(19) United States
(12) Patent Application Publication
(10) Pub. No.: US 2012/0157512 A1
(43) Pub. Date: Jun. 21, 2012

(54) Preventing and Curing Beneficial Insect Diseases Via Plant Transcribed Molecules

(75) Inventors: Eyal Ben-Chanoch, Miami, FL (US); Nitzan Paldi, Moshav Bar-Giori (IL); Gal Yarden, Doar-Na Negev (IL)

(73) Assignee: MONSANTO TECHNOLOGY LLC, St. Louis, MO (US)

(21) Appl. No.: 13/391,103

(22) PCT Filed: Aug. 22, 2010
(86) PCT No.: PCT/IB10/53776

§ 371 Date: Feb. 17, 2012

Related U.S. Application Data
(60) Provisional application No. 61/235,707, filed on Aug. 21, 2009.

(51) Int. Cl. A61K 31/7088; C12N 5/10; C12N 1/21; A01H 5/00; A61K 31/713; A61P 31/14; A61P 31/04; A61P 31/12; A61P 33/02; A61P 31/10; A61P 33/00; C12N 15/82; A61P 31/00

(52) U.S. Cl. 514/44 A; 435/320.1; 435/419; 435/252.2; 800/298; 800/285; 800/286

(57) ABSTRACT

Methods and compositions for transforming plants to express polynucleotides capable of gene silencing gene expression in pathogens of beneficial insets such as IAPV, Nosema species and Varroa mites, and methods for using the transgenic plants for reducing infection and susceptibility of bees to Colony Collapse Disorder are provided.

### FIELD AND BACKGROUND OF THE INVENTION

[0001] The invention relates to compositions and methods for reducing susceptibility to pathogenic organisms in beneficial insects using RNA interference technology, and more particularly, to the use of plants expressing dsRNA for prevention and treatment of infections in honeybees.

[0002] Beneficial Insects and Insect Pathogens

[0003] The importance of honeybees and other pollinating insects to the global world economy far surpasses their contribution in terms of honey production. The United States Department of Agriculture (USDA) estimates that every third bite we consume in our diet is dependent on a honeybee to pollinate that food. The total contribution of pollination in terms of added value to fruit crops exceeds $15 billion per annum, with indirect potential consequence of $75 billion dollars.

[0004] The unprecedented influence of human society, namely, monoculture and technology, overuse of pesticides, and global warming with subsequent emerging diseases, are all leading to what experts are referring to as the sixth major extinction of species on Earth. This in turn has led to a catastrophic decline in the population of beneficial insects, with pollinating insects such as bees most severely affected. Indeed, in the U.S. there has been a massive impact on agriculture and a threat to the human food chain, in direct consequence of what is known as Colony Collapse Disorder (CCD) of honeybees, which is characterized by the rapid loss from a colony of its adult bee population. Decline in honeybee colonies worldwide has reached 25-30% or more loss per season since 2006, a significant portion of which is due to Colony Collapse Disorder (CCD).

[0005] Beneficial insects, such as honeybees or bumblebees used for pollination, as well as antagonists of pests used in biocontrol programs, such as parasitic wasps, all have a range of pests and pathogens that cause them an array of diseases. Such diseases reduce their fecundity and thus reduce their capacity as beneficial insects. For honeybees these include numerous parasites and pathogens, including viruses, bacteria, protozoa, Endoparasites and mites, each with characteristic modes of transmission.

[0006] CCD has been associated with the Israeli Acute Paralysis Virus (IAPV). Weakened colonies are also more susceptible to opportunistic infection associated with other pathogens such as viruses [e.g. deformed wing virus (DWV), Kashmir bee virus (KBV), acute bee paralysis virus (ABPV) and black queen cell virus (BQCV)] bacteria (e.g. Melissococcus pluton, European foulbrood) and microsporidia (e.g. Nosema). In addition, infestation of pests such as the parasitic Varroa mites weakens the bees and breaches the protective insect exoskeleton, making them vulnerable to further infection by pathogenic species.

[0007] Chemical means for controlling these infections have been employed, such as Fumagillin for Nosema infection and pyrethroid and organophosphate miticides for Varroa. They have not only failed to eradicate the pathogens and pests, but also pose a serious risk of toxicity and contamination of the bees' honey.

[0008] Methods for Silencing Using siRNAs/dsRNA

[0009] RNA interference (dsRNA and siRNA) has been shown effective in silencing gene expression in a broad variety of species, including plants, with wide ranging implications for cancer, inherited disease, infectious disease in plants and animals. It was also shown in a variety of organisms that dsRNA or their siRNA derivatives can be used to arrest, retard or even prevent a variety of pathogens, most notably viral diseases (see, for example, WO/2003/004649 to Tenllado et al).

[0010] It has been shown in some species that RNAi mediated interference spreads from the initial site of dsRNA delivery, producing interference phenotypes throughout the injected animal. Recently the same spreading effect of dsRNA has been demonstrated in bee larva, as well as detection of SID transmembrane channels considered responsible for endocytic uptake and spreading effect of dsRNA in humans, mouse and C. elegans (Aronstein et al, J. Apic Res and Bee World, 2006; 45:20-24).

[0011] Application of RNA interference technology for insects that are plant pests and other plant pests has been suggested. Moderate RNAi-type silencing of insect genes by feeding has been demonstrated (Turner et al., Insect Mol Biol 2006; 15:383; and Araujo et al., Insect Mol. Biol 2006; 36:683). dsRNA absorbance via honey has also been demonstrated (Aronstein et al., J Apiculture Res Bee World 2006; 45:20-24).

[0012] U.S. Pat. No. 6,326,193 refers to the use of recombinant insect viruses such as baculoviruses expressing dsRNA to silence selected insect genes for pest control. PCT application WO 99/32619 describes the use of dsRNA for reducing crop destruction by plant pathogens or pests such as arachnids, insects, nematodes, protozoans, bacteria, or fungi. PCT patent application WO 2004/005485 describes RNAi sequences and transgenic plants designed to control plant-parasitic nematodes.

[0013] US Patent Application 20030154508 describes pest control with a dsRNA against a cation-amino acid transporter/channel protein. PCT patent application WO 02/14472 describes an inverted repeat and a sense or antisense nucleic acids for inhibiting target gene expression in a sucking insect. US patent application 20030150017 describes the use of RNA molecules homologous or complementary to a nucleotide sequence of a plant pest such as nematodes and insects.

[0014] Raemakers et al (PCT Applications WO 2007/080127 and WO 2007/080126) have disclosed transgenic plants expressing RNAi for controlling pest infestation by insects, nematodes, fungus and other plant pests. Among the sequences taught are sequences targeting essential genes of insects, including the honeybee. Waterhouse et al (US Patent Application 2006 0272049) and Van De Craen (US Patent Application No. 2010068172) also disclosed transgenic plants expressing dsRNA directed to essential genes of plant insect pests, for use as pesticides and insecticides. Boukharov et al. (US Patent Application 2007 0250947) disclosed dsRNA in transgenic plants for targeting plant parasitic nematodes. While expression and processing of dsRNA were demonstrated, no actual inhibition of infestation with the dsRNA was shown.

[0015] Recently, Paldi et al demonstrated that ingestion by bees of a segment of IAPV-dsRNA leads to viral RNA degradation and is successful in silencing IAPV infection and preventing bee mortality (PCT Application WO2009/060429), and that Nosema-specific dsRNA can specifically and differentially silence ADP/ATP transporter gene expression (Paldi et al., Applied Environ Microbiol, Epub Jul. 9, 2010).

[0016] Although direct application of dsRNA to the commercially grown honeybees can be facilitated by providing it in bee feed as described by Paldi et al. (PCT Application WO2009/060429), there is no way to protect feral population of bees that are still the mainstay of pollination of crops in most of the world. Thus, there is a need for improved methods of providing the beneficial insects with protection from pathogenic disease agents.

### SUMMARY OF THE INVENTION

[0017] According to an aspect of some embodiments of the present invention there is provided a nucleic acid construct comprising a polynucleotide expressing a nucleic acid agent downregulating expression of a gene product of an insect pathogen, the polynucleotide operably linked to a cis-regulatory element operable in plants.

[0018] According to an aspect of some embodiments of the present invention there is provided a cell comprising a nucleic acid construct comprising a polynucleotide expressing a nucleic acid agent downregulating expression of a gene product of an insect pathogen, the polynucleotide operably linked to a cis-regulatory element operable in plants.

[0019] According to some embodiments of the invention, the cell is a plant cell.

[0020] According to some embodiments of the invention, the cell is an Agrobacterium.

[0021] According to an aspect of some embodiments of the present invention there is provided a plant expressing a nucleic acid construct comprising a polynucleotide expressing a nucleic acid agent downregulating expression of a gene product of an insect pathogen, the polynucleotide operably linked to a cis-regulatory element operable in plants.

[0022] According to some embodiments of the invention, the plant is a flowering plant selected from the group consisting of rapeseed, alfalfa and clover.

[0023] According to some embodiments of the invention, the plant is expressing the nucleic acid construct in floral nectary tissues, extrafloral nectarines or pollen.

[0024] According to an aspect of some embodiments of the present invention there is provided a method of reducing the susceptibility of a insect to a disease caused by an insect pathogen, the method comprising providing to the insects plants expressing a nucleic acid construct a nucleic acid construct comprising a polynucleotide expressing a nucleic acid agent downregulating expression of a gene product of an insect pathogen, the polynucleotide operably linked to a cis-regulatory element operable in plants, such that the insect feeds from the plants and ingests the nucleic acid agent, thereby reducing the susceptibility of the insect to the pathogen.

[0025] According to some embodiments of the invention the insect is a pollinating insect or a herbivorous insect.

[0026] According to some embodiments of the invention the insect is a bee and the plants express a nucleic acid agent complementary to a nucleic acid sequence selected from the group consisting of SEQ ID NOs: 60-252698, 252699-256728, and 256782-266260.

[0027] According to some embodiments of the invention the insect is a bee and the plants express a nucleic acid agent complementary to a nucleic acid sequence selected from the group consisting of SEQ ID NOs: 55-59, 253194, 254090, 259289, 256752, 256761 and 256762.

[0028] According to an aspect of some embodiments of the present invention there is provided a method for reducing the susceptibility of an bee to a disease caused by an insect pathogen comprising providing the bee with a plant expressing a nucleic acid construct comprising a polynucleotide expressing a nucleic acid agent down-regulating expression of a gene product of a IAPV, Nosema and/or Varroa bee pathogen, the polynucleotide operably linked to a cis-regulatory element operable in plants, such that the bee feeds from the plants and ingests the nucleic acid agent, thereby reducing the susceptibility of the bee to the pathogen.

[0029] According to an aspect of some embodiments of the present invention there is provided a method of reducing the susceptibility of honeybees to Colony Collapse Disorder (CCD), the method comprising providing to the honeybees plants expressing a nucleic acid construct comprising a polynucleotide expressing a nucleic acid agent downregulating expression of a gene product of a IAPV, Nosema and/or Varroa bee pathogen, the polynucleotide operably linked to a cis-regulatory element operable in plants, such that the bee feeds from the plants and ingests the nucleic acid agent, thereby reducing the susceptibility of the bee to the pathogen.

[0030] According to an aspect of some embodiments of the present invention there is provided a method of producing a plant capable of reducing the susceptibility of an insect feeding from the plant, plant tissues or plant secretions to a disease caused by an insect pathogen, the method comprising transforming cells of the plant with a nucleic acid agent downregulating expression of a gene product of a IAPV, Nosema and/or Varroa bee pathogen, the polynucleotide operably linked to a cis-regulatory element operable in plants, selecting transformed plants or plant cells expressing insect pathogen-specific dsRNA, and propagating the plants or plant cells to produce a plant or plant cells capable of reducing the susceptibility of an insect feeding from the plant.

[0031] According to some embodiments of the invention, the nucleic acid agent is selected from the group consisting of a dsRNA, an antisense RNA and a ribozyme.

[0032] According to some embodiments of the invention the dsRNA is selected from the group consisting of siRNA, shRNA and miRNA.

[0033] According to some embodiments of the invention the cis regulatory element is active in floral nectary tissues, extrafloral nectarines and/or pollen.

[0034] According to some embodiments of the invention the nucleic acid agent is greater than 15 base pairs in length.

[0035] According to some embodiments of the invention the nucleic acid agent is 19 to 25 base pairs in length.

[0036] According to some embodiments of the invention the nucleic acid agent is greater than 30 base pairs in length.

[0037] According to some embodiments of the invention the insect is a bee.

[0038] According to some embodiments of the invention the insect pathogen is selected from the group consisting of a virus, a bacteria, a parasitic protozoan, a fungus a nematode and a mite.

[0039] According to some embodiments of the invention the insect pathogen is a virus.

[0040] According to some embodiments of the invention the insect is a bee and the virus is Israel Acute Paralysis Virus.

[0041] According to some embodiments of the invention the nucleic acid agent is complementary to a viral nucleic acid sequence as set forth in any of SEQ ID NOs: 256752, 256761, 256762 and 311552.

[0042] According to some embodiments of the invention the nucleic acid agent is complementary to a viral nucleic acid sequence as set forth in any of SEQ ID NOs: SEQ ID NOs: 256782-266260.

[0043] According to some embodiments of the invention the nucleic acid sequence is as set forth in SEQ ID NO: 311533.

[0044] According to some embodiments of the invention the insect is a bee and the pathogen is a Nosema parasite.

[0045] According to some embodiments of the invention the nucleic acid agent is complementary to a Nosema nucleic acid sequence as set forth in any of SEQ ID NOs: 55-252698.

[0046] According to some embodiments of the invention the Nosema parasite is N. cerana and the gene product is an mRNA encoding a Nosema ATP/ADP transporter protein or homologue thereof.

[0047] According to some embodiments of the invention the ATP/ADP transporter protein or homologue thereof is selected from the group consisting of proteins encoded by SEQ ID NOs: 44, 45, 46 and 47.

[0048] According to some embodiments of the invention the insect is a bee and the pathogen is a Varroa destructor mite.

[0049] According to some embodiments of the invention the gene product is an Varroa specific mRNA encoding a polypeptide selected from the group consisting of NADH dehydrogenase subunit 2, ATP synthetase subunit 8, ATP synthetase subunit 6, sodium channel and cytochrome oxydase subunit I.

[0050] According to some embodiments of the invention the insect is a bee and the nucleic acid construct comprises at least two nucleic acid agents, each of the nucleic acid agents downregulating expression of at least one gene product of at least one bee pathogen.

[0051] According to some embodiments of the invention the insect is a bee and the at least one bee pathogen is selected from the group consisting of a virus, a bacteria, a parasitic protozoan, a fungus, a nematode and a mite.

[0052] According to some embodiments of the invention the at least one bee pathogen comprises at least two bee pathogens.

[0053] According to some embodiments of the invention the nucleic acid agent corresponds to conserved sequences in the at least two bee pathogens.

[0054] Unless otherwise defined, all technical and/or scientific terms used herein have the same meaning as commonly understood by one of ordinary skill in the art to which the invention pertains. Although methods and materials similar or equivalent to those described herein can be used in the practice or testing of embodiments of the invention, exemplary methods and/or materials are described below. In case of conflict, the patent specification, including definitions, will control. In addition, the materials, methods, and examples are illustrative only and are not intended to be necessarily limiting.

### BRIEF DESCRIPTION OF THE DRAWINGS

[0055] Some embodiments of the invention are herein described, by way of example only, with reference to the accompanying drawings. With specific reference now to the drawings in detail, it is stressed that the particulars shown are by way of example and for purposes of illustrative discussion of embodiments of the invention. In this regard, the description taken with the drawings makes apparent to those skilled in the art how embodiments of the invention may be practiced.

[0056] In the drawings:

[0057] FIG. 1 is a schematic map of the plasmids pJETCPset1 and pJETCPset2, bearing the insert encoding the IAPV-specific dsRNA and its inverted repeat, respectively;

[0058] FIG. 2 is a schematic map of the plasmid pRNA69CPset1;

[0059] FIG. 3 is a schematic map showing transcription of the IAPV-specific dsRNA from pRNA69 CP-IR, using T7 primers;

[0060] FIG. 4 is a gel analysis of transcription products from pRNA69 CP-IR showing correctly sized, dsRNA products. Lane 1 is the molecular weight size ladder. Lane 2—endogenous bee RNA (single stranded)(completely degraded)+RNAse A. Lane 3—transcription product of pRNA IR-CP#1, no RNAse A. Lane 4—dsRNA transcription product of pRNA IR-CP#1+RNAse A. Lane 5—dsRNA transcription product of pRNA IR-CP#2+RNAse A. Lane 6—endogenous bee RNA (single stranded)+DICER (resistant). Lane 7—transcription product of pRNA IR-CP#1, no DICER. Lane 8—dsRNA transcription product of pRNA IR-CP#1+DICER. Lane 5—dsRNA transcription product of pRNA IR-CP#2+DICER. Note the correct size of the transcription products, their resistance to single strand-specific RNAse I (lanes 4 and 5), and complete degradation with double strand-specific DICER (lanes 8 and 9);

[0061] FIG. 5 is a schematic showing pRNA69 CP-IR and the plasmids pBART and pART27;

[0062] FIG. 6 is a schematic of pBART and pART27 comprising the IAPV-specific dsRNA expression cassettes;

[0063] FIG. 7 is a gel analysis of transcription products from pBART IR-CP#1 and IR-CP#2, showing correctly sized, dsRNA products. Lane 1—endogenous bee RNA from a bee fed Nosema-specific dsRNA (mixed ss and ds RNA)+RNAse A (note the partial degradation and single resistant 760 bp fragment). Lane 2—transcription product of pRNA69 IR-CP#1+RNAse A (resistant). Lane 3—dsRNA transcription product of pBART IR-CP#1, no RNAse A. Lane 4—dsRNA transcription product of pBART IR-CP#1+RNAse A. Lane 5—dsRNA transcription product of pBART IR-CP#2+RNAse A. Lane 6—dsRNA transcription product of pART27 IR-CP#1+RNAse A. Lane 7—dsRNA transcription product of pART27 IR-CP#1+RNAse A. Lane 8—dsRNA transcription product of pART27 IR-CP#1, no RNAse A. Lane 9—Molecular weight ladder. Lane 10—endogenous bee RNA from a bee fed Nosema-specific dsRNA (mixed ss and ds RNA)+DICER (note the complete degradation of the ds RNA fragment, and resistance of the ss ribosomal and m-RNA). Lane 11—transcription product of pRNA69 IR-CP#1+DICER (degraded). Lane 12—dsRNA transcription product of pBART IR-CP#1, no DICER. Lane 13—dsRNA transcription product of pBART IR-CP#1+DICER. Lane 14—dsRNA transcription product of pBART IR-CP#2+DICER. Lane 15—dsRNA transcription product of pART27 IR-CP#1+DICER. Lane 16—dsRNA transcription product of pART27 IR-CP#1+DICER. Lane 17—dsRNA transcription product of pART27 IR-CP#1, no RNAse A. Note the correct size of the transcription products, their resistance to single strand-specific RNAse I (lanes 3-7), and complete degradation with double strand-specific DICER (lanes 13-17).

### DESCRIPTION OF SPECIFIC EMBODIMENTS OF THE INVENTION

[0064] The present invention, in some embodiments thereof, relates to plant-expressed compositions and methods for reducing susceptibility to pathogenic organisms in beneficial insects using RNA interference technology, and more particularly, but not exclusively, to the use of plants expressing bee pathogen-specific dsRNA for prevention and treatment of infections in honeybees.

[0065] Before explaining at least one embodiment of the invention in detail, it is to be understood that the invention is not necessarily limited in its application to the details set forth in the following description or exemplified by the Examples. The invention is capable of other embodiments or of being practiced or carried out in various ways.

[0066] Pathogens causing disease of beneficial insects, such as bees and other pollinators, inflict untold economic damage on modern agriculture, and threaten to alter traditional patterns of pollination and gene flow critical to modern agriculture. Effective and economically feasible means for reducing occurrence and severity of insect-pathogen infection, and the efficient delivery of these means to the affected insects are much needed.

[0067] Paldi et al have demonstrated gene silencing of viral and microsporidian bee pathogens (IAPV-PCT Application WO2009/060429; and Nosema—Paldi et al., Applied Environ Microbiol, Epub Jul. 9, 2010), and reduced susceptibility to infection in bees fed with pathogen-specific dsRNA. However, provision of pathogen-specific dsRNA to the critically important feral bee populations, which are not concentrated in easily located hives, and to bees foraging during seasons of plentiful flower forage, requires both increased quantities of the pathogen-specific dsRNA, and improved methods for its dispersion and delivery to the insects.

[0068] Bees and other beneficial, herbivorous insects feed off plant tissues, such as nectar, pollen and soft parts of the plant. The present inventors have surprisingly found that providing plants expressing insect pathogen-specific dsRNA in plant tissues and secretions available to the insects in the vicinity of bees and other beneficial insects can be effective in reducing disease and infection caused by these pathogens in the beneficial insects. Bees and other beneficial insects ingesting the plants or plant tissues benefit from gene silencing of the pathogenic organisms, and reduced susceptibility to the associated diseases and infections. In particular embodiments, the present invention provides methods and compositions for transforming plants to express polynucleotides capable of gene silencing of IAPV, Nosema species and Varroa mites, and methods for using the transgenic plants for reducing infection and susceptibility of bees to Colony Collapse Disorder.

[0069] Thus, according to one aspect of the present invention, there is provided a method of reducing the susceptibility of an insect to a disease caused by an insect pathogen, the method comprising providing to the insect plants expressing a nucleic acid construct comprising a polynucleotide expressing a nucleic acid agent down-regulating expression of a gene product of an insect pathogen, said polynucleotide operably linked to a cis-regulatory element operable in plants, such that said insect feeds from said plants and ingests said nucleic acid agent, thereby reducing the susceptibility of said insect to said pathogen.

[0070] As used herein, the term “beneficial insect” is defined as any of several members of the class Insecta, including Apterygota (wingless) and Pterygota (winged), which perform a function desirable by humans, such as insects which assist production in agriculture, and contribute to pest control, habitat integration, aesthetics and ‘natural vitality’ in horticulture and gardening. In some embodiments of the present invention, the beneficial insects are herbivorous or pollinating insects. A non-limiting list of beneficial insects, including herbivorous and pollinating species, includes bees, the minute pirate bug (Orius), the big-eyed bug (Geocoris), the soldier beetles (Antharidae), the green lacewings (Chrysophidae) and hoverflies (Syrphios). In one embodiment, “beneficial insects” also includes those beneficial insects preying on other insects or organisms (e.g. aphids, mites, larvae, eggs, etc) which feed off transgenic plants of the present invention.

[0071] As used herein, the term “bee” is defined as any of several winged, hairy-bodied, usually stinging insects of the superfamily Apoidea in the order Hymenoptera, including both solitary and social species and characterized by sucking and chewing mouthparts for gathering nectar and pollen. Exemplary bee species include, but are not limited to Apis, Bombus, Trigona, Osmia and the like. In one embodiment, bees include, but are not limited to bumblebees (Bombus terrestris) and honeybees (Apis mellifera).

[0072] As used herein, the term “colony” is defined as a population of dozens to typically several tens of thousand honeybees that cooperate in nest building, food collection, and brood rearing. A colony normally has a single queen, the remainder of the bees being either “workers” (females) or “drones” (males). The social structure of the colony is maintained by the queen and workers and depends on an effective system of communication. Division of labor within the worker caste primarily depends on the age of the bee but varies with the needs of the colony. Reproduction and colony strength depend on the queen, the quantity of food stores, and the size of the worker force. Honeybees can also be subdivided into the categories of “hive bees”, usually for the first part of a workers lifetime, during which the “hive bee” performs tasks within the hive, and “forager bee”, during the latter part of the bee's lifetime, during which the “forager” locates and collects pollen and nectar from outside the hive, and brings the nectar or pollen into the hive for consumption and storage.

[0073] As used herein, the term “insect pathogen” is defined as a nucleic acid-containing agent capable of proliferation within the insect or insect colony (for example, in the case of social insects), the pathogen causing disease in the insect or insect colonies, especially, but not exclusively, a virus, a bacteria, a fungus, or a mite. An insect or insect colony pathogenic agent can be an intracellular or extra-cellular parasite, and can even be a mite such as the parasitic Varroa mite, or another insect, which preys on the insect or insect colony. According to one embodiment of the invention, the pathogen is a “bee pathogen”, causing or facilitating a bee or bee colony disease, such as Colony Collapse Disorder, Sacbrood virus disease, Deformed Wing Disease, Cloudy Wing Disease, Chronic Paralysis, Nosemosis, American Foul Brood, bee and/or bee colony, Varroa infestation and the like.

[0074] As used herein, the terms “insect disease” or “insect colony disease” are defined as undesirable changes in the behavior, physiology, morphology, reproductive fitness, economic value, pollination capability, resistance to infection and/or infestation of an insect, a population of insects and/or an insect colony, directly or indirectly resulting from contact with an insect or insect colony pathogenic agent. According to one embodiment of the invention, the insect is a bee and the undesirable changes include, but are not limited to behavior, physiology, morphology, reproductive fitness, economic value, honey production, pollination capability, resistance to infection and/or infestation of the bee or bee colony.

[0075] As used herein, the term “tolerance” is defined as the ability of an insect or insect colony to resist and/or endure infestation by and/or proliferation of an insect pathogen, including, but not limited to, degree of infection, severity of symptoms, infectivity to other individuals (contagion), and the like. Tolerance can be assessed, for example, by monitoring insect longetivity/life-span, infectivity, presence of symptoms, such as, but not limited to, hunger, vitality, flight range, etc, presence of pathogenic organisms, or time course of a disease in a population following a challenge with the insect pathogen.

[0076] As used herein, the term “susceptibility” is defined as the ability of an insect or insect colony to become infested or infected by and/or support proliferation of an insect pathogen, including, but not limited to, degree of infection, severity of symptoms, infectivity to other individuals (contagion), and the like. Susceptibility can be assessed, for example, by monitoring infectivity, presence of symptoms, such as, but not limited to, hunger, vitality, flight range, etc, presence of pathogenic organisms, mortality or time course of a disease in an individual bee or bee population following a challenge with the insect pathogen.

[0077] As used herein, the term “plant” refers to whole plants, plant organs, plant tissues, seeds, plant cells, seeds and progeny of the same. Plant cells include, without limitation, cells from seeds, suspension cultures, embryos, meristematic regions, callus tissue, leaves, roots, shoots, gametophytes, sporophytes, pollen and microspores. Plant parts include differentiated and undifferentiated tissues including, but not limited to the following: roots, stems, shoots, leaves, pollen, seeds, tumor tissue and various forms of cells and culture (e.g., single cells, protoplasts, embryos and callus tissue). The plant tissue may be in plant or in a plant organ, tissue or cell culture. The term “plant organ” or “plant tissue” refers to plant tissue or a group of tissues that constitute a morphologically and functionally distinct part of a plant. The term “genome” refers to the following: (1) the entire complement of genetic material (genes and non-coding sequences) that is present in each cell of an organism, or virus or organelle; and/or (2) a complete set of chromosomes inherited as a (haploid) unit from one parent. “Progeny” comprises any subsequent generation of a plant. Plant can be monocots and dicots, cereal grains, vegetables, ornamentals, crop plants and conifers. A non-limiting list of plants suitable for use with some embodiments of the present invention is provided hereinbelow.

[0078] As used herein, the phrase “vicinity” or “vicinity of said bee” refers to a location in sufficient proximity of the insect in order that the insect, or bee, when foraging or seeking to feed, could easily contact and ingest plant tissues, organs, secretions or cells. One of skill in the art would easily be able to determine how far from the origin of the bees the transgenic plants of the present invention should be located, in order to achieve efficient contact between the insects and the transgenic plants. It will be appreciated that “in the vicinity” for flying beneficial insects, such as bees, will be at a greater distance from the source of bees than, for example, “in the vicinity” for crawling insects. Further, in some embodiments, transgenic plants expressing pathogen specific dsRNA of the present invention will be planted among other crops, while in other embodiments, the transgenic plants are crop plants in themselves. It will be appreciated that according to some embodiments of the present invention, at least a portion of the plant or plant tissue or secretion (for example, nectar, pollen, leaves, exudate, and the like) is provided to the insect such as by way of ingestion, inhalation, etc.

[0079] A non-limiting list of exemplary disease-causing pathogens, and diseases of insects and insect colonies associated with the insect pathogenic agents, suitable for treatment according to some embodiments of the methods and compositions of the present invention is found in Table II below. The complete genomes of several known isolates of IAPV and information on possible phylogenic relationships between strains that can be similarly targeted with the methods and compositions of the present invention are provided in Palacios et al. 2008 (Journal of Virology, 2008, 82:6209-217). A draft of the genome of N. cerana has been provided in nCornma et al. (PLoS Pathogen, 2009; 5:e1000466). The complete genome of Varroa destructor was provided by Ongus et al (J Gen Virol 2004; 85: 3747-55), and it's mitochondrial genome by Navajas et al (Mol Biol Evol, 2002; 19:2313-17).

TABLE II
Exemplary Insect Pathogens

| Parasitic Organism | Genes |
|---|---|
| Acute bee | Acute bee paralysis virus, complete genome |
| paralysis virus | Accession NC_002548 (seq id no: 256736) |
| Israel acute | Accession: NC_009025, 14oland acute paralysis virus of bees, complete genome (seq id |
| paralysis virus | no: 256744) |
| Deformed wing | Deformed wing virus, complete genome. |
| virus | Accession NC_004830 (seq id no: 256738) |
| Kashmir bee | Accession: AY275710, 14oland14 bee virus, complete genome (seq id no: 256737) |
| virus | |
| Black queen cell | Black queen cell virus strain 14oland-6 non-structural polyprotein |
| virus | and structural polyprotein genes, complete cds. |
| | Accession: EF517521 (seq id no: 256748) |
| Chronic | Chronic bee paralysis virus rna 2, complete sequence. |
| paralysis virus | Accession: NC_010712 (seq id no: 256751) |
| Cloudy wing | Cloudy wing virus rna polymerase (pol) gene, partial cds. |
| virus | Accession AF034543 (seq id no: 256735) |
| Paenibacillus | Accession: NZ_AARF01000646, whole genome (shotgun) sequenced. (seq id no: |
| larvae (American | 256739) |
| Foul Brood) | |
| Melissococcus | Accession: EF666055 Melissococcus plutonius superoxide dismutase (soda) gene (seq |
| pluton (European | id no: 256749) |
| Foul Brood) | |
| Ascophaera apis | No genomic data |
| (Chalkbrood) | |
| Nosema apis, | 1) Accession DQ996230 (seq id no: 256743), Nosema apis RNA polymerase II largest |
| | subunit |
| | 2) Accesions EU545140 (seq id no: 256750), EF584425 (seq id no: 256747), EF584423 |
| | (seq id no: 256746), EF584418 (seq id no: 256745) all are 16S ribosomal RNA |
| | gene |
| Nosema cerana | EF091883 (seq id no: 256740), EF091884 (seq id no: 256741), and EF091885 (seq id |
| | no: 256742) are accessions of 5S ribosomal RNA gene, intergenic spacer, and small |
| | subunit ribosomal RNA gene; See Table III |
| Varroa | Accession: NC_004454 (SEQ ID NO: 311551 and 11) NADH dehydrogenase, subunit |
| destructor | 2; Accession: NC_004454 (SEQ ID NO: 12) ATP synthetase; subunit 8; Accession: |
| | NC_004454 (SEQ ID NO: 14); ATP synthetase; subunit 6; Accession: Genbank |
| | accession No. AY259834 (SEQ ID NO: 13 and 311550) Sodium channel gene; |
| | Genbank accession No. NC_004454 (SEQ ID NO: 311549) Cytochrome oxydase |
| | subunit I. |

[0080] As used herein, the phrase “Varroa destructor mite” refers to the external parasitic mite that attacks honey bees Apis cerana and Apis mellifera. The mite may be at an adult stage, feeding off the bee, or at a larval stage, inside the honey bee brood cell.

[0081] As used herein, the term “Nosema” is defined as any organism of a genus (the type of the family Nosematidae) of microsporidian protozoans that includes various parasites, particularly those causing disease in bees or bee colonies. Nosema infecting bee include but are not limited to N. cerana and N. apis. Infection of bees or bee colonies with a Nosema parasite is commonly known as Nosemosis. It will be appreciated that the gene silencing mechanisms described herein can be effective for combating microsporidean species infecting insect hosts other than bees, with examples including but not limited to, the silk moth. However, due to the heterogeneity of RNAi and metabolic pathways in microsporidia, and in view of the critical role of the individual parasite's endogenous RNAi pathways for effective gene silencing, identification of effective candidate target genes may be required in each case.

[0082] As used herein, the term “mitosome” is defined as a double membrane-bound mitochondria-like organelle of Microsporidia highly reduced from the perspective of both physical size and biochemical complexity. Mitosomal proteins include, but are not limited to protein and metabolite import proteins (TOM70, TIM22, TOM40, Imp2, mitochondrial Hsp70, and ATM1-ABC transporter proteins), proteins involved in ISC assembly and export (frataxin, ferredoxin, ISCU, ISCS, ERV1, and ferredoxin NADPH oxido-reductase [FNR]), pyruvate dehydrogenase subunits, PDHα and -β, mitochondrial glycerol-3-phosphate dehydrogenase (mtG3PDH) and manganese-containing superoxide dismutase (MnSOD).

[0083] As used herein, the term “ATP/ADP transporter protein” refers to a protein which function is transfer of ATP and/or ADP through membranes. Microsporidian ATP/ADP transporter proteins homologous to ATP/ADP transporter proteins from other species have been identified in E. cuniculi and N. cerana (see above, and FIG. 1). As used herein, “putative” ATP/ADP transporter proteins, “ATP/ADP transporter protein orthologues” or “ATP/ADP transporter protein homologues” refer to proteins, or putative encoded polypeptides from polynucleotide sequences, having significant amino acid identity or similarity to known ATP/ADP transporter proteins of other species, and/or possessing consensus sequences common to known ATP/ADP transporter proteins. Examples of Nosema ATP/ADP transporter proteins, or ATP/ADP transporter protein homologues, are nc123 (SEQ ID NO:19), nc006 (SEQ ID NO:22), nc014 (SEQ ID NO:21) and nc017 (SEQ ID NO:20).

[0084] As used herein, the term “downregulating expression” is defined as causing, directly or indirectly, reduction in the transcription of a desired gene, reduction in the amount, stability or translatability of transcription products (e.g. RNA) of said gene, reduction in translation of the polypeptide(s) encoded by the desired gene and/or reduction in the amount, stability, or alteration of biochemical function of the polypeptides encoded by the desired gene, so as to reduce the amount or function of the gene products. As used herein, “downregulating expression” also relates to reduction in amount, stability or translatability of insect pathogen RNA molecules in cells of an insect, where the insect pathogen genome is a single stranded RNA molecule, as in case of a single-stranded RNA virus. Downregulating expression of a gene or other insect pathogen RNA can be monitored, for example, by direct detection of gene transcripts (for example, by PCR), by detection of polypeptide(s) encoded by the gene or insect pathogen RNA (for example, by Western blot or immunoprecipitation), by detection of biological activity of polypeptides encode by the gene (for example, catalytic activity, ligand binding, and the like), or by monitoring changes in a cell or organism resulting from reduction in expression of a desired gene or insect pathogen RNA (for example, reduced proliferation of a pathogen, reduced virulence of a pathogen, reduced motility of a cell, reduced response of a cell or organism to stimulus, etc). As used herein, the downregulation can be transient, for example, for the duration of the presence of a downregulating agent, or permanent, resulting in reduction of gene expression or insect pathogen RNA for the lifetime of the organism and/or its future generations.

[0085] Downregulation of insect pathogen polypeptides can be affected on the genomic and/or the transcript level using a variety of molecules which interfere with transcription and/or translation (e.g., RNA silencing agents, Ribozyme, DNAzyme and antisense). Treatment and prevention of plant viral infections with dsRNA has been disclosed by WO/2003/004649 to Tenllado et al. Use of dsRNA in insects is disclosed in US Patent Application 2007 0250947, US Patent Application 2006 0272049, PCT Applications WO 2007/080127 and WO 2007/080126, US patent application 20030150017, US Patent Application No. 2010068172, PCT patent application WO 02/14472, US Patent Application 20030154508, PCT application WO2009/060429, PCT patent application WO 2004/005485, PCT application WO 99/32619 and U.S. Pat. No. 6,326,193.

[0086] As used herein, the phrase “gene product” refers to proteins, peptides and RNA molecules (i.e. polynucleotides, for example, functional RNA molecules tRNA, rRNA, mRNA). Generally, the gene product which expression thereof is downregulated is a gene product of a gene critical to the function and vitality of the insect pathogen. Examples of such gene products include nucleic acids (such as viral RNA), proteins, peptides, glycoproteins and lipoproteins normally produced by an insect pathogen. For example, gene products which may be downregulated in the insect pathogens include transcripts of genes associated with pathogen replication, pathogen growth, pathogen energy metabolism, pathogen resistance to host defense mechanisms, pathogen motility, and the like. Specific, non-limiting example are the ATP/ADP transporter proteins and mitosomal proteins of Nosema.

[0087] Following is a list of agents capable of downregulating expression level and/or activity of insect pathogen gene products, suitable for use with the methods of the present invention.

[0088] Downregulation of expression of insect pathogen gene products can be achieved by RNA silencing. As used herein, the phrase “RNA silencing” refers to a group of regulatory mechanisms [e.g. RNA interference (RNAi), transcriptional gene silencing (TGS), post-transcriptional gene silencing (PTGS), quelling, co-suppression, and translational repression] mediated by RNA molecules which result in the inhibition or “silencing” of the expression of a corresponding insect pathogen gene. RNA silencing has been observed in many types of organisms, including plants, animals, and fungi.

[0089] As used herein, the term “nucleic acid agent downregulating expression of a gene product” or “RNA silencing agent” refers to an RNA which is capable of inhibiting or “silencing” the expression of a target gene. In certain embodiments, the nucleic acid agent is capable of preventing complete processing (e.g., the full translation and/or expression) of an mRNA molecule through a post-transcriptional silencing mechanism. Nucleic acid agent includes noncoding RNA molecules, for example RNA duplexes comprising paired strands, as well as precursor RNAs from which such small non-coding RNAs can be generated. Exemplary nucleic acid agents include dsRNAs such as siRNAs, miRNAs and shRNAs. In one embodiment, the nucleic acid agent is capable of inducing RNA interference. In another embodiment, the nucleic acid agent is capable of mediating translational repression.

[0090] RNA interference commonly refers to the process of sequence-specific post-transcriptional gene silencing in animals mediated by short interfering RNAs (siRNAs). The corresponding process in plants is commonly referred to as post-transcriptional gene silencing or RNA silencing and is also referred to as quelling in fungi. The process of post-transcriptional gene silencing is thought to be an evolutionarily-conserved cellular defense mechanism used to prevent the expression of foreign genes and is commonly shared by diverse flora and phyla. Such protection from foreign gene expression may have evolved in response to the production of double-stranded RNAs (dsRNAs) derived from viral infection or from the random integration of transposon elements into a host genome via a cellular response that specifically destroys homologous single-stranded RNA or viral genomic RNA.

[0091] The presence of long dsRNAs in cells stimulates the activity of a ribonuclease III enzyme referred to as DICER. Dicer is involved in the processing of the dsRNA into short pieces of dsRNA known as short interfering RNAs (siRNAs). Short interfering RNAs derived from dicer activity are typically about 21 to about 23 nucleotides in length and comprise about 19 base pair duplexes. The RNAi response also features an endonuclease complex, commonly referred to as an RNA-induced silencing complex (RISC), which mediates cleavage of single-stranded RNA having sequence complementary to the antisense strand of the siRNA duplex. Cleavage of the target RNA takes place in the middle of the region complementary to the antisense strand of the siRNA duplex.

[0092] Accordingly, the present invention contemplates use of dsRNA to down-regulate protein expression from mRNA.

[0093] According to one embodiment, the dsRNA is greater than 30 bp. The use of long dsRNAs can provide numerous advantages in that the cell can select the optimal silencing sequence alleviating the need to test numerous siRNAs; long dsRNAs will allow for silencing libraries to have less complexity than would be necessary for siRNAs.

[0094] In one embodiment of the present invention, the dsRNA is greater than 30 base-pairs, and is selected from the group complementary to a sequence as set forth in SEQ ID NOs: 55-59. In another embodiment of the present invention, the dsRNA is greater than 30 base pairs and comprises at least two sequences complementary to a sequence selected from group as set forth in SEQ ID NOs: 256752, 256761, 256762 and 311552. In yet another embodiment, the dsRNA comprises the sequence complementary to the sequence as set forth in SEQ ID NO: 256752 and to a sequence as set forth in at least one of SEQ ID NOs: 256761, 256762 and 311552. In one embodiment of the present invention, the dsRNA comprises at least two sequences downregulating expression of a target insect pathogen gene, wherein the at least two sequences can be contiguous, or non-contiguous with respect to one another.

[0095] Another method of downregulating expression of insect pathogen gene products is by introduction of small inhibitory RNAs (siRNAs).

[0096] The term “siRNA” refers to small inhibitory RNA duplexes (generally between 18-30 basepairs, between 19 and 25 basepairs) that induce the RNA interference (RNAi) pathway. Typically, siRNAs are chemically synthesized as 21mers with a central 19 bp duplex region and symmetric 2-base 3′-overhangs on the termini, although it has been recently described that chemically synthesized RNA duplexes of 25-30 base length can have as much as a 100-fold increase in potency compared with 21mers at the same location. The observed increased potency obtained using longer RNAs in triggering RNAi is theorized to result from providing Dicer with a substrate (27mer) instead of a product (21mer) and that this improves the rate or efficiency of entry of the siRNA duplex into RISC.

[0097] It has been found that position of the 3′-overhang influences potency of an siRNA and asymmetric duplexes having a 3′-overhang on the antisense strand are generally more potent than those with the 3′-overhang on the sense strand (Rose et al., 2005). This can be attributed to asymmetrical strand loading into RISC, as the opposite efficacy patterns are observed when targeting the antisense transcript.

[0098] The strands of a double-stranded interfering RNA (e.g., an siRNA) may be connected to form a hairpin or stem-loop structure (e.g., an shRNA) that is capable of folding back onto itself to form a double stranded structure. Thus, as mentioned the nucleic acid agent of the present invention may also be a short hairpin RNA (shRNA).

[0099] The term “shRNA”, as used herein, refers to an RNA agent having a stem-loop structure, comprising a first and second region of complementary sequence, the degree of complementarity and orientation of the regions being sufficient such that base pairing occurs between the regions, the first and second regions being joined by a loop region, the loop resulting from a lack of base pairing between nucleotides (or nucleotide analogs) within the loop region. In specific embodiments, the loop region can be optimized to be as short as possible while still providing enough intramolecular flexibility to allow the formation of the base-paired stem region. Accordingly, the loop sequence is generally less than 1000, 900, 800, 700, 600, 500, 400, 300, 200, 100, 50, 25, 20, 15, 10 nucleotides or less. In some embodiments, the number of nucleotides in the loop is a number between and including 3 to 23, or 5 to 15, or 7 to 13, or 4 to 9, or 9 to 11. Some of the nucleotides in the loop can be involved in base-pair interactions with other nucleotides in the loop. Examples of oligonucleotide sequences that can be used to form the loop are detailed in Brummelkamp, T. R. et al. (2002) Science 296: 550 and Castanotto, D. et al. (2002) RNA 8:1454. It will be recognized by one of skill in the art that the resulting single chain oligonucleotide forms a stem-loop or hairpin structure comprising a double-stranded region capable of interacting with the RNAi machinery.

[0100] The first and second regions of the hairpin RNA molecule comprise the base-paired stem of the hairpin structure. The first and the second regions are inverted repeats of one another and share sufficient complementarity to allow the formation of the base-paired stem region. In specific embodiments, the first and the second regions are fully complementary to one another. Alternatively, the first and the second regions may be partially complementary to each other so long as they are capable of hybridizing to one another to form a base-paired stem region. The amount of complementarity between the first and the second regions can be calculated as a percentage of the entire region. Thus, the first and the second regions of the hairpin RNA generally share at least 50%, 60%, 70%, 80%, 85%, 90%, 91%, 92%, 93%, 94%, 95%, 96%, 97%, 98%, 99%, up to and including 100% complementarity.

[0101] The first and the second regions are at least about 1000, 500, 400, 300, 200, 100, 50, 40, 30, 25, 22, 20, 15 or 10 nucleotides in length. In specific embodiments, the length of the first and/or the second regions is about 10-100 nucleotides, about 10 to about 75 nucleotides, about 10 to about 50 nucleotides, about 10 to about 40 nucleotides, about 10 to about 35 nucleotides, about 10 to about 30 nucleotides, about 10 to about 25 nucleotides, about 10 to about 20 nucleotides. In other embodiments, the length of the first and/or the second region comprises at least 10-20 nucleotides, 20-35 nucleotides, 30-45 nucleotides, 40-50 nucleotides, 50-100 nucleotides, or 100-300 nucleotides. See, for example, International Publication No. WO 0200904. In specific embodiments, the first and the second region comprise at least 20 nucleotides having at least 85% complementary to the first segment. In still other embodiments, the first and the second region which form the stem-loop structure of the hairpin comprises 3′ or 5′ overhang regions having unpaired nucleotide residues.

[0102] In specific embodiments, the sequences used in the first, the second, and/or the second regions comprise domains that are designed to have sufficient sequence identity to a target polynucleotide of interest and thereby have the ability to decrease the level of expression of the target polynucleotide. The specificity of the inhibitory RNA transcripts is therefore generally conferred by these domains of the nucleic acid. Thus, in some embodiments of the invention, the first, second and/or second region of the nucleic acid comprise a domain having at least 10, at least 15, at least 19, at least 20, at least 21, at least 22, at least 23, at least 24, at least 25, at least 30, at least 40, at least 50, at least 100, at least 200, at least 300, at least 500, at least 1000, or more than 1000 nucleotides that share sufficient sequence identity to the target polynucleotide to allow for a decrease in expression levels of the target polynucleotide when expressed in an appropriate cell. In other embodiments, the domain is between about 15 to 50 nucleotides, about 20-35 nucleotides, about 25-50 nucleotides, about 20 to 75 nucleotides, about 40-90 nucleotides about 15-100 nucleotides.

[0103] In specific embodiments, the domain of the first, the second, and/or the second region has 100% sequence identity to the target polynucleotide. In other embodiments, the domain of the first, the second and/or the second region having homology to the target polypeptide have at least 50%, 60%, 70%, 80%, 85%, 90%, 91%, 92%, 93%, 94%, 95%, 96%, 97%, 98%, 99%, or greater sequence identity to a region of the target polynucleotide. The sequence identity of the domains of the first, the second and/or the second regions to the target polynucleotide need only be sufficient to decrease expression of the target polynucleotide of interest. See, for example, Chuang and Meyerowitz (2000) Proc. Natl. Acad. Sci. USA 97:4985-4990; Stoutjesdijk et al. (2002) Plant Physiol. 129:1723-1731; Waterhouse and Helliwell (2003) Nat. Rev. Genet. 4:29-38; Pandolfini et al. BMC Biotechnology 3:7, and U.S. Patent Publication No. 20030175965; each of which is herein incorporated by reference. A transient assay for the efficiency of hpRNA constructs to silence gene expression in vivo has been described by Panstruga et al. (2003) Mol. Biol. Rep. 30:135-140, herein incorporated by reference.

[0104] The amount of complementarity shared between the first, second, and/or second region and the target polynucleotide or the amount of complementarity shared between the first region and the second region (i.e., the stem of the hairpin structure) may vary depending on the organism in which gene expression is to be controlled. Some organisms or cell types may require exact pairing or 100% identity, while other organisms or cell types may tolerate some mismatching. In some cells, for example, a single nucleotide mismatch in the targeting sequence abrogates the ability to suppress gene expression.

[0105] Any region of the target polynucleotide can be used to design the domain of the nucleic acid agent that shares sufficient sequence identity to allow expression of the hairpin transcript to decrease the level of the target polynucleotide. For instance, the domain can be designed to share sequence identity to the 5′ untranslated region of the target polynucleotide(s), the 3′ untranslated region of the target polynucleotide(s), exonic regions of the target polynucleotide(s), intronic regions of the target polynucleotide(s), and any combination thereof. In specific embodiments a domain of the nucleic acid agent shares sufficient homology to at least about 15 consecutive nucleotides from about nucleotides 1-50, 50-100, 100-150, 150-200, 200-250, 250-300, 300-350, 350-400, 400-450, 450-500, 550-600, 600-650, 650-700, 750-800, 850-900, 950-1000, 1000-1050, 1050-1100, 1100-1200, 1200-1300, 1300-1400, 1400-1500, 1500-1600, 1600-1700, 1700-1800, 1800-1900, 1900-2000 of the target sequence. In some instances to optimize the siRNA sequences employed in the hairpin, the synthetic oligodeoxyribonucleotide/RNAse H method can be used to determine sites on the target mRNA that are in a conformation that is susceptible to RNA silencing. See, for example, Vickers et al. (2003) J. Biol. Chem. 278:7108-7118 and Yang et al. (2002) Proc. Natl. Acad. Sci. USA 99:9442-9447, herein incorporated by reference. These studies indicate that there is a significant correlation between the RNase-H-sensitive sites and sites that promote efficient siRNA-directed mRNA degradation.

[0106] The hairpin silencing element may also be designed such that the sense sequence or the antisense sequence do not correspond to a target polynucleotide. In this embodiment, the sense and antisense sequence flank a loop sequence that comprises a nucleotide sequence corresponding to all or part of the target polynucleotide. Thus, it is the loop region that determines the specificity of the RNA interference. See, for example, WO 02/00904, herein incorporated by reference.

[0107] According to another embodiment the nucleic acid agent may be a miRNA. miRNAs are small RNAs made from genes encoding primary transcripts of various sizes. They have been identified in both animals and plants. The primary transcript (termed the “pri-miRNA”) is processed through various nucleolytic steps to a shorter precursor miRNA, or “pre-miRNA.” The pre-miRNA is present in a folded form so that the final (mature) miRNA is present in a duplex, the two strands being referred to as the miRNA (the strand that will eventually basepair with the target) The pre-miRNA is a substrate for a form of dicer that removes the miRNA duplex from the precursor, after which, similarly to siRNAs, the duplex can be taken into the RISC complex. It has been demonstrated that miRNAs can be transgenically expressed and be effective through expression of a precursor form, rather than the entire primary form (Parizotto et al. (2004) Genes & Development 18:2237-2242 and Guo et al. (2005) Plant Cell 17:1376-1386).

[0108] Unlike, siRNAs, miRNAs bind to transcript sequences with only partial complementarity (Zeng et al., 2002, Molec. Cell 9:1327-1333) and repress translation without affecting steady-state RNA levels (Lee et al., 1993, Cell 75:843-854; Wightman et al., 1993, Cell 75:855-862). Both miRNAs and siRNAs are processed by Dicer and associate with components of the RNA-induced silencing complex (Hutvagner et al., 2001, Science 293:834-838; Grishok et al., 2001, Cell 106: 23-34; Ketting et al., 2001, Genes Dev. 15:2654-2659; Williams et al., 2002, Proc. Natl. Acad. Sci. USA 99:6889-6894; Hammond et al., 2001, Science 293:1146-1150; Mourlatos et al., 2002, Genes Dev. 16:720-728). A report (Hutvagner et al., 2002, Sciencexpress 297:2056-2060) hypothesizes that gene regulation through the miRNA pathway versus the siRNA pathway is determined solely by the degree of complementarity to the target transcript. It is speculated that siRNAs with only partial identity to the mRNA target will function in translational repression, similar to an miRNA, rather than triggering RNA degradation.

[0109] According to one embodiment of the present invention, the nucleic acid agent is capable of causing cleavage and/or degradation of target insect pathogen transcribed polynucleotide sequences. As used herein, the phrases “target” or “target polynucleotide sequence” refer to any sequence present in an insect pathogen cell, or infected host cell, whether naturally occurring sequence or a heterologous sequence present, which insect pathogen transcribed polynucleotide sequence(s) has(ve) a function that is desired to be reduced or inhibited. The insect pathogen target sequence may be a coding sequence, that is, it is translated to express a protein or a functional fragment thereof. Alternatively, the target sequence may be non-coding, but may have a regulatory function, or it may be without any known function. The term “gene” is intended to include any target sequence intended to be “silenced”, whether or not transcribed and/or translated, including regulatory sequences, such as promoters, enhancers and other non-coding sequences.

[0110] In one embodiment of the present invention, synthesis of nucleic acid agents suitable for use with the present invention can be effected as follows. First, the insect pathogen polypeptide mRNA or other target sequence is scanned downstream of the AUG start codon for AA dinucleotide sequences. Occurrence of each AA and the 3′ adjacent 19 nucleotides is recorded as potential siRNA target sites. Preferably, siRNA target sites are selected from the open reading frame, as untranslated regions (UTRs) are richer in regulatory protein binding sites. UTR-binding proteins and/or translation initiation complexes may interfere with binding of the siRNA endonuclease complex [Tuschl Chem Biochem. 2:239-245]. It will be appreciated though, that siRNAs directed at untranslated regions may also be effective, as demonstrated for GAPDH wherein siRNA directed at the 5′ UTR mediated about 90% decrease in cellular GAPDH mRNA and completely abolished protein level (see Ambion technical library 91/912 at the Ambion website).

[0111] Second, potential target sites are compared to an appropriate genomic database (e.g., human, mouse, rat, insect, etc.) using any sequence alignment software, such as the BLAST software available from the NCBI server of the NIH. Putative target sites which exhibit significant homology to other coding sequences are filtered out. For example, host (e.g. bee) and plant host target sites can be filtered out in this manner.

[0112] Qualifying target sequences are selected as template for siRNA synthesis. Preferred sequences are those including low G/C content as these have proven to be more effective in mediating gene silencing as compared to those with G/C content higher than 55%. Several target sites are preferably selected along the length of the target gene or sequence for evaluation. For better evaluation of the selected siRNAs, a negative control is preferably used in conjunction. Negative control siRNA preferably include the same nucleotide composition as the siRNAs but lack significant homology to the genome. Thus, a scrambled nucleotide sequence of the siRNA is preferably used, provided it does not display any significant homology to insect or plant host gene sequences, or non-relevant insect pathogen target sequences.

[0113] In specific embodiments, suitable insect pathogen specific siRNA can be an IAPV, Nosema or Varroa specific siRNA, corresponding to IAPV sequences SEQ ID NOs: 256752, 256761, 256762 and 311552, Nosema cerana sequences SEQ ID NOs: 55-59, and Varroa destructor sequences SEQ ID NOS: 253194, 254090 and 259289. Additional suitable bee pathogen siRNAs can be designed according to sequences from any bee pathogens, for example, the sequences detailed in Table II, including, but not limited to Acute Bee Paralysis Virus (for example, SEQ ID NOs: 289158-298614), Deformed Wing Virus (for example, SEQ ID NOs: 9533-276380), Kashmir Bee Virus (for example, SEQ ID NOs: 299009-308499), Black Queen Cell Virus (for example, SEQ ID NOs: 276381-284662), Chronic Paralysis Virus (for example, SEQ ID NOs: 284663-286947), Cloudy Wing Virus (for example, SEQ ID NOs: 286948-287341), Paenibacillus larvae (for example, SEQ ID NOs: 287342-288735), Melissococcus pluton (for example, SEQ ID NOs: 288736-289157), Nosema apis (for example, SEQ ID NOs: 308500-311548).

[0114] Additional suitable Nosema siRNAs can be designed according to sequences from any Nosema sequence, for example, the sequences detailed herein, including, but not limited to TOM70 (for example, SEQ ID NOs:60-11687), TIM22, TOM40 (for example, SEQ ID NOs: 11688-19103), Imp2, mitochondrial Hsp70 (for example, SEQ ID NOs: 19104-34511), ATM1-ABC transporter proteins (for example, SEQ ID NOs: 34512-80411), Frataxin, Ferredoxin, ERV1 (for example, SEQ ID NOs: 80412-84803), ferredoxin, NADPH oxido-reductase [FNR] (for example, SEQ ID NOs:84804-94911, 94912-108140), pyruvate dehydrogenase α subunit (for example, SEQ ID NOs: 108141-116852), pyruvate dehydrogenase β subunit (for example, SEQ ID NOs: 116853-125294), mitochondrial glycerol-3-phosphate dehydrogenase (mtG3PDH) (for example, SEQ ID NOs: 125295-140999), manganese-containing superoxide dismutase (MnSOD) (for example, SEQ ID NOs: 141000-146687), DNAJ (Hsp70 interacting) (for example, SEQ ID NOs: 146688-157505), Iron Sulfur cluster ISU1, Cystein desulfurase Nsf1 (for example, SEQ ID NOs: 157506-169079), NAR1 (for example, SEQ ID NOs:169080-178790), RLI1 (for example, SEQ ID NOs:178791-195062), NC006 (for example, SEQ ID NOs: 195063-209633), NC123 (for example, SEQ ID NOs: 209634-224609), NC014 (for example, SEQ ID NOs: 224610-239747) and NC017 (for example, SEQ ID NOs:239748-252698) (see Table III, below).

TABLE III

| | Encephalitozoon | Nosema | | |
|---|---|---|---|---|
| | GenBank | GenBank | Nosema GenBank (DNA)/ | |
| | (protein) | (protein) | coordinates | SEQ ID NO: |
| TOM70 | | EEQ82075.1 | ACOL01000120/8001-9314 | SEQ ID NO: 27 |
| TIM22 | CAD25556.1 | — | | |
| TOM40 | CAD25408.1 | EEQ82411.1 | ACOL01000061/14217-15062 | SEQ ID NO: 28 |
| Imp2 | | | | |
| mitochondrial | NP_586360 | EEQ81757 | ACOL01000228.1/4051-5784 | SEQ ID NO: 29 |
| Hsp70 | | | | |
| ATM1-ABC | CAD26030 | EEQ82581.1 | ACOL01000042/1310-3019 | SEQ ID NO: 30 |
| transporter | | EEQ82586.1 | ACOL01000042/8786-10507 | SEQ ID NO: 31 |
| proteins | | EEQ82587.1 | ACOL01000042/10905-12638 | SEQ ID NO: 32 |
| Frataxin | XP_965969 | — | | |
| Ferredoxin | NP_585988.1\| | — | | |
| ERV1 | CAD25469 | EEQ82883 | ACOL01000016/5063-5572 | SEQ ID NO: 33 |
| ferredoxin | CAD27143 | EEQ81930 | ACOL01000159/6191-7324 | SEQ ID NO: 34 |
| NADPH | | | | |
| oxido- | | EEQ83026 | ACOL01000006/2688-4190 | SEQ ID NO: 35 |
| reductase | | | | |
| [FNR] | | | | |
| pyruvate | CAD27078 | EEQ82465 | ACOL01000055/12839-13828 | SEQ ID NO: 36 |
| dehydrogenase | CAD25304 | EEQ81634 | ACOL01000316/888-1847 | SEQ ID NO: 37 |
| subunits, | | | | |
| PDHα and -β | | | | |
| mitochondrial | CAD25806 | EEQ82606 | ACOL01000039/538-2304 | SEQ ID NO: 38 |
| glycerol-3- | | | | |
| phosphate | | | | |
| dehydrogenase | | | | |
| (mtG3PDH) | | | | |
| manganese- | CAD26018 | EEQ82623 | ACOL01000038/17225-17878 | SEQ ID NO: 39 |
| containing | | | | |
| superoxide | | | | |
| dismutase | | | | |
| (MnSOD) | | | | |
| DNAJ (Hsp70 | Q8SRK0 | EEQ82425 | ACOL01000059/6412-7635 | SEQ ID NO: 40 |
| interacting) | | | | |
| Iron Sulfur | Q8SSM2 | — | | |
| cluster ISU1 | | | | |
| Cystein | Q8SQS2 | EEQ82825 | ACOL01000020/5924-7231 | SEQ ID NO: 41 |
| desulfurase | | | | |
| Nsf1 | | | | |
| Critical Fe/S | | | | |
| cytosolic | | | | |
| proteins | | | | |
| NAR1 | NP_597440.1 | EEQ82578 | ACOL01000043/12613-13713 | SEQ ID NO: 42 |
| RLI1 | | EEQ83099 | ACOL01000003/27828-29657 | SEQ ID NO: 43 |
| ATP/ADP | | | | |
| Transporter | | | | |
| homologues | | | | |
| Nc006 | | EEQ83030.1 | ACOL01000006/9068-10708 | SEQ ID NO: 44 |
| Nc123 | | EEQ82057.1 | ACOL01000123/4795-6480 | SEQ ID NO: 45 |
| Nc014 | | EEQ82913.1 | ACOL01000014/4714-6417 | SEQ ID NO: 46 |
| Nc017 | | EEQ82872.1 | ACOL01000017/9811-11271 | SEQ ID NO: 47 |

[0115] Multiple insect-pathogen sequences can be designed to include sequences suitable for producing siRNAs effective against more than one insect pathogen. Such multiple insect-pathogen dsRNA can be of the long or short variety, and may include sequences corresponding to homologous sequences within a class of insect pathogens (multiple bee-virus sequences, for example), or sequences corresponding to diverse classes of pathogens (e.g. viral+bacterial+fungal+mite sequences, etc). Further, multiple sequences can be designed to include two or more dsRNA sequences of the same bee-pathogen.

[0116] Primer sequences for producing nucleic acid agents for silencing expression of some of the pathogen genes are detailed in Table IV.

TABLE IV
Insect pathogen-specific dsRNA sequences for silencing pathogen
genes and the primer sequences used to make them:

| IAPV | SEQ ID NO: | GenBank locator | Size |
|---|---|---|---|
| IAPV: dsRNA synthesis | | | |
| F: TAATACGACTCACTATAGGGCGACCA | 256767 | 8977-9835 | 408 |
| CCCCTCTCAAACAATCTCAAACA | | (NC_009025) | (excluding |
| R: TAATACGACTCACTATAGGGCGATAT | 256768 | | the T7 |
| ATCCAGTTCAAGTGTCGGTTTTC | | | promoter |
| | | | (in bold)) |
| IAPV: dsRNA synthesis | | | |
| F: TAATACGACTCACTATAGGGCGAGAC | 256769 | 6168-6594 | 427 |
| ACAATTCTTGAAATGCCAAACT | | (NC_009025) | (excluding |
| R: TAATACGACTCACTATAGGGCGACAT | 256770 | | the T7 |
| GTGTTACCATACGACTGCTGTAA | | | promoter |
| | | | (in bold)) |

NOSEMA

| Primer name | Sequence (SEQ ID NO) |
|---|---|
| NA7001 T7 Nc0006F | CTAATACGACTCACTATAGGGAGACAGCTAACGAGCCCGTTTC |
| | (SEQ ID NO: 1) |
| NA7002 T7 Nc006 R | CTAATACGACTCACTATAGGGAGACCATAGTAATCCATCCACTAC |
| | (SEQ ID NO: 2) |
| NA7003 T7 Nc123 F | CTAATACGACTCACTATAGGGAGACTGGTCTTTAACGAATGGAC |
| | (SEQ ID NO: 3) |
| NA7004 T7 Nc123 R | CTAATACGACTCACTATAGGGAGAGTGGGCACGCTATGGCAAC |
| | (SEQ ID NO: 4) |
| NA7005 T7 Nc014 F | CTAATACGACTCACTATAGGGAGACTCCTGGACAGTCCGCTAG |
| | (SEQ ID NO: 5) |
| NA7006 T7 Nc014 R | CTAATACGACTCACTATAGGGAGAATCAGTTGACGGTAAACGG |
| | (SEQ ID NO: 6) |
| NA7007 T7 Nc017 F | CTAATACGACTCACTATAGGGAGAGCTTGATGGGCTTATCTCC |
| | (SEQ ID NO: 7) |
| NA7008 T7 Nc017 R | CTAATACGACTCACTATAGGGAGAGCAATGCGATTTCCACGG |
| | (SEQ ID NO: 8) |
| TOM-70 PROTEIN | |
| NT7009 T7 TOM70 F | CTAATACGACTCACTATAGGGAGACTGAATGTTACAAGCAGATGGG |
| | (SEQ ID NO: 9) |
| NT7015 TOM70 R | CTAATACGACTCACTATAGGGAGAACCAGGAGTATCTGGATGAC |
| | (SEQ ID NO: 10) |

*Note:
The Nosema specific sequences are in plain font.

[0117] Additional suitable Varroa siRNAs can be designed according to sequences from any Varroa sequence, for example, the sequences detailed herein, including, but not limited to SEQ ID NO: 252699-256728.

[0118] It will be appreciated that the dsRNA sequences target RNA transcripts complementary to pathogen DNA or RNA (in the case of a virus) sequences of the targeted gene which are expressed in the parasite (transcribed into RNA), and that the actual complementation taking place in the RNAi pathways occurs following reduction of the dsRNA to smaller fragments by the RNAi enzymes.

[0119] Multiple insect pathogen-specific siRNA sequences can be designed to include sequences suitable for producing siRNAs effective against more than one pathogenic species. Such multiple insect pathogen-specific dsRNA can be of the long or short variety, and may also be combined with sequences corresponding to diverse classes of pathogens (e.g. viral and/or bacterial and/or fungal sequences, etc). Further, multiple sequences can be designed to include two or more dsRNA sequences of the same pathogen. Thus, in some embodiments, the nucleic acid construct comprises at least two nucleic acid agents, each of said nucleic acid agents downregulating expression of at least one gene product of at least one insect pathogen. In some further embodiments the at least two nucleic acid agents downregulate expression of the same target gene product. In yet further embodiments the at least two nucleic acid agents down-regulate expression of at least two different target gene product.

[0120] It will be appreciated that the RNA silencing agent of the present invention need not be limited to those molecules containing only RNA, but further encompasses chemically-modified nucleotides and non-nucleotides.

[0121] Another agent capable of downregulating an insect pathogen gene product is a DNAzyme molecule capable of specifically cleaving an mRNA transcript or DNA sequence of the insect pathogen gene. DNAzymes are single-stranded polynucleotides which are capable of cleaving both single and double stranded target sequences (Breaker, R. R. and Joyce, G. Chemistry and Biology 1995; 2:655; Santoro, S. W. & Joyce, G. F. Proc. Natl, Acad. Sci. USA 1997; 943:4262) A general model (the “10-23” model) for the DNAzyme has been proposed. “10-23” DNAzymes have a catalytic domain of 15 deoxyribonucleotides, flanked by two substrate-recognition domains of seven to nine deoxyribonucleotides each. This type of DNAzyme can effectively cleave its substrate RNA at purine:pyrimidine junctions (Santoro, S. W. & Joyce, G. F. Proc. Natl, Acad. Sci. USA 199; for rev of DNAzymes see Khachigian, L M [Curr Opin Mol Ther 4:119-21 (2002)].

[0122] Examples of construction and amplification of synthetic, engineered DNAzymes recognizing single and double-stranded target cleavage sites have been disclosed in U.S. Pat. No. 6,326,174 to Joyce et al.

[0123] Downregulation of insect pathogen polypeptides or cleavage of insect pathogen RNA can also be effected by using an antisense polynucleotide capable of specifically hybridizing with an mRNA transcript encoding the insect pathogen polypeptide or an insect pathogen RNA target sequence.

[0124] Design of antisense molecules which can be used to efficiently downregulate an insect pathogen polypeptide must be effected while considering two aspects important to the antisense approach. The first aspect is delivery of the oligonucleotide into the cytoplasm of the appropriate cells, while the second aspect is design of an oligonucleotide which specifically binds the designated mRNA or RNA target sequence within cells in a way which inhibits translation thereof.

[0125] A number of delivery strategies which can be used to efficiently deliver oligonucleotides into a wide variety of cell types have been disclosed [see, for example, Luft J Mol Med 76: 75-6 (1998); Kronenwett et al. Blood 91: 852-62 (1998); Rajur et al. Bioconjug Chem 8: 935-40 (1997); Lavigne et al. Biochem Biophys Res Commun 237: 566-71 (1997) and Aoki et al. (1997) Biochem Biophys Res Commun 231: 540-5 (1997)]. Several approaches for designing and predicting efficiency of specific oligonucleotides using an in vitro system were also published (Matveeva et al., Nature Biotechnology 16: 1374-1375 (1998)].

[0126] For example, a suitable antisense oligonucleotide targeted against an insect pathogen would be of the sequences complementary to pathogen mRNA sequences as set forth in SEQ ID NOs: 55-59, 253194, 254090, 259289, 256752, 256761.

[0127] Thus, the current consensus is that recent developments in the field of antisense technology which, as described above, have led to the generation of highly accurate antisense design algorithms and a wide variety of oligonucleotide delivery systems, enable an ordinarily skilled artisan to design and implement antisense approaches suitable for downregulating expression of known sequences without having to resort to undue trial and error experimentation.

[0128] Another agent capable of downregulating an insect pathogen polypeptide is a ribozyme molecule capable of specifically cleaving an mRNA transcript encoding an insect pathogen polypeptide. Ribozymes are being increasingly used for the sequence-specific inhibition of gene expression by the cleavage of mRNAs encoding proteins of interest [Welch et al., Curr Opin Biotechnol. 9:486-96 (1998)]. Ribozymes have been identified in insects (Webb et al, Science 2009; 326:953), and used effectively for gene silencing in insects (Lee et al, FASEB J 2001; 15:2390-400).

[0129] An additional method of regulating the expression of an insect pathogen gene in cells is via triplex forming oligonucleotides (TFOs). Recent studies have shown that TFOs can be designed which can recognize and bind to polypurine/polypirimidine regions in double-stranded helical DNA in a sequence-specific manner. These recognition rules are outlined by Maher III, L. J., et al., Science, 1989; 245:725-730; Moser, H. E., et al., Science, 1987; 238:645-630; Beal, P. A., et al, Science, 1992; 251:1360-1363; Cooney, M., et al., Science, 1988; 241:456-459; and Hogan, M. E., et al., EP Publication 375408. Detailed description of the design, synthesis and administration of effective TFOs can be found in U.S. Patent Application Nos. 2003 017068 and 2003 0096980 to Froehler et al, and 2002 0128218 and 2002 0123476 to Emanuele et al, and U.S. Pat. No. 5,721,138 to Lawn.

[0130] In some embodiments of the present invention, the methods and compositions of the invention employ nucleic acid elements that when transcribed “form” a dsRNA molecule. Accordingly, the heterologous polynucleotide being expressed need not form the dsRNA by itself, but can interact with other sequences in the plant cell or in the insect gut, or even in the pathogen after ingestion to allow the formation of the dsRNA. For example, a chimeric polynucleotide that can selectively silence the target polynucleotide can be generated by expressing a chimeric construct comprising the target sequence for a miRNA or siRNA to a sequence corresponding to all or part of the gene or genes to be silenced. In such an embodiment, the dsRNA is “formed” when the target for the miRNA or siRNA interacts with the miRNA present in the cell. The resulting dsRNA can then reduce the level of expression of the gene or genes to be silenced. The construct can be designed to have a target for an endogenous miRNA or alternatively, a target for a heterologous and/or synthetic miRNA can be employed in the construct. If a heterologous and/or synthetic miRNA is employed, it can be introduced into the cell on the same nucleotide construct as the chimeric polynucleotide or on a separate construct. As discussed elsewhere herein, any method can be used to introduce the construct comprising the heterologous miRNA.

[0131] It will be appreciated that mechanisms other than dsRNA for targeting the pathogens proteins or other gene products can effectively block gene expression in the parasite, and therefore potentially reduce insect pathogen, severity of symptoms and contagiousness in the host insect. Any molecules capable of traversing the membrane of insect mucosal epithelial cells and able to disrupt pathogen gene expression or activity, could potentially enter the pathogen in an early stage, and reduce infection levels and severity of symptoms in infected hosts.

[0132] The nucleic acid agent of the present invention is expressed in plant cells, plants, plant tissues and/or organs. For transcription from a transgene in vivo or from an expression cassette, a regulatory region (e.g., promoter, enhancer, silencer, leader, intron and polyadenylation) may be used to modulate the transcription of the RNA strand (or strands). Therefore, in one embodiment, there is provided a nucleic acid construct comprising a polynucleotide encoding a nucleic acid agent downregulating expression of a gene product of an insect pathogen, the polynucleotide operably linked to a cis-regulatory element operable in plants.

[0133] The use of the term “polynucleotide” is not intended to limit the present invention to polynucleotides comprising DNA. Those of ordinary skill in the art will recognize that polynucleotides, can comprise ribonucleotides and combinations of ribonucleotides and deoxyribonucleotides. Such deoxyribonucleotides and ribonucleotides include both naturally occurring molecules and synthetic analogues. The polynucleotides of the invention also encompass all forms of sequences including, but not limited to, single-stranded forms, double-stranded forms, hairpins, stem-and-loop structures, and the like.

[0134] The polynucleotide encoding the nucleic acid agent employed in the methods and compositions of the invention can be provided in expression cassettes for expression in a plant or organism of interest. It is recognized that multiple nucleic acid agents including multiple identical nucleic acid agents, multiple nucleic acid agents targeting different regions of the target sequence, or multiple nucleic acid agents from different target sequences can be used. In this embodiment, it is recognized that each nucleic acid agent can be contained in a single or separate cassette, DNA construct, or vector. As discussed, any means of providing the nucleic acid agent is contemplated. A plant or plant cell can be transformed with a single cassette comprising DNA encoding one or more nucleic acid agent or separate cassettes comprising each nucleic acid agent can be used to transform a plant or plant cell or host cell. Likewise, a plant transformed with one component can be subsequently transformed with the second component. One or more nucleic acid agent can also be brought together by sexual crossing. That is, a first plant comprising one component is crossed with a second plant comprising the second component. Progeny plants from the cross will comprise both components.

[0135] The expression cassette can include 5′ and 3′ regulatory sequences operably linked to the polynucleotide of the invention. “Operably linked” is intended to mean a functional linkage between two or more elements. For example, an operable linkage between a polynucleotide of the invention and a regulatory sequence (i.e., a promoter) is a functional link that allows for expression of the polynucleotide of the invention. Operably linked elements may be contiguous or non-contiguous. When used to refer to the joining of two protein coding regions, by operably linked is intended that the coding regions are in the same reading frame. The cassette may additionally contain at least one additional polynucleotide to be cotransformed into the organism. Alternatively, the additional polypeptide(s) can be provided on multiple expression cassettes. Expression cassettes can be provided with a plurality of restriction sites and/or recombination sites for insertion of the polynucleotide to be under the transcriptional regulation of the regulatory regions. The expression cassette may additionally contain selectable marker genes.

[0136] “Regulatory sequences” or “control elements” refer to nucleotide sequences located upstream, within, or downstream of a structural nucleotide sequence, and which influence the timing and level or amount of transcription, RNA processing or stability, or translation of the associated structural nucleotide sequence. Regulatory sequences may include promoters, translation leader sequences, introns, enhancers, stem-loop structures, repressor binding sequences, termination sequences, pausing sequences, polyadenylation recognition sequences, and the like.

[0137] The expression cassette will include in the 5′-3′ direction of transcription, a transcriptional and translational initiation region (i.e., a promoter), a polynucleotide comprising the silencing element employed in the methods and compositions of the invention, and a transcriptional and translational termination region (i.e., termination region) functional in plants. The regulatory regions (i.e., promoters, transcriptional regulatory regions, and translational termination regions) and/or the polynucleotides employed in the invention may be native/analogous to the host cell or to each other. Alternatively, the regulatory regions and/or the polynucleotide employed in the invention may be heterologous to the host cell or to each other. As used herein, “heterologous” in reference to a sequence is a sequence that originates from a foreign species, or, if from the same species, is substantially modified from its native form in composition and/or genomic locus by deliberate human intervention. For example, a promoter operably linked to a heterologous polynucleotide is from a species different from the species from which the polynucleotide was derived, or, if from the same/analogous species, one or both are substantially modified from their original form and/or genomic locus, or the promoter is not the native promoter for the operably linked polynucleotide. As used herein, a chimeric gene comprises a coding sequence operably linked to a transcription initiation region that is heterologous to the coding sequence.

[0138] The termination region may be native with the transcriptional initiation region, may be native with the operably linked polynucleotide encoding the nucleic acid agent, may be native with the plant host, or may be derived from another source (i.e., foreign or heterologous) to the promoter, the polynucleotide comprising silencing element, the plant host, or any combination thereof. Convenient termination regions are available from the Ti-plasmid of A. tumefaciens, such as the octopine synthase and nopaline synthase termination regions. See also Guerineau et al. (1991) Mol. Gen. Genet. 262:141-144; Proudfoot (1991) Cell 64:671-674; Sanfacon et al. (1991) Genes Dev. 5:141-149; Mogen et al. (1990) Plant Cell 2:1261-1272; Munroe et al. (1990) Gene 91:151-158; Ballas et al. (1989) Nucleic Acids Res. 17:7891-7903; and Joshi et al. (1987) Nucleic Acids Res. 15:9627-9639.

[0139] Additional sequence modifications are known to enhance gene expression in a cellular host. These include elimination of sequences encoding spurious polyadenylation signals, exon-intron splice site signals, transposon-like repeats, and other such well-characterized sequences that may be deleterious to gene expression. The G-C content of the sequence may be adjusted to levels average for a given cellular host, as calculated by reference to known genes expressed in the host cell. When possible, the sequence is modified to avoid predicted hairpin secondary mRNA structures.

[0140] In preparing the expression cassette, the various DNA fragments may be manipulated, so as to provide for the DNA sequences in the proper orientation and, as appropriate, in the proper reading frame. Toward this end, adapters or linkers may be employed to join the DNA fragments or other manipulations may be involved to provide for convenient restriction sites, removal of superfluous DNA, removal of restriction sites, or the like. For this purpose, in vitro mutagenesis, primer repair, restriction, annealing, resubstitutions, e.g., transitions and transversions, may be involved.

[0141] A number of promoters can be used in the practice of the invention. The polynucleotide encoding the nucleic acid agent can be combined with constitutive, tissue-preferred, or other promoters for expression in plants.

[0142] Such constitutive promoters include, for example, the core promoter of the Rsyn7 promoter and other constitutive promoters disclosed in WO 99/43838 and U.S. Pat. No. 6,072,050; the core CaMV 35S promoter (Odell et al. (1985) Nature 313:810-812); rice actin (McElroy et al. (1990) Plant Cell 2:163-171); ubiquitin (Christensen et al. (1989) Plant Mol. Biol. 12:619-632 and Christensen et al. (1992) Plant Mol. Biol. 18:675-689); pEMU (Last et al. (1991) Theor. Appl. Genet. 81:581-588); MAS (Velten et al. (1984) EMBO J. 3:2723-2730); ALS promoter (U.S. Pat. No. 5,659,026), and the like. Other constitutive promoters include, for example, U.S. Pat. Nos. 5,608,149; 5,608,144; 5,604,121; 5,569,597; 5,466,785; 5,399,680; 5,268,463; 5,608,142; and 6,177,611.

[0143] An inducible promoter, for instance, a pathogen-inducible promoter could also be employed. Such promoters include those from pathogenesis-related proteins (PR proteins), which are induced following infection by a pathogen; e.g., PR proteins, SAR proteins, beta-1,3-glucanase, chitinase, etc. See, for example, Redolfi et al. (1983) Neth. J. Plant Pathol. 89:245-254; Uknes et al. (1992) Plant Cell 4:645-656; and Van Loon (1985) Plant Mol. Virol. 4:111-116. See also WO 99/43819, herein incorporated by reference.

[0144] Of interest are promoters that are expressed locally at or near the site of contact with the beneficial insect. Of particular interest are nectary specific, pollen specific, and flower-specific promoters (see Fernandez et al, Plant Phys 2009, 151:1729-40 and Kram et al, BMC Plant Biol 2009; 9:92) such as, but not limited to the tapetal-oleosin like protein promoter (see U.S. Pat. No. 7,303,917 to Robert), the chsA (chalcone synthase) promoter from Petunia hybrida, promoters from scent biosynthetic enzymes, such as the Linalool Synthase (LIS) promoter from Clarkia brewri, the 1,8-cineole synthase and (+)-sabinene synthase promoters from common sage (U.S. Pat. No. 5,891,697), the Benzyl alcohol:acetyl CoA acetyltransferase (BEAT) promoter, the S-adenosyl-L-methionine:(iso)eugenol O-methyltransferase, (IEMT) promoter, the Limonene synthase's nucleotide promoter (U.S. Pat. No. 5,871,988), the S-Adenosyl-L-Methionine:Salicylic Acid Methyl Transferase (S-AMT) and the S-Adenosyl-L-methionine:benzoic acid carboxyl methyltransferase (BAMT) promoter, the NEC1 nectary specific promoter from Petunia hybrida, fruit and flower specific promoters PPC2, TPRP, IMA, CRC and PG (Fernandez et al, 2009), the Aribidopsis nectarium gene cluster promoters (Kram et al, BMC Plant Biol, 2009), the promoters from nectary-related LEAFY, UFO, AGAMOUS, SHATTERPROOF1/2, APETALA2/3, PISTILLATA, and SEPALLATA1/2/3 genes (Kram et al, 2009), the tobacco NECTARIN I, III and V promoters, the Brassica NTR1 promoter and the Arabidopsis sesquiterpene synthetase promoter.

[0145] Chemical-regulated promoters can be used to modulate the expression of a gene in a plant through the application of an exogenous chemical regulator. Depending upon the objective, the promoter may be a chemical-inducible promoter, where application of the chemical induces gene expression, or a chemical-repressible promoter, where application of the chemical represses gene expression. Chemical-inducible promoters are known in the art and include, but are not limited to, the maize In2-2 promoter, which is activated by benzenesulfonamide herbicide safeners, the maize GST promoter, which is activated by hydrophobic electrophilic compounds that are used as pre-emergent herbicides, and the tobacco PR-1a promoter, which is activated by salicylic acid. Other chemical-regulated promoters of interest include steroid-responsive promoters (see, for example, the glucocorticoid-inducible promoter in Schena et al. (1991) Proc. Natl. Acad. Sci. USA 88:10421-10425 and McNellis et al. (1998) Plant J. 14(2):247-257) and tetracycline-inducible and tetracycline-repressible promoters (see, for example, Gatz et al. (1991) Mol. Gen. Genet. 227:229-237, and U.S. Pat. Nos. 5,814,618 and 5,789,156), herein incorporated by reference.

[0146] Tissue-preferred promoters can be utilized to target enhanced expression within a particular plant tissue. Tissue-preferred promoters include Yamamoto et al. (1997) Plant J=12(2):255-265; Kawamata et al. (1997) Plant Cell Physiol. 38(7):792-803; Hansen et al. (1997) Mol. Gen Genet. 254(3):337-343; Russell et al. (1997) Transgenic Res. 6(2):157-168; Rinehart et al. (1996) Plant Physiol. 112(3):1331-1341; Van Camp et al. (1996) Plant Physiol. 112(2):525-535; Canevascini et al. (1996) Plant Physiol. 112(2):513-524; Yamamoto et al. (1994) Plant Cell Physiol. 35(5):773-778; Lam (1994) Results Probl. Cell Differ. 20:181-196; Orozco et al. (1993) Plant Mol Biol. 23(6):1129-1138; Matsuoka et al. (1993) Proc Natl. Acad. Sci. USA 90(20):9586-9590; and Guevara-Garcia et al. (1993) Plant J. 4(3):495-505. Such promoters can be modified, if necessary, for weak expression.

[0147] Leaf-preferred promoters are known in the art. See, for example, Yamamoto et al. (1997) Plant J. 12(2):255-265; Kwon et al. (1994) Plant Physiol. 105:357-67; Yamamoto et al. (1994) Plant Cell Physiol. 35(5):773-778; Gotor et al. (1993) Plant J. 3:509-18; Orozco et al. (1993) Plant Mol. Biol. 23(6):1129-1138; and Matsuoka et al. (1993) Proc. Natl. Acad. Sci. USA 90(20):9586-9590.

[0148] Root-preferred promoters are known and can be selected from the many available from the literature or isolated de novo from various compatible species. See, for example, Hire et al. (1992) Plant Mol. Biol. 20(2):207-218 (soybean root-specific glutamine synthetase gene); Keller and Baumgartner (1991) Plant Cell 3(10):1051-1061 (root-specific control element in the GRP 1.8 gene of French bean); Sanger et al. (1990) Plant Mol. Biol. 14(3):433-443 (root-specific promoter of the mannopine synthase (MAS) gene of Agrobacterium tumefaciens); and Miao et al. (1991) Plant Cell 3(1):11-22 (full-length cDNA clone encoding cytosolic glutamine synthetase (GS), which is expressed in roots and root nodules of soybean).

[0149] In one embodiment of this invention the plant-expressed promoter is a vascular-specific promoter such as a phloem-specific promoter. A “vascular-specific” promoter, as used herein, is a promoter which is at least expressed in vascular cells, or a promoter which is preferentially expressed in vascular cells. Expression of a vascular-specific promoter need not be exclusively in vascular cells, expression in other cell types or tissues is possible. A “phloem-specific promoter” as used herein, is a plant-expressible promoter which is at least expressed in phloem cells, or a promoter which is preferentially expressed in phloem cells. Expression of a phloem-specific promoter need not be exclusively in phloem cells, expression in other cell types or tissues, e.g., xylem tissue, is possible. In one embodiment of this invention, a phloem-specific promoter is a plant-expressible promoter at least expressed in phloem cells, wherein the expression in non-phloem cells is more limited (or absent) compared to the expression in phloem cells. Examples of suitable vascular-specific or phloem-specific promoters in accordance with this invention include but are not limited to the SCSV3, SCSV4, SCSV5, and SCSV7 promoters; the rolC gene promoter of Agrobacterium rhizogenes; the rolA gene promoter of Agrobacterium rhizogenes; the promoter of the Agrobacterium tumefaciens T-DNA gene 5; the rice sucrose synthase RSs1 gene promoter; the CoYMV or Commelina yellow mottle badnavirus promoter; the CFDV or coconut foliar decay virus promoter; the RTBV or rice tungro bacilliform virus promoter; the pea glutamin synthase GS3A gene; the inv CD111 and inv CD141 promoters of the potato invertase genes, the promoter of the sulfate transporter geneSultr1; a promoter of a sucrose synthase gene; and the promoter of a tobacco sucrose transporter gene and the like.

[0150] Additional possible promoters include the Black Cherry promoter for Prunasin Hydrolase (PH DL1.4 PRO) (U.S. Pat. No. 6,797,859), Thioredoxin H promoter from cucumber and rice, Rice (RSs1) and maize sucrose synthese-1 promoters, PP2 promoter from pumpkin, At SUC2 promoter, At SAM-1 (S-adenosylmethionine synthetase), and the Rice tungro bacilliform virus (RTBV) promoter.

[0151] The expression cassette can also comprise a selectable marker gene for the selection of transformed cells. Selectable marker genes are utilized for the selection of transformed cells or tissues. Marker genes include genes encoding antibiotic resistance, such as those encoding neomycin phosphotransferase II (NEO) and hygromycin phosphotransferase (HPT), as well as genes conferring resistance to herbicidal compounds, such as glufosinate ammonium, bromoxynil, imidazolinones, and 2,4-dichlorophenoxyacetate (2,4-D). Additional, non-limiting examples of selectable markers include phenotypic markers such as beta.-galactosidase and fluorescent proteins such as green fluorescent protein (GFP), cyan florescent protein (CYP), and yellow florescent protein (PhiYFP.TM. from Evrogen. For additional selectable markers, see generally, Yarranton (1992) Curr. Opin. Biotech. 3:506-511; Christopherson et al. (1992) Proc. Natl. Acad. Sci. USA 89:6314-6318, and Reines et al. (1993) Proc. Natl. Acad. Sci. USA 90:1917-1921. Such disclosures are herein incorporated by reference. The above list of selectable marker genes is not meant to be limiting. Any selectable marker gene can be used in the present invention.

[0152] It is recognized that the polynucleotides comprising sequences encoding the nucleic acid agent can be used to transform organisms to provide for host organism production of these components. Such host organisms include baculoviruses, bacteria, and the like. In this manner, the combination of polynucleotides encoding the nucleic acid agent may be introduced via a suitable vector into a microbial host, and said host applied to the environment, or to plants or animals. The term “introduced” in the context of inserting a nucleic acid into a cell, means “transfection” or “transformation” or “transduction” and includes reference to the incorporation of a nucleic acid into a eukaryotic or prokaryotic cell where the nucleic acid may be stably incorporated into the genome of the cell (e.g., chromosome, plasmid, plastid, or mitochondrial DNA), converted into an autonomous replicon, or transiently expressed (e.g., transfected mRNA).

[0153] In one embodiment, the methods of the invention involve introducing a polynucleotide or nucleic acid construct into a plant. “Introducing” is intended to mean presenting to the plant the polynucleotide or polypeptide in such a manner that the sequence gains access to the interior of a cell of the plant, or to interstitial fluid or other extracellular compartment of the plant, in such a manner as to be available to a beneficial pollinating or herbivorous insect. The methods of the invention do not depend on a particular method for introducing a sequence into a plant, only that the polynucleotide gains access to the interior of at least one cell of the plant. Methods for introducing polynucleotide into plants are known in the art including, but not limited to, stable transformation methods, transient transformation methods, and virus-mediated methods.

[0154] “Stable transformation” is intended to mean that the nucleotide construct introduced into a plant integrates into the genome of the plant and is capable of being inherited by the progeny thereof “Transient transformation” is intended to mean that a polynucleotide is introduced into the plant and does not integrate into the genome of the plant is introduced into a plant. Transformation protocols as well as protocols for introducing polynucleotide sequences into plants may vary depending on the type of plant or plant cell, i.e., monocot or dicot, targeted for transformation. Suitable methods of introducing polypeptides and polynucleotides into plant cells include microinjection (Crossway et al. (1986) Biotechniques 4:320-334), electroporation (Riggs et al. (1986) Proc. Natl. Acad. Sci. USA 83:5602-5606, Agrobacterium-mediated transformation (U.S. Pat. No. 5,563,055 and U.S. Pat. No. 5,981,840), direct gene transfer (Paszkowski et al. (1984) EMBO J. 3:2717-2722), and ballistic particle acceleration (see, for example, U.S. Pat. No. 4,945,050; U.S. Pat. No. 5,879,918; U.S. Pat. No. 5,886,244; and, 5,932,782; Tomes et al. (1995) in Plant Cell, Tissue, and Organ Culture. Fundamental Methods, ed. Gamborg and Phillips (Springer-Verlag, Berlin); and Lec1 transformation (WO 00/28058). Also see U.S. Pat. Nos. 5,240,855; 5,322,783; and, 5,324,646; U.S. Pat. No. 5,736,369; all of which are herein incorporated by reference.

[0155] In specific embodiments, the nucleic acid agent and insect pathogen-specific sequences of the invention can be provided to a plant using a variety of transient transformation methods. Such transient transformation methods include, but are not limited to, the introduction of the polynucleotide or variants and fragments thereof directly into the plant or the introduction of the transcript into the plant. Such methods include, for example, microinjection or particle bombardment. See, for example, Crossway et al. (1986) Mol. Gen. Genet. 202:179-185; Nomura et al. (1986) Plant Sci. 44:53-58; Hepler et al. (1994) Proc. Natl. Acad. Sci. 91: 2176-2180 and Hush et al. (1994) The Journal of Cell Science 107:775-784, all of which are herein incorporated by reference. Alternatively, polynucleotides can be transiently transformed into the plant using techniques known in the art. Such techniques include viral vector system and the precipitation of the polynucleotide in a manner that precludes subsequent release of the DNA. Thus, the transcription from the particle-bound DNA can occur, but the frequency with which it is released to become integrated into the genome is greatly reduced. Such methods include the use particles coated with polyethylimine (PEI; Sigma #P3143).

[0156] In other embodiments, the polynucleotide of the invention may be introduced into plants by contacting plants with a virus or viral nucleic acids. Generally, such methods involve incorporating a nucleotide construct of the invention within a viral DNA or RNA molecule. Further, it is recognized that promoters of the invention also encompass promoters utilized for transcription by viral RNA polymerases. Methods for introducing polynucleotides into plants and expressing a protein encoded therein, involving viral DNA or RNA molecules, are known in the art. See, for example, U.S. Pat. Nos. 5,889,191, 5,889,190, 5,866,785, 5,589,367, 5,316,931, and Porta et al. (1996) Molecular Biotechnology 5:209-221; herein incorporated by reference.

[0157] Methods are known in the art for the targeted insertion of a polynucleotide at a specific location in the plant genome. In one embodiment, the insertion of the polynucleotide at a desired genomic location is achieved using a site-specific recombination system. See, for example, WO99/25821, WO99/25854, WO99/25840, WO99/25855, and WO99/25853, all of which are herein incorporated by reference. Briefly, the polynucleotide of the invention can be contained in transfer cassette flanked by two non-recombinogenic recombination sites. The transfer cassette is introduced into a plant having stably incorporated into its genome a target site which is flanked by two non-recombinogenic recombination sites that correspond to the sites of the transfer cassette. An appropriate recombinase is provided and the transfer cassette is integrated at the target site. The polynucleotide of interest is thereby integrated at a specific chromosomal position in the plant genome.

[0158] The cells that have been transformed may be grown into plants in accordance with conventional ways. See, for example, McCormick et al. (1986) Plant Cell Reports 5:81-84. These plants may then be grown, and either pollinated with the same transformed strain or different strains, and the resulting progeny having constitutive expression of the desired phenotypic characteristic identified. Two or more generations may be grown to ensure that expression of the desired phenotypic characteristic is stably maintained and inherited and then seeds harvested to ensure expression of the desired phenotypic characteristic has been achieved. In this manner, the present invention provides transformed seed (also referred to as “transgenic seed”) having a polynucleotide of the invention, for example, an expression cassette of the invention, stably incorporated into their genome.

[0159] As used herein, the term plant includes plant cells, plant protoplasts, plant cell tissue cultures from which plants can be regenerated, plant calli, plant clumps, and plant cells that are intact in plants or parts of plants such as embryos, pollen, ovules, seeds, leaves, flowers, branches, fruit, kernels, ears, cobs, husks, stalks, roots, root tips, anthers, and the like. Grain is intended to mean the mature seed produced by commercial growers for purposes other than growing or reproducing the species. Progeny, variants, and mutants of the regenerated plants are also included within the scope of the invention, provided that these parts comprise the introduced polynucleotides.

[0160] The present invention may be used for transformation of any plant species, including, but not limited to, monocots and dicots. Examples of plant species of interest include, but are not limited to, corn (Zea mays), Brassica sp. (e.g., B. napus, B. rapa, B. juncea), particularly those Brassica species useful as sources of seed oil, alfalfa (Medicago sativa), rice (Oryza sativa), rye (Secale cereale), sorghum (Sorghum bicolor, Sorghum vulgare), millet (e.g., pearl millet (Pennisetum glaucum), proso millet (Panicum miliaceum), foxtail millet (Setaria italica), finger millet (Eleusine coracana)), sunflower (Helianthus annuus), safflower (Carthamus tinctorius), wheat (Triticum aestivum), soybean (Glycine max), tobacco (Nicotiana tabacum), potato (Solanum tuberosum), peanuts (Arachis hypogaea), cotton (Gossypium barbadense, Gossypium hirsutum), sweet potato (Ipomoea batatus), cassaya (Manihot esculenta), coffee (Coffea spp.), coconut (Cocos nucifera), pineapple (Ananas comosus), citrus trees (Citrus spp.), cocoa (Theobroma cacao), tea (Camellia sinensis), banana (Musa spp.), avocado (Persea americana), fig (Ficus casica), guava (Psidium guajava), mango (Mangifera indica), olive (Olea europaea), papaya (Carica papaya), cashew (Anacardium occidentale), macadamia (Macadamia integrifolia), almond (Prunus amygdalus), sugar beets (Beta vulgaris), sugarcane (Saccharum spp.), oats, barley, vegetables, ornamentals, and conifers. Vegetables include tomatoes (Lycopersicon esculentum), lettuce (e.g., Lactuca sativa), green beans (Phaseolus vulgaris), lima beans (Phaseolus limensis), peas (Lathyrus spp.), and members of the genus Cucumis such as cucumber (C. sativus), cantaloupe (C. cantalupensis), and musk melon (C. melo). Ornamentals include azalea (Rhododendron spp.), hydrangea (Macrophylla hydrangea), hibiscus (Hibiscus rosasanensis), roses (Rosa spp.), tulips (Tulipa spp.), daffodils (Narcissus spp.), petunias (Petunia hybrida), carnation (Dianthus caryophyllus), poinsettia (Euphorbia pulcherrima), and chrysanthemum. Conifers that may be employed in practicing the present invention include, for example, pines such as loblolly pine (Pinus taeda), slash pine (Pinus elliotii), ponderosa pine (Pinus ponderosa), lodgepole pine (Pinus contorta), and Monterey pine (Pinus radiata); Douglas-fir (Pseudoisuga menziesii); Western hemlock (Tsuga canadensis); Sitka spruce (Picea glauca); redwood (Sequoia sempervirens); true firs such as silver fir (Abies amabilis) and balsam fir (Abies balsamea); and cedars such as Western red cedar (Thuja plicata) and Alaska yellow-cedar (Chamaecyparis noolkatensis). In specific embodiments, plants of the present invention are crop plants (for example, corn, alfalfa, sunflower, Brassica, soybean, cotton, safflower, peanut, sorghum, wheat, millet, tobacco, etc.). In some embodiments, rapeseed (Brassica), clover and alfalfa plants are optimal.

[0161] In some embodiments, the beneficial insects are pollinating insects, such as, but not limited to, bees. In other embodiments, the beneficial insects are herbivores. Thus, in some embodiments, the beneficial insects are attracted to, make contact with, or feed off the flower or flower-related tissues of the plant. Some non-limiting examples of plants particularly suited for use of the present invention with pollinating insects are flowering plants that are ubiquitous in their distribution, flower in a season relevant for pollinating insect activity, produce nectar, are easily transformed and easily cultivated. Thus, in some specific embodiments, the plant is a flowering plant selected from the group consisting of rapeseed, clover and alfalfa. In another embodiment, plants having extrafloral nectaries are selected.

[0162] The methods detailed herein can be used to produce plants useful in combating pathogen-related disease in insects. Thus, in one specific embodiment, there is provided a method of producing a plant capable of reducing the susceptibility of an insect feeding from said plant, plant tissues or plant secretions to a disease caused by an insect pathogen, the method comprising transforming cells of said plant with a nucleic acid construct comprising a polynucleotide expressing a nucleic acid agent down-regulating expression of a gene product of an insect pathogen, said polynucleotide operably linked to a cis-regulatory element operable in plants, selecting transformed plants or plant cells expressing insect pathogen-specific dsRNA, and propagating said plants or plant cells to produce a plant or plant cells capable of reducing the susceptibility of an insect feeding from said plant.

[0163] Other plants of interest include grain plants that provide seeds of interest, oil-seed plants, and leguminous plants. Seeds of interest include grain seeds, such as corn, wheat, barley, rice, sorghum, rye, etc. Oil-seed plants include cotton, soybean, safflower, sunflower, Brassica, maize, alfalfa, palm, coconut, etc. Leguminous plants include beans and peas. Beans include guar, locust bean, fenugreek, soybean, garden beans, cowpea, mungbean, lima bean, fava bean, lentils, chickpea, etc.

[0164] The methods of the invention comprise methods for reducing susceptibility of an insect (e.g. a bee) to a disease caused by an insect pathogen (e.g. a bee pathogen), comprising providing to the insect plants expressing the nucleic acid construct comprising a polynucleotide expressing the nucleic acid agent of the invention, wherein said nucleic acid construct, when ingested by an insect, specifically reduces the level of a target polynucleotide of the insect pathogen and thereby controls the insect pathogen. The insect can be fed the nucleic acid agent in a variety of ways. For example, in one embodiment, the polynucleotide comprising the nucleic acid agent is introduced into a plant. As the insect feeds on the plant or part thereof expressing these sequences, the nucleic acid agent is delivered to the pathogen. When the nucleic acid agent is delivered to the plant in this manner, it is recognized that the nucleic acid agent can be expressed constitutively or alternatively, it may be produced in a stage-specific manner by employing the various inducible or tissue-preferred or developmentally regulated promoters that are discussed elsewhere herein. For example, the nucleic acid agent could be expressed in aerial plant tissues such as, the leaves, stem, flower, etc. In these embodiments, pathogens of bees and other pollinating insects, such as IAPV and Nosema can be targeted. In other embodiments, the silencing element is expressed in a root.

[0165] The polynucleotide sequences of interest used to transform plants can be combined at any time and in any order. For example, a transgenic plant comprising one or more desired traits can be used as the target to introduce further traits by subsequent transformation. The traits can be introduced simultaneously in a co-transformation protocol with the polynucleotides of interest provided by any combination of transformation cassettes. For example, if two sequences will be introduced, the two sequences can be contained in separate transformation cassettes (trans) or contained on the same transformation cassette (cis). Expression of the sequences can be driven by the same promoter or by different promoters. In certain cases, it may be desirable to introduce a transformation cassette that will suppress the expression of the polynucleotide of interest. This may be combined with any combination of other suppression cassettes or overexpression cassettes to generate the desired combination of traits in the plant. It is further recognized that polynucleotide sequences can be introduced at a desired genomic location using a site-specific recombination system. See, for example, WO99/25821, WO99/25854, WO99/25840, WO99/25855, and WO99/25853, all of which are herein incorporated by reference.

[0166] Methods and compositions are further provided which allow for an increase in RNAi produced from the silencing element. In such embodiments, the methods and compositions employ a first polynucleotide comprising a nucleic acid agent for a target pathogen sequence operably linked to a promoter active in the plant cell; and, a second polynucleotide comprising a suppressor enhancer element comprising the target pathogen sequence or an active variant or fragment thereof operably linked to a promoter active in the plant cell. The combined expression of the silencing element with suppressor enhancer element leads to an increased amplification of the inhibitory RNA produced from the silencing element over that achievable with only the expression of the silencing element alone. In addition to the increased amplification of the specific RNAi species itself, the methods and compositions further allow for the production of a diverse population of RNAi species and for the systemic production of RNAi throughout the plant. Thus, the various methods and compositions provide improved methods for the delivery of inhibitory RNA to the target organism. See, for example, U.S. Patent Application No. 20090265818.

[0167] It will be appreciated that the RNA, dsRNA, siRNA, or miRNA of the present invention may be produced chemically or enzymatically through manual or automated reactions or in vivo in an organism. RNA may also be produced by partial or total organic synthesis. Any modified ribonucleotide can be introduced by in vitro enzymatic or organic synthesis. The RNA may be synthesized by a cellular RNA polymerase or a bacteriophage RNA polymerase (e.g., T3, T7, SP6). If synthesized chemically or by in vitro enzymatic synthesis, the RNA may be purified prior to feeding or formulated in an acceptable carrier and provided as a liquid, solid or semi-solid to the bees. For example, RNA can be purified from a mixture by extraction with a solvent or resin, precipitation, electrophoresis, chromatography, or a combination thereof. Alternatively, the RNA may be used with no, or a minimum of, purification to avoid losses due to sample processing. The RNA may be dried for storage or dissolved in an aqueous solution. The solution may contain buffers or salts to promote annealing, and/or stabilization of the duplex strands. In some embodiments, the nucleic acid agent of the present invention is provided to the plant from an external source, and is taken up into the plant via conducting tissues (i.e. xylem and phloem). Such solutions, or powders comprising the nucleic acid agents of the present invention can be applied by irrigation or by mechanical means such as spraying or dusting. As phloem is the source of fluid for nectar production, it is conceivable that nucleic acid agent of the present invention can be introduced into nectar and other plant secretions via external application to the plant.

[0168] In some embodiments, the methods of the present invention can be used to combat Colony Collapse Disorder, wherein the beneficial insect is a bee, and the insect pathogen-associated disease is any of IAPV, nosemosis or Varroa infestation. Thus, there is provided a method of reducing the susceptibility of honeybees to Colony Collapse Disorder, the method comprising providing to the honeybees plants expressing a nucleic acid construct comprising a polynucleotide encoding a nucleic acid agent downregulating a gene product of an insect pathogen selected from the group consisting of IAPV, Nosema and Varroa. In some specific embodiments, the nucleic acid agent is complementary to SEQ ID NOs: 256752, 256761, 256762 and 311552, 55-59 or 253194, 254090 and 259289.

[0169] It is expected that during the life of a patent maturing from this application many relevant methods and compositions comprising a nucleic acid agent down-regulating expression of a gene product of an insect pathogen will be developed and the scope of the terms nucleic acid agent of the invention, and insect pathogen-specific dsRNA is intended to include all such new technologies a priori.

[0170] As used herein the term “about” refers to ±10%.

[0171] The terms “comprises”, “comprising”, “includes”, “including”, “having” and their conjugates mean “including but not limited to”.

[0172] The term “consisting of means “including and limited to”.

[0173] The term “consisting essentially of” means that the composition, method or structure may include additional ingredients, steps and/or parts, but only if the additional ingredients, steps and/or parts do not materially alter the basic and novel characteristics of the claimed composition, method or structure.

[0174] As used herein, the singular form “a”, “an” and “the” include plural references unless the context clearly dictates otherwise. For example, the term “a compound” or “at least one compound” may include a plurality of compounds, including mixtures thereof.

[0175] Throughout this application, various embodiments of this invention may be presented in a range format. It should be understood that the description in range format is merely for convenience and brevity and should not be construed as an inflexible limitation on the scope of the invention. Accordingly, the description of a range should be considered to have specifically disclosed all the possible subranges as well as individual numerical values within that range. For example, description of a range such as from 1 to 6 should be considered to have specifically disclosed subranges such as from 1 to 3, from 1 to 4, from 1 to 5, from 2 to 4, from 2 to 6, from 3 to 6 etc., as well as individual numbers within that range, for example, 1, 2, 3, 4, 5, and 6. This applies regardless of the breadth of the range.

[0176] Whenever a numerical range is indicated herein, it is meant to include any cited numeral (fractional or integral) within the indicated range. The phrases “ranging/ranges between” a first indicate number and a second indicate number and “ranging/ranges from” a first indicate number “to” a second indicate number are used herein interchangeably and are meant to include the first and second indicated numbers and all the fractional and integral numerals therebetween.

[0177] As used herein the term “method” refers to manners, means, techniques and procedures for accomplishing a given task including, but not limited to, those manners, means, techniques and procedures either known to, or readily developed from known manners, means, techniques and procedures by practitioners of the chemical, pharmacological, biological, biochemical and medical arts.

[0178] As used herein, the term “treating” includes abrogating, substantially inhibiting, slowing or reversing the progression of a condition, substantially ameliorating clinical or aesthetical symptoms of a condition or substantially preventing the appearance of clinical or aesthetical symptoms of a condition.

[0179] It is appreciated that certain features of the invention, which are, for clarity, described in the context of separate embodiments, may also be provided in combination in a single embodiment. Conversely, various features of the invention, which are, for brevity, described in the context of a single embodiment, may also be provided separately or in any suitable subcombination or as suitable in any other described embodiment of the invention. Certain features described in the context of various embodiments are not to be considered essential features of those embodiments, unless the embodiment is inoperative without those elements.

[0180] Various embodiments and aspects of the present invention as delineated hereinabove and as claimed in the claims section below find experimental support in the following examples.

### EXAMPLES

[0181] Reference is now made to the following examples, which together with the above descriptions illustrate some embodiments of the invention in a non limiting fashion.

[0182] Generally, the nomenclature used herein and the laboratory procedures utilized in the present invention include molecular, biochemical, microbiological and recombinant DNA techniques. Such techniques are thoroughly explained in the literature. See, for example, “Molecular Cloning: A laboratory Manual” Sambrook et al., (1989); “Current Protocols in Molecular Biology” Volumes I-III Ausubel, R. M., ed. (1994); Ausubel et al., “Current Protocols in Molecular Biology”, John Wiley and Sons, Baltimore, Md. (1989); Perbal, “A Practical Guide to Molecular Cloning”, John Wiley & Sons, New York (1988); Watson et al., “Recombinant DNA”, Scientific American Books, New York; Birren et al. (eds) “Genome Analysis: A Laboratory Manual Series”, Vols. 1-4, Cold Spring Harbor Laboratory Press, New York (1998); methodologies as set forth in U.S. Pat. Nos. 4,666,828; 4,683,202; 4,801,531; 5,192,659 and 5,272,057; “Cell Biology: A Laboratory Handbook”, Volumes I-III Cellis, J. E., ed. (1994); “Culture of Animal Cells—A Manual of Basic Technique” by Freshney, Wiley-Liss, N.Y. (1994), Third Edition; “Current Protocols in Immunology” Volumes I-III Coligan J. E., ed. (1994); Stites et al. (eds), “Basic and Clinical Immunology” (8th Edition), Appleton & Lange, Norwalk, Conn. (1994); Mishell and Shiigi (eds), “Selected Methods in Cellular Immunology”, W. H. Freeman and Co., New York (1980); available immunoassays are extensively described in the patent and scientific literature, see, for example, U.S. Pat. Nos. 3,791,932; 3,839,153; 3,850,752; 3,850,578; 3,853,987; 3,867,517; 3,879,262; 3,901,654; 3,935,074; 3,984,533; 3,996,345; 4,034,074; 4,098,876; 4,879,219; 5,011,771 and 5,281,521; “Oligonucleotide Synthesis” Gait, M. J., ed. (1984); “Nucleic Acid Hybridization” Hames, B. D., and Higgins S. J., eds. (1985); “Transcription and Translation” Hames, B. D., and Higgins S. J., eds. (1984); “Animal Cell Culture” Freshney, R. I., ed. (1986); “Immobilized Cells and Enzymes” IRL Press, (1986); “A Practical Guide to Molecular Cloning” Perbal, B., (1984) and “Methods in Enzymology” Vol. 1-317, Academic Press; “PCR Protocols: A Guide To Methods And Applications”, Academic Press, San Diego, Calif. (1990); Marshak et al., “Strategies for Protein Purification and Characterization—A Laboratory Course Manual” CSHL Press (1996); all of which are incorporated by reference as if fully set forth herein. Other general references are provided throughout this document. The procedures therein are believed to be well known in the art and are provided for the convenience of the reader. All the information contained therein is incorporated herein by reference.

### Example I

### Cloning of IAPV-Specific dsRNA into a Plant Expressible Binary Vector

[0183] dsRNA complementary to the IAPV Coat Protein sequence was found to be effective in reducing viral infection and preventing bee mortality when fed to the bees. The following details preparation of a binary vector capable of producing transgenic plants expressing IAPV specific dsRNA.

[0184] Production and Cloning of IAPV Sequences:

[0185] PCR products representing the 433 bp portion of the IAPV Coat Protein gene (position 8977-9410 in the IAPV genome) (SEQ ID NO: 311552) and it's inverted repeat sequence were prepared using the following primers and pDRIVE plasmid as a template.

[0186] For the IAPV Coat Protein sequence

[0187] 1. The forward primer at position 8977 in the IAPV genome, containing XhoI restriction and T7 sequence (“XhoI/T7-CP F”):

5′-GGCTCGAGTAATACGACTCACTATAGGGCGACCAC-3′
length = 35 bp, Tm = 73° C.

[0188] 2. The reverse primer at position 9410 in the IAPV genome, containing EcoRI restriction sequence (“EcoRI-CP R”):

5′CCGAATTCTATATCCAGTTCAAGTGTCGGTTTTC3′
length = 34 bp, Tm = 68° C.

[0189] PCR reaction was performed using 40 cycles of denaturation at 94° C., hybridization at 59° C. and elongation at 72° C. PCR product is a 472 bp fragment (“CPset1”), flanked by XhoI and EcoRI sites.

[0190] For the inverted repeat of the IAPV Coat Protein sequence:

[0191] 1. Forward primer at position 9410 in the IAPV genome, containing BamHI restriction sequence (“BamHI-CP F”):

5′GGGGATCCTATATCCAGTTCAAGTGTC3′
length = 27 bp, Tm = 63° C.

[0192] 2. Reverse primer at position 8977 in the IAPV genome, containing XbaI restriction sequence (“XbaI-CP R”):

5′CCTCTAGACCACCCCTCTACAACAATCTC3′
length = 29 bp, Tm = 65° C.

[0193] PCR reaction was performed using 40 cycles of denaturation at 94° C., hybridization at 59° C. and elongation at 72° C. PCR product is a 449 bp fragment (“CPset2”), flanked by XbaI and BamI sites.

[0194] To avoid any interference with pDRIVE for next steps, a gel extraction of the 472 and 449 bp fragments was performed.

[0195] PCR products “CPset1” and “CPset2” were ligated into plasmid pJET1.2 according to manufacturer's instructions (CloneJET™, Fermentas), which were amplified in E. coli, then selected for Ampicillin resistance. Recombinant colonies with plasmids CPset1 (pJET-CPset1) and CPset2 (pJET-CPset2) were selected, grown and plasmid DNA isolated (FIG. 1).

[0196] The cloned sequence “CPset1” was released by digestion with the appropriate restriction enzymes, and ligated into appropriately double-digested pRNA69 plasmids, according to the manufacturer's protocol (Genaid Biotech Ltd, Taiwan). The pRNA69 plasmid includes the strong 35S CaMV promoter and the octopine terminator sequences for expression of cloned sequences in plants.

[0197] The ligated plasmids were amplified in E. coli, then selected for Ampicillin resistance. Recombinant colonies with plasmids pRNA69-CPset1 were selected, grown and plasmid DNA isolated according to manufacturer's protocol (High-Speed Plasmid Mini Kit, Genaid Biotech Ltd, Taiwan) (FIG. 2). The resulting plasmids were isolated and purified, and inserts verified by gel separation and sequencing of the fragments.

[0198] Binary Plant Expressible Plasmids for IAPV-Specific dsRNA Production

[0199] Purified pRNA69-CPset1 plasmids were double-digested with XbaI and BamI restriction enzymes, and linearized plasmid DNA gel-purified. The cloned sequence “CPset2” was released from pJET-CPset2 by digestion, purified, and ligated into the double-digested, purified pRNA69-CPset1 plasmids, according to the manufacturer's protocol (Genaid Biotech Ltd, Taiwan). The ligated plasmids were amplified in E. coli, then selected for Ampicillin resistance. Recombinant colonies with plasmids pRNA69-IR-CP were selected, grown and plasmid DNA isolated according to manufacturer's protocol (High-Speed Plasmid Mini Kit, Genaid Biotech Ltd, Taiwan). The resulting pRNA69-IR-CP plasmids bearing both “CPset1” and the inverted repeat “CPset2” inserts were isolated and purified, and inserts verified by gel separation and sequencing of the fragments.

[0200] In addition, PCR amplification of the pRNA69-IR-CP DNA with the pRNA69-specific primers further verified the insertion of the CPset2 sequence, the presence of both CPset1 and CPset2 inserts, and the insertion of the two inserts in an inverted configuration.

[0201] At this stage transcription from verified CP-silencing inverted-repeat constructs was performed. pRNA69-IR-CP plasmids pRNA69-IR-CP#1 and pRNA69-IR-CP#2 were linearized, ethanol precipitated, and transcription was performed with T7 polymerase followed by DICER and RNAse A digestion of the transcription products. Transcription using pRNA69 and pRNA69-CPset1 was performed as negative controls (FIG. 3).

[0202] DICER endoribonuclease RNAse III digests long dsRNA into smaller, heterogeneous siRNA fragments. RNAse A is a single strand specific RNAse, which should not cleave the long dsRNA product of pRNA69-IR-CP transcription.

[0203] FIG. 4 shows the results of the RNAse digestions of the transcription products of pRNA69-IR-CP. The pRNA69-IR-CP transcripts (lane 3) were unaffected by RNAse A (lane 4, pRNA69-IR-CP#1, lane 5, pRNA69-IR-CP#2), although the RNAse affected complete degradation of endogenous bee single stranded RNA (lane 2). Thus, the pRNA69-IR-CP transcripts do not contain any significant amounts of single stranded RNA.

[0204] Digestion with DICER (FIG. 4, lanes 6-9), completely degraded the pRNA69-IR-CP transcripts (lane 8, pRNA69-IR-CP#1, lane 9, pRNA69-IR-CP#2), but had no effect on endogenous bee single stranded RNA (lane 6). Lane 7 shows the pRNA69-IR-CP#1 intact after incubation in the absence of DICER.

[0205] Thus, transcription of pRNA69-IR-CP plasmids, constructed as described herein, results in accumulation of accurate IAPV-specific dsRNA.

[0206] Next, the IAPV-specific cassettes of pRNA69-IR-CP (SEQ ID NO: 311533) were released from pRNA69-IR-CP by NotI digestion, and ligated into linearized binary vectors pART27 and pBART within the LacZ sequence, with no specific orientation (FIG. 5). Ligation products were transformed into E. coli and recombinant colonies selected by PCR amplification with OCS and 35S primers. Analysis of the cloned DNA revealed one clone including pBART-IR-CP #2 one orientation and another clone including pBART-IR-CP #1 in the opposite orientation (FIG. 6).

[0207] In-vitro transcription of pART27-IR-CP#1, pART27-IR-CP#2, pBART-IR-CP #1 and pBART-IR-CP#2 resulted in transcripts identical to IAPV-specific dsRNA (SEQ ID NO: 311552), as analyzed by gel electrophoresis, migrating as a 500 bp fragment (results not shown). RNAse A and DICER digestion (FIG. 7) confirmed that the transcripts were indeed dsRNA (ihpRNA), as they were completely resistant to RNAse A digestion (FIG. 7, lanes 4-7: Lane 4=pBART-IR-CP#1, lane 5=pBART-IR-CP#2, lane 6=pART27-IR-CP#1, lane 7=pART27-IR-CP#2), but were completely degraded by DICER (FIG. 7, lanes 13-16: Lane 13=pBART-IR-CP#1, lane 14=pBART-IR-CP#2, lane 15=pART27-IR-CP#1, lane 16=pART27-IR-CP#2).

[0208] Thus, the proper orientation and reading frame of the IAPV-specific insertions of the binary vectors were confirmed by restriction digestion and gel analysis, and the function of the binary vectors, and double stranded nature of the transcribed CP-ihpRNA was confirmed by the in vitro transcription assay. The binary plasmids are now ready to transform plants and plant cells via Agrobacterium-mediated transformation and integration into a plant host genome.

### Example II

### Transformation of Plants with Binary Vectors Expressing Plant Pathogen-Specific dsRNA

[0209] Generation of Transgenic Plants

[0210] Plant tissues (for example, cotton, potato, tobacco, rice, tomato, arabidopsis, rapeseed, mustard, etc) are transformed with the Agrobacterium tumefaciens strain (e.g. C58) comprising the vectors encoding plant pathogen-specific dsRNA (e.g. pBART-IR-CP#1 and pBART-IR-CP#2), and regenerated into whole plants via protocols described for example in “Transgenic plants, Methods and Protocols. (2005) Methods in Molecular Biology, Volume 286, edited by Leandro Pena, Humana Press, Totowa N.J.”. Non-limiting, exemplary transformations are detailed below by way of illustration.

[0211] A. Nicotiana tabacum Transformation

[0212] Plant transformation vectors encoding plant pathogen-specific dsRNA (e.g. pBART-IR-CP#1 and pBART-IR-CP#2, optionally with tissue, developmental or other specific promoters or enhancers) are introduced separately into Agrobacterium tumefaciens (for example, strain EHA 105) following the protocol supplied with by manufacturer [e.g. Pharmacia Agrobacterium cells (product: #27-1535)]. To prepare the Agrobacterium competent cells, a selective medium is inoculated with Agrobacterium tumefaciens and cultured, then recultured in fresh medium. The cells are harvested and resuspended in chilled CaCl₂, and frozen until use.

[0213] The competent Agrobacterium cells are transformed as follows: An aliquot (e.g. 0.5-10 μg) of uncut plasmid DNA in water are added to 100 μl Agrobacterium competent cells and incubated on ice for 30 min. The cells are then frozen in liquid nitrogen and thawed quickly, medium added and incubated for 2 h with gentle shaking (100 rpm). Cells are then harvested, the pellet resuspended, and plated on a selective medium (e.g. BASTA and kanamycin), and grown for 2-3 days. Plasmid DNA from individual Agrobacterium colonies is then digested and analyzed by agarose gel electrophoresis as described herein to verify the integrity of the vector. Individual colonies that contain the desired recombinant plasmid are selected, recultured overnight in selective medium (e.g. BASTA and kanamycin) and the cells harvested and resuspended in medium.

[0214] Agrobacterium-mediated transformation of tobacco cultivars is performed as follows. Pieces of fresh young tobacco leaves are sterilized 1-2 min in 70% ethanol, 5 min in Javex and then rinsed in sterile water for 2 min 3 times. Leaf discs are obtained with a 5 mm cork borer. Leaf discs are then transferred to a dish containing the Agrobacterium cell suspension and grown in a specific light/dark regimen for 2-3 days. The co-cultivated discs are transferred to plates with selective medium (such as TTK plates) and grown for a further 2 weeks. Regenerated shoots are transferred to vessels containing selective rooting medium (e.g. with BASTA and kanamycin). Once a good root system has developed, the plantlets are removed from the vessels, most of the agar removed from the roots and the plantlets transferred to moist potting soil.

[0215] Kanamycin resistant Nicotiana tabacum plants are demonstrated to be transformed by PCR analysis following transformation with pathogen-specific dsRNA vectors (e.g. pBART-IR-CP#1 or pBART-IR-CP#2), using specific primers, for example, T7 primers, or pBART specific primers that anneal in or near the insert regions, to amplify an insert-specific fragment. Function of the transformed binary vectors, and double stranded nature of the transcribed CP-ihpRNA is confirmed by PCR and gel analysis of transcripts in tissue extracts, as described above.

[0216] B. Brassica napus Transformation

[0217] Plant transformation vectors encoding plant pathogen-specific dsRNA (e.g. pBART-IR-CP#1 and pBART-IR-CP#2, optionally with tissue, developmental or other specific promoters or enhancers) are introduced separately into Agrobacterium tumefaciens, following the protocol supplied by the manufacturer [for example, Pharmacia Agrobacterium cells (product: #27-1535)]. To prepare the Agrobacterium competent cells, selective medium (with appropriate antibiotics, e.g. BASTA and kanamycin) is inoculated with a glycerol stock of Agrobacterium tumefaciens and cultured at by shaking at 250 rpm approximately 15 hours, an aliquot recultured to desired density, the culture chilled, cells harvested, and resusupended in cold 20 mM CaCl₂. Competent cells are then dispensed into aliquots and frozen.

[0218] The Agrobacterium cells are then transformed as follows. The competent Agrobacterium cells are transformed as follows: An aliquot (e.g. 0.5-10 μg) of uncut plasmid DNA in water are added to 100 μl Agrobacterium competent cells and incubated on ice for 30 min. The cells are then frozen in liquid nitrogen and thawed quickly, medium added and incubated for 2 h with gentle shaking (100 rpm). Cells are then harvested, the pellet resuspended, and plated on appropriate selective medium (for example, chloramphenicol, gentamycin, BASTA, kanamycin, etc.), and grown for 2-3 days. Plasmid DNA from individual Agrobacterium colonies is then digested and analyzed by agarose gel electrophoresis as described herein to verify the integrity of the vector. Individual colonies that contain the desired recombinant plasmid are selected, recultured overnight in selective medium and the cells harvested and resuspended in medium.

[0219] Agrobacterium-mediated transformation of Brassica cultivars (for example, B. napus cv. Westar) is performed according to the method of Moloney M. M., Walker, J. M., Sharma, K. K. Plant Cell Rep. 8:238-242 (1989) with modifications. Seeds are sterilized, with bleach, detergent and mercuric chloride, rinsed well with sterile distilled water and plated on ½ strength hormone-free MS medium (Sigma) with sucrose in petri dishes. They are then placed into sterilized vessels and maintained in a light/dark regimen for cotyledon growth.

[0220] Cotyledons are excised from 4-day old seedlings by gently grasping both petioles just above the point where they join the hypocotyl. The cotyledons are soaked in BASE solution (4.3 g/L MS (GIBCO BRL), 10 ml 100.times.B5 Vitamins (0.1 g/L nicotinic acid, 1.0 g/L thiamine-HCl, 0.1 g/L pyridoxine-HCl, 10 g/L m-inositol), 2% sucrose, 1 mg/L 2,4-D, pH 5.8; 1% DMSO and 200.mu.M acetosyringone added after autoclaving) containing Agrobacterium cells with the recombinant plant transformation vector. Most of the BASE solution is removed and the cotyledons incubated for 2 days in the dark. The dishes containing the cotyledons are then transferred to cold for 3-4 days in the dark, and transferred to plates containing appropriate selection medium (e.g. MS B5) and grown in a light/dark regimen until shoots appear. Shoots are transferred to vessels containing shoot selection medium, grown until desired length and transferred to vessels containing selective rooting medium (e.g. MS, B5 Vitamins, sucrose, alpha.-naphthaleneacetic acid, timentin and antibiotic, e.g. BASTA and kanamycin). Once a good root system develops, the plantlets are removed from the vessels, most of the agar removed from the roots and the plantlets transferred to moist potting soil.

[0221] Selected Brassica plants are demonstrated to be transformed by PCR analysis following transformation with pathogen-specific dsRNA vectors (e.g. pBART-IR-CP#1 or pBART-IR-CP#2), using specific primers, for example, T7 primers, or pBART specific primers that anneal in or near the insert regions, to amplify an insert-specific fragment. Function of the transformed binary vectors, and double stranded nature of the transcribed CP-ihpRNA is confirmed by PCR and gel analysis of transcripts in tissue extracts, as described above.

[0222] C. Brassica carinata Transformation

[0223] Plant transformation vectors encoding plant pathogen-specific dsRNA (e.g. pBART-IR-CP#1 and pBART-IR-CP#2, optionally with tissue, developmental or other specific promoters or enhancers) are introduced separately into Agrobacterium tumefaciens strain as described hereinabove. The Agrobacterium cells are transformed as described hereinabove, with appropriate selective media, and plasmid DNA from individual Agrobacterium colonies verified and prepared as described above.

[0224] The B. carinata cultivars' (Ethiopian mustard, e.g. B. carinata A. Braun, breeding line C90-1163) seeds are sterilized (in, for example, PPM (Plant Preservative Mixture, Plant Cell Technology Inc.)), and plated on fresh seed germination medium in petri dishes fitted inside vessels. Seeds are then incubated at for 3-4 days in an appropriate photoperiod.

[0225] Brassica carinata plants are then transformed as described by Babic, V., Datla, R. S., Scoles, G. J., Keller, W. Plant Cell Reports, 17, 183-188 (1998), optionally with modifications. Healthy green cotyledons are cut at the point where they join the hypocotyls, the petiole of each explant dipped into the Agrobacterium suspension and then transferred to petri dishes with Whatman No. 1 filter paper covering the regeneration medium (MS pH 5.8, 3% sucrose; 2 mg/L BA, 0.05 mg/L NAA and 0.7% phytagar). The explants are incubated for 2 days, then transferred to petri dishes containing appropriate selection medium (e.g. containing BASTA and kanamycin) and incubated for 2 weeks as above.

[0226] Regenerated shoots are then transferred to shoot elongation medium (MS e.g. containing gibberellic acid) in petri dishes fitted in vessels and incubated for two weeks as above. Shoots are then transferred to selective rooting media and when healthy roots appear the plantlets were transferred to soil.

[0227] Resistant Brassica plants are demonstrated to be transformed by PCR analysis following transformation with pathogen-specific dsRNA vectors (e.g. pBART-IR-CP#1 or pBART-IR-CP#2), using specific primers, for example, T7 primers, or pBART specific primers that anneal in or near the insert regions, to amplify an insert-specific fragment. Function of the transformed binary vectors, and double stranded nature of the transcribed CP-ihpRNA is confirmed by PCR and gel analysis of transcripts in tissue extracts, as described above.

[0228] D. Arabidopsis Transformation

[0229] Plant transformation vectors encoding plant pathogen-specific dsRNA (e.g. pBART-IR-CP#1 and pBART-IR-CP#2, optionally with tissue, developmental or other specific promoters or enhancers) are introduced separately into Agrobacterium tumefaciens strain as described hereinabove. The Agrobacterium cells are transformed as described hereinabove, with appropriate selective media, and plasmid DNA from individual Agrobacterium colonies verified and prepared as described above.

[0230] Arabidopsis thaliana plants are transformed using the floral dip method (Clough and Bent (1998) Plant Journal 16:735-743). Aerial parts of the plants are incubated for a few seconds in a solution containing 5% sucrose, resuspended A. tumefaciens cells from an overnight culture and 0.03% of the surfactant Silwet L-77. After inoculation plants are covered for 16 hours with a transparent plastic to maintain humidity. To increase the transformation efficiency, the procedure is repeated after one week. Watering is stopped as seeds become mature and dry seeds are harvested and cold treated for two days. After sterilization seeds are plated on an antibiotic containing growth medium for selection of transformed plants. The selected plants are transferred to soil for optimal seed production.

[0231] Establishment of Transgenic Plant Lines:

[0232] In general, T1 positive transformants are identified by selection (for example, by BASTA and kanamycin selection) and selfed to produce T2 seeds. These T2 seedlings are selected with the appropriate marker, and screened by RT-PCR for the presence of pathogen-specific dsRNA (for example, the IAPV-specific 433 bp CP sequence). The integration of the expected inverted repeat constructs in the genomic DNA of the T2 progeny is confirmed by PCR, as described above. In some embodiments, plants expressing the pathogen-specific dsRNA in a desired tissue or organ (e.g. nectary, pollen) are selected, in order to increase the probability of the insect's (e.g. honey bee) contact with the dsRNA.

[0233] The 35S promoter can be replaced by a nectar or flower specific promoter, such as the chsA (chalcone synthase) promoter from Petunia hybrida, the Linalool Synthase (LIS) promoter from Clarkia brewri and the nectary specific NEC1 promoter from Petunia hybrida, or other specific promoters as detailed hereinabove. Suggested use of such nectary and flower specific promoters has been, for example, to enhance or produce desirable components for increasing the nutritional quality of the honey that is collected from these flowers. Pollen specific promoters are described, for example, in U.S. Pat. No. 7,303,917, to Robert et al. (the Brassica tapetal oleosin-like protein promoter) and in US Patent Application 20040045053, to Greenland (the maize ZmC5 promoter).

[0234] Self-crossed lines for RNAi transgenic plants are then selected in the T3 generation by segregation analysis using the selective antibiotic markers. Nectar, and/or pollen from the transgenic plant lines, containing the pathogen-specific dsRNA, is provided in feed to the insects prior to, and during experimental infection with the pathogen(s), in order to assess the efficacy of the plant expressed dsRNA in retarding, reducing and/or preventing infection or severity thereof. When effective pollen and/or nectar-producing plants are selected and propagated, they are then are used for bee feeding trials. (Minihives experiments and field trials under controlled conditions).

### Example III

### Large-Scale Field Trials of Viral-Specific dsRNA for Prevention of IAPV-Associated Disease of Honeybees

[0235] In order to test the effectiveness of providing plants expressing insect pathogen-specific sdRNA of the present invention in the control of mortality in honey bees due to virus infection, the transgenic plants expressing IAPV-specific dsRNA are provided in the vicinity of bee hives, under field conditions, and resistance, tolerance to and mortality from IAPV infection were monitored. Paramaters monitored are higher adult bee population as measured by: visual inspection and total weight gain, which has been shown to be the best proxy to the total honeybee activity in the hive. The field trials are conducted basically as described in PCT IL2008/001440, which is incorporated herein in it's entirety by reference. PCT IL2008/001440 has disclosed that parameters of colony robustness are strongly affected by direct feeding of the IAPV-specific dsRNA.

### Materials and Methods

[0236] Small Interfering RNAs (siRNA), specific for IAPV and other known honeybee viruses are measured at least two time points—before IAPV active infection and after 14 days, to verify the presence and monitor concentration of siRNA in the treatment groups.

[0237] Visual inspection—frames of adult bees are assessed by two independent qualified and blinded inspectors for their percent coverage by adult bees. This assessment is done three times; at the outset, before placing the honey super (mid-point) and at the study conclusion, and results are compared between treated and control groups.

[0238] Total Weight Gain—weight gain from onset to midpoint and from onset to end-point. The total weight gain (weight of the full box and its full supers at the midpoint of the end point minus weight of the full box at the study onset) is measured.

[0239] Additional parameters that can be assessed to monitor the effect of the transgenic plants on basic parameters of bee colony health are numbers of capped brood, numbers of bees in the hive, returning foragers and honey production in exposed and control hives, in the absence of infection with IAPV (to assess safety) and following infection.

[0240] The bee hives from the two treatment groups are overwintered together according to regular beekeeping practices, and are then moved to two different flower patches:

[0241] 1. Treatment flower patch growing a transgenic rapeseed variety expressing IAPV-specific dsRNA in its nectar.

[0242] 2. Control flower patch growing either a non-transgenic rapeseed of the same variety, or a transgenic rapeseed variety expressing non-relevant dsRNA in its nectar.

[0243] At the end of the exposure both groups are infected with IAPV virus inoculums, and the hives moved together to yet another flower patch for an additional period of nectar collection.

[0244] Feeding schedule: Monthly feeding with sugar solution are given from study onset in fall (October) until Spring (March-April). When honey flow season begins all hives are supered (i.e. a honey-super box are be added to all hives with a queen excluder between the brood box and the honey super). The end point analysis is at June-July (midsummer) or at least one month after the supers are put on top of the hives.

[0245] Number and Source of animals: 72 hives, 36 hives in each treatment group. The hives of each group are marked by a different color mark on the hive.

[0246] Inclusion criteria: Prior to the commencement of the trial all hives are equalized. To equalize, all frames and bees are removed from the colonies, and are grouped by content (brood, honey/pollen, or empty frames). Frames are then randomly returned to the brood nests, and each hive body receives 5 frames of brood (at least 10% brood at least one side of the frame), 2 frames of honey (more than 50% honey on both sides of frame), and a mated queen. All queens are “sister queens”. Equilibrated hives with at least 6 adult bee's populated combs are included in the study. At time point zero (outset), hives are visually inspected by two assessors to verify equalization in terms of bee population, and the absence of clinical symptoms of disease. A hive that does not have at least 6 populated combs, or found queen-less is not included.

[0247] Exclusion criteria: Hives that are found during the study with less than 1 side of 1 comb populated with adult bees (bee's count of less than 10) are considered dead. A hive that is declared as dead according to this parameter is not be fed anymore. The dead hives are weighed and inspected formally as close as possible to the time of death.

[0248] Analytical Methods: Data collected during the study includes: frames coverage by adult bees, total weight of hive (plus super at endpoint), siRNA of relevant viruses and RT-PCR for virus detection.

[0249] Visual Inspection: Observers estimate (on a scale of zero to ten) what proportion of the side of each frame in the bottom box (and at the end point analysis also in each frame in the honey-super) is covered with bees.

[0250] The scores of the two inspectors are averaged and calculated to % coverage (score of 20 per comb=100%).

[0251] % coverage is transferred to number of bees per comb, according to the numbers set by Burgett and Burikam, 1985:

[0252] 100% comb coverage at the bottom box=2,430 bees, 100% coverage of a super comb=1,570 bees.

[0253] The numbers are summarized to produce an average number of bees per hive.

[0254] Total Weight Gain: Each hive is weighed to set a starting weight. At midpoint total gross weight of the brood box is measured again, and total Weight Gain is calculated by subtracting the starting weight from the current weighing.

[0255] Each empty honey super is weighed and numbered prior to adding the honey supers to colonies. The investigator supers (add honey supers) colonies a week after the last feeding is done. At the end of the trial (at least one month later), the entire hive (deep brood supers and honey supers together) are weighed in the field. The total weight per hive at the end-point is calculated as the total gross weight as measured at end point, minus the weight of the relevant empty honey super. Then a Total Weight Gain is calculated by subtracting the starting weight from the end-point total weight calculated.

[0256] RT-PCR—Detection of Viruses (IAPV) Presence

[0257] Extraction of Nucleic Acids: Total RNA are extracted from the preserved bees using the Tri-reagent method (Sigma, St. Louis Mo., USA). Briefly, RNA are extracted by liquid phase separation and precipitation, following by re-suspention in nuclease-free water. RT-PCR: For IAPV expression analyses and for bee Actin internal controls measured amounts of RNA are subjected to one-step RT-PCR using RT-PCR System (Verso 1-Step RT-PCR Kit, Thermo scientific). RT-PCR are done with the following specific primers:

| | | Product |
|---|---|---|
| Primer name | Sequence | size |
| IAPV For (708) | 5′ AGACACCAATCACGGACCTCAC 3′ | 137 bp |
| IAPV Rev (780) | 5′ GAGATTGTTTGAGAGGGGTGG 3′ | |
| -Actin (90111) | | |
| For Bee | 5′ AGGAATGGAAGCTTGCGGTA 3′ | 181 bp |
| -Actin (90121) | 5′ AATTTTCATGGTGGATGGTGC 3′ | |
| Rev Bee | | |

[0258] Primers 708 and 780 amplify a region corresponding to nucleotides 8660-8997 in the IAPV sequence (GenBank: EF219380.1) and it are not within the IAPV-specific dsRNA target sequence.

[0259] Samples for virus presence analysis are taken at study outset and before IAPV introduction. Samples are taken from each study group. Samples consist of 10 bees randomly sampled from 6 hives in each group (60 total per treatment group). The bees are put into RNAsafe (Ambion) to preserve the RNA from degradation, or are immediately frozen.

[0260] Bee samples are kept in a −80° C. freezer until processed.

[0261] siRNA—Activity

[0262] RNA extraction: RNA is extracted using Tri-Reagent (Sigma, USA) according to protocol provided by the manufacturer. All samples treated with DNaseI and resuspended with loading buffer (90% Formamide, 0.05 Bromophenol Black, 0.05% Xylene cyanol) prior to loading on gel.

[0263] Gel electrophoresis and Blot: 10 μg of freshly prepared RNA are measured using the spectrophotometer and are loaded on 12% Acrylamide gel acrylamide:Bis acrylamide ratio) in denaturation environment (gel contains 7M Urea). After electrophoresis samples are transferred to positively charged nylon membrane using electroblotting method.

[0264] Hybridization and signal detection: In order to verify processing of dsRNA into siRNA. Membrane hybridized with freshly prepared DNA probe of IAPV segment, homolog to the IAPV-CP region. This is made using DIG PCR probe preparation Kit in DIG easyhyb solution (Roche) according to manufacturer protocol. The membrane is washed twice with 2×SSC/0.1% SDS than washed for stringency with 0.1×SSC/0.1% SDS in 65° C. Membranes are further washed using DIG Wash and Block Kit according to manufacturer protocol. Detection is performed using CSPD-star substrate. Positive control are 21nt DNA primers corresponding to the CP hybridized sequence.

[0265] Description of procedures for sample selection, preparation, and storage: Samples for virus presence analysis are taken before IAPV introduction (are marked as time 0) and 14 days after IAPV introduction date (are marked as time 14). Samples are taken from each study group. Samples will consist of 10 bees randomly sampled from 6 hives in each group (60 total per treatment group). The bees are put into RNAsafe (Ambion) to preserve the RNA from degradation. Bee samples are kept in a −80° C. freezer until processed.

[0266] Active Infection: A virus mixture that originated in bees taken from the local area where the experiment are set up are used in the study. The virus mixture is tested to verify presence of different viruses. Virus purification is according to the technique described in Maori et al. 2007a and Maori et al. 2007b. The virus concentrations are measured by a protein assay, and aliquots of the virus at the required concentration and total amount are marked and stored individually. Feeding is in sugar syrup.

### RESULTS

[0267] Content of IAPV-specific dsRNA in the transgenic plants as measured before and during the trial verifies the available sources of the dsRNA. RT-PCR measurement of quantities of the IAPV specific dsRNA in the bees further verifies effective delivery of the nucleic acid agents to the bees. Significantly greater weight gain and/or bee colony health by visual inspection of the hives provided with transgenic plants expressing the IAPV-specific dsRNA indicates an effect of the dsRNA. Correlation between the amount of the nucleic acid delivered, reduction in disease symptoms and tolerance to infection further indicates effective resistance to IAPV infection and tolerance of its effects in the infected bees.

[0268] After establishing that the transgenic plants alone did not make any difference relative to the untreated control, control colonies receiving virus without exposure to the transgenic plants, and colonies infected with the receiving virus and also exposed to the transgenic plants are compared to test the efficacy of the transgenic plants in directly preventing the IAPV symptoms. As Colony Collapse Disorder (CCD) is characterized by thinning of the affected colony due to reduced numbers of returning foragers the effect of the transgenic plants on numbers of returning foragers is monitored in the virus-infected colonies, over time.

[0269] Another important parameter characteristic of CCD is a reduction in the total number of bees in the hive, which is easily monitored in the test and control colonies, over time. Further, honey production, and flight activity data of a hive reflects not only the numbers of bees in the colony, but their overall health and robustness. Reduction in viral infection, and enhancement of overall health of the colony indicates effective delivery to the foraging bees, and dispersion of the plant-derived pathogen-specific dsRNA within the hive.

[0270] Although the invention has been described in conjunction with specific embodiments thereof, it is evident that many alternatives, modifications and variations will be apparent to those skilled in the art. Accordingly, it is intended to embrace all such alternatives, modifications and variations that fall within the spirit and broad scope of the appended claims.

[0271] All publications, patents and patent applications mentioned in this specification are herein incorporated in their entirety by reference into the specification, to the same extent as if each individual publication, patent or patent application was specifically and individually indicated to be incorporated herein by reference. In addition, citation or identification of any reference in this application shall not be construed as an admission that such reference is available as prior art to the present invention. To the extent that section headings are used, they should not be construed as necessarily limiting.

### LIST OF REFERENCES

### Additional References are Cited in the Text

[0272] Araujo R N, Santos A, Pinto F S, Gontijo N F, Lehane M J, Pereira M H. (2006) Insect Biochem Mol Biol. 36(9):683-93.
[0273] Baulcombe D. (2004). RNA silencing in plants. Nature. 431:356-63.
[0274] Carter and Thornburg (2002) The nectary-specific pattern of expression of the tobacco Nectarin I promoter is regulated by multiple promoter elements. Plant Molecular Biology 51: 451-457,
[0275] Chapin et al. (2000). Consequences of changing biodiversity. Nature. 405:234-42.
[0276] Chen and Siede (2007) Honey bee viruses. Adv Virus Res. 70:33-80.
[0277] Chen et al. (2007). Nosema ceranae is a long-present and wide-spread microsporidian infection of the European honey bee (Apis mellifera) in the United States. J Invert Path.
[0278] Cox Foster et al. (2007). A metagenomic survey of microbes in honey bee colony collapse disorder. Science._{—}18(5848):283-7
[0279] De Graaf et al. (2006). Diagnosis of American foulbrood in honey bees: a synthesis and proposed analytical protocols Lett Appl Microbiol. 43(6):583-90
[0280] Fernandez et al Plant Physiol. 2009; 151:1729-40
[0281] Gordon and Waterhouse (2006). Small RNA viruses of insects: expression in plants and RNA silencing Adv Virus Res. 68:459-502
[0282] H. T. Horner (2007) Amyloplast to chromoplast conversion in developing ornamental tobacco floral nectaries provides sugar for nectar and antioxidants for protection. American Journal of Botany. 94:12-24
[0283] Kram et al, BMC Plant Biol., 2009; 9:92
[0284] Myers N, Mittermeier R. A, Mittermeier C. G, da Fonseca G. A. B, Kent J. Biodiversity hotspots for conservation priorities. Nature. 2000; 403:853-858
[0285] Nature. 2007 Feb. 22; 445(7130):816-7
[0286] Pest Manag Sci. 2007 November; 63(11):1051-7. Incidents of bee poisoning with pesticides in the United Kingdom, 1994-2003.
[0287] Pettis et al. (2007) Am. Bee Journal 147: 595
[0288] Pimm S. L, Raven P. Biodiversity—extinction by numbers. Nature. 2000; 403:843-845
[0289] Pounds et al. (2006). Widespread amphibian extinctions from epidemic disease driven by global warming Nature; 439:161-7.
[0290] Samatarau et al. (2000). Parasitic mites of honey bees: life history, implications, and impact. Ann Rev Ent. 45:519-48
[0291] Science. 2004 Mar. 19; 303(5665):1879-81
[0292] Science. 2004 Mar. 19; 303(5665):1747.
[0293] Science. 2004 Sep. 10; 305(5690):1632-4.
[0294] Tenllado F., Diaz-Ruiz J. R. (2001). Double-stranded RNA-mediated interference with plant virus infection. Journal of Virology 75: 12288-12297.
[0295] Tenllado F, Llave C, Diaz-Ruiz J R. (2004). RNA interference as a new biotechnological tool for the control of virus diseases in plants. Virus Res. 102:85-96.
[0296] Timmons L, Fire A. (1998) Specific interference by ingested dsRNA. Nature. 29; 395(6705):854.
[0297] Timmons L., Court D. L., Fire A. (2001). Ingestion of bacterially expressed dsRNAs can produce specific and potent genetic interference in Caenorhabditis elegans. Gene 263:103-112.
[0298] Trends Biotechnol. 2005 August; 23(8):388-94. Effects of biotechnology on biodiversity: herbicide-tolerant and insect-resistant GM crops
[0299] Turner C T, Davy M W, MacDiarmid R M, Plummer K M, Birch N P, Newcomb R D (2006) RNA interference in the light brown apple moth, Epiphyas postvittana (Walker) induced by double-stranded RNA feeding. Insect Mol Biol. June; 15(3):383-91.
[0300] WO/2003/004649, method of interfering with a virus infection in plants.

The application's sequence listing, which the Patent Office published only in electronic form, follows.

SEQUENCE LISTING (311553 sequences)

SEQ ID NO: 1 - DNA, 43 bp, Artificial sequence
  Single strand DNA oligonucleotide
ctaatacgactcactatagggagacagctaacgagcccgtttc

SEQ ID NO: 2 - DNA, 45 bp, Artificial sequence
  Single strand DNA oligonucleotide
ctaatacgactcactatagggagaccatagtaatccatccactac

SEQ ID NO: 3 - DNA, 44 bp, Artificial sequence
  Single strand DNA oligonucleotide
ctaatacgactcactatagggagactggtctttaacgaatggac

SEQ ID NO: 4 - DNA, 43 bp, Artificial sequence
  Single strand DNA oligonucleotide
ctaatacgactcactatagggagagtgggcacgctatggcaac

SEQ ID NO: 5 - DNA, 43 bp, Artificial sequence
  Single strand DNA oligonucleotide
ctaatacgactcactatagggagactcctggacagtccgctag

SEQ ID NO: 6 - DNA, 43 bp, Artificial sequence
  Single strand DNA oligonucleotide
ctaatacgactcactatagggagaatcagttgacggtaaacgg

SEQ ID NO: 7 - DNA, 43 bp, Artificial sequence
  Single strand DNA oligonucleotide
ctaatacgactcactatagggagagcttgatgggcttatctcc

SEQ ID NO: 8 - DNA, 42 bp, Artificial sequence
  Single strand DNA oligonucleotide
ctaatacgactcactatagggagagcaatgcgatttccacgg

SEQ ID NO: 9 - DNA, 46 bp, Artificial sequence
  Single strand DNA oligonucleotide
ctaatacgactcactatagggagactgaatgttacaagcagatggg

SEQ ID NO: 10 - DNA, 44 bp, Artificial sequence
  Single strand DNA oligonucleotide
ctaatacgactcactatagggagaaccaggagtatctggatgac

SEQ ID NO: 11 - DNA, 266 bp, Varroa destructor
attttattcaattaaagtatttaccaattggaataaagataggattaatgataatttttttaagtttaagtggaatacctccctttataggatttatttctaagataactgttttgttgatgtattttgagaatcaaaaaataatttttttaattatattattagtatctgtaataagaatatatatttatataaattattttatgaagagtttattttttataagattaggttataataaaaataaaaatataggaataagaaga

SEQ ID NO: 12 - DNA, 99 bp, Varroa destructor
atacctcaaatgtatccttcatattgagtattaattcatatagtatttatattgaattattatataataataatttattattattttatatttaagtaa

SEQ ID NO: 13 - DNA, 501 bp, Varroa destructor
ggccaatcccgattccggcgacacaaagaaattacaagaagctatagaccgttttcatcgagccggaagatggattaagaaaaaatttcgagatctattcatgctatgttcgggtaaacagcgcaaccagatctcggatcaaacctacgccgaagacctggacctcgacacaggggtcattattatggatggacaggttattaagaaggatagccccacgcccgaactcatcgatgggttggatgttggttttcaagctgataagcaacaggcgcaggtgattgtaatgcaaaagcttaaaaacaattcccgacctatcattggcgactcaaaggaatttagcaacaaagttcatccaggccccgacttttgcctggtaaagccgaacgacaacggcgaaggcctcgtgcaagacaccgagcttggggcctccacgccgctcagctcgccttcctgtatagttgaacagcctctgtctcacgacagtgtgggcctgccacc

SEQ ID NO: 14 - DNA, 339 bp, Varroa destructor
ataactattataatttttggatgatcaaatttttttaataaaataataaagcatttagtacctgaagggacacctatttatttagcctcctttatggtattaattgaaagaattagtaatttaattcgtcctttaactttggcagtacggttagtagctaatataattgctgggcatttattgttagttttgttatcaagattaggagagatatcaataatatattatatatttactttgcctttaataattagcttgacagtattagagatatttgttactattattcaaagatatgtatatataattttattggtactttatttaaatgaagtttaa

SEQ ID NO: 15 - DNA, 22 bp, Artificial sequence
  Single strand DNA oligonucleotide
cacctgaaaacaacttacctac

SEQ ID NO: 16 - DNA, 20 bp, Artificial sequence
  Single strand DNA oligonucleotide
gtatcttgccttaccatcac

SEQ ID NO: 17 - DNA, 25 bp, Artificial sequence
  Single strand DNA oligonucleotide
ggaaaagatgagaatatggaagaag

SEQ ID NO: 18 - DNA, 23 bp, Artificial sequence
  Single strand DNA oligonucleotide
ccagttacccttgtttgtgtagg

SEQ ID NO: 19 - protein, 561 aa, Nosema ceranae
MIERGIMEKIKNLLTEDEVEAEANSGRGILSIFRIAKVERRMFWLMTLMFSLISFIYSVGRVLKDAAVLSRQMPLSINCLKSFVILPVTLVCVGLIQKSTLSYSFTKIFDGALLIFAFLYIILGLVLLPYSHLFQLDSYFFRDLFSDGKCVVRGYDALLSLALVFNEWTSSLVYIVSEMFGNLVLSYFFLTFANSLTTPGQSARFIPLFYVFSNISLFLSSQVTELFTRYRSKLTFSEAEFLYNGFFVFSGVLVIVIFLIKKYLERNVTNKPLFVVKSVKKKGPKVKVGFAEGLKEMMASKLLLNISLTVMFYGISTNLIESTFKSGLVKGAEELNENTKSYSMGYNSFEQKIASITVIILLLSPFPKLIQTKGWIFVAIACPLITLFAVVSVCGLAFYNYPATNNDTNFFLNSLCATPGKSFIKLENVLGCVAVALMKVAKYGSFDISKEAISMQIDSSLRARYKGIFDGVFGKLGKSLGSLFVWIMGYAFQTRDFRKLAPLCISVIVFFVIIWIYSVIYLNKKYKESVVSNLPIDVDLFASKLLDNKKEEEIDVSVLVN

SEQ ID NO: 20 - protein, 486 aa, Nosema ceranae
MTKTKKFPKVKILLSLTFLMACVINTLLEFYREIVIMTKQIPSSLYYIKLFFSLPIICLMMSYVQKALNVYSILSIVNFIIFGFIGIFFLIGSLLIPFEYKIQKGSQWALDIFCDGKMSVRSLMGLSPFLYMYSEWISTLCYILSELWSTLVVGFALYALANHACTEDEMKEIVPNFSTITAISMIISVAFIYIKDELANILPAGLHDKIDGSSLFFLILSFVTTLIYFLKSYIPLKTKEIKETINKEEDKTTSSFDLLQSKFLRNMCAAALIYAINAGFIDMSLKNSLSTGSRINNMPPKDYSQKYLVTTSLTISAVSLFYNFVIRGNRIASRIFYLSIASPIAAIFFTALISGLSFYNLRTAPSVLRINLENWCATIGFAFSKITKYVLFDLAKEMLSMRVPVKYRYKFKSFYDGVCIKIGKSIISLYGTFLTFIEIPDIRQVSYVSFIFLIFANFLWIRSVCYLSKKYNESIEQNSEIDVDFN

SEQ ID NO: 21 - protein, 567 aa, Nosema ceranae
MSVDNSKVLQNNENSALPTEDEIEYEASNGSGIYSLIRVAKVERKMFWIMAAMFFIISFIYSVARVLKDAAVIGKQLPASIFFLKFVIILPFSFISVGIIQKALDKYPFTKIFDVTLIVFAVAFTILGSLLLPFSDYIQIQPFWAKDIFADGKAVARSTDFLFSIALVFNEWTSSAIYVLSEMFGSLILSYLFMTFANGLSTPGQSARFVPLFYVGSNLALLLSGMINYFYSVSKSKMSYVAAERFFNGFFCLSGILCAVIYLLKKYLENNVTSKPMFVRKTFTKKKSKVKVGFVDGLIEMSKSKLLLNMSLVVLFYAVSTNIIESAYKSALAVGANETGEAKSTYASIYTSIEQSGVAVIVMILLLTPFPRLIKTKGWITIAILCPIITFFSAFGTFVLAYLNFPITNKEDNIFDIYRLPSTDSIIKLENIVGVICVSLMKISKYAAFDITKEALSMQIDGSIRAKYKGIFDGVFGKLGKSFGSVYGFTITTLLGTRDVRRGAPISLCVLILFCLIWFYSVFYLNRKYKESVENNAPIDIDLFTSSKVKAPSSEPTVATKSVTTEE

SEQ ID NO: 22 - protein, 546 aa, Nosema ceranae
MSVINETPENNLPTEDEIDQLANSRTGLLSYFKVAKVEMPKFFILGIMFGLINFVYSFLRILKDLFVMVRQDQNSIMFMKIFYVLPISFASVILIQWLMQNKPVSSIFNLFLIIFTAFFFGLGAIFLFEEKVTPSSFLFRDIFADNKGALKGLNFIKYFLITANEPVSTCIFIIAEMWGSLLMAYLYMSFLNESCTIRQFTRFLPPFYIIANLALLVSGLASSSFRELRKGFSYEQNQLLYSSVFIAMGGICLILMYMKYYFENKIMSVPIFIPSNTIKKKQKVSVGFSEGISIMMKSKLLMSLCIIVFFYNITFNLIESVYKAGIKAASKSLGLEVGEYSGKFNTIDQILVAVTVITLNLSAFSTLVESSGWITMGLLTPLFLLLGSIIVMGASIYNSAIEGLAFSWISVFFKKMSYIYTIENYSGMFFLAFIKVLKYSAFDICKEKMGMRIDPAHRARFKSVYDGIFNKLGKSIGSLYGLAILVALDTDNVRKGSPITLTIAIILIYIWIRAIIYLAGAYNVSIKNNTSVDIDLIKDDKKENAE

SEQ ID NO: 23 - protein, 597 aa, Encephalitozoon cuniculi
MNEVENNNHSFPREDIPTEDEIEEEANSRQGILRYFRVARAEYTKFALLGLMFGIIGFIYSFMRILKDMFVMVRQEPTTILFIKIFYILPVSMALVFLIQYMLGTKTVSRIFSIFCGGFASLFFLCGAVFLIEEQVSPSKFLFRDMFIDGKMSSRSLNVFKSMFLTLNEPLATIVFISAEMWGSLVLSYLFLSFLNESCTIRQFSRFIPPLIIITNVSLFLSATVAGAFFKLREKLAFQQNQVLLSGIFIFQGFLVVLVIFLKIYLERVTMKRPLFIVSSGSRRKKAKANVSFSEGLEIMSQSKLLLAMSLIVLFFNISYNMVESTFKVGVKVAAEYFNEEKGKYSGKFNRIDQYMTSVVVICLNLSPFSSYVETRGFLLVGLITPIVTLMAIVLFLGSALYNTSMEESGLGIVNGLFPGGKPLYVLENYFGVIFMSLLKITKYSAFDICKEKLGMRINPTYRARFKSVYDGIFGKLGKSIGSIYGLLMFEALDTEDLRKATPITAGIIFIFIVMWVKAIIYLSRSYESAVQHNRDVDIDMTLMFEALDTEDLRKATPITAGIIFIFIVMWVKAIIYLSRSYESAVQHNRDVDIDMT

SEQ ID NO: 24 - protein, 600 aa, Encephalitozoon cuniculi
MSEIGSSVPVNENRPLLTEDEVEAQANSSTVWPLSRIRVARCEWKLWGSLAFIFGASAYIYSFSRVMKDSFVLSRQLPIAISFLKTCFVLPISVIVTGIVQKLLVTRTISKVFDYTLIAFSFLYLLIGMVLLPFAEKIQPGLYFSRDIFADDKMAYKGFEFLFAIFLIFNEWTTSFVYVCAELFGSLVVQFMFLAFANEALTIRQSTRMMPLFYVISNILLLLSSESTSFYSKKVREWDYKKTCLITNSFFAVFGAMIAVTYLVKKYAENTILKKQLFIRTEGVAKKKGRKSSAGFSESMKLMAQSKFLVAMVMNALFYYAGTNLIESSWKNGISVAADANNMEKRAYSASIVSGEQRVVGALVAIILLTPISTLVQTHGWITMAIVPPLVTLVSSLVIFGSAFFNYSNYPEGKTSVILSSLVKGYKPNFYLECNIGIYCVSGMKIAKYAFYDISKEAISLQIDPLYRPRLKAVYDGLCGKLGKSIGSLYAMFWSVMGYNDVRAAAPITLGMWLIISPIWIYSVIYLNRKYNQSIQTSSPIDLDLFFWSVMGYNDVRAAAPITLGMWLIISPIWIYSVIYLNRKYNQSIQTSSPIDLDLF

SEQ ID NO: 25 - protein, 598 aa, Encephalitozoon cuniculi
MSTFQLSASSKDSYLFRTEEELEEEVYGKTGFFKHIRVARNEWPRVLYLSLLFGVITMVHTIMGNLREMVLMGRQDPMSMFFIKSIFLPPCSLLFIWAIQLGLSLFTPSKMFDITLILFSGCYILFGLVVWPLKGYIQKDFYWSRDIFGDGKMESLRIHFLYPVFLVFNEWTSSFLFLCSEMWGALVVSYFFNIFANEVSTRRQSQRYISVYNISNAISIFLSAVLTLVFNKWRDGVAFETKELGFRILILVLGSTVIGILALKKYMEREILPAPVFLIREVEKTSTERRKLKLDEARQTLSRSKLLIAISLNVLLYGVTSTLVEATFKSGIAAGARYTNNSKETFANFYNGLEQIIIAISLLVVINTPYSALVKKGGWKYLASLPIVIAMFSLFSVFLIAFYNVGADSGGNVLFGSLFKNRMPTFILENTLGLVTNASMKIGKYLGADVSKEAISMQIDPLYRAKYKAVYDGLCGKLGKSLGSIICTVMTGLWDITDIRRVSSVSGILIVIIIAMWYFILKYLSRQFQAAVEANTYIELDEFVMTGLWDITDIRRVSSVSGILIVIIIAMWYFILKYLSRQFQAAVEANTYIELDEF

SEQ ID NO: 26 - protein, 589 aa, Encephalitozoon cuniculi
MSENREIDATDRRDKTFDKEKLRPHVYSSVAGGMRSTSGDTKAVLLFSLLFALLSYIDAFLYVLGDMVMMNTQMPSSILFIKSVLVLPMTFFFIVIVQKGLRYLSQPRMLEVILIISSVFFLLFGFVIWPYCKRLQPDFFWSRDIFSDGKMKTRHLDFFFPIFLVFSEWASTMLYLVAELWGSLIISFMFFSRAIHQCTEAQVKKFLPTISLISAVVFLSSGLLTKSLNSRRDALPYHEKERLFSQVFIVTSALTVMSAITSFFTDRALAKDDPRHKGKKEHKVRKIGFAGSLKMMQKSRFLRAMTESVVAASVCSNIFEAIYRGGIVLGAVQSSTSKSSYMNRLNAMAQIITSIFLLVMFFKPATHLIERRGWFPVAITAPIVAIITLVLFFPMVFFNNITEGDLIASGEEYVGSFVLENYTGMFLTTIIRISKYCFFDVAKEAASIRVSPVHRHSFRGIHDGLGINIGKTIGSVYCTMFLTTIIRISKYCFFDVAKEAASIRVSPVHRHSFRGIHDGLGINIGKTIGSVYCTLVTVVFDVRDVRNVVSVSTVFVGVFCVIWIRSILHINKKYKESIERNDFINVELA

SEQ ID NO: 27 - DNA, 1314 bp, Nosema ceranae
atgaaacgaaaaacagaaatatttattgctattacagtagtcactgcagtgacatgttacttatttaaaaaaataataaatagacaaaagtctgattatacatcaataaaacaggaagcagataaatattttatacaagaagattataaaaatgctattctgttgtacactaaatgtaaatatatgaaaagtgatgctgaaattcttactaaaattagtctctgtaattatttcttaaaaaattatcaagaagttataaataattctttatttaagacaaataataaagatctaataaaaataagatctgaatgttacaagcagatgggaaataaaaaaaaatttcttaaggatttagcactttatgaaacatttgctaataataaagaagtccaagatgaaattatgcagactgttaaagaaatttgtgaagaagaagtgaatgagtttattgaacaagaaggtttaaaaattaataaagaagatgtgctaagaggacttgtttcaataaaaaatataaatgagatttatgatgcatttggaggtaaatctaagaagtttaaattttctaatgatgaaaaggaagtgttaaatcttcttaatgccattattttacacctaaaaggaaaaaaagaacaggcaattcttttattagaaaaatctacttataaatacagtatcttgtatagagcatattttcttacattgaagaatgaatatatttcatcttcattgcctttagatgacgagattactacgctttacttgtattctaagatttttaaagataaatctgatacttaccttaaatctgctatagataaatcagtagatctacctattgaacagaaagactttctgtacgtagatcttcttgtattttacatttctaaaaaggatgttgaaaaagttaatgaaacaattaataatttaaaagagactcttacccccactttattggaacttattggagaatattatttaaaaagtggaaatcactctaaaatgttagatctattatctagtcatccagatactcctggtaaattacttttaacggcactttatgcaataagtattgataagaaaaaggatgctatagaaattttatatagaagtatatcagaatattcatcttattttaaatcttatttgtatttaggaaatattttaataaatgatgacttaaatgaatgcaggaaattgtttaatacatcacttcaatattgttgtaattctgatgaggtttttattgttaagcagtcacttattttaatagaagtacatgaatacatcaaagaaaataaaatataa

SEQ ID NO: 28 - DNA, 846 bp, Nosema ceranae
atgaaatctttctacaaaaaaataaaaagttatttattcaaatctgccattaatacatcttttgatacttttaatttagaaaatgtaagcattactagcttaaatacgtacaccggtgttaaaaccgaaatatcaaaaaccgtatcaccacacttccagatttctcatgtctcttctatgggcgcagatttcgacataaaacagacatacgccacgttctgctttaacaatcttttgctacaaacgagcatagaccaagacaaaatatttagaataagaggtacccacatgtttaaaaatctacttactaaattccatacagtaattggtagaagtaaagatatctttacacaaatagaggtagacataaaaaataaatacaataatatgtgtataaaaatgatacagccagctattaaaggtgcttcatgtatatacgtgggtaattatatgcagcagctaggagtaattagtcttggtggggagattattaaagctgatgaatacattggactatcttttgtagggagatatgaagggattggttctatttctactatatcacttcagcagtttaatacactgtctatagattattacaagacattgtcttctatttgtgacgtaggtattaaaatatcaactgatagggaaaaatcagttaattatggattaggagttaaactacacagtaaaaaaggagaaattatcggatgtgtagataacaatcatattttaagcataatttataatgataaattatctgaagggttaacacttaatttgagttgtagatttggtaagaaagtatttgattatggctatgggtttatttatgaattttaa

SEQ ID NO: 29 - DNA, 1734 bp, Nosema ceranae
ttaagaatttttcaatattttttttgcttgttctaagtcataaatttttttagtcaaatatgactttaaaatctcttttgtttcatctgttacttgtttgtactttaaaaattgttgaatttcaattttaaattcggcacaatttttttcaatttcatcttttttcgaattttcttcggcttctcgtatcatttgcgaaatttcaccttcatttaatccacttgaaggcacaatttcgatttcttgcttttttttcgttatcccgtcttgcgcagatactttgtatattccgttagcatcggcttcaaatgtaacatctatctttggaatacctgcaggtgctttaggaatgtttttgagctttatagctcctaaatatttattgtcttttaccatctttctttctccttgatatattctaatatctacttcggattgattatcttcagaggtagaaaaactgtgtgtttccttaaatggaatagtagaatttctatgaattatcttattaaaaatcccgcccaaaagctctatacctaaactcaatggtactacatccaataataggacatcttttatttttccttctaacacgcctgcttgtagagcggcccctttagcaacagcttcatctggattaatatttgtagaaggctcgataccaaaaatcttcttaacaagttttctaacatacggcattcgtgtcattccacccacaagtataacgtgtttaatatcacttttagttatattggcatctctaatagctttaagacaggggtttattgttttgtctattaacttttttgtaattttttcaaattcgtcgcgtgtaattacctcttttaagtgataattctttttactatcgttataaatatacggaatattaatttcagacgaaagattagacgacagttcttttttcattttttccgctgcttctttaattctattataacaagaatcgtgtttaagtaaatcaattcctgttctacttttaaatttttcattaatataatctactaaagtattatccaaatcttctcctcctaaaaaagtatttccgttagtagattttacatgaaaaataccattatctaattctaatatactaatgtcaaaagttcctcctcccagatcataaacagctataataccctgtgcagacttgtcaagcccataagcaagtgctgccgcagtaggctcattaatcactctaagcacttgtaatcccgcaatccttcccgcatctttagtagcttgcctttgcatgtcatcaaaatatgcgggcactgttataacagatcttaatactttagaatttaaaaaattctctgcggcatttttcatttttgacaaaataaatgcaccaatttgtgcaggagaatatttcttattgtcaatttttatccaaatatcgccgttacaatgcttagtagtgtcatatggtaagctttttaaataatcttttaattctacatcatcaaattttcgtcccagcaatctcttagacgcaaaaatcgtattcttgggatgtaataacaagttagacttagcttgctcacctgttaaaattttatctttaaaaattgataccaccgatggtgtagttctaccaccttcttcgttttcaataatttgtgggatattgttatgtataagagacacacaagaattggttgttcctagatcaattcctattattttagagctaatttcttctttagacat

SEQ ID NO: 30 - DNA, 1710 bp, Nosema ceranae
ttataagtttaatgtagaaataatattttcttctatcttatgtaatgatacagttttgtttttaatacttagcactttatcaaataagtggagtaaatctaaattatgtaaaacaataattatcgtcttctctaagttgttggagattagacttttaagaatttcatattcagcttttttgtccaatgcggccgttggctcatctaaaattataataggagaattttttagtgccgaccttaacaaaattactttttgtctttctccaccactaagcttatgtcccttatctccaacatgtgtgttgtattcatcctctaggttgtttatagaatcgtgtacacaaagttttttactgatttttataacttcttctttatcaaatatttcttttccatatgttaaattataataaaccgtttcgttaaacaaaaatgaggtttgtggtgcaaatgatataagtgatctatatgaactattagaaatttcttttatatctcgattatctagataaatatttcccccataattttcaaatctcataatcatctttataagagatgtttttcccgatccattttttccaataatagctactttttcaccttttttaattaaaatatttatgtccgttaaaatttttttggagtaataattaaatgatgcattttctaatcttatatcattattaaattcattaacatctactaaatttggttcttcttttataagctctggtttaaaagatgttcttatatttaagattgcttgtgtatatcgtgagtaaaagaaccctaattgtccaaaacttgaatacaatgttctattaatgccaatataaaatacaacatccctggcacttagttttgctgttaatattccatagtttcctaatgttataactataaaacactgtaaagcaaaaattatcttatttacaaggtataaaaaactaagagatctccagattctgttacattccgattctacttcagaaacatatttttcatatttaagcgattcttcttcttctgttttatatgctagtatagtctcatgattaattaaagaatcatgtaagtgatttgagcatctttgttgtgcgcaattatattcttttcttattcctgtacgccaatgaactattttcgcagttgcaaggatgtaaactaataatgtgattaaaataataaacatatttgtcaaccctaaatttgtataaattgacgaacacgccaatataactgtaaaaaaaatatttatgatattaacaaataaaacttcgatcaattcacttattgctttactttctcggtctattattgtttgtatttcaccgcatcctattttattgtatctactaagttccatatttataaaatttttaaatgaattttttcctgtcagtctgaatacatgttgaacgggtgtaacaaatataaaattgttaagttctgacattgtaattgatacaattgtcaaaactgcaaaatacaaaagactttgactaagatctttattatctgtaatatcactagtcaatttccgggtagcttcaactgttaaaacattaaatgtacaaactgcaaatgtcccaaaaattatgtaaatgacaaatgttcgaataaagggctttgaaataacatattctacaatcaggtctttcataatactaatatcactaccataaatagattttttttctaacat

SEQ ID NO: 31 - DNA, 1722 bp, Nosema ceranae
atgaaggaaaaaaccaattatgaaattttatatgatacatttgtaaaatattgttacaatatttcctatataaggtacgtaatgtttcccatattactgtctacaattatagcttgttatctcgaagttcaggcaagtaacatatcaaaaagaattgcagaagattttgaaaataaaataaatgcaggaaaaagtatatttaaatatattttatttttaacttcatcaatagtattaagacaaattaatgatattgtgtttagcgggccaatacaatttttatataaaattgttggagttgaagcattttatcattacatttcattaaacttagaaaattttaacaaaataggaagtggagagatacaaatgattattgagcggaaaagtagagcatatggtgacatactagaactaactactctctcggccgtaccaacctgtattgtagttattatgtcgtttttctcagtatataaaaatttgggaagagatgcactctacgtaatgttggctacaagtgccttgtatgtgtattttacatttgtattttcaatatggagaaacaatattagaagacaatataataagtcacaggataaattatcgaataaattacaagattttttagctaatcatgaaacaattaaagcctataatatggaagaagaaactattacatattttgatgaaaatcaaaaaccggtagaatattttggggtaaagtctcacagaattttgttctctcttttatatatacaaaaaatgacatttgcgatacaggcaattattattatcacattaggatcttttggatattttccgattaaattatcctctcaacagttagtcttttatatttcgattagtaaaacgttgacaaattcgttgagcgaaatgggaatgctatacacaagatatgtacaaggatttttaaatgcaaagtctggatattacgagtttaaagaggatacacaaactgataaaataagactgatagattttaatgaaaagctagaatttagaaatgtatcttttagttatttaaataagcctattttagtgaatgctaatttcgttattaataaaggggagcgtgttgctattataggaaaaaatggaacaggtaaaagtacaataataaaattgttaatgaaattttataaatatgatggagatatattaattgatgatacagaaatagataatatttcggatagaagttacagaagtttaatatcatatgcaacacaaaacacgttcttattcgataatactgtgacatacaatatattttacgggactaaaaacgtaacagaaaaagaagttttagaattagccaaaaaaataggtgtattagagtctatacaggaatttaaagatgggtttagcacatcggtcggtgaacgcggaagatttttatctggtggtgaaaggcaaaaaattatgctgatgcgtgcattgcttaaaaattcagagatcgttttattagacgagccaacctcagcactagataaaaagagtgaactagaaactatgacatatatttttaatgaatttaagtaccatacttttgtaataattgtacacaatctagaattattggctttgtttgataaaattttatttgtaaatggtaatgaggtaacaatgatagaagacattaacaaaaaacttgaagaaaattcaaagtattttgcagatattttaaacaacgaataa

SEQ ID NO: 32 - DNA, 1734 bp, Nosema ceranae
atgaaaaaaatttcgaatagaaaaattatcaaagaaattatttacaatgatttattaaaaataagaatgttgcgatatgttattgtaccaataatatttttaactatattttacactgttttagagataaaaataagtacattagtaaagaatcttaatcaatctatcgcaaatcgaaaaggtgaacacacagcacttgaaagatttgtgttacagtcactcttagtggctgtattgaccgaacttaatggatttatttttacaggtgtagtgcaatatatttatagaaatacggcaaaatctacattcaaaggcttcatttctctttcacctaaaaattttagtaccataggtggcggagaaattcaaacaataatagatagaaaatcaaaatctgcaagtgaacttattgaagtgtttcttacaagcttgcttccaatatgccttaaacttttatttgcccttattgcagttataaaaaatatgggaggtcttgcgggcttcataatgtttgtttgtgtttcttgctatgcgactgtgactatattgatagcacaatggagatctaatattagaagagaacttaataactctgaaaatagatctagtaataaactacaagatggattaaataatcatgaaacaatcgtctcctttgggactacagatcttgaagtagatgaatatgatcagtttcttaaaattaatgcatctaatagtaacagattatggagagcactgtacattttaaatttatctcagagagcaatttttctcttacaaagtttttttattatttatgcaggaatatcaggaatattatctcaaaatatgtcatctaaccaactcatttatttaatgtccattacatctacggttactattaatttaagtaacttgggttacttatacactagatatacacaagcaataattaatgcaagatctacttatgatacaatgttagatataaaaaaagagaataataagtttaagattacagaatttaaagaaagtattaagtttaataatttgtcatttggttatgaaagtagacaaatttttaataaaataaatctagaaatatacaaaggagaaaaagtagcaattataggtaaaaatggtagtggtaaatcaacattactaaaactactgcttaaatttgatgaagattacaaaggtagcattttaatagatgacattgatattaaaaaaatcaaagacgaattttataggaatttattaggttacataccacagaatacatttttgtttaatgaatctgtaaaatataatattaaatacggatcttttggtatttcagacgaggatatttttgcattgtgtaaagagtttggattatatgacgttttcatgaacctcgaaaatggttttgatacgaatgtaggagaaagaggaaggttattaagtggtggagaaaagcaaaagattttattaatgcgtactatgttaagaaacaaggagataatggcattagatgaacccactgcagcacttgataaggagtctgaaaaaaagattttagagataattttacaacaggaagatcgaacagttttgatgataattcataatctagaacttattaataaatttgataaaataatttacattgatgaaaataatatagaagtctataaaaatgatattgaaggacaaaaaaagttttctacaaatttacaatattttttatcatacaaattaggtaaataa

SEQ ID NO: 33 - DNA, 510 bp, Nosema ceranae
ttattctggttcacaaccacaactccaaacaccttctacctttttacagtccataatgggctttcctaatcttttattaactatgttatgtgctttacatagccactggacaaattcgtcatgtgtggcaacttgtggaggatttaagcttaacagtctttgaaaatgtccacaacattctgcacaggggaaaagagatgataaaaggtaaataaattgaagtgtatcttttttatgttgtactgtaggaaatgcaggataaacagctgccatggtatgtaaaagtgtccatgttgctctccccaatctatctttaacttccttatttgttaatttttgattatgaattagacctaattcacctacttttggtgaaatagattgtaaaacagattttccaagtgagttgtctgcatgtgtatgcgggaaaaaatgctgttttgctaaataaacaatccatacacccaataagataataagtcctcttaatactttctgctctttgttcat

SEQ ID NO: 34 - DNA, 1134 bp, Nosema ceranae
ttatatccaactatcaaaaaatagcctcttttctttcacaatttcagaaaaattttcattaaaaatgctataaatagttttttgcatatcaggtcggccacaaacataaaccaaacatccgtctttaatgtatgtttttatctcatttaaattttgtaataaataatcagtaacataaattttattacaagataaaattttaataatttctgtgtttttatattttgcatctttaataagatcatcttcttgatttctaaatccatatattagtttgatatattgatcgtcttctttatttttcaaaaacgaaaaaaatggagcaatgccagttccagtacaaatacccaacacttttttacaaaaatttaatctaaataatttactcggtctgtgacagatctttaaattattataattttgcatatctatgaaattggaaacatgtccatatctatcgccttttttaataattgctactaaaatttcacatttttcatttacgtggttagtaagtgaataatatcttggcttaattgtttgacaattcataataagatcctctaaacttggtttacattgaaatgtatatataatgtcaagcacattattccagttcttaatgatgcttaaataatcttttactccttctttagaacacagatattcaatatcatgcttatttttagaggttttagaaatatccataagccatgcttttttaggcaatgaagtaaaatcaaaaatatacttgaaaaagtcacgcaaagatccttcgaattgaaaccccgtttttccaacttgctcaatatataataatgtatcaccagacatttctagtaaacttaacatttcattaacaagcaaatcattatttgaacaaagtagaccaatactatcaccaggaacaaaatctaatgtataattaagttgaaccttatatacctttttccatgtacaggaaaggttttcaatatttagtatatttgtatctatcaaatttatattctcgtttgtctttattttataagaacctgtatagttggtctttttaattataagcttattgaaatttctaatatttaaaggaacaaaatctacatttagattatattctaatttattgaatttcat

SEQ ID NO: 35 - DNA, 1503 bp, Nosema ceranae
ttaccaagtttctgcctgaaaatatattttctttttataaatatctaataacattttttcaataatattattaagtctagaatttccacttacaaatattaaccaatcatcaatattttctagcccttttatagtcttataaatatcttgtatgtatttattatcttcccttgaaacagcggggtaaatttcaatgcctttattttcaaactcttctttatataaaaaatctacatctctaaatctaaaaccatataataaaataacttttttaaaaaaatttaaatcagaatagtaattaacaaatgccctgggaagtgtaataccagtaccagtgcacataaacaaaatctttttaccactaaaattaagtctattttgtactatgttaacatgaatagtagaccctttagtaagtaattttaaatactctgaacaaagaccttttcgttcttcttttaaacttgttttaaaagaaacaagagagacggtgacaaagtaacaaaaatcttttttcgttaatgtaaaatatcttggattaattacagggatatacttgtacataaaatttgaggtaagttttatcttaaaatcttttagaacctcaaaaatagtgcgcttcggtagtaaaatgtaatcatagtacagatcgtaatttagataaatttctttacatttctcacgatattcctcagcaatggtatctgtgataagcgaaagttgtagaaaaaaatagatttgaggaatagaattaaaatcacaatattttttaatatatttaaccaaggtattgtcctttatgttattatatcttacaaactcctcgtaattataattttcaggataaaccgctagacaatcaccgatttcaaaattttctatatctatatcaaattttatttctaaaataggataaatgtaattgtaaggtgttaatatcttaatatcatttattgacgcactgtataaatcatttttacaacttgcaaaatttttagcattttgtagtttgtaatgcggtaatatataatatagatcttttatccatgtcttaaattcgcccataaatccttctttgtcttggctatctccattaccctttcttatcagaggtttagctccgtgttttaaaaggcaattatacaactttttagaacaaaaattaaaagatttataagacgaatccccaaggccaaatacagcaaaatttaagtgttgtaaaaaatttgtaggcagattttttttgcgcaaaaatttccaaaatttagtcatgttaaaaggttcagaaccattcccatgagtcgaacatacaaatataatcatatcaatatctaatattttttcgaaatcaaaactgtccatatctaaagtaaaatctgttggaagcaattctttatcaacgttataaatcaaatctttattgtatccgtatagtataacattttgaataagtttagcaatatgtatagaatttcctgtttgggagccatataagattatcat

SEQ ID NO: 36 - DNA, 990 bp, Nosema ceranae
ttattcagaataaacatcttttaaaagttcatcgatatcgggttctttagaaaaaataacttttttaacaccttcttcaaagcaggaaattacctcatcttcgataatttttacttcttcacaagtcgcaaatttttgtaagttattttttgcttctttaaggcaatcattattttttttttcattaatttcctccgtggatctgtaaaaatcgttaacatctaaacaggagtgcccacatgtcctgtacgtatcaatttgcaagatgataggtcctttttctattgcatgttgtctagcaaatgtaaatacatcaatcagttgagttatgtttttatctgtaagacgtatacctggaatattatatccccttttaaaatattcaggatatgtagtggaattactttcaggtgtccacatactataatgattattttcacatacataaaccacaggaagtttccataatgcagccatattgaacgactcccagacctgtccctgatttgcagcaccatccccgaaaaatacaaatgctacattttttacttttttatattgtaaagcaaatcccaatcctgtaccaagcgatacctgcgcacctactataccgtgtcccccataaaattggtcattatacaaatgcatcgatcctccttttcctttgcaattaccaatagcctttcctaataattcccctataatactttctatactgattccacaaataaatgctaatccatggcatctataagatcctatgactttatcatttttatctagtaccttttgtaaactcatataaatgttttcctgtcctattactaaatgacagaagcctcttatatttccttttttatacttagagttagcatattcttcgataagacgtagaattaacatatttctataaacatcttgtacaagttctttgtttaaagtagttttcagtttaactgtatttttatctaccaaataataatctatcat

SEQ ID NO: 37 - DNA, 960 bp, Nosema ceranae
atgatagaaattcgcgatcttataaatcaagcattggatgaggaaatgggaatggatcataatgtatatataataggagaagaagtaggcatctctggtggtcctcacggtcttactaaaaatttgatcaaaaaatacggcgatcaaagagtgaaggatacccctatttcggaaatgggatttacaggtctcgctgtgggttcaagctatttagggttaagacccgtagtagattttatgacttggaattttgctttgcaatcaattgaccatattattaattcttgtgcgaaaaccttgtatatgtcaggaggaagaatacaatgtccaattgtttttaggggaccaaatggattcaataatgggtacgctgcacagcacacacaagattttgcaccaatatatggttctattccaggccttaaggtggtttgtccttatacgggtaaagaccataaaggacttttaaaaagcgctattagagacaataacccggttatatttcttgagaatgaaatattatataaagataaataccttgaagtgtctaataattatattcaaccacttgacaaggcagtaattgaaaaaaatggtgttgacgttacagttttaggaatatcaataagtcttaaagaaatttttaaagcagacagtttgttagagaaaaaaaatatcgacattgagataattaatcttgtgtcaataaaaccaattgattatgttactattgaaatatcagtcaaaaaaacacaaaagttagtgatagttgattttgcatatcctactttcaatattgcgagtgaaatagctgcgcacttttacgaaaaatttaaagatataaaaattatgcgtgttcttgcgcaagatattcctacaccgtatgcacttaatcttgaaaaaatgtcttatccgacatgcaatgatattgtaaatgctgttacaaaaataaattcatag

SEQ ID NO: 38 - DNA, 1767 bp, Nosema ceranae
atggtgtataaggttttatttacagtaataggattaatatgtggtatacttacaataattaaacgatacaagtattttaagataaaaaaattggccttaacttacttcgggaaacaagacttgcaatggaaacctaaaagtcggtcagaaattattaacgatttaaaaaatacaaactttgacatattgattattggtggcggttcaacgggaatgggatgtgcaatcgaagcagctacacgaggtataagtgttggcctgatagaagcacatgattttggttcgggcacgagttcaaaatctacaaaactttttcatggcggtgtacgctaccttgaaaaagctgttaatgatttagatagatctcagtttgacttggtatctgaagcattaagtgaacgaaaaattgttatgaatatgtgtccttttctagtaaggtcgatggaaatattatttccggtttataaaaggcttttaattccttactactatattggccttaaattttatgattggatttctgggcaacggtcccttgggcgaagtaaatttttgtcgcggcaacaaactattacaaaatttcctaatgtgagaaaaatcgaccttgtaggatccgtttcgtatcgtgatggccaattttatgatgctaaatacaatgttctattgggtgtcacagctacctactatggagctgttgtattaaatcatgcaaaattcttgtcagtaacaaaagatggcgataaaattaatggaattaaatgtcaagattcaataaataatgaaaaatttttaattaggtgtaaagttttaataaatacttctggcccttttgctgacgaggttcgaaatacatcaattgaaaactgtcaaccaatactccaacatagttatggtacacatattgtagttcctgcgatattttcgcctaaaaatatgggctttgttgatccaagcacgagtgatggaagaatcgcattttttatgaattttaaaggtaaaacattgattggaggaacagatgttaagtgtaaagttgaagatttaataaaaccgactgaagaagatctaaactttcttattcacgaggccaattattttacagatcacaatttaaaattaacaaaaaaagatgttttgtctgtttggacaggtattagaccgttagtcaaggatttatcgaaaagttcaacagaaaagatatgtagaaaacatactataagaatagataaagacaatatggtaactgtaacaggtggtaagtggacaatttttcgacttatgggagaacagacaataaatcaaattataaaagtttttaatataaagtctaataaaccaagtataacacaatatcttcctgttttgggatcacagggatatactaaagctacagaatttgatttggcacttactttaaatattccagaagatatagctaagcatttagctacaacttatggtaccaaagcttacaatttctctgaatactttaatgggtcatacaccagacttacagatggttatccttatacaaaagaagaaatagtatattgtatcgaacatgaattggcttatcgcatcagtgatatattatttaataggatgatgataggatacattgacgtcagaagagcatttgatttaattggtatagtagctgaagtaatgaaagactattacggatgggatcagcaaagatataatgaagaaacaaaattatgcatggaaatgatggaaacttgtggttatagtttattaaaaaattaa

SEQ ID NO: 39 - DNA, 654 bp, Nosema ceranae
ttaatttatgcataattgaccatcatcagtaataaacacattacctttcttttctaccacacatttttgatatatttcattaactacatcccaatcaattacattccaccattcattaatgtattcttttctcctatttttatactgtaaataatacgcatgttcccatacatcaagacatagtaaaggaatacattcaccatcctccatcataggattgtcttgattaacactggtcttaatacacaatttatctttatatatcaaccacacccatcctgatccaaataattttacagcttcagtattaaaattctccttaaatttatttattgatccaaagtcttttattatagcactttccaactgggaagaaatctttttattttctggtgacattaccaaccagaaaagactatggttgtaatgaccaccaccataatctcttaattgtttatcaacaagtgcatttcctttattattaaaaagtaatgaatttaatgatttaccacacaaattgttatctaatattattttattaagagtgtctacatacgcttgatggtgcttagagtggtgggtctccattatatcttcacttatataaggctctagagatttataactatatttcagatttggaagagtgaacat

SEQ ID NO: 40 - DNA, 1224 bp, Nosema ceranae
atggcacaagacccccaaggactttatgaagtattaggacttaaagctggtgcaagcattgatgaagttaaaaaagcatttacaaaaaaacaaagggaatgtcatcccgatggtgcattttttaaagctgctcttagaaaatgtaaaacagatgaagaaagagcaaaagttgaaaaagaatttaaagaaaaatcacaaaaatgtaatcaagctaaagcagttttatttgatgagaaaaaaaagcaagagtatgatatgggaatgactggcgattttggattttctgcaggtggtggagactttttcgatattttttcaagttttactggtggaggaagaagaaatcgagtacaaaaagttcaagatacagaatacgagtttaatatttcgttgaaggaagcttatatgggaaagcgagctagttttaatgtaaaagtgcaaagagaatgttctgcgtgtaacggtaaaggaggagacagtgttgaaacatgtgaaccatgtaaaggtaaaggtaaggtagaacatcataggagactaggtcctttaatttctgtacaagaagcaccttgtaataattgtaattctactggatttgttgttaaaggaaagctttgtcaaagttgtaaaggtaaacaatacgttgagactaaagaacatattgaagtggaagtagagccaggagtacagaacggtagaaaatatacattttctggcaaaggaaatcataaaaaaaattgtgtaccgggtgatgtgattcttattgtaaacattacaaatgatccaagatttagaaaaagtggatataatttaattagtaaggttgatattccattgtatgttgctttggcaggcggacagattatatttgaacatatcactggtaagaaatttgaaattactttatatccatttaaagatttaaagaaatgtattattttaaaaggcgaaggttttaaaataaaaaatagttattcgggtggtgatcttattctcgaacctaatataattatagataagaatattgataaagatttattagcacgcgccttgaattatgttcctgtaagaaaagattttacaggaactgctgttccaaaatatgcagaatttggtgttatgcctaaagaacaggaagaacaaaacgaaagagaaagattcgaaggtgcagaagagttttttggaggaaatggtagagatttttttagcaagtttggatttttctaa

SEQ ID NO: 41 - DNA, 1308 bp, Nosema ceranae
atgttatttttttatagccccatttttatgactaaaagtttaacgaattctaaaactttaaatttaatgtcaagtgtacaatcaccagttataaatacaaaaaaaatatatcttgatgcacaagcgaccaagcctttagacccgcgtgtgcttgatgcaatgcttccatactatacatccatttttggaaatccacattctcgcacgcatacgtttggatggaatgcagaaaaaggcgtagaaatggctcgaaagcaagtagcagatttactgaatgccaatgaaaaagaaattatttttactagcggtgctactgagagtaacaaccttgcactaaagggtgtctttgcatttttaaaaaaagacaataggcctgttcatatcattaccacacaaattgaacataaatgtgtattggacacatgtagaagattagaagaagaaggagctacagtgacttatttgcctgtagataaaaatggaatagtagatccgcaattaataaaaaacagtattactaaagataccgctttggtgtctgttatggctgttaacaacgaaatgggagcaatacaaccgcttaaagaaataggaagaatatgtaaagaaaataatattttatttcacactgatgcagcacaagcagttggtaatatagatattgatgtcaatgatatgaatattgatttactaagtttatcaagtcataaaatttatggtccaaaaggtgttggtgccttatacgtcagaagaaggcctagggtgagaatgttaccactttttaatggtggtggacaagaaagaggattaagaagtgggacaacttctccacctttagttgttggattaggcaaagctgctgagatatgctctcaggagatgcgtaaggactatgaatatatacaaaaattatcggataaactaaaaaatcgcatcaaaacgaatgtagaaaatgttgttattaacggcgatgattctaagacttttcctggctgtctcaatatttcttttccatatgtagaaggtgaagggcttatgatgaatattaaggatattgctgttagtagtggaagtgcttgcacttcatcatctttagaaccctcttatgttttgcgagctttaggcaaaaatgatgatcttgcgcattcttctataagatttggaataaataagtttacaactgaagaagaaatcaataaagtatctagtgatacaattaaagctgttaataagttaagagatatgtctcctttatatgaaatggtcaaagaagggatagatttagataaaattaattggtctgcttaa

SEQ ID NO: 42 - DNA, 1101 bp, Nosema ceranae
atgaatactgaaaataaaccatgtatttcaccatttacctttaaactagaagattgcctggcatgttcggcttgtattgctgatttttctgttccaaaaattcctacttacacagaactgaaagatgtccctttaacatttttattatcaccacattcgaaaatgaatatgtatgcacactataacaatcatataatgtcctttagtgattttgaatatcacttaatttcatttataaaactaaaatttaatgtaataaaagtatatgatacatcttatgtcaaaaatattctgtatgatagtgtttatgaggaaagcacgagagacaaaataataataagtgactgtcctgggactgtttcatatattgaaaggcaagcacaccatttaattgaatatttatctgttacttctacacaacaacaagccataaagctacttgctcaggggcgaagtataagtgtcatacagtgctatgataaatttttagagaatagcgatgatgttttaactacctatgatttttataaaatgattttggatctaggatttttacagcataattttattaaaggaacctgtgagaaatgggagaagtgtactattggatatcattatggatatttagaacacatattaaataagaagaacaattatttaacaaaaaatgatagtataaaaatatttaacagtaaaaatgaggaggtaaggttaaatggaaaaagaaaattaaatattaacacagttacattaaataaaattaatatacctgagatagattataaatataaaaatggagtgtttacatatacacagatcaaaaataataagaaaaaaaaatatttaagaatattgggtctagaaccttttcttaattttattaaggaaagtaaacataaagaattagaatatgatgtatgcgaaatatacatttgtaatcagggatgcattaatggaccaggacaattgtatacagataatttatatgtaaataattcagaatacatagatattgatcttggtattgattgtaaacagttacaaaaaaggacatatagaaaaatagaaacaaagaaagttaattttaaaatagaatggtaa

SEQ ID NO: 43 - DNA, 1830 bp, Nosema ceranae
atggccaagaatgaatctaataaaataacgagactggcaattgttaattatgaactatgtaaaccgaaggaatgtatgtcagaatgtaaaaaggcgtgtcctgttaataaaacaggaaaggagtgtattacaattgatactaaatcacatatctcagaaattctgtgtataggatgttctgcgtgtcaaaagaaatgtccttttaaggcgattacaattgtaaatttacctacaaatctagataaagacatttcacatagatattcggcaaatggttttaaacttcacagattaccaatccctaaatatggtaaggttttagggctagtaggcactaatggtataggaaaaagtactgcacttaaaatattatcgggcaatcttaaaccaaacttaggaaagttcgacgttacgcccgactgggcagcaattctaaataattataaaggatctgaacttcatggattttttactaaaattttagaagggtctattaaagctatttctaagatacagtatatagataaaatgcctaaatttttaaaaggacgctataagtcagaaatcgcctccggaaaaatgttgtttactgttaatgatatattaaaaaaagttgatgaaaaaaataaatttgactattacgtagataaaatggcacttaaaaatgtattaacaagagaattagagcaattaagtggtggtgaacttcaaagattttgtattgcatacacatgtttacaagaaggaaatgtttatatttttgatgaacccactagttttttggatgttaagcagcgactagcagctgctaaggaaataagaaatttgtgtgaagaaaataaatatgttgtagttgtcgaacacgatttagccattttagatttgatgtgtgattttggatgtgttctatacggacaatctggggcatacggtgtaataagcgcaccatacgttattaaatcagcaataaatatatttcttgatggatttttgcctacagaaaacatgaaatttagaaattcagagttaaagtttaatatttcggaaacacttgatagtattatatctaccagagaccagtatcattatcccaatttgataaaaacatatccaaattttacgcttaaagttgaaggcggtaacttttcagattctgaaattgttgtatttcttggtgaaaatggaatgggcaaaactactttagtaggtttgatttcggggttaattaaagatgataacggggaagagttcggtttgttgtcatatagtcttaaaccgcaaaaaatcataccgaaatacaaaggaacagttagagatctttttatgtcaaaaattcgttcttcctttttagacgctaattttgttaatgaagctattaaacctttagatattcatcatttatacgaccaacttgtagaaaacttgagtggtggagaattacaaagaattgcaataataatatgtttaggaaaagatgctaacctttatttattagatgaaccttctgcgtatctagattcagatcagagaatagcgatttcaaaagttataaaaaggtttatttatgggaagaagcgaacagcctttgtggttgaacatgatttaattgtaggtacatatttggctgataaagttgttgtttttgagggaagccctagtgttcatagcactgctcataaaccgatggatttgcatagtggaatgaatatttttttaaagaatcttgatattacttttagaagagactcttccaattttagaccaagagttaataagccgaattccgcaaaagacagaactcagaaagaagagaataaatattttttttga

SEQ ID NO: 44 - DNA, 1641 bp, Nosema ceranae
ttattctgcgttttcttttttgtcgtcttttattaaatctatgtctacacttgtattatttttaattgaaacgttatatgcacccgctaaatagattatagctctaatccaaatataaatcaatattattgcaatcgttaatgtgattggactacccttccttacattatcagtatcaagtgctactaatatggctagtccatataatgaaccaatagattttcctaatttattaaaaataccatcataaacacttttaaaccgtgccctgtgtgcaggatcgattctcatacccattttctctttacaaatatcaaaggctgaatattttaatacttttatgaatgctaaaaagaacattccactgtaattttcgatcgtataaatgtacgacatttttttaaaaaatacagaaatccatgaaaaagcaagtccttcaatggcagaattgtagattgatgctcccataacgattattgaccccaacaacaagaataaaggtgttaagagtcccatagtaatccatccactactttctactaaagtagaaaatgctgacaaattaagtgttattacagtaactgctaccaatatttgatctattgtattaaatttgccggagtattctcctacctctaatcctaaactttttgacgcagctttaattcctgctttatagacagattcaattaaattaaatgttatattgtaaaaaaagactattatacaaagtgacattaataattttgatttcatcattatactaataccttcggagaaacctacactaactttttgtttcttttttatcgtattagaaggtataaatattggtacactcattattttattctcgaaataatatttcatgtacattaatattagacatataccgcccatggcaataaaaaccgaagaatataataactgattttgctcatagctaaatccttttcgcaattctctgaaagaactactggctaatccagatactagtaaagctaaatttgctattatgtaaaaaggtggtaaaaatcttgtaaactgtctgatagtacaactttcatttaaaaaactcatgtataaataagccataagtaaactgccccacatttctgctattataaaaatacaagttgaaacgggctcgttagctgtaattaaaaaatattttataaagttcaatcccttcaatgcacctttgttatcagcgaaaatatctctaaataaaaagctagatggtgttactttctcttcaaacaaaaagattgcccctagtccgaagaaaaatgcagtaaaaattattagaaatagattaaaaatcgatgatacaggtttattttgcataagccactgtattaaaattacagatgcaaaagatataggaagaacataaaaaattttcataaacataattgaattctgatcttgccttaccatcacaaataaatcttttaaaattcttaaaaatgaatacacaaagttaattaatccaaacataataccaagtataaaaaatttaggcatttcaaccttagcaactttaaaataactcagtaatcctgttcttgaatttgctaattgatcaatctcatcttccgtaggtaagttgttttcaggtgtttcatttattacactcat

SEQ ID NO: 45 - DNA, 1686 bp, Nosema ceranae
atgattgagaggggtattatggaaaaaataaaaaatttattaacagaggatgaagtagaagcagaagcaaattctggaaggggcattttatcaatatttagaattgctaaggtagaaagaagaatgttttggcttatgacgcttatgttttcgcttatttcctttatttactcagtaggacgagtgttaaaagatgcagcagttcttagtagacagatgccactatccattaattgtcttaaaagctttgtaattttaccagttactcttgtttgtgtaggattaattcagaagtctacactctcttattcttttacaaaaatatttgatggtgcattgttaatatttgcttttctttatatcattcttggtctagttcttcttccatattctcatcttttccagcttgatagttatttttttagagacctttttagtgatgggaaatgtgttgtaagaggctatgatgctttattatctttggcactggtctttaacgaatggacatcctctctagtttacattgtttcagaaatgtttggtaatttagtattgtcttatttcttcttgacgtttgctaattctttaacaactccaggacaaagtgcaagattcatacctttattttatgttttctcgaatatttctcttttcttatcttctcaagtgacagaactttttacaagatatagatcaaagctcactttctcagaggcggaatttttatataatggcttttttgtattttctggagttctagtaatagttatatttttaattaaaaaatatttggagaggaatgtgactaacaaacctttgtttgttgtaaaatctgttaaaaagaagggaccaaaagttaaagtaggatttgcggagggccttaaagaaatgatggcatcaaagttattacttaacatttcattaactgttatgttctatggtatatcaactaatttaatagaatcaacatttaaaagtggacttgtgaaaggtgcagaagaattaaacgagaatactaaaagttattctatgggatataattcatttgaacaaaagatagcatcaataactgttattatcctgcttttatcaccatttccaaaattaatacaaaccaaaggatggatatttgttgccatagcgtgcccacttattaccctttttgctgtagtttctgtgtgtggtcttgctttttacaattatccggcaacaaataatgacacaaatttttttctaaattcattatgtgctacgcccggtaaatcgtttataaaattagaaaatgttttaggatgtgtagctgtagctcttatgaaagtagcaaaatatggctcttttgatatttccaaagaagccatttcaatgcagattgattcgtcattgcgtgcacgttataaaggaatttttgacggtgtttttggtaagttaggaaaatctcttggatcgttatttgtgtggattatgggatatgcatttcaaacaagagattttagaaaattagctcccttatgtatcagcgtaattgtcttttttgttattatttggatttattcagttatttatttaaataagaaatacaaagaatcagttgttagtaatttacccatcgatgttgatttgtttgcatcaaagttgttagataataaaaaagaagaggaaattgatgtgtcagtgctcgttaattaa

SEQ ID NO: 46 - DNA, 1704 bp, Nosema ceranae
atgtcagtagacaattcgaaagttctacaaaataacgaaaactctgctcttcctacagaagatgaaattgagtatgaggccagcaatggttctggtatatattcacttattagagtagcaaaggttgagagaaagatgttttggatcatggcagctatgttctttattatctcctttatttattcggtggctagagtgcttaaagatgccgctgttattggtaaacaactcccagcgtcaattttctttttgaaatttgttattatccttccgttctcatttatttcagtaggtattattcagaaagctttagataaatatccttttacaaaaatatttgatgtaactttaatagttttcgctgttgcatttactatacttggtagtttattacttccctttagtgattatattcagattcaaccgttttgggccaaagatatttttgctgatggaaaagctgttgccagaagtacagattttttattttctattgcacttgttttcaatgaatggacaagttctgctatctatgttttatctgaaatgtttggtagtttgattctttcatatttatttatgacgtttgctaatggtctttcgactcctggacagtccgctagatttgtccctttattttatgttggatctaatttggctttacttctttcaggaatgataaattacttttatagtgtaagtaaatctaaaatgtcgtatgttgcggccgaaagattttttaatggatttttttgtctgagtggaattctctgtgctgtaatttatcttctaaaaaaatatttagaaaataatgttactagcaaaccaatgtttgttagaaagacttttactaaaaagaagagtaaagtgaaggttggatttgttgatggacttattgagatgagtaaatctaaactactgttgaatatgtcattagtcgtattattttatgctgtttctacgaatattattgagtcagcttataaatctgctttagctgtcggtgctaatgaaactggtgaggcaaaatctacctatgcttcaatttatacatcaattgaacaatctggagttgctgttattgtcatgattttgctacttaccccttttccaaggcttattaaaacaaaaggatggattacaatagccattctatgtcctattattacttttttttctgcttttggtacttttgtattagcttatttaaacttcccaattacaaacaaagaggataatatatttgatatttaccgtttaccgtcaactgattctataatcaaattagaaaatattgttggtgtcatttgtgtatctttaatgaagatttctaaatatgcagcatttgatatcacaaaagaggctttgtctatgcagattgatggttctataagagcgaaatacaaaggtatttttgatggtgtatttggtaagctggggaaatcttttggatcagtttatggatttacaattactacattattaggaacaagagatgttcgtagaggtgctcctatatcgctttgtgttctaatattgttctgccttatatggttttattctgttttctatctcaatagaaaatataaagaatctgtcgagaataatgcaccaattgatattgatttattcactagttcaaaagtcaaggcaccttcttctgaacctactgttgctaccaaaagtgttactacagaagaataa

SEQ ID NO: 47 - DNA, 1461 bp, Nosema ceranae
ttaattaaaatcaacatctatctcagaattttgttcaattgattcattatattttttacttaaataacagacactcctgatccacaaaaaatttgcaaatattaaaaatataaaagacacgtatgatacttgtctaatatctggaatttctataaacgtcaaaaaagttccatataaagagataatagatttaccaattttgatacatacaccatcataaaaacttttaaatttatacctgtatttaacaggcaccctcatagaaagcatttcttttgctaaatcaaataaaacatatttggtaattttagaaaatgcaaatccaatggttgcacaccaattttcaagatttattcttaagaccgatggagctgtgcgcaaattgtaaaaagaaagtcctgaaattagagcggtaaaaaatatagcagcaataggggaggcaatagatagataaaagatccttgatgcaatgcgatttccacggattacaaagttataaaataatgatacagcactaatcgttaaggaagttgttactaaatatttttgagaataatctttcggaggcatattattaattctgcttcccgtagataaagaattttttaaggacatatcaataaatcctgcattaatagcatagattaatgccgctgcacacatatttcttaaaaatttggattgtaaaagatcaaacgaggatgtcgttttgtcttcttctttatttatagtttcctttatttctttagttttaagaggaatataactttttaaaaagtaaattaatgtagttacaaaagacaagatcaaaaaaaacaaactactaccgtcaattttatcatgcaaacctgcaggaagtatatttgctaattcatcttttatataaataaaagctacagaaataatcattgaaatggcggtgattgtggaaaaattaggaacaatttctttcatttcatcttctgtacaagcatgattggctaacgcatataaagcaaaaccaactactagagtactccacaactccgataagatgtaacataaagtacttatccactcactgtacatatataaaaaaggagataagcccatcaagcttctaactgacatcttaccatcacaaaaaatatctagtgcccattgtgatcctttttggattttatattcaaatggaattaaaagagaaccaattagaaaaaaaatgccaataaaaccaaaaataataaaattcacaatactaagaatagagtacacatttaaagccttttggacatatgacatcataagacatataattggcagtgaaaagaaaagctttatgtagtacagtgacgaaggaatttgttttgtcataatcacgatttctctgtaaaattccaataatgtgttaatcacacatgccattaaaaatgtaagtgacaataatatttttacttttgggaatttttttgtcttagtcat

SEQ ID NO: 48 - DNA, 23 bp, Artificial sequence
  Single strand DNA oligonucleotide
ttaccctatgaaacgaaaaacag

SEQ ID NO: 49 - DNA, 27 bp, Artificial sequence
  Single strand DNA oligonucleotide
tttcagcatcacttttcatatatttac

SEQ ID NO: 50 - protein, 437 aa, Nosema ceranae
MKRKTEIFIAITVVTAVTCYLFKKIINRQKSDYTSIKQEADKYFIQEDYKNAILLYTKCKYMKSDAEILTKISLCNYFLKNYQEVINNSLFKTNNKDLIKIRSECYKQMGNKKKFLKDLALYETFANNKEVQDEIMQTVKEICEEEVNEFIEQEGLKINKEDVLRGLVSIKNINEIYDAFGGKSKKFKFSNDEKEVLNLLNAIILHLKGKKEQAILLLEKSTYKYSILYRAYFLTLKNEYISSSLPLDDEITTLYLYSKIFKDKSDTYLKSAIDKSVDLPIEQKDFLYVDLLVFYISKKDVEKVNETINNLKETLTPTLLELIGEYYLKSGNHSKMLDLLSSHPDTPGKLLLTALYAISIDKKKDAIEILYRSISEYSSYFKSYLYLGNILINDDLNECRKLFNTSLQYCCNSDEVFIVKQSLILIEVHEYIKENKI

SEQ ID NO: 51 - DNA, 1032 bp, Artificial sequence
  Sequencing results
  misc_feature (1)..(20): n is a, c, g, or t
  misc_feature (51)..(51): n is a, c, g, or t
  misc_feature (64)..(64): n is a, c, g, or t
  misc_feature (66)..(66): n is a, c, g, or t
  misc_feature (671)..(671): n is a, c, g, or t
  misc_feature (683)..(683): n is a, c, g, or t
  misc_feature (719)..(719): n is a, c, g, or t
  misc_feature (722)..(722): n is a, c, g, or t
  misc_feature (727)..(727): n is a, c, g, or t
  misc_feature (789)..(789): n is a, c, g, or t
  misc_feature (796)..(797): n is a, c, g, or t
  misc_feature (799)..(799): n is a, c, g, or t
  misc_feature (804)..(804): n is a, c, g, or t
  misc_feature (818)..(818): n is a, c, g, or t
  misc_feature (822)..(822): n is a, c, g, or t
  misc_feature (836)..(840): n is a, c, g, or t
  misc_feature (845)..(845): n is a, c, g, or t
  misc_feature (849)..(849): n is a, c, g, or t
  misc_feature (853)..(854): n is a, c, g, or t
  misc_feature (864)..(864): n is a, c, g, or t
  misc_feature (866)..(866): n is a, c, g, or t
  misc_feature (880)..(880): n is a, c, g, or t
  misc_feature (887)..(887): n is a, c, g, or t
  misc_feature (891)..(891): n is a, c, g, or t
  misc_feature (902)..(903): n is a, c, g, or t
  misc_feature (906)..(913): n is a, c, g, or t
  misc_feature (918)..(918): n is a, c, g, or t
  misc_feature (920)..(920): n is a, c, g, or t
  misc_feature (937)..(938): n is a, c, g, or t
  misc_feature (941)..(941): n is a, c, g, or t
  misc_feature (944)..(944): n is a, c, g, or t
  misc_feature (956)..(956): n is a, c, g, or t
  misc_feature (958)..(958): n is a, c, g, or t
  misc_feature (962)..(962): n is a, c, g, or t
  misc_feature (964)..(969): n is a, c, g, or t
  misc_feature (971)..(974): n is a, c, g, or t
  misc_feature (977)..(977): n is a, c, g, or t
  misc_feature (983)..(987): n is a, c, g, or t
  misc_feature (991)..(991): n is a, c, g, or t
  misc_feature (998)..(1003): n is a, c, g, or t
  misc_feature (1005)..(1005): n is a, c, g, or t
  misc_feature (1008)..(1015): n is a, c, g, or t
  misc_feature (1017)..(1017): n is a, c, g, or t
  misc_feature (1019)..(1022): n is a, c, g, or t
  misc_feature (1024)..(1026): n is a, c, g, or t
  misc_feature (1028)..(1032): n is a, c, g, or t
nnnnnnnnnnnnnnnnnnnnctcggcacccggggatcctctagagtcgacncagcaggcatgcncngcttgccacgtctaatacgactcactatagggagactggtctttaacgaatggacatcctctctagtttacattgtttcagaaatgtttggtaatttagtattgtcttatttcttcttgacgtttgctaattctttaacaactccaggacaaagtgcaagattcatacctttattttatgttttctcgaatatttctcttttcttatcttctcaagtgacagaactttttacaagatatagatcaaagctcactttctcagaggcggaatttttatataatggcttttttgtattttctggagttctagtaatagttatatttttaattaaaaaatatttggagaggaatgtgactaacaaacctttgtttgttgtaaaatctgttaaaaagaagggaccaaaagttaaagtaggatttgcggagggccttaaagaaatgatggcatcaaagttattacttaacatttcattaactgttatgttctatggtatatcaactaatttaatagaatcaacatttaaaagtggacttgtgaaaggtgcagaagaattaaacgagaatactaaaagttattctatgggatataattcatttgaacaaaanatagcatcaatnactgttattatcctgcttttatcaccatttccaaanttnatacnaaccaaaggatggatatttgttgccatagcgtgcccactctccctatagtgagtcgtattangctctgnnancttgnatgcctgcaggtcnactntagaggatcccccnnnnnccganctcnattnntaatcatggncntagctgtttcctgngtgaaanttgntatccgctccnnttnnnnnnnnatacnancccggaagcataagtgnnaanccnggggtgcctaangntgancnnnnnnannnntgngttgcnnnnnctgnccgtttnnnnnngnaannnnnnnngncnnnngnnntnnnnn

SEQ ID NO: 52 - DNA, 1019 bp, Artificial sequence
  Sequencing results
  misc_feature (1)..(12): n is a, c, g, or t
  misc_feature (16)..(16): n is a, c, g, or t
  misc_feature (60)..(60): n is a, c, g, or t
  misc_feature (817)..(818): n is a, c, g, or t
  misc_feature (833)..(833): n is a, c, g, or t
  misc_feature (863)..(863): n is a, c, g, or t
  misc_feature (885)..(885): n is a, c, g, or t
  misc_feature (892)..(892): n is a, c, g, or t
  misc_feature (911)..(911): n is a, c, g, or t
  misc_feature (924)..(925): n is a, c, g, or t
  misc_feature (937)..(937): n is a, c, g, or t
  misc_feature (961)..(962): n is a, c, g, or t
  misc_feature (969)..(969): n is a, c, g, or t
  misc_feature (988)..(989): n is a, c, g, or t
  misc_feature (999)..(1001): n is a, c, g, or t
  misc_feature (1008)..(1008): n is a, c, g, or t
  misc_feature (1019)..(1019): n is a, c, g, or t
nnnnnnnnnnnntcgnctcggcacccggggatcctctagagtcgacctgcaggcatgcangcttgccacgtcctaatacgactcactatagggagacagctaacgagcccgtttcaacttgtatttttataatagcagaaatgtggggcagtttacttatggcttatttatacatgagttttttaaatgaaagttgtactatcagacagtttacaagatttttaccacctttttacataatagcaaatttagctttactagtatctggattagccagtagttctttcagaggattgcgaaaaggatttagctatgagcaaaatcagttattatattcttcggtttttattgccatgggcggtatatgtctaatattaatgtacatgaaatattatttcgagaataaaataatgagtgtaccaatatttataccctctaatacgataaaaaagaaacaaaaagttagtgtaggtttctccgaaggtattagtataatgatgaaatcaaaattattaatgtcactttgtataatagtctttttttacaatataacatttaatttaattgaatctgtctataaagcaggaattaaagctgcgtcaaaaagtttaggattagaggtaggagaatactctggtaaatttaatacaataggtcaaatattggtagcagttactgtaataacgcttaatttgtcagcattttctactttagtggaaagtagtggatggattactatggtctccctatagtgagtcgtatgctctggaagcttgcatgcctgcaggtcgactctagaggatccccgggtaccganntcgaattcgtaatcntggtcatagctgtttcctgtgtgaaattgntatccgctcacaattccacacnacatacnagccggaagcataaagtgnaaagcctggggtnnctaatgagtganctaactcacattaattgcgttgcnntcactgnccgctttccagtcgggaannctgtcgtgcnnnctgcatnaatgaatcggn

SEQ ID NO: 53 - DNA, 665 bp, Nosema ceranae
actggtctttaacgaatggacatcctctctagtttacattgtttcagaaatgtttggtaatttagtattgtcttatttcttcttgacgtttgctaattctttaacaactccaggacaaagtgcaagattcatacctttattttatgttttctcgaatatttctcttttcttatcttctcaagtgacagaactttttacaagatatagatcaaagctcactttctcagaggcggaatttttatataatggcttttttgtattttctggagttctagtaatagttatatttttaattaaaaaatatttggagaggaatgtgactaacaaacctttgtttgttgtaaaatctgttaaaaagaagggaccaaaagttaaagtaggatttgcggagggccttaaagaaatgatggcatcaaagttattacttaacatttcattaactgttatgttctatggtatatcaactaatttaatagaatcaacatttaaaagtggacttgtgaaaggtgcagaagaattaaacgagaatactaaaagttattctatgggatataattcatttgaacaaaagatagcatcaataactgttattatcctgcttttatcaccatttccaaaattaatacaaaccaaaggatggatatttgttgccatagcgtgcccac

SEQ ID NO: 54 - DNA, 645 bp, Nosema ceranae
cagctaacgagcccgtttcaacttgtatttttataatagcagaaatgtggggcagtttacttatggcttatttatacatgagttttttaaatgaaagttgtactatcagacagtttacaagatttttaccacctttttacataatagcaaatttagctttactagtatctggattagccagtagttctttcagagaattgcgaaaaggatttagctatgagcaaaatcagttattatattcttcggtttttattgccatgggcggtatatgtctaatattaatgtacatgaaatattatttcgagaataaaataatgagtgtaccaatatttataccttctaatacgataaaaaagaaacaaaaagttagtgtaggtttctccgaaggtattagtataatgatgaaatcaaaattattaatgtcactttgtataatagtctttttttacaatataacatttaatttaattgaatctgtctataaagcaggaattaaagctgcgtcaaaaagtttaggattagaggtaggagaatactccggcaaatttaatacaatagatcaaatattggtagcagttactgtaataacacttaatttgtcagcattttctactttagtagaaagtagtggatggattactatgg

SEQ ID NO: 55 - DNA, 737 bp, Artificial sequence
  Tom70 dsRNA complementary sequence
ctgaatgttacaagcagatgggaaataaaaaaaaatttcttaaggatttagcactttatgaaacatttgctaataataaagaagtccaagatgaaattatgcagactgttaaagaaatttgtgaagaagaagtgaatgagtttattgaacaagaaggtttaaaaattaataaagaagatgtgctaagaggacttgtttcaataaaaaatataaatgagatttatgatgcatttggaggtaaatctaagaagtttaaattttctaatgatgaaaaggaagtgttaaatcttcttaatgccattattttacacctaaaaggaaaaaaagaacaggcaattcttttattagaaaaatctacttataaatacagtatcttgtatagagcatattttcttacattgaagaatgaatatatttcatcttcattgcctttagatgacgagattactacgctttacttgtattctaagatttttaaagataaatctgatacttaccttaaatctgctatagataaatcagtagatctacctattgaacagaaagactttctgtacgtagatcttcttgtattttacatttctaaaaaggatgttgaaaaagttaatgaaacaattaataatttaaaagagactcttacccccactttattggaacttattggagaatattatttaaaaagtggaaatcactctaaaatgttagatctattatctagtcatccagatactcctggt

SEQ ID NO: 56 - DNA, 645 bp, Artificial sequence
  NC006 dsRNA complementary sequence
ccatagtaatccatccactactttctactaaagtagaaaatgctgacaaattaagtgttattacagtaactgctaccaatatttgatctattgtattaaatttgccggagtattctcctacctctaatcctaaactttttgacgcagctttaattcctgctttatagacagattcaattaaattaaatgttatattgtaaaaaaagactattatacaaagtgacattaataattttgatttcatcattatactaataccttcggagaaacctacactaactttttgtttcttttttatcgtattagaaggtataaatattggtacactcattattttattctcgaaataatatttcatgtacattaatattagacatataccgcccatggcaataaaaaccgaagaatataataactgattttgctcatagctaaatccttttcgcaattctctgaaagaactactggctaatccagatactagtaaagctaaatttgctattatgtaaaaaggtggtaaaaatcttgtaaactgtctgatagtacaactttcatttaaaaaactcatgtataaataagccataagtaaactgccccacatttctgctattataaaaatacaagttgaaacgggctcgttagctg

SEQ ID NO: 57 - DNA, 665 bp, Artificial sequence; identical to SEQ ID NO: 53
  NC123 dsRNA complementary sequence

SEQ ID NO: 58 - DNA, 670 bp, Artificial sequence
  NC014 dsRNA complementary sequence
ctcctggacagtccgctagatttgtccctttattttatgttggatctaatttggctttacttctttcaggaatgataaattacttttatagtgtaagtaaatctaaaatgtcgtatgttgcggccgaaagattttttaatggatttttttgtctgagtggaattctctgtgctgtaatttatcttctaaaaaaatatttagaaaataatgttactagcaaaccaatgtttgttagaaagacttttactaaaaagaagagtaaagtgaaggttggatttgttgatggacttattgagatgagtaaatctaaactactgttgaatatgtcattagtcgtattattttatgctgtttctacgaatattattgagtcagcttataaatctgctttagctgtcggtgctaatgaaactggtgaggcaaaatctacctatgcttcaatttatacatcaattgaacaatctggagttgctgttattgtcatgattttgctacttaccccttttccaaggcttattaaaacaaaaggatggattacaatagccattctatgtcctattattacttttttttctgcttttggtacttttgtattagcttatttaaacttcccaattacaaacaaagaggataatatatttgatatttaccgtttaccgtcaactgattc

SEQ ID NO: 59 - DNA, 631 bp, Artificial sequence
  NC017 dsRNA complementary sequence
gcaatgcgatttccacggattacaaagttataaaataatgatacagcactaatcgttaaggaagttgttactaaatatttttgagaataatctttcggaggcatattattaattctgcttcccgtagataaagaattttttaaggacatatcaataaatcctgcattaatagcatagattaatgccgctgcacacatatttcttaaaaatttggattgtaaaagatcaaacgaggatgtcgttttgtcttcttctttatttatagtttcctttatttctttagttttaagaggaatataactttttaaaaagtaaattaatgtagttacaaaagacaagatcaaaaaaaacaaactactaccgtcaattttatcatgcaaacctgcaggaagtatatttgctaattcatcttttatataaataaaagctacagaaataatcattgaaatggcggtgattgtggaaaaattaggaacaatttctttcatttcatcttctgtacaagcatgattggctaacgcatataaagcaaaaccaactactagagtactccacaactccgataagatgtaacataaagtacttatccactcactgtacatatataaaaaaggagataagcccatcaagc

SEQ ID NO: 60 - DNA, 19 bp, Artificial sequence
  SiRNA target sequence
atgaaacgaaaaacagaaa

SEQ ID NO: 61 - DNA, 19 bp, Artificial sequence
  SiRNA target sequence
tgaaacgaaaaacagaaat

SEQ ID NO: 62 - DNA, 19 bp, Artificial sequence
  SiRNA target sequence
gaaacgaaaaacagaaata

SEQ ID NO: 63 - DNA, 19 bp, Artificial sequence
  SiRNA target sequence
aaacgaaaaacagaaatat

SEQ ID NO: 64 - DNA, 19 bp, Artificial sequence
  SiRNA target sequence
aacgaaaaacagaaatatt

SEQ ID NO: 65 - DNA, 19 bp, Artificial sequence
  SiRNA target sequence
acgaaaaacagaaatattt

SEQ ID NO: 66 - DNA, 19 bp, Artificial sequence
  SiRNA target sequence
cgaaaaacagaaatattta

SEQ ID NO: 67 - DNA, 19 bp, Artificial sequence
  SiRNA target sequence
gaaaaacagaaatatttat

SEQ ID NO: 68 - DNA, 19 bp, Artificial sequence
  SiRNA target sequence
aaaaacagaaatatttatt

SEQ ID NO: 69 - DNA, 19 bp, Artificial sequence
  SiRNA target sequence
aaaacagaaatatttattg

SEQ ID NO: 70 - DNA, 19 bp, Artificial sequence
  SiRNA target sequence
aaacagaaatatttattgc

SEQ ID NO: 71 - DNA, 19 bp, Artificial sequence
  SiRNA target sequence
aacagaaatatttattgct

SEQ ID NO: 72 - DNA, 19 bp, Artificial sequence
  SiRNA target sequence
acagaaatatttattgcta

SEQ ID NO: 73 - DNA, 19 bp, Artificial sequence
  SiRNA target sequence
cagaaatatttattgctat

SEQ ID NO: 74 - DNA, 19 bp, Artificial sequence
  SiRNA target sequence
agaaatatttattgctatt

SEQ ID NO: 75 - DNA, 19 bp, Artificial sequence
  SiRNA target sequence
gaaatatttattgctatta

SEQ ID NO: 76 - DNA, 19 bp, Artificial sequence
  SiRNA target sequence
aaatatttattgctattac

SEQ ID NO: 77 - DNA, 19 bp, Artificial sequence
  SiRNA target sequence
aatatttattgctattaca

SEQ ID NO: 78 - DNA, 19 bp, Artificial sequence
  SiRNA target sequence
atatttattgctattacag

SEQ ID NO: 79 - DNA, 19 bp, Artificial sequence
  SiRNA target sequence
tatttattgctattacagt

SEQ ID NO: 80 - DNA, 19 bp, Artificial sequence
  SiRNA target sequence
atttattgctattacagta

SEQ ID NO: 81 - DNA, 19 bp, Artificial sequence
  SiRNA target sequence
tttattgctattacagtag

SEQ ID NO: 82 - DNA, 19 bp, Artificial sequence
  SiRNA target sequence
ttattgctattacagtagt

SEQ ID NO: 83 - DNA, 19 bp, Artificial sequence
  SiRNA target sequence
tattgctattacagtagtc

SEQ ID NO: 84 - DNA, 19 bp, Artificial sequence
  SiRNA target sequence
attgctattacagtagtca

SEQ ID NO: 85 - DNA, 19 bp, Artificial sequence
  SiRNA target sequence
ttgctattacagtagtcac

SEQ ID NO: 86 - DNA, 19 bp, Artificial sequence
  SiRNA target sequence
tgctattacagtagtcact

SEQ ID NO: 87 - DNA, 19 bp, Artificial sequence
  SiRNA target sequence
gctattacagtagtcactg

SEQ ID NO: 88 - DNA, 19 bp, Artificial sequence
  SiRNA target sequence
ctattacagtagtcactgc

SEQ ID NO: 89 - DNA, 19 bp, Artificial sequence
  SiRNA target sequence
tattacagtagtcactgca

SEQ ID NO: 90 - DNA, 19 bp, Artificial sequence
  SiRNA target sequence
attacagtagtcactgcag

SEQ ID NO: 91 - DNA, 19 bp, Artificial sequence
  SiRNA target sequence
ttacagtagtcactgcagt

SEQ ID NO: 92 - DNA, 19 bp, Artificial sequence
  SiRNA target sequence
tacagtagtcactgcagtg

SEQ ID NO: 93 - DNA, 19 bp, Artificial sequence
  SiRNA target sequence
acagtagtcactgcagtga

SEQ ID NO: 94 - DNA, 19 bp, Artificial sequence
  SiRNA target sequence
cagtagtcactgcagtgac

SEQ ID NO: 95 - DNA, 19 bp, Artificial sequence
  SiRNA target sequence
agtagtcactgcagtgaca

SEQ ID NO: 96 - DNA, 19 bp, Artificial sequence
  SiRNA target sequence
gtagtcactgcagtgacat

SEQ ID NO: 97 - DNA, 19 bp, Artificial sequence
  SiRNA target sequence
tagtcactgcagtgacatg

SEQ ID NO: 98 - DNA, 19 bp, Artificial sequence
  SiRNA target sequence
agtcactgcagtgacatgt

SEQ ID NO: 99 - DNA, 19 bp, Artificial sequence
  SiRNA target sequence
gtcactgcagtgacatgtt

SEQ ID NO: 100 - DNA, 19 bp, Artificial sequence
  SiRNA target sequence
tcactgcagtgacatgtta

SEQ ID NO: 101 - DNA, 19 bp, Artificial sequence
  SiRNA target sequence
cactgcagtgacatgttac

SEQ ID NO: 102 - DNA, 19 bp, Artificial sequence
  SiRNA target sequence
actgcagtgacatgttact

SEQ ID NO: 103 - DNA, 19 bp, Artificial sequence
  SiRNA target sequence
ctgcagtgacatgttactt

SEQ ID NO: 104 - DNA, 19 bp, Artificial sequence
  SiRNA target sequence
tgcagtgacatgttactta

SEQ ID NO: 105 - DNA, 19 bp, Artificial sequence
  SiRNA target sequence
gcagtgacatgttacttat

SEQ ID NO: 106 - DNA, 19 bp, Artificial sequence
  SiRNA target sequence
cagtgacatgttacttatt

SEQ ID NO: 107 - DNA, 19 bp, Artificial sequence
  SiRNA target sequence
agtgacatgttacttattt

SEQ ID NO: 108 - DNA, 19 bp, Artificial sequence
  SiRNA target sequence
gtgacatgttacttattta

SEQ ID NO: 109 - DNA, 19 bp, Artificial sequence
  SiRNA target sequence
tgacatgttacttatttaa

SEQ ID NO: 110 - DNA, 19 bp, Artificial sequence
  SiRNA target sequence
gacatgttacttatttaaa

SEQ ID NO: 111 - DNA, 19 bp, Artificial sequence
  SiRNA target sequence
acatgttacttatttaaaa

SEQ ID NO: 112 - DNA, 19 bp, Artificial sequence
  SiRNA target sequence
catgttacttatttaaaaa

SEQ ID NO: 113 - DNA, 19 bp, Artificial sequence
  SiRNA target sequence
atgttacttatttaaaaaa

SEQ ID NO: 114 - DNA, 19 bp, Artificial sequence
  SiRNA target sequence
tgttacttatttaaaaaaa

SEQ ID NO: 115 - DNA, 19 bp, Artificial sequence
  SiRNA target sequence
gttacttatttaaaaaaat

SEQ ID NO: 116 - DNA, 19 bp, Artificial sequence
  SiRNA target sequence
ttacttatttaaaaaaata

SEQ ID NO: 117 - DNA, 19 bp, Artificial sequence
  SiRNA target sequence
tacttatttaaaaaaataa

SEQ ID NO: 118 - DNA, 19 bp, Artificial sequence
  SiRNA target sequence
acttatttaaaaaaataat

SEQ ID NO: 119 - DNA, 19 bp, Artificial sequence
  SiRNA target sequence
cttatttaaaaaaataata

SEQ ID NO: 120 - DNA, 19 bp, Artificial sequence
  SiRNA target sequence
ttatttaaaaaaataataa

SEQ ID NO: 121 - DNA, 19 bp, Artificial sequence
  SiRNA target sequence
tatttaaaaaaataataaa

SEQ ID NO: 122 - DNA, 19 bp, Artificial sequence
  SiRNA target sequence
atttaaaaaaataataaat

SEQ ID NO: 123 - DNA, 19 bp, Artificial sequence
  SiRNA target sequence
tttaaaaaaataataaata

SEQ ID NO: 124 - DNA, 19 bp, Artificial sequence
  SiRNA target sequence
ttaaaaaaataataaatag

SEQ ID NO: 125 - DNA, 19 bp, Artificial sequence
  SiRNA target sequence
taaaaaaataataaataga

SEQ ID NO: 126 - DNA, 19 bp, Artificial sequence
  SiRNA target sequence
aaaaaaataataaatagac

SEQ ID NO: 127 - DNA, 19 bp, Artificial sequence
  SiRNA target sequence
aaaaaataataaatagaca

SEQ ID NO: 128 - DNA, 19 bp, Artificial sequence
  SiRNA target sequence
aaaaataataaatagacaa

SEQ ID NO: 129 - DNA, 19 bp, Artificial sequence
  SiRNA target sequence
aaaataataaatagacaaa

SEQ ID NO: 130 - DNA, 19 bp, Artificial sequence
  SiRNA target sequence
aaataataaatagacaaaa

SEQ ID NO: 131 - DNA, 19 bp, Artificial sequence
  SiRNA target sequence
aataataaatagacaaaag

SEQ ID NO: 132 - DNA, 19 bp, Artificial sequence
  SiRNA target sequence
ataataaatagacaaaagt

SEQ ID NO: 133 - DNA, 19 bp, Artificial sequence
  SiRNA target sequence
taataaatagacaaaagtc

SEQ ID NO: 134 - DNA, 19 bp, Artificial sequence
  SiRNA target sequence
aataaatagacaaaagtct

SEQ ID NO: 135 - DNA, 19 bp, Artificial sequence
  SiRNA target sequence
ataaatagacaaaagtctg

SEQ ID NO: 136 - DNA, 19 bp, Artificial sequence
  SiRNA target sequence
taaatagacaaaagtctga

SEQ ID NO: 137 - DNA, 19 bp, Artificial sequence
  SiRNA target sequence
aaatagacaaaagtctgat

SEQ ID NO: 138 - DNA, 19 bp, Artificial sequence
  SiRNA target sequence
aatagacaaaagtctgatt

SEQ ID NO: 139 - DNA, 19 bp, Artificial sequence
  SiRNA target sequence
atagacaaaagtctgatta

SEQ ID NO: 140 - DNA, 19 bp, Artificial sequence
  SiRNA target sequence
tagacaaaagtctgattat

SEQ ID NO: 141 - DNA, 19 bp, Artificial sequence
  SiRNA target sequence
agacaaaagtctgattata

SEQ ID NO: 142 - DNA, 19 bp, Artificial sequence
  SiRNA target sequence
gacaaaagtctgattatac

SEQ ID NO: 143 - DNA, 19 bp, Artificial sequence
  SiRNA target sequence
acaaaagtctgattataca

SEQ ID NO: 144 - DNA, 19 bp, Artificial sequence
  SiRNA target sequence
caaaagtctgattatacat

SEQ ID NO: 145 - DNA, 19 bp, Artificial sequence
  SiRNA target sequence
aaaagtctgattatacatc

SEQ ID NO: 146 - DNA, 19 bp, Artificial sequence
  SiRNA target sequence
aaagtctgattatacatca

SEQ ID NO: 147 - DNA, 19 bp, Artificial sequence
  SiRNA target sequence
aagtctgattatacatcaa

SEQ ID NO: 148 - DNA, 19 bp, Artificial sequence
  SiRNA target sequence
agtctgattatacatcaat

SEQ ID NO: 149 - DNA, 19 bp, Artificial sequence
  SiRNA target sequence
gtctgattatacatcaata

SEQ ID NO: 150 - DNA, 19 bp, Artificial sequence
  SiRNA target sequence
tctgattatacatcaataa

SEQ ID NO: 151 - DNA, 19 bp, Artificial sequence
  SiRNA target sequence
ctgattatacatcaataaa

SEQ ID NO: 152 - DNA, 19 bp, Artificial sequence
  SiRNA target sequence
tgattatacatcaataaaa

SEQ ID NO: 153 - DNA, 19 bp, Artificial sequence
  SiRNA target sequence
gattatacatcaataaaac

SEQ ID NO: 154 - DNA, 19 bp, Artificial sequence
  SiRNA target sequence
attatacatcaataaaaca

SEQ ID NO: 155 - DNA, 19 bp, Artificial sequence
  SiRNA target sequence
ttatacatcaataaaacag

SEQ ID NO: 156 - DNA, 19 bp, Artificial sequence
  SiRNA target sequence
tatacatcaataaaacagg

SEQ ID NO: 157 - DNA, 19 bp, Artificial sequence
  SiRNA target sequence
atacatcaataaaacagga

SEQ ID NO: 158 - DNA, 19 bp, Artificial sequence
  SiRNA target sequence
tacatcaataaaacaggaa

SEQ ID NO: 159 - DNA, 19 bp, Artificial sequence
  SiRNA target sequence
acatcaataaaacaggaag

SEQ ID NO: 160 - DNA, 19 bp, Artificial sequence
  SiRNA target sequence
catcaataaaacaggaagc

SEQ ID NO: 161 - DNA, 19 bp, Artificial sequence
  SiRNA target sequence
atcaataaaacaggaagca

SEQ ID NO: 162 - DNA, 19 bp, Artificial sequence
  SiRNA target sequence
tcaataaaacaggaagcag

SEQ ID NO: 163 - DNA, 19 bp, Artificial sequence
  SiRNA target sequence
caataaaacaggaagcaga

SEQ ID NO: 164 - DNA, 19 bp, Artificial sequence
  SiRNA target sequence
aataaaacaggaagcagat

SEQ ID NO: 165 - DNA, 19 bp, Artificial sequence
  SiRNA target sequence
ataaaacaggaagcagata

SEQ ID NO: 166 - DNA, 19 bp, Artificial sequence
  SiRNA target sequence
taaaacaggaagcagataa

SEQ ID NO: 167 - DNA, 19 bp, Artificial sequence
  SiRNA target sequence
aaaacaggaagcagataaa

SEQ ID NO: 168 - DNA, 19 bp, Artificial sequence
  SiRNA target sequence
aaacaggaagcagataaat

SEQ ID NO: 169 - DNA, 19 bp, Artificial sequence
  SiRNA target sequence
aacaggaagcagataaata

SEQ ID NO: 170 - DNA, 19 bp, Artificial sequence
  SiRNA target sequence
acaggaagcagataaatat

SEQ ID NO: 171 - DNA, 19 bp, Artificial sequence
  SiRNA target sequence
caggaagcagataaatatt

SEQ ID NO: 172 - DNA, 19 bp, Artificial sequence
  SiRNA target sequence
aggaagcagataaatattt

SEQ ID NO: 173 - DNA, 19 bp, Artificial sequence
  SiRNA target sequence
ggaagcagataaatatttt

SEQ ID NO: 174 - DNA, 19 bp, Artificial sequence
  SiRNA target sequence
gaagcagataaatatttta

SEQ ID NO: 175 - DNA, 19 bp, Artificial sequence
  SiRNA target sequence
aagcagataaatattttat

SEQ ID NO: 176 - DNA, 19 bp, Artificial sequence
  SiRNA target sequence
agcagataaatattttata

SEQ ID NO: 177 - DNA, 19 bp, Artificial sequence
  SiRNA target sequence
gcagataaatattttatac

SEQ ID NO: 178 - DNA, 19 bp, Artificial sequence
  SiRNA target sequence
cagataaatattttataca

SEQ ID NO: 179 - DNA, 19 bp, Artificial sequence
  SiRNA target sequence
agataaatattttatacaa

SEQ ID NO: 180 - DNA, 19 bp, Artificial sequence
  SiRNA target sequence
gataaatattttatacaag

SEQ ID NO: 181 - DNA, 19 bp, Artificial sequence
  SiRNA target sequence
ataaatattttatacaaga

SEQ ID NO: 182 - DNA, 19 bp, Artificial sequence
  SiRNA target sequence
taaatattttatacaagaa

SEQ ID NO: 183 - DNA, 19 bp, Artificial sequence
  SiRNA target sequence
aaatattttatacaagaag

SEQ ID NO: 184 - DNA, 19 bp, Artificial sequence
  SiRNA target sequence
aatattttatacaagaaga

SEQ ID NO: 185 - DNA, 19 bp, Artificial sequence
  SiRNA target sequence
atattttatacaagaagat

SEQ ID NO: 186 - DNA, 19 bp, Artificial sequence
  SiRNA target sequence
tattttatacaagaagatt

SEQ ID NO: 187 - DNA, 19 bp, Artificial sequence
  SiRNA target sequence
attttatacaagaagatta

SEQ ID NO: 188 - DNA, 19 bp, Artificial sequence
  SiRNA target sequence
ttttatacaagaagattat

SEQ ID NO: 189 - DNA, 19 bp, Artificial sequence
  SiRNA target sequence
tttatacaagaagattata

SEQ ID NO: 190 - DNA, 19 bp, Artificial sequence
  SiRNA target sequence
ttatacaagaagattataa

SEQ ID NO: 191 - DNA, 19 bp, Artificial sequence
  SiRNA target sequence
tatacaagaagattataaa

SEQ ID NO: 192 - DNA, 19 bp, Artificial sequence
  SiRNA target sequence
atacaagaagattataaaa

SEQ ID NO: 193 - DNA, 19 bp, Artificial sequence
  SiRNA target sequence
tacaagaagattataaaaa

SEQ ID NO: 194 - DNA, 19 bp, Artificial sequence
  SiRNA target sequence
acaagaagattataaaaat

SEQ ID NO: 195 - DNA, 19 bp, Artificial sequence
  SiRNA target sequence
caagaagattataaaaatg

SEQ ID NO: 196 - DNA, 19 bp, Artificial sequence
  SiRNA target sequence
aagaagattataaaaatgc

SEQ ID NO: 197 - DNA, 19 bp, Artificial sequence
  SiRNA target sequence
agaagattataaaaatgct

SEQ ID NO: 198 - DNA, 19 bp, Artificial sequence
  SiRNA target sequence
gaagattataaaaatgcta

SEQ ID NO: 199 - DNA, 19 bp, Artificial sequence
  SiRNA target sequence
aagattataaaaatgctat

SEQ ID NO: 200 - DNA, 19 bp, Artificial sequence
  SiRNA target sequence
agattataaaaatgctatt

SEQ ID NO: 201 - DNA, 19 bp, Artificial sequence
  SiRNA target sequence
gattataaaaatgctattc

SEQ ID NO: 202 - DNA, 19 bp, Artificial sequence
  SiRNA target sequence
attataaaaatgctattct

SEQ ID NO: 203 - DNA, 19 bp, Artificial sequence
  SiRNA target sequence
ttataaaaatgctattctg

SEQ ID NO: 204 - DNA, 19 bp, Artificial sequence
  SiRNA target sequence
tataaaaatgctattctgt

SEQ ID NO: 205 - DNA, 19 bp, Artificial sequence
  SiRNA target sequence
ataaaaatgctattctgtt

SEQ ID NO: 206 - DNA, 19 bp, Artificial sequence
  SiRNA target sequence
taaaaatgctattctgttg

SEQ ID NO: 207 - DNA, 19 bp, Artificial sequence
  SiRNA target sequence
aaaaatgctattctgttgt

SEQ ID NO: 208 - DNA, 19 bp, Artificial sequence
  SiRNA target sequence
aaaatgctattctgttgta

SEQ ID NO: 209 - DNA, 19 bp, Artificial sequence
  SiRNA target sequence
aaatgctattctgttgtac

SEQ ID NO: 210 - DNA, 19 bp, Artificial sequence
  SiRNA target sequence
aatgctattctgttgtaca

SEQ ID NO: 211 - DNA, 19 bp, Artificial sequence
  SiRNA target sequence
atgctattctgttgtacac

SEQ ID NO: 212 - DNA, 19 bp, Artificial sequence
  SiRNA target sequence
tgctattctgttgtacact

SEQ ID NO: 213 - DNA, 19 bp, Artificial sequence
  SiRNA target sequence
gctattctgttgtacacta

SEQ ID NO: 214 - DNA, 19 bp, Artificial sequence
  SiRNA target sequence
ctattctgttgtacactaa

SEQ ID NO: 215 - DNA, 19 bp, Artificial sequence
  SiRNA target sequence
tattctgttgtacactaaa

SEQ ID NO: 216 - DNA, 19 bp, Artificial sequence
  SiRNA target sequence
attctgttgtacactaaat

SEQ ID NO: 217 - DNA, 19 bp, Artificial sequence
  SiRNA target sequence
ttctgttgtacactaaatg

SEQ ID NO: 218 - DNA, 19 bp, Artificial sequence
  SiRNA target sequence
tctgttgtacactaaatgt

SEQ ID NO: 219 - DNA, 19 bp, Artificial sequence
  SiRNA target sequence
ctgttgtacactaaatgta

SEQ ID NO: 220 - DNA, 19 bp, Artificial sequence
  SiRNA target sequence
tgttgtacactaaatgtaa

SEQ ID NO: 221 - DNA, 19 bp, Artificial sequence
  SiRNA target sequence
gttgtacactaaatgtaaa

SEQ ID NO: 222 - DNA, 19 bp, Artificial sequence
  SiRNA target sequence
ttgtacactaaatgtaaat

SEQ ID NO: 223 - DNA, 19 bp, Artificial sequence
  SiRNA target sequence
tgtacactaaatgtaaata

SEQ ID NO: 224 - DNA, 19 bp, Artificial sequence
  SiRNA target sequence
gtacactaaatgtaaatat

SEQ ID NO: 225 - DNA, 19 bp, Artificial sequence
  SiRNA target sequence
tacactaaatgtaaatata

SEQ ID NO: 226 - DNA, 19 bp, Artificial sequence
  SiRNA target sequence
acactaaatgtaaatatat

SEQ ID NO: 227 - DNA, 19 bp, Artificial sequence
  SiRNA target sequence
cactaaatgtaaatatatg

SEQ ID NO: 228 - DNA, 19 bp, Artificial sequence
  SiRNA target sequence
actaaatgtaaatatatga

SEQ ID NO: 229 - DNA, 19 bp, Artificial sequence
  SiRNA target sequence
ctaaatgtaaatatatgaa

SEQ ID NO: 230 - DNA, 19 bp, Artificial sequence
  SiRNA target sequence
taaatgtaaatatatgaaa

SEQ ID NO: 231 - DNA, 19 bp, Artificial sequence
  SiRNA target sequence
aaatgtaaatatatgaaaa

SEQ ID NO: 232 - DNA, 19 bp, Artificial sequence
  SiRNA target sequence
aatgtaaatatatgaaaag

SEQ ID NO: 233 - DNA, 19 bp, Artificial sequence
  SiRNA target sequence
atgtaaatatatgaaaagt

SEQ ID NO: 234 - DNA, 19 bp, Artificial sequence
  SiRNA target sequence
tgtaaatatatgaaaagtg

SEQ ID NO: 235 - DNA, 19 bp, Artificial sequence
  SiRNA target sequence
gtaaatatatgaaaagtga

SEQ ID NO: 236 - DNA, 19 bp, Artificial sequence
  SiRNA target sequence
taaatatatgaaaagtgat

SEQ ID NO: 237 - DNA, 19 bp, Artificial sequence
  SiRNA target sequence
aaatatatgaaaagtgatg

SEQ ID NO: 238 - DNA, 19 bp, Artificial sequence
  SiRNA target sequence
aatatatgaaaagtgatgc

SEQ ID NO: 239 - DNA, 19 bp, Artificial sequence
  SiRNA target sequence
atatatgaaaagtgatgct

SEQ ID NO: 240 - DNA, 19 bp, Artificial sequence
  SiRNA target sequence
tatatgaaaagtgatgctg

SEQ ID NO: 241 - DNA, 19 bp, Artificial sequence
  SiRNA target sequence
atatgaaaagtgatgctga

SEQ ID NO: 242 - DNA, 19 bp, Artificial sequence
  SiRNA target sequence
tatgaaaagtgatgctgaa

SEQ ID NO: 243 - DNA, 19 bp, Artificial sequence
  SiRNA target sequence
atgaaaagtgatgctgaaa

SEQ ID NO: 244 - DNA, 19 bp, Artificial sequence
  SiRNA target sequence
tgaaaagtgatgctgaaat

SEQ ID NO: 245 - DNA, 19 bp, Artificial sequence
  SiRNA target sequence
gaaaagtgatgctgaaatt

SEQ ID NO: 246 - DNA, 19 bp, Artificial sequence
  SiRNA target sequence
aaaagtgatgctgaaattc

SEQ ID NO: 247 - DNA, 19 bp, Artificial sequence
  SiRNA target sequence
aaagtgatgctgaaattct

SEQ ID NO: 248 - DNA, 19 bp, Artificial sequence
  SiRNA target sequence
aagtgatgctgaaattctt

SEQ ID NO: 249 - DNA, 19 bp, Artificial sequence
  SiRNA target sequence
agtgatgctgaaattctta

SEQ ID NO: 250 - DNA, 19 bp, Artificial sequence
  SiRNA target sequence
gtgatgctgaaattcttac

SEQ ID NO: 251 - DNA, 19 bp, Artificial sequence
  SiRNA target sequence
tgatgctgaaattcttact

SEQ ID NO: 252 - DNA, 19 bp, Artificial sequence
  SiRNA target sequence
gatgctgaaattcttacta

SEQ ID NO: 253 - DNA, 19 bp, Artificial sequence
  SiRNA target sequence
atgctgaaattcttactaa

SEQ ID NO: 254 - DNA, 19 bp, Artificial sequence
  SiRNA target sequence
tgctgaaattcttactaaa

SEQ ID NO: 255 - DNA, 19 bp, Artificial sequence
  SiRNA target sequence
gctgaaattcttactaaaa

SEQ ID NO: 256 - DNA, 19 bp, Artificial sequence
  SiRNA target sequence
ctgaaattcttactaaaat

SEQ ID NO: 257 - DNA, 19 bp, Artificial sequence
  SiRNA target sequence
tgaaattcttactaaaatt

SEQ ID NO: 258 - DNA, 19 bp, Artificial sequence
  SiRNA target sequence
gaaattcttactaaaatta

SEQ ID NO: 259 - DNA, 19 bp, Artificial sequence
  SiRNA target sequence
aaattcttactaaaattag

SEQ ID NO: 260 - DNA, 19 bp, Artificial sequence
  SiRNA target sequence
aattcttactaaaattagt

SEQ ID NO: 261 - DNA, 19 bp, Artificial sequence
  SiRNA target sequence
attcttactaaaattagtc

SEQ ID NO: 262 - DNA, 19 bp, Artificial sequence
  SiRNA target sequence
ttcttactaaaattagtct

SEQ ID NO: 263 - DNA, 19 bp, Artificial sequence
  SiRNA target sequence
tcttactaaaattagtctc

SEQ ID NO: 264 - DNA, 19 bp, Artificial sequence
  SiRNA target sequence
cttactaaaattagtctct

SEQ ID NO: 265 - DNA, 19 bp, Artificial sequence
  SiRNA target sequence
ttactaaaattagtctctg

SEQ ID NO: 266 - DNA, 19 bp, Artificial sequence
  SiRNA target sequence
tactaaaattagtctctgt

SEQ ID NO: 267 - DNA, 19 bp, Artificial sequence
  SiRNA target sequence
actaaaattagtctctgta

SEQ ID NO: 268 - DNA, 19 bp, Artificial sequence
  SiRNA target sequence
ctaaaattagtctctgtaa

SEQ ID NO: 269 - DNA, 19 bp, Artificial sequence
  SiRNA target sequence
taaaattagtctctgtaat

SEQ ID NO: 270 - DNA, 19 bp, Artificial sequence
  SiRNA target sequence
aaaattagtctctgtaatt

SEQ ID NO: 271 - DNA, 19 bp, Artificial sequence
  SiRNA target sequence
aaattagtctctgtaatta

SEQ ID NO: 272 - DNA, 19 bp, Artificial sequence
  SiRNA target sequence
aattagtctctgtaattat

SEQ ID NO: 273 - DNA, 19 bp, Artificial sequence
  SiRNA target sequence
attagtctctgtaattatt

SEQ ID NO: 274 - DNA, 19 bp, Artificial sequence
  SiRNA target sequence
ttagtctctgtaattattt

SEQ ID NO: 275 - DNA, 19 bp, Artificial sequence
  SiRNA target sequence
tagtctctgtaattatttc

SEQ ID NO: 276 - DNA, 19 bp, Artificial sequence
  SiRNA target sequence
agtctctgtaattatttct

SEQ ID NO: 277 - DNA, 19 bp, Artificial sequence
  SiRNA target sequence
gtctctgtaattatttctt

SEQ ID NO: 278 - DNA, 19 bp, Artificial sequence
  SiRNA target sequence
tctctgtaattatttctta

SEQ ID NO: 279 - DNA, 19 bp, Artificial sequence
  SiRNA target sequence
ctctgtaattatttcttaa

SEQ ID NO: 280 - DNA, 19 bp, Artificial sequence
  SiRNA target sequence
tctgtaattatttcttaaa

SEQ ID NO: 281 - DNA, 19 bp, Artificial sequence
  SiRNA target sequence
ctgtaattatttcttaaaa

SEQ ID NO: 282 - DNA, 19 bp, Artificial sequence
  SiRNA target sequence
tgtaattatttcttaaaaa

SEQ ID NO: 283 - DNA, 19 bp, Artificial sequence
  SiRNA target sequence
gtaattatttcttaaaaaa

SEQ ID NO: 284 - DNA, 19 bp, Artificial sequence
  SiRNA target sequence
taattatttcttaaaaaat

SEQ ID NO: 285 - DNA, 19 bp, Artificial sequence
  SiRNA target sequence
aattatttcttaaaaaatt

SEQ ID NO: 286 - DNA, 19 bp, Artificial sequence
  SiRNA target sequence
attatttcttaaaaaatta

SEQ ID NO: 287 - DNA, 19 bp, Artificial sequence
  SiRNA target sequence
ttatttcttaaaaaattat

SEQ ID NO: 288 - DNA, 19 bp, Artificial sequence
  SiRNA target sequence
tatttcttaaaaaattatc

SEQ ID NO: 289 - DNA, 19 bp, Artificial sequence
  SiRNA target sequence
atttcttaaaaaattatca

SEQ ID NO: 290 - DNA, 19 bp, Artificial sequence
  SiRNA target sequence
tttcttaaaaaattatcaa

SEQ ID NO: 291 - DNA, 19 bp, Artificial sequence
  SiRNA target sequence
ttcttaaaaaattatcaag

SEQ ID NO: 292 - DNA, 19 bp, Artificial sequence
  SiRNA target sequence
tcttaaaaaattatcaaga

SEQ ID NO: 293 - DNA, 19 bp, Artificial sequence
  SiRNA target sequence
cttaaaaaattatcaagaa

SEQ ID NO: 294 - DNA, 19 bp, Artificial sequence
  SiRNA target sequence
ttaaaaaattatcaagaag

SEQ ID NO: 295 - DNA, 19 bp, Artificial sequence
  SiRNA target sequence
taaaaaattatcaagaagt

SEQ ID NO: 296 - DNA, 19 bp, Artificial sequence
  SiRNA target sequence
aaaaaattatcaagaagtt

SEQ ID NO: 297 - DNA, 19 bp, Artificial sequence
  SiRNA target sequence
aaaaattatcaagaagtta

SEQ ID NO: 298 - DNA, 19 bp, Artificial sequence
  SiRNA target sequence
aaaattatcaagaagttat

SEQ ID NO: 299 - DNA, 19 bp, Artificial sequence
  SiRNA target sequence
aaattatcaagaagttata

SEQ ID NO: 300 - DNA, 19 bp, Artificial sequence
  SiRNA target sequence
aattatcaagaagttataa

SEQ ID NO: 301 - DNA, 19 bp, Artificial sequence
  SiRNA target sequence
attatcaagaagttataaa

SEQ ID NO: 302 - DNA, 19 bp, Artificial sequence
  SiRNA target sequence
ttatcaagaagttataaat

SEQ ID NO: 303 - DNA, 19 bp, Artificial sequence
  SiRNA target sequence
tatcaagaagttataaata

SEQ ID NO: 304 - DNA, 19 bp, Artificial sequence
  SiRNA target sequence
atcaagaagttataaataa

SEQ ID NO: 305 - DNA, 19 bp, Artificial sequence
  SiRNA target sequence
tcaagaagttataaataat

SEQ ID NO: 306 - DNA, 19 bp, Artificial sequence
  SiRNA target sequence
caagaagttataaataatt

SEQ ID NO: 307 - DNA, 19 bp, Artificial sequence
  SiRNA target sequence
aagaagttataaataattc

SEQ ID NO: 308 - DNA, 19 bp, Artificial sequence
  SiRNA target sequence
agaagttataaataattct

SEQ ID NO: 309 - DNA, 19 bp, Artificial sequence
  SiRNA target sequence
gaagttataaataattctt

SEQ ID NO: 310 - DNA, 19 bp, Artificial sequence
  SiRNA target sequence
aagttataaataattcttt

SEQ ID NO: 311 - DNA, 19 bp, Artificial sequence
  SiRNA target sequence
agttataaataattcttta

SEQ ID NO: 312 - DNA, 19 bp, Artificial sequence
  SiRNA target sequence
gttataaataattctttat

SEQ ID NO: 313 - DNA, 19 bp, Artificial sequence
  SiRNA target sequence
ttataaataattctttatt

SEQ ID NO: 314 - DNA, 19 bp, Artificial sequence
  SiRNA target sequence
tataaataattctttattt

SEQ ID NO: 315 - DNA, 19 bp, Artificial sequence
  SiRNA target sequence
ataaataattctttattta

SEQ ID NO: 316 - DNA, 19 bp, Artificial sequence
  SiRNA target sequence
taaataattctttatttaa

SEQ ID NO: 317 - DNA, 19 bp, Artificial sequence
  SiRNA target sequence
aaataattctttatttaag

SEQ ID NO: 318 - DNA, 19 bp, Artificial sequence
  SiRNA target sequence
aataattctttatttaaga

SEQ ID NO: 319 - DNA, 19 bp, Artificial sequence
  SiRNA target sequence
ataattctttatttaagac

SEQ ID NO: 320 - DNA, 19 bp, Artificial sequence
  SiRNA target sequence
taattctttatttaagaca

SEQ ID NO: 321 - DNA, 19 bp, Artificial sequence
  SiRNA target sequence
aattctttatttaagacaa

SEQ ID NO: 322 - DNA, 19 bp, Artificial sequence
  SiRNA target sequence
attctttatttaagacaaa

SEQ ID NO: 323 - DNA, 19 bp, Artificial sequence
  SiRNA target sequence
ttctttatttaagacaaat

SEQ ID NO: 324 - DNA, 19 bp, Artificial sequence
  SiRNA target sequence
tctttatttaagacaaata

SEQ ID NO: 325 - DNA, 19 bp, Artificial sequence
  SiRNA target sequence
ctttatttaagacaaataa

SEQ ID NO: 326 - DNA, 19 bp, Artificial sequence
  SiRNA target sequence
tttatttaagacaaataat

SEQ ID NO: 327 - DNA, 19 bp, Artificial sequence
  SiRNA target sequence
ttatttaagacaaataata

SEQ ID NO: 328 - DNA, 19 bp, Artificial sequence
  SiRNA target sequence
tatttaagacaaataataa

SEQ ID NO: 329 - DNA, 19 bp, Artificial sequence
  SiRNA target sequence
atttaagacaaataataaa

SEQ ID NO: 330 - DNA, 19 bp, Artificial sequence
  SiRNA target sequence
tttaagacaaataataaag

SEQ ID NO: 331 - DNA, 19 bp, Artificial sequence
  SiRNA target sequence
ttaagacaaataataaaga

SEQ ID NO: 332 - DNA, 19 bp, Artificial sequence
  SiRNA target sequence
taagacaaataataaagat

SEQ ID NO: 333 - DNA, 19 bp, Artificial sequence
  SiRNA target sequence
aagacaaataataaagatc

SEQ ID NO: 334 - DNA, 19 bp, Artificial sequence
  SiRNA target sequence
agacaaataataaagatct

SEQ ID NO: 335 - DNA, 19 bp, Artificial sequence
  SiRNA target sequence
gacaaataataaagatcta

SEQ ID NO: 336 - DNA, 19 bp, Artificial sequence
  SiRNA target sequence
acaaataataaagatctaa

SEQ ID NO: 337 - DNA, 19 bp, Artificial sequence
  SiRNA target sequence
caaataataaagatctaat

SEQ ID NO: 338 - DNA, 19 bp, Artificial sequence
  SiRNA target sequence
aaataataaagatctaata

SEQ ID NO: 339 - DNA, 19 bp, Artificial sequence
  SiRNA target sequence
aataataaagatctaataa

SEQ ID NO: 340 - DNA, 19 bp, Artificial sequence
  SiRNA target sequence
ataataaagatctaataaa

SEQ ID NO: 341 - DNA, 19 bp, Artificial sequence
  SiRNA target sequence
taataaagatctaataaaa

SEQ ID NO: 342 - DNA, 19 bp, Artificial sequence
  SiRNA target sequence
aataaagatctaataaaaa

SEQ ID NO: 343 - DNA, 19 bp, Artificial sequence
  SiRNA target sequence
ataaagatctaataaaaat

SEQ ID NO: 344 - DNA, 19 bp, Artificial sequence
  SiRNA target sequence
taaagatctaataaaaata

SEQ ID NO: 345 - DNA, 19 bp, Artificial sequence
  SiRNA target sequence
aaagatctaataaaaataa

SEQ ID NO: 346 - DNA, 19 bp, Artificial sequence
  SiRNA target sequence
aagatctaataaaaataag

SEQ ID NO: 347 - DNA, 19 bp, Artificial sequence
  SiRNA target sequence
agatctaataaaaataaga

SEQ ID NO: 348 - DNA, 19 bp, Artificial sequence
  SiRNA target sequence
gatctaataaaaataagat

SEQ ID NO: 349 - DNA, 19 bp, Artificial sequence
  SiRNA target sequence
atctaataaaaataagatc

SEQ ID NO: 350 - DNA, 19 bp, Artificial sequence
  SiRNA target sequence
tctaataaaaataagatct

SEQ ID NO: 351 - DNA, 19 bp, Artificial sequence
  SiRNA target sequence
ctaataaaaataagatctg

SEQ ID NO: 352 - DNA, 19 bp, Artificial sequence
  SiRNA target sequence
taataaaaataagatctga

SEQ ID NO: 353 - DNA, 19 bp, Artificial sequence
  SiRNA target sequence
aataaaaataagatctgaa

SEQ ID NO: 354 - DNA, 19 bp, Artificial sequence
  SiRNA target sequence
ataaaaataagatctgaat

SEQ ID NO: 355 - DNA, 19 bp, Artificial sequence
  SiRNA target sequence
taaaaataagatctgaatg

SEQ ID NO: 356 - DNA, 19 bp, Artificial sequence
  SiRNA target sequence
aaaaataagatctgaatgt

SEQ ID NO: 357 - DNA, 19 bp, Artificial sequence
  SiRNA target sequence
aaaataagatctgaatgtt

SEQ ID NO: 358 - DNA, 19 bp, Artificial sequence
  SiRNA target sequence
aaataagatctgaatgtta

SEQ ID NO: 359 - DNA, 19 bp, Artificial sequence
  SiRNA target sequence
aataagatctgaatgttac

SEQ ID NO: 360 - DNA, 19 bp, Artificial sequence
  SiRNA target sequence
ataagatctgaatgttaca

SEQ ID NO: 361 - DNA, 19 bp, Artificial sequence
  SiRNA target sequence
taagatctgaatgttacaa

SEQ ID NO: 362 - DNA, 19 bp, Artificial sequence
  SiRNA target sequence
aagatctgaatgttacaag

SEQ ID NO: 363 - DNA, 19 bp, Artificial sequence
  SiRNA target sequence
agatctgaatgttacaagc

SEQ ID NO: 364 - DNA, 19 bp, Artificial sequence
  SiRNA target sequence
gatctgaatgttacaagca

SEQ ID NO: 365 - DNA, 19 bp, Artificial sequence
  SiRNA target sequence
atctgaatgttacaagcag

SEQ ID NO: 366 - DNA, 19 bp, Artificial sequence
  SiRNA target sequence
tctgaatgttacaagcaga

SEQ ID NO: 367 - DNA, 19 bp, Artificial sequence
  SiRNA target sequence
ctgaatgttacaagcagat

SEQ ID NO: 368 - DNA, 19 bp, Artificial sequence
  SiRNA target sequence
tgaatgttacaagcagatg

SEQ ID NO: 369 - DNA, 19 bp, Artificial sequence
  SiRNA target sequence
gaatgttacaagcagatgg

SEQ ID NO: 370 - DNA, 19 bp, Artificial sequence
  SiRNA target sequence
aatgttacaagcagatggg

SEQ ID NO: 371 - DNA, 19 bp, Artificial sequence
  SiRNA target sequence
atgttacaagcagatggga

SEQ ID NO: 372 - DNA, 19 bp, Artificial sequence
  SiRNA target sequence
tgttacaagcagatgggaa

SEQ ID NO: 373 - DNA, 19 bp, Artificial sequence
  SiRNA target sequence
gttacaagcagatgggaaa

SEQ ID NO: 374 - DNA, 19 bp, Artificial sequence
  SiRNA target sequence
ttacaagcagatgggaaat

SEQ ID NO: 375 - DNA, 19 bp, Artificial sequence
  SiRNA target sequence
tacaagcagatgggaaata

SEQ ID NO: 376 - DNA, 19 bp, Artificial sequence
  SiRNA target sequence
acaagcagatgggaaataa

SEQ ID NO: 377 - DNA, 19 bp, Artificial sequence
  SiRNA target sequence
caagcagatgggaaataaa

SEQ ID NO: 378 - DNA, 19 bp, Artificial sequence
  SiRNA target sequence
aagcagatgggaaataaaa

SEQ ID NO: 379 - DNA, 19 bp, Artificial sequence
  SiRNA target sequence
agcagatgggaaataaaaa

SEQ ID NO: 380 - DNA, 19 bp, Artificial sequence
  SiRNA target sequence
gcagatgggaaataaaaaa

SEQ ID NO: 381 - DNA, 19 bp, Artificial sequence
  SiRNA target sequence
cagatgggaaataaaaaaa

SEQ ID NO: 382 - DNA, 19 bp, Artificial sequence
  SiRNA target sequence
agatgggaaataaaaaaaa

SEQ ID NO: 383 - DNA, 19 bp, Artificial sequence
  SiRNA target sequence
gatgggaaataaaaaaaaa

SEQ ID NO: 384 - DNA, 19 bp, Artificial sequence
  SiRNA target sequence
atgggaaataaaaaaaaat

SEQ ID NO: 385 - DNA, 19 bp, Artificial sequence
  SiRNA target sequence
tgggaaataaaaaaaaatt

SEQ ID NO: 386 - DNA, 19 bp, Artificial sequence
  SiRNA target sequence
gggaaataaaaaaaaattt

SEQ ID NO: 387 - DNA, 19 bp, Artificial sequence
  SiRNA target sequence
ggaaataaaaaaaaatttc

SEQ ID NO: 388 - DNA, 19 bp, Artificial sequence
  SiRNA target sequence
gaaataaaaaaaaatttct

SEQ ID NO: 389 - DNA, 19 bp, Artificial sequence
  SiRNA target sequence
aaataaaaaaaaatttctt

SEQ ID NO: 390 - DNA, 19 bp, Artificial sequence
  SiRNA target sequence
aataaaaaaaaatttctta

SEQ ID NO: 391 - DNA, 19 bp, Artificial sequence
  SiRNA target sequence
ataaaaaaaaatttcttaa

SEQ ID NO: 392 - DNA, 19 bp, Artificial sequence
  SiRNA target sequence
taaaaaaaaatttcttaag

SEQ ID NO: 393 - DNA, 19 bp, Artificial sequence
  SiRNA target sequence
aaaaaaaaatttcttaagg

SEQ ID NO: 394 - DNA, 19 bp, Artificial sequence
  SiRNA target sequence
aaaaaaaatttcttaagga

SEQ ID NO: 395 - DNA, 19 bp, Artificial sequence
  SiRNA target sequence
aaaaaaatttcttaaggat

SEQ ID NO: 396 - DNA, 19 bp, Artificial sequence
  SiRNA target sequence
aaaaaatttcttaaggatt

SEQ ID NO: 397 - DNA, 19 bp, Artificial sequence
  SiRNA target sequence
aaaaatttcttaaggattt

SEQ ID NO: 398 - DNA, 19 bp, Artificial sequence
  SiRNA target sequence
aaaatttcttaaggattta

SEQ ID NO: 399 - DNA, 19 bp, Artificial sequence
  SiRNA target sequence
aaatttcttaaggatttag

SEQ ID NO: 400 - DNA, 19 bp, Artificial sequence
  SiRNA target sequence
aatttcttaaggatttagc

SEQ ID NO: 401 - DNA, 19 bp, Artificial sequence
  SiRNA target sequence
atttcttaaggatttagca

SEQ ID NO: 402 - DNA, 19 bp, Artificial sequence
  SiRNA target sequence
tttcttaaggatttagcac

SEQ ID NO: 403 - DNA, 19 bp, Artificial sequence
  SiRNA target sequence
ttcttaaggatttagcact

SEQ ID NO: 404 - DNA, 19 bp, Artificial sequence
  SiRNA target sequence
tcttaaggatttagcactt

SEQ ID NO: 405 - DNA, 19 bp, Artificial sequence
  SiRNA target sequence
cttaaggatttagcacttt

SEQ ID NO: 406 - DNA, 19 bp, Artificial sequence
  SiRNA target sequence
ttaaggatttagcacttta

SEQ ID NO: 407 - DNA, 19 bp, Artificial sequence
  SiRNA target sequence
taaggatttagcactttat

SEQ ID NO: 408 - DNA, 19 bp, Artificial sequence
  SiRNA target sequence
aaggatttagcactttatg

SEQ ID NO: 409 - DNA, 19 bp, Artificial sequence
  SiRNA target sequence
aggatttagcactttatga

SEQ ID NO: 410 - DNA, 19 bp, Artificial sequence
  SiRNA target sequence
ggatttagcactttatgaa

SEQ ID NO: 411 - DNA, 19 bp, Artificial sequence
  SiRNA target sequence
gatttagcactttatgaaa

SEQ ID NO: 412 - DNA, 19 bp, Artificial sequence
  SiRNA target sequence
atttagcactttatgaaac

SEQ ID NO: 413 - DNA, 19 bp, Artificial sequence
  SiRNA target sequence
tttagcactttatgaaaca

SEQ ID NO: 414 - DNA, 19 bp, Artificial sequence
  SiRNA target sequence
ttagcactttatgaaacat

SEQ ID NO: 415 - DNA, 19 bp, Artificial sequence
  SiRNA target sequence
tagcactttatgaaacatt

SEQ ID NO: 416 - DNA, 19 bp, Artificial sequence
  SiRNA target sequence
agcactttatgaaacattt

SEQ ID NO: 417 - DNA, 19 bp, Artificial sequence
  SiRNA target sequence
gcactttatgaaacatttg

SEQ ID NO: 418 - DNA, 19 bp, Artificial sequence
  SiRNA target sequence
cactttatgaaacatttgc

SEQ ID NO: 419 - DNA, 19 bp, Artificial sequence
  SiRNA target sequence
actttatgaaacatttgct

SEQ ID NO: 420 - DNA, 19 bp, Artificial sequence
  SiRNA target sequence
ctttatgaaacatttgcta

SEQ ID NO: 421 - DNA, 19 bp, Artificial sequence
  SiRNA target sequence
tttatgaaacatttgctaa

SEQ ID NO: 422 - DNA, 19 bp, Artificial sequence
  SiRNA target sequence
ttatgaaacatttgctaat

SEQ ID NO: 423 - DNA, 19 bp, Artificial sequence
  SiRNA target sequence
tatgaaacatttgctaata

SEQ ID NO: 424 - DNA, 19 bp, Artificial sequence
  SiRNA target sequence
atgaaacatttgctaataa

SEQ ID NO: 425 - DNA, 19 bp, Artificial sequence
  SiRNA target sequence
tgaaacatttgctaataat

SEQ ID NO: 426 - DNA, 19 bp, Artificial sequence
  SiRNA target sequence
gaaacatttgctaataata

SEQ ID NO: 427 - DNA, 19 bp, Artificial sequence
  SiRNA target sequence
aaacatttgctaataataa

SEQ ID NO: 428 - DNA, 19 bp, Artificial sequence
  SiRNA target sequence
aacatttgctaataataaa

SEQ ID NO: 429 - DNA, 19 bp, Artificial sequence
  SiRNA target sequence
acatttgctaataataaag

SEQ ID NO: 430 - DNA, 19 bp, Artificial sequence
  SiRNA target sequence
catttgctaataataaaga

SEQ ID NO: 431 - DNA, 19 bp, Artificial sequence
  SiRNA target sequence
atttgctaataataaagaa

SEQ ID NO: 432 - DNA, 19 bp, Artificial sequence
  SiRNA target sequence
tttgctaataataaagaag

SEQ ID NO: 433 - DNA, 19 bp, Artificial sequence
  SiRNA target sequence
ttgctaataataaagaagt

SEQ ID NO: 434 - DNA, 19 bp, Artificial sequence
  SiRNA target sequence
tgctaataataaagaagtc

SEQ ID NO: 435 - DNA, 19 bp, Artificial sequence
  SiRNA target sequence
gctaataataaagaagtcc

SEQ ID NO: 436 - DNA, 19 bp, Artificial sequence
  SiRNA target sequence
ctaataataaagaagtcca

SEQ ID NO: 437 - DNA, 19 bp, Artificial sequence
  SiRNA target sequence
taataataaagaagtccaa

SEQ ID NO: 438 - DNA, 19 bp, Artificial sequence
  SiRNA target sequence
aataataaagaagtccaag

SEQ ID NO: 439 - DNA, 19 bp, Artificial sequence
  SiRNA target sequence
ataataaagaagtccaaga

SEQ ID NO: 440 - DNA, 19 bp, Artificial sequence
  SiRNA target sequence
taataaagaagtccaagat

SEQ ID NO: 441 - DNA, 19 bp, Artificial sequence
  SiRNA target sequence
aataaagaagtccaagatg

SEQ ID NO: 442 - DNA, 19 bp, Artificial sequence
  SiRNA target sequence
ataaagaagtccaagatga

SEQ ID NO: 443 - DNA, 19 bp, Artificial sequence
  SiRNA target sequence
taaagaagtccaagatgaa

SEQ ID NO: 444 - DNA, 19 bp, Artificial sequence
  SiRNA target sequence
aaagaagtccaagatgaaa

SEQ ID NO: 445 - DNA, 19 bp, Artificial sequence
  SiRNA target sequence
aagaagtccaagatgaaat

SEQ ID NO: 446 - DNA, 19 bp, Artificial sequence
  SiRNA target sequence
agaagtccaagatgaaatt

SEQ ID NO: 447 - DNA, 19 bp, Artificial sequence
  SiRNA target sequence
gaagtccaagatgaaatta

SEQ ID NO: 448 - DNA, 19 bp, Artificial sequence
  SiRNA target sequence
aagtccaagatgaaattat

SEQ ID NO: 449 - DNA, 19 bp, Artificial sequence
  SiRNA target sequence
agtccaagatgaaattatg

SEQ ID NO: 450 - DNA, 19 bp, Artificial sequence
  SiRNA target sequence
gtccaagatgaaattatgc

SEQ ID NO: 451 - DNA, 19 bp, Artificial sequence
  SiRNA target sequence
tccaagatgaaattatgca

SEQ ID NO: 452 - DNA, 19 bp, Artificial sequence
  SiRNA target sequence
ccaagatgaaattatgcag

SEQ ID NO: 453 - DNA, 19 bp, Artificial sequence
  SiRNA target sequence
caagatgaaattatgcaga

SEQ ID NO: 454 - DNA, 19 bp, Artificial sequence
  SiRNA target sequence
aagatgaaattatgcagac

SEQ ID NO: 455 - DNA, 19 bp, Artificial sequence
  SiRNA target sequence
agatgaaattatgcagact

SEQ ID NO: 456 - DNA, 19 bp, Artificial sequence
  SiRNA target sequence
gatgaaattatgcagactg

SEQ ID NO: 457 - DNA, 19 bp, Artificial sequence
  SiRNA target sequence
atgaaattatgcagactgt

SEQ ID NO: 458 - DNA, 19 bp, Artificial sequence
  SiRNA target sequence
tgaaattatgcagactgtt

SEQ ID NO: 459 - DNA, 19 bp, Artificial sequence
  SiRNA target sequence
gaaattatgcagactgtta

SEQ ID NO: 460 - DNA, 19 bp, Artificial sequence
  SiRNA target sequence
aaattatgcagactgttaa

SEQ ID NO: 461 - DNA, 19 bp, Artificial sequence
  SiRNA target sequence
aattatgcagactgttaaa

SEQ ID NO: 462 - DNA, 19 bp, Artificial sequence
  SiRNA target sequence
attatgcagactgttaaag

SEQ ID NO: 463 - DNA, 19 bp, Artificial sequence
  SiRNA target sequence
ttatgcagactgttaaaga

SEQ ID NO: 464 - DNA, 19 bp, Artificial sequence
  SiRNA target sequence
tatgcagactgttaaagaa

SEQ ID NO: 465 - DNA, 19 bp, Artificial sequence
  SiRNA target sequence
atgcagactgttaaagaaa

SEQ ID NO: 466 - DNA, 19 bp, Artificial sequence
  SiRNA target sequence
tgcagactgttaaagaaat

SEQ ID NO: 467 - DNA, 19 bp, Artificial sequence
  SiRNA target sequence
gcagactgttaaagaaatt

SEQ ID NO: 468 - DNA, 19 bp, Artificial sequence
  SiRNA target sequence
cagactgttaaagaaattt

SEQ ID NO: 469 - DNA, 19 bp, Artificial sequence
  SiRNA target sequence
agactgttaaagaaatttg

SEQ ID NO: 470 - DNA, 19 bp, Artificial sequence
  SiRNA target sequence
gactgttaaagaaatttgt

SEQ ID NO: 471 - DNA, 19 bp, Artificial sequence
  SiRNA target sequence
actgttaaagaaatttgtg

SEQ ID NO: 472 - DNA, 19 bp, Artificial sequence
  SiRNA target sequence
ctgttaaagaaatttgtga

SEQ ID NO: 473 - DNA, 19 bp, Artificial sequence
  SiRNA target sequence
tgttaaagaaatttgtgaa

SEQ ID NO: 474 - DNA, 19 bp, Artificial sequence
  SiRNA target sequence
gttaaagaaatttgtgaag

SEQ ID NO: 475 - DNA, 19 bp, Artificial sequence
  SiRNA target sequence
ttaaagaaatttgtgaaga

SEQ ID NO: 476 - DNA, 19 bp, Artificial sequence
  SiRNA target sequence
taaagaaatttgtgaagaa

SEQ ID NO: 477 - DNA, 19 bp, Artificial sequence
  SiRNA target sequence
aaagaaatttgtgaagaag

SEQ ID NO: 478 - DNA, 19 bp, Artificial sequence
  SiRNA target sequence
aagaaatttgtgaagaaga

SEQ ID NO: 479 - DNA, 19 bp, Artificial sequence
  SiRNA target sequence
agaaatttgtgaagaagaa

SEQ ID NO: 480 - DNA, 19 bp, Artificial sequence
  SiRNA target sequence
gaaatttgtgaagaagaag

SEQ ID NO: 481 - DNA, 19 bp, Artificial sequence
  SiRNA target sequence
aaatttgtgaagaagaagt

SEQ ID NO: 482 - DNA, 19 bp, Artificial sequence
  SiRNA target sequence
aatttgtgaagaagaagtg

SEQ ID NO: 483 - DNA, 19 bp, Artificial sequence
  SiRNA target sequence
atttgtgaagaagaagtga

SEQ ID NO: 484 - DNA, 19 bp, Artificial sequence
  SiRNA target sequence
tttgtgaagaagaagtgaa

SEQ ID NO: 485 - DNA, 19 bp, Artificial sequence
  SiRNA target sequence
ttgtgaagaagaagtgaat

SEQ ID NO: 486 - DNA, 19 bp, Artificial sequence
  SiRNA target sequence
tgtgaagaagaagtgaatg

SEQ ID NO: 487 - DNA, 19 bp, Artificial sequence
  SiRNA target sequence
gtgaagaagaagtgaatga

SEQ ID NO: 488 - DNA, 19 bp, Artificial sequence
  SiRNA target sequence
tgaagaagaagtgaatgag

SEQ ID NO: 489 - DNA, 19 bp, Artificial sequence
  SiRNA target sequence
gaagaagaagtgaatgagt

SEQ ID NO: 490 - DNA, 19 bp, Artificial sequence
  SiRNA target sequence
aagaagaagtgaatgagtt

SEQ ID NO: 491 - DNA, 19 bp, Artificial sequence
  SiRNA target sequence
agaagaagtgaatgagttt

SEQ ID NO: 492 - DNA, 19 bp, Artificial sequence
  SiRNA target sequence
gaagaagtgaatgagttta

SEQ ID NO: 493 - DNA, 19 bp, Artificial sequence
  SiRNA target sequence
aagaagtgaatgagtttat

SEQ ID NO: 494 - DNA, 19 bp, Artificial sequence
  SiRNA target sequence
agaagtgaatgagtttatt

SEQ ID NO: 495 - DNA, 19 bp, Artificial sequence
  SiRNA target sequence
gaagtgaatgagtttattg

SEQ ID NO: 496 - DNA, 19 bp, Artificial sequence
  SiRNA target sequence
aagtgaatgagtttattga

SEQ ID NO: 497 - DNA, 19 bp, Artificial sequence
  SiRNA target sequence
agtgaatgagtttattgaa

SEQ ID NO: 498 - DNA, 19 bp, Artificial sequence
  SiRNA target sequence
gtgaatgagtttattgaac

SEQ ID NO: 499 - DNA, 19 bp, Artificial sequence
  SiRNA target sequence
tgaatgagtttattgaaca

SEQ ID NO: 500 - DNA, 19 bp, Artificial sequence
  SiRNA target sequence
gaatgagtttattgaacaa

SEQ ID NO: 501 - DNA, 19 bp, Artificial sequence
  SiRNA target sequence
aatgagtttattgaacaag

SEQ ID NO: 502 - DNA, 19 bp, Artificial sequence
  SiRNA target sequence
atgagtttattgaacaaga

SEQ ID NO: 503 - DNA, 19 bp, Artificial sequence
  SiRNA target sequence
tgagtttattgaacaagaa

SEQ ID NO: 504 - DNA, 19 bp, Artificial sequence
  SiRNA target sequence
gagtttattgaacaagaag

SEQ ID NO: 505 - DNA, 19 bp, Artificial sequence
  SiRNA target sequence
agtttattgaacaagaagg

SEQ ID NO: 506 - DNA, 19 bp, Artificial sequence
  SiRNA target sequence
gtttattgaacaagaaggt

SEQ ID NO: 507 - DNA, 19 bp, Artificial sequence
  SiRNA target sequence
tttattgaacaagaaggtt

SEQ ID NO: 508 - DNA, 19 bp, Artificial sequence
  SiRNA target sequence
ttattgaacaagaaggttt

SEQ ID NO: 509 - DNA, 19 bp, Artificial sequence
  SiRNA target sequence
tattgaacaagaaggttta

SEQ ID NO: 510 - DNA, 19 bp, Artificial sequence
  SiRNA target sequence
attgaacaagaaggtttaa

SEQ ID NO: 511 - DNA, 19 bp, Artificial sequence
  SiRNA target sequence
ttgaacaagaaggtttaaa

SEQ ID NO: 512 - DNA, 19 bp, Artificial sequence
  SiRNA target sequence
tgaacaagaaggtttaaaa

SEQ ID NO: 513 - DNA, 19 bp, Artificial sequence
  SiRNA target sequence
gaacaagaaggtttaaaaa

SEQ ID NO: 514 - DNA, 19 bp, Artificial sequence
  SiRNA target sequence
aacaagaaggtttaaaaat

SEQ ID NO: 515 - DNA, 19 bp, Artificial sequence
  SiRNA target sequence
acaagaaggtttaaaaatt

SEQ ID NO: 516 - DNA, 19 bp, Artificial sequence
  SiRNA target sequence
caagaaggtttaaaaatta

SEQ ID NO: 517 - DNA, 19 bp, Artificial sequence
  SiRNA target sequence
aagaaggtttaaaaattaa

SEQ ID NO: 518 - DNA, 19 bp, Artificial sequence
  SiRNA target sequence
agaaggtttaaaaattaat

SEQ ID NO: 519 - DNA, 19 bp, Artificial sequence
  SiRNA target sequence
gaaggtttaaaaattaata

SEQ ID NO: 520 - DNA, 19 bp, Artificial sequence
  SiRNA target sequence
aaggtttaaaaattaataa

SEQ ID NO: 521 - DNA, 19 bp, Artificial sequence
  SiRNA target sequence
aggtttaaaaattaataaa

SEQ ID NO: 522 - DNA, 19 bp, Artificial sequence
  SiRNA target sequence
ggtttaaaaattaataaag

SEQ ID NO: 523 - DNA, 19 bp, Artificial sequence
  SiRNA target sequence
gtttaaaaattaataaaga

SEQ ID NO: 524 - DNA, 19 bp, Artificial sequence
  SiRNA target sequence
tttaaaaattaataaagaa

SEQ ID NO: 525 - DNA, 19 bp, Artificial sequence
  SiRNA target sequence
ttaaaaattaataaagaag

SEQ ID NO: 526 - DNA, 19 bp, Artificial sequence
  SiRNA target sequence
taaaaattaataaagaaga

SEQ ID NO: 527 - DNA, 19 bp, Artificial sequence
  SiRNA target sequence
aaaaattaataaagaagat

SEQ ID NO: 528 - DNA, 19 bp, Artificial sequence
  SiRNA target sequence
aaaattaataaagaagatg

SEQ ID NO: 529 - DNA, 19 bp, Artificial sequence
  SiRNA target sequence
aaattaataaagaagatgt

SEQ ID NO: 530 - DNA, 19 bp, Artificial sequence
  SiRNA target sequence
aattaataaagaagatgtg

SEQ ID NO: 531 - DNA, 19 bp, Artificial sequence
  SiRNA target sequence
attaataaagaagatgtgc

SEQ ID NO: 532 - DNA, 19 bp, Artificial sequence
  SiRNA target sequence
ttaataaagaagatgtgct

SEQ ID NO: 533 - DNA, 19 bp, Artificial sequence
  SiRNA target sequence
taataaagaagatgtgcta

SEQ ID NO: 534 - DNA, 19 bp, Artificial sequence
  SiRNA target sequence
aataaagaagatgtgctaa

SEQ ID NO: 535 - DNA, 19 bp, Artificial sequence
  SiRNA target sequence
ataaagaagatgtgctaag

SEQ ID NO: 536 - DNA, 19 bp, Artificial sequence
  SiRNA target sequence
taaagaagatgtgctaaga

SEQ ID NO: 537 - DNA, 19 bp, Artificial sequence
  SiRNA target sequence
aaagaagatgtgctaagag

SEQ ID NO: 538 - DNA, 19 bp, Artificial sequence
  SiRNA target sequence
aagaagatgtgctaagagg

SEQ ID NO: 539 - DNA, 19 bp, Artificial sequence
  SiRNA target sequence
agaagatgtgctaagagga

SEQ ID NO: 540 - DNA, 19 bp, Artificial sequence
  SiRNA target sequence
gaagatgtgctaagaggac

SEQ ID NO: 541 - DNA, 19 bp, Artificial sequence
  SiRNA target sequence
aagatgtgctaagaggact

SEQ ID NO: 542 - DNA, 19 bp, Artificial sequence
  SiRNA target sequence
agatgtgctaagaggactt

SEQ ID NO: 543 - DNA, 19 bp, Artificial sequence
  SiRNA target sequence
gatgtgctaagaggacttg

SEQ ID NO: 544 - DNA, 19 bp, Artificial sequence
  SiRNA target sequence
atgtgctaagaggacttgt

SEQ ID NO: 545 - DNA, 19 bp, Artificial sequence
  SiRNA target sequence
tgtgctaagaggacttgtt

SEQ ID NO: 546 - DNA, 19 bp, Artificial sequence
  SiRNA target sequence
gtgctaagaggacttgttt

SEQ ID NO: 547 - DNA, 19 bp, Artificial sequence
  SiRNA target sequence
tgctaagaggacttgtttc

SEQ ID NO: 548 - DNA, 19 bp, Artificial sequence
  SiRNA target sequence
gctaagaggacttgtttca

SEQ ID NO: 549 - DNA, 19 bp, Artificial sequence
  SiRNA target sequence
ctaagaggacttgtttcaa

SEQ ID NO: 550 - DNA, 19 bp, Artificial sequence
  SiRNA target sequence
taagaggacttgtttcaat

SEQ ID NO: 551 - DNA, 19 bp, Artificial sequence
  SiRNA target sequence
aagaggacttgtttcaata

SEQ ID NO: 552 - DNA, 19 bp, Artificial sequence
  SiRNA target sequence
agaggacttgtttcaataa

SEQ ID NO: 553 - DNA, 19 bp, Artificial sequence
  SiRNA target sequence
gaggacttgtttcaataaa

SEQ ID NO: 554 - DNA, 19 bp, Artificial sequence
  SiRNA target sequence
aggacttgtttcaataaaa

SEQ ID NO: 555 - DNA, 19 bp, Artificial sequence
  SiRNA target sequence
ggacttgtttcaataaaaa

SEQ ID NO: 556 - DNA, 19 bp, Artificial sequence
  SiRNA target sequence
gacttgtttcaataaaaaa

SEQ ID NO: 557 - DNA, 19 bp, Artificial sequence
  SiRNA target sequence
acttgtttcaataaaaaat

SEQ ID NO: 558 - DNA, 19 bp, Artificial sequence
  SiRNA target sequence
cttgtttcaataaaaaata

SEQ ID NO: 559 - DNA, 19 bp, Artificial sequence
  SiRNA target sequence
ttgtttcaataaaaaatat

SEQ ID NO: 560 - DNA, 19 bp, Artificial sequence
  SiRNA target sequence
tgtttcaataaaaaatata

SEQ ID NO: 561 - DNA, 19 bp, Artificial sequence
  SiRNA target sequence
gtttcaataaaaaatataa

SEQ ID NO: 562 - DNA, 19 bp, Artificial sequence
  SiRNA target sequence
tttcaataaaaaatataaa

SEQ ID NO: 563 - DNA, 19 bp, Artificial sequence
  SiRNA target sequence
ttcaataaaaaatataaat

SEQ ID NO: 564 - DNA, 19 bp, Artificial sequence
  SiRNA target sequence
tcaataaaaaatataaatg

SEQ ID NO: 565 - DNA, 19 bp, Artificial sequence
  SiRNA target sequence
caataaaaaatataaatga

SEQ ID NO: 566 - DNA, 19 bp, Artificial sequence
  SiRNA target sequence
aataaaaaatataaatgag

SEQ ID NO: 567 - DNA, 19 bp, Artificial sequence
  SiRNA target sequence
ataaaaaatataaatgaga

SEQ ID NO: 568 - DNA, 19 bp, Artificial sequence
  SiRNA target sequence
taaaaaatataaatgagat

SEQ ID NO: 569 - DNA, 19 bp, Artificial sequence
  SiRNA target sequence
aaaaaatataaatgagatt

SEQ ID NO: 570 - DNA, 19 bp, Artificial sequence
  SiRNA target sequence
aaaaatataaatgagattt

SEQ ID NO: 571 - DNA, 19 bp, Artificial sequence
  SiRNA target sequence
aaaatataaatgagattta

SEQ ID NO: 572 - DNA, 19 bp, Artificial sequence
  SiRNA target sequence
aaatataaatgagatttat

SEQ ID NO: 573 - DNA, 19 bp, Artificial sequence
  SiRNA target sequence
aatataaatgagatttatg

SEQ ID NO: 574 - DNA, 19 bp, Artificial sequence
  SiRNA target sequence
atataaatgagatttatga

SEQ ID NO: 575 - DNA, 19 bp, Artificial sequence
  SiRNA target sequence
tataaatgagatttatgat

SEQ ID NO: 576 - DNA, 19 bp, Artificial sequence
  SiRNA target sequence
ataaatgagatttatgatg

SEQ ID NO: 577 - DNA, 19 bp, Artificial sequence
  SiRNA target sequence
taaatgagatttatgatgc

SEQ ID NO: 578 - DNA, 19 bp, Artificial sequence
  SiRNA target sequence
aaatgagatttatgatgca

SEQ ID NO: 579 - DNA, 19 bp, Artificial sequence
  SiRNA target sequence
aatgagatttatgatgcat

SEQ ID NO: 580 - DNA, 19 bp, Artificial sequence
  SiRNA target sequence
atgagatttatgatgcatt

SEQ ID NO: 581 - DNA, 19 bp, Artificial sequence
  SiRNA target sequence
tgagatttatgatgcattt

SEQ ID NO: 582 - DNA, 19 bp, Artificial sequence
  SiRNA target sequence
gagatttatgatgcatttg

SEQ ID NO: 583 - DNA, 19 bp, Artificial sequence
  SiRNA target sequence
agatttatgatgcatttgg

SEQ ID NO: 584 - DNA, 19 bp, Artificial sequence
  SiRNA target sequence
gatttatgatgcatttgga

SEQ ID NO: 585 - DNA, 19 bp, Artificial sequence
  SiRNA target sequence
atttatgatgcatttggag

SEQ ID NO: 586 - DNA, 19 bp, Artificial sequence
  SiRNA target sequence
tttatgatgcatttggagg

SEQ ID NO: 587 - DNA, 19 bp, Artificial sequence
  SiRNA target sequence
ttatgatgcatttggaggt

SEQ ID NO: 588 - DNA, 19 bp, Artificial sequence
  SiRNA target sequence
tatgatgcatttggaggta

SEQ ID NO: 589 - DNA, 19 bp, Artificial sequence
  SiRNA target sequence
atgatgcatttggaggtaa

SEQ ID NO: 590 - DNA, 19 bp, Artificial sequence
  SiRNA target sequence
tgatgcatttggaggtaaa

SEQ ID NO: 591 - DNA, 19 bp, Artificial sequence
  SiRNA target sequence
gatgcatttggaggtaaat

SEQ ID NO: 592 - DNA, 19 bp, Artificial sequence
  SiRNA target sequence
atgcatttggaggtaaatc

SEQ ID NO: 593 - DNA, 19 bp, Artificial sequence
  SiRNA target sequence
tgcatttggaggtaaatct

SEQ ID NO: 594 - DNA, 19 bp, Artificial sequence
  SiRNA target sequence
gcatttggaggtaaatcta

SEQ ID NO: 595 - DNA, 19 bp, Artificial sequence
  SiRNA target sequence
catttggaggtaaatctaa

SEQ ID NO: 596 - DNA, 19 bp, Artificial sequence
  SiRNA target sequence
atttggaggtaaatctaag

SEQ ID NO: 597 - DNA, 19 bp, Artificial sequence
  SiRNA target sequence
tttggaggtaaatctaaga

SEQ ID NO: 598 - DNA, 19 bp, Artificial sequence
  SiRNA target sequence
ttggaggtaaatctaagaa

SEQ ID NO: 599 - DNA, 19 bp, Artificial sequence
  SiRNA target sequence
tggaggtaaatctaagaag

SEQ ID NO: 600 - DNA, 19 bp, Artificial sequence
  SiRNA target sequence
ggaggtaaatctaagaagt

SEQ ID NO: 601 - DNA, 19 bp, Artificial sequence
  SiRNA target sequence
gaggtaaatctaagaagtt

SEQ ID NO: 602 - DNA, 19 bp, Artificial sequence
  SiRNA target sequence
aggtaaatctaagaagttt

SEQ ID NO: 603 - DNA, 19 bp, Artificial sequence
  SiRNA target sequence
ggtaaatctaagaagttta

SEQ ID NO: 604 - DNA, 19 bp, Artificial sequence
  SiRNA target sequence
gtaaatctaagaagtttaa

SEQ ID NO: 605 - DNA, 19 bp, Artificial sequence
  SiRNA target sequence
taaatctaagaagtttaaa

SEQ ID NO: 606 - DNA, 19 bp, Artificial sequence
  SiRNA target sequence
aaatctaagaagtttaaat

SEQ ID NO: 607 - DNA, 19 bp, Artificial sequence
  SiRNA target sequence
aatctaagaagtttaaatt

SEQ ID NO: 608 - DNA, 19 bp, Artificial sequence
  SiRNA target sequence
atctaagaagtttaaattt

SEQ ID NO: 609 - DNA, 19 bp, Artificial sequence
  SiRNA target sequence
tctaagaagtttaaatttt

SEQ ID NO: 610 - DNA, 19 bp, Artificial sequence
  SiRNA target sequence
ctaagaagtttaaattttc

SEQ ID NO: 611 - DNA, 19 bp, Artificial sequence
  SiRNA target sequence
taagaagtttaaattttct

SEQ ID NO: 612 - DNA, 19 bp, Artificial sequence
  SiRNA target sequence
aagaagtttaaattttcta

SEQ ID NO: 613 - DNA, 19 bp, Artificial sequence
  SiRNA target sequence
agaagtttaaattttctaa

SEQ ID NO: 614 - DNA, 19 bp, Artificial sequence
  SiRNA target sequence
gaagtttaaattttctaat

SEQ ID NO: 615 - DNA, 19 bp, Artificial sequence
  SiRNA target sequence
aagtttaaattttctaatg

SEQ ID NO: 616 - DNA, 19 bp, Artificial sequence
  SiRNA target sequence
agtttaaattttctaatga

SEQ ID NO: 617 - DNA, 19 bp, Artificial sequence
  SiRNA target sequence
gtttaaattttctaatgat

SEQ ID NO: 618 - DNA, 19 bp, Artificial sequence
  SiRNA target sequence
tttaaattttctaatgatg

SEQ ID NO: 619 - DNA, 19 bp, Artificial sequence
  SiRNA target sequence
ttaaattttctaatgatga

SEQ ID NO: 620 - DNA, 19 bp, Artificial sequence
  SiRNA target sequence
taaattttctaatgatgaa

SEQ ID NO: 621 - DNA, 19 bp, Artificial sequence
  SiRNA target sequence
aaattttctaatgatgaaa

SEQ ID NO: 622 - DNA, 19 bp, Artificial sequence
  SiRNA target sequence
aattttctaatgatgaaaa

SEQ ID NO: 623 - DNA, 19 bp, Artificial sequence
  SiRNA target sequence
attttctaatgatgaaaag

SEQ ID NO: 624 - DNA, 19 bp, Artificial sequence
  SiRNA target sequence
ttttctaatgatgaaaagg

SEQ ID NO: 625 - DNA, 19 bp, Artificial sequence
  SiRNA target sequence
tttctaatgatgaaaagga

SEQ ID NO: 626 - DNA, 19 bp, Artificial sequence
  SiRNA target sequence
ttctaatgatgaaaaggaa

SEQ ID NO: 627 - DNA, 19 bp, Artificial sequence
  SiRNA target sequence
tctaatgatgaaaaggaag

SEQ ID NO: 628 - DNA, 19 bp, Artificial sequence
  SiRNA target sequence
ctaatgatgaaaaggaagt

SEQ ID NO: 629 - DNA, 19 bp, Artificial sequence
  SiRNA target sequence
taatgatgaaaaggaagtg

SEQ ID NO: 630 - DNA, 19 bp, Artificial sequence
  SiRNA target sequence
aatgatgaaaaggaagtgt

SEQ ID NO: 631 - DNA, 19 bp, Artificial sequence
  SiRNA target sequence
atgatgaaaaggaagtgtt

SEQ ID NO: 632 - DNA, 19 bp, Artificial sequence
  SiRNA target sequence
tgatgaaaaggaagtgtta

SEQ ID NO: 633 - DNA, 19 bp, Artificial sequence
  SiRNA target sequence
gatgaaaaggaagtgttaa

SEQ ID NO: 634 - DNA, 19 bp, Artificial sequence
  SiRNA target sequence
atgaaaaggaagtgttaaa

SEQ ID NO: 635 - DNA, 19 bp, Artificial sequence
  SiRNA target sequence
tgaaaaggaagtgttaaat

SEQ ID NO: 636 - DNA, 19 bp, Artificial sequence
  SiRNA target sequence
gaaaaggaagtgttaaatc

SEQ ID NO: 637 - DNA, 19 bp, Artificial sequence
  SiRNA target sequence
aaaaggaagtgttaaatct

SEQ ID NO: 638 - DNA, 19 bp, Artificial sequence
  SiRNA target sequence
aaaggaagtgttaaatctt

SEQ ID NO: 639 - DNA, 19 bp, Artificial sequence
  SiRNA target sequence
aaggaagtgttaaatcttc

SEQ ID NO: 640 - DNA, 19 bp, Artificial sequence
  SiRNA target sequence
aggaagtgttaaatcttct

SEQ ID NO: 641 - DNA, 19 bp, Artificial sequence
  SiRNA target sequence
ggaagtgttaaatcttctt

SEQ ID NO: 642 - DNA, 19 bp, Artificial sequence
  SiRNA target sequence
gaagtgttaaatcttctta

SEQ ID NO: 643 - DNA, 19 bp, Artificial sequence
  SiRNA target sequence
aagtgttaaatcttcttaa

SEQ ID NO: 644 - DNA, 19 bp, Artificial sequence
  SiRNA target sequence
agtgttaaatcttcttaat

SEQ ID NO: 645 - DNA, 19 bp, Artificial sequence
  SiRNA target sequence
gtgttaaatcttcttaatg

SEQ ID NO: 646 - DNA, 19 bp, Artificial sequence
  SiRNA target sequence
tgttaaatcttcttaatgc

SEQ ID NO: 647 - DNA, 19 bp, Artificial sequence
  SiRNA target sequence
gttaaatcttcttaatgcc

SEQ ID NO: 648 - DNA, 19 bp, Artificial sequence
  SiRNA target sequence
ttaaatcttcttaatgcca

SEQ ID NO: 649 - DNA, 19 bp, Artificial sequence
  SiRNA target sequence
taaatcttcttaatgccat

SEQ ID NO: 650 - DNA, 19 bp, Artificial sequence
  SiRNA target sequence
aaatcttcttaatgccatt

SEQ ID NO: 651 - DNA, 19 bp, Artificial sequence
  SiRNA target sequence
aatcttcttaatgccatta

SEQ ID NO: 652 - DNA, 19 bp, Artificial sequence
  SiRNA target sequence
atcttcttaatgccattat

SEQ ID NO: 653 - DNA, 19 bp, Artificial sequence
  SiRNA target sequence
tcttcttaatgccattatt

SEQ ID NO: 654 - DNA, 19 bp, Artificial sequence
  SiRNA target sequence
cttcttaatgccattattt

SEQ ID NO: 655 - DNA, 19 bp, Artificial sequence
  SiRNA target sequence
ttcttaatgccattatttt

SEQ ID NO: 656 - DNA, 19 bp, Artificial sequence
  SiRNA target sequence
tcttaatgccattatttta

SEQ ID NO: 657 - DNA, 19 bp, Artificial sequence
  SiRNA target sequence
cttaatgccattattttac

SEQ ID NO: 658 - DNA, 19 bp, Artificial sequence
  SiRNA target sequence
ttaatgccattattttaca

SEQ ID NO: 659 - DNA, 19 bp, Artificial sequence
  SiRNA target sequence
taatgccattattttacac

SEQ ID NO: 660 - DNA, 19 bp, Artificial sequence
  SiRNA target sequence
aatgccattattttacacc

SEQ ID NO: 661 - DNA, 19 bp, Artificial sequence
  SiRNA target sequence
atgccattattttacacct

SEQ ID NO: 662 - DNA, 19 bp, Artificial sequence
  SiRNA target sequence
tgccattattttacaccta

SEQ ID NO: 663 - DNA, 19 bp, Artificial sequence
  SiRNA target sequence
gccattattttacacctaa

SEQ ID NO: 664 - DNA, 19 bp, Artificial sequence
  SiRNA target sequence
ccattattttacacctaaa

SEQ ID NO: 665 - DNA, 19 bp, Artificial sequence
  SiRNA target sequence
cattattttacacctaaaa

SEQ ID NO: 666 - DNA, 19 bp, Artificial sequence
  SiRNA target sequence
attattttacacctaaaag

SEQ ID NO: 667 - DNA, 19 bp, Artificial sequence
  SiRNA target sequence
ttattttacacctaaaagg

SEQ ID NO: 668 - DNA, 19 bp, Artificial sequence
  SiRNA target sequence
tattttacacctaaaagga

SEQ ID NO: 669 - DNA, 19 bp, Artificial sequence
  SiRNA target sequence
attttacacctaaaaggaa

SEQ ID NO: 670 - DNA, 19 bp, Artificial sequence
  SiRNA target sequence
ttttacacctaaaaggaaa

SEQ ID NO: 671 - DNA, 19 bp, Artificial sequence
  SiRNA target sequence
tttacacctaaaaggaaaa

SEQ ID NO: 672 - DNA, 19 bp, Artificial sequence
  SiRNA target sequence
ttacacctaaaaggaaaaa

SEQ ID NO: 673 - DNA, 19 bp, Artificial sequence
  SiRNA target sequence
tacacctaaaaggaaaaaa

SEQ ID NO: 674 - DNA, 19 bp, Artificial sequence
  SiRNA target sequence
acacctaaaaggaaaaaaa

SEQ ID NO: 675 - DNA, 19 bp, Artificial sequence
  SiRNA target sequence
cacctaaaaggaaaaaaag

SEQ ID NO: 676 - DNA, 19 bp, Artificial sequence
  SiRNA target sequence
acctaaaaggaaaaaaaga

SEQ ID NO: 677 - DNA, 19 bp, Artificial sequence
  SiRNA target sequence
cctaaaaggaaaaaaagaa

SEQ ID NO: 678 - DNA, 19 bp, Artificial sequence
  SiRNA target sequence
ctaaaaggaaaaaaagaac

SEQ ID NO: 679 - DNA, 19 bp, Artificial sequence
  SiRNA target sequence
taaaaggaaaaaaagaaca

SEQ ID NO: 680 - DNA, 19 bp, Artificial sequence
  SiRNA target sequence
aaaaggaaaaaaagaacag

SEQ ID NO: 681 - DNA, 19 bp, Artificial sequence
  SiRNA target sequence
aaaggaaaaaaagaacagg

SEQ ID NO: 682 - DNA, 19 bp, Artificial sequence
  SiRNA target sequence
aaggaaaaaaagaacaggc

SEQ ID NO: 683 - DNA, 19 bp, Artificial sequence
  SiRNA target sequence
aggaaaaaaagaacaggca

SEQ ID NO: 684 - DNA, 19 bp, Artificial sequence
  SiRNA target sequence
ggaaaaaaagaacaggcaa

SEQ ID NO: 685 - DNA, 19 bp, Artificial sequence
  SiRNA target sequence
gaaaaaaagaacaggcaat

SEQ ID NO: 686 - DNA, 19 bp, Artificial sequence
  SiRNA target sequence
aaaaaaagaacaggcaatt

SEQ ID NO: 687 - DNA, 19 bp, Artificial sequence
  SiRNA target sequence
aaaaaagaacaggcaattc

SEQ ID NO: 688 - DNA, 19 bp, Artificial sequence
  SiRNA target sequence
aaaaagaacaggcaattct

SEQ ID NO: 689 - DNA, 19 bp, Artificial sequence
  SiRNA target sequence
aaaagaacaggcaattctt

SEQ ID NO: 690 - DNA, 19 bp, Artificial sequence
  SiRNA target sequence
aaagaacaggcaattcttt

SEQ ID NO: 691 - DNA, 19 bp, Artificial sequence
  SiRNA target sequence
aagaacaggcaattctttt

SEQ ID NO: 692 - DNA, 19 bp, Artificial sequence
  SiRNA target sequence
agaacaggcaattctttta

SEQ ID NO: 693 - DNA, 19 bp, Artificial sequence
  SiRNA target sequence
gaacaggcaattcttttat

SEQ ID NO: 694 - DNA, 19 bp, Artificial sequence
  SiRNA target sequence
aacaggcaattcttttatt

SEQ ID NO: 695 - DNA, 19 bp, Artificial sequence
  SiRNA target sequence
acaggcaattcttttatta

SEQ ID NO: 696 - DNA, 19 bp, Artificial sequence
  SiRNA target sequence
caggcaattcttttattag

SEQ ID NO: 697 - DNA, 19 bp, Artificial sequence
  SiRNA target sequence
aggcaattcttttattaga

SEQ ID NO: 698 - DNA, 19 bp, Artificial sequence
  SiRNA target sequence
ggcaattcttttattagaa

SEQ ID NO: 699 - DNA, 19 bp, Artificial sequence
  SiRNA target sequence
gcaattcttttattagaaa

SEQ ID NO: 700 - DNA, 19 bp, Artificial sequence
  SiRNA target sequence
caattcttttattagaaaa

SEQ ID NO: 701 - DNA, 19 bp, Artificial sequence
  SiRNA target sequence
aattcttttattagaaaaa

SEQ ID NO: 702 - DNA, 19 bp, Artificial sequence
  SiRNA target sequence
attcttttattagaaaaat

SEQ ID NO: 703 - DNA, 19 bp, Artificial sequence
  SiRNA target sequence
ttcttttattagaaaaatc

SEQ ID NO: 704 - DNA, 19 bp, Artificial sequence
  SiRNA target sequence
tcttttattagaaaaatct

SEQ ID NO: 705 - DNA, 19 bp, Artificial sequence
  SiRNA target sequence
cttttattagaaaaatcta

SEQ ID NO: 706 - DNA, 19 bp, Artificial sequence
  SiRNA target sequence
ttttattagaaaaatctac

SEQ ID NO: 707 - DNA, 19 bp, Artificial sequence
  SiRNA target sequence
tttattagaaaaatctact

SEQ ID NO: 708 - DNA, 19 bp, Artificial sequence
  SiRNA target sequence
ttattagaaaaatctactt

SEQ ID NO: 709 - DNA, 19 bp, Artificial sequence
  SiRNA target sequence
tattagaaaaatctactta

SEQ ID NO: 710 - DNA, 19 bp, Artificial sequence
  SiRNA target sequence
attagaaaaatctacttat

SEQ ID NO: 711 - DNA, 19 bp, Artificial sequence
  SiRNA target sequence
ttagaaaaatctacttata

SEQ ID NO: 712 - DNA, 19 bp, Artificial sequence
  SiRNA target sequence
tagaaaaatctacttataa

SEQ ID NO: 713 - DNA, 19 bp, Artificial sequence
  SiRNA target sequence
agaaaaatctacttataaa

SEQ ID NO: 714 - DNA, 19 bp, Artificial sequence
  SiRNA target sequence
gaaaaatctacttataaat

SEQ ID NO: 715 - DNA, 19 bp, Artificial sequence
  SiRNA target sequence
aaaaatctacttataaata

SEQ ID NO: 716 - DNA, 19 bp, Artificial sequence
  SiRNA target sequence
aaaatctacttataaatac

SEQ ID NO: 717 - DNA, 19 bp, Artificial sequence
  SiRNA target sequence
aaatctacttataaataca

SEQ ID NO: 718 - DNA, 19 bp, Artificial sequence
  SiRNA target sequence
aatctacttataaatacag

SEQ ID NO: 719 - DNA, 19 bp, Artificial sequence
  SiRNA target sequence
atctacttataaatacagt

SEQ ID NO: 720 - DNA, 19 bp, Artificial sequence
  SiRNA target sequence
tctacttataaatacagta

SEQ ID NO: 721 - DNA, 19 bp, Artificial sequence
  SiRNA target sequence
ctacttataaatacagtat

SEQ ID NO: 722 - DNA, 19 bp, Artificial sequence
  SiRNA target sequence
tacttataaatacagtatc

SEQ ID NO: 723 - DNA, 19 bp, Artificial sequence
  SiRNA target sequence
acttataaatacagtatct

SEQ ID NO: 724 - DNA, 19 bp, Artificial sequence
  SiRNA target sequence
cttataaatacagtatctt

SEQ ID NO: 725 - DNA, 19 bp, Artificial sequence
  SiRNA target sequence
ttataaatacagtatcttg

SEQ ID NO: 726 - DNA, 19 bp, Artificial sequence
  SiRNA target sequence
tataaatacagtatcttgt

SEQ ID NO: 727 - DNA, 19 bp, Artificial sequence
  SiRNA target sequence
ataaatacagtatcttgta

SEQ ID NO: 728 - DNA, 19 bp, Artificial sequence
  SiRNA target sequence
taaatacagtatcttgtat

SEQ ID NO: 729 - DNA, 19 bp, Artificial sequence
  SiRNA target sequence
aaatacagtatcttgtata

SEQ ID NO: 730 - DNA, 19 bp, Artificial sequence
  SiRNA target sequence
aatacagtatcttgtatag

SEQ ID NO: 731 - DNA, 19 bp, Artificial sequence
  SiRNA target sequence
atacagtatcttgtataga

SEQ ID NO: 732 - DNA, 19 bp, Artificial sequence
  SiRNA target sequence
tacagtatcttgtatagag

SEQ ID NO: 733 - DNA, 19 bp, Artificial sequence
  SiRNA target sequence
acagtatcttgtatagagc

SEQ ID NO: 734 - DNA, 19 bp, Artificial sequence
  SiRNA target sequence
cagtatcttgtatagagca

SEQ ID NO: 735 - DNA, 19 bp, Artificial sequence
  SiRNA target sequence
agtatcttgtatagagcat

SEQ ID NO: 736 - DNA, 19 bp, Artificial sequence
  SiRNA target sequence
gtatcttgtatagagcata

SEQ ID NO: 737 - DNA, 19 bp, Artificial sequence
  SiRNA target sequence
tatcttgtatagagcatat

SEQ ID NO: 738 - DNA, 19 bp, Artificial sequence
  SiRNA target sequence
atcttgtatagagcatatt

SEQ ID NO: 739 - DNA, 19 bp, Artificial sequence
  SiRNA target sequence
tcttgtatagagcatattt

SEQ ID NO: 740 - DNA, 19 bp, Artificial sequence
  SiRNA target sequence
cttgtatagagcatatttt

SEQ ID NO: 741 - DNA, 19 bp, Artificial sequence
  SiRNA target sequence
ttgtatagagcatattttc

SEQ ID NO: 742 - DNA, 19 bp, Artificial sequence
  SiRNA target sequence
tgtatagagcatattttct

SEQ ID NO: 743 - DNA, 19 bp, Artificial sequence
  SiRNA target sequence
gtatagagcatattttctt

SEQ ID NO: 744 - DNA, 19 bp, Artificial sequence
  SiRNA target sequence
tatagagcatattttctta

SEQ ID NO: 745 - DNA, 19 bp, Artificial sequence
  SiRNA target sequence
atagagcatattttcttac

SEQ ID NO: 746 - DNA, 19 bp, Artificial sequence
  SiRNA target sequence
tagagcatattttcttaca

SEQ ID NO: 747 - DNA, 19 bp, Artificial sequence
  SiRNA target sequence
agagcatattttcttacat

SEQ ID NO: 748 - DNA, 19 bp, Artificial sequence
  SiRNA target sequence
gagcatattttcttacatt

SEQ ID NO: 749 - DNA, 19 bp, Artificial sequence
  SiRNA target sequence
agcatattttcttacattg

SEQ ID NO: 750 - DNA, 19 bp, Artificial sequence
  SiRNA target sequence
gcatattttcttacattga

SEQ ID NO: 751 - DNA, 19 bp, Artificial sequence
  SiRNA target sequence
catattttcttacattgaa

SEQ ID NO: 752 - DNA, 19 bp, Artificial sequence
  SiRNA target sequence
atattttcttacattgaag

SEQ ID NO: 753 - DNA, 19 bp, Artificial sequence
  SiRNA target sequence
tattttcttacattgaaga

SEQ ID NO: 754 - DNA, 19 bp, Artificial sequence
  SiRNA target sequence
attttcttacattgaagaa

SEQ ID NO: 755 - DNA, 19 bp, Artificial sequence
  SiRNA target sequence
ttttcttacattgaagaat

SEQ ID NO: 756 - DNA, 19 bp, Artificial sequence
  SiRNA target sequence
tttcttacattgaagaatg

SEQ ID NO: 757 - DNA, 19 bp, Artificial sequence
  SiRNA target sequence
ttcttacattgaagaatga

SEQ ID NO: 758 - DNA, 19 bp, Artificial sequence
  SiRNA target sequence
tcttacattgaagaatgaa

SEQ ID NO: 759 - DNA, 19 bp, Artificial sequence
  SiRNA target sequence
cttacattgaagaatgaat

SEQ ID NO: 760 - DNA, 19 bp, Artificial sequence
  SiRNA target sequence
ttacattgaagaatgaata

SEQ ID NO: 761 - DNA, 19 bp, Artificial sequence
  SiRNA target sequence
tacattgaagaatgaatat

SEQ ID NO: 762 - DNA, 19 bp, Artificial sequence
  SiRNA target sequence
acattgaagaatgaatata

SEQ ID NO: 763 - DNA, 19 bp, Artificial sequence
  SiRNA target sequence
cattgaagaatgaatatat

SEQ ID NO: 764 - DNA, 19 bp, Artificial sequence
  SiRNA target sequence
attgaagaatgaatatatt

SEQ ID NO: 765 - DNA, 19 bp, Artificial sequence
  SiRNA target sequence
ttgaagaatgaatatattt

SEQ ID NO: 766 - DNA, 19 bp, Artificial sequence
  SiRNA target sequence
tgaagaatgaatatatttc

SEQ ID NO: 767 - DNA, 19 bp, Artificial sequence
  SiRNA target sequence
gaagaatgaatatatttca

SEQ ID NO: 768 - DNA, 19 bp, Artificial sequence
  SiRNA target sequence
aagaatgaatatatttcat

SEQ ID NO: 769 - DNA, 19 bp, Artificial sequence
  SiRNA target sequence
agaatgaatatatttcatc

SEQ ID NO: 770 - DNA, 19 bp, Artificial sequence
  SiRNA target sequence
gaatgaatatatttcatct

SEQ ID NO: 771 - DNA, 19 bp, Artificial sequence
  SiRNA target sequence
aatgaatatatttcatctt

SEQ ID NO: 772 - DNA, 19 bp, Artificial sequence
  SiRNA target sequence
atgaatatatttcatcttc

SEQ ID NO: 773 - DNA, 19 bp, Artificial sequence
  SiRNA target sequence
tgaatatatttcatcttca

SEQ ID NO: 774 - DNA, 19 bp, Artificial sequence
  SiRNA target sequence
gaatatatttcatcttcat

SEQ ID NO: 775 - DNA, 19 bp, Artificial sequence
  SiRNA target sequence
aatatatttcatcttcatt

SEQ ID NO: 776 - DNA, 19 bp, Artificial sequence
  SiRNA target sequence
atatatttcatcttcattg

SEQ ID NO: 777 - DNA, 19 bp, Artificial sequence
  SiRNA target sequence
tatatttcatcttcattgc

SEQ ID NO: 778 - DNA, 19 bp, Artificial sequence
  SiRNA target sequence
atatttcatcttcattgcc

SEQ ID NO: 779 - DNA, 19 bp, Artificial sequence
  SiRNA target sequence
tatttcatcttcattgcct

SEQ ID NO: 780 - DNA, 19 bp, Artificial sequence
  SiRNA target sequence
atttcatcttcattgcctt

SEQ ID NO: 781 - DNA, 19 bp, Artificial sequence
  SiRNA target sequence
tttcatcttcattgccttt

SEQ ID NO: 782 - DNA, 19 bp, Artificial sequence
  SiRNA target sequence
ttcatcttcattgccttta

SEQ ID NO: 783 - DNA, 19 bp, Artificial sequence
  SiRNA target sequence
tcatcttcattgcctttag

SEQ ID NO: 784 - DNA, 19 bp, Artificial sequence
  SiRNA target sequence
catcttcattgcctttaga

SEQ ID NO: 785 - DNA, 19 bp, Artificial sequence
  SiRNA target sequence
atcttcattgcctttagat

SEQ ID NO: 786 - DNA, 19 bp, Artificial sequence
  SiRNA target sequence
tcttcattgcctttagatg

SEQ ID NO: 787 - DNA, 19 bp, Artificial sequence
  SiRNA target sequence
cttcattgcctttagatga

SEQ ID NO: 788 - DNA, 19 bp, Artificial sequence
  SiRNA target sequence
ttcattgcctttagatgac

SEQ ID NO: 789 - DNA, 19 bp, Artificial sequence
  SiRNA target sequence
tcattgcctttagatgacg

SEQ ID NO: 790 - DNA, 19 bp, Artificial sequence
  SiRNA target sequence
cattgcctttagatgacga

SEQ ID NO: 791 - DNA, 19 bp, Artificial sequence
  SiRNA target sequence
attgcctttagatgacgag

SEQ ID NO: 792 - DNA, 19 bp, Artificial sequence
  SiRNA target sequence
ttgcctttagatgacgaga

SEQ ID NO: 793 - DNA, 19 bp, Artificial sequence
  SiRNA target sequence
tgcctttagatgacgagat

SEQ ID NO: 794 - DNA, 19 bp, Artificial sequence
  SiRNA target sequence
gcctttagatgacgagatt

SEQ ID NO: 795 - DNA, 19 bp, Artificial sequence
  SiRNA target sequence
cctttagatgacgagatta

SEQ ID NO: 796 - DNA, 19 bp, Artificial sequence
  SiRNA target sequence
ctttagatgacgagattac

SEQ ID NO: 797 - DNA, 19 bp, Artificial sequence
  SiRNA target sequence
tttagatgacgagattact

SEQ ID NO: 798 - DNA, 19 bp, Artificial sequence
  SiRNA target sequence
ttagatgacgagattacta

SEQ ID NO: 799 - DNA, 19 bp, Artificial sequence
  SiRNA target sequence
tagatgacgagattactac

SEQ ID NO: 800 - DNA, 19 bp, Artificial sequence
  SiRNA target sequence
agatgacgagattactacg

SEQ ID NO: 801 - DNA, 19 bp, Artificial sequence
  SiRNA target sequence
gatgacgagattactacgc

SEQ ID NO: 802 - DNA, 19 bp, Artificial sequence
  SiRNA target sequence
atgacgagattactacgct

SEQ ID NO: 803 - DNA, 19 bp, Artificial sequence
  SiRNA target sequence
tgacgagattactacgctt

SEQ ID NO: 804 - DNA, 19 bp, Artificial sequence
  SiRNA target sequence
gacgagattactacgcttt

SEQ ID NO: 805 - DNA, 19 bp, Artificial sequence
  SiRNA target sequence
acgagattactacgcttta

SEQ ID NO: 806 - DNA, 19 bp, Artificial sequence
  SiRNA target sequence
cgagattactacgctttac

SEQ ID NO: 807 - DNA, 19 bp, Artificial sequence
  SiRNA target sequence
gagattactacgctttact

SEQ ID NO: 808 - DNA, 19 bp, Artificial sequence
  SiRNA target sequence
agattactacgctttactt

SEQ ID NO: 809 - DNA, 19 bp, Artificial sequence
  SiRNA target sequence
gattactacgctttacttg

SEQ ID NO: 810 - DNA, 19 bp, Artificial sequence
  SiRNA target sequence
attactacgctttacttgt

SEQ ID NO: 811 - DNA, 19 bp, Artificial sequence
  SiRNA target sequence
ttactacgctttacttgta

SEQ ID NO: 812 - DNA, 19 bp, Artificial sequence
  SiRNA target sequence
tactacgctttacttgtat

SEQ ID NO: 813 - DNA, 19 bp, Artificial sequence
  SiRNA target sequence
actacgctttacttgtatt

SEQ ID NO: 814 - DNA, 19 bp, Artificial sequence
  SiRNA target sequence
ctacgctttacttgtattc

SEQ ID NO: 815 - DNA, 19 bp, Artificial sequence
  SiRNA target sequence
tacgctttacttgtattct

SEQ ID NO: 816 - DNA, 19 bp, Artificial sequence
  SiRNA target sequence
acgctttacttgtattcta

SEQ ID NO: 817 - DNA, 19 bp, Artificial sequence
  SiRNA target sequence
cgctttacttgtattctaa

SEQ ID NO: 818 - DNA, 19 bp, Artificial sequence
  SiRNA target sequence
gctttacttgtattctaag

SEQ ID NO: 819 - DNA, 19 bp, Artificial sequence
  SiRNA target sequence
ctttacttgtattctaaga

SEQ ID NO: 820 - DNA, 19 bp, Artificial sequence
  SiRNA target sequence
tttacttgtattctaagat

SEQ ID NO: 821 - DNA, 19 bp, Artificial sequence
  SiRNA target sequence
ttacttgtattctaagatt

SEQ ID NO: 822 - DNA, 19 bp, Artificial sequence
  SiRNA target sequence
tacttgtattctaagattt

SEQ ID NO: 823 - DNA, 19 bp, Artificial sequence
  SiRNA target sequence
acttgtattctaagatttt

SEQ ID NO: 824 - DNA, 19 bp, Artificial sequence
  SiRNA target sequence
cttgtattctaagattttt

SEQ ID NO: 825 - DNA, 19 bp, Artificial sequence
  SiRNA target sequence
ttgtattctaagattttta

SEQ ID NO: 826 - DNA, 19 bp, Artificial sequence
  SiRNA target sequence
tgtattctaagatttttaa

SEQ ID NO: 827 - DNA, 19 bp, Artificial sequence
  SiRNA target sequence
gtattctaagatttttaaa

SEQ ID NO: 828 - DNA, 19 bp, Artificial sequence
  SiRNA target sequence
tattctaagatttttaaag

SEQ ID NO: 829 - DNA, 19 bp, Artificial sequence
  SiRNA target sequence
attctaagatttttaaaga

SEQ ID NO: 830 - DNA, 19 bp, Artificial sequence
  SiRNA target sequence
ttctaagatttttaaagat

SEQ ID NO: 831 - DNA, 19 bp, Artificial sequence
  SiRNA target sequence
tctaagatttttaaagata

SEQ ID NO: 832 - DNA, 19 bp, Artificial sequence
  SiRNA target sequence
ctaagatttttaaagataa

SEQ ID NO: 833 - DNA, 19 bp, Artificial sequence
  SiRNA target sequence
taagatttttaaagataaa

SEQ ID NO: 834 - DNA, 19 bp, Artificial sequence
  SiRNA target sequence
aagatttttaaagataaat

SEQ ID NO: 835 - DNA, 19 bp, Artificial sequence
  SiRNA target sequence
agatttttaaagataaatc

SEQ ID NO: 836 - DNA, 19 bp, Artificial sequence
  SiRNA target sequence
gatttttaaagataaatct

SEQ ID NO: 837 - DNA, 19 bp, Artificial sequence
  SiRNA target sequence
atttttaaagataaatctg

SEQ ID NO: 838 - DNA, 19 bp, Artificial sequence
  SiRNA target sequence
tttttaaagataaatctga

SEQ ID NO: 839 - DNA, 19 bp, Artificial sequence
  SiRNA target sequence
ttttaaagataaatctgat

SEQ ID NO: 840 - DNA, 19 bp, Artificial sequence
  SiRNA target sequence
tttaaagataaatctgata

SEQ ID NO: 841 - DNA, 19 bp, Artificial sequence
  SiRNA target sequence
ttaaagataaatctgatac

SEQ ID NO: 842 - DNA, 19 bp, Artificial sequence
  SiRNA target sequence
taaagataaatctgatact

SEQ ID NO: 843 - DNA, 19 bp, Artificial sequence
  SiRNA target sequence
aaagataaatctgatactt

SEQ ID NO: 844 - DNA, 19 bp, Artificial sequence
  SiRNA target sequence
aagataaatctgatactta

SEQ ID NO: 845 - DNA, 19 bp, Artificial sequence
  SiRNA target sequence
agataaatctgatacttac

SEQ ID NO: 846 - DNA, 19 bp, Artificial sequence
  SiRNA target sequence
gataaatctgatacttacc

SEQ ID NO: 847 - DNA, 19 bp, Artificial sequence
  SiRNA target sequence
ataaatctgatacttacct

SEQ ID NO: 848 - DNA, 19 bp, Artificial sequence
  SiRNA target sequence
taaatctgatacttacctt

SEQ ID NO: 849 - DNA, 19 bp, Artificial sequence
  SiRNA target sequence
aaatctgatacttacctta

SEQ ID NO: 850 - DNA, 19 bp, Artificial sequence
  SiRNA target sequence
aatctgatacttaccttaa

SEQ ID NO: 851 - DNA, 19 bp, Artificial sequence
  SiRNA target sequence
atctgatacttaccttaaa

SEQ ID NO: 852 - DNA, 19 bp, Artificial sequence
  SiRNA target sequence
tctgatacttaccttaaat

SEQ ID NO: 853 - DNA, 19 bp, Artificial sequence
  SiRNA target sequence
ctgatacttaccttaaatc

SEQ ID NO: 854 - DNA, 19 bp, Artificial sequence
  SiRNA target sequence
tgatacttaccttaaatct

SEQ ID NO: 855 - DNA, 19 bp, Artificial sequence
  SiRNA target sequence
gatacttaccttaaatctg

SEQ ID NO: 856 - DNA, 19 bp, Artificial sequence
  SiRNA target sequence
atacttaccttaaatctgc

SEQ ID NO: 857 - DNA, 19 bp, Artificial sequence
  SiRNA target sequence
tacttaccttaaatctgct

SEQ ID NO: 858 - DNA, 19 bp, Artificial sequence
  SiRNA target sequence
acttaccttaaatctgcta

SEQ ID NO: 859 - DNA, 19 bp, Artificial sequence
  SiRNA target sequence
cttaccttaaatctgctat

SEQ ID NO: 860 - DNA, 19 bp, Artificial sequence
  SiRNA target sequence
ttaccttaaatctgctata

SEQ ID NO: 861 - DNA, 19 bp, Artificial sequence
  SiRNA target sequence
taccttaaatctgctatag

SEQ ID NO: 862 - DNA, 19 bp, Artificial sequence
  SiRNA target sequence
accttaaatctgctataga

SEQ ID NO: 863 - DNA, 19 bp, Artificial sequence
  SiRNA target sequence
ccttaaatctgctatagat

SEQ ID NO: 864 - DNA, 19 bp, Artificial sequence
  SiRNA target sequence
cttaaatctgctatagata

SEQ ID NO: 865 - DNA, 19 bp, Artificial sequence
  SiRNA target sequence
ttaaatctgctatagataa

SEQ ID NO: 866 - DNA, 19 bp, Artificial sequence
  SiRNA target sequence
taaatctgctatagataaa

SEQ ID NO: 867 - DNA, 19 bp, Artificial sequence
  SiRNA target sequence
aaatctgctatagataaat

SEQ ID NO: 868 - DNA, 19 bp, Artificial sequence
  SiRNA target sequence
aatctgctatagataaatc

SEQ ID NO: 869 - DNA, 19 bp, Artificial sequence
  SiRNA target sequence
atctgctatagataaatca

SEQ ID NO: 870 - DNA, 19 bp, Artificial sequence
  SiRNA target sequence
tctgctatagataaatcag

SEQ ID NO: 871 - DNA, 19 bp, Artificial sequence
  SiRNA target sequence
ctgctatagataaatcagt

SEQ ID NO: 872 - DNA, 19 bp, Artificial sequence
  SiRNA target sequence
tgctatagataaatcagta

SEQ ID NO: 873 - DNA, 19 bp, Artificial sequence
  SiRNA target sequence
gctatagataaatcagtag

SEQ ID NO: 874 - DNA, 19 bp, Artificial sequence
  SiRNA target sequence
ctatagataaatcagtaga

SEQ ID NO: 875 - DNA, 19 bp, Artificial sequence
  SiRNA target sequence
tatagataaatcagtagat

SEQ ID NO: 876 - DNA, 19 bp, Artificial sequence
  SiRNA target sequence
atagataaatcagtagatc

SEQ ID NO: 877 - DNA, 19 bp, Artificial sequence
  SiRNA target sequence
tagataaatcagtagatct

SEQ ID NO: 878 - DNA, 19 bp, Artificial sequence
  SiRNA target sequence
agataaatcagtagatcta

SEQ ID NO: 879 - DNA, 19 bp, Artificial sequence
  SiRNA target sequence
gataaatcagtagatctac

SEQ ID NO: 880 - DNA, 19 bp, Artificial sequence
  SiRNA target sequence
ataaatcagtagatctacc

SEQ ID NO: 881 - DNA, 19 bp, Artificial sequence
  SiRNA target sequence
taaatcagtagatctacct

SEQ ID NO: 882 - DNA, 19 bp, Artificial sequence
  SiRNA target sequence
aaatcagtagatctaccta

SEQ ID NO: 883 - DNA, 19 bp, Artificial sequence
  SiRNA target sequence
aatcagtagatctacctat

SEQ ID NO: 884 - DNA, 19 bp, Artificial sequence
  SiRNA target sequence
atcagtagatctacctatt

SEQ ID NO: 885 - DNA, 19 bp, Artificial sequence
  SiRNA target sequence
tcagtagatctacctattg

SEQ ID NO: 886 - DNA, 19 bp, Artificial sequence
  SiRNA target sequence
cagtagatctacctattga

SEQ ID NO: 887 - DNA, 19 bp, Artificial sequence
  SiRNA target sequence
agtagatctacctattgaa

SEQ ID NO: 888 - DNA, 19 bp, Artificial sequence
  SiRNA target sequence
gtagatctacctattgaac

SEQ ID NO: 889 - DNA, 19 bp, Artificial sequence
  SiRNA target sequence
tagatctacctattgaaca

SEQ ID NO: 890 - DNA, 19 bp, Artificial sequence
  SiRNA target sequence
agatctacctattgaacag

SEQ ID NO: 891 - DNA, 19 bp, Artificial sequence
  SiRNA target sequence
gatctacctattgaacaga

SEQ ID NO: 892 - DNA, 19 bp, Artificial sequence
  SiRNA target sequence
atctacctattgaacagaa

SEQ ID NO: 893 - DNA, 19 bp, Artificial sequence
  SiRNA target sequence
tctacctattgaacagaaa

SEQ ID NO: 894 - DNA, 19 bp, Artificial sequence
  SiRNA target sequence
ctacctattgaacagaaag

SEQ ID NO: 895 - DNA, 19 bp, Artificial sequence
  SiRNA target sequence
tacctattgaacagaaaga

SEQ ID NO: 896 - DNA, 19 bp, Artificial sequence
  SiRNA target sequence
acctattgaacagaaagac

SEQ ID NO: 897 - DNA, 19 bp, Artificial sequence
  SiRNA target sequence
cctattgaacagaaagact

SEQ ID NO: 898 - DNA, 19 bp, Artificial sequence
  SiRNA target sequence
ctattgaacagaaagactt

SEQ ID NO: 899 - DNA, 19 bp, Artificial sequence
  SiRNA target sequence
tattgaacagaaagacttt

SEQ ID NO: 900 - DNA, 19 bp, Artificial sequence
  SiRNA target sequence
attgaacagaaagactttc

SEQ ID NO: 901 - DNA, 19 bp, Artificial sequence
  SiRNA target sequence
ttgaacagaaagactttct

SEQ ID NO: 902 - DNA, 19 bp, Artificial sequence
  SiRNA target sequence
tgaacagaaagactttctg

SEQ ID NO: 903 - DNA, 19 bp, Artificial sequence
  SiRNA target sequence
gaacagaaagactttctgt

SEQ ID NO: 904 - DNA, 19 bp, Artificial sequence
  SiRNA target sequence
aacagaaagactttctgta

SEQ ID NO: 905 - DNA, 19 bp, Artificial sequence
  SiRNA target sequence
acagaaagactttctgtac

SEQ ID NO: 906 - DNA, 19 bp, Artificial sequence
  SiRNA target sequence
cagaaagactttctgtacg

SEQ ID NO: 907 - DNA, 19 bp, Artificial sequence
  SiRNA target sequence
agaaagactttctgtacgt

SEQ ID NO: 908 - DNA, 19 bp, Artificial sequence
  SiRNA target sequence
gaaagactttctgtacgta

SEQ ID NO: 909 - DNA, 19 bp, Artificial sequence
  SiRNA target sequence
aaagactttctgtacgtag

SEQ ID NO: 910 - DNA, 19 bp, Artificial sequence
  SiRNA target sequence
aagactttctgtacgtaga

SEQ ID NO: 911 - DNA, 19 bp, Artificial sequence
  SiRNA target sequence
agactttctgtacgtagat

SEQ ID NO: 912 - DNA, 19 bp, Artificial sequence
  SiRNA target sequence
gactttctgtacgtagatc

SEQ ID NO: 913 - DNA, 19 bp, Artificial sequence
  SiRNA target sequence
actttctgtacgtagatct

SEQ ID NO: 914 - DNA, 19 bp, Artificial sequence
  SiRNA target sequence
ctttctgtacgtagatctt

SEQ ID NO: 915 - DNA, 19 bp, Artificial sequence
  SiRNA target sequence
tttctgtacgtagatcttc

SEQ ID NO: 916 - DNA, 19 bp, Artificial sequence
  SiRNA target sequence
ttctgtacgtagatcttct

SEQ ID NO: 917 - DNA, 19 bp, Artificial sequence
  SiRNA target sequence
tctgtacgtagatcttctt

SEQ ID NO: 918 - DNA, 19 bp, Artificial sequence
  SiRNA target sequence
ctgtacgtagatcttcttg

SEQ ID NO: 919 - DNA, 19 bp, Artificial sequence
  SiRNA target sequence
tgtacgtagatcttcttgt

SEQ ID NO: 920 - DNA, 19 bp, Artificial sequence
  SiRNA target sequence
gtacgtagatcttcttgta

SEQ ID NO: 921 - DNA, 19 bp, Artificial sequence
  SiRNA target sequence
tacgtagatcttcttgtat

SEQ ID NO: 922 - DNA, 19 bp, Artificial sequence
  SiRNA target sequence
acgtagatcttcttgtatt

SEQ ID NO: 923 - DNA, 19 bp, Artificial sequence
  SiRNA target sequence
cgtagatcttcttgtattt

SEQ ID NO: 924 - DNA, 19 bp, Artificial sequence
  SiRNA target sequence
gtagatcttcttgtatttt

SEQ ID NO: 925 - DNA, 19 bp, Artificial sequence
  SiRNA target sequence
tagatcttcttgtatttta

SEQ ID NO: 926 - DNA, 19 bp, Artificial sequence
  SiRNA target sequence
agatcttcttgtattttac

SEQ ID NO: 927 - DNA, 19 bp, Artificial sequence
  SiRNA target sequence
gatcttcttgtattttaca

SEQ ID NO: 928 - DNA, 19 bp, Artificial sequence
  SiRNA target sequence
atcttcttgtattttacat

SEQ ID NO: 929 - DNA, 19 bp, Artificial sequence
  SiRNA target sequence
tcttcttgtattttacatt

SEQ ID NO: 930 - DNA, 19 bp, Artificial sequence
  SiRNA target sequence
cttcttgtattttacattt

SEQ ID NO: 931 - DNA, 19 bp, Artificial sequence
  SiRNA target sequence
ttcttgtattttacatttc

SEQ ID NO: 932 - DNA, 19 bp, Artificial sequence
  SiRNA target sequence
tcttgtattttacatttct

SEQ ID NO: 933 - DNA, 19 bp, Artificial sequence
  SiRNA target sequence
cttgtattttacatttcta

SEQ ID NO: 934 - DNA, 19 bp, Artificial sequence
  SiRNA target sequence
ttgtattttacatttctaa

SEQ ID NO: 935 - DNA, 19 bp, Artificial sequence
  SiRNA target sequence
tgtattttacatttctaaa

SEQ ID NO: 936 - DNA, 19 bp, Artificial sequence
  SiRNA target sequence
gtattttacatttctaaaa

SEQ ID NO: 937 - DNA, 19 bp, Artificial sequence
  SiRNA target sequence
tattttacatttctaaaaa

SEQ ID NO: 938 - DNA, 19 bp, Artificial sequence
  SiRNA target sequence
attttacatttctaaaaag

SEQ ID NO: 939 - DNA, 19 bp, Artificial sequence
  SiRNA target sequence
ttttacatttctaaaaagg

SEQ ID NO: 940 - DNA, 19 bp, Artificial sequence
  SiRNA target sequence
tttacatttctaaaaagga

SEQ ID NO: 941 - DNA, 19 bp, Artificial sequence
  SiRNA target sequence
ttacatttctaaaaaggat

SEQ ID NO: 942 - DNA, 19 bp, Artificial sequence
  SiRNA target sequence
tacatttctaaaaaggatg

SEQ ID NO: 943 - DNA, 19 bp, Artificial sequence
  SiRNA target sequence
acatttctaaaaaggatgt

SEQ ID NO: 944 - DNA, 19 bp, Artificial sequence
  SiRNA target sequence
catttctaaaaaggatgtt

SEQ ID NO: 945 - DNA, 19 bp, Artificial sequence
  SiRNA target sequence
atttctaaaaaggatgttg

SEQ ID NO: 946 - DNA, 19 bp, Artificial sequence
  SiRNA target sequence
tttctaaaaaggatgttga

SEQ ID NO: 947 - DNA, 19 bp, Artificial sequence
  SiRNA target sequence
ttctaaaaaggatgttgaa

SEQ ID NO: 948 - DNA, 19 bp, Artificial sequence
  SiRNA target sequence
tctaaaaaggatgttgaaa

SEQ ID NO: 949 - DNA, 19 bp, Artificial sequence
  SiRNA target sequence
ctaaaaaggatgttgaaaa

SEQ ID NO: 950 - DNA, 19 bp, Artificial sequence
  SiRNA target sequence
taaaaaggatgttgaaaaa

SEQ ID NO: 951 - DNA, 19 bp, Artificial sequence
  SiRNA target sequence
aaaaaggatgttgaaaaag

SEQ ID NO: 952 - DNA, 19 bp, Artificial sequence
  SiRNA target sequence
aaaaggatgttgaaaaagt

SEQ ID NO: 953 - DNA, 19 bp, Artificial sequence
  SiRNA target sequence
aaaggatgttgaaaaagtt

SEQ ID NO: 954 - DNA, 19 bp, Artificial sequence
  SiRNA target sequence
aaggatgttgaaaaagtta

SEQ ID NO: 955 - DNA, 19 bp, Artificial sequence
  SiRNA target sequence
aggatgttgaaaaagttaa

SEQ ID NO: 956 - DNA, 19 bp, Artificial sequence
  SiRNA target sequence
ggatgttgaaaaagttaat

SEQ ID NO: 957 - DNA, 19 bp, Artificial sequence
  SiRNA target sequence
gatgttgaaaaagttaatg

SEQ ID NO: 958 - DNA, 19 bp, Artificial sequence
  SiRNA target sequence
atgttgaaaaagttaatga

SEQ ID NO: 959 - DNA, 19 bp, Artificial sequence
  SiRNA target sequence
tgttgaaaaagttaatgaa

SEQ ID NO: 960 - DNA, 19 bp, Artificial sequence
  SiRNA target sequence
gttgaaaaagttaatgaaa

SEQ ID NO: 961 - DNA, 19 bp, Artificial sequence
  SiRNA target sequence
ttgaaaaagttaatgaaac

SEQ ID NO: 962 - DNA, 19 bp, Artificial sequence
  SiRNA target sequence
tgaaaaagttaatgaaaca

SEQ ID NO: 963 - DNA, 19 bp, Artificial sequence
  SiRNA target sequence
gaaaaagttaatgaaacaa

SEQ ID NO: 964 - DNA, 19 bp, Artificial sequence
  SiRNA target sequence
aaaaagttaatgaaacaat

SEQ ID NO: 965 - DNA, 19 bp, Artificial sequence
  SiRNA target sequence
aaaagttaatgaaacaatt

SEQ ID NO: 966 - DNA, 19 bp, Artificial sequence
  SiRNA target sequence
aaagttaatgaaacaatta

SEQ ID NO: 967 - DNA, 19 bp, Artificial sequence
  SiRNA target sequence
aagttaatgaaacaattaa

SEQ ID NO: 968 - DNA, 19 bp, Artificial sequence
  SiRNA target sequence
agttaatgaaacaattaat

SEQ ID NO: 969 - DNA, 19 bp, Artificial sequence
  SiRNA target sequence
gttaatgaaacaattaata

SEQ ID NO: 970 - DNA, 19 bp, Artificial sequence
  SiRNA target sequence
ttaatgaaacaattaataa

SEQ ID NO: 971 - DNA, 19 bp, Artificial sequence
  SiRNA target sequence
taatgaaacaattaataat

SEQ ID NO: 972 - DNA, 19 bp, Artificial sequence
  SiRNA target sequence
aatgaaacaattaataatt

SEQ ID NO: 973 - DNA, 19 bp, Artificial sequence
  SiRNA target sequence
atgaaacaattaataattt

SEQ ID NO: 974 - DNA, 19 bp, Artificial sequence
  SiRNA target sequence
tgaaacaattaataattta

SEQ ID NO: 975 - DNA, 19 bp, Artificial sequence
  SiRNA target sequence
gaaacaattaataatttaa

SEQ ID NO: 976 - DNA, 19 bp, Artificial sequence
  SiRNA target sequence
aaacaattaataatttaaa

SEQ ID NO: 977 - DNA, 19 bp, Artificial sequence
  SiRNA target sequence
aacaattaataatttaaaa

SEQ ID NO: 978 - DNA, 19 bp, Artificial sequence
  SiRNA target sequence
acaattaataatttaaaag

SEQ ID NO: 979 - DNA, 19 bp, Artificial sequence
  SiRNA target sequence
caattaataatttaaaaga

SEQ ID NO: 980 - DNA, 19 bp, Artificial sequence
  SiRNA target sequence
aattaataatttaaaagag

SEQ ID NO: 981 - DNA, 19 bp, Artificial sequence
  SiRNA target sequence
attaataatttaaaagaga

SEQ ID NO: 982 - DNA, 19 bp, Artificial sequence
  SiRNA target sequence
ttaataatttaaaagagac

SEQ ID NO: 983 - DNA, 19 bp, Artificial sequence
  SiRNA target sequence
taataatttaaaagagact

SEQ ID NO: 984 - DNA, 19 bp, Artificial sequence
  SiRNA target sequence
aataatttaaaagagactc

SEQ ID NO: 985 - DNA, 19 bp, Artificial sequence
  SiRNA target sequence
ataatttaaaagagactct

SEQ ID NO: 986 - DNA, 19 bp, Artificial sequence
  SiRNA target sequence
taatttaaaagagactctt

SEQ ID NO: 987 - DNA, 19 bp, Artificial sequence
  SiRNA target sequence
aatttaaaagagactctta

SEQ ID NO: 988 - DNA, 19 bp, Artificial sequence
  SiRNA target sequence
atttaaaagagactcttac

SEQ ID NO: 989 - DNA, 19 bp, Artificial sequence
  SiRNA target sequence
tttaaaagagactcttacc

SEQ ID NO: 990 - DNA, 19 bp, Artificial sequence
  SiRNA target sequence
ttaaaagagactcttaccc

SEQ ID NO: 991 - DNA, 19 bp, Artificial sequence
  SiRNA target sequence
taaaagagactcttacccc

SEQ ID NO: 992 - DNA, 19 bp, Artificial sequence
  SiRNA target sequence
aaaagagactcttaccccc

SEQ ID NO: 993 - DNA, 19 bp, Artificial sequence
  SiRNA target sequence
aaagagactcttaccccca

SEQ ID NO: 994 - DNA, 19 bp, Artificial sequence
  SiRNA target sequence
aagagactcttacccccac

SEQ ID NO: 995 - DNA, 19 bp, Artificial sequence
  SiRNA target sequence
agagactcttacccccact

SEQ ID NO: 996 - DNA, 19 bp, Artificial sequence
  SiRNA target sequence
gagactcttacccccactt

SEQ ID NO: 997 - DNA, 19 bp, Artificial sequence
  SiRNA target sequence
agactcttacccccacttt

SEQ ID NO: 998 - DNA, 19 bp, Artificial sequence
  SiRNA target sequence
gactcttacccccacttta

SEQ ID NO: 999 - DNA, 19 bp, Artificial sequence
  SiRNA target sequence
actcttacccccactttat

SEQ ID NO: 1000 - DNA, 19 bp, Artificial sequence
  SiRNA target sequence
ctcttacccccactttatt

SEQ ID NO: 1001 - DNA, 19 bp, Artificial sequence
  SiRNA target sequence
tcttacccccactttattg

SEQ ID NO: 1002 - DNA, 19 bp, Artificial sequence
  SiRNA target sequence
cttacccccactttattgg

SEQ ID NO: 1003 - DNA, 19 bp, Artificial sequence
  SiRNA target sequence
ttacccccactttattgga

SEQ ID NO: 1004 - DNA, 19 bp, Artificial sequence
  SiRNA target sequence
tacccccactttattggaa

SEQ ID NO: 1005 - DNA, 19 bp, Artificial sequence
  SiRNA target sequence
acccccactttattggaac

SEQ ID NO: 1006 - DNA, 19 bp, Artificial sequence
  SiRNA target sequence
cccccactttattggaact

SEQ ID NO: 1007 - DNA, 19 bp, Artificial sequence
  SiRNA target sequence
ccccactttattggaactt

SEQ ID NO: 1008 - DNA, 19 bp, Artificial sequence
  SiRNA target sequence
cccactttattggaactta

SEQ ID NO: 1009 - DNA, 19 bp, Artificial sequence
  SiRNA target sequence
ccactttattggaacttat

SEQ ID NO: 1010 - DNA, 19 bp, Artificial sequence
  SiRNA target sequence
cactttattggaacttatt

SEQ ID NO: 1011 - DNA, 19 bp, Artificial sequence
  SiRNA target sequence
actttattggaacttattg

SEQ ID NO: 1012 - DNA, 19 bp, Artificial sequence
  SiRNA target sequence
ctttattggaacttattgg

SEQ ID NO: 1013 - DNA, 19 bp, Artificial sequence
  SiRNA target sequence
tttattggaacttattgga

SEQ ID NO: 1014 - DNA, 19 bp, Artificial sequence
  SiRNA target sequence
ttattggaacttattggag

SEQ ID NO: 1015 - DNA, 19 bp, Artificial sequence
  SiRNA target sequence
tattggaacttattggaga

SEQ ID NO: 1016 - DNA, 19 bp, Artificial sequence
  SiRNA target sequence
attggaacttattggagaa

SEQ ID NO: 1017 - DNA, 19 bp, Artificial sequence
  SiRNA target sequence
ttggaacttattggagaat

SEQ ID NO: 1018 - DNA, 19 bp, Artificial sequence
  SiRNA target sequence
tggaacttattggagaata

SEQ ID NO: 1019 - DNA, 19 bp, Artificial sequence
  SiRNA target sequence
ggaacttattggagaatat

SEQ ID NO: 1020 - DNA, 19 bp, Artificial sequence
  SiRNA target sequence
gaacttattggagaatatt

SEQ ID NO: 1021 - DNA, 19 bp, Artificial sequence
  SiRNA target sequence
aacttattggagaatatta

SEQ ID NO: 1022 - DNA, 19 bp, Artificial sequence
  SiRNA target sequence
acttattggagaatattat

SEQ ID NO: 1023 - DNA, 19 bp, Artificial sequence
  SiRNA target sequence
cttattggagaatattatt

SEQ ID NO: 1024 - DNA, 19 bp, Artificial sequence
  SiRNA target sequence
ttattggagaatattattt

SEQ ID NO: 1025 - DNA, 19 bp, Artificial sequence
  SiRNA target sequence
tattggagaatattattta

SEQ ID NO: 1026 - DNA, 19 bp, Artificial sequence
  SiRNA target sequence
attggagaatattatttaa

SEQ ID NO: 1027 - DNA, 19 bp, Artificial sequence
  SiRNA target sequence
ttggagaatattatttaaa

SEQ ID NO: 1028 - DNA, 19 bp, Artificial sequence
  SiRNA target sequence
tggagaatattatttaaaa

SEQ ID NO: 1029 - DNA, 19 bp, Artificial sequence
  SiRNA target sequence
ggagaatattatttaaaaa

SEQ ID NO: 1030 - DNA, 19 bp, Artificial sequence
  SiRNA target sequence
gagaatattatttaaaaag

SEQ ID NO: 1031 - DNA, 19 bp, Artificial sequence
  SiRNA target sequence
agaatattatttaaaaagt

SEQ ID NO: 1032 - DNA, 19 bp, Artificial sequence
  SiRNA target sequence
gaatattatttaaaaagtg

SEQ ID NO: 1033 - DNA, 19 bp, Artificial sequence
  SiRNA target sequence
aatattatttaaaaagtgg

SEQ ID NO: 1034 - DNA, 19 bp, Artificial sequence
  SiRNA target sequence
atattatttaaaaagtgga

SEQ ID NO: 1035 - DNA, 19 bp, Artificial sequence
  SiRNA target sequence
tattatttaaaaagtggaa

SEQ ID NO: 1036 - DNA, 19 bp, Artificial sequence
  SiRNA target sequence
attatttaaaaagtggaaa

SEQ ID NO: 1037 - DNA, 19 bp, Artificial sequence
  SiRNA target sequence
ttatttaaaaagtggaaat

SEQ ID NO: 1038 - DNA, 19 bp, Artificial sequence
  SiRNA target sequence
tatttaaaaagtggaaatc

SEQ ID NO: 1039 - DNA, 19 bp, Artificial sequence
  SiRNA target sequence
atttaaaaagtggaaatca

SEQ ID NO: 1040 - DNA, 19 bp, Artificial sequence
  SiRNA target sequence
tttaaaaagtggaaatcac

SEQ ID NO: 1041 - DNA, 19 bp, Artificial sequence
  SiRNA target sequence
ttaaaaagtggaaatcact

SEQ ID NO: 1042 - DNA, 19 bp, Artificial sequence
  SiRNA target sequence
taaaaagtggaaatcactc

SEQ ID NO: 1043 - DNA, 19 bp, Artificial sequence
  SiRNA target sequence
aaaaagtggaaatcactct

SEQ ID NO: 1044 - DNA, 19 bp, Artificial sequence
  SiRNA target sequence
aaaagtggaaatcactcta

SEQ ID NO: 1045 - DNA, 19 bp, Artificial sequence
  SiRNA target sequence
aaagtggaaatcactctaa

SEQ ID NO: 1046 - DNA, 19 bp, Artificial sequence
  SiRNA target sequence
aagtggaaatcactctaaa

SEQ ID NO: 1047 - DNA, 19 bp, Artificial sequence
  SiRNA target sequence
agtggaaatcactctaaaa

SEQ ID NO: 1048 - DNA, 19 bp, Artificial sequence
  SiRNA target sequence
gtggaaatcactctaaaat

SEQ ID NO: 1049 - DNA, 19 bp, Artificial sequence
  SiRNA target sequence
tggaaatcactctaaaatg

SEQ ID NO: 1050 - DNA, 19 bp, Artificial sequence
  SiRNA target sequence
ggaaatcactctaaaatgt

SEQ ID NO: 1051 - DNA, 19 bp, Artificial sequence
  SiRNA target sequence
gaaatcactctaaaatgtt

SEQ ID NO: 1052 - DNA, 19 bp, Artificial sequence
  SiRNA target sequence
aaatcactctaaaatgtta

SEQ ID NO: 1053 - DNA, 19 bp, Artificial sequence
  SiRNA target sequence
aatcactctaaaatgttag

SEQ ID NO: 1054 - DNA, 19 bp, Artificial sequence
  SiRNA target sequence
atcactctaaaatgttaga

SEQ ID NO: 1055 - DNA, 19 bp, Artificial sequence
  SiRNA target sequence
tcactctaaaatgttagat

SEQ ID NO: 1056 - DNA, 19 bp, Artificial sequence
  SiRNA target sequence
cactctaaaatgttagatc

SEQ ID NO: 1057 - DNA, 19 bp, Artificial sequence
  SiRNA target sequence
actctaaaatgttagatct

SEQ ID NO: 1058 - DNA, 19 bp, Artificial sequence
  SiRNA target sequence
ctctaaaatgttagatcta

SEQ ID NO: 1059 - DNA, 19 bp, Artificial sequence
  SiRNA target sequence
tctaaaatgttagatctat

SEQ ID NO: 1060 - DNA, 19 bp, Artificial sequence
  SiRNA target sequence
ctaaaatgttagatctatt

SEQ ID NO: 1061 - DNA, 19 bp, Artificial sequence
  SiRNA target sequence
taaaatgttagatctatta

SEQ ID NO: 1062 - DNA, 19 bp, Artificial sequence
  SiRNA target sequence
aaaatgttagatctattat

SEQ ID NO: 1063 - DNA, 19 bp, Artificial sequence
  SiRNA target sequence
aaatgttagatctattatc

SEQ ID NO: 1064 - DNA, 19 bp, Artificial sequence
  SiRNA target sequence
aatgttagatctattatct

SEQ ID NO: 1065 - DNA, 19 bp, Artificial sequence
  SiRNA target sequence
atgttagatctattatcta

SEQ ID NO: 1066 - DNA, 19 bp, Artificial sequence
  SiRNA target sequence
tgttagatctattatctag

SEQ ID NO: 1067 - DNA, 19 bp, Artificial sequence
  SiRNA target sequence
gttagatctattatctagt

SEQ ID NO: 1068 - DNA, 19 bp, Artificial sequence
  SiRNA target sequence
ttagatctattatctagtc

SEQ ID NO: 1069 - DNA, 19 bp, Artificial sequence
  SiRNA target sequence
tagatctattatctagtca

SEQ ID NO: 1070 - DNA, 19 bp, Artificial sequence
  SiRNA target sequence
agatctattatctagtcat

SEQ ID NO: 1071 - DNA, 19 bp, Artificial sequence
  SiRNA target sequence
gatctattatctagtcatc

SEQ ID NO: 1072 - DNA, 19 bp, Artificial sequence
  SiRNA target sequence
atctattatctagtcatcc

SEQ ID NO: 1073 - DNA, 19 bp, Artificial sequence
  SiRNA target sequence
tctattatctagtcatcca

SEQ ID NO: 1074 - DNA, 19 bp, Artificial sequence
  SiRNA target sequence
ctattatctagtcatccag

SEQ ID NO: 1075 - DNA, 19 bp, Artificial sequence
  SiRNA target sequence
tattatctagtcatccaga

SEQ ID NO: 1076 - DNA, 19 bp, Artificial sequence
  SiRNA target sequence
attatctagtcatccagat

SEQ ID NO: 1077 - DNA, 19 bp, Artificial sequence
  SiRNA target sequence
ttatctagtcatccagata

SEQ ID NO: 1078 - DNA, 19 bp, Artificial sequence
  SiRNA target sequence
tatctagtcatccagatac

SEQ ID NO: 1079 - DNA, 19 bp, Artificial sequence
  SiRNA target sequence
atctagtcatccagatact

SEQ ID NO: 1080 - DNA, 19 bp, Artificial sequence
  SiRNA target sequence
tctagtcatccagatactc

SEQ ID NO: 1081 - DNA, 19 bp, Artificial sequence
  SiRNA target sequence
ctagtcatccagatactcc

SEQ ID NO: 1082 - DNA, 19 bp, Artificial sequence
  SiRNA target sequence
tagtcatccagatactcct

SEQ ID NO: 1083 - DNA, 19 bp, Artificial sequence
  SiRNA target sequence
agtcatccagatactcctg

SEQ ID NO: 1084 - DNA, 19 bp, Artificial sequence
  SiRNA target sequence
gtcatccagatactcctgg

SEQ ID NO: 1085 - DNA, 19 bp, Artificial sequence
  SiRNA target sequence
tcatccagatactcctggt

SEQ ID NO: 1086 - DNA, 19 bp, Artificial sequence
  SiRNA target sequence
catccagatactcctggta

SEQ ID NO: 1087 - DNA, 19 bp, Artificial sequence
  SiRNA target sequence
atccagatactcctggtaa

SEQ ID NO: 1088 - DNA, 19 bp, Artificial sequence
  SiRNA target sequence
tccagatactcctggtaaa

SEQ ID NO: 1089 - DNA, 19 bp, Artificial sequence
  SiRNA target sequence
ccagatactcctggtaaat

SEQ ID NO: 1090 - DNA, 19 bp, Artificial sequence
  SiRNA target sequence
cagatactcctggtaaatt

SEQ ID NO: 1091 - DNA, 19 bp, Artificial sequence
  SiRNA target sequence
agatactcctggtaaatta

SEQ ID NO: 1092 - DNA, 19 bp, Artificial sequence
  SiRNA target sequence
gatactcctggtaaattac

SEQ ID NO: 1093 - DNA, 19 bp, Artificial sequence
  SiRNA target sequence
atactcctggtaaattact

SEQ ID NO: 1094 - DNA, 19 bp, Artificial sequence
  SiRNA target sequence
tactcctggtaaattactt

SEQ ID NO: 1095 - DNA, 19 bp, Artificial sequence
  SiRNA target sequence
actcctggtaaattacttt

SEQ ID NO: 1096 - DNA, 19 bp, Artificial sequence
  SiRNA target sequence
ctcctggtaaattactttt

SEQ ID NO: 1097 - DNA, 19 bp, Artificial sequence
  SiRNA target sequence
tcctggtaaattactttta

SEQ ID NO: 1098 - DNA, 19 bp, Artificial sequence
  SiRNA target sequence
cctggtaaattacttttaa

SEQ ID NO: 1099 - DNA, 19 bp, Artificial sequence
  SiRNA target sequence
ctggtaaattacttttaac

SEQ ID NO: 1100 - DNA, 19 bp, Artificial sequence
  SiRNA target sequence
tggtaaattacttttaacg

SEQ ID NO: 1101 - DNA, 19 bp, Artificial sequence
  SiRNA target sequence
ggtaaattacttttaacgg

SEQ ID NO: 1102 - DNA, 19 bp, Artificial sequence
  SiRNA target sequence
gtaaattacttttaacggc

SEQ ID NO: 1103 - DNA, 19 bp, Artificial sequence
  SiRNA target sequence
taaattacttttaacggca

SEQ ID NO: 1104 - DNA, 19 bp, Artificial sequence
  SiRNA target sequence
aaattacttttaacggcac

SEQ ID NO: 1105 - DNA, 19 bp, Artificial sequence
  SiRNA target sequence
aattacttttaacggcact

SEQ ID NO: 1106 - DNA, 19 bp, Artificial sequence
  SiRNA target sequence
attacttttaacggcactt

SEQ ID NO: 1107 - DNA, 19 bp, Artificial sequence
  SiRNA target sequence
ttacttttaacggcacttt

SEQ ID NO: 1108 - DNA, 19 bp, Artificial sequence
  SiRNA target sequence
tacttttaacggcacttta

SEQ ID NO: 1109 - DNA, 19 bp, Artificial sequence
  SiRNA target sequence
acttttaacggcactttat

SEQ ID NO: 1110 - DNA, 19 bp, Artificial sequence
  SiRNA target sequence
cttttaacggcactttatg

SEQ ID NO: 1111 - DNA, 19 bp, Artificial sequence
  SiRNA target sequence
ttttaacggcactttatgc

SEQ ID NO: 1112 - DNA, 19 bp, Artificial sequence
  SiRNA target sequence
tttaacggcactttatgca

SEQ ID NO: 1113 - DNA, 19 bp, Artificial sequence
  SiRNA target sequence
ttaacggcactttatgcaa

SEQ ID NO: 1114 - DNA, 19 bp, Artificial sequence
  SiRNA target sequence
taacggcactttatgcaat

SEQ ID NO: 1115 - DNA, 19 bp, Artificial sequence
  SiRNA target sequence
aacggcactttatgcaata

SEQ ID NO: 1116 - DNA, 19 bp, Artificial sequence
  SiRNA target sequence
acggcactttatgcaataa

SEQ ID NO: 1117 - DNA, 19 bp, Artificial sequence
  SiRNA target sequence
cggcactttatgcaataag

SEQ ID NO: 1118 - DNA, 19 bp, Artificial sequence
  SiRNA target sequence
ggcactttatgcaataagt

SEQ ID NO: 1119 - DNA, 19 bp, Artificial sequence
  SiRNA target sequence
gcactttatgcaataagta

SEQ ID NO: 1120 - DNA, 19 bp, Artificial sequence
  SiRNA target sequence
cactttatgcaataagtat

SEQ ID NO: 1121 - DNA, 19 bp, Artificial sequence
  SiRNA target sequence
actttatgcaataagtatt

SEQ ID NO: 1122 - DNA, 19 bp, Artificial sequence
  SiRNA target sequence
ctttatgcaataagtattg

SEQ ID NO: 1123 - DNA, 19 bp, Artificial sequence
  SiRNA target sequence
tttatgcaataagtattga

SEQ ID NO: 1124 - DNA, 19 bp, Artificial sequence
  SiRNA target sequence
ttatgcaataagtattgat

SEQ ID NO: 1125 - DNA, 19 bp, Artificial sequence
  SiRNA target sequence
tatgcaataagtattgata

SEQ ID NO: 1126 - DNA, 19 bp, Artificial sequence
  SiRNA target sequence
atgcaataagtattgataa

SEQ ID NO: 1127 - DNA, 19 bp, Artificial sequence
  SiRNA target sequence
tgcaataagtattgataag

SEQ ID NO: 1128 - DNA, 19 bp, Artificial sequence
  SiRNA target sequence
gcaataagtattgataaga

SEQ ID NO: 1129 - DNA, 19 bp, Artificial sequence
  SiRNA target sequence
caataagtattgataagaa

SEQ ID NO: 1130 - DNA, 19 bp, Artificial sequence
  SiRNA target sequence
aataagtattgataagaaa

SEQ ID NO: 1131 - DNA, 19 bp, Artificial sequence
  SiRNA target sequence
ataagtattgataagaaaa

SEQ ID NO: 1132 - DNA, 19 bp, Artificial sequence
  SiRNA target sequence
taagtattgataagaaaaa

SEQ ID NO: 1133 - DNA, 19 bp, Artificial sequence
  SiRNA target sequence
aagtattgataagaaaaag

SEQ ID NO: 1134 - DNA, 19 bp, Artificial sequence
  SiRNA target sequence
agtattgataagaaaaagg

SEQ ID NO: 1135 - DNA, 19 bp, Artificial sequence
  SiRNA target sequence
gtattgataagaaaaagga

SEQ ID NO: 1136 - DNA, 19 bp, Artificial sequence
  SiRNA target sequence
tattgataagaaaaaggat

SEQ ID NO: 1137 - DNA, 19 bp, Artificial sequence
  SiRNA target sequence
attgataagaaaaaggatg

SEQ ID NO: 1138 - DNA, 19 bp, Artificial sequence
  SiRNA target sequence
ttgataagaaaaaggatgc

SEQ ID NO: 1139 - DNA, 19 bp, Artificial sequence
  SiRNA target sequence
tgataagaaaaaggatgct

SEQ ID NO: 1140 - DNA, 19 bp, Artificial sequence
  SiRNA target sequence
gataagaaaaaggatgcta

SEQ ID NO: 1141 - DNA, 19 bp, Artificial sequence
  SiRNA target sequence
ataagaaaaaggatgctat

SEQ ID NO: 1142 - DNA, 19 bp, Artificial sequence
  SiRNA target sequence
taagaaaaaggatgctata

SEQ ID NO: 1143 - DNA, 19 bp, Artificial sequence
  SiRNA target sequence
aagaaaaaggatgctatag

SEQ ID NO: 1144 - DNA, 19 bp, Artificial sequence
  SiRNA target sequence
agaaaaaggatgctataga

SEQ ID NO: 1145 - DNA, 19 bp, Artificial sequence
  SiRNA target sequence
gaaaaaggatgctatagaa

SEQ ID NO: 1146 - DNA, 19 bp, Artificial sequence
  SiRNA target sequence
aaaaaggatgctatagaaa

SEQ ID NO: 1147 - DNA, 19 bp, Artificial sequence
  SiRNA target sequence
aaaaggatgctatagaaat

SEQ ID NO: 1148 - DNA, 19 bp, Artificial sequence
  SiRNA target sequence
aaaggatgctatagaaatt

SEQ ID NO: 1149 - DNA, 19 bp, Artificial sequence
  SiRNA target sequence
aaggatgctatagaaattt

SEQ ID NO: 1150 - DNA, 19 bp, Artificial sequence
  SiRNA target sequence
aggatgctatagaaatttt

SEQ ID NO: 1151 - DNA, 19 bp, Artificial sequence
  SiRNA target sequence
ggatgctatagaaatttta

SEQ ID NO: 1152 - DNA, 19 bp, Artificial sequence
  SiRNA target sequence
gatgctatagaaattttat

SEQ ID NO: 1153 - DNA, 19 bp, Artificial sequence
  SiRNA target sequence
atgctatagaaattttata

SEQ ID NO: 1154 - DNA, 19 bp, Artificial sequence
  SiRNA target sequence
tgctatagaaattttatat

SEQ ID NO: 1155 - DNA, 19 bp, Artificial sequence
  SiRNA target sequence
gctatagaaattttatata

SEQ ID NO: 1156 - DNA, 19 bp, Artificial sequence
  SiRNA target sequence
ctatagaaattttatatag

SEQ ID NO: 1157 - DNA, 19 bp, Artificial sequence
  SiRNA target sequence
tatagaaattttatataga

SEQ ID NO: 1158 - DNA, 19 bp, Artificial sequence
  SiRNA target sequence
atagaaattttatatagaa

SEQ ID NO: 1159 - DNA, 19 bp, Artificial sequence
  SiRNA target sequence
tagaaattttatatagaag

SEQ ID NO: 1160 - DNA, 19 bp, Artificial sequence
  SiRNA target sequence
agaaattttatatagaagt

SEQ ID NO: 1161 - DNA, 19 bp, Artificial sequence
  SiRNA target sequence
gaaattttatatagaagta

SEQ ID NO: 1162 - DNA, 19 bp, Artificial sequence
  SiRNA target sequence
aaattttatatagaagtat

SEQ ID NO: 1163 - DNA, 19 bp, Artificial sequence
  SiRNA target sequence
aattttatatagaagtata

SEQ ID NO: 1164 - DNA, 19 bp, Artificial sequence
  SiRNA target sequence
attttatatagaagtatat

SEQ ID NO: 1165 - DNA, 19 bp, Artificial sequence
  SiRNA target sequence
ttttatatagaagtatatc

SEQ ID NO: 1166 - DNA, 19 bp, Artificial sequence
  SiRNA target sequence
tttatatagaagtatatca

SEQ ID NO: 1167 - DNA, 19 bp, Artificial sequence
  SiRNA target sequence
ttatatagaagtatatcag

SEQ ID NO: 1168 - DNA, 19 bp, Artificial sequence
  SiRNA target sequence
tatatagaagtatatcaga

SEQ ID NO: 1169 - DNA, 19 bp, Artificial sequence
  SiRNA target sequence
atatagaagtatatcagaa

SEQ ID NO: 1170 - DNA, 19 bp, Artificial sequence
  SiRNA target sequence
tatagaagtatatcagaat

SEQ ID NO: 1171 - DNA, 19 bp, Artificial sequence
  SiRNA target sequence
atagaagtatatcagaata

SEQ ID NO: 1172 - DNA, 19 bp, Artificial sequence
  SiRNA target sequence
tagaagtatatcagaatat

SEQ ID NO: 1173 - DNA, 19 bp, Artificial sequence
  SiRNA target sequence
agaagtatatcagaatatt

SEQ ID NO: 1174 - DNA, 19 bp, Artificial sequence
  SiRNA target sequence
gaagtatatcagaatattc

SEQ ID NO: 1175 - DNA, 19 bp, Artificial sequence
  SiRNA target sequence
aagtatatcagaatattca

SEQ ID NO: 1176 - DNA, 19 bp, Artificial sequence
  SiRNA target sequence
agtatatcagaatattcat

SEQ ID NO: 1177 - DNA, 19 bp, Artificial sequence
  SiRNA target sequence
gtatatcagaatattcatc

SEQ ID NO: 1178 - DNA, 19 bp, Artificial sequence
  SiRNA target sequence
tatatcagaatattcatct

SEQ ID NO: 1179 - DNA, 19 bp, Artificial sequence
  SiRNA target sequence
atatcagaatattcatctt

SEQ ID NO: 1180 - DNA, 19 bp, Artificial sequence
  SiRNA target sequence
tatcagaatattcatctta

SEQ ID NO: 1181 - DNA, 19 bp, Artificial sequence
  SiRNA target sequence
atcagaatattcatcttat

SEQ ID NO: 1182 - DNA, 19 bp, Artificial sequence
  SiRNA target sequence
tcagaatattcatcttatt

SEQ ID NO: 1183 - DNA, 19 bp, Artificial sequence
  SiRNA target sequence
cagaatattcatcttattt

SEQ ID NO: 1184 - DNA, 19 bp, Artificial sequence
  SiRNA target sequence
agaatattcatcttatttt

SEQ ID NO: 1185 - DNA, 19 bp, Artificial sequence
  SiRNA target sequence
gaatattcatcttatttta

SEQ ID NO: 1186 - DNA, 19 bp, Artificial sequence
  SiRNA target sequence
aatattcatcttattttaa

SEQ ID NO: 1187 - DNA, 19 bp, Artificial sequence
  SiRNA target sequence
atattcatcttattttaaa

SEQ ID NO: 1188 - DNA, 19 bp, Artificial sequence
  SiRNA target sequence
tattcatcttattttaaat

SEQ ID NO: 1189 - DNA, 19 bp, Artificial sequence
  SiRNA target sequence
attcatcttattttaaatc

SEQ ID NO: 1190 - DNA, 19 bp, Artificial sequence
  SiRNA target sequence
ttcatcttattttaaatct

SEQ ID NO: 1191 - DNA, 19 bp, Artificial sequence
  SiRNA target sequence
tcatcttattttaaatctt

SEQ ID NO: 1192 - DNA, 19 bp, Artificial sequence
  SiRNA target sequence
catcttattttaaatctta

SEQ ID NO: 1193 - DNA, 19 bp, Artificial sequence
  SiRNA target sequence
atcttattttaaatcttat

SEQ ID NO: 1194 - DNA, 19 bp, Artificial sequence
  SiRNA target sequence
tcttattttaaatcttatt

SEQ ID NO: 1195 - DNA, 19 bp, Artificial sequence
  SiRNA target sequence
cttattttaaatcttattt

SEQ ID NO: 1196 - DNA, 19 bp, Artificial sequence
  SiRNA target sequence
ttattttaaatcttatttg

SEQ ID NO: 1197 - DNA, 19 bp, Artificial sequence
  SiRNA target sequence
tattttaaatcttatttgt

SEQ ID NO: 1198 - DNA, 19 bp, Artificial sequence
  SiRNA target sequence
attttaaatcttatttgta

SEQ ID NO: 1199 - DNA, 19 bp, Artificial sequence
  SiRNA target sequence
ttttaaatcttatttgtat

SEQ ID NO: 1200 - DNA, 19 bp, Artificial sequence
  SiRNA target sequence
tttaaatcttatttgtatt

SEQ ID NO: 1201 - DNA, 19 bp, Artificial sequence
  SiRNA target sequence
ttaaatcttatttgtattt

SEQ ID NO: 1202 - DNA, 19 bp, Artificial sequence
  SiRNA target sequence
taaatcttatttgtattta

SEQ ID NO: 1203 - DNA, 19 bp, Artificial sequence
  SiRNA target sequence
aaatcttatttgtatttag

SEQ ID NO: 1204 - DNA, 19 bp, Artificial sequence
  SiRNA target sequence
aatcttatttgtatttagg

SEQ ID NO: 1205 - DNA, 19 bp, Artificial sequence
  SiRNA target sequence
atcttatttgtatttagga

SEQ ID NO: 1206 - DNA, 19 bp, Artificial sequence
  SiRNA target sequence
tcttatttgtatttaggaa

SEQ ID NO: 1207 - DNA, 19 bp, Artificial sequence
  SiRNA target sequence
cttatttgtatttaggaaa

SEQ ID NO: 1208 - DNA, 19 bp, Artificial sequence
  SiRNA target sequence
ttatttgtatttaggaaat

SEQ ID NO: 1209 - DNA, 19 bp, Artificial sequence
  SiRNA target sequence
tatttgtatttaggaaata

SEQ ID NO: 1210 - DNA, 19 bp, Artificial sequence
  SiRNA target sequence
atttgtatttaggaaatat

SEQ ID NO: 1211 - DNA, 19 bp, Artificial sequence
  SiRNA target sequence
tttgtatttaggaaatatt

SEQ ID NO: 1212 - DNA, 19 bp, Artificial sequence
  SiRNA target sequence
ttgtatttaggaaatattt

SEQ ID NO: 1213 - DNA, 19 bp, Artificial sequence
  SiRNA target sequence
tgtatttaggaaatatttt

SEQ ID NO: 1214 - DNA, 19 bp, Artificial sequence
  SiRNA target sequence
gtatttaggaaatatttta

SEQ ID NO: 1215 - DNA, 19 bp, Artificial sequence
  SiRNA target sequence
tatttaggaaatattttaa

SEQ ID NO: 1216 - DNA, 19 bp, Artificial sequence
  SiRNA target sequence
atttaggaaatattttaat

SEQ ID NO: 1217 - DNA, 19 bp, Artificial sequence
  SiRNA target sequence
tttaggaaatattttaata

SEQ ID NO: 1218 - DNA, 19 bp, Artificial sequence
  SiRNA target sequence
ttaggaaatattttaataa

SEQ ID NO: 1219 - DNA, 19 bp, Artificial sequence
  SiRNA target sequence
taggaaatattttaataaa

SEQ ID NO: 1220 - DNA, 19 bp, Artificial sequence
  SiRNA target sequence
aggaaatattttaataaat

SEQ ID NO: 1221 - DNA, 19 bp, Artificial sequence
  SiRNA target sequence
ggaaatattttaataaatg

SEQ ID NO: 1222 - DNA, 19 bp, Artificial sequence
  SiRNA target sequence
gaaatattttaataaatga

SEQ ID NO: 1223 - DNA, 19 bp, Artificial sequence
  SiRNA target sequence
aaatattttaataaatgat

SEQ ID NO: 1224 - DNA, 19 bp, Artificial sequence
  SiRNA target sequence
aatattttaataaatgatg

SEQ ID NO: 1225 - DNA, 19 bp, Artificial sequence
  SiRNA target sequence
atattttaataaatgatga

SEQ ID NO: 1226 - DNA, 19 bp, Artificial sequence
  SiRNA target sequence
tattttaataaatgatgac

SEQ ID NO: 1227 - DNA, 19 bp, Artificial sequence
  SiRNA target sequence
attttaataaatgatgact

SEQ ID NO: 1228 - DNA, 19 bp, Artificial sequence
  SiRNA target sequence
ttttaataaatgatgactt

SEQ ID NO: 1229 - DNA, 19 bp, Artificial sequence
  SiRNA target sequence
tttaataaatgatgactta

SEQ ID NO: 1230 - DNA, 19 bp, Artificial sequence
  SiRNA target sequence
ttaataaatgatgacttaa

SEQ ID NO: 1231 - DNA, 19 bp, Artificial sequence
  SiRNA target sequence
taataaatgatgacttaaa

SEQ ID NO: 1232 - DNA, 19 bp, Artificial sequence
  SiRNA target sequence
aataaatgatgacttaaat

SEQ ID NO: 1233 - DNA, 19 bp, Artificial sequence
  SiRNA target sequence
ataaatgatgacttaaatg

SEQ ID NO: 1234 - DNA, 19 bp, Artificial sequence
  SiRNA target sequence
taaatgatgacttaaatga

SEQ ID NO: 1235 - DNA, 19 bp, Artificial sequence
  SiRNA target sequence
aaatgatgacttaaatgaa

SEQ ID NO: 1236 - DNA, 19 bp, Artificial sequence
  SiRNA target sequence
aatgatgacttaaatgaat

SEQ ID NO: 1237 - DNA, 19 bp, Artificial sequence
  SiRNA target sequence
atgatgacttaaatgaatg

SEQ ID NO: 1238 - DNA, 19 bp, Artificial sequence
  SiRNA target sequence
tgatgacttaaatgaatgc

SEQ ID NO: 1239 - DNA, 19 bp, Artificial sequence
  SiRNA target sequence
gatgacttaaatgaatgca

SEQ ID NO: 1240 - DNA, 19 bp, Artificial sequence
  SiRNA target sequence
atgacttaaatgaatgcag

SEQ ID NO: 1241 - DNA, 19 bp, Artificial sequence
  SiRNA target sequence
tgacttaaatgaatgcagg

SEQ ID NO: 1242 - DNA, 19 bp, Artificial sequence
  SiRNA target sequence
gacttaaatgaatgcagga

SEQ ID NO: 1243 - DNA, 19 bp, Artificial sequence
  SiRNA target sequence
acttaaatgaatgcaggaa

SEQ ID NO: 1244 - DNA, 19 bp, Artificial sequence
  SiRNA target sequence
cttaaatgaatgcaggaaa

SEQ ID NO: 1245 - DNA, 19 bp, Artificial sequence
  SiRNA target sequence
ttaaatgaatgcaggaaat

SEQ ID NO: 1246 - DNA, 19 bp, Artificial sequence
  SiRNA target sequence
taaatgaatgcaggaaatt

SEQ ID NO: 1247 - DNA, 19 bp, Artificial sequence
  SiRNA target sequence
aaatgaatgcaggaaattg

SEQ ID NO: 1248 - DNA, 19 bp, Artificial sequence
  SiRNA target sequence
aatgaatgcaggaaattgt

SEQ ID NO: 1249 - DNA, 19 bp, Artificial sequence
  SiRNA target sequence
atgaatgcaggaaattgtt

SEQ ID NO: 1250 - DNA, 19 bp, Artificial sequence
  SiRNA target sequence
tgaatgcaggaaattgttt

SEQ ID NO: 1251 - DNA, 19 bp, Artificial sequence
  SiRNA target sequence
gaatgcaggaaattgttta

SEQ ID NO: 1252 - DNA, 19 bp, Artificial sequence
  SiRNA target sequence
aatgcaggaaattgtttaa

SEQ ID NO: 1253 - DNA, 19 bp, Artificial sequence
  SiRNA target sequence
atgcaggaaattgtttaat

SEQ ID NO: 1254 - DNA, 19 bp, Artificial sequence
  SiRNA target sequence
tgcaggaaattgtttaata

SEQ ID NO: 1255 - DNA, 19 bp, Artificial sequence
  SiRNA target sequence
gcaggaaattgtttaatac

SEQ ID NO: 1256 - DNA, 19 bp, Artificial sequence
  SiRNA target sequence
caggaaattgtttaataca

SEQ ID NO: 1257 - DNA, 19 bp, Artificial sequence
  SiRNA target sequence
aggaaattgtttaatacat

SEQ ID NO: 1258 - DNA, 19 bp, Artificial sequence
  SiRNA target sequence
ggaaattgtttaatacatc

SEQ ID NO: 1259 - DNA, 19 bp, Artificial sequence
  SiRNA target sequence
gaaattgtttaatacatca

SEQ ID NO: 1260 - DNA, 19 bp, Artificial sequence
  SiRNA target sequence
aaattgtttaatacatcac

SEQ ID NO: 1261 - DNA, 19 bp, Artificial sequence
  SiRNA target sequence
aattgtttaatacatcact

SEQ ID NO: 1262 - DNA, 19 bp, Artificial sequence
  SiRNA target sequence
attgtttaatacatcactt

SEQ ID NO: 1263 - DNA, 19 bp, Artificial sequence
  SiRNA target sequence
ttgtttaatacatcacttc

SEQ ID NO: 1264 - DNA, 19 bp, Artificial sequence
  SiRNA target sequence
tgtttaatacatcacttca

SEQ ID NO: 1265 - DNA, 19 bp, Artificial sequence
  SiRNA target sequence
gtttaatacatcacttcaa

SEQ ID NO: 1266 - DNA, 19 bp, Artificial sequence
  SiRNA target sequence
tttaatacatcacttcaat

SEQ ID NO: 1267 - DNA, 19 bp, Artificial sequence
  SiRNA target sequence
ttaatacatcacttcaata

SEQ ID NO: 1268 - DNA, 19 bp, Artificial sequence
  SiRNA target sequence
taatacatcacttcaatat

SEQ ID NO: 1269 - DNA, 19 bp, Artificial sequence
  SiRNA target sequence
aatacatcacttcaatatt

SEQ ID NO: 1270 - DNA, 19 bp, Artificial sequence
  SiRNA target sequence
atacatcacttcaatattg

SEQ ID NO: 1271 - DNA, 19 bp, Artificial sequence
  SiRNA target sequence
tacatcacttcaatattgt

SEQ ID NO: 1272 - DNA, 19 bp, Artificial sequence
  SiRNA target sequence
acatcacttcaatattgtt

SEQ ID NO: 1273 - DNA, 19 bp, Artificial sequence
  SiRNA target sequence
catcacttcaatattgttg

SEQ ID NO: 1274 - DNA, 19 bp, Artificial sequence
  SiRNA target sequence
atcacttcaatattgttgt

SEQ ID NO: 1275 - DNA, 19 bp, Artificial sequence
  SiRNA target sequence
tcacttcaatattgttgta

SEQ ID NO: 1276 - DNA, 19 bp, Artificial sequence
  SiRNA target sequence
cacttcaatattgttgtaa

SEQ ID NO: 1277 - DNA, 19 bp, Artificial sequence
  SiRNA target sequence
acttcaatattgttgtaat

SEQ ID NO: 1278 - DNA, 19 bp, Artificial sequence
  SiRNA target sequence
cttcaatattgttgtaatt

SEQ ID NO: 1279 - DNA, 19 bp, Artificial sequence
  SiRNA target sequence
ttcaatattgttgtaattc

SEQ ID NO: 1280 - DNA, 19 bp, Artificial sequence
  SiRNA target sequence
tcaatattgttgtaattct

SEQ ID NO: 1281 - DNA, 19 bp, Artificial sequence
  SiRNA target sequence
caatattgttgtaattctg

SEQ ID NO: 1282 - DNA, 19 bp, Artificial sequence
  SiRNA target sequence
aatattgttgtaattctga

SEQ ID NO: 1283 - DNA, 19 bp, Artificial sequence
  SiRNA target sequence
atattgttgtaattctgat

SEQ ID NO: 1284 - DNA, 19 bp, Artificial sequence
  SiRNA target sequence
tattgttgtaattctgatg

SEQ ID NO: 1285 - DNA, 19 bp, Artificial sequence
  SiRNA target sequence
attgttgtaattctgatga

SEQ ID NO: 1286 - DNA, 19 bp, Artificial sequence
  SiRNA target sequence
ttgttgtaattctgatgag

SEQ ID NO: 1287 - DNA, 19 bp, Artificial sequence
  SiRNA target sequence
tgttgtaattctgatgagg

SEQ ID NO: 1288 - DNA, 19 bp, Artificial sequence
  SiRNA target sequence
gttgtaattctgatgaggt

SEQ ID NO: 1289 - DNA, 19 bp, Artificial sequence
  SiRNA target sequence
ttgtaattctgatgaggtt

SEQ ID NO: 1290 - DNA, 19 bp, Artificial sequence
  SiRNA target sequence
tgtaattctgatgaggttt

SEQ ID NO: 1291 - DNA, 19 bp, Artificial sequence
  SiRNA target sequence
gtaattctgatgaggtttt

SEQ ID NO: 1292 - DNA, 19 bp, Artificial sequence
  SiRNA target sequence
taattctgatgaggttttt

SEQ ID NO: 1293 - DNA, 19 bp, Artificial sequence
  SiRNA target sequence
aattctgatgaggttttta

SEQ ID NO: 1294 - DNA, 19 bp, Artificial sequence
  SiRNA target sequence
attctgatgaggtttttat

SEQ ID NO: 1295 - DNA, 19 bp, Artificial sequence
  SiRNA target sequence
ttctgatgaggtttttatt

SEQ ID NO: 1296 - DNA, 19 bp, Artificial sequence
  SiRNA target sequence
tctgatgaggtttttattg

SEQ ID NO: 1297 - DNA, 19 bp, Artificial sequence
  SiRNA target sequence
ctgatgaggtttttattgt

SEQ ID NO: 1298 - DNA, 19 bp, Artificial sequence
  SiRNA target sequence
tgatgaggtttttattgtt

SEQ ID NO: 1299 - DNA, 19 bp, Artificial sequence
  SiRNA target sequence
gatgaggtttttattgtta

SEQ ID NO: 1300 - DNA, 19 bp, Artificial sequence
  SiRNA target sequence
atgaggtttttattgttaa

SEQ ID NO: 1301 - DNA, 19 bp, Artificial sequence
  SiRNA target sequence
tgaggtttttattgttaag

SEQ ID NO: 1302 - DNA, 19 bp, Artificial sequence
  SiRNA target sequence
gaggtttttattgttaagc

SEQ ID NO: 1303 - DNA, 19 bp, Artificial sequence
  SiRNA target sequence
aggtttttattgttaagca

SEQ ID NO: 1304 - DNA, 19 bp, Artificial sequence
  SiRNA target sequence
ggtttttattgttaagcag

SEQ ID NO: 1305 - DNA, 19 bp, Artificial sequence
  SiRNA target sequence
gtttttattgttaagcagt

SEQ ID NO: 1306 - DNA, 19 bp, Artificial sequence
  SiRNA target sequence
tttttattgttaagcagtc

SEQ ID NO: 1307 - DNA, 19 bp, Artificial sequence
  SiRNA target sequence
ttttattgttaagcagtca

SEQ ID NO: 1308 - DNA, 19 bp, Artificial sequence
  SiRNA target sequence
tttattgttaagcagtcac

SEQ ID NO: 1309 - DNA, 19 bp, Artificial sequence
  SiRNA target sequence
ttattgttaagcagtcact

SEQ ID NO: 1310 - DNA, 19 bp, Artificial sequence
  SiRNA target sequence
tattgttaagcagtcactt

SEQ ID NO: 1311 - DNA, 19 bp, Artificial sequence
  SiRNA target sequence
attgttaagcagtcactta

SEQ ID NO: 1312 - DNA, 19 bp, Artificial sequence
  SiRNA target sequence
ttgttaagcagtcacttat

SEQ ID NO: 1313 - DNA, 19 bp, Artificial sequence
  SiRNA target sequence
tgttaagcagtcacttatt

SEQ ID NO: 1314 - DNA, 19 bp, Artificial sequence
  SiRNA target sequence
gttaagcagtcacttattt

SEQ ID NO: 1315 - DNA, 19 bp, Artificial sequence
  SiRNA target sequence
ttaagcagtcacttatttt

SEQ ID NO: 1316 - DNA, 19 bp, Artificial sequence
  SiRNA target sequence
taagcagtcacttatttta

SEQ ID NO: 1317 - DNA, 19 bp, Artificial sequence
  SiRNA target sequence
aagcagtcacttattttaa

SEQ ID NO: 1318 - DNA, 19 bp, Artificial sequence
  SiRNA target sequence
agcagtcacttattttaat

SEQ ID NO: 1319 - DNA, 19 bp, Artificial sequence
  SiRNA target sequence
gcagtcacttattttaata

SEQ ID NO: 1320 - DNA, 19 bp, Artificial sequence
  SiRNA target sequence
cagtcacttattttaatag

SEQ ID NO: 1321 - DNA, 19 bp, Artificial sequence
  SiRNA target sequence
agtcacttattttaataga

SEQ ID NO: 1322 - DNA, 19 bp, Artificial sequence
  SiRNA target sequence
gtcacttattttaatagaa

SEQ ID NO: 1323 - DNA, 19 bp, Artificial sequence
  SiRNA target sequence
tcacttattttaatagaag

SEQ ID NO: 1324 - DNA, 19 bp, Artificial sequence
  SiRNA target sequence
cacttattttaatagaagt

SEQ ID NO: 1325 - DNA, 19 bp, Artificial sequence
  SiRNA target sequence
acttattttaatagaagta

SEQ ID NO: 1326 - DNA, 19 bp, Artificial sequence
  SiRNA target sequence
cttattttaatagaagtac

SEQ ID NO: 1327 - DNA, 19 bp, Artificial sequence
  SiRNA target sequence
ttattttaatagaagtaca

SEQ ID NO: 1328 - DNA, 19 bp, Artificial sequence
  SiRNA target sequence
tattttaatagaagtacat

SEQ ID NO: 1329 - DNA, 19 bp, Artificial sequence
  SiRNA target sequence
attttaatagaagtacatg

SEQ ID NO: 1330 - DNA, 19 bp, Artificial sequence
  SiRNA target sequence
ttttaatagaagtacatga

SEQ ID NO: 1331 - DNA, 19 bp, Artificial sequence
  SiRNA target sequence
tttaatagaagtacatgaa

SEQ ID NO: 1332 - DNA, 19 bp, Artificial sequence
  SiRNA target sequence
ttaatagaagtacatgaat

SEQ ID NO: 1333 - DNA, 19 bp, Artificial sequence
  SiRNA target sequence
taatagaagtacatgaata

SEQ ID NO: 1334 - DNA, 19 bp, Artificial sequence
  SiRNA target sequence
aatagaagtacatgaatac

SEQ ID NO: 1335 - DNA, 19 bp, Artificial sequence
  SiRNA target sequence
atagaagtacatgaataca

SEQ ID NO: 1336 - DNA, 19 bp, Artificial sequence
  SiRNA target sequence
tagaagtacatgaatacat

SEQ ID NO: 1337 - DNA, 19 bp, Artificial sequence
  SiRNA target sequence
agaagtacatgaatacatc

SEQ ID NO: 1338 - DNA, 19 bp, Artificial sequence
  SiRNA target sequence
gaagtacatgaatacatca

SEQ ID NO: 1339 - DNA, 19 bp, Artificial sequence
  SiRNA target sequence
aagtacatgaatacatcaa

SEQ ID NO: 1340 - DNA, 19 bp, Artificial sequence
  SiRNA target sequence
agtacatgaatacatcaaa

SEQ ID NO: 1341 - DNA, 19 bp, Artificial sequence
  SiRNA target sequence
gtacatgaatacatcaaag

SEQ ID NO: 1342 - DNA, 19 bp, Artificial sequence
  SiRNA target sequence
tacatgaatacatcaaaga

SEQ ID NO: 1343 - DNA, 19 bp, Artificial sequence
  SiRNA target sequence
acatgaatacatcaaagaa

SEQ ID NO: 1344 - DNA, 19 bp, Artificial sequence
  SiRNA target sequence
catgaatacatcaaagaaa

SEQ ID NO: 1345 - DNA, 19 bp, Artificial sequence
  SiRNA target sequence
atgaatacatcaaagaaaa

SEQ ID NO: 1346 - DNA, 19 bp, Artificial sequence
  SiRNA target sequence
tgaatacatcaaagaaaat

SEQ ID NO: 1347 - DNA, 19 bp, Artificial sequence
  SiRNA target sequence
gaatacatcaaagaaaata

SEQ ID NO: 1348 - DNA, 19 bp, Artificial sequence
  SiRNA target sequence
aatacatcaaagaaaataa

SEQ ID NO: 1349 - DNA, 19 bp, Artificial sequence
  SiRNA target sequence
atacatcaaagaaaataaa

SEQ ID NO: 1350 - DNA, 19 bp, Artificial sequence
  SiRNA target sequence
tacatcaaagaaaataaaa

SEQ ID NO: 1351 - DNA, 19 bp, Artificial sequence
  SiRNA target sequence
acatcaaagaaaataaaat

SEQ ID NO: 1352 - DNA, 19 bp, Artificial sequence
  SiRNA target sequence
catcaaagaaaataaaata

SEQ ID NO: 1353 - DNA, 19 bp, Artificial sequence
  SiRNA target sequence
atcaaagaaaataaaatat

SEQ ID NO: 1354 - DNA, 19 bp, Artificial sequence
  SiRNA target sequence
tcaaagaaaataaaatata

SEQ ID NO: 1355 - DNA, 19 bp, Artificial sequence
  SiRNA target sequence
caaagaaaataaaatataa

SEQ ID NO: 1356 - DNA, 20 bp, Artificial sequence
  SiRNA target sequence
atgaaacgaaaaacagaaat

SEQ ID NO: 1357 - DNA, 20 bp, Artificial sequence
  SiRNA target sequence
tgaaacgaaaaacagaaata

SEQ ID NO: 1358 - DNA, 20 bp, Artificial sequence
  SiRNA target sequence
gaaacgaaaaacagaaatat

SEQ ID NO: 1359 - DNA, 20 bp, Artificial sequence
  SiRNA target sequence
aaacgaaaaacagaaatatt

SEQ ID NO: 1360 - DNA, 20 bp, Artificial sequence
  SiRNA target sequence
aacgaaaaacagaaatattt

SEQ ID NO: 1361 - DNA, 20 bp, Artificial sequence
  SiRNA target sequence
acgaaaaacagaaatattta

SEQ ID NO: 1362 - DNA, 20 bp, Artificial sequence
  SiRNA target sequence
cgaaaaacagaaatatttat

SEQ ID NO: 1363 - DNA, 20 bp, Artificial sequence
  SiRNA target sequence
gaaaaacagaaatatttatt

SEQ ID NO: 1364 - DNA, 20 bp, Artificial sequence
  SiRNA target sequence
aaaaacagaaatatttattg

SEQ ID NO: 1365 - DNA, 20 bp, Artificial sequence
  SiRNA target sequence
aaaacagaaatatttattgc

SEQ ID NO: 1366 - DNA, 20 bp, Artificial sequence
  SiRNA target sequence
aaacagaaatatttattgct

SEQ ID NO: 1367 - DNA, 20 bp, Artificial sequence
  SiRNA target sequence
aacagaaatatttattgcta

SEQ ID NO: 1368 - DNA, 20 bp, Artificial sequence
  SiRNA target sequence
acagaaatatttattgctat

SEQ ID NO: 1369 - DNA, 20 bp, Artificial sequence
  SiRNA target sequence
cagaaatatttattgctatt

SEQ ID NO: 1370 - DNA, 20 bp, Artificial sequence
  SiRNA target sequence
agaaatatttattgctatta

SEQ ID NO: 1371 - DNA, 20 bp, Artificial sequence
  SiRNA target sequence
gaaatatttattgctattac

SEQ ID NO: 1372 - DNA, 20 bp, Artificial sequence
  SiRNA target sequence
aaatatttattgctattaca

SEQ ID NO: 1373 - DNA, 20 bp, Artificial sequence
  SiRNA target sequence
aatatttattgctattacag

SEQ ID NO: 1374 - DNA, 20 bp, Artificial sequence
  SiRNA target sequence
atatttattgctattacagt

SEQ ID NO: 1375 - DNA, 20 bp, Artificial sequence
  SiRNA target sequence
tatttattgctattacagta

SEQ ID NO: 1376 - DNA, 20 bp, Artificial sequence
  SiRNA target sequence
atttattgctattacagtag

SEQ ID NO: 1377 - DNA, 20 bp, Artificial sequence
  SiRNA target sequence
tttattgctattacagtagt

SEQ ID NO: 1378 - DNA, 20 bp, Artificial sequence
  SiRNA target sequence
ttattgctattacagtagtc

SEQ ID NO: 1379 - DNA, 20 bp, Artificial sequence
  SiRNA target sequence
tattgctattacagtagtca

SEQ ID NO: 1380 - DNA, 20 bp, Artificial sequence
  SiRNA target sequence
attgctattacagtagtcac

SEQ ID NO: 1381 - DNA, 20 bp, Artificial sequence
  SiRNA target sequence
ttgctattacagtagtcact

SEQ ID NO: 1382 - DNA, 20 bp, Artificial sequence
  SiRNA target sequence
tgctattacagtagtcactg

SEQ ID NO: 1383 - DNA, 20 bp, Artificial sequence
  SiRNA target sequence
gctattacagtagtcactgc

SEQ ID NO: 1384 - DNA, 20 bp, Artificial sequence
  SiRNA target sequence
ctattacagtagtcactgca

SEQ ID NO: 1385 - DNA, 20 bp, Artificial sequence
  SiRNA target sequence
tattacagtagtcactgcag

SEQ ID NO: 1386 - DNA, 20 bp, Artificial sequence
  SiRNA target sequence
attacagtagtcactgcagt

SEQ ID NO: 1387 - DNA, 20 bp, Artificial sequence
  SiRNA target sequence
ttacagtagtcactgcagtg

SEQ ID NO: 1388 - DNA, 20 bp, Artificial sequence
  SiRNA target sequence
tacagtagtcactgcagtga

SEQ ID NO: 1389 - DNA, 20 bp, Artificial sequence
  SiRNA target sequence
acagtagtcactgcagtgac

SEQ ID NO: 1390 - DNA, 20 bp, Artificial sequence
  SiRNA target sequence
cagtagtcactgcagtgaca

SEQ ID NO: 1391 - DNA, 20 bp, Artificial sequence
  SiRNA target sequence
agtagtcactgcagtgacat

SEQ ID NO: 1392 - DNA, 20 bp, Artificial sequence
  SiRNA target sequence
gtagtcactgcagtgacatg

SEQ ID NO: 1393 - DNA, 20 bp, Artificial sequence
  SiRNA target sequence
tagtcactgcagtgacatgt

SEQ ID NO: 1394 - DNA, 20 bp, Artificial sequence
  SiRNA target sequence
agtcactgcagtgacatgtt

SEQ ID NO: 1395 - DNA, 20 bp, Artificial sequence
  SiRNA target sequence
gtcactgcagtgacatgtta

SEQ ID NO: 1396 - DNA, 20 bp, Artificial sequence
  SiRNA target sequence
tcactgcagtgacatgttac

SEQ ID NO: 1397 - DNA, 20 bp, Artificial sequence
  SiRNA target sequence
cactgcagtgacatgttact

SEQ ID NO: 1398 - DNA, 20 bp, Artificial sequence
  SiRNA target sequence
actgcagtgacatgttactt

SEQ ID NO: 1399 - DNA, 20 bp, Artificial sequence
  SiRNA target sequence
ctgcagtgacatgttactta

SEQ ID NO: 1400 - DNA, 20 bp, Artificial sequence
  SiRNA target sequence
tgcagtgacatgttacttat

SEQ ID NO: 1401 - DNA, 20 bp, Artificial sequence
  SiRNA target sequence
gcagtgacatgttacttatt

SEQ ID NO: 1402 - DNA, 20 bp, Artificial sequence
  SiRNA target sequence
cagtgacatgttacttattt

SEQ ID NO: 1403 - DNA, 20 bp, Artificial sequence
  SiRNA target sequence
agtgacatgttacttattta

SEQ ID NO: 1404 - DNA, 20 bp, Artificial sequence
  SiRNA target sequence
gtgacatgttacttatttaa

SEQ ID NO: 1405 - DNA, 20 bp, Artificial sequence
  SiRNA target sequence
tgacatgttacttatttaaa

SEQ ID NO: 1406 - DNA, 20 bp, Artificial sequence
  SiRNA target sequence
gacatgttacttatttaaaa

SEQ ID NO: 1407 - DNA, 20 bp, Artificial sequence
  SiRNA target sequence
acatgttacttatttaaaaa

SEQ ID NO: 1408 - DNA, 20 bp, Artificial sequence
  SiRNA target sequence
catgttacttatttaaaaaa

SEQ ID NO: 1409 - DNA, 20 bp, Artificial sequence
  SiRNA target sequence
atgttacttatttaaaaaaa

SEQ ID NO: 1410 - DNA, 20 bp, Artificial sequence
  SiRNA target sequence
tgttacttatttaaaaaaat

SEQ ID NO: 1411 - DNA, 20 bp, Artificial sequence
  SiRNA target sequence
gttacttatttaaaaaaata

SEQ ID NO: 1412 - DNA, 20 bp, Artificial sequence
  SiRNA target sequence
ttacttatttaaaaaaataa

SEQ ID NO: 1413 - DNA, 20 bp, Artificial sequence
  SiRNA target sequence
tacttatttaaaaaaataat

SEQ ID NO: 1414 - DNA, 20 bp, Artificial sequence
  SiRNA target sequence
acttatttaaaaaaataata

SEQ ID NO: 1415 - DNA, 20 bp, Artificial sequence
  SiRNA target sequence
cttatttaaaaaaataataa

SEQ ID NO: 1416 - DNA, 20 bp, Artificial sequence
  SiRNA target sequence
ttatttaaaaaaataataaa

SEQ ID NO: 1417 - DNA, 20 bp, Artificial sequence
  SiRNA target sequence
tatttaaaaaaataataaat

SEQ ID NO: 1418 - DNA, 20 bp, Artificial sequence
  SiRNA target sequence
atttaaaaaaataataaata

SEQ ID NO: 1419 - DNA, 20 bp, Artificial sequence
  SiRNA target sequence
tttaaaaaaataataaatag

SEQ ID NO: 1420 - DNA, 20 bp, Artificial sequence
  SiRNA target sequence
ttaaaaaaataataaataga

SEQ ID NO: 1421 - DNA, 20 bp, Artificial sequence
  SiRNA target sequence
taaaaaaataataaatagac

SEQ ID NO: 1422 - DNA, 20 bp, Artificial sequence
  SiRNA target sequence
aaaaaaataataaatagaca

SEQ ID NO: 1423 - DNA, 20 bp, Artificial sequence
  SiRNA target sequence
aaaaaataataaatagacaa

SEQ ID NO: 1424 - DNA, 20 bp, Artificial sequence
  SiRNA target sequence
aaaaataataaatagacaaa

SEQ ID NO: 1425 - DNA, 20 bp, Artificial sequence
  SiRNA target sequence
aaaataataaatagacaaaa

SEQ ID NO: 1426 - DNA, 20 bp, Artificial sequence
  SiRNA target sequence
aaataataaatagacaaaag

SEQ ID NO: 1427 - DNA, 20 bp, Artificial sequence
  SiRNA target sequence
aataataaatagacaaaagt

SEQ ID NO: 1428 - DNA, 20 bp, Artificial sequence
  SiRNA target sequence
ataataaatagacaaaagtc

SEQ ID NO: 1429 - DNA, 20 bp, Artificial sequence
  SiRNA target sequence
taataaatagacaaaagtct

SEQ ID NO: 1430 - DNA, 20 bp, Artificial sequence
  SiRNA target sequence
aataaatagacaaaagtctg

SEQ ID NO: 1431 - DNA, 20 bp, Artificial sequence
  SiRNA target sequence
ataaatagacaaaagtctga

SEQ ID NO: 1432 - DNA, 20 bp, Artificial sequence
  SiRNA target sequence
taaatagacaaaagtctgat

SEQ ID NO: 1433 - DNA, 20 bp, Artificial sequence
  SiRNA target sequence
aaatagacaaaagtctgatt

SEQ ID NO: 1434 - DNA, 20 bp, Artificial sequence
  SiRNA target sequence
aatagacaaaagtctgatta

SEQ ID NO: 1435 - DNA, 20 bp, Artificial sequence
  SiRNA target sequence
atagacaaaagtctgattat

SEQ ID NO: 1436 - DNA, 20 bp, Artificial sequence
  SiRNA target sequence
tagacaaaagtctgattata

SEQ ID NO: 1437 - DNA, 20 bp, Artificial sequence
  SiRNA target sequence
agacaaaagtctgattatac

SEQ ID NO: 1438 - DNA, 20 bp, Artificial sequence
  SiRNA target sequence
gacaaaagtctgattataca

SEQ ID NO: 1439 - DNA, 20 bp, Artificial sequence
  SiRNA target sequence
acaaaagtctgattatacat

SEQ ID NO: 1440 - DNA, 20 bp, Artificial sequence
  SiRNA target sequence
caaaagtctgattatacatc

SEQ ID NO: 1441 - DNA, 20 bp, Artificial sequence
  SiRNA target sequence
aaaagtctgattatacatca

SEQ ID NO: 1442 - DNA, 20 bp, Artificial sequence
  SiRNA target sequence
aaagtctgattatacatcaa

SEQ ID NO: 1443 - DNA, 20 bp, Artificial sequence
  SiRNA target sequence
aagtctgattatacatcaat

SEQ ID NO: 1444 - DNA, 20 bp, Artificial sequence
  SiRNA target sequence
agtctgattatacatcaata

SEQ ID NO: 1445 - DNA, 20 bp, Artificial sequence
  SiRNA target sequence
gtctgattatacatcaataa

SEQ ID NO: 1446 - DNA, 20 bp, Artificial sequence
  SiRNA target sequence
tctgattatacatcaataaa

SEQ ID NO: 1447 - DNA, 20 bp, Artificial sequence
  SiRNA target sequence
ctgattatacatcaataaaa

SEQ ID NO: 1448 - DNA, 20 bp, Artificial sequence
  SiRNA target sequence
tgattatacatcaataaaac

SEQ ID NO: 1449 - DNA, 20 bp, Artificial sequence
  SiRNA target sequence
gattatacatcaataaaaca

SEQ ID NO: 1450 - DNA, 20 bp, Artificial sequence
  SiRNA target sequence
attatacatcaataaaacag

SEQ ID NO: 1451 - DNA, 20 bp, Artificial sequence
  SiRNA target sequence
ttatacatcaataaaacagg

SEQ ID NO: 1452 - DNA, 20 bp, Artificial sequence
  SiRNA target sequence
tatacatcaataaaacagga

SEQ ID NO: 1453 - DNA, 20 bp, Artificial sequence
  SiRNA target sequence
atacatcaataaaacaggaa

SEQ ID NO: 1454 - DNA, 20 bp, Artificial sequence
  SiRNA target sequence
tacatcaataaaacaggaag

SEQ ID NO: 1455 - DNA, 20 bp, Artificial sequence
  SiRNA target sequence
acatcaataaaacaggaagc

SEQ ID NO: 1456 - DNA, 20 bp, Artificial sequence
  SiRNA target sequence
catcaataaaacaggaagca

SEQ ID NO: 1457 - DNA, 20 bp, Artificial sequence
  SiRNA target sequence
atcaataaaacaggaagcag

SEQ ID NO: 1458 - DNA, 20 bp, Artificial sequence
  SiRNA target sequence
tcaataaaacaggaagcaga

SEQ ID NO: 1459 - DNA, 20 bp, Artificial sequence
  SiRNA target sequence
caataaaacaggaagcagat

SEQ ID NO: 1460 - DNA, 20 bp, Artificial sequence
  SiRNA target sequence
aataaaacaggaagcagata

SEQ ID NO: 1461 - DNA, 20 bp, Artificial sequence
  SiRNA target sequence
ataaaacaggaagcagataa

SEQ ID NO: 1462 - DNA, 20 bp, Artificial sequence
  SiRNA target sequence
taaaacaggaagcagataaa

SEQ ID NO: 1463 - DNA, 20 bp, Artificial sequence
  SiRNA target sequence
aaaacaggaagcagataaat

SEQ ID NO: 1464 - DNA, 20 bp, Artificial sequence
  SiRNA target sequence
aaacaggaagcagataaata

SEQ ID NO: 1465 - DNA, 20 bp, Artificial sequence
  SiRNA target sequence
aacaggaagcagataaatat

SEQ ID NO: 1466 - DNA, 20 bp, Artificial sequence
  SiRNA target sequence
acaggaagcagataaatatt

SEQ ID NO: 1467 - DNA, 20 bp, Artificial sequence
  SiRNA target sequence
caggaagcagataaatattt

SEQ ID NO: 1468 - DNA, 20 bp, Artificial sequence
  SiRNA target sequence
aggaagcagataaatatttt

SEQ ID NO: 1469 - DNA, 20 bp, Artificial sequence
  SiRNA target sequence
ggaagcagataaatatttta

SEQ ID NO: 1470 - DNA, 20 bp, Artificial sequence
  SiRNA target sequence
gaagcagataaatattttat

SEQ ID NO: 1471 - DNA, 20 bp, Artificial sequence
  SiRNA target sequence
aagcagataaatattttata

SEQ ID NO: 1472 - DNA, 20 bp, Artificial sequence
  SiRNA target sequence
agcagataaatattttatac

SEQ ID NO: 1473 - DNA, 20 bp, Artificial sequence
  SiRNA target sequence
gcagataaatattttataca

SEQ ID NO: 1474 - DNA, 20 bp, Artificial sequence
  SiRNA target sequence
cagataaatattttatacaa

SEQ ID NO: 1475 - DNA, 20 bp, Artificial sequence
  SiRNA target sequence
agataaatattttatacaag

SEQ ID NO: 1476 - DNA, 20 bp, Artificial sequence
  SiRNA target sequence
gataaatattttatacaaga

SEQ ID NO: 1477 - DNA, 20 bp, Artificial sequence
  SiRNA target sequence
ataaatattttatacaagaa

SEQ ID NO: 1478 - DNA, 20 bp, Artificial sequence
  SiRNA target sequence
taaatattttatacaagaag

SEQ ID NO: 1479 - DNA, 20 bp, Artificial sequence
  SiRNA target sequence
aaatattttatacaagaaga

SEQ ID NO: 1480 - DNA, 20 bp, Artificial sequence
  SiRNA target sequence
aatattttatacaagaagat

SEQ ID NO: 1481 - DNA, 20 bp, Artificial sequence
  SiRNA target sequence
atattttatacaagaagatt

SEQ ID NO: 1482 - DNA, 20 bp, Artificial sequence
  SiRNA target sequence
tattttatacaagaagatta

SEQ ID NO: 1483 - DNA, 20 bp, Artificial sequence
  SiRNA target sequence
attttatacaagaagattat

SEQ ID NO: 1484 - DNA, 20 bp, Artificial sequence
  SiRNA target sequence
ttttatacaagaagattata

SEQ ID NO: 1485 - DNA, 20 bp, Artificial sequence
  SiRNA target sequence
tttatacaagaagattataa

SEQ ID NO: 1486 - DNA, 20 bp, Artificial sequence
  SiRNA target sequence
ttatacaagaagattataaa

SEQ ID NO: 1487 - DNA, 20 bp, Artificial sequence
  SiRNA target sequence
tatacaagaagattataaaa

SEQ ID NO: 1488 - DNA, 20 bp, Artificial sequence
  SiRNA target sequence
atacaagaagattataaaaa

SEQ ID NO: 1489 - DNA, 20 bp, Artificial sequence
  SiRNA target sequence
tacaagaagattataaaaat

SEQ ID NO: 1490 - DNA, 20 bp, Artificial sequence
  SiRNA target sequence
acaagaagattataaaaatg

SEQ ID NO: 1491 - DNA, 20 bp, Artificial sequence
  SiRNA target sequence
caagaagattataaaaatgc

SEQ ID NO: 1492 - DNA, 20 bp, Artificial sequence
  SiRNA target sequence
aagaagattataaaaatgct

SEQ ID NO: 1493 - DNA, 20 bp, Artificial sequence
  SiRNA target sequence
agaagattataaaaatgcta

SEQ ID NO: 1494 - DNA, 20 bp, Artificial sequence
  SiRNA target sequence
gaagattataaaaatgctat

SEQ ID NO: 1495 - DNA, 20 bp, Artificial sequence
  SiRNA target sequence
aagattataaaaatgctatt

SEQ ID NO: 1496 - DNA, 20 bp, Artificial sequence
  SiRNA target sequence
agattataaaaatgctattc

SEQ ID NO: 1497 - DNA, 20 bp, Artificial sequence
  SiRNA target sequence
gattataaaaatgctattct

SEQ ID NO: 1498 - DNA, 20 bp, Artificial sequence
  SiRNA target sequence
attataaaaatgctattctg

SEQ ID NO: 1499 - DNA, 20 bp, Artificial sequence
  SiRNA target sequence
ttataaaaatgctattctgt

SEQ ID NO: 1500 - DNA, 20 bp, Artificial sequence
  SiRNA target sequence
tataaaaatgctattctgtt

SEQ ID NO: 1501 - DNA, 20 bp, Artificial sequence
  SiRNA target sequence
ataaaaatgctattctgttg

SEQ ID NO: 1502 - DNA, 20 bp, Artificial sequence
  SiRNA target sequence
taaaaatgctattctgttgt

SEQ ID NO: 1503 - DNA, 20 bp, Artificial sequence
  SiRNA target sequence
aaaaatgctattctgttgta

SEQ ID NO: 1504 - DNA, 20 bp, Artificial sequence
  SiRNA target sequence
aaaatgctattctgttgtac

SEQ ID NO: 1505 - DNA, 20 bp, Artificial sequence
  SiRNA target sequence
aaatgctattctgttgtaca

SEQ ID NO: 1506 - DNA, 20 bp, Artificial sequence
  SiRNA target sequence
aatgctattctgttgtacac

SEQ ID NO: 1507 - DNA, 20 bp, Artificial sequence
  SiRNA target sequence
atgctattctgttgtacact

SEQ ID NO: 1508 - DNA, 20 bp, Artificial sequence
  SiRNA target sequence
tgctattctgttgtacacta

SEQ ID NO: 1509 - DNA, 20 bp, Artificial sequence
  SiRNA target sequence
gctattctgttgtacactaa

SEQ ID NO: 1510 - DNA, 20 bp, Artificial sequence
  SiRNA target sequence
ctattctgttgtacactaaa

SEQ ID NO: 1511 - DNA, 20 bp, Artificial sequence
  SiRNA target sequence
tattctgttgtacactaaat

SEQ ID NO: 1512 - DNA, 20 bp, Artificial sequence
  SiRNA target sequence
attctgttgtacactaaatg

SEQ ID NO: 1513 - DNA, 20 bp, Artificial sequence
  SiRNA target sequence
ttctgttgtacactaaatgt

SEQ ID NO: 1514 - DNA, 20 bp, Artificial sequence
  SiRNA target sequence
tctgttgtacactaaatgta

SEQ ID NO: 1515 - DNA, 20 bp, Artificial sequence
  SiRNA target sequence
ctgttgtacactaaatgtaa

SEQ ID NO: 1516 - DNA, 20 bp, Artificial sequence
  SiRNA target sequence
tgttgtacactaaatgtaaa

SEQ ID NO: 1517 - DNA, 20 bp, Artificial sequence
  SiRNA target sequence
gttgtacactaaatgtaaat

SEQ ID NO: 1518 - DNA, 20 bp, Artificial sequence
  SiRNA target sequence
ttgtacactaaatgtaaata

SEQ ID NO: 1519 - DNA, 20 bp, Artificial sequence
  SiRNA target sequence
tgtacactaaatgtaaatat

SEQ ID NO: 1520 - DNA, 20 bp, Artificial sequence
  SiRNA target sequence
gtacactaaatgtaaatata

SEQ ID NO: 1521 - DNA, 20 bp, Artificial sequence
  SiRNA target sequence
tacactaaatgtaaatatat

SEQ ID NO: 1522 - DNA, 20 bp, Artificial sequence
  SiRNA target sequence
acactaaatgtaaatatatg

SEQ ID NO: 1523 - DNA, 20 bp, Artificial sequence
  SiRNA target sequence
cactaaatgtaaatatatga

SEQ ID NO: 1524 - DNA, 20 bp, Artificial sequence
  SiRNA target sequence
actaaatgtaaatatatgaa

SEQ ID NO: 1525 - DNA, 20 bp, Artificial sequence
  SiRNA target sequence
ctaaatgtaaatatatgaaa

SEQ ID NO: 1526 - DNA, 20 bp, Artificial sequence
  SiRNA target sequence
taaatgtaaatatatgaaaa

SEQ ID NO: 1527 - DNA, 20 bp, Artificial sequence
  SiRNA target sequence
aaatgtaaatatatgaaaag

SEQ ID NO: 1528 - DNA, 20 bp, Artificial sequence
  SiRNA target sequence
aatgtaaatatatgaaaagt

SEQ ID NO: 1529 - DNA, 20 bp, Artificial sequence
  SiRNA target sequence
atgtaaatatatgaaaagtg

SEQ ID NO: 1530 - DNA, 20 bp, Artificial sequence
  SiRNA target sequence
tgtaaatatatgaaaagtga

SEQ ID NO: 1531 - DNA, 20 bp, Artificial sequence
  SiRNA target sequence
gtaaatatatgaaaagtgat

SEQ ID NO: 1532 - DNA, 20 bp, Artificial sequence
  SiRNA target sequence
taaatatatgaaaagtgatg

SEQ ID NO: 1533 - DNA, 20 bp, Artificial sequence
  SiRNA target sequence
aaatatatgaaaagtgatgc

SEQ ID NO: 1534 - DNA, 20 bp, Artificial sequence
  SiRNA target sequence
aatatatgaaaagtgatgct

SEQ ID NO: 1535 - DNA, 20 bp, Artificial sequence
  SiRNA target sequence
atatatgaaaagtgatgctg

SEQ ID NO: 1536 - DNA, 20 bp, Artificial sequence
  SiRNA target sequence
tatatgaaaagtgatgctga

SEQ ID NO: 1537 - DNA, 20 bp, Artificial sequence
  SiRNA target sequence
atatgaaaagtgatgctgaa

SEQ ID NO: 1538 - DNA, 20 bp, Artificial sequence
  SiRNA target sequence
tatgaaaagtgatgctgaaa

SEQ ID NO: 1539 - DNA, 20 bp, Artificial sequence
  SiRNA target sequence
atgaaaagtgatgctgaaat

SEQ ID NO: 1540 - DNA, 20 bp, Artificial sequence
  SiRNA target sequence
tgaaaagtgatgctgaaatt

SEQ ID NO: 1541 - DNA, 20 bp, Artificial sequence
  SiRNA target sequence
gaaaagtgatgctgaaattc

SEQ ID NO: 1542 - DNA, 20 bp, Artificial sequence
  SiRNA target sequence
aaaagtgatgctgaaattct

SEQ ID NO: 1543 - DNA, 20 bp, Artificial sequence
  SiRNA target sequence
aaagtgatgctgaaattctt

SEQ ID NO: 1544 - DNA, 20 bp, Artificial sequence
  SiRNA target sequence
aagtgatgctgaaattctta

SEQ ID NO: 1545 - DNA, 20 bp, Artificial sequence
  SiRNA target sequence
agtgatgctgaaattcttac

SEQ ID NO: 1546 - DNA, 20 bp, Artificial sequence
  SiRNA target sequence
gtgatgctgaaattcttact

SEQ ID NO: 1547 - DNA, 20 bp, Artificial sequence
  SiRNA target sequence
tgatgctgaaattcttacta

SEQ ID NO: 1548 - DNA, 20 bp, Artificial sequence
  SiRNA target sequence
gatgctgaaattcttactaa

SEQ ID NO: 1549 - DNA, 20 bp, Artificial sequence
  SiRNA target sequence
atgctgaaattcttactaaa

SEQ ID NO: 1550 - DNA, 20 bp, Artificial sequence
  SiRNA target sequence
tgctgaaattcttactaaaa

SEQ ID NO: 1551 - DNA, 20 bp, Artificial sequence
  SiRNA target sequence
gctgaaattcttactaaaat

SEQ ID NO: 1552 - DNA, 20 bp, Artificial sequence
  SiRNA target sequence
ctgaaattcttactaaaatt

SEQ ID NO: 1553 - DNA, 20 bp, Artificial sequence
  SiRNA target sequence
tgaaattcttactaaaatta

SEQ ID NO: 1554 - DNA, 20 bp, Artificial sequence
  SiRNA target sequence
gaaattcttactaaaattag

SEQ ID NO: 1555 - DNA, 20 bp, Artificial sequence
  SiRNA target sequence
aaattcttactaaaattagt

SEQ ID NO: 1556 - DNA, 20 bp, Artificial sequence
  SiRNA target sequence
aattcttactaaaattagtc

SEQ ID NO: 1557 - DNA, 20 bp, Artificial sequence
  SiRNA target sequence
attcttactaaaattagtct

SEQ ID NO: 1558 - DNA, 20 bp, Artificial sequence
  SiRNA target sequence
ttcttactaaaattagtctc

SEQ ID NO: 1559 - DNA, 20 bp, Artificial sequence
  SiRNA target sequence
tcttactaaaattagtctct

SEQ ID NO: 1560 - DNA, 20 bp, Artificial sequence
  SiRNA target sequence
cttactaaaattagtctctg

SEQ ID NO: 1561 - DNA, 20 bp, Artificial sequence
  SiRNA target sequence
ttactaaaattagtctctgt

SEQ ID NO: 1562 - DNA, 20 bp, Artificial sequence
  SiRNA target sequence
tactaaaattagtctctgta

SEQ ID NO: 1563 - DNA, 20 bp, Artificial sequence
  SiRNA target sequence
actaaaattagtctctgtaa

SEQ ID NO: 1564 - DNA, 20 bp, Artificial sequence
  SiRNA target sequence
ctaaaattagtctctgtaat

SEQ ID NO: 1565 - DNA, 20 bp, Artificial sequence
  SiRNA target sequence
taaaattagtctctgtaatt

SEQ ID NO: 1566 - DNA, 20 bp, Artificial sequence
  SiRNA target sequence
aaaattagtctctgtaatta

SEQ ID NO: 1567 - DNA, 20 bp, Artificial sequence
  SiRNA target sequence
aaattagtctctgtaattat

SEQ ID NO: 1568 - DNA, 20 bp, Artificial sequence
  SiRNA target sequence
aattagtctctgtaattatt

SEQ ID NO: 1569 - DNA, 20 bp, Artificial sequence
  SiRNA target sequence
attagtctctgtaattattt

SEQ ID NO: 1570 - DNA, 20 bp, Artificial sequence
  SiRNA target sequence
ttagtctctgtaattatttc

SEQ ID NO: 1571 - DNA, 20 bp, Artificial sequence
  SiRNA target sequence
tagtctctgtaattatttct

SEQ ID NO: 1572 - DNA, 20 bp, Artificial sequence
  SiRNA target sequence
agtctctgtaattatttctt

SEQ ID NO: 1573 - DNA, 20 bp, Artificial sequence
  SiRNA target sequence
gtctctgtaattatttctta

SEQ ID NO: 1574 - DNA, 20 bp, Artificial sequence
  SiRNA target sequence
tctctgtaattatttcttaa

SEQ ID NO: 1575 - DNA, 20 bp, Artificial sequence
  SiRNA target sequence
ctctgtaattatttcttaaa

SEQ ID NO: 1576 - DNA, 20 bp, Artificial sequence
  SiRNA target sequence
tctgtaattatttcttaaaa

SEQ ID NO: 1577 - DNA, 20 bp, Artificial sequence
  SiRNA target sequence
ctgtaattatttcttaaaaa

SEQ ID NO: 1578 - DNA, 20 bp, Artificial sequence
  SiRNA target sequence
tgtaattatttcttaaaaaa

SEQ ID NO: 1579 - DNA, 20 bp, Artificial sequence
  SiRNA target sequence
gtaattatttcttaaaaaat

SEQ ID NO: 1580 - DNA, 20 bp, Artificial sequence
  SiRNA target sequence
taattatttcttaaaaaatt

SEQ ID NO: 1581 - DNA, 20 bp, Artificial sequence
  SiRNA target sequence
aattatttcttaaaaaatta

SEQ ID NO: 1582 - DNA, 20 bp, Artificial sequence
  SiRNA target sequence
attatttcttaaaaaattat

SEQ ID NO: 1583 - DNA, 20 bp, Artificial sequence
  SiRNA target sequence
ttatttcttaaaaaattatc

SEQ ID NO: 1584 - DNA, 20 bp, Artificial sequence
  SiRNA target sequence
tatttcttaaaaaattatca

SEQ ID NO: 1585 - DNA, 20 bp, Artificial sequence
  SiRNA target sequence
atttcttaaaaaattatcaa

SEQ ID NO: 1586 - DNA, 20 bp, Artificial sequence
  SiRNA target sequence
tttcttaaaaaattatcaag

SEQ ID NO: 1587 - DNA, 20 bp, Artificial sequence
  SiRNA target sequence
ttcttaaaaaattatcaaga

SEQ ID NO: 1588 - DNA, 20 bp, Artificial sequence
  SiRNA target sequence
tcttaaaaaattatcaagaa

SEQ ID NO: 1589 - DNA, 20 bp, Artificial sequence
  SiRNA target sequence
cttaaaaaattatcaagaag

SEQ ID NO: 1590 - DNA, 20 bp, Artificial sequence
  SiRNA target sequence
ttaaaaaattatcaagaagt

SEQ ID NO: 1591 - DNA, 20 bp, Artificial sequence
  SiRNA target sequence
taaaaaattatcaagaagtt

SEQ ID NO: 1592 - DNA, 20 bp, Artificial sequence
  SiRNA target sequence
aaaaaattatcaagaagtta

SEQ ID NO: 1593 - DNA, 20 bp, Artificial sequence
  SiRNA target sequence
aaaaattatcaagaagttat

SEQ ID NO: 1594 - DNA, 20 bp, Artificial sequence
  SiRNA target sequence
aaaattatcaagaagttata

SEQ ID NO: 1595 - DNA, 20 bp, Artificial sequence
  SiRNA target sequence
aaattatcaagaagttataa

SEQ ID NO: 1596 - DNA, 20 bp, Artificial sequence
  SiRNA target sequence
aattatcaagaagttataaa

SEQ ID NO: 1597 - DNA, 20 bp, Artificial sequence
  SiRNA target sequence
attatcaagaagttataaat

SEQ ID NO: 1598 - DNA, 20 bp, Artificial sequence
  SiRNA target sequence
ttatcaagaagttataaata

SEQ ID NO: 1599 - DNA, 20 bp, Artificial sequence
  SiRNA target sequence
tatcaagaagttataaataa

SEQ ID NO: 1600 - DNA, 20 bp, Artificial sequence
  SiRNA target sequence
atcaagaagttataaataat

SEQ ID NO: 1601 - DNA, 20 bp, Artificial sequence
  SiRNA target sequence
tcaagaagttataaataatt

SEQ ID NO: 1602 - DNA, 20 bp, Artificial sequence
  SiRNA target sequence
caagaagttataaataattc

SEQ ID NO: 1603 - DNA, 20 bp, Artificial sequence
  SiRNA target sequence
aagaagttataaataattct

SEQ ID NO: 1604 - DNA, 20 bp, Artificial sequence
  SiRNA target sequence
agaagttataaataattctt

SEQ ID NO: 1605 - DNA, 20 bp, Artificial sequence
  SiRNA target sequence
gaagttataaataattcttt

SEQ ID NO: 1606 - DNA, 20 bp, Artificial sequence
  SiRNA target sequence
aagttataaataattcttta

SEQ ID NO: 1607 - DNA, 20 bp, Artificial sequence
  SiRNA target sequence
agttataaataattctttat

SEQ ID NO: 1608 - DNA, 20 bp, Artificial sequence
  SiRNA target sequence
gttataaataattctttatt

SEQ ID NO: 1609 - DNA, 20 bp, Artificial sequence
  SiRNA target sequence
ttataaataattctttattt

SEQ ID NO: 1610 - DNA, 20 bp, Artificial sequence
  SiRNA target sequence
tataaataattctttattta

SEQ ID NO: 1611 - DNA, 20 bp, Artificial sequence
  SiRNA target sequence
ataaataattctttatttaa

SEQ ID NO: 1612 - DNA, 20 bp, Artificial sequence
  SiRNA target sequence
taaataattctttatttaag

SEQ ID NO: 1613 - DNA, 20 bp, Artificial sequence
  SiRNA target sequence
aaataattctttatttaaga

SEQ ID NO: 1614 - DNA, 20 bp, Artificial sequence
  SiRNA target sequence
aataattctttatttaagac

SEQ ID NO: 1615 - DNA, 20 bp, Artificial sequence
  SiRNA target sequence
ataattctttatttaagaca

SEQ ID NO: 1616 - DNA, 20 bp, Artificial sequence
  SiRNA target sequence
taattctttatttaagacaa

SEQ ID NO: 1617 - DNA, 20 bp, Artificial sequence
  SiRNA target sequence
aattctttatttaagacaaa

SEQ ID NO: 1618 - DNA, 20 bp, Artificial sequence
  SiRNA target sequence
attctttatttaagacaaat

SEQ ID NO: 1619 - DNA, 20 bp, Artificial sequence
  SiRNA target sequence
ttctttatttaagacaaata

SEQ ID NO: 1620 - DNA, 20 bp, Artificial sequence
  SiRNA target sequence
tctttatttaagacaaataa

SEQ ID NO: 1621 - DNA, 20 bp, Artificial sequence
  SiRNA target sequence
ctttatttaagacaaataat

SEQ ID NO: 1622 - DNA, 20 bp, Artificial sequence
  SiRNA target sequence
tttatttaagacaaataata

SEQ ID NO: 1623 - DNA, 20 bp, Artificial sequence
  SiRNA target sequence
ttatttaagacaaataataa

SEQ ID NO: 1624 - DNA, 20 bp, Artificial sequence
  SiRNA target sequence
tatttaagacaaataataaa

SEQ ID NO: 1625 - DNA, 20 bp, Artificial sequence
  SiRNA target sequence
atttaagacaaataataaag

SEQ ID NO: 1626 - DNA, 20 bp, Artificial sequence
  SiRNA target sequence
tttaagacaaataataaaga

SEQ ID NO: 1627 - DNA, 20 bp, Artificial sequence
  SiRNA target sequence
ttaagacaaataataaagat

SEQ ID NO: 1628 - DNA, 20 bp, Artificial sequence
  SiRNA target sequence
taagacaaataataaagatc

SEQ ID NO: 1629 - DNA, 20 bp, Artificial sequence
  SiRNA target sequence
aagacaaataataaagatct

SEQ ID NO: 1630 - DNA, 20 bp, Artificial sequence
  SiRNA target sequence
agacaaataataaagatcta

SEQ ID NO: 1631 - DNA, 20 bp, Artificial sequence
  SiRNA target sequence
gacaaataataaagatctaa

SEQ ID NO: 1632 - DNA, 20 bp, Artificial sequence
  SiRNA target sequence
acaaataataaagatctaat

SEQ ID NO: 1633 - DNA, 20 bp, Artificial sequence
  SiRNA target sequence
caaataataaagatctaata

SEQ ID NO: 1634 - DNA, 20 bp, Artificial sequence
  SiRNA target sequence
aaataataaagatctaataa

SEQ ID NO: 1635 - DNA, 20 bp, Artificial sequence
  SiRNA target sequence
aataataaagatctaataaa

SEQ ID NO: 1636 - DNA, 20 bp, Artificial sequence
  SiRNA target sequence
ataataaagatctaataaaa

SEQ ID NO: 1637 - DNA, 20 bp, Artificial sequence
  SiRNA target sequence
taataaagatctaataaaaa

SEQ ID NO: 1638 - DNA, 20 bp, Artificial sequence
  SiRNA target sequence
aataaagatctaataaaaat

SEQ ID NO: 1639 - DNA, 20 bp, Artificial sequence
  SiRNA target sequence
ataaagatctaataaaaata

SEQ ID NO: 1640 - DNA, 20 bp, Artificial sequence
  SiRNA target sequence
taaagatctaataaaaataa

SEQ ID NO: 1641 - DNA, 20 bp, Artificial sequence
  SiRNA target sequence
aaagatctaataaaaataag

SEQ ID NO: 1642 - DNA, 20 bp, Artificial sequence
  SiRNA target sequence
aagatctaataaaaataaga

SEQ ID NO: 1643 - DNA, 20 bp, Artificial sequence
  SiRNA target sequence
agatctaataaaaataagat

SEQ ID NO: 1644 - DNA, 20 bp, Artificial sequence
  SiRNA target sequence
gatctaataaaaataagatc

SEQ ID NO: 1645 - DNA, 20 bp, Artificial sequence
  SiRNA target sequence
atctaataaaaataagatct

SEQ ID NO: 1646 - DNA, 20 bp, Artificial sequence
  SiRNA target sequence
tctaataaaaataagatctg

SEQ ID NO: 1647 - DNA, 20 bp, Artificial sequence
  SiRNA target sequence
ctaataaaaataagatctga

SEQ ID NO: 1648 - DNA, 20 bp, Artificial sequence
  SiRNA target sequence
taataaaaataagatctgaa

SEQ ID NO: 1649 - DNA, 20 bp, Artificial sequence
  SiRNA target sequence
aataaaaataagatctgaat

SEQ ID NO: 1650 - DNA, 20 bp, Artificial sequence
  SiRNA target sequence
ataaaaataagatctgaatg

SEQ ID NO: 1651 - DNA, 20 bp, Artificial sequence
  SiRNA target sequence
taaaaataagatctgaatgt

SEQ ID NO: 1652 - DNA, 20 bp, Artificial sequence
  SiRNA target sequence
aaaaataagatctgaatgtt

SEQ ID NO: 1653 - DNA, 20 bp, Artificial sequence
  SiRNA target sequence
aaaataagatctgaatgtta

SEQ ID NO: 1654 - DNA, 20 bp, Artificial sequence
  SiRNA target sequence
aaataagatctgaatgttac

SEQ ID NO: 1655 - DNA, 20 bp, Artificial sequence
  SiRNA target sequence
aataagatctgaatgttaca

SEQ ID NO: 1656 - DNA, 20 bp, Artificial sequence
  SiRNA target sequence
ataagatctgaatgttacaa

SEQ ID NO: 1657 - DNA, 20 bp, Artificial sequence
  SiRNA target sequence
taagatctgaatgttacaag

SEQ ID NO: 1658 - DNA, 20 bp, Artificial sequence
  SiRNA target sequence
aagatctgaatgttacaagc

SEQ ID NO: 1659 - DNA, 20 bp, Artificial sequence
  SiRNA target sequence
agatctgaatgttacaagca

SEQ ID NO: 1660 - DNA, 20 bp, Artificial sequence
  SiRNA target sequence
gatctgaatgttacaagcag

SEQ ID NO: 1661 - DNA, 20 bp, Artificial sequence
  SiRNA target sequence
atctgaatgttacaagcaga

SEQ ID NO: 1662 - DNA, 20 bp, Artificial sequence
  SiRNA target sequence
tctgaatgttacaagcagat

SEQ ID NO: 1663 - DNA, 20 bp, Artificial sequence
  SiRNA target sequence
ctgaatgttacaagcagatg

SEQ ID NO: 1664 - DNA, 20 bp, Artificial sequence
  SiRNA target sequence
tgaatgttacaagcagatgg

SEQ ID NO: 1665 - DNA, 20 bp, Artificial sequence
  SiRNA target sequence
gaatgttacaagcagatggg

SEQ ID NO: 1666 - DNA, 20 bp, Artificial sequence
  SiRNA target sequence
aatgttacaagcagatggga

SEQ ID NO: 1667 - DNA, 20 bp, Artificial sequence
  SiRNA target sequence
atgttacaagcagatgggaa

SEQ ID NO: 1668 - DNA, 20 bp, Artificial sequence
  SiRNA target sequence
tgttacaagcagatgggaaa

SEQ ID NO: 1669 - DNA, 20 bp, Artificial sequence
  SiRNA target sequence
gttacaagcagatgggaaat

SEQ ID NO: 1670 - DNA, 20 bp, Artificial sequence
  SiRNA target sequence
ttacaagcagatgggaaata

SEQ ID NO: 1671 - DNA, 20 bp, Artificial sequence
  SiRNA target sequence
tacaagcagatgggaaataa

SEQ ID NO: 1672 - DNA, 20 bp, Artificial sequence
  SiRNA target sequence
acaagcagatgggaaataaa

SEQ ID NO: 1673 - DNA, 20 bp, Artificial sequence
  SiRNA target sequence
caagcagatgggaaataaaa

SEQ ID NO: 1674 - DNA, 20 bp, Artificial sequence
  SiRNA target sequence
aagcagatgggaaataaaaa

SEQ ID NO: 1675 - DNA, 20 bp, Artificial sequence
  SiRNA target sequence
agcagatgggaaataaaaaa

SEQ ID NO: 1676 - DNA, 20 bp, Artificial sequence
  SiRNA target sequence
gcagatgggaaataaaaaaa

SEQ ID NO: 1677 - DNA, 20 bp, Artificial sequence
  SiRNA target sequence
cagatgggaaataaaaaaaa

SEQ ID NO: 1678 - DNA, 20 bp, Artificial sequence
  SiRNA target sequence
agatgggaaataaaaaaaaa

SEQ ID NO: 1679 - DNA, 20 bp, Artificial sequence
  SiRNA target sequence
gatgggaaataaaaaaaaat

SEQ ID NO: 1680 - DNA, 20 bp, Artificial sequence
  SiRNA target sequence
atgggaaataaaaaaaaatt

SEQ ID NO: 1681 - DNA, 20 bp, Artificial sequence
  SiRNA target sequence
tgggaaataaaaaaaaattt

SEQ ID NO: 1682 - DNA, 20 bp, Artificial sequence
  SiRNA target sequence
gggaaataaaaaaaaatttc

SEQ ID NO: 1683 - DNA, 20 bp, Artificial sequence
  SiRNA target sequence
ggaaataaaaaaaaatttct

SEQ ID NO: 1684 - DNA, 20 bp, Artificial sequence
  SiRNA target sequence
gaaataaaaaaaaatttctt

SEQ ID NO: 1685 - DNA, 20 bp, Artificial sequence
  SiRNA target sequence
aaataaaaaaaaatttctta

SEQ ID NO: 1686 - DNA, 20 bp, Artificial sequence
  SiRNA target sequence
aataaaaaaaaatttcttaa

SEQ ID NO: 1687 - DNA, 20 bp, Artificial sequence
  SiRNA target sequence
ataaaaaaaaatttcttaag

SEQ ID NO: 1688 - DNA, 20 bp, Artificial sequence
  SiRNA target sequence
taaaaaaaaatttcttaagg

SEQ ID NO: 1689 - DNA, 20 bp, Artificial sequence
  SiRNA target sequence
aaaaaaaaatttcttaagga

SEQ ID NO: 1690 - DNA, 20 bp, Artificial sequence
  SiRNA target sequence
aaaaaaaatttcttaaggat

SEQ ID NO: 1691 - DNA, 20 bp, Artificial sequence
  SiRNA target sequence
aaaaaaatttcttaaggatt

SEQ ID NO: 1692 - DNA, 20 bp, Artificial sequence
  SiRNA target sequence
aaaaaatttcttaaggattt

SEQ ID NO: 1693 - DNA, 20 bp, Artificial sequence
  SiRNA target sequence
aaaaatttcttaaggattta

SEQ ID NO: 1694 - DNA, 20 bp, Artificial sequence
  SiRNA target sequence
aaaatttcttaaggatttag

SEQ ID NO: 1695 - DNA, 20 bp, Artificial sequence
  SiRNA target sequence
aaatttcttaaggatttagc

SEQ ID NO: 1696 - DNA, 20 bp, Artificial sequence
  SiRNA target sequence
aatttcttaaggatttagca

SEQ ID NO: 1697 - DNA, 20 bp, Artificial sequence
  SiRNA target sequence
atttcttaaggatttagcac

SEQ ID NO: 1698 - DNA, 20 bp, Artificial sequence
  SiRNA target sequence
tttcttaaggatttagcact

SEQ ID NO: 1699 - DNA, 20 bp, Artificial sequence
  SiRNA target sequence
ttcttaaggatttagcactt

SEQ ID NO: 1700 - DNA, 20 bp, Artificial sequence
  SiRNA target sequence
tcttaaggatttagcacttt

SEQ ID NO: 1701 - DNA, 20 bp, Artificial sequence
  SiRNA target sequence
cttaaggatttagcacttta

SEQ ID NO: 1702 - DNA, 20 bp, Artificial sequence
  SiRNA target sequence
ttaaggatttagcactttat

SEQ ID NO: 1703 - DNA, 20 bp, Artificial sequence
  SiRNA target sequence
taaggatttagcactttatg

SEQ ID NO: 1704 - DNA, 20 bp, Artificial sequence
  SiRNA target sequence
aaggatttagcactttatga

SEQ ID NO: 1705 - DNA, 20 bp, Artificial sequence
  SiRNA target sequence
aggatttagcactttatgaa

SEQ ID NO: 1706 - DNA, 20 bp, Artificial sequence
  SiRNA target sequence
ggatttagcactttatgaaa

SEQ ID NO: 1707 - DNA, 20 bp, Artificial sequence
  SiRNA target sequence
gatttagcactttatgaaac

SEQ ID NO: 1708 - DNA, 20 bp, Artificial sequence
  SiRNA target sequence
atttagcactttatgaaaca

SEQ ID NO: 1709 - DNA, 20 bp, Artificial sequence
  SiRNA target sequence
tttagcactttatgaaacat

SEQ ID NO: 1710 - DNA, 20 bp, Artificial sequence
  SiRNA target sequence
ttagcactttatgaaacatt

SEQ ID NO: 1711 - DNA, 20 bp, Artificial sequence
  SiRNA target sequence
tagcactttatgaaacattt

SEQ ID NO: 1712 - DNA, 20 bp, Artificial sequence
  SiRNA target sequence
agcactttatgaaacatttg

SEQ ID NO: 1713 - DNA, 20 bp, Artificial sequence
  SiRNA target sequence
gcactttatgaaacatttgc

SEQ ID NO: 1714 - DNA, 20 bp, Artificial sequence
  SiRNA target sequence
cactttatgaaacatttgct

SEQ ID NO: 1715 - DNA, 20 bp, Artificial sequence
  SiRNA target sequence
actttatgaaacatttgcta

SEQ ID NO: 1716 - DNA, 20 bp, Artificial sequence
  SiRNA target sequence
ctttatgaaacatttgctaa

SEQ ID NO: 1717 - DNA, 20 bp, Artificial sequence
  SiRNA target sequence
tttatgaaacatttgctaat

SEQ ID NO: 1718 - DNA, 20 bp, Artificial sequence
  SiRNA target sequence
ttatgaaacatttgctaata

SEQ ID NO: 1719 - DNA, 20 bp, Artificial sequence
  SiRNA target sequence
tatgaaacatttgctaataa

SEQ ID NO: 1720 - DNA, 20 bp, Artificial sequence
  SiRNA target sequence
atgaaacatttgctaataat

SEQ ID NO: 1721 - DNA, 20 bp, Artificial sequence
  SiRNA target sequence
tgaaacatttgctaataata

SEQ ID NO: 1722 - DNA, 20 bp, Artificial sequence
  SiRNA target sequence
gaaacatttgctaataataa

SEQ ID NO: 1723 - DNA, 20 bp, Artificial sequence
  SiRNA target sequence
aaacatttgctaataataaa

SEQ ID NO: 1724 - DNA, 20 bp, Artificial sequence
  SiRNA target sequence
aacatttgctaataataaag

SEQ ID NO: 1725 - DNA, 20 bp, Artificial sequence
  SiRNA target sequence
acatttgctaataataaaga

SEQ ID NO: 1726 - DNA, 20 bp, Artificial sequence
  SiRNA target sequence
catttgctaataataaagaa

SEQ ID NO: 1727 - DNA, 20 bp, Artificial sequence
  SiRNA target sequence
atttgctaataataaagaag

SEQ ID NO: 1728 - DNA, 20 bp, Artificial sequence
  SiRNA target sequence
tttgctaataataaagaagt

SEQ ID NO: 1729 - DNA, 20 bp, Artificial sequence
  SiRNA target sequence
ttgctaataataaagaagtc

SEQ ID NO: 1730 - DNA, 20 bp, Artificial sequence
  SiRNA target sequence
tgctaataataaagaagtcc

SEQ ID NO: 1731 - DNA, 20 bp, Artificial sequence
  SiRNA target sequence
gctaataataaagaagtcca

SEQ ID NO: 1732 - DNA, 20 bp, Artificial sequence
  SiRNA target sequence
ctaataataaagaagtccaa

SEQ ID NO: 1733 - DNA, 20 bp, Artificial sequence
  SiRNA target sequence
taataataaagaagtccaag

SEQ ID NO: 1734 - DNA, 20 bp, Artificial sequence
  SiRNA target sequence
aataataaagaagtccaaga

SEQ ID NO: 1735 - DNA, 20 bp, Artificial sequence
  SiRNA target sequence
ataataaagaagtccaagat

SEQ ID NO: 1736 - DNA, 20 bp, Artificial sequence
  SiRNA target sequence
taataaagaagtccaagatg

SEQ ID NO: 1737 - DNA, 20 bp, Artificial sequence
  SiRNA target sequence
aataaagaagtccaagatga

SEQ ID NO: 1738 - DNA, 20 bp, Artificial sequence
  SiRNA target sequence
ataaagaagtccaagatgaa

SEQ ID NO: 1739 - DNA, 20 bp, Artificial sequence
  SiRNA target sequence
taaagaagtccaagatgaaa

SEQ ID NO: 1740 - DNA, 20 bp, Artificial sequence
  SiRNA target sequence
aaagaagtccaagatgaaat

SEQ ID NO: 1741 - DNA, 20 bp, Artificial sequence
  SiRNA target sequence
aagaagtccaagatgaaatt

SEQ ID NO: 1742 - DNA, 20 bp, Artificial sequence
  SiRNA target sequence
agaagtccaagatgaaatta

SEQ ID NO: 1743 - DNA, 20 bp, Artificial sequence
  SiRNA target sequence
gaagtccaagatgaaattat

SEQ ID NO: 1744 - DNA, 20 bp, Artificial sequence
  SiRNA target sequence
aagtccaagatgaaattatg

SEQ ID NO: 1745 - DNA, 20 bp, Artificial sequence
  SiRNA target sequence
agtccaagatgaaattatgc

SEQ ID NO: 1746 - DNA, 20 bp, Artificial sequence
  SiRNA target sequence
gtccaagatgaaattatgca

SEQ ID NO: 1747 - DNA, 20 bp, Artificial sequence
  SiRNA target sequence
tccaagatgaaattatgcag

SEQ ID NO: 1748 - DNA, 20 bp, Artificial sequence
  SiRNA target sequence
ccaagatgaaattatgcaga

SEQ ID NO: 1749 - DNA, 20 bp, Artificial sequence
  SiRNA target sequence
caagatgaaattatgcagac

SEQ ID NO: 1750 - DNA, 20 bp, Artificial sequence
  SiRNA target sequence
aagatgaaattatgcagact

SEQ ID NO: 1751 - DNA, 20 bp, Artificial sequence
  SiRNA target sequence
agatgaaattatgcagactg

SEQ ID NO: 1752 - DNA, 20 bp, Artificial sequence
  SiRNA target sequence
gatgaaattatgcagactgt

SEQ ID NO: 1753 - DNA, 20 bp, Artificial sequence
  SiRNA target sequence
atgaaattatgcagactgtt

SEQ ID NO: 1754 - DNA, 20 bp, Artificial sequence
  SiRNA target sequence
tgaaattatgcagactgtta

SEQ ID NO: 1755 - DNA, 20 bp, Artificial sequence
  SiRNA target sequence
gaaattatgcagactgttaa

SEQ ID NO: 1756 - DNA, 20 bp, Artificial sequence
  SiRNA target sequence
aaattatgcagactgttaaa

SEQ ID NO: 1757 - DNA, 20 bp, Artificial sequence
  SiRNA target sequence
aattatgcagactgttaaag

SEQ ID NO: 1758 - DNA, 20 bp, Artificial sequence
  SiRNA target sequence
attatgcagactgttaaaga

SEQ ID NO: 1759 - DNA, 20 bp, Artificial sequence
  SiRNA target sequence
ttatgcagactgttaaagaa

SEQ ID NO: 1760 - DNA, 20 bp, Artificial sequence
  SiRNA target sequence
tatgcagactgttaaagaaa

SEQ ID NO: 1761 - DNA, 20 bp, Artificial sequence
  SiRNA target sequence
atgcagactgttaaagaaat

SEQ ID NO: 1762 - DNA, 20 bp, Artificial sequence
  SiRNA target sequence
tgcagactgttaaagaaatt

SEQ ID NO: 1763 - DNA, 20 bp, Artificial sequence
  SiRNA target sequence
gcagactgttaaagaaattt

SEQ ID NO: 1764 - DNA, 20 bp, Artificial sequence
  SiRNA target sequence
cagactgttaaagaaatttg

SEQ ID NO: 1765 - DNA, 20 bp, Artificial sequence
  SiRNA target sequence
agactgttaaagaaatttgt

SEQ ID NO: 1766 - DNA, 20 bp, Artificial sequence
  SiRNA target sequence
gactgttaaagaaatttgtg

SEQ ID NO: 1767 - DNA, 20 bp, Artificial sequence
  SiRNA target sequence
actgttaaagaaatttgtga

SEQ ID NO: 1768 - DNA, 20 bp, Artificial sequence
  SiRNA target sequence
ctgttaaagaaatttgtgaa

SEQ ID NO: 1769 - DNA, 20 bp, Artificial sequence
  SiRNA target sequence
tgttaaagaaatttgtgaag

SEQ ID NO: 1770 - DNA, 20 bp, Artificial sequence
  SiRNA target sequence
gttaaagaaatttgtgaaga

SEQ ID NO: 1771 - DNA, 20 bp, Artificial sequence
  SiRNA target sequence
ttaaagaaatttgtgaagaa

SEQ ID NO: 1772 - DNA, 20 bp, Artificial sequence
  SiRNA target sequence
taaagaaatttgtgaagaag

SEQ ID NO: 1773 - DNA, 20 bp, Artificial sequence
  SiRNA target sequence
aaagaaatttgtgaagaaga

SEQ ID NO: 1774 - DNA, 20 bp, Artificial sequence
  SiRNA target sequence
aagaaatttgtgaagaagaa

SEQ ID NO: 1775 - DNA, 20 bp, Artificial sequence
  SiRNA target sequence
agaaatttgtgaagaagaag

SEQ ID NO: 1776 - DNA, 20 bp, Artificial sequence
  SiRNA target sequence
gaaatttgtgaagaagaagt

SEQ ID NO: 1777 - DNA, 20 bp, Artificial sequence
  SiRNA target sequence
aaatttgtgaagaagaagtg

SEQ ID NO: 1778 - DNA, 20 bp, Artificial sequence
  SiRNA target sequence
aatttgtgaagaagaagtga

SEQ ID NO: 1779 - DNA, 20 bp, Artificial sequence
  SiRNA target sequence
atttgtgaagaagaagtgaa

SEQ ID NO: 1780 - DNA, 20 bp, Artificial sequence
  SiRNA target sequence
tttgtgaagaagaagtgaat

SEQ ID NO: 1781 - DNA, 20 bp, Artificial sequence
  SiRNA target sequence
ttgtgaagaagaagtgaatg

SEQ ID NO: 1782 - DNA, 20 bp, Artificial sequence
  SiRNA target sequence
tgtgaagaagaagtgaatga

SEQ ID NO: 1783 - DNA, 20 bp, Artificial sequence
  SiRNA target sequence
gtgaagaagaagtgaatgag

SEQ ID NO: 1784 - DNA, 20 bp, Artificial sequence
  SiRNA target sequence
tgaagaagaagtgaatgagt

SEQ ID NO: 1785 - DNA, 20 bp, Artificial sequence
  SiRNA target sequence
gaagaagaagtgaatgagtt

SEQ ID NO: 1786 - DNA, 20 bp, Artificial sequence
  SiRNA target sequence
aagaagaagtgaatgagttt

SEQ ID NO: 1787 - DNA, 20 bp, Artificial sequence
  SiRNA target sequence
agaagaagtgaatgagttta

SEQ ID NO: 1788 - DNA, 20 bp, Artificial sequence
  SiRNA target sequence
gaagaagtgaatgagtttat

SEQ ID NO: 1789 - DNA, 20 bp, Artificial sequence
  SiRNA target sequence
aagaagtgaatgagtttatt

SEQ ID NO: 1790 - DNA, 20 bp, Artificial sequence
  SiRNA target sequence
agaagtgaatgagtttattg

SEQ ID NO: 1791 - DNA, 20 bp, Artificial sequence
  SiRNA target sequence
gaagtgaatgagtttattga

SEQ ID NO: 1792 - DNA, 20 bp, Artificial sequence
  SiRNA target sequence
aagtgaatgagtttattgaa

SEQ ID NO: 1793 - DNA, 20 bp, Artificial sequence
  SiRNA target sequence
agtgaatgagtttattgaac

SEQ ID NO: 1794 - DNA, 20 bp, Artificial sequence
  SiRNA target sequence
gtgaatgagtttattgaaca

SEQ ID NO: 1795 - DNA, 20 bp, Artificial sequence
  SiRNA target sequence
tgaatgagtttattgaacaa

SEQ ID NO: 1796 - DNA, 20 bp, Artificial sequence
  SiRNA target sequence
gaatgagtttattgaacaag

SEQ ID NO: 1797 - DNA, 20 bp, Artificial sequence
  SiRNA target sequence
aatgagtttattgaacaaga

SEQ ID NO: 1798 - DNA, 20 bp, Artificial sequence
  SiRNA target sequence
atgagtttattgaacaagaa

SEQ ID NO: 1799 - DNA, 20 bp, Artificial sequence
  SiRNA target sequence
tgagtttattgaacaagaag

SEQ ID NO: 1800 - DNA, 20 bp, Artificial sequence
  SiRNA target sequence
gagtttattgaacaagaagg

SEQ ID NO: 1801 - DNA, 20 bp, Artificial sequence
  SiRNA target sequence
agtttattgaacaagaaggt

SEQ ID NO: 1802 - DNA, 20 bp, Artificial sequence
  SiRNA target sequence
gtttattgaacaagaaggtt

SEQ ID NO: 1803 - DNA, 20 bp, Artificial sequence
  SiRNA target sequence
tttattgaacaagaaggttt

SEQ ID NO: 1804 - DNA, 20 bp, Artificial sequence
  SiRNA target sequence
ttattgaacaagaaggttta

SEQ ID NO: 1805 - DNA, 20 bp, Artificial sequence
  SiRNA target sequence
tattgaacaagaaggtttaa

SEQ ID NO: 1806 - DNA, 20 bp, Artificial sequence
  SiRNA target sequence
attgaacaagaaggtttaaa

SEQ ID NO: 1807 - DNA, 20 bp, Artificial sequence
  SiRNA target sequence
ttgaacaagaaggtttaaaa

SEQ ID NO: 1808 - DNA, 20 bp, Artificial sequence
  SiRNA target sequence
tgaacaagaaggtttaaaaa

SEQ ID NO: 1809 - DNA, 20 bp, Artificial sequence
  SiRNA target sequence
gaacaagaaggtttaaaaat

SEQ ID NO: 1810 - DNA, 20 bp, Artificial sequence
  SiRNA target sequence
aacaagaaggtttaaaaatt

SEQ ID NO: 1811 - DNA, 20 bp, Artificial sequence
  SiRNA target sequence
acaagaaggtttaaaaatta

SEQ ID NO: 1812 - DNA, 20 bp, Artificial sequence
  SiRNA target sequence
caagaaggtttaaaaattaa

SEQ ID NO: 1813 - DNA, 20 bp, Artificial sequence
  SiRNA target sequence
aagaaggtttaaaaattaat

SEQ ID NO: 1814 - DNA, 20 bp, Artificial sequence
  SiRNA target sequence
agaaggtttaaaaattaata

SEQ ID NO: 1815 - DNA, 20 bp, Artificial sequence
  SiRNA target sequence
gaaggtttaaaaattaataa

SEQ ID NO: 1816 - DNA, 20 bp, Artificial sequence
  SiRNA target sequence
aaggtttaaaaattaataaa

SEQ ID NO: 1817 - DNA, 20 bp, Artificial sequence
  SiRNA target sequence
aggtttaaaaattaataaag

SEQ ID NO: 1818 - DNA, 20 bp, Artificial sequence
  SiRNA target sequence
ggtttaaaaattaataaaga

SEQ ID NO: 1819 - DNA, 20 bp, Artificial sequence
  SiRNA target sequence
gtttaaaaattaataaagaa

SEQ ID NO: 1820 - DNA, 20 bp, Artificial sequence
  SiRNA target sequence
tttaaaaattaataaagaag

SEQ ID NO: 1821 - DNA, 20 bp, Artificial sequence
  SiRNA target sequence
ttaaaaattaataaagaaga

SEQ ID NO: 1822 - DNA, 20 bp, Artificial sequence
  SiRNA target sequence
taaaaattaataaagaagat

SEQ ID NO: 1823 - DNA, 20 bp, Artificial sequence
  SiRNA target sequence
aaaaattaataaagaagatg

SEQ ID NO: 1824 - DNA, 20 bp, Artificial sequence
  SiRNA target sequence
aaaattaataaagaagatgt

SEQ ID NO: 1825 - DNA, 20 bp, Artificial sequence
  SiRNA target sequence
aaattaataaagaagatgtg

SEQ ID NO: 1826 - DNA, 20 bp, Artificial sequence
  SiRNA target sequence
aattaataaagaagatgtgc

SEQ ID NO: 1827 - DNA, 20 bp, Artificial sequence
  SiRNA target sequence
attaataaagaagatgtgct

SEQ ID NO: 1828 - DNA, 20 bp, Artificial sequence
  SiRNA target sequence
ttaataaagaagatgtgcta

SEQ ID NO: 1829 - DNA, 20 bp, Artificial sequence
  SiRNA target sequence
taataaagaagatgtgctaa

SEQ ID NO: 1830 - DNA, 20 bp, Artificial sequence
  SiRNA target sequence
aataaagaagatgtgctaag

SEQ ID NO: 1831 - DNA, 20 bp, Artificial sequence
  SiRNA target sequence
ataaagaagatgtgctaaga

SEQ ID NO: 1832 - DNA, 20 bp, Artificial sequence
  SiRNA target sequence
taaagaagatgtgctaagag

SEQ ID NO: 1833 - DNA, 20 bp, Artificial sequence
  SiRNA target sequence
aaagaagatgtgctaagagg

SEQ ID NO: 1834 - DNA, 20 bp, Artificial sequence
  SiRNA target sequence
aagaagatgtgctaagagga

SEQ ID NO: 1835 - DNA, 20 bp, Artificial sequence
  SiRNA target sequence
agaagatgtgctaagaggac

SEQ ID NO: 1836 - DNA, 20 bp, Artificial sequence
  SiRNA target sequence
gaagatgtgctaagaggact

SEQ ID NO: 1837 - DNA, 20 bp, Artificial sequence
  SiRNA target sequence
aagatgtgctaagaggactt

SEQ ID NO: 1838 - DNA, 20 bp, Artificial sequence
  SiRNA target sequence
agatgtgctaagaggacttg

SEQ ID NO: 1839 - DNA, 20 bp, Artificial sequence
  SiRNA target sequence
gatgtgctaagaggacttgt

SEQ ID NO: 1840 - DNA, 20 bp, Artificial sequence
  SiRNA target sequence
atgtgctaagaggacttgtt

SEQ ID NO: 1841 - DNA, 20 bp, Artificial sequence
  SiRNA target sequence
tgtgctaagaggacttgttt

SEQ ID NO: 1842 - DNA, 20 bp, Artificial sequence
  SiRNA target sequence
gtgctaagaggacttgtttc

SEQ ID NO: 1843 - DNA, 20 bp, Artificial sequence
  SiRNA target sequence
tgctaagaggacttgtttca

SEQ ID NO: 1844 - DNA, 20 bp, Artificial sequence
  SiRNA target sequence
gctaagaggacttgtttcaa

SEQ ID NO: 1845 - DNA, 20 bp, Artificial sequence
  SiRNA target sequence
ctaagaggacttgtttcaat

SEQ ID NO: 1846 - DNA, 20 bp, Artificial sequence
  SiRNA target sequence
taagaggacttgtttcaata

SEQ ID NO: 1847 - DNA, 20 bp, Artificial sequence
  SiRNA target sequence
aagaggacttgtttcaataa

SEQ ID NO: 1848 - DNA, 20 bp, Artificial sequence
  SiRNA target sequence
agaggacttgtttcaataaa

SEQ ID NO: 1849 - DNA, 20 bp, Artificial sequence
  SiRNA target sequence
gaggacttgtttcaataaaa

SEQ ID NO: 1850 - DNA, 20 bp, Artificial sequence
  SiRNA target sequence
aggacttgtttcaataaaaa

SEQ ID NO: 1851 - DNA, 20 bp, Artificial sequence
  SiRNA target sequence
ggacttgtttcaataaaaaa

SEQ ID NO: 1852 - DNA, 20 bp, Artificial sequence
  SiRNA target sequence
gacttgtttcaataaaaaat

SEQ ID NO: 1853 - DNA, 20 bp, Artificial sequence
  SiRNA target sequence
acttgtttcaataaaaaata

SEQ ID NO: 1854 - DNA, 20 bp, Artificial sequence
  SiRNA target sequence
cttgtttcaataaaaaatat

SEQ ID NO: 1855 - DNA, 20 bp, Artificial sequence
  SiRNA target sequence
ttgtttcaataaaaaatata

SEQ ID NO: 1856 - DNA, 20 bp, Artificial sequence
  SiRNA target sequence
tgtttcaataaaaaatataa

SEQ ID NO: 1857 - DNA, 20 bp, Artificial sequence
  SiRNA target sequence
gtttcaataaaaaatataaa

SEQ ID NO: 1858 - DNA, 20 bp, Artificial sequence
  SiRNA target sequence
tttcaataaaaaatataaat

SEQ ID NO: 1859 - DNA, 20 bp, Artificial sequence
  SiRNA target sequence
ttcaataaaaaatataaatg

SEQ ID NO: 1860 - DNA, 20 bp, Artificial sequence
  SiRNA target sequence
tcaataaaaaatataaatga

SEQ ID NO: 1861 - DNA, 20 bp, Artificial sequence
  SiRNA target sequence
caataaaaaatataaatgag

SEQ ID NO: 1862 - DNA, 20 bp, Artificial sequence
  SiRNA target sequence
aataaaaaatataaatgaga

SEQ ID NO: 1863 - DNA, 20 bp, Artificial sequence
  SiRNA target sequence
ataaaaaatataaatgagat

SEQ ID NO: 1864 - DNA, 20 bp, Artificial sequence
  SiRNA target sequence
taaaaaatataaatgagatt

SEQ ID NO: 1865 - DNA, 20 bp, Artificial sequence
  SiRNA target sequence
aaaaaatataaatgagattt

SEQ ID NO: 1866 - DNA, 20 bp, Artificial sequence
  SiRNA target sequence
aaaaatataaatgagattta

SEQ ID NO: 1867 - DNA, 20 bp, Artificial sequence
  SiRNA target sequence
aaaatataaatgagatttat

SEQ ID NO: 1868 - DNA, 20 bp, Artificial sequence
  SiRNA target sequence
aaatataaatgagatttatg

SEQ ID NO: 1869 - DNA, 20 bp, Artificial sequence
  SiRNA target sequence
aatataaatgagatttatga

SEQ ID NO: 1870 - DNA, 20 bp, Artificial sequence
  SiRNA target sequence
atataaatgagatttatgat

SEQ ID NO: 1871 - DNA, 20 bp, Artificial sequence
  SiRNA target sequence
tataaatgagatttatgatg

SEQ ID NO: 1872 - DNA, 20 bp, Artificial sequence
  SiRNA target sequence
ataaatgagatttatgatgc

SEQ ID NO: 1873 - DNA, 20 bp, Artificial sequence
  SiRNA target sequence
taaatgagatttatgatgca

SEQ ID NO: 1874 - DNA, 20 bp, Artificial sequence
  SiRNA target sequence
aaatgagatttatgatgcat

SEQ ID NO: 1875 - DNA, 20 bp, Artificial sequence
  SiRNA target sequence
aatgagatttatgatgcatt

SEQ ID NO: 1876 - DNA, 20 bp, Artificial sequence
  SiRNA target sequence
atgagatttatgatgcattt

SEQ ID NO: 1877 - DNA, 20 bp, Artificial sequence
  SiRNA target sequence
tgagatttatgatgcatttg

SEQ ID NO: 1878 - DNA, 20 bp, Artificial sequence
  SiRNA target sequence
gagatttatgatgcatttgg

SEQ ID NO: 1879 - DNA, 20 bp, Artificial sequence
  SiRNA target sequence
agatttatgatgcatttgga

SEQ ID NO: 1880 - DNA, 20 bp, Artificial sequence
  SiRNA target sequence
gatttatgatgcatttggag

SEQ ID NO: 1881 - DNA, 20 bp, Artificial sequence
  SiRNA target sequence
atttatgatgcatttggagg

SEQ ID NO: 1882 - DNA, 20 bp, Artificial sequence
  SiRNA target sequence
tttatgatgcatttggaggt

SEQ ID NO: 1883 - DNA, 20 bp, Artificial sequence
  SiRNA target sequence
ttatgatgcatttggaggta

SEQ ID NO: 1884 - DNA, 20 bp, Artificial sequence
  SiRNA target sequence
tatgatgcatttggaggtaa

SEQ ID NO: 1885 - DNA, 20 bp, Artificial sequence
  SiRNA target sequence
atgatgcatttggaggtaaa

SEQ ID NO: 1886 - DNA, 20 bp, Artificial sequence
  SiRNA target sequence
tgatgcatttggaggtaaat

SEQ ID NO: 1887 - DNA, 20 bp, Artificial sequence
  SiRNA target sequence
gatgcatttggaggtaaatc

SEQ ID NO: 1888 - DNA, 20 bp, Artificial sequence
  SiRNA target sequence
atgcatttggaggtaaatct

SEQ ID NO: 1889 - DNA, 20 bp, Artificial sequence
  SiRNA target sequence
tgcatttggaggtaaatcta

SEQ ID NO: 1890 - DNA, 20 bp, Artificial sequence
  SiRNA target sequence
gcatttggaggtaaatctaa

SEQ ID NO: 1891 - DNA, 20 bp, Artificial sequence
  SiRNA target sequence
catttggaggtaaatctaag

SEQ ID NO: 1892 - DNA, 20 bp, Artificial sequence
  SiRNA target sequence
atttggaggtaaatctaaga

SEQ ID NO: 1893 - DNA, 20 bp, Artificial sequence
  SiRNA target sequence
tttggaggtaaatctaagaa

SEQ ID NO: 1894 - DNA, 20 bp, Artificial sequence
  SiRNA target sequence
ttggaggtaaatctaagaag

SEQ ID NO: 1895 - DNA, 20 bp, Artificial sequence
  SiRNA target sequence
tggaggtaaatctaagaagt

SEQ ID NO: 1896 - DNA, 20 bp, Artificial sequence
  SiRNA target sequence
ggaggtaaatctaagaagtt

SEQ ID NO: 1897 - DNA, 20 bp, Artificial sequence
  SiRNA target sequence
gaggtaaatctaagaagttt

SEQ ID NO: 1898 - DNA, 20 bp, Artificial sequence
  SiRNA target sequence
aggtaaatctaagaagttta

SEQ ID NO: 1899 - DNA, 20 bp, Artificial sequence
  SiRNA target sequence
ggtaaatctaagaagtttaa

SEQ ID NO: 1900 - DNA, 20 bp, Artificial sequence
  SiRNA target sequence
gtaaatctaagaagtttaaa

SEQ ID NO: 1901 - DNA, 20 bp, Artificial sequence
  SiRNA target sequence
taaatctaagaagtttaaat

SEQ ID NO: 1902 - DNA, 20 bp, Artificial sequence
  SiRNA target sequence
aaatctaagaagtttaaatt

SEQ ID NO: 1903 - DNA, 20 bp, Artificial sequence
  SiRNA target sequence
aatctaagaagtttaaattt

SEQ ID NO: 1904 - DNA, 20 bp, Artificial sequence
  SiRNA target sequence
atctaagaagtttaaatttt

SEQ ID NO: 1905 - DNA, 20 bp, Artificial sequence
  SiRNA target sequence
tctaagaagtttaaattttc

SEQ ID NO: 1906 - DNA, 20 bp, Artificial sequence
  SiRNA target sequence
ctaagaagtttaaattttct

SEQ ID NO: 1907 - DNA, 20 bp, Artificial sequence
  SiRNA target sequence
taagaagtttaaattttcta

SEQ ID NO: 1908 - DNA, 20 bp, Artificial sequence
  SiRNA target sequence
aagaagtttaaattttctaa

SEQ ID NO: 1909 - DNA, 20 bp, Artificial sequence
  SiRNA target sequence
agaagtttaaattttctaat

SEQ ID NO: 1910 - DNA, 20 bp, Artificial sequence
  SiRNA target sequence
gaagtttaaattttctaatg

SEQ ID NO: 1911 - DNA, 20 bp, Artificial sequence
  SiRNA target sequence
aagtttaaattttctaatga

SEQ ID NO: 1912 - DNA, 20 bp, Artificial sequence
  SiRNA target sequence
agtttaaattttctaatgat

SEQ ID NO: 1913 - DNA, 20 bp, Artificial sequence
  SiRNA target sequence
gtttaaattttctaatgatg

SEQ ID NO: 1914 - DNA, 20 bp, Artificial sequence
  SiRNA target sequence
tttaaattttctaatgatga

SEQ ID NO: 1915 - DNA, 20 bp, Artificial sequence
  SiRNA target sequence
ttaaattttctaatgatgaa

SEQ ID NO: 1916 - DNA, 20 bp, Artificial sequence
  SiRNA target sequence
taaattttctaatgatgaaa

SEQ ID NO: 1917 - DNA, 20 bp, Artificial sequence
  SiRNA target sequence
aaattttctaatgatgaaaa

SEQ ID NO: 1918 - DNA, 20 bp, Artificial sequence
  SiRNA target sequence
aattttctaatgatgaaaag

SEQ ID NO: 1919 - DNA, 20 bp, Artificial sequence
  SiRNA target sequence
attttctaatgatgaaaagg

SEQ ID NO: 1920 - DNA, 20 bp, Artificial sequence
  SiRNA target sequence
ttttctaatgatgaaaagga

SEQ ID NO: 1921 - DNA, 20 bp, Artificial sequence
  SiRNA target sequence
tttctaatgatgaaaaggaa

SEQ ID NO: 1922 - DNA, 20 bp, Artificial sequence
  SiRNA target sequence
ttctaatgatgaaaaggaag

SEQ ID NO: 1923 - DNA, 20 bp, Artificial sequence
  SiRNA target sequence
tctaatgatgaaaaggaagt

SEQ ID NO: 1924 - DNA, 20 bp, Artificial sequence
  SiRNA target sequence
ctaatgatgaaaaggaagtg

SEQ ID NO: 1925 - DNA, 20 bp, Artificial sequence
  SiRNA target sequence
taatgatgaaaaggaagtgt

SEQ ID NO: 1926 - DNA, 20 bp, Artificial sequence
  SiRNA target sequence
aatgatgaaaaggaagtgtt

SEQ ID NO: 1927 - DNA, 20 bp, Artificial sequence
  SiRNA target sequence
atgatgaaaaggaagtgtta

SEQ ID NO: 1928 - DNA, 20 bp, Artificial sequence
  SiRNA target sequence
tgatgaaaaggaagtgttaa

SEQ ID NO: 1929 - DNA, 20 bp, Artificial sequence
  SiRNA target sequence
gatgaaaaggaagtgttaaa

SEQ ID NO: 1930 - DNA, 20 bp, Artificial sequence
  SiRNA target sequence
atgaaaaggaagtgttaaat

SEQ ID NO: 1931 - DNA, 20 bp, Artificial sequence
  SiRNA target sequence
tgaaaaggaagtgttaaatc

SEQ ID NO: 1932 - DNA, 20 bp, Artificial sequence
  SiRNA target sequence
gaaaaggaagtgttaaatct

SEQ ID NO: 1933 - DNA, 20 bp, Artificial sequence
  SiRNA target sequence
aaaaggaagtgttaaatctt

SEQ ID NO: 1934 - DNA, 20 bp, Artificial sequence
  SiRNA target sequence
aaaggaagtgttaaatcttc

SEQ ID NO: 1935 - DNA, 20 bp, Artificial sequence
  SiRNA target sequence
aaggaagtgttaaatcttct

SEQ ID NO: 1936 - DNA, 20 bp, Artificial sequence
  SiRNA target sequence
aggaagtgttaaatcttctt

SEQ ID NO: 1937 - DNA, 20 bp, Artificial sequence
  SiRNA target sequence
ggaagtgttaaatcttctta

SEQ ID NO: 1938 - DNA, 20 bp, Artificial sequence
  SiRNA target sequence
gaagtgttaaatcttcttaa

SEQ ID NO: 1939 - DNA, 20 bp, Artificial sequence
  SiRNA target sequence
aagtgttaaatcttcttaat

SEQ ID NO: 1940 - DNA, 20 bp, Artificial sequence
  SiRNA target sequence
agtgttaaatcttcttaatg

SEQ ID NO: 1941 - DNA, 20 bp, Artificial sequence
  SiRNA target sequence
gtgttaaatcttcttaatgc

SEQ ID NO: 1942 - DNA, 20 bp, Artificial sequence
  SiRNA target sequence
tgttaaatcttcttaatgcc

SEQ ID NO: 1943 - DNA, 20 bp, Artificial sequence
  SiRNA target sequence
gttaaatcttcttaatgcca

SEQ ID NO: 1944 - DNA, 20 bp, Artificial sequence
  SiRNA target sequence
ttaaatcttcttaatgccat

SEQ ID NO: 1945 - DNA, 20 bp, Artificial sequence
  SiRNA target sequence
taaatcttcttaatgccatt

SEQ ID NO: 1946 - DNA, 20 bp, Artificial sequence
  SiRNA target sequence
aaatcttcttaatgccatta

SEQ ID NO: 1947 - DNA, 20 bp, Artificial sequence
  SiRNA target sequence
aatcttcttaatgccattat

SEQ ID NO: 1948 - DNA, 20 bp, Artificial sequence
  SiRNA target sequence
atcttcttaatgccattatt

SEQ ID NO: 1949 - DNA, 20 bp, Artificial sequence
  SiRNA target sequence
tcttcttaatgccattattt

SEQ ID NO: 1950 - DNA, 20 bp, Artificial sequence
  SiRNA target sequence
cttcttaatgccattatttt

SEQ ID NO: 1951 - DNA, 20 bp, Artificial sequence
  SiRNA target sequence
ttcttaatgccattatttta

SEQ ID NO: 1952 - DNA, 20 bp, Artificial sequence
  SiRNA target sequence
tcttaatgccattattttac

SEQ ID NO: 1953 - DNA, 20 bp, Artificial sequence
  SiRNA target sequence
cttaatgccattattttaca

SEQ ID NO: 1954 - DNA, 20 bp, Artificial sequence
  SiRNA target sequence
ttaatgccattattttacac

SEQ ID NO: 1955 - DNA, 20 bp, Artificial sequence
  SiRNA target sequence
taatgccattattttacacc

SEQ ID NO: 1956 - DNA, 20 bp, Artificial sequence
  SiRNA target sequence
aatgccattattttacacct

SEQ ID NO: 1957 - DNA, 20 bp, Artificial sequence
  SiRNA target sequence
atgccattattttacaccta

SEQ ID NO: 1958 - DNA, 20 bp, Artificial sequence
  SiRNA target sequence
tgccattattttacacctaa

SEQ ID NO: 1959 - DNA, 20 bp, Artificial sequence
  SiRNA target sequence
gccattattttacacctaaa

SEQ ID NO: 1960 - DNA, 20 bp, Artificial sequence
  SiRNA target sequence
ccattattttacacctaaaa

SEQ ID NO: 1961 - DNA, 20 bp, Artificial sequence
  SiRNA target sequence
cattattttacacctaaaag

SEQ ID NO: 1962 - DNA, 20 bp, Artificial sequence
  SiRNA target sequence
attattttacacctaaaagg

SEQ ID NO: 1963 - DNA, 20 bp, Artificial sequence
  SiRNA target sequence
ttattttacacctaaaagga

SEQ ID NO: 1964 - DNA, 20 bp, Artificial sequence
  SiRNA target sequence
tattttacacctaaaaggaa

SEQ ID NO: 1965 - DNA, 20 bp, Artificial sequence
  SiRNA target sequence
attttacacctaaaaggaaa

SEQ ID NO: 1966 - DNA, 20 bp, Artificial sequence
  SiRNA target sequence
ttttacacctaaaaggaaaa

SEQ ID NO: 1967 - DNA, 20 bp, Artificial sequence
  SiRNA target sequence
tttacacctaaaaggaaaaa

SEQ ID NO: 1968 - DNA, 20 bp, Artificial sequence
  SiRNA target sequence
ttacacctaaaaggaaaaaa

SEQ ID NO: 1969 - DNA, 20 bp, Artificial sequence
  SiRNA target sequence
tacacctaaaaggaaaaaaa

SEQ ID NO: 1970 - DNA, 20 bp, Artificial sequence
  SiRNA target sequence
acacctaaaaggaaaaaaag

SEQ ID NO: 1971 - DNA, 20 bp, Artificial sequence
  SiRNA target sequence
cacctaaaaggaaaaaaaga

SEQ ID NO: 1972 - DNA, 20 bp, Artificial sequence
  SiRNA target sequence
acctaaaaggaaaaaaagaa

SEQ ID NO: 1973 - DNA, 20 bp, Artificial sequence
  SiRNA target sequence
cctaaaaggaaaaaaagaac

SEQ ID NO: 1974 - DNA, 20 bp, Artificial sequence
  SiRNA target sequence
ctaaaaggaaaaaaagaaca

SEQ ID NO: 1975 - DNA, 20 bp, Artificial sequence
  SiRNA target sequence
taaaaggaaaaaaagaacag

SEQ ID NO: 1976 - DNA, 20 bp, Artificial sequence
  SiRNA target sequence
aaaaggaaaaaaagaacagg

SEQ ID NO: 1977 - DNA, 20 bp, Artificial sequence
  SiRNA target sequence
aaaggaaaaaaagaacaggc

SEQ ID NO: 1978 - DNA, 20 bp, Artificial sequence
  SiRNA target sequence
aaggaaaaaaagaacaggca

SEQ ID NO: 1979 - DNA, 20 bp, Artificial sequence
  SiRNA target sequence
aggaaaaaaagaacaggcaa

SEQ ID NO: 1980 - DNA, 20 bp, Artificial sequence
  SiRNA target sequence
ggaaaaaaagaacaggcaat

SEQ ID NO: 1981 - DNA, 20 bp, Artificial sequence
  SiRNA target sequence
gaaaaaaagaacaggcaatt

SEQ ID NO: 1982 - DNA, 20 bp, Artificial sequence
  SiRNA target sequence
aaaaaaagaacaggcaattc

SEQ ID NO: 1983 - DNA, 20 bp, Artificial sequence
  SiRNA target sequence
aaaaaagaacaggcaattct

SEQ ID NO: 1984 - DNA, 20 bp, Artificial sequence
  SiRNA target sequence
aaaaagaacaggcaattctt

SEQ ID NO: 1985 - DNA, 20 bp, Artificial sequence
  SiRNA target sequence
aaaagaacaggcaattcttt

SEQ ID NO: 1986 - DNA, 20 bp, Artificial sequence
  SiRNA target sequence
aaagaacaggcaattctttt

SEQ ID NO: 1987 - DNA, 20 bp, Artificial sequence
  SiRNA target sequence
aagaacaggcaattctttta

SEQ ID NO: 1988 - DNA, 20 bp, Artificial sequence
  SiRNA target sequence
agaacaggcaattcttttat

SEQ ID NO: 1989 - DNA, 20 bp, Artificial sequence
  SiRNA target sequence
gaacaggcaattcttttatt

SEQ ID NO: 1990 - DNA, 20 bp, Artificial sequence
  SiRNA target sequence
aacaggcaattcttttatta

SEQ ID NO: 1991 - DNA, 20 bp, Artificial sequence
  SiRNA target sequence
acaggcaattcttttattag

SEQ ID NO: 1992 - DNA, 20 bp, Artificial sequence
  SiRNA target sequence
caggcaattcttttattaga

SEQ ID NO: 1993 - DNA, 20 bp, Artificial sequence
  SiRNA target sequence
aggcaattcttttattagaa

SEQ ID NO: 1994 - DNA, 20 bp, Artificial sequence
  SiRNA target sequence
ggcaattcttttattagaaa

SEQ ID NO: 1995 - DNA, 20 bp, Artificial sequence
  SiRNA target sequence
gcaattcttttattagaaaa

SEQ ID NO: 1996 - DNA, 20 bp, Artificial sequence
  SiRNA target sequence
caattcttttattagaaaaa

SEQ ID NO: 1997 - DNA, 20 bp, Artificial sequence
  SiRNA target sequence
aattcttttattagaaaaat

SEQ ID NO: 1998 - DNA, 20 bp, Artificial sequence
  SiRNA target sequence
attcttttattagaaaaatc

SEQ ID NO: 1999 - DNA, 20 bp, Artificial sequence
  SiRNA target sequence
ttcttttattagaaaaatct

SEQ ID NO: 2000 - DNA, 20 bp, Artificial sequence
  SiRNA target sequence
tcttttattagaaaaatcta

SEQ ID NO: 2001 - DNA, 20 bp, Artificial sequence
  SiRNA target sequence
cttttattagaaaaatctac

SEQ ID NO: 2002 - DNA, 20 bp, Artificial sequence
  SiRNA target sequence
ttttattagaaaaatctact

SEQ ID NO: 2003 - DNA, 20 bp, Artificial sequence
  SiRNA target sequence
tttattagaaaaatctactt

SEQ ID NO: 2004 - DNA, 20 bp, Artificial sequence
  SiRNA target sequence
ttattagaaaaatctactta

SEQ ID NO: 2005 - DNA, 20 bp, Artificial sequence
  SiRNA target sequence
tattagaaaaatctacttat

SEQ ID NO: 2006 - DNA, 20 bp, Artificial sequence
  SiRNA target sequence
attagaaaaatctacttata

SEQ ID NO: 2007 - DNA, 20 bp, Artificial sequence
  SiRNA target sequence
ttagaaaaatctacttataa

SEQ ID NO: 2008 - DNA, 20 bp, Artificial sequence
  SiRNA target sequence
tagaaaaatctacttataaa

SEQ ID NO: 2009 - DNA, 20 bp, Artificial sequence
  SiRNA target sequence
agaaaaatctacttataaat

SEQ ID NO: 2010 - DNA, 20 bp, Artificial sequence
  SiRNA target sequence
gaaaaatctacttataaata

SEQ ID NO: 2011 - DNA, 20 bp, Artificial sequence
  SiRNA target sequence
aaaaatctacttataaatac

SEQ ID NO: 2012 - DNA, 20 bp, Artificial sequence
  SiRNA target sequence
aaaatctacttataaataca

SEQ ID NO: 2013 - DNA, 20 bp, Artificial sequence
  SiRNA target sequence
aaatctacttataaatacag

SEQ ID NO: 2014 - DNA, 20 bp, Artificial sequence
  SiRNA target sequence
aatctacttataaatacagt

SEQ ID NO: 2015 - DNA, 20 bp, Artificial sequence
  SiRNA target sequence
atctacttataaatacagta

SEQ ID NO: 2016 - DNA, 20 bp, Artificial sequence
  SiRNA target sequence
tctacttataaatacagtat

SEQ ID NO: 2017 - DNA, 20 bp, Artificial sequence
  SiRNA target sequence
ctacttataaatacagtatc

SEQ ID NO: 2018 - DNA, 20 bp, Artificial sequence
  SiRNA target sequence
tacttataaatacagtatct

SEQ ID NO: 2019 - DNA, 20 bp, Artificial sequence
  SiRNA target sequence
acttataaatacagtatctt

SEQ ID NO: 2020 - DNA, 20 bp, Artificial sequence
  SiRNA target sequence
cttataaatacagtatcttg

SEQ ID NO: 2021 - DNA, 20 bp, Artificial sequence
  SiRNA target sequence
ttataaatacagtatcttgt

SEQ ID NO: 2022 - DNA, 20 bp, Artificial sequence
  SiRNA target sequence
tataaatacagtatcttgta

SEQ ID NO: 2023 - DNA, 20 bp, Artificial sequence
  SiRNA target sequence
ataaatacagtatcttgtat

SEQ ID NO: 2024 - DNA, 20 bp, Artificial sequence
  SiRNA target sequence
taaatacagtatcttgtata

SEQ ID NO: 2025 - DNA, 20 bp, Artificial sequence
  SiRNA target sequence
aaatacagtatcttgtatag

SEQ ID NO: 2026 - DNA, 20 bp, Artificial sequence
  SiRNA target sequence
aatacagtatcttgtataga

SEQ ID NO: 2027 - DNA, 20 bp, Artificial sequence
  SiRNA target sequence
atacagtatcttgtatagag

SEQ ID NO: 2028 - DNA, 20 bp, Artificial sequence
  SiRNA target sequence
tacagtatcttgtatagagc

SEQ ID NO: 2029 - DNA, 20 bp, Artificial sequence
  SiRNA target sequence
acagtatcttgtatagagca

SEQ ID NO: 2030 - DNA, 20 bp, Artificial sequence
  SiRNA target sequence
cagtatcttgtatagagcat

SEQ ID NO: 2031 - DNA, 20 bp, Artificial sequence
  SiRNA target sequence
agtatcttgtatagagcata

SEQ ID NO: 2032 - DNA, 20 bp, Artificial sequence
  SiRNA target sequence
gtatcttgtatagagcatat

SEQ ID NO: 2033 - DNA, 20 bp, Artificial sequence
  SiRNA target sequence
tatcttgtatagagcatatt

SEQ ID NO: 2034 - DNA, 20 bp, Artificial sequence
  SiRNA target sequence
atcttgtatagagcatattt

SEQ ID NO: 2035 - DNA, 20 bp, Artificial sequence
  SiRNA target sequence
tcttgtatagagcatatttt

SEQ ID NO: 2036 - DNA, 20 bp, Artificial sequence
  SiRNA target sequence
cttgtatagagcatattttc

SEQ ID NO: 2037 - DNA, 20 bp, Artificial sequence
  SiRNA target sequence
ttgtatagagcatattttct

SEQ ID NO: 2038 - DNA, 20 bp, Artificial sequence
  SiRNA target sequence
tgtatagagcatattttctt

SEQ ID NO: 2039 - DNA, 20 bp, Artificial sequence
  SiRNA target sequence
gtatagagcatattttctta

SEQ ID NO: 2040 - DNA, 20 bp, Artificial sequence
  SiRNA target sequence
tatagagcatattttcttac

SEQ ID NO: 2041 - DNA, 20 bp, Artificial sequence
  SiRNA target sequence
atagagcatattttcttaca

SEQ ID NO: 2042 - DNA, 20 bp, Artificial sequence
  SiRNA target sequence
tagagcatattttcttacat

SEQ ID NO: 2043 - DNA, 20 bp, Artificial sequence
  SiRNA target sequence
agagcatattttcttacatt

SEQ ID NO: 2044 - DNA, 20 bp, Artificial sequence
  SiRNA target sequence
gagcatattttcttacattg

SEQ ID NO: 2045 - DNA, 20 bp, Artificial sequence
  SiRNA target sequence
agcatattttcttacattga

SEQ ID NO: 2046 - DNA, 20 bp, Artificial sequence
  SiRNA target sequence
gcatattttcttacattgaa

SEQ ID NO: 2047 - DNA, 20 bp, Artificial sequence
  SiRNA target sequence
catattttcttacattgaag

SEQ ID NO: 2048 - DNA, 20 bp, Artificial sequence
  SiRNA target sequence
atattttcttacattgaaga

SEQ ID NO: 2049 - DNA, 20 bp, Artificial sequence
  SiRNA target sequence
tattttcttacattgaagaa

SEQ ID NO: 2050 - DNA, 20 bp, Artificial sequence
  SiRNA target sequence
attttcttacattgaagaat

SEQ ID NO: 2051 - DNA, 20 bp, Artificial sequence
  SiRNA target sequence
ttttcttacattgaagaatg

SEQ ID NO: 2052 - DNA, 20 bp, Artificial sequence
  SiRNA target sequence
tttcttacattgaagaatga

SEQ ID NO: 2053 - DNA, 20 bp, Artificial sequence
  SiRNA target sequence
ttcttacattgaagaatgaa

SEQ ID NO: 2054 - DNA, 20 bp, Artificial sequence
  SiRNA target sequence
tcttacattgaagaatgaat

SEQ ID NO: 2055 - DNA, 20 bp, Artificial sequence
  SiRNA target sequence
cttacattgaagaatgaata

SEQ ID NO: 2056 - DNA, 20 bp, Artificial sequence
  SiRNA target sequence
ttacattgaagaatgaatat

SEQ ID NO: 2057 - DNA, 20 bp, Artificial sequence
  SiRNA target sequence
tacattgaagaatgaatata

SEQ ID NO: 2058 - DNA, 20 bp, Artificial sequence
  SiRNA target sequence
acattgaagaatgaatatat

SEQ ID NO: 2059 - DNA, 20 bp, Artificial sequence
  SiRNA target sequence
cattgaagaatgaatatatt

SEQ ID NO: 2060 - DNA, 20 bp, Artificial sequence
  SiRNA target sequence
attgaagaatgaatatattt

SEQ ID NO: 2061 - DNA, 20 bp, Artificial sequence
  SiRNA target sequence
ttgaagaatgaatatatttc

SEQ ID NO: 2062 - DNA, 20 bp, Artificial sequence
  SiRNA target sequence
tgaagaatgaatatatttca

SEQ ID NO: 2063 - DNA, 20 bp, Artificial sequence
  SiRNA target sequence
gaagaatgaatatatttcat

SEQ ID NO: 2064 - DNA, 20 bp, Artificial sequence
  SiRNA target sequence
aagaatgaatatatttcatc

SEQ ID NO: 2065 - DNA, 20 bp, Artificial sequence
  SiRNA target sequence
agaatgaatatatttcatct

SEQ ID NO: 2066 - DNA, 20 bp, Artificial sequence
  SiRNA target sequence
gaatgaatatatttcatctt

SEQ ID NO: 2067 - DNA, 20 bp, Artificial sequence
  SiRNA target sequence
aatgaatatatttcatcttc

SEQ ID NO: 2068 - DNA, 20 bp, Artificial sequence
  SiRNA target sequence
atgaatatatttcatcttca

SEQ ID NO: 2069 - DNA, 20 bp, Artificial sequence
  SiRNA target sequence
tgaatatatttcatcttcat

SEQ ID NO: 2070 - DNA, 20 bp, Artificial sequence
  SiRNA target sequence
gaatatatttcatcttcatt

SEQ ID NO: 2071 - DNA, 20 bp, Artificial sequence
  SiRNA target sequence
aatatatttcatcttcattg

SEQ ID NO: 2072 - DNA, 20 bp, Artificial sequence
  SiRNA target sequence
atatatttcatcttcattgc

SEQ ID NO: 2073 - DNA, 20 bp, Artificial sequence
  SiRNA target sequence
tatatttcatcttcattgcc

SEQ ID NO: 2074 - DNA, 20 bp, Artificial sequence
  SiRNA target sequence
atatttcatcttcattgcct

SEQ ID NO: 2075 - DNA, 20 bp, Artificial sequence
  SiRNA target sequence
tatttcatcttcattgcctt

SEQ ID NO: 2076 - DNA, 20 bp, Artificial sequence
  SiRNA target sequence
atttcatcttcattgccttt

SEQ ID NO: 2077 - DNA, 20 bp, Artificial sequence
  SiRNA target sequence
tttcatcttcattgccttta

SEQ ID NO: 2078 - DNA, 20 bp, Artificial sequence
  SiRNA target sequence
ttcatcttcattgcctttag

SEQ ID NO: 2079 - DNA, 20 bp, Artificial sequence
  SiRNA target sequence
tcatcttcattgcctttaga

SEQ ID NO: 2080 - DNA, 20 bp, Artificial sequence
  SiRNA target sequence
catcttcattgcctttagat

SEQ ID NO: 2081 - DNA, 20 bp, Artificial sequence
  SiRNA target sequence
atcttcattgcctttagatg

SEQ ID NO: 2082 - DNA, 20 bp, Artificial sequence
  SiRNA target sequence
tcttcattgcctttagatga

SEQ ID NO: 2083 - DNA, 20 bp, Artificial sequence
  SiRNA target sequence
cttcattgcctttagatgac

SEQ ID NO: 2084 - DNA, 20 bp, Artificial sequence
  SiRNA target sequence
ttcattgcctttagatgacg

SEQ ID NO: 2085 - DNA, 20 bp, Artificial sequence
  SiRNA target sequence
tcattgcctttagatgacga

SEQ ID NO: 2086 - DNA, 20 bp, Artificial sequence
  SiRNA target sequence
cattgcctttagatgacgag

SEQ ID NO: 2087 - DNA, 20 bp, Artificial sequence
  SiRNA target sequence
attgcctttagatgacgaga

SEQ ID NO: 2088 - DNA, 20 bp, Artificial sequence
  SiRNA target sequence
ttgcctttagatgacgagat

SEQ ID NO: 2089 - DNA, 20 bp, Artificial sequence
  SiRNA target sequence
tgcctttagatgacgagatt

SEQ ID NO: 2090 - DNA, 20 bp, Artificial sequence
  SiRNA target sequence
gcctttagatgacgagatta

SEQ ID NO: 2091 - DNA, 20 bp, Artificial sequence
  SiRNA target sequence
cctttagatgacgagattac

SEQ ID NO: 2092 - DNA, 20 bp, Artificial sequence
  SiRNA target sequence
ctttagatgacgagattact

SEQ ID NO: 2093 - DNA, 20 bp, Artificial sequence
  SiRNA target sequence
tttagatgacgagattacta

SEQ ID NO: 2094 - DNA, 20 bp, Artificial sequence
  SiRNA target sequence
ttagatgacgagattactac

SEQ ID NO: 2095 - DNA, 20 bp, Artificial sequence
  SiRNA target sequence
tagatgacgagattactacg

SEQ ID NO: 2096 - DNA, 20 bp, Artificial sequence
  SiRNA target sequence
agatgacgagattactacgc

SEQ ID NO: 2097 - DNA, 20 bp, Artificial sequence
  SiRNA target sequence
gatgacgagattactacgct

SEQ ID NO: 2098 - DNA, 20 bp, Artificial sequence
  SiRNA target sequence
atgacgagattactacgctt

SEQ ID NO: 2099 - DNA, 20 bp, Artificial sequence
  SiRNA target sequence
tgacgagattactacgcttt

SEQ ID NO: 2100 - DNA, 20 bp, Artificial sequence
  SiRNA target sequence
gacgagattactacgcttta

SEQ ID NO: 2101 - DNA, 20 bp, Artificial sequence
  SiRNA target sequence
acgagattactacgctttac

SEQ ID NO: 2102 - DNA, 20 bp, Artificial sequence
  SiRNA target sequence
cgagattactacgctttact

SEQ ID NO: 2103 - DNA, 20 bp, Artificial sequence
  SiRNA target sequence
gagattactacgctttactt

SEQ ID NO: 2104 - DNA, 20 bp, Artificial sequence
  SiRNA target sequence
agattactacgctttacttg

SEQ ID NO: 2105 - DNA, 20 bp, Artificial sequence
  SiRNA target sequence
gattactacgctttacttgt

SEQ ID NO: 2106 - DNA, 20 bp, Artificial sequence
  SiRNA target sequence
attactacgctttacttgta

SEQ ID NO: 2107 - DNA, 20 bp, Artificial sequence
  SiRNA target sequence
ttactacgctttacttgtat

SEQ ID NO: 2108 - DNA, 20 bp, Artificial sequence
  SiRNA target sequence
tactacgctttacttgtatt

SEQ ID NO: 2109 - DNA, 20 bp, Artificial sequence
  SiRNA target sequence
actacgctttacttgtattc

SEQ ID NO: 2110 - DNA, 20 bp, Artificial sequence
  SiRNA target sequence
ctacgctttacttgtattct

SEQ ID NO: 2111 - DNA, 20 bp, Artificial sequence
  SiRNA target sequence
tacgctttacttgtattcta

SEQ ID NO: 2112 - DNA, 20 bp, Artificial sequence
  SiRNA target sequence
acgctttacttgtattctaa

SEQ ID NO: 2113 - DNA, 20 bp, Artificial sequence
  SiRNA target sequence
cgctttacttgtattctaag

SEQ ID NO: 2114 - DNA, 20 bp, Artificial sequence
  SiRNA target sequence
gctttacttgtattctaaga

SEQ ID NO: 2115 - DNA, 20 bp, Artificial sequence
  SiRNA target sequence
ctttacttgtattctaagat

SEQ ID NO: 2116 - DNA, 20 bp, Artificial sequence
  SiRNA target sequence
tttacttgtattctaagatt

SEQ ID NO: 2117 - DNA, 20 bp, Artificial sequence
  SiRNA target sequence
ttacttgtattctaagattt

SEQ ID NO: 2118 - DNA, 20 bp, Artificial sequence
  SiRNA target sequence
tacttgtattctaagatttt

SEQ ID NO: 2119 - DNA, 20 bp, Artificial sequence
  SiRNA target sequence
acttgtattctaagattttt

SEQ ID NO: 2120 - DNA, 20 bp, Artificial sequence
  SiRNA target sequence
cttgtattctaagattttta

SEQ ID NO: 2121 - DNA, 20 bp, Artificial sequence
  SiRNA target sequence
ttgtattctaagatttttaa

SEQ ID NO: 2122 - DNA, 20 bp, Artificial sequence
  SiRNA target sequence
tgtattctaagatttttaaa

SEQ ID NO: 2123 - DNA, 20 bp, Artificial sequence
  SiRNA target sequence
gtattctaagatttttaaag

SEQ ID NO: 2124 - DNA, 20 bp, Artificial sequence
  SiRNA target sequence
tattctaagatttttaaaga

SEQ ID NO: 2125 - DNA, 20 bp, Artificial sequence
  SiRNA target sequence
attctaagatttttaaagat

SEQ ID NO: 2126 - DNA, 20 bp, Artificial sequence
  SiRNA target sequence
ttctaagatttttaaagata

SEQ ID NO: 2127 - DNA, 20 bp, Artificial sequence
  SiRNA target sequence
tctaagatttttaaagataa

SEQ ID NO: 2128 - DNA, 20 bp, Artificial sequence
  SiRNA target sequence
ctaagatttttaaagataaa

SEQ ID NO: 2129 - DNA, 20 bp, Artificial sequence
  SiRNA target sequence
taagatttttaaagataaat

SEQ ID NO: 2130 - DNA, 20 bp, Artificial sequence
  SiRNA target sequence
aagatttttaaagataaatc

SEQ ID NO: 2131 - DNA, 20 bp, Artificial sequence
  SiRNA target sequence
agatttttaaagataaatct

SEQ ID NO: 2132 - DNA, 20 bp, Artificial sequence
  SiRNA target sequence
gatttttaaagataaatctg

SEQ ID NO: 2133 - DNA, 20 bp, Artificial sequence
  SiRNA target sequence
atttttaaagataaatctga

SEQ ID NO: 2134 - DNA, 20 bp, Artificial sequence
  SiRNA target sequence
tttttaaagataaatctgat

SEQ ID NO: 2135 - DNA, 20 bp, Artificial sequence
  SiRNA target sequence
ttttaaagataaatctgata

SEQ ID NO: 2136 - DNA, 20 bp, Artificial sequence
  SiRNA target sequence
tttaaagataaatctgatac

SEQ ID NO: 2137 - DNA, 20 bp, Artificial sequence
  SiRNA target sequence
ttaaagataaatctgatact

SEQ ID NO: 2138 - DNA, 20 bp, Artificial sequence
  SiRNA target sequence
taaagataaatctgatactt

SEQ ID NO: 2139 - DNA, 20 bp, Artificial sequence
  SiRNA target sequence
aaagataaatctgatactta

SEQ ID NO: 2140 - DNA, 20 bp, Artificial sequence
  SiRNA target sequence
aagataaatctgatacttac

SEQ ID NO: 2141 - DNA, 20 bp, Artificial sequence
  SiRNA target sequence
agataaatctgatacttacc

SEQ ID NO: 2142 - DNA, 20 bp, Artificial sequence
  SiRNA target sequence
gataaatctgatacttacct

SEQ ID NO: 2143 - DNA, 20 bp, Artificial sequence
  SiRNA target sequence
ataaatctgatacttacctt

SEQ ID NO: 2144 - DNA, 20 bp, Artificial sequence
  SiRNA target sequence
taaatctgatacttacctta

SEQ ID NO: 2145 - DNA, 20 bp, Artificial sequence
  SiRNA target sequence
aaatctgatacttaccttaa

SEQ ID NO: 2146 - DNA, 20 bp, Artificial sequence
  SiRNA target sequence
aatctgatacttaccttaaa

SEQ ID NO: 2147 - DNA, 20 bp, Artificial sequence
  SiRNA target sequence
atctgatacttaccttaaat

SEQ ID NO: 2148 - DNA, 20 bp, Artificial sequence
  SiRNA target sequence
tctgatacttaccttaaatc

SEQ ID NO: 2149 - DNA, 20 bp, Artificial sequence
  SiRNA target sequence
ctgatacttaccttaaatct

SEQ ID NO: 2150 - DNA, 20 bp, Artificial sequence
  SiRNA target sequence
tgatacttaccttaaatctg

SEQ ID NO: 2151 - DNA, 20 bp, Artificial sequence
  SiRNA target sequence
gatacttaccttaaatctgc

SEQ ID NO: 2152 - DNA, 20 bp, Artificial sequence
  SiRNA target sequence
atacttaccttaaatctgct

SEQ ID NO: 2153 - DNA, 20 bp, Artificial sequence
  SiRNA target sequence
tacttaccttaaatctgcta

SEQ ID NO: 2154 - DNA, 20 bp, Artificial sequence
  SiRNA target sequence
acttaccttaaatctgctat

SEQ ID NO: 2155 - DNA, 20 bp, Artificial sequence
  SiRNA target sequence
cttaccttaaatctgctata

SEQ ID NO: 2156 - DNA, 20 bp, Artificial sequence
  SiRNA target sequence
ttaccttaaatctgctatag

SEQ ID NO: 2157 - DNA, 20 bp, Artificial sequence
  SiRNA target sequence
taccttaaatctgctataga

SEQ ID NO: 2158 - DNA, 20 bp, Artificial sequence
  SiRNA target sequence
accttaaatctgctatagat

SEQ ID NO: 2159 - DNA, 20 bp, Artificial sequence
  SiRNA target sequence
ccttaaatctgctatagata

SEQ ID NO: 2160 - DNA, 20 bp, Artificial sequence
  SiRNA target sequence
cttaaatctgctatagataa

SEQ ID NO: 2161 - DNA, 20 bp, Artificial sequence
  SiRNA target sequence
ttaaatctgctatagataaa

SEQ ID NO: 2162 - DNA, 20 bp, Artificial sequence
  SiRNA target sequence
taaatctgctatagataaat

SEQ ID NO: 2163 - DNA, 20 bp, Artificial sequence
  SiRNA target sequence
aaatctgctatagataaatc

SEQ ID NO: 2164 - DNA, 20 bp, Artificial sequence
  SiRNA target sequence
aatctgctatagataaatca

SEQ ID NO: 2165 - DNA, 20 bp, Artificial sequence
  SiRNA target sequence
atctgctatagataaatcag

SEQ ID NO: 2166 - DNA, 20 bp, Artificial sequence
  SiRNA target sequence
tctgctatagataaatcagt

SEQ ID NO: 2167 - DNA, 20 bp, Artificial sequence
  SiRNA target sequence
ctgctatagataaatcagta

SEQ ID NO: 2168 - DNA, 20 bp, Artificial sequence
  SiRNA target sequence
tgctatagataaatcagtag

SEQ ID NO: 2169 - DNA, 20 bp, Artificial sequence
  SiRNA target sequence
gctatagataaatcagtaga

SEQ ID NO: 2170 - DNA, 20 bp, Artificial sequence
  SiRNA target sequence
ctatagataaatcagtagat

SEQ ID NO: 2171 - DNA, 20 bp, Artificial sequence
  SiRNA target sequence
tatagataaatcagtagatc

SEQ ID NO: 2172 - DNA, 20 bp, Artificial sequence
  SiRNA target sequence
atagataaatcagtagatct

SEQ ID NO: 2173 - DNA, 20 bp, Artificial sequence
  SiRNA target sequence
tagataaatcagtagatcta

SEQ ID NO: 2174 - DNA, 20 bp, Artificial sequence
  SiRNA target sequence
agataaatcagtagatctac

SEQ ID NO: 2175 - DNA, 20 bp, Artificial sequence
  SiRNA target sequence
gataaatcagtagatctacc

SEQ ID NO: 2176 - DNA, 20 bp, Artificial sequence
  SiRNA target sequence
ataaatcagtagatctacct

SEQ ID NO: 2177 - DNA, 20 bp, Artificial sequence
  SiRNA target sequence
taaatcagtagatctaccta

SEQ ID NO: 2178 - DNA, 20 bp, Artificial sequence
  SiRNA target sequence
aaatcagtagatctacctat

SEQ ID NO: 2179 - DNA, 20 bp, Artificial sequence
  SiRNA target sequence
aatcagtagatctacctatt

SEQ ID NO: 2180 - DNA, 20 bp, Artificial sequence
  SiRNA target sequence
atcagtagatctacctattg

SEQ ID NO: 2181 - DNA, 20 bp, Artificial sequence
  SiRNA target sequence
tcagtagatctacctattga

SEQ ID NO: 2182 - DNA, 20 bp, Artificial sequence
  SiRNA target sequence
cagtagatctacctattgaa

SEQ ID NO: 2183 - DNA, 20 bp, Artificial sequence
  SiRNA target sequence
agtagatctacctattgaac

SEQ ID NO: 2184 - DNA, 20 bp, Artificial sequence
  SiRNA target sequence
gtagatctacctattgaaca

SEQ ID NO: 2185 - DNA, 20 bp, Artificial sequence
  SiRNA target sequence
tagatctacctattgaacag

SEQ ID NO: 2186 - DNA, 20 bp, Artificial sequence
  SiRNA target sequence
agatctacctattgaacaga

SEQ ID NO: 2187 - DNA, 20 bp, Artificial sequence
  SiRNA target sequence
gatctacctattgaacagaa

SEQ ID NO: 2188 - DNA, 20 bp, Artificial sequence
  SiRNA target sequence
atctacctattgaacagaaa

SEQ ID NO: 2189 - DNA, 20 bp, Artificial sequence
  SiRNA target sequence
tctacctattgaacagaaag

SEQ ID NO: 2190 - DNA, 20 bp, Artificial sequence
  SiRNA target sequence
ctacctattgaacagaaaga

SEQ ID NO: 2191 - DNA, 20 bp, Artificial sequence
  SiRNA target sequence
tacctattgaacagaaagac

SEQ ID NO: 2192 - DNA, 20 bp, Artificial sequence
  SiRNA target sequence
acctattgaacagaaagact

SEQ ID NO: 2193 - DNA, 20 bp, Artificial sequence
  SiRNA target sequence
cctattgaacagaaagactt

SEQ ID NO: 2194 - DNA, 20 bp, Artificial sequence
  SiRNA target sequence
ctattgaacagaaagacttt

SEQ ID NO: 2195 - DNA, 20 bp, Artificial sequence
  SiRNA target sequence
tattgaacagaaagactttc

SEQ ID NO: 2196 - DNA, 20 bp, Artificial sequence
  SiRNA target sequence
attgaacagaaagactttct

SEQ ID NO: 2197 - DNA, 20 bp, Artificial sequence
  SiRNA target sequence
ttgaacagaaagactttctg

SEQ ID NO: 2198 - DNA, 20 bp, Artificial sequence
  SiRNA target sequence
tgaacagaaagactttctgt

SEQ ID NO: 2199 - DNA, 20 bp, Artificial sequence
  SiRNA target sequence
gaacagaaagactttctgta

SEQ ID NO: 2200 - DNA, 20 bp, Artificial sequence
  SiRNA target sequence
aacagaaagactttctgtac

SEQ ID NO: 2201 - DNA, 20 bp, Artificial sequence
  SiRNA target sequence
acagaaagactttctgtacg

SEQ ID NO: 2202 - DNA, 20 bp, Artificial sequence
  SiRNA target sequence
cagaaagactttctgtacgt

SEQ ID NO: 2203 - DNA, 20 bp, Artificial sequence
  SiRNA target sequence
agaaagactttctgtacgta

SEQ ID NO: 2204 - DNA, 20 bp, Artificial sequence
  SiRNA target sequence
gaaagactttctgtacgtag

SEQ ID NO: 2205 - DNA, 20 bp, Artificial sequence
  SiRNA target sequence
aaagactttctgtacgtaga

SEQ ID NO: 2206 - DNA, 20 bp, Artificial sequence
  SiRNA target sequence
aagactttctgtacgtagat

SEQ ID NO: 2207 - DNA, 20 bp, Artificial sequence
  SiRNA target sequence
agactttctgtacgtagatc

SEQ ID NO: 2208 - DNA, 20 bp, Artificial sequence
  SiRNA target sequence
gactttctgtacgtagatct

SEQ ID NO: 2209 - DNA, 20 bp, Artificial sequence
  SiRNA target sequence
actttctgtacgtagatctt

SEQ ID NO: 2210 - DNA, 20 bp, Artificial sequence
  SiRNA target sequence
ctttctgtacgtagatcttc

SEQ ID NO: 2211 - DNA, 20 bp, Artificial sequence
  SiRNA target sequence
tttctgtacgtagatcttct

SEQ ID NO: 2212 - DNA, 20 bp, Artificial sequence
  SiRNA target sequence
ttctgtacgtagatcttctt

SEQ ID NO: 2213 - DNA, 20 bp, Artificial sequence
  SiRNA target sequence
tctgtacgtagatcttcttg

SEQ ID NO: 2214 - DNA, 20 bp, Artificial sequence
  SiRNA target sequence
ctgtacgtagatcttcttgt

SEQ ID NO: 2215 - DNA, 20 bp, Artificial sequence
  SiRNA target sequence
tgtacgtagatcttcttgta

SEQ ID NO: 2216 - DNA, 20 bp, Artificial sequence
  SiRNA target sequence
gtacgtagatcttcttgtat

SEQ ID NO: 2217 - DNA, 20 bp, Artificial sequence
  SiRNA target sequence
tacgtagatcttcttgtatt

SEQ ID NO: 2218 - DNA, 20 bp, Artificial sequence
  SiRNA target sequence
acgtagatcttcttgtattt

SEQ ID NO: 2219 - DNA, 20 bp, Artificial sequence
  SiRNA target sequence
cgtagatcttcttgtatttt

SEQ ID NO: 2220 - DNA, 20 bp, Artificial sequence
  SiRNA target sequence
gtagatcttcttgtatttta

SEQ ID NO: 2221 - DNA, 20 bp, Artificial sequence
  SiRNA target sequence
tagatcttcttgtattttac

SEQ ID NO: 2222 - DNA, 20 bp, Artificial sequence
  SiRNA target sequence
agatcttcttgtattttaca

SEQ ID NO: 2223 - DNA, 20 bp, Artificial sequence
  SiRNA target sequence
gatcttcttgtattttacat

SEQ ID NO: 2224 - DNA, 20 bp, Artificial sequence
  SiRNA target sequence
atcttcttgtattttacatt

SEQ ID NO: 2225 - DNA, 20 bp, Artificial sequence
  SiRNA target sequence
tcttcttgtattttacattt

SEQ ID NO: 2226 - DNA, 20 bp, Artificial sequence
  SiRNA target sequence
cttcttgtattttacatttc

SEQ ID NO: 2227 - DNA, 20 bp, Artificial sequence
  SiRNA target sequence
ttcttgtattttacatttct

SEQ ID NO: 2228 - DNA, 20 bp, Artificial sequence
  SiRNA target sequence
tcttgtattttacatttcta

SEQ ID NO: 2229 - DNA, 20 bp, Artificial sequence
  SiRNA target sequence
cttgtattttacatttctaa

SEQ ID NO: 2230 - DNA, 20 bp, Artificial sequence
  SiRNA target sequence
ttgtattttacatttctaaa

SEQ ID NO: 2231 - DNA, 20 bp, Artificial sequence
  SiRNA target sequence
tgtattttacatttctaaaa

SEQ ID NO: 2232 - DNA, 20 bp, Artificial sequence
  SiRNA target sequence
gtattttacatttctaaaaa

SEQ ID NO: 2233 - DNA, 20 bp, Artificial sequence
  SiRNA target sequence
tattttacatttctaaaaag

SEQ ID NO: 2234 - DNA, 20 bp, Artificial sequence
  SiRNA target sequence
attttacatttctaaaaagg

SEQ ID NO: 2235 - DNA, 20 bp, Artificial sequence
  SiRNA target sequence
ttttacatttctaaaaagga

SEQ ID NO: 2236 - DNA, 20 bp, Artificial sequence
  SiRNA target sequence
tttacatttctaaaaaggat

SEQ ID NO: 2237 - DNA, 20 bp, Artificial sequence
  SiRNA target sequence
ttacatttctaaaaaggatg

SEQ ID NO: 2238 - DNA, 20 bp, Artificial sequence
  SiRNA target sequence
tacatttctaaaaaggatgt

SEQ ID NO: 2239 - DNA, 20 bp, Artificial sequence
  SiRNA target sequence
acatttctaaaaaggatgtt

SEQ ID NO: 2240 - DNA, 20 bp, Artificial sequence
  SiRNA target sequence
catttctaaaaaggatgttg

SEQ ID NO: 2241 - DNA, 20 bp, Artificial sequence
  SiRNA target sequence
atttctaaaaaggatgttga

SEQ ID NO: 2242 - DNA, 20 bp, Artificial sequence
  SiRNA target sequence
tttctaaaaaggatgttgaa

SEQ ID NO: 2243 - DNA, 20 bp, Artificial sequence
  SiRNA target sequence
ttctaaaaaggatgttgaaa

SEQ ID NO: 2244 - DNA, 20 bp, Artificial sequence
  SiRNA target sequence
tctaaaaaggatgttgaaaa

SEQ ID NO: 2245 - DNA, 20 bp, Artificial sequence
  SiRNA target sequence
ctaaaaaggatgttgaaaaa

SEQ ID NO: 2246 - DNA, 20 bp, Artificial sequence
  SiRNA target sequence
taaaaaggatgttgaaaaag

SEQ ID NO: 2247 - DNA, 20 bp, Artificial sequence
  SiRNA target sequence
aaaaaggatgttgaaaaagt

SEQ ID NO: 2248 - DNA, 20 bp, Artificial sequence
  SiRNA target sequence
aaaaggatgttgaaaaagtt

SEQ ID NO: 2249 - DNA, 20 bp, Artificial sequence
  SiRNA target sequence
aaaggatgttgaaaaagtta

SEQ ID NO: 2250 - DNA, 20 bp, Artificial sequence
  SiRNA target sequence
aaggatgttgaaaaagttaa

SEQ ID NO: 2251 - DNA, 20 bp, Artificial sequence
  SiRNA target sequence
aggatgttgaaaaagttaat

SEQ ID NO: 2252 - DNA, 20 bp, Artificial sequence
  SiRNA target sequence
ggatgttgaaaaagttaatg

SEQ ID NO: 2253 - DNA, 20 bp, Artificial sequence
  SiRNA target sequence
gatgttgaaaaagttaatga

SEQ ID NO: 2254 - DNA, 20 bp, Artificial sequence
  SiRNA target sequence
atgttgaaaaagttaatgaa

SEQ ID NO: 2255 - DNA, 20 bp, Artificial sequence
  SiRNA target sequence
tgttgaaaaagttaatgaaa

SEQ ID NO: 2256 - DNA, 20 bp, Artificial sequence
  SiRNA target sequence
gttgaaaaagttaatgaaac

SEQ ID NO: 2257 - DNA, 20 bp, Artificial sequence
  SiRNA target sequence
ttgaaaaagttaatgaaaca

SEQ ID NO: 2258 - DNA, 20 bp, Artificial sequence
  SiRNA target sequence
tgaaaaagttaatgaaacaa

SEQ ID NO: 2259 - DNA, 20 bp, Artificial sequence
  SiRNA target sequence
gaaaaagttaatgaaacaat

SEQ ID NO: 2260 - DNA, 20 bp, Artificial sequence
  SiRNA target sequence
aaaaagttaatgaaacaatt

SEQ ID NO: 2261 - DNA, 20 bp, Artificial sequence
  SiRNA target sequence
aaaagttaatgaaacaatta

SEQ ID NO: 2262 - DNA, 20 bp, Artificial sequence
  SiRNA target sequence
aaagttaatgaaacaattaa

SEQ ID NO: 2263 - DNA, 20 bp, Artificial sequence
  SiRNA target sequence
aagttaatgaaacaattaat

SEQ ID NO: 2264 - DNA, 20 bp, Artificial sequence
  SiRNA target sequence
agttaatgaaacaattaata

SEQ ID NO: 2265 - DNA, 20 bp, Artificial sequence
  SiRNA target sequence
gttaatgaaacaattaataa

SEQ ID NO: 2266 - DNA, 20 bp, Artificial sequence
  SiRNA target sequence
ttaatgaaacaattaataat

SEQ ID NO: 2267 - DNA, 20 bp, Artificial sequence
  SiRNA target sequence
taatgaaacaattaataatt

SEQ ID NO: 2268 - DNA, 20 bp, Artificial sequence
  SiRNA target sequence
aatgaaacaattaataattt

SEQ ID NO: 2269 - DNA, 20 bp, Artificial sequence
  SiRNA target sequence
atgaaacaattaataattta

SEQ ID NO: 2270 - DNA, 20 bp, Artificial sequence
  SiRNA target sequence
tgaaacaattaataatttaa

SEQ ID NO: 2271 - DNA, 20 bp, Artificial sequence
  SiRNA target sequence
gaaacaattaataatttaaa

SEQ ID NO: 2272 - DNA, 20 bp, Artificial sequence
  SiRNA target sequence
aaacaattaataatttaaaa

SEQ ID NO: 2273 - DNA, 20 bp, Artificial sequence
  SiRNA target sequence
aacaattaataatttaaaag

SEQ ID NO: 2274 - DNA, 20 bp, Artificial sequence
  SiRNA target sequence
acaattaataatttaaaaga

SEQ ID NO: 2275 - DNA, 20 bp, Artificial sequence
  SiRNA target sequence
caattaataatttaaaagag

SEQ ID NO: 2276 - DNA, 20 bp, Artificial sequence
  SiRNA target sequence
aattaataatttaaaagaga

SEQ ID NO: 2277 - DNA, 20 bp, Artificial sequence
  SiRNA target sequence
attaataatttaaaagagac

SEQ ID NO: 2278 - DNA, 20 bp, Artificial sequence
  SiRNA target sequence
ttaataatttaaaagagact

SEQ ID NO: 2279 - DNA, 20 bp, Artificial sequence
  SiRNA target sequence
taataatttaaaagagactc

SEQ ID NO: 2280 - DNA, 20 bp, Artificial sequence
  SiRNA target sequence
aataatttaaaagagactct

SEQ ID NO: 2281 - DNA, 20 bp, Artificial sequence
  SiRNA target sequence
ataatttaaaagagactctt

SEQ ID NO: 2282 - DNA, 20 bp, Artificial sequence
  SiRNA target sequence
taatttaaaagagactctta

SEQ ID NO: 2283 - DNA, 20 bp, Artificial sequence
  SiRNA target sequence
aatttaaaagagactcttac

SEQ ID NO: 2284 - DNA, 20 bp, Artificial sequence
  SiRNA target sequence
atttaaaagagactcttacc

SEQ ID NO: 2285 - DNA, 20 bp, Artificial sequence
  SiRNA target sequence
tttaaaagagactcttaccc

SEQ ID NO: 2286 - DNA, 20 bp, Artificial sequence
  SiRNA target sequence
ttaaaagagactcttacccc

SEQ ID NO: 2287 - DNA, 20 bp, Artificial sequence
  SiRNA target sequence
taaaagagactcttaccccc

SEQ ID NO: 2288 - DNA, 20 bp, Artificial sequence
  SiRNA target sequence
aaaagagactcttaccccca

SEQ ID NO: 2289 - DNA, 20 bp, Artificial sequence
  SiRNA target sequence
aaagagactcttacccccac

SEQ ID NO: 2290 - DNA, 20 bp, Artificial sequence
  SiRNA target sequence
aagagactcttacccccact

SEQ ID NO: 2291 - DNA, 20 bp, Artificial sequence
  SiRNA target sequence
agagactcttacccccactt

SEQ ID NO: 2292 - DNA, 20 bp, Artificial sequence
  SiRNA target sequence
gagactcttacccccacttt

SEQ ID NO: 2293 - DNA, 20 bp, Artificial sequence
  SiRNA target sequence
agactcttacccccacttta

SEQ ID NO: 2294 - DNA, 20 bp, Artificial sequence
  SiRNA target sequence
gactcttacccccactttat

SEQ ID NO: 2295 - DNA, 20 bp, Artificial sequence
  SiRNA target sequence
actcttacccccactttatt

SEQ ID NO: 2296 - DNA, 20 bp, Artificial sequence
  SiRNA target sequence
ctcttacccccactttattg

SEQ ID NO: 2297 - DNA, 20 bp, Artificial sequence
  SiRNA target sequence
tcttacccccactttattgg

SEQ ID NO: 2298 - DNA, 20 bp, Artificial sequence
  SiRNA target sequence
cttacccccactttattgga

SEQ ID NO: 2299 - DNA, 20 bp, Artificial sequence
  SiRNA target sequence
ttacccccactttattggaa

SEQ ID NO: 2300 - DNA, 20 bp, Artificial sequence
  SiRNA target sequence
tacccccactttattggaac

SEQ ID NO: 2301 - DNA, 20 bp, Artificial sequence
  SiRNA target sequence
acccccactttattggaact

SEQ ID NO: 2302 - DNA, 20 bp, Artificial sequence
  SiRNA target sequence
cccccactttattggaactt

SEQ ID NO: 2303 - DNA, 20 bp, Artificial sequence
  SiRNA target sequence
ccccactttattggaactta

SEQ ID NO: 2304 - DNA, 20 bp, Artificial sequence
  SiRNA target sequence
cccactttattggaacttat

SEQ ID NO: 2305 - DNA, 20 bp, Artificial sequence
  SiRNA target sequence
ccactttattggaacttatt

SEQ ID NO: 2306 - DNA, 20 bp, Artificial sequence
  SiRNA target sequence
cactttattggaacttattg

SEQ ID NO: 2307 - DNA, 20 bp, Artificial sequence
  SiRNA target sequence
actttattggaacttattgg

SEQ ID NO: 2308 - DNA, 20 bp, Artificial sequence
  SiRNA target sequence
ctttattggaacttattgga

SEQ ID NO: 2309 - DNA, 20 bp, Artificial sequence
  SiRNA target sequence
tttattggaacttattggag

SEQ ID NO: 2310 - DNA, 20 bp, Artificial sequence
  SiRNA target sequence
ttattggaacttattggaga

SEQ ID NO: 2311 - DNA, 20 bp, Artificial sequence
  SiRNA target sequence
tattggaacttattggagaa

SEQ ID NO: 2312 - DNA, 20 bp, Artificial sequence
  SiRNA target sequence
attggaacttattggagaat

SEQ ID NO: 2313 - DNA, 20 bp, Artificial sequence
  SiRNA target sequence
ttggaacttattggagaata

SEQ ID NO: 2314 - DNA, 20 bp, Artificial sequence
  SiRNA target sequence
tggaacttattggagaatat

SEQ ID NO: 2315 - DNA, 20 bp, Artificial sequence
  SiRNA target sequence
ggaacttattggagaatatt

SEQ ID NO: 2316 - DNA, 20 bp, Artificial sequence
  SiRNA target sequence
gaacttattggagaatatta

SEQ ID NO: 2317 - DNA, 20 bp, Artificial sequence
  SiRNA target sequence
aacttattggagaatattat

SEQ ID NO: 2318 - DNA, 20 bp, Artificial sequence
  SiRNA target sequence
acttattggagaatattatt

SEQ ID NO: 2319 - DNA, 20 bp, Artificial sequence
  SiRNA target sequence
cttattggagaatattattt

SEQ ID NO: 2320 - DNA, 20 bp, Artificial sequence
  SiRNA target sequence
ttattggagaatattattta

SEQ ID NO: 2321 - DNA, 20 bp, Artificial sequence
  SiRNA target sequence
tattggagaatattatttaa

SEQ ID NO: 2322 - DNA, 20 bp, Artificial sequence
  SiRNA target sequence
attggagaatattatttaaa

SEQ ID NO: 2323 - DNA, 20 bp, Artificial sequence
  SiRNA target sequence
ttggagaatattatttaaaa

SEQ ID NO: 2324 - DNA, 20 bp, Artificial sequence
  SiRNA target sequence
tggagaatattatttaaaaa

SEQ ID NO: 2325 - DNA, 20 bp, Artificial sequence
  SiRNA target sequence
ggagaatattatttaaaaag

SEQ ID NO: 2326 - DNA, 20 bp, Artificial sequence
  SiRNA target sequence
gagaatattatttaaaaagt

SEQ ID NO: 2327 - DNA, 20 bp, Artificial sequence
  SiRNA target sequence
agaatattatttaaaaagtg

SEQ ID NO: 2328 - DNA, 20 bp, Artificial sequence
  SiRNA target sequence
gaatattatttaaaaagtgg

SEQ ID NO: 2329 - DNA, 20 bp, Artificial sequence
  SiRNA target sequence
aatattatttaaaaagtgga

SEQ ID NO: 2330 - DNA, 20 bp, Artificial sequence
  SiRNA target sequence
atattatttaaaaagtggaa

SEQ ID NO: 2331 - DNA, 20 bp, Artificial sequence
  SiRNA target sequence
tattatttaaaaagtggaaa

SEQ ID NO: 2332 - DNA, 20 bp, Artificial sequence
  SiRNA target sequence
attatttaaaaagtggaaat

SEQ ID NO: 2333 - DNA, 20 bp, Artificial sequence
  SiRNA target sequence
ttatttaaaaagtggaaatc

SEQ ID NO: 2334 - DNA, 20 bp, Artificial sequence
  SiRNA target sequence
tatttaaaaagtggaaatca

SEQ ID NO: 2335 - DNA, 20 bp, Artificial sequence
  SiRNA target sequence
atttaaaaagtggaaatcac

SEQ ID NO: 2336 - DNA, 20 bp, Artificial sequence
  SiRNA target sequence
tttaaaaagtggaaatcact

SEQ ID NO: 2337 - DNA, 20 bp, Artificial sequence
  SiRNA target sequence
ttaaaaagtggaaatcactc

SEQ ID NO: 2338 - DNA, 20 bp, Artificial sequence
  SiRNA target sequence
taaaaagtggaaatcactct

SEQ ID NO: 2339 - DNA, 20 bp, Artificial sequence
  SiRNA target sequence
aaaaagtggaaatcactcta

SEQ ID NO: 2340 - DNA, 20 bp, Artificial sequence
  SiRNA target sequence
aaaagtggaaatcactctaa

SEQ ID NO: 2341 - DNA, 20 bp, Artificial sequence
  SiRNA target sequence
aaagtggaaatcactctaaa

SEQ ID NO: 2342 - DNA, 20 bp, Artificial sequence
  SiRNA target sequence
aagtggaaatcactctaaaa

SEQ ID NO: 2343 - DNA, 20 bp, Artificial sequence
  SiRNA target sequence
agtggaaatcactctaaaat

SEQ ID NO: 2344 - DNA, 20 bp, Artificial sequence
  SiRNA target sequence
gtggaaatcactctaaaatg

SEQ ID NO: 2345 - DNA, 20 bp, Artificial sequence
  SiRNA target sequence
tggaaatcactctaaaatgt

SEQ ID NO: 2346 - DNA, 20 bp, Artificial sequence
  SiRNA target sequence
ggaaatcactctaaaatgtt

SEQ ID NO: 2347 - DNA, 20 bp, Artificial sequence
  SiRNA target sequence
gaaatcactctaaaatgtta

SEQ ID NO: 2348 - DNA, 20 bp, Artificial sequence
  SiRNA target sequence
aaatcactctaaaatgttag

SEQ ID NO: 2349 - DNA, 20 bp, Artificial sequence
  SiRNA target sequence
aatcactctaaaatgttaga

SEQ ID NO: 2350 - DNA, 20 bp, Artificial sequence
  SiRNA target sequence
atcactctaaaatgttagat

SEQ ID NO: 2351 - DNA, 20 bp, Artificial sequence
  SiRNA target sequence
tcactctaaaatgttagatc

SEQ ID NO: 2352 - DNA, 20 bp, Artificial sequence
  SiRNA target sequence
cactctaaaatgttagatct

SEQ ID NO: 2353 - DNA, 20 bp, Artificial sequence
  SiRNA target sequence
actctaaaatgttagatcta

SEQ ID NO: 2354 - DNA, 20 bp, Artificial sequence
  SiRNA target sequence
ctctaaaatgttagatctat

SEQ ID NO: 2355 - DNA, 20 bp, Artificial sequence
  SiRNA target sequence
tctaaaatgttagatctatt

SEQ ID NO: 2356 - DNA, 20 bp, Artificial sequence
  SiRNA target sequence
ctaaaatgttagatctatta

SEQ ID NO: 2357 - DNA, 20 bp, Artificial sequence
  SiRNA target sequence
taaaatgttagatctattat

SEQ ID NO: 2358 - DNA, 20 bp, Artificial sequence
  SiRNA target sequence
aaaatgttagatctattatc

SEQ ID NO: 2359 - DNA, 20 bp, Artificial sequence
  SiRNA target sequence
aaatgttagatctattatct

SEQ ID NO: 2360 - DNA, 20 bp, Artificial sequence
  SiRNA target sequence
aatgttagatctattatcta

SEQ ID NO: 2361 - DNA, 20 bp, Artificial sequence
  SiRNA target sequence
atgttagatctattatctag

SEQ ID NO: 2362 - DNA, 20 bp, Artificial sequence
  SiRNA target sequence
tgttagatctattatctagt

SEQ ID NO: 2363 - DNA, 20 bp, Artificial sequence
  SiRNA target sequence
gttagatctattatctagtc

SEQ ID NO: 2364 - DNA, 20 bp, Artificial sequence
  SiRNA target sequence
ttagatctattatctagtca

SEQ ID NO: 2365 - DNA, 20 bp, Artificial sequence
  SiRNA target sequence
tagatctattatctagtcat

SEQ ID NO: 2366 - DNA, 20 bp, Artificial sequence
  SiRNA target sequence
agatctattatctagtcatc

SEQ ID NO: 2367 - DNA, 20 bp, Artificial sequence
  SiRNA target sequence
gatctattatctagtcatcc

SEQ ID NO: 2368 - DNA, 20 bp, Artificial sequence
  SiRNA target sequence
atctattatctagtcatcca

SEQ ID NO: 2369 - DNA, 20 bp, Artificial sequence
  SiRNA target sequence
tctattatctagtcatccag

SEQ ID NO: 2370 - DNA, 20 bp, Artificial sequence
  SiRNA target sequence
ctattatctagtcatccaga

SEQ ID NO: 2371 - DNA, 20 bp, Artificial sequence
  SiRNA target sequence
tattatctagtcatccagat

SEQ ID NO: 2372 - DNA, 20 bp, Artificial sequence
  SiRNA target sequence
attatctagtcatccagata

SEQ ID NO: 2373 - DNA, 20 bp, Artificial sequence
  SiRNA target sequence
ttatctagtcatccagatac

SEQ ID NO: 2374 - DNA, 20 bp, Artificial sequence
  SiRNA target sequence
tatctagtcatccagatact

SEQ ID NO: 2375 - DNA, 20 bp, Artificial sequence
  SiRNA target sequence
atctagtcatccagatactc

SEQ ID NO: 2376 - DNA, 20 bp, Artificial sequence
  SiRNA target sequence
tctagtcatccagatactcc

SEQ ID NO: 2377 - DNA, 20 bp, Artificial sequence
  SiRNA target sequence
ctagtcatccagatactcct

SEQ ID NO: 2378 - DNA, 20 bp, Artificial sequence
  SiRNA target sequence
tagtcatccagatactcctg

SEQ ID NO: 2379 - DNA, 20 bp, Artificial sequence
  SiRNA target sequence
agtcatccagatactcctgg

SEQ ID NO: 2380 - DNA, 20 bp, Artificial sequence
  SiRNA target sequence
gtcatccagatactcctggt

SEQ ID NO: 2381 - DNA, 20 bp, Artificial sequence
  SiRNA target sequence
tcatccagatactcctggta

SEQ ID NO: 2382 - DNA, 20 bp, Artificial sequence
  SiRNA target sequence
catccagatactcctggtaa

SEQ ID NO: 2383 - DNA, 20 bp, Artificial sequence
  SiRNA target sequence
atccagatactcctggtaaa

SEQ ID NO: 2384 - DNA, 20 bp, Artificial sequence
  SiRNA target sequence
tccagatactcctggtaaat

SEQ ID NO: 2385 - DNA, 20 bp, Artificial sequence
  SiRNA target sequence
ccagatactcctggtaaatt

SEQ ID NO: 2386 - DNA, 20 bp, Artificial sequence
  SiRNA target sequence
cagatactcctggtaaatta

SEQ ID NO: 2387 - DNA, 20 bp, Artificial sequence
  SiRNA target sequence
agatactcctggtaaattac

SEQ ID NO: 2388 - DNA, 20 bp, Artificial sequence
  SiRNA target sequence
gatactcctggtaaattact

SEQ ID NO: 2389 - DNA, 20 bp, Artificial sequence
  SiRNA target sequence
atactcctggtaaattactt

SEQ ID NO: 2390 - DNA, 20 bp, Artificial sequence
  SiRNA target sequence
tactcctggtaaattacttt

SEQ ID NO: 2391 - DNA, 20 bp, Artificial sequence
  SiRNA target sequence
actcctggtaaattactttt

SEQ ID NO: 2392 - DNA, 20 bp, Artificial sequence
  SiRNA target sequence
ctcctggtaaattactttta

SEQ ID NO: 2393 - DNA, 20 bp, Artificial sequence
  SiRNA target sequence
tcctggtaaattacttttaa

SEQ ID NO: 2394 - DNA, 20 bp, Artificial sequence
  SiRNA target sequence
cctggtaaattacttttaac

SEQ ID NO: 2395 - DNA, 20 bp, Artificial sequence
  SiRNA target sequence
ctggtaaattacttttaacg

SEQ ID NO: 2396 - DNA, 20 bp, Artificial sequence
  SiRNA target sequence
tggtaaattacttttaacgg

SEQ ID NO: 2397 - DNA, 20 bp, Artificial sequence
  SiRNA target sequence
ggtaaattacttttaacggc

SEQ ID NO: 2398 - DNA, 20 bp, Artificial sequence
  SiRNA target sequence
gtaaattacttttaacggca

SEQ ID NO: 2399 - DNA, 20 bp, Artificial sequence
  SiRNA target sequence
taaattacttttaacggcac

SEQ ID NO: 2400 - DNA, 20 bp, Artificial sequence
  SiRNA target sequence
aaattacttttaacggcact

SEQ ID NO: 2401 - DNA, 20 bp, Artificial sequence
  SiRNA target sequence
aattacttttaacggcactt

SEQ ID NO: 2402 - DNA, 20 bp, Artificial sequence
  SiRNA target sequence
attacttttaacggcacttt

SEQ ID NO: 2403 - DNA, 20 bp, Artificial sequence
  SiRNA target sequence
ttacttttaacggcacttta

SEQ ID NO: 2404 - DNA, 20 bp, Artificial sequence
  SiRNA target sequence
tacttttaacggcactttat

SEQ ID NO: 2405 - DNA, 20 bp, Artificial sequence
  SiRNA target sequence
acttttaacggcactttatg

SEQ ID NO: 2406 - DNA, 20 bp, Artificial sequence
  SiRNA target sequence
cttttaacggcactttatgc

SEQ ID NO: 2407 - DNA, 20 bp, Artificial sequence
  SiRNA target sequence
ttttaacggcactttatgca

SEQ ID NO: 2408 - DNA, 20 bp, Artificial sequence
  SiRNA target sequence
tttaacggcactttatgcaa

SEQ ID NO: 2409 - DNA, 20 bp, Artificial sequence
  SiRNA target sequence
ttaacggcactttatgcaat

SEQ ID NO: 2410 - DNA, 20 bp, Artificial sequence
  SiRNA target sequence
taacggcactttatgcaata

SEQ ID NO: 2411 - DNA, 20 bp, Artificial sequence
  SiRNA target sequence
aacggcactttatgcaataa

SEQ ID NO: 2412 - DNA, 20 bp, Artificial sequence
  SiRNA target sequence
acggcactttatgcaataag

SEQ ID NO: 2413 - DNA, 20 bp, Artificial sequence
  SiRNA target sequence
cggcactttatgcaataagt

SEQ ID NO: 2414 - DNA, 20 bp, Artificial sequence
  SiRNA target sequence
ggcactttatgcaataagta

SEQ ID NO: 2415 - DNA, 20 bp, Artificial sequence
  SiRNA target sequence
gcactttatgcaataagtat

SEQ ID NO: 2416 - DNA, 20 bp, Artificial sequence
  SiRNA target sequence
cactttatgcaataagtatt

SEQ ID NO: 2417 - DNA, 20 bp, Artificial sequence
  SiRNA target sequence
actttatgcaataagtattg

SEQ ID NO: 2418 - DNA, 20 bp, Artificial sequence
  SiRNA target sequence
ctttatgcaataagtattga

SEQ ID NO: 2419 - DNA, 20 bp, Artificial sequence
  SiRNA target sequence
tttatgcaataagtattgat

SEQ ID NO: 2420 - DNA, 20 bp, Artificial sequence
  SiRNA target sequence
ttatgcaataagtattgata

SEQ ID NO: 2421 - DNA, 20 bp, Artificial sequence
  SiRNA target sequence
tatgcaataagtattgataa

SEQ ID NO: 2422 - DNA, 20 bp, Artificial sequence
  SiRNA target sequence
atgcaataagtattgataag

SEQ ID NO: 2423 - DNA, 20 bp, Artificial sequence
  SiRNA target sequence
tgcaataagtattgataaga

SEQ ID NO: 2424 - DNA, 20 bp, Artificial sequence
  SiRNA target sequence
gcaataagtattgataagaa

SEQ ID NO: 2425 - DNA, 20 bp, Artificial sequence
  SiRNA target sequence
caataagtattgataagaaa

SEQ ID NO: 2426 - DNA, 20 bp, Artificial sequence
  SiRNA target sequence
aataagtattgataagaaaa

SEQ ID NO: 2427 - DNA, 20 bp, Artificial sequence
  SiRNA target sequence
ataagtattgataagaaaaa

SEQ ID NO: 2428 - DNA, 20 bp, Artificial sequence
  SiRNA target sequence
taagtattgataagaaaaag

SEQ ID NO: 2429 - DNA, 20 bp, Artificial sequence
  SiRNA target sequence
aagtattgataagaaaaagg

SEQ ID NO: 2430 - DNA, 20 bp, Artificial sequence
  SiRNA target sequence
agtattgataagaaaaagga

SEQ ID NO: 2431 - DNA, 20 bp, Artificial sequence
  SiRNA target sequence
gtattgataagaaaaaggat

SEQ ID NO: 2432 - DNA, 20 bp, Artificial sequence
  SiRNA target sequence
tattgataagaaaaaggatg

SEQ ID NO: 2433 - DNA, 20 bp, Artificial sequence
  SiRNA target sequence
attgataagaaaaaggatgc

SEQ ID NO: 2434 - DNA, 20 bp, Artificial sequence
  SiRNA target sequence
ttgataagaaaaaggatgct

SEQ ID NO: 2435 - DNA, 20 bp, Artificial sequence
  SiRNA target sequence
tgataagaaaaaggatgcta

SEQ ID NO: 2436 - DNA, 20 bp, Artificial sequence
  SiRNA target sequence
gataagaaaaaggatgctat

SEQ ID NO: 2437 - DNA, 20 bp, Artificial sequence
  SiRNA target sequence
ataagaaaaaggatgctata

SEQ ID NO: 2438 - DNA, 20 bp, Artificial sequence
  SiRNA target sequence
taagaaaaaggatgctatag

SEQ ID NO: 2439 - DNA, 20 bp, Artificial sequence
  SiRNA target sequence
aagaaaaaggatgctataga

SEQ ID NO: 2440 - DNA, 20 bp, Artificial sequence
  SiRNA target sequence
agaaaaaggatgctatagaa

SEQ ID NO: 2441 - DNA, 20 bp, Artificial sequence
  SiRNA target sequence
gaaaaaggatgctatagaaa

SEQ ID NO: 2442 - DNA, 20 bp, Artificial sequence
  SiRNA target sequence
aaaaaggatgctatagaaat

SEQ ID NO: 2443 - DNA, 20 bp, Artificial sequence
  SiRNA target sequence
aaaaggatgctatagaaatt

SEQ ID NO: 2444 - DNA, 20 bp, Artificial sequence
  SiRNA target sequence
aaaggatgctatagaaattt

SEQ ID NO: 2445 - DNA, 20 bp, Artificial sequence
  SiRNA target sequence
aaggatgctatagaaatttt

SEQ ID NO: 2446 - DNA, 20 bp, Artificial sequence
  SiRNA target sequence
aggatgctatagaaatttta

SEQ ID NO: 2447 - DNA, 20 bp, Artificial sequence
  SiRNA target sequence
ggatgctatagaaattttat

SEQ ID NO: 2448 - DNA, 20 bp, Artificial sequence
  SiRNA target sequence
gatgctatagaaattttata

SEQ ID NO: 2449 - DNA, 20 bp, Artificial sequence
  SiRNA target sequence
atgctatagaaattttatat

SEQ ID NO: 2450 - DNA, 20 bp, Artificial sequence
  SiRNA target sequence
tgctatagaaattttatata

SEQ ID NO: 2451 - DNA, 20 bp, Artificial sequence
  SiRNA target sequence
gctatagaaattttatatag

SEQ ID NO: 2452 - DNA, 20 bp, Artificial sequence
  SiRNA target sequence
ctatagaaattttatataga

SEQ ID NO: 2453 - DNA, 20 bp, Artificial sequence
  SiRNA target sequence
tatagaaattttatatagaa

SEQ ID NO: 2454 - DNA, 20 bp, Artificial sequence
  SiRNA target sequence
atagaaattttatatagaag

SEQ ID NO: 2455 - DNA, 20 bp, Artificial sequence
  SiRNA target sequence
tagaaattttatatagaagt

SEQ ID NO: 2456 - DNA, 20 bp, Artificial sequence
  SiRNA target sequence
agaaattttatatagaagta

SEQ ID NO: 2457 - DNA, 20 bp, Artificial sequence
  SiRNA target sequence
gaaattttatatagaagtat

SEQ ID NO: 2458 - DNA, 20 bp, Artificial sequence
  SiRNA target sequence
aaattttatatagaagtata

SEQ ID NO: 2459 - DNA, 20 bp, Artificial sequence
  SiRNA target sequence
aattttatatagaagtatat

SEQ ID NO: 2460 - DNA, 20 bp, Artificial sequence
  SiRNA target sequence
attttatatagaagtatatc

SEQ ID NO: 2461 - DNA, 20 bp, Artificial sequence
  SiRNA target sequence
ttttatatagaagtatatca

SEQ ID NO: 2462 - DNA, 20 bp, Artificial sequence
  SiRNA target sequence
tttatatagaagtatatcag

SEQ ID NO: 2463 - DNA, 20 bp, Artificial sequence
  SiRNA target sequence
ttatatagaagtatatcaga

SEQ ID NO: 2464 - DNA, 20 bp, Artificial sequence
  SiRNA target sequence
tatatagaagtatatcagaa

SEQ ID NO: 2465 - DNA, 20 bp, Artificial sequence
  SiRNA target sequence
atatagaagtatatcagaat

SEQ ID NO: 2466 - DNA, 20 bp, Artificial sequence
  SiRNA target sequence
tatagaagtatatcagaata

SEQ ID NO: 2467 - DNA, 20 bp, Artificial sequence
  SiRNA target sequence
atagaagtatatcagaatat

SEQ ID NO: 2468 - DNA, 20 bp, Artificial sequence
  SiRNA target sequence
tagaagtatatcagaatatt

SEQ ID NO: 2469 - DNA, 20 bp, Artificial sequence
  SiRNA target sequence
agaagtatatcagaatattc

SEQ ID NO: 2470 - DNA, 20 bp, Artificial sequence
  SiRNA target sequence
gaagtatatcagaatattca

SEQ ID NO: 2471 - DNA, 20 bp, Artificial sequence
  SiRNA target sequence
aagtatatcagaatattcat

SEQ ID NO: 2472 - DNA, 20 bp, Artificial sequence
  SiRNA target sequence
agtatatcagaatattcatc

SEQ ID NO: 2473 - DNA, 20 bp, Artificial sequence
  SiRNA target sequence
gtatatcagaatattcatct

SEQ ID NO: 2474 - DNA, 20 bp, Artificial sequence
  SiRNA target sequence
tatatcagaatattcatctt

SEQ ID NO: 2475 - DNA, 20 bp, Artificial sequence
  SiRNA target sequence
atatcagaatattcatctta

SEQ ID NO: 2476 - DNA, 20 bp, Artificial sequence
  SiRNA target sequence
tatcagaatattcatcttat

SEQ ID NO: 2477 - DNA, 20 bp, Artificial sequence
  SiRNA target sequence
atcagaatattcatcttatt

SEQ ID NO: 2478 - DNA, 20 bp, Artificial sequence
  SiRNA target sequence
tcagaatattcatcttattt

SEQ ID NO: 2479 - DNA, 20 bp, Artificial sequence
  SiRNA target sequence
cagaatattcatcttatttt

SEQ ID NO: 2480 - DNA, 20 bp, Artificial sequence
  SiRNA target sequence
agaatattcatcttatttta

SEQ ID NO: 2481 - DNA, 20 bp, Artificial sequence
  SiRNA target sequence
gaatattcatcttattttaa

SEQ ID NO: 2482 - DNA, 20 bp, Artificial sequence
  SiRNA target sequence
aatattcatcttattttaaa

SEQ ID NO: 2483 - DNA, 20 bp, Artificial sequence
  SiRNA target sequence
atattcatcttattttaaat

SEQ ID NO: 2484 - DNA, 20 bp, Artificial sequence
  SiRNA target sequence
tattcatcttattttaaatc

SEQ ID NO: 2485 - DNA, 20 bp, Artificial sequence
  SiRNA target sequence
attcatcttattttaaatct

SEQ ID NO: 2486 - DNA, 20 bp, Artificial sequence
  SiRNA target sequence
ttcatcttattttaaatctt

SEQ ID NO: 2487 - DNA, 20 bp, Artificial sequence
  SiRNA target sequence
tcatcttattttaaatctta

SEQ ID NO: 2488 - DNA, 20 bp, Artificial sequence
  SiRNA target sequence
catcttattttaaatcttat

SEQ ID NO: 2489 - DNA, 20 bp, Artificial sequence
  SiRNA target sequence
atcttattttaaatcttatt

SEQ ID NO: 2490 - DNA, 20 bp, Artificial sequence
  SiRNA target sequence
tcttattttaaatcttattt

SEQ ID NO: 2491 - DNA, 20 bp, Artificial sequence
  SiRNA target sequence
cttattttaaatcttatttg

SEQ ID NO: 2492 - DNA, 20 bp, Artificial sequence
  SiRNA target sequence
ttattttaaatcttatttgt

SEQ ID NO: 2493 - DNA, 20 bp, Artificial sequence
  SiRNA target sequence
tattttaaatcttatttgta

SEQ ID NO: 2494 - DNA, 20 bp, Artificial sequence
  SiRNA target sequence
attttaaatcttatttgtat

SEQ ID NO: 2495 - DNA, 20 bp, Artificial sequence
  SiRNA target sequence
ttttaaatcttatttgtatt

SEQ ID NO: 2496 - DNA, 20 bp, Artificial sequence
  SiRNA target sequence
tttaaatcttatttgtattt

SEQ ID NO: 2497 - DNA, 20 bp, Artificial sequence
  SiRNA target sequence
ttaaatcttatttgtattta

SEQ ID NO: 2498 - DNA, 20 bp, Artificial sequence
  SiRNA target sequence
taaatcttatttgtatttag

SEQ ID NO: 2499 - DNA, 20 bp, Artificial sequence
  SiRNA target sequence
aaatcttatttgtatttagg

SEQ ID NO: 2500 - DNA, 20 bp, Artificial sequence
  SiRNA target sequence
aatcttatttgtatttagga

SEQ ID NO: 2501 - DNA, 20 bp, Artificial sequence
  SiRNA target sequence
atcttatttgtatttaggaa

SEQ ID NO: 2502 - DNA, 20 bp, Artificial sequence
  SiRNA target sequence
tcttatttgtatttaggaaa

SEQ ID NO: 2503 - DNA, 20 bp, Artificial sequence
  SiRNA target sequence
cttatttgtatttaggaaat

SEQ ID NO: 2504 - DNA, 20 bp, Artificial sequence
  SiRNA target sequence
ttatttgtatttaggaaata

SEQ ID NO: 2505 - DNA, 20 bp, Artificial sequence
  SiRNA target sequence
tatttgtatttaggaaatat

SEQ ID NO: 2506 - DNA, 20 bp, Artificial sequence
  SiRNA target sequence
atttgtatttaggaaatatt

SEQ ID NO: 2507 - DNA, 20 bp, Artificial sequence
  SiRNA target sequence
tttgtatttaggaaatattt

SEQ ID NO: 2508 - DNA, 20 bp, Artificial sequence
  SiRNA target sequence
ttgtatttaggaaatatttt

SEQ ID NO: 2509 - DNA, 20 bp, Artificial sequence
  SiRNA target sequence
tgtatttaggaaatatttta

SEQ ID NO: 2510 - DNA, 20 bp, Artificial sequence
  SiRNA target sequence
gtatttaggaaatattttaa

SEQ ID NO: 2511 - DNA, 20 bp, Artificial sequence
  SiRNA target sequence
tatttaggaaatattttaat

SEQ ID NO: 2512 - DNA, 20 bp, Artificial sequence
  SiRNA target sequence
atttaggaaatattttaata

SEQ ID NO: 2513 - DNA, 20 bp, Artificial sequence
  SiRNA target sequence
tttaggaaatattttaataa

SEQ ID NO: 2514 - DNA, 20 bp, Artificial sequence
  SiRNA target sequence
ttaggaaatattttaataaa

SEQ ID NO: 2515 - DNA, 20 bp, Artificial sequence
  SiRNA target sequence
taggaaatattttaataaat

SEQ ID NO: 2516 - DNA, 20 bp, Artificial sequence
  SiRNA target sequence
aggaaatattttaataaatg

SEQ ID NO: 2517 - DNA, 20 bp, Artificial sequence
  SiRNA target sequence
ggaaatattttaataaatga

SEQ ID NO: 2518 - DNA, 20 bp, Artificial sequence
  SiRNA target sequence
gaaatattttaataaatgat

SEQ ID NO: 2519 - DNA, 20 bp, Artificial sequence
  SiRNA target sequence
aaatattttaataaatgatg

SEQ ID NO: 2520 - DNA, 20 bp, Artificial sequence
  SiRNA target sequence
aatattttaataaatgatga

SEQ ID NO: 2521 - DNA, 20 bp, Artificial sequence
  SiRNA target sequence
atattttaataaatgatgac

SEQ ID NO: 2522 - DNA, 20 bp, Artificial sequence
  SiRNA target sequence
tattttaataaatgatgact

SEQ ID NO: 2523 - DNA, 20 bp, Artificial sequence
  SiRNA target sequence
attttaataaatgatgactt

SEQ ID NO: 2524 - DNA, 20 bp, Artificial sequence
  SiRNA target sequence
ttttaataaatgatgactta

SEQ ID NO: 2525 - DNA, 20 bp, Artificial sequence
  SiRNA target sequence
tttaataaatgatgacttaa

SEQ ID NO: 2526 - DNA, 20 bp, Artificial sequence
  SiRNA target sequence
ttaataaatgatgacttaaa

SEQ ID NO: 2527 - DNA, 20 bp, Artificial sequence
  SiRNA target sequence
taataaatgatgacttaaat

SEQ ID NO: 2528 - DNA, 20 bp, Artificial sequence
  SiRNA target sequence
aataaatgatgacttaaatg

SEQ ID NO: 2529 - DNA, 20 bp, Artificial sequence
  SiRNA target sequence
ataaatgatgacttaaatga

SEQ ID NO: 2530 - DNA, 20 bp, Artificial sequence
  SiRNA target sequence
taaatgatgacttaaatgaa

SEQ ID NO: 2531 - DNA, 20 bp, Artificial sequence
  SiRNA target sequence
aaatgatgacttaaatgaat

SEQ ID NO: 2532 - DNA, 20 bp, Artificial sequence
  SiRNA target sequence
aatgatgacttaaatgaatg

SEQ ID NO: 2533 - DNA, 20 bp, Artificial sequence
  SiRNA target sequence
atgatgacttaaatgaatgc

SEQ ID NO: 2534 - DNA, 20 bp, Artificial sequence
  SiRNA target sequence
tgatgacttaaatgaatgca

SEQ ID NO: 2535 - DNA, 20 bp, Artificial sequence
  SiRNA target sequence
gatgacttaaatgaatgcag

SEQ ID NO: 2536 - DNA, 20 bp, Artificial sequence
  SiRNA target sequence
atgacttaaatgaatgcagg

SEQ ID NO: 2537 - DNA, 20 bp, Artificial sequence
  SiRNA target sequence
tgacttaaatgaatgcagga

SEQ ID NO: 2538 - DNA, 20 bp, Artificial sequence
  SiRNA target sequence
gacttaaatgaatgcaggaa

SEQ ID NO: 2539 - DNA, 20 bp, Artificial sequence
  SiRNA target sequence
acttaaatgaatgcaggaaa

SEQ ID NO: 2540 - DNA, 20 bp, Artificial sequence
  SiRNA target sequence
cttaaatgaatgcaggaaat

SEQ ID NO: 2541 - DNA, 20 bp, Artificial sequence
  SiRNA target sequence
ttaaatgaatgcaggaaatt

SEQ ID NO: 2542 - DNA, 20 bp, Artificial sequence
  SiRNA target sequence
taaatgaatgcaggaaattg

SEQ ID NO: 2543 - DNA, 20 bp, Artificial sequence
  SiRNA target sequence
aaatgaatgcaggaaattgt

SEQ ID NO: 2544 - DNA, 20 bp, Artificial sequence
  SiRNA target sequence
aatgaatgcaggaaattgtt

SEQ ID NO: 2545 - DNA, 20 bp, Artificial sequence
  SiRNA target sequence
atgaatgcaggaaattgttt

SEQ ID NO: 2546 - DNA, 20 bp, Artificial sequence
  SiRNA target sequence
tgaatgcaggaaattgttta

SEQ ID NO: 2547 - DNA, 20 bp, Artificial sequence
  SiRNA target sequence
gaatgcaggaaattgtttaa

SEQ ID NO: 2548 - DNA, 20 bp, Artificial sequence
  SiRNA target sequence
aatgcaggaaattgtttaat

SEQ ID NO: 2549 - DNA, 20 bp, Artificial sequence
  SiRNA target sequence
atgcaggaaattgtttaata

SEQ ID NO: 2550 - DNA, 20 bp, Artificial sequence
  SiRNA target sequence
tgcaggaaattgtttaatac

SEQ ID NO: 2551 - DNA, 20 bp, Artificial sequence
  SiRNA target sequence
gcaggaaattgtttaataca

SEQ ID NO: 2552 - DNA, 20 bp, Artificial sequence
  SiRNA target sequence
caggaaattgtttaatacat

SEQ ID NO: 2553 - DNA, 20 bp, Artificial sequence
  SiRNA target sequence
aggaaattgtttaatacatc

SEQ ID NO: 2554 - DNA, 20 bp, Artificial sequence
  SiRNA target sequence
ggaaattgtttaatacatca

SEQ ID NO: 2555 - DNA, 20 bp, Artificial sequence
  SiRNA target sequence
gaaattgtttaatacatcac

SEQ ID NO: 2556 - DNA, 20 bp, Artificial sequence
  SiRNA target sequence
aaattgtttaatacatcact

SEQ ID NO: 2557 - DNA, 20 bp, Artificial sequence
  SiRNA target sequence
aattgtttaatacatcactt

SEQ ID NO: 2558 - DNA, 20 bp, Artificial sequence
  SiRNA target sequence
attgtttaatacatcacttc

SEQ ID NO: 2559 - DNA, 20 bp, Artificial sequence
  SiRNA target sequence
ttgtttaatacatcacttca

SEQ ID NO: 2560 - DNA, 20 bp, Artificial sequence
  SiRNA target sequence
tgtttaatacatcacttcaa

SEQ ID NO: 2561 - DNA, 20 bp, Artificial sequence
  SiRNA target sequence
gtttaatacatcacttcaat

SEQ ID NO: 2562 - DNA, 20 bp, Artificial sequence
  SiRNA target sequence
tttaatacatcacttcaata

SEQ ID NO: 2563 - DNA, 20 bp, Artificial sequence
  SiRNA target sequence
ttaatacatcacttcaatat

SEQ ID NO: 2564 - DNA, 20 bp, Artificial sequence
  SiRNA target sequence
taatacatcacttcaatatt

SEQ ID NO: 2565 - DNA, 20 bp, Artificial sequence
  SiRNA target sequence
aatacatcacttcaatattg

SEQ ID NO: 2566 - DNA, 20 bp, Artificial sequence
  SiRNA target sequence
atacatcacttcaatattgt

SEQ ID NO: 2567 - DNA, 20 bp, Artificial sequence
  SiRNA target sequence
tacatcacttcaatattgtt

SEQ ID NO: 2568 - DNA, 20 bp, Artificial sequence
  SiRNA target sequence
acatcacttcaatattgttg

SEQ ID NO: 2569 - DNA, 20 bp, Artificial sequence
  SiRNA target sequence
catcacttcaatattgttgt

SEQ ID NO: 2570 - DNA, 20 bp, Artificial sequence
  SiRNA target sequence
atcacttcaatattgttgta

SEQ ID NO: 2571 - DNA, 20 bp, Artificial sequence
  SiRNA target sequence
tcacttcaatattgttgtaa

SEQ ID NO: 2572 - DNA, 20 bp, Artificial sequence
  SiRNA target sequence
cacttcaatattgttgtaat

SEQ ID NO: 2573 - DNA, 20 bp, Artificial sequence
  SiRNA target sequence
acttcaatattgttgtaatt

SEQ ID NO: 2574 - DNA, 20 bp, Artificial sequence
  SiRNA target sequence
cttcaatattgttgtaattc

SEQ ID NO: 2575 - DNA, 20 bp, Artificial sequence
  SiRNA target sequence
ttcaatattgttgtaattct

SEQ ID NO: 2576 - DNA, 20 bp, Artificial sequence
  SiRNA target sequence
tcaatattgttgtaattctg

SEQ ID NO: 2577 - DNA, 20 bp, Artificial sequence
  SiRNA target sequence
caatattgttgtaattctga

SEQ ID NO: 2578 - DNA, 20 bp, Artificial sequence
  SiRNA target sequence
aatattgttgtaattctgat

SEQ ID NO: 2579 - DNA, 20 bp, Artificial sequence
  SiRNA target sequence
atattgttgtaattctgatg

SEQ ID NO: 2580 - DNA, 20 bp, Artificial sequence
  SiRNA target sequence
tattgttgtaattctgatga

SEQ ID NO: 2581 - DNA, 20 bp, Artificial sequence
  SiRNA target sequence
attgttgtaattctgatgag

SEQ ID NO: 2582 - DNA, 20 bp, Artificial sequence
  SiRNA target sequence
ttgttgtaattctgatgagg

SEQ ID NO: 2583 - DNA, 20 bp, Artificial sequence
  SiRNA target sequence
tgttgtaattctgatgaggt

SEQ ID NO: 2584 - DNA, 20 bp, Artificial sequence
  SiRNA target sequence
gttgtaattctgatgaggtt

SEQ ID NO: 2585 - DNA, 20 bp, Artificial sequence
  SiRNA target sequence
ttgtaattctgatgaggttt

SEQ ID NO: 2586 - DNA, 20 bp, Artificial sequence
  SiRNA target sequence
tgtaattctgatgaggtttt

SEQ ID NO: 2587 - DNA, 20 bp, Artificial sequence
  SiRNA target sequence
gtaattctgatgaggttttt

SEQ ID NO: 2588 - DNA, 20 bp, Artificial sequence
  SiRNA target sequence
taattctgatgaggttttta

SEQ ID NO: 2589 - DNA, 20 bp, Artificial sequence
  SiRNA target sequence
aattctgatgaggtttttat

SEQ ID NO: 2590 - DNA, 20 bp, Artificial sequence
  SiRNA target sequence
attctgatgaggtttttatt

SEQ ID NO: 2591 - DNA, 20 bp, Artificial sequence
  SiRNA target sequence
ttctgatgaggtttttattg

SEQ ID NO: 2592 - DNA, 20 bp, Artificial sequence
  SiRNA target sequence
tctgatgaggtttttattgt

SEQ ID NO: 2593 - DNA, 20 bp, Artificial sequence
  SiRNA target sequence
ctgatgaggtttttattgtt

SEQ ID NO: 2594 - DNA, 20 bp, Artificial sequence
  SiRNA target sequence
tgatgaggtttttattgtta

SEQ ID NO: 2595 - DNA, 20 bp, Artificial sequence
  SiRNA target sequence
gatgaggtttttattgttaa

SEQ ID NO: 2596 - DNA, 20 bp, Artificial sequence
  SiRNA target sequence
atgaggtttttattgttaag

SEQ ID NO: 2597 - DNA, 20 bp, Artificial sequence
  SiRNA target sequence
tgaggtttttattgttaagc

SEQ ID NO: 2598 - DNA, 20 bp, Artificial sequence
  SiRNA target sequence
gaggtttttattgttaagca

SEQ ID NO: 2599 - DNA, 20 bp, Artificial sequence
  SiRNA target sequence
aggtttttattgttaagcag

SEQ ID NO: 2600 - DNA, 20 bp, Artificial sequence
  SiRNA target sequence
ggtttttattgttaagcagt

SEQ ID NO: 2601 - DNA, 20 bp, Artificial sequence
  SiRNA target sequence
gtttttattgttaagcagtc

SEQ ID NO: 2602 - DNA, 20 bp, Artificial sequence
  SiRNA target sequence
tttttattgttaagcagtca

SEQ ID NO: 2603 - DNA, 20 bp, Artificial sequence
  SiRNA target sequence
ttttattgttaagcagtcac

SEQ ID NO: 2604 - DNA, 20 bp, Artificial sequence
  SiRNA target sequence
tttattgttaagcagtcact

SEQ ID NO: 2605 - DNA, 20 bp, Artificial sequence
  SiRNA target sequence
ttattgttaagcagtcactt

SEQ ID NO: 2606 - DNA, 20 bp, Artificial sequence
  SiRNA target sequence
tattgttaagcagtcactta

SEQ ID NO: 2607 - DNA, 20 bp, Artificial sequence
  SiRNA target sequence
attgttaagcagtcacttat

SEQ ID NO: 2608 - DNA, 20 bp, Artificial sequence
  SiRNA target sequence
ttgttaagcagtcacttatt

SEQ ID NO: 2609 - DNA, 20 bp, Artificial sequence
  SiRNA target sequence
tgttaagcagtcacttattt

SEQ ID NO: 2610 - DNA, 20 bp, Artificial sequence
  SiRNA target sequence
gttaagcagtcacttatttt

SEQ ID NO: 2611 - DNA, 20 bp, Artificial sequence
  SiRNA target sequence
ttaagcagtcacttatttta

SEQ ID NO: 2612 - DNA, 20 bp, Artificial sequence
  SiRNA target sequence
taagcagtcacttattttaa

SEQ ID NO: 2613 - DNA, 20 bp, Artificial sequence
  SiRNA target sequence
aagcagtcacttattttaat

SEQ ID NO: 2614 - DNA, 20 bp, Artificial sequence
  SiRNA target sequence
agcagtcacttattttaata

SEQ ID NO: 2615 - DNA, 20 bp, Artificial sequence
  SiRNA target sequence
gcagtcacttattttaatag

SEQ ID NO: 2616 - DNA, 20 bp, Artificial sequence
  SiRNA target sequence
cagtcacttattttaataga

SEQ ID NO: 2617 - DNA, 20 bp, Artificial sequence
  SiRNA target sequence
agtcacttattttaatagaa

SEQ ID NO: 2618 - DNA, 20 bp, Artificial sequence
  SiRNA target sequence
gtcacttattttaatagaag

SEQ ID NO: 2619 - DNA, 20 bp, Artificial sequence
  SiRNA target sequence
tcacttattttaatagaagt

SEQ ID NO: 2620 - DNA, 20 bp, Artificial sequence
  SiRNA target sequence
cacttattttaatagaagta

SEQ ID NO: 2621 - DNA, 20 bp, Artificial sequence
  SiRNA target sequence
acttattttaatagaagtac

SEQ ID NO: 2622 - DNA, 20 bp, Artificial sequence
  SiRNA target sequence
cttattttaatagaagtaca

SEQ ID NO: 2623 - DNA, 20 bp, Artificial sequence
  SiRNA target sequence
ttattttaatagaagtacat

SEQ ID NO: 2624 - DNA, 20 bp, Artificial sequence
  SiRNA target sequence
tattttaatagaagtacatg

SEQ ID NO: 2625 - DNA, 20 bp, Artificial sequence
  SiRNA target sequence
attttaatagaagtacatga

SEQ ID NO: 2626 - DNA, 20 bp, Artificial sequence
  SiRNA target sequence
ttttaatagaagtacatgaa

SEQ ID NO: 2627 - DNA, 20 bp, Artificial sequence
  SiRNA target sequence
tttaatagaagtacatgaat

SEQ ID NO: 2628 - DNA, 20 bp, Artificial sequence
  SiRNA target sequence
ttaatagaagtacatgaata

SEQ ID NO: 2629 - DNA, 20 bp, Artificial sequence
  SiRNA target sequence
taatagaagtacatgaatac

SEQ ID NO: 2630 - DNA, 20 bp, Artificial sequence
  SiRNA target sequence
aatagaagtacatgaataca

SEQ ID NO: 2631 - DNA, 20 bp, Artificial sequence
  SiRNA target sequence
atagaagtacatgaatacat

SEQ ID NO: 2632 - DNA, 20 bp, Artificial sequence
  SiRNA target sequence
tagaagtacatgaatacatc

SEQ ID NO: 2633 - DNA, 20 bp, Artificial sequence
  SiRNA target sequence
agaagtacatgaatacatca

SEQ ID NO: 2634 - DNA, 20 bp, Artificial sequence
  SiRNA target sequence
gaagtacatgaatacatcaa

SEQ ID NO: 2635 - DNA, 20 bp, Artificial sequence
  SiRNA target sequence
aagtacatgaatacatcaaa

SEQ ID NO: 2636 - DNA, 20 bp, Artificial sequence
  SiRNA target sequence
agtacatgaatacatcaaag

SEQ ID NO: 2637 - DNA, 20 bp, Artificial sequence
  SiRNA target sequence
gtacatgaatacatcaaaga

SEQ ID NO: 2638 - DNA, 20 bp, Artificial sequence
  SiRNA target sequence
tacatgaatacatcaaagaa

SEQ ID NO: 2639 - DNA, 20 bp, Artificial sequence
  SiRNA target sequence
acatgaatacatcaaagaaa

SEQ ID NO: 2640 - DNA, 20 bp, Artificial sequence
  SiRNA target sequence
catgaatacatcaaagaaaa

SEQ ID NO: 2641 - DNA, 20 bp, Artificial sequence
  SiRNA target sequence
atgaatacatcaaagaaaat

SEQ ID NO: 2642 - DNA, 20 bp, Artificial sequence
  SiRNA target sequence
tgaatacatcaaagaaaata

SEQ ID NO: 2643 - DNA, 20 bp, Artificial sequence
  SiRNA target sequence
gaatacatcaaagaaaataa

SEQ ID NO: 2644 - DNA, 20 bp, Artificial sequence
  SiRNA target sequence
aatacatcaaagaaaataaa

SEQ ID NO: 2645 - DNA, 20 bp, Artificial sequence
  SiRNA target sequence
atacatcaaagaaaataaaa

SEQ ID NO: 2646 - DNA, 20 bp, Artificial sequence
  SiRNA target sequence
tacatcaaagaaaataaaat

SEQ ID NO: 2647 - DNA, 20 bp, Artificial sequence
  SiRNA target sequence
acatcaaagaaaataaaata

SEQ ID NO: 2648 - DNA, 20 bp, Artificial sequence
  SiRNA target sequence
catcaaagaaaataaaatat

SEQ ID NO: 2649 - DNA, 20 bp, Artificial sequence
  SiRNA target sequence
atcaaagaaaataaaatata

SEQ ID NO: 2650 - DNA, 20 bp, Artificial sequence
  SiRNA target sequence
tcaaagaaaataaaatataa

SEQ ID NO: 2651 - DNA, 21 bp, Artificial sequence
  SiRNA target sequence
atgaaacgaaaaacagaaata

SEQ ID NO: 2652 - DNA, 21 bp, Artificial sequence
  SiRNA target sequence
tgaaacgaaaaacagaaatat

SEQ ID NO: 2653 - DNA, 21 bp, Artificial sequence
  SiRNA target sequence
gaaacgaaaaacagaaatatt

SEQ ID NO: 2654 - DNA, 21 bp, Artificial sequence
  SiRNA target sequence
aaacgaaaaacagaaatattt

SEQ ID NO: 2655 - DNA, 21 bp, Artificial sequence
  SiRNA target sequence
aacgaaaaacagaaatattta

SEQ ID NO: 2656 - DNA, 21 bp, Artificial sequence
  SiRNA target sequence
acgaaaaacagaaatatttat

SEQ ID NO: 2657 - DNA, 21 bp, Artificial sequence
  SiRNA target sequence
cgaaaaacagaaatatttatt

SEQ ID NO: 2658 - DNA, 21 bp, Artificial sequence
  SiRNA target sequence
gaaaaacagaaatatttattg

SEQ ID NO: 2659 - DNA, 21 bp, Artificial sequence
  SiRNA target sequence
aaaaacagaaatatttattgc

SEQ ID NO: 2660 - DNA, 21 bp, Artificial sequence
  SiRNA target sequence
aaaacagaaatatttattgct

SEQ ID NO: 2661 - DNA, 21 bp, Artificial sequence
  SiRNA target sequence
aaacagaaatatttattgcta

SEQ ID NO: 2662 - DNA, 21 bp, Artificial sequence
  SiRNA target sequence
aacagaaatatttattgctat

SEQ ID NO: 2663 - DNA, 21 bp, Artificial sequence
  SiRNA target sequence
acagaaatatttattgctatt

SEQ ID NO: 2664 - DNA, 21 bp, Artificial sequence
  SiRNA target sequence
cagaaatatttattgctatta

SEQ ID NO: 2665 - DNA, 21 bp, Artificial sequence
  SiRNA target sequence
agaaatatttattgctattac

SEQ ID NO: 2666 - DNA, 21 bp, Artificial sequence
  SiRNA target sequence
gaaatatttattgctattaca

SEQ ID NO: 2667 - DNA, 21 bp, Artificial sequence
  SiRNA target sequence
aaatatttattgctattacag

SEQ ID NO: 2668 - DNA, 21 bp, Artificial sequence
  SiRNA target sequence
aatatttattgctattacagt

SEQ ID NO: 2669 - DNA, 21 bp, Artificial sequence
  SiRNA target sequence
atatttattgctattacagta

SEQ ID NO: 2670 - DNA, 21 bp, Artificial sequence
  SiRNA target sequence
tatttattgctattacagtag

SEQ ID NO: 2671 - DNA, 21 bp, Artificial sequence
  SiRNA target sequence
atttattgctattacagtagt

SEQ ID NO: 2672 - DNA, 21 bp, Artificial sequence
  SiRNA target sequence
tttattgctattacagtagtc

SEQ ID NO: 2673 - DNA, 21 bp, Artificial sequence
  SiRNA target sequence
ttattgctattacagtagtca

SEQ ID NO: 2674 - DNA, 21 bp, Artificial sequence
  SiRNA target sequence
tattgctattacagtagtcac

SEQ ID NO: 2675 - DNA, 21 bp, Artificial sequence
  SiRNA target sequence
attgctattacagtagtcact

SEQ ID NO: 2676 - DNA, 21 bp, Artificial sequence
  SiRNA target sequence
ttgctattacagtagtcactg

SEQ ID NO: 2677 - DNA, 21 bp, Artificial sequence
  SiRNA target sequence
tgctattacagtagtcactgc

SEQ ID NO: 2678 - DNA, 21 bp, Artificial sequence
  SiRNA target sequence
gctattacagtagtcactgca

SEQ ID NO: 2679 - DNA, 21 bp, Artificial sequence
  SiRNA target sequence
ctattacagtagtcactgcag

SEQ ID NO: 2680 - DNA, 21 bp, Artificial sequence
  SiRNA target sequence
tattacagtagtcactgcagt

SEQ ID NO: 2681 - DNA, 21 bp, Artificial sequence
  SiRNA target sequence
attacagtagtcactgcagtg

SEQ ID NO: 2682 - DNA, 21 bp, Artificial sequence
  SiRNA target sequence
ttacagtagtcactgcagtga

SEQ ID NO: 2683 - DNA, 21 bp, Artificial sequence
  SiRNA target sequence
tacagtagtcactgcagtgac

SEQ ID NO: 2684 - DNA, 21 bp, Artificial sequence
  SiRNA target sequence
acagtagtcactgcagtgaca

SEQ ID NO: 2685 - DNA, 21 bp, Artificial sequence
  SiRNA target sequence
cagtagtcactgcagtgacat

SEQ ID NO: 2686 - DNA, 21 bp, Artificial sequence
  SiRNA target sequence
agtagtcactgcagtgacatg

SEQ ID NO: 2687 - DNA, 21 bp, Artificial sequence
  SiRNA target sequence
gtagtcactgcagtgacatgt

SEQ ID NO: 2688 - DNA, 21 bp, Artificial sequence
  SiRNA target sequence
tagtcactgcagtgacatgtt

SEQ ID NO: 2689 - DNA, 21 bp, Artificial sequence
  SiRNA target sequence
agtcactgcagtgacatgtta

SEQ ID NO: 2690 - DNA, 21 bp, Artificial sequence
  SiRNA target sequence
gtcactgcagtgacatgttac

SEQ ID NO: 2691 - DNA, 21 bp, Artificial sequence
  SiRNA target sequence
tcactgcagtgacatgttact

SEQ ID NO: 2692 - DNA, 21 bp, Artificial sequence
  SiRNA target sequence
cactgcagtgacatgttactt

SEQ ID NO: 2693 - DNA, 21 bp, Artificial sequence
  SiRNA target sequence
actgcagtgacatgttactta

SEQ ID NO: 2694 - DNA, 21 bp, Artificial sequence
  SiRNA target sequence
ctgcagtgacatgttacttat

SEQ ID NO: 2695 - DNA, 21 bp, Artificial sequence
  SiRNA target sequence
tgcagtgacatgttacttatt

SEQ ID NO: 2696 - DNA, 21 bp, Artificial sequence
  SiRNA target sequence
gcagtgacatgttacttattt

SEQ ID NO: 2697 - DNA, 21 bp, Artificial sequence
  SiRNA target sequence
cagtgacatgttacttattta

SEQ ID NO: 2698 - DNA, 21 bp, Artificial sequence
  SiRNA target sequence
agtgacatgttacttatttaa

SEQ ID NO: 2699 - DNA, 21 bp, Artificial sequence
  SiRNA target sequence
gtgacatgttacttatttaaa

SEQ ID NO: 2700 - DNA, 21 bp, Artificial sequence
  SiRNA target sequence
tgacatgttacttatttaaaa

SEQ ID NO: 2701 - DNA, 21 bp, Artificial sequence
  SiRNA target sequence
gacatgttacttatttaaaaa

SEQ ID NO: 2702 - DNA, 21 bp, Artificial sequence
  SiRNA target sequence
acatgttacttatttaaaaaa

SEQ ID NO: 2703 - DNA, 21 bp, Artificial sequence
  SiRNA target sequence
catgttacttatttaaaaaaa

SEQ ID NO: 2704 - DNA, 21 bp, Artificial sequence
  SiRNA target sequence
atgttacttatttaaaaaaat

SEQ ID NO: 2705 - DNA, 21 bp, Artificial sequence
  SiRNA target sequence
tgttacttatttaaaaaaata

SEQ ID NO: 2706 - DNA, 21 bp, Artificial sequence
  SiRNA target sequence
gttacttatttaaaaaaataa

SEQ ID NO: 2707 - DNA, 21 bp, Artificial sequence
  SiRNA target sequence
ttacttatttaaaaaaataat

SEQ ID NO: 2708 - DNA, 21 bp, Artificial sequence
  SiRNA target sequence
tacttatttaaaaaaataata

SEQ ID NO: 2709 - DNA, 21 bp, Artificial sequence
  SiRNA target sequence
acttatttaaaaaaataataa

SEQ ID NO: 2710 - DNA, 21 bp, Artificial sequence
  SiRNA target sequence
cttatttaaaaaaataataaa

SEQ ID NO: 2711 - DNA, 21 bp, Artificial sequence
  SiRNA target sequence
ttatttaaaaaaataataaat

SEQ ID NO: 2712 - DNA, 21 bp, Artificial sequence
  SiRNA target sequence
tatttaaaaaaataataaata

SEQ ID NO: 2713 - DNA, 21 bp, Artificial sequence
  SiRNA target sequence
atttaaaaaaataataaatag

SEQ ID NO: 2714 - DNA, 21 bp, Artificial sequence
  SiRNA target sequence
tttaaaaaaataataaataga

SEQ ID NO: 2715 - DNA, 21 bp, Artificial sequence
  SiRNA target sequence
ttaaaaaaataataaatagac

SEQ ID NO: 2716 - DNA, 21 bp, Artificial sequence
  SiRNA target sequence
taaaaaaataataaatagaca

SEQ ID NO: 2717 - DNA, 21 bp, Artificial sequence
  SiRNA target sequence
aaaaaaataataaatagacaa

SEQ ID NO: 2718 - DNA, 21 bp, Artificial sequence
  SiRNA target sequence
aaaaaataataaatagacaaa

SEQ ID NO: 2719 - DNA, 21 bp, Artificial sequence
  SiRNA target sequence
aaaaataataaatagacaaaa

SEQ ID NO: 2720 - DNA, 21 bp, Artificial sequence
  SiRNA target sequence
aaaataataaatagacaaaag

SEQ ID NO: 2721 - DNA, 21 bp, Artificial sequence
  SiRNA target sequence
aaataataaatagacaaaagt

SEQ ID NO: 2722 - DNA, 21 bp, Artificial sequence
  SiRNA target sequence
aataataaatagacaaaagtc

SEQ ID NO: 2723 - DNA, 21 bp, Artificial sequence
  SiRNA target sequence
ataataaatagacaaaagtct

SEQ ID NO: 2724 - DNA, 21 bp, Artificial sequence
  SiRNA target sequence
taataaatagacaaaagtctg

SEQ ID NO: 2725 - DNA, 21 bp, Artificial sequence
  SiRNA target sequence
aataaatagacaaaagtctga

SEQ ID NO: 2726 - DNA, 21 bp, Artificial sequence
  SiRNA target sequence
ataaatagacaaaagtctgat

SEQ ID NO: 2727 - DNA, 21 bp, Artificial sequence
  SiRNA target sequence
taaatagacaaaagtctgatt

SEQ ID NO: 2728 - DNA, 21 bp, Artificial sequence
  SiRNA target sequence
aaatagacaaaagtctgatta

SEQ ID NO: 2729 - DNA, 21 bp, Artificial sequence
  SiRNA target sequence
aatagacaaaagtctgattat

SEQ ID NO: 2730 - DNA, 21 bp, Artificial sequence
  SiRNA target sequence
atagacaaaagtctgattata

SEQ ID NO: 2731 - DNA, 21 bp, Artificial sequence
  SiRNA target sequence
tagacaaaagtctgattatac

SEQ ID NO: 2732 - DNA, 21 bp, Artificial sequence
  SiRNA target sequence
agacaaaagtctgattataca

SEQ ID NO: 2733 - DNA, 21 bp, Artificial sequence
  SiRNA target sequence
gacaaaagtctgattatacat

SEQ ID NO: 2734 - DNA, 21 bp, Artificial sequence
  SiRNA target sequence
acaaaagtctgattatacatc

SEQ ID NO: 2735 - DNA, 21 bp, Artificial sequence
  SiRNA target sequence
caaaagtctgattatacatca

SEQ ID NO: 2736 - DNA, 21 bp, Artificial sequence
  SiRNA target sequence
aaaagtctgattatacatcaa

SEQ ID NO: 2737 - DNA, 21 bp, Artificial sequence
  SiRNA target sequence
aaagtctgattatacatcaat

SEQ ID NO: 2738 - DNA, 21 bp, Artificial sequence
  SiRNA target sequence
aagtctgattatacatcaata

SEQ ID NO: 2739 - DNA, 21 bp, Artificial sequence
  SiRNA target sequence
agtctgattatacatcaataa

SEQ ID NO: 2740 - DNA, 21 bp, Artificial sequence
  SiRNA target sequence
gtctgattatacatcaataaa

SEQ ID NO: 2741 - DNA, 21 bp, Artificial sequence
  SiRNA target sequence
tctgattatacatcaataaaa

SEQ ID NO: 2742 - DNA, 21 bp, Artificial sequence
  SiRNA target sequence
ctgattatacatcaataaaac

SEQ ID NO: 2743 - DNA, 21 bp, Artificial sequence
  SiRNA target sequence
tgattatacatcaataaaaca

SEQ ID NO: 2744 - DNA, 21 bp, Artificial sequence
  SiRNA target sequence
gattatacatcaataaaacag

SEQ ID NO: 2745 - DNA, 21 bp, Artificial sequence
  SiRNA target sequence
attatacatcaataaaacagg

SEQ ID NO: 2746 - DNA, 21 bp, Artificial sequence
  SiRNA target sequence
ttatacatcaataaaacagga

SEQ ID NO: 2747 - DNA, 21 bp, Artificial sequence
  SiRNA target sequence
tatacatcaataaaacaggaa

SEQ ID NO: 2748 - DNA, 21 bp, Artificial sequence
  SiRNA target sequence
atacatcaataaaacaggaag

SEQ ID NO: 2749 - DNA, 21 bp, Artificial sequence
  SiRNA target sequence
tacatcaataaaacaggaagc

SEQ ID NO: 2750 - DNA, 21 bp, Artificial sequence
  SiRNA target sequence
acatcaataaaacaggaagca

SEQ ID NO: 2751 - DNA, 21 bp, Artificial sequence
  SiRNA target sequence
catcaataaaacaggaagcag

SEQ ID NO: 2752 - DNA, 21 bp, Artificial sequence
  SiRNA target sequence
atcaataaaacaggaagcaga

SEQ ID NO: 2753 - DNA, 21 bp, Artificial sequence
  SiRNA target sequence
tcaataaaacaggaagcagat

SEQ ID NO: 2754 - DNA, 21 bp, Artificial sequence
  SiRNA target sequence
caataaaacaggaagcagata

SEQ ID NO: 2755 - DNA, 21 bp, Artificial sequence
  SiRNA target sequence
aataaaacaggaagcagataa

SEQ ID NO: 2756 - DNA, 21 bp, Artificial sequence
  SiRNA target sequence
ataaaacaggaagcagataaa

SEQ ID NO: 2757 - DNA, 21 bp, Artificial sequence
  SiRNA target sequence
taaaacaggaagcagataaat

SEQ ID NO: 2758 - DNA, 21 bp, Artificial sequence
  SiRNA target sequence
aaaacaggaagcagataaata

SEQ ID NO: 2759 - DNA, 21 bp, Artificial sequence
  SiRNA target sequence
aaacaggaagcagataaatat

SEQ ID NO: 2760 - DNA, 21 bp, Artificial sequence
  SiRNA target sequence
aacaggaagcagataaatatt

SEQ ID NO: 2761 - DNA, 21 bp, Artificial sequence
  SiRNA target sequence
acaggaagcagataaatattt

SEQ ID NO: 2762 - DNA, 21 bp, Artificial sequence
  SiRNA target sequence
caggaagcagataaatatttt

SEQ ID NO: 2763 - DNA, 21 bp, Artificial sequence
  SiRNA target sequence
aggaagcagataaatatttta

SEQ ID NO: 2764 - DNA, 21 bp, Artificial sequence
  SiRNA target sequence
ggaagcagataaatattttat

SEQ ID NO: 2765 - DNA, 21 bp, Artificial sequence
  SiRNA target sequence
gaagcagataaatattttata

SEQ ID NO: 2766 - DNA, 21 bp, Artificial sequence
  SiRNA target sequence
aagcagataaatattttatac

SEQ ID NO: 2767 - DNA, 21 bp, Artificial sequence
  SiRNA target sequence
agcagataaatattttataca

SEQ ID NO: 2768 - DNA, 21 bp, Artificial sequence
  SiRNA target sequence
gcagataaatattttatacaa

SEQ ID NO: 2769 - DNA, 21 bp, Artificial sequence
  SiRNA target sequence
cagataaatattttatacaag

SEQ ID NO: 2770 - DNA, 21 bp, Artificial sequence
  SiRNA target sequence
agataaatattttatacaaga

SEQ ID NO: 2771 - DNA, 21 bp, Artificial sequence
  SiRNA target sequence
gataaatattttatacaagaa

SEQ ID NO: 2772 - DNA, 21 bp, Artificial sequence
  SiRNA target sequence
ataaatattttatacaagaag

SEQ ID NO: 2773 - DNA, 21 bp, Artificial sequence
  SiRNA target sequence
taaatattttatacaagaaga

SEQ ID NO: 2774 - DNA, 21 bp, Artificial sequence
  SiRNA target sequence
aaatattttatacaagaagat

SEQ ID NO: 2775 - DNA, 21 bp, Artificial sequence
  SiRNA target sequence
aatattttatacaagaagatt

SEQ ID NO: 2776 - DNA, 21 bp, Artificial sequence
  SiRNA target sequence
atattttatacaagaagatta

SEQ ID NO: 2777 - DNA, 21 bp, Artificial sequence
  SiRNA target sequence
tattttatacaagaagattat

SEQ ID NO: 2778 - DNA, 21 bp, Artificial sequence
  SiRNA target sequence
attttatacaagaagattata

SEQ ID NO: 2779 - DNA, 21 bp, Artificial sequence
  SiRNA target sequence
ttttatacaagaagattataa

SEQ ID NO: 2780 - DNA, 21 bp, Artificial sequence
  SiRNA target sequence
tttatacaagaagattataaa

SEQ ID NO: 2781 - DNA, 21 bp, Artificial sequence
  SiRNA target sequence
ttatacaagaagattataaaa

SEQ ID NO: 2782 - DNA, 21 bp, Artificial sequence
  SiRNA target sequence
tatacaagaagattataaaaa

SEQ ID NO: 2783 - DNA, 21 bp, Artificial sequence
  SiRNA target sequence
atacaagaagattataaaaat

SEQ ID NO: 2784 - DNA, 21 bp, Artificial sequence
  SiRNA target sequence
tacaagaagattataaaaatg

SEQ ID NO: 2785 - DNA, 21 bp, Artificial sequence
  SiRNA target sequence
acaagaagattataaaaatgc

SEQ ID NO: 2786 - DNA, 21 bp, Artificial sequence
  SiRNA target sequence
caagaagattataaaaatgct

SEQ ID NO: 2787 - DNA, 21 bp, Artificial sequence
  SiRNA target sequence
aagaagattataaaaatgcta

SEQ ID NO: 2788 - DNA, 21 bp, Artificial sequence
  SiRNA target sequence
agaagattataaaaatgctat

SEQ ID NO: 2789 - DNA, 21 bp, Artificial sequence
  SiRNA target sequence
gaagattataaaaatgctatt

SEQ ID NO: 2790 - DNA, 21 bp, Artificial sequence
  SiRNA target sequence
aagattataaaaatgctattc

SEQ ID NO: 2791 - DNA, 21 bp, Artificial sequence
  SiRNA target sequence
agattataaaaatgctattct

SEQ ID NO: 2792 - DNA, 21 bp, Artificial sequence
  SiRNA target sequence
gattataaaaatgctattctg

SEQ ID NO: 2793 - DNA, 21 bp, Artificial sequence
  SiRNA target sequence
attataaaaatgctattctgt

SEQ ID NO: 2794 - DNA, 21 bp, Artificial sequence
  SiRNA target sequence
ttataaaaatgctattctgtt

SEQ ID NO: 2795 - DNA, 21 bp, Artificial sequence
  SiRNA target sequence
tataaaaatgctattctgttg

SEQ ID NO: 2796 - DNA, 21 bp, Artificial sequence
  SiRNA target sequence
ataaaaatgctattctgttgt

SEQ ID NO: 2797 - DNA, 21 bp, Artificial sequence
  SiRNA target sequence
taaaaatgctattctgttgta

SEQ ID NO: 2798 - DNA, 21 bp, Artificial sequence
  SiRNA target sequence
aaaaatgctattctgttgtac

SEQ ID NO: 2799 - DNA, 21 bp, Artificial sequence
  SiRNA target sequence
aaaatgctattctgttgtaca

SEQ ID NO: 2800 - DNA, 21 bp, Artificial sequence
  SiRNA target sequence
aaatgctattctgttgtacac

SEQ ID NO: 2801 - DNA, 21 bp, Artificial sequence
  SiRNA target sequence
aatgctattctgttgtacact

SEQ ID NO: 2802 - DNA, 21 bp, Artificial sequence
  SiRNA target sequence
atgctattctgttgtacacta

SEQ ID NO: 2803 - DNA, 21 bp, Artificial sequence
  SiRNA target sequence
tgctattctgttgtacactaa

SEQ ID NO: 2804 - DNA, 21 bp, Artificial sequence
  SiRNA target sequence
gctattctgttgtacactaaa

SEQ ID NO: 2805 - DNA, 21 bp, Artificial sequence
  SiRNA target sequence
ctattctgttgtacactaaat

SEQ ID NO: 2806 - DNA, 21 bp, Artificial sequence
  SiRNA target sequence
tattctgttgtacactaaatg

SEQ ID NO: 2807 - DNA, 21 bp, Artificial sequence
  SiRNA target sequence
attctgttgtacactaaatgt

SEQ ID NO: 2808 - DNA, 21 bp, Artificial sequence
  SiRNA target sequence
ttctgttgtacactaaatgta

SEQ ID NO: 2809 - DNA, 21 bp, Artificial sequence
  SiRNA target sequence
tctgttgtacactaaatgtaa

SEQ ID NO: 2810 - DNA, 21 bp, Artificial sequence
  SiRNA target sequence
ctgttgtacactaaatgtaaa

SEQ ID NO: 2811 - DNA, 21 bp, Artificial sequence
  SiRNA target sequence
tgttgtacactaaatgtaaat

SEQ ID NO: 2812 - DNA, 21 bp, Artificial sequence
  SiRNA target sequence
gttgtacactaaatgtaaata

SEQ ID NO: 2813 - DNA, 21 bp, Artificial sequence
  SiRNA target sequence
ttgtacactaaatgtaaatat

SEQ ID NO: 2814 - DNA, 21 bp, Artificial sequence
  SiRNA target sequence
tgtacactaaatgtaaatata

SEQ ID NO: 2815 - DNA, 21 bp, Artificial sequence
  SiRNA target sequence
gtacactaaatgtaaatatat

SEQ ID NO: 2816 - DNA, 21 bp, Artificial sequence
  SiRNA target sequence
tacactaaatgtaaatatatg

SEQ ID NO: 2817 - DNA, 21 bp, Artificial sequence
  SiRNA target sequence
acactaaatgtaaatatatga

SEQ ID NO: 2818 - DNA, 21 bp, Artificial sequence
  SiRNA target sequence
cactaaatgtaaatatatgaa

SEQ ID NO: 2819 - DNA, 21 bp, Artificial sequence
  SiRNA target sequence
actaaatgtaaatatatgaaa

SEQ ID NO: 2820 - DNA, 21 bp, Artificial sequence
  SiRNA target sequence
ctaaatgtaaatatatgaaaa

SEQ ID NO: 2821 - DNA, 21 bp, Artificial sequence
  SiRNA target sequence
taaatgtaaatatatgaaaag

SEQ ID NO: 2822 - DNA, 21 bp, Artificial sequence
  SiRNA target sequence
aaatgtaaatatatgaaaagt

SEQ ID NO: 2823 - DNA, 21 bp, Artificial sequence
  SiRNA target sequence
aatgtaaatatatgaaaagtg

SEQ ID NO: 2824 - DNA, 21 bp, Artificial sequence
  SiRNA target sequence
atgtaaatatatgaaaagtga

SEQ ID NO: 2825 - DNA, 21 bp, Artificial sequence
  SiRNA target sequence
tgtaaatatatgaaaagtgat

SEQ ID NO: 2826 - DNA, 21 bp, Artificial sequence
  SiRNA target sequence
gtaaatatatgaaaagtgatg

SEQ ID NO: 2827 - DNA, 21 bp, Artificial sequence
  SiRNA target sequence
taaatatatgaaaagtgatgc

SEQ ID NO: 2828 - DNA, 21 bp, Artificial sequence
  SiRNA target sequence
aaatatatgaaaagtgatgct

SEQ ID NO: 2829 - DNA, 21 bp, Artificial sequence
  SiRNA target sequence
aatatatgaaaagtgatgctg

SEQ ID NO: 2830 - DNA, 21 bp, Artificial sequence
  SiRNA target sequence
atatatgaaaagtgatgctga

SEQ ID NO: 2831 - DNA, 21 bp, Artificial sequence
  SiRNA target sequence
tatatgaaaagtgatgctgaa

SEQ ID NO: 2832 - DNA, 21 bp, Artificial sequence
  SiRNA target sequence
atatgaaaagtgatgctgaaa

SEQ ID NO: 2833 - DNA, 21 bp, Artificial sequence
  SiRNA target sequence
tatgaaaagtgatgctgaaat

SEQ ID NO: 2834 - DNA, 21 bp, Artificial sequence
  SiRNA target sequence
atgaaaagtgatgctgaaatt

SEQ ID NO: 2835 - DNA, 21 bp, Artificial sequence
  SiRNA target sequence
tgaaaagtgatgctgaaattc

SEQ ID NO: 2836 - DNA, 21 bp, Artificial sequence
  SiRNA target sequence
gaaaagtgatgctgaaattct

SEQ ID NO: 2837 - DNA, 21 bp, Artificial sequence
  SiRNA target sequence
aaaagtgatgctgaaattctt

SEQ ID NO: 2838 - DNA, 21 bp, Artificial sequence
  SiRNA target sequence
aaagtgatgctgaaattctta

SEQ ID NO: 2839 - DNA, 21 bp, Artificial sequence
  SiRNA target sequence
aagtgatgctgaaattcttac

SEQ ID NO: 2840 - DNA, 21 bp, Artificial sequence
  SiRNA target sequence
agtgatgctgaaattcttact

SEQ ID NO: 2841 - DNA, 21 bp, Artificial sequence
  SiRNA target sequence
gtgatgctgaaattcttacta

SEQ ID NO: 2842 - DNA, 21 bp, Artificial sequence
  SiRNA target sequence
tgatgctgaaattcttactaa

SEQ ID NO: 2843 - DNA, 21 bp, Artificial sequence
  SiRNA target sequence
gatgctgaaattcttactaaa

SEQ ID NO: 2844 - DNA, 21 bp, Artificial sequence
  SiRNA target sequence
atgctgaaattcttactaaaa

SEQ ID NO: 2845 - DNA, 21 bp, Artificial sequence
  SiRNA target sequence
tgctgaaattcttactaaaat

SEQ ID NO: 2846 - DNA, 21 bp, Artificial sequence
  SiRNA target sequence
gctgaaattcttactaaaatt

SEQ ID NO: 2847 - DNA, 21 bp, Artificial sequence
  SiRNA target sequence
ctgaaattcttactaaaatta

SEQ ID NO: 2848 - DNA, 21 bp, Artificial sequence
  SiRNA target sequence
tgaaattcttactaaaattag

SEQ ID NO: 2849 - DNA, 21 bp, Artificial sequence
  SiRNA target sequence
gaaattcttactaaaattagt

SEQ ID NO: 2850 - DNA, 21 bp, Artificial sequence
  SiRNA target sequence
aaattcttactaaaattagtc

SEQ ID NO: 2851 - DNA, 21 bp, Artificial sequence
  SiRNA target sequence
aattcttactaaaattagtct

SEQ ID NO: 2852 - DNA, 21 bp, Artificial sequence
  SiRNA target sequence
attcttactaaaattagtctc

SEQ ID NO: 2853 - DNA, 21 bp, Artificial sequence
  SiRNA target sequence
ttcttactaaaattagtctct

SEQ ID NO: 2854 - DNA, 21 bp, Artificial sequence
  SiRNA target sequence
tcttactaaaattagtctctg

SEQ ID NO: 2855 - DNA, 21 bp, Artificial sequence
  SiRNA target sequence
cttactaaaattagtctctgt

SEQ ID NO: 2856 - DNA, 21 bp, Artificial sequence
  SiRNA target sequence
ttactaaaattagtctctgta

SEQ ID NO: 2857 - DNA, 21 bp, Artificial sequence
  SiRNA target sequence
tactaaaattagtctctgtaa

SEQ ID NO: 2858 - DNA, 21 bp, Artificial sequence
  SiRNA target sequence
actaaaattagtctctgtaat

SEQ ID NO: 2859 - DNA, 21 bp, Artificial sequence
  SiRNA target sequence
ctaaaattagtctctgtaatt

SEQ ID NO: 2860 - DNA, 21 bp, Artificial sequence
  SiRNA target sequence
taaaattagtctctgtaatta

SEQ ID NO: 2861 - DNA, 21 bp, Artificial sequence
  SiRNA target sequence
aaaattagtctctgtaattat

SEQ ID NO: 2862 - DNA, 21 bp, Artificial sequence
  SiRNA target sequence
aaattagtctctgtaattatt

SEQ ID NO: 2863 - DNA, 21 bp, Artificial sequence
  SiRNA target sequence
aattagtctctgtaattattt

SEQ ID NO: 2864 - DNA, 21 bp, Artificial sequence
  SiRNA target sequence
attagtctctgtaattatttc

SEQ ID NO: 2865 - DNA, 21 bp, Artificial sequence
  SiRNA target sequence
ttagtctctgtaattatttct

SEQ ID NO: 2866 - DNA, 21 bp, Artificial sequence
  SiRNA target sequence
tagtctctgtaattatttctt

SEQ ID NO: 2867 - DNA, 21 bp, Artificial sequence
  SiRNA target sequence
agtctctgtaattatttctta

SEQ ID NO: 2868 - DNA, 21 bp, Artificial sequence
  SiRNA target sequence
gtctctgtaattatttcttaa

SEQ ID NO: 2869 - DNA, 21 bp, Artificial sequence
  SiRNA target sequence
tctctgtaattatttcttaaa

SEQ ID NO: 2870 - DNA, 21 bp, Artificial sequence
  SiRNA target sequence
ctctgtaattatttcttaaaa

SEQ ID NO: 2871 - DNA, 21 bp, Artificial sequence
  SiRNA target sequence
tctgtaattatttcttaaaaa

SEQ ID NO: 2872 - DNA, 21 bp, Artificial sequence
  SiRNA target sequence
ctgtaattatttcttaaaaaa

SEQ ID NO: 2873 - DNA, 21 bp, Artificial sequence
  SiRNA target sequence
tgtaattatttcttaaaaaat

SEQ ID NO: 2874 - DNA, 21 bp, Artificial sequence
  SiRNA target sequence
gtaattatttcttaaaaaatt

SEQ ID NO: 2875 - DNA, 21 bp, Artificial sequence
  SiRNA target sequence
taattatttcttaaaaaatta

SEQ ID NO: 2876 - DNA, 21 bp, Artificial sequence
  SiRNA target sequence
aattatttcttaaaaaattat

SEQ ID NO: 2877 - DNA, 21 bp, Artificial sequence
  SiRNA target sequence
attatttcttaaaaaattatc

SEQ ID NO: 2878 - DNA, 21 bp, Artificial sequence
  SiRNA target sequence
ttatttcttaaaaaattatca

SEQ ID NO: 2879 - DNA, 21 bp, Artificial sequence
  SiRNA target sequence
tatttcttaaaaaattatcaa

SEQ ID NO: 2880 - DNA, 21 bp, Artificial sequence
  SiRNA target sequence
atttcttaaaaaattatcaag

SEQ ID NO: 2881 - DNA, 21 bp, Artificial sequence
  SiRNA target sequence
tttcttaaaaaattatcaaga

SEQ ID NO: 2882 - DNA, 21 bp, Artificial sequence
  SiRNA target sequence
ttcttaaaaaattatcaagaa

SEQ ID NO: 2883 - DNA, 21 bp, Artificial sequence
  SiRNA target sequence
tcttaaaaaattatcaagaag

SEQ ID NO: 2884 - DNA, 21 bp, Artificial sequence
  SiRNA target sequence
cttaaaaaattatcaagaagt

SEQ ID NO: 2885 - DNA, 21 bp, Artificial sequence
  SiRNA target sequence
ttaaaaaattatcaagaagtt

SEQ ID NO: 2886 - DNA, 21 bp, Artificial sequence
  SiRNA target sequence
taaaaaattatcaagaagtta

SEQ ID NO: 2887 - DNA, 21 bp, Artificial sequence
  SiRNA target sequence
aaaaaattatcaagaagttat

SEQ ID NO: 2888 - DNA, 21 bp, Artificial sequence
  SiRNA target sequence
aaaaattatcaagaagttata

SEQ ID NO: 2889 - DNA, 21 bp, Artificial sequence
  SiRNA target sequence
aaaattatcaagaagttataa

SEQ ID NO: 2890 - DNA, 21 bp, Artificial sequence
  SiRNA target sequence
aaattatcaagaagttataaa

SEQ ID NO: 2891 - DNA, 21 bp, Artificial sequence
  SiRNA target sequence
aattatcaagaagttataaat

SEQ ID NO: 2892 - DNA, 21 bp, Artificial sequence
  SiRNA target sequence
attatcaagaagttataaata

SEQ ID NO: 2893 - DNA, 21 bp, Artificial sequence
  SiRNA target sequence
ttatcaagaagttataaataa

SEQ ID NO: 2894 - DNA, 21 bp, Artificial sequence
  SiRNA target sequence
tatcaagaagttataaataat

SEQ ID NO: 2895 - DNA, 21 bp, Artificial sequence
  SiRNA target sequence
atcaagaagttataaataatt

SEQ ID NO: 2896 - DNA, 21 bp, Artificial sequence
  SiRNA target sequence
tcaagaagttataaataattc

SEQ ID NO: 2897 - DNA, 21 bp, Artificial sequence
  SiRNA target sequence
caagaagttataaataattct

SEQ ID NO: 2898 - DNA, 21 bp, Artificial sequence
  SiRNA target sequence
aagaagttataaataattctt

SEQ ID NO: 2899 - DNA, 21 bp, Artificial sequence
  SiRNA target sequence
agaagttataaataattcttt

SEQ ID NO: 2900 - DNA, 21 bp, Artificial sequence
  SiRNA target sequence
gaagttataaataattcttta

SEQ ID NO: 2901 - DNA, 21 bp, Artificial sequence
  SiRNA target sequence
aagttataaataattctttat

SEQ ID NO: 2902 - DNA, 21 bp, Artificial sequence
  SiRNA target sequence
agttataaataattctttatt

SEQ ID NO: 2903 - DNA, 21 bp, Artificial sequence
  SiRNA target sequence
gttataaataattctttattt

SEQ ID NO: 2904 - DNA, 21 bp, Artificial sequence
  SiRNA target sequence
ttataaataattctttattta

SEQ ID NO: 2905 - DNA, 21 bp, Artificial sequence
  SiRNA target sequence
tataaataattctttatttaa

SEQ ID NO: 2906 - DNA, 21 bp, Artificial sequence
  SiRNA target sequence
ataaataattctttatttaag

SEQ ID NO: 2907 - DNA, 21 bp, Artificial sequence
  SiRNA target sequence
taaataattctttatttaaga

SEQ ID NO: 2908 - DNA, 21 bp, Artificial sequence
  SiRNA target sequence
aaataattctttatttaagac

SEQ ID NO: 2909 - DNA, 21 bp, Artificial sequence
  SiRNA target sequence
aataattctttatttaagaca

SEQ ID NO: 2910 - DNA, 21 bp, Artificial sequence
  SiRNA target sequence
ataattctttatttaagacaa

SEQ ID NO: 2911 - DNA, 21 bp, Artificial sequence
  SiRNA target sequence
taattctttatttaagacaaa

SEQ ID NO: 2912 - DNA, 21 bp, Artificial sequence
  SiRNA target sequence
aattctttatttaagacaaat

SEQ ID NO: 2913 - DNA, 21 bp, Artificial sequence
  SiRNA target sequence
attctttatttaagacaaata

SEQ ID NO: 2914 - DNA, 21 bp, Artificial sequence
  SiRNA target sequence
ttctttatttaagacaaataa

SEQ ID NO: 2915 - DNA, 21 bp, Artificial sequence
  SiRNA target sequence
tctttatttaagacaaataat

SEQ ID NO: 2916 - DNA, 21 bp, Artificial sequence
  SiRNA target sequence
ctttatttaagacaaataata

SEQ ID NO: 2917 - DNA, 21 bp, Artificial sequence
  SiRNA target sequence
tttatttaagacaaataataa

SEQ ID NO: 2918 - DNA, 21 bp, Artificial sequence
  SiRNA target sequence
ttatttaagacaaataataaa

SEQ ID NO: 2919 - DNA, 21 bp, Artificial sequence
  SiRNA target sequence
tatttaagacaaataataaag

SEQ ID NO: 2920 - DNA, 21 bp, Artificial sequence
  SiRNA target sequence
atttaagacaaataataaaga

SEQ ID NO: 2921 - DNA, 21 bp, Artificial sequence
  SiRNA target sequence
tttaagacaaataataaagat

SEQ ID NO: 2922 - DNA, 21 bp, Artificial sequence
  SiRNA target sequence
ttaagacaaataataaagatc

SEQ ID NO: 2923 - DNA, 21 bp, Artificial sequence
  SiRNA target sequence
taagacaaataataaagatct

SEQ ID NO: 2924 - DNA, 21 bp, Artificial sequence
  SiRNA target sequence
aagacaaataataaagatcta

SEQ ID NO: 2925 - DNA, 21 bp, Artificial sequence
  SiRNA target sequence
agacaaataataaagatctaa

SEQ ID NO: 2926 - DNA, 21 bp, Artificial sequence
  SiRNA target sequence
gacaaataataaagatctaat

SEQ ID NO: 2927 - DNA, 21 bp, Artificial sequence
  SiRNA target sequence
acaaataataaagatctaata

SEQ ID NO: 2928 - DNA, 21 bp, Artificial sequence
  SiRNA target sequence
caaataataaagatctaataa

SEQ ID NO: 2929 - DNA, 21 bp, Artificial sequence
  SiRNA target sequence
aaataataaagatctaataaa

SEQ ID NO: 2930 - DNA, 21 bp, Artificial sequence
  SiRNA target sequence
aataataaagatctaataaaa

SEQ ID NO: 2931 - DNA, 21 bp, Artificial sequence
  SiRNA target sequence
ataataaagatctaataaaaa

SEQ ID NO: 2932 - DNA, 21 bp, Artificial sequence
  SiRNA target sequence
taataaagatctaataaaaat

SEQ ID NO: 2933 - DNA, 21 bp, Artificial sequence
  SiRNA target sequence
aataaagatctaataaaaata

SEQ ID NO: 2934 - DNA, 21 bp, Artificial sequence
  SiRNA target sequence
ataaagatctaataaaaataa

SEQ ID NO: 2935 - DNA, 21 bp, Artificial sequence
  SiRNA target sequence
taaagatctaataaaaataag

SEQ ID NO: 2936 - DNA, 21 bp, Artificial sequence
  SiRNA target sequence
aaagatctaataaaaataaga

SEQ ID NO: 2937 - DNA, 21 bp, Artificial sequence
  SiRNA target sequence
aagatctaataaaaataagat

SEQ ID NO: 2938 - DNA, 21 bp, Artificial sequence
  SiRNA target sequence
agatctaataaaaataagatc

SEQ ID NO: 2939 - DNA, 21 bp, Artificial sequence
  SiRNA target sequence
gatctaataaaaataagatct

SEQ ID NO: 2940 - DNA, 21 bp, Artificial sequence
  SiRNA target sequence
atctaataaaaataagatctg

SEQ ID NO: 2941 - DNA, 21 bp, Artificial sequence
  SiRNA target sequence
tctaataaaaataagatctga

SEQ ID NO: 2942 - DNA, 21 bp, Artificial sequence
  SiRNA target sequence
ctaataaaaataagatctgaa

SEQ ID NO: 2943 - DNA, 21 bp, Artificial sequence
  SiRNA target sequence
taataaaaataagatctgaat

SEQ ID NO: 2944 - DNA, 21 bp, Artificial sequence
  SiRNA target sequence
aataaaaataagatctgaatg

SEQ ID NO: 2945 - DNA, 21 bp, Artificial sequence
  SiRNA target sequence
ataaaaataagatctgaatgt

SEQ ID NO: 2946 - DNA, 21 bp, Artificial sequence
  SiRNA target sequence
taaaaataagatctgaatgtt

SEQ ID NO: 2947 - DNA, 21 bp, Artificial sequence
  SiRNA target sequence
aaaaataagatctgaatgtta

SEQ ID NO: 2948 - DNA, 21 bp, Artificial sequence
  SiRNA target sequence
aaaataagatctgaatgttac

SEQ ID NO: 2949 - DNA, 21 bp, Artificial sequence
  SiRNA target sequence
aaataagatctgaatgttaca

SEQ ID NO: 2950 - DNA, 21 bp, Artificial sequence
  SiRNA target sequence
aataagatctgaatgttacaa

SEQ ID NO: 2951 - DNA, 21 bp, Artificial sequence
  SiRNA target sequence
ataagatctgaatgttacaag

SEQ ID NO: 2952 - DNA, 21 bp, Artificial sequence
  SiRNA target sequence
taagatctgaatgttacaagc

SEQ ID NO: 2953 - DNA, 21 bp, Artificial sequence
  SiRNA target sequence
aagatctgaatgttacaagca

SEQ ID NO: 2954 - DNA, 21 bp, Artificial sequence
  SiRNA target sequence
agatctgaatgttacaagcag

SEQ ID NO: 2955 - DNA, 21 bp, Artificial sequence
  SiRNA target sequence
gatctgaatgttacaagcaga

SEQ ID NO: 2956 - DNA, 21 bp, Artificial sequence
  SiRNA target sequence
atctgaatgttacaagcagat

SEQ ID NO: 2957 - DNA, 21 bp, Artificial sequence
  SiRNA target sequence
tctgaatgttacaagcagatg

SEQ ID NO: 2958 - DNA, 21 bp, Artificial sequence
  SiRNA target sequence
ctgaatgttacaagcagatgg

SEQ ID NO: 2959 - DNA, 21 bp, Artificial sequence
  SiRNA target sequence
tgaatgttacaagcagatggg

SEQ ID NO: 2960 - DNA, 21 bp, Artificial sequence
  SiRNA target sequence
gaatgttacaagcagatggga

SEQ ID NO: 2961 - DNA, 21 bp, Artificial sequence
  SiRNA target sequence
aatgttacaagcagatgggaa

SEQ ID NO: 2962 - DNA, 21 bp, Artificial sequence
  SiRNA target sequence
atgttacaagcagatgggaaa

SEQ ID NO: 2963 - DNA, 21 bp, Artificial sequence
  SiRNA target sequence
tgttacaagcagatgggaaat

SEQ ID NO: 2964 - DNA, 21 bp, Artificial sequence
  SiRNA target sequence
gttacaagcagatgggaaata

SEQ ID NO: 2965 - DNA, 21 bp, Artificial sequence
  SiRNA target sequence
ttacaagcagatgggaaataa

SEQ ID NO: 2966 - DNA, 21 bp, Artificial sequence
  SiRNA target sequence
tacaagcagatgggaaataaa

SEQ ID NO: 2967 - DNA, 21 bp, Artificial sequence
  SiRNA target sequence
acaagcagatgggaaataaaa

SEQ ID NO: 2968 - DNA, 21 bp, Artificial sequence
  SiRNA target sequence
caagcagatgggaaataaaaa

SEQ ID NO: 2969 - DNA, 21 bp, Artificial sequence
  SiRNA target sequence
aagcagatgggaaataaaaaa

SEQ ID NO: 2970 - DNA, 21 bp, Artificial sequence
  SiRNA target sequence
agcagatgggaaataaaaaaa

SEQ ID NO: 2971 - DNA, 21 bp, Artificial sequence
  SiRNA target sequence
gcagatgggaaataaaaaaaa

SEQ ID NO: 2972 - DNA, 21 bp, Artificial sequence
  SiRNA target sequence
cagatgggaaataaaaaaaaa

SEQ ID NO: 2973 - DNA, 21 bp, Artificial sequence
  SiRNA target sequence
agatgggaaataaaaaaaaat

SEQ ID NO: 2974 - DNA, 21 bp, Artificial sequence
  SiRNA target sequence
gatgggaaataaaaaaaaatt

SEQ ID NO: 2975 - DNA, 21 bp, Artificial sequence
  SiRNA target sequence
atgggaaataaaaaaaaattt

SEQ ID NO: 2976 - DNA, 21 bp, Artificial sequence
  SiRNA target sequence
tgggaaataaaaaaaaatttc

SEQ ID NO: 2977 - DNA, 21 bp, Artificial sequence
  SiRNA target sequence
gggaaataaaaaaaaatttct

SEQ ID NO: 2978 - DNA, 21 bp, Artificial sequence
  SiRNA target sequence
ggaaataaaaaaaaatttctt

SEQ ID NO: 2979 - DNA, 21 bp, Artificial sequence
  SiRNA target sequence
gaaataaaaaaaaatttctta

SEQ ID NO: 2980 - DNA, 21 bp, Artificial sequence
  SiRNA target sequence
aaataaaaaaaaatttcttaa

SEQ ID NO: 2981 - DNA, 21 bp, Artificial sequence
  SiRNA target sequence
aataaaaaaaaatttcttaag

SEQ ID NO: 2982 - DNA, 21 bp, Artificial sequence
  SiRNA target sequence
ataaaaaaaaatttcttaagg

SEQ ID NO: 2983 - DNA, 21 bp, Artificial sequence
  SiRNA target sequence
taaaaaaaaatttcttaagga

SEQ ID NO: 2984 - DNA, 21 bp, Artificial sequence
  SiRNA target sequence
aaaaaaaaatttcttaaggat

SEQ ID NO: 2985 - DNA, 21 bp, Artificial sequence
  SiRNA target sequence
aaaaaaaatttcttaaggatt

SEQ ID NO: 2986 - DNA, 21 bp, Artificial sequence
  SiRNA target sequence
aaaaaaatttcttaaggattt

SEQ ID NO: 2987 - DNA, 21 bp, Artificial sequence
  SiRNA target sequence
aaaaaatttcttaaggattta

SEQ ID NO: 2988 - DNA, 21 bp, Artificial sequence
  SiRNA target sequence
aaaaatttcttaaggatttag

SEQ ID NO: 2989 - DNA, 21 bp, Artificial sequence
  SiRNA target sequence
aaaatttcttaaggatttagc

SEQ ID NO: 2990 - DNA, 21 bp, Artificial sequence
  SiRNA target sequence
aaatttcttaaggatttagca

SEQ ID NO: 2991 - DNA, 21 bp, Artificial sequence
  SiRNA target sequence
aatttcttaaggatttagcac

SEQ ID NO: 2992 - DNA, 21 bp, Artificial sequence
  SiRNA target sequence
atttcttaaggatttagcact

SEQ ID NO: 2993 - DNA, 21 bp, Artificial sequence
  SiRNA target sequence
tttcttaaggatttagcactt

SEQ ID NO: 2994 - DNA, 21 bp, Artificial sequence
  SiRNA target sequence
ttcttaaggatttagcacttt

SEQ ID NO: 2995 - DNA, 21 bp, Artificial sequence
  SiRNA target sequence
tcttaaggatttagcacttta

SEQ ID NO: 2996 - DNA, 21 bp, Artificial sequence
  SiRNA target sequence
cttaaggatttagcactttat

SEQ ID NO: 2997 - DNA, 21 bp, Artificial sequence
  SiRNA target sequence
ttaaggatttagcactttatg

SEQ ID NO: 2998 - DNA, 21 bp, Artificial sequence
  SiRNA target sequence
taaggatttagcactttatga

SEQ ID NO: 2999 - DNA, 21 bp, Artificial sequence
  SiRNA target sequence
aaggatttagcactttatgaa

SEQ ID NO: 3000 - DNA, 21 bp, Artificial sequence
  SiRNA target sequence
aggatttagcactttatgaaa

SEQ ID NO: 3001 - DNA, 21 bp, Artificial sequence
  SiRNA target sequence
ggatttagcactttatgaaac

SEQ ID NO: 3002 - DNA, 21 bp, Artificial sequence
  SiRNA target sequence
gatttagcactttatgaaaca

SEQ ID NO: 3003 - DNA, 21 bp, Artificial sequence
  SiRNA target sequence
atttagcactttatgaaacat

SEQ ID NO: 3004 - DNA, 21 bp, Artificial sequence
  SiRNA target sequence
tttagcactttatgaaacatt

SEQ ID NO: 3005 - DNA, 21 bp, Artificial sequence
  SiRNA target sequence
ttagcactttatgaaacattt

SEQ ID NO: 3006 - DNA, 21 bp, Artificial sequence
  SiRNA target sequence
tagcactttatgaaacatttg

SEQ ID NO: 3007 - DNA, 21 bp, Artificial sequence
  SiRNA target sequence
agcactttatgaaacatttgc

SEQ ID NO: 3008 - DNA, 21 bp, Artificial sequence
  SiRNA target sequence
gcactttatgaaacatttgct

SEQ ID NO: 3009 - DNA, 21 bp, Artificial sequence
  SiRNA target sequence
cactttatgaaacatttgcta

SEQ ID NO: 3010 - DNA, 21 bp, Artificial sequence
  SiRNA target sequence
actttatgaaacatttgctaa

SEQ ID NO: 3011 - DNA, 21 bp, Artificial sequence
  SiRNA target sequence
ctttatgaaacatttgctaat

SEQ ID NO: 3012 - DNA, 21 bp, Artificial sequence
  SiRNA target sequence
tttatgaaacatttgctaata

SEQ ID NO: 3013 - DNA, 21 bp, Artificial sequence
  SiRNA target sequence
ttatgaaacatttgctaataa

SEQ ID NO: 3014 - DNA, 21 bp, Artificial sequence
  SiRNA target sequence
tatgaaacatttgctaataat

SEQ ID NO: 3015 - DNA, 21 bp, Artificial sequence
  SiRNA target sequence
atgaaacatttgctaataata

SEQ ID NO: 3016 - DNA, 21 bp, Artificial sequence
  SiRNA target sequence
tgaaacatttgctaataataa

SEQ ID NO: 3017 - DNA, 21 bp, Artificial sequence
  SiRNA target sequence
gaaacatttgctaataataaa

SEQ ID NO: 3018 - DNA, 21 bp, Artificial sequence
  SiRNA target sequence
aaacatttgctaataataaag

SEQ ID NO: 3019 - DNA, 21 bp, Artificial sequence
  SiRNA target sequence
aacatttgctaataataaaga

SEQ ID NO: 3020 - DNA, 21 bp, Artificial sequence
  SiRNA target sequence
acatttgctaataataaagaa

SEQ ID NO: 3021 - DNA, 21 bp, Artificial sequence
  SiRNA target sequence
catttgctaataataaagaag

SEQ ID NO: 3022 - DNA, 21 bp, Artificial sequence
  SiRNA target sequence
atttgctaataataaagaagt

SEQ ID NO: 3023 - DNA, 21 bp, Artificial sequence
  SiRNA target sequence
tttgctaataataaagaagtc

SEQ ID NO: 3024 - DNA, 21 bp, Artificial sequence
  SiRNA target sequence
ttgctaataataaagaagtcc

SEQ ID NO: 3025 - DNA, 21 bp, Artificial sequence
  SiRNA target sequence
tgctaataataaagaagtcca

SEQ ID NO: 3026 - DNA, 21 bp, Artificial sequence
  SiRNA target sequence
gctaataataaagaagtccaa

SEQ ID NO: 3027 - DNA, 21 bp, Artificial sequence
  SiRNA target sequence
ctaataataaagaagtccaag

SEQ ID NO: 3028 - DNA, 21 bp, Artificial sequence
  SiRNA target sequence
taataataaagaagtccaaga

SEQ ID NO: 3029 - DNA, 21 bp, Artificial sequence
  SiRNA target sequence
aataataaagaagtccaagat

SEQ ID NO: 3030 - DNA, 21 bp, Artificial sequence
  SiRNA target sequence
ataataaagaagtccaagatg

SEQ ID NO: 3031 - DNA, 21 bp, Artificial sequence
  SiRNA target sequence
taataaagaagtccaagatga

SEQ ID NO: 3032 - DNA, 21 bp, Artificial sequence
  SiRNA target sequence
aataaagaagtccaagatgaa

SEQ ID NO: 3033 - DNA, 21 bp, Artificial sequence
  SiRNA target sequence
ataaagaagtccaagatgaaa

SEQ ID NO: 3034 - DNA, 21 bp, Artificial sequence
  SiRNA target sequence
taaagaagtccaagatgaaat

SEQ ID NO: 3035 - DNA, 21 bp, Artificial sequence
  SiRNA target sequence
aaagaagtccaagatgaaatt

SEQ ID NO: 3036 - DNA, 21 bp, Artificial sequence
  SiRNA target sequence
aagaagtccaagatgaaatta

SEQ ID NO: 3037 - DNA, 21 bp, Artificial sequence
  SiRNA target sequence
agaagtccaagatgaaattat

SEQ ID NO: 3038 - DNA, 21 bp, Artificial sequence
  SiRNA target sequence
gaagtccaagatgaaattatg

SEQ ID NO: 3039 - DNA, 21 bp, Artificial sequence
  SiRNA target sequence
aagtccaagatgaaattatgc

SEQ ID NO: 3040 - DNA, 21 bp, Artificial sequence
  SiRNA target sequence
agtccaagatgaaattatgca

SEQ ID NO: 3041 - DNA, 21 bp, Artificial sequence
  SiRNA target sequence
gtccaagatgaaattatgcag

SEQ ID NO: 3042 - DNA, 21 bp, Artificial sequence
  SiRNA target sequence
tccaagatgaaattatgcaga

SEQ ID NO: 3043 - DNA, 21 bp, Artificial sequence
  SiRNA target sequence
ccaagatgaaattatgcagac

SEQ ID NO: 3044 - DNA, 21 bp, Artificial sequence
  SiRNA target sequence
caagatgaaattatgcagact

SEQ ID NO: 3045 - DNA, 21 bp, Artificial sequence
  SiRNA target sequence
aagatgaaattatgcagactg

SEQ ID NO: 3046 - DNA, 21 bp, Artificial sequence
  SiRNA target sequence
agatgaaattatgcagactgt

SEQ ID NO: 3047 - DNA, 21 bp, Artificial sequence
  SiRNA target sequence
gatgaaattatgcagactgtt

SEQ ID NO: 3048 - DNA, 21 bp, Artificial sequence
  SiRNA target sequence
atgaaattatgcagactgtta

SEQ ID NO: 3049 - DNA, 21 bp, Artificial sequence
  SiRNA target sequence
tgaaattatgcagactgttaa

SEQ ID NO: 3050 - DNA, 21 bp, Artificial sequence
  SiRNA target sequence
gaaattatgcagactgttaaa

SEQ ID NO: 3051 - DNA, 21 bp, Artificial sequence
  SiRNA target sequence
aaattatgcagactgttaaag

SEQ ID NO: 3052 - DNA, 21 bp, Artificial sequence
  SiRNA target sequence
aattatgcagactgttaaaga

SEQ ID NO: 3053 - DNA, 21 bp, Artificial sequence
  SiRNA target sequence
attatgcagactgttaaagaa

SEQ ID NO: 3054 - DNA, 21 bp, Artificial sequence
  SiRNA target sequence
ttatgcagactgttaaagaaa

SEQ ID NO: 3055 - DNA, 21 bp, Artificial sequence
  SiRNA target sequence
tatgcagactgttaaagaaat

SEQ ID NO: 3056 - DNA, 21 bp, Artificial sequence
  SiRNA target sequence
atgcagactgttaaagaaatt

SEQ ID NO: 3057 - DNA, 21 bp, Artificial sequence
  SiRNA target sequence
tgcagactgttaaagaaattt

SEQ ID NO: 3058 - DNA, 21 bp, Artificial sequence
  SiRNA target sequence
gcagactgttaaagaaatttg

SEQ ID NO: 3059 - DNA, 21 bp, Artificial sequence
  SiRNA target sequence
cagactgttaaagaaatttgt

SEQ ID NO: 3060 - DNA, 21 bp, Artificial sequence
  SiRNA target sequence
agactgttaaagaaatttgtg

SEQ ID NO: 3061 - DNA, 21 bp, Artificial sequence
  SiRNA target sequence
gactgttaaagaaatttgtga

SEQ ID NO: 3062 - DNA, 21 bp, Artificial sequence
  SiRNA target sequence
actgttaaagaaatttgtgaa

SEQ ID NO: 3063 - DNA, 21 bp, Artificial sequence
  SiRNA target sequence
ctgttaaagaaatttgtgaag

SEQ ID NO: 3064 - DNA, 21 bp, Artificial sequence
  SiRNA target sequence
tgttaaagaaatttgtgaaga

SEQ ID NO: 3065 - DNA, 21 bp, Artificial sequence
  SiRNA target sequence
gttaaagaaatttgtgaagaa

SEQ ID NO: 3066 - DNA, 21 bp, Artificial sequence
  SiRNA target sequence
ttaaagaaatttgtgaagaag

SEQ ID NO: 3067 - DNA, 21 bp, Artificial sequence
  SiRNA target sequence
taaagaaatttgtgaagaaga

SEQ ID NO: 3068 - DNA, 21 bp, Artificial sequence
  SiRNA target sequence
aaagaaatttgtgaagaagaa

SEQ ID NO: 3069 - DNA, 21 bp, Artificial sequence
  SiRNA target sequence
aagaaatttgtgaagaagaag

SEQ ID NO: 3070 - DNA, 21 bp, Artificial sequence
  SiRNA target sequence
agaaatttgtgaagaagaagt

SEQ ID NO: 3071 - DNA, 21 bp, Artificial sequence
  SiRNA target sequence
gaaatttgtgaagaagaagtg

SEQ ID NO: 3072 - DNA, 21 bp, Artificial sequence
  SiRNA target sequence
aaatttgtgaagaagaagtga

SEQ ID NO: 3073 - DNA, 21 bp, Artificial sequence
  SiRNA target sequence
aatttgtgaagaagaagtgaa

SEQ ID NO: 3074 - DNA, 21 bp, Artificial sequence
  SiRNA target sequence
atttgtgaagaagaagtgaat

SEQ ID NO: 3075 - DNA, 21 bp, Artificial sequence
  SiRNA target sequence
tttgtgaagaagaagtgaatg

SEQ ID NO: 3076 - DNA, 21 bp, Artificial sequence
  SiRNA target sequence
ttgtgaagaagaagtgaatga

SEQ ID NO: 3077 - DNA, 21 bp, Artificial sequence
  SiRNA target sequence
tgtgaagaagaagtgaatgag

SEQ ID NO: 3078 - DNA, 21 bp, Artificial sequence
  SiRNA target sequence
gtgaagaagaagtgaatgagt

SEQ ID NO: 3079 - DNA, 21 bp, Artificial sequence
  SiRNA target sequence
tgaagaagaagtgaatgagtt

SEQ ID NO: 3080 - DNA, 21 bp, Artificial sequence
  SiRNA target sequence
gaagaagaagtgaatgagttt

SEQ ID NO: 3081 - DNA, 21 bp, Artificial sequence
  SiRNA target sequence
aagaagaagtgaatgagttta

SEQ ID NO: 3082 - DNA, 21 bp, Artificial sequence
  SiRNA target sequence
agaagaagtgaatgagtttat

SEQ ID NO: 3083 - DNA, 21 bp, Artificial sequence
  SiRNA target sequence
gaagaagtgaatgagtttatt

SEQ ID NO: 3084 - DNA, 21 bp, Artificial sequence
  SiRNA target sequence
aagaagtgaatgagtttattg

SEQ ID NO: 3085 - DNA, 21 bp, Artificial sequence
  SiRNA target sequence
agaagtgaatgagtttattga

SEQ ID NO: 3086 - DNA, 21 bp, Artificial sequence
  SiRNA target sequence
gaagtgaatgagtttattgaa

SEQ ID NO: 3087 - DNA, 21 bp, Artificial sequence
  SiRNA target sequence
aagtgaatgagtttattgaac

SEQ ID NO: 3088 - DNA, 21 bp, Artificial sequence
  SiRNA target sequence
agtgaatgagtttattgaaca

SEQ ID NO: 3089 - DNA, 21 bp, Artificial sequence
  SiRNA target sequence
gtgaatgagtttattgaacaa

SEQ ID NO: 3090 - DNA, 21 bp, Artificial sequence
  SiRNA target sequence
tgaatgagtttattgaacaag

SEQ ID NO: 3091 - DNA, 21 bp, Artificial sequence
  SiRNA target sequence
gaatgagtttattgaacaaga

SEQ ID NO: 3092 - DNA, 21 bp, Artificial sequence
  SiRNA target sequence
aatgagtttattgaacaagaa

SEQ ID NO: 3093 - DNA, 21 bp, Artificial sequence
  SiRNA target sequence
atgagtttattgaacaagaag

SEQ ID NO: 3094 - DNA, 21 bp, Artificial sequence
  SiRNA target sequence
tgagtttattgaacaagaagg

SEQ ID NO: 3095 - DNA, 21 bp, Artificial sequence
  SiRNA target sequence
gagtttattgaacaagaaggt

SEQ ID NO: 3096 - DNA, 21 bp, Artificial sequence
  SiRNA target sequence
agtttattgaacaagaaggtt

SEQ ID NO: 3097 - DNA, 21 bp, Artificial sequence
  SiRNA target sequence
gtttattgaacaagaaggttt

SEQ ID NO: 3098 - DNA, 21 bp, Artificial sequence
  SiRNA target sequence
tttattgaacaagaaggttta

SEQ ID NO: 3099 - DNA, 21 bp, Artificial sequence
  SiRNA target sequence
ttattgaacaagaaggtttaa

SEQ ID NO: 3100 - DNA, 21 bp, Artificial sequence
  SiRNA target sequence
tattgaacaagaaggtttaaa

SEQ ID NO: 3101 - DNA, 21 bp, Artificial sequence
  SiRNA target sequence
attgaacaagaaggtttaaaa

SEQ ID NO: 3102 - DNA, 21 bp, Artificial sequence
  SiRNA target sequence
ttgaacaagaaggtttaaaaa

SEQ ID NO: 3103 - DNA, 21 bp, Artificial sequence
  SiRNA target sequence
tgaacaagaaggtttaaaaat

SEQ ID NO: 3104 - DNA, 21 bp, Artificial sequence
  SiRNA target sequence
gaacaagaaggtttaaaaatt

SEQ ID NO: 3105 - DNA, 21 bp, Artificial sequence
  SiRNA target sequence
aacaagaaggtttaaaaatta

SEQ ID NO: 3106 - DNA, 21 bp, Artificial sequence
  SiRNA target sequence
acaagaaggtttaaaaattaa

SEQ ID NO: 3107 - DNA, 21 bp, Artificial sequence
  SiRNA target sequence
caagaaggtttaaaaattaat

SEQ ID NO: 3108 - DNA, 21 bp, Artificial sequence
  SiRNA target sequence
aagaaggtttaaaaattaata

SEQ ID NO: 3109 - DNA, 21 bp, Artificial sequence
  SiRNA target sequence
agaaggtttaaaaattaataa

SEQ ID NO: 3110 - DNA, 21 bp, Artificial sequence
  SiRNA target sequence
gaaggtttaaaaattaataaa

SEQ ID NO: 3111 - DNA, 21 bp, Artificial sequence
  SiRNA target sequence
aaggtttaaaaattaataaag

SEQ ID NO: 3112 - DNA, 21 bp, Artificial sequence
  SiRNA target sequence
aggtttaaaaattaataaaga

SEQ ID NO: 3113 - DNA, 21 bp, Artificial sequence
  SiRNA target sequence
ggtttaaaaattaataaagaa

SEQ ID NO: 3114 - DNA, 21 bp, Artificial sequence
  SiRNA target sequence
gtttaaaaattaataaagaag

SEQ ID NO: 3115 - DNA, 21 bp, Artificial sequence
  SiRNA target sequence
tttaaaaattaataaagaaga

SEQ ID NO: 3116 - DNA, 21 bp, Artificial sequence
  SiRNA target sequence
ttaaaaattaataaagaagat

SEQ ID NO: 3117 - DNA, 21 bp, Artificial sequence
  SiRNA target sequence
taaaaattaataaagaagatg

SEQ ID NO: 3118 - DNA, 21 bp, Artificial sequence
  SiRNA target sequence
aaaaattaataaagaagatgt

SEQ ID NO: 3119 - DNA, 21 bp, Artificial sequence
  SiRNA target sequence
aaaattaataaagaagatgtg

SEQ ID NO: 3120 - DNA, 21 bp, Artificial sequence
  SiRNA target sequence
aaattaataaagaagatgtgc

SEQ ID NO: 3121 - DNA, 21 bp, Artificial sequence
  SiRNA target sequence
aattaataaagaagatgtgct

SEQ ID NO: 3122 - DNA, 21 bp, Artificial sequence
  SiRNA target sequence
attaataaagaagatgtgcta

SEQ ID NO: 3123 - DNA, 21 bp, Artificial sequence
  SiRNA target sequence
ttaataaagaagatgtgctaa

SEQ ID NO: 3124 - DNA, 21 bp, Artificial sequence
  SiRNA target sequence
taataaagaagatgtgctaag

SEQ ID NO: 3125 - DNA, 21 bp, Artificial sequence
  SiRNA target sequence
aataaagaagatgtgctaaga

SEQ ID NO: 3126 - DNA, 21 bp, Artificial sequence
  SiRNA target sequence
ataaagaagatgtgctaagag

SEQ ID NO: 3127 - DNA, 21 bp, Artificial sequence
  SiRNA target sequence
taaagaagatgtgctaagagg

SEQ ID NO: 3128 - DNA, 21 bp, Artificial sequence
  SiRNA target sequence
aaagaagatgtgctaagagga

SEQ ID NO: 3129 - DNA, 21 bp, Artificial sequence
  SiRNA target sequence
aagaagatgtgctaagaggac

SEQ ID NO: 3130 - DNA, 21 bp, Artificial sequence
  SiRNA target sequence
agaagatgtgctaagaggact

SEQ ID NO: 3131 - DNA, 21 bp, Artificial sequence
  SiRNA target sequence
gaagatgtgctaagaggactt

SEQ ID NO: 3132 - DNA, 21 bp, Artificial sequence
  SiRNA target sequence
aagatgtgctaagaggacttg

SEQ ID NO: 3133 - DNA, 21 bp, Artificial sequence
  SiRNA target sequence
agatgtgctaagaggacttgt

SEQ ID NO: 3134 - DNA, 21 bp, Artificial sequence
  SiRNA target sequence
gatgtgctaagaggacttgtt

SEQ ID NO: 3135 - DNA, 21 bp, Artificial sequence
  SiRNA target sequence
atgtgctaagaggacttgttt

SEQ ID NO: 3136 - DNA, 21 bp, Artificial sequence
  SiRNA target sequence
tgtgctaagaggacttgtttc

SEQ ID NO: 3137 - DNA, 21 bp, Artificial sequence
  SiRNA target sequence
gtgctaagaggacttgtttca

SEQ ID NO: 3138 - DNA, 21 bp, Artificial sequence
  SiRNA target sequence
tgctaagaggacttgtttcaa

SEQ ID NO: 3139 - DNA, 21 bp, Artificial sequence
  SiRNA target sequence
gctaagaggacttgtttcaat

SEQ ID NO: 3140 - DNA, 21 bp, Artificial sequence
  SiRNA target sequence
ctaagaggacttgtttcaata

SEQ ID NO: 3141 - DNA, 21 bp, Artificial sequence
  SiRNA target sequence
taagaggacttgtttcaataa

SEQ ID NO: 3142 - DNA, 21 bp, Artificial sequence
  SiRNA target sequence
aagaggacttgtttcaataaa

SEQ ID NO: 3143 - DNA, 21 bp, Artificial sequence
  SiRNA target sequence
agaggacttgtttcaataaaa

SEQ ID NO: 3144 - DNA, 21 bp, Artificial sequence
  SiRNA target sequence
gaggacttgtttcaataaaaa

SEQ ID NO: 3145 - DNA, 21 bp, Artificial sequence
  SiRNA target sequence
aggacttgtttcaataaaaaa

SEQ ID NO: 3146 - DNA, 21 bp, Artificial sequence
  SiRNA target sequence
ggacttgtttcaataaaaaat

SEQ ID NO: 3147 - DNA, 21 bp, Artificial sequence
  SiRNA target sequence
gacttgtttcaataaaaaata

SEQ ID NO: 3148 - DNA, 21 bp, Artificial sequence
  SiRNA target sequence
acttgtttcaataaaaaatat

SEQ ID NO: 3149 - DNA, 21 bp, Artificial sequence
  SiRNA target sequence
cttgtttcaataaaaaatata

SEQ ID NO: 3150 - DNA, 21 bp, Artificial sequence
  SiRNA target sequence
ttgtttcaataaaaaatataa

SEQ ID NO: 3151 - DNA, 21 bp, Artificial sequence
  SiRNA target sequence
tgtttcaataaaaaatataaa

SEQ ID NO: 3152 - DNA, 21 bp, Artificial sequence
  SiRNA target sequence
gtttcaataaaaaatataaat

SEQ ID NO: 3153 - DNA, 21 bp, Artificial sequence
  SiRNA target sequence
tttcaataaaaaatataaatg

SEQ ID NO: 3154 - DNA, 21 bp, Artificial sequence
  SiRNA target sequence
ttcaataaaaaatataaatga

SEQ ID NO: 3155 - DNA, 21 bp, Artificial sequence
  SiRNA target sequence
tcaataaaaaatataaatgag

SEQ ID NO: 3156 - DNA, 21 bp, Artificial sequence
  SiRNA target sequence
caataaaaaatataaatgaga

SEQ ID NO: 3157 - DNA, 21 bp, Artificial sequence
  SiRNA target sequence
aataaaaaatataaatgagat

SEQ ID NO: 3158 - DNA, 21 bp, Artificial sequence
  SiRNA target sequence
ataaaaaatataaatgagatt

SEQ ID NO: 3159 - DNA, 21 bp, Artificial sequence
  SiRNA target sequence
taaaaaatataaatgagattt

SEQ ID NO: 3160 - DNA, 21 bp, Artificial sequence
  SiRNA target sequence
aaaaaatataaatgagattta

SEQ ID NO: 3161 - DNA, 21 bp, Artificial sequence
  SiRNA target sequence
aaaaatataaatgagatttat

SEQ ID NO: 3162 - DNA, 21 bp, Artificial sequence
  SiRNA target sequence
aaaatataaatgagatttatg

SEQ ID NO: 3163 - DNA, 21 bp, Artificial sequence
  SiRNA target sequence
aaatataaatgagatttatga

SEQ ID NO: 3164 - DNA, 21 bp, Artificial sequence
  SiRNA target sequence
aatataaatgagatttatgat

SEQ ID NO: 3165 - DNA, 21 bp, Artificial sequence
  SiRNA target sequence
atataaatgagatttatgatg

SEQ ID NO: 3166 - DNA, 21 bp, Artificial sequence
  SiRNA target sequence
tataaatgagatttatgatgc

SEQ ID NO: 3167 - DNA, 21 bp, Artificial sequence
  SiRNA target sequence
ataaatgagatttatgatgca

SEQ ID NO: 3168 - DNA, 21 bp, Artificial sequence
  SiRNA target sequence
taaatgagatttatgatgcat

SEQ ID NO: 3169 - DNA, 21 bp, Artificial sequence
  SiRNA target sequence
aaatgagatttatgatgcatt

SEQ ID NO: 3170 - DNA, 21 bp, Artificial sequence
  SiRNA target sequence
aatgagatttatgatgcattt

SEQ ID NO: 3171 - DNA, 21 bp, Artificial sequence
  SiRNA target sequence
atgagatttatgatgcatttg

SEQ ID NO: 3172 - DNA, 21 bp, Artificial sequence
  SiRNA target sequence
tgagatttatgatgcatttgg

SEQ ID NO: 3173 - DNA, 21 bp, Artificial sequence
  SiRNA target sequence
gagatttatgatgcatttgga

SEQ ID NO: 3174 - DNA, 21 bp, Artificial sequence
  SiRNA target sequence
agatttatgatgcatttggag

SEQ ID NO: 3175 - DNA, 21 bp, Artificial sequence
  SiRNA target sequence
gatttatgatgcatttggagg

SEQ ID NO: 3176 - DNA, 21 bp, Artificial sequence
  SiRNA target sequence
atttatgatgcatttggaggt

SEQ ID NO: 3177 - DNA, 21 bp, Artificial sequence
  SiRNA target sequence
tttatgatgcatttggaggta

SEQ ID NO: 3178 - DNA, 21 bp, Artificial sequence
  SiRNA target sequence
ttatgatgcatttggaggtaa

SEQ ID NO: 3179 - DNA, 21 bp, Artificial sequence
  SiRNA target sequence
tatgatgcatttggaggtaaa

SEQ ID NO: 3180 - DNA, 21 bp, Artificial sequence
  SiRNA target sequence
atgatgcatttggaggtaaat

SEQ ID NO: 3181 - DNA, 21 bp, Artificial sequence
  SiRNA target sequence
tgatgcatttggaggtaaatc

SEQ ID NO: 3182 - DNA, 21 bp, Artificial sequence
  SiRNA target sequence
gatgcatttggaggtaaatct

SEQ ID NO: 3183 - DNA, 21 bp, Artificial sequence
  SiRNA target sequence
atgcatttggaggtaaatcta

SEQ ID NO: 3184 - DNA, 21 bp, Artificial sequence
  SiRNA target sequence
tgcatttggaggtaaatctaa

SEQ ID NO: 3185 - DNA, 21 bp, Artificial sequence
  SiRNA target sequence
gcatttggaggtaaatctaag

SEQ ID NO: 3186 - DNA, 21 bp, Artificial sequence
  SiRNA target sequence
catttggaggtaaatctaaga

SEQ ID NO: 3187 - DNA, 21 bp, Artificial sequence
  SiRNA target sequence
atttggaggtaaatctaagaa

SEQ ID NO: 3188 - DNA, 21 bp, Artificial sequence
  SiRNA target sequence
tttggaggtaaatctaagaag

SEQ ID NO: 3189 - DNA, 21 bp, Artificial sequence
  SiRNA target sequence
ttggaggtaaatctaagaagt

SEQ ID NO: 3190 - DNA, 21 bp, Artificial sequence
  SiRNA target sequence
tggaggtaaatctaagaagtt

SEQ ID NO: 3191 - DNA, 21 bp, Artificial sequence
  SiRNA target sequence
ggaggtaaatctaagaagttt

SEQ ID NO: 3192 - DNA, 21 bp, Artificial sequence
  SiRNA target sequence
gaggtaaatctaagaagttta

SEQ ID NO: 3193 - DNA, 21 bp, Artificial sequence
  SiRNA target sequence
aggtaaatctaagaagtttaa

SEQ ID NO: 3194 - DNA, 21 bp, Artificial sequence
  SiRNA target sequence
ggtaaatctaagaagtttaaa

SEQ ID NO: 3195 - DNA, 21 bp, Artificial sequence
  SiRNA target sequence
gtaaatctaagaagtttaaat

SEQ ID NO: 3196 - DNA, 21 bp, Artificial sequence
  SiRNA target sequence
taaatctaagaagtttaaatt

SEQ ID NO: 3197 - DNA, 21 bp, Artificial sequence
  SiRNA target sequence
aaatctaagaagtttaaattt

SEQ ID NO: 3198 - DNA, 21 bp, Artificial sequence
  SiRNA target sequence
aatctaagaagtttaaatttt

SEQ ID NO: 3199 - DNA, 21 bp, Artificial sequence
  SiRNA target sequence
atctaagaagtttaaattttc

SEQ ID NO: 3200 - DNA, 21 bp, Artificial sequence
  SiRNA target sequence
tctaagaagtttaaattttct

SEQ ID NO: 3201 - DNA, 21 bp, Artificial sequence
  SiRNA target sequence
ctaagaagtttaaattttcta

SEQ ID NO: 3202 - DNA, 21 bp, Artificial sequence
  SiRNA target sequence
taagaagtttaaattttctaa

SEQ ID NO: 3203 - DNA, 21 bp, Artificial sequence
  SiRNA target sequence
aagaagtttaaattttctaat

SEQ ID NO: 3204 - DNA, 21 bp, Artificial sequence
  SiRNA target sequence
agaagtttaaattttctaatg

SEQ ID NO: 3205 - DNA, 21 bp, Artificial sequence
  SiRNA target sequence
gaagtttaaattttctaatga

SEQ ID NO: 3206 - DNA, 21 bp, Artificial sequence
  SiRNA target sequence
aagtttaaattttctaatgat

SEQ ID NO: 3207 - DNA, 21 bp, Artificial sequence
  SiRNA target sequence
agtttaaattttctaatgatg

SEQ ID NO: 3208 - DNA, 21 bp, Artificial sequence
  SiRNA target sequence
gtttaaattttctaatgatga

SEQ ID NO: 3209 - DNA, 21 bp, Artificial sequence
  SiRNA target sequence
tttaaattttctaatgatgaa

SEQ ID NO: 3210 - DNA, 21 bp, Artificial sequence
  SiRNA target sequence
ttaaattttctaatgatgaaa

SEQ ID NO: 3211 - DNA, 21 bp, Artificial sequence
  SiRNA target sequence
taaattttctaatgatgaaaa

SEQ ID NO: 3212 - DNA, 21 bp, Artificial sequence
  SiRNA target sequence
aaattttctaatgatgaaaag

SEQ ID NO: 3213 - DNA, 21 bp, Artificial sequence
  SiRNA target sequence
aattttctaatgatgaaaagg

SEQ ID NO: 3214 - DNA, 21 bp, Artificial sequence
  SiRNA target sequence
attttctaatgatgaaaagga

SEQ ID NO: 3215 - DNA, 21 bp, Artificial sequence
  SiRNA target sequence
ttttctaatgatgaaaaggaa

SEQ ID NO: 3216 - DNA, 21 bp, Artificial sequence
  SiRNA target sequence
tttctaatgatgaaaaggaag

SEQ ID NO: 3217 - DNA, 21 bp, Artificial sequence
  SiRNA target sequence
ttctaatgatgaaaaggaagt

SEQ ID NO: 3218 - DNA, 21 bp, Artificial sequence
  SiRNA target sequence
tctaatgatgaaaaggaagtg

SEQ ID NO: 3219 - DNA, 21 bp, Artificial sequence
  SiRNA target sequence
ctaatgatgaaaaggaagtgt

SEQ ID NO: 3220 - DNA, 21 bp, Artificial sequence
  SiRNA target sequence
taatgatgaaaaggaagtgtt

SEQ ID NO: 3221 - DNA, 21 bp, Artificial sequence
  SiRNA target sequence
aatgatgaaaaggaagtgtta

SEQ ID NO: 3222 - DNA, 21 bp, Artificial sequence
  SiRNA target sequence
atgatgaaaaggaagtgttaa

SEQ ID NO: 3223 - DNA, 21 bp, Artificial sequence
  SiRNA target sequence
tgatgaaaaggaagtgttaaa

SEQ ID NO: 3224 - DNA, 21 bp, Artificial sequence
  SiRNA target sequence
gatgaaaaggaagtgttaaat

SEQ ID NO: 3225 - DNA, 21 bp, Artificial sequence
  SiRNA target sequence
atgaaaaggaagtgttaaatc

SEQ ID NO: 3226 - DNA, 21 bp, Artificial sequence
  SiRNA target sequence
tgaaaaggaagtgttaaatct

SEQ ID NO: 3227 - DNA, 21 bp, Artificial sequence
  SiRNA target sequence
gaaaaggaagtgttaaatctt

SEQ ID NO: 3228 - DNA, 21 bp, Artificial sequence
  SiRNA target sequence
aaaaggaagtgttaaatcttc

SEQ ID NO: 3229 - DNA, 21 bp, Artificial sequence
  SiRNA target sequence
aaaggaagtgttaaatcttct

SEQ ID NO: 3230 - DNA, 21 bp, Artificial sequence
  SiRNA target sequence
aaggaagtgttaaatcttctt

SEQ ID NO: 3231 - DNA, 21 bp, Artificial sequence
  SiRNA target sequence
aggaagtgttaaatcttctta

SEQ ID NO: 3232 - DNA, 21 bp, Artificial sequence
  SiRNA target sequence
ggaagtgttaaatcttcttaa

SEQ ID NO: 3233 - DNA, 21 bp, Artificial sequence
  SiRNA target sequence
gaagtgttaaatcttcttaat

SEQ ID NO: 3234 - DNA, 21 bp, Artificial sequence
  SiRNA target sequence
aagtgttaaatcttcttaatg

SEQ ID NO: 3235 - DNA, 21 bp, Artificial sequence
  SiRNA target sequence
agtgttaaatcttcttaatgc

SEQ ID NO: 3236 - DNA, 21 bp, Artificial sequence
  SiRNA target sequence
gtgttaaatcttcttaatgcc

SEQ ID NO: 3237 - DNA, 21 bp, Artificial sequence
  SiRNA target sequence
tgttaaatcttcttaatgcca

SEQ ID NO: 3238 - DNA, 21 bp, Artificial sequence
  SiRNA target sequence
gttaaatcttcttaatgccat

SEQ ID NO: 3239 - DNA, 21 bp, Artificial sequence
  SiRNA target sequence
ttaaatcttcttaatgccatt

SEQ ID NO: 3240 - DNA, 21 bp, Artificial sequence
  SiRNA target sequence
taaatcttcttaatgccatta

SEQ ID NO: 3241 - DNA, 21 bp, Artificial sequence
  SiRNA target sequence
aaatcttcttaatgccattat

SEQ ID NO: 3242 - DNA, 21 bp, Artificial sequence
  SiRNA target sequence
aatcttcttaatgccattatt

SEQ ID NO: 3243 - DNA, 21 bp, Artificial sequence
  SiRNA target sequence
atcttcttaatgccattattt

SEQ ID NO: 3244 - DNA, 21 bp, Artificial sequence
  SiRNA target sequence
tcttcttaatgccattatttt

SEQ ID NO: 3245 - DNA, 21 bp, Artificial sequence
  SiRNA target sequence
cttcttaatgccattatttta

SEQ ID NO: 3246 - DNA, 21 bp, Artificial sequence
  SiRNA target sequence
ttcttaatgccattattttac

SEQ ID NO: 3247 - DNA, 21 bp, Artificial sequence
  SiRNA target sequence
tcttaatgccattattttaca

SEQ ID NO: 3248 - DNA, 21 bp, Artificial sequence
  SiRNA target sequence
cttaatgccattattttacac

SEQ ID NO: 3249 - DNA, 21 bp, Artificial sequence
  SiRNA target sequence
ttaatgccattattttacacc

SEQ ID NO: 3250 - DNA, 21 bp, Artificial sequence
  SiRNA target sequence
taatgccattattttacacct

SEQ ID NO: 3251 - DNA, 21 bp, Artificial sequence
  SiRNA target sequence
aatgccattattttacaccta

SEQ ID NO: 3252 - DNA, 21 bp, Artificial sequence
  SiRNA target sequence
atgccattattttacacctaa

SEQ ID NO: 3253 - DNA, 21 bp, Artificial sequence
  SiRNA target sequence
tgccattattttacacctaaa

SEQ ID NO: 3254 - DNA, 21 bp, Artificial sequence
  SiRNA target sequence
gccattattttacacctaaaa

SEQ ID NO: 3255 - DNA, 21 bp, Artificial sequence
  SiRNA target sequence
ccattattttacacctaaaag

SEQ ID NO: 3256 - DNA, 21 bp, Artificial sequence
  SiRNA target sequence
cattattttacacctaaaagg

SEQ ID NO: 3257 - DNA, 21 bp, Artificial sequence
  SiRNA target sequence
attattttacacctaaaagga

SEQ ID NO: 3258 - DNA, 21 bp, Artificial sequence
  SiRNA target sequence
ttattttacacctaaaaggaa

SEQ ID NO: 3259 - DNA, 21 bp, Artificial sequence
  SiRNA target sequence
tattttacacctaaaaggaaa

SEQ ID NO: 3260 - DNA, 21 bp, Artificial sequence
  SiRNA target sequence
attttacacctaaaaggaaaa

SEQ ID NO: 3261 - DNA, 21 bp, Artificial sequence
  SiRNA target sequence
ttttacacctaaaaggaaaaa

SEQ ID NO: 3262 - DNA, 21 bp, Artificial sequence
  SiRNA target sequence
tttacacctaaaaggaaaaaa

SEQ ID NO: 3263 - DNA, 21 bp, Artificial sequence
  SiRNA target sequence
ttacacctaaaaggaaaaaaa

SEQ ID NO: 3264 - DNA, 21 bp, Artificial sequence
  SiRNA target sequence
tacacctaaaaggaaaaaaag

SEQ ID NO: 3265 - DNA, 21 bp, Artificial sequence
  SiRNA target sequence
acacctaaaaggaaaaaaaga

SEQ ID NO: 3266 - DNA, 21 bp, Artificial sequence
  SiRNA target sequence
cacctaaaaggaaaaaaagaa

SEQ ID NO: 3267 - DNA, 21 bp, Artificial sequence
  SiRNA target sequence
acctaaaaggaaaaaaagaac

SEQ ID NO: 3268 - DNA, 21 bp, Artificial sequence
  SiRNA target sequence
cctaaaaggaaaaaaagaaca

SEQ ID NO: 3269 - DNA, 21 bp, Artificial sequence
  SiRNA target sequence
ctaaaaggaaaaaaagaacag

SEQ ID NO: 3270 - DNA, 21 bp, Artificial sequence
  SiRNA target sequence
taaaaggaaaaaaagaacagg

SEQ ID NO: 3271 - DNA, 21 bp, Artificial sequence
  SiRNA target sequence
aaaaggaaaaaaagaacaggc

SEQ ID NO: 3272 - DNA, 21 bp, Artificial sequence
  SiRNA target sequence
aaaggaaaaaaagaacaggca

SEQ ID NO: 3273 - DNA, 21 bp, Artificial sequence
  SiRNA target sequence
aaggaaaaaaagaacaggcaa

SEQ ID NO: 3274 - DNA, 21 bp, Artificial sequence
  SiRNA target sequence
aggaaaaaaagaacaggcaat

SEQ ID NO: 3275 - DNA, 21 bp, Artificial sequence
  SiRNA target sequence
ggaaaaaaagaacaggcaatt

SEQ ID NO: 3276 - DNA, 21 bp, Artificial sequence
  SiRNA target sequence
gaaaaaaagaacaggcaattc

SEQ ID NO: 3277 - DNA, 21 bp, Artificial sequence
  SiRNA target sequence
aaaaaaagaacaggcaattct

SEQ ID NO: 3278 - DNA, 21 bp, Artificial sequence
  SiRNA target sequence
aaaaaagaacaggcaattctt

SEQ ID NO: 3279 - DNA, 21 bp, Artificial sequence
  SiRNA target sequence
aaaaagaacaggcaattcttt

SEQ ID NO: 3280 - DNA, 21 bp, Artificial sequence
  SiRNA target sequence
aaaagaacaggcaattctttt

SEQ ID NO: 3281 - DNA, 21 bp, Artificial sequence
  SiRNA target sequence
aaagaacaggcaattctttta

SEQ ID NO: 3282 - DNA, 21 bp, Artificial sequence
  SiRNA target sequence
aagaacaggcaattcttttat

SEQ ID NO: 3283 - DNA, 21 bp, Artificial sequence
  SiRNA target sequence
agaacaggcaattcttttatt

SEQ ID NO: 3284 - DNA, 21 bp, Artificial sequence
  SiRNA target sequence
gaacaggcaattcttttatta

SEQ ID NO: 3285 - DNA, 21 bp, Artificial sequence
  SiRNA target sequence
aacaggcaattcttttattag

SEQ ID NO: 3286 - DNA, 21 bp, Artificial sequence
  SiRNA target sequence
acaggcaattcttttattaga

SEQ ID NO: 3287 - DNA, 21 bp, Artificial sequence
  SiRNA target sequence
caggcaattcttttattagaa

SEQ ID NO: 3288 - DNA, 21 bp, Artificial sequence
  SiRNA target sequence
aggcaattcttttattagaaa

SEQ ID NO: 3289 - DNA, 21 bp, Artificial sequence
  SiRNA target sequence
ggcaattcttttattagaaaa

SEQ ID NO: 3290 - DNA, 21 bp, Artificial sequence
  SiRNA target sequence
gcaattcttttattagaaaaa

SEQ ID NO: 3291 - DNA, 21 bp, Artificial sequence
  SiRNA target sequence
caattcttttattagaaaaat

SEQ ID NO: 3292 - DNA, 21 bp, Artificial sequence
  SiRNA target sequence
aattcttttattagaaaaatc

SEQ ID NO: 3293 - DNA, 21 bp, Artificial sequence
  SiRNA target sequence
attcttttattagaaaaatct

SEQ ID NO: 3294 - DNA, 21 bp, Artificial sequence
  SiRNA target sequence
ttcttttattagaaaaatcta

SEQ ID NO: 3295 - DNA, 21 bp, Artificial sequence
  SiRNA target sequence
tcttttattagaaaaatctac

SEQ ID NO: 3296 - DNA, 21 bp, Artificial sequence
  SiRNA target sequence
cttttattagaaaaatctact

SEQ ID NO: 3297 - DNA, 21 bp, Artificial sequence
  SiRNA target sequence
ttttattagaaaaatctactt

SEQ ID NO: 3298 - DNA, 21 bp, Artificial sequence
  SiRNA target sequence
tttattagaaaaatctactta

SEQ ID NO: 3299 - DNA, 21 bp, Artificial sequence
  SiRNA target sequence
ttattagaaaaatctacttat

SEQ ID NO: 3300 - DNA, 21 bp, Artificial sequence
  SiRNA target sequence
tattagaaaaatctacttata

SEQ ID NO: 3301 - DNA, 21 bp, Artificial sequence
  SiRNA target sequence
attagaaaaatctacttataa

SEQ ID NO: 3302 - DNA, 21 bp, Artificial sequence
  SiRNA target sequence
ttagaaaaatctacttataaa

SEQ ID NO: 3303 - DNA, 21 bp, Artificial sequence
  SiRNA target sequence
tagaaaaatctacttataaat

SEQ ID NO: 3304 - DNA, 21 bp, Artificial sequence
  SiRNA target sequence
agaaaaatctacttataaata

SEQ ID NO: 3305 - DNA, 21 bp, Artificial sequence
  SiRNA target sequence
gaaaaatctacttataaatac

SEQ ID NO: 3306 - DNA, 21 bp, Artificial sequence
  SiRNA target sequence
aaaaatctacttataaataca

SEQ ID NO: 3307 - DNA, 21 bp, Artificial sequence
  SiRNA target sequence
aaaatctacttataaatacag

SEQ ID NO: 3308 - DNA, 21 bp, Artificial sequence
  SiRNA target sequence
aaatctacttataaatacagt

SEQ ID NO: 3309 - DNA, 21 bp, Artificial sequence
  SiRNA target sequence
aatctacttataaatacagta

SEQ ID NO: 3310 - DNA, 21 bp, Artificial sequence
  SiRNA target sequence
atctacttataaatacagtat

SEQ ID NO: 3311 - DNA, 21 bp, Artificial sequence
  SiRNA target sequence
tctacttataaatacagtatc

SEQ ID NO: 3312 - DNA, 21 bp, Artificial sequence
  SiRNA target sequence
ctacttataaatacagtatct

SEQ ID NO: 3313 - DNA, 21 bp, Artificial sequence
  SiRNA target sequence
tacttataaatacagtatctt

SEQ ID NO: 3314 - DNA, 21 bp, Artificial sequence
  SiRNA target sequence
acttataaatacagtatcttg

SEQ ID NO: 3315 - DNA, 21 bp, Artificial sequence
  SiRNA target sequence
cttataaatacagtatcttgt

SEQ ID NO: 3316 - DNA, 21 bp, Artificial sequence
  SiRNA target sequence
ttataaatacagtatcttgta

SEQ ID NO: 3317 - DNA, 21 bp, Artificial sequence
  SiRNA target sequence
tataaatacagtatcttgtat

SEQ ID NO: 3318 - DNA, 21 bp, Artificial sequence
  SiRNA target sequence
ataaatacagtatcttgtata

SEQ ID NO: 3319 - DNA, 21 bp, Artificial sequence
  SiRNA target sequence
taaatacagtatcttgtatag

SEQ ID NO: 3320 - DNA, 21 bp, Artificial sequence
  SiRNA target sequence
aaatacagtatcttgtataga

SEQ ID NO: 3321 - DNA, 21 bp, Artificial sequence
  SiRNA target sequence
aatacagtatcttgtatagag

SEQ ID NO: 3322 - DNA, 21 bp, Artificial sequence
  SiRNA target sequence
atacagtatcttgtatagagc

SEQ ID NO: 3323 - DNA, 21 bp, Artificial sequence
  SiRNA target sequence
tacagtatcttgtatagagca

SEQ ID NO: 3324 - DNA, 21 bp, Artificial sequence
  SiRNA target sequence
acagtatcttgtatagagcat

SEQ ID NO: 3325 - DNA, 21 bp, Artificial sequence
  SiRNA target sequence
cagtatcttgtatagagcata

SEQ ID NO: 3326 - DNA, 21 bp, Artificial sequence
  SiRNA target sequence
agtatcttgtatagagcatat

SEQ ID NO: 3327 - DNA, 21 bp, Artificial sequence
  SiRNA target sequence
gtatcttgtatagagcatatt

SEQ ID NO: 3328 - DNA, 21 bp, Artificial sequence
  SiRNA target sequence
tatcttgtatagagcatattt

SEQ ID NO: 3329 - DNA, 21 bp, Artificial sequence
  SiRNA target sequence
atcttgtatagagcatatttt

SEQ ID NO: 3330 - DNA, 21 bp, Artificial sequence
  SiRNA target sequence
tcttgtatagagcatattttc

SEQ ID NO: 3331 - DNA, 21 bp, Artificial sequence
  SiRNA target sequence
cttgtatagagcatattttct

SEQ ID NO: 3332 - DNA, 21 bp, Artificial sequence
  SiRNA target sequence
ttgtatagagcatattttctt

SEQ ID NO: 3333 - DNA, 21 bp, Artificial sequence
  SiRNA target sequence
tgtatagagcatattttctta

SEQ ID NO: 3334 - DNA, 21 bp, Artificial sequence
  SiRNA target sequence
gtatagagcatattttcttac

SEQ ID NO: 3335 - DNA, 21 bp, Artificial sequence
  SiRNA target sequence
tatagagcatattttcttaca

SEQ ID NO: 3336 - DNA, 21 bp, Artificial sequence
  SiRNA target sequence
atagagcatattttcttacat

SEQ ID NO: 3337 - DNA, 21 bp, Artificial sequence
  SiRNA target sequence
tagagcatattttcttacatt

SEQ ID NO: 3338 - DNA, 21 bp, Artificial sequence
  SiRNA target sequence
agagcatattttcttacattg

SEQ ID NO: 3339 - DNA, 21 bp, Artificial sequence
  SiRNA target sequence
gagcatattttcttacattga

SEQ ID NO: 3340 - DNA, 21 bp, Artificial sequence
  SiRNA target sequence
agcatattttcttacattgaa

SEQ ID NO: 3341 - DNA, 21 bp, Artificial sequence
  SiRNA target sequence
gcatattttcttacattgaag

SEQ ID NO: 3342 - DNA, 21 bp, Artificial sequence
  SiRNA target sequence
catattttcttacattgaaga

SEQ ID NO: 3343 - DNA, 21 bp, Artificial sequence
  SiRNA target sequence
atattttcttacattgaagaa

SEQ ID NO: 3344 - DNA, 21 bp, Artificial sequence
  SiRNA target sequence
tattttcttacattgaagaat

SEQ ID NO: 3345 - DNA, 21 bp, Artificial sequence
  SiRNA target sequence
attttcttacattgaagaatg

SEQ ID NO: 3346 - DNA, 21 bp, Artificial sequence
  SiRNA target sequence
ttttcttacattgaagaatga

SEQ ID NO: 3347 - DNA, 21 bp, Artificial sequence
  SiRNA target sequence
tttcttacattgaagaatgaa

SEQ ID NO: 3348 - DNA, 21 bp, Artificial sequence
  SiRNA target sequence
ttcttacattgaagaatgaat

SEQ ID NO: 3349 - DNA, 21 bp, Artificial sequence
  SiRNA target sequence
tcttacattgaagaatgaata

SEQ ID NO: 3350 - DNA, 21 bp, Artificial sequence
  SiRNA target sequence
cttacattgaagaatgaatat

SEQ ID NO: 3351 - DNA, 21 bp, Artificial sequence
  SiRNA target sequence
ttacattgaagaatgaatata

SEQ ID NO: 3352 - DNA, 21 bp, Artificial sequence
  SiRNA target sequence
tacattgaagaatgaatatat

SEQ ID NO: 3353 - DNA, 21 bp, Artificial sequence
  SiRNA target sequence
acattgaagaatgaatatatt

SEQ ID NO: 3354 - DNA, 21 bp, Artificial sequence
  SiRNA target sequence
cattgaagaatgaatatattt

SEQ ID NO: 3355 - DNA, 21 bp, Artificial sequence
  SiRNA target sequence
attgaagaatgaatatatttc

SEQ ID NO: 3356 - DNA, 21 bp, Artificial sequence
  SiRNA target sequence
ttgaagaatgaatatatttca

SEQ ID NO: 3357 - DNA, 21 bp, Artificial sequence
  SiRNA target sequence
tgaagaatgaatatatttcat

SEQ ID NO: 3358 - DNA, 21 bp, Artificial sequence
  SiRNA target sequence
gaagaatgaatatatttcatc

SEQ ID NO: 3359 - DNA, 21 bp, Artificial sequence
  SiRNA target sequence
aagaatgaatatatttcatct

SEQ ID NO: 3360 - DNA, 21 bp, Artificial sequence
  SiRNA target sequence
agaatgaatatatttcatctt

SEQ ID NO: 3361 - DNA, 21 bp, Artificial sequence
  SiRNA target sequence
gaatgaatatatttcatcttc

SEQ ID NO: 3362 - DNA, 21 bp, Artificial sequence
  SiRNA target sequence
aatgaatatatttcatcttca

SEQ ID NO: 3363 - DNA, 21 bp, Artificial sequence
  SiRNA target sequence
atgaatatatttcatcttcat

SEQ ID NO: 3364 - DNA, 21 bp, Artificial sequence
  SiRNA target sequence
tgaatatatttcatcttcatt

SEQ ID NO: 3365 - DNA, 21 bp, Artificial sequence
  SiRNA target sequence
gaatatatttcatcttcattg

SEQ ID NO: 3366 - DNA, 21 bp, Artificial sequence
  SiRNA target sequence
aatatatttcatcttcattgc

SEQ ID NO: 3367 - DNA, 21 bp, Artificial sequence
  SiRNA target sequence
atatatttcatcttcattgcc

SEQ ID NO: 3368 - DNA, 21 bp, Artificial sequence
  SiRNA target sequence
tatatttcatcttcattgcct

SEQ ID NO: 3369 - DNA, 21 bp, Artificial sequence
  SiRNA target sequence
atatttcatcttcattgcctt

SEQ ID NO: 3370 - DNA, 21 bp, Artificial sequence
  SiRNA target sequence
tatttcatcttcattgccttt

SEQ ID NO: 3371 - DNA, 21 bp, Artificial sequence
  SiRNA target sequence
atttcatcttcattgccttta

SEQ ID NO: 3372 - DNA, 21 bp, Artificial sequence
  SiRNA target sequence
tttcatcttcattgcctttag

SEQ ID NO: 3373 - DNA, 21 bp, Artificial sequence
  SiRNA target sequence
ttcatcttcattgcctttaga

SEQ ID NO: 3374 - DNA, 21 bp, Artificial sequence
  SiRNA target sequence
tcatcttcattgcctttagat

SEQ ID NO: 3375 - DNA, 21 bp, Artificial sequence
  SiRNA target sequence
catcttcattgcctttagatg

SEQ ID NO: 3376 - DNA, 21 bp, Artificial sequence
  SiRNA target sequence
atcttcattgcctttagatga

SEQ ID NO: 3377 - DNA, 21 bp, Artificial sequence
  SiRNA target sequence
tcttcattgcctttagatgac

SEQ ID NO: 3378 - DNA, 21 bp, Artificial sequence
  SiRNA target sequence
cttcattgcctttagatgacg

SEQ ID NO: 3379 - DNA, 21 bp, Artificial sequence
  SiRNA target sequence
ttcattgcctttagatgacga

SEQ ID NO: 3380 - DNA, 21 bp, Artificial sequence
  SiRNA target sequence
tcattgcctttagatgacgag

SEQ ID NO: 3381 - DNA, 21 bp, Artificial sequence
  SiRNA target sequence
cattgcctttagatgacgaga

SEQ ID NO: 3382 - DNA, 21 bp, Artificial sequence
  SiRNA target sequence
attgcctttagatgacgagat

SEQ ID NO: 3383 - DNA, 21 bp, Artificial sequence
  SiRNA target sequence
ttgcctttagatgacgagatt

SEQ ID NO: 3384 - DNA, 21 bp, Artificial sequence
  SiRNA target sequence
tgcctttagatgacgagatta

SEQ ID NO: 3385 - DNA, 21 bp, Artificial sequence
  SiRNA target sequence
gcctttagatgacgagattac

SEQ ID NO: 3386 - DNA, 21 bp, Artificial sequence
  SiRNA target sequence
cctttagatgacgagattact

SEQ ID NO: 3387 - DNA, 21 bp, Artificial sequence
  SiRNA target sequence
ctttagatgacgagattacta

SEQ ID NO: 3388 - DNA, 21 bp, Artificial sequence
  SiRNA target sequence
tttagatgacgagattactac

SEQ ID NO: 3389 - DNA, 21 bp, Artificial sequence
  SiRNA target sequence
ttagatgacgagattactacg

SEQ ID NO: 3390 - DNA, 21 bp, Artificial sequence
  SiRNA target sequence
tagatgacgagattactacgc

SEQ ID NO: 3391 - DNA, 21 bp, Artificial sequence
  SiRNA target sequence
agatgacgagattactacgct

SEQ ID NO: 3392 - DNA, 21 bp, Artificial sequence
  SiRNA target sequence
gatgacgagattactacgctt

SEQ ID NO: 3393 - DNA, 21 bp, Artificial sequence
  SiRNA target sequence
atgacgagattactacgcttt

SEQ ID NO: 3394 - DNA, 21 bp, Artificial sequence
  SiRNA target sequence
tgacgagattactacgcttta

SEQ ID NO: 3395 - DNA, 21 bp, Artificial sequence
  SiRNA target sequence
gacgagattactacgctttac

SEQ ID NO: 3396 - DNA, 21 bp, Artificial sequence
  SiRNA target sequence
acgagattactacgctttact

SEQ ID NO: 3397 - DNA, 21 bp, Artificial sequence
  SiRNA target sequence
cgagattactacgctttactt

SEQ ID NO: 3398 - DNA, 21 bp, Artificial sequence
  SiRNA target sequence
gagattactacgctttacttg

SEQ ID NO: 3399 - DNA, 21 bp, Artificial sequence
  SiRNA target sequence
agattactacgctttacttgt

SEQ ID NO: 3400 - DNA, 21 bp, Artificial sequence
  SiRNA target sequence
gattactacgctttacttgta

SEQ ID NO: 3401 - DNA, 21 bp, Artificial sequence
  SiRNA target sequence
attactacgctttacttgtat

SEQ ID NO: 3402 - DNA, 21 bp, Artificial sequence
  SiRNA target sequence
ttactacgctttacttgtatt

SEQ ID NO: 3403 - DNA, 21 bp, Artificial sequence
  SiRNA target sequence
tactacgctttacttgtattc

SEQ ID NO: 3404 - DNA, 21 bp, Artificial sequence
  SiRNA target sequence
actacgctttacttgtattct

SEQ ID NO: 3405 - DNA, 21 bp, Artificial sequence
  SiRNA target sequence
ctacgctttacttgtattcta

SEQ ID NO: 3406 - DNA, 21 bp, Artificial sequence
  SiRNA target sequence
tacgctttacttgtattctaa

SEQ ID NO: 3407 - DNA, 21 bp, Artificial sequence
  SiRNA target sequence
acgctttacttgtattctaag

SEQ ID NO: 3408 - DNA, 21 bp, Artificial sequence
  SiRNA target sequence
cgctttacttgtattctaaga

SEQ ID NO: 3409 - DNA, 21 bp, Artificial sequence
  SiRNA target sequence
gctttacttgtattctaagat

SEQ ID NO: 3410 - DNA, 21 bp, Artificial sequence
  SiRNA target sequence
ctttacttgtattctaagatt

SEQ ID NO: 3411 - DNA, 21 bp, Artificial sequence
  SiRNA target sequence
tttacttgtattctaagattt

SEQ ID NO: 3412 - DNA, 21 bp, Artificial sequence
  SiRNA target sequence
ttacttgtattctaagatttt

SEQ ID NO: 3413 - DNA, 21 bp, Artificial sequence
  SiRNA target sequence
tacttgtattctaagattttt

SEQ ID NO: 3414 - DNA, 21 bp, Artificial sequence
  SiRNA target sequence
acttgtattctaagattttta

SEQ ID NO: 3415 - DNA, 21 bp, Artificial sequence
  SiRNA target sequence
cttgtattctaagatttttaa

SEQ ID NO: 3416 - DNA, 21 bp, Artificial sequence
  SiRNA target sequence
ttgtattctaagatttttaaa

SEQ ID NO: 3417 - DNA, 21 bp, Artificial sequence
  SiRNA target sequence
tgtattctaagatttttaaag

SEQ ID NO: 3418 - DNA, 21 bp, Artificial sequence
  SiRNA target sequence
gtattctaagatttttaaaga

SEQ ID NO: 3419 - DNA, 21 bp, Artificial sequence
  SiRNA target sequence
tattctaagatttttaaagat

SEQ ID NO: 3420 - DNA, 21 bp, Artificial sequence
  SiRNA target sequence
attctaagatttttaaagata

SEQ ID NO: 3421 - DNA, 21 bp, Artificial sequence
  SiRNA target sequence
ttctaagatttttaaagataa

SEQ ID NO: 3422 - DNA, 21 bp, Artificial sequence
  SiRNA target sequence
tctaagatttttaaagataaa

SEQ ID NO: 3423 - DNA, 21 bp, Artificial sequence
  SiRNA target sequence
ctaagatttttaaagataaat

SEQ ID NO: 3424 - DNA, 21 bp, Artificial sequence
  SiRNA target sequence
taagatttttaaagataaatc

SEQ ID NO: 3425 - DNA, 21 bp, Artificial sequence
  SiRNA target sequence
aagatttttaaagataaatct

SEQ ID NO: 3426 - DNA, 21 bp, Artificial sequence
  SiRNA target sequence
agatttttaaagataaatctg

SEQ ID NO: 3427 - DNA, 21 bp, Artificial sequence
  SiRNA target sequence
gatttttaaagataaatctga

SEQ ID NO: 3428 - DNA, 21 bp, Artificial sequence
  SiRNA target sequence
atttttaaagataaatctgat

SEQ ID NO: 3429 - DNA, 21 bp, Artificial sequence
  SiRNA target sequence
tttttaaagataaatctgata

SEQ ID NO: 3430 - DNA, 21 bp, Artificial sequence
  SiRNA target sequence
ttttaaagataaatctgatac

SEQ ID NO: 3431 - DNA, 21 bp, Artificial sequence
  SiRNA target sequence
tttaaagataaatctgatact

SEQ ID NO: 3432 - DNA, 21 bp, Artificial sequence
  SiRNA target sequence
ttaaagataaatctgatactt

SEQ ID NO: 3433 - DNA, 21 bp, Artificial sequence
  SiRNA target sequence
taaagataaatctgatactta

SEQ ID NO: 3434 - DNA, 21 bp, Artificial sequence
  SiRNA target sequence
aaagataaatctgatacttac

SEQ ID NO: 3435 - DNA, 21 bp, Artificial sequence
  SiRNA target sequence
aagataaatctgatacttacc

SEQ ID NO: 3436 - DNA, 21 bp, Artificial sequence
  SiRNA target sequence
agataaatctgatacttacct

SEQ ID NO: 3437 - DNA, 21 bp, Artificial sequence
  SiRNA target sequence
gataaatctgatacttacctt

SEQ ID NO: 3438 - DNA, 21 bp, Artificial sequence
  SiRNA target sequence
ataaatctgatacttacctta

SEQ ID NO: 3439 - DNA, 21 bp, Artificial sequence
  SiRNA target sequence
taaatctgatacttaccttaa

SEQ ID NO: 3440 - DNA, 21 bp, Artificial sequence
  SiRNA target sequence
aaatctgatacttaccttaaa

SEQ ID NO: 3441 - DNA, 21 bp, Artificial sequence
  SiRNA target sequence
aatctgatacttaccttaaat

SEQ ID NO: 3442 - DNA, 21 bp, Artificial sequence
  SiRNA target sequence
atctgatacttaccttaaatc

SEQ ID NO: 3443 - DNA, 21 bp, Artificial sequence
  SiRNA target sequence
tctgatacttaccttaaatct

SEQ ID NO: 3444 - DNA, 21 bp, Artificial sequence
  SiRNA target sequence
ctgatacttaccttaaatctg

SEQ ID NO: 3445 - DNA, 21 bp, Artificial sequence
  SiRNA target sequence
tgatacttaccttaaatctgc

SEQ ID NO: 3446 - DNA, 21 bp, Artificial sequence
  SiRNA target sequence
gatacttaccttaaatctgct

SEQ ID NO: 3447 - DNA, 21 bp, Artificial sequence
  SiRNA target sequence
atacttaccttaaatctgcta

SEQ ID NO: 3448 - DNA, 21 bp, Artificial sequence
  SiRNA target sequence
tacttaccttaaatctgctat

SEQ ID NO: 3449 - DNA, 21 bp, Artificial sequence
  SiRNA target sequence
acttaccttaaatctgctata

SEQ ID NO: 3450 - DNA, 21 bp, Artificial sequence
  SiRNA target sequence
cttaccttaaatctgctatag

SEQ ID NO: 3451 - DNA, 21 bp, Artificial sequence
  SiRNA target sequence
ttaccttaaatctgctataga

SEQ ID NO: 3452 - DNA, 21 bp, Artificial sequence
  SiRNA target sequence
taccttaaatctgctatagat

SEQ ID NO: 3453 - DNA, 21 bp, Artificial sequence
  SiRNA target sequence
accttaaatctgctatagata

SEQ ID NO: 3454 - DNA, 21 bp, Artificial sequence
  SiRNA target sequence
ccttaaatctgctatagataa

SEQ ID NO: 3455 - DNA, 21 bp, Artificial sequence
  SiRNA target sequence
cttaaatctgctatagataaa

SEQ ID NO: 3456 - DNA, 21 bp, Artificial sequence
  SiRNA target sequence
ttaaatctgctatagataaat

SEQ ID NO: 3457 - DNA, 21 bp, Artificial sequence
  SiRNA target sequence
taaatctgctatagataaatc

SEQ ID NO: 3458 - DNA, 21 bp, Artificial sequence
  SiRNA target sequence
aaatctgctatagataaatca

SEQ ID NO: 3459 - DNA, 21 bp, Artificial sequence
  SiRNA target sequence
aatctgctatagataaatcag

SEQ ID NO: 3460 - DNA, 21 bp, Artificial sequence
  SiRNA target sequence
atctgctatagataaatcagt

SEQ ID NO: 3461 - DNA, 21 bp, Artificial sequence
  SiRNA target sequence
tctgctatagataaatcagta

SEQ ID NO: 3462 - DNA, 21 bp, Artificial sequence
  SiRNA target sequence
ctgctatagataaatcagtag

SEQ ID NO: 3463 - DNA, 21 bp, Artificial sequence
  SiRNA target sequence
tgctatagataaatcagtaga

SEQ ID NO: 3464 - DNA, 21 bp, Artificial sequence
  SiRNA target sequence
gctatagataaatcagtagat

SEQ ID NO: 3465 - DNA, 21 bp, Artificial sequence
  SiRNA target sequence
ctatagataaatcagtagatc

SEQ ID NO: 3466 - DNA, 21 bp, Artificial sequence
  SiRNA target sequence
tatagataaatcagtagatct

SEQ ID NO: 3467 - DNA, 21 bp, Artificial sequence
  SiRNA target sequence
atagataaatcagtagatcta

SEQ ID NO: 3468 - DNA, 21 bp, Artificial sequence
  SiRNA target sequence
tagataaatcagtagatctac

SEQ ID NO: 3469 - DNA, 21 bp, Artificial sequence
  SiRNA target sequence
agataaatcagtagatctacc

SEQ ID NO: 3470 - DNA, 21 bp, Artificial sequence
  SiRNA target sequence
gataaatcagtagatctacct

SEQ ID NO: 3471 - DNA, 21 bp, Artificial sequence
  SiRNA target sequence
ataaatcagtagatctaccta

SEQ ID NO: 3472 - DNA, 21 bp, Artificial sequence
  SiRNA target sequence
taaatcagtagatctacctat

SEQ ID NO: 3473 - DNA, 21 bp, Artificial sequence
  SiRNA target sequence
aaatcagtagatctacctatt

SEQ ID NO: 3474 - DNA, 21 bp, Artificial sequence
  SiRNA target sequence
aatcagtagatctacctattg

SEQ ID NO: 3475 - DNA, 21 bp, Artificial sequence
  SiRNA target sequence
atcagtagatctacctattga

SEQ ID NO: 3476 - DNA, 21 bp, Artificial sequence
  SiRNA target sequence
tcagtagatctacctattgaa

SEQ ID NO: 3477 - DNA, 21 bp, Artificial sequence
  SiRNA target sequence
cagtagatctacctattgaac

SEQ ID NO: 3478 - DNA, 21 bp, Artificial sequence
  SiRNA target sequence
agtagatctacctattgaaca

SEQ ID NO: 3479 - DNA, 21 bp, Artificial sequence
  SiRNA target sequence
gtagatctacctattgaacag

SEQ ID NO: 3480 - DNA, 21 bp, Artificial sequence
  SiRNA target sequence
tagatctacctattgaacaga

SEQ ID NO: 3481 - DNA, 21 bp, Artificial sequence
  SiRNA target sequence
agatctacctattgaacagaa

SEQ ID NO: 3482 - DNA, 21 bp, Artificial sequence
  SiRNA target sequence
gatctacctattgaacagaaa

SEQ ID NO: 3483 - DNA, 21 bp, Artificial sequence
  SiRNA target sequence
atctacctattgaacagaaag

SEQ ID NO: 3484 - DNA, 21 bp, Artificial sequence
  SiRNA target sequence
tctacctattgaacagaaaga

SEQ ID NO: 3485 - DNA, 21 bp, Artificial sequence
  SiRNA target sequence
ctacctattgaacagaaagac

SEQ ID NO: 3486 - DNA, 21 bp, Artificial sequence
  SiRNA target sequence
tacctattgaacagaaagact

SEQ ID NO: 3487 - DNA, 21 bp, Artificial sequence
  SiRNA target sequence
acctattgaacagaaagactt

SEQ ID NO: 3488 - DNA, 21 bp, Artificial sequence
  SiRNA target sequence
cctattgaacagaaagacttt

SEQ ID NO: 3489 - DNA, 21 bp, Artificial sequence
  SiRNA target sequence
ctattgaacagaaagactttc

SEQ ID NO: 3490 - DNA, 21 bp, Artificial sequence
  SiRNA target sequence
tattgaacagaaagactttct

SEQ ID NO: 3491 - DNA, 21 bp, Artificial sequence
  SiRNA target sequence
attgaacagaaagactttctg

SEQ ID NO: 3492 - DNA, 21 bp, Artificial sequence
  SiRNA target sequence
ttgaacagaaagactttctgt

SEQ ID NO: 3493 - DNA, 21 bp, Artificial sequence
  SiRNA target sequence
tgaacagaaagactttctgta

SEQ ID NO: 3494 - DNA, 21 bp, Artificial sequence
  SiRNA target sequence
gaacagaaagactttctgtac

SEQ ID NO: 3495 - DNA, 21 bp, Artificial sequence
  SiRNA target sequence
aacagaaagactttctgtacg

SEQ ID NO: 3496 - DNA, 21 bp, Artificial sequence
  SiRNA target sequence
acagaaagactttctgtacgt

SEQ ID NO: 3497 - DNA, 21 bp, Artificial sequence
  SiRNA target sequence
cagaaagactttctgtacgta

SEQ ID NO: 3498 - DNA, 21 bp, Artificial sequence
  SiRNA target sequence
agaaagactttctgtacgtag

SEQ ID NO: 3499 - DNA, 21 bp, Artificial sequence
  SiRNA target sequence
gaaagactttctgtacgtaga

SEQ ID NO: 3500 - DNA, 21 bp, Artificial sequence
  SiRNA target sequence
aaagactttctgtacgtagat

SEQ ID NO: 3501 - DNA, 21 bp, Artificial sequence
  SiRNA target sequence
aagactttctgtacgtagatc

SEQ ID NO: 3502 - DNA, 21 bp, Artificial sequence
  SiRNA target sequence
agactttctgtacgtagatct

SEQ ID NO: 3503 - DNA, 21 bp, Artificial sequence
  SiRNA target sequence
gactttctgtacgtagatctt

SEQ ID NO: 3504 - DNA, 21 bp, Artificial sequence
  SiRNA target sequence
actttctgtacgtagatcttc

SEQ ID NO: 3505 - DNA, 21 bp, Artificial sequence
  SiRNA target sequence
ctttctgtacgtagatcttct

SEQ ID NO: 3506 - DNA, 21 bp, Artificial sequence
  SiRNA target sequence
tttctgtacgtagatcttctt

SEQ ID NO: 3507 - DNA, 21 bp, Artificial sequence
  SiRNA target sequence
ttctgtacgtagatcttcttg

SEQ ID NO: 3508 - DNA, 21 bp, Artificial sequence
  SiRNA target sequence
tctgtacgtagatcttcttgt

SEQ ID NO: 3509 - DNA, 21 bp, Artificial sequence
  SiRNA target sequence
ctgtacgtagatcttcttgta

SEQ ID NO: 3510 - DNA, 21 bp, Artificial sequence
  SiRNA target sequence
tgtacgtagatcttcttgtat

SEQ ID NO: 3511 - DNA, 21 bp, Artificial sequence
  SiRNA target sequence
gtacgtagatcttcttgtatt

SEQ ID NO: 3512 - DNA, 21 bp, Artificial sequence
  SiRNA target sequence
tacgtagatcttcttgtattt

SEQ ID NO: 3513 - DNA, 21 bp, Artificial sequence
  SiRNA target sequence
acgtagatcttcttgtatttt

SEQ ID NO: 3514 - DNA, 21 bp, Artificial sequence
  SiRNA target sequence
cgtagatcttcttgtatttta

SEQ ID NO: 3515 - DNA, 21 bp, Artificial sequence
  SiRNA target sequence
gtagatcttcttgtattttac

SEQ ID NO: 3516 - DNA, 21 bp, Artificial sequence
  SiRNA target sequence
tagatcttcttgtattttaca

SEQ ID NO: 3517 - DNA, 21 bp, Artificial sequence
  SiRNA target sequence
agatcttcttgtattttacat

SEQ ID NO: 3518 - DNA, 21 bp, Artificial sequence
  SiRNA target sequence
gatcttcttgtattttacatt

SEQ ID NO: 3519 - DNA, 21 bp, Artificial sequence
  SiRNA target sequence
atcttcttgtattttacattt

SEQ ID NO: 3520 - DNA, 21 bp, Artificial sequence
  SiRNA target sequence
tcttcttgtattttacatttc

SEQ ID NO: 3521 - DNA, 21 bp, Artificial sequence
  SiRNA target sequence
cttcttgtattttacatttct

SEQ ID NO: 3522 - DNA, 21 bp, Artificial sequence
  SiRNA target sequence
ttcttgtattttacatttcta

SEQ ID NO: 3523 - DNA, 21 bp, Artificial sequence
  SiRNA target sequence
tcttgtattttacatttctaa

SEQ ID NO: 3524 - DNA, 21 bp, Artificial sequence
  SiRNA target sequence
cttgtattttacatttctaaa

SEQ ID NO: 3525 - DNA, 21 bp, Artificial sequence
  SiRNA target sequence
ttgtattttacatttctaaaa

SEQ ID NO: 3526 - DNA, 21 bp, Artificial sequence
  SiRNA target sequence
tgtattttacatttctaaaaa

SEQ ID NO: 3527 - DNA, 21 bp, Artificial sequence
  SiRNA target sequence
gtattttacatttctaaaaag

SEQ ID NO: 3528 - DNA, 21 bp, Artificial sequence
  SiRNA target sequence
tattttacatttctaaaaagg

SEQ ID NO: 3529 - DNA, 21 bp, Artificial sequence
  SiRNA target sequence
attttacatttctaaaaagga

SEQ ID NO: 3530 - DNA, 21 bp, Artificial sequence
  SiRNA target sequence
ttttacatttctaaaaaggat

SEQ ID NO: 3531 - DNA, 21 bp, Artificial sequence
  SiRNA target sequence
tttacatttctaaaaaggatg

SEQ ID NO: 3532 - DNA, 21 bp, Artificial sequence
  SiRNA target sequence
ttacatttctaaaaaggatgt

SEQ ID NO: 3533 - DNA, 21 bp, Artificial sequence
  SiRNA target sequence
tacatttctaaaaaggatgtt

SEQ ID NO: 3534 - DNA, 21 bp, Artificial sequence
  SiRNA target sequence
acatttctaaaaaggatgttg

SEQ ID NO: 3535 - DNA, 21 bp, Artificial sequence
  SiRNA target sequence
catttctaaaaaggatgttga

SEQ ID NO: 3536 - DNA, 21 bp, Artificial sequence
  SiRNA target sequence
atttctaaaaaggatgttgaa

SEQ ID NO: 3537 - DNA, 21 bp, Artificial sequence
  SiRNA target sequence
tttctaaaaaggatgttgaaa

SEQ ID NO: 3538 - DNA, 21 bp, Artificial sequence
  SiRNA target sequence
ttctaaaaaggatgttgaaaa

SEQ ID NO: 3539 - DNA, 21 bp, Artificial sequence
  SiRNA target sequence
tctaaaaaggatgttgaaaaa

SEQ ID NO: 3540 - DNA, 21 bp, Artificial sequence
  SiRNA target sequence
ctaaaaaggatgttgaaaaag

SEQ ID NO: 3541 - DNA, 21 bp, Artificial sequence
  SiRNA target sequence
taaaaaggatgttgaaaaagt

SEQ ID NO: 3542 - DNA, 21 bp, Artificial sequence
  SiRNA target sequence
aaaaaggatgttgaaaaagtt

SEQ ID NO: 3543 - DNA, 21 bp, Artificial sequence
  SiRNA target sequence
aaaaggatgttgaaaaagtta

SEQ ID NO: 3544 - DNA, 21 bp, Artificial sequence
  SiRNA target sequence
aaaggatgttgaaaaagttaa

SEQ ID NO: 3545 - DNA, 21 bp, Artificial sequence
  SiRNA target sequence
aaggatgttgaaaaagttaat

SEQ ID NO: 3546 - DNA, 21 bp, Artificial sequence
  SiRNA target sequence
aggatgttgaaaaagttaatg

SEQ ID NO: 3547 - DNA, 21 bp, Artificial sequence
  SiRNA target sequence
ggatgttgaaaaagttaatga

SEQ ID NO: 3548 - DNA, 21 bp, Artificial sequence
  SiRNA target sequence
gatgttgaaaaagttaatgaa

SEQ ID NO: 3549 - DNA, 21 bp, Artificial sequence
  SiRNA target sequence
atgttgaaaaagttaatgaaa

SEQ ID NO: 3550 - DNA, 21 bp, Artificial sequence
  SiRNA target sequence
tgttgaaaaagttaatgaaac

SEQ ID NO: 3551 - DNA, 21 bp, Artificial sequence
  SiRNA target sequence
gttgaaaaagttaatgaaaca

SEQ ID NO: 3552 - DNA, 21 bp, Artificial sequence
  SiRNA target sequence
ttgaaaaagttaatgaaacaa

SEQ ID NO: 3553 - DNA, 21 bp, Artificial sequence
  SiRNA target sequence
tgaaaaagttaatgaaacaat

SEQ ID NO: 3554 - DNA, 21 bp, Artificial sequence
  SiRNA target sequence
gaaaaagttaatgaaacaatt

SEQ ID NO: 3555 - DNA, 21 bp, Artificial sequence
  SiRNA target sequence
aaaaagttaatgaaacaatta

SEQ ID NO: 3556 - DNA, 21 bp, Artificial sequence
  SiRNA target sequence
aaaagttaatgaaacaattaa

SEQ ID NO: 3557 - DNA, 21 bp, Artificial sequence
  SiRNA target sequence
aaagttaatgaaacaattaat

SEQ ID NO: 3558 - DNA, 21 bp, Artificial sequence
  SiRNA target sequence
aagttaatgaaacaattaata

SEQ ID NO: 3559 - DNA, 21 bp, Artificial sequence
  SiRNA target sequence
agttaatgaaacaattaataa

SEQ ID NO: 3560 - DNA, 21 bp, Artificial sequence
  SiRNA target sequence
gttaatgaaacaattaataat

SEQ ID NO: 3561 - DNA, 21 bp, Artificial sequence
  SiRNA target sequence
ttaatgaaacaattaataatt

SEQ ID NO: 3562 - DNA, 21 bp, Artificial sequence
  SiRNA target sequence
taatgaaacaattaataattt

SEQ ID NO: 3563 - DNA, 21 bp, Artificial sequence
  SiRNA target sequence
aatgaaacaattaataattta

SEQ ID NO: 3564 - DNA, 21 bp, Artificial sequence
  SiRNA target sequence
atgaaacaattaataatttaa

SEQ ID NO: 3565 - DNA, 21 bp, Artificial sequence
  SiRNA target sequence
tgaaacaattaataatttaaa

SEQ ID NO: 3566 - DNA, 21 bp, Artificial sequence
  SiRNA target sequence
gaaacaattaataatttaaaa

SEQ ID NO: 3567 - DNA, 21 bp, Artificial sequence
  SiRNA target sequence
aaacaattaataatttaaaag

SEQ ID NO: 3568 - DNA, 21 bp, Artificial sequence
  SiRNA target sequence
aacaattaataatttaaaaga

SEQ ID NO: 3569 - DNA, 21 bp, Artificial sequence
  SiRNA target sequence
acaattaataatttaaaagag

SEQ ID NO: 3570 - DNA, 21 bp, Artificial sequence
  SiRNA target sequence
caattaataatttaaaagaga

SEQ ID NO: 3571 - DNA, 21 bp, Artificial sequence
  SiRNA target sequence
aattaataatttaaaagagac

SEQ ID NO: 3572 - DNA, 21 bp, Artificial sequence
  SiRNA target sequence
attaataatttaaaagagact

SEQ ID NO: 3573 - DNA, 21 bp, Artificial sequence
  SiRNA target sequence
ttaataatttaaaagagactc

SEQ ID NO: 3574 - DNA, 21 bp, Artificial sequence
  SiRNA target sequence
taataatttaaaagagactct

SEQ ID NO: 3575 - DNA, 21 bp, Artificial sequence
  SiRNA target sequence
aataatttaaaagagactctt

SEQ ID NO: 3576 - DNA, 21 bp, Artificial sequence
  SiRNA target sequence
ataatttaaaagagactctta

SEQ ID NO: 3577 - DNA, 21 bp, Artificial sequence
  SiRNA target sequence
taatttaaaagagactcttac

SEQ ID NO: 3578 - DNA, 21 bp, Artificial sequence
  SiRNA target sequence
aatttaaaagagactcttacc

SEQ ID NO: 3579 - DNA, 21 bp, Artificial sequence
  SiRNA target sequence
atttaaaagagactcttaccc

SEQ ID NO: 3580 - DNA, 21 bp, Artificial sequence
  SiRNA target sequence
tttaaaagagactcttacccc

SEQ ID NO: 3581 - DNA, 21 bp, Artificial sequence
  SiRNA target sequence
ttaaaagagactcttaccccc

SEQ ID NO: 3582 - DNA, 21 bp, Artificial sequence
  SiRNA target sequence
taaaagagactcttaccccca

SEQ ID NO: 3583 - DNA, 21 bp, Artificial sequence
  SiRNA target sequence
aaaagagactcttacccccac

SEQ ID NO: 3584 - DNA, 21 bp, Artificial sequence
  SiRNA target sequence
aaagagactcttacccccact

SEQ ID NO: 3585 - DNA, 21 bp, Artificial sequence
  SiRNA target sequence
aagagactcttacccccactt

SEQ ID NO: 3586 - DNA, 21 bp, Artificial sequence
  SiRNA target sequence
agagactcttacccccacttt

SEQ ID NO: 3587 - DNA, 21 bp, Artificial sequence
  SiRNA target sequence
gagactcttacccccacttta

SEQ ID NO: 3588 - DNA, 21 bp, Artificial sequence
  SiRNA target sequence
agactcttacccccactttat

SEQ ID NO: 3589 - DNA, 21 bp, Artificial sequence
  SiRNA target sequence
gactcttacccccactttatt

SEQ ID NO: 3590 - DNA, 21 bp, Artificial sequence
  SiRNA target sequence
actcttacccccactttattg

SEQ ID NO: 3591 - DNA, 21 bp, Artificial sequence
  SiRNA target sequence
ctcttacccccactttattgg

SEQ ID NO: 3592 - DNA, 21 bp, Artificial sequence
  SiRNA target sequence
tcttacccccactttattgga

SEQ ID NO: 3593 - DNA, 21 bp, Artificial sequence
  SiRNA target sequence
cttacccccactttattggaa

SEQ ID NO: 3594 - DNA, 21 bp, Artificial sequence
  SiRNA target sequence
ttacccccactttattggaac

SEQ ID NO: 3595 - DNA, 21 bp, Artificial sequence
  SiRNA target sequence
tacccccactttattggaact

SEQ ID NO: 3596 - DNA, 21 bp, Artificial sequence
  SiRNA target sequence
acccccactttattggaactt

SEQ ID NO: 3597 - DNA, 21 bp, Artificial sequence
  SiRNA target sequence
cccccactttattggaactta

SEQ ID NO: 3598 - DNA, 21 bp, Artificial sequence
  SiRNA target sequence
ccccactttattggaacttat

SEQ ID NO: 3599 - DNA, 21 bp, Artificial sequence
  SiRNA target sequence
cccactttattggaacttatt

SEQ ID NO: 3600 - DNA, 21 bp, Artificial sequence
  SiRNA target sequence
ccactttattggaacttattg

SEQ ID NO: 3601 - DNA, 21 bp, Artificial sequence
  SiRNA target sequence
cactttattggaacttattgg

SEQ ID NO: 3602 - DNA, 21 bp, Artificial sequence
  SiRNA target sequence
actttattggaacttattgga

SEQ ID NO: 3603 - DNA, 21 bp, Artificial sequence
  SiRNA target sequence
ctttattggaacttattggag

SEQ ID NO: 3604 - DNA, 21 bp, Artificial sequence
  SiRNA target sequence
tttattggaacttattggaga

SEQ ID NO: 3605 - DNA, 21 bp, Artificial sequence
  SiRNA target sequence
ttattggaacttattggagaa

SEQ ID NO: 3606 - DNA, 21 bp, Artificial sequence
  SiRNA target sequence
tattggaacttattggagaat

SEQ ID NO: 3607 - DNA, 21 bp, Artificial sequence
  SiRNA target sequence
attggaacttattggagaata

SEQ ID NO: 3608 - DNA, 21 bp, Artificial sequence
  SiRNA target sequence
ttggaacttattggagaatat

SEQ ID NO: 3609 - DNA, 21 bp, Artificial sequence
  SiRNA target sequence
tggaacttattggagaatatt

SEQ ID NO: 3610 - DNA, 21 bp, Artificial sequence
  SiRNA target sequence
ggaacttattggagaatatta

SEQ ID NO: 3611 - DNA, 21 bp, Artificial sequence
  SiRNA target sequence
gaacttattggagaatattat

SEQ ID NO: 3612 - DNA, 21 bp, Artificial sequence
  SiRNA target sequence
aacttattggagaatattatt

SEQ ID NO: 3613 - DNA, 21 bp, Artificial sequence
  SiRNA target sequence
acttattggagaatattattt

SEQ ID NO: 3614 - DNA, 21 bp, Artificial sequence
  SiRNA target sequence
cttattggagaatattattta

SEQ ID NO: 3615 - DNA, 21 bp, Artificial sequence
  SiRNA target sequence
ttattggagaatattatttaa

SEQ ID NO: 3616 - DNA, 21 bp, Artificial sequence
  SiRNA target sequence
tattggagaatattatttaaa

SEQ ID NO: 3617 - DNA, 21 bp, Artificial sequence
  SiRNA target sequence
attggagaatattatttaaaa

SEQ ID NO: 3618 - DNA, 21 bp, Artificial sequence
  SiRNA target sequence
ttggagaatattatttaaaaa

SEQ ID NO: 3619 - DNA, 21 bp, Artificial sequence
  SiRNA target sequence
tggagaatattatttaaaaag

SEQ ID NO: 3620 - DNA, 21 bp, Artificial sequence
  SiRNA target sequence
ggagaatattatttaaaaagt

SEQ ID NO: 3621 - DNA, 21 bp, Artificial sequence
  SiRNA target sequence
gagaatattatttaaaaagtg

SEQ ID NO: 3622 - DNA, 21 bp, Artificial sequence
  SiRNA target sequence
agaatattatttaaaaagtgg

SEQ ID NO: 3623 - DNA, 21 bp, Artificial sequence
  SiRNA target sequence
gaatattatttaaaaagtgga

SEQ ID NO: 3624 - DNA, 21 bp, Artificial sequence
  SiRNA target sequence
aatattatttaaaaagtggaa

SEQ ID NO: 3625 - DNA, 21 bp, Artificial sequence
  SiRNA target sequence
atattatttaaaaagtggaaa

SEQ ID NO: 3626 - DNA, 21 bp, Artificial sequence
  SiRNA target sequence
tattatttaaaaagtggaaat

SEQ ID NO: 3627 - DNA, 21 bp, Artificial sequence
  SiRNA target sequence
attatttaaaaagtggaaatc

SEQ ID NO: 3628 - DNA, 21 bp, Artificial sequence
  SiRNA target sequence
ttatttaaaaagtggaaatca

SEQ ID NO: 3629 - DNA, 21 bp, Artificial sequence
  SiRNA target sequence
tatttaaaaagtggaaatcac

SEQ ID NO: 3630 - DNA, 21 bp, Artificial sequence
  SiRNA target sequence
atttaaaaagtggaaatcact

SEQ ID NO: 3631 - DNA, 21 bp, Artificial sequence
  SiRNA target sequence
tttaaaaagtggaaatcactc

SEQ ID NO: 3632 - DNA, 21 bp, Artificial sequence
  SiRNA target sequence
ttaaaaagtggaaatcactct

SEQ ID NO: 3633 - DNA, 21 bp, Artificial sequence
  SiRNA target sequence
taaaaagtggaaatcactcta

SEQ ID NO: 3634 - DNA, 21 bp, Artificial sequence
  SiRNA target sequence
aaaaagtggaaatcactctaa

SEQ ID NO: 3635 - DNA, 21 bp, Artificial sequence
  SiRNA target sequence
aaaagtggaaatcactctaaa

SEQ ID NO: 3636 - DNA, 21 bp, Artificial sequence
  SiRNA target sequence
aaagtggaaatcactctaaaa

SEQ ID NO: 3637 - DNA, 21 bp, Artificial sequence
  SiRNA target sequence
aagtggaaatcactctaaaat

SEQ ID NO: 3638 - DNA, 21 bp, Artificial sequence
  SiRNA target sequence
agtggaaatcactctaaaatg

SEQ ID NO: 3639 - DNA, 21 bp, Artificial sequence
  SiRNA target sequence
gtggaaatcactctaaaatgt

SEQ ID NO: 3640 - DNA, 21 bp, Artificial sequence
  SiRNA target sequence
tggaaatcactctaaaatgtt

SEQ ID NO: 3641 - DNA, 21 bp, Artificial sequence
  SiRNA target sequence
ggaaatcactctaaaatgtta

SEQ ID NO: 3642 - DNA, 21 bp, Artificial sequence
  SiRNA target sequence
gaaatcactctaaaatgttag

SEQ ID NO: 3643 - DNA, 21 bp, Artificial sequence
  SiRNA target sequence
aaatcactctaaaatgttaga

SEQ ID NO: 3644 - DNA, 21 bp, Artificial sequence
  SiRNA target sequence
aatcactctaaaatgttagat

SEQ ID NO: 3645 - DNA, 21 bp, Artificial sequence
  SiRNA target sequence
atcactctaaaatgttagatc

SEQ ID NO: 3646 - DNA, 21 bp, Artificial sequence
  SiRNA target sequence
tcactctaaaatgttagatct

SEQ ID NO: 3647 - DNA, 21 bp, Artificial sequence
  SiRNA target sequence
cactctaaaatgttagatcta

SEQ ID NO: 3648 - DNA, 21 bp, Artificial sequence
  SiRNA target sequence
actctaaaatgttagatctat

SEQ ID NO: 3649 - DNA, 21 bp, Artificial sequence
  SiRNA target sequence
ctctaaaatgttagatctatt

SEQ ID NO: 3650 - DNA, 21 bp, Artificial sequence
  SiRNA target sequence
tctaaaatgttagatctatta

SEQ ID NO: 3651 - DNA, 21 bp, Artificial sequence
  SiRNA target sequence
ctaaaatgttagatctattat

SEQ ID NO: 3652 - DNA, 21 bp, Artificial sequence
  SiRNA target sequence
taaaatgttagatctattatc

SEQ ID NO: 3653 - DNA, 21 bp, Artificial sequence
  SiRNA target sequence
aaaatgttagatctattatct

SEQ ID NO: 3654 - DNA, 21 bp, Artificial sequence
  SiRNA target sequence
aaatgttagatctattatcta

SEQ ID NO: 3655 - DNA, 21 bp, Artificial sequence
  SiRNA target sequence
aatgttagatctattatctag

SEQ ID NO: 3656 - DNA, 21 bp, Artificial sequence
  SiRNA target sequence
atgttagatctattatctagt

SEQ ID NO: 3657 - DNA, 21 bp, Artificial sequence
  SiRNA target sequence
tgttagatctattatctagtc

SEQ ID NO: 3658 - DNA, 21 bp, Artificial sequence
  SiRNA target sequence
gttagatctattatctagtca

SEQ ID NO: 3659 - DNA, 21 bp, Artificial sequence
  SiRNA target sequence
ttagatctattatctagtcat

SEQ ID NO: 3660 - DNA, 21 bp, Artificial sequence
  SiRNA target sequence
tagatctattatctagtcatc

SEQ ID NO: 3661 - DNA, 21 bp, Artificial sequence
  SiRNA target sequence
agatctattatctagtcatcc

SEQ ID NO: 3662 - DNA, 21 bp, Artificial sequence
  SiRNA target sequence
gatctattatctagtcatcca

SEQ ID NO: 3663 - DNA, 21 bp, Artificial sequence
  SiRNA target sequence
atctattatctagtcatccag

SEQ ID NO: 3664 - DNA, 21 bp, Artificial sequence
  SiRNA target sequence
tctattatctagtcatccaga

SEQ ID NO: 3665 - DNA, 21 bp, Artificial sequence
  SiRNA target sequence
ctattatctagtcatccagat

SEQ ID NO: 3666 - DNA, 21 bp, Artificial sequence
  SiRNA target sequence
tattatctagtcatccagata

SEQ ID NO: 3667 - DNA, 21 bp, Artificial sequence
  SiRNA target sequence
attatctagtcatccagatac

SEQ ID NO: 3668 - DNA, 21 bp, Artificial sequence
  SiRNA target sequence
ttatctagtcatccagatact

SEQ ID NO: 3669 - DNA, 21 bp, Artificial sequence
  SiRNA target sequence
tatctagtcatccagatactc

SEQ ID NO: 3670 - DNA, 21 bp, Artificial sequence
  SiRNA target sequence
atctagtcatccagatactcc

SEQ ID NO: 3671 - DNA, 21 bp, Artificial sequence
  SiRNA target sequence
tctagtcatccagatactcct

SEQ ID NO: 3672 - DNA, 21 bp, Artificial sequence
  SiRNA target sequence
ctagtcatccagatactcctg

SEQ ID NO: 3673 - DNA, 21 bp, Artificial sequence
  SiRNA target sequence
tagtcatccagatactcctgg

SEQ ID NO: 3674 - DNA, 21 bp, Artificial sequence
  SiRNA target sequence
agtcatccagatactcctggt

SEQ ID NO: 3675 - DNA, 21 bp, Artificial sequence
  SiRNA target sequence
gtcatccagatactcctggta

SEQ ID NO: 3676 - DNA, 21 bp, Artificial sequence
  SiRNA target sequence
tcatccagatactcctggtaa

SEQ ID NO: 3677 - DNA, 21 bp, Artificial sequence
  SiRNA target sequence
catccagatactcctggtaaa

SEQ ID NO: 3678 - DNA, 21 bp, Artificial sequence
  SiRNA target sequence
atccagatactcctggtaaat

SEQ ID NO: 3679 - DNA, 21 bp, Artificial sequence
  SiRNA target sequence
tccagatactcctggtaaatt

SEQ ID NO: 3680 - DNA, 21 bp, Artificial sequence
  SiRNA target sequence
ccagatactcctggtaaatta

SEQ ID NO: 3681 - DNA, 21 bp, Artificial sequence
  SiRNA target sequence
cagatactcctggtaaattac

SEQ ID NO: 3682 - DNA, 21 bp, Artificial sequence
  SiRNA target sequence
agatactcctggtaaattact

SEQ ID NO: 3683 - DNA, 21 bp, Artificial sequence
  SiRNA target sequence
gatactcctggtaaattactt

SEQ ID NO: 3684 - DNA, 21 bp, Artificial sequence
  SiRNA target sequence
atactcctggtaaattacttt

SEQ ID NO: 3685 - DNA, 21 bp, Artificial sequence
  SiRNA target sequence
tactcctggtaaattactttt

SEQ ID NO: 3686 - DNA, 21 bp, Artificial sequence
  SiRNA target sequence
actcctggtaaattactttta

SEQ ID NO: 3687 - DNA, 21 bp, Artificial sequence
  SiRNA target sequence
ctcctggtaaattacttttaa

SEQ ID NO: 3688 - DNA, 21 bp, Artificial sequence
  SiRNA target sequence
tcctggtaaattacttttaac

SEQ ID NO: 3689 - DNA, 21 bp, Artificial sequence
  SiRNA target sequence
cctggtaaattacttttaacg

SEQ ID NO: 3690 - DNA, 21 bp, Artificial sequence
  SiRNA target sequence
ctggtaaattacttttaacgg

SEQ ID NO: 3691 - DNA, 21 bp, Artificial sequence
  SiRNA target sequence
tggtaaattacttttaacggc

SEQ ID NO: 3692 - DNA, 21 bp, Artificial sequence
  SiRNA target sequence
ggtaaattacttttaacggca

SEQ ID NO: 3693 - DNA, 21 bp, Artificial sequence
  SiRNA target sequence
gtaaattacttttaacggcac

SEQ ID NO: 3694 - DNA, 21 bp, Artificial sequence
  SiRNA target sequence
taaattacttttaacggcact

SEQ ID NO: 3695 - DNA, 21 bp, Artificial sequence
  SiRNA target sequence
aaattacttttaacggcactt

SEQ ID NO: 3696 - DNA, 21 bp, Artificial sequence
  SiRNA target sequence
aattacttttaacggcacttt

SEQ ID NO: 3697 - DNA, 21 bp, Artificial sequence
  SiRNA target sequence
attacttttaacggcacttta

SEQ ID NO: 3698 - DNA, 21 bp, Artificial sequence
  SiRNA target sequence
ttacttttaacggcactttat

SEQ ID NO: 3699 - DNA, 21 bp, Artificial sequence
  SiRNA target sequence
tacttttaacggcactttatg

SEQ ID NO: 3700 - DNA, 21 bp, Artificial sequence
  SiRNA target sequence
acttttaacggcactttatgc

SEQ ID NO: 3701 - DNA, 21 bp, Artificial sequence
  SiRNA target sequence
cttttaacggcactttatgca

SEQ ID NO: 3702 - DNA, 21 bp, Artificial sequence
  SiRNA target sequence
ttttaacggcactttatgcaa

SEQ ID NO: 3703 - DNA, 21 bp, Artificial sequence
  SiRNA target sequence
tttaacggcactttatgcaat

SEQ ID NO: 3704 - DNA, 21 bp, Artificial sequence
  SiRNA target sequence
ttaacggcactttatgcaata

SEQ ID NO: 3705 - DNA, 21 bp, Artificial sequence
  SiRNA target sequence
taacggcactttatgcaataa

SEQ ID NO: 3706 - DNA, 21 bp, Artificial sequence
  SiRNA target sequence
aacggcactttatgcaataag

SEQ ID NO: 3707 - DNA, 21 bp, Artificial sequence
  SiRNA target sequence
acggcactttatgcaataagt

SEQ ID NO: 3708 - DNA, 21 bp, Artificial sequence
  SiRNA target sequence
cggcactttatgcaataagta

SEQ ID NO: 3709 - DNA, 21 bp, Artificial sequence
  SiRNA target sequence
ggcactttatgcaataagtat

SEQ ID NO: 3710 - DNA, 21 bp, Artificial sequence
  SiRNA target sequence
gcactttatgcaataagtatt

SEQ ID NO: 3711 - DNA, 21 bp, Artificial sequence
  SiRNA target sequence
cactttatgcaataagtattg

SEQ ID NO: 3712 - DNA, 21 bp, Artificial sequence
  SiRNA target sequence
actttatgcaataagtattga

SEQ ID NO: 3713 - DNA, 21 bp, Artificial sequence
  SiRNA target sequence
ctttatgcaataagtattgat

SEQ ID NO: 3714 - DNA, 21 bp, Artificial sequence
  SiRNA target sequence
tttatgcaataagtattgata

SEQ ID NO: 3715 - DNA, 21 bp, Artificial sequence
  SiRNA target sequence
ttatgcaataagtattgataa

SEQ ID NO: 3716 - DNA, 21 bp, Artificial sequence
  SiRNA target sequence
tatgcaataagtattgataag

SEQ ID NO: 3717 - DNA, 21 bp, Artificial sequence
  SiRNA target sequence
atgcaataagtattgataaga

SEQ ID NO: 3718 - DNA, 21 bp, Artificial sequence
  SiRNA target sequence
tgcaataagtattgataagaa

SEQ ID NO: 3719 - DNA, 21 bp, Artificial sequence
  SiRNA target sequence
gcaataagtattgataagaaa

SEQ ID NO: 3720 - DNA, 21 bp, Artificial sequence
  SiRNA target sequence
caataagtattgataagaaaa

SEQ ID NO: 3721 - DNA, 21 bp, Artificial sequence
  SiRNA target sequence
aataagtattgataagaaaaa

SEQ ID NO: 3722 - DNA, 21 bp, Artificial sequence
  SiRNA target sequence
ataagtattgataagaaaaag

SEQ ID NO: 3723 - DNA, 21 bp, Artificial sequence
  SiRNA target sequence
taagtattgataagaaaaagg

SEQ ID NO: 3724 - DNA, 21 bp, Artificial sequence
  SiRNA target sequence
aagtattgataagaaaaagga

SEQ ID NO: 3725 - DNA, 21 bp, Artificial sequence
  SiRNA target sequence
agtattgataagaaaaaggat

SEQ ID NO: 3726 - DNA, 21 bp, Artificial sequence
  SiRNA target sequence
gtattgataagaaaaaggatg

SEQ ID NO: 3727 - DNA, 21 bp, Artificial sequence
  SiRNA target sequence
tattgataagaaaaaggatgc

SEQ ID NO: 3728 - DNA, 21 bp, Artificial sequence
  SiRNA target sequence
attgataagaaaaaggatgct

SEQ ID NO: 3729 - DNA, 21 bp, Artificial sequence
  SiRNA target sequence
ttgataagaaaaaggatgcta

SEQ ID NO: 3730 - DNA, 21 bp, Artificial sequence
  SiRNA target sequence
tgataagaaaaaggatgctat

SEQ ID NO: 3731 - DNA, 21 bp, Artificial sequence
  SiRNA target sequence
gataagaaaaaggatgctata

SEQ ID NO: 3732 - DNA, 21 bp, Artificial sequence
  SiRNA target sequence
ataagaaaaaggatgctatag

SEQ ID NO: 3733 - DNA, 21 bp, Artificial sequence
  SiRNA target sequence
taagaaaaaggatgctataga

SEQ ID NO: 3734 - DNA, 21 bp, Artificial sequence
  SiRNA target sequence
aagaaaaaggatgctatagaa

SEQ ID NO: 3735 - DNA, 21 bp, Artificial sequence
  SiRNA target sequence
agaaaaaggatgctatagaaa

SEQ ID NO: 3736 - DNA, 21 bp, Artificial sequence
  SiRNA target sequence
gaaaaaggatgctatagaaat

SEQ ID NO: 3737 - DNA, 21 bp, Artificial sequence
  SiRNA target sequence
aaaaaggatgctatagaaatt

SEQ ID NO: 3738 - DNA, 21 bp, Artificial sequence
  SiRNA target sequence
aaaaggatgctatagaaattt

SEQ ID NO: 3739 - DNA, 21 bp, Artificial sequence
  SiRNA target sequence
aaaggatgctatagaaatttt

SEQ ID NO: 3740 - DNA, 21 bp, Artificial sequence
  SiRNA target sequence
aaggatgctatagaaatttta

SEQ ID NO: 3741 - DNA, 21 bp, Artificial sequence
  SiRNA target sequence
aggatgctatagaaattttat

SEQ ID NO: 3742 - DNA, 21 bp, Artificial sequence
  SiRNA target sequence
ggatgctatagaaattttata

SEQ ID NO: 3743 - DNA, 21 bp, Artificial sequence
  SiRNA target sequence
gatgctatagaaattttatat

SEQ ID NO: 3744 - DNA, 21 bp, Artificial sequence
  SiRNA target sequence
atgctatagaaattttatata

SEQ ID NO: 3745 - DNA, 21 bp, Artificial sequence
  SiRNA target sequence
tgctatagaaattttatatag

SEQ ID NO: 3746 - DNA, 21 bp, Artificial sequence
  SiRNA target sequence
gctatagaaattttatataga

SEQ ID NO: 3747 - DNA, 21 bp, Artificial sequence
  SiRNA target sequence
ctatagaaattttatatagaa

SEQ ID NO: 3748 - DNA, 21 bp, Artificial sequence
  SiRNA target sequence
tatagaaattttatatagaag

SEQ ID NO: 3749 - DNA, 21 bp, Artificial sequence
  SiRNA target sequence
atagaaattttatatagaagt

SEQ ID NO: 3750 - DNA, 21 bp, Artificial sequence
  SiRNA target sequence
tagaaattttatatagaagta

SEQ ID NO: 3751 - DNA, 21 bp, Artificial sequence
  SiRNA target sequence
agaaattttatatagaagtat

SEQ ID NO: 3752 - DNA, 21 bp, Artificial sequence
  SiRNA target sequence
gaaattttatatagaagtata

SEQ ID NO: 3753 - DNA, 21 bp, Artificial sequence
  SiRNA target sequence
aaattttatatagaagtatat

SEQ ID NO: 3754 - DNA, 21 bp, Artificial sequence
  SiRNA target sequence
aattttatatagaagtatatc

SEQ ID NO: 3755 - DNA, 21 bp, Artificial sequence
  SiRNA target sequence
attttatatagaagtatatca

SEQ ID NO: 3756 - DNA, 21 bp, Artificial sequence
  SiRNA target sequence
ttttatatagaagtatatcag

SEQ ID NO: 3757 - DNA, 21 bp, Artificial sequence
  SiRNA target sequence
tttatatagaagtatatcaga

SEQ ID NO: 3758 - DNA, 21 bp, Artificial sequence
  SiRNA target sequence
ttatatagaagtatatcagaa

SEQ ID NO: 3759 - DNA, 21 bp, Artificial sequence
  SiRNA target sequence
tatatagaagtatatcagaat

SEQ ID NO: 3760 - DNA, 21 bp, Artificial sequence
  SiRNA target sequence
atatagaagtatatcagaata

SEQ ID NO: 3761 - DNA, 21 bp, Artificial sequence
  SiRNA target sequence
tatagaagtatatcagaatat

SEQ ID NO: 3762 - DNA, 21 bp, Artificial sequence
  SiRNA target sequence
atagaagtatatcagaatatt

SEQ ID NO: 3763 - DNA, 21 bp, Artificial sequence
  SiRNA target sequence
tagaagtatatcagaatattc

SEQ ID NO: 3764 - DNA, 21 bp, Artificial sequence
  SiRNA target sequence
agaagtatatcagaatattca

SEQ ID NO: 3765 - DNA, 21 bp, Artificial sequence
  SiRNA target sequence
gaagtatatcagaatattcat

SEQ ID NO: 3766 - DNA, 21 bp, Artificial sequence
  SiRNA target sequence
aagtatatcagaatattcatc

SEQ ID NO: 3767 - DNA, 21 bp, Artificial sequence
  SiRNA target sequence
agtatatcagaatattcatct

SEQ ID NO: 3768 - DNA, 21 bp, Artificial sequence
  SiRNA target sequence
gtatatcagaatattcatctt

SEQ ID NO: 3769 - DNA, 21 bp, Artificial sequence
  SiRNA target sequence
tatatcagaatattcatctta

SEQ ID NO: 3770 - DNA, 21 bp, Artificial sequence
  SiRNA target sequence
atatcagaatattcatcttat

SEQ ID NO: 3771 - DNA, 21 bp, Artificial sequence
  SiRNA target sequence
tatcagaatattcatcttatt

SEQ ID NO: 3772 - DNA, 21 bp, Artificial sequence
  SiRNA target sequence
atcagaatattcatcttattt

SEQ ID NO: 3773 - DNA, 21 bp, Artificial sequence
  SiRNA target sequence
tcagaatattcatcttatttt

SEQ ID NO: 3774 - DNA, 21 bp, Artificial sequence
  SiRNA target sequence
cagaatattcatcttatttta

SEQ ID NO: 3775 - DNA, 21 bp, Artificial sequence
  SiRNA target sequence
agaatattcatcttattttaa

SEQ ID NO: 3776 - DNA, 21 bp, Artificial sequence
  SiRNA target sequence
gaatattcatcttattttaaa

SEQ ID NO: 3777 - DNA, 21 bp, Artificial sequence
  SiRNA target sequence
aatattcatcttattttaaat

SEQ ID NO: 3778 - DNA, 21 bp, Artificial sequence
  SiRNA target sequence
atattcatcttattttaaatc

SEQ ID NO: 3779 - DNA, 21 bp, Artificial sequence
  SiRNA target sequence
tattcatcttattttaaatct

SEQ ID NO: 3780 - DNA, 21 bp, Artificial sequence
  SiRNA target sequence
attcatcttattttaaatctt

SEQ ID NO: 3781 - DNA, 21 bp, Artificial sequence
  SiRNA target sequence
ttcatcttattttaaatctta

SEQ ID NO: 3782 - DNA, 21 bp, Artificial sequence
  SiRNA target sequence
tcatcttattttaaatcttat

SEQ ID NO: 3783 - DNA, 21 bp, Artificial sequence
  SiRNA target sequence
catcttattttaaatcttatt

SEQ ID NO: 3784 - DNA, 21 bp, Artificial sequence
  SiRNA target sequence
atcttattttaaatcttattt

SEQ ID NO: 3785 - DNA, 21 bp, Artificial sequence
  SiRNA target sequence
tcttattttaaatcttatttg

SEQ ID NO: 3786 - DNA, 21 bp, Artificial sequence
  SiRNA target sequence
cttattttaaatcttatttgt

SEQ ID NO: 3787 - DNA, 21 bp, Artificial sequence
  SiRNA target sequence
ttattttaaatcttatttgta

SEQ ID NO: 3788 - DNA, 21 bp, Artificial sequence
  SiRNA target sequence
tattttaaatcttatttgtat

SEQ ID NO: 3789 - DNA, 21 bp, Artificial sequence
  SiRNA target sequence
attttaaatcttatttgtatt

SEQ ID NO: 3790 - DNA, 21 bp, Artificial sequence
  SiRNA target sequence
ttttaaatcttatttgtattt

SEQ ID NO: 3791 - DNA, 21 bp, Artificial sequence
  SiRNA target sequence
tttaaatcttatttgtattta

SEQ ID NO: 3792 - DNA, 21 bp, Artificial sequence
  SiRNA target sequence
ttaaatcttatttgtatttag

SEQ ID NO: 3793 - DNA, 21 bp, Artificial sequence
  SiRNA target sequence
taaatcttatttgtatttagg

SEQ ID NO: 3794 - DNA, 21 bp, Artificial sequence
  SiRNA target sequence
aaatcttatttgtatttagga

SEQ ID NO: 3795 - DNA, 21 bp, Artificial sequence
  SiRNA target sequence
aatcttatttgtatttaggaa

SEQ ID NO: 3796 - DNA, 21 bp, Artificial sequence
  SiRNA target sequence
atcttatttgtatttaggaaa

SEQ ID NO: 3797 - DNA, 21 bp, Artificial sequence
  SiRNA target sequence
tcttatttgtatttaggaaat

SEQ ID NO: 3798 - DNA, 21 bp, Artificial sequence
  SiRNA target sequence
cttatttgtatttaggaaata

SEQ ID NO: 3799 - DNA, 21 bp, Artificial sequence
  SiRNA target sequence
ttatttgtatttaggaaatat

SEQ ID NO: 3800 - DNA, 21 bp, Artificial sequence
  SiRNA target sequence
tatttgtatttaggaaatatt

SEQ ID NO: 3801 - DNA, 21 bp, Artificial sequence
  SiRNA target sequence
atttgtatttaggaaatattt

SEQ ID NO: 3802 - DNA, 21 bp, Artificial sequence
  SiRNA target sequence
tttgtatttaggaaatatttt

SEQ ID NO: 3803 - DNA, 21 bp, Artificial sequence
  SiRNA target sequence
ttgtatttaggaaatatttta

SEQ ID NO: 3804 - DNA, 21 bp, Artificial sequence
  SiRNA target sequence
tgtatttaggaaatattttaa

SEQ ID NO: 3805 - DNA, 21 bp, Artificial sequence
  SiRNA target sequence
gtatttaggaaatattttaat

SEQ ID NO: 3806 - DNA, 21 bp, Artificial sequence
  SiRNA target sequence
tatttaggaaatattttaata

SEQ ID NO: 3807 - DNA, 21 bp, Artificial sequence
  SiRNA target sequence
atttaggaaatattttaataa

SEQ ID NO: 3808 - DNA, 21 bp, Artificial sequence
  SiRNA target sequence
tttaggaaatattttaataaa

SEQ ID NO: 3809 - DNA, 21 bp, Artificial sequence
  SiRNA target sequence
ttaggaaatattttaataaat

SEQ ID NO: 3810 - DNA, 21 bp, Artificial sequence
  SiRNA target sequence
taggaaatattttaataaatg

SEQ ID NO: 3811 - DNA, 21 bp, Artificial sequence
  SiRNA target sequence
aggaaatattttaataaatga

SEQ ID NO: 3812 - DNA, 21 bp, Artificial sequence
  SiRNA target sequence
ggaaatattttaataaatgat

SEQ ID NO: 3813 - DNA, 21 bp, Artificial sequence
  SiRNA target sequence
gaaatattttaataaatgatg

SEQ ID NO: 3814 - DNA, 21 bp, Artificial sequence
  SiRNA target sequence
aaatattttaataaatgatga

SEQ ID NO: 3815 - DNA, 21 bp, Artificial sequence
  SiRNA target sequence
aatattttaataaatgatgac

SEQ ID NO: 3816 - DNA, 21 bp, Artificial sequence
  SiRNA target sequence
atattttaataaatgatgact

SEQ ID NO: 3817 - DNA, 21 bp, Artificial sequence
  SiRNA target sequence
tattttaataaatgatgactt

SEQ ID NO: 3818 - DNA, 21 bp, Artificial sequence
  SiRNA target sequence
attttaataaatgatgactta

SEQ ID NO: 3819 - DNA, 21 bp, Artificial sequence
  SiRNA target sequence
ttttaataaatgatgacttaa

SEQ ID NO: 3820 - DNA, 21 bp, Artificial sequence
  SiRNA target sequence
tttaataaatgatgacttaaa

SEQ ID NO: 3821 - DNA, 21 bp, Artificial sequence
  SiRNA target sequence
ttaataaatgatgacttaaat

SEQ ID NO: 3822 - DNA, 21 bp, Artificial sequence
  SiRNA target sequence
taataaatgatgacttaaatg

SEQ ID NO: 3823 - DNA, 21 bp, Artificial sequence
  SiRNA target sequence
aataaatgatgacttaaatga

SEQ ID NO: 3824 - DNA, 21 bp, Artificial sequence
  SiRNA target sequence
ataaatgatgacttaaatgaa

SEQ ID NO: 3825 - DNA, 21 bp, Artificial sequence
  SiRNA target sequence
taaatgatgacttaaatgaat

SEQ ID NO: 3826 - DNA, 21 bp, Artificial sequence
  SiRNA target sequence
aaatgatgacttaaatgaatg

SEQ ID NO: 3827 - DNA, 21 bp, Artificial sequence
  SiRNA target sequence
aatgatgacttaaatgaatgc

SEQ ID NO: 3828 - DNA, 21 bp, Artificial sequence
  SiRNA target sequence
atgatgacttaaatgaatgca

SEQ ID NO: 3829 - DNA, 21 bp, Artificial sequence
  SiRNA target sequence
tgatgacttaaatgaatgcag

SEQ ID NO: 3830 - DNA, 21 bp, Artificial sequence
  SiRNA target sequence
gatgacttaaatgaatgcagg

SEQ ID NO: 3831 - DNA, 21 bp, Artificial sequence
  SiRNA target sequence
atgacttaaatgaatgcagga

SEQ ID NO: 3832 - DNA, 21 bp, Artificial sequence
  SiRNA target sequence
tgacttaaatgaatgcaggaa

SEQ ID NO: 3833 - DNA, 21 bp, Artificial sequence
  SiRNA target sequence
gacttaaatgaatgcaggaaa

SEQ ID NO: 3834 - DNA, 21 bp, Artificial sequence
  SiRNA target sequence
acttaaatgaatgcaggaaat

SEQ ID NO: 3835 - DNA, 21 bp, Artificial sequence
  SiRNA target sequence
cttaaatgaatgcaggaaatt

SEQ ID NO: 3836 - DNA, 21 bp, Artificial sequence
  SiRNA target sequence
ttaaatgaatgcaggaaattg

SEQ ID NO: 3837 - DNA, 21 bp, Artificial sequence
  SiRNA target sequence
taaatgaatgcaggaaattgt

SEQ ID NO: 3838 - DNA, 21 bp, Artificial sequence
  SiRNA target sequence
aaatgaatgcaggaaattgtt

SEQ ID NO: 3839 - DNA, 21 bp, Artificial sequence
  SiRNA target sequence
aatgaatgcaggaaattgttt

SEQ ID NO: 3840 - DNA, 21 bp, Artificial sequence
  SiRNA target sequence
atgaatgcaggaaattgttta

SEQ ID NO: 3841 - DNA, 21 bp, Artificial sequence
  SiRNA target sequence
tgaatgcaggaaattgtttaa

SEQ ID NO: 3842 - DNA, 21 bp, Artificial sequence
  SiRNA target sequence
gaatgcaggaaattgtttaat

SEQ ID NO: 3843 - DNA, 21 bp, Artificial sequence
  SiRNA target sequence
aatgcaggaaattgtttaata

SEQ ID NO: 3844 - DNA, 21 bp, Artificial sequence
  SiRNA target sequence
atgcaggaaattgtttaatac

SEQ ID NO: 3845 - DNA, 21 bp, Artificial sequence
  SiRNA target sequence
tgcaggaaattgtttaataca

SEQ ID NO: 3846 - DNA, 21 bp, Artificial sequence
  SiRNA target sequence
gcaggaaattgtttaatacat

SEQ ID NO: 3847 - DNA, 21 bp, Artificial sequence
  SiRNA target sequence
caggaaattgtttaatacatc

SEQ ID NO: 3848 - DNA, 21 bp, Artificial sequence
  SiRNA target sequence
aggaaattgtttaatacatca

SEQ ID NO: 3849 - DNA, 21 bp, Artificial sequence
  SiRNA target sequence
ggaaattgtttaatacatcac

SEQ ID NO: 3850 - DNA, 21 bp, Artificial sequence
  SiRNA target sequence
gaaattgtttaatacatcact

SEQ ID NO: 3851 - DNA, 21 bp, Artificial sequence
  SiRNA target sequence
aaattgtttaatacatcactt

SEQ ID NO: 3852 - DNA, 21 bp, Artificial sequence
  SiRNA target sequence
aattgtttaatacatcacttc

SEQ ID NO: 3853 - DNA, 21 bp, Artificial sequence
  SiRNA target sequence
attgtttaatacatcacttca

SEQ ID NO: 3854 - DNA, 21 bp, Artificial sequence
  SiRNA target sequence
ttgtttaatacatcacttcaa

SEQ ID NO: 3855 - DNA, 21 bp, Artificial sequence
  SiRNA target sequence
tgtttaatacatcacttcaat

SEQ ID NO: 3856 - DNA, 21 bp, Artificial sequence
  SiRNA target sequence
gtttaatacatcacttcaata

SEQ ID NO: 3857 - DNA, 21 bp, Artificial sequence
  SiRNA target sequence
tttaatacatcacttcaatat

SEQ ID NO: 3858 - DNA, 21 bp, Artificial sequence
  SiRNA target sequence
ttaatacatcacttcaatatt

SEQ ID NO: 3859 - DNA, 21 bp, Artificial sequence
  SiRNA target sequence
taatacatcacttcaatattg

SEQ ID NO: 3860 - DNA, 21 bp, Artificial sequence
  SiRNA target sequence
aatacatcacttcaatattgt

SEQ ID NO: 3861 - DNA, 21 bp, Artificial sequence
  SiRNA target sequence
atacatcacttcaatattgtt

SEQ ID NO: 3862 - DNA, 21 bp, Artificial sequence
  SiRNA target sequence
tacatcacttcaatattgttg

SEQ ID NO: 3863 - DNA, 21 bp, Artificial sequence
  SiRNA target sequence
acatcacttcaatattgttgt

SEQ ID NO: 3864 - DNA, 21 bp, Artificial sequence
  SiRNA target sequence
catcacttcaatattgttgta

SEQ ID NO: 3865 - DNA, 21 bp, Artificial sequence
  SiRNA target sequence
atcacttcaatattgttgtaa

SEQ ID NO: 3866 - DNA, 21 bp, Artificial sequence
  SiRNA target sequence
tcacttcaatattgttgtaat

SEQ ID NO: 3867 - DNA, 21 bp, Artificial sequence
  SiRNA target sequence
cacttcaatattgttgtaatt

SEQ ID NO: 3868 - DNA, 21 bp, Artificial sequence
  SiRNA target sequence
acttcaatattgttgtaattc

SEQ ID NO: 3869 - DNA, 21 bp, Artificial sequence
  SiRNA target sequence
cttcaatattgttgtaattct

SEQ ID NO: 3870 - DNA, 21 bp, Artificial sequence
  SiRNA target sequence
ttcaatattgttgtaattctg

SEQ ID NO: 3871 - DNA, 21 bp, Artificial sequence
  SiRNA target sequence
tcaatattgttgtaattctga

SEQ ID NO: 3872 - DNA, 21 bp, Artificial sequence
  SiRNA target sequence
caatattgttgtaattctgat

SEQ ID NO: 3873 - DNA, 21 bp, Artificial sequence
  SiRNA target sequence
aatattgttgtaattctgatg

SEQ ID NO: 3874 - DNA, 21 bp, Artificial sequence
  SiRNA target sequence
atattgttgtaattctgatga

SEQ ID NO: 3875 - DNA, 21 bp, Artificial sequence
  SiRNA target sequence
tattgttgtaattctgatgag

SEQ ID NO: 3876 - DNA, 21 bp, Artificial sequence
  SiRNA target sequence
attgttgtaattctgatgagg

SEQ ID NO: 3877 - DNA, 21 bp, Artificial sequence
  SiRNA target sequence
ttgttgtaattctgatgaggt

SEQ ID NO: 3878 - DNA, 21 bp, Artificial sequence
  SiRNA target sequence
tgttgtaattctgatgaggtt

SEQ ID NO: 3879 - DNA, 21 bp, Artificial sequence
  SiRNA target sequence
gttgtaattctgatgaggttt

SEQ ID NO: 3880 - DNA, 21 bp, Artificial sequence
  SiRNA target sequence
ttgtaattctgatgaggtttt

SEQ ID NO: 3881 - DNA, 21 bp, Artificial sequence
  SiRNA target sequence
tgtaattctgatgaggttttt

SEQ ID NO: 3882 - DNA, 21 bp, Artificial sequence
  SiRNA target sequence
gtaattctgatgaggttttta

SEQ ID NO: 3883 - DNA, 21 bp, Artificial sequence
  SiRNA target sequence
taattctgatgaggtttttat

SEQ ID NO: 3884 - DNA, 21 bp, Artificial sequence
  SiRNA target sequence
aattctgatgaggtttttatt

SEQ ID NO: 3885 - DNA, 21 bp, Artificial sequence
  SiRNA target sequence
attctgatgaggtttttattg

SEQ ID NO: 3886 - DNA, 21 bp, Artificial sequence
  SiRNA target sequence
ttctgatgaggtttttattgt

SEQ ID NO: 3887 - DNA, 21 bp, Artificial sequence
  SiRNA target sequence
tctgatgaggtttttattgtt

SEQ ID NO: 3888 - DNA, 21 bp, Artificial sequence
  SiRNA target sequence
ctgatgaggtttttattgtta

SEQ ID NO: 3889 - DNA, 21 bp, Artificial sequence
  SiRNA target sequence
tgatgaggtttttattgttaa

SEQ ID NO: 3890 - DNA, 21 bp, Artificial sequence
  SiRNA target sequence
gatgaggtttttattgttaag

SEQ ID NO: 3891 - DNA, 21 bp, Artificial sequence
  SiRNA target sequence
atgaggtttttattgttaagc

SEQ ID NO: 3892 - DNA, 21 bp, Artificial sequence
  SiRNA target sequence
tgaggtttttattgttaagca

SEQ ID NO: 3893 - DNA, 21 bp, Artificial sequence
  SiRNA target sequence
gaggtttttattgttaagcag

SEQ ID NO: 3894 - DNA, 21 bp, Artificial sequence
  SiRNA target sequence
aggtttttattgttaagcagt

SEQ ID NO: 3895 - DNA, 21 bp, Artificial sequence
  SiRNA target sequence
ggtttttattgttaagcagtc

SEQ ID NO: 3896 - DNA, 21 bp, Artificial sequence
  SiRNA target sequence
gtttttattgttaagcagtca

SEQ ID NO: 3897 - DNA, 21 bp, Artificial sequence
  SiRNA target sequence
tttttattgttaagcagtcac

SEQ ID NO: 3898 - DNA, 21 bp, Artificial sequence
  SiRNA target sequence
ttttattgttaagcagtcact

SEQ ID NO: 3899 - DNA, 21 bp, Artificial sequence
  SiRNA target sequence
tttattgttaagcagtcactt

SEQ ID NO: 3900 - DNA, 21 bp, Artificial sequence
  SiRNA target sequence
ttattgttaagcagtcactta

SEQ ID NO: 3901 - DNA, 21 bp, Artificial sequence
  SiRNA target sequence
tattgttaagcagtcacttat

SEQ ID NO: 3902 - DNA, 21 bp, Artificial sequence
  SiRNA target sequence
attgttaagcagtcacttatt

SEQ ID NO: 3903 - DNA, 21 bp, Artificial sequence
  SiRNA target sequence
ttgttaagcagtcacttattt

SEQ ID NO: 3904 - DNA, 21 bp, Artificial sequence
  SiRNA target sequence
tgttaagcagtcacttatttt

SEQ ID NO: 3905 - DNA, 21 bp, Artificial sequence
  SiRNA target sequence
gttaagcagtcacttatttta

SEQ ID NO: 3906 - DNA, 21 bp, Artificial sequence
  SiRNA target sequence
ttaagcagtcacttattttaa

SEQ ID NO: 3907 - DNA, 21 bp, Artificial sequence
  SiRNA target sequence
taagcagtcacttattttaat

SEQ ID NO: 3908 - DNA, 21 bp, Artificial sequence
  SiRNA target sequence
aagcagtcacttattttaata

SEQ ID NO: 3909 - DNA, 21 bp, Artificial sequence
  SiRNA target sequence
agcagtcacttattttaatag

SEQ ID NO: 3910 - DNA, 21 bp, Artificial sequence
  SiRNA target sequence
gcagtcacttattttaataga

SEQ ID NO: 3911 - DNA, 21 bp, Artificial sequence
  SiRNA target sequence
cagtcacttattttaatagaa

SEQ ID NO: 3912 - DNA, 21 bp, Artificial sequence
  SiRNA target sequence
agtcacttattttaatagaag

SEQ ID NO: 3913 - DNA, 21 bp, Artificial sequence
  SiRNA target sequence
gtcacttattttaatagaagt

SEQ ID NO: 3914 - DNA, 21 bp, Artificial sequence
  SiRNA target sequence
tcacttattttaatagaagta

SEQ ID NO: 3915 - DNA, 21 bp, Artificial sequence
  SiRNA target sequence
cacttattttaatagaagtac

SEQ ID NO: 3916 - DNA, 21 bp, Artificial sequence
  SiRNA target sequence
acttattttaatagaagtaca

SEQ ID NO: 3917 - DNA, 21 bp, Artificial sequence
  SiRNA target sequence
cttattttaatagaagtacat

SEQ ID NO: 3918 - DNA, 21 bp, Artificial sequence
  SiRNA target sequence
ttattttaatagaagtacatg

SEQ ID NO: 3919 - DNA, 21 bp, Artificial sequence
  SiRNA target sequence
tattttaatagaagtacatga

SEQ ID NO: 3920 - DNA, 21 bp, Artificial sequence
  SiRNA target sequence
attttaatagaagtacatgaa

SEQ ID NO: 3921 - DNA, 21 bp, Artificial sequence
  SiRNA target sequence
ttttaatagaagtacatgaat

SEQ ID NO: 3922 - DNA, 21 bp, Artificial sequence
  SiRNA target sequence
tttaatagaagtacatgaata

SEQ ID NO: 3923 - DNA, 21 bp, Artificial sequence
  SiRNA target sequence
ttaatagaagtacatgaatac

SEQ ID NO: 3924 - DNA, 21 bp, Artificial sequence
  SiRNA target sequence
taatagaagtacatgaataca

SEQ ID NO: 3925 - DNA, 21 bp, Artificial sequence
  SiRNA target sequence
aatagaagtacatgaatacat

SEQ ID NO: 3926 - DNA, 21 bp, Artificial sequence
  SiRNA target sequence
atagaagtacatgaatacatc

SEQ ID NO: 3927 - DNA, 21 bp, Artificial sequence
  SiRNA target sequence
tagaagtacatgaatacatca

SEQ ID NO: 3928 - DNA, 21 bp, Artificial sequence
  SiRNA target sequence
agaagtacatgaatacatcaa

SEQ ID NO: 3929 - DNA, 21 bp, Artificial sequence
  SiRNA target sequence
gaagtacatgaatacatcaaa

SEQ ID NO: 3930 - DNA, 21 bp, Artificial sequence
  SiRNA target sequence
aagtacatgaatacatcaaag

SEQ ID NO: 3931 - DNA, 21 bp, Artificial sequence
  SiRNA target sequence
agtacatgaatacatcaaaga

SEQ ID NO: 3932 - DNA, 21 bp, Artificial sequence
  SiRNA target sequence
gtacatgaatacatcaaagaa

SEQ ID NO: 3933 - DNA, 21 bp, Artificial sequence
  SiRNA target sequence
tacatgaatacatcaaagaaa

SEQ ID NO: 3934 - DNA, 21 bp, Artificial sequence
  SiRNA target sequence
acatgaatacatcaaagaaaa

SEQ ID NO: 3935 - DNA, 21 bp, Artificial sequence
  SiRNA target sequence
catgaatacatcaaagaaaat

SEQ ID NO: 3936 - DNA, 21 bp, Artificial sequence
  SiRNA target sequence
atgaatacatcaaagaaaata

SEQ ID NO: 3937 - DNA, 21 bp, Artificial sequence
  SiRNA target sequence
tgaatacatcaaagaaaataa

SEQ ID NO: 3938 - DNA, 21 bp, Artificial sequence
  SiRNA target sequence
gaatacatcaaagaaaataaa

SEQ ID NO: 3939 - DNA, 21 bp, Artificial sequence
  SiRNA target sequence
aatacatcaaagaaaataaaa

SEQ ID NO: 3940 - DNA, 21 bp, Artificial sequence
  SiRNA target sequence
atacatcaaagaaaataaaat

SEQ ID NO: 3941 - DNA, 21 bp, Artificial sequence
  SiRNA target sequence
tacatcaaagaaaataaaata

SEQ ID NO: 3942 - DNA, 21 bp, Artificial sequence
  SiRNA target sequence
acatcaaagaaaataaaatat

SEQ ID NO: 3943 - DNA, 21 bp, Artificial sequence
  SiRNA target sequence
catcaaagaaaataaaatata

SEQ ID NO: 3944 - DNA, 21 bp, Artificial sequence
  SiRNA target sequence
atcaaagaaaataaaatataa

SEQ ID NO: 3945 - DNA, 22 bp, Artificial sequence
  SiRNA target sequence
atgaaacgaaaaacagaaatat

SEQ ID NO: 3946 - DNA, 22 bp, Artificial sequence
  SiRNA target sequence
tgaaacgaaaaacagaaatatt

SEQ ID NO: 3947 - DNA, 22 bp, Artificial sequence
  SiRNA target sequence
gaaacgaaaaacagaaatattt

SEQ ID NO: 3948 - DNA, 22 bp, Artificial sequence
  SiRNA target sequence
aaacgaaaaacagaaatattta

SEQ ID NO: 3949 - DNA, 22 bp, Artificial sequence
  SiRNA target sequence
aacgaaaaacagaaatatttat

SEQ ID NO: 3950 - DNA, 22 bp, Artificial sequence
  SiRNA target sequence
acgaaaaacagaaatatttatt

SEQ ID NO: 3951 - DNA, 22 bp, Artificial sequence
  SiRNA target sequence
cgaaaaacagaaatatttattg

SEQ ID NO: 3952 - DNA, 22 bp, Artificial sequence
  SiRNA target sequence
gaaaaacagaaatatttattgc

SEQ ID NO: 3953 - DNA, 22 bp, Artificial sequence
  SiRNA target sequence
aaaaacagaaatatttattgct

SEQ ID NO: 3954 - DNA, 22 bp, Artificial sequence
  SiRNA target sequence
aaaacagaaatatttattgcta

SEQ ID NO: 3955 - DNA, 22 bp, Artificial sequence
  SiRNA target sequence
aaacagaaatatttattgctat

SEQ ID NO: 3956 - DNA, 22 bp, Artificial sequence
  SiRNA target sequence
aacagaaatatttattgctatt

SEQ ID NO: 3957 - DNA, 22 bp, Artificial sequence
  SiRNA target sequence
acagaaatatttattgctatta

SEQ ID NO: 3958 - DNA, 22 bp, Artificial sequence
  SiRNA target sequence
cagaaatatttattgctattac

SEQ ID NO: 3959 - DNA, 22 bp, Artificial sequence
  SiRNA target sequence
agaaatatttattgctattaca

SEQ ID NO: 3960 - DNA, 22 bp, Artificial sequence
  SiRNA target sequence
gaaatatttattgctattacag

SEQ ID NO: 3961 - DNA, 22 bp, Artificial sequence
  SiRNA target sequence
aaatatttattgctattacagt

SEQ ID NO: 3962 - DNA, 22 bp, Artificial sequence
  SiRNA target sequence
aatatttattgctattacagta

SEQ ID NO: 3963 - DNA, 22 bp, Artificial sequence
  SiRNA target sequence
atatttattgctattacagtag

SEQ ID NO: 3964 - DNA, 22 bp, Artificial sequence
  SiRNA target sequence
tatttattgctattacagtagt

SEQ ID NO: 3965 - DNA, 22 bp, Artificial sequence
  SiRNA target sequence
atttattgctattacagtagtc

SEQ ID NO: 3966 - DNA, 22 bp, Artificial sequence
  SiRNA target sequence
tttattgctattacagtagtca

SEQ ID NO: 3967 - DNA, 22 bp, Artificial sequence
  SiRNA target sequence
ttattgctattacagtagtcac

SEQ ID NO: 3968 - DNA, 22 bp, Artificial sequence
  SiRNA target sequence
tattgctattacagtagtcact

SEQ ID NO: 3969 - DNA, 22 bp, Artificial sequence
  SiRNA target sequence
attgctattacagtagtcactg

SEQ ID NO: 3970 - DNA, 22 bp, Artificial sequence
  SiRNA target sequence
ttgctattacagtagtcactgc

SEQ ID NO: 3971 - DNA, 22 bp, Artificial sequence
  SiRNA target sequence
tgctattacagtagtcactgca

SEQ ID NO: 3972 - DNA, 22 bp, Artificial sequence
  SiRNA target sequence
gctattacagtagtcactgcag

SEQ ID NO: 3973 - DNA, 22 bp, Artificial sequence
  SiRNA target sequence
ctattacagtagtcactgcagt

SEQ ID NO: 3974 - DNA, 22 bp, Artificial sequence
  SiRNA target sequence
tattacagtagtcactgcagtg

SEQ ID NO: 3975 - DNA, 22 bp, Artificial sequence
  SiRNA target sequence
attacagtagtcactgcagtga

SEQ ID NO: 3976 - DNA, 22 bp, Artificial sequence
  SiRNA target sequence
ttacagtagtcactgcagtgac

SEQ ID NO: 3977 - DNA, 22 bp, Artificial sequence
  SiRNA target sequence
tacagtagtcactgcagtgaca

SEQ ID NO: 3978 - DNA, 22 bp, Artificial sequence
  SiRNA target sequence
acagtagtcactgcagtgacat

SEQ ID NO: 3979 - DNA, 22 bp, Artificial sequence
  SiRNA target sequence
cagtagtcactgcagtgacatg

SEQ ID NO: 3980 - DNA, 22 bp, Artificial sequence
  SiRNA target sequence
agtagtcactgcagtgacatgt

SEQ ID NO: 3981 - DNA, 22 bp, Artificial sequence
  SiRNA target sequence
gtagtcactgcagtgacatgtt

SEQ ID NO: 3982 - DNA, 22 bp, Artificial sequence
  SiRNA target sequence
tagtcactgcagtgacatgtta

SEQ ID NO: 3983 - DNA, 22 bp, Artificial sequence
  SiRNA target sequence
agtcactgcagtgacatgttac

SEQ ID NO: 3984 - DNA, 22 bp, Artificial sequence
  SiRNA target sequence
gtcactgcagtgacatgttact

SEQ ID NO: 3985 - DNA, 22 bp, Artificial sequence
  SiRNA target sequence
tcactgcagtgacatgttactt

SEQ ID NO: 3986 - DNA, 22 bp, Artificial sequence
  SiRNA target sequence
cactgcagtgacatgttactta

SEQ ID NO: 3987 - DNA, 22 bp, Artificial sequence
  SiRNA target sequence
actgcagtgacatgttacttat

SEQ ID NO: 3988 - DNA, 22 bp, Artificial sequence
  SiRNA target sequence
ctgcagtgacatgttacttatt

SEQ ID NO: 3989 - DNA, 22 bp, Artificial sequence
  SiRNA target sequence
tgcagtgacatgttacttattt

SEQ ID NO: 3990 - DNA, 22 bp, Artificial sequence
  SiRNA target sequence
gcagtgacatgttacttattta

SEQ ID NO: 3991 - DNA, 22 bp, Artificial sequence
  SiRNA target sequence
cagtgacatgttacttatttaa

SEQ ID NO: 3992 - DNA, 22 bp, Artificial sequence
  SiRNA target sequence
agtgacatgttacttatttaaa

SEQ ID NO: 3993 - DNA, 22 bp, Artificial sequence
  SiRNA target sequence
gtgacatgttacttatttaaaa

SEQ ID NO: 3994 - DNA, 22 bp, Artificial sequence
  SiRNA target sequence
tgacatgttacttatttaaaaa

SEQ ID NO: 3995 - DNA, 22 bp, Artificial sequence
  SiRNA target sequence
gacatgttacttatttaaaaaa

SEQ ID NO: 3996 - DNA, 22 bp, Artificial sequence
  SiRNA target sequence
acatgttacttatttaaaaaaa

SEQ ID NO: 3997 - DNA, 22 bp, Artificial sequence
  SiRNA target sequence
catgttacttatttaaaaaaat

SEQ ID NO: 3998 - DNA, 22 bp, Artificial sequence
  SiRNA target sequence
atgttacttatttaaaaaaata

SEQ ID NO: 3999 - DNA, 22 bp, Artificial sequence
  SiRNA target sequence
tgttacttatttaaaaaaataa

SEQ ID NO: 4000 - DNA, 22 bp, Artificial sequence
  SiRNA target sequence
gttacttatttaaaaaaataat

SEQ ID NO: 4001 - DNA, 22 bp, Artificial sequence
  SiRNA target sequence
ttacttatttaaaaaaataata

SEQ ID NO: 4002 - DNA, 22 bp, Artificial sequence
  SiRNA target sequence
tacttatttaaaaaaataataa

SEQ ID NO: 4003 - DNA, 22 bp, Artificial sequence
  SiRNA target sequence
acttatttaaaaaaataataaa

SEQ ID NO: 4004 - DNA, 22 bp, Artificial sequence
  SiRNA target sequence
cttatttaaaaaaataataaat

SEQ ID NO: 4005 - DNA, 22 bp, Artificial sequence
  SiRNA target sequence
ttatttaaaaaaataataaata

SEQ ID NO: 4006 - DNA, 22 bp, Artificial sequence
  SiRNA target sequence
tatttaaaaaaataataaatag

SEQ ID NO: 4007 - DNA, 22 bp, Artificial sequence
  SiRNA target sequence
atttaaaaaaataataaataga

SEQ ID NO: 4008 - DNA, 22 bp, Artificial sequence
  SiRNA target sequence
tttaaaaaaataataaatagac

SEQ ID NO: 4009 - DNA, 22 bp, Artificial sequence
  SiRNA target sequence
ttaaaaaaataataaatagaca

SEQ ID NO: 4010 - DNA, 22 bp, Artificial sequence
  SiRNA target sequence
taaaaaaataataaatagacaa

SEQ ID NO: 4011 - DNA, 22 bp, Artificial sequence
  SiRNA target sequence
aaaaaaataataaatagacaaa

SEQ ID NO: 4012 - DNA, 22 bp, Artificial sequence
  SiRNA target sequence
aaaaaataataaatagacaaaa

SEQ ID NO: 4013 - DNA, 22 bp, Artificial sequence
  SiRNA target sequence
aaaaataataaatagacaaaag

SEQ ID NO: 4014 - DNA, 22 bp, Artificial sequence
  SiRNA target sequence
aaaataataaatagacaaaagt

SEQ ID NO: 4015 - DNA, 22 bp, Artificial sequence
  SiRNA target sequence
aaataataaatagacaaaagtc

SEQ ID NO: 4016 - DNA, 22 bp, Artificial sequence
  SiRNA target sequence
aataataaatagacaaaagtct

SEQ ID NO: 4017 - DNA, 22 bp, Artificial sequence
  SiRNA target sequence
ataataaatagacaaaagtctg

SEQ ID NO: 4018 - DNA, 22 bp, Artificial sequence
  SiRNA target sequence
taataaatagacaaaagtctga

SEQ ID NO: 4019 - DNA, 22 bp, Artificial sequence
  SiRNA target sequence
aataaatagacaaaagtctgat

SEQ ID NO: 4020 - DNA, 22 bp, Artificial sequence
  SiRNA target sequence
ataaatagacaaaagtctgatt

SEQ ID NO: 4021 - DNA, 22 bp, Artificial sequence
  SiRNA target sequence
taaatagacaaaagtctgatta

SEQ ID NO: 4022 - DNA, 22 bp, Artificial sequence
  SiRNA target sequence
aaatagacaaaagtctgattat

SEQ ID NO: 4023 - DNA, 22 bp, Artificial sequence
  SiRNA target sequence
aatagacaaaagtctgattata

SEQ ID NO: 4024 - DNA, 22 bp, Artificial sequence
  SiRNA target sequence
atagacaaaagtctgattatac

SEQ ID NO: 4025 - DNA, 22 bp, Artificial sequence
  SiRNA target sequence
tagacaaaagtctgattataca

SEQ ID NO: 4026 - DNA, 22 bp, Artificial sequence
  SiRNA target sequence
agacaaaagtctgattatacat

SEQ ID NO: 4027 - DNA, 22 bp, Artificial sequence
  SiRNA target sequence
gacaaaagtctgattatacatc

SEQ ID NO: 4028 - DNA, 22 bp, Artificial sequence
  SiRNA target sequence
acaaaagtctgattatacatca

SEQ ID NO: 4029 - DNA, 22 bp, Artificial sequence
  SiRNA target sequence
caaaagtctgattatacatcaa

SEQ ID NO: 4030 - DNA, 22 bp, Artificial sequence
  SiRNA target sequence
aaaagtctgattatacatcaat

SEQ ID NO: 4031 - DNA, 22 bp, Artificial sequence
  SiRNA target sequence
aaagtctgattatacatcaata

SEQ ID NO: 4032 - DNA, 22 bp, Artificial sequence
  SiRNA target sequence
aagtctgattatacatcaataa

SEQ ID NO: 4033 - DNA, 22 bp, Artificial sequence
  SiRNA target sequence
agtctgattatacatcaataaa

SEQ ID NO: 4034 - DNA, 22 bp, Artificial sequence
  SiRNA target sequence
gtctgattatacatcaataaaa

SEQ ID NO: 4035 - DNA, 22 bp, Artificial sequence
  SiRNA target sequence
tctgattatacatcaataaaac

SEQ ID NO: 4036 - DNA, 22 bp, Artificial sequence
  SiRNA target sequence
ctgattatacatcaataaaaca

SEQ ID NO: 4037 - DNA, 22 bp, Artificial sequence
  SiRNA target sequence
tgattatacatcaataaaacag

SEQ ID NO: 4038 - DNA, 22 bp, Artificial sequence
  SiRNA target sequence
gattatacatcaataaaacagg

SEQ ID NO: 4039 - DNA, 22 bp, Artificial sequence
  SiRNA target sequence
attatacatcaataaaacagga

SEQ ID NO: 4040 - DNA, 22 bp, Artificial sequence
  SiRNA target sequence
ttatacatcaataaaacaggaa

SEQ ID NO: 4041 - DNA, 22 bp, Artificial sequence
  SiRNA target sequence
tatacatcaataaaacaggaag

SEQ ID NO: 4042 - DNA, 22 bp, Artificial sequence
  SiRNA target sequence
atacatcaataaaacaggaagc

SEQ ID NO: 4043 - DNA, 22 bp, Artificial sequence
  SiRNA target sequence
tacatcaataaaacaggaagca

SEQ ID NO: 4044 - DNA, 22 bp, Artificial sequence
  SiRNA target sequence
acatcaataaaacaggaagcag

SEQ ID NO: 4045 - DNA, 22 bp, Artificial sequence
  SiRNA target sequence
catcaataaaacaggaagcaga

SEQ ID NO: 4046 - DNA, 22 bp, Artificial sequence
  SiRNA target sequence
atcaataaaacaggaagcagat

SEQ ID NO: 4047 - DNA, 22 bp, Artificial sequence
  SiRNA target sequence
tcaataaaacaggaagcagata

SEQ ID NO: 4048 - DNA, 22 bp, Artificial sequence
  SiRNA target sequence
caataaaacaggaagcagataa

SEQ ID NO: 4049 - DNA, 22 bp, Artificial sequence
  SiRNA target sequence
aataaaacaggaagcagataaa

SEQ ID NO: 4050 - DNA, 22 bp, Artificial sequence
  SiRNA target sequence
ataaaacaggaagcagataaat

SEQ ID NO: 4051 - DNA, 22 bp, Artificial sequence
  SiRNA target sequence
taaaacaggaagcagataaata

SEQ ID NO: 4052 - DNA, 22 bp, Artificial sequence
  SiRNA target sequence
aaaacaggaagcagataaatat

SEQ ID NO: 4053 - DNA, 22 bp, Artificial sequence
  SiRNA target sequence
aaacaggaagcagataaatatt

SEQ ID NO: 4054 - DNA, 22 bp, Artificial sequence
  SiRNA target sequence
aacaggaagcagataaatattt

SEQ ID NO: 4055 - DNA, 22 bp, Artificial sequence
  SiRNA target sequence
acaggaagcagataaatatttt

SEQ ID NO: 4056 - DNA, 22 bp, Artificial sequence
  SiRNA target sequence
caggaagcagataaatatttta

SEQ ID NO: 4057 - DNA, 22 bp, Artificial sequence
  SiRNA target sequence
aggaagcagataaatattttat

SEQ ID NO: 4058 - DNA, 22 bp, Artificial sequence
  SiRNA target sequence
ggaagcagataaatattttata

SEQ ID NO: 4059 - DNA, 22 bp, Artificial sequence
  SiRNA target sequence
gaagcagataaatattttatac

SEQ ID NO: 4060 - DNA, 22 bp, Artificial sequence
  SiRNA target sequence
aagcagataaatattttataca

SEQ ID NO: 4061 - DNA, 22 bp, Artificial sequence
  SiRNA target sequence
agcagataaatattttatacaa

SEQ ID NO: 4062 - DNA, 22 bp, Artificial sequence
  SiRNA target sequence
gcagataaatattttatacaag

SEQ ID NO: 4063 - DNA, 22 bp, Artificial sequence
  SiRNA target sequence
cagataaatattttatacaaga

SEQ ID NO: 4064 - DNA, 22 bp, Artificial sequence
  SiRNA target sequence
agataaatattttatacaagaa

SEQ ID NO: 4065 - DNA, 22 bp, Artificial sequence
  SiRNA target sequence
gataaatattttatacaagaag

SEQ ID NO: 4066 - DNA, 22 bp, Artificial sequence
  SiRNA target sequence
ataaatattttatacaagaaga

SEQ ID NO: 4067 - DNA, 22 bp, Artificial sequence
  SiRNA target sequence
taaatattttatacaagaagat

SEQ ID NO: 4068 - DNA, 22 bp, Artificial sequence
  SiRNA target sequence
aaatattttatacaagaagatt

SEQ ID NO: 4069 - DNA, 22 bp, Artificial sequence
  SiRNA target sequence
aatattttatacaagaagatta

SEQ ID NO: 4070 - DNA, 22 bp, Artificial sequence
  SiRNA target sequence
atattttatacaagaagattat

SEQ ID NO: 4071 - DNA, 22 bp, Artificial sequence
  SiRNA target sequence
tattttatacaagaagattata

SEQ ID NO: 4072 - DNA, 22 bp, Artificial sequence
  SiRNA target sequence
attttatacaagaagattataa

SEQ ID NO: 4073 - DNA, 22 bp, Artificial sequence
  SiRNA target sequence
ttttatacaagaagattataaa

SEQ ID NO: 4074 - DNA, 22 bp, Artificial sequence
  SiRNA target sequence
tttatacaagaagattataaaa

SEQ ID NO: 4075 - DNA, 22 bp, Artificial sequence
  SiRNA target sequence
ttatacaagaagattataaaaa

SEQ ID NO: 4076 - DNA, 22 bp, Artificial sequence
  SiRNA target sequence
tatacaagaagattataaaaat

SEQ ID NO: 4077 - DNA, 22 bp, Artificial sequence
  SiRNA target sequence
atacaagaagattataaaaatg

SEQ ID NO: 4078 - DNA, 22 bp, Artificial sequence
  SiRNA target sequence
tacaagaagattataaaaatgc

SEQ ID NO: 4079 - DNA, 22 bp, Artificial sequence
  SiRNA target sequence
acaagaagattataaaaatgct

SEQ ID NO: 4080 - DNA, 22 bp, Artificial sequence
  SiRNA target sequence
caagaagattataaaaatgcta

SEQ ID NO: 4081 - DNA, 22 bp, Artificial sequence
  SiRNA target sequence
aagaagattataaaaatgctat

SEQ ID NO: 4082 - DNA, 22 bp, Artificial sequence
  SiRNA target sequence
agaagattataaaaatgctatt

SEQ ID NO: 4083 - DNA, 22 bp, Artificial sequence
  SiRNA target sequence
gaagattataaaaatgctattc

SEQ ID NO: 4084 - DNA, 22 bp, Artificial sequence
  SiRNA target sequence
aagattataaaaatgctattct

SEQ ID NO: 4085 - DNA, 22 bp, Artificial sequence
  SiRNA target sequence
agattataaaaatgctattctg

SEQ ID NO: 4086 - DNA, 22 bp, Artificial sequence
  SiRNA target sequence
gattataaaaatgctattctgt

SEQ ID NO: 4087 - DNA, 22 bp, Artificial sequence
  SiRNA target sequence
attataaaaatgctattctgtt

SEQ ID NO: 4088 - DNA, 22 bp, Artificial sequence
  SiRNA target sequence
ttataaaaatgctattctgttg

SEQ ID NO: 4089 - DNA, 22 bp, Artificial sequence
  SiRNA target sequence
tataaaaatgctattctgttgt

SEQ ID NO: 4090 - DNA, 22 bp, Artificial sequence
  SiRNA target sequence
ataaaaatgctattctgttgta

SEQ ID NO: 4091 - DNA, 22 bp, Artificial sequence
  SiRNA target sequence
taaaaatgctattctgttgtac

SEQ ID NO: 4092 - DNA, 22 bp, Artificial sequence
  SiRNA target sequence
aaaaatgctattctgttgtaca

SEQ ID NO: 4093 - DNA, 22 bp, Artificial sequence
  SiRNA target sequence
aaaatgctattctgttgtacac

SEQ ID NO: 4094 - DNA, 22 bp, Artificial sequence
  SiRNA target sequence
aaatgctattctgttgtacact

SEQ ID NO: 4095 - DNA, 22 bp, Artificial sequence
  SiRNA target sequence
aatgctattctgttgtacacta

SEQ ID NO: 4096 - DNA, 22 bp, Artificial sequence
  SiRNA target sequence
atgctattctgttgtacactaa

SEQ ID NO: 4097 - DNA, 22 bp, Artificial sequence
  SiRNA target sequence
tgctattctgttgtacactaaa

SEQ ID NO: 4098 - DNA, 22 bp, Artificial sequence
  SiRNA target sequence
gctattctgttgtacactaaat

SEQ ID NO: 4099 - DNA, 22 bp, Artificial sequence
  SiRNA target sequence
ctattctgttgtacactaaatg

SEQ ID NO: 4100 - DNA, 22 bp, Artificial sequence
  SiRNA target sequence
tattctgttgtacactaaatgt

SEQ ID NO: 4101 - DNA, 22 bp, Artificial sequence
  SiRNA target sequence
attctgttgtacactaaatgta

SEQ ID NO: 4102 - DNA, 22 bp, Artificial sequence
  SiRNA target sequence
ttctgttgtacactaaatgtaa

SEQ ID NO: 4103 - DNA, 22 bp, Artificial sequence
  SiRNA target sequence
tctgttgtacactaaatgtaaa

SEQ ID NO: 4104 - DNA, 22 bp, Artificial sequence
  SiRNA target sequence
ctgttgtacactaaatgtaaat

SEQ ID NO: 4105 - DNA, 22 bp, Artificial sequence
  SiRNA target sequence
tgttgtacactaaatgtaaata

SEQ ID NO: 4106 - DNA, 22 bp, Artificial sequence
  SiRNA target sequence
gttgtacactaaatgtaaatat

SEQ ID NO: 4107 - DNA, 22 bp, Artificial sequence
  SiRNA target sequence
ttgtacactaaatgtaaatata

SEQ ID NO: 4108 - DNA, 22 bp, Artificial sequence
  SiRNA target sequence
tgtacactaaatgtaaatatat

SEQ ID NO: 4109 - DNA, 22 bp, Artificial sequence
  SiRNA target sequence
gtacactaaatgtaaatatatg

SEQ ID NO: 4110 - DNA, 22 bp, Artificial sequence
  SiRNA target sequence
tacactaaatgtaaatatatga

SEQ ID NO: 4111 - DNA, 22 bp, Artificial sequence
  SiRNA target sequence
acactaaatgtaaatatatgaa

SEQ ID NO: 4112 - DNA, 22 bp, Artificial sequence
  SiRNA target sequence
cactaaatgtaaatatatgaaa

SEQ ID NO: 4113 - DNA, 22 bp, Artificial sequence
  SiRNA target sequence
actaaatgtaaatatatgaaaa

SEQ ID NO: 4114 - DNA, 22 bp, Artificial sequence
  SiRNA target sequence
ctaaatgtaaatatatgaaaag

SEQ ID NO: 4115 - DNA, 22 bp, Artificial sequence
  SiRNA target sequence
taaatgtaaatatatgaaaagt

SEQ ID NO: 4116 - DNA, 22 bp, Artificial sequence
  SiRNA target sequence
aaatgtaaatatatgaaaagtg

SEQ ID NO: 4117 - DNA, 22 bp, Artificial sequence
  SiRNA target sequence
aatgtaaatatatgaaaagtga

SEQ ID NO: 4118 - DNA, 22 bp, Artificial sequence
  SiRNA target sequence
atgtaaatatatgaaaagtgat

SEQ ID NO: 4119 - DNA, 22 bp, Artificial sequence
  SiRNA target sequence
tgtaaatatatgaaaagtgatg

SEQ ID NO: 4120 - DNA, 22 bp, Artificial sequence
  SiRNA target sequence
gtaaatatatgaaaagtgatgc

SEQ ID NO: 4121 - DNA, 22 bp, Artificial sequence
  SiRNA target sequence
taaatatatgaaaagtgatgct

SEQ ID NO: 4122 - DNA, 22 bp, Artificial sequence
  SiRNA target sequence
aaatatatgaaaagtgatgctg

SEQ ID NO: 4123 - DNA, 22 bp, Artificial sequence
  SiRNA target sequence
aatatatgaaaagtgatgctga

SEQ ID NO: 4124 - DNA, 22 bp, Artificial sequence
  SiRNA target sequence
atatatgaaaagtgatgctgaa

SEQ ID NO: 4125 - DNA, 22 bp, Artificial sequence
  SiRNA target sequence
tatatgaaaagtgatgctgaaa

SEQ ID NO: 4126 - DNA, 22 bp, Artificial sequence
  SiRNA target sequence
atatgaaaagtgatgctgaaat

SEQ ID NO: 4127 - DNA, 22 bp, Artificial sequence
  SiRNA target sequence
tatgaaaagtgatgctgaaatt

SEQ ID NO: 4128 - DNA, 22 bp, Artificial sequence
  SiRNA target sequence
atgaaaagtgatgctgaaattc

SEQ ID NO: 4129 - DNA, 22 bp, Artificial sequence
  SiRNA target sequence
tgaaaagtgatgctgaaattct

SEQ ID NO: 4130 - DNA, 22 bp, Artificial sequence
  SiRNA target sequence
gaaaagtgatgctgaaattctt

SEQ ID NO: 4131 - DNA, 22 bp, Artificial sequence
  SiRNA target sequence
aaaagtgatgctgaaattctta

SEQ ID NO: 4132 - DNA, 22 bp, Artificial sequence
  SiRNA target sequence
aaagtgatgctgaaattcttac

SEQ ID NO: 4133 - DNA, 22 bp, Artificial sequence
  SiRNA target sequence
aagtgatgctgaaattcttact

SEQ ID NO: 4134 - DNA, 22 bp, Artificial sequence
  SiRNA target sequence
agtgatgctgaaattcttacta

SEQ ID NO: 4135 - DNA, 22 bp, Artificial sequence
  SiRNA target sequence
gtgatgctgaaattcttactaa

SEQ ID NO: 4136 - DNA, 22 bp, Artificial sequence
  SiRNA target sequence
tgatgctgaaattcttactaaa

SEQ ID NO: 4137 - DNA, 22 bp, Artificial sequence
  SiRNA target sequence
gatgctgaaattcttactaaaa

SEQ ID NO: 4138 - DNA, 22 bp, Artificial sequence
  SiRNA target sequence
atgctgaaattcttactaaaat

SEQ ID NO: 4139 - DNA, 22 bp, Artificial sequence
  SiRNA target sequence
tgctgaaattcttactaaaatt

SEQ ID NO: 4140 - DNA, 22 bp, Artificial sequence
  SiRNA target sequence
gctgaaattcttactaaaatta

SEQ ID NO: 4141 - DNA, 22 bp, Artificial sequence
  SiRNA target sequence
ctgaaattcttactaaaattag

SEQ ID NO: 4142 - DNA, 22 bp, Artificial sequence
  SiRNA target sequence
tgaaattcttactaaaattagt

SEQ ID NO: 4143 - DNA, 22 bp, Artificial sequence
  SiRNA target sequence
gaaattcttactaaaattagtc

SEQ ID NO: 4144 - DNA, 22 bp, Artificial sequence
  SiRNA target sequence
aaattcttactaaaattagtct

SEQ ID NO: 4145 - DNA, 22 bp, Artificial sequence
  SiRNA target sequence
aattcttactaaaattagtctc

SEQ ID NO: 4146 - DNA, 22 bp, Artificial sequence
  SiRNA target sequence
attcttactaaaattagtctct

SEQ ID NO: 4147 - DNA, 22 bp, Artificial sequence
  SiRNA target sequence
ttcttactaaaattagtctctg

SEQ ID NO: 4148 - DNA, 22 bp, Artificial sequence
  SiRNA target sequence
tcttactaaaattagtctctgt

SEQ ID NO: 4149 - DNA, 22 bp, Artificial sequence
  SiRNA target sequence
cttactaaaattagtctctgta

SEQ ID NO: 4150 - DNA, 22 bp, Artificial sequence
  SiRNA target sequence
ttactaaaattagtctctgtaa

SEQ ID NO: 4151 - DNA, 22 bp, Artificial sequence
  SiRNA target sequence
tactaaaattagtctctgtaat

SEQ ID NO: 4152 - DNA, 22 bp, Artificial sequence
  SiRNA target sequence
actaaaattagtctctgtaatt

SEQ ID NO: 4153 - DNA, 22 bp, Artificial sequence
  SiRNA target sequence
ctaaaattagtctctgtaatta

SEQ ID NO: 4154 - DNA, 22 bp, Artificial sequence
  SiRNA target sequence
taaaattagtctctgtaattat

SEQ ID NO: 4155 - DNA, 22 bp, Artificial sequence
  SiRNA target sequence
aaaattagtctctgtaattatt

SEQ ID NO: 4156 - DNA, 22 bp, Artificial sequence
  SiRNA target sequence
aaattagtctctgtaattattt

SEQ ID NO: 4157 - DNA, 22 bp, Artificial sequence
  SiRNA target sequence
aattagtctctgtaattatttc

SEQ ID NO: 4158 - DNA, 22 bp, Artificial sequence
  SiRNA target sequence
attagtctctgtaattatttct

SEQ ID NO: 4159 - DNA, 22 bp, Artificial sequence
  SiRNA target sequence
ttagtctctgtaattatttctt

SEQ ID NO: 4160 - DNA, 22 bp, Artificial sequence
  SiRNA target sequence
tagtctctgtaattatttctta

SEQ ID NO: 4161 - DNA, 22 bp, Artificial sequence
  SiRNA target sequence
agtctctgtaattatttcttaa

SEQ ID NO: 4162 - DNA, 22 bp, Artificial sequence
  SiRNA target sequence
gtctctgtaattatttcttaaa

SEQ ID NO: 4163 - DNA, 22 bp, Artificial sequence
  SiRNA target sequence
tctctgtaattatttcttaaaa

SEQ ID NO: 4164 - DNA, 22 bp, Artificial sequence
  SiRNA target sequence
ctctgtaattatttcttaaaaa

SEQ ID NO: 4165 - DNA, 22 bp, Artificial sequence
  SiRNA target sequence
tctgtaattatttcttaaaaaa

SEQ ID NO: 4166 - DNA, 22 bp, Artificial sequence
  SiRNA target sequence
ctgtaattatttcttaaaaaat

SEQ ID NO: 4167 - DNA, 22 bp, Artificial sequence
  SiRNA target sequence
tgtaattatttcttaaaaaatt

SEQ ID NO: 4168 - DNA, 22 bp, Artificial sequence
  SiRNA target sequence
gtaattatttcttaaaaaatta

SEQ ID NO: 4169 - DNA, 22 bp, Artificial sequence
  SiRNA target sequence
taattatttcttaaaaaattat

SEQ ID NO: 4170 - DNA, 22 bp, Artificial sequence
  SiRNA target sequence
aattatttcttaaaaaattatc

SEQ ID NO: 4171 - DNA, 22 bp, Artificial sequence
  SiRNA target sequence
attatttcttaaaaaattatca

SEQ ID NO: 4172 - DNA, 22 bp, Artificial sequence
  SiRNA target sequence
ttatttcttaaaaaattatcaa

SEQ ID NO: 4173 - DNA, 22 bp, Artificial sequence
  SiRNA target sequence
tatttcttaaaaaattatcaag

SEQ ID NO: 4174 - DNA, 22 bp, Artificial sequence
  SiRNA target sequence
atttcttaaaaaattatcaaga

SEQ ID NO: 4175 - DNA, 22 bp, Artificial sequence
  SiRNA target sequence
tttcttaaaaaattatcaagaa

SEQ ID NO: 4176 - DNA, 22 bp, Artificial sequence
  SiRNA target sequence
ttcttaaaaaattatcaagaag

SEQ ID NO: 4177 - DNA, 22 bp, Artificial sequence
  SiRNA target sequence
tcttaaaaaattatcaagaagt

SEQ ID NO: 4178 - DNA, 22 bp, Artificial sequence
  SiRNA target sequence
cttaaaaaattatcaagaagtt

SEQ ID NO: 4179 - DNA, 22 bp, Artificial sequence
  SiRNA target sequence
ttaaaaaattatcaagaagtta

SEQ ID NO: 4180 - DNA, 22 bp, Artificial sequence
  SiRNA target sequence
taaaaaattatcaagaagttat

SEQ ID NO: 4181 - DNA, 22 bp, Artificial sequence
  SiRNA target sequence
aaaaaattatcaagaagttata

SEQ ID NO: 4182 - DNA, 22 bp, Artificial sequence
  SiRNA target sequence
aaaaattatcaagaagttataa

SEQ ID NO: 4183 - DNA, 22 bp, Artificial sequence
  SiRNA target sequence
aaaattatcaagaagttataaa

SEQ ID NO: 4184 - DNA, 22 bp, Artificial sequence
  SiRNA target sequence
aaattatcaagaagttataaat

SEQ ID NO: 4185 - DNA, 22 bp, Artificial sequence
  SiRNA target sequence
aattatcaagaagttataaata

SEQ ID NO: 4186 - DNA, 22 bp, Artificial sequence
  SiRNA target sequence
attatcaagaagttataaataa

SEQ ID NO: 4187 - DNA, 22 bp, Artificial sequence
  SiRNA target sequence
ttatcaagaagttataaataat

SEQ ID NO: 4188 - DNA, 22 bp, Artificial sequence
  SiRNA target sequence
tatcaagaagttataaataatt

SEQ ID NO: 4189 - DNA, 22 bp, Artificial sequence
  SiRNA target sequence
atcaagaagttataaataattc

SEQ ID NO: 4190 - DNA, 22 bp, Artificial sequence
  SiRNA target sequence
tcaagaagttataaataattct

SEQ ID NO: 4191 - DNA, 22 bp, Artificial sequence
  SiRNA target sequence
caagaagttataaataattctt

SEQ ID NO: 4192 - DNA, 22 bp, Artificial sequence
  SiRNA target sequence
aagaagttataaataattcttt

SEQ ID NO: 4193 - DNA, 22 bp, Artificial sequence
  SiRNA target sequence
agaagttataaataattcttta

SEQ ID NO: 4194 - DNA, 22 bp, Artificial sequence
  SiRNA target sequence
gaagttataaataattctttat

SEQ ID NO: 4195 - DNA, 22 bp, Artificial sequence
  SiRNA target sequence
aagttataaataattctttatt

SEQ ID NO: 4196 - DNA, 22 bp, Artificial sequence
  SiRNA target sequence
agttataaataattctttattt

SEQ ID NO: 4197 - DNA, 22 bp, Artificial sequence
  SiRNA target sequence
gttataaataattctttattta

SEQ ID NO: 4198 - DNA, 22 bp, Artificial sequence
  SiRNA target sequence
ttataaataattctttatttaa

SEQ ID NO: 4199 - DNA, 22 bp, Artificial sequence
  SiRNA target sequence
tataaataattctttatttaag

SEQ ID NO: 4200 - DNA, 22 bp, Artificial sequence
  SiRNA target sequence
ataaataattctttatttaaga

SEQ ID NO: 4201 - DNA, 22 bp, Artificial sequence
  SiRNA target sequence
taaataattctttatttaagac

SEQ ID NO: 4202 - DNA, 22 bp, Artificial sequence
  SiRNA target sequence
aaataattctttatttaagaca

SEQ ID NO: 4203 - DNA, 22 bp, Artificial sequence
  SiRNA target sequence
aataattctttatttaagacaa

SEQ ID NO: 4204 - DNA, 22 bp, Artificial sequence
  SiRNA target sequence
ataattctttatttaagacaaa

SEQ ID NO: 4205 - DNA, 22 bp, Artificial sequence
  SiRNA target sequence
taattctttatttaagacaaat

SEQ ID NO: 4206 - DNA, 22 bp, Artificial sequence
  SiRNA target sequence
aattctttatttaagacaaata

SEQ ID NO: 4207 - DNA, 22 bp, Artificial sequence
  SiRNA target sequence
attctttatttaagacaaataa

SEQ ID NO: 4208 - DNA, 22 bp, Artificial sequence
  SiRNA target sequence
ttctttatttaagacaaataat

SEQ ID NO: 4209 - DNA, 22 bp, Artificial sequence
  SiRNA target sequence
tctttatttaagacaaataata

SEQ ID NO: 4210 - DNA, 22 bp, Artificial sequence
  SiRNA target sequence
ctttatttaagacaaataataa

SEQ ID NO: 4211 - DNA, 22 bp, Artificial sequence
  SiRNA target sequence
tttatttaagacaaataataaa

SEQ ID NO: 4212 - DNA, 22 bp, Artificial sequence
  SiRNA target sequence
ttatttaagacaaataataaag

SEQ ID NO: 4213 - DNA, 22 bp, Artificial sequence
  SiRNA target sequence
tatttaagacaaataataaaga

SEQ ID NO: 4214 - DNA, 22 bp, Artificial sequence
  SiRNA target sequence
atttaagacaaataataaagat

SEQ ID NO: 4215 - DNA, 22 bp, Artificial sequence
  SiRNA target sequence
tttaagacaaataataaagatc

SEQ ID NO: 4216 - DNA, 22 bp, Artificial sequence
  SiRNA target sequence
ttaagacaaataataaagatct

SEQ ID NO: 4217 - DNA, 22 bp, Artificial sequence
  SiRNA target sequence
taagacaaataataaagatcta

SEQ ID NO: 4218 - DNA, 22 bp, Artificial sequence
  SiRNA target sequence
aagacaaataataaagatctaa

SEQ ID NO: 4219 - DNA, 22 bp, Artificial sequence
  SiRNA target sequence
agacaaataataaagatctaat

SEQ ID NO: 4220 - DNA, 22 bp, Artificial sequence
  SiRNA target sequence
gacaaataataaagatctaata

SEQ ID NO: 4221 - DNA, 22 bp, Artificial sequence
  SiRNA target sequence
acaaataataaagatctaataa

SEQ ID NO: 4222 - DNA, 22 bp, Artificial sequence
  SiRNA target sequence
caaataataaagatctaataaa

SEQ ID NO: 4223 - DNA, 22 bp, Artificial sequence
  SiRNA target sequence
aaataataaagatctaataaaa

SEQ ID NO: 4224 - DNA, 22 bp, Artificial sequence
  SiRNA target sequence
aataataaagatctaataaaaa

SEQ ID NO: 4225 - DNA, 22 bp, Artificial sequence
  SiRNA target sequence
ataataaagatctaataaaaat

SEQ ID NO: 4226 - DNA, 22 bp, Artificial sequence
  SiRNA target sequence
taataaagatctaataaaaata

SEQ ID NO: 4227 - DNA, 22 bp, Artificial sequence
  SiRNA target sequence
aataaagatctaataaaaataa

SEQ ID NO: 4228 - DNA, 22 bp, Artificial sequence
  SiRNA target sequence
ataaagatctaataaaaataag

SEQ ID NO: 4229 - DNA, 22 bp, Artificial sequence
  SiRNA target sequence
taaagatctaataaaaataaga

SEQ ID NO: 4230 - DNA, 22 bp, Artificial sequence
  SiRNA target sequence
aaagatctaataaaaataagat

SEQ ID NO: 4231 - DNA, 22 bp, Artificial sequence
  SiRNA target sequence
aagatctaataaaaataagatc

SEQ ID NO: 4232 - DNA, 22 bp, Artificial sequence
  SiRNA target sequence
agatctaataaaaataagatct

SEQ ID NO: 4233 - DNA, 22 bp, Artificial sequence
  SiRNA target sequence
gatctaataaaaataagatctg

SEQ ID NO: 4234 - DNA, 22 bp, Artificial sequence
  SiRNA target sequence
atctaataaaaataagatctga

SEQ ID NO: 4235 - DNA, 22 bp, Artificial sequence
  SiRNA target sequence
tctaataaaaataagatctgaa

SEQ ID NO: 4236 - DNA, 22 bp, Artificial sequence
  SiRNA target sequence
ctaataaaaataagatctgaat

SEQ ID NO: 4237 - DNA, 22 bp, Artificial sequence
  SiRNA target sequence
taataaaaataagatctgaatg

SEQ ID NO: 4238 - DNA, 22 bp, Artificial sequence
  SiRNA target sequence
aataaaaataagatctgaatgt

SEQ ID NO: 4239 - DNA, 22 bp, Artificial sequence
  SiRNA target sequence
ataaaaataagatctgaatgtt

SEQ ID NO: 4240 - DNA, 22 bp, Artificial sequence
  SiRNA target sequence
taaaaataagatctgaatgtta

SEQ ID NO: 4241 - DNA, 22 bp, Artificial sequence
  SiRNA target sequence
aaaaataagatctgaatgttac

SEQ ID NO: 4242 - DNA, 22 bp, Artificial sequence
  SiRNA target sequence
aaaataagatctgaatgttaca

SEQ ID NO: 4243 - DNA, 22 bp, Artificial sequence
  SiRNA target sequence
aaataagatctgaatgttacaa

SEQ ID NO: 4244 - DNA, 22 bp, Artificial sequence
  SiRNA target sequence
aataagatctgaatgttacaag

SEQ ID NO: 4245 - DNA, 22 bp, Artificial sequence
  SiRNA target sequence
ataagatctgaatgttacaagc

SEQ ID NO: 4246 - DNA, 22 bp, Artificial sequence
  SiRNA target sequence
taagatctgaatgttacaagca

SEQ ID NO: 4247 - DNA, 22 bp, Artificial sequence
  SiRNA target sequence
aagatctgaatgttacaagcag

SEQ ID NO: 4248 - DNA, 22 bp, Artificial sequence
  SiRNA target sequence
agatctgaatgttacaagcaga

SEQ ID NO: 4249 - DNA, 22 bp, Artificial sequence
  SiRNA target sequence
gatctgaatgttacaagcagat

SEQ ID NO: 4250 - DNA, 22 bp, Artificial sequence
  SiRNA target sequence
atctgaatgttacaagcagatg

SEQ ID NO: 4251 - DNA, 22 bp, Artificial sequence
  SiRNA target sequence
tctgaatgttacaagcagatgg

SEQ ID NO: 4252 - DNA, 22 bp, Artificial sequence
  SiRNA target sequence
ctgaatgttacaagcagatggg

SEQ ID NO: 4253 - DNA, 22 bp, Artificial sequence
  SiRNA target sequence
tgaatgttacaagcagatggga

SEQ ID NO: 4254 - DNA, 22 bp, Artificial sequence
  SiRNA target sequence
gaatgttacaagcagatgggaa

SEQ ID NO: 4255 - DNA, 22 bp, Artificial sequence
  SiRNA target sequence
aatgttacaagcagatgggaaa

SEQ ID NO: 4256 - DNA, 22 bp, Artificial sequence
  SiRNA target sequence
atgttacaagcagatgggaaat

SEQ ID NO: 4257 - DNA, 22 bp, Artificial sequence
  SiRNA target sequence
tgttacaagcagatgggaaata

SEQ ID NO: 4258 - DNA, 22 bp, Artificial sequence
  SiRNA target sequence
gttacaagcagatgggaaataa

SEQ ID NO: 4259 - DNA, 22 bp, Artificial sequence
  SiRNA target sequence
ttacaagcagatgggaaataaa

SEQ ID NO: 4260 - DNA, 22 bp, Artificial sequence
  SiRNA target sequence
tacaagcagatgggaaataaaa

SEQ ID NO: 4261 - DNA, 22 bp, Artificial sequence
  SiRNA target sequence
acaagcagatgggaaataaaaa

SEQ ID NO: 4262 - DNA, 22 bp, Artificial sequence
  SiRNA target sequence
caagcagatgggaaataaaaaa

SEQ ID NO: 4263 - DNA, 22 bp, Artificial sequence
  SiRNA target sequence
aagcagatgggaaataaaaaaa

SEQ ID NO: 4264 - DNA, 22 bp, Artificial sequence
  SiRNA target sequence
agcagatgggaaataaaaaaaa

SEQ ID NO: 4265 - DNA, 22 bp, Artificial sequence
  SiRNA target sequence
gcagatgggaaataaaaaaaaa

SEQ ID NO: 4266 - DNA, 22 bp, Artificial sequence
  SiRNA target sequence
cagatgggaaataaaaaaaaat

SEQ ID NO: 4267 - DNA, 22 bp, Artificial sequence
  SiRNA target sequence
agatgggaaataaaaaaaaatt

SEQ ID NO: 4268 - DNA, 22 bp, Artificial sequence
  SiRNA target sequence
gatgggaaataaaaaaaaattt

SEQ ID NO: 4269 - DNA, 22 bp, Artificial sequence
  SiRNA target sequence
atgggaaataaaaaaaaatttc

SEQ ID NO: 4270 - DNA, 22 bp, Artificial sequence
  SiRNA target sequence
tgggaaataaaaaaaaatttct

SEQ ID NO: 4271 - DNA, 22 bp, Artificial sequence
  SiRNA target sequence
gggaaataaaaaaaaatttctt

SEQ ID NO: 4272 - DNA, 22 bp, Artificial sequence
  SiRNA target sequence
ggaaataaaaaaaaatttctta

SEQ ID NO: 4273 - DNA, 22 bp, Artificial sequence
  SiRNA target sequence
gaaataaaaaaaaatttcttaa

SEQ ID NO: 4274 - DNA, 22 bp, Artificial sequence
  SiRNA target sequence
aaataaaaaaaaatttcttaag

SEQ ID NO: 4275 - DNA, 22 bp, Artificial sequence
  SiRNA target sequence
aataaaaaaaaatttcttaagg

SEQ ID NO: 4276 - DNA, 22 bp, Artificial sequence
  SiRNA target sequence
ataaaaaaaaatttcttaagga

SEQ ID NO: 4277 - DNA, 22 bp, Artificial sequence
  SiRNA target sequence
taaaaaaaaatttcttaaggat

SEQ ID NO: 4278 - DNA, 22 bp, Artificial sequence
  SiRNA target sequence
aaaaaaaaatttcttaaggatt

SEQ ID NO: 4279 - DNA, 22 bp, Artificial sequence
  SiRNA target sequence
aaaaaaaatttcttaaggattt

SEQ ID NO: 4280 - DNA, 22 bp, Artificial sequence
  SiRNA target sequence
aaaaaaatttcttaaggattta

SEQ ID NO: 4281 - DNA, 22 bp, Artificial sequence
  SiRNA target sequence
aaaaaatttcttaaggatttag

SEQ ID NO: 4282 - DNA, 22 bp, Artificial sequence
  SiRNA target sequence
aaaaatttcttaaggatttagc

SEQ ID NO: 4283 - DNA, 22 bp, Artificial sequence
  SiRNA target sequence
aaaatttcttaaggatttagca

SEQ ID NO: 4284 - DNA, 22 bp, Artificial sequence
  SiRNA target sequence
aaatttcttaaggatttagcac

SEQ ID NO: 4285 - DNA, 22 bp, Artificial sequence
  SiRNA target sequence
aatttcttaaggatttagcact

SEQ ID NO: 4286 - DNA, 22 bp, Artificial sequence
  SiRNA target sequence
atttcttaaggatttagcactt

SEQ ID NO: 4287 - DNA, 22 bp, Artificial sequence
  SiRNA target sequence
tttcttaaggatttagcacttt

SEQ ID NO: 4288 - DNA, 22 bp, Artificial sequence
  SiRNA target sequence
ttcttaaggatttagcacttta

SEQ ID NO: 4289 - DNA, 22 bp, Artificial sequence
  SiRNA target sequence
tcttaaggatttagcactttat

SEQ ID NO: 4290 - DNA, 22 bp, Artificial sequence
  SiRNA target sequence
cttaaggatttagcactttatg

SEQ ID NO: 4291 - DNA, 22 bp, Artificial sequence
  SiRNA target sequence
ttaaggatttagcactttatga

SEQ ID NO: 4292 - DNA, 22 bp, Artificial sequence
  SiRNA target sequence
taaggatttagcactttatgaa

SEQ ID NO: 4293 - DNA, 22 bp, Artificial sequence
  SiRNA target sequence
aaggatttagcactttatgaaa

SEQ ID NO: 4294 - DNA, 22 bp, Artificial sequence
  SiRNA target sequence
aggatttagcactttatgaaac

SEQ ID NO: 4295 - DNA, 22 bp, Artificial sequence
  SiRNA target sequence
ggatttagcactttatgaaaca

SEQ ID NO: 4296 - DNA, 22 bp, Artificial sequence
  SiRNA target sequence
gatttagcactttatgaaacat

SEQ ID NO: 4297 - DNA, 22 bp, Artificial sequence
  SiRNA target sequence
atttagcactttatgaaacatt

SEQ ID NO: 4298 - DNA, 22 bp, Artificial sequence
  SiRNA target sequence
tttagcactttatgaaacattt

SEQ ID NO: 4299 - DNA, 22 bp, Artificial sequence
  SiRNA target sequence
ttagcactttatgaaacatttg

SEQ ID NO: 4300 - DNA, 22 bp, Artificial sequence
  SiRNA target sequence
tagcactttatgaaacatttgc

SEQ ID NO: 4301 - DNA, 22 bp, Artificial sequence
  SiRNA target sequence
agcactttatgaaacatttgct

SEQ ID NO: 4302 - DNA, 22 bp, Artificial sequence
  SiRNA target sequence
gcactttatgaaacatttgcta

SEQ ID NO: 4303 - DNA, 22 bp, Artificial sequence
  SiRNA target sequence
cactttatgaaacatttgctaa

SEQ ID NO: 4304 - DNA, 22 bp, Artificial sequence
  SiRNA target sequence
actttatgaaacatttgctaat

SEQ ID NO: 4305 - DNA, 22 bp, Artificial sequence
  SiRNA target sequence
ctttatgaaacatttgctaata

SEQ ID NO: 4306 - DNA, 22 bp, Artificial sequence
  SiRNA target sequence
tttatgaaacatttgctaataa

SEQ ID NO: 4307 - DNA, 22 bp, Artificial sequence
  SiRNA target sequence
ttatgaaacatttgctaataat

SEQ ID NO: 4308 - DNA, 22 bp, Artificial sequence
  SiRNA target sequence
tatgaaacatttgctaataata

SEQ ID NO: 4309 - DNA, 22 bp, Artificial sequence
  SiRNA target sequence
atgaaacatttgctaataataa

SEQ ID NO: 4310 - DNA, 22 bp, Artificial sequence
  SiRNA target sequence
tgaaacatttgctaataataaa

SEQ ID NO: 4311 - DNA, 22 bp, Artificial sequence
  SiRNA target sequence
gaaacatttgctaataataaag

SEQ ID NO: 4312 - DNA, 22 bp, Artificial sequence
  SiRNA target sequence
aaacatttgctaataataaaga

SEQ ID NO: 4313 - DNA, 22 bp, Artificial sequence
  SiRNA target sequence
aacatttgctaataataaagaa

SEQ ID NO: 4314 - DNA, 22 bp, Artificial sequence
  SiRNA target sequence
acatttgctaataataaagaag

SEQ ID NO: 4315 - DNA, 22 bp, Artificial sequence
  SiRNA target sequence
catttgctaataataaagaagt

SEQ ID NO: 4316 - DNA, 22 bp, Artificial sequence
  SiRNA target sequence
atttgctaataataaagaagtc

SEQ ID NO: 4317 - DNA, 22 bp, Artificial sequence
  SiRNA target sequence
tttgctaataataaagaagtcc

SEQ ID NO: 4318 - DNA, 22 bp, Artificial sequence
  SiRNA target sequence
ttgctaataataaagaagtcca

SEQ ID NO: 4319 - DNA, 22 bp, Artificial sequence
  SiRNA target sequence
tgctaataataaagaagtccaa

SEQ ID NO: 4320 - DNA, 22 bp, Artificial sequence
  SiRNA target sequence
gctaataataaagaagtccaag

SEQ ID NO: 4321 - DNA, 22 bp, Artificial sequence
  SiRNA target sequence
ctaataataaagaagtccaaga

SEQ ID NO: 4322 - DNA, 22 bp, Artificial sequence
  SiRNA target sequence
taataataaagaagtccaagat

SEQ ID NO: 4323 - DNA, 22 bp, Artificial sequence
  SiRNA target sequence
aataataaagaagtccaagatg

SEQ ID NO: 4324 - DNA, 22 bp, Artificial sequence
  SiRNA target sequence
ataataaagaagtccaagatga

SEQ ID NO: 4325 - DNA, 22 bp, Artificial sequence
  SiRNA target sequence
taataaagaagtccaagatgaa

SEQ ID NO: 4326 - DNA, 22 bp, Artificial sequence
  SiRNA target sequence
aataaagaagtccaagatgaaa

SEQ ID NO: 4327 - DNA, 22 bp, Artificial sequence
  SiRNA target sequence
ataaagaagtccaagatgaaat

SEQ ID NO: 4328 - DNA, 22 bp, Artificial sequence
  SiRNA target sequence
taaagaagtccaagatgaaatt

SEQ ID NO: 4329 - DNA, 22 bp, Artificial sequence
  SiRNA target sequence
aaagaagtccaagatgaaatta

SEQ ID NO: 4330 - DNA, 22 bp, Artificial sequence
  SiRNA target sequence
aagaagtccaagatgaaattat

SEQ ID NO: 4331 - DNA, 22 bp, Artificial sequence
  SiRNA target sequence
agaagtccaagatgaaattatg

SEQ ID NO: 4332 - DNA, 22 bp, Artificial sequence
  SiRNA target sequence
gaagtccaagatgaaattatgc

SEQ ID NO: 4333 - DNA, 22 bp, Artificial sequence
  SiRNA target sequence
aagtccaagatgaaattatgca

SEQ ID NO: 4334 - DNA, 22 bp, Artificial sequence
  SiRNA target sequence
agtccaagatgaaattatgcag

SEQ ID NO: 4335 - DNA, 22 bp, Artificial sequence
  SiRNA target sequence
gtccaagatgaaattatgcaga

SEQ ID NO: 4336 - DNA, 22 bp, Artificial sequence
  SiRNA target sequence
tccaagatgaaattatgcagac

SEQ ID NO: 4337 - DNA, 22 bp, Artificial sequence
  SiRNA target sequence
ccaagatgaaattatgcagact

SEQ ID NO: 4338 - DNA, 22 bp, Artificial sequence
  SiRNA target sequence
caagatgaaattatgcagactg

SEQ ID NO: 4339 - DNA, 22 bp, Artificial sequence
  SiRNA target sequence
aagatgaaattatgcagactgt

SEQ ID NO: 4340 - DNA, 22 bp, Artificial sequence
  SiRNA target sequence
agatgaaattatgcagactgtt

SEQ ID NO: 4341 - DNA, 22 bp, Artificial sequence
  SiRNA target sequence
gatgaaattatgcagactgtta

SEQ ID NO: 4342 - DNA, 22 bp, Artificial sequence
  SiRNA target sequence
atgaaattatgcagactgttaa

SEQ ID NO: 4343 - DNA, 22 bp, Artificial sequence
  SiRNA target sequence
tgaaattatgcagactgttaaa

SEQ ID NO: 4344 - DNA, 22 bp, Artificial sequence
  SiRNA target sequence
gaaattatgcagactgttaaag

SEQ ID NO: 4345 - DNA, 22 bp, Artificial sequence
  SiRNA target sequence
aaattatgcagactgttaaaga

SEQ ID NO: 4346 - DNA, 22 bp, Artificial sequence
  SiRNA target sequence
aattatgcagactgttaaagaa

SEQ ID NO: 4347 - DNA, 22 bp, Artificial sequence
  SiRNA target sequence
attatgcagactgttaaagaaa

SEQ ID NO: 4348 - DNA, 22 bp, Artificial sequence
  SiRNA target sequence
ttatgcagactgttaaagaaat

SEQ ID NO: 4349 - DNA, 22 bp, Artificial sequence
  SiRNA target sequence
tatgcagactgttaaagaaatt

SEQ ID NO: 4350 - DNA, 22 bp, Artificial sequence
  SiRNA target sequence
atgcagactgttaaagaaattt

SEQ ID NO: 4351 - DNA, 22 bp, Artificial sequence
  SiRNA target sequence
tgcagactgttaaagaaatttg

SEQ ID NO: 4352 - DNA, 22 bp, Artificial sequence
  SiRNA target sequence
gcagactgttaaagaaatttgt

SEQ ID NO: 4353 - DNA, 22 bp, Artificial sequence
  SiRNA target sequence
cagactgttaaagaaatttgtg

SEQ ID NO: 4354 - DNA, 22 bp, Artificial sequence
  SiRNA target sequence
agactgttaaagaaatttgtga

SEQ ID NO: 4355 - DNA, 22 bp, Artificial sequence
  SiRNA target sequence
gactgttaaagaaatttgtgaa

SEQ ID NO: 4356 - DNA, 22 bp, Artificial sequence
  SiRNA target sequence
actgttaaagaaatttgtgaag

SEQ ID NO: 4357 - DNA, 22 bp, Artificial sequence
  SiRNA target sequence
ctgttaaagaaatttgtgaaga

SEQ ID NO: 4358 - DNA, 22 bp, Artificial sequence
  SiRNA target sequence
tgttaaagaaatttgtgaagaa

SEQ ID NO: 4359 - DNA, 22 bp, Artificial sequence
  SiRNA target sequence
gttaaagaaatttgtgaagaag

SEQ ID NO: 4360 - DNA, 22 bp, Artificial sequence
  SiRNA target sequence
ttaaagaaatttgtgaagaaga

SEQ ID NO: 4361 - DNA, 22 bp, Artificial sequence
  SiRNA target sequence
taaagaaatttgtgaagaagaa

SEQ ID NO: 4362 - DNA, 22 bp, Artificial sequence
  SiRNA target sequence
aaagaaatttgtgaagaagaag

SEQ ID NO: 4363 - DNA, 22 bp, Artificial sequence
  SiRNA target sequence
aagaaatttgtgaagaagaagt

SEQ ID NO: 4364 - DNA, 22 bp, Artificial sequence
  SiRNA target sequence
agaaatttgtgaagaagaagtg

SEQ ID NO: 4365 - DNA, 22 bp, Artificial sequence
  SiRNA target sequence
gaaatttgtgaagaagaagtga

SEQ ID NO: 4366 - DNA, 22 bp, Artificial sequence
  SiRNA target sequence
aaatttgtgaagaagaagtgaa

SEQ ID NO: 4367 - DNA, 22 bp, Artificial sequence
  SiRNA target sequence
aatttgtgaagaagaagtgaat

SEQ ID NO: 4368 - DNA, 22 bp, Artificial sequence
  SiRNA target sequence
atttgtgaagaagaagtgaatg

SEQ ID NO: 4369 - DNA, 22 bp, Artificial sequence
  SiRNA target sequence
tttgtgaagaagaagtgaatga

SEQ ID NO: 4370 - DNA, 22 bp, Artificial sequence
  SiRNA target sequence
ttgtgaagaagaagtgaatgag

SEQ ID NO: 4371 - DNA, 22 bp, Artificial sequence
  SiRNA target sequence
tgtgaagaagaagtgaatgagt

SEQ ID NO: 4372 - DNA, 22 bp, Artificial sequence
  SiRNA target sequence
gtgaagaagaagtgaatgagtt

SEQ ID NO: 4373 - DNA, 22 bp, Artificial sequence
  SiRNA target sequence
tgaagaagaagtgaatgagttt

SEQ ID NO: 4374 - DNA, 22 bp, Artificial sequence
  SiRNA target sequence
gaagaagaagtgaatgagttta

SEQ ID NO: 4375 - DNA, 22 bp, Artificial sequence
  SiRNA target sequence
aagaagaagtgaatgagtttat

SEQ ID NO: 4376 - DNA, 22 bp, Artificial sequence
  SiRNA target sequence
agaagaagtgaatgagtttatt

SEQ ID NO: 4377 - DNA, 22 bp, Artificial sequence
  SiRNA target sequence
gaagaagtgaatgagtttattg

SEQ ID NO: 4378 - DNA, 22 bp, Artificial sequence
  SiRNA target sequence
aagaagtgaatgagtttattga

SEQ ID NO: 4379 - DNA, 22 bp, Artificial sequence
  SiRNA target sequence
agaagtgaatgagtttattgaa

SEQ ID NO: 4380 - DNA, 22 bp, Artificial sequence
  SiRNA target sequence
gaagtgaatgagtttattgaac

SEQ ID NO: 4381 - DNA, 22 bp, Artificial sequence
  SiRNA target sequence
aagtgaatgagtttattgaaca

SEQ ID NO: 4382 - DNA, 22 bp, Artificial sequence
  SiRNA target sequence
agtgaatgagtttattgaacaa

SEQ ID NO: 4383 - DNA, 22 bp, Artificial sequence
  SiRNA target sequence
gtgaatgagtttattgaacaag

SEQ ID NO: 4384 - DNA, 22 bp, Artificial sequence
  SiRNA target sequence
tgaatgagtttattgaacaaga

SEQ ID NO: 4385 - DNA, 22 bp, Artificial sequence
  SiRNA target sequence
gaatgagtttattgaacaagaa

SEQ ID NO: 4386 - DNA, 22 bp, Artificial sequence
  SiRNA target sequence
aatgagtttattgaacaagaag

SEQ ID NO: 4387 - DNA, 22 bp, Artificial sequence
  SiRNA target sequence
atgagtttattgaacaagaagg

SEQ ID NO: 4388 - DNA, 22 bp, Artificial sequence
  SiRNA target sequence
tgagtttattgaacaagaaggt

SEQ ID NO: 4389 - DNA, 22 bp, Artificial sequence
  SiRNA target sequence
gagtttattgaacaagaaggtt

SEQ ID NO: 4390 - DNA, 22 bp, Artificial sequence
  SiRNA target sequence
agtttattgaacaagaaggttt

SEQ ID NO: 4391 - DNA, 22 bp, Artificial sequence
  SiRNA target sequence
gtttattgaacaagaaggttta

SEQ ID NO: 4392 - DNA, 22 bp, Artificial sequence
  SiRNA target sequence
tttattgaacaagaaggtttaa

SEQ ID NO: 4393 - DNA, 22 bp, Artificial sequence
  SiRNA target sequence
ttattgaacaagaaggtttaaa

SEQ ID NO: 4394 - DNA, 22 bp, Artificial sequence
  SiRNA target sequence
tattgaacaagaaggtttaaaa

SEQ ID NO: 4395 - DNA, 22 bp, Artificial sequence
  SiRNA target sequence
attgaacaagaaggtttaaaaa

SEQ ID NO: 4396 - DNA, 22 bp, Artificial sequence
  SiRNA target sequence
ttgaacaagaaggtttaaaaat

SEQ ID NO: 4397 - DNA, 22 bp, Artificial sequence
  SiRNA target sequence
tgaacaagaaggtttaaaaatt

SEQ ID NO: 4398 - DNA, 22 bp, Artificial sequence
  SiRNA target sequence
gaacaagaaggtttaaaaatta

SEQ ID NO: 4399 - DNA, 22 bp, Artificial sequence
  SiRNA target sequence
aacaagaaggtttaaaaattaa

SEQ ID NO: 4400 - DNA, 22 bp, Artificial sequence
  SiRNA target sequence
acaagaaggtttaaaaattaat

SEQ ID NO: 4401 - DNA, 22 bp, Artificial sequence
  SiRNA target sequence
caagaaggtttaaaaattaata

SEQ ID NO: 4402 - DNA, 22 bp, Artificial sequence
  SiRNA target sequence
aagaaggtttaaaaattaataa

SEQ ID NO: 4403 - DNA, 22 bp, Artificial sequence
  SiRNA target sequence
agaaggtttaaaaattaataaa

SEQ ID NO: 4404 - DNA, 22 bp, Artificial sequence
  SiRNA target sequence
gaaggtttaaaaattaataaag

SEQ ID NO: 4405 - DNA, 22 bp, Artificial sequence
  SiRNA target sequence
aaggtttaaaaattaataaaga

SEQ ID NO: 4406 - DNA, 22 bp, Artificial sequence
  SiRNA target sequence
aggtttaaaaattaataaagaa

SEQ ID NO: 4407 - DNA, 22 bp, Artificial sequence
  SiRNA target sequence
ggtttaaaaattaataaagaag

SEQ ID NO: 4408 - DNA, 22 bp, Artificial sequence
  SiRNA target sequence
gtttaaaaattaataaagaaga

SEQ ID NO: 4409 - DNA, 22 bp, Artificial sequence
  SiRNA target sequence
tttaaaaattaataaagaagat

SEQ ID NO: 4410 - DNA, 22 bp, Artificial sequence
  SiRNA target sequence
ttaaaaattaataaagaagatg

SEQ ID NO: 4411 - DNA, 22 bp, Artificial sequence
  SiRNA target sequence
taaaaattaataaagaagatgt

SEQ ID NO: 4412 - DNA, 22 bp, Artificial sequence
  SiRNA target sequence
aaaaattaataaagaagatgtg

SEQ ID NO: 4413 - DNA, 22 bp, Artificial sequence
  SiRNA target sequence
aaaattaataaagaagatgtgc

SEQ ID NO: 4414 - DNA, 22 bp, Artificial sequence
  SiRNA target sequence
aaattaataaagaagatgtgct

SEQ ID NO: 4415 - DNA, 22 bp, Artificial sequence
  SiRNA target sequence
aattaataaagaagatgtgcta

SEQ ID NO: 4416 - DNA, 22 bp, Artificial sequence
  SiRNA target sequence
attaataaagaagatgtgctaa

SEQ ID NO: 4417 - DNA, 22 bp, Artificial sequence
  SiRNA target sequence
ttaataaagaagatgtgctaag

SEQ ID NO: 4418 - DNA, 22 bp, Artificial sequence
  SiRNA target sequence
taataaagaagatgtgctaaga

SEQ ID NO: 4419 - DNA, 22 bp, Artificial sequence
  SiRNA target sequence
aataaagaagatgtgctaagag

SEQ ID NO: 4420 - DNA, 22 bp, Artificial sequence
  SiRNA target sequence
ataaagaagatgtgctaagagg

SEQ ID NO: 4421 - DNA, 22 bp, Artificial sequence
  SiRNA target sequence
taaagaagatgtgctaagagga

SEQ ID NO: 4422 - DNA, 22 bp, Artificial sequence
  SiRNA target sequence
aaagaagatgtgctaagaggac

SEQ ID NO: 4423 - DNA, 22 bp, Artificial sequence
  SiRNA target sequence
aagaagatgtgctaagaggact

SEQ ID NO: 4424 - DNA, 22 bp, Artificial sequence
  SiRNA target sequence
agaagatgtgctaagaggactt

SEQ ID NO: 4425 - DNA, 22 bp, Artificial sequence
  SiRNA target sequence
gaagatgtgctaagaggacttg

SEQ ID NO: 4426 - DNA, 22 bp, Artificial sequence
  SiRNA target sequence
aagatgtgctaagaggacttgt

SEQ ID NO: 4427 - DNA, 22 bp, Artificial sequence
  SiRNA target sequence
agatgtgctaagaggacttgtt

SEQ ID NO: 4428 - DNA, 22 bp, Artificial sequence
  SiRNA target sequence
gatgtgctaagaggacttgttt

SEQ ID NO: 4429 - DNA, 22 bp, Artificial sequence
  SiRNA target sequence
atgtgctaagaggacttgtttc

SEQ ID NO: 4430 - DNA, 22 bp, Artificial sequence
  SiRNA target sequence
tgtgctaagaggacttgtttca

SEQ ID NO: 4431 - DNA, 22 bp, Artificial sequence
  SiRNA target sequence
gtgctaagaggacttgtttcaa

SEQ ID NO: 4432 - DNA, 22 bp, Artificial sequence
  SiRNA target sequence
tgctaagaggacttgtttcaat

SEQ ID NO: 4433 - DNA, 22 bp, Artificial sequence
  SiRNA target sequence
gctaagaggacttgtttcaata

SEQ ID NO: 4434 - DNA, 22 bp, Artificial sequence
  SiRNA target sequence
ctaagaggacttgtttcaataa

SEQ ID NO: 4435 - DNA, 22 bp, Artificial sequence
  SiRNA target sequence
taagaggacttgtttcaataaa

SEQ ID NO: 4436 - DNA, 22 bp, Artificial sequence
  SiRNA target sequence
aagaggacttgtttcaataaaa

SEQ ID NO: 4437 - DNA, 22 bp, Artificial sequence
  SiRNA target sequence
agaggacttgtttcaataaaaa

SEQ ID NO: 4438 - DNA, 22 bp, Artificial sequence
  SiRNA target sequence
gaggacttgtttcaataaaaaa

SEQ ID NO: 4439 - DNA, 22 bp, Artificial sequence
  SiRNA target sequence
aggacttgtttcaataaaaaat

SEQ ID NO: 4440 - DNA, 22 bp, Artificial sequence
  SiRNA target sequence
ggacttgtttcaataaaaaata

SEQ ID NO: 4441 - DNA, 22 bp, Artificial sequence
  SiRNA target sequence
gacttgtttcaataaaaaatat

SEQ ID NO: 4442 - DNA, 22 bp, Artificial sequence
  SiRNA target sequence
acttgtttcaataaaaaatata

SEQ ID NO: 4443 - DNA, 22 bp, Artificial sequence
  SiRNA target sequence
cttgtttcaataaaaaatataa

SEQ ID NO: 4444 - DNA, 22 bp, Artificial sequence
  SiRNA target sequence
ttgtttcaataaaaaatataaa

SEQ ID NO: 4445 - DNA, 22 bp, Artificial sequence
  SiRNA target sequence
tgtttcaataaaaaatataaat

SEQ ID NO: 4446 - DNA, 22 bp, Artificial sequence
  SiRNA target sequence
gtttcaataaaaaatataaatg

SEQ ID NO: 4447 - DNA, 22 bp, Artificial sequence
  SiRNA target sequence
tttcaataaaaaatataaatga

SEQ ID NO: 4448 - DNA, 22 bp, Artificial sequence
  SiRNA target sequence
ttcaataaaaaatataaatgag

SEQ ID NO: 4449 - DNA, 22 bp, Artificial sequence
  SiRNA target sequence
tcaataaaaaatataaatgaga

SEQ ID NO: 4450 - DNA, 22 bp, Artificial sequence
  SiRNA target sequence
caataaaaaatataaatgagat

SEQ ID NO: 4451 - DNA, 22 bp, Artificial sequence
  SiRNA target sequence
aataaaaaatataaatgagatt

SEQ ID NO: 4452 - DNA, 22 bp, Artificial sequence
  SiRNA target sequence
ataaaaaatataaatgagattt

SEQ ID NO: 4453 - DNA, 22 bp, Artificial sequence
  SiRNA target sequence
taaaaaatataaatgagattta

SEQ ID NO: 4454 - DNA, 22 bp, Artificial sequence
  SiRNA target sequence
aaaaaatataaatgagatttat

SEQ ID NO: 4455 - DNA, 22 bp, Artificial sequence
  SiRNA target sequence
aaaaatataaatgagatttatg

SEQ ID NO: 4456 - DNA, 22 bp, Artificial sequence
  SiRNA target sequence
aaaatataaatgagatttatga

SEQ ID NO: 4457 - DNA, 22 bp, Artificial sequence
  SiRNA target sequence
aaatataaatgagatttatgat

SEQ ID NO: 4458 - DNA, 22 bp, Artificial sequence
  SiRNA target sequence
aatataaatgagatttatgatg

SEQ ID NO: 4459 - DNA, 22 bp, Artificial sequence
  SiRNA target sequence
atataaatgagatttatgatgc

SEQ ID NO: 4460 - DNA, 22 bp, Artificial sequence
  SiRNA target sequence
tataaatgagatttatgatgca

SEQ ID NO: 4461 - DNA, 22 bp, Artificial sequence
  SiRNA target sequence
ataaatgagatttatgatgcat

SEQ ID NO: 4462 - DNA, 22 bp, Artificial sequence
  SiRNA target sequence
taaatgagatttatgatgcatt

SEQ ID NO: 4463 - DNA, 22 bp, Artificial sequence
  SiRNA target sequence
aaatgagatttatgatgcattt

SEQ ID NO: 4464 - DNA, 22 bp, Artificial sequence
  SiRNA target sequence
aatgagatttatgatgcatttg

SEQ ID NO: 4465 - DNA, 22 bp, Artificial sequence
  SiRNA target sequence
atgagatttatgatgcatttgg

SEQ ID NO: 4466 - DNA, 22 bp, Artificial sequence
  SiRNA target sequence
tgagatttatgatgcatttgga

SEQ ID NO: 4467 - DNA, 22 bp, Artificial sequence
  SiRNA target sequence
gagatttatgatgcatttggag

SEQ ID NO: 4468 - DNA, 22 bp, Artificial sequence
  SiRNA target sequence
agatttatgatgcatttggagg

SEQ ID NO: 4469 - DNA, 22 bp, Artificial sequence
  SiRNA target sequence
gatttatgatgcatttggaggt

SEQ ID NO: 4470 - DNA, 22 bp, Artificial sequence
  SiRNA target sequence
atttatgatgcatttggaggta

SEQ ID NO: 4471 - DNA, 22 bp, Artificial sequence
  SiRNA target sequence
tttatgatgcatttggaggtaa

SEQ ID NO: 4472 - DNA, 22 bp, Artificial sequence
  SiRNA target sequence
ttatgatgcatttggaggtaaa

SEQ ID NO: 4473 - DNA, 22 bp, Artificial sequence
  SiRNA target sequence
tatgatgcatttggaggtaaat

SEQ ID NO: 4474 - DNA, 22 bp, Artificial sequence
  SiRNA target sequence
atgatgcatttggaggtaaatc

SEQ ID NO: 4475 - DNA, 22 bp, Artificial sequence
  SiRNA target sequence
tgatgcatttggaggtaaatct

SEQ ID NO: 4476 - DNA, 22 bp, Artificial sequence
  SiRNA target sequence
gatgcatttggaggtaaatcta

SEQ ID NO: 4477 - DNA, 22 bp, Artificial sequence
  SiRNA target sequence
atgcatttggaggtaaatctaa

SEQ ID NO: 4478 - DNA, 22 bp, Artificial sequence
  SiRNA target sequence
tgcatttggaggtaaatctaag

SEQ ID NO: 4479 - DNA, 22 bp, Artificial sequence
  SiRNA target sequence
gcatttggaggtaaatctaaga

SEQ ID NO: 4480 - DNA, 22 bp, Artificial sequence
  SiRNA target sequence
catttggaggtaaatctaagaa

SEQ ID NO: 4481 - DNA, 22 bp, Artificial sequence
  SiRNA target sequence
atttggaggtaaatctaagaag

SEQ ID NO: 4482 - DNA, 22 bp, Artificial sequence
  SiRNA target sequence
tttggaggtaaatctaagaagt

SEQ ID NO: 4483 - DNA, 22 bp, Artificial sequence
  SiRNA target sequence
ttggaggtaaatctaagaagtt

SEQ ID NO: 4484 - DNA, 22 bp, Artificial sequence
  SiRNA target sequence
tggaggtaaatctaagaagttt

SEQ ID NO: 4485 - DNA, 22 bp, Artificial sequence
  SiRNA target sequence
ggaggtaaatctaagaagttta

SEQ ID NO: 4486 - DNA, 22 bp, Artificial sequence
  SiRNA target sequence
gaggtaaatctaagaagtttaa

SEQ ID NO: 4487 - DNA, 22 bp, Artificial sequence
  SiRNA target sequence
aggtaaatctaagaagtttaaa

SEQ ID NO: 4488 - DNA, 22 bp, Artificial sequence
  SiRNA target sequence
ggtaaatctaagaagtttaaat

SEQ ID NO: 4489 - DNA, 22 bp, Artificial sequence
  SiRNA target sequence
gtaaatctaagaagtttaaatt

SEQ ID NO: 4490 - DNA, 22 bp, Artificial sequence
  SiRNA target sequence
taaatctaagaagtttaaattt

SEQ ID NO: 4491 - DNA, 22 bp, Artificial sequence
  SiRNA target sequence
aaatctaagaagtttaaatttt

SEQ ID NO: 4492 - DNA, 22 bp, Artificial sequence
  SiRNA target sequence
aatctaagaagtttaaattttc

SEQ ID NO: 4493 - DNA, 22 bp, Artificial sequence
  SiRNA target sequence
atctaagaagtttaaattttct

SEQ ID NO: 4494 - DNA, 22 bp, Artificial sequence
  SiRNA target sequence
tctaagaagtttaaattttcta

SEQ ID NO: 4495 - DNA, 22 bp, Artificial sequence
  SiRNA target sequence
ctaagaagtttaaattttctaa

SEQ ID NO: 4496 - DNA, 22 bp, Artificial sequence
  SiRNA target sequence
taagaagtttaaattttctaat

SEQ ID NO: 4497 - DNA, 22 bp, Artificial sequence
  SiRNA target sequence
aagaagtttaaattttctaatg

SEQ ID NO: 4498 - DNA, 22 bp, Artificial sequence
  SiRNA target sequence
agaagtttaaattttctaatga

SEQ ID NO: 4499 - DNA, 22 bp, Artificial sequence
  SiRNA target sequence
gaagtttaaattttctaatgat

SEQ ID NO: 4500 - DNA, 22 bp, Artificial sequence
  SiRNA target sequence
aagtttaaattttctaatgatg

SEQ ID NO: 4501 - DNA, 22 bp, Artificial sequence
  SiRNA target sequence
agtttaaattttctaatgatga

SEQ ID NO: 4502 - DNA, 22 bp, Artificial sequence
  SiRNA target sequence
gtttaaattttctaatgatgaa

SEQ ID NO: 4503 - DNA, 22 bp, Artificial sequence
  SiRNA target sequence
tttaaattttctaatgatgaaa

SEQ ID NO: 4504 - DNA, 22 bp, Artificial sequence
  SiRNA target sequence
ttaaattttctaatgatgaaaa

SEQ ID NO: 4505 - DNA, 22 bp, Artificial sequence
  SiRNA target sequence
taaattttctaatgatgaaaag

SEQ ID NO: 4506 - DNA, 22 bp, Artificial sequence
  SiRNA target sequence
aaattttctaatgatgaaaagg

SEQ ID NO: 4507 - DNA, 22 bp, Artificial sequence
  SiRNA target sequence
aattttctaatgatgaaaagga

SEQ ID NO: 4508 - DNA, 22 bp, Artificial sequence
  SiRNA target sequence
attttctaatgatgaaaaggaa

SEQ ID NO: 4509 - DNA, 22 bp, Artificial sequence
  SiRNA target sequence
ttttctaatgatgaaaaggaag

SEQ ID NO: 4510 - DNA, 22 bp, Artificial sequence
  SiRNA target sequence
tttctaatgatgaaaaggaagt

SEQ ID NO: 4511 - DNA, 22 bp, Artificial sequence
  SiRNA target sequence
ttctaatgatgaaaaggaagtg

SEQ ID NO: 4512 - DNA, 22 bp, Artificial sequence
  SiRNA target sequence
tctaatgatgaaaaggaagtgt

SEQ ID NO: 4513 - DNA, 22 bp, Artificial sequence
  SiRNA target sequence
ctaatgatgaaaaggaagtgtt

SEQ ID NO: 4514 - DNA, 22 bp, Artificial sequence
  SiRNA target sequence
taatgatgaaaaggaagtgtta

SEQ ID NO: 4515 - DNA, 22 bp, Artificial sequence
  SiRNA target sequence
aatgatgaaaaggaagtgttaa

SEQ ID NO: 4516 - DNA, 22 bp, Artificial sequence
  SiRNA target sequence
atgatgaaaaggaagtgttaaa

SEQ ID NO: 4517 - DNA, 22 bp, Artificial sequence
  SiRNA target sequence
tgatgaaaaggaagtgttaaat

SEQ ID NO: 4518 - DNA, 22 bp, Artificial sequence
  SiRNA target sequence
gatgaaaaggaagtgttaaatc

SEQ ID NO: 4519 - DNA, 22 bp, Artificial sequence
  SiRNA target sequence
atgaaaaggaagtgttaaatct

SEQ ID NO: 4520 - DNA, 22 bp, Artificial sequence
  SiRNA target sequence
tgaaaaggaagtgttaaatctt

SEQ ID NO: 4521 - DNA, 22 bp, Artificial sequence
  SiRNA target sequence
gaaaaggaagtgttaaatcttc

SEQ ID NO: 4522 - DNA, 22 bp, Artificial sequence
  SiRNA target sequence
aaaaggaagtgttaaatcttct

SEQ ID NO: 4523 - DNA, 22 bp, Artificial sequence
  SiRNA target sequence
aaaggaagtgttaaatcttctt

SEQ ID NO: 4524 - DNA, 22 bp, Artificial sequence
  SiRNA target sequence
aaggaagtgttaaatcttctta

SEQ ID NO: 4525 - DNA, 22 bp, Artificial sequence
  SiRNA target sequence
aggaagtgttaaatcttcttaa

SEQ ID NO: 4526 - DNA, 22 bp, Artificial sequence
  SiRNA target sequence
ggaagtgttaaatcttcttaat

SEQ ID NO: 4527 - DNA, 22 bp, Artificial sequence
  SiRNA target sequence
gaagtgttaaatcttcttaatg

SEQ ID NO: 4528 - DNA, 22 bp, Artificial sequence
  SiRNA target sequence
aagtgttaaatcttcttaatgc

SEQ ID NO: 4529 - DNA, 22 bp, Artificial sequence
  SiRNA target sequence
agtgttaaatcttcttaatgcc

SEQ ID NO: 4530 - DNA, 22 bp, Artificial sequence
  SiRNA target sequence
gtgttaaatcttcttaatgcca

SEQ ID NO: 4531 - DNA, 22 bp, Artificial sequence
  SiRNA target sequence
tgttaaatcttcttaatgccat

SEQ ID NO: 4532 - DNA, 22 bp, Artificial sequence
  SiRNA target sequence
gttaaatcttcttaatgccatt

SEQ ID NO: 4533 - DNA, 22 bp, Artificial sequence
  SiRNA target sequence
ttaaatcttcttaatgccatta

SEQ ID NO: 4534 - DNA, 22 bp, Artificial sequence
  SiRNA target sequence
taaatcttcttaatgccattat

SEQ ID NO: 4535 - DNA, 22 bp, Artificial sequence
  SiRNA target sequence
aaatcttcttaatgccattatt

SEQ ID NO: 4536 - DNA, 22 bp, Artificial sequence
  SiRNA target sequence
aatcttcttaatgccattattt

SEQ ID NO: 4537 - DNA, 22 bp, Artificial sequence
  SiRNA target sequence
atcttcttaatgccattatttt

SEQ ID NO: 4538 - DNA, 22 bp, Artificial sequence
  SiRNA target sequence
tcttcttaatgccattatttta

SEQ ID NO: 4539 - DNA, 22 bp, Artificial sequence
  SiRNA target sequence
cttcttaatgccattattttac

SEQ ID NO: 4540 - DNA, 22 bp, Artificial sequence
  SiRNA target sequence
ttcttaatgccattattttaca

SEQ ID NO: 4541 - DNA, 22 bp, Artificial sequence
  SiRNA target sequence
tcttaatgccattattttacac

SEQ ID NO: 4542 - DNA, 22 bp, Artificial sequence
  SiRNA target sequence
cttaatgccattattttacacc

SEQ ID NO: 4543 - DNA, 22 bp, Artificial sequence
  SiRNA target sequence
ttaatgccattattttacacct

SEQ ID NO: 4544 - DNA, 22 bp, Artificial sequence
  SiRNA target sequence
taatgccattattttacaccta

SEQ ID NO: 4545 - DNA, 22 bp, Artificial sequence
  SiRNA target sequence
aatgccattattttacacctaa

SEQ ID NO: 4546 - DNA, 22 bp, Artificial sequence
  SiRNA target sequence
atgccattattttacacctaaa

SEQ ID NO: 4547 - DNA, 22 bp, Artificial sequence
  SiRNA target sequence
tgccattattttacacctaaaa

SEQ ID NO: 4548 - DNA, 22 bp, Artificial sequence
  SiRNA target sequence
gccattattttacacctaaaag

SEQ ID NO: 4549 - DNA, 22 bp, Artificial sequence
  SiRNA target sequence
ccattattttacacctaaaagg

SEQ ID NO: 4550 - DNA, 22 bp, Artificial sequence
  SiRNA target sequence
cattattttacacctaaaagga

SEQ ID NO: 4551 - DNA, 22 bp, Artificial sequence
  SiRNA target sequence
attattttacacctaaaaggaa

SEQ ID NO: 4552 - DNA, 22 bp, Artificial sequence
  SiRNA target sequence
ttattttacacctaaaaggaaa

SEQ ID NO: 4553 - DNA, 22 bp, Artificial sequence
  SiRNA target sequence
tattttacacctaaaaggaaaa

SEQ ID NO: 4554 - DNA, 22 bp, Artificial sequence
  SiRNA target sequence
attttacacctaaaaggaaaaa

SEQ ID NO: 4555 - DNA, 22 bp, Artificial sequence
  SiRNA target sequence
ttttacacctaaaaggaaaaaa

SEQ ID NO: 4556 - DNA, 22 bp, Artificial sequence
  SiRNA target sequence
tttacacctaaaaggaaaaaaa

SEQ ID NO: 4557 - DNA, 22 bp, Artificial sequence
  SiRNA target sequence
ttacacctaaaaggaaaaaaag

SEQ ID NO: 4558 - DNA, 22 bp, Artificial sequence
  SiRNA target sequence
tacacctaaaaggaaaaaaaga

SEQ ID NO: 4559 - DNA, 22 bp, Artificial sequence
  SiRNA target sequence
acacctaaaaggaaaaaaagaa

SEQ ID NO: 4560 - DNA, 22 bp, Artificial sequence
  SiRNA target sequence
cacctaaaaggaaaaaaagaac

SEQ ID NO: 4561 - DNA, 22 bp, Artificial sequence
  SiRNA target sequence
acctaaaaggaaaaaaagaaca

SEQ ID NO: 4562 - DNA, 22 bp, Artificial sequence
  SiRNA target sequence
cctaaaaggaaaaaaagaacag

SEQ ID NO: 4563 - DNA, 22 bp, Artificial sequence
  SiRNA target sequence
ctaaaaggaaaaaaagaacagg

SEQ ID NO: 4564 - DNA, 22 bp, Artificial sequence
  SiRNA target sequence
taaaaggaaaaaaagaacaggc

SEQ ID NO: 4565 - DNA, 22 bp, Artificial sequence
  SiRNA target sequence
aaaaggaaaaaaagaacaggca

SEQ ID NO: 4566 - DNA, 22 bp, Artificial sequence
  SiRNA target sequence
aaaggaaaaaaagaacaggcaa

SEQ ID NO: 4567 - DNA, 22 bp, Artificial sequence
  SiRNA target sequence
aaggaaaaaaagaacaggcaat

SEQ ID NO: 4568 - DNA, 22 bp, Artificial sequence
  SiRNA target sequence
aggaaaaaaagaacaggcaatt

SEQ ID NO: 4569 - DNA, 22 bp, Artificial sequence
  SiRNA target sequence
ggaaaaaaagaacaggcaattc

SEQ ID NO: 4570 - DNA, 22 bp, Artificial sequence
  SiRNA target sequence
gaaaaaaagaacaggcaattct

SEQ ID NO: 4571 - DNA, 22 bp, Artificial sequence
  SiRNA target sequence
aaaaaaagaacaggcaattctt

SEQ ID NO: 4572 - DNA, 22 bp, Artificial sequence
  SiRNA target sequence
aaaaaagaacaggcaattcttt

SEQ ID NO: 4573 - DNA, 22 bp, Artificial sequence
  SiRNA target sequence
aaaaagaacaggcaattctttt

SEQ ID NO: 4574 - DNA, 22 bp, Artificial sequence
  SiRNA target sequence
aaaagaacaggcaattctttta

SEQ ID NO: 4575 - DNA, 22 bp, Artificial sequence
  SiRNA target sequence
aaagaacaggcaattcttttat

SEQ ID NO: 4576 - DNA, 22 bp, Artificial sequence
  SiRNA target sequence
aagaacaggcaattcttttatt

SEQ ID NO: 4577 - DNA, 22 bp, Artificial sequence
  SiRNA target sequence
agaacaggcaattcttttatta

SEQ ID NO: 4578 - DNA, 22 bp, Artificial sequence
  SiRNA target sequence
gaacaggcaattcttttattag

SEQ ID NO: 4579 - DNA, 22 bp, Artificial sequence
  SiRNA target sequence
aacaggcaattcttttattaga

SEQ ID NO: 4580 - DNA, 22 bp, Artificial sequence
  SiRNA target sequence
acaggcaattcttttattagaa

SEQ ID NO: 4581 - DNA, 22 bp, Artificial sequence
  SiRNA target sequence
caggcaattcttttattagaaa

SEQ ID NO: 4582 - DNA, 22 bp, Artificial sequence
  SiRNA target sequence
aggcaattcttttattagaaaa

SEQ ID NO: 4583 - DNA, 22 bp, Artificial sequence
  SiRNA target sequence
ggcaattcttttattagaaaaa

SEQ ID NO: 4584 - DNA, 22 bp, Artificial sequence
  SiRNA target sequence
gcaattcttttattagaaaaat

SEQ ID NO: 4585 - DNA, 22 bp, Artificial sequence
  SiRNA target sequence
caattcttttattagaaaaatc

SEQ ID NO: 4586 - DNA, 22 bp, Artificial sequence
  SiRNA target sequence
aattcttttattagaaaaatct

SEQ ID NO: 4587 - DNA, 22 bp, Artificial sequence
  SiRNA target sequence
attcttttattagaaaaatcta

SEQ ID NO: 4588 - DNA, 22 bp, Artificial sequence
  SiRNA target sequence
ttcttttattagaaaaatctac

SEQ ID NO: 4589 - DNA, 22 bp, Artificial sequence
  SiRNA target sequence
tcttttattagaaaaatctact

SEQ ID NO: 4590 - DNA, 22 bp, Artificial sequence
  SiRNA target sequence
cttttattagaaaaatctactt

SEQ ID NO: 4591 - DNA, 22 bp, Artificial sequence
  SiRNA target sequence
ttttattagaaaaatctactta

SEQ ID NO: 4592 - DNA, 22 bp, Artificial sequence
  SiRNA target sequence
tttattagaaaaatctacttat

SEQ ID NO: 4593 - DNA, 22 bp, Artificial sequence
  SiRNA target sequence
ttattagaaaaatctacttata

SEQ ID NO: 4594 - DNA, 22 bp, Artificial sequence
  SiRNA target sequence
tattagaaaaatctacttataa

SEQ ID NO: 4595 - DNA, 22 bp, Artificial sequence
  SiRNA target sequence
attagaaaaatctacttataaa

SEQ ID NO: 4596 - DNA, 22 bp, Artificial sequence
  SiRNA target sequence
ttagaaaaatctacttataaat

SEQ ID NO: 4597 - DNA, 22 bp, Artificial sequence
  SiRNA target sequence
tagaaaaatctacttataaata

SEQ ID NO: 4598 - DNA, 22 bp, Artificial sequence
  SiRNA target sequence
agaaaaatctacttataaatac

SEQ ID NO: 4599 - DNA, 22 bp, Artificial sequence
  SiRNA target sequence
gaaaaatctacttataaataca

SEQ ID NO: 4600 - DNA, 22 bp, Artificial sequence
  SiRNA target sequence
aaaaatctacttataaatacag

SEQ ID NO: 4601 - DNA, 22 bp, Artificial sequence
  SiRNA target sequence
aaaatctacttataaatacagt

SEQ ID NO: 4602 - DNA, 22 bp, Artificial sequence
  SiRNA target sequence
aaatctacttataaatacagta

SEQ ID NO: 4603 - DNA, 22 bp, Artificial sequence
  SiRNA target sequence
aatctacttataaatacagtat

SEQ ID NO: 4604 - DNA, 22 bp, Artificial sequence
  SiRNA target sequence
atctacttataaatacagtatc

SEQ ID NO: 4605 - DNA, 22 bp, Artificial sequence
  SiRNA target sequence
tctacttataaatacagtatct

SEQ ID NO: 4606 - DNA, 22 bp, Artificial sequence
  SiRNA target sequence
ctacttataaatacagtatctt

SEQ ID NO: 4607 - DNA, 22 bp, Artificial sequence
  SiRNA target sequence
tacttataaatacagtatcttg

SEQ ID NO: 4608 - DNA, 22 bp, Artificial sequence
  SiRNA target sequence
acttataaatacagtatcttgt

SEQ ID NO: 4609 - DNA, 22 bp, Artificial sequence
  SiRNA target sequence
cttataaatacagtatcttgta

SEQ ID NO: 4610 - DNA, 22 bp, Artificial sequence
  SiRNA target sequence
ttataaatacagtatcttgtat

SEQ ID NO: 4611 - DNA, 22 bp, Artificial sequence
  SiRNA target sequence
tataaatacagtatcttgtata

SEQ ID NO: 4612 - DNA, 22 bp, Artificial sequence
  SiRNA target sequence
ataaatacagtatcttgtatag

SEQ ID NO: 4613 - DNA, 22 bp, Artificial sequence
  SiRNA target sequence
taaatacagtatcttgtataga

SEQ ID NO: 4614 - DNA, 22 bp, Artificial sequence
  SiRNA target sequence
aaatacagtatcttgtatagag

SEQ ID NO: 4615 - DNA, 22 bp, Artificial sequence
  SiRNA target sequence
aatacagtatcttgtatagagc

SEQ ID NO: 4616 - DNA, 22 bp, Artificial sequence
  SiRNA target sequence
atacagtatcttgtatagagca

SEQ ID NO: 4617 - DNA, 22 bp, Artificial sequence
  SiRNA target sequence
tacagtatcttgtatagagcat

SEQ ID NO: 4618 - DNA, 22 bp, Artificial sequence
  SiRNA target sequence
acagtatcttgtatagagcata

SEQ ID NO: 4619 - DNA, 22 bp, Artificial sequence
  SiRNA target sequence
cagtatcttgtatagagcatat

SEQ ID NO: 4620 - DNA, 22 bp, Artificial sequence
  SiRNA target sequence
agtatcttgtatagagcatatt

SEQ ID NO: 4621 - DNA, 22 bp, Artificial sequence
  SiRNA target sequence
gtatcttgtatagagcatattt

SEQ ID NO: 4622 - DNA, 22 bp, Artificial sequence
  SiRNA target sequence
tatcttgtatagagcatatttt

SEQ ID NO: 4623 - DNA, 22 bp, Artificial sequence
  SiRNA target sequence
atcttgtatagagcatattttc

SEQ ID NO: 4624 - DNA, 22 bp, Artificial sequence
  SiRNA target sequence
tcttgtatagagcatattttct

SEQ ID NO: 4625 - DNA, 22 bp, Artificial sequence
  SiRNA target sequence
cttgtatagagcatattttctt

SEQ ID NO: 4626 - DNA, 22 bp, Artificial sequence
  SiRNA target sequence
ttgtatagagcatattttctta

SEQ ID NO: 4627 - DNA, 22 bp, Artificial sequence
  SiRNA target sequence
tgtatagagcatattttcttac

SEQ ID NO: 4628 - DNA, 22 bp, Artificial sequence
  SiRNA target sequence
gtatagagcatattttcttaca

SEQ ID NO: 4629 - DNA, 22 bp, Artificial sequence
  SiRNA target sequence
tatagagcatattttcttacat

SEQ ID NO: 4630 - DNA, 22 bp, Artificial sequence
  SiRNA target sequence
atagagcatattttcttacatt

SEQ ID NO: 4631 - DNA, 22 bp, Artificial sequence
  SiRNA target sequence
tagagcatattttcttacattg

SEQ ID NO: 4632 - DNA, 22 bp, Artificial sequence
  SiRNA target sequence
agagcatattttcttacattga

SEQ ID NO: 4633 - DNA, 22 bp, Artificial sequence
  SiRNA target sequence
gagcatattttcttacattgaa

SEQ ID NO: 4634 - DNA, 22 bp, Artificial sequence
  SiRNA target sequence
agcatattttcttacattgaag

SEQ ID NO: 4635 - DNA, 22 bp, Artificial sequence
  SiRNA target sequence
gcatattttcttacattgaaga

SEQ ID NO: 4636 - DNA, 22 bp, Artificial sequence
  SiRNA target sequence
catattttcttacattgaagaa

SEQ ID NO: 4637 - DNA, 22 bp, Artificial sequence
  SiRNA target sequence
atattttcttacattgaagaat

SEQ ID NO: 4638 - DNA, 22 bp, Artificial sequence
  SiRNA target sequence
tattttcttacattgaagaatg

SEQ ID NO: 4639 - DNA, 22 bp, Artificial sequence
  SiRNA target sequence
attttcttacattgaagaatga

SEQ ID NO: 4640 - DNA, 22 bp, Artificial sequence
  SiRNA target sequence
ttttcttacattgaagaatgaa

SEQ ID NO: 4641 - DNA, 22 bp, Artificial sequence
  SiRNA target sequence
tttcttacattgaagaatgaat

SEQ ID NO: 4642 - DNA, 22 bp, Artificial sequence
  SiRNA target sequence
ttcttacattgaagaatgaata

SEQ ID NO: 4643 - DNA, 22 bp, Artificial sequence
  SiRNA target sequence
tcttacattgaagaatgaatat

SEQ ID NO: 4644 - DNA, 22 bp, Artificial sequence
  SiRNA target sequence
cttacattgaagaatgaatata

SEQ ID NO: 4645 - DNA, 22 bp, Artificial sequence
  SiRNA target sequence
ttacattgaagaatgaatatat

SEQ ID NO: 4646 - DNA, 22 bp, Artificial sequence
  SiRNA target sequence
tacattgaagaatgaatatatt

SEQ ID NO: 4647 - DNA, 22 bp, Artificial sequence
  SiRNA target sequence
acattgaagaatgaatatattt

SEQ ID NO: 4648 - DNA, 22 bp, Artificial sequence
  SiRNA target sequence
cattgaagaatgaatatatttc

SEQ ID NO: 4649 - DNA, 22 bp, Artificial sequence
  SiRNA target sequence
attgaagaatgaatatatttca

SEQ ID NO: 4650 - DNA, 22 bp, Artificial sequence
  SiRNA target sequence
ttgaagaatgaatatatttcat

SEQ ID NO: 4651 - DNA, 22 bp, Artificial sequence
  SiRNA target sequence
tgaagaatgaatatatttcatc

SEQ ID NO: 4652 - DNA, 22 bp, Artificial sequence
  SiRNA target sequence
gaagaatgaatatatttcatct

SEQ ID NO: 4653 - DNA, 22 bp, Artificial sequence
  SiRNA target sequence
aagaatgaatatatttcatctt

SEQ ID NO: 4654 - DNA, 22 bp, Artificial sequence
  SiRNA target sequence
agaatgaatatatttcatcttc

SEQ ID NO: 4655 - DNA, 22 bp, Artificial sequence
  SiRNA target sequence
gaatgaatatatttcatcttca

SEQ ID NO: 4656 - DNA, 22 bp, Artificial sequence
  SiRNA target sequence
aatgaatatatttcatcttcat

SEQ ID NO: 4657 - DNA, 22 bp, Artificial sequence
  SiRNA target sequence
atgaatatatttcatcttcatt

SEQ ID NO: 4658 - DNA, 22 bp, Artificial sequence
  SiRNA target sequence
tgaatatatttcatcttcattg

SEQ ID NO: 4659 - DNA, 22 bp, Artificial sequence
  SiRNA target sequence
gaatatatttcatcttcattgc

SEQ ID NO: 4660 - DNA, 22 bp, Artificial sequence
  SiRNA target sequence
aatatatttcatcttcattgcc

SEQ ID NO: 4661 - DNA, 22 bp, Artificial sequence
  SiRNA target sequence
atatatttcatcttcattgcct

SEQ ID NO: 4662 - DNA, 22 bp, Artificial sequence
  SiRNA target sequence
tatatttcatcttcattgcctt

SEQ ID NO: 4663 - DNA, 22 bp, Artificial sequence
  SiRNA target sequence
atatttcatcttcattgccttt

SEQ ID NO: 4664 - DNA, 22 bp, Artificial sequence
  SiRNA target sequence
tatttcatcttcattgccttta

SEQ ID NO: 4665 - DNA, 22 bp, Artificial sequence
  SiRNA target sequence
atttcatcttcattgcctttag

SEQ ID NO: 4666 - DNA, 22 bp, Artificial sequence
  SiRNA target sequence
tttcatcttcattgcctttaga

SEQ ID NO: 4667 - DNA, 22 bp, Artificial sequence
  SiRNA target sequence
ttcatcttcattgcctttagat

SEQ ID NO: 4668 - DNA, 22 bp, Artificial sequence
  SiRNA target sequence
tcatcttcattgcctttagatg

SEQ ID NO: 4669 - DNA, 22 bp, Artificial sequence
  SiRNA target sequence
catcttcattgcctttagatga

SEQ ID NO: 4670 - DNA, 22 bp, Artificial sequence
  SiRNA target sequence
atcttcattgcctttagatgac

SEQ ID NO: 4671 - DNA, 22 bp, Artificial sequence
  SiRNA target sequence
tcttcattgcctttagatgacg

SEQ ID NO: 4672 - DNA, 22 bp, Artificial sequence
  SiRNA target sequence
cttcattgcctttagatgacga

SEQ ID NO: 4673 - DNA, 22 bp, Artificial sequence
  SiRNA target sequence
ttcattgcctttagatgacgag

SEQ ID NO: 4674 - DNA, 22 bp, Artificial sequence
  SiRNA target sequence
tcattgcctttagatgacgaga

SEQ ID NO: 4675 - DNA, 22 bp, Artificial sequence
  SiRNA target sequence
cattgcctttagatgacgagat

SEQ ID NO: 4676 - DNA, 22 bp, Artificial sequence
  SiRNA target sequence
attgcctttagatgacgagatt

SEQ ID NO: 4677 - DNA, 22 bp, Artificial sequence
  SiRNA target sequence
ttgcctttagatgacgagatta

SEQ ID NO: 4678 - DNA, 22 bp, Artificial sequence
  SiRNA target sequence
tgcctttagatgacgagattac

SEQ ID NO: 4679 - DNA, 22 bp, Artificial sequence
  SiRNA target sequence
gcctttagatgacgagattact

SEQ ID NO: 4680 - DNA, 22 bp, Artificial sequence
  SiRNA target sequence
cctttagatgacgagattacta

SEQ ID NO: 4681 - DNA, 22 bp, Artificial sequence
  SiRNA target sequence
ctttagatgacgagattactac

SEQ ID NO: 4682 - DNA, 22 bp, Artificial sequence
  SiRNA target sequence
tttagatgacgagattactacg

SEQ ID NO: 4683 - DNA, 22 bp, Artificial sequence
  SiRNA target sequence
ttagatgacgagattactacgc

SEQ ID NO: 4684 - DNA, 22 bp, Artificial sequence
  SiRNA target sequence
tagatgacgagattactacgct

SEQ ID NO: 4685 - DNA, 22 bp, Artificial sequence
  SiRNA target sequence
agatgacgagattactacgctt

SEQ ID NO: 4686 - DNA, 22 bp, Artificial sequence
  SiRNA target sequence
gatgacgagattactacgcttt

SEQ ID NO: 4687 - DNA, 22 bp, Artificial sequence
  SiRNA target sequence
atgacgagattactacgcttta

SEQ ID NO: 4688 - DNA, 22 bp, Artificial sequence
  SiRNA target sequence
tgacgagattactacgctttac

SEQ ID NO: 4689 - DNA, 22 bp, Artificial sequence
  SiRNA target sequence
gacgagattactacgctttact

SEQ ID NO: 4690 - DNA, 22 bp, Artificial sequence
  SiRNA target sequence
acgagattactacgctttactt

SEQ ID NO: 4691 - DNA, 22 bp, Artificial sequence
  SiRNA target sequence
cgagattactacgctttacttg

SEQ ID NO: 4692 - DNA, 22 bp, Artificial sequence
  SiRNA target sequence
gagattactacgctttacttgt

SEQ ID NO: 4693 - DNA, 22 bp, Artificial sequence
  SiRNA target sequence
agattactacgctttacttgta

SEQ ID NO: 4694 - DNA, 22 bp, Artificial sequence
  SiRNA target sequence
gattactacgctttacttgtat

SEQ ID NO: 4695 - DNA, 22 bp, Artificial sequence
  SiRNA target sequence
attactacgctttacttgtatt

SEQ ID NO: 4696 - DNA, 22 bp, Artificial sequence
  SiRNA target sequence
ttactacgctttacttgtattc

SEQ ID NO: 4697 - DNA, 22 bp, Artificial sequence
  SiRNA target sequence
tactacgctttacttgtattct

SEQ ID NO: 4698 - DNA, 22 bp, Artificial sequence
  SiRNA target sequence
actacgctttacttgtattcta

SEQ ID NO: 4699 - DNA, 22 bp, Artificial sequence
  SiRNA target sequence
ctacgctttacttgtattctaa

SEQ ID NO: 4700 - DNA, 22 bp, Artificial sequence
  SiRNA target sequence
tacgctttacttgtattctaag

SEQ ID NO: 4701 - DNA, 22 bp, Artificial sequence
  SiRNA target sequence
acgctttacttgtattctaaga

SEQ ID NO: 4702 - DNA, 22 bp, Artificial sequence
  SiRNA target sequence
cgctttacttgtattctaagat

SEQ ID NO: 4703 - DNA, 22 bp, Artificial sequence
  SiRNA target sequence
gctttacttgtattctaagatt

SEQ ID NO: 4704 - DNA, 22 bp, Artificial sequence
  SiRNA target sequence
ctttacttgtattctaagattt

SEQ ID NO: 4705 - DNA, 22 bp, Artificial sequence
  SiRNA target sequence
tttacttgtattctaagatttt

SEQ ID NO: 4706 - DNA, 22 bp, Artificial sequence
  SiRNA target sequence
ttacttgtattctaagattttt

SEQ ID NO: 4707 - DNA, 22 bp, Artificial sequence
  SiRNA target sequence
tacttgtattctaagattttta

SEQ ID NO: 4708 - DNA, 22 bp, Artificial sequence
  SiRNA target sequence
acttgtattctaagatttttaa

SEQ ID NO: 4709 - DNA, 22 bp, Artificial sequence
  SiRNA target sequence
cttgtattctaagatttttaaa

SEQ ID NO: 4710 - DNA, 22 bp, Artificial sequence
  SiRNA target sequence
ttgtattctaagatttttaaag

SEQ ID NO: 4711 - DNA, 22 bp, Artificial sequence
  SiRNA target sequence
tgtattctaagatttttaaaga

SEQ ID NO: 4712 - DNA, 22 bp, Artificial sequence
  SiRNA target sequence
gtattctaagatttttaaagat

SEQ ID NO: 4713 - DNA, 22 bp, Artificial sequence
  SiRNA target sequence
tattctaagatttttaaagata

SEQ ID NO: 4714 - DNA, 22 bp, Artificial sequence
  SiRNA target sequence
attctaagatttttaaagataa

SEQ ID NO: 4715 - DNA, 22 bp, Artificial sequence
  SiRNA target sequence
ttctaagatttttaaagataaa

SEQ ID NO: 4716 - DNA, 22 bp, Artificial sequence
  SiRNA target sequence
tctaagatttttaaagataaat

SEQ ID NO: 4717 - DNA, 22 bp, Artificial sequence
  SiRNA target sequence
ctaagatttttaaagataaatc

SEQ ID NO: 4718 - DNA, 22 bp, Artificial sequence
  SiRNA target sequence
taagatttttaaagataaatct

SEQ ID NO: 4719 - DNA, 22 bp, Artificial sequence
  SiRNA target sequence
aagatttttaaagataaatctg

SEQ ID NO: 4720 - DNA, 22 bp, Artificial sequence
  SiRNA target sequence
agatttttaaagataaatctga

SEQ ID NO: 4721 - DNA, 22 bp, Artificial sequence
  SiRNA target sequence
gatttttaaagataaatctgat

SEQ ID NO: 4722 - DNA, 22 bp, Artificial sequence
  SiRNA target sequence
atttttaaagataaatctgata

SEQ ID NO: 4723 - DNA, 22 bp, Artificial sequence
  SiRNA target sequence
tttttaaagataaatctgatac

SEQ ID NO: 4724 - DNA, 22 bp, Artificial sequence
  SiRNA target sequence
ttttaaagataaatctgatact

SEQ ID NO: 4725 - DNA, 22 bp, Artificial sequence
  SiRNA target sequence
tttaaagataaatctgatactt

SEQ ID NO: 4726 - DNA, 22 bp, Artificial sequence
  SiRNA target sequence
ttaaagataaatctgatactta

SEQ ID NO: 4727 - DNA, 22 bp, Artificial sequence
  SiRNA target sequence
taaagataaatctgatacttac

SEQ ID NO: 4728 - DNA, 22 bp, Artificial sequence
  SiRNA target sequence
aaagataaatctgatacttacc

SEQ ID NO: 4729 - DNA, 22 bp, Artificial sequence
  SiRNA target sequence
aagataaatctgatacttacct

SEQ ID NO: 4730 - DNA, 22 bp, Artificial sequence
  SiRNA target sequence
agataaatctgatacttacctt

SEQ ID NO: 4731 - DNA, 22 bp, Artificial sequence
  SiRNA target sequence
gataaatctgatacttacctta

SEQ ID NO: 4732 - DNA, 22 bp, Artificial sequence
  SiRNA target sequence
ataaatctgatacttaccttaa

SEQ ID NO: 4733 - DNA, 22 bp, Artificial sequence
  SiRNA target sequence
taaatctgatacttaccttaaa

SEQ ID NO: 4734 - DNA, 22 bp, Artificial sequence
  SiRNA target sequence
aaatctgatacttaccttaaat

SEQ ID NO: 4735 - DNA, 22 bp, Artificial sequence
  SiRNA target sequence
aatctgatacttaccttaaatc

SEQ ID NO: 4736 - DNA, 22 bp, Artificial sequence
  SiRNA target sequence
atctgatacttaccttaaatct

SEQ ID NO: 4737 - DNA, 22 bp, Artificial sequence
  SiRNA target sequence
tctgatacttaccttaaatctg

SEQ ID NO: 4738 - DNA, 22 bp, Artificial sequence
  SiRNA target sequence
ctgatacttaccttaaatctgc

SEQ ID NO: 4739 - DNA, 22 bp, Artificial sequence
  SiRNA target sequence
tgatacttaccttaaatctgct

SEQ ID NO: 4740 - DNA, 22 bp, Artificial sequence
  SiRNA target sequence
gatacttaccttaaatctgcta

SEQ ID NO: 4741 - DNA, 22 bp, Artificial sequence
  SiRNA target sequence
atacttaccttaaatctgctat

SEQ ID NO: 4742 - DNA, 22 bp, Artificial sequence
  SiRNA target sequence
tacttaccttaaatctgctata

SEQ ID NO: 4743 - DNA, 22 bp, Artificial sequence
  SiRNA target sequence
acttaccttaaatctgctatag

SEQ ID NO: 4744 - DNA, 22 bp, Artificial sequence
  SiRNA target sequence
cttaccttaaatctgctataga

SEQ ID NO: 4745 - DNA, 22 bp, Artificial sequence
  SiRNA target sequence
ttaccttaaatctgctatagat

SEQ ID NO: 4746 - DNA, 22 bp, Artificial sequence
  SiRNA target sequence
taccttaaatctgctatagata

SEQ ID NO: 4747 - DNA, 22 bp, Artificial sequence
  SiRNA target sequence
accttaaatctgctatagataa

SEQ ID NO: 4748 - DNA, 22 bp, Artificial sequence
  SiRNA target sequence
ccttaaatctgctatagataaa

SEQ ID NO: 4749 - DNA, 22 bp, Artificial sequence
  SiRNA target sequence
cttaaatctgctatagataaat

SEQ ID NO: 4750 - DNA, 22 bp, Artificial sequence
  SiRNA target sequence
ttaaatctgctatagataaatc

SEQ ID NO: 4751 - DNA, 22 bp, Artificial sequence
  SiRNA target sequence
taaatctgctatagataaatca

SEQ ID NO: 4752 - DNA, 22 bp, Artificial sequence
  SiRNA target sequence
aaatctgctatagataaatcag

SEQ ID NO: 4753 - DNA, 22 bp, Artificial sequence
  SiRNA target sequence
aatctgctatagataaatcagt

SEQ ID NO: 4754 - DNA, 22 bp, Artificial sequence
  SiRNA target sequence
atctgctatagataaatcagta

SEQ ID NO: 4755 - DNA, 22 bp, Artificial sequence
  SiRNA target sequence
tctgctatagataaatcagtag

SEQ ID NO: 4756 - DNA, 22 bp, Artificial sequence
  SiRNA target sequence
ctgctatagataaatcagtaga

SEQ ID NO: 4757 - DNA, 22 bp, Artificial sequence
  SiRNA target sequence
tgctatagataaatcagtagat

SEQ ID NO: 4758 - DNA, 22 bp, Artificial sequence
  SiRNA target sequence
gctatagataaatcagtagatc

SEQ ID NO: 4759 - DNA, 22 bp, Artificial sequence
  SiRNA target sequence
ctatagataaatcagtagatct

SEQ ID NO: 4760 - DNA, 22 bp, Artificial sequence
  SiRNA target sequence
tatagataaatcagtagatcta

SEQ ID NO: 4761 - DNA, 22 bp, Artificial sequence
  SiRNA target sequence
atagataaatcagtagatctac

SEQ ID NO: 4762 - DNA, 22 bp, Artificial sequence
  SiRNA target sequence
tagataaatcagtagatctacc

SEQ ID NO: 4763 - DNA, 22 bp, Artificial sequence
  SiRNA target sequence
agataaatcagtagatctacct

SEQ ID NO: 4764 - DNA, 22 bp, Artificial sequence
  SiRNA target sequence
gataaatcagtagatctaccta

SEQ ID NO: 4765 - DNA, 22 bp, Artificial sequence
  SiRNA target sequence
ataaatcagtagatctacctat

SEQ ID NO: 4766 - DNA, 22 bp, Artificial sequence
  SiRNA target sequence
taaatcagtagatctacctatt

SEQ ID NO: 4767 - DNA, 22 bp, Artificial sequence
  SiRNA target sequence
aaatcagtagatctacctattg

SEQ ID NO: 4768 - DNA, 22 bp, Artificial sequence
  SiRNA target sequence
aatcagtagatctacctattga

SEQ ID NO: 4769 - DNA, 22 bp, Artificial sequence
  SiRNA target sequence
atcagtagatctacctattgaa

SEQ ID NO: 4770 - DNA, 22 bp, Artificial sequence
  SiRNA target sequence
tcagtagatctacctattgaac

SEQ ID NO: 4771 - DNA, 22 bp, Artificial sequence
  SiRNA target sequence
cagtagatctacctattgaaca

SEQ ID NO: 4772 - DNA, 22 bp, Artificial sequence
  SiRNA target sequence
agtagatctacctattgaacag

SEQ ID NO: 4773 - DNA, 22 bp, Artificial sequence
  SiRNA target sequence
gtagatctacctattgaacaga

SEQ ID NO: 4774 - DNA, 22 bp, Artificial sequence
  SiRNA target sequence
tagatctacctattgaacagaa

SEQ ID NO: 4775 - DNA, 22 bp, Artificial sequence
  SiRNA target sequence
agatctacctattgaacagaaa

SEQ ID NO: 4776 - DNA, 22 bp, Artificial sequence
  SiRNA target sequence
gatctacctattgaacagaaag

SEQ ID NO: 4777 - DNA, 22 bp, Artificial sequence
  SiRNA target sequence
atctacctattgaacagaaaga

SEQ ID NO: 4778 - DNA, 22 bp, Artificial sequence
  SiRNA target sequence
tctacctattgaacagaaagac

SEQ ID NO: 4779 - DNA, 22 bp, Artificial sequence
  SiRNA target sequence
ctacctattgaacagaaagact

SEQ ID NO: 4780 - DNA, 22 bp, Artificial sequence
  SiRNA target sequence
tacctattgaacagaaagactt

SEQ ID NO: 4781 - DNA, 22 bp, Artificial sequence
  SiRNA target sequence
acctattgaacagaaagacttt

SEQ ID NO: 4782 - DNA, 22 bp, Artificial sequence
  SiRNA target sequence
cctattgaacagaaagactttc

SEQ ID NO: 4783 - DNA, 22 bp, Artificial sequence
  SiRNA target sequence
ctattgaacagaaagactttct

SEQ ID NO: 4784 - DNA, 22 bp, Artificial sequence
  SiRNA target sequence
tattgaacagaaagactttctg

SEQ ID NO: 4785 - DNA, 22 bp, Artificial sequence
  SiRNA target sequence
attgaacagaaagactttctgt

SEQ ID NO: 4786 - DNA, 22 bp, Artificial sequence
  SiRNA target sequence
ttgaacagaaagactttctgta

SEQ ID NO: 4787 - DNA, 22 bp, Artificial sequence
  SiRNA target sequence
tgaacagaaagactttctgtac

SEQ ID NO: 4788 - DNA, 22 bp, Artificial sequence
  SiRNA target sequence
gaacagaaagactttctgtacg

SEQ ID NO: 4789 - DNA, 22 bp, Artificial sequence
  SiRNA target sequence
aacagaaagactttctgtacgt

SEQ ID NO: 4790 - DNA, 22 bp, Artificial sequence
  SiRNA target sequence
acagaaagactttctgtacgta

SEQ ID NO: 4791 - DNA, 22 bp, Artificial sequence
  SiRNA target sequence
cagaaagactttctgtacgtag

SEQ ID NO: 4792 - DNA, 22 bp, Artificial sequence
  SiRNA target sequence
agaaagactttctgtacgtaga

SEQ ID NO: 4793 - DNA, 22 bp, Artificial sequence
  SiRNA target sequence
gaaagactttctgtacgtagat

SEQ ID NO: 4794 - DNA, 22 bp, Artificial sequence
  SiRNA target sequence
aaagactttctgtacgtagatc

SEQ ID NO: 4795 - DNA, 22 bp, Artificial sequence
  SiRNA target sequence
aagactttctgtacgtagatct

SEQ ID NO: 4796 - DNA, 22 bp, Artificial sequence
  SiRNA target sequence
agactttctgtacgtagatctt

SEQ ID NO: 4797 - DNA, 22 bp, Artificial sequence
  SiRNA target sequence
gactttctgtacgtagatcttc

SEQ ID NO: 4798 - DNA, 22 bp, Artificial sequence
  SiRNA target sequence
actttctgtacgtagatcttct

SEQ ID NO: 4799 - DNA, 22 bp, Artificial sequence
  SiRNA target sequence
ctttctgtacgtagatcttctt

SEQ ID NO: 4800 - DNA, 22 bp, Artificial sequence
  SiRNA target sequence
tttctgtacgtagatcttcttg

SEQ ID NO: 4801 - DNA, 22 bp, Artificial sequence
  SiRNA target sequence
ttctgtacgtagatcttcttgt

SEQ ID NO: 4802 - DNA, 22 bp, Artificial sequence
  SiRNA target sequence
tctgtacgtagatcttcttgta

SEQ ID NO: 4803 - DNA, 22 bp, Artificial sequence
  SiRNA target sequence
ctgtacgtagatcttcttgtat

SEQ ID NO: 4804 - DNA, 22 bp, Artificial sequence
  SiRNA target sequence
tgtacgtagatcttcttgtatt

SEQ ID NO: 4805 - DNA, 22 bp, Artificial sequence
  SiRNA target sequence
gtacgtagatcttcttgtattt

SEQ ID NO: 4806 - DNA, 22 bp, Artificial sequence
  SiRNA target sequence
tacgtagatcttcttgtatttt

SEQ ID NO: 4807 - DNA, 22 bp, Artificial sequence
  SiRNA target sequence
acgtagatcttcttgtatttta

SEQ ID NO: 4808 - DNA, 22 bp, Artificial sequence
  SiRNA target sequence
cgtagatcttcttgtattttac

SEQ ID NO: 4809 - DNA, 22 bp, Artificial sequence
  SiRNA target sequence
gtagatcttcttgtattttaca

SEQ ID NO: 4810 - DNA, 22 bp, Artificial sequence
  SiRNA target sequence
tagatcttcttgtattttacat

SEQ ID NO: 4811 - DNA, 22 bp, Artificial sequence
  SiRNA target sequence
agatcttcttgtattttacatt

SEQ ID NO: 4812 - DNA, 22 bp, Artificial sequence
  SiRNA target sequence
gatcttcttgtattttacattt

SEQ ID NO: 4813 - DNA, 22 bp, Artificial sequence
  SiRNA target sequence
atcttcttgtattttacatttc

SEQ ID NO: 4814 - DNA, 22 bp, Artificial sequence
  SiRNA target sequence
tcttcttgtattttacatttct

SEQ ID NO: 4815 - DNA, 22 bp, Artificial sequence
  SiRNA target sequence
cttcttgtattttacatttcta

SEQ ID NO: 4816 - DNA, 22 bp, Artificial sequence
  SiRNA target sequence
ttcttgtattttacatttctaa

SEQ ID NO: 4817 - DNA, 22 bp, Artificial sequence
  SiRNA target sequence
tcttgtattttacatttctaaa

SEQ ID NO: 4818 - DNA, 22 bp, Artificial sequence
  SiRNA target sequence
cttgtattttacatttctaaaa

SEQ ID NO: 4819 - DNA, 22 bp, Artificial sequence
  SiRNA target sequence
ttgtattttacatttctaaaaa

SEQ ID NO: 4820 - DNA, 22 bp, Artificial sequence
  SiRNA target sequence
tgtattttacatttctaaaaag

SEQ ID NO: 4821 - DNA, 22 bp, Artificial sequence
  SiRNA target sequence
gtattttacatttctaaaaagg

SEQ ID NO: 4822 - DNA, 22 bp, Artificial sequence
  SiRNA target sequence
tattttacatttctaaaaagga

SEQ ID NO: 4823 - DNA, 22 bp, Artificial sequence
  SiRNA target sequence
attttacatttctaaaaaggat

SEQ ID NO: 4824 - DNA, 22 bp, Artificial sequence
  SiRNA target sequence
ttttacatttctaaaaaggatg

SEQ ID NO: 4825 - DNA, 22 bp, Artificial sequence
  SiRNA target sequence
tttacatttctaaaaaggatgt

SEQ ID NO: 4826 - DNA, 22 bp, Artificial sequence
  SiRNA target sequence
ttacatttctaaaaaggatgtt

SEQ ID NO: 4827 - DNA, 22 bp, Artificial sequence
  SiRNA target sequence
tacatttctaaaaaggatgttg

SEQ ID NO: 4828 - DNA, 22 bp, Artificial sequence
  SiRNA target sequence
acatttctaaaaaggatgttga

SEQ ID NO: 4829 - DNA, 22 bp, Artificial sequence
  SiRNA target sequence
catttctaaaaaggatgttgaa

SEQ ID NO: 4830 - DNA, 22 bp, Artificial sequence
  SiRNA target sequence
atttctaaaaaggatgttgaaa

SEQ ID NO: 4831 - DNA, 22 bp, Artificial sequence
  SiRNA target sequence
tttctaaaaaggatgttgaaaa

SEQ ID NO: 4832 - DNA, 22 bp, Artificial sequence
  SiRNA target sequence
ttctaaaaaggatgttgaaaaa

SEQ ID NO: 4833 - DNA, 22 bp, Artificial sequence
  SiRNA target sequence
tctaaaaaggatgttgaaaaag

SEQ ID NO: 4834 - DNA, 22 bp, Artificial sequence
  SiRNA target sequence
ctaaaaaggatgttgaaaaagt

SEQ ID NO: 4835 - DNA, 22 bp, Artificial sequence
  SiRNA target sequence
taaaaaggatgttgaaaaagtt

SEQ ID NO: 4836 - DNA, 22 bp, Artificial sequence
  SiRNA target sequence
aaaaaggatgttgaaaaagtta

SEQ ID NO: 4837 - DNA, 22 bp, Artificial sequence
  SiRNA target sequence
aaaaggatgttgaaaaagttaa

SEQ ID NO: 4838 - DNA, 22 bp, Artificial sequence
  SiRNA target sequence
aaaggatgttgaaaaagttaat

SEQ ID NO: 4839 - DNA, 22 bp, Artificial sequence
  SiRNA target sequence
aaggatgttgaaaaagttaatg

SEQ ID NO: 4840 - DNA, 22 bp, Artificial sequence
  SiRNA target sequence
aggatgttgaaaaagttaatga

SEQ ID NO: 4841 - DNA, 22 bp, Artificial sequence
  SiRNA target sequence
ggatgttgaaaaagttaatgaa

SEQ ID NO: 4842 - DNA, 22 bp, Artificial sequence
  SiRNA target sequence
gatgttgaaaaagttaatgaaa

SEQ ID NO: 4843 - DNA, 22 bp, Artificial sequence
  SiRNA target sequence
atgttgaaaaagttaatgaaac

SEQ ID NO: 4844 - DNA, 22 bp, Artificial sequence
  SiRNA target sequence
tgttgaaaaagttaatgaaaca

SEQ ID NO: 4845 - DNA, 22 bp, Artificial sequence
  SiRNA target sequence
gttgaaaaagttaatgaaacaa

SEQ ID NO: 4846 - DNA, 22 bp, Artificial sequence
  SiRNA target sequence
ttgaaaaagttaatgaaacaat

SEQ ID NO: 4847 - DNA, 22 bp, Artificial sequence
  SiRNA target sequence
tgaaaaagttaatgaaacaatt

SEQ ID NO: 4848 - DNA, 22 bp, Artificial sequence
  SiRNA target sequence
gaaaaagttaatgaaacaatta

SEQ ID NO: 4849 - DNA, 22 bp, Artificial sequence
  SiRNA target sequence
aaaaagttaatgaaacaattaa

SEQ ID NO: 4850 - DNA, 22 bp, Artificial sequence
  SiRNA target sequence
aaaagttaatgaaacaattaat

SEQ ID NO: 4851 - DNA, 22 bp, Artificial sequence
  SiRNA target sequence
aaagttaatgaaacaattaata

SEQ ID NO: 4852 - DNA, 22 bp, Artificial sequence
  SiRNA target sequence
aagttaatgaaacaattaataa

SEQ ID NO: 4853 - DNA, 22 bp, Artificial sequence
  SiRNA target sequence
agttaatgaaacaattaataat

SEQ ID NO: 4854 - DNA, 22 bp, Artificial sequence
  SiRNA target sequence
gttaatgaaacaattaataatt

SEQ ID NO: 4855 - DNA, 22 bp, Artificial sequence
  SiRNA target sequence
ttaatgaaacaattaataattt

SEQ ID NO: 4856 - DNA, 22 bp, Artificial sequence
  SiRNA target sequence
taatgaaacaattaataattta

SEQ ID NO: 4857 - DNA, 22 bp, Artificial sequence
  SiRNA target sequence
aatgaaacaattaataatttaa

SEQ ID NO: 4858 - DNA, 22 bp, Artificial sequence
  SiRNA target sequence
atgaaacaattaataatttaaa

SEQ ID NO: 4859 - DNA, 22 bp, Artificial sequence
  SiRNA target sequence
tgaaacaattaataatttaaaa

SEQ ID NO: 4860 - DNA, 22 bp, Artificial sequence
  SiRNA target sequence
gaaacaattaataatttaaaag

SEQ ID NO: 4861 - DNA, 22 bp, Artificial sequence
  SiRNA target sequence
aaacaattaataatttaaaaga

SEQ ID NO: 4862 - DNA, 22 bp, Artificial sequence
  SiRNA target sequence
aacaattaataatttaaaagag

SEQ ID NO: 4863 - DNA, 22 bp, Artificial sequence
  SiRNA target sequence
acaattaataatttaaaagaga

SEQ ID NO: 4864 - DNA, 22 bp, Artificial sequence
  SiRNA target sequence
caattaataatttaaaagagac

SEQ ID NO: 4865 - DNA, 22 bp, Artificial sequence
  SiRNA target sequence
aattaataatttaaaagagact

SEQ ID NO: 4866 - DNA, 22 bp, Artificial sequence
  SiRNA target sequence
attaataatttaaaagagactc

SEQ ID NO: 4867 - DNA, 22 bp, Artificial sequence
  SiRNA target sequence
ttaataatttaaaagagactct

SEQ ID NO: 4868 - DNA, 22 bp, Artificial sequence
  SiRNA target sequence
taataatttaaaagagactctt

SEQ ID NO: 4869 - DNA, 22 bp, Artificial sequence
  SiRNA target sequence
aataatttaaaagagactctta

SEQ ID NO: 4870 - DNA, 22 bp, Artificial sequence
  SiRNA target sequence
ataatttaaaagagactcttac

SEQ ID NO: 4871 - DNA, 22 bp, Artificial sequence
  SiRNA target sequence
taatttaaaagagactcttacc

SEQ ID NO: 4872 - DNA, 22 bp, Artificial sequence
  SiRNA target sequence
aatttaaaagagactcttaccc

SEQ ID NO: 4873 - DNA, 22 bp, Artificial sequence
  SiRNA target sequence
atttaaaagagactcttacccc

SEQ ID NO: 4874 - DNA, 22 bp, Artificial sequence
  SiRNA target sequence
tttaaaagagactcttaccccc

SEQ ID NO: 4875 - DNA, 22 bp, Artificial sequence
  SiRNA target sequence
ttaaaagagactcttaccccca

SEQ ID NO: 4876 - DNA, 22 bp, Artificial sequence
  SiRNA target sequence
taaaagagactcttacccccac

SEQ ID NO: 4877 - DNA, 22 bp, Artificial sequence
  SiRNA target sequence
aaaagagactcttacccccact

SEQ ID NO: 4878 - DNA, 22 bp, Artificial sequence
  SiRNA target sequence
aaagagactcttacccccactt

SEQ ID NO: 4879 - DNA, 22 bp, Artificial sequence
  SiRNA target sequence
aagagactcttacccccacttt

SEQ ID NO: 4880 - DNA, 22 bp, Artificial sequence
  SiRNA target sequence
agagactcttacccccacttta

SEQ ID NO: 4881 - DNA, 22 bp, Artificial sequence
  SiRNA target sequence
gagactcttacccccactttat

SEQ ID NO: 4882 - DNA, 22 bp, Artificial sequence
  SiRNA target sequence
agactcttacccccactttatt

SEQ ID NO: 4883 - DNA, 22 bp, Artificial sequence
  SiRNA target sequence
gactcttacccccactttattg

SEQ ID NO: 4884 - DNA, 22 bp, Artificial sequence
  SiRNA target sequence
actcttacccccactttattgg

SEQ ID NO: 4885 - DNA, 22 bp, Artificial sequence
  SiRNA target sequence
ctcttacccccactttattgga

SEQ ID NO: 4886 - DNA, 22 bp, Artificial sequence
  SiRNA target sequence
tcttacccccactttattggaa

SEQ ID NO: 4887 - DNA, 22 bp, Artificial sequence
  SiRNA target sequence
cttacccccactttattggaac

SEQ ID NO: 4888 - DNA, 22 bp, Artificial sequence
  SiRNA target sequence
ttacccccactttattggaact

SEQ ID NO: 4889 - DNA, 22 bp, Artificial sequence
  SiRNA target sequence
tacccccactttattggaactt

SEQ ID NO: 4890 - DNA, 22 bp, Artificial sequence
  SiRNA target sequence
acccccactttattggaactta

SEQ ID NO: 4891 - DNA, 22 bp, Artificial sequence
  SiRNA target sequence
cccccactttattggaacttat

SEQ ID NO: 4892 - DNA, 22 bp, Artificial sequence
  SiRNA target sequence
ccccactttattggaacttatt

SEQ ID NO: 4893 - DNA, 22 bp, Artificial sequence
  SiRNA target sequence
cccactttattggaacttattg

SEQ ID NO: 4894 - DNA, 22 bp, Artificial sequence
  SiRNA target sequence
ccactttattggaacttattgg

SEQ ID NO: 4895 - DNA, 22 bp, Artificial sequence
  SiRNA target sequence
cactttattggaacttattgga

SEQ ID NO: 4896 - DNA, 22 bp, Artificial sequence
  SiRNA target sequence
actttattggaacttattggag

SEQ ID NO: 4897 - DNA, 22 bp, Artificial sequence
  SiRNA target sequence
ctttattggaacttattggaga

SEQ ID NO: 4898 - DNA, 22 bp, Artificial sequence
  SiRNA target sequence
tttattggaacttattggagaa

SEQ ID NO: 4899 - DNA, 22 bp, Artificial sequence
  SiRNA target sequence
ttattggaacttattggagaat

SEQ ID NO: 4900 - DNA, 22 bp, Artificial sequence
  SiRNA target sequence
tattggaacttattggagaata

SEQ ID NO: 4901 - DNA, 22 bp, Artificial sequence
  SiRNA target sequence
attggaacttattggagaatat

SEQ ID NO: 4902 - DNA, 22 bp, Artificial sequence
  SiRNA target sequence
ttggaacttattggagaatatt

SEQ ID NO: 4903 - DNA, 22 bp, Artificial sequence
  SiRNA target sequence
tggaacttattggagaatatta

SEQ ID NO: 4904 - DNA, 22 bp, Artificial sequence
  SiRNA target sequence
ggaacttattggagaatattat

SEQ ID NO: 4905 - DNA, 22 bp, Artificial sequence
  SiRNA target sequence
gaacttattggagaatattatt

SEQ ID NO: 4906 - DNA, 22 bp, Artificial sequence
  SiRNA target sequence
aacttattggagaatattattt

SEQ ID NO: 4907 - DNA, 22 bp, Artificial sequence
  SiRNA target sequence
acttattggagaatattattta

SEQ ID NO: 4908 - DNA, 22 bp, Artificial sequence
  SiRNA target sequence
cttattggagaatattatttaa

SEQ ID NO: 4909 - DNA, 22 bp, Artificial sequence
  SiRNA target sequence
ttattggagaatattatttaaa

SEQ ID NO: 4910 - DNA, 22 bp, Artificial sequence
  SiRNA target sequence
tattggagaatattatttaaaa

SEQ ID NO: 4911 - DNA, 22 bp, Artificial sequence
  SiRNA target sequence
attggagaatattatttaaaaa

SEQ ID NO: 4912 - DNA, 22 bp, Artificial sequence
  SiRNA target sequence
ttggagaatattatttaaaaag

SEQ ID NO: 4913 - DNA, 22 bp, Artificial sequence
  SiRNA target sequence
tggagaatattatttaaaaagt

SEQ ID NO: 4914 - DNA, 22 bp, Artificial sequence
  SiRNA target sequence
ggagaatattatttaaaaagtg

SEQ ID NO: 4915 - DNA, 22 bp, Artificial sequence
  SiRNA target sequence
gagaatattatttaaaaagtgg

SEQ ID NO: 4916 - DNA, 22 bp, Artificial sequence
  SiRNA target sequence
agaatattatttaaaaagtgga

SEQ ID NO: 4917 - DNA, 22 bp, Artificial sequence
  SiRNA target sequence
gaatattatttaaaaagtggaa

SEQ ID NO: 4918 - DNA, 22 bp, Artificial sequence
  SiRNA target sequence
aatattatttaaaaagtggaaa

SEQ ID NO: 4919 - DNA, 22 bp, Artificial sequence
  SiRNA target sequence
atattatttaaaaagtggaaat

SEQ ID NO: 4920 - DNA, 22 bp, Artificial sequence
  SiRNA target sequence
tattatttaaaaagtggaaatc

SEQ ID NO: 4921 - DNA, 22 bp, Artificial sequence
  SiRNA target sequence
attatttaaaaagtggaaatca

SEQ ID NO: 4922 - DNA, 22 bp, Artificial sequence
  SiRNA target sequence
ttatttaaaaagtggaaatcac

SEQ ID NO: 4923 - DNA, 22 bp, Artificial sequence
  SiRNA target sequence
tatttaaaaagtggaaatcact

SEQ ID NO: 4924 - DNA, 22 bp, Artificial sequence
  SiRNA target sequence
atttaaaaagtggaaatcactc

SEQ ID NO: 4925 - DNA, 22 bp, Artificial sequence
  SiRNA target sequence
tttaaaaagtggaaatcactct

SEQ ID NO: 4926 - DNA, 22 bp, Artificial sequence
  SiRNA target sequence
ttaaaaagtggaaatcactcta

SEQ ID NO: 4927 - DNA, 22 bp, Artificial sequence
  SiRNA target sequence
taaaaagtggaaatcactctaa

SEQ ID NO: 4928 - DNA, 22 bp, Artificial sequence
  SiRNA target sequence
aaaaagtggaaatcactctaaa

SEQ ID NO: 4929 - DNA, 22 bp, Artificial sequence
  SiRNA target sequence
aaaagtggaaatcactctaaaa

SEQ ID NO: 4930 - DNA, 22 bp, Artificial sequence
  SiRNA target sequence
aaagtggaaatcactctaaaat

SEQ ID NO: 4931 - DNA, 22 bp, Artificial sequence
  SiRNA target sequence
aagtggaaatcactctaaaatg

SEQ ID NO: 4932 - DNA, 22 bp, Artificial sequence
  SiRNA target sequence
agtggaaatcactctaaaatgt

SEQ ID NO: 4933 - DNA, 22 bp, Artificial sequence
  SiRNA target sequence
gtggaaatcactctaaaatgtt

SEQ ID NO: 4934 - DNA, 22 bp, Artificial sequence
  SiRNA target sequence
tggaaatcactctaaaatgtta

SEQ ID NO: 4935 - DNA, 22 bp, Artificial sequence
  SiRNA target sequence
ggaaatcactctaaaatgttag

SEQ ID NO: 4936 - DNA, 22 bp, Artificial sequence
  SiRNA target sequence
gaaatcactctaaaatgttaga

SEQ ID NO: 4937 - DNA, 22 bp, Artificial sequence
  SiRNA target sequence
aaatcactctaaaatgttagat

SEQ ID NO: 4938 - DNA, 22 bp, Artificial sequence
  SiRNA target sequence
aatcactctaaaatgttagatc

SEQ ID NO: 4939 - DNA, 22 bp, Artificial sequence
  SiRNA target sequence
atcactctaaaatgttagatct

SEQ ID NO: 4940 - DNA, 22 bp, Artificial sequence
  SiRNA target sequence
tcactctaaaatgttagatcta

SEQ ID NO: 4941 - DNA, 22 bp, Artificial sequence
  SiRNA target sequence
cactctaaaatgttagatctat

SEQ ID NO: 4942 - DNA, 22 bp, Artificial sequence
  SiRNA target sequence
actctaaaatgttagatctatt

SEQ ID NO: 4943 - DNA, 22 bp, Artificial sequence
  SiRNA target sequence
ctctaaaatgttagatctatta

SEQ ID NO: 4944 - DNA, 22 bp, Artificial sequence
  SiRNA target sequence
tctaaaatgttagatctattat

SEQ ID NO: 4945 - DNA, 22 bp, Artificial sequence
  SiRNA target sequence
ctaaaatgttagatctattatc

SEQ ID NO: 4946 - DNA, 22 bp, Artificial sequence
  SiRNA target sequence
taaaatgttagatctattatct

SEQ ID NO: 4947 - DNA, 22 bp, Artificial sequence
  SiRNA target sequence
aaaatgttagatctattatcta

SEQ ID NO: 4948 - DNA, 22 bp, Artificial sequence
  SiRNA target sequence
aaatgttagatctattatctag

SEQ ID NO: 4949 - DNA, 22 bp, Artificial sequence
  SiRNA target sequence
aatgttagatctattatctagt

SEQ ID NO: 4950 - DNA, 22 bp, Artificial sequence
  SiRNA target sequence
atgttagatctattatctagtc

SEQ ID NO: 4951 - DNA, 22 bp, Artificial sequence
  SiRNA target sequence
tgttagatctattatctagtca

SEQ ID NO: 4952 - DNA, 22 bp, Artificial sequence
  SiRNA target sequence
gttagatctattatctagtcat

SEQ ID NO: 4953 - DNA, 22 bp, Artificial sequence
  SiRNA target sequence
ttagatctattatctagtcatc

SEQ ID NO: 4954 - DNA, 22 bp, Artificial sequence
  SiRNA target sequence
tagatctattatctagtcatcc

SEQ ID NO: 4955 - DNA, 22 bp, Artificial sequence
  SiRNA target sequence
agatctattatctagtcatcca

SEQ ID NO: 4956 - DNA, 22 bp, Artificial sequence
  SiRNA target sequence
gatctattatctagtcatccag

SEQ ID NO: 4957 - DNA, 22 bp, Artificial sequence
  SiRNA target sequence
atctattatctagtcatccaga

SEQ ID NO: 4958 - DNA, 22 bp, Artificial sequence
  SiRNA target sequence
tctattatctagtcatccagat

SEQ ID NO: 4959 - DNA, 22 bp, Artificial sequence
  SiRNA target sequence
ctattatctagtcatccagata

SEQ ID NO: 4960 - DNA, 22 bp, Artificial sequence
  SiRNA target sequence
tattatctagtcatccagatac

SEQ ID NO: 4961 - DNA, 22 bp, Artificial sequence
  SiRNA target sequence
attatctagtcatccagatact

SEQ ID NO: 4962 - DNA, 22 bp, Artificial sequence
  SiRNA target sequence
ttatctagtcatccagatactc

SEQ ID NO: 4963 - DNA, 22 bp, Artificial sequence
  SiRNA target sequence
tatctagtcatccagatactcc

SEQ ID NO: 4964 - DNA, 22 bp, Artificial sequence
  SiRNA target sequence
atctagtcatccagatactcct

SEQ ID NO: 4965 - DNA, 22 bp, Artificial sequence
  SiRNA target sequence
tctagtcatccagatactcctg

SEQ ID NO: 4966 - DNA, 22 bp, Artificial sequence
  SiRNA target sequence
ctagtcatccagatactcctgg

SEQ ID NO: 4967 - DNA, 22 bp, Artificial sequence
  SiRNA target sequence
tagtcatccagatactcctggt

SEQ ID NO: 4968 - DNA, 22 bp, Artificial sequence
  SiRNA target sequence
agtcatccagatactcctggta

SEQ ID NO: 4969 - DNA, 22 bp, Artificial sequence
  SiRNA target sequence
gtcatccagatactcctggtaa

SEQ ID NO: 4970 - DNA, 22 bp, Artificial sequence
  SiRNA target sequence
tcatccagatactcctggtaaa

SEQ ID NO: 4971 - DNA, 22 bp, Artificial sequence
  SiRNA target sequence
catccagatactcctggtaaat

SEQ ID NO: 4972 - DNA, 22 bp, Artificial sequence
  SiRNA target sequence
atccagatactcctggtaaatt

SEQ ID NO: 4973 - DNA, 22 bp, Artificial sequence
  SiRNA target sequence
tccagatactcctggtaaatta

SEQ ID NO: 4974 - DNA, 22 bp, Artificial sequence
  SiRNA target sequence
ccagatactcctggtaaattac

SEQ ID NO: 4975 - DNA, 22 bp, Artificial sequence
  SiRNA target sequence
cagatactcctggtaaattact

SEQ ID NO: 4976 - DNA, 22 bp, Artificial sequence
  SiRNA target sequence
agatactcctggtaaattactt

SEQ ID NO: 4977 - DNA, 22 bp, Artificial sequence
  SiRNA target sequence
gatactcctggtaaattacttt

SEQ ID NO: 4978 - DNA, 22 bp, Artificial sequence
  SiRNA target sequence
atactcctggtaaattactttt

SEQ ID NO: 4979 - DNA, 22 bp, Artificial sequence
  SiRNA target sequence
tactcctggtaaattactttta

SEQ ID NO: 4980 - DNA, 22 bp, Artificial sequence
  SiRNA target sequence
actcctggtaaattacttttaa

SEQ ID NO: 4981 - DNA, 22 bp, Artificial sequence
  SiRNA target sequence
ctcctggtaaattacttttaac

SEQ ID NO: 4982 - DNA, 22 bp, Artificial sequence
  SiRNA target sequence
tcctggtaaattacttttaacg

SEQ ID NO: 4983 - DNA, 22 bp, Artificial sequence
  SiRNA target sequence
cctggtaaattacttttaacgg

SEQ ID NO: 4984 - DNA, 22 bp, Artificial sequence
  SiRNA target sequence
ctggtaaattacttttaacggc

SEQ ID NO: 4985 - DNA, 22 bp, Artificial sequence
  SiRNA target sequence
tggtaaattacttttaacggca

SEQ ID NO: 4986 - DNA, 22 bp, Artificial sequence
  SiRNA target sequence
ggtaaattacttttaacggcac

SEQ ID NO: 4987 - DNA, 22 bp, Artificial sequence
  SiRNA target sequence
gtaaattacttttaacggcact

SEQ ID NO: 4988 - DNA, 22 bp, Artificial sequence
  SiRNA target sequence
taaattacttttaacggcactt

SEQ ID NO: 4989 - DNA, 22 bp, Artificial sequence
  SiRNA target sequence
aaattacttttaacggcacttt

SEQ ID NO: 4990 - DNA, 22 bp, Artificial sequence
  SiRNA target sequence
aattacttttaacggcacttta

SEQ ID NO: 4991 - DNA, 22 bp, Artificial sequence
  SiRNA target sequence
attacttttaacggcactttat

SEQ ID NO: 4992 - DNA, 22 bp, Artificial sequence
  SiRNA target sequence
ttacttttaacggcactttatg

SEQ ID NO: 4993 - DNA, 22 bp, Artificial sequence
  SiRNA target sequence
tacttttaacggcactttatgc

SEQ ID NO: 4994 - DNA, 22 bp, Artificial sequence
  SiRNA target sequence
acttttaacggcactttatgca

SEQ ID NO: 4995 - DNA, 22 bp, Artificial sequence
  SiRNA target sequence
cttttaacggcactttatgcaa

SEQ ID NO: 4996 - DNA, 22 bp, Artificial sequence
  SiRNA target sequence
ttttaacggcactttatgcaat

SEQ ID NO: 4997 - DNA, 22 bp, Artificial sequence
  SiRNA target sequence
tttaacggcactttatgcaata

SEQ ID NO: 4998 - DNA, 22 bp, Artificial sequence
  SiRNA target sequence
ttaacggcactttatgcaataa

SEQ ID NO: 4999 - DNA, 22 bp, Artificial sequence
  SiRNA target sequence
taacggcactttatgcaataag

SEQ ID NO: 5000 - DNA, 22 bp, Artificial sequence
  SiRNA target sequence
aacggcactttatgcaataagt

SEQ ID NO: 5001 - DNA, 22 bp, Artificial sequence
  SiRNA target sequence
acggcactttatgcaataagta

SEQ ID NO: 5002 - DNA, 22 bp, Artificial sequence
  SiRNA target sequence
cggcactttatgcaataagtat

SEQ ID NO: 5003 - DNA, 22 bp, Artificial sequence
  SiRNA target sequence
ggcactttatgcaataagtatt

SEQ ID NO: 5004 - DNA, 22 bp, Artificial sequence
  SiRNA target sequence
gcactttatgcaataagtattg

SEQ ID NO: 5005 - DNA, 22 bp, Artificial sequence
  SiRNA target sequence
cactttatgcaataagtattga

SEQ ID NO: 5006 - DNA, 22 bp, Artificial sequence
  SiRNA target sequence
actttatgcaataagtattgat

SEQ ID NO: 5007 - DNA, 22 bp, Artificial sequence
  SiRNA target sequence
ctttatgcaataagtattgata

SEQ ID NO: 5008 - DNA, 22 bp, Artificial sequence
  SiRNA target sequence
tttatgcaataagtattgataa

SEQ ID NO: 5009 - DNA, 22 bp, Artificial sequence
  SiRNA target sequence
ttatgcaataagtattgataag

SEQ ID NO: 5010 - DNA, 22 bp, Artificial sequence
  SiRNA target sequence
tatgcaataagtattgataaga

SEQ ID NO: 5011 - DNA, 22 bp, Artificial sequence
  SiRNA target sequence
atgcaataagtattgataagaa

SEQ ID NO: 5012 - DNA, 22 bp, Artificial sequence
  SiRNA target sequence
tgcaataagtattgataagaaa

SEQ ID NO: 5013 - DNA, 22 bp, Artificial sequence
  SiRNA target sequence
gcaataagtattgataagaaaa

SEQ ID NO: 5014 - DNA, 22 bp, Artificial sequence
  SiRNA target sequence
caataagtattgataagaaaaa

SEQ ID NO: 5015 - DNA, 22 bp, Artificial sequence
  SiRNA target sequence
aataagtattgataagaaaaag

SEQ ID NO: 5016 - DNA, 22 bp, Artificial sequence
  SiRNA target sequence
ataagtattgataagaaaaagg

SEQ ID NO: 5017 - DNA, 22 bp, Artificial sequence
  SiRNA target sequence
taagtattgataagaaaaagga

SEQ ID NO: 5018 - DNA, 22 bp, Artificial sequence
  SiRNA target sequence
aagtattgataagaaaaaggat

SEQ ID NO: 5019 - DNA, 22 bp, Artificial sequence
  SiRNA target sequence
agtattgataagaaaaaggatg

SEQ ID NO: 5020 - DNA, 22 bp, Artificial sequence
  SiRNA target sequence
gtattgataagaaaaaggatgc

SEQ ID NO: 5021 - DNA, 22 bp, Artificial sequence
  SiRNA target sequence
tattgataagaaaaaggatgct

SEQ ID NO: 5022 - DNA, 22 bp, Artificial sequence
  SiRNA target sequence
attgataagaaaaaggatgcta

SEQ ID NO: 5023 - DNA, 22 bp, Artificial sequence
  SiRNA target sequence
ttgataagaaaaaggatgctat

SEQ ID NO: 5024 - DNA, 22 bp, Artificial sequence
  SiRNA target sequence
tgataagaaaaaggatgctata

SEQ ID NO: 5025 - DNA, 22 bp, Artificial sequence
  SiRNA target sequence
gataagaaaaaggatgctatag

SEQ ID NO: 5026 - DNA, 22 bp, Artificial sequence
  SiRNA target sequence
ataagaaaaaggatgctataga

SEQ ID NO: 5027 - DNA, 22 bp, Artificial sequence
  SiRNA target sequence
taagaaaaaggatgctatagaa

SEQ ID NO: 5028 - DNA, 22 bp, Artificial sequence
  SiRNA target sequence
aagaaaaaggatgctatagaaa

SEQ ID NO: 5029 - DNA, 22 bp, Artificial sequence
  SiRNA target sequence
agaaaaaggatgctatagaaat

SEQ ID NO: 5030 - DNA, 22 bp, Artificial sequence
  SiRNA target sequence
gaaaaaggatgctatagaaatt

SEQ ID NO: 5031 - DNA, 22 bp, Artificial sequence
  SiRNA target sequence
aaaaaggatgctatagaaattt

SEQ ID NO: 5032 - DNA, 22 bp, Artificial sequence
  SiRNA target sequence
aaaaggatgctatagaaatttt

SEQ ID NO: 5033 - DNA, 22 bp, Artificial sequence
  SiRNA target sequence
aaaggatgctatagaaatttta

SEQ ID NO: 5034 - DNA, 22 bp, Artificial sequence
  SiRNA target sequence
aaggatgctatagaaattttat

SEQ ID NO: 5035 - DNA, 22 bp, Artificial sequence
  SiRNA target sequence
aggatgctatagaaattttata

SEQ ID NO: 5036 - DNA, 22 bp, Artificial sequence
  SiRNA target sequence
ggatgctatagaaattttatat

SEQ ID NO: 5037 - DNA, 22 bp, Artificial sequence
  SiRNA target sequence
gatgctatagaaattttatata

SEQ ID NO: 5038 - DNA, 22 bp, Artificial sequence
  SiRNA target sequence
atgctatagaaattttatatag

SEQ ID NO: 5039 - DNA, 22 bp, Artificial sequence
  SiRNA target sequence
tgctatagaaattttatataga

SEQ ID NO: 5040 - DNA, 22 bp, Artificial sequence
  SiRNA target sequence
gctatagaaattttatatagaa

SEQ ID NO: 5041 - DNA, 22 bp, Artificial sequence
  SiRNA target sequence
ctatagaaattttatatagaag

SEQ ID NO: 5042 - DNA, 22 bp, Artificial sequence
  SiRNA target sequence
tatagaaattttatatagaagt

SEQ ID NO: 5043 - DNA, 22 bp, Artificial sequence
  SiRNA target sequence
atagaaattttatatagaagta

SEQ ID NO: 5044 - DNA, 22 bp, Artificial sequence
  SiRNA target sequence
tagaaattttatatagaagtat

SEQ ID NO: 5045 - DNA, 22 bp, Artificial sequence
  SiRNA target sequence
agaaattttatatagaagtata

SEQ ID NO: 5046 - DNA, 22 bp, Artificial sequence
  SiRNA target sequence
gaaattttatatagaagtatat

SEQ ID NO: 5047 - DNA, 22 bp, Artificial sequence
  SiRNA target sequence
aaattttatatagaagtatatc

SEQ ID NO: 5048 - DNA, 22 bp, Artificial sequence
  SiRNA target sequence
aattttatatagaagtatatca

SEQ ID NO: 5049 - DNA, 22 bp, Artificial sequence
  SiRNA target sequence
attttatatagaagtatatcag

SEQ ID NO: 5050 - DNA, 22 bp, Artificial sequence
  SiRNA target sequence
ttttatatagaagtatatcaga

SEQ ID NO: 5051 - DNA, 22 bp, Artificial sequence
  SiRNA target sequence
tttatatagaagtatatcagaa

SEQ ID NO: 5052 - DNA, 22 bp, Artificial sequence
  SiRNA target sequence
ttatatagaagtatatcagaat

SEQ ID NO: 5053 - DNA, 22 bp, Artificial sequence
  SiRNA target sequence
tatatagaagtatatcagaata

SEQ ID NO: 5054 - DNA, 22 bp, Artificial sequence
  SiRNA target sequence
atatagaagtatatcagaatat

SEQ ID NO: 5055 - DNA, 22 bp, Artificial sequence
  SiRNA target sequence
tatagaagtatatcagaatatt

SEQ ID NO: 5056 - DNA, 22 bp, Artificial sequence
  SiRNA target sequence
atagaagtatatcagaatattc

SEQ ID NO: 5057 - DNA, 22 bp, Artificial sequence
  SiRNA target sequence
tagaagtatatcagaatattca

SEQ ID NO: 5058 - DNA, 22 bp, Artificial sequence
  SiRNA target sequence
agaagtatatcagaatattcat

SEQ ID NO: 5059 - DNA, 22 bp, Artificial sequence
  SiRNA target sequence
gaagtatatcagaatattcatc

SEQ ID NO: 5060 - DNA, 22 bp, Artificial sequence
  SiRNA target sequence
aagtatatcagaatattcatct

SEQ ID NO: 5061 - DNA, 22 bp, Artificial sequence
  SiRNA target sequence
agtatatcagaatattcatctt

SEQ ID NO: 5062 - DNA, 22 bp, Artificial sequence
  SiRNA target sequence
gtatatcagaatattcatctta

SEQ ID NO: 5063 - DNA, 22 bp, Artificial sequence
  SiRNA target sequence
tatatcagaatattcatcttat

SEQ ID NO: 5064 - DNA, 22 bp, Artificial sequence
  SiRNA target sequence
atatcagaatattcatcttatt

SEQ ID NO: 5065 - DNA, 22 bp, Artificial sequence
  SiRNA target sequence
tatcagaatattcatcttattt

SEQ ID NO: 5066 - DNA, 22 bp, Artificial sequence
  SiRNA target sequence
atcagaatattcatcttatttt

SEQ ID NO: 5067 - DNA, 22 bp, Artificial sequence
  SiRNA target sequence
tcagaatattcatcttatttta

SEQ ID NO: 5068 - DNA, 22 bp, Artificial sequence
  SiRNA target sequence
cagaatattcatcttattttaa

SEQ ID NO: 5069 - DNA, 22 bp, Artificial sequence
  SiRNA target sequence
agaatattcatcttattttaaa

SEQ ID NO: 5070 - DNA, 22 bp, Artificial sequence
  SiRNA target sequence
gaatattcatcttattttaaat

SEQ ID NO: 5071 - DNA, 22 bp, Artificial sequence
  SiRNA target sequence
aatattcatcttattttaaatc

SEQ ID NO: 5072 - DNA, 22 bp, Artificial sequence
  SiRNA target sequence
atattcatcttattttaaatct

SEQ ID NO: 5073 - DNA, 22 bp, Artificial sequence
  SiRNA target sequence
tattcatcttattttaaatctt

SEQ ID NO: 5074 - DNA, 22 bp, Artificial sequence
  SiRNA target sequence
attcatcttattttaaatctta

SEQ ID NO: 5075 - DNA, 22 bp, Artificial sequence
  SiRNA target sequence
ttcatcttattttaaatcttat

SEQ ID NO: 5076 - DNA, 22 bp, Artificial sequence
  SiRNA target sequence
tcatcttattttaaatcttatt

SEQ ID NO: 5077 - DNA, 22 bp, Artificial sequence
  SiRNA target sequence
catcttattttaaatcttattt

SEQ ID NO: 5078 - DNA, 22 bp, Artificial sequence
  SiRNA target sequence
atcttattttaaatcttatttg

SEQ ID NO: 5079 - DNA, 22 bp, Artificial sequence
  SiRNA target sequence
tcttattttaaatcttatttgt

SEQ ID NO: 5080 - DNA, 22 bp, Artificial sequence
  SiRNA target sequence
cttattttaaatcttatttgta

SEQ ID NO: 5081 - DNA, 22 bp, Artificial sequence
  SiRNA target sequence
ttattttaaatcttatttgtat

SEQ ID NO: 5082 - DNA, 22 bp, Artificial sequence
  SiRNA target sequence
tattttaaatcttatttgtatt

SEQ ID NO: 5083 - DNA, 22 bp, Artificial sequence
  SiRNA target sequence
attttaaatcttatttgtattt

SEQ ID NO: 5084 - DNA, 22 bp, Artificial sequence
  SiRNA target sequence
ttttaaatcttatttgtattta

SEQ ID NO: 5085 - DNA, 22 bp, Artificial sequence
  SiRNA target sequence
tttaaatcttatttgtatttag

SEQ ID NO: 5086 - DNA, 22 bp, Artificial sequence
  SiRNA target sequence
ttaaatcttatttgtatttagg

SEQ ID NO: 5087 - DNA, 22 bp, Artificial sequence
  SiRNA target sequence
taaatcttatttgtatttagga

SEQ ID NO: 5088 - DNA, 22 bp, Artificial sequence
  SiRNA target sequence
aaatcttatttgtatttaggaa

SEQ ID NO: 5089 - DNA, 22 bp, Artificial sequence
  SiRNA target sequence
aatcttatttgtatttaggaaa

SEQ ID NO: 5090 - DNA, 22 bp, Artificial sequence
  SiRNA target sequence
atcttatttgtatttaggaaat

SEQ ID NO: 5091 - DNA, 22 bp, Artificial sequence
  SiRNA target sequence
tcttatttgtatttaggaaata

SEQ ID NO: 5092 - DNA, 22 bp, Artificial sequence
  SiRNA target sequence
cttatttgtatttaggaaatat

SEQ ID NO: 5093 - DNA, 22 bp, Artificial sequence
  SiRNA target sequence
ttatttgtatttaggaaatatt

SEQ ID NO: 5094 - DNA, 22 bp, Artificial sequence
  SiRNA target sequence
tatttgtatttaggaaatattt

SEQ ID NO: 5095 - DNA, 22 bp, Artificial sequence
  SiRNA target sequence
atttgtatttaggaaatatttt

SEQ ID NO: 5096 - DNA, 22 bp, Artificial sequence
  SiRNA target sequence
tttgtatttaggaaatatttta

SEQ ID NO: 5097 - DNA, 22 bp, Artificial sequence
  SiRNA target sequence
ttgtatttaggaaatattttaa

SEQ ID NO: 5098 - DNA, 22 bp, Artificial sequence
  SiRNA target sequence
tgtatttaggaaatattttaat

SEQ ID NO: 5099 - DNA, 22 bp, Artificial sequence
  SiRNA target sequence
gtatttaggaaatattttaata

SEQ ID NO: 5100 - DNA, 22 bp, Artificial sequence
  SiRNA target sequence
tatttaggaaatattttaataa

SEQ ID NO: 5101 - DNA, 22 bp, Artificial sequence
  SiRNA target sequence
atttaggaaatattttaataaa

SEQ ID NO: 5102 - DNA, 22 bp, Artificial sequence
  SiRNA target sequence
tttaggaaatattttaataaat

SEQ ID NO: 5103 - DNA, 22 bp, Artificial sequence
  SiRNA target sequence
ttaggaaatattttaataaatg

SEQ ID NO: 5104 - DNA, 22 bp, Artificial sequence
  SiRNA target sequence
taggaaatattttaataaatga

SEQ ID NO: 5105 - DNA, 22 bp, Artificial sequence
  SiRNA target sequence
aggaaatattttaataaatgat

SEQ ID NO: 5106 - DNA, 22 bp, Artificial sequence
  SiRNA target sequence
ggaaatattttaataaatgatg

SEQ ID NO: 5107 - DNA, 22 bp, Artificial sequence
  SiRNA target sequence
gaaatattttaataaatgatga

SEQ ID NO: 5108 - DNA, 22 bp, Artificial sequence
  SiRNA target sequence
aaatattttaataaatgatgac

SEQ ID NO: 5109 - DNA, 22 bp, Artificial sequence
  SiRNA target sequence
aatattttaataaatgatgact

SEQ ID NO: 5110 - DNA, 22 bp, Artificial sequence
  SiRNA target sequence
atattttaataaatgatgactt

SEQ ID NO: 5111 - DNA, 22 bp, Artificial sequence
  SiRNA target sequence
tattttaataaatgatgactta

SEQ ID NO: 5112 - DNA, 22 bp, Artificial sequence
  SiRNA target sequence
attttaataaatgatgacttaa

SEQ ID NO: 5113 - DNA, 22 bp, Artificial sequence
  SiRNA target sequence
ttttaataaatgatgacttaaa

SEQ ID NO: 5114 - DNA, 22 bp, Artificial sequence
  SiRNA target sequence
tttaataaatgatgacttaaat

SEQ ID NO: 5115 - DNA, 22 bp, Artificial sequence
  SiRNA target sequence
ttaataaatgatgacttaaatg

SEQ ID NO: 5116 - DNA, 22 bp, Artificial sequence
  SiRNA target sequence
taataaatgatgacttaaatga

SEQ ID NO: 5117 - DNA, 22 bp, Artificial sequence
  SiRNA target sequence
aataaatgatgacttaaatgaa

SEQ ID NO: 5118 - DNA, 22 bp, Artificial sequence
  SiRNA target sequence
ataaatgatgacttaaatgaat

SEQ ID NO: 5119 - DNA, 22 bp, Artificial sequence
  SiRNA target sequence
taaatgatgacttaaatgaatg

SEQ ID NO: 5120 - DNA, 22 bp, Artificial sequence
  SiRNA target sequence
aaatgatgacttaaatgaatgc

SEQ ID NO: 5121 - DNA, 22 bp, Artificial sequence
  SiRNA target sequence
aatgatgacttaaatgaatgca

SEQ ID NO: 5122 - DNA, 22 bp, Artificial sequence
  SiRNA target sequence
atgatgacttaaatgaatgcag

SEQ ID NO: 5123 - DNA, 22 bp, Artificial sequence
  SiRNA target sequence
tgatgacttaaatgaatgcagg

SEQ ID NO: 5124 - DNA, 22 bp, Artificial sequence
  SiRNA target sequence
gatgacttaaatgaatgcagga

SEQ ID NO: 5125 - DNA, 22 bp, Artificial sequence
  SiRNA target sequence
atgacttaaatgaatgcaggaa

SEQ ID NO: 5126 - DNA, 22 bp, Artificial sequence
  SiRNA target sequence
tgacttaaatgaatgcaggaaa

SEQ ID NO: 5127 - DNA, 22 bp, Artificial sequence
  SiRNA target sequence
gacttaaatgaatgcaggaaat

SEQ ID NO: 5128 - DNA, 22 bp, Artificial sequence
  SiRNA target sequence
acttaaatgaatgcaggaaatt

SEQ ID NO: 5129 - DNA, 22 bp, Artificial sequence
  SiRNA target sequence
cttaaatgaatgcaggaaattg

SEQ ID NO: 5130 - DNA, 22 bp, Artificial sequence
  SiRNA target sequence
ttaaatgaatgcaggaaattgt

SEQ ID NO: 5131 - DNA, 22 bp, Artificial sequence
  SiRNA target sequence
taaatgaatgcaggaaattgtt

SEQ ID NO: 5132 - DNA, 22 bp, Artificial sequence
  SiRNA target sequence
aaatgaatgcaggaaattgttt

SEQ ID NO: 5133 - DNA, 22 bp, Artificial sequence
  SiRNA target sequence
aatgaatgcaggaaattgttta

SEQ ID NO: 5134 - DNA, 22 bp, Artificial sequence
  SiRNA target sequence
atgaatgcaggaaattgtttaa

SEQ ID NO: 5135 - DNA, 22 bp, Artificial sequence
  SiRNA target sequence
tgaatgcaggaaattgtttaat

SEQ ID NO: 5136 - DNA, 22 bp, Artificial sequence
  SiRNA target sequence
gaatgcaggaaattgtttaata

SEQ ID NO: 5137 - DNA, 22 bp, Artificial sequence
  SiRNA target sequence
aatgcaggaaattgtttaatac

SEQ ID NO: 5138 - DNA, 22 bp, Artificial sequence
  SiRNA target sequence
atgcaggaaattgtttaataca

SEQ ID NO: 5139 - DNA, 22 bp, Artificial sequence
  SiRNA target sequence
tgcaggaaattgtttaatacat

SEQ ID NO: 5140 - DNA, 22 bp, Artificial sequence
  SiRNA target sequence
gcaggaaattgtttaatacatc

SEQ ID NO: 5141 - DNA, 22 bp, Artificial sequence
  SiRNA target sequence
caggaaattgtttaatacatca

SEQ ID NO: 5142 - DNA, 22 bp, Artificial sequence
  SiRNA target sequence
aggaaattgtttaatacatcac

SEQ ID NO: 5143 - DNA, 22 bp, Artificial sequence
  SiRNA target sequence
ggaaattgtttaatacatcact

SEQ ID NO: 5144 - DNA, 22 bp, Artificial sequence
  SiRNA target sequence
gaaattgtttaatacatcactt

SEQ ID NO: 5145 - DNA, 22 bp, Artificial sequence
  SiRNA target sequence
aaattgtttaatacatcacttc

SEQ ID NO: 5146 - DNA, 22 bp, Artificial sequence
  SiRNA target sequence
aattgtttaatacatcacttca

SEQ ID NO: 5147 - DNA, 22 bp, Artificial sequence
  SiRNA target sequence
attgtttaatacatcacttcaa

SEQ ID NO: 5148 - DNA, 22 bp, Artificial sequence
  SiRNA target sequence
ttgtttaatacatcacttcaat

SEQ ID NO: 5149 - DNA, 22 bp, Artificial sequence
  SiRNA target sequence
tgtttaatacatcacttcaata

SEQ ID NO: 5150 - DNA, 22 bp, Artificial sequence
  SiRNA target sequence
gtttaatacatcacttcaatat

SEQ ID NO: 5151 - DNA, 22 bp, Artificial sequence
  SiRNA target sequence
tttaatacatcacttcaatatt

SEQ ID NO: 5152 - DNA, 22 bp, Artificial sequence
  SiRNA target sequence
ttaatacatcacttcaatattg

SEQ ID NO: 5153 - DNA, 22 bp, Artificial sequence
  SiRNA target sequence
taatacatcacttcaatattgt

SEQ ID NO: 5154 - DNA, 22 bp, Artificial sequence
  SiRNA target sequence
aatacatcacttcaatattgtt

SEQ ID NO: 5155 - DNA, 22 bp, Artificial sequence
  SiRNA target sequence
atacatcacttcaatattgttg

SEQ ID NO: 5156 - DNA, 22 bp, Artificial sequence
  SiRNA target sequence
tacatcacttcaatattgttgt

SEQ ID NO: 5157 - DNA, 22 bp, Artificial sequence
  SiRNA target sequence
acatcacttcaatattgttgta

SEQ ID NO: 5158 - DNA, 22 bp, Artificial sequence
  SiRNA target sequence
catcacttcaatattgttgtaa

SEQ ID NO: 5159 - DNA, 22 bp, Artificial sequence
  SiRNA target sequence
atcacttcaatattgttgtaat

SEQ ID NO: 5160 - DNA, 22 bp, Artificial sequence
  SiRNA target sequence
tcacttcaatattgttgtaatt

SEQ ID NO: 5161 - DNA, 22 bp, Artificial sequence
  SiRNA target sequence
cacttcaatattgttgtaattc

SEQ ID NO: 5162 - DNA, 22 bp, Artificial sequence
  SiRNA target sequence
acttcaatattgttgtaattct

SEQ ID NO: 5163 - DNA, 22 bp, Artificial sequence
  SiRNA target sequence
cttcaatattgttgtaattctg

SEQ ID NO: 5164 - DNA, 22 bp, Artificial sequence
  SiRNA target sequence
ttcaatattgttgtaattctga

SEQ ID NO: 5165 - DNA, 22 bp, Artificial sequence
  SiRNA target sequence
tcaatattgttgtaattctgat

SEQ ID NO: 5166 - DNA, 22 bp, Artificial sequence
  SiRNA target sequence
caatattgttgtaattctgatg

SEQ ID NO: 5167 - DNA, 22 bp, Artificial sequence
  SiRNA target sequence
aatattgttgtaattctgatga

SEQ ID NO: 5168 - DNA, 22 bp, Artificial sequence
  SiRNA target sequence
atattgttgtaattctgatgag

SEQ ID NO: 5169 - DNA, 22 bp, Artificial sequence
  SiRNA target sequence
tattgttgtaattctgatgagg

SEQ ID NO: 5170 - DNA, 22 bp, Artificial sequence
  SiRNA target sequence
attgttgtaattctgatgaggt

SEQ ID NO: 5171 - DNA, 22 bp, Artificial sequence
  SiRNA target sequence
ttgttgtaattctgatgaggtt

SEQ ID NO: 5172 - DNA, 22 bp, Artificial sequence
  SiRNA target sequence
tgttgtaattctgatgaggttt

SEQ ID NO: 5173 - DNA, 22 bp, Artificial sequence
  SiRNA target sequence
gttgtaattctgatgaggtttt

SEQ ID NO: 5174 - DNA, 22 bp, Artificial sequence
  SiRNA target sequence
ttgtaattctgatgaggttttt

SEQ ID NO: 5175 - DNA, 22 bp, Artificial sequence
  SiRNA target sequence
tgtaattctgatgaggttttta

SEQ ID NO: 5176 - DNA, 22 bp, Artificial sequence
  SiRNA target sequence
gtaattctgatgaggtttttat

SEQ ID NO: 5177 - DNA, 22 bp, Artificial sequence
  SiRNA target sequence
taattctgatgaggtttttatt

SEQ ID NO: 5178 - DNA, 22 bp, Artificial sequence
  SiRNA target sequence
aattctgatgaggtttttattg

SEQ ID NO: 5179 - DNA, 22 bp, Artificial sequence
  SiRNA target sequence
attctgatgaggtttttattgt

SEQ ID NO: 5180 - DNA, 22 bp, Artificial sequence
  SiRNA target sequence
ttctgatgaggtttttattgtt

SEQ ID NO: 5181 - DNA, 22 bp, Artificial sequence
  SiRNA target sequence
tctgatgaggtttttattgtta

SEQ ID NO: 5182 - DNA, 22 bp, Artificial sequence
  SiRNA target sequence
ctgatgaggtttttattgttaa

SEQ ID NO: 5183 - DNA, 22 bp, Artificial sequence
  SiRNA target sequence
tgatgaggtttttattgttaag

SEQ ID NO: 5184 - DNA, 22 bp, Artificial sequence
  SiRNA target sequence
gatgaggtttttattgttaagc

SEQ ID NO: 5185 - DNA, 22 bp, Artificial sequence
  SiRNA target sequence
atgaggtttttattgttaagca

SEQ ID NO: 5186 - DNA, 22 bp, Artificial sequence
  SiRNA target sequence
tgaggtttttattgttaagcag

SEQ ID NO: 5187 - DNA, 22 bp, Artificial sequence
  SiRNA target sequence
gaggtttttattgttaagcagt

SEQ ID NO: 5188 - DNA, 22 bp, Artificial sequence
  SiRNA target sequence
aggtttttattgttaagcagtc

SEQ ID NO: 5189 - DNA, 22 bp, Artificial sequence
  SiRNA target sequence
ggtttttattgttaagcagtca

SEQ ID NO: 5190 - DNA, 22 bp, Artificial sequence
  SiRNA target sequence
gtttttattgttaagcagtcac

SEQ ID NO: 5191 - DNA, 22 bp, Artificial sequence
  SiRNA target sequence
tttttattgttaagcagtcact

SEQ ID NO: 5192 - DNA, 22 bp, Artificial sequence
  SiRNA target sequence
ttttattgttaagcagtcactt

SEQ ID NO: 5193 - DNA, 22 bp, Artificial sequence
  SiRNA target sequence
tttattgttaagcagtcactta

SEQ ID NO: 5194 - DNA, 22 bp, Artificial sequence
  SiRNA target sequence
ttattgttaagcagtcacttat

SEQ ID NO: 5195 - DNA, 22 bp, Artificial sequence
  SiRNA target sequence
tattgttaagcagtcacttatt

SEQ ID NO: 5196 - DNA, 22 bp, Artificial sequence
  SiRNA target sequence
attgttaagcagtcacttattt

SEQ ID NO: 5197 - DNA, 22 bp, Artificial sequence
  SiRNA target sequence
ttgttaagcagtcacttatttt

SEQ ID NO: 5198 - DNA, 22 bp, Artificial sequence
  SiRNA target sequence
tgttaagcagtcacttatttta

SEQ ID NO: 5199 - DNA, 22 bp, Artificial sequence
  SiRNA target sequence
gttaagcagtcacttattttaa

SEQ ID NO: 5200 - DNA, 22 bp, Artificial sequence
  SiRNA target sequence
ttaagcagtcacttattttaat

SEQ ID NO: 5201 - DNA, 22 bp, Artificial sequence
  SiRNA target sequence
taagcagtcacttattttaata

SEQ ID NO: 5202 - DNA, 22 bp, Artificial sequence
  SiRNA target sequence
aagcagtcacttattttaatag

SEQ ID NO: 5203 - DNA, 22 bp, Artificial sequence
  SiRNA target sequence
agcagtcacttattttaataga

SEQ ID NO: 5204 - DNA, 22 bp, Artificial sequence
  SiRNA target sequence
gcagtcacttattttaatagaa

SEQ ID NO: 5205 - DNA, 22 bp, Artificial sequence
  SiRNA target sequence
cagtcacttattttaatagaag

SEQ ID NO: 5206 - DNA, 22 bp, Artificial sequence
  SiRNA target sequence
agtcacttattttaatagaagt

SEQ ID NO: 5207 - DNA, 22 bp, Artificial sequence
  SiRNA target sequence
gtcacttattttaatagaagta

SEQ ID NO: 5208 - DNA, 22 bp, Artificial sequence
  SiRNA target sequence
tcacttattttaatagaagtac

SEQ ID NO: 5209 - DNA, 22 bp, Artificial sequence
  SiRNA target sequence
cacttattttaatagaagtaca

SEQ ID NO: 5210 - DNA, 22 bp, Artificial sequence
  SiRNA target sequence
acttattttaatagaagtacat

SEQ ID NO: 5211 - DNA, 22 bp, Artificial sequence
  SiRNA target sequence
cttattttaatagaagtacatg

SEQ ID NO: 5212 - DNA, 22 bp, Artificial sequence
  SiRNA target sequence
ttattttaatagaagtacatga

SEQ ID NO: 5213 - DNA, 22 bp, Artificial sequence
  SiRNA target sequence
tattttaatagaagtacatgaa

SEQ ID NO: 5214 - DNA, 22 bp, Artificial sequence
  SiRNA target sequence
attttaatagaagtacatgaat

SEQ ID NO: 5215 - DNA, 22 bp, Artificial sequence
  SiRNA target sequence
ttttaatagaagtacatgaata

SEQ ID NO: 5216 - DNA, 22 bp, Artificial sequence
  SiRNA target sequence
tttaatagaagtacatgaatac

SEQ ID NO: 5217 - DNA, 22 bp, Artificial sequence
  SiRNA target sequence
ttaatagaagtacatgaataca

SEQ ID NO: 5218 - DNA, 22 bp, Artificial sequence
  SiRNA target sequence
taatagaagtacatgaatacat

SEQ ID NO: 5219 - DNA, 22 bp, Artificial sequence
  SiRNA target sequence
aatagaagtacatgaatacatc

SEQ ID NO: 5220 - DNA, 22 bp, Artificial sequence
  SiRNA target sequence
atagaagtacatgaatacatca

SEQ ID NO: 5221 - DNA, 22 bp, Artificial sequence
  SiRNA target sequence
tagaagtacatgaatacatcaa

SEQ ID NO: 5222 - DNA, 22 bp, Artificial sequence
  SiRNA target sequence
agaagtacatgaatacatcaaa

SEQ ID NO: 5223 - DNA, 22 bp, Artificial sequence
  SiRNA target sequence
gaagtacatgaatacatcaaag

SEQ ID NO: 5224 - DNA, 22 bp, Artificial sequence
  SiRNA target sequence
aagtacatgaatacatcaaaga

SEQ ID NO: 5225 - DNA, 22 bp, Artificial sequence
  SiRNA target sequence
agtacatgaatacatcaaagaa

SEQ ID NO: 5226 - DNA, 22 bp, Artificial sequence
  SiRNA target sequence
gtacatgaatacatcaaagaaa

SEQ ID NO: 5227 - DNA, 22 bp, Artificial sequence
  SiRNA target sequence
tacatgaatacatcaaagaaaa

SEQ ID NO: 5228 - DNA, 22 bp, Artificial sequence
  SiRNA target sequence
acatgaatacatcaaagaaaat

SEQ ID NO: 5229 - DNA, 22 bp, Artificial sequence
  SiRNA target sequence
catgaatacatcaaagaaaata

SEQ ID NO: 5230 - DNA, 22 bp, Artificial sequence
  SiRNA target sequence
atgaatacatcaaagaaaataa

SEQ ID NO: 5231 - DNA, 22 bp, Artificial sequence
  SiRNA target sequence
tgaatacatcaaagaaaataaa

SEQ ID NO: 5232 - DNA, 22 bp, Artificial sequence
  SiRNA target sequence
gaatacatcaaagaaaataaaa

SEQ ID NO: 5233 - DNA, 22 bp, Artificial sequence
  SiRNA target sequence
aatacatcaaagaaaataaaat

SEQ ID NO: 5234 - DNA, 22 bp, Artificial sequence
  SiRNA target sequence
atacatcaaagaaaataaaata

SEQ ID NO: 5235 - DNA, 22 bp, Artificial sequence
  SiRNA target sequence
tacatcaaagaaaataaaatat

SEQ ID NO: 5236 - DNA, 22 bp, Artificial sequence
  SiRNA target sequence
acatcaaagaaaataaaatata

SEQ ID NO: 5237 - DNA, 22 bp, Artificial sequence
  SiRNA target sequence
catcaaagaaaataaaatataa

SEQ ID NO: 5238 - DNA, 23 bp, Artificial sequence
  SiRNA target sequence
atgaaacgaaaaacagaaatatt

SEQ ID NO: 5239 - DNA, 23 bp, Artificial sequence
  SiRNA target sequence
tgaaacgaaaaacagaaatattt

SEQ ID NO: 5240 - DNA, 23 bp, Artificial sequence
  SiRNA target sequence
gaaacgaaaaacagaaatattta

SEQ ID NO: 5241 - DNA, 23 bp, Artificial sequence
  SiRNA target sequence
aaacgaaaaacagaaatatttat

SEQ ID NO: 5242 - DNA, 23 bp, Artificial sequence
  SiRNA target sequence
aacgaaaaacagaaatatttatt

SEQ ID NO: 5243 - DNA, 23 bp, Artificial sequence
  SiRNA target sequence
acgaaaaacagaaatatttattg

SEQ ID NO: 5244 - DNA, 23 bp, Artificial sequence
  SiRNA target sequence
cgaaaaacagaaatatttattgc

SEQ ID NO: 5245 - DNA, 23 bp, Artificial sequence
  SiRNA target sequence
gaaaaacagaaatatttattgct

SEQ ID NO: 5246 - DNA, 23 bp, Artificial sequence
  SiRNA target sequence
aaaaacagaaatatttattgcta

SEQ ID NO: 5247 - DNA, 23 bp, Artificial sequence
  SiRNA target sequence
aaaacagaaatatttattgctat

SEQ ID NO: 5248 - DNA, 23 bp, Artificial sequence
  SiRNA target sequence
aaacagaaatatttattgctatt

SEQ ID NO: 5249 - DNA, 23 bp, Artificial sequence
  SiRNA target sequence
aacagaaatatttattgctatta

SEQ ID NO: 5250 - DNA, 23 bp, Artificial sequence
  SiRNA target sequence
acagaaatatttattgctattac

SEQ ID NO: 5251 - DNA, 23 bp, Artificial sequence
  SiRNA target sequence
cagaaatatttattgctattaca

SEQ ID NO: 5252 - DNA, 23 bp, Artificial sequence
  SiRNA target sequence
agaaatatttattgctattacag

SEQ ID NO: 5253 - DNA, 23 bp, Artificial sequence
  SiRNA target sequence
gaaatatttattgctattacagt

SEQ ID NO: 5254 - DNA, 23 bp, Artificial sequence
  SiRNA target sequence
aaatatttattgctattacagta

SEQ ID NO: 5255 - DNA, 23 bp, Artificial sequence
  SiRNA target sequence
aatatttattgctattacagtag

SEQ ID NO: 5256 - DNA, 23 bp, Artificial sequence
  SiRNA target sequence
atatttattgctattacagtagt

SEQ ID NO: 5257 - DNA, 23 bp, Artificial sequence
  SiRNA target sequence
tatttattgctattacagtagtc

SEQ ID NO: 5258 - DNA, 23 bp, Artificial sequence
  SiRNA target sequence
atttattgctattacagtagtca

SEQ ID NO: 5259 - DNA, 23 bp, Artificial sequence
  SiRNA target sequence
tttattgctattacagtagtcac

SEQ ID NO: 5260 - DNA, 23 bp, Artificial sequence
  SiRNA target sequence
ttattgctattacagtagtcact

SEQ ID NO: 5261 - DNA, 23 bp, Artificial sequence
  SiRNA target sequence
tattgctattacagtagtcactg

SEQ ID NO: 5262 - DNA, 23 bp, Artificial sequence
  SiRNA target sequence
attgctattacagtagtcactgc

SEQ ID NO: 5263 - DNA, 23 bp, Artificial sequence
  SiRNA target sequence
ttgctattacagtagtcactgca

SEQ ID NO: 5264 - DNA, 23 bp, Artificial sequence
  SiRNA target sequence
tgctattacagtagtcactgcag

SEQ ID NO: 5265 - DNA, 23 bp, Artificial sequence
  SiRNA target sequence
gctattacagtagtcactgcagt

SEQ ID NO: 5266 - DNA, 23 bp, Artificial sequence
  SiRNA target sequence
ctattacagtagtcactgcagtg

SEQ ID NO: 5267 - DNA, 23 bp, Artificial sequence
  SiRNA target sequence
tattacagtagtcactgcagtga

SEQ ID NO: 5268 - DNA, 23 bp, Artificial sequence
  SiRNA target sequence
attacagtagtcactgcagtgac

SEQ ID NO: 5269 - DNA, 23 bp, Artificial sequence
  SiRNA target sequence
ttacagtagtcactgcagtgaca

SEQ ID NO: 5270 - DNA, 23 bp, Artificial sequence
  SiRNA target sequence
tacagtagtcactgcagtgacat

SEQ ID NO: 5271 - DNA, 23 bp, Artificial sequence
  SiRNA target sequence
acagtagtcactgcagtgacatg

SEQ ID NO: 5272 - DNA, 23 bp, Artificial sequence
  SiRNA target sequence
cagtagtcactgcagtgacatgt

SEQ ID NO: 5273 - DNA, 23 bp, Artificial sequence
  SiRNA target sequence
agtagtcactgcagtgacatgtt

SEQ ID NO: 5274 - DNA, 23 bp, Artificial sequence
  SiRNA target sequence
gtagtcactgcagtgacatgtta

SEQ ID NO: 5275 - DNA, 23 bp, Artificial sequence
  SiRNA target sequence
tagtcactgcagtgacatgttac

SEQ ID NO: 5276 - DNA, 23 bp, Artificial sequence
  SiRNA target sequence
agtcactgcagtgacatgttact

SEQ ID NO: 5277 - DNA, 23 bp, Artificial sequence
  SiRNA target sequence
gtcactgcagtgacatgttactt

SEQ ID NO: 5278 - DNA, 23 bp, Artificial sequence
  SiRNA target sequence
tcactgcagtgacatgttactta

SEQ ID NO: 5279 - DNA, 23 bp, Artificial sequence
  SiRNA target sequence
cactgcagtgacatgttacttat

SEQ ID NO: 5280 - DNA, 23 bp, Artificial sequence
  SiRNA target sequence
actgcagtgacatgttacttatt

SEQ ID NO: 5281 - DNA, 23 bp, Artificial sequence
  SiRNA target sequence
ctgcagtgacatgttacttattt

SEQ ID NO: 5282 - DNA, 23 bp, Artificial sequence
  SiRNA target sequence
tgcagtgacatgttacttattta

SEQ ID NO: 5283 - DNA, 23 bp, Artificial sequence
  SiRNA target sequence
gcagtgacatgttacttatttaa

SEQ ID NO: 5284 - DNA, 23 bp, Artificial sequence
  SiRNA target sequence
cagtgacatgttacttatttaaa

SEQ ID NO: 5285 - DNA, 23 bp, Artificial sequence
  SiRNA target sequence
agtgacatgttacttatttaaaa

SEQ ID NO: 5286 - DNA, 23 bp, Artificial sequence
  SiRNA target sequence
gtgacatgttacttatttaaaaa

SEQ ID NO: 5287 - DNA, 23 bp, Artificial sequence
  SiRNA target sequence
tgacatgttacttatttaaaaaa

SEQ ID NO: 5288 - DNA, 23 bp, Artificial sequence
  SiRNA target sequence
gacatgttacttatttaaaaaaa

SEQ ID NO: 5289 - DNA, 23 bp, Artificial sequence
  SiRNA target sequence
acatgttacttatttaaaaaaat

SEQ ID NO: 5290 - DNA, 23 bp, Artificial sequence
  SiRNA target sequence
catgttacttatttaaaaaaata

SEQ ID NO: 5291 - DNA, 23 bp, Artificial sequence
  SiRNA target sequence
atgttacttatttaaaaaaataa

SEQ ID NO: 5292 - DNA, 23 bp, Artificial sequence
  SiRNA target sequence
tgttacttatttaaaaaaataat

SEQ ID NO: 5293 - DNA, 23 bp, Artificial sequence
  SiRNA target sequence
gttacttatttaaaaaaataata

SEQ ID NO: 5294 - DNA, 23 bp, Artificial sequence
  SiRNA target sequence
ttacttatttaaaaaaataataa

SEQ ID NO: 5295 - DNA, 23 bp, Artificial sequence
  SiRNA target sequence
tacttatttaaaaaaataataaa

SEQ ID NO: 5296 - DNA, 23 bp, Artificial sequence
  SiRNA target sequence
acttatttaaaaaaataataaat

SEQ ID NO: 5297 - DNA, 23 bp, Artificial sequence
  SiRNA target sequence
cttatttaaaaaaataataaata

SEQ ID NO: 5298 - DNA, 23 bp, Artificial sequence
  SiRNA target sequence
ttatttaaaaaaataataaatag

SEQ ID NO: 5299 - DNA, 23 bp, Artificial sequence
  SiRNA target sequence
tatttaaaaaaataataaataga

SEQ ID NO: 5300 - DNA, 23 bp, Artificial sequence
  SiRNA target sequence
atttaaaaaaataataaatagac

SEQ ID NO: 5301 - DNA, 23 bp, Artificial sequence
  SiRNA target sequence
tttaaaaaaataataaatagaca

SEQ ID NO: 5302 - DNA, 23 bp, Artificial sequence
  SiRNA target sequence
ttaaaaaaataataaatagacaa

SEQ ID NO: 5303 - DNA, 23 bp, Artificial sequence
  SiRNA target sequence
taaaaaaataataaatagacaaa

SEQ ID NO: 5304 - DNA, 23 bp, Artificial sequence
  SiRNA target sequence
aaaaaaataataaatagacaaaa

SEQ ID NO: 5305 - DNA, 23 bp, Artificial sequence
  SiRNA target sequence
aaaaaataataaatagacaaaag

SEQ ID NO: 5306 - DNA, 23 bp, Artificial sequence
  SiRNA target sequence
aaaaataataaatagacaaaagt

SEQ ID NO: 5307 - DNA, 23 bp, Artificial sequence
  SiRNA target sequence
aaaataataaatagacaaaagtc

SEQ ID NO: 5308 - DNA, 23 bp, Artificial sequence
  SiRNA target sequence
aaataataaatagacaaaagtct

SEQ ID NO: 5309 - DNA, 23 bp, Artificial sequence
  SiRNA target sequence
aataataaatagacaaaagtctg

SEQ ID NO: 5310 - DNA, 23 bp, Artificial sequence
  SiRNA target sequence
ataataaatagacaaaagtctga

SEQ ID NO: 5311 - DNA, 23 bp, Artificial sequence
  SiRNA target sequence
taataaatagacaaaagtctgat

SEQ ID NO: 5312 - DNA, 23 bp, Artificial sequence
  SiRNA target sequence
aataaatagacaaaagtctgatt

SEQ ID NO: 5313 - DNA, 23 bp, Artificial sequence
  SiRNA target sequence
ataaatagacaaaagtctgatta

SEQ ID NO: 5314 - DNA, 23 bp, Artificial sequence
  SiRNA target sequence
taaatagacaaaagtctgattat

SEQ ID NO: 5315 - DNA, 23 bp, Artificial sequence
  SiRNA target sequence
aaatagacaaaagtctgattata

SEQ ID NO: 5316 - DNA, 23 bp, Artificial sequence
  SiRNA target sequence
aatagacaaaagtctgattatac

SEQ ID NO: 5317 - DNA, 23 bp, Artificial sequence
  SiRNA target sequence
atagacaaaagtctgattataca

SEQ ID NO: 5318 - DNA, 23 bp, Artificial sequence
  SiRNA target sequence
tagacaaaagtctgattatacat

SEQ ID NO: 5319 - DNA, 23 bp, Artificial sequence
  SiRNA target sequence
agacaaaagtctgattatacatc

SEQ ID NO: 5320 - DNA, 23 bp, Artificial sequence
  SiRNA target sequence
gacaaaagtctgattatacatca

SEQ ID NO: 5321 - DNA, 23 bp, Artificial sequence
  SiRNA target sequence
acaaaagtctgattatacatcaa

SEQ ID NO: 5322 - DNA, 23 bp, Artificial sequence
  SiRNA target sequence
caaaagtctgattatacatcaat

SEQ ID NO: 5323 - DNA, 23 bp, Artificial sequence
  SiRNA target sequence
aaaagtctgattatacatcaata

SEQ ID NO: 5324 - DNA, 23 bp, Artificial sequence
  SiRNA target sequence
aaagtctgattatacatcaataa

SEQ ID NO: 5325 - DNA, 23 bp, Artificial sequence
  SiRNA target sequence
aagtctgattatacatcaataaa

SEQ ID NO: 5326 - DNA, 23 bp, Artificial sequence
  SiRNA target sequence
agtctgattatacatcaataaaa

SEQ ID NO: 5327 - DNA, 23 bp, Artificial sequence
  SiRNA target sequence
gtctgattatacatcaataaaac

SEQ ID NO: 5328 - DNA, 23 bp, Artificial sequence
  SiRNA target sequence
tctgattatacatcaataaaaca

SEQ ID NO: 5329 - DNA, 23 bp, Artificial sequence
  SiRNA target sequence
ctgattatacatcaataaaacag

SEQ ID NO: 5330 - DNA, 23 bp, Artificial sequence
  SiRNA target sequence
tgattatacatcaataaaacagg

SEQ ID NO: 5331 - DNA, 23 bp, Artificial sequence
  SiRNA target sequence
gattatacatcaataaaacagga

SEQ ID NO: 5332 - DNA, 23 bp, Artificial sequence
  SiRNA target sequence
attatacatcaataaaacaggaa

SEQ ID NO: 5333 - DNA, 23 bp, Artificial sequence
  SiRNA target sequence
ttatacatcaataaaacaggaag

SEQ ID NO: 5334 - DNA, 23 bp, Artificial sequence
  SiRNA target sequence
tatacatcaataaaacaggaagc

SEQ ID NO: 5335 - DNA, 23 bp, Artificial sequence
  SiRNA target sequence
atacatcaataaaacaggaagca

SEQ ID NO: 5336 - DNA, 23 bp, Artificial sequence
  SiRNA target sequence
tacatcaataaaacaggaagcag

SEQ ID NO: 5337 - DNA, 23 bp, Artificial sequence
  SiRNA target sequence
acatcaataaaacaggaagcaga

SEQ ID NO: 5338 - DNA, 23 bp, Artificial sequence
  SiRNA target sequence
catcaataaaacaggaagcagat

SEQ ID NO: 5339 - DNA, 23 bp, Artificial sequence
  SiRNA target sequence
atcaataaaacaggaagcagata

SEQ ID NO: 5340 - DNA, 23 bp, Artificial sequence
  SiRNA target sequence
tcaataaaacaggaagcagataa

SEQ ID NO: 5341 - DNA, 23 bp, Artificial sequence
  SiRNA target sequence
caataaaacaggaagcagataaa

SEQ ID NO: 5342 - DNA, 23 bp, Artificial sequence
  SiRNA target sequence
aataaaacaggaagcagataaat

SEQ ID NO: 5343 - DNA, 23 bp, Artificial sequence
  SiRNA target sequence
ataaaacaggaagcagataaata

SEQ ID NO: 5344 - DNA, 23 bp, Artificial sequence
  SiRNA target sequence
taaaacaggaagcagataaatat

SEQ ID NO: 5345 - DNA, 23 bp, Artificial sequence
  SiRNA target sequence
aaaacaggaagcagataaatatt

SEQ ID NO: 5346 - DNA, 23 bp, Artificial sequence
  SiRNA target sequence
aaacaggaagcagataaatattt

SEQ ID NO: 5347 - DNA, 23 bp, Artificial sequence
  SiRNA target sequence
aacaggaagcagataaatatttt

SEQ ID NO: 5348 - DNA, 23 bp, Artificial sequence
  SiRNA target sequence
acaggaagcagataaatatttta

SEQ ID NO: 5349 - DNA, 23 bp, Artificial sequence
  SiRNA target sequence
caggaagcagataaatattttat

SEQ ID NO: 5350 - DNA, 23 bp, Artificial sequence
  SiRNA target sequence
aggaagcagataaatattttata

SEQ ID NO: 5351 - DNA, 23 bp, Artificial sequence
  SiRNA target sequence
ggaagcagataaatattttatac

SEQ ID NO: 5352 - DNA, 23 bp, Artificial sequence
  SiRNA target sequence
gaagcagataaatattttataca

SEQ ID NO: 5353 - DNA, 23 bp, Artificial sequence
  SiRNA target sequence
aagcagataaatattttatacaa

SEQ ID NO: 5354 - DNA, 23 bp, Artificial sequence
  SiRNA target sequence
agcagataaatattttatacaag

SEQ ID NO: 5355 - DNA, 23 bp, Artificial sequence
  SiRNA target sequence
gcagataaatattttatacaaga

SEQ ID NO: 5356 - DNA, 23 bp, Artificial sequence
  SiRNA target sequence
cagataaatattttatacaagaa

SEQ ID NO: 5357 - DNA, 23 bp, Artificial sequence
  SiRNA target sequence
agataaatattttatacaagaag

SEQ ID NO: 5358 - DNA, 23 bp, Artificial sequence
  SiRNA target sequence
gataaatattttatacaagaaga

SEQ ID NO: 5359 - DNA, 23 bp, Artificial sequence
  SiRNA target sequence
ataaatattttatacaagaagat

SEQ ID NO: 5360 - DNA, 23 bp, Artificial sequence
  SiRNA target sequence
taaatattttatacaagaagatt

SEQ ID NO: 5361 - DNA, 23 bp, Artificial sequence
  SiRNA target sequence
aaatattttatacaagaagatta

SEQ ID NO: 5362 - DNA, 23 bp, Artificial sequence
  SiRNA target sequence
aatattttatacaagaagattat

SEQ ID NO: 5363 - DNA, 23 bp, Artificial sequence
  SiRNA target sequence
atattttatacaagaagattata

SEQ ID NO: 5364 - DNA, 23 bp, Artificial sequence
  SiRNA target sequence
tattttatacaagaagattataa

SEQ ID NO: 5365 - DNA, 23 bp, Artificial sequence
  SiRNA target sequence
attttatacaagaagattataaa

SEQ ID NO: 5366 - DNA, 23 bp, Artificial sequence
  SiRNA target sequence
ttttatacaagaagattataaaa

SEQ ID NO: 5367 - DNA, 23 bp, Artificial sequence
  SiRNA target sequence
tttatacaagaagattataaaaa

SEQ ID NO: 5368 - DNA, 23 bp, Artificial sequence
  SiRNA target sequence
ttatacaagaagattataaaaat

SEQ ID NO: 5369 - DNA, 23 bp, Artificial sequence
  SiRNA target sequence
tatacaagaagattataaaaatg

SEQ ID NO: 5370 - DNA, 23 bp, Artificial sequence
  SiRNA target sequence
atacaagaagattataaaaatgc

SEQ ID NO: 5371 - DNA, 23 bp, Artificial sequence
  SiRNA target sequence
tacaagaagattataaaaatgct

SEQ ID NO: 5372 - DNA, 23 bp, Artificial sequence
  SiRNA target sequence
acaagaagattataaaaatgcta

SEQ ID NO: 5373 - DNA, 23 bp, Artificial sequence
  SiRNA target sequence
caagaagattataaaaatgctat

SEQ ID NO: 5374 - DNA, 23 bp, Artificial sequence
  SiRNA target sequence
aagaagattataaaaatgctatt

SEQ ID NO: 5375 - DNA, 23 bp, Artificial sequence
  SiRNA target sequence
agaagattataaaaatgctattc

SEQ ID NO: 5376 - DNA, 23 bp, Artificial sequence
  SiRNA target sequence
gaagattataaaaatgctattct

SEQ ID NO: 5377 - DNA, 23 bp, Artificial sequence
  SiRNA target sequence
aagattataaaaatgctattctg

SEQ ID NO: 5378 - DNA, 23 bp, Artificial sequence
  SiRNA target sequence
agattataaaaatgctattctgt

SEQ ID NO: 5379 - DNA, 23 bp, Artificial sequence
  SiRNA target sequence
gattataaaaatgctattctgtt

SEQ ID NO: 5380 - DNA, 23 bp, Artificial sequence
  SiRNA target sequence
attataaaaatgctattctgttg

SEQ ID NO: 5381 - DNA, 23 bp, Artificial sequence
  SiRNA target sequence
ttataaaaatgctattctgttgt

SEQ ID NO: 5382 - DNA, 23 bp, Artificial sequence
  SiRNA target sequence
tataaaaatgctattctgttgta

SEQ ID NO: 5383 - DNA, 23 bp, Artificial sequence
  SiRNA target sequence
ataaaaatgctattctgttgtac

SEQ ID NO: 5384 - DNA, 23 bp, Artificial sequence
  SiRNA target sequence
taaaaatgctattctgttgtaca

SEQ ID NO: 5385 - DNA, 23 bp, Artificial sequence
  SiRNA target sequence
aaaaatgctattctgttgtacac

SEQ ID NO: 5386 - DNA, 23 bp, Artificial sequence
  SiRNA target sequence
aaaatgctattctgttgtacact

SEQ ID NO: 5387 - DNA, 23 bp, Artificial sequence
  SiRNA target sequence
aaatgctattctgttgtacacta

SEQ ID NO: 5388 - DNA, 23 bp, Artificial sequence
  SiRNA target sequence
aatgctattctgttgtacactaa

SEQ ID NO: 5389 - DNA, 23 bp, Artificial sequence
  SiRNA target sequence
atgctattctgttgtacactaaa

SEQ ID NO: 5390 - DNA, 23 bp, Artificial sequence
  SiRNA target sequence
tgctattctgttgtacactaaat

SEQ ID NO: 5391 - DNA, 23 bp, Artificial sequence
  SiRNA target sequence
gctattctgttgtacactaaatg

SEQ ID NO: 5392 - DNA, 23 bp, Artificial sequence
  SiRNA target sequence
ctattctgttgtacactaaatgt

SEQ ID NO: 5393 - DNA, 23 bp, Artificial sequence
  SiRNA target sequence
tattctgttgtacactaaatgta

SEQ ID NO: 5394 - DNA, 23 bp, Artificial sequence
  SiRNA target sequence
attctgttgtacactaaatgtaa

SEQ ID NO: 5395 - DNA, 23 bp, Artificial sequence
  SiRNA target sequence
ttctgttgtacactaaatgtaaa

SEQ ID NO: 5396 - DNA, 23 bp, Artificial sequence
  SiRNA target sequence
tctgttgtacactaaatgtaaat

SEQ ID NO: 5397 - DNA, 23 bp, Artificial sequence
  SiRNA target sequence
ctgttgtacactaaatgtaaata

SEQ ID NO: 5398 - DNA, 23 bp, Artificial sequence
  SiRNA target sequence
tgttgtacactaaatgtaaatat

SEQ ID NO: 5399 - DNA, 23 bp, Artificial sequence
  SiRNA target sequence
gttgtacactaaatgtaaatata

SEQ ID NO: 5400 - DNA, 23 bp, Artificial sequence
  SiRNA target sequence
ttgtacactaaatgtaaatatat

SEQ ID NO: 5401 - DNA, 23 bp, Artificial sequence
  SiRNA target sequence
tgtacactaaatgtaaatatatg

SEQ ID NO: 5402 - DNA, 23 bp, Artificial sequence
  SiRNA target sequence
gtacactaaatgtaaatatatga

SEQ ID NO: 5403 - DNA, 23 bp, Artificial sequence
  SiRNA target sequence
tacactaaatgtaaatatatgaa

SEQ ID NO: 5404 - DNA, 23 bp, Artificial sequence
  SiRNA target sequence
acactaaatgtaaatatatgaaa

SEQ ID NO: 5405 - DNA, 23 bp, Artificial sequence
  SiRNA target sequence
cactaaatgtaaatatatgaaaa

SEQ ID NO: 5406 - DNA, 23 bp, Artificial sequence
  SiRNA target sequence
actaaatgtaaatatatgaaaag

SEQ ID NO: 5407 - DNA, 23 bp, Artificial sequence
  SiRNA target sequence
ctaaatgtaaatatatgaaaagt

SEQ ID NO: 5408 - DNA, 23 bp, Artificial sequence
  SiRNA target sequence
taaatgtaaatatatgaaaagtg

SEQ ID NO: 5409 - DNA, 23 bp, Artificial sequence
  SiRNA target sequence
aaatgtaaatatatgaaaagtga

SEQ ID NO: 5410 - DNA, 23 bp, Artificial sequence
  SiRNA target sequence
aatgtaaatatatgaaaagtgat

SEQ ID NO: 5411 - DNA, 23 bp, Artificial sequence
  SiRNA target sequence
atgtaaatatatgaaaagtgatg

SEQ ID NO: 5412 - DNA, 23 bp, Artificial sequence
  SiRNA target sequence
tgtaaatatatgaaaagtgatgc

SEQ ID NO: 5413 - DNA, 23 bp, Artificial sequence
  SiRNA target sequence
gtaaatatatgaaaagtgatgct

SEQ ID NO: 5414 - DNA, 23 bp, Artificial sequence
  SiRNA target sequence
taaatatatgaaaagtgatgctg

SEQ ID NO: 5415 - DNA, 23 bp, Artificial sequence
  SiRNA target sequence
aaatatatgaaaagtgatgctga

SEQ ID NO: 5416 - DNA, 23 bp, Artificial sequence
  SiRNA target sequence
aatatatgaaaagtgatgctgaa

SEQ ID NO: 5417 - DNA, 23 bp, Artificial sequence
  SiRNA target sequence
atatatgaaaagtgatgctgaaa

SEQ ID NO: 5418 - DNA, 23 bp, Artificial sequence
  SiRNA target sequence
tatatgaaaagtgatgctgaaat

SEQ ID NO: 5419 - DNA, 23 bp, Artificial sequence
  SiRNA target sequence
atatgaaaagtgatgctgaaatt

SEQ ID NO: 5420 - DNA, 23 bp, Artificial sequence
  SiRNA target sequence
tatgaaaagtgatgctgaaattc

SEQ ID NO: 5421 - DNA, 23 bp, Artificial sequence
  SiRNA target sequence
atgaaaagtgatgctgaaattct

SEQ ID NO: 5422 - DNA, 23 bp, Artificial sequence
  SiRNA target sequence
tgaaaagtgatgctgaaattctt

SEQ ID NO: 5423 - DNA, 23 bp, Artificial sequence
  SiRNA target sequence
gaaaagtgatgctgaaattctta

SEQ ID NO: 5424 - DNA, 23 bp, Artificial sequence
  SiRNA target sequence
aaaagtgatgctgaaattcttac

SEQ ID NO: 5425 - DNA, 23 bp, Artificial sequence
  SiRNA target sequence
aaagtgatgctgaaattcttact

SEQ ID NO: 5426 - DNA, 23 bp, Artificial sequence
  SiRNA target sequence
aagtgatgctgaaattcttacta

SEQ ID NO: 5427 - DNA, 23 bp, Artificial sequence
  SiRNA target sequence
agtgatgctgaaattcttactaa

SEQ ID NO: 5428 - DNA, 23 bp, Artificial sequence
  SiRNA target sequence
gtgatgctgaaattcttactaaa

SEQ ID NO: 5429 - DNA, 23 bp, Artificial sequence
  SiRNA target sequence
tgatgctgaaattcttactaaaa

SEQ ID NO: 5430 - DNA, 23 bp, Artificial sequence
  SiRNA target sequence
gatgctgaaattcttactaaaat

SEQ ID NO: 5431 - DNA, 23 bp, Artificial sequence
  SiRNA target sequence
atgctgaaattcttactaaaatt

SEQ ID NO: 5432 - DNA, 23 bp, Artificial sequence
  SiRNA target sequence
tgctgaaattcttactaaaatta

SEQ ID NO: 5433 - DNA, 23 bp, Artificial sequence
  SiRNA target sequence
gctgaaattcttactaaaattag

SEQ ID NO: 5434 - DNA, 23 bp, Artificial sequence
  SiRNA target sequence
ctgaaattcttactaaaattagt

SEQ ID NO: 5435 - DNA, 23 bp, Artificial sequence
  SiRNA target sequence
tgaaattcttactaaaattagtc

SEQ ID NO: 5436 - DNA, 23 bp, Artificial sequence
  SiRNA target sequence
gaaattcttactaaaattagtct

SEQ ID NO: 5437 - DNA, 23 bp, Artificial sequence
  SiRNA target sequence
aaattcttactaaaattagtctc

SEQ ID NO: 5438 - DNA, 23 bp, Artificial sequence
  SiRNA target sequence
aattcttactaaaattagtctct

SEQ ID NO: 5439 - DNA, 23 bp, Artificial sequence
  SiRNA target sequence
attcttactaaaattagtctctg

SEQ ID NO: 5440 - DNA, 23 bp, Artificial sequence
  SiRNA target sequence
ttcttactaaaattagtctctgt

SEQ ID NO: 5441 - DNA, 23 bp, Artificial sequence
  SiRNA target sequence
tcttactaaaattagtctctgta

SEQ ID NO: 5442 - DNA, 23 bp, Artificial sequence
  SiRNA target sequence
cttactaaaattagtctctgtaa

SEQ ID NO: 5443 - DNA, 23 bp, Artificial sequence
  SiRNA target sequence
ttactaaaattagtctctgtaat

SEQ ID NO: 5444 - DNA, 23 bp, Artificial sequence
  SiRNA target sequence
tactaaaattagtctctgtaatt

SEQ ID NO: 5445 - DNA, 23 bp, Artificial sequence
  SiRNA target sequence
actaaaattagtctctgtaatta

SEQ ID NO: 5446 - DNA, 23 bp, Artificial sequence
  SiRNA target sequence
ctaaaattagtctctgtaattat

SEQ ID NO: 5447 - DNA, 23 bp, Artificial sequence
  SiRNA target sequence
taaaattagtctctgtaattatt

SEQ ID NO: 5448 - DNA, 23 bp, Artificial sequence
  SiRNA target sequence
aaaattagtctctgtaattattt

SEQ ID NO: 5449 - DNA, 23 bp, Artificial sequence
  SiRNA target sequence
aaattagtctctgtaattatttc

SEQ ID NO: 5450 - DNA, 23 bp, Artificial sequence
  SiRNA target sequence
aattagtctctgtaattatttct

SEQ ID NO: 5451 - DNA, 23 bp, Artificial sequence
  SiRNA target sequence
attagtctctgtaattatttctt

SEQ ID NO: 5452 - DNA, 23 bp, Artificial sequence
  SiRNA target sequence
ttagtctctgtaattatttctta

SEQ ID NO: 5453 - DNA, 23 bp, Artificial sequence
  SiRNA target sequence
tagtctctgtaattatttcttaa

SEQ ID NO: 5454 - DNA, 23 bp, Artificial sequence
  SiRNA target sequence
agtctctgtaattatttcttaaa

SEQ ID NO: 5455 - DNA, 23 bp, Artificial sequence
  SiRNA target sequence
gtctctgtaattatttcttaaaa

SEQ ID NO: 5456 - DNA, 23 bp, Artificial sequence
  SiRNA target sequence
tctctgtaattatttcttaaaaa

SEQ ID NO: 5457 - DNA, 23 bp, Artificial sequence
  SiRNA target sequence
ctctgtaattatttcttaaaaaa

SEQ ID NO: 5458 - DNA, 23 bp, Artificial sequence
  SiRNA target sequence
tctgtaattatttcttaaaaaat

SEQ ID NO: 5459 - DNA, 23 bp, Artificial sequence
  SiRNA target sequence
ctgtaattatttcttaaaaaatt

SEQ ID NO: 5460 - DNA, 23 bp, Artificial sequence
  SiRNA target sequence
tgtaattatttcttaaaaaatta

SEQ ID NO: 5461 - DNA, 23 bp, Artificial sequence
  SiRNA target sequence
gtaattatttcttaaaaaattat

SEQ ID NO: 5462 - DNA, 23 bp, Artificial sequence
  SiRNA target sequence
taattatttcttaaaaaattatc

SEQ ID NO: 5463 - DNA, 23 bp, Artificial sequence
  SiRNA target sequence
aattatttcttaaaaaattatca

SEQ ID NO: 5464 - DNA, 23 bp, Artificial sequence
  SiRNA target sequence
attatttcttaaaaaattatcaa

SEQ ID NO: 5465 - DNA, 23 bp, Artificial sequence
  SiRNA target sequence
ttatttcttaaaaaattatcaag

SEQ ID NO: 5466 - DNA, 23 bp, Artificial sequence
  SiRNA target sequence
tatttcttaaaaaattatcaaga

SEQ ID NO: 5467 - DNA, 23 bp, Artificial sequence
  SiRNA target sequence
atttcttaaaaaattatcaagaa

SEQ ID NO: 5468 - DNA, 23 bp, Artificial sequence
  SiRNA target sequence
tttcttaaaaaattatcaagaag

SEQ ID NO: 5469 - DNA, 23 bp, Artificial sequence
  SiRNA target sequence
ttcttaaaaaattatcaagaagt

SEQ ID NO: 5470 - DNA, 23 bp, Artificial sequence
  SiRNA target sequence
tcttaaaaaattatcaagaagtt

SEQ ID NO: 5471 - DNA, 23 bp, Artificial sequence
  SiRNA target sequence
cttaaaaaattatcaagaagtta

SEQ ID NO: 5472 - DNA, 23 bp, Artificial sequence
  SiRNA target sequence
ttaaaaaattatcaagaagttat

SEQ ID NO: 5473 - DNA, 23 bp, Artificial sequence
  SiRNA target sequence
taaaaaattatcaagaagttata

SEQ ID NO: 5474 - DNA, 23 bp, Artificial sequence
  SiRNA target sequence
aaaaaattatcaagaagttataa

SEQ ID NO: 5475 - DNA, 23 bp, Artificial sequence
  SiRNA target sequence
aaaaattatcaagaagttataaa

SEQ ID NO: 5476 - DNA, 23 bp, Artificial sequence
  SiRNA target sequence
aaaattatcaagaagttataaat

SEQ ID NO: 5477 - DNA, 23 bp, Artificial sequence
  SiRNA target sequence
aaattatcaagaagttataaata

SEQ ID NO: 5478 - DNA, 23 bp, Artificial sequence
  SiRNA target sequence
aattatcaagaagttataaataa

SEQ ID NO: 5479 - DNA, 23 bp, Artificial sequence
  SiRNA target sequence
attatcaagaagttataaataat

SEQ ID NO: 5480 - DNA, 23 bp, Artificial sequence
  SiRNA target sequence
ttatcaagaagttataaataatt

SEQ ID NO: 5481 - DNA, 23 bp, Artificial sequence
  SiRNA target sequence
tatcaagaagttataaataattc

SEQ ID NO: 5482 - DNA, 23 bp, Artificial sequence
  SiRNA target sequence
atcaagaagttataaataattct

SEQ ID NO: 5483 - DNA, 23 bp, Artificial sequence
  SiRNA target sequence
tcaagaagttataaataattctt

SEQ ID NO: 5484 - DNA, 23 bp, Artificial sequence
  SiRNA target sequence
caagaagttataaataattcttt

SEQ ID NO: 5485 - DNA, 23 bp, Artificial sequence
  SiRNA target sequence
aagaagttataaataattcttta

SEQ ID NO: 5486 - DNA, 23 bp, Artificial sequence
  SiRNA target sequence
agaagttataaataattctttat

SEQ ID NO: 5487 - DNA, 23 bp, Artificial sequence
  SiRNA target sequence
gaagttataaataattctttatt

SEQ ID NO: 5488 - DNA, 23 bp, Artificial sequence
  SiRNA target sequence
aagttataaataattctttattt

SEQ ID NO: 5489 - DNA, 23 bp, Artificial sequence
  SiRNA target sequence
agttataaataattctttattta

SEQ ID NO: 5490 - DNA, 23 bp, Artificial sequence
  SiRNA target sequence
gttataaataattctttatttaa

SEQ ID NO: 5491 - DNA, 23 bp, Artificial sequence
  SiRNA target sequence
ttataaataattctttatttaag

SEQ ID NO: 5492 - DNA, 23 bp, Artificial sequence
  SiRNA target sequence
tataaataattctttatttaaga

SEQ ID NO: 5493 - DNA, 23 bp, Artificial sequence
  SiRNA target sequence
ataaataattctttatttaagac

SEQ ID NO: 5494 - DNA, 23 bp, Artificial sequence
  SiRNA target sequence
taaataattctttatttaagaca

SEQ ID NO: 5495 - DNA, 23 bp, Artificial sequence
  SiRNA target sequence
aaataattctttatttaagacaa

SEQ ID NO: 5496 - DNA, 23 bp, Artificial sequence
  SiRNA target sequence
aataattctttatttaagacaaa

SEQ ID NO: 5497 - DNA, 23 bp, Artificial sequence
  SiRNA target sequence
ataattctttatttaagacaaat

SEQ ID NO: 5498 - DNA, 23 bp, Artificial sequence
  SiRNA target sequence
taattctttatttaagacaaata

SEQ ID NO: 5499 - DNA, 23 bp, Artificial sequence
  SiRNA target sequence
aattctttatttaagacaaataa

SEQ ID NO: 5500 - DNA, 23 bp, Artificial sequence
  SiRNA target sequence
attctttatttaagacaaataat

SEQ ID NO: 5501 - DNA, 23 bp, Artificial sequence
  SiRNA target sequence
ttctttatttaagacaaataata

SEQ ID NO: 5502 - DNA, 23 bp, Artificial sequence
  SiRNA target sequence
tctttatttaagacaaataataa

SEQ ID NO: 5503 - DNA, 23 bp, Artificial sequence
  SiRNA target sequence
ctttatttaagacaaataataaa

SEQ ID NO: 5504 - DNA, 23 bp, Artificial sequence
  SiRNA target sequence
tttatttaagacaaataataaag

SEQ ID NO: 5505 - DNA, 23 bp, Artificial sequence
  SiRNA target sequence
ttatttaagacaaataataaaga

SEQ ID NO: 5506 - DNA, 23 bp, Artificial sequence
  SiRNA target sequence
tatttaagacaaataataaagat

SEQ ID NO: 5507 - DNA, 23 bp, Artificial sequence
  SiRNA target sequence
atttaagacaaataataaagatc

SEQ ID NO: 5508 - DNA, 23 bp, Artificial sequence
  SiRNA target sequence
tttaagacaaataataaagatct

SEQ ID NO: 5509 - DNA, 23 bp, Artificial sequence
  SiRNA target sequence
ttaagacaaataataaagatcta

SEQ ID NO: 5510 - DNA, 23 bp, Artificial sequence
  SiRNA target sequence
taagacaaataataaagatctaa

SEQ ID NO: 5511 - DNA, 23 bp, Artificial sequence
  SiRNA target sequence
aagacaaataataaagatctaat

SEQ ID NO: 5512 - DNA, 23 bp, Artificial sequence
  SiRNA target sequence
agacaaataataaagatctaata

SEQ ID NO: 5513 - DNA, 23 bp, Artificial sequence
  SiRNA target sequence
gacaaataataaagatctaataa

SEQ ID NO: 5514 - DNA, 23 bp, Artificial sequence
  SiRNA target sequence
acaaataataaagatctaataaa

SEQ ID NO: 5515 - DNA, 23 bp, Artificial sequence
  SiRNA target sequence
caaataataaagatctaataaaa

SEQ ID NO: 5516 - DNA, 23 bp, Artificial sequence
  SiRNA target sequence
aaataataaagatctaataaaaa

SEQ ID NO: 5517 - DNA, 23 bp, Artificial sequence
  SiRNA target sequence
aataataaagatctaataaaaat

SEQ ID NO: 5518 - DNA, 23 bp, Artificial sequence
  SiRNA target sequence
ataataaagatctaataaaaata

SEQ ID NO: 5519 - DNA, 23 bp, Artificial sequence
  SiRNA target sequence
taataaagatctaataaaaataa

SEQ ID NO: 5520 - DNA, 23 bp, Artificial sequence
  SiRNA target sequence
aataaagatctaataaaaataag

SEQ ID NO: 5521 - DNA, 23 bp, Artificial sequence
  SiRNA target sequence
ataaagatctaataaaaataaga

SEQ ID NO: 5522 - DNA, 23 bp, Artificial sequence
  SiRNA target sequence
taaagatctaataaaaataagat

SEQ ID NO: 5523 - DNA, 23 bp, Artificial sequence
  SiRNA target sequence
aaagatctaataaaaataagatc

SEQ ID NO: 5524 - DNA, 23 bp, Artificial sequence
  SiRNA target sequence
aagatctaataaaaataagatct

SEQ ID NO: 5525 - DNA, 23 bp, Artificial sequence
  SiRNA target sequence
agatctaataaaaataagatctg

SEQ ID NO: 5526 - DNA, 23 bp, Artificial sequence
  SiRNA target sequence
gatctaataaaaataagatctga

SEQ ID NO: 5527 - DNA, 23 bp, Artificial sequence
  SiRNA target sequence
atctaataaaaataagatctgaa

SEQ ID NO: 5528 - DNA, 23 bp, Artificial sequence
  SiRNA target sequence
tctaataaaaataagatctgaat

SEQ ID NO: 5529 - DNA, 23 bp, Artificial sequence
  SiRNA target sequence
ctaataaaaataagatctgaatg

SEQ ID NO: 5530 - DNA, 23 bp, Artificial sequence
  SiRNA target sequence
taataaaaataagatctgaatgt

SEQ ID NO: 5531 - DNA, 23 bp, Artificial sequence
  SiRNA target sequence
aataaaaataagatctgaatgtt

SEQ ID NO: 5532 - DNA, 23 bp, Artificial sequence
  SiRNA target sequence
ataaaaataagatctgaatgtta

SEQ ID NO: 5533 - DNA, 23 bp, Artificial sequence
  SiRNA target sequence
taaaaataagatctgaatgttac

SEQ ID NO: 5534 - DNA, 23 bp, Artificial sequence
  SiRNA target sequence
aaaaataagatctgaatgttaca

SEQ ID NO: 5535 - DNA, 23 bp, Artificial sequence
  SiRNA target sequence
aaaataagatctgaatgttacaa

SEQ ID NO: 5536 - DNA, 23 bp, Artificial sequence
  SiRNA target sequence
aaataagatctgaatgttacaag

SEQ ID NO: 5537 - DNA, 23 bp, Artificial sequence
  SiRNA target sequence
aataagatctgaatgttacaagc

SEQ ID NO: 5538 - DNA, 23 bp, Artificial sequence
  SiRNA target sequence
ataagatctgaatgttacaagca

SEQ ID NO: 5539 - DNA, 23 bp, Artificial sequence
  SiRNA target sequence
taagatctgaatgttacaagcag

SEQ ID NO: 5540 - DNA, 23 bp, Artificial sequence
  SiRNA target sequence
aagatctgaatgttacaagcaga

SEQ ID NO: 5541 - DNA, 23 bp, Artificial sequence
  SiRNA target sequence
agatctgaatgttacaagcagat

SEQ ID NO: 5542 - DNA, 23 bp, Artificial sequence
  SiRNA target sequence
gatctgaatgttacaagcagatg

SEQ ID NO: 5543 - DNA, 23 bp, Artificial sequence
  SiRNA target sequence
atctgaatgttacaagcagatgg

SEQ ID NO: 5544 - DNA, 23 bp, Artificial sequence
  SiRNA target sequence
tctgaatgttacaagcagatggg

SEQ ID NO: 5545 - DNA, 23 bp, Artificial sequence
  SiRNA target sequence
ctgaatgttacaagcagatggga

SEQ ID NO: 5546 - DNA, 23 bp, Artificial sequence
  SiRNA target sequence
tgaatgttacaagcagatgggaa

SEQ ID NO: 5547 - DNA, 23 bp, Artificial sequence
  SiRNA target sequence
gaatgttacaagcagatgggaaa

SEQ ID NO: 5548 - DNA, 23 bp, Artificial sequence
  SiRNA target sequence
aatgttacaagcagatgggaaat

SEQ ID NO: 5549 - DNA, 23 bp, Artificial sequence
  SiRNA target sequence
atgttacaagcagatgggaaata

SEQ ID NO: 5550 - DNA, 23 bp, Artificial sequence
  SiRNA target sequence
tgttacaagcagatgggaaataa

SEQ ID NO: 5551 - DNA, 23 bp, Artificial sequence
  SiRNA target sequence
gttacaagcagatgggaaataaa

SEQ ID NO: 5552 - DNA, 23 bp, Artificial sequence
  SiRNA target sequence
ttacaagcagatgggaaataaaa

SEQ ID NO: 5553 - DNA, 23 bp, Artificial sequence
  SiRNA target sequence
tacaagcagatgggaaataaaaa

SEQ ID NO: 5554 - DNA, 23 bp, Artificial sequence
  SiRNA target sequence
acaagcagatgggaaataaaaaa

SEQ ID NO: 5555 - DNA, 23 bp, Artificial sequence
  SiRNA target sequence
caagcagatgggaaataaaaaaa

SEQ ID NO: 5556 - DNA, 23 bp, Artificial sequence
  SiRNA target sequence
aagcagatgggaaataaaaaaaa

SEQ ID NO: 5557 - DNA, 23 bp, Artificial sequence
  SiRNA target sequence
agcagatgggaaataaaaaaaaa

SEQ ID NO: 5558 - DNA, 23 bp, Artificial sequence
  SiRNA target sequence
gcagatgggaaataaaaaaaaat

SEQ ID NO: 5559 - DNA, 23 bp, Artificial sequence
  SiRNA target sequence
cagatgggaaataaaaaaaaatt

SEQ ID NO: 5560 - DNA, 23 bp, Artificial sequence
  SiRNA target sequence
agatgggaaataaaaaaaaattt

SEQ ID NO: 5561 - DNA, 23 bp, Artificial sequence
  SiRNA target sequence
gatgggaaataaaaaaaaatttc

SEQ ID NO: 5562 - DNA, 23 bp, Artificial sequence
  SiRNA target sequence
atgggaaataaaaaaaaatttct

SEQ ID NO: 5563 - DNA, 23 bp, Artificial sequence
  SiRNA target sequence
tgggaaataaaaaaaaatttctt

SEQ ID NO: 5564 - DNA, 23 bp, Artificial sequence
  SiRNA target sequence
gggaaataaaaaaaaatttctta

SEQ ID NO: 5565 - DNA, 23 bp, Artificial sequence
  SiRNA target sequence
ggaaataaaaaaaaatttcttaa

SEQ ID NO: 5566 - DNA, 23 bp, Artificial sequence
  SiRNA target sequence
gaaataaaaaaaaatttcttaag

SEQ ID NO: 5567 - DNA, 23 bp, Artificial sequence
  SiRNA target sequence
aaataaaaaaaaatttcttaagg

SEQ ID NO: 5568 - DNA, 23 bp, Artificial sequence
  SiRNA target sequence
aataaaaaaaaatttcttaagga

SEQ ID NO: 5569 - DNA, 23 bp, Artificial sequence
  SiRNA target sequence
ataaaaaaaaatttcttaaggat

SEQ ID NO: 5570 - DNA, 23 bp, Artificial sequence
  SiRNA target sequence
taaaaaaaaatttcttaaggatt

SEQ ID NO: 5571 - DNA, 23 bp, Artificial sequence
  SiRNA target sequence
aaaaaaaaatttcttaaggattt

SEQ ID NO: 5572 - DNA, 23 bp, Artificial sequence
  SiRNA target sequence
aaaaaaaatttcttaaggattta

SEQ ID NO: 5573 - DNA, 23 bp, Artificial sequence
  SiRNA target sequence
aaaaaaatttcttaaggatttag

SEQ ID NO: 5574 - DNA, 23 bp, Artificial sequence
  SiRNA target sequence
aaaaaatttcttaaggatttagc

SEQ ID NO: 5575 - DNA, 23 bp, Artificial sequence
  SiRNA target sequence
aaaaatttcttaaggatttagca

SEQ ID NO: 5576 - DNA, 23 bp, Artificial sequence
  SiRNA target sequence
aaaatttcttaaggatttagcac

SEQ ID NO: 5577 - DNA, 23 bp, Artificial sequence
  SiRNA target sequence
aaatttcttaaggatttagcact

SEQ ID NO: 5578 - DNA, 23 bp, Artificial sequence
  SiRNA target sequence
aatttcttaaggatttagcactt

SEQ ID NO: 5579 - DNA, 23 bp, Artificial sequence
  SiRNA target sequence
atttcttaaggatttagcacttt

SEQ ID NO: 5580 - DNA, 23 bp, Artificial sequence
  SiRNA target sequence
tttcttaaggatttagcacttta

SEQ ID NO: 5581 - DNA, 23 bp, Artificial sequence
  SiRNA target sequence
ttcttaaggatttagcactttat

SEQ ID NO: 5582 - DNA, 23 bp, Artificial sequence
  SiRNA target sequence
tcttaaggatttagcactttatg

SEQ ID NO: 5583 - DNA, 23 bp, Artificial sequence
  SiRNA target sequence
cttaaggatttagcactttatga

SEQ ID NO: 5584 - DNA, 23 bp, Artificial sequence
  SiRNA target sequence
ttaaggatttagcactttatgaa

SEQ ID NO: 5585 - DNA, 23 bp, Artificial sequence
  SiRNA target sequence
taaggatttagcactttatgaaa

SEQ ID NO: 5586 - DNA, 23 bp, Artificial sequence
  SiRNA target sequence
aaggatttagcactttatgaaac

SEQ ID NO: 5587 - DNA, 23 bp, Artificial sequence
  SiRNA target sequence
aggatttagcactttatgaaaca

SEQ ID NO: 5588 - DNA, 23 bp, Artificial sequence
  SiRNA target sequence
ggatttagcactttatgaaacat

SEQ ID NO: 5589 - DNA, 23 bp, Artificial sequence
  SiRNA target sequence
gatttagcactttatgaaacatt

SEQ ID NO: 5590 - DNA, 23 bp, Artificial sequence
  SiRNA target sequence
atttagcactttatgaaacattt

SEQ ID NO: 5591 - DNA, 23 bp, Artificial sequence
  SiRNA target sequence
tttagcactttatgaaacatttg

SEQ ID NO: 5592 - DNA, 23 bp, Artificial sequence
  SiRNA target sequence
ttagcactttatgaaacatttgc

SEQ ID NO: 5593 - DNA, 23 bp, Artificial sequence
  SiRNA target sequence
tagcactttatgaaacatttgct

SEQ ID NO: 5594 - DNA, 23 bp, Artificial sequence
  SiRNA target sequence
agcactttatgaaacatttgcta

SEQ ID NO: 5595 - DNA, 23 bp, Artificial sequence
  SiRNA target sequence
gcactttatgaaacatttgctaa

SEQ ID NO: 5596 - DNA, 23 bp, Artificial sequence
  SiRNA target sequence
cactttatgaaacatttgctaat

SEQ ID NO: 5597 - DNA, 23 bp, Artificial sequence
  SiRNA target sequence
actttatgaaacatttgctaata

SEQ ID NO: 5598 - DNA, 23 bp, Artificial sequence
  SiRNA target sequence
ctttatgaaacatttgctaataa

SEQ ID NO: 5599 - DNA, 23 bp, Artificial sequence
  SiRNA target sequence
tttatgaaacatttgctaataat

SEQ ID NO: 5600 - DNA, 23 bp, Artificial sequence
  SiRNA target sequence
ttatgaaacatttgctaataata

SEQ ID NO: 5601 - DNA, 23 bp, Artificial sequence
  SiRNA target sequence
tatgaaacatttgctaataataa

SEQ ID NO: 5602 - DNA, 23 bp, Artificial sequence
  SiRNA target sequence
atgaaacatttgctaataataaa

SEQ ID NO: 5603 - DNA, 23 bp, Artificial sequence
  SiRNA target sequence
tgaaacatttgctaataataaag

SEQ ID NO: 5604 - DNA, 23 bp, Artificial sequence
  SiRNA target sequence
gaaacatttgctaataataaaga

SEQ ID NO: 5605 - DNA, 23 bp, Artificial sequence
  SiRNA target sequence
aaacatttgctaataataaagaa

SEQ ID NO: 5606 - DNA, 23 bp, Artificial sequence
  SiRNA target sequence
aacatttgctaataataaagaag

SEQ ID NO: 5607 - DNA, 23 bp, Artificial sequence
  SiRNA target sequence
acatttgctaataataaagaagt

SEQ ID NO: 5608 - DNA, 23 bp, Artificial sequence
  SiRNA target sequence
catttgctaataataaagaagtc

SEQ ID NO: 5609 - DNA, 23 bp, Artificial sequence
  SiRNA target sequence
atttgctaataataaagaagtcc

SEQ ID NO: 5610 - DNA, 23 bp, Artificial sequence
  SiRNA target sequence
tttgctaataataaagaagtcca

SEQ ID NO: 5611 - DNA, 23 bp, Artificial sequence
  SiRNA target sequence
ttgctaataataaagaagtccaa

SEQ ID NO: 5612 - DNA, 23 bp, Artificial sequence
  SiRNA target sequence
tgctaataataaagaagtccaag

SEQ ID NO: 5613 - DNA, 23 bp, Artificial sequence
  SiRNA target sequence
gctaataataaagaagtccaaga

SEQ ID NO: 5614 - DNA, 23 bp, Artificial sequence
  SiRNA target sequence
ctaataataaagaagtccaagat

SEQ ID NO: 5615 - DNA, 23 bp, Artificial sequence
  SiRNA target sequence
taataataaagaagtccaagatg

SEQ ID NO: 5616 - DNA, 23 bp, Artificial sequence
  SiRNA target sequence
aataataaagaagtccaagatga

SEQ ID NO: 5617 - DNA, 23 bp, Artificial sequence
  SiRNA target sequence
ataataaagaagtccaagatgaa

SEQ ID NO: 5618 - DNA, 23 bp, Artificial sequence
  SiRNA target sequence
taataaagaagtccaagatgaaa

SEQ ID NO: 5619 - DNA, 23 bp, Artificial sequence
  SiRNA target sequence
aataaagaagtccaagatgaaat

SEQ ID NO: 5620 - DNA, 23 bp, Artificial sequence
  SiRNA target sequence
ataaagaagtccaagatgaaatt

SEQ ID NO: 5621 - DNA, 23 bp, Artificial sequence
  SiRNA target sequence
taaagaagtccaagatgaaatta

SEQ ID NO: 5622 - DNA, 23 bp, Artificial sequence
  SiRNA target sequence
aaagaagtccaagatgaaattat

SEQ ID NO: 5623 - DNA, 23 bp, Artificial sequence
  SiRNA target sequence
aagaagtccaagatgaaattatg

SEQ ID NO: 5624 - DNA, 23 bp, Artificial sequence
  SiRNA target sequence
agaagtccaagatgaaattatgc

SEQ ID NO: 5625 - DNA, 23 bp, Artificial sequence
  SiRNA target sequence
gaagtccaagatgaaattatgca

SEQ ID NO: 5626 - DNA, 23 bp, Artificial sequence
  SiRNA target sequence
aagtccaagatgaaattatgcag

SEQ ID NO: 5627 - DNA, 23 bp, Artificial sequence
  SiRNA target sequence
agtccaagatgaaattatgcaga

SEQ ID NO: 5628 - DNA, 23 bp, Artificial sequence
  SiRNA target sequence
gtccaagatgaaattatgcagac

SEQ ID NO: 5629 - DNA, 23 bp, Artificial sequence
  SiRNA target sequence
tccaagatgaaattatgcagact

SEQ ID NO: 5630 - DNA, 23 bp, Artificial sequence
  SiRNA target sequence
ccaagatgaaattatgcagactg

SEQ ID NO: 5631 - DNA, 23 bp, Artificial sequence
  SiRNA target sequence
caagatgaaattatgcagactgt

SEQ ID NO: 5632 - DNA, 23 bp, Artificial sequence
  SiRNA target sequence
aagatgaaattatgcagactgtt

SEQ ID NO: 5633 - DNA, 23 bp, Artificial sequence
  SiRNA target sequence
agatgaaattatgcagactgtta

SEQ ID NO: 5634 - DNA, 23 bp, Artificial sequence
  SiRNA target sequence
gatgaaattatgcagactgttaa

SEQ ID NO: 5635 - DNA, 23 bp, Artificial sequence
  SiRNA target sequence
atgaaattatgcagactgttaaa

SEQ ID NO: 5636 - DNA, 23 bp, Artificial sequence
  SiRNA target sequence
tgaaattatgcagactgttaaag

SEQ ID NO: 5637 - DNA, 23 bp, Artificial sequence
  SiRNA target sequence
gaaattatgcagactgttaaaga

SEQ ID NO: 5638 - DNA, 23 bp, Artificial sequence
  SiRNA target sequence
aaattatgcagactgttaaagaa

SEQ ID NO: 5639 - DNA, 23 bp, Artificial sequence
  SiRNA target sequence
aattatgcagactgttaaagaaa

SEQ ID NO: 5640 - DNA, 23 bp, Artificial sequence
  SiRNA target sequence
attatgcagactgttaaagaaat

SEQ ID NO: 5641 - DNA, 23 bp, Artificial sequence
  SiRNA target sequence
ttatgcagactgttaaagaaatt

SEQ ID NO: 5642 - DNA, 23 bp, Artificial sequence
  SiRNA target sequence
tatgcagactgttaaagaaattt

SEQ ID NO: 5643 - DNA, 23 bp, Artificial sequence
  SiRNA target sequence
atgcagactgttaaagaaatttg

SEQ ID NO: 5644 - DNA, 23 bp, Artificial sequence
  SiRNA target sequence
tgcagactgttaaagaaatttgt

SEQ ID NO: 5645 - DNA, 23 bp, Artificial sequence
  SiRNA target sequence
gcagactgttaaagaaatttgtg

SEQ ID NO: 5646 - DNA, 23 bp, Artificial sequence
  SiRNA target sequence
cagactgttaaagaaatttgtga

SEQ ID NO: 5647 - DNA, 23 bp, Artificial sequence
  SiRNA target sequence
agactgttaaagaaatttgtgaa

SEQ ID NO: 5648 - DNA, 23 bp, Artificial sequence
  SiRNA target sequence
gactgttaaagaaatttgtgaag

SEQ ID NO: 5649 - DNA, 23 bp, Artificial sequence
  SiRNA target sequence
actgttaaagaaatttgtgaaga

SEQ ID NO: 5650 - DNA, 23 bp, Artificial sequence
  SiRNA target sequence
ctgttaaagaaatttgtgaagaa

SEQ ID NO: 5651 - DNA, 23 bp, Artificial sequence
  SiRNA target sequence
tgttaaagaaatttgtgaagaag

SEQ ID NO: 5652 - DNA, 23 bp, Artificial sequence
  SiRNA target sequence
gttaaagaaatttgtgaagaaga

SEQ ID NO: 5653 - DNA, 23 bp, Artificial sequence
  SiRNA target sequence
ttaaagaaatttgtgaagaagaa

SEQ ID NO: 5654 - DNA, 23 bp, Artificial sequence
  SiRNA target sequence
taaagaaatttgtgaagaagaag

SEQ ID NO: 5655 - DNA, 23 bp, Artificial sequence
  SiRNA target sequence
aaagaaatttgtgaagaagaagt

SEQ ID NO: 5656 - DNA, 23 bp, Artificial sequence
  SiRNA target sequence
aagaaatttgtgaagaagaagtg

SEQ ID NO: 5657 - DNA, 23 bp, Artificial sequence
  SiRNA target sequence
agaaatttgtgaagaagaagtga

SEQ ID NO: 5658 - DNA, 23 bp, Artificial sequence
  SiRNA target sequence
gaaatttgtgaagaagaagtgaa

SEQ ID NO: 5659 - DNA, 23 bp, Artificial sequence
  SiRNA target sequence
aaatttgtgaagaagaagtgaat

SEQ ID NO: 5660 - DNA, 23 bp, Artificial sequence
  SiRNA target sequence
aatttgtgaagaagaagtgaatg

SEQ ID NO: 5661 - DNA, 23 bp, Artificial sequence
  SiRNA target sequence
atttgtgaagaagaagtgaatga

SEQ ID NO: 5662 - DNA, 23 bp, Artificial sequence
  SiRNA target sequence
tttgtgaagaagaagtgaatgag

SEQ ID NO: 5663 - DNA, 23 bp, Artificial sequence
  SiRNA target sequence
ttgtgaagaagaagtgaatgagt

SEQ ID NO: 5664 - DNA, 23 bp, Artificial sequence
  SiRNA target sequence
tgtgaagaagaagtgaatgagtt

SEQ ID NO: 5665 - DNA, 23 bp, Artificial sequence
  SiRNA target sequence
gtgaagaagaagtgaatgagttt

SEQ ID NO: 5666 - DNA, 23 bp, Artificial sequence
  SiRNA target sequence
tgaagaagaagtgaatgagttta

SEQ ID NO: 5667 - DNA, 23 bp, Artificial sequence
  SiRNA target sequence
gaagaagaagtgaatgagtttat

SEQ ID NO: 5668 - DNA, 23 bp, Artificial sequence
  SiRNA target sequence
aagaagaagtgaatgagtttatt

SEQ ID NO: 5669 - DNA, 23 bp, Artificial sequence
  SiRNA target sequence
agaagaagtgaatgagtttattg

SEQ ID NO: 5670 - DNA, 23 bp, Artificial sequence
  SiRNA target sequence
gaagaagtgaatgagtttattga

SEQ ID NO: 5671 - DNA, 23 bp, Artificial sequence
  SiRNA target sequence
aagaagtgaatgagtttattgaa

SEQ ID NO: 5672 - DNA, 23 bp, Artificial sequence
  SiRNA target sequence
agaagtgaatgagtttattgaac

SEQ ID NO: 5673 - DNA, 23 bp, Artificial sequence
  SiRNA target sequence
gaagtgaatgagtttattgaaca

SEQ ID NO: 5674 - DNA, 23 bp, Artificial sequence
  SiRNA target sequence
aagtgaatgagtttattgaacaa

SEQ ID NO: 5675 - DNA, 23 bp, Artificial sequence
  SiRNA target sequence
agtgaatgagtttattgaacaag

SEQ ID NO: 5676 - DNA, 23 bp, Artificial sequence
  SiRNA target sequence
gtgaatgagtttattgaacaaga

SEQ ID NO: 5677 - DNA, 23 bp, Artificial sequence
  SiRNA target sequence
tgaatgagtttattgaacaagaa

SEQ ID NO: 5678 - DNA, 23 bp, Artificial sequence
  SiRNA target sequence
gaatgagtttattgaacaagaag

SEQ ID NO: 5679 - DNA, 23 bp, Artificial sequence
  SiRNA target sequence
aatgagtttattgaacaagaagg

SEQ ID NO: 5680 - DNA, 23 bp, Artificial sequence
  SiRNA target sequence
atgagtttattgaacaagaaggt

SEQ ID NO: 5681 - DNA, 23 bp, Artificial sequence
  SiRNA target sequence
tgagtttattgaacaagaaggtt

SEQ ID NO: 5682 - DNA, 23 bp, Artificial sequence
  SiRNA target sequence
gagtttattgaacaagaaggttt

SEQ ID NO: 5683 - DNA, 23 bp, Artificial sequence
  SiRNA target sequence
agtttattgaacaagaaggttta

SEQ ID NO: 5684 - DNA, 23 bp, Artificial sequence
  SiRNA target sequence
gtttattgaacaagaaggtttaa

SEQ ID NO: 5685 - DNA, 23 bp, Artificial sequence
  SiRNA target sequence
tttattgaacaagaaggtttaaa

SEQ ID NO: 5686 - DNA, 23 bp, Artificial sequence
  SiRNA target sequence
ttattgaacaagaaggtttaaaa

SEQ ID NO: 5687 - DNA, 23 bp, Artificial sequence
  SiRNA target sequence
tattgaacaagaaggtttaaaaa

SEQ ID NO: 5688 - DNA, 23 bp, Artificial sequence
  SiRNA target sequence
attgaacaagaaggtttaaaaat

SEQ ID NO: 5689 - DNA, 23 bp, Artificial sequence
  SiRNA target sequence
ttgaacaagaaggtttaaaaatt

SEQ ID NO: 5690 - DNA, 23 bp, Artificial sequence
  SiRNA target sequence
tgaacaagaaggtttaaaaatta

SEQ ID NO: 5691 - DNA, 23 bp, Artificial sequence
  SiRNA target sequence
gaacaagaaggtttaaaaattaa

SEQ ID NO: 5692 - DNA, 23 bp, Artificial sequence
  SiRNA target sequence
aacaagaaggtttaaaaattaat

SEQ ID NO: 5693 - DNA, 23 bp, Artificial sequence
  SiRNA target sequence
acaagaaggtttaaaaattaata

SEQ ID NO: 5694 - DNA, 23 bp, Artificial sequence
  SiRNA target sequence
caagaaggtttaaaaattaataa

SEQ ID NO: 5695 - DNA, 23 bp, Artificial sequence
  SiRNA target sequence
aagaaggtttaaaaattaataaa

SEQ ID NO: 5696 - DNA, 23 bp, Artificial sequence
  SiRNA target sequence
agaaggtttaaaaattaataaag

SEQ ID NO: 5697 - DNA, 23 bp, Artificial sequence
  SiRNA target sequence
gaaggtttaaaaattaataaaga

SEQ ID NO: 5698 - DNA, 23 bp, Artificial sequence
  SiRNA target sequence
aaggtttaaaaattaataaagaa

SEQ ID NO: 5699 - DNA, 23 bp, Artificial sequence
  SiRNA target sequence
aggtttaaaaattaataaagaag

SEQ ID NO: 5700 - DNA, 23 bp, Artificial sequence
  SiRNA target sequence
ggtttaaaaattaataaagaaga

SEQ ID NO: 5701 - DNA, 23 bp, Artificial sequence
  SiRNA target sequence
gtttaaaaattaataaagaagat

SEQ ID NO: 5702 - DNA, 23 bp, Artificial sequence
  SiRNA target sequence
tttaaaaattaataaagaagatg

SEQ ID NO: 5703 - DNA, 23 bp, Artificial sequence
  SiRNA target sequence
ttaaaaattaataaagaagatgt

SEQ ID NO: 5704 - DNA, 23 bp, Artificial sequence
  SiRNA target sequence
taaaaattaataaagaagatgtg

SEQ ID NO: 5705 - DNA, 23 bp, Artificial sequence
  SiRNA target sequence
aaaaattaataaagaagatgtgc

SEQ ID NO: 5706 - DNA, 23 bp, Artificial sequence
  SiRNA target sequence
aaaattaataaagaagatgtgct

SEQ ID NO: 5707 - DNA, 23 bp, Artificial sequence
  SiRNA target sequence
aaattaataaagaagatgtgcta

SEQ ID NO: 5708 - DNA, 23 bp, Artificial sequence
  SiRNA target sequence
aattaataaagaagatgtgctaa

SEQ ID NO: 5709 - DNA, 23 bp, Artificial sequence
  SiRNA target sequence
attaataaagaagatgtgctaag

SEQ ID NO: 5710 - DNA, 23 bp, Artificial sequence
  SiRNA target sequence
ttaataaagaagatgtgctaaga

SEQ ID NO: 5711 - DNA, 23 bp, Artificial sequence
  SiRNA target sequence
taataaagaagatgtgctaagag

SEQ ID NO: 5712 - DNA, 23 bp, Artificial sequence
  SiRNA target sequence
aataaagaagatgtgctaagagg

SEQ ID NO: 5713 - DNA, 23 bp, Artificial sequence
  SiRNA target sequence
ataaagaagatgtgctaagagga

SEQ ID NO: 5714 - DNA, 23 bp, Artificial sequence
  SiRNA target sequence
taaagaagatgtgctaagaggac

SEQ ID NO: 5715 - DNA, 23 bp, Artificial sequence
  SiRNA target sequence
aaagaagatgtgctaagaggact

SEQ ID NO: 5716 - DNA, 23 bp, Artificial sequence
  SiRNA target sequence
aagaagatgtgctaagaggactt

SEQ ID NO: 5717 - DNA, 23 bp, Artificial sequence
  SiRNA target sequence
agaagatgtgctaagaggacttg

SEQ ID NO: 5718 - DNA, 23 bp, Artificial sequence
  SiRNA target sequence
gaagatgtgctaagaggacttgt

SEQ ID NO: 5719 - DNA, 23 bp, Artificial sequence
  SiRNA target sequence
aagatgtgctaagaggacttgtt

SEQ ID NO: 5720 - DNA, 23 bp, Artificial sequence
  SiRNA target sequence
agatgtgctaagaggacttgttt

SEQ ID NO: 5721 - DNA, 23 bp, Artificial sequence
  SiRNA target sequence
gatgtgctaagaggacttgtttc

SEQ ID NO: 5722 - DNA, 23 bp, Artificial sequence
  SiRNA target sequence
atgtgctaagaggacttgtttca

SEQ ID NO: 5723 - DNA, 23 bp, Artificial sequence
  SiRNA target sequence
tgtgctaagaggacttgtttcaa

SEQ ID NO: 5724 - DNA, 23 bp, Artificial sequence
  SiRNA target sequence
gtgctaagaggacttgtttcaat

SEQ ID NO: 5725 - DNA, 23 bp, Artificial sequence
  SiRNA target sequence
tgctaagaggacttgtttcaata

SEQ ID NO: 5726 - DNA, 23 bp, Artificial sequence
  SiRNA target sequence
gctaagaggacttgtttcaataa

SEQ ID NO: 5727 - DNA, 23 bp, Artificial sequence
  SiRNA target sequence
ctaagaggacttgtttcaataaa

SEQ ID NO: 5728 - DNA, 23 bp, Artificial sequence
  SiRNA target sequence
taagaggacttgtttcaataaaa

SEQ ID NO: 5729 - DNA, 23 bp, Artificial sequence
  SiRNA target sequence
aagaggacttgtttcaataaaaa

SEQ ID NO: 5730 - DNA, 23 bp, Artificial sequence
  SiRNA target sequence
agaggacttgtttcaataaaaaa

SEQ ID NO: 5731 - DNA, 23 bp, Artificial sequence
  SiRNA target sequence
gaggacttgtttcaataaaaaat

SEQ ID NO: 5732 - DNA, 23 bp, Artificial sequence
  SiRNA target sequence
aggacttgtttcaataaaaaata

SEQ ID NO: 5733 - DNA, 23 bp, Artificial sequence
  SiRNA target sequence
ggacttgtttcaataaaaaatat

SEQ ID NO: 5734 - DNA, 23 bp, Artificial sequence
  SiRNA target sequence
gacttgtttcaataaaaaatata

SEQ ID NO: 5735 - DNA, 23 bp, Artificial sequence
  SiRNA target sequence
acttgtttcaataaaaaatataa

SEQ ID NO: 5736 - DNA, 23 bp, Artificial sequence
  SiRNA target sequence
cttgtttcaataaaaaatataaa

SEQ ID NO: 5737 - DNA, 23 bp, Artificial sequence
  SiRNA target sequence
ttgtttcaataaaaaatataaat

SEQ ID NO: 5738 - DNA, 23 bp, Artificial sequence
  SiRNA target sequence
tgtttcaataaaaaatataaatg

SEQ ID NO: 5739 - DNA, 23 bp, Artificial sequence
  SiRNA target sequence
gtttcaataaaaaatataaatga

SEQ ID NO: 5740 - DNA, 23 bp, Artificial sequence
  SiRNA target sequence
tttcaataaaaaatataaatgag

SEQ ID NO: 5741 - DNA, 23 bp, Artificial sequence
  SiRNA target sequence
ttcaataaaaaatataaatgaga

SEQ ID NO: 5742 - DNA, 23 bp, Artificial sequence
  SiRNA target sequence
tcaataaaaaatataaatgagat

SEQ ID NO: 5743 - DNA, 23 bp, Artificial sequence
  SiRNA target sequence
caataaaaaatataaatgagatt

SEQ ID NO: 5744 - DNA, 23 bp, Artificial sequence
  SiRNA target sequence
aataaaaaatataaatgagattt

SEQ ID NO: 5745 - DNA, 23 bp, Artificial sequence
  SiRNA target sequence
ataaaaaatataaatgagattta

SEQ ID NO: 5746 - DNA, 23 bp, Artificial sequence
  SiRNA target sequence
taaaaaatataaatgagatttat

SEQ ID NO: 5747 - DNA, 23 bp, Artificial sequence
  SiRNA target sequence
aaaaaatataaatgagatttatg

SEQ ID NO: 5748 - DNA, 23 bp, Artificial sequence
  SiRNA target sequence
aaaaatataaatgagatttatga

SEQ ID NO: 5749 - DNA, 23 bp, Artificial sequence
  SiRNA target sequence
aaaatataaatgagatttatgat

SEQ ID NO: 5750 - DNA, 23 bp, Artificial sequence
  SiRNA target sequence
aaatataaatgagatttatgatg

SEQ ID NO: 5751 - DNA, 23 bp, Artificial sequence
  SiRNA target sequence
aatataaatgagatttatgatgc

SEQ ID NO: 5752 - DNA, 23 bp, Artificial sequence
  SiRNA target sequence
atataaatgagatttatgatgca

SEQ ID NO: 5753 - DNA, 23 bp, Artificial sequence
  SiRNA target sequence
tataaatgagatttatgatgcat

SEQ ID NO: 5754 - DNA, 23 bp, Artificial sequence
  SiRNA target sequence
ataaatgagatttatgatgcatt

SEQ ID NO: 5755 - DNA, 23 bp, Artificial sequence
  SiRNA target sequence
taaatgagatttatgatgcattt

SEQ ID NO: 5756 - DNA, 23 bp, Artificial sequence
  SiRNA target sequence
aaatgagatttatgatgcatttg

SEQ ID NO: 5757 - DNA, 23 bp, Artificial sequence
  SiRNA target sequence
aatgagatttatgatgcatttgg

SEQ ID NO: 5758 - DNA, 23 bp, Artificial sequence
  SiRNA target sequence
atgagatttatgatgcatttgga

SEQ ID NO: 5759 - DNA, 23 bp, Artificial sequence
  SiRNA target sequence
tgagatttatgatgcatttggag

SEQ ID NO: 5760 - DNA, 23 bp, Artificial sequence
  SiRNA target sequence
gagatttatgatgcatttggagg

SEQ ID NO: 5761 - DNA, 23 bp, Artificial sequence
  SiRNA target sequence
agatttatgatgcatttggaggt

SEQ ID NO: 5762 - DNA, 23 bp, Artificial sequence
  SiRNA target sequence
gatttatgatgcatttggaggta

SEQ ID NO: 5763 - DNA, 23 bp, Artificial sequence
  SiRNA target sequence
atttatgatgcatttggaggtaa

SEQ ID NO: 5764 - DNA, 23 bp, Artificial sequence
  SiRNA target sequence
tttatgatgcatttggaggtaaa

SEQ ID NO: 5765 - DNA, 23 bp, Artificial sequence
  SiRNA target sequence
ttatgatgcatttggaggtaaat

SEQ ID NO: 5766 - DNA, 23 bp, Artificial sequence
  SiRNA target sequence
tatgatgcatttggaggtaaatc

SEQ ID NO: 5767 - DNA, 23 bp, Artificial sequence
  SiRNA target sequence
atgatgcatttggaggtaaatct

SEQ ID NO: 5768 - DNA, 23 bp, Artificial sequence
  SiRNA target sequence
tgatgcatttggaggtaaatcta

SEQ ID NO: 5769 - DNA, 23 bp, Artificial sequence
  SiRNA target sequence
gatgcatttggaggtaaatctaa

SEQ ID NO: 5770 - DNA, 23 bp, Artificial sequence
  SiRNA target sequence
atgcatttggaggtaaatctaag

SEQ ID NO: 5771 - DNA, 23 bp, Artificial sequence
  SiRNA target sequence
tgcatttggaggtaaatctaaga

SEQ ID NO: 5772 - DNA, 23 bp, Artificial sequence
  SiRNA target sequence
gcatttggaggtaaatctaagaa

SEQ ID NO: 5773 - DNA, 23 bp, Artificial sequence
  SiRNA target sequence
catttggaggtaaatctaagaag

SEQ ID NO: 5774 - DNA, 23 bp, Artificial sequence
  SiRNA target sequence
atttggaggtaaatctaagaagt

SEQ ID NO: 5775 - DNA, 23 bp, Artificial sequence
  SiRNA target sequence
tttggaggtaaatctaagaagtt

SEQ ID NO: 5776 - DNA, 23 bp, Artificial sequence
  SiRNA target sequence
ttggaggtaaatctaagaagttt

SEQ ID NO: 5777 - DNA, 23 bp, Artificial sequence
  SiRNA target sequence
tggaggtaaatctaagaagttta

SEQ ID NO: 5778 - DNA, 23 bp, Artificial sequence
  SiRNA target sequence
ggaggtaaatctaagaagtttaa

SEQ ID NO: 5779 - DNA, 23 bp, Artificial sequence
  SiRNA target sequence
gaggtaaatctaagaagtttaaa

SEQ ID NO: 5780 - DNA, 23 bp, Artificial sequence
  SiRNA target sequence
aggtaaatctaagaagtttaaat

SEQ ID NO: 5781 - DNA, 23 bp, Artificial sequence
  SiRNA target sequence
ggtaaatctaagaagtttaaatt

SEQ ID NO: 5782 - DNA, 23 bp, Artificial sequence
  SiRNA target sequence
gtaaatctaagaagtttaaattt

SEQ ID NO: 5783 - DNA, 23 bp, Artificial sequence
  SiRNA target sequence
taaatctaagaagtttaaatttt

SEQ ID NO: 5784 - DNA, 23 bp, Artificial sequence
  SiRNA target sequence
aaatctaagaagtttaaattttc

SEQ ID NO: 5785 - DNA, 23 bp, Artificial sequence
  SiRNA target sequence
aatctaagaagtttaaattttct

SEQ ID NO: 5786 - DNA, 23 bp, Artificial sequence
  SiRNA target sequence
atctaagaagtttaaattttcta

SEQ ID NO: 5787 - DNA, 23 bp, Artificial sequence
  SiRNA target sequence
tctaagaagtttaaattttctaa

SEQ ID NO: 5788 - DNA, 23 bp, Artificial sequence
  SiRNA target sequence
ctaagaagtttaaattttctaat

SEQ ID NO: 5789 - DNA, 23 bp, Artificial sequence
  SiRNA target sequence
taagaagtttaaattttctaatg

SEQ ID NO: 5790 - DNA, 23 bp, Artificial sequence
  SiRNA target sequence
aagaagtttaaattttctaatga

SEQ ID NO: 5791 - DNA, 23 bp, Artificial sequence
  SiRNA target sequence
agaagtttaaattttctaatgat

SEQ ID NO: 5792 - DNA, 23 bp, Artificial sequence
  SiRNA target sequence
gaagtttaaattttctaatgatg

SEQ ID NO: 5793 - DNA, 23 bp, Artificial sequence
  SiRNA target sequence
aagtttaaattttctaatgatga

SEQ ID NO: 5794 - DNA, 23 bp, Artificial sequence
  SiRNA target sequence
agtttaaattttctaatgatgaa

SEQ ID NO: 5795 - DNA, 23 bp, Artificial sequence
  SiRNA target sequence
gtttaaattttctaatgatgaaa

SEQ ID NO: 5796 - DNA, 23 bp, Artificial sequence
  SiRNA target sequence
tttaaattttctaatgatgaaaa

SEQ ID NO: 5797 - DNA, 23 bp, Artificial sequence
  SiRNA target sequence
ttaaattttctaatgatgaaaag

SEQ ID NO: 5798 - DNA, 23 bp, Artificial sequence
  SiRNA target sequence
taaattttctaatgatgaaaagg

SEQ ID NO: 5799 - DNA, 23 bp, Artificial sequence
  SiRNA target sequence
aaattttctaatgatgaaaagga

SEQ ID NO: 5800 - DNA, 23 bp, Artificial sequence
  SiRNA target sequence
aattttctaatgatgaaaaggaa

SEQ ID NO: 5801 - DNA, 23 bp, Artificial sequence
  SiRNA target sequence
attttctaatgatgaaaaggaag

SEQ ID NO: 5802 - DNA, 23 bp, Artificial sequence
  SiRNA target sequence
ttttctaatgatgaaaaggaagt

SEQ ID NO: 5803 - DNA, 23 bp, Artificial sequence
  SiRNA target sequence
tttctaatgatgaaaaggaagtg

SEQ ID NO: 5804 - DNA, 23 bp, Artificial sequence
  SiRNA target sequence
ttctaatgatgaaaaggaagtgt

SEQ ID NO: 5805 - DNA, 23 bp, Artificial sequence
  SiRNA target sequence
tctaatgatgaaaaggaagtgtt

SEQ ID NO: 5806 - DNA, 23 bp, Artificial sequence
  SiRNA target sequence
ctaatgatgaaaaggaagtgtta

SEQ ID NO: 5807 - DNA, 23 bp, Artificial sequence
  SiRNA target sequence
taatgatgaaaaggaagtgttaa

SEQ ID NO: 5808 - DNA, 23 bp, Artificial sequence
  SiRNA target sequence
aatgatgaaaaggaagtgttaaa

SEQ ID NO: 5809 - DNA, 23 bp, Artificial sequence
  SiRNA target sequence
atgatgaaaaggaagtgttaaat

SEQ ID NO: 5810 - DNA, 23 bp, Artificial sequence
  SiRNA target sequence
tgatgaaaaggaagtgttaaatc

SEQ ID NO: 5811 - DNA, 23 bp, Artificial sequence
  SiRNA target sequence
gatgaaaaggaagtgttaaatct

SEQ ID NO: 5812 - DNA, 23 bp, Artificial sequence
  SiRNA target sequence
atgaaaaggaagtgttaaatctt

SEQ ID NO: 5813 - DNA, 23 bp, Artificial sequence
  SiRNA target sequence
tgaaaaggaagtgttaaatcttc

SEQ ID NO: 5814 - DNA, 23 bp, Artificial sequence
  SiRNA target sequence
gaaaaggaagtgttaaatcttct

SEQ ID NO: 5815 - DNA, 23 bp, Artificial sequence
  SiRNA target sequence
aaaaggaagtgttaaatcttctt

SEQ ID NO: 5816 - DNA, 23 bp, Artificial sequence
  SiRNA target sequence
aaaggaagtgttaaatcttctta

SEQ ID NO: 5817 - DNA, 23 bp, Artificial sequence
  SiRNA target sequence
aaggaagtgttaaatcttcttaa

SEQ ID NO: 5818 - DNA, 23 bp, Artificial sequence
  SiRNA target sequence
aggaagtgttaaatcttcttaat

SEQ ID NO: 5819 - DNA, 23 bp, Artificial sequence
  SiRNA target sequence
ggaagtgttaaatcttcttaatg

SEQ ID NO: 5820 - DNA, 23 bp, Artificial sequence
  SiRNA target sequence
gaagtgttaaatcttcttaatgc

SEQ ID NO: 5821 - DNA, 23 bp, Artificial sequence
  SiRNA target sequence
aagtgttaaatcttcttaatgcc

SEQ ID NO: 5822 - DNA, 23 bp, Artificial sequence
  SiRNA target sequence
agtgttaaatcttcttaatgcca

SEQ ID NO: 5823 - DNA, 23 bp, Artificial sequence
  SiRNA target sequence
gtgttaaatcttcttaatgccat

SEQ ID NO: 5824 - DNA, 23 bp, Artificial sequence
  SiRNA target sequence
tgttaaatcttcttaatgccatt

SEQ ID NO: 5825 - DNA, 23 bp, Artificial sequence
  SiRNA target sequence
gttaaatcttcttaatgccatta

SEQ ID NO: 5826 - DNA, 23 bp, Artificial sequence
  SiRNA target sequence
ttaaatcttcttaatgccattat

SEQ ID NO: 5827 - DNA, 23 bp, Artificial sequence
  SiRNA target sequence
taaatcttcttaatgccattatt

SEQ ID NO: 5828 - DNA, 23 bp, Artificial sequence
  SiRNA target sequence
aaatcttcttaatgccattattt

SEQ ID NO: 5829 - DNA, 23 bp, Artificial sequence
  SiRNA target sequence
aatcttcttaatgccattatttt

SEQ ID NO: 5830 - DNA, 23 bp, Artificial sequence
  SiRNA target sequence
atcttcttaatgccattatttta

SEQ ID NO: 5831 - DNA, 23 bp, Artificial sequence
  SiRNA target sequence
tcttcttaatgccattattttac

SEQ ID NO: 5832 - DNA, 23 bp, Artificial sequence
  SiRNA target sequence
cttcttaatgccattattttaca

SEQ ID NO: 5833 - DNA, 23 bp, Artificial sequence
  SiRNA target sequence
ttcttaatgccattattttacac

SEQ ID NO: 5834 - DNA, 23 bp, Artificial sequence
  SiRNA target sequence
tcttaatgccattattttacacc

SEQ ID NO: 5835 - DNA, 23 bp, Artificial sequence
  SiRNA target sequence
cttaatgccattattttacacct

SEQ ID NO: 5836 - DNA, 23 bp, Artificial sequence
  SiRNA target sequence
ttaatgccattattttacaccta

SEQ ID NO: 5837 - DNA, 23 bp, Artificial sequence
  SiRNA target sequence
taatgccattattttacacctaa

SEQ ID NO: 5838 - DNA, 23 bp, Artificial sequence
  SiRNA target sequence
aatgccattattttacacctaaa

SEQ ID NO: 5839 - DNA, 23 bp, Artificial sequence
  SiRNA target sequence
atgccattattttacacctaaaa

SEQ ID NO: 5840 - DNA, 23 bp, Artificial sequence
  SiRNA target sequence
tgccattattttacacctaaaag

SEQ ID NO: 5841 - DNA, 23 bp, Artificial sequence
  SiRNA target sequence
gccattattttacacctaaaagg

SEQ ID NO: 5842 - DNA, 23 bp, Artificial sequence
  SiRNA target sequence
ccattattttacacctaaaagga

SEQ ID NO: 5843 - DNA, 23 bp, Artificial sequence
  SiRNA target sequence
cattattttacacctaaaaggaa

SEQ ID NO: 5844 - DNA, 23 bp, Artificial sequence
  SiRNA target sequence
attattttacacctaaaaggaaa

SEQ ID NO: 5845 - DNA, 23 bp, Artificial sequence
  SiRNA target sequence
ttattttacacctaaaaggaaaa

SEQ ID NO: 5846 - DNA, 23 bp, Artificial sequence
  SiRNA target sequence
tattttacacctaaaaggaaaaa

SEQ ID NO: 5847 - DNA, 23 bp, Artificial sequence
  SiRNA target sequence
attttacacctaaaaggaaaaaa

SEQ ID NO: 5848 - DNA, 23 bp, Artificial sequence
  SiRNA target sequence
ttttacacctaaaaggaaaaaaa

SEQ ID NO: 5849 - DNA, 23 bp, Artificial sequence
  SiRNA target sequence
tttacacctaaaaggaaaaaaag

SEQ ID NO: 5850 - DNA, 23 bp, Artificial sequence
  SiRNA target sequence
ttacacctaaaaggaaaaaaaga

SEQ ID NO: 5851 - DNA, 23 bp, Artificial sequence
  SiRNA target sequence
tacacctaaaaggaaaaaaagaa

SEQ ID NO: 5852 - DNA, 23 bp, Artificial sequence
  SiRNA target sequence
acacctaaaaggaaaaaaagaac

SEQ ID NO: 5853 - DNA, 23 bp, Artificial sequence
  SiRNA target sequence
cacctaaaaggaaaaaaagaaca

SEQ ID NO: 5854 - DNA, 23 bp, Artificial sequence
  SiRNA target sequence
acctaaaaggaaaaaaagaacag

SEQ ID NO: 5855 - DNA, 23 bp, Artificial sequence
  SiRNA target sequence
cctaaaaggaaaaaaagaacagg

SEQ ID NO: 5856 - DNA, 23 bp, Artificial sequence
  SiRNA target sequence
ctaaaaggaaaaaaagaacaggc

SEQ ID NO: 5857 - DNA, 23 bp, Artificial sequence
  SiRNA target sequence
taaaaggaaaaaaagaacaggca

SEQ ID NO: 5858 - DNA, 23 bp, Artificial sequence
  SiRNA target sequence
aaaaggaaaaaaagaacaggcaa

SEQ ID NO: 5859 - DNA, 23 bp, Artificial sequence
  SiRNA target sequence
aaaggaaaaaaagaacaggcaat

SEQ ID NO: 5860 - DNA, 23 bp, Artificial sequence
  SiRNA target sequence
aaggaaaaaaagaacaggcaatt

SEQ ID NO: 5861 - DNA, 23 bp, Artificial sequence
  SiRNA target sequence
aggaaaaaaagaacaggcaattc

SEQ ID NO: 5862 - DNA, 23 bp, Artificial sequence
  SiRNA target sequence
ggaaaaaaagaacaggcaattct

SEQ ID NO: 5863 - DNA, 23 bp, Artificial sequence
  SiRNA target sequence
gaaaaaaagaacaggcaattctt

SEQ ID NO: 5864 - DNA, 23 bp, Artificial sequence
  SiRNA target sequence
aaaaaaagaacaggcaattcttt

SEQ ID NO: 5865 - DNA, 23 bp, Artificial sequence
  SiRNA target sequence
aaaaaagaacaggcaattctttt

SEQ ID NO: 5866 - DNA, 23 bp, Artificial sequence
  SiRNA target sequence
aaaaagaacaggcaattctttta

SEQ ID NO: 5867 - DNA, 23 bp, Artificial sequence
  SiRNA target sequence
aaaagaacaggcaattcttttat

SEQ ID NO: 5868 - DNA, 23 bp, Artificial sequence
  SiRNA target sequence
aaagaacaggcaattcttttatt

SEQ ID NO: 5869 - DNA, 23 bp, Artificial sequence
  SiRNA target sequence
aagaacaggcaattcttttatta

SEQ ID NO: 5870 - DNA, 23 bp, Artificial sequence
  SiRNA target sequence
agaacaggcaattcttttattag

SEQ ID NO: 5871 - DNA, 23 bp, Artificial sequence
  SiRNA target sequence
gaacaggcaattcttttattaga

SEQ ID NO: 5872 - DNA, 23 bp, Artificial sequence
  SiRNA target sequence
aacaggcaattcttttattagaa

SEQ ID NO: 5873 - DNA, 23 bp, Artificial sequence
  SiRNA target sequence
acaggcaattcttttattagaaa

SEQ ID NO: 5874 - DNA, 23 bp, Artificial sequence
  SiRNA target sequence
caggcaattcttttattagaaaa

SEQ ID NO: 5875 - DNA, 23 bp, Artificial sequence
  SiRNA target sequence
aggcaattcttttattagaaaaa

SEQ ID NO: 5876 - DNA, 23 bp, Artificial sequence
  SiRNA target sequence
ggcaattcttttattagaaaaat

SEQ ID NO: 5877 - DNA, 23 bp, Artificial sequence
  SiRNA target sequence
gcaattcttttattagaaaaatc

SEQ ID NO: 5878 - DNA, 23 bp, Artificial sequence
  SiRNA target sequence
caattcttttattagaaaaatct

SEQ ID NO: 5879 - DNA, 23 bp, Artificial sequence
  SiRNA target sequence
aattcttttattagaaaaatcta

SEQ ID NO: 5880 - DNA, 23 bp, Artificial sequence
  SiRNA target sequence
attcttttattagaaaaatctac

SEQ ID NO: 5881 - DNA, 23 bp, Artificial sequence
  SiRNA target sequence
ttcttttattagaaaaatctact

SEQ ID NO: 5882 - DNA, 23 bp, Artificial sequence
  SiRNA target sequence
tcttttattagaaaaatctactt

SEQ ID NO: 5883 - DNA, 23 bp, Artificial sequence
  SiRNA target sequence
cttttattagaaaaatctactta

SEQ ID NO: 5884 - DNA, 23 bp, Artificial sequence
  SiRNA target sequence
ttttattagaaaaatctacttat

SEQ ID NO: 5885 - DNA, 23 bp, Artificial sequence
  SiRNA target sequence
tttattagaaaaatctacttata

SEQ ID NO: 5886 - DNA, 23 bp, Artificial sequence
  SiRNA target sequence
ttattagaaaaatctacttataa

SEQ ID NO: 5887 - DNA, 23 bp, Artificial sequence
  SiRNA target sequence
tattagaaaaatctacttataaa

SEQ ID NO: 5888 - DNA, 23 bp, Artificial sequence
  SiRNA target sequence
attagaaaaatctacttataaat

SEQ ID NO: 5889 - DNA, 23 bp, Artificial sequence
  SiRNA target sequence
ttagaaaaatctacttataaata

SEQ ID NO: 5890 - DNA, 23 bp, Artificial sequence
  SiRNA target sequence
tagaaaaatctacttataaatac

SEQ ID NO: 5891 - DNA, 23 bp, Artificial sequence
  SiRNA target sequence
agaaaaatctacttataaataca

SEQ ID NO: 5892 - DNA, 23 bp, Artificial sequence
  SiRNA target sequence
gaaaaatctacttataaatacag

SEQ ID NO: 5893 - DNA, 23 bp, Artificial sequence
  SiRNA target sequence
aaaaatctacttataaatacagt

SEQ ID NO: 5894 - DNA, 23 bp, Artificial sequence
  SiRNA target sequence
aaaatctacttataaatacagta

SEQ ID NO: 5895 - DNA, 23 bp, Artificial sequence
  SiRNA target sequence
aaatctacttataaatacagtat

SEQ ID NO: 5896 - DNA, 23 bp, Artificial sequence
  SiRNA target sequence
aatctacttataaatacagtatc

SEQ ID NO: 5897 - DNA, 23 bp, Artificial sequence
  SiRNA target sequence
atctacttataaatacagtatct

SEQ ID NO: 5898 - DNA, 23 bp, Artificial sequence
  SiRNA target sequence
tctacttataaatacagtatctt

SEQ ID NO: 5899 - DNA, 23 bp, Artificial sequence
  SiRNA target sequence
ctacttataaatacagtatcttg

SEQ ID NO: 5900 - DNA, 23 bp, Artificial sequence
  SiRNA target sequence
tacttataaatacagtatcttgt

SEQ ID NO: 5901 - DNA, 23 bp, Artificial sequence
  SiRNA target sequence
acttataaatacagtatcttgta

SEQ ID NO: 5902 - DNA, 23 bp, Artificial sequence
  SiRNA target sequence
cttataaatacagtatcttgtat

SEQ ID NO: 5903 - DNA, 23 bp, Artificial sequence
  SiRNA target sequence
ttataaatacagtatcttgtata

SEQ ID NO: 5904 - DNA, 23 bp, Artificial sequence
  SiRNA target sequence
tataaatacagtatcttgtatag

SEQ ID NO: 5905 - DNA, 23 bp, Artificial sequence
  SiRNA target sequence
ataaatacagtatcttgtataga

SEQ ID NO: 5906 - DNA, 23 bp, Artificial sequence
  SiRNA target sequence
taaatacagtatcttgtatagag

SEQ ID NO: 5907 - DNA, 23 bp, Artificial sequence
  SiRNA target sequence
aaatacagtatcttgtatagagc

SEQ ID NO: 5908 - DNA, 23 bp, Artificial sequence
  SiRNA target sequence
aatacagtatcttgtatagagca

SEQ ID NO: 5909 - DNA, 23 bp, Artificial sequence
  SiRNA target sequence
atacagtatcttgtatagagcat

SEQ ID NO: 5910 - DNA, 23 bp, Artificial sequence
  SiRNA target sequence
tacagtatcttgtatagagcata

SEQ ID NO: 5911 - DNA, 23 bp, Artificial sequence
  SiRNA target sequence
acagtatcttgtatagagcatat

SEQ ID NO: 5912 - DNA, 23 bp, Artificial sequence
  SiRNA target sequence
cagtatcttgtatagagcatatt

SEQ ID NO: 5913 - DNA, 23 bp, Artificial sequence
  SiRNA target sequence
agtatcttgtatagagcatattt

SEQ ID NO: 5914 - DNA, 23 bp, Artificial sequence
  SiRNA target sequence
gtatcttgtatagagcatatttt

SEQ ID NO: 5915 - DNA, 23 bp, Artificial sequence
  SiRNA target sequence
tatcttgtatagagcatattttc

SEQ ID NO: 5916 - DNA, 23 bp, Artificial sequence
  SiRNA target sequence
atcttgtatagagcatattttct

SEQ ID NO: 5917 - DNA, 23 bp, Artificial sequence
  SiRNA target sequence
tcttgtatagagcatattttctt

SEQ ID NO: 5918 - DNA, 23 bp, Artificial sequence
  SiRNA target sequence
cttgtatagagcatattttctta

SEQ ID NO: 5919 - DNA, 23 bp, Artificial sequence
  SiRNA target sequence
ttgtatagagcatattttcttac

SEQ ID NO: 5920 - DNA, 23 bp, Artificial sequence
  SiRNA target sequence
tgtatagagcatattttcttaca

SEQ ID NO: 5921 - DNA, 23 bp, Artificial sequence
  SiRNA target sequence
gtatagagcatattttcttacat

SEQ ID NO: 5922 - DNA, 23 bp, Artificial sequence
  SiRNA target sequence
tatagagcatattttcttacatt

SEQ ID NO: 5923 - DNA, 23 bp, Artificial sequence
  SiRNA target sequence
atagagcatattttcttacattg

SEQ ID NO: 5924 - DNA, 23 bp, Artificial sequence
  SiRNA target sequence
tagagcatattttcttacattga

SEQ ID NO: 5925 - DNA, 23 bp, Artificial sequence
  SiRNA target sequence
agagcatattttcttacattgaa

SEQ ID NO: 5926 - DNA, 23 bp, Artificial sequence
  SiRNA target sequence
gagcatattttcttacattgaag

SEQ ID NO: 5927 - DNA, 23 bp, Artificial sequence
  SiRNA target sequence
agcatattttcttacattgaaga

SEQ ID NO: 5928 - DNA, 23 bp, Artificial sequence
  SiRNA target sequence
gcatattttcttacattgaagaa

SEQ ID NO: 5929 - DNA, 23 bp, Artificial sequence
  SiRNA target sequence
catattttcttacattgaagaat

SEQ ID NO: 5930 - DNA, 23 bp, Artificial sequence
  SiRNA target sequence
atattttcttacattgaagaatg

SEQ ID NO: 5931 - DNA, 23 bp, Artificial sequence
  SiRNA target sequence
tattttcttacattgaagaatga

SEQ ID NO: 5932 - DNA, 23 bp, Artificial sequence
  SiRNA target sequence
attttcttacattgaagaatgaa

SEQ ID NO: 5933 - DNA, 23 bp, Artificial sequence
  SiRNA target sequence
ttttcttacattgaagaatgaat

SEQ ID NO: 5934 - DNA, 23 bp, Artificial sequence
  SiRNA target sequence
tttcttacattgaagaatgaata

SEQ ID NO: 5935 - DNA, 23 bp, Artificial sequence
  SiRNA target sequence
ttcttacattgaagaatgaatat

SEQ ID NO: 5936 - DNA, 23 bp, Artificial sequence
  SiRNA target sequence
tcttacattgaagaatgaatata

SEQ ID NO: 5937 - DNA, 23 bp, Artificial sequence
  SiRNA target sequence
cttacattgaagaatgaatatat

SEQ ID NO: 5938 - DNA, 23 bp, Artificial sequence
  SiRNA target sequence
ttacattgaagaatgaatatatt

SEQ ID NO: 5939 - DNA, 23 bp, Artificial sequence
  SiRNA target sequence
tacattgaagaatgaatatattt

SEQ ID NO: 5940 - DNA, 23 bp, Artificial sequence
  SiRNA target sequence
acattgaagaatgaatatatttc

SEQ ID NO: 5941 - DNA, 23 bp, Artificial sequence
  SiRNA target sequence
cattgaagaatgaatatatttca

SEQ ID NO: 5942 - DNA, 23 bp, Artificial sequence
  SiRNA target sequence
attgaagaatgaatatatttcat

SEQ ID NO: 5943 - DNA, 23 bp, Artificial sequence
  SiRNA target sequence
ttgaagaatgaatatatttcatc

SEQ ID NO: 5944 - DNA, 23 bp, Artificial sequence
  SiRNA target sequence
tgaagaatgaatatatttcatct

SEQ ID NO: 5945 - DNA, 23 bp, Artificial sequence
  SiRNA target sequence
gaagaatgaatatatttcatctt

SEQ ID NO: 5946 - DNA, 23 bp, Artificial sequence
  SiRNA target sequence
aagaatgaatatatttcatcttc

SEQ ID NO: 5947 - DNA, 23 bp, Artificial sequence
  SiRNA target sequence
agaatgaatatatttcatcttca

SEQ ID NO: 5948 - DNA, 23 bp, Artificial sequence
  SiRNA target sequence
gaatgaatatatttcatcttcat

SEQ ID NO: 5949 - DNA, 23 bp, Artificial sequence
  SiRNA target sequence
aatgaatatatttcatcttcatt

SEQ ID NO: 5950 - DNA, 23 bp, Artificial sequence
  SiRNA target sequence
atgaatatatttcatcttcattg

SEQ ID NO: 5951 - DNA, 23 bp, Artificial sequence
  SiRNA target sequence
tgaatatatttcatcttcattgc

SEQ ID NO: 5952 - DNA, 23 bp, Artificial sequence
  SiRNA target sequence
gaatatatttcatcttcattgcc

SEQ ID NO: 5953 - DNA, 23 bp, Artificial sequence
  SiRNA target sequence
aatatatttcatcttcattgcct

SEQ ID NO: 5954 - DNA, 23 bp, Artificial sequence
  SiRNA target sequence
atatatttcatcttcattgcctt

SEQ ID NO: 5955 - DNA, 23 bp, Artificial sequence
  SiRNA target sequence
tatatttcatcttcattgccttt

SEQ ID NO: 5956 - DNA, 23 bp, Artificial sequence
  SiRNA target sequence
atatttcatcttcattgccttta

SEQ ID NO: 5957 - DNA, 23 bp, Artificial sequence
  SiRNA target sequence
tatttcatcttcattgcctttag

SEQ ID NO: 5958 - DNA, 23 bp, Artificial sequence
  SiRNA target sequence
atttcatcttcattgcctttaga

SEQ ID NO: 5959 - DNA, 23 bp, Artificial sequence
  SiRNA target sequence
tttcatcttcattgcctttagat

SEQ ID NO: 5960 - DNA, 23 bp, Artificial sequence
  SiRNA target sequence
ttcatcttcattgcctttagatg

SEQ ID NO: 5961 - DNA, 23 bp, Artificial sequence
  SiRNA target sequence
tcatcttcattgcctttagatga

SEQ ID NO: 5962 - DNA, 23 bp, Artificial sequence
  SiRNA target sequence
catcttcattgcctttagatgac

SEQ ID NO: 5963 - DNA, 23 bp, Artificial sequence
  SiRNA target sequence
atcttcattgcctttagatgacg

SEQ ID NO: 5964 - DNA, 23 bp, Artificial sequence
  SiRNA target sequence
tcttcattgcctttagatgacga

SEQ ID NO: 5965 - DNA, 23 bp, Artificial sequence
  SiRNA target sequence
cttcattgcctttagatgacgag

SEQ ID NO: 5966 - DNA, 23 bp, Artificial sequence
  SiRNA target sequence
ttcattgcctttagatgacgaga

SEQ ID NO: 5967 - DNA, 23 bp, Artificial sequence
  SiRNA target sequence
tcattgcctttagatgacgagat

SEQ ID NO: 5968 - DNA, 23 bp, Artificial sequence
  SiRNA target sequence
cattgcctttagatgacgagatt

SEQ ID NO: 5969 - DNA, 23 bp, Artificial sequence
  SiRNA target sequence
attgcctttagatgacgagatta

SEQ ID NO: 5970 - DNA, 23 bp, Artificial sequence
  SiRNA target sequence
ttgcctttagatgacgagattac

SEQ ID NO: 5971 - DNA, 23 bp, Artificial sequence
  SiRNA target sequence
tgcctttagatgacgagattact

SEQ ID NO: 5972 - DNA, 23 bp, Artificial sequence
  SiRNA target sequence
gcctttagatgacgagattacta

SEQ ID NO: 5973 - DNA, 23 bp, Artificial sequence
  SiRNA target sequence
cctttagatgacgagattactac

SEQ ID NO: 5974 - DNA, 23 bp, Artificial sequence
  SiRNA target sequence
ctttagatgacgagattactacg

SEQ ID NO: 5975 - DNA, 23 bp, Artificial sequence
  SiRNA target sequence
tttagatgacgagattactacgc

SEQ ID NO: 5976 - DNA, 23 bp, Artificial sequence
  SiRNA target sequence
ttagatgacgagattactacgct

SEQ ID NO: 5977 - DNA, 23 bp, Artificial sequence
  SiRNA target sequence
tagatgacgagattactacgctt

SEQ ID NO: 5978 - DNA, 23 bp, Artificial sequence
  SiRNA target sequence
agatgacgagattactacgcttt

SEQ ID NO: 5979 - DNA, 23 bp, Artificial sequence
  SiRNA target sequence
gatgacgagattactacgcttta

SEQ ID NO: 5980 - DNA, 23 bp, Artificial sequence
  SiRNA target sequence
atgacgagattactacgctttac

SEQ ID NO: 5981 - DNA, 23 bp, Artificial sequence
  SiRNA target sequence
tgacgagattactacgctttact

SEQ ID NO: 5982 - DNA, 23 bp, Artificial sequence
  SiRNA target sequence
gacgagattactacgctttactt

SEQ ID NO: 5983 - DNA, 23 bp, Artificial sequence
  SiRNA target sequence
acgagattactacgctttacttg

SEQ ID NO: 5984 - DNA, 23 bp, Artificial sequence
  SiRNA target sequence
cgagattactacgctttacttgt

SEQ ID NO: 5985 - DNA, 23 bp, Artificial sequence
  SiRNA target sequence
gagattactacgctttacttgta

SEQ ID NO: 5986 - DNA, 23 bp, Artificial sequence
  SiRNA target sequence
agattactacgctttacttgtat

SEQ ID NO: 5987 - DNA, 23 bp, Artificial sequence
  SiRNA target sequence
gattactacgctttacttgtatt

SEQ ID NO: 5988 - DNA, 23 bp, Artificial sequence
  SiRNA target sequence
attactacgctttacttgtattc

SEQ ID NO: 5989 - DNA, 23 bp, Artificial sequence
  SiRNA target sequence
ttactacgctttacttgtattct

SEQ ID NO: 5990 - DNA, 23 bp, Artificial sequence
  SiRNA target sequence
tactacgctttacttgtattcta

SEQ ID NO: 5991 - DNA, 23 bp, Artificial sequence
  SiRNA target sequence
actacgctttacttgtattctaa

SEQ ID NO: 5992 - DNA, 23 bp, Artificial sequence
  SiRNA target sequence
ctacgctttacttgtattctaag

SEQ ID NO: 5993 - DNA, 23 bp, Artificial sequence
  SiRNA target sequence
tacgctttacttgtattctaaga

SEQ ID NO: 5994 - DNA, 23 bp, Artificial sequence
  SiRNA target sequence
acgctttacttgtattctaagat

SEQ ID NO: 5995 - DNA, 23 bp, Artificial sequence
  SiRNA target sequence
cgctttacttgtattctaagatt

SEQ ID NO: 5996 - DNA, 23 bp, Artificial sequence
  SiRNA target sequence
gctttacttgtattctaagattt

SEQ ID NO: 5997 - DNA, 23 bp, Artificial sequence
  SiRNA target sequence
ctttacttgtattctaagatttt

SEQ ID NO: 5998 - DNA, 23 bp, Artificial sequence
  SiRNA target sequence
tttacttgtattctaagattttt

SEQ ID NO: 5999 - DNA, 23 bp, Artificial sequence
  SiRNA target sequence
ttacttgtattctaagattttta

SEQ ID NO: 6000 - DNA, 23 bp, Artificial sequence
  SiRNA target sequence
tacttgtattctaagatttttaa

SEQ ID NO: 6001 - DNA, 23 bp, Artificial sequence
  SiRNA target sequence
acttgtattctaagatttttaaa

SEQ ID NO: 6002 - DNA, 23 bp, Artificial sequence
  SiRNA target sequence
cttgtattctaagatttttaaag

SEQ ID NO: 6003 - DNA, 23 bp, Artificial sequence
  SiRNA target sequence
ttgtattctaagatttttaaaga

SEQ ID NO: 6004 - DNA, 23 bp, Artificial sequence
  SiRNA target sequence
tgtattctaagatttttaaagat

SEQ ID NO: 6005 - DNA, 23 bp, Artificial sequence
  SiRNA target sequence
gtattctaagatttttaaagata

SEQ ID NO: 6006 - DNA, 23 bp, Artificial sequence
  SiRNA target sequence
tattctaagatttttaaagataa

SEQ ID NO: 6007 - DNA, 23 bp, Artificial sequence
  SiRNA target sequence
attctaagatttttaaagataaa

SEQ ID NO: 6008 - DNA, 23 bp, Artificial sequence
  SiRNA target sequence
ttctaagatttttaaagataaat

SEQ ID NO: 6009 - DNA, 23 bp, Artificial sequence
  SiRNA target sequence
tctaagatttttaaagataaatc

SEQ ID NO: 6010 - DNA, 23 bp, Artificial sequence
  SiRNA target sequence
ctaagatttttaaagataaatct

SEQ ID NO: 6011 - DNA, 23 bp, Artificial sequence
  SiRNA target sequence
taagatttttaaagataaatctg

SEQ ID NO: 6012 - DNA, 23 bp, Artificial sequence
  SiRNA target sequence
aagatttttaaagataaatctga

SEQ ID NO: 6013 - DNA, 23 bp, Artificial sequence
  SiRNA target sequence
agatttttaaagataaatctgat

SEQ ID NO: 6014 - DNA, 23 bp, Artificial sequence
  SiRNA target sequence
gatttttaaagataaatctgata

SEQ ID NO: 6015 - DNA, 23 bp, Artificial sequence
  SiRNA target sequence
atttttaaagataaatctgatac

SEQ ID NO: 6016 - DNA, 23 bp, Artificial sequence
  SiRNA target sequence
tttttaaagataaatctgatact

SEQ ID NO: 6017 - DNA, 23 bp, Artificial sequence
  SiRNA target sequence
ttttaaagataaatctgatactt

SEQ ID NO: 6018 - DNA, 23 bp, Artificial sequence
  SiRNA target sequence
tttaaagataaatctgatactta

SEQ ID NO: 6019 - DNA, 23 bp, Artificial sequence
  SiRNA target sequence
ttaaagataaatctgatacttac

SEQ ID NO: 6020 - DNA, 23 bp, Artificial sequence
  SiRNA target sequence
taaagataaatctgatacttacc

SEQ ID NO: 6021 - DNA, 23 bp, Artificial sequence
  SiRNA target sequence
aaagataaatctgatacttacct

SEQ ID NO: 6022 - DNA, 23 bp, Artificial sequence
  SiRNA target sequence
aagataaatctgatacttacctt

SEQ ID NO: 6023 - DNA, 23 bp, Artificial sequence
  SiRNA target sequence
agataaatctgatacttacctta

SEQ ID NO: 6024 - DNA, 23 bp, Artificial sequence
  SiRNA target sequence
gataaatctgatacttaccttaa

SEQ ID NO: 6025 - DNA, 23 bp, Artificial sequence
  SiRNA target sequence
ataaatctgatacttaccttaaa

SEQ ID NO: 6026 - DNA, 23 bp, Artificial sequence
  SiRNA target sequence
taaatctgatacttaccttaaat

SEQ ID NO: 6027 - DNA, 23 bp, Artificial sequence
  SiRNA target sequence
aaatctgatacttaccttaaatc

SEQ ID NO: 6028 - DNA, 23 bp, Artificial sequence
  SiRNA target sequence
aatctgatacttaccttaaatct

SEQ ID NO: 6029 - DNA, 23 bp, Artificial sequence
  SiRNA target sequence
atctgatacttaccttaaatctg

SEQ ID NO: 6030 - DNA, 23 bp, Artificial sequence
  SiRNA target sequence
tctgatacttaccttaaatctgc

SEQ ID NO: 6031 - DNA, 23 bp, Artificial sequence
  SiRNA target sequence
ctgatacttaccttaaatctgct

SEQ ID NO: 6032 - DNA, 23 bp, Artificial sequence
  SiRNA target sequence
tgatacttaccttaaatctgcta

SEQ ID NO: 6033 - DNA, 23 bp, Artificial sequence
  SiRNA target sequence
gatacttaccttaaatctgctat

SEQ ID NO: 6034 - DNA, 23 bp, Artificial sequence
  SiRNA target sequence
atacttaccttaaatctgctata

SEQ ID NO: 6035 - DNA, 23 bp, Artificial sequence
  SiRNA target sequence
tacttaccttaaatctgctatag

SEQ ID NO: 6036 - DNA, 23 bp, Artificial sequence
  SiRNA target sequence
acttaccttaaatctgctataga

SEQ ID NO: 6037 - DNA, 23 bp, Artificial sequence
  SiRNA target sequence
cttaccttaaatctgctatagat

SEQ ID NO: 6038 - DNA, 23 bp, Artificial sequence
  SiRNA target sequence
ttaccttaaatctgctatagata

SEQ ID NO: 6039 - DNA, 23 bp, Artificial sequence
  SiRNA target sequence
taccttaaatctgctatagataa

SEQ ID NO: 6040 - DNA, 23 bp, Artificial sequence
  SiRNA target sequence
accttaaatctgctatagataaa

SEQ ID NO: 6041 - DNA, 23 bp, Artificial sequence
  SiRNA target sequence
ccttaaatctgctatagataaat

SEQ ID NO: 6042 - DNA, 23 bp, Artificial sequence
  SiRNA target sequence
cttaaatctgctatagataaatc

SEQ ID NO: 6043 - DNA, 23 bp, Artificial sequence
  SiRNA target sequence
ttaaatctgctatagataaatca

SEQ ID NO: 6044 - DNA, 23 bp, Artificial sequence
  SiRNA target sequence
taaatctgctatagataaatcag

SEQ ID NO: 6045 - DNA, 23 bp, Artificial sequence
  SiRNA target sequence
aaatctgctatagataaatcagt

SEQ ID NO: 6046 - DNA, 23 bp, Artificial sequence
  SiRNA target sequence
aatctgctatagataaatcagta

SEQ ID NO: 6047 - DNA, 23 bp, Artificial sequence
  SiRNA target sequence
atctgctatagataaatcagtag

SEQ ID NO: 6048 - DNA, 23 bp, Artificial sequence
  SiRNA target sequence
tctgctatagataaatcagtaga

SEQ ID NO: 6049 - DNA, 23 bp, Artificial sequence
  SiRNA target sequence
ctgctatagataaatcagtagat

SEQ ID NO: 6050 - DNA, 23 bp, Artificial sequence
  SiRNA target sequence
tgctatagataaatcagtagatc

SEQ ID NO: 6051 - DNA, 23 bp, Artificial sequence
  SiRNA target sequence
gctatagataaatcagtagatct

SEQ ID NO: 6052 - DNA, 23 bp, Artificial sequence
  SiRNA target sequence
ctatagataaatcagtagatcta

SEQ ID NO: 6053 - DNA, 23 bp, Artificial sequence
  SiRNA target sequence
tatagataaatcagtagatctac

SEQ ID NO: 6054 - DNA, 23 bp, Artificial sequence
  SiRNA target sequence
atagataaatcagtagatctacc

SEQ ID NO: 6055 - DNA, 23 bp, Artificial sequence
  SiRNA target sequence
tagataaatcagtagatctacct

SEQ ID NO: 6056 - DNA, 23 bp, Artificial sequence
  SiRNA target sequence
agataaatcagtagatctaccta

SEQ ID NO: 6057 - DNA, 23 bp, Artificial sequence
  SiRNA target sequence
gataaatcagtagatctacctat

SEQ ID NO: 6058 - DNA, 23 bp, Artificial sequence
  SiRNA target sequence
ataaatcagtagatctacctatt

SEQ ID NO: 6059 - DNA, 23 bp, Artificial sequence
  SiRNA target sequence
taaatcagtagatctacctattg

SEQ ID NO: 6060 - DNA, 23 bp, Artificial sequence
  SiRNA target sequence
aaatcagtagatctacctattga

SEQ ID NO: 6061 - DNA, 23 bp, Artificial sequence
  SiRNA target sequence
aatcagtagatctacctattgaa

SEQ ID NO: 6062 - DNA, 23 bp, Artificial sequence
  SiRNA target sequence
atcagtagatctacctattgaac

SEQ ID NO: 6063 - DNA, 23 bp, Artificial sequence
  SiRNA target sequence
tcagtagatctacctattgaaca

SEQ ID NO: 6064 - DNA, 23 bp, Artificial sequence
  SiRNA target sequence
cagtagatctacctattgaacag

SEQ ID NO: 6065 - DNA, 23 bp, Artificial sequence
  SiRNA target sequence
agtagatctacctattgaacaga

SEQ ID NO: 6066 - DNA, 23 bp, Artificial sequence
  SiRNA target sequence
gtagatctacctattgaacagaa

SEQ ID NO: 6067 - DNA, 23 bp, Artificial sequence
  SiRNA target sequence
tagatctacctattgaacagaaa

SEQ ID NO: 6068 - DNA, 23 bp, Artificial sequence
  SiRNA target sequence
agatctacctattgaacagaaag

SEQ ID NO: 6069 - DNA, 23 bp, Artificial sequence
  SiRNA target sequence
gatctacctattgaacagaaaga

SEQ ID NO: 6070 - DNA, 23 bp, Artificial sequence
  SiRNA target sequence
atctacctattgaacagaaagac

SEQ ID NO: 6071 - DNA, 23 bp, Artificial sequence
  SiRNA target sequence
tctacctattgaacagaaagact

SEQ ID NO: 6072 - DNA, 23 bp, Artificial sequence
  SiRNA target sequence
ctacctattgaacagaaagactt

SEQ ID NO: 6073 - DNA, 23 bp, Artificial sequence
  SiRNA target sequence
tacctattgaacagaaagacttt

SEQ ID NO: 6074 - DNA, 23 bp, Artificial sequence
  SiRNA target sequence
acctattgaacagaaagactttc

SEQ ID NO: 6075 - DNA, 23 bp, Artificial sequence
  SiRNA target sequence
cctattgaacagaaagactttct

SEQ ID NO: 6076 - DNA, 23 bp, Artificial sequence
  SiRNA target sequence
ctattgaacagaaagactttctg

SEQ ID NO: 6077 - DNA, 23 bp, Artificial sequence
  SiRNA target sequence
tattgaacagaaagactttctgt

SEQ ID NO: 6078 - DNA, 23 bp, Artificial sequence
  SiRNA target sequence
attgaacagaaagactttctgta

SEQ ID NO: 6079 - DNA, 23 bp, Artificial sequence
  SiRNA target sequence
ttgaacagaaagactttctgtac

SEQ ID NO: 6080 - DNA, 23 bp, Artificial sequence
  SiRNA target sequence
tgaacagaaagactttctgtacg

SEQ ID NO: 6081 - DNA, 23 bp, Artificial sequence
  SiRNA target sequence
gaacagaaagactttctgtacgt

SEQ ID NO: 6082 - DNA, 23 bp, Artificial sequence
  SiRNA target sequence
aacagaaagactttctgtacgta

SEQ ID NO: 6083 - DNA, 23 bp, Artificial sequence
  SiRNA target sequence
acagaaagactttctgtacgtag

SEQ ID NO: 6084 - DNA, 23 bp, Artificial sequence
  SiRNA target sequence
cagaaagactttctgtacgtaga

SEQ ID NO: 6085 - DNA, 23 bp, Artificial sequence
  SiRNA target sequence
agaaagactttctgtacgtagat

SEQ ID NO: 6086 - DNA, 23 bp, Artificial sequence
  SiRNA target sequence
gaaagactttctgtacgtagatc

SEQ ID NO: 6087 - DNA, 23 bp, Artificial sequence
  SiRNA target sequence
aaagactttctgtacgtagatct

SEQ ID NO: 6088 - DNA, 23 bp, Artificial sequence
  SiRNA target sequence
aagactttctgtacgtagatctt

SEQ ID NO: 6089 - DNA, 23 bp, Artificial sequence
  SiRNA target sequence
agactttctgtacgtagatcttc

SEQ ID NO: 6090 - DNA, 23 bp, Artificial sequence
  SiRNA target sequence
gactttctgtacgtagatcttct

SEQ ID NO: 6091 - DNA, 23 bp, Artificial sequence
  SiRNA target sequence
actttctgtacgtagatcttctt

SEQ ID NO: 6092 - DNA, 23 bp, Artificial sequence
  SiRNA target sequence
ctttctgtacgtagatcttcttg

SEQ ID NO: 6093 - DNA, 23 bp, Artificial sequence
  SiRNA target sequence
tttctgtacgtagatcttcttgt

SEQ ID NO: 6094 - DNA, 23 bp, Artificial sequence
  SiRNA target sequence
ttctgtacgtagatcttcttgta

SEQ ID NO: 6095 - DNA, 23 bp, Artificial sequence
  SiRNA target sequence
tctgtacgtagatcttcttgtat

SEQ ID NO: 6096 - DNA, 23 bp, Artificial sequence
  SiRNA target sequence
ctgtacgtagatcttcttgtatt

SEQ ID NO: 6097 - DNA, 23 bp, Artificial sequence
  SiRNA target sequence
tgtacgtagatcttcttgtattt

SEQ ID NO: 6098 - DNA, 23 bp, Artificial sequence
  SiRNA target sequence
gtacgtagatcttcttgtatttt

SEQ ID NO: 6099 - DNA, 23 bp, Artificial sequence
  SiRNA target sequence
tacgtagatcttcttgtatttta

SEQ ID NO: 6100 - DNA, 23 bp, Artificial sequence
  SiRNA target sequence
acgtagatcttcttgtattttac

SEQ ID NO: 6101 - DNA, 23 bp, Artificial sequence
  SiRNA target sequence
cgtagatcttcttgtattttaca

SEQ ID NO: 6102 - DNA, 23 bp, Artificial sequence
  SiRNA target sequence
gtagatcttcttgtattttacat

SEQ ID NO: 6103 - DNA, 23 bp, Artificial sequence
  SiRNA target sequence
tagatcttcttgtattttacatt

SEQ ID NO: 6104 - DNA, 23 bp, Artificial sequence
  SiRNA target sequence
agatcttcttgtattttacattt

SEQ ID NO: 6105 - DNA, 23 bp, Artificial sequence
  SiRNA target sequence
gatcttcttgtattttacatttc

SEQ ID NO: 6106 - DNA, 23 bp, Artificial sequence
  SiRNA target sequence
atcttcttgtattttacatttct

SEQ ID NO: 6107 - DNA, 23 bp, Artificial sequence
  SiRNA target sequence
tcttcttgtattttacatttcta

SEQ ID NO: 6108 - DNA, 23 bp, Artificial sequence
  SiRNA target sequence
cttcttgtattttacatttctaa

SEQ ID NO: 6109 - DNA, 23 bp, Artificial sequence
  SiRNA target sequence
ttcttgtattttacatttctaaa

SEQ ID NO: 6110 - DNA, 23 bp, Artificial sequence
  SiRNA target sequence
tcttgtattttacatttctaaaa

SEQ ID NO: 6111 - DNA, 23 bp, Artificial sequence
  SiRNA target sequence
cttgtattttacatttctaaaaa

SEQ ID NO: 6112 - DNA, 23 bp, Artificial sequence
  SiRNA target sequence
ttgtattttacatttctaaaaag

SEQ ID NO: 6113 - DNA, 23 bp, Artificial sequence
  SiRNA target sequence
tgtattttacatttctaaaaagg

SEQ ID NO: 6114 - DNA, 23 bp, Artificial sequence
  SiRNA target sequence
gtattttacatttctaaaaagga

SEQ ID NO: 6115 - DNA, 23 bp, Artificial sequence
  SiRNA target sequence
tattttacatttctaaaaaggat

SEQ ID NO: 6116 - DNA, 23 bp, Artificial sequence
  SiRNA target sequence
attttacatttctaaaaaggatg

SEQ ID NO: 6117 - DNA, 23 bp, Artificial sequence
  SiRNA target sequence
ttttacatttctaaaaaggatgt

SEQ ID NO: 6118 - DNA, 23 bp, Artificial sequence
  SiRNA target sequence
tttacatttctaaaaaggatgtt

SEQ ID NO: 6119 - DNA, 23 bp, Artificial sequence
  SiRNA target sequence
ttacatttctaaaaaggatgttg

SEQ ID NO: 6120 - DNA, 23 bp, Artificial sequence
  SiRNA target sequence
tacatttctaaaaaggatgttga

SEQ ID NO: 6121 - DNA, 23 bp, Artificial sequence
  SiRNA target sequence
acatttctaaaaaggatgttgaa

SEQ ID NO: 6122 - DNA, 23 bp, Artificial sequence
  SiRNA target sequence
catttctaaaaaggatgttgaaa

SEQ ID NO: 6123 - DNA, 23 bp, Artificial sequence
  SiRNA target sequence
atttctaaaaaggatgttgaaaa

SEQ ID NO: 6124 - DNA, 23 bp, Artificial sequence
  SiRNA target sequence
tttctaaaaaggatgttgaaaaa

SEQ ID NO: 6125 - DNA, 23 bp, Artificial sequence
  SiRNA target sequence
ttctaaaaaggatgttgaaaaag

SEQ ID NO: 6126 - DNA, 23 bp, Artificial sequence
  SiRNA target sequence
tctaaaaaggatgttgaaaaagt

SEQ ID NO: 6127 - DNA, 23 bp, Artificial sequence
  SiRNA target sequence
ctaaaaaggatgttgaaaaagtt

SEQ ID NO: 6128 - DNA, 23 bp, Artificial sequence
  SiRNA target sequence
taaaaaggatgttgaaaaagtta

SEQ ID NO: 6129 - DNA, 23 bp, Artificial sequence
  SiRNA target sequence
aaaaaggatgttgaaaaagttaa

SEQ ID NO: 6130 - DNA, 23 bp, Artificial sequence
  SiRNA target sequence
aaaaggatgttgaaaaagttaat

SEQ ID NO: 6131 - DNA, 23 bp, Artificial sequence
  SiRNA target sequence
aaaggatgttgaaaaagttaatg

SEQ ID NO: 6132 - DNA, 23 bp, Artificial sequence
  SiRNA target sequence
aaggatgttgaaaaagttaatga

SEQ ID NO: 6133 - DNA, 23 bp, Artificial sequence
  SiRNA target sequence
aggatgttgaaaaagttaatgaa

SEQ ID NO: 6134 - DNA, 23 bp, Artificial sequence
  SiRNA target sequence
ggatgttgaaaaagttaatgaaa

SEQ ID NO: 6135 - DNA, 23 bp, Artificial sequence
  SiRNA target sequence
gatgttgaaaaagttaatgaaac

SEQ ID NO: 6136 - DNA, 23 bp, Artificial sequence
  SiRNA target sequence
atgttgaaaaagttaatgaaaca

SEQ ID NO: 6137 - DNA, 23 bp, Artificial sequence
  SiRNA target sequence
tgttgaaaaagttaatgaaacaa

SEQ ID NO: 6138 - DNA, 23 bp, Artificial sequence
  SiRNA target sequence
gttgaaaaagttaatgaaacaat

SEQ ID NO: 6139 - DNA, 23 bp, Artificial sequence
  SiRNA target sequence
ttgaaaaagttaatgaaacaatt

SEQ ID NO: 6140 - DNA, 23 bp, Artificial sequence
  SiRNA target sequence
tgaaaaagttaatgaaacaatta

SEQ ID NO: 6141 - DNA, 23 bp, Artificial sequence
  SiRNA target sequence
gaaaaagttaatgaaacaattaa

SEQ ID NO: 6142 - DNA, 23 bp, Artificial sequence
  SiRNA target sequence
aaaaagttaatgaaacaattaat

SEQ ID NO: 6143 - DNA, 23 bp, Artificial sequence
  SiRNA target sequence
aaaagttaatgaaacaattaata

SEQ ID NO: 6144 - DNA, 23 bp, Artificial sequence
  SiRNA target sequence
aaagttaatgaaacaattaataa

SEQ ID NO: 6145 - DNA, 23 bp, Artificial sequence
  SiRNA target sequence
aagttaatgaaacaattaataat

SEQ ID NO: 6146 - DNA, 23 bp, Artificial sequence
  SiRNA target sequence
agttaatgaaacaattaataatt

SEQ ID NO: 6147 - DNA, 23 bp, Artificial sequence
  SiRNA target sequence
gttaatgaaacaattaataattt

SEQ ID NO: 6148 - DNA, 23 bp, Artificial sequence
  SiRNA target sequence
ttaatgaaacaattaataattta

SEQ ID NO: 6149 - DNA, 23 bp, Artificial sequence
  SiRNA target sequence
taatgaaacaattaataatttaa

SEQ ID NO: 6150 - DNA, 23 bp, Artificial sequence
  SiRNA target sequence
aatgaaacaattaataatttaaa

SEQ ID NO: 6151 - DNA, 23 bp, Artificial sequence
  SiRNA target sequence
atgaaacaattaataatttaaaa

SEQ ID NO: 6152 - DNA, 23 bp, Artificial sequence
  SiRNA target sequence
tgaaacaattaataatttaaaag

SEQ ID NO: 6153 - DNA, 23 bp, Artificial sequence
  SiRNA target sequence
gaaacaattaataatttaaaaga

SEQ ID NO: 6154 - DNA, 23 bp, Artificial sequence
  SiRNA target sequence
aaacaattaataatttaaaagag

SEQ ID NO: 6155 - DNA, 23 bp, Artificial sequence
  SiRNA target sequence
aacaattaataatttaaaagaga

SEQ ID NO: 6156 - DNA, 23 bp, Artificial sequence
  SiRNA target sequence
acaattaataatttaaaagagac

SEQ ID NO: 6157 - DNA, 23 bp, Artificial sequence
  SiRNA target sequence
caattaataatttaaaagagact

SEQ ID NO: 6158 - DNA, 23 bp, Artificial sequence
  SiRNA target sequence
aattaataatttaaaagagactc

SEQ ID NO: 6159 - DNA, 23 bp, Artificial sequence
  SiRNA target sequence
attaataatttaaaagagactct

SEQ ID NO: 6160 - DNA, 23 bp, Artificial sequence
  SiRNA target sequence
ttaataatttaaaagagactctt

SEQ ID NO: 6161 - DNA, 23 bp, Artificial sequence
  SiRNA target sequence
taataatttaaaagagactctta

SEQ ID NO: 6162 - DNA, 23 bp, Artificial sequence
  SiRNA target sequence
aataatttaaaagagactcttac

SEQ ID NO: 6163 - DNA, 23 bp, Artificial sequence
  SiRNA target sequence
ataatttaaaagagactcttacc

SEQ ID NO: 6164 - DNA, 23 bp, Artificial sequence
  SiRNA target sequence
taatttaaaagagactcttaccc

SEQ ID NO: 6165 - DNA, 23 bp, Artificial sequence
  SiRNA target sequence
aatttaaaagagactcttacccc

SEQ ID NO: 6166 - DNA, 23 bp, Artificial sequence
  SiRNA target sequence
atttaaaagagactcttaccccc

SEQ ID NO: 6167 - DNA, 23 bp, Artificial sequence
  SiRNA target sequence
tttaaaagagactcttaccccca

SEQ ID NO: 6168 - DNA, 23 bp, Artificial sequence
  SiRNA target sequence
ttaaaagagactcttacccccac

SEQ ID NO: 6169 - DNA, 23 bp, Artificial sequence
  SiRNA target sequence
taaaagagactcttacccccact

SEQ ID NO: 6170 - DNA, 23 bp, Artificial sequence
  SiRNA target sequence
aaaagagactcttacccccactt

SEQ ID NO: 6171 - DNA, 23 bp, Artificial sequence
  SiRNA target sequence
aaagagactcttacccccacttt

SEQ ID NO: 6172 - DNA, 23 bp, Artificial sequence
  SiRNA target sequence
aagagactcttacccccacttta

SEQ ID NO: 6173 - DNA, 23 bp, Artificial sequence
  SiRNA target sequence
agagactcttacccccactttat

SEQ ID NO: 6174 - DNA, 23 bp, Artificial sequence
  SiRNA target sequence
gagactcttacccccactttatt

SEQ ID NO: 6175 - DNA, 23 bp, Artificial sequence
  SiRNA target sequence
agactcttacccccactttattg

SEQ ID NO: 6176 - DNA, 23 bp, Artificial sequence
  SiRNA target sequence
gactcttacccccactttattgg

SEQ ID NO: 6177 - DNA, 23 bp, Artificial sequence
  SiRNA target sequence
actcttacccccactttattgga

SEQ ID NO: 6178 - DNA, 23 bp, Artificial sequence
  SiRNA target sequence
ctcttacccccactttattggaa

SEQ ID NO: 6179 - DNA, 23 bp, Artificial sequence
  SiRNA target sequence
tcttacccccactttattggaac

SEQ ID NO: 6180 - DNA, 23 bp, Artificial sequence
  SiRNA target sequence
cttacccccactttattggaact

SEQ ID NO: 6181 - DNA, 23 bp, Artificial sequence
  SiRNA target sequence
ttacccccactttattggaactt

SEQ ID NO: 6182 - DNA, 23 bp, Artificial sequence
  SiRNA target sequence
tacccccactttattggaactta

SEQ ID NO: 6183 - DNA, 23 bp, Artificial sequence
  SiRNA target sequence
acccccactttattggaacttat

SEQ ID NO: 6184 - DNA, 23 bp, Artificial sequence
  SiRNA target sequence
cccccactttattggaacttatt

SEQ ID NO: 6185 - DNA, 23 bp, Artificial sequence
  SiRNA target sequence
ccccactttattggaacttattg

SEQ ID NO: 6186 - DNA, 23 bp, Artificial sequence
  SiRNA target sequence
cccactttattggaacttattgg

SEQ ID NO: 6187 - DNA, 23 bp, Artificial sequence
  SiRNA target sequence
ccactttattggaacttattgga

SEQ ID NO: 6188 - DNA, 23 bp, Artificial sequence
  SiRNA target sequence
cactttattggaacttattggag

SEQ ID NO: 6189 - DNA, 23 bp, Artificial sequence
  SiRNA target sequence
actttattggaacttattggaga

SEQ ID NO: 6190 - DNA, 23 bp, Artificial sequence
  SiRNA target sequence
ctttattggaacttattggagaa

SEQ ID NO: 6191 - DNA, 23 bp, Artificial sequence
  SiRNA target sequence
tttattggaacttattggagaat

SEQ ID NO: 6192 - DNA, 23 bp, Artificial sequence
  SiRNA target sequence
ttattggaacttattggagaata

SEQ ID NO: 6193 - DNA, 23 bp, Artificial sequence
  SiRNA target sequence
tattggaacttattggagaatat

SEQ ID NO: 6194 - DNA, 23 bp, Artificial sequence
  SiRNA target sequence
attggaacttattggagaatatt

SEQ ID NO: 6195 - DNA, 23 bp, Artificial sequence
  SiRNA target sequence
ttggaacttattggagaatatta

SEQ ID NO: 6196 - DNA, 23 bp, Artificial sequence
  SiRNA target sequence
tggaacttattggagaatattat

SEQ ID NO: 6197 - DNA, 23 bp, Artificial sequence
  SiRNA target sequence
ggaacttattggagaatattatt

SEQ ID NO: 6198 - DNA, 23 bp, Artificial sequence
  SiRNA target sequence
gaacttattggagaatattattt

SEQ ID NO: 6199 - DNA, 23 bp, Artificial sequence
  SiRNA target sequence
aacttattggagaatattattta

SEQ ID NO: 6200 - DNA, 23 bp, Artificial sequence
  SiRNA target sequence
acttattggagaatattatttaa

SEQ ID NO: 6201 - DNA, 23 bp, Artificial sequence
  SiRNA target sequence
cttattggagaatattatttaaa

SEQ ID NO: 6202 - DNA, 23 bp, Artificial sequence
  SiRNA target sequence
ttattggagaatattatttaaaa

SEQ ID NO: 6203 - DNA, 23 bp, Artificial sequence
  SiRNA target sequence
tattggagaatattatttaaaaa

SEQ ID NO: 6204 - DNA, 23 bp, Artificial sequence
  SiRNA target sequence
attggagaatattatttaaaaag

SEQ ID NO: 6205 - DNA, 23 bp, Artificial sequence
  SiRNA target sequence
ttggagaatattatttaaaaagt

SEQ ID NO: 6206 - DNA, 23 bp, Artificial sequence
  SiRNA target sequence
tggagaatattatttaaaaagtg

SEQ ID NO: 6207 - DNA, 23 bp, Artificial sequence
  SiRNA target sequence
ggagaatattatttaaaaagtgg

SEQ ID NO: 6208 - DNA, 23 bp, Artificial sequence
  SiRNA target sequence
gagaatattatttaaaaagtgga

SEQ ID NO: 6209 - DNA, 23 bp, Artificial sequence
  SiRNA target sequence
agaatattatttaaaaagtggaa

SEQ ID NO: 6210 - DNA, 23 bp, Artificial sequence
  SiRNA target sequence
gaatattatttaaaaagtggaaa

SEQ ID NO: 6211 - DNA, 23 bp, Artificial sequence
  SiRNA target sequence
aatattatttaaaaagtggaaat

SEQ ID NO: 6212 - DNA, 23 bp, Artificial sequence
  SiRNA target sequence
atattatttaaaaagtggaaatc

SEQ ID NO: 6213 - DNA, 23 bp, Artificial sequence
  SiRNA target sequence
tattatttaaaaagtggaaatca

SEQ ID NO: 6214 - DNA, 23 bp, Artificial sequence
  SiRNA target sequence
attatttaaaaagtggaaatcac

SEQ ID NO: 6215 - DNA, 23 bp, Artificial sequence
  SiRNA target sequence
ttatttaaaaagtggaaatcact

SEQ ID NO: 6216 - DNA, 23 bp, Artificial sequence
  SiRNA target sequence
tatttaaaaagtggaaatcactc

SEQ ID NO: 6217 - DNA, 23 bp, Artificial sequence
  SiRNA target sequence
atttaaaaagtggaaatcactct

SEQ ID NO: 6218 - DNA, 23 bp, Artificial sequence
  SiRNA target sequence
tttaaaaagtggaaatcactcta

SEQ ID NO: 6219 - DNA, 23 bp, Artificial sequence
  SiRNA target sequence
ttaaaaagtggaaatcactctaa

SEQ ID NO: 6220 - DNA, 23 bp, Artificial sequence
  SiRNA target sequence
taaaaagtggaaatcactctaaa

SEQ ID NO: 6221 - DNA, 23 bp, Artificial sequence
  SiRNA target sequence
aaaaagtggaaatcactctaaaa

SEQ ID NO: 6222 - DNA, 23 bp, Artificial sequence
  SiRNA target sequence
aaaagtggaaatcactctaaaat

SEQ ID NO: 6223 - DNA, 23 bp, Artificial sequence
  SiRNA target sequence
aaagtggaaatcactctaaaatg

SEQ ID NO: 6224 - DNA, 23 bp, Artificial sequence
  SiRNA target sequence
aagtggaaatcactctaaaatgt

SEQ ID NO: 6225 - DNA, 23 bp, Artificial sequence
  SiRNA target sequence
agtggaaatcactctaaaatgtt

SEQ ID NO: 6226 - DNA, 23 bp, Artificial sequence
  SiRNA target sequence
gtggaaatcactctaaaatgtta

SEQ ID NO: 6227 - DNA, 23 bp, Artificial sequence
  SiRNA target sequence
tggaaatcactctaaaatgttag

SEQ ID NO: 6228 - DNA, 23 bp, Artificial sequence
  SiRNA target sequence
ggaaatcactctaaaatgttaga

SEQ ID NO: 6229 - DNA, 23 bp, Artificial sequence
  SiRNA target sequence
gaaatcactctaaaatgttagat

SEQ ID NO: 6230 - DNA, 23 bp, Artificial sequence
  SiRNA target sequence
aaatcactctaaaatgttagatc

SEQ ID NO: 6231 - DNA, 23 bp, Artificial sequence
  SiRNA target sequence
aatcactctaaaatgttagatct

SEQ ID NO: 6232 - DNA, 23 bp, Artificial sequence
  SiRNA target sequence
atcactctaaaatgttagatcta

SEQ ID NO: 6233 - DNA, 23 bp, Artificial sequence
  SiRNA target sequence
tcactctaaaatgttagatctat

SEQ ID NO: 6234 - DNA, 23 bp, Artificial sequence
  SiRNA target sequence
cactctaaaatgttagatctatt

SEQ ID NO: 6235 - DNA, 23 bp, Artificial sequence
  SiRNA target sequence
actctaaaatgttagatctatta

SEQ ID NO: 6236 - DNA, 23 bp, Artificial sequence
  SiRNA target sequence
ctctaaaatgttagatctattat

SEQ ID NO: 6237 - DNA, 23 bp, Artificial sequence
  SiRNA target sequence
tctaaaatgttagatctattatc

SEQ ID NO: 6238 - DNA, 23 bp, Artificial sequence
  SiRNA target sequence
ctaaaatgttagatctattatct

SEQ ID NO: 6239 - DNA, 23 bp, Artificial sequence
  SiRNA target sequence
taaaatgttagatctattatcta

SEQ ID NO: 6240 - DNA, 23 bp, Artificial sequence
  SiRNA target sequence
aaaatgttagatctattatctag

SEQ ID NO: 6241 - DNA, 23 bp, Artificial sequence
  SiRNA target sequence
aaatgttagatctattatctagt

SEQ ID NO: 6242 - DNA, 23 bp, Artificial sequence
  SiRNA target sequence
aatgttagatctattatctagtc

SEQ ID NO: 6243 - DNA, 23 bp, Artificial sequence
  SiRNA target sequence
atgttagatctattatctagtca

SEQ ID NO: 6244 - DNA, 23 bp, Artificial sequence
  SiRNA target sequence
tgttagatctattatctagtcat

SEQ ID NO: 6245 - DNA, 23 bp, Artificial sequence
  SiRNA target sequence
gttagatctattatctagtcatc

SEQ ID NO: 6246 - DNA, 23 bp, Artificial sequence
  SiRNA target sequence
ttagatctattatctagtcatcc

SEQ ID NO: 6247 - DNA, 23 bp, Artificial sequence
  SiRNA target sequence
tagatctattatctagtcatcca

SEQ ID NO: 6248 - DNA, 23 bp, Artificial sequence
  SiRNA target sequence
agatctattatctagtcatccag

SEQ ID NO: 6249 - DNA, 23 bp, Artificial sequence
  SiRNA target sequence
gatctattatctagtcatccaga

SEQ ID NO: 6250 - DNA, 23 bp, Artificial sequence
  SiRNA target sequence
atctattatctagtcatccagat

SEQ ID NO: 6251 - DNA, 23 bp, Artificial sequence
  SiRNA target sequence
tctattatctagtcatccagata

SEQ ID NO: 6252 - DNA, 23 bp, Artificial sequence
  SiRNA target sequence
ctattatctagtcatccagatac

SEQ ID NO: 6253 - DNA, 23 bp, Artificial sequence
  SiRNA target sequence
tattatctagtcatccagatact

SEQ ID NO: 6254 - DNA, 23 bp, Artificial sequence
  SiRNA target sequence
attatctagtcatccagatactc

SEQ ID NO: 6255 - DNA, 23 bp, Artificial sequence
  SiRNA target sequence
ttatctagtcatccagatactcc

SEQ ID NO: 6256 - DNA, 23 bp, Artificial sequence
  SiRNA target sequence
tatctagtcatccagatactcct

SEQ ID NO: 6257 - DNA, 23 bp, Artificial sequence
  SiRNA target sequence
atctagtcatccagatactcctg

SEQ ID NO: 6258 - DNA, 23 bp, Artificial sequence
  SiRNA target sequence
tctagtcatccagatactcctgg

SEQ ID NO: 6259 - DNA, 23 bp, Artificial sequence
  SiRNA target sequence
ctagtcatccagatactcctggt

SEQ ID NO: 6260 - DNA, 23 bp, Artificial sequence
  SiRNA target sequence
tagtcatccagatactcctggta

SEQ ID NO: 6261 - DNA, 23 bp, Artificial sequence
  SiRNA target sequence
agtcatccagatactcctggtaa

SEQ ID NO: 6262 - DNA, 23 bp, Artificial sequence
  SiRNA target sequence
gtcatccagatactcctggtaaa

SEQ ID NO: 6263 - DNA, 23 bp, Artificial sequence
  SiRNA target sequence
tcatccagatactcctggtaaat

SEQ ID NO: 6264 - DNA, 23 bp, Artificial sequence
  SiRNA target sequence
catccagatactcctggtaaatt

SEQ ID NO: 6265 - DNA, 23 bp, Artificial sequence
  SiRNA target sequence
atccagatactcctggtaaatta

SEQ ID NO: 6266 - DNA, 23 bp, Artificial sequence
  SiRNA target sequence
tccagatactcctggtaaattac

SEQ ID NO: 6267 - DNA, 23 bp, Artificial sequence
  SiRNA target sequence
ccagatactcctggtaaattact

SEQ ID NO: 6268 - DNA, 23 bp, Artificial sequence
  SiRNA target sequence
cagatactcctggtaaattactt

SEQ ID NO: 6269 - DNA, 23 bp, Artificial sequence
  SiRNA target sequence
agatactcctggtaaattacttt

SEQ ID NO: 6270 - DNA, 23 bp, Artificial sequence
  SiRNA target sequence
gatactcctggtaaattactttt

SEQ ID NO: 6271 - DNA, 23 bp, Artificial sequence
  SiRNA target sequence
atactcctggtaaattactttta

SEQ ID NO: 6272 - DNA, 23 bp, Artificial sequence
  SiRNA target sequence
tactcctggtaaattacttttaa

SEQ ID NO: 6273 - DNA, 23 bp, Artificial sequence
  SiRNA target sequence
actcctggtaaattacttttaac

SEQ ID NO: 6274 - DNA, 23 bp, Artificial sequence
  SiRNA target sequence
ctcctggtaaattacttttaacg

SEQ ID NO: 6275 - DNA, 23 bp, Artificial sequence
  SiRNA target sequence
tcctggtaaattacttttaacgg

SEQ ID NO: 6276 - DNA, 23 bp, Artificial sequence
  SiRNA target sequence
cctggtaaattacttttaacggc

SEQ ID NO: 6277 - DNA, 23 bp, Artificial sequence
  SiRNA target sequence
ctggtaaattacttttaacggca

SEQ ID NO: 6278 - DNA, 23 bp, Artificial sequence
  SiRNA target sequence
tggtaaattacttttaacggcac

SEQ ID NO: 6279 - DNA, 23 bp, Artificial sequence
  SiRNA target sequence
ggtaaattacttttaacggcact

SEQ ID NO: 6280 - DNA, 23 bp, Artificial sequence
  SiRNA target sequence
gtaaattacttttaacggcactt

SEQ ID NO: 6281 - DNA, 23 bp, Artificial sequence
  SiRNA target sequence
taaattacttttaacggcacttt

SEQ ID NO: 6282 - DNA, 23 bp, Artificial sequence
  SiRNA target sequence
aaattacttttaacggcacttta

SEQ ID NO: 6283 - DNA, 23 bp, Artificial sequence
  SiRNA target sequence
aattacttttaacggcactttat

SEQ ID NO: 6284 - DNA, 23 bp, Artificial sequence
  SiRNA target sequence
attacttttaacggcactttatg

SEQ ID NO: 6285 - DNA, 23 bp, Artificial sequence
  SiRNA target sequence
ttacttttaacggcactttatgc

SEQ ID NO: 6286 - DNA, 23 bp, Artificial sequence
  SiRNA target sequence
tacttttaacggcactttatgca

SEQ ID NO: 6287 - DNA, 23 bp, Artificial sequence
  SiRNA target sequence
acttttaacggcactttatgcaa

SEQ ID NO: 6288 - DNA, 23 bp, Artificial sequence
  SiRNA target sequence
cttttaacggcactttatgcaat

SEQ ID NO: 6289 - DNA, 23 bp, Artificial sequence
  SiRNA target sequence
ttttaacggcactttatgcaata

SEQ ID NO: 6290 - DNA, 23 bp, Artificial sequence
  SiRNA target sequence
tttaacggcactttatgcaataa

SEQ ID NO: 6291 - DNA, 23 bp, Artificial sequence
  SiRNA target sequence
ttaacggcactttatgcaataag

SEQ ID NO: 6292 - DNA, 23 bp, Artificial sequence
  SiRNA target sequence
taacggcactttatgcaataagt

SEQ ID NO: 6293 - DNA, 23 bp, Artificial sequence
  SiRNA target sequence
aacggcactttatgcaataagta

SEQ ID NO: 6294 - DNA, 23 bp, Artificial sequence
  SiRNA target sequence
acggcactttatgcaataagtat

SEQ ID NO: 6295 - DNA, 23 bp, Artificial sequence
  SiRNA target sequence
cggcactttatgcaataagtatt

SEQ ID NO: 6296 - DNA, 23 bp, Artificial sequence
  SiRNA target sequence
ggcactttatgcaataagtattg

SEQ ID NO: 6297 - DNA, 23 bp, Artificial sequence
  SiRNA target sequence
gcactttatgcaataagtattga

SEQ ID NO: 6298 - DNA, 23 bp, Artificial sequence
  SiRNA target sequence
cactttatgcaataagtattgat

SEQ ID NO: 6299 - DNA, 23 bp, Artificial sequence
  SiRNA target sequence
actttatgcaataagtattgata

SEQ ID NO: 6300 - DNA, 23 bp, Artificial sequence
  SiRNA target sequence
ctttatgcaataagtattgataa

SEQ ID NO: 6301 - DNA, 23 bp, Artificial sequence
  SiRNA target sequence
tttatgcaataagtattgataag

SEQ ID NO: 6302 - DNA, 23 bp, Artificial sequence
  SiRNA target sequence
ttatgcaataagtattgataaga

SEQ ID NO: 6303 - DNA, 23 bp, Artificial sequence
  SiRNA target sequence
tatgcaataagtattgataagaa

SEQ ID NO: 6304 - DNA, 23 bp, Artificial sequence
  SiRNA target sequence
atgcaataagtattgataagaaa

SEQ ID NO: 6305 - DNA, 23 bp, Artificial sequence
  SiRNA target sequence
tgcaataagtattgataagaaaa

SEQ ID NO: 6306 - DNA, 23 bp, Artificial sequence
  SiRNA target sequence
gcaataagtattgataagaaaaa

SEQ ID NO: 6307 - DNA, 23 bp, Artificial sequence
  SiRNA target sequence
caataagtattgataagaaaaag

SEQ ID NO: 6308 - DNA, 23 bp, Artificial sequence
  SiRNA target sequence
aataagtattgataagaaaaagg

SEQ ID NO: 6309 - DNA, 23 bp, Artificial sequence
  SiRNA target sequence
ataagtattgataagaaaaagga

SEQ ID NO: 6310 - DNA, 23 bp, Artificial sequence
  SiRNA target sequence
taagtattgataagaaaaaggat

SEQ ID NO: 6311 - DNA, 23 bp, Artificial sequence
  SiRNA target sequence
aagtattgataagaaaaaggatg

SEQ ID NO: 6312 - DNA, 23 bp, Artificial sequence
  SiRNA target sequence
agtattgataagaaaaaggatgc

SEQ ID NO: 6313 - DNA, 23 bp, Artificial sequence
  SiRNA target sequence
gtattgataagaaaaaggatgct

SEQ ID NO: 6314 - DNA, 23 bp, Artificial sequence
  SiRNA target sequence
tattgataagaaaaaggatgcta

SEQ ID NO: 6315 - DNA, 23 bp, Artificial sequence
  SiRNA target sequence
attgataagaaaaaggatgctat

SEQ ID NO: 6316 - DNA, 23 bp, Artificial sequence
  SiRNA target sequence
ttgataagaaaaaggatgctata

SEQ ID NO: 6317 - DNA, 23 bp, Artificial sequence
  SiRNA target sequence
tgataagaaaaaggatgctatag

SEQ ID NO: 6318 - DNA, 23 bp, Artificial sequence
  SiRNA target sequence
gataagaaaaaggatgctataga

SEQ ID NO: 6319 - DNA, 23 bp, Artificial sequence
  SiRNA target sequence
ataagaaaaaggatgctatagaa

SEQ ID NO: 6320 - DNA, 23 bp, Artificial sequence
  SiRNA target sequence
taagaaaaaggatgctatagaaa

SEQ ID NO: 6321 - DNA, 23 bp, Artificial sequence
  SiRNA target sequence
aagaaaaaggatgctatagaaat

SEQ ID NO: 6322 - DNA, 23 bp, Artificial sequence
  SiRNA target sequence
agaaaaaggatgctatagaaatt

SEQ ID NO: 6323 - DNA, 23 bp, Artificial sequence
  SiRNA target sequence
gaaaaaggatgctatagaaattt

SEQ ID NO: 6324 - DNA, 23 bp, Artificial sequence
  SiRNA target sequence
aaaaaggatgctatagaaatttt

SEQ ID NO: 6325 - DNA, 23 bp, Artificial sequence
  SiRNA target sequence
aaaaggatgctatagaaatttta

SEQ ID NO: 6326 - DNA, 23 bp, Artificial sequence
  SiRNA target sequence
aaaggatgctatagaaattttat

SEQ ID NO: 6327 - DNA, 23 bp, Artificial sequence
  SiRNA target sequence
aaggatgctatagaaattttata

SEQ ID NO: 6328 - DNA, 23 bp, Artificial sequence
  SiRNA target sequence
aggatgctatagaaattttatat

SEQ ID NO: 6329 - DNA, 23 bp, Artificial sequence
  SiRNA target sequence
ggatgctatagaaattttatata

SEQ ID NO: 6330 - DNA, 23 bp, Artificial sequence
  SiRNA target sequence
gatgctatagaaattttatatag

SEQ ID NO: 6331 - DNA, 23 bp, Artificial sequence
  SiRNA target sequence
atgctatagaaattttatataga

SEQ ID NO: 6332 - DNA, 23 bp, Artificial sequence
  SiRNA target sequence
tgctatagaaattttatatagaa

SEQ ID NO: 6333 - DNA, 23 bp, Artificial sequence
  SiRNA target sequence
gctatagaaattttatatagaag

SEQ ID NO: 6334 - DNA, 23 bp, Artificial sequence
  SiRNA target sequence
ctatagaaattttatatagaagt

SEQ ID NO: 6335 - DNA, 23 bp, Artificial sequence
  SiRNA target sequence
tatagaaattttatatagaagta

SEQ ID NO: 6336 - DNA, 23 bp, Artificial sequence
  SiRNA target sequence
atagaaattttatatagaagtat

SEQ ID NO: 6337 - DNA, 23 bp, Artificial sequence
  SiRNA target sequence
tagaaattttatatagaagtata

SEQ ID NO: 6338 - DNA, 23 bp, Artificial sequence
  SiRNA target sequence
agaaattttatatagaagtatat

SEQ ID NO: 6339 - DNA, 23 bp, Artificial sequence
  SiRNA target sequence
gaaattttatatagaagtatatc

SEQ ID NO: 6340 - DNA, 23 bp, Artificial sequence
  SiRNA target sequence
aaattttatatagaagtatatca

SEQ ID NO: 6341 - DNA, 23 bp, Artificial sequence
  SiRNA target sequence
aattttatatagaagtatatcag

SEQ ID NO: 6342 - DNA, 23 bp, Artificial sequence
  SiRNA target sequence
attttatatagaagtatatcaga

SEQ ID NO: 6343 - DNA, 23 bp, Artificial sequence
  SiRNA target sequence
ttttatatagaagtatatcagaa

SEQ ID NO: 6344 - DNA, 23 bp, Artificial sequence
  SiRNA target sequence
tttatatagaagtatatcagaat

SEQ ID NO: 6345 - DNA, 23 bp, Artificial sequence
  SiRNA target sequence
ttatatagaagtatatcagaata

SEQ ID NO: 6346 - DNA, 23 bp, Artificial sequence
  SiRNA target sequence
tatatagaagtatatcagaatat

SEQ ID NO: 6347 - DNA, 23 bp, Artificial sequence
  SiRNA target sequence
atatagaagtatatcagaatatt

SEQ ID NO: 6348 - DNA, 23 bp, Artificial sequence
  SiRNA target sequence
tatagaagtatatcagaatattc

SEQ ID NO: 6349 - DNA, 23 bp, Artificial sequence
  SiRNA target sequence
atagaagtatatcagaatattca

SEQ ID NO: 6350 - DNA, 23 bp, Artificial sequence
  SiRNA target sequence
tagaagtatatcagaatattcat

SEQ ID NO: 6351 - DNA, 23 bp, Artificial sequence
  SiRNA target sequence
agaagtatatcagaatattcatc

SEQ ID NO: 6352 - DNA, 23 bp, Artificial sequence
  SiRNA target sequence
gaagtatatcagaatattcatct

SEQ ID NO: 6353 - DNA, 23 bp, Artificial sequence
  SiRNA target sequence
aagtatatcagaatattcatctt

SEQ ID NO: 6354 - DNA, 23 bp, Artificial sequence
  SiRNA target sequence
agtatatcagaatattcatctta

SEQ ID NO: 6355 - DNA, 23 bp, Artificial sequence
  SiRNA target sequence
gtatatcagaatattcatcttat

SEQ ID NO: 6356 - DNA, 23 bp, Artificial sequence
  SiRNA target sequence
tatatcagaatattcatcttatt

SEQ ID NO: 6357 - DNA, 23 bp, Artificial sequence
  SiRNA target sequence
atatcagaatattcatcttattt

SEQ ID NO: 6358 - DNA, 23 bp, Artificial sequence
  SiRNA target sequence
tatcagaatattcatcttatttt

SEQ ID NO: 6359 - DNA, 23 bp, Artificial sequence
  SiRNA target sequence
atcagaatattcatcttatttta

SEQ ID NO: 6360 - DNA, 23 bp, Artificial sequence
  SiRNA target sequence
tcagaatattcatcttattttaa

SEQ ID NO: 6361 - DNA, 23 bp, Artificial sequence
  SiRNA target sequence
cagaatattcatcttattttaaa

SEQ ID NO: 6362 - DNA, 23 bp, Artificial sequence
  SiRNA target sequence
agaatattcatcttattttaaat

SEQ ID NO: 6363 - DNA, 23 bp, Artificial sequence
  SiRNA target sequence
gaatattcatcttattttaaatc

SEQ ID NO: 6364 - DNA, 23 bp, Artificial sequence
  SiRNA target sequence
aatattcatcttattttaaatct

SEQ ID NO: 6365 - DNA, 23 bp, Artificial sequence
  SiRNA target sequence
atattcatcttattttaaatctt

SEQ ID NO: 6366 - DNA, 23 bp, Artificial sequence
  SiRNA target sequence
tattcatcttattttaaatctta

SEQ ID NO: 6367 - DNA, 23 bp, Artificial sequence
  SiRNA target sequence
attcatcttattttaaatcttat

SEQ ID NO: 6368 - DNA, 23 bp, Artificial sequence
  SiRNA target sequence
ttcatcttattttaaatcttatt

SEQ ID NO: 6369 - DNA, 23 bp, Artificial sequence
  SiRNA target sequence
tcatcttattttaaatcttattt

SEQ ID NO: 6370 - DNA, 23 bp, Artificial sequence
  SiRNA target sequence
catcttattttaaatcttatttg

SEQ ID NO: 6371 - DNA, 23 bp, Artificial sequence
  SiRNA target sequence
atcttattttaaatcttatttgt

SEQ ID NO: 6372 - DNA, 23 bp, Artificial sequence
  SiRNA target sequence
tcttattttaaatcttatttgta

SEQ ID NO: 6373 - DNA, 23 bp, Artificial sequence
  SiRNA target sequence
cttattttaaatcttatttgtat

SEQ ID NO: 6374 - DNA, 23 bp, Artificial sequence
  SiRNA target sequence
ttattttaaatcttatttgtatt

SEQ ID NO: 6375 - DNA, 23 bp, Artificial sequence
  SiRNA target sequence
tattttaaatcttatttgtattt

SEQ ID NO: 6376 - DNA, 23 bp, Artificial sequence
  SiRNA target sequence
attttaaatcttatttgtattta

SEQ ID NO: 6377 - DNA, 23 bp, Artificial sequence
  SiRNA target sequence
ttttaaatcttatttgtatttag

SEQ ID NO: 6378 - DNA, 23 bp, Artificial sequence
  SiRNA target sequence
tttaaatcttatttgtatttagg

SEQ ID NO: 6379 - DNA, 23 bp, Artificial sequence
  SiRNA target sequence
ttaaatcttatttgtatttagga

SEQ ID NO: 6380 - DNA, 23 bp, Artificial sequence
  SiRNA target sequence
taaatcttatttgtatttaggaa

SEQ ID NO: 6381 - DNA, 23 bp, Artificial sequence
  SiRNA target sequence
aaatcttatttgtatttaggaaa

SEQ ID NO: 6382 - DNA, 23 bp, Artificial sequence
  SiRNA target sequence
aatcttatttgtatttaggaaat

SEQ ID NO: 6383 - DNA, 23 bp, Artificial sequence
  SiRNA target sequence
atcttatttgtatttaggaaata

SEQ ID NO: 6384 - DNA, 23 bp, Artificial sequence
  SiRNA target sequence
tcttatttgtatttaggaaatat

SEQ ID NO: 6385 - DNA, 23 bp, Artificial sequence
  SiRNA target sequence
cttatttgtatttaggaaatatt

SEQ ID NO: 6386 - DNA, 23 bp, Artificial sequence
  SiRNA target sequence
ttatttgtatttaggaaatattt

SEQ ID NO: 6387 - DNA, 23 bp, Artificial sequence
  SiRNA target sequence
tatttgtatttaggaaatatttt

SEQ ID NO: 6388 - DNA, 23 bp, Artificial sequence
  SiRNA target sequence
atttgtatttaggaaatatttta

SEQ ID NO: 6389 - DNA, 23 bp, Artificial sequence
  SiRNA target sequence
tttgtatttaggaaatattttaa

SEQ ID NO: 6390 - DNA, 23 bp, Artificial sequence
  SiRNA target sequence
ttgtatttaggaaatattttaat

SEQ ID NO: 6391 - DNA, 23 bp, Artificial sequence
  SiRNA target sequence
tgtatttaggaaatattttaata

SEQ ID NO: 6392 - DNA, 23 bp, Artificial sequence
  SiRNA target sequence
gtatttaggaaatattttaataa

SEQ ID NO: 6393 - DNA, 23 bp, Artificial sequence
  SiRNA target sequence
tatttaggaaatattttaataaa

SEQ ID NO: 6394 - DNA, 23 bp, Artificial sequence
  SiRNA target sequence
atttaggaaatattttaataaat

SEQ ID NO: 6395 - DNA, 23 bp, Artificial sequence
  SiRNA target sequence
tttaggaaatattttaataaatg

SEQ ID NO: 6396 - DNA, 23 bp, Artificial sequence
  SiRNA target sequence
ttaggaaatattttaataaatga

SEQ ID NO: 6397 - DNA, 23 bp, Artificial sequence
  SiRNA target sequence
taggaaatattttaataaatgat

SEQ ID NO: 6398 - DNA, 23 bp, Artificial sequence
  SiRNA target sequence
aggaaatattttaataaatgatg

SEQ ID NO: 6399 - DNA, 23 bp, Artificial sequence
  SiRNA target sequence
ggaaatattttaataaatgatga

SEQ ID NO: 6400 - DNA, 23 bp, Artificial sequence
  SiRNA target sequence
gaaatattttaataaatgatgac

SEQ ID NO: 6401 - DNA, 23 bp, Artificial sequence
  SiRNA target sequence
aaatattttaataaatgatgact

SEQ ID NO: 6402 - DNA, 23 bp, Artificial sequence
  SiRNA target sequence
aatattttaataaatgatgactt

SEQ ID NO: 6403 - DNA, 23 bp, Artificial sequence
  SiRNA target sequence
atattttaataaatgatgactta

SEQ ID NO: 6404 - DNA, 23 bp, Artificial sequence
  SiRNA target sequence
tattttaataaatgatgacttaa

SEQ ID NO: 6405 - DNA, 23 bp, Artificial sequence
  SiRNA target sequence
attttaataaatgatgacttaaa

SEQ ID NO: 6406 - DNA, 23 bp, Artificial sequence
  SiRNA target sequence
ttttaataaatgatgacttaaat

SEQ ID NO: 6407 - DNA, 23 bp, Artificial sequence
  SiRNA target sequence
tttaataaatgatgacttaaatg

SEQ ID NO: 6408 - DNA, 23 bp, Artificial sequence
  SiRNA target sequence
ttaataaatgatgacttaaatga

SEQ ID NO: 6409 - DNA, 23 bp, Artificial sequence
  SiRNA target sequence
taataaatgatgacttaaatgaa

SEQ ID NO: 6410 - DNA, 23 bp, Artificial sequence
  SiRNA target sequence
aataaatgatgacttaaatgaat

SEQ ID NO: 6411 - DNA, 23 bp, Artificial sequence
  SiRNA target sequence
ataaatgatgacttaaatgaatg

SEQ ID NO: 6412 - DNA, 23 bp, Artificial sequence
  SiRNA target sequence
taaatgatgacttaaatgaatgc

SEQ ID NO: 6413 - DNA, 23 bp, Artificial sequence
  SiRNA target sequence
aaatgatgacttaaatgaatgca

SEQ ID NO: 6414 - DNA, 23 bp, Artificial sequence
  SiRNA target sequence
aatgatgacttaaatgaatgcag

SEQ ID NO: 6415 - DNA, 23 bp, Artificial sequence
  SiRNA target sequence
atgatgacttaaatgaatgcagg

SEQ ID NO: 6416 - DNA, 23 bp, Artificial sequence
  SiRNA target sequence
tgatgacttaaatgaatgcagga

SEQ ID NO: 6417 - DNA, 23 bp, Artificial sequence
  SiRNA target sequence
gatgacttaaatgaatgcaggaa

SEQ ID NO: 6418 - DNA, 23 bp, Artificial sequence
  SiRNA target sequence
atgacttaaatgaatgcaggaaa

SEQ ID NO: 6419 - DNA, 23 bp, Artificial sequence
  SiRNA target sequence
tgacttaaatgaatgcaggaaat

SEQ ID NO: 6420 - DNA, 23 bp, Artificial sequence
  SiRNA target sequence
gacttaaatgaatgcaggaaatt

SEQ ID NO: 6421 - DNA, 23 bp, Artificial sequence
  SiRNA target sequence
acttaaatgaatgcaggaaattg

SEQ ID NO: 6422 - DNA, 23 bp, Artificial sequence
  SiRNA target sequence
cttaaatgaatgcaggaaattgt

SEQ ID NO: 6423 - DNA, 23 bp, Artificial sequence
  SiRNA target sequence
ttaaatgaatgcaggaaattgtt

SEQ ID NO: 6424 - DNA, 23 bp, Artificial sequence
  SiRNA target sequence
taaatgaatgcaggaaattgttt

SEQ ID NO: 6425 - DNA, 23 bp, Artificial sequence
  SiRNA target sequence
aaatgaatgcaggaaattgttta

SEQ ID NO: 6426 - DNA, 23 bp, Artificial sequence
  SiRNA target sequence
aatgaatgcaggaaattgtttaa

SEQ ID NO: 6427 - DNA, 23 bp, Artificial sequence
  SiRNA target sequence
atgaatgcaggaaattgtttaat

SEQ ID NO: 6428 - DNA, 23 bp, Artificial sequence
  SiRNA target sequence
tgaatgcaggaaattgtttaata

SEQ ID NO: 6429 - DNA, 23 bp, Artificial sequence
  SiRNA target sequence
gaatgcaggaaattgtttaatac

SEQ ID NO: 6430 - DNA, 23 bp, Artificial sequence
  SiRNA target sequence
aatgcaggaaattgtttaataca

SEQ ID NO: 6431 - DNA, 23 bp, Artificial sequence
  SiRNA target sequence
atgcaggaaattgtttaatacat

SEQ ID NO: 6432 - DNA, 23 bp, Artificial sequence
  SiRNA target sequence
tgcaggaaattgtttaatacatc

SEQ ID NO: 6433 - DNA, 23 bp, Artificial sequence
  SiRNA target sequence
gcaggaaattgtttaatacatca

SEQ ID NO: 6434 - DNA, 23 bp, Artificial sequence
  SiRNA target sequence
caggaaattgtttaatacatcac

SEQ ID NO: 6435 - DNA, 23 bp, Artificial sequence
  SiRNA target sequence
aggaaattgtttaatacatcact

SEQ ID NO: 6436 - DNA, 23 bp, Artificial sequence
  SiRNA target sequence
ggaaattgtttaatacatcactt

SEQ ID NO: 6437 - DNA, 23 bp, Artificial sequence
  SiRNA target sequence
gaaattgtttaatacatcacttc

SEQ ID NO: 6438 - DNA, 23 bp, Artificial sequence
  SiRNA target sequence
aaattgtttaatacatcacttca

SEQ ID NO: 6439 - DNA, 23 bp, Artificial sequence
  SiRNA target sequence
aattgtttaatacatcacttcaa

SEQ ID NO: 6440 - DNA, 23 bp, Artificial sequence
  SiRNA target sequence
attgtttaatacatcacttcaat

SEQ ID NO: 6441 - DNA, 23 bp, Artificial sequence
  SiRNA target sequence
ttgtttaatacatcacttcaata

SEQ ID NO: 6442 - DNA, 23 bp, Artificial sequence
  SiRNA target sequence
tgtttaatacatcacttcaatat

SEQ ID NO: 6443 - DNA, 23 bp, Artificial sequence
  SiRNA target sequence
gtttaatacatcacttcaatatt

SEQ ID NO: 6444 - DNA, 23 bp, Artificial sequence
  SiRNA target sequence
tttaatacatcacttcaatattg

SEQ ID NO: 6445 - DNA, 23 bp, Artificial sequence
  SiRNA target sequence
ttaatacatcacttcaatattgt

SEQ ID NO: 6446 - DNA, 23 bp, Artificial sequence
  SiRNA target sequence
taatacatcacttcaatattgtt

SEQ ID NO: 6447 - DNA, 23 bp, Artificial sequence
  SiRNA target sequence
aatacatcacttcaatattgttg

SEQ ID NO: 6448 - DNA, 23 bp, Artificial sequence
  SiRNA target sequence
atacatcacttcaatattgttgt

SEQ ID NO: 6449 - DNA, 23 bp, Artificial sequence
  SiRNA target sequence
tacatcacttcaatattgttgta

SEQ ID NO: 6450 - DNA, 23 bp, Artificial sequence
  SiRNA target sequence
acatcacttcaatattgttgtaa

SEQ ID NO: 6451 - DNA, 23 bp, Artificial sequence
  SiRNA target sequence
catcacttcaatattgttgtaat

SEQ ID NO: 6452 - DNA, 23 bp, Artificial sequence
  SiRNA target sequence
atcacttcaatattgttgtaatt

SEQ ID NO: 6453 - DNA, 23 bp, Artificial sequence
  SiRNA target sequence
tcacttcaatattgttgtaattc

SEQ ID NO: 6454 - DNA, 23 bp, Artificial sequence
  SiRNA target sequence
cacttcaatattgttgtaattct

SEQ ID NO: 6455 - DNA, 23 bp, Artificial sequence
  SiRNA target sequence
acttcaatattgttgtaattctg

SEQ ID NO: 6456 - DNA, 23 bp, Artificial sequence
  SiRNA target sequence
cttcaatattgttgtaattctga

SEQ ID NO: 6457 - DNA, 23 bp, Artificial sequence
  SiRNA target sequence
ttcaatattgttgtaattctgat

SEQ ID NO: 6458 - DNA, 23 bp, Artificial sequence
  SiRNA target sequence
tcaatattgttgtaattctgatg

SEQ ID NO: 6459 - DNA, 23 bp, Artificial sequence
  SiRNA target sequence
caatattgttgtaattctgatga

SEQ ID NO: 6460 - DNA, 23 bp, Artificial sequence
  SiRNA target sequence
aatattgttgtaattctgatgag

SEQ ID NO: 6461 - DNA, 23 bp, Artificial sequence
  SiRNA target sequence
atattgttgtaattctgatgagg

SEQ ID NO: 6462 - DNA, 23 bp, Artificial sequence
  SiRNA target sequence
tattgttgtaattctgatgaggt

SEQ ID NO: 6463 - DNA, 23 bp, Artificial sequence
  SiRNA target sequence
attgttgtaattctgatgaggtt

SEQ ID NO: 6464 - DNA, 23 bp, Artificial sequence
  SiRNA target sequence
ttgttgtaattctgatgaggttt

SEQ ID NO: 6465 - DNA, 23 bp, Artificial sequence
  SiRNA target sequence
tgttgtaattctgatgaggtttt

SEQ ID NO: 6466 - DNA, 23 bp, Artificial sequence
  SiRNA target sequence
gttgtaattctgatgaggttttt

SEQ ID NO: 6467 - DNA, 23 bp, Artificial sequence
  SiRNA target sequence
ttgtaattctgatgaggttttta

SEQ ID NO: 6468 - DNA, 23 bp, Artificial sequence
  SiRNA target sequence
tgtaattctgatgaggtttttat

SEQ ID NO: 6469 - DNA, 23 bp, Artificial sequence
  SiRNA target sequence
gtaattctgatgaggtttttatt

SEQ ID NO: 6470 - DNA, 23 bp, Artificial sequence
  SiRNA target sequence
taattctgatgaggtttttattg

SEQ ID NO: 6471 - DNA, 23 bp, Artificial sequence
  SiRNA target sequence
aattctgatgaggtttttattgt

SEQ ID NO: 6472 - DNA, 23 bp, Artificial sequence
  SiRNA target sequence
attctgatgaggtttttattgtt

SEQ ID NO: 6473 - DNA, 23 bp, Artificial sequence
  SiRNA target sequence
ttctgatgaggtttttattgtta

SEQ ID NO: 6474 - DNA, 23 bp, Artificial sequence
  SiRNA target sequence
tctgatgaggtttttattgttaa

SEQ ID NO: 6475 - DNA, 23 bp, Artificial sequence
  SiRNA target sequence
ctgatgaggtttttattgttaag

SEQ ID NO: 6476 - DNA, 23 bp, Artificial sequence
  SiRNA target sequence
tgatgaggtttttattgttaagc

SEQ ID NO: 6477 - DNA, 23 bp, Artificial sequence
  SiRNA target sequence
gatgaggtttttattgttaagca

SEQ ID NO: 6478 - DNA, 23 bp, Artificial sequence
  SiRNA target sequence
atgaggtttttattgttaagcag

SEQ ID NO: 6479 - DNA, 23 bp, Artificial sequence
  SiRNA target sequence
tgaggtttttattgttaagcagt

SEQ ID NO: 6480 - DNA, 23 bp, Artificial sequence
  SiRNA target sequence
gaggtttttattgttaagcagtc

SEQ ID NO: 6481 - DNA, 23 bp, Artificial sequence
  SiRNA target sequence
aggtttttattgttaagcagtca

SEQ ID NO: 6482 - DNA, 23 bp, Artificial sequence
  SiRNA target sequence
ggtttttattgttaagcagtcac

SEQ ID NO: 6483 - DNA, 23 bp, Artificial sequence
  SiRNA target sequence
gtttttattgttaagcagtcact

SEQ ID NO: 6484 - DNA, 23 bp, Artificial sequence
  SiRNA target sequence
tttttattgttaagcagtcactt

SEQ ID NO: 6485 - DNA, 23 bp, Artificial sequence
  SiRNA target sequence
ttttattgttaagcagtcactta

SEQ ID NO: 6486 - DNA, 23 bp, Artificial sequence
  SiRNA target sequence
tttattgttaagcagtcacttat

SEQ ID NO: 6487 - DNA, 23 bp, Artificial sequence
  SiRNA target sequence
ttattgttaagcagtcacttatt

SEQ ID NO: 6488 - DNA, 23 bp, Artificial sequence
  SiRNA target sequence
tattgttaagcagtcacttattt

SEQ ID NO: 6489 - DNA, 23 bp, Artificial sequence
  SiRNA target sequence
attgttaagcagtcacttatttt

SEQ ID NO: 6490 - DNA, 23 bp, Artificial sequence
  SiRNA target sequence
ttgttaagcagtcacttatttta

SEQ ID NO: 6491 - DNA, 23 bp, Artificial sequence
  SiRNA target sequence
tgttaagcagtcacttattttaa

SEQ ID NO: 6492 - DNA, 23 bp, Artificial sequence
  SiRNA target sequence
gttaagcagtcacttattttaat

SEQ ID NO: 6493 - DNA, 23 bp, Artificial sequence
  SiRNA target sequence
ttaagcagtcacttattttaata

SEQ ID NO: 6494 - DNA, 23 bp, Artificial sequence
  SiRNA target sequence
taagcagtcacttattttaatag

SEQ ID NO: 6495 - DNA, 23 bp, Artificial sequence
  SiRNA target sequence
aagcagtcacttattttaataga

SEQ ID NO: 6496 - DNA, 23 bp, Artificial sequence
  SiRNA target sequence
agcagtcacttattttaatagaa

SEQ ID NO: 6497 - DNA, 23 bp, Artificial sequence
  SiRNA target sequence
gcagtcacttattttaatagaag

SEQ ID NO: 6498 - DNA, 23 bp, Artificial sequence
  SiRNA target sequence
cagtcacttattttaatagaagt

SEQ ID NO: 6499 - DNA, 23 bp, Artificial sequence
  SiRNA target sequence
agtcacttattttaatagaagta

SEQ ID NO: 6500 - DNA, 23 bp, Artificial sequence
  SiRNA target sequence
gtcacttattttaatagaagtac

SEQ ID NO: 6501 - DNA, 23 bp, Artificial sequence
  SiRNA target sequence
tcacttattttaatagaagtaca

SEQ ID NO: 6502 - DNA, 23 bp, Artificial sequence
  SiRNA target sequence
cacttattttaatagaagtacat

SEQ ID NO: 6503 - DNA, 23 bp, Artificial sequence
  SiRNA target sequence
acttattttaatagaagtacatg

SEQ ID NO: 6504 - DNA, 23 bp, Artificial sequence
  SiRNA target sequence
cttattttaatagaagtacatga

SEQ ID NO: 6505 - DNA, 23 bp, Artificial sequence
  SiRNA target sequence
ttattttaatagaagtacatgaa

SEQ ID NO: 6506 - DNA, 23 bp, Artificial sequence
  SiRNA target sequence
tattttaatagaagtacatgaat

SEQ ID NO: 6507 - DNA, 23 bp, Artificial sequence
  SiRNA target sequence
attttaatagaagtacatgaata

SEQ ID NO: 6508 - DNA, 23 bp, Artificial sequence
  SiRNA target sequence
ttttaatagaagtacatgaatac

SEQ ID NO: 6509 - DNA, 23 bp, Artificial sequence
  SiRNA target sequence
tttaatagaagtacatgaataca

SEQ ID NO: 6510 - DNA, 23 bp, Artificial sequence
  SiRNA target sequence
ttaatagaagtacatgaatacat

SEQ ID NO: 6511 - DNA, 23 bp, Artificial sequence
  SiRNA target sequence
taatagaagtacatgaatacatc

SEQ ID NO: 6512 - DNA, 23 bp, Artificial sequence
  SiRNA target sequence
aatagaagtacatgaatacatca

SEQ ID NO: 6513 - DNA, 23 bp, Artificial sequence
  SiRNA target sequence
atagaagtacatgaatacatcaa

SEQ ID NO: 6514 - DNA, 23 bp, Artificial sequence
  SiRNA target sequence
tagaagtacatgaatacatcaaa

SEQ ID NO: 6515 - DNA, 23 bp, Artificial sequence
  SiRNA target sequence
agaagtacatgaatacatcaaag

SEQ ID NO: 6516 - DNA, 23 bp, Artificial sequence
  SiRNA target sequence
gaagtacatgaatacatcaaaga

SEQ ID NO: 6517 - DNA, 23 bp, Artificial sequence
  SiRNA target sequence
aagtacatgaatacatcaaagaa

SEQ ID NO: 6518 - DNA, 23 bp, Artificial sequence
  SiRNA target sequence
agtacatgaatacatcaaagaaa

SEQ ID NO: 6519 - DNA, 23 bp, Artificial sequence
  SiRNA target sequence
gtacatgaatacatcaaagaaaa

SEQ ID NO: 6520 - DNA, 23 bp, Artificial sequence
  SiRNA target sequence
tacatgaatacatcaaagaaaat

SEQ ID NO: 6521 - DNA, 23 bp, Artificial sequence
  SiRNA target sequence
acatgaatacatcaaagaaaata

SEQ ID NO: 6522 - DNA, 23 bp, Artificial sequence
  SiRNA target sequence
catgaatacatcaaagaaaataa

SEQ ID NO: 6523 - DNA, 23 bp, Artificial sequence
  SiRNA target sequence
atgaatacatcaaagaaaataaa

SEQ ID NO: 6524 - DNA, 23 bp, Artificial sequence
  SiRNA target sequence
tgaatacatcaaagaaaataaaa

SEQ ID NO: 6525 - DNA, 23 bp, Artificial sequence
  SiRNA target sequence
gaatacatcaaagaaaataaaat

SEQ ID NO: 6526 - DNA, 23 bp, Artificial sequence
  SiRNA target sequence
aatacatcaaagaaaataaaata

SEQ ID NO: 6527 - DNA, 23 bp, Artificial sequence
  SiRNA target sequence
atacatcaaagaaaataaaatat

SEQ ID NO: 6528 - DNA, 23 bp, Artificial sequence
  SiRNA target sequence
tacatcaaagaaaataaaatata

SEQ ID NO: 6529 - DNA, 23 bp, Artificial sequence
  SiRNA target sequence
acatcaaagaaaataaaatataa

SEQ ID NO: 6530 - DNA, 24 bp, Artificial sequence
  SiRNA target sequence
atgaaacgaaaaacagaaatattt

SEQ ID NO: 6531 - DNA, 24 bp, Artificial sequence
  SiRNA target sequence
tgaaacgaaaaacagaaatattta

SEQ ID NO: 6532 - DNA, 24 bp, Artificial sequence
  SiRNA target sequence
gaaacgaaaaacagaaatatttat

SEQ ID NO: 6533 - DNA, 24 bp, Artificial sequence
  SiRNA target sequence
aaacgaaaaacagaaatatttatt

SEQ ID NO: 6534 - DNA, 24 bp, Artificial sequence
  SiRNA target sequence
aacgaaaaacagaaatatttattg

SEQ ID NO: 6535 - DNA, 24 bp, Artificial sequence
  SiRNA target sequence
acgaaaaacagaaatatttattgc

SEQ ID NO: 6536 - DNA, 24 bp, Artificial sequence
  SiRNA target sequence
cgaaaaacagaaatatttattgct

SEQ ID NO: 6537 - DNA, 24 bp, Artificial sequence
  SiRNA target sequence
gaaaaacagaaatatttattgcta

SEQ ID NO: 6538 - DNA, 24 bp, Artificial sequence
  SiRNA target sequence
aaaaacagaaatatttattgctat

SEQ ID NO: 6539 - DNA, 24 bp, Artificial sequence
  SiRNA target sequence
aaaacagaaatatttattgctatt

SEQ ID NO: 6540 - DNA, 24 bp, Artificial sequence
  SiRNA target sequence
aaacagaaatatttattgctatta

SEQ ID NO: 6541 - DNA, 24 bp, Artificial sequence
  SiRNA target sequence
aacagaaatatttattgctattac

SEQ ID NO: 6542 - DNA, 24 bp, Artificial sequence
  SiRNA target sequence
acagaaatatttattgctattaca

SEQ ID NO: 6543 - DNA, 24 bp, Artificial sequence
  SiRNA target sequence
cagaaatatttattgctattacag

SEQ ID NO: 6544 - DNA, 24 bp, Artificial sequence
  SiRNA target sequence
agaaatatttattgctattacagt

SEQ ID NO: 6545 - DNA, 24 bp, Artificial sequence
  SiRNA target sequence
gaaatatttattgctattacagta

SEQ ID NO: 6546 - DNA, 24 bp, Artificial sequence
  SiRNA target sequence
aaatatttattgctattacagtag

SEQ ID NO: 6547 - DNA, 24 bp, Artificial sequence
  SiRNA target sequence
aatatttattgctattacagtagt

SEQ ID NO: 6548 - DNA, 24 bp, Artificial sequence
  SiRNA target sequence
atatttattgctattacagtagtc

SEQ ID NO: 6549 - DNA, 24 bp, Artificial sequence
  SiRNA target sequence
tatttattgctattacagtagtca

SEQ ID NO: 6550 - DNA, 24 bp, Artificial sequence
  SiRNA target sequence
atttattgctattacagtagtcac

SEQ ID NO: 6551 - DNA, 24 bp, Artificial sequence
  SiRNA target sequence
tttattgctattacagtagtcact

SEQ ID NO: 6552 - DNA, 24 bp, Artificial sequence
  SiRNA target sequence
ttattgctattacagtagtcactg

SEQ ID NO: 6553 - DNA, 24 bp, Artificial sequence
  SiRNA target sequence
tattgctattacagtagtcactgc

SEQ ID NO: 6554 - DNA, 24 bp, Artificial sequence
  SiRNA target sequence
attgctattacagtagtcactgca

SEQ ID NO: 6555 - DNA, 24 bp, Artificial sequence
  SiRNA target sequence
ttgctattacagtagtcactgcag

SEQ ID NO: 6556 - DNA, 24 bp, Artificial sequence
  SiRNA target sequence
tgctattacagtagtcactgcagt

SEQ ID NO: 6557 - DNA, 24 bp, Artificial sequence
  SiRNA target sequence
gctattacagtagtcactgcagtg

SEQ ID NO: 6558 - DNA, 24 bp, Artificial sequence
  SiRNA target sequence
ctattacagtagtcactgcagtga

SEQ ID NO: 6559 - DNA, 24 bp, Artificial sequence
  SiRNA target sequence
tattacagtagtcactgcagtgac

SEQ ID NO: 6560 - DNA, 24 bp, Artificial sequence
  SiRNA target sequence
attacagtagtcactgcagtgaca

SEQ ID NO: 6561 - DNA, 24 bp, Artificial sequence
  SiRNA target sequence
ttacagtagtcactgcagtgacat

SEQ ID NO: 6562 - DNA, 24 bp, Artificial sequence
  SiRNA target sequence
tacagtagtcactgcagtgacatg

SEQ ID NO: 6563 - DNA, 24 bp, Artificial sequence
  SiRNA target sequence
acagtagtcactgcagtgacatgt

SEQ ID NO: 6564 - DNA, 24 bp, Artificial sequence
  SiRNA target sequence
cagtagtcactgcagtgacatgtt

SEQ ID NO: 6565 - DNA, 24 bp, Artificial sequence
  SiRNA target sequence
agtagtcactgcagtgacatgtta

SEQ ID NO: 6566 - DNA, 24 bp, Artificial sequence
  SiRNA target sequence
gtagtcactgcagtgacatgttac

SEQ ID NO: 6567 - DNA, 24 bp, Artificial sequence
  SiRNA target sequence
tagtcactgcagtgacatgttact

SEQ ID NO: 6568 - DNA, 24 bp, Artificial sequence
  SiRNA target sequence
agtcactgcagtgacatgttactt

SEQ ID NO: 6569 - DNA, 24 bp, Artificial sequence
  SiRNA target sequence
gtcactgcagtgacatgttactta

SEQ ID NO: 6570 - DNA, 24 bp, Artificial sequence
  SiRNA target sequence
tcactgcagtgacatgttacttat

SEQ ID NO: 6571 - DNA, 24 bp, Artificial sequence
  SiRNA target sequence
cactgcagtgacatgttacttatt

SEQ ID NO: 6572 - DNA, 24 bp, Artificial sequence
  SiRNA target sequence
actgcagtgacatgttacttattt

SEQ ID NO: 6573 - DNA, 24 bp, Artificial sequence
  SiRNA target sequence
ctgcagtgacatgttacttattta

SEQ ID NO: 6574 - DNA, 24 bp, Artificial sequence
  SiRNA target sequence
tgcagtgacatgttacttatttaa

SEQ ID NO: 6575 - DNA, 24 bp, Artificial sequence
  SiRNA target sequence
gcagtgacatgttacttatttaaa

SEQ ID NO: 6576 - DNA, 24 bp, Artificial sequence
  SiRNA target sequence
cagtgacatgttacttatttaaaa

SEQ ID NO: 6577 - DNA, 24 bp, Artificial sequence
  SiRNA target sequence
agtgacatgttacttatttaaaaa

SEQ ID NO: 6578 - DNA, 24 bp, Artificial sequence
  SiRNA target sequence
gtgacatgttacttatttaaaaaa

SEQ ID NO: 6579 - DNA, 24 bp, Artificial sequence
  SiRNA target sequence
tgacatgttacttatttaaaaaaa

SEQ ID NO: 6580 - DNA, 24 bp, Artificial sequence
  SiRNA target sequence
gacatgttacttatttaaaaaaat

SEQ ID NO: 6581 - DNA, 24 bp, Artificial sequence
  SiRNA target sequence
acatgttacttatttaaaaaaata

SEQ ID NO: 6582 - DNA, 24 bp, Artificial sequence
  SiRNA target sequence
catgttacttatttaaaaaaataa

SEQ ID NO: 6583 - DNA, 24 bp, Artificial sequence
  SiRNA target sequence
atgttacttatttaaaaaaataat

SEQ ID NO: 6584 - DNA, 24 bp, Artificial sequence
  SiRNA target sequence
tgttacttatttaaaaaaataata

SEQ ID NO: 6585 - DNA, 24 bp, Artificial sequence
  SiRNA target sequence
gttacttatttaaaaaaataataa

SEQ ID NO: 6586 - DNA, 24 bp, Artificial sequence
  SiRNA target sequence
ttacttatttaaaaaaataataaa

SEQ ID NO: 6587 - DNA, 24 bp, Artificial sequence
  SiRNA target sequence
tacttatttaaaaaaataataaat

SEQ ID NO: 6588 - DNA, 24 bp, Artificial sequence
  SiRNA target sequence
acttatttaaaaaaataataaata

SEQ ID NO: 6589 - DNA, 24 bp, Artificial sequence
  SiRNA target sequence
cttatttaaaaaaataataaatag

SEQ ID NO: 6590 - DNA, 24 bp, Artificial sequence
  SiRNA target sequence
ttatttaaaaaaataataaataga

SEQ ID NO: 6591 - DNA, 24 bp, Artificial sequence
  SiRNA target sequence
tatttaaaaaaataataaatagac

SEQ ID NO: 6592 - DNA, 24 bp, Artificial sequence
  SiRNA target sequence
atttaaaaaaataataaatagaca

SEQ ID NO: 6593 - DNA, 24 bp, Artificial sequence
  SiRNA target sequence
tttaaaaaaataataaatagacaa

SEQ ID NO: 6594 - DNA, 24 bp, Artificial sequence
  SiRNA target sequence
ttaaaaaaataataaatagacaaa

SEQ ID NO: 6595 - DNA, 24 bp, Artificial sequence
  SiRNA target sequence
taaaaaaataataaatagacaaaa

SEQ ID NO: 6596 - DNA, 24 bp, Artificial sequence
  SiRNA target sequence
aaaaaaataataaatagacaaaag

SEQ ID NO: 6597 - DNA, 24 bp, Artificial sequence
  SiRNA target sequence
aaaaaataataaatagacaaaagt

SEQ ID NO: 6598 - DNA, 24 bp, Artificial sequence
  SiRNA target sequence
aaaaataataaatagacaaaagtc

SEQ ID NO: 6599 - DNA, 24 bp, Artificial sequence
  SiRNA target sequence
aaaataataaatagacaaaagtct

SEQ ID NO: 6600 - DNA, 24 bp, Artificial sequence
  SiRNA target sequence
aaataataaatagacaaaagtctg

SEQ ID NO: 6601 - DNA, 24 bp, Artificial sequence
  SiRNA target sequence
aataataaatagacaaaagtctga

SEQ ID NO: 6602 - DNA, 24 bp, Artificial sequence
  SiRNA target sequence
ataataaatagacaaaagtctgat

SEQ ID NO: 6603 - DNA, 24 bp, Artificial sequence
  SiRNA target sequence
taataaatagacaaaagtctgatt

SEQ ID NO: 6604 - DNA, 24 bp, Artificial sequence
  SiRNA target sequence
aataaatagacaaaagtctgatta

SEQ ID NO: 6605 - DNA, 24 bp, Artificial sequence
  SiRNA target sequence
ataaatagacaaaagtctgattat

SEQ ID NO: 6606 - DNA, 24 bp, Artificial sequence
  SiRNA target sequence
taaatagacaaaagtctgattata

SEQ ID NO: 6607 - DNA, 24 bp, Artificial sequence
  SiRNA target sequence
aaatagacaaaagtctgattatac

SEQ ID NO: 6608 - DNA, 24 bp, Artificial sequence
  SiRNA target sequence
aatagacaaaagtctgattataca

SEQ ID NO: 6609 - DNA, 24 bp, Artificial sequence
  SiRNA target sequence
atagacaaaagtctgattatacat

SEQ ID NO: 6610 - DNA, 24 bp, Artificial sequence
  SiRNA target sequence
tagacaaaagtctgattatacatc

SEQ ID NO: 6611 - DNA, 24 bp, Artificial sequence
  SiRNA target sequence
agacaaaagtctgattatacatca

SEQ ID NO: 6612 - DNA, 24 bp, Artificial sequence
  SiRNA target sequence
gacaaaagtctgattatacatcaa

SEQ ID NO: 6613 - DNA, 24 bp, Artificial sequence
  SiRNA target sequence
acaaaagtctgattatacatcaat

SEQ ID NO: 6614 - DNA, 24 bp, Artificial sequence
  SiRNA target sequence
caaaagtctgattatacatcaata

SEQ ID NO: 6615 - DNA, 24 bp, Artificial sequence
  SiRNA target sequence
aaaagtctgattatacatcaataa

SEQ ID NO: 6616 - DNA, 24 bp, Artificial sequence
  SiRNA target sequence
aaagtctgattatacatcaataaa

SEQ ID NO: 6617 - DNA, 24 bp, Artificial sequence
  SiRNA target sequence
aagtctgattatacatcaataaaa

SEQ ID NO: 6618 - DNA, 24 bp, Artificial sequence
  SiRNA target sequence
agtctgattatacatcaataaaac

SEQ ID NO: 6619 - DNA, 24 bp, Artificial sequence
  SiRNA target sequence
gtctgattatacatcaataaaaca

SEQ ID NO: 6620 - DNA, 24 bp, Artificial sequence
  SiRNA target sequence
tctgattatacatcaataaaacag

SEQ ID NO: 6621 - DNA, 24 bp, Artificial sequence
  SiRNA target sequence
ctgattatacatcaataaaacagg

SEQ ID NO: 6622 - DNA, 24 bp, Artificial sequence
  SiRNA target sequence
tgattatacatcaataaaacagga

SEQ ID NO: 6623 - DNA, 24 bp, Artificial sequence
  SiRNA target sequence
gattatacatcaataaaacaggaa

SEQ ID NO: 6624 - DNA, 24 bp, Artificial sequence
  SiRNA target sequence
attatacatcaataaaacaggaag

SEQ ID NO: 6625 - DNA, 24 bp, Artificial sequence
  SiRNA target sequence
ttatacatcaataaaacaggaagc

SEQ ID NO: 6626 - DNA, 24 bp, Artificial sequence
  SiRNA target sequence
tatacatcaataaaacaggaagca

SEQ ID NO: 6627 - DNA, 24 bp, Artificial sequence
  SiRNA target sequence
atacatcaataaaacaggaagcag

SEQ ID NO: 6628 - DNA, 24 bp, Artificial sequence
  SiRNA target sequence
tacatcaataaaacaggaagcaga

SEQ ID NO: 6629 - DNA, 24 bp, Artificial sequence
  SiRNA target sequence
acatcaataaaacaggaagcagat

SEQ ID NO: 6630 - DNA, 24 bp, Artificial sequence
  SiRNA target sequence
catcaataaaacaggaagcagata

SEQ ID NO: 6631 - DNA, 24 bp, Artificial sequence
  SiRNA target sequence
atcaataaaacaggaagcagataa

SEQ ID NO: 6632 - DNA, 24 bp, Artificial sequence
  SiRNA target sequence
tcaataaaacaggaagcagataaa

SEQ ID NO: 6633 - DNA, 24 bp, Artificial sequence
  SiRNA target sequence
caataaaacaggaagcagataaat

SEQ ID NO: 6634 - DNA, 24 bp, Artificial sequence
  SiRNA target sequence
aataaaacaggaagcagataaata

SEQ ID NO: 6635 - DNA, 24 bp, Artificial sequence
  SiRNA target sequence
ataaaacaggaagcagataaatat

SEQ ID NO: 6636 - DNA, 24 bp, Artificial sequence
  SiRNA target sequence
taaaacaggaagcagataaatatt

SEQ ID NO: 6637 - DNA, 24 bp, Artificial sequence
  SiRNA target sequence
aaaacaggaagcagataaatattt

SEQ ID NO: 6638 - DNA, 24 bp, Artificial sequence
  SiRNA target sequence
aaacaggaagcagataaatatttt

SEQ ID NO: 6639 - DNA, 24 bp, Artificial sequence
  SiRNA target sequence
aacaggaagcagataaatatttta

SEQ ID NO: 6640 - DNA, 24 bp, Artificial sequence
  SiRNA target sequence
acaggaagcagataaatattttat

SEQ ID NO: 6641 - DNA, 24 bp, Artificial sequence
  SiRNA target sequence
caggaagcagataaatattttata

SEQ ID NO: 6642 - DNA, 24 bp, Artificial sequence
  SiRNA target sequence
aggaagcagataaatattttatac

SEQ ID NO: 6643 - DNA, 24 bp, Artificial sequence
  SiRNA target sequence
ggaagcagataaatattttataca

SEQ ID NO: 6644 - DNA, 24 bp, Artificial sequence
  SiRNA target sequence
gaagcagataaatattttatacaa

SEQ ID NO: 6645 - DNA, 24 bp, Artificial sequence
  SiRNA target sequence
aagcagataaatattttatacaag

SEQ ID NO: 6646 - DNA, 24 bp, Artificial sequence
  SiRNA target sequence
agcagataaatattttatacaaga

SEQ ID NO: 6647 - DNA, 24 bp, Artificial sequence
  SiRNA target sequence
gcagataaatattttatacaagaa

SEQ ID NO: 6648 - DNA, 24 bp, Artificial sequence
  SiRNA target sequence
cagataaatattttatacaagaag

SEQ ID NO: 6649 - DNA, 24 bp, Artificial sequence
  SiRNA target sequence
agataaatattttatacaagaaga

SEQ ID NO: 6650 - DNA, 24 bp, Artificial sequence
  SiRNA target sequence
gataaatattttatacaagaagat

SEQ ID NO: 6651 - DNA, 24 bp, Artificial sequence
  SiRNA target sequence
ataaatattttatacaagaagatt

SEQ ID NO: 6652 - DNA, 24 bp, Artificial sequence
  SiRNA target sequence
taaatattttatacaagaagatta

SEQ ID NO: 6653 - DNA, 24 bp, Artificial sequence
  SiRNA target sequence
aaatattttatacaagaagattat

SEQ ID NO: 6654 - DNA, 24 bp, Artificial sequence
  SiRNA target sequence
aatattttatacaagaagattata

SEQ ID NO: 6655 - DNA, 24 bp, Artificial sequence
  SiRNA target sequence
atattttatacaagaagattataa

SEQ ID NO: 6656 - DNA, 24 bp, Artificial sequence
  SiRNA target sequence
tattttatacaagaagattataaa

SEQ ID NO: 6657 - DNA, 24 bp, Artificial sequence
  SiRNA target sequence
attttatacaagaagattataaaa

SEQ ID NO: 6658 - DNA, 24 bp, Artificial sequence
  SiRNA target sequence
ttttatacaagaagattataaaaa

SEQ ID NO: 6659 - DNA, 24 bp, Artificial sequence
  SiRNA target sequence
tttatacaagaagattataaaaat

SEQ ID NO: 6660 - DNA, 24 bp, Artificial sequence
  SiRNA target sequence
ttatacaagaagattataaaaatg

SEQ ID NO: 6661 - DNA, 24 bp, Artificial sequence
  SiRNA target sequence
tatacaagaagattataaaaatgc

SEQ ID NO: 6662 - DNA, 24 bp, Artificial sequence
  SiRNA target sequence
atacaagaagattataaaaatgct

SEQ ID NO: 6663 - DNA, 24 bp, Artificial sequence
  SiRNA target sequence
tacaagaagattataaaaatgcta

SEQ ID NO: 6664 - DNA, 24 bp, Artificial sequence
  SiRNA target sequence
acaagaagattataaaaatgctat

SEQ ID NO: 6665 - DNA, 24 bp, Artificial sequence
  SiRNA target sequence
caagaagattataaaaatgctatt

SEQ ID NO: 6666 - DNA, 24 bp, Artificial sequence
  SiRNA target sequence
aagaagattataaaaatgctattc

SEQ ID NO: 6667 - DNA, 24 bp, Artificial sequence
  SiRNA target sequence
agaagattataaaaatgctattct

SEQ ID NO: 6668 - DNA, 24 bp, Artificial sequence
  SiRNA target sequence
gaagattataaaaatgctattctg

SEQ ID NO: 6669 - DNA, 24 bp, Artificial sequence
  SiRNA target sequence
aagattataaaaatgctattctgt

SEQ ID NO: 6670 - DNA, 24 bp, Artificial sequence
  SiRNA target sequence
agattataaaaatgctattctgtt

SEQ ID NO: 6671 - DNA, 24 bp, Artificial sequence
  SiRNA target sequence
gattataaaaatgctattctgttg

SEQ ID NO: 6672 - DNA, 24 bp, Artificial sequence
  SiRNA target sequence
attataaaaatgctattctgttgt

SEQ ID NO: 6673 - DNA, 24 bp, Artificial sequence
  SiRNA target sequence
ttataaaaatgctattctgttgta

SEQ ID NO: 6674 - DNA, 24 bp, Artificial sequence
  SiRNA target sequence
tataaaaatgctattctgttgtac

SEQ ID NO: 6675 - DNA, 24 bp, Artificial sequence
  SiRNA target sequence
ataaaaatgctattctgttgtaca

SEQ ID NO: 6676 - DNA, 24 bp, Artificial sequence
  SiRNA target sequence
taaaaatgctattctgttgtacac

SEQ ID NO: 6677 - DNA, 24 bp, Artificial sequence
  SiRNA target sequence
aaaaatgctattctgttgtacact

SEQ ID NO: 6678 - DNA, 24 bp, Artificial sequence
  SiRNA target sequence
aaaatgctattctgttgtacacta

SEQ ID NO: 6679 - DNA, 24 bp, Artificial sequence
  SiRNA target sequence
aaatgctattctgttgtacactaa

SEQ ID NO: 6680 - DNA, 24 bp, Artificial sequence
  SiRNA target sequence
aatgctattctgttgtacactaaa

SEQ ID NO: 6681 - DNA, 24 bp, Artificial sequence
  SiRNA target sequence
atgctattctgttgtacactaaat

SEQ ID NO: 6682 - DNA, 24 bp, Artificial sequence
  SiRNA target sequence
tgctattctgttgtacactaaatg

SEQ ID NO: 6683 - DNA, 24 bp, Artificial sequence
  SiRNA target sequence
gctattctgttgtacactaaatgt

SEQ ID NO: 6684 - DNA, 24 bp, Artificial sequence
  SiRNA target sequence
ctattctgttgtacactaaatgta

SEQ ID NO: 6685 - DNA, 24 bp, Artificial sequence
  SiRNA target sequence
tattctgttgtacactaaatgtaa

SEQ ID NO: 6686 - DNA, 24 bp, Artificial sequence
  SiRNA target sequence
attctgttgtacactaaatgtaaa

SEQ ID NO: 6687 - DNA, 24 bp, Artificial sequence
  SiRNA target sequence
ttctgttgtacactaaatgtaaat

SEQ ID NO: 6688 - DNA, 24 bp, Artificial sequence
  SiRNA target sequence
tctgttgtacactaaatgtaaata

SEQ ID NO: 6689 - DNA, 24 bp, Artificial sequence
  SiRNA target sequence
ctgttgtacactaaatgtaaatat

SEQ ID NO: 6690 - DNA, 24 bp, Artificial sequence
  SiRNA target sequence
tgttgtacactaaatgtaaatata

SEQ ID NO: 6691 - DNA, 24 bp, Artificial sequence
  SiRNA target sequence
gttgtacactaaatgtaaatatat

SEQ ID NO: 6692 - DNA, 24 bp, Artificial sequence
  SiRNA target sequence
ttgtacactaaatgtaaatatatg

SEQ ID NO: 6693 - DNA, 24 bp, Artificial sequence
  SiRNA target sequence
tgtacactaaatgtaaatatatga

SEQ ID NO: 6694 - DNA, 24 bp, Artificial sequence
  SiRNA target sequence
gtacactaaatgtaaatatatgaa

SEQ ID NO: 6695 - DNA, 24 bp, Artificial sequence
  SiRNA target sequence
tacactaaatgtaaatatatgaaa

SEQ ID NO: 6696 - DNA, 24 bp, Artificial sequence
  SiRNA target sequence
acactaaatgtaaatatatgaaaa

SEQ ID NO: 6697 - DNA, 24 bp, Artificial sequence
  SiRNA target sequence
cactaaatgtaaatatatgaaaag

SEQ ID NO: 6698 - DNA, 24 bp, Artificial sequence
  SiRNA target sequence
actaaatgtaaatatatgaaaagt

SEQ ID NO: 6699 - DNA, 24 bp, Artificial sequence
  SiRNA target sequence
ctaaatgtaaatatatgaaaagtg

SEQ ID NO: 6700 - DNA, 24 bp, Artificial sequence
  SiRNA target sequence
taaatgtaaatatatgaaaagtga

SEQ ID NO: 6701 - DNA, 24 bp, Artificial sequence
  SiRNA target sequence
aaatgtaaatatatgaaaagtgat

SEQ ID NO: 6702 - DNA, 24 bp, Artificial sequence
  SiRNA target sequence
aatgtaaatatatgaaaagtgatg

SEQ ID NO: 6703 - DNA, 24 bp, Artificial sequence
  SiRNA target sequence
atgtaaatatatgaaaagtgatgc

SEQ ID NO: 6704 - DNA, 24 bp, Artificial sequence
  SiRNA target sequence
tgtaaatatatgaaaagtgatgct

SEQ ID NO: 6705 - DNA, 24 bp, Artificial sequence
  SiRNA target sequence
gtaaatatatgaaaagtgatgctg

SEQ ID NO: 6706 - DNA, 24 bp, Artificial sequence
  SiRNA target sequence
taaatatatgaaaagtgatgctga

SEQ ID NO: 6707 - DNA, 24 bp, Artificial sequence
  SiRNA target sequence
aaatatatgaaaagtgatgctgaa

SEQ ID NO: 6708 - DNA, 24 bp, Artificial sequence
  SiRNA target sequence
aatatatgaaaagtgatgctgaaa

SEQ ID NO: 6709 - DNA, 24 bp, Artificial sequence
  SiRNA target sequence
atatatgaaaagtgatgctgaaat

SEQ ID NO: 6710 - DNA, 24 bp, Artificial sequence
  SiRNA target sequence
tatatgaaaagtgatgctgaaatt

SEQ ID NO: 6711 - DNA, 24 bp, Artificial sequence
  SiRNA target sequence
atatgaaaagtgatgctgaaattc

SEQ ID NO: 6712 - DNA, 24 bp, Artificial sequence
  SiRNA target sequence
tatgaaaagtgatgctgaaattct

SEQ ID NO: 6713 - DNA, 24 bp, Artificial sequence
  SiRNA target sequence
atgaaaagtgatgctgaaattctt

SEQ ID NO: 6714 - DNA, 24 bp, Artificial sequence
  SiRNA target sequence
tgaaaagtgatgctgaaattctta

SEQ ID NO: 6715 - DNA, 24 bp, Artificial sequence
  SiRNA target sequence
gaaaagtgatgctgaaattcttac

SEQ ID NO: 6716 - DNA, 24 bp, Artificial sequence
  SiRNA target sequence
aaaagtgatgctgaaattcttact

SEQ ID NO: 6717 - DNA, 24 bp, Artificial sequence
  SiRNA target sequence
aaagtgatgctgaaattcttacta

SEQ ID NO: 6718 - DNA, 24 bp, Artificial sequence
  SiRNA target sequence
aagtgatgctgaaattcttactaa

SEQ ID NO: 6719 - DNA, 24 bp, Artificial sequence
  SiRNA target sequence
agtgatgctgaaattcttactaaa

SEQ ID NO: 6720 - DNA, 24 bp, Artificial sequence
  SiRNA target sequence
gtgatgctgaaattcttactaaaa

SEQ ID NO: 6721 - DNA, 24 bp, Artificial sequence
  SiRNA target sequence
tgatgctgaaattcttactaaaat

SEQ ID NO: 6722 - DNA, 24 bp, Artificial sequence
  SiRNA target sequence
gatgctgaaattcttactaaaatt

SEQ ID NO: 6723 - DNA, 24 bp, Artificial sequence
  SiRNA target sequence
atgctgaaattcttactaaaatta

SEQ ID NO: 6724 - DNA, 24 bp, Artificial sequence
  SiRNA target sequence
tgctgaaattcttactaaaattag

SEQ ID NO: 6725 - DNA, 24 bp, Artificial sequence
  SiRNA target sequence
gctgaaattcttactaaaattagt

SEQ ID NO: 6726 - DNA, 24 bp, Artificial sequence
  SiRNA target sequence
ctgaaattcttactaaaattagtc

SEQ ID NO: 6727 - DNA, 24 bp, Artificial sequence
  SiRNA target sequence
tgaaattcttactaaaattagtct

SEQ ID NO: 6728 - DNA, 24 bp, Artificial sequence
  SiRNA target sequence
gaaattcttactaaaattagtctc

SEQ ID NO: 6729 - DNA, 24 bp, Artificial sequence
  SiRNA target sequence
aaattcttactaaaattagtctct

SEQ ID NO: 6730 - DNA, 24 bp, Artificial sequence
  SiRNA target sequence
aattcttactaaaattagtctctg

SEQ ID NO: 6731 - DNA, 24 bp, Artificial sequence
  SiRNA target sequence
attcttactaaaattagtctctgt

SEQ ID NO: 6732 - DNA, 24 bp, Artificial sequence
  SiRNA target sequence
ttcttactaaaattagtctctgta

SEQ ID NO: 6733 - DNA, 24 bp, Artificial sequence
  SiRNA target sequence
tcttactaaaattagtctctgtaa

SEQ ID NO: 6734 - DNA, 24 bp, Artificial sequence
  SiRNA target sequence
cttactaaaattagtctctgtaat

SEQ ID NO: 6735 - DNA, 24 bp, Artificial sequence
  SiRNA target sequence
ttactaaaattagtctctgtaatt

SEQ ID NO: 6736 - DNA, 24 bp, Artificial sequence
  SiRNA target sequence
tactaaaattagtctctgtaatta

SEQ ID NO: 6737 - DNA, 24 bp, Artificial sequence
  SiRNA target sequence
actaaaattagtctctgtaattat

SEQ ID NO: 6738 - DNA, 24 bp, Artificial sequence
  SiRNA target sequence
ctaaaattagtctctgtaattatt

SEQ ID NO: 6739 - DNA, 24 bp, Artificial sequence
  SiRNA target sequence
taaaattagtctctgtaattattt

SEQ ID NO: 6740 - DNA, 24 bp, Artificial sequence
  SiRNA target sequence
aaaattagtctctgtaattatttc

SEQ ID NO: 6741 - DNA, 24 bp, Artificial sequence
  SiRNA target sequence
aaattagtctctgtaattatttct

SEQ ID NO: 6742 - DNA, 24 bp, Artificial sequence
  SiRNA target sequence
aattagtctctgtaattatttctt

SEQ ID NO: 6743 - DNA, 24 bp, Artificial sequence
  SiRNA target sequence
attagtctctgtaattatttctta

SEQ ID NO: 6744 - DNA, 24 bp, Artificial sequence
  SiRNA target sequence
ttagtctctgtaattatttcttaa

SEQ ID NO: 6745 - DNA, 24 bp, Artificial sequence
  SiRNA target sequence
tagtctctgtaattatttcttaaa

SEQ ID NO: 6746 - DNA, 24 bp, Artificial sequence
  SiRNA target sequence
agtctctgtaattatttcttaaaa

SEQ ID NO: 6747 - DNA, 24 bp, Artificial sequence
  SiRNA target sequence
gtctctgtaattatttcttaaaaa

SEQ ID NO: 6748 - DNA, 24 bp, Artificial sequence
  SiRNA target sequence
tctctgtaattatttcttaaaaaa

SEQ ID NO: 6749 - DNA, 24 bp, Artificial sequence
  SiRNA target sequence
ctctgtaattatttcttaaaaaat

SEQ ID NO: 6750 - DNA, 24 bp, Artificial sequence
  SiRNA target sequence
tctgtaattatttcttaaaaaatt

SEQ ID NO: 6751 - DNA, 24 bp, Artificial sequence
  SiRNA target sequence
ctgtaattatttcttaaaaaatta

SEQ ID NO: 6752 - DNA, 24 bp, Artificial sequence
  SiRNA target sequence
tgtaattatttcttaaaaaattat

SEQ ID NO: 6753 - DNA, 24 bp, Artificial sequence
  SiRNA target sequence
gtaattatttcttaaaaaattatc

SEQ ID NO: 6754 - DNA, 24 bp, Artificial sequence
  SiRNA target sequence
taattatttcttaaaaaattatca

SEQ ID NO: 6755 - DNA, 24 bp, Artificial sequence
  SiRNA target sequence
aattatttcttaaaaaattatcaa

SEQ ID NO: 6756 - DNA, 24 bp, Artificial sequence
  SiRNA target sequence
attatttcttaaaaaattatcaag

SEQ ID NO: 6757 - DNA, 24 bp, Artificial sequence
  SiRNA target sequence
ttatttcttaaaaaattatcaaga

SEQ ID NO: 6758 - DNA, 24 bp, Artificial sequence
  SiRNA target sequence
tatttcttaaaaaattatcaagaa

SEQ ID NO: 6759 - DNA, 24 bp, Artificial sequence
  SiRNA target sequence
atttcttaaaaaattatcaagaag

SEQ ID NO: 6760 - DNA, 24 bp, Artificial sequence
  SiRNA target sequence
tttcttaaaaaattatcaagaagt

SEQ ID NO: 6761 - DNA, 24 bp, Artificial sequence
  SiRNA target sequence
ttcttaaaaaattatcaagaagtt

SEQ ID NO: 6762 - DNA, 24 bp, Artificial sequence
  SiRNA target sequence
tcttaaaaaattatcaagaagtta

SEQ ID NO: 6763 - DNA, 24 bp, Artificial sequence
  SiRNA target sequence
cttaaaaaattatcaagaagttat

SEQ ID NO: 6764 - DNA, 24 bp, Artificial sequence
  SiRNA target sequence
ttaaaaaattatcaagaagttata

SEQ ID NO: 6765 - DNA, 24 bp, Artificial sequence
  SiRNA target sequence
taaaaaattatcaagaagttataa

SEQ ID NO: 6766 - DNA, 24 bp, Artificial sequence
  SiRNA target sequence
aaaaaattatcaagaagttataaa

SEQ ID NO: 6767 - DNA, 24 bp, Artificial sequence
  SiRNA target sequence
aaaaattatcaagaagttataaat

SEQ ID NO: 6768 - DNA, 24 bp, Artificial sequence
  SiRNA target sequence
aaaattatcaagaagttataaata

SEQ ID NO: 6769 - DNA, 24 bp, Artificial sequence
  SiRNA target sequence
aaattatcaagaagttataaataa

SEQ ID NO: 6770 - DNA, 24 bp, Artificial sequence
  SiRNA target sequence
aattatcaagaagttataaataat

SEQ ID NO: 6771 - DNA, 24 bp, Artificial sequence
  SiRNA target sequence
attatcaagaagttataaataatt

SEQ ID NO: 6772 - DNA, 24 bp, Artificial sequence
  SiRNA target sequence
ttatcaagaagttataaataattc

SEQ ID NO: 6773 - DNA, 24 bp, Artificial sequence
  SiRNA target sequence
tatcaagaagttataaataattct

SEQ ID NO: 6774 - DNA, 24 bp, Artificial sequence
  SiRNA target sequence
atcaagaagttataaataattctt

SEQ ID NO: 6775 - DNA, 24 bp, Artificial sequence
  SiRNA target sequence
tcaagaagttataaataattcttt

SEQ ID NO: 6776 - DNA, 24 bp, Artificial sequence
  SiRNA target sequence
caagaagttataaataattcttta

SEQ ID NO: 6777 - DNA, 24 bp, Artificial sequence
  SiRNA target sequence
aagaagttataaataattctttat

SEQ ID NO: 6778 - DNA, 24 bp, Artificial sequence
  SiRNA target sequence
agaagttataaataattctttatt

SEQ ID NO: 6779 - DNA, 24 bp, Artificial sequence
  SiRNA target sequence
gaagttataaataattctttattt

SEQ ID NO: 6780 - DNA, 24 bp, Artificial sequence
  SiRNA target sequence
aagttataaataattctttattta

SEQ ID NO: 6781 - DNA, 24 bp, Artificial sequence
  SiRNA target sequence
agttataaataattctttatttaa

SEQ ID NO: 6782 - DNA, 24 bp, Artificial sequence
  SiRNA target sequence
gttataaataattctttatttaag

SEQ ID NO: 6783 - DNA, 24 bp, Artificial sequence
  SiRNA target sequence
ttataaataattctttatttaaga

SEQ ID NO: 6784 - DNA, 24 bp, Artificial sequence
  SiRNA target sequence
tataaataattctttatttaagac

SEQ ID NO: 6785 - DNA, 24 bp, Artificial sequence
  SiRNA target sequence
ataaataattctttatttaagaca

SEQ ID NO: 6786 - DNA, 24 bp, Artificial sequence
  SiRNA target sequence
taaataattctttatttaagacaa

SEQ ID NO: 6787 - DNA, 24 bp, Artificial sequence
  SiRNA target sequence
aaataattctttatttaagacaaa

SEQ ID NO: 6788 - DNA, 24 bp, Artificial sequence
  SiRNA target sequence
aataattctttatttaagacaaat

SEQ ID NO: 6789 - DNA, 24 bp, Artificial sequence
  SiRNA target sequence
ataattctttatttaagacaaata

SEQ ID NO: 6790 - DNA, 24 bp, Artificial sequence
  SiRNA target sequence
taattctttatttaagacaaataa

SEQ ID NO: 6791 - DNA, 24 bp, Artificial sequence
  SiRNA target sequence
aattctttatttaagacaaataat

SEQ ID NO: 6792 - DNA, 24 bp, Artificial sequence
  SiRNA target sequence
attctttatttaagacaaataata

SEQ ID NO: 6793 - DNA, 24 bp, Artificial sequence
  SiRNA target sequence
ttctttatttaagacaaataataa

SEQ ID NO: 6794 - DNA, 24 bp, Artificial sequence
  SiRNA target sequence
tctttatttaagacaaataataaa

SEQ ID NO: 6795 - DNA, 24 bp, Artificial sequence
  SiRNA target sequence
ctttatttaagacaaataataaag

SEQ ID NO: 6796 - DNA, 24 bp, Artificial sequence
  SiRNA target sequence
tttatttaagacaaataataaaga

SEQ ID NO: 6797 - DNA, 24 bp, Artificial sequence
  SiRNA target sequence
ttatttaagacaaataataaagat

SEQ ID NO: 6798 - DNA, 24 bp, Artificial sequence
  SiRNA target sequence
tatttaagacaaataataaagatc

SEQ ID NO: 6799 - DNA, 24 bp, Artificial sequence
  SiRNA target sequence
atttaagacaaataataaagatct

SEQ ID NO: 6800 - DNA, 24 bp, Artificial sequence
  SiRNA target sequence
tttaagacaaataataaagatcta

SEQ ID NO: 6801 - DNA, 24 bp, Artificial sequence
  SiRNA target sequence
ttaagacaaataataaagatctaa

SEQ ID NO: 6802 - DNA, 24 bp, Artificial sequence
  SiRNA target sequence
taagacaaataataaagatctaat

SEQ ID NO: 6803 - DNA, 24 bp, Artificial sequence
  SiRNA target sequence
aagacaaataataaagatctaata

SEQ ID NO: 6804 - DNA, 24 bp, Artificial sequence
  SiRNA target sequence
agacaaataataaagatctaataa

SEQ ID NO: 6805 - DNA, 24 bp, Artificial sequence
  SiRNA target sequence
gacaaataataaagatctaataaa

SEQ ID NO: 6806 - DNA, 24 bp, Artificial sequence
  SiRNA target sequence
acaaataataaagatctaataaaa

SEQ ID NO: 6807 - DNA, 24 bp, Artificial sequence
  SiRNA target sequence
caaataataaagatctaataaaaa

SEQ ID NO: 6808 - DNA, 24 bp, Artificial sequence
  SiRNA target sequence
aaataataaagatctaataaaaat

SEQ ID NO: 6809 - DNA, 24 bp, Artificial sequence
  SiRNA target sequence
aataataaagatctaataaaaata

SEQ ID NO: 6810 - DNA, 24 bp, Artificial sequence
  SiRNA target sequence
ataataaagatctaataaaaataa

SEQ ID NO: 6811 - DNA, 24 bp, Artificial sequence
  SiRNA target sequence
taataaagatctaataaaaataag

SEQ ID NO: 6812 - DNA, 24 bp, Artificial sequence
  SiRNA target sequence
aataaagatctaataaaaataaga

SEQ ID NO: 6813 - DNA, 24 bp, Artificial sequence
  SiRNA target sequence
ataaagatctaataaaaataagat

SEQ ID NO: 6814 - DNA, 24 bp, Artificial sequence
  SiRNA target sequence
taaagatctaataaaaataagatc

SEQ ID NO: 6815 - DNA, 24 bp, Artificial sequence
  SiRNA target sequence
aaagatctaataaaaataagatct

SEQ ID NO: 6816 - DNA, 24 bp, Artificial sequence
  SiRNA target sequence
aagatctaataaaaataagatctg

SEQ ID NO: 6817 - DNA, 24 bp, Artificial sequence
  SiRNA target sequence
agatctaataaaaataagatctga

SEQ ID NO: 6818 - DNA, 24 bp, Artificial sequence
  SiRNA target sequence
gatctaataaaaataagatctgaa

SEQ ID NO: 6819 - DNA, 24 bp, Artificial sequence
  SiRNA target sequence
atctaataaaaataagatctgaat

SEQ ID NO: 6820 - DNA, 24 bp, Artificial sequence
  SiRNA target sequence
tctaataaaaataagatctgaatg

SEQ ID NO: 6821 - DNA, 24 bp, Artificial sequence
  SiRNA target sequence
ctaataaaaataagatctgaatgt

SEQ ID NO: 6822 - DNA, 24 bp, Artificial sequence
  SiRNA target sequence
taataaaaataagatctgaatgtt

SEQ ID NO: 6823 - DNA, 24 bp, Artificial sequence
  SiRNA target sequence
aataaaaataagatctgaatgtta

SEQ ID NO: 6824 - DNA, 24 bp, Artificial sequence
  SiRNA target sequence
ataaaaataagatctgaatgttac

SEQ ID NO: 6825 - DNA, 24 bp, Artificial sequence
  SiRNA target sequence
taaaaataagatctgaatgttaca

SEQ ID NO: 6826 - DNA, 24 bp, Artificial sequence
  SiRNA target sequence
aaaaataagatctgaatgttacaa

SEQ ID NO: 6827 - DNA, 24 bp, Artificial sequence
  SiRNA target sequence
aaaataagatctgaatgttacaag

SEQ ID NO: 6828 - DNA, 24 bp, Artificial sequence
  SiRNA target sequence
aaataagatctgaatgttacaagc

SEQ ID NO: 6829 - DNA, 24 bp, Artificial sequence
  SiRNA target sequence
aataagatctgaatgttacaagca

SEQ ID NO: 6830 - DNA, 24 bp, Artificial sequence
  SiRNA target sequence
ataagatctgaatgttacaagcag

SEQ ID NO: 6831 - DNA, 24 bp, Artificial sequence
  SiRNA target sequence
taagatctgaatgttacaagcaga

SEQ ID NO: 6832 - DNA, 24 bp, Artificial sequence
  SiRNA target sequence
aagatctgaatgttacaagcagat

SEQ ID NO: 6833 - DNA, 24 bp, Artificial sequence
  SiRNA target sequence
agatctgaatgttacaagcagatg

SEQ ID NO: 6834 - DNA, 24 bp, Artificial sequence
  SiRNA target sequence
gatctgaatgttacaagcagatgg

SEQ ID NO: 6835 - DNA, 24 bp, Artificial sequence
  SiRNA target sequence
atctgaatgttacaagcagatggg

SEQ ID NO: 6836 - DNA, 24 bp, Artificial sequence
  SiRNA target sequence
tctgaatgttacaagcagatggga

SEQ ID NO: 6837 - DNA, 24 bp, Artificial sequence
  SiRNA target sequence
ctgaatgttacaagcagatgggaa

SEQ ID NO: 6838 - DNA, 24 bp, Artificial sequence
  SiRNA target sequence
tgaatgttacaagcagatgggaaa

SEQ ID NO: 6839 - DNA, 24 bp, Artificial sequence
  SiRNA target sequence
gaatgttacaagcagatgggaaat

SEQ ID NO: 6840 - DNA, 24 bp, Artificial sequence
  SiRNA target sequence
aatgttacaagcagatgggaaata

SEQ ID NO: 6841 - DNA, 24 bp, Artificial sequence
  SiRNA target sequence
atgttacaagcagatgggaaataa

SEQ ID NO: 6842 - DNA, 24 bp, Artificial sequence
  SiRNA target sequence
tgttacaagcagatgggaaataaa

SEQ ID NO: 6843 - DNA, 24 bp, Artificial sequence
  SiRNA target sequence
gttacaagcagatgggaaataaaa

SEQ ID NO: 6844 - DNA, 24 bp, Artificial sequence
  SiRNA target sequence
ttacaagcagatgggaaataaaaa

SEQ ID NO: 6845 - DNA, 24 bp, Artificial sequence
  SiRNA target sequence
tacaagcagatgggaaataaaaaa

SEQ ID NO: 6846 - DNA, 24 bp, Artificial sequence
  SiRNA target sequence
acaagcagatgggaaataaaaaaa

SEQ ID NO: 6847 - DNA, 24 bp, Artificial sequence
  SiRNA target sequence
caagcagatgggaaataaaaaaaa

SEQ ID NO: 6848 - DNA, 24 bp, Artificial sequence
  SiRNA target sequence
aagcagatgggaaataaaaaaaaa

SEQ ID NO: 6849 - DNA, 24 bp, Artificial sequence
  SiRNA target sequence
agcagatgggaaataaaaaaaaat

SEQ ID NO: 6850 - DNA, 24 bp, Artificial sequence
  SiRNA target sequence
gcagatgggaaataaaaaaaaatt

SEQ ID NO: 6851 - DNA, 24 bp, Artificial sequence
  SiRNA target sequence
cagatgggaaataaaaaaaaattt

SEQ ID NO: 6852 - DNA, 24 bp, Artificial sequence
  SiRNA target sequence
agatgggaaataaaaaaaaatttc

SEQ ID NO: 6853 - DNA, 24 bp, Artificial sequence
  SiRNA target sequence
gatgggaaataaaaaaaaatttct

SEQ ID NO: 6854 - DNA, 24 bp, Artificial sequence
  SiRNA target sequence
atgggaaataaaaaaaaatttctt

SEQ ID NO: 6855 - DNA, 24 bp, Artificial sequence
  SiRNA target sequence
tgggaaataaaaaaaaatttctta

SEQ ID NO: 6856 - DNA, 24 bp, Artificial sequence
  SiRNA target sequence
gggaaataaaaaaaaatttcttaa

SEQ ID NO: 6857 - DNA, 24 bp, Artificial sequence
  SiRNA target sequence
ggaaataaaaaaaaatttcttaag

SEQ ID NO: 6858 - DNA, 24 bp, Artificial sequence
  SiRNA target sequence
gaaataaaaaaaaatttcttaagg

SEQ ID NO: 6859 - DNA, 24 bp, Artificial sequence
  SiRNA target sequence
aaataaaaaaaaatttcttaagga

SEQ ID NO: 6860 - DNA, 24 bp, Artificial sequence
  SiRNA target sequence
aataaaaaaaaatttcttaaggat

SEQ ID NO: 6861 - DNA, 24 bp, Artificial sequence
  SiRNA target sequence
ataaaaaaaaatttcttaaggatt

SEQ ID NO: 6862 - DNA, 24 bp, Artificial sequence
  SiRNA target sequence
taaaaaaaaatttcttaaggattt

SEQ ID NO: 6863 - DNA, 24 bp, Artificial sequence
  SiRNA target sequence
aaaaaaaaatttcttaaggattta

SEQ ID NO: 6864 - DNA, 24 bp, Artificial sequence
  SiRNA target sequence
aaaaaaaatttcttaaggatttag

SEQ ID NO: 6865 - DNA, 24 bp, Artificial sequence
  SiRNA target sequence
aaaaaaatttcttaaggatttagc

SEQ ID NO: 6866 - DNA, 24 bp, Artificial sequence
  SiRNA target sequence
aaaaaatttcttaaggatttagca

SEQ ID NO: 6867 - DNA, 24 bp, Artificial sequence
  SiRNA target sequence
aaaaatttcttaaggatttagcac

SEQ ID NO: 6868 - DNA, 24 bp, Artificial sequence
  SiRNA target sequence
aaaatttcttaaggatttagcact

SEQ ID NO: 6869 - DNA, 24 bp, Artificial sequence
  SiRNA target sequence
aaatttcttaaggatttagcactt

SEQ ID NO: 6870 - DNA, 24 bp, Artificial sequence
  SiRNA target sequence
aatttcttaaggatttagcacttt

SEQ ID NO: 6871 - DNA, 24 bp, Artificial sequence
  SiRNA target sequence
atttcttaaggatttagcacttta

SEQ ID NO: 6872 - DNA, 24 bp, Artificial sequence
  SiRNA target sequence
tttcttaaggatttagcactttat

SEQ ID NO: 6873 - DNA, 24 bp, Artificial sequence
  SiRNA target sequence
ttcttaaggatttagcactttatg

SEQ ID NO: 6874 - DNA, 24 bp, Artificial sequence
  SiRNA target sequence
tcttaaggatttagcactttatga

SEQ ID NO: 6875 - DNA, 24 bp, Artificial sequence
  SiRNA target sequence
cttaaggatttagcactttatgaa

SEQ ID NO: 6876 - DNA, 24 bp, Artificial sequence
  SiRNA target sequence
ttaaggatttagcactttatgaaa

SEQ ID NO: 6877 - DNA, 24 bp, Artificial sequence
  SiRNA target sequence
taaggatttagcactttatgaaac

SEQ ID NO: 6878 - DNA, 24 bp, Artificial sequence
  SiRNA target sequence
aaggatttagcactttatgaaaca

SEQ ID NO: 6879 - DNA, 24 bp, Artificial sequence
  SiRNA target sequence
aggatttagcactttatgaaacat

SEQ ID NO: 6880 - DNA, 24 bp, Artificial sequence
  SiRNA target sequence
ggatttagcactttatgaaacatt

SEQ ID NO: 6881 - DNA, 24 bp, Artificial sequence
  SiRNA target sequence
gatttagcactttatgaaacattt

SEQ ID NO: 6882 - DNA, 24 bp, Artificial sequence
  SiRNA target sequence
atttagcactttatgaaacatttg

SEQ ID NO: 6883 - DNA, 24 bp, Artificial sequence
  SiRNA target sequence
tttagcactttatgaaacatttgc

SEQ ID NO: 6884 - DNA, 24 bp, Artificial sequence
  SiRNA target sequence
ttagcactttatgaaacatttgct

SEQ ID NO: 6885 - DNA, 24 bp, Artificial sequence
  SiRNA target sequence
tagcactttatgaaacatttgcta

SEQ ID NO: 6886 - DNA, 24 bp, Artificial sequence
  SiRNA target sequence
agcactttatgaaacatttgctaa

SEQ ID NO: 6887 - DNA, 24 bp, Artificial sequence
  SiRNA target sequence
gcactttatgaaacatttgctaat

SEQ ID NO: 6888 - DNA, 24 bp, Artificial sequence
  SiRNA target sequence
cactttatgaaacatttgctaata

SEQ ID NO: 6889 - DNA, 24 bp, Artificial sequence
  SiRNA target sequence
actttatgaaacatttgctaataa

SEQ ID NO: 6890 - DNA, 24 bp, Artificial sequence
  SiRNA target sequence
ctttatgaaacatttgctaataat

SEQ ID NO: 6891 - DNA, 24 bp, Artificial sequence
  SiRNA target sequence
tttatgaaacatttgctaataata

SEQ ID NO: 6892 - DNA, 24 bp, Artificial sequence
  SiRNA target sequence
ttatgaaacatttgctaataataa

SEQ ID NO: 6893 - DNA, 24 bp, Artificial sequence
  SiRNA target sequence
tatgaaacatttgctaataataaa

SEQ ID NO: 6894 - DNA, 24 bp, Artificial sequence
  SiRNA target sequence
atgaaacatttgctaataataaag

SEQ ID NO: 6895 - DNA, 24 bp, Artificial sequence
  SiRNA target sequence
tgaaacatttgctaataataaaga

SEQ ID NO: 6896 - DNA, 24 bp, Artificial sequence
  SiRNA target sequence
gaaacatttgctaataataaagaa

SEQ ID NO: 6897 - DNA, 24 bp, Artificial sequence
  SiRNA target sequence
aaacatttgctaataataaagaag

SEQ ID NO: 6898 - DNA, 24 bp, Artificial sequence
  SiRNA target sequence
aacatttgctaataataaagaagt

SEQ ID NO: 6899 - DNA, 24 bp, Artificial sequence
  SiRNA target sequence
acatttgctaataataaagaagtc

SEQ ID NO: 6900 - DNA, 24 bp, Artificial sequence
  SiRNA target sequence
catttgctaataataaagaagtcc

SEQ ID NO: 6901 - DNA, 24 bp, Artificial sequence
  SiRNA target sequence
atttgctaataataaagaagtcca

SEQ ID NO: 6902 - DNA, 24 bp, Artificial sequence
  SiRNA target sequence
tttgctaataataaagaagtccaa

SEQ ID NO: 6903 - DNA, 24 bp, Artificial sequence
  SiRNA target sequence
ttgctaataataaagaagtccaag

SEQ ID NO: 6904 - DNA, 24 bp, Artificial sequence
  SiRNA target sequence
tgctaataataaagaagtccaaga

SEQ ID NO: 6905 - DNA, 24 bp, Artificial sequence
  SiRNA target sequence
gctaataataaagaagtccaagat

SEQ ID NO: 6906 - DNA, 24 bp, Artificial sequence
  SiRNA target sequence
ctaataataaagaagtccaagatg

SEQ ID NO: 6907 - DNA, 24 bp, Artificial sequence
  SiRNA target sequence
taataataaagaagtccaagatga

SEQ ID NO: 6908 - DNA, 24 bp, Artificial sequence
  SiRNA target sequence
aataataaagaagtccaagatgaa

SEQ ID NO: 6909 - DNA, 24 bp, Artificial sequence
  SiRNA target sequence
ataataaagaagtccaagatgaaa

SEQ ID NO: 6910 - DNA, 24 bp, Artificial sequence
  SiRNA target sequence
taataaagaagtccaagatgaaat

SEQ ID NO: 6911 - DNA, 24 bp, Artificial sequence
  SiRNA target sequence
aataaagaagtccaagatgaaatt

SEQ ID NO: 6912 - DNA, 24 bp, Artificial sequence
  SiRNA target sequence
ataaagaagtccaagatgaaatta

SEQ ID NO: 6913 - DNA, 24 bp, Artificial sequence
  SiRNA target sequence
taaagaagtccaagatgaaattat

SEQ ID NO: 6914 - DNA, 24 bp, Artificial sequence
  SiRNA target sequence
aaagaagtccaagatgaaattatg

SEQ ID NO: 6915 - DNA, 24 bp, Artificial sequence
  SiRNA target sequence
aagaagtccaagatgaaattatgc

SEQ ID NO: 6916 - DNA, 24 bp, Artificial sequence
  SiRNA target sequence
agaagtccaagatgaaattatgca

SEQ ID NO: 6917 - DNA, 24 bp, Artificial sequence
  SiRNA target sequence
gaagtccaagatgaaattatgcag

SEQ ID NO: 6918 - DNA, 24 bp, Artificial sequence
  SiRNA target sequence
aagtccaagatgaaattatgcaga

SEQ ID NO: 6919 - DNA, 24 bp, Artificial sequence
  SiRNA target sequence
agtccaagatgaaattatgcagac

SEQ ID NO: 6920 - DNA, 24 bp, Artificial sequence
  SiRNA target sequence
gtccaagatgaaattatgcagact

SEQ ID NO: 6921 - DNA, 24 bp, Artificial sequence
  SiRNA target sequence
tccaagatgaaattatgcagactg

SEQ ID NO: 6922 - DNA, 24 bp, Artificial sequence
  SiRNA target sequence
ccaagatgaaattatgcagactgt

SEQ ID NO: 6923 - DNA, 24 bp, Artificial sequence
  SiRNA target sequence
caagatgaaattatgcagactgtt

SEQ ID NO: 6924 - DNA, 24 bp, Artificial sequence
  SiRNA target sequence
aagatgaaattatgcagactgtta

SEQ ID NO: 6925 - DNA, 24 bp, Artificial sequence
  SiRNA target sequence
agatgaaattatgcagactgttaa

SEQ ID NO: 6926 - DNA, 24 bp, Artificial sequence
  SiRNA target sequence
gatgaaattatgcagactgttaaa

SEQ ID NO: 6927 - DNA, 24 bp, Artificial sequence
  SiRNA target sequence
atgaaattatgcagactgttaaag

SEQ ID NO: 6928 - DNA, 24 bp, Artificial sequence
  SiRNA target sequence
tgaaattatgcagactgttaaaga

SEQ ID NO: 6929 - DNA, 24 bp, Artificial sequence
  SiRNA target sequence
gaaattatgcagactgttaaagaa

SEQ ID NO: 6930 - DNA, 24 bp, Artificial sequence
  SiRNA target sequence
aaattatgcagactgttaaagaaa

SEQ ID NO: 6931 - DNA, 24 bp, Artificial sequence
  SiRNA target sequence
aattatgcagactgttaaagaaat

SEQ ID NO: 6932 - DNA, 24 bp, Artificial sequence
  SiRNA target sequence
attatgcagactgttaaagaaatt

SEQ ID NO: 6933 - DNA, 24 bp, Artificial sequence
  SiRNA target sequence
ttatgcagactgttaaagaaattt

SEQ ID NO: 6934 - DNA, 24 bp, Artificial sequence
  SiRNA target sequence
tatgcagactgttaaagaaatttg

SEQ ID NO: 6935 - DNA, 24 bp, Artificial sequence
  SiRNA target sequence
atgcagactgttaaagaaatttgt

SEQ ID NO: 6936 - DNA, 24 bp, Artificial sequence
  SiRNA target sequence
tgcagactgttaaagaaatttgtg

SEQ ID NO: 6937 - DNA, 24 bp, Artificial sequence
  SiRNA target sequence
gcagactgttaaagaaatttgtga

SEQ ID NO: 6938 - DNA, 24 bp, Artificial sequence
  SiRNA target sequence
cagactgttaaagaaatttgtgaa

SEQ ID NO: 6939 - DNA, 24 bp, Artificial sequence
  SiRNA target sequence
agactgttaaagaaatttgtgaag

SEQ ID NO: 6940 - DNA, 24 bp, Artificial sequence
  SiRNA target sequence
gactgttaaagaaatttgtgaaga

SEQ ID NO: 6941 - DNA, 24 bp, Artificial sequence
  SiRNA target sequence
actgttaaagaaatttgtgaagaa

SEQ ID NO: 6942 - DNA, 24 bp, Artificial sequence
  SiRNA target sequence
ctgttaaagaaatttgtgaagaag

SEQ ID NO: 6943 - DNA, 24 bp, Artificial sequence
  SiRNA target sequence
tgttaaagaaatttgtgaagaaga

SEQ ID NO: 6944 - DNA, 24 bp, Artificial sequence
  SiRNA target sequence
gttaaagaaatttgtgaagaagaa

SEQ ID NO: 6945 - DNA, 24 bp, Artificial sequence
  SiRNA target sequence
ttaaagaaatttgtgaagaagaag

SEQ ID NO: 6946 - DNA, 24 bp, Artificial sequence
  SiRNA target sequence
taaagaaatttgtgaagaagaagt

SEQ ID NO: 6947 - DNA, 24 bp, Artificial sequence
  SiRNA target sequence
aaagaaatttgtgaagaagaagtg

SEQ ID NO: 6948 - DNA, 24 bp, Artificial sequence
  SiRNA target sequence
aagaaatttgtgaagaagaagtga

SEQ ID NO: 6949 - DNA, 24 bp, Artificial sequence
  SiRNA target sequence
agaaatttgtgaagaagaagtgaa

SEQ ID NO: 6950 - DNA, 24 bp, Artificial sequence
  SiRNA target sequence
gaaatttgtgaagaagaagtgaat

SEQ ID NO: 6951 - DNA, 24 bp, Artificial sequence
  SiRNA target sequence
aaatttgtgaagaagaagtgaatg

SEQ ID NO: 6952 - DNA, 24 bp, Artificial sequence
  SiRNA target sequence
aatttgtgaagaagaagtgaatga

SEQ ID NO: 6953 - DNA, 24 bp, Artificial sequence
  SiRNA target sequence
atttgtgaagaagaagtgaatgag

SEQ ID NO: 6954 - DNA, 24 bp, Artificial sequence
  SiRNA target sequence
tttgtgaagaagaagtgaatgagt

SEQ ID NO: 6955 - DNA, 24 bp, Artificial sequence
  SiRNA target sequence
ttgtgaagaagaagtgaatgagtt

SEQ ID NO: 6956 - DNA, 24 bp, Artificial sequence
  SiRNA target sequence
tgtgaagaagaagtgaatgagttt

SEQ ID NO: 6957 - DNA, 24 bp, Artificial sequence
  SiRNA target sequence
gtgaagaagaagtgaatgagttta

SEQ ID NO: 6958 - DNA, 24 bp, Artificial sequence
  SiRNA target sequence
tgaagaagaagtgaatgagtttat

SEQ ID NO: 6959 - DNA, 24 bp, Artificial sequence
  SiRNA target sequence
gaagaagaagtgaatgagtttatt

SEQ ID NO: 6960 - DNA, 24 bp, Artificial sequence
  SiRNA target sequence
aagaagaagtgaatgagtttattg

SEQ ID NO: 6961 - DNA, 24 bp, Artificial sequence
  SiRNA target sequence
agaagaagtgaatgagtttattga

SEQ ID NO: 6962 - DNA, 24 bp, Artificial sequence
  SiRNA target sequence
gaagaagtgaatgagtttattgaa

SEQ ID NO: 6963 - DNA, 24 bp, Artificial sequence
  SiRNA target sequence
aagaagtgaatgagtttattgaac

SEQ ID NO: 6964 - DNA, 24 bp, Artificial sequence
  SiRNA target sequence
agaagtgaatgagtttattgaaca

SEQ ID NO: 6965 - DNA, 24 bp, Artificial sequence
  SiRNA target sequence
gaagtgaatgagtttattgaacaa

SEQ ID NO: 6966 - DNA, 24 bp, Artificial sequence
  SiRNA target sequence
aagtgaatgagtttattgaacaag

SEQ ID NO: 6967 - DNA, 24 bp, Artificial sequence
  SiRNA target sequence
agtgaatgagtttattgaacaaga

SEQ ID NO: 6968 - DNA, 24 bp, Artificial sequence
  SiRNA target sequence
gtgaatgagtttattgaacaagaa

SEQ ID NO: 6969 - DNA, 24 bp, Artificial sequence
  SiRNA target sequence
tgaatgagtttattgaacaagaag

SEQ ID NO: 6970 - DNA, 24 bp, Artificial sequence
  SiRNA target sequence
gaatgagtttattgaacaagaagg

SEQ ID NO: 6971 - DNA, 24 bp, Artificial sequence
  SiRNA target sequence
aatgagtttattgaacaagaaggt

SEQ ID NO: 6972 - DNA, 24 bp, Artificial sequence
  SiRNA target sequence
atgagtttattgaacaagaaggtt

SEQ ID NO: 6973 - DNA, 24 bp, Artificial sequence
  SiRNA target sequence
tgagtttattgaacaagaaggttt

SEQ ID NO: 6974 - DNA, 24 bp, Artificial sequence
  SiRNA target sequence
gagtttattgaacaagaaggttta

SEQ ID NO: 6975 - DNA, 24 bp, Artificial sequence
  SiRNA target sequence
agtttattgaacaagaaggtttaa

SEQ ID NO: 6976 - DNA, 24 bp, Artificial sequence
  SiRNA target sequence
gtttattgaacaagaaggtttaaa

SEQ ID NO: 6977 - DNA, 24 bp, Artificial sequence
  SiRNA target sequence
tttattgaacaagaaggtttaaaa

SEQ ID NO: 6978 - DNA, 24 bp, Artificial sequence
  SiRNA target sequence
ttattgaacaagaaggtttaaaaa

SEQ ID NO: 6979 - DNA, 24 bp, Artificial sequence
  SiRNA target sequence
tattgaacaagaaggtttaaaaat

SEQ ID NO: 6980 - DNA, 24 bp, Artificial sequence
  SiRNA target sequence
attgaacaagaaggtttaaaaatt

SEQ ID NO: 6981 - DNA, 24 bp, Artificial sequence
  SiRNA target sequence
ttgaacaagaaggtttaaaaatta

SEQ ID NO: 6982 - DNA, 24 bp, Artificial sequence
  SiRNA target sequence
tgaacaagaaggtttaaaaattaa

SEQ ID NO: 6983 - DNA, 24 bp, Artificial sequence
  SiRNA target sequence
gaacaagaaggtttaaaaattaat

SEQ ID NO: 6984 - DNA, 24 bp, Artificial sequence
  SiRNA target sequence
aacaagaaggtttaaaaattaata

SEQ ID NO: 6985 - DNA, 24 bp, Artificial sequence
  SiRNA target sequence
acaagaaggtttaaaaattaataa

SEQ ID NO: 6986 - DNA, 24 bp, Artificial sequence
  SiRNA target sequence
caagaaggtttaaaaattaataaa

SEQ ID NO: 6987 - DNA, 24 bp, Artificial sequence
  SiRNA target sequence
aagaaggtttaaaaattaataaag

SEQ ID NO: 6988 - DNA, 24 bp, Artificial sequence
  SiRNA target sequence
agaaggtttaaaaattaataaaga

SEQ ID NO: 6989 - DNA, 24 bp, Artificial sequence
  SiRNA target sequence
gaaggtttaaaaattaataaagaa

SEQ ID NO: 6990 - DNA, 24 bp, Artificial sequence
  SiRNA target sequence
aaggtttaaaaattaataaagaag

SEQ ID NO: 6991 - DNA, 24 bp, Artificial sequence
  SiRNA target sequence
aggtttaaaaattaataaagaaga

SEQ ID NO: 6992 - DNA, 24 bp, Artificial sequence
  SiRNA target sequence
ggtttaaaaattaataaagaagat

SEQ ID NO: 6993 - DNA, 24 bp, Artificial sequence
  SiRNA target sequence
gtttaaaaattaataaagaagatg

SEQ ID NO: 6994 - DNA, 24 bp, Artificial sequence
  SiRNA target sequence
tttaaaaattaataaagaagatgt

SEQ ID NO: 6995 - DNA, 24 bp, Artificial sequence
  SiRNA target sequence
ttaaaaattaataaagaagatgtg

SEQ ID NO: 6996 - DNA, 24 bp, Artificial sequence
  SiRNA target sequence
taaaaattaataaagaagatgtgc

SEQ ID NO: 6997 - DNA, 24 bp, Artificial sequence
  SiRNA target sequence
aaaaattaataaagaagatgtgct

SEQ ID NO: 6998 - DNA, 24 bp, Artificial sequence
  SiRNA target sequence
aaaattaataaagaagatgtgcta

SEQ ID NO: 6999 - DNA, 24 bp, Artificial sequence
  SiRNA target sequence
aaattaataaagaagatgtgctaa

SEQ ID NO: 7000 - DNA, 24 bp, Artificial sequence
  SiRNA target sequence
aattaataaagaagatgtgctaag

SEQ ID NO: 7001 - DNA, 24 bp, Artificial sequence
  SiRNA target sequence
attaataaagaagatgtgctaaga

SEQ ID NO: 7002 - DNA, 24 bp, Artificial sequence
  SiRNA target sequence
ttaataaagaagatgtgctaagag

SEQ ID NO: 7003 - DNA, 24 bp, Artificial sequence
  SiRNA target sequence
taataaagaagatgtgctaagagg

SEQ ID NO: 7004 - DNA, 24 bp, Artificial sequence
  SiRNA target sequence
aataaagaagatgtgctaagagga

SEQ ID NO: 7005 - DNA, 24 bp, Artificial sequence
  SiRNA target sequence
ataaagaagatgtgctaagaggac

SEQ ID NO: 7006 - DNA, 24 bp, Artificial sequence
  SiRNA target sequence
taaagaagatgtgctaagaggact

SEQ ID NO: 7007 - DNA, 24 bp, Artificial sequence
  SiRNA target sequence
aaagaagatgtgctaagaggactt

SEQ ID NO: 7008 - DNA, 24 bp, Artificial sequence
  SiRNA target sequence
aagaagatgtgctaagaggacttg

SEQ ID NO: 7009 - DNA, 24 bp, Artificial sequence
  SiRNA target sequence
agaagatgtgctaagaggacttgt

SEQ ID NO: 7010 - DNA, 24 bp, Artificial sequence
  SiRNA target sequence
gaagatgtgctaagaggacttgtt

SEQ ID NO: 7011 - DNA, 24 bp, Artificial sequence
  SiRNA target sequence
aagatgtgctaagaggacttgttt

SEQ ID NO: 7012 - DNA, 24 bp, Artificial sequence
  SiRNA target sequence
agatgtgctaagaggacttgtttc

SEQ ID NO: 7013 - DNA, 24 bp, Artificial sequence
  SiRNA target sequence
gatgtgctaagaggacttgtttca

SEQ ID NO: 7014 - DNA, 24 bp, Artificial sequence
  SiRNA target sequence
atgtgctaagaggacttgtttcaa

SEQ ID NO: 7015 - DNA, 24 bp, Artificial sequence
  SiRNA target sequence
tgtgctaagaggacttgtttcaat

SEQ ID NO: 7016 - DNA, 24 bp, Artificial sequence
  SiRNA target sequence
gtgctaagaggacttgtttcaata

SEQ ID NO: 7017 - DNA, 24 bp, Artificial sequence
  SiRNA target sequence
tgctaagaggacttgtttcaataa

SEQ ID NO: 7018 - DNA, 24 bp, Artificial sequence
  SiRNA target sequence
gctaagaggacttgtttcaataaa

SEQ ID NO: 7019 - DNA, 24 bp, Artificial sequence
  SiRNA target sequence
ctaagaggacttgtttcaataaaa

SEQ ID NO: 7020 - DNA, 24 bp, Artificial sequence
  SiRNA target sequence
taagaggacttgtttcaataaaaa

SEQ ID NO: 7021 - DNA, 24 bp, Artificial sequence
  SiRNA target sequence
aagaggacttgtttcaataaaaaa

SEQ ID NO: 7022 - DNA, 24 bp, Artificial sequence
  SiRNA target sequence
agaggacttgtttcaataaaaaat

SEQ ID NO: 7023 - DNA, 24 bp, Artificial sequence
  SiRNA target sequence
gaggacttgtttcaataaaaaata

SEQ ID NO: 7024 - DNA, 24 bp, Artificial sequence
  SiRNA target sequence
aggacttgtttcaataaaaaatat

SEQ ID NO: 7025 - DNA, 24 bp, Artificial sequence
  SiRNA target sequence
ggacttgtttcaataaaaaatata

SEQ ID NO: 7026 - DNA, 24 bp, Artificial sequence
  SiRNA target sequence
gacttgtttcaataaaaaatataa

SEQ ID NO: 7027 - DNA, 24 bp, Artificial sequence
  SiRNA target sequence
acttgtttcaataaaaaatataaa

SEQ ID NO: 7028 - DNA, 24 bp, Artificial sequence
  SiRNA target sequence
cttgtttcaataaaaaatataaat

SEQ ID NO: 7029 - DNA, 24 bp, Artificial sequence
  SiRNA target sequence
ttgtttcaataaaaaatataaatg

SEQ ID NO: 7030 - DNA, 24 bp, Artificial sequence
  SiRNA target sequence
tgtttcaataaaaaatataaatga

SEQ ID NO: 7031 - DNA, 24 bp, Artificial sequence
  SiRNA target sequence
gtttcaataaaaaatataaatgag

SEQ ID NO: 7032 - DNA, 24 bp, Artificial sequence
  SiRNA target sequence
tttcaataaaaaatataaatgaga

SEQ ID NO: 7033 - DNA, 24 bp, Artificial sequence
  SiRNA target sequence
ttcaataaaaaatataaatgagat

SEQ ID NO: 7034 - DNA, 24 bp, Artificial sequence
  SiRNA target sequence
tcaataaaaaatataaatgagatt

SEQ ID NO: 7035 - DNA, 24 bp, Artificial sequence
  SiRNA target sequence
caataaaaaatataaatgagattt

SEQ ID NO: 7036 - DNA, 24 bp, Artificial sequence
  SiRNA target sequence
aataaaaaatataaatgagattta

SEQ ID NO: 7037 - DNA, 24 bp, Artificial sequence
  SiRNA target sequence
ataaaaaatataaatgagatttat

SEQ ID NO: 7038 - DNA, 24 bp, Artificial sequence
  SiRNA target sequence
taaaaaatataaatgagatttatg

SEQ ID NO: 7039 - DNA, 24 bp, Artificial sequence
  SiRNA target sequence
aaaaaatataaatgagatttatga

SEQ ID NO: 7040 - DNA, 24 bp, Artificial sequence
  SiRNA target sequence
aaaaatataaatgagatttatgat

SEQ ID NO: 7041 - DNA, 24 bp, Artificial sequence
  SiRNA target sequence
aaaatataaatgagatttatgatg

SEQ ID NO: 7042 - DNA, 24 bp, Artificial sequence
  SiRNA target sequence
aaatataaatgagatttatgatgc

SEQ ID NO: 7043 - DNA, 24 bp, Artificial sequence
  SiRNA target sequence
aatataaatgagatttatgatgca

SEQ ID NO: 7044 - DNA, 24 bp, Artificial sequence
  SiRNA target sequence
atataaatgagatttatgatgcat

SEQ ID NO: 7045 - DNA, 24 bp, Artificial sequence
  SiRNA target sequence
tataaatgagatttatgatgcatt

SEQ ID NO: 7046 - DNA, 24 bp, Artificial sequence
  SiRNA target sequence
ataaatgagatttatgatgcattt

SEQ ID NO: 7047 - DNA, 24 bp, Artificial sequence
  SiRNA target sequence
taaatgagatttatgatgcatttg

SEQ ID NO: 7048 - DNA, 24 bp, Artificial sequence
  SiRNA target sequence
aaatgagatttatgatgcatttgg

SEQ ID NO: 7049 - DNA, 24 bp, Artificial sequence
  SiRNA target sequence
aatgagatttatgatgcatttgga

SEQ ID NO: 7050 - DNA, 24 bp, Artificial sequence
  SiRNA target sequence
atgagatttatgatgcatttggag

SEQ ID NO: 7051 - DNA, 24 bp, Artificial sequence
  SiRNA target sequence
tgagatttatgatgcatttggagg

SEQ ID NO: 7052 - DNA, 24 bp, Artificial sequence
  SiRNA target sequence
gagatttatgatgcatttggaggt

SEQ ID NO: 7053 - DNA, 24 bp, Artificial sequence
  SiRNA target sequence
agatttatgatgcatttggaggta

SEQ ID NO: 7054 - DNA, 24 bp, Artificial sequence
  SiRNA target sequence
gatttatgatgcatttggaggtaa

SEQ ID NO: 7055 - DNA, 24 bp, Artificial sequence
  SiRNA target sequence
atttatgatgcatttggaggtaaa

SEQ ID NO: 7056 - DNA, 24 bp, Artificial sequence
  SiRNA target sequence
tttatgatgcatttggaggtaaat

SEQ ID NO: 7057 - DNA, 24 bp, Artificial sequence
  SiRNA target sequence
ttatgatgcatttggaggtaaatc

SEQ ID NO: 7058 - DNA, 24 bp, Artificial sequence
  SiRNA target sequence
tatgatgcatttggaggtaaatct

SEQ ID NO: 7059 - DNA, 24 bp, Artificial sequence
  SiRNA target sequence
atgatgcatttggaggtaaatcta

SEQ ID NO: 7060 - DNA, 24 bp, Artificial sequence
  SiRNA target sequence
tgatgcatttggaggtaaatctaa

SEQ ID NO: 7061 - DNA, 24 bp, Artificial sequence
  SiRNA target sequence
gatgcatttggaggtaaatctaag

SEQ ID NO: 7062 - DNA, 24 bp, Artificial sequence
  SiRNA target sequence
atgcatttggaggtaaatctaaga

SEQ ID NO: 7063 - DNA, 24 bp, Artificial sequence
  SiRNA target sequence
tgcatttggaggtaaatctaagaa

SEQ ID NO: 7064 - DNA, 24 bp, Artificial sequence
  SiRNA target sequence
gcatttggaggtaaatctaagaag

SEQ ID NO: 7065 - DNA, 24 bp, Artificial sequence
  SiRNA target sequence
catttggaggtaaatctaagaagt

SEQ ID NO: 7066 - DNA, 24 bp, Artificial sequence
  SiRNA target sequence
atttggaggtaaatctaagaagtt

SEQ ID NO: 7067 - DNA, 24 bp, Artificial sequence
  SiRNA target sequence
tttggaggtaaatctaagaagttt

SEQ ID NO: 7068 - DNA, 24 bp, Artificial sequence
  SiRNA target sequence
ttggaggtaaatctaagaagttta

SEQ ID NO: 7069 - DNA, 24 bp, Artificial sequence
  SiRNA target sequence
tggaggtaaatctaagaagtttaa

SEQ ID NO: 7070 - DNA, 24 bp, Artificial sequence
  SiRNA target sequence
ggaggtaaatctaagaagtttaaa

SEQ ID NO: 7071 - DNA, 24 bp, Artificial sequence
  SiRNA target sequence
gaggtaaatctaagaagtttaaat

SEQ ID NO: 7072 - DNA, 24 bp, Artificial sequence
  SiRNA target sequence
aggtaaatctaagaagtttaaatt

SEQ ID NO: 7073 - DNA, 24 bp, Artificial sequence
  SiRNA target sequence
ggtaaatctaagaagtttaaattt

SEQ ID NO: 7074 - DNA, 24 bp, Artificial sequence
  SiRNA target sequence
gtaaatctaagaagtttaaatttt

SEQ ID NO: 7075 - DNA, 24 bp, Artificial sequence
  SiRNA target sequence
taaatctaagaagtttaaattttc

SEQ ID NO: 7076 - DNA, 24 bp, Artificial sequence
  SiRNA target sequence
aaatctaagaagtttaaattttct

SEQ ID NO: 7077 - DNA, 24 bp, Artificial sequence
  SiRNA target sequence
aatctaagaagtttaaattttcta

SEQ ID NO: 7078 - DNA, 24 bp, Artificial sequence
  SiRNA target sequence
atctaagaagtttaaattttctaa

SEQ ID NO: 7079 - DNA, 24 bp, Artificial sequence
  SiRNA target sequence
tctaagaagtttaaattttctaat

SEQ ID NO: 7080 - DNA, 24 bp, Artificial sequence
  SiRNA target sequence
ctaagaagtttaaattttctaatg

SEQ ID NO: 7081 - DNA, 24 bp, Artificial sequence
  SiRNA target sequence
taagaagtttaaattttctaatga

SEQ ID NO: 7082 - DNA, 24 bp, Artificial sequence
  SiRNA target sequence
aagaagtttaaattttctaatgat

SEQ ID NO: 7083 - DNA, 24 bp, Artificial sequence
  SiRNA target sequence
agaagtttaaattttctaatgatg

SEQ ID NO: 7084 - DNA, 24 bp, Artificial sequence
  SiRNA target sequence
gaagtttaaattttctaatgatga

SEQ ID NO: 7085 - DNA, 24 bp, Artificial sequence
  SiRNA target sequence
aagtttaaattttctaatgatgaa

SEQ ID NO: 7086 - DNA, 24 bp, Artificial sequence
  SiRNA target sequence
agtttaaattttctaatgatgaaa

SEQ ID NO: 7087 - DNA, 24 bp, Artificial sequence
  SiRNA target sequence
gtttaaattttctaatgatgaaaa

SEQ ID NO: 7088 - DNA, 24 bp, Artificial sequence
  SiRNA target sequence
tttaaattttctaatgatgaaaag

SEQ ID NO: 7089 - DNA, 24 bp, Artificial sequence
  SiRNA target sequence
ttaaattttctaatgatgaaaagg

SEQ ID NO: 7090 - DNA, 24 bp, Artificial sequence
  SiRNA target sequence
taaattttctaatgatgaaaagga

SEQ ID NO: 7091 - DNA, 24 bp, Artificial sequence
  SiRNA target sequence
aaattttctaatgatgaaaaggaa

SEQ ID NO: 7092 - DNA, 24 bp, Artificial sequence
  SiRNA target sequence
aattttctaatgatgaaaaggaag

SEQ ID NO: 7093 - DNA, 24 bp, Artificial sequence
  SiRNA target sequence
attttctaatgatgaaaaggaagt

SEQ ID NO: 7094 - DNA, 24 bp, Artificial sequence
  SiRNA target sequence
ttttctaatgatgaaaaggaagtg

SEQ ID NO: 7095 - DNA, 24 bp, Artificial sequence
  SiRNA target sequence
tttctaatgatgaaaaggaagtgt

SEQ ID NO: 7096 - DNA, 24 bp, Artificial sequence
  SiRNA target sequence
ttctaatgatgaaaaggaagtgtt

SEQ ID NO: 7097 - DNA, 24 bp, Artificial sequence
  SiRNA target sequence
tctaatgatgaaaaggaagtgtta

SEQ ID NO: 7098 - DNA, 24 bp, Artificial sequence
  SiRNA target sequence
ctaatgatgaaaaggaagtgttaa

SEQ ID NO: 7099 - DNA, 24 bp, Artificial sequence
  SiRNA target sequence
taatgatgaaaaggaagtgttaaa

SEQ ID NO: 7100 - DNA, 24 bp, Artificial sequence
  SiRNA target sequence
aatgatgaaaaggaagtgttaaat

SEQ ID NO: 7101 - DNA, 24 bp, Artificial sequence
  SiRNA target sequence
atgatgaaaaggaagtgttaaatc

SEQ ID NO: 7102 - DNA, 24 bp, Artificial sequence
  SiRNA target sequence
tgatgaaaaggaagtgttaaatct

SEQ ID NO: 7103 - DNA, 24 bp, Artificial sequence
  SiRNA target sequence
gatgaaaaggaagtgttaaatctt

SEQ ID NO: 7104 - DNA, 24 bp, Artificial sequence
  SiRNA target sequence
atgaaaaggaagtgttaaatcttc

SEQ ID NO: 7105 - DNA, 24 bp, Artificial sequence
  SiRNA target sequence
tgaaaaggaagtgttaaatcttct

SEQ ID NO: 7106 - DNA, 24 bp, Artificial sequence
  SiRNA target sequence
gaaaaggaagtgttaaatcttctt

SEQ ID NO: 7107 - DNA, 24 bp, Artificial sequence
  SiRNA target sequence
aaaaggaagtgttaaatcttctta

SEQ ID NO: 7108 - DNA, 24 bp, Artificial sequence
  SiRNA target sequence
aaaggaagtgttaaatcttcttaa

SEQ ID NO: 7109 - DNA, 24 bp, Artificial sequence
  SiRNA target sequence
aaggaagtgttaaatcttcttaat

SEQ ID NO: 7110 - DNA, 24 bp, Artificial sequence
  SiRNA target sequence
aggaagtgttaaatcttcttaatg

SEQ ID NO: 7111 - DNA, 24 bp, Artificial sequence
  SiRNA target sequence
ggaagtgttaaatcttcttaatgc

SEQ ID NO: 7112 - DNA, 24 bp, Artificial sequence
  SiRNA target sequence
gaagtgttaaatcttcttaatgcc

SEQ ID NO: 7113 - DNA, 24 bp, Artificial sequence
  SiRNA target sequence
aagtgttaaatcttcttaatgcca

SEQ ID NO: 7114 - DNA, 24 bp, Artificial sequence
  SiRNA target sequence
agtgttaaatcttcttaatgccat

SEQ ID NO: 7115 - DNA, 24 bp, Artificial sequence
  SiRNA target sequence
gtgttaaatcttcttaatgccatt

SEQ ID NO: 7116 - DNA, 24 bp, Artificial sequence
  SiRNA target sequence
tgttaaatcttcttaatgccatta

SEQ ID NO: 7117 - DNA, 24 bp, Artificial sequence
  SiRNA target sequence
gttaaatcttcttaatgccattat

SEQ ID NO: 7118 - DNA, 24 bp, Artificial sequence
  SiRNA target sequence
ttaaatcttcttaatgccattatt

SEQ ID NO: 7119 - DNA, 24 bp, Artificial sequence
  SiRNA target sequence
taaatcttcttaatgccattattt

SEQ ID NO: 7120 - DNA, 24 bp, Artificial sequence
  SiRNA target sequence
aaatcttcttaatgccattatttt

SEQ ID NO: 7121 - DNA, 24 bp, Artificial sequence
  SiRNA target sequence
aatcttcttaatgccattatttta

SEQ ID NO: 7122 - DNA, 24 bp, Artificial sequence
  SiRNA target sequence
atcttcttaatgccattattttac

SEQ ID NO: 7123 - DNA, 24 bp, Artificial sequence
  SiRNA target sequence
tcttcttaatgccattattttaca

SEQ ID NO: 7124 - DNA, 24 bp, Artificial sequence
  SiRNA target sequence
cttcttaatgccattattttacac

SEQ ID NO: 7125 - DNA, 24 bp, Artificial sequence
  SiRNA target sequence
ttcttaatgccattattttacacc

SEQ ID NO: 7126 - DNA, 24 bp, Artificial sequence
  SiRNA target sequence
tcttaatgccattattttacacct

SEQ ID NO: 7127 - DNA, 24 bp, Artificial sequence
  SiRNA target sequence
cttaatgccattattttacaccta

SEQ ID NO: 7128 - DNA, 24 bp, Artificial sequence
  SiRNA target sequence
ttaatgccattattttacacctaa

SEQ ID NO: 7129 - DNA, 24 bp, Artificial sequence
  SiRNA target sequence
taatgccattattttacacctaaa

SEQ ID NO: 7130 - DNA, 24 bp, Artificial sequence
  SiRNA target sequence
aatgccattattttacacctaaaa

SEQ ID NO: 7131 - DNA, 24 bp, Artificial sequence
  SiRNA target sequence
atgccattattttacacctaaaag

SEQ ID NO: 7132 - DNA, 24 bp, Artificial sequence
  SiRNA target sequence
tgccattattttacacctaaaagg

SEQ ID NO: 7133 - DNA, 24 bp, Artificial sequence
  SiRNA target sequence
gccattattttacacctaaaagga

SEQ ID NO: 7134 - DNA, 24 bp, Artificial sequence
  SiRNA target sequence
ccattattttacacctaaaaggaa

SEQ ID NO: 7135 - DNA, 24 bp, Artificial sequence
  SiRNA target sequence
cattattttacacctaaaaggaaa

SEQ ID NO: 7136 - DNA, 24 bp, Artificial sequence
  SiRNA target sequence
attattttacacctaaaaggaaaa

SEQ ID NO: 7137 - DNA, 24 bp, Artificial sequence
  SiRNA target sequence
ttattttacacctaaaaggaaaaa

SEQ ID NO: 7138 - DNA, 24 bp, Artificial sequence
  SiRNA target sequence
tattttacacctaaaaggaaaaaa

SEQ ID NO: 7139 - DNA, 24 bp, Artificial sequence
  SiRNA target sequence
attttacacctaaaaggaaaaaaa

SEQ ID NO: 7140 - DNA, 24 bp, Artificial sequence
  SiRNA target sequence
ttttacacctaaaaggaaaaaaag

SEQ ID NO: 7141 - DNA, 24 bp, Artificial sequence
  SiRNA target sequence
tttacacctaaaaggaaaaaaaga

SEQ ID NO: 7142 - DNA, 24 bp, Artificial sequence
  SiRNA target sequence
ttacacctaaaaggaaaaaaagaa

SEQ ID NO: 7143 - DNA, 24 bp, Artificial sequence
  SiRNA target sequence
tacacctaaaaggaaaaaaagaac

SEQ ID NO: 7144 - DNA, 24 bp, Artificial sequence
  SiRNA target sequence
acacctaaaaggaaaaaaagaaca

SEQ ID NO: 7145 - DNA, 24 bp, Artificial sequence
  SiRNA target sequence
cacctaaaaggaaaaaaagaacag

SEQ ID NO: 7146 - DNA, 24 bp, Artificial sequence
  SiRNA target sequence
acctaaaaggaaaaaaagaacagg

SEQ ID NO: 7147 - DNA, 24 bp, Artificial sequence
  SiRNA target sequence
cctaaaaggaaaaaaagaacaggc

SEQ ID NO: 7148 - DNA, 24 bp, Artificial sequence
  SiRNA target sequence
ctaaaaggaaaaaaagaacaggca

SEQ ID NO: 7149 - DNA, 24 bp, Artificial sequence
  SiRNA target sequence
taaaaggaaaaaaagaacaggcaa

SEQ ID NO: 7150 - DNA, 24 bp, Artificial sequence
  SiRNA target sequence
aaaaggaaaaaaagaacaggcaat

SEQ ID NO: 7151 - DNA, 24 bp, Artificial sequence
  SiRNA target sequence
aaaggaaaaaaagaacaggcaatt

SEQ ID NO: 7152 - DNA, 24 bp, Artificial sequence
  SiRNA target sequence
aaggaaaaaaagaacaggcaattc

SEQ ID NO: 7153 - DNA, 24 bp, Artificial sequence
  SiRNA target sequence
aggaaaaaaagaacaggcaattct

SEQ ID NO: 7154 - DNA, 24 bp, Artificial sequence
  SiRNA target sequence
ggaaaaaaagaacaggcaattctt

SEQ ID NO: 7155 - DNA, 24 bp, Artificial sequence
  SiRNA target sequence
gaaaaaaagaacaggcaattcttt

SEQ ID NO: 7156 - DNA, 24 bp, Artificial sequence
  SiRNA target sequence
aaaaaaagaacaggcaattctttt

SEQ ID NO: 7157 - DNA, 24 bp, Artificial sequence
  SiRNA target sequence
aaaaaagaacaggcaattctttta

SEQ ID NO: 7158 - DNA, 24 bp, Artificial sequence
  SiRNA target sequence
aaaaagaacaggcaattcttttat

SEQ ID NO: 7159 - DNA, 24 bp, Artificial sequence
  SiRNA target sequence
aaaagaacaggcaattcttttatt

SEQ ID NO: 7160 - DNA, 24 bp, Artificial sequence
  SiRNA target sequence
aaagaacaggcaattcttttatta

SEQ ID NO: 7161 - DNA, 24 bp, Artificial sequence
  SiRNA target sequence
aagaacaggcaattcttttattag

SEQ ID NO: 7162 - DNA, 24 bp, Artificial sequence
  SiRNA target sequence
agaacaggcaattcttttattaga

SEQ ID NO: 7163 - DNA, 24 bp, Artificial sequence
  SiRNA target sequence
gaacaggcaattcttttattagaa

SEQ ID NO: 7164 - DNA, 24 bp, Artificial sequence
  SiRNA target sequence
aacaggcaattcttttattagaaa

SEQ ID NO: 7165 - DNA, 24 bp, Artificial sequence
  SiRNA target sequence
acaggcaattcttttattagaaaa

SEQ ID NO: 7166 - DNA, 24 bp, Artificial sequence
  SiRNA target sequence
caggcaattcttttattagaaaaa

SEQ ID NO: 7167 - DNA, 24 bp, Artificial sequence
  SiRNA target sequence
aggcaattcttttattagaaaaat

SEQ ID NO: 7168 - DNA, 24 bp, Artificial sequence
  SiRNA target sequence
ggcaattcttttattagaaaaatc

SEQ ID NO: 7169 - DNA, 24 bp, Artificial sequence
  SiRNA target sequence
gcaattcttttattagaaaaatct

SEQ ID NO: 7170 - DNA, 24 bp, Artificial sequence
  SiRNA target sequence
caattcttttattagaaaaatcta

SEQ ID NO: 7171 - DNA, 24 bp, Artificial sequence
  SiRNA target sequence
aattcttttattagaaaaatctac

SEQ ID NO: 7172 - DNA, 24 bp, Artificial sequence
  SiRNA target sequence
attcttttattagaaaaatctact

SEQ ID NO: 7173 - DNA, 24 bp, Artificial sequence
  SiRNA target sequence
ttcttttattagaaaaatctactt

SEQ ID NO: 7174 - DNA, 24 bp, Artificial sequence
  SiRNA target sequence
tcttttattagaaaaatctactta

SEQ ID NO: 7175 - DNA, 24 bp, Artificial sequence
  SiRNA target sequence
cttttattagaaaaatctacttat

SEQ ID NO: 7176 - DNA, 24 bp, Artificial sequence
  SiRNA target sequence
ttttattagaaaaatctacttata

SEQ ID NO: 7177 - DNA, 24 bp, Artificial sequence
  SiRNA target sequence
tttattagaaaaatctacttataa

SEQ ID NO: 7178 - DNA, 24 bp, Artificial sequence
  SiRNA target sequence
ttattagaaaaatctacttataaa

SEQ ID NO: 7179 - DNA, 24 bp, Artificial sequence
  SiRNA target sequence
tattagaaaaatctacttataaat

SEQ ID NO: 7180 - DNA, 24 bp, Artificial sequence
  SiRNA target sequence
attagaaaaatctacttataaata

SEQ ID NO: 7181 - DNA, 24 bp, Artificial sequence
  SiRNA target sequence
ttagaaaaatctacttataaatac

SEQ ID NO: 7182 - DNA, 24 bp, Artificial sequence
  SiRNA target sequence
tagaaaaatctacttataaataca

SEQ ID NO: 7183 - DNA, 24 bp, Artificial sequence
  SiRNA target sequence
agaaaaatctacttataaatacag

SEQ ID NO: 7184 - DNA, 24 bp, Artificial sequence
  SiRNA target sequence
gaaaaatctacttataaatacagt

SEQ ID NO: 7185 - DNA, 24 bp, Artificial sequence
  SiRNA target sequence
aaaaatctacttataaatacagta

SEQ ID NO: 7186 - DNA, 24 bp, Artificial sequence
  SiRNA target sequence
aaaatctacttataaatacagtat

SEQ ID NO: 7187 - DNA, 24 bp, Artificial sequence
  SiRNA target sequence
aaatctacttataaatacagtatc

SEQ ID NO: 7188 - DNA, 24 bp, Artificial sequence
  SiRNA target sequence
aatctacttataaatacagtatct

SEQ ID NO: 7189 - DNA, 24 bp, Artificial sequence
  SiRNA target sequence
atctacttataaatacagtatctt

SEQ ID NO: 7190 - DNA, 24 bp, Artificial sequence
  SiRNA target sequence
tctacttataaatacagtatcttg

SEQ ID NO: 7191 - DNA, 24 bp, Artificial sequence
  SiRNA target sequence
ctacttataaatacagtatcttgt

SEQ ID NO: 7192 - DNA, 24 bp, Artificial sequence
  SiRNA target sequence
tacttataaatacagtatcttgta

SEQ ID NO: 7193 - DNA, 24 bp, Artificial sequence
  SiRNA target sequence
acttataaatacagtatcttgtat

SEQ ID NO: 7194 - DNA, 24 bp, Artificial sequence
  SiRNA target sequence
cttataaatacagtatcttgtata

SEQ ID NO: 7195 - DNA, 24 bp, Artificial sequence
  SiRNA target sequence
ttataaatacagtatcttgtatag

SEQ ID NO: 7196 - DNA, 24 bp, Artificial sequence
  SiRNA target sequence
tataaatacagtatcttgtataga

SEQ ID NO: 7197 - DNA, 24 bp, Artificial sequence
  SiRNA target sequence
ataaatacagtatcttgtatagag

SEQ ID NO: 7198 - DNA, 24 bp, Artificial sequence
  SiRNA target sequence
taaatacagtatcttgtatagagc

SEQ ID NO: 7199 - DNA, 24 bp, Artificial sequence
  SiRNA target sequence
aaatacagtatcttgtatagagca

SEQ ID NO: 7200 - DNA, 24 bp, Artificial sequence
  SiRNA target sequence
aatacagtatcttgtatagagcat

SEQ ID NO: 7201 - DNA, 24 bp, Artificial sequence
  SiRNA target sequence
atacagtatcttgtatagagcata

SEQ ID NO: 7202 - DNA, 24 bp, Artificial sequence
  SiRNA target sequence
tacagtatcttgtatagagcatat

SEQ ID NO: 7203 - DNA, 24 bp, Artificial sequence
  SiRNA target sequence
acagtatcttgtatagagcatatt

SEQ ID NO: 7204 - DNA, 24 bp, Artificial sequence
  SiRNA target sequence
cagtatcttgtatagagcatattt

SEQ ID NO: 7205 - DNA, 24 bp, Artificial sequence
  SiRNA target sequence
agtatcttgtatagagcatatttt

SEQ ID NO: 7206 - DNA, 24 bp, Artificial sequence
  SiRNA target sequence
gtatcttgtatagagcatattttc

SEQ ID NO: 7207 - DNA, 24 bp, Artificial sequence
  SiRNA target sequence
tatcttgtatagagcatattttct

SEQ ID NO: 7208 - DNA, 24 bp, Artificial sequence
  SiRNA target sequence
atcttgtatagagcatattttctt

SEQ ID NO: 7209 - DNA, 24 bp, Artificial sequence
  SiRNA target sequence
tcttgtatagagcatattttctta

SEQ ID NO: 7210 - DNA, 24 bp, Artificial sequence
  SiRNA target sequence
cttgtatagagcatattttcttac

SEQ ID NO: 7211 - DNA, 24 bp, Artificial sequence
  SiRNA target sequence
ttgtatagagcatattttcttaca

SEQ ID NO: 7212 - DNA, 24 bp, Artificial sequence
  SiRNA target sequence
tgtatagagcatattttcttacat

SEQ ID NO: 7213 - DNA, 24 bp, Artificial sequence
  SiRNA target sequence
gtatagagcatattttcttacatt

SEQ ID NO: 7214 - DNA, 24 bp, Artificial sequence
  SiRNA target sequence
tatagagcatattttcttacattg

SEQ ID NO: 7215 - DNA, 24 bp, Artificial sequence
  SiRNA target sequence
atagagcatattttcttacattga

SEQ ID NO: 7216 - DNA, 24 bp, Artificial sequence
  SiRNA target sequence
tagagcatattttcttacattgaa

SEQ ID NO: 7217 - DNA, 24 bp, Artificial sequence
  SiRNA target sequence
agagcatattttcttacattgaag

SEQ ID NO: 7218 - DNA, 24 bp, Artificial sequence
  SiRNA target sequence
gagcatattttcttacattgaaga

SEQ ID NO: 7219 - DNA, 24 bp, Artificial sequence
  SiRNA target sequence
agcatattttcttacattgaagaa

SEQ ID NO: 7220 - DNA, 24 bp, Artificial sequence
  SiRNA target sequence
gcatattttcttacattgaagaat

SEQ ID NO: 7221 - DNA, 24 bp, Artificial sequence
  SiRNA target sequence
catattttcttacattgaagaatg

SEQ ID NO: 7222 - DNA, 24 bp, Artificial sequence
  SiRNA target sequence
atattttcttacattgaagaatga

SEQ ID NO: 7223 - DNA, 24 bp, Artificial sequence
  SiRNA target sequence
tattttcttacattgaagaatgaa

SEQ ID NO: 7224 - DNA, 24 bp, Artificial sequence
  SiRNA target sequence
attttcttacattgaagaatgaat

SEQ ID NO: 7225 - DNA, 24 bp, Artificial sequence
  SiRNA target sequence
ttttcttacattgaagaatgaata

SEQ ID NO: 7226 - DNA, 24 bp, Artificial sequence
  SiRNA target sequence
tttcttacattgaagaatgaatat

SEQ ID NO: 7227 - DNA, 24 bp, Artificial sequence
  SiRNA target sequence
ttcttacattgaagaatgaatata

SEQ ID NO: 7228 - DNA, 24 bp, Artificial sequence
  SiRNA target sequence
tcttacattgaagaatgaatatat

SEQ ID NO: 7229 - DNA, 24 bp, Artificial sequence
  SiRNA target sequence
cttacattgaagaatgaatatatt

SEQ ID NO: 7230 - DNA, 24 bp, Artificial sequence
  SiRNA target sequence
ttacattgaagaatgaatatattt

SEQ ID NO: 7231 - DNA, 24 bp, Artificial sequence
  SiRNA target sequence
tacattgaagaatgaatatatttc

SEQ ID NO: 7232 - DNA, 24 bp, Artificial sequence
  SiRNA target sequence
acattgaagaatgaatatatttca

SEQ ID NO: 7233 - DNA, 24 bp, Artificial sequence
  SiRNA target sequence
cattgaagaatgaatatatttcat

SEQ ID NO: 7234 - DNA, 24 bp, Artificial sequence
  SiRNA target sequence
attgaagaatgaatatatttcatc

SEQ ID NO: 7235 - DNA, 24 bp, Artificial sequence
  SiRNA target sequence
ttgaagaatgaatatatttcatct

SEQ ID NO: 7236 - DNA, 24 bp, Artificial sequence
  SiRNA target sequence
tgaagaatgaatatatttcatctt

SEQ ID NO: 7237 - DNA, 24 bp, Artificial sequence
  SiRNA target sequence
gaagaatgaatatatttcatcttc

SEQ ID NO: 7238 - DNA, 24 bp, Artificial sequence
  SiRNA target sequence
aagaatgaatatatttcatcttca

SEQ ID NO: 7239 - DNA, 24 bp, Artificial sequence
  SiRNA target sequence
agaatgaatatatttcatcttcat

SEQ ID NO: 7240 - DNA, 24 bp, Artificial sequence
  SiRNA target sequence
gaatgaatatatttcatcttcatt

SEQ ID NO: 7241 - DNA, 24 bp, Artificial sequence
  SiRNA target sequence
aatgaatatatttcatcttcattg

SEQ ID NO: 7242 - DNA, 24 bp, Artificial sequence
  SiRNA target sequence
atgaatatatttcatcttcattgc

SEQ ID NO: 7243 - DNA, 24 bp, Artificial sequence
  SiRNA target sequence
tgaatatatttcatcttcattgcc

SEQ ID NO: 7244 - DNA, 24 bp, Artificial sequence
  SiRNA target sequence
gaatatatttcatcttcattgcct

SEQ ID NO: 7245 - DNA, 24 bp, Artificial sequence
  SiRNA target sequence
aatatatttcatcttcattgcctt

SEQ ID NO: 7246 - DNA, 24 bp, Artificial sequence
  SiRNA target sequence
atatatttcatcttcattgccttt

SEQ ID NO: 7247 - DNA, 24 bp, Artificial sequence
  SiRNA target sequence
tatatttcatcttcattgccttta

SEQ ID NO: 7248 - DNA, 24 bp, Artificial sequence
  SiRNA target sequence
atatttcatcttcattgcctttag

SEQ ID NO: 7249 - DNA, 24 bp, Artificial sequence
  SiRNA target sequence
tatttcatcttcattgcctttaga

SEQ ID NO: 7250 - DNA, 24 bp, Artificial sequence
  SiRNA target sequence
atttcatcttcattgcctttagat

SEQ ID NO: 7251 - DNA, 24 bp, Artificial sequence
  SiRNA target sequence
tttcatcttcattgcctttagatg

SEQ ID NO: 7252 - DNA, 24 bp, Artificial sequence
  SiRNA target sequence
ttcatcttcattgcctttagatga

SEQ ID NO: 7253 - DNA, 24 bp, Artificial sequence
  SiRNA target sequence
tcatcttcattgcctttagatgac

SEQ ID NO: 7254 - DNA, 24 bp, Artificial sequence
  SiRNA target sequence
catcttcattgcctttagatgacg

SEQ ID NO: 7255 - DNA, 24 bp, Artificial sequence
  SiRNA target sequence
atcttcattgcctttagatgacga

SEQ ID NO: 7256 - DNA, 24 bp, Artificial sequence
  SiRNA target sequence
tcttcattgcctttagatgacgag

SEQ ID NO: 7257 - DNA, 24 bp, Artificial sequence
  SiRNA target sequence
cttcattgcctttagatgacgaga

SEQ ID NO: 7258 - DNA, 24 bp, Artificial sequence
  SiRNA target sequence
ttcattgcctttagatgacgagat

SEQ ID NO: 7259 - DNA, 24 bp, Artificial sequence
  SiRNA target sequence
tcattgcctttagatgacgagatt

SEQ ID NO: 7260 - DNA, 24 bp, Artificial sequence
  SiRNA target sequence
cattgcctttagatgacgagatta

SEQ ID NO: 7261 - DNA, 24 bp, Artificial sequence
  SiRNA target sequence
attgcctttagatgacgagattac

SEQ ID NO: 7262 - DNA, 24 bp, Artificial sequence
  SiRNA target sequence
ttgcctttagatgacgagattact

SEQ ID NO: 7263 - DNA, 24 bp, Artificial sequence
  SiRNA target sequence
tgcctttagatgacgagattacta

SEQ ID NO: 7264 - DNA, 24 bp, Artificial sequence
  SiRNA target sequence
gcctttagatgacgagattactac

SEQ ID NO: 7265 - DNA, 24 bp, Artificial sequence
  SiRNA target sequence
cctttagatgacgagattactacg

SEQ ID NO: 7266 - DNA, 24 bp, Artificial sequence
  SiRNA target sequence
ctttagatgacgagattactacgc

SEQ ID NO: 7267 - DNA, 24 bp, Artificial sequence
  SiRNA target sequence
tttagatgacgagattactacgct

SEQ ID NO: 7268 - DNA, 24 bp, Artificial sequence
  SiRNA target sequence
ttagatgacgagattactacgctt

SEQ ID NO: 7269 - DNA, 24 bp, Artificial sequence
  SiRNA target sequence
tagatgacgagattactacgcttt

SEQ ID NO: 7270 - DNA, 24 bp, Artificial sequence
  SiRNA target sequence
agatgacgagattactacgcttta

SEQ ID NO: 7271 - DNA, 24 bp, Artificial sequence
  SiRNA target sequence
gatgacgagattactacgctttac

SEQ ID NO: 7272 - DNA, 24 bp, Artificial sequence
  SiRNA target sequence
atgacgagattactacgctttact

SEQ ID NO: 7273 - DNA, 24 bp, Artificial sequence
  SiRNA target sequence
tgacgagattactacgctttactt

SEQ ID NO: 7274 - DNA, 24 bp, Artificial sequence
  SiRNA target sequence
gacgagattactacgctttacttg

SEQ ID NO: 7275 - DNA, 24 bp, Artificial sequence
  SiRNA target sequence
acgagattactacgctttacttgt

SEQ ID NO: 7276 - DNA, 24 bp, Artificial sequence
  SiRNA target sequence
cgagattactacgctttacttgta

SEQ ID NO: 7277 - DNA, 24 bp, Artificial sequence
  SiRNA target sequence
gagattactacgctttacttgtat

SEQ ID NO: 7278 - DNA, 24 bp, Artificial sequence
  SiRNA target sequence
agattactacgctttacttgtatt

SEQ ID NO: 7279 - DNA, 24 bp, Artificial sequence
  SiRNA target sequence
gattactacgctttacttgtattc

SEQ ID NO: 7280 - DNA, 24 bp, Artificial sequence
  SiRNA target sequence
attactacgctttacttgtattct

SEQ ID NO: 7281 - DNA, 24 bp, Artificial sequence
  SiRNA target sequence
ttactacgctttacttgtattcta

SEQ ID NO: 7282 - DNA, 24 bp, Artificial sequence
  SiRNA target sequence
tactacgctttacttgtattctaa

SEQ ID NO: 7283 - DNA, 24 bp, Artificial sequence
  SiRNA target sequence
actacgctttacttgtattctaag

SEQ ID NO: 7284 - DNA, 24 bp, Artificial sequence
  SiRNA target sequence
ctacgctttacttgtattctaaga

SEQ ID NO: 7285 - DNA, 24 bp, Artificial sequence
  SiRNA target sequence
tacgctttacttgtattctaagat

SEQ ID NO: 7286 - DNA, 24 bp, Artificial sequence
  SiRNA target sequence
acgctttacttgtattctaagatt

SEQ ID NO: 7287 - DNA, 24 bp, Artificial sequence
  SiRNA target sequence
cgctttacttgtattctaagattt

SEQ ID NO: 7288 - DNA, 24 bp, Artificial sequence
  SiRNA target sequence
gctttacttgtattctaagatttt

SEQ ID NO: 7289 - DNA, 24 bp, Artificial sequence
  SiRNA target sequence
ctttacttgtattctaagattttt

SEQ ID NO: 7290 - DNA, 24 bp, Artificial sequence
  SiRNA target sequence
tttacttgtattctaagattttta

SEQ ID NO: 7291 - DNA, 24 bp, Artificial sequence
  SiRNA target sequence
ttacttgtattctaagatttttaa

SEQ ID NO: 7292 - DNA, 24 bp, Artificial sequence
  SiRNA target sequence
tacttgtattctaagatttttaaa

SEQ ID NO: 7293 - DNA, 24 bp, Artificial sequence
  SiRNA target sequence
acttgtattctaagatttttaaag

SEQ ID NO: 7294 - DNA, 24 bp, Artificial sequence
  SiRNA target sequence
cttgtattctaagatttttaaaga

SEQ ID NO: 7295 - DNA, 24 bp, Artificial sequence
  SiRNA target sequence
ttgtattctaagatttttaaagat

SEQ ID NO: 7296 - DNA, 24 bp, Artificial sequence
  SiRNA target sequence
tgtattctaagatttttaaagata

SEQ ID NO: 7297 - DNA, 24 bp, Artificial sequence
  SiRNA target sequence
gtattctaagatttttaaagataa

SEQ ID NO: 7298 - DNA, 24 bp, Artificial sequence
  SiRNA target sequence
tattctaagatttttaaagataaa

SEQ ID NO: 7299 - DNA, 24 bp, Artificial sequence
  SiRNA target sequence
attctaagatttttaaagataaat

SEQ ID NO: 7300 - DNA, 24 bp, Artificial sequence
  SiRNA target sequence
ttctaagatttttaaagataaatc

SEQ ID NO: 7301 - DNA, 24 bp, Artificial sequence
  SiRNA target sequence
tctaagatttttaaagataaatct

SEQ ID NO: 7302 - DNA, 24 bp, Artificial sequence
  SiRNA target sequence
ctaagatttttaaagataaatctg

SEQ ID NO: 7303 - DNA, 24 bp, Artificial sequence
  SiRNA target sequence
taagatttttaaagataaatctga

SEQ ID NO: 7304 - DNA, 24 bp, Artificial sequence
  SiRNA target sequence
aagatttttaaagataaatctgat

SEQ ID NO: 7305 - DNA, 24 bp, Artificial sequence
  SiRNA target sequence
agatttttaaagataaatctgata

SEQ ID NO: 7306 - DNA, 24 bp, Artificial sequence
  SiRNA target sequence
gatttttaaagataaatctgatac

SEQ ID NO: 7307 - DNA, 24 bp, Artificial sequence
  SiRNA target sequence
atttttaaagataaatctgatact

SEQ ID NO: 7308 - DNA, 24 bp, Artificial sequence
  SiRNA target sequence
tttttaaagataaatctgatactt

SEQ ID NO: 7309 - DNA, 24 bp, Artificial sequence
  SiRNA target sequence
ttttaaagataaatctgatactta

SEQ ID NO: 7310 - DNA, 24 bp, Artificial sequence
  SiRNA target sequence
tttaaagataaatctgatacttac

SEQ ID NO: 7311 - DNA, 24 bp, Artificial sequence
  SiRNA target sequence
ttaaagataaatctgatacttacc

SEQ ID NO: 7312 - DNA, 24 bp, Artificial sequence
  SiRNA target sequence
taaagataaatctgatacttacct

SEQ ID NO: 7313 - DNA, 24 bp, Artificial sequence
  SiRNA target sequence
aaagataaatctgatacttacctt

SEQ ID NO: 7314 - DNA, 24 bp, Artificial sequence
  SiRNA target sequence
aagataaatctgatacttacctta

SEQ ID NO: 7315 - DNA, 24 bp, Artificial sequence
  SiRNA target sequence
agataaatctgatacttaccttaa

SEQ ID NO: 7316 - DNA, 24 bp, Artificial sequence
  SiRNA target sequence
gataaatctgatacttaccttaaa

SEQ ID NO: 7317 - DNA, 24 bp, Artificial sequence
  SiRNA target sequence
ataaatctgatacttaccttaaat

SEQ ID NO: 7318 - DNA, 24 bp, Artificial sequence
  SiRNA target sequence
taaatctgatacttaccttaaatc

SEQ ID NO: 7319 - DNA, 24 bp, Artificial sequence
  SiRNA target sequence
aaatctgatacttaccttaaatct

SEQ ID NO: 7320 - DNA, 24 bp, Artificial sequence
  SiRNA target sequence
aatctgatacttaccttaaatctg

SEQ ID NO: 7321 - DNA, 24 bp, Artificial sequence
  SiRNA target sequence
atctgatacttaccttaaatctgc

SEQ ID NO: 7322 - DNA, 24 bp, Artificial sequence
  SiRNA target sequence
tctgatacttaccttaaatctgct

SEQ ID NO: 7323 - DNA, 24 bp, Artificial sequence
  SiRNA target sequence
ctgatacttaccttaaatctgcta

SEQ ID NO: 7324 - DNA, 24 bp, Artificial sequence
  SiRNA target sequence
tgatacttaccttaaatctgctat

SEQ ID NO: 7325 - DNA, 24 bp, Artificial sequence
  SiRNA target sequence
gatacttaccttaaatctgctata

SEQ ID NO: 7326 - DNA, 24 bp, Artificial sequence
  SiRNA target sequence
atacttaccttaaatctgctatag

SEQ ID NO: 7327 - DNA, 24 bp, Artificial sequence
  SiRNA target sequence
tacttaccttaaatctgctataga

SEQ ID NO: 7328 - DNA, 24 bp, Artificial sequence
  SiRNA target sequence
acttaccttaaatctgctatagat

SEQ ID NO: 7329 - DNA, 24 bp, Artificial sequence
  SiRNA target sequence
cttaccttaaatctgctatagata

SEQ ID NO: 7330 - DNA, 24 bp, Artificial sequence
  SiRNA target sequence
ttaccttaaatctgctatagataa

SEQ ID NO: 7331 - DNA, 24 bp, Artificial sequence
  SiRNA target sequence
taccttaaatctgctatagataaa

SEQ ID NO: 7332 - DNA, 24 bp, Artificial sequence
  SiRNA target sequence
accttaaatctgctatagataaat

SEQ ID NO: 7333 - DNA, 24 bp, Artificial sequence
  SiRNA target sequence
ccttaaatctgctatagataaatc

SEQ ID NO: 7334 - DNA, 24 bp, Artificial sequence
  SiRNA target sequence
cttaaatctgctatagataaatca

SEQ ID NO: 7335 - DNA, 24 bp, Artificial sequence
  SiRNA target sequence
ttaaatctgctatagataaatcag

SEQ ID NO: 7336 - DNA, 24 bp, Artificial sequence
  SiRNA target sequence
taaatctgctatagataaatcagt

SEQ ID NO: 7337 - DNA, 24 bp, Artificial sequence
  SiRNA target sequence
aaatctgctatagataaatcagta

SEQ ID NO: 7338 - DNA, 24 bp, Artificial sequence
  SiRNA target sequence
aatctgctatagataaatcagtag

SEQ ID NO: 7339 - DNA, 24 bp, Artificial sequence
  SiRNA target sequence
atctgctatagataaatcagtaga

SEQ ID NO: 7340 - DNA, 24 bp, Artificial sequence
  SiRNA target sequence
tctgctatagataaatcagtagat

SEQ ID NO: 7341 - DNA, 24 bp, Artificial sequence
  SiRNA target sequence
ctgctatagataaatcagtagatc

SEQ ID NO: 7342 - DNA, 24 bp, Artificial sequence
  SiRNA target sequence
tgctatagataaatcagtagatct

SEQ ID NO: 7343 - DNA, 24 bp, Artificial sequence
  SiRNA target sequence
gctatagataaatcagtagatcta

SEQ ID NO: 7344 - DNA, 24 bp, Artificial sequence
  SiRNA target sequence
ctatagataaatcagtagatctac

SEQ ID NO: 7345 - DNA, 24 bp, Artificial sequence
  SiRNA target sequence
tatagataaatcagtagatctacc

SEQ ID NO: 7346 - DNA, 24 bp, Artificial sequence
  SiRNA target sequence
atagataaatcagtagatctacct

SEQ ID NO: 7347 - DNA, 24 bp, Artificial sequence
  SiRNA target sequence
tagataaatcagtagatctaccta

SEQ ID NO: 7348 - DNA, 24 bp, Artificial sequence
  SiRNA target sequence
agataaatcagtagatctacctat

SEQ ID NO: 7349 - DNA, 24 bp, Artificial sequence
  SiRNA target sequence
gataaatcagtagatctacctatt

SEQ ID NO: 7350 - DNA, 24 bp, Artificial sequence
  SiRNA target sequence
ataaatcagtagatctacctattg

SEQ ID NO: 7351 - DNA, 24 bp, Artificial sequence
  SiRNA target sequence
taaatcagtagatctacctattga

SEQ ID NO: 7352 - DNA, 24 bp, Artificial sequence
  SiRNA target sequence
aaatcagtagatctacctattgaa

SEQ ID NO: 7353 - DNA, 24 bp, Artificial sequence
  SiRNA target sequence
aatcagtagatctacctattgaac

SEQ ID NO: 7354 - DNA, 24 bp, Artificial sequence
  SiRNA target sequence
atcagtagatctacctattgaaca

SEQ ID NO: 7355 - DNA, 24 bp, Artificial sequence
  SiRNA target sequence
tcagtagatctacctattgaacag

SEQ ID NO: 7356 - DNA, 24 bp, Artificial sequence
  SiRNA target sequence
cagtagatctacctattgaacaga

SEQ ID NO: 7357 - DNA, 24 bp, Artificial sequence
  SiRNA target sequence
agtagatctacctattgaacagaa

SEQ ID NO: 7358 - DNA, 24 bp, Artificial sequence
  SiRNA target sequence
gtagatctacctattgaacagaaa

SEQ ID NO: 7359 - DNA, 24 bp, Artificial sequence
  SiRNA target sequence
tagatctacctattgaacagaaag

SEQ ID NO: 7360 - DNA, 24 bp, Artificial sequence
  SiRNA target sequence
agatctacctattgaacagaaaga

SEQ ID NO: 7361 - DNA, 24 bp, Artificial sequence
  SiRNA target sequence
gatctacctattgaacagaaagac

SEQ ID NO: 7362 - DNA, 24 bp, Artificial sequence
  SiRNA target sequence
atctacctattgaacagaaagact

SEQ ID NO: 7363 - DNA, 24 bp, Artificial sequence
  SiRNA target sequence
tctacctattgaacagaaagactt

SEQ ID NO: 7364 - DNA, 24 bp, Artificial sequence
  SiRNA target sequence
ctacctattgaacagaaagacttt

SEQ ID NO: 7365 - DNA, 24 bp, Artificial sequence
  SiRNA target sequence
tacctattgaacagaaagactttc

SEQ ID NO: 7366 - DNA, 24 bp, Artificial sequence
  SiRNA target sequence
acctattgaacagaaagactttct

SEQ ID NO: 7367 - DNA, 24 bp, Artificial sequence
  SiRNA target sequence
cctattgaacagaaagactttctg

SEQ ID NO: 7368 - DNA, 24 bp, Artificial sequence
  SiRNA target sequence
ctattgaacagaaagactttctgt

SEQ ID NO: 7369 - DNA, 24 bp, Artificial sequence
  SiRNA target sequence
tattgaacagaaagactttctgta

SEQ ID NO: 7370 - DNA, 24 bp, Artificial sequence
  SiRNA target sequence
attgaacagaaagactttctgtac

SEQ ID NO: 7371 - DNA, 24 bp, Artificial sequence
  SiRNA target sequence
ttgaacagaaagactttctgtacg

SEQ ID NO: 7372 - DNA, 24 bp, Artificial sequence
  SiRNA target sequence
tgaacagaaagactttctgtacgt

SEQ ID NO: 7373 - DNA, 24 bp, Artificial sequence
  SiRNA target sequence
gaacagaaagactttctgtacgta

SEQ ID NO: 7374 - DNA, 24 bp, Artificial sequence
  SiRNA target sequence
aacagaaagactttctgtacgtag

SEQ ID NO: 7375 - DNA, 24 bp, Artificial sequence
  SiRNA target sequence
acagaaagactttctgtacgtaga

SEQ ID NO: 7376 - DNA, 24 bp, Artificial sequence
  SiRNA target sequence
cagaaagactttctgtacgtagat

SEQ ID NO: 7377 - DNA, 24 bp, Artificial sequence
  SiRNA target sequence
agaaagactttctgtacgtagatc

SEQ ID NO: 7378 - DNA, 24 bp, Artificial sequence
  SiRNA target sequence
gaaagactttctgtacgtagatct

SEQ ID NO: 7379 - DNA, 24 bp, Artificial sequence
  SiRNA target sequence
aaagactttctgtacgtagatctt

SEQ ID NO: 7380 - DNA, 24 bp, Artificial sequence
  SiRNA target sequence
aagactttctgtacgtagatcttc

SEQ ID NO: 7381 - DNA, 24 bp, Artificial sequence
  SiRNA target sequence
agactttctgtacgtagatcttct

SEQ ID NO: 7382 - DNA, 24 bp, Artificial sequence
  SiRNA target sequence
gactttctgtacgtagatcttctt

SEQ ID NO: 7383 - DNA, 24 bp, Artificial sequence
  SiRNA target sequence
actttctgtacgtagatcttcttg

SEQ ID NO: 7384 - DNA, 24 bp, Artificial sequence
  SiRNA target sequence
ctttctgtacgtagatcttcttgt

SEQ ID NO: 7385 - DNA, 24 bp, Artificial sequence
  SiRNA target sequence
tttctgtacgtagatcttcttgta

SEQ ID NO: 7386 - DNA, 24 bp, Artificial sequence
  SiRNA target sequence
ttctgtacgtagatcttcttgtat

SEQ ID NO: 7387 - DNA, 24 bp, Artificial sequence
  SiRNA target sequence
tctgtacgtagatcttcttgtatt

SEQ ID NO: 7388 - DNA, 24 bp, Artificial sequence
  SiRNA target sequence
ctgtacgtagatcttcttgtattt

SEQ ID NO: 7389 - DNA, 24 bp, Artificial sequence
  SiRNA target sequence
tgtacgtagatcttcttgtatttt

SEQ ID NO: 7390 - DNA, 24 bp, Artificial sequence
  SiRNA target sequence
gtacgtagatcttcttgtatttta

SEQ ID NO: 7391 - DNA, 24 bp, Artificial sequence
  SiRNA target sequence
tacgtagatcttcttgtattttac

SEQ ID NO: 7392 - DNA, 24 bp, Artificial sequence
  SiRNA target sequence
acgtagatcttcttgtattttaca

SEQ ID NO: 7393 - DNA, 24 bp, Artificial sequence
  SiRNA target sequence
cgtagatcttcttgtattttacat

SEQ ID NO: 7394 - DNA, 24 bp, Artificial sequence
  SiRNA target sequence
gtagatcttcttgtattttacatt

SEQ ID NO: 7395 - DNA, 24 bp, Artificial sequence
  SiRNA target sequence
tagatcttcttgtattttacattt

SEQ ID NO: 7396 - DNA, 24 bp, Artificial sequence
  SiRNA target sequence
agatcttcttgtattttacatttc

SEQ ID NO: 7397 - DNA, 24 bp, Artificial sequence
  SiRNA target sequence
gatcttcttgtattttacatttct

SEQ ID NO: 7398 - DNA, 24 bp, Artificial sequence
  SiRNA target sequence
atcttcttgtattttacatttcta

SEQ ID NO: 7399 - DNA, 24 bp, Artificial sequence
  SiRNA target sequence
tcttcttgtattttacatttctaa

SEQ ID NO: 7400 - DNA, 24 bp, Artificial sequence
  SiRNA target sequence
cttcttgtattttacatttctaaa

SEQ ID NO: 7401 - DNA, 24 bp, Artificial sequence
  SiRNA target sequence
ttcttgtattttacatttctaaaa

SEQ ID NO: 7402 - DNA, 24 bp, Artificial sequence
  SiRNA target sequence
tcttgtattttacatttctaaaaa

SEQ ID NO: 7403 - DNA, 24 bp, Artificial sequence
  SiRNA target sequence
cttgtattttacatttctaaaaag

SEQ ID NO: 7404 - DNA, 24 bp, Artificial sequence
  SiRNA target sequence
ttgtattttacatttctaaaaagg

SEQ ID NO: 7405 - DNA, 24 bp, Artificial sequence
  SiRNA target sequence
tgtattttacatttctaaaaagga

SEQ ID NO: 7406 - DNA, 24 bp, Artificial sequence
  SiRNA target sequence
gtattttacatttctaaaaaggat

SEQ ID NO: 7407 - DNA, 24 bp, Artificial sequence
  SiRNA target sequence
tattttacatttctaaaaaggatg

SEQ ID NO: 7408 - DNA, 24 bp, Artificial sequence
  SiRNA target sequence
attttacatttctaaaaaggatgt

SEQ ID NO: 7409 - DNA, 24 bp, Artificial sequence
  SiRNA target sequence
ttttacatttctaaaaaggatgtt

SEQ ID NO: 7410 - DNA, 24 bp, Artificial sequence
  SiRNA target sequence
tttacatttctaaaaaggatgttg

SEQ ID NO: 7411 - DNA, 24 bp, Artificial sequence
  SiRNA target sequence
ttacatttctaaaaaggatgttga

SEQ ID NO: 7412 - DNA, 24 bp, Artificial sequence
  SiRNA target sequence
tacatttctaaaaaggatgttgaa

SEQ ID NO: 7413 - DNA, 24 bp, Artificial sequence
  SiRNA target sequence
acatttctaaaaaggatgttgaaa

SEQ ID NO: 7414 - DNA, 24 bp, Artificial sequence
  SiRNA target sequence
catttctaaaaaggatgttgaaaa

SEQ ID NO: 7415 - DNA, 24 bp, Artificial sequence
  SiRNA target sequence
atttctaaaaaggatgttgaaaaa

SEQ ID NO: 7416 - DNA, 24 bp, Artificial sequence
  SiRNA target sequence
tttctaaaaaggatgttgaaaaag

SEQ ID NO: 7417 - DNA, 24 bp, Artificial sequence
  SiRNA target sequence
ttctaaaaaggatgttgaaaaagt

SEQ ID NO: 7418 - DNA, 24 bp, Artificial sequence
  SiRNA target sequence
tctaaaaaggatgttgaaaaagtt

SEQ ID NO: 7419 - DNA, 24 bp, Artificial sequence
  SiRNA target sequence
ctaaaaaggatgttgaaaaagtta

SEQ ID NO: 7420 - DNA, 24 bp, Artificial sequence
  SiRNA target sequence
taaaaaggatgttgaaaaagttaa

SEQ ID NO: 7421 - DNA, 24 bp, Artificial sequence
  SiRNA target sequence
aaaaaggatgttgaaaaagttaat

SEQ ID NO: 7422 - DNA, 24 bp, Artificial sequence
  SiRNA target sequence
aaaaggatgttgaaaaagttaatg

SEQ ID NO: 7423 - DNA, 24 bp, Artificial sequence
  SiRNA target sequence
aaaggatgttgaaaaagttaatga

SEQ ID NO: 7424 - DNA, 24 bp, Artificial sequence
  SiRNA target sequence
aaggatgttgaaaaagttaatgaa

SEQ ID NO: 7425 - DNA, 24 bp, Artificial sequence
  SiRNA target sequence
aggatgttgaaaaagttaatgaaa

SEQ ID NO: 7426 - DNA, 24 bp, Artificial sequence
  SiRNA target sequence
ggatgttgaaaaagttaatgaaac

SEQ ID NO: 7427 - DNA, 24 bp, Artificial sequence
  SiRNA target sequence
gatgttgaaaaagttaatgaaaca

SEQ ID NO: 7428 - DNA, 24 bp, Artificial sequence
  SiRNA target sequence
atgttgaaaaagttaatgaaacaa

SEQ ID NO: 7429 - DNA, 24 bp, Artificial sequence
  SiRNA target sequence
tgttgaaaaagttaatgaaacaat

SEQ ID NO: 7430 - DNA, 24 bp, Artificial sequence
  SiRNA target sequence
gttgaaaaagttaatgaaacaatt

SEQ ID NO: 7431 - DNA, 24 bp, Artificial sequence
  SiRNA target sequence
ttgaaaaagttaatgaaacaatta

SEQ ID NO: 7432 - DNA, 24 bp, Artificial sequence
  SiRNA target sequence
tgaaaaagttaatgaaacaattaa

SEQ ID NO: 7433 - DNA, 24 bp, Artificial sequence
  SiRNA target sequence
gaaaaagttaatgaaacaattaat

SEQ ID NO: 7434 - DNA, 24 bp, Artificial sequence
  SiRNA target sequence
aaaaagttaatgaaacaattaata

SEQ ID NO: 7435 - DNA, 24 bp, Artificial sequence
  SiRNA target sequence
aaaagttaatgaaacaattaataa

SEQ ID NO: 7436 - DNA, 24 bp, Artificial sequence
  SiRNA target sequence
aaagttaatgaaacaattaataat

SEQ ID NO: 7437 - DNA, 24 bp, Artificial sequence
  SiRNA target sequence
aagttaatgaaacaattaataatt

SEQ ID NO: 7438 - DNA, 24 bp, Artificial sequence
  SiRNA target sequence
agttaatgaaacaattaataattt

SEQ ID NO: 7439 - DNA, 24 bp, Artificial sequence
  SiRNA target sequence
gttaatgaaacaattaataattta

SEQ ID NO: 7440 - DNA, 24 bp, Artificial sequence
  SiRNA target sequence
ttaatgaaacaattaataatttaa

SEQ ID NO: 7441 - DNA, 24 bp, Artificial sequence
  SiRNA target sequence
taatgaaacaattaataatttaaa

SEQ ID NO: 7442 - DNA, 24 bp, Artificial sequence
  SiRNA target sequence
aatgaaacaattaataatttaaaa

SEQ ID NO: 7443 - DNA, 24 bp, Artificial sequence
  SiRNA target sequence
atgaaacaattaataatttaaaag

SEQ ID NO: 7444 - DNA, 24 bp, Artificial sequence
  SiRNA target sequence
tgaaacaattaataatttaaaaga

SEQ ID NO: 7445 - DNA, 24 bp, Artificial sequence
  SiRNA target sequence
gaaacaattaataatttaaaagag

SEQ ID NO: 7446 - DNA, 24 bp, Artificial sequence
  SiRNA target sequence
aaacaattaataatttaaaagaga

SEQ ID NO: 7447 - DNA, 24 bp, Artificial sequence
  SiRNA target sequence
aacaattaataatttaaaagagac

SEQ ID NO: 7448 - DNA, 24 bp, Artificial sequence
  SiRNA target sequence
acaattaataatttaaaagagact

SEQ ID NO: 7449 - DNA, 24 bp, Artificial sequence
  SiRNA target sequence
caattaataatttaaaagagactc

SEQ ID NO: 7450 - DNA, 24 bp, Artificial sequence
  SiRNA target sequence
aattaataatttaaaagagactct

SEQ ID NO: 7451 - DNA, 24 bp, Artificial sequence
  SiRNA target sequence
attaataatttaaaagagactctt

SEQ ID NO: 7452 - DNA, 24 bp, Artificial sequence
  SiRNA target sequence
ttaataatttaaaagagactctta

SEQ ID NO: 7453 - DNA, 24 bp, Artificial sequence
  SiRNA target sequence
taataatttaaaagagactcttac

SEQ ID NO: 7454 - DNA, 24 bp, Artificial sequence
  SiRNA target sequence
aataatttaaaagagactcttacc

SEQ ID NO: 7455 - DNA, 24 bp, Artificial sequence
  SiRNA target sequence
ataatttaaaagagactcttaccc

SEQ ID NO: 7456 - DNA, 24 bp, Artificial sequence
  SiRNA target sequence
taatttaaaagagactcttacccc

SEQ ID NO: 7457 - DNA, 24 bp, Artificial sequence
  SiRNA target sequence
aatttaaaagagactcttaccccc

SEQ ID NO: 7458 - DNA, 24 bp, Artificial sequence
  SiRNA target sequence
atttaaaagagactcttaccccca

SEQ ID NO: 7459 - DNA, 24 bp, Artificial sequence
  SiRNA target sequence
tttaaaagagactcttacccccac

SEQ ID NO: 7460 - DNA, 24 bp, Artificial sequence
  SiRNA target sequence
ttaaaagagactcttacccccact

SEQ ID NO: 7461 - DNA, 24 bp, Artificial sequence
  SiRNA target sequence
taaaagagactcttacccccactt

SEQ ID NO: 7462 - DNA, 24 bp, Artificial sequence
  SiRNA target sequence
aaaagagactcttacccccacttt

SEQ ID NO: 7463 - DNA, 24 bp, Artificial sequence
  SiRNA target sequence
aaagagactcttacccccacttta

SEQ ID NO: 7464 - DNA, 24 bp, Artificial sequence
  SiRNA target sequence
aagagactcttacccccactttat

SEQ ID NO: 7465 - DNA, 24 bp, Artificial sequence
  SiRNA target sequence
agagactcttacccccactttatt

SEQ ID NO: 7466 - DNA, 24 bp, Artificial sequence
  SiRNA target sequence
gagactcttacccccactttattg

SEQ ID NO: 7467 - DNA, 24 bp, Artificial sequence
  SiRNA target sequence
agactcttacccccactttattgg

SEQ ID NO: 7468 - DNA, 24 bp, Artificial sequence
  SiRNA target sequence
gactcttacccccactttattgga

SEQ ID NO: 7469 - DNA, 24 bp, Artificial sequence
  SiRNA target sequence
actcttacccccactttattggaa

SEQ ID NO: 7470 - DNA, 24 bp, Artificial sequence
  SiRNA target sequence
ctcttacccccactttattggaac

SEQ ID NO: 7471 - DNA, 24 bp, Artificial sequence
  SiRNA target sequence
tcttacccccactttattggaact

SEQ ID NO: 7472 - DNA, 24 bp, Artificial sequence
  SiRNA target sequence
cttacccccactttattggaactt

SEQ ID NO: 7473 - DNA, 24 bp, Artificial sequence
  SiRNA target sequence
ttacccccactttattggaactta

SEQ ID NO: 7474 - DNA, 24 bp, Artificial sequence
  SiRNA target sequence
tacccccactttattggaacttat

SEQ ID NO: 7475 - DNA, 24 bp, Artificial sequence
  SiRNA target sequence
acccccactttattggaacttatt

SEQ ID NO: 7476 - DNA, 24 bp, Artificial sequence
  SiRNA target sequence
cccccactttattggaacttattg

SEQ ID NO: 7477 - DNA, 24 bp, Artificial sequence
  SiRNA target sequence
ccccactttattggaacttattgg

SEQ ID NO: 7478 - DNA, 24 bp, Artificial sequence
  SiRNA target sequence
cccactttattggaacttattgga

SEQ ID NO: 7479 - DNA, 24 bp, Artificial sequence
  SiRNA target sequence
ccactttattggaacttattggag

SEQ ID NO: 7480 - DNA, 24 bp, Artificial sequence
  SiRNA target sequence
cactttattggaacttattggaga

SEQ ID NO: 7481 - DNA, 24 bp, Artificial sequence
  SiRNA target sequence
actttattggaacttattggagaa

SEQ ID NO: 7482 - DNA, 24 bp, Artificial sequence
  SiRNA target sequence
ctttattggaacttattggagaat

SEQ ID NO: 7483 - DNA, 24 bp, Artificial sequence
  SiRNA target sequence
tttattggaacttattggagaata

SEQ ID NO: 7484 - DNA, 24 bp, Artificial sequence
  SiRNA target sequence
ttattggaacttattggagaatat

SEQ ID NO: 7485 - DNA, 24 bp, Artificial sequence
  SiRNA target sequence
tattggaacttattggagaatatt

SEQ ID NO: 7486 - DNA, 24 bp, Artificial sequence
  SiRNA target sequence
attggaacttattggagaatatta

SEQ ID NO: 7487 - DNA, 24 bp, Artificial sequence
  SiRNA target sequence
ttggaacttattggagaatattat

SEQ ID NO: 7488 - DNA, 24 bp, Artificial sequence
  SiRNA target sequence
tggaacttattggagaatattatt

SEQ ID NO: 7489 - DNA, 24 bp, Artificial sequence
  SiRNA target sequence
ggaacttattggagaatattattt

SEQ ID NO: 7490 - DNA, 24 bp, Artificial sequence
  SiRNA target sequence
gaacttattggagaatattattta

SEQ ID NO: 7491 - DNA, 24 bp, Artificial sequence
  SiRNA target sequence
aacttattggagaatattatttaa

SEQ ID NO: 7492 - DNA, 24 bp, Artificial sequence
  SiRNA target sequence
acttattggagaatattatttaaa

SEQ ID NO: 7493 - DNA, 24 bp, Artificial sequence
  SiRNA target sequence
cttattggagaatattatttaaaa

SEQ ID NO: 7494 - DNA, 24 bp, Artificial sequence
  SiRNA target sequence
ttattggagaatattatttaaaaa

SEQ ID NO: 7495 - DNA, 24 bp, Artificial sequence
  SiRNA target sequence
tattggagaatattatttaaaaag

SEQ ID NO: 7496 - DNA, 24 bp, Artificial sequence
  SiRNA target sequence
attggagaatattatttaaaaagt

SEQ ID NO: 7497 - DNA, 24 bp, Artificial sequence
  SiRNA target sequence
ttggagaatattatttaaaaagtg

SEQ ID NO: 7498 - DNA, 24 bp, Artificial sequence
  SiRNA target sequence
tggagaatattatttaaaaagtgg

SEQ ID NO: 7499 - DNA, 24 bp, Artificial sequence
  SiRNA target sequence
ggagaatattatttaaaaagtgga

SEQ ID NO: 7500 - DNA, 24 bp, Artificial sequence
  SiRNA target sequence
gagaatattatttaaaaagtggaa

SEQ ID NO: 7501 - DNA, 24 bp, Artificial sequence
  SiRNA target sequence
agaatattatttaaaaagtggaaa

SEQ ID NO: 7502 - DNA, 24 bp, Artificial sequence
  SiRNA target sequence
gaatattatttaaaaagtggaaat

SEQ ID NO: 7503 - DNA, 24 bp, Artificial sequence
  SiRNA target sequence
aatattatttaaaaagtggaaatc

SEQ ID NO: 7504 - DNA, 24 bp, Artificial sequence
  SiRNA target sequence
atattatttaaaaagtggaaatca

SEQ ID NO: 7505 - DNA, 24 bp, Artificial sequence
  SiRNA target sequence
tattatttaaaaagtggaaatcac

SEQ ID NO: 7506 - DNA, 24 bp, Artificial sequence
  SiRNA target sequence
attatttaaaaagtggaaatcact

SEQ ID NO: 7507 - DNA, 24 bp, Artificial sequence
  SiRNA target sequence
ttatttaaaaagtggaaatcactc

SEQ ID NO: 7508 - DNA, 24 bp, Artificial sequence
  SiRNA target sequence
tatttaaaaagtggaaatcactct

SEQ ID NO: 7509 - DNA, 24 bp, Artificial sequence
  SiRNA target sequence
atttaaaaagtggaaatcactcta

SEQ ID NO: 7510 - DNA, 24 bp, Artificial sequence
  SiRNA target sequence
tttaaaaagtggaaatcactctaa

SEQ ID NO: 7511 - DNA, 24 bp, Artificial sequence
  SiRNA target sequence
ttaaaaagtggaaatcactctaaa

SEQ ID NO: 7512 - DNA, 24 bp, Artificial sequence
  SiRNA target sequence
taaaaagtggaaatcactctaaaa

SEQ ID NO: 7513 - DNA, 24 bp, Artificial sequence
  SiRNA target sequence
aaaaagtggaaatcactctaaaat

SEQ ID NO: 7514 - DNA, 24 bp, Artificial sequence
  SiRNA target sequence
aaaagtggaaatcactctaaaatg

SEQ ID NO: 7515 - DNA, 24 bp, Artificial sequence
  SiRNA target sequence
aaagtggaaatcactctaaaatgt

SEQ ID NO: 7516 - DNA, 24 bp, Artificial sequence
  SiRNA target sequence
aagtggaaatcactctaaaatgtt

SEQ ID NO: 7517 - DNA, 24 bp, Artificial sequence
  SiRNA target sequence
agtggaaatcactctaaaatgtta

SEQ ID NO: 7518 - DNA, 24 bp, Artificial sequence
  SiRNA target sequence
gtggaaatcactctaaaatgttag

SEQ ID NO: 7519 - DNA, 24 bp, Artificial sequence
  SiRNA target sequence
tggaaatcactctaaaatgttaga

SEQ ID NO: 7520 - DNA, 24 bp, Artificial sequence
  SiRNA target sequence
ggaaatcactctaaaatgttagat

SEQ ID NO: 7521 - DNA, 24 bp, Artificial sequence
  SiRNA target sequence
gaaatcactctaaaatgttagatc

SEQ ID NO: 7522 - DNA, 24 bp, Artificial sequence
  SiRNA target sequence
aaatcactctaaaatgttagatct

SEQ ID NO: 7523 - DNA, 24 bp, Artificial sequence
  SiRNA target sequence
aatcactctaaaatgttagatcta

SEQ ID NO: 7524 - DNA, 24 bp, Artificial sequence
  SiRNA target sequence
atcactctaaaatgttagatctat

SEQ ID NO: 7525 - DNA, 24 bp, Artificial sequence
  SiRNA target sequence
tcactctaaaatgttagatctatt

SEQ ID NO: 7526 - DNA, 24 bp, Artificial sequence
  SiRNA target sequence
cactctaaaatgttagatctatta

SEQ ID NO: 7527 - DNA, 24 bp, Artificial sequence
  SiRNA target sequence
actctaaaatgttagatctattat

SEQ ID NO: 7528 - DNA, 24 bp, Artificial sequence
  SiRNA target sequence
ctctaaaatgttagatctattatc

SEQ ID NO: 7529 - DNA, 24 bp, Artificial sequence
  SiRNA target sequence
tctaaaatgttagatctattatct

SEQ ID NO: 7530 - DNA, 24 bp, Artificial sequence
  SiRNA target sequence
ctaaaatgttagatctattatcta

SEQ ID NO: 7531 - DNA, 24 bp, Artificial sequence
  SiRNA target sequence
taaaatgttagatctattatctag

SEQ ID NO: 7532 - DNA, 24 bp, Artificial sequence
  SiRNA target sequence
aaaatgttagatctattatctagt

SEQ ID NO: 7533 - DNA, 24 bp, Artificial sequence
  SiRNA target sequence
aaatgttagatctattatctagtc

SEQ ID NO: 7534 - DNA, 24 bp, Artificial sequence
  SiRNA target sequence
aatgttagatctattatctagtca

SEQ ID NO: 7535 - DNA, 24 bp, Artificial sequence
  SiRNA target sequence
atgttagatctattatctagtcat

SEQ ID NO: 7536 - DNA, 24 bp, Artificial sequence
  SiRNA target sequence
tgttagatctattatctagtcatc

SEQ ID NO: 7537 - DNA, 24 bp, Artificial sequence
  SiRNA target sequence
gttagatctattatctagtcatcc

SEQ ID NO: 7538 - DNA, 24 bp, Artificial sequence
  SiRNA target sequence
ttagatctattatctagtcatcca

SEQ ID NO: 7539 - DNA, 24 bp, Artificial sequence
  SiRNA target sequence
tagatctattatctagtcatccag

SEQ ID NO: 7540 - DNA, 24 bp, Artificial sequence
  SiRNA target sequence
agatctattatctagtcatccaga

SEQ ID NO: 7541 - DNA, 24 bp, Artificial sequence
  SiRNA target sequence
gatctattatctagtcatccagat

SEQ ID NO: 7542 - DNA, 24 bp, Artificial sequence
  SiRNA target sequence
atctattatctagtcatccagata

SEQ ID NO: 7543 - DNA, 24 bp, Artificial sequence
  SiRNA target sequence
tctattatctagtcatccagatac

SEQ ID NO: 7544 - DNA, 24 bp, Artificial sequence
  SiRNA target sequence
ctattatctagtcatccagatact

SEQ ID NO: 7545 - DNA, 24 bp, Artificial sequence
  SiRNA target sequence
tattatctagtcatccagatactc

SEQ ID NO: 7546 - DNA, 24 bp, Artificial sequence
  SiRNA target sequence
attatctagtcatccagatactcc

SEQ ID NO: 7547 - DNA, 24 bp, Artificial sequence
  SiRNA target sequence
ttatctagtcatccagatactcct

SEQ ID NO: 7548 - DNA, 24 bp, Artificial sequence
  SiRNA target sequence
tatctagtcatccagatactcctg

SEQ ID NO: 7549 - DNA, 24 bp, Artificial sequence
  SiRNA target sequence
atctagtcatccagatactcctgg

SEQ ID NO: 7550 - DNA, 24 bp, Artificial sequence
  SiRNA target sequence
tctagtcatccagatactcctggt

SEQ ID NO: 7551 - DNA, 24 bp, Artificial sequence
  SiRNA target sequence
ctagtcatccagatactcctggta

SEQ ID NO: 7552 - DNA, 24 bp, Artificial sequence
  SiRNA target sequence
tagtcatccagatactcctggtaa

SEQ ID NO: 7553 - DNA, 24 bp, Artificial sequence
  SiRNA target sequence
agtcatccagatactcctggtaaa

SEQ ID NO: 7554 - DNA, 24 bp, Artificial sequence
  SiRNA target sequence
gtcatccagatactcctggtaaat

SEQ ID NO: 7555 - DNA, 24 bp, Artificial sequence
  SiRNA target sequence
tcatccagatactcctggtaaatt

SEQ ID NO: 7556 - DNA, 24 bp, Artificial sequence
  SiRNA target sequence
catccagatactcctggtaaatta

SEQ ID NO: 7557 - DNA, 24 bp, Artificial sequence
  SiRNA target sequence
atccagatactcctggtaaattac

SEQ ID NO: 7558 - DNA, 24 bp, Artificial sequence
  SiRNA target sequence
tccagatactcctggtaaattact

SEQ ID NO: 7559 - DNA, 24 bp, Artificial sequence
  SiRNA target sequence
ccagatactcctggtaaattactt

SEQ ID NO: 7560 - DNA, 24 bp, Artificial sequence
  SiRNA target sequence
cagatactcctggtaaattacttt

SEQ ID NO: 7561 - DNA, 24 bp, Artificial sequence
  SiRNA target sequence
agatactcctggtaaattactttt

SEQ ID NO: 7562 - DNA, 24 bp, Artificial sequence
  SiRNA target sequence
gatactcctggtaaattactttta

SEQ ID NO: 7563 - DNA, 24 bp, Artificial sequence
  SiRNA target sequence
atactcctggtaaattacttttaa

SEQ ID NO: 7564 - DNA, 24 bp, Artificial sequence
  SiRNA target sequence
tactcctggtaaattacttttaac

SEQ ID NO: 7565 - DNA, 24 bp, Artificial sequence
  SiRNA target sequence
actcctggtaaattacttttaacg

SEQ ID NO: 7566 - DNA, 24 bp, Artificial sequence
  SiRNA target sequence
ctcctggtaaattacttttaacgg

SEQ ID NO: 7567 - DNA, 24 bp, Artificial sequence
  SiRNA target sequence
tcctggtaaattacttttaacggc

SEQ ID NO: 7568 - DNA, 24 bp, Artificial sequence
  SiRNA target sequence
cctggtaaattacttttaacggca

SEQ ID NO: 7569 - DNA, 24 bp, Artificial sequence
  SiRNA target sequence
ctggtaaattacttttaacggcac

SEQ ID NO: 7570 - DNA, 24 bp, Artificial sequence
  SiRNA target sequence
tggtaaattacttttaacggcact

SEQ ID NO: 7571 - DNA, 24 bp, Artificial sequence
  SiRNA target sequence
ggtaaattacttttaacggcactt

SEQ ID NO: 7572 - DNA, 24 bp, Artificial sequence
  SiRNA target sequence
gtaaattacttttaacggcacttt

SEQ ID NO: 7573 - DNA, 24 bp, Artificial sequence
  SiRNA target sequence
taaattacttttaacggcacttta

SEQ ID NO: 7574 - DNA, 24 bp, Artificial sequence
  SiRNA target sequence
aaattacttttaacggcactttat

SEQ ID NO: 7575 - DNA, 24 bp, Artificial sequence
  SiRNA target sequence
aattacttttaacggcactttatg

SEQ ID NO: 7576 - DNA, 24 bp, Artificial sequence
  SiRNA target sequence
attacttttaacggcactttatgc

SEQ ID NO: 7577 - DNA, 24 bp, Artificial sequence
  SiRNA target sequence
ttacttttaacggcactttatgca

SEQ ID NO: 7578 - DNA, 24 bp, Artificial sequence
  SiRNA target sequence
tacttttaacggcactttatgcaa

SEQ ID NO: 7579 - DNA, 24 bp, Artificial sequence
  SiRNA target sequence
acttttaacggcactttatgcaat

SEQ ID NO: 7580 - DNA, 24 bp, Artificial sequence
  SiRNA target sequence
cttttaacggcactttatgcaata

SEQ ID NO: 7581 - DNA, 24 bp, Artificial sequence
  SiRNA target sequence
ttttaacggcactttatgcaataa

SEQ ID NO: 7582 - DNA, 24 bp, Artificial sequence
  SiRNA target sequence
tttaacggcactttatgcaataag

SEQ ID NO: 7583 - DNA, 24 bp, Artificial sequence
  SiRNA target sequence
ttaacggcactttatgcaataagt

SEQ ID NO: 7584 - DNA, 24 bp, Artificial sequence
  SiRNA target sequence
taacggcactttatgcaataagta

SEQ ID NO: 7585 - DNA, 24 bp, Artificial sequence
  SiRNA target sequence
aacggcactttatgcaataagtat

SEQ ID NO: 7586 - DNA, 24 bp, Artificial sequence
  SiRNA target sequence
acggcactttatgcaataagtatt

SEQ ID NO: 7587 - DNA, 24 bp, Artificial sequence
  SiRNA target sequence
cggcactttatgcaataagtattg

SEQ ID NO: 7588 - DNA, 24 bp, Artificial sequence
  SiRNA target sequence
ggcactttatgcaataagtattga

SEQ ID NO: 7589 - DNA, 24 bp, Artificial sequence
  SiRNA target sequence
gcactttatgcaataagtattgat

SEQ ID NO: 7590 - DNA, 24 bp, Artificial sequence
  SiRNA target sequence
cactttatgcaataagtattgata

SEQ ID NO: 7591 - DNA, 24 bp, Artificial sequence
  SiRNA target sequence
actttatgcaataagtattgataa

SEQ ID NO: 7592 - DNA, 24 bp, Artificial sequence
  SiRNA target sequence
ctttatgcaataagtattgataag

SEQ ID NO: 7593 - DNA, 24 bp, Artificial sequence
  SiRNA target sequence
tttatgcaataagtattgataaga

SEQ ID NO: 7594 - DNA, 24 bp, Artificial sequence
  SiRNA target sequence
ttatgcaataagtattgataagaa

SEQ ID NO: 7595 - DNA, 24 bp, Artificial sequence
  SiRNA target sequence
tatgcaataagtattgataagaaa

SEQ ID NO: 7596 - DNA, 24 bp, Artificial sequence
  SiRNA target sequence
atgcaataagtattgataagaaaa

SEQ ID NO: 7597 - DNA, 24 bp, Artificial sequence
  SiRNA target sequence
tgcaataagtattgataagaaaaa

SEQ ID NO: 7598 - DNA, 24 bp, Artificial sequence
  SiRNA target sequence
gcaataagtattgataagaaaaag

SEQ ID NO: 7599 - DNA, 24 bp, Artificial sequence
  SiRNA target sequence
caataagtattgataagaaaaagg

SEQ ID NO: 7600 - DNA, 24 bp, Artificial sequence
  SiRNA target sequence
aataagtattgataagaaaaagga

SEQ ID NO: 7601 - DNA, 24 bp, Artificial sequence
  SiRNA target sequence
ataagtattgataagaaaaaggat

SEQ ID NO: 7602 - DNA, 24 bp, Artificial sequence
  SiRNA target sequence
taagtattgataagaaaaaggatg

SEQ ID NO: 7603 - DNA, 24 bp, Artificial sequence
  SiRNA target sequence
aagtattgataagaaaaaggatgc

SEQ ID NO: 7604 - DNA, 24 bp, Artificial sequence
  SiRNA target sequence
agtattgataagaaaaaggatgct

SEQ ID NO: 7605 - DNA, 24 bp, Artificial sequence
  SiRNA target sequence
gtattgataagaaaaaggatgcta

SEQ ID NO: 7606 - DNA, 24 bp, Artificial sequence
  SiRNA target sequence
tattgataagaaaaaggatgctat

SEQ ID NO: 7607 - DNA, 24 bp, Artificial sequence
  SiRNA target sequence
attgataagaaaaaggatgctata

SEQ ID NO: 7608 - DNA, 24 bp, Artificial sequence
  SiRNA target sequence
ttgataagaaaaaggatgctatag

SEQ ID NO: 7609 - DNA, 24 bp, Artificial sequence
  SiRNA target sequence
tgataagaaaaaggatgctataga

SEQ ID NO: 7610 - DNA, 24 bp, Artificial sequence
  SiRNA target sequence
gataagaaaaaggatgctatagaa

SEQ ID NO: 7611 - DNA, 24 bp, Artificial sequence
  SiRNA target sequence
ataagaaaaaggatgctatagaaa

SEQ ID NO: 7612 - DNA, 24 bp, Artificial sequence
  SiRNA target sequence
taagaaaaaggatgctatagaaat

SEQ ID NO: 7613 - DNA, 24 bp, Artificial sequence
  SiRNA target sequence
aagaaaaaggatgctatagaaatt

SEQ ID NO: 7614 - DNA, 24 bp, Artificial sequence
  SiRNA target sequence
agaaaaaggatgctatagaaattt

SEQ ID NO: 7615 - DNA, 24 bp, Artificial sequence
  SiRNA target sequence
gaaaaaggatgctatagaaatttt

SEQ ID NO: 7616 - DNA, 24 bp, Artificial sequence
  SiRNA target sequence
aaaaaggatgctatagaaatttta

SEQ ID NO: 7617 - DNA, 24 bp, Artificial sequence
  SiRNA target sequence
aaaaggatgctatagaaattttat

SEQ ID NO: 7618 - DNA, 24 bp, Artificial sequence
  SiRNA target sequence
aaaggatgctatagaaattttata

SEQ ID NO: 7619 - DNA, 24 bp, Artificial sequence
  SiRNA target sequence
aaggatgctatagaaattttatat

SEQ ID NO: 7620 - DNA, 24 bp, Artificial sequence
  SiRNA target sequence
aggatgctatagaaattttatata

SEQ ID NO: 7621 - DNA, 24 bp, Artificial sequence
  SiRNA target sequence
ggatgctatagaaattttatatag

SEQ ID NO: 7622 - DNA, 24 bp, Artificial sequence
  SiRNA target sequence
gatgctatagaaattttatataga

SEQ ID NO: 7623 - DNA, 24 bp, Artificial sequence
  SiRNA target sequence
atgctatagaaattttatatagaa

SEQ ID NO: 7624 - DNA, 24 bp, Artificial sequence
  SiRNA target sequence
tgctatagaaattttatatagaag

SEQ ID NO: 7625 - DNA, 24 bp, Artificial sequence
  SiRNA target sequence
gctatagaaattttatatagaagt

SEQ ID NO: 7626 - DNA, 24 bp, Artificial sequence
  SiRNA target sequence
ctatagaaattttatatagaagta

SEQ ID NO: 7627 - DNA, 24 bp, Artificial sequence
  SiRNA target sequence
tatagaaattttatatagaagtat

SEQ ID NO: 7628 - DNA, 24 bp, Artificial sequence
  SiRNA target sequence
atagaaattttatatagaagtata

SEQ ID NO: 7629 - DNA, 24 bp, Artificial sequence
  SiRNA target sequence
tagaaattttatatagaagtatat

SEQ ID NO: 7630 - DNA, 24 bp, Artificial sequence
  SiRNA target sequence
agaaattttatatagaagtatatc

SEQ ID NO: 7631 - DNA, 24 bp, Artificial sequence
  SiRNA target sequence
gaaattttatatagaagtatatca

SEQ ID NO: 7632 - DNA, 24 bp, Artificial sequence
  SiRNA target sequence
aaattttatatagaagtatatcag

SEQ ID NO: 7633 - DNA, 24 bp, Artificial sequence
  SiRNA target sequence
aattttatatagaagtatatcaga

SEQ ID NO: 7634 - DNA, 24 bp, Artificial sequence
  SiRNA target sequence
attttatatagaagtatatcagaa

SEQ ID NO: 7635 - DNA, 24 bp, Artificial sequence
  SiRNA target sequence
ttttatatagaagtatatcagaat

SEQ ID NO: 7636 - DNA, 24 bp, Artificial sequence
  SiRNA target sequence
tttatatagaagtatatcagaata

SEQ ID NO: 7637 - DNA, 24 bp, Artificial sequence
  SiRNA target sequence
ttatatagaagtatatcagaatat

SEQ ID NO: 7638 - DNA, 24 bp, Artificial sequence
  SiRNA target sequence
tatatagaagtatatcagaatatt

SEQ ID NO: 7639 - DNA, 24 bp, Artificial sequence
  SiRNA target sequence
atatagaagtatatcagaatattc

SEQ ID NO: 7640 - DNA, 24 bp, Artificial sequence
  SiRNA target sequence
tatagaagtatatcagaatattca

SEQ ID NO: 7641 - DNA, 24 bp, Artificial sequence
  SiRNA target sequence
atagaagtatatcagaatattcat

SEQ ID NO: 7642 - DNA, 24 bp, Artificial sequence
  SiRNA target sequence
tagaagtatatcagaatattcatc

SEQ ID NO: 7643 - DNA, 24 bp, Artificial sequence
  SiRNA target sequence
agaagtatatcagaatattcatct

SEQ ID NO: 7644 - DNA, 24 bp, Artificial sequence
  SiRNA target sequence
gaagtatatcagaatattcatctt

SEQ ID NO: 7645 - DNA, 24 bp, Artificial sequence
  SiRNA target sequence
aagtatatcagaatattcatctta

SEQ ID NO: 7646 - DNA, 24 bp, Artificial sequence
  SiRNA target sequence
agtatatcagaatattcatcttat

SEQ ID NO: 7647 - DNA, 24 bp, Artificial sequence
  SiRNA target sequence
gtatatcagaatattcatcttatt

SEQ ID NO: 7648 - DNA, 24 bp, Artificial sequence
  SiRNA target sequence
tatatcagaatattcatcttattt

SEQ ID NO: 7649 - DNA, 24 bp, Artificial sequence
  SiRNA target sequence
atatcagaatattcatcttatttt

SEQ ID NO: 7650 - DNA, 24 bp, Artificial sequence
  SiRNA target sequence
tatcagaatattcatcttatttta

SEQ ID NO: 7651 - DNA, 24 bp, Artificial sequence
  SiRNA target sequence
atcagaatattcatcttattttaa

SEQ ID NO: 7652 - DNA, 24 bp, Artificial sequence
  SiRNA target sequence
tcagaatattcatcttattttaaa

SEQ ID NO: 7653 - DNA, 24 bp, Artificial sequence
  SiRNA target sequence
cagaatattcatcttattttaaat

SEQ ID NO: 7654 - DNA, 24 bp, Artificial sequence
  SiRNA target sequence
agaatattcatcttattttaaatc

SEQ ID NO: 7655 - DNA, 24 bp, Artificial sequence
  SiRNA target sequence
gaatattcatcttattttaaatct

SEQ ID NO: 7656 - DNA, 24 bp, Artificial sequence
  SiRNA target sequence
aatattcatcttattttaaatctt

SEQ ID NO: 7657 - DNA, 24 bp, Artificial sequence
  SiRNA target sequence
atattcatcttattttaaatctta

SEQ ID NO: 7658 - DNA, 24 bp, Artificial sequence
  SiRNA target sequence
tattcatcttattttaaatcttat

SEQ ID NO: 7659 - DNA, 24 bp, Artificial sequence
  SiRNA target sequence
attcatcttattttaaatcttatt

SEQ ID NO: 7660 - DNA, 24 bp, Artificial sequence
  SiRNA target sequence
ttcatcttattttaaatcttattt

SEQ ID NO: 7661 - DNA, 24 bp, Artificial sequence
  SiRNA target sequence
tcatcttattttaaatcttatttg

SEQ ID NO: 7662 - DNA, 24 bp, Artificial sequence
  SiRNA target sequence
catcttattttaaatcttatttgt

SEQ ID NO: 7663 - DNA, 24 bp, Artificial sequence
  SiRNA target sequence
atcttattttaaatcttatttgta

SEQ ID NO: 7664 - DNA, 24 bp, Artificial sequence
  SiRNA target sequence
tcttattttaaatcttatttgtat

SEQ ID NO: 7665 - DNA, 24 bp, Artificial sequence
  SiRNA target sequence
cttattttaaatcttatttgtatt

SEQ ID NO: 7666 - DNA, 24 bp, Artificial sequence
  SiRNA target sequence
ttattttaaatcttatttgtattt

SEQ ID NO: 7667 - DNA, 24 bp, Artificial sequence
  SiRNA target sequence
tattttaaatcttatttgtattta

SEQ ID NO: 7668 - DNA, 24 bp, Artificial sequence
  SiRNA target sequence
attttaaatcttatttgtatttag

SEQ ID NO: 7669 - DNA, 24 bp, Artificial sequence
  SiRNA target sequence
ttttaaatcttatttgtatttagg

SEQ ID NO: 7670 - DNA, 24 bp, Artificial sequence
  SiRNA target sequence
tttaaatcttatttgtatttagga

SEQ ID NO: 7671 - DNA, 24 bp, Artificial sequence
  SiRNA target sequence
ttaaatcttatttgtatttaggaa

SEQ ID NO: 7672 - DNA, 24 bp, Artificial sequence
  SiRNA target sequence
taaatcttatttgtatttaggaaa

SEQ ID NO: 7673 - DNA, 24 bp, Artificial sequence
  SiRNA target sequence
aaatcttatttgtatttaggaaat

SEQ ID NO: 7674 - DNA, 24 bp, Artificial sequence
  SiRNA target sequence
aatcttatttgtatttaggaaata

SEQ ID NO: 7675 - DNA, 24 bp, Artificial sequence
  SiRNA target sequence
atcttatttgtatttaggaaatat

SEQ ID NO: 7676 - DNA, 24 bp, Artificial sequence
  SiRNA target sequence
tcttatttgtatttaggaaatatt

SEQ ID NO: 7677 - DNA, 24 bp, Artificial sequence
  SiRNA target sequence
cttatttgtatttaggaaatattt

SEQ ID NO: 7678 - DNA, 24 bp, Artificial sequence
  SiRNA target sequence
ttatttgtatttaggaaatatttt

SEQ ID NO: 7679 - DNA, 24 bp, Artificial sequence
  SiRNA target sequence
tatttgtatttaggaaatatttta

SEQ ID NO: 7680 - DNA, 24 bp, Artificial sequence
  SiRNA target sequence
atttgtatttaggaaatattttaa

SEQ ID NO: 7681 - DNA, 24 bp, Artificial sequence
  SiRNA target sequence
tttgtatttaggaaatattttaat

SEQ ID NO: 7682 - DNA, 24 bp, Artificial sequence
  SiRNA target sequence
ttgtatttaggaaatattttaata

SEQ ID NO: 7683 - DNA, 24 bp, Artificial sequence
  SiRNA target sequence
tgtatttaggaaatattttaataa

SEQ ID NO: 7684 - DNA, 24 bp, Artificial sequence
  SiRNA target sequence
gtatttaggaaatattttaataaa

SEQ ID NO: 7685 - DNA, 24 bp, Artificial sequence
  SiRNA target sequence
tatttaggaaatattttaataaat

SEQ ID NO: 7686 - DNA, 24 bp, Artificial sequence
  SiRNA target sequence
atttaggaaatattttaataaatg

SEQ ID NO: 7687 - DNA, 24 bp, Artificial sequence
  SiRNA target sequence
tttaggaaatattttaataaatga

SEQ ID NO: 7688 - DNA, 24 bp, Artificial sequence
  SiRNA target sequence
ttaggaaatattttaataaatgat

SEQ ID NO: 7689 - DNA, 24 bp, Artificial sequence
  SiRNA target sequence
taggaaatattttaataaatgatg

SEQ ID NO: 7690 - DNA, 24 bp, Artificial sequence
  SiRNA target sequence
aggaaatattttaataaatgatga

SEQ ID NO: 7691 - DNA, 24 bp, Artificial sequence
  SiRNA target sequence
ggaaatattttaataaatgatgac

SEQ ID NO: 7692 - DNA, 24 bp, Artificial sequence
  SiRNA target sequence
gaaatattttaataaatgatgact

SEQ ID NO: 7693 - DNA, 24 bp, Artificial sequence
  SiRNA target sequence
aaatattttaataaatgatgactt

SEQ ID NO: 7694 - DNA, 24 bp, Artificial sequence
  SiRNA target sequence
aatattttaataaatgatgactta

SEQ ID NO: 7695 - DNA, 24 bp, Artificial sequence
  SiRNA target sequence
atattttaataaatgatgacttaa

SEQ ID NO: 7696 - DNA, 24 bp, Artificial sequence
  SiRNA target sequence
tattttaataaatgatgacttaaa

SEQ ID NO: 7697 - DNA, 24 bp, Artificial sequence
  SiRNA target sequence
attttaataaatgatgacttaaat

SEQ ID NO: 7698 - DNA, 24 bp, Artificial sequence
  SiRNA target sequence
ttttaataaatgatgacttaaatg

SEQ ID NO: 7699 - DNA, 24 bp, Artificial sequence
  SiRNA target sequence
tttaataaatgatgacttaaatga

SEQ ID NO: 7700 - DNA, 24 bp, Artificial sequence
  SiRNA target sequence
ttaataaatgatgacttaaatgaa

SEQ ID NO: 7701 - DNA, 24 bp, Artificial sequence
  SiRNA target sequence
taataaatgatgacttaaatgaat

SEQ ID NO: 7702 - DNA, 24 bp, Artificial sequence
  SiRNA target sequence
aataaatgatgacttaaatgaatg

SEQ ID NO: 7703 - DNA, 24 bp, Artificial sequence
  SiRNA target sequence
ataaatgatgacttaaatgaatgc

SEQ ID NO: 7704 - DNA, 24 bp, Artificial sequence
  SiRNA target sequence
taaatgatgacttaaatgaatgca

SEQ ID NO: 7705 - DNA, 24 bp, Artificial sequence
  SiRNA target sequence
aaatgatgacttaaatgaatgcag

SEQ ID NO: 7706 - DNA, 24 bp, Artificial sequence
  SiRNA target sequence
aatgatgacttaaatgaatgcagg

SEQ ID NO: 7707 - DNA, 24 bp, Artificial sequence
  SiRNA target sequence
atgatgacttaaatgaatgcagga

SEQ ID NO: 7708 - DNA, 24 bp, Artificial sequence
  SiRNA target sequence
tgatgacttaaatgaatgcaggaa

SEQ ID NO: 7709 - DNA, 24 bp, Artificial sequence
  SiRNA target sequence
gatgacttaaatgaatgcaggaaa

SEQ ID NO: 7710 - DNA, 24 bp, Artificial sequence
  SiRNA target sequence
atgacttaaatgaatgcaggaaat

SEQ ID NO: 7711 - DNA, 24 bp, Artificial sequence
  SiRNA target sequence
tgacttaaatgaatgcaggaaatt

SEQ ID NO: 7712 - DNA, 24 bp, Artificial sequence
  SiRNA target sequence
gacttaaatgaatgcaggaaattg

SEQ ID NO: 7713 - DNA, 24 bp, Artificial sequence
  SiRNA target sequence
acttaaatgaatgcaggaaattgt

SEQ ID NO: 7714 - DNA, 24 bp, Artificial sequence
  SiRNA target sequence
cttaaatgaatgcaggaaattgtt

SEQ ID NO: 7715 - DNA, 24 bp, Artificial sequence
  SiRNA target sequence
ttaaatgaatgcaggaaattgttt

SEQ ID NO: 7716 - DNA, 24 bp, Artificial sequence
  SiRNA target sequence
taaatgaatgcaggaaattgttta

SEQ ID NO: 7717 - DNA, 24 bp, Artificial sequence
  SiRNA target sequence
aaatgaatgcaggaaattgtttaa

SEQ ID NO: 7718 - DNA, 24 bp, Artificial sequence
  SiRNA target sequence
aatgaatgcaggaaattgtttaat

SEQ ID NO: 7719 - DNA, 24 bp, Artificial sequence
  SiRNA target sequence
atgaatgcaggaaattgtttaata

SEQ ID NO: 7720 - DNA, 24 bp, Artificial sequence
  SiRNA target sequence
tgaatgcaggaaattgtttaatac

SEQ ID NO: 7721 - DNA, 24 bp, Artificial sequence
  SiRNA target sequence
gaatgcaggaaattgtttaataca

SEQ ID NO: 7722 - DNA, 24 bp, Artificial sequence
  SiRNA target sequence
aatgcaggaaattgtttaatacat

SEQ ID NO: 7723 - DNA, 24 bp, Artificial sequence
  SiRNA target sequence
atgcaggaaattgtttaatacatc

SEQ ID NO: 7724 - DNA, 24 bp, Artificial sequence
  SiRNA target sequence
tgcaggaaattgtttaatacatca

SEQ ID NO: 7725 - DNA, 24 bp, Artificial sequence
  SiRNA target sequence
gcaggaaattgtttaatacatcac

SEQ ID NO: 7726 - DNA, 24 bp, Artificial sequence
  SiRNA target sequence
caggaaattgtttaatacatcact

SEQ ID NO: 7727 - DNA, 24 bp, Artificial sequence
  SiRNA target sequence
aggaaattgtttaatacatcactt

SEQ ID NO: 7728 - DNA, 24 bp, Artificial sequence
  SiRNA target sequence
ggaaattgtttaatacatcacttc

SEQ ID NO: 7729 - DNA, 24 bp, Artificial sequence
  SiRNA target sequence
gaaattgtttaatacatcacttca

SEQ ID NO: 7730 - DNA, 24 bp, Artificial sequence
  SiRNA target sequence
aaattgtttaatacatcacttcaa

SEQ ID NO: 7731 - DNA, 24 bp, Artificial sequence
  SiRNA target sequence
aattgtttaatacatcacttcaat

SEQ ID NO: 7732 - DNA, 24 bp, Artificial sequence
  SiRNA target sequence
attgtttaatacatcacttcaata

SEQ ID NO: 7733 - DNA, 24 bp, Artificial sequence
  SiRNA target sequence
ttgtttaatacatcacttcaatat

SEQ ID NO: 7734 - DNA, 24 bp, Artificial sequence
  SiRNA target sequence
tgtttaatacatcacttcaatatt

SEQ ID NO: 7735 - DNA, 24 bp, Artificial sequence
  SiRNA target sequence
gtttaatacatcacttcaatattg

SEQ ID NO: 7736 - DNA, 24 bp, Artificial sequence
  SiRNA target sequence
tttaatacatcacttcaatattgt

SEQ ID NO: 7737 - DNA, 24 bp, Artificial sequence
  SiRNA target sequence
ttaatacatcacttcaatattgtt

SEQ ID NO: 7738 - DNA, 24 bp, Artificial sequence
  SiRNA target sequence
taatacatcacttcaatattgttg

SEQ ID NO: 7739 - DNA, 24 bp, Artificial sequence
  SiRNA target sequence
aatacatcacttcaatattgttgt

SEQ ID NO: 7740 - DNA, 24 bp, Artificial sequence
  SiRNA target sequence
atacatcacttcaatattgttgta

SEQ ID NO: 7741 - DNA, 24 bp, Artificial sequence
  SiRNA target sequence
tacatcacttcaatattgttgtaa

SEQ ID NO: 7742 - DNA, 24 bp, Artificial sequence
  SiRNA target sequence
acatcacttcaatattgttgtaat

SEQ ID NO: 7743 - DNA, 24 bp, Artificial sequence
  SiRNA target sequence
catcacttcaatattgttgtaatt

SEQ ID NO: 7744 - DNA, 24 bp, Artificial sequence
  SiRNA target sequence
atcacttcaatattgttgtaattc

SEQ ID NO: 7745 - DNA, 24 bp, Artificial sequence
  SiRNA target sequence
tcacttcaatattgttgtaattct

SEQ ID NO: 7746 - DNA, 24 bp, Artificial sequence
  SiRNA target sequence
cacttcaatattgttgtaattctg

SEQ ID NO: 7747 - DNA, 24 bp, Artificial sequence
  SiRNA target sequence
acttcaatattgttgtaattctga

SEQ ID NO: 7748 - DNA, 24 bp, Artificial sequence
  SiRNA target sequence
cttcaatattgttgtaattctgat

SEQ ID NO: 7749 - DNA, 24 bp, Artificial sequence
  SiRNA target sequence
ttcaatattgttgtaattctgatg

SEQ ID NO: 7750 - DNA, 24 bp, Artificial sequence
  SiRNA target sequence
tcaatattgttgtaattctgatga

SEQ ID NO: 7751 - DNA, 24 bp, Artificial sequence
  SiRNA target sequence
caatattgttgtaattctgatgag

SEQ ID NO: 7752 - DNA, 24 bp, Artificial sequence
  SiRNA target sequence
aatattgttgtaattctgatgagg

SEQ ID NO: 7753 - DNA, 24 bp, Artificial sequence
  SiRNA target sequence
atattgttgtaattctgatgaggt

SEQ ID NO: 7754 - DNA, 24 bp, Artificial sequence
  SiRNA target sequence
tattgttgtaattctgatgaggtt

SEQ ID NO: 7755 - DNA, 24 bp, Artificial sequence
  SiRNA target sequence
attgttgtaattctgatgaggttt

SEQ ID NO: 7756 - DNA, 24 bp, Artificial sequence
  SiRNA target sequence
ttgttgtaattctgatgaggtttt

SEQ ID NO: 7757 - DNA, 24 bp, Artificial sequence
  SiRNA target sequence
tgttgtaattctgatgaggttttt

SEQ ID NO: 7758 - DNA, 24 bp, Artificial sequence
  SiRNA target sequence
gttgtaattctgatgaggttttta

SEQ ID NO: 7759 - DNA, 24 bp, Artificial sequence
  SiRNA target sequence
ttgtaattctgatgaggtttttat

SEQ ID NO: 7760 - DNA, 24 bp, Artificial sequence
  SiRNA target sequence
tgtaattctgatgaggtttttatt

SEQ ID NO: 7761 - DNA, 24 bp, Artificial sequence
  SiRNA target sequence
gtaattctgatgaggtttttattg

SEQ ID NO: 7762 - DNA, 24 bp, Artificial sequence
  SiRNA target sequence
taattctgatgaggtttttattgt

SEQ ID NO: 7763 - DNA, 24 bp, Artificial sequence
  SiRNA target sequence
aattctgatgaggtttttattgtt

SEQ ID NO: 7764 - DNA, 24 bp, Artificial sequence
  SiRNA target sequence
attctgatgaggtttttattgtta

SEQ ID NO: 7765 - DNA, 24 bp, Artificial sequence
  SiRNA target sequence
ttctgatgaggtttttattgttaa

SEQ ID NO: 7766 - DNA, 24 bp, Artificial sequence
  SiRNA target sequence
tctgatgaggtttttattgttaag

SEQ ID NO: 7767 - DNA, 24 bp, Artificial sequence
  SiRNA target sequence
ctgatgaggtttttattgttaagc

SEQ ID NO: 7768 - DNA, 24 bp, Artificial sequence
  SiRNA target sequence
tgatgaggtttttattgttaagca

SEQ ID NO: 7769 - DNA, 24 bp, Artificial sequence
  SiRNA target sequence
gatgaggtttttattgttaagcag

SEQ ID NO: 7770 - DNA, 24 bp, Artificial sequence
  SiRNA target sequence
atgaggtttttattgttaagcagt

SEQ ID NO: 7771 - DNA, 24 bp, Artificial sequence
  SiRNA target sequence
tgaggtttttattgttaagcagtc

SEQ ID NO: 7772 - DNA, 24 bp, Artificial sequence
  SiRNA target sequence
gaggtttttattgttaagcagtca

SEQ ID NO: 7773 - DNA, 24 bp, Artificial sequence
  SiRNA target sequence
aggtttttattgttaagcagtcac

SEQ ID NO: 7774 - DNA, 24 bp, Artificial sequence
  SiRNA target sequence
ggtttttattgttaagcagtcact

SEQ ID NO: 7775 - DNA, 24 bp, Artificial sequence
  SiRNA target sequence
gtttttattgttaagcagtcactt

SEQ ID NO: 7776 - DNA, 24 bp, Artificial sequence
  SiRNA target sequence
tttttattgttaagcagtcactta

SEQ ID NO: 7777 - DNA, 24 bp, Artificial sequence
  SiRNA target sequence
ttttattgttaagcagtcacttat

SEQ ID NO: 7778 - DNA, 24 bp, Artificial sequence
  SiRNA target sequence
tttattgttaagcagtcacttatt

SEQ ID NO: 7779 - DNA, 24 bp, Artificial sequence
  SiRNA target sequence
ttattgttaagcagtcacttattt

SEQ ID NO: 7780 - DNA, 24 bp, Artificial sequence
  SiRNA target sequence
tattgttaagcagtcacttatttt

SEQ ID NO: 7781 - DNA, 24 bp, Artificial sequence
  SiRNA target sequence
attgttaagcagtcacttatttta

SEQ ID NO: 7782 - DNA, 24 bp, Artificial sequence
  SiRNA target sequence
ttgttaagcagtcacttattttaa

SEQ ID NO: 7783 - DNA, 24 bp, Artificial sequence
  SiRNA target sequence
tgttaagcagtcacttattttaat

SEQ ID NO: 7784 - DNA, 24 bp, Artificial sequence
  SiRNA target sequence
gttaagcagtcacttattttaata

SEQ ID NO: 7785 - DNA, 24 bp, Artificial sequence
  SiRNA target sequence
ttaagcagtcacttattttaatag

SEQ ID NO: 7786 - DNA, 24 bp, Artificial sequence
  SiRNA target sequence
taagcagtcacttattttaataga

SEQ ID NO: 7787 - DNA, 24 bp, Artificial sequence
  SiRNA target sequence
aagcagtcacttattttaatagaa

SEQ ID NO: 7788 - DNA, 24 bp, Artificial sequence
  SiRNA target sequence
agcagtcacttattttaatagaag

SEQ ID NO: 7789 - DNA, 24 bp, Artificial sequence
  SiRNA target sequence
gcagtcacttattttaatagaagt

SEQ ID NO: 7790 - DNA, 24 bp, Artificial sequence
  SiRNA target sequence
cagtcacttattttaatagaagta

SEQ ID NO: 7791 - DNA, 24 bp, Artificial sequence
  SiRNA target sequence
agtcacttattttaatagaagtac

SEQ ID NO: 7792 - DNA, 24 bp, Artificial sequence
  SiRNA target sequence
gtcacttattttaatagaagtaca

SEQ ID NO: 7793 - DNA, 24 bp, Artificial sequence
  SiRNA target sequence
tcacttattttaatagaagtacat

SEQ ID NO: 7794 - DNA, 24 bp, Artificial sequence
  SiRNA target sequence
cacttattttaatagaagtacatg

SEQ ID NO: 7795 - DNA, 24 bp, Artificial sequence
  SiRNA target sequence
acttattttaatagaagtacatga

SEQ ID NO: 7796 - DNA, 24 bp, Artificial sequence
  SiRNA target sequence
cttattttaatagaagtacatgaa

SEQ ID NO: 7797 - DNA, 24 bp, Artificial sequence
  SiRNA target sequence
ttattttaatagaagtacatgaat

SEQ ID NO: 7798 - DNA, 24 bp, Artificial sequence
  SiRNA target sequence
tattttaatagaagtacatgaata

SEQ ID NO: 7799 - DNA, 24 bp, Artificial sequence
  SiRNA target sequence
attttaatagaagtacatgaatac

SEQ ID NO: 7800 - DNA, 24 bp, Artificial sequence
  SiRNA target sequence
ttttaatagaagtacatgaataca

SEQ ID NO: 7801 - DNA, 24 bp, Artificial sequence
  SiRNA target sequence
tttaatagaagtacatgaatacat

SEQ ID NO: 7802 - DNA, 24 bp, Artificial sequence
  SiRNA target sequence
ttaatagaagtacatgaatacatc

SEQ ID NO: 7803 - DNA, 24 bp, Artificial sequence
  SiRNA target sequence
taatagaagtacatgaatacatca

SEQ ID NO: 7804 - DNA, 24 bp, Artificial sequence
  SiRNA target sequence
aatagaagtacatgaatacatcaa

SEQ ID NO: 7805 - DNA, 24 bp, Artificial sequence
  SiRNA target sequence
atagaagtacatgaatacatcaaa

SEQ ID NO: 7806 - DNA, 24 bp, Artificial sequence
  SiRNA target sequence
tagaagtacatgaatacatcaaag

SEQ ID NO: 7807 - DNA, 24 bp, Artificial sequence
  SiRNA target sequence
agaagtacatgaatacatcaaaga

SEQ ID NO: 7808 - DNA, 24 bp, Artificial sequence
  SiRNA target sequence
gaagtacatgaatacatcaaagaa

SEQ ID NO: 7809 - DNA, 24 bp, Artificial sequence
  SiRNA target sequence
aagtacatgaatacatcaaagaaa

SEQ ID NO: 7810 - DNA, 24 bp, Artificial sequence
  SiRNA target sequence
agtacatgaatacatcaaagaaaa

SEQ ID NO: 7811 - DNA, 24 bp, Artificial sequence
  SiRNA target sequence
gtacatgaatacatcaaagaaaat

SEQ ID NO: 7812 - DNA, 24 bp, Artificial sequence
  SiRNA target sequence
tacatgaatacatcaaagaaaata

SEQ ID NO: 7813 - DNA, 24 bp, Artificial sequence
  SiRNA target sequence
acatgaatacatcaaagaaaataa

SEQ ID NO: 7814 - DNA, 24 bp, Artificial sequence
  SiRNA target sequence
catgaatacatcaaagaaaataaa

SEQ ID NO: 7815 - DNA, 24 bp, Artificial sequence
  SiRNA target sequence
atgaatacatcaaagaaaataaaa

SEQ ID NO: 7816 - DNA, 24 bp, Artificial sequence
  SiRNA target sequence
tgaatacatcaaagaaaataaaat

SEQ ID NO: 7817 - DNA, 24 bp, Artificial sequence
  SiRNA target sequence
gaatacatcaaagaaaataaaata

SEQ ID NO: 7818 - DNA, 24 bp, Artificial sequence
  SiRNA target sequence
aatacatcaaagaaaataaaatat

SEQ ID NO: 7819 - DNA, 24 bp, Artificial sequence
  SiRNA target sequence
atacatcaaagaaaataaaatata

SEQ ID NO: 7820 - DNA, 24 bp, Artificial sequence
  SiRNA target sequence
tacatcaaagaaaataaaatataa

SEQ ID NO: 7821 - DNA, 25 bp, Artificial sequence
  SiRNA target sequence
atgaaacgaaaaacagaaatattta

SEQ ID NO: 7822 - DNA, 25 bp, Artificial sequence
  SiRNA target sequence
tgaaacgaaaaacagaaatatttat

SEQ ID NO: 7823 - DNA, 25 bp, Artificial sequence
  SiRNA target sequence
gaaacgaaaaacagaaatatttatt

SEQ ID NO: 7824 - DNA, 25 bp, Artificial sequence
  SiRNA target sequence
aaacgaaaaacagaaatatttattg

SEQ ID NO: 7825 - DNA, 25 bp, Artificial sequence
  SiRNA target sequence
aacgaaaaacagaaatatttattgc

SEQ ID NO: 7826 - DNA, 25 bp, Artificial sequence
  SiRNA target sequence
acgaaaaacagaaatatttattgct

SEQ ID NO: 7827 - DNA, 25 bp, Artificial sequence
  SiRNA target sequence
cgaaaaacagaaatatttattgcta

SEQ ID NO: 7828 - DNA, 25 bp, Artificial sequence
  SiRNA target sequence
gaaaaacagaaatatttattgctat

SEQ ID NO: 7829 - DNA, 25 bp, Artificial sequence
  SiRNA target sequence
aaaaacagaaatatttattgctatt

SEQ ID NO: 7830 - DNA, 25 bp, Artificial sequence
  SiRNA target sequence
aaaacagaaatatttattgctatta

SEQ ID NO: 7831 - DNA, 25 bp, Artificial sequence
  SiRNA target sequence
aaacagaaatatttattgctattac

SEQ ID NO: 7832 - DNA, 25 bp, Artificial sequence
  SiRNA target sequence
aacagaaatatttattgctattaca

SEQ ID NO: 7833 - DNA, 25 bp, Artificial sequence
  SiRNA target sequence
acagaaatatttattgctattacag

SEQ ID NO: 7834 - DNA, 25 bp, Artificial sequence
  SiRNA target sequence
cagaaatatttattgctattacagt

SEQ ID NO: 7835 - DNA, 25 bp, Artificial sequence
  SiRNA target sequence
agaaatatttattgctattacagta

SEQ ID NO: 7836 - DNA, 25 bp, Artificial sequence
  SiRNA target sequence
gaaatatttattgctattacagtag

SEQ ID NO: 7837 - DNA, 25 bp, Artificial sequence
  SiRNA target sequence
aaatatttattgctattacagtagt

SEQ ID NO: 7838 - DNA, 25 bp, Artificial sequence
  SiRNA target sequence
aatatttattgctattacagtagtc

SEQ ID NO: 7839 - DNA, 25 bp, Artificial sequence
  SiRNA target sequence
atatttattgctattacagtagtca

SEQ ID NO: 7840 - DNA, 25 bp, Artificial sequence
  SiRNA target sequence
tatttattgctattacagtagtcac

SEQ ID NO: 7841 - DNA, 25 bp, Artificial sequence
  SiRNA target sequence
atttattgctattacagtagtcact

SEQ ID NO: 7842 - DNA, 25 bp, Artificial sequence
  SiRNA target sequence
tttattgctattacagtagtcactg

SEQ ID NO: 7843 - DNA, 25 bp, Artificial sequence
  SiRNA target sequence
ttattgctattacagtagtcactgc

SEQ ID NO: 7844 - DNA, 25 bp, Artificial sequence
  SiRNA target sequence
tattgctattacagtagtcactgca

SEQ ID NO: 7845 - DNA, 25 bp, Artificial sequence
  SiRNA target sequence
attgctattacagtagtcactgcag

SEQ ID NO: 7846 - DNA, 25 bp, Artificial sequence
  SiRNA target sequence
ttgctattacagtagtcactgcagt

SEQ ID NO: 7847 - DNA, 25 bp, Artificial sequence
  SiRNA target sequence
tgctattacagtagtcactgcagtg

SEQ ID NO: 7848 - DNA, 25 bp, Artificial sequence
  SiRNA target sequence
gctattacagtagtcactgcagtga

SEQ ID NO: 7849 - DNA, 25 bp, Artificial sequence
  SiRNA target sequence
ctattacagtagtcactgcagtgac

SEQ ID NO: 7850 - DNA, 25 bp, Artificial sequence
  SiRNA target sequence
tattacagtagtcactgcagtgaca

SEQ ID NO: 7851 - DNA, 25 bp, Artificial sequence
  SiRNA target sequence
attacagtagtcactgcagtgacat

SEQ ID NO: 7852 - DNA, 25 bp, Artificial sequence
  SiRNA target sequence
ttacagtagtcactgcagtgacatg

SEQ ID NO: 7853 - DNA, 25 bp, Artificial sequence
  SiRNA target sequence
tacagtagtcactgcagtgacatgt

SEQ ID NO: 7854 - DNA, 25 bp, Artificial sequence
  SiRNA target sequence
acagtagtcactgcagtgacatgtt

SEQ ID NO: 7855 - DNA, 25 bp, Artificial sequence
  SiRNA target sequence
cagtagtcactgcagtgacatgtta

SEQ ID NO: 7856 - DNA, 25 bp, Artificial sequence
  SiRNA target sequence
agtagtcactgcagtgacatgttac

SEQ ID NO: 7857 - DNA, 25 bp, Artificial sequence
  SiRNA target sequence
gtagtcactgcagtgacatgttact

SEQ ID NO: 7858 - DNA, 25 bp, Artificial sequence
  SiRNA target sequence
tagtcactgcagtgacatgttactt

SEQ ID NO: 7859 - DNA, 25 bp, Artificial sequence
  SiRNA target sequence
agtcactgcagtgacatgttactta

SEQ ID NO: 7860 - DNA, 25 bp, Artificial sequence
  SiRNA target sequence
gtcactgcagtgacatgttacttat

SEQ ID NO: 7861 - DNA, 25 bp, Artificial sequence
  SiRNA target sequence
tcactgcagtgacatgttacttatt

SEQ ID NO: 7862 - DNA, 25 bp, Artificial sequence
  SiRNA target sequence
cactgcagtgacatgttacttattt

SEQ ID NO: 7863 - DNA, 25 bp, Artificial sequence
  SiRNA target sequence
actgcagtgacatgttacttattta

SEQ ID NO: 7864 - DNA, 25 bp, Artificial sequence
  SiRNA target sequence
ctgcagtgacatgttacttatttaa

SEQ ID NO: 7865 - DNA, 25 bp, Artificial sequence
  SiRNA target sequence
tgcagtgacatgttacttatttaaa

SEQ ID NO: 7866 - DNA, 25 bp, Artificial sequence
  SiRNA target sequence
gcagtgacatgttacttatttaaaa

SEQ ID NO: 7867 - DNA, 25 bp, Artificial sequence
  SiRNA target sequence
cagtgacatgttacttatttaaaaa

SEQ ID NO: 7868 - DNA, 25 bp, Artificial sequence
  SiRNA target sequence
agtgacatgttacttatttaaaaaa

SEQ ID NO: 7869 - DNA, 25 bp, Artificial sequence
  SiRNA target sequence
gtgacatgttacttatttaaaaaaa

SEQ ID NO: 7870 - DNA, 25 bp, Artificial sequence
  SiRNA target sequence
tgacatgttacttatttaaaaaaat

SEQ ID NO: 7871 - DNA, 25 bp, Artificial sequence
  SiRNA target sequence
gacatgttacttatttaaaaaaata

SEQ ID NO: 7872 - DNA, 25 bp, Artificial sequence
  SiRNA target sequence
acatgttacttatttaaaaaaataa

SEQ ID NO: 7873 - DNA, 25 bp, Artificial sequence
  SiRNA target sequence
catgttacttatttaaaaaaataat

SEQ ID NO: 7874 - DNA, 25 bp, Artificial sequence
  SiRNA target sequence
atgttacttatttaaaaaaataata

SEQ ID NO: 7875 - DNA, 25 bp, Artificial sequence
  SiRNA target sequence
tgttacttatttaaaaaaataataa

SEQ ID NO: 7876 - DNA, 25 bp, Artificial sequence
  SiRNA target sequence
gttacttatttaaaaaaataataaa

SEQ ID NO: 7877 - DNA, 25 bp, Artificial sequence
  SiRNA target sequence
ttacttatttaaaaaaataataaat

SEQ ID NO: 7878 - DNA, 25 bp, Artificial sequence
  SiRNA target sequence
tacttatttaaaaaaataataaata

SEQ ID NO: 7879 - DNA, 25 bp, Artificial sequence
  SiRNA target sequence
acttatttaaaaaaataataaatag

SEQ ID NO: 7880 - DNA, 25 bp, Artificial sequence
  SiRNA target sequence
cttatttaaaaaaataataaataga

SEQ ID NO: 7881 - DNA, 25 bp, Artificial sequence
  SiRNA target sequence
ttatttaaaaaaataataaatagac

SEQ ID NO: 7882 - DNA, 25 bp, Artificial sequence
  SiRNA target sequence
tatttaaaaaaataataaatagaca

SEQ ID NO: 7883 - DNA, 25 bp, Artificial sequence
  SiRNA target sequence
atttaaaaaaataataaatagacaa

SEQ ID NO: 7884 - DNA, 25 bp, Artificial sequence
  SiRNA target sequence
tttaaaaaaataataaatagacaaa

SEQ ID NO: 7885 - DNA, 25 bp, Artificial sequence
  SiRNA target sequence
ttaaaaaaataataaatagacaaaa

SEQ ID NO: 7886 - DNA, 25 bp, Artificial sequence
  SiRNA target sequence
taaaaaaataataaatagacaaaag

SEQ ID NO: 7887 - DNA, 25 bp, Artificial sequence
  SiRNA target sequence
aaaaaaataataaatagacaaaagt

SEQ ID NO: 7888 - DNA, 25 bp, Artificial sequence
  SiRNA target sequence
aaaaaataataaatagacaaaagtc

SEQ ID NO: 7889 - DNA, 25 bp, Artificial sequence
  SiRNA target sequence
aaaaataataaatagacaaaagtct

SEQ ID NO: 7890 - DNA, 25 bp, Artificial sequence
  SiRNA target sequence
aaaataataaatagacaaaagtctg

SEQ ID NO: 7891 - DNA, 25 bp, Artificial sequence
  SiRNA target sequence
aaataataaatagacaaaagtctga

SEQ ID NO: 7892 - DNA, 25 bp, Artificial sequence
  SiRNA target sequence
aataataaatagacaaaagtctgat

SEQ ID NO: 7893 - DNA, 25 bp, Artificial sequence
  SiRNA target sequence
ataataaatagacaaaagtctgatt

SEQ ID NO: 7894 - DNA, 25 bp, Artificial sequence
  SiRNA target sequence
taataaatagacaaaagtctgatta

SEQ ID NO: 7895 - DNA, 25 bp, Artificial sequence
  SiRNA target sequence
aataaatagacaaaagtctgattat

SEQ ID NO: 7896 - DNA, 25 bp, Artificial sequence
  SiRNA target sequence
ataaatagacaaaagtctgattata

SEQ ID NO: 7897 - DNA, 25 bp, Artificial sequence
  SiRNA target sequence
taaatagacaaaagtctgattatac

SEQ ID NO: 7898 - DNA, 25 bp, Artificial sequence
  SiRNA target sequence
aaatagacaaaagtctgattataca

SEQ ID NO: 7899 - DNA, 25 bp, Artificial sequence
  SiRNA target sequence
aatagacaaaagtctgattatacat

SEQ ID NO: 7900 - DNA, 25 bp, Artificial sequence
  SiRNA target sequence
atagacaaaagtctgattatacatc

SEQ ID NO: 7901 - DNA, 25 bp, Artificial sequence
  SiRNA target sequence
tagacaaaagtctgattatacatca

SEQ ID NO: 7902 - DNA, 25 bp, Artificial sequence
  SiRNA target sequence
agacaaaagtctgattatacatcaa

SEQ ID NO: 7903 - DNA, 25 bp, Artificial sequence
  SiRNA target sequence
gacaaaagtctgattatacatcaat

SEQ ID NO: 7904 - DNA, 25 bp, Artificial sequence
  SiRNA target sequence
acaaaagtctgattatacatcaata

SEQ ID NO: 7905 - DNA, 25 bp, Artificial sequence
  SiRNA target sequence
caaaagtctgattatacatcaataa

SEQ ID NO: 7906 - DNA, 25 bp, Artificial sequence
  SiRNA target sequence
aaaagtctgattatacatcaataaa

SEQ ID NO: 7907 - DNA, 25 bp, Artificial sequence
  SiRNA target sequence
aaagtctgattatacatcaataaaa

SEQ ID NO: 7908 - DNA, 25 bp, Artificial sequence
  SiRNA target sequence
aagtctgattatacatcaataaaac

SEQ ID NO: 7909 - DNA, 25 bp, Artificial sequence
  SiRNA target sequence
agtctgattatacatcaataaaaca

SEQ ID NO: 7910 - DNA, 25 bp, Artificial sequence
  SiRNA target sequence
gtctgattatacatcaataaaacag

SEQ ID NO: 7911 - DNA, 25 bp, Artificial sequence
  SiRNA target sequence
tctgattatacatcaataaaacagg

SEQ ID NO: 7912 - DNA, 25 bp, Artificial sequence
  SiRNA target sequence
ctgattatacatcaataaaacagga

SEQ ID NO: 7913 - DNA, 25 bp, Artificial sequence
  SiRNA target sequence
tgattatacatcaataaaacaggaa

SEQ ID NO: 7914 - DNA, 25 bp, Artificial sequence
  SiRNA target sequence
gattatacatcaataaaacaggaag

SEQ ID NO: 7915 - DNA, 25 bp, Artificial sequence
  SiRNA target sequence
attatacatcaataaaacaggaagc

SEQ ID NO: 7916 - DNA, 25 bp, Artificial sequence
  SiRNA target sequence
ttatacatcaataaaacaggaagca

SEQ ID NO: 7917 - DNA, 25 bp, Artificial sequence
  SiRNA target sequence
tatacatcaataaaacaggaagcag

SEQ ID NO: 7918 - DNA, 25 bp, Artificial sequence
  SiRNA target sequence
atacatcaataaaacaggaagcaga

SEQ ID NO: 7919 - DNA, 25 bp, Artificial sequence
  SiRNA target sequence
tacatcaataaaacaggaagcagat

SEQ ID NO: 7920 - DNA, 25 bp, Artificial sequence
  SiRNA target sequence
acatcaataaaacaggaagcagata

SEQ ID NO: 7921 - DNA, 25 bp, Artificial sequence
  SiRNA target sequence
catcaataaaacaggaagcagataa

SEQ ID NO: 7922 - DNA, 25 bp, Artificial sequence
  SiRNA target sequence
atcaataaaacaggaagcagataaa

SEQ ID NO: 7923 - DNA, 25 bp, Artificial sequence
  SiRNA target sequence
tcaataaaacaggaagcagataaat

SEQ ID NO: 7924 - DNA, 25 bp, Artificial sequence
  SiRNA target sequence
caataaaacaggaagcagataaata

SEQ ID NO: 7925 - DNA, 25 bp, Artificial sequence
  SiRNA target sequence
aataaaacaggaagcagataaatat

SEQ ID NO: 7926 - DNA, 25 bp, Artificial sequence
  SiRNA target sequence
ataaaacaggaagcagataaatatt

SEQ ID NO: 7927 - DNA, 25 bp, Artificial sequence
  SiRNA target sequence
taaaacaggaagcagataaatattt

SEQ ID NO: 7928 - DNA, 25 bp, Artificial sequence
  SiRNA target sequence
aaaacaggaagcagataaatatttt

SEQ ID NO: 7929 - DNA, 25 bp, Artificial sequence
  SiRNA target sequence
aaacaggaagcagataaatatttta

SEQ ID NO: 7930 - DNA, 25 bp, Artificial sequence
  SiRNA target sequence
aacaggaagcagataaatattttat

SEQ ID NO: 7931 - DNA, 25 bp, Artificial sequence
  SiRNA target sequence
acaggaagcagataaatattttata

SEQ ID NO: 7932 - DNA, 25 bp, Artificial sequence
  SiRNA target sequence
caggaagcagataaatattttatac

SEQ ID NO: 7933 - DNA, 25 bp, Artificial sequence
  SiRNA target sequence
aggaagcagataaatattttataca

SEQ ID NO: 7934 - DNA, 25 bp, Artificial sequence
  SiRNA target sequence
ggaagcagataaatattttatacaa

SEQ ID NO: 7935 - DNA, 25 bp, Artificial sequence
  SiRNA target sequence
gaagcagataaatattttatacaag

SEQ ID NO: 7936 - DNA, 25 bp, Artificial sequence
  SiRNA target sequence
aagcagataaatattttatacaaga

SEQ ID NO: 7937 - DNA, 25 bp, Artificial sequence
  SiRNA target sequence
agcagataaatattttatacaagaa

SEQ ID NO: 7938 - DNA, 25 bp, Artificial sequence
  SiRNA target sequence
gcagataaatattttatacaagaag

SEQ ID NO: 7939 - DNA, 25 bp, Artificial sequence
  SiRNA target sequence
cagataaatattttatacaagaaga

SEQ ID NO: 7940 - DNA, 25 bp, Artificial sequence
  SiRNA target sequence
agataaatattttatacaagaagat

SEQ ID NO: 7941 - DNA, 25 bp, Artificial sequence
  SiRNA target sequence
gataaatattttatacaagaagatt

SEQ ID NO: 7942 - DNA, 25 bp, Artificial sequence
  SiRNA target sequence
ataaatattttatacaagaagatta

SEQ ID NO: 7943 - DNA, 25 bp, Artificial sequence
  SiRNA target sequence
taaatattttatacaagaagattat

SEQ ID NO: 7944 - DNA, 25 bp, Artificial sequence
  SiRNA target sequence
aaatattttatacaagaagattata

SEQ ID NO: 7945 - DNA, 25 bp, Artificial sequence
  SiRNA target sequence
aatattttatacaagaagattataa

SEQ ID NO: 7946 - DNA, 25 bp, Artificial sequence
  SiRNA target sequence
atattttatacaagaagattataaa

SEQ ID NO: 7947 - DNA, 25 bp, Artificial sequence
  SiRNA target sequence
tattttatacaagaagattataaaa

SEQ ID NO: 7948 - DNA, 25 bp, Artificial sequence
  SiRNA target sequence
attttatacaagaagattataaaaa

SEQ ID NO: 7949 - DNA, 25 bp, Artificial sequence
  SiRNA target sequence
ttttatacaagaagattataaaaat

SEQ ID NO: 7950 - DNA, 25 bp, Artificial sequence
  SiRNA target sequence
tttatacaagaagattataaaaatg

SEQ ID NO: 7951 - DNA, 25 bp, Artificial sequence
  SiRNA target sequence
ttatacaagaagattataaaaatgc

SEQ ID NO: 7952 - DNA, 25 bp, Artificial sequence
  SiRNA target sequence
tatacaagaagattataaaaatgct

SEQ ID NO: 7953 - DNA, 25 bp, Artificial sequence
  SiRNA target sequence
atacaagaagattataaaaatgcta

SEQ ID NO: 7954 - DNA, 25 bp, Artificial sequence
  SiRNA target sequence
tacaagaagattataaaaatgctat

SEQ ID NO: 7955 - DNA, 25 bp, Artificial sequence
  SiRNA target sequence
acaagaagattataaaaatgctatt

SEQ ID NO: 7956 - DNA, 25 bp, Artificial sequence
  SiRNA target sequence
caagaagattataaaaatgctattc

SEQ ID NO: 7957 - DNA, 25 bp, Artificial sequence
  SiRNA target sequence
aagaagattataaaaatgctattct

SEQ ID NO: 7958 - DNA, 25 bp, Artificial sequence
  SiRNA target sequence
agaagattataaaaatgctattctg

SEQ ID NO: 7959 - DNA, 25 bp, Artificial sequence
  SiRNA target sequence
gaagattataaaaatgctattctgt

SEQ ID NO: 7960 - DNA, 25 bp, Artificial sequence
  SiRNA target sequence
aagattataaaaatgctattctgtt

SEQ ID NO: 7961 - DNA, 25 bp, Artificial sequence
  SiRNA target sequence
agattataaaaatgctattctgttg

SEQ ID NO: 7962 - DNA, 25 bp, Artificial sequence
  SiRNA target sequence
gattataaaaatgctattctgttgt

SEQ ID NO: 7963 - DNA, 25 bp, Artificial sequence
  SiRNA target sequence
attataaaaatgctattctgttgta

SEQ ID NO: 7964 - DNA, 25 bp, Artificial sequence
  SiRNA target sequence
ttataaaaatgctattctgttgtac

SEQ ID NO: 7965 - DNA, 25 bp, Artificial sequence
  SiRNA target sequence
tataaaaatgctattctgttgtaca

SEQ ID NO: 7966 - DNA, 25 bp, Artificial sequence
  SiRNA target sequence
ataaaaatgctattctgttgtacac

SEQ ID NO: 7967 - DNA, 25 bp, Artificial sequence
  SiRNA target sequence
taaaaatgctattctgttgtacact

SEQ ID NO: 7968 - DNA, 25 bp, Artificial sequence
  SiRNA target sequence
aaaaatgctattctgttgtacacta

SEQ ID NO: 7969 - DNA, 25 bp, Artificial sequence
  SiRNA target sequence
aaaatgctattctgttgtacactaa

SEQ ID NO: 7970 - DNA, 25 bp, Artificial sequence
  SiRNA target sequence
aaatgctattctgttgtacactaaa

SEQ ID NO: 7971 - DNA, 25 bp, Artificial sequence
  SiRNA target sequence
aatgctattctgttgtacactaaat

SEQ ID NO: 7972 - DNA, 25 bp, Artificial sequence
  SiRNA target sequence
atgctattctgttgtacactaaatg

SEQ ID NO: 7973 - DNA, 25 bp, Artificial sequence
  SiRNA target sequence
tgctattctgttgtacactaaatgt

SEQ ID NO: 7974 - DNA, 25 bp, Artificial sequence
  SiRNA target sequence
gctattctgttgtacactaaatgta

SEQ ID NO: 7975 - DNA, 25 bp, Artificial sequence
  SiRNA target sequence
ctattctgttgtacactaaatgtaa

SEQ ID NO: 7976 - DNA, 25 bp, Artificial sequence
  SiRNA target sequence
tattctgttgtacactaaatgtaaa

SEQ ID NO: 7977 - DNA, 25 bp, Artificial sequence
  SiRNA target sequence
attctgttgtacactaaatgtaaat

SEQ ID NO: 7978 - DNA, 25 bp, Artificial sequence
  SiRNA target sequence
ttctgttgtacactaaatgtaaata

SEQ ID NO: 7979 - DNA, 25 bp, Artificial sequence
  SiRNA target sequence
tctgttgtacactaaatgtaaatat

SEQ ID NO: 7980 - DNA, 25 bp, Artificial sequence
  SiRNA target sequence
ctgttgtacactaaatgtaaatata

SEQ ID NO: 7981 - DNA, 25 bp, Artificial sequence
  SiRNA target sequence
tgttgtacactaaatgtaaatatat

SEQ ID NO: 7982 - DNA, 25 bp, Artificial sequence
  SiRNA target sequence
gttgtacactaaatgtaaatatatg

SEQ ID NO: 7983 - DNA, 25 bp, Artificial sequence
  SiRNA target sequence
ttgtacactaaatgtaaatatatga

SEQ ID NO: 7984 - DNA, 25 bp, Artificial sequence
  SiRNA target sequence
tgtacactaaatgtaaatatatgaa

SEQ ID NO: 7985 - DNA, 25 bp, Artificial sequence
  SiRNA target sequence
gtacactaaatgtaaatatatgaaa

SEQ ID NO: 7986 - DNA, 25 bp, Artificial sequence
  SiRNA target sequence
tacactaaatgtaaatatatgaaaa

SEQ ID NO: 7987 - DNA, 25 bp, Artificial sequence
  SiRNA target sequence
acactaaatgtaaatatatgaaaag

SEQ ID NO: 7988 - DNA, 25 bp, Artificial sequence
  SiRNA target sequence
cactaaatgtaaatatatgaaaagt

SEQ ID NO: 7989 - DNA, 25 bp, Artificial sequence
  SiRNA target sequence
actaaatgtaaatatatgaaaagtg

SEQ ID NO: 7990 - DNA, 25 bp, Artificial sequence
  SiRNA target sequence
ctaaatgtaaatatatgaaaagtga

SEQ ID NO: 7991 - DNA, 25 bp, Artificial sequence
  SiRNA target sequence
taaatgtaaatatatgaaaagtgat

SEQ ID NO: 7992 - DNA, 25 bp, Artificial sequence
  SiRNA target sequence
aaatgtaaatatatgaaaagtgatg

SEQ ID NO: 7993 - DNA, 25 bp, Artificial sequence
  SiRNA target sequence
aatgtaaatatatgaaaagtgatgc

SEQ ID NO: 7994 - DNA, 25 bp, Artificial sequence
  SiRNA target sequence
atgtaaatatatgaaaagtgatgct

SEQ ID NO: 7995 - DNA, 25 bp, Artificial sequence
  SiRNA target sequence
tgtaaatatatgaaaagtgatgctg

SEQ ID NO: 7996 - DNA, 25 bp, Artificial sequence
  SiRNA target sequence
gtaaatatatgaaaagtgatgctga

SEQ ID NO: 7997 - DNA, 25 bp, Artificial sequence
  SiRNA target sequence
taaatatatgaaaagtgatgctgaa

SEQ ID NO: 7998 - DNA, 25 bp, Artificial sequence
  SiRNA target sequence
aaatatatgaaaagtgatgctgaaa

SEQ ID NO: 7999 - DNA, 25 bp, Artificial sequence
  SiRNA target sequence
aatatatgaaaagtgatgctgaaat

SEQ ID NO: 8000 - DNA, 25 bp, Artificial sequence
  SiRNA target sequence
atatatgaaaagtgatgctgaaatt

SEQ ID NO: 8001 - DNA, 25 bp, Artificial sequence
  SiRNA target sequence
tatatgaaaagtgatgctgaaattc

SEQ ID NO: 8002 - DNA, 25 bp, Artificial sequence
  SiRNA target sequence
atatgaaaagtgatgctgaaattct

SEQ ID NO: 8003 - DNA, 25 bp, Artificial sequence
  SiRNA target sequence
tatgaaaagtgatgctgaaattctt

SEQ ID NO: 8004 - DNA, 25 bp, Artificial sequence
  SiRNA target sequence
atgaaaagtgatgctgaaattctta

SEQ ID NO: 8005 - DNA, 25 bp, Artificial sequence
  SiRNA target sequence
tgaaaagtgatgctgaaattcttac

SEQ ID NO: 8006 - DNA, 25 bp, Artificial sequence
  SiRNA target sequence
gaaaagtgatgctgaaattcttact

SEQ ID NO: 8007 - DNA, 25 bp, Artificial sequence
  SiRNA target sequence
aaaagtgatgctgaaattcttacta

SEQ ID NO: 8008 - DNA, 25 bp, Artificial sequence
  SiRNA target sequence
aaagtgatgctgaaattcttactaa

SEQ ID NO: 8009 - DNA, 25 bp, Artificial sequence
  SiRNA target sequence
aagtgatgctgaaattcttactaaa

SEQ ID NO: 8010 - DNA, 25 bp, Artificial sequence
  SiRNA target sequence
agtgatgctgaaattcttactaaaa

SEQ ID NO: 8011 - DNA, 25 bp, Artificial sequence
  SiRNA target sequence
gtgatgctgaaattcttactaaaat

SEQ ID NO: 8012 - DNA, 25 bp, Artificial sequence
  SiRNA target sequence
tgatgctgaaattcttactaaaatt

SEQ ID NO: 8013 - DNA, 25 bp, Artificial sequence
  SiRNA target sequence
gatgctgaaattcttactaaaatta

SEQ ID NO: 8014 - DNA, 25 bp, Artificial sequence
  SiRNA target sequence
atgctgaaattcttactaaaattag

SEQ ID NO: 8015 - DNA, 25 bp, Artificial sequence
  SiRNA target sequence
tgctgaaattcttactaaaattagt

SEQ ID NO: 8016 - DNA, 25 bp, Artificial sequence
  SiRNA target sequence
gctgaaattcttactaaaattagtc

SEQ ID NO: 8017 - DNA, 25 bp, Artificial sequence
  SiRNA target sequence
ctgaaattcttactaaaattagtct

SEQ ID NO: 8018 - DNA, 25 bp, Artificial sequence
  SiRNA target sequence
tgaaattcttactaaaattagtctc

SEQ ID NO: 8019 - DNA, 25 bp, Artificial sequence
  SiRNA target sequence
gaaattcttactaaaattagtctct

SEQ ID NO: 8020 - DNA, 25 bp, Artificial sequence
  SiRNA target sequence
aaattcttactaaaattagtctctg

SEQ ID NO: 8021 - DNA, 25 bp, Artificial sequence
  SiRNA target sequence
aattcttactaaaattagtctctgt

SEQ ID NO: 8022 - DNA, 25 bp, Artificial sequence
  SiRNA target sequence
attcttactaaaattagtctctgta

SEQ ID NO: 8023 - DNA, 25 bp, Artificial sequence
  SiRNA target sequence
ttcttactaaaattagtctctgtaa

SEQ ID NO: 8024 - DNA, 25 bp, Artificial sequence
  SiRNA target sequence
tcttactaaaattagtctctgtaat

SEQ ID NO: 8025 - DNA, 25 bp, Artificial sequence
  SiRNA target sequence
cttactaaaattagtctctgtaatt

SEQ ID NO: 8026 - DNA, 25 bp, Artificial sequence
  SiRNA target sequence
ttactaaaattagtctctgtaatta

SEQ ID NO: 8027 - DNA, 25 bp, Artificial sequence
  SiRNA target sequence
tactaaaattagtctctgtaattat

SEQ ID NO: 8028 - DNA, 25 bp, Artificial sequence
  SiRNA target sequence
actaaaattagtctctgtaattatt

SEQ ID NO: 8029 - DNA, 25 bp, Artificial sequence
  SiRNA target sequence
ctaaaattagtctctgtaattattt

SEQ ID NO: 8030 - DNA, 25 bp, Artificial sequence
  SiRNA target sequence
taaaattagtctctgtaattatttc

SEQ ID NO: 8031 - DNA, 25 bp, Artificial sequence
  SiRNA target sequence
aaaattagtctctgtaattatttct

SEQ ID NO: 8032 - DNA, 25 bp, Artificial sequence
  SiRNA target sequence
aaattagtctctgtaattatttctt

SEQ ID NO: 8033 - DNA, 25 bp, Artificial sequence
  SiRNA target sequence
aattagtctctgtaattatttctta

SEQ ID NO: 8034 - DNA, 25 bp, Artificial sequence
  SiRNA target sequence
attagtctctgtaattatttcttaa

SEQ ID NO: 8035 - DNA, 25 bp, Artificial sequence
  SiRNA target sequence
ttagtctctgtaattatttcttaaa

SEQ ID NO: 8036 - DNA, 25 bp, Artificial sequence
  SiRNA target sequence
tagtctctgtaattatttcttaaaa

SEQ ID NO: 8037 - DNA, 25 bp, Artificial sequence
  SiRNA target sequence
agtctctgtaattatttcttaaaaa

SEQ ID NO: 8038 - DNA, 25 bp, Artificial sequence
  SiRNA target sequence
gtctctgtaattatttcttaaaaaa

SEQ ID NO: 8039 - DNA, 25 bp, Artificial sequence
  SiRNA target sequence
tctctgtaattatttcttaaaaaat

SEQ ID NO: 8040 - DNA, 25 bp, Artificial sequence
  SiRNA target sequence
ctctgtaattatttcttaaaaaatt

SEQ ID NO: 8041 - DNA, 25 bp, Artificial sequence
  SiRNA target sequence
tctgtaattatttcttaaaaaatta

SEQ ID NO: 8042 - DNA, 25 bp, Artificial sequence
  SiRNA target sequence
ctgtaattatttcttaaaaaattat

SEQ ID NO: 8043 - DNA, 25 bp, Artificial sequence
  SiRNA target sequence
tgtaattatttcttaaaaaattatc

SEQ ID NO: 8044 - DNA, 25 bp, Artificial sequence
  SiRNA target sequence
gtaattatttcttaaaaaattatca

SEQ ID NO: 8045 - DNA, 25 bp, Artificial sequence
  SiRNA target sequence
taattatttcttaaaaaattatcaa

SEQ ID NO: 8046 - DNA, 25 bp, Artificial sequence
  SiRNA target sequence
aattatttcttaaaaaattatcaag

SEQ ID NO: 8047 - DNA, 25 bp, Artificial sequence
  SiRNA target sequence
attatttcttaaaaaattatcaaga

SEQ ID NO: 8048 - DNA, 25 bp, Artificial sequence
  SiRNA target sequence
ttatttcttaaaaaattatcaagaa

SEQ ID NO: 8049 - DNA, 25 bp, Artificial sequence
  SiRNA target sequence
tatttcttaaaaaattatcaagaag

SEQ ID NO: 8050 - DNA, 25 bp, Artificial sequence
  SiRNA target sequence
atttcttaaaaaattatcaagaagt

SEQ ID NO: 8051 - DNA, 25 bp, Artificial sequence
  SiRNA target sequence
tttcttaaaaaattatcaagaagtt

SEQ ID NO: 8052 - DNA, 25 bp, Artificial sequence
  SiRNA target sequence
ttcttaaaaaattatcaagaagtta

SEQ ID NO: 8053 - DNA, 25 bp, Artificial sequence
  SiRNA target sequence
tcttaaaaaattatcaagaagttat

SEQ ID NO: 8054 - DNA, 25 bp, Artificial sequence
  SiRNA target sequence
cttaaaaaattatcaagaagttata

SEQ ID NO: 8055 - DNA, 25 bp, Artificial sequence
  SiRNA target sequence
ttaaaaaattatcaagaagttataa

SEQ ID NO: 8056 - DNA, 25 bp, Artificial sequence
  SiRNA target sequence
taaaaaattatcaagaagttataaa

SEQ ID NO: 8057 - DNA, 25 bp, Artificial sequence
  SiRNA target sequence
aaaaaattatcaagaagttataaat

SEQ ID NO: 8058 - DNA, 25 bp, Artificial sequence
  SiRNA target sequence
aaaaattatcaagaagttataaata

SEQ ID NO: 8059 - DNA, 25 bp, Artificial sequence
  SiRNA target sequence
aaaattatcaagaagttataaataa

SEQ ID NO: 8060 - DNA, 25 bp, Artificial sequence
  SiRNA target sequence
aaattatcaagaagttataaataat

SEQ ID NO: 8061 - DNA, 25 bp, Artificial sequence
  SiRNA target sequence
aattatcaagaagttataaataatt

SEQ ID NO: 8062 - DNA, 25 bp, Artificial sequence
  SiRNA target sequence
attatcaagaagttataaataattc

SEQ ID NO: 8063 - DNA, 25 bp, Artificial sequence
  SiRNA target sequence
ttatcaagaagttataaataattct

SEQ ID NO: 8064 - DNA, 25 bp, Artificial sequence
  SiRNA target sequence
tatcaagaagttataaataattctt

SEQ ID NO: 8065 - DNA, 25 bp, Artificial sequence
  SiRNA target sequence
atcaagaagttataaataattcttt

SEQ ID NO: 8066 - DNA, 25 bp, Artificial sequence
  SiRNA target sequence
tcaagaagttataaataattcttta

SEQ ID NO: 8067 - DNA, 25 bp, Artificial sequence
  SiRNA target sequence
caagaagttataaataattctttat

SEQ ID NO: 8068 - DNA, 25 bp, Artificial sequence
  SiRNA target sequence
aagaagttataaataattctttatt

SEQ ID NO: 8069 - DNA, 25 bp, Artificial sequence
  SiRNA target sequence
agaagttataaataattctttattt

SEQ ID NO: 8070 - DNA, 25 bp, Artificial sequence
  SiRNA target sequence
gaagttataaataattctttattta

SEQ ID NO: 8071 - DNA, 25 bp, Artificial sequence
  SiRNA target sequence
aagttataaataattctttatttaa

SEQ ID NO: 8072 - DNA, 25 bp, Artificial sequence
  SiRNA target sequence
agttataaataattctttatttaag

SEQ ID NO: 8073 - DNA, 25 bp, Artificial sequence
  SiRNA target sequence
gttataaataattctttatttaaga

SEQ ID NO: 8074 - DNA, 25 bp, Artificial sequence
  SiRNA target sequence
ttataaataattctttatttaagac

SEQ ID NO: 8075 - DNA, 25 bp, Artificial sequence
  SiRNA target sequence
tataaataattctttatttaagaca

SEQ ID NO: 8076 - DNA, 25 bp, Artificial sequence
  SiRNA target sequence
ataaataattctttatttaagacaa

SEQ ID NO: 8077 - DNA, 25 bp, Artificial sequence
  SiRNA target sequence
taaataattctttatttaagacaaa

SEQ ID NO: 8078 - DNA, 25 bp, Artificial sequence
  SiRNA target sequence
aaataattctttatttaagacaaat

SEQ ID NO: 8079 - DNA, 25 bp, Artificial sequence
  SiRNA target sequence
aataattctttatttaagacaaata

SEQ ID NO: 8080 - DNA, 25 bp, Artificial sequence
  SiRNA target sequence
ataattctttatttaagacaaataa

SEQ ID NO: 8081 - DNA, 25 bp, Artificial sequence
  SiRNA target sequence
taattctttatttaagacaaataat

SEQ ID NO: 8082 - DNA, 25 bp, Artificial sequence
  SiRNA target sequence
aattctttatttaagacaaataata

SEQ ID NO: 8083 - DNA, 25 bp, Artificial sequence
  SiRNA target sequence
attctttatttaagacaaataataa

SEQ ID NO: 8084 - DNA, 25 bp, Artificial sequence
  SiRNA target sequence
ttctttatttaagacaaataataaa

SEQ ID NO: 8085 - DNA, 25 bp, Artificial sequence
  SiRNA target sequence
tctttatttaagacaaataataaag

SEQ ID NO: 8086 - DNA, 25 bp, Artificial sequence
  SiRNA target sequence
ctttatttaagacaaataataaaga

SEQ ID NO: 8087 - DNA, 25 bp, Artificial sequence
  SiRNA target sequence
tttatttaagacaaataataaagat

SEQ ID NO: 8088 - DNA, 25 bp, Artificial sequence
  SiRNA target sequence
ttatttaagacaaataataaagatc

SEQ ID NO: 8089 - DNA, 25 bp, Artificial sequence
  SiRNA target sequence
tatttaagacaaataataaagatct

SEQ ID NO: 8090 - DNA, 25 bp, Artificial sequence
  SiRNA target sequence
atttaagacaaataataaagatcta

SEQ ID NO: 8091 - DNA, 25 bp, Artificial sequence
  SiRNA target sequence
tttaagacaaataataaagatctaa

SEQ ID NO: 8092 - DNA, 25 bp, Artificial sequence
  SiRNA target sequence
ttaagacaaataataaagatctaat

SEQ ID NO: 8093 - DNA, 25 bp, Artificial sequence
  SiRNA target sequence
taagacaaataataaagatctaata

SEQ ID NO: 8094 - DNA, 25 bp, Artificial sequence
  SiRNA target sequence
aagacaaataataaagatctaataa

SEQ ID NO: 8095 - DNA, 25 bp, Artificial sequence
  SiRNA target sequence
agacaaataataaagatctaataaa

SEQ ID NO: 8096 - DNA, 25 bp, Artificial sequence
  SiRNA target sequence
gacaaataataaagatctaataaaa

SEQ ID NO: 8097 - DNA, 25 bp, Artificial sequence
  SiRNA target sequence
acaaataataaagatctaataaaaa

SEQ ID NO: 8098 - DNA, 25 bp, Artificial sequence
  SiRNA target sequence
caaataataaagatctaataaaaat

SEQ ID NO: 8099 - DNA, 25 bp, Artificial sequence
  SiRNA target sequence
aaataataaagatctaataaaaata

SEQ ID NO: 8100 - DNA, 25 bp, Artificial sequence
  SiRNA target sequence
aataataaagatctaataaaaataa

SEQ ID NO: 8101 - DNA, 25 bp, Artificial sequence
  SiRNA target sequence
ataataaagatctaataaaaataag

SEQ ID NO: 8102 - DNA, 25 bp, Artificial sequence
  SiRNA target sequence
taataaagatctaataaaaataaga

SEQ ID NO: 8103 - DNA, 25 bp, Artificial sequence
  SiRNA target sequence
aataaagatctaataaaaataagat

SEQ ID NO: 8104 - DNA, 25 bp, Artificial sequence
  SiRNA target sequence
ataaagatctaataaaaataagatc

SEQ ID NO: 8105 - DNA, 25 bp, Artificial sequence
  SiRNA target sequence
taaagatctaataaaaataagatct

SEQ ID NO: 8106 - DNA, 25 bp, Artificial sequence
  SiRNA target sequence
aaagatctaataaaaataagatctg

SEQ ID NO: 8107 - DNA, 25 bp, Artificial sequence
  SiRNA target sequence
aagatctaataaaaataagatctga

SEQ ID NO: 8108 - DNA, 25 bp, Artificial sequence
  SiRNA target sequence
agatctaataaaaataagatctgaa

SEQ ID NO: 8109 - DNA, 25 bp, Artificial sequence
  SiRNA target sequence
gatctaataaaaataagatctgaat

SEQ ID NO: 8110 - DNA, 25 bp, Artificial sequence
  SiRNA target sequence
atctaataaaaataagatctgaatg

SEQ ID NO: 8111 - DNA, 25 bp, Artificial sequence
  SiRNA target sequence
tctaataaaaataagatctgaatgt

SEQ ID NO: 8112 - DNA, 25 bp, Artificial sequence
  SiRNA target sequence
ctaataaaaataagatctgaatgtt

SEQ ID NO: 8113 - DNA, 25 bp, Artificial sequence
  SiRNA target sequence
taataaaaataagatctgaatgtta

SEQ ID NO: 8114 - DNA, 25 bp, Artificial sequence
  SiRNA target sequence
aataaaaataagatctgaatgttac

SEQ ID NO: 8115 - DNA, 25 bp, Artificial sequence
  SiRNA target sequence
ataaaaataagatctgaatgttaca

SEQ ID NO: 8116 - DNA, 25 bp, Artificial sequence
  SiRNA target sequence
taaaaataagatctgaatgttacaa

SEQ ID NO: 8117 - DNA, 25 bp, Artificial sequence
  SiRNA target sequence
aaaaataagatctgaatgttacaag

SEQ ID NO: 8118 - DNA, 25 bp, Artificial sequence
  SiRNA target sequence
aaaataagatctgaatgttacaagc

SEQ ID NO: 8119 - DNA, 25 bp, Artificial sequence
  SiRNA target sequence
aaataagatctgaatgttacaagca

SEQ ID NO: 8120 - DNA, 25 bp, Artificial sequence
  SiRNA target sequence
aataagatctgaatgttacaagcag

SEQ ID NO: 8121 - DNA, 25 bp, Artificial sequence
  SiRNA target sequence
ataagatctgaatgttacaagcaga

SEQ ID NO: 8122 - DNA, 25 bp, Artificial sequence
  SiRNA target sequence
taagatctgaatgttacaagcagat

SEQ ID NO: 8123 - DNA, 25 bp, Artificial sequence
  SiRNA target sequence
aagatctgaatgttacaagcagatg

SEQ ID NO: 8124 - DNA, 25 bp, Artificial sequence
  SiRNA target sequence
agatctgaatgttacaagcagatgg

SEQ ID NO: 8125 - DNA, 25 bp, Artificial sequence
  SiRNA target sequence
gatctgaatgttacaagcagatggg

SEQ ID NO: 8126 - DNA, 25 bp, Artificial sequence
  SiRNA target sequence
atctgaatgttacaagcagatggga

SEQ ID NO: 8127 - DNA, 25 bp, Artificial sequence
  SiRNA target sequence
tctgaatgttacaagcagatgggaa

SEQ ID NO: 8128 - DNA, 25 bp, Artificial sequence
  SiRNA target sequence
ctgaatgttacaagcagatgggaaa

SEQ ID NO: 8129 - DNA, 25 bp, Artificial sequence
  SiRNA target sequence
tgaatgttacaagcagatgggaaat

SEQ ID NO: 8130 - DNA, 25 bp, Artificial sequence
  SiRNA target sequence
gaatgttacaagcagatgggaaata

SEQ ID NO: 8131 - DNA, 25 bp, Artificial sequence
  SiRNA target sequence
aatgttacaagcagatgggaaataa

SEQ ID NO: 8132 - DNA, 25 bp, Artificial sequence
  SiRNA target sequence
atgttacaagcagatgggaaataaa

SEQ ID NO: 8133 - DNA, 25 bp, Artificial sequence
  SiRNA target sequence
tgttacaagcagatgggaaataaaa

SEQ ID NO: 8134 - DNA, 25 bp, Artificial sequence
  SiRNA target sequence
gttacaagcagatgggaaataaaaa

SEQ ID NO: 8135 - DNA, 25 bp, Artificial sequence
  SiRNA target sequence
ttacaagcagatgggaaataaaaaa

SEQ ID NO: 8136 - DNA, 25 bp, Artificial sequence
  SiRNA target sequence
tacaagcagatgggaaataaaaaaa

SEQ ID NO: 8137 - DNA, 25 bp, Artificial sequence
  SiRNA target sequence
acaagcagatgggaaataaaaaaaa

SEQ ID NO: 8138 - DNA, 25 bp, Artificial sequence
  SiRNA target sequence
caagcagatgggaaataaaaaaaaa

SEQ ID NO: 8139 - DNA, 25 bp, Artificial sequence
  SiRNA target sequence
aagcagatgggaaataaaaaaaaat

SEQ ID NO: 8140 - DNA, 25 bp, Artificial sequence
  SiRNA target sequence
agcagatgggaaataaaaaaaaatt

SEQ ID NO: 8141 - DNA, 25 bp, Artificial sequence
  SiRNA target sequence
gcagatgggaaataaaaaaaaattt

SEQ ID NO: 8142 - DNA, 25 bp, Artificial sequence
  SiRNA target sequence
cagatgggaaataaaaaaaaatttc

SEQ ID NO: 8143 - DNA, 25 bp, Artificial sequence
  SiRNA target sequence
agatgggaaataaaaaaaaatttct

SEQ ID NO: 8144 - DNA, 25 bp, Artificial sequence
  SiRNA target sequence
gatgggaaataaaaaaaaatttctt

SEQ ID NO: 8145 - DNA, 25 bp, Artificial sequence
  SiRNA target sequence
atgggaaataaaaaaaaatttctta

SEQ ID NO: 8146 - DNA, 25 bp, Artificial sequence
  SiRNA target sequence
tgggaaataaaaaaaaatttcttaa

SEQ ID NO: 8147 - DNA, 25 bp, Artificial sequence
  SiRNA target sequence
gggaaataaaaaaaaatttcttaag

SEQ ID NO: 8148 - DNA, 25 bp, Artificial sequence
  SiRNA target sequence
ggaaataaaaaaaaatttcttaagg

SEQ ID NO: 8149 - DNA, 25 bp, Artificial sequence
  SiRNA target sequence
gaaataaaaaaaaatttcttaagga

SEQ ID NO: 8150 - DNA, 25 bp, Artificial sequence
  SiRNA target sequence
aaataaaaaaaaatttcttaaggat

SEQ ID NO: 8151 - DNA, 25 bp, Artificial sequence
  SiRNA target sequence
aataaaaaaaaatttcttaaggatt

SEQ ID NO: 8152 - DNA, 25 bp, Artificial sequence
  SiRNA target sequence
ataaaaaaaaatttcttaaggattt

SEQ ID NO: 8153 - DNA, 25 bp, Artificial sequence
  SiRNA target sequence
taaaaaaaaatttcttaaggattta

SEQ ID NO: 8154 - DNA, 25 bp, Artificial sequence
  SiRNA target sequence
aaaaaaaaatttcttaaggatttag

SEQ ID NO: 8155 - DNA, 25 bp, Artificial sequence
  SiRNA target sequence
aaaaaaaatttcttaaggatttagc

SEQ ID NO: 8156 - DNA, 25 bp, Artificial sequence
  SiRNA target sequence
aaaaaaatttcttaaggatttagca

SEQ ID NO: 8157 - DNA, 25 bp, Artificial sequence
  SiRNA target sequence
aaaaaatttcttaaggatttagcac

SEQ ID NO: 8158 - DNA, 25 bp, Artificial sequence
  SiRNA target sequence
aaaaatttcttaaggatttagcact

SEQ ID NO: 8159 - DNA, 25 bp, Artificial sequence
  SiRNA target sequence
aaaatttcttaaggatttagcactt

SEQ ID NO: 8160 - DNA, 25 bp, Artificial sequence
  SiRNA target sequence
aaatttcttaaggatttagcacttt

SEQ ID NO: 8161 - DNA, 25 bp, Artificial sequence
  SiRNA target sequence
aatttcttaaggatttagcacttta

SEQ ID NO: 8162 - DNA, 25 bp, Artificial sequence
  SiRNA target sequence
atttcttaaggatttagcactttat

SEQ ID NO: 8163 - DNA, 25 bp, Artificial sequence
  SiRNA target sequence
tttcttaaggatttagcactttatg

SEQ ID NO: 8164 - DNA, 25 bp, Artificial sequence
  SiRNA target sequence
ttcttaaggatttagcactttatga

SEQ ID NO: 8165 - DNA, 25 bp, Artificial sequence
  SiRNA target sequence
tcttaaggatttagcactttatgaa

SEQ ID NO: 8166 - DNA, 25 bp, Artificial sequence
  SiRNA target sequence
cttaaggatttagcactttatgaaa

SEQ ID NO: 8167 - DNA, 25 bp, Artificial sequence
  SiRNA target sequence
ttaaggatttagcactttatgaaac

SEQ ID NO: 8168 - DNA, 25 bp, Artificial sequence
  SiRNA target sequence
taaggatttagcactttatgaaaca

SEQ ID NO: 8169 - DNA, 25 bp, Artificial sequence
  SiRNA target sequence
aaggatttagcactttatgaaacat

SEQ ID NO: 8170 - DNA, 25 bp, Artificial sequence
  SiRNA target sequence
aggatttagcactttatgaaacatt

SEQ ID NO: 8171 - DNA, 25 bp, Artificial sequence
  SiRNA target sequence
ggatttagcactttatgaaacattt

SEQ ID NO: 8172 - DNA, 25 bp, Artificial sequence
  SiRNA target sequence
gatttagcactttatgaaacatttg

SEQ ID NO: 8173 - DNA, 25 bp, Artificial sequence
  SiRNA target sequence
atttagcactttatgaaacatttgc

SEQ ID NO: 8174 - DNA, 25 bp, Artificial sequence
  SiRNA target sequence
tttagcactttatgaaacatttgct

SEQ ID NO: 8175 - DNA, 25 bp, Artificial sequence
  SiRNA target sequence
ttagcactttatgaaacatttgcta

SEQ ID NO: 8176 - DNA, 25 bp, Artificial sequence
  SiRNA target sequence
tagcactttatgaaacatttgctaa

SEQ ID NO: 8177 - DNA, 25 bp, Artificial sequence
  SiRNA target sequence
agcactttatgaaacatttgctaat

SEQ ID NO: 8178 - DNA, 25 bp, Artificial sequence
  SiRNA target sequence
gcactttatgaaacatttgctaata

SEQ ID NO: 8179 - DNA, 25 bp, Artificial sequence
  SiRNA target sequence
cactttatgaaacatttgctaataa

SEQ ID NO: 8180 - DNA, 25 bp, Artificial sequence
  SiRNA target sequence
actttatgaaacatttgctaataat

SEQ ID NO: 8181 - DNA, 25 bp, Artificial sequence
  SiRNA target sequence
ctttatgaaacatttgctaataata

SEQ ID NO: 8182 - DNA, 25 bp, Artificial sequence
  SiRNA target sequence
tttatgaaacatttgctaataataa

SEQ ID NO: 8183 - DNA, 25 bp, Artificial sequence
  SiRNA target sequence
ttatgaaacatttgctaataataaa

SEQ ID NO: 8184 - DNA, 25 bp, Artificial sequence
  SiRNA target sequence
tatgaaacatttgctaataataaag

SEQ ID NO: 8185 - DNA, 25 bp, Artificial sequence
  SiRNA target sequence
atgaaacatttgctaataataaaga

SEQ ID NO: 8186 - DNA, 25 bp, Artificial sequence
  SiRNA target sequence
tgaaacatttgctaataataaagaa

SEQ ID NO: 8187 - DNA, 25 bp, Artificial sequence
  SiRNA target sequence
gaaacatttgctaataataaagaag

SEQ ID NO: 8188 - DNA, 25 bp, Artificial sequence
  SiRNA target sequence
aaacatttgctaataataaagaagt

SEQ ID NO: 8189 - DNA, 25 bp, Artificial sequence
  SiRNA target sequence
aacatttgctaataataaagaagtc

SEQ ID NO: 8190 - DNA, 25 bp, Artificial sequence
  SiRNA target sequence
acatttgctaataataaagaagtcc

SEQ ID NO: 8191 - DNA, 25 bp, Artificial sequence
  SiRNA target sequence
catttgctaataataaagaagtcca

SEQ ID NO: 8192 - DNA, 25 bp, Artificial sequence
  SiRNA target sequence
atttgctaataataaagaagtccaa

SEQ ID NO: 8193 - DNA, 25 bp, Artificial sequence
  SiRNA target sequence
tttgctaataataaagaagtccaag

SEQ ID NO: 8194 - DNA, 25 bp, Artificial sequence
  SiRNA target sequence
ttgctaataataaagaagtccaaga

SEQ ID NO: 8195 - DNA, 25 bp, Artificial sequence
  SiRNA target sequence
tgctaataataaagaagtccaagat

SEQ ID NO: 8196 - DNA, 25 bp, Artificial sequence
  SiRNA target sequence
gctaataataaagaagtccaagatg

SEQ ID NO: 8197 - DNA, 25 bp, Artificial sequence
  SiRNA target sequence
ctaataataaagaagtccaagatga

SEQ ID NO: 8198 - DNA, 25 bp, Artificial sequence
  SiRNA target sequence
taataataaagaagtccaagatgaa

SEQ ID NO: 8199 - DNA, 25 bp, Artificial sequence
  SiRNA target sequence
aataataaagaagtccaagatgaaa

SEQ ID NO: 8200 - DNA, 25 bp, Artificial sequence
  SiRNA target sequence
ataataaagaagtccaagatgaaat

SEQ ID NO: 8201 - DNA, 25 bp, Artificial sequence
  SiRNA target sequence
taataaagaagtccaagatgaaatt

SEQ ID NO: 8202 - DNA, 25 bp, Artificial sequence
  SiRNA target sequence
aataaagaagtccaagatgaaatta

SEQ ID NO: 8203 - DNA, 25 bp, Artificial sequence
  SiRNA target sequence
ataaagaagtccaagatgaaattat

SEQ ID NO: 8204 - DNA, 25 bp, Artificial sequence
  SiRNA target sequence
taaagaagtccaagatgaaattatg

SEQ ID NO: 8205 - DNA, 25 bp, Artificial sequence
  SiRNA target sequence
aaagaagtccaagatgaaattatgc

SEQ ID NO: 8206 - DNA, 25 bp, Artificial sequence
  SiRNA target sequence
aagaagtccaagatgaaattatgca

SEQ ID NO: 8207 - DNA, 25 bp, Artificial sequence
  SiRNA target sequence
agaagtccaagatgaaattatgcag

SEQ ID NO: 8208 - DNA, 25 bp, Artificial sequence
  SiRNA target sequence
gaagtccaagatgaaattatgcaga

SEQ ID NO: 8209 - DNA, 25 bp, Artificial sequence
  SiRNA target sequence
aagtccaagatgaaattatgcagac

SEQ ID NO: 8210 - DNA, 25 bp, Artificial sequence
  SiRNA target sequence
agtccaagatgaaattatgcagact

SEQ ID NO: 8211 - DNA, 25 bp, Artificial sequence
  SiRNA target sequence
gtccaagatgaaattatgcagactg

SEQ ID NO: 8212 - DNA, 25 bp, Artificial sequence
  SiRNA target sequence
tccaagatgaaattatgcagactgt

SEQ ID NO: 8213 - DNA, 25 bp, Artificial sequence
  SiRNA target sequence
ccaagatgaaattatgcagactgtt

SEQ ID NO: 8214 - DNA, 25 bp, Artificial sequence
  SiRNA target sequence
caagatgaaattatgcagactgtta

SEQ ID NO: 8215 - DNA, 25 bp, Artificial sequence
  SiRNA target sequence
aagatgaaattatgcagactgttaa

SEQ ID NO: 8216 - DNA, 25 bp, Artificial sequence
  SiRNA target sequence
agatgaaattatgcagactgttaaa

SEQ ID NO: 8217 - DNA, 25 bp, Artificial sequence
  SiRNA target sequence
gatgaaattatgcagactgttaaag

SEQ ID NO: 8218 - DNA, 25 bp, Artificial sequence
  SiRNA target sequence
atgaaattatgcagactgttaaaga

SEQ ID NO: 8219 - DNA, 25 bp, Artificial sequence
  SiRNA target sequence
tgaaattatgcagactgttaaagaa

SEQ ID NO: 8220 - DNA, 25 bp, Artificial sequence
  SiRNA target sequence
gaaattatgcagactgttaaagaaa

SEQ ID NO: 8221 - DNA, 25 bp, Artificial sequence
  SiRNA target sequence
aaattatgcagactgttaaagaaat

SEQ ID NO: 8222 - DNA, 25 bp, Artificial sequence
  SiRNA target sequence
aattatgcagactgttaaagaaatt

SEQ ID NO: 8223 - DNA, 25 bp, Artificial sequence
  SiRNA target sequence
attatgcagactgttaaagaaattt

SEQ ID NO: 8224 - DNA, 25 bp, Artificial sequence
  SiRNA target sequence
ttatgcagactgttaaagaaatttg

SEQ ID NO: 8225 - DNA, 25 bp, Artificial sequence
  SiRNA target sequence
tatgcagactgttaaagaaatttgt

SEQ ID NO: 8226 - DNA, 25 bp, Artificial sequence
  SiRNA target sequence
atgcagactgttaaagaaatttgtg

SEQ ID NO: 8227 - DNA, 25 bp, Artificial sequence
  SiRNA target sequence
tgcagactgttaaagaaatttgtga

SEQ ID NO: 8228 - DNA, 25 bp, Artificial sequence
  SiRNA target sequence
gcagactgttaaagaaatttgtgaa

SEQ ID NO: 8229 - DNA, 25 bp, Artificial sequence
  SiRNA target sequence
cagactgttaaagaaatttgtgaag

SEQ ID NO: 8230 - DNA, 25 bp, Artificial sequence
  SiRNA target sequence
agactgttaaagaaatttgtgaaga

SEQ ID NO: 8231 - DNA, 25 bp, Artificial sequence
  SiRNA target sequence
gactgttaaagaaatttgtgaagaa

SEQ ID NO: 8232 - DNA, 25 bp, Artificial sequence
  SiRNA target sequence
actgttaaagaaatttgtgaagaag

SEQ ID NO: 8233 - DNA, 25 bp, Artificial sequence
  SiRNA target sequence
ctgttaaagaaatttgtgaagaaga

SEQ ID NO: 8234 - DNA, 25 bp, Artificial sequence
  SiRNA target sequence
tgttaaagaaatttgtgaagaagaa

SEQ ID NO: 8235 - DNA, 25 bp, Artificial sequence
  SiRNA target sequence
gttaaagaaatttgtgaagaagaag

SEQ ID NO: 8236 - DNA, 25 bp, Artificial sequence
  SiRNA target sequence
ttaaagaaatttgtgaagaagaagt

SEQ ID NO: 8237 - DNA, 25 bp, Artificial sequence
  SiRNA target sequence
taaagaaatttgtgaagaagaagtg

SEQ ID NO: 8238 - DNA, 25 bp, Artificial sequence
  SiRNA target sequence
aaagaaatttgtgaagaagaagtga

SEQ ID NO: 8239 - DNA, 25 bp, Artificial sequence
  SiRNA target sequence
aagaaatttgtgaagaagaagtgaa

SEQ ID NO: 8240 - DNA, 25 bp, Artificial sequence
  SiRNA target sequence
agaaatttgtgaagaagaagtgaat

SEQ ID NO: 8241 - DNA, 25 bp, Artificial sequence
  SiRNA target sequence
gaaatttgtgaagaagaagtgaatg

SEQ ID NO: 8242 - DNA, 25 bp, Artificial sequence
  SiRNA target sequence
aaatttgtgaagaagaagtgaatga

SEQ ID NO: 8243 - DNA, 25 bp, Artificial sequence
  SiRNA target sequence
aatttgtgaagaagaagtgaatgag

SEQ ID NO: 8244 - DNA, 25 bp, Artificial sequence
  SiRNA target sequence
atttgtgaagaagaagtgaatgagt

SEQ ID NO: 8245 - DNA, 25 bp, Artificial sequence
  SiRNA target sequence
tttgtgaagaagaagtgaatgagtt

SEQ ID NO: 8246 - DNA, 25 bp, Artificial sequence
  SiRNA target sequence
ttgtgaagaagaagtgaatgagttt

SEQ ID NO: 8247 - DNA, 25 bp, Artificial sequence
  SiRNA target sequence
tgtgaagaagaagtgaatgagttta

SEQ ID NO: 8248 - DNA, 25 bp, Artificial sequence
  SiRNA target sequence
gtgaagaagaagtgaatgagtttat

SEQ ID NO: 8249 - DNA, 25 bp, Artificial sequence
  SiRNA target sequence
tgaagaagaagtgaatgagtttatt

SEQ ID NO: 8250 - DNA, 25 bp, Artificial sequence
  SiRNA target sequence
gaagaagaagtgaatgagtttattg

SEQ ID NO: 8251 - DNA, 25 bp, Artificial sequence
  SiRNA target sequence
aagaagaagtgaatgagtttattga

SEQ ID NO: 8252 - DNA, 25 bp, Artificial sequence
  SiRNA target sequence
agaagaagtgaatgagtttattgaa

SEQ ID NO: 8253 - DNA, 25 bp, Artificial sequence
  SiRNA target sequence
gaagaagtgaatgagtttattgaac

SEQ ID NO: 8254 - DNA, 25 bp, Artificial sequence
  SiRNA target sequence
aagaagtgaatgagtttattgaaca

SEQ ID NO: 8255 - DNA, 25 bp, Artificial sequence
  SiRNA target sequence
agaagtgaatgagtttattgaacaa

SEQ ID NO: 8256 - DNA, 25 bp, Artificial sequence
  SiRNA target sequence
gaagtgaatgagtttattgaacaag

SEQ ID NO: 8257 - DNA, 25 bp, Artificial sequence
  SiRNA target sequence
aagtgaatgagtttattgaacaaga

SEQ ID NO: 8258 - DNA, 25 bp, Artificial sequence
  SiRNA target sequence
agtgaatgagtttattgaacaagaa

SEQ ID NO: 8259 - DNA, 25 bp, Artificial sequence
  SiRNA target sequence
gtgaatgagtttattgaacaagaag

SEQ ID NO: 8260 - DNA, 25 bp, Artificial sequence
  SiRNA target sequence
tgaatgagtttattgaacaagaagg

SEQ ID NO: 8261 - DNA, 25 bp, Artificial sequence
  SiRNA target sequence
gaatgagtttattgaacaagaaggt

SEQ ID NO: 8262 - DNA, 25 bp, Artificial sequence
  SiRNA target sequence
aatgagtttattgaacaagaaggtt

SEQ ID NO: 8263 - DNA, 25 bp, Artificial sequence
  SiRNA target sequence
atgagtttattgaacaagaaggttt

SEQ ID NO: 8264 - DNA, 25 bp, Artificial sequence
  SiRNA target sequence
tgagtttattgaacaagaaggttta

SEQ ID NO: 8265 - DNA, 25 bp, Artificial sequence
  SiRNA target sequence
gagtttattgaacaagaaggtttaa

SEQ ID NO: 8266 - DNA, 25 bp, Artificial sequence
  SiRNA target sequence
agtttattgaacaagaaggtttaaa

SEQ ID NO: 8267 - DNA, 25 bp, Artificial sequence
  SiRNA target sequence
gtttattgaacaagaaggtttaaaa

SEQ ID NO: 8268 - DNA, 25 bp, Artificial sequence
  SiRNA target sequence
tttattgaacaagaaggtttaaaaa

SEQ ID NO: 8269 - DNA, 25 bp, Artificial sequence
  SiRNA target sequence
ttattgaacaagaaggtttaaaaat

SEQ ID NO: 8270 - DNA, 25 bp, Artificial sequence
  SiRNA target sequence
tattgaacaagaaggtttaaaaatt

SEQ ID NO: 8271 - DNA, 25 bp, Artificial sequence
  SiRNA target sequence
attgaacaagaaggtttaaaaatta

SEQ ID NO: 8272 - DNA, 25 bp, Artificial sequence
  SiRNA target sequence
ttgaacaagaaggtttaaaaattaa

SEQ ID NO: 8273 - DNA, 25 bp, Artificial sequence
  SiRNA target sequence
tgaacaagaaggtttaaaaattaat

SEQ ID NO: 8274 - DNA, 25 bp, Artificial sequence
  SiRNA target sequence
gaacaagaaggtttaaaaattaata

SEQ ID NO: 8275 - DNA, 25 bp, Artificial sequence
  SiRNA target sequence
aacaagaaggtttaaaaattaataa

SEQ ID NO: 8276 - DNA, 25 bp, Artificial sequence
  SiRNA target sequence
acaagaaggtttaaaaattaataaa

SEQ ID NO: 8277 - DNA, 25 bp, Artificial sequence
  SiRNA target sequence
caagaaggtttaaaaattaataaag

SEQ ID NO: 8278 - DNA, 25 bp, Artificial sequence
  SiRNA target sequence
aagaaggtttaaaaattaataaaga

SEQ ID NO: 8279 - DNA, 25 bp, Artificial sequence
  SiRNA target sequence
agaaggtttaaaaattaataaagaa

SEQ ID NO: 8280 - DNA, 25 bp, Artificial sequence
  SiRNA target sequence
gaaggtttaaaaattaataaagaag

SEQ ID NO: 8281 - DNA, 25 bp, Artificial sequence
  SiRNA target sequence
aaggtttaaaaattaataaagaaga

SEQ ID NO: 8282 - DNA, 25 bp, Artificial sequence
  SiRNA target sequence
aggtttaaaaattaataaagaagat

SEQ ID NO: 8283 - DNA, 25 bp, Artificial sequence
  SiRNA target sequence
ggtttaaaaattaataaagaagatg

SEQ ID NO: 8284 - DNA, 25 bp, Artificial sequence
  SiRNA target sequence
gtttaaaaattaataaagaagatgt

SEQ ID NO: 8285 - DNA, 25 bp, Artificial sequence
  SiRNA target sequence
tttaaaaattaataaagaagatgtg

SEQ ID NO: 8286 - DNA, 25 bp, Artificial sequence
  SiRNA target sequence
ttaaaaattaataaagaagatgtgc

SEQ ID NO: 8287 - DNA, 25 bp, Artificial sequence
  SiRNA target sequence
taaaaattaataaagaagatgtgct

SEQ ID NO: 8288 - DNA, 25 bp, Artificial sequence
  SiRNA target sequence
aaaaattaataaagaagatgtgcta

SEQ ID NO: 8289 - DNA, 25 bp, Artificial sequence
  SiRNA target sequence
aaaattaataaagaagatgtgctaa

SEQ ID NO: 8290 - DNA, 25 bp, Artificial sequence
  SiRNA target sequence
aaattaataaagaagatgtgctaag

SEQ ID NO: 8291 - DNA, 25 bp, Artificial sequence
  SiRNA target sequence
aattaataaagaagatgtgctaaga

SEQ ID NO: 8292 - DNA, 25 bp, Artificial sequence
  SiRNA target sequence
attaataaagaagatgtgctaagag

SEQ ID NO: 8293 - DNA, 25 bp, Artificial sequence
  SiRNA target sequence
ttaataaagaagatgtgctaagagg

SEQ ID NO: 8294 - DNA, 25 bp, Artificial sequence
  SiRNA target sequence
taataaagaagatgtgctaagagga

SEQ ID NO: 8295 - DNA, 25 bp, Artificial sequence
  SiRNA target sequence
aataaagaagatgtgctaagaggac

SEQ ID NO: 8296 - DNA, 25 bp, Artificial sequence
  SiRNA target sequence
ataaagaagatgtgctaagaggact

SEQ ID NO: 8297 - DNA, 25 bp, Artificial sequence
  SiRNA target sequence
taaagaagatgtgctaagaggactt

SEQ ID NO: 8298 - DNA, 25 bp, Artificial sequence
  SiRNA target sequence
aaagaagatgtgctaagaggacttg

SEQ ID NO: 8299 - DNA, 25 bp, Artificial sequence
  SiRNA target sequence
aagaagatgtgctaagaggacttgt

SEQ ID NO: 8300 - DNA, 25 bp, Artificial sequence
  SiRNA target sequence
agaagatgtgctaagaggacttgtt

SEQ ID NO: 8301 - DNA, 25 bp, Artificial sequence
  SiRNA target sequence
gaagatgtgctaagaggacttgttt

SEQ ID NO: 8302 - DNA, 25 bp, Artificial sequence
  SiRNA target sequence
aagatgtgctaagaggacttgtttc

SEQ ID NO: 8303 - DNA, 25 bp, Artificial sequence
  SiRNA target sequence
agatgtgctaagaggacttgtttca

SEQ ID NO: 8304 - DNA, 25 bp, Artificial sequence
  SiRNA target sequence
gatgtgctaagaggacttgtttcaa

SEQ ID NO: 8305 - DNA, 25 bp, Artificial sequence
  SiRNA target sequence
atgtgctaagaggacttgtttcaat

SEQ ID NO: 8306 - DNA, 25 bp, Artificial sequence
  SiRNA target sequence
tgtgctaagaggacttgtttcaata

SEQ ID NO: 8307 - DNA, 25 bp, Artificial sequence
  SiRNA target sequence
gtgctaagaggacttgtttcaataa

SEQ ID NO: 8308 - DNA, 25 bp, Artificial sequence
  SiRNA target sequence
tgctaagaggacttgtttcaataaa

SEQ ID NO: 8309 - DNA, 25 bp, Artificial sequence
  SiRNA target sequence
gctaagaggacttgtttcaataaaa

SEQ ID NO: 8310 - DNA, 25 bp, Artificial sequence
  SiRNA target sequence
ctaagaggacttgtttcaataaaaa

SEQ ID NO: 8311 - DNA, 25 bp, Artificial sequence
  SiRNA target sequence
taagaggacttgtttcaataaaaaa

SEQ ID NO: 8312 - DNA, 25 bp, Artificial sequence
  SiRNA target sequence
aagaggacttgtttcaataaaaaat

SEQ ID NO: 8313 - DNA, 25 bp, Artificial sequence
  SiRNA target sequence
agaggacttgtttcaataaaaaata

SEQ ID NO: 8314 - DNA, 25 bp, Artificial sequence
  SiRNA target sequence
gaggacttgtttcaataaaaaatat

SEQ ID NO: 8315 - DNA, 25 bp, Artificial sequence
  SiRNA target sequence
aggacttgtttcaataaaaaatata

SEQ ID NO: 8316 - DNA, 25 bp, Artificial sequence
  SiRNA target sequence
ggacttgtttcaataaaaaatataa

SEQ ID NO: 8317 - DNA, 25 bp, Artificial sequence
  SiRNA target sequence
gacttgtttcaataaaaaatataaa

SEQ ID NO: 8318 - DNA, 25 bp, Artificial sequence
  SiRNA target sequence
acttgtttcaataaaaaatataaat

SEQ ID NO: 8319 - DNA, 25 bp, Artificial sequence
  SiRNA target sequence
cttgtttcaataaaaaatataaatg

SEQ ID NO: 8320 - DNA, 25 bp, Artificial sequence
  SiRNA target sequence
ttgtttcaataaaaaatataaatga

SEQ ID NO: 8321 - DNA, 25 bp, Artificial sequence
  SiRNA target sequence
tgtttcaataaaaaatataaatgag

SEQ ID NO: 8322 - DNA, 25 bp, Artificial sequence
  SiRNA target sequence
gtttcaataaaaaatataaatgaga

SEQ ID NO: 8323 - DNA, 25 bp, Artificial sequence
  SiRNA target sequence
tttcaataaaaaatataaatgagat

SEQ ID NO: 8324 - DNA, 25 bp, Artificial sequence
  SiRNA target sequence
ttcaataaaaaatataaatgagatt

SEQ ID NO: 8325 - DNA, 25 bp, Artificial sequence
  SiRNA target sequence
tcaataaaaaatataaatgagattt

SEQ ID NO: 8326 - DNA, 25 bp, Artificial sequence
  SiRNA target sequence
caataaaaaatataaatgagattta

SEQ ID NO: 8327 - DNA, 25 bp, Artificial sequence
  SiRNA target sequence
aataaaaaatataaatgagatttat

SEQ ID NO: 8328 - DNA, 25 bp, Artificial sequence
  SiRNA target sequence
ataaaaaatataaatgagatttatg

SEQ ID NO: 8329 - DNA, 25 bp, Artificial sequence
  SiRNA target sequence
taaaaaatataaatgagatttatga

SEQ ID NO: 8330 - DNA, 25 bp, Artificial sequence
  SiRNA target sequence
aaaaaatataaatgagatttatgat

SEQ ID NO: 8331 - DNA, 25 bp, Artificial sequence
  SiRNA target sequence
aaaaatataaatgagatttatgatg

SEQ ID NO: 8332 - DNA, 25 bp, Artificial sequence
  SiRNA target sequence
aaaatataaatgagatttatgatgc

SEQ ID NO: 8333 - DNA, 25 bp, Artificial sequence
  SiRNA target sequence
aaatataaatgagatttatgatgca

SEQ ID NO: 8334 - DNA, 25 bp, Artificial sequence
  SiRNA target sequence
aatataaatgagatttatgatgcat

SEQ ID NO: 8335 - DNA, 25 bp, Artificial sequence
  SiRNA target sequence
atataaatgagatttatgatgcatt

SEQ ID NO: 8336 - DNA, 25 bp, Artificial sequence
  SiRNA target sequence
tataaatgagatttatgatgcattt

SEQ ID NO: 8337 - DNA, 25 bp, Artificial sequence
  SiRNA target sequence
ataaatgagatttatgatgcatttg

SEQ ID NO: 8338 - DNA, 25 bp, Artificial sequence
  SiRNA target sequence
taaatgagatttatgatgcatttgg

SEQ ID NO: 8339 - DNA, 25 bp, Artificial sequence
  SiRNA target sequence
aaatgagatttatgatgcatttgga

SEQ ID NO: 8340 - DNA, 25 bp, Artificial sequence
  SiRNA target sequence
aatgagatttatgatgcatttggag

SEQ ID NO: 8341 - DNA, 25 bp, Artificial sequence
  SiRNA target sequence
atgagatttatgatgcatttggagg

SEQ ID NO: 8342 - DNA, 25 bp, Artificial sequence
  SiRNA target sequence
tgagatttatgatgcatttggaggt

SEQ ID NO: 8343 - DNA, 25 bp, Artificial sequence
  SiRNA target sequence
gagatttatgatgcatttggaggta

SEQ ID NO: 8344 - DNA, 25 bp, Artificial sequence
  SiRNA target sequence
agatttatgatgcatttggaggtaa

SEQ ID NO: 8345 - DNA, 25 bp, Artificial sequence
  SiRNA target sequence
gatttatgatgcatttggaggtaaa

SEQ ID NO: 8346 - DNA, 25 bp, Artificial sequence
  SiRNA target sequence
atttatgatgcatttggaggtaaat

SEQ ID NO: 8347 - DNA, 25 bp, Artificial sequence
  SiRNA target sequence
tttatgatgcatttggaggtaaatc

SEQ ID NO: 8348 - DNA, 25 bp, Artificial sequence
  SiRNA target sequence
ttatgatgcatttggaggtaaatct

SEQ ID NO: 8349 - DNA, 25 bp, Artificial sequence
  SiRNA target sequence
tatgatgcatttggaggtaaatcta

SEQ ID NO: 8350 - DNA, 25 bp, Artificial sequence
  SiRNA target sequence
atgatgcatttggaggtaaatctaa

SEQ ID NO: 8351 - DNA, 25 bp, Artificial sequence
  SiRNA target sequence
tgatgcatttggaggtaaatctaag

SEQ ID NO: 8352 - DNA, 25 bp, Artificial sequence
  SiRNA target sequence
gatgcatttggaggtaaatctaaga

SEQ ID NO: 8353 - DNA, 25 bp, Artificial sequence
  SiRNA target sequence
atgcatttggaggtaaatctaagaa

SEQ ID NO: 8354 - DNA, 25 bp, Artificial sequence
  SiRNA target sequence
tgcatttggaggtaaatctaagaag

SEQ ID NO: 8355 - DNA, 25 bp, Artificial sequence
  SiRNA target sequence
gcatttggaggtaaatctaagaagt

SEQ ID NO: 8356 - DNA, 25 bp, Artificial sequence
  SiRNA target sequence
catttggaggtaaatctaagaagtt

SEQ ID NO: 8357 - DNA, 25 bp, Artificial sequence
  SiRNA target sequence
atttggaggtaaatctaagaagttt

SEQ ID NO: 8358 - DNA, 25 bp, Artificial sequence
  SiRNA target sequence
tttggaggtaaatctaagaagttta

SEQ ID NO: 8359 - DNA, 25 bp, Artificial sequence
  SiRNA target sequence
ttggaggtaaatctaagaagtttaa

SEQ ID NO: 8360 - DNA, 25 bp, Artificial sequence
  SiRNA target sequence
tggaggtaaatctaagaagtttaaa

SEQ ID NO: 8361 - DNA, 25 bp, Artificial sequence
  SiRNA target sequence
ggaggtaaatctaagaagtttaaat

SEQ ID NO: 8362 - DNA, 25 bp, Artificial sequence
  SiRNA target sequence
gaggtaaatctaagaagtttaaatt

SEQ ID NO: 8363 - DNA, 25 bp, Artificial sequence
  SiRNA target sequence
aggtaaatctaagaagtttaaattt

SEQ ID NO: 8364 - DNA, 25 bp, Artificial sequence
  SiRNA target sequence
ggtaaatctaagaagtttaaatttt

SEQ ID NO: 8365 - DNA, 25 bp, Artificial sequence
  SiRNA target sequence
gtaaatctaagaagtttaaattttc

SEQ ID NO: 8366 - DNA, 25 bp, Artificial sequence
  SiRNA target sequence
taaatctaagaagtttaaattttct

SEQ ID NO: 8367 - DNA, 25 bp, Artificial sequence
  SiRNA target sequence
aaatctaagaagtttaaattttcta

SEQ ID NO: 8368 - DNA, 25 bp, Artificial sequence
  SiRNA target sequence
aatctaagaagtttaaattttctaa

SEQ ID NO: 8369 - DNA, 25 bp, Artificial sequence
  SiRNA target sequence
atctaagaagtttaaattttctaat

SEQ ID NO: 8370 - DNA, 25 bp, Artificial sequence
  SiRNA target sequence
tctaagaagtttaaattttctaatg

SEQ ID NO: 8371 - DNA, 25 bp, Artificial sequence
  SiRNA target sequence
ctaagaagtttaaattttctaatga

SEQ ID NO: 8372 - DNA, 25 bp, Artificial sequence
  SiRNA target sequence
taagaagtttaaattttctaatgat

SEQ ID NO: 8373 - DNA, 25 bp, Artificial sequence
  SiRNA target sequence
aagaagtttaaattttctaatgatg

SEQ ID NO: 8374 - DNA, 25 bp, Artificial sequence
  SiRNA target sequence
agaagtttaaattttctaatgatga

SEQ ID NO: 8375 - DNA, 25 bp, Artificial sequence
  SiRNA target sequence
gaagtttaaattttctaatgatgaa

SEQ ID NO: 8376 - DNA, 25 bp, Artificial sequence
  SiRNA target sequence
aagtttaaattttctaatgatgaaa

SEQ ID NO: 8377 - DNA, 25 bp, Artificial sequence
  SiRNA target sequence
agtttaaattttctaatgatgaaaa

SEQ ID NO: 8378 - DNA, 25 bp, Artificial sequence
  SiRNA target sequence
gtttaaattttctaatgatgaaaag

SEQ ID NO: 8379 - DNA, 25 bp, Artificial sequence
  SiRNA target sequence
tttaaattttctaatgatgaaaagg

SEQ ID NO: 8380 - DNA, 25 bp, Artificial sequence
  SiRNA target sequence
ttaaattttctaatgatgaaaagga

SEQ ID NO: 8381 - DNA, 25 bp, Artificial sequence
  SiRNA target sequence
taaattttctaatgatgaaaaggaa

SEQ ID NO: 8382 - DNA, 25 bp, Artificial sequence
  SiRNA target sequence
aaattttctaatgatgaaaaggaag

SEQ ID NO: 8383 - DNA, 25 bp, Artificial sequence
  SiRNA target sequence
aattttctaatgatgaaaaggaagt

SEQ ID NO: 8384 - DNA, 25 bp, Artificial sequence
  SiRNA target sequence
attttctaatgatgaaaaggaagtg

SEQ ID NO: 8385 - DNA, 25 bp, Artificial sequence
  SiRNA target sequence
ttttctaatgatgaaaaggaagtgt

SEQ ID NO: 8386 - DNA, 25 bp, Artificial sequence
  SiRNA target sequence
tttctaatgatgaaaaggaagtgtt

SEQ ID NO: 8387 - DNA, 25 bp, Artificial sequence
  SiRNA target sequence
ttctaatgatgaaaaggaagtgtta

SEQ ID NO: 8388 - DNA, 25 bp, Artificial sequence
  SiRNA target sequence
tctaatgatgaaaaggaagtgttaa

SEQ ID NO: 8389 - DNA, 25 bp, Artificial sequence
  SiRNA target sequence
ctaatgatgaaaaggaagtgttaaa

SEQ ID NO: 8390 - DNA, 25 bp, Artificial sequence
  SiRNA target sequence
taatgatgaaaaggaagtgttaaat

SEQ ID NO: 8391 - DNA, 25 bp, Artificial sequence
  SiRNA target sequence
aatgatgaaaaggaagtgttaaatc

SEQ ID NO: 8392 - DNA, 25 bp, Artificial sequence
  SiRNA target sequence
atgatgaaaaggaagtgttaaatct

SEQ ID NO: 8393 - DNA, 25 bp, Artificial sequence
  SiRNA target sequence
tgatgaaaaggaagtgttaaatctt

SEQ ID NO: 8394 - DNA, 25 bp, Artificial sequence
  SiRNA target sequence
gatgaaaaggaagtgttaaatcttc

SEQ ID NO: 8395 - DNA, 25 bp, Artificial sequence
  SiRNA target sequence
atgaaaaggaagtgttaaatcttct

SEQ ID NO: 8396 - DNA, 25 bp, Artificial sequence
  SiRNA target sequence
tgaaaaggaagtgttaaatcttctt

SEQ ID NO: 8397 - DNA, 25 bp, Artificial sequence
  SiRNA target sequence
gaaaaggaagtgttaaatcttctta

SEQ ID NO: 8398 - DNA, 25 bp, Artificial sequence
  SiRNA target sequence
aaaaggaagtgttaaatcttcttaa

SEQ ID NO: 8399 - DNA, 25 bp, Artificial sequence
  SiRNA target sequence
aaaggaagtgttaaatcttcttaat

SEQ ID NO: 8400 - DNA, 25 bp, Artificial sequence
  SiRNA target sequence
aaggaagtgttaaatcttcttaatg

SEQ ID NO: 8401 - DNA, 25 bp, Artificial sequence
  SiRNA target sequence
aggaagtgttaaatcttcttaatgc

SEQ ID NO: 8402 - DNA, 25 bp, Artificial sequence
  SiRNA target sequence
ggaagtgttaaatcttcttaatgcc

SEQ ID NO: 8403 - DNA, 25 bp, Artificial sequence
  SiRNA target sequence
gaagtgttaaatcttcttaatgcca

SEQ ID NO: 8404 - DNA, 25 bp, Artificial sequence
  SiRNA target sequence
aagtgttaaatcttcttaatgccat

SEQ ID NO: 8405 - DNA, 25 bp, Artificial sequence
  SiRNA target sequence
agtgttaaatcttcttaatgccatt

SEQ ID NO: 8406 - DNA, 25 bp, Artificial sequence
  SiRNA target sequence
gtgttaaatcttcttaatgccatta

SEQ ID NO: 8407 - DNA, 25 bp, Artificial sequence
  SiRNA target sequence
tgttaaatcttcttaatgccattat

SEQ ID NO: 8408 - DNA, 25 bp, Artificial sequence
  SiRNA target sequence
gttaaatcttcttaatgccattatt

SEQ ID NO: 8409 - DNA, 25 bp, Artificial sequence
  SiRNA target sequence
ttaaatcttcttaatgccattattt

SEQ ID NO: 8410 - DNA, 25 bp, Artificial sequence
  SiRNA target sequence
taaatcttcttaatgccattatttt

SEQ ID NO: 8411 - DNA, 25 bp, Artificial sequence
  SiRNA target sequence
aaatcttcttaatgccattatttta

SEQ ID NO: 8412 - DNA, 25 bp, Artificial sequence
  SiRNA target sequence
aatcttcttaatgccattattttac

SEQ ID NO: 8413 - DNA, 25 bp, Artificial sequence
  SiRNA target sequence
atcttcttaatgccattattttaca

SEQ ID NO: 8414 - DNA, 25 bp, Artificial sequence
  SiRNA target sequence
tcttcttaatgccattattttacac

SEQ ID NO: 8415 - DNA, 25 bp, Artificial sequence
  SiRNA target sequence
cttcttaatgccattattttacacc

SEQ ID NO: 8416 - DNA, 25 bp, Artificial sequence
  SiRNA target sequence
ttcttaatgccattattttacacct

SEQ ID NO: 8417 - DNA, 25 bp, Artificial sequence
  SiRNA target sequence
tcttaatgccattattttacaccta

SEQ ID NO: 8418 - DNA, 25 bp, Artificial sequence
  SiRNA target sequence
cttaatgccattattttacacctaa

SEQ ID NO: 8419 - DNA, 25 bp, Artificial sequence
  SiRNA target sequence
ttaatgccattattttacacctaaa

SEQ ID NO: 8420 - DNA, 25 bp, Artificial sequence
  SiRNA target sequence
taatgccattattttacacctaaaa

SEQ ID NO: 8421 - DNA, 25 bp, Artificial sequence
  SiRNA target sequence
aatgccattattttacacctaaaag

SEQ ID NO: 8422 - DNA, 25 bp, Artificial sequence
  SiRNA target sequence
atgccattattttacacctaaaagg

SEQ ID NO: 8423 - DNA, 25 bp, Artificial sequence
  SiRNA target sequence
tgccattattttacacctaaaagga

SEQ ID NO: 8424 - DNA, 25 bp, Artificial sequence
  SiRNA target sequence
gccattattttacacctaaaaggaa

SEQ ID NO: 8425 - DNA, 25 bp, Artificial sequence
  SiRNA target sequence
ccattattttacacctaaaaggaaa

SEQ ID NO: 8426 - DNA, 25 bp, Artificial sequence
  SiRNA target sequence
cattattttacacctaaaaggaaaa

SEQ ID NO: 8427 - DNA, 25 bp, Artificial sequence
  SiRNA target sequence
attattttacacctaaaaggaaaaa

SEQ ID NO: 8428 - DNA, 25 bp, Artificial sequence
  SiRNA target sequence
ttattttacacctaaaaggaaaaaa

SEQ ID NO: 8429 - DNA, 25 bp, Artificial sequence
  SiRNA target sequence
tattttacacctaaaaggaaaaaaa

SEQ ID NO: 8430 - DNA, 25 bp, Artificial sequence
  SiRNA target sequence
attttacacctaaaaggaaaaaaag

SEQ ID NO: 8431 - DNA, 25 bp, Artificial sequence
  SiRNA target sequence
ttttacacctaaaaggaaaaaaaga

SEQ ID NO: 8432 - DNA, 25 bp, Artificial sequence
  SiRNA target sequence
tttacacctaaaaggaaaaaaagaa

SEQ ID NO: 8433 - DNA, 25 bp, Artificial sequence
  SiRNA target sequence
ttacacctaaaaggaaaaaaagaac

SEQ ID NO: 8434 - DNA, 25 bp, Artificial sequence
  SiRNA target sequence
tacacctaaaaggaaaaaaagaaca

SEQ ID NO: 8435 - DNA, 25 bp, Artificial sequence
  SiRNA target sequence
acacctaaaaggaaaaaaagaacag

SEQ ID NO: 8436 - DNA, 25 bp, Artificial sequence
  SiRNA target sequence
cacctaaaaggaaaaaaagaacagg

SEQ ID NO: 8437 - DNA, 25 bp, Artificial sequence
  SiRNA target sequence
acctaaaaggaaaaaaagaacaggc

SEQ ID NO: 8438 - DNA, 25 bp, Artificial sequence
  SiRNA target sequence
cctaaaaggaaaaaaagaacaggca

SEQ ID NO: 8439 - DNA, 25 bp, Artificial sequence
  SiRNA target sequence
ctaaaaggaaaaaaagaacaggcaa

SEQ ID NO: 8440 - DNA, 25 bp, Artificial sequence
  SiRNA target sequence
taaaaggaaaaaaagaacaggcaat

SEQ ID NO: 8441 - DNA, 25 bp, Artificial sequence
  SiRNA target sequence
aaaaggaaaaaaagaacaggcaatt

SEQ ID NO: 8442 - DNA, 25 bp, Artificial sequence
  SiRNA target sequence
aaaggaaaaaaagaacaggcaattc

SEQ ID NO: 8443 - DNA, 25 bp, Artificial sequence
  SiRNA target sequence
aaggaaaaaaagaacaggcaattct

SEQ ID NO: 8444 - DNA, 25 bp, Artificial sequence
  SiRNA target sequence
aggaaaaaaagaacaggcaattctt

SEQ ID NO: 8445 - DNA, 25 bp, Artificial sequence
  SiRNA target sequence
ggaaaaaaagaacaggcaattcttt

SEQ ID NO: 8446 - DNA, 25 bp, Artificial sequence
  SiRNA target sequence
gaaaaaaagaacaggcaattctttt

SEQ ID NO: 8447 - DNA, 25 bp, Artificial sequence
  SiRNA target sequence
aaaaaaagaacaggcaattctttta

SEQ ID NO: 8448 - DNA, 25 bp, Artificial sequence
  SiRNA target sequence
aaaaaagaacaggcaattcttttat

SEQ ID NO: 8449 - DNA, 25 bp, Artificial sequence
  SiRNA target sequence
aaaaagaacaggcaattcttttatt

SEQ ID NO: 8450 - DNA, 25 bp, Artificial sequence
  SiRNA target sequence
aaaagaacaggcaattcttttatta

SEQ ID NO: 8451 - DNA, 25 bp, Artificial sequence
  SiRNA target sequence
aaagaacaggcaattcttttattag

SEQ ID NO: 8452 - DNA, 25 bp, Artificial sequence
  SiRNA target sequence
aagaacaggcaattcttttattaga

SEQ ID NO: 8453 - DNA, 25 bp, Artificial sequence
  SiRNA target sequence
agaacaggcaattcttttattagaa

SEQ ID NO: 8454 - DNA, 25 bp, Artificial sequence
  SiRNA target sequence
gaacaggcaattcttttattagaaa

SEQ ID NO: 8455 - DNA, 25 bp, Artificial sequence
  SiRNA target sequence
aacaggcaattcttttattagaaaa

SEQ ID NO: 8456 - DNA, 25 bp, Artificial sequence
  SiRNA target sequence
acaggcaattcttttattagaaaaa

SEQ ID NO: 8457 - DNA, 25 bp, Artificial sequence
  SiRNA target sequence
caggcaattcttttattagaaaaat

SEQ ID NO: 8458 - DNA, 25 bp, Artificial sequence
  SiRNA target sequence
aggcaattcttttattagaaaaatc

SEQ ID NO: 8459 - DNA, 25 bp, Artificial sequence
  SiRNA target sequence
ggcaattcttttattagaaaaatct

SEQ ID NO: 8460 - DNA, 25 bp, Artificial sequence
  SiRNA target sequence
gcaattcttttattagaaaaatcta

SEQ ID NO: 8461 - DNA, 25 bp, Artificial sequence
  SiRNA target sequence
caattcttttattagaaaaatctac

SEQ ID NO: 8462 - DNA, 25 bp, Artificial sequence
  SiRNA target sequence
aattcttttattagaaaaatctact

SEQ ID NO: 8463 - DNA, 25 bp, Artificial sequence
  SiRNA target sequence
attcttttattagaaaaatctactt

SEQ ID NO: 8464 - DNA, 25 bp, Artificial sequence
  SiRNA target sequence
ttcttttattagaaaaatctactta

SEQ ID NO: 8465 - DNA, 25 bp, Artificial sequence
  SiRNA target sequence
tcttttattagaaaaatctacttat

SEQ ID NO: 8466 - DNA, 25 bp, Artificial sequence
  SiRNA target sequence
cttttattagaaaaatctacttata

SEQ ID NO: 8467 - DNA, 25 bp, Artificial sequence
  SiRNA target sequence
ttttattagaaaaatctacttataa

SEQ ID NO: 8468 - DNA, 25 bp, Artificial sequence
  SiRNA target sequence
tttattagaaaaatctacttataaa

SEQ ID NO: 8469 - DNA, 25 bp, Artificial sequence
  SiRNA target sequence
ttattagaaaaatctacttataaat

SEQ ID NO: 8470 - DNA, 25 bp, Artificial sequence
  SiRNA target sequence
tattagaaaaatctacttataaata

SEQ ID NO: 8471 - DNA, 25 bp, Artificial sequence
  SiRNA target sequence
attagaaaaatctacttataaatac

SEQ ID NO: 8472 - DNA, 25 bp, Artificial sequence
  SiRNA target sequence
ttagaaaaatctacttataaataca

SEQ ID NO: 8473 - DNA, 25 bp, Artificial sequence
  SiRNA target sequence
tagaaaaatctacttataaatacag

SEQ ID NO: 8474 - DNA, 25 bp, Artificial sequence
  SiRNA target sequence
agaaaaatctacttataaatacagt

SEQ ID NO: 8475 - DNA, 25 bp, Artificial sequence
  SiRNA target sequence
gaaaaatctacttataaatacagta

SEQ ID NO: 8476 - DNA, 25 bp, Artificial sequence
  SiRNA target sequence
aaaaatctacttataaatacagtat

SEQ ID NO: 8477 - DNA, 25 bp, Artificial sequence
  SiRNA target sequence
aaaatctacttataaatacagtatc

SEQ ID NO: 8478 - DNA, 25 bp, Artificial sequence
  SiRNA target sequence
aaatctacttataaatacagtatct

SEQ ID NO: 8479 - DNA, 25 bp, Artificial sequence
  SiRNA target sequence
aatctacttataaatacagtatctt

SEQ ID NO: 8480 - DNA, 25 bp, Artificial sequence
  SiRNA target sequence
atctacttataaatacagtatcttg

SEQ ID NO: 8481 - DNA, 25 bp, Artificial sequence
  SiRNA target sequence
tctacttataaatacagtatcttgt

SEQ ID NO: 8482 - DNA, 25 bp, Artificial sequence
  SiRNA target sequence
ctacttataaatacagtatcttgta

SEQ ID NO: 8483 - DNA, 25 bp, Artificial sequence
  SiRNA target sequence
tacttataaatacagtatcttgtat

SEQ ID NO: 8484 - DNA, 25 bp, Artificial sequence
  SiRNA target sequence
acttataaatacagtatcttgtata

SEQ ID NO: 8485 - DNA, 25 bp, Artificial sequence
  SiRNA target sequence
cttataaatacagtatcttgtatag

SEQ ID NO: 8486 - DNA, 25 bp, Artificial sequence
  SiRNA target sequence
ttataaatacagtatcttgtataga

SEQ ID NO: 8487 - DNA, 25 bp, Artificial sequence
  SiRNA target sequence
tataaatacagtatcttgtatagag

SEQ ID NO: 8488 - DNA, 25 bp, Artificial sequence
  SiRNA target sequence
ataaatacagtatcttgtatagagc

SEQ ID NO: 8489 - DNA, 25 bp, Artificial sequence
  SiRNA target sequence
taaatacagtatcttgtatagagca

SEQ ID NO: 8490 - DNA, 25 bp, Artificial sequence
  SiRNA target sequence
aaatacagtatcttgtatagagcat

SEQ ID NO: 8491 - DNA, 25 bp, Artificial sequence
  SiRNA target sequence
aatacagtatcttgtatagagcata

SEQ ID NO: 8492 - DNA, 25 bp, Artificial sequence
  SiRNA target sequence
atacagtatcttgtatagagcatat

SEQ ID NO: 8493 - DNA, 25 bp, Artificial sequence
  SiRNA target sequence
tacagtatcttgtatagagcatatt

SEQ ID NO: 8494 - DNA, 25 bp, Artificial sequence
  SiRNA target sequence
acagtatcttgtatagagcatattt

SEQ ID NO: 8495 - DNA, 25 bp, Artificial sequence
  SiRNA target sequence
cagtatcttgtatagagcatatttt

SEQ ID NO: 8496 - DNA, 25 bp, Artificial sequence
  SiRNA target sequence
agtatcttgtatagagcatattttc

SEQ ID NO: 8497 - DNA, 25 bp, Artificial sequence
  SiRNA target sequence
gtatcttgtatagagcatattttct

SEQ ID NO: 8498 - DNA, 25 bp, Artificial sequence
  SiRNA target sequence
tatcttgtatagagcatattttctt

SEQ ID NO: 8499 - DNA, 25 bp, Artificial sequence
  SiRNA target sequence
atcttgtatagagcatattttctta

SEQ ID NO: 8500 - DNA, 25 bp, Artificial sequence
  SiRNA target sequence
tcttgtatagagcatattttcttac

SEQ ID NO: 8501 - DNA, 25 bp, Artificial sequence
  SiRNA target sequence
cttgtatagagcatattttcttaca

SEQ ID NO: 8502 - DNA, 25 bp, Artificial sequence
  SiRNA target sequence
ttgtatagagcatattttcttacat

SEQ ID NO: 8503 - DNA, 25 bp, Artificial sequence
  SiRNA target sequence
tgtatagagcatattttcttacatt

SEQ ID NO: 8504 - DNA, 25 bp, Artificial sequence
  SiRNA target sequence
gtatagagcatattttcttacattg

SEQ ID NO: 8505 - DNA, 25 bp, Artificial sequence
  SiRNA target sequence
tatagagcatattttcttacattga

SEQ ID NO: 8506 - DNA, 25 bp, Artificial sequence
  SiRNA target sequence
atagagcatattttcttacattgaa

SEQ ID NO: 8507 - DNA, 25 bp, Artificial sequence
  SiRNA target sequence
tagagcatattttcttacattgaag

SEQ ID NO: 8508 - DNA, 25 bp, Artificial sequence
  SiRNA target sequence
agagcatattttcttacattgaaga

SEQ ID NO: 8509 - DNA, 25 bp, Artificial sequence
  SiRNA target sequence
gagcatattttcttacattgaagaa

SEQ ID NO: 8510 - DNA, 25 bp, Artificial sequence
  SiRNA target sequence
agcatattttcttacattgaagaat

SEQ ID NO: 8511 - DNA, 25 bp, Artificial sequence
  SiRNA target sequence
gcatattttcttacattgaagaatg

SEQ ID NO: 8512 - DNA, 25 bp, Artificial sequence
  SiRNA target sequence
catattttcttacattgaagaatga

SEQ ID NO: 8513 - DNA, 25 bp, Artificial sequence
  SiRNA target sequence
atattttcttacattgaagaatgaa

SEQ ID NO: 8514 - DNA, 25 bp, Artificial sequence
  SiRNA target sequence
tattttcttacattgaagaatgaat

SEQ ID NO: 8515 - DNA, 25 bp, Artificial sequence
  SiRNA target sequence
attttcttacattgaagaatgaata

SEQ ID NO: 8516 - DNA, 25 bp, Artificial sequence
  SiRNA target sequence
ttttcttacattgaagaatgaatat

SEQ ID NO: 8517 - DNA, 25 bp, Artificial sequence
  SiRNA target sequence
tttcttacattgaagaatgaatata

SEQ ID NO: 8518 - DNA, 25 bp, Artificial sequence
  SiRNA target sequence
ttcttacattgaagaatgaatatat

SEQ ID NO: 8519 - DNA, 25 bp, Artificial sequence
  SiRNA target sequence
tcttacattgaagaatgaatatatt

SEQ ID NO: 8520 - DNA, 25 bp, Artificial sequence
  SiRNA target sequence
cttacattgaagaatgaatatattt

SEQ ID NO: 8521 - DNA, 25 bp, Artificial sequence
  SiRNA target sequence
ttacattgaagaatgaatatatttc

SEQ ID NO: 8522 - DNA, 25 bp, Artificial sequence
  SiRNA target sequence
tacattgaagaatgaatatatttca

SEQ ID NO: 8523 - DNA, 25 bp, Artificial sequence
  SiRNA target sequence
acattgaagaatgaatatatttcat

SEQ ID NO: 8524 - DNA, 25 bp, Artificial sequence
  SiRNA target sequence
cattgaagaatgaatatatttcatc

SEQ ID NO: 8525 - DNA, 25 bp, Artificial sequence
  SiRNA target sequence
attgaagaatgaatatatttcatct

SEQ ID NO: 8526 - DNA, 25 bp, Artificial sequence
  SiRNA target sequence
ttgaagaatgaatatatttcatctt

SEQ ID NO: 8527 - DNA, 25 bp, Artificial sequence
  SiRNA target sequence
tgaagaatgaatatatttcatcttc

SEQ ID NO: 8528 - DNA, 25 bp, Artificial sequence
  SiRNA target sequence
gaagaatgaatatatttcatcttca

SEQ ID NO: 8529 - DNA, 25 bp, Artificial sequence
  SiRNA target sequence
aagaatgaatatatttcatcttcat

SEQ ID NO: 8530 - DNA, 25 bp, Artificial sequence
  SiRNA target sequence
agaatgaatatatttcatcttcatt

SEQ ID NO: 8531 - DNA, 25 bp, Artificial sequence
  SiRNA target sequence
gaatgaatatatttcatcttcattg

SEQ ID NO: 8532 - DNA, 25 bp, Artificial sequence
  SiRNA target sequence
aatgaatatatttcatcttcattgc

SEQ ID NO: 8533 - DNA, 25 bp, Artificial sequence
  SiRNA target sequence
atgaatatatttcatcttcattgcc

SEQ ID NO: 8534 - DNA, 25 bp, Artificial sequence
  SiRNA target sequence
tgaatatatttcatcttcattgcct

SEQ ID NO: 8535 - DNA, 25 bp, Artificial sequence
  SiRNA target sequence
gaatatatttcatcttcattgcctt

SEQ ID NO: 8536 - DNA, 25 bp, Artificial sequence
  SiRNA target sequence
aatatatttcatcttcattgccttt

SEQ ID NO: 8537 - DNA, 25 bp, Artificial sequence
  SiRNA target sequence
atatatttcatcttcattgccttta

SEQ ID NO: 8538 - DNA, 25 bp, Artificial sequence
  SiRNA target sequence
tatatttcatcttcattgcctttag

SEQ ID NO: 8539 - DNA, 25 bp, Artificial sequence
  SiRNA target sequence
atatttcatcttcattgcctttaga

SEQ ID NO: 8540 - DNA, 25 bp, Artificial sequence
  SiRNA target sequence
tatttcatcttcattgcctttagat

SEQ ID NO: 8541 - DNA, 25 bp, Artificial sequence
  SiRNA target sequence
atttcatcttcattgcctttagatg

SEQ ID NO: 8542 - DNA, 25 bp, Artificial sequence
  SiRNA target sequence
tttcatcttcattgcctttagatga

SEQ ID NO: 8543 - DNA, 25 bp, Artificial sequence
  SiRNA target sequence
ttcatcttcattgcctttagatgac

SEQ ID NO: 8544 - DNA, 25 bp, Artificial sequence
  SiRNA target sequence
tcatcttcattgcctttagatgacg

SEQ ID NO: 8545 - DNA, 25 bp, Artificial sequence
  SiRNA target sequence
catcttcattgcctttagatgacga

SEQ ID NO: 8546 - DNA, 25 bp, Artificial sequence
  SiRNA target sequence
atcttcattgcctttagatgacgag

SEQ ID NO: 8547 - DNA, 25 bp, Artificial sequence
  SiRNA target sequence
tcttcattgcctttagatgacgaga

SEQ ID NO: 8548 - DNA, 25 bp, Artificial sequence
  SiRNA target sequence
cttcattgcctttagatgacgagat

SEQ ID NO: 8549 - DNA, 25 bp, Artificial sequence
  SiRNA target sequence
ttcattgcctttagatgacgagatt

SEQ ID NO: 8550 - DNA, 25 bp, Artificial sequence
  SiRNA target sequence
tcattgcctttagatgacgagatta

SEQ ID NO: 8551 - DNA, 25 bp, Artificial sequence
  SiRNA target sequence
cattgcctttagatgacgagattac

SEQ ID NO: 8552 - DNA, 25 bp, Artificial sequence
  SiRNA target sequence
attgcctttagatgacgagattact

SEQ ID NO: 8553 - DNA, 25 bp, Artificial sequence
  SiRNA target sequence
ttgcctttagatgacgagattacta

SEQ ID NO: 8554 - DNA, 25 bp, Artificial sequence
  SiRNA target sequence
tgcctttagatgacgagattactac

SEQ ID NO: 8555 - DNA, 25 bp, Artificial sequence
  SiRNA target sequence
gcctttagatgacgagattactacg

SEQ ID NO: 8556 - DNA, 25 bp, Artificial sequence
  SiRNA target sequence
cctttagatgacgagattactacgc

SEQ ID NO: 8557 - DNA, 25 bp, Artificial sequence
  SiRNA target sequence
ctttagatgacgagattactacgct

SEQ ID NO: 8558 - DNA, 25 bp, Artificial sequence
  SiRNA target sequence
tttagatgacgagattactacgctt

SEQ ID NO: 8559 - DNA, 25 bp, Artificial sequence
  SiRNA target sequence
ttagatgacgagattactacgcttt

SEQ ID NO: 8560 - DNA, 25 bp, Artificial sequence
  SiRNA target sequence
tagatgacgagattactacgcttta

SEQ ID NO: 8561 - DNA, 25 bp, Artificial sequence
  SiRNA target sequence
agatgacgagattactacgctttac

SEQ ID NO: 8562 - DNA, 25 bp, Artificial sequence
  SiRNA target sequence
gatgacgagattactacgctttact

SEQ ID NO: 8563 - DNA, 25 bp, Artificial sequence
  SiRNA target sequence
atgacgagattactacgctttactt

SEQ ID NO: 8564 - DNA, 25 bp, Artificial sequence
  SiRNA target sequence
tgacgagattactacgctttacttg

SEQ ID NO: 8565 - DNA, 25 bp, Artificial sequence
  SiRNA target sequence
gacgagattactacgctttacttgt

SEQ ID NO: 8566 - DNA, 25 bp, Artificial sequence
  SiRNA target sequence
acgagattactacgctttacttgta

SEQ ID NO: 8567 - DNA, 25 bp, Artificial sequence
  SiRNA target sequence
cgagattactacgctttacttgtat

SEQ ID NO: 8568 - DNA, 25 bp, Artificial sequence
  SiRNA target sequence
gagattactacgctttacttgtatt

SEQ ID NO: 8569 - DNA, 25 bp, Artificial sequence
  SiRNA target sequence
agattactacgctttacttgtattc

SEQ ID NO: 8570 - DNA, 25 bp, Artificial sequence
  SiRNA target sequence
gattactacgctttacttgtattct

SEQ ID NO: 8571 - DNA, 25 bp, Artificial sequence
  SiRNA target sequence
attactacgctttacttgtattcta

SEQ ID NO: 8572 - DNA, 25 bp, Artificial sequence
  SiRNA target sequence
ttactacgctttacttgtattctaa

SEQ ID NO: 8573 - DNA, 25 bp, Artificial sequence
  SiRNA target sequence
tactacgctttacttgtattctaag

SEQ ID NO: 8574 - DNA, 25 bp, Artificial sequence
  SiRNA target sequence
actacgctttacttgtattctaaga

SEQ ID NO: 8575 - DNA, 25 bp, Artificial sequence
  SiRNA target sequence
ctacgctttacttgtattctaagat

SEQ ID NO: 8576 - DNA, 25 bp, Artificial sequence
  SiRNA target sequence
tacgctttacttgtattctaagatt

SEQ ID NO: 8577 - DNA, 25 bp, Artificial sequence
  SiRNA target sequence
acgctttacttgtattctaagattt

SEQ ID NO: 8578 - DNA, 25 bp, Artificial sequence
  SiRNA target sequence
cgctttacttgtattctaagatttt

SEQ ID NO: 8579 - DNA, 25 bp, Artificial sequence
  SiRNA target sequence
gctttacttgtattctaagattttt

SEQ ID NO: 8580 - DNA, 25 bp, Artificial sequence
  SiRNA target sequence
ctttacttgtattctaagattttta

SEQ ID NO: 8581 - DNA, 25 bp, Artificial sequence
  SiRNA target sequence
tttacttgtattctaagatttttaa

SEQ ID NO: 8582 - DNA, 25 bp, Artificial sequence
  SiRNA target sequence
ttacttgtattctaagatttttaaa

SEQ ID NO: 8583 - DNA, 25 bp, Artificial sequence
  SiRNA target sequence
tacttgtattctaagatttttaaag

SEQ ID NO: 8584 - DNA, 25 bp, Artificial sequence
  SiRNA target sequence
acttgtattctaagatttttaaaga

SEQ ID NO: 8585 - DNA, 25 bp, Artificial sequence
  SiRNA target sequence
cttgtattctaagatttttaaagat

SEQ ID NO: 8586 - DNA, 25 bp, Artificial sequence
  SiRNA target sequence
ttgtattctaagatttttaaagata

SEQ ID NO: 8587 - DNA, 25 bp, Artificial sequence
  SiRNA target sequence
tgtattctaagatttttaaagataa

SEQ ID NO: 8588 - DNA, 25 bp, Artificial sequence
  SiRNA target sequence
gtattctaagatttttaaagataaa

SEQ ID NO: 8589 - DNA, 25 bp, Artificial sequence
  SiRNA target sequence
tattctaagatttttaaagataaat

SEQ ID NO: 8590 - DNA, 25 bp, Artificial sequence
  SiRNA target sequence
attctaagatttttaaagataaatc

SEQ ID NO: 8591 - DNA, 25 bp, Artificial sequence
  SiRNA target sequence
ttctaagatttttaaagataaatct

SEQ ID NO: 8592 - DNA, 25 bp, Artificial sequence
  SiRNA target sequence
tctaagatttttaaagataaatctg

SEQ ID NO: 8593 - DNA, 25 bp, Artificial sequence
  SiRNA target sequence
ctaagatttttaaagataaatctga

SEQ ID NO: 8594 - DNA, 25 bp, Artificial sequence
  SiRNA target sequence
taagatttttaaagataaatctgat

SEQ ID NO: 8595 - DNA, 25 bp, Artificial sequence
  SiRNA target sequence
aagatttttaaagataaatctgata

SEQ ID NO: 8596 - DNA, 25 bp, Artificial sequence
  SiRNA target sequence
agatttttaaagataaatctgatac

SEQ ID NO: 8597 - DNA, 25 bp, Artificial sequence
  SiRNA target sequence
gatttttaaagataaatctgatact

SEQ ID NO: 8598 - DNA, 25 bp, Artificial sequence
  SiRNA target sequence
atttttaaagataaatctgatactt

SEQ ID NO: 8599 - DNA, 25 bp, Artificial sequence
  SiRNA target sequence
tttttaaagataaatctgatactta

SEQ ID NO: 8600 - DNA, 25 bp, Artificial sequence
  SiRNA target sequence
ttttaaagataaatctgatacttac

SEQ ID NO: 8601 - DNA, 25 bp, Artificial sequence
  SiRNA target sequence
tttaaagataaatctgatacttacc

SEQ ID NO: 8602 - DNA, 25 bp, Artificial sequence
  SiRNA target sequence
ttaaagataaatctgatacttacct

SEQ ID NO: 8603 - DNA, 25 bp, Artificial sequence
  SiRNA target sequence
taaagataaatctgatacttacctt

SEQ ID NO: 8604 - DNA, 25 bp, Artificial sequence
  SiRNA target sequence
aaagataaatctgatacttacctta

SEQ ID NO: 8605 - DNA, 25 bp, Artificial sequence
  SiRNA target sequence
aagataaatctgatacttaccttaa

SEQ ID NO: 8606 - DNA, 25 bp, Artificial sequence
  SiRNA target sequence
agataaatctgatacttaccttaaa

SEQ ID NO: 8607 - DNA, 25 bp, Artificial sequence
  SiRNA target sequence
gataaatctgatacttaccttaaat

SEQ ID NO: 8608 - DNA, 25 bp, Artificial sequence
  SiRNA target sequence
ataaatctgatacttaccttaaatc

SEQ ID NO: 8609 - DNA, 25 bp, Artificial sequence
  SiRNA target sequence
taaatctgatacttaccttaaatct

SEQ ID NO: 8610 - DNA, 25 bp, Artificial sequence
  SiRNA target sequence
aaatctgatacttaccttaaatctg

SEQ ID NO: 8611 - DNA, 25 bp, Artificial sequence
  SiRNA target sequence
aatctgatacttaccttaaatctgc

SEQ ID NO: 8612 - DNA, 25 bp, Artificial sequence
  SiRNA target sequence
atctgatacttaccttaaatctgct

SEQ ID NO: 8613 - DNA, 25 bp, Artificial sequence
  SiRNA target sequence
tctgatacttaccttaaatctgcta

SEQ ID NO: 8614 - DNA, 25 bp, Artificial sequence
  SiRNA target sequence
ctgatacttaccttaaatctgctat

SEQ ID NO: 8615 - DNA, 25 bp, Artificial sequence
  SiRNA target sequence
tgatacttaccttaaatctgctata

SEQ ID NO: 8616 - DNA, 25 bp, Artificial sequence
  SiRNA target sequence
gatacttaccttaaatctgctatag

SEQ ID NO: 8617 - DNA, 25 bp, Artificial sequence
  SiRNA target sequence
atacttaccttaaatctgctataga

SEQ ID NO: 8618 - DNA, 25 bp, Artificial sequence
  SiRNA target sequence
tacttaccttaaatctgctatagat

SEQ ID NO: 8619 - DNA, 25 bp, Artificial sequence
  SiRNA target sequence
acttaccttaaatctgctatagata

SEQ ID NO: 8620 - DNA, 25 bp, Artificial sequence
  SiRNA target sequence
cttaccttaaatctgctatagataa

SEQ ID NO: 8621 - DNA, 25 bp, Artificial sequence
  SiRNA target sequence
ttaccttaaatctgctatagataaa

SEQ ID NO: 8622 - DNA, 25 bp, Artificial sequence
  SiRNA target sequence
taccttaaatctgctatagataaat

SEQ ID NO: 8623 - DNA, 25 bp, Artificial sequence
  SiRNA target sequence
accttaaatctgctatagataaatc

SEQ ID NO: 8624 - DNA, 25 bp, Artificial sequence
  SiRNA target sequence
ccttaaatctgctatagataaatca

SEQ ID NO: 8625 - DNA, 25 bp, Artificial sequence
  SiRNA target sequence
cttaaatctgctatagataaatcag

SEQ ID NO: 8626 - DNA, 25 bp, Artificial sequence
  SiRNA target sequence
ttaaatctgctatagataaatcagt

SEQ ID NO: 8627 - DNA, 25 bp, Artificial sequence
  SiRNA target sequence
taaatctgctatagataaatcagta

SEQ ID NO: 8628 - DNA, 25 bp, Artificial sequence
  SiRNA target sequence
aaatctgctatagataaatcagtag

SEQ ID NO: 8629 - DNA, 25 bp, Artificial sequence
  SiRNA target sequence
aatctgctatagataaatcagtaga

SEQ ID NO: 8630 - DNA, 25 bp, Artificial sequence
  SiRNA target sequence
atctgctatagataaatcagtagat

SEQ ID NO: 8631 - DNA, 25 bp, Artificial sequence
  SiRNA target sequence
tctgctatagataaatcagtagatc

SEQ ID NO: 8632 - DNA, 25 bp, Artificial sequence
  SiRNA target sequence
ctgctatagataaatcagtagatct

SEQ ID NO: 8633 - DNA, 25 bp, Artificial sequence
  SiRNA target sequence
tgctatagataaatcagtagatcta

SEQ ID NO: 8634 - DNA, 25 bp, Artificial sequence
  SiRNA target sequence
gctatagataaatcagtagatctac

SEQ ID NO: 8635 - DNA, 25 bp, Artificial sequence
  SiRNA target sequence
ctatagataaatcagtagatctacc

SEQ ID NO: 8636 - DNA, 25 bp, Artificial sequence
  SiRNA target sequence
tatagataaatcagtagatctacct

SEQ ID NO: 8637 - DNA, 25 bp, Artificial sequence
  SiRNA target sequence
atagataaatcagtagatctaccta

SEQ ID NO: 8638 - DNA, 25 bp, Artificial sequence
  SiRNA target sequence
tagataaatcagtagatctacctat

SEQ ID NO: 8639 - DNA, 25 bp, Artificial sequence
  SiRNA target sequence
agataaatcagtagatctacctatt

SEQ ID NO: 8640 - DNA, 25 bp, Artificial sequence
  SiRNA target sequence
gataaatcagtagatctacctattg

SEQ ID NO: 8641 - DNA, 25 bp, Artificial sequence
  SiRNA target sequence
ataaatcagtagatctacctattga

SEQ ID NO: 8642 - DNA, 25 bp, Artificial sequence
  SiRNA target sequence
taaatcagtagatctacctattgaa

SEQ ID NO: 8643 - DNA, 25 bp, Artificial sequence
  SiRNA target sequence
aaatcagtagatctacctattgaac

SEQ ID NO: 8644 - DNA, 25 bp, Artificial sequence
  SiRNA target sequence
aatcagtagatctacctattgaaca

SEQ ID NO: 8645 - DNA, 25 bp, Artificial sequence
  SiRNA target sequence
atcagtagatctacctattgaacag

SEQ ID NO: 8646 - DNA, 25 bp, Artificial sequence
  SiRNA target sequence
tcagtagatctacctattgaacaga

SEQ ID NO: 8647 - DNA, 25 bp, Artificial sequence
  SiRNA target sequence
cagtagatctacctattgaacagaa

SEQ ID NO: 8648 - DNA, 25 bp, Artificial sequence
  SiRNA target sequence
agtagatctacctattgaacagaaa

SEQ ID NO: 8649 - DNA, 25 bp, Artificial sequence
  SiRNA target sequence
gtagatctacctattgaacagaaag

SEQ ID NO: 8650 - DNA, 25 bp, Artificial sequence
  SiRNA target sequence
tagatctacctattgaacagaaaga

SEQ ID NO: 8651 - DNA, 25 bp, Artificial sequence
  SiRNA target sequence
agatctacctattgaacagaaagac

SEQ ID NO: 8652 - DNA, 25 bp, Artificial sequence
  SiRNA target sequence
gatctacctattgaacagaaagact

SEQ ID NO: 8653 - DNA, 25 bp, Artificial sequence
  SiRNA target sequence
atctacctattgaacagaaagactt

SEQ ID NO: 8654 - DNA, 25 bp, Artificial sequence
  SiRNA target sequence
tctacctattgaacagaaagacttt

SEQ ID NO: 8655 - DNA, 25 bp, Artificial sequence
  SiRNA target sequence
ctacctattgaacagaaagactttc

SEQ ID NO: 8656 - DNA, 25 bp, Artificial sequence
  SiRNA target sequence
tacctattgaacagaaagactttct

SEQ ID NO: 8657 - DNA, 25 bp, Artificial sequence
  SiRNA target sequence
acctattgaacagaaagactttctg

SEQ ID NO: 8658 - DNA, 25 bp, Artificial sequence
  SiRNA target sequence
cctattgaacagaaagactttctgt

SEQ ID NO: 8659 - DNA, 25 bp, Artificial sequence
  SiRNA target sequence
ctattgaacagaaagactttctgta

SEQ ID NO: 8660 - DNA, 25 bp, Artificial sequence
  SiRNA target sequence
tattgaacagaaagactttctgtac

SEQ ID NO: 8661 - DNA, 25 bp, Artificial sequence
  SiRNA target sequence
attgaacagaaagactttctgtacg

SEQ ID NO: 8662 - DNA, 25 bp, Artificial sequence
  SiRNA target sequence
ttgaacagaaagactttctgtacgt

SEQ ID NO: 8663 - DNA, 25 bp, Artificial sequence
  SiRNA target sequence
tgaacagaaagactttctgtacgta

SEQ ID NO: 8664 - DNA, 25 bp, Artificial sequence
  SiRNA target sequence
gaacagaaagactttctgtacgtag

SEQ ID NO: 8665 - DNA, 25 bp, Artificial sequence
  SiRNA target sequence
aacagaaagactttctgtacgtaga

SEQ ID NO: 8666 - DNA, 25 bp, Artificial sequence
  SiRNA target sequence
acagaaagactttctgtacgtagat

SEQ ID NO: 8667 - DNA, 25 bp, Artificial sequence
  SiRNA target sequence
cagaaagactttctgtacgtagatc

SEQ ID NO: 8668 - DNA, 25 bp, Artificial sequence
  SiRNA target sequence
agaaagactttctgtacgtagatct

SEQ ID NO: 8669 - DNA, 25 bp, Artificial sequence
  SiRNA target sequence
gaaagactttctgtacgtagatctt

SEQ ID NO: 8670 - DNA, 25 bp, Artificial sequence
  SiRNA target sequence
aaagactttctgtacgtagatcttc

SEQ ID NO: 8671 - DNA, 25 bp, Artificial sequence
  SiRNA target sequence
aagactttctgtacgtagatcttct

SEQ ID NO: 8672 - DNA, 25 bp, Artificial sequence
  SiRNA target sequence
agactttctgtacgtagatcttctt

SEQ ID NO: 8673 - DNA, 25 bp, Artificial sequence
  SiRNA target sequence
gactttctgtacgtagatcttcttg

SEQ ID NO: 8674 - DNA, 25 bp, Artificial sequence
  SiRNA target sequence
actttctgtacgtagatcttcttgt

SEQ ID NO: 8675 - DNA, 25 bp, Artificial sequence
  SiRNA target sequence
ctttctgtacgtagatcttcttgta

SEQ ID NO: 8676 - DNA, 25 bp, Artificial sequence
  SiRNA target sequence
tttctgtacgtagatcttcttgtat

SEQ ID NO: 8677 - DNA, 25 bp, Artificial sequence
  SiRNA target sequence
ttctgtacgtagatcttcttgtatt

SEQ ID NO: 8678 - DNA, 25 bp, Artificial sequence
  SiRNA target sequence
tctgtacgtagatcttcttgtattt

SEQ ID NO: 8679 - DNA, 25 bp, Artificial sequence
  SiRNA target sequence
ctgtacgtagatcttcttgtatttt

SEQ ID NO: 8680 - DNA, 25 bp, Artificial sequence
  SiRNA target sequence
tgtacgtagatcttcttgtatttta

SEQ ID NO: 8681 - DNA, 25 bp, Artificial sequence
  SiRNA target sequence
gtacgtagatcttcttgtattttac

SEQ ID NO: 8682 - DNA, 25 bp, Artificial sequence
  SiRNA target sequence
tacgtagatcttcttgtattttaca

SEQ ID NO: 8683 - DNA, 25 bp, Artificial sequence
  SiRNA target sequence
acgtagatcttcttgtattttacat

SEQ ID NO: 8684 - DNA, 25 bp, Artificial sequence
  SiRNA target sequence
cgtagatcttcttgtattttacatt

SEQ ID NO: 8685 - DNA, 25 bp, Artificial sequence
  SiRNA target sequence
gtagatcttcttgtattttacattt

SEQ ID NO: 8686 - DNA, 25 bp, Artificial sequence
  SiRNA target sequence
tagatcttcttgtattttacatttc

SEQ ID NO: 8687 - DNA, 25 bp, Artificial sequence
  SiRNA target sequence
agatcttcttgtattttacatttct

SEQ ID NO: 8688 - DNA, 25 bp, Artificial sequence
  SiRNA target sequence
gatcttcttgtattttacatttcta

SEQ ID NO: 8689 - DNA, 25 bp, Artificial sequence
  SiRNA target sequence
atcttcttgtattttacatttctaa

SEQ ID NO: 8690 - DNA, 25 bp, Artificial sequence
  SiRNA target sequence
tcttcttgtattttacatttctaaa

SEQ ID NO: 8691 - DNA, 25 bp, Artificial sequence
  SiRNA target sequence
cttcttgtattttacatttctaaaa

SEQ ID NO: 8692 - DNA, 25 bp, Artificial sequence
  SiRNA target sequence
ttcttgtattttacatttctaaaaa

SEQ ID NO: 8693 - DNA, 25 bp, Artificial sequence
  SiRNA target sequence
tcttgtattttacatttctaaaaag

SEQ ID NO: 8694 - DNA, 25 bp, Artificial sequence
  SiRNA target sequence
cttgtattttacatttctaaaaagg

SEQ ID NO: 8695 - DNA, 25 bp, Artificial sequence
  SiRNA target sequence
ttgtattttacatttctaaaaagga

SEQ ID NO: 8696 - DNA, 25 bp, Artificial sequence
  SiRNA target sequence
tgtattttacatttctaaaaaggat

SEQ ID NO: 8697 - DNA, 25 bp, Artificial sequence
  SiRNA target sequence
gtattttacatttctaaaaaggatg

SEQ ID NO: 8698 - DNA, 25 bp, Artificial sequence
  SiRNA target sequence
tattttacatttctaaaaaggatgt

SEQ ID NO: 8699 - DNA, 25 bp, Artificial sequence
  SiRNA target sequence
attttacatttctaaaaaggatgtt

SEQ ID NO: 8700 - DNA, 25 bp, Artificial sequence
  SiRNA target sequence
ttttacatttctaaaaaggatgttg

SEQ ID NO: 8701 - DNA, 25 bp, Artificial sequence
  SiRNA target sequence
tttacatttctaaaaaggatgttga

SEQ ID NO: 8702 - DNA, 25 bp, Artificial sequence
  SiRNA target sequence
ttacatttctaaaaaggatgttgaa

SEQ ID NO: 8703 - DNA, 25 bp, Artificial sequence
  SiRNA target sequence
tacatttctaaaaaggatgttgaaa

SEQ ID NO: 8704 - DNA, 25 bp, Artificial sequence
  SiRNA target sequence
acatttctaaaaaggatgttgaaaa

SEQ ID NO: 8705 - DNA, 25 bp, Artificial sequence
  SiRNA target sequence
catttctaaaaaggatgttgaaaaa

SEQ ID NO: 8706 - DNA, 25 bp, Artificial sequence
  SiRNA target sequence
atttctaaaaaggatgttgaaaaag

SEQ ID NO: 8707 - DNA, 25 bp, Artificial sequence
  SiRNA target sequence
tttctaaaaaggatgttgaaaaagt

SEQ ID NO: 8708 - DNA, 25 bp, Artificial sequence
  SiRNA target sequence
ttctaaaaaggatgttgaaaaagtt

SEQ ID NO: 8709 - DNA, 25 bp, Artificial sequence
  SiRNA target sequence
tctaaaaaggatgttgaaaaagtta

SEQ ID NO: 8710 - DNA, 25 bp, Artificial sequence
  SiRNA target sequence
ctaaaaaggatgttgaaaaagttaa

SEQ ID NO: 8711 - DNA, 25 bp, Artificial sequence
  SiRNA target sequence
taaaaaggatgttgaaaaagttaat

SEQ ID NO: 8712 - DNA, 25 bp, Artificial sequence
  SiRNA target sequence
aaaaaggatgttgaaaaagttaatg

SEQ ID NO: 8713 - DNA, 25 bp, Artificial sequence
  SiRNA target sequence
aaaaggatgttgaaaaagttaatga

SEQ ID NO: 8714 - DNA, 25 bp, Artificial sequence
  SiRNA target sequence
aaaggatgttgaaaaagttaatgaa

SEQ ID NO: 8715 - DNA, 25 bp, Artificial sequence
  SiRNA target sequence
aaggatgttgaaaaagttaatgaaa

SEQ ID NO: 8716 - DNA, 25 bp, Artificial sequence
  SiRNA target sequence
aggatgttgaaaaagttaatgaaac

SEQ ID NO: 8717 - DNA, 25 bp, Artificial sequence
  SiRNA target sequence
ggatgttgaaaaagttaatgaaaca

SEQ ID NO: 8718 - DNA, 25 bp, Artificial sequence
  SiRNA target sequence
gatgttgaaaaagttaatgaaacaa

SEQ ID NO: 8719 - DNA, 25 bp, Artificial sequence
  SiRNA target sequence
atgttgaaaaagttaatgaaacaat

SEQ ID NO: 8720 - DNA, 25 bp, Artificial sequence
  SiRNA target sequence
tgttgaaaaagttaatgaaacaatt

SEQ ID NO: 8721 - DNA, 25 bp, Artificial sequence
  SiRNA target sequence
gttgaaaaagttaatgaaacaatta

SEQ ID NO: 8722 - DNA, 25 bp, Artificial sequence
  SiRNA target sequence
ttgaaaaagttaatgaaacaattaa

SEQ ID NO: 8723 - DNA, 25 bp, Artificial sequence
  SiRNA target sequence
tgaaaaagttaatgaaacaattaat

SEQ ID NO: 8724 - DNA, 25 bp, Artificial sequence
  SiRNA target sequence
gaaaaagttaatgaaacaattaata

SEQ ID NO: 8725 - DNA, 25 bp, Artificial sequence
  SiRNA target sequence
aaaaagttaatgaaacaattaataa

SEQ ID NO: 8726 - DNA, 25 bp, Artificial sequence
  SiRNA target sequence
aaaagttaatgaaacaattaataat

SEQ ID NO: 8727 - DNA, 25 bp, Artificial sequence
  SiRNA target sequence
aaagttaatgaaacaattaataatt

SEQ ID NO: 8728 - DNA, 25 bp, Artificial sequence
  SiRNA target sequence
aagttaatgaaacaattaataattt

SEQ ID NO: 8729 - DNA, 25 bp, Artificial sequence
  SiRNA target sequence
agttaatgaaacaattaataattta

SEQ ID NO: 8730 - DNA, 25 bp, Artificial sequence
  SiRNA target sequence
gttaatgaaacaattaataatttaa

SEQ ID NO: 8731 - DNA, 25 bp, Artificial sequence
  SiRNA target sequence
ttaatgaaacaattaataatttaaa

SEQ ID NO: 8732 - DNA, 25 bp, Artificial sequence
  SiRNA target sequence
taatgaaacaattaataatttaaaa

SEQ ID NO: 8733 - DNA, 25 bp, Artificial sequence
  SiRNA target sequence
aatgaaacaattaataatttaaaag

SEQ ID NO: 8734 - DNA, 25 bp, Artificial sequence
  SiRNA target sequence
atgaaacaattaataatttaaaaga

SEQ ID NO: 8735 - DNA, 25 bp, Artificial sequence
  SiRNA target sequence
tgaaacaattaataatttaaaagag

SEQ ID NO: 8736 - DNA, 25 bp, Artificial sequence
  SiRNA target sequence
gaaacaattaataatttaaaagaga

SEQ ID NO: 8737 - DNA, 25 bp, Artificial sequence
  SiRNA target sequence
aaacaattaataatttaaaagagac

SEQ ID NO: 8738 - DNA, 25 bp, Artificial sequence
  SiRNA target sequence
aacaattaataatttaaaagagact

SEQ ID NO: 8739 - DNA, 25 bp, Artificial sequence
  SiRNA target sequence
acaattaataatttaaaagagactc

SEQ ID NO: 8740 - DNA, 25 bp, Artificial sequence
  SiRNA target sequence
caattaataatttaaaagagactct

SEQ ID NO: 8741 - DNA, 25 bp, Artificial sequence
  SiRNA target sequence
aattaataatttaaaagagactctt

SEQ ID NO: 8742 - DNA, 25 bp, Artificial sequence
  SiRNA target sequence
attaataatttaaaagagactctta

SEQ ID NO: 8743 - DNA, 25 bp, Artificial sequence
  SiRNA target sequence
ttaataatttaaaagagactcttac

SEQ ID NO: 8744 - DNA, 25 bp, Artificial sequence
  SiRNA target sequence
taataatttaaaagagactcttacc

SEQ ID NO: 8745 - DNA, 25 bp, Artificial sequence
  SiRNA target sequence
aataatttaaaagagactcttaccc

SEQ ID NO: 8746 - DNA, 25 bp, Artificial sequence
  SiRNA target sequence
ataatttaaaagagactcttacccc

SEQ ID NO: 8747 - DNA, 25 bp, Artificial sequence
  SiRNA target sequence
taatttaaaagagactcttaccccc

SEQ ID NO: 8748 - DNA, 25 bp, Artificial sequence
  SiRNA target sequence
aatttaaaagagactcttaccccca

SEQ ID NO: 8749 - DNA, 25 bp, Artificial sequence
  SiRNA target sequence
atttaaaagagactcttacccccac

SEQ ID NO: 8750 - DNA, 25 bp, Artificial sequence
  SiRNA target sequence
tttaaaagagactcttacccccact

SEQ ID NO: 8751 - DNA, 25 bp, Artificial sequence
  SiRNA target sequence
ttaaaagagactcttacccccactt

SEQ ID NO: 8752 - DNA, 25 bp, Artificial sequence
  SiRNA target sequence
taaaagagactcttacccccacttt

SEQ ID NO: 8753 - DNA, 25 bp, Artificial sequence
  SiRNA target sequence
aaaagagactcttacccccacttta

SEQ ID NO: 8754 - DNA, 25 bp, Artificial sequence
  SiRNA target sequence
aaagagactcttacccccactttat

SEQ ID NO: 8755 - DNA, 25 bp, Artificial sequence
  SiRNA target sequence
aagagactcttacccccactttatt

SEQ ID NO: 8756 - DNA, 25 bp, Artificial sequence
  SiRNA target sequence
agagactcttacccccactttattg

SEQ ID NO: 8757 - DNA, 25 bp, Artificial sequence
  SiRNA target sequence
gagactcttacccccactttattgg

SEQ ID NO: 8758 - DNA, 25 bp, Artificial sequence
  SiRNA target sequence
agactcttacccccactttattgga

SEQ ID NO: 8759 - DNA, 25 bp, Artificial sequence
  SiRNA target sequence
gactcttacccccactttattggaa

SEQ ID NO: 8760 - DNA, 25 bp, Artificial sequence
  SiRNA target sequence
actcttacccccactttattggaac

SEQ ID NO: 8761 - DNA, 25 bp, Artificial sequence
  SiRNA target sequence
ctcttacccccactttattggaact

SEQ ID NO: 8762 - DNA, 25 bp, Artificial sequence
  SiRNA target sequence
tcttacccccactttattggaactt

SEQ ID NO: 8763 - DNA, 25 bp, Artificial sequence
  SiRNA target sequence
cttacccccactttattggaactta

SEQ ID NO: 8764 - DNA, 25 bp, Artificial sequence
  SiRNA target sequence
ttacccccactttattggaacttat

SEQ ID NO: 8765 - DNA, 25 bp, Artificial sequence
  SiRNA target sequence
tacccccactttattggaacttatt

SEQ ID NO: 8766 - DNA, 25 bp, Artificial sequence
  SiRNA target sequence
acccccactttattggaacttattg

SEQ ID NO: 8767 - DNA, 25 bp, Artificial sequence
  SiRNA target sequence
cccccactttattggaacttattgg

SEQ ID NO: 8768 - DNA, 25 bp, Artificial sequence
  SiRNA target sequence
ccccactttattggaacttattgga

SEQ ID NO: 8769 - DNA, 25 bp, Artificial sequence
  SiRNA target sequence
cccactttattggaacttattggag

SEQ ID NO: 8770 - DNA, 25 bp, Artificial sequence
  SiRNA target sequence
ccactttattggaacttattggaga

SEQ ID NO: 8771 - DNA, 25 bp, Artificial sequence
  SiRNA target sequence
cactttattggaacttattggagaa

SEQ ID NO: 8772 - DNA, 25 bp, Artificial sequence
  SiRNA target sequence
actttattggaacttattggagaat

SEQ ID NO: 8773 - DNA, 25 bp, Artificial sequence
  SiRNA target sequence
ctttattggaacttattggagaata

SEQ ID NO: 8774 - DNA, 25 bp, Artificial sequence
  SiRNA target sequence
tttattggaacttattggagaatat

SEQ ID NO: 8775 - DNA, 25 bp, Artificial sequence
  SiRNA target sequence
ttattggaacttattggagaatatt

SEQ ID NO: 8776 - DNA, 25 bp, Artificial sequence
  SiRNA target sequence
tattggaacttattggagaatatta

SEQ ID NO: 8777 - DNA, 25 bp, Artificial sequence
  SiRNA target sequence
attggaacttattggagaatattat

SEQ ID NO: 8778 - DNA, 25 bp, Artificial sequence
  SiRNA target sequence
ttggaacttattggagaatattatt

SEQ ID NO: 8779 - DNA, 25 bp, Artificial sequence
  SiRNA target sequence
tggaacttattggagaatattattt

SEQ ID NO: 8780 - DNA, 25 bp, Artificial sequence
  SiRNA target sequence
ggaacttattggagaatattattta

SEQ ID NO: 8781 - DNA, 25 bp, Artificial sequence
  SiRNA target sequence
gaacttattggagaatattatttaa

SEQ ID NO: 8782 - DNA, 25 bp, Artificial sequence
  SiRNA target sequence
aacttattggagaatattatttaaa

SEQ ID NO: 8783 - DNA, 25 bp, Artificial sequence
  SiRNA target sequence
acttattggagaatattatttaaaa

SEQ ID NO: 8784 - DNA, 25 bp, Artificial sequence
  SiRNA target sequence
cttattggagaatattatttaaaaa

SEQ ID NO: 8785 - DNA, 25 bp, Artificial sequence
  SiRNA target sequence
ttattggagaatattatttaaaaag

SEQ ID NO: 8786 - DNA, 25 bp, Artificial sequence
  SiRNA target sequence
tattggagaatattatttaaaaagt

SEQ ID NO: 8787 - DNA, 25 bp, Artificial sequence
  SiRNA target sequence
attggagaatattatttaaaaagtg

SEQ ID NO: 8788 - DNA, 25 bp, Artificial sequence
  SiRNA target sequence
ttggagaatattatttaaaaagtgg

SEQ ID NO: 8789 - DNA, 25 bp, Artificial sequence
  SiRNA target sequence
tggagaatattatttaaaaagtgga

SEQ ID NO: 8790 - DNA, 25 bp, Artificial sequence
  SiRNA target sequence
ggagaatattatttaaaaagtggaa

SEQ ID NO: 8791 - DNA, 25 bp, Artificial sequence
  SiRNA target sequence
gagaatattatttaaaaagtggaaa

SEQ ID NO: 8792 - DNA, 25 bp, Artificial sequence
  SiRNA target sequence
agaatattatttaaaaagtggaaat

SEQ ID NO: 8793 - DNA, 25 bp, Artificial sequence
  SiRNA target sequence
gaatattatttaaaaagtggaaatc

SEQ ID NO: 8794 - DNA, 25 bp, Artificial sequence
  SiRNA target sequence
aatattatttaaaaagtggaaatca

SEQ ID NO: 8795 - DNA, 25 bp, Artificial sequence
  SiRNA target sequence
atattatttaaaaagtggaaatcac

SEQ ID NO: 8796 - DNA, 25 bp, Artificial sequence
  SiRNA target sequence
tattatttaaaaagtggaaatcact

SEQ ID NO: 8797 - DNA, 25 bp, Artificial sequence
  SiRNA target sequence
attatttaaaaagtggaaatcactc

SEQ ID NO: 8798 - DNA, 25 bp, Artificial sequence
  SiRNA target sequence
ttatttaaaaagtggaaatcactct

SEQ ID NO: 8799 - DNA, 25 bp, Artificial sequence
  SiRNA target sequence
tatttaaaaagtggaaatcactcta

SEQ ID NO: 8800 - DNA, 25 bp, Artificial sequence
  SiRNA target sequence
atttaaaaagtggaaatcactctaa

SEQ ID NO: 8801 - DNA, 25 bp, Artificial sequence
  SiRNA target sequence
tttaaaaagtggaaatcactctaaa

SEQ ID NO: 8802 - DNA, 25 bp, Artificial sequence
  SiRNA target sequence
ttaaaaagtggaaatcactctaaaa

SEQ ID NO: 8803 - DNA, 25 bp, Artificial sequence
  SiRNA target sequence
taaaaagtggaaatcactctaaaat

SEQ ID NO: 8804 - DNA, 25 bp, Artificial sequence
  SiRNA target sequence
aaaaagtggaaatcactctaaaatg

SEQ ID NO: 8805 - DNA, 25 bp, Artificial sequence
  SiRNA target sequence
aaaagtggaaatcactctaaaatgt

SEQ ID NO: 8806 - DNA, 25 bp, Artificial sequence
  SiRNA target sequence
aaagtggaaatcactctaaaatgtt

SEQ ID NO: 8807 - DNA, 25 bp, Artificial sequence
  SiRNA target sequence
aagtggaaatcactctaaaatgtta

SEQ ID NO: 8808 - DNA, 25 bp, Artificial sequence
  SiRNA target sequence
agtggaaatcactctaaaatgttag

SEQ ID NO: 8809 - DNA, 25 bp, Artificial sequence
  SiRNA target sequence
gtggaaatcactctaaaatgttaga

SEQ ID NO: 8810 - DNA, 25 bp, Artificial sequence
  SiRNA target sequence
tggaaatcactctaaaatgttagat

SEQ ID NO: 8811 - DNA, 25 bp, Artificial sequence
  SiRNA target sequence
ggaaatcactctaaaatgttagatc

SEQ ID NO: 8812 - DNA, 25 bp, Artificial sequence
  SiRNA target sequence
gaaatcactctaaaatgttagatct

SEQ ID NO: 8813 - DNA, 25 bp, Artificial sequence
  SiRNA target sequence
aaatcactctaaaatgttagatcta

SEQ ID NO: 8814 - DNA, 25 bp, Artificial sequence
  SiRNA target sequence
aatcactctaaaatgttagatctat

SEQ ID NO: 8815 - DNA, 25 bp, Artificial sequence
  SiRNA target sequence
atcactctaaaatgttagatctatt

SEQ ID NO: 8816 - DNA, 25 bp, Artificial sequence
  SiRNA target sequence
tcactctaaaatgttagatctatta

SEQ ID NO: 8817 - DNA, 25 bp, Artificial sequence
  SiRNA target sequence
cactctaaaatgttagatctattat

SEQ ID NO: 8818 - DNA, 25 bp, Artificial sequence
  SiRNA target sequence
actctaaaatgttagatctattatc

SEQ ID NO: 8819 - DNA, 25 bp, Artificial sequence
  SiRNA target sequence
ctctaaaatgttagatctattatct

SEQ ID NO: 8820 - DNA, 25 bp, Artificial sequence
  SiRNA target sequence
tctaaaatgttagatctattatcta

SEQ ID NO: 8821 - DNA, 25 bp, Artificial sequence
  SiRNA target sequence
ctaaaatgttagatctattatctag

SEQ ID NO: 8822 - DNA, 25 bp, Artificial sequence
  SiRNA target sequence
taaaatgttagatctattatctagt

SEQ ID NO: 8823 - DNA, 25 bp, Artificial sequence
  SiRNA target sequence
aaaatgttagatctattatctagtc

SEQ ID NO: 8824 - DNA, 25 bp, Artificial sequence
  SiRNA target sequence
aaatgttagatctattatctagtca

SEQ ID NO: 8825 - DNA, 25 bp, Artificial sequence
  SiRNA target sequence
aatgttagatctattatctagtcat

SEQ ID NO: 8826 - DNA, 25 bp, Artificial sequence
  SiRNA target sequence
atgttagatctattatctagtcatc

SEQ ID NO: 8827 - DNA, 25 bp, Artificial sequence
  SiRNA target sequence
tgttagatctattatctagtcatcc

SEQ ID NO: 8828 - DNA, 25 bp, Artificial sequence
  SiRNA target sequence
gttagatctattatctagtcatcca

SEQ ID NO: 8829 - DNA, 25 bp, Artificial sequence
  SiRNA target sequence
ttagatctattatctagtcatccag

SEQ ID NO: 8830 - DNA, 25 bp, Artificial sequence
  SiRNA target sequence
tagatctattatctagtcatccaga

SEQ ID NO: 8831 - DNA, 25 bp, Artificial sequence
  SiRNA target sequence
agatctattatctagtcatccagat

SEQ ID NO: 8832 - DNA, 25 bp, Artificial sequence
  SiRNA target sequence
gatctattatctagtcatccagata

SEQ ID NO: 8833 - DNA, 25 bp, Artificial sequence
  SiRNA target sequence
atctattatctagtcatccagatac

SEQ ID NO: 8834 - DNA, 25 bp, Artificial sequence
  SiRNA target sequence
tctattatctagtcatccagatact

SEQ ID NO: 8835 - DNA, 25 bp, Artificial sequence
  SiRNA target sequence
ctattatctagtcatccagatactc

SEQ ID NO: 8836 - DNA, 25 bp, Artificial sequence
  SiRNA target sequence
tattatctagtcatccagatactcc

SEQ ID NO: 8837 - DNA, 25 bp, Artificial sequence
  SiRNA target sequence
attatctagtcatccagatactcct

SEQ ID NO: 8838 - DNA, 25 bp, Artificial sequence
  SiRNA target sequence
ttatctagtcatccagatactcctg

SEQ ID NO: 8839 - DNA, 25 bp, Artificial sequence
  SiRNA target sequence
tatctagtcatccagatactcctgg

SEQ ID NO: 8840 - DNA, 25 bp, Artificial sequence
  SiRNA target sequence
atctagtcatccagatactcctggt

SEQ ID NO: 8841 - DNA, 25 bp, Artificial sequence
  SiRNA target sequence
tctagtcatccagatactcctggta

SEQ ID NO: 8842 - DNA, 25 bp, Artificial sequence
  SiRNA target sequence
ctagtcatccagatactcctggtaa

SEQ ID NO: 8843 - DNA, 25 bp, Artificial sequence
  SiRNA target sequence
tagtcatccagatactcctggtaaa

SEQ ID NO: 8844 - DNA, 25 bp, Artificial sequence
  SiRNA target sequence
agtcatccagatactcctggtaaat

SEQ ID NO: 8845 - DNA, 25 bp, Artificial sequence
  SiRNA target sequence
gtcatccagatactcctggtaaatt

SEQ ID NO: 8846 - DNA, 25 bp, Artificial sequence
  SiRNA target sequence
tcatccagatactcctggtaaatta

SEQ ID NO: 8847 - DNA, 25 bp, Artificial sequence
  SiRNA target sequence
catccagatactcctggtaaattac

SEQ ID NO: 8848 - DNA, 25 bp, Artificial sequence
  SiRNA target sequence
atccagatactcctggtaaattact

SEQ ID NO: 8849 - DNA, 25 bp, Artificial sequence
  SiRNA target sequence
tccagatactcctggtaaattactt

SEQ ID NO: 8850 - DNA, 25 bp, Artificial sequence
  SiRNA target sequence
ccagatactcctggtaaattacttt

SEQ ID NO: 8851 - DNA, 25 bp, Artificial sequence
  SiRNA target sequence
cagatactcctggtaaattactttt

SEQ ID NO: 8852 - DNA, 25 bp, Artificial sequence
  SiRNA target sequence
agatactcctggtaaattactttta

SEQ ID NO: 8853 - DNA, 25 bp, Artificial sequence
  SiRNA target sequence
gatactcctggtaaattacttttaa

SEQ ID NO: 8854 - DNA, 25 bp, Artificial sequence
  SiRNA target sequence
atactcctggtaaattacttttaac

SEQ ID NO: 8855 - DNA, 25 bp, Artificial sequence
  SiRNA target sequence
tactcctggtaaattacttttaacg

SEQ ID NO: 8856 - DNA, 25 bp, Artificial sequence
  SiRNA target sequence
actcctggtaaattacttttaacgg

SEQ ID NO: 8857 - DNA, 25 bp, Artificial sequence
  SiRNA target sequence
ctcctggtaaattacttttaacggc

SEQ ID NO: 8858 - DNA, 25 bp, Artificial sequence
  SiRNA target sequence
tcctggtaaattacttttaacggca

SEQ ID NO: 8859 - DNA, 25 bp, Artificial sequence
  SiRNA target sequence
cctggtaaattacttttaacggcac

SEQ ID NO: 8860 - DNA, 25 bp, Artificial sequence
  SiRNA target sequence
ctggtaaattacttttaacggcact

SEQ ID NO: 8861 - DNA, 25 bp, Artificial sequence
  SiRNA target sequence
tggtaaattacttttaacggcactt

SEQ ID NO: 8862 - DNA, 25 bp, Artificial sequence
  SiRNA target sequence
ggtaaattacttttaacggcacttt

SEQ ID NO: 8863 - DNA, 25 bp, Artificial sequence
  SiRNA target sequence
gtaaattacttttaacggcacttta

SEQ ID NO: 8864 - DNA, 25 bp, Artificial sequence
  SiRNA target sequence
taaattacttttaacggcactttat

SEQ ID NO: 8865 - DNA, 25 bp, Artificial sequence
  SiRNA target sequence
aaattacttttaacggcactttatg

SEQ ID NO: 8866 - DNA, 25 bp, Artificial sequence
  SiRNA target sequence
aattacttttaacggcactttatgc

SEQ ID NO: 8867 - DNA, 25 bp, Artificial sequence
  SiRNA target sequence
attacttttaacggcactttatgca

SEQ ID NO: 8868 - DNA, 25 bp, Artificial sequence
  SiRNA target sequence
ttacttttaacggcactttatgcaa

SEQ ID NO: 8869 - DNA, 25 bp, Artificial sequence
  SiRNA target sequence
tacttttaacggcactttatgcaat

SEQ ID NO: 8870 - DNA, 25 bp, Artificial sequence
  SiRNA target sequence
acttttaacggcactttatgcaata

SEQ ID NO: 8871 - DNA, 25 bp, Artificial sequence
  SiRNA target sequence
cttttaacggcactttatgcaataa

SEQ ID NO: 8872 - DNA, 25 bp, Artificial sequence
  SiRNA target sequence
ttttaacggcactttatgcaataag

SEQ ID NO: 8873 - DNA, 25 bp, Artificial sequence
  SiRNA target sequence
tttaacggcactttatgcaataagt

SEQ ID NO: 8874 - DNA, 25 bp, Artificial sequence
  SiRNA target sequence
ttaacggcactttatgcaataagta

SEQ ID NO: 8875 - DNA, 25 bp, Artificial sequence
  SiRNA target sequence
taacggcactttatgcaataagtat

SEQ ID NO: 8876 - DNA, 25 bp, Artificial sequence
  SiRNA target sequence
aacggcactttatgcaataagtatt

SEQ ID NO: 8877 - DNA, 25 bp, Artificial sequence
  SiRNA target sequence
acggcactttatgcaataagtattg

SEQ ID NO: 8878 - DNA, 25 bp, Artificial sequence
  SiRNA target sequence
cggcactttatgcaataagtattga

SEQ ID NO: 8879 - DNA, 25 bp, Artificial sequence
  SiRNA target sequence
ggcactttatgcaataagtattgat

SEQ ID NO: 8880 - DNA, 25 bp, Artificial sequence
  SiRNA target sequence
gcactttatgcaataagtattgata

SEQ ID NO: 8881 - DNA, 25 bp, Artificial sequence
  SiRNA target sequence
cactttatgcaataagtattgataa

SEQ ID NO: 8882 - DNA, 25 bp, Artificial sequence
  SiRNA target sequence
actttatgcaataagtattgataag

SEQ ID NO: 8883 - DNA, 25 bp, Artificial sequence
  SiRNA target sequence
ctttatgcaataagtattgataaga

SEQ ID NO: 8884 - DNA, 25 bp, Artificial sequence
  SiRNA target sequence
tttatgcaataagtattgataagaa

SEQ ID NO: 8885 - DNA, 25 bp, Artificial sequence
  SiRNA target sequence
ttatgcaataagtattgataagaaa

SEQ ID NO: 8886 - DNA, 25 bp, Artificial sequence
  SiRNA target sequence
tatgcaataagtattgataagaaaa

SEQ ID NO: 8887 - DNA, 25 bp, Artificial sequence
  SiRNA target sequence
atgcaataagtattgataagaaaaa

SEQ ID NO: 8888 - DNA, 25 bp, Artificial sequence
  SiRNA target sequence
tgcaataagtattgataagaaaaag

SEQ ID NO: 8889 - DNA, 25 bp, Artificial sequence
  SiRNA target sequence
gcaataagtattgataagaaaaagg

SEQ ID NO: 8890 - DNA, 25 bp, Artificial sequence
  SiRNA target sequence
caataagtattgataagaaaaagga

SEQ ID NO: 8891 - DNA, 25 bp, Artificial sequence
  SiRNA target sequence
aataagtattgataagaaaaaggat

SEQ ID NO: 8892 - DNA, 25 bp, Artificial sequence
  SiRNA target sequence
ataagtattgataagaaaaaggatg

SEQ ID NO: 8893 - DNA, 25 bp, Artificial sequence
  SiRNA target sequence
taagtattgataagaaaaaggatgc

SEQ ID NO: 8894 - DNA, 25 bp, Artificial sequence
  SiRNA target sequence
aagtattgataagaaaaaggatgct

SEQ ID NO: 8895 - DNA, 25 bp, Artificial sequence
  SiRNA target sequence
agtattgataagaaaaaggatgcta

SEQ ID NO: 8896 - DNA, 25 bp, Artificial sequence
  SiRNA target sequence
gtattgataagaaaaaggatgctat

SEQ ID NO: 8897 - DNA, 25 bp, Artificial sequence
  SiRNA target sequence
tattgataagaaaaaggatgctata

SEQ ID NO: 8898 - DNA, 25 bp, Artificial sequence
  SiRNA target sequence
attgataagaaaaaggatgctatag

SEQ ID NO: 8899 - DNA, 25 bp, Artificial sequence
  SiRNA target sequence
ttgataagaaaaaggatgctataga

SEQ ID NO: 8900 - DNA, 25 bp, Artificial sequence
  SiRNA target sequence
tgataagaaaaaggatgctatagaa

SEQ ID NO: 8901 - DNA, 25 bp, Artificial sequence
  SiRNA target sequence
gataagaaaaaggatgctatagaaa

SEQ ID NO: 8902 - DNA, 25 bp, Artificial sequence
  SiRNA target sequence
ataagaaaaaggatgctatagaaat

SEQ ID NO: 8903 - DNA, 25 bp, Artificial sequence
  SiRNA target sequence
taagaaaaaggatgctatagaaatt

SEQ ID NO: 8904 - DNA, 25 bp, Artificial sequence
  SiRNA target sequence
aagaaaaaggatgctatagaaattt

SEQ ID NO: 8905 - DNA, 25 bp, Artificial sequence
  SiRNA target sequence
agaaaaaggatgctatagaaatttt

SEQ ID NO: 8906 - DNA, 25 bp, Artificial sequence
  SiRNA target sequence
gaaaaaggatgctatagaaatttta

SEQ ID NO: 8907 - DNA, 25 bp, Artificial sequence
  SiRNA target sequence
aaaaaggatgctatagaaattttat

SEQ ID NO: 8908 - DNA, 25 bp, Artificial sequence
  SiRNA target sequence
aaaaggatgctatagaaattttata

SEQ ID NO: 8909 - DNA, 25 bp, Artificial sequence
  SiRNA target sequence
aaaggatgctatagaaattttatat

SEQ ID NO: 8910 - DNA, 25 bp, Artificial sequence
  SiRNA target sequence
aaggatgctatagaaattttatata

SEQ ID NO: 8911 - DNA, 25 bp, Artificial sequence
  SiRNA target sequence
aggatgctatagaaattttatatag

SEQ ID NO: 8912 - DNA, 25 bp, Artificial sequence
  SiRNA target sequence
ggatgctatagaaattttatataga

SEQ ID NO: 8913 - DNA, 25 bp, Artificial sequence
  SiRNA target sequence
gatgctatagaaattttatatagaa

SEQ ID NO: 8914 - DNA, 25 bp, Artificial sequence
  SiRNA target sequence
atgctatagaaattttatatagaag

SEQ ID NO: 8915 - DNA, 25 bp, Artificial sequence
  SiRNA target sequence
tgctatagaaattttatatagaagt

SEQ ID NO: 8916 - DNA, 25 bp, Artificial sequence
  SiRNA target sequence
gctatagaaattttatatagaagta

SEQ ID NO: 8917 - DNA, 25 bp, Artificial sequence
  SiRNA target sequence
ctatagaaattttatatagaagtat

SEQ ID NO: 8918 - DNA, 25 bp, Artificial sequence
  SiRNA target sequence
tatagaaattttatatagaagtata

SEQ ID NO: 8919 - DNA, 25 bp, Artificial sequence
  SiRNA target sequence
atagaaattttatatagaagtatat

SEQ ID NO: 8920 - DNA, 25 bp, Artificial sequence
  SiRNA target sequence
tagaaattttatatagaagtatatc

SEQ ID NO: 8921 - DNA, 25 bp, Artificial sequence
  SiRNA target sequence
agaaattttatatagaagtatatca

SEQ ID NO: 8922 - DNA, 25 bp, Artificial sequence
  SiRNA target sequence
gaaattttatatagaagtatatcag

SEQ ID NO: 8923 - DNA, 25 bp, Artificial sequence
  SiRNA target sequence
aaattttatatagaagtatatcaga

SEQ ID NO: 8924 - DNA, 25 bp, Artificial sequence
  SiRNA target sequence
aattttatatagaagtatatcagaa

SEQ ID NO: 8925 - DNA, 25 bp, Artificial sequence
  SiRNA target sequence
attttatatagaagtatatcagaat

SEQ ID NO: 8926 - DNA, 25 bp, Artificial sequence
  SiRNA target sequence
ttttatatagaagtatatcagaata

SEQ ID NO: 8927 - DNA, 25 bp, Artificial sequence
  SiRNA target sequence
tttatatagaagtatatcagaatat

SEQ ID NO: 8928 - DNA, 25 bp, Artificial sequence
  SiRNA target sequence
ttatatagaagtatatcagaatatt

SEQ ID NO: 8929 - DNA, 25 bp, Artificial sequence
  SiRNA target sequence
tatatagaagtatatcagaatattc

SEQ ID NO: 8930 - DNA, 25 bp, Artificial sequence
  SiRNA target sequence
atatagaagtatatcagaatattca

SEQ ID NO: 8931 - DNA, 25 bp, Artificial sequence
  SiRNA target sequence
tatagaagtatatcagaatattcat

SEQ ID NO: 8932 - DNA, 25 bp, Artificial sequence
  SiRNA target sequence
atagaagtatatcagaatattcatc

SEQ ID NO: 8933 - DNA, 25 bp, Artificial sequence
  SiRNA target sequence
tagaagtatatcagaatattcatct

SEQ ID NO: 8934 - DNA, 25 bp, Artificial sequence
  SiRNA target sequence
agaagtatatcagaatattcatctt

SEQ ID NO: 8935 - DNA, 25 bp, Artificial sequence
  SiRNA target sequence
gaagtatatcagaatattcatctta

SEQ ID NO: 8936 - DNA, 25 bp, Artificial sequence
  SiRNA target sequence
aagtatatcagaatattcatcttat

SEQ ID NO: 8937 - DNA, 25 bp, Artificial sequence
  SiRNA target sequence
agtatatcagaatattcatcttatt

SEQ ID NO: 8938 - DNA, 25 bp, Artificial sequence
  SiRNA target sequence
gtatatcagaatattcatcttattt

SEQ ID NO: 8939 - DNA, 25 bp, Artificial sequence
  SiRNA target sequence
tatatcagaatattcatcttatttt

SEQ ID NO: 8940 - DNA, 25 bp, Artificial sequence
  SiRNA target sequence
atatcagaatattcatcttatttta

SEQ ID NO: 8941 - DNA, 25 bp, Artificial sequence
  SiRNA target sequence
tatcagaatattcatcttattttaa

SEQ ID NO: 8942 - DNA, 25 bp, Artificial sequence
  SiRNA target sequence
atcagaatattcatcttattttaaa

SEQ ID NO: 8943 - DNA, 25 bp, Artificial sequence
  SiRNA target sequence
tcagaatattcatcttattttaaat

SEQ ID NO: 8944 - DNA, 25 bp, Artificial sequence
  SiRNA target sequence
cagaatattcatcttattttaaatc

SEQ ID NO: 8945 - DNA, 25 bp, Artificial sequence
  SiRNA target sequence
agaatattcatcttattttaaatct

SEQ ID NO: 8946 - DNA, 25 bp, Artificial sequence
  SiRNA target sequence
gaatattcatcttattttaaatctt

SEQ ID NO: 8947 - DNA, 25 bp, Artificial sequence
  SiRNA target sequence
aatattcatcttattttaaatctta

SEQ ID NO: 8948 - DNA, 25 bp, Artificial sequence
  SiRNA target sequence
atattcatcttattttaaatcttat

SEQ ID NO: 8949 - DNA, 25 bp, Artificial sequence
  SiRNA target sequence
tattcatcttattttaaatcttatt

SEQ ID NO: 8950 - DNA, 25 bp, Artificial sequence
  SiRNA target sequence
attcatcttattttaaatcttattt

SEQ ID NO: 8951 - DNA, 25 bp, Artificial sequence
  SiRNA target sequence
ttcatcttattttaaatcttatttg

SEQ ID NO: 8952 - DNA, 25 bp, Artificial sequence
  SiRNA target sequence
tcatcttattttaaatcttatttgt

SEQ ID NO: 8953 - DNA, 25 bp, Artificial sequence
  SiRNA target sequence
catcttattttaaatcttatttgta

SEQ ID NO: 8954 - DNA, 25 bp, Artificial sequence
  SiRNA target sequence
atcttattttaaatcttatttgtat

SEQ ID NO: 8955 - DNA, 25 bp, Artificial sequence
  SiRNA target sequence
tcttattttaaatcttatttgtatt

SEQ ID NO: 8956 - DNA, 25 bp, Artificial sequence
  SiRNA target sequence
cttattttaaatcttatttgtattt

SEQ ID NO: 8957 - DNA, 25 bp, Artificial sequence
  SiRNA target sequence
ttattttaaatcttatttgtattta

SEQ ID NO: 8958 - DNA, 25 bp, Artificial sequence
  SiRNA target sequence
tattttaaatcttatttgtatttag

SEQ ID NO: 8959 - DNA, 25 bp, Artificial sequence
  SiRNA target sequence
attttaaatcttatttgtatttagg

SEQ ID NO: 8960 - DNA, 25 bp, Artificial sequence
  SiRNA target sequence
ttttaaatcttatttgtatttagga

SEQ ID NO: 8961 - DNA, 25 bp, Artificial sequence
  SiRNA target sequence
tttaaatcttatttgtatttaggaa

SEQ ID NO: 8962 - DNA, 25 bp, Artificial sequence
  SiRNA target sequence
ttaaatcttatttgtatttaggaaa

SEQ ID NO: 8963 - DNA, 25 bp, Artificial sequence
  SiRNA target sequence
taaatcttatttgtatttaggaaat

SEQ ID NO: 8964 - DNA, 25 bp, Artificial sequence
  SiRNA target sequence
aaatcttatttgtatttaggaaata

SEQ ID NO: 8965 - DNA, 25 bp, Artificial sequence
  SiRNA target sequence
aatcttatttgtatttaggaaatat

SEQ ID NO: 8966 - DNA, 25 bp, Artificial sequence
  SiRNA target sequence
atcttatttgtatttaggaaatatt

SEQ ID NO: 8967 - DNA, 25 bp, Artificial sequence
  SiRNA target sequence
tcttatttgtatttaggaaatattt

SEQ ID NO: 8968 - DNA, 25 bp, Artificial sequence
  SiRNA target sequence
cttatttgtatttaggaaatatttt

SEQ ID NO: 8969 - DNA, 25 bp, Artificial sequence
  SiRNA target sequence
ttatttgtatttaggaaatatttta

SEQ ID NO: 8970 - DNA, 25 bp, Artificial sequence
  SiRNA target sequence
tatttgtatttaggaaatattttaa

SEQ ID NO: 8971 - DNA, 25 bp, Artificial sequence
  SiRNA target sequence
atttgtatttaggaaatattttaat

SEQ ID NO: 8972 - DNA, 25 bp, Artificial sequence
  SiRNA target sequence
tttgtatttaggaaatattttaata

SEQ ID NO: 8973 - DNA, 25 bp, Artificial sequence
  SiRNA target sequence
ttgtatttaggaaatattttaataa

SEQ ID NO: 8974 - DNA, 25 bp, Artificial sequence
  SiRNA target sequence
tgtatttaggaaatattttaataaa

SEQ ID NO: 8975 - DNA, 25 bp, Artificial sequence
  SiRNA target sequence
gtatttaggaaatattttaataaat

SEQ ID NO: 8976 - DNA, 25 bp, Artificial sequence
  SiRNA target sequence
tatttaggaaatattttaataaatg

SEQ ID NO: 8977 - DNA, 25 bp, Artificial sequence
  SiRNA target sequence
atttaggaaatattttaataaatga

SEQ ID NO: 8978 - DNA, 25 bp, Artificial sequence
  SiRNA target sequence
tttaggaaatattttaataaatgat

SEQ ID NO: 8979 - DNA, 25 bp, Artificial sequence
  SiRNA target sequence
ttaggaaatattttaataaatgatg

SEQ ID NO: 8980 - DNA, 25 bp, Artificial sequence
  SiRNA target sequence
taggaaatattttaataaatgatga

SEQ ID NO: 8981 - DNA, 25 bp, Artificial sequence
  SiRNA target sequence
aggaaatattttaataaatgatgac

SEQ ID NO: 8982 - DNA, 25 bp, Artificial sequence
  SiRNA target sequence
ggaaatattttaataaatgatgact

SEQ ID NO: 8983 - DNA, 25 bp, Artificial sequence
  SiRNA target sequence
gaaatattttaataaatgatgactt

SEQ ID NO: 8984 - DNA, 25 bp, Artificial sequence
  SiRNA target sequence
aaatattttaataaatgatgactta

SEQ ID NO: 8985 - DNA, 25 bp, Artificial sequence
  SiRNA target sequence
aatattttaataaatgatgacttaa

SEQ ID NO: 8986 - DNA, 25 bp, Artificial sequence
  SiRNA target sequence
atattttaataaatgatgacttaaa

SEQ ID NO: 8987 - DNA, 25 bp, Artificial sequence
  SiRNA target sequence
tattttaataaatgatgacttaaat

SEQ ID NO: 8988 - DNA, 25 bp, Artificial sequence
  SiRNA target sequence
attttaataaatgatgacttaaatg

SEQ ID NO: 8989 - DNA, 25 bp, Artificial sequence
  SiRNA target sequence
ttttaataaatgatgacttaaatga

SEQ ID NO: 8990 - DNA, 25 bp, Artificial sequence
  SiRNA target sequence
tttaataaatgatgacttaaatgaa

SEQ ID NO: 8991 - DNA, 25 bp, Artificial sequence
  SiRNA target sequence
ttaataaatgatgacttaaatgaat

SEQ ID NO: 8992 - DNA, 25 bp, Artificial sequence
  SiRNA target sequence
taataaatgatgacttaaatgaatg

SEQ ID NO: 8993 - DNA, 25 bp, Artificial sequence
  SiRNA target sequence
aataaatgatgacttaaatgaatgc

SEQ ID NO: 8994 - DNA, 25 bp, Artificial sequence
  SiRNA target sequence
ataaatgatgacttaaatgaatgca

SEQ ID NO: 8995 - DNA, 25 bp, Artificial sequence
  SiRNA target sequence
taaatgatgacttaaatgaatgcag

SEQ ID NO: 8996 - DNA, 25 bp, Artificial sequence
  SiRNA target sequence
aaatgatgacttaaatgaatgcagg

SEQ ID NO: 8997 - DNA, 25 bp, Artificial sequence
  SiRNA target sequence
aatgatgacttaaatgaatgcagga

SEQ ID NO: 8998 - DNA, 25 bp, Artificial sequence
  SiRNA target sequence
atgatgacttaaatgaatgcaggaa

SEQ ID NO: 8999 - DNA, 25 bp, Artificial sequence
  SiRNA target sequence
tgatgacttaaatgaatgcaggaaa

SEQ ID NO: 9000 - DNA, 25 bp, Artificial sequence
  SiRNA target sequence
gatgacttaaatgaatgcaggaaat

SEQ ID NO: 9001 - DNA, 25 bp, Artificial sequence
  SiRNA target sequence
atgacttaaatgaatgcaggaaatt

SEQ ID NO: 9002 - DNA, 25 bp, Artificial sequence
  SiRNA target sequence
tgacttaaatgaatgcaggaaattg

SEQ ID NO: 9003 - DNA, 25 bp, Artificial sequence
  SiRNA target sequence
gacttaaatgaatgcaggaaattgt

SEQ ID NO: 9004 - DNA, 25 bp, Artificial sequence
  SiRNA target sequence
acttaaatgaatgcaggaaattgtt

SEQ ID NO: 9005 - DNA, 25 bp, Artificial sequence
  SiRNA target sequence
cttaaatgaatgcaggaaattgttt

SEQ ID NO: 9006 - DNA, 25 bp, Artificial sequence
  SiRNA target sequence
ttaaatgaatgcaggaaattgttta

SEQ ID NO: 9007 - DNA, 25 bp, Artificial sequence
  SiRNA target sequence
taaatgaatgcaggaaattgtttaa

SEQ ID NO: 9008 - DNA, 25 bp, Artificial sequence
  SiRNA target sequence
aaatgaatgcaggaaattgtttaat

SEQ ID NO: 9009 - DNA, 25 bp, Artificial sequence
  SiRNA target sequence
aatgaatgcaggaaattgtttaata

SEQ ID NO: 9010 - DNA, 25 bp, Artificial sequence
  SiRNA target sequence
atgaatgcaggaaattgtttaatac

SEQ ID NO: 9011 - DNA, 25 bp, Artificial sequence
  SiRNA target sequence
tgaatgcaggaaattgtttaataca

SEQ ID NO: 9012 - DNA, 25 bp, Artificial sequence
  SiRNA target sequence
gaatgcaggaaattgtttaatacat

SEQ ID NO: 9013 - DNA, 25 bp, Artificial sequence
  SiRNA target sequence
aatgcaggaaattgtttaatacatc

SEQ ID NO: 9014 - DNA, 25 bp, Artificial sequence
  SiRNA target sequence
atgcaggaaattgtttaatacatca

SEQ ID NO: 9015 - DNA, 25 bp, Artificial sequence
  SiRNA target sequence
tgcaggaaattgtttaatacatcac

SEQ ID NO: 9016 - DNA, 25 bp, Artificial sequence
  SiRNA target sequence
gcaggaaattgtttaatacatcact

SEQ ID NO: 9017 - DNA, 25 bp, Artificial sequence
  SiRNA target sequence
caggaaattgtttaatacatcactt

SEQ ID NO: 9018 - DNA, 25 bp, Artificial sequence
  SiRNA target sequence
aggaaattgtttaatacatcacttc

SEQ ID NO: 9019 - DNA, 25 bp, Artificial sequence
  SiRNA target sequence
ggaaattgtttaatacatcacttca

SEQ ID NO: 9020 - DNA, 25 bp, Artificial sequence
  SiRNA target sequence
gaaattgtttaatacatcacttcaa

SEQ ID NO: 9021 - DNA, 25 bp, Artificial sequence
  SiRNA target sequence
aaattgtttaatacatcacttcaat

SEQ ID NO: 9022 - DNA, 25 bp, Artificial sequence
  SiRNA target sequence
aattgtttaatacatcacttcaata

SEQ ID NO: 9023 - DNA, 25 bp, Artificial sequence
  SiRNA target sequence
attgtttaatacatcacttcaatat

SEQ ID NO: 9024 - DNA, 25 bp, Artificial sequence
  SiRNA target sequence
ttgtttaatacatcacttcaatatt

SEQ ID NO: 9025 - DNA, 25 bp, Artificial sequence
  SiRNA target sequence
tgtttaatacatcacttcaatattg

SEQ ID NO: 9026 - DNA, 25 bp, Artificial sequence
  SiRNA target sequence
gtttaatacatcacttcaatattgt

SEQ ID NO: 9027 - DNA, 25 bp, Artificial sequence
  SiRNA target sequence
tttaatacatcacttcaatattgtt

SEQ ID NO: 9028 - DNA, 25 bp, Artificial sequence
  SiRNA target sequence
ttaatacatcacttcaatattgttg

SEQ ID NO: 9029 - DNA, 25 bp, Artificial sequence
  SiRNA target sequence
taatacatcacttcaatattgttgt

SEQ ID NO: 9030 - DNA, 25 bp, Artificial sequence
  SiRNA target sequence
aatacatcacttcaatattgttgta

SEQ ID NO: 9031 - DNA, 25 bp, Artificial sequence
  SiRNA target sequence
atacatcacttcaatattgttgtaa

SEQ ID NO: 9032 - DNA, 25 bp, Artificial sequence
  SiRNA target sequence
tacatcacttcaatattgttgtaat

SEQ ID NO: 9033 - DNA, 25 bp, Artificial sequence
  SiRNA target sequence
acatcacttcaatattgttgtaatt

SEQ ID NO: 9034 - DNA, 25 bp, Artificial sequence
  SiRNA target sequence
catcacttcaatattgttgtaattc

SEQ ID NO: 9035 - DNA, 25 bp, Artificial sequence
  SiRNA target sequence
atcacttcaatattgttgtaattct

SEQ ID NO: 9036 - DNA, 25 bp, Artificial sequence
  SiRNA target sequence
tcacttcaatattgttgtaattctg

SEQ ID NO: 9037 - DNA, 25 bp, Artificial sequence
  SiRNA target sequence
cacttcaatattgttgtaattctga

SEQ ID NO: 9038 - DNA, 25 bp, Artificial sequence
  SiRNA target sequence
acttcaatattgttgtaattctgat

SEQ ID NO: 9039 - DNA, 25 bp, Artificial sequence
  SiRNA target sequence
cttcaatattgttgtaattctgatg

SEQ ID NO: 9040 - DNA, 25 bp, Artificial sequence
  SiRNA target sequence
ttcaatattgttgtaattctgatga

SEQ ID NO: 9041 - DNA, 25 bp, Artificial sequence
  SiRNA target sequence
tcaatattgttgtaattctgatgag

SEQ ID NO: 9042 - DNA, 25 bp, Artificial sequence
  SiRNA target sequence
caatattgttgtaattctgatgagg

SEQ ID NO: 9043 - DNA, 25 bp, Artificial sequence
  SiRNA target sequence
aatattgttgtaattctgatgaggt

SEQ ID NO: 9044 - DNA, 25 bp, Artificial sequence
  SiRNA target sequence
atattgttgtaattctgatgaggtt

SEQ ID NO: 9045 - DNA, 25 bp, Artificial sequence
  SiRNA target sequence
tattgttgtaattctgatgaggttt

SEQ ID NO: 9046 - DNA, 25 bp, Artificial sequence
  SiRNA target sequence
attgttgtaattctgatgaggtttt

SEQ ID NO: 9047 - DNA, 25 bp, Artificial sequence
  SiRNA target sequence
ttgttgtaattctgatgaggttttt

SEQ ID NO: 9048 - DNA, 25 bp, Artificial sequence
  SiRNA target sequence
tgttgtaattctgatgaggttttta

SEQ ID NO: 9049 - DNA, 25 bp, Artificial sequence
  SiRNA target sequence
gttgtaattctgatgaggtttttat

SEQ ID NO: 9050 - DNA, 25 bp, Artificial sequence
  SiRNA target sequence
ttgtaattctgatgaggtttttatt

SEQ ID NO: 9051 - DNA, 25 bp, Artificial sequence
  SiRNA target sequence
tgtaattctgatgaggtttttattg

SEQ ID NO: 9052 - DNA, 25 bp, Artificial sequence
  SiRNA target sequence
gtaattctgatgaggtttttattgt

SEQ ID NO: 9053 - DNA, 25 bp, Artificial sequence
  SiRNA target sequence
taattctgatgaggtttttattgtt

SEQ ID NO: 9054 - DNA, 25 bp, Artificial sequence
  SiRNA target sequence
aattctgatgaggtttttattgtta

SEQ ID NO: 9055 - DNA, 25 bp, Artificial sequence
  SiRNA target sequence
attctgatgaggtttttattgttaa

SEQ ID NO: 9056 - DNA, 25 bp, Artificial sequence
  SiRNA target sequence
ttctgatgaggtttttattgttaag

SEQ ID NO: 9057 - DNA, 25 bp, Artificial sequence
  SiRNA target sequence
tctgatgaggtttttattgttaagc

SEQ ID NO: 9058 - DNA, 25 bp, Artificial sequence
  SiRNA target sequence
ctgatgaggtttttattgttaagca

SEQ ID NO: 9059 - DNA, 25 bp, Artificial sequence
  SiRNA target sequence
tgatgaggtttttattgttaagcag

SEQ ID NO: 9060 - DNA, 25 bp, Artificial sequence
  SiRNA target sequence
gatgaggtttttattgttaagcagt

SEQ ID NO: 9061 - DNA, 25 bp, Artificial sequence
  SiRNA target sequence
atgaggtttttattgttaagcagtc

SEQ ID NO: 9062 - DNA, 25 bp, Artificial sequence
  SiRNA target sequence
tgaggtttttattgttaagcagtca

SEQ ID NO: 9063 - DNA, 25 bp, Artificial sequence
  SiRNA target sequence
gaggtttttattgttaagcagtcac

SEQ ID NO: 9064 - DNA, 25 bp, Artificial sequence
  SiRNA target sequence
aggtttttattgttaagcagtcact

SEQ ID NO: 9065 - DNA, 25 bp, Artificial sequence
  SiRNA target sequence
ggtttttattgttaagcagtcactt

SEQ ID NO: 9066 - DNA, 25 bp, Artificial sequence
  SiRNA target sequence
gtttttattgttaagcagtcactta

SEQ ID NO: 9067 - DNA, 25 bp, Artificial sequence
  SiRNA target sequence
tttttattgttaagcagtcacttat

SEQ ID NO: 9068 - DNA, 25 bp, Artificial sequence
  SiRNA target sequence
ttttattgttaagcagtcacttatt

SEQ ID NO: 9069 - DNA, 25 bp, Artificial sequence
  SiRNA target sequence
tttattgttaagcagtcacttattt

SEQ ID NO: 9070 - DNA, 25 bp, Artificial sequence
  SiRNA target sequence
ttattgttaagcagtcacttatttt

SEQ ID NO: 9071 - DNA, 25 bp, Artificial sequence
  SiRNA target sequence
tattgttaagcagtcacttatttta

SEQ ID NO: 9072 - DNA, 25 bp, Artificial sequence
  SiRNA target sequence
attgttaagcagtcacttattttaa

SEQ ID NO: 9073 - DNA, 25 bp, Artificial sequence
  SiRNA target sequence
ttgttaagcagtcacttattttaat

SEQ ID NO: 9074 - DNA, 25 bp, Artificial sequence
  SiRNA target sequence
tgttaagcagtcacttattttaata

SEQ ID NO: 9075 - DNA, 25 bp, Artificial sequence
  SiRNA target sequence
gttaagcagtcacttattttaatag

SEQ ID NO: 9076 - DNA, 25 bp, Artificial sequence
  SiRNA target sequence
ttaagcagtcacttattttaataga

SEQ ID NO: 9077 - DNA, 25 bp, Artificial sequence
  SiRNA target sequence
taagcagtcacttattttaatagaa

SEQ ID NO: 9078 - DNA, 25 bp, Artificial sequence
  SiRNA target sequence
aagcagtcacttattttaatagaag

SEQ ID NO: 9079 - DNA, 25 bp, Artificial sequence
  SiRNA target sequence
agcagtcacttattttaatagaagt

SEQ ID NO: 9080 - DNA, 25 bp, Artificial sequence
  SiRNA target sequence
gcagtcacttattttaatagaagta

SEQ ID NO: 9081 - DNA, 25 bp, Artificial sequence
  SiRNA target sequence
cagtcacttattttaatagaagtac

SEQ ID NO: 9082 - DNA, 25 bp, Artificial sequence
  SiRNA target sequence
agtcacttattttaatagaagtaca

SEQ ID NO: 9083 - DNA, 25 bp, Artificial sequence
  SiRNA target sequence
gtcacttattttaatagaagtacat

SEQ ID NO: 9084 - DNA, 25 bp, Artificial sequence
  SiRNA target sequence
tcacttattttaatagaagtacatg

SEQ ID NO: 9085 - DNA, 25 bp, Artificial sequence
  SiRNA target sequence
cacttattttaatagaagtacatga

SEQ ID NO: 9086 - DNA, 25 bp, Artificial sequence
  SiRNA target sequence
acttattttaatagaagtacatgaa

SEQ ID NO: 9087 - DNA, 25 bp, Artificial sequence
  SiRNA target sequence
cttattttaatagaagtacatgaat

SEQ ID NO: 9088 - DNA, 25 bp, Artificial sequence
  SiRNA target sequence
ttattttaatagaagtacatgaata

SEQ ID NO: 9089 - DNA, 25 bp, Artificial sequence
  SiRNA target sequence
tattttaatagaagtacatgaatac

SEQ ID NO: 9090 - DNA, 25 bp, Artificial sequence
  SiRNA target sequence
attttaatagaagtacatgaataca

SEQ ID NO: 9091 - DNA, 25 bp, Artificial sequence
  SiRNA target sequence
ttttaatagaagtacatgaatacat

SEQ ID NO: 9092 - DNA, 25 bp, Artificial sequence
  SiRNA target sequence
tttaatagaagtacatgaatacatc

SEQ ID NO: 9093 - DNA, 25 bp, Artificial sequence
  SiRNA target sequence
ttaatagaagtacatgaatacatca

SEQ ID NO: 9094 - DNA, 25 bp, Artificial sequence
  SiRNA target sequence
taatagaagtacatgaatacatcaa

SEQ ID NO: 9095 - DNA, 25 bp, Artificial sequence
  SiRNA target sequence
aatagaagtacatgaatacatcaaa

SEQ ID NO: 9096 - DNA, 25 bp, Artificial sequence
  SiRNA target sequence
atagaagtacatgaatacatcaaag

SEQ ID NO: 9097 - DNA, 25 bp, Artificial sequence
  SiRNA target sequence
tagaagtacatgaatacatcaaaga

SEQ ID NO: 9098 - DNA, 25 bp, Artificial sequence
  SiRNA target sequence
agaagtacatgaatacatcaaagaa

SEQ ID NO: 9099 - DNA, 25 bp, Artificial sequence
  SiRNA target sequence
gaagtacatgaatacatcaaagaaa

SEQ ID NO: 9100 - DNA, 25 bp, Artificial sequence
  SiRNA target sequence
aagtacatgaatacatcaaagaaaa

SEQ ID NO: 9101 - DNA, 25 bp, Artificial sequence
  SiRNA target sequence
agtacatgaatacatcaaagaaaat

SEQ ID NO: 9102 - DNA, 25 bp, Artificial sequence
  SiRNA target sequence
gtacatgaatacatcaaagaaaata

SEQ ID NO: 9103 - DNA, 25 bp, Artificial sequence
  SiRNA target sequence
tacatgaatacatcaaagaaaataa

SEQ ID NO: 9104 - DNA, 25 bp, Artificial sequence
  SiRNA target sequence
acatgaatacatcaaagaaaataaa

SEQ ID NO: 9105 - DNA, 25 bp, Artificial sequence
  SiRNA target sequence
catgaatacatcaaagaaaataaaa

SEQ ID NO: 9106 - DNA, 25 bp, Artificial sequence
  SiRNA target sequence
atgaatacatcaaagaaaataaaat

SEQ ID NO: 9107 - DNA, 25 bp, Artificial sequence
  SiRNA target sequence
tgaatacatcaaagaaaataaaata

SEQ ID NO: 9108 - DNA, 25 bp, Artificial sequence
  SiRNA target sequence
gaatacatcaaagaaaataaaatat

SEQ ID NO: 9109 - DNA, 25 bp, Artificial sequence
  SiRNA target sequence
aatacatcaaagaaaataaaatata

SEQ ID NO: 9110 - DNA, 25 bp, Artificial sequence
  SiRNA target sequence
atacatcaaagaaaataaaatataa

SEQ ID NO: 9111 - DNA, 26 bp, Artificial sequence
  SiRNA target sequence
atgaaacgaaaaacagaaatatttat

SEQ ID NO: 9112 - DNA, 26 bp, Artificial sequence
  SiRNA target sequence
tgaaacgaaaaacagaaatatttatt

SEQ ID NO: 9113 - DNA, 26 bp, Artificial sequence
  SiRNA target sequence
gaaacgaaaaacagaaatatttattg

SEQ ID NO: 9114 - DNA, 26 bp, Artificial sequence
  SiRNA target sequence
aaacgaaaaacagaaatatttattgc

SEQ ID NO: 9115 - DNA, 26 bp, Artificial sequence
  SiRNA target sequence
aacgaaaaacagaaatatttattgct

SEQ ID NO: 9116 - DNA, 26 bp, Artificial sequence
  SiRNA target sequence
acgaaaaacagaaatatttattgcta

SEQ ID NO: 9117 - DNA, 26 bp, Artificial sequence
  SiRNA target sequence
cgaaaaacagaaatatttattgctat

SEQ ID NO: 9118 - DNA, 26 bp, Artificial sequence
  SiRNA target sequence
gaaaaacagaaatatttattgctatt

SEQ ID NO: 9119 - DNA, 26 bp, Artificial sequence
  SiRNA target sequence
aaaaacagaaatatttattgctatta

SEQ ID NO: 9120 - DNA, 26 bp, Artificial sequence
  SiRNA target sequence
aaaacagaaatatttattgctattac

SEQ ID NO: 9121 - DNA, 26 bp, Artificial sequence
  SiRNA target sequence
aaacagaaatatttattgctattaca

SEQ ID NO: 9122 - DNA, 26 bp, Artificial sequence
  SiRNA target sequence
aacagaaatatttattgctattacag

SEQ ID NO: 9123 - DNA, 26 bp, Artificial sequence
  SiRNA target sequence
acagaaatatttattgctattacagt

SEQ ID NO: 9124 - DNA, 26 bp, Artificial sequence
  SiRNA target sequence
cagaaatatttattgctattacagta

SEQ ID NO: 9125 - DNA, 26 bp, Artificial sequence
  SiRNA target sequence
agaaatatttattgctattacagtag

SEQ ID NO: 9126 - DNA, 26 bp, Artificial sequence
  SiRNA target sequence
gaaatatttattgctattacagtagt

SEQ ID NO: 9127 - DNA, 26 bp, Artificial sequence
  SiRNA target sequence
aaatatttattgctattacagtagtc

SEQ ID NO: 9128 - DNA, 26 bp, Artificial sequence
  SiRNA target sequence
aatatttattgctattacagtagtca

SEQ ID NO: 9129 - DNA, 26 bp, Artificial sequence
  SiRNA target sequence
atatttattgctattacagtagtcac

SEQ ID NO: 9130 - DNA, 26 bp, Artificial sequence
  SiRNA target sequence
tatttattgctattacagtagtcact

SEQ ID NO: 9131 - DNA, 26 bp, Artificial sequence
  SiRNA target sequence
atttattgctattacagtagtcactg

SEQ ID NO: 9132 - DNA, 26 bp, Artificial sequence
  SiRNA target sequence
tttattgctattacagtagtcactgc

SEQ ID NO: 9133 - DNA, 26 bp, Artificial sequence
  SiRNA target sequence
ttattgctattacagtagtcactgca

SEQ ID NO: 9134 - DNA, 26 bp, Artificial sequence
  SiRNA target sequence
tattgctattacagtagtcactgcag

SEQ ID NO: 9135 - DNA, 26 bp, Artificial sequence
  SiRNA target sequence
attgctattacagtagtcactgcagt

SEQ ID NO: 9136 - DNA, 26 bp, Artificial sequence
  SiRNA target sequence
ttgctattacagtagtcactgcagtg

SEQ ID NO: 9137 - DNA, 26 bp, Artificial sequence
  SiRNA target sequence
tgctattacagtagtcactgcagtga

SEQ ID NO: 9138 - DNA, 26 bp, Artificial sequence
  SiRNA target sequence
gctattacagtagtcactgcagtgac

SEQ ID NO: 9139 - DNA, 26 bp, Artificial sequence
  SiRNA target sequence
ctattacagtagtcactgcagtgaca

SEQ ID NO: 9140 - DNA, 26 bp, Artificial sequence
  SiRNA target sequence
tattacagtagtcactgcagtgacat

SEQ ID NO: 9141 - DNA, 26 bp, Artificial sequence
  SiRNA target sequence
attacagtagtcactgcagtgacatg

SEQ ID NO: 9142 - DNA, 26 bp, Artificial sequence
  SiRNA target sequence
ttacagtagtcactgcagtgacatgt

SEQ ID NO: 9143 - DNA, 26 bp, Artificial sequence
  SiRNA target sequence
tacagtagtcactgcagtgacatgtt

SEQ ID NO: 9144 - DNA, 26 bp, Artificial sequence
  SiRNA target sequence
acagtagtcactgcagtgacatgtta

SEQ ID NO: 9145 - DNA, 26 bp, Artificial sequence
  SiRNA target sequence
cagtagtcactgcagtgacatgttac

SEQ ID NO: 9146 - DNA, 26 bp, Artificial sequence
  SiRNA target sequence
agtagtcactgcagtgacatgttact

SEQ ID NO: 9147 - DNA, 26 bp, Artificial sequence
  SiRNA target sequence
gtagtcactgcagtgacatgttactt

SEQ ID NO: 9148 - DNA, 26 bp, Artificial sequence
  SiRNA target sequence
tagtcactgcagtgacatgttactta

SEQ ID NO: 9149 - DNA, 26 bp, Artificial sequence
  SiRNA target sequence
agtcactgcagtgacatgttacttat

SEQ ID NO: 9150 - DNA, 26 bp, Artificial sequence
  SiRNA target sequence
gtcactgcagtgacatgttacttatt

SEQ ID NO: 9151 - DNA, 26 bp, Artificial sequence
  SiRNA target sequence
tcactgcagtgacatgttacttattt

SEQ ID NO: 9152 - DNA, 26 bp, Artificial sequence
  SiRNA target sequence
cactgcagtgacatgttacttattta

SEQ ID NO: 9153 - DNA, 26 bp, Artificial sequence
  SiRNA target sequence
actgcagtgacatgttacttatttaa

SEQ ID NO: 9154 - DNA, 26 bp, Artificial sequence
  SiRNA target sequence
ctgcagtgacatgttacttatttaaa

SEQ ID NO: 9155 - DNA, 26 bp, Artificial sequence
  SiRNA target sequence
tgcagtgacatgttacttatttaaaa

SEQ ID NO: 9156 - DNA, 26 bp, Artificial sequence
  SiRNA target sequence
gcagtgacatgttacttatttaaaaa

SEQ ID NO: 9157 - DNA, 26 bp, Artificial sequence
  SiRNA target sequence
cagtgacatgttacttatttaaaaaa

SEQ ID NO: 9158 - DNA, 26 bp, Artificial sequence
  SiRNA target sequence
agtgacatgttacttatttaaaaaaa

SEQ ID NO: 9159 - DNA, 26 bp, Artificial sequence
  SiRNA target sequence
gtgacatgttacttatttaaaaaaat

SEQ ID NO: 9160 - DNA, 26 bp, Artificial sequence
  SiRNA target sequence
tgacatgttacttatttaaaaaaata

SEQ ID NO: 9161 - DNA, 26 bp, Artificial sequence
  SiRNA target sequence
gacatgttacttatttaaaaaaataa

SEQ ID NO: 9162 - DNA, 26 bp, Artificial sequence
  SiRNA target sequence
acatgttacttatttaaaaaaataat

SEQ ID NO: 9163 - DNA, 26 bp, Artificial sequence
  SiRNA target sequence
catgttacttatttaaaaaaataata

SEQ ID NO: 9164 - DNA, 26 bp, Artificial sequence
  SiRNA target sequence
atgttacttatttaaaaaaataataa

SEQ ID NO: 9165 - DNA, 26 bp, Artificial sequence
  SiRNA target sequence
tgttacttatttaaaaaaataataaa

SEQ ID NO: 9166 - DNA, 26 bp, Artificial sequence
  SiRNA target sequence
gttacttatttaaaaaaataataaat

SEQ ID NO: 9167 - DNA, 26 bp, Artificial sequence
  SiRNA target sequence
ttacttatttaaaaaaataataaata

SEQ ID NO: 9168 - DNA, 26 bp, Artificial sequence
  SiRNA target sequence
tacttatttaaaaaaataataaatag

SEQ ID NO: 9169 - DNA, 26 bp, Artificial sequence
  SiRNA target sequence
acttatttaaaaaaataataaataga

SEQ ID NO: 9170 - DNA, 26 bp, Artificial sequence
  SiRNA target sequence
cttatttaaaaaaataataaatagac

SEQ ID NO: 9171 - DNA, 26 bp, Artificial sequence
  SiRNA target sequence
ttatttaaaaaaataataaatagaca

SEQ ID NO: 9172 - DNA, 26 bp, Artificial sequence
  SiRNA target sequence
tatttaaaaaaataataaatagacaa

SEQ ID NO: 9173 - DNA, 26 bp, Artificial sequence
  SiRNA target sequence
atttaaaaaaataataaatagacaaa

SEQ ID NO: 9174 - DNA, 26 bp, Artificial sequence
  SiRNA target sequence
tttaaaaaaataataaatagacaaaa

SEQ ID NO: 9175 - DNA, 26 bp, Artificial sequence
  SiRNA target sequence
ttaaaaaaataataaatagacaaaag

SEQ ID NO: 9176 - DNA, 26 bp, Artificial sequence
  SiRNA target sequence
taaaaaaataataaatagacaaaagt

SEQ ID NO: 9177 - DNA, 26 bp, Artificial sequence
  SiRNA target sequence
aaaaaaataataaatagacaaaagtc

SEQ ID NO: 9178 - DNA, 26 bp, Artificial sequence
  SiRNA target sequence
aaaaaataataaatagacaaaagtct

SEQ ID NO: 9179 - DNA, 26 bp, Artificial sequence
  SiRNA target sequence
aaaaataataaatagacaaaagtctg

SEQ ID NO: 9180 - DNA, 26 bp, Artificial sequence
  SiRNA target sequence
aaaataataaatagacaaaagtctga

SEQ ID NO: 9181 - DNA, 26 bp, Artificial sequence
  SiRNA target sequence
aaataataaatagacaaaagtctgat

SEQ ID NO: 9182 - DNA, 26 bp, Artificial sequence
  SiRNA target sequence
aataataaatagacaaaagtctgatt

SEQ ID NO: 9183 - DNA, 26 bp, Artificial sequence
  SiRNA target sequence
ataataaatagacaaaagtctgatta

SEQ ID NO: 9184 - DNA, 26 bp, Artificial sequence
  SiRNA target sequence
taataaatagacaaaagtctgattat

SEQ ID NO: 9185 - DNA, 26 bp, Artificial sequence
  SiRNA target sequence
aataaatagacaaaagtctgattata

SEQ ID NO: 9186 - DNA, 26 bp, Artificial sequence
  SiRNA target sequence
ataaatagacaaaagtctgattatac

SEQ ID NO: 9187 - DNA, 26 bp, Artificial sequence
  SiRNA target sequence
taaatagacaaaagtctgattataca

SEQ ID NO: 9188 - DNA, 26 bp, Artificial sequence
  SiRNA target sequence
aaatagacaaaagtctgattatacat

SEQ ID NO: 9189 - DNA, 26 bp, Artificial sequence
  SiRNA target sequence
aatagacaaaagtctgattatacatc

SEQ ID NO: 9190 - DNA, 26 bp, Artificial sequence
  SiRNA target sequence
atagacaaaagtctgattatacatca

SEQ ID NO: 9191 - DNA, 26 bp, Artificial sequence
  SiRNA target sequence
tagacaaaagtctgattatacatcaa

SEQ ID NO: 9192 - DNA, 26 bp, Artificial sequence
  SiRNA target sequence
agacaaaagtctgattatacatcaat

SEQ ID NO: 9193 - DNA, 26 bp, Artificial sequence
  SiRNA target sequence
gacaaaagtctgattatacatcaata

SEQ ID NO: 9194 - DNA, 26 bp, Artificial sequence
  SiRNA target sequence
acaaaagtctgattatacatcaataa

SEQ ID NO: 9195 - DNA, 26 bp, Artificial sequence
  SiRNA target sequence
caaaagtctgattatacatcaataaa

SEQ ID NO: 9196 - DNA, 26 bp, Artificial sequence
  SiRNA target sequence
aaaagtctgattatacatcaataaaa

SEQ ID NO: 9197 - DNA, 26 bp, Artificial sequence
  SiRNA target sequence
aaagtctgattatacatcaataaaac

SEQ ID NO: 9198 - DNA, 26 bp, Artificial sequence
  SiRNA target sequence
aagtctgattatacatcaataaaaca

SEQ ID NO: 9199 - DNA, 26 bp, Artificial sequence
  SiRNA target sequence
agtctgattatacatcaataaaacag

SEQ ID NO: 9200 - DNA, 26 bp, Artificial sequence
  SiRNA target sequence
gtctgattatacatcaataaaacagg

SEQ ID NO: 9201 - DNA, 26 bp, Artificial sequence
  SiRNA target sequence
tctgattatacatcaataaaacagga

SEQ ID NO: 9202 - DNA, 26 bp, Artificial sequence
  SiRNA target sequence
ctgattatacatcaataaaacaggaa

SEQ ID NO: 9203 - DNA, 26 bp, Artificial sequence
  SiRNA target sequence
tgattatacatcaataaaacaggaag

SEQ ID NO: 9204 - DNA, 26 bp, Artificial sequence
  SiRNA target sequence
gattatacatcaataaaacaggaagc

SEQ ID NO: 9205 - DNA, 26 bp, Artificial sequence
  SiRNA target sequence
attatacatcaataaaacaggaagca

SEQ ID NO: 9206 - DNA, 26 bp, Artificial sequence
  SiRNA target sequence
ttatacatcaataaaacaggaagcag

SEQ ID NO: 9207 - DNA, 26 bp, Artificial sequence
  SiRNA target sequence
tatacatcaataaaacaggaagcaga

SEQ ID NO: 9208 - DNA, 26 bp, Artificial sequence
  SiRNA target sequence
atacatcaataaaacaggaagcagat

SEQ ID NO: 9209 - DNA, 26 bp, Artificial sequence
  SiRNA target sequence
tacatcaataaaacaggaagcagata

SEQ ID NO: 9210 - DNA, 26 bp, Artificial sequence
  SiRNA target sequence
acatcaataaaacaggaagcagataa

SEQ ID NO: 9211 - DNA, 26 bp, Artificial sequence
  SiRNA target sequence
catcaataaaacaggaagcagataaa

SEQ ID NO: 9212 - DNA, 26 bp, Artificial sequence
  SiRNA target sequence
atcaataaaacaggaagcagataaat

SEQ ID NO: 9213 - DNA, 26 bp, Artificial sequence
  SiRNA target sequence
tcaataaaacaggaagcagataaata

SEQ ID NO: 9214 - DNA, 26 bp, Artificial sequence
  SiRNA target sequence
caataaaacaggaagcagataaatat

SEQ ID NO: 9215 - DNA, 26 bp, Artificial sequence
  SiRNA target sequence
aataaaacaggaagcagataaatatt

SEQ ID NO: 9216 - DNA, 26 bp, Artificial sequence
  SiRNA target sequence
ataaaacaggaagcagataaatattt

SEQ ID NO: 9217 - DNA, 26 bp, Artificial sequence
  SiRNA target sequence
taaaacaggaagcagataaatatttt

SEQ ID NO: 9218 - DNA, 26 bp, Artificial sequence
  SiRNA target sequence
aaaacaggaagcagataaatatttta

SEQ ID NO: 9219 - DNA, 26 bp, Artificial sequence
  SiRNA target sequence
aaacaggaagcagataaatattttat

SEQ ID NO: 9220 - DNA, 26 bp, Artificial sequence
  SiRNA target sequence
aacaggaagcagataaatattttata

SEQ ID NO: 9221 - DNA, 26 bp, Artificial sequence
  SiRNA target sequence
acaggaagcagataaatattttatac

SEQ ID NO: 9222 - DNA, 26 bp, Artificial sequence
  SiRNA target sequence
caggaagcagataaatattttataca

SEQ ID NO: 9223 - DNA, 26 bp, Artificial sequence
  SiRNA target sequence
aggaagcagataaatattttatacaa

SEQ ID NO: 9224 - DNA, 26 bp, Artificial sequence
  SiRNA target sequence
ggaagcagataaatattttatacaag

SEQ ID NO: 9225 - DNA, 26 bp, Artificial sequence
  SiRNA target sequence
gaagcagataaatattttatacaaga

SEQ ID NO: 9226 - DNA, 26 bp, Artificial sequence
  SiRNA target sequence
aagcagataaatattttatacaagaa

SEQ ID NO: 9227 - DNA, 26 bp, Artificial sequence
  SiRNA target sequence
agcagataaatattttatacaagaag

SEQ ID NO: 9228 - DNA, 26 bp, Artificial sequence
  SiRNA target sequence
gcagataaatattttatacaagaaga

SEQ ID NO: 9229 - DNA, 26 bp, Artificial sequence
  SiRNA target sequence
cagataaatattttatacaagaagat

SEQ ID NO: 9230 - DNA, 26 bp, Artificial sequence
  SiRNA target sequence
agataaatattttatacaagaagatt

SEQ ID NO: 9231 - DNA, 26 bp, Artificial sequence
  SiRNA target sequence
gataaatattttatacaagaagatta

SEQ ID NO: 9232 - DNA, 26 bp, Artificial sequence
  SiRNA target sequence
ataaatattttatacaagaagattat

SEQ ID NO: 9233 - DNA, 26 bp, Artificial sequence
  SiRNA target sequence
taaatattttatacaagaagattata

SEQ ID NO: 9234 - DNA, 26 bp, Artificial sequence
  SiRNA target sequence
aaatattttatacaagaagattataa

SEQ ID NO: 9235 - DNA, 26 bp, Artificial sequence
  SiRNA target sequence
aatattttatacaagaagattataaa

SEQ ID NO: 9236 - DNA, 26 bp, Artificial sequence
  SiRNA target sequence
atattttatacaagaagattataaaa

SEQ ID NO: 9237 - DNA, 26 bp, Artificial sequence
  SiRNA target sequence
tattttatacaagaagattataaaaa

SEQ ID NO: 9238 - DNA, 26 bp, Artificial sequence
  SiRNA target sequence
attttatacaagaagattataaaaat

SEQ ID NO: 9239 - DNA, 26 bp, Artificial sequence
  SiRNA target sequence
ttttatacaagaagattataaaaatg

SEQ ID NO: 9240 - DNA, 26 bp, Artificial sequence
  SiRNA target sequence
tttatacaagaagattataaaaatgc

SEQ ID NO: 9241 - DNA, 26 bp, Artificial sequence
  SiRNA target sequence
ttatacaagaagattataaaaatgct

SEQ ID NO: 9242 - DNA, 26 bp, Artificial sequence
  SiRNA target sequence
tatacaagaagattataaaaatgcta

SEQ ID NO: 9243 - DNA, 26 bp, Artificial sequence
  SiRNA target sequence
atacaagaagattataaaaatgctat

SEQ ID NO: 9244 - DNA, 26 bp, Artificial sequence
  SiRNA target sequence
tacaagaagattataaaaatgctatt

SEQ ID NO: 9245 - DNA, 26 bp, Artificial sequence
  SiRNA target sequence
acaagaagattataaaaatgctattc

SEQ ID NO: 9246 - DNA, 26 bp, Artificial sequence
  SiRNA target sequence
caagaagattataaaaatgctattct

SEQ ID NO: 9247 - DNA, 26 bp, Artificial sequence
  SiRNA target sequence
aagaagattataaaaatgctattctg

SEQ ID NO: 9248 - DNA, 26 bp, Artificial sequence
  SiRNA target sequence
agaagattataaaaatgctattctgt

SEQ ID NO: 9249 - DNA, 26 bp, Artificial sequence
  SiRNA target sequence
gaagattataaaaatgctattctgtt

SEQ ID NO: 9250 - DNA, 26 bp, Artificial sequence
  SiRNA target sequence
aagattataaaaatgctattctgttg

SEQ ID NO: 9251 - DNA, 26 bp, Artificial sequence
  SiRNA target sequence
agattataaaaatgctattctgttgt

SEQ ID NO: 9252 - DNA, 26 bp, Artificial sequence
  SiRNA target sequence
gattataaaaatgctattctgttgta

SEQ ID NO: 9253 - DNA, 26 bp, Artificial sequence
  SiRNA target sequence
attataaaaatgctattctgttgtac

SEQ ID NO: 9254 - DNA, 26 bp, Artificial sequence
  SiRNA target sequence
ttataaaaatgctattctgttgtaca

SEQ ID NO: 9255 - DNA, 26 bp, Artificial sequence
  SiRNA target sequence
tataaaaatgctattctgttgtacac

SEQ ID NO: 9256 - DNA, 26 bp, Artificial sequence
  SiRNA target sequence
ataaaaatgctattctgttgtacact

SEQ ID NO: 9257 - DNA, 26 bp, Artificial sequence
  SiRNA target sequence
taaaaatgctattctgttgtacacta

SEQ ID NO: 9258 - DNA, 26 bp, Artificial sequence
  SiRNA target sequence
aaaaatgctattctgttgtacactaa

SEQ ID NO: 9259 - DNA, 26 bp, Artificial sequence
  SiRNA target sequence
aaaatgctattctgttgtacactaaa

SEQ ID NO: 9260 - DNA, 26 bp, Artificial sequence
  SiRNA target sequence
aaatgctattctgttgtacactaaat

SEQ ID NO: 9261 - DNA, 26 bp, Artificial sequence
  SiRNA target sequence
aatgctattctgttgtacactaaatg

SEQ ID NO: 9262 - DNA, 26 bp, Artificial sequence
  SiRNA target sequence
atgctattctgttgtacactaaatgt

SEQ ID NO: 9263 - DNA, 26 bp, Artificial sequence
  SiRNA target sequence
tgctattctgttgtacactaaatgta

SEQ ID NO: 9264 - DNA, 26 bp, Artificial sequence
  SiRNA target sequence
gctattctgttgtacactaaatgtaa

SEQ ID NO: 9265 - DNA, 26 bp, Artificial sequence
  SiRNA target sequence
ctattctgttgtacactaaatgtaaa

SEQ ID NO: 9266 - DNA, 26 bp, Artificial sequence
  SiRNA target sequence
tattctgttgtacactaaatgtaaat

SEQ ID NO: 9267 - DNA, 26 bp, Artificial sequence
  SiRNA target sequence
attctgttgtacactaaatgtaaata

SEQ ID NO: 9268 - DNA, 26 bp, Artificial sequence
  SiRNA target sequence
ttctgttgtacactaaatgtaaatat

SEQ ID NO: 9269 - DNA, 26 bp, Artificial sequence
  SiRNA target sequence
tctgttgtacactaaatgtaaatata

SEQ ID NO: 9270 - DNA, 26 bp, Artificial sequence
  SiRNA target sequence
ctgttgtacactaaatgtaaatatat

SEQ ID NO: 9271 - DNA, 26 bp, Artificial sequence
  SiRNA target sequence
tgttgtacactaaatgtaaatatatg

SEQ ID NO: 9272 - DNA, 26 bp, Artificial sequence
  SiRNA target sequence
gttgtacactaaatgtaaatatatga

SEQ ID NO: 9273 - DNA, 26 bp, Artificial sequence
  SiRNA target sequence
ttgtacactaaatgtaaatatatgaa

SEQ ID NO: 9274 - DNA, 26 bp, Artificial sequence
  SiRNA target sequence
tgtacactaaatgtaaatatatgaaa

SEQ ID NO: 9275 - DNA, 26 bp, Artificial sequence
  SiRNA target sequence
gtacactaaatgtaaatatatgaaaa

SEQ ID NO: 9276 - DNA, 26 bp, Artificial sequence
  SiRNA target sequence
tacactaaatgtaaatatatgaaaag

SEQ ID NO: 9277 - DNA, 26 bp, Artificial sequence
  SiRNA target sequence
acactaaatgtaaatatatgaaaagt

SEQ ID NO: 9278 - DNA, 26 bp, Artificial sequence
  SiRNA target sequence
cactaaatgtaaatatatgaaaagtg

SEQ ID NO: 9279 - DNA, 26 bp, Artificial sequence
  SiRNA target sequence
actaaatgtaaatatatgaaaagtga

SEQ ID NO: 9280 - DNA, 26 bp, Artificial sequence
  SiRNA target sequence
ctaaatgtaaatatatgaaaagtgat

SEQ ID NO: 9281 - DNA, 26 bp, Artificial sequence
  SiRNA target sequence
taaatgtaaatatatgaaaagtgatg

SEQ ID NO: 9282 - DNA, 26 bp, Artificial sequence
  SiRNA target sequence
aaatgtaaatatatgaaaagtgatgc

SEQ ID NO: 9283 - DNA, 26 bp, Artificial sequence
  SiRNA target sequence
aatgtaaatatatgaaaagtgatgct

SEQ ID NO: 9284 - DNA, 26 bp, Artificial sequence
  SiRNA target sequence
atgtaaatatatgaaaagtgatgctg

SEQ ID NO: 9285 - DNA, 26 bp, Artificial sequence
  SiRNA target sequence
tgtaaatatatgaaaagtgatgctga

SEQ ID NO: 9286 - DNA, 26 bp, Artificial sequence
  SiRNA target sequence
gtaaatatatgaaaagtgatgctgaa

SEQ ID NO: 9287 - DNA, 26 bp, Artificial sequence
  SiRNA target sequence
taaatatatgaaaagtgatgctgaaa

SEQ ID NO: 9288 - DNA, 26 bp, Artificial sequence
  SiRNA target sequence
aaatatatgaaaagtgatgctgaaat

SEQ ID NO: 9289 - DNA, 26 bp, Artificial sequence
  SiRNA target sequence
aatatatgaaaagtgatgctgaaatt

SEQ ID NO: 9290 - DNA, 26 bp, Artificial sequence
  SiRNA target sequence
atatatgaaaagtgatgctgaaattc

SEQ ID NO: 9291 - DNA, 26 bp, Artificial sequence
  SiRNA target sequence
tatatgaaaagtgatgctgaaattct

SEQ ID NO: 9292 - DNA, 26 bp, Artificial sequence
  SiRNA target sequence
atatgaaaagtgatgctgaaattctt

SEQ ID NO: 9293 - DNA, 26 bp, Artificial sequence
  SiRNA target sequence
tatgaaaagtgatgctgaaattctta

SEQ ID NO: 9294 - DNA, 26 bp, Artificial sequence
  SiRNA target sequence
atgaaaagtgatgctgaaattcttac

SEQ ID NO: 9295 - DNA, 26 bp, Artificial sequence
  SiRNA target sequence
tgaaaagtgatgctgaaattcttact

SEQ ID NO: 9296 - DNA, 26 bp, Artificial sequence
  SiRNA target sequence
gaaaagtgatgctgaaattcttacta

SEQ ID NO: 9297 - DNA, 26 bp, Artificial sequence
  SiRNA target sequence
aaaagtgatgctgaaattcttactaa

SEQ ID NO: 9298 - DNA, 26 bp, Artificial sequence
  SiRNA target sequence
aaagtgatgctgaaattcttactaaa

SEQ ID NO: 9299 - DNA, 26 bp, Artificial sequence
  SiRNA target sequence
aagtgatgctgaaattcttactaaaa

SEQ ID NO: 9300 - DNA, 26 bp, Artificial sequence
  SiRNA target sequence
agtgatgctgaaattcttactaaaat

SEQ ID NO: 9301 - DNA, 26 bp, Artificial sequence
  SiRNA target sequence
gtgatgctgaaattcttactaaaatt

SEQ ID NO: 9302 - DNA, 26 bp, Artificial sequence
  SiRNA target sequence
tgatgctgaaattcttactaaaatta

SEQ ID NO: 9303 - DNA, 26 bp, Artificial sequence
  SiRNA target sequence
gatgctgaaattcttactaaaattag

SEQ ID NO: 9304 - DNA, 26 bp, Artificial sequence
  SiRNA target sequence
atgctgaaattcttactaaaattagt

SEQ ID NO: 9305 - DNA, 26 bp, Artificial sequence
  SiRNA target sequence
tgctgaaattcttactaaaattagtc

SEQ ID NO: 9306 - DNA, 26 bp, Artificial sequence
  SiRNA target sequence
gctgaaattcttactaaaattagtct

SEQ ID NO: 9307 - DNA, 26 bp, Artificial sequence
  SiRNA target sequence
ctgaaattcttactaaaattagtctc

SEQ ID NO: 9308 - DNA, 26 bp, Artificial sequence
  SiRNA target sequence
tgaaattcttactaaaattagtctct

SEQ ID NO: 9309 - DNA, 26 bp, Artificial sequence
  SiRNA target sequence
gaaattcttactaaaattagtctctg

SEQ ID NO: 9310 - DNA, 26 bp, Artificial sequence
  SiRNA target sequence
aaattcttactaaaattagtctctgt

SEQ ID NO: 9311 - DNA, 26 bp, Artificial sequence
  SiRNA target sequence
aattcttactaaaattagtctctgta

SEQ ID NO: 9312 - DNA, 26 bp, Artificial sequence
  SiRNA target sequence
attcttactaaaattagtctctgtaa

SEQ ID NO: 9313 - DNA, 26 bp, Artificial sequence
  SiRNA target sequence
ttcttactaaaattagtctctgtaat

SEQ ID NO: 9314 - DNA, 26 bp, Artificial sequence
  SiRNA target sequence
tcttactaaaattagtctctgtaatt

SEQ ID NO: 9315 - DNA, 26 bp, Artificial sequence
  SiRNA target sequence
cttactaaaattagtctctgtaatta

SEQ ID NO: 9316 - DNA, 26 bp, Artificial sequence
  SiRNA target sequence
ttactaaaattagtctctgtaattat

SEQ ID NO: 9317 - DNA, 26 bp, Artificial sequence
  SiRNA target sequence
tactaaaattagtctctgtaattatt

SEQ ID NO: 9318 - DNA, 26 bp, Artificial sequence
  SiRNA target sequence
actaaaattagtctctgtaattattt

SEQ ID NO: 9319 - DNA, 26 bp, Artificial sequence
  SiRNA target sequence
ctaaaattagtctctgtaattatttc

SEQ ID NO: 9320 - DNA, 26 bp, Artificial sequence
  SiRNA target sequence
taaaattagtctctgtaattatttct

SEQ ID NO: 9321 - DNA, 26 bp, Artificial sequence
  SiRNA target sequence
aaaattagtctctgtaattatttctt

SEQ ID NO: 9322 - DNA, 26 bp, Artificial sequence
  SiRNA target sequence
aaattagtctctgtaattatttctta

SEQ ID NO: 9323 - DNA, 26 bp, Artificial sequence
  SiRNA target sequence
aattagtctctgtaattatttcttaa

SEQ ID NO: 9324 - DNA, 26 bp, Artificial sequence
  SiRNA target sequence
attagtctctgtaattatttcttaaa

SEQ ID NO: 9325 - DNA, 26 bp, Artificial sequence
  SiRNA target sequence
ttagtctctgtaattatttcttaaaa

SEQ ID NO: 9326 - DNA, 26 bp, Artificial sequence
  SiRNA target sequence
tagtctctgtaattatttcttaaaaa

SEQ ID NO: 9327 - DNA, 26 bp, Artificial sequence
  SiRNA target sequence
agtctctgtaattatttcttaaaaaa

SEQ ID NO: 9328 - DNA, 26 bp, Artificial sequence
  SiRNA target sequence
gtctctgtaattatttcttaaaaaat

SEQ ID NO: 9329 - DNA, 26 bp, Artificial sequence
  SiRNA target sequence
tctctgtaattatttcttaaaaaatt

SEQ ID NO: 9330 - DNA, 26 bp, Artificial sequence
  SiRNA target sequence
ctctgtaattatttcttaaaaaatta

SEQ ID NO: 9331 - DNA, 26 bp, Artificial sequence
  SiRNA target sequence
tctgtaattatttcttaaaaaattat

SEQ ID NO: 9332 - DNA, 26 bp, Artificial sequence
  SiRNA target sequence
ctgtaattatttcttaaaaaattatc

SEQ ID NO: 9333 - DNA, 26 bp, Artificial sequence
  SiRNA target sequence
tgtaattatttcttaaaaaattatca

SEQ ID NO: 9334 - DNA, 26 bp, Artificial sequence
  SiRNA target sequence
gtaattatttcttaaaaaattatcaa

SEQ ID NO: 9335 - DNA, 26 bp, Artificial sequence
  SiRNA target sequence
taattatttcttaaaaaattatcaag

SEQ ID NO: 9336 - DNA, 26 bp, Artificial sequence
  SiRNA target sequence
aattatttcttaaaaaattatcaaga

SEQ ID NO: 9337 - DNA, 26 bp, Artificial sequence
  SiRNA target sequence
attatttcttaaaaaattatcaagaa

SEQ ID NO: 9338 - DNA, 26 bp, Artificial sequence
  SiRNA target sequence
ttatttcttaaaaaattatcaagaag

SEQ ID NO: 9339 - DNA, 26 bp, Artificial sequence
  SiRNA target sequence
tatttcttaaaaaattatcaagaagt

SEQ ID NO: 9340 - DNA, 26 bp, Artificial sequence
  SiRNA target sequence
atttcttaaaaaattatcaagaagtt

SEQ ID NO: 9341 - DNA, 26 bp, Artificial sequence
  SiRNA target sequence
tttcttaaaaaattatcaagaagtta

SEQ ID NO: 9342 - DNA, 26 bp, Artificial sequence
  SiRNA target sequence
ttcttaaaaaattatcaagaagttat

SEQ ID NO: 9343 - DNA, 26 bp, Artificial sequence
  SiRNA target sequence
tcttaaaaaattatcaagaagttata

SEQ ID NO: 9344 - DNA, 26 bp, Artificial sequence
  SiRNA target sequence
cttaaaaaattatcaagaagttataa

SEQ ID NO: 9345 - DNA, 26 bp, Artificial sequence
  SiRNA target sequence
ttaaaaaattatcaagaagttataaa

SEQ ID NO: 9346 - DNA, 26 bp, Artificial sequence
  SiRNA target sequence
taaaaaattatcaagaagttataaat

SEQ ID NO: 9347 - DNA, 26 bp, Artificial sequence
  SiRNA target sequence
aaaaaattatcaagaagttataaata

SEQ ID NO: 9348 - DNA, 26 bp, Artificial sequence
  SiRNA target sequence
aaaaattatcaagaagttataaataa

SEQ ID NO: 9349 - DNA, 26 bp, Artificial sequence
  SiRNA target sequence
aaaattatcaagaagttataaataat

SEQ ID NO: 9350 - DNA, 26 bp, Artificial sequence
  SiRNA target sequence
aaattatcaagaagttataaataatt

SEQ ID NO: 9351 - DNA, 26 bp, Artificial sequence
  SiRNA target sequence
aattatcaagaagttataaataattc

SEQ ID NO: 9352 - DNA, 26 bp, Artificial sequence
  SiRNA target sequence
attatcaagaagttataaataattct

SEQ ID NO: 9353 - DNA, 26 bp, Artificial sequence
  SiRNA target sequence
ttatcaagaagttataaataattctt

SEQ ID NO: 9354 - DNA, 26 bp, Artificial sequence
  SiRNA target sequence
tatcaagaagttataaataattcttt

SEQ ID NO: 9355 - DNA, 26 bp, Artificial sequence
  SiRNA target sequence
atcaagaagttataaataattcttta

SEQ ID NO: 9356 - DNA, 26 bp, Artificial sequence
  SiRNA target sequence
tcaagaagttataaataattctttat

SEQ ID NO: 9357 - DNA, 26 bp, Artificial sequence
  SiRNA target sequence
caagaagttataaataattctttatt

SEQ ID NO: 9358 - DNA, 26 bp, Artificial sequence
  SiRNA target sequence
aagaagttataaataattctttattt

SEQ ID NO: 9359 - DNA, 26 bp, Artificial sequence
  SiRNA target sequence
agaagttataaataattctttattta

SEQ ID NO: 9360 - DNA, 26 bp, Artificial sequence
  SiRNA target sequence
gaagttataaataattctttatttaa

SEQ ID NO: 9361 - DNA, 26 bp, Artificial sequence
  SiRNA target sequence
aagttataaataattctttatttaag

SEQ ID NO: 9362 - DNA, 26 bp, Artificial sequence
  SiRNA target sequence
agttataaataattctttatttaaga

SEQ ID NO: 9363 - DNA, 26 bp, Artificial sequence
  SiRNA target sequence
gttataaataattctttatttaagac

SEQ ID NO: 9364 - DNA, 26 bp, Artificial sequence
  SiRNA target sequence
ttataaataattctttatttaagaca

SEQ ID NO: 9365 - DNA, 26 bp, Artificial sequence
  SiRNA target sequence
tataaataattctttatttaagacaa

SEQ ID NO: 9366 - DNA, 26 bp, Artificial sequence
  SiRNA target sequence
ataaataattctttatttaagacaaa

SEQ ID NO: 9367 - DNA, 26 bp, Artificial sequence
  SiRNA target sequence
taaataattctttatttaagacaaat

SEQ ID NO: 9368 - DNA, 26 bp, Artificial sequence
  SiRNA target sequence
aaataattctttatttaagacaaata

SEQ ID NO: 9369 - DNA, 26 bp, Artificial sequence
  SiRNA target sequence
aataattctttatttaagacaaataa

SEQ ID NO: 9370 - DNA, 26 bp, Artificial sequence
  SiRNA target sequence
ataattctttatttaagacaaataat

SEQ ID NO: 9371 - DNA, 26 bp, Artificial sequence
  SiRNA target sequence
taattctttatttaagacaaataata

SEQ ID NO: 9372 - DNA, 26 bp, Artificial sequence
  SiRNA target sequence
aattctttatttaagacaaataataa

SEQ ID NO: 9373 - DNA, 26 bp, Artificial sequence
  SiRNA target sequence
attctttatttaagacaaataataaa

SEQ ID NO: 9374 - DNA, 26 bp, Artificial sequence
  SiRNA target sequence
ttctttatttaagacaaataataaag

SEQ ID NO: 9375 - DNA, 26 bp, Artificial sequence
  SiRNA target sequence
tctttatttaagacaaataataaaga

SEQ ID NO: 9376 - DNA, 26 bp, Artificial sequence
  SiRNA target sequence
ctttatttaagacaaataataaagat

SEQ ID NO: 9377 - DNA, 26 bp, Artificial sequence
  SiRNA target sequence
tttatttaagacaaataataaagatc

SEQ ID NO: 9378 - DNA, 26 bp, Artificial sequence
  SiRNA target sequence
ttatttaagacaaataataaagatct

SEQ ID NO: 9379 - DNA, 26 bp, Artificial sequence
  SiRNA target sequence
tatttaagacaaataataaagatcta

SEQ ID NO: 9380 - DNA, 26 bp, Artificial sequence
  SiRNA target sequence
atttaagacaaataataaagatctaa

SEQ ID NO: 9381 - DNA, 26 bp, Artificial sequence
  SiRNA target sequence
tttaagacaaataataaagatctaat

SEQ ID NO: 9382 - DNA, 26 bp, Artificial sequence
  SiRNA target sequence
ttaagacaaataataaagatctaata

SEQ ID NO: 9383 - DNA, 26 bp, Artificial sequence
  SiRNA target sequence
taagacaaataataaagatctaataa

SEQ ID NO: 9384 - DNA, 26 bp, Artificial sequence
  SiRNA target sequence
aagacaaataataaagatctaataaa

SEQ ID NO: 9385 - DNA, 26 bp, Artificial sequence
  SiRNA target sequence
agacaaataataaagatctaataaaa

SEQ ID NO: 9386 - DNA, 26 bp, Artificial sequence
  SiRNA target sequence
gacaaataataaagatctaataaaaa

SEQ ID NO: 9387 - DNA, 26 bp, Artificial sequence
  SiRNA target sequence
acaaataataaagatctaataaaaat

SEQ ID NO: 9388 - DNA, 26 bp, Artificial sequence
  SiRNA target sequence
caaataataaagatctaataaaaata

SEQ ID NO: 9389 - DNA, 26 bp, Artificial sequence
  SiRNA target sequence
aaataataaagatctaataaaaataa

SEQ ID NO: 9390 - DNA, 26 bp, Artificial sequence
  SiRNA target sequence
aataataaagatctaataaaaataag

SEQ ID NO: 9391 - DNA, 26 bp, Artificial sequence
  SiRNA target sequence
ataataaagatctaataaaaataaga

SEQ ID NO: 9392 - DNA, 26 bp, Artificial sequence
  SiRNA target sequence
taataaagatctaataaaaataagat

SEQ ID NO: 9393 - DNA, 26 bp, Artificial sequence
  SiRNA target sequence
aataaagatctaataaaaataagatc

SEQ ID NO: 9394 - DNA, 26 bp, Artificial sequence
  SiRNA target sequence
ataaagatctaataaaaataagatct

SEQ ID NO: 9395 - DNA, 26 bp, Artificial sequence
  SiRNA target sequence
taaagatctaataaaaataagatctg

SEQ ID NO: 9396 - DNA, 26 bp, Artificial sequence
  SiRNA target sequence
aaagatctaataaaaataagatctga

SEQ ID NO: 9397 - DNA, 26 bp, Artificial sequence
  SiRNA target sequence
aagatctaataaaaataagatctgaa

SEQ ID NO: 9398 - DNA, 26 bp, Artificial sequence
  SiRNA target sequence
agatctaataaaaataagatctgaat

SEQ ID NO: 9399 - DNA, 26 bp, Artificial sequence
  SiRNA target sequence
gatctaataaaaataagatctgaatg

SEQ ID NO: 9400 - DNA, 26 bp, Artificial sequence
  SiRNA target sequence
atctaataaaaataagatctgaatgt

SEQ ID NO: 9401 - DNA, 26 bp, Artificial sequence
  SiRNA target sequence
tctaataaaaataagatctgaatgtt

SEQ ID NO: 9402 - DNA, 26 bp, Artificial sequence
  SiRNA target sequence
ctaataaaaataagatctgaatgtta

SEQ ID NO: 9403 - DNA, 26 bp, Artificial sequence
  SiRNA target sequence
taataaaaataagatctgaatgttac

SEQ ID NO: 9404 - DNA, 26 bp, Artificial sequence
  SiRNA target sequence
aataaaaataagatctgaatgttaca

SEQ ID NO: 9405 - DNA, 26 bp, Artificial sequence
  SiRNA target sequence
ataaaaataagatctgaatgttacaa

SEQ ID NO: 9406 - DNA, 26 bp, Artificial sequence
  SiRNA target sequence
taaaaataagatctgaatgttacaag

SEQ ID NO: 9407 - DNA, 26 bp, Artificial sequence
  SiRNA target sequence
aaaaataagatctgaatgttacaagc

SEQ ID NO: 9408 - DNA, 26 bp, Artificial sequence
  SiRNA target sequence
aaaataagatctgaatgttacaagca

SEQ ID NO: 9409 - DNA, 26 bp, Artificial sequence
  SiRNA target sequence
aaataagatctgaatgttacaagcag

SEQ ID NO: 9410 - DNA, 26 bp, Artificial sequence
  SiRNA target sequence
aataagatctgaatgttacaagcaga

SEQ ID NO: 9411 - DNA, 26 bp, Artificial sequence
  SiRNA target sequence
ataagatctgaatgttacaagcagat

SEQ ID NO: 9412 - DNA, 26 bp, Artificial sequence
  SiRNA target sequence
taagatctgaatgttacaagcagatg

SEQ ID NO: 9413 - DNA, 26 bp, Artificial sequence
  SiRNA target sequence
aagatctgaatgttacaagcagatgg

SEQ ID NO: 9414 - DNA, 26 bp, Artificial sequence
  SiRNA target sequence
agatctgaatgttacaagcagatggg

SEQ ID NO: 9415 - DNA, 26 bp, Artificial sequence
  SiRNA target sequence
gatctgaatgttacaagcagatggga

SEQ ID NO: 9416 - DNA, 26 bp, Artificial sequence
  SiRNA target sequence
atctgaatgttacaagcagatgggaa

SEQ ID NO: 9417 - DNA, 26 bp, Artificial sequence
  SiRNA target sequence
tctgaatgttacaagcagatgggaaa

SEQ ID NO: 9418 - DNA, 26 bp, Artificial sequence
  SiRNA target sequence
ctgaatgttacaagcagatgggaaat

SEQ ID NO: 9419 - DNA, 26 bp, Artificial sequence
  SiRNA target sequence
tgaatgttacaagcagatgggaaata

SEQ ID NO: 9420 - DNA, 26 bp, Artificial sequence
  SiRNA target sequence
gaatgttacaagcagatgggaaataa

SEQ ID NO: 9421 - DNA, 26 bp, Artificial sequence
  SiRNA target sequence
aatgttacaagcagatgggaaataaa

SEQ ID NO: 9422 - DNA, 26 bp, Artificial sequence
  SiRNA target sequence
atgttacaagcagatgggaaataaaa

SEQ ID NO: 9423 - DNA, 26 bp, Artificial sequence
  SiRNA target sequence
tgttacaagcagatgggaaataaaaa

SEQ ID NO: 9424 - DNA, 26 bp, Artificial sequence
  SiRNA target sequence
gttacaagcagatgggaaataaaaaa

SEQ ID NO: 9425 - DNA, 26 bp, Artificial sequence
  SiRNA target sequence
ttacaagcagatgggaaataaaaaaa

SEQ ID NO: 9426 - DNA, 26 bp, Artificial sequence
  SiRNA target sequence
tacaagcagatgggaaataaaaaaaa

SEQ ID NO: 9427 - DNA, 26 bp, Artificial sequence
  SiRNA target sequence
acaagcagatgggaaataaaaaaaaa

SEQ ID NO: 9428 - DNA, 26 bp, Artificial sequence
  SiRNA target sequence
caagcagatgggaaataaaaaaaaat

SEQ ID NO: 9429 - DNA, 26 bp, Artificial sequence
  SiRNA target sequence
aagcagatgggaaataaaaaaaaatt

SEQ ID NO: 9430 - DNA, 26 bp, Artificial sequence
  SiRNA target sequence
agcagatgggaaataaaaaaaaattt

SEQ ID NO: 9431 - DNA, 26 bp, Artificial sequence
  SiRNA target sequence
gcagatgggaaataaaaaaaaatttc

SEQ ID NO: 9432 - DNA, 26 bp, Artificial sequence
  SiRNA target sequence
cagatgggaaataaaaaaaaatttct

SEQ ID NO: 9433 - DNA, 26 bp, Artificial sequence
  SiRNA target sequence
agatgggaaataaaaaaaaatttctt

SEQ ID NO: 9434 - DNA, 26 bp, Artificial sequence
  SiRNA target sequence
gatgggaaataaaaaaaaatttctta

SEQ ID NO: 9435 - DNA, 26 bp, Artificial sequence
  SiRNA target sequence
atgggaaataaaaaaaaatttcttaa

SEQ ID NO: 9436 - DNA, 26 bp, Artificial sequence
  SiRNA target sequence
tgggaaataaaaaaaaatttcttaag

SEQ ID NO: 9437 - DNA, 26 bp, Artificial sequence
  SiRNA target sequence
gggaaataaaaaaaaatttcttaagg

SEQ ID NO: 9438 - DNA, 26 bp, Artificial sequence
  SiRNA target sequence
ggaaataaaaaaaaatttcttaagga

SEQ ID NO: 9439 - DNA, 26 bp, Artificial sequence
  SiRNA target sequence
gaaataaaaaaaaatttcttaaggat

SEQ ID NO: 9440 - DNA, 26 bp, Artificial sequence
  SiRNA target sequence
aaataaaaaaaaatttcttaaggatt

SEQ ID NO: 9441 - DNA, 26 bp, Artificial sequence
  SiRNA target sequence
aataaaaaaaaatttcttaaggattt

SEQ ID NO: 9442 - DNA, 26 bp, Artificial sequence
  SiRNA target sequence
ataaaaaaaaatttcttaaggattta

SEQ ID NO: 9443 - DNA, 26 bp, Artificial sequence
  SiRNA target sequence
taaaaaaaaatttcttaaggatttag

SEQ ID NO: 9444 - DNA, 26 bp, Artificial sequence
  SiRNA target sequence
aaaaaaaaatttcttaaggatttagc

SEQ ID NO: 9445 - DNA, 26 bp, Artificial sequence
  SiRNA target sequence
aaaaaaaatttcttaaggatttagca

SEQ ID NO: 9446 - DNA, 26 bp, Artificial sequence
  SiRNA target sequence
aaaaaaatttcttaaggatttagcac

SEQ ID NO: 9447 - DNA, 26 bp, Artificial sequence
  SiRNA target sequence
aaaaaatttcttaaggatttagcact

SEQ ID NO: 9448 - DNA, 26 bp, Artificial sequence
  SiRNA target sequence
aaaaatttcttaaggatttagcactt

SEQ ID NO: 9449 - DNA, 26 bp, Artificial sequence
  SiRNA target sequence
aaaatttcttaaggatttagcacttt

SEQ ID NO: 9450 - DNA, 26 bp, Artificial sequence
  SiRNA target sequence
aaatttcttaaggatttagcacttta

SEQ ID NO: 9451 - DNA, 26 bp, Artificial sequence
  SiRNA target sequence
aatttcttaaggatttagcactttat

SEQ ID NO: 9452 - DNA, 26 bp, Artificial sequence
  SiRNA target sequence
atttcttaaggatttagcactttatg

SEQ ID NO: 9453 - DNA, 26 bp, Artificial sequence
  SiRNA target sequence
tttcttaaggatttagcactttatga

SEQ ID NO: 9454 - DNA, 26 bp, Artificial sequence
  SiRNA target sequence
ttcttaaggatttagcactttatgaa

SEQ ID NO: 9455 - DNA, 26 bp, Artificial sequence
  SiRNA target sequence
tcttaaggatttagcactttatgaaa

SEQ ID NO: 9456 - DNA, 26 bp, Artificial sequence
  SiRNA target sequence
cttaaggatttagcactttatgaaac

SEQ ID NO: 9457 - DNA, 26 bp, Artificial sequence
  SiRNA target sequence
ttaaggatttagcactttatgaaaca

SEQ ID NO: 9458 - DNA, 26 bp, Artificial sequence
  SiRNA target sequence
taaggatttagcactttatgaaacat

SEQ ID NO: 9459 - DNA, 26 bp, Artificial sequence
  SiRNA target sequence
aaggatttagcactttatgaaacatt

SEQ ID NO: 9460 - DNA, 26 bp, Artificial sequence
  SiRNA target sequence
aggatttagcactttatgaaacattt

SEQ ID NO: 9461 - DNA, 26 bp, Artificial sequence
  SiRNA target sequence
ggatttagcactttatgaaacatttg

SEQ ID NO: 9462 - DNA, 26 bp, Artificial sequence
  SiRNA target sequence
gatttagcactttatgaaacatttgc

SEQ ID NO: 9463 - DNA, 26 bp, Artificial sequence
  SiRNA target sequence
atttagcactttatgaaacatttgct

SEQ ID NO: 9464 - DNA, 26 bp, Artificial sequence
  SiRNA target sequence
tttagcactttatgaaacatttgcta

SEQ ID NO: 9465 - DNA, 26 bp, Artificial sequence
  SiRNA target sequence
ttagcactttatgaaacatttgctaa

SEQ ID NO: 9466 - DNA, 26 bp, Artificial sequence
  SiRNA target sequence
tagcactttatgaaacatttgctaat

SEQ ID NO: 9467 - DNA, 26 bp, Artificial sequence
  SiRNA target sequence
agcactttatgaaacatttgctaata

SEQ ID NO: 9468 - DNA, 26 bp, Artificial sequence
  SiRNA target sequence
gcactttatgaaacatttgctaataa

SEQ ID NO: 9469 - DNA, 26 bp, Artificial sequence
  SiRNA target sequence
cactttatgaaacatttgctaataat

SEQ ID NO: 9470 - DNA, 26 bp, Artificial sequence
  SiRNA target sequence
actttatgaaacatttgctaataata

SEQ ID NO: 9471 - DNA, 26 bp, Artificial sequence
  SiRNA target sequence
ctttatgaaacatttgctaataataa

SEQ ID NO: 9472 - DNA, 26 bp, Artificial sequence
  SiRNA target sequence
tttatgaaacatttgctaataataaa

SEQ ID NO: 9473 - DNA, 26 bp, Artificial sequence
  SiRNA target sequence
ttatgaaacatttgctaataataaag

SEQ ID NO: 9474 - DNA, 26 bp, Artificial sequence
  SiRNA target sequence
tatgaaacatttgctaataataaaga

SEQ ID NO: 9475 - DNA, 26 bp, Artificial sequence
  SiRNA target sequence
atgaaacatttgctaataataaagaa

SEQ ID NO: 9476 - DNA, 26 bp, Artificial sequence
  SiRNA target sequence
tgaaacatttgctaataataaagaag

SEQ ID NO: 9477 - DNA, 26 bp, Artificial sequence
  SiRNA target sequence
gaaacatttgctaataataaagaagt

SEQ ID NO: 9478 - DNA, 26 bp, Artificial sequence
  SiRNA target sequence
aaacatttgctaataataaagaagtc

SEQ ID NO: 9479 - DNA, 26 bp, Artificial sequence
  SiRNA target sequence
aacatttgctaataataaagaagtcc

SEQ ID NO: 9480 - DNA, 26 bp, Artificial sequence
  SiRNA target sequence
acatttgctaataataaagaagtcca

SEQ ID NO: 9481 - DNA, 26 bp, Artificial sequence
  SiRNA target sequence
catttgctaataataaagaagtccaa

SEQ ID NO: 9482 - DNA, 26 bp, Artificial sequence
  SiRNA target sequence
atttgctaataataaagaagtccaag

SEQ ID NO: 9483 - DNA, 26 bp, Artificial sequence
  SiRNA target sequence
tttgctaataataaagaagtccaaga

SEQ ID NO: 9484 - DNA, 26 bp, Artificial sequence
  SiRNA target sequence
ttgctaataataaagaagtccaagat

SEQ ID NO: 9485 - DNA, 26 bp, Artificial sequence
  SiRNA target sequence
tgctaataataaagaagtccaagatg

SEQ ID NO: 9486 - DNA, 26 bp, Artificial sequence
  SiRNA target sequence
gctaataataaagaagtccaagatga

SEQ ID NO: 9487 - DNA, 26 bp, Artificial sequence
  SiRNA target sequence
ctaataataaagaagtccaagatgaa

SEQ ID NO: 9488 - DNA, 26 bp, Artificial sequence
  SiRNA target sequence
taataataaagaagtccaagatgaaa

SEQ ID NO: 9489 - DNA, 26 bp, Artificial sequence
  SiRNA target sequence
aataataaagaagtccaagatgaaat

SEQ ID NO: 9490 - DNA, 26 bp, Artificial sequence
  SiRNA target sequence
ataataaagaagtccaagatgaaatt

SEQ ID NO: 9491 - DNA, 26 bp, Artificial sequence
  SiRNA target sequence
taataaagaagtccaagatgaaatta

SEQ ID NO: 9492 - DNA, 26 bp, Artificial sequence
  SiRNA target sequence
aataaagaagtccaagatgaaattat

SEQ ID NO: 9493 - DNA, 26 bp, Artificial sequence
  SiRNA target sequence
ataaagaagtccaagatgaaattatg

SEQ ID NO: 9494 - DNA, 26 bp, Artificial sequence
  SiRNA target sequence
taaagaagtccaagatgaaattatgc

SEQ ID NO: 9495 - DNA, 26 bp, Artificial sequence
  SiRNA target sequence
aaagaagtccaagatgaaattatgca

SEQ ID NO: 9496 - DNA, 26 bp, Artificial sequence
  SiRNA target sequence
aagaagtccaagatgaaattatgcag

SEQ ID NO: 9497 - DNA, 26 bp, Artificial sequence
  SiRNA target sequence
agaagtccaagatgaaattatgcaga

SEQ ID NO: 9498 - DNA, 26 bp, Artificial sequence
  SiRNA target sequence
gaagtccaagatgaaattatgcagac

SEQ ID NO: 9499 - DNA, 26 bp, Artificial sequence
  SiRNA target sequence
aagtccaagatgaaattatgcagact

SEQ ID NO: 9500 - DNA, 26 bp, Artificial sequence
  SiRNA target sequence
agtccaagatgaaattatgcagactg

SEQ ID NO: 9501 - DNA, 26 bp, Artificial sequence
  SiRNA target sequence
gtccaagatgaaattatgcagactgt

SEQ ID NO: 9502 - DNA, 26 bp, Artificial sequence
  SiRNA target sequence
tccaagatgaaattatgcagactgtt

SEQ ID NO: 9503 - DNA, 26 bp, Artificial sequence
  SiRNA target sequence
ccaagatgaaattatgcagactgtta

SEQ ID NO: 9504 - DNA, 26 bp, Artificial sequence
  SiRNA target sequence
caagatgaaattatgcagactgttaa

SEQ ID NO: 9505 - DNA, 26 bp, Artificial sequence
  SiRNA target sequence
aagatgaaattatgcagactgttaaa

SEQ ID NO: 9506 - DNA, 26 bp, Artificial sequence
  SiRNA target sequence
agatgaaattatgcagactgttaaag

SEQ ID NO: 9507 - DNA, 26 bp, Artificial sequence
  SiRNA target sequence
gatgaaattatgcagactgttaaaga

SEQ ID NO: 9508 - DNA, 26 bp, Artificial sequence
  SiRNA target sequence
atgaaattatgcagactgttaaagaa

SEQ ID NO: 9509 - DNA, 26 bp, Artificial sequence
  SiRNA target sequence
tgaaattatgcagactgttaaagaaa

SEQ ID NO: 9510 - DNA, 26 bp, Artificial sequence
  SiRNA target sequence
gaaattatgcagactgttaaagaaat

SEQ ID NO: 9511 - DNA, 26 bp, Artificial sequence
  SiRNA target sequence
aaattatgcagactgttaaagaaatt

SEQ ID NO: 9512 - DNA, 26 bp, Artificial sequence
  SiRNA target sequence
aattatgcagactgttaaagaaattt

SEQ ID NO: 9513 - DNA, 26 bp, Artificial sequence
  SiRNA target sequence
attatgcagactgttaaagaaatttg

SEQ ID NO: 9514 - DNA, 26 bp, Artificial sequence
  SiRNA target sequence
ttatgcagactgttaaagaaatttgt

SEQ ID NO: 9515 - DNA, 26 bp, Artificial sequence
  SiRNA target sequence
tatgcagactgttaaagaaatttgtg

SEQ ID NO: 9516 - DNA, 26 bp, Artificial sequence
  SiRNA target sequence
atgcagactgttaaagaaatttgtga

SEQ ID NO: 9517 - DNA, 26 bp, Artificial sequence
  SiRNA target sequence
tgcagactgttaaagaaatttgtgaa

SEQ ID NO: 9518 - DNA, 26 bp, Artificial sequence
  SiRNA target sequence
gcagactgttaaagaaatttgtgaag

SEQ ID NO: 9519 - DNA, 26 bp, Artificial sequence
  SiRNA target sequence
cagactgttaaagaaatttgtgaaga

SEQ ID NO: 9520 - DNA, 26 bp, Artificial sequence
  SiRNA target sequence
agactgttaaagaaatttgtgaagaa

SEQ ID NO: 9521 - DNA, 26 bp, Artificial sequence
  SiRNA target sequence
gactgttaaagaaatttgtgaagaag

SEQ ID NO: 9522 - DNA, 26 bp, Artificial sequence
  SiRNA target sequence
actgttaaagaaatttgtgaagaaga

SEQ ID NO: 9523 - DNA, 26 bp, Artificial sequence
  SiRNA target sequence
ctgttaaagaaatttgtgaagaagaa

SEQ ID NO: 9524 - DNA, 26 bp, Artificial sequence
  SiRNA target sequence
tgttaaagaaatttgtgaagaagaag

SEQ ID NO: 9525 - DNA, 26 bp, Artificial sequence
  SiRNA target sequence
gttaaagaaatttgtgaagaagaagt

SEQ ID NO: 9526 - DNA, 26 bp, Artificial sequence
  SiRNA target sequence
ttaaagaaatttgtgaagaagaagtg

SEQ ID NO: 9527 - DNA, 26 bp, Artificial sequence
  SiRNA target sequence
taaagaaatttgtgaagaagaagtga

SEQ ID NO: 9528 - DNA, 26 bp, Artificial sequence
  SiRNA target sequence
aaagaaatttgtgaagaagaagtgaa

SEQ ID NO: 9529 - DNA, 26 bp, Artificial sequence
  SiRNA target sequence
aagaaatttgtgaagaagaagtgaat

SEQ ID NO: 9530 - DNA, 26 bp, Artificial sequence
  SiRNA target sequence
agaaatttgtgaagaagaagtgaatg

SEQ ID NO: 9531 - DNA, 26 bp, Artificial sequence
  SiRNA target sequence
gaaatttgtgaagaagaagtgaatga

SEQ ID NO: 9532 - DNA, 26 bp, Artificial sequence
  SiRNA target sequence
aaatttgtgaagaagaagtgaatgag

SEQ ID NO: 9533 - DNA, 26 bp, Artificial sequence
  SiRNA target sequence
aatttgtgaagaagaagtgaatgagt

SEQ ID NO: 9534 - DNA, 26 bp, Artificial sequence
  SiRNA target sequence
atttgtgaagaagaagtgaatgagtt

SEQ ID NO: 9535 - DNA, 26 bp, Artificial sequence
  SiRNA target sequence
tttgtgaagaagaagtgaatgagttt

SEQ ID NO: 9536 - DNA, 26 bp, Artificial sequence
  SiRNA target sequence
ttgtgaagaagaagtgaatgagttta

SEQ ID NO: 9537 - DNA, 26 bp, Artificial sequence
  SiRNA target sequence
tgtgaagaagaagtgaatgagtttat

SEQ ID NO: 9538 - DNA, 26 bp, Artificial sequence
  SiRNA target sequence
gtgaagaagaagtgaatgagtttatt

SEQ ID NO: 9539 - DNA, 26 bp, Artificial sequence
  SiRNA target sequence
tgaagaagaagtgaatgagtttattg

SEQ ID NO: 9540 - DNA, 26 bp, Artificial sequence
  SiRNA target sequence
gaagaagaagtgaatgagtttattga

SEQ ID NO: 9541 - DNA, 26 bp, Artificial sequence
  SiRNA target sequence
aagaagaagtgaatgagtttattgaa

SEQ ID NO: 9542 - DNA, 26 bp, Artificial sequence
  SiRNA target sequence
agaagaagtgaatgagtttattgaac

SEQ ID NO: 9543 - DNA, 26 bp, Artificial sequence
  SiRNA target sequence
gaagaagtgaatgagtttattgaaca

SEQ ID NO: 9544 - DNA, 26 bp, Artificial sequence
  SiRNA target sequence
aagaagtgaatgagtttattgaacaa

SEQ ID NO: 9545 - DNA, 26 bp, Artificial sequence
  SiRNA target sequence
agaagtgaatgagtttattgaacaag

SEQ ID NO: 9546 - DNA, 26 bp, Artificial sequence
  SiRNA target sequence
gaagtgaatgagtttattgaacaaga

SEQ ID NO: 9547 - DNA, 26 bp, Artificial sequence
  SiRNA target sequence
aagtgaatgagtttattgaacaagaa

SEQ ID NO: 9548 - DNA, 26 bp, Artificial sequence
  SiRNA target sequence
agtgaatgagtttattgaacaagaag

SEQ ID NO: 9549 - DNA, 26 bp, Artificial sequence
  SiRNA target sequence
gtgaatgagtttattgaacaagaagg

SEQ ID NO: 9550 - DNA, 26 bp, Artificial sequence
  SiRNA target sequence
tgaatgagtttattgaacaagaaggt

SEQ ID NO: 9551 - DNA, 26 bp, Artificial sequence
  SiRNA target sequence
gaatgagtttattgaacaagaaggtt

SEQ ID NO: 9552 - DNA, 26 bp, Artificial sequence
  SiRNA target sequence
aatgagtttattgaacaagaaggttt

SEQ ID NO: 9553 - DNA, 26 bp, Artificial sequence
  SiRNA target sequence
atgagtttattgaacaagaaggttta

SEQ ID NO: 9554 - DNA, 26 bp, Artificial sequence
  SiRNA target sequence
tgagtttattgaacaagaaggtttaa

SEQ ID NO: 9555 - DNA, 26 bp, Artificial sequence
  SiRNA target sequence
gagtttattgaacaagaaggtttaaa

SEQ ID NO: 9556 - DNA, 26 bp, Artificial sequence
  SiRNA target sequence
agtttattgaacaagaaggtttaaaa

SEQ ID NO: 9557 - DNA, 26 bp, Artificial sequence
  SiRNA target sequence
gtttattgaacaagaaggtttaaaaa

SEQ ID NO: 9558 - DNA, 26 bp, Artificial sequence
  SiRNA target sequence
tttattgaacaagaaggtttaaaaat

SEQ ID NO: 9559 - DNA, 26 bp, Artificial sequence
  SiRNA target sequence
ttattgaacaagaaggtttaaaaatt

SEQ ID NO: 9560 - DNA, 26 bp, Artificial sequence
  SiRNA target sequence
tattgaacaagaaggtttaaaaatta

SEQ ID NO: 9561 - DNA, 26 bp, Artificial sequence
  SiRNA target sequence
attgaacaagaaggtttaaaaattaa

SEQ ID NO: 9562 - DNA, 26 bp, Artificial sequence
  SiRNA target sequence
ttgaacaagaaggtttaaaaattaat

SEQ ID NO: 9563 - DNA, 26 bp, Artificial sequence
  SiRNA target sequence
tgaacaagaaggtttaaaaattaata

SEQ ID NO: 9564 - DNA, 26 bp, Artificial sequence
  SiRNA target sequence
gaacaagaaggtttaaaaattaataa

SEQ ID NO: 9565 - DNA, 26 bp, Artificial sequence
  SiRNA target sequence
aacaagaaggtttaaaaattaataaa

SEQ ID NO: 9566 - DNA, 26 bp, Artificial sequence
  SiRNA target sequence
acaagaaggtttaaaaattaataaag

SEQ ID NO: 9567 - DNA, 26 bp, Artificial sequence
  SiRNA target sequence
caagaaggtttaaaaattaataaaga

SEQ ID NO: 9568 - DNA, 26 bp, Artificial sequence
  SiRNA target sequence
aagaaggtttaaaaattaataaagaa

SEQ ID NO: 9569 - DNA, 26 bp, Artificial sequence
  SiRNA target sequence
agaaggtttaaaaattaataaagaag

SEQ ID NO: 9570 - DNA, 26 bp, Artificial sequence
  SiRNA target sequence
gaaggtttaaaaattaataaagaaga

SEQ ID NO: 9571 - DNA, 26 bp, Artificial sequence
  SiRNA target sequence
aaggtttaaaaattaataaagaagat

SEQ ID NO: 9572 - DNA, 26 bp, Artificial sequence
  SiRNA target sequence
aggtttaaaaattaataaagaagatg

SEQ ID NO: 9573 - DNA, 26 bp, Artificial sequence
  SiRNA target sequence
ggtttaaaaattaataaagaagatgt

SEQ ID NO: 9574 - DNA, 26 bp, Artificial sequence
  SiRNA target sequence
gtttaaaaattaataaagaagatgtg

SEQ ID NO: 9575 - DNA, 26 bp, Artificial sequence
  SiRNA target sequence
tttaaaaattaataaagaagatgtgc

SEQ ID NO: 9576 - DNA, 26 bp, Artificial sequence
  SiRNA target sequence
ttaaaaattaataaagaagatgtgct

SEQ ID NO: 9577 - DNA, 26 bp, Artificial sequence
  SiRNA target sequence
taaaaattaataaagaagatgtgcta

SEQ ID NO: 9578 - DNA, 26 bp, Artificial sequence
  SiRNA target sequence
aaaaattaataaagaagatgtgctaa

SEQ ID NO: 9579 - DNA, 26 bp, Artificial sequence
  SiRNA target sequence
aaaattaataaagaagatgtgctaag

SEQ ID NO: 9580 - DNA, 26 bp, Artificial sequence
  SiRNA target sequence
aaattaataaagaagatgtgctaaga

SEQ ID NO: 9581 - DNA, 26 bp, Artificial sequence
  SiRNA target sequence
aattaataaagaagatgtgctaagag

SEQ ID NO: 9582 - DNA, 26 bp, Artificial sequence
  SiRNA target sequence
attaataaagaagatgtgctaagagg

SEQ ID NO: 9583 - DNA, 26 bp, Artificial sequence
  SiRNA target sequence
ttaataaagaagatgtgctaagagga

SEQ ID NO: 9584 - DNA, 26 bp, Artificial sequence
  SiRNA target sequence
taataaagaagatgtgctaagaggac

SEQ ID NO: 9585 - DNA, 26 bp, Artificial sequence
  SiRNA target sequence
aataaagaagatgtgctaagaggact

SEQ ID NO: 9586 - DNA, 26 bp, Artificial sequence
  SiRNA target sequence
ataaagaagatgtgctaagaggactt

SEQ ID NO: 9587 - DNA, 26 bp, Artificial sequence
  SiRNA target sequence
taaagaagatgtgctaagaggacttg

SEQ ID NO: 9588 - DNA, 26 bp, Artificial sequence
  SiRNA target sequence
aaagaagatgtgctaagaggacttgt

SEQ ID NO: 9589 - DNA, 26 bp, Artificial sequence
  SiRNA target sequence
aagaagatgtgctaagaggacttgtt

SEQ ID NO: 9590 - DNA, 26 bp, Artificial sequence
  SiRNA target sequence
agaagatgtgctaagaggacttgttt

SEQ ID NO: 9591 - DNA, 26 bp, Artificial sequence
  SiRNA target sequence
gaagatgtgctaagaggacttgtttc

SEQ ID NO: 9592 - DNA, 26 bp, Artificial sequence
  SiRNA target sequence
aagatgtgctaagaggacttgtttca

SEQ ID NO: 9593 - DNA, 26 bp, Artificial sequence
  SiRNA target sequence
agatgtgctaagaggacttgtttcaa

SEQ ID NO: 9594 - DNA, 26 bp, Artificial sequence
  SiRNA target sequence
gatgtgctaagaggacttgtttcaat

SEQ ID NO: 9595 - DNA, 26 bp, Artificial sequence
  SiRNA target sequence
atgtgctaagaggacttgtttcaata

SEQ ID NO: 9596 - DNA, 26 bp, Artificial sequence
  SiRNA target sequence
tgtgctaagaggacttgtttcaataa

SEQ ID NO: 9597 - DNA, 26 bp, Artificial sequence
  SiRNA target sequence
gtgctaagaggacttgtttcaataaa

SEQ ID NO: 9598 - DNA, 26 bp, Artificial sequence
  SiRNA target sequence
tgctaagaggacttgtttcaataaaa

SEQ ID NO: 9599 - DNA, 26 bp, Artificial sequence
  SiRNA target sequence
gctaagaggacttgtttcaataaaaa

SEQ ID NO: 9600 - DNA, 26 bp, Artificial sequence
  SiRNA target sequence
ctaagaggacttgtttcaataaaaaa

SEQ ID NO: 9601 - DNA, 26 bp, Artificial sequence
  SiRNA target sequence
taagaggacttgtttcaataaaaaat

SEQ ID NO: 9602 - DNA, 26 bp, Artificial sequence
  SiRNA target sequence
aagaggacttgtttcaataaaaaata

SEQ ID NO: 9603 - DNA, 26 bp, Artificial sequence
  SiRNA target sequence
agaggacttgtttcaataaaaaatat

SEQ ID NO: 9604 - DNA, 26 bp, Artificial sequence
  SiRNA target sequence
gaggacttgtttcaataaaaaatata

SEQ ID NO: 9605 - DNA, 26 bp, Artificial sequence
  SiRNA target sequence
aggacttgtttcaataaaaaatataa

SEQ ID NO: 9606 - DNA, 26 bp, Artificial sequence
  SiRNA target sequence
ggacttgtttcaataaaaaatataaa

SEQ ID NO: 9607 - DNA, 26 bp, Artificial sequence
  SiRNA target sequence
gacttgtttcaataaaaaatataaat

SEQ ID NO: 9608 - DNA, 26 bp, Artificial sequence
  SiRNA target sequence
acttgtttcaataaaaaatataaatg

SEQ ID NO: 9609 - DNA, 26 bp, Artificial sequence
  SiRNA target sequence
cttgtttcaataaaaaatataaatga

SEQ ID NO: 9610 - DNA, 26 bp, Artificial sequence
  SiRNA target sequence
ttgtttcaataaaaaatataaatgag

SEQ ID NO: 9611 - DNA, 26 bp, Artificial sequence
  SiRNA target sequence
tgtttcaataaaaaatataaatgaga

SEQ ID NO: 9612 - DNA, 26 bp, Artificial sequence
  SiRNA target sequence
gtttcaataaaaaatataaatgagat

SEQ ID NO: 9613 - DNA, 26 bp, Artificial sequence
  SiRNA target sequence
tttcaataaaaaatataaatgagatt

SEQ ID NO: 9614 - DNA, 26 bp, Artificial sequence
  SiRNA target sequence
ttcaataaaaaatataaatgagattt

SEQ ID NO: 9615 - DNA, 26 bp, Artificial sequence
  SiRNA target sequence
tcaataaaaaatataaatgagattta

SEQ ID NO: 9616 - DNA, 26 bp, Artificial sequence
  SiRNA target sequence
caataaaaaatataaatgagatttat

SEQ ID NO: 9617 - DNA, 26 bp, Artificial sequence
  SiRNA target sequence
aataaaaaatataaatgagatttatg

SEQ ID NO: 9618 - DNA, 26 bp, Artificial sequence
  SiRNA target sequence
ataaaaaatataaatgagatttatga

SEQ ID NO: 9619 - DNA, 26 bp, Artificial sequence
  SiRNA target sequence
taaaaaatataaatgagatttatgat

SEQ ID NO: 9620 - DNA, 26 bp, Artificial sequence
  SiRNA target sequence
aaaaaatataaatgagatttatgatg

SEQ ID NO: 9621 - DNA, 26 bp, Artificial sequence
  SiRNA target sequence
aaaaatataaatgagatttatgatgc

SEQ ID NO: 9622 - DNA, 26 bp, Artificial sequence
  SiRNA target sequence
aaaatataaatgagatttatgatgca

SEQ ID NO: 9623 - DNA, 26 bp, Artificial sequence
  SiRNA target sequence
aaatataaatgagatttatgatgcat

SEQ ID NO: 9624 - DNA, 26 bp, Artificial sequence
  SiRNA target sequence
aatataaatgagatttatgatgcatt

SEQ ID NO: 9625 - DNA, 26 bp, Artificial sequence
  SiRNA target sequence
atataaatgagatttatgatgcattt

SEQ ID NO: 9626 - DNA, 26 bp, Artificial sequence
  SiRNA target sequence
tataaatgagatttatgatgcatttg

SEQ ID NO: 9627 - DNA, 26 bp, Artificial sequence
  SiRNA target sequence
ataaatgagatttatgatgcatttgg

SEQ ID NO: 9628 - DNA, 26 bp, Artificial sequence
  SiRNA target sequence
taaatgagatttatgatgcatttgga

SEQ ID NO: 9629 - DNA, 26 bp, Artificial sequence
  SiRNA target sequence
aaatgagatttatgatgcatttggag

SEQ ID NO: 9630 - DNA, 26 bp, Artificial sequence
  SiRNA target sequence
aatgagatttatgatgcatttggagg

SEQ ID NO: 9631 - DNA, 26 bp, Artificial sequence
  SiRNA target sequence
atgagatttatgatgcatttggaggt

SEQ ID NO: 9632 - DNA, 26 bp, Artificial sequence
  SiRNA target sequence
tgagatttatgatgcatttggaggta

SEQ ID NO: 9633 - DNA, 26 bp, Artificial sequence
  SiRNA target sequence
gagatttatgatgcatttggaggtaa

SEQ ID NO: 9634 - DNA, 26 bp, Artificial sequence
  SiRNA target sequence
agatttatgatgcatttggaggtaaa

SEQ ID NO: 9635 - DNA, 26 bp, Artificial sequence
  SiRNA target sequence
gatttatgatgcatttggaggtaaat

SEQ ID NO: 9636 - DNA, 26 bp, Artificial sequence
  SiRNA target sequence
atttatgatgcatttggaggtaaatc

SEQ ID NO: 9637 - DNA, 26 bp, Artificial sequence
  SiRNA target sequence
tttatgatgcatttggaggtaaatct

SEQ ID NO: 9638 - DNA, 26 bp, Artificial sequence
  SiRNA target sequence
ttatgatgcatttggaggtaaatcta

SEQ ID NO: 9639 - DNA, 26 bp, Artificial sequence
  SiRNA target sequence
tatgatgcatttggaggtaaatctaa

SEQ ID NO: 9640 - DNA, 26 bp, Artificial sequence
  SiRNA target sequence
atgatgcatttggaggtaaatctaag

SEQ ID NO: 9641 - DNA, 26 bp, Artificial sequence
  SiRNA target sequence
tgatgcatttggaggtaaatctaaga

SEQ ID NO: 9642 - DNA, 26 bp, Artificial sequence
  SiRNA target sequence
gatgcatttggaggtaaatctaagaa

SEQ ID NO: 9643 - DNA, 26 bp, Artificial sequence
  SiRNA target sequence
atgcatttggaggtaaatctaagaag

SEQ ID NO: 9644 - DNA, 26 bp, Artificial sequence
  SiRNA target sequence
tgcatttggaggtaaatctaagaagt

SEQ ID NO: 9645 - DNA, 26 bp, Artificial sequence
  SiRNA target sequence
gcatttggaggtaaatctaagaagtt

SEQ ID NO: 9646 - DNA, 26 bp, Artificial sequence
  SiRNA target sequence
catttggaggtaaatctaagaagttt

SEQ ID NO: 9647 - DNA, 26 bp, Artificial sequence
  SiRNA target sequence
atttggaggtaaatctaagaagttta

SEQ ID NO: 9648 - DNA, 26 bp, Artificial sequence
  SiRNA target sequence
tttggaggtaaatctaagaagtttaa

SEQ ID NO: 9649 - DNA, 26 bp, Artificial sequence
  SiRNA target sequence
ttggaggtaaatctaagaagtttaaa

SEQ ID NO: 9650 - DNA, 26 bp, Artificial sequence
  SiRNA target sequence
tggaggtaaatctaagaagtttaaat

SEQ ID NO: 9651 - DNA, 26 bp, Artificial sequence
  SiRNA target sequence
ggaggtaaatctaagaagtttaaatt

SEQ ID NO: 9652 - DNA, 26 bp, Artificial sequence
  SiRNA target sequence
gaggtaaatctaagaagtttaaattt

SEQ ID NO: 9653 - DNA, 26 bp, Artificial sequence
  SiRNA target sequence
aggtaaatctaagaagtttaaatttt

SEQ ID NO: 9654 - DNA, 26 bp, Artificial sequence
  SiRNA target sequence
ggtaaatctaagaagtttaaattttc

SEQ ID NO: 9655 - DNA, 26 bp, Artificial sequence
  SiRNA target sequence
gtaaatctaagaagtttaaattttct

SEQ ID NO: 9656 - DNA, 26 bp, Artificial sequence
  SiRNA target sequence
taaatctaagaagtttaaattttcta

SEQ ID NO: 9657 - DNA, 26 bp, Artificial sequence
  SiRNA target sequence
aaatctaagaagtttaaattttctaa

SEQ ID NO: 9658 - DNA, 26 bp, Artificial sequence
  SiRNA target sequence
aatctaagaagtttaaattttctaat

SEQ ID NO: 9659 - DNA, 26 bp, Artificial sequence
  SiRNA target sequence
atctaagaagtttaaattttctaatg

SEQ ID NO: 9660 - DNA, 26 bp, Artificial sequence
  SiRNA target sequence
tctaagaagtttaaattttctaatga

SEQ ID NO: 9661 - DNA, 26 bp, Artificial sequence
  SiRNA target sequence
ctaagaagtttaaattttctaatgat

SEQ ID NO: 9662 - DNA, 26 bp, Artificial sequence
  SiRNA target sequence
taagaagtttaaattttctaatgatg

SEQ ID NO: 9663 - DNA, 26 bp, Artificial sequence
  SiRNA target sequence
aagaagtttaaattttctaatgatga

SEQ ID NO: 9664 - DNA, 26 bp, Artificial sequence
  SiRNA target sequence
agaagtttaaattttctaatgatgaa

SEQ ID NO: 9665 - DNA, 26 bp, Artificial sequence
  SiRNA target sequence
gaagtttaaattttctaatgatgaaa

SEQ ID NO: 9666 - DNA, 26 bp, Artificial sequence
  SiRNA target sequence
aagtttaaattttctaatgatgaaaa

SEQ ID NO: 9667 - DNA, 26 bp, Artificial sequence
  SiRNA target sequence
agtttaaattttctaatgatgaaaag

SEQ ID NO: 9668 - DNA, 26 bp, Artificial sequence
  SiRNA target sequence
gtttaaattttctaatgatgaaaagg

SEQ ID NO: 9669 - DNA, 26 bp, Artificial sequence
  SiRNA target sequence
tttaaattttctaatgatgaaaagga

SEQ ID NO: 9670 - DNA, 26 bp, Artificial sequence
  SiRNA target sequence
ttaaattttctaatgatgaaaaggaa

SEQ ID NO: 9671 - DNA, 26 bp, Artificial sequence
  SiRNA target sequence
taaattttctaatgatgaaaaggaag

SEQ ID NO: 9672 - DNA, 26 bp, Artificial sequence
  SiRNA target sequence
aaattttctaatgatgaaaaggaagt

SEQ ID NO: 9673 - DNA, 26 bp, Artificial sequence
  SiRNA target sequence
aattttctaatgatgaaaaggaagtg

SEQ ID NO: 9674 - DNA, 26 bp, Artificial sequence
  SiRNA target sequence
attttctaatgatgaaaaggaagtgt

SEQ ID NO: 9675 - DNA, 26 bp, Artificial sequence
  SiRNA target sequence
ttttctaatgatgaaaaggaagtgtt

SEQ ID NO: 9676 - DNA, 26 bp, Artificial sequence
  SiRNA target sequence
tttctaatgatgaaaaggaagtgtta

SEQ ID NO: 9677 - DNA, 26 bp, Artificial sequence
  SiRNA target sequence
ttctaatgatgaaaaggaagtgttaa

SEQ ID NO: 9678 - DNA, 26 bp, Artificial sequence
  SiRNA target sequence
tctaatgatgaaaaggaagtgttaaa

SEQ ID NO: 9679 - DNA, 26 bp, Artificial sequence
  SiRNA target sequence
ctaatgatgaaaaggaagtgttaaat

SEQ ID NO: 9680 - DNA, 26 bp, Artificial sequence
  SiRNA target sequence
taatgatgaaaaggaagtgttaaatc

SEQ ID NO: 9681 - DNA, 26 bp, Artificial sequence
  SiRNA target sequence
aatgatgaaaaggaagtgttaaatct

SEQ ID NO: 9682 - DNA, 26 bp, Artificial sequence
  SiRNA target sequence
atgatgaaaaggaagtgttaaatctt

SEQ ID NO: 9683 - DNA, 26 bp, Artificial sequence
  SiRNA target sequence
tgatgaaaaggaagtgttaaatcttc

SEQ ID NO: 9684 - DNA, 26 bp, Artificial sequence
  SiRNA target sequence
gatgaaaaggaagtgttaaatcttct

SEQ ID NO: 9685 - DNA, 26 bp, Artificial sequence
  SiRNA target sequence
atgaaaaggaagtgttaaatcttctt

SEQ ID NO: 9686 - DNA, 26 bp, Artificial sequence
  SiRNA target sequence
tgaaaaggaagtgttaaatcttctta

SEQ ID NO: 9687 - DNA, 26 bp, Artificial sequence
  SiRNA target sequence
gaaaaggaagtgttaaatcttcttaa

SEQ ID NO: 9688 - DNA, 26 bp, Artificial sequence
  SiRNA target sequence
aaaaggaagtgttaaatcttcttaat

SEQ ID NO: 9689 - DNA, 26 bp, Artificial sequence
  SiRNA target sequence
aaaggaagtgttaaatcttcttaatg

SEQ ID NO: 9690 - DNA, 26 bp, Artificial sequence
  SiRNA target sequence
aaggaagtgttaaatcttcttaatgc

SEQ ID NO: 9691 - DNA, 26 bp, Artificial sequence
  SiRNA target sequence
aggaagtgttaaatcttcttaatgcc

SEQ ID NO: 9692 - DNA, 26 bp, Artificial sequence
  SiRNA target sequence
ggaagtgttaaatcttcttaatgcca

SEQ ID NO: 9693 - DNA, 26 bp, Artificial sequence
  SiRNA target sequence
gaagtgttaaatcttcttaatgccat

SEQ ID NO: 9694 - DNA, 26 bp, Artificial sequence
  SiRNA target sequence
aagtgttaaatcttcttaatgccatt

SEQ ID NO: 9695 - DNA, 26 bp, Artificial sequence
  SiRNA target sequence
agtgttaaatcttcttaatgccatta

SEQ ID NO: 9696 - DNA, 26 bp, Artificial sequence
  SiRNA target sequence
gtgttaaatcttcttaatgccattat

SEQ ID NO: 9697 - DNA, 26 bp, Artificial sequence
  SiRNA target sequence
tgttaaatcttcttaatgccattatt

SEQ ID NO: 9698 - DNA, 26 bp, Artificial sequence
  SiRNA target sequence
gttaaatcttcttaatgccattattt

SEQ ID NO: 9699 - DNA, 26 bp, Artificial sequence
  SiRNA target sequence
ttaaatcttcttaatgccattatttt

SEQ ID NO: 9700 - DNA, 26 bp, Artificial sequence
  SiRNA target sequence
taaatcttcttaatgccattatttta

SEQ ID NO: 9701 - DNA, 26 bp, Artificial sequence
  SiRNA target sequence
aaatcttcttaatgccattattttac

SEQ ID NO: 9702 - DNA, 26 bp, Artificial sequence
  SiRNA target sequence
aatcttcttaatgccattattttaca

SEQ ID NO: 9703 - DNA, 26 bp, Artificial sequence
  SiRNA target sequence
atcttcttaatgccattattttacac

SEQ ID NO: 9704 - DNA, 26 bp, Artificial sequence
  SiRNA target sequence
tcttcttaatgccattattttacacc

SEQ ID NO: 9705 - DNA, 26 bp, Artificial sequence
  SiRNA target sequence
cttcttaatgccattattttacacct

SEQ ID NO: 9706 - DNA, 26 bp, Artificial sequence
  SiRNA target sequence
ttcttaatgccattattttacaccta

SEQ ID NO: 9707 - DNA, 26 bp, Artificial sequence
  SiRNA target sequence
tcttaatgccattattttacacctaa

SEQ ID NO: 9708 - DNA, 26 bp, Artificial sequence
  SiRNA target sequence
cttaatgccattattttacacctaaa

SEQ ID NO: 9709 - DNA, 26 bp, Artificial sequence
  SiRNA target sequence
ttaatgccattattttacacctaaaa

SEQ ID NO: 9710 - DNA, 26 bp, Artificial sequence
  SiRNA target sequence
taatgccattattttacacctaaaag

SEQ ID NO: 9711 - DNA, 26 bp, Artificial sequence
  SiRNA target sequence
aatgccattattttacacctaaaagg

SEQ ID NO: 9712 - DNA, 26 bp, Artificial sequence
  SiRNA target sequence
atgccattattttacacctaaaagga

SEQ ID NO: 9713 - DNA, 26 bp, Artificial sequence
  SiRNA target sequence
tgccattattttacacctaaaaggaa

SEQ ID NO: 9714 - DNA, 26 bp, Artificial sequence
  SiRNA target sequence
gccattattttacacctaaaaggaaa

SEQ ID NO: 9715 - DNA, 26 bp, Artificial sequence
  SiRNA target sequence
ccattattttacacctaaaaggaaaa

SEQ ID NO: 9716 - DNA, 26 bp, Artificial sequence
  SiRNA target sequence
cattattttacacctaaaaggaaaaa

SEQ ID NO: 9717 - DNA, 26 bp, Artificial sequence
  SiRNA target sequence
attattttacacctaaaaggaaaaaa

SEQ ID NO: 9718 - DNA, 26 bp, Artificial sequence
  SiRNA target sequence
ttattttacacctaaaaggaaaaaaa

SEQ ID NO: 9719 - DNA, 26 bp, Artificial sequence
  SiRNA target sequence
tattttacacctaaaaggaaaaaaag

SEQ ID NO: 9720 - DNA, 26 bp, Artificial sequence
  SiRNA target sequence
attttacacctaaaaggaaaaaaaga

SEQ ID NO: 9721 - DNA, 26 bp, Artificial sequence
  SiRNA target sequence
ttttacacctaaaaggaaaaaaagaa

SEQ ID NO: 9722 - DNA, 26 bp, Artificial sequence
  SiRNA target sequence
tttacacctaaaaggaaaaaaagaac

SEQ ID NO: 9723 - DNA, 26 bp, Artificial sequence
  SiRNA target sequence
ttacacctaaaaggaaaaaaagaaca

SEQ ID NO: 9724 - DNA, 26 bp, Artificial sequence
  SiRNA target sequence
tacacctaaaaggaaaaaaagaacag

SEQ ID NO: 9725 - DNA, 26 bp, Artificial sequence
  SiRNA target sequence
acacctaaaaggaaaaaaagaacagg

SEQ ID NO: 9726 - DNA, 26 bp, Artificial sequence
  SiRNA target sequence
cacctaaaaggaaaaaaagaacaggc

SEQ ID NO: 9727 - DNA, 26 bp, Artificial sequence
  SiRNA target sequence
acctaaaaggaaaaaaagaacaggca

SEQ ID NO: 9728 - DNA, 26 bp, Artificial sequence
  SiRNA target sequence
cctaaaaggaaaaaaagaacaggcaa

SEQ ID NO: 9729 - DNA, 26 bp, Artificial sequence
  SiRNA target sequence
ctaaaaggaaaaaaagaacaggcaat

SEQ ID NO: 9730 - DNA, 26 bp, Artificial sequence
  SiRNA target sequence
taaaaggaaaaaaagaacaggcaatt

SEQ ID NO: 9731 - DNA, 26 bp, Artificial sequence
  SiRNA target sequence
aaaaggaaaaaaagaacaggcaattc

SEQ ID NO: 9732 - DNA, 26 bp, Artificial sequence
  SiRNA target sequence
aaaggaaaaaaagaacaggcaattct

SEQ ID NO: 9733 - DNA, 26 bp, Artificial sequence
  SiRNA target sequence
aaggaaaaaaagaacaggcaattctt

SEQ ID NO: 9734 - DNA, 26 bp, Artificial sequence
  SiRNA target sequence
aggaaaaaaagaacaggcaattcttt

SEQ ID NO: 9735 - DNA, 26 bp, Artificial sequence
  SiRNA target sequence
ggaaaaaaagaacaggcaattctttt

SEQ ID NO: 9736 - DNA, 26 bp, Artificial sequence
  SiRNA target sequence
gaaaaaaagaacaggcaattctttta

SEQ ID NO: 9737 - DNA, 26 bp, Artificial sequence
  SiRNA target sequence
aaaaaaagaacaggcaattcttttat

SEQ ID NO: 9738 - DNA, 26 bp, Artificial sequence
  SiRNA target sequence
aaaaaagaacaggcaattcttttatt

SEQ ID NO: 9739 - DNA, 26 bp, Artificial sequence
  SiRNA target sequence
aaaaagaacaggcaattcttttatta

SEQ ID NO: 9740 - DNA, 26 bp, Artificial sequence
  SiRNA target sequence
aaaagaacaggcaattcttttattag

SEQ ID NO: 9741 - DNA, 26 bp, Artificial sequence
  SiRNA target sequence
aaagaacaggcaattcttttattaga

SEQ ID NO: 9742 - DNA, 26 bp, Artificial sequence
  SiRNA target sequence
aagaacaggcaattcttttattagaa

SEQ ID NO: 9743 - DNA, 26 bp, Artificial sequence
  SiRNA target sequence
agaacaggcaattcttttattagaaa

SEQ ID NO: 9744 - DNA, 26 bp, Artificial sequence
  SiRNA target sequence
gaacaggcaattcttttattagaaaa

SEQ ID NO: 9745 - DNA, 26 bp, Artificial sequence
  SiRNA target sequence
aacaggcaattcttttattagaaaaa

SEQ ID NO: 9746 - DNA, 26 bp, Artificial sequence
  SiRNA target sequence
acaggcaattcttttattagaaaaat

SEQ ID NO: 9747 - DNA, 26 bp, Artificial sequence
  SiRNA target sequence
caggcaattcttttattagaaaaatc

SEQ ID NO: 9748 - DNA, 26 bp, Artificial sequence
  SiRNA target sequence
aggcaattcttttattagaaaaatct

SEQ ID NO: 9749 - DNA, 26 bp, Artificial sequence
  SiRNA target sequence
ggcaattcttttattagaaaaatcta

SEQ ID NO: 9750 - DNA, 26 bp, Artificial sequence
  SiRNA target sequence
gcaattcttttattagaaaaatctac

SEQ ID NO: 9751 - DNA, 26 bp, Artificial sequence
  SiRNA target sequence
caattcttttattagaaaaatctact

SEQ ID NO: 9752 - DNA, 26 bp, Artificial sequence
  SiRNA target sequence
aattcttttattagaaaaatctactt

SEQ ID NO: 9753 - DNA, 26 bp, Artificial sequence
  SiRNA target sequence
attcttttattagaaaaatctactta

SEQ ID NO: 9754 - DNA, 26 bp, Artificial sequence
  SiRNA target sequence
ttcttttattagaaaaatctacttat

SEQ ID NO: 9755 - DNA, 26 bp, Artificial sequence
  SiRNA target sequence
tcttttattagaaaaatctacttata

SEQ ID NO: 9756 - DNA, 26 bp, Artificial sequence
  SiRNA target sequence
cttttattagaaaaatctacttataa

SEQ ID NO: 9757 - DNA, 26 bp, Artificial sequence
  SiRNA target sequence
ttttattagaaaaatctacttataaa

SEQ ID NO: 9758 - DNA, 26 bp, Artificial sequence
  SiRNA target sequence
tttattagaaaaatctacttataaat

SEQ ID NO: 9759 - DNA, 26 bp, Artificial sequence
  SiRNA target sequence
ttattagaaaaatctacttataaata

SEQ ID NO: 9760 - DNA, 26 bp, Artificial sequence
  SiRNA target sequence
tattagaaaaatctacttataaatac

SEQ ID NO: 9761 - DNA, 26 bp, Artificial sequence
  SiRNA target sequence
attagaaaaatctacttataaataca

SEQ ID NO: 9762 - DNA, 26 bp, Artificial sequence
  SiRNA target sequence
ttagaaaaatctacttataaatacag

SEQ ID NO: 9763 - DNA, 26 bp, Artificial sequence
  SiRNA target sequence
tagaaaaatctacttataaatacagt

SEQ ID NO: 9764 - DNA, 26 bp, Artificial sequence
  SiRNA target sequence
agaaaaatctacttataaatacagta

SEQ ID NO: 9765 - DNA, 26 bp, Artificial sequence
  SiRNA target sequence
gaaaaatctacttataaatacagtat

SEQ ID NO: 9766 - DNA, 26 bp, Artificial sequence
  SiRNA target sequence
aaaaatctacttataaatacagtatc

SEQ ID NO: 9767 - DNA, 26 bp, Artificial sequence
  SiRNA target sequence
aaaatctacttataaatacagtatct

SEQ ID NO: 9768 - DNA, 26 bp, Artificial sequence
  SiRNA target sequence
aaatctacttataaatacagtatctt

SEQ ID NO: 9769 - DNA, 26 bp, Artificial sequence
  SiRNA target sequence
aatctacttataaatacagtatcttg

SEQ ID NO: 9770 - DNA, 26 bp, Artificial sequence
  SiRNA target sequence
atctacttataaatacagtatcttgt

SEQ ID NO: 9771 - DNA, 26 bp, Artificial sequence
  SiRNA target sequence
tctacttataaatacagtatcttgta

SEQ ID NO: 9772 - DNA, 26 bp, Artificial sequence
  SiRNA target sequence
ctacttataaatacagtatcttgtat

SEQ ID NO: 9773 - DNA, 26 bp, Artificial sequence
  SiRNA target sequence
tacttataaatacagtatcttgtata

SEQ ID NO: 9774 - DNA, 26 bp, Artificial sequence
  SiRNA target sequence
acttataaatacagtatcttgtatag

SEQ ID NO: 9775 - DNA, 26 bp, Artificial sequence
  SiRNA target sequence
cttataaatacagtatcttgtataga

SEQ ID NO: 9776 - DNA, 26 bp, Artificial sequence
  SiRNA target sequence
ttataaatacagtatcttgtatagag

SEQ ID NO: 9777 - DNA, 26 bp, Artificial sequence
  SiRNA target sequence
tataaatacagtatcttgtatagagc

SEQ ID NO: 9778 - DNA, 26 bp, Artificial sequence
  SiRNA target sequence
ataaatacagtatcttgtatagagca

SEQ ID NO: 9779 - DNA, 26 bp, Artificial sequence
  SiRNA target sequence
taaatacagtatcttgtatagagcat

SEQ ID NO: 9780 - DNA, 26 bp, Artificial sequence
  SiRNA target sequence
aaatacagtatcttgtatagagcata

SEQ ID NO: 9781 - DNA, 26 bp, Artificial sequence
  SiRNA target sequence
aatacagtatcttgtatagagcatat

SEQ ID NO: 9782 - DNA, 26 bp, Artificial sequence
  SiRNA target sequence
atacagtatcttgtatagagcatatt

SEQ ID NO: 9783 - DNA, 26 bp, Artificial sequence
  SiRNA target sequence
tacagtatcttgtatagagcatattt

SEQ ID NO: 9784 - DNA, 26 bp, Artificial sequence
  SiRNA target sequence
acagtatcttgtatagagcatatttt

SEQ ID NO: 9785 - DNA, 26 bp, Artificial sequence
  SiRNA target sequence
cagtatcttgtatagagcatattttc

SEQ ID NO: 9786 - DNA, 26 bp, Artificial sequence
  SiRNA target sequence
agtatcttgtatagagcatattttct

SEQ ID NO: 9787 - DNA, 26 bp, Artificial sequence
  SiRNA target sequence
gtatcttgtatagagcatattttctt

SEQ ID NO: 9788 - DNA, 26 bp, Artificial sequence
  SiRNA target sequence
tatcttgtatagagcatattttctta

SEQ ID NO: 9789 - DNA, 26 bp, Artificial sequence
  SiRNA target sequence
atcttgtatagagcatattttcttac

SEQ ID NO: 9790 - DNA, 26 bp, Artificial sequence
  SiRNA target sequence
tcttgtatagagcatattttcttaca

SEQ ID NO: 9791 - DNA, 26 bp, Artificial sequence
  SiRNA target sequence
cttgtatagagcatattttcttacat

SEQ ID NO: 9792 - DNA, 26 bp, Artificial sequence
  SiRNA target sequence
ttgtatagagcatattttcttacatt

SEQ ID NO: 9793 - DNA, 26 bp, Artificial sequence
  SiRNA target sequence
tgtatagagcatattttcttacattg

SEQ ID NO: 9794 - DNA, 26 bp, Artificial sequence
  SiRNA target sequence
gtatagagcatattttcttacattga

SEQ ID NO: 9795 - DNA, 26 bp, Artificial sequence
  SiRNA target sequence
tatagagcatattttcttacattgaa

SEQ ID NO: 9796 - DNA, 26 bp, Artificial sequence
  SiRNA target sequence
atagagcatattttcttacattgaag

SEQ ID NO: 9797 - DNA, 26 bp, Artificial sequence
  SiRNA target sequence
tagagcatattttcttacattgaaga

SEQ ID NO: 9798 - DNA, 26 bp, Artificial sequence
  SiRNA target sequence
agagcatattttcttacattgaagaa

SEQ ID NO: 9799 - DNA, 26 bp, Artificial sequence
  SiRNA target sequence
gagcatattttcttacattgaagaat

SEQ ID NO: 9800 - DNA, 26 bp, Artificial sequence
  SiRNA target sequence
agcatattttcttacattgaagaatg

SEQ ID NO: 9801 - DNA, 26 bp, Artificial sequence
  SiRNA target sequence
gcatattttcttacattgaagaatga

SEQ ID NO: 9802 - DNA, 26 bp, Artificial sequence
  SiRNA target sequence
catattttcttacattgaagaatgaa

SEQ ID NO: 9803 - DNA, 26 bp, Artificial sequence
  SiRNA target sequence
atattttcttacattgaagaatgaat

SEQ ID NO: 9804 - DNA, 26 bp, Artificial sequence
  SiRNA target sequence
tattttcttacattgaagaatgaata

SEQ ID NO: 9805 - DNA, 26 bp, Artificial sequence
  SiRNA target sequence
attttcttacattgaagaatgaatat

SEQ ID NO: 9806 - DNA, 26 bp, Artificial sequence
  SiRNA target sequence
ttttcttacattgaagaatgaatata

SEQ ID NO: 9807 - DNA, 26 bp, Artificial sequence
  SiRNA target sequence
tttcttacattgaagaatgaatatat

SEQ ID NO: 9808 - DNA, 26 bp, Artificial sequence
  SiRNA target sequence
ttcttacattgaagaatgaatatatt

SEQ ID NO: 9809 - DNA, 26 bp, Artificial sequence
  SiRNA target sequence
tcttacattgaagaatgaatatattt

SEQ ID NO: 9810 - DNA, 26 bp, Artificial sequence
  SiRNA target sequence
cttacattgaagaatgaatatatttc

SEQ ID NO: 9811 - DNA, 26 bp, Artificial sequence
  SiRNA target sequence
ttacattgaagaatgaatatatttca

SEQ ID NO: 9812 - DNA, 26 bp, Artificial sequence
  SiRNA target sequence
tacattgaagaatgaatatatttcat

SEQ ID NO: 9813 - DNA, 26 bp, Artificial sequence
  SiRNA target sequence
acattgaagaatgaatatatttcatc

SEQ ID NO: 9814 - DNA, 26 bp, Artificial sequence
  SiRNA target sequence
cattgaagaatgaatatatttcatct

SEQ ID NO: 9815 - DNA, 26 bp, Artificial sequence
  SiRNA target sequence
attgaagaatgaatatatttcatctt

SEQ ID NO: 9816 - DNA, 26 bp, Artificial sequence
  SiRNA target sequence
ttgaagaatgaatatatttcatcttc

SEQ ID NO: 9817 - DNA, 26 bp, Artificial sequence
  SiRNA target sequence
tgaagaatgaatatatttcatcttca

SEQ ID NO: 9818 - DNA, 26 bp, Artificial sequence
  SiRNA target sequence
gaagaatgaatatatttcatcttcat

SEQ ID NO: 9819 - DNA, 26 bp, Artificial sequence
  SiRNA target sequence
aagaatgaatatatttcatcttcatt

SEQ ID NO: 9820 - DNA, 26 bp, Artificial sequence
  SiRNA target sequence
agaatgaatatatttcatcttcattg

SEQ ID NO: 9821 - DNA, 26 bp, Artificial sequence
  SiRNA target sequence
gaatgaatatatttcatcttcattgc

SEQ ID NO: 9822 - DNA, 26 bp, Artificial sequence
  SiRNA target sequence
aatgaatatatttcatcttcattgcc

SEQ ID NO: 9823 - DNA, 26 bp, Artificial sequence
  SiRNA target sequence
atgaatatatttcatcttcattgcct

SEQ ID NO: 9824 - DNA, 26 bp, Artificial sequence
  SiRNA target sequence
tgaatatatttcatcttcattgcctt

SEQ ID NO: 9825 - DNA, 26 bp, Artificial sequence
  SiRNA target sequence
gaatatatttcatcttcattgccttt

SEQ ID NO: 9826 - DNA, 26 bp, Artificial sequence
  SiRNA target sequence
aatatatttcatcttcattgccttta

SEQ ID NO: 9827 - DNA, 26 bp, Artificial sequence
  SiRNA target sequence
atatatttcatcttcattgcctttag

SEQ ID NO: 9828 - DNA, 26 bp, Artificial sequence
  SiRNA target sequence
tatatttcatcttcattgcctttaga

SEQ ID NO: 9829 - DNA, 26 bp, Artificial sequence
  SiRNA target sequence
atatttcatcttcattgcctttagat

SEQ ID NO: 9830 - DNA, 26 bp, Artificial sequence
  SiRNA target sequence
tatttcatcttcattgcctttagatg

SEQ ID NO: 9831 - DNA, 26 bp, Artificial sequence
  SiRNA target sequence
atttcatcttcattgcctttagatga

SEQ ID NO: 9832 - DNA, 26 bp, Artificial sequence
  SiRNA target sequence
tttcatcttcattgcctttagatgac

SEQ ID NO: 9833 - DNA, 26 bp, Artificial sequence
  SiRNA target sequence
ttcatcttcattgcctttagatgacg

SEQ ID NO: 9834 - DNA, 26 bp, Artificial sequence
  SiRNA target sequence
tcatcttcattgcctttagatgacga

SEQ ID NO: 9835 - DNA, 26 bp, Artificial sequence
  SiRNA target sequence
catcttcattgcctttagatgacgag

SEQ ID NO: 9836 - DNA, 26 bp, Artificial sequence
  SiRNA target sequence
atcttcattgcctttagatgacgaga

SEQ ID NO: 9837 - DNA, 26 bp, Artificial sequence
  SiRNA target sequence
tcttcattgcctttagatgacgagat

SEQ ID NO: 9838 - DNA, 26 bp, Artificial sequence
  SiRNA target sequence
cttcattgcctttagatgacgagatt

SEQ ID NO: 9839 - DNA, 26 bp, Artificial sequence
  SiRNA target sequence
ttcattgcctttagatgacgagatta

SEQ ID NO: 9840 - DNA, 26 bp, Artificial sequence
  SiRNA target sequence
tcattgcctttagatgacgagattac

SEQ ID NO: 9841 - DNA, 26 bp, Artificial sequence
  SiRNA target sequence
cattgcctttagatgacgagattact

SEQ ID NO: 9842 - DNA, 26 bp, Artificial sequence
  SiRNA target sequence
attgcctttagatgacgagattacta

SEQ ID NO: 9843 - DNA, 26 bp, Artificial sequence
  SiRNA target sequence
ttgcctttagatgacgagattactac

SEQ ID NO: 9844 - DNA, 26 bp, Artificial sequence
  SiRNA target sequence
tgcctttagatgacgagattactacg

SEQ ID NO: 9845 - DNA, 26 bp, Artificial sequence
  SiRNA target sequence
gcctttagatgacgagattactacgc

SEQ ID NO: 9846 - DNA, 26 bp, Artificial sequence
  SiRNA target sequence
cctttagatgacgagattactacgct

SEQ ID NO: 9847 - DNA, 26 bp, Artificial sequence
  SiRNA target sequence
ctttagatgacgagattactacgctt

SEQ ID NO: 9848 - DNA, 26 bp, Artificial sequence
  SiRNA target sequence
tttagatgacgagattactacgcttt

SEQ ID NO: 9849 - DNA, 26 bp, Artificial sequence
  SiRNA target sequence
ttagatgacgagattactacgcttta

SEQ ID NO: 9850 - DNA, 26 bp, Artificial sequence
  SiRNA target sequence
tagatgacgagattactacgctttac

SEQ ID NO: 9851 - DNA, 26 bp, Artificial sequence
  SiRNA target sequence
agatgacgagattactacgctttact

SEQ ID NO: 9852 - DNA, 26 bp, Artificial sequence
  SiRNA target sequence
gatgacgagattactacgctttactt

SEQ ID NO: 9853 - DNA, 26 bp, Artificial sequence
  SiRNA target sequence
atgacgagattactacgctttacttg

SEQ ID NO: 9854 - DNA, 26 bp, Artificial sequence
  SiRNA target sequence
tgacgagattactacgctttacttgt

SEQ ID NO: 9855 - DNA, 26 bp, Artificial sequence
  SiRNA target sequence
gacgagattactacgctttacttgta

SEQ ID NO: 9856 - DNA, 26 bp, Artificial sequence
  SiRNA target sequence
acgagattactacgctttacttgtat

SEQ ID NO: 9857 - DNA, 26 bp, Artificial sequence
  SiRNA target sequence
cgagattactacgctttacttgtatt

SEQ ID NO: 9858 - DNA, 26 bp, Artificial sequence
  SiRNA target sequence
gagattactacgctttacttgtattc

SEQ ID NO: 9859 - DNA, 26 bp, Artificial sequence
  SiRNA target sequence
agattactacgctttacttgtattct

SEQ ID NO: 9860 - DNA, 26 bp, Artificial sequence
  SiRNA target sequence
gattactacgctttacttgtattcta

SEQ ID NO: 9861 - DNA, 26 bp, Artificial sequence
  SiRNA target sequence
attactacgctttacttgtattctaa

SEQ ID NO: 9862 - DNA, 26 bp, Artificial sequence
  SiRNA target sequence
ttactacgctttacttgtattctaag

SEQ ID NO: 9863 - DNA, 26 bp, Artificial sequence
  SiRNA target sequence
tactacgctttacttgtattctaaga

SEQ ID NO: 9864 - DNA, 26 bp, Artificial sequence
  SiRNA target sequence
actacgctttacttgtattctaagat

SEQ ID NO: 9865 - DNA, 26 bp, Artificial sequence
  SiRNA target sequence
ctacgctttacttgtattctaagatt

SEQ ID NO: 9866 - DNA, 26 bp, Artificial sequence
  SiRNA target sequence
tacgctttacttgtattctaagattt

SEQ ID NO: 9867 - DNA, 26 bp, Artificial sequence
  SiRNA target sequence
acgctttacttgtattctaagatttt

SEQ ID NO: 9868 - DNA, 26 bp, Artificial sequence
  SiRNA target sequence
cgctttacttgtattctaagattttt

SEQ ID NO: 9869 - DNA, 26 bp, Artificial sequence
  SiRNA target sequence
gctttacttgtattctaagattttta

SEQ ID NO: 9870 - DNA, 26 bp, Artificial sequence
  SiRNA target sequence
ctttacttgtattctaagatttttaa

SEQ ID NO: 9871 - DNA, 26 bp, Artificial sequence
  SiRNA target sequence
tttacttgtattctaagatttttaaa

SEQ ID NO: 9872 - DNA, 26 bp, Artificial sequence
  SiRNA target sequence
ttacttgtattctaagatttttaaag

SEQ ID NO: 9873 - DNA, 26 bp, Artificial sequence
  SiRNA target sequence
tacttgtattctaagatttttaaaga

SEQ ID NO: 9874 - DNA, 26 bp, Artificial sequence
  SiRNA target sequence
acttgtattctaagatttttaaagat

SEQ ID NO: 9875 - DNA, 26 bp, Artificial sequence
  SiRNA target sequence
cttgtattctaagatttttaaagata

SEQ ID NO: 9876 - DNA, 26 bp, Artificial sequence
  SiRNA target sequence
ttgtattctaagatttttaaagataa

SEQ ID NO: 9877 - DNA, 26 bp, Artificial sequence
  SiRNA target sequence
tgtattctaagatttttaaagataaa

SEQ ID NO: 9878 - DNA, 26 bp, Artificial sequence
  SiRNA target sequence
gtattctaagatttttaaagataaat

SEQ ID NO: 9879 - DNA, 26 bp, Artificial sequence
  SiRNA target sequence
tattctaagatttttaaagataaatc

SEQ ID NO: 9880 - DNA, 26 bp, Artificial sequence
  SiRNA target sequence
attctaagatttttaaagataaatct

SEQ ID NO: 9881 - DNA, 26 bp, Artificial sequence
  SiRNA target sequence
ttctaagatttttaaagataaatctg

SEQ ID NO: 9882 - DNA, 26 bp, Artificial sequence
  SiRNA target sequence
tctaagatttttaaagataaatctga

SEQ ID NO: 9883 - DNA, 26 bp, Artificial sequence
  SiRNA target sequence
ctaagatttttaaagataaatctgat

SEQ ID NO: 9884 - DNA, 26 bp, Artificial sequence
  SiRNA target sequence
taagatttttaaagataaatctgata

SEQ ID NO: 9885 - DNA, 26 bp, Artificial sequence
  SiRNA target sequence
aagatttttaaagataaatctgatac

SEQ ID NO: 9886 - DNA, 26 bp, Artificial sequence
  SiRNA target sequence
agatttttaaagataaatctgatact

SEQ ID NO: 9887 - DNA, 26 bp, Artificial sequence
  SiRNA target sequence
gatttttaaagataaatctgatactt

SEQ ID NO: 9888 - DNA, 26 bp, Artificial sequence
  SiRNA target sequence
atttttaaagataaatctgatactta

SEQ ID NO: 9889 - DNA, 26 bp, Artificial sequence
  SiRNA target sequence
tttttaaagataaatctgatacttac

SEQ ID NO: 9890 - DNA, 26 bp, Artificial sequence
  SiRNA target sequence
ttttaaagataaatctgatacttacc

SEQ ID NO: 9891 - DNA, 26 bp, Artificial sequence
  SiRNA target sequence
tttaaagataaatctgatacttacct

SEQ ID NO: 9892 - DNA, 26 bp, Artificial sequence
  SiRNA target sequence
ttaaagataaatctgatacttacctt

SEQ ID NO: 9893 - DNA, 26 bp, Artificial sequence
  SiRNA target sequence
taaagataaatctgatacttacctta

SEQ ID NO: 9894 - DNA, 26 bp, Artificial sequence
  SiRNA target sequence
aaagataaatctgatacttaccttaa

SEQ ID NO: 9895 - DNA, 26 bp, Artificial sequence
  SiRNA target sequence
aagataaatctgatacttaccttaaa

SEQ ID NO: 9896 - DNA, 26 bp, Artificial sequence
  SiRNA target sequence
agataaatctgatacttaccttaaat

SEQ ID NO: 9897 - DNA, 26 bp, Artificial sequence
  SiRNA target sequence
gataaatctgatacttaccttaaatc

SEQ ID NO: 9898 - DNA, 26 bp, Artificial sequence
  SiRNA target sequence
ataaatctgatacttaccttaaatct

SEQ ID NO: 9899 - DNA, 26 bp, Artificial sequence
  SiRNA target sequence
taaatctgatacttaccttaaatctg

SEQ ID NO: 9900 - DNA, 26 bp, Artificial sequence
  SiRNA target sequence
aaatctgatacttaccttaaatctgc

SEQ ID NO: 9901 - DNA, 26 bp, Artificial sequence
  SiRNA target sequence
aatctgatacttaccttaaatctgct

SEQ ID NO: 9902 - DNA, 26 bp, Artificial sequence
  SiRNA target sequence
atctgatacttaccttaaatctgcta

SEQ ID NO: 9903 - DNA, 26 bp, Artificial sequence
  SiRNA target sequence
tctgatacttaccttaaatctgctat

SEQ ID NO: 9904 - DNA, 26 bp, Artificial sequence
  SiRNA target sequence
ctgatacttaccttaaatctgctata

SEQ ID NO: 9905 - DNA, 26 bp, Artificial sequence
  SiRNA target sequence
tgatacttaccttaaatctgctatag

SEQ ID NO: 9906 - DNA, 26 bp, Artificial sequence
  SiRNA target sequence
gatacttaccttaaatctgctataga

SEQ ID NO: 9907 - DNA, 26 bp, Artificial sequence
  SiRNA target sequence
atacttaccttaaatctgctatagat

SEQ ID NO: 9908 - DNA, 26 bp, Artificial sequence
  SiRNA target sequence
tacttaccttaaatctgctatagata

SEQ ID NO: 9909 - DNA, 26 bp, Artificial sequence
  SiRNA target sequence
acttaccttaaatctgctatagataa

SEQ ID NO: 9910 - DNA, 26 bp, Artificial sequence
  SiRNA target sequence
cttaccttaaatctgctatagataaa

SEQ ID NO: 9911 - DNA, 26 bp, Artificial sequence
  SiRNA target sequence
ttaccttaaatctgctatagataaat

SEQ ID NO: 9912 - DNA, 26 bp, Artificial sequence
  SiRNA target sequence
taccttaaatctgctatagataaatc

SEQ ID NO: 9913 - DNA, 26 bp, Artificial sequence
  SiRNA target sequence
accttaaatctgctatagataaatca

SEQ ID NO: 9914 - DNA, 26 bp, Artificial sequence
  SiRNA target sequence
ccttaaatctgctatagataaatcag

SEQ ID NO: 9915 - DNA, 26 bp, Artificial sequence
  SiRNA target sequence
cttaaatctgctatagataaatcagt

SEQ ID NO: 9916 - DNA, 26 bp, Artificial sequence
  SiRNA target sequence
ttaaatctgctatagataaatcagta

SEQ ID NO: 9917 - DNA, 26 bp, Artificial sequence
  SiRNA target sequence
taaatctgctatagataaatcagtag

SEQ ID NO: 9918 - DNA, 26 bp, Artificial sequence
  SiRNA target sequence
aaatctgctatagataaatcagtaga

SEQ ID NO: 9919 - DNA, 26 bp, Artificial sequence
  SiRNA target sequence
aatctgctatagataaatcagtagat

SEQ ID NO: 9920 - DNA, 26 bp, Artificial sequence
  SiRNA target sequence
atctgctatagataaatcagtagatc

SEQ ID NO: 9921 - DNA, 26 bp, Artificial sequence
  SiRNA target sequence
tctgctatagataaatcagtagatct

SEQ ID NO: 9922 - DNA, 26 bp, Artificial sequence
  SiRNA target sequence
ctgctatagataaatcagtagatcta

SEQ ID NO: 9923 - DNA, 26 bp, Artificial sequence
  SiRNA target sequence
tgctatagataaatcagtagatctac

SEQ ID NO: 9924 - DNA, 26 bp, Artificial sequence
  SiRNA target sequence
gctatagataaatcagtagatctacc

SEQ ID NO: 9925 - DNA, 26 bp, Artificial sequence
  SiRNA target sequence
ctatagataaatcagtagatctacct

SEQ ID NO: 9926 - DNA, 26 bp, Artificial sequence
  SiRNA target sequence
tatagataaatcagtagatctaccta

SEQ ID NO: 9927 - DNA, 26 bp, Artificial sequence
  SiRNA target sequence
atagataaatcagtagatctacctat

SEQ ID NO: 9928 - DNA, 26 bp, Artificial sequence
  SiRNA target sequence
tagataaatcagtagatctacctatt

SEQ ID NO: 9929 - DNA, 26 bp, Artificial sequence
  SiRNA target sequence
agataaatcagtagatctacctattg

SEQ ID NO: 9930 - DNA, 26 bp, Artificial sequence
  SiRNA target sequence
gataaatcagtagatctacctattga

SEQ ID NO: 9931 - DNA, 26 bp, Artificial sequence
  SiRNA target sequence
ataaatcagtagatctacctattgaa

SEQ ID NO: 9932 - DNA, 26 bp, Artificial sequence
  SiRNA target sequence
taaatcagtagatctacctattgaac

SEQ ID NO: 9933 - DNA, 26 bp, Artificial sequence
  SiRNA target sequence
aaatcagtagatctacctattgaaca

SEQ ID NO: 9934 - DNA, 26 bp, Artificial sequence
  SiRNA target sequence
aatcagtagatctacctattgaacag

SEQ ID NO: 9935 - DNA, 26 bp, Artificial sequence
  SiRNA target sequence
atcagtagatctacctattgaacaga

SEQ ID NO: 9936 - DNA, 26 bp, Artificial sequence
  SiRNA target sequence
tcagtagatctacctattgaacagaa

SEQ ID NO: 9937 - DNA, 26 bp, Artificial sequence
  SiRNA target sequence
cagtagatctacctattgaacagaaa

SEQ ID NO: 9938 - DNA, 26 bp, Artificial sequence
  SiRNA target sequence
agtagatctacctattgaacagaaag

SEQ ID NO: 9939 - DNA, 26 bp, Artificial sequence
  SiRNA target sequence
gtagatctacctattgaacagaaaga

SEQ ID NO: 9940 - DNA, 26 bp, Artificial sequence
  SiRNA target sequence
tagatctacctattgaacagaaagac

SEQ ID NO: 9941 - DNA, 26 bp, Artificial sequence
  SiRNA target sequence
agatctacctattgaacagaaagact

SEQ ID NO: 9942 - DNA, 26 bp, Artificial sequence
  SiRNA target sequence
gatctacctattgaacagaaagactt

SEQ ID NO: 9943 - DNA, 26 bp, Artificial sequence
  SiRNA target sequence
atctacctattgaacagaaagacttt

SEQ ID NO: 9944 - DNA, 26 bp, Artificial sequence
  SiRNA target sequence
tctacctattgaacagaaagactttc

SEQ ID NO: 9945 - DNA, 26 bp, Artificial sequence
  SiRNA target sequence
ctacctattgaacagaaagactttct

SEQ ID NO: 9946 - DNA, 26 bp, Artificial sequence
  SiRNA target sequence
tacctattgaacagaaagactttctg

SEQ ID NO: 9947 - DNA, 26 bp, Artificial sequence
  SiRNA target sequence
acctattgaacagaaagactttctgt

SEQ ID NO: 9948 - DNA, 26 bp, Artificial sequence
  SiRNA target sequence
cctattgaacagaaagactttctgta

SEQ ID NO: 9949 - DNA, 26 bp, Artificial sequence
  SiRNA target sequence
ctattgaacagaaagactttctgtac

SEQ ID NO: 9950 - DNA, 26 bp, Artificial sequence
  SiRNA target sequence
tattgaacagaaagactttctgtacg

SEQ ID NO: 9951 - DNA, 26 bp, Artificial sequence
  SiRNA target sequence
attgaacagaaagactttctgtacgt

SEQ ID NO: 9952 - DNA, 26 bp, Artificial sequence
  SiRNA target sequence
ttgaacagaaagactttctgtacgta

SEQ ID NO: 9953 - DNA, 26 bp, Artificial sequence
  SiRNA target sequence
tgaacagaaagactttctgtacgtag

SEQ ID NO: 9954 - DNA, 26 bp, Artificial sequence
  SiRNA target sequence
gaacagaaagactttctgtacgtaga

SEQ ID NO: 9955 - DNA, 26 bp, Artificial sequence
  SiRNA target sequence
aacagaaagactttctgtacgtagat

SEQ ID NO: 9956 - DNA, 26 bp, Artificial sequence
  SiRNA target sequence
acagaaagactttctgtacgtagatc

SEQ ID NO: 9957 - DNA, 26 bp, Artificial sequence
  SiRNA target sequence
cagaaagactttctgtacgtagatct

SEQ ID NO: 9958 - DNA, 26 bp, Artificial sequence
  SiRNA target sequence
agaaagactttctgtacgtagatctt

SEQ ID NO: 9959 - DNA, 26 bp, Artificial sequence
  SiRNA target sequence
gaaagactttctgtacgtagatcttc

SEQ ID NO: 9960 - DNA, 26 bp, Artificial sequence
  SiRNA target sequence
aaagactttctgtacgtagatcttct

SEQ ID NO: 9961 - DNA, 26 bp, Artificial sequence
  SiRNA target sequence
aagactttctgtacgtagatcttctt

SEQ ID NO: 9962 - DNA, 26 bp, Artificial sequence
  SiRNA target sequence
agactttctgtacgtagatcttcttg

SEQ ID NO: 9963 - DNA, 26 bp, Artificial sequence
  SiRNA target sequence
gactttctgtacgtagatcttcttgt

SEQ ID NO: 9964 - DNA, 26 bp, Artificial sequence
  SiRNA target sequence
actttctgtacgtagatcttcttgta

SEQ ID NO: 9965 - DNA, 26 bp, Artificial sequence
  SiRNA target sequence
ctttctgtacgtagatcttcttgtat

SEQ ID NO: 9966 - DNA, 26 bp, Artificial sequence
  SiRNA target sequence
tttctgtacgtagatcttcttgtatt

SEQ ID NO: 9967 - DNA, 26 bp, Artificial sequence
  SiRNA target sequence
ttctgtacgtagatcttcttgtattt

SEQ ID NO: 9968 - DNA, 26 bp, Artificial sequence
  SiRNA target sequence
tctgtacgtagatcttcttgtatttt

SEQ ID NO: 9969 - DNA, 26 bp, Artificial sequence
  SiRNA target sequence
ctgtacgtagatcttcttgtatttta

SEQ ID NO: 9970 - DNA, 26 bp, Artificial sequence
  SiRNA target sequence
tgtacgtagatcttcttgtattttac

SEQ ID NO: 9971 - DNA, 26 bp, Artificial sequence
  SiRNA target sequence
gtacgtagatcttcttgtattttaca

SEQ ID NO: 9972 - DNA, 26 bp, Artificial sequence
  SiRNA target sequence
tacgtagatcttcttgtattttacat

SEQ ID NO: 9973 - DNA, 26 bp, Artificial sequence
  SiRNA target sequence
acgtagatcttcttgtattttacatt

SEQ ID NO: 9974 - DNA, 26 bp, Artificial sequence
  SiRNA target sequence
cgtagatcttcttgtattttacattt

SEQ ID NO: 9975 - DNA, 26 bp, Artificial sequence
  SiRNA target sequence
gtagatcttcttgtattttacatttc

SEQ ID NO: 9976 - DNA, 26 bp, Artificial sequence
  SiRNA target sequence
tagatcttcttgtattttacatttct

SEQ ID NO: 9977 - DNA, 26 bp, Artificial sequence
  SiRNA target sequence
agatcttcttgtattttacatttcta

SEQ ID NO: 9978 - DNA, 26 bp, Artificial sequence
  SiRNA target sequence
gatcttcttgtattttacatttctaa

SEQ ID NO: 9979 - DNA, 26 bp, Artificial sequence
  SiRNA target sequence
atcttcttgtattttacatttctaaa

SEQ ID NO: 9980 - DNA, 26 bp, Artificial sequence
  SiRNA target sequence
tcttcttgtattttacatttctaaaa

SEQ ID NO: 9981 - DNA, 26 bp, Artificial sequence
  SiRNA target sequence
cttcttgtattttacatttctaaaaa

SEQ ID NO: 9982 - DNA, 26 bp, Artificial sequence
  SiRNA target sequence
ttcttgtattttacatttctaaaaag

SEQ ID NO: 9983 - DNA, 26 bp, Artificial sequence
  SiRNA target sequence
tcttgtattttacatttctaaaaagg

SEQ ID NO: 9984 - DNA, 26 bp, Artificial sequence
  SiRNA target sequence
cttgtattttacatttctaaaaagga

SEQ ID NO: 9985 - DNA, 26 bp, Artificial sequence
  SiRNA target sequence
ttgtattttacatttctaaaaaggat

SEQ ID NO: 9986 - DNA, 26 bp, Artificial sequence
  SiRNA target sequence
tgtattttacatttctaaaaaggatg

SEQ ID NO: 9987 - DNA, 26 bp, Artificial sequence
  SiRNA target sequence
gtattttacatttctaaaaaggatgt

SEQ ID NO: 9988 - DNA, 26 bp, Artificial sequence
  SiRNA target sequence
tattttacatttctaaaaaggatgtt

SEQ ID NO: 9989 - DNA, 26 bp, Artificial sequence
  SiRNA target sequence
attttacatttctaaaaaggatgttg

SEQ ID NO: 9990 - DNA, 26 bp, Artificial sequence
  SiRNA target sequence
ttttacatttctaaaaaggatgttga

SEQ ID NO: 9991 - DNA, 26 bp, Artificial sequence
  SiRNA target sequence
tttacatttctaaaaaggatgttgaa

SEQ ID NO: 9992 - DNA, 26 bp, Artificial sequence
  SiRNA target sequence
ttacatttctaaaaaggatgttgaaa

SEQ ID NO: 9993 - DNA, 26 bp, Artificial sequence
  SiRNA target sequence
tacatttctaaaaaggatgttgaaaa

SEQ ID NO: 9994 - DNA, 26 bp, Artificial sequence
  SiRNA target sequence
acatttctaaaaaggatgttgaaaaa

SEQ ID NO: 9995 - DNA, 26 bp, Artificial sequence
  SiRNA target sequence
catttctaaaaaggatgttgaaaaag

SEQ ID NO: 9996 - DNA, 26 bp, Artificial sequence
  SiRNA target sequence
atttctaaaaaggatgttgaaaaagt

SEQ ID NO: 9997 - DNA, 26 bp, Artificial sequence
  SiRNA target sequence
tttctaaaaaggatgttgaaaaagtt

SEQ ID NO: 9998 - DNA, 26 bp, Artificial sequence
  SiRNA target sequence
ttctaaaaaggatgttgaaaaagtta

SEQ ID NO: 9999 - DNA, 26 bp, Artificial sequence
  SiRNA target sequence
tctaaaaaggatgttgaaaaagttaa

SEQ ID NO: 10000 - DNA, 26 bp, Artificial sequence
  SiRNA target sequence
ctaaaaaggatgttgaaaaagttaat

SEQ ID NO: 10001 - DNA, 26 bp, Artificial sequence
  SiRNA target sequence
taaaaaggatgttgaaaaagttaatg

SEQ ID NO: 10002 - DNA, 26 bp, Artificial sequence
  SiRNA target sequence
aaaaaggatgttgaaaaagttaatga

SEQ ID NO: 10003 - DNA, 26 bp, Artificial sequence
  SiRNA target sequence
aaaaggatgttgaaaaagttaatgaa

SEQ ID NO: 10004 - DNA, 26 bp, Artificial sequence
  SiRNA target sequence
aaaggatgttgaaaaagttaatgaaa

SEQ ID NO: 10005 - DNA, 26 bp, Artificial sequence
  SiRNA target sequence
aaggatgttgaaaaagttaatgaaac

SEQ ID NO: 10006 - DNA, 26 bp, Artificial sequence
  SiRNA target sequence
aggatgttgaaaaagttaatgaaaca

SEQ ID NO: 10007 - DNA, 26 bp, Artificial sequence
  SiRNA target sequence
ggatgttgaaaaagttaatgaaacaa

SEQ ID NO: 10008 - DNA, 26 bp, Artificial sequence
  SiRNA target sequence
gatgttgaaaaagttaatgaaacaat

SEQ ID NO: 10009 - DNA, 26 bp, Artificial sequence
  SiRNA target sequence
atgttgaaaaagttaatgaaacaatt

SEQ ID NO: 10010 - DNA, 26 bp, Artificial sequence
  SiRNA target sequence
tgttgaaaaagttaatgaaacaatta

SEQ ID NO: 10011 - DNA, 26 bp, Artificial sequence
  SiRNA target sequence
gttgaaaaagttaatgaaacaattaa

SEQ ID NO: 10012 - DNA, 26 bp, Artificial sequence
  SiRNA target sequence
ttgaaaaagttaatgaaacaattaat

SEQ ID NO: 10013 - DNA, 26 bp, Artificial sequence
  SiRNA target sequence
tgaaaaagttaatgaaacaattaata

SEQ ID NO: 10014 - DNA, 26 bp, Artificial sequence
  SiRNA target sequence
gaaaaagttaatgaaacaattaataa

SEQ ID NO: 10015 - DNA, 26 bp, Artificial sequence
  SiRNA target sequence
aaaaagttaatgaaacaattaataat

SEQ ID NO: 10016 - DNA, 26 bp, Artificial sequence
  SiRNA target sequence
aaaagttaatgaaacaattaataatt

SEQ ID NO: 10017 - DNA, 26 bp, Artificial sequence
  SiRNA target sequence
aaagttaatgaaacaattaataattt

SEQ ID NO: 10018 - DNA, 26 bp, Artificial sequence
  SiRNA target sequence
aagttaatgaaacaattaataattta

SEQ ID NO: 10019 - DNA, 26 bp, Artificial sequence
  SiRNA target sequence
agttaatgaaacaattaataatttaa

SEQ ID NO: 10020 - DNA, 26 bp, Artificial sequence
  SiRNA target sequence
gttaatgaaacaattaataatttaaa

SEQ ID NO: 10021 - DNA, 26 bp, Artificial sequence
  SiRNA target sequence
ttaatgaaacaattaataatttaaaa

SEQ ID NO: 10022 - DNA, 26 bp, Artificial sequence
  SiRNA target sequence
taatgaaacaattaataatttaaaag

SEQ ID NO: 10023 - DNA, 26 bp, Artificial sequence
  SiRNA target sequence
aatgaaacaattaataatttaaaaga

SEQ ID NO: 10024 - DNA, 26 bp, Artificial sequence
  SiRNA target sequence
atgaaacaattaataatttaaaagag

SEQ ID NO: 10025 - DNA, 26 bp, Artificial sequence
  SiRNA target sequence
tgaaacaattaataatttaaaagaga

SEQ ID NO: 10026 - DNA, 26 bp, Artificial sequence
  SiRNA target sequence
gaaacaattaataatttaaaagagac

SEQ ID NO: 10027 - DNA, 26 bp, Artificial sequence
  SiRNA target sequence
aaacaattaataatttaaaagagact

SEQ ID NO: 10028 - DNA, 26 bp, Artificial sequence
  SiRNA target sequence
aacaattaataatttaaaagagactc

SEQ ID NO: 10029 - DNA, 26 bp, Artificial sequence
  SiRNA target sequence
acaattaataatttaaaagagactct

SEQ ID NO: 10030 - DNA, 26 bp, Artificial sequence
  SiRNA target sequence
caattaataatttaaaagagactctt

SEQ ID NO: 10031 - DNA, 26 bp, Artificial sequence
  SiRNA target sequence
aattaataatttaaaagagactctta

SEQ ID NO: 10032 - DNA, 26 bp, Artificial sequence
  SiRNA target sequence
attaataatttaaaagagactcttac

SEQ ID NO: 10033 - DNA, 26 bp, Artificial sequence
  SiRNA target sequence
ttaataatttaaaagagactcttacc

SEQ ID NO: 10034 - DNA, 26 bp, Artificial sequence
  SiRNA target sequence
taataatttaaaagagactcttaccc

SEQ ID NO: 10035 - DNA, 26 bp, Artificial sequence
  SiRNA target sequence
aataatttaaaagagactcttacccc

SEQ ID NO: 10036 - DNA, 26 bp, Artificial sequence
  SiRNA target sequence
ataatttaaaagagactcttaccccc

SEQ ID NO: 10037 - DNA, 26 bp, Artificial sequence
  SiRNA target sequence
taatttaaaagagactcttaccccca

SEQ ID NO: 10038 - DNA, 26 bp, Artificial sequence
  SiRNA target sequence
aatttaaaagagactcttacccccac

SEQ ID NO: 10039 - DNA, 26 bp, Artificial sequence
  SiRNA target sequence
atttaaaagagactcttacccccact

SEQ ID NO: 10040 - DNA, 26 bp, Artificial sequence
  SiRNA target sequence
tttaaaagagactcttacccccactt

SEQ ID NO: 10041 - DNA, 26 bp, Artificial sequence
  SiRNA target sequence
ttaaaagagactcttacccccacttt

SEQ ID NO: 10042 - DNA, 26 bp, Artificial sequence
  SiRNA target sequence
taaaagagactcttacccccacttta

SEQ ID NO: 10043 - DNA, 26 bp, Artificial sequence
  SiRNA target sequence
aaaagagactcttacccccactttat

SEQ ID NO: 10044 - DNA, 26 bp, Artificial sequence
  SiRNA target sequence
aaagagactcttacccccactttatt

SEQ ID NO: 10045 - DNA, 26 bp, Artificial sequence
  SiRNA target sequence
aagagactcttacccccactttattg

SEQ ID NO: 10046 - DNA, 26 bp, Artificial sequence
  SiRNA target sequence
agagactcttacccccactttattgg

SEQ ID NO: 10047 - DNA, 26 bp, Artificial sequence
  SiRNA target sequence
gagactcttacccccactttattgga

SEQ ID NO: 10048 - DNA, 26 bp, Artificial sequence
  SiRNA target sequence
agactcttacccccactttattggaa

SEQ ID NO: 10049 - DNA, 26 bp, Artificial sequence
  SiRNA target sequence
gactcttacccccactttattggaac

SEQ ID NO: 10050 - DNA, 26 bp, Artificial sequence
  SiRNA target sequence
actcttacccccactttattggaact

SEQ ID NO: 10051 - DNA, 26 bp, Artificial sequence
  SiRNA target sequence
ctcttacccccactttattggaactt

SEQ ID NO: 10052 - DNA, 26 bp, Artificial sequence
  SiRNA target sequence
tcttacccccactttattggaactta

SEQ ID NO: 10053 - DNA, 26 bp, Artificial sequence
  SiRNA target sequence
cttacccccactttattggaacttat

SEQ ID NO: 10054 - DNA, 26 bp, Artificial sequence
  SiRNA target sequence
ttacccccactttattggaacttatt

SEQ ID NO: 10055 - DNA, 26 bp, Artificial sequence
  SiRNA target sequence
tacccccactttattggaacttattg

SEQ ID NO: 10056 - DNA, 26 bp, Artificial sequence
  SiRNA target sequence
acccccactttattggaacttattgg

SEQ ID NO: 10057 - DNA, 26 bp, Artificial sequence
  SiRNA target sequence
cccccactttattggaacttattgga

SEQ ID NO: 10058 - DNA, 26 bp, Artificial sequence
  SiRNA target sequence
ccccactttattggaacttattggag

SEQ ID NO: 10059 - DNA, 26 bp, Artificial sequence
  SiRNA target sequence
cccactttattggaacttattggaga

SEQ ID NO: 10060 - DNA, 26 bp, Artificial sequence
  SiRNA target sequence
ccactttattggaacttattggagaa

SEQ ID NO: 10061 - DNA, 26 bp, Artificial sequence
  SiRNA target sequence
cactttattggaacttattggagaat

SEQ ID NO: 10062 - DNA, 26 bp, Artificial sequence
  SiRNA target sequence
actttattggaacttattggagaata

SEQ ID NO: 10063 - DNA, 26 bp, Artificial sequence
  SiRNA target sequence
ctttattggaacttattggagaatat

SEQ ID NO: 10064 - DNA, 26 bp, Artificial sequence
  SiRNA target sequence
tttattggaacttattggagaatatt

SEQ ID NO: 10065 - DNA, 26 bp, Artificial sequence
  SiRNA target sequence
ttattggaacttattggagaatatta

SEQ ID NO: 10066 - DNA, 26 bp, Artificial sequence
  SiRNA target sequence
tattggaacttattggagaatattat

SEQ ID NO: 10067 - DNA, 26 bp, Artificial sequence
  SiRNA target sequence
attggaacttattggagaatattatt

SEQ ID NO: 10068 - DNA, 26 bp, Artificial sequence
  SiRNA target sequence
ttggaacttattggagaatattattt

SEQ ID NO: 10069 - DNA, 26 bp, Artificial sequence
  SiRNA target sequence
tggaacttattggagaatattattta

SEQ ID NO: 10070 - DNA, 26 bp, Artificial sequence
  SiRNA target sequence
ggaacttattggagaatattatttaa

SEQ ID NO: 10071 - DNA, 26 bp, Artificial sequence
  SiRNA target sequence
gaacttattggagaatattatttaaa

SEQ ID NO: 10072 - DNA, 26 bp, Artificial sequence
  SiRNA target sequence
aacttattggagaatattatttaaaa

SEQ ID NO: 10073 - DNA, 26 bp, Artificial sequence
  SiRNA target sequence
acttattggagaatattatttaaaaa

SEQ ID NO: 10074 - DNA, 26 bp, Artificial sequence
  SiRNA target sequence
cttattggagaatattatttaaaaag

SEQ ID NO: 10075 - DNA, 26 bp, Artificial sequence
  SiRNA target sequence
ttattggagaatattatttaaaaagt

SEQ ID NO: 10076 - DNA, 26 bp, Artificial sequence
  SiRNA target sequence
tattggagaatattatttaaaaagtg

SEQ ID NO: 10077 - DNA, 26 bp, Artificial sequence
  SiRNA target sequence
attggagaatattatttaaaaagtgg

SEQ ID NO: 10078 - DNA, 26 bp, Artificial sequence
  SiRNA target sequence
ttggagaatattatttaaaaagtgga

SEQ ID NO: 10079 - DNA, 26 bp, Artificial sequence
  SiRNA target sequence
tggagaatattatttaaaaagtggaa

SEQ ID NO: 10080 - DNA, 26 bp, Artificial sequence
  SiRNA target sequence
ggagaatattatttaaaaagtggaaa

SEQ ID NO: 10081 - DNA, 26 bp, Artificial sequence
  SiRNA target sequence
gagaatattatttaaaaagtggaaat

SEQ ID NO: 10082 - DNA, 26 bp, Artificial sequence
  SiRNA target sequence
agaatattatttaaaaagtggaaatc

SEQ ID NO: 10083 - DNA, 26 bp, Artificial sequence
  SiRNA target sequence
gaatattatttaaaaagtggaaatca

SEQ ID NO: 10084 - DNA, 26 bp, Artificial sequence
  SiRNA target sequence
aatattatttaaaaagtggaaatcac

SEQ ID NO: 10085 - DNA, 26 bp, Artificial sequence
  SiRNA target sequence
atattatttaaaaagtggaaatcact

SEQ ID NO: 10086 - DNA, 26 bp, Artificial sequence
  SiRNA target sequence
tattatttaaaaagtggaaatcactc

SEQ ID NO: 10087 - DNA, 26 bp, Artificial sequence
  SiRNA target sequence
attatttaaaaagtggaaatcactct

SEQ ID NO: 10088 - DNA, 26 bp, Artificial sequence
  SiRNA target sequence
ttatttaaaaagtggaaatcactcta

SEQ ID NO: 10089 - DNA, 26 bp, Artificial sequence
  SiRNA target sequence
tatttaaaaagtggaaatcactctaa

SEQ ID NO: 10090 - DNA, 26 bp, Artificial sequence
  SiRNA target sequence
atttaaaaagtggaaatcactctaaa

SEQ ID NO: 10091 - DNA, 26 bp, Artificial sequence
  SiRNA target sequence
tttaaaaagtggaaatcactctaaaa

SEQ ID NO: 10092 - DNA, 26 bp, Artificial sequence
  SiRNA target sequence
ttaaaaagtggaaatcactctaaaat

SEQ ID NO: 10093 - DNA, 26 bp, Artificial sequence
  SiRNA target sequence
taaaaagtggaaatcactctaaaatg

SEQ ID NO: 10094 - DNA, 26 bp, Artificial sequence
  SiRNA target sequence
aaaaagtggaaatcactctaaaatgt

SEQ ID NO: 10095 - DNA, 26 bp, Artificial sequence
  SiRNA target sequence
aaaagtggaaatcactctaaaatgtt

SEQ ID NO: 10096 - DNA, 26 bp, Artificial sequence
  SiRNA target sequence
aaagtggaaatcactctaaaatgtta

SEQ ID NO: 10097 - DNA, 26 bp, Artificial sequence
  SiRNA target sequence
aagtggaaatcactctaaaatgttag

SEQ ID NO: 10098 - DNA, 26 bp, Artificial sequence
  SiRNA target sequence
agtggaaatcactctaaaatgttaga

SEQ ID NO: 10099 - DNA, 26 bp, Artificial sequence
  SiRNA target sequence
gtggaaatcactctaaaatgttagat

SEQ ID NO: 10100 - DNA, 26 bp, Artificial sequence
  SiRNA target sequence
tggaaatcactctaaaatgttagatc

SEQ ID NO: 10101 - DNA, 26 bp, Artificial sequence
  SiRNA target sequence
ggaaatcactctaaaatgttagatct

SEQ ID NO: 10102 - DNA, 26 bp, Artificial sequence
  SiRNA target sequence
gaaatcactctaaaatgttagatcta

SEQ ID NO: 10103 - DNA, 26 bp, Artificial sequence
  SiRNA target sequence
aaatcactctaaaatgttagatctat

SEQ ID NO: 10104 - DNA, 26 bp, Artificial sequence
  SiRNA target sequence
aatcactctaaaatgttagatctatt

SEQ ID NO: 10105 - DNA, 26 bp, Artificial sequence
  SiRNA target sequence
atcactctaaaatgttagatctatta

SEQ ID NO: 10106 - DNA, 26 bp, Artificial sequence
  SiRNA target sequence
tcactctaaaatgttagatctattat

SEQ ID NO: 10107 - DNA, 26 bp, Artificial sequence
  SiRNA target sequence
cactctaaaatgttagatctattatc

SEQ ID NO: 10108 - DNA, 26 bp, Artificial sequence
  SiRNA target sequence
actctaaaatgttagatctattatct

SEQ ID NO: 10109 - DNA, 26 bp, Artificial sequence
  SiRNA target sequence
ctctaaaatgttagatctattatcta

SEQ ID NO: 10110 - DNA, 26 bp, Artificial sequence
  SiRNA target sequence
tctaaaatgttagatctattatctag

SEQ ID NO: 10111 - DNA, 26 bp, Artificial sequence
  SiRNA target sequence
ctaaaatgttagatctattatctagt

SEQ ID NO: 10112 - DNA, 26 bp, Artificial sequence
  SiRNA target sequence
taaaatgttagatctattatctagtc

SEQ ID NO: 10113 - DNA, 26 bp, Artificial sequence
  SiRNA target sequence
aaaatgttagatctattatctagtca

SEQ ID NO: 10114 - DNA, 26 bp, Artificial sequence
  SiRNA target sequence
aaatgttagatctattatctagtcat

SEQ ID NO: 10115 - DNA, 26 bp, Artificial sequence
  SiRNA target sequence
aatgttagatctattatctagtcatc

SEQ ID NO: 10116 - DNA, 26 bp, Artificial sequence
  SiRNA target sequence
atgttagatctattatctagtcatcc

SEQ ID NO: 10117 - DNA, 26 bp, Artificial sequence
  SiRNA target sequence
tgttagatctattatctagtcatcca

SEQ ID NO: 10118 - DNA, 26 bp, Artificial sequence
  SiRNA target sequence
gttagatctattatctagtcatccag

SEQ ID NO: 10119 - DNA, 26 bp, Artificial sequence
  SiRNA target sequence
ttagatctattatctagtcatccaga

SEQ ID NO: 10120 - DNA, 26 bp, Artificial sequence
  SiRNA target sequence
tagatctattatctagtcatccagat

SEQ ID NO: 10121 - DNA, 26 bp, Artificial sequence
  SiRNA target sequence
agatctattatctagtcatccagata

SEQ ID NO: 10122 - DNA, 26 bp, Artificial sequence
  SiRNA target sequence
gatctattatctagtcatccagatac

SEQ ID NO: 10123 - DNA, 26 bp, Artificial sequence
  SiRNA target sequence
atctattatctagtcatccagatact

SEQ ID NO: 10124 - DNA, 26 bp, Artificial sequence
  SiRNA target sequence
tctattatctagtcatccagatactc

SEQ ID NO: 10125 - DNA, 26 bp, Artificial sequence
  SiRNA target sequence
ctattatctagtcatccagatactcc

SEQ ID NO: 10126 - DNA, 26 bp, Artificial sequence
  SiRNA target sequence
tattatctagtcatccagatactcct

SEQ ID NO: 10127 - DNA, 26 bp, Artificial sequence
  SiRNA target sequence
attatctagtcatccagatactcctg

SEQ ID NO: 10128 - DNA, 26 bp, Artificial sequence
  SiRNA target sequence
ttatctagtcatccagatactcctgg

SEQ ID NO: 10129 - DNA, 26 bp, Artificial sequence
  SiRNA target sequence
tatctagtcatccagatactcctggt

SEQ ID NO: 10130 - DNA, 26 bp, Artificial sequence
  SiRNA target sequence
atctagtcatccagatactcctggta

SEQ ID NO: 10131 - DNA, 26 bp, Artificial sequence
  SiRNA target sequence
tctagtcatccagatactcctggtaa

SEQ ID NO: 10132 - DNA, 26 bp, Artificial sequence
  SiRNA target sequence
ctagtcatccagatactcctggtaaa

SEQ ID NO: 10133 - DNA, 26 bp, Artificial sequence
  SiRNA target sequence
tagtcatccagatactcctggtaaat

SEQ ID NO: 10134 - DNA, 26 bp, Artificial sequence
  SiRNA target sequence
agtcatccagatactcctggtaaatt

SEQ ID NO: 10135 - DNA, 26 bp, Artificial sequence
  SiRNA target sequence
gtcatccagatactcctggtaaatta

SEQ ID NO: 10136 - DNA, 26 bp, Artificial sequence
  SiRNA target sequence
tcatccagatactcctggtaaattac

SEQ ID NO: 10137 - DNA, 26 bp, Artificial sequence
  SiRNA target sequence
catccagatactcctggtaaattact

SEQ ID NO: 10138 - DNA, 26 bp, Artificial sequence
  SiRNA target sequence
atccagatactcctggtaaattactt

SEQ ID NO: 10139 - DNA, 26 bp, Artificial sequence
  SiRNA target sequence
tccagatactcctggtaaattacttt

SEQ ID NO: 10140 - DNA, 26 bp, Artificial sequence
  SiRNA target sequence
ccagatactcctggtaaattactttt

SEQ ID NO: 10141 - DNA, 26 bp, Artificial sequence
  SiRNA target sequence
cagatactcctggtaaattactttta

SEQ ID NO: 10142 - DNA, 26 bp, Artificial sequence
  SiRNA target sequence
agatactcctggtaaattacttttaa

SEQ ID NO: 10143 - DNA, 26 bp, Artificial sequence
  SiRNA target sequence
gatactcctggtaaattacttttaac

SEQ ID NO: 10144 - DNA, 26 bp, Artificial sequence
  SiRNA target sequence
atactcctggtaaattacttttaacg

SEQ ID NO: 10145 - DNA, 26 bp, Artificial sequence
  SiRNA target sequence
tactcctggtaaattacttttaacgg

SEQ ID NO: 10146 - DNA, 26 bp, Artificial sequence
  SiRNA target sequence
actcctggtaaattacttttaacggc

SEQ ID NO: 10147 - DNA, 26 bp, Artificial sequence
  SiRNA target sequence
ctcctggtaaattacttttaacggca

SEQ ID NO: 10148 - DNA, 26 bp, Artificial sequence
  SiRNA target sequence
tcctggtaaattacttttaacggcac

SEQ ID NO: 10149 - DNA, 26 bp, Artificial sequence
  SiRNA target sequence
cctggtaaattacttttaacggcact

SEQ ID NO: 10150 - DNA, 26 bp, Artificial sequence
  SiRNA target sequence
ctggtaaattacttttaacggcactt

SEQ ID NO: 10151 - DNA, 26 bp, Artificial sequence
  SiRNA target sequence
tggtaaattacttttaacggcacttt

SEQ ID NO: 10152 - DNA, 26 bp, Artificial sequence
  SiRNA target sequence
ggtaaattacttttaacggcacttta

SEQ ID NO: 10153 - DNA, 26 bp, Artificial sequence
  SiRNA target sequence
gtaaattacttttaacggcactttat

SEQ ID NO: 10154 - DNA, 26 bp, Artificial sequence
  SiRNA target sequence
taaattacttttaacggcactttatg

SEQ ID NO: 10155 - DNA, 26 bp, Artificial sequence
  SiRNA target sequence
aaattacttttaacggcactttatgc

SEQ ID NO: 10156 - DNA, 26 bp, Artificial sequence
  SiRNA target sequence
aattacttttaacggcactttatgca

SEQ ID NO: 10157 - DNA, 26 bp, Artificial sequence
  SiRNA target sequence
attacttttaacggcactttatgcaa

SEQ ID NO: 10158 - DNA, 26 bp, Artificial sequence
  SiRNA target sequence
ttacttttaacggcactttatgcaat

SEQ ID NO: 10159 - DNA, 26 bp, Artificial sequence
  SiRNA target sequence
tacttttaacggcactttatgcaata

SEQ ID NO: 10160 - DNA, 26 bp, Artificial sequence
  SiRNA target sequence
acttttaacggcactttatgcaataa

SEQ ID NO: 10161 - DNA, 26 bp, Artificial sequence
  SiRNA target sequence
cttttaacggcactttatgcaataag

SEQ ID NO: 10162 - DNA, 26 bp, Artificial sequence
  SiRNA target sequence
ttttaacggcactttatgcaataagt

SEQ ID NO: 10163 - DNA, 26 bp, Artificial sequence
  SiRNA target sequence
tttaacggcactttatgcaataagta

SEQ ID NO: 10164 - DNA, 26 bp, Artificial sequence
  SiRNA target sequence
ttaacggcactttatgcaataagtat

SEQ ID NO: 10165 - DNA, 26 bp, Artificial sequence
  SiRNA target sequence
taacggcactttatgcaataagtatt

SEQ ID NO: 10166 - DNA, 26 bp, Artificial sequence
  SiRNA target sequence
aacggcactttatgcaataagtattg

SEQ ID NO: 10167 - DNA, 26 bp, Artificial sequence
  SiRNA target sequence
acggcactttatgcaataagtattga

SEQ ID NO: 10168 - DNA, 26 bp, Artificial sequence
  SiRNA target sequence
cggcactttatgcaataagtattgat

SEQ ID NO: 10169 - DNA, 26 bp, Artificial sequence
  SiRNA target sequence
ggcactttatgcaataagtattgata

SEQ ID NO: 10170 - DNA, 26 bp, Artificial sequence
  SiRNA target sequence
gcactttatgcaataagtattgataa

SEQ ID NO: 10171 - DNA, 26 bp, Artificial sequence
  SiRNA target sequence
cactttatgcaataagtattgataag

SEQ ID NO: 10172 - DNA, 26 bp, Artificial sequence
  SiRNA target sequence
actttatgcaataagtattgataaga

SEQ ID NO: 10173 - DNA, 26 bp, Artificial sequence
  SiRNA target sequence
ctttatgcaataagtattgataagaa

SEQ ID NO: 10174 - DNA, 26 bp, Artificial sequence
  SiRNA target sequence
tttatgcaataagtattgataagaaa

SEQ ID NO: 10175 - DNA, 26 bp, Artificial sequence
  SiRNA target sequence
ttatgcaataagtattgataagaaaa

SEQ ID NO: 10176 - DNA, 26 bp, Artificial sequence
  SiRNA target sequence
tatgcaataagtattgataagaaaaa

SEQ ID NO: 10177 - DNA, 26 bp, Artificial sequence
  SiRNA target sequence
atgcaataagtattgataagaaaaag

SEQ ID NO: 10178 - DNA, 26 bp, Artificial sequence
  SiRNA target sequence
tgcaataagtattgataagaaaaagg

SEQ ID NO: 10179 - DNA, 26 bp, Artificial sequence
  SiRNA target sequence
gcaataagtattgataagaaaaagga

SEQ ID NO: 10180 - DNA, 26 bp, Artificial sequence
  SiRNA target sequence
caataagtattgataagaaaaaggat

SEQ ID NO: 10181 - DNA, 26 bp, Artificial sequence
  SiRNA target sequence
aataagtattgataagaaaaaggatg

SEQ ID NO: 10182 - DNA, 26 bp, Artificial sequence
  SiRNA target sequence
ataagtattgataagaaaaaggatgc

SEQ ID NO: 10183 - DNA, 26 bp, Artificial sequence
  SiRNA target sequence
taagtattgataagaaaaaggatgct

SEQ ID NO: 10184 - DNA, 26 bp, Artificial sequence
  SiRNA target sequence
aagtattgataagaaaaaggatgcta

SEQ ID NO: 10185 - DNA, 26 bp, Artificial sequence
  SiRNA target sequence
agtattgataagaaaaaggatgctat

SEQ ID NO: 10186 - DNA, 26 bp, Artificial sequence
  SiRNA target sequence
gtattgataagaaaaaggatgctata

SEQ ID NO: 10187 - DNA, 26 bp, Artificial sequence
  SiRNA target sequence
tattgataagaaaaaggatgctatag

SEQ ID NO: 10188 - DNA, 26 bp, Artificial sequence
  SiRNA target sequence
attgataagaaaaaggatgctataga

SEQ ID NO: 10189 - DNA, 26 bp, Artificial sequence
  SiRNA target sequence
ttgataagaaaaaggatgctatagaa

SEQ ID NO: 10190 - DNA, 26 bp, Artificial sequence
  SiRNA target sequence
tgataagaaaaaggatgctatagaaa

SEQ ID NO: 10191 - DNA, 26 bp, Artificial sequence
  SiRNA target sequence
gataagaaaaaggatgctatagaaat

SEQ ID NO: 10192 - DNA, 26 bp, Artificial sequence
  SiRNA target sequence
ataagaaaaaggatgctatagaaatt

SEQ ID NO: 10193 - DNA, 26 bp, Artificial sequence
  SiRNA target sequence
taagaaaaaggatgctatagaaattt

SEQ ID NO: 10194 - DNA, 26 bp, Artificial sequence
  SiRNA target sequence
aagaaaaaggatgctatagaaatttt

SEQ ID NO: 10195 - DNA, 26 bp, Artificial sequence
  SiRNA target sequence
agaaaaaggatgctatagaaatttta

SEQ ID NO: 10196 - DNA, 26 bp, Artificial sequence
  SiRNA target sequence
gaaaaaggatgctatagaaattttat

SEQ ID NO: 10197 - DNA, 26 bp, Artificial sequence
  SiRNA target sequence
aaaaaggatgctatagaaattttata

SEQ ID NO: 10198 - DNA, 26 bp, Artificial sequence
  SiRNA target sequence
aaaaggatgctatagaaattttatat

SEQ ID NO: 10199 - DNA, 26 bp, Artificial sequence
  SiRNA target sequence
aaaggatgctatagaaattttatata

SEQ ID NO: 10200 - DNA, 26 bp, Artificial sequence
  SiRNA target sequence
aaggatgctatagaaattttatatag

SEQ ID NO: 10201 - DNA, 26 bp, Artificial sequence
  SiRNA target sequence
aggatgctatagaaattttatataga

SEQ ID NO: 10202 - DNA, 26 bp, Artificial sequence
  SiRNA target sequence
ggatgctatagaaattttatatagaa

SEQ ID NO: 10203 - DNA, 26 bp, Artificial sequence
  SiRNA target sequence
gatgctatagaaattttatatagaag

SEQ ID NO: 10204 - DNA, 26 bp, Artificial sequence
  SiRNA target sequence
atgctatagaaattttatatagaagt

SEQ ID NO: 10205 - DNA, 26 bp, Artificial sequence
  SiRNA target sequence
tgctatagaaattttatatagaagta

SEQ ID NO: 10206 - DNA, 26 bp, Artificial sequence
  SiRNA target sequence
gctatagaaattttatatagaagtat

SEQ ID NO: 10207 - DNA, 26 bp, Artificial sequence
  SiRNA target sequence
ctatagaaattttatatagaagtata

SEQ ID NO: 10208 - DNA, 26 bp, Artificial sequence
  SiRNA target sequence
tatagaaattttatatagaagtatat

SEQ ID NO: 10209 - DNA, 26 bp, Artificial sequence
  SiRNA target sequence
atagaaattttatatagaagtatatc

SEQ ID NO: 10210 - DNA, 26 bp, Artificial sequence
  SiRNA target sequence
tagaaattttatatagaagtatatca

SEQ ID NO: 10211 - DNA, 26 bp, Artificial sequence
  SiRNA target sequence
agaaattttatatagaagtatatcag

SEQ ID NO: 10212 - DNA, 26 bp, Artificial sequence
  SiRNA target sequence
gaaattttatatagaagtatatcaga

SEQ ID NO: 10213 - DNA, 26 bp, Artificial sequence
  SiRNA target sequence
aaattttatatagaagtatatcagaa

SEQ ID NO: 10214 - DNA, 26 bp, Artificial sequence
  SiRNA target sequence
aattttatatagaagtatatcagaat

SEQ ID NO: 10215 - DNA, 26 bp, Artificial sequence
  SiRNA target sequence
attttatatagaagtatatcagaata

SEQ ID NO: 10216 - DNA, 26 bp, Artificial sequence
  SiRNA target sequence
ttttatatagaagtatatcagaatat

SEQ ID NO: 10217 - DNA, 26 bp, Artificial sequence
  SiRNA target sequence
tttatatagaagtatatcagaatatt

SEQ ID NO: 10218 - DNA, 26 bp, Artificial sequence
  SiRNA target sequence
ttatatagaagtatatcagaatattc

SEQ ID NO: 10219 - DNA, 26 bp, Artificial sequence
  SiRNA target sequence
tatatagaagtatatcagaatattca

SEQ ID NO: 10220 - DNA, 26 bp, Artificial sequence
  SiRNA target sequence
atatagaagtatatcagaatattcat

SEQ ID NO: 10221 - DNA, 26 bp, Artificial sequence
  SiRNA target sequence
tatagaagtatatcagaatattcatc

SEQ ID NO: 10222 - DNA, 26 bp, Artificial sequence
  SiRNA target sequence
atagaagtatatcagaatattcatct

SEQ ID NO: 10223 - DNA, 26 bp, Artificial sequence
  SiRNA target sequence
tagaagtatatcagaatattcatctt

SEQ ID NO: 10224 - DNA, 26 bp, Artificial sequence
  SiRNA target sequence
agaagtatatcagaatattcatctta

SEQ ID NO: 10225 - DNA, 26 bp, Artificial sequence
  SiRNA target sequence
gaagtatatcagaatattcatcttat

SEQ ID NO: 10226 - DNA, 26 bp, Artificial sequence
  SiRNA target sequence
aagtatatcagaatattcatcttatt

SEQ ID NO: 10227 - DNA, 26 bp, Artificial sequence
  SiRNA target sequence
agtatatcagaatattcatcttattt

SEQ ID NO: 10228 - DNA, 26 bp, Artificial sequence
  SiRNA target sequence
gtatatcagaatattcatcttatttt

SEQ ID NO: 10229 - DNA, 26 bp, Artificial sequence
  SiRNA target sequence
tatatcagaatattcatcttatttta

SEQ ID NO: 10230 - DNA, 26 bp, Artificial sequence
  SiRNA target sequence
atatcagaatattcatcttattttaa

SEQ ID NO: 10231 - DNA, 26 bp, Artificial sequence
  SiRNA target sequence
tatcagaatattcatcttattttaaa

SEQ ID NO: 10232 - DNA, 26 bp, Artificial sequence
  SiRNA target sequence
atcagaatattcatcttattttaaat

SEQ ID NO: 10233 - DNA, 26 bp, Artificial sequence
  SiRNA target sequence
tcagaatattcatcttattttaaatc

SEQ ID NO: 10234 - DNA, 26 bp, Artificial sequence
  SiRNA target sequence
cagaatattcatcttattttaaatct

SEQ ID NO: 10235 - DNA, 26 bp, Artificial sequence
  SiRNA target sequence
agaatattcatcttattttaaatctt

SEQ ID NO: 10236 - DNA, 26 bp, Artificial sequence
  SiRNA target sequence
gaatattcatcttattttaaatctta

SEQ ID NO: 10237 - DNA, 26 bp, Artificial sequence
  SiRNA target sequence
aatattcatcttattttaaatcttat

SEQ ID NO: 10238 - DNA, 26 bp, Artificial sequence
  SiRNA target sequence
atattcatcttattttaaatcttatt

SEQ ID NO: 10239 - DNA, 26 bp, Artificial sequence
  SiRNA target sequence
tattcatcttattttaaatcttattt

SEQ ID NO: 10240 - DNA, 26 bp, Artificial sequence
  SiRNA target sequence
attcatcttattttaaatcttatttg

SEQ ID NO: 10241 - DNA, 26 bp, Artificial sequence
  SiRNA target sequence
ttcatcttattttaaatcttatttgt

SEQ ID NO: 10242 - DNA, 26 bp, Artificial sequence
  SiRNA target sequence
tcatcttattttaaatcttatttgta

SEQ ID NO: 10243 - DNA, 26 bp, Artificial sequence
  SiRNA target sequence
catcttattttaaatcttatttgtat

SEQ ID NO: 10244 - DNA, 26 bp, Artificial sequence
  SiRNA target sequence
atcttattttaaatcttatttgtatt

SEQ ID NO: 10245 - DNA, 26 bp, Artificial sequence
  SiRNA target sequence
tcttattttaaatcttatttgtattt

SEQ ID NO: 10246 - DNA, 26 bp, Artificial sequence
  SiRNA target sequence
cttattttaaatcttatttgtattta

SEQ ID NO: 10247 - DNA, 26 bp, Artificial sequence
  SiRNA target sequence
ttattttaaatcttatttgtatttag

SEQ ID NO: 10248 - DNA, 26 bp, Artificial sequence
  SiRNA target sequence
tattttaaatcttatttgtatttagg

SEQ ID NO: 10249 - DNA, 26 bp, Artificial sequence
  SiRNA target sequence
attttaaatcttatttgtatttagga

SEQ ID NO: 10250 - DNA, 26 bp, Artificial sequence
  SiRNA target sequence
ttttaaatcttatttgtatttaggaa

SEQ ID NO: 10251 - DNA, 26 bp, Artificial sequence
  SiRNA target sequence
tttaaatcttatttgtatttaggaaa

SEQ ID NO: 10252 - DNA, 26 bp, Artificial sequence
  SiRNA target sequence
ttaaatcttatttgtatttaggaaat

SEQ ID NO: 10253 - DNA, 26 bp, Artificial sequence
  SiRNA target sequence
taaatcttatttgtatttaggaaata

SEQ ID NO: 10254 - DNA, 26 bp, Artificial sequence
  SiRNA target sequence
aaatcttatttgtatttaggaaatat

SEQ ID NO: 10255 - DNA, 26 bp, Artificial sequence
  SiRNA target sequence
aatcttatttgtatttaggaaatatt

SEQ ID NO: 10256 - DNA, 26 bp, Artificial sequence
  SiRNA target sequence
atcttatttgtatttaggaaatattt

SEQ ID NO: 10257 - DNA, 26 bp, Artificial sequence
  SiRNA target sequence
tcttatttgtatttaggaaatatttt

SEQ ID NO: 10258 - DNA, 26 bp, Artificial sequence
  SiRNA target sequence
cttatttgtatttaggaaatatttta

SEQ ID NO: 10259 - DNA, 26 bp, Artificial sequence
  SiRNA target sequence
ttatttgtatttaggaaatattttaa

SEQ ID NO: 10260 - DNA, 26 bp, Artificial sequence
  SiRNA target sequence
tatttgtatttaggaaatattttaat

SEQ ID NO: 10261 - DNA, 26 bp, Artificial sequence
  SiRNA target sequence
atttgtatttaggaaatattttaata

SEQ ID NO: 10262 - DNA, 26 bp, Artificial sequence
  SiRNA target sequence
tttgtatttaggaaatattttaataa

SEQ ID NO: 10263 - DNA, 26 bp, Artificial sequence
  SiRNA target sequence
ttgtatttaggaaatattttaataaa

SEQ ID NO: 10264 - DNA, 26 bp, Artificial sequence
  SiRNA target sequence
tgtatttaggaaatattttaataaat

SEQ ID NO: 10265 - DNA, 26 bp, Artificial sequence
  SiRNA target sequence
gtatttaggaaatattttaataaatg

SEQ ID NO: 10266 - DNA, 26 bp, Artificial sequence
  SiRNA target sequence
tatttaggaaatattttaataaatga

SEQ ID NO: 10267 - DNA, 26 bp, Artificial sequence
  SiRNA target sequence
atttaggaaatattttaataaatgat

SEQ ID NO: 10268 - DNA, 26 bp, Artificial sequence
  SiRNA target sequence
tttaggaaatattttaataaatgatg

SEQ ID NO: 10269 - DNA, 26 bp, Artificial sequence
  SiRNA target sequence
ttaggaaatattttaataaatgatga

SEQ ID NO: 10270 - DNA, 26 bp, Artificial sequence
  SiRNA target sequence
taggaaatattttaataaatgatgac

SEQ ID NO: 10271 - DNA, 26 bp, Artificial sequence
  SiRNA target sequence
aggaaatattttaataaatgatgact

SEQ ID NO: 10272 - DNA, 26 bp, Artificial sequence
  SiRNA target sequence
ggaaatattttaataaatgatgactt

SEQ ID NO: 10273 - DNA, 26 bp, Artificial sequence
  SiRNA target sequence
gaaatattttaataaatgatgactta

SEQ ID NO: 10274 - DNA, 26 bp, Artificial sequence
  SiRNA target sequence
aaatattttaataaatgatgacttaa

SEQ ID NO: 10275 - DNA, 26 bp, Artificial sequence
  SiRNA target sequence
aatattttaataaatgatgacttaaa

SEQ ID NO: 10276 - DNA, 26 bp, Artificial sequence
  SiRNA target sequence
atattttaataaatgatgacttaaat

SEQ ID NO: 10277 - DNA, 26 bp, Artificial sequence
  SiRNA target sequence
tattttaataaatgatgacttaaatg

SEQ ID NO: 10278 - DNA, 26 bp, Artificial sequence
  SiRNA target sequence
attttaataaatgatgacttaaatga

SEQ ID NO: 10279 - DNA, 26 bp, Artificial sequence
  SiRNA target sequence
ttttaataaatgatgacttaaatgaa

SEQ ID NO: 10280 - DNA, 26 bp, Artificial sequence
  SiRNA target sequence
tttaataaatgatgacttaaatgaat

SEQ ID NO: 10281 - DNA, 26 bp, Artificial sequence
  SiRNA target sequence
ttaataaatgatgacttaaatgaatg

SEQ ID NO: 10282 - DNA, 26 bp, Artificial sequence
  SiRNA target sequence
taataaatgatgacttaaatgaatgc

SEQ ID NO: 10283 - DNA, 26 bp, Artificial sequence
  SiRNA target sequence
aataaatgatgacttaaatgaatgca

SEQ ID NO: 10284 - DNA, 26 bp, Artificial sequence
  SiRNA target sequence
ataaatgatgacttaaatgaatgcag

SEQ ID NO: 10285 - DNA, 26 bp, Artificial sequence
  SiRNA target sequence
taaatgatgacttaaatgaatgcagg

SEQ ID NO: 10286 - DNA, 26 bp, Artificial sequence
  SiRNA target sequence
aaatgatgacttaaatgaatgcagga

SEQ ID NO: 10287 - DNA, 26 bp, Artificial sequence
  SiRNA target sequence
aatgatgacttaaatgaatgcaggaa

SEQ ID NO: 10288 - DNA, 26 bp, Artificial sequence
  SiRNA target sequence
atgatgacttaaatgaatgcaggaaa

SEQ ID NO: 10289 - DNA, 26 bp, Artificial sequence
  SiRNA target sequence
tgatgacttaaatgaatgcaggaaat

SEQ ID NO: 10290 - DNA, 26 bp, Artificial sequence
  SiRNA target sequence
gatgacttaaatgaatgcaggaaatt

SEQ ID NO: 10291 - DNA, 26 bp, Artificial sequence
  SiRNA target sequence
atgacttaaatgaatgcaggaaattg

SEQ ID NO: 10292 - DNA, 26 bp, Artificial sequence
  SiRNA target sequence
tgacttaaatgaatgcaggaaattgt

SEQ ID NO: 10293 - DNA, 26 bp, Artificial sequence
  SiRNA target sequence
gacttaaatgaatgcaggaaattgtt

SEQ ID NO: 10294 - DNA, 26 bp, Artificial sequence
  SiRNA target sequence
acttaaatgaatgcaggaaattgttt

SEQ ID NO: 10295 - DNA, 26 bp, Artificial sequence
  SiRNA target sequence
cttaaatgaatgcaggaaattgttta

SEQ ID NO: 10296 - DNA, 26 bp, Artificial sequence
  SiRNA target sequence
ttaaatgaatgcaggaaattgtttaa

SEQ ID NO: 10297 - DNA, 26 bp, Artificial sequence
  SiRNA target sequence
taaatgaatgcaggaaattgtttaat

SEQ ID NO: 10298 - DNA, 26 bp, Artificial sequence
  SiRNA target sequence
aaatgaatgcaggaaattgtttaata

SEQ ID NO: 10299 - DNA, 26 bp, Artificial sequence
  SiRNA target sequence
aatgaatgcaggaaattgtttaatac

SEQ ID NO: 10300 - DNA, 26 bp, Artificial sequence
  SiRNA target sequence
atgaatgcaggaaattgtttaataca

SEQ ID NO: 10301 - DNA, 26 bp, Artificial sequence
  SiRNA target sequence
tgaatgcaggaaattgtttaatacat

SEQ ID NO: 10302 - DNA, 26 bp, Artificial sequence
  SiRNA target sequence
gaatgcaggaaattgtttaatacatc

SEQ ID NO: 10303 - DNA, 26 bp, Artificial sequence
  SiRNA target sequence
aatgcaggaaattgtttaatacatca

SEQ ID NO: 10304 - DNA, 26 bp, Artificial sequence
  SiRNA target sequence
atgcaggaaattgtttaatacatcac

SEQ ID NO: 10305 - DNA, 26 bp, Artificial sequence
  SiRNA target sequence
tgcaggaaattgtttaatacatcact

SEQ ID NO: 10306 - DNA, 26 bp, Artificial sequence
  SiRNA target sequence
gcaggaaattgtttaatacatcactt

SEQ ID NO: 10307 - DNA, 26 bp, Artificial sequence
  SiRNA target sequence
caggaaattgtttaatacatcacttc

SEQ ID NO: 10308 - DNA, 26 bp, Artificial sequence
  SiRNA target sequence
aggaaattgtttaatacatcacttca

SEQ ID NO: 10309 - DNA, 26 bp, Artificial sequence
  SiRNA target sequence
ggaaattgtttaatacatcacttcaa

SEQ ID NO: 10310 - DNA, 26 bp, Artificial sequence
  SiRNA target sequence
gaaattgtttaatacatcacttcaat

SEQ ID NO: 10311 - DNA, 26 bp, Artificial sequence
  SiRNA target sequence
aaattgtttaatacatcacttcaata

SEQ ID NO: 10312 - DNA, 26 bp, Artificial sequence
  SiRNA target sequence
aattgtttaatacatcacttcaatat

SEQ ID NO: 10313 - DNA, 26 bp, Artificial sequence
  SiRNA target sequence
attgtttaatacatcacttcaatatt

SEQ ID NO: 10314 - DNA, 26 bp, Artificial sequence
  SiRNA target sequence
ttgtttaatacatcacttcaatattg

SEQ ID NO: 10315 - DNA, 26 bp, Artificial sequence
  SiRNA target sequence
tgtttaatacatcacttcaatattgt

SEQ ID NO: 10316 - DNA, 26 bp, Artificial sequence
  SiRNA target sequence
gtttaatacatcacttcaatattgtt

SEQ ID NO: 10317 - DNA, 26 bp, Artificial sequence
  SiRNA target sequence
tttaatacatcacttcaatattgttg

SEQ ID NO: 10318 - DNA, 26 bp, Artificial sequence
  SiRNA target sequence
ttaatacatcacttcaatattgttgt

SEQ ID NO: 10319 - DNA, 26 bp, Artificial sequence
  SiRNA target sequence
taatacatcacttcaatattgttgta

SEQ ID NO: 10320 - DNA, 26 bp, Artificial sequence
  SiRNA target sequence
aatacatcacttcaatattgttgtaa

SEQ ID NO: 10321 - DNA, 26 bp, Artificial sequence
  SiRNA target sequence
atacatcacttcaatattgttgtaat

SEQ ID NO: 10322 - DNA, 26 bp, Artificial sequence
  SiRNA target sequence
tacatcacttcaatattgttgtaatt

SEQ ID NO: 10323 - DNA, 26 bp, Artificial sequence
  SiRNA target sequence
acatcacttcaatattgttgtaattc

SEQ ID NO: 10324 - DNA, 26 bp, Artificial sequence
  SiRNA target sequence
catcacttcaatattgttgtaattct

SEQ ID NO: 10325 - DNA, 26 bp, Artificial sequence
  SiRNA target sequence
atcacttcaatattgttgtaattctg

SEQ ID NO: 10326 - DNA, 26 bp, Artificial sequence
  SiRNA target sequence
tcacttcaatattgttgtaattctga

SEQ ID NO: 10327 - DNA, 26 bp, Artificial sequence
  SiRNA target sequence
cacttcaatattgttgtaattctgat

SEQ ID NO: 10328 - DNA, 26 bp, Artificial sequence
  SiRNA target sequence
acttcaatattgttgtaattctgatg

SEQ ID NO: 10329 - DNA, 26 bp, Artificial sequence
  SiRNA target sequence
cttcaatattgttgtaattctgatga

SEQ ID NO: 10330 - DNA, 26 bp, Artificial sequence
  SiRNA target sequence
ttcaatattgttgtaattctgatgag

SEQ ID NO: 10331 - DNA, 26 bp, Artificial sequence
  SiRNA target sequence
tcaatattgttgtaattctgatgagg

SEQ ID NO: 10332 - DNA, 26 bp, Artificial sequence
  SiRNA target sequence
caatattgttgtaattctgatgaggt

SEQ ID NO: 10333 - DNA, 26 bp, Artificial sequence
  SiRNA target sequence
aatattgttgtaattctgatgaggtt

SEQ ID NO: 10334 - DNA, 26 bp, Artificial sequence
  SiRNA target sequence
atattgttgtaattctgatgaggttt

SEQ ID NO: 10335 - DNA, 26 bp, Artificial sequence
  SiRNA target sequence
tattgttgtaattctgatgaggtttt

SEQ ID NO: 10336 - DNA, 26 bp, Artificial sequence
  SiRNA target sequence
attgttgtaattctgatgaggttttt

SEQ ID NO: 10337 - DNA, 26 bp, Artificial sequence
  SiRNA target sequence
ttgttgtaattctgatgaggttttta

SEQ ID NO: 10338 - DNA, 26 bp, Artificial sequence
  SiRNA target sequence
tgttgtaattctgatgaggtttttat

SEQ ID NO: 10339 - DNA, 26 bp, Artificial sequence
  SiRNA target sequence
gttgtaattctgatgaggtttttatt

SEQ ID NO: 10340 - DNA, 26 bp, Artificial sequence
  SiRNA target sequence
ttgtaattctgatgaggtttttattg

SEQ ID NO: 10341 - DNA, 26 bp, Artificial sequence
  SiRNA target sequence
tgtaattctgatgaggtttttattgt

SEQ ID NO: 10342 - DNA, 26 bp, Artificial sequence
  SiRNA target sequence
gtaattctgatgaggtttttattgtt

SEQ ID NO: 10343 - DNA, 26 bp, Artificial sequence
  SiRNA target sequence
taattctgatgaggtttttattgtta

SEQ ID NO: 10344 - DNA, 26 bp, Artificial sequence
  SiRNA target sequence
aattctgatgaggtttttattgttaa

SEQ ID NO: 10345 - DNA, 26 bp, Artificial sequence
  SiRNA target sequence
attctgatgaggtttttattgttaag

SEQ ID NO: 10346 - DNA, 26 bp, Artificial sequence
  SiRNA target sequence
ttctgatgaggtttttattgttaagc

SEQ ID NO: 10347 - DNA, 26 bp, Artificial sequence
  SiRNA target sequence
tctgatgaggtttttattgttaagca

SEQ ID NO: 10348 - DNA, 26 bp, Artificial sequence
  SiRNA target sequence
ctgatgaggtttttattgttaagcag

SEQ ID NO: 10349 - DNA, 26 bp, Artificial sequence
  SiRNA target sequence
tgatgaggtttttattgttaagcagt

SEQ ID NO: 10350 - DNA, 26 bp, Artificial sequence
  SiRNA target sequence
gatgaggtttttattgttaagcagtc

SEQ ID NO: 10351 - DNA, 26 bp, Artificial sequence
  SiRNA target sequence
atgaggtttttattgttaagcagtca

SEQ ID NO: 10352 - DNA, 26 bp, Artificial sequence
  SiRNA target sequence
tgaggtttttattgttaagcagtcac

SEQ ID NO: 10353 - DNA, 26 bp, Artificial sequence
  SiRNA target sequence
gaggtttttattgttaagcagtcact

SEQ ID NO: 10354 - DNA, 26 bp, Artificial sequence
  SiRNA target sequence
aggtttttattgttaagcagtcactt

SEQ ID NO: 10355 - DNA, 26 bp, Artificial sequence
  SiRNA target sequence
ggtttttattgttaagcagtcactta

SEQ ID NO: 10356 - DNA, 26 bp, Artificial sequence
  SiRNA target sequence
gtttttattgttaagcagtcacttat

SEQ ID NO: 10357 - DNA, 26 bp, Artificial sequence
  SiRNA target sequence
tttttattgttaagcagtcacttatt

SEQ ID NO: 10358 - DNA, 26 bp, Artificial sequence
  SiRNA target sequence
ttttattgttaagcagtcacttattt

SEQ ID NO: 10359 - DNA, 26 bp, Artificial sequence
  SiRNA target sequence
tttattgttaagcagtcacttatttt

SEQ ID NO: 10360 - DNA, 26 bp, Artificial sequence
  SiRNA target sequence
ttattgttaagcagtcacttatttta

SEQ ID NO: 10361 - DNA, 26 bp, Artificial sequence
  SiRNA target sequence
tattgttaagcagtcacttattttaa

SEQ ID NO: 10362 - DNA, 26 bp, Artificial sequence
  SiRNA target sequence
attgttaagcagtcacttattttaat

SEQ ID NO: 10363 - DNA, 26 bp, Artificial sequence
  SiRNA target sequence
ttgttaagcagtcacttattttaata

SEQ ID NO: 10364 - DNA, 26 bp, Artificial sequence
  SiRNA target sequence
tgttaagcagtcacttattttaatag

SEQ ID NO: 10365 - DNA, 26 bp, Artificial sequence
  SiRNA target sequence
gttaagcagtcacttattttaataga

SEQ ID NO: 10366 - DNA, 26 bp, Artificial sequence
  SiRNA target sequence
ttaagcagtcacttattttaatagaa

SEQ ID NO: 10367 - DNA, 26 bp, Artificial sequence
  SiRNA target sequence
taagcagtcacttattttaatagaag

SEQ ID NO: 10368 - DNA, 26 bp, Artificial sequence
  SiRNA target sequence
aagcagtcacttattttaatagaagt

SEQ ID NO: 10369 - DNA, 26 bp, Artificial sequence
  SiRNA target sequence
agcagtcacttattttaatagaagta

SEQ ID NO: 10370 - DNA, 26 bp, Artificial sequence
  SiRNA target sequence
gcagtcacttattttaatagaagtac

SEQ ID NO: 10371 - DNA, 26 bp, Artificial sequence
  SiRNA target sequence
cagtcacttattttaatagaagtaca

SEQ ID NO: 10372 - DNA, 26 bp, Artificial sequence
  SiRNA target sequence
agtcacttattttaatagaagtacat

SEQ ID NO: 10373 - DNA, 26 bp, Artificial sequence
  SiRNA target sequence
gtcacttattttaatagaagtacatg

SEQ ID NO: 10374 - DNA, 26 bp, Artificial sequence
  SiRNA target sequence
tcacttattttaatagaagtacatga

SEQ ID NO: 10375 - DNA, 26 bp, Artificial sequence
  SiRNA target sequence
cacttattttaatagaagtacatgaa

SEQ ID NO: 10376 - DNA, 26 bp, Artificial sequence
  SiRNA target sequence
acttattttaatagaagtacatgaat

SEQ ID NO: 10377 - DNA, 26 bp, Artificial sequence
  SiRNA target sequence
cttattttaatagaagtacatgaata

SEQ ID NO: 10378 - DNA, 26 bp, Artificial sequence
  SiRNA target sequence
ttattttaatagaagtacatgaatac

SEQ ID NO: 10379 - DNA, 26 bp, Artificial sequence
  SiRNA target sequence
tattttaatagaagtacatgaataca

SEQ ID NO: 10380 - DNA, 26 bp, Artificial sequence
  SiRNA target sequence
attttaatagaagtacatgaatacat

SEQ ID NO: 10381 - DNA, 26 bp, Artificial sequence
  SiRNA target sequence
ttttaatagaagtacatgaatacatc

SEQ ID NO: 10382 - DNA, 26 bp, Artificial sequence
  SiRNA target sequence
tttaatagaagtacatgaatacatca

SEQ ID NO: 10383 - DNA, 26 bp, Artificial sequence
  SiRNA target sequence
ttaatagaagtacatgaatacatcaa

SEQ ID NO: 10384 - DNA, 26 bp, Artificial sequence
  SiRNA target sequence
taatagaagtacatgaatacatcaaa

SEQ ID NO: 10385 - DNA, 26 bp, Artificial sequence
  SiRNA target sequence
aatagaagtacatgaatacatcaaag

SEQ ID NO: 10386 - DNA, 26 bp, Artificial sequence
  SiRNA target sequence
atagaagtacatgaatacatcaaaga

SEQ ID NO: 10387 - DNA, 26 bp, Artificial sequence
  SiRNA target sequence
tagaagtacatgaatacatcaaagaa

SEQ ID NO: 10388 - DNA, 26 bp, Artificial sequence
  SiRNA target sequence
agaagtacatgaatacatcaaagaaa

SEQ ID NO: 10389 - DNA, 26 bp, Artificial sequence
  SiRNA target sequence
gaagtacatgaatacatcaaagaaaa

SEQ ID NO: 10390 - DNA, 26 bp, Artificial sequence
  SiRNA target sequence
aagtacatgaatacatcaaagaaaat

SEQ ID NO: 10391 - DNA, 26 bp, Artificial sequence
  SiRNA target sequence
agtacatgaatacatcaaagaaaata

SEQ ID NO: 10392 - DNA, 26 bp, Artificial sequence
  SiRNA target sequence
gtacatgaatacatcaaagaaaataa

SEQ ID NO: 10393 - DNA, 26 bp, Artificial sequence
  SiRNA target sequence
tacatgaatacatcaaagaaaataaa

SEQ ID NO: 10394 - DNA, 26 bp, Artificial sequence
  SiRNA target sequence
acatgaatacatcaaagaaaataaaa

SEQ ID NO: 10395 - DNA, 26 bp, Artificial sequence
  SiRNA target sequence
catgaatacatcaaagaaaataaaat

SEQ ID NO: 10396 - DNA, 26 bp, Artificial sequence
  SiRNA target sequence
atgaatacatcaaagaaaataaaata

SEQ ID NO: 10397 - DNA, 26 bp, Artificial sequence
  SiRNA target sequence
tgaatacatcaaagaaaataaaatat

SEQ ID NO: 10398 - DNA, 26 bp, Artificial sequence
  SiRNA target sequence
gaatacatcaaagaaaataaaatata

SEQ ID NO: 10399 - DNA, 26 bp, Artificial sequence
  SiRNA target sequence
aatacatcaaagaaaataaaatataa

SEQ ID NO: 10400 - DNA, 27 bp, Artificial sequence
  SiRNA target sequence
atgaaacgaaaaacagaaatatttatt

SEQ ID NO: 10401 - DNA, 27 bp, Artificial sequence
  SiRNA target sequence
tgaaacgaaaaacagaaatatttattg

SEQ ID NO: 10402 - DNA, 27 bp, Artificial sequence
  SiRNA target sequence
gaaacgaaaaacagaaatatttattgc

SEQ ID NO: 10403 - DNA, 27 bp, Artificial sequence
  SiRNA target sequence
aaacgaaaaacagaaatatttattgct

SEQ ID NO: 10404 - DNA, 27 bp, Artificial sequence
  SiRNA target sequence
aacgaaaaacagaaatatttattgcta

SEQ ID NO: 10405 - DNA, 27 bp, Artificial sequence
  SiRNA target sequence
acgaaaaacagaaatatttattgctat

SEQ ID NO: 10406 - DNA, 27 bp, Artificial sequence
  SiRNA target sequence
cgaaaaacagaaatatttattgctatt

SEQ ID NO: 10407 - DNA, 27 bp, Artificial sequence
  SiRNA target sequence
gaaaaacagaaatatttattgctatta

SEQ ID NO: 10408 - DNA, 27 bp, Artificial sequence
  SiRNA target sequence
aaaaacagaaatatttattgctattac

SEQ ID NO: 10409 - DNA, 27 bp, Artificial sequence
  SiRNA target sequence
aaaacagaaatatttattgctattaca

SEQ ID NO: 10410 - DNA, 27 bp, Artificial sequence
  SiRNA target sequence
aaacagaaatatttattgctattacag

SEQ ID NO: 10411 - DNA, 27 bp, Artificial sequence
  SiRNA target sequence
aacagaaatatttattgctattacagt

SEQ ID NO: 10412 - DNA, 27 bp, Artificial sequence
  SiRNA target sequence
acagaaatatttattgctattacagta

SEQ ID NO: 10413 - DNA, 27 bp, Artificial sequence
  SiRNA target sequence
cagaaatatttattgctattacagtag

SEQ ID NO: 10414 - DNA, 27 bp, Artificial sequence
  SiRNA target sequence
agaaatatttattgctattacagtagt

SEQ ID NO: 10415 - DNA, 27 bp, Artificial sequence
  SiRNA target sequence
gaaatatttattgctattacagtagtc

SEQ ID NO: 10416 - DNA, 27 bp, Artificial sequence
  SiRNA target sequence
aaatatttattgctattacagtagtca

SEQ ID NO: 10417 - DNA, 27 bp, Artificial sequence
  SiRNA target sequence
aatatttattgctattacagtagtcac

SEQ ID NO: 10418 - DNA, 27 bp, Artificial sequence
  SiRNA target sequence
atatttattgctattacagtagtcact

SEQ ID NO: 10419 - DNA, 27 bp, Artificial sequence
  SiRNA target sequence
tatttattgctattacagtagtcactg

SEQ ID NO: 10420 - DNA, 27 bp, Artificial sequence
  SiRNA target sequence
atttattgctattacagtagtcactgc

SEQ ID NO: 10421 - DNA, 27 bp, Artificial sequence
  SiRNA target sequence
tttattgctattacagtagtcactgca

SEQ ID NO: 10422 - DNA, 27 bp, Artificial sequence
  SiRNA target sequence
ttattgctattacagtagtcactgcag

SEQ ID NO: 10423 - DNA, 27 bp, Artificial sequence
  SiRNA target sequence
tattgctattacagtagtcactgcagt

SEQ ID NO: 10424 - DNA, 27 bp, Artificial sequence
  SiRNA target sequence
attgctattacagtagtcactgcagtg

SEQ ID NO: 10425 - DNA, 27 bp, Artificial sequence
  SiRNA target sequence
ttgctattacagtagtcactgcagtga

SEQ ID NO: 10426 - DNA, 27 bp, Artificial sequence
  SiRNA target sequence
tgctattacagtagtcactgcagtgac

SEQ ID NO: 10427 - DNA, 27 bp, Artificial sequence
  SiRNA target sequence
gctattacagtagtcactgcagtgaca

SEQ ID NO: 10428 - DNA, 27 bp, Artificial sequence
  SiRNA target sequence
ctattacagtagtcactgcagtgacat

SEQ ID NO: 10429 - DNA, 27 bp, Artificial sequence
  SiRNA target sequence
tattacagtagtcactgcagtgacatg

SEQ ID NO: 10430 - DNA, 27 bp, Artificial sequence
  SiRNA target sequence
attacagtagtcactgcagtgacatgt

SEQ ID NO: 10431 - DNA, 27 bp, Artificial sequence
  SiRNA target sequence
ttacagtagtcactgcagtgacatgtt

SEQ ID NO: 10432 - DNA, 27 bp, Artificial sequence
  SiRNA target sequence
tacagtagtcactgcagtgacatgtta

SEQ ID NO: 10433 - DNA, 27 bp, Artificial sequence
  SiRNA target sequence
acagtagtcactgcagtgacatgttac

SEQ ID NO: 10434 - DNA, 27 bp, Artificial sequence
  SiRNA target sequence
cagtagtcactgcagtgacatgttact

SEQ ID NO: 10435 - DNA, 27 bp, Artificial sequence
  SiRNA target sequence
agtagtcactgcagtgacatgttactt

SEQ ID NO: 10436 - DNA, 27 bp, Artificial sequence
  SiRNA target sequence
gtagtcactgcagtgacatgttactta

SEQ ID NO: 10437 - DNA, 27 bp, Artificial sequence
  SiRNA target sequence
tagtcactgcagtgacatgttacttat

SEQ ID NO: 10438 - DNA, 27 bp, Artificial sequence
  SiRNA target sequence
agtcactgcagtgacatgttacttatt

SEQ ID NO: 10439 - DNA, 27 bp, Artificial sequence
  SiRNA target sequence
gtcactgcagtgacatgttacttattt

SEQ ID NO: 10440 - DNA, 27 bp, Artificial sequence
  SiRNA target sequence
tcactgcagtgacatgttacttattta

SEQ ID NO: 10441 - DNA, 27 bp, Artificial sequence
  SiRNA target sequence
cactgcagtgacatgttacttatttaa

SEQ ID NO: 10442 - DNA, 27 bp, Artificial sequence
  SiRNA target sequence
actgcagtgacatgttacttatttaaa

SEQ ID NO: 10443 - DNA, 27 bp, Artificial sequence
  SiRNA target sequence
ctgcagtgacatgttacttatttaaaa

SEQ ID NO: 10444 - DNA, 27 bp, Artificial sequence
  SiRNA target sequence
tgcagtgacatgttacttatttaaaaa

SEQ ID NO: 10445 - DNA, 27 bp, Artificial sequence
  SiRNA target sequence
gcagtgacatgttacttatttaaaaaa

SEQ ID NO: 10446 - DNA, 27 bp, Artificial sequence
  SiRNA target sequence
cagtgacatgttacttatttaaaaaaa

SEQ ID NO: 10447 - DNA, 27 bp, Artificial sequence
  SiRNA target sequence
agtgacatgttacttatttaaaaaaat

SEQ ID NO: 10448 - DNA, 27 bp, Artificial sequence
  SiRNA target sequence
gtgacatgttacttatttaaaaaaata

SEQ ID NO: 10449 - DNA, 27 bp, Artificial sequence
  SiRNA target sequence
tgacatgttacttatttaaaaaaataa

SEQ ID NO: 10450 - DNA, 27 bp, Artificial sequence
  SiRNA target sequence
gacatgttacttatttaaaaaaataat

SEQ ID NO: 10451 - DNA, 27 bp, Artificial sequence
  SiRNA target sequence
acatgttacttatttaaaaaaataata

SEQ ID NO: 10452 - DNA, 27 bp, Artificial sequence
  SiRNA target sequence
catgttacttatttaaaaaaataataa

SEQ ID NO: 10453 - DNA, 27 bp, Artificial sequence
  SiRNA target sequence
atgttacttatttaaaaaaataataaa

SEQ ID NO: 10454 - DNA, 27 bp, Artificial sequence
  SiRNA target sequence
tgttacttatttaaaaaaataataaat

SEQ ID NO: 10455 - DNA, 27 bp, Artificial sequence
  SiRNA target sequence
gttacttatttaaaaaaataataaata

SEQ ID NO: 10456 - DNA, 27 bp, Artificial sequence
  SiRNA target sequence
ttacttatttaaaaaaataataaatag

SEQ ID NO: 10457 - DNA, 27 bp, Artificial sequence
  SiRNA target sequence
tacttatttaaaaaaataataaataga

SEQ ID NO: 10458 - DNA, 27 bp, Artificial sequence
  SiRNA target sequence
acttatttaaaaaaataataaatagac

SEQ ID NO: 10459 - DNA, 27 bp, Artificial sequence
  SiRNA target sequence
cttatttaaaaaaataataaatagaca

SEQ ID NO: 10460 - DNA, 27 bp, Artificial sequence
  SiRNA target sequence
ttatttaaaaaaataataaatagacaa

SEQ ID NO: 10461 - DNA, 27 bp, Artificial sequence
  SiRNA target sequence
tatttaaaaaaataataaatagacaaa

SEQ ID NO: 10462 - DNA, 27 bp, Artificial sequence
  SiRNA target sequence
atttaaaaaaataataaatagacaaaa

SEQ ID NO: 10463 - DNA, 27 bp, Artificial sequence
  SiRNA target sequence
tttaaaaaaataataaatagacaaaag

SEQ ID NO: 10464 - DNA, 27 bp, Artificial sequence
  SiRNA target sequence
ttaaaaaaataataaatagacaaaagt

SEQ ID NO: 10465 - DNA, 27 bp, Artificial sequence
  SiRNA target sequence
taaaaaaataataaatagacaaaagtc

SEQ ID NO: 10466 - DNA, 27 bp, Artificial sequence
  SiRNA target sequence
aaaaaaataataaatagacaaaagtct

SEQ ID NO: 10467 - DNA, 27 bp, Artificial sequence
  SiRNA target sequence
aaaaaataataaatagacaaaagtctg

SEQ ID NO: 10468 - DNA, 27 bp, Artificial sequence
  SiRNA target sequence
aaaaataataaatagacaaaagtctga

SEQ ID NO: 10469 - DNA, 27 bp, Artificial sequence
  SiRNA target sequence
aaaataataaatagacaaaagtctgat

SEQ ID NO: 10470 - DNA, 27 bp, Artificial sequence
  SiRNA target sequence
aaataataaatagacaaaagtctgatt

SEQ ID NO: 10471 - DNA, 27 bp, Artificial sequence
  SiRNA target sequence
aataataaatagacaaaagtctgatta

SEQ ID NO: 10472 - DNA, 27 bp, Artificial sequence
  SiRNA target sequence
ataataaatagacaaaagtctgattat

SEQ ID NO: 10473 - DNA, 27 bp, Artificial sequence
  SiRNA target sequence
taataaatagacaaaagtctgattata

SEQ ID NO: 10474 - DNA, 27 bp, Artificial sequence
  SiRNA target sequence
aataaatagacaaaagtctgattatac

SEQ ID NO: 10475 - DNA, 27 bp, Artificial sequence
  SiRNA target sequence
ataaatagacaaaagtctgattataca

SEQ ID NO: 10476 - DNA, 27 bp, Artificial sequence
  SiRNA target sequence
taaatagacaaaagtctgattatacat

SEQ ID NO: 10477 - DNA, 27 bp, Artificial sequence
  SiRNA target sequence
aaatagacaaaagtctgattatacatc

SEQ ID NO: 10478 - DNA, 27 bp, Artificial sequence
  SiRNA target sequence
aatagacaaaagtctgattatacatca

SEQ ID NO: 10479 - DNA, 27 bp, Artificial sequence
  SiRNA target sequence
atagacaaaagtctgattatacatcaa

SEQ ID NO: 10480 - DNA, 27 bp, Artificial sequence
  SiRNA target sequence
tagacaaaagtctgattatacatcaat

SEQ ID NO: 10481 - DNA, 27 bp, Artificial sequence
  SiRNA target sequence
agacaaaagtctgattatacatcaata

SEQ ID NO: 10482 - DNA, 27 bp, Artificial sequence
  SiRNA target sequence
gacaaaagtctgattatacatcaataa

SEQ ID NO: 10483 - DNA, 27 bp, Artificial sequence
  SiRNA target sequence
acaaaagtctgattatacatcaataaa

SEQ ID NO: 10484 - DNA, 27 bp, Artificial sequence
  SiRNA target sequence
caaaagtctgattatacatcaataaaa

SEQ ID NO: 10485 - DNA, 27 bp, Artificial sequence
  SiRNA target sequence
aaaagtctgattatacatcaataaaac

SEQ ID NO: 10486 - DNA, 27 bp, Artificial sequence
  SiRNA target sequence
aaagtctgattatacatcaataaaaca

SEQ ID NO: 10487 - DNA, 27 bp, Artificial sequence
  SiRNA target sequence
aagtctgattatacatcaataaaacag

SEQ ID NO: 10488 - DNA, 27 bp, Artificial sequence
  SiRNA target sequence
agtctgattatacatcaataaaacagg

SEQ ID NO: 10489 - DNA, 27 bp, Artificial sequence
  SiRNA target sequence
gtctgattatacatcaataaaacagga

SEQ ID NO: 10490 - DNA, 27 bp, Artificial sequence
  SiRNA target sequence
tctgattatacatcaataaaacaggaa

SEQ ID NO: 10491 - DNA, 27 bp, Artificial sequence
  SiRNA target sequence
ctgattatacatcaataaaacaggaag

SEQ ID NO: 10492 - DNA, 27 bp, Artificial sequence
  SiRNA target sequence
tgattatacatcaataaaacaggaagc

SEQ ID NO: 10493 - DNA, 27 bp, Artificial sequence
  SiRNA target sequence
gattatacatcaataaaacaggaagca

SEQ ID NO: 10494 - DNA, 27 bp, Artificial sequence
  SiRNA target sequence
attatacatcaataaaacaggaagcag

SEQ ID NO: 10495 - DNA, 27 bp, Artificial sequence
  SiRNA target sequence
ttatacatcaataaaacaggaagcaga

SEQ ID NO: 10496 - DNA, 27 bp, Artificial sequence
  SiRNA target sequence
tatacatcaataaaacaggaagcagat

SEQ ID NO: 10497 - DNA, 27 bp, Artificial sequence
  SiRNA target sequence
atacatcaataaaacaggaagcagata

SEQ ID NO: 10498 - DNA, 27 bp, Artificial sequence
  SiRNA target sequence
tacatcaataaaacaggaagcagataa

SEQ ID NO: 10499 - DNA, 27 bp, Artificial sequence
  SiRNA target sequence
acatcaataaaacaggaagcagataaa

SEQ ID NO: 10500 - DNA, 27 bp, Artificial sequence
  SiRNA target sequence
catcaataaaacaggaagcagataaat

SEQ ID NO: 10501 - DNA, 27 bp, Artificial sequence
  SiRNA target sequence
atcaataaaacaggaagcagataaata

SEQ ID NO: 10502 - DNA, 27 bp, Artificial sequence
  SiRNA target sequence
tcaataaaacaggaagcagataaatat

SEQ ID NO: 10503 - DNA, 27 bp, Artificial sequence
  SiRNA target sequence
caataaaacaggaagcagataaatatt

SEQ ID NO: 10504 - DNA, 27 bp, Artificial sequence
  SiRNA target sequence
aataaaacaggaagcagataaatattt

SEQ ID NO: 10505 - DNA, 27 bp, Artificial sequence
  SiRNA target sequence
ataaaacaggaagcagataaatatttt

SEQ ID NO: 10506 - DNA, 27 bp, Artificial sequence
  SiRNA target sequence
taaaacaggaagcagataaatatttta

SEQ ID NO: 10507 - DNA, 27 bp, Artificial sequence
  SiRNA target sequence
aaaacaggaagcagataaatattttat

SEQ ID NO: 10508 - DNA, 27 bp, Artificial sequence
  SiRNA target sequence
aaacaggaagcagataaatattttata

SEQ ID NO: 10509 - DNA, 27 bp, Artificial sequence
  SiRNA target sequence
aacaggaagcagataaatattttatac

SEQ ID NO: 10510 - DNA, 27 bp, Artificial sequence
  SiRNA target sequence
acaggaagcagataaatattttataca

SEQ ID NO: 10511 - DNA, 27 bp, Artificial sequence
  SiRNA target sequence
caggaagcagataaatattttatacaa

SEQ ID NO: 10512 - DNA, 27 bp, Artificial sequence
  SiRNA target sequence
aggaagcagataaatattttatacaag

SEQ ID NO: 10513 - DNA, 27 bp, Artificial sequence
  SiRNA target sequence
ggaagcagataaatattttatacaaga

SEQ ID NO: 10514 - DNA, 27 bp, Artificial sequence
  SiRNA target sequence
gaagcagataaatattttatacaagaa

SEQ ID NO: 10515 - DNA, 27 bp, Artificial sequence
  SiRNA target sequence
aagcagataaatattttatacaagaag

SEQ ID NO: 10516 - DNA, 27 bp, Artificial sequence
  SiRNA target sequence
agcagataaatattttatacaagaaga

SEQ ID NO: 10517 - DNA, 27 bp, Artificial sequence
  SiRNA target sequence
gcagataaatattttatacaagaagat

SEQ ID NO: 10518 - DNA, 27 bp, Artificial sequence
  SiRNA target sequence
cagataaatattttatacaagaagatt

SEQ ID NO: 10519 - DNA, 27 bp, Artificial sequence
  SiRNA target sequence
agataaatattttatacaagaagatta

SEQ ID NO: 10520 - DNA, 27 bp, Artificial sequence
  SiRNA target sequence
gataaatattttatacaagaagattat

SEQ ID NO: 10521 - DNA, 27 bp, Artificial sequence
  SiRNA target sequence
ataaatattttatacaagaagattata

SEQ ID NO: 10522 - DNA, 27 bp, Artificial sequence
  SiRNA target sequence
taaatattttatacaagaagattataa

SEQ ID NO: 10523 - DNA, 27 bp, Artificial sequence
  SiRNA target sequence
aaatattttatacaagaagattataaa

SEQ ID NO: 10524 - DNA, 27 bp, Artificial sequence
  SiRNA target sequence
aatattttatacaagaagattataaaa

SEQ ID NO: 10525 - DNA, 27 bp, Artificial sequence
  SiRNA target sequence
atattttatacaagaagattataaaaa

SEQ ID NO: 10526 - DNA, 27 bp, Artificial sequence
  SiRNA target sequence
tattttatacaagaagattataaaaat

SEQ ID NO: 10527 - DNA, 27 bp, Artificial sequence
  SiRNA target sequence
attttatacaagaagattataaaaatg

SEQ ID NO: 10528 - DNA, 27 bp, Artificial sequence
  SiRNA target sequence
ttttatacaagaagattataaaaatgc

SEQ ID NO: 10529 - DNA, 27 bp, Artificial sequence
  SiRNA target sequence
tttatacaagaagattataaaaatgct

SEQ ID NO: 10530 - DNA, 27 bp, Artificial sequence
  SiRNA target sequence
ttatacaagaagattataaaaatgcta

SEQ ID NO: 10531 - DNA, 27 bp, Artificial sequence
  SiRNA target sequence
tatacaagaagattataaaaatgctat

SEQ ID NO: 10532 - DNA, 27 bp, Artificial sequence
  SiRNA target sequence
atacaagaagattataaaaatgctatt

SEQ ID NO: 10533 - DNA, 27 bp, Artificial sequence
  SiRNA target sequence
tacaagaagattataaaaatgctattc

SEQ ID NO: 10534 - DNA, 27 bp, Artificial sequence
  SiRNA target sequence
acaagaagattataaaaatgctattct

SEQ ID NO: 10535 - DNA, 27 bp, Artificial sequence
  SiRNA target sequence
caagaagattataaaaatgctattctg

SEQ ID NO: 10536 - DNA, 27 bp, Artificial sequence
  SiRNA target sequence
aagaagattataaaaatgctattctgt

SEQ ID NO: 10537 - DNA, 27 bp, Artificial sequence
  SiRNA target sequence
agaagattataaaaatgctattctgtt

SEQ ID NO: 10538 - DNA, 27 bp, Artificial sequence
  SiRNA target sequence
gaagattataaaaatgctattctgttg

SEQ ID NO: 10539 - DNA, 27 bp, Artificial sequence
  SiRNA target sequence
aagattataaaaatgctattctgttgt

SEQ ID NO: 10540 - DNA, 27 bp, Artificial sequence
  SiRNA target sequence
agattataaaaatgctattctgttgta

SEQ ID NO: 10541 - DNA, 27 bp, Artificial sequence
  SiRNA target sequence
gattataaaaatgctattctgttgtac

SEQ ID NO: 10542 - DNA, 27 bp, Artificial sequence
  SiRNA target sequence
attataaaaatgctattctgttgtaca

SEQ ID NO: 10543 - DNA, 27 bp, Artificial sequence
  SiRNA target sequence
ttataaaaatgctattctgttgtacac

SEQ ID NO: 10544 - DNA, 27 bp, Artificial sequence
  SiRNA target sequence
tataaaaatgctattctgttgtacact

SEQ ID NO: 10545 - DNA, 27 bp, Artificial sequence
  SiRNA target sequence
ataaaaatgctattctgttgtacacta

SEQ ID NO: 10546 - DNA, 27 bp, Artificial sequence
  SiRNA target sequence
taaaaatgctattctgttgtacactaa

SEQ ID NO: 10547 - DNA, 27 bp, Artificial sequence
  SiRNA target sequence
aaaaatgctattctgttgtacactaaa

SEQ ID NO: 10548 - DNA, 27 bp, Artificial sequence
  SiRNA target sequence
aaaatgctattctgttgtacactaaat

SEQ ID NO: 10549 - DNA, 27 bp, Artificial sequence
  SiRNA target sequence
aaatgctattctgttgtacactaaatg

SEQ ID NO: 10550 - DNA, 27 bp, Artificial sequence
  SiRNA target sequence
aatgctattctgttgtacactaaatgt

SEQ ID NO: 10551 - DNA, 27 bp, Artificial sequence
  SiRNA target sequence
atgctattctgttgtacactaaatgta

SEQ ID NO: 10552 - DNA, 27 bp, Artificial sequence
  SiRNA target sequence
tgctattctgttgtacactaaatgtaa

SEQ ID NO: 10553 - DNA, 27 bp, Artificial sequence
  SiRNA target sequence
gctattctgttgtacactaaatgtaaa

SEQ ID NO: 10554 - DNA, 27 bp, Artificial sequence
  SiRNA target sequence
ctattctgttgtacactaaatgtaaat

SEQ ID NO: 10555 - DNA, 27 bp, Artificial sequence
  SiRNA target sequence
tattctgttgtacactaaatgtaaata

SEQ ID NO: 10556 - DNA, 27 bp, Artificial sequence
  SiRNA target sequence
attctgttgtacactaaatgtaaatat

SEQ ID NO: 10557 - DNA, 27 bp, Artificial sequence
  SiRNA target sequence
ttctgttgtacactaaatgtaaatata

SEQ ID NO: 10558 - DNA, 27 bp, Artificial sequence
  SiRNA target sequence
tctgttgtacactaaatgtaaatatat

SEQ ID NO: 10559 - DNA, 27 bp, Artificial sequence
  SiRNA target sequence
ctgttgtacactaaatgtaaatatatg

SEQ ID NO: 10560 - DNA, 27 bp, Artificial sequence
  SiRNA target sequence
tgttgtacactaaatgtaaatatatga

SEQ ID NO: 10561 - DNA, 27 bp, Artificial sequence
  SiRNA target sequence
gttgtacactaaatgtaaatatatgaa

SEQ ID NO: 10562 - DNA, 27 bp, Artificial sequence
  SiRNA target sequence
ttgtacactaaatgtaaatatatgaaa

SEQ ID NO: 10563 - DNA, 27 bp, Artificial sequence
  SiRNA target sequence
tgtacactaaatgtaaatatatgaaaa

SEQ ID NO: 10564 - DNA, 27 bp, Artificial sequence
  SiRNA target sequence
gtacactaaatgtaaatatatgaaaag

SEQ ID NO: 10565 - DNA, 27 bp, Artificial sequence
  SiRNA target sequence
tacactaaatgtaaatatatgaaaagt

SEQ ID NO: 10566 - DNA, 27 bp, Artificial sequence
  SiRNA target sequence
acactaaatgtaaatatatgaaaagtg

SEQ ID NO: 10567 - DNA, 27 bp, Artificial sequence
  SiRNA target sequence
cactaaatgtaaatatatgaaaagtga

SEQ ID NO: 10568 - DNA, 27 bp, Artificial sequence
  SiRNA target sequence
actaaatgtaaatatatgaaaagtgat

SEQ ID NO: 10569 - DNA, 27 bp, Artificial sequence
  SiRNA target sequence
ctaaatgtaaatatatgaaaagtgatg

SEQ ID NO: 10570 - DNA, 27 bp, Artificial sequence
  SiRNA target sequence
taaatgtaaatatatgaaaagtgatgc

SEQ ID NO: 10571 - DNA, 27 bp, Artificial sequence
  SiRNA target sequence
aaatgtaaatatatgaaaagtgatgct

SEQ ID NO: 10572 - DNA, 27 bp, Artificial sequence
  SiRNA target sequence
aatgtaaatatatgaaaagtgatgctg

SEQ ID NO: 10573 - DNA, 27 bp, Artificial sequence
  SiRNA target sequence
atgtaaatatatgaaaagtgatgctga

SEQ ID NO: 10574 - DNA, 27 bp, Artificial sequence
  SiRNA target sequence
tgtaaatatatgaaaagtgatgctgaa

SEQ ID NO: 10575 - DNA, 27 bp, Artificial sequence
  SiRNA target sequence
gtaaatatatgaaaagtgatgctgaaa

SEQ ID NO: 10576 - DNA, 27 bp, Artificial sequence
  SiRNA target sequence
taaatatatgaaaagtgatgctgaaat

SEQ ID NO: 10577 - DNA, 27 bp, Artificial sequence
  SiRNA target sequence
aaatatatgaaaagtgatgctgaaatt

SEQ ID NO: 10578 - DNA, 27 bp, Artificial sequence
  SiRNA target sequence
aatatatgaaaagtgatgctgaaattc

SEQ ID NO: 10579 - DNA, 27 bp, Artificial sequence
  SiRNA target sequence
atatatgaaaagtgatgctgaaattct

SEQ ID NO: 10580 - DNA, 27 bp, Artificial sequence
  SiRNA target sequence
tatatgaaaagtgatgctgaaattctt

SEQ ID NO: 10581 - DNA, 27 bp, Artificial sequence
  SiRNA target sequence
atatgaaaagtgatgctgaaattctta

SEQ ID NO: 10582 - DNA, 27 bp, Artificial sequence
  SiRNA target sequence
tatgaaaagtgatgctgaaattcttac

SEQ ID NO: 10583 - DNA, 27 bp, Artificial sequence
  SiRNA target sequence
atgaaaagtgatgctgaaattcttact

SEQ ID NO: 10584 - DNA, 27 bp, Artificial sequence
  SiRNA target sequence
tgaaaagtgatgctgaaattcttacta

SEQ ID NO: 10585 - DNA, 27 bp, Artificial sequence
  SiRNA target sequence
gaaaagtgatgctgaaattcttactaa

SEQ ID NO: 10586 - DNA, 27 bp, Artificial sequence
  SiRNA target sequence
aaaagtgatgctgaaattcttactaaa

SEQ ID NO: 10587 - DNA, 27 bp, Artificial sequence
  SiRNA target sequence
aaagtgatgctgaaattcttactaaaa

SEQ ID NO: 10588 - DNA, 27 bp, Artificial sequence
  SiRNA target sequence
aagtgatgctgaaattcttactaaaat

SEQ ID NO: 10589 - DNA, 27 bp, Artificial sequence
  SiRNA target sequence
agtgatgctgaaattcttactaaaatt

SEQ ID NO: 10590 - DNA, 27 bp, Artificial sequence
  SiRNA target sequence
gtgatgctgaaattcttactaaaatta

SEQ ID NO: 10591 - DNA, 27 bp, Artificial sequence
  SiRNA target sequence
tgatgctgaaattcttactaaaattag

SEQ ID NO: 10592 - DNA, 27 bp, Artificial sequence
  SiRNA target sequence
gatgctgaaattcttactaaaattagt

SEQ ID NO: 10593 - DNA, 27 bp, Artificial sequence
  SiRNA target sequence
atgctgaaattcttactaaaattagtc

SEQ ID NO: 10594 - DNA, 27 bp, Artificial sequence
  SiRNA target sequence
tgctgaaattcttactaaaattagtct

SEQ ID NO: 10595 - DNA, 27 bp, Artificial sequence
  SiRNA target sequence
gctgaaattcttactaaaattagtctc

SEQ ID NO: 10596 - DNA, 27 bp, Artificial sequence
  SiRNA target sequence
ctgaaattcttactaaaattagtctct

SEQ ID NO: 10597 - DNA, 27 bp, Artificial sequence
  SiRNA target sequence
tgaaattcttactaaaattagtctctg

SEQ ID NO: 10598 - DNA, 27 bp, Artificial sequence
  SiRNA target sequence
gaaattcttactaaaattagtctctgt

SEQ ID NO: 10599 - DNA, 27 bp, Artificial sequence
  SiRNA target sequence
aaattcttactaaaattagtctctgta

SEQ ID NO: 10600 - DNA, 27 bp, Artificial sequence
  SiRNA target sequence
aattcttactaaaattagtctctgtaa

SEQ ID NO: 10601 - DNA, 27 bp, Artificial sequence
  SiRNA target sequence
attcttactaaaattagtctctgtaat

SEQ ID NO: 10602 - DNA, 27 bp, Artificial sequence
  SiRNA target sequence
ttcttactaaaattagtctctgtaatt

SEQ ID NO: 10603 - DNA, 27 bp, Artificial sequence
  SiRNA target sequence
tcttactaaaattagtctctgtaatta

SEQ ID NO: 10604 - DNA, 27 bp, Artificial sequence
  SiRNA target sequence
cttactaaaattagtctctgtaattat

SEQ ID NO: 10605 - DNA, 27 bp, Artificial sequence
  SiRNA target sequence
ttactaaaattagtctctgtaattatt

SEQ ID NO: 10606 - DNA, 27 bp, Artificial sequence
  SiRNA target sequence
tactaaaattagtctctgtaattattt

SEQ ID NO: 10607 - DNA, 27 bp, Artificial sequence
  SiRNA target sequence
actaaaattagtctctgtaattatttc

SEQ ID NO: 10608 - DNA, 27 bp, Artificial sequence
  SiRNA target sequence
ctaaaattagtctctgtaattatttct

SEQ ID NO: 10609 - DNA, 27 bp, Artificial sequence
  SiRNA target sequence
taaaattagtctctgtaattatttctt

SEQ ID NO: 10610 - DNA, 27 bp, Artificial sequence
  SiRNA target sequence
aaaattagtctctgtaattatttctta

SEQ ID NO: 10611 - DNA, 27 bp, Artificial sequence
  SiRNA target sequence
aaattagtctctgtaattatttcttaa

SEQ ID NO: 10612 - DNA, 27 bp, Artificial sequence
  SiRNA target sequence
aattagtctctgtaattatttcttaaa

SEQ ID NO: 10613 - DNA, 27 bp, Artificial sequence
  SiRNA target sequence
attagtctctgtaattatttcttaaaa

SEQ ID NO: 10614 - DNA, 27 bp, Artificial sequence
  SiRNA target sequence
ttagtctctgtaattatttcttaaaaa

SEQ ID NO: 10615 - DNA, 27 bp, Artificial sequence
  SiRNA target sequence
tagtctctgtaattatttcttaaaaaa

SEQ ID NO: 10616 - DNA, 27 bp, Artificial sequence
  SiRNA target sequence
agtctctgtaattatttcttaaaaaat

SEQ ID NO: 10617 - DNA, 27 bp, Artificial sequence
  SiRNA target sequence
gtctctgtaattatttcttaaaaaatt

SEQ ID NO: 10618 - DNA, 27 bp, Artificial sequence
  SiRNA target sequence
tctctgtaattatttcttaaaaaatta

SEQ ID NO: 10619 - DNA, 27 bp, Artificial sequence
  SiRNA target sequence
ctctgtaattatttcttaaaaaattat

SEQ ID NO: 10620 - DNA, 27 bp, Artificial sequence
  SiRNA target sequence
tctgtaattatttcttaaaaaattatc

SEQ ID NO: 10621 - DNA, 27 bp, Artificial sequence
  SiRNA target sequence
ctgtaattatttcttaaaaaattatca

SEQ ID NO: 10622 - DNA, 27 bp, Artificial sequence
  SiRNA target sequence
tgtaattatttcttaaaaaattatcaa

SEQ ID NO: 10623 - DNA, 27 bp, Artificial sequence
  SiRNA target sequence
gtaattatttcttaaaaaattatcaag

SEQ ID NO: 10624 - DNA, 27 bp, Artificial sequence
  SiRNA target sequence
taattatttcttaaaaaattatcaaga

SEQ ID NO: 10625 - DNA, 27 bp, Artificial sequence
  SiRNA target sequence
aattatttcttaaaaaattatcaagaa

SEQ ID NO: 10626 - DNA, 27 bp, Artificial sequence
  SiRNA target sequence
attatttcttaaaaaattatcaagaag

SEQ ID NO: 10627 - DNA, 27 bp, Artificial sequence
  SiRNA target sequence
ttatttcttaaaaaattatcaagaagt

SEQ ID NO: 10628 - DNA, 27 bp, Artificial sequence
  SiRNA target sequence
tatttcttaaaaaattatcaagaagtt

SEQ ID NO: 10629 - DNA, 27 bp, Artificial sequence
  SiRNA target sequence
atttcttaaaaaattatcaagaagtta

SEQ ID NO: 10630 - DNA, 27 bp, Artificial sequence
  SiRNA target sequence
tttcttaaaaaattatcaagaagttat

SEQ ID NO: 10631 - DNA, 27 bp, Artificial sequence
  SiRNA target sequence
ttcttaaaaaattatcaagaagttata

SEQ ID NO: 10632 - DNA, 27 bp, Artificial sequence
  SiRNA target sequence
tcttaaaaaattatcaagaagttataa

SEQ ID NO: 10633 - DNA, 27 bp, Artificial sequence
  SiRNA target sequence
cttaaaaaattatcaagaagttataaa

SEQ ID NO: 10634 - DNA, 27 bp, Artificial sequence
  SiRNA target sequence
ttaaaaaattatcaagaagttataaat

SEQ ID NO: 10635 - DNA, 27 bp, Artificial sequence
  SiRNA target sequence
taaaaaattatcaagaagttataaata

SEQ ID NO: 10636 - DNA, 27 bp, Artificial sequence
  SiRNA target sequence
aaaaaattatcaagaagttataaataa

SEQ ID NO: 10637 - DNA, 27 bp, Artificial sequence
  SiRNA target sequence
aaaaattatcaagaagttataaataat

SEQ ID NO: 10638 - DNA, 27 bp, Artificial sequence
  SiRNA target sequence
aaaattatcaagaagttataaataatt

SEQ ID NO: 10639 - DNA, 27 bp, Artificial sequence
  SiRNA target sequence
aaattatcaagaagttataaataattc

SEQ ID NO: 10640 - DNA, 27 bp, Artificial sequence
  SiRNA target sequence
aattatcaagaagttataaataattct

SEQ ID NO: 10641 - DNA, 27 bp, Artificial sequence
  SiRNA target sequence
attatcaagaagttataaataattctt

SEQ ID NO: 10642 - DNA, 27 bp, Artificial sequence
  SiRNA target sequence
ttatcaagaagttataaataattcttt

SEQ ID NO: 10643 - DNA, 27 bp, Artificial sequence
  SiRNA target sequence
tatcaagaagttataaataattcttta

SEQ ID NO: 10644 - DNA, 27 bp, Artificial sequence
  SiRNA target sequence
atcaagaagttataaataattctttat

SEQ ID NO: 10645 - DNA, 27 bp, Artificial sequence
  SiRNA target sequence
tcaagaagttataaataattctttatt

SEQ ID NO: 10646 - DNA, 27 bp, Artificial sequence
  SiRNA target sequence
caagaagttataaataattctttattt

SEQ ID NO: 10647 - DNA, 27 bp, Artificial sequence
  SiRNA target sequence
aagaagttataaataattctttattta

SEQ ID NO: 10648 - DNA, 27 bp, Artificial sequence
  SiRNA target sequence
agaagttataaataattctttatttaa

SEQ ID NO: 10649 - DNA, 27 bp, Artificial sequence
  SiRNA target sequence
gaagttataaataattctttatttaag

SEQ ID NO: 10650 - DNA, 27 bp, Artificial sequence
  SiRNA target sequence
aagttataaataattctttatttaaga

SEQ ID NO: 10651 - DNA, 27 bp, Artificial sequence
  SiRNA target sequence
agttataaataattctttatttaagac

SEQ ID NO: 10652 - DNA, 27 bp, Artificial sequence
  SiRNA target sequence
gttataaataattctttatttaagaca

SEQ ID NO: 10653 - DNA, 27 bp, Artificial sequence
  SiRNA target sequence
ttataaataattctttatttaagacaa

SEQ ID NO: 10654 - DNA, 27 bp, Artificial sequence
  SiRNA target sequence
tataaataattctttatttaagacaaa

SEQ ID NO: 10655 - DNA, 27 bp, Artificial sequence
  SiRNA target sequence
ataaataattctttatttaagacaaat

SEQ ID NO: 10656 - DNA, 27 bp, Artificial sequence
  SiRNA target sequence
taaataattctttatttaagacaaata

SEQ ID NO: 10657 - DNA, 27 bp, Artificial sequence
  SiRNA target sequence
aaataattctttatttaagacaaataa

SEQ ID NO: 10658 - DNA, 27 bp, Artificial sequence
  SiRNA target sequence
aataattctttatttaagacaaataat

SEQ ID NO: 10659 - DNA, 27 bp, Artificial sequence
  SiRNA target sequence
ataattctttatttaagacaaataata

SEQ ID NO: 10660 - DNA, 27 bp, Artificial sequence
  SiRNA target sequence
taattctttatttaagacaaataataa

SEQ ID NO: 10661 - DNA, 27 bp, Artificial sequence
  SiRNA target sequence
aattctttatttaagacaaataataaa

SEQ ID NO: 10662 - DNA, 27 bp, Artificial sequence
  SiRNA target sequence
attctttatttaagacaaataataaag

SEQ ID NO: 10663 - DNA, 27 bp, Artificial sequence
  SiRNA target sequence
ttctttatttaagacaaataataaaga

SEQ ID NO: 10664 - DNA, 27 bp, Artificial sequence
  SiRNA target sequence
tctttatttaagacaaataataaagat

SEQ ID NO: 10665 - DNA, 27 bp, Artificial sequence
  SiRNA target sequence
ctttatttaagacaaataataaagatc

SEQ ID NO: 10666 - DNA, 27 bp, Artificial sequence
  SiRNA target sequence
tttatttaagacaaataataaagatct

SEQ ID NO: 10667 - DNA, 27 bp, Artificial sequence
  SiRNA target sequence
ttatttaagacaaataataaagatcta

SEQ ID NO: 10668 - DNA, 27 bp, Artificial sequence
  SiRNA target sequence
tatttaagacaaataataaagatctaa

SEQ ID NO: 10669 - DNA, 27 bp, Artificial sequence
  SiRNA target sequence
atttaagacaaataataaagatctaat

SEQ ID NO: 10670 - DNA, 27 bp, Artificial sequence
  SiRNA target sequence
tttaagacaaataataaagatctaata

SEQ ID NO: 10671 - DNA, 27 bp, Artificial sequence
  SiRNA target sequence
ttaagacaaataataaagatctaataa

SEQ ID NO: 10672 - DNA, 27 bp, Artificial sequence
  SiRNA target sequence
taagacaaataataaagatctaataaa

SEQ ID NO: 10673 - DNA, 27 bp, Artificial sequence
  SiRNA target sequence
aagacaaataataaagatctaataaaa

SEQ ID NO: 10674 - DNA, 27 bp, Artificial sequence
  SiRNA target sequence
agacaaataataaagatctaataaaaa

SEQ ID NO: 10675 - DNA, 27 bp, Artificial sequence
  SiRNA target sequence
gacaaataataaagatctaataaaaat

SEQ ID NO: 10676 - DNA, 27 bp, Artificial sequence
  SiRNA target sequence
acaaataataaagatctaataaaaata

SEQ ID NO: 10677 - DNA, 27 bp, Artificial sequence
  SiRNA target sequence
caaataataaagatctaataaaaataa

SEQ ID NO: 10678 - DNA, 27 bp, Artificial sequence
  SiRNA target sequence
aaataataaagatctaataaaaataag

SEQ ID NO: 10679 - DNA, 27 bp, Artificial sequence
  SiRNA target sequence
aataataaagatctaataaaaataaga

SEQ ID NO: 10680 - DNA, 27 bp, Artificial sequence
  SiRNA target sequence
ataataaagatctaataaaaataagat

SEQ ID NO: 10681 - DNA, 27 bp, Artificial sequence
  SiRNA target sequence
taataaagatctaataaaaataagatc

SEQ ID NO: 10682 - DNA, 27 bp, Artificial sequence
  SiRNA target sequence
aataaagatctaataaaaataagatct

SEQ ID NO: 10683 - DNA, 27 bp, Artificial sequence
  SiRNA target sequence
ataaagatctaataaaaataagatctg

SEQ ID NO: 10684 - DNA, 27 bp, Artificial sequence
  SiRNA target sequence
taaagatctaataaaaataagatctga

SEQ ID NO: 10685 - DNA, 27 bp, Artificial sequence
  SiRNA target sequence
aaagatctaataaaaataagatctgaa

SEQ ID NO: 10686 - DNA, 27 bp, Artificial sequence
  SiRNA target sequence
aagatctaataaaaataagatctgaat

SEQ ID NO: 10687 - DNA, 27 bp, Artificial sequence
  SiRNA target sequence
agatctaataaaaataagatctgaatg

SEQ ID NO: 10688 - DNA, 27 bp, Artificial sequence
  SiRNA target sequence
gatctaataaaaataagatctgaatgt

SEQ ID NO: 10689 - DNA, 27 bp, Artificial sequence
  SiRNA target sequence
atctaataaaaataagatctgaatgtt

SEQ ID NO: 10690 - DNA, 27 bp, Artificial sequence
  SiRNA target sequence
tctaataaaaataagatctgaatgtta

SEQ ID NO: 10691 - DNA, 27 bp, Artificial sequence
  SiRNA target sequence
ctaataaaaataagatctgaatgttac

SEQ ID NO: 10692 - DNA, 27 bp, Artificial sequence
  SiRNA target sequence
taataaaaataagatctgaatgttaca

SEQ ID NO: 10693 - DNA, 27 bp, Artificial sequence
  SiRNA target sequence
aataaaaataagatctgaatgttacaa

SEQ ID NO: 10694 - DNA, 27 bp, Artificial sequence
  SiRNA target sequence
ataaaaataagatctgaatgttacaag

SEQ ID NO: 10695 - DNA, 27 bp, Artificial sequence
  SiRNA target sequence
taaaaataagatctgaatgttacaagc

SEQ ID NO: 10696 - DNA, 27 bp, Artificial sequence
  SiRNA target sequence
aaaaataagatctgaatgttacaagca

SEQ ID NO: 10697 - DNA, 27 bp, Artificial sequence
  SiRNA target sequence
aaaataagatctgaatgttacaagcag

SEQ ID NO: 10698 - DNA, 27 bp, Artificial sequence
  SiRNA target sequence
aaataagatctgaatgttacaagcaga

SEQ ID NO: 10699 - DNA, 27 bp, Artificial sequence
  SiRNA target sequence
aataagatctgaatgttacaagcagat

SEQ ID NO: 10700 - DNA, 27 bp, Artificial sequence
  SiRNA target sequence
ataagatctgaatgttacaagcagatg

SEQ ID NO: 10701 - DNA, 27 bp, Artificial sequence
  SiRNA target sequence
taagatctgaatgttacaagcagatgg

SEQ ID NO: 10702 - DNA, 27 bp, Artificial sequence
  SiRNA target sequence
aagatctgaatgttacaagcagatggg

SEQ ID NO: 10703 - DNA, 27 bp, Artificial sequence
  SiRNA target sequence
agatctgaatgttacaagcagatggga

SEQ ID NO: 10704 - DNA, 27 bp, Artificial sequence
  SiRNA target sequence
gatctgaatgttacaagcagatgggaa

SEQ ID NO: 10705 - DNA, 27 bp, Artificial sequence
  SiRNA target sequence
atctgaatgttacaagcagatgggaaa

SEQ ID NO: 10706 - DNA, 27 bp, Artificial sequence
  SiRNA target sequence
tctgaatgttacaagcagatgggaaat

SEQ ID NO: 10707 - DNA, 27 bp, Artificial sequence
  SiRNA target sequence
ctgaatgttacaagcagatgggaaata

SEQ ID NO: 10708 - DNA, 27 bp, Artificial sequence
  SiRNA target sequence
tgaatgttacaagcagatgggaaataa

SEQ ID NO: 10709 - DNA, 27 bp, Artificial sequence
  SiRNA target sequence
gaatgttacaagcagatgggaaataaa

SEQ ID NO: 10710 - DNA, 27 bp, Artificial sequence
  SiRNA target sequence
aatgttacaagcagatgggaaataaaa

SEQ ID NO: 10711 - DNA, 27 bp, Artificial sequence
  SiRNA target sequence
atgttacaagcagatgggaaataaaaa

SEQ ID NO: 10712 - DNA, 27 bp, Artificial sequence
  SiRNA target sequence
tgttacaagcagatgggaaataaaaaa

SEQ ID NO: 10713 - DNA, 27 bp, Artificial sequence
  SiRNA target sequence
gttacaagcagatgggaaataaaaaaa

SEQ ID NO: 10714 - DNA, 27 bp, Artificial sequence
  SiRNA target sequence
ttacaagcagatgggaaataaaaaaaa

SEQ ID NO: 10715 - DNA, 27 bp, Artificial sequence
  SiRNA target sequence
tacaagcagatgggaaataaaaaaaaa

SEQ ID NO: 10716 - DNA, 27 bp, Artificial sequence
  SiRNA target sequence
acaagcagatgggaaataaaaaaaaat

SEQ ID NO: 10717 - DNA, 27 bp, Artificial sequence
  SiRNA target sequence
caagcagatgggaaataaaaaaaaatt

SEQ ID NO: 10718 - DNA, 27 bp, Artificial sequence
  SiRNA target sequence
aagcagatgggaaataaaaaaaaattt

SEQ ID NO: 10719 - DNA, 27 bp, Artificial sequence
  SiRNA target sequence
agcagatgggaaataaaaaaaaatttc

SEQ ID NO: 10720 - DNA, 27 bp, Artificial sequence
  SiRNA target sequence
gcagatgggaaataaaaaaaaatttct

SEQ ID NO: 10721 - DNA, 27 bp, Artificial sequence
  SiRNA target sequence
cagatgggaaataaaaaaaaatttctt

SEQ ID NO: 10722 - DNA, 27 bp, Artificial sequence
  SiRNA target sequence
agatgggaaataaaaaaaaatttctta

SEQ ID NO: 10723 - DNA, 27 bp, Artificial sequence
  SiRNA target sequence
gatgggaaataaaaaaaaatttcttaa

SEQ ID NO: 10724 - DNA, 27 bp, Artificial sequence
  SiRNA target sequence
atgggaaataaaaaaaaatttcttaag

SEQ ID NO: 10725 - DNA, 27 bp, Artificial sequence
  SiRNA target sequence
tgggaaataaaaaaaaatttcttaagg

SEQ ID NO: 10726 - DNA, 27 bp, Artificial sequence
  SiRNA target sequence
gggaaataaaaaaaaatttcttaagga

SEQ ID NO: 10727 - DNA, 27 bp, Artificial sequence
  SiRNA target sequence
ggaaataaaaaaaaatttcttaaggat

SEQ ID NO: 10728 - DNA, 27 bp, Artificial sequence
  SiRNA target sequence
gaaataaaaaaaaatttcttaaggatt

SEQ ID NO: 10729 - DNA, 27 bp, Artificial sequence
  SiRNA target sequence
aaataaaaaaaaatttcttaaggattt

SEQ ID NO: 10730 - DNA, 27 bp, Artificial sequence
  SiRNA target sequence
aataaaaaaaaatttcttaaggattta

SEQ ID NO: 10731 - DNA, 27 bp, Artificial sequence
  SiRNA target sequence
ataaaaaaaaatttcttaaggatttag

SEQ ID NO: 10732 - DNA, 27 bp, Artificial sequence
  SiRNA target sequence
taaaaaaaaatttcttaaggatttagc

SEQ ID NO: 10733 - DNA, 27 bp, Artificial sequence
  SiRNA target sequence
aaaaaaaaatttcttaaggatttagca

SEQ ID NO: 10734 - DNA, 27 bp, Artificial sequence
  SiRNA target sequence
aaaaaaaatttcttaaggatttagcac

SEQ ID NO: 10735 - DNA, 27 bp, Artificial sequence
  SiRNA target sequence
aaaaaaatttcttaaggatttagcact

SEQ ID NO: 10736 - DNA, 27 bp, Artificial sequence
  SiRNA target sequence
aaaaaatttcttaaggatttagcactt

SEQ ID NO: 10737 - DNA, 27 bp, Artificial sequence
  SiRNA target sequence
aaaaatttcttaaggatttagcacttt

SEQ ID NO: 10738 - DNA, 27 bp, Artificial sequence
  SiRNA target sequence
aaaatttcttaaggatttagcacttta

SEQ ID NO: 10739 - DNA, 27 bp, Artificial sequence
  SiRNA target sequence
aaatttcttaaggatttagcactttat

SEQ ID NO: 10740 - DNA, 27 bp, Artificial sequence
  SiRNA target sequence
aatttcttaaggatttagcactttatg

SEQ ID NO: 10741 - DNA, 27 bp, Artificial sequence
  SiRNA target sequence
atttcttaaggatttagcactttatga

SEQ ID NO: 10742 - DNA, 27 bp, Artificial sequence
  SiRNA target sequence
tttcttaaggatttagcactttatgaa

SEQ ID NO: 10743 - DNA, 27 bp, Artificial sequence
  SiRNA target sequence
ttcttaaggatttagcactttatgaaa

SEQ ID NO: 10744 - DNA, 27 bp, Artificial sequence
  SiRNA target sequence
tcttaaggatttagcactttatgaaac

SEQ ID NO: 10745 - DNA, 27 bp, Artificial sequence
  SiRNA target sequence
cttaaggatttagcactttatgaaaca

SEQ ID NO: 10746 - DNA, 27 bp, Artificial sequence
  SiRNA target sequence
ttaaggatttagcactttatgaaacat

SEQ ID NO: 10747 - DNA, 27 bp, Artificial sequence
  SiRNA target sequence
taaggatttagcactttatgaaacatt

SEQ ID NO: 10748 - DNA, 27 bp, Artificial sequence
  SiRNA target sequence
aaggatttagcactttatgaaacattt

SEQ ID NO: 10749 - DNA, 27 bp, Artificial sequence
  SiRNA target sequence
aggatttagcactttatgaaacatttg

SEQ ID NO: 10750 - DNA, 27 bp, Artificial sequence
  SiRNA target sequence
ggatttagcactttatgaaacatttgc

SEQ ID NO: 10751 - DNA, 27 bp, Artificial sequence
  SiRNA target sequence
gatttagcactttatgaaacatttgct

SEQ ID NO: 10752 - DNA, 27 bp, Artificial sequence
  SiRNA target sequence
atttagcactttatgaaacatttgcta

SEQ ID NO: 10753 - DNA, 27 bp, Artificial sequence
  SiRNA target sequence
tttagcactttatgaaacatttgctaa

SEQ ID NO: 10754 - DNA, 27 bp, Artificial sequence
  SiRNA target sequence
ttagcactttatgaaacatttgctaat

SEQ ID NO: 10755 - DNA, 27 bp, Artificial sequence
  SiRNA target sequence
tagcactttatgaaacatttgctaata

SEQ ID NO: 10756 - DNA, 27 bp, Artificial sequence
  SiRNA target sequence
agcactttatgaaacatttgctaataa

SEQ ID NO: 10757 - DNA, 27 bp, Artificial sequence
  SiRNA target sequence
gcactttatgaaacatttgctaataat

SEQ ID NO: 10758 - DNA, 27 bp, Artificial sequence
  SiRNA target sequence
cactttatgaaacatttgctaataata

SEQ ID NO: 10759 - DNA, 27 bp, Artificial sequence
  SiRNA target sequence
actttatgaaacatttgctaataataa

SEQ ID NO: 10760 - DNA, 27 bp, Artificial sequence
  SiRNA target sequence
ctttatgaaacatttgctaataataaa

SEQ ID NO: 10761 - DNA, 27 bp, Artificial sequence
  SiRNA target sequence
tttatgaaacatttgctaataataaag

SEQ ID NO: 10762 - DNA, 27 bp, Artificial sequence
  SiRNA target sequence
ttatgaaacatttgctaataataaaga

SEQ ID NO: 10763 - DNA, 27 bp, Artificial sequence
  SiRNA target sequence
tatgaaacatttgctaataataaagaa

SEQ ID NO: 10764 - DNA, 27 bp, Artificial sequence
  SiRNA target sequence
atgaaacatttgctaataataaagaag

SEQ ID NO: 10765 - DNA, 27 bp, Artificial sequence
  SiRNA target sequence
tgaaacatttgctaataataaagaagt

SEQ ID NO: 10766 - DNA, 27 bp, Artificial sequence
  SiRNA target sequence
gaaacatttgctaataataaagaagtc

SEQ ID NO: 10767 - DNA, 27 bp, Artificial sequence
  SiRNA target sequence
aaacatttgctaataataaagaagtcc

SEQ ID NO: 10768 - DNA, 27 bp, Artificial sequence
  SiRNA target sequence
aacatttgctaataataaagaagtcca

SEQ ID NO: 10769 - DNA, 27 bp, Artificial sequence
  SiRNA target sequence
acatttgctaataataaagaagtccaa

SEQ ID NO: 10770 - DNA, 27 bp, Artificial sequence
  SiRNA target sequence
catttgctaataataaagaagtccaag

SEQ ID NO: 10771 - DNA, 27 bp, Artificial sequence
  SiRNA target sequence
atttgctaataataaagaagtccaaga

SEQ ID NO: 10772 - DNA, 27 bp, Artificial sequence
  SiRNA target sequence
tttgctaataataaagaagtccaagat

SEQ ID NO: 10773 - DNA, 27 bp, Artificial sequence
  SiRNA target sequence
ttgctaataataaagaagtccaagatg

SEQ ID NO: 10774 - DNA, 27 bp, Artificial sequence
  SiRNA target sequence
tgctaataataaagaagtccaagatga

SEQ ID NO: 10775 - DNA, 27 bp, Artificial sequence
  SiRNA target sequence
gctaataataaagaagtccaagatgaa

SEQ ID NO: 10776 - DNA, 27 bp, Artificial sequence
  SiRNA target sequence
ctaataataaagaagtccaagatgaaa

SEQ ID NO: 10777 - DNA, 27 bp, Artificial sequence
  SiRNA target sequence
taataataaagaagtccaagatgaaat

SEQ ID NO: 10778 - DNA, 27 bp, Artificial sequence
  SiRNA target sequence
aataataaagaagtccaagatgaaatt

SEQ ID NO: 10779 - DNA, 27 bp, Artificial sequence
  SiRNA target sequence
ataataaagaagtccaagatgaaatta

SEQ ID NO: 10780 - DNA, 27 bp, Artificial sequence
  SiRNA target sequence
taataaagaagtccaagatgaaattat

SEQ ID NO: 10781 - DNA, 27 bp, Artificial sequence
  SiRNA target sequence
aataaagaagtccaagatgaaattatg

SEQ ID NO: 10782 - DNA, 27 bp, Artificial sequence
  SiRNA target sequence
ataaagaagtccaagatgaaattatgc

SEQ ID NO: 10783 - DNA, 27 bp, Artificial sequence
  SiRNA target sequence
taaagaagtccaagatgaaattatgca

SEQ ID NO: 10784 - DNA, 27 bp, Artificial sequence
  SiRNA target sequence
aaagaagtccaagatgaaattatgcag

SEQ ID NO: 10785 - DNA, 27 bp, Artificial sequence
  SiRNA target sequence
aagaagtccaagatgaaattatgcaga

SEQ ID NO: 10786 - DNA, 27 bp, Artificial sequence
  SiRNA target sequence
agaagtccaagatgaaattatgcagac

SEQ ID NO: 10787 - DNA, 27 bp, Artificial sequence
  SiRNA target sequence
gaagtccaagatgaaattatgcagact

SEQ ID NO: 10788 - DNA, 27 bp, Artificial sequence
  SiRNA target sequence
aagtccaagatgaaattatgcagactg

SEQ ID NO: 10789 - DNA, 27 bp, Artificial sequence
  SiRNA target sequence
agtccaagatgaaattatgcagactgt

SEQ ID NO: 10790 - DNA, 27 bp, Artificial sequence
  SiRNA target sequence
gtccaagatgaaattatgcagactgtt

SEQ ID NO: 10791 - DNA, 27 bp, Artificial sequence
  SiRNA target sequence
tccaagatgaaattatgcagactgtta

SEQ ID NO: 10792 - DNA, 27 bp, Artificial sequence
  SiRNA target sequence
ccaagatgaaattatgcagactgttaa

SEQ ID NO: 10793 - DNA, 27 bp, Artificial sequence
  SiRNA target sequence
caagatgaaattatgcagactgttaaa

SEQ ID NO: 10794 - DNA, 27 bp, Artificial sequence
  SiRNA target sequence
aagatgaaattatgcagactgttaaag

SEQ ID NO: 10795 - DNA, 27 bp, Artificial sequence
  SiRNA target sequence
agatgaaattatgcagactgttaaaga

SEQ ID NO: 10796 - DNA, 27 bp, Artificial sequence
  SiRNA target sequence
gatgaaattatgcagactgttaaagaa

SEQ ID NO: 10797 - DNA, 27 bp, Artificial sequence
  SiRNA target sequence
atgaaattatgcagactgttaaagaaa

SEQ ID NO: 10798 - DNA, 27 bp, Artificial sequence
  SiRNA target sequence
tgaaattatgcagactgttaaagaaat

SEQ ID NO: 10799 - DNA, 27 bp, Artificial sequence
  SiRNA target sequence
gaaattatgcagactgttaaagaaatt

SEQ ID NO: 10800 - DNA, 27 bp, Artificial sequence
  SiRNA target sequence
aaattatgcagactgttaaagaaattt

SEQ ID NO: 10801 - DNA, 27 bp, Artificial sequence
  SiRNA target sequence
aattatgcagactgttaaagaaatttg

SEQ ID NO: 10802 - DNA, 27 bp, Artificial sequence
  SiRNA target sequence
attatgcagactgttaaagaaatttgt

SEQ ID NO: 10803 - DNA, 27 bp, Artificial sequence
  SiRNA target sequence
ttatgcagactgttaaagaaatttgtg

SEQ ID NO: 10804 - DNA, 27 bp, Artificial sequence
  SiRNA target sequence
tatgcagactgttaaagaaatttgtga

SEQ ID NO: 10805 - DNA, 27 bp, Artificial sequence
  SiRNA target sequence
atgcagactgttaaagaaatttgtgaa

SEQ ID NO: 10806 - DNA, 27 bp, Artificial sequence
  SiRNA target sequence
tgcagactgttaaagaaatttgtgaag

SEQ ID NO: 10807 - DNA, 27 bp, Artificial sequence
  SiRNA target sequence
gcagactgttaaagaaatttgtgaaga

SEQ ID NO: 10808 - DNA, 27 bp, Artificial sequence
  SiRNA target sequence
cagactgttaaagaaatttgtgaagaa

SEQ ID NO: 10809 - DNA, 27 bp, Artificial sequence
  SiRNA target sequence
agactgttaaagaaatttgtgaagaag

SEQ ID NO: 10810 - DNA, 27 bp, Artificial sequence
  SiRNA target sequence
gactgttaaagaaatttgtgaagaaga

SEQ ID NO: 10811 - DNA, 27 bp, Artificial sequence
  SiRNA target sequence
actgttaaagaaatttgtgaagaagaa

SEQ ID NO: 10812 - DNA, 27 bp, Artificial sequence
  SiRNA target sequence
ctgttaaagaaatttgtgaagaagaag

SEQ ID NO: 10813 - DNA, 27 bp, Artificial sequence
  SiRNA target sequence
tgttaaagaaatttgtgaagaagaagt

SEQ ID NO: 10814 - DNA, 27 bp, Artificial sequence
  SiRNA target sequence
gttaaagaaatttgtgaagaagaagtg

SEQ ID NO: 10815 - DNA, 27 bp, Artificial sequence
  SiRNA target sequence
ttaaagaaatttgtgaagaagaagtga

SEQ ID NO: 10816 - DNA, 27 bp, Artificial sequence
  SiRNA target sequence
taaagaaatttgtgaagaagaagtgaa

SEQ ID NO: 10817 - DNA, 27 bp, Artificial sequence
  SiRNA target sequence
aaagaaatttgtgaagaagaagtgaat

SEQ ID NO: 10818 - DNA, 27 bp, Artificial sequence
  SiRNA target sequence
aagaaatttgtgaagaagaagtgaatg

SEQ ID NO: 10819 - DNA, 27 bp, Artificial sequence
  SiRNA target sequence
agaaatttgtgaagaagaagtgaatga

SEQ ID NO: 10820 - DNA, 27 bp, Artificial sequence
  SiRNA target sequence
gaaatttgtgaagaagaagtgaatgag

SEQ ID NO: 10821 - DNA, 27 bp, Artificial sequence
  SiRNA target sequence
aaatttgtgaagaagaagtgaatgagt

SEQ ID NO: 10822 - DNA, 27 bp, Artificial sequence
  SiRNA target sequence
aatttgtgaagaagaagtgaatgagtt

SEQ ID NO: 10823 - DNA, 27 bp, Artificial sequence
  SiRNA target sequence
atttgtgaagaagaagtgaatgagttt

SEQ ID NO: 10824 - DNA, 27 bp, Artificial sequence
  SiRNA target sequence
tttgtgaagaagaagtgaatgagttta

SEQ ID NO: 10825 - DNA, 27 bp, Artificial sequence
  SiRNA target sequence
ttgtgaagaagaagtgaatgagtttat

SEQ ID NO: 10826 - DNA, 27 bp, Artificial sequence
  SiRNA target sequence
tgtgaagaagaagtgaatgagtttatt

SEQ ID NO: 10827 - DNA, 27 bp, Artificial sequence
  SiRNA target sequence
gtgaagaagaagtgaatgagtttattg

SEQ ID NO: 10828 - DNA, 27 bp, Artificial sequence
  SiRNA target sequence
tgaagaagaagtgaatgagtttattga

SEQ ID NO: 10829 - DNA, 27 bp, Artificial sequence
  SiRNA target sequence
gaagaagaagtgaatgagtttattgaa

SEQ ID NO: 10830 - DNA, 27 bp, Artificial sequence
  SiRNA target sequence
aagaagaagtgaatgagtttattgaac

SEQ ID NO: 10831 - DNA, 27 bp, Artificial sequence
  SiRNA target sequence
agaagaagtgaatgagtttattgaaca

SEQ ID NO: 10832 - DNA, 27 bp, Artificial sequence
  SiRNA target sequence
gaagaagtgaatgagtttattgaacaa

SEQ ID NO: 10833 - DNA, 27 bp, Artificial sequence
  SiRNA target sequence
aagaagtgaatgagtttattgaacaag

SEQ ID NO: 10834 - DNA, 27 bp, Artificial sequence
  SiRNA target sequence
agaagtgaatgagtttattgaacaaga

SEQ ID NO: 10835 - DNA, 27 bp, Artificial sequence
  SiRNA target sequence
gaagtgaatgagtttattgaacaagaa

SEQ ID NO: 10836 - DNA, 27 bp, Artificial sequence
  SiRNA target sequence
aagtgaatgagtttattgaacaagaag

SEQ ID NO: 10837 - DNA, 27 bp, Artificial sequence
  SiRNA target sequence
agtgaatgagtttattgaacaagaagg

SEQ ID NO: 10838 - DNA, 27 bp, Artificial sequence
  SiRNA target sequence
gtgaatgagtttattgaacaagaaggt

SEQ ID NO: 10839 - DNA, 27 bp, Artificial sequence
  SiRNA target sequence
tgaatgagtttattgaacaagaaggtt

SEQ ID NO: 10840 - DNA, 27 bp, Artificial sequence
  SiRNA target sequence
gaatgagtttattgaacaagaaggttt

SEQ ID NO: 10841 - DNA, 27 bp, Artificial sequence
  SiRNA target sequence
aatgagtttattgaacaagaaggttta

SEQ ID NO: 10842 - DNA, 27 bp, Artificial sequence
  SiRNA target sequence
atgagtttattgaacaagaaggtttaa

SEQ ID NO: 10843 - DNA, 27 bp, Artificial sequence
  SiRNA target sequence
tgagtttattgaacaagaaggtttaaa

SEQ ID NO: 10844 - DNA, 27 bp, Artificial sequence
  SiRNA target sequence
gagtttattgaacaagaaggtttaaaa

SEQ ID NO: 10845 - DNA, 27 bp, Artificial sequence
  SiRNA target sequence
agtttattgaacaagaaggtttaaaaa

SEQ ID NO: 10846 - DNA, 27 bp, Artificial sequence
  SiRNA target sequence
gtttattgaacaagaaggtttaaaaat

SEQ ID NO: 10847 - DNA, 27 bp, Artificial sequence
  SiRNA target sequence
tttattgaacaagaaggtttaaaaatt

SEQ ID NO: 10848 - DNA, 27 bp, Artificial sequence
  SiRNA target sequence
ttattgaacaagaaggtttaaaaatta

SEQ ID NO: 10849 - DNA, 27 bp, Artificial sequence
  SiRNA target sequence
tattgaacaagaaggtttaaaaattaa

SEQ ID NO: 10850 - DNA, 27 bp, Artificial sequence
  SiRNA target sequence
attgaacaagaaggtttaaaaattaat

SEQ ID NO: 10851 - DNA, 27 bp, Artificial sequence
  SiRNA target sequence
ttgaacaagaaggtttaaaaattaata

SEQ ID NO: 10852 - DNA, 27 bp, Artificial sequence
  SiRNA target sequence
tgaacaagaaggtttaaaaattaataa

SEQ ID NO: 10853 - DNA, 27 bp, Artificial sequence
  SiRNA target sequence
gaacaagaaggtttaaaaattaataaa

SEQ ID NO: 10854 - DNA, 27 bp, Artificial sequence
  SiRNA target sequence
aacaagaaggtttaaaaattaataaag

SEQ ID NO: 10855 - DNA, 27 bp, Artificial sequence
  SiRNA target sequence
acaagaaggtttaaaaattaataaaga

SEQ ID NO: 10856 - DNA, 27 bp, Artificial sequence
  SiRNA target sequence
caagaaggtttaaaaattaataaagaa

SEQ ID NO: 10857 - DNA, 27 bp, Artificial sequence
  SiRNA target sequence
aagaaggtttaaaaattaataaagaag

SEQ ID NO: 10858 - DNA, 27 bp, Artificial sequence
  SiRNA target sequence
agaaggtttaaaaattaataaagaaga

SEQ ID NO: 10859 - DNA, 27 bp, Artificial sequence
  SiRNA target sequence
gaaggtttaaaaattaataaagaagat

SEQ ID NO: 10860 - DNA, 27 bp, Artificial sequence
  SiRNA target sequence
aaggtttaaaaattaataaagaagatg

SEQ ID NO: 10861 - DNA, 27 bp, Artificial sequence
  SiRNA target sequence
aggtttaaaaattaataaagaagatgt

SEQ ID NO: 10862 - DNA, 27 bp, Artificial sequence
  SiRNA target sequence
ggtttaaaaattaataaagaagatgtg

SEQ ID NO: 10863 - DNA, 27 bp, Artificial sequence
  SiRNA target sequence
gtttaaaaattaataaagaagatgtgc

SEQ ID NO: 10864 - DNA, 27 bp, Artificial sequence
  SiRNA target sequence
tttaaaaattaataaagaagatgtgct

SEQ ID NO: 10865 - DNA, 27 bp, Artificial sequence
  SiRNA target sequence
ttaaaaattaataaagaagatgtgcta

SEQ ID NO: 10866 - DNA, 27 bp, Artificial sequence
  SiRNA target sequence
taaaaattaataaagaagatgtgctaa

SEQ ID NO: 10867 - DNA, 27 bp, Artificial sequence
  SiRNA target sequence
aaaaattaataaagaagatgtgctaag

SEQ ID NO: 10868 - DNA, 27 bp, Artificial sequence
  SiRNA target sequence
aaaattaataaagaagatgtgctaaga

SEQ ID NO: 10869 - DNA, 27 bp, Artificial sequence
  SiRNA target sequence
aaattaataaagaagatgtgctaagag

SEQ ID NO: 10870 - DNA, 27 bp, Artificial sequence
  SiRNA target sequence
aattaataaagaagatgtgctaagagg

SEQ ID NO: 10871 - DNA, 27 bp, Artificial sequence
  SiRNA target sequence
attaataaagaagatgtgctaagagga

SEQ ID NO: 10872 - DNA, 27 bp, Artificial sequence
  SiRNA target sequence
ttaataaagaagatgtgctaagaggac

SEQ ID NO: 10873 - DNA, 27 bp, Artificial sequence
  SiRNA target sequence
taataaagaagatgtgctaagaggact

SEQ ID NO: 10874 - DNA, 27 bp, Artificial sequence
  SiRNA target sequence
aataaagaagatgtgctaagaggactt

SEQ ID NO: 10875 - DNA, 27 bp, Artificial sequence
  SiRNA target sequence
ataaagaagatgtgctaagaggacttg

SEQ ID NO: 10876 - DNA, 27 bp, Artificial sequence
  SiRNA target sequence
taaagaagatgtgctaagaggacttgt

SEQ ID NO: 10877 - DNA, 27 bp, Artificial sequence
  SiRNA target sequence
aaagaagatgtgctaagaggacttgtt

SEQ ID NO: 10878 - DNA, 27 bp, Artificial sequence
  SiRNA target sequence
aagaagatgtgctaagaggacttgttt

SEQ ID NO: 10879 - DNA, 27 bp, Artificial sequence
  SiRNA target sequence
agaagatgtgctaagaggacttgtttc

SEQ ID NO: 10880 - DNA, 27 bp, Artificial sequence
  SiRNA target sequence
gaagatgtgctaagaggacttgtttca

SEQ ID NO: 10881 - DNA, 27 bp, Artificial sequence
  SiRNA target sequence
aagatgtgctaagaggacttgtttcaa

SEQ ID NO: 10882 - DNA, 27 bp, Artificial sequence
  SiRNA target sequence
agatgtgctaagaggacttgtttcaat

SEQ ID NO: 10883 - DNA, 27 bp, Artificial sequence
  SiRNA target sequence
gatgtgctaagaggacttgtttcaata

SEQ ID NO: 10884 - DNA, 27 bp, Artificial sequence
  SiRNA target sequence
atgtgctaagaggacttgtttcaataa

SEQ ID NO: 10885 - DNA, 27 bp, Artificial sequence
  SiRNA target sequence
tgtgctaagaggacttgtttcaataaa

SEQ ID NO: 10886 - DNA, 27 bp, Artificial sequence
  SiRNA target sequence
gtgctaagaggacttgtttcaataaaa

SEQ ID NO: 10887 - DNA, 27 bp, Artificial sequence
  SiRNA target sequence
tgctaagaggacttgtttcaataaaaa

SEQ ID NO: 10888 - DNA, 27 bp, Artificial sequence
  SiRNA target sequence
gctaagaggacttgtttcaataaaaaa

SEQ ID NO: 10889 - DNA, 27 bp, Artificial sequence
  SiRNA target sequence
ctaagaggacttgtttcaataaaaaat

SEQ ID NO: 10890 - DNA, 27 bp, Artificial sequence
  SiRNA target sequence
taagaggacttgtttcaataaaaaata

SEQ ID NO: 10891 - DNA, 27 bp, Artificial sequence
  SiRNA target sequence
aagaggacttgtttcaataaaaaatat

SEQ ID NO: 10892 - DNA, 27 bp, Artificial sequence
  SiRNA target sequence
agaggacttgtttcaataaaaaatata

SEQ ID NO: 10893 - DNA, 27 bp, Artificial sequence
  SiRNA target sequence
gaggacttgtttcaataaaaaatataa

SEQ ID NO: 10894 - DNA, 27 bp, Artificial sequence
  SiRNA target sequence
aggacttgtttcaataaaaaatataaa

SEQ ID NO: 10895 - DNA, 27 bp, Artificial sequence
  SiRNA target sequence
ggacttgtttcaataaaaaatataaat

SEQ ID NO: 10896 - DNA, 27 bp, Artificial sequence
  SiRNA target sequence
gacttgtttcaataaaaaatataaatg

SEQ ID NO: 10897 - DNA, 27 bp, Artificial sequence
  SiRNA target sequence
acttgtttcaataaaaaatataaatga

SEQ ID NO: 10898 - DNA, 27 bp, Artificial sequence
  SiRNA target sequence
cttgtttcaataaaaaatataaatgag

SEQ ID NO: 10899 - DNA, 27 bp, Artificial sequence
  SiRNA target sequence
ttgtttcaataaaaaatataaatgaga

SEQ ID NO: 10900 - DNA, 27 bp, Artificial sequence
  SiRNA target sequence
tgtttcaataaaaaatataaatgagat

SEQ ID NO: 10901 - DNA, 27 bp, Artificial sequence
  SiRNA target sequence
gtttcaataaaaaatataaatgagatt

SEQ ID NO: 10902 - DNA, 27 bp, Artificial sequence
  SiRNA target sequence
tttcaataaaaaatataaatgagattt

SEQ ID NO: 10903 - DNA, 27 bp, Artificial sequence
  SiRNA target sequence
ttcaataaaaaatataaatgagattta

SEQ ID NO: 10904 - DNA, 27 bp, Artificial sequence
  SiRNA target sequence
tcaataaaaaatataaatgagatttat

SEQ ID NO: 10905 - DNA, 27 bp, Artificial sequence
  SiRNA target sequence
caataaaaaatataaatgagatttatg

SEQ ID NO: 10906 - DNA, 27 bp, Artificial sequence
  SiRNA target sequence
aataaaaaatataaatgagatttatga

SEQ ID NO: 10907 - DNA, 27 bp, Artificial sequence
  SiRNA target sequence
ataaaaaatataaatgagatttatgat

SEQ ID NO: 10908 - DNA, 27 bp, Artificial sequence
  SiRNA target sequence
taaaaaatataaatgagatttatgatg

SEQ ID NO: 10909 - DNA, 27 bp, Artificial sequence
  SiRNA target sequence
aaaaaatataaatgagatttatgatgc

SEQ ID NO: 10910 - DNA, 27 bp, Artificial sequence
  SiRNA target sequence
aaaaatataaatgagatttatgatgca

SEQ ID NO: 10911 - DNA, 27 bp, Artificial sequence
  SiRNA target sequence
aaaatataaatgagatttatgatgcat

SEQ ID NO: 10912 - DNA, 27 bp, Artificial sequence
  SiRNA target sequence
aaatataaatgagatttatgatgcatt

SEQ ID NO: 10913 - DNA, 27 bp, Artificial sequence
  SiRNA target sequence
aatataaatgagatttatgatgcattt

SEQ ID NO: 10914 - DNA, 27 bp, Artificial sequence
  SiRNA target sequence
atataaatgagatttatgatgcatttg

SEQ ID NO: 10915 - DNA, 27 bp, Artificial sequence
  SiRNA target sequence
tataaatgagatttatgatgcatttgg

SEQ ID NO: 10916 - DNA, 27 bp, Artificial sequence
  SiRNA target sequence
ataaatgagatttatgatgcatttgga

SEQ ID NO: 10917 - DNA, 27 bp, Artificial sequence
  SiRNA target sequence
taaatgagatttatgatgcatttggag

SEQ ID NO: 10918 - DNA, 27 bp, Artificial sequence
  SiRNA target sequence
aaatgagatttatgatgcatttggagg

SEQ ID NO: 10919 - DNA, 27 bp, Artificial sequence
  SiRNA target sequence
aatgagatttatgatgcatttggaggt

SEQ ID NO: 10920 - DNA, 27 bp, Artificial sequence
  SiRNA target sequence
atgagatttatgatgcatttggaggta

SEQ ID NO: 10921 - DNA, 27 bp, Artificial sequence
  SiRNA target sequence
tgagatttatgatgcatttggaggtaa

SEQ ID NO: 10922 - DNA, 27 bp, Artificial sequence
  SiRNA target sequence
gagatttatgatgcatttggaggtaaa

SEQ ID NO: 10923 - DNA, 27 bp, Artificial sequence
  SiRNA target sequence
agatttatgatgcatttggaggtaaat

SEQ ID NO: 10924 - DNA, 27 bp, Artificial sequence
  SiRNA target sequence
gatttatgatgcatttggaggtaaatc

SEQ ID NO: 10925 - DNA, 27 bp, Artificial sequence
  SiRNA target sequence
atttatgatgcatttggaggtaaatct

SEQ ID NO: 10926 - DNA, 27 bp, Artificial sequence
  SiRNA target sequence
tttatgatgcatttggaggtaaatcta

SEQ ID NO: 10927 - DNA, 27 bp, Artificial sequence
  SiRNA target sequence
ttatgatgcatttggaggtaaatctaa

SEQ ID NO: 10928 - DNA, 27 bp, Artificial sequence
  SiRNA target sequence
tatgatgcatttggaggtaaatctaag

SEQ ID NO: 10929 - DNA, 27 bp, Artificial sequence
  SiRNA target sequence
atgatgcatttggaggtaaatctaaga

SEQ ID NO: 10930 - DNA, 27 bp, Artificial sequence
  SiRNA target sequence
tgatgcatttggaggtaaatctaagaa

SEQ ID NO: 10931 - DNA, 27 bp, Artificial sequence
  SiRNA target sequence
gatgcatttggaggtaaatctaagaag

SEQ ID NO: 10932 - DNA, 27 bp, Artificial sequence
  SiRNA target sequence
atgcatttggaggtaaatctaagaagt

SEQ ID NO: 10933 - DNA, 27 bp, Artificial sequence
  SiRNA target sequence
tgcatttggaggtaaatctaagaagtt

SEQ ID NO: 10934 - DNA, 27 bp, Artificial sequence
  SiRNA target sequence
gcatttggaggtaaatctaagaagttt

SEQ ID NO: 10935 - DNA, 27 bp, Artificial sequence
  SiRNA target sequence
catttggaggtaaatctaagaagttta

SEQ ID NO: 10936 - DNA, 27 bp, Artificial sequence
  SiRNA target sequence
atttggaggtaaatctaagaagtttaa

SEQ ID NO: 10937 - DNA, 27 bp, Artificial sequence
  SiRNA target sequence
tttggaggtaaatctaagaagtttaaa

SEQ ID NO: 10938 - DNA, 27 bp, Artificial sequence
  SiRNA target sequence
ttggaggtaaatctaagaagtttaaat

SEQ ID NO: 10939 - DNA, 27 bp, Artificial sequence
  SiRNA target sequence
tggaggtaaatctaagaagtttaaatt

SEQ ID NO: 10940 - DNA, 27 bp, Artificial sequence
  SiRNA target sequence
ggaggtaaatctaagaagtttaaattt

SEQ ID NO: 10941 - DNA, 27 bp, Artificial sequence
  SiRNA target sequence
gaggtaaatctaagaagtttaaatttt

SEQ ID NO: 10942 - DNA, 27 bp, Artificial sequence
  SiRNA target sequence
aggtaaatctaagaagtttaaattttc

SEQ ID NO: 10943 - DNA, 27 bp, Artificial sequence
  SiRNA target sequence
ggtaaatctaagaagtttaaattttct

SEQ ID NO: 10944 - DNA, 27 bp, Artificial sequence
  SiRNA target sequence
gtaaatctaagaagtttaaattttcta

SEQ ID NO: 10945 - DNA, 27 bp, Artificial sequence
  SiRNA target sequence
taaatctaagaagtttaaattttctaa

SEQ ID NO: 10946 - DNA, 27 bp, Artificial sequence
  SiRNA target sequence
aaatctaagaagtttaaattttctaat

SEQ ID NO: 10947 - DNA, 27 bp, Artificial sequence
  SiRNA target sequence
aatctaagaagtttaaattttctaatg

SEQ ID NO: 10948 - DNA, 27 bp, Artificial sequence
  SiRNA target sequence
atctaagaagtttaaattttctaatga

SEQ ID NO: 10949 - DNA, 27 bp, Artificial sequence
  SiRNA target sequence
tctaagaagtttaaattttctaatgat

SEQ ID NO: 10950 - DNA, 27 bp, Artificial sequence
  SiRNA target sequence
ctaagaagtttaaattttctaatgatg

SEQ ID NO: 10951 - DNA, 27 bp, Artificial sequence
  SiRNA target sequence
taagaagtttaaattttctaatgatga

SEQ ID NO: 10952 - DNA, 27 bp, Artificial sequence
  SiRNA target sequence
aagaagtttaaattttctaatgatgaa

SEQ ID NO: 10953 - DNA, 27 bp, Artificial sequence
  SiRNA target sequence
agaagtttaaattttctaatgatgaaa

SEQ ID NO: 10954 - DNA, 27 bp, Artificial sequence
  SiRNA target sequence
gaagtttaaattttctaatgatgaaaa

SEQ ID NO: 10955 - DNA, 27 bp, Artificial sequence
  SiRNA target sequence
aagtttaaattttctaatgatgaaaag

SEQ ID NO: 10956 - DNA, 27 bp, Artificial sequence
  SiRNA target sequence
agtttaaattttctaatgatgaaaagg

SEQ ID NO: 10957 - DNA, 27 bp, Artificial sequence
  SiRNA target sequence
gtttaaattttctaatgatgaaaagga

SEQ ID NO: 10958 - DNA, 27 bp, Artificial sequence
  SiRNA target sequence
tttaaattttctaatgatgaaaaggaa

SEQ ID NO: 10959 - DNA, 27 bp, Artificial sequence
  SiRNA target sequence
ttaaattttctaatgatgaaaaggaag

SEQ ID NO: 10960 - DNA, 27 bp, Artificial sequence
  SiRNA target sequence
taaattttctaatgatgaaaaggaagt

SEQ ID NO: 10961 - DNA, 27 bp, Artificial sequence
  SiRNA target sequence
aaattttctaatgatgaaaaggaagtg

SEQ ID NO: 10962 - DNA, 27 bp, Artificial sequence
  SiRNA target sequence
aattttctaatgatgaaaaggaagtgt

SEQ ID NO: 10963 - DNA, 27 bp, Artificial sequence
  SiRNA target sequence
attttctaatgatgaaaaggaagtgtt

SEQ ID NO: 10964 - DNA, 27 bp, Artificial sequence
  SiRNA target sequence
ttttctaatgatgaaaaggaagtgtta

SEQ ID NO: 10965 - DNA, 27 bp, Artificial sequence
  SiRNA target sequence
tttctaatgatgaaaaggaagtgttaa

SEQ ID NO: 10966 - DNA, 27 bp, Artificial sequence
  SiRNA target sequence
ttctaatgatgaaaaggaagtgttaaa

SEQ ID NO: 10967 - DNA, 27 bp, Artificial sequence
  SiRNA target sequence
tctaatgatgaaaaggaagtgttaaat

SEQ ID NO: 10968 - DNA, 27 bp, Artificial sequence
  SiRNA target sequence
ctaatgatgaaaaggaagtgttaaatc

SEQ ID NO: 10969 - DNA, 27 bp, Artificial sequence
  SiRNA target sequence
taatgatgaaaaggaagtgttaaatct

SEQ ID NO: 10970 - DNA, 27 bp, Artificial sequence
  SiRNA target sequence
aatgatgaaaaggaagtgttaaatctt

SEQ ID NO: 10971 - DNA, 27 bp, Artificial sequence
  SiRNA target sequence
atgatgaaaaggaagtgttaaatcttc

SEQ ID NO: 10972 - DNA, 27 bp, Artificial sequence
  SiRNA target sequence
tgatgaaaaggaagtgttaaatcttct

SEQ ID NO: 10973 - DNA, 27 bp, Artificial sequence
  SiRNA target sequence
gatgaaaaggaagtgttaaatcttctt

SEQ ID NO: 10974 - DNA, 27 bp, Artificial sequence
  SiRNA target sequence
atgaaaaggaagtgttaaatcttctta

SEQ ID NO: 10975 - DNA, 27 bp, Artificial sequence
  SiRNA target sequence
tgaaaaggaagtgttaaatcttcttaa

SEQ ID NO: 10976 - DNA, 27 bp, Artificial sequence
  SiRNA target sequence
gaaaaggaagtgttaaatcttcttaat

SEQ ID NO: 10977 - DNA, 27 bp, Artificial sequence
  SiRNA target sequence
aaaaggaagtgttaaatcttcttaatg

SEQ ID NO: 10978 - DNA, 27 bp, Artificial sequence
  SiRNA target sequence
aaaggaagtgttaaatcttcttaatgc

SEQ ID NO: 10979 - DNA, 27 bp, Artificial sequence
  SiRNA target sequence
aaggaagtgttaaatcttcttaatgcc

SEQ ID NO: 10980 - DNA, 27 bp, Artificial sequence
  SiRNA target sequence
aggaagtgttaaatcttcttaatgcca

SEQ ID NO: 10981 - DNA, 27 bp, Artificial sequence
  SiRNA target sequence
ggaagtgttaaatcttcttaatgccat

SEQ ID NO: 10982 - DNA, 27 bp, Artificial sequence
  SiRNA target sequence
gaagtgttaaatcttcttaatgccatt

SEQ ID NO: 10983 - DNA, 27 bp, Artificial sequence
  SiRNA target sequence
aagtgttaaatcttcttaatgccatta

SEQ ID NO: 10984 - DNA, 27 bp, Artificial sequence
  SiRNA target sequence
agtgttaaatcttcttaatgccattat

SEQ ID NO: 10985 - DNA, 27 bp, Artificial sequence
  SiRNA target sequence
gtgttaaatcttcttaatgccattatt

SEQ ID NO: 10986 - DNA, 27 bp, Artificial sequence
  SiRNA target sequence
tgttaaatcttcttaatgccattattt

SEQ ID NO: 10987 - DNA, 27 bp, Artificial sequence
  SiRNA target sequence
gttaaatcttcttaatgccattatttt

SEQ ID NO: 10988 - DNA, 27 bp, Artificial sequence
  SiRNA target sequence
ttaaatcttcttaatgccattatttta

SEQ ID NO: 10989 - DNA, 27 bp, Artificial sequence
  SiRNA target sequence
taaatcttcttaatgccattattttac

SEQ ID NO: 10990 - DNA, 27 bp, Artificial sequence
  SiRNA target sequence
aaatcttcttaatgccattattttaca

SEQ ID NO: 10991 - DNA, 27 bp, Artificial sequence
  SiRNA target sequence
aatcttcttaatgccattattttacac

SEQ ID NO: 10992 - DNA, 27 bp, Artificial sequence
  SiRNA target sequence
atcttcttaatgccattattttacacc

SEQ ID NO: 10993 - DNA, 27 bp, Artificial sequence
  SiRNA target sequence
tcttcttaatgccattattttacacct

SEQ ID NO: 10994 - DNA, 27 bp, Artificial sequence
  SiRNA target sequence
cttcttaatgccattattttacaccta

SEQ ID NO: 10995 - DNA, 27 bp, Artificial sequence
  SiRNA target sequence
ttcttaatgccattattttacacctaa

SEQ ID NO: 10996 - DNA, 27 bp, Artificial sequence
  SiRNA target sequence
tcttaatgccattattttacacctaaa

SEQ ID NO: 10997 - DNA, 27 bp, Artificial sequence
  SiRNA target sequence
cttaatgccattattttacacctaaaa

SEQ ID NO: 10998 - DNA, 27 bp, Artificial sequence
  SiRNA target sequence
ttaatgccattattttacacctaaaag

SEQ ID NO: 10999 - DNA, 27 bp, Artificial sequence
  SiRNA target sequence
taatgccattattttacacctaaaagg

SEQ ID NO: 11000 - DNA, 27 bp, Artificial sequence
  SiRNA target sequence
aatgccattattttacacctaaaagga

SEQ ID NO: 11001 - DNA, 27 bp, Artificial sequence
  SiRNA target sequence
atgccattattttacacctaaaaggaa

SEQ ID NO: 11002 - DNA, 27 bp, Artificial sequence
  SiRNA target sequence
tgccattattttacacctaaaaggaaa

SEQ ID NO: 11003 - DNA, 27 bp, Artificial sequence
  SiRNA target sequence
gccattattttacacctaaaaggaaaa

SEQ ID NO: 11004 - DNA, 27 bp, Artificial sequence
  SiRNA target sequence
ccattattttacacctaaaaggaaaaa

SEQ ID NO: 11005 - DNA, 27 bp, Artificial sequence
  SiRNA target sequence
cattattttacacctaaaaggaaaaaa

SEQ ID NO: 11006 - DNA, 27 bp, Artificial sequence
  SiRNA target sequence
attattttacacctaaaaggaaaaaaa

SEQ ID NO: 11007 - DNA, 27 bp, Artificial sequence
  SiRNA target sequence
ttattttacacctaaaaggaaaaaaag

SEQ ID NO: 11008 - DNA, 27 bp, Artificial sequence
  SiRNA target sequence
tattttacacctaaaaggaaaaaaaga

SEQ ID NO: 11009 - DNA, 27 bp, Artificial sequence
  SiRNA target sequence
attttacacctaaaaggaaaaaaagaa

SEQ ID NO: 11010 - DNA, 27 bp, Artificial sequence
  SiRNA target sequence
ttttacacctaaaaggaaaaaaagaac

SEQ ID NO: 11011 - DNA, 27 bp, Artificial sequence
  SiRNA target sequence
tttacacctaaaaggaaaaaaagaaca

SEQ ID NO: 11012 - DNA, 27 bp, Artificial sequence
  SiRNA target sequence
ttacacctaaaaggaaaaaaagaacag

SEQ ID NO: 11013 - DNA, 27 bp, Artificial sequence
  SiRNA target sequence
tacacctaaaaggaaaaaaagaacagg

SEQ ID NO: 11014 - DNA, 27 bp, Artificial sequence
  SiRNA target sequence
acacctaaaaggaaaaaaagaacaggc

SEQ ID NO: 11015 - DNA, 27 bp, Artificial sequence
  SiRNA target sequence
cacctaaaaggaaaaaaagaacaggca

SEQ ID NO: 11016 - DNA, 27 bp, Artificial sequence
  SiRNA target sequence
acctaaaaggaaaaaaagaacaggcaa

SEQ ID NO: 11017 - DNA, 27 bp, Artificial sequence
  SiRNA target sequence
cctaaaaggaaaaaaagaacaggcaat

SEQ ID NO: 11018 - DNA, 27 bp, Artificial sequence
  SiRNA target sequence
ctaaaaggaaaaaaagaacaggcaatt

SEQ ID NO: 11019 - DNA, 27 bp, Artificial sequence
  SiRNA target sequence
taaaaggaaaaaaagaacaggcaattc

SEQ ID NO: 11020 - DNA, 27 bp, Artificial sequence
  SiRNA target sequence
aaaaggaaaaaaagaacaggcaattct

SEQ ID NO: 11021 - DNA, 27 bp, Artificial sequence
  SiRNA target sequence
aaaggaaaaaaagaacaggcaattctt

SEQ ID NO: 11022 - DNA, 27 bp, Artificial sequence
  SiRNA target sequence
aaggaaaaaaagaacaggcaattcttt

SEQ ID NO: 11023 - DNA, 27 bp, Artificial sequence
  SiRNA target sequence
aggaaaaaaagaacaggcaattctttt

SEQ ID NO: 11024 - DNA, 27 bp, Artificial sequence
  SiRNA target sequence
ggaaaaaaagaacaggcaattctttta

SEQ ID NO: 11025 - DNA, 27 bp, Artificial sequence
  SiRNA target sequence
gaaaaaaagaacaggcaattcttttat

SEQ ID NO: 11026 - DNA, 27 bp, Artificial sequence
  SiRNA target sequence
aaaaaaagaacaggcaattcttttatt

SEQ ID NO: 11027 - DNA, 27 bp, Artificial sequence
  SiRNA target sequence
aaaaaagaacaggcaattcttttatta

SEQ ID NO: 11028 - DNA, 27 bp, Artificial sequence
  SiRNA target sequence
aaaaagaacaggcaattcttttattag

SEQ ID NO: 11029 - DNA, 27 bp, Artificial sequence
  SiRNA target sequence
aaaagaacaggcaattcttttattaga

SEQ ID NO: 11030 - DNA, 27 bp, Artificial sequence
  SiRNA target sequence
aaagaacaggcaattcttttattagaa

SEQ ID NO: 11031 - DNA, 27 bp, Artificial sequence
  SiRNA target sequence
aagaacaggcaattcttttattagaaa

SEQ ID NO: 11032 - DNA, 27 bp, Artificial sequence
  SiRNA target sequence
agaacaggcaattcttttattagaaaa

SEQ ID NO: 11033 - DNA, 27 bp, Artificial sequence
  SiRNA target sequence
gaacaggcaattcttttattagaaaaa

SEQ ID NO: 11034 - DNA, 27 bp, Artificial sequence
  SiRNA target sequence
aacaggcaattcttttattagaaaaat

SEQ ID NO: 11035 - DNA, 27 bp, Artificial sequence
  SiRNA target sequence
acaggcaattcttttattagaaaaatc

SEQ ID NO: 11036 - DNA, 27 bp, Artificial sequence
  SiRNA target sequence
caggcaattcttttattagaaaaatct

SEQ ID NO: 11037 - DNA, 27 bp, Artificial sequence
  SiRNA target sequence
aggcaattcttttattagaaaaatcta

SEQ ID NO: 11038 - DNA, 27 bp, Artificial sequence
  SiRNA target sequence
ggcaattcttttattagaaaaatctac

SEQ ID NO: 11039 - DNA, 27 bp, Artificial sequence
  SiRNA target sequence
gcaattcttttattagaaaaatctact

SEQ ID NO: 11040 - DNA, 27 bp, Artificial sequence
  SiRNA target sequence
caattcttttattagaaaaatctactt

SEQ ID NO: 11041 - DNA, 27 bp, Artificial sequence
  SiRNA target sequence
aattcttttattagaaaaatctactta

SEQ ID NO: 11042 - DNA, 27 bp, Artificial sequence
  SiRNA target sequence
attcttttattagaaaaatctacttat

SEQ ID NO: 11043 - DNA, 27 bp, Artificial sequence
  SiRNA target sequence
ttcttttattagaaaaatctacttata

SEQ ID NO: 11044 - DNA, 27 bp, Artificial sequence
  SiRNA target sequence
tcttttattagaaaaatctacttataa

SEQ ID NO: 11045 - DNA, 27 bp, Artificial sequence
  SiRNA target sequence
cttttattagaaaaatctacttataaa

SEQ ID NO: 11046 - DNA, 27 bp, Artificial sequence
  SiRNA target sequence
ttttattagaaaaatctacttataaat

SEQ ID NO: 11047 - DNA, 27 bp, Artificial sequence
  SiRNA target sequence
tttattagaaaaatctacttataaata

SEQ ID NO: 11048 - DNA, 27 bp, Artificial sequence
  SiRNA target sequence
ttattagaaaaatctacttataaatac

SEQ ID NO: 11049 - DNA, 27 bp, Artificial sequence
  SiRNA target sequence
tattagaaaaatctacttataaataca

SEQ ID NO: 11050 - DNA, 27 bp, Artificial sequence
  SiRNA target sequence
attagaaaaatctacttataaatacag

SEQ ID NO: 11051 - DNA, 27 bp, Artificial sequence
  SiRNA target sequence
ttagaaaaatctacttataaatacagt

SEQ ID NO: 11052 - DNA, 27 bp, Artificial sequence
  SiRNA target sequence
tagaaaaatctacttataaatacagta

SEQ ID NO: 11053 - DNA, 27 bp, Artificial sequence
  SiRNA target sequence
agaaaaatctacttataaatacagtat

SEQ ID NO: 11054 - DNA, 27 bp, Artificial sequence
  SiRNA target sequence
gaaaaatctacttataaatacagtatc

SEQ ID NO: 11055 - DNA, 27 bp, Artificial sequence
  SiRNA target sequence
aaaaatctacttataaatacagtatct

SEQ ID NO: 11056 - DNA, 27 bp, Artificial sequence
  SiRNA target sequence
aaaatctacttataaatacagtatctt

SEQ ID NO: 11057 - DNA, 27 bp, Artificial sequence
  SiRNA target sequence
aaatctacttataaatacagtatcttg

SEQ ID NO: 11058 - DNA, 27 bp, Artificial sequence
  SiRNA target sequence
aatctacttataaatacagtatcttgt

SEQ ID NO: 11059 - DNA, 27 bp, Artificial sequence
  SiRNA target sequence
atctacttataaatacagtatcttgta

SEQ ID NO: 11060 - DNA, 27 bp, Artificial sequence
  SiRNA target sequence
tctacttataaatacagtatcttgtat

SEQ ID NO: 11061 - DNA, 27 bp, Artificial sequence
  SiRNA target sequence
ctacttataaatacagtatcttgtata

SEQ ID NO: 11062 - DNA, 27 bp, Artificial sequence
  SiRNA target sequence
tacttataaatacagtatcttgtatag

SEQ ID NO: 11063 - DNA, 27 bp, Artificial sequence
  SiRNA target sequence
acttataaatacagtatcttgtataga

SEQ ID NO: 11064 - DNA, 27 bp, Artificial sequence
  SiRNA target sequence
cttataaatacagtatcttgtatagag

SEQ ID NO: 11065 - DNA, 27 bp, Artificial sequence
  SiRNA target sequence
ttataaatacagtatcttgtatagagc

SEQ ID NO: 11066 - DNA, 27 bp, Artificial sequence
  SiRNA target sequence
tataaatacagtatcttgtatagagca

SEQ ID NO: 11067 - DNA, 27 bp, Artificial sequence
  SiRNA target sequence
ataaatacagtatcttgtatagagcat

SEQ ID NO: 11068 - DNA, 27 bp, Artificial sequence
  SiRNA target sequence
taaatacagtatcttgtatagagcata

SEQ ID NO: 11069 - DNA, 27 bp, Artificial sequence
  SiRNA target sequence
aaatacagtatcttgtatagagcatat

SEQ ID NO: 11070 - DNA, 27 bp, Artificial sequence
  SiRNA target sequence
aatacagtatcttgtatagagcatatt

SEQ ID NO: 11071 - DNA, 27 bp, Artificial sequence
  SiRNA target sequence
atacagtatcttgtatagagcatattt

SEQ ID NO: 11072 - DNA, 27 bp, Artificial sequence
  SiRNA target sequence
tacagtatcttgtatagagcatatttt

SEQ ID NO: 11073 - DNA, 27 bp, Artificial sequence
  SiRNA target sequence
acagtatcttgtatagagcatattttc

SEQ ID NO: 11074 - DNA, 27 bp, Artificial sequence
  SiRNA target sequence
cagtatcttgtatagagcatattttct

SEQ ID NO: 11075 - DNA, 27 bp, Artificial sequence
  SiRNA target sequence
agtatcttgtatagagcatattttctt

SEQ ID NO: 11076 - DNA, 27 bp, Artificial sequence
  SiRNA target sequence
gtatcttgtatagagcatattttctta

SEQ ID NO: 11077 - DNA, 27 bp, Artificial sequence
  SiRNA target sequence
tatcttgtatagagcatattttcttac

SEQ ID NO: 11078 - DNA, 27 bp, Artificial sequence
  SiRNA target sequence
atcttgtatagagcatattttcttaca

SEQ ID NO: 11079 - DNA, 27 bp, Artificial sequence
  SiRNA target sequence
tcttgtatagagcatattttcttacat

SEQ ID NO: 11080 - DNA, 27 bp, Artificial sequence
  SiRNA target sequence
cttgtatagagcatattttcttacatt

SEQ ID NO: 11081 - DNA, 27 bp, Artificial sequence
  SiRNA target sequence
ttgtatagagcatattttcttacattg

SEQ ID NO: 11082 - DNA, 27 bp, Artificial sequence
  SiRNA target sequence
tgtatagagcatattttcttacattga

SEQ ID NO: 11083 - DNA, 27 bp, Artificial sequence
  SiRNA target sequence
gtatagagcatattttcttacattgaa

SEQ ID NO: 11084 - DNA, 27 bp, Artificial sequence
  SiRNA target sequence
tatagagcatattttcttacattgaag

SEQ ID NO: 11085 - DNA, 27 bp, Artificial sequence
  SiRNA target sequence
atagagcatattttcttacattgaaga

SEQ ID NO: 11086 - DNA, 27 bp, Artificial sequence
  SiRNA target sequence
tagagcatattttcttacattgaagaa

SEQ ID NO: 11087 - DNA, 27 bp, Artificial sequence
  SiRNA target sequence
agagcatattttcttacattgaagaat

SEQ ID NO: 11088 - DNA, 27 bp, Artificial sequence
  SiRNA target sequence
gagcatattttcttacattgaagaatg

SEQ ID NO: 11089 - DNA, 27 bp, Artificial sequence
  SiRNA target sequence
agcatattttcttacattgaagaatga

SEQ ID NO: 11090 - DNA, 27 bp, Artificial sequence
  SiRNA target sequence
gcatattttcttacattgaagaatgaa

SEQ ID NO: 11091 - DNA, 27 bp, Artificial sequence
  SiRNA target sequence
catattttcttacattgaagaatgaat

SEQ ID NO: 11092 - DNA, 27 bp, Artificial sequence
  SiRNA target sequence
atattttcttacattgaagaatgaata

SEQ ID NO: 11093 - DNA, 27 bp, Artificial sequence
  SiRNA target sequence
tattttcttacattgaagaatgaatat

SEQ ID NO: 11094 - DNA, 27 bp, Artificial sequence
  SiRNA target sequence
attttcttacattgaagaatgaatata

SEQ ID NO: 11095 - DNA, 27 bp, Artificial sequence
  SiRNA target sequence
ttttcttacattgaagaatgaatatat

SEQ ID NO: 11096 - DNA, 27 bp, Artificial sequence
  SiRNA target sequence
tttcttacattgaagaatgaatatatt

SEQ ID NO: 11097 - DNA, 27 bp, Artificial sequence
  SiRNA target sequence
ttcttacattgaagaatgaatatattt

SEQ ID NO: 11098 - DNA, 27 bp, Artificial sequence
  SiRNA target sequence
tcttacattgaagaatgaatatatttc

SEQ ID NO: 11099 - DNA, 27 bp, Artificial sequence
  SiRNA target sequence
cttacattgaagaatgaatatatttca

SEQ ID NO: 11100 - DNA, 27 bp, Artificial sequence
  SiRNA target sequence
ttacattgaagaatgaatatatttcat

SEQ ID NO: 11101 - DNA, 27 bp, Artificial sequence
  SiRNA target sequence
tacattgaagaatgaatatatttcatc

SEQ ID NO: 11102 - DNA, 27 bp, Artificial sequence
  SiRNA target sequence
acattgaagaatgaatatatttcatct

SEQ ID NO: 11103 - DNA, 27 bp, Artificial sequence
  SiRNA target sequence
cattgaagaatgaatatatttcatctt

SEQ ID NO: 11104 - DNA, 27 bp, Artificial sequence
  SiRNA target sequence
attgaagaatgaatatatttcatcttc

SEQ ID NO: 11105 - DNA, 27 bp, Artificial sequence
  SiRNA target sequence
ttgaagaatgaatatatttcatcttca

SEQ ID NO: 11106 - DNA, 27 bp, Artificial sequence
  SiRNA target sequence
tgaagaatgaatatatttcatcttcat

SEQ ID NO: 11107 - DNA, 27 bp, Artificial sequence
  SiRNA target sequence
gaagaatgaatatatttcatcttcatt

SEQ ID NO: 11108 - DNA, 27 bp, Artificial sequence
  SiRNA target sequence
aagaatgaatatatttcatcttcattg

SEQ ID NO: 11109 - DNA, 27 bp, Artificial sequence
  SiRNA target sequence
agaatgaatatatttcatcttcattgc

SEQ ID NO: 11110 - DNA, 27 bp, Artificial sequence
  SiRNA target sequence
gaatgaatatatttcatcttcattgcc

SEQ ID NO: 11111 - DNA, 27 bp, Artificial sequence
  SiRNA target sequence
aatgaatatatttcatcttcattgcct

SEQ ID NO: 11112 - DNA, 27 bp, Artificial sequence
  SiRNA target sequence
atgaatatatttcatcttcattgcctt

SEQ ID NO: 11113 - DNA, 27 bp, Artificial sequence
  SiRNA target sequence
tgaatatatttcatcttcattgccttt

SEQ ID NO: 11114 - DNA, 27 bp, Artificial sequence
  SiRNA target sequence
gaatatatttcatcttcattgccttta

SEQ ID NO: 11115 - DNA, 27 bp, Artificial sequence
  SiRNA target sequence
aatatatttcatcttcattgcctttag

SEQ ID NO: 11116 - DNA, 27 bp, Artificial sequence
  SiRNA target sequence
atatatttcatcttcattgcctttaga

SEQ ID NO: 11117 - DNA, 27 bp, Artificial sequence
  SiRNA target sequence
tatatttcatcttcattgcctttagat

SEQ ID NO: 11118 - DNA, 27 bp, Artificial sequence
  SiRNA target sequence
atatttcatcttcattgcctttagatg

SEQ ID NO: 11119 - DNA, 27 bp, Artificial sequence
  SiRNA target sequence
tatttcatcttcattgcctttagatga

SEQ ID NO: 11120 - DNA, 27 bp, Artificial sequence
  SiRNA target sequence
atttcatcttcattgcctttagatgac

SEQ ID NO: 11121 - DNA, 27 bp, Artificial sequence
  SiRNA target sequence
tttcatcttcattgcctttagatgacg

SEQ ID NO: 11122 - DNA, 27 bp, Artificial sequence
  SiRNA target sequence
ttcatcttcattgcctttagatgacga

SEQ ID NO: 11123 - DNA, 27 bp, Artificial sequence
  SiRNA target sequence
tcatcttcattgcctttagatgacgag

SEQ ID NO: 11124 - DNA, 27 bp, Artificial sequence
  SiRNA target sequence
catcttcattgcctttagatgacgaga

SEQ ID NO: 11125 - DNA, 27 bp, Artificial sequence
  SiRNA target sequence
atcttcattgcctttagatgacgagat

SEQ ID NO: 11126 - DNA, 27 bp, Artificial sequence
  SiRNA target sequence
tcttcattgcctttagatgacgagatt

SEQ ID NO: 11127 - DNA, 27 bp, Artificial sequence
  SiRNA target sequence
cttcattgcctttagatgacgagatta

SEQ ID NO: 11128 - DNA, 27 bp, Artificial sequence
  SiRNA target sequence
ttcattgcctttagatgacgagattac

SEQ ID NO: 11129 - DNA, 27 bp, Artificial sequence
  SiRNA target sequence
tcattgcctttagatgacgagattact

SEQ ID NO: 11130 - DNA, 27 bp, Artificial sequence
  SiRNA target sequence
cattgcctttagatgacgagattacta

SEQ ID NO: 11131 - DNA, 27 bp, Artificial sequence
  SiRNA target sequence
attgcctttagatgacgagattactac

SEQ ID NO: 11132 - DNA, 27 bp, Artificial sequence
  SiRNA target sequence
ttgcctttagatgacgagattactacg

SEQ ID NO: 11133 - DNA, 27 bp, Artificial sequence
  SiRNA target sequence
tgcctttagatgacgagattactacgc

SEQ ID NO: 11134 - DNA, 27 bp, Artificial sequence
  SiRNA target sequence
gcctttagatgacgagattactacgct

SEQ ID NO: 11135 - DNA, 27 bp, Artificial sequence
  SiRNA target sequence
cctttagatgacgagattactacgctt

SEQ ID NO: 11136 - DNA, 27 bp, Artificial sequence
  SiRNA target sequence
ctttagatgacgagattactacgcttt

SEQ ID NO: 11137 - DNA, 27 bp, Artificial sequence
  SiRNA target sequence
tttagatgacgagattactacgcttta

SEQ ID NO: 11138 - DNA, 27 bp, Artificial sequence
  SiRNA target sequence
ttagatgacgagattactacgctttac

SEQ ID NO: 11139 - DNA, 27 bp, Artificial sequence
  SiRNA target sequence
tagatgacgagattactacgctttact

SEQ ID NO: 11140 - DNA, 27 bp, Artificial sequence
  SiRNA target sequence
agatgacgagattactacgctttactt

SEQ ID NO: 11141 - DNA, 27 bp, Artificial sequence
  SiRNA target sequence
gatgacgagattactacgctttacttg

SEQ ID NO: 11142 - DNA, 27 bp, Artificial sequence
  SiRNA target sequence
atgacgagattactacgctttacttgt

SEQ ID NO: 11143 - DNA, 27 bp, Artificial sequence
  SiRNA target sequence
tgacgagattactacgctttacttgta

SEQ ID NO: 11144 - DNA, 27 bp, Artificial sequence
  SiRNA target sequence
gacgagattactacgctttacttgtat

SEQ ID NO: 11145 - DNA, 27 bp, Artificial sequence
  SiRNA target sequence
acgagattactacgctttacttgtatt

SEQ ID NO: 11146 - DNA, 27 bp, Artificial sequence
  SiRNA target sequence
cgagattactacgctttacttgtattc

SEQ ID NO: 11147 - DNA, 27 bp, Artificial sequence
  SiRNA target sequence
gagattactacgctttacttgtattct

SEQ ID NO: 11148 - DNA, 27 bp, Artificial sequence
  SiRNA target sequence
agattactacgctttacttgtattcta

SEQ ID NO: 11149 - DNA, 27 bp, Artificial sequence
  SiRNA target sequence
gattactacgctttacttgtattctaa

SEQ ID NO: 11150 - DNA, 27 bp, Artificial sequence
  SiRNA target sequence
attactacgctttacttgtattctaag

SEQ ID NO: 11151 - DNA, 27 bp, Artificial sequence
  SiRNA target sequence
ttactacgctttacttgtattctaaga

SEQ ID NO: 11152 - DNA, 27 bp, Artificial sequence
  SiRNA target sequence
tactacgctttacttgtattctaagat

SEQ ID NO: 11153 - DNA, 27 bp, Artificial sequence
  SiRNA target sequence
actacgctttacttgtattctaagatt

SEQ ID NO: 11154 - DNA, 27 bp, Artificial sequence
  SiRNA target sequence
ctacgctttacttgtattctaagattt

SEQ ID NO: 11155 - DNA, 27 bp, Artificial sequence
  SiRNA target sequence
tacgctttacttgtattctaagatttt

SEQ ID NO: 11156 - DNA, 27 bp, Artificial sequence
  SiRNA target sequence
acgctttacttgtattctaagattttt

SEQ ID NO: 11157 - DNA, 27 bp, Artificial sequence
  SiRNA target sequence
cgctttacttgtattctaagattttta

SEQ ID NO: 11158 - DNA, 27 bp, Artificial sequence
  SiRNA target sequence
gctttacttgtattctaagatttttaa

SEQ ID NO: 11159 - DNA, 27 bp, Artificial sequence
  SiRNA target sequence
ctttacttgtattctaagatttttaaa

SEQ ID NO: 11160 - DNA, 27 bp, Artificial sequence
  SiRNA target sequence
tttacttgtattctaagatttttaaag

SEQ ID NO: 11161 - DNA, 27 bp, Artificial sequence
  SiRNA target sequence
ttacttgtattctaagatttttaaaga

SEQ ID NO: 11162 - DNA, 27 bp, Artificial sequence
  SiRNA target sequence
tacttgtattctaagatttttaaagat

SEQ ID NO: 11163 - DNA, 27 bp, Artificial sequence
  SiRNA target sequence
acttgtattctaagatttttaaagata

SEQ ID NO: 11164 - DNA, 27 bp, Artificial sequence
  SiRNA target sequence
cttgtattctaagatttttaaagataa

SEQ ID NO: 11165 - DNA, 27 bp, Artificial sequence
  SiRNA target sequence
ttgtattctaagatttttaaagataaa

SEQ ID NO: 11166 - DNA, 27 bp, Artificial sequence
  SiRNA target sequence
tgtattctaagatttttaaagataaat

SEQ ID NO: 11167 - DNA, 27 bp, Artificial sequence
  SiRNA target sequence
gtattctaagatttttaaagataaatc

SEQ ID NO: 11168 - DNA, 27 bp, Artificial sequence
  SiRNA target sequence
tattctaagatttttaaagataaatct

SEQ ID NO: 11169 - DNA, 27 bp, Artificial sequence
  SiRNA target sequence
attctaagatttttaaagataaatctg

SEQ ID NO: 11170 - DNA, 27 bp, Artificial sequence
  SiRNA target sequence
ttctaagatttttaaagataaatctga

SEQ ID NO: 11171 - DNA, 27 bp, Artificial sequence
  SiRNA target sequence
tctaagatttttaaagataaatctgat

SEQ ID NO: 11172 - DNA, 27 bp, Artificial sequence
  SiRNA target sequence
ctaagatttttaaagataaatctgata

SEQ ID NO: 11173 - DNA, 27 bp, Artificial sequence
  SiRNA target sequence
taagatttttaaagataaatctgatac

SEQ ID NO: 11174 - DNA, 27 bp, Artificial sequence
  SiRNA target sequence
aagatttttaaagataaatctgatact

SEQ ID NO: 11175 - DNA, 27 bp, Artificial sequence
  SiRNA target sequence
agatttttaaagataaatctgatactt

SEQ ID NO: 11176 - DNA, 27 bp, Artificial sequence
  SiRNA target sequence
gatttttaaagataaatctgatactta

SEQ ID NO: 11177 - DNA, 27 bp, Artificial sequence
  SiRNA target sequence
atttttaaagataaatctgatacttac

SEQ ID NO: 11178 - DNA, 27 bp, Artificial sequence
  SiRNA target sequence
tttttaaagataaatctgatacttacc

SEQ ID NO: 11179 - DNA, 27 bp, Artificial sequence
  SiRNA target sequence
ttttaaagataaatctgatacttacct

SEQ ID NO: 11180 - DNA, 27 bp, Artificial sequence
  SiRNA target sequence
tttaaagataaatctgatacttacctt

SEQ ID NO: 11181 - DNA, 27 bp, Artificial sequence
  SiRNA target sequence
ttaaagataaatctgatacttacctta

SEQ ID NO: 11182 - DNA, 27 bp, Artificial sequence
  SiRNA target sequence
taaagataaatctgatacttaccttaa

SEQ ID NO: 11183 - DNA, 27 bp, Artificial sequence
  SiRNA target sequence
aaagataaatctgatacttaccttaaa

SEQ ID NO: 11184 - DNA, 27 bp, Artificial sequence
  SiRNA target sequence
aagataaatctgatacttaccttaaat

SEQ ID NO: 11185 - DNA, 27 bp, Artificial sequence
  SiRNA target sequence
agataaatctgatacttaccttaaatc

SEQ ID NO: 11186 - DNA, 27 bp, Artificial sequence
  SiRNA target sequence
gataaatctgatacttaccttaaatct

SEQ ID NO: 11187 - DNA, 27 bp, Artificial sequence
  SiRNA target sequence
ataaatctgatacttaccttaaatctg

SEQ ID NO: 11188 - DNA, 27 bp, Artificial sequence
  SiRNA target sequence
taaatctgatacttaccttaaatctgc

SEQ ID NO: 11189 - DNA, 27 bp, Artificial sequence
  SiRNA target sequence
aaatctgatacttaccttaaatctgct

SEQ ID NO: 11190 - DNA, 27 bp, Artificial sequence
  SiRNA target sequence
aatctgatacttaccttaaatctgcta

SEQ ID NO: 11191 - DNA, 27 bp, Artificial sequence
  SiRNA target sequence
atctgatacttaccttaaatctgctat

SEQ ID NO: 11192 - DNA, 27 bp, Artificial sequence
  SiRNA target sequence
tctgatacttaccttaaatctgctata

SEQ ID NO: 11193 - DNA, 27 bp, Artificial sequence
  SiRNA target sequence
ctgatacttaccttaaatctgctatag

SEQ ID NO: 11194 - DNA, 27 bp, Artificial sequence
  SiRNA target sequence
tgatacttaccttaaatctgctataga

SEQ ID NO: 11195 - DNA, 27 bp, Artificial sequence
  SiRNA target sequence
gatacttaccttaaatctgctatagat

SEQ ID NO: 11196 - DNA, 27 bp, Artificial sequence
  SiRNA target sequence
atacttaccttaaatctgctatagata

SEQ ID NO: 11197 - DNA, 27 bp, Artificial sequence
  SiRNA target sequence
tacttaccttaaatctgctatagataa

SEQ ID NO: 11198 - DNA, 27 bp, Artificial sequence
  SiRNA target sequence
acttaccttaaatctgctatagataaa

SEQ ID NO: 11199 - DNA, 27 bp, Artificial sequence
  SiRNA target sequence
cttaccttaaatctgctatagataaat

SEQ ID NO: 11200 - DNA, 27 bp, Artificial sequence
  SiRNA target sequence
ttaccttaaatctgctatagataaatc

SEQ ID NO: 11201 - DNA, 27 bp, Artificial sequence
  SiRNA target sequence
taccttaaatctgctatagataaatca

SEQ ID NO: 11202 - DNA, 27 bp, Artificial sequence
  SiRNA target sequence
accttaaatctgctatagataaatcag

SEQ ID NO: 11203 - DNA, 27 bp, Artificial sequence
  SiRNA target sequence
ccttaaatctgctatagataaatcagt

SEQ ID NO: 11204 - DNA, 27 bp, Artificial sequence
  SiRNA target sequence
cttaaatctgctatagataaatcagta

SEQ ID NO: 11205 - DNA, 27 bp, Artificial sequence
  SiRNA target sequence
ttaaatctgctatagataaatcagtag

SEQ ID NO: 11206 - DNA, 27 bp, Artificial sequence
  SiRNA target sequence
taaatctgctatagataaatcagtaga

SEQ ID NO: 11207 - DNA, 27 bp, Artificial sequence
  SiRNA target sequence
aaatctgctatagataaatcagtagat

SEQ ID NO: 11208 - DNA, 27 bp, Artificial sequence
  SiRNA target sequence
aatctgctatagataaatcagtagatc

SEQ ID NO: 11209 - DNA, 27 bp, Artificial sequence
  SiRNA target sequence
atctgctatagataaatcagtagatct

SEQ ID NO: 11210 - DNA, 27 bp, Artificial sequence
  SiRNA target sequence
tctgctatagataaatcagtagatcta

SEQ ID NO: 11211 - DNA, 27 bp, Artificial sequence
  SiRNA target sequence
ctgctatagataaatcagtagatctac

SEQ ID NO: 11212 - DNA, 27 bp, Artificial sequence
  SiRNA target sequence
tgctatagataaatcagtagatctacc

SEQ ID NO: 11213 - DNA, 27 bp, Artificial sequence
  SiRNA target sequence
gctatagataaatcagtagatctacct

SEQ ID NO: 11214 - DNA, 27 bp, Artificial sequence
  SiRNA target sequence
ctatagataaatcagtagatctaccta

SEQ ID NO: 11215 - DNA, 27 bp, Artificial sequence
  SiRNA target sequence
tatagataaatcagtagatctacctat

SEQ ID NO: 11216 - DNA, 27 bp, Artificial sequence
  SiRNA target sequence
atagataaatcagtagatctacctatt

SEQ ID NO: 11217 - DNA, 27 bp, Artificial sequence
  SiRNA target sequence
tagataaatcagtagatctacctattg

SEQ ID NO: 11218 - DNA, 27 bp, Artificial sequence
  SiRNA target sequence
agataaatcagtagatctacctattga

SEQ ID NO: 11219 - DNA, 27 bp, Artificial sequence
  SiRNA target sequence
gataaatcagtagatctacctattgaa

SEQ ID NO: 11220 - DNA, 27 bp, Artificial sequence
  SiRNA target sequence
ataaatcagtagatctacctattgaac

SEQ ID NO: 11221 - DNA, 27 bp, Artificial sequence
  SiRNA target sequence
taaatcagtagatctacctattgaaca

SEQ ID NO: 11222 - DNA, 27 bp, Artificial sequence
  SiRNA target sequence
aaatcagtagatctacctattgaacag

SEQ ID NO: 11223 - DNA, 27 bp, Artificial sequence
  SiRNA target sequence
aatcagtagatctacctattgaacaga

SEQ ID NO: 11224 - DNA, 27 bp, Artificial sequence
  SiRNA target sequence
atcagtagatctacctattgaacagaa

SEQ ID NO: 11225 - DNA, 27 bp, Artificial sequence
  SiRNA target sequence
tcagtagatctacctattgaacagaaa

SEQ ID NO: 11226 - DNA, 27 bp, Artificial sequence
  SiRNA target sequence
cagtagatctacctattgaacagaaag

SEQ ID NO: 11227 - DNA, 27 bp, Artificial sequence
  SiRNA target sequence
agtagatctacctattgaacagaaaga

SEQ ID NO: 11228 - DNA, 27 bp, Artificial sequence
  SiRNA target sequence
gtagatctacctattgaacagaaagac

SEQ ID NO: 11229 - DNA, 27 bp, Artificial sequence
  SiRNA target sequence
tagatctacctattgaacagaaagact

SEQ ID NO: 11230 - DNA, 27 bp, Artificial sequence
  SiRNA target sequence
agatctacctattgaacagaaagactt

SEQ ID NO: 11231 - DNA, 27 bp, Artificial sequence
  SiRNA target sequence
gatctacctattgaacagaaagacttt

SEQ ID NO: 11232 - DNA, 27 bp, Artificial sequence
  SiRNA target sequence
atctacctattgaacagaaagactttc

SEQ ID NO: 11233 - DNA, 27 bp, Artificial sequence
  SiRNA target sequence
tctacctattgaacagaaagactttct

SEQ ID NO: 11234 - DNA, 27 bp, Artificial sequence
  SiRNA target sequence
ctacctattgaacagaaagactttctg

SEQ ID NO: 11235 - DNA, 27 bp, Artificial sequence
  SiRNA target sequence
tacctattgaacagaaagactttctgt

SEQ ID NO: 11236 - DNA, 27 bp, Artificial sequence
  SiRNA target sequence
acctattgaacagaaagactttctgta

SEQ ID NO: 11237 - DNA, 27 bp, Artificial sequence
  SiRNA target sequence
cctattgaacagaaagactttctgtac

SEQ ID NO: 11238 - DNA, 27 bp, Artificial sequence
  SiRNA target sequence
ctattgaacagaaagactttctgtacg

SEQ ID NO: 11239 - DNA, 27 bp, Artificial sequence
  SiRNA target sequence
tattgaacagaaagactttctgtacgt

SEQ ID NO: 11240 - DNA, 27 bp, Artificial sequence
  SiRNA target sequence
attgaacagaaagactttctgtacgta

SEQ ID NO: 11241 - DNA, 27 bp, Artificial sequence
  SiRNA target sequence
ttgaacagaaagactttctgtacgtag

SEQ ID NO: 11242 - DNA, 27 bp, Artificial sequence
  SiRNA target sequence
tgaacagaaagactttctgtacgtaga

SEQ ID NO: 11243 - DNA, 27 bp, Artificial sequence
  SiRNA target sequence
gaacagaaagactttctgtacgtagat

SEQ ID NO: 11244 - DNA, 27 bp, Artificial sequence
  SiRNA target sequence
aacagaaagactttctgtacgtagatc

SEQ ID NO: 11245 - DNA, 27 bp, Artificial sequence
  SiRNA target sequence
acagaaagactttctgtacgtagatct

SEQ ID NO: 11246 - DNA, 27 bp, Artificial sequence
  SiRNA target sequence
cagaaagactttctgtacgtagatctt

SEQ ID NO: 11247 - DNA, 27 bp, Artificial sequence
  SiRNA target sequence
agaaagactttctgtacgtagatcttc

SEQ ID NO: 11248 - DNA, 27 bp, Artificial sequence
  SiRNA target sequence
gaaagactttctgtacgtagatcttct

SEQ ID NO: 11249 - DNA, 27 bp, Artificial sequence
  SiRNA target sequence
aaagactttctgtacgtagatcttctt

SEQ ID NO: 11250 - DNA, 27 bp, Artificial sequence
  SiRNA target sequence
aagactttctgtacgtagatcttcttg

SEQ ID NO: 11251 - DNA, 27 bp, Artificial sequence
  SiRNA target sequence
agactttctgtacgtagatcttcttgt

SEQ ID NO: 11252 - DNA, 27 bp, Artificial sequence
  SiRNA target sequence
gactttctgtacgtagatcttcttgta

SEQ ID NO: 11253 - DNA, 27 bp, Artificial sequence
  SiRNA target sequence
actttctgtacgtagatcttcttgtat

SEQ ID NO: 11254 - DNA, 27 bp, Artificial sequence
  SiRNA target sequence
ctttctgtacgtagatcttcttgtatt

SEQ ID NO: 11255 - DNA, 27 bp, Artificial sequence
  SiRNA target sequence
tttctgtacgtagatcttcttgtattt

SEQ ID NO: 11256 - DNA, 27 bp, Artificial sequence
  SiRNA target sequence
ttctgtacgtagatcttcttgtatttt

SEQ ID NO: 11257 - DNA, 27 bp, Artificial sequence
  SiRNA target sequence
tctgtacgtagatcttcttgtatttta

SEQ ID NO: 11258 - DNA, 27 bp, Artificial sequence
  SiRNA target sequence
ctgtacgtagatcttcttgtattttac

SEQ ID NO: 11259 - DNA, 27 bp, Artificial sequence
  SiRNA target sequence
tgtacgtagatcttcttgtattttaca

SEQ ID NO: 11260 - DNA, 27 bp, Artificial sequence
  SiRNA target sequence
gtacgtagatcttcttgtattttacat

SEQ ID NO: 11261 - DNA, 27 bp, Artificial sequence
  SiRNA target sequence
tacgtagatcttcttgtattttacatt

SEQ ID NO: 11262 - DNA, 27 bp, Artificial sequence
  SiRNA target sequence
acgtagatcttcttgtattttacattt

SEQ ID NO: 11263 - DNA, 27 bp, Artificial sequence
  SiRNA target sequence
cgtagatcttcttgtattttacatttc

SEQ ID NO: 11264 - DNA, 27 bp, Artificial sequence
  SiRNA target sequence
gtagatcttcttgtattttacatttct

SEQ ID NO: 11265 - DNA, 27 bp, Artificial sequence
  SiRNA target sequence
tagatcttcttgtattttacatttcta

SEQ ID NO: 11266 - DNA, 27 bp, Artificial sequence
  SiRNA target sequence
agatcttcttgtattttacatttctaa

SEQ ID NO: 11267 - DNA, 27 bp, Artificial sequence
  SiRNA target sequence
gatcttcttgtattttacatttctaaa

SEQ ID NO: 11268 - DNA, 27 bp, Artificial sequence
  SiRNA target sequence
atcttcttgtattttacatttctaaaa

SEQ ID NO: 11269 - DNA, 27 bp, Artificial sequence
  SiRNA target sequence
tcttcttgtattttacatttctaaaaa

SEQ ID NO: 11270 - DNA, 27 bp, Artificial sequence
  SiRNA target sequence
cttcttgtattttacatttctaaaaag

SEQ ID NO: 11271 - DNA, 27 bp, Artificial sequence
  SiRNA target sequence
ttcttgtattttacatttctaaaaagg

SEQ ID NO: 11272 - DNA, 27 bp, Artificial sequence
  SiRNA target sequence
tcttgtattttacatttctaaaaagga

SEQ ID NO: 11273 - DNA, 27 bp, Artificial sequence
  SiRNA target sequence
cttgtattttacatttctaaaaaggat

SEQ ID NO: 11274 - DNA, 27 bp, Artificial sequence
  SiRNA target sequence
ttgtattttacatttctaaaaaggatg

SEQ ID NO: 11275 - DNA, 27 bp, Artificial sequence
  SiRNA target sequence
tgtattttacatttctaaaaaggatgt

SEQ ID NO: 11276 - DNA, 27 bp, Artificial sequence
  SiRNA target sequence
gtattttacatttctaaaaaggatgtt

SEQ ID NO: 11277 - DNA, 27 bp, Artificial sequence
  SiRNA target sequence
tattttacatttctaaaaaggatgttg

SEQ ID NO: 11278 - DNA, 27 bp, Artificial sequence
  SiRNA target sequence
attttacatttctaaaaaggatgttga

SEQ ID NO: 11279 - DNA, 27 bp, Artificial sequence
  SiRNA target sequence
ttttacatttctaaaaaggatgttgaa

SEQ ID NO: 11280 - DNA, 27 bp, Artificial sequence
  SiRNA target sequence
tttacatttctaaaaaggatgttgaaa

SEQ ID NO: 11281 - DNA, 27 bp, Artificial sequence
  SiRNA target sequence
ttacatttctaaaaaggatgttgaaaa

SEQ ID NO: 11282 - DNA, 27 bp, Artificial sequence
  SiRNA target sequence
tacatttctaaaaaggatgttgaaaaa

SEQ ID NO: 11283 - DNA, 27 bp, Artificial sequence
  SiRNA target sequence
acatttctaaaaaggatgttgaaaaag

SEQ ID NO: 11284 - DNA, 27 bp, Artificial sequence
  SiRNA target sequence
catttctaaaaaggatgttgaaaaagt

SEQ ID NO: 11285 - DNA, 27 bp, Artificial sequence
  SiRNA target sequence
atttctaaaaaggatgttgaaaaagtt

SEQ ID NO: 11286 - DNA, 27 bp, Artificial sequence
  SiRNA target sequence
tttctaaaaaggatgttgaaaaagtta

SEQ ID NO: 11287 - DNA, 27 bp, Artificial sequence
  SiRNA target sequence
ttctaaaaaggatgttgaaaaagttaa

SEQ ID NO: 11288 - DNA, 27 bp, Artificial sequence
  SiRNA target sequence
tctaaaaaggatgttgaaaaagttaat

SEQ ID NO: 11289 - DNA, 27 bp, Artificial sequence
  SiRNA target sequence
ctaaaaaggatgttgaaaaagttaatg

SEQ ID NO: 11290 - DNA, 27 bp, Artificial sequence
  SiRNA target sequence
taaaaaggatgttgaaaaagttaatga

SEQ ID NO: 11291 - DNA, 27 bp, Artificial sequence
  SiRNA target sequence
aaaaaggatgttgaaaaagttaatgaa

SEQ ID NO: 11292 - DNA, 27 bp, Artificial sequence
  SiRNA target sequence
aaaaggatgttgaaaaagttaatgaaa

SEQ ID NO: 11293 - DNA, 27 bp, Artificial sequence
  SiRNA target sequence
aaaggatgttgaaaaagttaatgaaac

SEQ ID NO: 11294 - DNA, 27 bp, Artificial sequence
  SiRNA target sequence
aaggatgttgaaaaagttaatgaaaca

SEQ ID NO: 11295 - DNA, 27 bp, Artificial sequence
  SiRNA target sequence
aggatgttgaaaaagttaatgaaacaa

SEQ ID NO: 11296 - DNA, 27 bp, Artificial sequence
  SiRNA target sequence
ggatgttgaaaaagttaatgaaacaat

SEQ ID NO: 11297 - DNA, 27 bp, Artificial sequence
  SiRNA target sequence
gatgttgaaaaagttaatgaaacaatt

SEQ ID NO: 11298 - DNA, 27 bp, Artificial sequence
  SiRNA target sequence
atgttgaaaaagttaatgaaacaatta

SEQ ID NO: 11299 - DNA, 27 bp, Artificial sequence
  SiRNA target sequence
tgttgaaaaagttaatgaaacaattaa

SEQ ID NO: 11300 - DNA, 27 bp, Artificial sequence
  SiRNA target sequence
gttgaaaaagttaatgaaacaattaat

SEQ ID NO: 11301 - DNA, 27 bp, Artificial sequence
  SiRNA target sequence
ttgaaaaagttaatgaaacaattaata

SEQ ID NO: 11302 - DNA, 27 bp, Artificial sequence
  SiRNA target sequence
tgaaaaagttaatgaaacaattaataa

SEQ ID NO: 11303 - DNA, 27 bp, Artificial sequence
  SiRNA target sequence
gaaaaagttaatgaaacaattaataat

SEQ ID NO: 11304 - DNA, 27 bp, Artificial sequence
  SiRNA target sequence
aaaaagttaatgaaacaattaataatt

SEQ ID NO: 11305 - DNA, 27 bp, Artificial sequence
  SiRNA target sequence
aaaagttaatgaaacaattaataattt

SEQ ID NO: 11306 - DNA, 27 bp, Artificial sequence
  SiRNA target sequence
aaagttaatgaaacaattaataattta

SEQ ID NO: 11307 - DNA, 27 bp, Artificial sequence
  SiRNA target sequence
aagttaatgaaacaattaataatttaa

SEQ ID NO: 11308 - DNA, 27 bp, Artificial sequence
  SiRNA target sequence
agttaatgaaacaattaataatttaaa

SEQ ID NO: 11309 - DNA, 27 bp, Artificial sequence
  SiRNA target sequence
gttaatgaaacaattaataatttaaaa

SEQ ID NO: 11310 - DNA, 27 bp, Artificial sequence
  SiRNA target sequence
ttaatgaaacaattaataatttaaaag

SEQ ID NO: 11311 - DNA, 27 bp, Artificial sequence
  SiRNA target sequence
taatgaaacaattaataatttaaaaga

SEQ ID NO: 11312 - DNA, 27 bp, Artificial sequence
  SiRNA target sequence
aatgaaacaattaataatttaaaagag

SEQ ID NO: 11313 - DNA, 27 bp, Artificial sequence
  SiRNA target sequence
atgaaacaattaataatttaaaagaga

SEQ ID NO: 11314 - DNA, 27 bp, Artificial sequence
  SiRNA target sequence
tgaaacaattaataatttaaaagagac

SEQ ID NO: 11315 - DNA, 27 bp, Artificial sequence
  SiRNA target sequence
gaaacaattaataatttaaaagagact

SEQ ID NO: 11316 - DNA, 27 bp, Artificial sequence
  SiRNA target sequence
aaacaattaataatttaaaagagactc

SEQ ID NO: 11317 - DNA, 27 bp, Artificial sequence
  SiRNA target sequence
aacaattaataatttaaaagagactct

SEQ ID NO: 11318 - DNA, 27 bp, Artificial sequence
  SiRNA target sequence
acaattaataatttaaaagagactctt

SEQ ID NO: 11319 - DNA, 27 bp, Artificial sequence
  SiRNA target sequence
caattaataatttaaaagagactctta

SEQ ID NO: 11320 - DNA, 27 bp, Artificial sequence
  SiRNA target sequence
aattaataatttaaaagagactcttac

SEQ ID NO: 11321 - DNA, 27 bp, Artificial sequence
  SiRNA target sequence
attaataatttaaaagagactcttacc

SEQ ID NO: 11322 - DNA, 27 bp, Artificial sequence
  SiRNA target sequence
ttaataatttaaaagagactcttaccc

SEQ ID NO: 11323 - DNA, 27 bp, Artificial sequence
  SiRNA target sequence
taataatttaaaagagactcttacccc

SEQ ID NO: 11324 - DNA, 27 bp, Artificial sequence
  SiRNA target sequence
aataatttaaaagagactcttaccccc

SEQ ID NO: 11325 - DNA, 27 bp, Artificial sequence
  SiRNA target sequence
ataatttaaaagagactcttaccccca

SEQ ID NO: 11326 - DNA, 27 bp, Artificial sequence
  SiRNA target sequence
taatttaaaagagactcttacccccac

SEQ ID NO: 11327 - DNA, 27 bp, Artificial sequence
  SiRNA target sequence
aatttaaaagagactcttacccccact

SEQ ID NO: 11328 - DNA, 27 bp, Artificial sequence
  SiRNA target sequence
atttaaaagagactcttacccccactt

SEQ ID NO: 11329 - DNA, 27 bp, Artificial sequence
  SiRNA target sequence
tttaaaagagactcttacccccacttt

SEQ ID NO: 11330 - DNA, 27 bp, Artificial sequence
  SiRNA target sequence
ttaaaagagactcttacccccacttta

SEQ ID NO: 11331 - DNA, 27 bp, Artificial sequence
  SiRNA target sequence
taaaagagactcttacccccactttat

SEQ ID NO: 11332 - DNA, 27 bp, Artificial sequence
  SiRNA target sequence
aaaagagactcttacccccactttatt

SEQ ID NO: 11333 - DNA, 27 bp, Artificial sequence
  SiRNA target sequence
aaagagactcttacccccactttattg

SEQ ID NO: 11334 - DNA, 27 bp, Artificial sequence
  SiRNA target sequence
aagagactcttacccccactttattgg

SEQ ID NO: 11335 - DNA, 27 bp, Artificial sequence
  SiRNA target sequence
agagactcttacccccactttattgga

SEQ ID NO: 11336 - DNA, 27 bp, Artificial sequence
  SiRNA target sequence
gagactcttacccccactttattggaa

SEQ ID NO: 11337 - DNA, 27 bp, Artificial sequence
  SiRNA target sequence
agactcttacccccactttattggaac

SEQ ID NO: 11338 - DNA, 27 bp, Artificial sequence
  SiRNA target sequence
gactcttacccccactttattggaact

SEQ ID NO: 11339 - DNA, 27 bp, Artificial sequence
  SiRNA target sequence
actcttacccccactttattggaactt

SEQ ID NO: 11340 - DNA, 27 bp, Artificial sequence
  SiRNA target sequence
ctcttacccccactttattggaactta

SEQ ID NO: 11341 - DNA, 27 bp, Artificial sequence
  SiRNA target sequence
tcttacccccactttattggaacttat

SEQ ID NO: 11342 - DNA, 27 bp, Artificial sequence
  SiRNA target sequence
cttacccccactttattggaacttatt

SEQ ID NO: 11343 - DNA, 27 bp, Artificial sequence
  SiRNA target sequence
ttacccccactttattggaacttattg

SEQ ID NO: 11344 - DNA, 27 bp, Artificial sequence
  SiRNA target sequence
tacccccactttattggaacttattgg

SEQ ID NO: 11345 - DNA, 27 bp, Artificial sequence
  SiRNA target sequence
acccccactttattggaacttattgga

SEQ ID NO: 11346 - DNA, 27 bp, Artificial sequence
  SiRNA target sequence
cccccactttattggaacttattggag

SEQ ID NO: 11347 - DNA, 27 bp, Artificial sequence
  SiRNA target sequence
ccccactttattggaacttattggaga

SEQ ID NO: 11348 - DNA, 27 bp, Artificial sequence
  SiRNA target sequence
cccactttattggaacttattggagaa

SEQ ID NO: 11349 - DNA, 27 bp, Artificial sequence
  SiRNA target sequence
ccactttattggaacttattggagaat

SEQ ID NO: 11350 - DNA, 27 bp, Artificial sequence
  SiRNA target sequence
cactttattggaacttattggagaata

SEQ ID NO: 11351 - DNA, 27 bp, Artificial sequence
  SiRNA target sequence
actttattggaacttattggagaatat

SEQ ID NO: 11352 - DNA, 27 bp, Artificial sequence
  SiRNA target sequence
ctttattggaacttattggagaatatt

SEQ ID NO: 11353 - DNA, 27 bp, Artificial sequence
  SiRNA target sequence
tttattggaacttattggagaatatta

SEQ ID NO: 11354 - DNA, 27 bp, Artificial sequence
  SiRNA target sequence
ttattggaacttattggagaatattat

SEQ ID NO: 11355 - DNA, 27 bp, Artificial sequence
  SiRNA target sequence
tattggaacttattggagaatattatt

SEQ ID NO: 11356 - DNA, 27 bp, Artificial sequence
  SiRNA target sequence
attggaacttattggagaatattattt

SEQ ID NO: 11357 - DNA, 27 bp, Artificial sequence
  SiRNA target sequence
ttggaacttattggagaatattattta

SEQ ID NO: 11358 - DNA, 27 bp, Artificial sequence
  SiRNA target sequence
tggaacttattggagaatattatttaa

SEQ ID NO: 11359 - DNA, 27 bp, Artificial sequence
  SiRNA target sequence
ggaacttattggagaatattatttaaa

SEQ ID NO: 11360 - DNA, 27 bp, Artificial sequence
  SiRNA target sequence
gaacttattggagaatattatttaaaa

SEQ ID NO: 11361 - DNA, 27 bp, Artificial sequence
  SiRNA target sequence
aacttattggagaatattatttaaaaa

SEQ ID NO: 11362 - DNA, 27 bp, Artificial sequence
  SiRNA target sequence
acttattggagaatattatttaaaaag

SEQ ID NO: 11363 - DNA, 27 bp, Artificial sequence
  SiRNA target sequence
cttattggagaatattatttaaaaagt

SEQ ID NO: 11364 - DNA, 27 bp, Artificial sequence
  SiRNA target sequence
ttattggagaatattatttaaaaagtg

SEQ ID NO: 11365 - DNA, 27 bp, Artificial sequence
  SiRNA target sequence
tattggagaatattatttaaaaagtgg

SEQ ID NO: 11366 - DNA, 27 bp, Artificial sequence
  SiRNA target sequence
attggagaatattatttaaaaagtgga

SEQ ID NO: 11367 - DNA, 27 bp, Artificial sequence
  SiRNA target sequence
ttggagaatattatttaaaaagtggaa

SEQ ID NO: 11368 - DNA, 27 bp, Artificial sequence
  SiRNA target sequence
tggagaatattatttaaaaagtggaaa

SEQ ID NO: 11369 - DNA, 27 bp, Artificial sequence
  SiRNA target sequence
ggagaatattatttaaaaagtggaaat

SEQ ID NO: 11370 - DNA, 27 bp, Artificial sequence
  SiRNA target sequence
gagaatattatttaaaaagtggaaatc

SEQ ID NO: 11371 - DNA, 27 bp, Artificial sequence
  SiRNA target sequence
agaatattatttaaaaagtggaaatca

SEQ ID NO: 11372 - DNA, 27 bp, Artificial sequence
  SiRNA target sequence
gaatattatttaaaaagtggaaatcac

SEQ ID NO: 11373 - DNA, 27 bp, Artificial sequence
  SiRNA target sequence
aatattatttaaaaagtggaaatcact

SEQ ID NO: 11374 - DNA, 27 bp, Artificial sequence
  SiRNA target sequence
atattatttaaaaagtggaaatcactc

SEQ ID NO: 11375 - DNA, 27 bp, Artificial sequence
  SiRNA target sequence
tattatttaaaaagtggaaatcactct

SEQ ID NO: 11376 - DNA, 27 bp, Artificial sequence
  SiRNA target sequence
attatttaaaaagtggaaatcactcta

SEQ ID NO: 11377 - DNA, 27 bp, Artificial sequence
  SiRNA target sequence
ttatttaaaaagtggaaatcactctaa

SEQ ID NO: 11378 - DNA, 27 bp, Artificial sequence
  SiRNA target sequence
tatttaaaaagtggaaatcactctaaa

SEQ ID NO: 11379 - DNA, 27 bp, Artificial sequence
  SiRNA target sequence
atttaaaaagtggaaatcactctaaaa

SEQ ID NO: 11380 - DNA, 27 bp, Artificial sequence
  SiRNA target sequence
tttaaaaagtggaaatcactctaaaat

SEQ ID NO: 11381 - DNA, 27 bp, Artificial sequence
  SiRNA target sequence
ttaaaaagtggaaatcactctaaaatg

SEQ ID NO: 11382 - DNA, 27 bp, Artificial sequence
  SiRNA target sequence
taaaaagtggaaatcactctaaaatgt

SEQ ID NO: 11383 - DNA, 27 bp, Artificial sequence
  SiRNA target sequence
aaaaagtggaaatcactctaaaatgtt

SEQ ID NO: 11384 - DNA, 27 bp, Artificial sequence
  SiRNA target sequence
aaaagtggaaatcactctaaaatgtta

SEQ ID NO: 11385 - DNA, 27 bp, Artificial sequence
  SiRNA target sequence
aaagtggaaatcactctaaaatgttag

SEQ ID NO: 11386 - DNA, 27 bp, Artificial sequence
  SiRNA target sequence
aagtggaaatcactctaaaatgttaga

SEQ ID NO: 11387 - DNA, 27 bp, Artificial sequence
  SiRNA target sequence
agtggaaatcactctaaaatgttagat

SEQ ID NO: 11388 - DNA, 27 bp, Artificial sequence
  SiRNA target sequence
gtggaaatcactctaaaatgttagatc

SEQ ID NO: 11389 - DNA, 27 bp, Artificial sequence
  SiRNA target sequence
tggaaatcactctaaaatgttagatct

SEQ ID NO: 11390 - DNA, 27 bp, Artificial sequence
  SiRNA target sequence
ggaaatcactctaaaatgttagatcta

SEQ ID NO: 11391 - DNA, 27 bp, Artificial sequence
  SiRNA target sequence
gaaatcactctaaaatgttagatctat

SEQ ID NO: 11392 - DNA, 27 bp, Artificial sequence
  SiRNA target sequence
aaatcactctaaaatgttagatctatt

SEQ ID NO: 11393 - DNA, 27 bp, Artificial sequence
  SiRNA target sequence
aatcactctaaaatgttagatctatta

SEQ ID NO: 11394 - DNA, 27 bp, Artificial sequence
  SiRNA target sequence
atcactctaaaatgttagatctattat

SEQ ID NO: 11395 - DNA, 27 bp, Artificial sequence
  SiRNA target sequence
tcactctaaaatgttagatctattatc

SEQ ID NO: 11396 - DNA, 27 bp, Artificial sequence
  SiRNA target sequence
cactctaaaatgttagatctattatct

SEQ ID NO: 11397 - DNA, 27 bp, Artificial sequence
  SiRNA target sequence
actctaaaatgttagatctattatcta

SEQ ID NO: 11398 - DNA, 27 bp, Artificial sequence
  SiRNA target sequence
ctctaaaatgttagatctattatctag

SEQ ID NO: 11399 - DNA, 27 bp, Artificial sequence
  SiRNA target sequence
tctaaaatgttagatctattatctagt

SEQ ID NO: 11400 - DNA, 27 bp, Artificial sequence
  SiRNA target sequence
ctaaaatgttagatctattatctagtc

SEQ ID NO: 11401 - DNA, 27 bp, Artificial sequence
  SiRNA target sequence
taaaatgttagatctattatctagtca

SEQ ID NO: 11402 - DNA, 27 bp, Artificial sequence
  SiRNA target sequence
aaaatgttagatctattatctagtcat

SEQ ID NO: 11403 - DNA, 27 bp, Artificial sequence
  SiRNA target sequence
aaatgttagatctattatctagtcatc

SEQ ID NO: 11404 - DNA, 27 bp, Artificial sequence
  SiRNA target sequence
aatgttagatctattatctagtcatcc

SEQ ID NO: 11405 - DNA, 27 bp, Artificial sequence
  SiRNA target sequence
atgttagatctattatctagtcatcca

SEQ ID NO: 11406 - DNA, 27 bp, Artificial sequence
  SiRNA target sequence
tgttagatctattatctagtcatccag

SEQ ID NO: 11407 - DNA, 27 bp, Artificial sequence
  SiRNA target sequence
gttagatctattatctagtcatccaga

SEQ ID NO: 11408 - DNA, 27 bp, Artificial sequence
  SiRNA target sequence
ttagatctattatctagtcatccagat

SEQ ID NO: 11409 - DNA, 27 bp, Artificial sequence
  SiRNA target sequence
tagatctattatctagtcatccagata

SEQ ID NO: 11410 - DNA, 27 bp, Artificial sequence
  SiRNA target sequence
agatctattatctagtcatccagatac

SEQ ID NO: 11411 - DNA, 27 bp, Artificial sequence
  SiRNA target sequence
gatctattatctagtcatccagatact

SEQ ID NO: 11412 - DNA, 27 bp, Artificial sequence
  SiRNA target sequence
atctattatctagtcatccagatactc

SEQ ID NO: 11413 - DNA, 27 bp, Artificial sequence
  SiRNA target sequence
tctattatctagtcatccagatactcc

SEQ ID NO: 11414 - DNA, 27 bp, Artificial sequence
  SiRNA target sequence
ctattatctagtcatccagatactcct

SEQ ID NO: 11415 - DNA, 27 bp, Artificial sequence
  SiRNA target sequence
tattatctagtcatccagatactcctg

SEQ ID NO: 11416 - DNA, 27 bp, Artificial sequence
  SiRNA target sequence
attatctagtcatccagatactcctgg

SEQ ID NO: 11417 - DNA, 27 bp, Artificial sequence
  SiRNA target sequence
ttatctagtcatccagatactcctggt

SEQ ID NO: 11418 - DNA, 27 bp, Artificial sequence
  SiRNA target sequence
tatctagtcatccagatactcctggta

SEQ ID NO: 11419 - DNA, 27 bp, Artificial sequence
  SiRNA target sequence
atctagtcatccagatactcctggtaa

SEQ ID NO: 11420 - DNA, 27 bp, Artificial sequence
  SiRNA target sequence
tctagtcatccagatactcctggtaaa

SEQ ID NO: 11421 - DNA, 27 bp, Artificial sequence
  SiRNA target sequence
ctagtcatccagatactcctggtaaat

SEQ ID NO: 11422 - DNA, 27 bp, Artificial sequence
  SiRNA target sequence
tagtcatccagatactcctggtaaatt

SEQ ID NO: 11423 - DNA, 27 bp, Artificial sequence
  SiRNA target sequence
agtcatccagatactcctggtaaatta

SEQ ID NO: 11424 - DNA, 27 bp, Artificial sequence
  SiRNA target sequence
gtcatccagatactcctggtaaattac

SEQ ID NO: 11425 - DNA, 27 bp, Artificial sequence
  SiRNA target sequence
tcatccagatactcctggtaaattact

SEQ ID NO: 11426 - DNA, 27 bp, Artificial sequence
  SiRNA target sequence
catccagatactcctggtaaattactt

SEQ ID NO: 11427 - DNA, 27 bp, Artificial sequence
  SiRNA target sequence
atccagatactcctggtaaattacttt

SEQ ID NO: 11428 - DNA, 27 bp, Artificial sequence
  SiRNA target sequence
tccagatactcctggtaaattactttt

SEQ ID NO: 11429 - DNA, 27 bp, Artificial sequence
  SiRNA target sequence
ccagatactcctggtaaattactttta

SEQ ID NO: 11430 - DNA, 27 bp, Artificial sequence
  SiRNA target sequence
cagatactcctggtaaattacttttaa

SEQ ID NO: 11431 - DNA, 27 bp, Artificial sequence
  SiRNA target sequence
agatactcctggtaaattacttttaac

SEQ ID NO: 11432 - DNA, 27 bp, Artificial sequence
  SiRNA target sequence
gatactcctggtaaattacttttaacg

SEQ ID NO: 11433 - DNA, 27 bp, Artificial sequence
  SiRNA target sequence
atactcctggtaaattacttttaacgg

SEQ ID NO: 11434 - DNA, 27 bp, Artificial sequence
  SiRNA target sequence
tactcctggtaaattacttttaacggc

SEQ ID NO: 11435 - DNA, 27 bp, Artificial sequence
  SiRNA target sequence
actcctggtaaattacttttaacggca

SEQ ID NO: 11436 - DNA, 27 bp, Artificial sequence
  SiRNA target sequence
ctcctggtaaattacttttaacggcac

SEQ ID NO: 11437 - DNA, 27 bp, Artificial sequence
  SiRNA target sequence
tcctggtaaattacttttaacggcact

SEQ ID NO: 11438 - DNA, 27 bp, Artificial sequence
  SiRNA target sequence
cctggtaaattacttttaacggcactt

SEQ ID NO: 11439 - DNA, 27 bp, Artificial sequence
  SiRNA target sequence
ctggtaaattacttttaacggcacttt

SEQ ID NO: 11440 - DNA, 27 bp, Artificial sequence
  SiRNA target sequence
tggtaaattacttttaacggcacttta

SEQ ID NO: 11441 - DNA, 27 bp, Artificial sequence
  SiRNA target sequence
ggtaaattacttttaacggcactttat

SEQ ID NO: 11442 - DNA, 27 bp, Artificial sequence
  SiRNA target sequence
gtaaattacttttaacggcactttatg

SEQ ID NO: 11443 - DNA, 27 bp, Artificial sequence
  SiRNA target sequence
taaattacttttaacggcactttatgc

SEQ ID NO: 11444 - DNA, 27 bp, Artificial sequence
  SiRNA target sequence
aaattacttttaacggcactttatgca

SEQ ID NO: 11445 - DNA, 27 bp, Artificial sequence
  SiRNA target sequence
aattacttttaacggcactttatgcaa

SEQ ID NO: 11446 - DNA, 27 bp, Artificial sequence
  SiRNA target sequence
attacttttaacggcactttatgcaat

SEQ ID NO: 11447 - DNA, 27 bp, Artificial sequence
  SiRNA target sequence
ttacttttaacggcactttatgcaata

SEQ ID NO: 11448 - DNA, 27 bp, Artificial sequence
  SiRNA target sequence
tacttttaacggcactttatgcaataa

SEQ ID NO: 11449 - DNA, 27 bp, Artificial sequence
  SiRNA target sequence
acttttaacggcactttatgcaataag

SEQ ID NO: 11450 - DNA, 27 bp, Artificial sequence
  SiRNA target sequence
cttttaacggcactttatgcaataagt

SEQ ID NO: 11451 - DNA, 27 bp, Artificial sequence
  SiRNA target sequence
ttttaacggcactttatgcaataagta

SEQ ID NO: 11452 - DNA, 27 bp, Artificial sequence
  SiRNA target sequence
tttaacggcactttatgcaataagtat

SEQ ID NO: 11453 - DNA, 27 bp, Artificial sequence
  SiRNA target sequence
ttaacggcactttatgcaataagtatt

SEQ ID NO: 11454 - DNA, 27 bp, Artificial sequence
  SiRNA target sequence
taacggcactttatgcaataagtattg

SEQ ID NO: 11455 - DNA, 27 bp, Artificial sequence
  SiRNA target sequence
aacggcactttatgcaataagtattga

SEQ ID NO: 11456 - DNA, 27 bp, Artificial sequence
  SiRNA target sequence
acggcactttatgcaataagtattgat

SEQ ID NO: 11457 - DNA, 27 bp, Artificial sequence
  SiRNA target sequence
cggcactttatgcaataagtattgata

SEQ ID NO: 11458 - DNA, 27 bp, Artificial sequence
  SiRNA target sequence
ggcactttatgcaataagtattgataa

SEQ ID NO: 11459 - DNA, 27 bp, Artificial sequence
  SiRNA target sequence
gcactttatgcaataagtattgataag

SEQ ID NO: 11460 - DNA, 27 bp, Artificial sequence
  SiRNA target sequence
cactttatgcaataagtattgataaga

SEQ ID NO: 11461 - DNA, 27 bp, Artificial sequence
  SiRNA target sequence
actttatgcaataagtattgataagaa

SEQ ID NO: 11462 - DNA, 27 bp, Artificial sequence
  SiRNA target sequence
ctttatgcaataagtattgataagaaa

SEQ ID NO: 11463 - DNA, 27 bp, Artificial sequence
  SiRNA target sequence
tttatgcaataagtattgataagaaaa

SEQ ID NO: 11464 - DNA, 27 bp, Artificial sequence
  SiRNA target sequence
ttatgcaataagtattgataagaaaaa

SEQ ID NO: 11465 - DNA, 27 bp, Artificial sequence
  SiRNA target sequence
tatgcaataagtattgataagaaaaag

SEQ ID NO: 11466 - DNA, 27 bp, Artificial sequence
  SiRNA target sequence
atgcaataagtattgataagaaaaagg

SEQ ID NO: 11467 - DNA, 27 bp, Artificial sequence
  SiRNA target sequence
tgcaataagtattgataagaaaaagga

SEQ ID NO: 11468 - DNA, 27 bp, Artificial sequence
  SiRNA target sequence
gcaataagtattgataagaaaaaggat

SEQ ID NO: 11469 - DNA, 27 bp, Artificial sequence
  SiRNA target sequence
caataagtattgataagaaaaaggatg

SEQ ID NO: 11470 - DNA, 27 bp, Artificial sequence
  SiRNA target sequence
aataagtattgataagaaaaaggatgc

SEQ ID NO: 11471 - DNA, 27 bp, Artificial sequence
  SiRNA target sequence
ataagtattgataagaaaaaggatgct

SEQ ID NO: 11472 - DNA, 27 bp, Artificial sequence
  SiRNA target sequence
taagtattgataagaaaaaggatgcta

SEQ ID NO: 11473 - DNA, 27 bp, Artificial sequence
  SiRNA target sequence
aagtattgataagaaaaaggatgctat

SEQ ID NO: 11474 - DNA, 27 bp, Artificial sequence
  SiRNA target sequence
agtattgataagaaaaaggatgctata

SEQ ID NO: 11475 - DNA, 27 bp, Artificial sequence
  SiRNA target sequence
gtattgataagaaaaaggatgctatag

SEQ ID NO: 11476 - DNA, 27 bp, Artificial sequence
  SiRNA target sequence
tattgataagaaaaaggatgctataga

SEQ ID NO: 11477 - DNA, 27 bp, Artificial sequence
  SiRNA target sequence
attgataagaaaaaggatgctatagaa

SEQ ID NO: 11478 - DNA, 27 bp, Artificial sequence
  SiRNA target sequence
ttgataagaaaaaggatgctatagaaa

SEQ ID NO: 11479 - DNA, 27 bp, Artificial sequence
  SiRNA target sequence
tgataagaaaaaggatgctatagaaat

SEQ ID NO: 11480 - DNA, 27 bp, Artificial sequence
  SiRNA target sequence
gataagaaaaaggatgctatagaaatt

SEQ ID NO: 11481 - DNA, 27 bp, Artificial sequence
  SiRNA target sequence
ataagaaaaaggatgctatagaaattt

SEQ ID NO: 11482 - DNA, 27 bp, Artificial sequence
  SiRNA target sequence
taagaaaaaggatgctatagaaatttt

SEQ ID NO: 11483 - DNA, 27 bp, Artificial sequence
  SiRNA target sequence
aagaaaaaggatgctatagaaatttta

SEQ ID NO: 11484 - DNA, 27 bp, Artificial sequence
  SiRNA target sequence
agaaaaaggatgctatagaaattttat

SEQ ID NO: 11485 - DNA, 27 bp, Artificial sequence
  SiRNA target sequence
gaaaaaggatgctatagaaattttata

SEQ ID NO: 11486 - DNA, 27 bp, Artificial sequence
  SiRNA target sequence
aaaaaggatgctatagaaattttatat

SEQ ID NO: 11487 - DNA, 27 bp, Artificial sequence
  SiRNA target sequence
aaaaggatgctatagaaattttatata

SEQ ID NO: 11488 - DNA, 27 bp, Artificial sequence
  SiRNA target sequence
aaaggatgctatagaaattttatatag

SEQ ID NO: 11489 - DNA, 27 bp, Artificial sequence
  SiRNA target sequence
aaggatgctatagaaattttatataga

SEQ ID NO: 11490 - DNA, 27 bp, Artificial sequence
  SiRNA target sequence
aggatgctatagaaattttatatagaa

SEQ ID NO: 11491 - DNA, 27 bp, Artificial sequence
  SiRNA target sequence
ggatgctatagaaattttatatagaag

SEQ ID NO: 11492 - DNA, 27 bp, Artificial sequence
  SiRNA target sequence
gatgctatagaaattttatatagaagt

SEQ ID NO: 11493 - DNA, 27 bp, Artificial sequence
  SiRNA target sequence
atgctatagaaattttatatagaagta

SEQ ID NO: 11494 - DNA, 27 bp, Artificial sequence
  SiRNA target sequence
tgctatagaaattttatatagaagtat

SEQ ID NO: 11495 - DNA, 27 bp, Artificial sequence
  SiRNA target sequence
gctatagaaattttatatagaagtata

SEQ ID NO: 11496 - DNA, 27 bp, Artificial sequence
  SiRNA target sequence
ctatagaaattttatatagaagtatat

SEQ ID NO: 11497 - DNA, 27 bp, Artificial sequence
  SiRNA target sequence
tatagaaattttatatagaagtatatc

SEQ ID NO: 11498 - DNA, 27 bp, Artificial sequence
  SiRNA target sequence
atagaaattttatatagaagtatatca

SEQ ID NO: 11499 - DNA, 27 bp, Artificial sequence
  SiRNA target sequence
tagaaattttatatagaagtatatcag

SEQ ID NO: 11500 - DNA, 27 bp, Artificial sequence
  SiRNA target sequence
agaaattttatatagaagtatatcaga

SEQ ID NO: 11501 - DNA, 27 bp, Artificial sequence
  SiRNA target sequence
gaaattttatatagaagtatatcagaa

SEQ ID NO: 11502 - DNA, 27 bp, Artificial sequence
  SiRNA target sequence
aaattttatatagaagtatatcagaat

SEQ ID NO: 11503 - DNA, 27 bp, Artificial sequence
  SiRNA target sequence
aattttatatagaagtatatcagaata

SEQ ID NO: 11504 - DNA, 27 bp, Artificial sequence
  SiRNA target sequence
attttatatagaagtatatcagaatat

SEQ ID NO: 11505 - DNA, 27 bp, Artificial sequence
  SiRNA target sequence
ttttatatagaagtatatcagaatatt

SEQ ID NO: 11506 - DNA, 27 bp, Artificial sequence
  SiRNA target sequence
tttatatagaagtatatcagaatattc

SEQ ID NO: 11507 - DNA, 27 bp, Artificial sequence
  SiRNA target sequence
ttatatagaagtatatcagaatattca

SEQ ID NO: 11508 - DNA, 27 bp, Artificial sequence
  SiRNA target sequence
tatatagaagtatatcagaatattcat

SEQ ID NO: 11509 - DNA, 27 bp, Artificial sequence
  SiRNA target sequence
atatagaagtatatcagaatattcatc

SEQ ID NO: 11510 - DNA, 27 bp, Artificial sequence
  SiRNA target sequence
tatagaagtatatcagaatattcatct

SEQ ID NO: 11511 - DNA, 27 bp, Artificial sequence
  SiRNA target sequence
atagaagtatatcagaatattcatctt

SEQ ID NO: 11512 - DNA, 27 bp, Artificial sequence
  SiRNA target sequence
tagaagtatatcagaatattcatctta

SEQ ID NO: 11513 - DNA, 27 bp, Artificial sequence
  SiRNA target sequence
agaagtatatcagaatattcatcttat

SEQ ID NO: 11514 - DNA, 27 bp, Artificial sequence
  SiRNA target sequence
gaagtatatcagaatattcatcttatt

SEQ ID NO: 11515 - DNA, 27 bp, Artificial sequence
  SiRNA target sequence
aagtatatcagaatattcatcttattt

SEQ ID NO: 11516 - DNA, 27 bp, Artificial sequence
  SiRNA target sequence
agtatatcagaatattcatcttatttt

SEQ ID NO: 11517 - DNA, 27 bp, Artificial sequence
  SiRNA target sequence
gtatatcagaatattcatcttatttta

SEQ ID NO: 11518 - DNA, 27 bp, Artificial sequence
  SiRNA target sequence
tatatcagaatattcatcttattttaa

SEQ ID NO: 11519 - DNA, 27 bp, Artificial sequence
  SiRNA target sequence
atatcagaatattcatcttattttaaa

SEQ ID NO: 11520 - DNA, 27 bp, Artificial sequence
  SiRNA target sequence
tatcagaatattcatcttattttaaat

SEQ ID NO: 11521 - DNA, 27 bp, Artificial sequence
  SiRNA target sequence
atcagaatattcatcttattttaaatc

SEQ ID NO: 11522 - DNA, 27 bp, Artificial sequence
  SiRNA target sequence
tcagaatattcatcttattttaaatct

SEQ ID NO: 11523 - DNA, 27 bp, Artificial sequence
  SiRNA target sequence
cagaatattcatcttattttaaatctt

SEQ ID NO: 11524 - DNA, 27 bp, Artificial sequence
  SiRNA target sequence
agaatattcatcttattttaaatctta

SEQ ID NO: 11525 - DNA, 27 bp, Artificial sequence
  SiRNA target sequence
gaatattcatcttattttaaatcttat

SEQ ID NO: 11526 - DNA, 27 bp, Artificial sequence
  SiRNA target sequence
aatattcatcttattttaaatcttatt

SEQ ID NO: 11527 - DNA, 27 bp, Artificial sequence
  SiRNA target sequence
atattcatcttattttaaatcttattt

SEQ ID NO: 11528 - DNA, 27 bp, Artificial sequence
  SiRNA target sequence
tattcatcttattttaaatcttatttg

SEQ ID NO: 11529 - DNA, 27 bp, Artificial sequence
  SiRNA target sequence
attcatcttattttaaatcttatttgt

SEQ ID NO: 11530 - DNA, 27 bp, Artificial sequence
  SiRNA target sequence
ttcatcttattttaaatcttatttgta

SEQ ID NO: 11531 - DNA, 27 bp, Artificial sequence
  SiRNA target sequence
tcatcttattttaaatcttatttgtat

SEQ ID NO: 11532 - DNA, 27 bp, Artificial sequence
  SiRNA target sequence
catcttattttaaatcttatttgtatt

SEQ ID NO: 11533 - DNA, 27 bp, Artificial sequence
  SiRNA target sequence
atcttattttaaatcttatttgtattt

SEQ ID NO: 11534 - DNA, 27 bp, Artificial sequence
  SiRNA target sequence
tcttattttaaatcttatttgtattta

SEQ ID NO: 11535 - DNA, 27 bp, Artificial sequence
  SiRNA target sequence
cttattttaaatcttatttgtatttag

SEQ ID NO: 11536 - DNA, 27 bp, Artificial sequence
  SiRNA target sequence
ttattttaaatcttatttgtatttagg

SEQ ID NO: 11537 - DNA, 27 bp, Artificial sequence
  SiRNA target sequence
tattttaaatcttatttgtatttagga

SEQ ID NO: 11538 - DNA, 27 bp, Artificial sequence
  SiRNA target sequence
attttaaatcttatttgtatttaggaa

SEQ ID NO: 11539 - DNA, 27 bp, Artificial sequence
  SiRNA target sequence
ttttaaatcttatttgtatttaggaaa

SEQ ID NO: 11540 - DNA, 27 bp, Artificial sequence
  SiRNA target sequence
tttaaatcttatttgtatttaggaaat

SEQ ID NO: 11541 - DNA, 27 bp, Artificial sequence
  SiRNA target sequence
ttaaatcttatttgtatttaggaaata

SEQ ID NO: 11542 - DNA, 27 bp, Artificial sequence
  SiRNA target sequence
taaatcttatttgtatttaggaaatat

SEQ ID NO: 11543 - DNA, 27 bp, Artificial sequence
  SiRNA target sequence
aaatcttatttgtatttaggaaatatt

SEQ ID NO: 11544 - DNA, 27 bp, Artificial sequence
  SiRNA target sequence
aatcttatttgtatttaggaaatattt

SEQ ID NO: 11545 - DNA, 27 bp, Artificial sequence
  SiRNA target sequence
atcttatttgtatttaggaaatatttt

SEQ ID NO: 11546 - DNA, 27 bp, Artificial sequence
  SiRNA target sequence
tcttatttgtatttaggaaatatttta

SEQ ID NO: 11547 - DNA, 27 bp, Artificial sequence
  SiRNA target sequence
cttatttgtatttaggaaatattttaa

SEQ ID NO: 11548 - DNA, 27 bp, Artificial sequence
  SiRNA target sequence
ttatttgtatttaggaaatattttaat

SEQ ID NO: 11549 - DNA, 27 bp, Artificial sequence
  SiRNA target sequence
tatttgtatttaggaaatattttaata

SEQ ID NO: 11550 - DNA, 27 bp, Artificial sequence
  SiRNA target sequence
atttgtatttaggaaatattttaataa

SEQ ID NO: 11551 - DNA, 27 bp, Artificial sequence
  SiRNA target sequence
tttgtatttaggaaatattttaataaa

SEQ ID NO: 11552 - DNA, 27 bp, Artificial sequence
  SiRNA target sequence
ttgtatttaggaaatattttaataaat

SEQ ID NO: 11553 - DNA, 27 bp, Artificial sequence
  SiRNA target sequence
tgtatttaggaaatattttaataaatg

SEQ ID NO: 11554 - DNA, 27 bp, Artificial sequence
  SiRNA target sequence
gtatttaggaaatattttaataaatga

SEQ ID NO: 11555 - DNA, 27 bp, Artificial sequence
  SiRNA target sequence
tatttaggaaatattttaataaatgat

SEQ ID NO: 11556 - DNA, 27 bp, Artificial sequence
  SiRNA target sequence
atttaggaaatattttaataaatgatg

SEQ ID NO: 11557 - DNA, 27 bp, Artificial sequence
  SiRNA target sequence
tttaggaaatattttaataaatgatga

SEQ ID NO: 11558 - DNA, 27 bp, Artificial sequence
  SiRNA target sequence
ttaggaaatattttaataaatgatgac

SEQ ID NO: 11559 - DNA, 27 bp, Artificial sequence
  SiRNA target sequence
taggaaatattttaataaatgatgact

SEQ ID NO: 11560 - DNA, 27 bp, Artificial sequence
  SiRNA target sequence
aggaaatattttaataaatgatgactt

SEQ ID NO: 11561 - DNA, 27 bp, Artificial sequence
  SiRNA target sequence
ggaaatattttaataaatgatgactta

SEQ ID NO: 11562 - DNA, 27 bp, Artificial sequence
  SiRNA target sequence
gaaatattttaataaatgatgacttaa

SEQ ID NO: 11563 - DNA, 27 bp, Artificial sequence
  SiRNA target sequence
aaatattttaataaatgatgacttaaa

SEQ ID NO: 11564 - DNA, 27 bp, Artificial sequence
  SiRNA target sequence
aatattttaataaatgatgacttaaat

SEQ ID NO: 11565 - DNA, 27 bp, Artificial sequence
  SiRNA target sequence
atattttaataaatgatgacttaaatg

SEQ ID NO: 11566 - DNA, 27 bp, Artificial sequence
  SiRNA target sequence
tattttaataaatgatgacttaaatga

SEQ ID NO: 11567 - DNA, 27 bp, Artificial sequence
  SiRNA target sequence
attttaataaatgatgacttaaatgaa

SEQ ID NO: 11568 - DNA, 27 bp, Artificial sequence
  SiRNA target sequence
ttttaataaatgatgacttaaatgaat

SEQ ID NO: 11569 - DNA, 27 bp, Artificial sequence
  SiRNA target sequence
tttaataaatgatgacttaaatgaatg

SEQ ID NO: 11570 - DNA, 27 bp, Artificial sequence
  SiRNA target sequence
ttaataaatgatgacttaaatgaatgc

SEQ ID NO: 11571 - DNA, 27 bp, Artificial sequence
  SiRNA target sequence
taataaatgatgacttaaatgaatgca

SEQ ID NO: 11572 - DNA, 27 bp, Artificial sequence
  SiRNA target sequence
aataaatgatgacttaaatgaatgcag

SEQ ID NO: 11573 - DNA, 27 bp, Artificial sequence
  SiRNA target sequence
ataaatgatgacttaaatgaatgcagg

SEQ ID NO: 11574 - DNA, 27 bp, Artificial sequence
  SiRNA target sequence
taaatgatgacttaaatgaatgcagga

SEQ ID NO: 11575 - DNA, 27 bp, Artificial sequence
  SiRNA target sequence
aaatgatgacttaaatgaatgcaggaa

SEQ ID NO: 11576 - DNA, 27 bp, Artificial sequence
  SiRNA target sequence
aatgatgacttaaatgaatgcaggaaa

SEQ ID NO: 11577 - DNA, 27 bp, Artificial sequence
  SiRNA target sequence
atgatgacttaaatgaatgcaggaaat

SEQ ID NO: 11578 - DNA, 27 bp, Artificial sequence
  SiRNA target sequence
tgatgacttaaatgaatgcaggaaatt

SEQ ID NO: 11579 - DNA, 27 bp, Artificial sequence
  SiRNA target sequence
gatgacttaaatgaatgcaggaaattg

SEQ ID NO: 11580 - DNA, 27 bp, Artificial sequence
  SiRNA target sequence
atgacttaaatgaatgcaggaaattgt

SEQ ID NO: 11581 - DNA, 27 bp, Artificial sequence
  SiRNA target sequence
tgacttaaatgaatgcaggaaattgtt

SEQ ID NO: 11582 - DNA, 27 bp, Artificial sequence
  SiRNA target sequence
gacttaaatgaatgcaggaaattgttt

SEQ ID NO: 11583 - DNA, 27 bp, Artificial sequence
  SiRNA target sequence
acttaaatgaatgcaggaaattgttta

SEQ ID NO: 11584 - DNA, 27 bp, Artificial sequence
  SiRNA target sequence
cttaaatgaatgcaggaaattgtttaa

SEQ ID NO: 11585 - DNA, 27 bp, Artificial sequence
  SiRNA target sequence
ttaaatgaatgcaggaaattgtttaat

SEQ ID NO: 11586 - DNA, 27 bp, Artificial sequence
  SiRNA target sequence
taaatgaatgcaggaaattgtttaata

SEQ ID NO: 11587 - DNA, 27 bp, Artificial sequence
  SiRNA target sequence
aaatgaatgcaggaaattgtttaatac

SEQ ID NO: 11588 - DNA, 27 bp, Artificial sequence
  SiRNA target sequence
aatgaatgcaggaaattgtttaataca

SEQ ID NO: 11589 - DNA, 27 bp, Artificial sequence
  SiRNA target sequence
atgaatgcaggaaattgtttaatacat

SEQ ID NO: 11590 - DNA, 27 bp, Artificial sequence
  SiRNA target sequence
tgaatgcaggaaattgtttaatacatc

SEQ ID NO: 11591 - DNA, 27 bp, Artificial sequence
  SiRNA target sequence
gaatgcaggaaattgtttaatacatca

SEQ ID NO: 11592 - DNA, 27 bp, Artificial sequence
  SiRNA target sequence
aatgcaggaaattgtttaatacatcac

SEQ ID NO: 11593 - DNA, 27 bp, Artificial sequence
  SiRNA target sequence
atgcaggaaattgtttaatacatcact

SEQ ID NO: 11594 - DNA, 27 bp, Artificial sequence
  SiRNA target sequence
tgcaggaaattgtttaatacatcactt

SEQ ID NO: 11595 - DNA, 27 bp, Artificial sequence
  SiRNA target sequence
gcaggaaattgtttaatacatcacttc

SEQ ID NO: 11596 - DNA, 27 bp, Artificial sequence
  SiRNA target sequence
caggaaattgtttaatacatcacttca

SEQ ID NO: 11597 - DNA, 27 bp, Artificial sequence
  SiRNA target sequence
aggaaattgtttaatacatcacttcaa

SEQ ID NO: 11598 - DNA, 27 bp, Artificial sequence
  SiRNA target sequence
ggaaattgtttaatacatcacttcaat

SEQ ID NO: 11599 - DNA, 27 bp, Artificial sequence
  SiRNA target sequence
gaaattgtttaatacatcacttcaata

SEQ ID NO: 11600 - DNA, 27 bp, Artificial sequence
  SiRNA target sequence
aaattgtttaatacatcacttcaatat

SEQ ID NO: 11601 - DNA, 27 bp, Artificial sequence
  SiRNA target sequence
aattgtttaatacatcacttcaatatt

SEQ ID NO: 11602 - DNA, 27 bp, Artificial sequence
  SiRNA target sequence
attgtttaatacatcacttcaatattg

SEQ ID NO: 11603 - DNA, 27 bp, Artificial sequence
  SiRNA target sequence
ttgtttaatacatcacttcaatattgt

SEQ ID NO: 11604 - DNA, 27 bp, Artificial sequence
  SiRNA target sequence
tgtttaatacatcacttcaatattgtt

SEQ ID NO: 11605 - DNA, 27 bp, Artificial sequence
  SiRNA target sequence
gtttaatacatcacttcaatattgttg

SEQ ID NO: 11606 - DNA, 27 bp, Artificial sequence
  SiRNA target sequence
tttaatacatcacttcaatattgttgt

SEQ ID NO: 11607 - DNA, 27 bp, Artificial sequence
  SiRNA target sequence
ttaatacatcacttcaatattgttgta

SEQ ID NO: 11608 - DNA, 27 bp, Artificial sequence
  SiRNA target sequence
taatacatcacttcaatattgttgtaa

SEQ ID NO: 11609 - DNA, 27 bp, Artificial sequence
  SiRNA target sequence
aatacatcacttcaatattgttgtaat

SEQ ID NO: 11610 - DNA, 27 bp, Artificial sequence
  SiRNA target sequence
atacatcacttcaatattgttgtaatt

SEQ ID NO: 11611 - DNA, 27 bp, Artificial sequence
  SiRNA target sequence
tacatcacttcaatattgttgtaattc

SEQ ID NO: 11612 - DNA, 27 bp, Artificial sequence
  SiRNA target sequence
acatcacttcaatattgttgtaattct

SEQ ID NO: 11613 - DNA, 27 bp, Artificial sequence
  SiRNA target sequence
catcacttcaatattgttgtaattctg

SEQ ID NO: 11614 - DNA, 27 bp, Artificial sequence
  SiRNA target sequence
atcacttcaatattgttgtaattctga

SEQ ID NO: 11615 - DNA, 27 bp, Artificial sequence
  SiRNA target sequence
tcacttcaatattgttgtaattctgat

SEQ ID NO: 11616 - DNA, 27 bp, Artificial sequence
  SiRNA target sequence
cacttcaatattgttgtaattctgatg

SEQ ID NO: 11617 - DNA, 27 bp, Artificial sequence
  SiRNA target sequence
acttcaatattgttgtaattctgatga

SEQ ID NO: 11618 - DNA, 27 bp, Artificial sequence
  SiRNA target sequence
cttcaatattgttgtaattctgatgag

SEQ ID NO: 11619 - DNA, 27 bp, Artificial sequence
  SiRNA target sequence
ttcaatattgttgtaattctgatgagg

SEQ ID NO: 11620 - DNA, 27 bp, Artificial sequence
  SiRNA target sequence
tcaatattgttgtaattctgatgaggt

SEQ ID NO: 11621 - DNA, 27 bp, Artificial sequence
  SiRNA target sequence
caatattgttgtaattctgatgaggtt

SEQ ID NO: 11622 - DNA, 27 bp, Artificial sequence
  SiRNA target sequence
aatattgttgtaattctgatgaggttt

SEQ ID NO: 11623 - DNA, 27 bp, Artificial sequence
  SiRNA target sequence
atattgttgtaattctgatgaggtttt

SEQ ID NO: 11624 - DNA, 27 bp, Artificial sequence
  SiRNA target sequence
tattgttgtaattctgatgaggttttt

SEQ ID NO: 11625 - DNA, 27 bp, Artificial sequence
  SiRNA target sequence
attgttgtaattctgatgaggttttta

SEQ ID NO: 11626 - DNA, 27 bp, Artificial sequence
  SiRNA target sequence
ttgttgtaattctgatgaggtttttat

SEQ ID NO: 11627 - DNA, 27 bp, Artificial sequence
  SiRNA target sequence
tgttgtaattctgatgaggtttttatt

SEQ ID NO: 11628 - DNA, 27 bp, Artificial sequence
  SiRNA target sequence
gttgtaattctgatgaggtttttattg

SEQ ID NO: 11629 - DNA, 27 bp, Artificial sequence
  SiRNA target sequence
ttgtaattctgatgaggtttttattgt

SEQ ID NO: 11630 - DNA, 27 bp, Artificial sequence
  SiRNA target sequence
tgtaattctgatgaggtttttattgtt

SEQ ID NO: 11631 - DNA, 27 bp, Artificial sequence
  SiRNA target sequence
gtaattctgatgaggtttttattgtta

SEQ ID NO: 11632 - DNA, 27 bp, Artificial sequence
  SiRNA target sequence
taattctgatgaggtttttattgttaa

SEQ ID NO: 11633 - DNA, 27 bp, Artificial sequence
  SiRNA target sequence
aattctgatgaggtttttattgttaag

SEQ ID NO: 11634 - DNA, 27 bp, Artificial sequence
  SiRNA target sequence
attctgatgaggtttttattgttaagc

SEQ ID NO: 11635 - DNA, 27 bp, Artificial sequence
  SiRNA target sequence
ttctgatgaggtttttattgttaagca

SEQ ID NO: 11636 - DNA, 27 bp, Artificial sequence
  SiRNA target sequence
tctgatgaggtttttattgttaagcag

SEQ ID NO: 11637 - DNA, 27 bp, Artificial sequence
  SiRNA target sequence
ctgatgaggtttttattgttaagcagt

SEQ ID NO: 11638 - DNA, 27 bp, Artificial sequence
  SiRNA target sequence
tgatgaggtttttattgttaagcagtc

SEQ ID NO: 11639 - DNA, 27 bp, Artificial sequence
  SiRNA target sequence
gatgaggtttttattgttaagcagtca

SEQ ID NO: 11640 - DNA, 27 bp, Artificial sequence
  SiRNA target sequence
atgaggtttttattgttaagcagtcac

SEQ ID NO: 11641 - DNA, 27 bp, Artificial sequence
  SiRNA target sequence
tgaggtttttattgttaagcagtcact

SEQ ID NO: 11642 - DNA, 27 bp, Artificial sequence
  SiRNA target sequence
gaggtttttattgttaagcagtcactt

SEQ ID NO: 11643 - DNA, 27 bp, Artificial sequence
  SiRNA target sequence
aggtttttattgttaagcagtcactta

SEQ ID NO: 11644 - DNA, 27 bp, Artificial sequence
  SiRNA target sequence
ggtttttattgttaagcagtcacttat

SEQ ID NO: 11645 - DNA, 27 bp, Artificial sequence
  SiRNA target sequence
gtttttattgttaagcagtcacttatt

SEQ ID NO: 11646 - DNA, 27 bp, Artificial sequence
  SiRNA target sequence
tttttattgttaagcagtcacttattt

SEQ ID NO: 11647 - DNA, 27 bp, Artificial sequence
  SiRNA target sequence
ttttattgttaagcagtcacttatttt

SEQ ID NO: 11648 - DNA, 27 bp, Artificial sequence
  SiRNA target sequence
tttattgttaagcagtcacttatttta

SEQ ID NO: 11649 - DNA, 27 bp, Artificial sequence
  SiRNA target sequence
ttattgttaagcagtcacttattttaa

SEQ ID NO: 11650 - DNA, 27 bp, Artificial sequence
  SiRNA target sequence
tattgttaagcagtcacttattttaat

SEQ ID NO: 11651 - DNA, 27 bp, Artificial sequence
  SiRNA target sequence
attgttaagcagtcacttattttaata

SEQ ID NO: 11652 - DNA, 27 bp, Artificial sequence
  SiRNA target sequence
ttgttaagcagtcacttattttaatag

SEQ ID NO: 11653 - DNA, 27 bp, Artificial sequence
  SiRNA target sequence
tgttaagcagtcacttattttaataga

SEQ ID NO: 11654 - DNA, 27 bp, Artificial sequence
  SiRNA target sequence
gttaagcagtcacttattttaatagaa

SEQ ID NO: 11655 - DNA, 27 bp, Artificial sequence
  SiRNA target sequence
ttaagcagtcacttattttaatagaag

SEQ ID NO: 11656 - DNA, 27 bp, Artificial sequence
  SiRNA target sequence
taagcagtcacttattttaatagaagt

SEQ ID NO: 11657 - DNA, 27 bp, Artificial sequence
  SiRNA target sequence
aagcagtcacttattttaatagaagta

SEQ ID NO: 11658 - DNA, 27 bp, Artificial sequence
  SiRNA target sequence
agcagtcacttattttaatagaagtac

SEQ ID NO: 11659 - DNA, 27 bp, Artificial sequence
  SiRNA target sequence
gcagtcacttattttaatagaagtaca

SEQ ID NO: 11660 - DNA, 27 bp, Artificial sequence
  SiRNA target sequence
cagtcacttattttaatagaagtacat

SEQ ID NO: 11661 - DNA, 27 bp, Artificial sequence
  SiRNA target sequence
agtcacttattttaatagaagtacatg

SEQ ID NO: 11662 - DNA, 27 bp, Artificial sequence
  SiRNA target sequence
gtcacttattttaatagaagtacatga

SEQ ID NO: 11663 - DNA, 27 bp, Artificial sequence
  SiRNA target sequence
tcacttattttaatagaagtacatgaa

SEQ ID NO: 11664 - DNA, 27 bp, Artificial sequence
  SiRNA target sequence
cacttattttaatagaagtacatgaat

SEQ ID NO: 11665 - DNA, 27 bp, Artificial sequence
  SiRNA target sequence
acttattttaatagaagtacatgaata

SEQ ID NO: 11666 - DNA, 27 bp, Artificial sequence
  SiRNA target sequence
cttattttaatagaagtacatgaatac

SEQ ID NO: 11667 - DNA, 27 bp, Artificial sequence
  SiRNA target sequence
ttattttaatagaagtacatgaataca

SEQ ID NO: 11668 - DNA, 27 bp, Artificial sequence
  SiRNA target sequence
tattttaatagaagtacatgaatacat

SEQ ID NO: 11669 - DNA, 27 bp, Artificial sequence
  SiRNA target sequence
attttaatagaagtacatgaatacatc

SEQ ID NO: 11670 - DNA, 27 bp, Artificial sequence
  SiRNA target sequence
ttttaatagaagtacatgaatacatca

SEQ ID NO: 11671 - DNA, 27 bp, Artificial sequence
  SiRNA target sequence
tttaatagaagtacatgaatacatcaa

SEQ ID NO: 11672 - DNA, 27 bp, Artificial sequence
  SiRNA target sequence
ttaatagaagtacatgaatacatcaaa

SEQ ID NO: 11673 - DNA, 27 bp, Artificial sequence
  SiRNA target sequence
taatagaagtacatgaatacatcaaag

SEQ ID NO: 11674 - DNA, 27 bp, Artificial sequence
  SiRNA target sequence
aatagaagtacatgaatacatcaaaga

SEQ ID NO: 11675 - DNA, 27 bp, Artificial sequence
  SiRNA target sequence
atagaagtacatgaatacatcaaagaa

SEQ ID NO: 11676 - DNA, 27 bp, Artificial sequence
  SiRNA target sequence
tagaagtacatgaatacatcaaagaaa

SEQ ID NO: 11677 - DNA, 27 bp, Artificial sequence
  SiRNA target sequence
agaagtacatgaatacatcaaagaaaa

SEQ ID NO: 11678 - DNA, 27 bp, Artificial sequence
  SiRNA target sequence
gaagtacatgaatacatcaaagaaaat

SEQ ID NO: 11679 - DNA, 27 bp, Artificial sequence
  SiRNA target sequence
aagtacatgaatacatcaaagaaaata

SEQ ID NO: 11680 - DNA, 27 bp, Artificial sequence
  SiRNA target sequence
agtacatgaatacatcaaagaaaataa

SEQ ID NO: 11681 - DNA, 27 bp, Artificial sequence
  SiRNA target sequence
gtacatgaatacatcaaagaaaataaa

SEQ ID NO: 11682 - DNA, 27 bp, Artificial sequence
  SiRNA target sequence
tacatgaatacatcaaagaaaataaaa

SEQ ID NO: 11683 - DNA, 27 bp, Artificial sequence
  SiRNA target sequence
acatgaatacatcaaagaaaataaaat

SEQ ID NO: 11684 - DNA, 27 bp, Artificial sequence
  SiRNA target sequence
catgaatacatcaaagaaaataaaata

SEQ ID NO: 11685 - DNA, 27 bp, Artificial sequence
  SiRNA target sequence
atgaatacatcaaagaaaataaaatat

SEQ ID NO: 11686 - DNA, 27 bp, Artificial sequence
  SiRNA target sequence
tgaatacatcaaagaaaataaaatata

SEQ ID NO: 11687 - DNA, 27 bp, Artificial sequence
  SiRNA target sequence
gaatacatcaaagaaaataaaatataa

SEQ ID NO: 11688 - DNA, 19 bp, Artificial sequence
  SiRNA target sequence
atgaaatctttctacaaaa

SEQ ID NO: 11689 - DNA, 19 bp, Artificial sequence
  SiRNA target sequence
tgaaatctttctacaaaaa

SEQ ID NO: 11690 - DNA, 19 bp, Artificial sequence
  SiRNA target sequence
gaaatctttctacaaaaaa

SEQ ID NO: 11691 - DNA, 19 bp, Artificial sequence
  SiRNA target sequence
aaatctttctacaaaaaaa

SEQ ID NO: 11692 - DNA, 19 bp, Artificial sequence
  SiRNA target sequence
aatctttctacaaaaaaat

SEQ ID NO: 11693 - DNA, 19 bp, Artificial sequence
  SiRNA target sequence
atctttctacaaaaaaata

SEQ ID NO: 11694 - DNA, 19 bp, Artificial sequence
  SiRNA target sequence
tctttctacaaaaaaataa

SEQ ID NO: 11695 - DNA, 19 bp, Artificial sequence
  SiRNA target sequence
ctttctacaaaaaaataaa

SEQ ID NO: 11696 - DNA, 19 bp, Artificial sequence
  SiRNA target sequence
tttctacaaaaaaataaaa

SEQ ID NO: 11697 - DNA, 19 bp, Artificial sequence
  SiRNA target sequence
ttctacaaaaaaataaaaa

SEQ ID NO: 11698 - DNA, 19 bp, Artificial sequence
  SiRNA target sequence
tctacaaaaaaataaaaag

SEQ ID NO: 11699 - DNA, 19 bp, Artificial sequence
  SiRNA target sequence
ctacaaaaaaataaaaagt

SEQ ID NO: 11700 - DNA, 19 bp, Artificial sequence
  SiRNA target sequence
tacaaaaaaataaaaagtt

SEQ ID NO: 11701 - DNA, 19 bp, Artificial sequence
  SiRNA target sequence
acaaaaaaataaaaagtta

SEQ ID NO: 11702 - DNA, 19 bp, Artificial sequence
  SiRNA target sequence
caaaaaaataaaaagttat

SEQ ID NO: 11703 - DNA, 19 bp, Artificial sequence
  SiRNA target sequence
aaaaaaataaaaagttatt

SEQ ID NO: 11704 - DNA, 19 bp, Artificial sequence
  SiRNA target sequence
aaaaaataaaaagttattt

SEQ ID NO: 11705 - DNA, 19 bp, Artificial sequence
  SiRNA target sequence
aaaaataaaaagttattta

SEQ ID NO: 11706 - DNA, 19 bp, Artificial sequence
  SiRNA target sequence
aaaataaaaagttatttat

SEQ ID NO: 11707 - DNA, 19 bp, Artificial sequence
  SiRNA target sequence
aaataaaaagttatttatt

SEQ ID NO: 11708 - DNA, 19 bp, Artificial sequence
  SiRNA target sequence
aataaaaagttatttattc

SEQ ID NO: 11709 - DNA, 19 bp, Artificial sequence
  SiRNA target sequence
ataaaaagttatttattca

SEQ ID NO: 11710 - DNA, 19 bp, Artificial sequence
  SiRNA target sequence
taaaaagttatttattcaa

SEQ ID NO: 11711 - DNA, 19 bp, Artificial sequence
  SiRNA target sequence
aaaaagttatttattcaaa

SEQ ID NO: 11712 - DNA, 19 bp, Artificial sequence
  SiRNA target sequence
aaaagttatttattcaaat

SEQ ID NO: 11713 - DNA, 19 bp, Artificial sequence
  SiRNA target sequence
aaagttatttattcaaatc

SEQ ID NO: 11714 - DNA, 19 bp, Artificial sequence
  SiRNA target sequence
aagttatttattcaaatct

SEQ ID NO: 11715 - DNA, 19 bp, Artificial sequence
  SiRNA target sequence
agttatttattcaaatctg

SEQ ID NO: 11716 - DNA, 19 bp, Artificial sequence
  SiRNA target sequence
gttatttattcaaatctgc

SEQ ID NO: 11717 - DNA, 19 bp, Artificial sequence
  SiRNA target sequence
ttatttattcaaatctgcc

SEQ ID NO: 11718 - DNA, 19 bp, Artificial sequence
  SiRNA target sequence
tatttattcaaatctgcca

SEQ ID NO: 11719 - DNA, 19 bp, Artificial sequence
  SiRNA target sequence
atttattcaaatctgccat

SEQ ID NO: 11720 - DNA, 19 bp, Artificial sequence
  SiRNA target sequence
tttattcaaatctgccatt

SEQ ID NO: 11721 - DNA, 19 bp, Artificial sequence
  SiRNA target sequence
ttattcaaatctgccatta

SEQ ID NO: 11722 - DNA, 19 bp, Artificial sequence
  SiRNA target sequence
tattcaaatctgccattaa

SEQ ID NO: 11723 - DNA, 19 bp, Artificial sequence
  SiRNA target sequence
attcaaatctgccattaat

SEQ ID NO: 11724 - DNA, 19 bp, Artificial sequence
  SiRNA target sequence
ttcaaatctgccattaata

SEQ ID NO: 11725 - DNA, 19 bp, Artificial sequence
  SiRNA target sequence
tcaaatctgccattaatac

SEQ ID NO: 11726 - DNA, 19 bp, Artificial sequence
  SiRNA target sequence
caaatctgccattaataca

SEQ ID NO: 11727 - DNA, 19 bp, Artificial sequence
  SiRNA target sequence
aaatctgccattaatacat

SEQ ID NO: 11728 - DNA, 19 bp, Artificial sequence
  SiRNA target sequence
aatctgccattaatacatc

SEQ ID NO: 11729 - DNA, 19 bp, Artificial sequence
  SiRNA target sequence
atctgccattaatacatct

SEQ ID NO: 11730 - DNA, 19 bp, Artificial sequence
  SiRNA target sequence
tctgccattaatacatctt

SEQ ID NO: 11731 - DNA, 19 bp, Artificial sequence
  SiRNA target sequence
ctgccattaatacatcttt

SEQ ID NO: 11732 - DNA, 19 bp, Artificial sequence
  SiRNA target sequence
tgccattaatacatctttt

SEQ ID NO: 11733 - DNA, 19 bp, Artificial sequence
  SiRNA target sequence
gccattaatacatcttttg

SEQ ID NO: 11734 - DNA, 19 bp, Artificial sequence
  SiRNA target sequence
ccattaatacatcttttga

SEQ ID NO: 11735 - DNA, 19 bp, Artificial sequence
  SiRNA target sequence
cattaatacatcttttgat

SEQ ID NO: 11736 - DNA, 19 bp, Artificial sequence
  SiRNA target sequence
attaatacatcttttgata

SEQ ID NO: 11737 - DNA, 19 bp, Artificial sequence
  SiRNA target sequence
ttaatacatcttttgatac

SEQ ID NO: 11738 - DNA, 19 bp, Artificial sequence
  SiRNA target sequence
taatacatcttttgatact

SEQ ID NO: 11739 - DNA, 19 bp, Artificial sequence
  SiRNA target sequence
aatacatcttttgatactt

SEQ ID NO: 11740 - DNA, 19 bp, Artificial sequence
  SiRNA target sequence
atacatcttttgatacttt

SEQ ID NO: 11741 - DNA, 19 bp, Artificial sequence
  SiRNA target sequence
tacatcttttgatactttt

SEQ ID NO: 11742 - DNA, 19 bp, Artificial sequence
  SiRNA target sequence
acatcttttgatactttta

SEQ ID NO: 11743 - DNA, 19 bp, Artificial sequence
  SiRNA target sequence
catcttttgatacttttaa

SEQ ID NO: 11744 - DNA, 19 bp, Artificial sequence
  SiRNA target sequence
atcttttgatacttttaat

SEQ ID NO: 11745 - DNA, 19 bp, Artificial sequence
  SiRNA target sequence
tcttttgatacttttaatt

SEQ ID NO: 11746 - DNA, 19 bp, Artificial sequence
  SiRNA target sequence
cttttgatacttttaattt

SEQ ID NO: 11747 - DNA, 19 bp, Artificial sequence
  SiRNA target sequence
ttttgatacttttaattta

SEQ ID NO: 11748 - DNA, 19 bp, Artificial sequence
  SiRNA target sequence
tttgatacttttaatttag

SEQ ID NO: 11749 - DNA, 19 bp, Artificial sequence
  SiRNA target sequence
ttgatacttttaatttaga

SEQ ID NO: 11750 - DNA, 19 bp, Artificial sequence
  SiRNA target sequence
tgatacttttaatttagaa

SEQ ID NO: 11751 - DNA, 19 bp, Artificial sequence
  SiRNA target sequence
gatacttttaatttagaaa

SEQ ID NO: 11752 - DNA, 19 bp, Artificial sequence
  SiRNA target sequence
atacttttaatttagaaaa

SEQ ID NO: 11753 - DNA, 19 bp, Artificial sequence
  SiRNA target sequence
tacttttaatttagaaaat

SEQ ID NO: 11754 - DNA, 19 bp, Artificial sequence
  SiRNA target sequence
acttttaatttagaaaatg

SEQ ID NO: 11755 - DNA, 19 bp, Artificial sequence
  SiRNA target sequence
cttttaatttagaaaatgt

SEQ ID NO: 11756 - DNA, 19 bp, Artificial sequence
  SiRNA target sequence
ttttaatttagaaaatgta

SEQ ID NO: 11757 - DNA, 19 bp, Artificial sequence
  SiRNA target sequence
tttaatttagaaaatgtaa

SEQ ID NO: 11758 - DNA, 19 bp, Artificial sequence
  SiRNA target sequence
ttaatttagaaaatgtaag

SEQ ID NO: 11759 - DNA, 19 bp, Artificial sequence
  SiRNA target sequence
taatttagaaaatgtaagc

SEQ ID NO: 11760 - DNA, 19 bp, Artificial sequence
  SiRNA target sequence
aatttagaaaatgtaagca

SEQ ID NO: 11761 - DNA, 19 bp, Artificial sequence
  SiRNA target sequence
atttagaaaatgtaagcat

SEQ ID NO: 11762 - DNA, 19 bp, Artificial sequence
  SiRNA target sequence
tttagaaaatgtaagcatt

SEQ ID NO: 11763 - DNA, 19 bp, Artificial sequence
  SiRNA target sequence
ttagaaaatgtaagcatta

SEQ ID NO: 11764 - DNA, 19 bp, Artificial sequence
  SiRNA target sequence
tagaaaatgtaagcattac

SEQ ID NO: 11765 - DNA, 19 bp, Artificial sequence
  SiRNA target sequence
agaaaatgtaagcattact

SEQ ID NO: 11766 - DNA, 19 bp, Artificial sequence
  SiRNA target sequence
gaaaatgtaagcattacta

SEQ ID NO: 11767 - DNA, 19 bp, Artificial sequence
  SiRNA target sequence
aaaatgtaagcattactag

SEQ ID NO: 11768 - DNA, 19 bp, Artificial sequence
  SiRNA target sequence
aaatgtaagcattactagc

SEQ ID NO: 11769 - DNA, 19 bp, Artificial sequence
  SiRNA target sequence
aatgtaagcattactagct

SEQ ID NO: 11770 - DNA, 19 bp, Artificial sequence
  SiRNA target sequence
atgtaagcattactagctt

SEQ ID NO: 11771 - DNA, 19 bp, Artificial sequence
  SiRNA target sequence
tgtaagcattactagctta

SEQ ID NO: 11772 - DNA, 19 bp, Artificial sequence
  SiRNA target sequence
gtaagcattactagcttaa

SEQ ID NO: 11773 - DNA, 19 bp, Artificial sequence
  SiRNA target sequence
taagcattactagcttaaa

SEQ ID NO: 11774 - DNA, 19 bp, Artificial sequence
  SiRNA target sequence
aagcattactagcttaaat

SEQ ID NO: 11775 - DNA, 19 bp, Artificial sequence
  SiRNA target sequence
agcattactagcttaaata

SEQ ID NO: 11776 - DNA, 19 bp, Artificial sequence
  SiRNA target sequence
gcattactagcttaaatac

SEQ ID NO: 11777 - DNA, 19 bp, Artificial sequence
  SiRNA target sequence
cattactagcttaaatacg

SEQ ID NO: 11778 - DNA, 19 bp, Artificial sequence
  SiRNA target sequence
attactagcttaaatacgt

SEQ ID NO: 11779 - DNA, 19 bp, Artificial sequence
  SiRNA target sequence
ttactagcttaaatacgta

SEQ ID NO: 11780 - DNA, 19 bp, Artificial sequence
  SiRNA target sequence
tactagcttaaatacgtac

SEQ ID NO: 11781 - DNA, 19 bp, Artificial sequence
  SiRNA target sequence
actagcttaaatacgtaca

SEQ ID NO: 11782 - DNA, 19 bp, Artificial sequence
  SiRNA target sequence
ctagcttaaatacgtacac

SEQ ID NO: 11783 - DNA, 19 bp, Artificial sequence
  SiRNA target sequence
tagcttaaatacgtacacc

SEQ ID NO: 11784 - DNA, 19 bp, Artificial sequence
  SiRNA target sequence
agcttaaatacgtacaccg

SEQ ID NO: 11785 - DNA, 19 bp, Artificial sequence
  SiRNA target sequence
gcttaaatacgtacaccgg

SEQ ID NO: 11786 - DNA, 19 bp, Artificial sequence
  SiRNA target sequence
cttaaatacgtacaccggt

SEQ ID NO: 11787 - DNA, 19 bp, Artificial sequence
  SiRNA target sequence
ttaaatacgtacaccggtg

SEQ ID NO: 11788 - DNA, 19 bp, Artificial sequence
  SiRNA target sequence
taaatacgtacaccggtgt

SEQ ID NO: 11789 - DNA, 19 bp, Artificial sequence
  SiRNA target sequence
aaatacgtacaccggtgtt

SEQ ID NO: 11790 - DNA, 19 bp, Artificial sequence
  SiRNA target sequence
aatacgtacaccggtgtta

SEQ ID NO: 11791 - DNA, 19 bp, Artificial sequence
  SiRNA target sequence
atacgtacaccggtgttaa

SEQ ID NO: 11792 - DNA, 19 bp, Artificial sequence
  SiRNA target sequence
tacgtacaccggtgttaaa

SEQ ID NO: 11793 - DNA, 19 bp, Artificial sequence
  SiRNA target sequence
acgtacaccggtgttaaaa

SEQ ID NO: 11794 - DNA, 19 bp, Artificial sequence
  SiRNA target sequence
cgtacaccggtgttaaaac

SEQ ID NO: 11795 - DNA, 19 bp, Artificial sequence
  SiRNA target sequence
gtacaccggtgttaaaacc

SEQ ID NO: 11796 - DNA, 19 bp, Artificial sequence
  SiRNA target sequence
tacaccggtgttaaaaccg

SEQ ID NO: 11797 - DNA, 19 bp, Artificial sequence
  SiRNA target sequence
acaccggtgttaaaaccga

SEQ ID NO: 11798 - DNA, 19 bp, Artificial sequence
  SiRNA target sequence
caccggtgttaaaaccgaa

SEQ ID NO: 11799 - DNA, 19 bp, Artificial sequence
  SiRNA target sequence
accggtgttaaaaccgaaa

SEQ ID NO: 11800 - DNA, 19 bp, Artificial sequence
  SiRNA target sequence
ccggtgttaaaaccgaaat

SEQ ID NO: 11801 - DNA, 19 bp, Artificial sequence
  SiRNA target sequence
cggtgttaaaaccgaaata

SEQ ID NO: 11802 - DNA, 19 bp, Artificial sequence
  SiRNA target sequence
ggtgttaaaaccgaaatat

SEQ ID NO: 11803 - DNA, 19 bp, Artificial sequence
  SiRNA target sequence
gtgttaaaaccgaaatatc

SEQ ID NO: 11804 - DNA, 19 bp, Artificial sequence
  SiRNA target sequence
tgttaaaaccgaaatatca

SEQ ID NO: 11805 - DNA, 19 bp, Artificial sequence
  SiRNA target sequence
gttaaaaccgaaatatcaa

SEQ ID NO: 11806 - DNA, 19 bp, Artificial sequence
  SiRNA target sequence
ttaaaaccgaaatatcaaa

SEQ ID NO: 11807 - DNA, 19 bp, Artificial sequence
  SiRNA target sequence
taaaaccgaaatatcaaaa

SEQ ID NO: 11808 - DNA, 19 bp, Artificial sequence
  SiRNA target sequence
aaaaccgaaatatcaaaaa

SEQ ID NO: 11809 - DNA, 19 bp, Artificial sequence
  SiRNA target sequence
aaaccgaaatatcaaaaac

SEQ ID NO: 11810 - DNA, 19 bp, Artificial sequence
  SiRNA target sequence
aaccgaaatatcaaaaacc

SEQ ID NO: 11811 - DNA, 19 bp, Artificial sequence
  SiRNA target sequence
accgaaatatcaaaaaccg

SEQ ID NO: 11812 - DNA, 19 bp, Artificial sequence
  SiRNA target sequence
ccgaaatatcaaaaaccgt

SEQ ID NO: 11813 - DNA, 19 bp, Artificial sequence
  SiRNA target sequence
cgaaatatcaaaaaccgta

SEQ ID NO: 11814 - DNA, 19 bp, Artificial sequence
  SiRNA target sequence
gaaatatcaaaaaccgtat

SEQ ID NO: 11815 - DNA, 19 bp, Artificial sequence
  SiRNA target sequence
aaatatcaaaaaccgtatc

SEQ ID NO: 11816 - DNA, 19 bp, Artificial sequence
  SiRNA target sequence
aatatcaaaaaccgtatca

SEQ ID NO: 11817 - DNA, 19 bp, Artificial sequence
  SiRNA target sequence
atatcaaaaaccgtatcac

SEQ ID NO: 11818 - DNA, 19 bp, Artificial sequence
  SiRNA target sequence
tatcaaaaaccgtatcacc

SEQ ID NO: 11819 - DNA, 19 bp, Artificial sequence
  SiRNA target sequence
atcaaaaaccgtatcacca

SEQ ID NO: 11820 - DNA, 19 bp, Artificial sequence
  SiRNA target sequence
tcaaaaaccgtatcaccac

SEQ ID NO: 11821 - DNA, 19 bp, Artificial sequence
  SiRNA target sequence
caaaaaccgtatcaccaca

SEQ ID NO: 11822 - DNA, 19 bp, Artificial sequence
  SiRNA target sequence
aaaaaccgtatcaccacac

SEQ ID NO: 11823 - DNA, 19 bp, Artificial sequence
  SiRNA target sequence
aaaaccgtatcaccacact

SEQ ID NO: 11824 - DNA, 19 bp, Artificial sequence
  SiRNA target sequence
aaaccgtatcaccacactt

SEQ ID NO: 11825 - DNA, 19 bp, Artificial sequence
  SiRNA target sequence
aaccgtatcaccacacttc

SEQ ID NO: 11826 - DNA, 19 bp, Artificial sequence
  SiRNA target sequence
accgtatcaccacacttcc

SEQ ID NO: 11827 - DNA, 19 bp, Artificial sequence
  SiRNA target sequence
ccgtatcaccacacttcca

SEQ ID NO: 11828 - DNA, 19 bp, Artificial sequence
  SiRNA target sequence
cgtatcaccacacttccag

SEQ ID NO: 11829 - DNA, 19 bp, Artificial sequence
  SiRNA target sequence
gtatcaccacacttccaga

SEQ ID NO: 11830 - DNA, 19 bp, Artificial sequence
  SiRNA target sequence
tatcaccacacttccagat

SEQ ID NO: 11831 - DNA, 19 bp, Artificial sequence
  SiRNA target sequence
atcaccacacttccagatt

SEQ ID NO: 11832 - DNA, 19 bp, Artificial sequence
  SiRNA target sequence
tcaccacacttccagattt

SEQ ID NO: 11833 - DNA, 19 bp, Artificial sequence
  SiRNA target sequence
caccacacttccagatttc

SEQ ID NO: 11834 - DNA, 19 bp, Artificial sequence
  SiRNA target sequence
accacacttccagatttct

SEQ ID NO: 11835 - DNA, 19 bp, Artificial sequence
  SiRNA target sequence
ccacacttccagatttctc

SEQ ID NO: 11836 - DNA, 19 bp, Artificial sequence
  SiRNA target sequence
cacacttccagatttctca

SEQ ID NO: 11837 - DNA, 19 bp, Artificial sequence
  SiRNA target sequence
acacttccagatttctcat

SEQ ID NO: 11838 - DNA, 19 bp, Artificial sequence
  SiRNA target sequence
cacttccagatttctcatg

SEQ ID NO: 11839 - DNA, 19 bp, Artificial sequence
  SiRNA target sequence
acttccagatttctcatgt

SEQ ID NO: 11840 - DNA, 19 bp, Artificial sequence
  SiRNA target sequence
cttccagatttctcatgtc

SEQ ID NO: 11841 - DNA, 19 bp, Artificial sequence
  SiRNA target sequence
ttccagatttctcatgtct

SEQ ID NO: 11842 - DNA, 19 bp, Artificial sequence
  SiRNA target sequence
tccagatttctcatgtctc

SEQ ID NO: 11843 - DNA, 19 bp, Artificial sequence
  SiRNA target sequence
ccagatttctcatgtctct

SEQ ID NO: 11844 - DNA, 19 bp, Artificial sequence
  SiRNA target sequence
cagatttctcatgtctctt

SEQ ID NO: 11845 - DNA, 19 bp, Artificial sequence
  SiRNA target sequence
agatttctcatgtctcttc

SEQ ID NO: 11846 - DNA, 19 bp, Artificial sequence
  SiRNA target sequence
gatttctcatgtctcttct

SEQ ID NO: 11847 - DNA, 19 bp, Artificial sequence
  SiRNA target sequence
atttctcatgtctcttcta

SEQ ID NO: 11848 - DNA, 19 bp, Artificial sequence
  SiRNA target sequence
tttctcatgtctcttctat

SEQ ID NO: 11849 - DNA, 19 bp, Artificial sequence
  SiRNA target sequence
ttctcatgtctcttctatg

SEQ ID NO: 11850 - DNA, 19 bp, Artificial sequence
  SiRNA target sequence
tctcatgtctcttctatgg

SEQ ID NO: 11851 - DNA, 19 bp, Artificial sequence
  SiRNA target sequence
ctcatgtctcttctatggg

SEQ ID NO: 11852 - DNA, 19 bp, Artificial sequence
  SiRNA target sequence
tcatgtctcttctatgggc

SEQ ID NO: 11853 - DNA, 19 bp, Artificial sequence
  SiRNA target sequence
catgtctcttctatgggcg

SEQ ID NO: 11854 - DNA, 19 bp, Artificial sequence
  SiRNA target sequence
atgtctcttctatgggcgc

SEQ ID NO: 11855 - DNA, 19 bp, Artificial sequence
  SiRNA target sequence
tgtctcttctatgggcgca

SEQ ID NO: 11856 - DNA, 19 bp, Artificial sequence
  SiRNA target sequence
gtctcttctatgggcgcag

SEQ ID NO: 11857 - DNA, 19 bp, Artificial sequence
  SiRNA target sequence
tctcttctatgggcgcaga

SEQ ID NO: 11858 - DNA, 19 bp, Artificial sequence
  SiRNA target sequence
ctcttctatgggcgcagat

SEQ ID NO: 11859 - DNA, 19 bp, Artificial sequence
  SiRNA target sequence
tcttctatgggcgcagatt

SEQ ID NO: 11860 - DNA, 19 bp, Artificial sequence
  SiRNA target sequence
cttctatgggcgcagattt

SEQ ID NO: 11861 - DNA, 19 bp, Artificial sequence
  SiRNA target sequence
ttctatgggcgcagatttc

SEQ ID NO: 11862 - DNA, 19 bp, Artificial sequence
  SiRNA target sequence
tctatgggcgcagatttcg

SEQ ID NO: 11863 - DNA, 19 bp, Artificial sequence
  SiRNA target sequence
ctatgggcgcagatttcga

SEQ ID NO: 11864 - DNA, 19 bp, Artificial sequence
  SiRNA target sequence
tatgggcgcagatttcgac

SEQ ID NO: 11865 - DNA, 19 bp, Artificial sequence
  SiRNA target sequence
atgggcgcagatttcgaca

SEQ ID NO: 11866 - DNA, 19 bp, Artificial sequence
  SiRNA target sequence
tgggcgcagatttcgacat

SEQ ID NO: 11867 - DNA, 19 bp, Artificial sequence
  SiRNA target sequence
gggcgcagatttcgacata

SEQ ID NO: 11868 - DNA, 19 bp, Artificial sequence
  SiRNA target sequence
ggcgcagatttcgacataa

SEQ ID NO: 11869 - DNA, 19 bp, Artificial sequence
  SiRNA target sequence
gcgcagatttcgacataaa

SEQ ID NO: 11870 - DNA, 19 bp, Artificial sequence
  SiRNA target sequence
cgcagatttcgacataaaa

SEQ ID NO: 11871 - DNA, 19 bp, Artificial sequence
  SiRNA target sequence
gcagatttcgacataaaac

SEQ ID NO: 11872 - DNA, 19 bp, Artificial sequence
  SiRNA target sequence
cagatttcgacataaaaca

SEQ ID NO: 11873 - DNA, 19 bp, Artificial sequence
  SiRNA target sequence
agatttcgacataaaacag

SEQ ID NO: 11874 - DNA, 19 bp, Artificial sequence
  SiRNA target sequence
gatttcgacataaaacaga

SEQ ID NO: 11875 - DNA, 19 bp, Artificial sequence
  SiRNA target sequence
atttcgacataaaacagac

SEQ ID NO: 11876 - DNA, 19 bp, Artificial sequence
  SiRNA target sequence
tttcgacataaaacagaca

SEQ ID NO: 11877 - DNA, 19 bp, Artificial sequence
  SiRNA target sequence
ttcgacataaaacagacat

SEQ ID NO: 11878 - DNA, 19 bp, Artificial sequence
  SiRNA target sequence
tcgacataaaacagacata

SEQ ID NO: 11879 - DNA, 19 bp, Artificial sequence
  SiRNA target sequence
cgacataaaacagacatac

SEQ ID NO: 11880 - DNA, 19 bp, Artificial sequence
  SiRNA target sequence
gacataaaacagacatacg

SEQ ID NO: 11881 - DNA, 19 bp, Artificial sequence
  SiRNA target sequence
acataaaacagacatacgc

SEQ ID NO: 11882 - DNA, 19 bp, Artificial sequence
  SiRNA target sequence
cataaaacagacatacgcc

SEQ ID NO: 11883 - DNA, 19 bp, Artificial sequence
  SiRNA target sequence
ataaaacagacatacgcca

SEQ ID NO: 11884 - DNA, 19 bp, Artificial sequence
  SiRNA target sequence
taaaacagacatacgccac

SEQ ID NO: 11885 - DNA, 19 bp, Artificial sequence
  SiRNA target sequence
aaaacagacatacgccacg

SEQ ID NO: 11886 - DNA, 19 bp, Artificial sequence
  SiRNA target sequence
aaacagacatacgccacgt

SEQ ID NO: 11887 - DNA, 19 bp, Artificial sequence
  SiRNA target sequence
aacagacatacgccacgtt

SEQ ID NO: 11888 - DNA, 19 bp, Artificial sequence
  SiRNA target sequence
acagacatacgccacgttc

SEQ ID NO: 11889 - DNA, 19 bp, Artificial sequence
  SiRNA target sequence
cagacatacgccacgttct

SEQ ID NO: 11890 - DNA, 19 bp, Artificial sequence
  SiRNA target sequence
agacatacgccacgttctg

SEQ ID NO: 11891 - DNA, 19 bp, Artificial sequence
  SiRNA target sequence
gacatacgccacgttctgc

SEQ ID NO: 11892 - DNA, 19 bp, Artificial sequence
  SiRNA target sequence
acatacgccacgttctgct

SEQ ID NO: 11893 - DNA, 19 bp, Artificial sequence
  SiRNA target sequence
catacgccacgttctgctt

SEQ ID NO: 11894 - DNA, 19 bp, Artificial sequence
  SiRNA target sequence
atacgccacgttctgcttt

SEQ ID NO: 11895 - DNA, 19 bp, Artificial sequence
  SiRNA target sequence
tacgccacgttctgcttta

SEQ ID NO: 11896 - DNA, 19 bp, Artificial sequence
  SiRNA target sequence
acgccacgttctgctttaa

SEQ ID NO: 11897 - DNA, 19 bp, Artificial sequence
  SiRNA target sequence
cgccacgttctgctttaac

SEQ ID NO: 11898 - DNA, 19 bp, Artificial sequence
  SiRNA target sequence
gccacgttctgctttaaca

SEQ ID NO: 11899 - DNA, 19 bp, Artificial sequence
  SiRNA target sequence
ccacgttctgctttaacaa

SEQ ID NO: 11900 - DNA, 19 bp, Artificial sequence
  SiRNA target sequence
cacgttctgctttaacaat

SEQ ID NO: 11901 - DNA, 19 bp, Artificial sequence
  SiRNA target sequence
acgttctgctttaacaatc

SEQ ID NO: 11902 - DNA, 19 bp, Artificial sequence
  SiRNA target sequence
cgttctgctttaacaatct

SEQ ID NO: 11903 - DNA, 19 bp, Artificial sequence
  SiRNA target sequence
gttctgctttaacaatctt

SEQ ID NO: 11904 - DNA, 19 bp, Artificial sequence
  SiRNA target sequence
ttctgctttaacaatcttt

SEQ ID NO: 11905 - DNA, 19 bp, Artificial sequence
  SiRNA target sequence
tctgctttaacaatctttt

SEQ ID NO: 11906 - DNA, 19 bp, Artificial sequence
  SiRNA target sequence
ctgctttaacaatcttttg

SEQ ID NO: 11907 - DNA, 19 bp, Artificial sequence
  SiRNA target sequence
tgctttaacaatcttttgc

SEQ ID NO: 11908 - DNA, 19 bp, Artificial sequence
  SiRNA target sequence
gctttaacaatcttttgct

SEQ ID NO: 11909 - DNA, 19 bp, Artificial sequence
  SiRNA target sequence
ctttaacaatcttttgcta

SEQ ID NO: 11910 - DNA, 19 bp, Artificial sequence
  SiRNA target sequence
tttaacaatcttttgctac

SEQ ID NO: 11911 - DNA, 19 bp, Artificial sequence
  SiRNA target sequence
ttaacaatcttttgctaca

SEQ ID NO: 11912 - DNA, 19 bp, Artificial sequence
  SiRNA target sequence
taacaatcttttgctacaa

SEQ ID NO: 11913 - DNA, 19 bp, Artificial sequence
  SiRNA target sequence
aacaatcttttgctacaaa

SEQ ID NO: 11914 - DNA, 19 bp, Artificial sequence
  SiRNA target sequence
acaatcttttgctacaaac

SEQ ID NO: 11915 - DNA, 19 bp, Artificial sequence
  SiRNA target sequence
caatcttttgctacaaacg

SEQ ID NO: 11916 - DNA, 19 bp, Artificial sequence
  SiRNA target sequence
aatcttttgctacaaacga

SEQ ID NO: 11917 - DNA, 19 bp, Artificial sequence
  SiRNA target sequence
atcttttgctacaaacgag

SEQ ID NO: 11918 - DNA, 19 bp, Artificial sequence
  SiRNA target sequence
tcttttgctacaaacgagc

SEQ ID NO: 11919 - DNA, 19 bp, Artificial sequence
  SiRNA target sequence
cttttgctacaaacgagca

SEQ ID NO: 11920 - DNA, 19 bp, Artificial sequence
  SiRNA target sequence
ttttgctacaaacgagcat

SEQ ID NO: 11921 - DNA, 19 bp, Artificial sequence
  SiRNA target sequence
tttgctacaaacgagcata

SEQ ID NO: 11922 - DNA, 19 bp, Artificial sequence
  SiRNA target sequence
ttgctacaaacgagcatag

SEQ ID NO: 11923 - DNA, 19 bp, Artificial sequence
  SiRNA target sequence
tgctacaaacgagcataga

SEQ ID NO: 11924 - DNA, 19 bp, Artificial sequence
  SiRNA target sequence
gctacaaacgagcatagac

SEQ ID NO: 11925 - DNA, 19 bp, Artificial sequence
  SiRNA target sequence
ctacaaacgagcatagacc

SEQ ID NO: 11926 - DNA, 19 bp, Artificial sequence
  SiRNA target sequence
tacaaacgagcatagacca

SEQ ID NO: 11927 - DNA, 19 bp, Artificial sequence
  SiRNA target sequence
acaaacgagcatagaccaa

SEQ ID NO: 11928 - DNA, 19 bp, Artificial sequence
  SiRNA target sequence
caaacgagcatagaccaag

SEQ ID NO: 11929 - DNA, 19 bp, Artificial sequence
  SiRNA target sequence
aaacgagcatagaccaaga

SEQ ID NO: 11930 - DNA, 19 bp, Artificial sequence
  SiRNA target sequence
aacgagcatagaccaagac

SEQ ID NO: 11931 - DNA, 19 bp, Artificial sequence
  SiRNA target sequence
acgagcatagaccaagaca

SEQ ID NO: 11932 - DNA, 19 bp, Artificial sequence
  SiRNA target sequence
cgagcatagaccaagacaa

SEQ ID NO: 11933 - DNA, 19 bp, Artificial sequence
  SiRNA target sequence
gagcatagaccaagacaaa

SEQ ID NO: 11934 - DNA, 19 bp, Artificial sequence
  SiRNA target sequence
agcatagaccaagacaaaa

SEQ ID NO: 11935 - DNA, 19 bp, Artificial sequence
  SiRNA target sequence
gcatagaccaagacaaaat

SEQ ID NO: 11936 - DNA, 19 bp, Artificial sequence
  SiRNA target sequence
catagaccaagacaaaata

SEQ ID NO: 11937 - DNA, 19 bp, Artificial sequence
  SiRNA target sequence
atagaccaagacaaaatat

SEQ ID NO: 11938 - DNA, 19 bp, Artificial sequence
  SiRNA target sequence
tagaccaagacaaaatatt

SEQ ID NO: 11939 - DNA, 19 bp, Artificial sequence
  SiRNA target sequence
agaccaagacaaaatattt

SEQ ID NO: 11940 - DNA, 19 bp, Artificial sequence
  SiRNA target sequence
gaccaagacaaaatattta

SEQ ID NO: 11941 - DNA, 19 bp, Artificial sequence
  SiRNA target sequence
accaagacaaaatatttag

SEQ ID NO: 11942 - DNA, 19 bp, Artificial sequence
  SiRNA target sequence
ccaagacaaaatatttaga

SEQ ID NO: 11943 - DNA, 19 bp, Artificial sequence
  SiRNA target sequence
caagacaaaatatttagaa

SEQ ID NO: 11944 - DNA, 19 bp, Artificial sequence
  SiRNA target sequence
aagacaaaatatttagaat

SEQ ID NO: 11945 - DNA, 19 bp, Artificial sequence
  SiRNA target sequence
agacaaaatatttagaata

SEQ ID NO: 11946 - DNA, 19 bp, Artificial sequence
  SiRNA target sequence
gacaaaatatttagaataa

SEQ ID NO: 11947 - DNA, 19 bp, Artificial sequence
  SiRNA target sequence
acaaaatatttagaataag

SEQ ID NO: 11948 - DNA, 19 bp, Artificial sequence
  SiRNA target sequence
caaaatatttagaataaga

SEQ ID NO: 11949 - DNA, 19 bp, Artificial sequence
  SiRNA target sequence
aaaatatttagaataagag

SEQ ID NO: 11950 - DNA, 19 bp, Artificial sequence
  SiRNA target sequence
aaatatttagaataagagg

SEQ ID NO: 11951 - DNA, 19 bp, Artificial sequence
  SiRNA target sequence
aatatttagaataagaggt

SEQ ID NO: 11952 - DNA, 19 bp, Artificial sequence
  SiRNA target sequence
atatttagaataagaggta

SEQ ID NO: 11953 - DNA, 19 bp, Artificial sequence
  SiRNA target sequence
tatttagaataagaggtac

SEQ ID NO: 11954 - DNA, 19 bp, Artificial sequence
  SiRNA target sequence
atttagaataagaggtacc

SEQ ID NO: 11955 - DNA, 19 bp, Artificial sequence
  SiRNA target sequence
tttagaataagaggtaccc

SEQ ID NO: 11956 - DNA, 19 bp, Artificial sequence
  SiRNA target sequence
ttagaataagaggtaccca

SEQ ID NO: 11957 - DNA, 19 bp, Artificial sequence
  SiRNA target sequence
tagaataagaggtacccac

SEQ ID NO: 11958 - DNA, 19 bp, Artificial sequence
  SiRNA target sequence
agaataagaggtacccaca

SEQ ID NO: 11959 - DNA, 19 bp, Artificial sequence
  SiRNA target sequence
gaataagaggtacccacat

SEQ ID NO: 11960 - DNA, 19 bp, Artificial sequence
  SiRNA target sequence
aataagaggtacccacatg

SEQ ID NO: 11961 - DNA, 19 bp, Artificial sequence
  SiRNA target sequence
ataagaggtacccacatgt

SEQ ID NO: 11962 - DNA, 19 bp, Artificial sequence
  SiRNA target sequence
taagaggtacccacatgtt

SEQ ID NO: 11963 - DNA, 19 bp, Artificial sequence
  SiRNA target sequence
aagaggtacccacatgttt

SEQ ID NO: 11964 - DNA, 19 bp, Artificial sequence
  SiRNA target sequence
agaggtacccacatgttta

SEQ ID NO: 11965 - DNA, 19 bp, Artificial sequence
  SiRNA target sequence
gaggtacccacatgtttaa

SEQ ID NO: 11966 - DNA, 19 bp, Artificial sequence
  SiRNA target sequence
aggtacccacatgtttaaa

SEQ ID NO: 11967 - DNA, 19 bp, Artificial sequence
  SiRNA target sequence
ggtacccacatgtttaaaa

SEQ ID NO: 11968 - DNA, 19 bp, Artificial sequence
  SiRNA target sequence
gtacccacatgtttaaaaa

SEQ ID NO: 11969 - DNA, 19 bp, Artificial sequence
  SiRNA target sequence
tacccacatgtttaaaaat

SEQ ID NO: 11970 - DNA, 19 bp, Artificial sequence
  SiRNA target sequence
acccacatgtttaaaaatc

SEQ ID NO: 11971 - DNA, 19 bp, Artificial sequence
  SiRNA target sequence
cccacatgtttaaaaatct

SEQ ID NO: 11972 - DNA, 19 bp, Artificial sequence
  SiRNA target sequence
ccacatgtttaaaaatcta

SEQ ID NO: 11973 - DNA, 19 bp, Artificial sequence
  SiRNA target sequence
cacatgtttaaaaatctac

SEQ ID NO: 11974 - DNA, 19 bp, Artificial sequence
  SiRNA target sequence
acatgtttaaaaatctact

SEQ ID NO: 11975 - DNA, 19 bp, Artificial sequence
  SiRNA target sequence
catgtttaaaaatctactt

SEQ ID NO: 11976 - DNA, 19 bp, Artificial sequence
  SiRNA target sequence
atgtttaaaaatctactta

SEQ ID NO: 11977 - DNA, 19 bp, Artificial sequence
  SiRNA target sequence
tgtttaaaaatctacttac

SEQ ID NO: 11978 - DNA, 19 bp, Artificial sequence
  SiRNA target sequence
gtttaaaaatctacttact

SEQ ID NO: 11979 - DNA, 19 bp, Artificial sequence
  SiRNA target sequence
tttaaaaatctacttacta

SEQ ID NO: 11980 - DNA, 19 bp, Artificial sequence
  SiRNA target sequence
ttaaaaatctacttactaa

SEQ ID NO: 11981 - DNA, 19 bp, Artificial sequence
  SiRNA target sequence
taaaaatctacttactaaa

SEQ ID NO: 11982 - DNA, 19 bp, Artificial sequence
  SiRNA target sequence
aaaaatctacttactaaat

SEQ ID NO: 11983 - DNA, 19 bp, Artificial sequence
  SiRNA target sequence
aaaatctacttactaaatt

SEQ ID NO: 11984 - DNA, 19 bp, Artificial sequence
  SiRNA target sequence
aaatctacttactaaattc

SEQ ID NO: 11985 - DNA, 19 bp, Artificial sequence
  SiRNA target sequence
aatctacttactaaattcc

SEQ ID NO: 11986 - DNA, 19 bp, Artificial sequence
  SiRNA target sequence
atctacttactaaattcca

SEQ ID NO: 11987 - DNA, 19 bp, Artificial sequence
  SiRNA target sequence
tctacttactaaattccat

SEQ ID NO: 11988 - DNA, 19 bp, Artificial sequence
  SiRNA target sequence
ctacttactaaattccata

SEQ ID NO: 11989 - DNA, 19 bp, Artificial sequence
  SiRNA target sequence
tacttactaaattccatac

SEQ ID NO: 11990 - DNA, 19 bp, Artificial sequence
  SiRNA target sequence
acttactaaattccataca

SEQ ID NO: 11991 - DNA, 19 bp, Artificial sequence
  SiRNA target sequence
cttactaaattccatacag

SEQ ID NO: 11992 - DNA, 19 bp, Artificial sequence
  SiRNA target sequence
ttactaaattccatacagt

SEQ ID NO: 11993 - DNA, 19 bp, Artificial sequence
  SiRNA target sequence
tactaaattccatacagta

SEQ ID NO: 11994 - DNA, 19 bp, Artificial sequence
  SiRNA target sequence
actaaattccatacagtaa

SEQ ID NO: 11995 - DNA, 19 bp, Artificial sequence
  SiRNA target sequence
ctaaattccatacagtaat

SEQ ID NO: 11996 - DNA, 19 bp, Artificial sequence
  SiRNA target sequence
taaattccatacagtaatt

SEQ ID NO: 11997 - DNA, 19 bp, Artificial sequence
  SiRNA target sequence
aaattccatacagtaattg

SEQ ID NO: 11998 - DNA, 19 bp, Artificial sequence
  SiRNA target sequence
aattccatacagtaattgg

SEQ ID NO: 11999 - DNA, 19 bp, Artificial sequence
  SiRNA target sequence
attccatacagtaattggt

SEQ ID NO: 12000 - DNA, 19 bp, Artificial sequence
  SiRNA target sequence
ttccatacagtaattggta

SEQ ID NO: 12001 - DNA, 19 bp, Artificial sequence
  SiRNA target sequence
tccatacagtaattggtag

SEQ ID NO: 12002 - DNA, 19 bp, Artificial sequence
  SiRNA target sequence
ccatacagtaattggtaga

SEQ ID NO: 12003 - DNA, 19 bp, Artificial sequence
  SiRNA target sequence
catacagtaattggtagaa

SEQ ID NO: 12004 - DNA, 19 bp, Artificial sequence
  SiRNA target sequence
atacagtaattggtagaag

SEQ ID NO: 12005 - DNA, 19 bp, Artificial sequence
  SiRNA target sequence
tacagtaattggtagaagt

SEQ ID NO: 12006 - DNA, 19 bp, Artificial sequence
  SiRNA target sequence
acagtaattggtagaagta

SEQ ID NO: 12007 - DNA, 19 bp, Artificial sequence
  SiRNA target sequence
cagtaattggtagaagtaa

SEQ ID NO: 12008 - DNA, 19 bp, Artificial sequence
  SiRNA target sequence
agtaattggtagaagtaaa

SEQ ID NO: 12009 - DNA, 19 bp, Artificial sequence
  SiRNA target sequence
gtaattggtagaagtaaag

SEQ ID NO: 12010 - DNA, 19 bp, Artificial sequence
  SiRNA target sequence
taattggtagaagtaaaga

SEQ ID NO: 12011 - DNA, 19 bp, Artificial sequence
  SiRNA target sequence
aattggtagaagtaaagat

SEQ ID NO: 12012 - DNA, 19 bp, Artificial sequence
  SiRNA target sequence
attggtagaagtaaagata

SEQ ID NO: 12013 - DNA, 19 bp, Artificial sequence
  SiRNA target sequence
ttggtagaagtaaagatat

SEQ ID NO: 12014 - DNA, 19 bp, Artificial sequence
  SiRNA target sequence
tggtagaagtaaagatatc

SEQ ID NO: 12015 - DNA, 19 bp, Artificial sequence
  SiRNA target sequence
ggtagaagtaaagatatct

SEQ ID NO: 12016 - DNA, 19 bp, Artificial sequence
  SiRNA target sequence
gtagaagtaaagatatctt

SEQ ID NO: 12017 - DNA, 19 bp, Artificial sequence
  SiRNA target sequence
tagaagtaaagatatcttt

SEQ ID NO: 12018 - DNA, 19 bp, Artificial sequence
  SiRNA target sequence
agaagtaaagatatcttta

SEQ ID NO: 12019 - DNA, 19 bp, Artificial sequence
  SiRNA target sequence
gaagtaaagatatctttac

SEQ ID NO: 12020 - DNA, 19 bp, Artificial sequence
  SiRNA target sequence
aagtaaagatatctttaca

SEQ ID NO: 12021 - DNA, 19 bp, Artificial sequence
  SiRNA target sequence
agtaaagatatctttacac

SEQ ID NO: 12022 - DNA, 19 bp, Artificial sequence
  SiRNA target sequence
gtaaagatatctttacaca

SEQ ID NO: 12023 - DNA, 19 bp, Artificial sequence
  SiRNA target sequence
taaagatatctttacacaa

SEQ ID NO: 12024 - DNA, 19 bp, Artificial sequence
  SiRNA target sequence
aaagatatctttacacaaa

SEQ ID NO: 12025 - DNA, 19 bp, Artificial sequence
  SiRNA target sequence
aagatatctttacacaaat

SEQ ID NO: 12026 - DNA, 19 bp, Artificial sequence
  SiRNA target sequence
agatatctttacacaaata

SEQ ID NO: 12027 - DNA, 19 bp, Artificial sequence
  SiRNA target sequence
gatatctttacacaaatag

SEQ ID NO: 12028 - DNA, 19 bp, Artificial sequence
  SiRNA target sequence
atatctttacacaaataga

SEQ ID NO: 12029 - DNA, 19 bp, Artificial sequence
  SiRNA target sequence
tatctttacacaaatagag

SEQ ID NO: 12030 - DNA, 19 bp, Artificial sequence
  SiRNA target sequence
atctttacacaaatagagg

SEQ ID NO: 12031 - DNA, 19 bp, Artificial sequence
  SiRNA target sequence
tctttacacaaatagaggt

SEQ ID NO: 12032 - DNA, 19 bp, Artificial sequence
  SiRNA target sequence
ctttacacaaatagaggta

SEQ ID NO: 12033 - DNA, 19 bp, Artificial sequence
  SiRNA target sequence
tttacacaaatagaggtag

SEQ ID NO: 12034 - DNA, 19 bp, Artificial sequence
  SiRNA target sequence
ttacacaaatagaggtaga

SEQ ID NO: 12035 - DNA, 19 bp, Artificial sequence
  SiRNA target sequence
tacacaaatagaggtagac

SEQ ID NO: 12036 - DNA, 19 bp, Artificial sequence
  SiRNA target sequence
acacaaatagaggtagaca

SEQ ID NO: 12037 - DNA, 19 bp, Artificial sequence
  SiRNA target sequence
cacaaatagaggtagacat

SEQ ID NO: 12038 - DNA, 19 bp, Artificial sequence
  SiRNA target sequence
acaaatagaggtagacata

SEQ ID NO: 12039 - DNA, 19 bp, Artificial sequence
  SiRNA target sequence
caaatagaggtagacataa

SEQ ID NO: 12040 - DNA, 19 bp, Artificial sequence
  SiRNA target sequence
aaatagaggtagacataaa

SEQ ID NO: 12041 - DNA, 19 bp, Artificial sequence
  SiRNA target sequence
aatagaggtagacataaaa

SEQ ID NO: 12042 - DNA, 19 bp, Artificial sequence
  SiRNA target sequence
atagaggtagacataaaaa

SEQ ID NO: 12043 - DNA, 19 bp, Artificial sequence
  SiRNA target sequence
tagaggtagacataaaaaa

SEQ ID NO: 12044 - DNA, 19 bp, Artificial sequence
  SiRNA target sequence
agaggtagacataaaaaat

SEQ ID NO: 12045 - DNA, 19 bp, Artificial sequence
  SiRNA target sequence
gaggtagacataaaaaata

SEQ ID NO: 12046 - DNA, 19 bp, Artificial sequence
  SiRNA target sequence
aggtagacataaaaaataa

SEQ ID NO: 12047 - DNA, 19 bp, Artificial sequence
  SiRNA target sequence
ggtagacataaaaaataaa

SEQ ID NO: 12048 - DNA, 19 bp, Artificial sequence
  SiRNA target sequence
gtagacataaaaaataaat

SEQ ID NO: 12049 - DNA, 19 bp, Artificial sequence
  SiRNA target sequence
tagacataaaaaataaata

SEQ ID NO: 12050 - DNA, 19 bp, Artificial sequence
  SiRNA target sequence
agacataaaaaataaatac

SEQ ID NO: 12051 - DNA, 19 bp, Artificial sequence
  SiRNA target sequence
gacataaaaaataaataca

SEQ ID NO: 12052 - DNA, 19 bp, Artificial sequence
  SiRNA target sequence
acataaaaaataaatacaa

SEQ ID NO: 12053 - DNA, 19 bp, Artificial sequence
  SiRNA target sequence
cataaaaaataaatacaat

SEQ ID NO: 12054 - DNA, 19 bp, Artificial sequence
  SiRNA target sequence
ataaaaaataaatacaata

SEQ ID NO: 12055 - DNA, 19 bp, Artificial sequence
  SiRNA target sequence
taaaaaataaatacaataa

SEQ ID NO: 12056 - DNA, 19 bp, Artificial sequence
  SiRNA target sequence
aaaaaataaatacaataat

SEQ ID NO: 12057 - DNA, 19 bp, Artificial sequence
  SiRNA target sequence
aaaaataaatacaataata

SEQ ID NO: 12058 - DNA, 19 bp, Artificial sequence
  SiRNA target sequence
aaaataaatacaataatat

SEQ ID NO: 12059 - DNA, 19 bp, Artificial sequence
  SiRNA target sequence
aaataaatacaataatatg

SEQ ID NO: 12060 - DNA, 19 bp, Artificial sequence
  SiRNA target sequence
aataaatacaataatatgt

SEQ ID NO: 12061 - DNA, 19 bp, Artificial sequence
  SiRNA target sequence
ataaatacaataatatgtg

SEQ ID NO: 12062 - DNA, 19 bp, Artificial sequence
  SiRNA target sequence
taaatacaataatatgtgt

SEQ ID NO: 12063 - DNA, 19 bp, Artificial sequence
  SiRNA target sequence
aaatacaataatatgtgta

SEQ ID NO: 12064 - DNA, 19 bp, Artificial sequence
  SiRNA target sequence
aatacaataatatgtgtat

SEQ ID NO: 12065 - DNA, 19 bp, Artificial sequence
  SiRNA target sequence
atacaataatatgtgtata

SEQ ID NO: 12066 - DNA, 19 bp, Artificial sequence
  SiRNA target sequence
tacaataatatgtgtataa

SEQ ID NO: 12067 - DNA, 19 bp, Artificial sequence
  SiRNA target sequence
acaataatatgtgtataaa

SEQ ID NO: 12068 - DNA, 19 bp, Artificial sequence
  SiRNA target sequence
caataatatgtgtataaaa

SEQ ID NO: 12069 - DNA, 19 bp, Artificial sequence
  SiRNA target sequence
aataatatgtgtataaaaa

SEQ ID NO: 12070 - DNA, 19 bp, Artificial sequence
  SiRNA target sequence
ataatatgtgtataaaaat

SEQ ID NO: 12071 - DNA, 19 bp, Artificial sequence
  SiRNA target sequence
taatatgtgtataaaaatg

SEQ ID NO: 12072 - DNA, 19 bp, Artificial sequence
  SiRNA target sequence
aatatgtgtataaaaatga

SEQ ID NO: 12073 - DNA, 19 bp, Artificial sequence
  SiRNA target sequence
atatgtgtataaaaatgat

SEQ ID NO: 12074 - DNA, 19 bp, Artificial sequence
  SiRNA target sequence
tatgtgtataaaaatgata

SEQ ID NO: 12075 - DNA, 19 bp, Artificial sequence
  SiRNA target sequence
atgtgtataaaaatgatac

SEQ ID NO: 12076 - DNA, 19 bp, Artificial sequence
  SiRNA target sequence
tgtgtataaaaatgataca

SEQ ID NO: 12077 - DNA, 19 bp, Artificial sequence
  SiRNA target sequence
gtgtataaaaatgatacag

SEQ ID NO: 12078 - DNA, 19 bp, Artificial sequence
  SiRNA target sequence
tgtataaaaatgatacagc

SEQ ID NO: 12079 - DNA, 19 bp, Artificial sequence
  SiRNA target sequence
gtataaaaatgatacagcc

SEQ ID NO: 12080 - DNA, 19 bp, Artificial sequence
  SiRNA target sequence
tataaaaatgatacagcca

SEQ ID NO: 12081 - DNA, 19 bp, Artificial sequence
  SiRNA target sequence
ataaaaatgatacagccag

SEQ ID NO: 12082 - DNA, 19 bp, Artificial sequence
  SiRNA target sequence
taaaaatgatacagccagc

SEQ ID NO: 12083 - DNA, 19 bp, Artificial sequence
  SiRNA target sequence
aaaaatgatacagccagct

SEQ ID NO: 12084 - DNA, 19 bp, Artificial sequence
  SiRNA target sequence
aaaatgatacagccagcta

SEQ ID NO: 12085 - DNA, 19 bp, Artificial sequence
  SiRNA target sequence
aaatgatacagccagctat

SEQ ID NO: 12086 - DNA, 19 bp, Artificial sequence
  SiRNA target sequence
aatgatacagccagctatt

SEQ ID NO: 12087 - DNA, 19 bp, Artificial sequence
  SiRNA target sequence
atgatacagccagctatta

SEQ ID NO: 12088 - DNA, 19 bp, Artificial sequence
  SiRNA target sequence
tgatacagccagctattaa

SEQ ID NO: 12089 - DNA, 19 bp, Artificial sequence
  SiRNA target sequence
gatacagccagctattaaa

SEQ ID NO: 12090 - DNA, 19 bp, Artificial sequence
  SiRNA target sequence
atacagccagctattaaag

SEQ ID NO: 12091 - DNA, 19 bp, Artificial sequence
  SiRNA target sequence
tacagccagctattaaagg

SEQ ID NO: 12092 - DNA, 19 bp, Artificial sequence
  SiRNA target sequence
acagccagctattaaaggt

SEQ ID NO: 12093 - DNA, 19 bp, Artificial sequence
  SiRNA target sequence
cagccagctattaaaggtg

SEQ ID NO: 12094 - DNA, 19 bp, Artificial sequence
  SiRNA target sequence
agccagctattaaaggtgc

SEQ ID NO: 12095 - DNA, 19 bp, Artificial sequence
  SiRNA target sequence
gccagctattaaaggtgct

SEQ ID NO: 12096 - DNA, 19 bp, Artificial sequence
  SiRNA target sequence
ccagctattaaaggtgctt

SEQ ID NO: 12097 - DNA, 19 bp, Artificial sequence
  SiRNA target sequence
cagctattaaaggtgcttc

SEQ ID NO: 12098 - DNA, 19 bp, Artificial sequence
  SiRNA target sequence
agctattaaaggtgcttca

SEQ ID NO: 12099 - DNA, 19 bp, Artificial sequence
  SiRNA target sequence
gctattaaaggtgcttcat

SEQ ID NO: 12100 - DNA, 19 bp, Artificial sequence
  SiRNA target sequence
ctattaaaggtgcttcatg

SEQ ID NO: 12101 - DNA, 19 bp, Artificial sequence
  SiRNA target sequence
tattaaaggtgcttcatgt

SEQ ID NO: 12102 - DNA, 19 bp, Artificial sequence
  SiRNA target sequence
attaaaggtgcttcatgta

SEQ ID NO: 12103 - DNA, 19 bp, Artificial sequence
  SiRNA target sequence
ttaaaggtgcttcatgtat

SEQ ID NO: 12104 - DNA, 19 bp, Artificial sequence
  SiRNA target sequence
taaaggtgcttcatgtata

SEQ ID NO: 12105 - DNA, 19 bp, Artificial sequence
  SiRNA target sequence
aaaggtgcttcatgtatat

SEQ ID NO: 12106 - DNA, 19 bp, Artificial sequence
  SiRNA target sequence
aaggtgcttcatgtatata

SEQ ID NO: 12107 - DNA, 19 bp, Artificial sequence
  SiRNA target sequence
aggtgcttcatgtatatac

SEQ ID NO: 12108 - DNA, 19 bp, Artificial sequence
  SiRNA target sequence
ggtgcttcatgtatatacg

SEQ ID NO: 12109 - DNA, 19 bp, Artificial sequence
  SiRNA target sequence
gtgcttcatgtatatacgt

SEQ ID NO: 12110 - DNA, 19 bp, Artificial sequence
  SiRNA target sequence
tgcttcatgtatatacgtg

SEQ ID NO: 12111 - DNA, 19 bp, Artificial sequence
  SiRNA target sequence
gcttcatgtatatacgtgg

SEQ ID NO: 12112 - DNA, 19 bp, Artificial sequence
  SiRNA target sequence
cttcatgtatatacgtggg

SEQ ID NO: 12113 - DNA, 19 bp, Artificial sequence
  SiRNA target sequence
ttcatgtatatacgtgggt

SEQ ID NO: 12114 - DNA, 19 bp, Artificial sequence
  SiRNA target sequence
tcatgtatatacgtgggta

SEQ ID NO: 12115 - DNA, 19 bp, Artificial sequence
  SiRNA target sequence
catgtatatacgtgggtaa

SEQ ID NO: 12116 - DNA, 19 bp, Artificial sequence
  SiRNA target sequence
atgtatatacgtgggtaat

SEQ ID NO: 12117 - DNA, 19 bp, Artificial sequence
  SiRNA target sequence
tgtatatacgtgggtaatt

SEQ ID NO: 12118 - DNA, 19 bp, Artificial sequence
  SiRNA target sequence
gtatatacgtgggtaatta

SEQ ID NO: 12119 - DNA, 19 bp, Artificial sequence
  SiRNA target sequence
tatatacgtgggtaattat

SEQ ID NO: 12120 - DNA, 19 bp, Artificial sequence
  SiRNA target sequence
atatacgtgggtaattata

SEQ ID NO: 12121 - DNA, 19 bp, Artificial sequence
  SiRNA target sequence
tatacgtgggtaattatat

SEQ ID NO: 12122 - DNA, 19 bp, Artificial sequence
  SiRNA target sequence
atacgtgggtaattatatg

SEQ ID NO: 12123 - DNA, 19 bp, Artificial sequence
  SiRNA target sequence
tacgtgggtaattatatgc

SEQ ID NO: 12124 - DNA, 19 bp, Artificial sequence
  SiRNA target sequence
acgtgggtaattatatgca

SEQ ID NO: 12125 - DNA, 19 bp, Artificial sequence
  SiRNA target sequence
cgtgggtaattatatgcag

SEQ ID NO: 12126 - DNA, 19 bp, Artificial sequence
  SiRNA target sequence
gtgggtaattatatgcagc

SEQ ID NO: 12127 - DNA, 19 bp, Artificial sequence
  SiRNA target sequence
tgggtaattatatgcagca

SEQ ID NO: 12128 - DNA, 19 bp, Artificial sequence
  SiRNA target sequence
gggtaattatatgcagcag

SEQ ID NO: 12129 - DNA, 19 bp, Artificial sequence
  SiRNA target sequence
ggtaattatatgcagcagc

SEQ ID NO: 12130 - DNA, 19 bp, Artificial sequence
  SiRNA target sequence
gtaattatatgcagcagct

SEQ ID NO: 12131 - DNA, 19 bp, Artificial sequence
  SiRNA target sequence
taattatatgcagcagcta

SEQ ID NO: 12132 - DNA, 19 bp, Artificial sequence
  SiRNA target sequence
aattatatgcagcagctag

SEQ ID NO: 12133 - DNA, 19 bp, Artificial sequence
  SiRNA target sequence
attatatgcagcagctagg

SEQ ID NO: 12134 - DNA, 19 bp, Artificial sequence
  SiRNA target sequence
ttatatgcagcagctagga

SEQ ID NO: 12135 - DNA, 19 bp, Artificial sequence
  SiRNA target sequence
tatatgcagcagctaggag

SEQ ID NO: 12136 - DNA, 19 bp, Artificial sequence
  SiRNA target sequence
atatgcagcagctaggagt

SEQ ID NO: 12137 - DNA, 19 bp, Artificial sequence
  SiRNA target sequence
tatgcagcagctaggagta

SEQ ID NO: 12138 - DNA, 19 bp, Artificial sequence
  SiRNA target sequence
atgcagcagctaggagtaa

SEQ ID NO: 12139 - DNA, 19 bp, Artificial sequence
  SiRNA target sequence
tgcagcagctaggagtaat

SEQ ID NO: 12140 - DNA, 19 bp, Artificial sequence
  SiRNA target sequence
gcagcagctaggagtaatt

SEQ ID NO: 12141 - DNA, 19 bp, Artificial sequence
  SiRNA target sequence
cagcagctaggagtaatta

SEQ ID NO: 12142 - DNA, 19 bp, Artificial sequence
  SiRNA target sequence
agcagctaggagtaattag

SEQ ID NO: 12143 - DNA, 19 bp, Artificial sequence
  SiRNA target sequence
gcagctaggagtaattagt

SEQ ID NO: 12144 - DNA, 19 bp, Artificial sequence
  SiRNA target sequence
cagctaggagtaattagtc

SEQ ID NO: 12145 - DNA, 19 bp, Artificial sequence
  SiRNA target sequence
agctaggagtaattagtct

SEQ ID NO: 12146 - DNA, 19 bp, Artificial sequence
  SiRNA target sequence
gctaggagtaattagtctt

SEQ ID NO: 12147 - DNA, 19 bp, Artificial sequence
  SiRNA target sequence
ctaggagtaattagtcttg

SEQ ID NO: 12148 - DNA, 19 bp, Artificial sequence
  SiRNA target sequence
taggagtaattagtcttgg

SEQ ID NO: 12149 - DNA, 19 bp, Artificial sequence
  SiRNA target sequence
aggagtaattagtcttggt

SEQ ID NO: 12150 - DNA, 19 bp, Artificial sequence
  SiRNA target sequence
ggagtaattagtcttggtg

SEQ ID NO: 12151 - DNA, 19 bp, Artificial sequence
  SiRNA target sequence
gagtaattagtcttggtgg

SEQ ID NO: 12152 - DNA, 19 bp, Artificial sequence
  SiRNA target sequence
agtaattagtcttggtggg

SEQ ID NO: 12153 - DNA, 19 bp, Artificial sequence
  SiRNA target sequence
gtaattagtcttggtgggg

SEQ ID NO: 12154 - DNA, 19 bp, Artificial sequence
  SiRNA target sequence
taattagtcttggtgggga

SEQ ID NO: 12155 - DNA, 19 bp, Artificial sequence
  SiRNA target sequence
aattagtcttggtggggag

SEQ ID NO: 12156 - DNA, 19 bp, Artificial sequence
  SiRNA target sequence
attagtcttggtggggaga

SEQ ID NO: 12157 - DNA, 19 bp, Artificial sequence
  SiRNA target sequence
ttagtcttggtggggagat

SEQ ID NO: 12158 - DNA, 19 bp, Artificial sequence
  SiRNA target sequence
tagtcttggtggggagatt

SEQ ID NO: 12159 - DNA, 19 bp, Artificial sequence
  SiRNA target sequence
agtcttggtggggagatta

SEQ ID NO: 12160 - DNA, 19 bp, Artificial sequence
  SiRNA target sequence
gtcttggtggggagattat

SEQ ID NO: 12161 - DNA, 19 bp, Artificial sequence
  SiRNA target sequence
tcttggtggggagattatt

SEQ ID NO: 12162 - DNA, 19 bp, Artificial sequence
  SiRNA target sequence
cttggtggggagattatta

SEQ ID NO: 12163 - DNA, 19 bp, Artificial sequence
  SiRNA target sequence
ttggtggggagattattaa

SEQ ID NO: 12164 - DNA, 19 bp, Artificial sequence
  SiRNA target sequence
tggtggggagattattaaa

SEQ ID NO: 12165 - DNA, 19 bp, Artificial sequence
  SiRNA target sequence
ggtggggagattattaaag

SEQ ID NO: 12166 - DNA, 19 bp, Artificial sequence
  SiRNA target sequence
gtggggagattattaaagc

SEQ ID NO: 12167 - DNA, 19 bp, Artificial sequence
  SiRNA target sequence
tggggagattattaaagct

SEQ ID NO: 12168 - DNA, 19 bp, Artificial sequence
  SiRNA target sequence
ggggagattattaaagctg

SEQ ID NO: 12169 - DNA, 19 bp, Artificial sequence
  SiRNA target sequence
gggagattattaaagctga

SEQ ID NO: 12170 - DNA, 19 bp, Artificial sequence
  SiRNA target sequence
ggagattattaaagctgat

SEQ ID NO: 12171 - DNA, 19 bp, Artificial sequence
  SiRNA target sequence
gagattattaaagctgatg

SEQ ID NO: 12172 - DNA, 19 bp, Artificial sequence
  SiRNA target sequence
agattattaaagctgatga

SEQ ID NO: 12173 - DNA, 19 bp, Artificial sequence
  SiRNA target sequence
gattattaaagctgatgaa

SEQ ID NO: 12174 - DNA, 19 bp, Artificial sequence
  SiRNA target sequence
attattaaagctgatgaat

SEQ ID NO: 12175 - DNA, 19 bp, Artificial sequence
  SiRNA target sequence
ttattaaagctgatgaata

SEQ ID NO: 12176 - DNA, 19 bp, Artificial sequence
  SiRNA target sequence
tattaaagctgatgaatac

SEQ ID NO: 12177 - DNA, 19 bp, Artificial sequence
  SiRNA target sequence
attaaagctgatgaataca

SEQ ID NO: 12178 - DNA, 19 bp, Artificial sequence
  SiRNA target sequence
ttaaagctgatgaatacat

SEQ ID NO: 12179 - DNA, 19 bp, Artificial sequence
  SiRNA target sequence
taaagctgatgaatacatt

SEQ ID NO: 12180 - DNA, 19 bp, Artificial sequence
  SiRNA target sequence
aaagctgatgaatacattg

SEQ ID NO: 12181 - DNA, 19 bp, Artificial sequence
  SiRNA target sequence
aagctgatgaatacattgg

SEQ ID NO: 12182 - DNA, 19 bp, Artificial sequence
  SiRNA target sequence
agctgatgaatacattgga

SEQ ID NO: 12183 - DNA, 19 bp, Artificial sequence
  SiRNA target sequence
gctgatgaatacattggac

SEQ ID NO: 12184 - DNA, 19 bp, Artificial sequence
  SiRNA target sequence
ctgatgaatacattggact

SEQ ID NO: 12185 - DNA, 19 bp, Artificial sequence
  SiRNA target sequence
tgatgaatacattggacta

SEQ ID NO: 12186 - DNA, 19 bp, Artificial sequence
  SiRNA target sequence
gatgaatacattggactat

SEQ ID NO: 12187 - DNA, 19 bp, Artificial sequence
  SiRNA target sequence
atgaatacattggactatc

SEQ ID NO: 12188 - DNA, 19 bp, Artificial sequence
  SiRNA target sequence
tgaatacattggactatct

SEQ ID NO: 12189 - DNA, 19 bp, Artificial sequence
  SiRNA target sequence
gaatacattggactatctt

SEQ ID NO: 12190 - DNA, 19 bp, Artificial sequence
  SiRNA target sequence
aatacattggactatcttt

SEQ ID NO: 12191 - DNA, 19 bp, Artificial sequence
  SiRNA target sequence
atacattggactatctttt

SEQ ID NO: 12192 - DNA, 19 bp, Artificial sequence
  SiRNA target sequence
tacattggactatcttttg

SEQ ID NO: 12193 - DNA, 19 bp, Artificial sequence
  SiRNA target sequence
acattggactatcttttgt

SEQ ID NO: 12194 - DNA, 19 bp, Artificial sequence
  SiRNA target sequence
cattggactatcttttgta

SEQ ID NO: 12195 - DNA, 19 bp, Artificial sequence
  SiRNA target sequence
attggactatcttttgtag

SEQ ID NO: 12196 - DNA, 19 bp, Artificial sequence
  SiRNA target sequence
ttggactatcttttgtagg

SEQ ID NO: 12197 - DNA, 19 bp, Artificial sequence
  SiRNA target sequence
tggactatcttttgtaggg

SEQ ID NO: 12198 - DNA, 19 bp, Artificial sequence
  SiRNA target sequence
ggactatcttttgtaggga

SEQ ID NO: 12199 - DNA, 19 bp, Artificial sequence
  SiRNA target sequence
gactatcttttgtagggag

SEQ ID NO: 12200 - DNA, 19 bp, Artificial sequence
  SiRNA target sequence
actatcttttgtagggaga

SEQ ID NO: 12201 - DNA, 19 bp, Artificial sequence
  SiRNA target sequence
ctatcttttgtagggagat

SEQ ID NO: 12202 - DNA, 19 bp, Artificial sequence
  SiRNA target sequence
tatcttttgtagggagata

SEQ ID NO: 12203 - DNA, 19 bp, Artificial sequence
  SiRNA target sequence
atcttttgtagggagatat

SEQ ID NO: 12204 - DNA, 19 bp, Artificial sequence
  SiRNA target sequence
tcttttgtagggagatatg

SEQ ID NO: 12205 - DNA, 19 bp, Artificial sequence
  SiRNA target sequence
cttttgtagggagatatga

SEQ ID NO: 12206 - DNA, 19 bp, Artificial sequence
  SiRNA target sequence
ttttgtagggagatatgaa

SEQ ID NO: 12207 - DNA, 19 bp, Artificial sequence
  SiRNA target sequence
tttgtagggagatatgaag

SEQ ID NO: 12208 - DNA, 19 bp, Artificial sequence
  SiRNA target sequence
ttgtagggagatatgaagg

SEQ ID NO: 12209 - DNA, 19 bp, Artificial sequence
  SiRNA target sequence
tgtagggagatatgaaggg

SEQ ID NO: 12210 - DNA, 19 bp, Artificial sequence
  SiRNA target sequence
gtagggagatatgaaggga

SEQ ID NO: 12211 - DNA, 19 bp, Artificial sequence
  SiRNA target sequence
tagggagatatgaagggat

SEQ ID NO: 12212 - DNA, 19 bp, Artificial sequence
  SiRNA target sequence
agggagatatgaagggatt

SEQ ID NO: 12213 - DNA, 19 bp, Artificial sequence
  SiRNA target sequence
gggagatatgaagggattg

SEQ ID NO: 12214 - DNA, 19 bp, Artificial sequence
  SiRNA target sequence
ggagatatgaagggattgg

SEQ ID NO: 12215 - DNA, 19 bp, Artificial sequence
  SiRNA target sequence
gagatatgaagggattggt

SEQ ID NO: 12216 - DNA, 19 bp, Artificial sequence
  SiRNA target sequence
agatatgaagggattggtt

SEQ ID NO: 12217 - DNA, 19 bp, Artificial sequence
  SiRNA target sequence
gatatgaagggattggttc

SEQ ID NO: 12218 - DNA, 19 bp, Artificial sequence
  SiRNA target sequence
atatgaagggattggttct

SEQ ID NO: 12219 - DNA, 19 bp, Artificial sequence
  SiRNA target sequence
tatgaagggattggttcta

SEQ ID NO: 12220 - DNA, 19 bp, Artificial sequence
  SiRNA target sequence
atgaagggattggttctat

SEQ ID NO: 12221 - DNA, 19 bp, Artificial sequence
  SiRNA target sequence
tgaagggattggttctatt

SEQ ID NO: 12222 - DNA, 19 bp, Artificial sequence
  SiRNA target sequence
gaagggattggttctattt

SEQ ID NO: 12223 - DNA, 19 bp, Artificial sequence
  SiRNA target sequence
aagggattggttctatttc

SEQ ID NO: 12224 - DNA, 19 bp, Artificial sequence
  SiRNA target sequence
agggattggttctatttct

SEQ ID NO: 12225 - DNA, 19 bp, Artificial sequence
  SiRNA target sequence
gggattggttctatttcta

SEQ ID NO: 12226 - DNA, 19 bp, Artificial sequence
  SiRNA target sequence
ggattggttctatttctac

SEQ ID NO: 12227 - DNA, 19 bp, Artificial sequence
  SiRNA target sequence
gattggttctatttctact

SEQ ID NO: 12228 - DNA, 19 bp, Artificial sequence
  SiRNA target sequence
attggttctatttctacta

SEQ ID NO: 12229 - DNA, 19 bp, Artificial sequence
  SiRNA target sequence
ttggttctatttctactat

SEQ ID NO: 12230 - DNA, 19 bp, Artificial sequence
  SiRNA target sequence
tggttctatttctactata

SEQ ID NO: 12231 - DNA, 19 bp, Artificial sequence
  SiRNA target sequence
ggttctatttctactatat

SEQ ID NO: 12232 - DNA, 19 bp, Artificial sequence
  SiRNA target sequence
gttctatttctactatatc

SEQ ID NO: 12233 - DNA, 19 bp, Artificial sequence
  SiRNA target sequence
ttctatttctactatatca

SEQ ID NO: 12234 - DNA, 19 bp, Artificial sequence
  SiRNA target sequence
tctatttctactatatcac

SEQ ID NO: 12235 - DNA, 19 bp, Artificial sequence
  SiRNA target sequence
ctatttctactatatcact

SEQ ID NO: 12236 - DNA, 19 bp, Artificial sequence
  SiRNA target sequence
tatttctactatatcactt

SEQ ID NO: 12237 - DNA, 19 bp, Artificial sequence
  SiRNA target sequence
atttctactatatcacttc

SEQ ID NO: 12238 - DNA, 19 bp, Artificial sequence
  SiRNA target sequence
tttctactatatcacttca

SEQ ID NO: 12239 - DNA, 19 bp, Artificial sequence
  SiRNA target sequence
ttctactatatcacttcag

SEQ ID NO: 12240 - DNA, 19 bp, Artificial sequence
  SiRNA target sequence
tctactatatcacttcagc

SEQ ID NO: 12241 - DNA, 19 bp, Artificial sequence
  SiRNA target sequence
ctactatatcacttcagca

SEQ ID NO: 12242 - DNA, 19 bp, Artificial sequence
  SiRNA target sequence
tactatatcacttcagcag

SEQ ID NO: 12243 - DNA, 19 bp, Artificial sequence
  SiRNA target sequence
actatatcacttcagcagt

SEQ ID NO: 12244 - DNA, 19 bp, Artificial sequence
  SiRNA target sequence
ctatatcacttcagcagtt

SEQ ID NO: 12245 - DNA, 19 bp, Artificial sequence
  SiRNA target sequence
tatatcacttcagcagttt

SEQ ID NO: 12246 - DNA, 19 bp, Artificial sequence
  SiRNA target sequence
atatcacttcagcagttta

SEQ ID NO: 12247 - DNA, 19 bp, Artificial sequence
  SiRNA target sequence
tatcacttcagcagtttaa

SEQ ID NO: 12248 - DNA, 19 bp, Artificial sequence
  SiRNA target sequence
atcacttcagcagtttaat

SEQ ID NO: 12249 - DNA, 19 bp, Artificial sequence
  SiRNA target sequence
tcacttcagcagtttaata

SEQ ID NO: 12250 - DNA, 19 bp, Artificial sequence
  SiRNA target sequence
cacttcagcagtttaatac

SEQ ID NO: 12251 - DNA, 19 bp, Artificial sequence
  SiRNA target sequence
acttcagcagtttaataca

SEQ ID NO: 12252 - DNA, 19 bp, Artificial sequence
  SiRNA target sequence
cttcagcagtttaatacac

SEQ ID NO: 12253 - DNA, 19 bp, Artificial sequence
  SiRNA target sequence
ttcagcagtttaatacact

SEQ ID NO: 12254 - DNA, 19 bp, Artificial sequence
  SiRNA target sequence
tcagcagtttaatacactg

SEQ ID NO: 12255 - DNA, 19 bp, Artificial sequence
  SiRNA target sequence
cagcagtttaatacactgt

SEQ ID NO: 12256 - DNA, 19 bp, Artificial sequence
  SiRNA target sequence
agcagtttaatacactgtc

SEQ ID NO: 12257 - DNA, 19 bp, Artificial sequence
  SiRNA target sequence
gcagtttaatacactgtct

SEQ ID NO: 12258 - DNA, 19 bp, Artificial sequence
  SiRNA target sequence
cagtttaatacactgtcta

SEQ ID NO: 12259 - DNA, 19 bp, Artificial sequence
  SiRNA target sequence
agtttaatacactgtctat

SEQ ID NO: 12260 - DNA, 19 bp, Artificial sequence
  SiRNA target sequence
gtttaatacactgtctata

SEQ ID NO: 12261 - DNA, 19 bp, Artificial sequence
  SiRNA target sequence
tttaatacactgtctatag

SEQ ID NO: 12262 - DNA, 19 bp, Artificial sequence
  SiRNA target sequence
ttaatacactgtctataga

SEQ ID NO: 12263 - DNA, 19 bp, Artificial sequence
  SiRNA target sequence
taatacactgtctatagat

SEQ ID NO: 12264 - DNA, 19 bp, Artificial sequence
  SiRNA target sequence
aatacactgtctatagatt

SEQ ID NO: 12265 - DNA, 19 bp, Artificial sequence
  SiRNA target sequence
atacactgtctatagatta

SEQ ID NO: 12266 - DNA, 19 bp, Artificial sequence
  SiRNA target sequence
tacactgtctatagattat

SEQ ID NO: 12267 - DNA, 19 bp, Artificial sequence
  SiRNA target sequence
acactgtctatagattatt

SEQ ID NO: 12268 - DNA, 19 bp, Artificial sequence
  SiRNA target sequence
cactgtctatagattatta

SEQ ID NO: 12269 - DNA, 19 bp, Artificial sequence
  SiRNA target sequence
actgtctatagattattac

SEQ ID NO: 12270 - DNA, 19 bp, Artificial sequence
  SiRNA target sequence
ctgtctatagattattaca

SEQ ID NO: 12271 - DNA, 19 bp, Artificial sequence
  SiRNA target sequence
tgtctatagattattacaa

SEQ ID NO: 12272 - DNA, 19 bp, Artificial sequence
  SiRNA target sequence
gtctatagattattacaag

SEQ ID NO: 12273 - DNA, 19 bp, Artificial sequence
  SiRNA target sequence
tctatagattattacaaga

SEQ ID NO: 12274 - DNA, 19 bp, Artificial sequence
  SiRNA target sequence
ctatagattattacaagac

SEQ ID NO: 12275 - DNA, 19 bp, Artificial sequence
  SiRNA target sequence
tatagattattacaagaca

SEQ ID NO: 12276 - DNA, 19 bp, Artificial sequence
  SiRNA target sequence
atagattattacaagacat

SEQ ID NO: 12277 - DNA, 19 bp, Artificial sequence
  SiRNA target sequence
tagattattacaagacatt

SEQ ID NO: 12278 - DNA, 19 bp, Artificial sequence
  SiRNA target sequence
agattattacaagacattg

SEQ ID NO: 12279 - DNA, 19 bp, Artificial sequence
  SiRNA target sequence
gattattacaagacattgt

SEQ ID NO: 12280 - DNA, 19 bp, Artificial sequence
  SiRNA target sequence
attattacaagacattgtc

SEQ ID NO: 12281 - DNA, 19 bp, Artificial sequence
  SiRNA target sequence
ttattacaagacattgtct

SEQ ID NO: 12282 - DNA, 19 bp, Artificial sequence
  SiRNA target sequence
tattacaagacattgtctt

SEQ ID NO: 12283 - DNA, 19 bp, Artificial sequence
  SiRNA target sequence
attacaagacattgtcttc

SEQ ID NO: 12284 - DNA, 19 bp, Artificial sequence
  SiRNA target sequence
ttacaagacattgtcttct

SEQ ID NO: 12285 - DNA, 19 bp, Artificial sequence
  SiRNA target sequence
tacaagacattgtcttcta

SEQ ID NO: 12286 - DNA, 19 bp, Artificial sequence
  SiRNA target sequence
acaagacattgtcttctat

SEQ ID NO: 12287 - DNA, 19 bp, Artificial sequence
  SiRNA target sequence
caagacattgtcttctatt

SEQ ID NO: 12288 - DNA, 19 bp, Artificial sequence
  SiRNA target sequence
aagacattgtcttctattt

SEQ ID NO: 12289 - DNA, 19 bp, Artificial sequence
  SiRNA target sequence
agacattgtcttctatttg

SEQ ID NO: 12290 - DNA, 19 bp, Artificial sequence
  SiRNA target sequence
gacattgtcttctatttgt

SEQ ID NO: 12291 - DNA, 19 bp, Artificial sequence
  SiRNA target sequence
acattgtcttctatttgtg

SEQ ID NO: 12292 - DNA, 19 bp, Artificial sequence
  SiRNA target sequence
cattgtcttctatttgtga

SEQ ID NO: 12293 - DNA, 19 bp, Artificial sequence
  SiRNA target sequence
attgtcttctatttgtgac

SEQ ID NO: 12294 - DNA, 19 bp, Artificial sequence
  SiRNA target sequence
ttgtcttctatttgtgacg

SEQ ID NO: 12295 - DNA, 19 bp, Artificial sequence
  SiRNA target sequence
tgtcttctatttgtgacgt

SEQ ID NO: 12296 - DNA, 19 bp, Artificial sequence
  SiRNA target sequence
gtcttctatttgtgacgta

SEQ ID NO: 12297 - DNA, 19 bp, Artificial sequence
  SiRNA target sequence
tcttctatttgtgacgtag

SEQ ID NO: 12298 - DNA, 19 bp, Artificial sequence
  SiRNA target sequence
cttctatttgtgacgtagg

SEQ ID NO: 12299 - DNA, 19 bp, Artificial sequence
  SiRNA target sequence
ttctatttgtgacgtaggt

SEQ ID NO: 12300 - DNA, 19 bp, Artificial sequence
  SiRNA target sequence
tctatttgtgacgtaggta

SEQ ID NO: 12301 - DNA, 19 bp, Artificial sequence
  SiRNA target sequence
ctatttgtgacgtaggtat

SEQ ID NO: 12302 - DNA, 19 bp, Artificial sequence
  SiRNA target sequence
tatttgtgacgtaggtatt

SEQ ID NO: 12303 - DNA, 19 bp, Artificial sequence
  SiRNA target sequence
atttgtgacgtaggtatta

SEQ ID NO: 12304 - DNA, 19 bp, Artificial sequence
  SiRNA target sequence
tttgtgacgtaggtattaa

SEQ ID NO: 12305 - DNA, 19 bp, Artificial sequence
  SiRNA target sequence
ttgtgacgtaggtattaaa

SEQ ID NO: 12306 - DNA, 19 bp, Artificial sequence
  SiRNA target sequence
tgtgacgtaggtattaaaa

SEQ ID NO: 12307 - DNA, 19 bp, Artificial sequence
  SiRNA target sequence
gtgacgtaggtattaaaat

SEQ ID NO: 12308 - DNA, 19 bp, Artificial sequence
  SiRNA target sequence
tgacgtaggtattaaaata

SEQ ID NO: 12309 - DNA, 19 bp, Artificial sequence
  SiRNA target sequence
gacgtaggtattaaaatat

SEQ ID NO: 12310 - DNA, 19 bp, Artificial sequence
  SiRNA target sequence
acgtaggtattaaaatatc

SEQ ID NO: 12311 - DNA, 19 bp, Artificial sequence
  SiRNA target sequence
cgtaggtattaaaatatca

SEQ ID NO: 12312 - DNA, 19 bp, Artificial sequence
  SiRNA target sequence
gtaggtattaaaatatcaa

SEQ ID NO: 12313 - DNA, 19 bp, Artificial sequence
  SiRNA target sequence
taggtattaaaatatcaac

SEQ ID NO: 12314 - DNA, 19 bp, Artificial sequence
  SiRNA target sequence
aggtattaaaatatcaact

SEQ ID NO: 12315 - DNA, 19 bp, Artificial sequence
  SiRNA target sequence
ggtattaaaatatcaactg

SEQ ID NO: 12316 - DNA, 19 bp, Artificial sequence
  SiRNA target sequence
gtattaaaatatcaactga

SEQ ID NO: 12317 - DNA, 19 bp, Artificial sequence
  SiRNA target sequence
tattaaaatatcaactgat

SEQ ID NO: 12318 - DNA, 19 bp, Artificial sequence
  SiRNA target sequence
attaaaatatcaactgata

SEQ ID NO: 12319 - DNA, 19 bp, Artificial sequence
  SiRNA target sequence
ttaaaatatcaactgatag

SEQ ID NO: 12320 - DNA, 19 bp, Artificial sequence
  SiRNA target sequence
taaaatatcaactgatagg

SEQ ID NO: 12321 - DNA, 19 bp, Artificial sequence
  SiRNA target sequence
aaaatatcaactgataggg

SEQ ID NO: 12322 - DNA, 19 bp, Artificial sequence
  SiRNA target sequence
aaatatcaactgataggga

SEQ ID NO: 12323 - DNA, 19 bp, Artificial sequence
  SiRNA target sequence
aatatcaactgatagggaa

SEQ ID NO: 12324 - DNA, 19 bp, Artificial sequence
  SiRNA target sequence
atatcaactgatagggaaa

SEQ ID NO: 12325 - DNA, 19 bp, Artificial sequence
  SiRNA target sequence
tatcaactgatagggaaaa

SEQ ID NO: 12326 - DNA, 19 bp, Artificial sequence
  SiRNA target sequence
atcaactgatagggaaaaa

SEQ ID NO: 12327 - DNA, 19 bp, Artificial sequence
  SiRNA target sequence
tcaactgatagggaaaaat

SEQ ID NO: 12328 - DNA, 19 bp, Artificial sequence
  SiRNA target sequence
caactgatagggaaaaatc

SEQ ID NO: 12329 - DNA, 19 bp, Artificial sequence
  SiRNA target sequence
aactgatagggaaaaatca

SEQ ID NO: 12330 - DNA, 19 bp, Artificial sequence
  SiRNA target sequence
actgatagggaaaaatcag

SEQ ID NO: 12331 - DNA, 19 bp, Artificial sequence
  SiRNA target sequence
ctgatagggaaaaatcagt

SEQ ID NO: 12332 - DNA, 19 bp, Artificial sequence
  SiRNA target sequence
tgatagggaaaaatcagtt

SEQ ID NO: 12333 - DNA, 19 bp, Artificial sequence
  SiRNA target sequence
gatagggaaaaatcagtta

SEQ ID NO: 12334 - DNA, 19 bp, Artificial sequence
  SiRNA target sequence
atagggaaaaatcagttaa

SEQ ID NO: 12335 - DNA, 19 bp, Artificial sequence
  SiRNA target sequence
tagggaaaaatcagttaat

SEQ ID NO: 12336 - DNA, 19 bp, Artificial sequence
  SiRNA target sequence
agggaaaaatcagttaatt

SEQ ID NO: 12337 - DNA, 19 bp, Artificial sequence
  SiRNA target sequence
gggaaaaatcagttaatta

SEQ ID NO: 12338 - DNA, 19 bp, Artificial sequence
  SiRNA target sequence
ggaaaaatcagttaattat

SEQ ID NO: 12339 - DNA, 19 bp, Artificial sequence
  SiRNA target sequence
gaaaaatcagttaattatg

SEQ ID NO: 12340 - DNA, 19 bp, Artificial sequence
  SiRNA target sequence
aaaaatcagttaattatgg

SEQ ID NO: 12341 - DNA, 19 bp, Artificial sequence
  SiRNA target sequence
aaaatcagttaattatgga

SEQ ID NO: 12342 - DNA, 19 bp, Artificial sequence
  SiRNA target sequence
aaatcagttaattatggat

SEQ ID NO: 12343 - DNA, 19 bp, Artificial sequence
  SiRNA target sequence
aatcagttaattatggatt

SEQ ID NO: 12344 - DNA, 19 bp, Artificial sequence
  SiRNA target sequence
atcagttaattatggatta

SEQ ID NO: 12345 - DNA, 19 bp, Artificial sequence
  SiRNA target sequence
tcagttaattatggattag

SEQ ID NO: 12346 - DNA, 19 bp, Artificial sequence
  SiRNA target sequence
cagttaattatggattagg

SEQ ID NO: 12347 - DNA, 19 bp, Artificial sequence
  SiRNA target sequence
agttaattatggattagga

SEQ ID NO: 12348 - DNA, 19 bp, Artificial sequence
  SiRNA target sequence
gttaattatggattaggag

SEQ ID NO: 12349 - DNA, 19 bp, Artificial sequence
  SiRNA target sequence
ttaattatggattaggagt

SEQ ID NO: 12350 - DNA, 19 bp, Artificial sequence
  SiRNA target sequence
taattatggattaggagtt

SEQ ID NO: 12351 - DNA, 19 bp, Artificial sequence
  SiRNA target sequence
aattatggattaggagtta

SEQ ID NO: 12352 - DNA, 19 bp, Artificial sequence
  SiRNA target sequence
attatggattaggagttaa

SEQ ID NO: 12353 - DNA, 19 bp, Artificial sequence
  SiRNA target sequence
ttatggattaggagttaaa

SEQ ID NO: 12354 - DNA, 19 bp, Artificial sequence
  SiRNA target sequence
tatggattaggagttaaac

SEQ ID NO: 12355 - DNA, 19 bp, Artificial sequence
  SiRNA target sequence
atggattaggagttaaact

SEQ ID NO: 12356 - DNA, 19 bp, Artificial sequence
  SiRNA target sequence
tggattaggagttaaacta

SEQ ID NO: 12357 - DNA, 19 bp, Artificial sequence
  SiRNA target sequence
ggattaggagttaaactac

SEQ ID NO: 12358 - DNA, 19 bp, Artificial sequence
  SiRNA target sequence
gattaggagttaaactaca

SEQ ID NO: 12359 - DNA, 19 bp, Artificial sequence
  SiRNA target sequence
attaggagttaaactacac

SEQ ID NO: 12360 - DNA, 19 bp, Artificial sequence
  SiRNA target sequence
ttaggagttaaactacaca

SEQ ID NO: 12361 - DNA, 19 bp, Artificial sequence
  SiRNA target sequence
taggagttaaactacacag

SEQ ID NO: 12362 - DNA, 19 bp, Artificial sequence
  SiRNA target sequence
aggagttaaactacacagt

SEQ ID NO: 12363 - DNA, 19 bp, Artificial sequence
  SiRNA target sequence
ggagttaaactacacagta

SEQ ID NO: 12364 - DNA, 19 bp, Artificial sequence
  SiRNA target sequence
gagttaaactacacagtaa

SEQ ID NO: 12365 - DNA, 19 bp, Artificial sequence
  SiRNA target sequence
agttaaactacacagtaaa

SEQ ID NO: 12366 - DNA, 19 bp, Artificial sequence
  SiRNA target sequence
gttaaactacacagtaaaa

SEQ ID NO: 12367 - DNA, 19 bp, Artificial sequence
  SiRNA target sequence
ttaaactacacagtaaaaa

SEQ ID NO: 12368 - DNA, 19 bp, Artificial sequence
  SiRNA target sequence
taaactacacagtaaaaaa

SEQ ID NO: 12369 - DNA, 19 bp, Artificial sequence
  SiRNA target sequence
aaactacacagtaaaaaag

SEQ ID NO: 12370 - DNA, 19 bp, Artificial sequence
  SiRNA target sequence
aactacacagtaaaaaagg

SEQ ID NO: 12371 - DNA, 19 bp, Artificial sequence
  SiRNA target sequence
actacacagtaaaaaagga

SEQ ID NO: 12372 - DNA, 19 bp, Artificial sequence
  SiRNA target sequence
ctacacagtaaaaaaggag

SEQ ID NO: 12373 - DNA, 19 bp, Artificial sequence
  SiRNA target sequence
tacacagtaaaaaaggaga

SEQ ID NO: 12374 - DNA, 19 bp, Artificial sequence
  SiRNA target sequence
acacagtaaaaaaggagaa

SEQ ID NO: 12375 - DNA, 19 bp, Artificial sequence
  SiRNA target sequence
cacagtaaaaaaggagaaa

SEQ ID NO: 12376 - DNA, 19 bp, Artificial sequence
  SiRNA target sequence
acagtaaaaaaggagaaat

SEQ ID NO: 12377 - DNA, 19 bp, Artificial sequence
  SiRNA target sequence
cagtaaaaaaggagaaatt

SEQ ID NO: 12378 - DNA, 19 bp, Artificial sequence
  SiRNA target sequence
agtaaaaaaggagaaatta

SEQ ID NO: 12379 - DNA, 19 bp, Artificial sequence
  SiRNA target sequence
gtaaaaaaggagaaattat

SEQ ID NO: 12380 - DNA, 19 bp, Artificial sequence
  SiRNA target sequence
taaaaaaggagaaattatc

SEQ ID NO: 12381 - DNA, 19 bp, Artificial sequence
  SiRNA target sequence
aaaaaaggagaaattatcg

SEQ ID NO: 12382 - DNA, 19 bp, Artificial sequence
  SiRNA target sequence
aaaaaggagaaattatcgg

SEQ ID NO: 12383 - DNA, 19 bp, Artificial sequence
  SiRNA target sequence
aaaaggagaaattatcgga

SEQ ID NO: 12384 - DNA, 19 bp, Artificial sequence
  SiRNA target sequence
aaaggagaaattatcggat

SEQ ID NO: 12385 - DNA, 19 bp, Artificial sequence
  SiRNA target sequence
aaggagaaattatcggatg

SEQ ID NO: 12386 - DNA, 19 bp, Artificial sequence
  SiRNA target sequence
aggagaaattatcggatgt

SEQ ID NO: 12387 - DNA, 19 bp, Artificial sequence
  SiRNA target sequence
ggagaaattatcggatgtg

SEQ ID NO: 12388 - DNA, 19 bp, Artificial sequence
  SiRNA target sequence
gagaaattatcggatgtgt

SEQ ID NO: 12389 - DNA, 19 bp, Artificial sequence
  SiRNA target sequence
agaaattatcggatgtgta

SEQ ID NO: 12390 - DNA, 19 bp, Artificial sequence
  SiRNA target sequence
gaaattatcggatgtgtag

SEQ ID NO: 12391 - DNA, 19 bp, Artificial sequence
  SiRNA target sequence
aaattatcggatgtgtaga

SEQ ID NO: 12392 - DNA, 19 bp, Artificial sequence
  SiRNA target sequence
aattatcggatgtgtagat

SEQ ID NO: 12393 - DNA, 19 bp, Artificial sequence
  SiRNA target sequence
attatcggatgtgtagata

SEQ ID NO: 12394 - DNA, 19 bp, Artificial sequence
  SiRNA target sequence
ttatcggatgtgtagataa

SEQ ID NO: 12395 - DNA, 19 bp, Artificial sequence
  SiRNA target sequence
tatcggatgtgtagataac

SEQ ID NO: 12396 - DNA, 19 bp, Artificial sequence
  SiRNA target sequence
atcggatgtgtagataaca

SEQ ID NO: 12397 - DNA, 19 bp, Artificial sequence
  SiRNA target sequence
tcggatgtgtagataacaa

SEQ ID NO: 12398 - DNA, 19 bp, Artificial sequence
  SiRNA target sequence
cggatgtgtagataacaat

SEQ ID NO: 12399 - DNA, 19 bp, Artificial sequence
  SiRNA target sequence
ggatgtgtagataacaatc

SEQ ID NO: 12400 - DNA, 19 bp, Artificial sequence
  SiRNA target sequence
gatgtgtagataacaatca

SEQ ID NO: 12401 - DNA, 19 bp, Artificial sequence
  SiRNA target sequence
atgtgtagataacaatcat

SEQ ID NO: 12402 - DNA, 19 bp, Artificial sequence
  SiRNA target sequence
tgtgtagataacaatcata

SEQ ID NO: 12403 - DNA, 19 bp, Artificial sequence
  SiRNA target sequence
gtgtagataacaatcatat

SEQ ID NO: 12404 - DNA, 19 bp, Artificial sequence
  SiRNA target sequence
tgtagataacaatcatatt

SEQ ID NO: 12405 - DNA, 19 bp, Artificial sequence
  SiRNA target sequence
gtagataacaatcatattt

SEQ ID NO: 12406 - DNA, 19 bp, Artificial sequence
  SiRNA target sequence
tagataacaatcatatttt

SEQ ID NO: 12407 - DNA, 19 bp, Artificial sequence
  SiRNA target sequence
agataacaatcatatttta

SEQ ID NO: 12408 - DNA, 19 bp, Artificial sequence
  SiRNA target sequence
gataacaatcatattttaa

SEQ ID NO: 12409 - DNA, 19 bp, Artificial sequence
  SiRNA target sequence
ataacaatcatattttaag

SEQ ID NO: 12410 - DNA, 19 bp, Artificial sequence
  SiRNA target sequence
taacaatcatattttaagc

SEQ ID NO: 12411 - DNA, 19 bp, Artificial sequence
  SiRNA target sequence
aacaatcatattttaagca

SEQ ID NO: 12412 - DNA, 19 bp, Artificial sequence
  SiRNA target sequence
acaatcatattttaagcat

SEQ ID NO: 12413 - DNA, 19 bp, Artificial sequence
  SiRNA target sequence
caatcatattttaagcata

SEQ ID NO: 12414 - DNA, 19 bp, Artificial sequence
  SiRNA target sequence
aatcatattttaagcataa

SEQ ID NO: 12415 - DNA, 19 bp, Artificial sequence
  SiRNA target sequence
atcatattttaagcataat

SEQ ID NO: 12416 - DNA, 19 bp, Artificial sequence
  SiRNA target sequence
tcatattttaagcataatt

SEQ ID NO: 12417 - DNA, 19 bp, Artificial sequence
  SiRNA target sequence
catattttaagcataattt

SEQ ID NO: 12418 - DNA, 19 bp, Artificial sequence
  SiRNA target sequence
atattttaagcataattta

SEQ ID NO: 12419 - DNA, 19 bp, Artificial sequence
  SiRNA target sequence
tattttaagcataatttat

SEQ ID NO: 12420 - DNA, 19 bp, Artificial sequence
  SiRNA target sequence
attttaagcataatttata

SEQ ID NO: 12421 - DNA, 19 bp, Artificial sequence
  SiRNA target sequence
ttttaagcataatttataa

SEQ ID NO: 12422 - DNA, 19 bp, Artificial sequence
  SiRNA target sequence
tttaagcataatttataat

SEQ ID NO: 12423 - DNA, 19 bp, Artificial sequence
  SiRNA target sequence
ttaagcataatttataatg

SEQ ID NO: 12424 - DNA, 19 bp, Artificial sequence
  SiRNA target sequence
taagcataatttataatga

SEQ ID NO: 12425 - DNA, 19 bp, Artificial sequence
  SiRNA target sequence
aagcataatttataatgat

SEQ ID NO: 12426 - DNA, 19 bp, Artificial sequence
  SiRNA target sequence
agcataatttataatgata

SEQ ID NO: 12427 - DNA, 19 bp, Artificial sequence
  SiRNA target sequence
gcataatttataatgataa

SEQ ID NO: 12428 - DNA, 19 bp, Artificial sequence
  SiRNA target sequence
cataatttataatgataaa

SEQ ID NO: 12429 - DNA, 19 bp, Artificial sequence
  SiRNA target sequence
ataatttataatgataaat

SEQ ID NO: 12430 - DNA, 19 bp, Artificial sequence
  SiRNA target sequence
taatttataatgataaatt

SEQ ID NO: 12431 - DNA, 19 bp, Artificial sequence
  SiRNA target sequence
aatttataatgataaatta

SEQ ID NO: 12432 - DNA, 19 bp, Artificial sequence
  SiRNA target sequence
atttataatgataaattat

SEQ ID NO: 12433 - DNA, 19 bp, Artificial sequence
  SiRNA target sequence
tttataatgataaattatc

SEQ ID NO: 12434 - DNA, 19 bp, Artificial sequence
  SiRNA target sequence
ttataatgataaattatct

SEQ ID NO: 12435 - DNA, 19 bp, Artificial sequence
  SiRNA target sequence
tataatgataaattatctg

SEQ ID NO: 12436 - DNA, 19 bp, Artificial sequence
  SiRNA target sequence
ataatgataaattatctga

SEQ ID NO: 12437 - DNA, 19 bp, Artificial sequence
  SiRNA target sequence
taatgataaattatctgaa

SEQ ID NO: 12438 - DNA, 19 bp, Artificial sequence
  SiRNA target sequence
aatgataaattatctgaag

SEQ ID NO: 12439 - DNA, 19 bp, Artificial sequence
  SiRNA target sequence
atgataaattatctgaagg

SEQ ID NO: 12440 - DNA, 19 bp, Artificial sequence
  SiRNA target sequence
tgataaattatctgaaggg

SEQ ID NO: 12441 - DNA, 19 bp, Artificial sequence
  SiRNA target sequence
gataaattatctgaagggt

SEQ ID NO: 12442 - DNA, 19 bp, Artificial sequence
  SiRNA target sequence
ataaattatctgaagggtt

SEQ ID NO: 12443 - DNA, 19 bp, Artificial sequence
  SiRNA target sequence
taaattatctgaagggtta

SEQ ID NO: 12444 - DNA, 19 bp, Artificial sequence
  SiRNA target sequence
aaattatctgaagggttaa

SEQ ID NO: 12445 - DNA, 19 bp, Artificial sequence
  SiRNA target sequence
aattatctgaagggttaac

SEQ ID NO: 12446 - DNA, 19 bp, Artificial sequence
  SiRNA target sequence
attatctgaagggttaaca

SEQ ID NO: 12447 - DNA, 19 bp, Artificial sequence
  SiRNA target sequence
ttatctgaagggttaacac

SEQ ID NO: 12448 - DNA, 19 bp, Artificial sequence
  SiRNA target sequence
tatctgaagggttaacact

SEQ ID NO: 12449 - DNA, 19 bp, Artificial sequence
  SiRNA target sequence
atctgaagggttaacactt

SEQ ID NO: 12450 - DNA, 19 bp, Artificial sequence
  SiRNA target sequence
tctgaagggttaacactta

SEQ ID NO: 12451 - DNA, 19 bp, Artificial sequence
  SiRNA target sequence
ctgaagggttaacacttaa

SEQ ID NO: 12452 - DNA, 19 bp, Artificial sequence
  SiRNA target sequence
tgaagggttaacacttaat

SEQ ID NO: 12453 - DNA, 19 bp, Artificial sequence
  SiRNA target sequence
gaagggttaacacttaatt

SEQ ID NO: 12454 - DNA, 19 bp, Artificial sequence
  SiRNA target sequence
aagggttaacacttaattt

SEQ ID NO: 12455 - DNA, 19 bp, Artificial sequence
  SiRNA target sequence
agggttaacacttaatttg

SEQ ID NO: 12456 - DNA, 19 bp, Artificial sequence
  SiRNA target sequence
gggttaacacttaatttga

SEQ ID NO: 12457 - DNA, 19 bp, Artificial sequence
  SiRNA target sequence
ggttaacacttaatttgag

SEQ ID NO: 12458 - DNA, 19 bp, Artificial sequence
  SiRNA target sequence
gttaacacttaatttgagt

SEQ ID NO: 12459 - DNA, 19 bp, Artificial sequence
  SiRNA target sequence
ttaacacttaatttgagtt

SEQ ID NO: 12460 - DNA, 19 bp, Artificial sequence
  SiRNA target sequence
taacacttaatttgagttg

SEQ ID NO: 12461 - DNA, 19 bp, Artificial sequence
  SiRNA target sequence
aacacttaatttgagttgt

SEQ ID NO: 12462 - DNA, 19 bp, Artificial sequence
  SiRNA target sequence
acacttaatttgagttgta

SEQ ID NO: 12463 - DNA, 19 bp, Artificial sequence
  SiRNA target sequence
cacttaatttgagttgtag

SEQ ID NO: 12464 - DNA, 19 bp, Artificial sequence
  SiRNA target sequence
acttaatttgagttgtaga

SEQ ID NO: 12465 - DNA, 19 bp, Artificial sequence
  SiRNA target sequence
cttaatttgagttgtagat

SEQ ID NO: 12466 - DNA, 19 bp, Artificial sequence
  SiRNA target sequence
ttaatttgagttgtagatt

SEQ ID NO: 12467 - DNA, 19 bp, Artificial sequence
  SiRNA target sequence
taatttgagttgtagattt

SEQ ID NO: 12468 - DNA, 19 bp, Artificial sequence
  SiRNA target sequence
aatttgagttgtagatttg

SEQ ID NO: 12469 - DNA, 19 bp, Artificial sequence
  SiRNA target sequence
atttgagttgtagatttgg

SEQ ID NO: 12470 - DNA, 19 bp, Artificial sequence
  SiRNA target sequence
tttgagttgtagatttggt

SEQ ID NO: 12471 - DNA, 19 bp, Artificial sequence
  SiRNA target sequence
ttgagttgtagatttggta

SEQ ID NO: 12472 - DNA, 19 bp, Artificial sequence
  SiRNA target sequence
tgagttgtagatttggtaa

SEQ ID NO: 12473 - DNA, 19 bp, Artificial sequence
  SiRNA target sequence
gagttgtagatttggtaag

SEQ ID NO: 12474 - DNA, 19 bp, Artificial sequence
  SiRNA target sequence
agttgtagatttggtaaga

SEQ ID NO: 12475 - DNA, 19 bp, Artificial sequence
  SiRNA target sequence
gttgtagatttggtaagaa

SEQ ID NO: 12476 - DNA, 19 bp, Artificial sequence
  SiRNA target sequence
ttgtagatttggtaagaaa

SEQ ID NO: 12477 - DNA, 19 bp, Artificial sequence
  SiRNA target sequence
tgtagatttggtaagaaag

SEQ ID NO: 12478 - DNA, 19 bp, Artificial sequence
  SiRNA target sequence
gtagatttggtaagaaagt

SEQ ID NO: 12479 - DNA, 19 bp, Artificial sequence
  SiRNA target sequence
tagatttggtaagaaagta

SEQ ID NO: 12480 - DNA, 19 bp, Artificial sequence
  SiRNA target sequence
agatttggtaagaaagtat

SEQ ID NO: 12481 - DNA, 19 bp, Artificial sequence
  SiRNA target sequence
gatttggtaagaaagtatt

SEQ ID NO: 12482 - DNA, 19 bp, Artificial sequence
  SiRNA target sequence
atttggtaagaaagtattt

SEQ ID NO: 12483 - DNA, 19 bp, Artificial sequence
  SiRNA target sequence
tttggtaagaaagtatttg

SEQ ID NO: 12484 - DNA, 19 bp, Artificial sequence
  SiRNA target sequence
ttggtaagaaagtatttga

SEQ ID NO: 12485 - DNA, 19 bp, Artificial sequence
  SiRNA target sequence
tggtaagaaagtatttgat

SEQ ID NO: 12486 - DNA, 19 bp, Artificial sequence
  SiRNA target sequence
ggtaagaaagtatttgatt

SEQ ID NO: 12487 - DNA, 19 bp, Artificial sequence
  SiRNA target sequence
gtaagaaagtatttgatta

SEQ ID NO: 12488 - DNA, 19 bp, Artificial sequence
  SiRNA target sequence
taagaaagtatttgattat

SEQ ID NO: 12489 - DNA, 19 bp, Artificial sequence
  SiRNA target sequence
aagaaagtatttgattatg

SEQ ID NO: 12490 - DNA, 19 bp, Artificial sequence
  SiRNA target sequence
agaaagtatttgattatgg

SEQ ID NO: 12491 - DNA, 19 bp, Artificial sequence
  SiRNA target sequence
gaaagtatttgattatggc

SEQ ID NO: 12492 - DNA, 19 bp, Artificial sequence
  SiRNA target sequence
aaagtatttgattatggct

SEQ ID NO: 12493 - DNA, 19 bp, Artificial sequence
  SiRNA target sequence
aagtatttgattatggcta

SEQ ID NO: 12494 - DNA, 19 bp, Artificial sequence
  SiRNA target sequence
agtatttgattatggctat

SEQ ID NO: 12495 - DNA, 19 bp, Artificial sequence
  SiRNA target sequence
gtatttgattatggctatg

SEQ ID NO: 12496 - DNA, 19 bp, Artificial sequence
  SiRNA target sequence
tatttgattatggctatgg

SEQ ID NO: 12497 - DNA, 19 bp, Artificial sequence
  SiRNA target sequence
atttgattatggctatggg

SEQ ID NO: 12498 - DNA, 19 bp, Artificial sequence
  SiRNA target sequence
tttgattatggctatgggt

SEQ ID NO: 12499 - DNA, 19 bp, Artificial sequence
  SiRNA target sequence
ttgattatggctatgggtt

SEQ ID NO: 12500 - DNA, 19 bp, Artificial sequence
  SiRNA target sequence
tgattatggctatgggttt

SEQ ID NO: 12501 - DNA, 19 bp, Artificial sequence
  SiRNA target sequence
gattatggctatgggttta

SEQ ID NO: 12502 - DNA, 19 bp, Artificial sequence
  SiRNA target sequence
attatggctatgggtttat

SEQ ID NO: 12503 - DNA, 19 bp, Artificial sequence
  SiRNA target sequence
ttatggctatgggtttatt

SEQ ID NO: 12504 - DNA, 19 bp, Artificial sequence
  SiRNA target sequence
tatggctatgggtttattt

SEQ ID NO: 12505 - DNA, 19 bp, Artificial sequence
  SiRNA target sequence
atggctatgggtttattta

SEQ ID NO: 12506 - DNA, 19 bp, Artificial sequence
  SiRNA target sequence
tggctatgggtttatttat

SEQ ID NO: 12507 - DNA, 19 bp, Artificial sequence
  SiRNA target sequence
ggctatgggtttatttatg

SEQ ID NO: 12508 - DNA, 19 bp, Artificial sequence
  SiRNA target sequence
gctatgggtttatttatga

SEQ ID NO: 12509 - DNA, 19 bp, Artificial sequence
  SiRNA target sequence
ctatgggtttatttatgaa

SEQ ID NO: 12510 - DNA, 19 bp, Artificial sequence
  SiRNA target sequence
tatgggtttatttatgaat

SEQ ID NO: 12511 - DNA, 19 bp, Artificial sequence
  SiRNA target sequence
atgggtttatttatgaatt

SEQ ID NO: 12512 - DNA, 19 bp, Artificial sequence
  SiRNA target sequence
tgggtttatttatgaattt

SEQ ID NO: 12513 - DNA, 19 bp, Artificial sequence
  SiRNA target sequence
gggtttatttatgaatttt

SEQ ID NO: 12514 - DNA, 19 bp, Artificial sequence
  SiRNA target sequence
ggtttatttatgaatttta

SEQ ID NO: 12515 - DNA, 19 bp, Artificial sequence
  SiRNA target sequence
gtttatttatgaattttaa

SEQ ID NO: 12516 - DNA, 20 bp, Artificial sequence
  SiRNA target sequence
atgaaatctttctacaaaaa

SEQ ID NO: 12517 - DNA, 20 bp, Artificial sequence
  SiRNA target sequence
tgaaatctttctacaaaaaa

SEQ ID NO: 12518 - DNA, 20 bp, Artificial sequence
  SiRNA target sequence
gaaatctttctacaaaaaaa

SEQ ID NO: 12519 - DNA, 20 bp, Artificial sequence
  SiRNA target sequence
aaatctttctacaaaaaaat

SEQ ID NO: 12520 - DNA, 20 bp, Artificial sequence
  SiRNA target sequence
aatctttctacaaaaaaata

SEQ ID NO: 12521 - DNA, 20 bp, Artificial sequence
  SiRNA target sequence
atctttctacaaaaaaataa

SEQ ID NO: 12522 - DNA, 20 bp, Artificial sequence
  SiRNA target sequence
tctttctacaaaaaaataaa

SEQ ID NO: 12523 - DNA, 20 bp, Artificial sequence
  SiRNA target sequence
ctttctacaaaaaaataaaa

SEQ ID NO: 12524 - DNA, 20 bp, Artificial sequence
  SiRNA target sequence
tttctacaaaaaaataaaaa

SEQ ID NO: 12525 - DNA, 20 bp, Artificial sequence
  SiRNA target sequence
ttctacaaaaaaataaaaag

SEQ ID NO: 12526 - DNA, 20 bp, Artificial sequence
  SiRNA target sequence
tctacaaaaaaataaaaagt

SEQ ID NO: 12527 - DNA, 20 bp, Artificial sequence
  SiRNA target sequence
ctacaaaaaaataaaaagtt

SEQ ID NO: 12528 - DNA, 20 bp, Artificial sequence
  SiRNA target sequence
tacaaaaaaataaaaagtta

SEQ ID NO: 12529 - DNA, 20 bp, Artificial sequence
  SiRNA target sequence
acaaaaaaataaaaagttat

SEQ ID NO: 12530 - DNA, 20 bp, Artificial sequence
  SiRNA target sequence
caaaaaaataaaaagttatt

SEQ ID NO: 12531 - DNA, 20 bp, Artificial sequence
  SiRNA target sequence
aaaaaaataaaaagttattt

SEQ ID NO: 12532 - DNA, 20 bp, Artificial sequence
  SiRNA target sequence
aaaaaataaaaagttattta

SEQ ID NO: 12533 - DNA, 20 bp, Artificial sequence
  SiRNA target sequence
aaaaataaaaagttatttat

SEQ ID NO: 12534 - DNA, 20 bp, Artificial sequence
  SiRNA target sequence
aaaataaaaagttatttatt

SEQ ID NO: 12535 - DNA, 20 bp, Artificial sequence
  SiRNA target sequence
aaataaaaagttatttattc

SEQ ID NO: 12536 - DNA, 20 bp, Artificial sequence
  SiRNA target sequence
aataaaaagttatttattca

SEQ ID NO: 12537 - DNA, 20 bp, Artificial sequence
  SiRNA target sequence
ataaaaagttatttattcaa

SEQ ID NO: 12538 - DNA, 20 bp, Artificial sequence
  SiRNA target sequence
taaaaagttatttattcaaa

SEQ ID NO: 12539 - DNA, 20 bp, Artificial sequence
  SiRNA target sequence
aaaaagttatttattcaaat

SEQ ID NO: 12540 - DNA, 20 bp, Artificial sequence
  SiRNA target sequence
aaaagttatttattcaaatc

SEQ ID NO: 12541 - DNA, 20 bp, Artificial sequence
  SiRNA target sequence
aaagttatttattcaaatct

SEQ ID NO: 12542 - DNA, 20 bp, Artificial sequence
  SiRNA target sequence
aagttatttattcaaatctg

SEQ ID NO: 12543 - DNA, 20 bp, Artificial sequence
  SiRNA target sequence
agttatttattcaaatctgc

SEQ ID NO: 12544 - DNA, 20 bp, Artificial sequence
  SiRNA target sequence
gttatttattcaaatctgcc

SEQ ID NO: 12545 - DNA, 20 bp, Artificial sequence
  SiRNA target sequence
ttatttattcaaatctgcca

SEQ ID NO: 12546 - DNA, 20 bp, Artificial sequence
  SiRNA target sequence
tatttattcaaatctgccat

SEQ ID NO: 12547 - DNA, 20 bp, Artificial sequence
  SiRNA target sequence
atttattcaaatctgccatt

SEQ ID NO: 12548 - DNA, 20 bp, Artificial sequence
  SiRNA target sequence
tttattcaaatctgccatta

SEQ ID NO: 12549 - DNA, 20 bp, Artificial sequence
  SiRNA target sequence
ttattcaaatctgccattaa

SEQ ID NO: 12550 - DNA, 20 bp, Artificial sequence
  SiRNA target sequence
tattcaaatctgccattaat

SEQ ID NO: 12551 - DNA, 20 bp, Artificial sequence
  SiRNA target sequence
attcaaatctgccattaata

SEQ ID NO: 12552 - DNA, 20 bp, Artificial sequence
  SiRNA target sequence
ttcaaatctgccattaatac

SEQ ID NO: 12553 - DNA, 20 bp, Artificial sequence
  SiRNA target sequence
tcaaatctgccattaataca

SEQ ID NO: 12554 - DNA, 20 bp, Artificial sequence
  SiRNA target sequence
caaatctgccattaatacat

SEQ ID NO: 12555 - DNA, 20 bp, Artificial sequence
  SiRNA target sequence
aaatctgccattaatacatc

SEQ ID NO: 12556 - DNA, 20 bp, Artificial sequence
  SiRNA target sequence
aatctgccattaatacatct

SEQ ID NO: 12557 - DNA, 20 bp, Artificial sequence
  SiRNA target sequence
atctgccattaatacatctt

SEQ ID NO: 12558 - DNA, 20 bp, Artificial sequence
  SiRNA target sequence
tctgccattaatacatcttt

SEQ ID NO: 12559 - DNA, 20 bp, Artificial sequence
  SiRNA target sequence
ctgccattaatacatctttt

SEQ ID NO: 12560 - DNA, 20 bp, Artificial sequence
  SiRNA target sequence
tgccattaatacatcttttg

SEQ ID NO: 12561 - DNA, 20 bp, Artificial sequence
  SiRNA target sequence
gccattaatacatcttttga

SEQ ID NO: 12562 - DNA, 20 bp, Artificial sequence
  SiRNA target sequence
ccattaatacatcttttgat

SEQ ID NO: 12563 - DNA, 20 bp, Artificial sequence
  SiRNA target sequence
cattaatacatcttttgata

SEQ ID NO: 12564 - DNA, 20 bp, Artificial sequence
  SiRNA target sequence
attaatacatcttttgatac

SEQ ID NO: 12565 - DNA, 20 bp, Artificial sequence
  SiRNA target sequence
ttaatacatcttttgatact

SEQ ID NO: 12566 - DNA, 20 bp, Artificial sequence
  SiRNA target sequence
taatacatcttttgatactt

SEQ ID NO: 12567 - DNA, 20 bp, Artificial sequence
  SiRNA target sequence
aatacatcttttgatacttt

SEQ ID NO: 12568 - DNA, 20 bp, Artificial sequence
  SiRNA target sequence
atacatcttttgatactttt

SEQ ID NO: 12569 - DNA, 20 bp, Artificial sequence
  SiRNA target sequence
tacatcttttgatactttta

SEQ ID NO: 12570 - DNA, 20 bp, Artificial sequence
  SiRNA target sequence
acatcttttgatacttttaa

SEQ ID NO: 12571 - DNA, 20 bp, Artificial sequence
  SiRNA target sequence
catcttttgatacttttaat

SEQ ID NO: 12572 - DNA, 20 bp, Artificial sequence
  SiRNA target sequence
atcttttgatacttttaatt

SEQ ID NO: 12573 - DNA, 20 bp, Artificial sequence
  SiRNA target sequence
tcttttgatacttttaattt

SEQ ID NO: 12574 - DNA, 20 bp, Artificial sequence
  SiRNA target sequence
cttttgatacttttaattta

SEQ ID NO: 12575 - DNA, 20 bp, Artificial sequence
  SiRNA target sequence
ttttgatacttttaatttag

SEQ ID NO: 12576 - DNA, 20 bp, Artificial sequence
  SiRNA target sequence
tttgatacttttaatttaga

SEQ ID NO: 12577 - DNA, 20 bp, Artificial sequence
  SiRNA target sequence
ttgatacttttaatttagaa

SEQ ID NO: 12578 - DNA, 20 bp, Artificial sequence
  SiRNA target sequence
tgatacttttaatttagaaa

SEQ ID NO: 12579 - DNA, 20 bp, Artificial sequence
  SiRNA target sequence
gatacttttaatttagaaaa

SEQ ID NO: 12580 - DNA, 20 bp, Artificial sequence
  SiRNA target sequence
atacttttaatttagaaaat

SEQ ID NO: 12581 - DNA, 20 bp, Artificial sequence
  SiRNA target sequence
tacttttaatttagaaaatg

SEQ ID NO: 12582 - DNA, 20 bp, Artificial sequence
  SiRNA target sequence
acttttaatttagaaaatgt

SEQ ID NO: 12583 - DNA, 20 bp, Artificial sequence
  SiRNA target sequence
cttttaatttagaaaatgta

SEQ ID NO: 12584 - DNA, 20 bp, Artificial sequence
  SiRNA target sequence
ttttaatttagaaaatgtaa

SEQ ID NO: 12585 - DNA, 20 bp, Artificial sequence
  SiRNA target sequence
tttaatttagaaaatgtaag

SEQ ID NO: 12586 - DNA, 20 bp, Artificial sequence
  SiRNA target sequence
ttaatttagaaaatgtaagc

SEQ ID NO: 12587 - DNA, 20 bp, Artificial sequence
  SiRNA target sequence
taatttagaaaatgtaagca

SEQ ID NO: 12588 - DNA, 20 bp, Artificial sequence
  SiRNA target sequence
aatttagaaaatgtaagcat

SEQ ID NO: 12589 - DNA, 20 bp, Artificial sequence
  SiRNA target sequence
atttagaaaatgtaagcatt

SEQ ID NO: 12590 - DNA, 20 bp, Artificial sequence
  SiRNA target sequence
tttagaaaatgtaagcatta

SEQ ID NO: 12591 - DNA, 20 bp, Artificial sequence
  SiRNA target sequence
ttagaaaatgtaagcattac

SEQ ID NO: 12592 - DNA, 20 bp, Artificial sequence
  SiRNA target sequence
tagaaaatgtaagcattact

SEQ ID NO: 12593 - DNA, 20 bp, Artificial sequence
  SiRNA target sequence
agaaaatgtaagcattacta

SEQ ID NO: 12594 - DNA, 20 bp, Artificial sequence
  SiRNA target sequence
gaaaatgtaagcattactag

SEQ ID NO: 12595 - DNA, 20 bp, Artificial sequence
  SiRNA target sequence
aaaatgtaagcattactagc

SEQ ID NO: 12596 - DNA, 20 bp, Artificial sequence
  SiRNA target sequence
aaatgtaagcattactagct

SEQ ID NO: 12597 - DNA, 20 bp, Artificial sequence
  SiRNA target sequence
aatgtaagcattactagctt

SEQ ID NO: 12598 - DNA, 20 bp, Artificial sequence
  SiRNA target sequence
atgtaagcattactagctta

SEQ ID NO: 12599 - DNA, 20 bp, Artificial sequence
  SiRNA target sequence
tgtaagcattactagcttaa

SEQ ID NO: 12600 - DNA, 20 bp, Artificial sequence
  SiRNA target sequence
gtaagcattactagcttaaa

SEQ ID NO: 12601 - DNA, 20 bp, Artificial sequence
  SiRNA target sequence
taagcattactagcttaaat

SEQ ID NO: 12602 - DNA, 20 bp, Artificial sequence
  SiRNA target sequence
aagcattactagcttaaata

SEQ ID NO: 12603 - DNA, 20 bp, Artificial sequence
  SiRNA target sequence
agcattactagcttaaatac

SEQ ID NO: 12604 - DNA, 20 bp, Artificial sequence
  SiRNA target sequence
gcattactagcttaaatacg

SEQ ID NO: 12605 - DNA, 20 bp, Artificial sequence
  SiRNA target sequence
cattactagcttaaatacgt

SEQ ID NO: 12606 - DNA, 20 bp, Artificial sequence
  SiRNA target sequence
attactagcttaaatacgta

SEQ ID NO: 12607 - DNA, 20 bp, Artificial sequence
  SiRNA target sequence
ttactagcttaaatacgtac

SEQ ID NO: 12608 - DNA, 20 bp, Artificial sequence
  SiRNA target sequence
tactagcttaaatacgtaca

SEQ ID NO: 12609 - DNA, 20 bp, Artificial sequence
  SiRNA target sequence
actagcttaaatacgtacac

SEQ ID NO: 12610 - DNA, 20 bp, Artificial sequence
  SiRNA target sequence
ctagcttaaatacgtacacc

SEQ ID NO: 12611 - DNA, 20 bp, Artificial sequence
  SiRNA target sequence
tagcttaaatacgtacaccg

SEQ ID NO: 12612 - DNA, 20 bp, Artificial sequence
  SiRNA target sequence
agcttaaatacgtacaccgg

SEQ ID NO: 12613 - DNA, 20 bp, Artificial sequence
  SiRNA target sequence
gcttaaatacgtacaccggt

SEQ ID NO: 12614 - DNA, 20 bp, Artificial sequence
  SiRNA target sequence
cttaaatacgtacaccggtg

SEQ ID NO: 12615 - DNA, 20 bp, Artificial sequence
  SiRNA target sequence
ttaaatacgtacaccggtgt

SEQ ID NO: 12616 - DNA, 20 bp, Artificial sequence
  SiRNA target sequence
taaatacgtacaccggtgtt

SEQ ID NO: 12617 - DNA, 20 bp, Artificial sequence
  SiRNA target sequence
aaatacgtacaccggtgtta

SEQ ID NO: 12618 - DNA, 20 bp, Artificial sequence
  SiRNA target sequence
aatacgtacaccggtgttaa

SEQ ID NO: 12619 - DNA, 20 bp, Artificial sequence
  SiRNA target sequence
atacgtacaccggtgttaaa

SEQ ID NO: 12620 - DNA, 20 bp, Artificial sequence
  SiRNA target sequence
tacgtacaccggtgttaaaa

SEQ ID NO: 12621 - DNA, 20 bp, Artificial sequence
  SiRNA target sequence
acgtacaccggtgttaaaac

SEQ ID NO: 12622 - DNA, 20 bp, Artificial sequence
  SiRNA target sequence
cgtacaccggtgttaaaacc

SEQ ID NO: 12623 - DNA, 20 bp, Artificial sequence
  SiRNA target sequence
gtacaccggtgttaaaaccg

SEQ ID NO: 12624 - DNA, 20 bp, Artificial sequence
  SiRNA target sequence
tacaccggtgttaaaaccga

SEQ ID NO: 12625 - DNA, 20 bp, Artificial sequence
  SiRNA target sequence
acaccggtgttaaaaccgaa

SEQ ID NO: 12626 - DNA, 20 bp, Artificial sequence
  SiRNA target sequence
caccggtgttaaaaccgaaa

SEQ ID NO: 12627 - DNA, 20 bp, Artificial sequence
  SiRNA target sequence
accggtgttaaaaccgaaat

SEQ ID NO: 12628 - DNA, 20 bp, Artificial sequence
  SiRNA target sequence
ccggtgttaaaaccgaaata

SEQ ID NO: 12629 - DNA, 20 bp, Artificial sequence
  SiRNA target sequence
cggtgttaaaaccgaaatat

SEQ ID NO: 12630 - DNA, 20 bp, Artificial sequence
  SiRNA target sequence
ggtgttaaaaccgaaatatc

SEQ ID NO: 12631 - DNA, 20 bp, Artificial sequence
  SiRNA target sequence
gtgttaaaaccgaaatatca

SEQ ID NO: 12632 - DNA, 20 bp, Artificial sequence
  SiRNA target sequence
tgttaaaaccgaaatatcaa

SEQ ID NO: 12633 - DNA, 20 bp, Artificial sequence
  SiRNA target sequence
gttaaaaccgaaatatcaaa

SEQ ID NO: 12634 - DNA, 20 bp, Artificial sequence
  SiRNA target sequence
ttaaaaccgaaatatcaaaa

SEQ ID NO: 12635 - DNA, 20 bp, Artificial sequence
  SiRNA target sequence
taaaaccgaaatatcaaaaa

SEQ ID NO: 12636 - DNA, 20 bp, Artificial sequence
  SiRNA target sequence
aaaaccgaaatatcaaaaac

SEQ ID NO: 12637 - DNA, 20 bp, Artificial sequence
  SiRNA target sequence
aaaccgaaatatcaaaaacc

SEQ ID NO: 12638 - DNA, 20 bp, Artificial sequence
  SiRNA target sequence
aaccgaaatatcaaaaaccg

SEQ ID NO: 12639 - DNA, 20 bp, Artificial sequence
  SiRNA target sequence
accgaaatatcaaaaaccgt

SEQ ID NO: 12640 - DNA, 20 bp, Artificial sequence
  SiRNA target sequence
ccgaaatatcaaaaaccgta

SEQ ID NO: 12641 - DNA, 20 bp, Artificial sequence
  SiRNA target sequence
cgaaatatcaaaaaccgtat

SEQ ID NO: 12642 - DNA, 20 bp, Artificial sequence
  SiRNA target sequence
gaaatatcaaaaaccgtatc

SEQ ID NO: 12643 - DNA, 20 bp, Artificial sequence
  SiRNA target sequence
aaatatcaaaaaccgtatca

SEQ ID NO: 12644 - DNA, 20 bp, Artificial sequence
  SiRNA target sequence
aatatcaaaaaccgtatcac

SEQ ID NO: 12645 - DNA, 20 bp, Artificial sequence
  SiRNA target sequence
atatcaaaaaccgtatcacc

SEQ ID NO: 12646 - DNA, 20 bp, Artificial sequence
  SiRNA target sequence
tatcaaaaaccgtatcacca

SEQ ID NO: 12647 - DNA, 20 bp, Artificial sequence
  SiRNA target sequence
atcaaaaaccgtatcaccac

SEQ ID NO: 12648 - DNA, 20 bp, Artificial sequence
  SiRNA target sequence
tcaaaaaccgtatcaccaca

SEQ ID NO: 12649 - DNA, 20 bp, Artificial sequence
  SiRNA target sequence
caaaaaccgtatcaccacac

SEQ ID NO: 12650 - DNA, 20 bp, Artificial sequence
  SiRNA target sequence
aaaaaccgtatcaccacact

SEQ ID NO: 12651 - DNA, 20 bp, Artificial sequence
  SiRNA target sequence
aaaaccgtatcaccacactt

SEQ ID NO: 12652 - DNA, 20 bp, Artificial sequence
  SiRNA target sequence
aaaccgtatcaccacacttc

SEQ ID NO: 12653 - DNA, 20 bp, Artificial sequence
  SiRNA target sequence
aaccgtatcaccacacttcc

SEQ ID NO: 12654 - DNA, 20 bp, Artificial sequence
  SiRNA target sequence
accgtatcaccacacttcca

SEQ ID NO: 12655 - DNA, 20 bp, Artificial sequence
  SiRNA target sequence
ccgtatcaccacacttccag

SEQ ID NO: 12656 - DNA, 20 bp, Artificial sequence
  SiRNA target sequence
cgtatcaccacacttccaga

SEQ ID NO: 12657 - DNA, 20 bp, Artificial sequence
  SiRNA target sequence
gtatcaccacacttccagat

SEQ ID NO: 12658 - DNA, 20 bp, Artificial sequence
  SiRNA target sequence
tatcaccacacttccagatt

SEQ ID NO: 12659 - DNA, 20 bp, Artificial sequence
  SiRNA target sequence
atcaccacacttccagattt

SEQ ID NO: 12660 - DNA, 20 bp, Artificial sequence
  SiRNA target sequence
tcaccacacttccagatttc

SEQ ID NO: 12661 - DNA, 20 bp, Artificial sequence
  SiRNA target sequence
caccacacttccagatttct

SEQ ID NO: 12662 - DNA, 20 bp, Artificial sequence
  SiRNA target sequence
accacacttccagatttctc

SEQ ID NO: 12663 - DNA, 20 bp, Artificial sequence
  SiRNA target sequence
ccacacttccagatttctca

SEQ ID NO: 12664 - DNA, 20 bp, Artificial sequence
  SiRNA target sequence
cacacttccagatttctcat

SEQ ID NO: 12665 - DNA, 20 bp, Artificial sequence
  SiRNA target sequence
acacttccagatttctcatg

SEQ ID NO: 12666 - DNA, 20 bp, Artificial sequence
  SiRNA target sequence
cacttccagatttctcatgt

SEQ ID NO: 12667 - DNA, 20 bp, Artificial sequence
  SiRNA target sequence
acttccagatttctcatgtc

SEQ ID NO: 12668 - DNA, 20 bp, Artificial sequence
  SiRNA target sequence
cttccagatttctcatgtct

SEQ ID NO: 12669 - DNA, 20 bp, Artificial sequence
  SiRNA target sequence
ttccagatttctcatgtctc

SEQ ID NO: 12670 - DNA, 20 bp, Artificial sequence
  SiRNA target sequence
tccagatttctcatgtctct

SEQ ID NO: 12671 - DNA, 20 bp, Artificial sequence
  SiRNA target sequence
ccagatttctcatgtctctt

SEQ ID NO: 12672 - DNA, 20 bp, Artificial sequence
  SiRNA target sequence
cagatttctcatgtctcttc

SEQ ID NO: 12673 - DNA, 20 bp, Artificial sequence
  SiRNA target sequence
agatttctcatgtctcttct

SEQ ID NO: 12674 - DNA, 20 bp, Artificial sequence
  SiRNA target sequence
gatttctcatgtctcttcta

SEQ ID NO: 12675 - DNA, 20 bp, Artificial sequence
  SiRNA target sequence
atttctcatgtctcttctat

SEQ ID NO: 12676 - DNA, 20 bp, Artificial sequence
  SiRNA target sequence
tttctcatgtctcttctatg

SEQ ID NO: 12677 - DNA, 20 bp, Artificial sequence
  SiRNA target sequence
ttctcatgtctcttctatgg

SEQ ID NO: 12678 - DNA, 20 bp, Artificial sequence
  SiRNA target sequence
tctcatgtctcttctatggg

SEQ ID NO: 12679 - DNA, 20 bp, Artificial sequence
  SiRNA target sequence
ctcatgtctcttctatgggc

SEQ ID NO: 12680 - DNA, 20 bp, Artificial sequence
  SiRNA target sequence
tcatgtctcttctatgggcg

SEQ ID NO: 12681 - DNA, 20 bp, Artificial sequence
  SiRNA target sequence
catgtctcttctatgggcgc

SEQ ID NO: 12682 - DNA, 20 bp, Artificial sequence
  SiRNA target sequence
atgtctcttctatgggcgca

SEQ ID NO: 12683 - DNA, 20 bp, Artificial sequence
  SiRNA target sequence
tgtctcttctatgggcgcag

SEQ ID NO: 12684 - DNA, 20 bp, Artificial sequence
  SiRNA target sequence
gtctcttctatgggcgcaga

SEQ ID NO: 12685 - DNA, 20 bp, Artificial sequence
  SiRNA target sequence
tctcttctatgggcgcagat

SEQ ID NO: 12686 - DNA, 20 bp, Artificial sequence
  SiRNA target sequence
ctcttctatgggcgcagatt

SEQ ID NO: 12687 - DNA, 20 bp, Artificial sequence
  SiRNA target sequence
tcttctatgggcgcagattt

SEQ ID NO: 12688 - DNA, 20 bp, Artificial sequence
  SiRNA target sequence
cttctatgggcgcagatttc

SEQ ID NO: 12689 - DNA, 20 bp, Artificial sequence
  SiRNA target sequence
ttctatgggcgcagatttcg

SEQ ID NO: 12690 - DNA, 20 bp, Artificial sequence
  SiRNA target sequence
tctatgggcgcagatttcga

SEQ ID NO: 12691 - DNA, 20 bp, Artificial sequence
  SiRNA target sequence
ctatgggcgcagatttcgac

SEQ ID NO: 12692 - DNA, 20 bp, Artificial sequence
  SiRNA target sequence
tatgggcgcagatttcgaca

SEQ ID NO: 12693 - DNA, 20 bp, Artificial sequence
  SiRNA target sequence
atgggcgcagatttcgacat

SEQ ID NO: 12694 - DNA, 20 bp, Artificial sequence
  SiRNA target sequence
tgggcgcagatttcgacata

SEQ ID NO: 12695 - DNA, 20 bp, Artificial sequence
  SiRNA target sequence
gggcgcagatttcgacataa

SEQ ID NO: 12696 - DNA, 20 bp, Artificial sequence
  SiRNA target sequence
ggcgcagatttcgacataaa

SEQ ID NO: 12697 - DNA, 20 bp, Artificial sequence
  SiRNA target sequence
gcgcagatttcgacataaaa

SEQ ID NO: 12698 - DNA, 20 bp, Artificial sequence
  SiRNA target sequence
cgcagatttcgacataaaac

SEQ ID NO: 12699 - DNA, 20 bp, Artificial sequence
  SiRNA target sequence
gcagatttcgacataaaaca

SEQ ID NO: 12700 - DNA, 20 bp, Artificial sequence
  SiRNA target sequence
cagatttcgacataaaacag

SEQ ID NO: 12701 - DNA, 20 bp, Artificial sequence
  SiRNA target sequence
agatttcgacataaaacaga

SEQ ID NO: 12702 - DNA, 20 bp, Artificial sequence
  SiRNA target sequence
gatttcgacataaaacagac

SEQ ID NO: 12703 - DNA, 20 bp, Artificial sequence
  SiRNA target sequence
atttcgacataaaacagaca

SEQ ID NO: 12704 - DNA, 20 bp, Artificial sequence
  SiRNA target sequence
tttcgacataaaacagacat

SEQ ID NO: 12705 - DNA, 20 bp, Artificial sequence
  SiRNA target sequence
ttcgacataaaacagacata

SEQ ID NO: 12706 - DNA, 20 bp, Artificial sequence
  SiRNA target sequence
tcgacataaaacagacatac

SEQ ID NO: 12707 - DNA, 20 bp, Artificial sequence
  SiRNA target sequence
cgacataaaacagacatacg

SEQ ID NO: 12708 - DNA, 20 bp, Artificial sequence
  SiRNA target sequence
gacataaaacagacatacgc

SEQ ID NO: 12709 - DNA, 20 bp, Artificial sequence
  SiRNA target sequence
acataaaacagacatacgcc

SEQ ID NO: 12710 - DNA, 20 bp, Artificial sequence
  SiRNA target sequence
cataaaacagacatacgcca

SEQ ID NO: 12711 - DNA, 20 bp, Artificial sequence
  SiRNA target sequence
ataaaacagacatacgccac

SEQ ID NO: 12712 - DNA, 20 bp, Artificial sequence
  SiRNA target sequence
taaaacagacatacgccacg

SEQ ID NO: 12713 - DNA, 20 bp, Artificial sequence
  SiRNA target sequence
aaaacagacatacgccacgt

SEQ ID NO: 12714 - DNA, 20 bp, Artificial sequence
  SiRNA target sequence
aaacagacatacgccacgtt

SEQ ID NO: 12715 - DNA, 20 bp, Artificial sequence
  SiRNA target sequence
aacagacatacgccacgttc

SEQ ID NO: 12716 - DNA, 20 bp, Artificial sequence
  SiRNA target sequence
acagacatacgccacgttct

SEQ ID NO: 12717 - DNA, 20 bp, Artificial sequence
  SiRNA target sequence
cagacatacgccacgttctg

SEQ ID NO: 12718 - DNA, 20 bp, Artificial sequence
  SiRNA target sequence
agacatacgccacgttctgc

SEQ ID NO: 12719 - DNA, 20 bp, Artificial sequence
  SiRNA target sequence
gacatacgccacgttctgct

SEQ ID NO: 12720 - DNA, 20 bp, Artificial sequence
  SiRNA target sequence
acatacgccacgttctgctt

SEQ ID NO: 12721 - DNA, 20 bp, Artificial sequence
  SiRNA target sequence
catacgccacgttctgcttt

SEQ ID NO: 12722 - DNA, 20 bp, Artificial sequence
  SiRNA target sequence
atacgccacgttctgcttta

SEQ ID NO: 12723 - DNA, 20 bp, Artificial sequence
  SiRNA target sequence
tacgccacgttctgctttaa

SEQ ID NO: 12724 - DNA, 20 bp, Artificial sequence
  SiRNA target sequence
acgccacgttctgctttaac

SEQ ID NO: 12725 - DNA, 20 bp, Artificial sequence
  SiRNA target sequence
cgccacgttctgctttaaca

SEQ ID NO: 12726 - DNA, 20 bp, Artificial sequence
  SiRNA target sequence
gccacgttctgctttaacaa

SEQ ID NO: 12727 - DNA, 20 bp, Artificial sequence
  SiRNA target sequence
ccacgttctgctttaacaat

SEQ ID NO: 12728 - DNA, 20 bp, Artificial sequence
  SiRNA target sequence
cacgttctgctttaacaatc

SEQ ID NO: 12729 - DNA, 20 bp, Artificial sequence
  SiRNA target sequence
acgttctgctttaacaatct

SEQ ID NO: 12730 - DNA, 20 bp, Artificial sequence
  SiRNA target sequence
cgttctgctttaacaatctt

SEQ ID NO: 12731 - DNA, 20 bp, Artificial sequence
  SiRNA target sequence
gttctgctttaacaatcttt

SEQ ID NO: 12732 - DNA, 20 bp, Artificial sequence
  SiRNA target sequence
ttctgctttaacaatctttt

SEQ ID NO: 12733 - DNA, 20 bp, Artificial sequence
  SiRNA target sequence
tctgctttaacaatcttttg

SEQ ID NO: 12734 - DNA, 20 bp, Artificial sequence
  SiRNA target sequence
ctgctttaacaatcttttgc

SEQ ID NO: 12735 - DNA, 20 bp, Artificial sequence
  SiRNA target sequence
tgctttaacaatcttttgct

SEQ ID NO: 12736 - DNA, 20 bp, Artificial sequence
  SiRNA target sequence
gctttaacaatcttttgcta

SEQ ID NO: 12737 - DNA, 20 bp, Artificial sequence
  SiRNA target sequence
ctttaacaatcttttgctac

SEQ ID NO: 12738 - DNA, 20 bp, Artificial sequence
  SiRNA target sequence
tttaacaatcttttgctaca

SEQ ID NO: 12739 - DNA, 20 bp, Artificial sequence
  SiRNA target sequence
ttaacaatcttttgctacaa

SEQ ID NO: 12740 - DNA, 20 bp, Artificial sequence
  SiRNA target sequence
taacaatcttttgctacaaa

SEQ ID NO: 12741 - DNA, 20 bp, Artificial sequence
  SiRNA target sequence
aacaatcttttgctacaaac

SEQ ID NO: 12742 - DNA, 20 bp, Artificial sequence
  SiRNA target sequence
acaatcttttgctacaaacg

SEQ ID NO: 12743 - DNA, 20 bp, Artificial sequence
  SiRNA target sequence
caatcttttgctacaaacga

SEQ ID NO: 12744 - DNA, 20 bp, Artificial sequence
  SiRNA target sequence
aatcttttgctacaaacgag

SEQ ID NO: 12745 - DNA, 20 bp, Artificial sequence
  SiRNA target sequence
atcttttgctacaaacgagc

SEQ ID NO: 12746 - DNA, 20 bp, Artificial sequence
  SiRNA target sequence
tcttttgctacaaacgagca

SEQ ID NO: 12747 - DNA, 20 bp, Artificial sequence
  SiRNA target sequence
cttttgctacaaacgagcat

SEQ ID NO: 12748 - DNA, 20 bp, Artificial sequence
  SiRNA target sequence
ttttgctacaaacgagcata

SEQ ID NO: 12749 - DNA, 20 bp, Artificial sequence
  SiRNA target sequence
tttgctacaaacgagcatag

SEQ ID NO: 12750 - DNA, 20 bp, Artificial sequence
  SiRNA target sequence
ttgctacaaacgagcataga

SEQ ID NO: 12751 - DNA, 20 bp, Artificial sequence
  SiRNA target sequence
tgctacaaacgagcatagac

SEQ ID NO: 12752 - DNA, 20 bp, Artificial sequence
  SiRNA target sequence
gctacaaacgagcatagacc

SEQ ID NO: 12753 - DNA, 20 bp, Artificial sequence
  SiRNA target sequence
ctacaaacgagcatagacca

SEQ ID NO: 12754 - DNA, 20 bp, Artificial sequence
  SiRNA target sequence
tacaaacgagcatagaccaa

SEQ ID NO: 12755 - DNA, 20 bp, Artificial sequence
  SiRNA target sequence
acaaacgagcatagaccaag

SEQ ID NO: 12756 - DNA, 20 bp, Artificial sequence
  SiRNA target sequence
caaacgagcatagaccaaga

SEQ ID NO: 12757 - DNA, 20 bp, Artificial sequence
  SiRNA target sequence
aaacgagcatagaccaagac

SEQ ID NO: 12758 - DNA, 20 bp, Artificial sequence
  SiRNA target sequence
aacgagcatagaccaagaca

SEQ ID NO: 12759 - DNA, 20 bp, Artificial sequence
  SiRNA target sequence
acgagcatagaccaagacaa

SEQ ID NO: 12760 - DNA, 20 bp, Artificial sequence
  SiRNA target sequence
cgagcatagaccaagacaaa

SEQ ID NO: 12761 - DNA, 20 bp, Artificial sequence
  SiRNA target sequence
gagcatagaccaagacaaaa

SEQ ID NO: 12762 - DNA, 20 bp, Artificial sequence
  SiRNA target sequence
agcatagaccaagacaaaat

SEQ ID NO: 12763 - DNA, 20 bp, Artificial sequence
  SiRNA target sequence
gcatagaccaagacaaaata

SEQ ID NO: 12764 - DNA, 20 bp, Artificial sequence
  SiRNA target sequence
catagaccaagacaaaatat

SEQ ID NO: 12765 - DNA, 20 bp, Artificial sequence
  SiRNA target sequence
atagaccaagacaaaatatt

SEQ ID NO: 12766 - DNA, 20 bp, Artificial sequence
  SiRNA target sequence
tagaccaagacaaaatattt

SEQ ID NO: 12767 - DNA, 20 bp, Artificial sequence
  SiRNA target sequence
agaccaagacaaaatattta

SEQ ID NO: 12768 - DNA, 20 bp, Artificial sequence
  SiRNA target sequence
gaccaagacaaaatatttag

SEQ ID NO: 12769 - DNA, 20 bp, Artificial sequence
  SiRNA target sequence
accaagacaaaatatttaga

SEQ ID NO: 12770 - DNA, 20 bp, Artificial sequence
  SiRNA target sequence
ccaagacaaaatatttagaa

SEQ ID NO: 12771 - DNA, 20 bp, Artificial sequence
  SiRNA target sequence
caagacaaaatatttagaat

SEQ ID NO: 12772 - DNA, 20 bp, Artificial sequence
  SiRNA target sequence
aagacaaaatatttagaata

SEQ ID NO: 12773 - DNA, 20 bp, Artificial sequence
  SiRNA target sequence
agacaaaatatttagaataa

SEQ ID NO: 12774 - DNA, 20 bp, Artificial sequence
  SiRNA target sequence
gacaaaatatttagaataag

SEQ ID NO: 12775 - DNA, 20 bp, Artificial sequence
  SiRNA target sequence
acaaaatatttagaataaga

SEQ ID NO: 12776 - DNA, 20 bp, Artificial sequence
  SiRNA target sequence
caaaatatttagaataagag

SEQ ID NO: 12777 - DNA, 20 bp, Artificial sequence
  SiRNA target sequence
aaaatatttagaataagagg

SEQ ID NO: 12778 - DNA, 20 bp, Artificial sequence
  SiRNA target sequence
aaatatttagaataagaggt

SEQ ID NO: 12779 - DNA, 20 bp, Artificial sequence
  SiRNA target sequence
aatatttagaataagaggta

SEQ ID NO: 12780 - DNA, 20 bp, Artificial sequence
  SiRNA target sequence
atatttagaataagaggtac

SEQ ID NO: 12781 - DNA, 20 bp, Artificial sequence
  SiRNA target sequence
tatttagaataagaggtacc

SEQ ID NO: 12782 - DNA, 20 bp, Artificial sequence
  SiRNA target sequence
atttagaataagaggtaccc

SEQ ID NO: 12783 - DNA, 20 bp, Artificial sequence
  SiRNA target sequence
tttagaataagaggtaccca

SEQ ID NO: 12784 - DNA, 20 bp, Artificial sequence
  SiRNA target sequence
ttagaataagaggtacccac

SEQ ID NO: 12785 - DNA, 20 bp, Artificial sequence
  SiRNA target sequence
tagaataagaggtacccaca

SEQ ID NO: 12786 - DNA, 20 bp, Artificial sequence
  SiRNA target sequence
agaataagaggtacccacat

SEQ ID NO: 12787 - DNA, 20 bp, Artificial sequence
  SiRNA target sequence
gaataagaggtacccacatg

SEQ ID NO: 12788 - DNA, 20 bp, Artificial sequence
  SiRNA target sequence
aataagaggtacccacatgt

SEQ ID NO: 12789 - DNA, 20 bp, Artificial sequence
  SiRNA target sequence
ataagaggtacccacatgtt

SEQ ID NO: 12790 - DNA, 20 bp, Artificial sequence
  SiRNA target sequence
taagaggtacccacatgttt

SEQ ID NO: 12791 - DNA, 20 bp, Artificial sequence
  SiRNA target sequence
aagaggtacccacatgttta

SEQ ID NO: 12792 - DNA, 20 bp, Artificial sequence
  SiRNA target sequence
agaggtacccacatgtttaa

SEQ ID NO: 12793 - DNA, 20 bp, Artificial sequence
  SiRNA target sequence
gaggtacccacatgtttaaa

SEQ ID NO: 12794 - DNA, 20 bp, Artificial sequence
  SiRNA target sequence
aggtacccacatgtttaaaa

SEQ ID NO: 12795 - DNA, 20 bp, Artificial sequence
  SiRNA target sequence
ggtacccacatgtttaaaaa

SEQ ID NO: 12796 - DNA, 20 bp, Artificial sequence
  SiRNA target sequence
gtacccacatgtttaaaaat

SEQ ID NO: 12797 - DNA, 20 bp, Artificial sequence
  SiRNA target sequence
tacccacatgtttaaaaatc

SEQ ID NO: 12798 - DNA, 20 bp, Artificial sequence
  SiRNA target sequence
acccacatgtttaaaaatct

SEQ ID NO: 12799 - DNA, 20 bp, Artificial sequence
  SiRNA target sequence
cccacatgtttaaaaatcta

SEQ ID NO: 12800 - DNA, 20 bp, Artificial sequence
  SiRNA target sequence
ccacatgtttaaaaatctac

SEQ ID NO: 12801 - DNA, 20 bp, Artificial sequence
  SiRNA target sequence
cacatgtttaaaaatctact

SEQ ID NO: 12802 - DNA, 20 bp, Artificial sequence
  SiRNA target sequence
acatgtttaaaaatctactt

SEQ ID NO: 12803 - DNA, 20 bp, Artificial sequence
  SiRNA target sequence
catgtttaaaaatctactta

SEQ ID NO: 12804 - DNA, 20 bp, Artificial sequence
  SiRNA target sequence
atgtttaaaaatctacttac

SEQ ID NO: 12805 - DNA, 20 bp, Artificial sequence
  SiRNA target sequence
tgtttaaaaatctacttact

SEQ ID NO: 12806 - DNA, 20 bp, Artificial sequence
  SiRNA target sequence
gtttaaaaatctacttacta

SEQ ID NO: 12807 - DNA, 20 bp, Artificial sequence
  SiRNA target sequence
tttaaaaatctacttactaa

SEQ ID NO: 12808 - DNA, 20 bp, Artificial sequence
  SiRNA target sequence
ttaaaaatctacttactaaa

SEQ ID NO: 12809 - DNA, 20 bp, Artificial sequence
  SiRNA target sequence
taaaaatctacttactaaat

SEQ ID NO: 12810 - DNA, 20 bp, Artificial sequence
  SiRNA target sequence
aaaaatctacttactaaatt

SEQ ID NO: 12811 - DNA, 20 bp, Artificial sequence
  SiRNA target sequence
aaaatctacttactaaattc

SEQ ID NO: 12812 - DNA, 20 bp, Artificial sequence
  SiRNA target sequence
aaatctacttactaaattcc

SEQ ID NO: 12813 - DNA, 20 bp, Artificial sequence
  SiRNA target sequence
aatctacttactaaattcca

SEQ ID NO: 12814 - DNA, 20 bp, Artificial sequence
  SiRNA target sequence
atctacttactaaattccat

SEQ ID NO: 12815 - DNA, 20 bp, Artificial sequence
  SiRNA target sequence
tctacttactaaattccata

SEQ ID NO: 12816 - DNA, 20 bp, Artificial sequence
  SiRNA target sequence
ctacttactaaattccatac

SEQ ID NO: 12817 - DNA, 20 bp, Artificial sequence
  SiRNA target sequence
tacttactaaattccataca

SEQ ID NO: 12818 - DNA, 20 bp, Artificial sequence
  SiRNA target sequence
acttactaaattccatacag

SEQ ID NO: 12819 - DNA, 20 bp, Artificial sequence
  SiRNA target sequence
cttactaaattccatacagt

SEQ ID NO: 12820 - DNA, 20 bp, Artificial sequence
  SiRNA target sequence
ttactaaattccatacagta

SEQ ID NO: 12821 - DNA, 20 bp, Artificial sequence
  SiRNA target sequence
tactaaattccatacagtaa

SEQ ID NO: 12822 - DNA, 20 bp, Artificial sequence
  SiRNA target sequence
actaaattccatacagtaat

SEQ ID NO: 12823 - DNA, 20 bp, Artificial sequence
  SiRNA target sequence
ctaaattccatacagtaatt

SEQ ID NO: 12824 - DNA, 20 bp, Artificial sequence
  SiRNA target sequence
taaattccatacagtaattg

SEQ ID NO: 12825 - DNA, 20 bp, Artificial sequence
  SiRNA target sequence
aaattccatacagtaattgg

SEQ ID NO: 12826 - DNA, 20 bp, Artificial sequence
  SiRNA target sequence
aattccatacagtaattggt

SEQ ID NO: 12827 - DNA, 20 bp, Artificial sequence
  SiRNA target sequence
attccatacagtaattggta

SEQ ID NO: 12828 - DNA, 20 bp, Artificial sequence
  SiRNA target sequence
ttccatacagtaattggtag

SEQ ID NO: 12829 - DNA, 20 bp, Artificial sequence
  SiRNA target sequence
tccatacagtaattggtaga

SEQ ID NO: 12830 - DNA, 20 bp, Artificial sequence
  SiRNA target sequence
ccatacagtaattggtagaa

SEQ ID NO: 12831 - DNA, 20 bp, Artificial sequence
  SiRNA target sequence
catacagtaattggtagaag

SEQ ID NO: 12832 - DNA, 20 bp, Artificial sequence
  SiRNA target sequence
atacagtaattggtagaagt

SEQ ID NO: 12833 - DNA, 20 bp, Artificial sequence
  SiRNA target sequence
tacagtaattggtagaagta

SEQ ID NO: 12834 - DNA, 20 bp, Artificial sequence
  SiRNA target sequence
acagtaattggtagaagtaa

SEQ ID NO: 12835 - DNA, 20 bp, Artificial sequence
  SiRNA target sequence
cagtaattggtagaagtaaa

SEQ ID NO: 12836 - DNA, 20 bp, Artificial sequence
  SiRNA target sequence
agtaattggtagaagtaaag

SEQ ID NO: 12837 - DNA, 20 bp, Artificial sequence
  SiRNA target sequence
gtaattggtagaagtaaaga

SEQ ID NO: 12838 - DNA, 20 bp, Artificial sequence
  SiRNA target sequence
taattggtagaagtaaagat

SEQ ID NO: 12839 - DNA, 20 bp, Artificial sequence
  SiRNA target sequence
aattggtagaagtaaagata

SEQ ID NO: 12840 - DNA, 20 bp, Artificial sequence
  SiRNA target sequence
attggtagaagtaaagatat

SEQ ID NO: 12841 - DNA, 20 bp, Artificial sequence
  SiRNA target sequence
ttggtagaagtaaagatatc

SEQ ID NO: 12842 - DNA, 20 bp, Artificial sequence
  SiRNA target sequence
tggtagaagtaaagatatct

SEQ ID NO: 12843 - DNA, 20 bp, Artificial sequence
  SiRNA target sequence
ggtagaagtaaagatatctt

SEQ ID NO: 12844 - DNA, 20 bp, Artificial sequence
  SiRNA target sequence
gtagaagtaaagatatcttt

SEQ ID NO: 12845 - DNA, 20 bp, Artificial sequence
  SiRNA target sequence
tagaagtaaagatatcttta

SEQ ID NO: 12846 - DNA, 20 bp, Artificial sequence
  SiRNA target sequence
agaagtaaagatatctttac

SEQ ID NO: 12847 - DNA, 20 bp, Artificial sequence
  SiRNA target sequence
gaagtaaagatatctttaca

SEQ ID NO: 12848 - DNA, 20 bp, Artificial sequence
  SiRNA target sequence
aagtaaagatatctttacac

SEQ ID NO: 12849 - DNA, 20 bp, Artificial sequence
  SiRNA target sequence
agtaaagatatctttacaca

SEQ ID NO: 12850 - DNA, 20 bp, Artificial sequence
  SiRNA target sequence
gtaaagatatctttacacaa

SEQ ID NO: 12851 - DNA, 20 bp, Artificial sequence
  SiRNA target sequence
taaagatatctttacacaaa

SEQ ID NO: 12852 - DNA, 20 bp, Artificial sequence
  SiRNA target sequence
aaagatatctttacacaaat

SEQ ID NO: 12853 - DNA, 20 bp, Artificial sequence
  SiRNA target sequence
aagatatctttacacaaata

SEQ ID NO: 12854 - DNA, 20 bp, Artificial sequence
  SiRNA target sequence
agatatctttacacaaatag

SEQ ID NO: 12855 - DNA, 20 bp, Artificial sequence
  SiRNA target sequence
gatatctttacacaaataga

SEQ ID NO: 12856 - DNA, 20 bp, Artificial sequence
  SiRNA target sequence
atatctttacacaaatagag

SEQ ID NO: 12857 - DNA, 20 bp, Artificial sequence
  SiRNA target sequence
tatctttacacaaatagagg

SEQ ID NO: 12858 - DNA, 20 bp, Artificial sequence
  SiRNA target sequence
atctttacacaaatagaggt

SEQ ID NO: 12859 - DNA, 20 bp, Artificial sequence
  SiRNA target sequence
tctttacacaaatagaggta

SEQ ID NO: 12860 - DNA, 20 bp, Artificial sequence
  SiRNA target sequence
ctttacacaaatagaggtag

SEQ ID NO: 12861 - DNA, 20 bp, Artificial sequence
  SiRNA target sequence
tttacacaaatagaggtaga

SEQ ID NO: 12862 - DNA, 20 bp, Artificial sequence
  SiRNA target sequence
ttacacaaatagaggtagac

SEQ ID NO: 12863 - DNA, 20 bp, Artificial sequence
  SiRNA target sequence
tacacaaatagaggtagaca

SEQ ID NO: 12864 - DNA, 20 bp, Artificial sequence
  SiRNA target sequence
acacaaatagaggtagacat

SEQ ID NO: 12865 - DNA, 20 bp, Artificial sequence
  SiRNA target sequence
cacaaatagaggtagacata

SEQ ID NO: 12866 - DNA, 20 bp, Artificial sequence
  SiRNA target sequence
acaaatagaggtagacataa

SEQ ID NO: 12867 - DNA, 20 bp, Artificial sequence
  SiRNA target sequence
caaatagaggtagacataaa

SEQ ID NO: 12868 - DNA, 20 bp, Artificial sequence
  SiRNA target sequence
aaatagaggtagacataaaa

SEQ ID NO: 12869 - DNA, 20 bp, Artificial sequence
  SiRNA target sequence
aatagaggtagacataaaaa

SEQ ID NO: 12870 - DNA, 20 bp, Artificial sequence
  SiRNA target sequence
atagaggtagacataaaaaa

SEQ ID NO: 12871 - DNA, 20 bp, Artificial sequence
  SiRNA target sequence
tagaggtagacataaaaaat

SEQ ID NO: 12872 - DNA, 20 bp, Artificial sequence
  SiRNA target sequence
agaggtagacataaaaaata

SEQ ID NO: 12873 - DNA, 20 bp, Artificial sequence
  SiRNA target sequence
gaggtagacataaaaaataa

SEQ ID NO: 12874 - DNA, 20 bp, Artificial sequence
  SiRNA target sequence
aggtagacataaaaaataaa

SEQ ID NO: 12875 - DNA, 20 bp, Artificial sequence
  SiRNA target sequence
ggtagacataaaaaataaat

SEQ ID NO: 12876 - DNA, 20 bp, Artificial sequence
  SiRNA target sequence
gtagacataaaaaataaata

SEQ ID NO: 12877 - DNA, 20 bp, Artificial sequence
  SiRNA target sequence
tagacataaaaaataaatac

SEQ ID NO: 12878 - DNA, 20 bp, Artificial sequence
  SiRNA target sequence
agacataaaaaataaataca

SEQ ID NO: 12879 - DNA, 20 bp, Artificial sequence
  SiRNA target sequence
gacataaaaaataaatacaa

SEQ ID NO: 12880 - DNA, 20 bp, Artificial sequence
  SiRNA target sequence
acataaaaaataaatacaat

SEQ ID NO: 12881 - DNA, 20 bp, Artificial sequence
  SiRNA target sequence
cataaaaaataaatacaata

SEQ ID NO: 12882 - DNA, 20 bp, Artificial sequence
  SiRNA target sequence
ataaaaaataaatacaataa

SEQ ID NO: 12883 - DNA, 20 bp, Artificial sequence
  SiRNA target sequence
taaaaaataaatacaataat

SEQ ID NO: 12884 - DNA, 20 bp, Artificial sequence
  SiRNA target sequence
aaaaaataaatacaataata

SEQ ID NO: 12885 - DNA, 20 bp, Artificial sequence
  SiRNA target sequence
aaaaataaatacaataatat

SEQ ID NO: 12886 - DNA, 20 bp, Artificial sequence
  SiRNA target sequence
aaaataaatacaataatatg

SEQ ID NO: 12887 - DNA, 20 bp, Artificial sequence
  SiRNA target sequence
aaataaatacaataatatgt

SEQ ID NO: 12888 - DNA, 20 bp, Artificial sequence
  SiRNA target sequence
aataaatacaataatatgtg

SEQ ID NO: 12889 - DNA, 20 bp, Artificial sequence
  SiRNA target sequence
ataaatacaataatatgtgt

SEQ ID NO: 12890 - DNA, 20 bp, Artificial sequence
  SiRNA target sequence
taaatacaataatatgtgta

SEQ ID NO: 12891 - DNA, 20 bp, Artificial sequence
  SiRNA target sequence
aaatacaataatatgtgtat

SEQ ID NO: 12892 - DNA, 20 bp, Artificial sequence
  SiRNA target sequence
aatacaataatatgtgtata

SEQ ID NO: 12893 - DNA, 20 bp, Artificial sequence
  SiRNA target sequence
atacaataatatgtgtataa

SEQ ID NO: 12894 - DNA, 20 bp, Artificial sequence
  SiRNA target sequence
tacaataatatgtgtataaa

SEQ ID NO: 12895 - DNA, 20 bp, Artificial sequence
  SiRNA target sequence
acaataatatgtgtataaaa

SEQ ID NO: 12896 - DNA, 20 bp, Artificial sequence
  SiRNA target sequence
caataatatgtgtataaaaa

SEQ ID NO: 12897 - DNA, 20 bp, Artificial sequence
  SiRNA target sequence
aataatatgtgtataaaaat

SEQ ID NO: 12898 - DNA, 20 bp, Artificial sequence
  SiRNA target sequence
ataatatgtgtataaaaatg

SEQ ID NO: 12899 - DNA, 20 bp, Artificial sequence
  SiRNA target sequence
taatatgtgtataaaaatga

SEQ ID NO: 12900 - DNA, 20 bp, Artificial sequence
  SiRNA target sequence
aatatgtgtataaaaatgat

SEQ ID NO: 12901 - DNA, 20 bp, Artificial sequence
  SiRNA target sequence
atatgtgtataaaaatgata

SEQ ID NO: 12902 - DNA, 20 bp, Artificial sequence
  SiRNA target sequence
tatgtgtataaaaatgatac

SEQ ID NO: 12903 - DNA, 20 bp, Artificial sequence
  SiRNA target sequence
atgtgtataaaaatgataca

SEQ ID NO: 12904 - DNA, 20 bp, Artificial sequence
  SiRNA target sequence
tgtgtataaaaatgatacag

SEQ ID NO: 12905 - DNA, 20 bp, Artificial sequence
  SiRNA target sequence
gtgtataaaaatgatacagc

SEQ ID NO: 12906 - DNA, 20 bp, Artificial sequence
  SiRNA target sequence
tgtataaaaatgatacagcc

SEQ ID NO: 12907 - DNA, 20 bp, Artificial sequence
  SiRNA target sequence
gtataaaaatgatacagcca

SEQ ID NO: 12908 - DNA, 20 bp, Artificial sequence
  SiRNA target sequence
tataaaaatgatacagccag

SEQ ID NO: 12909 - DNA, 20 bp, Artificial sequence
  SiRNA target sequence
ataaaaatgatacagccagc

SEQ ID NO: 12910 - DNA, 20 bp, Artificial sequence
  SiRNA target sequence
taaaaatgatacagccagct

SEQ ID NO: 12911 - DNA, 20 bp, Artificial sequence
  SiRNA target sequence
aaaaatgatacagccagcta

SEQ ID NO: 12912 - DNA, 20 bp, Artificial sequence
  SiRNA target sequence
aaaatgatacagccagctat

SEQ ID NO: 12913 - DNA, 20 bp, Artificial sequence
  SiRNA target sequence
aaatgatacagccagctatt

SEQ ID NO: 12914 - DNA, 20 bp, Artificial sequence
  SiRNA target sequence
aatgatacagccagctatta

SEQ ID NO: 12915 - DNA, 20 bp, Artificial sequence
  SiRNA target sequence
atgatacagccagctattaa

SEQ ID NO: 12916 - DNA, 20 bp, Artificial sequence
  SiRNA target sequence
tgatacagccagctattaaa

SEQ ID NO: 12917 - DNA, 20 bp, Artificial sequence
  SiRNA target sequence
gatacagccagctattaaag

SEQ ID NO: 12918 - DNA, 20 bp, Artificial sequence
  SiRNA target sequence
atacagccagctattaaagg

SEQ ID NO: 12919 - DNA, 20 bp, Artificial sequence
  SiRNA target sequence
tacagccagctattaaaggt

SEQ ID NO: 12920 - DNA, 20 bp, Artificial sequence
  SiRNA target sequence
acagccagctattaaaggtg

SEQ ID NO: 12921 - DNA, 20 bp, Artificial sequence
  SiRNA target sequence
cagccagctattaaaggtgc

SEQ ID NO: 12922 - DNA, 20 bp, Artificial sequence
  SiRNA target sequence
agccagctattaaaggtgct

SEQ ID NO: 12923 - DNA, 20 bp, Artificial sequence
  SiRNA target sequence
gccagctattaaaggtgctt

SEQ ID NO: 12924 - DNA, 20 bp, Artificial sequence
  SiRNA target sequence
ccagctattaaaggtgcttc

SEQ ID NO: 12925 - DNA, 20 bp, Artificial sequence
  SiRNA target sequence
cagctattaaaggtgcttca

SEQ ID NO: 12926 - DNA, 20 bp, Artificial sequence
  SiRNA target sequence
agctattaaaggtgcttcat

SEQ ID NO: 12927 - DNA, 20 bp, Artificial sequence
  SiRNA target sequence
gctattaaaggtgcttcatg

SEQ ID NO: 12928 - DNA, 20 bp, Artificial sequence
  SiRNA target sequence
ctattaaaggtgcttcatgt

SEQ ID NO: 12929 - DNA, 20 bp, Artificial sequence
  SiRNA target sequence
tattaaaggtgcttcatgta

SEQ ID NO: 12930 - DNA, 20 bp, Artificial sequence
  SiRNA target sequence
attaaaggtgcttcatgtat

SEQ ID NO: 12931 - DNA, 20 bp, Artificial sequence
  SiRNA target sequence
ttaaaggtgcttcatgtata

SEQ ID NO: 12932 - DNA, 20 bp, Artificial sequence
  SiRNA target sequence
taaaggtgcttcatgtatat

SEQ ID NO: 12933 - DNA, 20 bp, Artificial sequence
  SiRNA target sequence
aaaggtgcttcatgtatata

SEQ ID NO: 12934 - DNA, 20 bp, Artificial sequence
  SiRNA target sequence
aaggtgcttcatgtatatac

SEQ ID NO: 12935 - DNA, 20 bp, Artificial sequence
  SiRNA target sequence
aggtgcttcatgtatatacg

SEQ ID NO: 12936 - DNA, 20 bp, Artificial sequence
  SiRNA target sequence
ggtgcttcatgtatatacgt

SEQ ID NO: 12937 - DNA, 20 bp, Artificial sequence
  SiRNA target sequence
gtgcttcatgtatatacgtg

SEQ ID NO: 12938 - DNA, 20 bp, Artificial sequence
  SiRNA target sequence
tgcttcatgtatatacgtgg

SEQ ID NO: 12939 - DNA, 20 bp, Artificial sequence
  SiRNA target sequence
gcttcatgtatatacgtggg

SEQ ID NO: 12940 - DNA, 20 bp, Artificial sequence
  SiRNA target sequence
cttcatgtatatacgtgggt

SEQ ID NO: 12941 - DNA, 20 bp, Artificial sequence
  SiRNA target sequence
ttcatgtatatacgtgggta

SEQ ID NO: 12942 - DNA, 20 bp, Artificial sequence
  SiRNA target sequence
tcatgtatatacgtgggtaa

SEQ ID NO: 12943 - DNA, 20 bp, Artificial sequence
  SiRNA target sequence
catgtatatacgtgggtaat

SEQ ID NO: 12944 - DNA, 20 bp, Artificial sequence
  SiRNA target sequence
atgtatatacgtgggtaatt

SEQ ID NO: 12945 - DNA, 20 bp, Artificial sequence
  SiRNA target sequence
tgtatatacgtgggtaatta

SEQ ID NO: 12946 - DNA, 20 bp, Artificial sequence
  SiRNA target sequence
gtatatacgtgggtaattat

SEQ ID NO: 12947 - DNA, 20 bp, Artificial sequence
  SiRNA target sequence
tatatacgtgggtaattata

SEQ ID NO: 12948 - DNA, 20 bp, Artificial sequence
  SiRNA target sequence
atatacgtgggtaattatat

SEQ ID NO: 12949 - DNA, 20 bp, Artificial sequence
  SiRNA target sequence
tatacgtgggtaattatatg

SEQ ID NO: 12950 - DNA, 20 bp, Artificial sequence
  SiRNA target sequence
atacgtgggtaattatatgc

SEQ ID NO: 12951 - DNA, 20 bp, Artificial sequence
  SiRNA target sequence
tacgtgggtaattatatgca

SEQ ID NO: 12952 - DNA, 20 bp, Artificial sequence
  SiRNA target sequence
acgtgggtaattatatgcag

SEQ ID NO: 12953 - DNA, 20 bp, Artificial sequence
  SiRNA target sequence
cgtgggtaattatatgcagc

SEQ ID NO: 12954 - DNA, 20 bp, Artificial sequence
  SiRNA target sequence
gtgggtaattatatgcagca

SEQ ID NO: 12955 - DNA, 20 bp, Artificial sequence
  SiRNA target sequence
tgggtaattatatgcagcag

SEQ ID NO: 12956 - DNA, 20 bp, Artificial sequence
  SiRNA target sequence
gggtaattatatgcagcagc

SEQ ID NO: 12957 - DNA, 20 bp, Artificial sequence
  SiRNA target sequence
ggtaattatatgcagcagct

SEQ ID NO: 12958 - DNA, 20 bp, Artificial sequence
  SiRNA target sequence
gtaattatatgcagcagcta

SEQ ID NO: 12959 - DNA, 20 bp, Artificial sequence
  SiRNA target sequence
taattatatgcagcagctag

SEQ ID NO: 12960 - DNA, 20 bp, Artificial sequence
  SiRNA target sequence
aattatatgcagcagctagg

SEQ ID NO: 12961 - DNA, 20 bp, Artificial sequence
  SiRNA target sequence
attatatgcagcagctagga

SEQ ID NO: 12962 - DNA, 20 bp, Artificial sequence
  SiRNA target sequence
ttatatgcagcagctaggag

SEQ ID NO: 12963 - DNA, 20 bp, Artificial sequence
  SiRNA target sequence
tatatgcagcagctaggagt

SEQ ID NO: 12964 - DNA, 20 bp, Artificial sequence
  SiRNA target sequence
atatgcagcagctaggagta

SEQ ID NO: 12965 - DNA, 20 bp, Artificial sequence
  SiRNA target sequence
tatgcagcagctaggagtaa

SEQ ID NO: 12966 - DNA, 20 bp, Artificial sequence
  SiRNA target sequence
atgcagcagctaggagtaat

SEQ ID NO: 12967 - DNA, 20 bp, Artificial sequence
  SiRNA target sequence
tgcagcagctaggagtaatt

SEQ ID NO: 12968 - DNA, 20 bp, Artificial sequence
  SiRNA target sequence
gcagcagctaggagtaatta

SEQ ID NO: 12969 - DNA, 20 bp, Artificial sequence
  SiRNA target sequence
cagcagctaggagtaattag

SEQ ID NO: 12970 - DNA, 20 bp, Artificial sequence
  SiRNA target sequence
agcagctaggagtaattagt

SEQ ID NO: 12971 - DNA, 20 bp, Artificial sequence
  SiRNA target sequence
gcagctaggagtaattagtc

SEQ ID NO: 12972 - DNA, 20 bp, Artificial sequence
  SiRNA target sequence
cagctaggagtaattagtct

SEQ ID NO: 12973 - DNA, 20 bp, Artificial sequence
  SiRNA target sequence
agctaggagtaattagtctt

SEQ ID NO: 12974 - DNA, 20 bp, Artificial sequence
  SiRNA target sequence
gctaggagtaattagtcttg

SEQ ID NO: 12975 - DNA, 20 bp, Artificial sequence
  SiRNA target sequence
ctaggagtaattagtcttgg

SEQ ID NO: 12976 - DNA, 20 bp, Artificial sequence
  SiRNA target sequence
taggagtaattagtcttggt

SEQ ID NO: 12977 - DNA, 20 bp, Artificial sequence
  SiRNA target sequence
aggagtaattagtcttggtg

SEQ ID NO: 12978 - DNA, 20 bp, Artificial sequence
  SiRNA target sequence
ggagtaattagtcttggtgg

SEQ ID NO: 12979 - DNA, 20 bp, Artificial sequence
  SiRNA target sequence
gagtaattagtcttggtggg

SEQ ID NO: 12980 - DNA, 20 bp, Artificial sequence
  SiRNA target sequence
agtaattagtcttggtgggg

SEQ ID NO: 12981 - DNA, 20 bp, Artificial sequence
  SiRNA target sequence
gtaattagtcttggtgggga

SEQ ID NO: 12982 - DNA, 20 bp, Artificial sequence
  SiRNA target sequence
taattagtcttggtggggag

SEQ ID NO: 12983 - DNA, 20 bp, Artificial sequence
  SiRNA target sequence
aattagtcttggtggggaga

SEQ ID NO: 12984 - DNA, 20 bp, Artificial sequence
  SiRNA target sequence
attagtcttggtggggagat

SEQ ID NO: 12985 - DNA, 20 bp, Artificial sequence
  SiRNA target sequence
ttagtcttggtggggagatt

SEQ ID NO: 12986 - DNA, 20 bp, Artificial sequence
  SiRNA target sequence
tagtcttggtggggagatta

SEQ ID NO: 12987 - DNA, 20 bp, Artificial sequence
  SiRNA target sequence
agtcttggtggggagattat

SEQ ID NO: 12988 - DNA, 20 bp, Artificial sequence
  SiRNA target sequence
gtcttggtggggagattatt

SEQ ID NO: 12989 - DNA, 20 bp, Artificial sequence
  SiRNA target sequence
tcttggtggggagattatta

SEQ ID NO: 12990 - DNA, 20 bp, Artificial sequence
  SiRNA target sequence
cttggtggggagattattaa

SEQ ID NO: 12991 - DNA, 20 bp, Artificial sequence
  SiRNA target sequence
ttggtggggagattattaaa

SEQ ID NO: 12992 - DNA, 20 bp, Artificial sequence
  SiRNA target sequence
tggtggggagattattaaag

SEQ ID NO: 12993 - DNA, 20 bp, Artificial sequence
  SiRNA target sequence
ggtggggagattattaaagc

SEQ ID NO: 12994 - DNA, 20 bp, Artificial sequence
  SiRNA target sequence
gtggggagattattaaagct

SEQ ID NO: 12995 - DNA, 20 bp, Artificial sequence
  SiRNA target sequence
tggggagattattaaagctg

SEQ ID NO: 12996 - DNA, 20 bp, Artificial sequence
  SiRNA target sequence
ggggagattattaaagctga

SEQ ID NO: 12997 - DNA, 20 bp, Artificial sequence
  SiRNA target sequence
gggagattattaaagctgat

SEQ ID NO: 12998 - DNA, 20 bp, Artificial sequence
  SiRNA target sequence
ggagattattaaagctgatg

SEQ ID NO: 12999 - DNA, 20 bp, Artificial sequence
  SiRNA target sequence
gagattattaaagctgatga

SEQ ID NO: 13000 - DNA, 20 bp, Artificial sequence
  SiRNA target sequence
agattattaaagctgatgaa

SEQ ID NO: 13001 - DNA, 20 bp, Artificial sequence
  SiRNA target sequence
gattattaaagctgatgaat

SEQ ID NO: 13002 - DNA, 20 bp, Artificial sequence
  SiRNA target sequence
attattaaagctgatgaata

SEQ ID NO: 13003 - DNA, 20 bp, Artificial sequence
  SiRNA target sequence
ttattaaagctgatgaatac

SEQ ID NO: 13004 - DNA, 20 bp, Artificial sequence
  SiRNA target sequence
tattaaagctgatgaataca

SEQ ID NO: 13005 - DNA, 20 bp, Artificial sequence
  SiRNA target sequence
attaaagctgatgaatacat

SEQ ID NO: 13006 - DNA, 20 bp, Artificial sequence
  SiRNA target sequence
ttaaagctgatgaatacatt

SEQ ID NO: 13007 - DNA, 20 bp, Artificial sequence
  SiRNA target sequence
taaagctgatgaatacattg

SEQ ID NO: 13008 - DNA, 20 bp, Artificial sequence
  SiRNA target sequence
aaagctgatgaatacattgg

SEQ ID NO: 13009 - DNA, 20 bp, Artificial sequence
  SiRNA target sequence
aagctgatgaatacattgga

SEQ ID NO: 13010 - DNA, 20 bp, Artificial sequence
  SiRNA target sequence
agctgatgaatacattggac

SEQ ID NO: 13011 - DNA, 20 bp, Artificial sequence
  SiRNA target sequence
gctgatgaatacattggact

SEQ ID NO: 13012 - DNA, 20 bp, Artificial sequence
  SiRNA target sequence
ctgatgaatacattggacta

SEQ ID NO: 13013 - DNA, 20 bp, Artificial sequence
  SiRNA target sequence
tgatgaatacattggactat

SEQ ID NO: 13014 - DNA, 20 bp, Artificial sequence
  SiRNA target sequence
gatgaatacattggactatc

SEQ ID NO: 13015 - DNA, 20 bp, Artificial sequence
  SiRNA target sequence
atgaatacattggactatct

SEQ ID NO: 13016 - DNA, 20 bp, Artificial sequence
  SiRNA target sequence
tgaatacattggactatctt

SEQ ID NO: 13017 - DNA, 20 bp, Artificial sequence
  SiRNA target sequence
gaatacattggactatcttt

SEQ ID NO: 13018 - DNA, 20 bp, Artificial sequence
  SiRNA target sequence
aatacattggactatctttt

SEQ ID NO: 13019 - DNA, 20 bp, Artificial sequence
  SiRNA target sequence
atacattggactatcttttg

SEQ ID NO: 13020 - DNA, 20 bp, Artificial sequence
  SiRNA target sequence
tacattggactatcttttgt

SEQ ID NO: 13021 - DNA, 20 bp, Artificial sequence
  SiRNA target sequence
acattggactatcttttgta

SEQ ID NO: 13022 - DNA, 20 bp, Artificial sequence
  SiRNA target sequence
cattggactatcttttgtag

SEQ ID NO: 13023 - DNA, 20 bp, Artificial sequence
  SiRNA target sequence
attggactatcttttgtagg

SEQ ID NO: 13024 - DNA, 20 bp, Artificial sequence
  SiRNA target sequence
ttggactatcttttgtaggg

SEQ ID NO: 13025 - DNA, 20 bp, Artificial sequence
  SiRNA target sequence
tggactatcttttgtaggga

SEQ ID NO: 13026 - DNA, 20 bp, Artificial sequence
  SiRNA target sequence
ggactatcttttgtagggag

SEQ ID NO: 13027 - DNA, 20 bp, Artificial sequence
  SiRNA target sequence
gactatcttttgtagggaga

SEQ ID NO: 13028 - DNA, 20 bp, Artificial sequence
  SiRNA target sequence
actatcttttgtagggagat

SEQ ID NO: 13029 - DNA, 20 bp, Artificial sequence
  SiRNA target sequence
ctatcttttgtagggagata

SEQ ID NO: 13030 - DNA, 20 bp, Artificial sequence
  SiRNA target sequence
tatcttttgtagggagatat

SEQ ID NO: 13031 - DNA, 20 bp, Artificial sequence
  SiRNA target sequence
atcttttgtagggagatatg

SEQ ID NO: 13032 - DNA, 20 bp, Artificial sequence
  SiRNA target sequence
tcttttgtagggagatatga

SEQ ID NO: 13033 - DNA, 20 bp, Artificial sequence
  SiRNA target sequence
cttttgtagggagatatgaa

SEQ ID NO: 13034 - DNA, 20 bp, Artificial sequence
  SiRNA target sequence
ttttgtagggagatatgaag

SEQ ID NO: 13035 - DNA, 20 bp, Artificial sequence
  SiRNA target sequence
tttgtagggagatatgaagg

SEQ ID NO: 13036 - DNA, 20 bp, Artificial sequence
  SiRNA target sequence
ttgtagggagatatgaaggg

SEQ ID NO: 13037 - DNA, 20 bp, Artificial sequence
  SiRNA target sequence
tgtagggagatatgaaggga

SEQ ID NO: 13038 - DNA, 20 bp, Artificial sequence
  SiRNA target sequence
gtagggagatatgaagggat

SEQ ID NO: 13039 - DNA, 20 bp, Artificial sequence
  SiRNA target sequence
tagggagatatgaagggatt

SEQ ID NO: 13040 - DNA, 20 bp, Artificial sequence
  SiRNA target sequence
agggagatatgaagggattg

SEQ ID NO: 13041 - DNA, 20 bp, Artificial sequence
  SiRNA target sequence
gggagatatgaagggattgg

SEQ ID NO: 13042 - DNA, 20 bp, Artificial sequence
  SiRNA target sequence
ggagatatgaagggattggt

SEQ ID NO: 13043 - DNA, 20 bp, Artificial sequence
  SiRNA target sequence
gagatatgaagggattggtt

SEQ ID NO: 13044 - DNA, 20 bp, Artificial sequence
  SiRNA target sequence
agatatgaagggattggttc

SEQ ID NO: 13045 - DNA, 20 bp, Artificial sequence
  SiRNA target sequence
gatatgaagggattggttct

SEQ ID NO: 13046 - DNA, 20 bp, Artificial sequence
  SiRNA target sequence
atatgaagggattggttcta

SEQ ID NO: 13047 - DNA, 20 bp, Artificial sequence
  SiRNA target sequence
tatgaagggattggttctat

SEQ ID NO: 13048 - DNA, 20 bp, Artificial sequence
  SiRNA target sequence
atgaagggattggttctatt

SEQ ID NO: 13049 - DNA, 20 bp, Artificial sequence
  SiRNA target sequence
tgaagggattggttctattt

SEQ ID NO: 13050 - DNA, 20 bp, Artificial sequence
  SiRNA target sequence
gaagggattggttctatttc

SEQ ID NO: 13051 - DNA, 20 bp, Artificial sequence
  SiRNA target sequence
aagggattggttctatttct

SEQ ID NO: 13052 - DNA, 20 bp, Artificial sequence
  SiRNA target sequence
agggattggttctatttcta

SEQ ID NO: 13053 - DNA, 20 bp, Artificial sequence
  SiRNA target sequence
gggattggttctatttctac

SEQ ID NO: 13054 - DNA, 20 bp, Artificial sequence
  SiRNA target sequence
ggattggttctatttctact

SEQ ID NO: 13055 - DNA, 20 bp, Artificial sequence
  SiRNA target sequence
gattggttctatttctacta

SEQ ID NO: 13056 - DNA, 20 bp, Artificial sequence
  SiRNA target sequence
attggttctatttctactat

SEQ ID NO: 13057 - DNA, 20 bp, Artificial sequence
  SiRNA target sequence
ttggttctatttctactata

SEQ ID NO: 13058 - DNA, 20 bp, Artificial sequence
  SiRNA target sequence
tggttctatttctactatat

SEQ ID NO: 13059 - DNA, 20 bp, Artificial sequence
  SiRNA target sequence
ggttctatttctactatatc

SEQ ID NO: 13060 - DNA, 20 bp, Artificial sequence
  SiRNA target sequence
gttctatttctactatatca

SEQ ID NO: 13061 - DNA, 20 bp, Artificial sequence
  SiRNA target sequence
ttctatttctactatatcac

SEQ ID NO: 13062 - DNA, 20 bp, Artificial sequence
  SiRNA target sequence
tctatttctactatatcact

SEQ ID NO: 13063 - DNA, 20 bp, Artificial sequence
  SiRNA target sequence
ctatttctactatatcactt

SEQ ID NO: 13064 - DNA, 20 bp, Artificial sequence
  SiRNA target sequence
tatttctactatatcacttc

SEQ ID NO: 13065 - DNA, 20 bp, Artificial sequence
  SiRNA target sequence
atttctactatatcacttca

SEQ ID NO: 13066 - DNA, 20 bp, Artificial sequence
  SiRNA target sequence
tttctactatatcacttcag

SEQ ID NO: 13067 - DNA, 20 bp, Artificial sequence
  SiRNA target sequence
ttctactatatcacttcagc

SEQ ID NO: 13068 - DNA, 20 bp, Artificial sequence
  SiRNA target sequence
tctactatatcacttcagca

SEQ ID NO: 13069 - DNA, 20 bp, Artificial sequence
  SiRNA target sequence
ctactatatcacttcagcag

SEQ ID NO: 13070 - DNA, 20 bp, Artificial sequence
  SiRNA target sequence
tactatatcacttcagcagt

SEQ ID NO: 13071 - DNA, 20 bp, Artificial sequence
  SiRNA target sequence
actatatcacttcagcagtt

SEQ ID NO: 13072 - DNA, 20 bp, Artificial sequence
  SiRNA target sequence
ctatatcacttcagcagttt

SEQ ID NO: 13073 - DNA, 20 bp, Artificial sequence
  SiRNA target sequence
tatatcacttcagcagttta

SEQ ID NO: 13074 - DNA, 20 bp, Artificial sequence
  SiRNA target sequence
atatcacttcagcagtttaa

SEQ ID NO: 13075 - DNA, 20 bp, Artificial sequence
  SiRNA target sequence
tatcacttcagcagtttaat

SEQ ID NO: 13076 - DNA, 20 bp, Artificial sequence
  SiRNA target sequence
atcacttcagcagtttaata

SEQ ID NO: 13077 - DNA, 20 bp, Artificial sequence
  SiRNA target sequence
tcacttcagcagtttaatac

SEQ ID NO: 13078 - DNA, 20 bp, Artificial sequence
  SiRNA target sequence
cacttcagcagtttaataca

SEQ ID NO: 13079 - DNA, 20 bp, Artificial sequence
  SiRNA target sequence
acttcagcagtttaatacac

SEQ ID NO: 13080 - DNA, 20 bp, Artificial sequence
  SiRNA target sequence
cttcagcagtttaatacact

SEQ ID NO: 13081 - DNA, 20 bp, Artificial sequence
  SiRNA target sequence
ttcagcagtttaatacactg

SEQ ID NO: 13082 - DNA, 20 bp, Artificial sequence
  SiRNA target sequence
tcagcagtttaatacactgt

SEQ ID NO: 13083 - DNA, 20 bp, Artificial sequence
  SiRNA target sequence
cagcagtttaatacactgtc

SEQ ID NO: 13084 - DNA, 20 bp, Artificial sequence
  SiRNA target sequence
agcagtttaatacactgtct

SEQ ID NO: 13085 - DNA, 20 bp, Artificial sequence
  SiRNA target sequence
gcagtttaatacactgtcta

SEQ ID NO: 13086 - DNA, 20 bp, Artificial sequence
  SiRNA target sequence
cagtttaatacactgtctat

SEQ ID NO: 13087 - DNA, 20 bp, Artificial sequence
  SiRNA target sequence
agtttaatacactgtctata

SEQ ID NO: 13088 - DNA, 20 bp, Artificial sequence
  SiRNA target sequence
gtttaatacactgtctatag

SEQ ID NO: 13089 - DNA, 20 bp, Artificial sequence
  SiRNA target sequence
tttaatacactgtctataga

SEQ ID NO: 13090 - DNA, 20 bp, Artificial sequence
  SiRNA target sequence
ttaatacactgtctatagat

SEQ ID NO: 13091 - DNA, 20 bp, Artificial sequence
  SiRNA target sequence
taatacactgtctatagatt

SEQ ID NO: 13092 - DNA, 20 bp, Artificial sequence
  SiRNA target sequence
aatacactgtctatagatta

SEQ ID NO: 13093 - DNA, 20 bp, Artificial sequence
  SiRNA target sequence
atacactgtctatagattat

SEQ ID NO: 13094 - DNA, 20 bp, Artificial sequence
  SiRNA target sequence
tacactgtctatagattatt

SEQ ID NO: 13095 - DNA, 20 bp, Artificial sequence
  SiRNA target sequence
acactgtctatagattatta

SEQ ID NO: 13096 - DNA, 20 bp, Artificial sequence
  SiRNA target sequence
cactgtctatagattattac

SEQ ID NO: 13097 - DNA, 20 bp, Artificial sequence
  SiRNA target sequence
actgtctatagattattaca

SEQ ID NO: 13098 - DNA, 20 bp, Artificial sequence
  SiRNA target sequence
ctgtctatagattattacaa

SEQ ID NO: 13099 - DNA, 20 bp, Artificial sequence
  SiRNA target sequence
tgtctatagattattacaag

SEQ ID NO: 13100 - DNA, 20 bp, Artificial sequence
  SiRNA target sequence
gtctatagattattacaaga

SEQ ID NO: 13101 - DNA, 20 bp, Artificial sequence
  SiRNA target sequence
tctatagattattacaagac

SEQ ID NO: 13102 - DNA, 20 bp, Artificial sequence
  SiRNA target sequence
ctatagattattacaagaca

SEQ ID NO: 13103 - DNA, 20 bp, Artificial sequence
  SiRNA target sequence
tatagattattacaagacat

SEQ ID NO: 13104 - DNA, 20 bp, Artificial sequence
  SiRNA target sequence
atagattattacaagacatt

SEQ ID NO: 13105 - DNA, 20 bp, Artificial sequence
  SiRNA target sequence
tagattattacaagacattg

SEQ ID NO: 13106 - DNA, 20 bp, Artificial sequence
  SiRNA target sequence
agattattacaagacattgt

SEQ ID NO: 13107 - DNA, 20 bp, Artificial sequence
  SiRNA target sequence
gattattacaagacattgtc

SEQ ID NO: 13108 - DNA, 20 bp, Artificial sequence
  SiRNA target sequence
attattacaagacattgtct

SEQ ID NO: 13109 - DNA, 20 bp, Artificial sequence
  SiRNA target sequence
ttattacaagacattgtctt

SEQ ID NO: 13110 - DNA, 20 bp, Artificial sequence
  SiRNA target sequence
tattacaagacattgtcttc

SEQ ID NO: 13111 - DNA, 20 bp, Artificial sequence
  SiRNA target sequence
attacaagacattgtcttct

SEQ ID NO: 13112 - DNA, 20 bp, Artificial sequence
  SiRNA target sequence
ttacaagacattgtcttcta

SEQ ID NO: 13113 - DNA, 20 bp, Artificial sequence
  SiRNA target sequence
tacaagacattgtcttctat

SEQ ID NO: 13114 - DNA, 20 bp, Artificial sequence
  SiRNA target sequence
acaagacattgtcttctatt

SEQ ID NO: 13115 - DNA, 20 bp, Artificial sequence
  SiRNA target sequence
caagacattgtcttctattt

SEQ ID NO: 13116 - DNA, 20 bp, Artificial sequence
  SiRNA target sequence
aagacattgtcttctatttg

SEQ ID NO: 13117 - DNA, 20 bp, Artificial sequence
  SiRNA target sequence
agacattgtcttctatttgt

SEQ ID NO: 13118 - DNA, 20 bp, Artificial sequence
  SiRNA target sequence
gacattgtcttctatttgtg

SEQ ID NO: 13119 - DNA, 20 bp, Artificial sequence
  SiRNA target sequence
acattgtcttctatttgtga

SEQ ID NO: 13120 - DNA, 20 bp, Artificial sequence
  SiRNA target sequence
cattgtcttctatttgtgac

SEQ ID NO: 13121 - DNA, 20 bp, Artificial sequence
  SiRNA target sequence
attgtcttctatttgtgacg

SEQ ID NO: 13122 - DNA, 20 bp, Artificial sequence
  SiRNA target sequence
ttgtcttctatttgtgacgt

SEQ ID NO: 13123 - DNA, 20 bp, Artificial sequence
  SiRNA target sequence
tgtcttctatttgtgacgta

SEQ ID NO: 13124 - DNA, 20 bp, Artificial sequence
  SiRNA target sequence
gtcttctatttgtgacgtag

SEQ ID NO: 13125 - DNA, 20 bp, Artificial sequence
  SiRNA target sequence
tcttctatttgtgacgtagg

SEQ ID NO: 13126 - DNA, 20 bp, Artificial sequence
  SiRNA target sequence
cttctatttgtgacgtaggt

SEQ ID NO: 13127 - DNA, 20 bp, Artificial sequence
  SiRNA target sequence
ttctatttgtgacgtaggta

SEQ ID NO: 13128 - DNA, 20 bp, Artificial sequence
  SiRNA target sequence
tctatttgtgacgtaggtat

SEQ ID NO: 13129 - DNA, 20 bp, Artificial sequence
  SiRNA target sequence
ctatttgtgacgtaggtatt

SEQ ID NO: 13130 - DNA, 20 bp, Artificial sequence
  SiRNA target sequence
tatttgtgacgtaggtatta

SEQ ID NO: 13131 - DNA, 20 bp, Artificial sequence
  SiRNA target sequence
atttgtgacgtaggtattaa

SEQ ID NO: 13132 - DNA, 20 bp, Artificial sequence
  SiRNA target sequence
tttgtgacgtaggtattaaa

SEQ ID NO: 13133 - DNA, 20 bp, Artificial sequence
  SiRNA target sequence
ttgtgacgtaggtattaaaa

SEQ ID NO: 13134 - DNA, 20 bp, Artificial sequence
  SiRNA target sequence
tgtgacgtaggtattaaaat

SEQ ID NO: 13135 - DNA, 20 bp, Artificial sequence
  SiRNA target sequence
gtgacgtaggtattaaaata

SEQ ID NO: 13136 - DNA, 20 bp, Artificial sequence
  SiRNA target sequence
tgacgtaggtattaaaatat

SEQ ID NO: 13137 - DNA, 20 bp, Artificial sequence
  SiRNA target sequence
gacgtaggtattaaaatatc

SEQ ID NO: 13138 - DNA, 20 bp, Artificial sequence
  SiRNA target sequence
acgtaggtattaaaatatca

SEQ ID NO: 13139 - DNA, 20 bp, Artificial sequence
  SiRNA target sequence
cgtaggtattaaaatatcaa

SEQ ID NO: 13140 - DNA, 20 bp, Artificial sequence
  SiRNA target sequence
gtaggtattaaaatatcaac

SEQ ID NO: 13141 - DNA, 20 bp, Artificial sequence
  SiRNA target sequence
taggtattaaaatatcaact

SEQ ID NO: 13142 - DNA, 20 bp, Artificial sequence
  SiRNA target sequence
aggtattaaaatatcaactg

SEQ ID NO: 13143 - DNA, 20 bp, Artificial sequence
  SiRNA target sequence
ggtattaaaatatcaactga

SEQ ID NO: 13144 - DNA, 20 bp, Artificial sequence
  SiRNA target sequence
gtattaaaatatcaactgat

SEQ ID NO: 13145 - DNA, 20 bp, Artificial sequence
  SiRNA target sequence
tattaaaatatcaactgata

SEQ ID NO: 13146 - DNA, 20 bp, Artificial sequence
  SiRNA target sequence
attaaaatatcaactgatag

SEQ ID NO: 13147 - DNA, 20 bp, Artificial sequence
  SiRNA target sequence
ttaaaatatcaactgatagg

SEQ ID NO: 13148 - DNA, 20 bp, Artificial sequence
  SiRNA target sequence
taaaatatcaactgataggg

SEQ ID NO: 13149 - DNA, 20 bp, Artificial sequence
  SiRNA target sequence
aaaatatcaactgataggga

SEQ ID NO: 13150 - DNA, 20 bp, Artificial sequence
  SiRNA target sequence
aaatatcaactgatagggaa

SEQ ID NO: 13151 - DNA, 20 bp, Artificial sequence
  SiRNA target sequence
aatatcaactgatagggaaa

SEQ ID NO: 13152 - DNA, 20 bp, Artificial sequence
  SiRNA target sequence
atatcaactgatagggaaaa

SEQ ID NO: 13153 - DNA, 20 bp, Artificial sequence
  SiRNA target sequence
tatcaactgatagggaaaaa

SEQ ID NO: 13154 - DNA, 20 bp, Artificial sequence
  SiRNA target sequence
atcaactgatagggaaaaat

SEQ ID NO: 13155 - DNA, 20 bp, Artificial sequence
  SiRNA target sequence
tcaactgatagggaaaaatc

SEQ ID NO: 13156 - DNA, 20 bp, Artificial sequence
  SiRNA target sequence
caactgatagggaaaaatca

SEQ ID NO: 13157 - DNA, 20 bp, Artificial sequence
  SiRNA target sequence
aactgatagggaaaaatcag

SEQ ID NO: 13158 - DNA, 20 bp, Artificial sequence
  SiRNA target sequence
actgatagggaaaaatcagt

SEQ ID NO: 13159 - DNA, 20 bp, Artificial sequence
  SiRNA target sequence
ctgatagggaaaaatcagtt

SEQ ID NO: 13160 - DNA, 20 bp, Artificial sequence
  SiRNA target sequence
tgatagggaaaaatcagtta

SEQ ID NO: 13161 - DNA, 20 bp, Artificial sequence
  SiRNA target sequence
gatagggaaaaatcagttaa

SEQ ID NO: 13162 - DNA, 20 bp, Artificial sequence
  SiRNA target sequence
atagggaaaaatcagttaat

SEQ ID NO: 13163 - DNA, 20 bp, Artificial sequence
  SiRNA target sequence
tagggaaaaatcagttaatt

SEQ ID NO: 13164 - DNA, 20 bp, Artificial sequence
  SiRNA target sequence
agggaaaaatcagttaatta

SEQ ID NO: 13165 - DNA, 20 bp, Artificial sequence
  SiRNA target sequence
gggaaaaatcagttaattat

SEQ ID NO: 13166 - DNA, 20 bp, Artificial sequence
  SiRNA target sequence
ggaaaaatcagttaattatg

SEQ ID NO: 13167 - DNA, 20 bp, Artificial sequence
  SiRNA target sequence
gaaaaatcagttaattatgg

SEQ ID NO: 13168 - DNA, 20 bp, Artificial sequence
  SiRNA target sequence
aaaaatcagttaattatgga

SEQ ID NO: 13169 - DNA, 20 bp, Artificial sequence
  SiRNA target sequence
aaaatcagttaattatggat

SEQ ID NO: 13170 - DNA, 20 bp, Artificial sequence
  SiRNA target sequence
aaatcagttaattatggatt

SEQ ID NO: 13171 - DNA, 20 bp, Artificial sequence
  SiRNA target sequence
aatcagttaattatggatta

SEQ ID NO: 13172 - DNA, 20 bp, Artificial sequence
  SiRNA target sequence
atcagttaattatggattag

SEQ ID NO: 13173 - DNA, 20 bp, Artificial sequence
  SiRNA target sequence
tcagttaattatggattagg

SEQ ID NO: 13174 - DNA, 20 bp, Artificial sequence
  SiRNA target sequence
cagttaattatggattagga

SEQ ID NO: 13175 - DNA, 20 bp, Artificial sequence
  SiRNA target sequence
agttaattatggattaggag

SEQ ID NO: 13176 - DNA, 20 bp, Artificial sequence
  SiRNA target sequence
gttaattatggattaggagt

SEQ ID NO: 13177 - DNA, 20 bp, Artificial sequence
  SiRNA target sequence
ttaattatggattaggagtt

SEQ ID NO: 13178 - DNA, 20 bp, Artificial sequence
  SiRNA target sequence
taattatggattaggagtta

SEQ ID NO: 13179 - DNA, 20 bp, Artificial sequence
  SiRNA target sequence
aattatggattaggagttaa

SEQ ID NO: 13180 - DNA, 20 bp, Artificial sequence
  SiRNA target sequence
attatggattaggagttaaa

SEQ ID NO: 13181 - DNA, 20 bp, Artificial sequence
  SiRNA target sequence
ttatggattaggagttaaac

SEQ ID NO: 13182 - DNA, 20 bp, Artificial sequence
  SiRNA target sequence
tatggattaggagttaaact

SEQ ID NO: 13183 - DNA, 20 bp, Artificial sequence
  SiRNA target sequence
atggattaggagttaaacta

SEQ ID NO: 13184 - DNA, 20 bp, Artificial sequence
  SiRNA target sequence
tggattaggagttaaactac

SEQ ID NO: 13185 - DNA, 20 bp, Artificial sequence
  SiRNA target sequence
ggattaggagttaaactaca

SEQ ID NO: 13186 - DNA, 20 bp, Artificial sequence
  SiRNA target sequence
gattaggagttaaactacac

SEQ ID NO: 13187 - DNA, 20 bp, Artificial sequence
  SiRNA target sequence
attaggagttaaactacaca

SEQ ID NO: 13188 - DNA, 20 bp, Artificial sequence
  SiRNA target sequence
ttaggagttaaactacacag

SEQ ID NO: 13189 - DNA, 20 bp, Artificial sequence
  SiRNA target sequence
taggagttaaactacacagt

SEQ ID NO: 13190 - DNA, 20 bp, Artificial sequence
  SiRNA target sequence
aggagttaaactacacagta

SEQ ID NO: 13191 - DNA, 20 bp, Artificial sequence
  SiRNA target sequence
ggagttaaactacacagtaa

SEQ ID NO: 13192 - DNA, 20 bp, Artificial sequence
  SiRNA target sequence
gagttaaactacacagtaaa

SEQ ID NO: 13193 - DNA, 20 bp, Artificial sequence
  SiRNA target sequence
agttaaactacacagtaaaa

SEQ ID NO: 13194 - DNA, 20 bp, Artificial sequence
  SiRNA target sequence
gttaaactacacagtaaaaa

SEQ ID NO: 13195 - DNA, 20 bp, Artificial sequence
  SiRNA target sequence
ttaaactacacagtaaaaaa

SEQ ID NO: 13196 - DNA, 20 bp, Artificial sequence
  SiRNA target sequence
taaactacacagtaaaaaag

SEQ ID NO: 13197 - DNA, 20 bp, Artificial sequence
  SiRNA target sequence
aaactacacagtaaaaaagg

SEQ ID NO: 13198 - DNA, 20 bp, Artificial sequence
  SiRNA target sequence
aactacacagtaaaaaagga

SEQ ID NO: 13199 - DNA, 20 bp, Artificial sequence
  SiRNA target sequence
actacacagtaaaaaaggag

SEQ ID NO: 13200 - DNA, 20 bp, Artificial sequence
  SiRNA target sequence
ctacacagtaaaaaaggaga

SEQ ID NO: 13201 - DNA, 20 bp, Artificial sequence
  SiRNA target sequence
tacacagtaaaaaaggagaa

SEQ ID NO: 13202 - DNA, 20 bp, Artificial sequence
  SiRNA target sequence
acacagtaaaaaaggagaaa

SEQ ID NO: 13203 - DNA, 20 bp, Artificial sequence
  SiRNA target sequence
cacagtaaaaaaggagaaat

SEQ ID NO: 13204 - DNA, 20 bp, Artificial sequence
  SiRNA target sequence
acagtaaaaaaggagaaatt

SEQ ID NO: 13205 - DNA, 20 bp, Artificial sequence
  SiRNA target sequence
cagtaaaaaaggagaaatta

SEQ ID NO: 13206 - DNA, 20 bp, Artificial sequence
  SiRNA target sequence
agtaaaaaaggagaaattat

SEQ ID NO: 13207 - DNA, 20 bp, Artificial sequence
  SiRNA target sequence
gtaaaaaaggagaaattatc

SEQ ID NO: 13208 - DNA, 20 bp, Artificial sequence
  SiRNA target sequence
taaaaaaggagaaattatcg

SEQ ID NO: 13209 - DNA, 20 bp, Artificial sequence
  SiRNA target sequence
aaaaaaggagaaattatcgg

SEQ ID NO: 13210 - DNA, 20 bp, Artificial sequence
  SiRNA target sequence
aaaaaggagaaattatcgga

SEQ ID NO: 13211 - DNA, 20 bp, Artificial sequence
  SiRNA target sequence
aaaaggagaaattatcggat

SEQ ID NO: 13212 - DNA, 20 bp, Artificial sequence
  SiRNA target sequence
aaaggagaaattatcggatg

SEQ ID NO: 13213 - DNA, 20 bp, Artificial sequence
  SiRNA target sequence
aaggagaaattatcggatgt

SEQ ID NO: 13214 - DNA, 20 bp, Artificial sequence
  SiRNA target sequence
aggagaaattatcggatgtg

SEQ ID NO: 13215 - DNA, 20 bp, Artificial sequence
  SiRNA target sequence
ggagaaattatcggatgtgt

SEQ ID NO: 13216 - DNA, 20 bp, Artificial sequence
  SiRNA target sequence
gagaaattatcggatgtgta

SEQ ID NO: 13217 - DNA, 20 bp, Artificial sequence
  SiRNA target sequence
agaaattatcggatgtgtag

SEQ ID NO: 13218 - DNA, 20 bp, Artificial sequence
  SiRNA target sequence
gaaattatcggatgtgtaga

SEQ ID NO: 13219 - DNA, 20 bp, Artificial sequence
  SiRNA target sequence
aaattatcggatgtgtagat

SEQ ID NO: 13220 - DNA, 20 bp, Artificial sequence
  SiRNA target sequence
aattatcggatgtgtagata

SEQ ID NO: 13221 - DNA, 20 bp, Artificial sequence
  SiRNA target sequence
attatcggatgtgtagataa

SEQ ID NO: 13222 - DNA, 20 bp, Artificial sequence
  SiRNA target sequence
ttatcggatgtgtagataac

SEQ ID NO: 13223 - DNA, 20 bp, Artificial sequence
  SiRNA target sequence
tatcggatgtgtagataaca

SEQ ID NO: 13224 - DNA, 20 bp, Artificial sequence
  SiRNA target sequence
atcggatgtgtagataacaa

SEQ ID NO: 13225 - DNA, 20 bp, Artificial sequence
  SiRNA target sequence
tcggatgtgtagataacaat

SEQ ID NO: 13226 - DNA, 20 bp, Artificial sequence
  SiRNA target sequence
cggatgtgtagataacaatc

SEQ ID NO: 13227 - DNA, 20 bp, Artificial sequence
  SiRNA target sequence
ggatgtgtagataacaatca

SEQ ID NO: 13228 - DNA, 20 bp, Artificial sequence
  SiRNA target sequence
gatgtgtagataacaatcat

SEQ ID NO: 13229 - DNA, 20 bp, Artificial sequence
  SiRNA target sequence
atgtgtagataacaatcata

SEQ ID NO: 13230 - DNA, 20 bp, Artificial sequence
  SiRNA target sequence
tgtgtagataacaatcatat

SEQ ID NO: 13231 - DNA, 20 bp, Artificial sequence
  SiRNA target sequence
gtgtagataacaatcatatt

SEQ ID NO: 13232 - DNA, 20 bp, Artificial sequence
  SiRNA target sequence
tgtagataacaatcatattt

SEQ ID NO: 13233 - DNA, 20 bp, Artificial sequence
  SiRNA target sequence
gtagataacaatcatatttt

SEQ ID NO: 13234 - DNA, 20 bp, Artificial sequence
  SiRNA target sequence
tagataacaatcatatttta

SEQ ID NO: 13235 - DNA, 20 bp, Artificial sequence
  SiRNA target sequence
agataacaatcatattttaa

SEQ ID NO: 13236 - DNA, 20 bp, Artificial sequence
  SiRNA target sequence
gataacaatcatattttaag

SEQ ID NO: 13237 - DNA, 20 bp, Artificial sequence
  SiRNA target sequence
ataacaatcatattttaagc

SEQ ID NO: 13238 - DNA, 20 bp, Artificial sequence
  SiRNA target sequence
taacaatcatattttaagca

SEQ ID NO: 13239 - DNA, 20 bp, Artificial sequence
  SiRNA target sequence
aacaatcatattttaagcat

SEQ ID NO: 13240 - DNA, 20 bp, Artificial sequence
  SiRNA target sequence
acaatcatattttaagcata

SEQ ID NO: 13241 - DNA, 20 bp, Artificial sequence
  SiRNA target sequence
caatcatattttaagcataa

SEQ ID NO: 13242 - DNA, 20 bp, Artificial sequence
  SiRNA target sequence
aatcatattttaagcataat

SEQ ID NO: 13243 - DNA, 20 bp, Artificial sequence
  SiRNA target sequence
atcatattttaagcataatt

SEQ ID NO: 13244 - DNA, 20 bp, Artificial sequence
  SiRNA target sequence
tcatattttaagcataattt

SEQ ID NO: 13245 - DNA, 20 bp, Artificial sequence
  SiRNA target sequence
catattttaagcataattta

SEQ ID NO: 13246 - DNA, 20 bp, Artificial sequence
  SiRNA target sequence
atattttaagcataatttat

SEQ ID NO: 13247 - DNA, 20 bp, Artificial sequence
  SiRNA target sequence
tattttaagcataatttata

SEQ ID NO: 13248 - DNA, 20 bp, Artificial sequence
  SiRNA target sequence
attttaagcataatttataa

SEQ ID NO: 13249 - DNA, 20 bp, Artificial sequence
  SiRNA target sequence
ttttaagcataatttataat

SEQ ID NO: 13250 - DNA, 20 bp, Artificial sequence
  SiRNA target sequence
tttaagcataatttataatg

SEQ ID NO: 13251 - DNA, 20 bp, Artificial sequence
  SiRNA target sequence
ttaagcataatttataatga

SEQ ID NO: 13252 - DNA, 20 bp, Artificial sequence
  SiRNA target sequence
taagcataatttataatgat

SEQ ID NO: 13253 - DNA, 20 bp, Artificial sequence
  SiRNA target sequence
aagcataatttataatgata

SEQ ID NO: 13254 - DNA, 20 bp, Artificial sequence
  SiRNA target sequence
agcataatttataatgataa

SEQ ID NO: 13255 - DNA, 20 bp, Artificial sequence
  SiRNA target sequence
gcataatttataatgataaa

SEQ ID NO: 13256 - DNA, 20 bp, Artificial sequence
  SiRNA target sequence
cataatttataatgataaat

SEQ ID NO: 13257 - DNA, 20 bp, Artificial sequence
  SiRNA target sequence
ataatttataatgataaatt

SEQ ID NO: 13258 - DNA, 20 bp, Artificial sequence
  SiRNA target sequence
taatttataatgataaatta

SEQ ID NO: 13259 - DNA, 20 bp, Artificial sequence
  SiRNA target sequence
aatttataatgataaattat

SEQ ID NO: 13260 - DNA, 20 bp, Artificial sequence
  SiRNA target sequence
atttataatgataaattatc

SEQ ID NO: 13261 - DNA, 20 bp, Artificial sequence
  SiRNA target sequence
tttataatgataaattatct

SEQ ID NO: 13262 - DNA, 20 bp, Artificial sequence
  SiRNA target sequence
ttataatgataaattatctg

SEQ ID NO: 13263 - DNA, 20 bp, Artificial sequence
  SiRNA target sequence
tataatgataaattatctga

SEQ ID NO: 13264 - DNA, 20 bp, Artificial sequence
  SiRNA target sequence
ataatgataaattatctgaa

SEQ ID NO: 13265 - DNA, 20 bp, Artificial sequence
  SiRNA target sequence
taatgataaattatctgaag

SEQ ID NO: 13266 - DNA, 20 bp, Artificial sequence
  SiRNA target sequence
aatgataaattatctgaagg

SEQ ID NO: 13267 - DNA, 20 bp, Artificial sequence
  SiRNA target sequence
atgataaattatctgaaggg

SEQ ID NO: 13268 - DNA, 20 bp, Artificial sequence
  SiRNA target sequence
tgataaattatctgaagggt

SEQ ID NO: 13269 - DNA, 20 bp, Artificial sequence
  SiRNA target sequence
gataaattatctgaagggtt

SEQ ID NO: 13270 - DNA, 20 bp, Artificial sequence
  SiRNA target sequence
ataaattatctgaagggtta

SEQ ID NO: 13271 - DNA, 20 bp, Artificial sequence
  SiRNA target sequence
taaattatctgaagggttaa

SEQ ID NO: 13272 - DNA, 20 bp, Artificial sequence
  SiRNA target sequence
aaattatctgaagggttaac

SEQ ID NO: 13273 - DNA, 20 bp, Artificial sequence
  SiRNA target sequence
aattatctgaagggttaaca

SEQ ID NO: 13274 - DNA, 20 bp, Artificial sequence
  SiRNA target sequence
attatctgaagggttaacac

SEQ ID NO: 13275 - DNA, 20 bp, Artificial sequence
  SiRNA target sequence
ttatctgaagggttaacact

SEQ ID NO: 13276 - DNA, 20 bp, Artificial sequence
  SiRNA target sequence
tatctgaagggttaacactt

SEQ ID NO: 13277 - DNA, 20 bp, Artificial sequence
  SiRNA target sequence
atctgaagggttaacactta

SEQ ID NO: 13278 - DNA, 20 bp, Artificial sequence
  SiRNA target sequence
tctgaagggttaacacttaa

SEQ ID NO: 13279 - DNA, 20 bp, Artificial sequence
  SiRNA target sequence
ctgaagggttaacacttaat

SEQ ID NO: 13280 - DNA, 20 bp, Artificial sequence
  SiRNA target sequence
tgaagggttaacacttaatt

SEQ ID NO: 13281 - DNA, 20 bp, Artificial sequence
  SiRNA target sequence
gaagggttaacacttaattt

SEQ ID NO: 13282 - DNA, 20 bp, Artificial sequence
  SiRNA target sequence
aagggttaacacttaatttg

SEQ ID NO: 13283 - DNA, 20 bp, Artificial sequence
  SiRNA target sequence
agggttaacacttaatttga

SEQ ID NO: 13284 - DNA, 20 bp, Artificial sequence
  SiRNA target sequence
gggttaacacttaatttgag

SEQ ID NO: 13285 - DNA, 20 bp, Artificial sequence
  SiRNA target sequence
ggttaacacttaatttgagt

SEQ ID NO: 13286 - DNA, 20 bp, Artificial sequence
  SiRNA target sequence
gttaacacttaatttgagtt

SEQ ID NO: 13287 - DNA, 20 bp, Artificial sequence
  SiRNA target sequence
ttaacacttaatttgagttg

SEQ ID NO: 13288 - DNA, 20 bp, Artificial sequence
  SiRNA target sequence
taacacttaatttgagttgt

SEQ ID NO: 13289 - DNA, 20 bp, Artificial sequence
  SiRNA target sequence
aacacttaatttgagttgta

SEQ ID NO: 13290 - DNA, 20 bp, Artificial sequence
  SiRNA target sequence
acacttaatttgagttgtag

SEQ ID NO: 13291 - DNA, 20 bp, Artificial sequence
  SiRNA target sequence
cacttaatttgagttgtaga

SEQ ID NO: 13292 - DNA, 20 bp, Artificial sequence
  SiRNA target sequence
acttaatttgagttgtagat

SEQ ID NO: 13293 - DNA, 20 bp, Artificial sequence
  SiRNA target sequence
cttaatttgagttgtagatt

SEQ ID NO: 13294 - DNA, 20 bp, Artificial sequence
  SiRNA target sequence
ttaatttgagttgtagattt

SEQ ID NO: 13295 - DNA, 20 bp, Artificial sequence
  SiRNA target sequence
taatttgagttgtagatttg

SEQ ID NO: 13296 - DNA, 20 bp, Artificial sequence
  SiRNA target sequence
aatttgagttgtagatttgg

SEQ ID NO: 13297 - DNA, 20 bp, Artificial sequence
  SiRNA target sequence
atttgagttgtagatttggt

SEQ ID NO: 13298 - DNA, 20 bp, Artificial sequence
  SiRNA target sequence
tttgagttgtagatttggta

SEQ ID NO: 13299 - DNA, 20 bp, Artificial sequence
  SiRNA target sequence
ttgagttgtagatttggtaa

SEQ ID NO: 13300 - DNA, 20 bp, Artificial sequence
  SiRNA target sequence
tgagttgtagatttggtaag

SEQ ID NO: 13301 - DNA, 20 bp, Artificial sequence
  SiRNA target sequence
gagttgtagatttggtaaga

SEQ ID NO: 13302 - DNA, 20 bp, Artificial sequence
  SiRNA target sequence
agttgtagatttggtaagaa

SEQ ID NO: 13303 - DNA, 20 bp, Artificial sequence
  SiRNA target sequence
gttgtagatttggtaagaaa

SEQ ID NO: 13304 - DNA, 20 bp, Artificial sequence
  SiRNA target sequence
ttgtagatttggtaagaaag

SEQ ID NO: 13305 - DNA, 20 bp, Artificial sequence
  SiRNA target sequence
tgtagatttggtaagaaagt

SEQ ID NO: 13306 - DNA, 20 bp, Artificial sequence
  SiRNA target sequence
gtagatttggtaagaaagta

SEQ ID NO: 13307 - DNA, 20 bp, Artificial sequence
  SiRNA target sequence
tagatttggtaagaaagtat

SEQ ID NO: 13308 - DNA, 20 bp, Artificial sequence
  SiRNA target sequence
agatttggtaagaaagtatt

SEQ ID NO: 13309 - DNA, 20 bp, Artificial sequence
  SiRNA target sequence
gatttggtaagaaagtattt

SEQ ID NO: 13310 - DNA, 20 bp, Artificial sequence
  SiRNA target sequence
atttggtaagaaagtatttg

SEQ ID NO: 13311 - DNA, 20 bp, Artificial sequence
  SiRNA target sequence
tttggtaagaaagtatttga

SEQ ID NO: 13312 - DNA, 20 bp, Artificial sequence
  SiRNA target sequence
ttggtaagaaagtatttgat

SEQ ID NO: 13313 - DNA, 20 bp, Artificial sequence
  SiRNA target sequence
tggtaagaaagtatttgatt

SEQ ID NO: 13314 - DNA, 20 bp, Artificial sequence
  SiRNA target sequence
ggtaagaaagtatttgatta

SEQ ID NO: 13315 - DNA, 20 bp, Artificial sequence
  SiRNA target sequence
gtaagaaagtatttgattat

SEQ ID NO: 13316 - DNA, 20 bp, Artificial sequence
  SiRNA target sequence
taagaaagtatttgattatg

SEQ ID NO: 13317 - DNA, 20 bp, Artificial sequence
  SiRNA target sequence
aagaaagtatttgattatgg

SEQ ID NO: 13318 - DNA, 20 bp, Artificial sequence
  SiRNA target sequence
agaaagtatttgattatggc

SEQ ID NO: 13319 - DNA, 20 bp, Artificial sequence
  SiRNA target sequence
gaaagtatttgattatggct

SEQ ID NO: 13320 - DNA, 20 bp, Artificial sequence
  SiRNA target sequence
aaagtatttgattatggcta

SEQ ID NO: 13321 - DNA, 20 bp, Artificial sequence
  SiRNA target sequence
aagtatttgattatggctat

SEQ ID NO: 13322 - DNA, 20 bp, Artificial sequence
  SiRNA target sequence
agtatttgattatggctatg

SEQ ID NO: 13323 - DNA, 20 bp, Artificial sequence
  SiRNA target sequence
gtatttgattatggctatgg

SEQ ID NO: 13324 - DNA, 20 bp, Artificial sequence
  SiRNA target sequence
tatttgattatggctatggg

SEQ ID NO: 13325 - DNA, 20 bp, Artificial sequence
  SiRNA target sequence
atttgattatggctatgggt

SEQ ID NO: 13326 - DNA, 20 bp, Artificial sequence
  SiRNA target sequence
tttgattatggctatgggtt

SEQ ID NO: 13327 - DNA, 20 bp, Artificial sequence
  SiRNA target sequence
ttgattatggctatgggttt

SEQ ID NO: 13328 - DNA, 20 bp, Artificial sequence
  SiRNA target sequence
tgattatggctatgggttta

SEQ ID NO: 13329 - DNA, 20 bp, Artificial sequence
  SiRNA target sequence
gattatggctatgggtttat

SEQ ID NO: 13330 - DNA, 20 bp, Artificial sequence
  SiRNA target sequence
attatggctatgggtttatt

SEQ ID NO: 13331 - DNA, 20 bp, Artificial sequence
  SiRNA target sequence
ttatggctatgggtttattt

SEQ ID NO: 13332 - DNA, 20 bp, Artificial sequence
  SiRNA target sequence
tatggctatgggtttattta

SEQ ID NO: 13333 - DNA, 20 bp, Artificial sequence
  SiRNA target sequence
atggctatgggtttatttat

SEQ ID NO: 13334 - DNA, 20 bp, Artificial sequence
  SiRNA target sequence
tggctatgggtttatttatg

SEQ ID NO: 13335 - DNA, 20 bp, Artificial sequence
  SiRNA target sequence
ggctatgggtttatttatga

SEQ ID NO: 13336 - DNA, 20 bp, Artificial sequence
  SiRNA target sequence
gctatgggtttatttatgaa

SEQ ID NO: 13337 - DNA, 20 bp, Artificial sequence
  SiRNA target sequence
ctatgggtttatttatgaat

SEQ ID NO: 13338 - DNA, 20 bp, Artificial sequence
  SiRNA target sequence
tatgggtttatttatgaatt

SEQ ID NO: 13339 - DNA, 20 bp, Artificial sequence
  SiRNA target sequence
atgggtttatttatgaattt

SEQ ID NO: 13340 - DNA, 20 bp, Artificial sequence
  SiRNA target sequence
tgggtttatttatgaatttt

SEQ ID NO: 13341 - DNA, 20 bp, Artificial sequence
  SiRNA target sequence
gggtttatttatgaatttta

SEQ ID NO: 13342 - DNA, 20 bp, Artificial sequence
  SiRNA target sequence
ggtttatttatgaattttaa

SEQ ID NO: 13343 - DNA, 21 bp, Artificial sequence
  SiRNA target sequence
atgaaatctttctacaaaaaa

SEQ ID NO: 13344 - DNA, 21 bp, Artificial sequence
  SiRNA target sequence
tgaaatctttctacaaaaaaa

SEQ ID NO: 13345 - DNA, 21 bp, Artificial sequence
  SiRNA target sequence
gaaatctttctacaaaaaaat

SEQ ID NO: 13346 - DNA, 21 bp, Artificial sequence
  SiRNA target sequence
aaatctttctacaaaaaaata

SEQ ID NO: 13347 - DNA, 21 bp, Artificial sequence
  SiRNA target sequence
aatctttctacaaaaaaataa

SEQ ID NO: 13348 - DNA, 21 bp, Artificial sequence
  SiRNA target sequence
atctttctacaaaaaaataaa

SEQ ID NO: 13349 - DNA, 21 bp, Artificial sequence
  SiRNA target sequence
tctttctacaaaaaaataaaa

SEQ ID NO: 13350 - DNA, 21 bp, Artificial sequence
  SiRNA target sequence
ctttctacaaaaaaataaaaa

SEQ ID NO: 13351 - DNA, 21 bp, Artificial sequence
  SiRNA target sequence
tttctacaaaaaaataaaaag

SEQ ID NO: 13352 - DNA, 21 bp, Artificial sequence
  SiRNA target sequence
ttctacaaaaaaataaaaagt

SEQ ID NO: 13353 - DNA, 21 bp, Artificial sequence
  SiRNA target sequence
tctacaaaaaaataaaaagtt

SEQ ID NO: 13354 - DNA, 21 bp, Artificial sequence
  SiRNA target sequence
ctacaaaaaaataaaaagtta

SEQ ID NO: 13355 - DNA, 21 bp, Artificial sequence
  SiRNA target sequence
tacaaaaaaataaaaagttat

SEQ ID NO: 13356 - DNA, 21 bp, Artificial sequence
  SiRNA target sequence
acaaaaaaataaaaagttatt

SEQ ID NO: 13357 - DNA, 21 bp, Artificial sequence
  SiRNA target sequence
caaaaaaataaaaagttattt

SEQ ID NO: 13358 - DNA, 21 bp, Artificial sequence
  SiRNA target sequence
aaaaaaataaaaagttattta

SEQ ID NO: 13359 - DNA, 21 bp, Artificial sequence
  SiRNA target sequence
aaaaaataaaaagttatttat

SEQ ID NO: 13360 - DNA, 21 bp, Artificial sequence
  SiRNA target sequence
aaaaataaaaagttatttatt

SEQ ID NO: 13361 - DNA, 21 bp, Artificial sequence
  SiRNA target sequence
aaaataaaaagttatttattc

SEQ ID NO: 13362 - DNA, 21 bp, Artificial sequence
  SiRNA target sequence
aaataaaaagttatttattca

SEQ ID NO: 13363 - DNA, 21 bp, Artificial sequence
  SiRNA target sequence
aataaaaagttatttattcaa

SEQ ID NO: 13364 - DNA, 21 bp, Artificial sequence
  SiRNA target sequence
ataaaaagttatttattcaaa

SEQ ID NO: 13365 - DNA, 21 bp, Artificial sequence
  SiRNA target sequence
taaaaagttatttattcaaat

SEQ ID NO: 13366 - DNA, 21 bp, Artificial sequence
  SiRNA target sequence
aaaaagttatttattcaaatc

SEQ ID NO: 13367 - DNA, 21 bp, Artificial sequence
  SiRNA target sequence
aaaagttatttattcaaatct

SEQ ID NO: 13368 - DNA, 21 bp, Artificial sequence
  SiRNA target sequence
aaagttatttattcaaatctg

SEQ ID NO: 13369 - DNA, 21 bp, Artificial sequence
  SiRNA target sequence
aagttatttattcaaatctgc

SEQ ID NO: 13370 - DNA, 21 bp, Artificial sequence
  SiRNA target sequence
agttatttattcaaatctgcc

SEQ ID NO: 13371 - DNA, 21 bp, Artificial sequence
  SiRNA target sequence
gttatttattcaaatctgcca

SEQ ID NO: 13372 - DNA, 21 bp, Artificial sequence
  SiRNA target sequence
ttatttattcaaatctgccat

SEQ ID NO: 13373 - DNA, 21 bp, Artificial sequence
  SiRNA target sequence
tatttattcaaatctgccatt

SEQ ID NO: 13374 - DNA, 21 bp, Artificial sequence
  SiRNA target sequence
atttattcaaatctgccatta

SEQ ID NO: 13375 - DNA, 21 bp, Artificial sequence
  SiRNA target sequence
tttattcaaatctgccattaa

SEQ ID NO: 13376 - DNA, 21 bp, Artificial sequence
  SiRNA target sequence
ttattcaaatctgccattaat

SEQ ID NO: 13377 - DNA, 21 bp, Artificial sequence
  SiRNA target sequence
tattcaaatctgccattaata

SEQ ID NO: 13378 - DNA, 21 bp, Artificial sequence
  SiRNA target sequence
attcaaatctgccattaatac

SEQ ID NO: 13379 - DNA, 21 bp, Artificial sequence
  SiRNA target sequence
ttcaaatctgccattaataca

SEQ ID NO: 13380 - DNA, 21 bp, Artificial sequence
  SiRNA target sequence
tcaaatctgccattaatacat

SEQ ID NO: 13381 - DNA, 21 bp, Artificial sequence
  SiRNA target sequence
caaatctgccattaatacatc

SEQ ID NO: 13382 - DNA, 21 bp, Artificial sequence
  SiRNA target sequence
aaatctgccattaatacatct

SEQ ID NO: 13383 - DNA, 21 bp, Artificial sequence
  SiRNA target sequence
aatctgccattaatacatctt

SEQ ID NO: 13384 - DNA, 21 bp, Artificial sequence
  SiRNA target sequence
atctgccattaatacatcttt

SEQ ID NO: 13385 - DNA, 21 bp, Artificial sequence
  SiRNA target sequence
tctgccattaatacatctttt

SEQ ID NO: 13386 - DNA, 21 bp, Artificial sequence
  SiRNA target sequence
ctgccattaatacatcttttg

SEQ ID NO: 13387 - DNA, 21 bp, Artificial sequence
  SiRNA target sequence
tgccattaatacatcttttga

SEQ ID NO: 13388 - DNA, 21 bp, Artificial sequence
  SiRNA target sequence
gccattaatacatcttttgat

SEQ ID NO: 13389 - DNA, 21 bp, Artificial sequence
  SiRNA target sequence
ccattaatacatcttttgata

SEQ ID NO: 13390 - DNA, 21 bp, Artificial sequence
  SiRNA target sequence
cattaatacatcttttgatac

SEQ ID NO: 13391 - DNA, 21 bp, Artificial sequence
  SiRNA target sequence
attaatacatcttttgatact

SEQ ID NO: 13392 - DNA, 21 bp, Artificial sequence
  SiRNA target sequence
ttaatacatcttttgatactt

SEQ ID NO: 13393 - DNA, 21 bp, Artificial sequence
  SiRNA target sequence
taatacatcttttgatacttt

SEQ ID NO: 13394 - DNA, 21 bp, Artificial sequence
  SiRNA target sequence
aatacatcttttgatactttt

SEQ ID NO: 13395 - DNA, 21 bp, Artificial sequence
  SiRNA target sequence
atacatcttttgatactttta

SEQ ID NO: 13396 - DNA, 21 bp, Artificial sequence
  SiRNA target sequence
tacatcttttgatacttttaa

SEQ ID NO: 13397 - DNA, 21 bp, Artificial sequence
  SiRNA target sequence
acatcttttgatacttttaat

SEQ ID NO: 13398 - DNA, 21 bp, Artificial sequence
  SiRNA target sequence
catcttttgatacttttaatt

SEQ ID NO: 13399 - DNA, 21 bp, Artificial sequence
  SiRNA target sequence
atcttttgatacttttaattt

SEQ ID NO: 13400 - DNA, 21 bp, Artificial sequence
  SiRNA target sequence
tcttttgatacttttaattta

SEQ ID NO: 13401 - DNA, 21 bp, Artificial sequence
  SiRNA target sequence
cttttgatacttttaatttag

SEQ ID NO: 13402 - DNA, 21 bp, Artificial sequence
  SiRNA target sequence
ttttgatacttttaatttaga

SEQ ID NO: 13403 - DNA, 21 bp, Artificial sequence
  SiRNA target sequence
tttgatacttttaatttagaa

SEQ ID NO: 13404 - DNA, 21 bp, Artificial sequence
  SiRNA target sequence
ttgatacttttaatttagaaa

SEQ ID NO: 13405 - DNA, 21 bp, Artificial sequence
  SiRNA target sequence
tgatacttttaatttagaaaa

SEQ ID NO: 13406 - DNA, 21 bp, Artificial sequence
  SiRNA target sequence
gatacttttaatttagaaaat

SEQ ID NO: 13407 - DNA, 21 bp, Artificial sequence
  SiRNA target sequence
atacttttaatttagaaaatg

SEQ ID NO: 13408 - DNA, 21 bp, Artificial sequence
  SiRNA target sequence
tacttttaatttagaaaatgt

SEQ ID NO: 13409 - DNA, 21 bp, Artificial sequence
  SiRNA target sequence
acttttaatttagaaaatgta

SEQ ID NO: 13410 - DNA, 21 bp, Artificial sequence
  SiRNA target sequence
cttttaatttagaaaatgtaa

SEQ ID NO: 13411 - DNA, 21 bp, Artificial sequence
  SiRNA target sequence
ttttaatttagaaaatgtaag

SEQ ID NO: 13412 - DNA, 21 bp, Artificial sequence
  SiRNA target sequence
tttaatttagaaaatgtaagc

SEQ ID NO: 13413 - DNA, 21 bp, Artificial sequence
  SiRNA target sequence
ttaatttagaaaatgtaagca

SEQ ID NO: 13414 - DNA, 21 bp, Artificial sequence
  SiRNA target sequence
taatttagaaaatgtaagcat

SEQ ID NO: 13415 - DNA, 21 bp, Artificial sequence
  SiRNA target sequence
aatttagaaaatgtaagcatt

SEQ ID NO: 13416 - DNA, 21 bp, Artificial sequence
  SiRNA target sequence
atttagaaaatgtaagcatta

SEQ ID NO: 13417 - DNA, 21 bp, Artificial sequence
  SiRNA target sequence
tttagaaaatgtaagcattac

SEQ ID NO: 13418 - DNA, 21 bp, Artificial sequence
  SiRNA target sequence
ttagaaaatgtaagcattact

SEQ ID NO: 13419 - DNA, 21 bp, Artificial sequence
  SiRNA target sequence
tagaaaatgtaagcattacta

SEQ ID NO: 13420 - DNA, 21 bp, Artificial sequence
  SiRNA target sequence
agaaaatgtaagcattactag

SEQ ID NO: 13421 - DNA, 21 bp, Artificial sequence
  SiRNA target sequence
gaaaatgtaagcattactagc

SEQ ID NO: 13422 - DNA, 21 bp, Artificial sequence
  SiRNA target sequence
aaaatgtaagcattactagct

SEQ ID NO: 13423 - DNA, 21 bp, Artificial sequence
  SiRNA target sequence
aaatgtaagcattactagctt

SEQ ID NO: 13424 - DNA, 21 bp, Artificial sequence
  SiRNA target sequence
aatgtaagcattactagctta

SEQ ID NO: 13425 - DNA, 21 bp, Artificial sequence
  SiRNA target sequence
atgtaagcattactagcttaa

SEQ ID NO: 13426 - DNA, 21 bp, Artificial sequence
  SiRNA target sequence
tgtaagcattactagcttaaa

SEQ ID NO: 13427 - DNA, 21 bp, Artificial sequence
  SiRNA target sequence
gtaagcattactagcttaaat

SEQ ID NO: 13428 - DNA, 21 bp, Artificial sequence
  SiRNA target sequence
taagcattactagcttaaata

SEQ ID NO: 13429 - DNA, 21 bp, Artificial sequence
  SiRNA target sequence
aagcattactagcttaaatac

SEQ ID NO: 13430 - DNA, 21 bp, Artificial sequence
  SiRNA target sequence
agcattactagcttaaatacg

SEQ ID NO: 13431 - DNA, 21 bp, Artificial sequence
  SiRNA target sequence
gcattactagcttaaatacgt

SEQ ID NO: 13432 - DNA, 21 bp, Artificial sequence
  SiRNA target sequence
cattactagcttaaatacgta

SEQ ID NO: 13433 - DNA, 21 bp, Artificial sequence
  SiRNA target sequence
attactagcttaaatacgtac

SEQ ID NO: 13434 - DNA, 21 bp, Artificial sequence
  SiRNA target sequence
ttactagcttaaatacgtaca

SEQ ID NO: 13435 - DNA, 21 bp, Artificial sequence
  SiRNA target sequence
tactagcttaaatacgtacac

SEQ ID NO: 13436 - DNA, 21 bp, Artificial sequence
  SiRNA target sequence
actagcttaaatacgtacacc

SEQ ID NO: 13437 - DNA, 21 bp, Artificial sequence
  SiRNA target sequence
ctagcttaaatacgtacaccg

SEQ ID NO: 13438 - DNA, 21 bp, Artificial sequence
  SiRNA target sequence
tagcttaaatacgtacaccgg

SEQ ID NO: 13439 - DNA, 21 bp, Artificial sequence
  SiRNA target sequence
agcttaaatacgtacaccggt

SEQ ID NO: 13440 - DNA, 21 bp, Artificial sequence
  SiRNA target sequence
gcttaaatacgtacaccggtg

SEQ ID NO: 13441 - DNA, 21 bp, Artificial sequence
  SiRNA target sequence
cttaaatacgtacaccggtgt

SEQ ID NO: 13442 - DNA, 21 bp, Artificial sequence
  SiRNA target sequence
ttaaatacgtacaccggtgtt

SEQ ID NO: 13443 - DNA, 21 bp, Artificial sequence
  SiRNA target sequence
taaatacgtacaccggtgtta

SEQ ID NO: 13444 - DNA, 21 bp, Artificial sequence
  SiRNA target sequence
aaatacgtacaccggtgttaa

SEQ ID NO: 13445 - DNA, 21 bp, Artificial sequence
  SiRNA target sequence
aatacgtacaccggtgttaaa

SEQ ID NO: 13446 - DNA, 21 bp, Artificial sequence
  SiRNA target sequence
atacgtacaccggtgttaaaa

SEQ ID NO: 13447 - DNA, 21 bp, Artificial sequence
  SiRNA target sequence
tacgtacaccggtgttaaaac

SEQ ID NO: 13448 - DNA, 21 bp, Artificial sequence
  SiRNA target sequence
acgtacaccggtgttaaaacc

SEQ ID NO: 13449 - DNA, 21 bp, Artificial sequence
  SiRNA target sequence
cgtacaccggtgttaaaaccg

SEQ ID NO: 13450 - DNA, 21 bp, Artificial sequence
  SiRNA target sequence
gtacaccggtgttaaaaccga

SEQ ID NO: 13451 - DNA, 21 bp, Artificial sequence
  SiRNA target sequence
tacaccggtgttaaaaccgaa

SEQ ID NO: 13452 - DNA, 21 bp, Artificial sequence
  SiRNA target sequence
acaccggtgttaaaaccgaaa

SEQ ID NO: 13453 - DNA, 21 bp, Artificial sequence
  SiRNA target sequence
caccggtgttaaaaccgaaat

SEQ ID NO: 13454 - DNA, 21 bp, Artificial sequence
  SiRNA target sequence
accggtgttaaaaccgaaata

SEQ ID NO: 13455 - DNA, 21 bp, Artificial sequence
  SiRNA target sequence
ccggtgttaaaaccgaaatat

SEQ ID NO: 13456 - DNA, 21 bp, Artificial sequence
  SiRNA target sequence
cggtgttaaaaccgaaatatc

SEQ ID NO: 13457 - DNA, 21 bp, Artificial sequence
  SiRNA target sequence
ggtgttaaaaccgaaatatca

SEQ ID NO: 13458 - DNA, 21 bp, Artificial sequence
  SiRNA target sequence
gtgttaaaaccgaaatatcaa

SEQ ID NO: 13459 - DNA, 21 bp, Artificial sequence
  SiRNA target sequence
tgttaaaaccgaaatatcaaa

SEQ ID NO: 13460 - DNA, 21 bp, Artificial sequence
  SiRNA target sequence
gttaaaaccgaaatatcaaaa

SEQ ID NO: 13461 - DNA, 21 bp, Artificial sequence
  SiRNA target sequence
ttaaaaccgaaatatcaaaaa

SEQ ID NO: 13462 - DNA, 21 bp, Artificial sequence
  SiRNA target sequence
taaaaccgaaatatcaaaaac

SEQ ID NO: 13463 - DNA, 21 bp, Artificial sequence
  SiRNA target sequence
aaaaccgaaatatcaaaaacc

SEQ ID NO: 13464 - DNA, 21 bp, Artificial sequence
  SiRNA target sequence
aaaccgaaatatcaaaaaccg

SEQ ID NO: 13465 - DNA, 21 bp, Artificial sequence
  SiRNA target sequence
aaccgaaatatcaaaaaccgt

SEQ ID NO: 13466 - DNA, 21 bp, Artificial sequence
  SiRNA target sequence
accgaaatatcaaaaaccgta

SEQ ID NO: 13467 - DNA, 21 bp, Artificial sequence
  SiRNA target sequence
ccgaaatatcaaaaaccgtat

SEQ ID NO: 13468 - DNA, 21 bp, Artificial sequence
  SiRNA target sequence
cgaaatatcaaaaaccgtatc

SEQ ID NO: 13469 - DNA, 21 bp, Artificial sequence
  SiRNA target sequence
gaaatatcaaaaaccgtatca

SEQ ID NO: 13470 - DNA, 21 bp, Artificial sequence
  SiRNA target sequence
aaatatcaaaaaccgtatcac

SEQ ID NO: 13471 - DNA, 21 bp, Artificial sequence
  SiRNA target sequence
aatatcaaaaaccgtatcacc

SEQ ID NO: 13472 - DNA, 21 bp, Artificial sequence
  SiRNA target sequence
atatcaaaaaccgtatcacca

SEQ ID NO: 13473 - DNA, 21 bp, Artificial sequence
  SiRNA target sequence
tatcaaaaaccgtatcaccac

SEQ ID NO: 13474 - DNA, 21 bp, Artificial sequence
  SiRNA target sequence
atcaaaaaccgtatcaccaca

SEQ ID NO: 13475 - DNA, 21 bp, Artificial sequence
  SiRNA target sequence
tcaaaaaccgtatcaccacac

SEQ ID NO: 13476 - DNA, 21 bp, Artificial sequence
  SiRNA target sequence
caaaaaccgtatcaccacact

SEQ ID NO: 13477 - DNA, 21 bp, Artificial sequence
  SiRNA target sequence
aaaaaccgtatcaccacactt

SEQ ID NO: 13478 - DNA, 21 bp, Artificial sequence
  SiRNA target sequence
aaaaccgtatcaccacacttc

SEQ ID NO: 13479 - DNA, 21 bp, Artificial sequence
  SiRNA target sequence
aaaccgtatcaccacacttcc

SEQ ID NO: 13480 - DNA, 21 bp, Artificial sequence
  SiRNA target sequence
aaccgtatcaccacacttcca

SEQ ID NO: 13481 - DNA, 21 bp, Artificial sequence
  SiRNA target sequence
accgtatcaccacacttccag

SEQ ID NO: 13482 - DNA, 21 bp, Artificial sequence
  SiRNA target sequence
ccgtatcaccacacttccaga

SEQ ID NO: 13483 - DNA, 21 bp, Artificial sequence
  SiRNA target sequence
cgtatcaccacacttccagat

SEQ ID NO: 13484 - DNA, 21 bp, Artificial sequence
  SiRNA target sequence
gtatcaccacacttccagatt

SEQ ID NO: 13485 - DNA, 21 bp, Artificial sequence
  SiRNA target sequence
tatcaccacacttccagattt

SEQ ID NO: 13486 - DNA, 21 bp, Artificial sequence
  SiRNA target sequence
atcaccacacttccagatttc

SEQ ID NO: 13487 - DNA, 21 bp, Artificial sequence
  SiRNA target sequence
tcaccacacttccagatttct

SEQ ID NO: 13488 - DNA, 21 bp, Artificial sequence
  SiRNA target sequence
caccacacttccagatttctc

SEQ ID NO: 13489 - DNA, 21 bp, Artificial sequence
  SiRNA target sequence
accacacttccagatttctca

SEQ ID NO: 13490 - DNA, 21 bp, Artificial sequence
  SiRNA target sequence
ccacacttccagatttctcat

SEQ ID NO: 13491 - DNA, 21 bp, Artificial sequence
  SiRNA target sequence
cacacttccagatttctcatg

SEQ ID NO: 13492 - DNA, 21 bp, Artificial sequence
  SiRNA target sequence
acacttccagatttctcatgt

SEQ ID NO: 13493 - DNA, 21 bp, Artificial sequence
  SiRNA target sequence
cacttccagatttctcatgtc

SEQ ID NO: 13494 - DNA, 21 bp, Artificial sequence
  SiRNA target sequence
acttccagatttctcatgtct

SEQ ID NO: 13495 - DNA, 21 bp, Artificial sequence
  SiRNA target sequence
cttccagatttctcatgtctc

SEQ ID NO: 13496 - DNA, 21 bp, Artificial sequence
  SiRNA target sequence
ttccagatttctcatgtctct

SEQ ID NO: 13497 - DNA, 21 bp, Artificial sequence
  SiRNA target sequence
tccagatttctcatgtctctt

SEQ ID NO: 13498 - DNA, 21 bp, Artificial sequence
  SiRNA target sequence
ccagatttctcatgtctcttc

SEQ ID NO: 13499 - DNA, 21 bp, Artificial sequence
  SiRNA target sequence
cagatttctcatgtctcttct

SEQ ID NO: 13500 - DNA, 21 bp, Artificial sequence
  SiRNA target sequence
agatttctcatgtctcttcta

SEQ ID NO: 13501 - DNA, 21 bp, Artificial sequence
  SiRNA target sequence
gatttctcatgtctcttctat

SEQ ID NO: 13502 - DNA, 21 bp, Artificial sequence
  SiRNA target sequence
atttctcatgtctcttctatg

SEQ ID NO: 13503 - DNA, 21 bp, Artificial sequence
  SiRNA target sequence
tttctcatgtctcttctatgg

SEQ ID NO: 13504 - DNA, 21 bp, Artificial sequence
  SiRNA target sequence
ttctcatgtctcttctatggg

SEQ ID NO: 13505 - DNA, 21 bp, Artificial sequence
  SiRNA target sequence
tctcatgtctcttctatgggc

SEQ ID NO: 13506 - DNA, 21 bp, Artificial sequence
  SiRNA target sequence
ctcatgtctcttctatgggcg

SEQ ID NO: 13507 - DNA, 21 bp, Artificial sequence
  SiRNA target sequence
tcatgtctcttctatgggcgc

SEQ ID NO: 13508 - DNA, 21 bp, Artificial sequence
  SiRNA target sequence
catgtctcttctatgggcgca

SEQ ID NO: 13509 - DNA, 21 bp, Artificial sequence
  SiRNA target sequence
atgtctcttctatgggcgcag

SEQ ID NO: 13510 - DNA, 21 bp, Artificial sequence
  SiRNA target sequence
tgtctcttctatgggcgcaga

SEQ ID NO: 13511 - DNA, 21 bp, Artificial sequence
  SiRNA target sequence
gtctcttctatgggcgcagat

SEQ ID NO: 13512 - DNA, 21 bp, Artificial sequence
  SiRNA target sequence
tctcttctatgggcgcagatt

SEQ ID NO: 13513 - DNA, 21 bp, Artificial sequence
  SiRNA target sequence
ctcttctatgggcgcagattt

SEQ ID NO: 13514 - DNA, 21 bp, Artificial sequence
  SiRNA target sequence
tcttctatgggcgcagatttc

SEQ ID NO: 13515 - DNA, 21 bp, Artificial sequence
  SiRNA target sequence
cttctatgggcgcagatttcg

SEQ ID NO: 13516 - DNA, 21 bp, Artificial sequence
  SiRNA target sequence
ttctatgggcgcagatttcga

SEQ ID NO: 13517 - DNA, 21 bp, Artificial sequence
  SiRNA target sequence
tctatgggcgcagatttcgac

SEQ ID NO: 13518 - DNA, 21 bp, Artificial sequence
  SiRNA target sequence
ctatgggcgcagatttcgaca

SEQ ID NO: 13519 - DNA, 21 bp, Artificial sequence
  SiRNA target sequence
tatgggcgcagatttcgacat

SEQ ID NO: 13520 - DNA, 21 bp, Artificial sequence
  SiRNA target sequence
atgggcgcagatttcgacata

SEQ ID NO: 13521 - DNA, 21 bp, Artificial sequence
  SiRNA target sequence
tgggcgcagatttcgacataa

SEQ ID NO: 13522 - DNA, 21 bp, Artificial sequence
  SiRNA target sequence
gggcgcagatttcgacataaa

SEQ ID NO: 13523 - DNA, 21 bp, Artificial sequence
  SiRNA target sequence
ggcgcagatttcgacataaaa

SEQ ID NO: 13524 - DNA, 21 bp, Artificial sequence
  SiRNA target sequence
gcgcagatttcgacataaaac

SEQ ID NO: 13525 - DNA, 21 bp, Artificial sequence
  SiRNA target sequence
cgcagatttcgacataaaaca

SEQ ID NO: 13526 - DNA, 21 bp, Artificial sequence
  SiRNA target sequence
gcagatttcgacataaaacag

SEQ ID NO: 13527 - DNA, 21 bp, Artificial sequence
  SiRNA target sequence
cagatttcgacataaaacaga

SEQ ID NO: 13528 - DNA, 21 bp, Artificial sequence
  SiRNA target sequence
agatttcgacataaaacagac

SEQ ID NO: 13529 - DNA, 21 bp, Artificial sequence
  SiRNA target sequence
gatttcgacataaaacagaca

SEQ ID NO: 13530 - DNA, 21 bp, Artificial sequence
  SiRNA target sequence
atttcgacataaaacagacat

SEQ ID NO: 13531 - DNA, 21 bp, Artificial sequence
  SiRNA target sequence
tttcgacataaaacagacata

SEQ ID NO: 13532 - DNA, 21 bp, Artificial sequence
  SiRNA target sequence
ttcgacataaaacagacatac

SEQ ID NO: 13533 - DNA, 21 bp, Artificial sequence
  SiRNA target sequence
tcgacataaaacagacatacg

SEQ ID NO: 13534 - DNA, 21 bp, Artificial sequence
  SiRNA target sequence
cgacataaaacagacatacgc

SEQ ID NO: 13535 - DNA, 21 bp, Artificial sequence
  SiRNA target sequence
gacataaaacagacatacgcc

SEQ ID NO: 13536 - DNA, 21 bp, Artificial sequence
  SiRNA target sequence
acataaaacagacatacgcca

SEQ ID NO: 13537 - DNA, 21 bp, Artificial sequence
  SiRNA target sequence
cataaaacagacatacgccac

SEQ ID NO: 13538 - DNA, 21 bp, Artificial sequence
  SiRNA target sequence
ataaaacagacatacgccacg

SEQ ID NO: 13539 - DNA, 21 bp, Artificial sequence
  SiRNA target sequence
taaaacagacatacgccacgt

SEQ ID NO: 13540 - DNA, 21 bp, Artificial sequence
  SiRNA target sequence
aaaacagacatacgccacgtt

SEQ ID NO: 13541 - DNA, 21 bp, Artificial sequence
  SiRNA target sequence
aaacagacatacgccacgttc

SEQ ID NO: 13542 - DNA, 21 bp, Artificial sequence
  SiRNA target sequence
aacagacatacgccacgttct

SEQ ID NO: 13543 - DNA, 21 bp, Artificial sequence
  SiRNA target sequence
acagacatacgccacgttctg

SEQ ID NO: 13544 - DNA, 21 bp, Artificial sequence
  SiRNA target sequence
cagacatacgccacgttctgc

SEQ ID NO: 13545 - DNA, 21 bp, Artificial sequence
  SiRNA target sequence
agacatacgccacgttctgct

SEQ ID NO: 13546 - DNA, 21 bp, Artificial sequence
  SiRNA target sequence
gacatacgccacgttctgctt

SEQ ID NO: 13547 - DNA, 21 bp, Artificial sequence
  SiRNA target sequence
acatacgccacgttctgcttt

SEQ ID NO: 13548 - DNA, 21 bp, Artificial sequence
  SiRNA target sequence
catacgccacgttctgcttta

SEQ ID NO: 13549 - DNA, 21 bp, Artificial sequence
  SiRNA target sequence
atacgccacgttctgctttaa

SEQ ID NO: 13550 - DNA, 21 bp, Artificial sequence
  SiRNA target sequence
tacgccacgttctgctttaac

SEQ ID NO: 13551 - DNA, 21 bp, Artificial sequence
  SiRNA target sequence
acgccacgttctgctttaaca

SEQ ID NO: 13552 - DNA, 21 bp, Artificial sequence
  SiRNA target sequence
cgccacgttctgctttaacaa

SEQ ID NO: 13553 - DNA, 21 bp, Artificial sequence
  SiRNA target sequence
gccacgttctgctttaacaat

SEQ ID NO: 13554 - DNA, 21 bp, Artificial sequence
  SiRNA target sequence
ccacgttctgctttaacaatc

SEQ ID NO: 13555 - DNA, 21 bp, Artificial sequence
  SiRNA target sequence
cacgttctgctttaacaatct

SEQ ID NO: 13556 - DNA, 21 bp, Artificial sequence
  SiRNA target sequence
acgttctgctttaacaatctt

SEQ ID NO: 13557 - DNA, 21 bp, Artificial sequence
  SiRNA target sequence
cgttctgctttaacaatcttt

SEQ ID NO: 13558 - DNA, 21 bp, Artificial sequence
  SiRNA target sequence
gttctgctttaacaatctttt

SEQ ID NO: 13559 - DNA, 21 bp, Artificial sequence
  SiRNA target sequence
ttctgctttaacaatcttttg

SEQ ID NO: 13560 - DNA, 21 bp, Artificial sequence
  SiRNA target sequence
tctgctttaacaatcttttgc

SEQ ID NO: 13561 - DNA, 21 bp, Artificial sequence
  SiRNA target sequence
ctgctttaacaatcttttgct

SEQ ID NO: 13562 - DNA, 21 bp, Artificial sequence
  SiRNA target sequence
tgctttaacaatcttttgcta

SEQ ID NO: 13563 - DNA, 21 bp, Artificial sequence
  SiRNA target sequence
gctttaacaatcttttgctac

SEQ ID NO: 13564 - DNA, 21 bp, Artificial sequence
  SiRNA target sequence
ctttaacaatcttttgctaca

SEQ ID NO: 13565 - DNA, 21 bp, Artificial sequence
  SiRNA target sequence
tttaacaatcttttgctacaa

SEQ ID NO: 13566 - DNA, 21 bp, Artificial sequence
  SiRNA target sequence
ttaacaatcttttgctacaaa

SEQ ID NO: 13567 - DNA, 21 bp, Artificial sequence
  SiRNA target sequence
taacaatcttttgctacaaac

SEQ ID NO: 13568 - DNA, 21 bp, Artificial sequence
  SiRNA target sequence
aacaatcttttgctacaaacg

SEQ ID NO: 13569 - DNA, 21 bp, Artificial sequence
  SiRNA target sequence
acaatcttttgctacaaacga

SEQ ID NO: 13570 - DNA, 21 bp, Artificial sequence
  SiRNA target sequence
caatcttttgctacaaacgag

SEQ ID NO: 13571 - DNA, 21 bp, Artificial sequence
  SiRNA target sequence
aatcttttgctacaaacgagc

SEQ ID NO: 13572 - DNA, 21 bp, Artificial sequence
  SiRNA target sequence
atcttttgctacaaacgagca

SEQ ID NO: 13573 - DNA, 21 bp, Artificial sequence
  SiRNA target sequence
tcttttgctacaaacgagcat

SEQ ID NO: 13574 - DNA, 21 bp, Artificial sequence
  SiRNA target sequence
cttttgctacaaacgagcata

SEQ ID NO: 13575 - DNA, 21 bp, Artificial sequence
  SiRNA target sequence
ttttgctacaaacgagcatag

SEQ ID NO: 13576 - DNA, 21 bp, Artificial sequence
  SiRNA target sequence
tttgctacaaacgagcataga

SEQ ID NO: 13577 - DNA, 21 bp, Artificial sequence
  SiRNA target sequence
ttgctacaaacgagcatagac

SEQ ID NO: 13578 - DNA, 21 bp, Artificial sequence
  SiRNA target sequence
tgctacaaacgagcatagacc

SEQ ID NO: 13579 - DNA, 21 bp, Artificial sequence
  SiRNA target sequence
gctacaaacgagcatagacca

SEQ ID NO: 13580 - DNA, 21 bp, Artificial sequence
  SiRNA target sequence
ctacaaacgagcatagaccaa

SEQ ID NO: 13581 - DNA, 21 bp, Artificial sequence
  SiRNA target sequence
tacaaacgagcatagaccaag

SEQ ID NO: 13582 - DNA, 21 bp, Artificial sequence
  SiRNA target sequence
acaaacgagcatagaccaaga

SEQ ID NO: 13583 - DNA, 21 bp, Artificial sequence
  SiRNA target sequence
caaacgagcatagaccaagac

SEQ ID NO: 13584 - DNA, 21 bp, Artificial sequence
  SiRNA target sequence
aaacgagcatagaccaagaca

SEQ ID NO: 13585 - DNA, 21 bp, Artificial sequence
  SiRNA target sequence
aacgagcatagaccaagacaa

SEQ ID NO: 13586 - DNA, 21 bp, Artificial sequence
  SiRNA target sequence
acgagcatagaccaagacaaa

SEQ ID NO: 13587 - DNA, 21 bp, Artificial sequence
  SiRNA target sequence
cgagcatagaccaagacaaaa

SEQ ID NO: 13588 - DNA, 21 bp, Artificial sequence
  SiRNA target sequence
gagcatagaccaagacaaaat

SEQ ID NO: 13589 - DNA, 21 bp, Artificial sequence
  SiRNA target sequence
agcatagaccaagacaaaata

SEQ ID NO: 13590 - DNA, 21 bp, Artificial sequence
  SiRNA target sequence
gcatagaccaagacaaaatat

SEQ ID NO: 13591 - DNA, 21 bp, Artificial sequence
  SiRNA target sequence
catagaccaagacaaaatatt

SEQ ID NO: 13592 - DNA, 21 bp, Artificial sequence
  SiRNA target sequence
atagaccaagacaaaatattt

SEQ ID NO: 13593 - DNA, 21 bp, Artificial sequence
  SiRNA target sequence
tagaccaagacaaaatattta

SEQ ID NO: 13594 - DNA, 21 bp, Artificial sequence
  SiRNA target sequence
agaccaagacaaaatatttag

SEQ ID NO: 13595 - DNA, 21 bp, Artificial sequence
  SiRNA target sequence
gaccaagacaaaatatttaga

SEQ ID NO: 13596 - DNA, 21 bp, Artificial sequence
  SiRNA target sequence
accaagacaaaatatttagaa

SEQ ID NO: 13597 - DNA, 21 bp, Artificial sequence
  SiRNA target sequence
ccaagacaaaatatttagaat

SEQ ID NO: 13598 - DNA, 21 bp, Artificial sequence
  SiRNA target sequence
caagacaaaatatttagaata

SEQ ID NO: 13599 - DNA, 21 bp, Artificial sequence
  SiRNA target sequence
aagacaaaatatttagaataa

SEQ ID NO: 13600 - DNA, 21 bp, Artificial sequence
  SiRNA target sequence
agacaaaatatttagaataag

SEQ ID NO: 13601 - DNA, 21 bp, Artificial sequence
  SiRNA target sequence
gacaaaatatttagaataaga

SEQ ID NO: 13602 - DNA, 21 bp, Artificial sequence
  SiRNA target sequence
acaaaatatttagaataagag

SEQ ID NO: 13603 - DNA, 21 bp, Artificial sequence
  SiRNA target sequence
caaaatatttagaataagagg

SEQ ID NO: 13604 - DNA, 21 bp, Artificial sequence
  SiRNA target sequence
aaaatatttagaataagaggt

SEQ ID NO: 13605 - DNA, 21 bp, Artificial sequence
  SiRNA target sequence
aaatatttagaataagaggta

SEQ ID NO: 13606 - DNA, 21 bp, Artificial sequence
  SiRNA target sequence
aatatttagaataagaggtac

SEQ ID NO: 13607 - DNA, 21 bp, Artificial sequence
  SiRNA target sequence
atatttagaataagaggtacc

SEQ ID NO: 13608 - DNA, 21 bp, Artificial sequence
  SiRNA target sequence
tatttagaataagaggtaccc

SEQ ID NO: 13609 - DNA, 21 bp, Artificial sequence
  SiRNA target sequence
atttagaataagaggtaccca

SEQ ID NO: 13610 - DNA, 21 bp, Artificial sequence
  SiRNA target sequence
tttagaataagaggtacccac

SEQ ID NO: 13611 - DNA, 21 bp, Artificial sequence
  SiRNA target sequence
ttagaataagaggtacccaca

SEQ ID NO: 13612 - DNA, 21 bp, Artificial sequence
  SiRNA target sequence
tagaataagaggtacccacat

SEQ ID NO: 13613 - DNA, 21 bp, Artificial sequence
  SiRNA target sequence
agaataagaggtacccacatg

SEQ ID NO: 13614 - DNA, 21 bp, Artificial sequence
  SiRNA target sequence
gaataagaggtacccacatgt

SEQ ID NO: 13615 - DNA, 21 bp, Artificial sequence
  SiRNA target sequence
aataagaggtacccacatgtt

SEQ ID NO: 13616 - DNA, 21 bp, Artificial sequence
  SiRNA target sequence
ataagaggtacccacatgttt

SEQ ID NO: 13617 - DNA, 21 bp, Artificial sequence
  SiRNA target sequence
taagaggtacccacatgttta

SEQ ID NO: 13618 - DNA, 21 bp, Artificial sequence
  SiRNA target sequence
aagaggtacccacatgtttaa

SEQ ID NO: 13619 - DNA, 21 bp, Artificial sequence
  SiRNA target sequence
agaggtacccacatgtttaaa

SEQ ID NO: 13620 - DNA, 21 bp, Artificial sequence
  SiRNA target sequence
gaggtacccacatgtttaaaa

SEQ ID NO: 13621 - DNA, 21 bp, Artificial sequence
  SiRNA target sequence
aggtacccacatgtttaaaaa

SEQ ID NO: 13622 - DNA, 21 bp, Artificial sequence
  SiRNA target sequence
ggtacccacatgtttaaaaat

SEQ ID NO: 13623 - DNA, 21 bp, Artificial sequence
  SiRNA target sequence
gtacccacatgtttaaaaatc

SEQ ID NO: 13624 - DNA, 21 bp, Artificial sequence
  SiRNA target sequence
tacccacatgtttaaaaatct

SEQ ID NO: 13625 - DNA, 21 bp, Artificial sequence
  SiRNA target sequence
acccacatgtttaaaaatcta

SEQ ID NO: 13626 - DNA, 21 bp, Artificial sequence
  SiRNA target sequence
cccacatgtttaaaaatctac

SEQ ID NO: 13627 - DNA, 21 bp, Artificial sequence
  SiRNA target sequence
ccacatgtttaaaaatctact

SEQ ID NO: 13628 - DNA, 21 bp, Artificial sequence
  SiRNA target sequence
cacatgtttaaaaatctactt

SEQ ID NO: 13629 - DNA, 21 bp, Artificial sequence
  SiRNA target sequence
acatgtttaaaaatctactta

SEQ ID NO: 13630 - DNA, 21 bp, Artificial sequence
  SiRNA target sequence
catgtttaaaaatctacttac

SEQ ID NO: 13631 - DNA, 21 bp, Artificial sequence
  SiRNA target sequence
atgtttaaaaatctacttact

SEQ ID NO: 13632 - DNA, 21 bp, Artificial sequence
  SiRNA target sequence
tgtttaaaaatctacttacta

SEQ ID NO: 13633 - DNA, 21 bp, Artificial sequence
  SiRNA target sequence
gtttaaaaatctacttactaa

SEQ ID NO: 13634 - DNA, 21 bp, Artificial sequence
  SiRNA target sequence
tttaaaaatctacttactaaa

SEQ ID NO: 13635 - DNA, 21 bp, Artificial sequence
  SiRNA target sequence
ttaaaaatctacttactaaat

SEQ ID NO: 13636 - DNA, 21 bp, Artificial sequence
  SiRNA target sequence
taaaaatctacttactaaatt

SEQ ID NO: 13637 - DNA, 21 bp, Artificial sequence
  SiRNA target sequence
aaaaatctacttactaaattc

SEQ ID NO: 13638 - DNA, 21 bp, Artificial sequence
  SiRNA target sequence
aaaatctacttactaaattcc

SEQ ID NO: 13639 - DNA, 21 bp, Artificial sequence
  SiRNA target sequence
aaatctacttactaaattcca

SEQ ID NO: 13640 - DNA, 21 bp, Artificial sequence
  SiRNA target sequence
aatctacttactaaattccat

SEQ ID NO: 13641 - DNA, 21 bp, Artificial sequence
  SiRNA target sequence
atctacttactaaattccata

SEQ ID NO: 13642 - DNA, 21 bp, Artificial sequence
  SiRNA target sequence
tctacttactaaattccatac

SEQ ID NO: 13643 - DNA, 21 bp, Artificial sequence
  SiRNA target sequence
ctacttactaaattccataca

SEQ ID NO: 13644 - DNA, 21 bp, Artificial sequence
  SiRNA target sequence
tacttactaaattccatacag

SEQ ID NO: 13645 - DNA, 21 bp, Artificial sequence
  SiRNA target sequence
acttactaaattccatacagt

SEQ ID NO: 13646 - DNA, 21 bp, Artificial sequence
  SiRNA target sequence
cttactaaattccatacagta

SEQ ID NO: 13647 - DNA, 21 bp, Artificial sequence
  SiRNA target sequence
ttactaaattccatacagtaa

SEQ ID NO: 13648 - DNA, 21 bp, Artificial sequence
  SiRNA target sequence
tactaaattccatacagtaat

SEQ ID NO: 13649 - DNA, 21 bp, Artificial sequence
  SiRNA target sequence
actaaattccatacagtaatt

SEQ ID NO: 13650 - DNA, 21 bp, Artificial sequence
  SiRNA target sequence
ctaaattccatacagtaattg

SEQ ID NO: 13651 - DNA, 21 bp, Artificial sequence
  SiRNA target sequence
taaattccatacagtaattgg

SEQ ID NO: 13652 - DNA, 21 bp, Artificial sequence
  SiRNA target sequence
aaattccatacagtaattggt

SEQ ID NO: 13653 - DNA, 21 bp, Artificial sequence
  SiRNA target sequence
aattccatacagtaattggta

SEQ ID NO: 13654 - DNA, 21 bp, Artificial sequence
  SiRNA target sequence
attccatacagtaattggtag

SEQ ID NO: 13655 - DNA, 21 bp, Artificial sequence
  SiRNA target sequence
ttccatacagtaattggtaga

SEQ ID NO: 13656 - DNA, 21 bp, Artificial sequence
  SiRNA target sequence
tccatacagtaattggtagaa

SEQ ID NO: 13657 - DNA, 21 bp, Artificial sequence
  SiRNA target sequence
ccatacagtaattggtagaag

SEQ ID NO: 13658 - DNA, 21 bp, Artificial sequence
  SiRNA target sequence
catacagtaattggtagaagt

SEQ ID NO: 13659 - DNA, 21 bp, Artificial sequence
  SiRNA target sequence
atacagtaattggtagaagta

SEQ ID NO: 13660 - DNA, 21 bp, Artificial sequence
  SiRNA target sequence
tacagtaattggtagaagtaa

SEQ ID NO: 13661 - DNA, 21 bp, Artificial sequence
  SiRNA target sequence
acagtaattggtagaagtaaa

SEQ ID NO: 13662 - DNA, 21 bp, Artificial sequence
  SiRNA target sequence
cagtaattggtagaagtaaag

SEQ ID NO: 13663 - DNA, 21 bp, Artificial sequence
  SiRNA target sequence
agtaattggtagaagtaaaga

SEQ ID NO: 13664 - DNA, 21 bp, Artificial sequence
  SiRNA target sequence
gtaattggtagaagtaaagat

SEQ ID NO: 13665 - DNA, 21 bp, Artificial sequence
  SiRNA target sequence
taattggtagaagtaaagata

SEQ ID NO: 13666 - DNA, 21 bp, Artificial sequence
  SiRNA target sequence
aattggtagaagtaaagatat

SEQ ID NO: 13667 - DNA, 21 bp, Artificial sequence
  SiRNA target sequence
attggtagaagtaaagatatc

SEQ ID NO: 13668 - DNA, 21 bp, Artificial sequence
  SiRNA target sequence
ttggtagaagtaaagatatct

SEQ ID NO: 13669 - DNA, 21 bp, Artificial sequence
  SiRNA target sequence
tggtagaagtaaagatatctt

SEQ ID NO: 13670 - DNA, 21 bp, Artificial sequence
  SiRNA target sequence
ggtagaagtaaagatatcttt

SEQ ID NO: 13671 - DNA, 21 bp, Artificial sequence
  SiRNA target sequence
gtagaagtaaagatatcttta

SEQ ID NO: 13672 - DNA, 21 bp, Artificial sequence
  SiRNA target sequence
tagaagtaaagatatctttac

SEQ ID NO: 13673 - DNA, 21 bp, Artificial sequence
  SiRNA target sequence
agaagtaaagatatctttaca

SEQ ID NO: 13674 - DNA, 21 bp, Artificial sequence
  SiRNA target sequence
gaagtaaagatatctttacac

SEQ ID NO: 13675 - DNA, 21 bp, Artificial sequence
  SiRNA target sequence
aagtaaagatatctttacaca

SEQ ID NO: 13676 - DNA, 21 bp, Artificial sequence
  SiRNA target sequence
agtaaagatatctttacacaa

SEQ ID NO: 13677 - DNA, 21 bp, Artificial sequence
  SiRNA target sequence
gtaaagatatctttacacaaa

SEQ ID NO: 13678 - DNA, 21 bp, Artificial sequence
  SiRNA target sequence
taaagatatctttacacaaat

SEQ ID NO: 13679 - DNA, 21 bp, Artificial sequence
  SiRNA target sequence
aaagatatctttacacaaata

SEQ ID NO: 13680 - DNA, 21 bp, Artificial sequence
  SiRNA target sequence
aagatatctttacacaaatag

SEQ ID NO: 13681 - DNA, 21 bp, Artificial sequence
  SiRNA target sequence
agatatctttacacaaataga

SEQ ID NO: 13682 - DNA, 21 bp, Artificial sequence
  SiRNA target sequence
gatatctttacacaaatagag

SEQ ID NO: 13683 - DNA, 21 bp, Artificial sequence
  SiRNA target sequence
atatctttacacaaatagagg

SEQ ID NO: 13684 - DNA, 21 bp, Artificial sequence
  SiRNA target sequence
tatctttacacaaatagaggt

SEQ ID NO: 13685 - DNA, 21 bp, Artificial sequence
  SiRNA target sequence
atctttacacaaatagaggta

SEQ ID NO: 13686 - DNA, 21 bp, Artificial sequence
  SiRNA target sequence
tctttacacaaatagaggtag

SEQ ID NO: 13687 - DNA, 21 bp, Artificial sequence
  SiRNA target sequence
ctttacacaaatagaggtaga

SEQ ID NO: 13688 - DNA, 21 bp, Artificial sequence
  SiRNA target sequence
tttacacaaatagaggtagac

SEQ ID NO: 13689 - DNA, 21 bp, Artificial sequence
  SiRNA target sequence
ttacacaaatagaggtagaca

SEQ ID NO: 13690 - DNA, 21 bp, Artificial sequence
  SiRNA target sequence
tacacaaatagaggtagacat

SEQ ID NO: 13691 - DNA, 21 bp, Artificial sequence
  SiRNA target sequence
acacaaatagaggtagacata

SEQ ID NO: 13692 - DNA, 21 bp, Artificial sequence
  SiRNA target sequence
cacaaatagaggtagacataa

SEQ ID NO: 13693 - DNA, 21 bp, Artificial sequence
  SiRNA target sequence
acaaatagaggtagacataaa

SEQ ID NO: 13694 - DNA, 21 bp, Artificial sequence
  SiRNA target sequence
caaatagaggtagacataaaa

SEQ ID NO: 13695 - DNA, 21 bp, Artificial sequence
  SiRNA target sequence
aaatagaggtagacataaaaa

SEQ ID NO: 13696 - DNA, 21 bp, Artificial sequence
  SiRNA target sequence
aatagaggtagacataaaaaa

SEQ ID NO: 13697 - DNA, 21 bp, Artificial sequence
  SiRNA target sequence
atagaggtagacataaaaaat

SEQ ID NO: 13698 - DNA, 21 bp, Artificial sequence
  SiRNA target sequence
tagaggtagacataaaaaata

SEQ ID NO: 13699 - DNA, 21 bp, Artificial sequence
  SiRNA target sequence
agaggtagacataaaaaataa

SEQ ID NO: 13700 - DNA, 21 bp, Artificial sequence
  SiRNA target sequence
gaggtagacataaaaaataaa

SEQ ID NO: 13701 - DNA, 21 bp, Artificial sequence
  SiRNA target sequence
aggtagacataaaaaataaat

SEQ ID NO: 13702 - DNA, 21 bp, Artificial sequence
  SiRNA target sequence
ggtagacataaaaaataaata

SEQ ID NO: 13703 - DNA, 21 bp, Artificial sequence
  SiRNA target sequence
gtagacataaaaaataaatac

SEQ ID NO: 13704 - DNA, 21 bp, Artificial sequence
  SiRNA target sequence
tagacataaaaaataaataca

SEQ ID NO: 13705 - DNA, 21 bp, Artificial sequence
  SiRNA target sequence
agacataaaaaataaatacaa

SEQ ID NO: 13706 - DNA, 21 bp, Artificial sequence
  SiRNA target sequence
gacataaaaaataaatacaat

SEQ ID NO: 13707 - DNA, 21 bp, Artificial sequence
  SiRNA target sequence
acataaaaaataaatacaata

SEQ ID NO: 13708 - DNA, 21 bp, Artificial sequence
  SiRNA target sequence
cataaaaaataaatacaataa

SEQ ID NO: 13709 - DNA, 21 bp, Artificial sequence
  SiRNA target sequence
ataaaaaataaatacaataat

SEQ ID NO: 13710 - DNA, 21 bp, Artificial sequence
  SiRNA target sequence
taaaaaataaatacaataata

SEQ ID NO: 13711 - DNA, 21 bp, Artificial sequence
  SiRNA target sequence
aaaaaataaatacaataatat

SEQ ID NO: 13712 - DNA, 21 bp, Artificial sequence
  SiRNA target sequence
aaaaataaatacaataatatg

SEQ ID NO: 13713 - DNA, 21 bp, Artificial sequence
  SiRNA target sequence
aaaataaatacaataatatgt

SEQ ID NO: 13714 - DNA, 21 bp, Artificial sequence
  SiRNA target sequence
aaataaatacaataatatgtg

SEQ ID NO: 13715 - DNA, 21 bp, Artificial sequence
  SiRNA target sequence
aataaatacaataatatgtgt

SEQ ID NO: 13716 - DNA, 21 bp, Artificial sequence
  SiRNA target sequence
ataaatacaataatatgtgta

SEQ ID NO: 13717 - DNA, 21 bp, Artificial sequence
  SiRNA target sequence
taaatacaataatatgtgtat

SEQ ID NO: 13718 - DNA, 21 bp, Artificial sequence
  SiRNA target sequence
aaatacaataatatgtgtata

SEQ ID NO: 13719 - DNA, 21 bp, Artificial sequence
  SiRNA target sequence
aatacaataatatgtgtataa

SEQ ID NO: 13720 - DNA, 21 bp, Artificial sequence
  SiRNA target sequence
atacaataatatgtgtataaa

SEQ ID NO: 13721 - DNA, 21 bp, Artificial sequence
  SiRNA target sequence
tacaataatatgtgtataaaa

SEQ ID NO: 13722 - DNA, 21 bp, Artificial sequence
  SiRNA target sequence
acaataatatgtgtataaaaa

SEQ ID NO: 13723 - DNA, 21 bp, Artificial sequence
  SiRNA target sequence
caataatatgtgtataaaaat

SEQ ID NO: 13724 - DNA, 21 bp, Artificial sequence
  SiRNA target sequence
aataatatgtgtataaaaatg

SEQ ID NO: 13725 - DNA, 21 bp, Artificial sequence
  SiRNA target sequence
ataatatgtgtataaaaatga

SEQ ID NO: 13726 - DNA, 21 bp, Artificial sequence
  SiRNA target sequence
taatatgtgtataaaaatgat

SEQ ID NO: 13727 - DNA, 21 bp, Artificial sequence
  SiRNA target sequence
aatatgtgtataaaaatgata

SEQ ID NO: 13728 - DNA, 21 bp, Artificial sequence
  SiRNA target sequence
atatgtgtataaaaatgatac

SEQ ID NO: 13729 - DNA, 21 bp, Artificial sequence
  SiRNA target sequence
tatgtgtataaaaatgataca

SEQ ID NO: 13730 - DNA, 21 bp, Artificial sequence
  SiRNA target sequence
atgtgtataaaaatgatacag

SEQ ID NO: 13731 - DNA, 21 bp, Artificial sequence
  SiRNA target sequence
tgtgtataaaaatgatacagc

SEQ ID NO: 13732 - DNA, 21 bp, Artificial sequence
  SiRNA target sequence
gtgtataaaaatgatacagcc

SEQ ID NO: 13733 - DNA, 21 bp, Artificial sequence
  SiRNA target sequence
tgtataaaaatgatacagcca

SEQ ID NO: 13734 - DNA, 21 bp, Artificial sequence
  SiRNA target sequence
gtataaaaatgatacagccag

SEQ ID NO: 13735 - DNA, 21 bp, Artificial sequence
  SiRNA target sequence
tataaaaatgatacagccagc

SEQ ID NO: 13736 - DNA, 21 bp, Artificial sequence
  SiRNA target sequence
ataaaaatgatacagccagct

SEQ ID NO: 13737 - DNA, 21 bp, Artificial sequence
  SiRNA target sequence
taaaaatgatacagccagcta

SEQ ID NO: 13738 - DNA, 21 bp, Artificial sequence
  SiRNA target sequence
aaaaatgatacagccagctat

SEQ ID NO: 13739 - DNA, 21 bp, Artificial sequence
  SiRNA target sequence
aaaatgatacagccagctatt

SEQ ID NO: 13740 - DNA, 21 bp, Artificial sequence
  SiRNA target sequence
aaatgatacagccagctatta

SEQ ID NO: 13741 - DNA, 21 bp, Artificial sequence
  SiRNA target sequence
aatgatacagccagctattaa

SEQ ID NO: 13742 - DNA, 21 bp, Artificial sequence
  SiRNA target sequence
atgatacagccagctattaaa

SEQ ID NO: 13743 - DNA, 21 bp, Artificial sequence
  SiRNA target sequence
tgatacagccagctattaaag

SEQ ID NO: 13744 - DNA, 21 bp, Artificial sequence
  SiRNA target sequence
gatacagccagctattaaagg

SEQ ID NO: 13745 - DNA, 21 bp, Artificial sequence
  SiRNA target sequence
atacagccagctattaaaggt

SEQ ID NO: 13746 - DNA, 21 bp, Artificial sequence
  SiRNA target sequence
tacagccagctattaaaggtg

SEQ ID NO: 13747 - DNA, 21 bp, Artificial sequence
  SiRNA target sequence
acagccagctattaaaggtgc

SEQ ID NO: 13748 - DNA, 21 bp, Artificial sequence
  SiRNA target sequence
cagccagctattaaaggtgct

SEQ ID NO: 13749 - DNA, 21 bp, Artificial sequence
  SiRNA target sequence
agccagctattaaaggtgctt

SEQ ID NO: 13750 - DNA, 21 bp, Artificial sequence
  SiRNA target sequence
gccagctattaaaggtgcttc

SEQ ID NO: 13751 - DNA, 21 bp, Artificial sequence
  SiRNA target sequence
ccagctattaaaggtgcttca

SEQ ID NO: 13752 - DNA, 21 bp, Artificial sequence
  SiRNA target sequence
cagctattaaaggtgcttcat

SEQ ID NO: 13753 - DNA, 21 bp, Artificial sequence
  SiRNA target sequence
agctattaaaggtgcttcatg

SEQ ID NO: 13754 - DNA, 21 bp, Artificial sequence
  SiRNA target sequence
gctattaaaggtgcttcatgt

SEQ ID NO: 13755 - DNA, 21 bp, Artificial sequence
  SiRNA target sequence
ctattaaaggtgcttcatgta

SEQ ID NO: 13756 - DNA, 21 bp, Artificial sequence
  SiRNA target sequence
tattaaaggtgcttcatgtat

SEQ ID NO: 13757 - DNA, 21 bp, Artificial sequence
  SiRNA target sequence
attaaaggtgcttcatgtata

SEQ ID NO: 13758 - DNA, 21 bp, Artificial sequence
  SiRNA target sequence
ttaaaggtgcttcatgtatat

SEQ ID NO: 13759 - DNA, 21 bp, Artificial sequence
  SiRNA target sequence
taaaggtgcttcatgtatata

SEQ ID NO: 13760 - DNA, 21 bp, Artificial sequence
  SiRNA target sequence
aaaggtgcttcatgtatatac

SEQ ID NO: 13761 - DNA, 21 bp, Artificial sequence
  SiRNA target sequence
aaggtgcttcatgtatatacg

SEQ ID NO: 13762 - DNA, 21 bp, Artificial sequence
  SiRNA target sequence
aggtgcttcatgtatatacgt

SEQ ID NO: 13763 - DNA, 21 bp, Artificial sequence
  SiRNA target sequence
ggtgcttcatgtatatacgtg

SEQ ID NO: 13764 - DNA, 21 bp, Artificial sequence
  SiRNA target sequence
gtgcttcatgtatatacgtgg

SEQ ID NO: 13765 - DNA, 21 bp, Artificial sequence
  SiRNA target sequence
tgcttcatgtatatacgtggg

SEQ ID NO: 13766 - DNA, 21 bp, Artificial sequence
  SiRNA target sequence
gcttcatgtatatacgtgggt

SEQ ID NO: 13767 - DNA, 21 bp, Artificial sequence
  SiRNA target sequence
cttcatgtatatacgtgggta

SEQ ID NO: 13768 - DNA, 21 bp, Artificial sequence
  SiRNA target sequence
ttcatgtatatacgtgggtaa

SEQ ID NO: 13769 - DNA, 21 bp, Artificial sequence
  SiRNA target sequence
tcatgtatatacgtgggtaat

SEQ ID NO: 13770 - DNA, 21 bp, Artificial sequence
  SiRNA target sequence
catgtatatacgtgggtaatt

SEQ ID NO: 13771 - DNA, 21 bp, Artificial sequence
  SiRNA target sequence
atgtatatacgtgggtaatta

SEQ ID NO: 13772 - DNA, 21 bp, Artificial sequence
  SiRNA target sequence
tgtatatacgtgggtaattat

SEQ ID NO: 13773 - DNA, 21 bp, Artificial sequence
  SiRNA target sequence
gtatatacgtgggtaattata

SEQ ID NO: 13774 - DNA, 21 bp, Artificial sequence
  SiRNA target sequence
tatatacgtgggtaattatat

SEQ ID NO: 13775 - DNA, 21 bp, Artificial sequence
  SiRNA target sequence
atatacgtgggtaattatatg

SEQ ID NO: 13776 - DNA, 21 bp, Artificial sequence
  SiRNA target sequence
tatacgtgggtaattatatgc

SEQ ID NO: 13777 - DNA, 21 bp, Artificial sequence
  SiRNA target sequence
atacgtgggtaattatatgca

SEQ ID NO: 13778 - DNA, 21 bp, Artificial sequence
  SiRNA target sequence
tacgtgggtaattatatgcag

SEQ ID NO: 13779 - DNA, 21 bp, Artificial sequence
  SiRNA target sequence
acgtgggtaattatatgcagc

SEQ ID NO: 13780 - DNA, 21 bp, Artificial sequence
  SiRNA target sequence
cgtgggtaattatatgcagca

SEQ ID NO: 13781 - DNA, 21 bp, Artificial sequence
  SiRNA target sequence
gtgggtaattatatgcagcag

SEQ ID NO: 13782 - DNA, 21 bp, Artificial sequence
  SiRNA target sequence
tgggtaattatatgcagcagc

SEQ ID NO: 13783 - DNA, 21 bp, Artificial sequence
  SiRNA target sequence
gggtaattatatgcagcagct

SEQ ID NO: 13784 - DNA, 21 bp, Artificial sequence
  SiRNA target sequence
ggtaattatatgcagcagcta

SEQ ID NO: 13785 - DNA, 21 bp, Artificial sequence
  SiRNA target sequence
gtaattatatgcagcagctag

SEQ ID NO: 13786 - DNA, 21 bp, Artificial sequence
  SiRNA target sequence
taattatatgcagcagctagg

SEQ ID NO: 13787 - DNA, 21 bp, Artificial sequence
  SiRNA target sequence
aattatatgcagcagctagga

SEQ ID NO: 13788 - DNA, 21 bp, Artificial sequence
  SiRNA target sequence
attatatgcagcagctaggag

SEQ ID NO: 13789 - DNA, 21 bp, Artificial sequence
  SiRNA target sequence
ttatatgcagcagctaggagt

SEQ ID NO: 13790 - DNA, 21 bp, Artificial sequence
  SiRNA target sequence
tatatgcagcagctaggagta

SEQ ID NO: 13791 - DNA, 21 bp, Artificial sequence
  SiRNA target sequence
atatgcagcagctaggagtaa

SEQ ID NO: 13792 - DNA, 21 bp, Artificial sequence
  SiRNA target sequence
tatgcagcagctaggagtaat

SEQ ID NO: 13793 - DNA, 21 bp, Artificial sequence
  SiRNA target sequence
atgcagcagctaggagtaatt

SEQ ID NO: 13794 - DNA, 21 bp, Artificial sequence
  SiRNA target sequence
tgcagcagctaggagtaatta

SEQ ID NO: 13795 - DNA, 21 bp, Artificial sequence
  SiRNA target sequence
gcagcagctaggagtaattag

SEQ ID NO: 13796 - DNA, 21 bp, Artificial sequence
  SiRNA target sequence
cagcagctaggagtaattagt

SEQ ID NO: 13797 - DNA, 21 bp, Artificial sequence
  SiRNA target sequence
agcagctaggagtaattagtc

SEQ ID NO: 13798 - DNA, 21 bp, Artificial sequence
  SiRNA target sequence
gcagctaggagtaattagtct

SEQ ID NO: 13799 - DNA, 21 bp, Artificial sequence
  SiRNA target sequence
cagctaggagtaattagtctt

SEQ ID NO: 13800 - DNA, 21 bp, Artificial sequence
  SiRNA target sequence
agctaggagtaattagtcttg

SEQ ID NO: 13801 - DNA, 21 bp, Artificial sequence
  SiRNA target sequence
gctaggagtaattagtcttgg

SEQ ID NO: 13802 - DNA, 21 bp, Artificial sequence
  SiRNA target sequence
ctaggagtaattagtcttggt

SEQ ID NO: 13803 - DNA, 21 bp, Artificial sequence
  SiRNA target sequence
taggagtaattagtcttggtg

SEQ ID NO: 13804 - DNA, 21 bp, Artificial sequence
  SiRNA target sequence
aggagtaattagtcttggtgg

SEQ ID NO: 13805 - DNA, 21 bp, Artificial sequence
  SiRNA target sequence
ggagtaattagtcttggtggg

SEQ ID NO: 13806 - DNA, 21 bp, Artificial sequence
  SiRNA target sequence
gagtaattagtcttggtgggg

SEQ ID NO: 13807 - DNA, 21 bp, Artificial sequence
  SiRNA target sequence
agtaattagtcttggtgggga

SEQ ID NO: 13808 - DNA, 21 bp, Artificial sequence
  SiRNA target sequence
gtaattagtcttggtggggag

SEQ ID NO: 13809 - DNA, 21 bp, Artificial sequence
  SiRNA target sequence
taattagtcttggtggggaga

SEQ ID NO: 13810 - DNA, 21 bp, Artificial sequence
  SiRNA target sequence
aattagtcttggtggggagat

SEQ ID NO: 13811 - DNA, 21 bp, Artificial sequence
  SiRNA target sequence
attagtcttggtggggagatt

SEQ ID NO: 13812 - DNA, 21 bp, Artificial sequence
  SiRNA target sequence
ttagtcttggtggggagatta

SEQ ID NO: 13813 - DNA, 21 bp, Artificial sequence
  SiRNA target sequence
tagtcttggtggggagattat

SEQ ID NO: 13814 - DNA, 21 bp, Artificial sequence
  SiRNA target sequence
agtcttggtggggagattatt

SEQ ID NO: 13815 - DNA, 21 bp, Artificial sequence
  SiRNA target sequence
gtcttggtggggagattatta

SEQ ID NO: 13816 - DNA, 21 bp, Artificial sequence
  SiRNA target sequence
tcttggtggggagattattaa

SEQ ID NO: 13817 - DNA, 21 bp, Artificial sequence
  SiRNA target sequence
cttggtggggagattattaaa

SEQ ID NO: 13818 - DNA, 21 bp, Artificial sequence
  SiRNA target sequence
ttggtggggagattattaaag

SEQ ID NO: 13819 - DNA, 21 bp, Artificial sequence
  SiRNA target sequence
tggtggggagattattaaagc

SEQ ID NO: 13820 - DNA, 21 bp, Artificial sequence
  SiRNA target sequence
ggtggggagattattaaagct

SEQ ID NO: 13821 - DNA, 21 bp, Artificial sequence
  SiRNA target sequence
gtggggagattattaaagctg

SEQ ID NO: 13822 - DNA, 21 bp, Artificial sequence
  SiRNA target sequence
tggggagattattaaagctga

SEQ ID NO: 13823 - DNA, 21 bp, Artificial sequence
  SiRNA target sequence
ggggagattattaaagctgat

SEQ ID NO: 13824 - DNA, 21 bp, Artificial sequence
  SiRNA target sequence
gggagattattaaagctgatg

SEQ ID NO: 13825 - DNA, 21 bp, Artificial sequence
  SiRNA target sequence
ggagattattaaagctgatga

SEQ ID NO: 13826 - DNA, 21 bp, Artificial sequence
  SiRNA target sequence
gagattattaaagctgatgaa

SEQ ID NO: 13827 - DNA, 21 bp, Artificial sequence
  SiRNA target sequence
agattattaaagctgatgaat

SEQ ID NO: 13828 - DNA, 21 bp, Artificial sequence
  SiRNA target sequence
gattattaaagctgatgaata

SEQ ID NO: 13829 - DNA, 21 bp, Artificial sequence
  SiRNA target sequence
attattaaagctgatgaatac

SEQ ID NO: 13830 - DNA, 21 bp, Artificial sequence
  SiRNA target sequence
ttattaaagctgatgaataca

SEQ ID NO: 13831 - DNA, 21 bp, Artificial sequence
  SiRNA target sequence
tattaaagctgatgaatacat

SEQ ID NO: 13832 - DNA, 21 bp, Artificial sequence
  SiRNA target sequence
attaaagctgatgaatacatt

SEQ ID NO: 13833 - DNA, 21 bp, Artificial sequence
  SiRNA target sequence
ttaaagctgatgaatacattg

SEQ ID NO: 13834 - DNA, 21 bp, Artificial sequence
  SiRNA target sequence
taaagctgatgaatacattgg

SEQ ID NO: 13835 - DNA, 21 bp, Artificial sequence
  SiRNA target sequence
aaagctgatgaatacattgga

SEQ ID NO: 13836 - DNA, 21 bp, Artificial sequence
  SiRNA target sequence
aagctgatgaatacattggac

SEQ ID NO: 13837 - DNA, 21 bp, Artificial sequence
  SiRNA target sequence
agctgatgaatacattggact

SEQ ID NO: 13838 - DNA, 21 bp, Artificial sequence
  SiRNA target sequence
gctgatgaatacattggacta

SEQ ID NO: 13839 - DNA, 21 bp, Artificial sequence
  SiRNA target sequence
ctgatgaatacattggactat

SEQ ID NO: 13840 - DNA, 21 bp, Artificial sequence
  SiRNA target sequence
tgatgaatacattggactatc

SEQ ID NO: 13841 - DNA, 21 bp, Artificial sequence
  SiRNA target sequence
gatgaatacattggactatct

SEQ ID NO: 13842 - DNA, 21 bp, Artificial sequence
  SiRNA target sequence
atgaatacattggactatctt

SEQ ID NO: 13843 - DNA, 21 bp, Artificial sequence
  SiRNA target sequence
tgaatacattggactatcttt

SEQ ID NO: 13844 - DNA, 21 bp, Artificial sequence
  SiRNA target sequence
gaatacattggactatctttt

SEQ ID NO: 13845 - DNA, 21 bp, Artificial sequence
  SiRNA target sequence
aatacattggactatcttttg

SEQ ID NO: 13846 - DNA, 21 bp, Artificial sequence
  SiRNA target sequence
atacattggactatcttttgt

SEQ ID NO: 13847 - DNA, 21 bp, Artificial sequence
  SiRNA target sequence
tacattggactatcttttgta

SEQ ID NO: 13848 - DNA, 21 bp, Artificial sequence
  SiRNA target sequence
acattggactatcttttgtag

SEQ ID NO: 13849 - DNA, 21 bp, Artificial sequence
  SiRNA target sequence
cattggactatcttttgtagg

SEQ ID NO: 13850 - DNA, 21 bp, Artificial sequence
  SiRNA target sequence
attggactatcttttgtaggg

SEQ ID NO: 13851 - DNA, 21 bp, Artificial sequence
  SiRNA target sequence
ttggactatcttttgtaggga

SEQ ID NO: 13852 - DNA, 21 bp, Artificial sequence
  SiRNA target sequence
tggactatcttttgtagggag

SEQ ID NO: 13853 - DNA, 21 bp, Artificial sequence
  SiRNA target sequence
ggactatcttttgtagggaga

SEQ ID NO: 13854 - DNA, 21 bp, Artificial sequence
  SiRNA target sequence
gactatcttttgtagggagat

SEQ ID NO: 13855 - DNA, 21 bp, Artificial sequence
  SiRNA target sequence
actatcttttgtagggagata

SEQ ID NO: 13856 - DNA, 21 bp, Artificial sequence
  SiRNA target sequence
ctatcttttgtagggagatat

SEQ ID NO: 13857 - DNA, 21 bp, Artificial sequence
  SiRNA target sequence
tatcttttgtagggagatatg

SEQ ID NO: 13858 - DNA, 21 bp, Artificial sequence
  SiRNA target sequence
atcttttgtagggagatatga

SEQ ID NO: 13859 - DNA, 21 bp, Artificial sequence
  SiRNA target sequence
tcttttgtagggagatatgaa

SEQ ID NO: 13860 - DNA, 21 bp, Artificial sequence
  SiRNA target sequence
cttttgtagggagatatgaag

SEQ ID NO: 13861 - DNA, 21 bp, Artificial sequence
  SiRNA target sequence
ttttgtagggagatatgaagg

SEQ ID NO: 13862 - DNA, 21 bp, Artificial sequence
  SiRNA target sequence
tttgtagggagatatgaaggg

SEQ ID NO: 13863 - DNA, 21 bp, Artificial sequence
  SiRNA target sequence
ttgtagggagatatgaaggga

SEQ ID NO: 13864 - DNA, 21 bp, Artificial sequence
  SiRNA target sequence
tgtagggagatatgaagggat

SEQ ID NO: 13865 - DNA, 21 bp, Artificial sequence
  SiRNA target sequence
gtagggagatatgaagggatt

SEQ ID NO: 13866 - DNA, 21 bp, Artificial sequence
  SiRNA target sequence
tagggagatatgaagggattg

SEQ ID NO: 13867 - DNA, 21 bp, Artificial sequence
  SiRNA target sequence
agggagatatgaagggattgg

SEQ ID NO: 13868 - DNA, 21 bp, Artificial sequence
  SiRNA target sequence
gggagatatgaagggattggt

SEQ ID NO: 13869 - DNA, 21 bp, Artificial sequence
  SiRNA target sequence
ggagatatgaagggattggtt

SEQ ID NO: 13870 - DNA, 21 bp, Artificial sequence
  SiRNA target sequence
gagatatgaagggattggttc

SEQ ID NO: 13871 - DNA, 21 bp, Artificial sequence
  SiRNA target sequence
agatatgaagggattggttct

SEQ ID NO: 13872 - DNA, 21 bp, Artificial sequence
  SiRNA target sequence
gatatgaagggattggttcta

SEQ ID NO: 13873 - DNA, 21 bp, Artificial sequence
  SiRNA target sequence
atatgaagggattggttctat

SEQ ID NO: 13874 - DNA, 21 bp, Artificial sequence
  SiRNA target sequence
tatgaagggattggttctatt

SEQ ID NO: 13875 - DNA, 21 bp, Artificial sequence
  SiRNA target sequence
atgaagggattggttctattt

SEQ ID NO: 13876 - DNA, 21 bp, Artificial sequence
  SiRNA target sequence
tgaagggattggttctatttc

SEQ ID NO: 13877 - DNA, 21 bp, Artificial sequence
  SiRNA target sequence
gaagggattggttctatttct

SEQ ID NO: 13878 - DNA, 21 bp, Artificial sequence
  SiRNA target sequence
aagggattggttctatttcta

SEQ ID NO: 13879 - DNA, 21 bp, Artificial sequence
  SiRNA target sequence
agggattggttctatttctac

SEQ ID NO: 13880 - DNA, 21 bp, Artificial sequence
  SiRNA target sequence
gggattggttctatttctact

SEQ ID NO: 13881 - DNA, 21 bp, Artificial sequence
  SiRNA target sequence
ggattggttctatttctacta

SEQ ID NO: 13882 - DNA, 21 bp, Artificial sequence
  SiRNA target sequence
gattggttctatttctactat

SEQ ID NO: 13883 - DNA, 21 bp, Artificial sequence
  SiRNA target sequence
attggttctatttctactata

SEQ ID NO: 13884 - DNA, 21 bp, Artificial sequence
  SiRNA target sequence
ttggttctatttctactatat

SEQ ID NO: 13885 - DNA, 21 bp, Artificial sequence
  SiRNA target sequence
tggttctatttctactatatc

SEQ ID NO: 13886 - DNA, 21 bp, Artificial sequence
  SiRNA target sequence
ggttctatttctactatatca

SEQ ID NO: 13887 - DNA, 21 bp, Artificial sequence
  SiRNA target sequence
gttctatttctactatatcac

SEQ ID NO: 13888 - DNA, 21 bp, Artificial sequence
  SiRNA target sequence
ttctatttctactatatcact

SEQ ID NO: 13889 - DNA, 21 bp, Artificial sequence
  SiRNA target sequence
tctatttctactatatcactt

SEQ ID NO: 13890 - DNA, 21 bp, Artificial sequence
  SiRNA target sequence
ctatttctactatatcacttc

SEQ ID NO: 13891 - DNA, 21 bp, Artificial sequence
  SiRNA target sequence
tatttctactatatcacttca

SEQ ID NO: 13892 - DNA, 21 bp, Artificial sequence
  SiRNA target sequence
atttctactatatcacttcag

SEQ ID NO: 13893 - DNA, 21 bp, Artificial sequence
  SiRNA target sequence
tttctactatatcacttcagc

SEQ ID NO: 13894 - DNA, 21 bp, Artificial sequence
  SiRNA target sequence
ttctactatatcacttcagca

SEQ ID NO: 13895 - DNA, 21 bp, Artificial sequence
  SiRNA target sequence
tctactatatcacttcagcag

SEQ ID NO: 13896 - DNA, 21 bp, Artificial sequence
  SiRNA target sequence
ctactatatcacttcagcagt

SEQ ID NO: 13897 - DNA, 21 bp, Artificial sequence
  SiRNA target sequence
tactatatcacttcagcagtt

SEQ ID NO: 13898 - DNA, 21 bp, Artificial sequence
  SiRNA target sequence
actatatcacttcagcagttt

SEQ ID NO: 13899 - DNA, 21 bp, Artificial sequence
  SiRNA target sequence
ctatatcacttcagcagttta

SEQ ID NO: 13900 - DNA, 21 bp, Artificial sequence
  SiRNA target sequence
tatatcacttcagcagtttaa

SEQ ID NO: 13901 - DNA, 21 bp, Artificial sequence
  SiRNA target sequence
atatcacttcagcagtttaat

SEQ ID NO: 13902 - DNA, 21 bp, Artificial sequence
  SiRNA target sequence
tatcacttcagcagtttaata

SEQ ID NO: 13903 - DNA, 21 bp, Artificial sequence
  SiRNA target sequence
atcacttcagcagtttaatac

SEQ ID NO: 13904 - DNA, 21 bp, Artificial sequence
  SiRNA target sequence
tcacttcagcagtttaataca

SEQ ID NO: 13905 - DNA, 21 bp, Artificial sequence
  SiRNA target sequence
cacttcagcagtttaatacac

SEQ ID NO: 13906 - DNA, 21 bp, Artificial sequence
  SiRNA target sequence
acttcagcagtttaatacact

SEQ ID NO: 13907 - DNA, 21 bp, Artificial sequence
  SiRNA target sequence
cttcagcagtttaatacactg

SEQ ID NO: 13908 - DNA, 21 bp, Artificial sequence
  SiRNA target sequence
ttcagcagtttaatacactgt

SEQ ID NO: 13909 - DNA, 21 bp, Artificial sequence
  SiRNA target sequence
tcagcagtttaatacactgtc

SEQ ID NO: 13910 - DNA, 21 bp, Artificial sequence
  SiRNA target sequence
cagcagtttaatacactgtct

SEQ ID NO: 13911 - DNA, 21 bp, Artificial sequence
  SiRNA target sequence
agcagtttaatacactgtcta

SEQ ID NO: 13912 - DNA, 21 bp, Artificial sequence
  SiRNA target sequence
gcagtttaatacactgtctat

SEQ ID NO: 13913 - DNA, 21 bp, Artificial sequence
  SiRNA target sequence
cagtttaatacactgtctata

SEQ ID NO: 13914 - DNA, 21 bp, Artificial sequence
  SiRNA target sequence
agtttaatacactgtctatag

SEQ ID NO: 13915 - DNA, 21 bp, Artificial sequence
  SiRNA target sequence
gtttaatacactgtctataga

SEQ ID NO: 13916 - DNA, 21 bp, Artificial sequence
  SiRNA target sequence
tttaatacactgtctatagat

SEQ ID NO: 13917 - DNA, 21 bp, Artificial sequence
  SiRNA target sequence
ttaatacactgtctatagatt

SEQ ID NO: 13918 - DNA, 21 bp, Artificial sequence
  SiRNA target sequence
taatacactgtctatagatta

SEQ ID NO: 13919 - DNA, 21 bp, Artificial sequence
  SiRNA target sequence
aatacactgtctatagattat

SEQ ID NO: 13920 - DNA, 21 bp, Artificial sequence
  SiRNA target sequence
atacactgtctatagattatt

SEQ ID NO: 13921 - DNA, 21 bp, Artificial sequence
  SiRNA target sequence
tacactgtctatagattatta

SEQ ID NO: 13922 - DNA, 21 bp, Artificial sequence
  SiRNA target sequence
acactgtctatagattattac

SEQ ID NO: 13923 - DNA, 21 bp, Artificial sequence
  SiRNA target sequence
cactgtctatagattattaca

SEQ ID NO: 13924 - DNA, 21 bp, Artificial sequence
  SiRNA target sequence
actgtctatagattattacaa

SEQ ID NO: 13925 - DNA, 21 bp, Artificial sequence
  SiRNA target sequence
ctgtctatagattattacaag

SEQ ID NO: 13926 - DNA, 21 bp, Artificial sequence
  SiRNA target sequence
tgtctatagattattacaaga

SEQ ID NO: 13927 - DNA, 21 bp, Artificial sequence
  SiRNA target sequence
gtctatagattattacaagac

SEQ ID NO: 13928 - DNA, 21 bp, Artificial sequence
  SiRNA target sequence
tctatagattattacaagaca

SEQ ID NO: 13929 - DNA, 21 bp, Artificial sequence
  SiRNA target sequence
ctatagattattacaagacat

SEQ ID NO: 13930 - DNA, 21 bp, Artificial sequence
  SiRNA target sequence
tatagattattacaagacatt

SEQ ID NO: 13931 - DNA, 21 bp, Artificial sequence
  SiRNA target sequence
atagattattacaagacattg

SEQ ID NO: 13932 - DNA, 21 bp, Artificial sequence
  SiRNA target sequence
tagattattacaagacattgt

SEQ ID NO: 13933 - DNA, 21 bp, Artificial sequence
  SiRNA target sequence
agattattacaagacattgtc

SEQ ID NO: 13934 - DNA, 21 bp, Artificial sequence
  SiRNA target sequence
gattattacaagacattgtct

SEQ ID NO: 13935 - DNA, 21 bp, Artificial sequence
  SiRNA target sequence
attattacaagacattgtctt

SEQ ID NO: 13936 - DNA, 21 bp, Artificial sequence
  SiRNA target sequence
ttattacaagacattgtcttc

SEQ ID NO: 13937 - DNA, 21 bp, Artificial sequence
  SiRNA target sequence
tattacaagacattgtcttct

SEQ ID NO: 13938 - DNA, 21 bp, Artificial sequence
  SiRNA target sequence
attacaagacattgtcttcta

SEQ ID NO: 13939 - DNA, 21 bp, Artificial sequence
  SiRNA target sequence
ttacaagacattgtcttctat

SEQ ID NO: 13940 - DNA, 21 bp, Artificial sequence
  SiRNA target sequence
tacaagacattgtcttctatt

SEQ ID NO: 13941 - DNA, 21 bp, Artificial sequence
  SiRNA target sequence
acaagacattgtcttctattt

SEQ ID NO: 13942 - DNA, 21 bp, Artificial sequence
  SiRNA target sequence
caagacattgtcttctatttg

SEQ ID NO: 13943 - DNA, 21 bp, Artificial sequence
  SiRNA target sequence
aagacattgtcttctatttgt

SEQ ID NO: 13944 - DNA, 21 bp, Artificial sequence
  SiRNA target sequence
agacattgtcttctatttgtg

SEQ ID NO: 13945 - DNA, 21 bp, Artificial sequence
  SiRNA target sequence
gacattgtcttctatttgtga

SEQ ID NO: 13946 - DNA, 21 bp, Artificial sequence
  SiRNA target sequence
acattgtcttctatttgtgac

SEQ ID NO: 13947 - DNA, 21 bp, Artificial sequence
  SiRNA target sequence
cattgtcttctatttgtgacg

SEQ ID NO: 13948 - DNA, 21 bp, Artificial sequence
  SiRNA target sequence
attgtcttctatttgtgacgt

SEQ ID NO: 13949 - DNA, 21 bp, Artificial sequence
  SiRNA target sequence
ttgtcttctatttgtgacgta

SEQ ID NO: 13950 - DNA, 21 bp, Artificial sequence
  SiRNA target sequence
tgtcttctatttgtgacgtag

SEQ ID NO: 13951 - DNA, 21 bp, Artificial sequence
  SiRNA target sequence
gtcttctatttgtgacgtagg

SEQ ID NO: 13952 - DNA, 21 bp, Artificial sequence
  SiRNA target sequence
tcttctatttgtgacgtaggt

SEQ ID NO: 13953 - DNA, 21 bp, Artificial sequence
  SiRNA target sequence
cttctatttgtgacgtaggta

SEQ ID NO: 13954 - DNA, 21 bp, Artificial sequence
  SiRNA target sequence
ttctatttgtgacgtaggtat

SEQ ID NO: 13955 - DNA, 21 bp, Artificial sequence
  SiRNA target sequence
tctatttgtgacgtaggtatt

SEQ ID NO: 13956 - DNA, 21 bp, Artificial sequence
  SiRNA target sequence
ctatttgtgacgtaggtatta

SEQ ID NO: 13957 - DNA, 21 bp, Artificial sequence
  SiRNA target sequence
tatttgtgacgtaggtattaa

SEQ ID NO: 13958 - DNA, 21 bp, Artificial sequence
  SiRNA target sequence
atttgtgacgtaggtattaaa

SEQ ID NO: 13959 - DNA, 21 bp, Artificial sequence
  SiRNA target sequence
tttgtgacgtaggtattaaaa

SEQ ID NO: 13960 - DNA, 21 bp, Artificial sequence
  SiRNA target sequence
ttgtgacgtaggtattaaaat

SEQ ID NO: 13961 - DNA, 21 bp, Artificial sequence
  SiRNA target sequence
tgtgacgtaggtattaaaata

SEQ ID NO: 13962 - DNA, 21 bp, Artificial sequence
  SiRNA target sequence
gtgacgtaggtattaaaatat

SEQ ID NO: 13963 - DNA, 21 bp, Artificial sequence
  SiRNA target sequence
tgacgtaggtattaaaatatc

SEQ ID NO: 13964 - DNA, 21 bp, Artificial sequence
  SiRNA target sequence
gacgtaggtattaaaatatca

SEQ ID NO: 13965 - DNA, 21 bp, Artificial sequence
  SiRNA target sequence
acgtaggtattaaaatatcaa

SEQ ID NO: 13966 - DNA, 21 bp, Artificial sequence
  SiRNA target sequence
cgtaggtattaaaatatcaac

SEQ ID NO: 13967 - DNA, 21 bp, Artificial sequence
  SiRNA target sequence
gtaggtattaaaatatcaact

SEQ ID NO: 13968 - DNA, 21 bp, Artificial sequence
  SiRNA target sequence
taggtattaaaatatcaactg

SEQ ID NO: 13969 - DNA, 21 bp, Artificial sequence
  SiRNA target sequence
aggtattaaaatatcaactga

SEQ ID NO: 13970 - DNA, 21 bp, Artificial sequence
  SiRNA target sequence
ggtattaaaatatcaactgat

SEQ ID NO: 13971 - DNA, 21 bp, Artificial sequence
  SiRNA target sequence
gtattaaaatatcaactgata

SEQ ID NO: 13972 - DNA, 21 bp, Artificial sequence
  SiRNA target sequence
tattaaaatatcaactgatag

SEQ ID NO: 13973 - DNA, 21 bp, Artificial sequence
  SiRNA target sequence
attaaaatatcaactgatagg

SEQ ID NO: 13974 - DNA, 21 bp, Artificial sequence
  SiRNA target sequence
ttaaaatatcaactgataggg

SEQ ID NO: 13975 - DNA, 21 bp, Artificial sequence
  SiRNA target sequence
taaaatatcaactgataggga

SEQ ID NO: 13976 - DNA, 21 bp, Artificial sequence
  SiRNA target sequence
aaaatatcaactgatagggaa

SEQ ID NO: 13977 - DNA, 21 bp, Artificial sequence
  SiRNA target sequence
aaatatcaactgatagggaaa

SEQ ID NO: 13978 - DNA, 21 bp, Artificial sequence
  SiRNA target sequence
aatatcaactgatagggaaaa

SEQ ID NO: 13979 - DNA, 21 bp, Artificial sequence
  SiRNA target sequence
atatcaactgatagggaaaaa

SEQ ID NO: 13980 - DNA, 21 bp, Artificial sequence
  SiRNA target sequence
tatcaactgatagggaaaaat

SEQ ID NO: 13981 - DNA, 21 bp, Artificial sequence
  SiRNA target sequence
atcaactgatagggaaaaatc

SEQ ID NO: 13982 - DNA, 21 bp, Artificial sequence
  SiRNA target sequence
tcaactgatagggaaaaatca

SEQ ID NO: 13983 - DNA, 21 bp, Artificial sequence
  SiRNA target sequence
caactgatagggaaaaatcag

SEQ ID NO: 13984 - DNA, 21 bp, Artificial sequence
  SiRNA target sequence
aactgatagggaaaaatcagt

SEQ ID NO: 13985 - DNA, 21 bp, Artificial sequence
  SiRNA target sequence
actgatagggaaaaatcagtt

SEQ ID NO: 13986 - DNA, 21 bp, Artificial sequence
  SiRNA target sequence
ctgatagggaaaaatcagtta

SEQ ID NO: 13987 - DNA, 21 bp, Artificial sequence
  SiRNA target sequence
tgatagggaaaaatcagttaa

SEQ ID NO: 13988 - DNA, 21 bp, Artificial sequence
  SiRNA target sequence
gatagggaaaaatcagttaat

SEQ ID NO: 13989 - DNA, 21 bp, Artificial sequence
  SiRNA target sequence
atagggaaaaatcagttaatt

SEQ ID NO: 13990 - DNA, 21 bp, Artificial sequence
  SiRNA target sequence
tagggaaaaatcagttaatta

SEQ ID NO: 13991 - DNA, 21 bp, Artificial sequence
  SiRNA target sequence
agggaaaaatcagttaattat

SEQ ID NO: 13992 - DNA, 21 bp, Artificial sequence
  SiRNA target sequence
gggaaaaatcagttaattatg

SEQ ID NO: 13993 - DNA, 21 bp, Artificial sequence
  SiRNA target sequence
ggaaaaatcagttaattatgg

SEQ ID NO: 13994 - DNA, 21 bp, Artificial sequence
  SiRNA target sequence
gaaaaatcagttaattatgga

SEQ ID NO: 13995 - DNA, 21 bp, Artificial sequence
  SiRNA target sequence
aaaaatcagttaattatggat

SEQ ID NO: 13996 - DNA, 21 bp, Artificial sequence
  SiRNA target sequence
aaaatcagttaattatggatt

SEQ ID NO: 13997 - DNA, 21 bp, Artificial sequence
  SiRNA target sequence
aaatcagttaattatggatta

SEQ ID NO: 13998 - DNA, 21 bp, Artificial sequence
  SiRNA target sequence
aatcagttaattatggattag

SEQ ID NO: 13999 - DNA, 21 bp, Artificial sequence
  SiRNA target sequence
atcagttaattatggattagg

SEQ ID NO: 14000 - DNA, 21 bp, Artificial sequence
  SiRNA target sequence
tcagttaattatggattagga

SEQ ID NO: 14001 - DNA, 21 bp, Artificial sequence
  SiRNA target sequence
cagttaattatggattaggag

SEQ ID NO: 14002 - DNA, 21 bp, Artificial sequence
  SiRNA target sequence
agttaattatggattaggagt

SEQ ID NO: 14003 - DNA, 21 bp, Artificial sequence
  SiRNA target sequence
gttaattatggattaggagtt

SEQ ID NO: 14004 - DNA, 21 bp, Artificial sequence
  SiRNA target sequence
ttaattatggattaggagtta

SEQ ID NO: 14005 - DNA, 21 bp, Artificial sequence
  SiRNA target sequence
taattatggattaggagttaa

SEQ ID NO: 14006 - DNA, 21 bp, Artificial sequence
  SiRNA target sequence
aattatggattaggagttaaa

SEQ ID NO: 14007 - DNA, 21 bp, Artificial sequence
  SiRNA target sequence
attatggattaggagttaaac

SEQ ID NO: 14008 - DNA, 21 bp, Artificial sequence
  SiRNA target sequence
ttatggattaggagttaaact

SEQ ID NO: 14009 - DNA, 21 bp, Artificial sequence
  SiRNA target sequence
tatggattaggagttaaacta

SEQ ID NO: 14010 - DNA, 21 bp, Artificial sequence
  SiRNA target sequence
atggattaggagttaaactac

SEQ ID NO: 14011 - DNA, 21 bp, Artificial sequence
  SiRNA target sequence
tggattaggagttaaactaca

SEQ ID NO: 14012 - DNA, 21 bp, Artificial sequence
  SiRNA target sequence
ggattaggagttaaactacac

SEQ ID NO: 14013 - DNA, 21 bp, Artificial sequence
  SiRNA target sequence
gattaggagttaaactacaca

SEQ ID NO: 14014 - DNA, 21 bp, Artificial sequence
  SiRNA target sequence
attaggagttaaactacacag

SEQ ID NO: 14015 - DNA, 21 bp, Artificial sequence
  SiRNA target sequence
ttaggagttaaactacacagt

SEQ ID NO: 14016 - DNA, 21 bp, Artificial sequence
  SiRNA target sequence
taggagttaaactacacagta

SEQ ID NO: 14017 - DNA, 21 bp, Artificial sequence
  SiRNA target sequence
aggagttaaactacacagtaa

SEQ ID NO: 14018 - DNA, 21 bp, Artificial sequence
  SiRNA target sequence
ggagttaaactacacagtaaa

SEQ ID NO: 14019 - DNA, 21 bp, Artificial sequence
  SiRNA target sequence
gagttaaactacacagtaaaa

SEQ ID NO: 14020 - DNA, 21 bp, Artificial sequence
  SiRNA target sequence
agttaaactacacagtaaaaa

SEQ ID NO: 14021 - DNA, 21 bp, Artificial sequence
  SiRNA target sequence
gttaaactacacagtaaaaaa

SEQ ID NO: 14022 - DNA, 21 bp, Artificial sequence
  SiRNA target sequence
ttaaactacacagtaaaaaag

SEQ ID NO: 14023 - DNA, 21 bp, Artificial sequence
  SiRNA target sequence
taaactacacagtaaaaaagg

SEQ ID NO: 14024 - DNA, 21 bp, Artificial sequence
  SiRNA target sequence
aaactacacagtaaaaaagga

SEQ ID NO: 14025 - DNA, 21 bp, Artificial sequence
  SiRNA target sequence
aactacacagtaaaaaaggag

SEQ ID NO: 14026 - DNA, 21 bp, Artificial sequence
  SiRNA target sequence
actacacagtaaaaaaggaga

SEQ ID NO: 14027 - DNA, 21 bp, Artificial sequence
  SiRNA target sequence
ctacacagtaaaaaaggagaa

SEQ ID NO: 14028 - DNA, 21 bp, Artificial sequence
  SiRNA target sequence
tacacagtaaaaaaggagaaa

SEQ ID NO: 14029 - DNA, 21 bp, Artificial sequence
  SiRNA target sequence
acacagtaaaaaaggagaaat

SEQ ID NO: 14030 - DNA, 21 bp, Artificial sequence
  SiRNA target sequence
cacagtaaaaaaggagaaatt

SEQ ID NO: 14031 - DNA, 21 bp, Artificial sequence
  SiRNA target sequence
acagtaaaaaaggagaaatta

SEQ ID NO: 14032 - DNA, 21 bp, Artificial sequence
  SiRNA target sequence
cagtaaaaaaggagaaattat

SEQ ID NO: 14033 - DNA, 21 bp, Artificial sequence
  SiRNA target sequence
agtaaaaaaggagaaattatc

SEQ ID NO: 14034 - DNA, 21 bp, Artificial sequence
  SiRNA target sequence
gtaaaaaaggagaaattatcg

SEQ ID NO: 14035 - DNA, 21 bp, Artificial sequence
  SiRNA target sequence
taaaaaaggagaaattatcgg

SEQ ID NO: 14036 - DNA, 21 bp, Artificial sequence
  SiRNA target sequence
aaaaaaggagaaattatcgga

SEQ ID NO: 14037 - DNA, 21 bp, Artificial sequence
  SiRNA target sequence
aaaaaggagaaattatcggat

SEQ ID NO: 14038 - DNA, 21 bp, Artificial sequence
  SiRNA target sequence
aaaaggagaaattatcggatg

SEQ ID NO: 14039 - DNA, 21 bp, Artificial sequence
  SiRNA target sequence
aaaggagaaattatcggatgt

SEQ ID NO: 14040 - DNA, 21 bp, Artificial sequence
  SiRNA target sequence
aaggagaaattatcggatgtg

SEQ ID NO: 14041 - DNA, 21 bp, Artificial sequence
  SiRNA target sequence
aggagaaattatcggatgtgt

SEQ ID NO: 14042 - DNA, 21 bp, Artificial sequence
  SiRNA target sequence
ggagaaattatcggatgtgta

SEQ ID NO: 14043 - DNA, 21 bp, Artificial sequence
  SiRNA target sequence
gagaaattatcggatgtgtag

SEQ ID NO: 14044 - DNA, 21 bp, Artificial sequence
  SiRNA target sequence
agaaattatcggatgtgtaga

SEQ ID NO: 14045 - DNA, 21 bp, Artificial sequence
  SiRNA target sequence
gaaattatcggatgtgtagat

SEQ ID NO: 14046 - DNA, 21 bp, Artificial sequence
  SiRNA target sequence
aaattatcggatgtgtagata

SEQ ID NO: 14047 - DNA, 21 bp, Artificial sequence
  SiRNA target sequence
aattatcggatgtgtagataa

SEQ ID NO: 14048 - DNA, 21 bp, Artificial sequence
  SiRNA target sequence
attatcggatgtgtagataac

SEQ ID NO: 14049 - DNA, 21 bp, Artificial sequence
  SiRNA target sequence
ttatcggatgtgtagataaca

SEQ ID NO: 14050 - DNA, 21 bp, Artificial sequence
  SiRNA target sequence
tatcggatgtgtagataacaa

SEQ ID NO: 14051 - DNA, 21 bp, Artificial sequence
  SiRNA target sequence
atcggatgtgtagataacaat

SEQ ID NO: 14052 - DNA, 21 bp, Artificial sequence
  SiRNA target sequence
tcggatgtgtagataacaatc

SEQ ID NO: 14053 - DNA, 21 bp, Artificial sequence
  SiRNA target sequence
cggatgtgtagataacaatca

SEQ ID NO: 14054 - DNA, 21 bp, Artificial sequence
  SiRNA target sequence
ggatgtgtagataacaatcat

SEQ ID NO: 14055 - DNA, 21 bp, Artificial sequence
  SiRNA target sequence
gatgtgtagataacaatcata

SEQ ID NO: 14056 - DNA, 21 bp, Artificial sequence
  SiRNA target sequence
atgtgtagataacaatcatat

SEQ ID NO: 14057 - DNA, 21 bp, Artificial sequence
  SiRNA target sequence
tgtgtagataacaatcatatt

SEQ ID NO: 14058 - DNA, 21 bp, Artificial sequence
  SiRNA target sequence
gtgtagataacaatcatattt

SEQ ID NO: 14059 - DNA, 21 bp, Artificial sequence
  SiRNA target sequence
tgtagataacaatcatatttt

SEQ ID NO: 14060 - DNA, 21 bp, Artificial sequence
  SiRNA target sequence
gtagataacaatcatatttta

SEQ ID NO: 14061 - DNA, 21 bp, Artificial sequence
  SiRNA target sequence
tagataacaatcatattttaa

SEQ ID NO: 14062 - DNA, 21 bp, Artificial sequence
  SiRNA target sequence
agataacaatcatattttaag

SEQ ID NO: 14063 - DNA, 21 bp, Artificial sequence
  SiRNA target sequence
gataacaatcatattttaagc

SEQ ID NO: 14064 - DNA, 21 bp, Artificial sequence
  SiRNA target sequence
ataacaatcatattttaagca

SEQ ID NO: 14065 - DNA, 21 bp, Artificial sequence
  SiRNA target sequence
taacaatcatattttaagcat

SEQ ID NO: 14066 - DNA, 21 bp, Artificial sequence
  SiRNA target sequence
aacaatcatattttaagcata

SEQ ID NO: 14067 - DNA, 21 bp, Artificial sequence
  SiRNA target sequence
acaatcatattttaagcataa

SEQ ID NO: 14068 - DNA, 21 bp, Artificial sequence
  SiRNA target sequence
caatcatattttaagcataat

SEQ ID NO: 14069 - DNA, 21 bp, Artificial sequence
  SiRNA target sequence
aatcatattttaagcataatt

SEQ ID NO: 14070 - DNA, 21 bp, Artificial sequence
  SiRNA target sequence
atcatattttaagcataattt

SEQ ID NO: 14071 - DNA, 21 bp, Artificial sequence
  SiRNA target sequence
tcatattttaagcataattta

SEQ ID NO: 14072 - DNA, 21 bp, Artificial sequence
  SiRNA target sequence
catattttaagcataatttat

SEQ ID NO: 14073 - DNA, 21 bp, Artificial sequence
  SiRNA target sequence
atattttaagcataatttata

SEQ ID NO: 14074 - DNA, 21 bp, Artificial sequence
  SiRNA target sequence
tattttaagcataatttataa

SEQ ID NO: 14075 - DNA, 21 bp, Artificial sequence
  SiRNA target sequence
attttaagcataatttataat

SEQ ID NO: 14076 - DNA, 21 bp, Artificial sequence
  SiRNA target sequence
ttttaagcataatttataatg

SEQ ID NO: 14077 - DNA, 21 bp, Artificial sequence
  SiRNA target sequence
tttaagcataatttataatga

SEQ ID NO: 14078 - DNA, 21 bp, Artificial sequence
  SiRNA target sequence
ttaagcataatttataatgat

SEQ ID NO: 14079 - DNA, 21 bp, Artificial sequence
  SiRNA target sequence
taagcataatttataatgata

SEQ ID NO: 14080 - DNA, 21 bp, Artificial sequence
  SiRNA target sequence
aagcataatttataatgataa

SEQ ID NO: 14081 - DNA, 21 bp, Artificial sequence
  SiRNA target sequence
agcataatttataatgataaa

SEQ ID NO: 14082 - DNA, 21 bp, Artificial sequence
  SiRNA target sequence
gcataatttataatgataaat

SEQ ID NO: 14083 - DNA, 21 bp, Artificial sequence
  SiRNA target sequence
cataatttataatgataaatt

SEQ ID NO: 14084 - DNA, 21 bp, Artificial sequence
  SiRNA target sequence
ataatttataatgataaatta

SEQ ID NO: 14085 - DNA, 21 bp, Artificial sequence
  SiRNA target sequence
taatttataatgataaattat

SEQ ID NO: 14086 - DNA, 21 bp, Artificial sequence
  SiRNA target sequence
aatttataatgataaattatc

SEQ ID NO: 14087 - DNA, 21 bp, Artificial sequence
  SiRNA target sequence
atttataatgataaattatct

SEQ ID NO: 14088 - DNA, 21 bp, Artificial sequence
  SiRNA target sequence
tttataatgataaattatctg

SEQ ID NO: 14089 - DNA, 21 bp, Artificial sequence
  SiRNA target sequence
ttataatgataaattatctga

SEQ ID NO: 14090 - DNA, 21 bp, Artificial sequence
  SiRNA target sequence
tataatgataaattatctgaa

SEQ ID NO: 14091 - DNA, 21 bp, Artificial sequence
  SiRNA target sequence
ataatgataaattatctgaag

SEQ ID NO: 14092 - DNA, 21 bp, Artificial sequence
  SiRNA target sequence
taatgataaattatctgaagg

SEQ ID NO: 14093 - DNA, 21 bp, Artificial sequence
  SiRNA target sequence
aatgataaattatctgaaggg

SEQ ID NO: 14094 - DNA, 21 bp, Artificial sequence
  SiRNA target sequence
atgataaattatctgaagggt

SEQ ID NO: 14095 - DNA, 21 bp, Artificial sequence
  SiRNA target sequence
tgataaattatctgaagggtt

SEQ ID NO: 14096 - DNA, 21 bp, Artificial sequence
  SiRNA target sequence
gataaattatctgaagggtta

SEQ ID NO: 14097 - DNA, 21 bp, Artificial sequence
  SiRNA target sequence
ataaattatctgaagggttaa

SEQ ID NO: 14098 - DNA, 21 bp, Artificial sequence
  SiRNA target sequence
taaattatctgaagggttaac

SEQ ID NO: 14099 - DNA, 21 bp, Artificial sequence
  SiRNA target sequence
aaattatctgaagggttaaca

SEQ ID NO: 14100 - DNA, 21 bp, Artificial sequence
  SiRNA target sequence
aattatctgaagggttaacac

SEQ ID NO: 14101 - DNA, 21 bp, Artificial sequence
  SiRNA target sequence
attatctgaagggttaacact

SEQ ID NO: 14102 - DNA, 21 bp, Artificial sequence
  SiRNA target sequence
ttatctgaagggttaacactt

SEQ ID NO: 14103 - DNA, 21 bp, Artificial sequence
  SiRNA target sequence
tatctgaagggttaacactta

SEQ ID NO: 14104 - DNA, 21 bp, Artificial sequence
  SiRNA target sequence
atctgaagggttaacacttaa

SEQ ID NO: 14105 - DNA, 21 bp, Artificial sequence
  SiRNA target sequence
tctgaagggttaacacttaat

SEQ ID NO: 14106 - DNA, 21 bp, Artificial sequence
  SiRNA target sequence
ctgaagggttaacacttaatt

SEQ ID NO: 14107 - DNA, 21 bp, Artificial sequence
  SiRNA target sequence
tgaagggttaacacttaattt

SEQ ID NO: 14108 - DNA, 21 bp, Artificial sequence
  SiRNA target sequence
gaagggttaacacttaatttg

SEQ ID NO: 14109 - DNA, 21 bp, Artificial sequence
  SiRNA target sequence
aagggttaacacttaatttga

SEQ ID NO: 14110 - DNA, 21 bp, Artificial sequence
  SiRNA target sequence
agggttaacacttaatttgag

SEQ ID NO: 14111 - DNA, 21 bp, Artificial sequence
  SiRNA target sequence
gggttaacacttaatttgagt

SEQ ID NO: 14112 - DNA, 21 bp, Artificial sequence
  SiRNA target sequence
ggttaacacttaatttgagtt

SEQ ID NO: 14113 - DNA, 21 bp, Artificial sequence
  SiRNA target sequence
gttaacacttaatttgagttg

SEQ ID NO: 14114 - DNA, 21 bp, Artificial sequence
  SiRNA target sequence
ttaacacttaatttgagttgt

SEQ ID NO: 14115 - DNA, 21 bp, Artificial sequence
  SiRNA target sequence
taacacttaatttgagttgta

SEQ ID NO: 14116 - DNA, 21 bp, Artificial sequence
  SiRNA target sequence
aacacttaatttgagttgtag

SEQ ID NO: 14117 - DNA, 21 bp, Artificial sequence
  SiRNA target sequence
acacttaatttgagttgtaga

SEQ ID NO: 14118 - DNA, 21 bp, Artificial sequence
  SiRNA target sequence
cacttaatttgagttgtagat

SEQ ID NO: 14119 - DNA, 21 bp, Artificial sequence
  SiRNA target sequence
acttaatttgagttgtagatt

SEQ ID NO: 14120 - DNA, 21 bp, Artificial sequence
  SiRNA target sequence
cttaatttgagttgtagattt

SEQ ID NO: 14121 - DNA, 21 bp, Artificial sequence
  SiRNA target sequence
ttaatttgagttgtagatttg

SEQ ID NO: 14122 - DNA, 21 bp, Artificial sequence
  SiRNA target sequence
taatttgagttgtagatttgg

SEQ ID NO: 14123 - DNA, 21 bp, Artificial sequence
  SiRNA target sequence
aatttgagttgtagatttggt

SEQ ID NO: 14124 - DNA, 21 bp, Artificial sequence
  SiRNA target sequence
atttgagttgtagatttggta

SEQ ID NO: 14125 - DNA, 21 bp, Artificial sequence
  SiRNA target sequence
tttgagttgtagatttggtaa

SEQ ID NO: 14126 - DNA, 21 bp, Artificial sequence
  SiRNA target sequence
ttgagttgtagatttggtaag

SEQ ID NO: 14127 - DNA, 21 bp, Artificial sequence
  SiRNA target sequence
tgagttgtagatttggtaaga

SEQ ID NO: 14128 - DNA, 21 bp, Artificial sequence
  SiRNA target sequence
gagttgtagatttggtaagaa

SEQ ID NO: 14129 - DNA, 21 bp, Artificial sequence
  SiRNA target sequence
agttgtagatttggtaagaaa

SEQ ID NO: 14130 - DNA, 21 bp, Artificial sequence
  SiRNA target sequence
gttgtagatttggtaagaaag

SEQ ID NO: 14131 - DNA, 21 bp, Artificial sequence
  SiRNA target sequence
ttgtagatttggtaagaaagt

SEQ ID NO: 14132 - DNA, 21 bp, Artificial sequence
  SiRNA target sequence
tgtagatttggtaagaaagta

SEQ ID NO: 14133 - DNA, 21 bp, Artificial sequence
  SiRNA target sequence
gtagatttggtaagaaagtat

SEQ ID NO: 14134 - DNA, 21 bp, Artificial sequence
  SiRNA target sequence
tagatttggtaagaaagtatt

SEQ ID NO: 14135 - DNA, 21 bp, Artificial sequence
  SiRNA target sequence
agatttggtaagaaagtattt

SEQ ID NO: 14136 - DNA, 21 bp, Artificial sequence
  SiRNA target sequence
gatttggtaagaaagtatttg

SEQ ID NO: 14137 - DNA, 21 bp, Artificial sequence
  SiRNA target sequence
atttggtaagaaagtatttga

SEQ ID NO: 14138 - DNA, 21 bp, Artificial sequence
  SiRNA target sequence
tttggtaagaaagtatttgat

SEQ ID NO: 14139 - DNA, 21 bp, Artificial sequence
  SiRNA target sequence
ttggtaagaaagtatttgatt

SEQ ID NO: 14140 - DNA, 21 bp, Artificial sequence
  SiRNA target sequence
tggtaagaaagtatttgatta

SEQ ID NO: 14141 - DNA, 21 bp, Artificial sequence
  SiRNA target sequence
ggtaagaaagtatttgattat

SEQ ID NO: 14142 - DNA, 21 bp, Artificial sequence
  SiRNA target sequence
gtaagaaagtatttgattatg

SEQ ID NO: 14143 - DNA, 21 bp, Artificial sequence
  SiRNA target sequence
taagaaagtatttgattatgg

SEQ ID NO: 14144 - DNA, 21 bp, Artificial sequence
  SiRNA target sequence
aagaaagtatttgattatggc

SEQ ID NO: 14145 - DNA, 21 bp, Artificial sequence
  SiRNA target sequence
agaaagtatttgattatggct

SEQ ID NO: 14146 - DNA, 21 bp, Artificial sequence
  SiRNA target sequence
gaaagtatttgattatggcta

SEQ ID NO: 14147 - DNA, 21 bp, Artificial sequence
  SiRNA target sequence
aaagtatttgattatggctat

SEQ ID NO: 14148 - DNA, 21 bp, Artificial sequence
  SiRNA target sequence
aagtatttgattatggctatg

SEQ ID NO: 14149 - DNA, 21 bp, Artificial sequence
  SiRNA target sequence
agtatttgattatggctatgg

SEQ ID NO: 14150 - DNA, 21 bp, Artificial sequence
  SiRNA target sequence
gtatttgattatggctatggg

SEQ ID NO: 14151 - DNA, 21 bp, Artificial sequence
  SiRNA target sequence
tatttgattatggctatgggt

SEQ ID NO: 14152 - DNA, 21 bp, Artificial sequence
  SiRNA target sequence
atttgattatggctatgggtt

SEQ ID NO: 14153 - DNA, 21 bp, Artificial sequence
  SiRNA target sequence
tttgattatggctatgggttt

SEQ ID NO: 14154 - DNA, 21 bp, Artificial sequence
  SiRNA target sequence
ttgattatggctatgggttta

SEQ ID NO: 14155 - DNA, 21 bp, Artificial sequence
  SiRNA target sequence
tgattatggctatgggtttat

SEQ ID NO: 14156 - DNA, 21 bp, Artificial sequence
  SiRNA target sequence
gattatggctatgggtttatt

SEQ ID NO: 14157 - DNA, 21 bp, Artificial sequence
  SiRNA target sequence
attatggctatgggtttattt

SEQ ID NO: 14158 - DNA, 21 bp, Artificial sequence
  SiRNA target sequence
ttatggctatgggtttattta

SEQ ID NO: 14159 - DNA, 21 bp, Artificial sequence
  SiRNA target sequence
tatggctatgggtttatttat

SEQ ID NO: 14160 - DNA, 21 bp, Artificial sequence
  SiRNA target sequence
atggctatgggtttatttatg

SEQ ID NO: 14161 - DNA, 21 bp, Artificial sequence
  SiRNA target sequence
tggctatgggtttatttatga

SEQ ID NO: 14162 - DNA, 21 bp, Artificial sequence
  SiRNA target sequence
ggctatgggtttatttatgaa

SEQ ID NO: 14163 - DNA, 21 bp, Artificial sequence
  SiRNA target sequence
gctatgggtttatttatgaat

SEQ ID NO: 14164 - DNA, 21 bp, Artificial sequence
  SiRNA target sequence
ctatgggtttatttatgaatt

SEQ ID NO: 14165 - DNA, 21 bp, Artificial sequence
  SiRNA target sequence
tatgggtttatttatgaattt

SEQ ID NO: 14166 - DNA, 21 bp, Artificial sequence
  SiRNA target sequence
atgggtttatttatgaatttt

SEQ ID NO: 14167 - DNA, 21 bp, Artificial sequence
  SiRNA target sequence
tgggtttatttatgaatttta

SEQ ID NO: 14168 - DNA, 21 bp, Artificial sequence
  SiRNA target sequence
gggtttatttatgaattttaa

SEQ ID NO: 14169 - DNA, 22 bp, Artificial sequence
  SiRNA target sequence
atgaaatctttctacaaaaaaa

SEQ ID NO: 14170 - DNA, 22 bp, Artificial sequence
  SiRNA target sequence
tgaaatctttctacaaaaaaat

SEQ ID NO: 14171 - DNA, 22 bp, Artificial sequence
  SiRNA target sequence
gaaatctttctacaaaaaaata

SEQ ID NO: 14172 - DNA, 22 bp, Artificial sequence
  SiRNA target sequence
aaatctttctacaaaaaaataa

SEQ ID NO: 14173 - DNA, 22 bp, Artificial sequence
  SiRNA target sequence
aatctttctacaaaaaaataaa

SEQ ID NO: 14174 - DNA, 22 bp, Artificial sequence
  SiRNA target sequence
atctttctacaaaaaaataaaa

SEQ ID NO: 14175 - DNA, 22 bp, Artificial sequence
  SiRNA target sequence
tctttctacaaaaaaataaaaa

SEQ ID NO: 14176 - DNA, 22 bp, Artificial sequence
  SiRNA target sequence
ctttctacaaaaaaataaaaag

SEQ ID NO: 14177 - DNA, 22 bp, Artificial sequence
  SiRNA target sequence
tttctacaaaaaaataaaaagt

SEQ ID NO: 14178 - DNA, 22 bp, Artificial sequence
  SiRNA target sequence
ttctacaaaaaaataaaaagtt

SEQ ID NO: 14179 - DNA, 22 bp, Artificial sequence
  SiRNA target sequence
tctacaaaaaaataaaaagtta

SEQ ID NO: 14180 - DNA, 22 bp, Artificial sequence
  SiRNA target sequence
ctacaaaaaaataaaaagttat

SEQ ID NO: 14181 - DNA, 22 bp, Artificial sequence
  SiRNA target sequence
tacaaaaaaataaaaagttatt

SEQ ID NO: 14182 - DNA, 22 bp, Artificial sequence
  SiRNA target sequence
acaaaaaaataaaaagttattt

SEQ ID NO: 14183 - DNA, 22 bp, Artificial sequence
  SiRNA target sequence
caaaaaaataaaaagttattta

SEQ ID NO: 14184 - DNA, 22 bp, Artificial sequence
  SiRNA target sequence
aaaaaaataaaaagttatttat

SEQ ID NO: 14185 - DNA, 22 bp, Artificial sequence
  SiRNA target sequence
aaaaaataaaaagttatttatt

SEQ ID NO: 14186 - DNA, 22 bp, Artificial sequence
  SiRNA target sequence
aaaaataaaaagttatttattc

SEQ ID NO: 14187 - DNA, 22 bp, Artificial sequence
  SiRNA target sequence
aaaataaaaagttatttattca

SEQ ID NO: 14188 - DNA, 22 bp, Artificial sequence
  SiRNA target sequence
aaataaaaagttatttattcaa

SEQ ID NO: 14189 - DNA, 22 bp, Artificial sequence
  SiRNA target sequence
aataaaaagttatttattcaaa

SEQ ID NO: 14190 - DNA, 22 bp, Artificial sequence
  SiRNA target sequence
ataaaaagttatttattcaaat

SEQ ID NO: 14191 - DNA, 22 bp, Artificial sequence
  SiRNA target sequence
taaaaagttatttattcaaatc

SEQ ID NO: 14192 - DNA, 22 bp, Artificial sequence
  SiRNA target sequence
aaaaagttatttattcaaatct

SEQ ID NO: 14193 - DNA, 22 bp, Artificial sequence
  SiRNA target sequence
aaaagttatttattcaaatctg

SEQ ID NO: 14194 - DNA, 22 bp, Artificial sequence
  SiRNA target sequence
aaagttatttattcaaatctgc

SEQ ID NO: 14195 - DNA, 22 bp, Artificial sequence
  SiRNA target sequence
aagttatttattcaaatctgcc

SEQ ID NO: 14196 - DNA, 22 bp, Artificial sequence
  SiRNA target sequence
agttatttattcaaatctgcca

SEQ ID NO: 14197 - DNA, 22 bp, Artificial sequence
  SiRNA target sequence
gttatttattcaaatctgccat

SEQ ID NO: 14198 - DNA, 22 bp, Artificial sequence
  SiRNA target sequence
ttatttattcaaatctgccatt

SEQ ID NO: 14199 - DNA, 22 bp, Artificial sequence
  SiRNA target sequence
tatttattcaaatctgccatta

SEQ ID NO: 14200 - DNA, 22 bp, Artificial sequence
  SiRNA target sequence
atttattcaaatctgccattaa

SEQ ID NO: 14201 - DNA, 22 bp, Artificial sequence
  SiRNA target sequence
tttattcaaatctgccattaat

SEQ ID NO: 14202 - DNA, 22 bp, Artificial sequence
  SiRNA target sequence
ttattcaaatctgccattaata

SEQ ID NO: 14203 - DNA, 22 bp, Artificial sequence
  SiRNA target sequence
tattcaaatctgccattaatac

SEQ ID NO: 14204 - DNA, 22 bp, Artificial sequence
  SiRNA target sequence
attcaaatctgccattaataca

SEQ ID NO: 14205 - DNA, 22 bp, Artificial sequence
  SiRNA target sequence
ttcaaatctgccattaatacat

SEQ ID NO: 14206 - DNA, 22 bp, Artificial sequence
  SiRNA target sequence
tcaaatctgccattaatacatc

SEQ ID NO: 14207 - DNA, 22 bp, Artificial sequence
  SiRNA target sequence
caaatctgccattaatacatct

SEQ ID NO: 14208 - DNA, 22 bp, Artificial sequence
  SiRNA target sequence
aaatctgccattaatacatctt

SEQ ID NO: 14209 - DNA, 22 bp, Artificial sequence
  SiRNA target sequence
aatctgccattaatacatcttt

SEQ ID NO: 14210 - DNA, 22 bp, Artificial sequence
  SiRNA target sequence
atctgccattaatacatctttt

SEQ ID NO: 14211 - DNA, 22 bp, Artificial sequence
  SiRNA target sequence
tctgccattaatacatcttttg

SEQ ID NO: 14212 - DNA, 22 bp, Artificial sequence
  SiRNA target sequence
ctgccattaatacatcttttga

SEQ ID NO: 14213 - DNA, 22 bp, Artificial sequence
  SiRNA target sequence
tgccattaatacatcttttgat

SEQ ID NO: 14214 - DNA, 22 bp, Artificial sequence
  SiRNA target sequence
gccattaatacatcttttgata

SEQ ID NO: 14215 - DNA, 22 bp, Artificial sequence
  SiRNA target sequence
ccattaatacatcttttgatac

SEQ ID NO: 14216 - DNA, 22 bp, Artificial sequence
  SiRNA target sequence
cattaatacatcttttgatact

SEQ ID NO: 14217 - DNA, 22 bp, Artificial sequence
  SiRNA target sequence
attaatacatcttttgatactt

SEQ ID NO: 14218 - DNA, 22 bp, Artificial sequence
  SiRNA target sequence
ttaatacatcttttgatacttt

SEQ ID NO: 14219 - DNA, 22 bp, Artificial sequence
  SiRNA target sequence
taatacatcttttgatactttt

SEQ ID NO: 14220 - DNA, 22 bp, Artificial sequence
  SiRNA target sequence
aatacatcttttgatactttta

SEQ ID NO: 14221 - DNA, 22 bp, Artificial sequence
  SiRNA target sequence
atacatcttttgatacttttaa

SEQ ID NO: 14222 - DNA, 22 bp, Artificial sequence
  SiRNA target sequence
tacatcttttgatacttttaat

SEQ ID NO: 14223 - DNA, 22 bp, Artificial sequence
  SiRNA target sequence
acatcttttgatacttttaatt

SEQ ID NO: 14224 - DNA, 22 bp, Artificial sequence
  SiRNA target sequence
catcttttgatacttttaattt

SEQ ID NO: 14225 - DNA, 22 bp, Artificial sequence
  SiRNA target sequence
atcttttgatacttttaattta

SEQ ID NO: 14226 - DNA, 22 bp, Artificial sequence
  SiRNA target sequence
tcttttgatacttttaatttag

SEQ ID NO: 14227 - DNA, 22 bp, Artificial sequence
  SiRNA target sequence
cttttgatacttttaatttaga

SEQ ID NO: 14228 - DNA, 22 bp, Artificial sequence
  SiRNA target sequence
ttttgatacttttaatttagaa

SEQ ID NO: 14229 - DNA, 22 bp, Artificial sequence
  SiRNA target sequence
tttgatacttttaatttagaaa

SEQ ID NO: 14230 - DNA, 22 bp, Artificial sequence
  SiRNA target sequence
ttgatacttttaatttagaaaa

SEQ ID NO: 14231 - DNA, 22 bp, Artificial sequence
  SiRNA target sequence
tgatacttttaatttagaaaat

SEQ ID NO: 14232 - DNA, 22 bp, Artificial sequence
  SiRNA target sequence
gatacttttaatttagaaaatg

SEQ ID NO: 14233 - DNA, 22 bp, Artificial sequence
  SiRNA target sequence
atacttttaatttagaaaatgt

SEQ ID NO: 14234 - DNA, 22 bp, Artificial sequence
  SiRNA target sequence
tacttttaatttagaaaatgta

SEQ ID NO: 14235 - DNA, 22 bp, Artificial sequence
  SiRNA target sequence
acttttaatttagaaaatgtaa

SEQ ID NO: 14236 - DNA, 22 bp, Artificial sequence
  SiRNA target sequence
cttttaatttagaaaatgtaag

SEQ ID NO: 14237 - DNA, 22 bp, Artificial sequence
  SiRNA target sequence
ttttaatttagaaaatgtaagc

SEQ ID NO: 14238 - DNA, 22 bp, Artificial sequence
  SiRNA target sequence
tttaatttagaaaatgtaagca

SEQ ID NO: 14239 - DNA, 22 bp, Artificial sequence
  SiRNA target sequence
ttaatttagaaaatgtaagcat

SEQ ID NO: 14240 - DNA, 22 bp, Artificial sequence
  SiRNA target sequence
taatttagaaaatgtaagcatt

SEQ ID NO: 14241 - DNA, 22 bp, Artificial sequence
  SiRNA target sequence
aatttagaaaatgtaagcatta

SEQ ID NO: 14242 - DNA, 22 bp, Artificial sequence
  SiRNA target sequence
atttagaaaatgtaagcattac

SEQ ID NO: 14243 - DNA, 22 bp, Artificial sequence
  SiRNA target sequence
tttagaaaatgtaagcattact

SEQ ID NO: 14244 - DNA, 22 bp, Artificial sequence
  SiRNA target sequence
ttagaaaatgtaagcattacta

SEQ ID NO: 14245 - DNA, 22 bp, Artificial sequence
  SiRNA target sequence
tagaaaatgtaagcattactag

SEQ ID NO: 14246 - DNA, 22 bp, Artificial sequence
  SiRNA target sequence
agaaaatgtaagcattactagc

SEQ ID NO: 14247 - DNA, 22 bp, Artificial sequence
  SiRNA target sequence
gaaaatgtaagcattactagct

SEQ ID NO: 14248 - DNA, 22 bp, Artificial sequence
  SiRNA target sequence
aaaatgtaagcattactagctt

SEQ ID NO: 14249 - DNA, 22 bp, Artificial sequence
  SiRNA target sequence
aaatgtaagcattactagctta

SEQ ID NO: 14250 - DNA, 22 bp, Artificial sequence
  SiRNA target sequence
aatgtaagcattactagcttaa

SEQ ID NO: 14251 - DNA, 22 bp, Artificial sequence
  SiRNA target sequence
atgtaagcattactagcttaaa

SEQ ID NO: 14252 - DNA, 22 bp, Artificial sequence
  SiRNA target sequence
tgtaagcattactagcttaaat

SEQ ID NO: 14253 - DNA, 22 bp, Artificial sequence
  SiRNA target sequence
gtaagcattactagcttaaata

SEQ ID NO: 14254 - DNA, 22 bp, Artificial sequence
  SiRNA target sequence
taagcattactagcttaaatac

SEQ ID NO: 14255 - DNA, 22 bp, Artificial sequence
  SiRNA target sequence
aagcattactagcttaaatacg

SEQ ID NO: 14256 - DNA, 22 bp, Artificial sequence
  SiRNA target sequence
agcattactagcttaaatacgt

SEQ ID NO: 14257 - DNA, 22 bp, Artificial sequence
  SiRNA target sequence
gcattactagcttaaatacgta

SEQ ID NO: 14258 - DNA, 22 bp, Artificial sequence
  SiRNA target sequence
cattactagcttaaatacgtac

SEQ ID NO: 14259 - DNA, 22 bp, Artificial sequence
  SiRNA target sequence
attactagcttaaatacgtaca

SEQ ID NO: 14260 - DNA, 22 bp, Artificial sequence
  SiRNA target sequence
ttactagcttaaatacgtacac

SEQ ID NO: 14261 - DNA, 22 bp, Artificial sequence
  SiRNA target sequence
tactagcttaaatacgtacacc

SEQ ID NO: 14262 - DNA, 22 bp, Artificial sequence
  SiRNA target sequence
actagcttaaatacgtacaccg

SEQ ID NO: 14263 - DNA, 22 bp, Artificial sequence
  SiRNA target sequence
ctagcttaaatacgtacaccgg

SEQ ID NO: 14264 - DNA, 22 bp, Artificial sequence
  SiRNA target sequence
tagcttaaatacgtacaccggt

SEQ ID NO: 14265 - DNA, 22 bp, Artificial sequence
  SiRNA target sequence
agcttaaatacgtacaccggtg

SEQ ID NO: 14266 - DNA, 22 bp, Artificial sequence
  SiRNA target sequence
gcttaaatacgtacaccggtgt

SEQ ID NO: 14267 - DNA, 22 bp, Artificial sequence
  SiRNA target sequence
cttaaatacgtacaccggtgtt

SEQ ID NO: 14268 - DNA, 22 bp, Artificial sequence
  SiRNA target sequence
ttaaatacgtacaccggtgtta

SEQ ID NO: 14269 - DNA, 22 bp, Artificial sequence
  SiRNA target sequence
taaatacgtacaccggtgttaa

SEQ ID NO: 14270 - DNA, 22 bp, Artificial sequence
  SiRNA target sequence
aaatacgtacaccggtgttaaa

SEQ ID NO: 14271 - DNA, 22 bp, Artificial sequence
  SiRNA target sequence
aatacgtacaccggtgttaaaa

SEQ ID NO: 14272 - DNA, 22 bp, Artificial sequence
  SiRNA target sequence
atacgtacaccggtgttaaaac

SEQ ID NO: 14273 - DNA, 22 bp, Artificial sequence
  SiRNA target sequence
tacgtacaccggtgttaaaacc

SEQ ID NO: 14274 - DNA, 22 bp, Artificial sequence
  SiRNA target sequence
acgtacaccggtgttaaaaccg

SEQ ID NO: 14275 - DNA, 22 bp, Artificial sequence
  SiRNA target sequence
cgtacaccggtgttaaaaccga

SEQ ID NO: 14276 - DNA, 22 bp, Artificial sequence
  SiRNA target sequence
gtacaccggtgttaaaaccgaa

SEQ ID NO: 14277 - DNA, 22 bp, Artificial sequence
  SiRNA target sequence
tacaccggtgttaaaaccgaaa

SEQ ID NO: 14278 - DNA, 22 bp, Artificial sequence
  SiRNA target sequence
acaccggtgttaaaaccgaaat

SEQ ID NO: 14279 - DNA, 22 bp, Artificial sequence
  SiRNA target sequence
caccggtgttaaaaccgaaata

SEQ ID NO: 14280 - DNA, 22 bp, Artificial sequence
  SiRNA target sequence
accggtgttaaaaccgaaatat

SEQ ID NO: 14281 - DNA, 22 bp, Artificial sequence
  SiRNA target sequence
ccggtgttaaaaccgaaatatc

SEQ ID NO: 14282 - DNA, 22 bp, Artificial sequence
  SiRNA target sequence
cggtgttaaaaccgaaatatca

SEQ ID NO: 14283 - DNA, 22 bp, Artificial sequence
  SiRNA target sequence
ggtgttaaaaccgaaatatcaa

SEQ ID NO: 14284 - DNA, 22 bp, Artificial sequence
  SiRNA target sequence
gtgttaaaaccgaaatatcaaa

SEQ ID NO: 14285 - DNA, 22 bp, Artificial sequence
  SiRNA target sequence
tgttaaaaccgaaatatcaaaa

SEQ ID NO: 14286 - DNA, 22 bp, Artificial sequence
  SiRNA target sequence
gttaaaaccgaaatatcaaaaa

SEQ ID NO: 14287 - DNA, 22 bp, Artificial sequence
  SiRNA target sequence
ttaaaaccgaaatatcaaaaac

SEQ ID NO: 14288 - DNA, 22 bp, Artificial sequence
  SiRNA target sequence
taaaaccgaaatatcaaaaacc

SEQ ID NO: 14289 - DNA, 22 bp, Artificial sequence
  SiRNA target sequence
aaaaccgaaatatcaaaaaccg

SEQ ID NO: 14290 - DNA, 22 bp, Artificial sequence
  SiRNA target sequence
aaaccgaaatatcaaaaaccgt

SEQ ID NO: 14291 - DNA, 22 bp, Artificial sequence
  SiRNA target sequence
aaccgaaatatcaaaaaccgta

SEQ ID NO: 14292 - DNA, 22 bp, Artificial sequence
  SiRNA target sequence
accgaaatatcaaaaaccgtat

SEQ ID NO: 14293 - DNA, 22 bp, Artificial sequence
  SiRNA target sequence
ccgaaatatcaaaaaccgtatc

SEQ ID NO: 14294 - DNA, 22 bp, Artificial sequence
  SiRNA target sequence
cgaaatatcaaaaaccgtatca

SEQ ID NO: 14295 - DNA, 22 bp, Artificial sequence
  SiRNA target sequence
gaaatatcaaaaaccgtatcac

SEQ ID NO: 14296 - DNA, 22 bp, Artificial sequence
  SiRNA target sequence
aaatatcaaaaaccgtatcacc

SEQ ID NO: 14297 - DNA, 22 bp, Artificial sequence
  SiRNA target sequence
aatatcaaaaaccgtatcacca

SEQ ID NO: 14298 - DNA, 22 bp, Artificial sequence
  SiRNA target sequence
atatcaaaaaccgtatcaccac

SEQ ID NO: 14299 - DNA, 22 bp, Artificial sequence
  SiRNA target sequence
tatcaaaaaccgtatcaccaca

SEQ ID NO: 14300 - DNA, 22 bp, Artificial sequence
  SiRNA target sequence
atcaaaaaccgtatcaccacac

SEQ ID NO: 14301 - DNA, 22 bp, Artificial sequence
  SiRNA target sequence
tcaaaaaccgtatcaccacact

SEQ ID NO: 14302 - DNA, 22 bp, Artificial sequence
  SiRNA target sequence
caaaaaccgtatcaccacactt

SEQ ID NO: 14303 - DNA, 22 bp, Artificial sequence
  SiRNA target sequence
aaaaaccgtatcaccacacttc

SEQ ID NO: 14304 - DNA, 22 bp, Artificial sequence
  SiRNA target sequence
aaaaccgtatcaccacacttcc

SEQ ID NO: 14305 - DNA, 22 bp, Artificial sequence
  SiRNA target sequence
aaaccgtatcaccacacttcca

SEQ ID NO: 14306 - DNA, 22 bp, Artificial sequence
  SiRNA target sequence
aaccgtatcaccacacttccag

SEQ ID NO: 14307 - DNA, 22 bp, Artificial sequence
  SiRNA target sequence
accgtatcaccacacttccaga

SEQ ID NO: 14308 - DNA, 22 bp, Artificial sequence
  SiRNA target sequence
ccgtatcaccacacttccagat

SEQ ID NO: 14309 - DNA, 22 bp, Artificial sequence
  SiRNA target sequence
cgtatcaccacacttccagatt

SEQ ID NO: 14310 - DNA, 22 bp, Artificial sequence
  SiRNA target sequence
gtatcaccacacttccagattt

SEQ ID NO: 14311 - DNA, 22 bp, Artificial sequence
  SiRNA target sequence
tatcaccacacttccagatttc

SEQ ID NO: 14312 - DNA, 22 bp, Artificial sequence
  SiRNA target sequence
atcaccacacttccagatttct

SEQ ID NO: 14313 - DNA, 22 bp, Artificial sequence
  SiRNA target sequence
tcaccacacttccagatttctc

SEQ ID NO: 14314 - DNA, 22 bp, Artificial sequence
  SiRNA target sequence
caccacacttccagatttctca

SEQ ID NO: 14315 - DNA, 22 bp, Artificial sequence
  SiRNA target sequence
accacacttccagatttctcat

SEQ ID NO: 14316 - DNA, 22 bp, Artificial sequence
  SiRNA target sequence
ccacacttccagatttctcatg

SEQ ID NO: 14317 - DNA, 22 bp, Artificial sequence
  SiRNA target sequence
cacacttccagatttctcatgt

SEQ ID NO: 14318 - DNA, 22 bp, Artificial sequence
  SiRNA target sequence
acacttccagatttctcatgtc

SEQ ID NO: 14319 - DNA, 22 bp, Artificial sequence
  SiRNA target sequence
cacttccagatttctcatgtct

SEQ ID NO: 14320 - DNA, 22 bp, Artificial sequence
  SiRNA target sequence
acttccagatttctcatgtctc

SEQ ID NO: 14321 - DNA, 22 bp, Artificial sequence
  SiRNA target sequence
cttccagatttctcatgtctct

SEQ ID NO: 14322 - DNA, 22 bp, Artificial sequence
  SiRNA target sequence
ttccagatttctcatgtctctt

SEQ ID NO: 14323 - DNA, 22 bp, Artificial sequence
  SiRNA target sequence
tccagatttctcatgtctcttc

SEQ ID NO: 14324 - DNA, 22 bp, Artificial sequence
  SiRNA target sequence
ccagatttctcatgtctcttct

SEQ ID NO: 14325 - DNA, 22 bp, Artificial sequence
  SiRNA target sequence
cagatttctcatgtctcttcta

SEQ ID NO: 14326 - DNA, 22 bp, Artificial sequence
  SiRNA target sequence
agatttctcatgtctcttctat

SEQ ID NO: 14327 - DNA, 22 bp, Artificial sequence
  SiRNA target sequence
gatttctcatgtctcttctatg

SEQ ID NO: 14328 - DNA, 22 bp, Artificial sequence
  SiRNA target sequence
atttctcatgtctcttctatgg

SEQ ID NO: 14329 - DNA, 22 bp, Artificial sequence
  SiRNA target sequence
tttctcatgtctcttctatggg

SEQ ID NO: 14330 - DNA, 22 bp, Artificial sequence
  SiRNA target sequence
ttctcatgtctcttctatgggc

SEQ ID NO: 14331 - DNA, 22 bp, Artificial sequence
  SiRNA target sequence
tctcatgtctcttctatgggcg

SEQ ID NO: 14332 - DNA, 22 bp, Artificial sequence
  SiRNA target sequence
ctcatgtctcttctatgggcgc

SEQ ID NO: 14333 - DNA, 22 bp, Artificial sequence
  SiRNA target sequence
tcatgtctcttctatgggcgca

SEQ ID NO: 14334 - DNA, 22 bp, Artificial sequence
  SiRNA target sequence
catgtctcttctatgggcgcag

SEQ ID NO: 14335 - DNA, 22 bp, Artificial sequence
  SiRNA target sequence
atgtctcttctatgggcgcaga

SEQ ID NO: 14336 - DNA, 22 bp, Artificial sequence
  SiRNA target sequence
tgtctcttctatgggcgcagat

SEQ ID NO: 14337 - DNA, 22 bp, Artificial sequence
  SiRNA target sequence
gtctcttctatgggcgcagatt

SEQ ID NO: 14338 - DNA, 22 bp, Artificial sequence
  SiRNA target sequence
tctcttctatgggcgcagattt

SEQ ID NO: 14339 - DNA, 22 bp, Artificial sequence
  SiRNA target sequence
ctcttctatgggcgcagatttc

SEQ ID NO: 14340 - DNA, 22 bp, Artificial sequence
  SiRNA target sequence
tcttctatgggcgcagatttcg

SEQ ID NO: 14341 - DNA, 22 bp, Artificial sequence
  SiRNA target sequence
cttctatgggcgcagatttcga

SEQ ID NO: 14342 - DNA, 22 bp, Artificial sequence
  SiRNA target sequence
ttctatgggcgcagatttcgac

SEQ ID NO: 14343 - DNA, 22 bp, Artificial sequence
  SiRNA target sequence
tctatgggcgcagatttcgaca

SEQ ID NO: 14344 - DNA, 22 bp, Artificial sequence
  SiRNA target sequence
ctatgggcgcagatttcgacat

SEQ ID NO: 14345 - DNA, 22 bp, Artificial sequence
  SiRNA target sequence
tatgggcgcagatttcgacata

SEQ ID NO: 14346 - DNA, 22 bp, Artificial sequence
  SiRNA target sequence
atgggcgcagatttcgacataa

SEQ ID NO: 14347 - DNA, 22 bp, Artificial sequence
  SiRNA target sequence
tgggcgcagatttcgacataaa

SEQ ID NO: 14348 - DNA, 22 bp, Artificial sequence
  SiRNA target sequence
gggcgcagatttcgacataaaa

SEQ ID NO: 14349 - DNA, 22 bp, Artificial sequence
  SiRNA target sequence
ggcgcagatttcgacataaaac

SEQ ID NO: 14350 - DNA, 22 bp, Artificial sequence
  SiRNA target sequence
gcgcagatttcgacataaaaca

SEQ ID NO: 14351 - DNA, 22 bp, Artificial sequence
  SiRNA target sequence
cgcagatttcgacataaaacag

SEQ ID NO: 14352 - DNA, 22 bp, Artificial sequence
  SiRNA target sequence
gcagatttcgacataaaacaga

SEQ ID NO: 14353 - DNA, 22 bp, Artificial sequence
  SiRNA target sequence
cagatttcgacataaaacagac

SEQ ID NO: 14354 - DNA, 22 bp, Artificial sequence
  SiRNA target sequence
agatttcgacataaaacagaca

SEQ ID NO: 14355 - DNA, 22 bp, Artificial sequence
  SiRNA target sequence
gatttcgacataaaacagacat

SEQ ID NO: 14356 - DNA, 22 bp, Artificial sequence
  SiRNA target sequence
atttcgacataaaacagacata

SEQ ID NO: 14357 - DNA, 22 bp, Artificial sequence
  SiRNA target sequence
tttcgacataaaacagacatac

SEQ ID NO: 14358 - DNA, 22 bp, Artificial sequence
  SiRNA target sequence
ttcgacataaaacagacatacg

SEQ ID NO: 14359 - DNA, 22 bp, Artificial sequence
  SiRNA target sequence
tcgacataaaacagacatacgc

SEQ ID NO: 14360 - DNA, 22 bp, Artificial sequence
  SiRNA target sequence
cgacataaaacagacatacgcc

SEQ ID NO: 14361 - DNA, 22 bp, Artificial sequence
  SiRNA target sequence
gacataaaacagacatacgcca

SEQ ID NO: 14362 - DNA, 22 bp, Artificial sequence
  SiRNA target sequence
acataaaacagacatacgccac

SEQ ID NO: 14363 - DNA, 22 bp, Artificial sequence
  SiRNA target sequence
cataaaacagacatacgccacg

SEQ ID NO: 14364 - DNA, 22 bp, Artificial sequence
  SiRNA target sequence
ataaaacagacatacgccacgt

SEQ ID NO: 14365 - DNA, 22 bp, Artificial sequence
  SiRNA target sequence
taaaacagacatacgccacgtt

SEQ ID NO: 14366 - DNA, 22 bp, Artificial sequence
  SiRNA target sequence
aaaacagacatacgccacgttc

SEQ ID NO: 14367 - DNA, 22 bp, Artificial sequence
  SiRNA target sequence
aaacagacatacgccacgttct

SEQ ID NO: 14368 - DNA, 22 bp, Artificial sequence
  SiRNA target sequence
aacagacatacgccacgttctg

SEQ ID NO: 14369 - DNA, 22 bp, Artificial sequence
  SiRNA target sequence
acagacatacgccacgttctgc

SEQ ID NO: 14370 - DNA, 22 bp, Artificial sequence
  SiRNA target sequence
cagacatacgccacgttctgct

SEQ ID NO: 14371 - DNA, 22 bp, Artificial sequence
  SiRNA target sequence
agacatacgccacgttctgctt

SEQ ID NO: 14372 - DNA, 22 bp, Artificial sequence
  SiRNA target sequence
gacatacgccacgttctgcttt

SEQ ID NO: 14373 - DNA, 22 bp, Artificial sequence
  SiRNA target sequence
acatacgccacgttctgcttta

SEQ ID NO: 14374 - DNA, 22 bp, Artificial sequence
  SiRNA target sequence
catacgccacgttctgctttaa

SEQ ID NO: 14375 - DNA, 22 bp, Artificial sequence
  SiRNA target sequence
atacgccacgttctgctttaac

SEQ ID NO: 14376 - DNA, 22 bp, Artificial sequence
  SiRNA target sequence
tacgccacgttctgctttaaca

SEQ ID NO: 14377 - DNA, 22 bp, Artificial sequence
  SiRNA target sequence
acgccacgttctgctttaacaa

SEQ ID NO: 14378 - DNA, 22 bp, Artificial sequence
  SiRNA target sequence
cgccacgttctgctttaacaat

SEQ ID NO: 14379 - DNA, 22 bp, Artificial sequence
  SiRNA target sequence
gccacgttctgctttaacaatc

SEQ ID NO: 14380 - DNA, 22 bp, Artificial sequence
  SiRNA target sequence
ccacgttctgctttaacaatct

SEQ ID NO: 14381 - DNA, 22 bp, Artificial sequence
  SiRNA target sequence
cacgttctgctttaacaatctt

SEQ ID NO: 14382 - DNA, 22 bp, Artificial sequence
  SiRNA target sequence
acgttctgctttaacaatcttt

SEQ ID NO: 14383 - DNA, 22 bp, Artificial sequence
  SiRNA target sequence
cgttctgctttaacaatctttt

SEQ ID NO: 14384 - DNA, 22 bp, Artificial sequence
  SiRNA target sequence
gttctgctttaacaatcttttg

SEQ ID NO: 14385 - DNA, 22 bp, Artificial sequence
  SiRNA target sequence
ttctgctttaacaatcttttgc

SEQ ID NO: 14386 - DNA, 22 bp, Artificial sequence
  SiRNA target sequence
tctgctttaacaatcttttgct

SEQ ID NO: 14387 - DNA, 22 bp, Artificial sequence
  SiRNA target sequence
ctgctttaacaatcttttgcta

SEQ ID NO: 14388 - DNA, 22 bp, Artificial sequence
  SiRNA target sequence
tgctttaacaatcttttgctac

SEQ ID NO: 14389 - DNA, 22 bp, Artificial sequence
  SiRNA target sequence
gctttaacaatcttttgctaca

SEQ ID NO: 14390 - DNA, 22 bp, Artificial sequence
  SiRNA target sequence
ctttaacaatcttttgctacaa

SEQ ID NO: 14391 - DNA, 22 bp, Artificial sequence
  SiRNA target sequence
tttaacaatcttttgctacaaa

SEQ ID NO: 14392 - DNA, 22 bp, Artificial sequence
  SiRNA target sequence
ttaacaatcttttgctacaaac

SEQ ID NO: 14393 - DNA, 22 bp, Artificial sequence
  SiRNA target sequence
taacaatcttttgctacaaacg

SEQ ID NO: 14394 - DNA, 22 bp, Artificial sequence
  SiRNA target sequence
aacaatcttttgctacaaacga

SEQ ID NO: 14395 - DNA, 22 bp, Artificial sequence
  SiRNA target sequence
acaatcttttgctacaaacgag

SEQ ID NO: 14396 - DNA, 22 bp, Artificial sequence
  SiRNA target sequence
caatcttttgctacaaacgagc

SEQ ID NO: 14397 - DNA, 22 bp, Artificial sequence
  SiRNA target sequence
aatcttttgctacaaacgagca

SEQ ID NO: 14398 - DNA, 22 bp, Artificial sequence
  SiRNA target sequence
atcttttgctacaaacgagcat

SEQ ID NO: 14399 - DNA, 22 bp, Artificial sequence
  SiRNA target sequence
tcttttgctacaaacgagcata

SEQ ID NO: 14400 - DNA, 22 bp, Artificial sequence
  SiRNA target sequence
cttttgctacaaacgagcatag

SEQ ID NO: 14401 - DNA, 22 bp, Artificial sequence
  SiRNA target sequence
ttttgctacaaacgagcataga

SEQ ID NO: 14402 - DNA, 22 bp, Artificial sequence
  SiRNA target sequence
tttgctacaaacgagcatagac

SEQ ID NO: 14403 - DNA, 22 bp, Artificial sequence
  SiRNA target sequence
ttgctacaaacgagcatagacc

SEQ ID NO: 14404 - DNA, 22 bp, Artificial sequence
  SiRNA target sequence
tgctacaaacgagcatagacca

SEQ ID NO: 14405 - DNA, 22 bp, Artificial sequence
  SiRNA target sequence
gctacaaacgagcatagaccaa

SEQ ID NO: 14406 - DNA, 22 bp, Artificial sequence
  SiRNA target sequence
ctacaaacgagcatagaccaag

SEQ ID NO: 14407 - DNA, 22 bp, Artificial sequence
  SiRNA target sequence
tacaaacgagcatagaccaaga

SEQ ID NO: 14408 - DNA, 22 bp, Artificial sequence
  SiRNA target sequence
acaaacgagcatagaccaagac

SEQ ID NO: 14409 - DNA, 22 bp, Artificial sequence
  SiRNA target sequence
caaacgagcatagaccaagaca

SEQ ID NO: 14410 - DNA, 22 bp, Artificial sequence
  SiRNA target sequence
aaacgagcatagaccaagacaa

SEQ ID NO: 14411 - DNA, 22 bp, Artificial sequence
  SiRNA target sequence
aacgagcatagaccaagacaaa

SEQ ID NO: 14412 - DNA, 22 bp, Artificial sequence
  SiRNA target sequence
acgagcatagaccaagacaaaa

SEQ ID NO: 14413 - DNA, 22 bp, Artificial sequence
  SiRNA target sequence
cgagcatagaccaagacaaaat

SEQ ID NO: 14414 - DNA, 22 bp, Artificial sequence
  SiRNA target sequence
gagcatagaccaagacaaaata

SEQ ID NO: 14415 - DNA, 22 bp, Artificial sequence
  SiRNA target sequence
agcatagaccaagacaaaatat

SEQ ID NO: 14416 - DNA, 22 bp, Artificial sequence
  SiRNA target sequence
gcatagaccaagacaaaatatt

SEQ ID NO: 14417 - DNA, 22 bp, Artificial sequence
  SiRNA target sequence
catagaccaagacaaaatattt

SEQ ID NO: 14418 - DNA, 22 bp, Artificial sequence
  SiRNA target sequence
atagaccaagacaaaatattta

SEQ ID NO: 14419 - DNA, 22 bp, Artificial sequence
  SiRNA target sequence
tagaccaagacaaaatatttag

SEQ ID NO: 14420 - DNA, 22 bp, Artificial sequence
  SiRNA target sequence
agaccaagacaaaatatttaga

SEQ ID NO: 14421 - DNA, 22 bp, Artificial sequence
  SiRNA target sequence
gaccaagacaaaatatttagaa

SEQ ID NO: 14422 - DNA, 22 bp, Artificial sequence
  SiRNA target sequence
accaagacaaaatatttagaat

SEQ ID NO: 14423 - DNA, 22 bp, Artificial sequence
  SiRNA target sequence
ccaagacaaaatatttagaata

SEQ ID NO: 14424 - DNA, 22 bp, Artificial sequence
  SiRNA target sequence
caagacaaaatatttagaataa

SEQ ID NO: 14425 - DNA, 22 bp, Artificial sequence
  SiRNA target sequence
aagacaaaatatttagaataag

SEQ ID NO: 14426 - DNA, 22 bp, Artificial sequence
  SiRNA target sequence
agacaaaatatttagaataaga

SEQ ID NO: 14427 - DNA, 22 bp, Artificial sequence
  SiRNA target sequence
gacaaaatatttagaataagag

SEQ ID NO: 14428 - DNA, 22 bp, Artificial sequence
  SiRNA target sequence
acaaaatatttagaataagagg

SEQ ID NO: 14429 - DNA, 22 bp, Artificial sequence
  SiRNA target sequence
caaaatatttagaataagaggt

SEQ ID NO: 14430 - DNA, 22 bp, Artificial sequence
  SiRNA target sequence
aaaatatttagaataagaggta

SEQ ID NO: 14431 - DNA, 22 bp, Artificial sequence
  SiRNA target sequence
aaatatttagaataagaggtac

SEQ ID NO: 14432 - DNA, 22 bp, Artificial sequence
  SiRNA target sequence
aatatttagaataagaggtacc

SEQ ID NO: 14433 - DNA, 22 bp, Artificial sequence
  SiRNA target sequence
atatttagaataagaggtaccc

SEQ ID NO: 14434 - DNA, 22 bp, Artificial sequence
  SiRNA target sequence
tatttagaataagaggtaccca

SEQ ID NO: 14435 - DNA, 22 bp, Artificial sequence
  SiRNA target sequence
atttagaataagaggtacccac

SEQ ID NO: 14436 - DNA, 22 bp, Artificial sequence
  SiRNA target sequence
tttagaataagaggtacccaca

SEQ ID NO: 14437 - DNA, 22 bp, Artificial sequence
  SiRNA target sequence
ttagaataagaggtacccacat

SEQ ID NO: 14438 - DNA, 22 bp, Artificial sequence
  SiRNA target sequence
tagaataagaggtacccacatg

SEQ ID NO: 14439 - DNA, 22 bp, Artificial sequence
  SiRNA target sequence
agaataagaggtacccacatgt

SEQ ID NO: 14440 - DNA, 22 bp, Artificial sequence
  SiRNA target sequence
gaataagaggtacccacatgtt

SEQ ID NO: 14441 - DNA, 22 bp, Artificial sequence
  SiRNA target sequence
aataagaggtacccacatgttt

SEQ ID NO: 14442 - DNA, 22 bp, Artificial sequence
  SiRNA target sequence
ataagaggtacccacatgttta

SEQ ID NO: 14443 - DNA, 22 bp, Artificial sequence
  SiRNA target sequence
taagaggtacccacatgtttaa

SEQ ID NO: 14444 - DNA, 22 bp, Artificial sequence
  SiRNA target sequence
aagaggtacccacatgtttaaa

SEQ ID NO: 14445 - DNA, 22 bp, Artificial sequence
  SiRNA target sequence
agaggtacccacatgtttaaaa

SEQ ID NO: 14446 - DNA, 22 bp, Artificial sequence
  SiRNA target sequence
gaggtacccacatgtttaaaaa

SEQ ID NO: 14447 - DNA, 22 bp, Artificial sequence
  SiRNA target sequence
aggtacccacatgtttaaaaat

SEQ ID NO: 14448 - DNA, 22 bp, Artificial sequence
  SiRNA target sequence
ggtacccacatgtttaaaaatc

SEQ ID NO: 14449 - DNA, 22 bp, Artificial sequence
  SiRNA target sequence
gtacccacatgtttaaaaatct

SEQ ID NO: 14450 - DNA, 22 bp, Artificial sequence
  SiRNA target sequence
tacccacatgtttaaaaatcta

SEQ ID NO: 14451 - DNA, 22 bp, Artificial sequence
  SiRNA target sequence
acccacatgtttaaaaatctac

SEQ ID NO: 14452 - DNA, 22 bp, Artificial sequence
  SiRNA target sequence
cccacatgtttaaaaatctact

SEQ ID NO: 14453 - DNA, 22 bp, Artificial sequence
  SiRNA target sequence
ccacatgtttaaaaatctactt

SEQ ID NO: 14454 - DNA, 22 bp, Artificial sequence
  SiRNA target sequence
cacatgtttaaaaatctactta

SEQ ID NO: 14455 - DNA, 22 bp, Artificial sequence
  SiRNA target sequence
acatgtttaaaaatctacttac

SEQ ID NO: 14456 - DNA, 22 bp, Artificial sequence
  SiRNA target sequence
catgtttaaaaatctacttact

SEQ ID NO: 14457 - DNA, 22 bp, Artificial sequence
  SiRNA target sequence
atgtttaaaaatctacttacta

SEQ ID NO: 14458 - DNA, 22 bp, Artificial sequence
  SiRNA target sequence
tgtttaaaaatctacttactaa

SEQ ID NO: 14459 - DNA, 22 bp, Artificial sequence
  SiRNA target sequence
gtttaaaaatctacttactaaa

SEQ ID NO: 14460 - DNA, 22 bp, Artificial sequence
  SiRNA target sequence
tttaaaaatctacttactaaat

SEQ ID NO: 14461 - DNA, 22 bp, Artificial sequence
  SiRNA target sequence
ttaaaaatctacttactaaatt

SEQ ID NO: 14462 - DNA, 22 bp, Artificial sequence
  SiRNA target sequence
taaaaatctacttactaaattc

SEQ ID NO: 14463 - DNA, 22 bp, Artificial sequence
  SiRNA target sequence
aaaaatctacttactaaattcc

SEQ ID NO: 14464 - DNA, 22 bp, Artificial sequence
  SiRNA target sequence
aaaatctacttactaaattcca

SEQ ID NO: 14465 - DNA, 22 bp, Artificial sequence
  SiRNA target sequence
aaatctacttactaaattccat

SEQ ID NO: 14466 - DNA, 22 bp, Artificial sequence
  SiRNA target sequence
aatctacttactaaattccata

SEQ ID NO: 14467 - DNA, 22 bp, Artificial sequence
  SiRNA target sequence
atctacttactaaattccatac

SEQ ID NO: 14468 - DNA, 22 bp, Artificial sequence
  SiRNA target sequence
tctacttactaaattccataca

SEQ ID NO: 14469 - DNA, 22 bp, Artificial sequence
  SiRNA target sequence
ctacttactaaattccatacag

SEQ ID NO: 14470 - DNA, 22 bp, Artificial sequence
  SiRNA target sequence
tacttactaaattccatacagt

SEQ ID NO: 14471 - DNA, 22 bp, Artificial sequence
  SiRNA target sequence
acttactaaattccatacagta

SEQ ID NO: 14472 - DNA, 22 bp, Artificial sequence
  SiRNA target sequence
cttactaaattccatacagtaa

SEQ ID NO: 14473 - DNA, 22 bp, Artificial sequence
  SiRNA target sequence
ttactaaattccatacagtaat

SEQ ID NO: 14474 - DNA, 22 bp, Artificial sequence
  SiRNA target sequence
tactaaattccatacagtaatt

SEQ ID NO: 14475 - DNA, 22 bp, Artificial sequence
  SiRNA target sequence
actaaattccatacagtaattg

SEQ ID NO: 14476 - DNA, 22 bp, Artificial sequence
  SiRNA target sequence
ctaaattccatacagtaattgg

SEQ ID NO: 14477 - DNA, 22 bp, Artificial sequence
  SiRNA target sequence
taaattccatacagtaattggt

SEQ ID NO: 14478 - DNA, 22 bp, Artificial sequence
  SiRNA target sequence
aaattccatacagtaattggta

SEQ ID NO: 14479 - DNA, 22 bp, Artificial sequence
  SiRNA target sequence
aattccatacagtaattggtag

SEQ ID NO: 14480 - DNA, 22 bp, Artificial sequence
  SiRNA target sequence
attccatacagtaattggtaga

SEQ ID NO: 14481 - DNA, 22 bp, Artificial sequence
  SiRNA target sequence
ttccatacagtaattggtagaa

SEQ ID NO: 14482 - DNA, 22 bp, Artificial sequence
  SiRNA target sequence
tccatacagtaattggtagaag

SEQ ID NO: 14483 - DNA, 22 bp, Artificial sequence
  SiRNA target sequence
ccatacagtaattggtagaagt

SEQ ID NO: 14484 - DNA, 22 bp, Artificial sequence
  SiRNA target sequence
catacagtaattggtagaagta

SEQ ID NO: 14485 - DNA, 22 bp, Artificial sequence
  SiRNA target sequence
atacagtaattggtagaagtaa

SEQ ID NO: 14486 - DNA, 22 bp, Artificial sequence
  SiRNA target sequence
tacagtaattggtagaagtaaa

SEQ ID NO: 14487 - DNA, 22 bp, Artificial sequence
  SiRNA target sequence
acagtaattggtagaagtaaag

SEQ ID NO: 14488 - DNA, 22 bp, Artificial sequence
  SiRNA target sequence
cagtaattggtagaagtaaaga

SEQ ID NO: 14489 - DNA, 22 bp, Artificial sequence
  SiRNA target sequence
agtaattggtagaagtaaagat

SEQ ID NO: 14490 - DNA, 22 bp, Artificial sequence
  SiRNA target sequence
gtaattggtagaagtaaagata

SEQ ID NO: 14491 - DNA, 22 bp, Artificial sequence
  SiRNA target sequence
taattggtagaagtaaagatat

SEQ ID NO: 14492 - DNA, 22 bp, Artificial sequence
  SiRNA target sequence
aattggtagaagtaaagatatc

SEQ ID NO: 14493 - DNA, 22 bp, Artificial sequence
  SiRNA target sequence
attggtagaagtaaagatatct

SEQ ID NO: 14494 - DNA, 22 bp, Artificial sequence
  SiRNA target sequence
ttggtagaagtaaagatatctt

SEQ ID NO: 14495 - DNA, 22 bp, Artificial sequence
  SiRNA target sequence
tggtagaagtaaagatatcttt

SEQ ID NO: 14496 - DNA, 22 bp, Artificial sequence
  SiRNA target sequence
ggtagaagtaaagatatcttta

SEQ ID NO: 14497 - DNA, 22 bp, Artificial sequence
  SiRNA target sequence
gtagaagtaaagatatctttac

SEQ ID NO: 14498 - DNA, 22 bp, Artificial sequence
  SiRNA target sequence
tagaagtaaagatatctttaca

SEQ ID NO: 14499 - DNA, 22 bp, Artificial sequence
  SiRNA target sequence
agaagtaaagatatctttacac

SEQ ID NO: 14500 - DNA, 22 bp, Artificial sequence
  SiRNA target sequence
gaagtaaagatatctttacaca

SEQ ID NO: 14501 - DNA, 22 bp, Artificial sequence
  SiRNA target sequence
aagtaaagatatctttacacaa

SEQ ID NO: 14502 - DNA, 22 bp, Artificial sequence
  SiRNA target sequence
agtaaagatatctttacacaaa

SEQ ID NO: 14503 - DNA, 22 bp, Artificial sequence
  SiRNA target sequence
gtaaagatatctttacacaaat

SEQ ID NO: 14504 - DNA, 22 bp, Artificial sequence
  SiRNA target sequence
taaagatatctttacacaaata

SEQ ID NO: 14505 - DNA, 22 bp, Artificial sequence
  SiRNA target sequence
aaagatatctttacacaaatag

SEQ ID NO: 14506 - DNA, 22 bp, Artificial sequence
  SiRNA target sequence
aagatatctttacacaaataga

SEQ ID NO: 14507 - DNA, 22 bp, Artificial sequence
  SiRNA target sequence
agatatctttacacaaatagag

SEQ ID NO: 14508 - DNA, 22 bp, Artificial sequence
  SiRNA target sequence
gatatctttacacaaatagagg

SEQ ID NO: 14509 - DNA, 22 bp, Artificial sequence
  SiRNA target sequence
atatctttacacaaatagaggt

SEQ ID NO: 14510 - DNA, 22 bp, Artificial sequence
  SiRNA target sequence
tatctttacacaaatagaggta

SEQ ID NO: 14511 - DNA, 22 bp, Artificial sequence
  SiRNA target sequence
atctttacacaaatagaggtag

SEQ ID NO: 14512 - DNA, 22 bp, Artificial sequence
  SiRNA target sequence
tctttacacaaatagaggtaga

SEQ ID NO: 14513 - DNA, 22 bp, Artificial sequence
  SiRNA target sequence
ctttacacaaatagaggtagac

SEQ ID NO: 14514 - DNA, 22 bp, Artificial sequence
  SiRNA target sequence
tttacacaaatagaggtagaca

SEQ ID NO: 14515 - DNA, 22 bp, Artificial sequence
  SiRNA target sequence
ttacacaaatagaggtagacat

SEQ ID NO: 14516 - DNA, 22 bp, Artificial sequence
  SiRNA target sequence
tacacaaatagaggtagacata

SEQ ID NO: 14517 - DNA, 22 bp, Artificial sequence
  SiRNA target sequence
acacaaatagaggtagacataa

SEQ ID NO: 14518 - DNA, 22 bp, Artificial sequence
  SiRNA target sequence
cacaaatagaggtagacataaa

SEQ ID NO: 14519 - DNA, 22 bp, Artificial sequence
  SiRNA target sequence
acaaatagaggtagacataaaa

SEQ ID NO: 14520 - DNA, 22 bp, Artificial sequence
  SiRNA target sequence
caaatagaggtagacataaaaa

SEQ ID NO: 14521 - DNA, 22 bp, Artificial sequence
  SiRNA target sequence
aaatagaggtagacataaaaaa

SEQ ID NO: 14522 - DNA, 22 bp, Artificial sequence
  SiRNA target sequence
aatagaggtagacataaaaaat

SEQ ID NO: 14523 - DNA, 22 bp, Artificial sequence
  SiRNA target sequence
atagaggtagacataaaaaata

SEQ ID NO: 14524 - DNA, 22 bp, Artificial sequence
  SiRNA target sequence
tagaggtagacataaaaaataa

SEQ ID NO: 14525 - DNA, 22 bp, Artificial sequence
  SiRNA target sequence
agaggtagacataaaaaataaa

SEQ ID NO: 14526 - DNA, 22 bp, Artificial sequence
  SiRNA target sequence
gaggtagacataaaaaataaat

SEQ ID NO: 14527 - DNA, 22 bp, Artificial sequence
  SiRNA target sequence
aggtagacataaaaaataaata

SEQ ID NO: 14528 - DNA, 22 bp, Artificial sequence
  SiRNA target sequence
ggtagacataaaaaataaatac

SEQ ID NO: 14529 - DNA, 22 bp, Artificial sequence
  SiRNA target sequence
gtagacataaaaaataaataca

SEQ ID NO: 14530 - DNA, 22 bp, Artificial sequence
  SiRNA target sequence
tagacataaaaaataaatacaa

SEQ ID NO: 14531 - DNA, 22 bp, Artificial sequence
  SiRNA target sequence
agacataaaaaataaatacaat

SEQ ID NO: 14532 - DNA, 22 bp, Artificial sequence
  SiRNA target sequence
gacataaaaaataaatacaata

SEQ ID NO: 14533 - DNA, 22 bp, Artificial sequence
  SiRNA target sequence
acataaaaaataaatacaataa

SEQ ID NO: 14534 - DNA, 22 bp, Artificial sequence
  SiRNA target sequence
cataaaaaataaatacaataat

SEQ ID NO: 14535 - DNA, 22 bp, Artificial sequence
  SiRNA target sequence
ataaaaaataaatacaataata

SEQ ID NO: 14536 - DNA, 22 bp, Artificial sequence
  SiRNA target sequence
taaaaaataaatacaataatat

SEQ ID NO: 14537 - DNA, 22 bp, Artificial sequence
  SiRNA target sequence
aaaaaataaatacaataatatg

SEQ ID NO: 14538 - DNA, 22 bp, Artificial sequence
  SiRNA target sequence
aaaaataaatacaataatatgt

SEQ ID NO: 14539 - DNA, 22 bp, Artificial sequence
  SiRNA target sequence
aaaataaatacaataatatgtg

SEQ ID NO: 14540 - DNA, 22 bp, Artificial sequence
  SiRNA target sequence
aaataaatacaataatatgtgt

SEQ ID NO: 14541 - DNA, 22 bp, Artificial sequence
  SiRNA target sequence
aataaatacaataatatgtgta

SEQ ID NO: 14542 - DNA, 22 bp, Artificial sequence
  SiRNA target sequence
ataaatacaataatatgtgtat

SEQ ID NO: 14543 - DNA, 22 bp, Artificial sequence
  SiRNA target sequence
taaatacaataatatgtgtata

SEQ ID NO: 14544 - DNA, 22 bp, Artificial sequence
  SiRNA target sequence
aaatacaataatatgtgtataa

SEQ ID NO: 14545 - DNA, 22 bp, Artificial sequence
  SiRNA target sequence
aatacaataatatgtgtataaa

SEQ ID NO: 14546 - DNA, 22 bp, Artificial sequence
  SiRNA target sequence
atacaataatatgtgtataaaa

SEQ ID NO: 14547 - DNA, 22 bp, Artificial sequence
  SiRNA target sequence
tacaataatatgtgtataaaaa

SEQ ID NO: 14548 - DNA, 22 bp, Artificial sequence
  SiRNA target sequence
acaataatatgtgtataaaaat

SEQ ID NO: 14549 - DNA, 22 bp, Artificial sequence
  SiRNA target sequence
caataatatgtgtataaaaatg

SEQ ID NO: 14550 - DNA, 22 bp, Artificial sequence
  SiRNA target sequence
aataatatgtgtataaaaatga

SEQ ID NO: 14551 - DNA, 22 bp, Artificial sequence
  SiRNA target sequence
ataatatgtgtataaaaatgat

SEQ ID NO: 14552 - DNA, 22 bp, Artificial sequence
  SiRNA target sequence
taatatgtgtataaaaatgata

SEQ ID NO: 14553 - DNA, 22 bp, Artificial sequence
  SiRNA target sequence
aatatgtgtataaaaatgatac

SEQ ID NO: 14554 - DNA, 22 bp, Artificial sequence
  SiRNA target sequence
atatgtgtataaaaatgataca

SEQ ID NO: 14555 - DNA, 22 bp, Artificial sequence
  SiRNA target sequence
tatgtgtataaaaatgatacag

SEQ ID NO: 14556 - DNA, 22 bp, Artificial sequence
  SiRNA target sequence
atgtgtataaaaatgatacagc

SEQ ID NO: 14557 - DNA, 22 bp, Artificial sequence
  SiRNA target sequence
tgtgtataaaaatgatacagcc

SEQ ID NO: 14558 - DNA, 22 bp, Artificial sequence
  SiRNA target sequence
gtgtataaaaatgatacagcca

SEQ ID NO: 14559 - DNA, 22 bp, Artificial sequence
  SiRNA target sequence
tgtataaaaatgatacagccag

SEQ ID NO: 14560 - DNA, 22 bp, Artificial sequence
  SiRNA target sequence
gtataaaaatgatacagccagc

SEQ ID NO: 14561 - DNA, 22 bp, Artificial sequence
  SiRNA target sequence
tataaaaatgatacagccagct

SEQ ID NO: 14562 - DNA, 22 bp, Artificial sequence
  SiRNA target sequence
ataaaaatgatacagccagcta

SEQ ID NO: 14563 - DNA, 22 bp, Artificial sequence
  SiRNA target sequence
taaaaatgatacagccagctat

SEQ ID NO: 14564 - DNA, 22 bp, Artificial sequence
  SiRNA target sequence
aaaaatgatacagccagctatt

SEQ ID NO: 14565 - DNA, 22 bp, Artificial sequence
  SiRNA target sequence
aaaatgatacagccagctatta

SEQ ID NO: 14566 - DNA, 22 bp, Artificial sequence
  SiRNA target sequence
aaatgatacagccagctattaa

SEQ ID NO: 14567 - DNA, 22 bp, Artificial sequence
  SiRNA target sequence
aatgatacagccagctattaaa

SEQ ID NO: 14568 - DNA, 22 bp, Artificial sequence
  SiRNA target sequence
atgatacagccagctattaaag

SEQ ID NO: 14569 - DNA, 22 bp, Artificial sequence
  SiRNA target sequence
tgatacagccagctattaaagg

SEQ ID NO: 14570 - DNA, 22 bp, Artificial sequence
  SiRNA target sequence
gatacagccagctattaaaggt

SEQ ID NO: 14571 - DNA, 22 bp, Artificial sequence
  SiRNA target sequence
atacagccagctattaaaggtg

SEQ ID NO: 14572 - DNA, 22 bp, Artificial sequence
  SiRNA target sequence
tacagccagctattaaaggtgc

SEQ ID NO: 14573 - DNA, 22 bp, Artificial sequence
  SiRNA target sequence
acagccagctattaaaggtgct

SEQ ID NO: 14574 - DNA, 22 bp, Artificial sequence
  SiRNA target sequence
cagccagctattaaaggtgctt

SEQ ID NO: 14575 - DNA, 22 bp, Artificial sequence
  SiRNA target sequence
agccagctattaaaggtgcttc

SEQ ID NO: 14576 - DNA, 22 bp, Artificial sequence
  SiRNA target sequence
gccagctattaaaggtgcttca

SEQ ID NO: 14577 - DNA, 22 bp, Artificial sequence
  SiRNA target sequence
ccagctattaaaggtgcttcat

SEQ ID NO: 14578 - DNA, 22 bp, Artificial sequence
  SiRNA target sequence
cagctattaaaggtgcttcatg

SEQ ID NO: 14579 - DNA, 22 bp, Artificial sequence
  SiRNA target sequence
agctattaaaggtgcttcatgt

SEQ ID NO: 14580 - DNA, 22 bp, Artificial sequence
  SiRNA target sequence
gctattaaaggtgcttcatgta

SEQ ID NO: 14581 - DNA, 22 bp, Artificial sequence
  SiRNA target sequence
ctattaaaggtgcttcatgtat

SEQ ID NO: 14582 - DNA, 22 bp, Artificial sequence
  SiRNA target sequence
tattaaaggtgcttcatgtata

SEQ ID NO: 14583 - DNA, 22 bp, Artificial sequence
  SiRNA target sequence
attaaaggtgcttcatgtatat

SEQ ID NO: 14584 - DNA, 22 bp, Artificial sequence
  SiRNA target sequence
ttaaaggtgcttcatgtatata

SEQ ID NO: 14585 - DNA, 22 bp, Artificial sequence
  SiRNA target sequence
taaaggtgcttcatgtatatac

SEQ ID NO: 14586 - DNA, 22 bp, Artificial sequence
  SiRNA target sequence
aaaggtgcttcatgtatatacg

SEQ ID NO: 14587 - DNA, 22 bp, Artificial sequence
  SiRNA target sequence
aaggtgcttcatgtatatacgt

SEQ ID NO: 14588 - DNA, 22 bp, Artificial sequence
  SiRNA target sequence
aggtgcttcatgtatatacgtg

SEQ ID NO: 14589 - DNA, 22 bp, Artificial sequence
  SiRNA target sequence
ggtgcttcatgtatatacgtgg

SEQ ID NO: 14590 - DNA, 22 bp, Artificial sequence
  SiRNA target sequence
gtgcttcatgtatatacgtggg

SEQ ID NO: 14591 - DNA, 22 bp, Artificial sequence
  SiRNA target sequence
tgcttcatgtatatacgtgggt

SEQ ID NO: 14592 - DNA, 22 bp, Artificial sequence
  SiRNA target sequence
gcttcatgtatatacgtgggta

SEQ ID NO: 14593 - DNA, 22 bp, Artificial sequence
  SiRNA target sequence
cttcatgtatatacgtgggtaa

SEQ ID NO: 14594 - DNA, 22 bp, Artificial sequence
  SiRNA target sequence
ttcatgtatatacgtgggtaat

SEQ ID NO: 14595 - DNA, 22 bp, Artificial sequence
  SiRNA target sequence
tcatgtatatacgtgggtaatt

SEQ ID NO: 14596 - DNA, 22 bp, Artificial sequence
  SiRNA target sequence
catgtatatacgtgggtaatta

SEQ ID NO: 14597 - DNA, 22 bp, Artificial sequence
  SiRNA target sequence
atgtatatacgtgggtaattat

SEQ ID NO: 14598 - DNA, 22 bp, Artificial sequence
  SiRNA target sequence
tgtatatacgtgggtaattata

SEQ ID NO: 14599 - DNA, 22 bp, Artificial sequence
  SiRNA target sequence
gtatatacgtgggtaattatat

SEQ ID NO: 14600 - DNA, 22 bp, Artificial sequence
  SiRNA target sequence
tatatacgtgggtaattatatg

SEQ ID NO: 14601 - DNA, 22 bp, Artificial sequence
  SiRNA target sequence
atatacgtgggtaattatatgc

SEQ ID NO: 14602 - DNA, 22 bp, Artificial sequence
  SiRNA target sequence
tatacgtgggtaattatatgca

SEQ ID NO: 14603 - DNA, 22 bp, Artificial sequence
  SiRNA target sequence
atacgtgggtaattatatgcag

SEQ ID NO: 14604 - DNA, 22 bp, Artificial sequence
  SiRNA target sequence
tacgtgggtaattatatgcagc

SEQ ID NO: 14605 - DNA, 22 bp, Artificial sequence
  SiRNA target sequence
acgtgggtaattatatgcagca

SEQ ID NO: 14606 - DNA, 22 bp, Artificial sequence
  SiRNA target sequence
cgtgggtaattatatgcagcag

SEQ ID NO: 14607 - DNA, 22 bp, Artificial sequence
  SiRNA target sequence
gtgggtaattatatgcagcagc

SEQ ID NO: 14608 - DNA, 22 bp, Artificial sequence
  SiRNA target sequence
tgggtaattatatgcagcagct

SEQ ID NO: 14609 - DNA, 22 bp, Artificial sequence
  SiRNA target sequence
gggtaattatatgcagcagcta

SEQ ID NO: 14610 - DNA, 22 bp, Artificial sequence
  SiRNA target sequence
ggtaattatatgcagcagctag

SEQ ID NO: 14611 - DNA, 22 bp, Artificial sequence
  SiRNA target sequence
gtaattatatgcagcagctagg

SEQ ID NO: 14612 - DNA, 22 bp, Artificial sequence
  SiRNA target sequence
taattatatgcagcagctagga

SEQ ID NO: 14613 - DNA, 22 bp, Artificial sequence
  SiRNA target sequence
aattatatgcagcagctaggag

SEQ ID NO: 14614 - DNA, 22 bp, Artificial sequence
  SiRNA target sequence
attatatgcagcagctaggagt

SEQ ID NO: 14615 - DNA, 22 bp, Artificial sequence
  SiRNA target sequence
ttatatgcagcagctaggagta

SEQ ID NO: 14616 - DNA, 22 bp, Artificial sequence
  SiRNA target sequence
tatatgcagcagctaggagtaa

SEQ ID NO: 14617 - DNA, 22 bp, Artificial sequence
  SiRNA target sequence
atatgcagcagctaggagtaat

SEQ ID NO: 14618 - DNA, 22 bp, Artificial sequence
  SiRNA target sequence
tatgcagcagctaggagtaatt

SEQ ID NO: 14619 - DNA, 22 bp, Artificial sequence
  SiRNA target sequence
atgcagcagctaggagtaatta

SEQ ID NO: 14620 - DNA, 22 bp, Artificial sequence
  SiRNA target sequence
tgcagcagctaggagtaattag

SEQ ID NO: 14621 - DNA, 22 bp, Artificial sequence
  SiRNA target sequence
gcagcagctaggagtaattagt

SEQ ID NO: 14622 - DNA, 22 bp, Artificial sequence
  SiRNA target sequence
cagcagctaggagtaattagtc

SEQ ID NO: 14623 - DNA, 22 bp, Artificial sequence
  SiRNA target sequence
agcagctaggagtaattagtct

SEQ ID NO: 14624 - DNA, 22 bp, Artificial sequence
  SiRNA target sequence
gcagctaggagtaattagtctt

SEQ ID NO: 14625 - DNA, 22 bp, Artificial sequence
  SiRNA target sequence
cagctaggagtaattagtcttg

SEQ ID NO: 14626 - DNA, 22 bp, Artificial sequence
  SiRNA target sequence
agctaggagtaattagtcttgg

SEQ ID NO: 14627 - DNA, 22 bp, Artificial sequence
  SiRNA target sequence
gctaggagtaattagtcttggt

SEQ ID NO: 14628 - DNA, 22 bp, Artificial sequence
  SiRNA target sequence
ctaggagtaattagtcttggtg

SEQ ID NO: 14629 - DNA, 22 bp, Artificial sequence
  SiRNA target sequence
taggagtaattagtcttggtgg

SEQ ID NO: 14630 - DNA, 22 bp, Artificial sequence
  SiRNA target sequence
aggagtaattagtcttggtggg

SEQ ID NO: 14631 - DNA, 22 bp, Artificial sequence
  SiRNA target sequence
ggagtaattagtcttggtgggg

SEQ ID NO: 14632 - DNA, 22 bp, Artificial sequence
  SiRNA target sequence
gagtaattagtcttggtgggga

SEQ ID NO: 14633 - DNA, 22 bp, Artificial sequence
  SiRNA target sequence
agtaattagtcttggtggggag

SEQ ID NO: 14634 - DNA, 22 bp, Artificial sequence
  SiRNA target sequence
gtaattagtcttggtggggaga

SEQ ID NO: 14635 - DNA, 22 bp, Artificial sequence
  SiRNA target sequence
taattagtcttggtggggagat

SEQ ID NO: 14636 - DNA, 22 bp, Artificial sequence
  SiRNA target sequence
aattagtcttggtggggagatt

SEQ ID NO: 14637 - DNA, 22 bp, Artificial sequence
  SiRNA target sequence
attagtcttggtggggagatta

SEQ ID NO: 14638 - DNA, 22 bp, Artificial sequence
  SiRNA target sequence
ttagtcttggtggggagattat

SEQ ID NO: 14639 - DNA, 22 bp, Artificial sequence
  SiRNA target sequence
tagtcttggtggggagattatt

SEQ ID NO: 14640 - DNA, 22 bp, Artificial sequence
  SiRNA target sequence
agtcttggtggggagattatta

SEQ ID NO: 14641 - DNA, 22 bp, Artificial sequence
  SiRNA target sequence
gtcttggtggggagattattaa

SEQ ID NO: 14642 - DNA, 22 bp, Artificial sequence
  SiRNA target sequence
tcttggtggggagattattaaa

SEQ ID NO: 14643 - DNA, 22 bp, Artificial sequence
  SiRNA target sequence
cttggtggggagattattaaag

SEQ ID NO: 14644 - DNA, 22 bp, Artificial sequence
  SiRNA target sequence
ttggtggggagattattaaagc

SEQ ID NO: 14645 - DNA, 22 bp, Artificial sequence
  SiRNA target sequence
tggtggggagattattaaagct

SEQ ID NO: 14646 - DNA, 22 bp, Artificial sequence
  SiRNA target sequence
ggtggggagattattaaagctg

SEQ ID NO: 14647 - DNA, 22 bp, Artificial sequence
  SiRNA target sequence
gtggggagattattaaagctga

SEQ ID NO: 14648 - DNA, 22 bp, Artificial sequence
  SiRNA target sequence
tggggagattattaaagctgat

SEQ ID NO: 14649 - DNA, 22 bp, Artificial sequence
  SiRNA target sequence
ggggagattattaaagctgatg

SEQ ID NO: 14650 - DNA, 22 bp, Artificial sequence
  SiRNA target sequence
gggagattattaaagctgatga

SEQ ID NO: 14651 - DNA, 22 bp, Artificial sequence
  SiRNA target sequence
ggagattattaaagctgatgaa

SEQ ID NO: 14652 - DNA, 22 bp, Artificial sequence
  SiRNA target sequence
gagattattaaagctgatgaat

SEQ ID NO: 14653 - DNA, 22 bp, Artificial sequence
  SiRNA target sequence
agattattaaagctgatgaata

SEQ ID NO: 14654 - DNA, 22 bp, Artificial sequence
  SiRNA target sequence
gattattaaagctgatgaatac

SEQ ID NO: 14655 - DNA, 22 bp, Artificial sequence
  SiRNA target sequence
attattaaagctgatgaataca

SEQ ID NO: 14656 - DNA, 22 bp, Artificial sequence
  SiRNA target sequence
ttattaaagctgatgaatacat

SEQ ID NO: 14657 - DNA, 22 bp, Artificial sequence
  SiRNA target sequence
tattaaagctgatgaatacatt

SEQ ID NO: 14658 - DNA, 22 bp, Artificial sequence
  SiRNA target sequence
attaaagctgatgaatacattg

SEQ ID NO: 14659 - DNA, 22 bp, Artificial sequence
  SiRNA target sequence
ttaaagctgatgaatacattgg

SEQ ID NO: 14660 - DNA, 22 bp, Artificial sequence
  SiRNA target sequence
taaagctgatgaatacattgga

SEQ ID NO: 14661 - DNA, 22 bp, Artificial sequence
  SiRNA target sequence
aaagctgatgaatacattggac

SEQ ID NO: 14662 - DNA, 22 bp, Artificial sequence
  SiRNA target sequence
aagctgatgaatacattggact

SEQ ID NO: 14663 - DNA, 22 bp, Artificial sequence
  SiRNA target sequence
agctgatgaatacattggacta

SEQ ID NO: 14664 - DNA, 22 bp, Artificial sequence
  SiRNA target sequence
gctgatgaatacattggactat

SEQ ID NO: 14665 - DNA, 22 bp, Artificial sequence
  SiRNA target sequence
ctgatgaatacattggactatc

SEQ ID NO: 14666 - DNA, 22 bp, Artificial sequence
  SiRNA target sequence
tgatgaatacattggactatct

SEQ ID NO: 14667 - DNA, 22 bp, Artificial sequence
  SiRNA target sequence
gatgaatacattggactatctt

SEQ ID NO: 14668 - DNA, 22 bp, Artificial sequence
  SiRNA target sequence
atgaatacattggactatcttt

SEQ ID NO: 14669 - DNA, 22 bp, Artificial sequence
  SiRNA target sequence
tgaatacattggactatctttt

SEQ ID NO: 14670 - DNA, 22 bp, Artificial sequence
  SiRNA target sequence
gaatacattggactatcttttg

SEQ ID NO: 14671 - DNA, 22 bp, Artificial sequence
  SiRNA target sequence
aatacattggactatcttttgt

SEQ ID NO: 14672 - DNA, 22 bp, Artificial sequence
  SiRNA target sequence
atacattggactatcttttgta

SEQ ID NO: 14673 - DNA, 22 bp, Artificial sequence
  SiRNA target sequence
tacattggactatcttttgtag

SEQ ID NO: 14674 - DNA, 22 bp, Artificial sequence
  SiRNA target sequence
acattggactatcttttgtagg

SEQ ID NO: 14675 - DNA, 22 bp, Artificial sequence
  SiRNA target sequence
cattggactatcttttgtaggg

SEQ ID NO: 14676 - DNA, 22 bp, Artificial sequence
  SiRNA target sequence
attggactatcttttgtaggga

SEQ ID NO: 14677 - DNA, 22 bp, Artificial sequence
  SiRNA target sequence
ttggactatcttttgtagggag

SEQ ID NO: 14678 - DNA, 22 bp, Artificial sequence
  SiRNA target sequence
tggactatcttttgtagggaga

SEQ ID NO: 14679 - DNA, 22 bp, Artificial sequence
  SiRNA target sequence
ggactatcttttgtagggagat

SEQ ID NO: 14680 - DNA, 22 bp, Artificial sequence
  SiRNA target sequence
gactatcttttgtagggagata

SEQ ID NO: 14681 - DNA, 22 bp, Artificial sequence
  SiRNA target sequence
actatcttttgtagggagatat

SEQ ID NO: 14682 - DNA, 22 bp, Artificial sequence
  SiRNA target sequence
ctatcttttgtagggagatatg

SEQ ID NO: 14683 - DNA, 22 bp, Artificial sequence
  SiRNA target sequence
tatcttttgtagggagatatga

SEQ ID NO: 14684 - DNA, 22 bp, Artificial sequence
  SiRNA target sequence
atcttttgtagggagatatgaa

SEQ ID NO: 14685 - DNA, 22 bp, Artificial sequence
  SiRNA target sequence
tcttttgtagggagatatgaag

SEQ ID NO: 14686 - DNA, 22 bp, Artificial sequence
  SiRNA target sequence
cttttgtagggagatatgaagg

SEQ ID NO: 14687 - DNA, 22 bp, Artificial sequence
  SiRNA target sequence
ttttgtagggagatatgaaggg

SEQ ID NO: 14688 - DNA, 22 bp, Artificial sequence
  SiRNA target sequence
tttgtagggagatatgaaggga

SEQ ID NO: 14689 - DNA, 22 bp, Artificial sequence
  SiRNA target sequence
ttgtagggagatatgaagggat

SEQ ID NO: 14690 - DNA, 22 bp, Artificial sequence
  SiRNA target sequence
tgtagggagatatgaagggatt

SEQ ID NO: 14691 - DNA, 22 bp, Artificial sequence
  SiRNA target sequence
gtagggagatatgaagggattg

SEQ ID NO: 14692 - DNA, 22 bp, Artificial sequence
  SiRNA target sequence
tagggagatatgaagggattgg

SEQ ID NO: 14693 - DNA, 22 bp, Artificial sequence
  SiRNA target sequence
agggagatatgaagggattggt

SEQ ID NO: 14694 - DNA, 22 bp, Artificial sequence
  SiRNA target sequence
gggagatatgaagggattggtt

SEQ ID NO: 14695 - DNA, 22 bp, Artificial sequence
  SiRNA target sequence
ggagatatgaagggattggttc

SEQ ID NO: 14696 - DNA, 22 bp, Artificial sequence
  SiRNA target sequence
gagatatgaagggattggttct

SEQ ID NO: 14697 - DNA, 22 bp, Artificial sequence
  SiRNA target sequence
agatatgaagggattggttcta

SEQ ID NO: 14698 - DNA, 22 bp, Artificial sequence
  SiRNA target sequence
gatatgaagggattggttctat

SEQ ID NO: 14699 - DNA, 22 bp, Artificial sequence
  SiRNA target sequence
atatgaagggattggttctatt

SEQ ID NO: 14700 - DNA, 22 bp, Artificial sequence
  SiRNA target sequence
tatgaagggattggttctattt

SEQ ID NO: 14701 - DNA, 22 bp, Artificial sequence
  SiRNA target sequence
atgaagggattggttctatttc

SEQ ID NO: 14702 - DNA, 22 bp, Artificial sequence
  SiRNA target sequence
tgaagggattggttctatttct

SEQ ID NO: 14703 - DNA, 22 bp, Artificial sequence
  SiRNA target sequence
gaagggattggttctatttcta

SEQ ID NO: 14704 - DNA, 22 bp, Artificial sequence
  SiRNA target sequence
aagggattggttctatttctac

SEQ ID NO: 14705 - DNA, 22 bp, Artificial sequence
  SiRNA target sequence
agggattggttctatttctact

SEQ ID NO: 14706 - DNA, 22 bp, Artificial sequence
  SiRNA target sequence
gggattggttctatttctacta

SEQ ID NO: 14707 - DNA, 22 bp, Artificial sequence
  SiRNA target sequence
ggattggttctatttctactat

SEQ ID NO: 14708 - DNA, 22 bp, Artificial sequence
  SiRNA target sequence
gattggttctatttctactata

SEQ ID NO: 14709 - DNA, 22 bp, Artificial sequence
  SiRNA target sequence
attggttctatttctactatat

SEQ ID NO: 14710 - DNA, 22 bp, Artificial sequence
  SiRNA target sequence
ttggttctatttctactatatc

SEQ ID NO: 14711 - DNA, 22 bp, Artificial sequence
  SiRNA target sequence
tggttctatttctactatatca

SEQ ID NO: 14712 - DNA, 22 bp, Artificial sequence
  SiRNA target sequence
ggttctatttctactatatcac

SEQ ID NO: 14713 - DNA, 22 bp, Artificial sequence
  SiRNA target sequence
gttctatttctactatatcact

SEQ ID NO: 14714 - DNA, 22 bp, Artificial sequence
  SiRNA target sequence
ttctatttctactatatcactt

SEQ ID NO: 14715 - DNA, 22 bp, Artificial sequence
  SiRNA target sequence
tctatttctactatatcacttc

SEQ ID NO: 14716 - DNA, 22 bp, Artificial sequence
  SiRNA target sequence
ctatttctactatatcacttca

SEQ ID NO: 14717 - DNA, 22 bp, Artificial sequence
  SiRNA target sequence
tatttctactatatcacttcag

SEQ ID NO: 14718 - DNA, 22 bp, Artificial sequence
  SiRNA target sequence
atttctactatatcacttcagc

SEQ ID NO: 14719 - DNA, 22 bp, Artificial sequence
  SiRNA target sequence
tttctactatatcacttcagca

SEQ ID NO: 14720 - DNA, 22 bp, Artificial sequence
  SiRNA target sequence
ttctactatatcacttcagcag

SEQ ID NO: 14721 - DNA, 22 bp, Artificial sequence
  SiRNA target sequence
tctactatatcacttcagcagt

SEQ ID NO: 14722 - DNA, 22 bp, Artificial sequence
  SiRNA target sequence
ctactatatcacttcagcagtt

SEQ ID NO: 14723 - DNA, 22 bp, Artificial sequence
  SiRNA target sequence
tactatatcacttcagcagttt

SEQ ID NO: 14724 - DNA, 22 bp, Artificial sequence
  SiRNA target sequence
actatatcacttcagcagttta

SEQ ID NO: 14725 - DNA, 22 bp, Artificial sequence
  SiRNA target sequence
ctatatcacttcagcagtttaa

SEQ ID NO: 14726 - DNA, 22 bp, Artificial sequence
  SiRNA target sequence
tatatcacttcagcagtttaat

SEQ ID NO: 14727 - DNA, 22 bp, Artificial sequence
  SiRNA target sequence
atatcacttcagcagtttaata

SEQ ID NO: 14728 - DNA, 22 bp, Artificial sequence
  SiRNA target sequence
tatcacttcagcagtttaatac

SEQ ID NO: 14729 - DNA, 22 bp, Artificial sequence
  SiRNA target sequence
atcacttcagcagtttaataca

SEQ ID NO: 14730 - DNA, 22 bp, Artificial sequence
  SiRNA target sequence
tcacttcagcagtttaatacac

SEQ ID NO: 14731 - DNA, 22 bp, Artificial sequence
  SiRNA target sequence
cacttcagcagtttaatacact

SEQ ID NO: 14732 - DNA, 22 bp, Artificial sequence
  SiRNA target sequence
acttcagcagtttaatacactg

SEQ ID NO: 14733 - DNA, 22 bp, Artificial sequence
  SiRNA target sequence
cttcagcagtttaatacactgt

SEQ ID NO: 14734 - DNA, 22 bp, Artificial sequence
  SiRNA target sequence
ttcagcagtttaatacactgtc

SEQ ID NO: 14735 - DNA, 22 bp, Artificial sequence
  SiRNA target sequence
tcagcagtttaatacactgtct

SEQ ID NO: 14736 - DNA, 22 bp, Artificial sequence
  SiRNA target sequence
cagcagtttaatacactgtcta

SEQ ID NO: 14737 - DNA, 22 bp, Artificial sequence
  SiRNA target sequence
agcagtttaatacactgtctat

SEQ ID NO: 14738 - DNA, 22 bp, Artificial sequence
  SiRNA target sequence
gcagtttaatacactgtctata

SEQ ID NO: 14739 - DNA, 22 bp, Artificial sequence
  SiRNA target sequence
cagtttaatacactgtctatag

SEQ ID NO: 14740 - DNA, 22 bp, Artificial sequence
  SiRNA target sequence
agtttaatacactgtctataga

SEQ ID NO: 14741 - DNA, 22 bp, Artificial sequence
  SiRNA target sequence
gtttaatacactgtctatagat

SEQ ID NO: 14742 - DNA, 22 bp, Artificial sequence
  SiRNA target sequence
tttaatacactgtctatagatt

SEQ ID NO: 14743 - DNA, 22 bp, Artificial sequence
  SiRNA target sequence
ttaatacactgtctatagatta

SEQ ID NO: 14744 - DNA, 22 bp, Artificial sequence
  SiRNA target sequence
taatacactgtctatagattat

SEQ ID NO: 14745 - DNA, 22 bp, Artificial sequence
  SiRNA target sequence
aatacactgtctatagattatt

SEQ ID NO: 14746 - DNA, 22 bp, Artificial sequence
  SiRNA target sequence
atacactgtctatagattatta

SEQ ID NO: 14747 - DNA, 22 bp, Artificial sequence
  SiRNA target sequence
tacactgtctatagattattac

SEQ ID NO: 14748 - DNA, 22 bp, Artificial sequence
  SiRNA target sequence
acactgtctatagattattaca

SEQ ID NO: 14749 - DNA, 22 bp, Artificial sequence
  SiRNA target sequence
cactgtctatagattattacaa

SEQ ID NO: 14750 - DNA, 22 bp, Artificial sequence
  SiRNA target sequence
actgtctatagattattacaag

SEQ ID NO: 14751 - DNA, 22 bp, Artificial sequence
  SiRNA target sequence
ctgtctatagattattacaaga

SEQ ID NO: 14752 - DNA, 22 bp, Artificial sequence
  SiRNA target sequence
tgtctatagattattacaagac

SEQ ID NO: 14753 - DNA, 22 bp, Artificial sequence
  SiRNA target sequence
gtctatagattattacaagaca

SEQ ID NO: 14754 - DNA, 22 bp, Artificial sequence
  SiRNA target sequence
tctatagattattacaagacat

SEQ ID NO: 14755 - DNA, 22 bp, Artificial sequence
  SiRNA target sequence
ctatagattattacaagacatt

SEQ ID NO: 14756 - DNA, 22 bp, Artificial sequence
  SiRNA target sequence
tatagattattacaagacattg

SEQ ID NO: 14757 - DNA, 22 bp, Artificial sequence
  SiRNA target sequence
atagattattacaagacattgt

SEQ ID NO: 14758 - DNA, 22 bp, Artificial sequence
  SiRNA target sequence
tagattattacaagacattgtc

SEQ ID NO: 14759 - DNA, 22 bp, Artificial sequence
  SiRNA target sequence
agattattacaagacattgtct

SEQ ID NO: 14760 - DNA, 22 bp, Artificial sequence
  SiRNA target sequence
gattattacaagacattgtctt

SEQ ID NO: 14761 - DNA, 22 bp, Artificial sequence
  SiRNA target sequence
attattacaagacattgtcttc

SEQ ID NO: 14762 - DNA, 22 bp, Artificial sequence
  SiRNA target sequence
ttattacaagacattgtcttct

SEQ ID NO: 14763 - DNA, 22 bp, Artificial sequence
  SiRNA target sequence
tattacaagacattgtcttcta

SEQ ID NO: 14764 - DNA, 22 bp, Artificial sequence
  SiRNA target sequence
attacaagacattgtcttctat

SEQ ID NO: 14765 - DNA, 22 bp, Artificial sequence
  SiRNA target sequence
ttacaagacattgtcttctatt

SEQ ID NO: 14766 - DNA, 22 bp, Artificial sequence
  SiRNA target sequence
tacaagacattgtcttctattt

SEQ ID NO: 14767 - DNA, 22 bp, Artificial sequence
  SiRNA target sequence
acaagacattgtcttctatttg

SEQ ID NO: 14768 - DNA, 22 bp, Artificial sequence
  SiRNA target sequence
caagacattgtcttctatttgt

SEQ ID NO: 14769 - DNA, 22 bp, Artificial sequence
  SiRNA target sequence
aagacattgtcttctatttgtg

SEQ ID NO: 14770 - DNA, 22 bp, Artificial sequence
  SiRNA target sequence
agacattgtcttctatttgtga

SEQ ID NO: 14771 - DNA, 22 bp, Artificial sequence
  SiRNA target sequence
gacattgtcttctatttgtgac

SEQ ID NO: 14772 - DNA, 22 bp, Artificial sequence
  SiRNA target sequence
acattgtcttctatttgtgacg

SEQ ID NO: 14773 - DNA, 22 bp, Artificial sequence
  SiRNA target sequence
cattgtcttctatttgtgacgt

SEQ ID NO: 14774 - DNA, 22 bp, Artificial sequence
  SiRNA target sequence
attgtcttctatttgtgacgta

SEQ ID NO: 14775 - DNA, 22 bp, Artificial sequence
  SiRNA target sequence
ttgtcttctatttgtgacgtag

SEQ ID NO: 14776 - DNA, 22 bp, Artificial sequence
  SiRNA target sequence
tgtcttctatttgtgacgtagg

SEQ ID NO: 14777 - DNA, 22 bp, Artificial sequence
  SiRNA target sequence
gtcttctatttgtgacgtaggt

SEQ ID NO: 14778 - DNA, 22 bp, Artificial sequence
  SiRNA target sequence
tcttctatttgtgacgtaggta

SEQ ID NO: 14779 - DNA, 22 bp, Artificial sequence
  SiRNA target sequence
cttctatttgtgacgtaggtat

SEQ ID NO: 14780 - DNA, 22 bp, Artificial sequence
  SiRNA target sequence
ttctatttgtgacgtaggtatt

SEQ ID NO: 14781 - DNA, 22 bp, Artificial sequence
  SiRNA target sequence
tctatttgtgacgtaggtatta

SEQ ID NO: 14782 - DNA, 22 bp, Artificial sequence
  SiRNA target sequence
ctatttgtgacgtaggtattaa

SEQ ID NO: 14783 - DNA, 22 bp, Artificial sequence
  SiRNA target sequence
tatttgtgacgtaggtattaaa

SEQ ID NO: 14784 - DNA, 22 bp, Artificial sequence
  SiRNA target sequence
atttgtgacgtaggtattaaaa

SEQ ID NO: 14785 - DNA, 22 bp, Artificial sequence
  SiRNA target sequence
tttgtgacgtaggtattaaaat

SEQ ID NO: 14786 - DNA, 22 bp, Artificial sequence
  SiRNA target sequence
ttgtgacgtaggtattaaaata

SEQ ID NO: 14787 - DNA, 22 bp, Artificial sequence
  SiRNA target sequence
tgtgacgtaggtattaaaatat

SEQ ID NO: 14788 - DNA, 22 bp, Artificial sequence
  SiRNA target sequence
gtgacgtaggtattaaaatatc

SEQ ID NO: 14789 - DNA, 22 bp, Artificial sequence
  SiRNA target sequence
tgacgtaggtattaaaatatca

SEQ ID NO: 14790 - DNA, 22 bp, Artificial sequence
  SiRNA target sequence
gacgtaggtattaaaatatcaa

SEQ ID NO: 14791 - DNA, 22 bp, Artificial sequence
  SiRNA target sequence
acgtaggtattaaaatatcaac

SEQ ID NO: 14792 - DNA, 22 bp, Artificial sequence
  SiRNA target sequence
cgtaggtattaaaatatcaact

SEQ ID NO: 14793 - DNA, 22 bp, Artificial sequence
  SiRNA target sequence
gtaggtattaaaatatcaactg

SEQ ID NO: 14794 - DNA, 22 bp, Artificial sequence
  SiRNA target sequence
taggtattaaaatatcaactga

SEQ ID NO: 14795 - DNA, 22 bp, Artificial sequence
  SiRNA target sequence
aggtattaaaatatcaactgat

SEQ ID NO: 14796 - DNA, 22 bp, Artificial sequence
  SiRNA target sequence
ggtattaaaatatcaactgata

SEQ ID NO: 14797 - DNA, 22 bp, Artificial sequence
  SiRNA target sequence
gtattaaaatatcaactgatag

SEQ ID NO: 14798 - DNA, 22 bp, Artificial sequence
  SiRNA target sequence
tattaaaatatcaactgatagg

SEQ ID NO: 14799 - DNA, 22 bp, Artificial sequence
  SiRNA target sequence
attaaaatatcaactgataggg

SEQ ID NO: 14800 - DNA, 22 bp, Artificial sequence
  SiRNA target sequence
ttaaaatatcaactgataggga

SEQ ID NO: 14801 - DNA, 22 bp, Artificial sequence
  SiRNA target sequence
taaaatatcaactgatagggaa

SEQ ID NO: 14802 - DNA, 22 bp, Artificial sequence
  SiRNA target sequence
aaaatatcaactgatagggaaa

SEQ ID NO: 14803 - DNA, 22 bp, Artificial sequence
  SiRNA target sequence
aaatatcaactgatagggaaaa

SEQ ID NO: 14804 - DNA, 22 bp, Artificial sequence
  SiRNA target sequence
aatatcaactgatagggaaaaa

SEQ ID NO: 14805 - DNA, 22 bp, Artificial sequence
  SiRNA target sequence
atatcaactgatagggaaaaat

SEQ ID NO: 14806 - DNA, 22 bp, Artificial sequence
  SiRNA target sequence
tatcaactgatagggaaaaatc

SEQ ID NO: 14807 - DNA, 22 bp, Artificial sequence
  SiRNA target sequence
atcaactgatagggaaaaatca

SEQ ID NO: 14808 - DNA, 22 bp, Artificial sequence
  SiRNA target sequence
tcaactgatagggaaaaatcag

SEQ ID NO: 14809 - DNA, 22 bp, Artificial sequence
  SiRNA target sequence
caactgatagggaaaaatcagt

SEQ ID NO: 14810 - DNA, 22 bp, Artificial sequence
  SiRNA target sequence
aactgatagggaaaaatcagtt

SEQ ID NO: 14811 - DNA, 22 bp, Artificial sequence
  SiRNA target sequence
actgatagggaaaaatcagtta

SEQ ID NO: 14812 - DNA, 22 bp, Artificial sequence
  SiRNA target sequence
ctgatagggaaaaatcagttaa

SEQ ID NO: 14813 - DNA, 22 bp, Artificial sequence
  SiRNA target sequence
tgatagggaaaaatcagttaat

SEQ ID NO: 14814 - DNA, 22 bp, Artificial sequence
  SiRNA target sequence
gatagggaaaaatcagttaatt

SEQ ID NO: 14815 - DNA, 22 bp, Artificial sequence
  SiRNA target sequence
atagggaaaaatcagttaatta

SEQ ID NO: 14816 - DNA, 22 bp, Artificial sequence
  SiRNA target sequence
tagggaaaaatcagttaattat

SEQ ID NO: 14817 - DNA, 22 bp, Artificial sequence
  SiRNA target sequence
agggaaaaatcagttaattatg

SEQ ID NO: 14818 - DNA, 22 bp, Artificial sequence
  SiRNA target sequence
gggaaaaatcagttaattatgg

SEQ ID NO: 14819 - DNA, 22 bp, Artificial sequence
  SiRNA target sequence
ggaaaaatcagttaattatgga

SEQ ID NO: 14820 - DNA, 22 bp, Artificial sequence
  SiRNA target sequence
gaaaaatcagttaattatggat

SEQ ID NO: 14821 - DNA, 22 bp, Artificial sequence
  SiRNA target sequence
aaaaatcagttaattatggatt

SEQ ID NO: 14822 - DNA, 22 bp, Artificial sequence
  SiRNA target sequence
aaaatcagttaattatggatta

SEQ ID NO: 14823 - DNA, 22 bp, Artificial sequence
  SiRNA target sequence
aaatcagttaattatggattag

SEQ ID NO: 14824 - DNA, 22 bp, Artificial sequence
  SiRNA target sequence
aatcagttaattatggattagg

SEQ ID NO: 14825 - DNA, 22 bp, Artificial sequence
  SiRNA target sequence
atcagttaattatggattagga

SEQ ID NO: 14826 - DNA, 22 bp, Artificial sequence
  SiRNA target sequence
tcagttaattatggattaggag

SEQ ID NO: 14827 - DNA, 22 bp, Artificial sequence
  SiRNA target sequence
cagttaattatggattaggagt

SEQ ID NO: 14828 - DNA, 22 bp, Artificial sequence
  SiRNA target sequence
agttaattatggattaggagtt

SEQ ID NO: 14829 - DNA, 22 bp, Artificial sequence
  SiRNA target sequence
gttaattatggattaggagtta

SEQ ID NO: 14830 - DNA, 22 bp, Artificial sequence
  SiRNA target sequence
ttaattatggattaggagttaa

SEQ ID NO: 14831 - DNA, 22 bp, Artificial sequence
  SiRNA target sequence
taattatggattaggagttaaa

SEQ ID NO: 14832 - DNA, 22 bp, Artificial sequence
  SiRNA target sequence
aattatggattaggagttaaac

SEQ ID NO: 14833 - DNA, 22 bp, Artificial sequence
  SiRNA target sequence
attatggattaggagttaaact

SEQ ID NO: 14834 - DNA, 22 bp, Artificial sequence
  SiRNA target sequence
ttatggattaggagttaaacta

SEQ ID NO: 14835 - DNA, 22 bp, Artificial sequence
  SiRNA target sequence
tatggattaggagttaaactac

SEQ ID NO: 14836 - DNA, 22 bp, Artificial sequence
  SiRNA target sequence
atggattaggagttaaactaca

SEQ ID NO: 14837 - DNA, 22 bp, Artificial sequence
  SiRNA target sequence
tggattaggagttaaactacac

SEQ ID NO: 14838 - DNA, 22 bp, Artificial sequence
  SiRNA target sequence
ggattaggagttaaactacaca

SEQ ID NO: 14839 - DNA, 22 bp, Artificial sequence
  SiRNA target sequence
gattaggagttaaactacacag

SEQ ID NO: 14840 - DNA, 22 bp, Artificial sequence
  SiRNA target sequence
attaggagttaaactacacagt

SEQ ID NO: 14841 - DNA, 22 bp, Artificial sequence
  SiRNA target sequence
ttaggagttaaactacacagta

SEQ ID NO: 14842 - DNA, 22 bp, Artificial sequence
  SiRNA target sequence
taggagttaaactacacagtaa

SEQ ID NO: 14843 - DNA, 22 bp, Artificial sequence
  SiRNA target sequence
aggagttaaactacacagtaaa

SEQ ID NO: 14844 - DNA, 22 bp, Artificial sequence
  SiRNA target sequence
ggagttaaactacacagtaaaa

SEQ ID NO: 14845 - DNA, 22 bp, Artificial sequence
  SiRNA target sequence
gagttaaactacacagtaaaaa

SEQ ID NO: 14846 - DNA, 22 bp, Artificial sequence
  SiRNA target sequence
agttaaactacacagtaaaaaa

SEQ ID NO: 14847 - DNA, 22 bp, Artificial sequence
  SiRNA target sequence
gttaaactacacagtaaaaaag

SEQ ID NO: 14848 - DNA, 22 bp, Artificial sequence
  SiRNA target sequence
ttaaactacacagtaaaaaagg

SEQ ID NO: 14849 - DNA, 22 bp, Artificial sequence
  SiRNA target sequence
taaactacacagtaaaaaagga

SEQ ID NO: 14850 - DNA, 22 bp, Artificial sequence
  SiRNA target sequence
aaactacacagtaaaaaaggag

SEQ ID NO: 14851 - DNA, 22 bp, Artificial sequence
  SiRNA target sequence
aactacacagtaaaaaaggaga

SEQ ID NO: 14852 - DNA, 22 bp, Artificial sequence
  SiRNA target sequence
actacacagtaaaaaaggagaa

SEQ ID NO: 14853 - DNA, 22 bp, Artificial sequence
  SiRNA target sequence
ctacacagtaaaaaaggagaaa

SEQ ID NO: 14854 - DNA, 22 bp, Artificial sequence
  SiRNA target sequence
tacacagtaaaaaaggagaaat

SEQ ID NO: 14855 - DNA, 22 bp, Artificial sequence
  SiRNA target sequence
acacagtaaaaaaggagaaatt

SEQ ID NO: 14856 - DNA, 22 bp, Artificial sequence
  SiRNA target sequence
cacagtaaaaaaggagaaatta

SEQ ID NO: 14857 - DNA, 22 bp, Artificial sequence
  SiRNA target sequence
acagtaaaaaaggagaaattat

SEQ ID NO: 14858 - DNA, 22 bp, Artificial sequence
  SiRNA target sequence
cagtaaaaaaggagaaattatc

SEQ ID NO: 14859 - DNA, 22 bp, Artificial sequence
  SiRNA target sequence
agtaaaaaaggagaaattatcg

SEQ ID NO: 14860 - DNA, 22 bp, Artificial sequence
  SiRNA target sequence
gtaaaaaaggagaaattatcgg

SEQ ID NO: 14861 - DNA, 22 bp, Artificial sequence
  SiRNA target sequence
taaaaaaggagaaattatcgga

SEQ ID NO: 14862 - DNA, 22 bp, Artificial sequence
  SiRNA target sequence
aaaaaaggagaaattatcggat

SEQ ID NO: 14863 - DNA, 22 bp, Artificial sequence
  SiRNA target sequence
aaaaaggagaaattatcggatg

SEQ ID NO: 14864 - DNA, 22 bp, Artificial sequence
  SiRNA target sequence
aaaaggagaaattatcggatgt

SEQ ID NO: 14865 - DNA, 22 bp, Artificial sequence
  SiRNA target sequence
aaaggagaaattatcggatgtg

SEQ ID NO: 14866 - DNA, 22 bp, Artificial sequence
  SiRNA target sequence
aaggagaaattatcggatgtgt

SEQ ID NO: 14867 - DNA, 22 bp, Artificial sequence
  SiRNA target sequence
aggagaaattatcggatgtgta

SEQ ID NO: 14868 - DNA, 22 bp, Artificial sequence
  SiRNA target sequence
ggagaaattatcggatgtgtag

SEQ ID NO: 14869 - DNA, 22 bp, Artificial sequence
  SiRNA target sequence
gagaaattatcggatgtgtaga

SEQ ID NO: 14870 - DNA, 22 bp, Artificial sequence
  SiRNA target sequence
agaaattatcggatgtgtagat

SEQ ID NO: 14871 - DNA, 22 bp, Artificial sequence
  SiRNA target sequence
gaaattatcggatgtgtagata

SEQ ID NO: 14872 - DNA, 22 bp, Artificial sequence
  SiRNA target sequence
aaattatcggatgtgtagataa

SEQ ID NO: 14873 - DNA, 22 bp, Artificial sequence
  SiRNA target sequence
aattatcggatgtgtagataac

SEQ ID NO: 14874 - DNA, 22 bp, Artificial sequence
  SiRNA target sequence
attatcggatgtgtagataaca

SEQ ID NO: 14875 - DNA, 22 bp, Artificial sequence
  SiRNA target sequence
ttatcggatgtgtagataacaa

SEQ ID NO: 14876 - DNA, 22 bp, Artificial sequence
  SiRNA target sequence
tatcggatgtgtagataacaat

SEQ ID NO: 14877 - DNA, 22 bp, Artificial sequence
  SiRNA target sequence
atcggatgtgtagataacaatc

SEQ ID NO: 14878 - DNA, 22 bp, Artificial sequence
  SiRNA target sequence
tcggatgtgtagataacaatca

SEQ ID NO: 14879 - DNA, 22 bp, Artificial sequence
  SiRNA target sequence
cggatgtgtagataacaatcat

SEQ ID NO: 14880 - DNA, 22 bp, Artificial sequence
  SiRNA target sequence
ggatgtgtagataacaatcata

SEQ ID NO: 14881 - DNA, 22 bp, Artificial sequence
  SiRNA target sequence
gatgtgtagataacaatcatat

SEQ ID NO: 14882 - DNA, 22 bp, Artificial sequence
  SiRNA target sequence
atgtgtagataacaatcatatt

SEQ ID NO: 14883 - DNA, 22 bp, Artificial sequence
  SiRNA target sequence
tgtgtagataacaatcatattt

SEQ ID NO: 14884 - DNA, 22 bp, Artificial sequence
  SiRNA target sequence
gtgtagataacaatcatatttt

SEQ ID NO: 14885 - DNA, 22 bp, Artificial sequence
  SiRNA target sequence
tgtagataacaatcatatttta

SEQ ID NO: 14886 - DNA, 22 bp, Artificial sequence
  SiRNA target sequence
gtagataacaatcatattttaa

SEQ ID NO: 14887 - DNA, 22 bp, Artificial sequence
  SiRNA target sequence
tagataacaatcatattttaag

SEQ ID NO: 14888 - DNA, 22 bp, Artificial sequence
  SiRNA target sequence
agataacaatcatattttaagc

SEQ ID NO: 14889 - DNA, 22 bp, Artificial sequence
  SiRNA target sequence
gataacaatcatattttaagca

SEQ ID NO: 14890 - DNA, 22 bp, Artificial sequence
  SiRNA target sequence
ataacaatcatattttaagcat

SEQ ID NO: 14891 - DNA, 22 bp, Artificial sequence
  SiRNA target sequence
taacaatcatattttaagcata

SEQ ID NO: 14892 - DNA, 22 bp, Artificial sequence
  SiRNA target sequence
aacaatcatattttaagcataa

SEQ ID NO: 14893 - DNA, 22 bp, Artificial sequence
  SiRNA target sequence
acaatcatattttaagcataat

SEQ ID NO: 14894 - DNA, 22 bp, Artificial sequence
  SiRNA target sequence
caatcatattttaagcataatt

SEQ ID NO: 14895 - DNA, 22 bp, Artificial sequence
  SiRNA target sequence
aatcatattttaagcataattt

SEQ ID NO: 14896 - DNA, 22 bp, Artificial sequence
  SiRNA target sequence
atcatattttaagcataattta

SEQ ID NO: 14897 - DNA, 22 bp, Artificial sequence
  SiRNA target sequence
tcatattttaagcataatttat

SEQ ID NO: 14898 - DNA, 22 bp, Artificial sequence
  SiRNA target sequence
catattttaagcataatttata

SEQ ID NO: 14899 - DNA, 22 bp, Artificial sequence
  SiRNA target sequence
atattttaagcataatttataa

SEQ ID NO: 14900 - DNA, 22 bp, Artificial sequence
  SiRNA target sequence
tattttaagcataatttataat

SEQ ID NO: 14901 - DNA, 22 bp, Artificial sequence
  SiRNA target sequence
attttaagcataatttataatg

SEQ ID NO: 14902 - DNA, 22 bp, Artificial sequence
  SiRNA target sequence
ttttaagcataatttataatga

SEQ ID NO: 14903 - DNA, 22 bp, Artificial sequence
  SiRNA target sequence
tttaagcataatttataatgat

SEQ ID NO: 14904 - DNA, 22 bp, Artificial sequence
  SiRNA target sequence
ttaagcataatttataatgata

SEQ ID NO: 14905 - DNA, 22 bp, Artificial sequence
  SiRNA target sequence
taagcataatttataatgataa

SEQ ID NO: 14906 - DNA, 22 bp, Artificial sequence
  SiRNA target sequence
aagcataatttataatgataaa

SEQ ID NO: 14907 - DNA, 22 bp, Artificial sequence
  SiRNA target sequence
agcataatttataatgataaat

SEQ ID NO: 14908 - DNA, 22 bp, Artificial sequence
  SiRNA target sequence
gcataatttataatgataaatt

SEQ ID NO: 14909 - DNA, 22 bp, Artificial sequence
  SiRNA target sequence
cataatttataatgataaatta

SEQ ID NO: 14910 - DNA, 22 bp, Artificial sequence
  SiRNA target sequence
ataatttataatgataaattat

SEQ ID NO: 14911 - DNA, 22 bp, Artificial sequence
  SiRNA target sequence
taatttataatgataaattatc

SEQ ID NO: 14912 - DNA, 22 bp, Artificial sequence
  SiRNA target sequence
aatttataatgataaattatct

SEQ ID NO: 14913 - DNA, 22 bp, Artificial sequence
  SiRNA target sequence
atttataatgataaattatctg

SEQ ID NO: 14914 - DNA, 22 bp, Artificial sequence
  SiRNA target sequence
tttataatgataaattatctga

SEQ ID NO: 14915 - DNA, 22 bp, Artificial sequence
  SiRNA target sequence
ttataatgataaattatctgaa

SEQ ID NO: 14916 - DNA, 22 bp, Artificial sequence
  SiRNA target sequence
tataatgataaattatctgaag

SEQ ID NO: 14917 - DNA, 22 bp, Artificial sequence
  SiRNA target sequence
ataatgataaattatctgaagg

SEQ ID NO: 14918 - DNA, 22 bp, Artificial sequence
  SiRNA target sequence
taatgataaattatctgaaggg

SEQ ID NO: 14919 - DNA, 22 bp, Artificial sequence
  SiRNA target sequence
aatgataaattatctgaagggt

SEQ ID NO: 14920 - DNA, 22 bp, Artificial sequence
  SiRNA target sequence
atgataaattatctgaagggtt

SEQ ID NO: 14921 - DNA, 22 bp, Artificial sequence
  SiRNA target sequence
tgataaattatctgaagggtta

SEQ ID NO: 14922 - DNA, 22 bp, Artificial sequence
  SiRNA target sequence
gataaattatctgaagggttaa

SEQ ID NO: 14923 - DNA, 22 bp, Artificial sequence
  SiRNA target sequence
ataaattatctgaagggttaac

SEQ ID NO: 14924 - DNA, 22 bp, Artificial sequence
  SiRNA target sequence
taaattatctgaagggttaaca

SEQ ID NO: 14925 - DNA, 22 bp, Artificial sequence
  SiRNA target sequence
aaattatctgaagggttaacac

SEQ ID NO: 14926 - DNA, 22 bp, Artificial sequence
  SiRNA target sequence
aattatctgaagggttaacact

SEQ ID NO: 14927 - DNA, 22 bp, Artificial sequence
  SiRNA target sequence
attatctgaagggttaacactt

SEQ ID NO: 14928 - DNA, 22 bp, Artificial sequence
  SiRNA target sequence
ttatctgaagggttaacactta

SEQ ID NO: 14929 - DNA, 22 bp, Artificial sequence
  SiRNA target sequence
tatctgaagggttaacacttaa

SEQ ID NO: 14930 - DNA, 22 bp, Artificial sequence
  SiRNA target sequence
atctgaagggttaacacttaat

SEQ ID NO: 14931 - DNA, 22 bp, Artificial sequence
  SiRNA target sequence
tctgaagggttaacacttaatt

SEQ ID NO: 14932 - DNA, 22 bp, Artificial sequence
  SiRNA target sequence
ctgaagggttaacacttaattt

SEQ ID NO: 14933 - DNA, 22 bp, Artificial sequence
  SiRNA target sequence
tgaagggttaacacttaatttg

SEQ ID NO: 14934 - DNA, 22 bp, Artificial sequence
  SiRNA target sequence
gaagggttaacacttaatttga

SEQ ID NO: 14935 - DNA, 22 bp, Artificial sequence
  SiRNA target sequence
aagggttaacacttaatttgag

SEQ ID NO: 14936 - DNA, 22 bp, Artificial sequence
  SiRNA target sequence
agggttaacacttaatttgagt

SEQ ID NO: 14937 - DNA, 22 bp, Artificial sequence
  SiRNA target sequence
gggttaacacttaatttgagtt

SEQ ID NO: 14938 - DNA, 22 bp, Artificial sequence
  SiRNA target sequence
ggttaacacttaatttgagttg

SEQ ID NO: 14939 - DNA, 22 bp, Artificial sequence
  SiRNA target sequence
gttaacacttaatttgagttgt

SEQ ID NO: 14940 - DNA, 22 bp, Artificial sequence
  SiRNA target sequence
ttaacacttaatttgagttgta

SEQ ID NO: 14941 - DNA, 22 bp, Artificial sequence
  SiRNA target sequence
taacacttaatttgagttgtag

SEQ ID NO: 14942 - DNA, 22 bp, Artificial sequence
  SiRNA target sequence
aacacttaatttgagttgtaga

SEQ ID NO: 14943 - DNA, 22 bp, Artificial sequence
  SiRNA target sequence
acacttaatttgagttgtagat

SEQ ID NO: 14944 - DNA, 22 bp, Artificial sequence
  SiRNA target sequence
cacttaatttgagttgtagatt

SEQ ID NO: 14945 - DNA, 22 bp, Artificial sequence
  SiRNA target sequence
acttaatttgagttgtagattt

SEQ ID NO: 14946 - DNA, 22 bp, Artificial sequence
  SiRNA target sequence
cttaatttgagttgtagatttg

SEQ ID NO: 14947 - DNA, 22 bp, Artificial sequence
  SiRNA target sequence
ttaatttgagttgtagatttgg

SEQ ID NO: 14948 - DNA, 22 bp, Artificial sequence
  SiRNA target sequence
taatttgagttgtagatttggt

SEQ ID NO: 14949 - DNA, 22 bp, Artificial sequence
  SiRNA target sequence
aatttgagttgtagatttggta

SEQ ID NO: 14950 - DNA, 22 bp, Artificial sequence
  SiRNA target sequence
atttgagttgtagatttggtaa

SEQ ID NO: 14951 - DNA, 22 bp, Artificial sequence
  SiRNA target sequence
tttgagttgtagatttggtaag

SEQ ID NO: 14952 - DNA, 22 bp, Artificial sequence
  SiRNA target sequence
ttgagttgtagatttggtaaga

SEQ ID NO: 14953 - DNA, 22 bp, Artificial sequence
  SiRNA target sequence
tgagttgtagatttggtaagaa

SEQ ID NO: 14954 - DNA, 22 bp, Artificial sequence
  SiRNA target sequence
gagttgtagatttggtaagaaa

SEQ ID NO: 14955 - DNA, 22 bp, Artificial sequence
  SiRNA target sequence
agttgtagatttggtaagaaag

SEQ ID NO: 14956 - DNA, 22 bp, Artificial sequence
  SiRNA target sequence
gttgtagatttggtaagaaagt

SEQ ID NO: 14957 - DNA, 22 bp, Artificial sequence
  SiRNA target sequence
ttgtagatttggtaagaaagta

SEQ ID NO: 14958 - DNA, 22 bp, Artificial sequence
  SiRNA target sequence
tgtagatttggtaagaaagtat

SEQ ID NO: 14959 - DNA, 22 bp, Artificial sequence
  SiRNA target sequence
gtagatttggtaagaaagtatt

SEQ ID NO: 14960 - DNA, 22 bp, Artificial sequence
  SiRNA target sequence
tagatttggtaagaaagtattt

SEQ ID NO: 14961 - DNA, 22 bp, Artificial sequence
  SiRNA target sequence
agatttggtaagaaagtatttg

SEQ ID NO: 14962 - DNA, 22 bp, Artificial sequence
  SiRNA target sequence
gatttggtaagaaagtatttga

SEQ ID NO: 14963 - DNA, 22 bp, Artificial sequence
  SiRNA target sequence
atttggtaagaaagtatttgat

SEQ ID NO: 14964 - DNA, 22 bp, Artificial sequence
  SiRNA target sequence
tttggtaagaaagtatttgatt

SEQ ID NO: 14965 - DNA, 22 bp, Artificial sequence
  SiRNA target sequence
ttggtaagaaagtatttgatta

SEQ ID NO: 14966 - DNA, 22 bp, Artificial sequence
  SiRNA target sequence
tggtaagaaagtatttgattat

SEQ ID NO: 14967 - DNA, 22 bp, Artificial sequence
  SiRNA target sequence
ggtaagaaagtatttgattatg

SEQ ID NO: 14968 - DNA, 22 bp, Artificial sequence
  SiRNA target sequence
gtaagaaagtatttgattatgg

SEQ ID NO: 14969 - DNA, 22 bp, Artificial sequence
  SiRNA target sequence
taagaaagtatttgattatggc

SEQ ID NO: 14970 - DNA, 22 bp, Artificial sequence
  SiRNA target sequence
aagaaagtatttgattatggct

SEQ ID NO: 14971 - DNA, 22 bp, Artificial sequence
  SiRNA target sequence
agaaagtatttgattatggcta

SEQ ID NO: 14972 - DNA, 22 bp, Artificial sequence
  SiRNA target sequence
gaaagtatttgattatggctat

SEQ ID NO: 14973 - DNA, 22 bp, Artificial sequence
  SiRNA target sequence
aaagtatttgattatggctatg

SEQ ID NO: 14974 - DNA, 22 bp, Artificial sequence
  SiRNA target sequence
aagtatttgattatggctatgg

SEQ ID NO: 14975 - DNA, 22 bp, Artificial sequence
  SiRNA target sequence
agtatttgattatggctatggg

SEQ ID NO: 14976 - DNA, 22 bp, Artificial sequence
  SiRNA target sequence
gtatttgattatggctatgggt

SEQ ID NO: 14977 - DNA, 22 bp, Artificial sequence
  SiRNA target sequence
tatttgattatggctatgggtt

SEQ ID NO: 14978 - DNA, 22 bp, Artificial sequence
  SiRNA target sequence
atttgattatggctatgggttt

SEQ ID NO: 14979 - DNA, 22 bp, Artificial sequence
  SiRNA target sequence
tttgattatggctatgggttta

SEQ ID NO: 14980 - DNA, 22 bp, Artificial sequence
  SiRNA target sequence
ttgattatggctatgggtttat

SEQ ID NO: 14981 - DNA, 22 bp, Artificial sequence
  SiRNA target sequence
tgattatggctatgggtttatt

SEQ ID NO: 14982 - DNA, 22 bp, Artificial sequence
  SiRNA target sequence
gattatggctatgggtttattt

SEQ ID NO: 14983 - DNA, 22 bp, Artificial sequence
  SiRNA target sequence
attatggctatgggtttattta

SEQ ID NO: 14984 - DNA, 22 bp, Artificial sequence
  SiRNA target sequence
ttatggctatgggtttatttat

SEQ ID NO: 14985 - DNA, 22 bp, Artificial sequence
  SiRNA target sequence
tatggctatgggtttatttatg

SEQ ID NO: 14986 - DNA, 22 bp, Artificial sequence
  SiRNA target sequence
atggctatgggtttatttatga

SEQ ID NO: 14987 - DNA, 22 bp, Artificial sequence
  SiRNA target sequence
tggctatgggtttatttatgaa

SEQ ID NO: 14988 - DNA, 22 bp, Artificial sequence
  SiRNA target sequence
ggctatgggtttatttatgaat

SEQ ID NO: 14989 - DNA, 22 bp, Artificial sequence
  SiRNA target sequence
gctatgggtttatttatgaatt

SEQ ID NO: 14990 - DNA, 22 bp, Artificial sequence
  SiRNA target sequence
ctatgggtttatttatgaattt

SEQ ID NO: 14991 - DNA, 22 bp, Artificial sequence
  SiRNA target sequence
tatgggtttatttatgaatttt

SEQ ID NO: 14992 - DNA, 22 bp, Artificial sequence
  SiRNA target sequence
atgggtttatttatgaatttta

SEQ ID NO: 14993 - DNA, 22 bp, Artificial sequence
  SiRNA target sequence
tgggtttatttatgaattttaa

SEQ ID NO: 14994 - DNA, 23 bp, Artificial sequence
  SiRNA target sequence
atgaaatctttctacaaaaaaat

SEQ ID NO: 14995 - DNA, 23 bp, Artificial sequence
  SiRNA target sequence
tgaaatctttctacaaaaaaata

SEQ ID NO: 14996 - DNA, 23 bp, Artificial sequence
  SiRNA target sequence
gaaatctttctacaaaaaaataa

SEQ ID NO: 14997 - DNA, 23 bp, Artificial sequence
  SiRNA target sequence
aaatctttctacaaaaaaataaa

SEQ ID NO: 14998 - DNA, 23 bp, Artificial sequence
  SiRNA target sequence
aatctttctacaaaaaaataaaa

SEQ ID NO: 14999 - DNA, 23 bp, Artificial sequence
  SiRNA target sequence
atctttctacaaaaaaataaaaa

SEQ ID NO: 15000 - DNA, 23 bp, Artificial sequence
  SiRNA target sequence
tctttctacaaaaaaataaaaag

SEQ ID NO: 15001 - DNA, 23 bp, Artificial sequence
  SiRNA target sequence
ctttctacaaaaaaataaaaagt

SEQ ID NO: 15002 - DNA, 23 bp, Artificial sequence
  SiRNA target sequence
tttctacaaaaaaataaaaagtt

SEQ ID NO: 15003 - DNA, 23 bp, Artificial sequence
  SiRNA target sequence
ttctacaaaaaaataaaaagtta

SEQ ID NO: 15004 - DNA, 23 bp, Artificial sequence
  SiRNA target sequence
tctacaaaaaaataaaaagttat

SEQ ID NO: 15005 - DNA, 23 bp, Artificial sequence
  SiRNA target sequence
ctacaaaaaaataaaaagttatt

SEQ ID NO: 15006 - DNA, 23 bp, Artificial sequence
  SiRNA target sequence
tacaaaaaaataaaaagttattt

SEQ ID NO: 15007 - DNA, 23 bp, Artificial sequence
  SiRNA target sequence
acaaaaaaataaaaagttattta

SEQ ID NO: 15008 - DNA, 23 bp, Artificial sequence
  SiRNA target sequence
caaaaaaataaaaagttatttat

SEQ ID NO: 15009 - DNA, 23 bp, Artificial sequence
  SiRNA target sequence
aaaaaaataaaaagttatttatt

SEQ ID NO: 15010 - DNA, 23 bp, Artificial sequence
  SiRNA target sequence
aaaaaataaaaagttatttattc

SEQ ID NO: 15011 - DNA, 23 bp, Artificial sequence
  SiRNA target sequence
aaaaataaaaagttatttattca

SEQ ID NO: 15012 - DNA, 23 bp, Artificial sequence
  SiRNA target sequence
aaaataaaaagttatttattcaa

SEQ ID NO: 15013 - DNA, 23 bp, Artificial sequence
  SiRNA target sequence
aaataaaaagttatttattcaaa

SEQ ID NO: 15014 - DNA, 23 bp, Artificial sequence
  SiRNA target sequence
aataaaaagttatttattcaaat

SEQ ID NO: 15015 - DNA, 23 bp, Artificial sequence
  SiRNA target sequence
ataaaaagttatttattcaaatc

SEQ ID NO: 15016 - DNA, 23 bp, Artificial sequence
  SiRNA target sequence
taaaaagttatttattcaaatct

SEQ ID NO: 15017 - DNA, 23 bp, Artificial sequence
  SiRNA target sequence
aaaaagttatttattcaaatctg

SEQ ID NO: 15018 - DNA, 23 bp, Artificial sequence
  SiRNA target sequence
aaaagttatttattcaaatctgc

SEQ ID NO: 15019 - DNA, 23 bp, Artificial sequence
  SiRNA target sequence
aaagttatttattcaaatctgcc

SEQ ID NO: 15020 - DNA, 23 bp, Artificial sequence
  SiRNA target sequence
aagttatttattcaaatctgcca

SEQ ID NO: 15021 - DNA, 23 bp, Artificial sequence
  SiRNA target sequence
agttatttattcaaatctgccat

SEQ ID NO: 15022 - DNA, 23 bp, Artificial sequence
  SiRNA target sequence
gttatttattcaaatctgccatt

SEQ ID NO: 15023 - DNA, 23 bp, Artificial sequence
  SiRNA target sequence
ttatttattcaaatctgccatta

SEQ ID NO: 15024 - DNA, 23 bp, Artificial sequence
  SiRNA target sequence
tatttattcaaatctgccattaa

SEQ ID NO: 15025 - DNA, 23 bp, Artificial sequence
  SiRNA target sequence
atttattcaaatctgccattaat

SEQ ID NO: 15026 - DNA, 23 bp, Artificial sequence
  SiRNA target sequence
tttattcaaatctgccattaata

SEQ ID NO: 15027 - DNA, 23 bp, Artificial sequence
  SiRNA target sequence
ttattcaaatctgccattaatac

SEQ ID NO: 15028 - DNA, 23 bp, Artificial sequence
  SiRNA target sequence
tattcaaatctgccattaataca

SEQ ID NO: 15029 - DNA, 23 bp, Artificial sequence
  SiRNA target sequence
attcaaatctgccattaatacat

SEQ ID NO: 15030 - DNA, 23 bp, Artificial sequence
  SiRNA target sequence
ttcaaatctgccattaatacatc

SEQ ID NO: 15031 - DNA, 23 bp, Artificial sequence
  SiRNA target sequence
tcaaatctgccattaatacatct

SEQ ID NO: 15032 - DNA, 23 bp, Artificial sequence
  SiRNA target sequence
caaatctgccattaatacatctt

SEQ ID NO: 15033 - DNA, 23 bp, Artificial sequence
  SiRNA target sequence
aaatctgccattaatacatcttt

SEQ ID NO: 15034 - DNA, 23 bp, Artificial sequence
  SiRNA target sequence
aatctgccattaatacatctttt

SEQ ID NO: 15035 - DNA, 23 bp, Artificial sequence
  SiRNA target sequence
atctgccattaatacatcttttg

SEQ ID NO: 15036 - DNA, 23 bp, Artificial sequence
  SiRNA target sequence
tctgccattaatacatcttttga

SEQ ID NO: 15037 - DNA, 23 bp, Artificial sequence
  SiRNA target sequence
ctgccattaatacatcttttgat

SEQ ID NO: 15038 - DNA, 23 bp, Artificial sequence
  SiRNA target sequence
tgccattaatacatcttttgata

SEQ ID NO: 15039 - DNA, 23 bp, Artificial sequence
  SiRNA target sequence
gccattaatacatcttttgatac

SEQ ID NO: 15040 - DNA, 23 bp, Artificial sequence
  SiRNA target sequence
ccattaatacatcttttgatact

SEQ ID NO: 15041 - DNA, 23 bp, Artificial sequence
  SiRNA target sequence
cattaatacatcttttgatactt

SEQ ID NO: 15042 - DNA, 23 bp, Artificial sequence
  SiRNA target sequence
attaatacatcttttgatacttt

SEQ ID NO: 15043 - DNA, 23 bp, Artificial sequence
  SiRNA target sequence
ttaatacatcttttgatactttt

SEQ ID NO: 15044 - DNA, 23 bp, Artificial sequence
  SiRNA target sequence
taatacatcttttgatactttta

SEQ ID NO: 15045 - DNA, 23 bp, Artificial sequence
  SiRNA target sequence
aatacatcttttgatacttttaa

SEQ ID NO: 15046 - DNA, 23 bp, Artificial sequence
  SiRNA target sequence
atacatcttttgatacttttaat

SEQ ID NO: 15047 - DNA, 23 bp, Artificial sequence
  SiRNA target sequence
tacatcttttgatacttttaatt

SEQ ID NO: 15048 - DNA, 23 bp, Artificial sequence
  SiRNA target sequence
acatcttttgatacttttaattt

SEQ ID NO: 15049 - DNA, 23 bp, Artificial sequence
  SiRNA target sequence
catcttttgatacttttaattta

SEQ ID NO: 15050 - DNA, 23 bp, Artificial sequence
  SiRNA target sequence
atcttttgatacttttaatttag

SEQ ID NO: 15051 - DNA, 23 bp, Artificial sequence
  SiRNA target sequence
tcttttgatacttttaatttaga

SEQ ID NO: 15052 - DNA, 23 bp, Artificial sequence
  SiRNA target sequence
cttttgatacttttaatttagaa

SEQ ID NO: 15053 - DNA, 23 bp, Artificial sequence
  SiRNA target sequence
ttttgatacttttaatttagaaa

SEQ ID NO: 15054 - DNA, 23 bp, Artificial sequence
  SiRNA target sequence
tttgatacttttaatttagaaaa

SEQ ID NO: 15055 - DNA, 23 bp, Artificial sequence
  SiRNA target sequence
ttgatacttttaatttagaaaat

SEQ ID NO: 15056 - DNA, 23 bp, Artificial sequence
  SiRNA target sequence
tgatacttttaatttagaaaatg

SEQ ID NO: 15057 - DNA, 23 bp, Artificial sequence
  SiRNA target sequence
gatacttttaatttagaaaatgt

SEQ ID NO: 15058 - DNA, 23 bp, Artificial sequence
  SiRNA target sequence
atacttttaatttagaaaatgta

SEQ ID NO: 15059 - DNA, 23 bp, Artificial sequence
  SiRNA target sequence
tacttttaatttagaaaatgtaa

SEQ ID NO: 15060 - DNA, 23 bp, Artificial sequence
  SiRNA target sequence
acttttaatttagaaaatgtaag

SEQ ID NO: 15061 - DNA, 23 bp, Artificial sequence
  SiRNA target sequence
cttttaatttagaaaatgtaagc

SEQ ID NO: 15062 - DNA, 23 bp, Artificial sequence
  SiRNA target sequence
ttttaatttagaaaatgtaagca

SEQ ID NO: 15063 - DNA, 23 bp, Artificial sequence
  SiRNA target sequence
tttaatttagaaaatgtaagcat

SEQ ID NO: 15064 - DNA, 23 bp, Artificial sequence
  SiRNA target sequence
ttaatttagaaaatgtaagcatt

SEQ ID NO: 15065 - DNA, 23 bp, Artificial sequence
  SiRNA target sequence
taatttagaaaatgtaagcatta

SEQ ID NO: 15066 - DNA, 23 bp, Artificial sequence
  SiRNA target sequence
aatttagaaaatgtaagcattac

SEQ ID NO: 15067 - DNA, 23 bp, Artificial sequence
  SiRNA target sequence
atttagaaaatgtaagcattact

SEQ ID NO: 15068 - DNA, 23 bp, Artificial sequence
  SiRNA target sequence
tttagaaaatgtaagcattacta

SEQ ID NO: 15069 - DNA, 23 bp, Artificial sequence
  SiRNA target sequence
ttagaaaatgtaagcattactag

SEQ ID NO: 15070 - DNA, 23 bp, Artificial sequence
  SiRNA target sequence
tagaaaatgtaagcattactagc

SEQ ID NO: 15071 - DNA, 23 bp, Artificial sequence
  SiRNA target sequence
agaaaatgtaagcattactagct

SEQ ID NO: 15072 - DNA, 23 bp, Artificial sequence
  SiRNA target sequence
gaaaatgtaagcattactagctt

SEQ ID NO: 15073 - DNA, 23 bp, Artificial sequence
  SiRNA target sequence
aaaatgtaagcattactagctta

SEQ ID NO: 15074 - DNA, 23 bp, Artificial sequence
  SiRNA target sequence
aaatgtaagcattactagcttaa

SEQ ID NO: 15075 - DNA, 23 bp, Artificial sequence
  SiRNA target sequence
aatgtaagcattactagcttaaa

SEQ ID NO: 15076 - DNA, 23 bp, Artificial sequence
  SiRNA target sequence
atgtaagcattactagcttaaat

SEQ ID NO: 15077 - DNA, 23 bp, Artificial sequence
  SiRNA target sequence
tgtaagcattactagcttaaata

SEQ ID NO: 15078 - DNA, 23 bp, Artificial sequence
  SiRNA target sequence
gtaagcattactagcttaaatac

SEQ ID NO: 15079 - DNA, 23 bp, Artificial sequence
  SiRNA target sequence
taagcattactagcttaaatacg

SEQ ID NO: 15080 - DNA, 23 bp, Artificial sequence
  SiRNA target sequence
aagcattactagcttaaatacgt

SEQ ID NO: 15081 - DNA, 23 bp, Artificial sequence
  SiRNA target sequence
agcattactagcttaaatacgta

SEQ ID NO: 15082 - DNA, 23 bp, Artificial sequence
  SiRNA target sequence
gcattactagcttaaatacgtac

SEQ ID NO: 15083 - DNA, 23 bp, Artificial sequence
  SiRNA target sequence
cattactagcttaaatacgtaca

SEQ ID NO: 15084 - DNA, 23 bp, Artificial sequence
  SiRNA target sequence
attactagcttaaatacgtacac

SEQ ID NO: 15085 - DNA, 23 bp, Artificial sequence
  SiRNA target sequence
ttactagcttaaatacgtacacc

SEQ ID NO: 15086 - DNA, 23 bp, Artificial sequence
  SiRNA target sequence
tactagcttaaatacgtacaccg

SEQ ID NO: 15087 - DNA, 23 bp, Artificial sequence
  SiRNA target sequence
actagcttaaatacgtacaccgg

SEQ ID NO: 15088 - DNA, 23 bp, Artificial sequence
  SiRNA target sequence
ctagcttaaatacgtacaccggt

SEQ ID NO: 15089 - DNA, 23 bp, Artificial sequence
  SiRNA target sequence
tagcttaaatacgtacaccggtg

SEQ ID NO: 15090 - DNA, 23 bp, Artificial sequence
  SiRNA target sequence
agcttaaatacgtacaccggtgt

SEQ ID NO: 15091 - DNA, 23 bp, Artificial sequence
  SiRNA target sequence
gcttaaatacgtacaccggtgtt

SEQ ID NO: 15092 - DNA, 23 bp, Artificial sequence
  SiRNA target sequence
cttaaatacgtacaccggtgtta

SEQ ID NO: 15093 - DNA, 23 bp, Artificial sequence
  SiRNA target sequence
ttaaatacgtacaccggtgttaa

SEQ ID NO: 15094 - DNA, 23 bp, Artificial sequence
  SiRNA target sequence
taaatacgtacaccggtgttaaa

SEQ ID NO: 15095 - DNA, 23 bp, Artificial sequence
  SiRNA target sequence
aaatacgtacaccggtgttaaaa

SEQ ID NO: 15096 - DNA, 23 bp, Artificial sequence
  SiRNA target sequence
aatacgtacaccggtgttaaaac

SEQ ID NO: 15097 - DNA, 23 bp, Artificial sequence
  SiRNA target sequence
atacgtacaccggtgttaaaacc

SEQ ID NO: 15098 - DNA, 23 bp, Artificial sequence
  SiRNA target sequence
tacgtacaccggtgttaaaaccg

SEQ ID NO: 15099 - DNA, 23 bp, Artificial sequence
  SiRNA target sequence
acgtacaccggtgttaaaaccga

SEQ ID NO: 15100 - DNA, 23 bp, Artificial sequence
  SiRNA target sequence
cgtacaccggtgttaaaaccgaa

SEQ ID NO: 15101 - DNA, 23 bp, Artificial sequence
  SiRNA target sequence
gtacaccggtgttaaaaccgaaa

SEQ ID NO: 15102 - DNA, 23 bp, Artificial sequence
  SiRNA target sequence
tacaccggtgttaaaaccgaaat

SEQ ID NO: 15103 - DNA, 23 bp, Artificial sequence
  SiRNA target sequence
acaccggtgttaaaaccgaaata

SEQ ID NO: 15104 - DNA, 23 bp, Artificial sequence
  SiRNA target sequence
caccggtgttaaaaccgaaatat

SEQ ID NO: 15105 - DNA, 23 bp, Artificial sequence
  SiRNA target sequence
accggtgttaaaaccgaaatatc

SEQ ID NO: 15106 - DNA, 23 bp, Artificial sequence
  SiRNA target sequence
ccggtgttaaaaccgaaatatca

SEQ ID NO: 15107 - DNA, 23 bp, Artificial sequence
  SiRNA target sequence
cggtgttaaaaccgaaatatcaa

SEQ ID NO: 15108 - DNA, 23 bp, Artificial sequence
  SiRNA target sequence
ggtgttaaaaccgaaatatcaaa

SEQ ID NO: 15109 - DNA, 23 bp, Artificial sequence
  SiRNA target sequence
gtgttaaaaccgaaatatcaaaa

SEQ ID NO: 15110 - DNA, 23 bp, Artificial sequence
  SiRNA target sequence
tgttaaaaccgaaatatcaaaaa

SEQ ID NO: 15111 - DNA, 23 bp, Artificial sequence
  SiRNA target sequence
gttaaaaccgaaatatcaaaaac

SEQ ID NO: 15112 - DNA, 23 bp, Artificial sequence
  SiRNA target sequence
ttaaaaccgaaatatcaaaaacc

SEQ ID NO: 15113 - DNA, 23 bp, Artificial sequence
  SiRNA target sequence
taaaaccgaaatatcaaaaaccg

SEQ ID NO: 15114 - DNA, 23 bp, Artificial sequence
  SiRNA target sequence
aaaaccgaaatatcaaaaaccgt

SEQ ID NO: 15115 - DNA, 23 bp, Artificial sequence
  SiRNA target sequence
aaaccgaaatatcaaaaaccgta

SEQ ID NO: 15116 - DNA, 23 bp, Artificial sequence
  SiRNA target sequence
aaccgaaatatcaaaaaccgtat

SEQ ID NO: 15117 - DNA, 23 bp, Artificial sequence
  SiRNA target sequence
accgaaatatcaaaaaccgtatc

SEQ ID NO: 15118 - DNA, 23 bp, Artificial sequence
  SiRNA target sequence
ccgaaatatcaaaaaccgtatca

SEQ ID NO: 15119 - DNA, 23 bp, Artificial sequence
  SiRNA target sequence
cgaaatatcaaaaaccgtatcac

SEQ ID NO: 15120 - DNA, 23 bp, Artificial sequence
  SiRNA target sequence
gaaatatcaaaaaccgtatcacc

SEQ ID NO: 15121 - DNA, 23 bp, Artificial sequence
  SiRNA target sequence
aaatatcaaaaaccgtatcacca

SEQ ID NO: 15122 - DNA, 23 bp, Artificial sequence
  SiRNA target sequence
aatatcaaaaaccgtatcaccac

SEQ ID NO: 15123 - DNA, 23 bp, Artificial sequence
  SiRNA target sequence
atatcaaaaaccgtatcaccaca

SEQ ID NO: 15124 - DNA, 23 bp, Artificial sequence
  SiRNA target sequence
tatcaaaaaccgtatcaccacac

SEQ ID NO: 15125 - DNA, 23 bp, Artificial sequence
  SiRNA target sequence
atcaaaaaccgtatcaccacact

SEQ ID NO: 15126 - DNA, 23 bp, Artificial sequence
  SiRNA target sequence
tcaaaaaccgtatcaccacactt

SEQ ID NO: 15127 - DNA, 23 bp, Artificial sequence
  SiRNA target sequence
caaaaaccgtatcaccacacttc

SEQ ID NO: 15128 - DNA, 23 bp, Artificial sequence
  SiRNA target sequence
aaaaaccgtatcaccacacttcc

SEQ ID NO: 15129 - DNA, 23 bp, Artificial sequence
  SiRNA target sequence
aaaaccgtatcaccacacttcca

SEQ ID NO: 15130 - DNA, 23 bp, Artificial sequence
  SiRNA target sequence
aaaccgtatcaccacacttccag

SEQ ID NO: 15131 - DNA, 23 bp, Artificial sequence
  SiRNA target sequence
aaccgtatcaccacacttccaga

SEQ ID NO: 15132 - DNA, 23 bp, Artificial sequence
  SiRNA target sequence
accgtatcaccacacttccagat

SEQ ID NO: 15133 - DNA, 23 bp, Artificial sequence
  SiRNA target sequence
ccgtatcaccacacttccagatt

SEQ ID NO: 15134 - DNA, 23 bp, Artificial sequence
  SiRNA target sequence
cgtatcaccacacttccagattt

SEQ ID NO: 15135 - DNA, 23 bp, Artificial sequence
  SiRNA target sequence
gtatcaccacacttccagatttc

SEQ ID NO: 15136 - DNA, 23 bp, Artificial sequence
  SiRNA target sequence
tatcaccacacttccagatttct

SEQ ID NO: 15137 - DNA, 23 bp, Artificial sequence
  SiRNA target sequence
atcaccacacttccagatttctc

SEQ ID NO: 15138 - DNA, 23 bp, Artificial sequence
  SiRNA target sequence
tcaccacacttccagatttctca

SEQ ID NO: 15139 - DNA, 23 bp, Artificial sequence
  SiRNA target sequence
caccacacttccagatttctcat

SEQ ID NO: 15140 - DNA, 23 bp, Artificial sequence
  SiRNA target sequence
accacacttccagatttctcatg

SEQ ID NO: 15141 - DNA, 23 bp, Artificial sequence
  SiRNA target sequence
ccacacttccagatttctcatgt

SEQ ID NO: 15142 - DNA, 23 bp, Artificial sequence
  SiRNA target sequence
cacacttccagatttctcatgtc

SEQ ID NO: 15143 - DNA, 23 bp, Artificial sequence
  SiRNA target sequence
acacttccagatttctcatgtct

SEQ ID NO: 15144 - DNA, 23 bp, Artificial sequence
  SiRNA target sequence
cacttccagatttctcatgtctc

SEQ ID NO: 15145 - DNA, 23 bp, Artificial sequence
  SiRNA target sequence
acttccagatttctcatgtctct

SEQ ID NO: 15146 - DNA, 23 bp, Artificial sequence
  SiRNA target sequence
cttccagatttctcatgtctctt

SEQ ID NO: 15147 - DNA, 23 bp, Artificial sequence
  SiRNA target sequence
ttccagatttctcatgtctcttc

SEQ ID NO: 15148 - DNA, 23 bp, Artificial sequence
  SiRNA target sequence
tccagatttctcatgtctcttct

SEQ ID NO: 15149 - DNA, 23 bp, Artificial sequence
  SiRNA target sequence
ccagatttctcatgtctcttcta

SEQ ID NO: 15150 - DNA, 23 bp, Artificial sequence
  SiRNA target sequence
cagatttctcatgtctcttctat

SEQ ID NO: 15151 - DNA, 23 bp, Artificial sequence
  SiRNA target sequence
agatttctcatgtctcttctatg

SEQ ID NO: 15152 - DNA, 23 bp, Artificial sequence
  SiRNA target sequence
gatttctcatgtctcttctatgg

SEQ ID NO: 15153 - DNA, 23 bp, Artificial sequence
  SiRNA target sequence
atttctcatgtctcttctatggg

SEQ ID NO: 15154 - DNA, 23 bp, Artificial sequence
  SiRNA target sequence
tttctcatgtctcttctatgggc

SEQ ID NO: 15155 - DNA, 23 bp, Artificial sequence
  SiRNA target sequence
ttctcatgtctcttctatgggcg

SEQ ID NO: 15156 - DNA, 23 bp, Artificial sequence
  SiRNA target sequence
tctcatgtctcttctatgggcgc

SEQ ID NO: 15157 - DNA, 23 bp, Artificial sequence
  SiRNA target sequence
ctcatgtctcttctatgggcgca

SEQ ID NO: 15158 - DNA, 23 bp, Artificial sequence
  SiRNA target sequence
tcatgtctcttctatgggcgcag

SEQ ID NO: 15159 - DNA, 23 bp, Artificial sequence
  SiRNA target sequence
catgtctcttctatgggcgcaga

SEQ ID NO: 15160 - DNA, 23 bp, Artificial sequence
  SiRNA target sequence
atgtctcttctatgggcgcagat

SEQ ID NO: 15161 - DNA, 23 bp, Artificial sequence
  SiRNA target sequence
tgtctcttctatgggcgcagatt

SEQ ID NO: 15162 - DNA, 23 bp, Artificial sequence
  SiRNA target sequence
gtctcttctatgggcgcagattt

SEQ ID NO: 15163 - DNA, 23 bp, Artificial sequence
  SiRNA target sequence
tctcttctatgggcgcagatttc

SEQ ID NO: 15164 - DNA, 23 bp, Artificial sequence
  SiRNA target sequence
ctcttctatgggcgcagatttcg

SEQ ID NO: 15165 - DNA, 23 bp, Artificial sequence
  SiRNA target sequence
tcttctatgggcgcagatttcga

SEQ ID NO: 15166 - DNA, 23 bp, Artificial sequence
  SiRNA target sequence
cttctatgggcgcagatttcgac

SEQ ID NO: 15167 - DNA, 23 bp, Artificial sequence
  SiRNA target sequence
ttctatgggcgcagatttcgaca

SEQ ID NO: 15168 - DNA, 23 bp, Artificial sequence
  SiRNA target sequence
tctatgggcgcagatttcgacat

SEQ ID NO: 15169 - DNA, 23 bp, Artificial sequence
  SiRNA target sequence
ctatgggcgcagatttcgacata

SEQ ID NO: 15170 - DNA, 23 bp, Artificial sequence
  SiRNA target sequence
tatgggcgcagatttcgacataa

SEQ ID NO: 15171 - DNA, 23 bp, Artificial sequence
  SiRNA target sequence
atgggcgcagatttcgacataaa

SEQ ID NO: 15172 - DNA, 23 bp, Artificial sequence
  SiRNA target sequence
tgggcgcagatttcgacataaaa

SEQ ID NO: 15173 - DNA, 23 bp, Artificial sequence
  SiRNA target sequence
gggcgcagatttcgacataaaac

SEQ ID NO: 15174 - DNA, 23 bp, Artificial sequence
  SiRNA target sequence
ggcgcagatttcgacataaaaca

SEQ ID NO: 15175 - DNA, 23 bp, Artificial sequence
  SiRNA target sequence
gcgcagatttcgacataaaacag

SEQ ID NO: 15176 - DNA, 23 bp, Artificial sequence
  SiRNA target sequence
cgcagatttcgacataaaacaga

SEQ ID NO: 15177 - DNA, 23 bp, Artificial sequence
  SiRNA target sequence
gcagatttcgacataaaacagac

SEQ ID NO: 15178 - DNA, 23 bp, Artificial sequence
  SiRNA target sequence
cagatttcgacataaaacagaca

SEQ ID NO: 15179 - DNA, 23 bp, Artificial sequence
  SiRNA target sequence
agatttcgacataaaacagacat

SEQ ID NO: 15180 - DNA, 23 bp, Artificial sequence
  SiRNA target sequence
gatttcgacataaaacagacata

SEQ ID NO: 15181 - DNA, 23 bp, Artificial sequence
  SiRNA target sequence
atttcgacataaaacagacatac

SEQ ID NO: 15182 - DNA, 23 bp, Artificial sequence
  SiRNA target sequence
tttcgacataaaacagacatacg

SEQ ID NO: 15183 - DNA, 23 bp, Artificial sequence
  SiRNA target sequence
ttcgacataaaacagacatacgc

SEQ ID NO: 15184 - DNA, 23 bp, Artificial sequence
  SiRNA target sequence
tcgacataaaacagacatacgcc

SEQ ID NO: 15185 - DNA, 23 bp, Artificial sequence
  SiRNA target sequence
cgacataaaacagacatacgcca

SEQ ID NO: 15186 - DNA, 23 bp, Artificial sequence
  SiRNA target sequence
gacataaaacagacatacgccac

SEQ ID NO: 15187 - DNA, 23 bp, Artificial sequence
  SiRNA target sequence
acataaaacagacatacgccacg

SEQ ID NO: 15188 - DNA, 23 bp, Artificial sequence
  SiRNA target sequence
cataaaacagacatacgccacgt

SEQ ID NO: 15189 - DNA, 23 bp, Artificial sequence
  SiRNA target sequence
ataaaacagacatacgccacgtt

SEQ ID NO: 15190 - DNA, 23 bp, Artificial sequence
  SiRNA target sequence
taaaacagacatacgccacgttc

SEQ ID NO: 15191 - DNA, 23 bp, Artificial sequence
  SiRNA target sequence
aaaacagacatacgccacgttct

SEQ ID NO: 15192 - DNA, 23 bp, Artificial sequence
  SiRNA target sequence
aaacagacatacgccacgttctg

SEQ ID NO: 15193 - DNA, 23 bp, Artificial sequence
  SiRNA target sequence
aacagacatacgccacgttctgc

SEQ ID NO: 15194 - DNA, 23 bp, Artificial sequence
  SiRNA target sequence
acagacatacgccacgttctgct

SEQ ID NO: 15195 - DNA, 23 bp, Artificial sequence
  SiRNA target sequence
cagacatacgccacgttctgctt

SEQ ID NO: 15196 - DNA, 23 bp, Artificial sequence
  SiRNA target sequence
agacatacgccacgttctgcttt

SEQ ID NO: 15197 - DNA, 23 bp, Artificial sequence
  SiRNA target sequence
gacatacgccacgttctgcttta

SEQ ID NO: 15198 - DNA, 23 bp, Artificial sequence
  SiRNA target sequence
acatacgccacgttctgctttaa

SEQ ID NO: 15199 - DNA, 23 bp, Artificial sequence
  SiRNA target sequence
catacgccacgttctgctttaac

SEQ ID NO: 15200 - DNA, 23 bp, Artificial sequence
  SiRNA target sequence
atacgccacgttctgctttaaca

SEQ ID NO: 15201 - DNA, 23 bp, Artificial sequence
  SiRNA target sequence
tacgccacgttctgctttaacaa

SEQ ID NO: 15202 - DNA, 23 bp, Artificial sequence
  SiRNA target sequence
acgccacgttctgctttaacaat

SEQ ID NO: 15203 - DNA, 23 bp, Artificial sequence
  SiRNA target sequence
cgccacgttctgctttaacaatc

SEQ ID NO: 15204 - DNA, 23 bp, Artificial sequence
  SiRNA target sequence
gccacgttctgctttaacaatct

SEQ ID NO: 15205 - DNA, 23 bp, Artificial sequence
  SiRNA target sequence
ccacgttctgctttaacaatctt

SEQ ID NO: 15206 - DNA, 23 bp, Artificial sequence
  SiRNA target sequence
cacgttctgctttaacaatcttt

SEQ ID NO: 15207 - DNA, 23 bp, Artificial sequence
  SiRNA target sequence
acgttctgctttaacaatctttt

SEQ ID NO: 15208 - DNA, 23 bp, Artificial sequence
  SiRNA target sequence
cgttctgctttaacaatcttttg

SEQ ID NO: 15209 - DNA, 23 bp, Artificial sequence
  SiRNA target sequence
gttctgctttaacaatcttttgc

SEQ ID NO: 15210 - DNA, 23 bp, Artificial sequence
  SiRNA target sequence
ttctgctttaacaatcttttgct

SEQ ID NO: 15211 - DNA, 23 bp, Artificial sequence
  SiRNA target sequence
tctgctttaacaatcttttgcta

SEQ ID NO: 15212 - DNA, 23 bp, Artificial sequence
  SiRNA target sequence
ctgctttaacaatcttttgctac

SEQ ID NO: 15213 - DNA, 23 bp, Artificial sequence
  SiRNA target sequence
tgctttaacaatcttttgctaca

SEQ ID NO: 15214 - DNA, 23 bp, Artificial sequence
  SiRNA target sequence
gctttaacaatcttttgctacaa

SEQ ID NO: 15215 - DNA, 23 bp, Artificial sequence
  SiRNA target sequence
ctttaacaatcttttgctacaaa

SEQ ID NO: 15216 - DNA, 23 bp, Artificial sequence
  SiRNA target sequence
tttaacaatcttttgctacaaac

SEQ ID NO: 15217 - DNA, 23 bp, Artificial sequence
  SiRNA target sequence
ttaacaatcttttgctacaaacg

SEQ ID NO: 15218 - DNA, 23 bp, Artificial sequence
  SiRNA target sequence
taacaatcttttgctacaaacga

SEQ ID NO: 15219 - DNA, 23 bp, Artificial sequence
  SiRNA target sequence
aacaatcttttgctacaaacgag

SEQ ID NO: 15220 - DNA, 23 bp, Artificial sequence
  SiRNA target sequence
acaatcttttgctacaaacgagc

SEQ ID NO: 15221 - DNA, 23 bp, Artificial sequence
  SiRNA target sequence
caatcttttgctacaaacgagca

SEQ ID NO: 15222 - DNA, 23 bp, Artificial sequence
  SiRNA target sequence
aatcttttgctacaaacgagcat

SEQ ID NO: 15223 - DNA, 23 bp, Artificial sequence
  SiRNA target sequence
atcttttgctacaaacgagcata

SEQ ID NO: 15224 - DNA, 23 bp, Artificial sequence
  SiRNA target sequence
tcttttgctacaaacgagcatag

SEQ ID NO: 15225 - DNA, 23 bp, Artificial sequence
  SiRNA target sequence
cttttgctacaaacgagcataga

SEQ ID NO: 15226 - DNA, 23 bp, Artificial sequence
  SiRNA target sequence
ttttgctacaaacgagcatagac

SEQ ID NO: 15227 - DNA, 23 bp, Artificial sequence
  SiRNA target sequence
tttgctacaaacgagcatagacc

SEQ ID NO: 15228 - DNA, 23 bp, Artificial sequence
  SiRNA target sequence
ttgctacaaacgagcatagacca

SEQ ID NO: 15229 - DNA, 23 bp, Artificial sequence
  SiRNA target sequence
tgctacaaacgagcatagaccaa

SEQ ID NO: 15230 - DNA, 23 bp, Artificial sequence
  SiRNA target sequence
gctacaaacgagcatagaccaag

SEQ ID NO: 15231 - DNA, 23 bp, Artificial sequence
  SiRNA target sequence
ctacaaacgagcatagaccaaga

SEQ ID NO: 15232 - DNA, 23 bp, Artificial sequence
  SiRNA target sequence
tacaaacgagcatagaccaagac

SEQ ID NO: 15233 - DNA, 23 bp, Artificial sequence
  SiRNA target sequence
acaaacgagcatagaccaagaca

SEQ ID NO: 15234 - DNA, 23 bp, Artificial sequence
  SiRNA target sequence
caaacgagcatagaccaagacaa

SEQ ID NO: 15235 - DNA, 23 bp, Artificial sequence
  SiRNA target sequence
aaacgagcatagaccaagacaaa

SEQ ID NO: 15236 - DNA, 23 bp, Artificial sequence
  SiRNA target sequence
aacgagcatagaccaagacaaaa

SEQ ID NO: 15237 - DNA, 23 bp, Artificial sequence
  SiRNA target sequence
acgagcatagaccaagacaaaat

SEQ ID NO: 15238 - DNA, 23 bp, Artificial sequence
  SiRNA target sequence
cgagcatagaccaagacaaaata

SEQ ID NO: 15239 - DNA, 23 bp, Artificial sequence
  SiRNA target sequence
gagcatagaccaagacaaaatat

SEQ ID NO: 15240 - DNA, 23 bp, Artificial sequence
  SiRNA target sequence
agcatagaccaagacaaaatatt

SEQ ID NO: 15241 - DNA, 23 bp, Artificial sequence
  SiRNA target sequence
gcatagaccaagacaaaatattt

SEQ ID NO: 15242 - DNA, 23 bp, Artificial sequence
  SiRNA target sequence
catagaccaagacaaaatattta

SEQ ID NO: 15243 - DNA, 23 bp, Artificial sequence
  SiRNA target sequence
atagaccaagacaaaatatttag

SEQ ID NO: 15244 - DNA, 23 bp, Artificial sequence
  SiRNA target sequence
tagaccaagacaaaatatttaga

SEQ ID NO: 15245 - DNA, 23 bp, Artificial sequence
  SiRNA target sequence
agaccaagacaaaatatttagaa

SEQ ID NO: 15246 - DNA, 23 bp, Artificial sequence
  SiRNA target sequence
gaccaagacaaaatatttagaat

SEQ ID NO: 15247 - DNA, 23 bp, Artificial sequence
  SiRNA target sequence
accaagacaaaatatttagaata

SEQ ID NO: 15248 - DNA, 23 bp, Artificial sequence
  SiRNA target sequence
ccaagacaaaatatttagaataa

SEQ ID NO: 15249 - DNA, 23 bp, Artificial sequence
  SiRNA target sequence
caagacaaaatatttagaataag

SEQ ID NO: 15250 - DNA, 23 bp, Artificial sequence
  SiRNA target sequence
aagacaaaatatttagaataaga

SEQ ID NO: 15251 - DNA, 23 bp, Artificial sequence
  SiRNA target sequence
agacaaaatatttagaataagag

SEQ ID NO: 15252 - DNA, 23 bp, Artificial sequence
  SiRNA target sequence
gacaaaatatttagaataagagg

SEQ ID NO: 15253 - DNA, 23 bp, Artificial sequence
  SiRNA target sequence
acaaaatatttagaataagaggt

SEQ ID NO: 15254 - DNA, 23 bp, Artificial sequence
  SiRNA target sequence
caaaatatttagaataagaggta

SEQ ID NO: 15255 - DNA, 23 bp, Artificial sequence
  SiRNA target sequence
aaaatatttagaataagaggtac

SEQ ID NO: 15256 - DNA, 23 bp, Artificial sequence
  SiRNA target sequence
aaatatttagaataagaggtacc

SEQ ID NO: 15257 - DNA, 23 bp, Artificial sequence
  SiRNA target sequence
aatatttagaataagaggtaccc

SEQ ID NO: 15258 - DNA, 23 bp, Artificial sequence
  SiRNA target sequence
atatttagaataagaggtaccca

SEQ ID NO: 15259 - DNA, 23 bp, Artificial sequence
  SiRNA target sequence
tatttagaataagaggtacccac

SEQ ID NO: 15260 - DNA, 23 bp, Artificial sequence
  SiRNA target sequence
atttagaataagaggtacccaca

SEQ ID NO: 15261 - DNA, 23 bp, Artificial sequence
  SiRNA target sequence
tttagaataagaggtacccacat

SEQ ID NO: 15262 - DNA, 23 bp, Artificial sequence
  SiRNA target sequence
ttagaataagaggtacccacatg

SEQ ID NO: 15263 - DNA, 23 bp, Artificial sequence
  SiRNA target sequence
tagaataagaggtacccacatgt

SEQ ID NO: 15264 - DNA, 23 bp, Artificial sequence
  SiRNA target sequence
agaataagaggtacccacatgtt

SEQ ID NO: 15265 - DNA, 23 bp, Artificial sequence
  SiRNA target sequence
gaataagaggtacccacatgttt

SEQ ID NO: 15266 - DNA, 23 bp, Artificial sequence
  SiRNA target sequence
aataagaggtacccacatgttta

SEQ ID NO: 15267 - DNA, 23 bp, Artificial sequence
  SiRNA target sequence
ataagaggtacccacatgtttaa

SEQ ID NO: 15268 - DNA, 23 bp, Artificial sequence
  SiRNA target sequence
taagaggtacccacatgtttaaa

SEQ ID NO: 15269 - DNA, 23 bp, Artificial sequence
  SiRNA target sequence
aagaggtacccacatgtttaaaa

SEQ ID NO: 15270 - DNA, 23 bp, Artificial sequence
  SiRNA target sequence
agaggtacccacatgtttaaaaa

SEQ ID NO: 15271 - DNA, 23 bp, Artificial sequence
  SiRNA target sequence
gaggtacccacatgtttaaaaat

SEQ ID NO: 15272 - DNA, 23 bp, Artificial sequence
  SiRNA target sequence
aggtacccacatgtttaaaaatc

SEQ ID NO: 15273 - DNA, 23 bp, Artificial sequence
  SiRNA target sequence
ggtacccacatgtttaaaaatct

SEQ ID NO: 15274 - DNA, 23 bp, Artificial sequence
  SiRNA target sequence
gtacccacatgtttaaaaatcta

SEQ ID NO: 15275 - DNA, 23 bp, Artificial sequence
  SiRNA target sequence
tacccacatgtttaaaaatctac

SEQ ID NO: 15276 - DNA, 23 bp, Artificial sequence
  SiRNA target sequence
acccacatgtttaaaaatctact

SEQ ID NO: 15277 - DNA, 23 bp, Artificial sequence
  SiRNA target sequence
cccacatgtttaaaaatctactt

SEQ ID NO: 15278 - DNA, 23 bp, Artificial sequence
  SiRNA target sequence
ccacatgtttaaaaatctactta

SEQ ID NO: 15279 - DNA, 23 bp, Artificial sequence
  SiRNA target sequence
cacatgtttaaaaatctacttac

SEQ ID NO: 15280 - DNA, 23 bp, Artificial sequence
  SiRNA target sequence
acatgtttaaaaatctacttact

SEQ ID NO: 15281 - DNA, 23 bp, Artificial sequence
  SiRNA target sequence
catgtttaaaaatctacttacta

SEQ ID NO: 15282 - DNA, 23 bp, Artificial sequence
  SiRNA target sequence
atgtttaaaaatctacttactaa

SEQ ID NO: 15283 - DNA, 23 bp, Artificial sequence
  SiRNA target sequence
tgtttaaaaatctacttactaaa

SEQ ID NO: 15284 - DNA, 23 bp, Artificial sequence
  SiRNA target sequence
gtttaaaaatctacttactaaat

SEQ ID NO: 15285 - DNA, 23 bp, Artificial sequence
  SiRNA target sequence
tttaaaaatctacttactaaatt

SEQ ID NO: 15286 - DNA, 23 bp, Artificial sequence
  SiRNA target sequence
ttaaaaatctacttactaaattc

SEQ ID NO: 15287 - DNA, 23 bp, Artificial sequence
  SiRNA target sequence
taaaaatctacttactaaattcc

SEQ ID NO: 15288 - DNA, 23 bp, Artificial sequence
  SiRNA target sequence
aaaaatctacttactaaattcca

SEQ ID NO: 15289 - DNA, 23 bp, Artificial sequence
  SiRNA target sequence
aaaatctacttactaaattccat

SEQ ID NO: 15290 - DNA, 23 bp, Artificial sequence
  SiRNA target sequence
aaatctacttactaaattccata

SEQ ID NO: 15291 - DNA, 23 bp, Artificial sequence
  SiRNA target sequence
aatctacttactaaattccatac

SEQ ID NO: 15292 - DNA, 23 bp, Artificial sequence
  SiRNA target sequence
atctacttactaaattccataca

SEQ ID NO: 15293 - DNA, 23 bp, Artificial sequence
  SiRNA target sequence
tctacttactaaattccatacag

SEQ ID NO: 15294 - DNA, 23 bp, Artificial sequence
  SiRNA target sequence
ctacttactaaattccatacagt

SEQ ID NO: 15295 - DNA, 23 bp, Artificial sequence
  SiRNA target sequence
tacttactaaattccatacagta

SEQ ID NO: 15296 - DNA, 23 bp, Artificial sequence
  SiRNA target sequence
acttactaaattccatacagtaa

SEQ ID NO: 15297 - DNA, 23 bp, Artificial sequence
  SiRNA target sequence
cttactaaattccatacagtaat

SEQ ID NO: 15298 - DNA, 23 bp, Artificial sequence
  SiRNA target sequence
ttactaaattccatacagtaatt

SEQ ID NO: 15299 - DNA, 23 bp, Artificial sequence
  SiRNA target sequence
tactaaattccatacagtaattg

SEQ ID NO: 15300 - DNA, 23 bp, Artificial sequence
  SiRNA target sequence
actaaattccatacagtaattgg

SEQ ID NO: 15301 - DNA, 23 bp, Artificial sequence
  SiRNA target sequence
ctaaattccatacagtaattggt

SEQ ID NO: 15302 - DNA, 23 bp, Artificial sequence
  SiRNA target sequence
taaattccatacagtaattggta

SEQ ID NO: 15303 - DNA, 23 bp, Artificial sequence
  SiRNA target sequence
aaattccatacagtaattggtag

SEQ ID NO: 15304 - DNA, 23 bp, Artificial sequence
  SiRNA target sequence
aattccatacagtaattggtaga

SEQ ID NO: 15305 - DNA, 23 bp, Artificial sequence
  SiRNA target sequence
attccatacagtaattggtagaa

SEQ ID NO: 15306 - DNA, 23 bp, Artificial sequence
  SiRNA target sequence
ttccatacagtaattggtagaag

SEQ ID NO: 15307 - DNA, 23 bp, Artificial sequence
  SiRNA target sequence
tccatacagtaattggtagaagt

SEQ ID NO: 15308 - DNA, 23 bp, Artificial sequence
  SiRNA target sequence
ccatacagtaattggtagaagta

SEQ ID NO: 15309 - DNA, 23 bp, Artificial sequence
  SiRNA target sequence
catacagtaattggtagaagtaa

SEQ ID NO: 15310 - DNA, 23 bp, Artificial sequence
  SiRNA target sequence
atacagtaattggtagaagtaaa

SEQ ID NO: 15311 - DNA, 23 bp, Artificial sequence
  SiRNA target sequence
tacagtaattggtagaagtaaag

SEQ ID NO: 15312 - DNA, 23 bp, Artificial sequence
  SiRNA target sequence
acagtaattggtagaagtaaaga

SEQ ID NO: 15313 - DNA, 23 bp, Artificial sequence
  SiRNA target sequence
cagtaattggtagaagtaaagat

SEQ ID NO: 15314 - DNA, 23 bp, Artificial sequence
  SiRNA target sequence
agtaattggtagaagtaaagata

SEQ ID NO: 15315 - DNA, 23 bp, Artificial sequence
  SiRNA target sequence
gtaattggtagaagtaaagatat

SEQ ID NO: 15316 - DNA, 23 bp, Artificial sequence
  SiRNA target sequence
taattggtagaagtaaagatatc

SEQ ID NO: 15317 - DNA, 23 bp, Artificial sequence
  SiRNA target sequence
aattggtagaagtaaagatatct

SEQ ID NO: 15318 - DNA, 23 bp, Artificial sequence
  SiRNA target sequence
attggtagaagtaaagatatctt

SEQ ID NO: 15319 - DNA, 23 bp, Artificial sequence
  SiRNA target sequence
ttggtagaagtaaagatatcttt

SEQ ID NO: 15320 - DNA, 23 bp, Artificial sequence
  SiRNA target sequence
tggtagaagtaaagatatcttta

SEQ ID NO: 15321 - DNA, 23 bp, Artificial sequence
  SiRNA target sequence
ggtagaagtaaagatatctttac

SEQ ID NO: 15322 - DNA, 23 bp, Artificial sequence
  SiRNA target sequence
gtagaagtaaagatatctttaca

SEQ ID NO: 15323 - DNA, 23 bp, Artificial sequence
  SiRNA target sequence
tagaagtaaagatatctttacac

SEQ ID NO: 15324 - DNA, 23 bp, Artificial sequence
  SiRNA target sequence
agaagtaaagatatctttacaca

SEQ ID NO: 15325 - DNA, 23 bp, Artificial sequence
  SiRNA target sequence
gaagtaaagatatctttacacaa

SEQ ID NO: 15326 - DNA, 23 bp, Artificial sequence
  SiRNA target sequence
aagtaaagatatctttacacaaa

SEQ ID NO: 15327 - DNA, 23 bp, Artificial sequence
  SiRNA target sequence
agtaaagatatctttacacaaat

SEQ ID NO: 15328 - DNA, 23 bp, Artificial sequence
  SiRNA target sequence
gtaaagatatctttacacaaata

SEQ ID NO: 15329 - DNA, 23 bp, Artificial sequence
  SiRNA target sequence
taaagatatctttacacaaatag

SEQ ID NO: 15330 - DNA, 23 bp, Artificial sequence
  SiRNA target sequence
aaagatatctttacacaaataga

SEQ ID NO: 15331 - DNA, 23 bp, Artificial sequence
  SiRNA target sequence
aagatatctttacacaaatagag

SEQ ID NO: 15332 - DNA, 23 bp, Artificial sequence
  SiRNA target sequence
agatatctttacacaaatagagg

SEQ ID NO: 15333 - DNA, 23 bp, Artificial sequence
  SiRNA target sequence
gatatctttacacaaatagaggt

SEQ ID NO: 15334 - DNA, 23 bp, Artificial sequence
  SiRNA target sequence
atatctttacacaaatagaggta

SEQ ID NO: 15335 - DNA, 23 bp, Artificial sequence
  SiRNA target sequence
tatctttacacaaatagaggtag

SEQ ID NO: 15336 - DNA, 23 bp, Artificial sequence
  SiRNA target sequence
atctttacacaaatagaggtaga

SEQ ID NO: 15337 - DNA, 23 bp, Artificial sequence
  SiRNA target sequence
tctttacacaaatagaggtagac

SEQ ID NO: 15338 - DNA, 23 bp, Artificial sequence
  SiRNA target sequence
ctttacacaaatagaggtagaca

SEQ ID NO: 15339 - DNA, 23 bp, Artificial sequence
  SiRNA target sequence
tttacacaaatagaggtagacat

SEQ ID NO: 15340 - DNA, 23 bp, Artificial sequence
  SiRNA target sequence
ttacacaaatagaggtagacata

SEQ ID NO: 15341 - DNA, 23 bp, Artificial sequence
  SiRNA target sequence
tacacaaatagaggtagacataa

SEQ ID NO: 15342 - DNA, 23 bp, Artificial sequence
  SiRNA target sequence
acacaaatagaggtagacataaa

SEQ ID NO: 15343 - DNA, 23 bp, Artificial sequence
  SiRNA target sequence
cacaaatagaggtagacataaaa

SEQ ID NO: 15344 - DNA, 23 bp, Artificial sequence
  SiRNA target sequence
acaaatagaggtagacataaaaa

SEQ ID NO: 15345 - DNA, 23 bp, Artificial sequence
  SiRNA target sequence
caaatagaggtagacataaaaaa

SEQ ID NO: 15346 - DNA, 23 bp, Artificial sequence
  SiRNA target sequence
aaatagaggtagacataaaaaat

SEQ ID NO: 15347 - DNA, 23 bp, Artificial sequence
  SiRNA target sequence
aatagaggtagacataaaaaata

SEQ ID NO: 15348 - DNA, 23 bp, Artificial sequence
  SiRNA target sequence
atagaggtagacataaaaaataa

SEQ ID NO: 15349 - DNA, 23 bp, Artificial sequence
  SiRNA target sequence
tagaggtagacataaaaaataaa

SEQ ID NO: 15350 - DNA, 23 bp, Artificial sequence
  SiRNA target sequence
agaggtagacataaaaaataaat

SEQ ID NO: 15351 - DNA, 23 bp, Artificial sequence
  SiRNA target sequence
gaggtagacataaaaaataaata

SEQ ID NO: 15352 - DNA, 23 bp, Artificial sequence
  SiRNA target sequence
aggtagacataaaaaataaatac

SEQ ID NO: 15353 - DNA, 23 bp, Artificial sequence
  SiRNA target sequence
ggtagacataaaaaataaataca

SEQ ID NO: 15354 - DNA, 23 bp, Artificial sequence
  SiRNA target sequence
gtagacataaaaaataaatacaa

SEQ ID NO: 15355 - DNA, 23 bp, Artificial sequence
  SiRNA target sequence
tagacataaaaaataaatacaat

SEQ ID NO: 15356 - DNA, 23 bp, Artificial sequence
  SiRNA target sequence
agacataaaaaataaatacaata

SEQ ID NO: 15357 - DNA, 23 bp, Artificial sequence
  SiRNA target sequence
gacataaaaaataaatacaataa

SEQ ID NO: 15358 - DNA, 23 bp, Artificial sequence
  SiRNA target sequence
acataaaaaataaatacaataat

SEQ ID NO: 15359 - DNA, 23 bp, Artificial sequence
  SiRNA target sequence
cataaaaaataaatacaataata

SEQ ID NO: 15360 - DNA, 23 bp, Artificial sequence
  SiRNA target sequence
ataaaaaataaatacaataatat

SEQ ID NO: 15361 - DNA, 23 bp, Artificial sequence
  SiRNA target sequence
taaaaaataaatacaataatatg

SEQ ID NO: 15362 - DNA, 23 bp, Artificial sequence
  SiRNA target sequence
aaaaaataaatacaataatatgt

SEQ ID NO: 15363 - DNA, 23 bp, Artificial sequence
  SiRNA target sequence
aaaaataaatacaataatatgtg

SEQ ID NO: 15364 - DNA, 23 bp, Artificial sequence
  SiRNA target sequence
aaaataaatacaataatatgtgt

SEQ ID NO: 15365 - DNA, 23 bp, Artificial sequence
  SiRNA target sequence
aaataaatacaataatatgtgta

SEQ ID NO: 15366 - DNA, 23 bp, Artificial sequence
  SiRNA target sequence
aataaatacaataatatgtgtat

SEQ ID NO: 15367 - DNA, 23 bp, Artificial sequence
  SiRNA target sequence
ataaatacaataatatgtgtata

SEQ ID NO: 15368 - DNA, 23 bp, Artificial sequence
  SiRNA target sequence
taaatacaataatatgtgtataa

SEQ ID NO: 15369 - DNA, 23 bp, Artificial sequence
  SiRNA target sequence
aaatacaataatatgtgtataaa

SEQ ID NO: 15370 - DNA, 23 bp, Artificial sequence
  SiRNA target sequence
aatacaataatatgtgtataaaa

SEQ ID NO: 15371 - DNA, 23 bp, Artificial sequence
  SiRNA target sequence
atacaataatatgtgtataaaaa

SEQ ID NO: 15372 - DNA, 23 bp, Artificial sequence
  SiRNA target sequence
tacaataatatgtgtataaaaat

SEQ ID NO: 15373 - DNA, 23 bp, Artificial sequence
  SiRNA target sequence
acaataatatgtgtataaaaatg

SEQ ID NO: 15374 - DNA, 23 bp, Artificial sequence
  SiRNA target sequence
caataatatgtgtataaaaatga

SEQ ID NO: 15375 - DNA, 23 bp, Artificial sequence
  SiRNA target sequence
aataatatgtgtataaaaatgat

SEQ ID NO: 15376 - DNA, 23 bp, Artificial sequence
  SiRNA target sequence
ataatatgtgtataaaaatgata

SEQ ID NO: 15377 - DNA, 23 bp, Artificial sequence
  SiRNA target sequence
taatatgtgtataaaaatgatac

SEQ ID NO: 15378 - DNA, 23 bp, Artificial sequence
  SiRNA target sequence
aatatgtgtataaaaatgataca

SEQ ID NO: 15379 - DNA, 23 bp, Artificial sequence
  SiRNA target sequence
atatgtgtataaaaatgatacag

SEQ ID NO: 15380 - DNA, 23 bp, Artificial sequence
  SiRNA target sequence
tatgtgtataaaaatgatacagc

SEQ ID NO: 15381 - DNA, 23 bp, Artificial sequence
  SiRNA target sequence
atgtgtataaaaatgatacagcc

SEQ ID NO: 15382 - DNA, 23 bp, Artificial sequence
  SiRNA target sequence
tgtgtataaaaatgatacagcca

SEQ ID NO: 15383 - DNA, 23 bp, Artificial sequence
  SiRNA target sequence
gtgtataaaaatgatacagccag

SEQ ID NO: 15384 - DNA, 23 bp, Artificial sequence
  SiRNA target sequence
tgtataaaaatgatacagccagc

SEQ ID NO: 15385 - DNA, 23 bp, Artificial sequence
  SiRNA target sequence
gtataaaaatgatacagccagct

SEQ ID NO: 15386 - DNA, 23 bp, Artificial sequence
  SiRNA target sequence
tataaaaatgatacagccagcta

SEQ ID NO: 15387 - DNA, 23 bp, Artificial sequence
  SiRNA target sequence
ataaaaatgatacagccagctat

SEQ ID NO: 15388 - DNA, 23 bp, Artificial sequence
  SiRNA target sequence
taaaaatgatacagccagctatt

SEQ ID NO: 15389 - DNA, 23 bp, Artificial sequence
  SiRNA target sequence
aaaaatgatacagccagctatta

SEQ ID NO: 15390 - DNA, 23 bp, Artificial sequence
  SiRNA target sequence
aaaatgatacagccagctattaa

SEQ ID NO: 15391 - DNA, 23 bp, Artificial sequence
  SiRNA target sequence
aaatgatacagccagctattaaa

SEQ ID NO: 15392 - DNA, 23 bp, Artificial sequence
  SiRNA target sequence
aatgatacagccagctattaaag

SEQ ID NO: 15393 - DNA, 23 bp, Artificial sequence
  SiRNA target sequence
atgatacagccagctattaaagg

SEQ ID NO: 15394 - DNA, 23 bp, Artificial sequence
  SiRNA target sequence
tgatacagccagctattaaaggt

SEQ ID NO: 15395 - DNA, 23 bp, Artificial sequence
  SiRNA target sequence
gatacagccagctattaaaggtg

SEQ ID NO: 15396 - DNA, 23 bp, Artificial sequence
  SiRNA target sequence
atacagccagctattaaaggtgc

SEQ ID NO: 15397 - DNA, 23 bp, Artificial sequence
  SiRNA target sequence
tacagccagctattaaaggtgct

SEQ ID NO: 15398 - DNA, 23 bp, Artificial sequence
  SiRNA target sequence
acagccagctattaaaggtgctt

SEQ ID NO: 15399 - DNA, 23 bp, Artificial sequence
  SiRNA target sequence
cagccagctattaaaggtgcttc

SEQ ID NO: 15400 - DNA, 23 bp, Artificial sequence
  SiRNA target sequence
agccagctattaaaggtgcttca

SEQ ID NO: 15401 - DNA, 23 bp, Artificial sequence
  SiRNA target sequence
gccagctattaaaggtgcttcat

SEQ ID NO: 15402 - DNA, 23 bp, Artificial sequence
  SiRNA target sequence
ccagctattaaaggtgcttcatg

SEQ ID NO: 15403 - DNA, 23 bp, Artificial sequence
  SiRNA target sequence
cagctattaaaggtgcttcatgt

SEQ ID NO: 15404 - DNA, 23 bp, Artificial sequence
  SiRNA target sequence
agctattaaaggtgcttcatgta

SEQ ID NO: 15405 - DNA, 23 bp, Artificial sequence
  SiRNA target sequence
gctattaaaggtgcttcatgtat

SEQ ID NO: 15406 - DNA, 23 bp, Artificial sequence
  SiRNA target sequence
ctattaaaggtgcttcatgtata

SEQ ID NO: 15407 - DNA, 23 bp, Artificial sequence
  SiRNA target sequence
tattaaaggtgcttcatgtatat

SEQ ID NO: 15408 - DNA, 23 bp, Artificial sequence
  SiRNA target sequence
attaaaggtgcttcatgtatata

SEQ ID NO: 15409 - DNA, 23 bp, Artificial sequence
  SiRNA target sequence
ttaaaggtgcttcatgtatatac

SEQ ID NO: 15410 - DNA, 23 bp, Artificial sequence
  SiRNA target sequence
taaaggtgcttcatgtatatacg

SEQ ID NO: 15411 - DNA, 23 bp, Artificial sequence
  SiRNA target sequence
aaaggtgcttcatgtatatacgt

SEQ ID NO: 15412 - DNA, 23 bp, Artificial sequence
  SiRNA target sequence
aaggtgcttcatgtatatacgtg

SEQ ID NO: 15413 - DNA, 23 bp, Artificial sequence
  SiRNA target sequence
aggtgcttcatgtatatacgtgg

SEQ ID NO: 15414 - DNA, 23 bp, Artificial sequence
  SiRNA target sequence
ggtgcttcatgtatatacgtggg

SEQ ID NO: 15415 - DNA, 23 bp, Artificial sequence
  SiRNA target sequence
gtgcttcatgtatatacgtgggt

SEQ ID NO: 15416 - DNA, 23 bp, Artificial sequence
  SiRNA target sequence
tgcttcatgtatatacgtgggta

SEQ ID NO: 15417 - DNA, 23 bp, Artificial sequence
  SiRNA target sequence
gcttcatgtatatacgtgggtaa

SEQ ID NO: 15418 - DNA, 23 bp, Artificial sequence
  SiRNA target sequence
cttcatgtatatacgtgggtaat

SEQ ID NO: 15419 - DNA, 23 bp, Artificial sequence
  SiRNA target sequence
ttcatgtatatacgtgggtaatt

SEQ ID NO: 15420 - DNA, 23 bp, Artificial sequence
  SiRNA target sequence
tcatgtatatacgtgggtaatta

SEQ ID NO: 15421 - DNA, 23 bp, Artificial sequence
  SiRNA target sequence
catgtatatacgtgggtaattat

SEQ ID NO: 15422 - DNA, 23 bp, Artificial sequence
  SiRNA target sequence
atgtatatacgtgggtaattata

SEQ ID NO: 15423 - DNA, 23 bp, Artificial sequence
  SiRNA target sequence
tgtatatacgtgggtaattatat

SEQ ID NO: 15424 - DNA, 23 bp, Artificial sequence
  SiRNA target sequence
gtatatacgtgggtaattatatg

SEQ ID NO: 15425 - DNA, 23 bp, Artificial sequence
  SiRNA target sequence
tatatacgtgggtaattatatgc

SEQ ID NO: 15426 - DNA, 23 bp, Artificial sequence
  SiRNA target sequence
atatacgtgggtaattatatgca

SEQ ID NO: 15427 - DNA, 23 bp, Artificial sequence
  SiRNA target sequence
tatacgtgggtaattatatgcag

SEQ ID NO: 15428 - DNA, 23 bp, Artificial sequence
  SiRNA target sequence
atacgtgggtaattatatgcagc

SEQ ID NO: 15429 - DNA, 23 bp, Artificial sequence
  SiRNA target sequence
tacgtgggtaattatatgcagca

SEQ ID NO: 15430 - DNA, 23 bp, Artificial sequence
  SiRNA target sequence
acgtgggtaattatatgcagcag

SEQ ID NO: 15431 - DNA, 23 bp, Artificial sequence
  SiRNA target sequence
cgtgggtaattatatgcagcagc

SEQ ID NO: 15432 - DNA, 23 bp, Artificial sequence
  SiRNA target sequence
gtgggtaattatatgcagcagct

SEQ ID NO: 15433 - DNA, 23 bp, Artificial sequence
  SiRNA target sequence
tgggtaattatatgcagcagcta

SEQ ID NO: 15434 - DNA, 23 bp, Artificial sequence
  SiRNA target sequence
gggtaattatatgcagcagctag

SEQ ID NO: 15435 - DNA, 23 bp, Artificial sequence
  SiRNA target sequence
ggtaattatatgcagcagctagg

SEQ ID NO: 15436 - DNA, 23 bp, Artificial sequence
  SiRNA target sequence
gtaattatatgcagcagctagga

SEQ ID NO: 15437 - DNA, 23 bp, Artificial sequence
  SiRNA target sequence
taattatatgcagcagctaggag

SEQ ID NO: 15438 - DNA, 23 bp, Artificial sequence
  SiRNA target sequence
aattatatgcagcagctaggagt

SEQ ID NO: 15439 - DNA, 23 bp, Artificial sequence
  SiRNA target sequence
attatatgcagcagctaggagta

SEQ ID NO: 15440 - DNA, 23 bp, Artificial sequence
  SiRNA target sequence
ttatatgcagcagctaggagtaa

SEQ ID NO: 15441 - DNA, 23 bp, Artificial sequence
  SiRNA target sequence
tatatgcagcagctaggagtaat

SEQ ID NO: 15442 - DNA, 23 bp, Artificial sequence
  SiRNA target sequence
atatgcagcagctaggagtaatt

SEQ ID NO: 15443 - DNA, 23 bp, Artificial sequence
  SiRNA target sequence
tatgcagcagctaggagtaatta

SEQ ID NO: 15444 - DNA, 23 bp, Artificial sequence
  SiRNA target sequence
atgcagcagctaggagtaattag

SEQ ID NO: 15445 - DNA, 23 bp, Artificial sequence
  SiRNA target sequence
tgcagcagctaggagtaattagt

SEQ ID NO: 15446 - DNA, 23 bp, Artificial sequence
  SiRNA target sequence
gcagcagctaggagtaattagtc

SEQ ID NO: 15447 - DNA, 23 bp, Artificial sequence
  SiRNA target sequence
cagcagctaggagtaattagtct

SEQ ID NO: 15448 - DNA, 23 bp, Artificial sequence
  SiRNA target sequence
agcagctaggagtaattagtctt

SEQ ID NO: 15449 - DNA, 23 bp, Artificial sequence
  SiRNA target sequence
gcagctaggagtaattagtcttg

SEQ ID NO: 15450 - DNA, 23 bp, Artificial sequence
  SiRNA target sequence
cagctaggagtaattagtcttgg

SEQ ID NO: 15451 - DNA, 23 bp, Artificial sequence
  SiRNA target sequence
agctaggagtaattagtcttggt

SEQ ID NO: 15452 - DNA, 23 bp, Artificial sequence
  SiRNA target sequence
gctaggagtaattagtcttggtg

SEQ ID NO: 15453 - DNA, 23 bp, Artificial sequence
  SiRNA target sequence
ctaggagtaattagtcttggtgg

SEQ ID NO: 15454 - DNA, 23 bp, Artificial sequence
  SiRNA target sequence
taggagtaattagtcttggtggg

SEQ ID NO: 15455 - DNA, 23 bp, Artificial sequence
  SiRNA target sequence
aggagtaattagtcttggtgggg

SEQ ID NO: 15456 - DNA, 23 bp, Artificial sequence
  SiRNA target sequence
ggagtaattagtcttggtgggga

SEQ ID NO: 15457 - DNA, 23 bp, Artificial sequence
  SiRNA target sequence
gagtaattagtcttggtggggag

SEQ ID NO: 15458 - DNA, 23 bp, Artificial sequence
  SiRNA target sequence
agtaattagtcttggtggggaga

SEQ ID NO: 15459 - DNA, 23 bp, Artificial sequence
  SiRNA target sequence
gtaattagtcttggtggggagat

SEQ ID NO: 15460 - DNA, 23 bp, Artificial sequence
  SiRNA target sequence
taattagtcttggtggggagatt

SEQ ID NO: 15461 - DNA, 23 bp, Artificial sequence
  SiRNA target sequence
aattagtcttggtggggagatta

SEQ ID NO: 15462 - DNA, 23 bp, Artificial sequence
  SiRNA target sequence
attagtcttggtggggagattat

SEQ ID NO: 15463 - DNA, 23 bp, Artificial sequence
  SiRNA target sequence
ttagtcttggtggggagattatt

SEQ ID NO: 15464 - DNA, 23 bp, Artificial sequence
  SiRNA target sequence
tagtcttggtggggagattatta

SEQ ID NO: 15465 - DNA, 23 bp, Artificial sequence
  SiRNA target sequence
agtcttggtggggagattattaa

SEQ ID NO: 15466 - DNA, 23 bp, Artificial sequence
  SiRNA target sequence
gtcttggtggggagattattaaa

SEQ ID NO: 15467 - DNA, 23 bp, Artificial sequence
  SiRNA target sequence
tcttggtggggagattattaaag

SEQ ID NO: 15468 - DNA, 23 bp, Artificial sequence
  SiRNA target sequence
cttggtggggagattattaaagc

SEQ ID NO: 15469 - DNA, 23 bp, Artificial sequence
  SiRNA target sequence
ttggtggggagattattaaagct

SEQ ID NO: 15470 - DNA, 23 bp, Artificial sequence
  SiRNA target sequence
tggtggggagattattaaagctg

SEQ ID NO: 15471 - DNA, 23 bp, Artificial sequence
  SiRNA target sequence
ggtggggagattattaaagctga

SEQ ID NO: 15472 - DNA, 23 bp, Artificial sequence
  SiRNA target sequence
gtggggagattattaaagctgat

SEQ ID NO: 15473 - DNA, 23 bp, Artificial sequence
  SiRNA target sequence
tggggagattattaaagctgatg

SEQ ID NO: 15474 - DNA, 23 bp, Artificial sequence
  SiRNA target sequence
ggggagattattaaagctgatga

SEQ ID NO: 15475 - DNA, 23 bp, Artificial sequence
  SiRNA target sequence
gggagattattaaagctgatgaa

SEQ ID NO: 15476 - DNA, 23 bp, Artificial sequence
  SiRNA target sequence
ggagattattaaagctgatgaat

SEQ ID NO: 15477 - DNA, 23 bp, Artificial sequence
  SiRNA target sequence
gagattattaaagctgatgaata

SEQ ID NO: 15478 - DNA, 23 bp, Artificial sequence
  SiRNA target sequence
agattattaaagctgatgaatac

SEQ ID NO: 15479 - DNA, 23 bp, Artificial sequence
  SiRNA target sequence
gattattaaagctgatgaataca

SEQ ID NO: 15480 - DNA, 23 bp, Artificial sequence
  SiRNA target sequence
attattaaagctgatgaatacat

SEQ ID NO: 15481 - DNA, 23 bp, Artificial sequence
  SiRNA target sequence
ttattaaagctgatgaatacatt

SEQ ID NO: 15482 - DNA, 23 bp, Artificial sequence
  SiRNA target sequence
tattaaagctgatgaatacattg

SEQ ID NO: 15483 - DNA, 23 bp, Artificial sequence
  SiRNA target sequence
attaaagctgatgaatacattgg

SEQ ID NO: 15484 - DNA, 23 bp, Artificial sequence
  SiRNA target sequence
ttaaagctgatgaatacattgga

SEQ ID NO: 15485 - DNA, 23 bp, Artificial sequence
  SiRNA target sequence
taaagctgatgaatacattggac

SEQ ID NO: 15486 - DNA, 23 bp, Artificial sequence
  SiRNA target sequence
aaagctgatgaatacattggact

SEQ ID NO: 15487 - DNA, 23 bp, Artificial sequence
  SiRNA target sequence
aagctgatgaatacattggacta

SEQ ID NO: 15488 - DNA, 23 bp, Artificial sequence
  SiRNA target sequence
agctgatgaatacattggactat

SEQ ID NO: 15489 - DNA, 23 bp, Artificial sequence
  SiRNA target sequence
gctgatgaatacattggactatc

SEQ ID NO: 15490 - DNA, 23 bp, Artificial sequence
  SiRNA target sequence
ctgatgaatacattggactatct

SEQ ID NO: 15491 - DNA, 23 bp, Artificial sequence
  SiRNA target sequence
tgatgaatacattggactatctt

SEQ ID NO: 15492 - DNA, 23 bp, Artificial sequence
  SiRNA target sequence
gatgaatacattggactatcttt

SEQ ID NO: 15493 - DNA, 23 bp, Artificial sequence
  SiRNA target sequence
atgaatacattggactatctttt

SEQ ID NO: 15494 - DNA, 23 bp, Artificial sequence
  SiRNA target sequence
tgaatacattggactatcttttg

SEQ ID NO: 15495 - DNA, 23 bp, Artificial sequence
  SiRNA target sequence
gaatacattggactatcttttgt

SEQ ID NO: 15496 - DNA, 23 bp, Artificial sequence
  SiRNA target sequence
aatacattggactatcttttgta

SEQ ID NO: 15497 - DNA, 23 bp, Artificial sequence
  SiRNA target sequence
atacattggactatcttttgtag

SEQ ID NO: 15498 - DNA, 23 bp, Artificial sequence
  SiRNA target sequence
tacattggactatcttttgtagg

SEQ ID NO: 15499 - DNA, 23 bp, Artificial sequence
  SiRNA target sequence
acattggactatcttttgtaggg

SEQ ID NO: 15500 - DNA, 23 bp, Artificial sequence
  SiRNA target sequence
cattggactatcttttgtaggga

SEQ ID NO: 15501 - DNA, 23 bp, Artificial sequence
  SiRNA target sequence
attggactatcttttgtagggag

SEQ ID NO: 15502 - DNA, 23 bp, Artificial sequence
  SiRNA target sequence
ttggactatcttttgtagggaga

SEQ ID NO: 15503 - DNA, 23 bp, Artificial sequence
  SiRNA target sequence
tggactatcttttgtagggagat

SEQ ID NO: 15504 - DNA, 23 bp, Artificial sequence
  SiRNA target sequence
ggactatcttttgtagggagata

SEQ ID NO: 15505 - DNA, 23 bp, Artificial sequence
  SiRNA target sequence
gactatcttttgtagggagatat

SEQ ID NO: 15506 - DNA, 23 bp, Artificial sequence
  SiRNA target sequence
actatcttttgtagggagatatg

SEQ ID NO: 15507 - DNA, 23 bp, Artificial sequence
  SiRNA target sequence
ctatcttttgtagggagatatga

SEQ ID NO: 15508 - DNA, 23 bp, Artificial sequence
  SiRNA target sequence
tatcttttgtagggagatatgaa

SEQ ID NO: 15509 - DNA, 23 bp, Artificial sequence
  SiRNA target sequence
atcttttgtagggagatatgaag

SEQ ID NO: 15510 - DNA, 23 bp, Artificial sequence
  SiRNA target sequence
tcttttgtagggagatatgaagg

SEQ ID NO: 15511 - DNA, 23 bp, Artificial sequence
  SiRNA target sequence
cttttgtagggagatatgaaggg

SEQ ID NO: 15512 - DNA, 23 bp, Artificial sequence
  SiRNA target sequence
ttttgtagggagatatgaaggga

SEQ ID NO: 15513 - DNA, 23 bp, Artificial sequence
  SiRNA target sequence
tttgtagggagatatgaagggat

SEQ ID NO: 15514 - DNA, 23 bp, Artificial sequence
  SiRNA target sequence
ttgtagggagatatgaagggatt

SEQ ID NO: 15515 - DNA, 23 bp, Artificial sequence
  SiRNA target sequence
tgtagggagatatgaagggattg

SEQ ID NO: 15516 - DNA, 23 bp, Artificial sequence
  SiRNA target sequence
gtagggagatatgaagggattgg

SEQ ID NO: 15517 - DNA, 23 bp, Artificial sequence
  SiRNA target sequence
tagggagatatgaagggattggt

SEQ ID NO: 15518 - DNA, 23 bp, Artificial sequence
  SiRNA target sequence
agggagatatgaagggattggtt

SEQ ID NO: 15519 - DNA, 23 bp, Artificial sequence
  SiRNA target sequence
gggagatatgaagggattggttc

SEQ ID NO: 15520 - DNA, 23 bp, Artificial sequence
  SiRNA target sequence
ggagatatgaagggattggttct

SEQ ID NO: 15521 - DNA, 23 bp, Artificial sequence
  SiRNA target sequence
gagatatgaagggattggttcta

SEQ ID NO: 15522 - DNA, 23 bp, Artificial sequence
  SiRNA target sequence
agatatgaagggattggttctat

SEQ ID NO: 15523 - DNA, 23 bp, Artificial sequence
  SiRNA target sequence
gatatgaagggattggttctatt

SEQ ID NO: 15524 - DNA, 23 bp, Artificial sequence
  SiRNA target sequence
atatgaagggattggttctattt

SEQ ID NO: 15525 - DNA, 23 bp, Artificial sequence
  SiRNA target sequence
tatgaagggattggttctatttc

SEQ ID NO: 15526 - DNA, 23 bp, Artificial sequence
  SiRNA target sequence
atgaagggattggttctatttct

SEQ ID NO: 15527 - DNA, 23 bp, Artificial sequence
  SiRNA target sequence
tgaagggattggttctatttcta

SEQ ID NO: 15528 - DNA, 23 bp, Artificial sequence
  SiRNA target sequence
gaagggattggttctatttctac

SEQ ID NO: 15529 - DNA, 23 bp, Artificial sequence
  SiRNA target sequence
aagggattggttctatttctact

SEQ ID NO: 15530 - DNA, 23 bp, Artificial sequence
  SiRNA target sequence
agggattggttctatttctacta

SEQ ID NO: 15531 - DNA, 23 bp, Artificial sequence
  SiRNA target sequence
gggattggttctatttctactat

SEQ ID NO: 15532 - DNA, 23 bp, Artificial sequence
  SiRNA target sequence
ggattggttctatttctactata

SEQ ID NO: 15533 - DNA, 23 bp, Artificial sequence
  SiRNA target sequence
gattggttctatttctactatat

SEQ ID NO: 15534 - DNA, 23 bp, Artificial sequence
  SiRNA target sequence
attggttctatttctactatatc

SEQ ID NO: 15535 - DNA, 23 bp, Artificial sequence
  SiRNA target sequence
ttggttctatttctactatatca

SEQ ID NO: 15536 - DNA, 23 bp, Artificial sequence
  SiRNA target sequence
tggttctatttctactatatcac

SEQ ID NO: 15537 - DNA, 23 bp, Artificial sequence
  SiRNA target sequence
ggttctatttctactatatcact

SEQ ID NO: 15538 - DNA, 23 bp, Artificial sequence
  SiRNA target sequence
gttctatttctactatatcactt

SEQ ID NO: 15539 - DNA, 23 bp, Artificial sequence
  SiRNA target sequence
ttctatttctactatatcacttc

SEQ ID NO: 15540 - DNA, 23 bp, Artificial sequence
  SiRNA target sequence
tctatttctactatatcacttca

SEQ ID NO: 15541 - DNA, 23 bp, Artificial sequence
  SiRNA target sequence
ctatttctactatatcacttcag

SEQ ID NO: 15542 - DNA, 23 bp, Artificial sequence
  SiRNA target sequence
tatttctactatatcacttcagc

SEQ ID NO: 15543 - DNA, 23 bp, Artificial sequence
  SiRNA target sequence
atttctactatatcacttcagca

SEQ ID NO: 15544 - DNA, 23 bp, Artificial sequence
  SiRNA target sequence
tttctactatatcacttcagcag

SEQ ID NO: 15545 - DNA, 23 bp, Artificial sequence
  SiRNA target sequence
ttctactatatcacttcagcagt

SEQ ID NO: 15546 - DNA, 23 bp, Artificial sequence
  SiRNA target sequence
tctactatatcacttcagcagtt

SEQ ID NO: 15547 - DNA, 23 bp, Artificial sequence
  SiRNA target sequence
ctactatatcacttcagcagttt

SEQ ID NO: 15548 - DNA, 23 bp, Artificial sequence
  SiRNA target sequence
tactatatcacttcagcagttta

SEQ ID NO: 15549 - DNA, 23 bp, Artificial sequence
  SiRNA target sequence
actatatcacttcagcagtttaa

SEQ ID NO: 15550 - DNA, 23 bp, Artificial sequence
  SiRNA target sequence
ctatatcacttcagcagtttaat

SEQ ID NO: 15551 - DNA, 23 bp, Artificial sequence
  SiRNA target sequence
tatatcacttcagcagtttaata

SEQ ID NO: 15552 - DNA, 23 bp, Artificial sequence
  SiRNA target sequence
atatcacttcagcagtttaatac

SEQ ID NO: 15553 - DNA, 23 bp, Artificial sequence
  SiRNA target sequence
tatcacttcagcagtttaataca

SEQ ID NO: 15554 - DNA, 23 bp, Artificial sequence
  SiRNA target sequence
atcacttcagcagtttaatacac

SEQ ID NO: 15555 - DNA, 23 bp, Artificial sequence
  SiRNA target sequence
tcacttcagcagtttaatacact

SEQ ID NO: 15556 - DNA, 23 bp, Artificial sequence
  SiRNA target sequence
cacttcagcagtttaatacactg

SEQ ID NO: 15557 - DNA, 23 bp, Artificial sequence
  SiRNA target sequence
acttcagcagtttaatacactgt

SEQ ID NO: 15558 - DNA, 23 bp, Artificial sequence
  SiRNA target sequence
cttcagcagtttaatacactgtc

SEQ ID NO: 15559 - DNA, 23 bp, Artificial sequence
  SiRNA target sequence
ttcagcagtttaatacactgtct

SEQ ID NO: 15560 - DNA, 23 bp, Artificial sequence
  SiRNA target sequence
tcagcagtttaatacactgtcta

SEQ ID NO: 15561 - DNA, 23 bp, Artificial sequence
  SiRNA target sequence
cagcagtttaatacactgtctat

SEQ ID NO: 15562 - DNA, 23 bp, Artificial sequence
  SiRNA target sequence
agcagtttaatacactgtctata

SEQ ID NO: 15563 - DNA, 23 bp, Artificial sequence
  SiRNA target sequence
gcagtttaatacactgtctatag

SEQ ID NO: 15564 - DNA, 23 bp, Artificial sequence
  SiRNA target sequence
cagtttaatacactgtctataga

SEQ ID NO: 15565 - DNA, 23 bp, Artificial sequence
  SiRNA target sequence
agtttaatacactgtctatagat

SEQ ID NO: 15566 - DNA, 23 bp, Artificial sequence
  SiRNA target sequence
gtttaatacactgtctatagatt

SEQ ID NO: 15567 - DNA, 23 bp, Artificial sequence
  SiRNA target sequence
tttaatacactgtctatagatta

SEQ ID NO: 15568 - DNA, 23 bp, Artificial sequence
  SiRNA target sequence
ttaatacactgtctatagattat

SEQ ID NO: 15569 - DNA, 23 bp, Artificial sequence
  SiRNA target sequence
taatacactgtctatagattatt

SEQ ID NO: 15570 - DNA, 23 bp, Artificial sequence
  SiRNA target sequence
aatacactgtctatagattatta

SEQ ID NO: 15571 - DNA, 23 bp, Artificial sequence
  SiRNA target sequence
atacactgtctatagattattac

SEQ ID NO: 15572 - DNA, 23 bp, Artificial sequence
  SiRNA target sequence
tacactgtctatagattattaca

SEQ ID NO: 15573 - DNA, 23 bp, Artificial sequence
  SiRNA target sequence
acactgtctatagattattacaa

SEQ ID NO: 15574 - DNA, 23 bp, Artificial sequence
  SiRNA target sequence
cactgtctatagattattacaag

SEQ ID NO: 15575 - DNA, 23 bp, Artificial sequence
  SiRNA target sequence
actgtctatagattattacaaga

SEQ ID NO: 15576 - DNA, 23 bp, Artificial sequence
  SiRNA target sequence
ctgtctatagattattacaagac

SEQ ID NO: 15577 - DNA, 23 bp, Artificial sequence
  SiRNA target sequence
tgtctatagattattacaagaca

SEQ ID NO: 15578 - DNA, 23 bp, Artificial sequence
  SiRNA target sequence
gtctatagattattacaagacat

SEQ ID NO: 15579 - DNA, 23 bp, Artificial sequence
  SiRNA target sequence
tctatagattattacaagacatt

SEQ ID NO: 15580 - DNA, 23 bp, Artificial sequence
  SiRNA target sequence
ctatagattattacaagacattg

SEQ ID NO: 15581 - DNA, 23 bp, Artificial sequence
  SiRNA target sequence
tatagattattacaagacattgt

SEQ ID NO: 15582 - DNA, 23 bp, Artificial sequence
  SiRNA target sequence
atagattattacaagacattgtc

SEQ ID NO: 15583 - DNA, 23 bp, Artificial sequence
  SiRNA target sequence
tagattattacaagacattgtct

SEQ ID NO: 15584 - DNA, 23 bp, Artificial sequence
  SiRNA target sequence
agattattacaagacattgtctt

SEQ ID NO: 15585 - DNA, 23 bp, Artificial sequence
  SiRNA target sequence
gattattacaagacattgtcttc

SEQ ID NO: 15586 - DNA, 23 bp, Artificial sequence
  SiRNA target sequence
attattacaagacattgtcttct

SEQ ID NO: 15587 - DNA, 23 bp, Artificial sequence
  SiRNA target sequence
ttattacaagacattgtcttcta

SEQ ID NO: 15588 - DNA, 23 bp, Artificial sequence
  SiRNA target sequence
tattacaagacattgtcttctat

SEQ ID NO: 15589 - DNA, 23 bp, Artificial sequence
  SiRNA target sequence
attacaagacattgtcttctatt

SEQ ID NO: 15590 - DNA, 23 bp, Artificial sequence
  SiRNA target sequence
ttacaagacattgtcttctattt

SEQ ID NO: 15591 - DNA, 23 bp, Artificial sequence
  SiRNA target sequence
tacaagacattgtcttctatttg

SEQ ID NO: 15592 - DNA, 23 bp, Artificial sequence
  SiRNA target sequence
acaagacattgtcttctatttgt

SEQ ID NO: 15593 - DNA, 23 bp, Artificial sequence
  SiRNA target sequence
caagacattgtcttctatttgtg

SEQ ID NO: 15594 - DNA, 23 bp, Artificial sequence
  SiRNA target sequence
aagacattgtcttctatttgtga

SEQ ID NO: 15595 - DNA, 23 bp, Artificial sequence
  SiRNA target sequence
agacattgtcttctatttgtgac

SEQ ID NO: 15596 - DNA, 23 bp, Artificial sequence
  SiRNA target sequence
gacattgtcttctatttgtgacg

SEQ ID NO: 15597 - DNA, 23 bp, Artificial sequence
  SiRNA target sequence
acattgtcttctatttgtgacgt

SEQ ID NO: 15598 - DNA, 23 bp, Artificial sequence
  SiRNA target sequence
cattgtcttctatttgtgacgta

SEQ ID NO: 15599 - DNA, 23 bp, Artificial sequence
  SiRNA target sequence
attgtcttctatttgtgacgtag

SEQ ID NO: 15600 - DNA, 23 bp, Artificial sequence
  SiRNA target sequence
ttgtcttctatttgtgacgtagg

SEQ ID NO: 15601 - DNA, 23 bp, Artificial sequence
  SiRNA target sequence
tgtcttctatttgtgacgtaggt

SEQ ID NO: 15602 - DNA, 23 bp, Artificial sequence
  SiRNA target sequence
gtcttctatttgtgacgtaggta

SEQ ID NO: 15603 - DNA, 23 bp, Artificial sequence
  SiRNA target sequence
tcttctatttgtgacgtaggtat

SEQ ID NO: 15604 - DNA, 23 bp, Artificial sequence
  SiRNA target sequence
cttctatttgtgacgtaggtatt

SEQ ID NO: 15605 - DNA, 23 bp, Artificial sequence
  SiRNA target sequence
ttctatttgtgacgtaggtatta

SEQ ID NO: 15606 - DNA, 23 bp, Artificial sequence
  SiRNA target sequence
tctatttgtgacgtaggtattaa

SEQ ID NO: 15607 - DNA, 23 bp, Artificial sequence
  SiRNA target sequence
ctatttgtgacgtaggtattaaa

SEQ ID NO: 15608 - DNA, 23 bp, Artificial sequence
  SiRNA target sequence
tatttgtgacgtaggtattaaaa

SEQ ID NO: 15609 - DNA, 23 bp, Artificial sequence
  SiRNA target sequence
atttgtgacgtaggtattaaaat

SEQ ID NO: 15610 - DNA, 23 bp, Artificial sequence
  SiRNA target sequence
tttgtgacgtaggtattaaaata

SEQ ID NO: 15611 - DNA, 23 bp, Artificial sequence
  SiRNA target sequence
ttgtgacgtaggtattaaaatat

SEQ ID NO: 15612 - DNA, 23 bp, Artificial sequence
  SiRNA target sequence
tgtgacgtaggtattaaaatatc

SEQ ID NO: 15613 - DNA, 23 bp, Artificial sequence
  SiRNA target sequence
gtgacgtaggtattaaaatatca

SEQ ID NO: 15614 - DNA, 23 bp, Artificial sequence
  SiRNA target sequence
tgacgtaggtattaaaatatcaa

SEQ ID NO: 15615 - DNA, 23 bp, Artificial sequence
  SiRNA target sequence
gacgtaggtattaaaatatcaac

SEQ ID NO: 15616 - DNA, 23 bp, Artificial sequence
  SiRNA target sequence
acgtaggtattaaaatatcaact

SEQ ID NO: 15617 - DNA, 23 bp, Artificial sequence
  SiRNA target sequence
cgtaggtattaaaatatcaactg

SEQ ID NO: 15618 - DNA, 23 bp, Artificial sequence
  SiRNA target sequence
gtaggtattaaaatatcaactga

SEQ ID NO: 15619 - DNA, 23 bp, Artificial sequence
  SiRNA target sequence
taggtattaaaatatcaactgat

SEQ ID NO: 15620 - DNA, 23 bp, Artificial sequence
  SiRNA target sequence
aggtattaaaatatcaactgata

SEQ ID NO: 15621 - DNA, 23 bp, Artificial sequence
  SiRNA target sequence
ggtattaaaatatcaactgatag

SEQ ID NO: 15622 - DNA, 23 bp, Artificial sequence
  SiRNA target sequence
gtattaaaatatcaactgatagg

SEQ ID NO: 15623 - DNA, 23 bp, Artificial sequence
  SiRNA target sequence
tattaaaatatcaactgataggg

SEQ ID NO: 15624 - DNA, 23 bp, Artificial sequence
  SiRNA target sequence
attaaaatatcaactgataggga

SEQ ID NO: 15625 - DNA, 23 bp, Artificial sequence
  SiRNA target sequence
ttaaaatatcaactgatagggaa

SEQ ID NO: 15626 - DNA, 23 bp, Artificial sequence
  SiRNA target sequence
taaaatatcaactgatagggaaa

SEQ ID NO: 15627 - DNA, 23 bp, Artificial sequence
  SiRNA target sequence
aaaatatcaactgatagggaaaa

SEQ ID NO: 15628 - DNA, 23 bp, Artificial sequence
  SiRNA target sequence
aaatatcaactgatagggaaaaa

SEQ ID NO: 15629 - DNA, 23 bp, Artificial sequence
  SiRNA target sequence
aatatcaactgatagggaaaaat

SEQ ID NO: 15630 - DNA, 23 bp, Artificial sequence
  SiRNA target sequence
atatcaactgatagggaaaaatc

SEQ ID NO: 15631 - DNA, 23 bp, Artificial sequence
  SiRNA target sequence
tatcaactgatagggaaaaatca

SEQ ID NO: 15632 - DNA, 23 bp, Artificial sequence
  SiRNA target sequence
atcaactgatagggaaaaatcag

SEQ ID NO: 15633 - DNA, 23 bp, Artificial sequence
  SiRNA target sequence
tcaactgatagggaaaaatcagt

SEQ ID NO: 15634 - DNA, 23 bp, Artificial sequence
  SiRNA target sequence
caactgatagggaaaaatcagtt

SEQ ID NO: 15635 - DNA, 23 bp, Artificial sequence
  SiRNA target sequence
aactgatagggaaaaatcagtta

SEQ ID NO: 15636 - DNA, 23 bp, Artificial sequence
  SiRNA target sequence
actgatagggaaaaatcagttaa

SEQ ID NO: 15637 - DNA, 23 bp, Artificial sequence
  SiRNA target sequence
ctgatagggaaaaatcagttaat

SEQ ID NO: 15638 - DNA, 23 bp, Artificial sequence
  SiRNA target sequence
tgatagggaaaaatcagttaatt

SEQ ID NO: 15639 - DNA, 23 bp, Artificial sequence
  SiRNA target sequence
gatagggaaaaatcagttaatta

SEQ ID NO: 15640 - DNA, 23 bp, Artificial sequence
  SiRNA target sequence
atagggaaaaatcagttaattat

SEQ ID NO: 15641 - DNA, 23 bp, Artificial sequence
  SiRNA target sequence
tagggaaaaatcagttaattatg

SEQ ID NO: 15642 - DNA, 23 bp, Artificial sequence
  SiRNA target sequence
agggaaaaatcagttaattatgg

SEQ ID NO: 15643 - DNA, 23 bp, Artificial sequence
  SiRNA target sequence
gggaaaaatcagttaattatgga

SEQ ID NO: 15644 - DNA, 23 bp, Artificial sequence
  SiRNA target sequence
ggaaaaatcagttaattatggat

SEQ ID NO: 15645 - DNA, 23 bp, Artificial sequence
  SiRNA target sequence
gaaaaatcagttaattatggatt

SEQ ID NO: 15646 - DNA, 23 bp, Artificial sequence
  SiRNA target sequence
aaaaatcagttaattatggatta

SEQ ID NO: 15647 - DNA, 23 bp, Artificial sequence
  SiRNA target sequence
aaaatcagttaattatggattag

SEQ ID NO: 15648 - DNA, 23 bp, Artificial sequence
  SiRNA target sequence
aaatcagttaattatggattagg

SEQ ID NO: 15649 - DNA, 23 bp, Artificial sequence
  SiRNA target sequence
aatcagttaattatggattagga

SEQ ID NO: 15650 - DNA, 23 bp, Artificial sequence
  SiRNA target sequence
atcagttaattatggattaggag

SEQ ID NO: 15651 - DNA, 23 bp, Artificial sequence
  SiRNA target sequence
tcagttaattatggattaggagt

SEQ ID NO: 15652 - DNA, 23 bp, Artificial sequence
  SiRNA target sequence
cagttaattatggattaggagtt

SEQ ID NO: 15653 - DNA, 23 bp, Artificial sequence
  SiRNA target sequence
agttaattatggattaggagtta

SEQ ID NO: 15654 - DNA, 23 bp, Artificial sequence
  SiRNA target sequence
gttaattatggattaggagttaa

SEQ ID NO: 15655 - DNA, 23 bp, Artificial sequence
  SiRNA target sequence
ttaattatggattaggagttaaa

SEQ ID NO: 15656 - DNA, 23 bp, Artificial sequence
  SiRNA target sequence
taattatggattaggagttaaac

SEQ ID NO: 15657 - DNA, 23 bp, Artificial sequence
  SiRNA target sequence
aattatggattaggagttaaact

SEQ ID NO: 15658 - DNA, 23 bp, Artificial sequence
  SiRNA target sequence
attatggattaggagttaaacta

SEQ ID NO: 15659 - DNA, 23 bp, Artificial sequence
  SiRNA target sequence
ttatggattaggagttaaactac

SEQ ID NO: 15660 - DNA, 23 bp, Artificial sequence
  SiRNA target sequence
tatggattaggagttaaactaca

SEQ ID NO: 15661 - DNA, 23 bp, Artificial sequence
  SiRNA target sequence
atggattaggagttaaactacac

SEQ ID NO: 15662 - DNA, 23 bp, Artificial sequence
  SiRNA target sequence
tggattaggagttaaactacaca

SEQ ID NO: 15663 - DNA, 23 bp, Artificial sequence
  SiRNA target sequence
ggattaggagttaaactacacag

SEQ ID NO: 15664 - DNA, 23 bp, Artificial sequence
  SiRNA target sequence
gattaggagttaaactacacagt

SEQ ID NO: 15665 - DNA, 23 bp, Artificial sequence
  SiRNA target sequence
attaggagttaaactacacagta

SEQ ID NO: 15666 - DNA, 23 bp, Artificial sequence
  SiRNA target sequence
ttaggagttaaactacacagtaa

SEQ ID NO: 15667 - DNA, 23 bp, Artificial sequence
  SiRNA target sequence
taggagttaaactacacagtaaa

SEQ ID NO: 15668 - DNA, 23 bp, Artificial sequence
  SiRNA target sequence
aggagttaaactacacagtaaaa

SEQ ID NO: 15669 - DNA, 23 bp, Artificial sequence
  SiRNA target sequence
ggagttaaactacacagtaaaaa

SEQ ID NO: 15670 - DNA, 23 bp, Artificial sequence
  SiRNA target sequence
gagttaaactacacagtaaaaaa

SEQ ID NO: 15671 - DNA, 23 bp, Artificial sequence
  SiRNA target sequence
agttaaactacacagtaaaaaag

SEQ ID NO: 15672 - DNA, 23 bp, Artificial sequence
  SiRNA target sequence
gttaaactacacagtaaaaaagg

SEQ ID NO: 15673 - DNA, 23 bp, Artificial sequence
  SiRNA target sequence
ttaaactacacagtaaaaaagga

SEQ ID NO: 15674 - DNA, 23 bp, Artificial sequence
  SiRNA target sequence
taaactacacagtaaaaaaggag

SEQ ID NO: 15675 - DNA, 23 bp, Artificial sequence
  SiRNA target sequence
aaactacacagtaaaaaaggaga

SEQ ID NO: 15676 - DNA, 23 bp, Artificial sequence
  SiRNA target sequence
aactacacagtaaaaaaggagaa

SEQ ID NO: 15677 - DNA, 23 bp, Artificial sequence
  SiRNA target sequence
actacacagtaaaaaaggagaaa

SEQ ID NO: 15678 - DNA, 23 bp, Artificial sequence
  SiRNA target sequence
ctacacagtaaaaaaggagaaat

SEQ ID NO: 15679 - DNA, 23 bp, Artificial sequence
  SiRNA target sequence
tacacagtaaaaaaggagaaatt

SEQ ID NO: 15680 - DNA, 23 bp, Artificial sequence
  SiRNA target sequence
acacagtaaaaaaggagaaatta

SEQ ID NO: 15681 - DNA, 23 bp, Artificial sequence
  SiRNA target sequence
cacagtaaaaaaggagaaattat

SEQ ID NO: 15682 - DNA, 23 bp, Artificial sequence
  SiRNA target sequence
acagtaaaaaaggagaaattatc

SEQ ID NO: 15683 - DNA, 23 bp, Artificial sequence
  SiRNA target sequence
cagtaaaaaaggagaaattatcg

SEQ ID NO: 15684 - DNA, 23 bp, Artificial sequence
  SiRNA target sequence
agtaaaaaaggagaaattatcgg

SEQ ID NO: 15685 - DNA, 23 bp, Artificial sequence
  SiRNA target sequence
gtaaaaaaggagaaattatcgga

SEQ ID NO: 15686 - DNA, 23 bp, Artificial sequence
  SiRNA target sequence
taaaaaaggagaaattatcggat

SEQ ID NO: 15687 - DNA, 23 bp, Artificial sequence
  SiRNA target sequence
aaaaaaggagaaattatcggatg

SEQ ID NO: 15688 - DNA, 23 bp, Artificial sequence
  SiRNA target sequence
aaaaaggagaaattatcggatgt

SEQ ID NO: 15689 - DNA, 23 bp, Artificial sequence
  SiRNA target sequence
aaaaggagaaattatcggatgtg

SEQ ID NO: 15690 - DNA, 23 bp, Artificial sequence
  SiRNA target sequence
aaaggagaaattatcggatgtgt

SEQ ID NO: 15691 - DNA, 23 bp, Artificial sequence
  SiRNA target sequence
aaggagaaattatcggatgtgta

SEQ ID NO: 15692 - DNA, 23 bp, Artificial sequence
  SiRNA target sequence
aggagaaattatcggatgtgtag

SEQ ID NO: 15693 - DNA, 23 bp, Artificial sequence
  SiRNA target sequence
ggagaaattatcggatgtgtaga

SEQ ID NO: 15694 - DNA, 23 bp, Artificial sequence
  SiRNA target sequence
gagaaattatcggatgtgtagat

SEQ ID NO: 15695 - DNA, 23 bp, Artificial sequence
  SiRNA target sequence
agaaattatcggatgtgtagata

SEQ ID NO: 15696 - DNA, 23 bp, Artificial sequence
  SiRNA target sequence
gaaattatcggatgtgtagataa

SEQ ID NO: 15697 - DNA, 23 bp, Artificial sequence
  SiRNA target sequence
aaattatcggatgtgtagataac

SEQ ID NO: 15698 - DNA, 23 bp, Artificial sequence
  SiRNA target sequence
aattatcggatgtgtagataaca

SEQ ID NO: 15699 - DNA, 23 bp, Artificial sequence
  SiRNA target sequence
attatcggatgtgtagataacaa

SEQ ID NO: 15700 - DNA, 23 bp, Artificial sequence
  SiRNA target sequence
ttatcggatgtgtagataacaat

SEQ ID NO: 15701 - DNA, 23 bp, Artificial sequence
  SiRNA target sequence
tatcggatgtgtagataacaatc

SEQ ID NO: 15702 - DNA, 23 bp, Artificial sequence
  SiRNA target sequence
atcggatgtgtagataacaatca

SEQ ID NO: 15703 - DNA, 23 bp, Artificial sequence
  SiRNA target sequence
tcggatgtgtagataacaatcat

SEQ ID NO: 15704 - DNA, 23 bp, Artificial sequence
  SiRNA target sequence
cggatgtgtagataacaatcata

SEQ ID NO: 15705 - DNA, 23 bp, Artificial sequence
  SiRNA target sequence
ggatgtgtagataacaatcatat

SEQ ID NO: 15706 - DNA, 23 bp, Artificial sequence
  SiRNA target sequence
gatgtgtagataacaatcatatt

SEQ ID NO: 15707 - DNA, 23 bp, Artificial sequence
  SiRNA target sequence
atgtgtagataacaatcatattt

SEQ ID NO: 15708 - DNA, 23 bp, Artificial sequence
  SiRNA target sequence
tgtgtagataacaatcatatttt

SEQ ID NO: 15709 - DNA, 23 bp, Artificial sequence
  SiRNA target sequence
gtgtagataacaatcatatttta

SEQ ID NO: 15710 - DNA, 23 bp, Artificial sequence
  SiRNA target sequence
tgtagataacaatcatattttaa

SEQ ID NO: 15711 - DNA, 23 bp, Artificial sequence
  SiRNA target sequence
gtagataacaatcatattttaag

SEQ ID NO: 15712 - DNA, 23 bp, Artificial sequence
  SiRNA target sequence
tagataacaatcatattttaagc

SEQ ID NO: 15713 - DNA, 23 bp, Artificial sequence
  SiRNA target sequence
agataacaatcatattttaagca

SEQ ID NO: 15714 - DNA, 23 bp, Artificial sequence
  SiRNA target sequence
gataacaatcatattttaagcat

SEQ ID NO: 15715 - DNA, 23 bp, Artificial sequence
  SiRNA target sequence
ataacaatcatattttaagcata

SEQ ID NO: 15716 - DNA, 23 bp, Artificial sequence
  SiRNA target sequence
taacaatcatattttaagcataa

SEQ ID NO: 15717 - DNA, 23 bp, Artificial sequence
  SiRNA target sequence
aacaatcatattttaagcataat

SEQ ID NO: 15718 - DNA, 23 bp, Artificial sequence
  SiRNA target sequence
acaatcatattttaagcataatt

SEQ ID NO: 15719 - DNA, 23 bp, Artificial sequence
  SiRNA target sequence
caatcatattttaagcataattt

SEQ ID NO: 15720 - DNA, 23 bp, Artificial sequence
  SiRNA target sequence
aatcatattttaagcataattta

SEQ ID NO: 15721 - DNA, 23 bp, Artificial sequence
  SiRNA target sequence
atcatattttaagcataatttat

SEQ ID NO: 15722 - DNA, 23 bp, Artificial sequence
  SiRNA target sequence
tcatattttaagcataatttata

SEQ ID NO: 15723 - DNA, 23 bp, Artificial sequence
  SiRNA target sequence
catattttaagcataatttataa

SEQ ID NO: 15724 - DNA, 23 bp, Artificial sequence
  SiRNA target sequence
atattttaagcataatttataat

SEQ ID NO: 15725 - DNA, 23 bp, Artificial sequence
  SiRNA target sequence
tattttaagcataatttataatg

SEQ ID NO: 15726 - DNA, 23 bp, Artificial sequence
  SiRNA target sequence
attttaagcataatttataatga

SEQ ID NO: 15727 - DNA, 23 bp, Artificial sequence
  SiRNA target sequence
ttttaagcataatttataatgat

SEQ ID NO: 15728 - DNA, 23 bp, Artificial sequence
  SiRNA target sequence
tttaagcataatttataatgata

SEQ ID NO: 15729 - DNA, 23 bp, Artificial sequence
  SiRNA target sequence
ttaagcataatttataatgataa

SEQ ID NO: 15730 - DNA, 23 bp, Artificial sequence
  SiRNA target sequence
taagcataatttataatgataaa

SEQ ID NO: 15731 - DNA, 23 bp, Artificial sequence
  SiRNA target sequence
aagcataatttataatgataaat

SEQ ID NO: 15732 - DNA, 23 bp, Artificial sequence
  SiRNA target sequence
agcataatttataatgataaatt

SEQ ID NO: 15733 - DNA, 23 bp, Artificial sequence
  SiRNA target sequence
gcataatttataatgataaatta

SEQ ID NO: 15734 - DNA, 23 bp, Artificial sequence
  SiRNA target sequence
cataatttataatgataaattat

SEQ ID NO: 15735 - DNA, 23 bp, Artificial sequence
  SiRNA target sequence
ataatttataatgataaattatc

SEQ ID NO: 15736 - DNA, 23 bp, Artificial sequence
  SiRNA target sequence
taatttataatgataaattatct

SEQ ID NO: 15737 - DNA, 23 bp, Artificial sequence
  SiRNA target sequence
aatttataatgataaattatctg

SEQ ID NO: 15738 - DNA, 23 bp, Artificial sequence
  SiRNA target sequence
atttataatgataaattatctga

SEQ ID NO: 15739 - DNA, 23 bp, Artificial sequence
  SiRNA target sequence
tttataatgataaattatctgaa

SEQ ID NO: 15740 - DNA, 23 bp, Artificial sequence
  SiRNA target sequence
ttataatgataaattatctgaag

SEQ ID NO: 15741 - DNA, 23 bp, Artificial sequence
  SiRNA target sequence
tataatgataaattatctgaagg

SEQ ID NO: 15742 - DNA, 23 bp, Artificial sequence
  SiRNA target sequence
ataatgataaattatctgaaggg

SEQ ID NO: 15743 - DNA, 23 bp, Artificial sequence
  SiRNA target sequence
taatgataaattatctgaagggt

SEQ ID NO: 15744 - DNA, 23 bp, Artificial sequence
  SiRNA target sequence
aatgataaattatctgaagggtt

SEQ ID NO: 15745 - DNA, 23 bp, Artificial sequence
  SiRNA target sequence
atgataaattatctgaagggtta

SEQ ID NO: 15746 - DNA, 23 bp, Artificial sequence
  SiRNA target sequence
tgataaattatctgaagggttaa

SEQ ID NO: 15747 - DNA, 23 bp, Artificial sequence
  SiRNA target sequence
gataaattatctgaagggttaac

SEQ ID NO: 15748 - DNA, 23 bp, Artificial sequence
  SiRNA target sequence
ataaattatctgaagggttaaca

SEQ ID NO: 15749 - DNA, 23 bp, Artificial sequence
  SiRNA target sequence
taaattatctgaagggttaacac

SEQ ID NO: 15750 - DNA, 23 bp, Artificial sequence
  SiRNA target sequence
aaattatctgaagggttaacact

SEQ ID NO: 15751 - DNA, 23 bp, Artificial sequence
  SiRNA target sequence
aattatctgaagggttaacactt

SEQ ID NO: 15752 - DNA, 23 bp, Artificial sequence
  SiRNA target sequence
attatctgaagggttaacactta

SEQ ID NO: 15753 - DNA, 23 bp, Artificial sequence
  SiRNA target sequence
ttatctgaagggttaacacttaa

SEQ ID NO: 15754 - DNA, 23 bp, Artificial sequence
  SiRNA target sequence
tatctgaagggttaacacttaat

SEQ ID NO: 15755 - DNA, 23 bp, Artificial sequence
  SiRNA target sequence
atctgaagggttaacacttaatt

SEQ ID NO: 15756 - DNA, 23 bp, Artificial sequence
  SiRNA target sequence
tctgaagggttaacacttaattt

SEQ ID NO: 15757 - DNA, 23 bp, Artificial sequence
  SiRNA target sequence
ctgaagggttaacacttaatttg

SEQ ID NO: 15758 - DNA, 23 bp, Artificial sequence
  SiRNA target sequence
tgaagggttaacacttaatttga

SEQ ID NO: 15759 - DNA, 23 bp, Artificial sequence
  SiRNA target sequence
gaagggttaacacttaatttgag

SEQ ID NO: 15760 - DNA, 23 bp, Artificial sequence
  SiRNA target sequence
aagggttaacacttaatttgagt

SEQ ID NO: 15761 - DNA, 23 bp, Artificial sequence
  SiRNA target sequence
agggttaacacttaatttgagtt

SEQ ID NO: 15762 - DNA, 23 bp, Artificial sequence
  SiRNA target sequence
gggttaacacttaatttgagttg

SEQ ID NO: 15763 - DNA, 23 bp, Artificial sequence
  SiRNA target sequence
ggttaacacttaatttgagttgt

SEQ ID NO: 15764 - DNA, 23 bp, Artificial sequence
  SiRNA target sequence
gttaacacttaatttgagttgta

SEQ ID NO: 15765 - DNA, 23 bp, Artificial sequence
  SiRNA target sequence
ttaacacttaatttgagttgtag

SEQ ID NO: 15766 - DNA, 23 bp, Artificial sequence
  SiRNA target sequence
taacacttaatttgagttgtaga

SEQ ID NO: 15767 - DNA, 23 bp, Artificial sequence
  SiRNA target sequence
aacacttaatttgagttgtagat

SEQ ID NO: 15768 - DNA, 23 bp, Artificial sequence
  SiRNA target sequence
acacttaatttgagttgtagatt

SEQ ID NO: 15769 - DNA, 23 bp, Artificial sequence
  SiRNA target sequence
cacttaatttgagttgtagattt

SEQ ID NO: 15770 - DNA, 23 bp, Artificial sequence
  SiRNA target sequence
acttaatttgagttgtagatttg

SEQ ID NO: 15771 - DNA, 23 bp, Artificial sequence
  SiRNA target sequence
cttaatttgagttgtagatttgg

SEQ ID NO: 15772 - DNA, 23 bp, Artificial sequence
  SiRNA target sequence
ttaatttgagttgtagatttggt

SEQ ID NO: 15773 - DNA, 23 bp, Artificial sequence
  SiRNA target sequence
taatttgagttgtagatttggta

SEQ ID NO: 15774 - DNA, 23 bp, Artificial sequence
  SiRNA target sequence
aatttgagttgtagatttggtaa

SEQ ID NO: 15775 - DNA, 23 bp, Artificial sequence
  SiRNA target sequence
atttgagttgtagatttggtaag

SEQ ID NO: 15776 - DNA, 23 bp, Artificial sequence
  SiRNA target sequence
tttgagttgtagatttggtaaga

SEQ ID NO: 15777 - DNA, 23 bp, Artificial sequence
  SiRNA target sequence
ttgagttgtagatttggtaagaa

SEQ ID NO: 15778 - DNA, 23 bp, Artificial sequence
  SiRNA target sequence
tgagttgtagatttggtaagaaa

SEQ ID NO: 15779 - DNA, 23 bp, Artificial sequence
  SiRNA target sequence
gagttgtagatttggtaagaaag

SEQ ID NO: 15780 - DNA, 23 bp, Artificial sequence
  SiRNA target sequence
agttgtagatttggtaagaaagt

SEQ ID NO: 15781 - DNA, 23 bp, Artificial sequence
  SiRNA target sequence
gttgtagatttggtaagaaagta

SEQ ID NO: 15782 - DNA, 23 bp, Artificial sequence
  SiRNA target sequence
ttgtagatttggtaagaaagtat

SEQ ID NO: 15783 - DNA, 23 bp, Artificial sequence
  SiRNA target sequence
tgtagatttggtaagaaagtatt

SEQ ID NO: 15784 - DNA, 23 bp, Artificial sequence
  SiRNA target sequence
gtagatttggtaagaaagtattt

SEQ ID NO: 15785 - DNA, 23 bp, Artificial sequence
  SiRNA target sequence
tagatttggtaagaaagtatttg

SEQ ID NO: 15786 - DNA, 23 bp, Artificial sequence
  SiRNA target sequence
agatttggtaagaaagtatttga

SEQ ID NO: 15787 - DNA, 23 bp, Artificial sequence
  SiRNA target sequence
gatttggtaagaaagtatttgat

SEQ ID NO: 15788 - DNA, 23 bp, Artificial sequence
  SiRNA target sequence
atttggtaagaaagtatttgatt

SEQ ID NO: 15789 - DNA, 23 bp, Artificial sequence
  SiRNA target sequence
tttggtaagaaagtatttgatta

SEQ ID NO: 15790 - DNA, 23 bp, Artificial sequence
  SiRNA target sequence
ttggtaagaaagtatttgattat

SEQ ID NO: 15791 - DNA, 23 bp, Artificial sequence
  SiRNA target sequence
tggtaagaaagtatttgattatg

SEQ ID NO: 15792 - DNA, 23 bp, Artificial sequence
  SiRNA target sequence
ggtaagaaagtatttgattatgg

SEQ ID NO: 15793 - DNA, 23 bp, Artificial sequence
  SiRNA target sequence
gtaagaaagtatttgattatggc

SEQ ID NO: 15794 - DNA, 23 bp, Artificial sequence
  SiRNA target sequence
taagaaagtatttgattatggct

SEQ ID NO: 15795 - DNA, 23 bp, Artificial sequence
  SiRNA target sequence
aagaaagtatttgattatggcta

SEQ ID NO: 15796 - DNA, 23 bp, Artificial sequence
  SiRNA target sequence
agaaagtatttgattatggctat

SEQ ID NO: 15797 - DNA, 23 bp, Artificial sequence
  SiRNA target sequence
gaaagtatttgattatggctatg

SEQ ID NO: 15798 - DNA, 23 bp, Artificial sequence
  SiRNA target sequence
aaagtatttgattatggctatgg

SEQ ID NO: 15799 - DNA, 23 bp, Artificial sequence
  SiRNA target sequence
aagtatttgattatggctatggg

SEQ ID NO: 15800 - DNA, 23 bp, Artificial sequence
  SiRNA target sequence
agtatttgattatggctatgggt

SEQ ID NO: 15801 - DNA, 23 bp, Artificial sequence
  SiRNA target sequence
gtatttgattatggctatgggtt

SEQ ID NO: 15802 - DNA, 23 bp, Artificial sequence
  SiRNA target sequence
tatttgattatggctatgggttt

SEQ ID NO: 15803 - DNA, 23 bp, Artificial sequence
  SiRNA target sequence
atttgattatggctatgggttta

SEQ ID NO: 15804 - DNA, 23 bp, Artificial sequence
  SiRNA target sequence
tttgattatggctatgggtttat

SEQ ID NO: 15805 - DNA, 23 bp, Artificial sequence
  SiRNA target sequence
ttgattatggctatgggtttatt

SEQ ID NO: 15806 - DNA, 23 bp, Artificial sequence
  SiRNA target sequence
tgattatggctatgggtttattt

SEQ ID NO: 15807 - DNA, 23 bp, Artificial sequence
  SiRNA target sequence
gattatggctatgggtttattta

SEQ ID NO: 15808 - DNA, 23 bp, Artificial sequence
  SiRNA target sequence
attatggctatgggtttatttat

SEQ ID NO: 15809 - DNA, 23 bp, Artificial sequence
  SiRNA target sequence
ttatggctatgggtttatttatg

SEQ ID NO: 15810 - DNA, 23 bp, Artificial sequence
  SiRNA target sequence
tatggctatgggtttatttatga

SEQ ID NO: 15811 - DNA, 23 bp, Artificial sequence
  SiRNA target sequence
atggctatgggtttatttatgaa

SEQ ID NO: 15812 - DNA, 23 bp, Artificial sequence
  SiRNA target sequence
tggctatgggtttatttatgaat

SEQ ID NO: 15813 - DNA, 23 bp, Artificial sequence
  SiRNA target sequence
ggctatgggtttatttatgaatt

SEQ ID NO: 15814 - DNA, 23 bp, Artificial sequence
  SiRNA target sequence
gctatgggtttatttatgaattt

SEQ ID NO: 15815 - DNA, 23 bp, Artificial sequence
  SiRNA target sequence
ctatgggtttatttatgaatttt

SEQ ID NO: 15816 - DNA, 23 bp, Artificial sequence
  SiRNA target sequence
tatgggtttatttatgaatttta

SEQ ID NO: 15817 - DNA, 23 bp, Artificial sequence
  SiRNA target sequence
atgggtttatttatgaattttaa

SEQ ID NO: 15818 - DNA, 24 bp, Artificial sequence
  SiRNA target sequence
atgaaatctttctacaaaaaaata

SEQ ID NO: 15819 - DNA, 24 bp, Artificial sequence
  SiRNA target sequence
tgaaatctttctacaaaaaaataa

SEQ ID NO: 15820 - DNA, 24 bp, Artificial sequence
  SiRNA target sequence
gaaatctttctacaaaaaaataaa

SEQ ID NO: 15821 - DNA, 24 bp, Artificial sequence
  SiRNA target sequence
aaatctttctacaaaaaaataaaa

SEQ ID NO: 15822 - DNA, 24 bp, Artificial sequence
  SiRNA target sequence
aatctttctacaaaaaaataaaaa

SEQ ID NO: 15823 - DNA, 24 bp, Artificial sequence
  SiRNA target sequence
atctttctacaaaaaaataaaaag

SEQ ID NO: 15824 - DNA, 24 bp, Artificial sequence
  SiRNA target sequence
tctttctacaaaaaaataaaaagt

SEQ ID NO: 15825 - DNA, 24 bp, Artificial sequence
  SiRNA target sequence
ctttctacaaaaaaataaaaagtt

SEQ ID NO: 15826 - DNA, 24 bp, Artificial sequence
  SiRNA target sequence
tttctacaaaaaaataaaaagtta

SEQ ID NO: 15827 - DNA, 24 bp, Artificial sequence
  SiRNA target sequence
ttctacaaaaaaataaaaagttat

SEQ ID NO: 15828 - DNA, 24 bp, Artificial sequence
  SiRNA target sequence
tctacaaaaaaataaaaagttatt

SEQ ID NO: 15829 - DNA, 24 bp, Artificial sequence
  SiRNA target sequence
ctacaaaaaaataaaaagttattt

SEQ ID NO: 15830 - DNA, 24 bp, Artificial sequence
  SiRNA target sequence
tacaaaaaaataaaaagttattta

SEQ ID NO: 15831 - DNA, 24 bp, Artificial sequence
  SiRNA target sequence
acaaaaaaataaaaagttatttat

SEQ ID NO: 15832 - DNA, 24 bp, Artificial sequence
  SiRNA target sequence
caaaaaaataaaaagttatttatt

SEQ ID NO: 15833 - DNA, 24 bp, Artificial sequence
  SiRNA target sequence
aaaaaaataaaaagttatttattc

SEQ ID NO: 15834 - DNA, 24 bp, Artificial sequence
  SiRNA target sequence
aaaaaataaaaagttatttattca

SEQ ID NO: 15835 - DNA, 24 bp, Artificial sequence
  SiRNA target sequence
aaaaataaaaagttatttattcaa

SEQ ID NO: 15836 - DNA, 24 bp, Artificial sequence
  SiRNA target sequence
aaaataaaaagttatttattcaaa

SEQ ID NO: 15837 - DNA, 24 bp, Artificial sequence
  SiRNA target sequence
aaataaaaagttatttattcaaat

SEQ ID NO: 15838 - DNA, 24 bp, Artificial sequence
  SiRNA target sequence
aataaaaagttatttattcaaatc

SEQ ID NO: 15839 - DNA, 24 bp, Artificial sequence
  SiRNA target sequence
ataaaaagttatttattcaaatct

SEQ ID NO: 15840 - DNA, 24 bp, Artificial sequence
  SiRNA target sequence
taaaaagttatttattcaaatctg

SEQ ID NO: 15841 - DNA, 24 bp, Artificial sequence
  SiRNA target sequence
aaaaagttatttattcaaatctgc

SEQ ID NO: 15842 - DNA, 24 bp, Artificial sequence
  SiRNA target sequence
aaaagttatttattcaaatctgcc

SEQ ID NO: 15843 - DNA, 24 bp, Artificial sequence
  SiRNA target sequence
aaagttatttattcaaatctgcca

SEQ ID NO: 15844 - DNA, 24 bp, Artificial sequence
  SiRNA target sequence
aagttatttattcaaatctgccat

SEQ ID NO: 15845 - DNA, 24 bp, Artificial sequence
  SiRNA target sequence
agttatttattcaaatctgccatt

SEQ ID NO: 15846 - DNA, 24 bp, Artificial sequence
  SiRNA target sequence
gttatttattcaaatctgccatta

SEQ ID NO: 15847 - DNA, 24 bp, Artificial sequence
  SiRNA target sequence
ttatttattcaaatctgccattaa

SEQ ID NO: 15848 - DNA, 24 bp, Artificial sequence
  SiRNA target sequence
tatttattcaaatctgccattaat

SEQ ID NO: 15849 - DNA, 24 bp, Artificial sequence
  SiRNA target sequence
atttattcaaatctgccattaata

SEQ ID NO: 15850 - DNA, 24 bp, Artificial sequence
  SiRNA target sequence
tttattcaaatctgccattaatac

SEQ ID NO: 15851 - DNA, 24 bp, Artificial sequence
  SiRNA target sequence
ttattcaaatctgccattaataca

SEQ ID NO: 15852 - DNA, 24 bp, Artificial sequence
  SiRNA target sequence
tattcaaatctgccattaatacat

SEQ ID NO: 15853 - DNA, 24 bp, Artificial sequence
  SiRNA target sequence
attcaaatctgccattaatacatc

SEQ ID NO: 15854 - DNA, 24 bp, Artificial sequence
  SiRNA target sequence
ttcaaatctgccattaatacatct

SEQ ID NO: 15855 - DNA, 24 bp, Artificial sequence
  SiRNA target sequence
tcaaatctgccattaatacatctt

SEQ ID NO: 15856 - DNA, 24 bp, Artificial sequence
  SiRNA target sequence
caaatctgccattaatacatcttt

SEQ ID NO: 15857 - DNA, 24 bp, Artificial sequence
  SiRNA target sequence
aaatctgccattaatacatctttt

SEQ ID NO: 15858 - DNA, 24 bp, Artificial sequence
  SiRNA target sequence
aatctgccattaatacatcttttg

SEQ ID NO: 15859 - DNA, 24 bp, Artificial sequence
  SiRNA target sequence
atctgccattaatacatcttttga

SEQ ID NO: 15860 - DNA, 24 bp, Artificial sequence
  SiRNA target sequence
tctgccattaatacatcttttgat

SEQ ID NO: 15861 - DNA, 24 bp, Artificial sequence
  SiRNA target sequence
ctgccattaatacatcttttgata

SEQ ID NO: 15862 - DNA, 24 bp, Artificial sequence
  SiRNA target sequence
tgccattaatacatcttttgatac

SEQ ID NO: 15863 - DNA, 24 bp, Artificial sequence
  SiRNA target sequence
gccattaatacatcttttgatact

SEQ ID NO: 15864 - DNA, 24 bp, Artificial sequence
  SiRNA target sequence
ccattaatacatcttttgatactt

SEQ ID NO: 15865 - DNA, 24 bp, Artificial sequence
  SiRNA target sequence
cattaatacatcttttgatacttt

SEQ ID NO: 15866 - DNA, 24 bp, Artificial sequence
  SiRNA target sequence
attaatacatcttttgatactttt

SEQ ID NO: 15867 - DNA, 24 bp, Artificial sequence
  SiRNA target sequence
ttaatacatcttttgatactttta

SEQ ID NO: 15868 - DNA, 24 bp, Artificial sequence
  SiRNA target sequence
taatacatcttttgatacttttaa

SEQ ID NO: 15869 - DNA, 24 bp, Artificial sequence
  SiRNA target sequence
aatacatcttttgatacttttaat

SEQ ID NO: 15870 - DNA, 24 bp, Artificial sequence
  SiRNA target sequence
atacatcttttgatacttttaatt

SEQ ID NO: 15871 - DNA, 24 bp, Artificial sequence
  SiRNA target sequence
tacatcttttgatacttttaattt

SEQ ID NO: 15872 - DNA, 24 bp, Artificial sequence
  SiRNA target sequence
acatcttttgatacttttaattta

SEQ ID NO: 15873 - DNA, 24 bp, Artificial sequence
  SiRNA target sequence
catcttttgatacttttaatttag

SEQ ID NO: 15874 - DNA, 24 bp, Artificial sequence
  SiRNA target sequence
atcttttgatacttttaatttaga

SEQ ID NO: 15875 - DNA, 24 bp, Artificial sequence
  SiRNA target sequence
tcttttgatacttttaatttagaa

SEQ ID NO: 15876 - DNA, 24 bp, Artificial sequence
  SiRNA target sequence
cttttgatacttttaatttagaaa

SEQ ID NO: 15877 - DNA, 24 bp, Artificial sequence
  SiRNA target sequence
ttttgatacttttaatttagaaaa

SEQ ID NO: 15878 - DNA, 24 bp, Artificial sequence
  SiRNA target sequence
tttgatacttttaatttagaaaat

SEQ ID NO: 15879 - DNA, 24 bp, Artificial sequence
  SiRNA target sequence
ttgatacttttaatttagaaaatg

SEQ ID NO: 15880 - DNA, 24 bp, Artificial sequence
  SiRNA target sequence
tgatacttttaatttagaaaatgt

SEQ ID NO: 15881 - DNA, 24 bp, Artificial sequence
  SiRNA target sequence
gatacttttaatttagaaaatgta

SEQ ID NO: 15882 - DNA, 24 bp, Artificial sequence
  SiRNA target sequence
atacttttaatttagaaaatgtaa

SEQ ID NO: 15883 - DNA, 24 bp, Artificial sequence
  SiRNA target sequence
tacttttaatttagaaaatgtaag

SEQ ID NO: 15884 - DNA, 24 bp, Artificial sequence
  SiRNA target sequence
acttttaatttagaaaatgtaagc

SEQ ID NO: 15885 - DNA, 24 bp, Artificial sequence
  SiRNA target sequence
cttttaatttagaaaatgtaagca

SEQ ID NO: 15886 - DNA, 24 bp, Artificial sequence
  SiRNA target sequence
ttttaatttagaaaatgtaagcat

SEQ ID NO: 15887 - DNA, 24 bp, Artificial sequence
  SiRNA target sequence
tttaatttagaaaatgtaagcatt

SEQ ID NO: 15888 - DNA, 24 bp, Artificial sequence
  SiRNA target sequence
ttaatttagaaaatgtaagcatta

SEQ ID NO: 15889 - DNA, 24 bp, Artificial sequence
  SiRNA target sequence
taatttagaaaatgtaagcattac

SEQ ID NO: 15890 - DNA, 24 bp, Artificial sequence
  SiRNA target sequence
aatttagaaaatgtaagcattact

SEQ ID NO: 15891 - DNA, 24 bp, Artificial sequence
  SiRNA target sequence
atttagaaaatgtaagcattacta

SEQ ID NO: 15892 - DNA, 24 bp, Artificial sequence
  SiRNA target sequence
tttagaaaatgtaagcattactag

SEQ ID NO: 15893 - DNA, 24 bp, Artificial sequence
  SiRNA target sequence
ttagaaaatgtaagcattactagc

SEQ ID NO: 15894 - DNA, 24 bp, Artificial sequence
  SiRNA target sequence
tagaaaatgtaagcattactagct

SEQ ID NO: 15895 - DNA, 24 bp, Artificial sequence
  SiRNA target sequence
agaaaatgtaagcattactagctt

SEQ ID NO: 15896 - DNA, 24 bp, Artificial sequence
  SiRNA target sequence
gaaaatgtaagcattactagctta

SEQ ID NO: 15897 - DNA, 24 bp, Artificial sequence
  SiRNA target sequence
aaaatgtaagcattactagcttaa

SEQ ID NO: 15898 - DNA, 24 bp, Artificial sequence
  SiRNA target sequence
aaatgtaagcattactagcttaaa

SEQ ID NO: 15899 - DNA, 24 bp, Artificial sequence
  SiRNA target sequence
aatgtaagcattactagcttaaat

SEQ ID NO: 15900 - DNA, 24 bp, Artificial sequence
  SiRNA target sequence
atgtaagcattactagcttaaata

SEQ ID NO: 15901 - DNA, 24 bp, Artificial sequence
  SiRNA target sequence
tgtaagcattactagcttaaatac

SEQ ID NO: 15902 - DNA, 24 bp, Artificial sequence
  SiRNA target sequence
gtaagcattactagcttaaatacg

SEQ ID NO: 15903 - DNA, 24 bp, Artificial sequence
  SiRNA target sequence
taagcattactagcttaaatacgt

SEQ ID NO: 15904 - DNA, 24 bp, Artificial sequence
  SiRNA target sequence
aagcattactagcttaaatacgta

SEQ ID NO: 15905 - DNA, 24 bp, Artificial sequence
  SiRNA target sequence
agcattactagcttaaatacgtac

SEQ ID NO: 15906 - DNA, 24 bp, Artificial sequence
  SiRNA target sequence
gcattactagcttaaatacgtaca

SEQ ID NO: 15907 - DNA, 24 bp, Artificial sequence
  SiRNA target sequence
cattactagcttaaatacgtacac

SEQ ID NO: 15908 - DNA, 24 bp, Artificial sequence
  SiRNA target sequence
attactagcttaaatacgtacacc

SEQ ID NO: 15909 - DNA, 24 bp, Artificial sequence
  SiRNA target sequence
ttactagcttaaatacgtacaccg

SEQ ID NO: 15910 - DNA, 24 bp, Artificial sequence
  SiRNA target sequence
tactagcttaaatacgtacaccgg

SEQ ID NO: 15911 - DNA, 24 bp, Artificial sequence
  SiRNA target sequence
actagcttaaatacgtacaccggt

SEQ ID NO: 15912 - DNA, 24 bp, Artificial sequence
  SiRNA target sequence
ctagcttaaatacgtacaccggtg

SEQ ID NO: 15913 - DNA, 24 bp, Artificial sequence
  SiRNA target sequence
tagcttaaatacgtacaccggtgt

SEQ ID NO: 15914 - DNA, 24 bp, Artificial sequence
  SiRNA target sequence
agcttaaatacgtacaccggtgtt

SEQ ID NO: 15915 - DNA, 24 bp, Artificial sequence
  SiRNA target sequence
gcttaaatacgtacaccggtgtta

SEQ ID NO: 15916 - DNA, 24 bp, Artificial sequence
  SiRNA target sequence
cttaaatacgtacaccggtgttaa

SEQ ID NO: 15917 - DNA, 24 bp, Artificial sequence
  SiRNA target sequence
ttaaatacgtacaccggtgttaaa

SEQ ID NO: 15918 - DNA, 24 bp, Artificial sequence
  SiRNA target sequence
taaatacgtacaccggtgttaaaa

SEQ ID NO: 15919 - DNA, 24 bp, Artificial sequence
  SiRNA target sequence
aaatacgtacaccggtgttaaaac

SEQ ID NO: 15920 - DNA, 24 bp, Artificial sequence
  SiRNA target sequence
aatacgtacaccggtgttaaaacc

SEQ ID NO: 15921 - DNA, 24 bp, Artificial sequence
  SiRNA target sequence
atacgtacaccggtgttaaaaccg

SEQ ID NO: 15922 - DNA, 24 bp, Artificial sequence
  SiRNA target sequence
tacgtacaccggtgttaaaaccga

SEQ ID NO: 15923 - DNA, 24 bp, Artificial sequence
  SiRNA target sequence
acgtacaccggtgttaaaaccgaa

SEQ ID NO: 15924 - DNA, 24 bp, Artificial sequence
  SiRNA target sequence
cgtacaccggtgttaaaaccgaaa

SEQ ID NO: 15925 - DNA, 24 bp, Artificial sequence
  SiRNA target sequence
gtacaccggtgttaaaaccgaaat

SEQ ID NO: 15926 - DNA, 24 bp, Artificial sequence
  SiRNA target sequence
tacaccggtgttaaaaccgaaata

SEQ ID NO: 15927 - DNA, 24 bp, Artificial sequence
  SiRNA target sequence
acaccggtgttaaaaccgaaatat

SEQ ID NO: 15928 - DNA, 24 bp, Artificial sequence
  SiRNA target sequence
caccggtgttaaaaccgaaatatc

SEQ ID NO: 15929 - DNA, 24 bp, Artificial sequence
  SiRNA target sequence
accggtgttaaaaccgaaatatca

SEQ ID NO: 15930 - DNA, 24 bp, Artificial sequence
  SiRNA target sequence
ccggtgttaaaaccgaaatatcaa

SEQ ID NO: 15931 - DNA, 24 bp, Artificial sequence
  SiRNA target sequence
cggtgttaaaaccgaaatatcaaa

SEQ ID NO: 15932 - DNA, 24 bp, Artificial sequence
  SiRNA target sequence
ggtgttaaaaccgaaatatcaaaa

SEQ ID NO: 15933 - DNA, 24 bp, Artificial sequence
  SiRNA target sequence
gtgttaaaaccgaaatatcaaaaa

SEQ ID NO: 15934 - DNA, 24 bp, Artificial sequence
  SiRNA target sequence
tgttaaaaccgaaatatcaaaaac

SEQ ID NO: 15935 - DNA, 24 bp, Artificial sequence
  SiRNA target sequence
gttaaaaccgaaatatcaaaaacc

SEQ ID NO: 15936 - DNA, 24 bp, Artificial sequence
  SiRNA target sequence
ttaaaaccgaaatatcaaaaaccg

SEQ ID NO: 15937 - DNA, 24 bp, Artificial sequence
  SiRNA target sequence
taaaaccgaaatatcaaaaaccgt

SEQ ID NO: 15938 - DNA, 24 bp, Artificial sequence
  SiRNA target sequence
aaaaccgaaatatcaaaaaccgta

SEQ ID NO: 15939 - DNA, 24 bp, Artificial sequence
  SiRNA target sequence
aaaccgaaatatcaaaaaccgtat

SEQ ID NO: 15940 - DNA, 24 bp, Artificial sequence
  SiRNA target sequence
aaccgaaatatcaaaaaccgtatc

SEQ ID NO: 15941 - DNA, 24 bp, Artificial sequence
  SiRNA target sequence
accgaaatatcaaaaaccgtatca

SEQ ID NO: 15942 - DNA, 24 bp, Artificial sequence
  SiRNA target sequence
ccgaaatatcaaaaaccgtatcac

SEQ ID NO: 15943 - DNA, 24 bp, Artificial sequence
  SiRNA target sequence
cgaaatatcaaaaaccgtatcacc

SEQ ID NO: 15944 - DNA, 24 bp, Artificial sequence
  SiRNA target sequence
gaaatatcaaaaaccgtatcacca

SEQ ID NO: 15945 - DNA, 24 bp, Artificial sequence
  SiRNA target sequence
aaatatcaaaaaccgtatcaccac

SEQ ID NO: 15946 - DNA, 24 bp, Artificial sequence
  SiRNA target sequence
aatatcaaaaaccgtatcaccaca

SEQ ID NO: 15947 - DNA, 24 bp, Artificial sequence
  SiRNA target sequence
atatcaaaaaccgtatcaccacac

SEQ ID NO: 15948 - DNA, 24 bp, Artificial sequence
  SiRNA target sequence
tatcaaaaaccgtatcaccacact

SEQ ID NO: 15949 - DNA, 24 bp, Artificial sequence
  SiRNA target sequence
atcaaaaaccgtatcaccacactt

SEQ ID NO: 15950 - DNA, 24 bp, Artificial sequence
  SiRNA target sequence
tcaaaaaccgtatcaccacacttc

SEQ ID NO: 15951 - DNA, 24 bp, Artificial sequence
  SiRNA target sequence
caaaaaccgtatcaccacacttcc

SEQ ID NO: 15952 - DNA, 24 bp, Artificial sequence
  SiRNA target sequence
aaaaaccgtatcaccacacttcca

SEQ ID NO: 15953 - DNA, 24 bp, Artificial sequence
  SiRNA target sequence
aaaaccgtatcaccacacttccag

SEQ ID NO: 15954 - DNA, 24 bp, Artificial sequence
  SiRNA target sequence
aaaccgtatcaccacacttccaga

SEQ ID NO: 15955 - DNA, 24 bp, Artificial sequence
  SiRNA target sequence
aaccgtatcaccacacttccagat

SEQ ID NO: 15956 - DNA, 24 bp, Artificial sequence
  SiRNA target sequence
accgtatcaccacacttccagatt

SEQ ID NO: 15957 - DNA, 24 bp, Artificial sequence
  SiRNA target sequence
ccgtatcaccacacttccagattt

SEQ ID NO: 15958 - DNA, 24 bp, Artificial sequence
  SiRNA target sequence
cgtatcaccacacttccagatttc

SEQ ID NO: 15959 - DNA, 24 bp, Artificial sequence
  SiRNA target sequence
gtatcaccacacttccagatttct

SEQ ID NO: 15960 - DNA, 24 bp, Artificial sequence
  SiRNA target sequence
tatcaccacacttccagatttctc

SEQ ID NO: 15961 - DNA, 24 bp, Artificial sequence
  SiRNA target sequence
atcaccacacttccagatttctca

SEQ ID NO: 15962 - DNA, 24 bp, Artificial sequence
  SiRNA target sequence
tcaccacacttccagatttctcat

SEQ ID NO: 15963 - DNA, 24 bp, Artificial sequence
  SiRNA target sequence
caccacacttccagatttctcatg

SEQ ID NO: 15964 - DNA, 24 bp, Artificial sequence
  SiRNA target sequence
accacacttccagatttctcatgt

SEQ ID NO: 15965 - DNA, 24 bp, Artificial sequence
  SiRNA target sequence
ccacacttccagatttctcatgtc

SEQ ID NO: 15966 - DNA, 24 bp, Artificial sequence
  SiRNA target sequence
cacacttccagatttctcatgtct

SEQ ID NO: 15967 - DNA, 24 bp, Artificial sequence
  SiRNA target sequence
acacttccagatttctcatgtctc

SEQ ID NO: 15968 - DNA, 24 bp, Artificial sequence
  SiRNA target sequence
cacttccagatttctcatgtctct

SEQ ID NO: 15969 - DNA, 24 bp, Artificial sequence
  SiRNA target sequence
acttccagatttctcatgtctctt

SEQ ID NO: 15970 - DNA, 24 bp, Artificial sequence
  SiRNA target sequence
cttccagatttctcatgtctcttc

SEQ ID NO: 15971 - DNA, 24 bp, Artificial sequence
  SiRNA target sequence
ttccagatttctcatgtctcttct

SEQ ID NO: 15972 - DNA, 24 bp, Artificial sequence
  SiRNA target sequence
tccagatttctcatgtctcttcta

SEQ ID NO: 15973 - DNA, 24 bp, Artificial sequence
  SiRNA target sequence
ccagatttctcatgtctcttctat

SEQ ID NO: 15974 - DNA, 24 bp, Artificial sequence
  SiRNA target sequence
cagatttctcatgtctcttctatg

SEQ ID NO: 15975 - DNA, 24 bp, Artificial sequence
  SiRNA target sequence
agatttctcatgtctcttctatgg

SEQ ID NO: 15976 - DNA, 24 bp, Artificial sequence
  SiRNA target sequence
gatttctcatgtctcttctatggg

SEQ ID NO: 15977 - DNA, 24 bp, Artificial sequence
  SiRNA target sequence
atttctcatgtctcttctatgggc

SEQ ID NO: 15978 - DNA, 24 bp, Artificial sequence
  SiRNA target sequence
tttctcatgtctcttctatgggcg

SEQ ID NO: 15979 - DNA, 24 bp, Artificial sequence
  SiRNA target sequence
ttctcatgtctcttctatgggcgc

SEQ ID NO: 15980 - DNA, 24 bp, Artificial sequence
  SiRNA target sequence
tctcatgtctcttctatgggcgca

SEQ ID NO: 15981 - DNA, 24 bp, Artificial sequence
  SiRNA target sequence
ctcatgtctcttctatgggcgcag

SEQ ID NO: 15982 - DNA, 24 bp, Artificial sequence
  SiRNA target sequence
tcatgtctcttctatgggcgcaga

SEQ ID NO: 15983 - DNA, 24 bp, Artificial sequence
  SiRNA target sequence
catgtctcttctatgggcgcagat

SEQ ID NO: 15984 - DNA, 24 bp, Artificial sequence
  SiRNA target sequence
atgtctcttctatgggcgcagatt

SEQ ID NO: 15985 - DNA, 24 bp, Artificial sequence
  SiRNA target sequence
tgtctcttctatgggcgcagattt

SEQ ID NO: 15986 - DNA, 24 bp, Artificial sequence
  SiRNA target sequence
gtctcttctatgggcgcagatttc

SEQ ID NO: 15987 - DNA, 24 bp, Artificial sequence
  SiRNA target sequence
tctcttctatgggcgcagatttcg

SEQ ID NO: 15988 - DNA, 24 bp, Artificial sequence
  SiRNA target sequence
ctcttctatgggcgcagatttcga

SEQ ID NO: 15989 - DNA, 24 bp, Artificial sequence
  SiRNA target sequence
tcttctatgggcgcagatttcgac

SEQ ID NO: 15990 - DNA, 24 bp, Artificial sequence
  SiRNA target sequence
cttctatgggcgcagatttcgaca

SEQ ID NO: 15991 - DNA, 24 bp, Artificial sequence
  SiRNA target sequence
ttctatgggcgcagatttcgacat

SEQ ID NO: 15992 - DNA, 24 bp, Artificial sequence
  SiRNA target sequence
tctatgggcgcagatttcgacata

SEQ ID NO: 15993 - DNA, 24 bp, Artificial sequence
  SiRNA target sequence
ctatgggcgcagatttcgacataa

SEQ ID NO: 15994 - DNA, 24 bp, Artificial sequence
  SiRNA target sequence
tatgggcgcagatttcgacataaa

SEQ ID NO: 15995 - DNA, 24 bp, Artificial sequence
  SiRNA target sequence
atgggcgcagatttcgacataaaa

SEQ ID NO: 15996 - DNA, 24 bp, Artificial sequence
  SiRNA target sequence
tgggcgcagatttcgacataaaac

SEQ ID NO: 15997 - DNA, 24 bp, Artificial sequence
  SiRNA target sequence
gggcgcagatttcgacataaaaca

SEQ ID NO: 15998 - DNA, 24 bp, Artificial sequence
  SiRNA target sequence
ggcgcagatttcgacataaaacag

SEQ ID NO: 15999 - DNA, 24 bp, Artificial sequence
  SiRNA target sequence
gcgcagatttcgacataaaacaga

SEQ ID NO: 16000 - DNA, 24 bp, Artificial sequence
  SiRNA target sequence
cgcagatttcgacataaaacagac

SEQ ID NO: 16001 - DNA, 24 bp, Artificial sequence
  SiRNA target sequence
gcagatttcgacataaaacagaca

SEQ ID NO: 16002 - DNA, 24 bp, Artificial sequence
  SiRNA target sequence
cagatttcgacataaaacagacat

SEQ ID NO: 16003 - DNA, 24 bp, Artificial sequence
  SiRNA target sequence
agatttcgacataaaacagacata

SEQ ID NO: 16004 - DNA, 24 bp, Artificial sequence
  SiRNA target sequence
gatttcgacataaaacagacatac

SEQ ID NO: 16005 - DNA, 24 bp, Artificial sequence
  SiRNA target sequence
atttcgacataaaacagacatacg

SEQ ID NO: 16006 - DNA, 24 bp, Artificial sequence
  SiRNA target sequence
tttcgacataaaacagacatacgc

SEQ ID NO: 16007 - DNA, 24 bp, Artificial sequence
  SiRNA target sequence
ttcgacataaaacagacatacgcc

SEQ ID NO: 16008 - DNA, 24 bp, Artificial sequence
  SiRNA target sequence
tcgacataaaacagacatacgcca

SEQ ID NO: 16009 - DNA, 24 bp, Artificial sequence
  SiRNA target sequence
cgacataaaacagacatacgccac

SEQ ID NO: 16010 - DNA, 24 bp, Artificial sequence
  SiRNA target sequence
gacataaaacagacatacgccacg

SEQ ID NO: 16011 - DNA, 24 bp, Artificial sequence
  SiRNA target sequence
acataaaacagacatacgccacgt

SEQ ID NO: 16012 - DNA, 24 bp, Artificial sequence
  SiRNA target sequence
cataaaacagacatacgccacgtt

SEQ ID NO: 16013 - DNA, 24 bp, Artificial sequence
  SiRNA target sequence
ataaaacagacatacgccacgttc

SEQ ID NO: 16014 - DNA, 24 bp, Artificial sequence
  SiRNA target sequence
taaaacagacatacgccacgttct

SEQ ID NO: 16015 - DNA, 24 bp, Artificial sequence
  SiRNA target sequence
aaaacagacatacgccacgttctg

SEQ ID NO: 16016 - DNA, 24 bp, Artificial sequence
  SiRNA target sequence
aaacagacatacgccacgttctgc

SEQ ID NO: 16017 - DNA, 24 bp, Artificial sequence
  SiRNA target sequence
aacagacatacgccacgttctgct

SEQ ID NO: 16018 - DNA, 24 bp, Artificial sequence
  SiRNA target sequence
acagacatacgccacgttctgctt

SEQ ID NO: 16019 - DNA, 24 bp, Artificial sequence
  SiRNA target sequence
cagacatacgccacgttctgcttt

SEQ ID NO: 16020 - DNA, 24 bp, Artificial sequence
  SiRNA target sequence
agacatacgccacgttctgcttta

SEQ ID NO: 16021 - DNA, 24 bp, Artificial sequence
  SiRNA target sequence
gacatacgccacgttctgctttaa

SEQ ID NO: 16022 - DNA, 24 bp, Artificial sequence
  SiRNA target sequence
acatacgccacgttctgctttaac

SEQ ID NO: 16023 - DNA, 24 bp, Artificial sequence
  SiRNA target sequence
catacgccacgttctgctttaaca

SEQ ID NO: 16024 - DNA, 24 bp, Artificial sequence
  SiRNA target sequence
atacgccacgttctgctttaacaa

SEQ ID NO: 16025 - DNA, 24 bp, Artificial sequence
  SiRNA target sequence
tacgccacgttctgctttaacaat

SEQ ID NO: 16026 - DNA, 24 bp, Artificial sequence
  SiRNA target sequence
acgccacgttctgctttaacaatc

SEQ ID NO: 16027 - DNA, 24 bp, Artificial sequence
  SiRNA target sequence
cgccacgttctgctttaacaatct

SEQ ID NO: 16028 - DNA, 24 bp, Artificial sequence
  SiRNA target sequence
gccacgttctgctttaacaatctt

SEQ ID NO: 16029 - DNA, 24 bp, Artificial sequence
  SiRNA target sequence
ccacgttctgctttaacaatcttt

SEQ ID NO: 16030 - DNA, 24 bp, Artificial sequence
  SiRNA target sequence
cacgttctgctttaacaatctttt

SEQ ID NO: 16031 - DNA, 24 bp, Artificial sequence
  SiRNA target sequence
acgttctgctttaacaatcttttg

SEQ ID NO: 16032 - DNA, 24 bp, Artificial sequence
  SiRNA target sequence
cgttctgctttaacaatcttttgc

SEQ ID NO: 16033 - DNA, 24 bp, Artificial sequence
  SiRNA target sequence
gttctgctttaacaatcttttgct

SEQ ID NO: 16034 - DNA, 24 bp, Artificial sequence
  SiRNA target sequence
ttctgctttaacaatcttttgcta

SEQ ID NO: 16035 - DNA, 24 bp, Artificial sequence
  SiRNA target sequence
tctgctttaacaatcttttgctac

SEQ ID NO: 16036 - DNA, 24 bp, Artificial sequence
  SiRNA target sequence
ctgctttaacaatcttttgctaca

SEQ ID NO: 16037 - DNA, 24 bp, Artificial sequence
  SiRNA target sequence
tgctttaacaatcttttgctacaa

SEQ ID NO: 16038 - DNA, 24 bp, Artificial sequence
  SiRNA target sequence
gctttaacaatcttttgctacaaa

SEQ ID NO: 16039 - DNA, 24 bp, Artificial sequence
  SiRNA target sequence
ctttaacaatcttttgctacaaac

SEQ ID NO: 16040 - DNA, 24 bp, Artificial sequence
  SiRNA target sequence
tttaacaatcttttgctacaaacg

SEQ ID NO: 16041 - DNA, 24 bp, Artificial sequence
  SiRNA target sequence
ttaacaatcttttgctacaaacga

SEQ ID NO: 16042 - DNA, 24 bp, Artificial sequence
  SiRNA target sequence
taacaatcttttgctacaaacgag

SEQ ID NO: 16043 - DNA, 24 bp, Artificial sequence
  SiRNA target sequence
aacaatcttttgctacaaacgagc

SEQ ID NO: 16044 - DNA, 24 bp, Artificial sequence
  SiRNA target sequence
acaatcttttgctacaaacgagca

SEQ ID NO: 16045 - DNA, 24 bp, Artificial sequence
  SiRNA target sequence
caatcttttgctacaaacgagcat

SEQ ID NO: 16046 - DNA, 24 bp, Artificial sequence
  SiRNA target sequence
aatcttttgctacaaacgagcata

SEQ ID NO: 16047 - DNA, 24 bp, Artificial sequence
  SiRNA target sequence
atcttttgctacaaacgagcatag

SEQ ID NO: 16048 - DNA, 24 bp, Artificial sequence
  SiRNA target sequence
tcttttgctacaaacgagcataga

SEQ ID NO: 16049 - DNA, 24 bp, Artificial sequence
  SiRNA target sequence
cttttgctacaaacgagcatagac

SEQ ID NO: 16050 - DNA, 24 bp, Artificial sequence
  SiRNA target sequence
ttttgctacaaacgagcatagacc

SEQ ID NO: 16051 - DNA, 24 bp, Artificial sequence
  SiRNA target sequence
tttgctacaaacgagcatagacca

SEQ ID NO: 16052 - DNA, 24 bp, Artificial sequence
  SiRNA target sequence
ttgctacaaacgagcatagaccaa

SEQ ID NO: 16053 - DNA, 24 bp, Artificial sequence
  SiRNA target sequence
tgctacaaacgagcatagaccaag

SEQ ID NO: 16054 - DNA, 24 bp, Artificial sequence
  SiRNA target sequence
gctacaaacgagcatagaccaaga

SEQ ID NO: 16055 - DNA, 24 bp, Artificial sequence
  SiRNA target sequence
ctacaaacgagcatagaccaagac

SEQ ID NO: 16056 - DNA, 24 bp, Artificial sequence
  SiRNA target sequence
tacaaacgagcatagaccaagaca

SEQ ID NO: 16057 - DNA, 24 bp, Artificial sequence
  SiRNA target sequence
acaaacgagcatagaccaagacaa

SEQ ID NO: 16058 - DNA, 24 bp, Artificial sequence
  SiRNA target sequence
caaacgagcatagaccaagacaaa

SEQ ID NO: 16059 - DNA, 24 bp, Artificial sequence
  SiRNA target sequence
aaacgagcatagaccaagacaaaa

SEQ ID NO: 16060 - DNA, 24 bp, Artificial sequence
  SiRNA target sequence
aacgagcatagaccaagacaaaat

SEQ ID NO: 16061 - DNA, 24 bp, Artificial sequence
  SiRNA target sequence
acgagcatagaccaagacaaaata

SEQ ID NO: 16062 - DNA, 24 bp, Artificial sequence
  SiRNA target sequence
cgagcatagaccaagacaaaatat

SEQ ID NO: 16063 - DNA, 24 bp, Artificial sequence
  SiRNA target sequence
gagcatagaccaagacaaaatatt

SEQ ID NO: 16064 - DNA, 24 bp, Artificial sequence
  SiRNA target sequence
agcatagaccaagacaaaatattt

SEQ ID NO: 16065 - DNA, 24 bp, Artificial sequence
  SiRNA target sequence
gcatagaccaagacaaaatattta

SEQ ID NO: 16066 - DNA, 24 bp, Artificial sequence
  SiRNA target sequence
catagaccaagacaaaatatttag

SEQ ID NO: 16067 - DNA, 24 bp, Artificial sequence
  SiRNA target sequence
atagaccaagacaaaatatttaga

SEQ ID NO: 16068 - DNA, 24 bp, Artificial sequence
  SiRNA target sequence
tagaccaagacaaaatatttagaa

SEQ ID NO: 16069 - DNA, 24 bp, Artificial sequence
  SiRNA target sequence
agaccaagacaaaatatttagaat

SEQ ID NO: 16070 - DNA, 24 bp, Artificial sequence
  SiRNA target sequence
gaccaagacaaaatatttagaata

SEQ ID NO: 16071 - DNA, 24 bp, Artificial sequence
  SiRNA target sequence
accaagacaaaatatttagaataa

SEQ ID NO: 16072 - DNA, 24 bp, Artificial sequence
  SiRNA target sequence
ccaagacaaaatatttagaataag

SEQ ID NO: 16073 - DNA, 24 bp, Artificial sequence
  SiRNA target sequence
caagacaaaatatttagaataaga

SEQ ID NO: 16074 - DNA, 24 bp, Artificial sequence
  SiRNA target sequence
aagacaaaatatttagaataagag

SEQ ID NO: 16075 - DNA, 24 bp, Artificial sequence
  SiRNA target sequence
agacaaaatatttagaataagagg

SEQ ID NO: 16076 - DNA, 24 bp, Artificial sequence
  SiRNA target sequence
gacaaaatatttagaataagaggt

SEQ ID NO: 16077 - DNA, 24 bp, Artificial sequence
  SiRNA target sequence
acaaaatatttagaataagaggta

SEQ ID NO: 16078 - DNA, 24 bp, Artificial sequence
  SiRNA target sequence
caaaatatttagaataagaggtac

SEQ ID NO: 16079 - DNA, 24 bp, Artificial sequence
  SiRNA target sequence
aaaatatttagaataagaggtacc

SEQ ID NO: 16080 - DNA, 24 bp, Artificial sequence
  SiRNA target sequence
aaatatttagaataagaggtaccc

SEQ ID NO: 16081 - DNA, 24 bp, Artificial sequence
  SiRNA target sequence
aatatttagaataagaggtaccca

SEQ ID NO: 16082 - DNA, 24 bp, Artificial sequence
  SiRNA target sequence
atatttagaataagaggtacccac

SEQ ID NO: 16083 - DNA, 24 bp, Artificial sequence
  SiRNA target sequence
tatttagaataagaggtacccaca

SEQ ID NO: 16084 - DNA, 24 bp, Artificial sequence
  SiRNA target sequence
atttagaataagaggtacccacat

SEQ ID NO: 16085 - DNA, 24 bp, Artificial sequence
  SiRNA target sequence
tttagaataagaggtacccacatg

SEQ ID NO: 16086 - DNA, 24 bp, Artificial sequence
  SiRNA target sequence
ttagaataagaggtacccacatgt

SEQ ID NO: 16087 - DNA, 24 bp, Artificial sequence
  SiRNA target sequence
tagaataagaggtacccacatgtt

SEQ ID NO: 16088 - DNA, 24 bp, Artificial sequence
  SiRNA target sequence
agaataagaggtacccacatgttt

SEQ ID NO: 16089 - DNA, 24 bp, Artificial sequence
  SiRNA target sequence
gaataagaggtacccacatgttta

SEQ ID NO: 16090 - DNA, 24 bp, Artificial sequence
  SiRNA target sequence
aataagaggtacccacatgtttaa

SEQ ID NO: 16091 - DNA, 24 bp, Artificial sequence
  SiRNA target sequence
ataagaggtacccacatgtttaaa

SEQ ID NO: 16092 - DNA, 24 bp, Artificial sequence
  SiRNA target sequence
taagaggtacccacatgtttaaaa

SEQ ID NO: 16093 - DNA, 24 bp, Artificial sequence
  SiRNA target sequence
aagaggtacccacatgtttaaaaa

SEQ ID NO: 16094 - DNA, 24 bp, Artificial sequence
  SiRNA target sequence
agaggtacccacatgtttaaaaat

SEQ ID NO: 16095 - DNA, 24 bp, Artificial sequence
  SiRNA target sequence
gaggtacccacatgtttaaaaatc

SEQ ID NO: 16096 - DNA, 24 bp, Artificial sequence
  SiRNA target sequence
aggtacccacatgtttaaaaatct

SEQ ID NO: 16097 - DNA, 24 bp, Artificial sequence
  SiRNA target sequence
ggtacccacatgtttaaaaatcta

SEQ ID NO: 16098 - DNA, 24 bp, Artificial sequence
  SiRNA target sequence
gtacccacatgtttaaaaatctac

SEQ ID NO: 16099 - DNA, 24 bp, Artificial sequence
  SiRNA target sequence
tacccacatgtttaaaaatctact

SEQ ID NO: 16100 - DNA, 24 bp, Artificial sequence
  SiRNA target sequence
acccacatgtttaaaaatctactt

SEQ ID NO: 16101 - DNA, 24 bp, Artificial sequence
  SiRNA target sequence
cccacatgtttaaaaatctactta

SEQ ID NO: 16102 - DNA, 24 bp, Artificial sequence
  SiRNA target sequence
ccacatgtttaaaaatctacttac

SEQ ID NO: 16103 - DNA, 24 bp, Artificial sequence
  SiRNA target sequence
cacatgtttaaaaatctacttact

SEQ ID NO: 16104 - DNA, 24 bp, Artificial sequence
  SiRNA target sequence
acatgtttaaaaatctacttacta

SEQ ID NO: 16105 - DNA, 24 bp, Artificial sequence
  SiRNA target sequence
catgtttaaaaatctacttactaa

SEQ ID NO: 16106 - DNA, 24 bp, Artificial sequence
  SiRNA target sequence
atgtttaaaaatctacttactaaa

SEQ ID NO: 16107 - DNA, 24 bp, Artificial sequence
  SiRNA target sequence
tgtttaaaaatctacttactaaat

SEQ ID NO: 16108 - DNA, 24 bp, Artificial sequence
  SiRNA target sequence
gtttaaaaatctacttactaaatt

SEQ ID NO: 16109 - DNA, 24 bp, Artificial sequence
  SiRNA target sequence
tttaaaaatctacttactaaattc

SEQ ID NO: 16110 - DNA, 24 bp, Artificial sequence
  SiRNA target sequence
ttaaaaatctacttactaaattcc

SEQ ID NO: 16111 - DNA, 24 bp, Artificial sequence
  SiRNA target sequence
taaaaatctacttactaaattcca

SEQ ID NO: 16112 - DNA, 24 bp, Artificial sequence
  SiRNA target sequence
aaaaatctacttactaaattccat

SEQ ID NO: 16113 - DNA, 24 bp, Artificial sequence
  SiRNA target sequence
aaaatctacttactaaattccata

SEQ ID NO: 16114 - DNA, 24 bp, Artificial sequence
  SiRNA target sequence
aaatctacttactaaattccatac

SEQ ID NO: 16115 - DNA, 24 bp, Artificial sequence
  SiRNA target sequence
aatctacttactaaattccataca

SEQ ID NO: 16116 - DNA, 24 bp, Artificial sequence
  SiRNA target sequence
atctacttactaaattccatacag

SEQ ID NO: 16117 - DNA, 24 bp, Artificial sequence
  SiRNA target sequence
tctacttactaaattccatacagt

SEQ ID NO: 16118 - DNA, 24 bp, Artificial sequence
  SiRNA target sequence
ctacttactaaattccatacagta

SEQ ID NO: 16119 - DNA, 24 bp, Artificial sequence
  SiRNA target sequence
tacttactaaattccatacagtaa

SEQ ID NO: 16120 - DNA, 24 bp, Artificial sequence
  SiRNA target sequence
acttactaaattccatacagtaat

SEQ ID NO: 16121 - DNA, 24 bp, Artificial sequence
  SiRNA target sequence
cttactaaattccatacagtaatt

SEQ ID NO: 16122 - DNA, 24 bp, Artificial sequence
  SiRNA target sequence
ttactaaattccatacagtaattg

SEQ ID NO: 16123 - DNA, 24 bp, Artificial sequence
  SiRNA target sequence
tactaaattccatacagtaattgg

SEQ ID NO: 16124 - DNA, 24 bp, Artificial sequence
  SiRNA target sequence
actaaattccatacagtaattggt

SEQ ID NO: 16125 - DNA, 24 bp, Artificial sequence
  SiRNA target sequence
ctaaattccatacagtaattggta

SEQ ID NO: 16126 - DNA, 24 bp, Artificial sequence
  SiRNA target sequence
taaattccatacagtaattggtag

SEQ ID NO: 16127 - DNA, 24 bp, Artificial sequence
  SiRNA target sequence
aaattccatacagtaattggtaga

SEQ ID NO: 16128 - DNA, 24 bp, Artificial sequence
  SiRNA target sequence
aattccatacagtaattggtagaa

SEQ ID NO: 16129 - DNA, 24 bp, Artificial sequence
  SiRNA target sequence
attccatacagtaattggtagaag

SEQ ID NO: 16130 - DNA, 24 bp, Artificial sequence
  SiRNA target sequence
ttccatacagtaattggtagaagt

SEQ ID NO: 16131 - DNA, 24 bp, Artificial sequence
  SiRNA target sequence
tccatacagtaattggtagaagta

SEQ ID NO: 16132 - DNA, 24 bp, Artificial sequence
  SiRNA target sequence
ccatacagtaattggtagaagtaa

SEQ ID NO: 16133 - DNA, 24 bp, Artificial sequence
  SiRNA target sequence
catacagtaattggtagaagtaaa

SEQ ID NO: 16134 - DNA, 24 bp, Artificial sequence
  SiRNA target sequence
atacagtaattggtagaagtaaag

SEQ ID NO: 16135 - DNA, 24 bp, Artificial sequence
  SiRNA target sequence
tacagtaattggtagaagtaaaga

SEQ ID NO: 16136 - DNA, 24 bp, Artificial sequence
  SiRNA target sequence
acagtaattggtagaagtaaagat

SEQ ID NO: 16137 - DNA, 24 bp, Artificial sequence
  SiRNA target sequence
cagtaattggtagaagtaaagata

SEQ ID NO: 16138 - DNA, 24 bp, Artificial sequence
  SiRNA target sequence
agtaattggtagaagtaaagatat

SEQ ID NO: 16139 - DNA, 24 bp, Artificial sequence
  SiRNA target sequence
gtaattggtagaagtaaagatatc

SEQ ID NO: 16140 - DNA, 24 bp, Artificial sequence
  SiRNA target sequence
taattggtagaagtaaagatatct

SEQ ID NO: 16141 - DNA, 24 bp, Artificial sequence
  SiRNA target sequence
aattggtagaagtaaagatatctt

SEQ ID NO: 16142 - DNA, 24 bp, Artificial sequence
  SiRNA target sequence
attggtagaagtaaagatatcttt

SEQ ID NO: 16143 - DNA, 24 bp, Artificial sequence
  SiRNA target sequence
ttggtagaagtaaagatatcttta

SEQ ID NO: 16144 - DNA, 24 bp, Artificial sequence
  SiRNA target sequence
tggtagaagtaaagatatctttac

SEQ ID NO: 16145 - DNA, 24 bp, Artificial sequence
  SiRNA target sequence
ggtagaagtaaagatatctttaca

SEQ ID NO: 16146 - DNA, 24 bp, Artificial sequence
  SiRNA target sequence
gtagaagtaaagatatctttacac

SEQ ID NO: 16147 - DNA, 24 bp, Artificial sequence
  SiRNA target sequence
tagaagtaaagatatctttacaca

SEQ ID NO: 16148 - DNA, 24 bp, Artificial sequence
  SiRNA target sequence
agaagtaaagatatctttacacaa

SEQ ID NO: 16149 - DNA, 24 bp, Artificial sequence
  SiRNA target sequence
gaagtaaagatatctttacacaaa

SEQ ID NO: 16150 - DNA, 24 bp, Artificial sequence
  SiRNA target sequence
aagtaaagatatctttacacaaat

SEQ ID NO: 16151 - DNA, 24 bp, Artificial sequence
  SiRNA target sequence
agtaaagatatctttacacaaata

SEQ ID NO: 16152 - DNA, 24 bp, Artificial sequence
  SiRNA target sequence
gtaaagatatctttacacaaatag

SEQ ID NO: 16153 - DNA, 24 bp, Artificial sequence
  SiRNA target sequence
taaagatatctttacacaaataga

SEQ ID NO: 16154 - DNA, 24 bp, Artificial sequence
  SiRNA target sequence
aaagatatctttacacaaatagag

SEQ ID NO: 16155 - DNA, 24 bp, Artificial sequence
  SiRNA target sequence
aagatatctttacacaaatagagg

SEQ ID NO: 16156 - DNA, 24 bp, Artificial sequence
  SiRNA target sequence
agatatctttacacaaatagaggt

SEQ ID NO: 16157 - DNA, 24 bp, Artificial sequence
  SiRNA target sequence
gatatctttacacaaatagaggta

SEQ ID NO: 16158 - DNA, 24 bp, Artificial sequence
  SiRNA target sequence
atatctttacacaaatagaggtag

SEQ ID NO: 16159 - DNA, 24 bp, Artificial sequence
  SiRNA target sequence
tatctttacacaaatagaggtaga

SEQ ID NO: 16160 - DNA, 24 bp, Artificial sequence
  SiRNA target sequence
atctttacacaaatagaggtagac

SEQ ID NO: 16161 - DNA, 24 bp, Artificial sequence
  SiRNA target sequence
tctttacacaaatagaggtagaca

SEQ ID NO: 16162 - DNA, 24 bp, Artificial sequence
  SiRNA target sequence
ctttacacaaatagaggtagacat

SEQ ID NO: 16163 - DNA, 24 bp, Artificial sequence
  SiRNA target sequence
tttacacaaatagaggtagacata

SEQ ID NO: 16164 - DNA, 24 bp, Artificial sequence
  SiRNA target sequence
ttacacaaatagaggtagacataa

SEQ ID NO: 16165 - DNA, 24 bp, Artificial sequence
  SiRNA target sequence
tacacaaatagaggtagacataaa

SEQ ID NO: 16166 - DNA, 24 bp, Artificial sequence
  SiRNA target sequence
acacaaatagaggtagacataaaa

SEQ ID NO: 16167 - DNA, 24 bp, Artificial sequence
  SiRNA target sequence
cacaaatagaggtagacataaaaa

SEQ ID NO: 16168 - DNA, 24 bp, Artificial sequence
  SiRNA target sequence
acaaatagaggtagacataaaaaa

SEQ ID NO: 16169 - DNA, 24 bp, Artificial sequence
  SiRNA target sequence
caaatagaggtagacataaaaaat

SEQ ID NO: 16170 - DNA, 24 bp, Artificial sequence
  SiRNA target sequence
aaatagaggtagacataaaaaata

SEQ ID NO: 16171 - DNA, 24 bp, Artificial sequence
  SiRNA target sequence
aatagaggtagacataaaaaataa

SEQ ID NO: 16172 - DNA, 24 bp, Artificial sequence
  SiRNA target sequence
atagaggtagacataaaaaataaa

SEQ ID NO: 16173 - DNA, 24 bp, Artificial sequence
  SiRNA target sequence
tagaggtagacataaaaaataaat

SEQ ID NO: 16174 - DNA, 24 bp, Artificial sequence
  SiRNA target sequence
agaggtagacataaaaaataaata

SEQ ID NO: 16175 - DNA, 24 bp, Artificial sequence
  SiRNA target sequence
gaggtagacataaaaaataaatac

SEQ ID NO: 16176 - DNA, 24 bp, Artificial sequence
  SiRNA target sequence
aggtagacataaaaaataaataca

SEQ ID NO: 16177 - DNA, 24 bp, Artificial sequence
  SiRNA target sequence
ggtagacataaaaaataaatacaa

SEQ ID NO: 16178 - DNA, 24 bp, Artificial sequence
  SiRNA target sequence
gtagacataaaaaataaatacaat

SEQ ID NO: 16179 - DNA, 24 bp, Artificial sequence
  SiRNA target sequence
tagacataaaaaataaatacaata

SEQ ID NO: 16180 - DNA, 24 bp, Artificial sequence
  SiRNA target sequence
agacataaaaaataaatacaataa

SEQ ID NO: 16181 - DNA, 24 bp, Artificial sequence
  SiRNA target sequence
gacataaaaaataaatacaataat

SEQ ID NO: 16182 - DNA, 24 bp, Artificial sequence
  SiRNA target sequence
acataaaaaataaatacaataata

SEQ ID NO: 16183 - DNA, 24 bp, Artificial sequence
  SiRNA target sequence
cataaaaaataaatacaataatat

SEQ ID NO: 16184 - DNA, 24 bp, Artificial sequence
  SiRNA target sequence
ataaaaaataaatacaataatatg

SEQ ID NO: 16185 - DNA, 24 bp, Artificial sequence
  SiRNA target sequence
taaaaaataaatacaataatatgt

SEQ ID NO: 16186 - DNA, 24 bp, Artificial sequence
  SiRNA target sequence
aaaaaataaatacaataatatgtg

SEQ ID NO: 16187 - DNA, 24 bp, Artificial sequence
  SiRNA target sequence
aaaaataaatacaataatatgtgt

SEQ ID NO: 16188 - DNA, 24 bp, Artificial sequence
  SiRNA target sequence
aaaataaatacaataatatgtgta

SEQ ID NO: 16189 - DNA, 24 bp, Artificial sequence
  SiRNA target sequence
aaataaatacaataatatgtgtat

SEQ ID NO: 16190 - DNA, 24 bp, Artificial sequence
  SiRNA target sequence
aataaatacaataatatgtgtata

SEQ ID NO: 16191 - DNA, 24 bp, Artificial sequence
  SiRNA target sequence
ataaatacaataatatgtgtataa

SEQ ID NO: 16192 - DNA, 24 bp, Artificial sequence
  SiRNA target sequence
taaatacaataatatgtgtataaa

SEQ ID NO: 16193 - DNA, 24 bp, Artificial sequence
  SiRNA target sequence
aaatacaataatatgtgtataaaa

SEQ ID NO: 16194 - DNA, 24 bp, Artificial sequence
  SiRNA target sequence
aatacaataatatgtgtataaaaa

SEQ ID NO: 16195 - DNA, 24 bp, Artificial sequence
  SiRNA target sequence
atacaataatatgtgtataaaaat

SEQ ID NO: 16196 - DNA, 24 bp, Artificial sequence
  SiRNA target sequence
tacaataatatgtgtataaaaatg

SEQ ID NO: 16197 - DNA, 24 bp, Artificial sequence
  SiRNA target sequence
acaataatatgtgtataaaaatga

SEQ ID NO: 16198 - DNA, 24 bp, Artificial sequence
  SiRNA target sequence
caataatatgtgtataaaaatgat

SEQ ID NO: 16199 - DNA, 24 bp, Artificial sequence
  SiRNA target sequence
aataatatgtgtataaaaatgata

SEQ ID NO: 16200 - DNA, 24 bp, Artificial sequence
  SiRNA target sequence
ataatatgtgtataaaaatgatac

SEQ ID NO: 16201 - DNA, 24 bp, Artificial sequence
  SiRNA target sequence
taatatgtgtataaaaatgataca

SEQ ID NO: 16202 - DNA, 24 bp, Artificial sequence
  SiRNA target sequence
aatatgtgtataaaaatgatacag

SEQ ID NO: 16203 - DNA, 24 bp, Artificial sequence
  SiRNA target sequence
atatgtgtataaaaatgatacagc

SEQ ID NO: 16204 - DNA, 24 bp, Artificial sequence
  SiRNA target sequence
tatgtgtataaaaatgatacagcc

SEQ ID NO: 16205 - DNA, 24 bp, Artificial sequence
  SiRNA target sequence
atgtgtataaaaatgatacagcca

SEQ ID NO: 16206 - DNA, 24 bp, Artificial sequence
  SiRNA target sequence
tgtgtataaaaatgatacagccag

SEQ ID NO: 16207 - DNA, 24 bp, Artificial sequence
  SiRNA target sequence
gtgtataaaaatgatacagccagc

SEQ ID NO: 16208 - DNA, 24 bp, Artificial sequence
  SiRNA target sequence
tgtataaaaatgatacagccagct

SEQ ID NO: 16209 - DNA, 24 bp, Artificial sequence
  SiRNA target sequence
gtataaaaatgatacagccagcta

SEQ ID NO: 16210 - DNA, 24 bp, Artificial sequence
  SiRNA target sequence
tataaaaatgatacagccagctat

SEQ ID NO: 16211 - DNA, 24 bp, Artificial sequence
  SiRNA target sequence
ataaaaatgatacagccagctatt

SEQ ID NO: 16212 - DNA, 24 bp, Artificial sequence
  SiRNA target sequence
taaaaatgatacagccagctatta

SEQ ID NO: 16213 - DNA, 24 bp, Artificial sequence
  SiRNA target sequence
aaaaatgatacagccagctattaa

SEQ ID NO: 16214 - DNA, 24 bp, Artificial sequence
  SiRNA target sequence
aaaatgatacagccagctattaaa

SEQ ID NO: 16215 - DNA, 24 bp, Artificial sequence
  SiRNA target sequence
aaatgatacagccagctattaaag

SEQ ID NO: 16216 - DNA, 24 bp, Artificial sequence
  SiRNA target sequence
aatgatacagccagctattaaagg

SEQ ID NO: 16217 - DNA, 24 bp, Artificial sequence
  SiRNA target sequence
atgatacagccagctattaaaggt

SEQ ID NO: 16218 - DNA, 24 bp, Artificial sequence
  SiRNA target sequence
tgatacagccagctattaaaggtg

SEQ ID NO: 16219 - DNA, 24 bp, Artificial sequence
  SiRNA target sequence
gatacagccagctattaaaggtgc

SEQ ID NO: 16220 - DNA, 24 bp, Artificial sequence
  SiRNA target sequence
atacagccagctattaaaggtgct

SEQ ID NO: 16221 - DNA, 24 bp, Artificial sequence
  SiRNA target sequence
tacagccagctattaaaggtgctt

SEQ ID NO: 16222 - DNA, 24 bp, Artificial sequence
  SiRNA target sequence
acagccagctattaaaggtgcttc

SEQ ID NO: 16223 - DNA, 24 bp, Artificial sequence
  SiRNA target sequence
cagccagctattaaaggtgcttca

SEQ ID NO: 16224 - DNA, 24 bp, Artificial sequence
  SiRNA target sequence
agccagctattaaaggtgcttcat

SEQ ID NO: 16225 - DNA, 24 bp, Artificial sequence
  SiRNA target sequence
gccagctattaaaggtgcttcatg

SEQ ID NO: 16226 - DNA, 24 bp, Artificial sequence
  SiRNA target sequence
ccagctattaaaggtgcttcatgt

SEQ ID NO: 16227 - DNA, 24 bp, Artificial sequence
  SiRNA target sequence
cagctattaaaggtgcttcatgta

SEQ ID NO: 16228 - DNA, 24 bp, Artificial sequence
  SiRNA target sequence
agctattaaaggtgcttcatgtat

SEQ ID NO: 16229 - DNA, 24 bp, Artificial sequence
  SiRNA target sequence
gctattaaaggtgcttcatgtata

SEQ ID NO: 16230 - DNA, 24 bp, Artificial sequence
  SiRNA target sequence
ctattaaaggtgcttcatgtatat

SEQ ID NO: 16231 - DNA, 24 bp, Artificial sequence
  SiRNA target sequence
tattaaaggtgcttcatgtatata

SEQ ID NO: 16232 - DNA, 24 bp, Artificial sequence
  SiRNA target sequence
attaaaggtgcttcatgtatatac

SEQ ID NO: 16233 - DNA, 24 bp, Artificial sequence
  SiRNA target sequence
ttaaaggtgcttcatgtatatacg

SEQ ID NO: 16234 - DNA, 24 bp, Artificial sequence
  SiRNA target sequence
taaaggtgcttcatgtatatacgt

SEQ ID NO: 16235 - DNA, 24 bp, Artificial sequence
  SiRNA target sequence
aaaggtgcttcatgtatatacgtg

SEQ ID NO: 16236 - DNA, 24 bp, Artificial sequence
  SiRNA target sequence
aaggtgcttcatgtatatacgtgg

SEQ ID NO: 16237 - DNA, 24 bp, Artificial sequence
  SiRNA target sequence
aggtgcttcatgtatatacgtggg

SEQ ID NO: 16238 - DNA, 24 bp, Artificial sequence
  SiRNA target sequence
ggtgcttcatgtatatacgtgggt

SEQ ID NO: 16239 - DNA, 24 bp, Artificial sequence
  SiRNA target sequence
gtgcttcatgtatatacgtgggta

SEQ ID NO: 16240 - DNA, 24 bp, Artificial sequence
  SiRNA target sequence
tgcttcatgtatatacgtgggtaa

SEQ ID NO: 16241 - DNA, 24 bp, Artificial sequence
  SiRNA target sequence
gcttcatgtatatacgtgggtaat

SEQ ID NO: 16242 - DNA, 24 bp, Artificial sequence
  SiRNA target sequence
cttcatgtatatacgtgggtaatt

SEQ ID NO: 16243 - DNA, 24 bp, Artificial sequence
  SiRNA target sequence
ttcatgtatatacgtgggtaatta

SEQ ID NO: 16244 - DNA, 24 bp, Artificial sequence
  SiRNA target sequence
tcatgtatatacgtgggtaattat

SEQ ID NO: 16245 - DNA, 24 bp, Artificial sequence
  SiRNA target sequence
catgtatatacgtgggtaattata

SEQ ID NO: 16246 - DNA, 24 bp, Artificial sequence
  SiRNA target sequence
atgtatatacgtgggtaattatat

SEQ ID NO: 16247 - DNA, 24 bp, Artificial sequence
  SiRNA target sequence
tgtatatacgtgggtaattatatg

SEQ ID NO: 16248 - DNA, 24 bp, Artificial sequence
  SiRNA target sequence
gtatatacgtgggtaattatatgc

SEQ ID NO: 16249 - DNA, 24 bp, Artificial sequence
  SiRNA target sequence
tatatacgtgggtaattatatgca

SEQ ID NO: 16250 - DNA, 24 bp, Artificial sequence
  SiRNA target sequence
atatacgtgggtaattatatgcag

SEQ ID NO: 16251 - DNA, 24 bp, Artificial sequence
  SiRNA target sequence
tatacgtgggtaattatatgcagc

SEQ ID NO: 16252 - DNA, 24 bp, Artificial sequence
  SiRNA target sequence
atacgtgggtaattatatgcagca

SEQ ID NO: 16253 - DNA, 24 bp, Artificial sequence
  SiRNA target sequence
tacgtgggtaattatatgcagcag

SEQ ID NO: 16254 - DNA, 24 bp, Artificial sequence
  SiRNA target sequence
acgtgggtaattatatgcagcagc

SEQ ID NO: 16255 - DNA, 24 bp, Artificial sequence
  SiRNA target sequence
cgtgggtaattatatgcagcagct

SEQ ID NO: 16256 - DNA, 24 bp, Artificial sequence
  SiRNA target sequence
gtgggtaattatatgcagcagcta

SEQ ID NO: 16257 - DNA, 24 bp, Artificial sequence
  SiRNA target sequence
tgggtaattatatgcagcagctag

SEQ ID NO: 16258 - DNA, 24 bp, Artificial sequence
  SiRNA target sequence
gggtaattatatgcagcagctagg

SEQ ID NO: 16259 - DNA, 24 bp, Artificial sequence
  SiRNA target sequence
ggtaattatatgcagcagctagga

SEQ ID NO: 16260 - DNA, 24 bp, Artificial sequence
  SiRNA target sequence
gtaattatatgcagcagctaggag

SEQ ID NO: 16261 - DNA, 24 bp, Artificial sequence
  SiRNA target sequence
taattatatgcagcagctaggagt

SEQ ID NO: 16262 - DNA, 24 bp, Artificial sequence
  SiRNA target sequence
aattatatgcagcagctaggagta

SEQ ID NO: 16263 - DNA, 24 bp, Artificial sequence
  SiRNA target sequence
attatatgcagcagctaggagtaa

SEQ ID NO: 16264 - DNA, 24 bp, Artificial sequence
  SiRNA target sequence
ttatatgcagcagctaggagtaat

SEQ ID NO: 16265 - DNA, 24 bp, Artificial sequence
  SiRNA target sequence
tatatgcagcagctaggagtaatt

SEQ ID NO: 16266 - DNA, 24 bp, Artificial sequence
  SiRNA target sequence
atatgcagcagctaggagtaatta

SEQ ID NO: 16267 - DNA, 24 bp, Artificial sequence
  SiRNA target sequence
tatgcagcagctaggagtaattag

SEQ ID NO: 16268 - DNA, 24 bp, Artificial sequence
  SiRNA target sequence
atgcagcagctaggagtaattagt

SEQ ID NO: 16269 - DNA, 24 bp, Artificial sequence
  SiRNA target sequence
tgcagcagctaggagtaattagtc

SEQ ID NO: 16270 - DNA, 24 bp, Artificial sequence
  SiRNA target sequence
gcagcagctaggagtaattagtct

SEQ ID NO: 16271 - DNA, 24 bp, Artificial sequence
  SiRNA target sequence
cagcagctaggagtaattagtctt

SEQ ID NO: 16272 - DNA, 24 bp, Artificial sequence
  SiRNA target sequence
agcagctaggagtaattagtcttg

SEQ ID NO: 16273 - DNA, 24 bp, Artificial sequence
  SiRNA target sequence
gcagctaggagtaattagtcttgg

SEQ ID NO: 16274 - DNA, 24 bp, Artificial sequence
  SiRNA target sequence
cagctaggagtaattagtcttggt

SEQ ID NO: 16275 - DNA, 24 bp, Artificial sequence
  SiRNA target sequence
agctaggagtaattagtcttggtg

SEQ ID NO: 16276 - DNA, 24 bp, Artificial sequence
  SiRNA target sequence
gctaggagtaattagtcttggtgg

SEQ ID NO: 16277 - DNA, 24 bp, Artificial sequence
  SiRNA target sequence
ctaggagtaattagtcttggtggg

SEQ ID NO: 16278 - DNA, 24 bp, Artificial sequence
  SiRNA target sequence
taggagtaattagtcttggtgggg

SEQ ID NO: 16279 - DNA, 24 bp, Artificial sequence
  SiRNA target sequence
aggagtaattagtcttggtgggga

SEQ ID NO: 16280 - DNA, 24 bp, Artificial sequence
  SiRNA target sequence
ggagtaattagtcttggtggggag

SEQ ID NO: 16281 - DNA, 24 bp, Artificial sequence
  SiRNA target sequence
gagtaattagtcttggtggggaga

SEQ ID NO: 16282 - DNA, 24 bp, Artificial sequence
  SiRNA target sequence
agtaattagtcttggtggggagat

SEQ ID NO: 16283 - DNA, 24 bp, Artificial sequence
  SiRNA target sequence
gtaattagtcttggtggggagatt

SEQ ID NO: 16284 - DNA, 24 bp, Artificial sequence
  SiRNA target sequence
taattagtcttggtggggagatta

SEQ ID NO: 16285 - DNA, 24 bp, Artificial sequence
  SiRNA target sequence
aattagtcttggtggggagattat

SEQ ID NO: 16286 - DNA, 24 bp, Artificial sequence
  SiRNA target sequence
attagtcttggtggggagattatt

SEQ ID NO: 16287 - DNA, 24 bp, Artificial sequence
  SiRNA target sequence
ttagtcttggtggggagattatta

SEQ ID NO: 16288 - DNA, 24 bp, Artificial sequence
  SiRNA target sequence
tagtcttggtggggagattattaa

SEQ ID NO: 16289 - DNA, 24 bp, Artificial sequence
  SiRNA target sequence
agtcttggtggggagattattaaa

SEQ ID NO: 16290 - DNA, 24 bp, Artificial sequence
  SiRNA target sequence
gtcttggtggggagattattaaag

SEQ ID NO: 16291 - DNA, 24 bp, Artificial sequence
  SiRNA target sequence
tcttggtggggagattattaaagc

SEQ ID NO: 16292 - DNA, 24 bp, Artificial sequence
  SiRNA target sequence
cttggtggggagattattaaagct

SEQ ID NO: 16293 - DNA, 24 bp, Artificial sequence
  SiRNA target sequence
ttggtggggagattattaaagctg

SEQ ID NO: 16294 - DNA, 24 bp, Artificial sequence
  SiRNA target sequence
tggtggggagattattaaagctga

SEQ ID NO: 16295 - DNA, 24 bp, Artificial sequence
  SiRNA target sequence
ggtggggagattattaaagctgat

SEQ ID NO: 16296 - DNA, 24 bp, Artificial sequence
  SiRNA target sequence
gtggggagattattaaagctgatg

SEQ ID NO: 16297 - DNA, 24 bp, Artificial sequence
  SiRNA target sequence
tggggagattattaaagctgatga

SEQ ID NO: 16298 - DNA, 24 bp, Artificial sequence
  SiRNA target sequence
ggggagattattaaagctgatgaa

SEQ ID NO: 16299 - DNA, 24 bp, Artificial sequence
  SiRNA target sequence
gggagattattaaagctgatgaat

SEQ ID NO: 16300 - DNA, 24 bp, Artificial sequence
  SiRNA target sequence
ggagattattaaagctgatgaata

SEQ ID NO: 16301 - DNA, 24 bp, Artificial sequence
  SiRNA target sequence
gagattattaaagctgatgaatac

SEQ ID NO: 16302 - DNA, 24 bp, Artificial sequence
  SiRNA target sequence
agattattaaagctgatgaataca

SEQ ID NO: 16303 - DNA, 24 bp, Artificial sequence
  SiRNA target sequence
gattattaaagctgatgaatacat

SEQ ID NO: 16304 - DNA, 24 bp, Artificial sequence
  SiRNA target sequence
attattaaagctgatgaatacatt

SEQ ID NO: 16305 - DNA, 24 bp, Artificial sequence
  SiRNA target sequence
ttattaaagctgatgaatacattg

SEQ ID NO: 16306 - DNA, 24 bp, Artificial sequence
  SiRNA target sequence
tattaaagctgatgaatacattgg

SEQ ID NO: 16307 - DNA, 24 bp, Artificial sequence
  SiRNA target sequence
attaaagctgatgaatacattgga

SEQ ID NO: 16308 - DNA, 24 bp, Artificial sequence
  SiRNA target sequence
ttaaagctgatgaatacattggac

SEQ ID NO: 16309 - DNA, 24 bp, Artificial sequence
  SiRNA target sequence
taaagctgatgaatacattggact

SEQ ID NO: 16310 - DNA, 24 bp, Artificial sequence
  SiRNA target sequence
aaagctgatgaatacattggacta

SEQ ID NO: 16311 - DNA, 24 bp, Artificial sequence
  SiRNA target sequence
aagctgatgaatacattggactat

SEQ ID NO: 16312 - DNA, 24 bp, Artificial sequence
  SiRNA target sequence
agctgatgaatacattggactatc

SEQ ID NO: 16313 - DNA, 24 bp, Artificial sequence
  SiRNA target sequence
gctgatgaatacattggactatct

SEQ ID NO: 16314 - DNA, 24 bp, Artificial sequence
  SiRNA target sequence
ctgatgaatacattggactatctt

SEQ ID NO: 16315 - DNA, 24 bp, Artificial sequence
  SiRNA target sequence
tgatgaatacattggactatcttt

SEQ ID NO: 16316 - DNA, 24 bp, Artificial sequence
  SiRNA target sequence
gatgaatacattggactatctttt

SEQ ID NO: 16317 - DNA, 24 bp, Artificial sequence
  SiRNA target sequence
atgaatacattggactatcttttg

SEQ ID NO: 16318 - DNA, 24 bp, Artificial sequence
  SiRNA target sequence
tgaatacattggactatcttttgt

SEQ ID NO: 16319 - DNA, 24 bp, Artificial sequence
  SiRNA target sequence
gaatacattggactatcttttgta

SEQ ID NO: 16320 - DNA, 24 bp, Artificial sequence
  SiRNA target sequence
aatacattggactatcttttgtag

SEQ ID NO: 16321 - DNA, 24 bp, Artificial sequence
  SiRNA target sequence
atacattggactatcttttgtagg

SEQ ID NO: 16322 - DNA, 24 bp, Artificial sequence
  SiRNA target sequence
tacattggactatcttttgtaggg

SEQ ID NO: 16323 - DNA, 24 bp, Artificial sequence
  SiRNA target sequence
acattggactatcttttgtaggga

SEQ ID NO: 16324 - DNA, 24 bp, Artificial sequence
  SiRNA target sequence
cattggactatcttttgtagggag

SEQ ID NO: 16325 - DNA, 24 bp, Artificial sequence
  SiRNA target sequence
attggactatcttttgtagggaga

SEQ ID NO: 16326 - DNA, 24 bp, Artificial sequence
  SiRNA target sequence
ttggactatcttttgtagggagat

SEQ ID NO: 16327 - DNA, 24 bp, Artificial sequence
  SiRNA target sequence
tggactatcttttgtagggagata

SEQ ID NO: 16328 - DNA, 24 bp, Artificial sequence
  SiRNA target sequence
ggactatcttttgtagggagatat

SEQ ID NO: 16329 - DNA, 24 bp, Artificial sequence
  SiRNA target sequence
gactatcttttgtagggagatatg

SEQ ID NO: 16330 - DNA, 24 bp, Artificial sequence
  SiRNA target sequence
actatcttttgtagggagatatga

SEQ ID NO: 16331 - DNA, 24 bp, Artificial sequence
  SiRNA target sequence
ctatcttttgtagggagatatgaa

SEQ ID NO: 16332 - DNA, 24 bp, Artificial sequence
  SiRNA target sequence
tatcttttgtagggagatatgaag

SEQ ID NO: 16333 - DNA, 24 bp, Artificial sequence
  SiRNA target sequence
atcttttgtagggagatatgaagg

SEQ ID NO: 16334 - DNA, 24 bp, Artificial sequence
  SiRNA target sequence
tcttttgtagggagatatgaaggg

SEQ ID NO: 16335 - DNA, 24 bp, Artificial sequence
  SiRNA target sequence
cttttgtagggagatatgaaggga

SEQ ID NO: 16336 - DNA, 24 bp, Artificial sequence
  SiRNA target sequence
ttttgtagggagatatgaagggat

SEQ ID NO: 16337 - DNA, 24 bp, Artificial sequence
  SiRNA target sequence
tttgtagggagatatgaagggatt

SEQ ID NO: 16338 - DNA, 24 bp, Artificial sequence
  SiRNA target sequence
ttgtagggagatatgaagggattg

SEQ ID NO: 16339 - DNA, 24 bp, Artificial sequence
  SiRNA target sequence
tgtagggagatatgaagggattgg

SEQ ID NO: 16340 - DNA, 24 bp, Artificial sequence
  SiRNA target sequence
gtagggagatatgaagggattggt

SEQ ID NO: 16341 - DNA, 24 bp, Artificial sequence
  SiRNA target sequence
tagggagatatgaagggattggtt

SEQ ID NO: 16342 - DNA, 24 bp, Artificial sequence
  SiRNA target sequence
agggagatatgaagggattggttc

SEQ ID NO: 16343 - DNA, 24 bp, Artificial sequence
  SiRNA target sequence
gggagatatgaagggattggttct

SEQ ID NO: 16344 - DNA, 24 bp, Artificial sequence
  SiRNA target sequence
ggagatatgaagggattggttcta

SEQ ID NO: 16345 - DNA, 24 bp, Artificial sequence
  SiRNA target sequence
gagatatgaagggattggttctat

SEQ ID NO: 16346 - DNA, 24 bp, Artificial sequence
  SiRNA target sequence
agatatgaagggattggttctatt

SEQ ID NO: 16347 - DNA, 24 bp, Artificial sequence
  SiRNA target sequence
gatatgaagggattggttctattt

SEQ ID NO: 16348 - DNA, 24 bp, Artificial sequence
  SiRNA target sequence
atatgaagggattggttctatttc

SEQ ID NO: 16349 - DNA, 24 bp, Artificial sequence
  SiRNA target sequence
tatgaagggattggttctatttct

SEQ ID NO: 16350 - DNA, 24 bp, Artificial sequence
  SiRNA target sequence
atgaagggattggttctatttcta

SEQ ID NO: 16351 - DNA, 24 bp, Artificial sequence
  SiRNA target sequence
tgaagggattggttctatttctac

SEQ ID NO: 16352 - DNA, 24 bp, Artificial sequence
  SiRNA target sequence
gaagggattggttctatttctact

SEQ ID NO: 16353 - DNA, 24 bp, Artificial sequence
  SiRNA target sequence
aagggattggttctatttctacta

SEQ ID NO: 16354 - DNA, 24 bp, Artificial sequence
  SiRNA target sequence
agggattggttctatttctactat

SEQ ID NO: 16355 - DNA, 24 bp, Artificial sequence
  SiRNA target sequence
gggattggttctatttctactata

SEQ ID NO: 16356 - DNA, 24 bp, Artificial sequence
  SiRNA target sequence
ggattggttctatttctactatat

SEQ ID NO: 16357 - DNA, 24 bp, Artificial sequence
  SiRNA target sequence
gattggttctatttctactatatc

SEQ ID NO: 16358 - DNA, 24 bp, Artificial sequence
  SiRNA target sequence
attggttctatttctactatatca

SEQ ID NO: 16359 - DNA, 24 bp, Artificial sequence
  SiRNA target sequence
ttggttctatttctactatatcac

SEQ ID NO: 16360 - DNA, 24 bp, Artificial sequence
  SiRNA target sequence
tggttctatttctactatatcact

SEQ ID NO: 16361 - DNA, 24 bp, Artificial sequence
  SiRNA target sequence
ggttctatttctactatatcactt

SEQ ID NO: 16362 - DNA, 24 bp, Artificial sequence
  SiRNA target sequence
gttctatttctactatatcacttc

SEQ ID NO: 16363 - DNA, 24 bp, Artificial sequence
  SiRNA target sequence
ttctatttctactatatcacttca

SEQ ID NO: 16364 - DNA, 24 bp, Artificial sequence
  SiRNA target sequence
tctatttctactatatcacttcag

SEQ ID NO: 16365 - DNA, 24 bp, Artificial sequence
  SiRNA target sequence
ctatttctactatatcacttcagc

SEQ ID NO: 16366 - DNA, 24 bp, Artificial sequence
  SiRNA target sequence
tatttctactatatcacttcagca

SEQ ID NO: 16367 - DNA, 24 bp, Artificial sequence
  SiRNA target sequence
atttctactatatcacttcagcag

SEQ ID NO: 16368 - DNA, 24 bp, Artificial sequence
  SiRNA target sequence
tttctactatatcacttcagcagt

SEQ ID NO: 16369 - DNA, 24 bp, Artificial sequence
  SiRNA target sequence
ttctactatatcacttcagcagtt

SEQ ID NO: 16370 - DNA, 24 bp, Artificial sequence
  SiRNA target sequence
tctactatatcacttcagcagttt

SEQ ID NO: 16371 - DNA, 24 bp, Artificial sequence
  SiRNA target sequence
ctactatatcacttcagcagttta

SEQ ID NO: 16372 - DNA, 24 bp, Artificial sequence
  SiRNA target sequence
tactatatcacttcagcagtttaa

SEQ ID NO: 16373 - DNA, 24 bp, Artificial sequence
  SiRNA target sequence
actatatcacttcagcagtttaat

SEQ ID NO: 16374 - DNA, 24 bp, Artificial sequence
  SiRNA target sequence
ctatatcacttcagcagtttaata

SEQ ID NO: 16375 - DNA, 24 bp, Artificial sequence
  SiRNA target sequence
tatatcacttcagcagtttaatac

SEQ ID NO: 16376 - DNA, 24 bp, Artificial sequence
  SiRNA target sequence
atatcacttcagcagtttaataca

SEQ ID NO: 16377 - DNA, 24 bp, Artificial sequence
  SiRNA target sequence
tatcacttcagcagtttaatacac

SEQ ID NO: 16378 - DNA, 24 bp, Artificial sequence
  SiRNA target sequence
atcacttcagcagtttaatacact

SEQ ID NO: 16379 - DNA, 24 bp, Artificial sequence
  SiRNA target sequence
tcacttcagcagtttaatacactg

SEQ ID NO: 16380 - DNA, 24 bp, Artificial sequence
  SiRNA target sequence
cacttcagcagtttaatacactgt

SEQ ID NO: 16381 - DNA, 24 bp, Artificial sequence
  SiRNA target sequence
acttcagcagtttaatacactgtc

SEQ ID NO: 16382 - DNA, 24 bp, Artificial sequence
  SiRNA target sequence
cttcagcagtttaatacactgtct

SEQ ID NO: 16383 - DNA, 24 bp, Artificial sequence
  SiRNA target sequence
ttcagcagtttaatacactgtcta

SEQ ID NO: 16384 - DNA, 24 bp, Artificial sequence
  SiRNA target sequence
tcagcagtttaatacactgtctat

SEQ ID NO: 16385 - DNA, 24 bp, Artificial sequence
  SiRNA target sequence
cagcagtttaatacactgtctata

SEQ ID NO: 16386 - DNA, 24 bp, Artificial sequence
  SiRNA target sequence
agcagtttaatacactgtctatag

SEQ ID NO: 16387 - DNA, 24 bp, Artificial sequence
  SiRNA target sequence
gcagtttaatacactgtctataga

SEQ ID NO: 16388 - DNA, 24 bp, Artificial sequence
  SiRNA target sequence
cagtttaatacactgtctatagat

SEQ ID NO: 16389 - DNA, 24 bp, Artificial sequence
  SiRNA target sequence
agtttaatacactgtctatagatt

SEQ ID NO: 16390 - DNA, 24 bp, Artificial sequence
  SiRNA target sequence
gtttaatacactgtctatagatta

SEQ ID NO: 16391 - DNA, 24 bp, Artificial sequence
  SiRNA target sequence
tttaatacactgtctatagattat

SEQ ID NO: 16392 - DNA, 24 bp, Artificial sequence
  SiRNA target sequence
ttaatacactgtctatagattatt

SEQ ID NO: 16393 - DNA, 24 bp, Artificial sequence
  SiRNA target sequence
taatacactgtctatagattatta

SEQ ID NO: 16394 - DNA, 24 bp, Artificial sequence
  SiRNA target sequence
aatacactgtctatagattattac

SEQ ID NO: 16395 - DNA, 24 bp, Artificial sequence
  SiRNA target sequence
atacactgtctatagattattaca

SEQ ID NO: 16396 - DNA, 24 bp, Artificial sequence
  SiRNA target sequence
tacactgtctatagattattacaa

SEQ ID NO: 16397 - DNA, 24 bp, Artificial sequence
  SiRNA target sequence
acactgtctatagattattacaag

SEQ ID NO: 16398 - DNA, 24 bp, Artificial sequence
  SiRNA target sequence
cactgtctatagattattacaaga

SEQ ID NO: 16399 - DNA, 24 bp, Artificial sequence
  SiRNA target sequence
actgtctatagattattacaagac

SEQ ID NO: 16400 - DNA, 24 bp, Artificial sequence
  SiRNA target sequence
ctgtctatagattattacaagaca

SEQ ID NO: 16401 - DNA, 24 bp, Artificial sequence
  SiRNA target sequence
tgtctatagattattacaagacat

SEQ ID NO: 16402 - DNA, 24 bp, Artificial sequence
  SiRNA target sequence
gtctatagattattacaagacatt

SEQ ID NO: 16403 - DNA, 24 bp, Artificial sequence
  SiRNA target sequence
tctatagattattacaagacattg

SEQ ID NO: 16404 - DNA, 24 bp, Artificial sequence
  SiRNA target sequence
ctatagattattacaagacattgt

SEQ ID NO: 16405 - DNA, 24 bp, Artificial sequence
  SiRNA target sequence
tatagattattacaagacattgtc

SEQ ID NO: 16406 - DNA, 24 bp, Artificial sequence
  SiRNA target sequence
atagattattacaagacattgtct

SEQ ID NO: 16407 - DNA, 24 bp, Artificial sequence
  SiRNA target sequence
tagattattacaagacattgtctt

SEQ ID NO: 16408 - DNA, 24 bp, Artificial sequence
  SiRNA target sequence
agattattacaagacattgtcttc

SEQ ID NO: 16409 - DNA, 24 bp, Artificial sequence
  SiRNA target sequence
gattattacaagacattgtcttct

SEQ ID NO: 16410 - DNA, 24 bp, Artificial sequence
  SiRNA target sequence
attattacaagacattgtcttcta

SEQ ID NO: 16411 - DNA, 24 bp, Artificial sequence
  SiRNA target sequence
ttattacaagacattgtcttctat

SEQ ID NO: 16412 - DNA, 24 bp, Artificial sequence
  SiRNA target sequence
tattacaagacattgtcttctatt

SEQ ID NO: 16413 - DNA, 24 bp, Artificial sequence
  SiRNA target sequence
attacaagacattgtcttctattt

SEQ ID NO: 16414 - DNA, 24 bp, Artificial sequence
  SiRNA target sequence
ttacaagacattgtcttctatttg

SEQ ID NO: 16415 - DNA, 24 bp, Artificial sequence
  SiRNA target sequence
tacaagacattgtcttctatttgt

SEQ ID NO: 16416 - DNA, 24 bp, Artificial sequence
  SiRNA target sequence
acaagacattgtcttctatttgtg

SEQ ID NO: 16417 - DNA, 24 bp, Artificial sequence
  SiRNA target sequence
caagacattgtcttctatttgtga

SEQ ID NO: 16418 - DNA, 24 bp, Artificial sequence
  SiRNA target sequence
aagacattgtcttctatttgtgac

SEQ ID NO: 16419 - DNA, 24 bp, Artificial sequence
  SiRNA target sequence
agacattgtcttctatttgtgacg

SEQ ID NO: 16420 - DNA, 24 bp, Artificial sequence
  SiRNA target sequence
gacattgtcttctatttgtgacgt

SEQ ID NO: 16421 - DNA, 24 bp, Artificial sequence
  SiRNA target sequence
acattgtcttctatttgtgacgta

SEQ ID NO: 16422 - DNA, 24 bp, Artificial sequence
  SiRNA target sequence
cattgtcttctatttgtgacgtag

SEQ ID NO: 16423 - DNA, 24 bp, Artificial sequence
  SiRNA target sequence
attgtcttctatttgtgacgtagg

SEQ ID NO: 16424 - DNA, 24 bp, Artificial sequence
  SiRNA target sequence
ttgtcttctatttgtgacgtaggt

SEQ ID NO: 16425 - DNA, 24 bp, Artificial sequence
  SiRNA target sequence
tgtcttctatttgtgacgtaggta

SEQ ID NO: 16426 - DNA, 24 bp, Artificial sequence
  SiRNA target sequence
gtcttctatttgtgacgtaggtat

SEQ ID NO: 16427 - DNA, 24 bp, Artificial sequence
  SiRNA target sequence
tcttctatttgtgacgtaggtatt

SEQ ID NO: 16428 - DNA, 24 bp, Artificial sequence
  SiRNA target sequence
cttctatttgtgacgtaggtatta

SEQ ID NO: 16429 - DNA, 24 bp, Artificial sequence
  SiRNA target sequence
ttctatttgtgacgtaggtattaa

SEQ ID NO: 16430 - DNA, 24 bp, Artificial sequence
  SiRNA target sequence
tctatttgtgacgtaggtattaaa

SEQ ID NO: 16431 - DNA, 24 bp, Artificial sequence
  SiRNA target sequence
ctatttgtgacgtaggtattaaaa

SEQ ID NO: 16432 - DNA, 24 bp, Artificial sequence
  SiRNA target sequence
tatttgtgacgtaggtattaaaat

SEQ ID NO: 16433 - DNA, 24 bp, Artificial sequence
  SiRNA target sequence
atttgtgacgtaggtattaaaata

SEQ ID NO: 16434 - DNA, 24 bp, Artificial sequence
  SiRNA target sequence
tttgtgacgtaggtattaaaatat

SEQ ID NO: 16435 - DNA, 24 bp, Artificial sequence
  SiRNA target sequence
ttgtgacgtaggtattaaaatatc

SEQ ID NO: 16436 - DNA, 24 bp, Artificial sequence
  SiRNA target sequence
tgtgacgtaggtattaaaatatca

SEQ ID NO: 16437 - DNA, 24 bp, Artificial sequence
  SiRNA target sequence
gtgacgtaggtattaaaatatcaa

SEQ ID NO: 16438 - DNA, 24 bp, Artificial sequence
  SiRNA target sequence
tgacgtaggtattaaaatatcaac

SEQ ID NO: 16439 - DNA, 24 bp, Artificial sequence
  SiRNA target sequence
gacgtaggtattaaaatatcaact

SEQ ID NO: 16440 - DNA, 24 bp, Artificial sequence
  SiRNA target sequence
acgtaggtattaaaatatcaactg

SEQ ID NO: 16441 - DNA, 24 bp, Artificial sequence
  SiRNA target sequence
cgtaggtattaaaatatcaactga

SEQ ID NO: 16442 - DNA, 24 bp, Artificial sequence
  SiRNA target sequence
gtaggtattaaaatatcaactgat

SEQ ID NO: 16443 - DNA, 24 bp, Artificial sequence
  SiRNA target sequence
taggtattaaaatatcaactgata

SEQ ID NO: 16444 - DNA, 24 bp, Artificial sequence
  SiRNA target sequence
aggtattaaaatatcaactgatag

SEQ ID NO: 16445 - DNA, 24 bp, Artificial sequence
  SiRNA target sequence
ggtattaaaatatcaactgatagg

SEQ ID NO: 16446 - DNA, 24 bp, Artificial sequence
  SiRNA target sequence
gtattaaaatatcaactgataggg

SEQ ID NO: 16447 - DNA, 24 bp, Artificial sequence
  SiRNA target sequence
tattaaaatatcaactgataggga

SEQ ID NO: 16448 - DNA, 24 bp, Artificial sequence
  SiRNA target sequence
attaaaatatcaactgatagggaa

SEQ ID NO: 16449 - DNA, 24 bp, Artificial sequence
  SiRNA target sequence
ttaaaatatcaactgatagggaaa

SEQ ID NO: 16450 - DNA, 24 bp, Artificial sequence
  SiRNA target sequence
taaaatatcaactgatagggaaaa

SEQ ID NO: 16451 - DNA, 24 bp, Artificial sequence
  SiRNA target sequence
aaaatatcaactgatagggaaaaa

SEQ ID NO: 16452 - DNA, 24 bp, Artificial sequence
  SiRNA target sequence
aaatatcaactgatagggaaaaat

SEQ ID NO: 16453 - DNA, 24 bp, Artificial sequence
  SiRNA target sequence
aatatcaactgatagggaaaaatc

SEQ ID NO: 16454 - DNA, 24 bp, Artificial sequence
  SiRNA target sequence
atatcaactgatagggaaaaatca

SEQ ID NO: 16455 - DNA, 24 bp, Artificial sequence
  SiRNA target sequence
tatcaactgatagggaaaaatcag

SEQ ID NO: 16456 - DNA, 24 bp, Artificial sequence
  SiRNA target sequence
atcaactgatagggaaaaatcagt

SEQ ID NO: 16457 - DNA, 24 bp, Artificial sequence
  SiRNA target sequence
tcaactgatagggaaaaatcagtt

SEQ ID NO: 16458 - DNA, 24 bp, Artificial sequence
  SiRNA target sequence
caactgatagggaaaaatcagtta

SEQ ID NO: 16459 - DNA, 24 bp, Artificial sequence
  SiRNA target sequence
aactgatagggaaaaatcagttaa

SEQ ID NO: 16460 - DNA, 24 bp, Artificial sequence
  SiRNA target sequence
actgatagggaaaaatcagttaat

SEQ ID NO: 16461 - DNA, 24 bp, Artificial sequence
  SiRNA target sequence
ctgatagggaaaaatcagttaatt

SEQ ID NO: 16462 - DNA, 24 bp, Artificial sequence
  SiRNA target sequence
tgatagggaaaaatcagttaatta

SEQ ID NO: 16463 - DNA, 24 bp, Artificial sequence
  SiRNA target sequence
gatagggaaaaatcagttaattat

SEQ ID NO: 16464 - DNA, 24 bp, Artificial sequence
  SiRNA target sequence
atagggaaaaatcagttaattatg

SEQ ID NO: 16465 - DNA, 24 bp, Artificial sequence
  SiRNA target sequence
tagggaaaaatcagttaattatgg

SEQ ID NO: 16466 - DNA, 24 bp, Artificial sequence
  SiRNA target sequence
agggaaaaatcagttaattatgga

SEQ ID NO: 16467 - DNA, 24 bp, Artificial sequence
  SiRNA target sequence
gggaaaaatcagttaattatggat

SEQ ID NO: 16468 - DNA, 24 bp, Artificial sequence
  SiRNA target sequence
ggaaaaatcagttaattatggatt

SEQ ID NO: 16469 - DNA, 24 bp, Artificial sequence
  SiRNA target sequence
gaaaaatcagttaattatggatta

SEQ ID NO: 16470 - DNA, 24 bp, Artificial sequence
  SiRNA target sequence
aaaaatcagttaattatggattag

SEQ ID NO: 16471 - DNA, 24 bp, Artificial sequence
  SiRNA target sequence
aaaatcagttaattatggattagg

SEQ ID NO: 16472 - DNA, 24 bp, Artificial sequence
  SiRNA target sequence
aaatcagttaattatggattagga

SEQ ID NO: 16473 - DNA, 24 bp, Artificial sequence
  SiRNA target sequence
aatcagttaattatggattaggag

SEQ ID NO: 16474 - DNA, 24 bp, Artificial sequence
  SiRNA target sequence
atcagttaattatggattaggagt

SEQ ID NO: 16475 - DNA, 24 bp, Artificial sequence
  SiRNA target sequence
tcagttaattatggattaggagtt

SEQ ID NO: 16476 - DNA, 24 bp, Artificial sequence
  SiRNA target sequence
cagttaattatggattaggagtta

SEQ ID NO: 16477 - DNA, 24 bp, Artificial sequence
  SiRNA target sequence
agttaattatggattaggagttaa

SEQ ID NO: 16478 - DNA, 24 bp, Artificial sequence
  SiRNA target sequence
gttaattatggattaggagttaaa

SEQ ID NO: 16479 - DNA, 24 bp, Artificial sequence
  SiRNA target sequence
ttaattatggattaggagttaaac

SEQ ID NO: 16480 - DNA, 24 bp, Artificial sequence
  SiRNA target sequence
taattatggattaggagttaaact

SEQ ID NO: 16481 - DNA, 24 bp, Artificial sequence
  SiRNA target sequence
aattatggattaggagttaaacta

SEQ ID NO: 16482 - DNA, 24 bp, Artificial sequence
  SiRNA target sequence
attatggattaggagttaaactac

SEQ ID NO: 16483 - DNA, 24 bp, Artificial sequence
  SiRNA target sequence
ttatggattaggagttaaactaca

SEQ ID NO: 16484 - DNA, 24 bp, Artificial sequence
  SiRNA target sequence
tatggattaggagttaaactacac

SEQ ID NO: 16485 - DNA, 24 bp, Artificial sequence
  SiRNA target sequence
atggattaggagttaaactacaca

SEQ ID NO: 16486 - DNA, 24 bp, Artificial sequence
  SiRNA target sequence
tggattaggagttaaactacacag

SEQ ID NO: 16487 - DNA, 24 bp, Artificial sequence
  SiRNA target sequence
ggattaggagttaaactacacagt

SEQ ID NO: 16488 - DNA, 24 bp, Artificial sequence
  SiRNA target sequence
gattaggagttaaactacacagta

SEQ ID NO: 16489 - DNA, 24 bp, Artificial sequence
  SiRNA target sequence
attaggagttaaactacacagtaa

SEQ ID NO: 16490 - DNA, 24 bp, Artificial sequence
  SiRNA target sequence
ttaggagttaaactacacagtaaa

SEQ ID NO: 16491 - DNA, 24 bp, Artificial sequence
  SiRNA target sequence
taggagttaaactacacagtaaaa

SEQ ID NO: 16492 - DNA, 24 bp, Artificial sequence
  SiRNA target sequence
aggagttaaactacacagtaaaaa

SEQ ID NO: 16493 - DNA, 24 bp, Artificial sequence
  SiRNA target sequence
ggagttaaactacacagtaaaaaa

SEQ ID NO: 16494 - DNA, 24 bp, Artificial sequence
  SiRNA target sequence
gagttaaactacacagtaaaaaag

SEQ ID NO: 16495 - DNA, 24 bp, Artificial sequence
  SiRNA target sequence
agttaaactacacagtaaaaaagg

SEQ ID NO: 16496 - DNA, 24 bp, Artificial sequence
  SiRNA target sequence
gttaaactacacagtaaaaaagga

SEQ ID NO: 16497 - DNA, 24 bp, Artificial sequence
  SiRNA target sequence
ttaaactacacagtaaaaaaggag

SEQ ID NO: 16498 - DNA, 24 bp, Artificial sequence
  SiRNA target sequence
taaactacacagtaaaaaaggaga

SEQ ID NO: 16499 - DNA, 24 bp, Artificial sequence
  SiRNA target sequence
aaactacacagtaaaaaaggagaa

SEQ ID NO: 16500 - DNA, 24 bp, Artificial sequence
  SiRNA target sequence
aactacacagtaaaaaaggagaaa

SEQ ID NO: 16501 - DNA, 24 bp, Artificial sequence
  SiRNA target sequence
actacacagtaaaaaaggagaaat

SEQ ID NO: 16502 - DNA, 24 bp, Artificial sequence
  SiRNA target sequence
ctacacagtaaaaaaggagaaatt

SEQ ID NO: 16503 - DNA, 24 bp, Artificial sequence
  SiRNA target sequence
tacacagtaaaaaaggagaaatta

SEQ ID NO: 16504 - DNA, 24 bp, Artificial sequence
  SiRNA target sequence
acacagtaaaaaaggagaaattat

SEQ ID NO: 16505 - DNA, 24 bp, Artificial sequence
  SiRNA target sequence
cacagtaaaaaaggagaaattatc

SEQ ID NO: 16506 - DNA, 24 bp, Artificial sequence
  SiRNA target sequence
acagtaaaaaaggagaaattatcg

SEQ ID NO: 16507 - DNA, 24 bp, Artificial sequence
  SiRNA target sequence
cagtaaaaaaggagaaattatcgg

SEQ ID NO: 16508 - DNA, 24 bp, Artificial sequence
  SiRNA target sequence
agtaaaaaaggagaaattatcgga

SEQ ID NO: 16509 - DNA, 24 bp, Artificial sequence
  SiRNA target sequence
gtaaaaaaggagaaattatcggat

SEQ ID NO: 16510 - DNA, 24 bp, Artificial sequence
  SiRNA target sequence
taaaaaaggagaaattatcggatg

SEQ ID NO: 16511 - DNA, 24 bp, Artificial sequence
  SiRNA target sequence
aaaaaaggagaaattatcggatgt

SEQ ID NO: 16512 - DNA, 24 bp, Artificial sequence
  SiRNA target sequence
aaaaaggagaaattatcggatgtg

SEQ ID NO: 16513 - DNA, 24 bp, Artificial sequence
  SiRNA target sequence
aaaaggagaaattatcggatgtgt

SEQ ID NO: 16514 - DNA, 24 bp, Artificial sequence
  SiRNA target sequence
aaaggagaaattatcggatgtgta

SEQ ID NO: 16515 - DNA, 24 bp, Artificial sequence
  SiRNA target sequence
aaggagaaattatcggatgtgtag

SEQ ID NO: 16516 - DNA, 24 bp, Artificial sequence
  SiRNA target sequence
aggagaaattatcggatgtgtaga

SEQ ID NO: 16517 - DNA, 24 bp, Artificial sequence
  SiRNA target sequence
ggagaaattatcggatgtgtagat

SEQ ID NO: 16518 - DNA, 24 bp, Artificial sequence
  SiRNA target sequence
gagaaattatcggatgtgtagata

SEQ ID NO: 16519 - DNA, 24 bp, Artificial sequence
  SiRNA target sequence
agaaattatcggatgtgtagataa

SEQ ID NO: 16520 - DNA, 24 bp, Artificial sequence
  SiRNA target sequence
gaaattatcggatgtgtagataac

SEQ ID NO: 16521 - DNA, 24 bp, Artificial sequence
  SiRNA target sequence
aaattatcggatgtgtagataaca

SEQ ID NO: 16522 - DNA, 24 bp, Artificial sequence
  SiRNA target sequence
aattatcggatgtgtagataacaa

SEQ ID NO: 16523 - DNA, 24 bp, Artificial sequence
  SiRNA target sequence
attatcggatgtgtagataacaat

SEQ ID NO: 16524 - DNA, 24 bp, Artificial sequence
  SiRNA target sequence
ttatcggatgtgtagataacaatc

SEQ ID NO: 16525 - DNA, 24 bp, Artificial sequence
  SiRNA target sequence
tatcggatgtgtagataacaatca

SEQ ID NO: 16526 - DNA, 24 bp, Artificial sequence
  SiRNA target sequence
atcggatgtgtagataacaatcat

SEQ ID NO: 16527 - DNA, 24 bp, Artificial sequence
  SiRNA target sequence
tcggatgtgtagataacaatcata

SEQ ID NO: 16528 - DNA, 24 bp, Artificial sequence
  SiRNA target sequence
cggatgtgtagataacaatcatat

SEQ ID NO: 16529 - DNA, 24 bp, Artificial sequence
  SiRNA target sequence
ggatgtgtagataacaatcatatt

SEQ ID NO: 16530 - DNA, 24 bp, Artificial sequence
  SiRNA target sequence
gatgtgtagataacaatcatattt

SEQ ID NO: 16531 - DNA, 24 bp, Artificial sequence
  SiRNA target sequence
atgtgtagataacaatcatatttt

SEQ ID NO: 16532 - DNA, 24 bp, Artificial sequence
  SiRNA target sequence
tgtgtagataacaatcatatttta

SEQ ID NO: 16533 - DNA, 24 bp, Artificial sequence
  SiRNA target sequence
gtgtagataacaatcatattttaa

SEQ ID NO: 16534 - DNA, 24 bp, Artificial sequence
  SiRNA target sequence
tgtagataacaatcatattttaag

SEQ ID NO: 16535 - DNA, 24 bp, Artificial sequence
  SiRNA target sequence
gtagataacaatcatattttaagc

SEQ ID NO: 16536 - DNA, 24 bp, Artificial sequence
  SiRNA target sequence
tagataacaatcatattttaagca

SEQ ID NO: 16537 - DNA, 24 bp, Artificial sequence
  SiRNA target sequence
agataacaatcatattttaagcat

SEQ ID NO: 16538 - DNA, 24 bp, Artificial sequence
  SiRNA target sequence
gataacaatcatattttaagcata

SEQ ID NO: 16539 - DNA, 24 bp, Artificial sequence
  SiRNA target sequence
ataacaatcatattttaagcataa

SEQ ID NO: 16540 - DNA, 24 bp, Artificial sequence
  SiRNA target sequence
taacaatcatattttaagcataat

SEQ ID NO: 16541 - DNA, 24 bp, Artificial sequence
  SiRNA target sequence
aacaatcatattttaagcataatt

SEQ ID NO: 16542 - DNA, 24 bp, Artificial sequence
  SiRNA target sequence
acaatcatattttaagcataattt

SEQ ID NO: 16543 - DNA, 24 bp, Artificial sequence
  SiRNA target sequence
caatcatattttaagcataattta

SEQ ID NO: 16544 - DNA, 24 bp, Artificial sequence
  SiRNA target sequence
aatcatattttaagcataatttat

SEQ ID NO: 16545 - DNA, 24 bp, Artificial sequence
  SiRNA target sequence
atcatattttaagcataatttata

SEQ ID NO: 16546 - DNA, 24 bp, Artificial sequence
  SiRNA target sequence
tcatattttaagcataatttataa

SEQ ID NO: 16547 - DNA, 24 bp, Artificial sequence
  SiRNA target sequence
catattttaagcataatttataat

SEQ ID NO: 16548 - DNA, 24 bp, Artificial sequence
  SiRNA target sequence
atattttaagcataatttataatg

SEQ ID NO: 16549 - DNA, 24 bp, Artificial sequence
  SiRNA target sequence
tattttaagcataatttataatga

SEQ ID NO: 16550 - DNA, 24 bp, Artificial sequence
  SiRNA target sequence
attttaagcataatttataatgat

SEQ ID NO: 16551 - DNA, 24 bp, Artificial sequence
  SiRNA target sequence
ttttaagcataatttataatgata

SEQ ID NO: 16552 - DNA, 24 bp, Artificial sequence
  SiRNA target sequence
tttaagcataatttataatgataa

SEQ ID NO: 16553 - DNA, 24 bp, Artificial sequence
  SiRNA target sequence
ttaagcataatttataatgataaa

SEQ ID NO: 16554 - DNA, 24 bp, Artificial sequence
  SiRNA target sequence
taagcataatttataatgataaat

SEQ ID NO: 16555 - DNA, 24 bp, Artificial sequence
  SiRNA target sequence
aagcataatttataatgataaatt

SEQ ID NO: 16556 - DNA, 24 bp, Artificial sequence
  SiRNA target sequence
agcataatttataatgataaatta

SEQ ID NO: 16557 - DNA, 24 bp, Artificial sequence
  SiRNA target sequence
gcataatttataatgataaattat

SEQ ID NO: 16558 - DNA, 24 bp, Artificial sequence
  SiRNA target sequence
cataatttataatgataaattatc

SEQ ID NO: 16559 - DNA, 24 bp, Artificial sequence
  SiRNA target sequence
ataatttataatgataaattatct

SEQ ID NO: 16560 - DNA, 24 bp, Artificial sequence
  SiRNA target sequence
taatttataatgataaattatctg

SEQ ID NO: 16561 - DNA, 24 bp, Artificial sequence
  SiRNA target sequence
aatttataatgataaattatctga

SEQ ID NO: 16562 - DNA, 24 bp, Artificial sequence
  SiRNA target sequence
atttataatgataaattatctgaa

SEQ ID NO: 16563 - DNA, 24 bp, Artificial sequence
  SiRNA target sequence
tttataatgataaattatctgaag

SEQ ID NO: 16564 - DNA, 24 bp, Artificial sequence
  SiRNA target sequence
ttataatgataaattatctgaagg

SEQ ID NO: 16565 - DNA, 24 bp, Artificial sequence
  SiRNA target sequence
tataatgataaattatctgaaggg

SEQ ID NO: 16566 - DNA, 24 bp, Artificial sequence
  SiRNA target sequence
ataatgataaattatctgaagggt

SEQ ID NO: 16567 - DNA, 24 bp, Artificial sequence
  SiRNA target sequence
taatgataaattatctgaagggtt

SEQ ID NO: 16568 - DNA, 24 bp, Artificial sequence
  SiRNA target sequence
aatgataaattatctgaagggtta

SEQ ID NO: 16569 - DNA, 24 bp, Artificial sequence
  SiRNA target sequence
atgataaattatctgaagggttaa

SEQ ID NO: 16570 - DNA, 24 bp, Artificial sequence
  SiRNA target sequence
tgataaattatctgaagggttaac

SEQ ID NO: 16571 - DNA, 24 bp, Artificial sequence
  SiRNA target sequence
gataaattatctgaagggttaaca

SEQ ID NO: 16572 - DNA, 24 bp, Artificial sequence
  SiRNA target sequence
ataaattatctgaagggttaacac

SEQ ID NO: 16573 - DNA, 24 bp, Artificial sequence
  SiRNA target sequence
taaattatctgaagggttaacact

SEQ ID NO: 16574 - DNA, 24 bp, Artificial sequence
  SiRNA target sequence
aaattatctgaagggttaacactt

SEQ ID NO: 16575 - DNA, 24 bp, Artificial sequence
  SiRNA target sequence
aattatctgaagggttaacactta

SEQ ID NO: 16576 - DNA, 24 bp, Artificial sequence
  SiRNA target sequence
attatctgaagggttaacacttaa

SEQ ID NO: 16577 - DNA, 24 bp, Artificial sequence
  SiRNA target sequence
ttatctgaagggttaacacttaat

SEQ ID NO: 16578 - DNA, 24 bp, Artificial sequence
  SiRNA target sequence
tatctgaagggttaacacttaatt

SEQ ID NO: 16579 - DNA, 24 bp, Artificial sequence
  SiRNA target sequence
atctgaagggttaacacttaattt

SEQ ID NO: 16580 - DNA, 24 bp, Artificial sequence
  SiRNA target sequence
tctgaagggttaacacttaatttg

SEQ ID NO: 16581 - DNA, 24 bp, Artificial sequence
  SiRNA target sequence
ctgaagggttaacacttaatttga

SEQ ID NO: 16582 - DNA, 24 bp, Artificial sequence
  SiRNA target sequence
tgaagggttaacacttaatttgag

SEQ ID NO: 16583 - DNA, 24 bp, Artificial sequence
  SiRNA target sequence
gaagggttaacacttaatttgagt

SEQ ID NO: 16584 - DNA, 24 bp, Artificial sequence
  SiRNA target sequence
aagggttaacacttaatttgagtt

SEQ ID NO: 16585 - DNA, 24 bp, Artificial sequence
  SiRNA target sequence
agggttaacacttaatttgagttg

SEQ ID NO: 16586 - DNA, 24 bp, Artificial sequence
  SiRNA target sequence
gggttaacacttaatttgagttgt

SEQ ID NO: 16587 - DNA, 24 bp, Artificial sequence
  SiRNA target sequence
ggttaacacttaatttgagttgta

SEQ ID NO: 16588 - DNA, 24 bp, Artificial sequence
  SiRNA target sequence
gttaacacttaatttgagttgtag

SEQ ID NO: 16589 - DNA, 24 bp, Artificial sequence
  SiRNA target sequence
ttaacacttaatttgagttgtaga

SEQ ID NO: 16590 - DNA, 24 bp, Artificial sequence
  SiRNA target sequence
taacacttaatttgagttgtagat

SEQ ID NO: 16591 - DNA, 24 bp, Artificial sequence
  SiRNA target sequence
aacacttaatttgagttgtagatt

SEQ ID NO: 16592 - DNA, 24 bp, Artificial sequence
  SiRNA target sequence
acacttaatttgagttgtagattt

SEQ ID NO: 16593 - DNA, 24 bp, Artificial sequence
  SiRNA target sequence
cacttaatttgagttgtagatttg

SEQ ID NO: 16594 - DNA, 24 bp, Artificial sequence
  SiRNA target sequence
acttaatttgagttgtagatttgg

SEQ ID NO: 16595 - DNA, 24 bp, Artificial sequence
  SiRNA target sequence
cttaatttgagttgtagatttggt

SEQ ID NO: 16596 - DNA, 24 bp, Artificial sequence
  SiRNA target sequence
ttaatttgagttgtagatttggta

SEQ ID NO: 16597 - DNA, 24 bp, Artificial sequence
  SiRNA target sequence
taatttgagttgtagatttggtaa

SEQ ID NO: 16598 - DNA, 24 bp, Artificial sequence
  SiRNA target sequence
aatttgagttgtagatttggtaag

SEQ ID NO: 16599 - DNA, 24 bp, Artificial sequence
  SiRNA target sequence
atttgagttgtagatttggtaaga

SEQ ID NO: 16600 - DNA, 24 bp, Artificial sequence
  SiRNA target sequence
tttgagttgtagatttggtaagaa

SEQ ID NO: 16601 - DNA, 24 bp, Artificial sequence
  SiRNA target sequence
ttgagttgtagatttggtaagaaa

SEQ ID NO: 16602 - DNA, 24 bp, Artificial sequence
  SiRNA target sequence
tgagttgtagatttggtaagaaag

SEQ ID NO: 16603 - DNA, 24 bp, Artificial sequence
  SiRNA target sequence
gagttgtagatttggtaagaaagt

SEQ ID NO: 16604 - DNA, 24 bp, Artificial sequence
  SiRNA target sequence
agttgtagatttggtaagaaagta

SEQ ID NO: 16605 - DNA, 24 bp, Artificial sequence
  SiRNA target sequence
gttgtagatttggtaagaaagtat

SEQ ID NO: 16606 - DNA, 24 bp, Artificial sequence
  SiRNA target sequence
ttgtagatttggtaagaaagtatt

SEQ ID NO: 16607 - DNA, 24 bp, Artificial sequence
  SiRNA target sequence
tgtagatttggtaagaaagtattt

SEQ ID NO: 16608 - DNA, 24 bp, Artificial sequence
  SiRNA target sequence
gtagatttggtaagaaagtatttg

SEQ ID NO: 16609 - DNA, 24 bp, Artificial sequence
  SiRNA target sequence
tagatttggtaagaaagtatttga

SEQ ID NO: 16610 - DNA, 24 bp, Artificial sequence
  SiRNA target sequence
agatttggtaagaaagtatttgat

SEQ ID NO: 16611 - DNA, 24 bp, Artificial sequence
  SiRNA target sequence
gatttggtaagaaagtatttgatt

SEQ ID NO: 16612 - DNA, 24 bp, Artificial sequence
  SiRNA target sequence
atttggtaagaaagtatttgatta

SEQ ID NO: 16613 - DNA, 24 bp, Artificial sequence
  SiRNA target sequence
tttggtaagaaagtatttgattat

SEQ ID NO: 16614 - DNA, 24 bp, Artificial sequence
  SiRNA target sequence
ttggtaagaaagtatttgattatg

SEQ ID NO: 16615 - DNA, 24 bp, Artificial sequence
  SiRNA target sequence
tggtaagaaagtatttgattatgg

SEQ ID NO: 16616 - DNA, 24 bp, Artificial sequence
  SiRNA target sequence
ggtaagaaagtatttgattatggc

SEQ ID NO: 16617 - DNA, 24 bp, Artificial sequence
  SiRNA target sequence
gtaagaaagtatttgattatggct

SEQ ID NO: 16618 - DNA, 24 bp, Artificial sequence
  SiRNA target sequence
taagaaagtatttgattatggcta

SEQ ID NO: 16619 - DNA, 24 bp, Artificial sequence
  SiRNA target sequence
aagaaagtatttgattatggctat

SEQ ID NO: 16620 - DNA, 24 bp, Artificial sequence
  SiRNA target sequence
agaaagtatttgattatggctatg

SEQ ID NO: 16621 - DNA, 24 bp, Artificial sequence
  SiRNA target sequence
gaaagtatttgattatggctatgg

SEQ ID NO: 16622 - DNA, 24 bp, Artificial sequence
  SiRNA target sequence
aaagtatttgattatggctatggg

SEQ ID NO: 16623 - DNA, 24 bp, Artificial sequence
  SiRNA target sequence
aagtatttgattatggctatgggt

SEQ ID NO: 16624 - DNA, 24 bp, Artificial sequence
  SiRNA target sequence
agtatttgattatggctatgggtt

SEQ ID NO: 16625 - DNA, 24 bp, Artificial sequence
  SiRNA target sequence
gtatttgattatggctatgggttt

SEQ ID NO: 16626 - DNA, 24 bp, Artificial sequence
  SiRNA target sequence
tatttgattatggctatgggttta

SEQ ID NO: 16627 - DNA, 24 bp, Artificial sequence
  SiRNA target sequence
atttgattatggctatgggtttat

SEQ ID NO: 16628 - DNA, 24 bp, Artificial sequence
  SiRNA target sequence
tttgattatggctatgggtttatt

SEQ ID NO: 16629 - DNA, 24 bp, Artificial sequence
  SiRNA target sequence
ttgattatggctatgggtttattt

SEQ ID NO: 16630 - DNA, 24 bp, Artificial sequence
  SiRNA target sequence
tgattatggctatgggtttattta

SEQ ID NO: 16631 - DNA, 24 bp, Artificial sequence
  SiRNA target sequence
gattatggctatgggtttatttat

SEQ ID NO: 16632 - DNA, 24 bp, Artificial sequence
  SiRNA target sequence
attatggctatgggtttatttatg

SEQ ID NO: 16633 - DNA, 24 bp, Artificial sequence
  SiRNA target sequence
ttatggctatgggtttatttatga

SEQ ID NO: 16634 - DNA, 24 bp, Artificial sequence
  SiRNA target sequence
tatggctatgggtttatttatgaa

SEQ ID NO: 16635 - DNA, 24 bp, Artificial sequence
  SiRNA target sequence
atggctatgggtttatttatgaat

SEQ ID NO: 16636 - DNA, 24 bp, Artificial sequence
  SiRNA target sequence
tggctatgggtttatttatgaatt

SEQ ID NO: 16637 - DNA, 24 bp, Artificial sequence
  SiRNA target sequence
ggctatgggtttatttatgaattt

SEQ ID NO: 16638 - DNA, 24 bp, Artificial sequence
  SiRNA target sequence
gctatgggtttatttatgaatttt

SEQ ID NO: 16639 - DNA, 24 bp, Artificial sequence
  SiRNA target sequence
ctatgggtttatttatgaatttta

SEQ ID NO: 16640 - DNA, 24 bp, Artificial sequence
  SiRNA target sequence
tatgggtttatttatgaattttaa

SEQ ID NO: 16641 - DNA, 25 bp, Artificial sequence
  SiRNA target sequence
atgaaatctttctacaaaaaaataa

SEQ ID NO: 16642 - DNA, 25 bp, Artificial sequence
  SiRNA target sequence
tgaaatctttctacaaaaaaataaa

SEQ ID NO: 16643 - DNA, 25 bp, Artificial sequence
  SiRNA target sequence
gaaatctttctacaaaaaaataaaa

SEQ ID NO: 16644 - DNA, 25 bp, Artificial sequence
  SiRNA target sequence
aaatctttctacaaaaaaataaaaa

SEQ ID NO: 16645 - DNA, 25 bp, Artificial sequence
  SiRNA target sequence
aatctttctacaaaaaaataaaaag

SEQ ID NO: 16646 - DNA, 25 bp, Artificial sequence
  SiRNA target sequence
atctttctacaaaaaaataaaaagt

SEQ ID NO: 16647 - DNA, 25 bp, Artificial sequence
  SiRNA target sequence
tctttctacaaaaaaataaaaagtt

SEQ ID NO: 16648 - DNA, 25 bp, Artificial sequence
  SiRNA target sequence
ctttctacaaaaaaataaaaagtta

SEQ ID NO: 16649 - DNA, 25 bp, Artificial sequence
  SiRNA target sequence
tttctacaaaaaaataaaaagttat

SEQ ID NO: 16650 - DNA, 25 bp, Artificial sequence
  SiRNA target sequence
ttctacaaaaaaataaaaagttatt

SEQ ID NO: 16651 - DNA, 25 bp, Artificial sequence
  SiRNA target sequence
tctacaaaaaaataaaaagttattt

SEQ ID NO: 16652 - DNA, 25 bp, Artificial sequence
  SiRNA target sequence
ctacaaaaaaataaaaagttattta

SEQ ID NO: 16653 - DNA, 25 bp, Artificial sequence
  SiRNA target sequence
tacaaaaaaataaaaagttatttat

SEQ ID NO: 16654 - DNA, 25 bp, Artificial sequence
  SiRNA target sequence
acaaaaaaataaaaagttatttatt

SEQ ID NO: 16655 - DNA, 25 bp, Artificial sequence
  SiRNA target sequence
caaaaaaataaaaagttatttattc

SEQ ID NO: 16656 - DNA, 25 bp, Artificial sequence
  SiRNA target sequence
aaaaaaataaaaagttatttattca

SEQ ID NO: 16657 - DNA, 25 bp, Artificial sequence
  SiRNA target sequence
aaaaaataaaaagttatttattcaa

SEQ ID NO: 16658 - DNA, 25 bp, Artificial sequence
  SiRNA target sequence
aaaaataaaaagttatttattcaaa

SEQ ID NO: 16659 - DNA, 25 bp, Artificial sequence
  SiRNA target sequence
aaaataaaaagttatttattcaaat

SEQ ID NO: 16660 - DNA, 25 bp, Artificial sequence
  SiRNA target sequence
aaataaaaagttatttattcaaatc

SEQ ID NO: 16661 - DNA, 25 bp, Artificial sequence
  SiRNA target sequence
aataaaaagttatttattcaaatct

SEQ ID NO: 16662 - DNA, 25 bp, Artificial sequence
  SiRNA target sequence
ataaaaagttatttattcaaatctg

SEQ ID NO: 16663 - DNA, 25 bp, Artificial sequence
  SiRNA target sequence
taaaaagttatttattcaaatctgc

SEQ ID NO: 16664 - DNA, 25 bp, Artificial sequence
  SiRNA target sequence
aaaaagttatttattcaaatctgcc

SEQ ID NO: 16665 - DNA, 25 bp, Artificial sequence
  SiRNA target sequence
aaaagttatttattcaaatctgcca

SEQ ID NO: 16666 - DNA, 25 bp, Artificial sequence
  SiRNA target sequence
aaagttatttattcaaatctgccat

SEQ ID NO: 16667 - DNA, 25 bp, Artificial sequence
  SiRNA target sequence
aagttatttattcaaatctgccatt

SEQ ID NO: 16668 - DNA, 25 bp, Artificial sequence
  SiRNA target sequence
agttatttattcaaatctgccatta

SEQ ID NO: 16669 - DNA, 25 bp, Artificial sequence
  SiRNA target sequence
gttatttattcaaatctgccattaa

SEQ ID NO: 16670 - DNA, 25 bp, Artificial sequence
  SiRNA target sequence
ttatttattcaaatctgccattaat

SEQ ID NO: 16671 - DNA, 25 bp, Artificial sequence
  SiRNA target sequence
tatttattcaaatctgccattaata

SEQ ID NO: 16672 - DNA, 25 bp, Artificial sequence
  SiRNA target sequence
atttattcaaatctgccattaatac

SEQ ID NO: 16673 - DNA, 25 bp, Artificial sequence
  SiRNA target sequence
tttattcaaatctgccattaataca

SEQ ID NO: 16674 - DNA, 25 bp, Artificial sequence
  SiRNA target sequence
ttattcaaatctgccattaatacat

SEQ ID NO: 16675 - DNA, 25 bp, Artificial sequence
  SiRNA target sequence
tattcaaatctgccattaatacatc

SEQ ID NO: 16676 - DNA, 25 bp, Artificial sequence
  SiRNA target sequence
attcaaatctgccattaatacatct

SEQ ID NO: 16677 - DNA, 25 bp, Artificial sequence
  SiRNA target sequence
ttcaaatctgccattaatacatctt

SEQ ID NO: 16678 - DNA, 25 bp, Artificial sequence
  SiRNA target sequence
tcaaatctgccattaatacatcttt

SEQ ID NO: 16679 - DNA, 25 bp, Artificial sequence
  SiRNA target sequence
caaatctgccattaatacatctttt

SEQ ID NO: 16680 - DNA, 25 bp, Artificial sequence
  SiRNA target sequence
aaatctgccattaatacatcttttg

SEQ ID NO: 16681 - DNA, 25 bp, Artificial sequence
  SiRNA target sequence
aatctgccattaatacatcttttga

SEQ ID NO: 16682 - DNA, 25 bp, Artificial sequence
  SiRNA target sequence
atctgccattaatacatcttttgat

SEQ ID NO: 16683 - DNA, 25 bp, Artificial sequence
  SiRNA target sequence
tctgccattaatacatcttttgata

SEQ ID NO: 16684 - DNA, 25 bp, Artificial sequence
  SiRNA target sequence
ctgccattaatacatcttttgatac

SEQ ID NO: 16685 - DNA, 25 bp, Artificial sequence
  SiRNA target sequence
tgccattaatacatcttttgatact

SEQ ID NO: 16686 - DNA, 25 bp, Artificial sequence
  SiRNA target sequence
gccattaatacatcttttgatactt

SEQ ID NO: 16687 - DNA, 25 bp, Artificial sequence
  SiRNA target sequence
ccattaatacatcttttgatacttt

SEQ ID NO: 16688 - DNA, 25 bp, Artificial sequence
  SiRNA target sequence
cattaatacatcttttgatactttt

SEQ ID NO: 16689 - DNA, 25 bp, Artificial sequence
  SiRNA target sequence
attaatacatcttttgatactttta

SEQ ID NO: 16690 - DNA, 25 bp, Artificial sequence
  SiRNA target sequence
ttaatacatcttttgatacttttaa

SEQ ID NO: 16691 - DNA, 25 bp, Artificial sequence
  SiRNA target sequence
taatacatcttttgatacttttaat

SEQ ID NO: 16692 - DNA, 25 bp, Artificial sequence
  SiRNA target sequence
aatacatcttttgatacttttaatt

SEQ ID NO: 16693 - DNA, 25 bp, Artificial sequence
  SiRNA target sequence
atacatcttttgatacttttaattt

SEQ ID NO: 16694 - DNA, 25 bp, Artificial sequence
  SiRNA target sequence
tacatcttttgatacttttaattta

SEQ ID NO: 16695 - DNA, 25 bp, Artificial sequence
  SiRNA target sequence
acatcttttgatacttttaatttag

SEQ ID NO: 16696 - DNA, 25 bp, Artificial sequence
  SiRNA target sequence
catcttttgatacttttaatttaga

SEQ ID NO: 16697 - DNA, 25 bp, Artificial sequence
  SiRNA target sequence
atcttttgatacttttaatttagaa

SEQ ID NO: 16698 - DNA, 25 bp, Artificial sequence
  SiRNA target sequence
tcttttgatacttttaatttagaaa

SEQ ID NO: 16699 - DNA, 25 bp, Artificial sequence
  SiRNA target sequence
cttttgatacttttaatttagaaaa

SEQ ID NO: 16700 - DNA, 25 bp, Artificial sequence
  SiRNA target sequence
ttttgatacttttaatttagaaaat

SEQ ID NO: 16701 - DNA, 25 bp, Artificial sequence
  SiRNA target sequence
tttgatacttttaatttagaaaatg

SEQ ID NO: 16702 - DNA, 25 bp, Artificial sequence
  SiRNA target sequence
ttgatacttttaatttagaaaatgt

SEQ ID NO: 16703 - DNA, 25 bp, Artificial sequence
  SiRNA target sequence
tgatacttttaatttagaaaatgta

SEQ ID NO: 16704 - DNA, 25 bp, Artificial sequence
  SiRNA target sequence
gatacttttaatttagaaaatgtaa

SEQ ID NO: 16705 - DNA, 25 bp, Artificial sequence
  SiRNA target sequence
atacttttaatttagaaaatgtaag

SEQ ID NO: 16706 - DNA, 25 bp, Artificial sequence
  SiRNA target sequence
tacttttaatttagaaaatgtaagc

SEQ ID NO: 16707 - DNA, 25 bp, Artificial sequence
  SiRNA target sequence
acttttaatttagaaaatgtaagca

SEQ ID NO: 16708 - DNA, 25 bp, Artificial sequence
  SiRNA target sequence
cttttaatttagaaaatgtaagcat

SEQ ID NO: 16709 - DNA, 25 bp, Artificial sequence
  SiRNA target sequence
ttttaatttagaaaatgtaagcatt

SEQ ID NO: 16710 - DNA, 25 bp, Artificial sequence
  SiRNA target sequence
tttaatttagaaaatgtaagcatta

SEQ ID NO: 16711 - DNA, 25 bp, Artificial sequence
  SiRNA target sequence
ttaatttagaaaatgtaagcattac

SEQ ID NO: 16712 - DNA, 25 bp, Artificial sequence
  SiRNA target sequence
taatttagaaaatgtaagcattact

SEQ ID NO: 16713 - DNA, 25 bp, Artificial sequence
  SiRNA target sequence
aatttagaaaatgtaagcattacta

SEQ ID NO: 16714 - DNA, 25 bp, Artificial sequence
  SiRNA target sequence
atttagaaaatgtaagcattactag

SEQ ID NO: 16715 - DNA, 25 bp, Artificial sequence
  SiRNA target sequence
tttagaaaatgtaagcattactagc

SEQ ID NO: 16716 - DNA, 25 bp, Artificial sequence
  SiRNA target sequence
ttagaaaatgtaagcattactagct

SEQ ID NO: 16717 - DNA, 25 bp, Artificial sequence
  SiRNA target sequence
tagaaaatgtaagcattactagctt

SEQ ID NO: 16718 - DNA, 25 bp, Artificial sequence
  SiRNA target sequence
agaaaatgtaagcattactagctta

SEQ ID NO: 16719 - DNA, 25 bp, Artificial sequence
  SiRNA target sequence
gaaaatgtaagcattactagcttaa

SEQ ID NO: 16720 - DNA, 25 bp, Artificial sequence
  SiRNA target sequence
aaaatgtaagcattactagcttaaa

SEQ ID NO: 16721 - DNA, 25 bp, Artificial sequence
  SiRNA target sequence
aaatgtaagcattactagcttaaat

SEQ ID NO: 16722 - DNA, 25 bp, Artificial sequence
  SiRNA target sequence
aatgtaagcattactagcttaaata

SEQ ID NO: 16723 - DNA, 25 bp, Artificial sequence
  SiRNA target sequence
atgtaagcattactagcttaaatac

SEQ ID NO: 16724 - DNA, 25 bp, Artificial sequence
  SiRNA target sequence
tgtaagcattactagcttaaatacg

SEQ ID NO: 16725 - DNA, 25 bp, Artificial sequence
  SiRNA target sequence
gtaagcattactagcttaaatacgt

SEQ ID NO: 16726 - DNA, 25 bp, Artificial sequence
  SiRNA target sequence
taagcattactagcttaaatacgta

SEQ ID NO: 16727 - DNA, 25 bp, Artificial sequence
  SiRNA target sequence
aagcattactagcttaaatacgtac

SEQ ID NO: 16728 - DNA, 25 bp, Artificial sequence
  SiRNA target sequence
agcattactagcttaaatacgtaca

SEQ ID NO: 16729 - DNA, 25 bp, Artificial sequence
  SiRNA target sequence
gcattactagcttaaatacgtacac

SEQ ID NO: 16730 - DNA, 25 bp, Artificial sequence
  SiRNA target sequence
cattactagcttaaatacgtacacc

SEQ ID NO: 16731 - DNA, 25 bp, Artificial sequence
  SiRNA target sequence
attactagcttaaatacgtacaccg

SEQ ID NO: 16732 - DNA, 25 bp, Artificial sequence
  SiRNA target sequence
ttactagcttaaatacgtacaccgg

SEQ ID NO: 16733 - DNA, 25 bp, Artificial sequence
  SiRNA target sequence
tactagcttaaatacgtacaccggt

SEQ ID NO: 16734 - DNA, 25 bp, Artificial sequence
  SiRNA target sequence
actagcttaaatacgtacaccggtg

SEQ ID NO: 16735 - DNA, 25 bp, Artificial sequence
  SiRNA target sequence
ctagcttaaatacgtacaccggtgt

SEQ ID NO: 16736 - DNA, 25 bp, Artificial sequence
  SiRNA target sequence
tagcttaaatacgtacaccggtgtt

SEQ ID NO: 16737 - DNA, 25 bp, Artificial sequence
  SiRNA target sequence
agcttaaatacgtacaccggtgtta

SEQ ID NO: 16738 - DNA, 25 bp, Artificial sequence
  SiRNA target sequence
gcttaaatacgtacaccggtgttaa

SEQ ID NO: 16739 - DNA, 25 bp, Artificial sequence
  SiRNA target sequence
cttaaatacgtacaccggtgttaaa

SEQ ID NO: 16740 - DNA, 25 bp, Artificial sequence
  SiRNA target sequence
ttaaatacgtacaccggtgttaaaa

SEQ ID NO: 16741 - DNA, 25 bp, Artificial sequence
  SiRNA target sequence
taaatacgtacaccggtgttaaaac

SEQ ID NO: 16742 - DNA, 25 bp, Artificial sequence
  SiRNA target sequence
aaatacgtacaccggtgttaaaacc

SEQ ID NO: 16743 - DNA, 25 bp, Artificial sequence
  SiRNA target sequence
aatacgtacaccggtgttaaaaccg

SEQ ID NO: 16744 - DNA, 25 bp, Artificial sequence
  SiRNA target sequence
atacgtacaccggtgttaaaaccga

SEQ ID NO: 16745 - DNA, 25 bp, Artificial sequence
  SiRNA target sequence
tacgtacaccggtgttaaaaccgaa

SEQ ID NO: 16746 - DNA, 25 bp, Artificial sequence
  SiRNA target sequence
acgtacaccggtgttaaaaccgaaa

SEQ ID NO: 16747 - DNA, 25 bp, Artificial sequence
  SiRNA target sequence
cgtacaccggtgttaaaaccgaaat

SEQ ID NO: 16748 - DNA, 25 bp, Artificial sequence
  SiRNA target sequence
gtacaccggtgttaaaaccgaaata

SEQ ID NO: 16749 - DNA, 25 bp, Artificial sequence
  SiRNA target sequence
tacaccggtgttaaaaccgaaatat

SEQ ID NO: 16750 - DNA, 25 bp, Artificial sequence
  SiRNA target sequence
acaccggtgttaaaaccgaaatatc

SEQ ID NO: 16751 - DNA, 25 bp, Artificial sequence
  SiRNA target sequence
caccggtgttaaaaccgaaatatca

SEQ ID NO: 16752 - DNA, 25 bp, Artificial sequence
  SiRNA target sequence
accggtgttaaaaccgaaatatcaa

SEQ ID NO: 16753 - DNA, 25 bp, Artificial sequence
  SiRNA target sequence
ccggtgttaaaaccgaaatatcaaa

SEQ ID NO: 16754 - DNA, 25 bp, Artificial sequence
  SiRNA target sequence
cggtgttaaaaccgaaatatcaaaa

SEQ ID NO: 16755 - DNA, 25 bp, Artificial sequence
  SiRNA target sequence
ggtgttaaaaccgaaatatcaaaaa

SEQ ID NO: 16756 - DNA, 25 bp, Artificial sequence
  SiRNA target sequence
gtgttaaaaccgaaatatcaaaaac

SEQ ID NO: 16757 - DNA, 25 bp, Artificial sequence
  SiRNA target sequence
tgttaaaaccgaaatatcaaaaacc

SEQ ID NO: 16758 - DNA, 25 bp, Artificial sequence
  SiRNA target sequence
gttaaaaccgaaatatcaaaaaccg

SEQ ID NO: 16759 - DNA, 25 bp, Artificial sequence
  SiRNA target sequence
ttaaaaccgaaatatcaaaaaccgt

SEQ ID NO: 16760 - DNA, 25 bp, Artificial sequence
  SiRNA target sequence
taaaaccgaaatatcaaaaaccgta

SEQ ID NO: 16761 - DNA, 25 bp, Artificial sequence
  SiRNA target sequence
aaaaccgaaatatcaaaaaccgtat

SEQ ID NO: 16762 - DNA, 25 bp, Artificial sequence
  SiRNA target sequence
aaaccgaaatatcaaaaaccgtatc

SEQ ID NO: 16763 - DNA, 25 bp, Artificial sequence
  SiRNA target sequence
aaccgaaatatcaaaaaccgtatca

SEQ ID NO: 16764 - DNA, 25 bp, Artificial sequence
  SiRNA target sequence
accgaaatatcaaaaaccgtatcac

SEQ ID NO: 16765 - DNA, 25 bp, Artificial sequence
  SiRNA target sequence
ccgaaatatcaaaaaccgtatcacc

SEQ ID NO: 16766 - DNA, 25 bp, Artificial sequence
  SiRNA target sequence
cgaaatatcaaaaaccgtatcacca

SEQ ID NO: 16767 - DNA, 25 bp, Artificial sequence
  SiRNA target sequence
gaaatatcaaaaaccgtatcaccac

SEQ ID NO: 16768 - DNA, 25 bp, Artificial sequence
  SiRNA target sequence
aaatatcaaaaaccgtatcaccaca

SEQ ID NO: 16769 - DNA, 25 bp, Artificial sequence
  SiRNA target sequence
aatatcaaaaaccgtatcaccacac

SEQ ID NO: 16770 - DNA, 25 bp, Artificial sequence
  SiRNA target sequence
atatcaaaaaccgtatcaccacact

SEQ ID NO: 16771 - DNA, 25 bp, Artificial sequence
  SiRNA target sequence
tatcaaaaaccgtatcaccacactt

SEQ ID NO: 16772 - DNA, 25 bp, Artificial sequence
  SiRNA target sequence
atcaaaaaccgtatcaccacacttc

SEQ ID NO: 16773 - DNA, 25 bp, Artificial sequence
  SiRNA target sequence
tcaaaaaccgtatcaccacacttcc

SEQ ID NO: 16774 - DNA, 25 bp, Artificial sequence
  SiRNA target sequence
caaaaaccgtatcaccacacttcca

SEQ ID NO: 16775 - DNA, 25 bp, Artificial sequence
  SiRNA target sequence
aaaaaccgtatcaccacacttccag

SEQ ID NO: 16776 - DNA, 25 bp, Artificial sequence
  SiRNA target sequence
aaaaccgtatcaccacacttccaga

SEQ ID NO: 16777 - DNA, 25 bp, Artificial sequence
  SiRNA target sequence
aaaccgtatcaccacacttccagat

SEQ ID NO: 16778 - DNA, 25 bp, Artificial sequence
  SiRNA target sequence
aaccgtatcaccacacttccagatt

SEQ ID NO: 16779 - DNA, 25 bp, Artificial sequence
  SiRNA target sequence
accgtatcaccacacttccagattt

SEQ ID NO: 16780 - DNA, 25 bp, Artificial sequence
  SiRNA target sequence
ccgtatcaccacacttccagatttc

SEQ ID NO: 16781 - DNA, 25 bp, Artificial sequence
  SiRNA target sequence
cgtatcaccacacttccagatttct

SEQ ID NO: 16782 - DNA, 25 bp, Artificial sequence
  SiRNA target sequence
gtatcaccacacttccagatttctc

SEQ ID NO: 16783 - DNA, 25 bp, Artificial sequence
  SiRNA target sequence
tatcaccacacttccagatttctca

SEQ ID NO: 16784 - DNA, 25 bp, Artificial sequence
  SiRNA target sequence
atcaccacacttccagatttctcat

SEQ ID NO: 16785 - DNA, 25 bp, Artificial sequence
  SiRNA target sequence
tcaccacacttccagatttctcatg

SEQ ID NO: 16786 - DNA, 25 bp, Artificial sequence
  SiRNA target sequence
caccacacttccagatttctcatgt

SEQ ID NO: 16787 - DNA, 25 bp, Artificial sequence
  SiRNA target sequence
accacacttccagatttctcatgtc

SEQ ID NO: 16788 - DNA, 25 bp, Artificial sequence
  SiRNA target sequence
ccacacttccagatttctcatgtct

SEQ ID NO: 16789 - DNA, 25 bp, Artificial sequence
  SiRNA target sequence
cacacttccagatttctcatgtctc

SEQ ID NO: 16790 - DNA, 25 bp, Artificial sequence
  SiRNA target sequence
acacttccagatttctcatgtctct

SEQ ID NO: 16791 - DNA, 25 bp, Artificial sequence
  SiRNA target sequence
cacttccagatttctcatgtctctt

SEQ ID NO: 16792 - DNA, 25 bp, Artificial sequence
  SiRNA target sequence
acttccagatttctcatgtctcttc

SEQ ID NO: 16793 - DNA, 25 bp, Artificial sequence
  SiRNA target sequence
cttccagatttctcatgtctcttct

SEQ ID NO: 16794 - DNA, 25 bp, Artificial sequence
  SiRNA target sequence
ttccagatttctcatgtctcttcta

SEQ ID NO: 16795 - DNA, 25 bp, Artificial sequence
  SiRNA target sequence
tccagatttctcatgtctcttctat

SEQ ID NO: 16796 - DNA, 25 bp, Artificial sequence
  SiRNA target sequence
ccagatttctcatgtctcttctatg

SEQ ID NO: 16797 - DNA, 25 bp, Artificial sequence
  SiRNA target sequence
cagatttctcatgtctcttctatgg

SEQ ID NO: 16798 - DNA, 25 bp, Artificial sequence
  SiRNA target sequence
agatttctcatgtctcttctatggg

SEQ ID NO: 16799 - DNA, 25 bp, Artificial sequence
  SiRNA target sequence
gatttctcatgtctcttctatgggc

SEQ ID NO: 16800 - DNA, 25 bp, Artificial sequence
  SiRNA target sequence
atttctcatgtctcttctatgggcg

SEQ ID NO: 16801 - DNA, 25 bp, Artificial sequence
  SiRNA target sequence
tttctcatgtctcttctatgggcgc

SEQ ID NO: 16802 - DNA, 25 bp, Artificial sequence
  SiRNA target sequence
ttctcatgtctcttctatgggcgca

SEQ ID NO: 16803 - DNA, 25 bp, Artificial sequence
  SiRNA target sequence
tctcatgtctcttctatgggcgcag

SEQ ID NO: 16804 - DNA, 25 bp, Artificial sequence
  SiRNA target sequence
ctcatgtctcttctatgggcgcaga

SEQ ID NO: 16805 - DNA, 25 bp, Artificial sequence
  SiRNA target sequence
tcatgtctcttctatgggcgcagat

SEQ ID NO: 16806 - DNA, 25 bp, Artificial sequence
  SiRNA target sequence
catgtctcttctatgggcgcagatt

SEQ ID NO: 16807 - DNA, 25 bp, Artificial sequence
  SiRNA target sequence
atgtctcttctatgggcgcagattt

SEQ ID NO: 16808 - DNA, 25 bp, Artificial sequence
  SiRNA target sequence
tgtctcttctatgggcgcagatttc

SEQ ID NO: 16809 - DNA, 25 bp, Artificial sequence
  SiRNA target sequence
gtctcttctatgggcgcagatttcg

SEQ ID NO: 16810 - DNA, 25 bp, Artificial sequence
  SiRNA target sequence
tctcttctatgggcgcagatttcga

SEQ ID NO: 16811 - DNA, 25 bp, Artificial sequence
  SiRNA target sequence
ctcttctatgggcgcagatttcgac

SEQ ID NO: 16812 - DNA, 25 bp, Artificial sequence
  SiRNA target sequence
tcttctatgggcgcagatttcgaca

SEQ ID NO: 16813 - DNA, 25 bp, Artificial sequence
  SiRNA target sequence
cttctatgggcgcagatttcgacat

SEQ ID NO: 16814 - DNA, 25 bp, Artificial sequence
  SiRNA target sequence
ttctatgggcgcagatttcgacata

SEQ ID NO: 16815 - DNA, 25 bp, Artificial sequence
  SiRNA target sequence
tctatgggcgcagatttcgacataa

SEQ ID NO: 16816 - DNA, 25 bp, Artificial sequence
  SiRNA target sequence
ctatgggcgcagatttcgacataaa

SEQ ID NO: 16817 - DNA, 25 bp, Artificial sequence
  SiRNA target sequence
tatgggcgcagatttcgacataaaa

SEQ ID NO: 16818 - DNA, 25 bp, Artificial sequence
  SiRNA target sequence
atgggcgcagatttcgacataaaac

SEQ ID NO: 16819 - DNA, 25 bp, Artificial sequence
  SiRNA target sequence
tgggcgcagatttcgacataaaaca

SEQ ID NO: 16820 - DNA, 25 bp, Artificial sequence
  SiRNA target sequence
gggcgcagatttcgacataaaacag

SEQ ID NO: 16821 - DNA, 25 bp, Artificial sequence
  SiRNA target sequence
ggcgcagatttcgacataaaacaga

SEQ ID NO: 16822 - DNA, 25 bp, Artificial sequence
  SiRNA target sequence
gcgcagatttcgacataaaacagac

SEQ ID NO: 16823 - DNA, 25 bp, Artificial sequence
  SiRNA target sequence
cgcagatttcgacataaaacagaca

SEQ ID NO: 16824 - DNA, 25 bp, Artificial sequence
  SiRNA target sequence
gcagatttcgacataaaacagacat

SEQ ID NO: 16825 - DNA, 25 bp, Artificial sequence
  SiRNA target sequence
cagatttcgacataaaacagacata

SEQ ID NO: 16826 - DNA, 25 bp, Artificial sequence
  SiRNA target sequence
agatttcgacataaaacagacatac

SEQ ID NO: 16827 - DNA, 25 bp, Artificial sequence
  SiRNA target sequence
gatttcgacataaaacagacatacg

SEQ ID NO: 16828 - DNA, 25 bp, Artificial sequence
  SiRNA target sequence
atttcgacataaaacagacatacgc

SEQ ID NO: 16829 - DNA, 25 bp, Artificial sequence
  SiRNA target sequence
tttcgacataaaacagacatacgcc

SEQ ID NO: 16830 - DNA, 25 bp, Artificial sequence
  SiRNA target sequence
ttcgacataaaacagacatacgcca

SEQ ID NO: 16831 - DNA, 25 bp, Artificial sequence
  SiRNA target sequence
tcgacataaaacagacatacgccac

SEQ ID NO: 16832 - DNA, 25 bp, Artificial sequence
  SiRNA target sequence
cgacataaaacagacatacgccacg

SEQ ID NO: 16833 - DNA, 25 bp, Artificial sequence
  SiRNA target sequence
gacataaaacagacatacgccacgt

SEQ ID NO: 16834 - DNA, 25 bp, Artificial sequence
  SiRNA target sequence
acataaaacagacatacgccacgtt

SEQ ID NO: 16835 - DNA, 25 bp, Artificial sequence
  SiRNA target sequence
cataaaacagacatacgccacgttc

SEQ ID NO: 16836 - DNA, 25 bp, Artificial sequence
  SiRNA target sequence
ataaaacagacatacgccacgttct

SEQ ID NO: 16837 - DNA, 25 bp, Artificial sequence
  SiRNA target sequence
taaaacagacatacgccacgttctg

SEQ ID NO: 16838 - DNA, 25 bp, Artificial sequence
  SiRNA target sequence
aaaacagacatacgccacgttctgc

SEQ ID NO: 16839 - DNA, 25 bp, Artificial sequence
  SiRNA target sequence
aaacagacatacgccacgttctgct

SEQ ID NO: 16840 - DNA, 25 bp, Artificial sequence
  SiRNA target sequence
aacagacatacgccacgttctgctt

SEQ ID NO: 16841 - DNA, 25 bp, Artificial sequence
  SiRNA target sequence
acagacatacgccacgttctgcttt

SEQ ID NO: 16842 - DNA, 25 bp, Artificial sequence
  SiRNA target sequence
cagacatacgccacgttctgcttta

SEQ ID NO: 16843 - DNA, 25 bp, Artificial sequence
  SiRNA target sequence
agacatacgccacgttctgctttaa

SEQ ID NO: 16844 - DNA, 25 bp, Artificial sequence
  SiRNA target sequence
gacatacgccacgttctgctttaac

SEQ ID NO: 16845 - DNA, 25 bp, Artificial sequence
  SiRNA target sequence
acatacgccacgttctgctttaaca

SEQ ID NO: 16846 - DNA, 25 bp, Artificial sequence
  SiRNA target sequence
catacgccacgttctgctttaacaa

SEQ ID NO: 16847 - DNA, 25 bp, Artificial sequence
  SiRNA target sequence
atacgccacgttctgctttaacaat

SEQ ID NO: 16848 - DNA, 25 bp, Artificial sequence
  SiRNA target sequence
tacgccacgttctgctttaacaatc

SEQ ID NO: 16849 - DNA, 25 bp, Artificial sequence
  SiRNA target sequence
acgccacgttctgctttaacaatct

SEQ ID NO: 16850 - DNA, 25 bp, Artificial sequence
  SiRNA target sequence
cgccacgttctgctttaacaatctt

SEQ ID NO: 16851 - DNA, 25 bp, Artificial sequence
  SiRNA target sequence
gccacgttctgctttaacaatcttt

SEQ ID NO: 16852 - DNA, 25 bp, Artificial sequence
  SiRNA target sequence
ccacgttctgctttaacaatctttt

SEQ ID NO: 16853 - DNA, 25 bp, Artificial sequence
  SiRNA target sequence
cacgttctgctttaacaatcttttg

SEQ ID NO: 16854 - DNA, 25 bp, Artificial sequence
  SiRNA target sequence
acgttctgctttaacaatcttttgc

SEQ ID NO: 16855 - DNA, 25 bp, Artificial sequence
  SiRNA target sequence
cgttctgctttaacaatcttttgct

SEQ ID NO: 16856 - DNA, 25 bp, Artificial sequence
  SiRNA target sequence
gttctgctttaacaatcttttgcta

SEQ ID NO: 16857 - DNA, 25 bp, Artificial sequence
  SiRNA target sequence
ttctgctttaacaatcttttgctac

SEQ ID NO: 16858 - DNA, 25 bp, Artificial sequence
  SiRNA target sequence
tctgctttaacaatcttttgctaca

SEQ ID NO: 16859 - DNA, 25 bp, Artificial sequence
  SiRNA target sequence
ctgctttaacaatcttttgctacaa

SEQ ID NO: 16860 - DNA, 25 bp, Artificial sequence
  SiRNA target sequence
tgctttaacaatcttttgctacaaa

SEQ ID NO: 16861 - DNA, 25 bp, Artificial sequence
  SiRNA target sequence
gctttaacaatcttttgctacaaac

SEQ ID NO: 16862 - DNA, 25 bp, Artificial sequence
  SiRNA target sequence
ctttaacaatcttttgctacaaacg

SEQ ID NO: 16863 - DNA, 25 bp, Artificial sequence
  SiRNA target sequence
tttaacaatcttttgctacaaacga

SEQ ID NO: 16864 - DNA, 25 bp, Artificial sequence
  SiRNA target sequence
ttaacaatcttttgctacaaacgag

SEQ ID NO: 16865 - DNA, 25 bp, Artificial sequence
  SiRNA target sequence
taacaatcttttgctacaaacgagc

SEQ ID NO: 16866 - DNA, 25 bp, Artificial sequence
  SiRNA target sequence
aacaatcttttgctacaaacgagca

SEQ ID NO: 16867 - DNA, 25 bp, Artificial sequence
  SiRNA target sequence
acaatcttttgctacaaacgagcat

SEQ ID NO: 16868 - DNA, 25 bp, Artificial sequence
  SiRNA target sequence
caatcttttgctacaaacgagcata

SEQ ID NO: 16869 - DNA, 25 bp, Artificial sequence
  SiRNA target sequence
aatcttttgctacaaacgagcatag

SEQ ID NO: 16870 - DNA, 25 bp, Artificial sequence
  SiRNA target sequence
atcttttgctacaaacgagcataga

SEQ ID NO: 16871 - DNA, 25 bp, Artificial sequence
  SiRNA target sequence
tcttttgctacaaacgagcatagac

SEQ ID NO: 16872 - DNA, 25 bp, Artificial sequence
  SiRNA target sequence
cttttgctacaaacgagcatagacc

SEQ ID NO: 16873 - DNA, 25 bp, Artificial sequence
  SiRNA target sequence
ttttgctacaaacgagcatagacca

SEQ ID NO: 16874 - DNA, 25 bp, Artificial sequence
  SiRNA target sequence
tttgctacaaacgagcatagaccaa

SEQ ID NO: 16875 - DNA, 25 bp, Artificial sequence
  SiRNA target sequence
ttgctacaaacgagcatagaccaag

SEQ ID NO: 16876 - DNA, 25 bp, Artificial sequence
  SiRNA target sequence
tgctacaaacgagcatagaccaaga

SEQ ID NO: 16877 - DNA, 25 bp, Artificial sequence
  SiRNA target sequence
gctacaaacgagcatagaccaagac

SEQ ID NO: 16878 - DNA, 25 bp, Artificial sequence
  SiRNA target sequence
ctacaaacgagcatagaccaagaca

SEQ ID NO: 16879 - DNA, 25 bp, Artificial sequence
  SiRNA target sequence
tacaaacgagcatagaccaagacaa

SEQ ID NO: 16880 - DNA, 25 bp, Artificial sequence
  SiRNA target sequence
acaaacgagcatagaccaagacaaa

SEQ ID NO: 16881 - DNA, 25 bp, Artificial sequence
  SiRNA target sequence
caaacgagcatagaccaagacaaaa

SEQ ID NO: 16882 - DNA, 25 bp, Artificial sequence
  SiRNA target sequence
aaacgagcatagaccaagacaaaat

SEQ ID NO: 16883 - DNA, 25 bp, Artificial sequence
  SiRNA target sequence
aacgagcatagaccaagacaaaata

SEQ ID NO: 16884 - DNA, 25 bp, Artificial sequence
  SiRNA target sequence
acgagcatagaccaagacaaaatat

SEQ ID NO: 16885 - DNA, 25 bp, Artificial sequence
  SiRNA target sequence
cgagcatagaccaagacaaaatatt

SEQ ID NO: 16886 - DNA, 25 bp, Artificial sequence
  SiRNA target sequence
gagcatagaccaagacaaaatattt

SEQ ID NO: 16887 - DNA, 25 bp, Artificial sequence
  SiRNA target sequence
agcatagaccaagacaaaatattta

SEQ ID NO: 16888 - DNA, 25 bp, Artificial sequence
  SiRNA target sequence
gcatagaccaagacaaaatatttag

SEQ ID NO: 16889 - DNA, 25 bp, Artificial sequence
  SiRNA target sequence
catagaccaagacaaaatatttaga

SEQ ID NO: 16890 - DNA, 25 bp, Artificial sequence
  SiRNA target sequence
atagaccaagacaaaatatttagaa

SEQ ID NO: 16891 - DNA, 25 bp, Artificial sequence
  SiRNA target sequence
tagaccaagacaaaatatttagaat

SEQ ID NO: 16892 - DNA, 25 bp, Artificial sequence
  SiRNA target sequence
agaccaagacaaaatatttagaata

SEQ ID NO: 16893 - DNA, 25 bp, Artificial sequence
  SiRNA target sequence
gaccaagacaaaatatttagaataa

SEQ ID NO: 16894 - DNA, 25 bp, Artificial sequence
  SiRNA target sequence
accaagacaaaatatttagaataag

SEQ ID NO: 16895 - DNA, 25 bp, Artificial sequence
  SiRNA target sequence
ccaagacaaaatatttagaataaga

SEQ ID NO: 16896 - DNA, 25 bp, Artificial sequence
  SiRNA target sequence
caagacaaaatatttagaataagag

SEQ ID NO: 16897 - DNA, 25 bp, Artificial sequence
  SiRNA target sequence
aagacaaaatatttagaataagagg

SEQ ID NO: 16898 - DNA, 25 bp, Artificial sequence
  SiRNA target sequence
agacaaaatatttagaataagaggt

SEQ ID NO: 16899 - DNA, 25 bp, Artificial sequence
  SiRNA target sequence
gacaaaatatttagaataagaggta

SEQ ID NO: 16900 - DNA, 25 bp, Artificial sequence
  SiRNA target sequence
acaaaatatttagaataagaggtac

SEQ ID NO: 16901 - DNA, 25 bp, Artificial sequence
  SiRNA target sequence
caaaatatttagaataagaggtacc

SEQ ID NO: 16902 - DNA, 25 bp, Artificial sequence
  SiRNA target sequence
aaaatatttagaataagaggtaccc

SEQ ID NO: 16903 - DNA, 25 bp, Artificial sequence
  SiRNA target sequence
aaatatttagaataagaggtaccca

SEQ ID NO: 16904 - DNA, 25 bp, Artificial sequence
  SiRNA target sequence
aatatttagaataagaggtacccac

SEQ ID NO: 16905 - DNA, 25 bp, Artificial sequence
  SiRNA target sequence
atatttagaataagaggtacccaca

SEQ ID NO: 16906 - DNA, 25 bp, Artificial sequence
  SiRNA target sequence
tatttagaataagaggtacccacat

SEQ ID NO: 16907 - DNA, 25 bp, Artificial sequence
  SiRNA target sequence
atttagaataagaggtacccacatg

SEQ ID NO: 16908 - DNA, 25 bp, Artificial sequence
  SiRNA target sequence
tttagaataagaggtacccacatgt

SEQ ID NO: 16909 - DNA, 25 bp, Artificial sequence
  SiRNA target sequence
ttagaataagaggtacccacatgtt

SEQ ID NO: 16910 - DNA, 25 bp, Artificial sequence
  SiRNA target sequence
tagaataagaggtacccacatgttt

SEQ ID NO: 16911 - DNA, 25 bp, Artificial sequence
  SiRNA target sequence
agaataagaggtacccacatgttta

SEQ ID NO: 16912 - DNA, 25 bp, Artificial sequence
  SiRNA target sequence
gaataagaggtacccacatgtttaa

SEQ ID NO: 16913 - DNA, 25 bp, Artificial sequence
  SiRNA target sequence
aataagaggtacccacatgtttaaa

SEQ ID NO: 16914 - DNA, 25 bp, Artificial sequence
  SiRNA target sequence
ataagaggtacccacatgtttaaaa

SEQ ID NO: 16915 - DNA, 25 bp, Artificial sequence
  SiRNA target sequence
taagaggtacccacatgtttaaaaa

SEQ ID NO: 16916 - DNA, 25 bp, Artificial sequence
  SiRNA target sequence
aagaggtacccacatgtttaaaaat

SEQ ID NO: 16917 - DNA, 25 bp, Artificial sequence
  SiRNA target sequence
agaggtacccacatgtttaaaaatc

SEQ ID NO: 16918 - DNA, 25 bp, Artificial sequence
  SiRNA target sequence
gaggtacccacatgtttaaaaatct

SEQ ID NO: 16919 - DNA, 25 bp, Artificial sequence
  SiRNA target sequence
aggtacccacatgtttaaaaatcta

SEQ ID NO: 16920 - DNA, 25 bp, Artificial sequence
  SiRNA target sequence
ggtacccacatgtttaaaaatctac

SEQ ID NO: 16921 - DNA, 25 bp, Artificial sequence
  SiRNA target sequence
gtacccacatgtttaaaaatctact

SEQ ID NO: 16922 - DNA, 25 bp, Artificial sequence
  SiRNA target sequence
tacccacatgtttaaaaatctactt

SEQ ID NO: 16923 - DNA, 25 bp, Artificial sequence
  SiRNA target sequence
acccacatgtttaaaaatctactta

SEQ ID NO: 16924 - DNA, 25 bp, Artificial sequence
  SiRNA target sequence
cccacatgtttaaaaatctacttac

SEQ ID NO: 16925 - DNA, 25 bp, Artificial sequence
  SiRNA target sequence
ccacatgtttaaaaatctacttact

SEQ ID NO: 16926 - DNA, 25 bp, Artificial sequence
  SiRNA target sequence
cacatgtttaaaaatctacttacta

SEQ ID NO: 16927 - DNA, 25 bp, Artificial sequence
  SiRNA target sequence
acatgtttaaaaatctacttactaa

SEQ ID NO: 16928 - DNA, 25 bp, Artificial sequence
  SiRNA target sequence
catgtttaaaaatctacttactaaa

SEQ ID NO: 16929 - DNA, 25 bp, Artificial sequence
  SiRNA target sequence
atgtttaaaaatctacttactaaat

SEQ ID NO: 16930 - DNA, 25 bp, Artificial sequence
  SiRNA target sequence
tgtttaaaaatctacttactaaatt

SEQ ID NO: 16931 - DNA, 25 bp, Artificial sequence
  SiRNA target sequence
gtttaaaaatctacttactaaattc

SEQ ID NO: 16932 - DNA, 25 bp, Artificial sequence
  SiRNA target sequence
tttaaaaatctacttactaaattcc

SEQ ID NO: 16933 - DNA, 25 bp, Artificial sequence
  SiRNA target sequence
ttaaaaatctacttactaaattcca

SEQ ID NO: 16934 - DNA, 25 bp, Artificial sequence
  SiRNA target sequence
taaaaatctacttactaaattccat

SEQ ID NO: 16935 - DNA, 25 bp, Artificial sequence
  SiRNA target sequence
aaaaatctacttactaaattccata

SEQ ID NO: 16936 - DNA, 25 bp, Artificial sequence
  SiRNA target sequence
aaaatctacttactaaattccatac

SEQ ID NO: 16937 - DNA, 25 bp, Artificial sequence
  SiRNA target sequence
aaatctacttactaaattccataca

SEQ ID NO: 16938 - DNA, 25 bp, Artificial sequence
  SiRNA target sequence
aatctacttactaaattccatacag

SEQ ID NO: 16939 - DNA, 25 bp, Artificial sequence
  SiRNA target sequence
atctacttactaaattccatacagt

SEQ ID NO: 16940 - DNA, 25 bp, Artificial sequence
  SiRNA target sequence
tctacttactaaattccatacagta

SEQ ID NO: 16941 - DNA, 25 bp, Artificial sequence
  SiRNA target sequence
ctacttactaaattccatacagtaa

SEQ ID NO: 16942 - DNA, 25 bp, Artificial sequence
  SiRNA target sequence
tacttactaaattccatacagtaat

SEQ ID NO: 16943 - DNA, 25 bp, Artificial sequence
  SiRNA target sequence
acttactaaattccatacagtaatt

SEQ ID NO: 16944 - DNA, 25 bp, Artificial sequence
  SiRNA target sequence
cttactaaattccatacagtaattg

SEQ ID NO: 16945 - DNA, 25 bp, Artificial sequence
  SiRNA target sequence
ttactaaattccatacagtaattgg

SEQ ID NO: 16946 - DNA, 25 bp, Artificial sequence
  SiRNA target sequence
tactaaattccatacagtaattggt

SEQ ID NO: 16947 - DNA, 25 bp, Artificial sequence
  SiRNA target sequence
actaaattccatacagtaattggta

SEQ ID NO: 16948 - DNA, 25 bp, Artificial sequence
  SiRNA target sequence
ctaaattccatacagtaattggtag

SEQ ID NO: 16949 - DNA, 25 bp, Artificial sequence
  SiRNA target sequence
taaattccatacagtaattggtaga

SEQ ID NO: 16950 - DNA, 25 bp, Artificial sequence
  SiRNA target sequence
aaattccatacagtaattggtagaa

SEQ ID NO: 16951 - DNA, 25 bp, Artificial sequence
  SiRNA target sequence
aattccatacagtaattggtagaag

SEQ ID NO: 16952 - DNA, 25 bp, Artificial sequence
  SiRNA target sequence
attccatacagtaattggtagaagt

SEQ ID NO: 16953 - DNA, 25 bp, Artificial sequence
  SiRNA target sequence
ttccatacagtaattggtagaagta

SEQ ID NO: 16954 - DNA, 25 bp, Artificial sequence
  SiRNA target sequence
tccatacagtaattggtagaagtaa

SEQ ID NO: 16955 - DNA, 25 bp, Artificial sequence
  SiRNA target sequence
ccatacagtaattggtagaagtaaa

SEQ ID NO: 16956 - DNA, 25 bp, Artificial sequence
  SiRNA target sequence
catacagtaattggtagaagtaaag

SEQ ID NO: 16957 - DNA, 25 bp, Artificial sequence
  SiRNA target sequence
atacagtaattggtagaagtaaaga

SEQ ID NO: 16958 - DNA, 25 bp, Artificial sequence
  SiRNA target sequence
tacagtaattggtagaagtaaagat

SEQ ID NO: 16959 - DNA, 25 bp, Artificial sequence
  SiRNA target sequence
acagtaattggtagaagtaaagata

SEQ ID NO: 16960 - DNA, 25 bp, Artificial sequence
  SiRNA target sequence
cagtaattggtagaagtaaagatat

SEQ ID NO: 16961 - DNA, 25 bp, Artificial sequence
  SiRNA target sequence
agtaattggtagaagtaaagatatc

SEQ ID NO: 16962 - DNA, 25 bp, Artificial sequence
  SiRNA target sequence
gtaattggtagaagtaaagatatct

SEQ ID NO: 16963 - DNA, 25 bp, Artificial sequence
  SiRNA target sequence
taattggtagaagtaaagatatctt

SEQ ID NO: 16964 - DNA, 25 bp, Artificial sequence
  SiRNA target sequence
aattggtagaagtaaagatatcttt

SEQ ID NO: 16965 - DNA, 25 bp, Artificial sequence
  SiRNA target sequence
attggtagaagtaaagatatcttta

SEQ ID NO: 16966 - DNA, 25 bp, Artificial sequence
  SiRNA target sequence
ttggtagaagtaaagatatctttac

SEQ ID NO: 16967 - DNA, 25 bp, Artificial sequence
  SiRNA target sequence
tggtagaagtaaagatatctttaca

SEQ ID NO: 16968 - DNA, 25 bp, Artificial sequence
  SiRNA target sequence
ggtagaagtaaagatatctttacac

SEQ ID NO: 16969 - DNA, 25 bp, Artificial sequence
  SiRNA target sequence
gtagaagtaaagatatctttacaca

SEQ ID NO: 16970 - DNA, 25 bp, Artificial sequence
  SiRNA target sequence
tagaagtaaagatatctttacacaa

SEQ ID NO: 16971 - DNA, 25 bp, Artificial sequence
  SiRNA target sequence
agaagtaaagatatctttacacaaa

SEQ ID NO: 16972 - DNA, 25 bp, Artificial sequence
  SiRNA target sequence
gaagtaaagatatctttacacaaat

SEQ ID NO: 16973 - DNA, 25 bp, Artificial sequence
  SiRNA target sequence
aagtaaagatatctttacacaaata

SEQ ID NO: 16974 - DNA, 25 bp, Artificial sequence
  SiRNA target sequence
agtaaagatatctttacacaaatag

SEQ ID NO: 16975 - DNA, 25 bp, Artificial sequence
  SiRNA target sequence
gtaaagatatctttacacaaataga

SEQ ID NO: 16976 - DNA, 25 bp, Artificial sequence
  SiRNA target sequence
taaagatatctttacacaaatagag

SEQ ID NO: 16977 - DNA, 25 bp, Artificial sequence
  SiRNA target sequence
aaagatatctttacacaaatagagg

SEQ ID NO: 16978 - DNA, 25 bp, Artificial sequence
  SiRNA target sequence
aagatatctttacacaaatagaggt

SEQ ID NO: 16979 - DNA, 25 bp, Artificial sequence
  SiRNA target sequence
agatatctttacacaaatagaggta

SEQ ID NO: 16980 - DNA, 25 bp, Artificial sequence
  SiRNA target sequence
gatatctttacacaaatagaggtag

SEQ ID NO: 16981 - DNA, 25 bp, Artificial sequence
  SiRNA target sequence
atatctttacacaaatagaggtaga

SEQ ID NO: 16982 - DNA, 25 bp, Artificial sequence
  SiRNA target sequence
tatctttacacaaatagaggtagac

SEQ ID NO: 16983 - DNA, 25 bp, Artificial sequence
  SiRNA target sequence
atctttacacaaatagaggtagaca

SEQ ID NO: 16984 - DNA, 25 bp, Artificial sequence
  SiRNA target sequence
tctttacacaaatagaggtagacat

SEQ ID NO: 16985 - DNA, 25 bp, Artificial sequence
  SiRNA target sequence
ctttacacaaatagaggtagacata

SEQ ID NO: 16986 - DNA, 25 bp, Artificial sequence
  SiRNA target sequence
tttacacaaatagaggtagacataa

SEQ ID NO: 16987 - DNA, 25 bp, Artificial sequence
  SiRNA target sequence
ttacacaaatagaggtagacataaa

SEQ ID NO: 16988 - DNA, 25 bp, Artificial sequence
  SiRNA target sequence
tacacaaatagaggtagacataaaa

SEQ ID NO: 16989 - DNA, 25 bp, Artificial sequence
  SiRNA target sequence
acacaaatagaggtagacataaaaa

SEQ ID NO: 16990 - DNA, 25 bp, Artificial sequence
  SiRNA target sequence
cacaaatagaggtagacataaaaaa

SEQ ID NO: 16991 - DNA, 25 bp, Artificial sequence
  SiRNA target sequence
acaaatagaggtagacataaaaaat

SEQ ID NO: 16992 - DNA, 25 bp, Artificial sequence
  SiRNA target sequence
caaatagaggtagacataaaaaata

SEQ ID NO: 16993 - DNA, 25 bp, Artificial sequence
  SiRNA target sequence
aaatagaggtagacataaaaaataa

SEQ ID NO: 16994 - DNA, 25 bp, Artificial sequence
  SiRNA target sequence
aatagaggtagacataaaaaataaa

SEQ ID NO: 16995 - DNA, 25 bp, Artificial sequence
  SiRNA target sequence
atagaggtagacataaaaaataaat

SEQ ID NO: 16996 - DNA, 25 bp, Artificial sequence
  SiRNA target sequence
tagaggtagacataaaaaataaata

SEQ ID NO: 16997 - DNA, 25 bp, Artificial sequence
  SiRNA target sequence
agaggtagacataaaaaataaatac

SEQ ID NO: 16998 - DNA, 25 bp, Artificial sequence
  SiRNA target sequence
gaggtagacataaaaaataaataca

SEQ ID NO: 16999 - DNA, 25 bp, Artificial sequence
  SiRNA target sequence
aggtagacataaaaaataaatacaa

SEQ ID NO: 17000 - DNA, 25 bp, Artificial sequence
  SiRNA target sequence
ggtagacataaaaaataaatacaat

SEQ ID NO: 17001 - DNA, 25 bp, Artificial sequence
  SiRNA target sequence
gtagacataaaaaataaatacaata

SEQ ID NO: 17002 - DNA, 25 bp, Artificial sequence
  SiRNA target sequence
tagacataaaaaataaatacaataa

SEQ ID NO: 17003 - DNA, 25 bp, Artificial sequence
  SiRNA target sequence
agacataaaaaataaatacaataat

SEQ ID NO: 17004 - DNA, 25 bp, Artificial sequence
  SiRNA target sequence
gacataaaaaataaatacaataata

SEQ ID NO: 17005 - DNA, 25 bp, Artificial sequence
  SiRNA target sequence
acataaaaaataaatacaataatat

SEQ ID NO: 17006 - DNA, 25 bp, Artificial sequence
  SiRNA target sequence
cataaaaaataaatacaataatatg

SEQ ID NO: 17007 - DNA, 25 bp, Artificial sequence
  SiRNA target sequence
ataaaaaataaatacaataatatgt

SEQ ID NO: 17008 - DNA, 25 bp, Artificial sequence
  SiRNA target sequence
taaaaaataaatacaataatatgtg

SEQ ID NO: 17009 - DNA, 25 bp, Artificial sequence
  SiRNA target sequence
aaaaaataaatacaataatatgtgt

SEQ ID NO: 17010 - DNA, 25 bp, Artificial sequence
  SiRNA target sequence
aaaaataaatacaataatatgtgta

SEQ ID NO: 17011 - DNA, 25 bp, Artificial sequence
  SiRNA target sequence
aaaataaatacaataatatgtgtat

SEQ ID NO: 17012 - DNA, 25 bp, Artificial sequence
  SiRNA target sequence
aaataaatacaataatatgtgtata

SEQ ID NO: 17013 - DNA, 25 bp, Artificial sequence
  SiRNA target sequence
aataaatacaataatatgtgtataa

SEQ ID NO: 17014 - DNA, 25 bp, Artificial sequence
  SiRNA target sequence
ataaatacaataatatgtgtataaa

SEQ ID NO: 17015 - DNA, 25 bp, Artificial sequence
  SiRNA target sequence
taaatacaataatatgtgtataaaa

SEQ ID NO: 17016 - DNA, 25 bp, Artificial sequence
  SiRNA target sequence
aaatacaataatatgtgtataaaaa

SEQ ID NO: 17017 - DNA, 25 bp, Artificial sequence
  SiRNA target sequence
aatacaataatatgtgtataaaaat

SEQ ID NO: 17018 - DNA, 25 bp, Artificial sequence
  SiRNA target sequence
atacaataatatgtgtataaaaatg

SEQ ID NO: 17019 - DNA, 25 bp, Artificial sequence
  SiRNA target sequence
tacaataatatgtgtataaaaatga

SEQ ID NO: 17020 - DNA, 25 bp, Artificial sequence
  SiRNA target sequence
acaataatatgtgtataaaaatgat

SEQ ID NO: 17021 - DNA, 25 bp, Artificial sequence
  SiRNA target sequence
caataatatgtgtataaaaatgata

SEQ ID NO: 17022 - DNA, 25 bp, Artificial sequence
  SiRNA target sequence
aataatatgtgtataaaaatgatac

SEQ ID NO: 17023 - DNA, 25 bp, Artificial sequence
  SiRNA target sequence
ataatatgtgtataaaaatgataca

SEQ ID NO: 17024 - DNA, 25 bp, Artificial sequence
  SiRNA target sequence
taatatgtgtataaaaatgatacag

SEQ ID NO: 17025 - DNA, 25 bp, Artificial sequence
  SiRNA target sequence
aatatgtgtataaaaatgatacagc

SEQ ID NO: 17026 - DNA, 25 bp, Artificial sequence
  SiRNA target sequence
atatgtgtataaaaatgatacagcc

SEQ ID NO: 17027 - DNA, 25 bp, Artificial sequence
  SiRNA target sequence
tatgtgtataaaaatgatacagcca

SEQ ID NO: 17028 - DNA, 25 bp, Artificial sequence
  SiRNA target sequence
atgtgtataaaaatgatacagccag

SEQ ID NO: 17029 - DNA, 25 bp, Artificial sequence
  SiRNA target sequence
tgtgtataaaaatgatacagccagc

SEQ ID NO: 17030 - DNA, 25 bp, Artificial sequence
  SiRNA target sequence
gtgtataaaaatgatacagccagct

SEQ ID NO: 17031 - DNA, 25 bp, Artificial sequence
  SiRNA target sequence
tgtataaaaatgatacagccagcta

SEQ ID NO: 17032 - DNA, 25 bp, Artificial sequence
  SiRNA target sequence
gtataaaaatgatacagccagctat

SEQ ID NO: 17033 - DNA, 25 bp, Artificial sequence
  SiRNA target sequence
tataaaaatgatacagccagctatt

SEQ ID NO: 17034 - DNA, 25 bp, Artificial sequence
  SiRNA target sequence
ataaaaatgatacagccagctatta

SEQ ID NO: 17035 - DNA, 25 bp, Artificial sequence
  SiRNA target sequence
taaaaatgatacagccagctattaa

SEQ ID NO: 17036 - DNA, 25 bp, Artificial sequence
  SiRNA target sequence
aaaaatgatacagccagctattaaa

SEQ ID NO: 17037 - DNA, 25 bp, Artificial sequence
  SiRNA target sequence
aaaatgatacagccagctattaaag

SEQ ID NO: 17038 - DNA, 25 bp, Artificial sequence
  SiRNA target sequence
aaatgatacagccagctattaaagg

SEQ ID NO: 17039 - DNA, 25 bp, Artificial sequence
  SiRNA target sequence
aatgatacagccagctattaaaggt

SEQ ID NO: 17040 - DNA, 25 bp, Artificial sequence
  SiRNA target sequence
atgatacagccagctattaaaggtg

SEQ ID NO: 17041 - DNA, 25 bp, Artificial sequence
  SiRNA target sequence
tgatacagccagctattaaaggtgc

SEQ ID NO: 17042 - DNA, 25 bp, Artificial sequence
  SiRNA target sequence
gatacagccagctattaaaggtgct

SEQ ID NO: 17043 - DNA, 25 bp, Artificial sequence
  SiRNA target sequence
atacagccagctattaaaggtgctt

SEQ ID NO: 17044 - DNA, 25 bp, Artificial sequence
  SiRNA target sequence
tacagccagctattaaaggtgcttc

SEQ ID NO: 17045 - DNA, 25 bp, Artificial sequence
  SiRNA target sequence
acagccagctattaaaggtgcttca

SEQ ID NO: 17046 - DNA, 25 bp, Artificial sequence
  SiRNA target sequence
cagccagctattaaaggtgcttcat

SEQ ID NO: 17047 - DNA, 25 bp, Artificial sequence
  SiRNA target sequence
agccagctattaaaggtgcttcatg

SEQ ID NO: 17048 - DNA, 25 bp, Artificial sequence
  SiRNA target sequence
gccagctattaaaggtgcttcatgt

SEQ ID NO: 17049 - DNA, 25 bp, Artificial sequence
  SiRNA target sequence
ccagctattaaaggtgcttcatgta

SEQ ID NO: 17050 - DNA, 25 bp, Artificial sequence
  SiRNA target sequence
cagctattaaaggtgcttcatgtat

SEQ ID NO: 17051 - DNA, 25 bp, Artificial sequence
  SiRNA target sequence
agctattaaaggtgcttcatgtata

SEQ ID NO: 17052 - DNA, 25 bp, Artificial sequence
  SiRNA target sequence
gctattaaaggtgcttcatgtatat

SEQ ID NO: 17053 - DNA, 25 bp, Artificial sequence
  SiRNA target sequence
ctattaaaggtgcttcatgtatata

SEQ ID NO: 17054 - DNA, 25 bp, Artificial sequence
  SiRNA target sequence
tattaaaggtgcttcatgtatatac

SEQ ID NO: 17055 - DNA, 25 bp, Artificial sequence
  SiRNA target sequence
attaaaggtgcttcatgtatatacg

SEQ ID NO: 17056 - DNA, 25 bp, Artificial sequence
  SiRNA target sequence
ttaaaggtgcttcatgtatatacgt

SEQ ID NO: 17057 - DNA, 25 bp, Artificial sequence
  SiRNA target sequence
taaaggtgcttcatgtatatacgtg

SEQ ID NO: 17058 - DNA, 25 bp, Artificial sequence
  SiRNA target sequence
aaaggtgcttcatgtatatacgtgg

SEQ ID NO: 17059 - DNA, 25 bp, Artificial sequence
  SiRNA target sequence
aaggtgcttcatgtatatacgtggg

SEQ ID NO: 17060 - DNA, 25 bp, Artificial sequence
  SiRNA target sequence
aggtgcttcatgtatatacgtgggt

SEQ ID NO: 17061 - DNA, 25 bp, Artificial sequence
  SiRNA target sequence
ggtgcttcatgtatatacgtgggta

SEQ ID NO: 17062 - DNA, 25 bp, Artificial sequence
  SiRNA target sequence
gtgcttcatgtatatacgtgggtaa

SEQ ID NO: 17063 - DNA, 25 bp, Artificial sequence
  SiRNA target sequence
tgcttcatgtatatacgtgggtaat

SEQ ID NO: 17064 - DNA, 25 bp, Artificial sequence
  SiRNA target sequence
gcttcatgtatatacgtgggtaatt

SEQ ID NO: 17065 - DNA, 25 bp, Artificial sequence
  SiRNA target sequence
cttcatgtatatacgtgggtaatta

SEQ ID NO: 17066 - DNA, 25 bp, Artificial sequence
  SiRNA target sequence
ttcatgtatatacgtgggtaattat

SEQ ID NO: 17067 - DNA, 25 bp, Artificial sequence
  SiRNA target sequence
tcatgtatatacgtgggtaattata

SEQ ID NO: 17068 - DNA, 25 bp, Artificial sequence
  SiRNA target sequence
catgtatatacgtgggtaattatat

SEQ ID NO: 17069 - DNA, 25 bp, Artificial sequence
  SiRNA target sequence
atgtatatacgtgggtaattatatg

SEQ ID NO: 17070 - DNA, 25 bp, Artificial sequence
  SiRNA target sequence
tgtatatacgtgggtaattatatgc

SEQ ID NO: 17071 - DNA, 25 bp, Artificial sequence
  SiRNA target sequence
gtatatacgtgggtaattatatgca

SEQ ID NO: 17072 - DNA, 25 bp, Artificial sequence
  SiRNA target sequence
tatatacgtgggtaattatatgcag

SEQ ID NO: 17073 - DNA, 25 bp, Artificial sequence
  SiRNA target sequence
atatacgtgggtaattatatgcagc

SEQ ID NO: 17074 - DNA, 25 bp, Artificial sequence
  SiRNA target sequence
tatacgtgggtaattatatgcagca

SEQ ID NO: 17075 - DNA, 25 bp, Artificial sequence
  SiRNA target sequence
atacgtgggtaattatatgcagcag

SEQ ID NO: 17076 - DNA, 25 bp, Artificial sequence
  SiRNA target sequence
tacgtgggtaattatatgcagcagc

SEQ ID NO: 17077 - DNA, 25 bp, Artificial sequence
  SiRNA target sequence
acgtgggtaattatatgcagcagct

SEQ ID NO: 17078 - DNA, 25 bp, Artificial sequence
  SiRNA target sequence
cgtgggtaattatatgcagcagcta

SEQ ID NO: 17079 - DNA, 25 bp, Artificial sequence
  SiRNA target sequence
gtgggtaattatatgcagcagctag

SEQ ID NO: 17080 - DNA, 25 bp, Artificial sequence
  SiRNA target sequence
tgggtaattatatgcagcagctagg

SEQ ID NO: 17081 - DNA, 25 bp, Artificial sequence
  SiRNA target sequence
gggtaattatatgcagcagctagga

SEQ ID NO: 17082 - DNA, 25 bp, Artificial sequence
  SiRNA target sequence
ggtaattatatgcagcagctaggag

SEQ ID NO: 17083 - DNA, 25 bp, Artificial sequence
  SiRNA target sequence
gtaattatatgcagcagctaggagt

SEQ ID NO: 17084 - DNA, 25 bp, Artificial sequence
  SiRNA target sequence
taattatatgcagcagctaggagta

SEQ ID NO: 17085 - DNA, 25 bp, Artificial sequence
  SiRNA target sequence
aattatatgcagcagctaggagtaa

SEQ ID NO: 17086 - DNA, 25 bp, Artificial sequence
  SiRNA target sequence
attatatgcagcagctaggagtaat

SEQ ID NO: 17087 - DNA, 25 bp, Artificial sequence
  SiRNA target sequence
ttatatgcagcagctaggagtaatt

SEQ ID NO: 17088 - DNA, 25 bp, Artificial sequence
  SiRNA target sequence
tatatgcagcagctaggagtaatta

SEQ ID NO: 17089 - DNA, 25 bp, Artificial sequence
  SiRNA target sequence
atatgcagcagctaggagtaattag

SEQ ID NO: 17090 - DNA, 25 bp, Artificial sequence
  SiRNA target sequence
tatgcagcagctaggagtaattagt

SEQ ID NO: 17091 - DNA, 25 bp, Artificial sequence
  SiRNA target sequence
atgcagcagctaggagtaattagtc

SEQ ID NO: 17092 - DNA, 25 bp, Artificial sequence
  SiRNA target sequence
tgcagcagctaggagtaattagtct

SEQ ID NO: 17093 - DNA, 25 bp, Artificial sequence
  SiRNA target sequence
gcagcagctaggagtaattagtctt

SEQ ID NO: 17094 - DNA, 25 bp, Artificial sequence
  SiRNA target sequence
cagcagctaggagtaattagtcttg

SEQ ID NO: 17095 - DNA, 25 bp, Artificial sequence
  SiRNA target sequence
agcagctaggagtaattagtcttgg

SEQ ID NO: 17096 - DNA, 25 bp, Artificial sequence
  SiRNA target sequence
gcagctaggagtaattagtcttggt

SEQ ID NO: 17097 - DNA, 25 bp, Artificial sequence
  SiRNA target sequence
cagctaggagtaattagtcttggtg

SEQ ID NO: 17098 - DNA, 25 bp, Artificial sequence
  SiRNA target sequence
agctaggagtaattagtcttggtgg

SEQ ID NO: 17099 - DNA, 25 bp, Artificial sequence
  SiRNA target sequence
gctaggagtaattagtcttggtggg

SEQ ID NO: 17100 - DNA, 25 bp, Artificial sequence
  SiRNA target sequence
ctaggagtaattagtcttggtgggg

SEQ ID NO: 17101 - DNA, 25 bp, Artificial sequence
  SiRNA target sequence
taggagtaattagtcttggtgggga

SEQ ID NO: 17102 - DNA, 25 bp, Artificial sequence
  SiRNA target sequence
aggagtaattagtcttggtggggag

SEQ ID NO: 17103 - DNA, 25 bp, Artificial sequence
  SiRNA target sequence
ggagtaattagtcttggtggggaga

SEQ ID NO: 17104 - DNA, 25 bp, Artificial sequence
  SiRNA target sequence
gagtaattagtcttggtggggagat

SEQ ID NO: 17105 - DNA, 25 bp, Artificial sequence
  SiRNA target sequence
agtaattagtcttggtggggagatt

SEQ ID NO: 17106 - DNA, 25 bp, Artificial sequence
  SiRNA target sequence
gtaattagtcttggtggggagatta

SEQ ID NO: 17107 - DNA, 25 bp, Artificial sequence
  SiRNA target sequence
taattagtcttggtggggagattat

SEQ ID NO: 17108 - DNA, 25 bp, Artificial sequence
  SiRNA target sequence
aattagtcttggtggggagattatt

SEQ ID NO: 17109 - DNA, 25 bp, Artificial sequence
  SiRNA target sequence
attagtcttggtggggagattatta

SEQ ID NO: 17110 - DNA, 25 bp, Artificial sequence
  SiRNA target sequence
ttagtcttggtggggagattattaa

SEQ ID NO: 17111 - DNA, 25 bp, Artificial sequence
  SiRNA target sequence
tagtcttggtggggagattattaaa

SEQ ID NO: 17112 - DNA, 25 bp, Artificial sequence
  SiRNA target sequence
agtcttggtggggagattattaaag

SEQ ID NO: 17113 - DNA, 25 bp, Artificial sequence
  SiRNA target sequence
gtcttggtggggagattattaaagc

SEQ ID NO: 17114 - DNA, 25 bp, Artificial sequence
  SiRNA target sequence
tcttggtggggagattattaaagct

SEQ ID NO: 17115 - DNA, 25 bp, Artificial sequence
  SiRNA target sequence
cttggtggggagattattaaagctg

SEQ ID NO: 17116 - DNA, 25 bp, Artificial sequence
  SiRNA target sequence
ttggtggggagattattaaagctga

SEQ ID NO: 17117 - DNA, 25 bp, Artificial sequence
  SiRNA target sequence
tggtggggagattattaaagctgat

SEQ ID NO: 17118 - DNA, 25 bp, Artificial sequence
  SiRNA target sequence
ggtggggagattattaaagctgatg

SEQ ID NO: 17119 - DNA, 25 bp, Artificial sequence
  SiRNA target sequence
gtggggagattattaaagctgatga

SEQ ID NO: 17120 - DNA, 25 bp, Artificial sequence
  SiRNA target sequence
tggggagattattaaagctgatgaa

SEQ ID NO: 17121 - DNA, 25 bp, Artificial sequence
  SiRNA target sequence
ggggagattattaaagctgatgaat

SEQ ID NO: 17122 - DNA, 25 bp, Artificial sequence
  SiRNA target sequence
gggagattattaaagctgatgaata

SEQ ID NO: 17123 - DNA, 25 bp, Artificial sequence
  SiRNA target sequence
ggagattattaaagctgatgaatac

SEQ ID NO: 17124 - DNA, 25 bp, Artificial sequence
  SiRNA target sequence
gagattattaaagctgatgaataca

SEQ ID NO: 17125 - DNA, 25 bp, Artificial sequence
  SiRNA target sequence
agattattaaagctgatgaatacat

SEQ ID NO: 17126 - DNA, 25 bp, Artificial sequence
  SiRNA target sequence
gattattaaagctgatgaatacatt

SEQ ID NO: 17127 - DNA, 25 bp, Artificial sequence
  SiRNA target sequence
attattaaagctgatgaatacattg

SEQ ID NO: 17128 - DNA, 25 bp, Artificial sequence
  SiRNA target sequence
ttattaaagctgatgaatacattgg

SEQ ID NO: 17129 - DNA, 25 bp, Artificial sequence
  SiRNA target sequence
tattaaagctgatgaatacattgga

SEQ ID NO: 17130 - DNA, 25 bp, Artificial sequence
  SiRNA target sequence
attaaagctgatgaatacattggac

SEQ ID NO: 17131 - DNA, 25 bp, Artificial sequence
  SiRNA target sequence
ttaaagctgatgaatacattggact

SEQ ID NO: 17132 - DNA, 25 bp, Artificial sequence
  SiRNA target sequence
taaagctgatgaatacattggacta

SEQ ID NO: 17133 - DNA, 25 bp, Artificial sequence
  SiRNA target sequence
aaagctgatgaatacattggactat

SEQ ID NO: 17134 - DNA, 25 bp, Artificial sequence
  SiRNA target sequence
aagctgatgaatacattggactatc

SEQ ID NO: 17135 - DNA, 25 bp, Artificial sequence
  SiRNA target sequence
agctgatgaatacattggactatct

SEQ ID NO: 17136 - DNA, 25 bp, Artificial sequence
  SiRNA target sequence
gctgatgaatacattggactatctt

SEQ ID NO: 17137 - DNA, 25 bp, Artificial sequence
  SiRNA target sequence
ctgatgaatacattggactatcttt

SEQ ID NO: 17138 - DNA, 25 bp, Artificial sequence
  SiRNA target sequence
tgatgaatacattggactatctttt

SEQ ID NO: 17139 - DNA, 25 bp, Artificial sequence
  SiRNA target sequence
gatgaatacattggactatcttttg

SEQ ID NO: 17140 - DNA, 25 bp, Artificial sequence
  SiRNA target sequence
atgaatacattggactatcttttgt

SEQ ID NO: 17141 - DNA, 25 bp, Artificial sequence
  SiRNA target sequence
tgaatacattggactatcttttgta

SEQ ID NO: 17142 - DNA, 25 bp, Artificial sequence
  SiRNA target sequence
gaatacattggactatcttttgtag

SEQ ID NO: 17143 - DNA, 25 bp, Artificial sequence
  SiRNA target sequence
aatacattggactatcttttgtagg

SEQ ID NO: 17144 - DNA, 25 bp, Artificial sequence
  SiRNA target sequence
atacattggactatcttttgtaggg

SEQ ID NO: 17145 - DNA, 25 bp, Artificial sequence
  SiRNA target sequence
tacattggactatcttttgtaggga

SEQ ID NO: 17146 - DNA, 25 bp, Artificial sequence
  SiRNA target sequence
acattggactatcttttgtagggag

SEQ ID NO: 17147 - DNA, 25 bp, Artificial sequence
  SiRNA target sequence
cattggactatcttttgtagggaga

SEQ ID NO: 17148 - DNA, 25 bp, Artificial sequence
  SiRNA target sequence
attggactatcttttgtagggagat

SEQ ID NO: 17149 - DNA, 25 bp, Artificial sequence
  SiRNA target sequence
ttggactatcttttgtagggagata

SEQ ID NO: 17150 - DNA, 25 bp, Artificial sequence
  SiRNA target sequence
tggactatcttttgtagggagatat

SEQ ID NO: 17151 - DNA, 25 bp, Artificial sequence
  SiRNA target sequence
ggactatcttttgtagggagatatg

SEQ ID NO: 17152 - DNA, 25 bp, Artificial sequence
  SiRNA target sequence
gactatcttttgtagggagatatga

SEQ ID NO: 17153 - DNA, 25 bp, Artificial sequence
  SiRNA target sequence
actatcttttgtagggagatatgaa

SEQ ID NO: 17154 - DNA, 25 bp, Artificial sequence
  SiRNA target sequence
ctatcttttgtagggagatatgaag

SEQ ID NO: 17155 - DNA, 25 bp, Artificial sequence
  SiRNA target sequence
tatcttttgtagggagatatgaagg

SEQ ID NO: 17156 - DNA, 25 bp, Artificial sequence
  SiRNA target sequence
atcttttgtagggagatatgaaggg

SEQ ID NO: 17157 - DNA, 25 bp, Artificial sequence
  SiRNA target sequence
tcttttgtagggagatatgaaggga

SEQ ID NO: 17158 - DNA, 25 bp, Artificial sequence
  SiRNA target sequence
cttttgtagggagatatgaagggat

SEQ ID NO: 17159 - DNA, 25 bp, Artificial sequence
  SiRNA target sequence
ttttgtagggagatatgaagggatt

SEQ ID NO: 17160 - DNA, 25 bp, Artificial sequence
  SiRNA target sequence
tttgtagggagatatgaagggattg

SEQ ID NO: 17161 - DNA, 25 bp, Artificial sequence
  SiRNA target sequence
ttgtagggagatatgaagggattgg

SEQ ID NO: 17162 - DNA, 25 bp, Artificial sequence
  SiRNA target sequence
tgtagggagatatgaagggattggt

SEQ ID NO: 17163 - DNA, 25 bp, Artificial sequence
  SiRNA target sequence
gtagggagatatgaagggattggtt

SEQ ID NO: 17164 - DNA, 25 bp, Artificial sequence
  SiRNA target sequence
tagggagatatgaagggattggttc

SEQ ID NO: 17165 - DNA, 25 bp, Artificial sequence
  SiRNA target sequence
agggagatatgaagggattggttct

SEQ ID NO: 17166 - DNA, 25 bp, Artificial sequence
  SiRNA target sequence
gggagatatgaagggattggttcta

SEQ ID NO: 17167 - DNA, 25 bp, Artificial sequence
  SiRNA target sequence
ggagatatgaagggattggttctat

SEQ ID NO: 17168 - DNA, 25 bp, Artificial sequence
  SiRNA target sequence
gagatatgaagggattggttctatt

SEQ ID NO: 17169 - DNA, 25 bp, Artificial sequence
  SiRNA target sequence
agatatgaagggattggttctattt

SEQ ID NO: 17170 - DNA, 25 bp, Artificial sequence
  SiRNA target sequence
gatatgaagggattggttctatttc

SEQ ID NO: 17171 - DNA, 25 bp, Artificial sequence
  SiRNA target sequence
atatgaagggattggttctatttct

SEQ ID NO: 17172 - DNA, 25 bp, Artificial sequence
  SiRNA target sequence
tatgaagggattggttctatttcta

SEQ ID NO: 17173 - DNA, 25 bp, Artificial sequence
  SiRNA target sequence
atgaagggattggttctatttctac

SEQ ID NO: 17174 - DNA, 25 bp, Artificial sequence
  SiRNA target sequence
tgaagggattggttctatttctact

SEQ ID NO: 17175 - DNA, 25 bp, Artificial sequence
  SiRNA target sequence
gaagggattggttctatttctacta

SEQ ID NO: 17176 - DNA, 25 bp, Artificial sequence
  SiRNA target sequence
aagggattggttctatttctactat

SEQ ID NO: 17177 - DNA, 25 bp, Artificial sequence
  SiRNA target sequence
agggattggttctatttctactata

SEQ ID NO: 17178 - DNA, 25 bp, Artificial sequence
  SiRNA target sequence
gggattggttctatttctactatat

SEQ ID NO: 17179 - DNA, 25 bp, Artificial sequence
  SiRNA target sequence
ggattggttctatttctactatatc

SEQ ID NO: 17180 - DNA, 25 bp, Artificial sequence
  SiRNA target sequence
gattggttctatttctactatatca

SEQ ID NO: 17181 - DNA, 25 bp, Artificial sequence
  SiRNA target sequence
attggttctatttctactatatcac

SEQ ID NO: 17182 - DNA, 25 bp, Artificial sequence
  SiRNA target sequence
ttggttctatttctactatatcact

SEQ ID NO: 17183 - DNA, 25 bp, Artificial sequence
  SiRNA target sequence
tggttctatttctactatatcactt

SEQ ID NO: 17184 - DNA, 25 bp, Artificial sequence
  SiRNA target sequence
ggttctatttctactatatcacttc

SEQ ID NO: 17185 - DNA, 25 bp, Artificial sequence
  SiRNA target sequence
gttctatttctactatatcacttca

SEQ ID NO: 17186 - DNA, 25 bp, Artificial sequence
  SiRNA target sequence
ttctatttctactatatcacttcag

SEQ ID NO: 17187 - DNA, 25 bp, Artificial sequence
  SiRNA target sequence
tctatttctactatatcacttcagc

SEQ ID NO: 17188 - DNA, 25 bp, Artificial sequence
  SiRNA target sequence
ctatttctactatatcacttcagca

SEQ ID NO: 17189 - DNA, 25 bp, Artificial sequence
  SiRNA target sequence
tatttctactatatcacttcagcag

SEQ ID NO: 17190 - DNA, 25 bp, Artificial sequence
  SiRNA target sequence
atttctactatatcacttcagcagt

SEQ ID NO: 17191 - DNA, 25 bp, Artificial sequence
  SiRNA target sequence
tttctactatatcacttcagcagtt

SEQ ID NO: 17192 - DNA, 25 bp, Artificial sequence
  SiRNA target sequence
ttctactatatcacttcagcagttt

SEQ ID NO: 17193 - DNA, 25 bp, Artificial sequence
  SiRNA target sequence
tctactatatcacttcagcagttta

SEQ ID NO: 17194 - DNA, 25 bp, Artificial sequence
  SiRNA target sequence
ctactatatcacttcagcagtttaa

SEQ ID NO: 17195 - DNA, 25 bp, Artificial sequence
  SiRNA target sequence
tactatatcacttcagcagtttaat

SEQ ID NO: 17196 - DNA, 25 bp, Artificial sequence
  SiRNA target sequence
actatatcacttcagcagtttaata

SEQ ID NO: 17197 - DNA, 25 bp, Artificial sequence
  SiRNA target sequence
ctatatcacttcagcagtttaatac

SEQ ID NO: 17198 - DNA, 25 bp, Artificial sequence
  SiRNA target sequence
tatatcacttcagcagtttaataca

SEQ ID NO: 17199 - DNA, 25 bp, Artificial sequence
  SiRNA target sequence
atatcacttcagcagtttaatacac

SEQ ID NO: 17200 - DNA, 25 bp, Artificial sequence
  SiRNA target sequence
tatcacttcagcagtttaatacact

SEQ ID NO: 17201 - DNA, 25 bp, Artificial sequence
  SiRNA target sequence
atcacttcagcagtttaatacactg

SEQ ID NO: 17202 - DNA, 25 bp, Artificial sequence
  SiRNA target sequence
tcacttcagcagtttaatacactgt

SEQ ID NO: 17203 - DNA, 25 bp, Artificial sequence
  SiRNA target sequence
cacttcagcagtttaatacactgtc

SEQ ID NO: 17204 - DNA, 25 bp, Artificial sequence
  SiRNA target sequence
acttcagcagtttaatacactgtct

SEQ ID NO: 17205 - DNA, 25 bp, Artificial sequence
  SiRNA target sequence
cttcagcagtttaatacactgtcta

SEQ ID NO: 17206 - DNA, 25 bp, Artificial sequence
  SiRNA target sequence
ttcagcagtttaatacactgtctat

SEQ ID NO: 17207 - DNA, 25 bp, Artificial sequence
  SiRNA target sequence
tcagcagtttaatacactgtctata

SEQ ID NO: 17208 - DNA, 25 bp, Artificial sequence
  SiRNA target sequence
cagcagtttaatacactgtctatag

SEQ ID NO: 17209 - DNA, 25 bp, Artificial sequence
  SiRNA target sequence
agcagtttaatacactgtctataga

SEQ ID NO: 17210 - DNA, 25 bp, Artificial sequence
  SiRNA target sequence
gcagtttaatacactgtctatagat

SEQ ID NO: 17211 - DNA, 25 bp, Artificial sequence
  SiRNA target sequence
cagtttaatacactgtctatagatt

SEQ ID NO: 17212 - DNA, 25 bp, Artificial sequence
  SiRNA target sequence
agtttaatacactgtctatagatta

SEQ ID NO: 17213 - DNA, 25 bp, Artificial sequence
  SiRNA target sequence
gtttaatacactgtctatagattat

SEQ ID NO: 17214 - DNA, 25 bp, Artificial sequence
  SiRNA target sequence
tttaatacactgtctatagattatt

SEQ ID NO: 17215 - DNA, 25 bp, Artificial sequence
  SiRNA target sequence
ttaatacactgtctatagattatta

SEQ ID NO: 17216 - DNA, 25 bp, Artificial sequence
  SiRNA target sequence
taatacactgtctatagattattac

SEQ ID NO: 17217 - DNA, 25 bp, Artificial sequence
  SiRNA target sequence
aatacactgtctatagattattaca

SEQ ID NO: 17218 - DNA, 25 bp, Artificial sequence
  SiRNA target sequence
atacactgtctatagattattacaa

SEQ ID NO: 17219 - DNA, 25 bp, Artificial sequence
  SiRNA target sequence
tacactgtctatagattattacaag

SEQ ID NO: 17220 - DNA, 25 bp, Artificial sequence
  SiRNA target sequence
acactgtctatagattattacaaga

SEQ ID NO: 17221 - DNA, 25 bp, Artificial sequence
  SiRNA target sequence
cactgtctatagattattacaagac

SEQ ID NO: 17222 - DNA, 25 bp, Artificial sequence
  SiRNA target sequence
actgtctatagattattacaagaca

SEQ ID NO: 17223 - DNA, 25 bp, Artificial sequence
  SiRNA target sequence
ctgtctatagattattacaagacat

SEQ ID NO: 17224 - DNA, 25 bp, Artificial sequence
  SiRNA target sequence
tgtctatagattattacaagacatt

SEQ ID NO: 17225 - DNA, 25 bp, Artificial sequence
  SiRNA target sequence
gtctatagattattacaagacattg

SEQ ID NO: 17226 - DNA, 25 bp, Artificial sequence
  SiRNA target sequence
tctatagattattacaagacattgt

SEQ ID NO: 17227 - DNA, 25 bp, Artificial sequence
  SiRNA target sequence
ctatagattattacaagacattgtc

SEQ ID NO: 17228 - DNA, 25 bp, Artificial sequence
  SiRNA target sequence
tatagattattacaagacattgtct

SEQ ID NO: 17229 - DNA, 25 bp, Artificial sequence
  SiRNA target sequence
atagattattacaagacattgtctt

SEQ ID NO: 17230 - DNA, 25 bp, Artificial sequence
  SiRNA target sequence
tagattattacaagacattgtcttc

SEQ ID NO: 17231 - DNA, 25 bp, Artificial sequence
  SiRNA target sequence
agattattacaagacattgtcttct

SEQ ID NO: 17232 - DNA, 25 bp, Artificial sequence
  SiRNA target sequence
gattattacaagacattgtcttcta

SEQ ID NO: 17233 - DNA, 25 bp, Artificial sequence
  SiRNA target sequence
attattacaagacattgtcttctat

SEQ ID NO: 17234 - DNA, 25 bp, Artificial sequence
  SiRNA target sequence
ttattacaagacattgtcttctatt

SEQ ID NO: 17235 - DNA, 25 bp, Artificial sequence
  SiRNA target sequence
tattacaagacattgtcttctattt

SEQ ID NO: 17236 - DNA, 25 bp, Artificial sequence
  SiRNA target sequence
attacaagacattgtcttctatttg

SEQ ID NO: 17237 - DNA, 25 bp, Artificial sequence
  SiRNA target sequence
ttacaagacattgtcttctatttgt

SEQ ID NO: 17238 - DNA, 25 bp, Artificial sequence
  SiRNA target sequence
tacaagacattgtcttctatttgtg

SEQ ID NO: 17239 - DNA, 25 bp, Artificial sequence
  SiRNA target sequence
acaagacattgtcttctatttgtga

SEQ ID NO: 17240 - DNA, 25 bp, Artificial sequence
  SiRNA target sequence
caagacattgtcttctatttgtgac

SEQ ID NO: 17241 - DNA, 25 bp, Artificial sequence
  SiRNA target sequence
aagacattgtcttctatttgtgacg

SEQ ID NO: 17242 - DNA, 25 bp, Artificial sequence
  SiRNA target sequence
agacattgtcttctatttgtgacgt

SEQ ID NO: 17243 - DNA, 25 bp, Artificial sequence
  SiRNA target sequence
gacattgtcttctatttgtgacgta

SEQ ID NO: 17244 - DNA, 25 bp, Artificial sequence
  SiRNA target sequence
acattgtcttctatttgtgacgtag

SEQ ID NO: 17245 - DNA, 25 bp, Artificial sequence
  SiRNA target sequence
cattgtcttctatttgtgacgtagg

SEQ ID NO: 17246 - DNA, 25 bp, Artificial sequence
  SiRNA target sequence
attgtcttctatttgtgacgtaggt

SEQ ID NO: 17247 - DNA, 25 bp, Artificial sequence
  SiRNA target sequence
ttgtcttctatttgtgacgtaggta

SEQ ID NO: 17248 - DNA, 25 bp, Artificial sequence
  SiRNA target sequence
tgtcttctatttgtgacgtaggtat

SEQ ID NO: 17249 - DNA, 25 bp, Artificial sequence
  SiRNA target sequence
gtcttctatttgtgacgtaggtatt

SEQ ID NO: 17250 - DNA, 25 bp, Artificial sequence
  SiRNA target sequence
tcttctatttgtgacgtaggtatta

SEQ ID NO: 17251 - DNA, 25 bp, Artificial sequence
  SiRNA target sequence
cttctatttgtgacgtaggtattaa

SEQ ID NO: 17252 - DNA, 25 bp, Artificial sequence
  SiRNA target sequence
ttctatttgtgacgtaggtattaaa

SEQ ID NO: 17253 - DNA, 25 bp, Artificial sequence
  SiRNA target sequence
tctatttgtgacgtaggtattaaaa

SEQ ID NO: 17254 - DNA, 25 bp, Artificial sequence
  SiRNA target sequence
ctatttgtgacgtaggtattaaaat

SEQ ID NO: 17255 - DNA, 25 bp, Artificial sequence
  SiRNA target sequence
tatttgtgacgtaggtattaaaata

SEQ ID NO: 17256 - DNA, 25 bp, Artificial sequence
  SiRNA target sequence
atttgtgacgtaggtattaaaatat

SEQ ID NO: 17257 - DNA, 25 bp, Artificial sequence
  SiRNA target sequence
tttgtgacgtaggtattaaaatatc

SEQ ID NO: 17258 - DNA, 25 bp, Artificial sequence
  SiRNA target sequence
ttgtgacgtaggtattaaaatatca

SEQ ID NO: 17259 - DNA, 25 bp, Artificial sequence
  SiRNA target sequence
tgtgacgtaggtattaaaatatcaa

SEQ ID NO: 17260 - DNA, 25 bp, Artificial sequence
  SiRNA target sequence
gtgacgtaggtattaaaatatcaac

SEQ ID NO: 17261 - DNA, 25 bp, Artificial sequence
  SiRNA target sequence
tgacgtaggtattaaaatatcaact

SEQ ID NO: 17262 - DNA, 25 bp, Artificial sequence
  SiRNA target sequence
gacgtaggtattaaaatatcaactg

SEQ ID NO: 17263 - DNA, 25 bp, Artificial sequence
  SiRNA target sequence
acgtaggtattaaaatatcaactga

SEQ ID NO: 17264 - DNA, 25 bp, Artificial sequence
  SiRNA target sequence
cgtaggtattaaaatatcaactgat

SEQ ID NO: 17265 - DNA, 25 bp, Artificial sequence
  SiRNA target sequence
gtaggtattaaaatatcaactgata

SEQ ID NO: 17266 - DNA, 25 bp, Artificial sequence
  SiRNA target sequence
taggtattaaaatatcaactgatag

SEQ ID NO: 17267 - DNA, 25 bp, Artificial sequence
  SiRNA target sequence
aggtattaaaatatcaactgatagg

SEQ ID NO: 17268 - DNA, 25 bp, Artificial sequence
  SiRNA target sequence
ggtattaaaatatcaactgataggg

SEQ ID NO: 17269 - DNA, 25 bp, Artificial sequence
  SiRNA target sequence
gtattaaaatatcaactgataggga

SEQ ID NO: 17270 - DNA, 25 bp, Artificial sequence
  SiRNA target sequence
tattaaaatatcaactgatagggaa

SEQ ID NO: 17271 - DNA, 25 bp, Artificial sequence
  SiRNA target sequence
attaaaatatcaactgatagggaaa

SEQ ID NO: 17272 - DNA, 25 bp, Artificial sequence
  SiRNA target sequence
ttaaaatatcaactgatagggaaaa

SEQ ID NO: 17273 - DNA, 25 bp, Artificial sequence
  SiRNA target sequence
taaaatatcaactgatagggaaaaa

SEQ ID NO: 17274 - DNA, 25 bp, Artificial sequence
  SiRNA target sequence
aaaatatcaactgatagggaaaaat

SEQ ID NO: 17275 - DNA, 25 bp, Artificial sequence
  SiRNA target sequence
aaatatcaactgatagggaaaaatc

SEQ ID NO: 17276 - DNA, 25 bp, Artificial sequence
  SiRNA target sequence
aatatcaactgatagggaaaaatca

SEQ ID NO: 17277 - DNA, 25 bp, Artificial sequence
  SiRNA target sequence
atatcaactgatagggaaaaatcag

SEQ ID NO: 17278 - DNA, 25 bp, Artificial sequence
  SiRNA target sequence
tatcaactgatagggaaaaatcagt

SEQ ID NO: 17279 - DNA, 25 bp, Artificial sequence
  SiRNA target sequence
atcaactgatagggaaaaatcagtt

SEQ ID NO: 17280 - DNA, 25 bp, Artificial sequence
  SiRNA target sequence
tcaactgatagggaaaaatcagtta

SEQ ID NO: 17281 - DNA, 25 bp, Artificial sequence
  SiRNA target sequence
caactgatagggaaaaatcagttaa

SEQ ID NO: 17282 - DNA, 25 bp, Artificial sequence
  SiRNA target sequence
aactgatagggaaaaatcagttaat

SEQ ID NO: 17283 - DNA, 25 bp, Artificial sequence
  SiRNA target sequence
actgatagggaaaaatcagttaatt

SEQ ID NO: 17284 - DNA, 25 bp, Artificial sequence
  SiRNA target sequence
ctgatagggaaaaatcagttaatta

SEQ ID NO: 17285 - DNA, 25 bp, Artificial sequence
  SiRNA target sequence
tgatagggaaaaatcagttaattat

SEQ ID NO: 17286 - DNA, 25 bp, Artificial sequence
  SiRNA target sequence
gatagggaaaaatcagttaattatg

SEQ ID NO: 17287 - DNA, 25 bp, Artificial sequence
  SiRNA target sequence
atagggaaaaatcagttaattatgg

SEQ ID NO: 17288 - DNA, 25 bp, Artificial sequence
  SiRNA target sequence
tagggaaaaatcagttaattatgga

SEQ ID NO: 17289 - DNA, 25 bp, Artificial sequence
  SiRNA target sequence
agggaaaaatcagttaattatggat

SEQ ID NO: 17290 - DNA, 25 bp, Artificial sequence
  SiRNA target sequence
gggaaaaatcagttaattatggatt

SEQ ID NO: 17291 - DNA, 25 bp, Artificial sequence
  SiRNA target sequence
ggaaaaatcagttaattatggatta

SEQ ID NO: 17292 - DNA, 25 bp, Artificial sequence
  SiRNA target sequence
gaaaaatcagttaattatggattag

SEQ ID NO: 17293 - DNA, 25 bp, Artificial sequence
  SiRNA target sequence
aaaaatcagttaattatggattagg

SEQ ID NO: 17294 - DNA, 25 bp, Artificial sequence
  SiRNA target sequence
aaaatcagttaattatggattagga

SEQ ID NO: 17295 - DNA, 25 bp, Artificial sequence
  SiRNA target sequence
aaatcagttaattatggattaggag

SEQ ID NO: 17296 - DNA, 25 bp, Artificial sequence
  SiRNA target sequence
aatcagttaattatggattaggagt

SEQ ID NO: 17297 - DNA, 25 bp, Artificial sequence
  SiRNA target sequence
atcagttaattatggattaggagtt

SEQ ID NO: 17298 - DNA, 25 bp, Artificial sequence
  SiRNA target sequence
tcagttaattatggattaggagtta

SEQ ID NO: 17299 - DNA, 25 bp, Artificial sequence
  SiRNA target sequence
cagttaattatggattaggagttaa

SEQ ID NO: 17300 - DNA, 25 bp, Artificial sequence
  SiRNA target sequence
agttaattatggattaggagttaaa

SEQ ID NO: 17301 - DNA, 25 bp, Artificial sequence
  SiRNA target sequence
gttaattatggattaggagttaaac

SEQ ID NO: 17302 - DNA, 25 bp, Artificial sequence
  SiRNA target sequence
ttaattatggattaggagttaaact

SEQ ID NO: 17303 - DNA, 25 bp, Artificial sequence
  SiRNA target sequence
taattatggattaggagttaaacta

SEQ ID NO: 17304 - DNA, 25 bp, Artificial sequence
  SiRNA target sequence
aattatggattaggagttaaactac

SEQ ID NO: 17305 - DNA, 25 bp, Artificial sequence
  SiRNA target sequence
attatggattaggagttaaactaca

SEQ ID NO: 17306 - DNA, 25 bp, Artificial sequence
  SiRNA target sequence
ttatggattaggagttaaactacac

SEQ ID NO: 17307 - DNA, 25 bp, Artificial sequence
  SiRNA target sequence
tatggattaggagttaaactacaca

SEQ ID NO: 17308 - DNA, 25 bp, Artificial sequence
  SiRNA target sequence
atggattaggagttaaactacacag

SEQ ID NO: 17309 - DNA, 25 bp, Artificial sequence
  SiRNA target sequence
tggattaggagttaaactacacagt

SEQ ID NO: 17310 - DNA, 25 bp, Artificial sequence
  SiRNA target sequence
ggattaggagttaaactacacagta

SEQ ID NO: 17311 - DNA, 25 bp, Artificial sequence
  SiRNA target sequence
gattaggagttaaactacacagtaa

SEQ ID NO: 17312 - DNA, 25 bp, Artificial sequence
  SiRNA target sequence
attaggagttaaactacacagtaaa

SEQ ID NO: 17313 - DNA, 25 bp, Artificial sequence
  SiRNA target sequence
ttaggagttaaactacacagtaaaa

SEQ ID NO: 17314 - DNA, 25 bp, Artificial sequence
  SiRNA target sequence
taggagttaaactacacagtaaaaa

SEQ ID NO: 17315 - DNA, 25 bp, Artificial sequence
  SiRNA target sequence
aggagttaaactacacagtaaaaaa

SEQ ID NO: 17316 - DNA, 25 bp, Artificial sequence
  SiRNA target sequence
ggagttaaactacacagtaaaaaag

SEQ ID NO: 17317 - DNA, 25 bp, Artificial sequence
  SiRNA target sequence
gagttaaactacacagtaaaaaagg

SEQ ID NO: 17318 - DNA, 25 bp, Artificial sequence
  SiRNA target sequence
agttaaactacacagtaaaaaagga

SEQ ID NO: 17319 - DNA, 25 bp, Artificial sequence
  SiRNA target sequence
gttaaactacacagtaaaaaaggag

SEQ ID NO: 17320 - DNA, 25 bp, Artificial sequence
  SiRNA target sequence
ttaaactacacagtaaaaaaggaga

SEQ ID NO: 17321 - DNA, 25 bp, Artificial sequence
  SiRNA target sequence
taaactacacagtaaaaaaggagaa

SEQ ID NO: 17322 - DNA, 25 bp, Artificial sequence
  SiRNA target sequence
aaactacacagtaaaaaaggagaaa

SEQ ID NO: 17323 - DNA, 25 bp, Artificial sequence
  SiRNA target sequence
aactacacagtaaaaaaggagaaat

SEQ ID NO: 17324 - DNA, 25 bp, Artificial sequence
  SiRNA target sequence
actacacagtaaaaaaggagaaatt

SEQ ID NO: 17325 - DNA, 25 bp, Artificial sequence
  SiRNA target sequence
ctacacagtaaaaaaggagaaatta

SEQ ID NO: 17326 - DNA, 25 bp, Artificial sequence
  SiRNA target sequence
tacacagtaaaaaaggagaaattat

SEQ ID NO: 17327 - DNA, 25 bp, Artificial sequence
  SiRNA target sequence
acacagtaaaaaaggagaaattatc

SEQ ID NO: 17328 - DNA, 25 bp, Artificial sequence
  SiRNA target sequence
cacagtaaaaaaggagaaattatcg

SEQ ID NO: 17329 - DNA, 25 bp, Artificial sequence
  SiRNA target sequence
acagtaaaaaaggagaaattatcgg

SEQ ID NO: 17330 - DNA, 25 bp, Artificial sequence
  SiRNA target sequence
cagtaaaaaaggagaaattatcgga

SEQ ID NO: 17331 - DNA, 25 bp, Artificial sequence
  SiRNA target sequence
agtaaaaaaggagaaattatcggat

SEQ ID NO: 17332 - DNA, 25 bp, Artificial sequence
  SiRNA target sequence
gtaaaaaaggagaaattatcggatg

SEQ ID NO: 17333 - DNA, 25 bp, Artificial sequence
  SiRNA target sequence
taaaaaaggagaaattatcggatgt

SEQ ID NO: 17334 - DNA, 25 bp, Artificial sequence
  SiRNA target sequence
aaaaaaggagaaattatcggatgtg

SEQ ID NO: 17335 - DNA, 25 bp, Artificial sequence
  SiRNA target sequence
aaaaaggagaaattatcggatgtgt

SEQ ID NO: 17336 - DNA, 25 bp, Artificial sequence
  SiRNA target sequence
aaaaggagaaattatcggatgtgta

SEQ ID NO: 17337 - DNA, 25 bp, Artificial sequence
  SiRNA target sequence
aaaggagaaattatcggatgtgtag

SEQ ID NO: 17338 - DNA, 25 bp, Artificial sequence
  SiRNA target sequence
aaggagaaattatcggatgtgtaga

SEQ ID NO: 17339 - DNA, 25 bp, Artificial sequence
  SiRNA target sequence
aggagaaattatcggatgtgtagat

SEQ ID NO: 17340 - DNA, 25 bp, Artificial sequence
  SiRNA target sequence
ggagaaattatcggatgtgtagata

SEQ ID NO: 17341 - DNA, 25 bp, Artificial sequence
  SiRNA target sequence
gagaaattatcggatgtgtagataa

SEQ ID NO: 17342 - DNA, 25 bp, Artificial sequence
  SiRNA target sequence
agaaattatcggatgtgtagataac

SEQ ID NO: 17343 - DNA, 25 bp, Artificial sequence
  SiRNA target sequence
gaaattatcggatgtgtagataaca

SEQ ID NO: 17344 - DNA, 25 bp, Artificial sequence
  SiRNA target sequence
aaattatcggatgtgtagataacaa

SEQ ID NO: 17345 - DNA, 25 bp, Artificial sequence
  SiRNA target sequence
aattatcggatgtgtagataacaat

SEQ ID NO: 17346 - DNA, 25 bp, Artificial sequence
  SiRNA target sequence
attatcggatgtgtagataacaatc

SEQ ID NO: 17347 - DNA, 25 bp, Artificial sequence
  SiRNA target sequence
ttatcggatgtgtagataacaatca

SEQ ID NO: 17348 - DNA, 25 bp, Artificial sequence
  SiRNA target sequence
tatcggatgtgtagataacaatcat

SEQ ID NO: 17349 - DNA, 25 bp, Artificial sequence
  SiRNA target sequence
atcggatgtgtagataacaatcata

SEQ ID NO: 17350 - DNA, 25 bp, Artificial sequence
  SiRNA target sequence
tcggatgtgtagataacaatcatat

SEQ ID NO: 17351 - DNA, 25 bp, Artificial sequence
  SiRNA target sequence
cggatgtgtagataacaatcatatt

SEQ ID NO: 17352 - DNA, 25 bp, Artificial sequence
  SiRNA target sequence
ggatgtgtagataacaatcatattt

SEQ ID NO: 17353 - DNA, 25 bp, Artificial sequence
  SiRNA target sequence
gatgtgtagataacaatcatatttt

SEQ ID NO: 17354 - DNA, 25 bp, Artificial sequence
  SiRNA target sequence
atgtgtagataacaatcatatttta

SEQ ID NO: 17355 - DNA, 25 bp, Artificial sequence
  SiRNA target sequence
tgtgtagataacaatcatattttaa

SEQ ID NO: 17356 - DNA, 25 bp, Artificial sequence
  SiRNA target sequence
gtgtagataacaatcatattttaag

SEQ ID NO: 17357 - DNA, 25 bp, Artificial sequence
  SiRNA target sequence
tgtagataacaatcatattttaagc

SEQ ID NO: 17358 - DNA, 25 bp, Artificial sequence
  SiRNA target sequence
gtagataacaatcatattttaagca

SEQ ID NO: 17359 - DNA, 25 bp, Artificial sequence
  SiRNA target sequence
tagataacaatcatattttaagcat

SEQ ID NO: 17360 - DNA, 25 bp, Artificial sequence
  SiRNA target sequence
agataacaatcatattttaagcata

SEQ ID NO: 17361 - DNA, 25 bp, Artificial sequence
  SiRNA target sequence
gataacaatcatattttaagcataa

SEQ ID NO: 17362 - DNA, 25 bp, Artificial sequence
  SiRNA target sequence
ataacaatcatattttaagcataat

SEQ ID NO: 17363 - DNA, 25 bp, Artificial sequence
  SiRNA target sequence
taacaatcatattttaagcataatt

SEQ ID NO: 17364 - DNA, 25 bp, Artificial sequence
  SiRNA target sequence
aacaatcatattttaagcataattt

SEQ ID NO: 17365 - DNA, 25 bp, Artificial sequence
  SiRNA target sequence
acaatcatattttaagcataattta

SEQ ID NO: 17366 - DNA, 25 bp, Artificial sequence
  SiRNA target sequence
caatcatattttaagcataatttat

SEQ ID NO: 17367 - DNA, 25 bp, Artificial sequence
  SiRNA target sequence
aatcatattttaagcataatttata

SEQ ID NO: 17368 - DNA, 25 bp, Artificial sequence
  SiRNA target sequence
atcatattttaagcataatttataa

SEQ ID NO: 17369 - DNA, 25 bp, Artificial sequence
  SiRNA target sequence
tcatattttaagcataatttataat

SEQ ID NO: 17370 - DNA, 25 bp, Artificial sequence
  SiRNA target sequence
catattttaagcataatttataatg

SEQ ID NO: 17371 - DNA, 25 bp, Artificial sequence
  SiRNA target sequence
atattttaagcataatttataatga

SEQ ID NO: 17372 - DNA, 25 bp, Artificial sequence
  SiRNA target sequence
tattttaagcataatttataatgat

SEQ ID NO: 17373 - DNA, 25 bp, Artificial sequence
  SiRNA target sequence
attttaagcataatttataatgata

SEQ ID NO: 17374 - DNA, 25 bp, Artificial sequence
  SiRNA target sequence
ttttaagcataatttataatgataa

SEQ ID NO: 17375 - DNA, 25 bp, Artificial sequence
  SiRNA target sequence
tttaagcataatttataatgataaa

SEQ ID NO: 17376 - DNA, 25 bp, Artificial sequence
  SiRNA target sequence
ttaagcataatttataatgataaat

SEQ ID NO: 17377 - DNA, 25 bp, Artificial sequence
  SiRNA target sequence
taagcataatttataatgataaatt

SEQ ID NO: 17378 - DNA, 25 bp, Artificial sequence
  SiRNA target sequence
aagcataatttataatgataaatta

SEQ ID NO: 17379 - DNA, 25 bp, Artificial sequence
  SiRNA target sequence
agcataatttataatgataaattat

SEQ ID NO: 17380 - DNA, 25 bp, Artificial sequence
  SiRNA target sequence
gcataatttataatgataaattatc

SEQ ID NO: 17381 - DNA, 25 bp, Artificial sequence
  SiRNA target sequence
cataatttataatgataaattatct

SEQ ID NO: 17382 - DNA, 25 bp, Artificial sequence
  SiRNA target sequence
ataatttataatgataaattatctg

SEQ ID NO: 17383 - DNA, 25 bp, Artificial sequence
  SiRNA target sequence
taatttataatgataaattatctga

SEQ ID NO: 17384 - DNA, 25 bp, Artificial sequence
  SiRNA target sequence
aatttataatgataaattatctgaa

SEQ ID NO: 17385 - DNA, 25 bp, Artificial sequence
  SiRNA target sequence
atttataatgataaattatctgaag

SEQ ID NO: 17386 - DNA, 25 bp, Artificial sequence
  SiRNA target sequence
tttataatgataaattatctgaagg

SEQ ID NO: 17387 - DNA, 25 bp, Artificial sequence
  SiRNA target sequence
ttataatgataaattatctgaaggg

SEQ ID NO: 17388 - DNA, 25 bp, Artificial sequence
  SiRNA target sequence
tataatgataaattatctgaagggt

SEQ ID NO: 17389 - DNA, 25 bp, Artificial sequence
  SiRNA target sequence
ataatgataaattatctgaagggtt

SEQ ID NO: 17390 - DNA, 25 bp, Artificial sequence
  SiRNA target sequence
taatgataaattatctgaagggtta

SEQ ID NO: 17391 - DNA, 25 bp, Artificial sequence
  SiRNA target sequence
aatgataaattatctgaagggttaa

SEQ ID NO: 17392 - DNA, 25 bp, Artificial sequence
  SiRNA target sequence
atgataaattatctgaagggttaac

SEQ ID NO: 17393 - DNA, 25 bp, Artificial sequence
  SiRNA target sequence
tgataaattatctgaagggttaaca

SEQ ID NO: 17394 - DNA, 25 bp, Artificial sequence
  SiRNA target sequence
gataaattatctgaagggttaacac

SEQ ID NO: 17395 - DNA, 25 bp, Artificial sequence
  SiRNA target sequence
ataaattatctgaagggttaacact

SEQ ID NO: 17396 - DNA, 25 bp, Artificial sequence
  SiRNA target sequence
taaattatctgaagggttaacactt

SEQ ID NO: 17397 - DNA, 25 bp, Artificial sequence
  SiRNA target sequence
aaattatctgaagggttaacactta

SEQ ID NO: 17398 - DNA, 25 bp, Artificial sequence
  SiRNA target sequence
aattatctgaagggttaacacttaa

SEQ ID NO: 17399 - DNA, 25 bp, Artificial sequence
  SiRNA target sequence
attatctgaagggttaacacttaat

SEQ ID NO: 17400 - DNA, 25 bp, Artificial sequence
  SiRNA target sequence
ttatctgaagggttaacacttaatt

SEQ ID NO: 17401 - DNA, 25 bp, Artificial sequence
  SiRNA target sequence
tatctgaagggttaacacttaattt

SEQ ID NO: 17402 - DNA, 25 bp, Artificial sequence
  SiRNA target sequence
atctgaagggttaacacttaatttg

SEQ ID NO: 17403 - DNA, 25 bp, Artificial sequence
  SiRNA target sequence
tctgaagggttaacacttaatttga

SEQ ID NO: 17404 - DNA, 25 bp, Artificial sequence
  SiRNA target sequence
ctgaagggttaacacttaatttgag

SEQ ID NO: 17405 - DNA, 25 bp, Artificial sequence
  SiRNA target sequence
tgaagggttaacacttaatttgagt

SEQ ID NO: 17406 - DNA, 25 bp, Artificial sequence
  SiRNA target sequence
gaagggttaacacttaatttgagtt

SEQ ID NO: 17407 - DNA, 25 bp, Artificial sequence
  SiRNA target sequence
aagggttaacacttaatttgagttg

SEQ ID NO: 17408 - DNA, 25 bp, Artificial sequence
  SiRNA target sequence
agggttaacacttaatttgagttgt

SEQ ID NO: 17409 - DNA, 25 bp, Artificial sequence
  SiRNA target sequence
gggttaacacttaatttgagttgta

SEQ ID NO: 17410 - DNA, 25 bp, Artificial sequence
  SiRNA target sequence
ggttaacacttaatttgagttgtag

SEQ ID NO: 17411 - DNA, 25 bp, Artificial sequence
  SiRNA target sequence
gttaacacttaatttgagttgtaga

SEQ ID NO: 17412 - DNA, 25 bp, Artificial sequence
  SiRNA target sequence
ttaacacttaatttgagttgtagat

SEQ ID NO: 17413 - DNA, 25 bp, Artificial sequence
  SiRNA target sequence
taacacttaatttgagttgtagatt

SEQ ID NO: 17414 - DNA, 25 bp, Artificial sequence
  SiRNA target sequence
aacacttaatttgagttgtagattt

SEQ ID NO: 17415 - DNA, 25 bp, Artificial sequence
  SiRNA target sequence
acacttaatttgagttgtagatttg

SEQ ID NO: 17416 - DNA, 25 bp, Artificial sequence
  SiRNA target sequence
cacttaatttgagttgtagatttgg

SEQ ID NO: 17417 - DNA, 25 bp, Artificial sequence
  SiRNA target sequence
acttaatttgagttgtagatttggt

SEQ ID NO: 17418 - DNA, 25 bp, Artificial sequence
  SiRNA target sequence
cttaatttgagttgtagatttggta

SEQ ID NO: 17419 - DNA, 25 bp, Artificial sequence
  SiRNA target sequence
ttaatttgagttgtagatttggtaa

SEQ ID NO: 17420 - DNA, 25 bp, Artificial sequence
  SiRNA target sequence
taatttgagttgtagatttggtaag

SEQ ID NO: 17421 - DNA, 25 bp, Artificial sequence
  SiRNA target sequence
aatttgagttgtagatttggtaaga

SEQ ID NO: 17422 - DNA, 25 bp, Artificial sequence
  SiRNA target sequence
atttgagttgtagatttggtaagaa

SEQ ID NO: 17423 - DNA, 25 bp, Artificial sequence
  SiRNA target sequence
tttgagttgtagatttggtaagaaa

SEQ ID NO: 17424 - DNA, 25 bp, Artificial sequence
  SiRNA target sequence
ttgagttgtagatttggtaagaaag

SEQ ID NO: 17425 - DNA, 25 bp, Artificial sequence
  SiRNA target sequence
tgagttgtagatttggtaagaaagt

SEQ ID NO: 17426 - DNA, 25 bp, Artificial sequence
  SiRNA target sequence
gagttgtagatttggtaagaaagta

SEQ ID NO: 17427 - DNA, 25 bp, Artificial sequence
  SiRNA target sequence
agttgtagatttggtaagaaagtat

SEQ ID NO: 17428 - DNA, 25 bp, Artificial sequence
  SiRNA target sequence
gttgtagatttggtaagaaagtatt

SEQ ID NO: 17429 - DNA, 25 bp, Artificial sequence
  SiRNA target sequence
ttgtagatttggtaagaaagtattt

SEQ ID NO: 17430 - DNA, 25 bp, Artificial sequence
  SiRNA target sequence
tgtagatttggtaagaaagtatttg

SEQ ID NO: 17431 - DNA, 25 bp, Artificial sequence
  SiRNA target sequence
gtagatttggtaagaaagtatttga

SEQ ID NO: 17432 - DNA, 25 bp, Artificial sequence
  SiRNA target sequence
tagatttggtaagaaagtatttgat

SEQ ID NO: 17433 - DNA, 25 bp, Artificial sequence
  SiRNA target sequence
agatttggtaagaaagtatttgatt

SEQ ID NO: 17434 - DNA, 25 bp, Artificial sequence
  SiRNA target sequence
gatttggtaagaaagtatttgatta

SEQ ID NO: 17435 - DNA, 25 bp, Artificial sequence
  SiRNA target sequence
atttggtaagaaagtatttgattat

SEQ ID NO: 17436 - DNA, 25 bp, Artificial sequence
  SiRNA target sequence
tttggtaagaaagtatttgattatg

SEQ ID NO: 17437 - DNA, 25 bp, Artificial sequence
  SiRNA target sequence
ttggtaagaaagtatttgattatgg

SEQ ID NO: 17438 - DNA, 25 bp, Artificial sequence
  SiRNA target sequence
tggtaagaaagtatttgattatggc

SEQ ID NO: 17439 - DNA, 25 bp, Artificial sequence
  SiRNA target sequence
ggtaagaaagtatttgattatggct

SEQ ID NO: 17440 - DNA, 25 bp, Artificial sequence
  SiRNA target sequence
gtaagaaagtatttgattatggcta

SEQ ID NO: 17441 - DNA, 25 bp, Artificial sequence
  SiRNA target sequence
taagaaagtatttgattatggctat

SEQ ID NO: 17442 - DNA, 25 bp, Artificial sequence
  SiRNA target sequence
aagaaagtatttgattatggctatg

SEQ ID NO: 17443 - DNA, 25 bp, Artificial sequence
  SiRNA target sequence
agaaagtatttgattatggctatgg

SEQ ID NO: 17444 - DNA, 25 bp, Artificial sequence
  SiRNA target sequence
gaaagtatttgattatggctatggg

SEQ ID NO: 17445 - DNA, 25 bp, Artificial sequence
  SiRNA target sequence
aaagtatttgattatggctatgggt

SEQ ID NO: 17446 - DNA, 25 bp, Artificial sequence
  SiRNA target sequence
aagtatttgattatggctatgggtt

SEQ ID NO: 17447 - DNA, 25 bp, Artificial sequence
  SiRNA target sequence
agtatttgattatggctatgggttt

SEQ ID NO: 17448 - DNA, 25 bp, Artificial sequence
  SiRNA target sequence
gtatttgattatggctatgggttta

SEQ ID NO: 17449 - DNA, 25 bp, Artificial sequence
  SiRNA target sequence
tatttgattatggctatgggtttat

SEQ ID NO: 17450 - DNA, 25 bp, Artificial sequence
  SiRNA target sequence
atttgattatggctatgggtttatt

SEQ ID NO: 17451 - DNA, 25 bp, Artificial sequence
  SiRNA target sequence
tttgattatggctatgggtttattt

SEQ ID NO: 17452 - DNA, 25 bp, Artificial sequence
  SiRNA target sequence
ttgattatggctatgggtttattta

SEQ ID NO: 17453 - DNA, 25 bp, Artificial sequence
  SiRNA target sequence
tgattatggctatgggtttatttat

SEQ ID NO: 17454 - DNA, 25 bp, Artificial sequence
  SiRNA target sequence
gattatggctatgggtttatttatg

SEQ ID NO: 17455 - DNA, 25 bp, Artificial sequence
  SiRNA target sequence
attatggctatgggtttatttatga

SEQ ID NO: 17456 - DNA, 25 bp, Artificial sequence
  SiRNA target sequence
ttatggctatgggtttatttatgaa

SEQ ID NO: 17457 - DNA, 25 bp, Artificial sequence
  SiRNA target sequence
tatggctatgggtttatttatgaat

SEQ ID NO: 17458 - DNA, 25 bp, Artificial sequence
  SiRNA target sequence
atggctatgggtttatttatgaatt

SEQ ID NO: 17459 - DNA, 25 bp, Artificial sequence
  SiRNA target sequence
tggctatgggtttatttatgaattt

SEQ ID NO: 17460 - DNA, 25 bp, Artificial sequence
  SiRNA target sequence
ggctatgggtttatttatgaatttt

SEQ ID NO: 17461 - DNA, 25 bp, Artificial sequence
  SiRNA target sequence
gctatgggtttatttatgaatttta

SEQ ID NO: 17462 - DNA, 25 bp, Artificial sequence
  SiRNA target sequence
ctatgggtttatttatgaattttaa

SEQ ID NO: 17463 - DNA, 26 bp, Artificial sequence
  SiRNA target sequence
atgaaatctttctacaaaaaaataaa

SEQ ID NO: 17464 - DNA, 26 bp, Artificial sequence
  SiRNA target sequence
tgaaatctttctacaaaaaaataaaa

SEQ ID NO: 17465 - DNA, 26 bp, Artificial sequence
  SiRNA target sequence
gaaatctttctacaaaaaaataaaaa

SEQ ID NO: 17466 - DNA, 26 bp, Artificial sequence
  SiRNA target sequence
aaatctttctacaaaaaaataaaaag

SEQ ID NO: 17467 - DNA, 26 bp, Artificial sequence
  SiRNA target sequence
aatctttctacaaaaaaataaaaagt

SEQ ID NO: 17468 - DNA, 26 bp, Artificial sequence
  SiRNA target sequence
atctttctacaaaaaaataaaaagtt

SEQ ID NO: 17469 - DNA, 26 bp, Artificial sequence
  SiRNA target sequence
tctttctacaaaaaaataaaaagtta

SEQ ID NO: 17470 - DNA, 26 bp, Artificial sequence
  SiRNA target sequence
ctttctacaaaaaaataaaaagttat

SEQ ID NO: 17471 - DNA, 26 bp, Artificial sequence
  SiRNA target sequence
tttctacaaaaaaataaaaagttatt

SEQ ID NO: 17472 - DNA, 26 bp, Artificial sequence
  SiRNA target sequence
ttctacaaaaaaataaaaagttattt

SEQ ID NO: 17473 - DNA, 26 bp, Artificial sequence
  SiRNA target sequence
tctacaaaaaaataaaaagttattta

SEQ ID NO: 17474 - DNA, 26 bp, Artificial sequence
  SiRNA target sequence
ctacaaaaaaataaaaagttatttat

SEQ ID NO: 17475 - DNA, 26 bp, Artificial sequence
  SiRNA target sequence
tacaaaaaaataaaaagttatttatt

SEQ ID NO: 17476 - DNA, 26 bp, Artificial sequence
  SiRNA target sequence
acaaaaaaataaaaagttatttattc

SEQ ID NO: 17477 - DNA, 26 bp, Artificial sequence
  SiRNA target sequence
caaaaaaataaaaagttatttattca

SEQ ID NO: 17478 - DNA, 26 bp, Artificial sequence
  SiRNA target sequence
aaaaaaataaaaagttatttattcaa

SEQ ID NO: 17479 - DNA, 26 bp, Artificial sequence
  SiRNA target sequence
aaaaaataaaaagttatttattcaaa

SEQ ID NO: 17480 - DNA, 26 bp, Artificial sequence
  SiRNA target sequence
aaaaataaaaagttatttattcaaat

SEQ ID NO: 17481 - DNA, 26 bp, Artificial sequence
  SiRNA target sequence
aaaataaaaagttatttattcaaatc

SEQ ID NO: 17482 - DNA, 26 bp, Artificial sequence
  SiRNA target sequence
aaataaaaagttatttattcaaatct

SEQ ID NO: 17483 - DNA, 26 bp, Artificial sequence
  SiRNA target sequence
aataaaaagttatttattcaaatctg

SEQ ID NO: 17484 - DNA, 26 bp, Artificial sequence
  SiRNA target sequence
ataaaaagttatttattcaaatctgc

SEQ ID NO: 17485 - DNA, 26 bp, Artificial sequence
  SiRNA target sequence
taaaaagttatttattcaaatctgcc

SEQ ID NO: 17486 - DNA, 26 bp, Artificial sequence
  SiRNA target sequence
aaaaagttatttattcaaatctgcca

SEQ ID NO: 17487 - DNA, 26 bp, Artificial sequence
  SiRNA target sequence
aaaagttatttattcaaatctgccat

SEQ ID NO: 17488 - DNA, 26 bp, Artificial sequence
  SiRNA target sequence
aaagttatttattcaaatctgccatt

SEQ ID NO: 17489 - DNA, 26 bp, Artificial sequence
  SiRNA target sequence
aagttatttattcaaatctgccatta

SEQ ID NO: 17490 - DNA, 26 bp, Artificial sequence
  SiRNA target sequence
agttatttattcaaatctgccattaa

SEQ ID NO: 17491 - DNA, 26 bp, Artificial sequence
  SiRNA target sequence
gttatttattcaaatctgccattaat

SEQ ID NO: 17492 - DNA, 26 bp, Artificial sequence
  SiRNA target sequence
ttatttattcaaatctgccattaata

SEQ ID NO: 17493 - DNA, 26 bp, Artificial sequence
  SiRNA target sequence
tatttattcaaatctgccattaatac

SEQ ID NO: 17494 - DNA, 26 bp, Artificial sequence
  SiRNA target sequence
atttattcaaatctgccattaataca

SEQ ID NO: 17495 - DNA, 26 bp, Artificial sequence
  SiRNA target sequence
tttattcaaatctgccattaatacat

SEQ ID NO: 17496 - DNA, 26 bp, Artificial sequence
  SiRNA target sequence
ttattcaaatctgccattaatacatc

SEQ ID NO: 17497 - DNA, 26 bp, Artificial sequence
  SiRNA target sequence
tattcaaatctgccattaatacatct

SEQ ID NO: 17498 - DNA, 26 bp, Artificial sequence
  SiRNA target sequence
attcaaatctgccattaatacatctt

SEQ ID NO: 17499 - DNA, 26 bp, Artificial sequence
  SiRNA target sequence
ttcaaatctgccattaatacatcttt

SEQ ID NO: 17500 - DNA, 26 bp, Artificial sequence
  SiRNA target sequence
tcaaatctgccattaatacatctttt

SEQ ID NO: 17501 - DNA, 26 bp, Artificial sequence
  SiRNA target sequence
caaatctgccattaatacatcttttg

SEQ ID NO: 17502 - DNA, 26 bp, Artificial sequence
  SiRNA target sequence
aaatctgccattaatacatcttttga

SEQ ID NO: 17503 - DNA, 26 bp, Artificial sequence
  SiRNA target sequence
aatctgccattaatacatcttttgat

SEQ ID NO: 17504 - DNA, 26 bp, Artificial sequence
  SiRNA target sequence
atctgccattaatacatcttttgata

SEQ ID NO: 17505 - DNA, 26 bp, Artificial sequence
  SiRNA target sequence
tctgccattaatacatcttttgatac

SEQ ID NO: 17506 - DNA, 26 bp, Artificial sequence
  SiRNA target sequence
ctgccattaatacatcttttgatact

SEQ ID NO: 17507 - DNA, 26 bp, Artificial sequence
  SiRNA target sequence
tgccattaatacatcttttgatactt

SEQ ID NO: 17508 - DNA, 26 bp, Artificial sequence
  SiRNA target sequence
gccattaatacatcttttgatacttt

SEQ ID NO: 17509 - DNA, 26 bp, Artificial sequence
  SiRNA target sequence
ccattaatacatcttttgatactttt

SEQ ID NO: 17510 - DNA, 26 bp, Artificial sequence
  SiRNA target sequence
cattaatacatcttttgatactttta

SEQ ID NO: 17511 - DNA, 26 bp, Artificial sequence
  SiRNA target sequence
attaatacatcttttgatacttttaa

SEQ ID NO: 17512 - DNA, 26 bp, Artificial sequence
  SiRNA target sequence
ttaatacatcttttgatacttttaat

SEQ ID NO: 17513 - DNA, 26 bp, Artificial sequence
  SiRNA target sequence
taatacatcttttgatacttttaatt

SEQ ID NO: 17514 - DNA, 26 bp, Artificial sequence
  SiRNA target sequence
aatacatcttttgatacttttaattt

SEQ ID NO: 17515 - DNA, 26 bp, Artificial sequence
  SiRNA target sequence
atacatcttttgatacttttaattta

SEQ ID NO: 17516 - DNA, 26 bp, Artificial sequence
  SiRNA target sequence
tacatcttttgatacttttaatttag

SEQ ID NO: 17517 - DNA, 26 bp, Artificial sequence
  SiRNA target sequence
acatcttttgatacttttaatttaga

SEQ ID NO: 17518 - DNA, 26 bp, Artificial sequence
  SiRNA target sequence
catcttttgatacttttaatttagaa

SEQ ID NO: 17519 - DNA, 26 bp, Artificial sequence
  SiRNA target sequence
atcttttgatacttttaatttagaaa

SEQ ID NO: 17520 - DNA, 26 bp, Artificial sequence
  SiRNA target sequence
tcttttgatacttttaatttagaaaa

SEQ ID NO: 17521 - DNA, 26 bp, Artificial sequence
  SiRNA target sequence
cttttgatacttttaatttagaaaat

SEQ ID NO: 17522 - DNA, 26 bp, Artificial sequence
  SiRNA target sequence
ttttgatacttttaatttagaaaatg

SEQ ID NO: 17523 - DNA, 26 bp, Artificial sequence
  SiRNA target sequence
tttgatacttttaatttagaaaatgt

SEQ ID NO: 17524 - DNA, 26 bp, Artificial sequence
  SiRNA target sequence
ttgatacttttaatttagaaaatgta

SEQ ID NO: 17525 - DNA, 26 bp, Artificial sequence
  SiRNA target sequence
tgatacttttaatttagaaaatgtaa

SEQ ID NO: 17526 - DNA, 26 bp, Artificial sequence
  SiRNA target sequence
gatacttttaatttagaaaatgtaag

SEQ ID NO: 17527 - DNA, 26 bp, Artificial sequence
  SiRNA target sequence
atacttttaatttagaaaatgtaagc

SEQ ID NO: 17528 - DNA, 26 bp, Artificial sequence
  SiRNA target sequence
tacttttaatttagaaaatgtaagca

SEQ ID NO: 17529 - DNA, 26 bp, Artificial sequence
  SiRNA target sequence
acttttaatttagaaaatgtaagcat

SEQ ID NO: 17530 - DNA, 26 bp, Artificial sequence
  SiRNA target sequence
cttttaatttagaaaatgtaagcatt

SEQ ID NO: 17531 - DNA, 26 bp, Artificial sequence
  SiRNA target sequence
ttttaatttagaaaatgtaagcatta

SEQ ID NO: 17532 - DNA, 26 bp, Artificial sequence
  SiRNA target sequence
tttaatttagaaaatgtaagcattac

SEQ ID NO: 17533 - DNA, 26 bp, Artificial sequence
  SiRNA target sequence
ttaatttagaaaatgtaagcattact

SEQ ID NO: 17534 - DNA, 26 bp, Artificial sequence
  SiRNA target sequence
taatttagaaaatgtaagcattacta

SEQ ID NO: 17535 - DNA, 26 bp, Artificial sequence
  SiRNA target sequence
aatttagaaaatgtaagcattactag

SEQ ID NO: 17536 - DNA, 26 bp, Artificial sequence
  SiRNA target sequence
atttagaaaatgtaagcattactagc

SEQ ID NO: 17537 - DNA, 26 bp, Artificial sequence
  SiRNA target sequence
tttagaaaatgtaagcattactagct

SEQ ID NO: 17538 - DNA, 26 bp, Artificial sequence
  SiRNA target sequence
ttagaaaatgtaagcattactagctt

SEQ ID NO: 17539 - DNA, 26 bp, Artificial sequence
  SiRNA target sequence
tagaaaatgtaagcattactagctta

SEQ ID NO: 17540 - DNA, 26 bp, Artificial sequence
  SiRNA target sequence
agaaaatgtaagcattactagcttaa

SEQ ID NO: 17541 - DNA, 26 bp, Artificial sequence
  SiRNA target sequence
gaaaatgtaagcattactagcttaaa

SEQ ID NO: 17542 - DNA, 26 bp, Artificial sequence
  SiRNA target sequence
aaaatgtaagcattactagcttaaat

SEQ ID NO: 17543 - DNA, 26 bp, Artificial sequence
  SiRNA target sequence
aaatgtaagcattactagcttaaata

SEQ ID NO: 17544 - DNA, 26 bp, Artificial sequence
  SiRNA target sequence
aatgtaagcattactagcttaaatac

SEQ ID NO: 17545 - DNA, 26 bp, Artificial sequence
  SiRNA target sequence
atgtaagcattactagcttaaatacg

SEQ ID NO: 17546 - DNA, 26 bp, Artificial sequence
  SiRNA target sequence
tgtaagcattactagcttaaatacgt

SEQ ID NO: 17547 - DNA, 26 bp, Artificial sequence
  SiRNA target sequence
gtaagcattactagcttaaatacgta

SEQ ID NO: 17548 - DNA, 26 bp, Artificial sequence
  SiRNA target sequence
taagcattactagcttaaatacgtac

SEQ ID NO: 17549 - DNA, 26 bp, Artificial sequence
  SiRNA target sequence
aagcattactagcttaaatacgtaca

SEQ ID NO: 17550 - DNA, 26 bp, Artificial sequence
  SiRNA target sequence
agcattactagcttaaatacgtacac

SEQ ID NO: 17551 - DNA, 26 bp, Artificial sequence
  SiRNA target sequence
gcattactagcttaaatacgtacacc

SEQ ID NO: 17552 - DNA, 26 bp, Artificial sequence
  SiRNA target sequence
cattactagcttaaatacgtacaccg

SEQ ID NO: 17553 - DNA, 26 bp, Artificial sequence
  SiRNA target sequence
attactagcttaaatacgtacaccgg

SEQ ID NO: 17554 - DNA, 26 bp, Artificial sequence
  SiRNA target sequence
ttactagcttaaatacgtacaccggt

SEQ ID NO: 17555 - DNA, 26 bp, Artificial sequence
  SiRNA target sequence
tactagcttaaatacgtacaccggtg

SEQ ID NO: 17556 - DNA, 26 bp, Artificial sequence
  SiRNA target sequence
actagcttaaatacgtacaccggtgt

SEQ ID NO: 17557 - DNA, 26 bp, Artificial sequence
  SiRNA target sequence
ctagcttaaatacgtacaccggtgtt

SEQ ID NO: 17558 - DNA, 26 bp, Artificial sequence
  SiRNA target sequence
tagcttaaatacgtacaccggtgtta

SEQ ID NO: 17559 - DNA, 26 bp, Artificial sequence
  SiRNA target sequence
agcttaaatacgtacaccggtgttaa

SEQ ID NO: 17560 - DNA, 26 bp, Artificial sequence
  SiRNA target sequence
gcttaaatacgtacaccggtgttaaa

SEQ ID NO: 17561 - DNA, 26 bp, Artificial sequence
  SiRNA target sequence
cttaaatacgtacaccggtgttaaaa

SEQ ID NO: 17562 - DNA, 26 bp, Artificial sequence
  SiRNA target sequence
ttaaatacgtacaccggtgttaaaac

SEQ ID NO: 17563 - DNA, 26 bp, Artificial sequence
  SiRNA target sequence
taaatacgtacaccggtgttaaaacc

SEQ ID NO: 17564 - DNA, 26 bp, Artificial sequence
  SiRNA target sequence
aaatacgtacaccggtgttaaaaccg

SEQ ID NO: 17565 - DNA, 26 bp, Artificial sequence
  SiRNA target sequence
aatacgtacaccggtgttaaaaccga

SEQ ID NO: 17566 - DNA, 26 bp, Artificial sequence
  SiRNA target sequence
atacgtacaccggtgttaaaaccgaa

SEQ ID NO: 17567 - DNA, 26 bp, Artificial sequence
  SiRNA target sequence
tacgtacaccggtgttaaaaccgaaa

SEQ ID NO: 17568 - DNA, 26 bp, Artificial sequence
  SiRNA target sequence
acgtacaccggtgttaaaaccgaaat

SEQ ID NO: 17569 - DNA, 26 bp, Artificial sequence
  SiRNA target sequence
cgtacaccggtgttaaaaccgaaata

SEQ ID NO: 17570 - DNA, 26 bp, Artificial sequence
  SiRNA target sequence
gtacaccggtgttaaaaccgaaatat

SEQ ID NO: 17571 - DNA, 26 bp, Artificial sequence
  SiRNA target sequence
tacaccggtgttaaaaccgaaatatc

SEQ ID NO: 17572 - DNA, 26 bp, Artificial sequence
  SiRNA target sequence
acaccggtgttaaaaccgaaatatca

SEQ ID NO: 17573 - DNA, 26 bp, Artificial sequence
  SiRNA target sequence
caccggtgttaaaaccgaaatatcaa

SEQ ID NO: 17574 - DNA, 26 bp, Artificial sequence
  SiRNA target sequence
accggtgttaaaaccgaaatatcaaa

SEQ ID NO: 17575 - DNA, 26 bp, Artificial sequence
  SiRNA target sequence
ccggtgttaaaaccgaaatatcaaaa

SEQ ID NO: 17576 - DNA, 26 bp, Artificial sequence
  SiRNA target sequence
cggtgttaaaaccgaaatatcaaaaa

SEQ ID NO: 17577 - DNA, 26 bp, Artificial sequence
  SiRNA target sequence
ggtgttaaaaccgaaatatcaaaaac

SEQ ID NO: 17578 - DNA, 26 bp, Artificial sequence
  SiRNA target sequence
gtgttaaaaccgaaatatcaaaaacc

SEQ ID NO: 17579 - DNA, 26 bp, Artificial sequence
  SiRNA target sequence
tgttaaaaccgaaatatcaaaaaccg

SEQ ID NO: 17580 - DNA, 26 bp, Artificial sequence
  SiRNA target sequence
gttaaaaccgaaatatcaaaaaccgt

SEQ ID NO: 17581 - DNA, 26 bp, Artificial sequence
  SiRNA target sequence
ttaaaaccgaaatatcaaaaaccgta

SEQ ID NO: 17582 - DNA, 26 bp, Artificial sequence
  SiRNA target sequence
taaaaccgaaatatcaaaaaccgtat

SEQ ID NO: 17583 - DNA, 26 bp, Artificial sequence
  SiRNA target sequence
aaaaccgaaatatcaaaaaccgtatc

SEQ ID NO: 17584 - DNA, 26 bp, Artificial sequence
  SiRNA target sequence
aaaccgaaatatcaaaaaccgtatca

SEQ ID NO: 17585 - DNA, 26 bp, Artificial sequence
  SiRNA target sequence
aaccgaaatatcaaaaaccgtatcac

SEQ ID NO: 17586 - DNA, 26 bp, Artificial sequence
  SiRNA target sequence
accgaaatatcaaaaaccgtatcacc

SEQ ID NO: 17587 - DNA, 26 bp, Artificial sequence
  SiRNA target sequence
ccgaaatatcaaaaaccgtatcacca

SEQ ID NO: 17588 - DNA, 26 bp, Artificial sequence
  SiRNA target sequence
cgaaatatcaaaaaccgtatcaccac

SEQ ID NO: 17589 - DNA, 26 bp, Artificial sequence
  SiRNA target sequence
gaaatatcaaaaaccgtatcaccaca

SEQ ID NO: 17590 - DNA, 26 bp, Artificial sequence
  SiRNA target sequence
aaatatcaaaaaccgtatcaccacac

SEQ ID NO: 17591 - DNA, 26 bp, Artificial sequence
  SiRNA target sequence
aatatcaaaaaccgtatcaccacact

SEQ ID NO: 17592 - DNA, 26 bp, Artificial sequence
  SiRNA target sequence
atatcaaaaaccgtatcaccacactt

SEQ ID NO: 17593 - DNA, 26 bp, Artificial sequence
  SiRNA target sequence
tatcaaaaaccgtatcaccacacttc

SEQ ID NO: 17594 - DNA, 26 bp, Artificial sequence
  SiRNA target sequence
atcaaaaaccgtatcaccacacttcc

SEQ ID NO: 17595 - DNA, 26 bp, Artificial sequence
  SiRNA target sequence
tcaaaaaccgtatcaccacacttcca

SEQ ID NO: 17596 - DNA, 26 bp, Artificial sequence
  SiRNA target sequence
caaaaaccgtatcaccacacttccag

SEQ ID NO: 17597 - DNA, 26 bp, Artificial sequence
  SiRNA target sequence
aaaaaccgtatcaccacacttccaga

SEQ ID NO: 17598 - DNA, 26 bp, Artificial sequence
  SiRNA target sequence
aaaaccgtatcaccacacttccagat

SEQ ID NO: 17599 - DNA, 26 bp, Artificial sequence
  SiRNA target sequence
aaaccgtatcaccacacttccagatt

SEQ ID NO: 17600 - DNA, 26 bp, Artificial sequence
  SiRNA target sequence
aaccgtatcaccacacttccagattt

SEQ ID NO: 17601 - DNA, 26 bp, Artificial sequence
  SiRNA target sequence
accgtatcaccacacttccagatttc

SEQ ID NO: 17602 - DNA, 26 bp, Artificial sequence
  SiRNA target sequence
ccgtatcaccacacttccagatttct

SEQ ID NO: 17603 - DNA, 26 bp, Artificial sequence
  SiRNA target sequence
cgtatcaccacacttccagatttctc

SEQ ID NO: 17604 - DNA, 26 bp, Artificial sequence
  SiRNA target sequence
gtatcaccacacttccagatttctca

SEQ ID NO: 17605 - DNA, 26 bp, Artificial sequence
  SiRNA target sequence
tatcaccacacttccagatttctcat

SEQ ID NO: 17606 - DNA, 26 bp, Artificial sequence
  SiRNA target sequence
atcaccacacttccagatttctcatg

SEQ ID NO: 17607 - DNA, 26 bp, Artificial sequence
  SiRNA target sequence
tcaccacacttccagatttctcatgt

SEQ ID NO: 17608 - DNA, 26 bp, Artificial sequence
  SiRNA target sequence
caccacacttccagatttctcatgtc

SEQ ID NO: 17609 - DNA, 26 bp, Artificial sequence
  SiRNA target sequence
accacacttccagatttctcatgtct

SEQ ID NO: 17610 - DNA, 26 bp, Artificial sequence
  SiRNA target sequence
ccacacttccagatttctcatgtctc

SEQ ID NO: 17611 - DNA, 26 bp, Artificial sequence
  SiRNA target sequence
cacacttccagatttctcatgtctct

SEQ ID NO: 17612 - DNA, 26 bp, Artificial sequence
  SiRNA target sequence
acacttccagatttctcatgtctctt

SEQ ID NO: 17613 - DNA, 26 bp, Artificial sequence
  SiRNA target sequence
cacttccagatttctcatgtctcttc

SEQ ID NO: 17614 - DNA, 26 bp, Artificial sequence
  SiRNA target sequence
acttccagatttctcatgtctcttct

SEQ ID NO: 17615 - DNA, 26 bp, Artificial sequence
  SiRNA target sequence
cttccagatttctcatgtctcttcta

SEQ ID NO: 17616 - DNA, 26 bp, Artificial sequence
  SiRNA target sequence
ttccagatttctcatgtctcttctat

SEQ ID NO: 17617 - DNA, 26 bp, Artificial sequence
  SiRNA target sequence
tccagatttctcatgtctcttctatg

SEQ ID NO: 17618 - DNA, 26 bp, Artificial sequence
  SiRNA target sequence
ccagatttctcatgtctcttctatgg

SEQ ID NO: 17619 - DNA, 26 bp, Artificial sequence
  SiRNA target sequence
cagatttctcatgtctcttctatggg

SEQ ID NO: 17620 - DNA, 26 bp, Artificial sequence
  SiRNA target sequence
agatttctcatgtctcttctatgggc

SEQ ID NO: 17621 - DNA, 26 bp, Artificial sequence
  SiRNA target sequence
gatttctcatgtctcttctatgggcg

SEQ ID NO: 17622 - DNA, 26 bp, Artificial sequence
  SiRNA target sequence
atttctcatgtctcttctatgggcgc

SEQ ID NO: 17623 - DNA, 26 bp, Artificial sequence
  SiRNA target sequence
tttctcatgtctcttctatgggcgca

SEQ ID NO: 17624 - DNA, 26 bp, Artificial sequence
  SiRNA target sequence
ttctcatgtctcttctatgggcgcag

SEQ ID NO: 17625 - DNA, 26 bp, Artificial sequence
  SiRNA target sequence
tctcatgtctcttctatgggcgcaga

SEQ ID NO: 17626 - DNA, 26 bp, Artificial sequence
  SiRNA target sequence
ctcatgtctcttctatgggcgcagat

SEQ ID NO: 17627 - DNA, 26 bp, Artificial sequence
  SiRNA target sequence
tcatgtctcttctatgggcgcagatt

SEQ ID NO: 17628 - DNA, 26 bp, Artificial sequence
  SiRNA target sequence
catgtctcttctatgggcgcagattt

SEQ ID NO: 17629 - DNA, 26 bp, Artificial sequence
  SiRNA target sequence
atgtctcttctatgggcgcagatttc

SEQ ID NO: 17630 - DNA, 26 bp, Artificial sequence
  SiRNA target sequence
tgtctcttctatgggcgcagatttcg

SEQ ID NO: 17631 - DNA, 26 bp, Artificial sequence
  SiRNA target sequence
gtctcttctatgggcgcagatttcga

SEQ ID NO: 17632 - DNA, 26 bp, Artificial sequence
  SiRNA target sequence
tctcttctatgggcgcagatttcgac

SEQ ID NO: 17633 - DNA, 26 bp, Artificial sequence
  SiRNA target sequence
ctcttctatgggcgcagatttcgaca

SEQ ID NO: 17634 - DNA, 26 bp, Artificial sequence
  SiRNA target sequence
tcttctatgggcgcagatttcgacat

SEQ ID NO: 17635 - DNA, 26 bp, Artificial sequence
  SiRNA target sequence
cttctatgggcgcagatttcgacata

SEQ ID NO: 17636 - DNA, 26 bp, Artificial sequence
  SiRNA target sequence
ttctatgggcgcagatttcgacataa

SEQ ID NO: 17637 - DNA, 26 bp, Artificial sequence
  SiRNA target sequence
tctatgggcgcagatttcgacataaa

SEQ ID NO: 17638 - DNA, 26 bp, Artificial sequence
  SiRNA target sequence
ctatgggcgcagatttcgacataaaa

SEQ ID NO: 17639 - DNA, 26 bp, Artificial sequence
  SiRNA target sequence
tatgggcgcagatttcgacataaaac

SEQ ID NO: 17640 - DNA, 26 bp, Artificial sequence
  SiRNA target sequence
atgggcgcagatttcgacataaaaca

SEQ ID NO: 17641 - DNA, 26 bp, Artificial sequence
  SiRNA target sequence
tgggcgcagatttcgacataaaacag

SEQ ID NO: 17642 - DNA, 26 bp, Artificial sequence
  SiRNA target sequence
gggcgcagatttcgacataaaacaga

SEQ ID NO: 17643 - DNA, 26 bp, Artificial sequence
  SiRNA target sequence
ggcgcagatttcgacataaaacagac

SEQ ID NO: 17644 - DNA, 26 bp, Artificial sequence
  SiRNA target sequence
gcgcagatttcgacataaaacagaca

SEQ ID NO: 17645 - DNA, 26 bp, Artificial sequence
  SiRNA target sequence
cgcagatttcgacataaaacagacat

SEQ ID NO: 17646 - DNA, 26 bp, Artificial sequence
  SiRNA target sequence
gcagatttcgacataaaacagacata

SEQ ID NO: 17647 - DNA, 26 bp, Artificial sequence
  SiRNA target sequence
cagatttcgacataaaacagacatac

SEQ ID NO: 17648 - DNA, 26 bp, Artificial sequence
  SiRNA target sequence
agatttcgacataaaacagacatacg

SEQ ID NO: 17649 - DNA, 26 bp, Artificial sequence
  SiRNA target sequence
gatttcgacataaaacagacatacgc

SEQ ID NO: 17650 - DNA, 26 bp, Artificial sequence
  SiRNA target sequence
atttcgacataaaacagacatacgcc

SEQ ID NO: 17651 - DNA, 26 bp, Artificial sequence
  SiRNA target sequence
tttcgacataaaacagacatacgcca

SEQ ID NO: 17652 - DNA, 26 bp, Artificial sequence
  SiRNA target sequence
ttcgacataaaacagacatacgccac

SEQ ID NO: 17653 - DNA, 26 bp, Artificial sequence
  SiRNA target sequence
tcgacataaaacagacatacgccacg

SEQ ID NO: 17654 - DNA, 26 bp, Artificial sequence
  SiRNA target sequence
cgacataaaacagacatacgccacgt

SEQ ID NO: 17655 - DNA, 26 bp, Artificial sequence
  SiRNA target sequence
gacataaaacagacatacgccacgtt

SEQ ID NO: 17656 - DNA, 26 bp, Artificial sequence
  SiRNA target sequence
acataaaacagacatacgccacgttc

SEQ ID NO: 17657 - DNA, 26 bp, Artificial sequence
  SiRNA target sequence
cataaaacagacatacgccacgttct

SEQ ID NO: 17658 - DNA, 26 bp, Artificial sequence
  SiRNA target sequence
ataaaacagacatacgccacgttctg

SEQ ID NO: 17659 - DNA, 26 bp, Artificial sequence
  SiRNA target sequence
taaaacagacatacgccacgttctgc

SEQ ID NO: 17660 - DNA, 26 bp, Artificial sequence
  SiRNA target sequence
aaaacagacatacgccacgttctgct

SEQ ID NO: 17661 - DNA, 26 bp, Artificial sequence
  SiRNA target sequence
aaacagacatacgccacgttctgctt

SEQ ID NO: 17662 - DNA, 26 bp, Artificial sequence
  SiRNA target sequence
aacagacatacgccacgttctgcttt

SEQ ID NO: 17663 - DNA, 26 bp, Artificial sequence
  SiRNA target sequence
acagacatacgccacgttctgcttta

SEQ ID NO: 17664 - DNA, 26 bp, Artificial sequence
  SiRNA target sequence
cagacatacgccacgttctgctttaa

SEQ ID NO: 17665 - DNA, 26 bp, Artificial sequence
  SiRNA target sequence
agacatacgccacgttctgctttaac

SEQ ID NO: 17666 - DNA, 26 bp, Artificial sequence
  SiRNA target sequence
gacatacgccacgttctgctttaaca

SEQ ID NO: 17667 - DNA, 26 bp, Artificial sequence
  SiRNA target sequence
acatacgccacgttctgctttaacaa

SEQ ID NO: 17668 - DNA, 26 bp, Artificial sequence
  SiRNA target sequence
catacgccacgttctgctttaacaat

SEQ ID NO: 17669 - DNA, 26 bp, Artificial sequence
  SiRNA target sequence
atacgccacgttctgctttaacaatc

SEQ ID NO: 17670 - DNA, 26 bp, Artificial sequence
  SiRNA target sequence
tacgccacgttctgctttaacaatct

SEQ ID NO: 17671 - DNA, 26 bp, Artificial sequence
  SiRNA target sequence
acgccacgttctgctttaacaatctt

SEQ ID NO: 17672 - DNA, 26 bp, Artificial sequence
  SiRNA target sequence
cgccacgttctgctttaacaatcttt

SEQ ID NO: 17673 - DNA, 26 bp, Artificial sequence
  SiRNA target sequence
gccacgttctgctttaacaatctttt

SEQ ID NO: 17674 - DNA, 26 bp, Artificial sequence
  SiRNA target sequence
ccacgttctgctttaacaatcttttg

SEQ ID NO: 17675 - DNA, 26 bp, Artificial sequence
  SiRNA target sequence
cacgttctgctttaacaatcttttgc

SEQ ID NO: 17676 - DNA, 26 bp, Artificial sequence
  SiRNA target sequence
acgttctgctttaacaatcttttgct

SEQ ID NO: 17677 - DNA, 26 bp, Artificial sequence
  SiRNA target sequence
cgttctgctttaacaatcttttgcta

SEQ ID NO: 17678 - DNA, 26 bp, Artificial sequence
  SiRNA target sequence
gttctgctttaacaatcttttgctac

SEQ ID NO: 17679 - DNA, 26 bp, Artificial sequence
  SiRNA target sequence
ttctgctttaacaatcttttgctaca

SEQ ID NO: 17680 - DNA, 26 bp, Artificial sequence
  SiRNA target sequence
tctgctttaacaatcttttgctacaa

SEQ ID NO: 17681 - DNA, 26 bp, Artificial sequence
  SiRNA target sequence
ctgctttaacaatcttttgctacaaa

SEQ ID NO: 17682 - DNA, 26 bp, Artificial sequence
  SiRNA target sequence
tgctttaacaatcttttgctacaaac

SEQ ID NO: 17683 - DNA, 26 bp, Artificial sequence
  SiRNA target sequence
gctttaacaatcttttgctacaaacg

SEQ ID NO: 17684 - DNA, 26 bp, Artificial sequence
  SiRNA target sequence
ctttaacaatcttttgctacaaacga

SEQ ID NO: 17685 - DNA, 26 bp, Artificial sequence
  SiRNA target sequence
tttaacaatcttttgctacaaacgag

SEQ ID NO: 17686 - DNA, 26 bp, Artificial sequence
  SiRNA target sequence
ttaacaatcttttgctacaaacgagc

SEQ ID NO: 17687 - DNA, 26 bp, Artificial sequence
  SiRNA target sequence
taacaatcttttgctacaaacgagca

SEQ ID NO: 17688 - DNA, 26 bp, Artificial sequence
  SiRNA target sequence
aacaatcttttgctacaaacgagcat

SEQ ID NO: 17689 - DNA, 26 bp, Artificial sequence
  SiRNA target sequence
acaatcttttgctacaaacgagcata

SEQ ID NO: 17690 - DNA, 26 bp, Artificial sequence
  SiRNA target sequence
caatcttttgctacaaacgagcatag

SEQ ID NO: 17691 - DNA, 26 bp, Artificial sequence
  SiRNA target sequence
aatcttttgctacaaacgagcataga

SEQ ID NO: 17692 - DNA, 26 bp, Artificial sequence
  SiRNA target sequence
atcttttgctacaaacgagcatagac

SEQ ID NO: 17693 - DNA, 26 bp, Artificial sequence
  SiRNA target sequence
tcttttgctacaaacgagcatagacc

SEQ ID NO: 17694 - DNA, 26 bp, Artificial sequence
  SiRNA target sequence
cttttgctacaaacgagcatagacca

SEQ ID NO: 17695 - DNA, 26 bp, Artificial sequence
  SiRNA target sequence
ttttgctacaaacgagcatagaccaa

SEQ ID NO: 17696 - DNA, 26 bp, Artificial sequence
  SiRNA target sequence
tttgctacaaacgagcatagaccaag

SEQ ID NO: 17697 - DNA, 26 bp, Artificial sequence
  SiRNA target sequence
ttgctacaaacgagcatagaccaaga

SEQ ID NO: 17698 - DNA, 26 bp, Artificial sequence
  SiRNA target sequence
tgctacaaacgagcatagaccaagac

SEQ ID NO: 17699 - DNA, 26 bp, Artificial sequence
  SiRNA target sequence
gctacaaacgagcatagaccaagaca

SEQ ID NO: 17700 - DNA, 26 bp, Artificial sequence
  SiRNA target sequence
ctacaaacgagcatagaccaagacaa

SEQ ID NO: 17701 - DNA, 26 bp, Artificial sequence
  SiRNA target sequence
tacaaacgagcatagaccaagacaaa

SEQ ID NO: 17702 - DNA, 26 bp, Artificial sequence
  SiRNA target sequence
acaaacgagcatagaccaagacaaaa

SEQ ID NO: 17703 - DNA, 26 bp, Artificial sequence
  SiRNA target sequence
caaacgagcatagaccaagacaaaat

SEQ ID NO: 17704 - DNA, 26 bp, Artificial sequence
  SiRNA target sequence
aaacgagcatagaccaagacaaaata

SEQ ID NO: 17705 - DNA, 26 bp, Artificial sequence
  SiRNA target sequence
aacgagcatagaccaagacaaaatat

SEQ ID NO: 17706 - DNA, 26 bp, Artificial sequence
  SiRNA target sequence
acgagcatagaccaagacaaaatatt

SEQ ID NO: 17707 - DNA, 26 bp, Artificial sequence
  SiRNA target sequence
cgagcatagaccaagacaaaatattt

SEQ ID NO: 17708 - DNA, 26 bp, Artificial sequence
  SiRNA target sequence
gagcatagaccaagacaaaatattta

SEQ ID NO: 17709 - DNA, 26 bp, Artificial sequence
  SiRNA target sequence
agcatagaccaagacaaaatatttag

SEQ ID NO: 17710 - DNA, 26 bp, Artificial sequence
  SiRNA target sequence
gcatagaccaagacaaaatatttaga

SEQ ID NO: 17711 - DNA, 26 bp, Artificial sequence
  SiRNA target sequence
catagaccaagacaaaatatttagaa

SEQ ID NO: 17712 - DNA, 26 bp, Artificial sequence
  SiRNA target sequence
atagaccaagacaaaatatttagaat

SEQ ID NO: 17713 - DNA, 26 bp, Artificial sequence
  SiRNA target sequence
tagaccaagacaaaatatttagaata

SEQ ID NO: 17714 - DNA, 26 bp, Artificial sequence
  SiRNA target sequence
agaccaagacaaaatatttagaataa

SEQ ID NO: 17715 - DNA, 26 bp, Artificial sequence
  SiRNA target sequence
gaccaagacaaaatatttagaataag

SEQ ID NO: 17716 - DNA, 26 bp, Artificial sequence
  SiRNA target sequence
accaagacaaaatatttagaataaga

SEQ ID NO: 17717 - DNA, 26 bp, Artificial sequence
  SiRNA target sequence
ccaagacaaaatatttagaataagag

SEQ ID NO: 17718 - DNA, 26 bp, Artificial sequence
  SiRNA target sequence
caagacaaaatatttagaataagagg

SEQ ID NO: 17719 - DNA, 26 bp, Artificial sequence
  SiRNA target sequence
aagacaaaatatttagaataagaggt

SEQ ID NO: 17720 - DNA, 26 bp, Artificial sequence
  SiRNA target sequence
agacaaaatatttagaataagaggta

SEQ ID NO: 17721 - DNA, 26 bp, Artificial sequence
  SiRNA target sequence
gacaaaatatttagaataagaggtac

SEQ ID NO: 17722 - DNA, 26 bp, Artificial sequence
  SiRNA target sequence
acaaaatatttagaataagaggtacc

SEQ ID NO: 17723 - DNA, 26 bp, Artificial sequence
  SiRNA target sequence
caaaatatttagaataagaggtaccc

SEQ ID NO: 17724 - DNA, 26 bp, Artificial sequence
  SiRNA target sequence
aaaatatttagaataagaggtaccca

SEQ ID NO: 17725 - DNA, 26 bp, Artificial sequence
  SiRNA target sequence
aaatatttagaataagaggtacccac

SEQ ID NO: 17726 - DNA, 26 bp, Artificial sequence
  SiRNA target sequence
aatatttagaataagaggtacccaca

SEQ ID NO: 17727 - DNA, 26 bp, Artificial sequence
  SiRNA target sequence
atatttagaataagaggtacccacat

SEQ ID NO: 17728 - DNA, 26 bp, Artificial sequence
  SiRNA target sequence
tatttagaataagaggtacccacatg

SEQ ID NO: 17729 - DNA, 26 bp, Artificial sequence
  SiRNA target sequence
atttagaataagaggtacccacatgt

SEQ ID NO: 17730 - DNA, 26 bp, Artificial sequence
  SiRNA target sequence
tttagaataagaggtacccacatgtt

SEQ ID NO: 17731 - DNA, 26 bp, Artificial sequence
  SiRNA target sequence
ttagaataagaggtacccacatgttt

SEQ ID NO: 17732 - DNA, 26 bp, Artificial sequence
  SiRNA target sequence
tagaataagaggtacccacatgttta

SEQ ID NO: 17733 - DNA, 26 bp, Artificial sequence
  SiRNA target sequence
agaataagaggtacccacatgtttaa

SEQ ID NO: 17734 - DNA, 26 bp, Artificial sequence
  SiRNA target sequence
gaataagaggtacccacatgtttaaa

SEQ ID NO: 17735 - DNA, 26 bp, Artificial sequence
  SiRNA target sequence
aataagaggtacccacatgtttaaaa

SEQ ID NO: 17736 - DNA, 26 bp, Artificial sequence
  SiRNA target sequence
ataagaggtacccacatgtttaaaaa

SEQ ID NO: 17737 - DNA, 26 bp, Artificial sequence
  SiRNA target sequence
taagaggtacccacatgtttaaaaat

SEQ ID NO: 17738 - DNA, 26 bp, Artificial sequence
  SiRNA target sequence
aagaggtacccacatgtttaaaaatc

SEQ ID NO: 17739 - DNA, 26 bp, Artificial sequence
  SiRNA target sequence
agaggtacccacatgtttaaaaatct

SEQ ID NO: 17740 - DNA, 26 bp, Artificial sequence
  SiRNA target sequence
gaggtacccacatgtttaaaaatcta

SEQ ID NO: 17741 - DNA, 26 bp, Artificial sequence
  SiRNA target sequence
aggtacccacatgtttaaaaatctac

SEQ ID NO: 17742 - DNA, 26 bp, Artificial sequence
  SiRNA target sequence
ggtacccacatgtttaaaaatctact

SEQ ID NO: 17743 - DNA, 26 bp, Artificial sequence
  SiRNA target sequence
gtacccacatgtttaaaaatctactt

SEQ ID NO: 17744 - DNA, 26 bp, Artificial sequence
  SiRNA target sequence
tacccacatgtttaaaaatctactta

SEQ ID NO: 17745 - DNA, 26 bp, Artificial sequence
  SiRNA target sequence
acccacatgtttaaaaatctacttac

SEQ ID NO: 17746 - DNA, 26 bp, Artificial sequence
  SiRNA target sequence
cccacatgtttaaaaatctacttact

SEQ ID NO: 17747 - DNA, 26 bp, Artificial sequence
  SiRNA target sequence
ccacatgtttaaaaatctacttacta

SEQ ID NO: 17748 - DNA, 26 bp, Artificial sequence
  SiRNA target sequence
cacatgtttaaaaatctacttactaa

SEQ ID NO: 17749 - DNA, 26 bp, Artificial sequence
  SiRNA target sequence
acatgtttaaaaatctacttactaaa

SEQ ID NO: 17750 - DNA, 26 bp, Artificial sequence
  SiRNA target sequence
catgtttaaaaatctacttactaaat

SEQ ID NO: 17751 - DNA, 26 bp, Artificial sequence
  SiRNA target sequence
atgtttaaaaatctacttactaaatt

SEQ ID NO: 17752 - DNA, 26 bp, Artificial sequence
  SiRNA target sequence
tgtttaaaaatctacttactaaattc

SEQ ID NO: 17753 - DNA, 26 bp, Artificial sequence
  SiRNA target sequence
gtttaaaaatctacttactaaattcc

SEQ ID NO: 17754 - DNA, 26 bp, Artificial sequence
  SiRNA target sequence
tttaaaaatctacttactaaattcca

SEQ ID NO: 17755 - DNA, 26 bp, Artificial sequence
  SiRNA target sequence
ttaaaaatctacttactaaattccat

SEQ ID NO: 17756 - DNA, 26 bp, Artificial sequence
  SiRNA target sequence
taaaaatctacttactaaattccata

SEQ ID NO: 17757 - DNA, 26 bp, Artificial sequence
  SiRNA target sequence
aaaaatctacttactaaattccatac

SEQ ID NO: 17758 - DNA, 26 bp, Artificial sequence
  SiRNA target sequence
aaaatctacttactaaattccataca

SEQ ID NO: 17759 - DNA, 26 bp, Artificial sequence
  SiRNA target sequence
aaatctacttactaaattccatacag

SEQ ID NO: 17760 - DNA, 26 bp, Artificial sequence
  SiRNA target sequence
aatctacttactaaattccatacagt

SEQ ID NO: 17761 - DNA, 26 bp, Artificial sequence
  SiRNA target sequence
atctacttactaaattccatacagta

SEQ ID NO: 17762 - DNA, 26 bp, Artificial sequence
  SiRNA target sequence
tctacttactaaattccatacagtaa

SEQ ID NO: 17763 - DNA, 26 bp, Artificial sequence
  SiRNA target sequence
ctacttactaaattccatacagtaat

SEQ ID NO: 17764 - DNA, 26 bp, Artificial sequence
  SiRNA target sequence
tacttactaaattccatacagtaatt

SEQ ID NO: 17765 - DNA, 26 bp, Artificial sequence
  SiRNA target sequence
acttactaaattccatacagtaattg

SEQ ID NO: 17766 - DNA, 26 bp, Artificial sequence
  SiRNA target sequence
cttactaaattccatacagtaattgg

SEQ ID NO: 17767 - DNA, 26 bp, Artificial sequence
  SiRNA target sequence
ttactaaattccatacagtaattggt

SEQ ID NO: 17768 - DNA, 26 bp, Artificial sequence
  SiRNA target sequence
tactaaattccatacagtaattggta

SEQ ID NO: 17769 - DNA, 26 bp, Artificial sequence
  SiRNA target sequence
actaaattccatacagtaattggtag

SEQ ID NO: 17770 - DNA, 26 bp, Artificial sequence
  SiRNA target sequence
ctaaattccatacagtaattggtaga

SEQ ID NO: 17771 - DNA, 26 bp, Artificial sequence
  SiRNA target sequence
taaattccatacagtaattggtagaa

SEQ ID NO: 17772 - DNA, 26 bp, Artificial sequence
  SiRNA target sequence
aaattccatacagtaattggtagaag

SEQ ID NO: 17773 - DNA, 26 bp, Artificial sequence
  SiRNA target sequence
aattccatacagtaattggtagaagt

SEQ ID NO: 17774 - DNA, 26 bp, Artificial sequence
  SiRNA target sequence
attccatacagtaattggtagaagta

SEQ ID NO: 17775 - DNA, 26 bp, Artificial sequence
  SiRNA target sequence
ttccatacagtaattggtagaagtaa

SEQ ID NO: 17776 - DNA, 26 bp, Artificial sequence
  SiRNA target sequence
tccatacagtaattggtagaagtaaa

SEQ ID NO: 17777 - DNA, 26 bp, Artificial sequence
  SiRNA target sequence
ccatacagtaattggtagaagtaaag

SEQ ID NO: 17778 - DNA, 26 bp, Artificial sequence
  SiRNA target sequence
catacagtaattggtagaagtaaaga

SEQ ID NO: 17779 - DNA, 26 bp, Artificial sequence
  SiRNA target sequence
atacagtaattggtagaagtaaagat

SEQ ID NO: 17780 - DNA, 26 bp, Artificial sequence
  SiRNA target sequence
tacagtaattggtagaagtaaagata

SEQ ID NO: 17781 - DNA, 26 bp, Artificial sequence
  SiRNA target sequence
acagtaattggtagaagtaaagatat

SEQ ID NO: 17782 - DNA, 26 bp, Artificial sequence
  SiRNA target sequence
cagtaattggtagaagtaaagatatc

SEQ ID NO: 17783 - DNA, 26 bp, Artificial sequence
  SiRNA target sequence
agtaattggtagaagtaaagatatct

SEQ ID NO: 17784 - DNA, 26 bp, Artificial sequence
  SiRNA target sequence
gtaattggtagaagtaaagatatctt

SEQ ID NO: 17785 - DNA, 26 bp, Artificial sequence
  SiRNA target sequence
taattggtagaagtaaagatatcttt

SEQ ID NO: 17786 - DNA, 26 bp, Artificial sequence
  SiRNA target sequence
aattggtagaagtaaagatatcttta

SEQ ID NO: 17787 - DNA, 26 bp, Artificial sequence
  SiRNA target sequence
attggtagaagtaaagatatctttac

SEQ ID NO: 17788 - DNA, 26 bp, Artificial sequence
  SiRNA target sequence
ttggtagaagtaaagatatctttaca

SEQ ID NO: 17789 - DNA, 26 bp, Artificial sequence
  SiRNA target sequence
tggtagaagtaaagatatctttacac

SEQ ID NO: 17790 - DNA, 26 bp, Artificial sequence
  SiRNA target sequence
ggtagaagtaaagatatctttacaca

SEQ ID NO: 17791 - DNA, 26 bp, Artificial sequence
  SiRNA target sequence
gtagaagtaaagatatctttacacaa

SEQ ID NO: 17792 - DNA, 26 bp, Artificial sequence
  SiRNA target sequence
tagaagtaaagatatctttacacaaa

SEQ ID NO: 17793 - DNA, 26 bp, Artificial sequence
  SiRNA target sequence
agaagtaaagatatctttacacaaat

SEQ ID NO: 17794 - DNA, 26 bp, Artificial sequence
  SiRNA target sequence
gaagtaaagatatctttacacaaata

SEQ ID NO: 17795 - DNA, 26 bp, Artificial sequence
  SiRNA target sequence
aagtaaagatatctttacacaaatag

SEQ ID NO: 17796 - DNA, 26 bp, Artificial sequence
  SiRNA target sequence
agtaaagatatctttacacaaataga

SEQ ID NO: 17797 - DNA, 26 bp, Artificial sequence
  SiRNA target sequence
gtaaagatatctttacacaaatagag

SEQ ID NO: 17798 - DNA, 26 bp, Artificial sequence
  SiRNA target sequence
taaagatatctttacacaaatagagg

SEQ ID NO: 17799 - DNA, 26 bp, Artificial sequence
  SiRNA target sequence
aaagatatctttacacaaatagaggt

SEQ ID NO: 17800 - DNA, 26 bp, Artificial sequence
  SiRNA target sequence
aagatatctttacacaaatagaggta

SEQ ID NO: 17801 - DNA, 26 bp, Artificial sequence
  SiRNA target sequence
agatatctttacacaaatagaggtag

SEQ ID NO: 17802 - DNA, 26 bp, Artificial sequence
  SiRNA target sequence
gatatctttacacaaatagaggtaga

SEQ ID NO: 17803 - DNA, 26 bp, Artificial sequence
  SiRNA target sequence
atatctttacacaaatagaggtagac

SEQ ID NO: 17804 - DNA, 26 bp, Artificial sequence
  SiRNA target sequence
tatctttacacaaatagaggtagaca

SEQ ID NO: 17805 - DNA, 26 bp, Artificial sequence
  SiRNA target sequence
atctttacacaaatagaggtagacat

SEQ ID NO: 17806 - DNA, 26 bp, Artificial sequence
  SiRNA target sequence
tctttacacaaatagaggtagacata

SEQ ID NO: 17807 - DNA, 26 bp, Artificial sequence
  SiRNA target sequence
ctttacacaaatagaggtagacataa

SEQ ID NO: 17808 - DNA, 26 bp, Artificial sequence
  SiRNA target sequence
tttacacaaatagaggtagacataaa

SEQ ID NO: 17809 - DNA, 26 bp, Artificial sequence
  SiRNA target sequence
ttacacaaatagaggtagacataaaa

SEQ ID NO: 17810 - DNA, 26 bp, Artificial sequence
  SiRNA target sequence
tacacaaatagaggtagacataaaaa

SEQ ID NO: 17811 - DNA, 26 bp, Artificial sequence
  SiRNA target sequence
acacaaatagaggtagacataaaaaa

SEQ ID NO: 17812 - DNA, 26 bp, Artificial sequence
  SiRNA target sequence
cacaaatagaggtagacataaaaaat

SEQ ID NO: 17813 - DNA, 26 bp, Artificial sequence
  SiRNA target sequence
acaaatagaggtagacataaaaaata

SEQ ID NO: 17814 - DNA, 26 bp, Artificial sequence
  SiRNA target sequence
caaatagaggtagacataaaaaataa

SEQ ID NO: 17815 - DNA, 26 bp, Artificial sequence
  SiRNA target sequence
aaatagaggtagacataaaaaataaa

SEQ ID NO: 17816 - DNA, 26 bp, Artificial sequence
  SiRNA target sequence
aatagaggtagacataaaaaataaat

SEQ ID NO: 17817 - DNA, 26 bp, Artificial sequence
  SiRNA target sequence
atagaggtagacataaaaaataaata

SEQ ID NO: 17818 - DNA, 26 bp, Artificial sequence
  SiRNA target sequence
tagaggtagacataaaaaataaatac

SEQ ID NO: 17819 - DNA, 26 bp, Artificial sequence
  SiRNA target sequence
agaggtagacataaaaaataaataca

SEQ ID NO: 17820 - DNA, 26 bp, Artificial sequence
  SiRNA target sequence
gaggtagacataaaaaataaatacaa

SEQ ID NO: 17821 - DNA, 26 bp, Artificial sequence
  SiRNA target sequence
aggtagacataaaaaataaatacaat

SEQ ID NO: 17822 - DNA, 26 bp, Artificial sequence
  SiRNA target sequence
ggtagacataaaaaataaatacaata

SEQ ID NO: 17823 - DNA, 26 bp, Artificial sequence
  SiRNA target sequence
gtagacataaaaaataaatacaataa

SEQ ID NO: 17824 - DNA, 26 bp, Artificial sequence
  SiRNA target sequence
tagacataaaaaataaatacaataat

SEQ ID NO: 17825 - DNA, 26 bp, Artificial sequence
  SiRNA target sequence
agacataaaaaataaatacaataata

SEQ ID NO: 17826 - DNA, 26 bp, Artificial sequence
  SiRNA target sequence
gacataaaaaataaatacaataatat

SEQ ID NO: 17827 - DNA, 26 bp, Artificial sequence
  SiRNA target sequence
acataaaaaataaatacaataatatg

SEQ ID NO: 17828 - DNA, 26 bp, Artificial sequence
  SiRNA target sequence
cataaaaaataaatacaataatatgt

SEQ ID NO: 17829 - DNA, 26 bp, Artificial sequence
  SiRNA target sequence
ataaaaaataaatacaataatatgtg

SEQ ID NO: 17830 - DNA, 26 bp, Artificial sequence
  SiRNA target sequence
taaaaaataaatacaataatatgtgt

SEQ ID NO: 17831 - DNA, 26 bp, Artificial sequence
  SiRNA target sequence
aaaaaataaatacaataatatgtgta

SEQ ID NO: 17832 - DNA, 26 bp, Artificial sequence
  SiRNA target sequence
aaaaataaatacaataatatgtgtat

SEQ ID NO: 17833 - DNA, 26 bp, Artificial sequence
  SiRNA target sequence
aaaataaatacaataatatgtgtata

SEQ ID NO: 17834 - DNA, 26 bp, Artificial sequence
  SiRNA target sequence
aaataaatacaataatatgtgtataa

SEQ ID NO: 17835 - DNA, 26 bp, Artificial sequence
  SiRNA target sequence
aataaatacaataatatgtgtataaa

SEQ ID NO: 17836 - DNA, 26 bp, Artificial sequence
  SiRNA target sequence
ataaatacaataatatgtgtataaaa

SEQ ID NO: 17837 - DNA, 26 bp, Artificial sequence
  SiRNA target sequence
taaatacaataatatgtgtataaaaa

SEQ ID NO: 17838 - DNA, 26 bp, Artificial sequence
  SiRNA target sequence
aaatacaataatatgtgtataaaaat

SEQ ID NO: 17839 - DNA, 26 bp, Artificial sequence
  SiRNA target sequence
aatacaataatatgtgtataaaaatg

SEQ ID NO: 17840 - DNA, 26 bp, Artificial sequence
  SiRNA target sequence
atacaataatatgtgtataaaaatga

SEQ ID NO: 17841 - DNA, 26 bp, Artificial sequence
  SiRNA target sequence
tacaataatatgtgtataaaaatgat

SEQ ID NO: 17842 - DNA, 26 bp, Artificial sequence
  SiRNA target sequence
acaataatatgtgtataaaaatgata

SEQ ID NO: 17843 - DNA, 26 bp, Artificial sequence
  SiRNA target sequence
caataatatgtgtataaaaatgatac

SEQ ID NO: 17844 - DNA, 26 bp, Artificial sequence
  SiRNA target sequence
aataatatgtgtataaaaatgataca

SEQ ID NO: 17845 - DNA, 26 bp, Artificial sequence
  SiRNA target sequence
ataatatgtgtataaaaatgatacag

SEQ ID NO: 17846 - DNA, 26 bp, Artificial sequence
  SiRNA target sequence
taatatgtgtataaaaatgatacagc

SEQ ID NO: 17847 - DNA, 26 bp, Artificial sequence
  SiRNA target sequence
aatatgtgtataaaaatgatacagcc

SEQ ID NO: 17848 - DNA, 26 bp, Artificial sequence
  SiRNA target sequence
atatgtgtataaaaatgatacagcca

SEQ ID NO: 17849 - DNA, 26 bp, Artificial sequence
  SiRNA target sequence
tatgtgtataaaaatgatacagccag

SEQ ID NO: 17850 - DNA, 26 bp, Artificial sequence
  SiRNA target sequence
atgtgtataaaaatgatacagccagc

SEQ ID NO: 17851 - DNA, 26 bp, Artificial sequence
  SiRNA target sequence
tgtgtataaaaatgatacagccagct

SEQ ID NO: 17852 - DNA, 26 bp, Artificial sequence
  SiRNA target sequence
gtgtataaaaatgatacagccagcta

SEQ ID NO: 17853 - DNA, 26 bp, Artificial sequence
  SiRNA target sequence
tgtataaaaatgatacagccagctat

SEQ ID NO: 17854 - DNA, 26 bp, Artificial sequence
  SiRNA target sequence
gtataaaaatgatacagccagctatt

SEQ ID NO: 17855 - DNA, 26 bp, Artificial sequence
  SiRNA target sequence
tataaaaatgatacagccagctatta

SEQ ID NO: 17856 - DNA, 26 bp, Artificial sequence
  SiRNA target sequence
ataaaaatgatacagccagctattaa

SEQ ID NO: 17857 - DNA, 26 bp, Artificial sequence
  SiRNA target sequence
taaaaatgatacagccagctattaaa

SEQ ID NO: 17858 - DNA, 26 bp, Artificial sequence
  SiRNA target sequence
aaaaatgatacagccagctattaaag

SEQ ID NO: 17859 - DNA, 26 bp, Artificial sequence
  SiRNA target sequence
aaaatgatacagccagctattaaagg

SEQ ID NO: 17860 - DNA, 26 bp, Artificial sequence
  SiRNA target sequence
aaatgatacagccagctattaaaggt

SEQ ID NO: 17861 - DNA, 26 bp, Artificial sequence
  SiRNA target sequence
aatgatacagccagctattaaaggtg

SEQ ID NO: 17862 - DNA, 26 bp, Artificial sequence
  SiRNA target sequence
atgatacagccagctattaaaggtgc

SEQ ID NO: 17863 - DNA, 26 bp, Artificial sequence
  SiRNA target sequence
tgatacagccagctattaaaggtgct

SEQ ID NO: 17864 - DNA, 26 bp, Artificial sequence
  SiRNA target sequence
gatacagccagctattaaaggtgctt

SEQ ID NO: 17865 - DNA, 26 bp, Artificial sequence
  SiRNA target sequence
atacagccagctattaaaggtgcttc

SEQ ID NO: 17866 - DNA, 26 bp, Artificial sequence
  SiRNA target sequence
tacagccagctattaaaggtgcttca

SEQ ID NO: 17867 - DNA, 26 bp, Artificial sequence
  SiRNA target sequence
acagccagctattaaaggtgcttcat

SEQ ID NO: 17868 - DNA, 26 bp, Artificial sequence
  SiRNA target sequence
cagccagctattaaaggtgcttcatg

SEQ ID NO: 17869 - DNA, 26 bp, Artificial sequence
  SiRNA target sequence
agccagctattaaaggtgcttcatgt

SEQ ID NO: 17870 - DNA, 26 bp, Artificial sequence
  SiRNA target sequence
gccagctattaaaggtgcttcatgta

SEQ ID NO: 17871 - DNA, 26 bp, Artificial sequence
  SiRNA target sequence
ccagctattaaaggtgcttcatgtat

SEQ ID NO: 17872 - DNA, 26 bp, Artificial sequence
  SiRNA target sequence
cagctattaaaggtgcttcatgtata

SEQ ID NO: 17873 - DNA, 26 bp, Artificial sequence
  SiRNA target sequence
agctattaaaggtgcttcatgtatat

SEQ ID NO: 17874 - DNA, 26 bp, Artificial sequence
  SiRNA target sequence
gctattaaaggtgcttcatgtatata

SEQ ID NO: 17875 - DNA, 26 bp, Artificial sequence
  SiRNA target sequence
ctattaaaggtgcttcatgtatatac

SEQ ID NO: 17876 - DNA, 26 bp, Artificial sequence
  SiRNA target sequence
tattaaaggtgcttcatgtatatacg

SEQ ID NO: 17877 - DNA, 26 bp, Artificial sequence
  SiRNA target sequence
attaaaggtgcttcatgtatatacgt

SEQ ID NO: 17878 - DNA, 26 bp, Artificial sequence
  SiRNA target sequence
ttaaaggtgcttcatgtatatacgtg

SEQ ID NO: 17879 - DNA, 26 bp, Artificial sequence
  SiRNA target sequence
taaaggtgcttcatgtatatacgtgg

SEQ ID NO: 17880 - DNA, 26 bp, Artificial sequence
  SiRNA target sequence
aaaggtgcttcatgtatatacgtggg

SEQ ID NO: 17881 - DNA, 26 bp, Artificial sequence
  SiRNA target sequence
aaggtgcttcatgtatatacgtgggt

SEQ ID NO: 17882 - DNA, 26 bp, Artificial sequence
  SiRNA target sequence
aggtgcttcatgtatatacgtgggta

SEQ ID NO: 17883 - DNA, 26 bp, Artificial sequence
  SiRNA target sequence
ggtgcttcatgtatatacgtgggtaa

SEQ ID NO: 17884 - DNA, 26 bp, Artificial sequence
  SiRNA target sequence
gtgcttcatgtatatacgtgggtaat

SEQ ID NO: 17885 - DNA, 26 bp, Artificial sequence
  SiRNA target sequence
tgcttcatgtatatacgtgggtaatt

SEQ ID NO: 17886 - DNA, 26 bp, Artificial sequence
  SiRNA target sequence
gcttcatgtatatacgtgggtaatta

SEQ ID NO: 17887 - DNA, 26 bp, Artificial sequence
  SiRNA target sequence
cttcatgtatatacgtgggtaattat

SEQ ID NO: 17888 - DNA, 26 bp, Artificial sequence
  SiRNA target sequence
ttcatgtatatacgtgggtaattata

SEQ ID NO: 17889 - DNA, 26 bp, Artificial sequence
  SiRNA target sequence
tcatgtatatacgtgggtaattatat

SEQ ID NO: 17890 - DNA, 26 bp, Artificial sequence
  SiRNA target sequence
catgtatatacgtgggtaattatatg

SEQ ID NO: 17891 - DNA, 26 bp, Artificial sequence
  SiRNA target sequence
atgtatatacgtgggtaattatatgc

SEQ ID NO: 17892 - DNA, 26 bp, Artificial sequence
  SiRNA target sequence
tgtatatacgtgggtaattatatgca

SEQ ID NO: 17893 - DNA, 26 bp, Artificial sequence
  SiRNA target sequence
gtatatacgtgggtaattatatgcag

SEQ ID NO: 17894 - DNA, 26 bp, Artificial sequence
  SiRNA target sequence
tatatacgtgggtaattatatgcagc

SEQ ID NO: 17895 - DNA, 26 bp, Artificial sequence
  SiRNA target sequence
atatacgtgggtaattatatgcagca

SEQ ID NO: 17896 - DNA, 26 bp, Artificial sequence
  SiRNA target sequence
tatacgtgggtaattatatgcagcag

SEQ ID NO: 17897 - DNA, 26 bp, Artificial sequence
  SiRNA target sequence
atacgtgggtaattatatgcagcagc

SEQ ID NO: 17898 - DNA, 26 bp, Artificial sequence
  SiRNA target sequence
tacgtgggtaattatatgcagcagct

SEQ ID NO: 17899 - DNA, 26 bp, Artificial sequence
  SiRNA target sequence
acgtgggtaattatatgcagcagcta

SEQ ID NO: 17900 - DNA, 26 bp, Artificial sequence
  SiRNA target sequence
cgtgggtaattatatgcagcagctag

SEQ ID NO: 17901 - DNA, 26 bp, Artificial sequence
  SiRNA target sequence
gtgggtaattatatgcagcagctagg

SEQ ID NO: 17902 - DNA, 26 bp, Artificial sequence
  SiRNA target sequence
tgggtaattatatgcagcagctagga

SEQ ID NO: 17903 - DNA, 26 bp, Artificial sequence
  SiRNA target sequence
gggtaattatatgcagcagctaggag

SEQ ID NO: 17904 - DNA, 26 bp, Artificial sequence
  SiRNA target sequence
ggtaattatatgcagcagctaggagt

SEQ ID NO: 17905 - DNA, 26 bp, Artificial sequence
  SiRNA target sequence
gtaattatatgcagcagctaggagta

SEQ ID NO: 17906 - DNA, 26 bp, Artificial sequence
  SiRNA target sequence
taattatatgcagcagctaggagtaa

SEQ ID NO: 17907 - DNA, 26 bp, Artificial sequence
  SiRNA target sequence
aattatatgcagcagctaggagtaat

SEQ ID NO: 17908 - DNA, 26 bp, Artificial sequence
  SiRNA target sequence
attatatgcagcagctaggagtaatt

SEQ ID NO: 17909 - DNA, 26 bp, Artificial sequence
  SiRNA target sequence
ttatatgcagcagctaggagtaatta

SEQ ID NO: 17910 - DNA, 26 bp, Artificial sequence
  SiRNA target sequence
tatatgcagcagctaggagtaattag

SEQ ID NO: 17911 - DNA, 26 bp, Artificial sequence
  SiRNA target sequence
atatgcagcagctaggagtaattagt

SEQ ID NO: 17912 - DNA, 26 bp, Artificial sequence
  SiRNA target sequence
tatgcagcagctaggagtaattagtc

SEQ ID NO: 17913 - DNA, 26 bp, Artificial sequence
  SiRNA target sequence
atgcagcagctaggagtaattagtct

SEQ ID NO: 17914 - DNA, 26 bp, Artificial sequence
  SiRNA target sequence
tgcagcagctaggagtaattagtctt

SEQ ID NO: 17915 - DNA, 26 bp, Artificial sequence
  SiRNA target sequence
gcagcagctaggagtaattagtcttg

SEQ ID NO: 17916 - DNA, 26 bp, Artificial sequence
  SiRNA target sequence
cagcagctaggagtaattagtcttgg

SEQ ID NO: 17917 - DNA, 26 bp, Artificial sequence
  SiRNA target sequence
agcagctaggagtaattagtcttggt

SEQ ID NO: 17918 - DNA, 26 bp, Artificial sequence
  SiRNA target sequence
gcagctaggagtaattagtcttggtg

SEQ ID NO: 17919 - DNA, 26 bp, Artificial sequence
  SiRNA target sequence
cagctaggagtaattagtcttggtgg

SEQ ID NO: 17920 - DNA, 26 bp, Artificial sequence
  SiRNA target sequence
agctaggagtaattagtcttggtggg

SEQ ID NO: 17921 - DNA, 26 bp, Artificial sequence
  SiRNA target sequence
gctaggagtaattagtcttggtgggg

SEQ ID NO: 17922 - DNA, 26 bp, Artificial sequence
  SiRNA target sequence
ctaggagtaattagtcttggtgggga

SEQ ID NO: 17923 - DNA, 26 bp, Artificial sequence
  SiRNA target sequence
taggagtaattagtcttggtggggag

SEQ ID NO: 17924 - DNA, 26 bp, Artificial sequence
  SiRNA target sequence
aggagtaattagtcttggtggggaga

SEQ ID NO: 17925 - DNA, 26 bp, Artificial sequence
  SiRNA target sequence
ggagtaattagtcttggtggggagat

SEQ ID NO: 17926 - DNA, 26 bp, Artificial sequence
  SiRNA target sequence
gagtaattagtcttggtggggagatt

SEQ ID NO: 17927 - DNA, 26 bp, Artificial sequence
  SiRNA target sequence
agtaattagtcttggtggggagatta

SEQ ID NO: 17928 - DNA, 26 bp, Artificial sequence
  SiRNA target sequence
gtaattagtcttggtggggagattat

SEQ ID NO: 17929 - DNA, 26 bp, Artificial sequence
  SiRNA target sequence
taattagtcttggtggggagattatt

SEQ ID NO: 17930 - DNA, 26 bp, Artificial sequence
  SiRNA target sequence
aattagtcttggtggggagattatta

SEQ ID NO: 17931 - DNA, 26 bp, Artificial sequence
  SiRNA target sequence
attagtcttggtggggagattattaa

SEQ ID NO: 17932 - DNA, 26 bp, Artificial sequence
  SiRNA target sequence
ttagtcttggtggggagattattaaa

SEQ ID NO: 17933 - DNA, 26 bp, Artificial sequence
  SiRNA target sequence
tagtcttggtggggagattattaaag

SEQ ID NO: 17934 - DNA, 26 bp, Artificial sequence
  SiRNA target sequence
agtcttggtggggagattattaaagc

SEQ ID NO: 17935 - DNA, 26 bp, Artificial sequence
  SiRNA target sequence
gtcttggtggggagattattaaagct

SEQ ID NO: 17936 - DNA, 26 bp, Artificial sequence
  SiRNA target sequence
tcttggtggggagattattaaagctg

SEQ ID NO: 17937 - DNA, 26 bp, Artificial sequence
  SiRNA target sequence
cttggtggggagattattaaagctga

SEQ ID NO: 17938 - DNA, 26 bp, Artificial sequence
  SiRNA target sequence
ttggtggggagattattaaagctgat

SEQ ID NO: 17939 - DNA, 26 bp, Artificial sequence
  SiRNA target sequence
tggtggggagattattaaagctgatg

SEQ ID NO: 17940 - DNA, 26 bp, Artificial sequence
  SiRNA target sequence
ggtggggagattattaaagctgatga

SEQ ID NO: 17941 - DNA, 26 bp, Artificial sequence
  SiRNA target sequence
gtggggagattattaaagctgatgaa

SEQ ID NO: 17942 - DNA, 26 bp, Artificial sequence
  SiRNA target sequence
tggggagattattaaagctgatgaat

SEQ ID NO: 17943 - DNA, 26 bp, Artificial sequence
  SiRNA target sequence
ggggagattattaaagctgatgaata

SEQ ID NO: 17944 - DNA, 26 bp, Artificial sequence
  SiRNA target sequence
gggagattattaaagctgatgaatac

SEQ ID NO: 17945 - DNA, 26 bp, Artificial sequence
  SiRNA target sequence
ggagattattaaagctgatgaataca

SEQ ID NO: 17946 - DNA, 26 bp, Artificial sequence
  SiRNA target sequence
gagattattaaagctgatgaatacat

SEQ ID NO: 17947 - DNA, 26 bp, Artificial sequence
  SiRNA target sequence
agattattaaagctgatgaatacatt

SEQ ID NO: 17948 - DNA, 26 bp, Artificial sequence
  SiRNA target sequence
gattattaaagctgatgaatacattg

SEQ ID NO: 17949 - DNA, 26 bp, Artificial sequence
  SiRNA target sequence
attattaaagctgatgaatacattgg

SEQ ID NO: 17950 - DNA, 26 bp, Artificial sequence
  SiRNA target sequence
ttattaaagctgatgaatacattgga

SEQ ID NO: 17951 - DNA, 26 bp, Artificial sequence
  SiRNA target sequence
tattaaagctgatgaatacattggac

SEQ ID NO: 17952 - DNA, 26 bp, Artificial sequence
  SiRNA target sequence
attaaagctgatgaatacattggact

SEQ ID NO: 17953 - DNA, 26 bp, Artificial sequence
  SiRNA target sequence
ttaaagctgatgaatacattggacta

SEQ ID NO: 17954 - DNA, 26 bp, Artificial sequence
  SiRNA target sequence
taaagctgatgaatacattggactat

SEQ ID NO: 17955 - DNA, 26 bp, Artificial sequence
  SiRNA target sequence
aaagctgatgaatacattggactatc

SEQ ID NO: 17956 - DNA, 26 bp, Artificial sequence
  SiRNA target sequence
aagctgatgaatacattggactatct

SEQ ID NO: 17957 - DNA, 26 bp, Artificial sequence
  SiRNA target sequence
agctgatgaatacattggactatctt

SEQ ID NO: 17958 - DNA, 26 bp, Artificial sequence
  SiRNA target sequence
gctgatgaatacattggactatcttt

SEQ ID NO: 17959 - DNA, 26 bp, Artificial sequence
  SiRNA target sequence
ctgatgaatacattggactatctttt

SEQ ID NO: 17960 - DNA, 26 bp, Artificial sequence
  SiRNA target sequence
tgatgaatacattggactatcttttg

SEQ ID NO: 17961 - DNA, 26 bp, Artificial sequence
  SiRNA target sequence
gatgaatacattggactatcttttgt

SEQ ID NO: 17962 - DNA, 26 bp, Artificial sequence
  SiRNA target sequence
atgaatacattggactatcttttgta

SEQ ID NO: 17963 - DNA, 26 bp, Artificial sequence
  SiRNA target sequence
tgaatacattggactatcttttgtag

SEQ ID NO: 17964 - DNA, 26 bp, Artificial sequence
  SiRNA target sequence
gaatacattggactatcttttgtagg

SEQ ID NO: 17965 - DNA, 26 bp, Artificial sequence
  SiRNA target sequence
aatacattggactatcttttgtaggg

SEQ ID NO: 17966 - DNA, 26 bp, Artificial sequence
  SiRNA target sequence
atacattggactatcttttgtaggga

SEQ ID NO: 17967 - DNA, 26 bp, Artificial sequence
  SiRNA target sequence
tacattggactatcttttgtagggag

SEQ ID NO: 17968 - DNA, 26 bp, Artificial sequence
  SiRNA target sequence
acattggactatcttttgtagggaga

SEQ ID NO: 17969 - DNA, 26 bp, Artificial sequence
  SiRNA target sequence
cattggactatcttttgtagggagat

SEQ ID NO: 17970 - DNA, 26 bp, Artificial sequence
  SiRNA target sequence
attggactatcttttgtagggagata

SEQ ID NO: 17971 - DNA, 26 bp, Artificial sequence
  SiRNA target sequence
ttggactatcttttgtagggagatat

SEQ ID NO: 17972 - DNA, 26 bp, Artificial sequence
  SiRNA target sequence
tggactatcttttgtagggagatatg

SEQ ID NO: 17973 - DNA, 26 bp, Artificial sequence
  SiRNA target sequence
ggactatcttttgtagggagatatga

SEQ ID NO: 17974 - DNA, 26 bp, Artificial sequence
  SiRNA target sequence
gactatcttttgtagggagatatgaa

SEQ ID NO: 17975 - DNA, 26 bp, Artificial sequence
  SiRNA target sequence
actatcttttgtagggagatatgaag

SEQ ID NO: 17976 - DNA, 26 bp, Artificial sequence
  SiRNA target sequence
ctatcttttgtagggagatatgaagg

SEQ ID NO: 17977 - DNA, 26 bp, Artificial sequence
  SiRNA target sequence
tatcttttgtagggagatatgaaggg

SEQ ID NO: 17978 - DNA, 26 bp, Artificial sequence
  SiRNA target sequence
atcttttgtagggagatatgaaggga

SEQ ID NO: 17979 - DNA, 26 bp, Artificial sequence
  SiRNA target sequence
tcttttgtagggagatatgaagggat

SEQ ID NO: 17980 - DNA, 26 bp, Artificial sequence
  SiRNA target sequence
cttttgtagggagatatgaagggatt

SEQ ID NO: 17981 - DNA, 26 bp, Artificial sequence
  SiRNA target sequence
ttttgtagggagatatgaagggattg

SEQ ID NO: 17982 - DNA, 26 bp, Artificial sequence
  SiRNA target sequence
tttgtagggagatatgaagggattgg

SEQ ID NO: 17983 - DNA, 26 bp, Artificial sequence
  SiRNA target sequence
ttgtagggagatatgaagggattggt

SEQ ID NO: 17984 - DNA, 26 bp, Artificial sequence
  SiRNA target sequence
tgtagggagatatgaagggattggtt

SEQ ID NO: 17985 - DNA, 26 bp, Artificial sequence
  SiRNA target sequence
gtagggagatatgaagggattggttc

SEQ ID NO: 17986 - DNA, 26 bp, Artificial sequence
  SiRNA target sequence
tagggagatatgaagggattggttct

SEQ ID NO: 17987 - DNA, 26 bp, Artificial sequence
  SiRNA target sequence
agggagatatgaagggattggttcta

SEQ ID NO: 17988 - DNA, 26 bp, Artificial sequence
  SiRNA target sequence
gggagatatgaagggattggttctat

SEQ ID NO: 17989 - DNA, 26 bp, Artificial sequence
  SiRNA target sequence
ggagatatgaagggattggttctatt

SEQ ID NO: 17990 - DNA, 26 bp, Artificial sequence
  SiRNA target sequence
gagatatgaagggattggttctattt

SEQ ID NO: 17991 - DNA, 26 bp, Artificial sequence
  SiRNA target sequence
agatatgaagggattggttctatttc

SEQ ID NO: 17992 - DNA, 26 bp, Artificial sequence
  SiRNA target sequence
gatatgaagggattggttctatttct

SEQ ID NO: 17993 - DNA, 26 bp, Artificial sequence
  SiRNA target sequence
atatgaagggattggttctatttcta

SEQ ID NO: 17994 - DNA, 26 bp, Artificial sequence
  SiRNA target sequence
tatgaagggattggttctatttctac

SEQ ID NO: 17995 - DNA, 26 bp, Artificial sequence
  SiRNA target sequence
atgaagggattggttctatttctact

SEQ ID NO: 17996 - DNA, 26 bp, Artificial sequence
  SiRNA target sequence
tgaagggattggttctatttctacta

SEQ ID NO: 17997 - DNA, 26 bp, Artificial sequence
  SiRNA target sequence
gaagggattggttctatttctactat

SEQ ID NO: 17998 - DNA, 26 bp, Artificial sequence
  SiRNA target sequence
aagggattggttctatttctactata

SEQ ID NO: 17999 - DNA, 26 bp, Artificial sequence
  SiRNA target sequence
agggattggttctatttctactatat

SEQ ID NO: 18000 - DNA, 26 bp, Artificial sequence
  SiRNA target sequence
gggattggttctatttctactatatc

SEQ ID NO: 18001 - DNA, 26 bp, Artificial sequence
  SiRNA target sequence
ggattggttctatttctactatatca

SEQ ID NO: 18002 - DNA, 26 bp, Artificial sequence
  SiRNA target sequence
gattggttctatttctactatatcac

SEQ ID NO: 18003 - DNA, 26 bp, Artificial sequence
  SiRNA target sequence
attggttctatttctactatatcact

SEQ ID NO: 18004 - DNA, 26 bp, Artificial sequence
  SiRNA target sequence
ttggttctatttctactatatcactt

SEQ ID NO: 18005 - DNA, 26 bp, Artificial sequence
  SiRNA target sequence
tggttctatttctactatatcacttc

SEQ ID NO: 18006 - DNA, 26 bp, Artificial sequence
  SiRNA target sequence
ggttctatttctactatatcacttca

SEQ ID NO: 18007 - DNA, 26 bp, Artificial sequence
  SiRNA target sequence
gttctatttctactatatcacttcag

SEQ ID NO: 18008 - DNA, 26 bp, Artificial sequence
  SiRNA target sequence
ttctatttctactatatcacttcagc

SEQ ID NO: 18009 - DNA, 26 bp, Artificial sequence
  SiRNA target sequence
tctatttctactatatcacttcagca

SEQ ID NO: 18010 - DNA, 26 bp, Artificial sequence
  SiRNA target sequence
ctatttctactatatcacttcagcag

SEQ ID NO: 18011 - DNA, 26 bp, Artificial sequence
  SiRNA target sequence
tatttctactatatcacttcagcagt

SEQ ID NO: 18012 - DNA, 26 bp, Artificial sequence
  SiRNA target sequence
atttctactatatcacttcagcagtt

SEQ ID NO: 18013 - DNA, 26 bp, Artificial sequence
  SiRNA target sequence
tttctactatatcacttcagcagttt

SEQ ID NO: 18014 - DNA, 26 bp, Artificial sequence
  SiRNA target sequence
ttctactatatcacttcagcagttta

SEQ ID NO: 18015 - DNA, 26 bp, Artificial sequence
  SiRNA target sequence
tctactatatcacttcagcagtttaa

SEQ ID NO: 18016 - DNA, 26 bp, Artificial sequence
  SiRNA target sequence
ctactatatcacttcagcagtttaat

SEQ ID NO: 18017 - DNA, 26 bp, Artificial sequence
  SiRNA target sequence
tactatatcacttcagcagtttaata

SEQ ID NO: 18018 - DNA, 26 bp, Artificial sequence
  SiRNA target sequence
actatatcacttcagcagtttaatac

SEQ ID NO: 18019 - DNA, 26 bp, Artificial sequence
  SiRNA target sequence
ctatatcacttcagcagtttaataca

SEQ ID NO: 18020 - DNA, 26 bp, Artificial sequence
  SiRNA target sequence
tatatcacttcagcagtttaatacac

SEQ ID NO: 18021 - DNA, 26 bp, Artificial sequence
  SiRNA target sequence
atatcacttcagcagtttaatacact

SEQ ID NO: 18022 - DNA, 26 bp, Artificial sequence
  SiRNA target sequence
tatcacttcagcagtttaatacactg

SEQ ID NO: 18023 - DNA, 26 bp, Artificial sequence
  SiRNA target sequence
atcacttcagcagtttaatacactgt

SEQ ID NO: 18024 - DNA, 26 bp, Artificial sequence
  SiRNA target sequence
tcacttcagcagtttaatacactgtc

SEQ ID NO: 18025 - DNA, 26 bp, Artificial sequence
  SiRNA target sequence
cacttcagcagtttaatacactgtct

SEQ ID NO: 18026 - DNA, 26 bp, Artificial sequence
  SiRNA target sequence
acttcagcagtttaatacactgtcta

SEQ ID NO: 18027 - DNA, 26 bp, Artificial sequence
  SiRNA target sequence
cttcagcagtttaatacactgtctat

SEQ ID NO: 18028 - DNA, 26 bp, Artificial sequence
  SiRNA target sequence
ttcagcagtttaatacactgtctata

SEQ ID NO: 18029 - DNA, 26 bp, Artificial sequence
  SiRNA target sequence
tcagcagtttaatacactgtctatag

SEQ ID NO: 18030 - DNA, 26 bp, Artificial sequence
  SiRNA target sequence
cagcagtttaatacactgtctataga

SEQ ID NO: 18031 - DNA, 26 bp, Artificial sequence
  SiRNA target sequence
agcagtttaatacactgtctatagat

SEQ ID NO: 18032 - DNA, 26 bp, Artificial sequence
  SiRNA target sequence
gcagtttaatacactgtctatagatt

SEQ ID NO: 18033 - DNA, 26 bp, Artificial sequence
  SiRNA target sequence
cagtttaatacactgtctatagatta

SEQ ID NO: 18034 - DNA, 26 bp, Artificial sequence
  SiRNA target sequence
agtttaatacactgtctatagattat

SEQ ID NO: 18035 - DNA, 26 bp, Artificial sequence
  SiRNA target sequence
gtttaatacactgtctatagattatt

SEQ ID NO: 18036 - DNA, 26 bp, Artificial sequence
  SiRNA target sequence
tttaatacactgtctatagattatta

SEQ ID NO: 18037 - DNA, 26 bp, Artificial sequence
  SiRNA target sequence
ttaatacactgtctatagattattac

SEQ ID NO: 18038 - DNA, 26 bp, Artificial sequence
  SiRNA target sequence
taatacactgtctatagattattaca

SEQ ID NO: 18039 - DNA, 26 bp, Artificial sequence
  SiRNA target sequence
aatacactgtctatagattattacaa

SEQ ID NO: 18040 - DNA, 26 bp, Artificial sequence
  SiRNA target sequence
atacactgtctatagattattacaag

SEQ ID NO: 18041 - DNA, 26 bp, Artificial sequence
  SiRNA target sequence
tacactgtctatagattattacaaga

SEQ ID NO: 18042 - DNA, 26 bp, Artificial sequence
  SiRNA target sequence
acactgtctatagattattacaagac

SEQ ID NO: 18043 - DNA, 26 bp, Artificial sequence
  SiRNA target sequence
cactgtctatagattattacaagaca

SEQ ID NO: 18044 - DNA, 26 bp, Artificial sequence
  SiRNA target sequence
actgtctatagattattacaagacat

SEQ ID NO: 18045 - DNA, 26 bp, Artificial sequence
  SiRNA target sequence
ctgtctatagattattacaagacatt

SEQ ID NO: 18046 - DNA, 26 bp, Artificial sequence
  SiRNA target sequence
tgtctatagattattacaagacattg

SEQ ID NO: 18047 - DNA, 26 bp, Artificial sequence
  SiRNA target sequence
gtctatagattattacaagacattgt

SEQ ID NO: 18048 - DNA, 26 bp, Artificial sequence
  SiRNA target sequence
tctatagattattacaagacattgtc

SEQ ID NO: 18049 - DNA, 26 bp, Artificial sequence
  SiRNA target sequence
ctatagattattacaagacattgtct

SEQ ID NO: 18050 - DNA, 26 bp, Artificial sequence
  SiRNA target sequence
tatagattattacaagacattgtctt

SEQ ID NO: 18051 - DNA, 26 bp, Artificial sequence
  SiRNA target sequence
atagattattacaagacattgtcttc

SEQ ID NO: 18052 - DNA, 26 bp, Artificial sequence
  SiRNA target sequence
tagattattacaagacattgtcttct

SEQ ID NO: 18053 - DNA, 26 bp, Artificial sequence
  SiRNA target sequence
agattattacaagacattgtcttcta

SEQ ID NO: 18054 - DNA, 26 bp, Artificial sequence
  SiRNA target sequence
gattattacaagacattgtcttctat

SEQ ID NO: 18055 - DNA, 26 bp, Artificial sequence
  SiRNA target sequence
attattacaagacattgtcttctatt

SEQ ID NO: 18056 - DNA, 26 bp, Artificial sequence
  SiRNA target sequence
ttattacaagacattgtcttctattt

SEQ ID NO: 18057 - DNA, 26 bp, Artificial sequence
  SiRNA target sequence
tattacaagacattgtcttctatttg

SEQ ID NO: 18058 - DNA, 26 bp, Artificial sequence
  SiRNA target sequence
attacaagacattgtcttctatttgt

SEQ ID NO: 18059 - DNA, 26 bp, Artificial sequence
  SiRNA target sequence
ttacaagacattgtcttctatttgtg

SEQ ID NO: 18060 - DNA, 26 bp, Artificial sequence
  SiRNA target sequence
tacaagacattgtcttctatttgtga

SEQ ID NO: 18061 - DNA, 26 bp, Artificial sequence
  SiRNA target sequence
acaagacattgtcttctatttgtgac

SEQ ID NO: 18062 - DNA, 26 bp, Artificial sequence
  SiRNA target sequence
caagacattgtcttctatttgtgacg

SEQ ID NO: 18063 - DNA, 26 bp, Artificial sequence
  SiRNA target sequence
aagacattgtcttctatttgtgacgt

SEQ ID NO: 18064 - DNA, 26 bp, Artificial sequence
  SiRNA target sequence
agacattgtcttctatttgtgacgta

SEQ ID NO: 18065 - DNA, 26 bp, Artificial sequence
  SiRNA target sequence
gacattgtcttctatttgtgacgtag

SEQ ID NO: 18066 - DNA, 26 bp, Artificial sequence
  SiRNA target sequence
acattgtcttctatttgtgacgtagg

SEQ ID NO: 18067 - DNA, 26 bp, Artificial sequence
  SiRNA target sequence
cattgtcttctatttgtgacgtaggt

SEQ ID NO: 18068 - DNA, 26 bp, Artificial sequence
  SiRNA target sequence
attgtcttctatttgtgacgtaggta

SEQ ID NO: 18069 - DNA, 26 bp, Artificial sequence
  SiRNA target sequence
ttgtcttctatttgtgacgtaggtat

SEQ ID NO: 18070 - DNA, 26 bp, Artificial sequence
  SiRNA target sequence
tgtcttctatttgtgacgtaggtatt

SEQ ID NO: 18071 - DNA, 26 bp, Artificial sequence
  SiRNA target sequence
gtcttctatttgtgacgtaggtatta

SEQ ID NO: 18072 - DNA, 26 bp, Artificial sequence
  SiRNA target sequence
tcttctatttgtgacgtaggtattaa

SEQ ID NO: 18073 - DNA, 26 bp, Artificial sequence
  SiRNA target sequence
cttctatttgtgacgtaggtattaaa

SEQ ID NO: 18074 - DNA, 26 bp, Artificial sequence
  SiRNA target sequence
ttctatttgtgacgtaggtattaaaa

SEQ ID NO: 18075 - DNA, 26 bp, Artificial sequence
  SiRNA target sequence
tctatttgtgacgtaggtattaaaat

SEQ ID NO: 18076 - DNA, 26 bp, Artificial sequence
  SiRNA target sequence
ctatttgtgacgtaggtattaaaata

SEQ ID NO: 18077 - DNA, 26 bp, Artificial sequence
  SiRNA target sequence
tatttgtgacgtaggtattaaaatat

SEQ ID NO: 18078 - DNA, 26 bp, Artificial sequence
  SiRNA target sequence
atttgtgacgtaggtattaaaatatc

SEQ ID NO: 18079 - DNA, 26 bp, Artificial sequence
  SiRNA target sequence
tttgtgacgtaggtattaaaatatca

SEQ ID NO: 18080 - DNA, 26 bp, Artificial sequence
  SiRNA target sequence
ttgtgacgtaggtattaaaatatcaa

SEQ ID NO: 18081 - DNA, 26 bp, Artificial sequence
  SiRNA target sequence
tgtgacgtaggtattaaaatatcaac

SEQ ID NO: 18082 - DNA, 26 bp, Artificial sequence
  SiRNA target sequence
gtgacgtaggtattaaaatatcaact

SEQ ID NO: 18083 - DNA, 26 bp, Artificial sequence
  SiRNA target sequence
tgacgtaggtattaaaatatcaactg

SEQ ID NO: 18084 - DNA, 26 bp, Artificial sequence
  SiRNA target sequence
gacgtaggtattaaaatatcaactga

SEQ ID NO: 18085 - DNA, 26 bp, Artificial sequence
  SiRNA target sequence
acgtaggtattaaaatatcaactgat

SEQ ID NO: 18086 - DNA, 26 bp, Artificial sequence
  SiRNA target sequence
cgtaggtattaaaatatcaactgata

SEQ ID NO: 18087 - DNA, 26 bp, Artificial sequence
  SiRNA target sequence
gtaggtattaaaatatcaactgatag

SEQ ID NO: 18088 - DNA, 26 bp, Artificial sequence
  SiRNA target sequence
taggtattaaaatatcaactgatagg

SEQ ID NO: 18089 - DNA, 26 bp, Artificial sequence
  SiRNA target sequence
aggtattaaaatatcaactgataggg

SEQ ID NO: 18090 - DNA, 26 bp, Artificial sequence
  SiRNA target sequence
ggtattaaaatatcaactgataggga

SEQ ID NO: 18091 - DNA, 26 bp, Artificial sequence
  SiRNA target sequence
gtattaaaatatcaactgatagggaa

SEQ ID NO: 18092 - DNA, 26 bp, Artificial sequence
  SiRNA target sequence
tattaaaatatcaactgatagggaaa

SEQ ID NO: 18093 - DNA, 26 bp, Artificial sequence
  SiRNA target sequence
attaaaatatcaactgatagggaaaa

SEQ ID NO: 18094 - DNA, 26 bp, Artificial sequence
  SiRNA target sequence
ttaaaatatcaactgatagggaaaaa

SEQ ID NO: 18095 - DNA, 26 bp, Artificial sequence
  SiRNA target sequence
taaaatatcaactgatagggaaaaat

SEQ ID NO: 18096 - DNA, 26 bp, Artificial sequence
  SiRNA target sequence
aaaatatcaactgatagggaaaaatc

SEQ ID NO: 18097 - DNA, 26 bp, Artificial sequence
  SiRNA target sequence
aaatatcaactgatagggaaaaatca

SEQ ID NO: 18098 - DNA, 26 bp, Artificial sequence
  SiRNA target sequence
aatatcaactgatagggaaaaatcag

SEQ ID NO: 18099 - DNA, 26 bp, Artificial sequence
  SiRNA target sequence
atatcaactgatagggaaaaatcagt

SEQ ID NO: 18100 - DNA, 26 bp, Artificial sequence
  SiRNA target sequence
tatcaactgatagggaaaaatcagtt

SEQ ID NO: 18101 - DNA, 26 bp, Artificial sequence
  SiRNA target sequence
atcaactgatagggaaaaatcagtta

SEQ ID NO: 18102 - DNA, 26 bp, Artificial sequence
  SiRNA target sequence
tcaactgatagggaaaaatcagttaa

SEQ ID NO: 18103 - DNA, 26 bp, Artificial sequence
  SiRNA target sequence
caactgatagggaaaaatcagttaat

SEQ ID NO: 18104 - DNA, 26 bp, Artificial sequence
  SiRNA target sequence
aactgatagggaaaaatcagttaatt

SEQ ID NO: 18105 - DNA, 26 bp, Artificial sequence
  SiRNA target sequence
actgatagggaaaaatcagttaatta

SEQ ID NO: 18106 - DNA, 26 bp, Artificial sequence
  SiRNA target sequence
ctgatagggaaaaatcagttaattat

SEQ ID NO: 18107 - DNA, 26 bp, Artificial sequence
  SiRNA target sequence
tgatagggaaaaatcagttaattatg

SEQ ID NO: 18108 - DNA, 26 bp, Artificial sequence
  SiRNA target sequence
gatagggaaaaatcagttaattatgg

SEQ ID NO: 18109 - DNA, 26 bp, Artificial sequence
  SiRNA target sequence
atagggaaaaatcagttaattatgga

SEQ ID NO: 18110 - DNA, 26 bp, Artificial sequence
  SiRNA target sequence
tagggaaaaatcagttaattatggat

SEQ ID NO: 18111 - DNA, 26 bp, Artificial sequence
  SiRNA target sequence
agggaaaaatcagttaattatggatt

SEQ ID NO: 18112 - DNA, 26 bp, Artificial sequence
  SiRNA target sequence
gggaaaaatcagttaattatggatta

SEQ ID NO: 18113 - DNA, 26 bp, Artificial sequence
  SiRNA target sequence
ggaaaaatcagttaattatggattag

SEQ ID NO: 18114 - DNA, 26 bp, Artificial sequence
  SiRNA target sequence
gaaaaatcagttaattatggattagg

SEQ ID NO: 18115 - DNA, 26 bp, Artificial sequence
  SiRNA target sequence
aaaaatcagttaattatggattagga

SEQ ID NO: 18116 - DNA, 26 bp, Artificial sequence
  SiRNA target sequence
aaaatcagttaattatggattaggag

SEQ ID NO: 18117 - DNA, 26 bp, Artificial sequence
  SiRNA target sequence
aaatcagttaattatggattaggagt

SEQ ID NO: 18118 - DNA, 26 bp, Artificial sequence
  SiRNA target sequence
aatcagttaattatggattaggagtt

SEQ ID NO: 18119 - DNA, 26 bp, Artificial sequence
  SiRNA target sequence
atcagttaattatggattaggagtta

SEQ ID NO: 18120 - DNA, 26 bp, Artificial sequence
  SiRNA target sequence
tcagttaattatggattaggagttaa

SEQ ID NO: 18121 - DNA, 26 bp, Artificial sequence
  SiRNA target sequence
cagttaattatggattaggagttaaa

SEQ ID NO: 18122 - DNA, 26 bp, Artificial sequence
  SiRNA target sequence
agttaattatggattaggagttaaac

SEQ ID NO: 18123 - DNA, 26 bp, Artificial sequence
  SiRNA target sequence
gttaattatggattaggagttaaact

SEQ ID NO: 18124 - DNA, 26 bp, Artificial sequence
  SiRNA target sequence
ttaattatggattaggagttaaacta

SEQ ID NO: 18125 - DNA, 26 bp, Artificial sequence
  SiRNA target sequence
taattatggattaggagttaaactac

SEQ ID NO: 18126 - DNA, 26 bp, Artificial sequence
  SiRNA target sequence
aattatggattaggagttaaactaca

SEQ ID NO: 18127 - DNA, 26 bp, Artificial sequence
  SiRNA target sequence
attatggattaggagttaaactacac

SEQ ID NO: 18128 - DNA, 26 bp, Artificial sequence
  SiRNA target sequence
ttatggattaggagttaaactacaca

SEQ ID NO: 18129 - DNA, 26 bp, Artificial sequence
  SiRNA target sequence
tatggattaggagttaaactacacag

SEQ ID NO: 18130 - DNA, 26 bp, Artificial sequence
  SiRNA target sequence
atggattaggagttaaactacacagt

SEQ ID NO: 18131 - DNA, 26 bp, Artificial sequence
  SiRNA target sequence
tggattaggagttaaactacacagta

SEQ ID NO: 18132 - DNA, 26 bp, Artificial sequence
  SiRNA target sequence
ggattaggagttaaactacacagtaa

SEQ ID NO: 18133 - DNA, 26 bp, Artificial sequence
  SiRNA target sequence
gattaggagttaaactacacagtaaa

SEQ ID NO: 18134 - DNA, 26 bp, Artificial sequence
  SiRNA target sequence
attaggagttaaactacacagtaaaa

SEQ ID NO: 18135 - DNA, 26 bp, Artificial sequence
  SiRNA target sequence
ttaggagttaaactacacagtaaaaa

SEQ ID NO: 18136 - DNA, 26 bp, Artificial sequence
  SiRNA target sequence
taggagttaaactacacagtaaaaaa

SEQ ID NO: 18137 - DNA, 26 bp, Artificial sequence
  SiRNA target sequence
aggagttaaactacacagtaaaaaag

SEQ ID NO: 18138 - DNA, 26 bp, Artificial sequence
  SiRNA target sequence
ggagttaaactacacagtaaaaaagg

SEQ ID NO: 18139 - DNA, 26 bp, Artificial sequence
  SiRNA target sequence
gagttaaactacacagtaaaaaagga

SEQ ID NO: 18140 - DNA, 26 bp, Artificial sequence
  SiRNA target sequence
agttaaactacacagtaaaaaaggag

SEQ ID NO: 18141 - DNA, 26 bp, Artificial sequence
  SiRNA target sequence
gttaaactacacagtaaaaaaggaga

SEQ ID NO: 18142 - DNA, 26 bp, Artificial sequence
  SiRNA target sequence
ttaaactacacagtaaaaaaggagaa

SEQ ID NO: 18143 - DNA, 26 bp, Artificial sequence
  SiRNA target sequence
taaactacacagtaaaaaaggagaaa

SEQ ID NO: 18144 - DNA, 26 bp, Artificial sequence
  SiRNA target sequence
aaactacacagtaaaaaaggagaaat

SEQ ID NO: 18145 - DNA, 26 bp, Artificial sequence
  SiRNA target sequence
aactacacagtaaaaaaggagaaatt

SEQ ID NO: 18146 - DNA, 26 bp, Artificial sequence
  SiRNA target sequence
actacacagtaaaaaaggagaaatta

SEQ ID NO: 18147 - DNA, 26 bp, Artificial sequence
  SiRNA target sequence
ctacacagtaaaaaaggagaaattat

SEQ ID NO: 18148 - DNA, 26 bp, Artificial sequence
  SiRNA target sequence
tacacagtaaaaaaggagaaattatc

SEQ ID NO: 18149 - DNA, 26 bp, Artificial sequence
  SiRNA target sequence
acacagtaaaaaaggagaaattatcg

SEQ ID NO: 18150 - DNA, 26 bp, Artificial sequence
  SiRNA target sequence
cacagtaaaaaaggagaaattatcgg

SEQ ID NO: 18151 - DNA, 26 bp, Artificial sequence
  SiRNA target sequence
acagtaaaaaaggagaaattatcgga

SEQ ID NO: 18152 - DNA, 26 bp, Artificial sequence
  SiRNA target sequence
cagtaaaaaaggagaaattatcggat

SEQ ID NO: 18153 - DNA, 26 bp, Artificial sequence
  SiRNA target sequence
agtaaaaaaggagaaattatcggatg

SEQ ID NO: 18154 - DNA, 26 bp, Artificial sequence
  SiRNA target sequence
gtaaaaaaggagaaattatcggatgt

SEQ ID NO: 18155 - DNA, 26 bp, Artificial sequence
  SiRNA target sequence
taaaaaaggagaaattatcggatgtg

SEQ ID NO: 18156 - DNA, 26 bp, Artificial sequence
  SiRNA target sequence
aaaaaaggagaaattatcggatgtgt

SEQ ID NO: 18157 - DNA, 26 bp, Artificial sequence
  SiRNA target sequence
aaaaaggagaaattatcggatgtgta

SEQ ID NO: 18158 - DNA, 26 bp, Artificial sequence
  SiRNA target sequence
aaaaggagaaattatcggatgtgtag

SEQ ID NO: 18159 - DNA, 26 bp, Artificial sequence
  SiRNA target sequence
aaaggagaaattatcggatgtgtaga

SEQ ID NO: 18160 - DNA, 26 bp, Artificial sequence
  SiRNA target sequence
aaggagaaattatcggatgtgtagat

SEQ ID NO: 18161 - DNA, 26 bp, Artificial sequence
  SiRNA target sequence
aggagaaattatcggatgtgtagata

SEQ ID NO: 18162 - DNA, 26 bp, Artificial sequence
  SiRNA target sequence
ggagaaattatcggatgtgtagataa

SEQ ID NO: 18163 - DNA, 26 bp, Artificial sequence
  SiRNA target sequence
gagaaattatcggatgtgtagataac

SEQ ID NO: 18164 - DNA, 26 bp, Artificial sequence
  SiRNA target sequence
agaaattatcggatgtgtagataaca

SEQ ID NO: 18165 - DNA, 26 bp, Artificial sequence
  SiRNA target sequence
gaaattatcggatgtgtagataacaa

SEQ ID NO: 18166 - DNA, 26 bp, Artificial sequence
  SiRNA target sequence
aaattatcggatgtgtagataacaat

SEQ ID NO: 18167 - DNA, 26 bp, Artificial sequence
  SiRNA target sequence
aattatcggatgtgtagataacaatc

SEQ ID NO: 18168 - DNA, 26 bp, Artificial sequence
  SiRNA target sequence
attatcggatgtgtagataacaatca

SEQ ID NO: 18169 - DNA, 26 bp, Artificial sequence
  SiRNA target sequence
ttatcggatgtgtagataacaatcat

SEQ ID NO: 18170 - DNA, 26 bp, Artificial sequence
  SiRNA target sequence
tatcggatgtgtagataacaatcata

SEQ ID NO: 18171 - DNA, 26 bp, Artificial sequence
  SiRNA target sequence
atcggatgtgtagataacaatcatat

SEQ ID NO: 18172 - DNA, 26 bp, Artificial sequence
  SiRNA target sequence
tcggatgtgtagataacaatcatatt

SEQ ID NO: 18173 - DNA, 26 bp, Artificial sequence
  SiRNA target sequence
cggatgtgtagataacaatcatattt

SEQ ID NO: 18174 - DNA, 26 bp, Artificial sequence
  SiRNA target sequence
ggatgtgtagataacaatcatatttt

SEQ ID NO: 18175 - DNA, 26 bp, Artificial sequence
  SiRNA target sequence
gatgtgtagataacaatcatatttta

SEQ ID NO: 18176 - DNA, 26 bp, Artificial sequence
  SiRNA target sequence
atgtgtagataacaatcatattttaa

SEQ ID NO: 18177 - DNA, 26 bp, Artificial sequence
  SiRNA target sequence
tgtgtagataacaatcatattttaag

SEQ ID NO: 18178 - DNA, 26 bp, Artificial sequence
  SiRNA target sequence
gtgtagataacaatcatattttaagc

SEQ ID NO: 18179 - DNA, 26 bp, Artificial sequence
  SiRNA target sequence
tgtagataacaatcatattttaagca

SEQ ID NO: 18180 - DNA, 26 bp, Artificial sequence
  SiRNA target sequence
gtagataacaatcatattttaagcat

SEQ ID NO: 18181 - DNA, 26 bp, Artificial sequence
  SiRNA target sequence
tagataacaatcatattttaagcata

SEQ ID NO: 18182 - DNA, 26 bp, Artificial sequence
  SiRNA target sequence
agataacaatcatattttaagcataa

SEQ ID NO: 18183 - DNA, 26 bp, Artificial sequence
  SiRNA target sequence
gataacaatcatattttaagcataat

SEQ ID NO: 18184 - DNA, 26 bp, Artificial sequence
  SiRNA target sequence
ataacaatcatattttaagcataatt

SEQ ID NO: 18185 - DNA, 26 bp, Artificial sequence
  SiRNA target sequence
taacaatcatattttaagcataattt

SEQ ID NO: 18186 - DNA, 26 bp, Artificial sequence
  SiRNA target sequence
aacaatcatattttaagcataattta

SEQ ID NO: 18187 - DNA, 26 bp, Artificial sequence
  SiRNA target sequence
acaatcatattttaagcataatttat

SEQ ID NO: 18188 - DNA, 26 bp, Artificial sequence
  SiRNA target sequence
caatcatattttaagcataatttata

SEQ ID NO: 18189 - DNA, 26 bp, Artificial sequence
  SiRNA target sequence
aatcatattttaagcataatttataa

SEQ ID NO: 18190 - DNA, 26 bp, Artificial sequence
  SiRNA target sequence
atcatattttaagcataatttataat

SEQ ID NO: 18191 - DNA, 26 bp, Artificial sequence
  SiRNA target sequence
tcatattttaagcataatttataatg

SEQ ID NO: 18192 - DNA, 26 bp, Artificial sequence
  SiRNA target sequence
catattttaagcataatttataatga

SEQ ID NO: 18193 - DNA, 26 bp, Artificial sequence
  SiRNA target sequence
atattttaagcataatttataatgat

SEQ ID NO: 18194 - DNA, 26 bp, Artificial sequence
  SiRNA target sequence
tattttaagcataatttataatgata

SEQ ID NO: 18195 - DNA, 26 bp, Artificial sequence
  SiRNA target sequence
attttaagcataatttataatgataa

SEQ ID NO: 18196 - DNA, 26 bp, Artificial sequence
  SiRNA target sequence
ttttaagcataatttataatgataaa

SEQ ID NO: 18197 - DNA, 26 bp, Artificial sequence
  SiRNA target sequence
tttaagcataatttataatgataaat

SEQ ID NO: 18198 - DNA, 26 bp, Artificial sequence
  SiRNA target sequence
ttaagcataatttataatgataaatt

SEQ ID NO: 18199 - DNA, 26 bp, Artificial sequence
  SiRNA target sequence
taagcataatttataatgataaatta

SEQ ID NO: 18200 - DNA, 26 bp, Artificial sequence
  SiRNA target sequence
aagcataatttataatgataaattat

SEQ ID NO: 18201 - DNA, 26 bp, Artificial sequence
  SiRNA target sequence
agcataatttataatgataaattatc

SEQ ID NO: 18202 - DNA, 26 bp, Artificial sequence
  SiRNA target sequence
gcataatttataatgataaattatct

SEQ ID NO: 18203 - DNA, 26 bp, Artificial sequence
  SiRNA target sequence
cataatttataatgataaattatctg

SEQ ID NO: 18204 - DNA, 26 bp, Artificial sequence
  SiRNA target sequence
ataatttataatgataaattatctga

SEQ ID NO: 18205 - DNA, 26 bp, Artificial sequence
  SiRNA target sequence
taatttataatgataaattatctgaa

SEQ ID NO: 18206 - DNA, 26 bp, Artificial sequence
  SiRNA target sequence
aatttataatgataaattatctgaag

SEQ ID NO: 18207 - DNA, 26 bp, Artificial sequence
  SiRNA target sequence
atttataatgataaattatctgaagg

SEQ ID NO: 18208 - DNA, 26 bp, Artificial sequence
  SiRNA target sequence
tttataatgataaattatctgaaggg

SEQ ID NO: 18209 - DNA, 26 bp, Artificial sequence
  SiRNA target sequence
ttataatgataaattatctgaagggt

SEQ ID NO: 18210 - DNA, 26 bp, Artificial sequence
  SiRNA target sequence
tataatgataaattatctgaagggtt

SEQ ID NO: 18211 - DNA, 26 bp, Artificial sequence
  SiRNA target sequence
ataatgataaattatctgaagggtta

SEQ ID NO: 18212 - DNA, 26 bp, Artificial sequence
  SiRNA target sequence
taatgataaattatctgaagggttaa

SEQ ID NO: 18213 - DNA, 26 bp, Artificial sequence
  SiRNA target sequence
aatgataaattatctgaagggttaac

SEQ ID NO: 18214 - DNA, 26 bp, Artificial sequence
  SiRNA target sequence
atgataaattatctgaagggttaaca

SEQ ID NO: 18215 - DNA, 26 bp, Artificial sequence
  SiRNA target sequence
tgataaattatctgaagggttaacac

SEQ ID NO: 18216 - DNA, 26 bp, Artificial sequence
  SiRNA target sequence
gataaattatctgaagggttaacact

SEQ ID NO: 18217 - DNA, 26 bp, Artificial sequence
  SiRNA target sequence
ataaattatctgaagggttaacactt

SEQ ID NO: 18218 - DNA, 26 bp, Artificial sequence
  SiRNA target sequence
taaattatctgaagggttaacactta

SEQ ID NO: 18219 - DNA, 26 bp, Artificial sequence
  SiRNA target sequence
aaattatctgaagggttaacacttaa

SEQ ID NO: 18220 - DNA, 26 bp, Artificial sequence
  SiRNA target sequence
aattatctgaagggttaacacttaat

SEQ ID NO: 18221 - DNA, 26 bp, Artificial sequence
  SiRNA target sequence
attatctgaagggttaacacttaatt

SEQ ID NO: 18222 - DNA, 26 bp, Artificial sequence
  SiRNA target sequence
ttatctgaagggttaacacttaattt

SEQ ID NO: 18223 - DNA, 26 bp, Artificial sequence
  SiRNA target sequence
tatctgaagggttaacacttaatttg

SEQ ID NO: 18224 - DNA, 26 bp, Artificial sequence
  SiRNA target sequence
atctgaagggttaacacttaatttga

SEQ ID NO: 18225 - DNA, 26 bp, Artificial sequence
  SiRNA target sequence
tctgaagggttaacacttaatttgag

SEQ ID NO: 18226 - DNA, 26 bp, Artificial sequence
  SiRNA target sequence
ctgaagggttaacacttaatttgagt

SEQ ID NO: 18227 - DNA, 26 bp, Artificial sequence
  SiRNA target sequence
tgaagggttaacacttaatttgagtt

SEQ ID NO: 18228 - DNA, 26 bp, Artificial sequence
  SiRNA target sequence
gaagggttaacacttaatttgagttg

SEQ ID NO: 18229 - DNA, 26 bp, Artificial sequence
  SiRNA target sequence
aagggttaacacttaatttgagttgt

SEQ ID NO: 18230 - DNA, 26 bp, Artificial sequence
  SiRNA target sequence
agggttaacacttaatttgagttgta

SEQ ID NO: 18231 - DNA, 26 bp, Artificial sequence
  SiRNA target sequence
gggttaacacttaatttgagttgtag

SEQ ID NO: 18232 - DNA, 26 bp, Artificial sequence
  SiRNA target sequence
ggttaacacttaatttgagttgtaga

SEQ ID NO: 18233 - DNA, 26 bp, Artificial sequence
  SiRNA target sequence
gttaacacttaatttgagttgtagat

SEQ ID NO: 18234 - DNA, 26 bp, Artificial sequence
  SiRNA target sequence
ttaacacttaatttgagttgtagatt

SEQ ID NO: 18235 - DNA, 26 bp, Artificial sequence
  SiRNA target sequence
taacacttaatttgagttgtagattt

SEQ ID NO: 18236 - DNA, 26 bp, Artificial sequence
  SiRNA target sequence
aacacttaatttgagttgtagatttg

SEQ ID NO: 18237 - DNA, 26 bp, Artificial sequence
  SiRNA target sequence
acacttaatttgagttgtagatttgg

SEQ ID NO: 18238 - DNA, 26 bp, Artificial sequence
  SiRNA target sequence
cacttaatttgagttgtagatttggt

SEQ ID NO: 18239 - DNA, 26 bp, Artificial sequence
  SiRNA target sequence
acttaatttgagttgtagatttggta

SEQ ID NO: 18240 - DNA, 26 bp, Artificial sequence
  SiRNA target sequence
cttaatttgagttgtagatttggtaa

SEQ ID NO: 18241 - DNA, 26 bp, Artificial sequence
  SiRNA target sequence
ttaatttgagttgtagatttggtaag

SEQ ID NO: 18242 - DNA, 26 bp, Artificial sequence
  SiRNA target sequence
taatttgagttgtagatttggtaaga

SEQ ID NO: 18243 - DNA, 26 bp, Artificial sequence
  SiRNA target sequence
aatttgagttgtagatttggtaagaa

SEQ ID NO: 18244 - DNA, 26 bp, Artificial sequence
  SiRNA target sequence
atttgagttgtagatttggtaagaaa

SEQ ID NO: 18245 - DNA, 26 bp, Artificial sequence
  SiRNA target sequence
tttgagttgtagatttggtaagaaag

SEQ ID NO: 18246 - DNA, 26 bp, Artificial sequence
  SiRNA target sequence
ttgagttgtagatttggtaagaaagt

SEQ ID NO: 18247 - DNA, 26 bp, Artificial sequence
  SiRNA target sequence
tgagttgtagatttggtaagaaagta

SEQ ID NO: 18248 - DNA, 26 bp, Artificial sequence
  SiRNA target sequence
gagttgtagatttggtaagaaagtat

SEQ ID NO: 18249 - DNA, 26 bp, Artificial sequence
  SiRNA target sequence
agttgtagatttggtaagaaagtatt

SEQ ID NO: 18250 - DNA, 26 bp, Artificial sequence
  SiRNA target sequence
gttgtagatttggtaagaaagtattt

SEQ ID NO: 18251 - DNA, 26 bp, Artificial sequence
  SiRNA target sequence
ttgtagatttggtaagaaagtatttg

SEQ ID NO: 18252 - DNA, 26 bp, Artificial sequence
  SiRNA target sequence
tgtagatttggtaagaaagtatttga

SEQ ID NO: 18253 - DNA, 26 bp, Artificial sequence
  SiRNA target sequence
gtagatttggtaagaaagtatttgat

SEQ ID NO: 18254 - DNA, 26 bp, Artificial sequence
  SiRNA target sequence
tagatttggtaagaaagtatttgatt

SEQ ID NO: 18255 - DNA, 26 bp, Artificial sequence
  SiRNA target sequence
agatttggtaagaaagtatttgatta

SEQ ID NO: 18256 - DNA, 26 bp, Artificial sequence
  SiRNA target sequence
gatttggtaagaaagtatttgattat

SEQ ID NO: 18257 - DNA, 26 bp, Artificial sequence
  SiRNA target sequence
atttggtaagaaagtatttgattatg

SEQ ID NO: 18258 - DNA, 26 bp, Artificial sequence
  SiRNA target sequence
tttggtaagaaagtatttgattatgg

SEQ ID NO: 18259 - DNA, 26 bp, Artificial sequence
  SiRNA target sequence
ttggtaagaaagtatttgattatggc

SEQ ID NO: 18260 - DNA, 26 bp, Artificial sequence
  SiRNA target sequence
tggtaagaaagtatttgattatggct

SEQ ID NO: 18261 - DNA, 26 bp, Artificial sequence
  SiRNA target sequence
ggtaagaaagtatttgattatggcta

SEQ ID NO: 18262 - DNA, 26 bp, Artificial sequence
  SiRNA target sequence
gtaagaaagtatttgattatggctat

SEQ ID NO: 18263 - DNA, 26 bp, Artificial sequence
  SiRNA target sequence
taagaaagtatttgattatggctatg

SEQ ID NO: 18264 - DNA, 26 bp, Artificial sequence
  SiRNA target sequence
aagaaagtatttgattatggctatgg

SEQ ID NO: 18265 - DNA, 26 bp, Artificial sequence
  SiRNA target sequence
agaaagtatttgattatggctatggg

SEQ ID NO: 18266 - DNA, 26 bp, Artificial sequence
  SiRNA target sequence
gaaagtatttgattatggctatgggt

SEQ ID NO: 18267 - DNA, 26 bp, Artificial sequence
  SiRNA target sequence
aaagtatttgattatggctatgggtt

SEQ ID NO: 18268 - DNA, 26 bp, Artificial sequence
  SiRNA target sequence
aagtatttgattatggctatgggttt

SEQ ID NO: 18269 - DNA, 26 bp, Artificial sequence
  SiRNA target sequence
agtatttgattatggctatgggttta

SEQ ID NO: 18270 - DNA, 26 bp, Artificial sequence
  SiRNA target sequence
gtatttgattatggctatgggtttat

SEQ ID NO: 18271 - DNA, 26 bp, Artificial sequence
  SiRNA target sequence
tatttgattatggctatgggtttatt

SEQ ID NO: 18272 - DNA, 26 bp, Artificial sequence
  SiRNA target sequence
atttgattatggctatgggtttattt

SEQ ID NO: 18273 - DNA, 26 bp, Artificial sequence
  SiRNA target sequence
tttgattatggctatgggtttattta

SEQ ID NO: 18274 - DNA, 26 bp, Artificial sequence
  SiRNA target sequence
ttgattatggctatgggtttatttat

SEQ ID NO: 18275 - DNA, 26 bp, Artificial sequence
  SiRNA target sequence
tgattatggctatgggtttatttatg

SEQ ID NO: 18276 - DNA, 26 bp, Artificial sequence
  SiRNA target sequence
gattatggctatgggtttatttatga

SEQ ID NO: 18277 - DNA, 26 bp, Artificial sequence
  SiRNA target sequence
attatggctatgggtttatttatgaa

SEQ ID NO: 18278 - DNA, 26 bp, Artificial sequence
  SiRNA target sequence
ttatggctatgggtttatttatgaat

SEQ ID NO: 18279 - DNA, 26 bp, Artificial sequence
  SiRNA target sequence
tatggctatgggtttatttatgaatt

SEQ ID NO: 18280 - DNA, 26 bp, Artificial sequence
  SiRNA target sequence
atggctatgggtttatttatgaattt

SEQ ID NO: 18281 - DNA, 26 bp, Artificial sequence
  SiRNA target sequence
tggctatgggtttatttatgaatttt

SEQ ID NO: 18282 - DNA, 26 bp, Artificial sequence
  SiRNA target sequence
ggctatgggtttatttatgaatttta

SEQ ID NO: 18283 - DNA, 26 bp, Artificial sequence
  SiRNA target sequence
gctatgggtttatttatgaattttaa

SEQ ID NO: 18284 - DNA, 27 bp, Artificial sequence
  SiRNA target sequence
atgaaatctttctacaaaaaaataaaa

SEQ ID NO: 18285 - DNA, 27 bp, Artificial sequence
  SiRNA target sequence
tgaaatctttctacaaaaaaataaaaa

SEQ ID NO: 18286 - DNA, 27 bp, Artificial sequence
  SiRNA target sequence
gaaatctttctacaaaaaaataaaaag

SEQ ID NO: 18287 - DNA, 27 bp, Artificial sequence
  SiRNA target sequence
aaatctttctacaaaaaaataaaaagt

SEQ ID NO: 18288 - DNA, 27 bp, Artificial sequence
  SiRNA target sequence
aatctttctacaaaaaaataaaaagtt

SEQ ID NO: 18289 - DNA, 27 bp, Artificial sequence
  SiRNA target sequence
atctttctacaaaaaaataaaaagtta

SEQ ID NO: 18290 - DNA, 27 bp, Artificial sequence
  SiRNA target sequence
tctttctacaaaaaaataaaaagttat

SEQ ID NO: 18291 - DNA, 27 bp, Artificial sequence
  SiRNA target sequence
ctttctacaaaaaaataaaaagttatt

SEQ ID NO: 18292 - DNA, 27 bp, Artificial sequence
  SiRNA target sequence
tttctacaaaaaaataaaaagttattt

SEQ ID NO: 18293 - DNA, 27 bp, Artificial sequence
  SiRNA target sequence
ttctacaaaaaaataaaaagttattta

SEQ ID NO: 18294 - DNA, 27 bp, Artificial sequence
  SiRNA target sequence
tctacaaaaaaataaaaagttatttat

SEQ ID NO: 18295 - DNA, 27 bp, Artificial sequence
  SiRNA target sequence
ctacaaaaaaataaaaagttatttatt

SEQ ID NO: 18296 - DNA, 27 bp, Artificial sequence
  SiRNA target sequence
tacaaaaaaataaaaagttatttattc

SEQ ID NO: 18297 - DNA, 27 bp, Artificial sequence
  SiRNA target sequence
acaaaaaaataaaaagttatttattca

SEQ ID NO: 18298 - DNA, 27 bp, Artificial sequence
  SiRNA target sequence
caaaaaaataaaaagttatttattcaa

SEQ ID NO: 18299 - DNA, 27 bp, Artificial sequence
  SiRNA target sequence
aaaaaaataaaaagttatttattcaaa

SEQ ID NO: 18300 - DNA, 27 bp, Artificial sequence
  SiRNA target sequence
aaaaaataaaaagttatttattcaaat

SEQ ID NO: 18301 - DNA, 27 bp, Artificial sequence
  SiRNA target sequence
aaaaataaaaagttatttattcaaatc

SEQ ID NO: 18302 - DNA, 27 bp, Artificial sequence
  SiRNA target sequence
aaaataaaaagttatttattcaaatct

SEQ ID NO: 18303 - DNA, 27 bp, Artificial sequence
  SiRNA target sequence
aaataaaaagttatttattcaaatctg

SEQ ID NO: 18304 - DNA, 27 bp, Artificial sequence
  SiRNA target sequence
aataaaaagttatttattcaaatctgc

SEQ ID NO: 18305 - DNA, 27 bp, Artificial sequence
  SiRNA target sequence
ataaaaagttatttattcaaatctgcc

SEQ ID NO: 18306 - DNA, 27 bp, Artificial sequence
  SiRNA target sequence
taaaaagttatttattcaaatctgcca

SEQ ID NO: 18307 - DNA, 27 bp, Artificial sequence
  SiRNA target sequence
aaaaagttatttattcaaatctgccat

SEQ ID NO: 18308 - DNA, 27 bp, Artificial sequence
  SiRNA target sequence
aaaagttatttattcaaatctgccatt

SEQ ID NO: 18309 - DNA, 27 bp, Artificial sequence
  SiRNA target sequence
aaagttatttattcaaatctgccatta

SEQ ID NO: 18310 - DNA, 27 bp, Artificial sequence
  SiRNA target sequence
aagttatttattcaaatctgccattaa

SEQ ID NO: 18311 - DNA, 27 bp, Artificial sequence
  SiRNA target sequence
agttatttattcaaatctgccattaat

SEQ ID NO: 18312 - DNA, 27 bp, Artificial sequence
  SiRNA target sequence
gttatttattcaaatctgccattaata

SEQ ID NO: 18313 - DNA, 27 bp, Artificial sequence
  SiRNA target sequence
ttatttattcaaatctgccattaatac

SEQ ID NO: 18314 - DNA, 27 bp, Artificial sequence
  SiRNA target sequence
tatttattcaaatctgccattaataca

SEQ ID NO: 18315 - DNA, 27 bp, Artificial sequence
  SiRNA target sequence
atttattcaaatctgccattaatacat

SEQ ID NO: 18316 - DNA, 27 bp, Artificial sequence
  SiRNA target sequence
tttattcaaatctgccattaatacatc

SEQ ID NO: 18317 - DNA, 27 bp, Artificial sequence
  SiRNA target sequence
ttattcaaatctgccattaatacatct

SEQ ID NO: 18318 - DNA, 27 bp, Artificial sequence
  SiRNA target sequence
tattcaaatctgccattaatacatctt

SEQ ID NO: 18319 - DNA, 27 bp, Artificial sequence
  SiRNA target sequence
attcaaatctgccattaatacatcttt

SEQ ID NO: 18320 - DNA, 27 bp, Artificial sequence
  SiRNA target sequence
ttcaaatctgccattaatacatctttt

SEQ ID NO: 18321 - DNA, 27 bp, Artificial sequence
  SiRNA target sequence
tcaaatctgccattaatacatcttttg

SEQ ID NO: 18322 - DNA, 27 bp, Artificial sequence
  SiRNA target sequence
caaatctgccattaatacatcttttga

SEQ ID NO: 18323 - DNA, 27 bp, Artificial sequence
  SiRNA target sequence
aaatctgccattaatacatcttttgat

SEQ ID NO: 18324 - DNA, 27 bp, Artificial sequence
  SiRNA target sequence
aatctgccattaatacatcttttgata

SEQ ID NO: 18325 - DNA, 27 bp, Artificial sequence
  SiRNA target sequence
atctgccattaatacatcttttgatac

SEQ ID NO: 18326 - DNA, 27 bp, Artificial sequence
  SiRNA target sequence
tctgccattaatacatcttttgatact

SEQ ID NO: 18327 - DNA, 27 bp, Artificial sequence
  SiRNA target sequence
ctgccattaatacatcttttgatactt

SEQ ID NO: 18328 - DNA, 27 bp, Artificial sequence
  SiRNA target sequence
tgccattaatacatcttttgatacttt

SEQ ID NO: 18329 - DNA, 27 bp, Artificial sequence
  SiRNA target sequence
gccattaatacatcttttgatactttt

SEQ ID NO: 18330 - DNA, 27 bp, Artificial sequence
  SiRNA target sequence
ccattaatacatcttttgatactttta

SEQ ID NO: 18331 - DNA, 27 bp, Artificial sequence
  SiRNA target sequence
cattaatacatcttttgatacttttaa

SEQ ID NO: 18332 - DNA, 27 bp, Artificial sequence
  SiRNA target sequence
attaatacatcttttgatacttttaat

SEQ ID NO: 18333 - DNA, 27 bp, Artificial sequence
  SiRNA target sequence
ttaatacatcttttgatacttttaatt

SEQ ID NO: 18334 - DNA, 27 bp, Artificial sequence
  SiRNA target sequence
taatacatcttttgatacttttaattt

SEQ ID NO: 18335 - DNA, 27 bp, Artificial sequence
  SiRNA target sequence
aatacatcttttgatacttttaattta

SEQ ID NO: 18336 - DNA, 27 bp, Artificial sequence
  SiRNA target sequence
atacatcttttgatacttttaatttag

SEQ ID NO: 18337 - DNA, 27 bp, Artificial sequence
  SiRNA target sequence
tacatcttttgatacttttaatttaga

SEQ ID NO: 18338 - DNA, 27 bp, Artificial sequence
  SiRNA target sequence
acatcttttgatacttttaatttagaa

SEQ ID NO: 18339 - DNA, 27 bp, Artificial sequence
  SiRNA target sequence
catcttttgatacttttaatttagaaa

SEQ ID NO: 18340 - DNA, 27 bp, Artificial sequence
  SiRNA target sequence
atcttttgatacttttaatttagaaaa

SEQ ID NO: 18341 - DNA, 27 bp, Artificial sequence
  SiRNA target sequence
tcttttgatacttttaatttagaaaat

SEQ ID NO: 18342 - DNA, 27 bp, Artificial sequence
  SiRNA target sequence
cttttgatacttttaatttagaaaatg

SEQ ID NO: 18343 - DNA, 27 bp, Artificial sequence
  SiRNA target sequence
ttttgatacttttaatttagaaaatgt

SEQ ID NO: 18344 - DNA, 27 bp, Artificial sequence
  SiRNA target sequence
tttgatacttttaatttagaaaatgta

SEQ ID NO: 18345 - DNA, 27 bp, Artificial sequence
  SiRNA target sequence
ttgatacttttaatttagaaaatgtaa

SEQ ID NO: 18346 - DNA, 27 bp, Artificial sequence
  SiRNA target sequence
tgatacttttaatttagaaaatgtaag

SEQ ID NO: 18347 - DNA, 27 bp, Artificial sequence
  SiRNA target sequence
gatacttttaatttagaaaatgtaagc

SEQ ID NO: 18348 - DNA, 27 bp, Artificial sequence
  SiRNA target sequence
atacttttaatttagaaaatgtaagca

SEQ ID NO: 18349 - DNA, 27 bp, Artificial sequence
  SiRNA target sequence
tacttttaatttagaaaatgtaagcat

SEQ ID NO: 18350 - DNA, 27 bp, Artificial sequence
  SiRNA target sequence
acttttaatttagaaaatgtaagcatt

SEQ ID NO: 18351 - DNA, 27 bp, Artificial sequence
  SiRNA target sequence
cttttaatttagaaaatgtaagcatta

SEQ ID NO: 18352 - DNA, 27 bp, Artificial sequence
  SiRNA target sequence
ttttaatttagaaaatgtaagcattac

SEQ ID NO: 18353 - DNA, 27 bp, Artificial sequence
  SiRNA target sequence
tttaatttagaaaatgtaagcattact

SEQ ID NO: 18354 - DNA, 27 bp, Artificial sequence
  SiRNA target sequence
ttaatttagaaaatgtaagcattacta

SEQ ID NO: 18355 - DNA, 27 bp, Artificial sequence
  SiRNA target sequence
taatttagaaaatgtaagcattactag

SEQ ID NO: 18356 - DNA, 27 bp, Artificial sequence
  SiRNA target sequence
aatttagaaaatgtaagcattactagc

SEQ ID NO: 18357 - DNA, 27 bp, Artificial sequence
  SiRNA target sequence
atttagaaaatgtaagcattactagct

SEQ ID NO: 18358 - DNA, 27 bp, Artificial sequence
  SiRNA target sequence
tttagaaaatgtaagcattactagctt

SEQ ID NO: 18359 - DNA, 27 bp, Artificial sequence
  SiRNA target sequence
ttagaaaatgtaagcattactagctta

SEQ ID NO: 18360 - DNA, 27 bp, Artificial sequence
  SiRNA target sequence
tagaaaatgtaagcattactagcttaa

SEQ ID NO: 18361 - DNA, 27 bp, Artificial sequence
  SiRNA target sequence
agaaaatgtaagcattactagcttaaa

SEQ ID NO: 18362 - DNA, 27 bp, Artificial sequence
  SiRNA target sequence
gaaaatgtaagcattactagcttaaat

SEQ ID NO: 18363 - DNA, 27 bp, Artificial sequence
  SiRNA target sequence
aaaatgtaagcattactagcttaaata

SEQ ID NO: 18364 - DNA, 27 bp, Artificial sequence
  SiRNA target sequence
aaatgtaagcattactagcttaaatac

SEQ ID NO: 18365 - DNA, 27 bp, Artificial sequence
  SiRNA target sequence
aatgtaagcattactagcttaaatacg

SEQ ID NO: 18366 - DNA, 27 bp, Artificial sequence
  SiRNA target sequence
atgtaagcattactagcttaaatacgt

SEQ ID NO: 18367 - DNA, 27 bp, Artificial sequence
  SiRNA target sequence
tgtaagcattactagcttaaatacgta

SEQ ID NO: 18368 - DNA, 27 bp, Artificial sequence
  SiRNA target sequence
gtaagcattactagcttaaatacgtac

SEQ ID NO: 18369 - DNA, 27 bp, Artificial sequence
  SiRNA target sequence
taagcattactagcttaaatacgtaca

SEQ ID NO: 18370 - DNA, 27 bp, Artificial sequence
  SiRNA target sequence
aagcattactagcttaaatacgtacac

SEQ ID NO: 18371 - DNA, 27 bp, Artificial sequence
  SiRNA target sequence
agcattactagcttaaatacgtacacc

SEQ ID NO: 18372 - DNA, 27 bp, Artificial sequence
  SiRNA target sequence
gcattactagcttaaatacgtacaccg

SEQ ID NO: 18373 - DNA, 27 bp, Artificial sequence
  SiRNA target sequence
cattactagcttaaatacgtacaccgg

SEQ ID NO: 18374 - DNA, 27 bp, Artificial sequence
  SiRNA target sequence
attactagcttaaatacgtacaccggt

SEQ ID NO: 18375 - DNA, 27 bp, Artificial sequence
  SiRNA target sequence
ttactagcttaaatacgtacaccggtg

SEQ ID NO: 18376 - DNA, 27 bp, Artificial sequence
  SiRNA target sequence
tactagcttaaatacgtacaccggtgt

SEQ ID NO: 18377 - DNA, 27 bp, Artificial sequence
  SiRNA target sequence
actagcttaaatacgtacaccggtgtt

SEQ ID NO: 18378 - DNA, 27 bp, Artificial sequence
  SiRNA target sequence
ctagcttaaatacgtacaccggtgtta

SEQ ID NO: 18379 - DNA, 27 bp, Artificial sequence
  SiRNA target sequence
tagcttaaatacgtacaccggtgttaa

SEQ ID NO: 18380 - DNA, 27 bp, Artificial sequence
  SiRNA target sequence
agcttaaatacgtacaccggtgttaaa

SEQ ID NO: 18381 - DNA, 27 bp, Artificial sequence
  SiRNA target sequence
gcttaaatacgtacaccggtgttaaaa

SEQ ID NO: 18382 - DNA, 27 bp, Artificial sequence
  SiRNA target sequence
cttaaatacgtacaccggtgttaaaac

SEQ ID NO: 18383 - DNA, 27 bp, Artificial sequence
  SiRNA target sequence
ttaaatacgtacaccggtgttaaaacc

SEQ ID NO: 18384 - DNA, 27 bp, Artificial sequence
  SiRNA target sequence
taaatacgtacaccggtgttaaaaccg

SEQ ID NO: 18385 - DNA, 27 bp, Artificial sequence
  SiRNA target sequence
aaatacgtacaccggtgttaaaaccga

SEQ ID NO: 18386 - DNA, 27 bp, Artificial sequence
  SiRNA target sequence
aatacgtacaccggtgttaaaaccgaa

SEQ ID NO: 18387 - DNA, 27 bp, Artificial sequence
  SiRNA target sequence
atacgtacaccggtgttaaaaccgaaa

SEQ ID NO: 18388 - DNA, 27 bp, Artificial sequence
  SiRNA target sequence
tacgtacaccggtgttaaaaccgaaat

SEQ ID NO: 18389 - DNA, 27 bp, Artificial sequence
  SiRNA target sequence
acgtacaccggtgttaaaaccgaaata

SEQ ID NO: 18390 - DNA, 27 bp, Artificial sequence
  SiRNA target sequence
cgtacaccggtgttaaaaccgaaatat

SEQ ID NO: 18391 - DNA, 27 bp, Artificial sequence
  SiRNA target sequence
gtacaccggtgttaaaaccgaaatatc

SEQ ID NO: 18392 - DNA, 27 bp, Artificial sequence
  SiRNA target sequence
tacaccggtgttaaaaccgaaatatca

SEQ ID NO: 18393 - DNA, 27 bp, Artificial sequence
  SiRNA target sequence
acaccggtgttaaaaccgaaatatcaa

SEQ ID NO: 18394 - DNA, 27 bp, Artificial sequence
  SiRNA target sequence
caccggtgttaaaaccgaaatatcaaa

SEQ ID NO: 18395 - DNA, 27 bp, Artificial sequence
  SiRNA target sequence
accggtgttaaaaccgaaatatcaaaa

SEQ ID NO: 18396 - DNA, 27 bp, Artificial sequence
  SiRNA target sequence
ccggtgttaaaaccgaaatatcaaaaa

SEQ ID NO: 18397 - DNA, 27 bp, Artificial sequence
  SiRNA target sequence
cggtgttaaaaccgaaatatcaaaaac

SEQ ID NO: 18398 - DNA, 27 bp, Artificial sequence
  SiRNA target sequence
ggtgttaaaaccgaaatatcaaaaacc

SEQ ID NO: 18399 - DNA, 27 bp, Artificial sequence
  SiRNA target sequence
gtgttaaaaccgaaatatcaaaaaccg

SEQ ID NO: 18400 - DNA, 27 bp, Artificial sequence
  SiRNA target sequence
tgttaaaaccgaaatatcaaaaaccgt

SEQ ID NO: 18401 - DNA, 27 bp, Artificial sequence
  SiRNA target sequence
gttaaaaccgaaatatcaaaaaccgta

SEQ ID NO: 18402 - DNA, 27 bp, Artificial sequence
  SiRNA target sequence
ttaaaaccgaaatatcaaaaaccgtat

SEQ ID NO: 18403 - DNA, 27 bp, Artificial sequence
  SiRNA target sequence
taaaaccgaaatatcaaaaaccgtatc

SEQ ID NO: 18404 - DNA, 27 bp, Artificial sequence
  SiRNA target sequence
aaaaccgaaatatcaaaaaccgtatca

SEQ ID NO: 18405 - DNA, 27 bp, Artificial sequence
  SiRNA target sequence
aaaccgaaatatcaaaaaccgtatcac

SEQ ID NO: 18406 - DNA, 27 bp, Artificial sequence
  SiRNA target sequence
aaccgaaatatcaaaaaccgtatcacc

SEQ ID NO: 18407 - DNA, 27 bp, Artificial sequence
  SiRNA target sequence
accgaaatatcaaaaaccgtatcacca

SEQ ID NO: 18408 - DNA, 27 bp, Artificial sequence
  SiRNA target sequence
ccgaaatatcaaaaaccgtatcaccac

SEQ ID NO: 18409 - DNA, 27 bp, Artificial sequence
  SiRNA target sequence
cgaaatatcaaaaaccgtatcaccaca

SEQ ID NO: 18410 - DNA, 27 bp, Artificial sequence
  SiRNA target sequence
gaaatatcaaaaaccgtatcaccacac

SEQ ID NO: 18411 - DNA, 27 bp, Artificial sequence
  SiRNA target sequence
aaatatcaaaaaccgtatcaccacact

SEQ ID NO: 18412 - DNA, 27 bp, Artificial sequence
  SiRNA target sequence
aatatcaaaaaccgtatcaccacactt

SEQ ID NO: 18413 - DNA, 27 bp, Artificial sequence
  SiRNA target sequence
atatcaaaaaccgtatcaccacacttc

SEQ ID NO: 18414 - DNA, 27 bp, Artificial sequence
  SiRNA target sequence
tatcaaaaaccgtatcaccacacttcc

SEQ ID NO: 18415 - DNA, 27 bp, Artificial sequence
  SiRNA target sequence
atcaaaaaccgtatcaccacacttcca

SEQ ID NO: 18416 - DNA, 27 bp, Artificial sequence
  SiRNA target sequence
tcaaaaaccgtatcaccacacttccag

SEQ ID NO: 18417 - DNA, 27 bp, Artificial sequence
  SiRNA target sequence
caaaaaccgtatcaccacacttccaga

SEQ ID NO: 18418 - DNA, 27 bp, Artificial sequence
  SiRNA target sequence
aaaaaccgtatcaccacacttccagat

SEQ ID NO: 18419 - DNA, 27 bp, Artificial sequence
  SiRNA target sequence
aaaaccgtatcaccacacttccagatt

SEQ ID NO: 18420 - DNA, 27 bp, Artificial sequence
  SiRNA target sequence
aaaccgtatcaccacacttccagattt

SEQ ID NO: 18421 - DNA, 27 bp, Artificial sequence
  SiRNA target sequence
aaccgtatcaccacacttccagatttc

SEQ ID NO: 18422 - DNA, 27 bp, Artificial sequence
  SiRNA target sequence
accgtatcaccacacttccagatttct

SEQ ID NO: 18423 - DNA, 27 bp, Artificial sequence
  SiRNA target sequence
ccgtatcaccacacttccagatttctc

SEQ ID NO: 18424 - DNA, 27 bp, Artificial sequence
  SiRNA target sequence
cgtatcaccacacttccagatttctca

SEQ ID NO: 18425 - DNA, 27 bp, Artificial sequence
  SiRNA target sequence
gtatcaccacacttccagatttctcat

SEQ ID NO: 18426 - DNA, 27 bp, Artificial sequence
  SiRNA target sequence
tatcaccacacttccagatttctcatg

SEQ ID NO: 18427 - DNA, 27 bp, Artificial sequence
  SiRNA target sequence
atcaccacacttccagatttctcatgt

SEQ ID NO: 18428 - DNA, 27 bp, Artificial sequence
  SiRNA target sequence
tcaccacacttccagatttctcatgtc

SEQ ID NO: 18429 - DNA, 27 bp, Artificial sequence
  SiRNA target sequence
caccacacttccagatttctcatgtct

SEQ ID NO: 18430 - DNA, 27 bp, Artificial sequence
  SiRNA target sequence
accacacttccagatttctcatgtctc

SEQ ID NO: 18431 - DNA, 27 bp, Artificial sequence
  SiRNA target sequence
ccacacttccagatttctcatgtctct

SEQ ID NO: 18432 - DNA, 27 bp, Artificial sequence
  SiRNA target sequence
cacacttccagatttctcatgtctctt

SEQ ID NO: 18433 - DNA, 27 bp, Artificial sequence
  SiRNA target sequence
acacttccagatttctcatgtctcttc

SEQ ID NO: 18434 - DNA, 27 bp, Artificial sequence
  SiRNA target sequence
cacttccagatttctcatgtctcttct

SEQ ID NO: 18435 - DNA, 27 bp, Artificial sequence
  SiRNA target sequence
acttccagatttctcatgtctcttcta

SEQ ID NO: 18436 - DNA, 27 bp, Artificial sequence
  SiRNA target sequence
cttccagatttctcatgtctcttctat

SEQ ID NO: 18437 - DNA, 27 bp, Artificial sequence
  SiRNA target sequence
ttccagatttctcatgtctcttctatg

SEQ ID NO: 18438 - DNA, 27 bp, Artificial sequence
  SiRNA target sequence
tccagatttctcatgtctcttctatgg

SEQ ID NO: 18439 - DNA, 27 bp, Artificial sequence
  SiRNA target sequence
ccagatttctcatgtctcttctatggg

SEQ ID NO: 18440 - DNA, 27 bp, Artificial sequence
  SiRNA target sequence
cagatttctcatgtctcttctatgggc

SEQ ID NO: 18441 - DNA, 27 bp, Artificial sequence
  SiRNA target sequence
agatttctcatgtctcttctatgggcg

SEQ ID NO: 18442 - DNA, 27 bp, Artificial sequence
  SiRNA target sequence
gatttctcatgtctcttctatgggcgc

SEQ ID NO: 18443 - DNA, 27 bp, Artificial sequence
  SiRNA target sequence
atttctcatgtctcttctatgggcgca

SEQ ID NO: 18444 - DNA, 27 bp, Artificial sequence
  SiRNA target sequence
tttctcatgtctcttctatgggcgcag

SEQ ID NO: 18445 - DNA, 27 bp, Artificial sequence
  SiRNA target sequence
ttctcatgtctcttctatgggcgcaga

SEQ ID NO: 18446 - DNA, 27 bp, Artificial sequence
  SiRNA target sequence
tctcatgtctcttctatgggcgcagat

SEQ ID NO: 18447 - DNA, 27 bp, Artificial sequence
  SiRNA target sequence
ctcatgtctcttctatgggcgcagatt

SEQ ID NO: 18448 - DNA, 27 bp, Artificial sequence
  SiRNA target sequence
tcatgtctcttctatgggcgcagattt

SEQ ID NO: 18449 - DNA, 27 bp, Artificial sequence
  SiRNA target sequence
catgtctcttctatgggcgcagatttc

SEQ ID NO: 18450 - DNA, 27 bp, Artificial sequence
  SiRNA target sequence
atgtctcttctatgggcgcagatttcg

SEQ ID NO: 18451 - DNA, 27 bp, Artificial sequence
  SiRNA target sequence
tgtctcttctatgggcgcagatttcga

SEQ ID NO: 18452 - DNA, 27 bp, Artificial sequence
  SiRNA target sequence
gtctcttctatgggcgcagatttcgac

SEQ ID NO: 18453 - DNA, 27 bp, Artificial sequence
  SiRNA target sequence
tctcttctatgggcgcagatttcgaca

SEQ ID NO: 18454 - DNA, 27 bp, Artificial sequence
  SiRNA target sequence
ctcttctatgggcgcagatttcgacat

SEQ ID NO: 18455 - DNA, 27 bp, Artificial sequence
  SiRNA target sequence
tcttctatgggcgcagatttcgacata

SEQ ID NO: 18456 - DNA, 27 bp, Artificial sequence
  SiRNA target sequence
cttctatgggcgcagatttcgacataa

SEQ ID NO: 18457 - DNA, 27 bp, Artificial sequence
  SiRNA target sequence
ttctatgggcgcagatttcgacataaa

SEQ ID NO: 18458 - DNA, 27 bp, Artificial sequence
  SiRNA target sequence
tctatgggcgcagatttcgacataaaa

SEQ ID NO: 18459 - DNA, 27 bp, Artificial sequence
  SiRNA target sequence
ctatgggcgcagatttcgacataaaac

SEQ ID NO: 18460 - DNA, 27 bp, Artificial sequence
  SiRNA target sequence
tatgggcgcagatttcgacataaaaca

SEQ ID NO: 18461 - DNA, 27 bp, Artificial sequence
  SiRNA target sequence
atgggcgcagatttcgacataaaacag

SEQ ID NO: 18462 - DNA, 27 bp, Artificial sequence
  SiRNA target sequence
tgggcgcagatttcgacataaaacaga

SEQ ID NO: 18463 - DNA, 27 bp, Artificial sequence
  SiRNA target sequence
gggcgcagatttcgacataaaacagac

SEQ ID NO: 18464 - DNA, 27 bp, Artificial sequence
  SiRNA target sequence
ggcgcagatttcgacataaaacagaca

SEQ ID NO: 18465 - DNA, 27 bp, Artificial sequence
  SiRNA target sequence
gcgcagatttcgacataaaacagacat

SEQ ID NO: 18466 - DNA, 27 bp, Artificial sequence
  SiRNA target sequence
cgcagatttcgacataaaacagacata

SEQ ID NO: 18467 - DNA, 27 bp, Artificial sequence
  SiRNA target sequence
gcagatttcgacataaaacagacatac

SEQ ID NO: 18468 - DNA, 27 bp, Artificial sequence
  SiRNA target sequence
cagatttcgacataaaacagacatacg

SEQ ID NO: 18469 - DNA, 27 bp, Artificial sequence
  SiRNA target sequence
agatttcgacataaaacagacatacgc

SEQ ID NO: 18470 - DNA, 27 bp, Artificial sequence
  SiRNA target sequence
gatttcgacataaaacagacatacgcc

SEQ ID NO: 18471 - DNA, 27 bp, Artificial sequence
  SiRNA target sequence
atttcgacataaaacagacatacgcca

SEQ ID NO: 18472 - DNA, 27 bp, Artificial sequence
  SiRNA target sequence
tttcgacataaaacagacatacgccac

SEQ ID NO: 18473 - DNA, 27 bp, Artificial sequence
  SiRNA target sequence
ttcgacataaaacagacatacgccacg

SEQ ID NO: 18474 - DNA, 27 bp, Artificial sequence
  SiRNA target sequence
tcgacataaaacagacatacgccacgt

SEQ ID NO: 18475 - DNA, 27 bp, Artificial sequence
  SiRNA target sequence
cgacataaaacagacatacgccacgtt

SEQ ID NO: 18476 - DNA, 27 bp, Artificial sequence
  SiRNA target sequence
gacataaaacagacatacgccacgttc

SEQ ID NO: 18477 - DNA, 27 bp, Artificial sequence
  SiRNA target sequence
acataaaacagacatacgccacgttct

SEQ ID NO: 18478 - DNA, 27 bp, Artificial sequence
  SiRNA target sequence
cataaaacagacatacgccacgttctg

SEQ ID NO: 18479 - DNA, 27 bp, Artificial sequence
  SiRNA target sequence
ataaaacagacatacgccacgttctgc

SEQ ID NO: 18480 - DNA, 27 bp, Artificial sequence
  SiRNA target sequence
taaaacagacatacgccacgttctgct

SEQ ID NO: 18481 - DNA, 27 bp, Artificial sequence
  SiRNA target sequence
aaaacagacatacgccacgttctgctt

SEQ ID NO: 18482 - DNA, 27 bp, Artificial sequence
  SiRNA target sequence
aaacagacatacgccacgttctgcttt

SEQ ID NO: 18483 - DNA, 27 bp, Artificial sequence
  SiRNA target sequence
aacagacatacgccacgttctgcttta

SEQ ID NO: 18484 - DNA, 27 bp, Artificial sequence
  SiRNA target sequence
acagacatacgccacgttctgctttaa

SEQ ID NO: 18485 - DNA, 27 bp, Artificial sequence
  SiRNA target sequence
cagacatacgccacgttctgctttaac

SEQ ID NO: 18486 - DNA, 27 bp, Artificial sequence
  SiRNA target sequence
agacatacgccacgttctgctttaaca

SEQ ID NO: 18487 - DNA, 27 bp, Artificial sequence
  SiRNA target sequence
gacatacgccacgttctgctttaacaa

SEQ ID NO: 18488 - DNA, 27 bp, Artificial sequence
  SiRNA target sequence
acatacgccacgttctgctttaacaat

SEQ ID NO: 18489 - DNA, 27 bp, Artificial sequence
  SiRNA target sequence
catacgccacgttctgctttaacaatc

SEQ ID NO: 18490 - DNA, 27 bp, Artificial sequence
  SiRNA target sequence
atacgccacgttctgctttaacaatct

SEQ ID NO: 18491 - DNA, 27 bp, Artificial sequence
  SiRNA target sequence
tacgccacgttctgctttaacaatctt

SEQ ID NO: 18492 - DNA, 27 bp, Artificial sequence
  SiRNA target sequence
acgccacgttctgctttaacaatcttt

SEQ ID NO: 18493 - DNA, 27 bp, Artificial sequence
  SiRNA target sequence
cgccacgttctgctttaacaatctttt

SEQ ID NO: 18494 - DNA, 27 bp, Artificial sequence
  SiRNA target sequence
gccacgttctgctttaacaatcttttg

SEQ ID NO: 18495 - DNA, 27 bp, Artificial sequence
  SiRNA target sequence
ccacgttctgctttaacaatcttttgc

SEQ ID NO: 18496 - DNA, 27 bp, Artificial sequence
  SiRNA target sequence
cacgttctgctttaacaatcttttgct

SEQ ID NO: 18497 - DNA, 27 bp, Artificial sequence
  SiRNA target sequence
acgttctgctttaacaatcttttgcta

SEQ ID NO: 18498 - DNA, 27 bp, Artificial sequence
  SiRNA target sequence
cgttctgctttaacaatcttttgctac

SEQ ID NO: 18499 - DNA, 27 bp, Artificial sequence
  SiRNA target sequence
gttctgctttaacaatcttttgctaca

SEQ ID NO: 18500 - DNA, 27 bp, Artificial sequence
  SiRNA target sequence
ttctgctttaacaatcttttgctacaa

SEQ ID NO: 18501 - DNA, 27 bp, Artificial sequence
  SiRNA target sequence
tctgctttaacaatcttttgctacaaa

SEQ ID NO: 18502 - DNA, 27 bp, Artificial sequence
  SiRNA target sequence
ctgctttaacaatcttttgctacaaac

SEQ ID NO: 18503 - DNA, 27 bp, Artificial sequence
  SiRNA target sequence
tgctttaacaatcttttgctacaaacg

SEQ ID NO: 18504 - DNA, 27 bp, Artificial sequence
  SiRNA target sequence
gctttaacaatcttttgctacaaacga

SEQ ID NO: 18505 - DNA, 27 bp, Artificial sequence
  SiRNA target sequence
ctttaacaatcttttgctacaaacgag

SEQ ID NO: 18506 - DNA, 27 bp, Artificial sequence
  SiRNA target sequence
tttaacaatcttttgctacaaacgagc

SEQ ID NO: 18507 - DNA, 27 bp, Artificial sequence
  SiRNA target sequence
ttaacaatcttttgctacaaacgagca

SEQ ID NO: 18508 - DNA, 27 bp, Artificial sequence
  SiRNA target sequence
taacaatcttttgctacaaacgagcat

SEQ ID NO: 18509 - DNA, 27 bp, Artificial sequence
  SiRNA target sequence
aacaatcttttgctacaaacgagcata

SEQ ID NO: 18510 - DNA, 27 bp, Artificial sequence
  SiRNA target sequence
acaatcttttgctacaaacgagcatag

SEQ ID NO: 18511 - DNA, 27 bp, Artificial sequence
  SiRNA target sequence
caatcttttgctacaaacgagcataga

SEQ ID NO: 18512 - DNA, 27 bp, Artificial sequence
  SiRNA target sequence
aatcttttgctacaaacgagcatagac

SEQ ID NO: 18513 - DNA, 27 bp, Artificial sequence
  SiRNA target sequence
atcttttgctacaaacgagcatagacc

SEQ ID NO: 18514 - DNA, 27 bp, Artificial sequence
  SiRNA target sequence
tcttttgctacaaacgagcatagacca

SEQ ID NO: 18515 - DNA, 27 bp, Artificial sequence
  SiRNA target sequence
cttttgctacaaacgagcatagaccaa

SEQ ID NO: 18516 - DNA, 27 bp, Artificial sequence
  SiRNA target sequence
ttttgctacaaacgagcatagaccaag

SEQ ID NO: 18517 - DNA, 27 bp, Artificial sequence
  SiRNA target sequence
tttgctacaaacgagcatagaccaaga

SEQ ID NO: 18518 - DNA, 27 bp, Artificial sequence
  SiRNA target sequence
ttgctacaaacgagcatagaccaagac

SEQ ID NO: 18519 - DNA, 27 bp, Artificial sequence
  SiRNA target sequence
tgctacaaacgagcatagaccaagaca

SEQ ID NO: 18520 - DNA, 27 bp, Artificial sequence
  SiRNA target sequence
gctacaaacgagcatagaccaagacaa

SEQ ID NO: 18521 - DNA, 27 bp, Artificial sequence
  SiRNA target sequence
ctacaaacgagcatagaccaagacaaa

SEQ ID NO: 18522 - DNA, 27 bp, Artificial sequence
  SiRNA target sequence
tacaaacgagcatagaccaagacaaaa

SEQ ID NO: 18523 - DNA, 27 bp, Artificial sequence
  SiRNA target sequence
acaaacgagcatagaccaagacaaaat

SEQ ID NO: 18524 - DNA, 27 bp, Artificial sequence
  SiRNA target sequence
caaacgagcatagaccaagacaaaata

SEQ ID NO: 18525 - DNA, 27 bp, Artificial sequence
  SiRNA target sequence
aaacgagcatagaccaagacaaaatat

SEQ ID NO: 18526 - DNA, 27 bp, Artificial sequence
  SiRNA target sequence
aacgagcatagaccaagacaaaatatt

SEQ ID NO: 18527 - DNA, 27 bp, Artificial sequence
  SiRNA target sequence
acgagcatagaccaagacaaaatattt

SEQ ID NO: 18528 - DNA, 27 bp, Artificial sequence
  SiRNA target sequence
cgagcatagaccaagacaaaatattta

SEQ ID NO: 18529 - DNA, 27 bp, Artificial sequence
  SiRNA target sequence
gagcatagaccaagacaaaatatttag

SEQ ID NO: 18530 - DNA, 27 bp, Artificial sequence
  SiRNA target sequence
agcatagaccaagacaaaatatttaga

SEQ ID NO: 18531 - DNA, 27 bp, Artificial sequence
  SiRNA target sequence
gcatagaccaagacaaaatatttagaa

SEQ ID NO: 18532 - DNA, 27 bp, Artificial sequence
  SiRNA target sequence
catagaccaagacaaaatatttagaat

SEQ ID NO: 18533 - DNA, 27 bp, Artificial sequence
  SiRNA target sequence
atagaccaagacaaaatatttagaata

SEQ ID NO: 18534 - DNA, 27 bp, Artificial sequence
  SiRNA target sequence
tagaccaagacaaaatatttagaataa

SEQ ID NO: 18535 - DNA, 27 bp, Artificial sequence
  SiRNA target sequence
agaccaagacaaaatatttagaataag

SEQ ID NO: 18536 - DNA, 27 bp, Artificial sequence
  SiRNA target sequence
gaccaagacaaaatatttagaataaga

SEQ ID NO: 18537 - DNA, 27 bp, Artificial sequence
  SiRNA target sequence
accaagacaaaatatttagaataagag

SEQ ID NO: 18538 - DNA, 27 bp, Artificial sequence
  SiRNA target sequence
ccaagacaaaatatttagaataagagg

SEQ ID NO: 18539 - DNA, 27 bp, Artificial sequence
  SiRNA target sequence
caagacaaaatatttagaataagaggt

SEQ ID NO: 18540 - DNA, 27 bp, Artificial sequence
  SiRNA target sequence
aagacaaaatatttagaataagaggta

SEQ ID NO: 18541 - DNA, 27 bp, Artificial sequence
  SiRNA target sequence
agacaaaatatttagaataagaggtac

SEQ ID NO: 18542 - DNA, 27 bp, Artificial sequence
  SiRNA target sequence
gacaaaatatttagaataagaggtacc

SEQ ID NO: 18543 - DNA, 27 bp, Artificial sequence
  SiRNA target sequence
acaaaatatttagaataagaggtaccc

SEQ ID NO: 18544 - DNA, 27 bp, Artificial sequence
  SiRNA target sequence
caaaatatttagaataagaggtaccca

SEQ ID NO: 18545 - DNA, 27 bp, Artificial sequence
  SiRNA target sequence
aaaatatttagaataagaggtacccac

SEQ ID NO: 18546 - DNA, 27 bp, Artificial sequence
  SiRNA target sequence
aaatatttagaataagaggtacccaca

SEQ ID NO: 18547 - DNA, 27 bp, Artificial sequence
  SiRNA target sequence
aatatttagaataagaggtacccacat

SEQ ID NO: 18548 - DNA, 27 bp, Artificial sequence
  SiRNA target sequence
atatttagaataagaggtacccacatg

SEQ ID NO: 18549 - DNA, 27 bp, Artificial sequence
  SiRNA target sequence
tatttagaataagaggtacccacatgt

SEQ ID NO: 18550 - DNA, 27 bp, Artificial sequence
  SiRNA target sequence
atttagaataagaggtacccacatgtt

SEQ ID NO: 18551 - DNA, 27 bp, Artificial sequence
  SiRNA target sequence
tttagaataagaggtacccacatgttt

SEQ ID NO: 18552 - DNA, 27 bp, Artificial sequence
  SiRNA target sequence
ttagaataagaggtacccacatgttta

SEQ ID NO: 18553 - DNA, 27 bp, Artificial sequence
  SiRNA target sequence
tagaataagaggtacccacatgtttaa

SEQ ID NO: 18554 - DNA, 27 bp, Artificial sequence
  SiRNA target sequence
agaataagaggtacccacatgtttaaa

SEQ ID NO: 18555 - DNA, 27 bp, Artificial sequence
  SiRNA target sequence
gaataagaggtacccacatgtttaaaa

SEQ ID NO: 18556 - DNA, 27 bp, Artificial sequence
  SiRNA target sequence
aataagaggtacccacatgtttaaaaa

SEQ ID NO: 18557 - DNA, 27 bp, Artificial sequence
  SiRNA target sequence
ataagaggtacccacatgtttaaaaat

SEQ ID NO: 18558 - DNA, 27 bp, Artificial sequence
  SiRNA target sequence
taagaggtacccacatgtttaaaaatc

SEQ ID NO: 18559 - DNA, 27 bp, Artificial sequence
  SiRNA target sequence
aagaggtacccacatgtttaaaaatct

SEQ ID NO: 18560 - DNA, 27 bp, Artificial sequence
  SiRNA target sequence
agaggtacccacatgtttaaaaatcta

SEQ ID NO: 18561 - DNA, 27 bp, Artificial sequence
  SiRNA target sequence
gaggtacccacatgtttaaaaatctac

SEQ ID NO: 18562 - DNA, 27 bp, Artificial sequence
  SiRNA target sequence
aggtacccacatgtttaaaaatctact

SEQ ID NO: 18563 - DNA, 27 bp, Artificial sequence
  SiRNA target sequence
ggtacccacatgtttaaaaatctactt

SEQ ID NO: 18564 - DNA, 27 bp, Artificial sequence
  SiRNA target sequence
gtacccacatgtttaaaaatctactta

SEQ ID NO: 18565 - DNA, 27 bp, Artificial sequence
  SiRNA target sequence
tacccacatgtttaaaaatctacttac

SEQ ID NO: 18566 - DNA, 27 bp, Artificial sequence
  SiRNA target sequence
acccacatgtttaaaaatctacttact

SEQ ID NO: 18567 - DNA, 27 bp, Artificial sequence
  SiRNA target sequence
cccacatgtttaaaaatctacttacta

SEQ ID NO: 18568 - DNA, 27 bp, Artificial sequence
  SiRNA target sequence
ccacatgtttaaaaatctacttactaa

SEQ ID NO: 18569 - DNA, 27 bp, Artificial sequence
  SiRNA target sequence
cacatgtttaaaaatctacttactaaa

SEQ ID NO: 18570 - DNA, 27 bp, Artificial sequence
  SiRNA target sequence
acatgtttaaaaatctacttactaaat

SEQ ID NO: 18571 - DNA, 27 bp, Artificial sequence
  SiRNA target sequence
catgtttaaaaatctacttactaaatt

SEQ ID NO: 18572 - DNA, 27 bp, Artificial sequence
  SiRNA target sequence
atgtttaaaaatctacttactaaattc

SEQ ID NO: 18573 - DNA, 27 bp, Artificial sequence
  SiRNA target sequence
tgtttaaaaatctacttactaaattcc

SEQ ID NO: 18574 - DNA, 27 bp, Artificial sequence
  SiRNA target sequence
gtttaaaaatctacttactaaattcca

SEQ ID NO: 18575 - DNA, 27 bp, Artificial sequence
  SiRNA target sequence
tttaaaaatctacttactaaattccat

SEQ ID NO: 18576 - DNA, 27 bp, Artificial sequence
  SiRNA target sequence
ttaaaaatctacttactaaattccata

SEQ ID NO: 18577 - DNA, 27 bp, Artificial sequence
  SiRNA target sequence
taaaaatctacttactaaattccatac

SEQ ID NO: 18578 - DNA, 27 bp, Artificial sequence
  SiRNA target sequence
aaaaatctacttactaaattccataca

SEQ ID NO: 18579 - DNA, 27 bp, Artificial sequence
  SiRNA target sequence
aaaatctacttactaaattccatacag

SEQ ID NO: 18580 - DNA, 27 bp, Artificial sequence
  SiRNA target sequence
aaatctacttactaaattccatacagt

SEQ ID NO: 18581 - DNA, 27 bp, Artificial sequence
  SiRNA target sequence
aatctacttactaaattccatacagta

SEQ ID NO: 18582 - DNA, 27 bp, Artificial sequence
  SiRNA target sequence
atctacttactaaattccatacagtaa

SEQ ID NO: 18583 - DNA, 27 bp, Artificial sequence
  SiRNA target sequence
tctacttactaaattccatacagtaat

SEQ ID NO: 18584 - DNA, 27 bp, Artificial sequence
  SiRNA target sequence
ctacttactaaattccatacagtaatt

SEQ ID NO: 18585 - DNA, 27 bp, Artificial sequence
  SiRNA target sequence
tacttactaaattccatacagtaattg

SEQ ID NO: 18586 - DNA, 27 bp, Artificial sequence
  SiRNA target sequence
acttactaaattccatacagtaattgg

SEQ ID NO: 18587 - DNA, 27 bp, Artificial sequence
  SiRNA target sequence
cttactaaattccatacagtaattggt

SEQ ID NO: 18588 - DNA, 27 bp, Artificial sequence
  SiRNA target sequence
ttactaaattccatacagtaattggta

SEQ ID NO: 18589 - DNA, 27 bp, Artificial sequence
  SiRNA target sequence
tactaaattccatacagtaattggtag

SEQ ID NO: 18590 - DNA, 27 bp, Artificial sequence
  SiRNA target sequence
actaaattccatacagtaattggtaga

SEQ ID NO: 18591 - DNA, 27 bp, Artificial sequence
  SiRNA target sequence
ctaaattccatacagtaattggtagaa

SEQ ID NO: 18592 - DNA, 27 bp, Artificial sequence
  SiRNA target sequence
taaattccatacagtaattggtagaag

SEQ ID NO: 18593 - DNA, 27 bp, Artificial sequence
  SiRNA target sequence
aaattccatacagtaattggtagaagt

SEQ ID NO: 18594 - DNA, 27 bp, Artificial sequence
  SiRNA target sequence
aattccatacagtaattggtagaagta

SEQ ID NO: 18595 - DNA, 27 bp, Artificial sequence
  SiRNA target sequence
attccatacagtaattggtagaagtaa

SEQ ID NO: 18596 - DNA, 27 bp, Artificial sequence
  SiRNA target sequence
ttccatacagtaattggtagaagtaaa

SEQ ID NO: 18597 - DNA, 27 bp, Artificial sequence
  SiRNA target sequence
tccatacagtaattggtagaagtaaag

SEQ ID NO: 18598 - DNA, 27 bp, Artificial sequence
  SiRNA target sequence
ccatacagtaattggtagaagtaaaga

SEQ ID NO: 18599 - DNA, 27 bp, Artificial sequence
  SiRNA target sequence
catacagtaattggtagaagtaaagat

SEQ ID NO: 18600 - DNA, 27 bp, Artificial sequence
  SiRNA target sequence
atacagtaattggtagaagtaaagata

SEQ ID NO: 18601 - DNA, 27 bp, Artificial sequence
  SiRNA target sequence
tacagtaattggtagaagtaaagatat

SEQ ID NO: 18602 - DNA, 27 bp, Artificial sequence
  SiRNA target sequence
acagtaattggtagaagtaaagatatc

SEQ ID NO: 18603 - DNA, 27 bp, Artificial sequence
  SiRNA target sequence
cagtaattggtagaagtaaagatatct

SEQ ID NO: 18604 - DNA, 27 bp, Artificial sequence
  SiRNA target sequence
agtaattggtagaagtaaagatatctt

SEQ ID NO: 18605 - DNA, 27 bp, Artificial sequence
  SiRNA target sequence
gtaattggtagaagtaaagatatcttt

SEQ ID NO: 18606 - DNA, 27 bp, Artificial sequence
  SiRNA target sequence
taattggtagaagtaaagatatcttta

SEQ ID NO: 18607 - DNA, 27 bp, Artificial sequence
  SiRNA target sequence
aattggtagaagtaaagatatctttac

SEQ ID NO: 18608 - DNA, 27 bp, Artificial sequence
  SiRNA target sequence
attggtagaagtaaagatatctttaca

SEQ ID NO: 18609 - DNA, 27 bp, Artificial sequence
  SiRNA target sequence
ttggtagaagtaaagatatctttacac

SEQ ID NO: 18610 - DNA, 27 bp, Artificial sequence
  SiRNA target sequence
tggtagaagtaaagatatctttacaca

SEQ ID NO: 18611 - DNA, 27 bp, Artificial sequence
  SiRNA target sequence
ggtagaagtaaagatatctttacacaa

SEQ ID NO: 18612 - DNA, 27 bp, Artificial sequence
  SiRNA target sequence
gtagaagtaaagatatctttacacaaa

SEQ ID NO: 18613 - DNA, 27 bp, Artificial sequence
  SiRNA target sequence
tagaagtaaagatatctttacacaaat

SEQ ID NO: 18614 - DNA, 27 bp, Artificial sequence
  SiRNA target sequence
agaagtaaagatatctttacacaaata

SEQ ID NO: 18615 - DNA, 27 bp, Artificial sequence
  SiRNA target sequence
gaagtaaagatatctttacacaaatag

SEQ ID NO: 18616 - DNA, 27 bp, Artificial sequence
  SiRNA target sequence
aagtaaagatatctttacacaaataga

SEQ ID NO: 18617 - DNA, 27 bp, Artificial sequence
  SiRNA target sequence
agtaaagatatctttacacaaatagag

SEQ ID NO: 18618 - DNA, 27 bp, Artificial sequence
  SiRNA target sequence
gtaaagatatctttacacaaatagagg

SEQ ID NO: 18619 - DNA, 27 bp, Artificial sequence
  SiRNA target sequence
taaagatatctttacacaaatagaggt

SEQ ID NO: 18620 - DNA, 27 bp, Artificial sequence
  SiRNA target sequence
aaagatatctttacacaaatagaggta

SEQ ID NO: 18621 - DNA, 27 bp, Artificial sequence
  SiRNA target sequence
aagatatctttacacaaatagaggtag

SEQ ID NO: 18622 - DNA, 27 bp, Artificial sequence
  SiRNA target sequence
agatatctttacacaaatagaggtaga

SEQ ID NO: 18623 - DNA, 27 bp, Artificial sequence
  SiRNA target sequence
gatatctttacacaaatagaggtagac

SEQ ID NO: 18624 - DNA, 27 bp, Artificial sequence
  SiRNA target sequence
atatctttacacaaatagaggtagaca

SEQ ID NO: 18625 - DNA, 27 bp, Artificial sequence
  SiRNA target sequence
tatctttacacaaatagaggtagacat

SEQ ID NO: 18626 - DNA, 27 bp, Artificial sequence
  SiRNA target sequence
atctttacacaaatagaggtagacata

SEQ ID NO: 18627 - DNA, 27 bp, Artificial sequence
  SiRNA target sequence
tctttacacaaatagaggtagacataa

SEQ ID NO: 18628 - DNA, 27 bp, Artificial sequence
  SiRNA target sequence
ctttacacaaatagaggtagacataaa

SEQ ID NO: 18629 - DNA, 27 bp, Artificial sequence
  SiRNA target sequence
tttacacaaatagaggtagacataaaa

SEQ ID NO: 18630 - DNA, 27 bp, Artificial sequence
  SiRNA target sequence
ttacacaaatagaggtagacataaaaa

SEQ ID NO: 18631 - DNA, 27 bp, Artificial sequence
  SiRNA target sequence
tacacaaatagaggtagacataaaaaa

SEQ ID NO: 18632 - DNA, 27 bp, Artificial sequence
  SiRNA target sequence
acacaaatagaggtagacataaaaaat

SEQ ID NO: 18633 - DNA, 27 bp, Artificial sequence
  SiRNA target sequence
cacaaatagaggtagacataaaaaata

SEQ ID NO: 18634 - DNA, 27 bp, Artificial sequence
  SiRNA target sequence
acaaatagaggtagacataaaaaataa

SEQ ID NO: 18635 - DNA, 27 bp, Artificial sequence
  SiRNA target sequence
caaatagaggtagacataaaaaataaa

SEQ ID NO: 18636 - DNA, 27 bp, Artificial sequence
  SiRNA target sequence
aaatagaggtagacataaaaaataaat

SEQ ID NO: 18637 - DNA, 27 bp, Artificial sequence
  SiRNA target sequence
aatagaggtagacataaaaaataaata

SEQ ID NO: 18638 - DNA, 27 bp, Artificial sequence
  SiRNA target sequence
atagaggtagacataaaaaataaatac

SEQ ID NO: 18639 - DNA, 27 bp, Artificial sequence
  SiRNA target sequence
tagaggtagacataaaaaataaataca

SEQ ID NO: 18640 - DNA, 27 bp, Artificial sequence
  SiRNA target sequence
agaggtagacataaaaaataaatacaa

SEQ ID NO: 18641 - DNA, 27 bp, Artificial sequence
  SiRNA target sequence
gaggtagacataaaaaataaatacaat

SEQ ID NO: 18642 - DNA, 27 bp, Artificial sequence
  SiRNA target sequence
aggtagacataaaaaataaatacaata

SEQ ID NO: 18643 - DNA, 27 bp, Artificial sequence
  SiRNA target sequence
ggtagacataaaaaataaatacaataa

SEQ ID NO: 18644 - DNA, 27 bp, Artificial sequence
  SiRNA target sequence
gtagacataaaaaataaatacaataat

SEQ ID NO: 18645 - DNA, 27 bp, Artificial sequence
  SiRNA target sequence
tagacataaaaaataaatacaataata

SEQ ID NO: 18646 - DNA, 27 bp, Artificial sequence
  SiRNA target sequence
agacataaaaaataaatacaataatat

SEQ ID NO: 18647 - DNA, 27 bp, Artificial sequence
  SiRNA target sequence
gacataaaaaataaatacaataatatg

SEQ ID NO: 18648 - DNA, 27 bp, Artificial sequence
  SiRNA target sequence
acataaaaaataaatacaataatatgt

SEQ ID NO: 18649 - DNA, 27 bp, Artificial sequence
  SiRNA target sequence
cataaaaaataaatacaataatatgtg

SEQ ID NO: 18650 - DNA, 27 bp, Artificial sequence
  SiRNA target sequence
ataaaaaataaatacaataatatgtgt

SEQ ID NO: 18651 - DNA, 27 bp, Artificial sequence
  SiRNA target sequence
taaaaaataaatacaataatatgtgta

SEQ ID NO: 18652 - DNA, 27 bp, Artificial sequence
  SiRNA target sequence
aaaaaataaatacaataatatgtgtat

SEQ ID NO: 18653 - DNA, 27 bp, Artificial sequence
  SiRNA target sequence
aaaaataaatacaataatatgtgtata

SEQ ID NO: 18654 - DNA, 27 bp, Artificial sequence
  SiRNA target sequence
aaaataaatacaataatatgtgtataa

SEQ ID NO: 18655 - DNA, 27 bp, Artificial sequence
  SiRNA target sequence
aaataaatacaataatatgtgtataaa

SEQ ID NO: 18656 - DNA, 27 bp, Artificial sequence
  SiRNA target sequence
aataaatacaataatatgtgtataaaa

SEQ ID NO: 18657 - DNA, 27 bp, Artificial sequence
  SiRNA target sequence
ataaatacaataatatgtgtataaaaa

SEQ ID NO: 18658 - DNA, 27 bp, Artificial sequence
  SiRNA target sequence
taaatacaataatatgtgtataaaaat

SEQ ID NO: 18659 - DNA, 27 bp, Artificial sequence
  SiRNA target sequence
aaatacaataatatgtgtataaaaatg

SEQ ID NO: 18660 - DNA, 27 bp, Artificial sequence
  SiRNA target sequence
aatacaataatatgtgtataaaaatga

SEQ ID NO: 18661 - DNA, 27 bp, Artificial sequence
  SiRNA target sequence
atacaataatatgtgtataaaaatgat

SEQ ID NO: 18662 - DNA, 27 bp, Artificial sequence
  SiRNA target sequence
tacaataatatgtgtataaaaatgata

SEQ ID NO: 18663 - DNA, 27 bp, Artificial sequence
  SiRNA target sequence
acaataatatgtgtataaaaatgatac

SEQ ID NO: 18664 - DNA, 27 bp, Artificial sequence
  SiRNA target sequence
caataatatgtgtataaaaatgataca

SEQ ID NO: 18665 - DNA, 27 bp, Artificial sequence
  SiRNA target sequence
aataatatgtgtataaaaatgatacag

SEQ ID NO: 18666 - DNA, 27 bp, Artificial sequence
  SiRNA target sequence
ataatatgtgtataaaaatgatacagc

SEQ ID NO: 18667 - DNA, 27 bp, Artificial sequence
  SiRNA target sequence
taatatgtgtataaaaatgatacagcc

SEQ ID NO: 18668 - DNA, 27 bp, Artificial sequence
  SiRNA target sequence
aatatgtgtataaaaatgatacagcca

SEQ ID NO: 18669 - DNA, 27 bp, Artificial sequence
  SiRNA target sequence
atatgtgtataaaaatgatacagccag

SEQ ID NO: 18670 - DNA, 27 bp, Artificial sequence
  SiRNA target sequence
tatgtgtataaaaatgatacagccagc

SEQ ID NO: 18671 - DNA, 27 bp, Artificial sequence
  SiRNA target sequence
atgtgtataaaaatgatacagccagct

SEQ ID NO: 18672 - DNA, 27 bp, Artificial sequence
  SiRNA target sequence
tgtgtataaaaatgatacagccagcta

SEQ ID NO: 18673 - DNA, 27 bp, Artificial sequence
  SiRNA target sequence
gtgtataaaaatgatacagccagctat

SEQ ID NO: 18674 - DNA, 27 bp, Artificial sequence
  SiRNA target sequence
tgtataaaaatgatacagccagctatt

SEQ ID NO: 18675 - DNA, 27 bp, Artificial sequence
  SiRNA target sequence
gtataaaaatgatacagccagctatta

SEQ ID NO: 18676 - DNA, 27 bp, Artificial sequence
  SiRNA target sequence
tataaaaatgatacagccagctattaa

SEQ ID NO: 18677 - DNA, 27 bp, Artificial sequence
  SiRNA target sequence
ataaaaatgatacagccagctattaaa

SEQ ID NO: 18678 - DNA, 27 bp, Artificial sequence
  SiRNA target sequence
taaaaatgatacagccagctattaaag

SEQ ID NO: 18679 - DNA, 27 bp, Artificial sequence
  SiRNA target sequence
aaaaatgatacagccagctattaaagg

SEQ ID NO: 18680 - DNA, 27 bp, Artificial sequence
  SiRNA target sequence
aaaatgatacagccagctattaaaggt

SEQ ID NO: 18681 - DNA, 27 bp, Artificial sequence
  SiRNA target sequence
aaatgatacagccagctattaaaggtg

SEQ ID NO: 18682 - DNA, 27 bp, Artificial sequence
  SiRNA target sequence
aatgatacagccagctattaaaggtgc

SEQ ID NO: 18683 - DNA, 27 bp, Artificial sequence
  SiRNA target sequence
atgatacagccagctattaaaggtgct

SEQ ID NO: 18684 - DNA, 27 bp, Artificial sequence
  SiRNA target sequence
tgatacagccagctattaaaggtgctt

SEQ ID NO: 18685 - DNA, 27 bp, Artificial sequence
  SiRNA target sequence
gatacagccagctattaaaggtgcttc

SEQ ID NO: 18686 - DNA, 27 bp, Artificial sequence
  SiRNA target sequence
atacagccagctattaaaggtgcttca

SEQ ID NO: 18687 - DNA, 27 bp, Artificial sequence
  SiRNA target sequence
tacagccagctattaaaggtgcttcat

SEQ ID NO: 18688 - DNA, 27 bp, Artificial sequence
  SiRNA target sequence
acagccagctattaaaggtgcttcatg

SEQ ID NO: 18689 - DNA, 27 bp, Artificial sequence
  SiRNA target sequence
cagccagctattaaaggtgcttcatgt

SEQ ID NO: 18690 - DNA, 27 bp, Artificial sequence
  SiRNA target sequence
agccagctattaaaggtgcttcatgta

SEQ ID NO: 18691 - DNA, 27 bp, Artificial sequence
  SiRNA target sequence
gccagctattaaaggtgcttcatgtat

SEQ ID NO: 18692 - DNA, 27 bp, Artificial sequence
  SiRNA target sequence
ccagctattaaaggtgcttcatgtata

SEQ ID NO: 18693 - DNA, 27 bp, Artificial sequence
  SiRNA target sequence
cagctattaaaggtgcttcatgtatat

SEQ ID NO: 18694 - DNA, 27 bp, Artificial sequence
  SiRNA target sequence
agctattaaaggtgcttcatgtatata

SEQ ID NO: 18695 - DNA, 27 bp, Artificial sequence
  SiRNA target sequence
gctattaaaggtgcttcatgtatatac

SEQ ID NO: 18696 - DNA, 27 bp, Artificial sequence
  SiRNA target sequence
ctattaaaggtgcttcatgtatatacg

SEQ ID NO: 18697 - DNA, 27 bp, Artificial sequence
  SiRNA target sequence
tattaaaggtgcttcatgtatatacgt

SEQ ID NO: 18698 - DNA, 27 bp, Artificial sequence
  SiRNA target sequence
attaaaggtgcttcatgtatatacgtg

SEQ ID NO: 18699 - DNA, 27 bp, Artificial sequence
  SiRNA target sequence
ttaaaggtgcttcatgtatatacgtgg

SEQ ID NO: 18700 - DNA, 27 bp, Artificial sequence
  SiRNA target sequence
taaaggtgcttcatgtatatacgtggg

SEQ ID NO: 18701 - DNA, 27 bp, Artificial sequence
  SiRNA target sequence
aaaggtgcttcatgtatatacgtgggt

SEQ ID NO: 18702 - DNA, 27 bp, Artificial sequence
  SiRNA target sequence
aaggtgcttcatgtatatacgtgggta

SEQ ID NO: 18703 - DNA, 27 bp, Artificial sequence
  SiRNA target sequence
aggtgcttcatgtatatacgtgggtaa

SEQ ID NO: 18704 - DNA, 27 bp, Artificial sequence
  SiRNA target sequence
ggtgcttcatgtatatacgtgggtaat

SEQ ID NO: 18705 - DNA, 27 bp, Artificial sequence
  SiRNA target sequence
gtgcttcatgtatatacgtgggtaatt

SEQ ID NO: 18706 - DNA, 27 bp, Artificial sequence
  SiRNA target sequence
tgcttcatgtatatacgtgggtaatta

SEQ ID NO: 18707 - DNA, 27 bp, Artificial sequence
  SiRNA target sequence
gcttcatgtatatacgtgggtaattat

SEQ ID NO: 18708 - DNA, 27 bp, Artificial sequence
  SiRNA target sequence
cttcatgtatatacgtgggtaattata

SEQ ID NO: 18709 - DNA, 27 bp, Artificial sequence
  SiRNA target sequence
ttcatgtatatacgtgggtaattatat

SEQ ID NO: 18710 - DNA, 27 bp, Artificial sequence
  SiRNA target sequence
tcatgtatatacgtgggtaattatatg

SEQ ID NO: 18711 - DNA, 27 bp, Artificial sequence
  SiRNA target sequence
catgtatatacgtgggtaattatatgc

SEQ ID NO: 18712 - DNA, 27 bp, Artificial sequence
  SiRNA target sequence
atgtatatacgtgggtaattatatgca

SEQ ID NO: 18713 - DNA, 27 bp, Artificial sequence
  SiRNA target sequence
tgtatatacgtgggtaattatatgcag

SEQ ID NO: 18714 - DNA, 27 bp, Artificial sequence
  SiRNA target sequence
gtatatacgtgggtaattatatgcagc

SEQ ID NO: 18715 - DNA, 27 bp, Artificial sequence
  SiRNA target sequence
tatatacgtgggtaattatatgcagca

SEQ ID NO: 18716 - DNA, 27 bp, Artificial sequence
  SiRNA target sequence
atatacgtgggtaattatatgcagcag

SEQ ID NO: 18717 - DNA, 27 bp, Artificial sequence
  SiRNA target sequence
tatacgtgggtaattatatgcagcagc

SEQ ID NO: 18718 - DNA, 27 bp, Artificial sequence
  SiRNA target sequence
atacgtgggtaattatatgcagcagct

SEQ ID NO: 18719 - DNA, 27 bp, Artificial sequence
  SiRNA target sequence
tacgtgggtaattatatgcagcagcta

SEQ ID NO: 18720 - DNA, 27 bp, Artificial sequence
  SiRNA target sequence
acgtgggtaattatatgcagcagctag

SEQ ID NO: 18721 - DNA, 27 bp, Artificial sequence
  SiRNA target sequence
cgtgggtaattatatgcagcagctagg

SEQ ID NO: 18722 - DNA, 27 bp, Artificial sequence
  SiRNA target sequence
gtgggtaattatatgcagcagctagga

SEQ ID NO: 18723 - DNA, 27 bp, Artificial sequence
  SiRNA target sequence
tgggtaattatatgcagcagctaggag

SEQ ID NO: 18724 - DNA, 27 bp, Artificial sequence
  SiRNA target sequence
gggtaattatatgcagcagctaggagt

SEQ ID NO: 18725 - DNA, 27 bp, Artificial sequence
  SiRNA target sequence
ggtaattatatgcagcagctaggagta

SEQ ID NO: 18726 - DNA, 27 bp, Artificial sequence
  SiRNA target sequence
gtaattatatgcagcagctaggagtaa

SEQ ID NO: 18727 - DNA, 27 bp, Artificial sequence
  SiRNA target sequence
taattatatgcagcagctaggagtaat

SEQ ID NO: 18728 - DNA, 27 bp, Artificial sequence
  SiRNA target sequence
aattatatgcagcagctaggagtaatt

SEQ ID NO: 18729 - DNA, 27 bp, Artificial sequence
  SiRNA target sequence
attatatgcagcagctaggagtaatta

SEQ ID NO: 18730 - DNA, 27 bp, Artificial sequence
  SiRNA target sequence
ttatatgcagcagctaggagtaattag

SEQ ID NO: 18731 - DNA, 27 bp, Artificial sequence
  SiRNA target sequence
tatatgcagcagctaggagtaattagt

SEQ ID NO: 18732 - DNA, 27 bp, Artificial sequence
  SiRNA target sequence
atatgcagcagctaggagtaattagtc

SEQ ID NO: 18733 - DNA, 27 bp, Artificial sequence
  SiRNA target sequence
tatgcagcagctaggagtaattagtct

SEQ ID NO: 18734 - DNA, 27 bp, Artificial sequence
  SiRNA target sequence
atgcagcagctaggagtaattagtctt

SEQ ID NO: 18735 - DNA, 27 bp, Artificial sequence
  SiRNA target sequence
tgcagcagctaggagtaattagtcttg

SEQ ID NO: 18736 - DNA, 27 bp, Artificial sequence
  SiRNA target sequence
gcagcagctaggagtaattagtcttgg

SEQ ID NO: 18737 - DNA, 27 bp, Artificial sequence
  SiRNA target sequence
cagcagctaggagtaattagtcttggt

SEQ ID NO: 18738 - DNA, 27 bp, Artificial sequence
  SiRNA target sequence
agcagctaggagtaattagtcttggtg

SEQ ID NO: 18739 - DNA, 27 bp, Artificial sequence
  SiRNA target sequence
gcagctaggagtaattagtcttggtgg

SEQ ID NO: 18740 - DNA, 27 bp, Artificial sequence
  SiRNA target sequence
cagctaggagtaattagtcttggtggg

SEQ ID NO: 18741 - DNA, 27 bp, Artificial sequence
  SiRNA target sequence
agctaggagtaattagtcttggtgggg

SEQ ID NO: 18742 - DNA, 27 bp, Artificial sequence
  SiRNA target sequence
gctaggagtaattagtcttggtgggga

SEQ ID NO: 18743 - DNA, 27 bp, Artificial sequence
  SiRNA target sequence
ctaggagtaattagtcttggtggggag

SEQ ID NO: 18744 - DNA, 27 bp, Artificial sequence
  SiRNA target sequence
taggagtaattagtcttggtggggaga

SEQ ID NO: 18745 - DNA, 27 bp, Artificial sequence
  SiRNA target sequence
aggagtaattagtcttggtggggagat

SEQ ID NO: 18746 - DNA, 27 bp, Artificial sequence
  SiRNA target sequence
ggagtaattagtcttggtggggagatt

SEQ ID NO: 18747 - DNA, 27 bp, Artificial sequence
  SiRNA target sequence
gagtaattagtcttggtggggagatta

SEQ ID NO: 18748 - DNA, 27 bp, Artificial sequence
  SiRNA target sequence
agtaattagtcttggtggggagattat

SEQ ID NO: 18749 - DNA, 27 bp, Artificial sequence
  SiRNA target sequence
gtaattagtcttggtggggagattatt

SEQ ID NO: 18750 - DNA, 27 bp, Artificial sequence
  SiRNA target sequence
taattagtcttggtggggagattatta

SEQ ID NO: 18751 - DNA, 27 bp, Artificial sequence
  SiRNA target sequence
aattagtcttggtggggagattattaa

SEQ ID NO: 18752 - DNA, 27 bp, Artificial sequence
  SiRNA target sequence
attagtcttggtggggagattattaaa

SEQ ID NO: 18753 - DNA, 27 bp, Artificial sequence
  SiRNA target sequence
ttagtcttggtggggagattattaaag

SEQ ID NO: 18754 - DNA, 27 bp, Artificial sequence
  SiRNA target sequence
tagtcttggtggggagattattaaagc

SEQ ID NO: 18755 - DNA, 27 bp, Artificial sequence
  SiRNA target sequence
agtcttggtggggagattattaaagct

SEQ ID NO: 18756 - DNA, 27 bp, Artificial sequence
  SiRNA target sequence
gtcttggtggggagattattaaagctg

SEQ ID NO: 18757 - DNA, 27 bp, Artificial sequence
  SiRNA target sequence
tcttggtggggagattattaaagctga

SEQ ID NO: 18758 - DNA, 27 bp, Artificial sequence
  SiRNA target sequence
cttggtggggagattattaaagctgat

SEQ ID NO: 18759 - DNA, 27 bp, Artificial sequence
  SiRNA target sequence
ttggtggggagattattaaagctgatg

SEQ ID NO: 18760 - DNA, 27 bp, Artificial sequence
  SiRNA target sequence
tggtggggagattattaaagctgatga

SEQ ID NO: 18761 - DNA, 27 bp, Artificial sequence
  SiRNA target sequence
ggtggggagattattaaagctgatgaa

SEQ ID NO: 18762 - DNA, 27 bp, Artificial sequence
  SiRNA target sequence
gtggggagattattaaagctgatgaat

SEQ ID NO: 18763 - DNA, 27 bp, Artificial sequence
  SiRNA target sequence
tggggagattattaaagctgatgaata

SEQ ID NO: 18764 - DNA, 27 bp, Artificial sequence
  SiRNA target sequence
ggggagattattaaagctgatgaatac

SEQ ID NO: 18765 - DNA, 27 bp, Artificial sequence
  SiRNA target sequence
gggagattattaaagctgatgaataca

SEQ ID NO: 18766 - DNA, 27 bp, Artificial sequence
  SiRNA target sequence
ggagattattaaagctgatgaatacat

SEQ ID NO: 18767 - DNA, 27 bp, Artificial sequence
  SiRNA target sequence
gagattattaaagctgatgaatacatt

SEQ ID NO: 18768 - DNA, 27 bp, Artificial sequence
  SiRNA target sequence
agattattaaagctgatgaatacattg

SEQ ID NO: 18769 - DNA, 27 bp, Artificial sequence
  SiRNA target sequence
gattattaaagctgatgaatacattgg

SEQ ID NO: 18770 - DNA, 27 bp, Artificial sequence
  SiRNA target sequence
attattaaagctgatgaatacattgga

SEQ ID NO: 18771 - DNA, 27 bp, Artificial sequence
  SiRNA target sequence
ttattaaagctgatgaatacattggac

SEQ ID NO: 18772 - DNA, 27 bp, Artificial sequence
  SiRNA target sequence
tattaaagctgatgaatacattggact

SEQ ID NO: 18773 - DNA, 27 bp, Artificial sequence
  SiRNA target sequence
attaaagctgatgaatacattggacta

SEQ ID NO: 18774 - DNA, 27 bp, Artificial sequence
  SiRNA target sequence
ttaaagctgatgaatacattggactat

SEQ ID NO: 18775 - DNA, 27 bp, Artificial sequence
  SiRNA target sequence
taaagctgatgaatacattggactatc

SEQ ID NO: 18776 - DNA, 27 bp, Artificial sequence
  SiRNA target sequence
aaagctgatgaatacattggactatct

SEQ ID NO: 18777 - DNA, 27 bp, Artificial sequence
  SiRNA target sequence
aagctgatgaatacattggactatctt

SEQ ID NO: 18778 - DNA, 27 bp, Artificial sequence
  SiRNA target sequence
agctgatgaatacattggactatcttt

SEQ ID NO: 18779 - DNA, 27 bp, Artificial sequence
  SiRNA target sequence
gctgatgaatacattggactatctttt

SEQ ID NO: 18780 - DNA, 27 bp, Artificial sequence
  SiRNA target sequence
ctgatgaatacattggactatcttttg

SEQ ID NO: 18781 - DNA, 27 bp, Artificial sequence
  SiRNA target sequence
tgatgaatacattggactatcttttgt

SEQ ID NO: 18782 - DNA, 27 bp, Artificial sequence
  SiRNA target sequence
gatgaatacattggactatcttttgta

SEQ ID NO: 18783 - DNA, 27 bp, Artificial sequence
  SiRNA target sequence
atgaatacattggactatcttttgtag

SEQ ID NO: 18784 - DNA, 27 bp, Artificial sequence
  SiRNA target sequence
tgaatacattggactatcttttgtagg

SEQ ID NO: 18785 - DNA, 27 bp, Artificial sequence
  SiRNA target sequence
gaatacattggactatcttttgtaggg

SEQ ID NO: 18786 - DNA, 27 bp, Artificial sequence
  SiRNA target sequence
aatacattggactatcttttgtaggga

SEQ ID NO: 18787 - DNA, 27 bp, Artificial sequence
  SiRNA target sequence
atacattggactatcttttgtagggag

SEQ ID NO: 18788 - DNA, 27 bp, Artificial sequence
  SiRNA target sequence
tacattggactatcttttgtagggaga

SEQ ID NO: 18789 - DNA, 27 bp, Artificial sequence
  SiRNA target sequence
acattggactatcttttgtagggagat

SEQ ID NO: 18790 - DNA, 27 bp, Artificial sequence
  SiRNA target sequence
cattggactatcttttgtagggagata

SEQ ID NO: 18791 - DNA, 27 bp, Artificial sequence
  SiRNA target sequence
attggactatcttttgtagggagatat

SEQ ID NO: 18792 - DNA, 27 bp, Artificial sequence
  SiRNA target sequence
ttggactatcttttgtagggagatatg

SEQ ID NO: 18793 - DNA, 27 bp, Artificial sequence
  SiRNA target sequence
tggactatcttttgtagggagatatga

SEQ ID NO: 18794 - DNA, 27 bp, Artificial sequence
  SiRNA target sequence
ggactatcttttgtagggagatatgaa

SEQ ID NO: 18795 - DNA, 27 bp, Artificial sequence
  SiRNA target sequence
gactatcttttgtagggagatatgaag

SEQ ID NO: 18796 - DNA, 27 bp, Artificial sequence
  SiRNA target sequence
actatcttttgtagggagatatgaagg

SEQ ID NO: 18797 - DNA, 27 bp, Artificial sequence
  SiRNA target sequence
ctatcttttgtagggagatatgaaggg

SEQ ID NO: 18798 - DNA, 27 bp, Artificial sequence
  SiRNA target sequence
tatcttttgtagggagatatgaaggga

SEQ ID NO: 18799 - DNA, 27 bp, Artificial sequence
  SiRNA target sequence
atcttttgtagggagatatgaagggat

SEQ ID NO: 18800 - DNA, 27 bp, Artificial sequence
  SiRNA target sequence
tcttttgtagggagatatgaagggatt

SEQ ID NO: 18801 - DNA, 27 bp, Artificial sequence
  SiRNA target sequence
cttttgtagggagatatgaagggattg

SEQ ID NO: 18802 - DNA, 27 bp, Artificial sequence
  SiRNA target sequence
ttttgtagggagatatgaagggattgg

SEQ ID NO: 18803 - DNA, 27 bp, Artificial sequence
  SiRNA target sequence
tttgtagggagatatgaagggattggt

SEQ ID NO: 18804 - DNA, 27 bp, Artificial sequence
  SiRNA target sequence
ttgtagggagatatgaagggattggtt

SEQ ID NO: 18805 - DNA, 27 bp, Artificial sequence
  SiRNA target sequence
tgtagggagatatgaagggattggttc

SEQ ID NO: 18806 - DNA, 27 bp, Artificial sequence
  SiRNA target sequence
gtagggagatatgaagggattggttct

SEQ ID NO: 18807 - DNA, 27 bp, Artificial sequence
  SiRNA target sequence
tagggagatatgaagggattggttcta

SEQ ID NO: 18808 - DNA, 27 bp, Artificial sequence
  SiRNA target sequence
agggagatatgaagggattggttctat

SEQ ID NO: 18809 - DNA, 27 bp, Artificial sequence
  SiRNA target sequence
gggagatatgaagggattggttctatt

SEQ ID NO: 18810 - DNA, 27 bp, Artificial sequence
  SiRNA target sequence
ggagatatgaagggattggttctattt

SEQ ID NO: 18811 - DNA, 27 bp, Artificial sequence
  SiRNA target sequence
gagatatgaagggattggttctatttc

SEQ ID NO: 18812 - DNA, 27 bp, Artificial sequence
  SiRNA target sequence
agatatgaagggattggttctatttct

SEQ ID NO: 18813 - DNA, 27 bp, Artificial sequence
  SiRNA target sequence
gatatgaagggattggttctatttcta

SEQ ID NO: 18814 - DNA, 27 bp, Artificial sequence
  SiRNA target sequence
atatgaagggattggttctatttctac

SEQ ID NO: 18815 - DNA, 27 bp, Artificial sequence
  SiRNA target sequence
tatgaagggattggttctatttctact

SEQ ID NO: 18816 - DNA, 27 bp, Artificial sequence
  SiRNA target sequence
atgaagggattggttctatttctacta

SEQ ID NO: 18817 - DNA, 27 bp, Artificial sequence
  SiRNA target sequence
tgaagggattggttctatttctactat

SEQ ID NO: 18818 - DNA, 27 bp, Artificial sequence
  SiRNA target sequence
gaagggattggttctatttctactata

SEQ ID NO: 18819 - DNA, 27 bp, Artificial sequence
  SiRNA target sequence
aagggattggttctatttctactatat

SEQ ID NO: 18820 - DNA, 27 bp, Artificial sequence
  SiRNA target sequence
agggattggttctatttctactatatc

SEQ ID NO: 18821 - DNA, 27 bp, Artificial sequence
  SiRNA target sequence
gggattggttctatttctactatatca

SEQ ID NO: 18822 - DNA, 27 bp, Artificial sequence
  SiRNA target sequence
ggattggttctatttctactatatcac

SEQ ID NO: 18823 - DNA, 27 bp, Artificial sequence
  SiRNA target sequence
gattggttctatttctactatatcact

SEQ ID NO: 18824 - DNA, 27 bp, Artificial sequence
  SiRNA target sequence
attggttctatttctactatatcactt

SEQ ID NO: 18825 - DNA, 27 bp, Artificial sequence
  SiRNA target sequence
ttggttctatttctactatatcacttc

SEQ ID NO: 18826 - DNA, 27 bp, Artificial sequence
  SiRNA target sequence
tggttctatttctactatatcacttca

SEQ ID NO: 18827 - DNA, 27 bp, Artificial sequence
  SiRNA target sequence
ggttctatttctactatatcacttcag

SEQ ID NO: 18828 - DNA, 27 bp, Artificial sequence
  SiRNA target sequence
gttctatttctactatatcacttcagc

SEQ ID NO: 18829 - DNA, 27 bp, Artificial sequence
  SiRNA target sequence
ttctatttctactatatcacttcagca

SEQ ID NO: 18830 - DNA, 27 bp, Artificial sequence
  SiRNA target sequence
tctatttctactatatcacttcagcag

SEQ ID NO: 18831 - DNA, 27 bp, Artificial sequence
  SiRNA target sequence
ctatttctactatatcacttcagcagt

SEQ ID NO: 18832 - DNA, 27 bp, Artificial sequence
  SiRNA target sequence
tatttctactatatcacttcagcagtt

SEQ ID NO: 18833 - DNA, 27 bp, Artificial sequence
  SiRNA target sequence
atttctactatatcacttcagcagttt

SEQ ID NO: 18834 - DNA, 27 bp, Artificial sequence
  SiRNA target sequence
tttctactatatcacttcagcagttta

SEQ ID NO: 18835 - DNA, 27 bp, Artificial sequence
  SiRNA target sequence
ttctactatatcacttcagcagtttaa

SEQ ID NO: 18836 - DNA, 27 bp, Artificial sequence
  SiRNA target sequence
tctactatatcacttcagcagtttaat

SEQ ID NO: 18837 - DNA, 27 bp, Artificial sequence
  SiRNA target sequence
ctactatatcacttcagcagtttaata

SEQ ID NO: 18838 - DNA, 27 bp, Artificial sequence
  SiRNA target sequence
tactatatcacttcagcagtttaatac

SEQ ID NO: 18839 - DNA, 27 bp, Artificial sequence
  SiRNA target sequence
actatatcacttcagcagtttaataca

SEQ ID NO: 18840 - DNA, 27 bp, Artificial sequence
  SiRNA target sequence
ctatatcacttcagcagtttaatacac

SEQ ID NO: 18841 - DNA, 27 bp, Artificial sequence
  SiRNA target sequence
tatatcacttcagcagtttaatacact

SEQ ID NO: 18842 - DNA, 27 bp, Artificial sequence
  SiRNA target sequence
atatcacttcagcagtttaatacactg

SEQ ID NO: 18843 - DNA, 27 bp, Artificial sequence
  SiRNA target sequence
tatcacttcagcagtttaatacactgt

SEQ ID NO: 18844 - DNA, 27 bp, Artificial sequence
  SiRNA target sequence
atcacttcagcagtttaatacactgtc

SEQ ID NO: 18845 - DNA, 27 bp, Artificial sequence
  SiRNA target sequence
tcacttcagcagtttaatacactgtct

SEQ ID NO: 18846 - DNA, 27 bp, Artificial sequence
  SiRNA target sequence
cacttcagcagtttaatacactgtcta

SEQ ID NO: 18847 - DNA, 27 bp, Artificial sequence
  SiRNA target sequence
acttcagcagtttaatacactgtctat

SEQ ID NO: 18848 - DNA, 27 bp, Artificial sequence
  SiRNA target sequence
cttcagcagtttaatacactgtctata

SEQ ID NO: 18849 - DNA, 27 bp, Artificial sequence
  SiRNA target sequence
ttcagcagtttaatacactgtctatag

SEQ ID NO: 18850 - DNA, 27 bp, Artificial sequence
  SiRNA target sequence
tcagcagtttaatacactgtctataga

SEQ ID NO: 18851 - DNA, 27 bp, Artificial sequence
  SiRNA target sequence
cagcagtttaatacactgtctatagat

SEQ ID NO: 18852 - DNA, 27 bp, Artificial sequence
  SiRNA target sequence
agcagtttaatacactgtctatagatt

SEQ ID NO: 18853 - DNA, 27 bp, Artificial sequence
  SiRNA target sequence
gcagtttaatacactgtctatagatta

SEQ ID NO: 18854 - DNA, 27 bp, Artificial sequence
  SiRNA target sequence
cagtttaatacactgtctatagattat

SEQ ID NO: 18855 - DNA, 27 bp, Artificial sequence
  SiRNA target sequence
agtttaatacactgtctatagattatt

SEQ ID NO: 18856 - DNA, 27 bp, Artificial sequence
  SiRNA target sequence
gtttaatacactgtctatagattatta

SEQ ID NO: 18857 - DNA, 27 bp, Artificial sequence
  SiRNA target sequence
tttaatacactgtctatagattattac

SEQ ID NO: 18858 - DNA, 27 bp, Artificial sequence
  SiRNA target sequence
ttaatacactgtctatagattattaca

SEQ ID NO: 18859 - DNA, 27 bp, Artificial sequence
  SiRNA target sequence
taatacactgtctatagattattacaa

SEQ ID NO: 18860 - DNA, 27 bp, Artificial sequence
  SiRNA target sequence
aatacactgtctatagattattacaag

SEQ ID NO: 18861 - DNA, 27 bp, Artificial sequence
  SiRNA target sequence
atacactgtctatagattattacaaga

SEQ ID NO: 18862 - DNA, 27 bp, Artificial sequence
  SiRNA target sequence
tacactgtctatagattattacaagac

SEQ ID NO: 18863 - DNA, 27 bp, Artificial sequence
  SiRNA target sequence
acactgtctatagattattacaagaca

SEQ ID NO: 18864 - DNA, 27 bp, Artificial sequence
  SiRNA target sequence
cactgtctatagattattacaagacat

SEQ ID NO: 18865 - DNA, 27 bp, Artificial sequence
  SiRNA target sequence
actgtctatagattattacaagacatt

SEQ ID NO: 18866 - DNA, 27 bp, Artificial sequence
  SiRNA target sequence
ctgtctatagattattacaagacattg

SEQ ID NO: 18867 - DNA, 27 bp, Artificial sequence
  SiRNA target sequence
tgtctatagattattacaagacattgt

SEQ ID NO: 18868 - DNA, 27 bp, Artificial sequence
  SiRNA target sequence
gtctatagattattacaagacattgtc

SEQ ID NO: 18869 - DNA, 27 bp, Artificial sequence
  SiRNA target sequence
tctatagattattacaagacattgtct

SEQ ID NO: 18870 - DNA, 27 bp, Artificial sequence
  SiRNA target sequence
ctatagattattacaagacattgtctt

SEQ ID NO: 18871 - DNA, 27 bp, Artificial sequence
  SiRNA target sequence
tatagattattacaagacattgtcttc

SEQ ID NO: 18872 - DNA, 27 bp, Artificial sequence
  SiRNA target sequence
atagattattacaagacattgtcttct

SEQ ID NO: 18873 - DNA, 27 bp, Artificial sequence
  SiRNA target sequence
tagattattacaagacattgtcttcta

SEQ ID NO: 18874 - DNA, 27 bp, Artificial sequence
  SiRNA target sequence
agattattacaagacattgtcttctat

SEQ ID NO: 18875 - DNA, 27 bp, Artificial sequence
  SiRNA target sequence
gattattacaagacattgtcttctatt

SEQ ID NO: 18876 - DNA, 27 bp, Artificial sequence
  SiRNA target sequence
attattacaagacattgtcttctattt

SEQ ID NO: 18877 - DNA, 27 bp, Artificial sequence
  SiRNA target sequence
ttattacaagacattgtcttctatttg

SEQ ID NO: 18878 - DNA, 27 bp, Artificial sequence
  SiRNA target sequence
tattacaagacattgtcttctatttgt

SEQ ID NO: 18879 - DNA, 27 bp, Artificial sequence
  SiRNA target sequence
attacaagacattgtcttctatttgtg

SEQ ID NO: 18880 - DNA, 27 bp, Artificial sequence
  SiRNA target sequence
ttacaagacattgtcttctatttgtga

SEQ ID NO: 18881 - DNA, 27 bp, Artificial sequence
  SiRNA target sequence
tacaagacattgtcttctatttgtgac

SEQ ID NO: 18882 - DNA, 27 bp, Artificial sequence
  SiRNA target sequence
acaagacattgtcttctatttgtgacg

SEQ ID NO: 18883 - DNA, 27 bp, Artificial sequence
  SiRNA target sequence
caagacattgtcttctatttgtgacgt

SEQ ID NO: 18884 - DNA, 27 bp, Artificial sequence
  SiRNA target sequence
aagacattgtcttctatttgtgacgta

SEQ ID NO: 18885 - DNA, 27 bp, Artificial sequence
  SiRNA target sequence
agacattgtcttctatttgtgacgtag

SEQ ID NO: 18886 - DNA, 27 bp, Artificial sequence
  SiRNA target sequence
gacattgtcttctatttgtgacgtagg

SEQ ID NO: 18887 - DNA, 27 bp, Artificial sequence
  SiRNA target sequence
acattgtcttctatttgtgacgtaggt

SEQ ID NO: 18888 - DNA, 27 bp, Artificial sequence
  SiRNA target sequence
cattgtcttctatttgtgacgtaggta

SEQ ID NO: 18889 - DNA, 27 bp, Artificial sequence
  SiRNA target sequence
attgtcttctatttgtgacgtaggtat

SEQ ID NO: 18890 - DNA, 27 bp, Artificial sequence
  SiRNA target sequence
ttgtcttctatttgtgacgtaggtatt

SEQ ID NO: 18891 - DNA, 27 bp, Artificial sequence
  SiRNA target sequence
tgtcttctatttgtgacgtaggtatta

SEQ ID NO: 18892 - DNA, 27 bp, Artificial sequence
  SiRNA target sequence
gtcttctatttgtgacgtaggtattaa

SEQ ID NO: 18893 - DNA, 27 bp, Artificial sequence
  SiRNA target sequence
tcttctatttgtgacgtaggtattaaa

SEQ ID NO: 18894 - DNA, 27 bp, Artificial sequence
  SiRNA target sequence
cttctatttgtgacgtaggtattaaaa

SEQ ID NO: 18895 - DNA, 27 bp, Artificial sequence
  SiRNA target sequence
ttctatttgtgacgtaggtattaaaat

SEQ ID NO: 18896 - DNA, 27 bp, Artificial sequence
  SiRNA target sequence
tctatttgtgacgtaggtattaaaata

SEQ ID NO: 18897 - DNA, 27 bp, Artificial sequence
  SiRNA target sequence
ctatttgtgacgtaggtattaaaatat

SEQ ID NO: 18898 - DNA, 27 bp, Artificial sequence
  SiRNA target sequence
tatttgtgacgtaggtattaaaatatc

SEQ ID NO: 18899 - DNA, 27 bp, Artificial sequence
  SiRNA target sequence
atttgtgacgtaggtattaaaatatca

SEQ ID NO: 18900 - DNA, 27 bp, Artificial sequence
  SiRNA target sequence
tttgtgacgtaggtattaaaatatcaa

SEQ ID NO: 18901 - DNA, 27 bp, Artificial sequence
  SiRNA target sequence
ttgtgacgtaggtattaaaatatcaac

SEQ ID NO: 18902 - DNA, 27 bp, Artificial sequence
  SiRNA target sequence
tgtgacgtaggtattaaaatatcaact

SEQ ID NO: 18903 - DNA, 27 bp, Artificial sequence
  SiRNA target sequence
gtgacgtaggtattaaaatatcaactg

SEQ ID NO: 18904 - DNA, 27 bp, Artificial sequence
  SiRNA target sequence
tgacgtaggtattaaaatatcaactga

SEQ ID NO: 18905 - DNA, 27 bp, Artificial sequence
  SiRNA target sequence
gacgtaggtattaaaatatcaactgat

SEQ ID NO: 18906 - DNA, 27 bp, Artificial sequence
  SiRNA target sequence
acgtaggtattaaaatatcaactgata

SEQ ID NO: 18907 - DNA, 27 bp, Artificial sequence
  SiRNA target sequence
cgtaggtattaaaatatcaactgatag

SEQ ID NO: 18908 - DNA, 27 bp, Artificial sequence
  SiRNA target sequence
gtaggtattaaaatatcaactgatagg

SEQ ID NO: 18909 - DNA, 27 bp, Artificial sequence
  SiRNA target sequence
taggtattaaaatatcaactgataggg

SEQ ID NO: 18910 - DNA, 27 bp, Artificial sequence
  SiRNA target sequence
aggtattaaaatatcaactgataggga

SEQ ID NO: 18911 - DNA, 27 bp, Artificial sequence
  SiRNA target sequence
ggtattaaaatatcaactgatagggaa

SEQ ID NO: 18912 - DNA, 27 bp, Artificial sequence
  SiRNA target sequence
gtattaaaatatcaactgatagggaaa

SEQ ID NO: 18913 - DNA, 27 bp, Artificial sequence
  SiRNA target sequence
tattaaaatatcaactgatagggaaaa

SEQ ID NO: 18914 - DNA, 27 bp, Artificial sequence
  SiRNA target sequence
attaaaatatcaactgatagggaaaaa

SEQ ID NO: 18915 - DNA, 27 bp, Artificial sequence
  SiRNA target sequence
ttaaaatatcaactgatagggaaaaat

SEQ ID NO: 18916 - DNA, 27 bp, Artificial sequence
  SiRNA target sequence
taaaatatcaactgatagggaaaaatc

SEQ ID NO: 18917 - DNA, 27 bp, Artificial sequence
  SiRNA target sequence
aaaatatcaactgatagggaaaaatca

SEQ ID NO: 18918 - DNA, 27 bp, Artificial sequence
  SiRNA target sequence
aaatatcaactgatagggaaaaatcag

SEQ ID NO: 18919 - DNA, 27 bp, Artificial sequence
  SiRNA target sequence
aatatcaactgatagggaaaaatcagt

SEQ ID NO: 18920 - DNA, 27 bp, Artificial sequence
  SiRNA target sequence
atatcaactgatagggaaaaatcagtt

SEQ ID NO: 18921 - DNA, 27 bp, Artificial sequence
  SiRNA target sequence
tatcaactgatagggaaaaatcagtta

SEQ ID NO: 18922 - DNA, 27 bp, Artificial sequence
  SiRNA target sequence
atcaactgatagggaaaaatcagttaa

SEQ ID NO: 18923 - DNA, 27 bp, Artificial sequence
  SiRNA target sequence
tcaactgatagggaaaaatcagttaat

SEQ ID NO: 18924 - DNA, 27 bp, Artificial sequence
  SiRNA target sequence
caactgatagggaaaaatcagttaatt

SEQ ID NO: 18925 - DNA, 27 bp, Artificial sequence
  SiRNA target sequence
aactgatagggaaaaatcagttaatta

SEQ ID NO: 18926 - DNA, 27 bp, Artificial sequence
  SiRNA target sequence
actgatagggaaaaatcagttaattat

SEQ ID NO: 18927 - DNA, 27 bp, Artificial sequence
  SiRNA target sequence
ctgatagggaaaaatcagttaattatg

SEQ ID NO: 18928 - DNA, 27 bp, Artificial sequence
  SiRNA target sequence
tgatagggaaaaatcagttaattatgg

SEQ ID NO: 18929 - DNA, 27 bp, Artificial sequence
  SiRNA target sequence
gatagggaaaaatcagttaattatgga

SEQ ID NO: 18930 - DNA, 27 bp, Artificial sequence
  SiRNA target sequence
atagggaaaaatcagttaattatggat

SEQ ID NO: 18931 - DNA, 27 bp, Artificial sequence
  SiRNA target sequence
tagggaaaaatcagttaattatggatt

SEQ ID NO: 18932 - DNA, 27 bp, Artificial sequence
  SiRNA target sequence
agggaaaaatcagttaattatggatta

SEQ ID NO: 18933 - DNA, 27 bp, Artificial sequence
  SiRNA target sequence
gggaaaaatcagttaattatggattag

SEQ ID NO: 18934 - DNA, 27 bp, Artificial sequence
  SiRNA target sequence
ggaaaaatcagttaattatggattagg

SEQ ID NO: 18935 - DNA, 27 bp, Artificial sequence
  SiRNA target sequence
gaaaaatcagttaattatggattagga

SEQ ID NO: 18936 - DNA, 27 bp, Artificial sequence
  SiRNA target sequence
aaaaatcagttaattatggattaggag

SEQ ID NO: 18937 - DNA, 27 bp, Artificial sequence
  SiRNA target sequence
aaaatcagttaattatggattaggagt

SEQ ID NO: 18938 - DNA, 27 bp, Artificial sequence
  SiRNA target sequence
aaatcagttaattatggattaggagtt

SEQ ID NO: 18939 - DNA, 27 bp, Artificial sequence
  SiRNA target sequence
aatcagttaattatggattaggagtta

SEQ ID NO: 18940 - DNA, 27 bp, Artificial sequence
  SiRNA target sequence
atcagttaattatggattaggagttaa

SEQ ID NO: 18941 - DNA, 27 bp, Artificial sequence
  SiRNA target sequence
tcagttaattatggattaggagttaaa

SEQ ID NO: 18942 - DNA, 27 bp, Artificial sequence
  SiRNA target sequence
cagttaattatggattaggagttaaac

SEQ ID NO: 18943 - DNA, 27 bp, Artificial sequence
  SiRNA target sequence
agttaattatggattaggagttaaact

SEQ ID NO: 18944 - DNA, 27 bp, Artificial sequence
  SiRNA target sequence
gttaattatggattaggagttaaacta

SEQ ID NO: 18945 - DNA, 27 bp, Artificial sequence
  SiRNA target sequence
ttaattatggattaggagttaaactac

SEQ ID NO: 18946 - DNA, 27 bp, Artificial sequence
  SiRNA target sequence
taattatggattaggagttaaactaca

SEQ ID NO: 18947 - DNA, 27 bp, Artificial sequence
  SiRNA target sequence
aattatggattaggagttaaactacac

SEQ ID NO: 18948 - DNA, 27 bp, Artificial sequence
  SiRNA target sequence
attatggattaggagttaaactacaca

SEQ ID NO: 18949 - DNA, 27 bp, Artificial sequence
  SiRNA target sequence
ttatggattaggagttaaactacacag

SEQ ID NO: 18950 - DNA, 27 bp, Artificial sequence
  SiRNA target sequence
tatggattaggagttaaactacacagt

SEQ ID NO: 18951 - DNA, 27 bp, Artificial sequence
  SiRNA target sequence
atggattaggagttaaactacacagta

SEQ ID NO: 18952 - DNA, 27 bp, Artificial sequence
  SiRNA target sequence
tggattaggagttaaactacacagtaa

SEQ ID NO: 18953 - DNA, 27 bp, Artificial sequence
  SiRNA target sequence
ggattaggagttaaactacacagtaaa

SEQ ID NO: 18954 - DNA, 27 bp, Artificial sequence
  SiRNA target sequence
gattaggagttaaactacacagtaaaa

SEQ ID NO: 18955 - DNA, 27 bp, Artificial sequence
  SiRNA target sequence
attaggagttaaactacacagtaaaaa

SEQ ID NO: 18956 - DNA, 27 bp, Artificial sequence
  SiRNA target sequence
ttaggagttaaactacacagtaaaaaa

SEQ ID NO: 18957 - DNA, 27 bp, Artificial sequence
  SiRNA target sequence
taggagttaaactacacagtaaaaaag

SEQ ID NO: 18958 - DNA, 27 bp, Artificial sequence
  SiRNA target sequence
aggagttaaactacacagtaaaaaagg

SEQ ID NO: 18959 - DNA, 27 bp, Artificial sequence
  SiRNA target sequence
ggagttaaactacacagtaaaaaagga

SEQ ID NO: 18960 - DNA, 27 bp, Artificial sequence
  SiRNA target sequence
gagttaaactacacagtaaaaaaggag

SEQ ID NO: 18961 - DNA, 27 bp, Artificial sequence
  SiRNA target sequence
agttaaactacacagtaaaaaaggaga

SEQ ID NO: 18962 - DNA, 27 bp, Artificial sequence
  SiRNA target sequence
gttaaactacacagtaaaaaaggagaa

SEQ ID NO: 18963 - DNA, 27 bp, Artificial sequence
  SiRNA target sequence
ttaaactacacagtaaaaaaggagaaa

SEQ ID NO: 18964 - DNA, 27 bp, Artificial sequence
  SiRNA target sequence
taaactacacagtaaaaaaggagaaat

SEQ ID NO: 18965 - DNA, 27 bp, Artificial sequence
  SiRNA target sequence
aaactacacagtaaaaaaggagaaatt

SEQ ID NO: 18966 - DNA, 27 bp, Artificial sequence
  SiRNA target sequence
aactacacagtaaaaaaggagaaatta

SEQ ID NO: 18967 - DNA, 27 bp, Artificial sequence
  SiRNA target sequence
actacacagtaaaaaaggagaaattat

SEQ ID NO: 18968 - DNA, 27 bp, Artificial sequence
  SiRNA target sequence
ctacacagtaaaaaaggagaaattatc

SEQ ID NO: 18969 - DNA, 27 bp, Artificial sequence
  SiRNA target sequence
tacacagtaaaaaaggagaaattatcg

SEQ ID NO: 18970 - DNA, 27 bp, Artificial sequence
  SiRNA target sequence
acacagtaaaaaaggagaaattatcgg

SEQ ID NO: 18971 - DNA, 27 bp, Artificial sequence
  SiRNA target sequence
cacagtaaaaaaggagaaattatcgga

SEQ ID NO: 18972 - DNA, 27 bp, Artificial sequence
  SiRNA target sequence
acagtaaaaaaggagaaattatcggat

SEQ ID NO: 18973 - DNA, 27 bp, Artificial sequence
  SiRNA target sequence
cagtaaaaaaggagaaattatcggatg

SEQ ID NO: 18974 - DNA, 27 bp, Artificial sequence
  SiRNA target sequence
agtaaaaaaggagaaattatcggatgt

SEQ ID NO: 18975 - DNA, 27 bp, Artificial sequence
  SiRNA target sequence
gtaaaaaaggagaaattatcggatgtg

SEQ ID NO: 18976 - DNA, 27 bp, Artificial sequence
  SiRNA target sequence
taaaaaaggagaaattatcggatgtgt

SEQ ID NO: 18977 - DNA, 27 bp, Artificial sequence
  SiRNA target sequence
aaaaaaggagaaattatcggatgtgta

SEQ ID NO: 18978 - DNA, 27 bp, Artificial sequence
  SiRNA target sequence
aaaaaggagaaattatcggatgtgtag

SEQ ID NO: 18979 - DNA, 27 bp, Artificial sequence
  SiRNA target sequence
aaaaggagaaattatcggatgtgtaga

SEQ ID NO: 18980 - DNA, 27 bp, Artificial sequence
  SiRNA target sequence
aaaggagaaattatcggatgtgtagat

SEQ ID NO: 18981 - DNA, 27 bp, Artificial sequence
  SiRNA target sequence
aaggagaaattatcggatgtgtagata

SEQ ID NO: 18982 - DNA, 27 bp, Artificial sequence
  SiRNA target sequence
aggagaaattatcggatgtgtagataa

SEQ ID NO: 18983 - DNA, 27 bp, Artificial sequence
  SiRNA target sequence
ggagaaattatcggatgtgtagataac

SEQ ID NO: 18984 - DNA, 27 bp, Artificial sequence
  SiRNA target sequence
gagaaattatcggatgtgtagataaca

SEQ ID NO: 18985 - DNA, 27 bp, Artificial sequence
  SiRNA target sequence
agaaattatcggatgtgtagataacaa

SEQ ID NO: 18986 - DNA, 27 bp, Artificial sequence
  SiRNA target sequence
gaaattatcggatgtgtagataacaat

SEQ ID NO: 18987 - DNA, 27 bp, Artificial sequence
  SiRNA target sequence
aaattatcggatgtgtagataacaatc

SEQ ID NO: 18988 - DNA, 27 bp, Artificial sequence
  SiRNA target sequence
aattatcggatgtgtagataacaatca

SEQ ID NO: 18989 - DNA, 27 bp, Artificial sequence
  SiRNA target sequence
attatcggatgtgtagataacaatcat

SEQ ID NO: 18990 - DNA, 27 bp, Artificial sequence
  SiRNA target sequence
ttatcggatgtgtagataacaatcata

SEQ ID NO: 18991 - DNA, 27 bp, Artificial sequence
  SiRNA target sequence
tatcggatgtgtagataacaatcatat

SEQ ID NO: 18992 - DNA, 27 bp, Artificial sequence
  SiRNA target sequence
atcggatgtgtagataacaatcatatt

SEQ ID NO: 18993 - DNA, 27 bp, Artificial sequence
  SiRNA target sequence
tcggatgtgtagataacaatcatattt

SEQ ID NO: 18994 - DNA, 27 bp, Artificial sequence
  SiRNA target sequence
cggatgtgtagataacaatcatatttt

SEQ ID NO: 18995 - DNA, 27 bp, Artificial sequence
  SiRNA target sequence
ggatgtgtagataacaatcatatttta

SEQ ID NO: 18996 - DNA, 27 bp, Artificial sequence
  SiRNA target sequence
gatgtgtagataacaatcatattttaa

SEQ ID NO: 18997 - DNA, 27 bp, Artificial sequence
  SiRNA target sequence
atgtgtagataacaatcatattttaag

SEQ ID NO: 18998 - DNA, 27 bp, Artificial sequence
  SiRNA target sequence
tgtgtagataacaatcatattttaagc

SEQ ID NO: 18999 - DNA, 27 bp, Artificial sequence
  SiRNA target sequence
gtgtagataacaatcatattttaagca

SEQ ID NO: 19000 - DNA, 27 bp, Artificial sequence
  SiRNA target sequence
tgtagataacaatcatattttaagcat

SEQ ID NO: 19001 - DNA, 27 bp, Artificial sequence
  SiRNA target sequence
gtagataacaatcatattttaagcata

SEQ ID NO: 19002 - DNA, 27 bp, Artificial sequence
  SiRNA target sequence
tagataacaatcatattttaagcataa

SEQ ID NO: 19003 - DNA, 27 bp, Artificial sequence
  SiRNA target sequence
agataacaatcatattttaagcataat

SEQ ID NO: 19004 - DNA, 27 bp, Artificial sequence
  SiRNA target sequence
gataacaatcatattttaagcataatt

SEQ ID NO: 19005 - DNA, 27 bp, Artificial sequence
  SiRNA target sequence
ataacaatcatattttaagcataattt

SEQ ID NO: 19006 - DNA, 27 bp, Artificial sequence
  SiRNA target sequence
taacaatcatattttaagcataattta

SEQ ID NO: 19007 - DNA, 27 bp, Artificial sequence
  SiRNA target sequence
aacaatcatattttaagcataatttat

SEQ ID NO: 19008 - DNA, 27 bp, Artificial sequence
  SiRNA target sequence
acaatcatattttaagcataatttata

SEQ ID NO: 19009 - DNA, 27 bp, Artificial sequence
  SiRNA target sequence
caatcatattttaagcataatttataa

SEQ ID NO: 19010 - DNA, 27 bp, Artificial sequence
  SiRNA target sequence
aatcatattttaagcataatttataat

SEQ ID NO: 19011 - DNA, 27 bp, Artificial sequence
  SiRNA target sequence
atcatattttaagcataatttataatg

SEQ ID NO: 19012 - DNA, 27 bp, Artificial sequence
  SiRNA target sequence
tcatattttaagcataatttataatga

SEQ ID NO: 19013 - DNA, 27 bp, Artificial sequence
  SiRNA target sequence
catattttaagcataatttataatgat

SEQ ID NO: 19014 - DNA, 27 bp, Artificial sequence
  SiRNA target sequence
atattttaagcataatttataatgata

SEQ ID NO: 19015 - DNA, 27 bp, Artificial sequence
  SiRNA target sequence
tattttaagcataatttataatgataa

SEQ ID NO: 19016 - DNA, 27 bp, Artificial sequence
  SiRNA target sequence
attttaagcataatttataatgataaa

SEQ ID NO: 19017 - DNA, 27 bp, Artificial sequence
  SiRNA target sequence
ttttaagcataatttataatgataaat

SEQ ID NO: 19018 - DNA, 27 bp, Artificial sequence
  SiRNA target sequence
tttaagcataatttataatgataaatt

SEQ ID NO: 19019 - DNA, 27 bp, Artificial sequence
  SiRNA target sequence
ttaagcataatttataatgataaatta

SEQ ID NO: 19020 - DNA, 27 bp, Artificial sequence
  SiRNA target sequence
taagcataatttataatgataaattat

SEQ ID NO: 19021 - DNA, 27 bp, Artificial sequence
  SiRNA target sequence
aagcataatttataatgataaattatc

SEQ ID NO: 19022 - DNA, 27 bp, Artificial sequence
  SiRNA target sequence
agcataatttataatgataaattatct

SEQ ID NO: 19023 - DNA, 27 bp, Artificial sequence
  SiRNA target sequence
gcataatttataatgataaattatctg

SEQ ID NO: 19024 - DNA, 27 bp, Artificial sequence
  SiRNA target sequence
cataatttataatgataaattatctga

SEQ ID NO: 19025 - DNA, 27 bp, Artificial sequence
  SiRNA target sequence
ataatttataatgataaattatctgaa

SEQ ID NO: 19026 - DNA, 27 bp, Artificial sequence
  SiRNA target sequence
taatttataatgataaattatctgaag

SEQ ID NO: 19027 - DNA, 27 bp, Artificial sequence
  SiRNA target sequence
aatttataatgataaattatctgaagg

SEQ ID NO: 19028 - DNA, 27 bp, Artificial sequence
  SiRNA target sequence
atttataatgataaattatctgaaggg

SEQ ID NO: 19029 - DNA, 27 bp, Artificial sequence
  SiRNA target sequence
tttataatgataaattatctgaagggt

SEQ ID NO: 19030 - DNA, 27 bp, Artificial sequence
  SiRNA target sequence
ttataatgataaattatctgaagggtt

SEQ ID NO: 19031 - DNA, 27 bp, Artificial sequence
  SiRNA target sequence
tataatgataaattatctgaagggtta

SEQ ID NO: 19032 - DNA, 27 bp, Artificial sequence
  SiRNA target sequence
ataatgataaattatctgaagggttaa

SEQ ID NO: 19033 - DNA, 27 bp, Artificial sequence
  SiRNA target sequence
taatgataaattatctgaagggttaac

SEQ ID NO: 19034 - DNA, 27 bp, Artificial sequence
  SiRNA target sequence
aatgataaattatctgaagggttaaca

SEQ ID NO: 19035 - DNA, 27 bp, Artificial sequence
  SiRNA target sequence
atgataaattatctgaagggttaacac

SEQ ID NO: 19036 - DNA, 27 bp, Artificial sequence
  SiRNA target sequence
tgataaattatctgaagggttaacact

SEQ ID NO: 19037 - DNA, 27 bp, Artificial sequence
  SiRNA target sequence
gataaattatctgaagggttaacactt

SEQ ID NO: 19038 - DNA, 27 bp, Artificial sequence
  SiRNA target sequence
ataaattatctgaagggttaacactta

SEQ ID NO: 19039 - DNA, 27 bp, Artificial sequence
  SiRNA target sequence
taaattatctgaagggttaacacttaa

SEQ ID NO: 19040 - DNA, 27 bp, Artificial sequence
  SiRNA target sequence
aaattatctgaagggttaacacttaat

SEQ ID NO: 19041 - DNA, 27 bp, Artificial sequence
  SiRNA target sequence
aattatctgaagggttaacacttaatt

SEQ ID NO: 19042 - DNA, 27 bp, Artificial sequence
  SiRNA target sequence
attatctgaagggttaacacttaattt

SEQ ID NO: 19043 - DNA, 27 bp, Artificial sequence
  SiRNA target sequence
ttatctgaagggttaacacttaatttg

SEQ ID NO: 19044 - DNA, 27 bp, Artificial sequence
  SiRNA target sequence
tatctgaagggttaacacttaatttga

SEQ ID NO: 19045 - DNA, 27 bp, Artificial sequence
  SiRNA target sequence
atctgaagggttaacacttaatttgag

SEQ ID NO: 19046 - DNA, 27 bp, Artificial sequence
  SiRNA target sequence
tctgaagggttaacacttaatttgagt

SEQ ID NO: 19047 - DNA, 27 bp, Artificial sequence
  SiRNA target sequence
ctgaagggttaacacttaatttgagtt

SEQ ID NO: 19048 - DNA, 27 bp, Artificial sequence
  SiRNA target sequence
tgaagggttaacacttaatttgagttg

SEQ ID NO: 19049 - DNA, 27 bp, Artificial sequence
  SiRNA target sequence
gaagggttaacacttaatttgagttgt

SEQ ID NO: 19050 - DNA, 27 bp, Artificial sequence
  SiRNA target sequence
aagggttaacacttaatttgagttgta

SEQ ID NO: 19051 - DNA, 27 bp, Artificial sequence
  SiRNA target sequence
agggttaacacttaatttgagttgtag

SEQ ID NO: 19052 - DNA, 27 bp, Artificial sequence
  SiRNA target sequence
gggttaacacttaatttgagttgtaga

SEQ ID NO: 19053 - DNA, 27 bp, Artificial sequence
  SiRNA target sequence
ggttaacacttaatttgagttgtagat

SEQ ID NO: 19054 - DNA, 27 bp, Artificial sequence
  SiRNA target sequence
gttaacacttaatttgagttgtagatt

SEQ ID NO: 19055 - DNA, 27 bp, Artificial sequence
  SiRNA target sequence
ttaacacttaatttgagttgtagattt

SEQ ID NO: 19056 - DNA, 27 bp, Artificial sequence
  SiRNA target sequence
taacacttaatttgagttgtagatttg

SEQ ID NO: 19057 - DNA, 27 bp, Artificial sequence
  SiRNA target sequence
aacacttaatttgagttgtagatttgg

SEQ ID NO: 19058 - DNA, 27 bp, Artificial sequence
  SiRNA target sequence
acacttaatttgagttgtagatttggt

SEQ ID NO: 19059 - DNA, 27 bp, Artificial sequence
  SiRNA target sequence
cacttaatttgagttgtagatttggta

SEQ ID NO: 19060 - DNA, 27 bp, Artificial sequence
  SiRNA target sequence
acttaatttgagttgtagatttggtaa

SEQ ID NO: 19061 - DNA, 27 bp, Artificial sequence
  SiRNA target sequence
cttaatttgagttgtagatttggtaag

SEQ ID NO: 19062 - DNA, 27 bp, Artificial sequence
  SiRNA target sequence
ttaatttgagttgtagatttggtaaga

SEQ ID NO: 19063 - DNA, 27 bp, Artificial sequence
  SiRNA target sequence
taatttgagttgtagatttggtaagaa

SEQ ID NO: 19064 - DNA, 27 bp, Artificial sequence
  SiRNA target sequence
aatttgagttgtagatttggtaagaaa

SEQ ID NO: 19065 - DNA, 27 bp, Artificial sequence
  SiRNA target sequence
atttgagttgtagatttggtaagaaag

SEQ ID NO: 19066 - DNA, 27 bp, Artificial sequence
  SiRNA target sequence
tttgagttgtagatttggtaagaaagt

SEQ ID NO: 19067 - DNA, 27 bp, Artificial sequence
  SiRNA target sequence
ttgagttgtagatttggtaagaaagta

SEQ ID NO: 19068 - DNA, 27 bp, Artificial sequence
  SiRNA target sequence
tgagttgtagatttggtaagaaagtat

SEQ ID NO: 19069 - DNA, 27 bp, Artificial sequence
  SiRNA target sequence
gagttgtagatttggtaagaaagtatt

SEQ ID NO: 19070 - DNA, 27 bp, Artificial sequence
  SiRNA target sequence
agttgtagatttggtaagaaagtattt

SEQ ID NO: 19071 - DNA, 27 bp, Artificial sequence
  SiRNA target sequence
gttgtagatttggtaagaaagtatttg

SEQ ID NO: 19072 - DNA, 27 bp, Artificial sequence
  SiRNA target sequence
ttgtagatttggtaagaaagtatttga

SEQ ID NO: 19073 - DNA, 27 bp, Artificial sequence
  SiRNA target sequence
tgtagatttggtaagaaagtatttgat

SEQ ID NO: 19074 - DNA, 27 bp, Artificial sequence
  SiRNA target sequence
gtagatttggtaagaaagtatttgatt

SEQ ID NO: 19075 - DNA, 27 bp, Artificial sequence
  SiRNA target sequence
tagatttggtaagaaagtatttgatta

SEQ ID NO: 19076 - DNA, 27 bp, Artificial sequence
  SiRNA target sequence
agatttggtaagaaagtatttgattat

SEQ ID NO: 19077 - DNA, 27 bp, Artificial sequence
  SiRNA target sequence
gatttggtaagaaagtatttgattatg

SEQ ID NO: 19078 - DNA, 27 bp, Artificial sequence
  SiRNA target sequence
atttggtaagaaagtatttgattatgg

SEQ ID NO: 19079 - DNA, 27 bp, Artificial sequence
  SiRNA target sequence
tttggtaagaaagtatttgattatggc

SEQ ID NO: 19080 - DNA, 27 bp, Artificial sequence
  SiRNA target sequence
ttggtaagaaagtatttgattatggct

SEQ ID NO: 19081 - DNA, 27 bp, Artificial sequence
  SiRNA target sequence
tggtaagaaagtatttgattatggcta

SEQ ID NO: 19082 - DNA, 27 bp, Artificial sequence
  SiRNA target sequence
ggtaagaaagtatttgattatggctat

SEQ ID NO: 19083 - DNA, 27 bp, Artificial sequence
  SiRNA target sequence
gtaagaaagtatttgattatggctatg

SEQ ID NO: 19084 - DNA, 27 bp, Artificial sequence
  SiRNA target sequence
taagaaagtatttgattatggctatgg

SEQ ID NO: 19085 - DNA, 27 bp, Artificial sequence
  SiRNA target sequence
aagaaagtatttgattatggctatggg

SEQ ID NO: 19086 - DNA, 27 bp, Artificial sequence
  SiRNA target sequence
agaaagtatttgattatggctatgggt

SEQ ID NO: 19087 - DNA, 27 bp, Artificial sequence
  SiRNA target sequence
gaaagtatttgattatggctatgggtt

SEQ ID NO: 19088 - DNA, 27 bp, Artificial sequence
  SiRNA target sequence
aaagtatttgattatggctatgggttt

SEQ ID NO: 19089 - DNA, 27 bp, Artificial sequence
  SiRNA target sequence
aagtatttgattatggctatgggttta

SEQ ID NO: 19090 - DNA, 27 bp, Artificial sequence
  SiRNA target sequence
agtatttgattatggctatgggtttat

SEQ ID NO: 19091 - DNA, 27 bp, Artificial sequence
  SiRNA target sequence
gtatttgattatggctatgggtttatt

SEQ ID NO: 19092 - DNA, 27 bp, Artificial sequence
  SiRNA target sequence
tatttgattatggctatgggtttattt

SEQ ID NO: 19093 - DNA, 27 bp, Artificial sequence
  SiRNA target sequence
atttgattatggctatgggtttattta

SEQ ID NO: 19094 - DNA, 27 bp, Artificial sequence
  SiRNA target sequence
tttgattatggctatgggtttatttat

SEQ ID NO: 19095 - DNA, 27 bp, Artificial sequence
  SiRNA target sequence
ttgattatggctatgggtttatttatg

SEQ ID NO: 19096 - DNA, 27 bp, Artificial sequence
  SiRNA target sequence
tgattatggctatgggtttatttatga

SEQ ID NO: 19097 - DNA, 27 bp, Artificial sequence
  SiRNA target sequence
gattatggctatgggtttatttatgaa

SEQ ID NO: 19098 - DNA, 27 bp, Artificial sequence
  SiRNA target sequence
attatggctatgggtttatttatgaat

SEQ ID NO: 19099 - DNA, 27 bp, Artificial sequence
  SiRNA target sequence
ttatggctatgggtttatttatgaatt

SEQ ID NO: 19100 - DNA, 27 bp, Artificial sequence
  SiRNA target sequence
tatggctatgggtttatttatgaattt

SEQ ID NO: 19101 - DNA, 27 bp, Artificial sequence
  SiRNA target sequence
atggctatgggtttatttatgaatttt

SEQ ID NO: 19102 - DNA, 27 bp, Artificial sequence
  SiRNA target sequence
tggctatgggtttatttatgaatttta

SEQ ID NO: 19103 - DNA, 27 bp, Artificial sequence
  SiRNA target sequence
ggctatgggtttatttatgaattttaa

SEQ ID NO: 19104 - DNA, 19 bp, Artificial sequence
  SiRNA target sequence
ttaagaatttttcaatatt

SEQ ID NO: 19105 - DNA, 19 bp, Artificial sequence
  SiRNA target sequence
taagaatttttcaatattt

SEQ ID NO: 19106 - DNA, 19 bp, Artificial sequence
  SiRNA target sequence
aagaatttttcaatatttt

SEQ ID NO: 19107 - DNA, 19 bp, Artificial sequence
  SiRNA target sequence
agaatttttcaatattttt

SEQ ID NO: 19108 - DNA, 19 bp, Artificial sequence
  SiRNA target sequence
gaatttttcaatatttttt

SEQ ID NO: 19109 - DNA, 19 bp, Artificial sequence
  SiRNA target sequence
aatttttcaatattttttt

SEQ ID NO: 19110 - DNA, 19 bp, Artificial sequence
  SiRNA target sequence
atttttcaatatttttttt

SEQ ID NO: 19111 - DNA, 19 bp, Artificial sequence
  SiRNA target sequence
tttttcaatattttttttg

SEQ ID NO: 19112 - DNA, 19 bp, Artificial sequence
  SiRNA target sequence
ttttcaatattttttttgc

SEQ ID NO: 19113 - DNA, 19 bp, Artificial sequence
  SiRNA target sequence
tttcaatattttttttgct

SEQ ID NO: 19114 - DNA, 19 bp, Artificial sequence
  SiRNA target sequence
ttcaatattttttttgctt

SEQ ID NO: 19115 - DNA, 19 bp, Artificial sequence
  SiRNA target sequence
tcaatattttttttgcttg

SEQ ID NO: 19116 - DNA, 19 bp, Artificial sequence
  SiRNA target sequence
caatattttttttgcttgt

SEQ ID NO: 19117 - DNA, 19 bp, Artificial sequence
  SiRNA target sequence
aatattttttttgcttgtt

SEQ ID NO: 19118 - DNA, 19 bp, Artificial sequence
  SiRNA target sequence
atattttttttgcttgttc

SEQ ID NO: 19119 - DNA, 19 bp, Artificial sequence
  SiRNA target sequence
tattttttttgcttgttct

SEQ ID NO: 19120 - DNA, 19 bp, Artificial sequence
  SiRNA target sequence
attttttttgcttgttcta

SEQ ID NO: 19121 - DNA, 19 bp, Artificial sequence
  SiRNA target sequence
ttttttttgcttgttctaa

SEQ ID NO: 19122 - DNA, 19 bp, Artificial sequence
  SiRNA target sequence
tttttttgcttgttctaag

SEQ ID NO: 19123 - DNA, 19 bp, Artificial sequence
  SiRNA target sequence
ttttttgcttgttctaagt

SEQ ID NO: 19124 - DNA, 19 bp, Artificial sequence
  SiRNA target sequence
tttttgcttgttctaagtc

SEQ ID NO: 19125 - DNA, 19 bp, Artificial sequence
  SiRNA target sequence
ttttgcttgttctaagtca

SEQ ID NO: 19126 - DNA, 19 bp, Artificial sequence
  SiRNA target sequence
tttgcttgttctaagtcat

SEQ ID NO: 19127 - DNA, 19 bp, Artificial sequence
  SiRNA target sequence
ttgcttgttctaagtcata

SEQ ID NO: 19128 - DNA, 19 bp, Artificial sequence
  SiRNA target sequence
tgcttgttctaagtcataa

SEQ ID NO: 19129 - DNA, 19 bp, Artificial sequence
  SiRNA target sequence
gcttgttctaagtcataaa

SEQ ID NO: 19130 - DNA, 19 bp, Artificial sequence
  SiRNA target sequence
cttgttctaagtcataaat

SEQ ID NO: 19131 - DNA, 19 bp, Artificial sequence
  SiRNA target sequence
ttgttctaagtcataaatt

SEQ ID NO: 19132 - DNA, 19 bp, Artificial sequence
  SiRNA target sequence
tgttctaagtcataaattt

SEQ ID NO: 19133 - DNA, 19 bp, Artificial sequence
  SiRNA target sequence
gttctaagtcataaatttt

SEQ ID NO: 19134 - DNA, 19 bp, Artificial sequence
  SiRNA target sequence
ttctaagtcataaattttt

SEQ ID NO: 19135 - DNA, 19 bp, Artificial sequence
  SiRNA target sequence
tctaagtcataaatttttt

SEQ ID NO: 19136 - DNA, 19 bp, Artificial sequence
  SiRNA target sequence
ctaagtcataaattttttt

SEQ ID NO: 19137 - DNA, 19 bp, Artificial sequence
  SiRNA target sequence
taagtcataaattttttta

SEQ ID NO: 19138 - DNA, 19 bp, Artificial sequence
  SiRNA target sequence
aagtcataaatttttttag

SEQ ID NO: 19139 - DNA, 19 bp, Artificial sequence
  SiRNA target sequence
agtcataaatttttttagt

SEQ ID NO: 19140 - DNA, 19 bp, Artificial sequence
  SiRNA target sequence
gtcataaatttttttagtc

SEQ ID NO: 19141 - DNA, 19 bp, Artificial sequence
  SiRNA target sequence
tcataaatttttttagtca

SEQ ID NO: 19142 - DNA, 19 bp, Artificial sequence
  SiRNA target sequence
cataaatttttttagtcaa

SEQ ID NO: 19143 - DNA, 19 bp, Artificial sequence
  SiRNA target sequence
ataaatttttttagtcaaa

SEQ ID NO: 19144 - DNA, 19 bp, Artificial sequence
  SiRNA target sequence
taaatttttttagtcaaat

SEQ ID NO: 19145 - DNA, 19 bp, Artificial sequence
  SiRNA target sequence
aaatttttttagtcaaata

SEQ ID NO: 19146 - DNA, 19 bp, Artificial sequence
  SiRNA target sequence
aatttttttagtcaaatat

SEQ ID NO: 19147 - DNA, 19 bp, Artificial sequence
  SiRNA target sequence
atttttttagtcaaatatg

SEQ ID NO: 19148 - DNA, 19 bp, Artificial sequence
  SiRNA target sequence
tttttttagtcaaatatga

SEQ ID NO: 19149 - DNA, 19 bp, Artificial sequence
  SiRNA target sequence
ttttttagtcaaatatgac

SEQ ID NO: 19150 - DNA, 19 bp, Artificial sequence
  SiRNA target sequence
tttttagtcaaatatgact

SEQ ID NO: 19151 - DNA, 19 bp, Artificial sequence
  SiRNA target sequence
ttttagtcaaatatgactt

SEQ ID NO: 19152 - DNA, 19 bp, Artificial sequence
  SiRNA target sequence
tttagtcaaatatgacttt

SEQ ID NO: 19153 - DNA, 19 bp, Artificial sequence
  SiRNA target sequence
ttagtcaaatatgacttta

SEQ ID NO: 19154 - DNA, 19 bp, Artificial sequence
  SiRNA target sequence
tagtcaaatatgactttaa

SEQ ID NO: 19155 - DNA, 19 bp, Artificial sequence
  SiRNA target sequence
agtcaaatatgactttaaa

SEQ ID NO: 19156 - DNA, 19 bp, Artificial sequence
  SiRNA target sequence
gtcaaatatgactttaaaa

SEQ ID NO: 19157 - DNA, 19 bp, Artificial sequence
  SiRNA target sequence
tcaaatatgactttaaaat

SEQ ID NO: 19158 - DNA, 19 bp, Artificial sequence
  SiRNA target sequence
caaatatgactttaaaatc

SEQ ID NO: 19159 - DNA, 19 bp, Artificial sequence
  SiRNA target sequence
aaatatgactttaaaatct

SEQ ID NO: 19160 - DNA, 19 bp, Artificial sequence
  SiRNA target sequence
aatatgactttaaaatctc

SEQ ID NO: 19161 - DNA, 19 bp, Artificial sequence
  SiRNA target sequence
atatgactttaaaatctct

SEQ ID NO: 19162 - DNA, 19 bp, Artificial sequence
  SiRNA target sequence
tatgactttaaaatctctt

SEQ ID NO: 19163 - DNA, 19 bp, Artificial sequence
  SiRNA target sequence
atgactttaaaatctcttt

SEQ ID NO: 19164 - DNA, 19 bp, Artificial sequence
  SiRNA target sequence
tgactttaaaatctctttt

SEQ ID NO: 19165 - DNA, 19 bp, Artificial sequence
  SiRNA target sequence
gactttaaaatctcttttg

SEQ ID NO: 19166 - DNA, 19 bp, Artificial sequence
  SiRNA target sequence
actttaaaatctcttttgt

SEQ ID NO: 19167 - DNA, 19 bp, Artificial sequence
  SiRNA target sequence
ctttaaaatctcttttgtt

SEQ ID NO: 19168 - DNA, 19 bp, Artificial sequence
  SiRNA target sequence
tttaaaatctcttttgttt

SEQ ID NO: 19169 - DNA, 19 bp, Artificial sequence
  SiRNA target sequence
ttaaaatctcttttgtttc

SEQ ID NO: 19170 - DNA, 19 bp, Artificial sequence
  SiRNA target sequence
taaaatctcttttgtttca

SEQ ID NO: 19171 - DNA, 19 bp, Artificial sequence
  SiRNA target sequence
aaaatctcttttgtttcat

SEQ ID NO: 19172 - DNA, 19 bp, Artificial sequence
  SiRNA target sequence
aaatctcttttgtttcatc

SEQ ID NO: 19173 - DNA, 19 bp, Artificial sequence
  SiRNA target sequence
aatctcttttgtttcatct

SEQ ID NO: 19174 - DNA, 19 bp, Artificial sequence
  SiRNA target sequence
atctcttttgtttcatctg

SEQ ID NO: 19175 - DNA, 19 bp, Artificial sequence
  SiRNA target sequence
tctcttttgtttcatctgt

SEQ ID NO: 19176 - DNA, 19 bp, Artificial sequence
  SiRNA target sequence
ctcttttgtttcatctgtt

SEQ ID NO: 19177 - DNA, 19 bp, Artificial sequence
  SiRNA target sequence
tcttttgtttcatctgtta

SEQ ID NO: 19178 - DNA, 19 bp, Artificial sequence
  SiRNA target sequence
cttttgtttcatctgttac

SEQ ID NO: 19179 - DNA, 19 bp, Artificial sequence
  SiRNA target sequence
ttttgtttcatctgttact

SEQ ID NO: 19180 - DNA, 19 bp, Artificial sequence
  SiRNA target sequence
tttgtttcatctgttactt

SEQ ID NO: 19181 - DNA, 19 bp, Artificial sequence
  SiRNA target sequence
ttgtttcatctgttacttg

SEQ ID NO: 19182 - DNA, 19 bp, Artificial sequence
  SiRNA target sequence
tgtttcatctgttacttgt

SEQ ID NO: 19183 - DNA, 19 bp, Artificial sequence
  SiRNA target sequence
gtttcatctgttacttgtt

SEQ ID NO: 19184 - DNA, 19 bp, Artificial sequence
  SiRNA target sequence
tttcatctgttacttgttt

SEQ ID NO: 19185 - DNA, 19 bp, Artificial sequence
  SiRNA target sequence
ttcatctgttacttgtttg

SEQ ID NO: 19186 - DNA, 19 bp, Artificial sequence
  SiRNA target sequence
tcatctgttacttgtttgt

SEQ ID NO: 19187 - DNA, 19 bp, Artificial sequence
  SiRNA target sequence
catctgttacttgtttgta

SEQ ID NO: 19188 - DNA, 19 bp, Artificial sequence
  SiRNA target sequence
atctgttacttgtttgtac

SEQ ID NO: 19189 - DNA, 19 bp, Artificial sequence
  SiRNA target sequence
tctgttacttgtttgtact

SEQ ID NO: 19190 - DNA, 19 bp, Artificial sequence
  SiRNA target sequence
ctgttacttgtttgtactt

SEQ ID NO: 19191 - DNA, 19 bp, Artificial sequence
  SiRNA target sequence
tgttacttgtttgtacttt

SEQ ID NO: 19192 - DNA, 19 bp, Artificial sequence
  SiRNA target sequence
gttacttgtttgtacttta

SEQ ID NO: 19193 - DNA, 19 bp, Artificial sequence
  SiRNA target sequence
ttacttgtttgtactttaa

SEQ ID NO: 19194 - DNA, 19 bp, Artificial sequence
  SiRNA target sequence
tacttgtttgtactttaaa

SEQ ID NO: 19195 - DNA, 19 bp, Artificial sequence
  SiRNA target sequence
acttgtttgtactttaaaa

SEQ ID NO: 19196 - DNA, 19 bp, Artificial sequence
  SiRNA target sequence
cttgtttgtactttaaaaa

SEQ ID NO: 19197 - DNA, 19 bp, Artificial sequence
  SiRNA target sequence
ttgtttgtactttaaaaat

SEQ ID NO: 19198 - DNA, 19 bp, Artificial sequence
  SiRNA target sequence
tgtttgtactttaaaaatt

SEQ ID NO: 19199 - DNA, 19 bp, Artificial sequence
  SiRNA target sequence
gtttgtactttaaaaattg

SEQ ID NO: 19200 - DNA, 19 bp, Artificial sequence
  SiRNA target sequence
tttgtactttaaaaattgt

SEQ ID NO: 19201 - DNA, 19 bp, Artificial sequence
  SiRNA target sequence
ttgtactttaaaaattgtt

SEQ ID NO: 19202 - DNA, 19 bp, Artificial sequence
  SiRNA target sequence
tgtactttaaaaattgttg

SEQ ID NO: 19203 - DNA, 19 bp, Artificial sequence
  SiRNA target sequence
gtactttaaaaattgttga

SEQ ID NO: 19204 - DNA, 19 bp, Artificial sequence
  SiRNA target sequence
tactttaaaaattgttgaa

SEQ ID NO: 19205 - DNA, 19 bp, Artificial sequence
  SiRNA target sequence
actttaaaaattgttgaat

SEQ ID NO: 19206 - DNA, 19 bp, Artificial sequence
  SiRNA target sequence
ctttaaaaattgttgaatt

SEQ ID NO: 19207 - DNA, 19 bp, Artificial sequence
  SiRNA target sequence
tttaaaaattgttgaattt

SEQ ID NO: 19208 - DNA, 19 bp, Artificial sequence
  SiRNA target sequence
ttaaaaattgttgaatttc

SEQ ID NO: 19209 - DNA, 19 bp, Artificial sequence
  SiRNA target sequence
taaaaattgttgaatttca

SEQ ID NO: 19210 - DNA, 19 bp, Artificial sequence
  SiRNA target sequence
aaaaattgttgaatttcaa

SEQ ID NO: 19211 - DNA, 19 bp, Artificial sequence
  SiRNA target sequence
aaaattgttgaatttcaat

SEQ ID NO: 19212 - DNA, 19 bp, Artificial sequence
  SiRNA target sequence
aaattgttgaatttcaatt

SEQ ID NO: 19213 - DNA, 19 bp, Artificial sequence
  SiRNA target sequence
aattgttgaatttcaattt

SEQ ID NO: 19214 - DNA, 19 bp, Artificial sequence
  SiRNA target sequence
attgttgaatttcaatttt

SEQ ID NO: 19215 - DNA, 19 bp, Artificial sequence
  SiRNA target sequence
ttgttgaatttcaatttta

SEQ ID NO: 19216 - DNA, 19 bp, Artificial sequence
  SiRNA target sequence
tgttgaatttcaattttaa

SEQ ID NO: 19217 - DNA, 19 bp, Artificial sequence
  SiRNA target sequence
gttgaatttcaattttaaa

SEQ ID NO: 19218 - DNA, 19 bp, Artificial sequence
  SiRNA target sequence
ttgaatttcaattttaaat

SEQ ID NO: 19219 - DNA, 19 bp, Artificial sequence
  SiRNA target sequence
tgaatttcaattttaaatt

SEQ ID NO: 19220 - DNA, 19 bp, Artificial sequence
  SiRNA target sequence
gaatttcaattttaaattc

SEQ ID NO: 19221 - DNA, 19 bp, Artificial sequence
  SiRNA target sequence
aatttcaattttaaattcg

SEQ ID NO: 19222 - DNA, 19 bp, Artificial sequence
  SiRNA target sequence
atttcaattttaaattcgg

SEQ ID NO: 19223 - DNA, 19 bp, Artificial sequence
  SiRNA target sequence
tttcaattttaaattcggc

SEQ ID NO: 19224 - DNA, 19 bp, Artificial sequence
  SiRNA target sequence
ttcaattttaaattcggca

SEQ ID NO: 19225 - DNA, 19 bp, Artificial sequence
  SiRNA target sequence
tcaattttaaattcggcac

SEQ ID NO: 19226 - DNA, 19 bp, Artificial sequence
  SiRNA target sequence
caattttaaattcggcaca

SEQ ID NO: 19227 - DNA, 19 bp, Artificial sequence
  SiRNA target sequence
aattttaaattcggcacaa

SEQ ID NO: 19228 - DNA, 19 bp, Artificial sequence
  SiRNA target sequence
attttaaattcggcacaat

SEQ ID NO: 19229 - DNA, 19 bp, Artificial sequence
  SiRNA target sequence
ttttaaattcggcacaatt

SEQ ID NO: 19230 - DNA, 19 bp, Artificial sequence
  SiRNA target sequence
tttaaattcggcacaattt

SEQ ID NO: 19231 - DNA, 19 bp, Artificial sequence
  SiRNA target sequence
ttaaattcggcacaatttt

SEQ ID NO: 19232 - DNA, 19 bp, Artificial sequence
  SiRNA target sequence
taaattcggcacaattttt

SEQ ID NO: 19233 - DNA, 19 bp, Artificial sequence
  SiRNA target sequence
aaattcggcacaatttttt

SEQ ID NO: 19234 - DNA, 19 bp, Artificial sequence
  SiRNA target sequence
aattcggcacaattttttt

SEQ ID NO: 19235 - DNA, 19 bp, Artificial sequence
  SiRNA target sequence
attcggcacaatttttttc

SEQ ID NO: 19236 - DNA, 19 bp, Artificial sequence
  SiRNA target sequence
ttcggcacaatttttttca

SEQ ID NO: 19237 - DNA, 19 bp, Artificial sequence
  SiRNA target sequence
tcggcacaatttttttcaa

SEQ ID NO: 19238 - DNA, 19 bp, Artificial sequence
  SiRNA target sequence
cggcacaatttttttcaat

SEQ ID NO: 19239 - DNA, 19 bp, Artificial sequence
  SiRNA target sequence
ggcacaatttttttcaatt

SEQ ID NO: 19240 - DNA, 19 bp, Artificial sequence
  SiRNA target sequence
gcacaatttttttcaattt

SEQ ID NO: 19241 - DNA, 19 bp, Artificial sequence
  SiRNA target sequence
cacaatttttttcaatttc

SEQ ID NO: 19242 - DNA, 19 bp, Artificial sequence
  SiRNA target sequence
acaatttttttcaatttca

SEQ ID NO: 19243 - DNA, 19 bp, Artificial sequence
  SiRNA target sequence
caatttttttcaatttcat

SEQ ID NO: 19244 - DNA, 19 bp, Artificial sequence
  SiRNA target sequence
aatttttttcaatttcatc

SEQ ID NO: 19245 - DNA, 19 bp, Artificial sequence
  SiRNA target sequence
atttttttcaatttcatct

SEQ ID NO: 19246 - DNA, 19 bp, Artificial sequence
  SiRNA target sequence
tttttttcaatttcatctt

SEQ ID NO: 19247 - DNA, 19 bp, Artificial sequence
  SiRNA target sequence
ttttttcaatttcatcttt

SEQ ID NO: 19248 - DNA, 19 bp, Artificial sequence
  SiRNA target sequence
tttttcaatttcatctttt

SEQ ID NO: 19249 - DNA, 19 bp, Artificial sequence
  SiRNA target sequence
ttttcaatttcatcttttt

SEQ ID NO: 19250 - DNA, 19 bp, Artificial sequence
  SiRNA target sequence
tttcaatttcatctttttt

SEQ ID NO: 19251 - DNA, 19 bp, Artificial sequence
  SiRNA target sequence
ttcaatttcatcttttttc

SEQ ID NO: 19252 - DNA, 19 bp, Artificial sequence
  SiRNA target sequence
tcaatttcatcttttttcg

SEQ ID NO: 19253 - DNA, 19 bp, Artificial sequence
  SiRNA target sequence
caatttcatcttttttcga

SEQ ID NO: 19254 - DNA, 19 bp, Artificial sequence
  SiRNA target sequence
aatttcatcttttttcgaa

SEQ ID NO: 19255 - DNA, 19 bp, Artificial sequence
  SiRNA target sequence
atttcatcttttttcgaat

SEQ ID NO: 19256 - DNA, 19 bp, Artificial sequence
  SiRNA target sequence
tttcatcttttttcgaatt

SEQ ID NO: 19257 - DNA, 19 bp, Artificial sequence
  SiRNA target sequence
ttcatcttttttcgaattt

SEQ ID NO: 19258 - DNA, 19 bp, Artificial sequence
  SiRNA target sequence
tcatcttttttcgaatttt

SEQ ID NO: 19259 - DNA, 19 bp, Artificial sequence
  SiRNA target sequence
catcttttttcgaattttc

SEQ ID NO: 19260 - DNA, 19 bp, Artificial sequence
  SiRNA target sequence
atcttttttcgaattttct

SEQ ID NO: 19261 - DNA, 19 bp, Artificial sequence
  SiRNA target sequence
tcttttttcgaattttctt

SEQ ID NO: 19262 - DNA, 19 bp, Artificial sequence
  SiRNA target sequence
cttttttcgaattttcttc

SEQ ID NO: 19263 - DNA, 19 bp, Artificial sequence
  SiRNA target sequence
ttttttcgaattttcttcg

SEQ ID NO: 19264 - DNA, 19 bp, Artificial sequence
  SiRNA target sequence
tttttcgaattttcttcgg

SEQ ID NO: 19265 - DNA, 19 bp, Artificial sequence
  SiRNA target sequence
ttttcgaattttcttcggc

SEQ ID NO: 19266 - DNA, 19 bp, Artificial sequence
  SiRNA target sequence
tttcgaattttcttcggct

SEQ ID NO: 19267 - DNA, 19 bp, Artificial sequence
  SiRNA target sequence
ttcgaattttcttcggctt

SEQ ID NO: 19268 - DNA, 19 bp, Artificial sequence
  SiRNA target sequence
tcgaattttcttcggcttc

SEQ ID NO: 19269 - DNA, 19 bp, Artificial sequence
  SiRNA target sequence
cgaattttcttcggcttct

SEQ ID NO: 19270 - DNA, 19 bp, Artificial sequence
  SiRNA target sequence
gaattttcttcggcttctc

SEQ ID NO: 19271 - DNA, 19 bp, Artificial sequence
  SiRNA target sequence
aattttcttcggcttctcg

SEQ ID NO: 19272 - DNA, 19 bp, Artificial sequence
  SiRNA target sequence
attttcttcggcttctcgt

SEQ ID NO: 19273 - DNA, 19 bp, Artificial sequence
  SiRNA target sequence
ttttcttcggcttctcgta

SEQ ID NO: 19274 - DNA, 19 bp, Artificial sequence
  SiRNA target sequence
tttcttcggcttctcgtat

SEQ ID NO: 19275 - DNA, 19 bp, Artificial sequence
  SiRNA target sequence
ttcttcggcttctcgtatc

SEQ ID NO: 19276 - DNA, 19 bp, Artificial sequence
  SiRNA target sequence
tcttcggcttctcgtatca

SEQ ID NO: 19277 - DNA, 19 bp, Artificial sequence
  SiRNA target sequence
cttcggcttctcgtatcat

SEQ ID NO: 19278 - DNA, 19 bp, Artificial sequence
  SiRNA target sequence
ttcggcttctcgtatcatt

SEQ ID NO: 19279 - DNA, 19 bp, Artificial sequence
  SiRNA target sequence
tcggcttctcgtatcattt

SEQ ID NO: 19280 - DNA, 19 bp, Artificial sequence
  SiRNA target sequence
cggcttctcgtatcatttg

SEQ ID NO: 19281 - DNA, 19 bp, Artificial sequence
  SiRNA target sequence
ggcttctcgtatcatttgc

SEQ ID NO: 19282 - DNA, 19 bp, Artificial sequence
  SiRNA target sequence
gcttctcgtatcatttgcg

SEQ ID NO: 19283 - DNA, 19 bp, Artificial sequence
  SiRNA target sequence
cttctcgtatcatttgcga

SEQ ID NO: 19284 - DNA, 19 bp, Artificial sequence
  SiRNA target sequence
ttctcgtatcatttgcgaa

SEQ ID NO: 19285 - DNA, 19 bp, Artificial sequence
  SiRNA target sequence
tctcgtatcatttgcgaaa

SEQ ID NO: 19286 - DNA, 19 bp, Artificial sequence
  SiRNA target sequence
ctcgtatcatttgcgaaat

SEQ ID NO: 19287 - DNA, 19 bp, Artificial sequence
  SiRNA target sequence
tcgtatcatttgcgaaatt

SEQ ID NO: 19288 - DNA, 19 bp, Artificial sequence
  SiRNA target sequence
cgtatcatttgcgaaattt

SEQ ID NO: 19289 - DNA, 19 bp, Artificial sequence
  SiRNA target sequence
gtatcatttgcgaaatttc

SEQ ID NO: 19290 - DNA, 19 bp, Artificial sequence
  SiRNA target sequence
tatcatttgcgaaatttca

SEQ ID NO: 19291 - DNA, 19 bp, Artificial sequence
  SiRNA target sequence
atcatttgcgaaatttcac

SEQ ID NO: 19292 - DNA, 19 bp, Artificial sequence
  SiRNA target sequence
tcatttgcgaaatttcacc

SEQ ID NO: 19293 - DNA, 19 bp, Artificial sequence
  SiRNA target sequence
catttgcgaaatttcacct

SEQ ID NO: 19294 - DNA, 19 bp, Artificial sequence
  SiRNA target sequence
atttgcgaaatttcacctt

SEQ ID NO: 19295 - DNA, 19 bp, Artificial sequence
  SiRNA target sequence
tttgcgaaatttcaccttc

SEQ ID NO: 19296 - DNA, 19 bp, Artificial sequence
  SiRNA target sequence
ttgcgaaatttcaccttca

SEQ ID NO: 19297 - DNA, 19 bp, Artificial sequence
  SiRNA target sequence
tgcgaaatttcaccttcat

SEQ ID NO: 19298 - DNA, 19 bp, Artificial sequence
  SiRNA target sequence
gcgaaatttcaccttcatt

SEQ ID NO: 19299 - DNA, 19 bp, Artificial sequence
  SiRNA target sequence
cgaaatttcaccttcattt

SEQ ID NO: 19300 - DNA, 19 bp, Artificial sequence
  SiRNA target sequence
gaaatttcaccttcattta

SEQ ID NO: 19301 - DNA, 19 bp, Artificial sequence
  SiRNA target sequence
aaatttcaccttcatttaa

SEQ ID NO: 19302 - DNA, 19 bp, Artificial sequence
  SiRNA target sequence
aatttcaccttcatttaat

SEQ ID NO: 19303 - DNA, 19 bp, Artificial sequence
  SiRNA target sequence
atttcaccttcatttaatc

SEQ ID NO: 19304 - DNA, 19 bp, Artificial sequence
  SiRNA target sequence
tttcaccttcatttaatcc

SEQ ID NO: 19305 - DNA, 19 bp, Artificial sequence
  SiRNA target sequence
ttcaccttcatttaatcca

SEQ ID NO: 19306 - DNA, 19 bp, Artificial sequence
  SiRNA target sequence
tcaccttcatttaatccac

SEQ ID NO: 19307 - DNA, 19 bp, Artificial sequence
  SiRNA target sequence
caccttcatttaatccact

SEQ ID NO: 19308 - DNA, 19 bp, Artificial sequence
  SiRNA target sequence
accttcatttaatccactt

SEQ ID NO: 19309 - DNA, 19 bp, Artificial sequence
  SiRNA target sequence
ccttcatttaatccacttg

SEQ ID NO: 19310 - DNA, 19 bp, Artificial sequence
  SiRNA target sequence
cttcatttaatccacttga

SEQ ID NO: 19311 - DNA, 19 bp, Artificial sequence
  SiRNA target sequence
ttcatttaatccacttgaa

SEQ ID NO: 19312 - DNA, 19 bp, Artificial sequence
  SiRNA target sequence
tcatttaatccacttgaag

SEQ ID NO: 19313 - DNA, 19 bp, Artificial sequence
  SiRNA target sequence
catttaatccacttgaagg

SEQ ID NO: 19314 - DNA, 19 bp, Artificial sequence
  SiRNA target sequence
atttaatccacttgaaggc

SEQ ID NO: 19315 - DNA, 19 bp, Artificial sequence
  SiRNA target sequence
tttaatccacttgaaggca

SEQ ID NO: 19316 - DNA, 19 bp, Artificial sequence
  SiRNA target sequence
ttaatccacttgaaggcac

SEQ ID NO: 19317 - DNA, 19 bp, Artificial sequence
  SiRNA target sequence
taatccacttgaaggcaca

SEQ ID NO: 19318 - DNA, 19 bp, Artificial sequence
  SiRNA target sequence
aatccacttgaaggcacaa

SEQ ID NO: 19319 - DNA, 19 bp, Artificial sequence
  SiRNA target sequence
atccacttgaaggcacaat

SEQ ID NO: 19320 - DNA, 19 bp, Artificial sequence
  SiRNA target sequence
tccacttgaaggcacaatt

SEQ ID NO: 19321 - DNA, 19 bp, Artificial sequence
  SiRNA target sequence
ccacttgaaggcacaattt

SEQ ID NO: 19322 - DNA, 19 bp, Artificial sequence
  SiRNA target sequence
cacttgaaggcacaatttc

SEQ ID NO: 19323 - DNA, 19 bp, Artificial sequence
  SiRNA target sequence
acttgaaggcacaatttcg

SEQ ID NO: 19324 - DNA, 19 bp, Artificial sequence
  SiRNA target sequence
cttgaaggcacaatttcga

SEQ ID NO: 19325 - DNA, 19 bp, Artificial sequence
  SiRNA target sequence
ttgaaggcacaatttcgat

SEQ ID NO: 19326 - DNA, 19 bp, Artificial sequence
  SiRNA target sequence
tgaaggcacaatttcgatt

SEQ ID NO: 19327 - DNA, 19 bp, Artificial sequence
  SiRNA target sequence
gaaggcacaatttcgattt

SEQ ID NO: 19328 - DNA, 19 bp, Artificial sequence
  SiRNA target sequence
aaggcacaatttcgatttc

SEQ ID NO: 19329 - DNA, 19 bp, Artificial sequence
  SiRNA target sequence
aggcacaatttcgatttct

SEQ ID NO: 19330 - DNA, 19 bp, Artificial sequence
  SiRNA target sequence
ggcacaatttcgatttctt

SEQ ID NO: 19331 - DNA, 19 bp, Artificial sequence
  SiRNA target sequence
gcacaatttcgatttcttg

SEQ ID NO: 19332 - DNA, 19 bp, Artificial sequence
  SiRNA target sequence
cacaatttcgatttcttgc

SEQ ID NO: 19333 - DNA, 19 bp, Artificial sequence
  SiRNA target sequence
acaatttcgatttcttgct

SEQ ID NO: 19334 - DNA, 19 bp, Artificial sequence
  SiRNA target sequence
caatttcgatttcttgctt

SEQ ID NO: 19335 - DNA, 19 bp, Artificial sequence
  SiRNA target sequence
aatttcgatttcttgcttt

SEQ ID NO: 19336 - DNA, 19 bp, Artificial sequence
  SiRNA target sequence
atttcgatttcttgctttt

SEQ ID NO: 19337 - DNA, 19 bp, Artificial sequence
  SiRNA target sequence
tttcgatttcttgcttttt

SEQ ID NO: 19338 - DNA, 19 bp, Artificial sequence
  SiRNA target sequence
ttcgatttcttgctttttt

SEQ ID NO: 19339 - DNA, 19 bp, Artificial sequence
  SiRNA target sequence
tcgatttcttgcttttttt

SEQ ID NO: 19340 - DNA, 19 bp, Artificial sequence
  SiRNA target sequence
cgatttcttgctttttttt

SEQ ID NO: 19341 - DNA, 19 bp, Artificial sequence
  SiRNA target sequence
gatttcttgcttttttttc

SEQ ID NO: 19342 - DNA, 19 bp, Artificial sequence
  SiRNA target sequence
atttcttgcttttttttcg

SEQ ID NO: 19343 - DNA, 19 bp, Artificial sequence
  SiRNA target sequence
tttcttgcttttttttcgt

SEQ ID NO: 19344 - DNA, 19 bp, Artificial sequence
  SiRNA target sequence
ttcttgcttttttttcgtt

SEQ ID NO: 19345 - DNA, 19 bp, Artificial sequence
  SiRNA target sequence
tcttgcttttttttcgtta

SEQ ID NO: 19346 - DNA, 19 bp, Artificial sequence
  SiRNA target sequence
cttgcttttttttcgttat

SEQ ID NO: 19347 - DNA, 19 bp, Artificial sequence
  SiRNA target sequence
ttgcttttttttcgttatc

SEQ ID NO: 19348 - DNA, 19 bp, Artificial sequence
  SiRNA target sequence
tgcttttttttcgttatcc

SEQ ID NO: 19349 - DNA, 19 bp, Artificial sequence
  SiRNA target sequence
gcttttttttcgttatccc

SEQ ID NO: 19350 - DNA, 19 bp, Artificial sequence
  SiRNA target sequence
cttttttttcgttatcccg

SEQ ID NO: 19351 - DNA, 19 bp, Artificial sequence
  SiRNA target sequence
ttttttttcgttatcccgt

SEQ ID NO: 19352 - DNA, 19 bp, Artificial sequence
  SiRNA target sequence
tttttttcgttatcccgtc

SEQ ID NO: 19353 - DNA, 19 bp, Artificial sequence
  SiRNA target sequence
ttttttcgttatcccgtct

SEQ ID NO: 19354 - DNA, 19 bp, Artificial sequence
  SiRNA target sequence
tttttcgttatcccgtctt

SEQ ID NO: 19355 - DNA, 19 bp, Artificial sequence
  SiRNA target sequence
ttttcgttatcccgtcttg

SEQ ID NO: 19356 - DNA, 19 bp, Artificial sequence
  SiRNA target sequence
tttcgttatcccgtcttgc

SEQ ID NO: 19357 - DNA, 19 bp, Artificial sequence
  SiRNA target sequence
ttcgttatcccgtcttgcg

SEQ ID NO: 19358 - DNA, 19 bp, Artificial sequence
  SiRNA target sequence
tcgttatcccgtcttgcgc

SEQ ID NO: 19359 - DNA, 19 bp, Artificial sequence
  SiRNA target sequence
cgttatcccgtcttgcgca

SEQ ID NO: 19360 - DNA, 19 bp, Artificial sequence
  SiRNA target sequence
gttatcccgtcttgcgcag

SEQ ID NO: 19361 - DNA, 19 bp, Artificial sequence
  SiRNA target sequence
ttatcccgtcttgcgcaga

SEQ ID NO: 19362 - DNA, 19 bp, Artificial sequence
  SiRNA target sequence
tatcccgtcttgcgcagat

SEQ ID NO: 19363 - DNA, 19 bp, Artificial sequence
  SiRNA target sequence
atcccgtcttgcgcagata

SEQ ID NO: 19364 - DNA, 19 bp, Artificial sequence
  SiRNA target sequence
tcccgtcttgcgcagatac

SEQ ID NO: 19365 - DNA, 19 bp, Artificial sequence
  SiRNA target sequence
cccgtcttgcgcagatact

SEQ ID NO: 19366 - DNA, 19 bp, Artificial sequence
  SiRNA target sequence
ccgtcttgcgcagatactt

SEQ ID NO: 19367 - DNA, 19 bp, Artificial sequence
  SiRNA target sequence
cgtcttgcgcagatacttt

SEQ ID NO: 19368 - DNA, 19 bp, Artificial sequence
  SiRNA target sequence
gtcttgcgcagatactttg

SEQ ID NO: 19369 - DNA, 19 bp, Artificial sequence
  SiRNA target sequence
tcttgcgcagatactttgt

SEQ ID NO: 19370 - DNA, 19 bp, Artificial sequence
  SiRNA target sequence
cttgcgcagatactttgta

SEQ ID NO: 19371 - DNA, 19 bp, Artificial sequence
  SiRNA target sequence
ttgcgcagatactttgtat

SEQ ID NO: 19372 - DNA, 19 bp, Artificial sequence
  SiRNA target sequence
tgcgcagatactttgtata

SEQ ID NO: 19373 - DNA, 19 bp, Artificial sequence
  SiRNA target sequence
gcgcagatactttgtatat

SEQ ID NO: 19374 - DNA, 19 bp, Artificial sequence
  SiRNA target sequence
cgcagatactttgtatatt

SEQ ID NO: 19375 - DNA, 19 bp, Artificial sequence
  SiRNA target sequence
gcagatactttgtatattc

SEQ ID NO: 19376 - DNA, 19 bp, Artificial sequence
  SiRNA target sequence
cagatactttgtatattcc

SEQ ID NO: 19377 - DNA, 19 bp, Artificial sequence
  SiRNA target sequence
agatactttgtatattccg

SEQ ID NO: 19378 - DNA, 19 bp, Artificial sequence
  SiRNA target sequence
gatactttgtatattccgt

SEQ ID NO: 19379 - DNA, 19 bp, Artificial sequence
  SiRNA target sequence
atactttgtatattccgtt

SEQ ID NO: 19380 - DNA, 19 bp, Artificial sequence
  SiRNA target sequence
tactttgtatattccgtta

SEQ ID NO: 19381 - DNA, 19 bp, Artificial sequence
  SiRNA target sequence
actttgtatattccgttag

SEQ ID NO: 19382 - DNA, 19 bp, Artificial sequence
  SiRNA target sequence
ctttgtatattccgttagc

SEQ ID NO: 19383 - DNA, 19 bp, Artificial sequence
  SiRNA target sequence
tttgtatattccgttagca

SEQ ID NO: 19384 - DNA, 19 bp, Artificial sequence
  SiRNA target sequence
ttgtatattccgttagcat

SEQ ID NO: 19385 - DNA, 19 bp, Artificial sequence
  SiRNA target sequence
tgtatattccgttagcatc

SEQ ID NO: 19386 - DNA, 19 bp, Artificial sequence
  SiRNA target sequence
gtatattccgttagcatcg

SEQ ID NO: 19387 - DNA, 19 bp, Artificial sequence
  SiRNA target sequence
tatattccgttagcatcgg

SEQ ID NO: 19388 - DNA, 19 bp, Artificial sequence
  SiRNA target sequence
atattccgttagcatcggc

SEQ ID NO: 19389 - DNA, 19 bp, Artificial sequence
  SiRNA target sequence
tattccgttagcatcggct

SEQ ID NO: 19390 - DNA, 19 bp, Artificial sequence
  SiRNA target sequence
attccgttagcatcggctt

SEQ ID NO: 19391 - DNA, 19 bp, Artificial sequence
  SiRNA target sequence
ttccgttagcatcggcttc

SEQ ID NO: 19392 - DNA, 19 bp, Artificial sequence
  SiRNA target sequence
tccgttagcatcggcttca

SEQ ID NO: 19393 - DNA, 19 bp, Artificial sequence
  SiRNA target sequence
ccgttagcatcggcttcaa

SEQ ID NO: 19394 - DNA, 19 bp, Artificial sequence
  SiRNA target sequence
cgttagcatcggcttcaaa

SEQ ID NO: 19395 - DNA, 19 bp, Artificial sequence
  SiRNA target sequence
gttagcatcggcttcaaat

SEQ ID NO: 19396 - DNA, 19 bp, Artificial sequence
  SiRNA target sequence
ttagcatcggcttcaaatg

SEQ ID NO: 19397 - DNA, 19 bp, Artificial sequence
  SiRNA target sequence
tagcatcggcttcaaatgt

SEQ ID NO: 19398 - DNA, 19 bp, Artificial sequence
  SiRNA target sequence
agcatcggcttcaaatgta

SEQ ID NO: 19399 - DNA, 19 bp, Artificial sequence
  SiRNA target sequence
gcatcggcttcaaatgtaa

SEQ ID NO: 19400 - DNA, 19 bp, Artificial sequence
  SiRNA target sequence
catcggcttcaaatgtaac

SEQ ID NO: 19401 - DNA, 19 bp, Artificial sequence
  SiRNA target sequence
atcggcttcaaatgtaaca

SEQ ID NO: 19402 - DNA, 19 bp, Artificial sequence
  SiRNA target sequence
tcggcttcaaatgtaacat

SEQ ID NO: 19403 - DNA, 19 bp, Artificial sequence
  SiRNA target sequence
cggcttcaaatgtaacatc

SEQ ID NO: 19404 - DNA, 19 bp, Artificial sequence
  SiRNA target sequence
ggcttcaaatgtaacatct

SEQ ID NO: 19405 - DNA, 19 bp, Artificial sequence
  SiRNA target sequence
gcttcaaatgtaacatcta

SEQ ID NO: 19406 - DNA, 19 bp, Artificial sequence
  SiRNA target sequence
cttcaaatgtaacatctat

SEQ ID NO: 19407 - DNA, 19 bp, Artificial sequence
  SiRNA target sequence
ttcaaatgtaacatctatc

SEQ ID NO: 19408 - DNA, 19 bp, Artificial sequence
  SiRNA target sequence
tcaaatgtaacatctatct

SEQ ID NO: 19409 - DNA, 19 bp, Artificial sequence
  SiRNA target sequence
caaatgtaacatctatctt

SEQ ID NO: 19410 - DNA, 19 bp, Artificial sequence
  SiRNA target sequence
aaatgtaacatctatcttt

SEQ ID NO: 19411 - DNA, 19 bp, Artificial sequence
  SiRNA target sequence
aatgtaacatctatctttg

SEQ ID NO: 19412 - DNA, 19 bp, Artificial sequence
  SiRNA target sequence
atgtaacatctatctttgg

SEQ ID NO: 19413 - DNA, 19 bp, Artificial sequence
  SiRNA target sequence
tgtaacatctatctttgga

SEQ ID NO: 19414 - DNA, 19 bp, Artificial sequence
  SiRNA target sequence
gtaacatctatctttggaa

SEQ ID NO: 19415 - DNA, 19 bp, Artificial sequence
  SiRNA target sequence
taacatctatctttggaat

SEQ ID NO: 19416 - DNA, 19 bp, Artificial sequence
  SiRNA target sequence
aacatctatctttggaata

SEQ ID NO: 19417 - DNA, 19 bp, Artificial sequence
  SiRNA target sequence
acatctatctttggaatac

SEQ ID NO: 19418 - DNA, 19 bp, Artificial sequence
  SiRNA target sequence
catctatctttggaatacc

SEQ ID NO: 19419 - DNA, 19 bp, Artificial sequence
  SiRNA target sequence
atctatctttggaatacct

SEQ ID NO: 19420 - DNA, 19 bp, Artificial sequence
  SiRNA target sequence
tctatctttggaatacctg

SEQ ID NO: 19421 - DNA, 19 bp, Artificial sequence
  SiRNA target sequence
ctatctttggaatacctgc

SEQ ID NO: 19422 - DNA, 19 bp, Artificial sequence
  SiRNA target sequence
tatctttggaatacctgca

SEQ ID NO: 19423 - DNA, 19 bp, Artificial sequence
  SiRNA target sequence
atctttggaatacctgcag

SEQ ID NO: 19424 - DNA, 19 bp, Artificial sequence
  SiRNA target sequence
tctttggaatacctgcagg

SEQ ID NO: 19425 - DNA, 19 bp, Artificial sequence
  SiRNA target sequence
ctttggaatacctgcaggt

SEQ ID NO: 19426 - DNA, 19 bp, Artificial sequence
  SiRNA target sequence
tttggaatacctgcaggtg

SEQ ID NO: 19427 - DNA, 19 bp, Artificial sequence
  SiRNA target sequence
ttggaatacctgcaggtgc

SEQ ID NO: 19428 - DNA, 19 bp, Artificial sequence
  SiRNA target sequence
tggaatacctgcaggtgct

SEQ ID NO: 19429 - DNA, 19 bp, Artificial sequence
  SiRNA target sequence
ggaatacctgcaggtgctt

SEQ ID NO: 19430 - DNA, 19 bp, Artificial sequence
  SiRNA target sequence
gaatacctgcaggtgcttt

SEQ ID NO: 19431 - DNA, 19 bp, Artificial sequence
  SiRNA target sequence
aatacctgcaggtgcttta

SEQ ID NO: 19432 - DNA, 19 bp, Artificial sequence
  SiRNA target sequence
atacctgcaggtgctttag

SEQ ID NO: 19433 - DNA, 19 bp, Artificial sequence
  SiRNA target sequence
tacctgcaggtgctttagg

SEQ ID NO: 19434 - DNA, 19 bp, Artificial sequence
  SiRNA target sequence
acctgcaggtgctttagga

SEQ ID NO: 19435 - DNA, 19 bp, Artificial sequence
  SiRNA target sequence
cctgcaggtgctttaggaa

SEQ ID NO: 19436 - DNA, 19 bp, Artificial sequence
  SiRNA target sequence
ctgcaggtgctttaggaat

SEQ ID NO: 19437 - DNA, 19 bp, Artificial sequence
  SiRNA target sequence
tgcaggtgctttaggaatg

SEQ ID NO: 19438 - DNA, 19 bp, Artificial sequence
  SiRNA target sequence
gcaggtgctttaggaatgt

SEQ ID NO: 19439 - DNA, 19 bp, Artificial sequence
  SiRNA target sequence
caggtgctttaggaatgtt

SEQ ID NO: 19440 - DNA, 19 bp, Artificial sequence
  SiRNA target sequence
aggtgctttaggaatgttt

SEQ ID NO: 19441 - DNA, 19 bp, Artificial sequence
  SiRNA target sequence
ggtgctttaggaatgtttt

SEQ ID NO: 19442 - DNA, 19 bp, Artificial sequence
  SiRNA target sequence
gtgctttaggaatgttttt

SEQ ID NO: 19443 - DNA, 19 bp, Artificial sequence
  SiRNA target sequence
tgctttaggaatgtttttg

SEQ ID NO: 19444 - DNA, 19 bp, Artificial sequence
  SiRNA target sequence
gctttaggaatgtttttga

SEQ ID NO: 19445 - DNA, 19 bp, Artificial sequence
  SiRNA target sequence
ctttaggaatgtttttgag

SEQ ID NO: 19446 - DNA, 19 bp, Artificial sequence
  SiRNA target sequence
tttaggaatgtttttgagc

SEQ ID NO: 19447 - DNA, 19 bp, Artificial sequence
  SiRNA target sequence
ttaggaatgtttttgagct

SEQ ID NO: 19448 - DNA, 19 bp, Artificial sequence
  SiRNA target sequence
taggaatgtttttgagctt

SEQ ID NO: 19449 - DNA, 19 bp, Artificial sequence
  SiRNA target sequence
aggaatgtttttgagcttt

SEQ ID NO: 19450 - DNA, 19 bp, Artificial sequence
  SiRNA target sequence
ggaatgtttttgagcttta

SEQ ID NO: 19451 - DNA, 19 bp, Artificial sequence
  SiRNA target sequence
gaatgtttttgagctttat

SEQ ID NO: 19452 - DNA, 19 bp, Artificial sequence
  SiRNA target sequence
aatgtttttgagctttata

SEQ ID NO: 19453 - DNA, 19 bp, Artificial sequence
  SiRNA target sequence
atgtttttgagctttatag

SEQ ID NO: 19454 - DNA, 19 bp, Artificial sequence
  SiRNA target sequence
tgtttttgagctttatagc

SEQ ID NO: 19455 - DNA, 19 bp, Artificial sequence
  SiRNA target sequence
gtttttgagctttatagct

SEQ ID NO: 19456 - DNA, 19 bp, Artificial sequence
  SiRNA target sequence
tttttgagctttatagctc

SEQ ID NO: 19457 - DNA, 19 bp, Artificial sequence
  SiRNA target sequence
ttttgagctttatagctcc

SEQ ID NO: 19458 - DNA, 19 bp, Artificial sequence
  SiRNA target sequence
tttgagctttatagctcct

SEQ ID NO: 19459 - DNA, 19 bp, Artificial sequence
  SiRNA target sequence
ttgagctttatagctccta

SEQ ID NO: 19460 - DNA, 19 bp, Artificial sequence
  SiRNA target sequence
tgagctttatagctcctaa

SEQ ID NO: 19461 - DNA, 19 bp, Artificial sequence
  SiRNA target sequence
gagctttatagctcctaaa

SEQ ID NO: 19462 - DNA, 19 bp, Artificial sequence
  SiRNA target sequence
agctttatagctcctaaat

SEQ ID NO: 19463 - DNA, 19 bp, Artificial sequence
  SiRNA target sequence
gctttatagctcctaaata

SEQ ID NO: 19464 - DNA, 19 bp, Artificial sequence
  SiRNA target sequence
ctttatagctcctaaatat

SEQ ID NO: 19465 - DNA, 19 bp, Artificial sequence
  SiRNA target sequence
tttatagctcctaaatatt

SEQ ID NO: 19466 - DNA, 19 bp, Artificial sequence
  SiRNA target sequence
ttatagctcctaaatattt

SEQ ID NO: 19467 - DNA, 19 bp, Artificial sequence
  SiRNA target sequence
tatagctcctaaatattta

SEQ ID NO: 19468 - DNA, 19 bp, Artificial sequence
  SiRNA target sequence
atagctcctaaatatttat

SEQ ID NO: 19469 - DNA, 19 bp, Artificial sequence
  SiRNA target sequence
tagctcctaaatatttatt

SEQ ID NO: 19470 - DNA, 19 bp, Artificial sequence
  SiRNA target sequence
agctcctaaatatttattg

SEQ ID NO: 19471 - DNA, 19 bp, Artificial sequence
  SiRNA target sequence
gctcctaaatatttattgt

SEQ ID NO: 19472 - DNA, 19 bp, Artificial sequence
  SiRNA target sequence
ctcctaaatatttattgtc

SEQ ID NO: 19473 - DNA, 19 bp, Artificial sequence
  SiRNA target sequence
tcctaaatatttattgtct

SEQ ID NO: 19474 - DNA, 19 bp, Artificial sequence
  SiRNA target sequence
cctaaatatttattgtctt

SEQ ID NO: 19475 - DNA, 19 bp, Artificial sequence
  SiRNA target sequence
ctaaatatttattgtcttt

SEQ ID NO: 19476 - DNA, 19 bp, Artificial sequence
  SiRNA target sequence
taaatatttattgtctttt

SEQ ID NO: 19477 - DNA, 19 bp, Artificial sequence
  SiRNA target sequence
aaatatttattgtctttta

SEQ ID NO: 19478 - DNA, 19 bp, Artificial sequence
  SiRNA target sequence
aatatttattgtcttttac

SEQ ID NO: 19479 - DNA, 19 bp, Artificial sequence
  SiRNA target sequence
atatttattgtcttttacc

SEQ ID NO: 19480 - DNA, 19 bp, Artificial sequence
  SiRNA target sequence
tatttattgtcttttacca

SEQ ID NO: 19481 - DNA, 19 bp, Artificial sequence
  SiRNA target sequence
atttattgtcttttaccat

SEQ ID NO: 19482 - DNA, 19 bp, Artificial sequence
  SiRNA target sequence
tttattgtcttttaccatc

SEQ ID NO: 19483 - DNA, 19 bp, Artificial sequence
  SiRNA target sequence
ttattgtcttttaccatct

SEQ ID NO: 19484 - DNA, 19 bp, Artificial sequence
  SiRNA target sequence
tattgtcttttaccatctt

SEQ ID NO: 19485 - DNA, 19 bp, Artificial sequence
  SiRNA target sequence
attgtcttttaccatcttt

SEQ ID NO: 19486 - DNA, 19 bp, Artificial sequence
  SiRNA target sequence
ttgtcttttaccatctttc

SEQ ID NO: 19487 - DNA, 19 bp, Artificial sequence
  SiRNA target sequence
tgtcttttaccatctttct

SEQ ID NO: 19488 - DNA, 19 bp, Artificial sequence
  SiRNA target sequence
gtcttttaccatctttctt

SEQ ID NO: 19489 - DNA, 19 bp, Artificial sequence
  SiRNA target sequence
tcttttaccatctttcttt

SEQ ID NO: 19490 - DNA, 19 bp, Artificial sequence
  SiRNA target sequence
cttttaccatctttctttc

SEQ ID NO: 19491 - DNA, 19 bp, Artificial sequence
  SiRNA target sequence
ttttaccatctttctttct

SEQ ID NO: 19492 - DNA, 19 bp, Artificial sequence
  SiRNA target sequence
tttaccatctttctttctc

SEQ ID NO: 19493 - DNA, 19 bp, Artificial sequence
  SiRNA target sequence
ttaccatctttctttctcc

SEQ ID NO: 19494 - DNA, 19 bp, Artificial sequence
  SiRNA target sequence
taccatctttctttctcct

SEQ ID NO: 19495 - DNA, 19 bp, Artificial sequence
  SiRNA target sequence
accatctttctttctcctt

SEQ ID NO: 19496 - DNA, 19 bp, Artificial sequence
  SiRNA target sequence
ccatctttctttctccttg

SEQ ID NO: 19497 - DNA, 19 bp, Artificial sequence
  SiRNA target sequence
catctttctttctccttga

SEQ ID NO: 19498 - DNA, 19 bp, Artificial sequence
  SiRNA target sequence
atctttctttctccttgat

SEQ ID NO: 19499 - DNA, 19 bp, Artificial sequence
  SiRNA target sequence
tctttctttctccttgata

SEQ ID NO: 19500 - DNA, 19 bp, Artificial sequence
  SiRNA target sequence
ctttctttctccttgatat

SEQ ID NO: 19501 - DNA, 19 bp, Artificial sequence
  SiRNA target sequence
tttctttctccttgatata

SEQ ID NO: 19502 - DNA, 19 bp, Artificial sequence
  SiRNA target sequence
ttctttctccttgatatat

SEQ ID NO: 19503 - DNA, 19 bp, Artificial sequence
  SiRNA target sequence
tctttctccttgatatatt

SEQ ID NO: 19504 - DNA, 19 bp, Artificial sequence
  SiRNA target sequence
ctttctccttgatatattc

SEQ ID NO: 19505 - DNA, 19 bp, Artificial sequence
  SiRNA target sequence
tttctccttgatatattct

SEQ ID NO: 19506 - DNA, 19 bp, Artificial sequence
  SiRNA target sequence
ttctccttgatatattcta

SEQ ID NO: 19507 - DNA, 19 bp, Artificial sequence
  SiRNA target sequence
tctccttgatatattctaa

SEQ ID NO: 19508 - DNA, 19 bp, Artificial sequence
  SiRNA target sequence
ctccttgatatattctaat

SEQ ID NO: 19509 - DNA, 19 bp, Artificial sequence
  SiRNA target sequence
tccttgatatattctaata

SEQ ID NO: 19510 - DNA, 19 bp, Artificial sequence
  SiRNA target sequence
ccttgatatattctaatat

SEQ ID NO: 19511 - DNA, 19 bp, Artificial sequence
  SiRNA target sequence
cttgatatattctaatatc

SEQ ID NO: 19512 - DNA, 19 bp, Artificial sequence
  SiRNA target sequence
ttgatatattctaatatct

SEQ ID NO: 19513 - DNA, 19 bp, Artificial sequence
  SiRNA target sequence
tgatatattctaatatcta

SEQ ID NO: 19514 - DNA, 19 bp, Artificial sequence
  SiRNA target sequence
gatatattctaatatctac

SEQ ID NO: 19515 - DNA, 19 bp, Artificial sequence
  SiRNA target sequence
atatattctaatatctact

SEQ ID NO: 19516 - DNA, 19 bp, Artificial sequence
  SiRNA target sequence
tatattctaatatctactt

SEQ ID NO: 19517 - DNA, 19 bp, Artificial sequence
  SiRNA target sequence
atattctaatatctacttc

SEQ ID NO: 19518 - DNA, 19 bp, Artificial sequence
  SiRNA target sequence
tattctaatatctacttcg

SEQ ID NO: 19519 - DNA, 19 bp, Artificial sequence
  SiRNA target sequence
attctaatatctacttcgg

SEQ ID NO: 19520 - DNA, 19 bp, Artificial sequence
  SiRNA target sequence
ttctaatatctacttcgga

SEQ ID NO: 19521 - DNA, 19 bp, Artificial sequence
  SiRNA target sequence
tctaatatctacttcggat

SEQ ID NO: 19522 - DNA, 19 bp, Artificial sequence
  SiRNA target sequence
ctaatatctacttcggatt

SEQ ID NO: 19523 - DNA, 19 bp, Artificial sequence
  SiRNA target sequence
taatatctacttcggattg

SEQ ID NO: 19524 - DNA, 19 bp, Artificial sequence
  SiRNA target sequence
aatatctacttcggattga

SEQ ID NO: 19525 - DNA, 19 bp, Artificial sequence
  SiRNA target sequence
atatctacttcggattgat

SEQ ID NO: 19526 - DNA, 19 bp, Artificial sequence
  SiRNA target sequence
tatctacttcggattgatt

SEQ ID NO: 19527 - DNA, 19 bp, Artificial sequence
  SiRNA target sequence
atctacttcggattgatta

SEQ ID NO: 19528 - DNA, 19 bp, Artificial sequence
  SiRNA target sequence
tctacttcggattgattat

SEQ ID NO: 19529 - DNA, 19 bp, Artificial sequence
  SiRNA target sequence
ctacttcggattgattatc

SEQ ID NO: 19530 - DNA, 19 bp, Artificial sequence
  SiRNA target sequence
tacttcggattgattatct

SEQ ID NO: 19531 - DNA, 19 bp, Artificial sequence
  SiRNA target sequence
acttcggattgattatctt

SEQ ID NO: 19532 - DNA, 19 bp, Artificial sequence
  SiRNA target sequence
cttcggattgattatcttc

SEQ ID NO: 19533 - DNA, 19 bp, Artificial sequence
  SiRNA target sequence
ttcggattgattatcttca

SEQ ID NO: 19534 - DNA, 19 bp, Artificial sequence
  SiRNA target sequence
tcggattgattatcttcag

SEQ ID NO: 19535 - DNA, 19 bp, Artificial sequence
  SiRNA target sequence
cggattgattatcttcaga

SEQ ID NO: 19536 - DNA, 19 bp, Artificial sequence
  SiRNA target sequence
ggattgattatcttcagag

SEQ ID NO: 19537 - DNA, 19 bp, Artificial sequence
  SiRNA target sequence
gattgattatcttcagagg

SEQ ID NO: 19538 - DNA, 19 bp, Artificial sequence
  SiRNA target sequence
attgattatcttcagaggt

SEQ ID NO: 19539 - DNA, 19 bp, Artificial sequence
  SiRNA target sequence
ttgattatcttcagaggta

SEQ ID NO: 19540 - DNA, 19 bp, Artificial sequence
  SiRNA target sequence
tgattatcttcagaggtag

SEQ ID NO: 19541 - DNA, 19 bp, Artificial sequence
  SiRNA target sequence
gattatcttcagaggtaga

SEQ ID NO: 19542 - DNA, 19 bp, Artificial sequence
  SiRNA target sequence
attatcttcagaggtagaa

SEQ ID NO: 19543 - DNA, 19 bp, Artificial sequence
  SiRNA target sequence
ttatcttcagaggtagaaa

SEQ ID NO: 19544 - DNA, 19 bp, Artificial sequence
  SiRNA target sequence
tatcttcagaggtagaaaa

SEQ ID NO: 19545 - DNA, 19 bp, Artificial sequence
  SiRNA target sequence
atcttcagaggtagaaaaa

SEQ ID NO: 19546 - DNA, 19 bp, Artificial sequence
  SiRNA target sequence
tcttcagaggtagaaaaac

SEQ ID NO: 19547 - DNA, 19 bp, Artificial sequence
  SiRNA target sequence
cttcagaggtagaaaaact

SEQ ID NO: 19548 - DNA, 19 bp, Artificial sequence
  SiRNA target sequence
ttcagaggtagaaaaactg

SEQ ID NO: 19549 - DNA, 19 bp, Artificial sequence
  SiRNA target sequence
tcagaggtagaaaaactgt

SEQ ID NO: 19550 - DNA, 19 bp, Artificial sequence
  SiRNA target sequence
cagaggtagaaaaactgtg

SEQ ID NO: 19551 - DNA, 19 bp, Artificial sequence
  SiRNA target sequence
agaggtagaaaaactgtgt

SEQ ID NO: 19552 - DNA, 19 bp, Artificial sequence
  SiRNA target sequence
gaggtagaaaaactgtgtg

SEQ ID NO: 19553 - DNA, 19 bp, Artificial sequence
  SiRNA target sequence
aggtagaaaaactgtgtgt

SEQ ID NO: 19554 - DNA, 19 bp, Artificial sequence
  SiRNA target sequence
ggtagaaaaactgtgtgtt

SEQ ID NO: 19555 - DNA, 19 bp, Artificial sequence
  SiRNA target sequence
gtagaaaaactgtgtgttt

SEQ ID NO: 19556 - DNA, 19 bp, Artificial sequence
  SiRNA target sequence
tagaaaaactgtgtgtttc

SEQ ID NO: 19557 - DNA, 19 bp, Artificial sequence
  SiRNA target sequence
agaaaaactgtgtgtttcc

SEQ ID NO: 19558 - DNA, 19 bp, Artificial sequence
  SiRNA target sequence
gaaaaactgtgtgtttcct

SEQ ID NO: 19559 - DNA, 19 bp, Artificial sequence
  SiRNA target sequence
aaaaactgtgtgtttcctt

SEQ ID NO: 19560 - DNA, 19 bp, Artificial sequence
  SiRNA target sequence
aaaactgtgtgtttcctta

SEQ ID NO: 19561 - DNA, 19 bp, Artificial sequence
  SiRNA target sequence
aaactgtgtgtttccttaa

SEQ ID NO: 19562 - DNA, 19 bp, Artificial sequence
  SiRNA target sequence
aactgtgtgtttccttaaa

SEQ ID NO: 19563 - DNA, 19 bp, Artificial sequence
  SiRNA target sequence
actgtgtgtttccttaaat

SEQ ID NO: 19564 - DNA, 19 bp, Artificial sequence
  SiRNA target sequence
ctgtgtgtttccttaaatg

SEQ ID NO: 19565 - DNA, 19 bp, Artificial sequence
  SiRNA target sequence
tgtgtgtttccttaaatgg

SEQ ID NO: 19566 - DNA, 19 bp, Artificial sequence
  SiRNA target sequence
gtgtgtttccttaaatgga

SEQ ID NO: 19567 - DNA, 19 bp, Artificial sequence
  SiRNA target sequence
tgtgtttccttaaatggaa

SEQ ID NO: 19568 - DNA, 19 bp, Artificial sequence
  SiRNA target sequence
gtgtttccttaaatggaat

SEQ ID NO: 19569 - DNA, 19 bp, Artificial sequence
  SiRNA target sequence
tgtttccttaaatggaata

SEQ ID NO: 19570 - DNA, 19 bp, Artificial sequence
  SiRNA target sequence
gtttccttaaatggaatag

SEQ ID NO: 19571 - DNA, 19 bp, Artificial sequence
  SiRNA target sequence
tttccttaaatggaatagt

SEQ ID NO: 19572 - DNA, 19 bp, Artificial sequence
  SiRNA target sequence
ttccttaaatggaatagta

SEQ ID NO: 19573 - DNA, 19 bp, Artificial sequence
  SiRNA target sequence
tccttaaatggaatagtag

SEQ ID NO: 19574 - DNA, 19 bp, Artificial sequence
  SiRNA target sequence
ccttaaatggaatagtaga

SEQ ID NO: 19575 - DNA, 19 bp, Artificial sequence
  SiRNA target sequence
cttaaatggaatagtagaa

SEQ ID NO: 19576 - DNA, 19 bp, Artificial sequence
  SiRNA target sequence
ttaaatggaatagtagaat

SEQ ID NO: 19577 - DNA, 19 bp, Artificial sequence
  SiRNA target sequence
taaatggaatagtagaatt

SEQ ID NO: 19578 - DNA, 19 bp, Artificial sequence
  SiRNA target sequence
aaatggaatagtagaattt

SEQ ID NO: 19579 - DNA, 19 bp, Artificial sequence
  SiRNA target sequence
aatggaatagtagaatttc

SEQ ID NO: 19580 - DNA, 19 bp, Artificial sequence
  SiRNA target sequence
atggaatagtagaatttct

SEQ ID NO: 19581 - DNA, 19 bp, Artificial sequence
  SiRNA target sequence
tggaatagtagaatttcta

SEQ ID NO: 19582 - DNA, 19 bp, Artificial sequence
  SiRNA target sequence
ggaatagtagaatttctat

SEQ ID NO: 19583 - DNA, 19 bp, Artificial sequence
  SiRNA target sequence
gaatagtagaatttctatg

SEQ ID NO: 19584 - DNA, 19 bp, Artificial sequence
  SiRNA target sequence
aatagtagaatttctatga

SEQ ID NO: 19585 - DNA, 19 bp, Artificial sequence
  SiRNA target sequence
atagtagaatttctatgaa

SEQ ID NO: 19586 - DNA, 19 bp, Artificial sequence
  SiRNA target sequence
tagtagaatttctatgaat

SEQ ID NO: 19587 - DNA, 19 bp, Artificial sequence
  SiRNA target sequence
agtagaatttctatgaatt

SEQ ID NO: 19588 - DNA, 19 bp, Artificial sequence
  SiRNA target sequence
gtagaatttctatgaatta

SEQ ID NO: 19589 - DNA, 19 bp, Artificial sequence
  SiRNA target sequence
tagaatttctatgaattat

SEQ ID NO: 19590 - DNA, 19 bp, Artificial sequence
  SiRNA target sequence
agaatttctatgaattatc

SEQ ID NO: 19591 - DNA, 19 bp, Artificial sequence
  SiRNA target sequence
gaatttctatgaattatct

SEQ ID NO: 19592 - DNA, 19 bp, Artificial sequence
  SiRNA target sequence
aatttctatgaattatctt

SEQ ID NO: 19593 - DNA, 19 bp, Artificial sequence
  SiRNA target sequence
atttctatgaattatctta

SEQ ID NO: 19594 - DNA, 19 bp, Artificial sequence
  SiRNA target sequence
tttctatgaattatcttat

SEQ ID NO: 19595 - DNA, 19 bp, Artificial sequence
  SiRNA target sequence
ttctatgaattatcttatt

SEQ ID NO: 19596 - DNA, 19 bp, Artificial sequence
  SiRNA target sequence
tctatgaattatcttatta

SEQ ID NO: 19597 - DNA, 19 bp, Artificial sequence
  SiRNA target sequence
ctatgaattatcttattaa

SEQ ID NO: 19598 - DNA, 19 bp, Artificial sequence
  SiRNA target sequence
tatgaattatcttattaaa

SEQ ID NO: 19599 - DNA, 19 bp, Artificial sequence
  SiRNA target sequence
atgaattatcttattaaaa

SEQ ID NO: 19600 - DNA, 19 bp, Artificial sequence
  SiRNA target sequence
tgaattatcttattaaaaa

SEQ ID NO: 19601 - DNA, 19 bp, Artificial sequence
  SiRNA target sequence
gaattatcttattaaaaat

SEQ ID NO: 19602 - DNA, 19 bp, Artificial sequence
  SiRNA target sequence
aattatcttattaaaaatc

SEQ ID NO: 19603 - DNA, 19 bp, Artificial sequence
  SiRNA target sequence
attatcttattaaaaatcc

SEQ ID NO: 19604 - DNA, 19 bp, Artificial sequence
  SiRNA target sequence
ttatcttattaaaaatccc

SEQ ID NO: 19605 - DNA, 19 bp, Artificial sequence
  SiRNA target sequence
tatcttattaaaaatcccg

SEQ ID NO: 19606 - DNA, 19 bp, Artificial sequence
  SiRNA target sequence
atcttattaaaaatcccgc

SEQ ID NO: 19607 - DNA, 19 bp, Artificial sequence
  SiRNA target sequence
tcttattaaaaatcccgcc

SEQ ID NO: 19608 - DNA, 19 bp, Artificial sequence
  SiRNA target sequence
cttattaaaaatcccgccc

SEQ ID NO: 19609 - DNA, 19 bp, Artificial sequence
  SiRNA target sequence
ttattaaaaatcccgccca

SEQ ID NO: 19610 - DNA, 19 bp, Artificial sequence
  SiRNA target sequence
tattaaaaatcccgcccaa

SEQ ID NO: 19611 - DNA, 19 bp, Artificial sequence
  SiRNA target sequence
attaaaaatcccgcccaaa

SEQ ID NO: 19612 - DNA, 19 bp, Artificial sequence
  SiRNA target sequence
ttaaaaatcccgcccaaaa

SEQ ID NO: 19613 - DNA, 19 bp, Artificial sequence
  SiRNA target sequence
taaaaatcccgcccaaaag

SEQ ID NO: 19614 - DNA, 19 bp, Artificial sequence
  SiRNA target sequence
aaaaatcccgcccaaaagc

SEQ ID NO: 19615 - DNA, 19 bp, Artificial sequence
  SiRNA target sequence
aaaatcccgcccaaaagct

SEQ ID NO: 19616 - DNA, 19 bp, Artificial sequence
  SiRNA target sequence
aaatcccgcccaaaagctc

SEQ ID NO: 19617 - DNA, 19 bp, Artificial sequence
  SiRNA target sequence
aatcccgcccaaaagctct

SEQ ID NO: 19618 - DNA, 19 bp, Artificial sequence
  SiRNA target sequence
atcccgcccaaaagctcta

SEQ ID NO: 19619 - DNA, 19 bp, Artificial sequence
  SiRNA target sequence
tcccgcccaaaagctctat

SEQ ID NO: 19620 - DNA, 19 bp, Artificial sequence
  SiRNA target sequence
cccgcccaaaagctctata

SEQ ID NO: 19621 - DNA, 19 bp, Artificial sequence
  SiRNA target sequence
ccgcccaaaagctctatac

SEQ ID NO: 19622 - DNA, 19 bp, Artificial sequence
  SiRNA target sequence
cgcccaaaagctctatacc

SEQ ID NO: 19623 - DNA, 19 bp, Artificial sequence
  SiRNA target sequence
gcccaaaagctctatacct

SEQ ID NO: 19624 - DNA, 19 bp, Artificial sequence
  SiRNA target sequence
cccaaaagctctataccta

SEQ ID NO: 19625 - DNA, 19 bp, Artificial sequence
  SiRNA target sequence
ccaaaagctctatacctaa

SEQ ID NO: 19626 - DNA, 19 bp, Artificial sequence
  SiRNA target sequence
caaaagctctatacctaaa

SEQ ID NO: 19627 - DNA, 19 bp, Artificial sequence
  SiRNA target sequence
aaaagctctatacctaaac

SEQ ID NO: 19628 - DNA, 19 bp, Artificial sequence
  SiRNA target sequence
aaagctctatacctaaact

SEQ ID NO: 19629 - DNA, 19 bp, Artificial sequence
  SiRNA target sequence
aagctctatacctaaactc

SEQ ID NO: 19630 - DNA, 19 bp, Artificial sequence
  SiRNA target sequence
agctctatacctaaactca

SEQ ID NO: 19631 - DNA, 19 bp, Artificial sequence
  SiRNA target sequence
gctctatacctaaactcaa

SEQ ID NO: 19632 - DNA, 19 bp, Artificial sequence
  SiRNA target sequence
ctctatacctaaactcaat

SEQ ID NO: 19633 - DNA, 19 bp, Artificial sequence
  SiRNA target sequence
tctatacctaaactcaatg

SEQ ID NO: 19634 - DNA, 19 bp, Artificial sequence
  SiRNA target sequence
ctatacctaaactcaatgg

SEQ ID NO: 19635 - DNA, 19 bp, Artificial sequence
  SiRNA target sequence
tatacctaaactcaatggt

SEQ ID NO: 19636 - DNA, 19 bp, Artificial sequence
  SiRNA target sequence
atacctaaactcaatggta

SEQ ID NO: 19637 - DNA, 19 bp, Artificial sequence
  SiRNA target sequence
tacctaaactcaatggtac

SEQ ID NO: 19638 - DNA, 19 bp, Artificial sequence
  SiRNA target sequence
acctaaactcaatggtact

SEQ ID NO: 19639 - DNA, 19 bp, Artificial sequence
  SiRNA target sequence
cctaaactcaatggtacta

SEQ ID NO: 19640 - DNA, 19 bp, Artificial sequence
  SiRNA target sequence
ctaaactcaatggtactac

SEQ ID NO: 19641 - DNA, 19 bp, Artificial sequence
  SiRNA target sequence
taaactcaatggtactaca

SEQ ID NO: 19642 - DNA, 19 bp, Artificial sequence
  SiRNA target sequence
aaactcaatggtactacat

SEQ ID NO: 19643 - DNA, 19 bp, Artificial sequence
  SiRNA target sequence
aactcaatggtactacatc

SEQ ID NO: 19644 - DNA, 19 bp, Artificial sequence
  SiRNA target sequence
actcaatggtactacatcc

SEQ ID NO: 19645 - DNA, 19 bp, Artificial sequence
  SiRNA target sequence
ctcaatggtactacatcca

SEQ ID NO: 19646 - DNA, 19 bp, Artificial sequence
  SiRNA target sequence
tcaatggtactacatccaa

SEQ ID NO: 19647 - DNA, 19 bp, Artificial sequence
  SiRNA target sequence
caatggtactacatccaat

SEQ ID NO: 19648 - DNA, 19 bp, Artificial sequence
  SiRNA target sequence
aatggtactacatccaata

SEQ ID NO: 19649 - DNA, 19 bp, Artificial sequence
  SiRNA target sequence
atggtactacatccaataa

SEQ ID NO: 19650 - DNA, 19 bp, Artificial sequence
  SiRNA target sequence
tggtactacatccaataat

SEQ ID NO: 19651 - DNA, 19 bp, Artificial sequence
  SiRNA target sequence
ggtactacatccaataata

SEQ ID NO: 19652 - DNA, 19 bp, Artificial sequence
  SiRNA target sequence
gtactacatccaataatag

SEQ ID NO: 19653 - DNA, 19 bp, Artificial sequence
  SiRNA target sequence
tactacatccaataatagg

SEQ ID NO: 19654 - DNA, 19 bp, Artificial sequence
  SiRNA target sequence
actacatccaataatagga

SEQ ID NO: 19655 - DNA, 19 bp, Artificial sequence
  SiRNA target sequence
ctacatccaataataggac

SEQ ID NO: 19656 - DNA, 19 bp, Artificial sequence
  SiRNA target sequence
tacatccaataataggaca

SEQ ID NO: 19657 - DNA, 19 bp, Artificial sequence
  SiRNA target sequence
acatccaataataggacat

SEQ ID NO: 19658 - DNA, 19 bp, Artificial sequence
  SiRNA target sequence
catccaataataggacatc

SEQ ID NO: 19659 - DNA, 19 bp, Artificial sequence
  SiRNA target sequence
atccaataataggacatct

SEQ ID NO: 19660 - DNA, 19 bp, Artificial sequence
  SiRNA target sequence
tccaataataggacatctt

SEQ ID NO: 19661 - DNA, 19 bp, Artificial sequence
  SiRNA target sequence
ccaataataggacatcttt

SEQ ID NO: 19662 - DNA, 19 bp, Artificial sequence
  SiRNA target sequence
caataataggacatctttt

SEQ ID NO: 19663 - DNA, 19 bp, Artificial sequence
  SiRNA target sequence
aataataggacatctttta

SEQ ID NO: 19664 - DNA, 19 bp, Artificial sequence
  SiRNA target sequence
ataataggacatcttttat

SEQ ID NO: 19665 - DNA, 19 bp, Artificial sequence
  SiRNA target sequence
taataggacatcttttatt

SEQ ID NO: 19666 - DNA, 19 bp, Artificial sequence
  SiRNA target sequence
aataggacatcttttattt

SEQ ID NO: 19667 - DNA, 19 bp, Artificial sequence
  SiRNA target sequence
ataggacatcttttatttt

SEQ ID NO: 19668 - DNA, 19 bp, Artificial sequence
  SiRNA target sequence
taggacatcttttattttt

SEQ ID NO: 19669 - DNA, 19 bp, Artificial sequence
  SiRNA target sequence
aggacatcttttatttttc

SEQ ID NO: 19670 - DNA, 19 bp, Artificial sequence
  SiRNA target sequence
ggacatcttttatttttcc

SEQ ID NO: 19671 - DNA, 19 bp, Artificial sequence
  SiRNA target sequence
gacatcttttatttttcct

SEQ ID NO: 19672 - DNA, 19 bp, Artificial sequence
  SiRNA target sequence
acatcttttatttttcctt

SEQ ID NO: 19673 - DNA, 19 bp, Artificial sequence
  SiRNA target sequence
catcttttatttttccttc

SEQ ID NO: 19674 - DNA, 19 bp, Artificial sequence
  SiRNA target sequence
atcttttatttttccttct

SEQ ID NO: 19675 - DNA, 19 bp, Artificial sequence
  SiRNA target sequence
tcttttatttttccttcta

SEQ ID NO: 19676 - DNA, 19 bp, Artificial sequence
  SiRNA target sequence
cttttatttttccttctaa

SEQ ID NO: 19677 - DNA, 19 bp, Artificial sequence
  SiRNA target sequence
ttttatttttccttctaac

SEQ ID NO: 19678 - DNA, 19 bp, Artificial sequence
  SiRNA target sequence
tttatttttccttctaaca

SEQ ID NO: 19679 - DNA, 19 bp, Artificial sequence
  SiRNA target sequence
ttatttttccttctaacac

SEQ ID NO: 19680 - DNA, 19 bp, Artificial sequence
  SiRNA target sequence
tatttttccttctaacacg

SEQ ID NO: 19681 - DNA, 19 bp, Artificial sequence
  SiRNA target sequence
atttttccttctaacacgc

SEQ ID NO: 19682 - DNA, 19 bp, Artificial sequence
  SiRNA target sequence
tttttccttctaacacgcc

SEQ ID NO: 19683 - DNA, 19 bp, Artificial sequence
  SiRNA target sequence
ttttccttctaacacgcct

SEQ ID NO: 19684 - DNA, 19 bp, Artificial sequence
  SiRNA target sequence
tttccttctaacacgcctg

SEQ ID NO: 19685 - DNA, 19 bp, Artificial sequence
  SiRNA target sequence
ttccttctaacacgcctgc

SEQ ID NO: 19686 - DNA, 19 bp, Artificial sequence
  SiRNA target sequence
tccttctaacacgcctgct

SEQ ID NO: 19687 - DNA, 19 bp, Artificial sequence
  SiRNA target sequence
ccttctaacacgcctgctt

SEQ ID NO: 19688 - DNA, 19 bp, Artificial sequence
  SiRNA target sequence
cttctaacacgcctgcttg

SEQ ID NO: 19689 - DNA, 19 bp, Artificial sequence
  SiRNA target sequence
ttctaacacgcctgcttgt

SEQ ID NO: 19690 - DNA, 19 bp, Artificial sequence
  SiRNA target sequence
tctaacacgcctgcttgta

SEQ ID NO: 19691 - DNA, 19 bp, Artificial sequence
  SiRNA target sequence
ctaacacgcctgcttgtag

SEQ ID NO: 19692 - DNA, 19 bp, Artificial sequence
  SiRNA target sequence
taacacgcctgcttgtaga

SEQ ID NO: 19693 - DNA, 19 bp, Artificial sequence
  SiRNA target sequence
aacacgcctgcttgtagag

SEQ ID NO: 19694 - DNA, 19 bp, Artificial sequence
  SiRNA target sequence
acacgcctgcttgtagagc

SEQ ID NO: 19695 - DNA, 19 bp, Artificial sequence
  SiRNA target sequence
cacgcctgcttgtagagcg

SEQ ID NO: 19696 - DNA, 19 bp, Artificial sequence
  SiRNA target sequence
acgcctgcttgtagagcgg

SEQ ID NO: 19697 - DNA, 19 bp, Artificial sequence
  SiRNA target sequence
cgcctgcttgtagagcggc

SEQ ID NO: 19698 - DNA, 19 bp, Artificial sequence
  SiRNA target sequence
gcctgcttgtagagcggcc

SEQ ID NO: 19699 - DNA, 19 bp, Artificial sequence
  SiRNA target sequence
cctgcttgtagagcggccc

SEQ ID NO: 19700 - DNA, 19 bp, Artificial sequence
  SiRNA target sequence
ctgcttgtagagcggcccc

SEQ ID NO: 19701 - DNA, 19 bp, Artificial sequence
  SiRNA target sequence
tgcttgtagagcggcccct

SEQ ID NO: 19702 - DNA, 19 bp, Artificial sequence
  SiRNA target sequence
gcttgtagagcggcccctt

SEQ ID NO: 19703 - DNA, 19 bp, Artificial sequence
  SiRNA target sequence
cttgtagagcggccccttt

SEQ ID NO: 19704 - DNA, 19 bp, Artificial sequence
  SiRNA target sequence
ttgtagagcggccccttta

SEQ ID NO: 19705 - DNA, 19 bp, Artificial sequence
  SiRNA target sequence
tgtagagcggcccctttag

SEQ ID NO: 19706 - DNA, 19 bp, Artificial sequence
  SiRNA target sequence
gtagagcggcccctttagc

SEQ ID NO: 19707 - DNA, 19 bp, Artificial sequence
  SiRNA target sequence
tagagcggcccctttagca

SEQ ID NO: 19708 - DNA, 19 bp, Artificial sequence
  SiRNA target sequence
agagcggcccctttagcaa

SEQ ID NO: 19709 - DNA, 19 bp, Artificial sequence
  SiRNA target sequence
gagcggcccctttagcaac

SEQ ID NO: 19710 - DNA, 19 bp, Artificial sequence
  SiRNA target sequence
agcggcccctttagcaaca

SEQ ID NO: 19711 - DNA, 19 bp, Artificial sequence
  SiRNA target sequence
gcggcccctttagcaacag

SEQ ID NO: 19712 - DNA, 19 bp, Artificial sequence
  SiRNA target sequence
cggcccctttagcaacagc

SEQ ID NO: 19713 - DNA, 19 bp, Artificial sequence
  SiRNA target sequence
ggcccctttagcaacagct

SEQ ID NO: 19714 - DNA, 19 bp, Artificial sequence
  SiRNA target sequence
gcccctttagcaacagctt

SEQ ID NO: 19715 - DNA, 19 bp, Artificial sequence
  SiRNA target sequence
cccctttagcaacagcttc

SEQ ID NO: 19716 - DNA, 19 bp, Artificial sequence
  SiRNA target sequence
ccctttagcaacagcttca

SEQ ID NO: 19717 - DNA, 19 bp, Artificial sequence
  SiRNA target sequence
cctttagcaacagcttcat

SEQ ID NO: 19718 - DNA, 19 bp, Artificial sequence
  SiRNA target sequence
ctttagcaacagcttcatc

SEQ ID NO: 19719 - DNA, 19 bp, Artificial sequence
  SiRNA target sequence
tttagcaacagcttcatct

SEQ ID NO: 19720 - DNA, 19 bp, Artificial sequence
  SiRNA target sequence
ttagcaacagcttcatctg

SEQ ID NO: 19721 - DNA, 19 bp, Artificial sequence
  SiRNA target sequence
tagcaacagcttcatctgg

SEQ ID NO: 19722 - DNA, 19 bp, Artificial sequence
  SiRNA target sequence
agcaacagcttcatctgga

SEQ ID NO: 19723 - DNA, 19 bp, Artificial sequence
  SiRNA target sequence
gcaacagcttcatctggat

SEQ ID NO: 19724 - DNA, 19 bp, Artificial sequence
  SiRNA target sequence
caacagcttcatctggatt

SEQ ID NO: 19725 - DNA, 19 bp, Artificial sequence
  SiRNA target sequence
aacagcttcatctggatta

SEQ ID NO: 19726 - DNA, 19 bp, Artificial sequence
  SiRNA target sequence
acagcttcatctggattaa

SEQ ID NO: 19727 - DNA, 19 bp, Artificial sequence
  SiRNA target sequence
cagcttcatctggattaat

SEQ ID NO: 19728 - DNA, 19 bp, Artificial sequence
  SiRNA target sequence
agcttcatctggattaata

SEQ ID NO: 19729 - DNA, 19 bp, Artificial sequence
  SiRNA target sequence
gcttcatctggattaatat

SEQ ID NO: 19730 - DNA, 19 bp, Artificial sequence
  SiRNA target sequence
cttcatctggattaatatt

SEQ ID NO: 19731 - DNA, 19 bp, Artificial sequence
  SiRNA target sequence
ttcatctggattaatattt

SEQ ID NO: 19732 - DNA, 19 bp, Artificial sequence
  SiRNA target sequence
tcatctggattaatatttg

SEQ ID NO: 19733 - DNA, 19 bp, Artificial sequence
  SiRNA target sequence
catctggattaatatttgt

SEQ ID NO: 19734 - DNA, 19 bp, Artificial sequence
  SiRNA target sequence
atctggattaatatttgta

SEQ ID NO: 19735 - DNA, 19 bp, Artificial sequence
  SiRNA target sequence
tctggattaatatttgtag

SEQ ID NO: 19736 - DNA, 19 bp, Artificial sequence
  SiRNA target sequence
ctggattaatatttgtaga

SEQ ID NO: 19737 - DNA, 19 bp, Artificial sequence
  SiRNA target sequence
tggattaatatttgtagaa

SEQ ID NO: 19738 - DNA, 19 bp, Artificial sequence
  SiRNA target sequence
ggattaatatttgtagaag

SEQ ID NO: 19739 - DNA, 19 bp, Artificial sequence
  SiRNA target sequence
gattaatatttgtagaagg

SEQ ID NO: 19740 - DNA, 19 bp, Artificial sequence
  SiRNA target sequence
attaatatttgtagaaggc

SEQ ID NO: 19741 - DNA, 19 bp, Artificial sequence
  SiRNA target sequence
ttaatatttgtagaaggct

SEQ ID NO: 19742 - DNA, 19 bp, Artificial sequence
  SiRNA target sequence
taatatttgtagaaggctc

SEQ ID NO: 19743 - DNA, 19 bp, Artificial sequence
  SiRNA target sequence
aatatttgtagaaggctcg

SEQ ID NO: 19744 - DNA, 19 bp, Artificial sequence
  SiRNA target sequence
atatttgtagaaggctcga

SEQ ID NO: 19745 - DNA, 19 bp, Artificial sequence
  SiRNA target sequence
tatttgtagaaggctcgat

SEQ ID NO: 19746 - DNA, 19 bp, Artificial sequence
  SiRNA target sequence
atttgtagaaggctcgata

SEQ ID NO: 19747 - DNA, 19 bp, Artificial sequence
  SiRNA target sequence
tttgtagaaggctcgatac

SEQ ID NO: 19748 - DNA, 19 bp, Artificial sequence
  SiRNA target sequence
ttgtagaaggctcgatacc

SEQ ID NO: 19749 - DNA, 19 bp, Artificial sequence
  SiRNA target sequence
tgtagaaggctcgatacca

SEQ ID NO: 19750 - DNA, 19 bp, Artificial sequence
  SiRNA target sequence
gtagaaggctcgataccaa

SEQ ID NO: 19751 - DNA, 19 bp, Artificial sequence
  SiRNA target sequence
tagaaggctcgataccaaa

SEQ ID NO: 19752 - DNA, 19 bp, Artificial sequence
  SiRNA target sequence
agaaggctcgataccaaaa

SEQ ID NO: 19753 - DNA, 19 bp, Artificial sequence
  SiRNA target sequence
gaaggctcgataccaaaaa

SEQ ID NO: 19754 - DNA, 19 bp, Artificial sequence
  SiRNA target sequence
aaggctcgataccaaaaat

SEQ ID NO: 19755 - DNA, 19 bp, Artificial sequence
  SiRNA target sequence
aggctcgataccaaaaatc

SEQ ID NO: 19756 - DNA, 19 bp, Artificial sequence
  SiRNA target sequence
ggctcgataccaaaaatct

SEQ ID NO: 19757 - DNA, 19 bp, Artificial sequence
  SiRNA target sequence
gctcgataccaaaaatctt

SEQ ID NO: 19758 - DNA, 19 bp, Artificial sequence
  SiRNA target sequence
ctcgataccaaaaatcttc

SEQ ID NO: 19759 - DNA, 19 bp, Artificial sequence
  SiRNA target sequence
tcgataccaaaaatcttct

SEQ ID NO: 19760 - DNA, 19 bp, Artificial sequence
  SiRNA target sequence
cgataccaaaaatcttctt

SEQ ID NO: 19761 - DNA, 19 bp, Artificial sequence
  SiRNA target sequence
gataccaaaaatcttctta

SEQ ID NO: 19762 - DNA, 19 bp, Artificial sequence
  SiRNA target sequence
ataccaaaaatcttcttaa

SEQ ID NO: 19763 - DNA, 19 bp, Artificial sequence
  SiRNA target sequence
taccaaaaatcttcttaac

SEQ ID NO: 19764 - DNA, 19 bp, Artificial sequence
  SiRNA target sequence
accaaaaatcttcttaaca

SEQ ID NO: 19765 - DNA, 19 bp, Artificial sequence
  SiRNA target sequence
ccaaaaatcttcttaacaa

SEQ ID NO: 19766 - DNA, 19 bp, Artificial sequence
  SiRNA target sequence
caaaaatcttcttaacaag

SEQ ID NO: 19767 - DNA, 19 bp, Artificial sequence
  SiRNA target sequence
aaaaatcttcttaacaagt

SEQ ID NO: 19768 - DNA, 19 bp, Artificial sequence
  SiRNA target sequence
aaaatcttcttaacaagtt

SEQ ID NO: 19769 - DNA, 19 bp, Artificial sequence
  SiRNA target sequence
aaatcttcttaacaagttt

SEQ ID NO: 19770 - DNA, 19 bp, Artificial sequence
  SiRNA target sequence
aatcttcttaacaagtttt

SEQ ID NO: 19771 - DNA, 19 bp, Artificial sequence
  SiRNA target sequence
atcttcttaacaagttttc

SEQ ID NO: 19772 - DNA, 19 bp, Artificial sequence
  SiRNA target sequence
tcttcttaacaagttttct

SEQ ID NO: 19773 - DNA, 19 bp, Artificial sequence
  SiRNA target sequence
cttcttaacaagttttcta

SEQ ID NO: 19774 - DNA, 19 bp, Artificial sequence
  SiRNA target sequence
ttcttaacaagttttctaa

SEQ ID NO: 19775 - DNA, 19 bp, Artificial sequence
  SiRNA target sequence
tcttaacaagttttctaac

SEQ ID NO: 19776 - DNA, 19 bp, Artificial sequence
  SiRNA target sequence
cttaacaagttttctaaca

SEQ ID NO: 19777 - DNA, 19 bp, Artificial sequence
  SiRNA target sequence
ttaacaagttttctaacat

SEQ ID NO: 19778 - DNA, 19 bp, Artificial sequence
  SiRNA target sequence
taacaagttttctaacata

SEQ ID NO: 19779 - DNA, 19 bp, Artificial sequence
  SiRNA target sequence
aacaagttttctaacatac

SEQ ID NO: 19780 - DNA, 19 bp, Artificial sequence
  SiRNA target sequence
acaagttttctaacatacg

SEQ ID NO: 19781 - DNA, 19 bp, Artificial sequence
  SiRNA target sequence
caagttttctaacatacgg

SEQ ID NO: 19782 - DNA, 19 bp, Artificial sequence
  SiRNA target sequence
aagttttctaacatacggc

SEQ ID NO: 19783 - DNA, 19 bp, Artificial sequence
  SiRNA target sequence
agttttctaacatacggca

SEQ ID NO: 19784 - DNA, 19 bp, Artificial sequence
  SiRNA target sequence
gttttctaacatacggcat

SEQ ID NO: 19785 - DNA, 19 bp, Artificial sequence
  SiRNA target sequence
ttttctaacatacggcatt

SEQ ID NO: 19786 - DNA, 19 bp, Artificial sequence
  SiRNA target sequence
tttctaacatacggcattc

SEQ ID NO: 19787 - DNA, 19 bp, Artificial sequence
  SiRNA target sequence
ttctaacatacggcattcg

SEQ ID NO: 19788 - DNA, 19 bp, Artificial sequence
  SiRNA target sequence
tctaacatacggcattcgt

SEQ ID NO: 19789 - DNA, 19 bp, Artificial sequence
  SiRNA target sequence
ctaacatacggcattcgtg

SEQ ID NO: 19790 - DNA, 19 bp, Artificial sequence
  SiRNA target sequence
taacatacggcattcgtgt

SEQ ID NO: 19791 - DNA, 19 bp, Artificial sequence
  SiRNA target sequence
aacatacggcattcgtgtc

SEQ ID NO: 19792 - DNA, 19 bp, Artificial sequence
  SiRNA target sequence
acatacggcattcgtgtca

SEQ ID NO: 19793 - DNA, 19 bp, Artificial sequence
  SiRNA target sequence
catacggcattcgtgtcat

SEQ ID NO: 19794 - DNA, 19 bp, Artificial sequence
  SiRNA target sequence
atacggcattcgtgtcatt

SEQ ID NO: 19795 - DNA, 19 bp, Artificial sequence
  SiRNA target sequence
tacggcattcgtgtcattc

SEQ ID NO: 19796 - DNA, 19 bp, Artificial sequence
  SiRNA target sequence
acggcattcgtgtcattcc

SEQ ID NO: 19797 - DNA, 19 bp, Artificial sequence
  SiRNA target sequence
cggcattcgtgtcattcca

SEQ ID NO: 19798 - DNA, 19 bp, Artificial sequence
  SiRNA target sequence
ggcattcgtgtcattccac

SEQ ID NO: 19799 - DNA, 19 bp, Artificial sequence
  SiRNA target sequence
gcattcgtgtcattccacc

SEQ ID NO: 19800 - DNA, 19 bp, Artificial sequence
  SiRNA target sequence
cattcgtgtcattccaccc

SEQ ID NO: 19801 - DNA, 19 bp, Artificial sequence
  SiRNA target sequence
attcgtgtcattccaccca

SEQ ID NO: 19802 - DNA, 19 bp, Artificial sequence
  SiRNA target sequence
ttcgtgtcattccacccac

SEQ ID NO: 19803 - DNA, 19 bp, Artificial sequence
  SiRNA target sequence
tcgtgtcattccacccaca

SEQ ID NO: 19804 - DNA, 19 bp, Artificial sequence
  SiRNA target sequence
cgtgtcattccacccacaa

SEQ ID NO: 19805 - DNA, 19 bp, Artificial sequence
  SiRNA target sequence
gtgtcattccacccacaag

SEQ ID NO: 19806 - DNA, 19 bp, Artificial sequence
  SiRNA target sequence
tgtcattccacccacaagt

SEQ ID NO: 19807 - DNA, 19 bp, Artificial sequence
  SiRNA target sequence
gtcattccacccacaagta

SEQ ID NO: 19808 - DNA, 19 bp, Artificial sequence
  SiRNA target sequence
tcattccacccacaagtat

SEQ ID NO: 19809 - DNA, 19 bp, Artificial sequence
  SiRNA target sequence
cattccacccacaagtata

SEQ ID NO: 19810 - DNA, 19 bp, Artificial sequence
  SiRNA target sequence
attccacccacaagtataa

SEQ ID NO: 19811 - DNA, 19 bp, Artificial sequence
  SiRNA target sequence
ttccacccacaagtataac

SEQ ID NO: 19812 - DNA, 19 bp, Artificial sequence
  SiRNA target sequence
tccacccacaagtataacg

SEQ ID NO: 19813 - DNA, 19 bp, Artificial sequence
  SiRNA target sequence
ccacccacaagtataacgt

SEQ ID NO: 19814 - DNA, 19 bp, Artificial sequence
  SiRNA target sequence
cacccacaagtataacgtg

SEQ ID NO: 19815 - DNA, 19 bp, Artificial sequence
  SiRNA target sequence
acccacaagtataacgtgt

SEQ ID NO: 19816 - DNA, 19 bp, Artificial sequence
  SiRNA target sequence
cccacaagtataacgtgtt

SEQ ID NO: 19817 - DNA, 19 bp, Artificial sequence
  SiRNA target sequence
ccacaagtataacgtgttt

SEQ ID NO: 19818 - DNA, 19 bp, Artificial sequence
  SiRNA target sequence
cacaagtataacgtgttta

SEQ ID NO: 19819 - DNA, 19 bp, Artificial sequence
  SiRNA target sequence
acaagtataacgtgtttaa

SEQ ID NO: 19820 - DNA, 19 bp, Artificial sequence
  SiRNA target sequence
caagtataacgtgtttaat

SEQ ID NO: 19821 - DNA, 19 bp, Artificial sequence
  SiRNA target sequence
aagtataacgtgtttaata

SEQ ID NO: 19822 - DNA, 19 bp, Artificial sequence
  SiRNA target sequence
agtataacgtgtttaatat

SEQ ID NO: 19823 - DNA, 19 bp, Artificial sequence
  SiRNA target sequence
gtataacgtgtttaatatc

SEQ ID NO: 19824 - DNA, 19 bp, Artificial sequence
  SiRNA target sequence
tataacgtgtttaatatca

SEQ ID NO: 19825 - DNA, 19 bp, Artificial sequence
  SiRNA target sequence
ataacgtgtttaatatcac

SEQ ID NO: 19826 - DNA, 19 bp, Artificial sequence
  SiRNA target sequence
taacgtgtttaatatcact

SEQ ID NO: 19827 - DNA, 19 bp, Artificial sequence
  SiRNA target sequence
aacgtgtttaatatcactt

SEQ ID NO: 19828 - DNA, 19 bp, Artificial sequence
  SiRNA target sequence
acgtgtttaatatcacttt

SEQ ID NO: 19829 - DNA, 19 bp, Artificial sequence
  SiRNA target sequence
cgtgtttaatatcactttt

SEQ ID NO: 19830 - DNA, 19 bp, Artificial sequence
  SiRNA target sequence
gtgtttaatatcactttta

SEQ ID NO: 19831 - DNA, 19 bp, Artificial sequence
  SiRNA target sequence
tgtttaatatcacttttag

SEQ ID NO: 19832 - DNA, 19 bp, Artificial sequence
  SiRNA target sequence
gtttaatatcacttttagt

SEQ ID NO: 19833 - DNA, 19 bp, Artificial sequence
  SiRNA target sequence
tttaatatcacttttagtt

SEQ ID NO: 19834 - DNA, 19 bp, Artificial sequence
  SiRNA target sequence
ttaatatcacttttagtta

SEQ ID NO: 19835 - DNA, 19 bp, Artificial sequence
  SiRNA target sequence
taatatcacttttagttat

SEQ ID NO: 19836 - DNA, 19 bp, Artificial sequence
  SiRNA target sequence
aatatcacttttagttata

SEQ ID NO: 19837 - DNA, 19 bp, Artificial sequence
  SiRNA target sequence
atatcacttttagttatat

SEQ ID NO: 19838 - DNA, 19 bp, Artificial sequence
  SiRNA target sequence
tatcacttttagttatatt

SEQ ID NO: 19839 - DNA, 19 bp, Artificial sequence
  SiRNA target sequence
atcacttttagttatattg

SEQ ID NO: 19840 - DNA, 19 bp, Artificial sequence
  SiRNA target sequence
tcacttttagttatattgg

SEQ ID NO: 19841 - DNA, 19 bp, Artificial sequence
  SiRNA target sequence
cacttttagttatattggc

SEQ ID NO: 19842 - DNA, 19 bp, Artificial sequence
  SiRNA target sequence
acttttagttatattggca

SEQ ID NO: 19843 - DNA, 19 bp, Artificial sequence
  SiRNA target sequence
cttttagttatattggcat

SEQ ID NO: 19844 - DNA, 19 bp, Artificial sequence
  SiRNA target sequence
ttttagttatattggcatc

SEQ ID NO: 19845 - DNA, 19 bp, Artificial sequence
  SiRNA target sequence
tttagttatattggcatct

SEQ ID NO: 19846 - DNA, 19 bp, Artificial sequence
  SiRNA target sequence
ttagttatattggcatctc

SEQ ID NO: 19847 - DNA, 19 bp, Artificial sequence
  SiRNA target sequence
tagttatattggcatctct

SEQ ID NO: 19848 - DNA, 19 bp, Artificial sequence
  SiRNA target sequence
agttatattggcatctcta

SEQ ID NO: 19849 - DNA, 19 bp, Artificial sequence
  SiRNA target sequence
gttatattggcatctctaa

SEQ ID NO: 19850 - DNA, 19 bp, Artificial sequence
  SiRNA target sequence
ttatattggcatctctaat

SEQ ID NO: 19851 - DNA, 19 bp, Artificial sequence
  SiRNA target sequence
tatattggcatctctaata

SEQ ID NO: 19852 - DNA, 19 bp, Artificial sequence
  SiRNA target sequence
atattggcatctctaatag

SEQ ID NO: 19853 - DNA, 19 bp, Artificial sequence
  SiRNA target sequence
tattggcatctctaatagc

SEQ ID NO: 19854 - DNA, 19 bp, Artificial sequence
  SiRNA target sequence
attggcatctctaatagct

SEQ ID NO: 19855 - DNA, 19 bp, Artificial sequence
  SiRNA target sequence
ttggcatctctaatagctt

SEQ ID NO: 19856 - DNA, 19 bp, Artificial sequence
  SiRNA target sequence
tggcatctctaatagcttt

SEQ ID NO: 19857 - DNA, 19 bp, Artificial sequence
  SiRNA target sequence
ggcatctctaatagcttta

SEQ ID NO: 19858 - DNA, 19 bp, Artificial sequence
  SiRNA target sequence
gcatctctaatagctttaa

SEQ ID NO: 19859 - DNA, 19 bp, Artificial sequence
  SiRNA target sequence
catctctaatagctttaag

SEQ ID NO: 19860 - DNA, 19 bp, Artificial sequence
  SiRNA target sequence
atctctaatagctttaaga

SEQ ID NO: 19861 - DNA, 19 bp, Artificial sequence
  SiRNA target sequence
tctctaatagctttaagac

SEQ ID NO: 19862 - DNA, 19 bp, Artificial sequence
  SiRNA target sequence
ctctaatagctttaagaca

SEQ ID NO: 19863 - DNA, 19 bp, Artificial sequence
  SiRNA target sequence
tctaatagctttaagacag

SEQ ID NO: 19864 - DNA, 19 bp, Artificial sequence
  SiRNA target sequence
ctaatagctttaagacagg

SEQ ID NO: 19865 - DNA, 19 bp, Artificial sequence
  SiRNA target sequence
taatagctttaagacaggg

SEQ ID NO: 19866 - DNA, 19 bp, Artificial sequence
  SiRNA target sequence
aatagctttaagacagggg

SEQ ID NO: 19867 - DNA, 19 bp, Artificial sequence
  SiRNA target sequence
atagctttaagacaggggt

SEQ ID NO: 19868 - DNA, 19 bp, Artificial sequence
  SiRNA target sequence
tagctttaagacaggggtt

SEQ ID NO: 19869 - DNA, 19 bp, Artificial sequence
  SiRNA target sequence
agctttaagacaggggttt

SEQ ID NO: 19870 - DNA, 19 bp, Artificial sequence
  SiRNA target sequence
gctttaagacaggggttta

SEQ ID NO: 19871 - DNA, 19 bp, Artificial sequence
  SiRNA target sequence
ctttaagacaggggtttat

SEQ ID NO: 19872 - DNA, 19 bp, Artificial sequence
  SiRNA target sequence
tttaagacaggggtttatt

SEQ ID NO: 19873 - DNA, 19 bp, Artificial sequence
  SiRNA target sequence
ttaagacaggggtttattg

SEQ ID NO: 19874 - DNA, 19 bp, Artificial sequence
  SiRNA target sequence
taagacaggggtttattgt

SEQ ID NO: 19875 - DNA, 19 bp, Artificial sequence
  SiRNA target sequence
aagacaggggtttattgtt

SEQ ID NO: 19876 - DNA, 19 bp, Artificial sequence
  SiRNA target sequence
agacaggggtttattgttt

SEQ ID NO: 19877 - DNA, 19 bp, Artificial sequence
  SiRNA target sequence
gacaggggtttattgtttt

SEQ ID NO: 19878 - DNA, 19 bp, Artificial sequence
  SiRNA target sequence
acaggggtttattgttttg

SEQ ID NO: 19879 - DNA, 19 bp, Artificial sequence
  SiRNA target sequence
caggggtttattgttttgt

SEQ ID NO: 19880 - DNA, 19 bp, Artificial sequence
  SiRNA target sequence
aggggtttattgttttgtc

SEQ ID NO: 19881 - DNA, 19 bp, Artificial sequence
  SiRNA target sequence
ggggtttattgttttgtct

SEQ ID NO: 19882 - DNA, 19 bp, Artificial sequence
  SiRNA target sequence
gggtttattgttttgtcta

SEQ ID NO: 19883 - DNA, 19 bp, Artificial sequence
  SiRNA target sequence
ggtttattgttttgtctat

SEQ ID NO: 19884 - DNA, 19 bp, Artificial sequence
  SiRNA target sequence
gtttattgttttgtctatt

SEQ ID NO: 19885 - DNA, 19 bp, Artificial sequence
  SiRNA target sequence
tttattgttttgtctatta

SEQ ID NO: 19886 - DNA, 19 bp, Artificial sequence
  SiRNA target sequence
ttattgttttgtctattaa

SEQ ID NO: 19887 - DNA, 19 bp, Artificial sequence
  SiRNA target sequence
tattgttttgtctattaac

SEQ ID NO: 19888 - DNA, 19 bp, Artificial sequence
  SiRNA target sequence
attgttttgtctattaact

SEQ ID NO: 19889 - DNA, 19 bp, Artificial sequence
  SiRNA target sequence
ttgttttgtctattaactt

SEQ ID NO: 19890 - DNA, 19 bp, Artificial sequence
  SiRNA target sequence
tgttttgtctattaacttt

SEQ ID NO: 19891 - DNA, 19 bp, Artificial sequence
  SiRNA target sequence
gttttgtctattaactttt

SEQ ID NO: 19892 - DNA, 19 bp, Artificial sequence
  SiRNA target sequence
ttttgtctattaacttttt

SEQ ID NO: 19893 - DNA, 19 bp, Artificial sequence
  SiRNA target sequence
tttgtctattaactttttt

SEQ ID NO: 19894 - DNA, 19 bp, Artificial sequence
  SiRNA target sequence
ttgtctattaacttttttg

SEQ ID NO: 19895 - DNA, 19 bp, Artificial sequence
  SiRNA target sequence
tgtctattaacttttttgt

SEQ ID NO: 19896 - DNA, 19 bp, Artificial sequence
  SiRNA target sequence
gtctattaacttttttgta

SEQ ID NO: 19897 - DNA, 19 bp, Artificial sequence
  SiRNA target sequence
tctattaacttttttgtaa

SEQ ID NO: 19898 - DNA, 19 bp, Artificial sequence
  SiRNA target sequence
ctattaacttttttgtaat

SEQ ID NO: 19899 - DNA, 19 bp, Artificial sequence
  SiRNA target sequence
tattaacttttttgtaatt

SEQ ID NO: 19900 - DNA, 19 bp, Artificial sequence
  SiRNA target sequence
attaacttttttgtaattt

SEQ ID NO: 19901 - DNA, 19 bp, Artificial sequence
  SiRNA target sequence
ttaacttttttgtaatttt

SEQ ID NO: 19902 - DNA, 19 bp, Artificial sequence
  SiRNA target sequence
taacttttttgtaattttt

SEQ ID NO: 19903 - DNA, 19 bp, Artificial sequence
  SiRNA target sequence
aacttttttgtaatttttt

SEQ ID NO: 19904 - DNA, 19 bp, Artificial sequence
  SiRNA target sequence
acttttttgtaattttttc

SEQ ID NO: 19905 - DNA, 19 bp, Artificial sequence
  SiRNA target sequence
cttttttgtaattttttca

SEQ ID NO: 19906 - DNA, 19 bp, Artificial sequence
  SiRNA target sequence
ttttttgtaattttttcaa

SEQ ID NO: 19907 - DNA, 19 bp, Artificial sequence
  SiRNA target sequence
tttttgtaattttttcaaa

SEQ ID NO: 19908 - DNA, 19 bp, Artificial sequence
  SiRNA target sequence
ttttgtaattttttcaaat

SEQ ID NO: 19909 - DNA, 19 bp, Artificial sequence
  SiRNA target sequence
tttgtaattttttcaaatt

SEQ ID NO: 19910 - DNA, 19 bp, Artificial sequence
  SiRNA target sequence
ttgtaattttttcaaattc

SEQ ID NO: 19911 - DNA, 19 bp, Artificial sequence
  SiRNA target sequence
tgtaattttttcaaattcg

SEQ ID NO: 19912 - DNA, 19 bp, Artificial sequence
  SiRNA target sequence
gtaattttttcaaattcgt

SEQ ID NO: 19913 - DNA, 19 bp, Artificial sequence
  SiRNA target sequence
taattttttcaaattcgtc

SEQ ID NO: 19914 - DNA, 19 bp, Artificial sequence
  SiRNA target sequence
aattttttcaaattcgtcg

SEQ ID NO: 19915 - DNA, 19 bp, Artificial sequence
  SiRNA target sequence
attttttcaaattcgtcgc

SEQ ID NO: 19916 - DNA, 19 bp, Artificial sequence
  SiRNA target sequence
ttttttcaaattcgtcgcg

SEQ ID NO: 19917 - DNA, 19 bp, Artificial sequence
  SiRNA target sequence
tttttcaaattcgtcgcgt

SEQ ID NO: 19918 - DNA, 19 bp, Artificial sequence
  SiRNA target sequence
ttttcaaattcgtcgcgtg

SEQ ID NO: 19919 - DNA, 19 bp, Artificial sequence
  SiRNA target sequence
tttcaaattcgtcgcgtgt

SEQ ID NO: 19920 - DNA, 19 bp, Artificial sequence
  SiRNA target sequence
ttcaaattcgtcgcgtgta

SEQ ID NO: 19921 - DNA, 19 bp, Artificial sequence
  SiRNA target sequence
tcaaattcgtcgcgtgtaa

SEQ ID NO: 19922 - DNA, 19 bp, Artificial sequence
  SiRNA target sequence
caaattcgtcgcgtgtaat

SEQ ID NO: 19923 - DNA, 19 bp, Artificial sequence
  SiRNA target sequence
aaattcgtcgcgtgtaatt

SEQ ID NO: 19924 - DNA, 19 bp, Artificial sequence
  SiRNA target sequence
aattcgtcgcgtgtaatta

SEQ ID NO: 19925 - DNA, 19 bp, Artificial sequence
  SiRNA target sequence
attcgtcgcgtgtaattac

SEQ ID NO: 19926 - DNA, 19 bp, Artificial sequence
  SiRNA target sequence
ttcgtcgcgtgtaattacc

SEQ ID NO: 19927 - DNA, 19 bp, Artificial sequence
  SiRNA target sequence
tcgtcgcgtgtaattacct

SEQ ID NO: 19928 - DNA, 19 bp, Artificial sequence
  SiRNA target sequence
cgtcgcgtgtaattacctc

SEQ ID NO: 19929 - DNA, 19 bp, Artificial sequence
  SiRNA target sequence
gtcgcgtgtaattacctct

SEQ ID NO: 19930 - DNA, 19 bp, Artificial sequence
  SiRNA target sequence
tcgcgtgtaattacctctt

SEQ ID NO: 19931 - DNA, 19 bp, Artificial sequence
  SiRNA target sequence
cgcgtgtaattacctcttt

SEQ ID NO: 19932 - DNA, 19 bp, Artificial sequence
  SiRNA target sequence
gcgtgtaattacctctttt

SEQ ID NO: 19933 - DNA, 19 bp, Artificial sequence
  SiRNA target sequence
cgtgtaattacctctttta

SEQ ID NO: 19934 - DNA, 19 bp, Artificial sequence
  SiRNA target sequence
gtgtaattacctcttttaa

SEQ ID NO: 19935 - DNA, 19 bp, Artificial sequence
  SiRNA target sequence
tgtaattacctcttttaag

SEQ ID NO: 19936 - DNA, 19 bp, Artificial sequence
  SiRNA target sequence
gtaattacctcttttaagt

SEQ ID NO: 19937 - DNA, 19 bp, Artificial sequence
  SiRNA target sequence
taattacctcttttaagtg

SEQ ID NO: 19938 - DNA, 19 bp, Artificial sequence
  SiRNA target sequence
aattacctcttttaagtga

SEQ ID NO: 19939 - DNA, 19 bp, Artificial sequence
  SiRNA target sequence
attacctcttttaagtgat

SEQ ID NO: 19940 - DNA, 19 bp, Artificial sequence
  SiRNA target sequence
ttacctcttttaagtgata

SEQ ID NO: 19941 - DNA, 19 bp, Artificial sequence
  SiRNA target sequence
tacctcttttaagtgataa

SEQ ID NO: 19942 - DNA, 19 bp, Artificial sequence
  SiRNA target sequence
acctcttttaagtgataat

SEQ ID NO: 19943 - DNA, 19 bp, Artificial sequence
  SiRNA target sequence
cctcttttaagtgataatt

SEQ ID NO: 19944 - DNA, 19 bp, Artificial sequence
  SiRNA target sequence
ctcttttaagtgataattc

SEQ ID NO: 19945 - DNA, 19 bp, Artificial sequence
  SiRNA target sequence
tcttttaagtgataattct

SEQ ID NO: 19946 - DNA, 19 bp, Artificial sequence
  SiRNA target sequence
cttttaagtgataattctt

SEQ ID NO: 19947 - DNA, 19 bp, Artificial sequence
  SiRNA target sequence
ttttaagtgataattcttt

SEQ ID NO: 19948 - DNA, 19 bp, Artificial sequence
  SiRNA target sequence
tttaagtgataattctttt

SEQ ID NO: 19949 - DNA, 19 bp, Artificial sequence
  SiRNA target sequence
ttaagtgataattcttttt

SEQ ID NO: 19950 - DNA, 19 bp, Artificial sequence
  SiRNA target sequence
taagtgataattcttttta

SEQ ID NO: 19951 - DNA, 19 bp, Artificial sequence
  SiRNA target sequence
aagtgataattctttttac

SEQ ID NO: 19952 - DNA, 19 bp, Artificial sequence
  SiRNA target sequence
agtgataattctttttact

SEQ ID NO: 19953 - DNA, 19 bp, Artificial sequence
  SiRNA target sequence
gtgataattctttttacta

SEQ ID NO: 19954 - DNA, 19 bp, Artificial sequence
  SiRNA target sequence
tgataattctttttactat

SEQ ID NO: 19955 - DNA, 19 bp, Artificial sequence
  SiRNA target sequence
gataattctttttactatc

SEQ ID NO: 19956 - DNA, 19 bp, Artificial sequence
  SiRNA target sequence
ataattctttttactatcg

SEQ ID NO: 19957 - DNA, 19 bp, Artificial sequence
  SiRNA target sequence
taattctttttactatcgt

SEQ ID NO: 19958 - DNA, 19 bp, Artificial sequence
  SiRNA target sequence
aattctttttactatcgtt

SEQ ID NO: 19959 - DNA, 19 bp, Artificial sequence
  SiRNA target sequence
attctttttactatcgtta

SEQ ID NO: 19960 - DNA, 19 bp, Artificial sequence
  SiRNA target sequence
ttctttttactatcgttat

SEQ ID NO: 19961 - DNA, 19 bp, Artificial sequence
  SiRNA target sequence
tctttttactatcgttata

SEQ ID NO: 19962 - DNA, 19 bp, Artificial sequence
  SiRNA target sequence
ctttttactatcgttataa

SEQ ID NO: 19963 - DNA, 19 bp, Artificial sequence
  SiRNA target sequence
tttttactatcgttataaa

SEQ ID NO: 19964 - DNA, 19 bp, Artificial sequence
  SiRNA target sequence
ttttactatcgttataaat

SEQ ID NO: 19965 - DNA, 19 bp, Artificial sequence
  SiRNA target sequence
tttactatcgttataaata

SEQ ID NO: 19966 - DNA, 19 bp, Artificial sequence
  SiRNA target sequence
ttactatcgttataaatat

SEQ ID NO: 19967 - DNA, 19 bp, Artificial sequence
  SiRNA target sequence
tactatcgttataaatata

SEQ ID NO: 19968 - DNA, 19 bp, Artificial sequence
  SiRNA target sequence
actatcgttataaatatac

SEQ ID NO: 19969 - DNA, 19 bp, Artificial sequence
  SiRNA target sequence
ctatcgttataaatatacg

SEQ ID NO: 19970 - DNA, 19 bp, Artificial sequence
  SiRNA target sequence
tatcgttataaatatacgg

SEQ ID NO: 19971 - DNA, 19 bp, Artificial sequence
  SiRNA target sequence
atcgttataaatatacgga

SEQ ID NO: 19972 - DNA, 19 bp, Artificial sequence
  SiRNA target sequence
tcgttataaatatacggaa

SEQ ID NO: 19973 - DNA, 19 bp, Artificial sequence
  SiRNA target sequence
cgttataaatatacggaat

SEQ ID NO: 19974 - DNA, 19 bp, Artificial sequence
  SiRNA target sequence
gttataaatatacggaata

SEQ ID NO: 19975 - DNA, 19 bp, Artificial sequence
  SiRNA target sequence
ttataaatatacggaatat

SEQ ID NO: 19976 - DNA, 19 bp, Artificial sequence
  SiRNA target sequence
tataaatatacggaatatt

SEQ ID NO: 19977 - DNA, 19 bp, Artificial sequence
  SiRNA target sequence
ataaatatacggaatatta

SEQ ID NO: 19978 - DNA, 19 bp, Artificial sequence
  SiRNA target sequence
taaatatacggaatattaa

SEQ ID NO: 19979 - DNA, 19 bp, Artificial sequence
  SiRNA target sequence
aaatatacggaatattaat

SEQ ID NO: 19980 - DNA, 19 bp, Artificial sequence
  SiRNA target sequence
aatatacggaatattaatt

SEQ ID NO: 19981 - DNA, 19 bp, Artificial sequence
  SiRNA target sequence
atatacggaatattaattt

SEQ ID NO: 19982 - DNA, 19 bp, Artificial sequence
  SiRNA target sequence
tatacggaatattaatttc

SEQ ID NO: 19983 - DNA, 19 bp, Artificial sequence
  SiRNA target sequence
atacggaatattaatttca

SEQ ID NO: 19984 - DNA, 19 bp, Artificial sequence
  SiRNA target sequence
tacggaatattaatttcag

SEQ ID NO: 19985 - DNA, 19 bp, Artificial sequence
  SiRNA target sequence
acggaatattaatttcaga

SEQ ID NO: 19986 - DNA, 19 bp, Artificial sequence
  SiRNA target sequence
cggaatattaatttcagac

SEQ ID NO: 19987 - DNA, 19 bp, Artificial sequence
  SiRNA target sequence
ggaatattaatttcagacg

SEQ ID NO: 19988 - DNA, 19 bp, Artificial sequence
  SiRNA target sequence
gaatattaatttcagacga

SEQ ID NO: 19989 - DNA, 19 bp, Artificial sequence
  SiRNA target sequence
aatattaatttcagacgaa

SEQ ID NO: 19990 - DNA, 19 bp, Artificial sequence
  SiRNA target sequence
atattaatttcagacgaaa

SEQ ID NO: 19991 - DNA, 19 bp, Artificial sequence
  SiRNA target sequence
tattaatttcagacgaaag

SEQ ID NO: 19992 - DNA, 19 bp, Artificial sequence
  SiRNA target sequence
attaatttcagacgaaaga

SEQ ID NO: 19993 - DNA, 19 bp, Artificial sequence
  SiRNA target sequence
ttaatttcagacgaaagat

SEQ ID NO: 19994 - DNA, 19 bp, Artificial sequence
  SiRNA target sequence
taatttcagacgaaagatt

SEQ ID NO: 19995 - DNA, 19 bp, Artificial sequence
  SiRNA target sequence
aatttcagacgaaagatta

SEQ ID NO: 19996 - DNA, 19 bp, Artificial sequence
  SiRNA target sequence
atttcagacgaaagattag

SEQ ID NO: 19997 - DNA, 19 bp, Artificial sequence
  SiRNA target sequence
tttcagacgaaagattaga

SEQ ID NO: 19998 - DNA, 19 bp, Artificial sequence
  SiRNA target sequence
ttcagacgaaagattagac

SEQ ID NO: 19999 - DNA, 19 bp, Artificial sequence
  SiRNA target sequence
tcagacgaaagattagacg

SEQ ID NO: 20000 - DNA, 19 bp, Artificial sequence
  SiRNA target sequence
cagacgaaagattagacga

SEQ ID NO: 20001 - DNA, 19 bp, Artificial sequence
  SiRNA target sequence
agacgaaagattagacgac

SEQ ID NO: 20002 - DNA, 19 bp, Artificial sequence
  SiRNA target sequence
gacgaaagattagacgaca

SEQ ID NO: 20003 - DNA, 19 bp, Artificial sequence
  SiRNA target sequence
acgaaagattagacgacag

SEQ ID NO: 20004 - DNA, 19 bp, Artificial sequence
  SiRNA target sequence
cgaaagattagacgacagt

SEQ ID NO: 20005 - DNA, 19 bp, Artificial sequence
  SiRNA target sequence
gaaagattagacgacagtt

SEQ ID NO: 20006 - DNA, 19 bp, Artificial sequence
  SiRNA target sequence
aaagattagacgacagttc

SEQ ID NO: 20007 - DNA, 19 bp, Artificial sequence
  SiRNA target sequence
aagattagacgacagttct

SEQ ID NO: 20008 - DNA, 19 bp, Artificial sequence
  SiRNA target sequence
agattagacgacagttctt

SEQ ID NO: 20009 - DNA, 19 bp, Artificial sequence
  SiRNA target sequence
gattagacgacagttcttt

SEQ ID NO: 20010 - DNA, 19 bp, Artificial sequence
  SiRNA target sequence
attagacgacagttctttt

SEQ ID NO: 20011 - DNA, 19 bp, Artificial sequence
  SiRNA target sequence
ttagacgacagttcttttt

SEQ ID NO: 20012 - DNA, 19 bp, Artificial sequence
  SiRNA target sequence
tagacgacagttctttttt

SEQ ID NO: 20013 - DNA, 19 bp, Artificial sequence
  SiRNA target sequence
agacgacagttcttttttc

SEQ ID NO: 20014 - DNA, 19 bp, Artificial sequence
  SiRNA target sequence
gacgacagttcttttttca

SEQ ID NO: 20015 - DNA, 19 bp, Artificial sequence
  SiRNA target sequence
acgacagttcttttttcat

SEQ ID NO: 20016 - DNA, 19 bp, Artificial sequence
  SiRNA target sequence
cgacagttcttttttcatt

SEQ ID NO: 20017 - DNA, 19 bp, Artificial sequence
  SiRNA target sequence
gacagttcttttttcattt

SEQ ID NO: 20018 - DNA, 19 bp, Artificial sequence
  SiRNA target sequence
acagttcttttttcatttt

SEQ ID NO: 20019 - DNA, 19 bp, Artificial sequence
  SiRNA target sequence
cagttcttttttcattttt

SEQ ID NO: 20020 - DNA, 19 bp, Artificial sequence
  SiRNA target sequence
agttcttttttcatttttt

SEQ ID NO: 20021 - DNA, 19 bp, Artificial sequence
  SiRNA target sequence
gttcttttttcattttttc

SEQ ID NO: 20022 - DNA, 19 bp, Artificial sequence
  SiRNA target sequence
ttcttttttcattttttcc

SEQ ID NO: 20023 - DNA, 19 bp, Artificial sequence
  SiRNA target sequence
tcttttttcattttttccg

SEQ ID NO: 20024 - DNA, 19 bp, Artificial sequence
  SiRNA target sequence
cttttttcattttttccgc

SEQ ID NO: 20025 - DNA, 19 bp, Artificial sequence
  SiRNA target sequence
ttttttcattttttccgct

SEQ ID NO: 20026 - DNA, 19 bp, Artificial sequence
  SiRNA target sequence
tttttcattttttccgctg

SEQ ID NO: 20027 - DNA, 19 bp, Artificial sequence
  SiRNA target sequence
ttttcattttttccgctgc

SEQ ID NO: 20028 - DNA, 19 bp, Artificial sequence
  SiRNA target sequence
tttcattttttccgctgct

SEQ ID NO: 20029 - DNA, 19 bp, Artificial sequence
  SiRNA target sequence
ttcattttttccgctgctt

SEQ ID NO: 20030 - DNA, 19 bp, Artificial sequence
  SiRNA target sequence
tcattttttccgctgcttc

SEQ ID NO: 20031 - DNA, 19 bp, Artificial sequence
  SiRNA target sequence
cattttttccgctgcttct

SEQ ID NO: 20032 - DNA, 19 bp, Artificial sequence
  SiRNA target sequence
attttttccgctgcttctt

SEQ ID NO: 20033 - DNA, 19 bp, Artificial sequence
  SiRNA target sequence
ttttttccgctgcttcttt

SEQ ID NO: 20034 - DNA, 19 bp, Artificial sequence
  SiRNA target sequence
tttttccgctgcttcttta

SEQ ID NO: 20035 - DNA, 19 bp, Artificial sequence
  SiRNA target sequence
ttttccgctgcttctttaa

SEQ ID NO: 20036 - DNA, 19 bp, Artificial sequence
  SiRNA target sequence
tttccgctgcttctttaat

SEQ ID NO: 20037 - DNA, 19 bp, Artificial sequence
  SiRNA target sequence
ttccgctgcttctttaatt

SEQ ID NO: 20038 - DNA, 19 bp, Artificial sequence
  SiRNA target sequence
tccgctgcttctttaattc

SEQ ID NO: 20039 - DNA, 19 bp, Artificial sequence
  SiRNA target sequence
ccgctgcttctttaattct

SEQ ID NO: 20040 - DNA, 19 bp, Artificial sequence
  SiRNA target sequence
cgctgcttctttaattcta

SEQ ID NO: 20041 - DNA, 19 bp, Artificial sequence
  SiRNA target sequence
gctgcttctttaattctat

SEQ ID NO: 20042 - DNA, 19 bp, Artificial sequence
  SiRNA target sequence
ctgcttctttaattctatt

SEQ ID NO: 20043 - DNA, 19 bp, Artificial sequence
  SiRNA target sequence
tgcttctttaattctatta

SEQ ID NO: 20044 - DNA, 19 bp, Artificial sequence
  SiRNA target sequence
gcttctttaattctattat

SEQ ID NO: 20045 - DNA, 19 bp, Artificial sequence
  SiRNA target sequence
cttctttaattctattata

SEQ ID NO: 20046 - DNA, 19 bp, Artificial sequence
  SiRNA target sequence
ttctttaattctattataa

SEQ ID NO: 20047 - DNA, 19 bp, Artificial sequence
  SiRNA target sequence
tctttaattctattataac

SEQ ID NO: 20048 - DNA, 19 bp, Artificial sequence
  SiRNA target sequence
ctttaattctattataaca

SEQ ID NO: 20049 - DNA, 19 bp, Artificial sequence
  SiRNA target sequence
tttaattctattataacaa

SEQ ID NO: 20050 - DNA, 19 bp, Artificial sequence
  SiRNA target sequence
ttaattctattataacaag

SEQ ID NO: 20051 - DNA, 19 bp, Artificial sequence
  SiRNA target sequence
taattctattataacaaga

SEQ ID NO: 20052 - DNA, 19 bp, Artificial sequence
  SiRNA target sequence
aattctattataacaagaa

SEQ ID NO: 20053 - DNA, 19 bp, Artificial sequence
  SiRNA target sequence
attctattataacaagaat

SEQ ID NO: 20054 - DNA, 19 bp, Artificial sequence
  SiRNA target sequence
ttctattataacaagaatc

SEQ ID NO: 20055 - DNA, 19 bp, Artificial sequence
  SiRNA target sequence
tctattataacaagaatcg

SEQ ID NO: 20056 - DNA, 19 bp, Artificial sequence
  SiRNA target sequence
ctattataacaagaatcgt

SEQ ID NO: 20057 - DNA, 19 bp, Artificial sequence
  SiRNA target sequence
tattataacaagaatcgtg

SEQ ID NO: 20058 - DNA, 19 bp, Artificial sequence
  SiRNA target sequence
attataacaagaatcgtgt

SEQ ID NO: 20059 - DNA, 19 bp, Artificial sequence
  SiRNA target sequence
ttataacaagaatcgtgtt

SEQ ID NO: 20060 - DNA, 19 bp, Artificial sequence
  SiRNA target sequence
tataacaagaatcgtgttt

SEQ ID NO: 20061 - DNA, 19 bp, Artificial sequence
  SiRNA target sequence
ataacaagaatcgtgttta

SEQ ID NO: 20062 - DNA, 19 bp, Artificial sequence
  SiRNA target sequence
taacaagaatcgtgtttaa

SEQ ID NO: 20063 - DNA, 19 bp, Artificial sequence
  SiRNA target sequence
aacaagaatcgtgtttaag

SEQ ID NO: 20064 - DNA, 19 bp, Artificial sequence
  SiRNA target sequence
acaagaatcgtgtttaagt

SEQ ID NO: 20065 - DNA, 19 bp, Artificial sequence
  SiRNA target sequence
caagaatcgtgtttaagta

SEQ ID NO: 20066 - DNA, 19 bp, Artificial sequence
  SiRNA target sequence
aagaatcgtgtttaagtaa

SEQ ID NO: 20067 - DNA, 19 bp, Artificial sequence
  SiRNA target sequence
agaatcgtgtttaagtaaa

SEQ ID NO: 20068 - DNA, 19 bp, Artificial sequence
  SiRNA target sequence
gaatcgtgtttaagtaaat

SEQ ID NO: 20069 - DNA, 19 bp, Artificial sequence
  SiRNA target sequence
aatcgtgtttaagtaaatc

SEQ ID NO: 20070 - DNA, 19 bp, Artificial sequence
  SiRNA target sequence
atcgtgtttaagtaaatca

SEQ ID NO: 20071 - DNA, 19 bp, Artificial sequence
  SiRNA target sequence
tcgtgtttaagtaaatcaa

SEQ ID NO: 20072 - DNA, 19 bp, Artificial sequence
  SiRNA target sequence
cgtgtttaagtaaatcaat

SEQ ID NO: 20073 - DNA, 19 bp, Artificial sequence
  SiRNA target sequence
gtgtttaagtaaatcaatt

SEQ ID NO: 20074 - DNA, 19 bp, Artificial sequence
  SiRNA target sequence
tgtttaagtaaatcaattc

SEQ ID NO: 20075 - DNA, 19 bp, Artificial sequence
  SiRNA target sequence
gtttaagtaaatcaattcc

SEQ ID NO: 20076 - DNA, 19 bp, Artificial sequence
  SiRNA target sequence
tttaagtaaatcaattcct

SEQ ID NO: 20077 - DNA, 19 bp, Artificial sequence
  SiRNA target sequence
ttaagtaaatcaattcctg

SEQ ID NO: 20078 - DNA, 19 bp, Artificial sequence
  SiRNA target sequence
taagtaaatcaattcctgt

SEQ ID NO: 20079 - DNA, 19 bp, Artificial sequence
  SiRNA target sequence
aagtaaatcaattcctgtt

SEQ ID NO: 20080 - DNA, 19 bp, Artificial sequence
  SiRNA target sequence
agtaaatcaattcctgttc

SEQ ID NO: 20081 - DNA, 19 bp, Artificial sequence
  SiRNA target sequence
gtaaatcaattcctgttct

SEQ ID NO: 20082 - DNA, 19 bp, Artificial sequence
  SiRNA target sequence
taaatcaattcctgttcta

SEQ ID NO: 20083 - DNA, 19 bp, Artificial sequence
  SiRNA target sequence
aaatcaattcctgttctac

SEQ ID NO: 20084 - DNA, 19 bp, Artificial sequence
  SiRNA target sequence
aatcaattcctgttctact

SEQ ID NO: 20085 - DNA, 19 bp, Artificial sequence
  SiRNA target sequence
atcaattcctgttctactt

SEQ ID NO: 20086 - DNA, 19 bp, Artificial sequence
  SiRNA target sequence
tcaattcctgttctacttt

SEQ ID NO: 20087 - DNA, 19 bp, Artificial sequence
  SiRNA target sequence
caattcctgttctactttt

SEQ ID NO: 20088 - DNA, 19 bp, Artificial sequence
  SiRNA target sequence
aattcctgttctactttta

SEQ ID NO: 20089 - DNA, 19 bp, Artificial sequence
  SiRNA target sequence
attcctgttctacttttaa

SEQ ID NO: 20090 - DNA, 19 bp, Artificial sequence
  SiRNA target sequence
ttcctgttctacttttaaa

SEQ ID NO: 20091 - DNA, 19 bp, Artificial sequence
  SiRNA target sequence
tcctgttctacttttaaat

SEQ ID NO: 20092 - DNA, 19 bp, Artificial sequence
  SiRNA target sequence
cctgttctacttttaaatt

SEQ ID NO: 20093 - DNA, 19 bp, Artificial sequence
  SiRNA target sequence
ctgttctacttttaaattt

SEQ ID NO: 20094 - DNA, 19 bp, Artificial sequence
  SiRNA target sequence
tgttctacttttaaatttt

SEQ ID NO: 20095 - DNA, 19 bp, Artificial sequence
  SiRNA target sequence
gttctacttttaaattttt

SEQ ID NO: 20096 - DNA, 19 bp, Artificial sequence
  SiRNA target sequence
ttctacttttaaatttttc

SEQ ID NO: 20097 - DNA, 19 bp, Artificial sequence
  SiRNA target sequence
tctacttttaaatttttca

SEQ ID NO: 20098 - DNA, 19 bp, Artificial sequence
  SiRNA target sequence
ctacttttaaatttttcat

SEQ ID NO: 20099 - DNA, 19 bp, Artificial sequence
  SiRNA target sequence
tacttttaaatttttcatt

SEQ ID NO: 20100 - DNA, 19 bp, Artificial sequence
  SiRNA target sequence
acttttaaatttttcatta

SEQ ID NO: 20101 - DNA, 19 bp, Artificial sequence
  SiRNA target sequence
cttttaaatttttcattaa

SEQ ID NO: 20102 - DNA, 19 bp, Artificial sequence
  SiRNA target sequence
ttttaaatttttcattaat

SEQ ID NO: 20103 - DNA, 19 bp, Artificial sequence
  SiRNA target sequence
tttaaatttttcattaata

SEQ ID NO: 20104 - DNA, 19 bp, Artificial sequence
  SiRNA target sequence
ttaaatttttcattaatat

SEQ ID NO: 20105 - DNA, 19 bp, Artificial sequence
  SiRNA target sequence
taaatttttcattaatata

SEQ ID NO: 20106 - DNA, 19 bp, Artificial sequence
  SiRNA target sequence
aaatttttcattaatataa

SEQ ID NO: 20107 - DNA, 19 bp, Artificial sequence
  SiRNA target sequence
aatttttcattaatataat

SEQ ID NO: 20108 - DNA, 19 bp, Artificial sequence
  SiRNA target sequence
atttttcattaatataatc

SEQ ID NO: 20109 - DNA, 19 bp, Artificial sequence
  SiRNA target sequence
tttttcattaatataatct

SEQ ID NO: 20110 - DNA, 19 bp, Artificial sequence
  SiRNA target sequence
ttttcattaatataatcta

SEQ ID NO: 20111 - DNA, 19 bp, Artificial sequence
  SiRNA target sequence
tttcattaatataatctac

SEQ ID NO: 20112 - DNA, 19 bp, Artificial sequence
  SiRNA target sequence
ttcattaatataatctact

SEQ ID NO: 20113 - DNA, 19 bp, Artificial sequence
  SiRNA target sequence
tcattaatataatctacta

SEQ ID NO: 20114 - DNA, 19 bp, Artificial sequence
  SiRNA target sequence
cattaatataatctactaa

SEQ ID NO: 20115 - DNA, 19 bp, Artificial sequence
  SiRNA target sequence
attaatataatctactaaa

SEQ ID NO: 20116 - DNA, 19 bp, Artificial sequence
  SiRNA target sequence
ttaatataatctactaaag

SEQ ID NO: 20117 - DNA, 19 bp, Artificial sequence
  SiRNA target sequence
taatataatctactaaagt

SEQ ID NO: 20118 - DNA, 19 bp, Artificial sequence
  SiRNA target sequence
aatataatctactaaagta

SEQ ID NO: 20119 - DNA, 19 bp, Artificial sequence
  SiRNA target sequence
atataatctactaaagtat

SEQ ID NO: 20120 - DNA, 19 bp, Artificial sequence
  SiRNA target sequence
tataatctactaaagtatt

SEQ ID NO: 20121 - DNA, 19 bp, Artificial sequence
  SiRNA target sequence
ataatctactaaagtatta

SEQ ID NO: 20122 - DNA, 19 bp, Artificial sequence
  SiRNA target sequence
taatctactaaagtattat

SEQ ID NO: 20123 - DNA, 19 bp, Artificial sequence
  SiRNA target sequence
aatctactaaagtattatc

SEQ ID NO: 20124 - DNA, 19 bp, Artificial sequence
  SiRNA target sequence
atctactaaagtattatcc

SEQ ID NO: 20125 - DNA, 19 bp, Artificial sequence
  SiRNA target sequence
tctactaaagtattatcca

SEQ ID NO: 20126 - DNA, 19 bp, Artificial sequence
  SiRNA target sequence
ctactaaagtattatccaa

SEQ ID NO: 20127 - DNA, 19 bp, Artificial sequence
  SiRNA target sequence
tactaaagtattatccaaa

SEQ ID NO: 20128 - DNA, 19 bp, Artificial sequence
  SiRNA target sequence
actaaagtattatccaaat

SEQ ID NO: 20129 - DNA, 19 bp, Artificial sequence
  SiRNA target sequence
ctaaagtattatccaaatc

SEQ ID NO: 20130 - DNA, 19 bp, Artificial sequence
  SiRNA target sequence
taaagtattatccaaatct

SEQ ID NO: 20131 - DNA, 19 bp, Artificial sequence
  SiRNA target sequence
aaagtattatccaaatctt

SEQ ID NO: 20132 - DNA, 19 bp, Artificial sequence
  SiRNA target sequence
aagtattatccaaatcttc

SEQ ID NO: 20133 - DNA, 19 bp, Artificial sequence
  SiRNA target sequence
agtattatccaaatcttct

SEQ ID NO: 20134 - DNA, 19 bp, Artificial sequence
  SiRNA target sequence
gtattatccaaatcttctc

SEQ ID NO: 20135 - DNA, 19 bp, Artificial sequence
  SiRNA target sequence
tattatccaaatcttctcc

SEQ ID NO: 20136 - DNA, 19 bp, Artificial sequence
  SiRNA target sequence
attatccaaatcttctcct

SEQ ID NO: 20137 - DNA, 19 bp, Artificial sequence
  SiRNA target sequence
ttatccaaatcttctcctc

SEQ ID NO: 20138 - DNA, 19 bp, Artificial sequence
  SiRNA target sequence
tatccaaatcttctcctcc

SEQ ID NO: 20139 - DNA, 19 bp, Artificial sequence
  SiRNA target sequence
atccaaatcttctcctcct

SEQ ID NO: 20140 - DNA, 19 bp, Artificial sequence
  SiRNA target sequence
tccaaatcttctcctccta

SEQ ID NO: 20141 - DNA, 19 bp, Artificial sequence
  SiRNA target sequence
ccaaatcttctcctcctaa

SEQ ID NO: 20142 - DNA, 19 bp, Artificial sequence
  SiRNA target sequence
caaatcttctcctcctaaa

SEQ ID NO: 20143 - DNA, 19 bp, Artificial sequence
  SiRNA target sequence
aaatcttctcctcctaaaa

SEQ ID NO: 20144 - DNA, 19 bp, Artificial sequence
  SiRNA target sequence
aatcttctcctcctaaaaa

SEQ ID NO: 20145 - DNA, 19 bp, Artificial sequence
  SiRNA target sequence
atcttctcctcctaaaaaa

SEQ ID NO: 20146 - DNA, 19 bp, Artificial sequence
  SiRNA target sequence
tcttctcctcctaaaaaag

SEQ ID NO: 20147 - DNA, 19 bp, Artificial sequence
  SiRNA target sequence
cttctcctcctaaaaaagt

SEQ ID NO: 20148 - DNA, 19 bp, Artificial sequence
  SiRNA target sequence
ttctcctcctaaaaaagta

SEQ ID NO: 20149 - DNA, 19 bp, Artificial sequence
  SiRNA target sequence
tctcctcctaaaaaagtat

SEQ ID NO: 20150 - DNA, 19 bp, Artificial sequence
  SiRNA target sequence
ctcctcctaaaaaagtatt

SEQ ID NO: 20151 - DNA, 19 bp, Artificial sequence
  SiRNA target sequence
tcctcctaaaaaagtattt

SEQ ID NO: 20152 - DNA, 19 bp, Artificial sequence
  SiRNA target sequence
cctcctaaaaaagtatttc

SEQ ID NO: 20153 - DNA, 19 bp, Artificial sequence
  SiRNA target sequence
ctcctaaaaaagtatttcc

SEQ ID NO: 20154 - DNA, 19 bp, Artificial sequence
  SiRNA target sequence
tcctaaaaaagtatttccg

SEQ ID NO: 20155 - DNA, 19 bp, Artificial sequence
  SiRNA target sequence
cctaaaaaagtatttccgt

SEQ ID NO: 20156 - DNA, 19 bp, Artificial sequence
  SiRNA target sequence
ctaaaaaagtatttccgtt

SEQ ID NO: 20157 - DNA, 19 bp, Artificial sequence
  SiRNA target sequence
taaaaaagtatttccgtta

SEQ ID NO: 20158 - DNA, 19 bp, Artificial sequence
  SiRNA target sequence
aaaaaagtatttccgttag

SEQ ID NO: 20159 - DNA, 19 bp, Artificial sequence
  SiRNA target sequence
aaaaagtatttccgttagt

SEQ ID NO: 20160 - DNA, 19 bp, Artificial sequence
  SiRNA target sequence
aaaagtatttccgttagta

SEQ ID NO: 20161 - DNA, 19 bp, Artificial sequence
  SiRNA target sequence
aaagtatttccgttagtag

SEQ ID NO: 20162 - DNA, 19 bp, Artificial sequence
  SiRNA target sequence
aagtatttccgttagtaga

SEQ ID NO: 20163 - DNA, 19 bp, Artificial sequence
  SiRNA target sequence
agtatttccgttagtagat

SEQ ID NO: 20164 - DNA, 19 bp, Artificial sequence
  SiRNA target sequence
gtatttccgttagtagatt

SEQ ID NO: 20165 - DNA, 19 bp, Artificial sequence
  SiRNA target sequence
tatttccgttagtagattt

SEQ ID NO: 20166 - DNA, 19 bp, Artificial sequence
  SiRNA target sequence
atttccgttagtagatttt

SEQ ID NO: 20167 - DNA, 19 bp, Artificial sequence
  SiRNA target sequence
tttccgttagtagatttta

SEQ ID NO: 20168 - DNA, 19 bp, Artificial sequence
  SiRNA target sequence
ttccgttagtagattttac

SEQ ID NO: 20169 - DNA, 19 bp, Artificial sequence
  SiRNA target sequence
tccgttagtagattttaca

SEQ ID NO: 20170 - DNA, 19 bp, Artificial sequence
  SiRNA target sequence
ccgttagtagattttacat

SEQ ID NO: 20171 - DNA, 19 bp, Artificial sequence
  SiRNA target sequence
cgttagtagattttacatg

SEQ ID NO: 20172 - DNA, 19 bp, Artificial sequence
  SiRNA target sequence
gttagtagattttacatga

SEQ ID NO: 20173 - DNA, 19 bp, Artificial sequence
  SiRNA target sequence
ttagtagattttacatgaa

SEQ ID NO: 20174 - DNA, 19 bp, Artificial sequence
  SiRNA target sequence
tagtagattttacatgaaa

SEQ ID NO: 20175 - DNA, 19 bp, Artificial sequence
  SiRNA target sequence
agtagattttacatgaaaa

SEQ ID NO: 20176 - DNA, 19 bp, Artificial sequence
  SiRNA target sequence
gtagattttacatgaaaaa

SEQ ID NO: 20177 - DNA, 19 bp, Artificial sequence
  SiRNA target sequence
tagattttacatgaaaaat

SEQ ID NO: 20178 - DNA, 19 bp, Artificial sequence
  SiRNA target sequence
agattttacatgaaaaata

SEQ ID NO: 20179 - DNA, 19 bp, Artificial sequence
  SiRNA target sequence
gattttacatgaaaaatac

SEQ ID NO: 20180 - DNA, 19 bp, Artificial sequence
  SiRNA target sequence
attttacatgaaaaatacc

SEQ ID NO: 20181 - DNA, 19 bp, Artificial sequence
  SiRNA target sequence
ttttacatgaaaaatacca

SEQ ID NO: 20182 - DNA, 19 bp, Artificial sequence
  SiRNA target sequence
tttacatgaaaaataccat

SEQ ID NO: 20183 - DNA, 19 bp, Artificial sequence
  SiRNA target sequence
ttacatgaaaaataccatt

SEQ ID NO: 20184 - DNA, 19 bp, Artificial sequence
  SiRNA target sequence
tacatgaaaaataccatta

SEQ ID NO: 20185 - DNA, 19 bp, Artificial sequence
  SiRNA target sequence
acatgaaaaataccattat

SEQ ID NO: 20186 - DNA, 19 bp, Artificial sequence
  SiRNA target sequence
catgaaaaataccattatc

SEQ ID NO: 20187 - DNA, 19 bp, Artificial sequence
  SiRNA target sequence
atgaaaaataccattatct

SEQ ID NO: 20188 - DNA, 19 bp, Artificial sequence
  SiRNA target sequence
tgaaaaataccattatcta

SEQ ID NO: 20189 - DNA, 19 bp, Artificial sequence
  SiRNA target sequence
gaaaaataccattatctaa

SEQ ID NO: 20190 - DNA, 19 bp, Artificial sequence
  SiRNA target sequence
aaaaataccattatctaat

SEQ ID NO: 20191 - DNA, 19 bp, Artificial sequence
  SiRNA target sequence
aaaataccattatctaatt

SEQ ID NO: 20192 - DNA, 19 bp, Artificial sequence
  SiRNA target sequence
aaataccattatctaattc

SEQ ID NO: 20193 - DNA, 19 bp, Artificial sequence
  SiRNA target sequence
aataccattatctaattct

SEQ ID NO: 20194 - DNA, 19 bp, Artificial sequence
  SiRNA target sequence
ataccattatctaattcta

SEQ ID NO: 20195 - DNA, 19 bp, Artificial sequence
  SiRNA target sequence
taccattatctaattctaa

SEQ ID NO: 20196 - DNA, 19 bp, Artificial sequence
  SiRNA target sequence
accattatctaattctaat

SEQ ID NO: 20197 - DNA, 19 bp, Artificial sequence
  SiRNA target sequence
ccattatctaattctaata

SEQ ID NO: 20198 - DNA, 19 bp, Artificial sequence
  SiRNA target sequence
cattatctaattctaatat

SEQ ID NO: 20199 - DNA, 19 bp, Artificial sequence
  SiRNA target sequence
attatctaattctaatata

SEQ ID NO: 20200 - DNA, 19 bp, Artificial sequence
  SiRNA target sequence
ttatctaattctaatatac

SEQ ID NO: 20201 - DNA, 19 bp, Artificial sequence
  SiRNA target sequence
tatctaattctaatatact

SEQ ID NO: 20202 - DNA, 19 bp, Artificial sequence
  SiRNA target sequence
atctaattctaatatacta

SEQ ID NO: 20203 - DNA, 19 bp, Artificial sequence
  SiRNA target sequence
tctaattctaatatactaa

SEQ ID NO: 20204 - DNA, 19 bp, Artificial sequence
  SiRNA target sequence
ctaattctaatatactaat

SEQ ID NO: 20205 - DNA, 19 bp, Artificial sequence
  SiRNA target sequence
taattctaatatactaatg

SEQ ID NO: 20206 - DNA, 19 bp, Artificial sequence
  SiRNA target sequence
aattctaatatactaatgt

SEQ ID NO: 20207 - DNA, 19 bp, Artificial sequence
  SiRNA target sequence
attctaatatactaatgtc

SEQ ID NO: 20208 - DNA, 19 bp, Artificial sequence
  SiRNA target sequence
ttctaatatactaatgtca

SEQ ID NO: 20209 - DNA, 19 bp, Artificial sequence
  SiRNA target sequence
tctaatatactaatgtcaa

SEQ ID NO: 20210 - DNA, 19 bp, Artificial sequence
  SiRNA target sequence
ctaatatactaatgtcaaa

SEQ ID NO: 20211 - DNA, 19 bp, Artificial sequence
  SiRNA target sequence
taatatactaatgtcaaaa

SEQ ID NO: 20212 - DNA, 19 bp, Artificial sequence
  SiRNA target sequence
aatatactaatgtcaaaag

SEQ ID NO: 20213 - DNA, 19 bp, Artificial sequence
  SiRNA target sequence
atatactaatgtcaaaagt

SEQ ID NO: 20214 - DNA, 19 bp, Artificial sequence
  SiRNA target sequence
tatactaatgtcaaaagtt

SEQ ID NO: 20215 - DNA, 19 bp, Artificial sequence
  SiRNA target sequence
atactaatgtcaaaagttc

SEQ ID NO: 20216 - DNA, 19 bp, Artificial sequence
  SiRNA target sequence
tactaatgtcaaaagttcc

SEQ ID NO: 20217 - DNA, 19 bp, Artificial sequence
  SiRNA target sequence
actaatgtcaaaagttcct

SEQ ID NO: 20218 - DNA, 19 bp, Artificial sequence
  SiRNA target sequence
ctaatgtcaaaagttcctc

SEQ ID NO: 20219 - DNA, 19 bp, Artificial sequence
  SiRNA target sequence
taatgtcaaaagttcctcc

SEQ ID NO: 20220 - DNA, 19 bp, Artificial sequence
  SiRNA target sequence
aatgtcaaaagttcctcct

SEQ ID NO: 20221 - DNA, 19 bp, Artificial sequence
  SiRNA target sequence
atgtcaaaagttcctcctc

SEQ ID NO: 20222 - DNA, 19 bp, Artificial sequence
  SiRNA target sequence
tgtcaaaagttcctcctcc

SEQ ID NO: 20223 - DNA, 19 bp, Artificial sequence
  SiRNA target sequence
gtcaaaagttcctcctccc

SEQ ID NO: 20224 - DNA, 19 bp, Artificial sequence
  SiRNA target sequence
tcaaaagttcctcctccca

SEQ ID NO: 20225 - DNA, 19 bp, Artificial sequence
  SiRNA target sequence
caaaagttcctcctcccag

SEQ ID NO: 20226 - DNA, 19 bp, Artificial sequence
  SiRNA target sequence
aaaagttcctcctcccaga

SEQ ID NO: 20227 - DNA, 19 bp, Artificial sequence
  SiRNA target sequence
aaagttcctcctcccagat

SEQ ID NO: 20228 - DNA, 19 bp, Artificial sequence
  SiRNA target sequence
aagttcctcctcccagatc

SEQ ID NO: 20229 - DNA, 19 bp, Artificial sequence
  SiRNA target sequence
agttcctcctcccagatca

SEQ ID NO: 20230 - DNA, 19 bp, Artificial sequence
  SiRNA target sequence
gttcctcctcccagatcat

SEQ ID NO: 20231 - DNA, 19 bp, Artificial sequence
  SiRNA target sequence
ttcctcctcccagatcata

SEQ ID NO: 20232 - DNA, 19 bp, Artificial sequence
  SiRNA target sequence
tcctcctcccagatcataa

SEQ ID NO: 20233 - DNA, 19 bp, Artificial sequence
  SiRNA target sequence
cctcctcccagatcataaa

SEQ ID NO: 20234 - DNA, 19 bp, Artificial sequence
  SiRNA target sequence
ctcctcccagatcataaac

SEQ ID NO: 20235 - DNA, 19 bp, Artificial sequence
  SiRNA target sequence
tcctcccagatcataaaca

SEQ ID NO: 20236 - DNA, 19 bp, Artificial sequence
  SiRNA target sequence
cctcccagatcataaacag

SEQ ID NO: 20237 - DNA, 19 bp, Artificial sequence
  SiRNA target sequence
ctcccagatcataaacagc

SEQ ID NO: 20238 - DNA, 19 bp, Artificial sequence
  SiRNA target sequence
tcccagatcataaacagct

SEQ ID NO: 20239 - DNA, 19 bp, Artificial sequence
  SiRNA target sequence
cccagatcataaacagcta

SEQ ID NO: 20240 - DNA, 19 bp, Artificial sequence
  SiRNA target sequence
ccagatcataaacagctat

SEQ ID NO: 20241 - DNA, 19 bp, Artificial sequence
  SiRNA target sequence
cagatcataaacagctata

SEQ ID NO: 20242 - DNA, 19 bp, Artificial sequence
  SiRNA target sequence
agatcataaacagctataa

SEQ ID NO: 20243 - DNA, 19 bp, Artificial sequence
  SiRNA target sequence
gatcataaacagctataat

SEQ ID NO: 20244 - DNA, 19 bp, Artificial sequence
  SiRNA target sequence
atcataaacagctataata

SEQ ID NO: 20245 - DNA, 19 bp, Artificial sequence
  SiRNA target sequence
tcataaacagctataatac

SEQ ID NO: 20246 - DNA, 19 bp, Artificial sequence
  SiRNA target sequence
cataaacagctataatacc

SEQ ID NO: 20247 - DNA, 19 bp, Artificial sequence
  SiRNA target sequence
ataaacagctataataccc

SEQ ID NO: 20248 - DNA, 19 bp, Artificial sequence
  SiRNA target sequence
taaacagctataataccct

SEQ ID NO: 20249 - DNA, 19 bp, Artificial sequence
  SiRNA target sequence
aaacagctataataccctg

SEQ ID NO: 20250 - DNA, 19 bp, Artificial sequence
  SiRNA target sequence
aacagctataataccctgt

SEQ ID NO: 20251 - DNA, 19 bp, Artificial sequence
  SiRNA target sequence
acagctataataccctgtg

SEQ ID NO: 20252 - DNA, 19 bp, Artificial sequence
  SiRNA target sequence
cagctataataccctgtgc

SEQ ID NO: 20253 - DNA, 19 bp, Artificial sequence
  SiRNA target sequence
agctataataccctgtgca

SEQ ID NO: 20254 - DNA, 19 bp, Artificial sequence
  SiRNA target sequence
gctataataccctgtgcag

SEQ ID NO: 20255 - DNA, 19 bp, Artificial sequence
  SiRNA target sequence
ctataataccctgtgcaga

SEQ ID NO: 20256 - DNA, 19 bp, Artificial sequence
  SiRNA target sequence
tataataccctgtgcagac

SEQ ID NO: 20257 - DNA, 19 bp, Artificial sequence
  SiRNA target sequence
ataataccctgtgcagact

SEQ ID NO: 20258 - DNA, 19 bp, Artificial sequence
  SiRNA target sequence
taataccctgtgcagactt

SEQ ID NO: 20259 - DNA, 19 bp, Artificial sequence
  SiRNA target sequence
aataccctgtgcagacttg

SEQ ID NO: 20260 - DNA, 19 bp, Artificial sequence
  SiRNA target sequence
ataccctgtgcagacttgt

SEQ ID NO: 20261 - DNA, 19 bp, Artificial sequence
  SiRNA target sequence
taccctgtgcagacttgtc

SEQ ID NO: 20262 - DNA, 19 bp, Artificial sequence
  SiRNA target sequence
accctgtgcagacttgtca

SEQ ID NO: 20263 - DNA, 19 bp, Artificial sequence
  SiRNA target sequence
ccctgtgcagacttgtcaa

SEQ ID NO: 20264 - DNA, 19 bp, Artificial sequence
  SiRNA target sequence
cctgtgcagacttgtcaag

SEQ ID NO: 20265 - DNA, 19 bp, Artificial sequence
  SiRNA target sequence
ctgtgcagacttgtcaagc

SEQ ID NO: 20266 - DNA, 19 bp, Artificial sequence
  SiRNA target sequence
tgtgcagacttgtcaagcc

SEQ ID NO: 20267 - DNA, 19 bp, Artificial sequence
  SiRNA target sequence
gtgcagacttgtcaagccc

SEQ ID NO: 20268 - DNA, 19 bp, Artificial sequence
  SiRNA target sequence
tgcagacttgtcaagccca

SEQ ID NO: 20269 - DNA, 19 bp, Artificial sequence
  SiRNA target sequence
gcagacttgtcaagcccat

SEQ ID NO: 20270 - DNA, 19 bp, Artificial sequence
  SiRNA target sequence
cagacttgtcaagcccata

SEQ ID NO: 20271 - DNA, 19 bp, Artificial sequence
  SiRNA target sequence
agacttgtcaagcccataa

SEQ ID NO: 20272 - DNA, 19 bp, Artificial sequence
  SiRNA target sequence
gacttgtcaagcccataag

SEQ ID NO: 20273 - DNA, 19 bp, Artificial sequence
  SiRNA target sequence
acttgtcaagcccataagc

SEQ ID NO: 20274 - DNA, 19 bp, Artificial sequence
  SiRNA target sequence
cttgtcaagcccataagca

SEQ ID NO: 20275 - DNA, 19 bp, Artificial sequence
  SiRNA target sequence
ttgtcaagcccataagcaa

SEQ ID NO: 20276 - DNA, 19 bp, Artificial sequence
  SiRNA target sequence
tgtcaagcccataagcaag

SEQ ID NO: 20277 - DNA, 19 bp, Artificial sequence
  SiRNA target sequence
gtcaagcccataagcaagt

SEQ ID NO: 20278 - DNA, 19 bp, Artificial sequence
  SiRNA target sequence
tcaagcccataagcaagtg

SEQ ID NO: 20279 - DNA, 19 bp, Artificial sequence
  SiRNA target sequence
caagcccataagcaagtgc

SEQ ID NO: 20280 - DNA, 19 bp, Artificial sequence
  SiRNA target sequence
aagcccataagcaagtgct

SEQ ID NO: 20281 - DNA, 19 bp, Artificial sequence
  SiRNA target sequence
agcccataagcaagtgctg

SEQ ID NO: 20282 - DNA, 19 bp, Artificial sequence
  SiRNA target sequence
gcccataagcaagtgctgc

SEQ ID NO: 20283 - DNA, 19 bp, Artificial sequence
  SiRNA target sequence
cccataagcaagtgctgcc

SEQ ID NO: 20284 - DNA, 19 bp, Artificial sequence
  SiRNA target sequence
ccataagcaagtgctgccg

SEQ ID NO: 20285 - DNA, 19 bp, Artificial sequence
  SiRNA target sequence
cataagcaagtgctgccgc

SEQ ID NO: 20286 - DNA, 19 bp, Artificial sequence
  SiRNA target sequence
ataagcaagtgctgccgca

SEQ ID NO: 20287 - DNA, 19 bp, Artificial sequence
  SiRNA target sequence
taagcaagtgctgccgcag

SEQ ID NO: 20288 - DNA, 19 bp, Artificial sequence
  SiRNA target sequence
aagcaagtgctgccgcagt

SEQ ID NO: 20289 - DNA, 19 bp, Artificial sequence
  SiRNA target sequence
agcaagtgctgccgcagta

SEQ ID NO: 20290 - DNA, 19 bp, Artificial sequence
  SiRNA target sequence
gcaagtgctgccgcagtag

SEQ ID NO: 20291 - DNA, 19 bp, Artificial sequence
  SiRNA target sequence
caagtgctgccgcagtagg

SEQ ID NO: 20292 - DNA, 19 bp, Artificial sequence
  SiRNA target sequence
aagtgctgccgcagtaggc

SEQ ID NO: 20293 - DNA, 19 bp, Artificial sequence
  SiRNA target sequence
agtgctgccgcagtaggct

SEQ ID NO: 20294 - DNA, 19 bp, Artificial sequence
  SiRNA target sequence
gtgctgccgcagtaggctc

SEQ ID NO: 20295 - DNA, 19 bp, Artificial sequence
  SiRNA target sequence
tgctgccgcagtaggctca

SEQ ID NO: 20296 - DNA, 19 bp, Artificial sequence
  SiRNA target sequence
gctgccgcagtaggctcat

SEQ ID NO: 20297 - DNA, 19 bp, Artificial sequence
  SiRNA target sequence
ctgccgcagtaggctcatt

SEQ ID NO: 20298 - DNA, 19 bp, Artificial sequence
  SiRNA target sequence
tgccgcagtaggctcatta

SEQ ID NO: 20299 - DNA, 19 bp, Artificial sequence
  SiRNA target sequence
gccgcagtaggctcattaa

SEQ ID NO: 20300 - DNA, 19 bp, Artificial sequence
  SiRNA target sequence
ccgcagtaggctcattaat

SEQ ID NO: 20301 - DNA, 19 bp, Artificial sequence
  SiRNA target sequence
cgcagtaggctcattaatc

SEQ ID NO: 20302 - DNA, 19 bp, Artificial sequence
  SiRNA target sequence
gcagtaggctcattaatca

SEQ ID NO: 20303 - DNA, 19 bp, Artificial sequence
  SiRNA target sequence
cagtaggctcattaatcac

SEQ ID NO: 20304 - DNA, 19 bp, Artificial sequence
  SiRNA target sequence
agtaggctcattaatcact

SEQ ID NO: 20305 - DNA, 19 bp, Artificial sequence
  SiRNA target sequence
gtaggctcattaatcactc

SEQ ID NO: 20306 - DNA, 19 bp, Artificial sequence
  SiRNA target sequence
taggctcattaatcactct

SEQ ID NO: 20307 - DNA, 19 bp, Artificial sequence
  SiRNA target sequence
aggctcattaatcactcta

SEQ ID NO: 20308 - DNA, 19 bp, Artificial sequence
  SiRNA target sequence
ggctcattaatcactctaa

SEQ ID NO: 20309 - DNA, 19 bp, Artificial sequence
  SiRNA target sequence
gctcattaatcactctaag

SEQ ID NO: 20310 - DNA, 19 bp, Artificial sequence
  SiRNA target sequence
ctcattaatcactctaagc

SEQ ID NO: 20311 - DNA, 19 bp, Artificial sequence
  SiRNA target sequence
tcattaatcactctaagca

SEQ ID NO: 20312 - DNA, 19 bp, Artificial sequence
  SiRNA target sequence
cattaatcactctaagcac

SEQ ID NO: 20313 - DNA, 19 bp, Artificial sequence
  SiRNA target sequence
attaatcactctaagcact

SEQ ID NO: 20314 - DNA, 19 bp, Artificial sequence
  SiRNA target sequence
ttaatcactctaagcactt

SEQ ID NO: 20315 - DNA, 19 bp, Artificial sequence
  SiRNA target sequence
taatcactctaagcacttg

SEQ ID NO: 20316 - DNA, 19 bp, Artificial sequence
  SiRNA target sequence
aatcactctaagcacttgt

SEQ ID NO: 20317 - DNA, 19 bp, Artificial sequence
  SiRNA target sequence
atcactctaagcacttgta

SEQ ID NO: 20318 - DNA, 19 bp, Artificial sequence
  SiRNA target sequence
tcactctaagcacttgtaa

SEQ ID NO: 20319 - DNA, 19 bp, Artificial sequence
  SiRNA target sequence
cactctaagcacttgtaat

SEQ ID NO: 20320 - DNA, 19 bp, Artificial sequence
  SiRNA target sequence
actctaagcacttgtaatc

SEQ ID NO: 20321 - DNA, 19 bp, Artificial sequence
  SiRNA target sequence
ctctaagcacttgtaatcc

SEQ ID NO: 20322 - DNA, 19 bp, Artificial sequence
  SiRNA target sequence
tctaagcacttgtaatccc

SEQ ID NO: 20323 - DNA, 19 bp, Artificial sequence
  SiRNA target sequence
ctaagcacttgtaatcccg

SEQ ID NO: 20324 - DNA, 19 bp, Artificial sequence
  SiRNA target sequence
taagcacttgtaatcccgc

SEQ ID NO: 20325 - DNA, 19 bp, Artificial sequence
  SiRNA target sequence
aagcacttgtaatcccgca

SEQ ID NO: 20326 - DNA, 19 bp, Artificial sequence
  SiRNA target sequence
agcacttgtaatcccgcaa

SEQ ID NO: 20327 - DNA, 19 bp, Artificial sequence
  SiRNA target sequence
gcacttgtaatcccgcaat

SEQ ID NO: 20328 - DNA, 19 bp, Artificial sequence
  SiRNA target sequence
cacttgtaatcccgcaatc

SEQ ID NO: 20329 - DNA, 19 bp, Artificial sequence
  SiRNA target sequence
acttgtaatcccgcaatcc

SEQ ID NO: 20330 - DNA, 19 bp, Artificial sequence
  SiRNA target sequence
cttgtaatcccgcaatcct

SEQ ID NO: 20331 - DNA, 19 bp, Artificial sequence
  SiRNA target sequence
ttgtaatcccgcaatcctt

SEQ ID NO: 20332 - DNA, 19 bp, Artificial sequence
  SiRNA target sequence
tgtaatcccgcaatccttc

SEQ ID NO: 20333 - DNA, 19 bp, Artificial sequence
  SiRNA target sequence
gtaatcccgcaatccttcc

SEQ ID NO: 20334 - DNA, 19 bp, Artificial sequence
  SiRNA target sequence
taatcccgcaatccttccc

SEQ ID NO: 20335 - DNA, 19 bp, Artificial sequence
  SiRNA target sequence
aatcccgcaatccttcccg

SEQ ID NO: 20336 - DNA, 19 bp, Artificial sequence
  SiRNA target sequence
atcccgcaatccttcccgc

SEQ ID NO: 20337 - DNA, 19 bp, Artificial sequence
  SiRNA target sequence
tcccgcaatccttcccgca

SEQ ID NO: 20338 - DNA, 19 bp, Artificial sequence
  SiRNA target sequence
cccgcaatccttcccgcat

SEQ ID NO: 20339 - DNA, 19 bp, Artificial sequence
  SiRNA target sequence
ccgcaatccttcccgcatc

SEQ ID NO: 20340 - DNA, 19 bp, Artificial sequence
  SiRNA target sequence
cgcaatccttcccgcatct

SEQ ID NO: 20341 - DNA, 19 bp, Artificial sequence
  SiRNA target sequence
gcaatccttcccgcatctt

SEQ ID NO: 20342 - DNA, 19 bp, Artificial sequence
  SiRNA target sequence
caatccttcccgcatcttt

SEQ ID NO: 20343 - DNA, 19 bp, Artificial sequence
  SiRNA target sequence
aatccttcccgcatcttta

SEQ ID NO: 20344 - DNA, 19 bp, Artificial sequence
  SiRNA target sequence
atccttcccgcatctttag

SEQ ID NO: 20345 - DNA, 19 bp, Artificial sequence
  SiRNA target sequence
tccttcccgcatctttagt

SEQ ID NO: 20346 - DNA, 19 bp, Artificial sequence
  SiRNA target sequence
ccttcccgcatctttagta

SEQ ID NO: 20347 - DNA, 19 bp, Artificial sequence
  SiRNA target sequence
cttcccgcatctttagtag

SEQ ID NO: 20348 - DNA, 19 bp, Artificial sequence
  SiRNA target sequence
ttcccgcatctttagtagc

SEQ ID NO: 20349 - DNA, 19 bp, Artificial sequence
  SiRNA target sequence
tcccgcatctttagtagct

SEQ ID NO: 20350 - DNA, 19 bp, Artificial sequence
  SiRNA target sequence
cccgcatctttagtagctt

SEQ ID NO: 20351 - DNA, 19 bp, Artificial sequence
  SiRNA target sequence
ccgcatctttagtagcttg

SEQ ID NO: 20352 - DNA, 19 bp, Artificial sequence
  SiRNA target sequence
cgcatctttagtagcttgc

SEQ ID NO: 20353 - DNA, 19 bp, Artificial sequence
  SiRNA target sequence
gcatctttagtagcttgcc

SEQ ID NO: 20354 - DNA, 19 bp, Artificial sequence
  SiRNA target sequence
catctttagtagcttgcct

SEQ ID NO: 20355 - DNA, 19 bp, Artificial sequence
  SiRNA target sequence
atctttagtagcttgcctt

SEQ ID NO: 20356 - DNA, 19 bp, Artificial sequence
  SiRNA target sequence
tctttagtagcttgccttt

SEQ ID NO: 20357 - DNA, 19 bp, Artificial sequence
  SiRNA target sequence
ctttagtagcttgcctttg

SEQ ID NO: 20358 - DNA, 19 bp, Artificial sequence
  SiRNA target sequence
tttagtagcttgcctttgc

SEQ ID NO: 20359 - DNA, 19 bp, Artificial sequence
  SiRNA target sequence
ttagtagcttgcctttgca

SEQ ID NO: 20360 - DNA, 19 bp, Artificial sequence
  SiRNA target sequence
tagtagcttgcctttgcat

SEQ ID NO: 20361 - DNA, 19 bp, Artificial sequence
  SiRNA target sequence
agtagcttgcctttgcatg

SEQ ID NO: 20362 - DNA, 19 bp, Artificial sequence
  SiRNA target sequence
gtagcttgcctttgcatgt

SEQ ID NO: 20363 - DNA, 19 bp, Artificial sequence
  SiRNA target sequence
tagcttgcctttgcatgtc

SEQ ID NO: 20364 - DNA, 19 bp, Artificial sequence
  SiRNA target sequence
agcttgcctttgcatgtca

SEQ ID NO: 20365 - DNA, 19 bp, Artificial sequence
  SiRNA target sequence
gcttgcctttgcatgtcat

SEQ ID NO: 20366 - DNA, 19 bp, Artificial sequence
  SiRNA target sequence
cttgcctttgcatgtcatc

SEQ ID NO: 20367 - DNA, 19 bp, Artificial sequence
  SiRNA target sequence
ttgcctttgcatgtcatca

SEQ ID NO: 20368 - DNA, 19 bp, Artificial sequence
  SiRNA target sequence
tgcctttgcatgtcatcaa

SEQ ID NO: 20369 - DNA, 19 bp, Artificial sequence
  SiRNA target sequence
gcctttgcatgtcatcaaa

SEQ ID NO: 20370 - DNA, 19 bp, Artificial sequence
  SiRNA target sequence
cctttgcatgtcatcaaaa

SEQ ID NO: 20371 - DNA, 19 bp, Artificial sequence
  SiRNA target sequence
ctttgcatgtcatcaaaat

SEQ ID NO: 20372 - DNA, 19 bp, Artificial sequence
  SiRNA target sequence
tttgcatgtcatcaaaata

SEQ ID NO: 20373 - DNA, 19 bp, Artificial sequence
  SiRNA target sequence
ttgcatgtcatcaaaatat

SEQ ID NO: 20374 - DNA, 19 bp, Artificial sequence
  SiRNA target sequence
tgcatgtcatcaaaatatg

SEQ ID NO: 20375 - DNA, 19 bp, Artificial sequence
  SiRNA target sequence
gcatgtcatcaaaatatgc

SEQ ID NO: 20376 - DNA, 19 bp, Artificial sequence
  SiRNA target sequence
catgtcatcaaaatatgcg

SEQ ID NO: 20377 - DNA, 19 bp, Artificial sequence
  SiRNA target sequence
atgtcatcaaaatatgcgg

SEQ ID NO: 20378 - DNA, 19 bp, Artificial sequence
  SiRNA target sequence
tgtcatcaaaatatgcggg

SEQ ID NO: 20379 - DNA, 19 bp, Artificial sequence
  SiRNA target sequence
gtcatcaaaatatgcgggc

SEQ ID NO: 20380 - DNA, 19 bp, Artificial sequence
  SiRNA target sequence
tcatcaaaatatgcgggca

SEQ ID NO: 20381 - DNA, 19 bp, Artificial sequence
  SiRNA target sequence
catcaaaatatgcgggcac

SEQ ID NO: 20382 - DNA, 19 bp, Artificial sequence
  SiRNA target sequence
atcaaaatatgcgggcact

SEQ ID NO: 20383 - DNA, 19 bp, Artificial sequence
  SiRNA target sequence
tcaaaatatgcgggcactg

SEQ ID NO: 20384 - DNA, 19 bp, Artificial sequence
  SiRNA target sequence
caaaatatgcgggcactgt

SEQ ID NO: 20385 - DNA, 19 bp, Artificial sequence
  SiRNA target sequence
aaaatatgcgggcactgtt

SEQ ID NO: 20386 - DNA, 19 bp, Artificial sequence
  SiRNA target sequence
aaatatgcgggcactgtta

SEQ ID NO: 20387 - DNA, 19 bp, Artificial sequence
  SiRNA target sequence
aatatgcgggcactgttat

SEQ ID NO: 20388 - DNA, 19 bp, Artificial sequence
  SiRNA target sequence
atatgcgggcactgttata

SEQ ID NO: 20389 - DNA, 19 bp, Artificial sequence
  SiRNA target sequence
tatgcgggcactgttataa

SEQ ID NO: 20390 - DNA, 19 bp, Artificial sequence
  SiRNA target sequence
atgcgggcactgttataac

SEQ ID NO: 20391 - DNA, 19 bp, Artificial sequence
  SiRNA target sequence
tgcgggcactgttataaca

SEQ ID NO: 20392 - DNA, 19 bp, Artificial sequence
  SiRNA target sequence
gcgggcactgttataacag

SEQ ID NO: 20393 - DNA, 19 bp, Artificial sequence
  SiRNA target sequence
cgggcactgttataacaga

SEQ ID NO: 20394 - DNA, 19 bp, Artificial sequence
  SiRNA target sequence
gggcactgttataacagat

SEQ ID NO: 20395 - DNA, 19 bp, Artificial sequence
  SiRNA target sequence
ggcactgttataacagatc

SEQ ID NO: 20396 - DNA, 19 bp, Artificial sequence
  SiRNA target sequence
gcactgttataacagatct

SEQ ID NO: 20397 - DNA, 19 bp, Artificial sequence
  SiRNA target sequence
cactgttataacagatctt

SEQ ID NO: 20398 - DNA, 19 bp, Artificial sequence
  SiRNA target sequence
actgttataacagatctta

SEQ ID NO: 20399 - DNA, 19 bp, Artificial sequence
  SiRNA target sequence
ctgttataacagatcttaa

SEQ ID NO: 20400 - DNA, 19 bp, Artificial sequence
  SiRNA target sequence
tgttataacagatcttaat

SEQ ID NO: 20401 - DNA, 19 bp, Artificial sequence
  SiRNA target sequence
gttataacagatcttaata

SEQ ID NO: 20402 - DNA, 19 bp, Artificial sequence
  SiRNA target sequence
ttataacagatcttaatac

SEQ ID NO: 20403 - DNA, 19 bp, Artificial sequence
  SiRNA target sequence
tataacagatcttaatact

SEQ ID NO: 20404 - DNA, 19 bp, Artificial sequence
  SiRNA target sequence
ataacagatcttaatactt

SEQ ID NO: 20405 - DNA, 19 bp, Artificial sequence
  SiRNA target sequence
taacagatcttaatacttt

SEQ ID NO: 20406 - DNA, 19 bp, Artificial sequence
  SiRNA target sequence
aacagatcttaatacttta

SEQ ID NO: 20407 - DNA, 19 bp, Artificial sequence
  SiRNA target sequence
acagatcttaatactttag

SEQ ID NO: 20408 - DNA, 19 bp, Artificial sequence
  SiRNA target sequence
cagatcttaatactttaga

SEQ ID NO: 20409 - DNA, 19 bp, Artificial sequence
  SiRNA target sequence
agatcttaatactttagaa

SEQ ID NO: 20410 - DNA, 19 bp, Artificial sequence
  SiRNA target sequence
gatcttaatactttagaat

SEQ ID NO: 20411 - DNA, 19 bp, Artificial sequence
  SiRNA target sequence
atcttaatactttagaatt

SEQ ID NO: 20412 - DNA, 19 bp, Artificial sequence
  SiRNA target sequence
tcttaatactttagaattt

SEQ ID NO: 20413 - DNA, 19 bp, Artificial sequence
  SiRNA target sequence
cttaatactttagaattta

SEQ ID NO: 20414 - DNA, 19 bp, Artificial sequence
  SiRNA target sequence
ttaatactttagaatttaa

SEQ ID NO: 20415 - DNA, 19 bp, Artificial sequence
  SiRNA target sequence
taatactttagaatttaaa

SEQ ID NO: 20416 - DNA, 19 bp, Artificial sequence
  SiRNA target sequence
aatactttagaatttaaaa

SEQ ID NO: 20417 - DNA, 19 bp, Artificial sequence
  SiRNA target sequence
atactttagaatttaaaaa

SEQ ID NO: 20418 - DNA, 19 bp, Artificial sequence
  SiRNA target sequence
tactttagaatttaaaaaa

SEQ ID NO: 20419 - DNA, 19 bp, Artificial sequence
  SiRNA target sequence
actttagaatttaaaaaat

SEQ ID NO: 20420 - DNA, 19 bp, Artificial sequence
  SiRNA target sequence
ctttagaatttaaaaaatt

SEQ ID NO: 20421 - DNA, 19 bp, Artificial sequence
  SiRNA target sequence
tttagaatttaaaaaattc

SEQ ID NO: 20422 - DNA, 19 bp, Artificial sequence
  SiRNA target sequence
ttagaatttaaaaaattct

SEQ ID NO: 20423 - DNA, 19 bp, Artificial sequence
  SiRNA target sequence
tagaatttaaaaaattctc

SEQ ID NO: 20424 - DNA, 19 bp, Artificial sequence
  SiRNA target sequence
agaatttaaaaaattctct

SEQ ID NO: 20425 - DNA, 19 bp, Artificial sequence
  SiRNA target sequence
gaatttaaaaaattctctg

SEQ ID NO: 20426 - DNA, 19 bp, Artificial sequence
  SiRNA target sequence
aatttaaaaaattctctgc

SEQ ID NO: 20427 - DNA, 19 bp, Artificial sequence
  SiRNA target sequence
atttaaaaaattctctgcg

SEQ ID NO: 20428 - DNA, 19 bp, Artificial sequence
  SiRNA target sequence
tttaaaaaattctctgcgg

SEQ ID NO: 20429 - DNA, 19 bp, Artificial sequence
  SiRNA target sequence
ttaaaaaattctctgcggc

SEQ ID NO: 20430 - DNA, 19 bp, Artificial sequence
  SiRNA target sequence
taaaaaattctctgcggca

SEQ ID NO: 20431 - DNA, 19 bp, Artificial sequence
  SiRNA target sequence
aaaaaattctctgcggcat

SEQ ID NO: 20432 - DNA, 19 bp, Artificial sequence
  SiRNA target sequence
aaaaattctctgcggcatt

SEQ ID NO: 20433 - DNA, 19 bp, Artificial sequence
  SiRNA target sequence
aaaattctctgcggcattt

SEQ ID NO: 20434 - DNA, 19 bp, Artificial sequence
  SiRNA target sequence
aaattctctgcggcatttt

SEQ ID NO: 20435 - DNA, 19 bp, Artificial sequence
  SiRNA target sequence
aattctctgcggcattttt

SEQ ID NO: 20436 - DNA, 19 bp, Artificial sequence
  SiRNA target sequence
attctctgcggcatttttc

SEQ ID NO: 20437 - DNA, 19 bp, Artificial sequence
  SiRNA target sequence
ttctctgcggcatttttca

SEQ ID NO: 20438 - DNA, 19 bp, Artificial sequence
  SiRNA target sequence
tctctgcggcatttttcat

SEQ ID NO: 20439 - DNA, 19 bp, Artificial sequence
  SiRNA target sequence
ctctgcggcatttttcatt

SEQ ID NO: 20440 - DNA, 19 bp, Artificial sequence
  SiRNA target sequence
tctgcggcatttttcattt

SEQ ID NO: 20441 - DNA, 19 bp, Artificial sequence
  SiRNA target sequence
ctgcggcatttttcatttt

SEQ ID NO: 20442 - DNA, 19 bp, Artificial sequence
  SiRNA target sequence
tgcggcatttttcattttt

SEQ ID NO: 20443 - DNA, 19 bp, Artificial sequence
  SiRNA target sequence
gcggcatttttcatttttg

SEQ ID NO: 20444 - DNA, 19 bp, Artificial sequence
  SiRNA target sequence
cggcatttttcatttttga

SEQ ID NO: 20445 - DNA, 19 bp, Artificial sequence
  SiRNA target sequence
ggcatttttcatttttgac

SEQ ID NO: 20446 - DNA, 19 bp, Artificial sequence
  SiRNA target sequence
gcatttttcatttttgaca

SEQ ID NO: 20447 - DNA, 19 bp, Artificial sequence
  SiRNA target sequence
catttttcatttttgacaa

SEQ ID NO: 20448 - DNA, 19 bp, Artificial sequence
  SiRNA target sequence
atttttcatttttgacaaa

SEQ ID NO: 20449 - DNA, 19 bp, Artificial sequence
  SiRNA target sequence
tttttcatttttgacaaaa

SEQ ID NO: 20450 - DNA, 19 bp, Artificial sequence
  SiRNA target sequence
ttttcatttttgacaaaat

SEQ ID NO: 20451 - DNA, 19 bp, Artificial sequence
  SiRNA target sequence
tttcatttttgacaaaata

SEQ ID NO: 20452 - DNA, 19 bp, Artificial sequence
  SiRNA target sequence
ttcatttttgacaaaataa

SEQ ID NO: 20453 - DNA, 19 bp, Artificial sequence
  SiRNA target sequence
tcatttttgacaaaataaa

SEQ ID NO: 20454 - DNA, 19 bp, Artificial sequence
  SiRNA target sequence
catttttgacaaaataaat

SEQ ID NO: 20455 - DNA, 19 bp, Artificial sequence
  SiRNA target sequence
atttttgacaaaataaatg

SEQ ID NO: 20456 - DNA, 19 bp, Artificial sequence
  SiRNA target sequence
tttttgacaaaataaatgc

SEQ ID NO: 20457 - DNA, 19 bp, Artificial sequence
  SiRNA target sequence
ttttgacaaaataaatgca

SEQ ID NO: 20458 - DNA, 19 bp, Artificial sequence
  SiRNA target sequence
tttgacaaaataaatgcac

SEQ ID NO: 20459 - DNA, 19 bp, Artificial sequence
  SiRNA target sequence
ttgacaaaataaatgcacc

SEQ ID NO: 20460 - DNA, 19 bp, Artificial sequence
  SiRNA target sequence
tgacaaaataaatgcacca

SEQ ID NO: 20461 - DNA, 19 bp, Artificial sequence
  SiRNA target sequence
gacaaaataaatgcaccaa

SEQ ID NO: 20462 - DNA, 19 bp, Artificial sequence
  SiRNA target sequence
acaaaataaatgcaccaat

SEQ ID NO: 20463 - DNA, 19 bp, Artificial sequence
  SiRNA target sequence
caaaataaatgcaccaatt

SEQ ID NO: 20464 - DNA, 19 bp, Artificial sequence
  SiRNA target sequence
aaaataaatgcaccaattt

SEQ ID NO: 20465 - DNA, 19 bp, Artificial sequence
  SiRNA target sequence
aaataaatgcaccaatttg

SEQ ID NO: 20466 - DNA, 19 bp, Artificial sequence
  SiRNA target sequence
aataaatgcaccaatttgt

SEQ ID NO: 20467 - DNA, 19 bp, Artificial sequence
  SiRNA target sequence
ataaatgcaccaatttgtg

SEQ ID NO: 20468 - DNA, 19 bp, Artificial sequence
  SiRNA target sequence
taaatgcaccaatttgtgc

SEQ ID NO: 20469 - DNA, 19 bp, Artificial sequence
  SiRNA target sequence
aaatgcaccaatttgtgca

SEQ ID NO: 20470 - DNA, 19 bp, Artificial sequence
  SiRNA target sequence
aatgcaccaatttgtgcag

SEQ ID NO: 20471 - DNA, 19 bp, Artificial sequence
  SiRNA target sequence
atgcaccaatttgtgcagg

SEQ ID NO: 20472 - DNA, 19 bp, Artificial sequence
  SiRNA target sequence
tgcaccaatttgtgcagga

SEQ ID NO: 20473 - DNA, 19 bp, Artificial sequence
  SiRNA target sequence
gcaccaatttgtgcaggag

SEQ ID NO: 20474 - DNA, 19 bp, Artificial sequence
  SiRNA target sequence
caccaatttgtgcaggaga

SEQ ID NO: 20475 - DNA, 19 bp, Artificial sequence
  SiRNA target sequence
accaatttgtgcaggagaa

SEQ ID NO: 20476 - DNA, 19 bp, Artificial sequence
  SiRNA target sequence
ccaatttgtgcaggagaat

SEQ ID NO: 20477 - DNA, 19 bp, Artificial sequence
  SiRNA target sequence
caatttgtgcaggagaata

SEQ ID NO: 20478 - DNA, 19 bp, Artificial sequence
  SiRNA target sequence
aatttgtgcaggagaatat

SEQ ID NO: 20479 - DNA, 19 bp, Artificial sequence
  SiRNA target sequence
atttgtgcaggagaatatt

SEQ ID NO: 20480 - DNA, 19 bp, Artificial sequence
  SiRNA target sequence
tttgtgcaggagaatattt

SEQ ID NO: 20481 - DNA, 19 bp, Artificial sequence
  SiRNA target sequence
ttgtgcaggagaatatttc

SEQ ID NO: 20482 - DNA, 19 bp, Artificial sequence
  SiRNA target sequence
tgtgcaggagaatatttct

SEQ ID NO: 20483 - DNA, 19 bp, Artificial sequence
  SiRNA target sequence
gtgcaggagaatatttctt

SEQ ID NO: 20484 - DNA, 19 bp, Artificial sequence
  SiRNA target sequence
tgcaggagaatatttctta

SEQ ID NO: 20485 - DNA, 19 bp, Artificial sequence
  SiRNA target sequence
gcaggagaatatttcttat

SEQ ID NO: 20486 - DNA, 19 bp, Artificial sequence
  SiRNA target sequence
caggagaatatttcttatt

SEQ ID NO: 20487 - DNA, 19 bp, Artificial sequence
  SiRNA target sequence
aggagaatatttcttattg

SEQ ID NO: 20488 - DNA, 19 bp, Artificial sequence
  SiRNA target sequence
ggagaatatttcttattgt

SEQ ID NO: 20489 - DNA, 19 bp, Artificial sequence
  SiRNA target sequence
gagaatatttcttattgtc

SEQ ID NO: 20490 - DNA, 19 bp, Artificial sequence
  SiRNA target sequence
agaatatttcttattgtca

SEQ ID NO: 20491 - DNA, 19 bp, Artificial sequence
  SiRNA target sequence
gaatatttcttattgtcaa

SEQ ID NO: 20492 - DNA, 19 bp, Artificial sequence
  SiRNA target sequence
aatatttcttattgtcaat

SEQ ID NO: 20493 - DNA, 19 bp, Artificial sequence
  SiRNA target sequence
atatttcttattgtcaatt

SEQ ID NO: 20494 - DNA, 19 bp, Artificial sequence
  SiRNA target sequence
tatttcttattgtcaattt

SEQ ID NO: 20495 - DNA, 19 bp, Artificial sequence
  SiRNA target sequence
atttcttattgtcaatttt

SEQ ID NO: 20496 - DNA, 19 bp, Artificial sequence
  SiRNA target sequence
tttcttattgtcaattttt

SEQ ID NO: 20497 - DNA, 19 bp, Artificial sequence
  SiRNA target sequence
ttcttattgtcaattttta

SEQ ID NO: 20498 - DNA, 19 bp, Artificial sequence
  SiRNA target sequence
tcttattgtcaatttttat

SEQ ID NO: 20499 - DNA, 19 bp, Artificial sequence
  SiRNA target sequence
cttattgtcaatttttatc

SEQ ID NO: 20500 - DNA, 19 bp, Artificial sequence
  SiRNA target sequence
ttattgtcaatttttatcc

SEQ ID NO: 20501 - DNA, 19 bp, Artificial sequence
  SiRNA target sequence
tattgtcaatttttatcca

SEQ ID NO: 20502 - DNA, 19 bp, Artificial sequence
  SiRNA target sequence
attgtcaatttttatccaa

SEQ ID NO: 20503 - DNA, 19 bp, Artificial sequence
  SiRNA target sequence
ttgtcaatttttatccaaa

SEQ ID NO: 20504 - DNA, 19 bp, Artificial sequence
  SiRNA target sequence
tgtcaatttttatccaaat

SEQ ID NO: 20505 - DNA, 19 bp, Artificial sequence
  SiRNA target sequence
gtcaatttttatccaaata

SEQ ID NO: 20506 - DNA, 19 bp, Artificial sequence
  SiRNA target sequence
tcaatttttatccaaatat

SEQ ID NO: 20507 - DNA, 19 bp, Artificial sequence
  SiRNA target sequence
caatttttatccaaatatc

SEQ ID NO: 20508 - DNA, 19 bp, Artificial sequence
  SiRNA target sequence
aatttttatccaaatatcg

SEQ ID NO: 20509 - DNA, 19 bp, Artificial sequence
  SiRNA target sequence
atttttatccaaatatcgc

SEQ ID NO: 20510 - DNA, 19 bp, Artificial sequence
  SiRNA target sequence
tttttatccaaatatcgcc

SEQ ID NO: 20511 - DNA, 19 bp, Artificial sequence
  SiRNA target sequence
ttttatccaaatatcgccg

SEQ ID NO: 20512 - DNA, 19 bp, Artificial sequence
  SiRNA target sequence
tttatccaaatatcgccgt

SEQ ID NO: 20513 - DNA, 19 bp, Artificial sequence
  SiRNA target sequence
ttatccaaatatcgccgtt

SEQ ID NO: 20514 - DNA, 19 bp, Artificial sequence
  SiRNA target sequence
tatccaaatatcgccgtta

SEQ ID NO: 20515 - DNA, 19 bp, Artificial sequence
  SiRNA target sequence
atccaaatatcgccgttac

SEQ ID NO: 20516 - DNA, 19 bp, Artificial sequence
  SiRNA target sequence
tccaaatatcgccgttaca

SEQ ID NO: 20517 - DNA, 19 bp, Artificial sequence
  SiRNA target sequence
ccaaatatcgccgttacaa

SEQ ID NO: 20518 - DNA, 19 bp, Artificial sequence
  SiRNA target sequence
caaatatcgccgttacaat

SEQ ID NO: 20519 - DNA, 19 bp, Artificial sequence
  SiRNA target sequence
aaatatcgccgttacaatg

SEQ ID NO: 20520 - DNA, 19 bp, Artificial sequence
  SiRNA target sequence
aatatcgccgttacaatgc

SEQ ID NO: 20521 - DNA, 19 bp, Artificial sequence
  SiRNA target sequence
atatcgccgttacaatgct

SEQ ID NO: 20522 - DNA, 19 bp, Artificial sequence
  SiRNA target sequence
tatcgccgttacaatgctt

SEQ ID NO: 20523 - DNA, 19 bp, Artificial sequence
  SiRNA target sequence
atcgccgttacaatgctta

SEQ ID NO: 20524 - DNA, 19 bp, Artificial sequence
  SiRNA target sequence
tcgccgttacaatgcttag

SEQ ID NO: 20525 - DNA, 19 bp, Artificial sequence
  SiRNA target sequence
cgccgttacaatgcttagt

SEQ ID NO: 20526 - DNA, 19 bp, Artificial sequence
  SiRNA target sequence
gccgttacaatgcttagta

SEQ ID NO: 20527 - DNA, 19 bp, Artificial sequence
  SiRNA target sequence
ccgttacaatgcttagtag

SEQ ID NO: 20528 - DNA, 19 bp, Artificial sequence
  SiRNA target sequence
cgttacaatgcttagtagt

SEQ ID NO: 20529 - DNA, 19 bp, Artificial sequence
  SiRNA target sequence
gttacaatgcttagtagtg

SEQ ID NO: 20530 - DNA, 19 bp, Artificial sequence
  SiRNA target sequence
ttacaatgcttagtagtgt

SEQ ID NO: 20531 - DNA, 19 bp, Artificial sequence
  SiRNA target sequence
tacaatgcttagtagtgtc

SEQ ID NO: 20532 - DNA, 19 bp, Artificial sequence
  SiRNA target sequence
acaatgcttagtagtgtca

SEQ ID NO: 20533 - DNA, 19 bp, Artificial sequence
  SiRNA target sequence
caatgcttagtagtgtcat

SEQ ID NO: 20534 - DNA, 19 bp, Artificial sequence
  SiRNA target sequence
aatgcttagtagtgtcata

SEQ ID NO: 20535 - DNA, 19 bp, Artificial sequence
  SiRNA target sequence
atgcttagtagtgtcatat

SEQ ID NO: 20536 - DNA, 19 bp, Artificial sequence
  SiRNA target sequence
tgcttagtagtgtcatatg

SEQ ID NO: 20537 - DNA, 19 bp, Artificial sequence
  SiRNA target sequence
gcttagtagtgtcatatgg

SEQ ID NO: 20538 - DNA, 19 bp, Artificial sequence
  SiRNA target sequence
cttagtagtgtcatatggt

SEQ ID NO: 20539 - DNA, 19 bp, Artificial sequence
  SiRNA target sequence
ttagtagtgtcatatggta

SEQ ID NO: 20540 - DNA, 19 bp, Artificial sequence
  SiRNA target sequence
tagtagtgtcatatggtaa

SEQ ID NO: 20541 - DNA, 19 bp, Artificial sequence
  SiRNA target sequence
agtagtgtcatatggtaag

SEQ ID NO: 20542 - DNA, 19 bp, Artificial sequence
  SiRNA target sequence
gtagtgtcatatggtaagc

SEQ ID NO: 20543 - DNA, 19 bp, Artificial sequence
  SiRNA target sequence
tagtgtcatatggtaagct

SEQ ID NO: 20544 - DNA, 19 bp, Artificial sequence
  SiRNA target sequence
agtgtcatatggtaagctt

SEQ ID NO: 20545 - DNA, 19 bp, Artificial sequence
  SiRNA target sequence
gtgtcatatggtaagcttt

SEQ ID NO: 20546 - DNA, 19 bp, Artificial sequence
  SiRNA target sequence
tgtcatatggtaagctttt

SEQ ID NO: 20547 - DNA, 19 bp, Artificial sequence
  SiRNA target sequence
gtcatatggtaagcttttt

SEQ ID NO: 20548 - DNA, 19 bp, Artificial sequence
  SiRNA target sequence
tcatatggtaagcttttta

SEQ ID NO: 20549 - DNA, 19 bp, Artificial sequence
  SiRNA target sequence
catatggtaagctttttaa

SEQ ID NO: 20550 - DNA, 19 bp, Artificial sequence
  SiRNA target sequence
atatggtaagctttttaaa

SEQ ID NO: 20551 - DNA, 19 bp, Artificial sequence
  SiRNA target sequence
tatggtaagctttttaaat

SEQ ID NO: 20552 - DNA, 19 bp, Artificial sequence
  SiRNA target sequence
atggtaagctttttaaata

SEQ ID NO: 20553 - DNA, 19 bp, Artificial sequence
  SiRNA target sequence
tggtaagctttttaaataa

SEQ ID NO: 20554 - DNA, 19 bp, Artificial sequence
  SiRNA target sequence
ggtaagctttttaaataat

SEQ ID NO: 20555 - DNA, 19 bp, Artificial sequence
  SiRNA target sequence
gtaagctttttaaataatc

SEQ ID NO: 20556 - DNA, 19 bp, Artificial sequence
  SiRNA target sequence
taagctttttaaataatct

SEQ ID NO: 20557 - DNA, 19 bp, Artificial sequence
  SiRNA target sequence
aagctttttaaataatctt

SEQ ID NO: 20558 - DNA, 19 bp, Artificial sequence
  SiRNA target sequence
agctttttaaataatcttt

SEQ ID NO: 20559 - DNA, 19 bp, Artificial sequence
  SiRNA target sequence
gctttttaaataatctttt

SEQ ID NO: 20560 - DNA, 19 bp, Artificial sequence
  SiRNA target sequence
ctttttaaataatctttta

SEQ ID NO: 20561 - DNA, 19 bp, Artificial sequence
  SiRNA target sequence
tttttaaataatcttttaa

SEQ ID NO: 20562 - DNA, 19 bp, Artificial sequence
  SiRNA target sequence
ttttaaataatcttttaat

SEQ ID NO: 20563 - DNA, 19 bp, Artificial sequence
  SiRNA target sequence
tttaaataatcttttaatt

SEQ ID NO: 20564 - DNA, 19 bp, Artificial sequence
  SiRNA target sequence
ttaaataatcttttaattc

SEQ ID NO: 20565 - DNA, 19 bp, Artificial sequence
  SiRNA target sequence
taaataatcttttaattct

SEQ ID NO: 20566 - DNA, 19 bp, Artificial sequence
  SiRNA target sequence
aaataatcttttaattcta

SEQ ID NO: 20567 - DNA, 19 bp, Artificial sequence
  SiRNA target sequence
aataatcttttaattctac

SEQ ID NO: 20568 - DNA, 19 bp, Artificial sequence
  SiRNA target sequence
ataatcttttaattctaca

SEQ ID NO: 20569 - DNA, 19 bp, Artificial sequence
  SiRNA target sequence
taatcttttaattctacat

SEQ ID NO: 20570 - DNA, 19 bp, Artificial sequence
  SiRNA target sequence
aatcttttaattctacatc

SEQ ID NO: 20571 - DNA, 19 bp, Artificial sequence
  SiRNA target sequence
atcttttaattctacatca

SEQ ID NO: 20572 - DNA, 19 bp, Artificial sequence
  SiRNA target sequence
tcttttaattctacatcat

SEQ ID NO: 20573 - DNA, 19 bp, Artificial sequence
  SiRNA target sequence
cttttaattctacatcatc

SEQ ID NO: 20574 - DNA, 19 bp, Artificial sequence
  SiRNA target sequence
ttttaattctacatcatca

SEQ ID NO: 20575 - DNA, 19 bp, Artificial sequence
  SiRNA target sequence
tttaattctacatcatcaa

SEQ ID NO: 20576 - DNA, 19 bp, Artificial sequence
  SiRNA target sequence
ttaattctacatcatcaaa

SEQ ID NO: 20577 - DNA, 19 bp, Artificial sequence
  SiRNA target sequence
taattctacatcatcaaat

SEQ ID NO: 20578 - DNA, 19 bp, Artificial sequence
  SiRNA target sequence
aattctacatcatcaaatt

SEQ ID NO: 20579 - DNA, 19 bp, Artificial sequence
  SiRNA target sequence
attctacatcatcaaattt

SEQ ID NO: 20580 - DNA, 19 bp, Artificial sequence
  SiRNA target sequence
ttctacatcatcaaatttt

SEQ ID NO: 20581 - DNA, 19 bp, Artificial sequence
  SiRNA target sequence
tctacatcatcaaattttc

SEQ ID NO: 20582 - DNA, 19 bp, Artificial sequence
  SiRNA target sequence
ctacatcatcaaattttcg

SEQ ID NO: 20583 - DNA, 19 bp, Artificial sequence
  SiRNA target sequence
tacatcatcaaattttcgt

SEQ ID NO: 20584 - DNA, 19 bp, Artificial sequence
  SiRNA target sequence
acatcatcaaattttcgtc

SEQ ID NO: 20585 - DNA, 19 bp, Artificial sequence
  SiRNA target sequence
catcatcaaattttcgtcc

SEQ ID NO: 20586 - DNA, 19 bp, Artificial sequence
  SiRNA target sequence
atcatcaaattttcgtccc

SEQ ID NO: 20587 - DNA, 19 bp, Artificial sequence
  SiRNA target sequence
tcatcaaattttcgtccca

SEQ ID NO: 20588 - DNA, 19 bp, Artificial sequence
  SiRNA target sequence
catcaaattttcgtcccag

SEQ ID NO: 20589 - DNA, 19 bp, Artificial sequence
  SiRNA target sequence
atcaaattttcgtcccagc

SEQ ID NO: 20590 - DNA, 19 bp, Artificial sequence
  SiRNA target sequence
tcaaattttcgtcccagca

SEQ ID NO: 20591 - DNA, 19 bp, Artificial sequence
  SiRNA target sequence
caaattttcgtcccagcaa

SEQ ID NO: 20592 - DNA, 19 bp, Artificial sequence
  SiRNA target sequence
aaattttcgtcccagcaat

SEQ ID NO: 20593 - DNA, 19 bp, Artificial sequence
  SiRNA target sequence
aattttcgtcccagcaatc

SEQ ID NO: 20594 - DNA, 19 bp, Artificial sequence
  SiRNA target sequence
attttcgtcccagcaatct

SEQ ID NO: 20595 - DNA, 19 bp, Artificial sequence
  SiRNA target sequence
ttttcgtcccagcaatctc

SEQ ID NO: 20596 - DNA, 19 bp, Artificial sequence
  SiRNA target sequence
tttcgtcccagcaatctct

SEQ ID NO: 20597 - DNA, 19 bp, Artificial sequence
  SiRNA target sequence
ttcgtcccagcaatctctt

SEQ ID NO: 20598 - DNA, 19 bp, Artificial sequence
  SiRNA target sequence
tcgtcccagcaatctctta

SEQ ID NO: 20599 - DNA, 19 bp, Artificial sequence
  SiRNA target sequence
cgtcccagcaatctcttag

SEQ ID NO: 20600 - DNA, 19 bp, Artificial sequence
  SiRNA target sequence
gtcccagcaatctcttaga

SEQ ID NO: 20601 - DNA, 19 bp, Artificial sequence
  SiRNA target sequence
tcccagcaatctcttagac

SEQ ID NO: 20602 - DNA, 19 bp, Artificial sequence
  SiRNA target sequence
cccagcaatctcttagacg

SEQ ID NO: 20603 - DNA, 19 bp, Artificial sequence
  SiRNA target sequence
ccagcaatctcttagacgc

SEQ ID NO: 20604 - DNA, 19 bp, Artificial sequence
  SiRNA target sequence
cagcaatctcttagacgca

SEQ ID NO: 20605 - DNA, 19 bp, Artificial sequence
  SiRNA target sequence
agcaatctcttagacgcaa

SEQ ID NO: 20606 - DNA, 19 bp, Artificial sequence
  SiRNA target sequence
gcaatctcttagacgcaaa

SEQ ID NO: 20607 - DNA, 19 bp, Artificial sequence
  SiRNA target sequence
caatctcttagacgcaaaa

SEQ ID NO: 20608 - DNA, 19 bp, Artificial sequence
  SiRNA target sequence
aatctcttagacgcaaaaa

SEQ ID NO: 20609 - DNA, 19 bp, Artificial sequence
  SiRNA target sequence
atctcttagacgcaaaaat

SEQ ID NO: 20610 - DNA, 19 bp, Artificial sequence
  SiRNA target sequence
tctcttagacgcaaaaatc

SEQ ID NO: 20611 - DNA, 19 bp, Artificial sequence
  SiRNA target sequence
ctcttagacgcaaaaatcg

SEQ ID NO: 20612 - DNA, 19 bp, Artificial sequence
  SiRNA target sequence
tcttagacgcaaaaatcgt

SEQ ID NO: 20613 - DNA, 19 bp, Artificial sequence
  SiRNA target sequence
cttagacgcaaaaatcgta

SEQ ID NO: 20614 - DNA, 19 bp, Artificial sequence
  SiRNA target sequence
ttagacgcaaaaatcgtat

SEQ ID NO: 20615 - DNA, 19 bp, Artificial sequence
  SiRNA target sequence
tagacgcaaaaatcgtatt

SEQ ID NO: 20616 - DNA, 19 bp, Artificial sequence
  SiRNA target sequence
agacgcaaaaatcgtattc

SEQ ID NO: 20617 - DNA, 19 bp, Artificial sequence
  SiRNA target sequence
gacgcaaaaatcgtattct

SEQ ID NO: 20618 - DNA, 19 bp, Artificial sequence
  SiRNA target sequence
acgcaaaaatcgtattctt

SEQ ID NO: 20619 - DNA, 19 bp, Artificial sequence
  SiRNA target sequence
cgcaaaaatcgtattcttg

SEQ ID NO: 20620 - DNA, 19 bp, Artificial sequence
  SiRNA target sequence
gcaaaaatcgtattcttgg

SEQ ID NO: 20621 - DNA, 19 bp, Artificial sequence
  SiRNA target sequence
caaaaatcgtattcttggg

SEQ ID NO: 20622 - DNA, 19 bp, Artificial sequence
  SiRNA target sequence
aaaaatcgtattcttggga

SEQ ID NO: 20623 - DNA, 19 bp, Artificial sequence
  SiRNA target sequence
aaaatcgtattcttgggat

SEQ ID NO: 20624 - DNA, 19 bp, Artificial sequence
  SiRNA target sequence
aaatcgtattcttgggatg

SEQ ID NO: 20625 - DNA, 19 bp, Artificial sequence
  SiRNA target sequence
aatcgtattcttgggatgt

SEQ ID NO: 20626 - DNA, 19 bp, Artificial sequence
  SiRNA target sequence
atcgtattcttgggatgta

SEQ ID NO: 20627 - DNA, 19 bp, Artificial sequence
  SiRNA target sequence
tcgtattcttgggatgtaa

SEQ ID NO: 20628 - DNA, 19 bp, Artificial sequence
  SiRNA target sequence
cgtattcttgggatgtaat

SEQ ID NO: 20629 - DNA, 19 bp, Artificial sequence
  SiRNA target sequence
gtattcttgggatgtaata

SEQ ID NO: 20630 - DNA, 19 bp, Artificial sequence
  SiRNA target sequence
tattcttgggatgtaataa

SEQ ID NO: 20631 - DNA, 19 bp, Artificial sequence
  SiRNA target sequence
attcttgggatgtaataac

SEQ ID NO: 20632 - DNA, 19 bp, Artificial sequence
  SiRNA target sequence
ttcttgggatgtaataaca

SEQ ID NO: 20633 - DNA, 19 bp, Artificial sequence
  SiRNA target sequence
tcttgggatgtaataacaa

SEQ ID NO: 20634 - DNA, 19 bp, Artificial sequence
  SiRNA target sequence
cttgggatgtaataacaag

SEQ ID NO: 20635 - DNA, 19 bp, Artificial sequence
  SiRNA target sequence
ttgggatgtaataacaagt

SEQ ID NO: 20636 - DNA, 19 bp, Artificial sequence
  SiRNA target sequence
tgggatgtaataacaagtt

SEQ ID NO: 20637 - DNA, 19 bp, Artificial sequence
  SiRNA target sequence
gggatgtaataacaagtta

SEQ ID NO: 20638 - DNA, 19 bp, Artificial sequence
  SiRNA target sequence
ggatgtaataacaagttag

SEQ ID NO: 20639 - DNA, 19 bp, Artificial sequence
  SiRNA target sequence
gatgtaataacaagttaga

SEQ ID NO: 20640 - DNA, 19 bp, Artificial sequence
  SiRNA target sequence
atgtaataacaagttagac

SEQ ID NO: 20641 - DNA, 19 bp, Artificial sequence
  SiRNA target sequence
tgtaataacaagttagact

SEQ ID NO: 20642 - DNA, 19 bp, Artificial sequence
  SiRNA target sequence
gtaataacaagttagactt

SEQ ID NO: 20643 - DNA, 19 bp, Artificial sequence
  SiRNA target sequence
taataacaagttagactta

SEQ ID NO: 20644 - DNA, 19 bp, Artificial sequence
  SiRNA target sequence
aataacaagttagacttag

SEQ ID NO: 20645 - DNA, 19 bp, Artificial sequence
  SiRNA target sequence
ataacaagttagacttagc

SEQ ID NO: 20646 - DNA, 19 bp, Artificial sequence
  SiRNA target sequence
taacaagttagacttagct

SEQ ID NO: 20647 - DNA, 19 bp, Artificial sequence
  SiRNA target sequence
aacaagttagacttagctt

SEQ ID NO: 20648 - DNA, 19 bp, Artificial sequence
  SiRNA target sequence
acaagttagacttagcttg

SEQ ID NO: 20649 - DNA, 19 bp, Artificial sequence
  SiRNA target sequence
caagttagacttagcttgc

SEQ ID NO: 20650 - DNA, 19 bp, Artificial sequence
  SiRNA target sequence
aagttagacttagcttgct

SEQ ID NO: 20651 - DNA, 19 bp, Artificial sequence
  SiRNA target sequence
agttagacttagcttgctc

SEQ ID NO: 20652 - DNA, 19 bp, Artificial sequence
  SiRNA target sequence
gttagacttagcttgctca

SEQ ID NO: 20653 - DNA, 19 bp, Artificial sequence
  SiRNA target sequence
ttagacttagcttgctcac

SEQ ID NO: 20654 - DNA, 19 bp, Artificial sequence
  SiRNA target sequence
tagacttagcttgctcacc

SEQ ID NO: 20655 - DNA, 19 bp, Artificial sequence
  SiRNA target sequence
agacttagcttgctcacct

SEQ ID NO: 20656 - DNA, 19 bp, Artificial sequence
  SiRNA target sequence
gacttagcttgctcacctg

SEQ ID NO: 20657 - DNA, 19 bp, Artificial sequence
  SiRNA target sequence
acttagcttgctcacctgt

SEQ ID NO: 20658 - DNA, 19 bp, Artificial sequence
  SiRNA target sequence
cttagcttgctcacctgtt

SEQ ID NO: 20659 - DNA, 19 bp, Artificial sequence
  SiRNA target sequence
ttagcttgctcacctgtta

SEQ ID NO: 20660 - DNA, 19 bp, Artificial sequence
  SiRNA target sequence
tagcttgctcacctgttaa

SEQ ID NO: 20661 - DNA, 19 bp, Artificial sequence
  SiRNA target sequence
agcttgctcacctgttaaa

SEQ ID NO: 20662 - DNA, 19 bp, Artificial sequence
  SiRNA target sequence
gcttgctcacctgttaaaa

SEQ ID NO: 20663 - DNA, 19 bp, Artificial sequence
  SiRNA target sequence
cttgctcacctgttaaaat

SEQ ID NO: 20664 - DNA, 19 bp, Artificial sequence
  SiRNA target sequence
ttgctcacctgttaaaatt

SEQ ID NO: 20665 - DNA, 19 bp, Artificial sequence
  SiRNA target sequence
tgctcacctgttaaaattt

SEQ ID NO: 20666 - DNA, 19 bp, Artificial sequence
  SiRNA target sequence
gctcacctgttaaaatttt

SEQ ID NO: 20667 - DNA, 19 bp, Artificial sequence
  SiRNA target sequence
ctcacctgttaaaatttta

SEQ ID NO: 20668 - DNA, 19 bp, Artificial sequence
  SiRNA target sequence
tcacctgttaaaattttat

SEQ ID NO: 20669 - DNA, 19 bp, Artificial sequence
  SiRNA target sequence
cacctgttaaaattttatc

SEQ ID NO: 20670 - DNA, 19 bp, Artificial sequence
  SiRNA target sequence
acctgttaaaattttatct

SEQ ID NO: 20671 - DNA, 19 bp, Artificial sequence
  SiRNA target sequence
cctgttaaaattttatctt

SEQ ID NO: 20672 - DNA, 19 bp, Artificial sequence
  SiRNA target sequence
ctgttaaaattttatcttt

SEQ ID NO: 20673 - DNA, 19 bp, Artificial sequence
  SiRNA target sequence
tgttaaaattttatcttta

SEQ ID NO: 20674 - DNA, 19 bp, Artificial sequence
  SiRNA target sequence
gttaaaattttatctttaa

SEQ ID NO: 20675 - DNA, 19 bp, Artificial sequence
  SiRNA target sequence
ttaaaattttatctttaaa

SEQ ID NO: 20676 - DNA, 19 bp, Artificial sequence
  SiRNA target sequence
taaaattttatctttaaaa

SEQ ID NO: 20677 - DNA, 19 bp, Artificial sequence
  SiRNA target sequence
aaaattttatctttaaaaa

SEQ ID NO: 20678 - DNA, 19 bp, Artificial sequence
  SiRNA target sequence
aaattttatctttaaaaat

SEQ ID NO: 20679 - DNA, 19 bp, Artificial sequence
  SiRNA target sequence
aattttatctttaaaaatt

SEQ ID NO: 20680 - DNA, 19 bp, Artificial sequence
  SiRNA target sequence
attttatctttaaaaattg

SEQ ID NO: 20681 - DNA, 19 bp, Artificial sequence
  SiRNA target sequence
ttttatctttaaaaattga

SEQ ID NO: 20682 - DNA, 19 bp, Artificial sequence
  SiRNA target sequence
tttatctttaaaaattgat

SEQ ID NO: 20683 - DNA, 19 bp, Artificial sequence
  SiRNA target sequence
ttatctttaaaaattgata

SEQ ID NO: 20684 - DNA, 19 bp, Artificial sequence
  SiRNA target sequence
tatctttaaaaattgatac

SEQ ID NO: 20685 - DNA, 19 bp, Artificial sequence
  SiRNA target sequence
atctttaaaaattgatacc

SEQ ID NO: 20686 - DNA, 19 bp, Artificial sequence
  SiRNA target sequence
tctttaaaaattgatacca

SEQ ID NO: 20687 - DNA, 19 bp, Artificial sequence
  SiRNA target sequence
ctttaaaaattgataccac

SEQ ID NO: 20688 - DNA, 19 bp, Artificial sequence
  SiRNA target sequence
tttaaaaattgataccacc

SEQ ID NO: 20689 - DNA, 19 bp, Artificial sequence
  SiRNA target sequence
ttaaaaattgataccaccg

SEQ ID NO: 20690 - DNA, 19 bp, Artificial sequence
  SiRNA target sequence
taaaaattgataccaccga

SEQ ID NO: 20691 - DNA, 19 bp, Artificial sequence
  SiRNA target sequence
aaaaattgataccaccgat

SEQ ID NO: 20692 - DNA, 19 bp, Artificial sequence
  SiRNA target sequence
aaaattgataccaccgatg

SEQ ID NO: 20693 - DNA, 19 bp, Artificial sequence
  SiRNA target sequence
aaattgataccaccgatgg

SEQ ID NO: 20694 - DNA, 19 bp, Artificial sequence
  SiRNA target sequence
aattgataccaccgatggt

SEQ ID NO: 20695 - DNA, 19 bp, Artificial sequence
  SiRNA target sequence
attgataccaccgatggtg

SEQ ID NO: 20696 - DNA, 19 bp, Artificial sequence
  SiRNA target sequence
ttgataccaccgatggtgt

SEQ ID NO: 20697 - DNA, 19 bp, Artificial sequence
  SiRNA target sequence
tgataccaccgatggtgta

SEQ ID NO: 20698 - DNA, 19 bp, Artificial sequence
  SiRNA target sequence
gataccaccgatggtgtag

SEQ ID NO: 20699 - DNA, 19 bp, Artificial sequence
  SiRNA target sequence
ataccaccgatggtgtagt

SEQ ID NO: 20700 - DNA, 19 bp, Artificial sequence
  SiRNA target sequence
taccaccgatggtgtagtt

SEQ ID NO: 20701 - DNA, 19 bp, Artificial sequence
  SiRNA target sequence
accaccgatggtgtagttc

SEQ ID NO: 20702 - DNA, 19 bp, Artificial sequence
  SiRNA target sequence
ccaccgatggtgtagttct

SEQ ID NO: 20703 - DNA, 19 bp, Artificial sequence
  SiRNA target sequence
caccgatggtgtagttcta

SEQ ID NO: 20704 - DNA, 19 bp, Artificial sequence
  SiRNA target sequence
accgatggtgtagttctac

SEQ ID NO: 20705 - DNA, 19 bp, Artificial sequence
  SiRNA target sequence
ccgatggtgtagttctacc

SEQ ID NO: 20706 - DNA, 19 bp, Artificial sequence
  SiRNA target sequence
cgatggtgtagttctacca

SEQ ID NO: 20707 - DNA, 19 bp, Artificial sequence
  SiRNA target sequence
gatggtgtagttctaccac

SEQ ID NO: 20708 - DNA, 19 bp, Artificial sequence
  SiRNA target sequence
atggtgtagttctaccacc

SEQ ID NO: 20709 - DNA, 19 bp, Artificial sequence
  SiRNA target sequence
tggtgtagttctaccacct

SEQ ID NO: 20710 - DNA, 19 bp, Artificial sequence
  SiRNA target sequence
ggtgtagttctaccacctt

SEQ ID NO: 20711 - DNA, 19 bp, Artificial sequence
  SiRNA target sequence
gtgtagttctaccaccttc

SEQ ID NO: 20712 - DNA, 19 bp, Artificial sequence
  SiRNA target sequence
tgtagttctaccaccttct

SEQ ID NO: 20713 - DNA, 19 bp, Artificial sequence
  SiRNA target sequence
gtagttctaccaccttctt

SEQ ID NO: 20714 - DNA, 19 bp, Artificial sequence
  SiRNA target sequence
tagttctaccaccttcttc

SEQ ID NO: 20715 - DNA, 19 bp, Artificial sequence
  SiRNA target sequence
agttctaccaccttcttcg

SEQ ID NO: 20716 - DNA, 19 bp, Artificial sequence
  SiRNA target sequence
gttctaccaccttcttcgt

SEQ ID NO: 20717 - DNA, 19 bp, Artificial sequence
  SiRNA target sequence
ttctaccaccttcttcgtt

SEQ ID NO: 20718 - DNA, 19 bp, Artificial sequence
  SiRNA target sequence
tctaccaccttcttcgttt

SEQ ID NO: 20719 - DNA, 19 bp, Artificial sequence
  SiRNA target sequence
ctaccaccttcttcgtttt

SEQ ID NO: 20720 - DNA, 19 bp, Artificial sequence
  SiRNA target sequence
taccaccttcttcgttttc

SEQ ID NO: 20721 - DNA, 19 bp, Artificial sequence
  SiRNA target sequence
accaccttcttcgttttca

SEQ ID NO: 20722 - DNA, 19 bp, Artificial sequence
  SiRNA target sequence
ccaccttcttcgttttcaa

SEQ ID NO: 20723 - DNA, 19 bp, Artificial sequence
  SiRNA target sequence
caccttcttcgttttcaat

SEQ ID NO: 20724 - DNA, 19 bp, Artificial sequence
  SiRNA target sequence
accttcttcgttttcaata

SEQ ID NO: 20725 - DNA, 19 bp, Artificial sequence
  SiRNA target sequence
ccttcttcgttttcaataa

SEQ ID NO: 20726 - DNA, 19 bp, Artificial sequence
  SiRNA target sequence
cttcttcgttttcaataat

SEQ ID NO: 20727 - DNA, 19 bp, Artificial sequence
  SiRNA target sequence
ttcttcgttttcaataatt

SEQ ID NO: 20728 - DNA, 19 bp, Artificial sequence
  SiRNA target sequence
tcttcgttttcaataattt

SEQ ID NO: 20729 - DNA, 19 bp, Artificial sequence
  SiRNA target sequence
cttcgttttcaataatttg

SEQ ID NO: 20730 - DNA, 19 bp, Artificial sequence
  SiRNA target sequence
ttcgttttcaataatttgt

SEQ ID NO: 20731 - DNA, 19 bp, Artificial sequence
  SiRNA target sequence
tcgttttcaataatttgtg

SEQ ID NO: 20732 - DNA, 19 bp, Artificial sequence
  SiRNA target sequence
cgttttcaataatttgtgg

SEQ ID NO: 20733 - DNA, 19 bp, Artificial sequence
  SiRNA target sequence
gttttcaataatttgtggg

SEQ ID NO: 20734 - DNA, 19 bp, Artificial sequence
  SiRNA target sequence
ttttcaataatttgtggga

SEQ ID NO: 20735 - DNA, 19 bp, Artificial sequence
  SiRNA target sequence
tttcaataatttgtgggat

SEQ ID NO: 20736 - DNA, 19 bp, Artificial sequence
  SiRNA target sequence
ttcaataatttgtgggata

SEQ ID NO: 20737 - DNA, 19 bp, Artificial sequence
  SiRNA target sequence
tcaataatttgtgggatat

SEQ ID NO: 20738 - DNA, 19 bp, Artificial sequence
  SiRNA target sequence
caataatttgtgggatatt

SEQ ID NO: 20739 - DNA, 19 bp, Artificial sequence
  SiRNA target sequence
aataatttgtgggatattg

SEQ ID NO: 20740 - DNA, 19 bp, Artificial sequence
  SiRNA target sequence
ataatttgtgggatattgt

SEQ ID NO: 20741 - DNA, 19 bp, Artificial sequence
  SiRNA target sequence
taatttgtgggatattgtt

SEQ ID NO: 20742 - DNA, 19 bp, Artificial sequence
  SiRNA target sequence
aatttgtgggatattgtta

SEQ ID NO: 20743 - DNA, 19 bp, Artificial sequence
  SiRNA target sequence
atttgtgggatattgttat

SEQ ID NO: 20744 - DNA, 19 bp, Artificial sequence
  SiRNA target sequence
tttgtgggatattgttatg

SEQ ID NO: 20745 - DNA, 19 bp, Artificial sequence
  SiRNA target sequence
ttgtgggatattgttatgt

SEQ ID NO: 20746 - DNA, 19 bp, Artificial sequence
  SiRNA target sequence
tgtgggatattgttatgta

SEQ ID NO: 20747 - DNA, 19 bp, Artificial sequence
  SiRNA target sequence
gtgggatattgttatgtat

SEQ ID NO: 20748 - DNA, 19 bp, Artificial sequence
  SiRNA target sequence
tgggatattgttatgtata

SEQ ID NO: 20749 - DNA, 19 bp, Artificial sequence
  SiRNA target sequence
gggatattgttatgtataa

SEQ ID NO: 20750 - DNA, 19 bp, Artificial sequence
  SiRNA target sequence
ggatattgttatgtataag

SEQ ID NO: 20751 - DNA, 19 bp, Artificial sequence
  SiRNA target sequence
gatattgttatgtataaga

SEQ ID NO: 20752 - DNA, 19 bp, Artificial sequence
  SiRNA target sequence
atattgttatgtataagag

SEQ ID NO: 20753 - DNA, 19 bp, Artificial sequence
  SiRNA target sequence
tattgttatgtataagaga

SEQ ID NO: 20754 - DNA, 19 bp, Artificial sequence
  SiRNA target sequence
attgttatgtataagagac

SEQ ID NO: 20755 - DNA, 19 bp, Artificial sequence
  SiRNA target sequence
ttgttatgtataagagaca

SEQ ID NO: 20756 - DNA, 19 bp, Artificial sequence
  SiRNA target sequence
tgttatgtataagagacac

SEQ ID NO: 20757 - DNA, 19 bp, Artificial sequence
  SiRNA target sequence
gttatgtataagagacaca

SEQ ID NO: 20758 - DNA, 19 bp, Artificial sequence
  SiRNA target sequence
ttatgtataagagacacac

SEQ ID NO: 20759 - DNA, 19 bp, Artificial sequence
  SiRNA target sequence
tatgtataagagacacaca

SEQ ID NO: 20760 - DNA, 19 bp, Artificial sequence
  SiRNA target sequence
atgtataagagacacacaa

SEQ ID NO: 20761 - DNA, 19 bp, Artificial sequence
  SiRNA target sequence
tgtataagagacacacaag

SEQ ID NO: 20762 - DNA, 19 bp, Artificial sequence
  SiRNA target sequence
gtataagagacacacaaga

SEQ ID NO: 20763 - DNA, 19 bp, Artificial sequence
  SiRNA target sequence
tataagagacacacaagaa

SEQ ID NO: 20764 - DNA, 19 bp, Artificial sequence
  SiRNA target sequence
ataagagacacacaagaat

SEQ ID NO: 20765 - DNA, 19 bp, Artificial sequence
  SiRNA target sequence
taagagacacacaagaatt

SEQ ID NO: 20766 - DNA, 19 bp, Artificial sequence
  SiRNA target sequence
aagagacacacaagaattg

SEQ ID NO: 20767 - DNA, 19 bp, Artificial sequence
  SiRNA target sequence
agagacacacaagaattgg

SEQ ID NO: 20768 - DNA, 19 bp, Artificial sequence
  SiRNA target sequence
gagacacacaagaattggt

SEQ ID NO: 20769 - DNA, 19 bp, Artificial sequence
  SiRNA target sequence
agacacacaagaattggtt

SEQ ID NO: 20770 - DNA, 19 bp, Artificial sequence
  SiRNA target sequence
gacacacaagaattggttg

SEQ ID NO: 20771 - DNA, 19 bp, Artificial sequence
  SiRNA target sequence
acacacaagaattggttgt

SEQ ID NO: 20772 - DNA, 19 bp, Artificial sequence
  SiRNA target sequence
cacacaagaattggttgtt

SEQ ID NO: 20773 - DNA, 19 bp, Artificial sequence
  SiRNA target sequence
acacaagaattggttgttc

SEQ ID NO: 20774 - DNA, 19 bp, Artificial sequence
  SiRNA target sequence
cacaagaattggttgttcc

SEQ ID NO: 20775 - DNA, 19 bp, Artificial sequence
  SiRNA target sequence
acaagaattggttgttcct

SEQ ID NO: 20776 - DNA, 19 bp, Artificial sequence
  SiRNA target sequence
caagaattggttgttccta

SEQ ID NO: 20777 - DNA, 19 bp, Artificial sequence
  SiRNA target sequence
aagaattggttgttcctag

SEQ ID NO: 20778 - DNA, 19 bp, Artificial sequence
  SiRNA target sequence
agaattggttgttcctaga

SEQ ID NO: 20779 - DNA, 19 bp, Artificial sequence
  SiRNA target sequence
gaattggttgttcctagat

SEQ ID NO: 20780 - DNA, 19 bp, Artificial sequence
  SiRNA target sequence
aattggttgttcctagatc

SEQ ID NO: 20781 - DNA, 19 bp, Artificial sequence
  SiRNA target sequence
attggttgttcctagatca

SEQ ID NO: 20782 - DNA, 19 bp, Artificial sequence
  SiRNA target sequence
ttggttgttcctagatcaa

SEQ ID NO: 20783 - DNA, 19 bp, Artificial sequence
  SiRNA target sequence
tggttgttcctagatcaat

SEQ ID NO: 20784 - DNA, 19 bp, Artificial sequence
  SiRNA target sequence
ggttgttcctagatcaatt

SEQ ID NO: 20785 - DNA, 19 bp, Artificial sequence
  SiRNA target sequence
gttgttcctagatcaattc

SEQ ID NO: 20786 - DNA, 19 bp, Artificial sequence
  SiRNA target sequence
ttgttcctagatcaattcc

SEQ ID NO: 20787 - DNA, 19 bp, Artificial sequence
  SiRNA target sequence
tgttcctagatcaattcct

SEQ ID NO: 20788 - DNA, 19 bp, Artificial sequence
  SiRNA target sequence
gttcctagatcaattccta

SEQ ID NO: 20789 - DNA, 19 bp, Artificial sequence
  SiRNA target sequence
ttcctagatcaattcctat

SEQ ID NO: 20790 - DNA, 19 bp, Artificial sequence
  SiRNA target sequence
tcctagatcaattcctatt

SEQ ID NO: 20791 - DNA, 19 bp, Artificial sequence
  SiRNA target sequence
cctagatcaattcctatta

SEQ ID NO: 20792 - DNA, 19 bp, Artificial sequence
  SiRNA target sequence
ctagatcaattcctattat

SEQ ID NO: 20793 - DNA, 19 bp, Artificial sequence
  SiRNA target sequence
tagatcaattcctattatt

SEQ ID NO: 20794 - DNA, 19 bp, Artificial sequence
  SiRNA target sequence
agatcaattcctattattt

SEQ ID NO: 20795 - DNA, 19 bp, Artificial sequence
  SiRNA target sequence
gatcaattcctattatttt

SEQ ID NO: 20796 - DNA, 19 bp, Artificial sequence
  SiRNA target sequence
atcaattcctattatttta

SEQ ID NO: 20797 - DNA, 19 bp, Artificial sequence
  SiRNA target sequence
tcaattcctattattttag

SEQ ID NO: 20798 - DNA, 19 bp, Artificial sequence
  SiRNA target sequence
caattcctattattttaga

SEQ ID NO: 20799 - DNA, 19 bp, Artificial sequence
  SiRNA target sequence
aattcctattattttagag

SEQ ID NO: 20800 - DNA, 19 bp, Artificial sequence
  SiRNA target sequence
attcctattattttagagc

SEQ ID NO: 20801 - DNA, 19 bp, Artificial sequence
  SiRNA target sequence
ttcctattattttagagct

SEQ ID NO: 20802 - DNA, 19 bp, Artificial sequence
  SiRNA target sequence
tcctattattttagagcta

SEQ ID NO: 20803 - DNA, 19 bp, Artificial sequence
  SiRNA target sequence
cctattattttagagctaa

SEQ ID NO: 20804 - DNA, 19 bp, Artificial sequence
  SiRNA target sequence
ctattattttagagctaat

SEQ ID NO: 20805 - DNA, 19 bp, Artificial sequence
  SiRNA target sequence
tattattttagagctaatt

SEQ ID NO: 20806 - DNA, 19 bp, Artificial sequence
  SiRNA target sequence
attattttagagctaattt

SEQ ID NO: 20807 - DNA, 19 bp, Artificial sequence
  SiRNA target sequence
ttattttagagctaatttc

SEQ ID NO: 20808 - DNA, 19 bp, Artificial sequence
  SiRNA target sequence
tattttagagctaatttct

SEQ ID NO: 20809 - DNA, 19 bp, Artificial sequence
  SiRNA target sequence
attttagagctaatttctt

SEQ ID NO: 20810 - DNA, 19 bp, Artificial sequence
  SiRNA target sequence
ttttagagctaatttcttc

SEQ ID NO: 20811 - DNA, 19 bp, Artificial sequence
  SiRNA target sequence
tttagagctaatttcttct

SEQ ID NO: 20812 - DNA, 19 bp, Artificial sequence
  SiRNA target sequence
ttagagctaatttcttctt

SEQ ID NO: 20813 - DNA, 19 bp, Artificial sequence
  SiRNA target sequence
tagagctaatttcttcttt

SEQ ID NO: 20814 - DNA, 19 bp, Artificial sequence
  SiRNA target sequence
agagctaatttcttcttta

SEQ ID NO: 20815 - DNA, 19 bp, Artificial sequence
  SiRNA target sequence
gagctaatttcttctttag

SEQ ID NO: 20816 - DNA, 19 bp, Artificial sequence
  SiRNA target sequence
agctaatttcttctttaga

SEQ ID NO: 20817 - DNA, 19 bp, Artificial sequence
  SiRNA target sequence
gctaatttcttctttagac

SEQ ID NO: 20818 - DNA, 19 bp, Artificial sequence
  SiRNA target sequence
ctaatttcttctttagaca

SEQ ID NO: 20819 - DNA, 19 bp, Artificial sequence
  SiRNA target sequence
taatttcttctttagacat

SEQ ID NO: 20820 - DNA, 20 bp, Artificial sequence
  SiRNA target sequence
ttaagaatttttcaatattt

SEQ ID NO: 20821 - DNA, 20 bp, Artificial sequence
  SiRNA target sequence
taagaatttttcaatatttt

SEQ ID NO: 20822 - DNA, 20 bp, Artificial sequence
  SiRNA target sequence
aagaatttttcaatattttt

SEQ ID NO: 20823 - DNA, 20 bp, Artificial sequence
  SiRNA target sequence
agaatttttcaatatttttt

SEQ ID NO: 20824 - DNA, 20 bp, Artificial sequence
  SiRNA target sequence
gaatttttcaatattttttt

SEQ ID NO: 20825 - DNA, 20 bp, Artificial sequence
  SiRNA target sequence
aatttttcaatatttttttt

SEQ ID NO: 20826 - DNA, 20 bp, Artificial sequence
  SiRNA target sequence
atttttcaatattttttttg

SEQ ID NO: 20827 - DNA, 20 bp, Artificial sequence
  SiRNA target sequence
tttttcaatattttttttgc

SEQ ID NO: 20828 - DNA, 20 bp, Artificial sequence
  SiRNA target sequence
ttttcaatattttttttgct

SEQ ID NO: 20829 - DNA, 20 bp, Artificial sequence
  SiRNA target sequence
tttcaatattttttttgctt

SEQ ID NO: 20830 - DNA, 20 bp, Artificial sequence
  SiRNA target sequence
ttcaatattttttttgcttg

SEQ ID NO: 20831 - DNA, 20 bp, Artificial sequence
  SiRNA target sequence
tcaatattttttttgcttgt

SEQ ID NO: 20832 - DNA, 20 bp, Artificial sequence
  SiRNA target sequence
caatattttttttgcttgtt

SEQ ID NO: 20833 - DNA, 20 bp, Artificial sequence
  SiRNA target sequence
aatattttttttgcttgttc

SEQ ID NO: 20834 - DNA, 20 bp, Artificial sequence
  SiRNA target sequence
atattttttttgcttgttct

SEQ ID NO: 20835 - DNA, 20 bp, Artificial sequence
  SiRNA target sequence
tattttttttgcttgttcta

SEQ ID NO: 20836 - DNA, 20 bp, Artificial sequence
  SiRNA target sequence
attttttttgcttgttctaa

SEQ ID NO: 20837 - DNA, 20 bp, Artificial sequence
  SiRNA target sequence
ttttttttgcttgttctaag

SEQ ID NO: 20838 - DNA, 20 bp, Artificial sequence
  SiRNA target sequence
tttttttgcttgttctaagt

SEQ ID NO: 20839 - DNA, 20 bp, Artificial sequence
  SiRNA target sequence
ttttttgcttgttctaagtc

SEQ ID NO: 20840 - DNA, 20 bp, Artificial sequence
  SiRNA target sequence
tttttgcttgttctaagtca

SEQ ID NO: 20841 - DNA, 20 bp, Artificial sequence
  SiRNA target sequence
ttttgcttgttctaagtcat

SEQ ID NO: 20842 - DNA, 20 bp, Artificial sequence
  SiRNA target sequence
tttgcttgttctaagtcata

SEQ ID NO: 20843 - DNA, 20 bp, Artificial sequence
  SiRNA target sequence
ttgcttgttctaagtcataa

SEQ ID NO: 20844 - DNA, 20 bp, Artificial sequence
  SiRNA target sequence
tgcttgttctaagtcataaa

SEQ ID NO: 20845 - DNA, 20 bp, Artificial sequence
  SiRNA target sequence
gcttgttctaagtcataaat

SEQ ID NO: 20846 - DNA, 20 bp, Artificial sequence
  SiRNA target sequence
cttgttctaagtcataaatt

SEQ ID NO: 20847 - DNA, 20 bp, Artificial sequence
  SiRNA target sequence
ttgttctaagtcataaattt

SEQ ID NO: 20848 - DNA, 20 bp, Artificial sequence
  SiRNA target sequence
tgttctaagtcataaatttt

SEQ ID NO: 20849 - DNA, 20 bp, Artificial sequence
  SiRNA target sequence
gttctaagtcataaattttt

SEQ ID NO: 20850 - DNA, 20 bp, Artificial sequence
  SiRNA target sequence
ttctaagtcataaatttttt

SEQ ID NO: 20851 - DNA, 20 bp, Artificial sequence
  SiRNA target sequence
tctaagtcataaattttttt

SEQ ID NO: 20852 - DNA, 20 bp, Artificial sequence
  SiRNA target sequence
ctaagtcataaattttttta

SEQ ID NO: 20853 - DNA, 20 bp, Artificial sequence
  SiRNA target sequence
taagtcataaatttttttag

SEQ ID NO: 20854 - DNA, 20 bp, Artificial sequence
  SiRNA target sequence
aagtcataaatttttttagt

SEQ ID NO: 20855 - DNA, 20 bp, Artificial sequence
  SiRNA target sequence
agtcataaatttttttagtc

SEQ ID NO: 20856 - DNA, 20 bp, Artificial sequence
  SiRNA target sequence
gtcataaatttttttagtca

SEQ ID NO: 20857 - DNA, 20 bp, Artificial sequence
  SiRNA target sequence
tcataaatttttttagtcaa

SEQ ID NO: 20858 - DNA, 20 bp, Artificial sequence
  SiRNA target sequence
cataaatttttttagtcaaa

SEQ ID NO: 20859 - DNA, 20 bp, Artificial sequence
  SiRNA target sequence
ataaatttttttagtcaaat

SEQ ID NO: 20860 - DNA, 20 bp, Artificial sequence
  SiRNA target sequence
taaatttttttagtcaaata

SEQ ID NO: 20861 - DNA, 20 bp, Artificial sequence
  SiRNA target sequence
aaatttttttagtcaaatat

SEQ ID NO: 20862 - DNA, 20 bp, Artificial sequence
  SiRNA target sequence
aatttttttagtcaaatatg

SEQ ID NO: 20863 - DNA, 20 bp, Artificial sequence
  SiRNA target sequence
atttttttagtcaaatatga

SEQ ID NO: 20864 - DNA, 20 bp, Artificial sequence
  SiRNA target sequence
tttttttagtcaaatatgac

SEQ ID NO: 20865 - DNA, 20 bp, Artificial sequence
  SiRNA target sequence
ttttttagtcaaatatgact

SEQ ID NO: 20866 - DNA, 20 bp, Artificial sequence
  SiRNA target sequence
tttttagtcaaatatgactt

SEQ ID NO: 20867 - DNA, 20 bp, Artificial sequence
  SiRNA target sequence
ttttagtcaaatatgacttt

SEQ ID NO: 20868 - DNA, 20 bp, Artificial sequence
  SiRNA target sequence
tttagtcaaatatgacttta

SEQ ID NO: 20869 - DNA, 20 bp, Artificial sequence
  SiRNA target sequence
ttagtcaaatatgactttaa

SEQ ID NO: 20870 - DNA, 20 bp, Artificial sequence
  SiRNA target sequence
tagtcaaatatgactttaaa

SEQ ID NO: 20871 - DNA, 20 bp, Artificial sequence
  SiRNA target sequence
agtcaaatatgactttaaaa

SEQ ID NO: 20872 - DNA, 20 bp, Artificial sequence
  SiRNA target sequence
gtcaaatatgactttaaaat

SEQ ID NO: 20873 - DNA, 20 bp, Artificial sequence
  SiRNA target sequence
tcaaatatgactttaaaatc

SEQ ID NO: 20874 - DNA, 20 bp, Artificial sequence
  SiRNA target sequence
caaatatgactttaaaatct

SEQ ID NO: 20875 - DNA, 20 bp, Artificial sequence
  SiRNA target sequence
aaatatgactttaaaatctc

SEQ ID NO: 20876 - DNA, 20 bp, Artificial sequence
  SiRNA target sequence
aatatgactttaaaatctct

SEQ ID NO: 20877 - DNA, 20 bp, Artificial sequence
  SiRNA target sequence
atatgactttaaaatctctt

SEQ ID NO: 20878 - DNA, 20 bp, Artificial sequence
  SiRNA target sequence
tatgactttaaaatctcttt

SEQ ID NO: 20879 - DNA, 20 bp, Artificial sequence
  SiRNA target sequence
atgactttaaaatctctttt

SEQ ID NO: 20880 - DNA, 20 bp, Artificial sequence
  SiRNA target sequence
tgactttaaaatctcttttg

SEQ ID NO: 20881 - DNA, 20 bp, Artificial sequence
  SiRNA target sequence
gactttaaaatctcttttgt

SEQ ID NO: 20882 - DNA, 20 bp, Artificial sequence
  SiRNA target sequence
actttaaaatctcttttgtt

SEQ ID NO: 20883 - DNA, 20 bp, Artificial sequence
  SiRNA target sequence
ctttaaaatctcttttgttt

SEQ ID NO: 20884 - DNA, 20 bp, Artificial sequence
  SiRNA target sequence
tttaaaatctcttttgtttc

SEQ ID NO: 20885 - DNA, 20 bp, Artificial sequence
  SiRNA target sequence
ttaaaatctcttttgtttca

SEQ ID NO: 20886 - DNA, 20 bp, Artificial sequence
  SiRNA target sequence
taaaatctcttttgtttcat

SEQ ID NO: 20887 - DNA, 20 bp, Artificial sequence
  SiRNA target sequence
aaaatctcttttgtttcatc

SEQ ID NO: 20888 - DNA, 20 bp, Artificial sequence
  SiRNA target sequence
aaatctcttttgtttcatct

SEQ ID NO: 20889 - DNA, 20 bp, Artificial sequence
  SiRNA target sequence
aatctcttttgtttcatctg

SEQ ID NO: 20890 - DNA, 20 bp, Artificial sequence
  SiRNA target sequence
atctcttttgtttcatctgt

SEQ ID NO: 20891 - DNA, 20 bp, Artificial sequence
  SiRNA target sequence
tctcttttgtttcatctgtt

SEQ ID NO: 20892 - DNA, 20 bp, Artificial sequence
  SiRNA target sequence
ctcttttgtttcatctgtta

SEQ ID NO: 20893 - DNA, 20 bp, Artificial sequence
  SiRNA target sequence
tcttttgtttcatctgttac

SEQ ID NO: 20894 - DNA, 20 bp, Artificial sequence
  SiRNA target sequence
cttttgtttcatctgttact

SEQ ID NO: 20895 - DNA, 20 bp, Artificial sequence
  SiRNA target sequence
ttttgtttcatctgttactt

SEQ ID NO: 20896 - DNA, 20 bp, Artificial sequence
  SiRNA target sequence
tttgtttcatctgttacttg

SEQ ID NO: 20897 - DNA, 20 bp, Artificial sequence
  SiRNA target sequence
ttgtttcatctgttacttgt

SEQ ID NO: 20898 - DNA, 20 bp, Artificial sequence
  SiRNA target sequence
tgtttcatctgttacttgtt

SEQ ID NO: 20899 - DNA, 20 bp, Artificial sequence
  SiRNA target sequence
gtttcatctgttacttgttt

SEQ ID NO: 20900 - DNA, 20 bp, Artificial sequence
  SiRNA target sequence
tttcatctgttacttgtttg

SEQ ID NO: 20901 - DNA, 20 bp, Artificial sequence
  SiRNA target sequence
ttcatctgttacttgtttgt

SEQ ID NO: 20902 - DNA, 20 bp, Artificial sequence
  SiRNA target sequence
tcatctgttacttgtttgta

SEQ ID NO: 20903 - DNA, 20 bp, Artificial sequence
  SiRNA target sequence
catctgttacttgtttgtac

SEQ ID NO: 20904 - DNA, 20 bp, Artificial sequence
  SiRNA target sequence
atctgttacttgtttgtact

SEQ ID NO: 20905 - DNA, 20 bp, Artificial sequence
  SiRNA target sequence
tctgttacttgtttgtactt

SEQ ID NO: 20906 - DNA, 20 bp, Artificial sequence
  SiRNA target sequence
ctgttacttgtttgtacttt

SEQ ID NO: 20907 - DNA, 20 bp, Artificial sequence
  SiRNA target sequence
tgttacttgtttgtacttta

SEQ ID NO: 20908 - DNA, 20 bp, Artificial sequence
  SiRNA target sequence
gttacttgtttgtactttaa

SEQ ID NO: 20909 - DNA, 20 bp, Artificial sequence
  SiRNA target sequence
ttacttgtttgtactttaaa

SEQ ID NO: 20910 - DNA, 20 bp, Artificial sequence
  SiRNA target sequence
tacttgtttgtactttaaaa

SEQ ID NO: 20911 - DNA, 20 bp, Artificial sequence
  SiRNA target sequence
acttgtttgtactttaaaaa

SEQ ID NO: 20912 - DNA, 20 bp, Artificial sequence
  SiRNA target sequence
cttgtttgtactttaaaaat

SEQ ID NO: 20913 - DNA, 20 bp, Artificial sequence
  SiRNA target sequence
ttgtttgtactttaaaaatt

SEQ ID NO: 20914 - DNA, 20 bp, Artificial sequence
  SiRNA target sequence
tgtttgtactttaaaaattg

SEQ ID NO: 20915 - DNA, 20 bp, Artificial sequence
  SiRNA target sequence
gtttgtactttaaaaattgt

SEQ ID NO: 20916 - DNA, 20 bp, Artificial sequence
  SiRNA target sequence
tttgtactttaaaaattgtt

SEQ ID NO: 20917 - DNA, 20 bp, Artificial sequence
  SiRNA target sequence
ttgtactttaaaaattgttg

SEQ ID NO: 20918 - DNA, 20 bp, Artificial sequence
  SiRNA target sequence
tgtactttaaaaattgttga

SEQ ID NO: 20919 - DNA, 20 bp, Artificial sequence
  SiRNA target sequence
gtactttaaaaattgttgaa

SEQ ID NO: 20920 - DNA, 20 bp, Artificial sequence
  SiRNA target sequence
tactttaaaaattgttgaat

SEQ ID NO: 20921 - DNA, 20 bp, Artificial sequence
  SiRNA target sequence
actttaaaaattgttgaatt

SEQ ID NO: 20922 - DNA, 20 bp, Artificial sequence
  SiRNA target sequence
ctttaaaaattgttgaattt

SEQ ID NO: 20923 - DNA, 20 bp, Artificial sequence
  SiRNA target sequence
tttaaaaattgttgaatttc

SEQ ID NO: 20924 - DNA, 20 bp, Artificial sequence
  SiRNA target sequence
ttaaaaattgttgaatttca

SEQ ID NO: 20925 - DNA, 20 bp, Artificial sequence
  SiRNA target sequence
taaaaattgttgaatttcaa

SEQ ID NO: 20926 - DNA, 20 bp, Artificial sequence
  SiRNA target sequence
aaaaattgttgaatttcaat

SEQ ID NO: 20927 - DNA, 20 bp, Artificial sequence
  SiRNA target sequence
aaaattgttgaatttcaatt

SEQ ID NO: 20928 - DNA, 20 bp, Artificial sequence
  SiRNA target sequence
aaattgttgaatttcaattt

SEQ ID NO: 20929 - DNA, 20 bp, Artificial sequence
  SiRNA target sequence
aattgttgaatttcaatttt

SEQ ID NO: 20930 - DNA, 20 bp, Artificial sequence
  SiRNA target sequence
attgttgaatttcaatttta

SEQ ID NO: 20931 - DNA, 20 bp, Artificial sequence
  SiRNA target sequence
ttgttgaatttcaattttaa

SEQ ID NO: 20932 - DNA, 20 bp, Artificial sequence
  SiRNA target sequence
tgttgaatttcaattttaaa

SEQ ID NO: 20933 - DNA, 20 bp, Artificial sequence
  SiRNA target sequence
gttgaatttcaattttaaat

SEQ ID NO: 20934 - DNA, 20 bp, Artificial sequence
  SiRNA target sequence
ttgaatttcaattttaaatt

SEQ ID NO: 20935 - DNA, 20 bp, Artificial sequence
  SiRNA target sequence
tgaatttcaattttaaattc

SEQ ID NO: 20936 - DNA, 20 bp, Artificial sequence
  SiRNA target sequence
gaatttcaattttaaattcg

SEQ ID NO: 20937 - DNA, 20 bp, Artificial sequence
  SiRNA target sequence
aatttcaattttaaattcgg

SEQ ID NO: 20938 - DNA, 20 bp, Artificial sequence
  SiRNA target sequence
atttcaattttaaattcggc

SEQ ID NO: 20939 - DNA, 20 bp, Artificial sequence
  SiRNA target sequence
tttcaattttaaattcggca

SEQ ID NO: 20940 - DNA, 20 bp, Artificial sequence
  SiRNA target sequence
ttcaattttaaattcggcac

SEQ ID NO: 20941 - DNA, 20 bp, Artificial sequence
  SiRNA target sequence
tcaattttaaattcggcaca

SEQ ID NO: 20942 - DNA, 20 bp, Artificial sequence
  SiRNA target sequence
caattttaaattcggcacaa

SEQ ID NO: 20943 - DNA, 20 bp, Artificial sequence
  SiRNA target sequence
aattttaaattcggcacaat

SEQ ID NO: 20944 - DNA, 20 bp, Artificial sequence
  SiRNA target sequence
attttaaattcggcacaatt

SEQ ID NO: 20945 - DNA, 20 bp, Artificial sequence
  SiRNA target sequence
ttttaaattcggcacaattt

SEQ ID NO: 20946 - DNA, 20 bp, Artificial sequence
  SiRNA target sequence
tttaaattcggcacaatttt

SEQ ID NO: 20947 - DNA, 20 bp, Artificial sequence
  SiRNA target sequence
ttaaattcggcacaattttt

SEQ ID NO: 20948 - DNA, 20 bp, Artificial sequence
  SiRNA target sequence
taaattcggcacaatttttt

SEQ ID NO: 20949 - DNA, 20 bp, Artificial sequence
  SiRNA target sequence
aaattcggcacaattttttt

SEQ ID NO: 20950 - DNA, 20 bp, Artificial sequence
  SiRNA target sequence
aattcggcacaatttttttc

SEQ ID NO: 20951 - DNA, 20 bp, Artificial sequence
  SiRNA target sequence
attcggcacaatttttttca

SEQ ID NO: 20952 - DNA, 20 bp, Artificial sequence
  SiRNA target sequence
ttcggcacaatttttttcaa

SEQ ID NO: 20953 - DNA, 20 bp, Artificial sequence
  SiRNA target sequence
tcggcacaatttttttcaat

SEQ ID NO: 20954 - DNA, 20 bp, Artificial sequence
  SiRNA target sequence
cggcacaatttttttcaatt

SEQ ID NO: 20955 - DNA, 20 bp, Artificial sequence
  SiRNA target sequence
ggcacaatttttttcaattt

SEQ ID NO: 20956 - DNA, 20 bp, Artificial sequence
  SiRNA target sequence
gcacaatttttttcaatttc

SEQ ID NO: 20957 - DNA, 20 bp, Artificial sequence
  SiRNA target sequence
cacaatttttttcaatttca

SEQ ID NO: 20958 - DNA, 20 bp, Artificial sequence
  SiRNA target sequence
acaatttttttcaatttcat

SEQ ID NO: 20959 - DNA, 20 bp, Artificial sequence
  SiRNA target sequence
caatttttttcaatttcatc

SEQ ID NO: 20960 - DNA, 20 bp, Artificial sequence
  SiRNA target sequence
aatttttttcaatttcatct

SEQ ID NO: 20961 - DNA, 20 bp, Artificial sequence
  SiRNA target sequence
atttttttcaatttcatctt

SEQ ID NO: 20962 - DNA, 20 bp, Artificial sequence
  SiRNA target sequence
tttttttcaatttcatcttt

SEQ ID NO: 20963 - DNA, 20 bp, Artificial sequence
  SiRNA target sequence
ttttttcaatttcatctttt

SEQ ID NO: 20964 - DNA, 20 bp, Artificial sequence
  SiRNA target sequence
tttttcaatttcatcttttt

SEQ ID NO: 20965 - DNA, 20 bp, Artificial sequence
  SiRNA target sequence
ttttcaatttcatctttttt

SEQ ID NO: 20966 - DNA, 20 bp, Artificial sequence
  SiRNA target sequence
tttcaatttcatcttttttc

SEQ ID NO: 20967 - DNA, 20 bp, Artificial sequence
  SiRNA target sequence
ttcaatttcatcttttttcg

SEQ ID NO: 20968 - DNA, 20 bp, Artificial sequence
  SiRNA target sequence
tcaatttcatcttttttcga

SEQ ID NO: 20969 - DNA, 20 bp, Artificial sequence
  SiRNA target sequence
caatttcatcttttttcgaa

SEQ ID NO: 20970 - DNA, 20 bp, Artificial sequence
  SiRNA target sequence
aatttcatcttttttcgaat

SEQ ID NO: 20971 - DNA, 20 bp, Artificial sequence
  SiRNA target sequence
atttcatcttttttcgaatt

SEQ ID NO: 20972 - DNA, 20 bp, Artificial sequence
  SiRNA target sequence
tttcatcttttttcgaattt

SEQ ID NO: 20973 - DNA, 20 bp, Artificial sequence
  SiRNA target sequence
ttcatcttttttcgaatttt

SEQ ID NO: 20974 - DNA, 20 bp, Artificial sequence
  SiRNA target sequence
tcatcttttttcgaattttc

SEQ ID NO: 20975 - DNA, 20 bp, Artificial sequence
  SiRNA target sequence
catcttttttcgaattttct

SEQ ID NO: 20976 - DNA, 20 bp, Artificial sequence
  SiRNA target sequence
atcttttttcgaattttctt

SEQ ID NO: 20977 - DNA, 20 bp, Artificial sequence
  SiRNA target sequence
tcttttttcgaattttcttc

SEQ ID NO: 20978 - DNA, 20 bp, Artificial sequence
  SiRNA target sequence
cttttttcgaattttcttcg

SEQ ID NO: 20979 - DNA, 20 bp, Artificial sequence
  SiRNA target sequence
ttttttcgaattttcttcgg

SEQ ID NO: 20980 - DNA, 20 bp, Artificial sequence
  SiRNA target sequence
tttttcgaattttcttcggc

SEQ ID NO: 20981 - DNA, 20 bp, Artificial sequence
  SiRNA target sequence
ttttcgaattttcttcggct

SEQ ID NO: 20982 - DNA, 20 bp, Artificial sequence
  SiRNA target sequence
tttcgaattttcttcggctt

SEQ ID NO: 20983 - DNA, 20 bp, Artificial sequence
  SiRNA target sequence
ttcgaattttcttcggcttc

SEQ ID NO: 20984 - DNA, 20 bp, Artificial sequence
  SiRNA target sequence
tcgaattttcttcggcttct

SEQ ID NO: 20985 - DNA, 20 bp, Artificial sequence
  SiRNA target sequence
cgaattttcttcggcttctc

SEQ ID NO: 20986 - DNA, 20 bp, Artificial sequence
  SiRNA target sequence
gaattttcttcggcttctcg

SEQ ID NO: 20987 - DNA, 20 bp, Artificial sequence
  SiRNA target sequence
aattttcttcggcttctcgt

SEQ ID NO: 20988 - DNA, 20 bp, Artificial sequence
  SiRNA target sequence
attttcttcggcttctcgta

SEQ ID NO: 20989 - DNA, 20 bp, Artificial sequence
  SiRNA target sequence
ttttcttcggcttctcgtat

SEQ ID NO: 20990 - DNA, 20 bp, Artificial sequence
  SiRNA target sequence
tttcttcggcttctcgtatc

SEQ ID NO: 20991 - DNA, 20 bp, Artificial sequence
  SiRNA target sequence
ttcttcggcttctcgtatca

SEQ ID NO: 20992 - DNA, 20 bp, Artificial sequence
  SiRNA target sequence
tcttcggcttctcgtatcat

SEQ ID NO: 20993 - DNA, 20 bp, Artificial sequence
  SiRNA target sequence
cttcggcttctcgtatcatt

SEQ ID NO: 20994 - DNA, 20 bp, Artificial sequence
  SiRNA target sequence
ttcggcttctcgtatcattt

SEQ ID NO: 20995 - DNA, 20 bp, Artificial sequence
  SiRNA target sequence
tcggcttctcgtatcatttg

SEQ ID NO: 20996 - DNA, 20 bp, Artificial sequence
  SiRNA target sequence
cggcttctcgtatcatttgc

SEQ ID NO: 20997 - DNA, 20 bp, Artificial sequence
  SiRNA target sequence
ggcttctcgtatcatttgcg

SEQ ID NO: 20998 - DNA, 20 bp, Artificial sequence
  SiRNA target sequence
gcttctcgtatcatttgcga

SEQ ID NO: 20999 - DNA, 20 bp, Artificial sequence
  SiRNA target sequence
cttctcgtatcatttgcgaa

SEQ ID NO: 21000 - DNA, 20 bp, Artificial sequence
  SiRNA target sequence
ttctcgtatcatttgcgaaa

SEQ ID NO: 21001 - DNA, 20 bp, Artificial sequence
  SiRNA target sequence
tctcgtatcatttgcgaaat

SEQ ID NO: 21002 - DNA, 20 bp, Artificial sequence
  SiRNA target sequence
ctcgtatcatttgcgaaatt

SEQ ID NO: 21003 - DNA, 20 bp, Artificial sequence
  SiRNA target sequence
tcgtatcatttgcgaaattt

SEQ ID NO: 21004 - DNA, 20 bp, Artificial sequence
  SiRNA target sequence
cgtatcatttgcgaaatttc

SEQ ID NO: 21005 - DNA, 20 bp, Artificial sequence
  SiRNA target sequence
gtatcatttgcgaaatttca

SEQ ID NO: 21006 - DNA, 20 bp, Artificial sequence
  SiRNA target sequence
tatcatttgcgaaatttcac

SEQ ID NO: 21007 - DNA, 20 bp, Artificial sequence
  SiRNA target sequence
atcatttgcgaaatttcacc

SEQ ID NO: 21008 - DNA, 20 bp, Artificial sequence
  SiRNA target sequence
tcatttgcgaaatttcacct

SEQ ID NO: 21009 - DNA, 20 bp, Artificial sequence
  SiRNA target sequence
catttgcgaaatttcacctt

SEQ ID NO: 21010 - DNA, 20 bp, Artificial sequence
  SiRNA target sequence
atttgcgaaatttcaccttc

SEQ ID NO: 21011 - DNA, 20 bp, Artificial sequence
  SiRNA target sequence
tttgcgaaatttcaccttca

SEQ ID NO: 21012 - DNA, 20 bp, Artificial sequence
  SiRNA target sequence
ttgcgaaatttcaccttcat

SEQ ID NO: 21013 - DNA, 20 bp, Artificial sequence
  SiRNA target sequence
tgcgaaatttcaccttcatt

SEQ ID NO: 21014 - DNA, 20 bp, Artificial sequence
  SiRNA target sequence
gcgaaatttcaccttcattt

SEQ ID NO: 21015 - DNA, 20 bp, Artificial sequence
  SiRNA target sequence
cgaaatttcaccttcattta

SEQ ID NO: 21016 - DNA, 20 bp, Artificial sequence
  SiRNA target sequence
gaaatttcaccttcatttaa

SEQ ID NO: 21017 - DNA, 20 bp, Artificial sequence
  SiRNA target sequence
aaatttcaccttcatttaat

SEQ ID NO: 21018 - DNA, 20 bp, Artificial sequence
  SiRNA target sequence
aatttcaccttcatttaatc

SEQ ID NO: 21019 - DNA, 20 bp, Artificial sequence
  SiRNA target sequence
atttcaccttcatttaatcc

SEQ ID NO: 21020 - DNA, 20 bp, Artificial sequence
  SiRNA target sequence
tttcaccttcatttaatcca

SEQ ID NO: 21021 - DNA, 20 bp, Artificial sequence
  SiRNA target sequence
ttcaccttcatttaatccac

SEQ ID NO: 21022 - DNA, 20 bp, Artificial sequence
  SiRNA target sequence
tcaccttcatttaatccact

SEQ ID NO: 21023 - DNA, 20 bp, Artificial sequence
  SiRNA target sequence
caccttcatttaatccactt

SEQ ID NO: 21024 - DNA, 20 bp, Artificial sequence
  SiRNA target sequence
accttcatttaatccacttg

SEQ ID NO: 21025 - DNA, 20 bp, Artificial sequence
  SiRNA target sequence
ccttcatttaatccacttga

SEQ ID NO: 21026 - DNA, 20 bp, Artificial sequence
  SiRNA target sequence
cttcatttaatccacttgaa

SEQ ID NO: 21027 - DNA, 20 bp, Artificial sequence
  SiRNA target sequence
ttcatttaatccacttgaag

SEQ ID NO: 21028 - DNA, 20 bp, Artificial sequence
  SiRNA target sequence
tcatttaatccacttgaagg

SEQ ID NO: 21029 - DNA, 20 bp, Artificial sequence
  SiRNA target sequence
catttaatccacttgaaggc

SEQ ID NO: 21030 - DNA, 20 bp, Artificial sequence
  SiRNA target sequence
atttaatccacttgaaggca

SEQ ID NO: 21031 - DNA, 20 bp, Artificial sequence
  SiRNA target sequence
tttaatccacttgaaggcac

SEQ ID NO: 21032 - DNA, 20 bp, Artificial sequence
  SiRNA target sequence
ttaatccacttgaaggcaca

SEQ ID NO: 21033 - DNA, 20 bp, Artificial sequence
  SiRNA target sequence
taatccacttgaaggcacaa

SEQ ID NO: 21034 - DNA, 20 bp, Artificial sequence
  SiRNA target sequence
aatccacttgaaggcacaat

SEQ ID NO: 21035 - DNA, 20 bp, Artificial sequence
  SiRNA target sequence
atccacttgaaggcacaatt

SEQ ID NO: 21036 - DNA, 20 bp, Artificial sequence
  SiRNA target sequence
tccacttgaaggcacaattt

SEQ ID NO: 21037 - DNA, 20 bp, Artificial sequence
  SiRNA target sequence
ccacttgaaggcacaatttc

SEQ ID NO: 21038 - DNA, 20 bp, Artificial sequence
  SiRNA target sequence
cacttgaaggcacaatttcg

SEQ ID NO: 21039 - DNA, 20 bp, Artificial sequence
  SiRNA target sequence
acttgaaggcacaatttcga

SEQ ID NO: 21040 - DNA, 20 bp, Artificial sequence
  SiRNA target sequence
cttgaaggcacaatttcgat

SEQ ID NO: 21041 - DNA, 20 bp, Artificial sequence
  SiRNA target sequence
ttgaaggcacaatttcgatt

SEQ ID NO: 21042 - DNA, 20 bp, Artificial sequence
  SiRNA target sequence
tgaaggcacaatttcgattt

SEQ ID NO: 21043 - DNA, 20 bp, Artificial sequence
  SiRNA target sequence
gaaggcacaatttcgatttc

SEQ ID NO: 21044 - DNA, 20 bp, Artificial sequence
  SiRNA target sequence
aaggcacaatttcgatttct

SEQ ID NO: 21045 - DNA, 20 bp, Artificial sequence
  SiRNA target sequence
aggcacaatttcgatttctt

SEQ ID NO: 21046 - DNA, 20 bp, Artificial sequence
  SiRNA target sequence
ggcacaatttcgatttcttg

SEQ ID NO: 21047 - DNA, 20 bp, Artificial sequence
  SiRNA target sequence
gcacaatttcgatttcttgc

SEQ ID NO: 21048 - DNA, 20 bp, Artificial sequence
  SiRNA target sequence
cacaatttcgatttcttgct

SEQ ID NO: 21049 - DNA, 20 bp, Artificial sequence
  SiRNA target sequence
acaatttcgatttcttgctt

SEQ ID NO: 21050 - DNA, 20 bp, Artificial sequence
  SiRNA target sequence
caatttcgatttcttgcttt

SEQ ID NO: 21051 - DNA, 20 bp, Artificial sequence
  SiRNA target sequence
aatttcgatttcttgctttt

SEQ ID NO: 21052 - DNA, 20 bp, Artificial sequence
  SiRNA target sequence
atttcgatttcttgcttttt

SEQ ID NO: 21053 - DNA, 20 bp, Artificial sequence
  SiRNA target sequence
tttcgatttcttgctttttt

SEQ ID NO: 21054 - DNA, 20 bp, Artificial sequence
  SiRNA target sequence
ttcgatttcttgcttttttt

SEQ ID NO: 21055 - DNA, 20 bp, Artificial sequence
  SiRNA target sequence
tcgatttcttgctttttttt

SEQ ID NO: 21056 - DNA, 20 bp, Artificial sequence
  SiRNA target sequence
cgatttcttgcttttttttc

SEQ ID NO: 21057 - DNA, 20 bp, Artificial sequence
  SiRNA target sequence
gatttcttgcttttttttcg

SEQ ID NO: 21058 - DNA, 20 bp, Artificial sequence
  SiRNA target sequence
atttcttgcttttttttcgt

SEQ ID NO: 21059 - DNA, 20 bp, Artificial sequence
  SiRNA target sequence
tttcttgcttttttttcgtt

SEQ ID NO: 21060 - DNA, 20 bp, Artificial sequence
  SiRNA target sequence
ttcttgcttttttttcgtta

SEQ ID NO: 21061 - DNA, 20 bp, Artificial sequence
  SiRNA target sequence
tcttgcttttttttcgttat

SEQ ID NO: 21062 - DNA, 20 bp, Artificial sequence
  SiRNA target sequence
cttgcttttttttcgttatc

SEQ ID NO: 21063 - DNA, 20 bp, Artificial sequence
  SiRNA target sequence
ttgcttttttttcgttatcc

SEQ ID NO: 21064 - DNA, 20 bp, Artificial sequence
  SiRNA target sequence
tgcttttttttcgttatccc

SEQ ID NO: 21065 - DNA, 20 bp, Artificial sequence
  SiRNA target sequence
gcttttttttcgttatcccg

SEQ ID NO: 21066 - DNA, 20 bp, Artificial sequence
  SiRNA target sequence
cttttttttcgttatcccgt

SEQ ID NO: 21067 - DNA, 20 bp, Artificial sequence
  SiRNA target sequence
ttttttttcgttatcccgtc

SEQ ID NO: 21068 - DNA, 20 bp, Artificial sequence
  SiRNA target sequence
tttttttcgttatcccgtct

SEQ ID NO: 21069 - DNA, 20 bp, Artificial sequence
  SiRNA target sequence
ttttttcgttatcccgtctt

SEQ ID NO: 21070 - DNA, 20 bp, Artificial sequence
  SiRNA target sequence
tttttcgttatcccgtcttg

SEQ ID NO: 21071 - DNA, 20 bp, Artificial sequence
  SiRNA target sequence
ttttcgttatcccgtcttgc

SEQ ID NO: 21072 - DNA, 20 bp, Artificial sequence
  SiRNA target sequence
tttcgttatcccgtcttgcg

SEQ ID NO: 21073 - DNA, 20 bp, Artificial sequence
  SiRNA target sequence
ttcgttatcccgtcttgcgc

SEQ ID NO: 21074 - DNA, 20 bp, Artificial sequence
  SiRNA target sequence
tcgttatcccgtcttgcgca

SEQ ID NO: 21075 - DNA, 20 bp, Artificial sequence
  SiRNA target sequence
cgttatcccgtcttgcgcag

SEQ ID NO: 21076 - DNA, 20 bp, Artificial sequence
  SiRNA target sequence
gttatcccgtcttgcgcaga

SEQ ID NO: 21077 - DNA, 20 bp, Artificial sequence
  SiRNA target sequence
ttatcccgtcttgcgcagat

SEQ ID NO: 21078 - DNA, 20 bp, Artificial sequence
  SiRNA target sequence
tatcccgtcttgcgcagata

SEQ ID NO: 21079 - DNA, 20 bp, Artificial sequence
  SiRNA target sequence
atcccgtcttgcgcagatac

SEQ ID NO: 21080 - DNA, 20 bp, Artificial sequence
  SiRNA target sequence
tcccgtcttgcgcagatact

SEQ ID NO: 21081 - DNA, 20 bp, Artificial sequence
  SiRNA target sequence
cccgtcttgcgcagatactt

SEQ ID NO: 21082 - DNA, 20 bp, Artificial sequence
  SiRNA target sequence
ccgtcttgcgcagatacttt

SEQ ID NO: 21083 - DNA, 20 bp, Artificial sequence
  SiRNA target sequence
cgtcttgcgcagatactttg

SEQ ID NO: 21084 - DNA, 20 bp, Artificial sequence
  SiRNA target sequence
gtcttgcgcagatactttgt

SEQ ID NO: 21085 - DNA, 20 bp, Artificial sequence
  SiRNA target sequence
tcttgcgcagatactttgta

SEQ ID NO: 21086 - DNA, 20 bp, Artificial sequence
  SiRNA target sequence
cttgcgcagatactttgtat

SEQ ID NO: 21087 - DNA, 20 bp, Artificial sequence
  SiRNA target sequence
ttgcgcagatactttgtata

SEQ ID NO: 21088 - DNA, 20 bp, Artificial sequence
  SiRNA target sequence
tgcgcagatactttgtatat

SEQ ID NO: 21089 - DNA, 20 bp, Artificial sequence
  SiRNA target sequence
gcgcagatactttgtatatt

SEQ ID NO: 21090 - DNA, 20 bp, Artificial sequence
  SiRNA target sequence
cgcagatactttgtatattc

SEQ ID NO: 21091 - DNA, 20 bp, Artificial sequence
  SiRNA target sequence
gcagatactttgtatattcc

SEQ ID NO: 21092 - DNA, 20 bp, Artificial sequence
  SiRNA target sequence
cagatactttgtatattccg

SEQ ID NO: 21093 - DNA, 20 bp, Artificial sequence
  SiRNA target sequence
agatactttgtatattccgt

SEQ ID NO: 21094 - DNA, 20 bp, Artificial sequence
  SiRNA target sequence
gatactttgtatattccgtt

SEQ ID NO: 21095 - DNA, 20 bp, Artificial sequence
  SiRNA target sequence
atactttgtatattccgtta

SEQ ID NO: 21096 - DNA, 20 bp, Artificial sequence
  SiRNA target sequence
tactttgtatattccgttag

SEQ ID NO: 21097 - DNA, 20 bp, Artificial sequence
  SiRNA target sequence
actttgtatattccgttagc

SEQ ID NO: 21098 - DNA, 20 bp, Artificial sequence
  SiRNA target sequence
ctttgtatattccgttagca

SEQ ID NO: 21099 - DNA, 20 bp, Artificial sequence
  SiRNA target sequence
tttgtatattccgttagcat

SEQ ID NO: 21100 - DNA, 20 bp, Artificial sequence
  SiRNA target sequence
ttgtatattccgttagcatc

SEQ ID NO: 21101 - DNA, 20 bp, Artificial sequence
  SiRNA target sequence
tgtatattccgttagcatcg

SEQ ID NO: 21102 - DNA, 20 bp, Artificial sequence
  SiRNA target sequence
gtatattccgttagcatcgg

SEQ ID NO: 21103 - DNA, 20 bp, Artificial sequence
  SiRNA target sequence
tatattccgttagcatcggc

SEQ ID NO: 21104 - DNA, 20 bp, Artificial sequence
  SiRNA target sequence
atattccgttagcatcggct

SEQ ID NO: 21105 - DNA, 20 bp, Artificial sequence
  SiRNA target sequence
tattccgttagcatcggctt

SEQ ID NO: 21106 - DNA, 20 bp, Artificial sequence
  SiRNA target sequence
attccgttagcatcggcttc

SEQ ID NO: 21107 - DNA, 20 bp, Artificial sequence
  SiRNA target sequence
ttccgttagcatcggcttca

SEQ ID NO: 21108 - DNA, 20 bp, Artificial sequence
  SiRNA target sequence
tccgttagcatcggcttcaa

SEQ ID NO: 21109 - DNA, 20 bp, Artificial sequence
  SiRNA target sequence
ccgttagcatcggcttcaaa

SEQ ID NO: 21110 - DNA, 20 bp, Artificial sequence
  SiRNA target sequence
cgttagcatcggcttcaaat

SEQ ID NO: 21111 - DNA, 20 bp, Artificial sequence
  SiRNA target sequence
gttagcatcggcttcaaatg

SEQ ID NO: 21112 - DNA, 20 bp, Artificial sequence
  SiRNA target sequence
ttagcatcggcttcaaatgt

SEQ ID NO: 21113 - DNA, 20 bp, Artificial sequence
  SiRNA target sequence
tagcatcggcttcaaatgta

SEQ ID NO: 21114 - DNA, 20 bp, Artificial sequence
  SiRNA target sequence
agcatcggcttcaaatgtaa

SEQ ID NO: 21115 - DNA, 20 bp, Artificial sequence
  SiRNA target sequence
gcatcggcttcaaatgtaac

SEQ ID NO: 21116 - DNA, 20 bp, Artificial sequence
  SiRNA target sequence
catcggcttcaaatgtaaca

SEQ ID NO: 21117 - DNA, 20 bp, Artificial sequence
  SiRNA target sequence
atcggcttcaaatgtaacat

SEQ ID NO: 21118 - DNA, 20 bp, Artificial sequence
  SiRNA target sequence
tcggcttcaaatgtaacatc

SEQ ID NO: 21119 - DNA, 20 bp, Artificial sequence
  SiRNA target sequence
cggcttcaaatgtaacatct

SEQ ID NO: 21120 - DNA, 20 bp, Artificial sequence
  SiRNA target sequence
ggcttcaaatgtaacatcta

SEQ ID NO: 21121 - DNA, 20 bp, Artificial sequence
  SiRNA target sequence
gcttcaaatgtaacatctat

SEQ ID NO: 21122 - DNA, 20 bp, Artificial sequence
  SiRNA target sequence
cttcaaatgtaacatctatc

SEQ ID NO: 21123 - DNA, 20 bp, Artificial sequence
  SiRNA target sequence
ttcaaatgtaacatctatct

SEQ ID NO: 21124 - DNA, 20 bp, Artificial sequence
  SiRNA target sequence
tcaaatgtaacatctatctt

SEQ ID NO: 21125 - DNA, 20 bp, Artificial sequence
  SiRNA target sequence
caaatgtaacatctatcttt

SEQ ID NO: 21126 - DNA, 20 bp, Artificial sequence
  SiRNA target sequence
aaatgtaacatctatctttg

SEQ ID NO: 21127 - DNA, 20 bp, Artificial sequence
  SiRNA target sequence
aatgtaacatctatctttgg

SEQ ID NO: 21128 - DNA, 20 bp, Artificial sequence
  SiRNA target sequence
atgtaacatctatctttgga

SEQ ID NO: 21129 - DNA, 20 bp, Artificial sequence
  SiRNA target sequence
tgtaacatctatctttggaa

SEQ ID NO: 21130 - DNA, 20 bp, Artificial sequence
  SiRNA target sequence
gtaacatctatctttggaat

SEQ ID NO: 21131 - DNA, 20 bp, Artificial sequence
  SiRNA target sequence
taacatctatctttggaata

SEQ ID NO: 21132 - DNA, 20 bp, Artificial sequence
  SiRNA target sequence
aacatctatctttggaatac

SEQ ID NO: 21133 - DNA, 20 bp, Artificial sequence
  SiRNA target sequence
acatctatctttggaatacc

SEQ ID NO: 21134 - DNA, 20 bp, Artificial sequence
  SiRNA target sequence
catctatctttggaatacct

SEQ ID NO: 21135 - DNA, 20 bp, Artificial sequence
  SiRNA target sequence
atctatctttggaatacctg

SEQ ID NO: 21136 - DNA, 20 bp, Artificial sequence
  SiRNA target sequence
tctatctttggaatacctgc

SEQ ID NO: 21137 - DNA, 20 bp, Artificial sequence
  SiRNA target sequence
ctatctttggaatacctgca

SEQ ID NO: 21138 - DNA, 20 bp, Artificial sequence
  SiRNA target sequence
tatctttggaatacctgcag

SEQ ID NO: 21139 - DNA, 20 bp, Artificial sequence
  SiRNA target sequence
atctttggaatacctgcagg

SEQ ID NO: 21140 - DNA, 20 bp, Artificial sequence
  SiRNA target sequence
tctttggaatacctgcaggt

SEQ ID NO: 21141 - DNA, 20 bp, Artificial sequence
  SiRNA target sequence
ctttggaatacctgcaggtg

SEQ ID NO: 21142 - DNA, 20 bp, Artificial sequence
  SiRNA target sequence
tttggaatacctgcaggtgc

SEQ ID NO: 21143 - DNA, 20 bp, Artificial sequence
  SiRNA target sequence
ttggaatacctgcaggtgct

SEQ ID NO: 21144 - DNA, 20 bp, Artificial sequence
  SiRNA target sequence
tggaatacctgcaggtgctt

SEQ ID NO: 21145 - DNA, 20 bp, Artificial sequence
  SiRNA target sequence
ggaatacctgcaggtgcttt

SEQ ID NO: 21146 - DNA, 20 bp, Artificial sequence
  SiRNA target sequence
gaatacctgcaggtgcttta

SEQ ID NO: 21147 - DNA, 20 bp, Artificial sequence
  SiRNA target sequence
aatacctgcaggtgctttag

SEQ ID NO: 21148 - DNA, 20 bp, Artificial sequence
  SiRNA target sequence
atacctgcaggtgctttagg

SEQ ID NO: 21149 - DNA, 20 bp, Artificial sequence
  SiRNA target sequence
tacctgcaggtgctttagga

SEQ ID NO: 21150 - DNA, 20 bp, Artificial sequence
  SiRNA target sequence
acctgcaggtgctttaggaa

SEQ ID NO: 21151 - DNA, 20 bp, Artificial sequence
  SiRNA target sequence
cctgcaggtgctttaggaat

SEQ ID NO: 21152 - DNA, 20 bp, Artificial sequence
  SiRNA target sequence
ctgcaggtgctttaggaatg

SEQ ID NO: 21153 - DNA, 20 bp, Artificial sequence
  SiRNA target sequence
tgcaggtgctttaggaatgt

SEQ ID NO: 21154 - DNA, 20 bp, Artificial sequence
  SiRNA target sequence
gcaggtgctttaggaatgtt

SEQ ID NO: 21155 - DNA, 20 bp, Artificial sequence
  SiRNA target sequence
caggtgctttaggaatgttt

SEQ ID NO: 21156 - DNA, 20 bp, Artificial sequence
  SiRNA target sequence
aggtgctttaggaatgtttt

SEQ ID NO: 21157 - DNA, 20 bp, Artificial sequence
  SiRNA target sequence
ggtgctttaggaatgttttt

SEQ ID NO: 21158 - DNA, 20 bp, Artificial sequence
  SiRNA target sequence
gtgctttaggaatgtttttg

SEQ ID NO: 21159 - DNA, 20 bp, Artificial sequence
  SiRNA target sequence
tgctttaggaatgtttttga

SEQ ID NO: 21160 - DNA, 20 bp, Artificial sequence
  SiRNA target sequence
gctttaggaatgtttttgag

SEQ ID NO: 21161 - DNA, 20 bp, Artificial sequence
  SiRNA target sequence
ctttaggaatgtttttgagc

SEQ ID NO: 21162 - DNA, 20 bp, Artificial sequence
  SiRNA target sequence
tttaggaatgtttttgagct

SEQ ID NO: 21163 - DNA, 20 bp, Artificial sequence
  SiRNA target sequence
ttaggaatgtttttgagctt

SEQ ID NO: 21164 - DNA, 20 bp, Artificial sequence
  SiRNA target sequence
taggaatgtttttgagcttt

SEQ ID NO: 21165 - DNA, 20 bp, Artificial sequence
  SiRNA target sequence
aggaatgtttttgagcttta

SEQ ID NO: 21166 - DNA, 20 bp, Artificial sequence
  SiRNA target sequence
ggaatgtttttgagctttat

SEQ ID NO: 21167 - DNA, 20 bp, Artificial sequence
  SiRNA target sequence
gaatgtttttgagctttata

SEQ ID NO: 21168 - DNA, 20 bp, Artificial sequence
  SiRNA target sequence
aatgtttttgagctttatag

SEQ ID NO: 21169 - DNA, 20 bp, Artificial sequence
  SiRNA target sequence
atgtttttgagctttatagc

SEQ ID NO: 21170 - DNA, 20 bp, Artificial sequence
  SiRNA target sequence
tgtttttgagctttatagct

SEQ ID NO: 21171 - DNA, 20 bp, Artificial sequence
  SiRNA target sequence
gtttttgagctttatagctc

SEQ ID NO: 21172 - DNA, 20 bp, Artificial sequence
  SiRNA target sequence
tttttgagctttatagctcc

SEQ ID NO: 21173 - DNA, 20 bp, Artificial sequence
  SiRNA target sequence
ttttgagctttatagctcct

SEQ ID NO: 21174 - DNA, 20 bp, Artificial sequence
  SiRNA target sequence
tttgagctttatagctccta

SEQ ID NO: 21175 - DNA, 20 bp, Artificial sequence
  SiRNA target sequence
ttgagctttatagctcctaa

SEQ ID NO: 21176 - DNA, 20 bp, Artificial sequence
  SiRNA target sequence
tgagctttatagctcctaaa

SEQ ID NO: 21177 - DNA, 20 bp, Artificial sequence
  SiRNA target sequence
gagctttatagctcctaaat

SEQ ID NO: 21178 - DNA, 20 bp, Artificial sequence
  SiRNA target sequence
agctttatagctcctaaata

SEQ ID NO: 21179 - DNA, 20 bp, Artificial sequence
  SiRNA target sequence
gctttatagctcctaaatat

SEQ ID NO: 21180 - DNA, 20 bp, Artificial sequence
  SiRNA target sequence
ctttatagctcctaaatatt

SEQ ID NO: 21181 - DNA, 20 bp, Artificial sequence
  SiRNA target sequence
tttatagctcctaaatattt

SEQ ID NO: 21182 - DNA, 20 bp, Artificial sequence
  SiRNA target sequence
ttatagctcctaaatattta

SEQ ID NO: 21183 - DNA, 20 bp, Artificial sequence
  SiRNA target sequence
tatagctcctaaatatttat

SEQ ID NO: 21184 - DNA, 20 bp, Artificial sequence
  SiRNA target sequence
atagctcctaaatatttatt

SEQ ID NO: 21185 - DNA, 20 bp, Artificial sequence
  SiRNA target sequence
tagctcctaaatatttattg

SEQ ID NO: 21186 - DNA, 20 bp, Artificial sequence
  SiRNA target sequence
agctcctaaatatttattgt

SEQ ID NO: 21187 - DNA, 20 bp, Artificial sequence
  SiRNA target sequence
gctcctaaatatttattgtc

SEQ ID NO: 21188 - DNA, 20 bp, Artificial sequence
  SiRNA target sequence
ctcctaaatatttattgtct

SEQ ID NO: 21189 - DNA, 20 bp, Artificial sequence
  SiRNA target sequence
tcctaaatatttattgtctt

SEQ ID NO: 21190 - DNA, 20 bp, Artificial sequence
  SiRNA target sequence
cctaaatatttattgtcttt

SEQ ID NO: 21191 - DNA, 20 bp, Artificial sequence
  SiRNA target sequence
ctaaatatttattgtctttt

SEQ ID NO: 21192 - DNA, 20 bp, Artificial sequence
  SiRNA target sequence
taaatatttattgtctttta

SEQ ID NO: 21193 - DNA, 20 bp, Artificial sequence
  SiRNA target sequence
aaatatttattgtcttttac

SEQ ID NO: 21194 - DNA, 20 bp, Artificial sequence
  SiRNA target sequence
aatatttattgtcttttacc

SEQ ID NO: 21195 - DNA, 20 bp, Artificial sequence
  SiRNA target sequence
atatttattgtcttttacca

SEQ ID NO: 21196 - DNA, 20 bp, Artificial sequence
  SiRNA target sequence
tatttattgtcttttaccat

SEQ ID NO: 21197 - DNA, 20 bp, Artificial sequence
  SiRNA target sequence
atttattgtcttttaccatc

SEQ ID NO: 21198 - DNA, 20 bp, Artificial sequence
  SiRNA target sequence
tttattgtcttttaccatct

SEQ ID NO: 21199 - DNA, 20 bp, Artificial sequence
  SiRNA target sequence
ttattgtcttttaccatctt

SEQ ID NO: 21200 - DNA, 20 bp, Artificial sequence
  SiRNA target sequence
tattgtcttttaccatcttt

SEQ ID NO: 21201 - DNA, 20 bp, Artificial sequence
  SiRNA target sequence
attgtcttttaccatctttc

SEQ ID NO: 21202 - DNA, 20 bp, Artificial sequence
  SiRNA target sequence
ttgtcttttaccatctttct

SEQ ID NO: 21203 - DNA, 20 bp, Artificial sequence
  SiRNA target sequence
tgtcttttaccatctttctt

SEQ ID NO: 21204 - DNA, 20 bp, Artificial sequence
  SiRNA target sequence
gtcttttaccatctttcttt

SEQ ID NO: 21205 - DNA, 20 bp, Artificial sequence
  SiRNA target sequence
tcttttaccatctttctttc

SEQ ID NO: 21206 - DNA, 20 bp, Artificial sequence
  SiRNA target sequence
cttttaccatctttctttct

SEQ ID NO: 21207 - DNA, 20 bp, Artificial sequence
  SiRNA target sequence
ttttaccatctttctttctc

SEQ ID NO: 21208 - DNA, 20 bp, Artificial sequence
  SiRNA target sequence
tttaccatctttctttctcc

SEQ ID NO: 21209 - DNA, 20 bp, Artificial sequence
  SiRNA target sequence
ttaccatctttctttctcct

SEQ ID NO: 21210 - DNA, 20 bp, Artificial sequence
  SiRNA target sequence
taccatctttctttctcctt

SEQ ID NO: 21211 - DNA, 20 bp, Artificial sequence
  SiRNA target sequence
accatctttctttctccttg

SEQ ID NO: 21212 - DNA, 20 bp, Artificial sequence
  SiRNA target sequence
ccatctttctttctccttga

SEQ ID NO: 21213 - DNA, 20 bp, Artificial sequence
  SiRNA target sequence
catctttctttctccttgat

SEQ ID NO: 21214 - DNA, 20 bp, Artificial sequence
  SiRNA target sequence
atctttctttctccttgata

SEQ ID NO: 21215 - DNA, 20 bp, Artificial sequence
  SiRNA target sequence
tctttctttctccttgatat

SEQ ID NO: 21216 - DNA, 20 bp, Artificial sequence
  SiRNA target sequence
ctttctttctccttgatata

SEQ ID NO: 21217 - DNA, 20 bp, Artificial sequence
  SiRNA target sequence
tttctttctccttgatatat

SEQ ID NO: 21218 - DNA, 20 bp, Artificial sequence
  SiRNA target sequence
ttctttctccttgatatatt

SEQ ID NO: 21219 - DNA, 20 bp, Artificial sequence
  SiRNA target sequence
tctttctccttgatatattc

SEQ ID NO: 21220 - DNA, 20 bp, Artificial sequence
  SiRNA target sequence
ctttctccttgatatattct

SEQ ID NO: 21221 - DNA, 20 bp, Artificial sequence
  SiRNA target sequence
tttctccttgatatattcta

SEQ ID NO: 21222 - DNA, 20 bp, Artificial sequence
  SiRNA target sequence
ttctccttgatatattctaa

SEQ ID NO: 21223 - DNA, 20 bp, Artificial sequence
  SiRNA target sequence
tctccttgatatattctaat

SEQ ID NO: 21224 - DNA, 20 bp, Artificial sequence
  SiRNA target sequence
ctccttgatatattctaata

SEQ ID NO: 21225 - DNA, 20 bp, Artificial sequence
  SiRNA target sequence
tccttgatatattctaatat

SEQ ID NO: 21226 - DNA, 20 bp, Artificial sequence
  SiRNA target sequence
ccttgatatattctaatatc

SEQ ID NO: 21227 - DNA, 20 bp, Artificial sequence
  SiRNA target sequence
cttgatatattctaatatct

SEQ ID NO: 21228 - DNA, 20 bp, Artificial sequence
  SiRNA target sequence
ttgatatattctaatatcta

SEQ ID NO: 21229 - DNA, 20 bp, Artificial sequence
  SiRNA target sequence
tgatatattctaatatctac

SEQ ID NO: 21230 - DNA, 20 bp, Artificial sequence
  SiRNA target sequence
gatatattctaatatctact

SEQ ID NO: 21231 - DNA, 20 bp, Artificial sequence
  SiRNA target sequence
atatattctaatatctactt

SEQ ID NO: 21232 - DNA, 20 bp, Artificial sequence
  SiRNA target sequence
tatattctaatatctacttc

SEQ ID NO: 21233 - DNA, 20 bp, Artificial sequence
  SiRNA target sequence
atattctaatatctacttcg

SEQ ID NO: 21234 - DNA, 20 bp, Artificial sequence
  SiRNA target sequence
tattctaatatctacttcgg

SEQ ID NO: 21235 - DNA, 20 bp, Artificial sequence
  SiRNA target sequence
attctaatatctacttcgga

SEQ ID NO: 21236 - DNA, 20 bp, Artificial sequence
  SiRNA target sequence
ttctaatatctacttcggat

SEQ ID NO: 21237 - DNA, 20 bp, Artificial sequence
  SiRNA target sequence
tctaatatctacttcggatt

SEQ ID NO: 21238 - DNA, 20 bp, Artificial sequence
  SiRNA target sequence
ctaatatctacttcggattg

SEQ ID NO: 21239 - DNA, 20 bp, Artificial sequence
  SiRNA target sequence
taatatctacttcggattga

SEQ ID NO: 21240 - DNA, 20 bp, Artificial sequence
  SiRNA target sequence
aatatctacttcggattgat

SEQ ID NO: 21241 - DNA, 20 bp, Artificial sequence
  SiRNA target sequence
atatctacttcggattgatt

SEQ ID NO: 21242 - DNA, 20 bp, Artificial sequence
  SiRNA target sequence
tatctacttcggattgatta

SEQ ID NO: 21243 - DNA, 20 bp, Artificial sequence
  SiRNA target sequence
atctacttcggattgattat

SEQ ID NO: 21244 - DNA, 20 bp, Artificial sequence
  SiRNA target sequence
tctacttcggattgattatc

SEQ ID NO: 21245 - DNA, 20 bp, Artificial sequence
  SiRNA target sequence
ctacttcggattgattatct

SEQ ID NO: 21246 - DNA, 20 bp, Artificial sequence
  SiRNA target sequence
tacttcggattgattatctt

SEQ ID NO: 21247 - DNA, 20 bp, Artificial sequence
  SiRNA target sequence
acttcggattgattatcttc

SEQ ID NO: 21248 - DNA, 20 bp, Artificial sequence
  SiRNA target sequence
cttcggattgattatcttca

SEQ ID NO: 21249 - DNA, 20 bp, Artificial sequence
  SiRNA target sequence
ttcggattgattatcttcag

SEQ ID NO: 21250 - DNA, 20 bp, Artificial sequence
  SiRNA target sequence
tcggattgattatcttcaga

SEQ ID NO: 21251 - DNA, 20 bp, Artificial sequence
  SiRNA target sequence
cggattgattatcttcagag

SEQ ID NO: 21252 - DNA, 20 bp, Artificial sequence
  SiRNA target sequence
ggattgattatcttcagagg

SEQ ID NO: 21253 - DNA, 20 bp, Artificial sequence
  SiRNA target sequence
gattgattatcttcagaggt

SEQ ID NO: 21254 - DNA, 20 bp, Artificial sequence
  SiRNA target sequence
attgattatcttcagaggta

SEQ ID NO: 21255 - DNA, 20 bp, Artificial sequence
  SiRNA target sequence
ttgattatcttcagaggtag

SEQ ID NO: 21256 - DNA, 20 bp, Artificial sequence
  SiRNA target sequence
tgattatcttcagaggtaga

SEQ ID NO: 21257 - DNA, 20 bp, Artificial sequence
  SiRNA target sequence
gattatcttcagaggtagaa

SEQ ID NO: 21258 - DNA, 20 bp, Artificial sequence
  SiRNA target sequence
attatcttcagaggtagaaa

SEQ ID NO: 21259 - DNA, 20 bp, Artificial sequence
  SiRNA target sequence
ttatcttcagaggtagaaaa

SEQ ID NO: 21260 - DNA, 20 bp, Artificial sequence
  SiRNA target sequence
tatcttcagaggtagaaaaa

SEQ ID NO: 21261 - DNA, 20 bp, Artificial sequence
  SiRNA target sequence
atcttcagaggtagaaaaac

SEQ ID NO: 21262 - DNA, 20 bp, Artificial sequence
  SiRNA target sequence
tcttcagaggtagaaaaact

SEQ ID NO: 21263 - DNA, 20 bp, Artificial sequence
  SiRNA target sequence
cttcagaggtagaaaaactg

SEQ ID NO: 21264 - DNA, 20 bp, Artificial sequence
  SiRNA target sequence
ttcagaggtagaaaaactgt

SEQ ID NO: 21265 - DNA, 20 bp, Artificial sequence
  SiRNA target sequence
tcagaggtagaaaaactgtg

SEQ ID NO: 21266 - DNA, 20 bp, Artificial sequence
  SiRNA target sequence
cagaggtagaaaaactgtgt

SEQ ID NO: 21267 - DNA, 20 bp, Artificial sequence
  SiRNA target sequence
agaggtagaaaaactgtgtg

SEQ ID NO: 21268 - DNA, 20 bp, Artificial sequence
  SiRNA target sequence
gaggtagaaaaactgtgtgt

SEQ ID NO: 21269 - DNA, 20 bp, Artificial sequence
  SiRNA target sequence
aggtagaaaaactgtgtgtt

SEQ ID NO: 21270 - DNA, 20 bp, Artificial sequence
  SiRNA target sequence
ggtagaaaaactgtgtgttt

SEQ ID NO: 21271 - DNA, 20 bp, Artificial sequence
  SiRNA target sequence
gtagaaaaactgtgtgtttc

SEQ ID NO: 21272 - DNA, 20 bp, Artificial sequence
  SiRNA target sequence
tagaaaaactgtgtgtttcc

SEQ ID NO: 21273 - DNA, 20 bp, Artificial sequence
  SiRNA target sequence
agaaaaactgtgtgtttcct

SEQ ID NO: 21274 - DNA, 20 bp, Artificial sequence
  SiRNA target sequence
gaaaaactgtgtgtttcctt

SEQ ID NO: 21275 - DNA, 20 bp, Artificial sequence
  SiRNA target sequence
aaaaactgtgtgtttcctta

SEQ ID NO: 21276 - DNA, 20 bp, Artificial sequence
  SiRNA target sequence
aaaactgtgtgtttccttaa

SEQ ID NO: 21277 - DNA, 20 bp, Artificial sequence
  SiRNA target sequence
aaactgtgtgtttccttaaa

SEQ ID NO: 21278 - DNA, 20 bp, Artificial sequence
  SiRNA target sequence
aactgtgtgtttccttaaat

SEQ ID NO: 21279 - DNA, 20 bp, Artificial sequence
  SiRNA target sequence
actgtgtgtttccttaaatg

SEQ ID NO: 21280 - DNA, 20 bp, Artificial sequence
  SiRNA target sequence
ctgtgtgtttccttaaatgg

SEQ ID NO: 21281 - DNA, 20 bp, Artificial sequence
  SiRNA target sequence
tgtgtgtttccttaaatgga

SEQ ID NO: 21282 - DNA, 20 bp, Artificial sequence
  SiRNA target sequence
gtgtgtttccttaaatggaa

SEQ ID NO: 21283 - DNA, 20 bp, Artificial sequence
  SiRNA target sequence
tgtgtttccttaaatggaat

SEQ ID NO: 21284 - DNA, 20 bp, Artificial sequence
  SiRNA target sequence
gtgtttccttaaatggaata

SEQ ID NO: 21285 - DNA, 20 bp, Artificial sequence
  SiRNA target sequence
tgtttccttaaatggaatag

SEQ ID NO: 21286 - DNA, 20 bp, Artificial sequence
  SiRNA target sequence
gtttccttaaatggaatagt

SEQ ID NO: 21287 - DNA, 20 bp, Artificial sequence
  SiRNA target sequence
tttccttaaatggaatagta

SEQ ID NO: 21288 - DNA, 20 bp, Artificial sequence
  SiRNA target sequence
ttccttaaatggaatagtag

SEQ ID NO: 21289 - DNA, 20 bp, Artificial sequence
  SiRNA target sequence
tccttaaatggaatagtaga

SEQ ID NO: 21290 - DNA, 20 bp, Artificial sequence
  SiRNA target sequence
ccttaaatggaatagtagaa

SEQ ID NO: 21291 - DNA, 20 bp, Artificial sequence
  SiRNA target sequence
cttaaatggaatagtagaat

SEQ ID NO: 21292 - DNA, 20 bp, Artificial sequence
  SiRNA target sequence
ttaaatggaatagtagaatt

SEQ ID NO: 21293 - DNA, 20 bp, Artificial sequence
  SiRNA target sequence
taaatggaatagtagaattt

SEQ ID NO: 21294 - DNA, 20 bp, Artificial sequence
  SiRNA target sequence
aaatggaatagtagaatttc

SEQ ID NO: 21295 - DNA, 20 bp, Artificial sequence
  SiRNA target sequence
aatggaatagtagaatttct

SEQ ID NO: 21296 - DNA, 20 bp, Artificial sequence
  SiRNA target sequence
atggaatagtagaatttcta

SEQ ID NO: 21297 - DNA, 20 bp, Artificial sequence
  SiRNA target sequence
tggaatagtagaatttctat

SEQ ID NO: 21298 - DNA, 20 bp, Artificial sequence
  SiRNA target sequence
ggaatagtagaatttctatg

SEQ ID NO: 21299 - DNA, 20 bp, Artificial sequence
  SiRNA target sequence
gaatagtagaatttctatga

SEQ ID NO: 21300 - DNA, 20 bp, Artificial sequence
  SiRNA target sequence
aatagtagaatttctatgaa

SEQ ID NO: 21301 - DNA, 20 bp, Artificial sequence
  SiRNA target sequence
atagtagaatttctatgaat

SEQ ID NO: 21302 - DNA, 20 bp, Artificial sequence
  SiRNA target sequence
tagtagaatttctatgaatt

SEQ ID NO: 21303 - DNA, 20 bp, Artificial sequence
  SiRNA target sequence
agtagaatttctatgaatta

SEQ ID NO: 21304 - DNA, 20 bp, Artificial sequence
  SiRNA target sequence
gtagaatttctatgaattat

SEQ ID NO: 21305 - DNA, 20 bp, Artificial sequence
  SiRNA target sequence
tagaatttctatgaattatc

SEQ ID NO: 21306 - DNA, 20 bp, Artificial sequence
  SiRNA target sequence
agaatttctatgaattatct

SEQ ID NO: 21307 - DNA, 20 bp, Artificial sequence
  SiRNA target sequence
gaatttctatgaattatctt

SEQ ID NO: 21308 - DNA, 20 bp, Artificial sequence
  SiRNA target sequence
aatttctatgaattatctta

SEQ ID NO: 21309 - DNA, 20 bp, Artificial sequence
  SiRNA target sequence
atttctatgaattatcttat

SEQ ID NO: 21310 - DNA, 20 bp, Artificial sequence
  SiRNA target sequence
tttctatgaattatcttatt

SEQ ID NO: 21311 - DNA, 20 bp, Artificial sequence
  SiRNA target sequence
ttctatgaattatcttatta

SEQ ID NO: 21312 - DNA, 20 bp, Artificial sequence
  SiRNA target sequence
tctatgaattatcttattaa

SEQ ID NO: 21313 - DNA, 20 bp, Artificial sequence
  SiRNA target sequence
ctatgaattatcttattaaa

SEQ ID NO: 21314 - DNA, 20 bp, Artificial sequence
  SiRNA target sequence
tatgaattatcttattaaaa

SEQ ID NO: 21315 - DNA, 20 bp, Artificial sequence
  SiRNA target sequence
atgaattatcttattaaaaa

SEQ ID NO: 21316 - DNA, 20 bp, Artificial sequence
  SiRNA target sequence
tgaattatcttattaaaaat

SEQ ID NO: 21317 - DNA, 20 bp, Artificial sequence
  SiRNA target sequence
gaattatcttattaaaaatc

SEQ ID NO: 21318 - DNA, 20 bp, Artificial sequence
  SiRNA target sequence
aattatcttattaaaaatcc

SEQ ID NO: 21319 - DNA, 20 bp, Artificial sequence
  SiRNA target sequence
attatcttattaaaaatccc

SEQ ID NO: 21320 - DNA, 20 bp, Artificial sequence
  SiRNA target sequence
ttatcttattaaaaatcccg

SEQ ID NO: 21321 - DNA, 20 bp, Artificial sequence
  SiRNA target sequence
tatcttattaaaaatcccgc

SEQ ID NO: 21322 - DNA, 20 bp, Artificial sequence
  SiRNA target sequence
atcttattaaaaatcccgcc

SEQ ID NO: 21323 - DNA, 20 bp, Artificial sequence
  SiRNA target sequence
tcttattaaaaatcccgccc

SEQ ID NO: 21324 - DNA, 20 bp, Artificial sequence
  SiRNA target sequence
cttattaaaaatcccgccca

SEQ ID NO: 21325 - DNA, 20 bp, Artificial sequence
  SiRNA target sequence
ttattaaaaatcccgcccaa

SEQ ID NO: 21326 - DNA, 20 bp, Artificial sequence
  SiRNA target sequence
tattaaaaatcccgcccaaa

SEQ ID NO: 21327 - DNA, 20 bp, Artificial sequence
  SiRNA target sequence
attaaaaatcccgcccaaaa

SEQ ID NO: 21328 - DNA, 20 bp, Artificial sequence
  SiRNA target sequence
ttaaaaatcccgcccaaaag

SEQ ID NO: 21329 - DNA, 20 bp, Artificial sequence
  SiRNA target sequence
taaaaatcccgcccaaaagc

SEQ ID NO: 21330 - DNA, 20 bp, Artificial sequence
  SiRNA target sequence
aaaaatcccgcccaaaagct

SEQ ID NO: 21331 - DNA, 20 bp, Artificial sequence
  SiRNA target sequence
aaaatcccgcccaaaagctc

SEQ ID NO: 21332 - DNA, 20 bp, Artificial sequence
  SiRNA target sequence
aaatcccgcccaaaagctct

SEQ ID NO: 21333 - DNA, 20 bp, Artificial sequence
  SiRNA target sequence
aatcccgcccaaaagctcta

SEQ ID NO: 21334 - DNA, 20 bp, Artificial sequence
  SiRNA target sequence
atcccgcccaaaagctctat

SEQ ID NO: 21335 - DNA, 20 bp, Artificial sequence
  SiRNA target sequence
tcccgcccaaaagctctata

SEQ ID NO: 21336 - DNA, 20 bp, Artificial sequence
  SiRNA target sequence
cccgcccaaaagctctatac

SEQ ID NO: 21337 - DNA, 20 bp, Artificial sequence
  SiRNA target sequence
ccgcccaaaagctctatacc

SEQ ID NO: 21338 - DNA, 20 bp, Artificial sequence
  SiRNA target sequence
cgcccaaaagctctatacct

SEQ ID NO: 21339 - DNA, 20 bp, Artificial sequence
  SiRNA target sequence
gcccaaaagctctataccta

SEQ ID NO: 21340 - DNA, 20 bp, Artificial sequence
  SiRNA target sequence
cccaaaagctctatacctaa

SEQ ID NO: 21341 - DNA, 20 bp, Artificial sequence
  SiRNA target sequence
ccaaaagctctatacctaaa

SEQ ID NO: 21342 - DNA, 20 bp, Artificial sequence
  SiRNA target sequence
caaaagctctatacctaaac

SEQ ID NO: 21343 - DNA, 20 bp, Artificial sequence
  SiRNA target sequence
aaaagctctatacctaaact

SEQ ID NO: 21344 - DNA, 20 bp, Artificial sequence
  SiRNA target sequence
aaagctctatacctaaactc

SEQ ID NO: 21345 - DNA, 20 bp, Artificial sequence
  SiRNA target sequence
aagctctatacctaaactca

SEQ ID NO: 21346 - DNA, 20 bp, Artificial sequence
  SiRNA target sequence
agctctatacctaaactcaa

SEQ ID NO: 21347 - DNA, 20 bp, Artificial sequence
  SiRNA target sequence
gctctatacctaaactcaat

SEQ ID NO: 21348 - DNA, 20 bp, Artificial sequence
  SiRNA target sequence
ctctatacctaaactcaatg

SEQ ID NO: 21349 - DNA, 20 bp, Artificial sequence
  SiRNA target sequence
tctatacctaaactcaatgg

SEQ ID NO: 21350 - DNA, 20 bp, Artificial sequence
  SiRNA target sequence
ctatacctaaactcaatggt

SEQ ID NO: 21351 - DNA, 20 bp, Artificial sequence
  SiRNA target sequence
tatacctaaactcaatggta

SEQ ID NO: 21352 - DNA, 20 bp, Artificial sequence
  SiRNA target sequence
atacctaaactcaatggtac

SEQ ID NO: 21353 - DNA, 20 bp, Artificial sequence
  SiRNA target sequence
tacctaaactcaatggtact

SEQ ID NO: 21354 - DNA, 20 bp, Artificial sequence
  SiRNA target sequence
acctaaactcaatggtacta

SEQ ID NO: 21355 - DNA, 20 bp, Artificial sequence
  SiRNA target sequence
cctaaactcaatggtactac

SEQ ID NO: 21356 - DNA, 20 bp, Artificial sequence
  SiRNA target sequence
ctaaactcaatggtactaca

SEQ ID NO: 21357 - DNA, 20 bp, Artificial sequence
  SiRNA target sequence
taaactcaatggtactacat

SEQ ID NO: 21358 - DNA, 20 bp, Artificial sequence
  SiRNA target sequence
aaactcaatggtactacatc

SEQ ID NO: 21359 - DNA, 20 bp, Artificial sequence
  SiRNA target sequence
aactcaatggtactacatcc

SEQ ID NO: 21360 - DNA, 20 bp, Artificial sequence
  SiRNA target sequence
actcaatggtactacatcca

SEQ ID NO: 21361 - DNA, 20 bp, Artificial sequence
  SiRNA target sequence
ctcaatggtactacatccaa

SEQ ID NO: 21362 - DNA, 20 bp, Artificial sequence
  SiRNA target sequence
tcaatggtactacatccaat

SEQ ID NO: 21363 - DNA, 20 bp, Artificial sequence
  SiRNA target sequence
caatggtactacatccaata

SEQ ID NO: 21364 - DNA, 20 bp, Artificial sequence
  SiRNA target sequence
aatggtactacatccaataa

SEQ ID NO: 21365 - DNA, 20 bp, Artificial sequence
  SiRNA target sequence
atggtactacatccaataat

SEQ ID NO: 21366 - DNA, 20 bp, Artificial sequence
  SiRNA target sequence
tggtactacatccaataata

SEQ ID NO: 21367 - DNA, 20 bp, Artificial sequence
  SiRNA target sequence
ggtactacatccaataatag

SEQ ID NO: 21368 - DNA, 20 bp, Artificial sequence
  SiRNA target sequence
gtactacatccaataatagg

SEQ ID NO: 21369 - DNA, 20 bp, Artificial sequence
  SiRNA target sequence
tactacatccaataatagga

SEQ ID NO: 21370 - DNA, 20 bp, Artificial sequence
  SiRNA target sequence
actacatccaataataggac

SEQ ID NO: 21371 - DNA, 20 bp, Artificial sequence
  SiRNA target sequence
ctacatccaataataggaca

SEQ ID NO: 21372 - DNA, 20 bp, Artificial sequence
  SiRNA target sequence
tacatccaataataggacat

SEQ ID NO: 21373 - DNA, 20 bp, Artificial sequence
  SiRNA target sequence
acatccaataataggacatc

SEQ ID NO: 21374 - DNA, 20 bp, Artificial sequence
  SiRNA target sequence
catccaataataggacatct

SEQ ID NO: 21375 - DNA, 20 bp, Artificial sequence
  SiRNA target sequence
atccaataataggacatctt

SEQ ID NO: 21376 - DNA, 20 bp, Artificial sequence
  SiRNA target sequence
tccaataataggacatcttt

SEQ ID NO: 21377 - DNA, 20 bp, Artificial sequence
  SiRNA target sequence
ccaataataggacatctttt

SEQ ID NO: 21378 - DNA, 20 bp, Artificial sequence
  SiRNA target sequence
caataataggacatctttta

SEQ ID NO: 21379 - DNA, 20 bp, Artificial sequence
  SiRNA target sequence
aataataggacatcttttat

SEQ ID NO: 21380 - DNA, 20 bp, Artificial sequence
  SiRNA target sequence
ataataggacatcttttatt

SEQ ID NO: 21381 - DNA, 20 bp, Artificial sequence
  SiRNA target sequence
taataggacatcttttattt

SEQ ID NO: 21382 - DNA, 20 bp, Artificial sequence
  SiRNA target sequence
aataggacatcttttatttt

SEQ ID NO: 21383 - DNA, 20 bp, Artificial sequence
  SiRNA target sequence
ataggacatcttttattttt

SEQ ID NO: 21384 - DNA, 20 bp, Artificial sequence
  SiRNA target sequence
taggacatcttttatttttc

SEQ ID NO: 21385 - DNA, 20 bp, Artificial sequence
  SiRNA target sequence
aggacatcttttatttttcc

SEQ ID NO: 21386 - DNA, 20 bp, Artificial sequence
  SiRNA target sequence
ggacatcttttatttttcct

SEQ ID NO: 21387 - DNA, 20 bp, Artificial sequence
  SiRNA target sequence
gacatcttttatttttcctt

SEQ ID NO: 21388 - DNA, 20 bp, Artificial sequence
  SiRNA target sequence
acatcttttatttttccttc

SEQ ID NO: 21389 - DNA, 20 bp, Artificial sequence
  SiRNA target sequence
catcttttatttttccttct

SEQ ID NO: 21390 - DNA, 20 bp, Artificial sequence
  SiRNA target sequence
atcttttatttttccttcta

SEQ ID NO: 21391 - DNA, 20 bp, Artificial sequence
  SiRNA target sequence
tcttttatttttccttctaa

SEQ ID NO: 21392 - DNA, 20 bp, Artificial sequence
  SiRNA target sequence
cttttatttttccttctaac

SEQ ID NO: 21393 - DNA, 20 bp, Artificial sequence
  SiRNA target sequence
ttttatttttccttctaaca

SEQ ID NO: 21394 - DNA, 20 bp, Artificial sequence
  SiRNA target sequence
tttatttttccttctaacac

SEQ ID NO: 21395 - DNA, 20 bp, Artificial sequence
  SiRNA target sequence
ttatttttccttctaacacg

SEQ ID NO: 21396 - DNA, 20 bp, Artificial sequence
  SiRNA target sequence
tatttttccttctaacacgc

SEQ ID NO: 21397 - DNA, 20 bp, Artificial sequence
  SiRNA target sequence
atttttccttctaacacgcc

SEQ ID NO: 21398 - DNA, 20 bp, Artificial sequence
  SiRNA target sequence
tttttccttctaacacgcct

SEQ ID NO: 21399 - DNA, 20 bp, Artificial sequence
  SiRNA target sequence
ttttccttctaacacgcctg

SEQ ID NO: 21400 - DNA, 20 bp, Artificial sequence
  SiRNA target sequence
tttccttctaacacgcctgc

SEQ ID NO: 21401 - DNA, 20 bp, Artificial sequence
  SiRNA target sequence
ttccttctaacacgcctgct

SEQ ID NO: 21402 - DNA, 20 bp, Artificial sequence
  SiRNA target sequence
tccttctaacacgcctgctt

SEQ ID NO: 21403 - DNA, 20 bp, Artificial sequence
  SiRNA target sequence
ccttctaacacgcctgcttg

SEQ ID NO: 21404 - DNA, 20 bp, Artificial sequence
  SiRNA target sequence
cttctaacacgcctgcttgt

SEQ ID NO: 21405 - DNA, 20 bp, Artificial sequence
  SiRNA target sequence
ttctaacacgcctgcttgta

SEQ ID NO: 21406 - DNA, 20 bp, Artificial sequence
  SiRNA target sequence
tctaacacgcctgcttgtag

SEQ ID NO: 21407 - DNA, 20 bp, Artificial sequence
  SiRNA target sequence
ctaacacgcctgcttgtaga

SEQ ID NO: 21408 - DNA, 20 bp, Artificial sequence
  SiRNA target sequence
taacacgcctgcttgtagag

SEQ ID NO: 21409 - DNA, 20 bp, Artificial sequence
  SiRNA target sequence
aacacgcctgcttgtagagc

SEQ ID NO: 21410 - DNA, 20 bp, Artificial sequence
  SiRNA target sequence
acacgcctgcttgtagagcg

SEQ ID NO: 21411 - DNA, 20 bp, Artificial sequence
  SiRNA target sequence
cacgcctgcttgtagagcgg

SEQ ID NO: 21412 - DNA, 20 bp, Artificial sequence
  SiRNA target sequence
acgcctgcttgtagagcggc

SEQ ID NO: 21413 - DNA, 20 bp, Artificial sequence
  SiRNA target sequence
cgcctgcttgtagagcggcc

SEQ ID NO: 21414 - DNA, 20 bp, Artificial sequence
  SiRNA target sequence
gcctgcttgtagagcggccc

SEQ ID NO: 21415 - DNA, 20 bp, Artificial sequence
  SiRNA target sequence
cctgcttgtagagcggcccc

SEQ ID NO: 21416 - DNA, 20 bp, Artificial sequence
  SiRNA target sequence
ctgcttgtagagcggcccct

SEQ ID NO: 21417 - DNA, 20 bp, Artificial sequence
  SiRNA target sequence
tgcttgtagagcggcccctt

SEQ ID NO: 21418 - DNA, 20 bp, Artificial sequence
  SiRNA target sequence
gcttgtagagcggccccttt

SEQ ID NO: 21419 - DNA, 20 bp, Artificial sequence
  SiRNA target sequence
cttgtagagcggccccttta

SEQ ID NO: 21420 - DNA, 20 bp, Artificial sequence
  SiRNA target sequence
ttgtagagcggcccctttag

SEQ ID NO: 21421 - DNA, 20 bp, Artificial sequence
  SiRNA target sequence
tgtagagcggcccctttagc

SEQ ID NO: 21422 - DNA, 20 bp, Artificial sequence
  SiRNA target sequence
gtagagcggcccctttagca

SEQ ID NO: 21423 - DNA, 20 bp, Artificial sequence
  SiRNA target sequence
tagagcggcccctttagcaa

SEQ ID NO: 21424 - DNA, 20 bp, Artificial sequence
  SiRNA target sequence
agagcggcccctttagcaac

SEQ ID NO: 21425 - DNA, 20 bp, Artificial sequence
  SiRNA target sequence
gagcggcccctttagcaaca

SEQ ID NO: 21426 - DNA, 20 bp, Artificial sequence
  SiRNA target sequence
agcggcccctttagcaacag

SEQ ID NO: 21427 - DNA, 20 bp, Artificial sequence
  SiRNA target sequence
gcggcccctttagcaacagc

SEQ ID NO: 21428 - DNA, 20 bp, Artificial sequence
  SiRNA target sequence
cggcccctttagcaacagct

SEQ ID NO: 21429 - DNA, 20 bp, Artificial sequence
  SiRNA target sequence
ggcccctttagcaacagctt

SEQ ID NO: 21430 - DNA, 20 bp, Artificial sequence
  SiRNA target sequence
gcccctttagcaacagcttc

SEQ ID NO: 21431 - DNA, 20 bp, Artificial sequence
  SiRNA target sequence
cccctttagcaacagcttca

SEQ ID NO: 21432 - DNA, 20 bp, Artificial sequence
  SiRNA target sequence
ccctttagcaacagcttcat

SEQ ID NO: 21433 - DNA, 20 bp, Artificial sequence
  SiRNA target sequence
cctttagcaacagcttcatc

SEQ ID NO: 21434 - DNA, 20 bp, Artificial sequence
  SiRNA target sequence
ctttagcaacagcttcatct

SEQ ID NO: 21435 - DNA, 20 bp, Artificial sequence
  SiRNA target sequence
tttagcaacagcttcatctg

SEQ ID NO: 21436 - DNA, 20 bp, Artificial sequence
  SiRNA target sequence
ttagcaacagcttcatctgg

SEQ ID NO: 21437 - DNA, 20 bp, Artificial sequence
  SiRNA target sequence
tagcaacagcttcatctgga

SEQ ID NO: 21438 - DNA, 20 bp, Artificial sequence
  SiRNA target sequence
agcaacagcttcatctggat

SEQ ID NO: 21439 - DNA, 20 bp, Artificial sequence
  SiRNA target sequence
gcaacagcttcatctggatt

SEQ ID NO: 21440 - DNA, 20 bp, Artificial sequence
  SiRNA target sequence
caacagcttcatctggatta

SEQ ID NO: 21441 - DNA, 20 bp, Artificial sequence
  SiRNA target sequence
aacagcttcatctggattaa

SEQ ID NO: 21442 - DNA, 20 bp, Artificial sequence
  SiRNA target sequence
acagcttcatctggattaat

SEQ ID NO: 21443 - DNA, 20 bp, Artificial sequence
  SiRNA target sequence
cagcttcatctggattaata

SEQ ID NO: 21444 - DNA, 20 bp, Artificial sequence
  SiRNA target sequence
agcttcatctggattaatat

SEQ ID NO: 21445 - DNA, 20 bp, Artificial sequence
  SiRNA target sequence
gcttcatctggattaatatt

SEQ ID NO: 21446 - DNA, 20 bp, Artificial sequence
  SiRNA target sequence
cttcatctggattaatattt

SEQ ID NO: 21447 - DNA, 20 bp, Artificial sequence
  SiRNA target sequence
ttcatctggattaatatttg

SEQ ID NO: 21448 - DNA, 20 bp, Artificial sequence
  SiRNA target sequence
tcatctggattaatatttgt

SEQ ID NO: 21449 - DNA, 20 bp, Artificial sequence
  SiRNA target sequence
catctggattaatatttgta

SEQ ID NO: 21450 - DNA, 20 bp, Artificial sequence
  SiRNA target sequence
atctggattaatatttgtag

SEQ ID NO: 21451 - DNA, 20 bp, Artificial sequence
  SiRNA target sequence
tctggattaatatttgtaga

SEQ ID NO: 21452 - DNA, 20 bp, Artificial sequence
  SiRNA target sequence
ctggattaatatttgtagaa

SEQ ID NO: 21453 - DNA, 20 bp, Artificial sequence
  SiRNA target sequence
tggattaatatttgtagaag

SEQ ID NO: 21454 - DNA, 20 bp, Artificial sequence
  SiRNA target sequence
ggattaatatttgtagaagg

SEQ ID NO: 21455 - DNA, 20 bp, Artificial sequence
  SiRNA target sequence
gattaatatttgtagaaggc

SEQ ID NO: 21456 - DNA, 20 bp, Artificial sequence
  SiRNA target sequence
attaatatttgtagaaggct

SEQ ID NO: 21457 - DNA, 20 bp, Artificial sequence
  SiRNA target sequence
ttaatatttgtagaaggctc

SEQ ID NO: 21458 - DNA, 20 bp, Artificial sequence
  SiRNA target sequence
taatatttgtagaaggctcg

SEQ ID NO: 21459 - DNA, 20 bp, Artificial sequence
  SiRNA target sequence
aatatttgtagaaggctcga

SEQ ID NO: 21460 - DNA, 20 bp, Artificial sequence
  SiRNA target sequence
atatttgtagaaggctcgat

SEQ ID NO: 21461 - DNA, 20 bp, Artificial sequence
  SiRNA target sequence
tatttgtagaaggctcgata

SEQ ID NO: 21462 - DNA, 20 bp, Artificial sequence
  SiRNA target sequence
atttgtagaaggctcgatac

SEQ ID NO: 21463 - DNA, 20 bp, Artificial sequence
  SiRNA target sequence
tttgtagaaggctcgatacc

SEQ ID NO: 21464 - DNA, 20 bp, Artificial sequence
  SiRNA target sequence
ttgtagaaggctcgatacca

SEQ ID NO: 21465 - DNA, 20 bp, Artificial sequence
  SiRNA target sequence
tgtagaaggctcgataccaa

SEQ ID NO: 21466 - DNA, 20 bp, Artificial sequence
  SiRNA target sequence
gtagaaggctcgataccaaa

SEQ ID NO: 21467 - DNA, 20 bp, Artificial sequence
  SiRNA target sequence
tagaaggctcgataccaaaa

SEQ ID NO: 21468 - DNA, 20 bp, Artificial sequence
  SiRNA target sequence
agaaggctcgataccaaaaa

SEQ ID NO: 21469 - DNA, 20 bp, Artificial sequence
  SiRNA target sequence
gaaggctcgataccaaaaat

SEQ ID NO: 21470 - DNA, 20 bp, Artificial sequence
  SiRNA target sequence
aaggctcgataccaaaaatc

SEQ ID NO: 21471 - DNA, 20 bp, Artificial sequence
  SiRNA target sequence
aggctcgataccaaaaatct

SEQ ID NO: 21472 - DNA, 20 bp, Artificial sequence
  SiRNA target sequence
ggctcgataccaaaaatctt

SEQ ID NO: 21473 - DNA, 20 bp, Artificial sequence
  SiRNA target sequence
gctcgataccaaaaatcttc

SEQ ID NO: 21474 - DNA, 20 bp, Artificial sequence
  SiRNA target sequence
ctcgataccaaaaatcttct

SEQ ID NO: 21475 - DNA, 20 bp, Artificial sequence
  SiRNA target sequence
tcgataccaaaaatcttctt

SEQ ID NO: 21476 - DNA, 20 bp, Artificial sequence
  SiRNA target sequence
cgataccaaaaatcttctta

SEQ ID NO: 21477 - DNA, 20 bp, Artificial sequence
  SiRNA target sequence
gataccaaaaatcttcttaa

SEQ ID NO: 21478 - DNA, 20 bp, Artificial sequence
  SiRNA target sequence
ataccaaaaatcttcttaac

SEQ ID NO: 21479 - DNA, 20 bp, Artificial sequence
  SiRNA target sequence
taccaaaaatcttcttaaca

SEQ ID NO: 21480 - DNA, 20 bp, Artificial sequence
  SiRNA target sequence
accaaaaatcttcttaacaa

SEQ ID NO: 21481 - DNA, 20 bp, Artificial sequence
  SiRNA target sequence
ccaaaaatcttcttaacaag

SEQ ID NO: 21482 - DNA, 20 bp, Artificial sequence
  SiRNA target sequence
caaaaatcttcttaacaagt

SEQ ID NO: 21483 - DNA, 20 bp, Artificial sequence
  SiRNA target sequence
aaaaatcttcttaacaagtt

SEQ ID NO: 21484 - DNA, 20 bp, Artificial sequence
  SiRNA target sequence
aaaatcttcttaacaagttt

SEQ ID NO: 21485 - DNA, 20 bp, Artificial sequence
  SiRNA target sequence
aaatcttcttaacaagtttt

SEQ ID NO: 21486 - DNA, 20 bp, Artificial sequence
  SiRNA target sequence
aatcttcttaacaagttttc

SEQ ID NO: 21487 - DNA, 20 bp, Artificial sequence
  SiRNA target sequence
atcttcttaacaagttttct

SEQ ID NO: 21488 - DNA, 20 bp, Artificial sequence
  SiRNA target sequence
tcttcttaacaagttttcta

SEQ ID NO: 21489 - DNA, 20 bp, Artificial sequence
  SiRNA target sequence
cttcttaacaagttttctaa

SEQ ID NO: 21490 - DNA, 20 bp, Artificial sequence
  SiRNA target sequence
ttcttaacaagttttctaac

SEQ ID NO: 21491 - DNA, 20 bp, Artificial sequence
  SiRNA target sequence
tcttaacaagttttctaaca

SEQ ID NO: 21492 - DNA, 20 bp, Artificial sequence
  SiRNA target sequence
cttaacaagttttctaacat

SEQ ID NO: 21493 - DNA, 20 bp, Artificial sequence
  SiRNA target sequence
ttaacaagttttctaacata

SEQ ID NO: 21494 - DNA, 20 bp, Artificial sequence
  SiRNA target sequence
taacaagttttctaacatac

SEQ ID NO: 21495 - DNA, 20 bp, Artificial sequence
  SiRNA target sequence
aacaagttttctaacatacg

SEQ ID NO: 21496 - DNA, 20 bp, Artificial sequence
  SiRNA target sequence
acaagttttctaacatacgg

SEQ ID NO: 21497 - DNA, 20 bp, Artificial sequence
  SiRNA target sequence
caagttttctaacatacggc

SEQ ID NO: 21498 - DNA, 20 bp, Artificial sequence
  SiRNA target sequence
aagttttctaacatacggca

SEQ ID NO: 21499 - DNA, 20 bp, Artificial sequence
  SiRNA target sequence
agttttctaacatacggcat

SEQ ID NO: 21500 - DNA, 20 bp, Artificial sequence
  SiRNA target sequence
gttttctaacatacggcatt

SEQ ID NO: 21501 - DNA, 20 bp, Artificial sequence
  SiRNA target sequence
ttttctaacatacggcattc

SEQ ID NO: 21502 - DNA, 20 bp, Artificial sequence
  SiRNA target sequence
tttctaacatacggcattcg

SEQ ID NO: 21503 - DNA, 20 bp, Artificial sequence
  SiRNA target sequence
ttctaacatacggcattcgt

SEQ ID NO: 21504 - DNA, 20 bp, Artificial sequence
  SiRNA target sequence
tctaacatacggcattcgtg

SEQ ID NO: 21505 - DNA, 20 bp, Artificial sequence
  SiRNA target sequence
ctaacatacggcattcgtgt

SEQ ID NO: 21506 - DNA, 20 bp, Artificial sequence
  SiRNA target sequence
taacatacggcattcgtgtc

SEQ ID NO: 21507 - DNA, 20 bp, Artificial sequence
  SiRNA target sequence
aacatacggcattcgtgtca

SEQ ID NO: 21508 - DNA, 20 bp, Artificial sequence
  SiRNA target sequence
acatacggcattcgtgtcat

SEQ ID NO: 21509 - DNA, 20 bp, Artificial sequence
  SiRNA target sequence
catacggcattcgtgtcatt

SEQ ID NO: 21510 - DNA, 20 bp, Artificial sequence
  SiRNA target sequence
atacggcattcgtgtcattc

SEQ ID NO: 21511 - DNA, 20 bp, Artificial sequence
  SiRNA target sequence
tacggcattcgtgtcattcc

SEQ ID NO: 21512 - DNA, 20 bp, Artificial sequence
  SiRNA target sequence
acggcattcgtgtcattcca

SEQ ID NO: 21513 - DNA, 20 bp, Artificial sequence
  SiRNA target sequence
cggcattcgtgtcattccac

SEQ ID NO: 21514 - DNA, 20 bp, Artificial sequence
  SiRNA target sequence
ggcattcgtgtcattccacc

SEQ ID NO: 21515 - DNA, 20 bp, Artificial sequence
  SiRNA target sequence
gcattcgtgtcattccaccc

SEQ ID NO: 21516 - DNA, 20 bp, Artificial sequence
  SiRNA target sequence
cattcgtgtcattccaccca

SEQ ID NO: 21517 - DNA, 20 bp, Artificial sequence
  SiRNA target sequence
attcgtgtcattccacccac

SEQ ID NO: 21518 - DNA, 20 bp, Artificial sequence
  SiRNA target sequence
ttcgtgtcattccacccaca

SEQ ID NO: 21519 - DNA, 20 bp, Artificial sequence
  SiRNA target sequence
tcgtgtcattccacccacaa

SEQ ID NO: 21520 - DNA, 20 bp, Artificial sequence
  SiRNA target sequence
cgtgtcattccacccacaag

SEQ ID NO: 21521 - DNA, 20 bp, Artificial sequence
  SiRNA target sequence
gtgtcattccacccacaagt

SEQ ID NO: 21522 - DNA, 20 bp, Artificial sequence
  SiRNA target sequence
tgtcattccacccacaagta

SEQ ID NO: 21523 - DNA, 20 bp, Artificial sequence
  SiRNA target sequence
gtcattccacccacaagtat

SEQ ID NO: 21524 - DNA, 20 bp, Artificial sequence
  SiRNA target sequence
tcattccacccacaagtata

SEQ ID NO: 21525 - DNA, 20 bp, Artificial sequence
  SiRNA target sequence
cattccacccacaagtataa

SEQ ID NO: 21526 - DNA, 20 bp, Artificial sequence
  SiRNA target sequence
attccacccacaagtataac

SEQ ID NO: 21527 - DNA, 20 bp, Artificial sequence
  SiRNA target sequence
ttccacccacaagtataacg

SEQ ID NO: 21528 - DNA, 20 bp, Artificial sequence
  SiRNA target sequence
tccacccacaagtataacgt

SEQ ID NO: 21529 - DNA, 20 bp, Artificial sequence
  SiRNA target sequence
ccacccacaagtataacgtg

SEQ ID NO: 21530 - DNA, 20 bp, Artificial sequence
  SiRNA target sequence
cacccacaagtataacgtgt

SEQ ID NO: 21531 - DNA, 20 bp, Artificial sequence
  SiRNA target sequence
acccacaagtataacgtgtt

SEQ ID NO: 21532 - DNA, 20 bp, Artificial sequence
  SiRNA target sequence
cccacaagtataacgtgttt

SEQ ID NO: 21533 - DNA, 20 bp, Artificial sequence
  SiRNA target sequence
ccacaagtataacgtgttta

SEQ ID NO: 21534 - DNA, 20 bp, Artificial sequence
  SiRNA target sequence
cacaagtataacgtgtttaa

SEQ ID NO: 21535 - DNA, 20 bp, Artificial sequence
  SiRNA target sequence
acaagtataacgtgtttaat

SEQ ID NO: 21536 - DNA, 20 bp, Artificial sequence
  SiRNA target sequence
caagtataacgtgtttaata

SEQ ID NO: 21537 - DNA, 20 bp, Artificial sequence
  SiRNA target sequence
aagtataacgtgtttaatat

SEQ ID NO: 21538 - DNA, 20 bp, Artificial sequence
  SiRNA target sequence
agtataacgtgtttaatatc

SEQ ID NO: 21539 - DNA, 20 bp, Artificial sequence
  SiRNA target sequence
gtataacgtgtttaatatca

SEQ ID NO: 21540 - DNA, 20 bp, Artificial sequence
  SiRNA target sequence
tataacgtgtttaatatcac

SEQ ID NO: 21541 - DNA, 20 bp, Artificial sequence
  SiRNA target sequence
ataacgtgtttaatatcact

SEQ ID NO: 21542 - DNA, 20 bp, Artificial sequence
  SiRNA target sequence
taacgtgtttaatatcactt

SEQ ID NO: 21543 - DNA, 20 bp, Artificial sequence
  SiRNA target sequence
aacgtgtttaatatcacttt

SEQ ID NO: 21544 - DNA, 20 bp, Artificial sequence
  SiRNA target sequence
acgtgtttaatatcactttt

SEQ ID NO: 21545 - DNA, 20 bp, Artificial sequence
  SiRNA target sequence
cgtgtttaatatcactttta

SEQ ID NO: 21546 - DNA, 20 bp, Artificial sequence
  SiRNA target sequence
gtgtttaatatcacttttag

SEQ ID NO: 21547 - DNA, 20 bp, Artificial sequence
  SiRNA target sequence
tgtttaatatcacttttagt

SEQ ID NO: 21548 - DNA, 20 bp, Artificial sequence
  SiRNA target sequence
gtttaatatcacttttagtt

SEQ ID NO: 21549 - DNA, 20 bp, Artificial sequence
  SiRNA target sequence
tttaatatcacttttagtta

SEQ ID NO: 21550 - DNA, 20 bp, Artificial sequence
  SiRNA target sequence
ttaatatcacttttagttat

SEQ ID NO: 21551 - DNA, 20 bp, Artificial sequence
  SiRNA target sequence
taatatcacttttagttata

SEQ ID NO: 21552 - DNA, 20 bp, Artificial sequence
  SiRNA target sequence
aatatcacttttagttatat

SEQ ID NO: 21553 - DNA, 20 bp, Artificial sequence
  SiRNA target sequence
atatcacttttagttatatt

SEQ ID NO: 21554 - DNA, 20 bp, Artificial sequence
  SiRNA target sequence
tatcacttttagttatattg

SEQ ID NO: 21555 - DNA, 20 bp, Artificial sequence
  SiRNA target sequence
atcacttttagttatattgg

SEQ ID NO: 21556 - DNA, 20 bp, Artificial sequence
  SiRNA target sequence
tcacttttagttatattggc

SEQ ID NO: 21557 - DNA, 20 bp, Artificial sequence
  SiRNA target sequence
cacttttagttatattggca

SEQ ID NO: 21558 - DNA, 20 bp, Artificial sequence
  SiRNA target sequence
acttttagttatattggcat

SEQ ID NO: 21559 - DNA, 20 bp, Artificial sequence
  SiRNA target sequence
cttttagttatattggcatc

SEQ ID NO: 21560 - DNA, 20 bp, Artificial sequence
  SiRNA target sequence
ttttagttatattggcatct

SEQ ID NO: 21561 - DNA, 20 bp, Artificial sequence
  SiRNA target sequence
tttagttatattggcatctc

SEQ ID NO: 21562 - DNA, 20 bp, Artificial sequence
  SiRNA target sequence
ttagttatattggcatctct

SEQ ID NO: 21563 - DNA, 20 bp, Artificial sequence
  SiRNA target sequence
tagttatattggcatctcta

SEQ ID NO: 21564 - DNA, 20 bp, Artificial sequence
  SiRNA target sequence
agttatattggcatctctaa

SEQ ID NO: 21565 - DNA, 20 bp, Artificial sequence
  SiRNA target sequence
gttatattggcatctctaat

SEQ ID NO: 21566 - DNA, 20 bp, Artificial sequence
  SiRNA target sequence
ttatattggcatctctaata

SEQ ID NO: 21567 - DNA, 20 bp, Artificial sequence
  SiRNA target sequence
tatattggcatctctaatag

SEQ ID NO: 21568 - DNA, 20 bp, Artificial sequence
  SiRNA target sequence
atattggcatctctaatagc

SEQ ID NO: 21569 - DNA, 20 bp, Artificial sequence
  SiRNA target sequence
tattggcatctctaatagct

SEQ ID NO: 21570 - DNA, 20 bp, Artificial sequence
  SiRNA target sequence
attggcatctctaatagctt

SEQ ID NO: 21571 - DNA, 20 bp, Artificial sequence
  SiRNA target sequence
ttggcatctctaatagcttt

SEQ ID NO: 21572 - DNA, 20 bp, Artificial sequence
  SiRNA target sequence
tggcatctctaatagcttta

SEQ ID NO: 21573 - DNA, 20 bp, Artificial sequence
  SiRNA target sequence
ggcatctctaatagctttaa

SEQ ID NO: 21574 - DNA, 20 bp, Artificial sequence
  SiRNA target sequence
gcatctctaatagctttaag

SEQ ID NO: 21575 - DNA, 20 bp, Artificial sequence
  SiRNA target sequence
catctctaatagctttaaga

SEQ ID NO: 21576 - DNA, 20 bp, Artificial sequence
  SiRNA target sequence
atctctaatagctttaagac

SEQ ID NO: 21577 - DNA, 20 bp, Artificial sequence
  SiRNA target sequence
tctctaatagctttaagaca

SEQ ID NO: 21578 - DNA, 20 bp, Artificial sequence
  SiRNA target sequence
ctctaatagctttaagacag

SEQ ID NO: 21579 - DNA, 20 bp, Artificial sequence
  SiRNA target sequence
tctaatagctttaagacagg

SEQ ID NO: 21580 - DNA, 20 bp, Artificial sequence
  SiRNA target sequence
ctaatagctttaagacaggg

SEQ ID NO: 21581 - DNA, 20 bp, Artificial sequence
  SiRNA target sequence
taatagctttaagacagggg

SEQ ID NO: 21582 - DNA, 20 bp, Artificial sequence
  SiRNA target sequence
aatagctttaagacaggggt

SEQ ID NO: 21583 - DNA, 20 bp, Artificial sequence
  SiRNA target sequence
atagctttaagacaggggtt

SEQ ID NO: 21584 - DNA, 20 bp, Artificial sequence
  SiRNA target sequence
tagctttaagacaggggttt

SEQ ID NO: 21585 - DNA, 20 bp, Artificial sequence
  SiRNA target sequence
agctttaagacaggggttta

SEQ ID NO: 21586 - DNA, 20 bp, Artificial sequence
  SiRNA target sequence
gctttaagacaggggtttat

SEQ ID NO: 21587 - DNA, 20 bp, Artificial sequence
  SiRNA target sequence
ctttaagacaggggtttatt

SEQ ID NO: 21588 - DNA, 20 bp, Artificial sequence
  SiRNA target sequence
tttaagacaggggtttattg

SEQ ID NO: 21589 - DNA, 20 bp, Artificial sequence
  SiRNA target sequence
ttaagacaggggtttattgt

SEQ ID NO: 21590 - DNA, 20 bp, Artificial sequence
  SiRNA target sequence
taagacaggggtttattgtt

SEQ ID NO: 21591 - DNA, 20 bp, Artificial sequence
  SiRNA target sequence
aagacaggggtttattgttt

SEQ ID NO: 21592 - DNA, 20 bp, Artificial sequence
  SiRNA target sequence
agacaggggtttattgtttt

SEQ ID NO: 21593 - DNA, 20 bp, Artificial sequence
  SiRNA target sequence
gacaggggtttattgttttg

SEQ ID NO: 21594 - DNA, 20 bp, Artificial sequence
  SiRNA target sequence
acaggggtttattgttttgt

SEQ ID NO: 21595 - DNA, 20 bp, Artificial sequence
  SiRNA target sequence
caggggtttattgttttgtc

SEQ ID NO: 21596 - DNA, 20 bp, Artificial sequence
  SiRNA target sequence
aggggtttattgttttgtct

SEQ ID NO: 21597 - DNA, 20 bp, Artificial sequence
  SiRNA target sequence
ggggtttattgttttgtcta

SEQ ID NO: 21598 - DNA, 20 bp, Artificial sequence
  SiRNA target sequence
gggtttattgttttgtctat

SEQ ID NO: 21599 - DNA, 20 bp, Artificial sequence
  SiRNA target sequence
ggtttattgttttgtctatt

SEQ ID NO: 21600 - DNA, 20 bp, Artificial sequence
  SiRNA target sequence
gtttattgttttgtctatta

SEQ ID NO: 21601 - DNA, 20 bp, Artificial sequence
  SiRNA target sequence
tttattgttttgtctattaa

SEQ ID NO: 21602 - DNA, 20 bp, Artificial sequence
  SiRNA target sequence
ttattgttttgtctattaac

SEQ ID NO: 21603 - DNA, 20 bp, Artificial sequence
  SiRNA target sequence
tattgttttgtctattaact

SEQ ID NO: 21604 - DNA, 20 bp, Artificial sequence
  SiRNA target sequence
attgttttgtctattaactt

SEQ ID NO: 21605 - DNA, 20 bp, Artificial sequence
  SiRNA target sequence
ttgttttgtctattaacttt

SEQ ID NO: 21606 - DNA, 20 bp, Artificial sequence
  SiRNA target sequence
tgttttgtctattaactttt

SEQ ID NO: 21607 - DNA, 20 bp, Artificial sequence
  SiRNA target sequence
gttttgtctattaacttttt

SEQ ID NO: 21608 - DNA, 20 bp, Artificial sequence
  SiRNA target sequence
ttttgtctattaactttttt

SEQ ID NO: 21609 - DNA, 20 bp, Artificial sequence
  SiRNA target sequence
tttgtctattaacttttttg

SEQ ID NO: 21610 - DNA, 20 bp, Artificial sequence
  SiRNA target sequence
ttgtctattaacttttttgt

SEQ ID NO: 21611 - DNA, 20 bp, Artificial sequence
  SiRNA target sequence
tgtctattaacttttttgta

SEQ ID NO: 21612 - DNA, 20 bp, Artificial sequence
  SiRNA target sequence
gtctattaacttttttgtaa

SEQ ID NO: 21613 - DNA, 20 bp, Artificial sequence
  SiRNA target sequence
tctattaacttttttgtaat

SEQ ID NO: 21614 - DNA, 20 bp, Artificial sequence
  SiRNA target sequence
ctattaacttttttgtaatt

SEQ ID NO: 21615 - DNA, 20 bp, Artificial sequence
  SiRNA target sequence
tattaacttttttgtaattt

SEQ ID NO: 21616 - DNA, 20 bp, Artificial sequence
  SiRNA target sequence
attaacttttttgtaatttt

SEQ ID NO: 21617 - DNA, 20 bp, Artificial sequence
  SiRNA target sequence
ttaacttttttgtaattttt

SEQ ID NO: 21618 - DNA, 20 bp, Artificial sequence
  SiRNA target sequence
taacttttttgtaatttttt

SEQ ID NO: 21619 - DNA, 20 bp, Artificial sequence
  SiRNA target sequence
aacttttttgtaattttttc

SEQ ID NO: 21620 - DNA, 20 bp, Artificial sequence
  SiRNA target sequence
acttttttgtaattttttca

SEQ ID NO: 21621 - DNA, 20 bp, Artificial sequence
  SiRNA target sequence
cttttttgtaattttttcaa

SEQ ID NO: 21622 - DNA, 20 bp, Artificial sequence
  SiRNA target sequence
ttttttgtaattttttcaaa

SEQ ID NO: 21623 - DNA, 20 bp, Artificial sequence
  SiRNA target sequence
tttttgtaattttttcaaat

SEQ ID NO: 21624 - DNA, 20 bp, Artificial sequence
  SiRNA target sequence
ttttgtaattttttcaaatt

SEQ ID NO: 21625 - DNA, 20 bp, Artificial sequence
  SiRNA target sequence
tttgtaattttttcaaattc

SEQ ID NO: 21626 - DNA, 20 bp, Artificial sequence
  SiRNA target sequence
ttgtaattttttcaaattcg

SEQ ID NO: 21627 - DNA, 20 bp, Artificial sequence
  SiRNA target sequence
tgtaattttttcaaattcgt

SEQ ID NO: 21628 - DNA, 20 bp, Artificial sequence
  SiRNA target sequence
gtaattttttcaaattcgtc

SEQ ID NO: 21629 - DNA, 20 bp, Artificial sequence
  SiRNA target sequence
taattttttcaaattcgtcg

SEQ ID NO: 21630 - DNA, 20 bp, Artificial sequence
  SiRNA target sequence
aattttttcaaattcgtcgc

SEQ ID NO: 21631 - DNA, 20 bp, Artificial sequence
  SiRNA target sequence
attttttcaaattcgtcgcg

SEQ ID NO: 21632 - DNA, 20 bp, Artificial sequence
  SiRNA target sequence
ttttttcaaattcgtcgcgt

SEQ ID NO: 21633 - DNA, 20 bp, Artificial sequence
  SiRNA target sequence
tttttcaaattcgtcgcgtg

SEQ ID NO: 21634 - DNA, 20 bp, Artificial sequence
  SiRNA target sequence
ttttcaaattcgtcgcgtgt

SEQ ID NO: 21635 - DNA, 20 bp, Artificial sequence
  SiRNA target sequence
tttcaaattcgtcgcgtgta

SEQ ID NO: 21636 - DNA, 20 bp, Artificial sequence
  SiRNA target sequence
ttcaaattcgtcgcgtgtaa

SEQ ID NO: 21637 - DNA, 20 bp, Artificial sequence
  SiRNA target sequence
tcaaattcgtcgcgtgtaat

SEQ ID NO: 21638 - DNA, 20 bp, Artificial sequence
  SiRNA target sequence
caaattcgtcgcgtgtaatt

SEQ ID NO: 21639 - DNA, 20 bp, Artificial sequence
  SiRNA target sequence
aaattcgtcgcgtgtaatta

SEQ ID NO: 21640 - DNA, 20 bp, Artificial sequence
  SiRNA target sequence
aattcgtcgcgtgtaattac

SEQ ID NO: 21641 - DNA, 20 bp, Artificial sequence
  SiRNA target sequence
attcgtcgcgtgtaattacc

SEQ ID NO: 21642 - DNA, 20 bp, Artificial sequence
  SiRNA target sequence
ttcgtcgcgtgtaattacct

SEQ ID NO: 21643 - DNA, 20 bp, Artificial sequence
  SiRNA target sequence
tcgtcgcgtgtaattacctc

SEQ ID NO: 21644 - DNA, 20 bp, Artificial sequence
  SiRNA target sequence
cgtcgcgtgtaattacctct

SEQ ID NO: 21645 - DNA, 20 bp, Artificial sequence
  SiRNA target sequence
gtcgcgtgtaattacctctt

SEQ ID NO: 21646 - DNA, 20 bp, Artificial sequence
  SiRNA target sequence
tcgcgtgtaattacctcttt

SEQ ID NO: 21647 - DNA, 20 bp, Artificial sequence
  SiRNA target sequence
cgcgtgtaattacctctttt

SEQ ID NO: 21648 - DNA, 20 bp, Artificial sequence
  SiRNA target sequence
gcgtgtaattacctctttta

SEQ ID NO: 21649 - DNA, 20 bp, Artificial sequence
  SiRNA target sequence
cgtgtaattacctcttttaa

SEQ ID NO: 21650 - DNA, 20 bp, Artificial sequence
  SiRNA target sequence
gtgtaattacctcttttaag

SEQ ID NO: 21651 - DNA, 20 bp, Artificial sequence
  SiRNA target sequence
tgtaattacctcttttaagt

SEQ ID NO: 21652 - DNA, 20 bp, Artificial sequence
  SiRNA target sequence
gtaattacctcttttaagtg

SEQ ID NO: 21653 - DNA, 20 bp, Artificial sequence
  SiRNA target sequence
taattacctcttttaagtga

SEQ ID NO: 21654 - DNA, 20 bp, Artificial sequence
  SiRNA target sequence
aattacctcttttaagtgat

SEQ ID NO: 21655 - DNA, 20 bp, Artificial sequence
  SiRNA target sequence
attacctcttttaagtgata

SEQ ID NO: 21656 - DNA, 20 bp, Artificial sequence
  SiRNA target sequence
ttacctcttttaagtgataa

SEQ ID NO: 21657 - DNA, 20 bp, Artificial sequence
  SiRNA target sequence
tacctcttttaagtgataat

SEQ ID NO: 21658 - DNA, 20 bp, Artificial sequence
  SiRNA target sequence
acctcttttaagtgataatt

SEQ ID NO: 21659 - DNA, 20 bp, Artificial sequence
  SiRNA target sequence
cctcttttaagtgataattc

SEQ ID NO: 21660 - DNA, 20 bp, Artificial sequence
  SiRNA target sequence
ctcttttaagtgataattct

SEQ ID NO: 21661 - DNA, 20 bp, Artificial sequence
  SiRNA target sequence
tcttttaagtgataattctt

SEQ ID NO: 21662 - DNA, 20 bp, Artificial sequence
  SiRNA target sequence
cttttaagtgataattcttt

SEQ ID NO: 21663 - DNA, 20 bp, Artificial sequence
  SiRNA target sequence
ttttaagtgataattctttt

SEQ ID NO: 21664 - DNA, 20 bp, Artificial sequence
  SiRNA target sequence
tttaagtgataattcttttt

SEQ ID NO: 21665 - DNA, 20 bp, Artificial sequence
  SiRNA target sequence
ttaagtgataattcttttta

SEQ ID NO: 21666 - DNA, 20 bp, Artificial sequence
  SiRNA target sequence
taagtgataattctttttac

SEQ ID NO: 21667 - DNA, 20 bp, Artificial sequence
  SiRNA target sequence
aagtgataattctttttact

SEQ ID NO: 21668 - DNA, 20 bp, Artificial sequence
  SiRNA target sequence
agtgataattctttttacta

SEQ ID NO: 21669 - DNA, 20 bp, Artificial sequence
  SiRNA target sequence
gtgataattctttttactat

SEQ ID NO: 21670 - DNA, 20 bp, Artificial sequence
  SiRNA target sequence
tgataattctttttactatc

SEQ ID NO: 21671 - DNA, 20 bp, Artificial sequence
  SiRNA target sequence
gataattctttttactatcg

SEQ ID NO: 21672 - DNA, 20 bp, Artificial sequence
  SiRNA target sequence
ataattctttttactatcgt

SEQ ID NO: 21673 - DNA, 20 bp, Artificial sequence
  SiRNA target sequence
taattctttttactatcgtt

SEQ ID NO: 21674 - DNA, 20 bp, Artificial sequence
  SiRNA target sequence
aattctttttactatcgtta

SEQ ID NO: 21675 - DNA, 20 bp, Artificial sequence
  SiRNA target sequence
attctttttactatcgttat

SEQ ID NO: 21676 - DNA, 20 bp, Artificial sequence
  SiRNA target sequence
ttctttttactatcgttata

SEQ ID NO: 21677 - DNA, 20 bp, Artificial sequence
  SiRNA target sequence
tctttttactatcgttataa

SEQ ID NO: 21678 - DNA, 20 bp, Artificial sequence
  SiRNA target sequence
ctttttactatcgttataaa

SEQ ID NO: 21679 - DNA, 20 bp, Artificial sequence
  SiRNA target sequence
tttttactatcgttataaat

SEQ ID NO: 21680 - DNA, 20 bp, Artificial sequence
  SiRNA target sequence
ttttactatcgttataaata

SEQ ID NO: 21681 - DNA, 20 bp, Artificial sequence
  SiRNA target sequence
tttactatcgttataaatat

SEQ ID NO: 21682 - DNA, 20 bp, Artificial sequence
  SiRNA target sequence
ttactatcgttataaatata

SEQ ID NO: 21683 - DNA, 20 bp, Artificial sequence
  SiRNA target sequence
tactatcgttataaatatac

SEQ ID NO: 21684 - DNA, 20 bp, Artificial sequence
  SiRNA target sequence
actatcgttataaatatacg

SEQ ID NO: 21685 - DNA, 20 bp, Artificial sequence
  SiRNA target sequence
ctatcgttataaatatacgg

SEQ ID NO: 21686 - DNA, 20 bp, Artificial sequence
  SiRNA target sequence
tatcgttataaatatacgga

SEQ ID NO: 21687 - DNA, 20 bp, Artificial sequence
  SiRNA target sequence
atcgttataaatatacggaa

SEQ ID NO: 21688 - DNA, 20 bp, Artificial sequence
  SiRNA target sequence
tcgttataaatatacggaat

SEQ ID NO: 21689 - DNA, 20 bp, Artificial sequence
  SiRNA target sequence
cgttataaatatacggaata

SEQ ID NO: 21690 - DNA, 20 bp, Artificial sequence
  SiRNA target sequence
gttataaatatacggaatat

SEQ ID NO: 21691 - DNA, 20 bp, Artificial sequence
  SiRNA target sequence
ttataaatatacggaatatt

SEQ ID NO: 21692 - DNA, 20 bp, Artificial sequence
  SiRNA target sequence
tataaatatacggaatatta

SEQ ID NO: 21693 - DNA, 20 bp, Artificial sequence
  SiRNA target sequence
ataaatatacggaatattaa

SEQ ID NO: 21694 - DNA, 20 bp, Artificial sequence
  SiRNA target sequence
taaatatacggaatattaat

SEQ ID NO: 21695 - DNA, 20 bp, Artificial sequence
  SiRNA target sequence
aaatatacggaatattaatt

SEQ ID NO: 21696 - DNA, 20 bp, Artificial sequence
  SiRNA target sequence
aatatacggaatattaattt

SEQ ID NO: 21697 - DNA, 20 bp, Artificial sequence
  SiRNA target sequence
atatacggaatattaatttc

SEQ ID NO: 21698 - DNA, 20 bp, Artificial sequence
  SiRNA target sequence
tatacggaatattaatttca

SEQ ID NO: 21699 - DNA, 20 bp, Artificial sequence
  SiRNA target sequence
atacggaatattaatttcag

SEQ ID NO: 21700 - DNA, 20 bp, Artificial sequence
  SiRNA target sequence
tacggaatattaatttcaga

SEQ ID NO: 21701 - DNA, 20 bp, Artificial sequence
  SiRNA target sequence
acggaatattaatttcagac

SEQ ID NO: 21702 - DNA, 20 bp, Artificial sequence
  SiRNA target sequence
cggaatattaatttcagacg

SEQ ID NO: 21703 - DNA, 20 bp, Artificial sequence
  SiRNA target sequence
ggaatattaatttcagacga

SEQ ID NO: 21704 - DNA, 20 bp, Artificial sequence
  SiRNA target sequence
gaatattaatttcagacgaa

SEQ ID NO: 21705 - DNA, 20 bp, Artificial sequence
  SiRNA target sequence
aatattaatttcagacgaaa

SEQ ID NO: 21706 - DNA, 20 bp, Artificial sequence
  SiRNA target sequence
atattaatttcagacgaaag

SEQ ID NO: 21707 - DNA, 20 bp, Artificial sequence
  SiRNA target sequence
tattaatttcagacgaaaga

SEQ ID NO: 21708 - DNA, 20 bp, Artificial sequence
  SiRNA target sequence
attaatttcagacgaaagat

SEQ ID NO: 21709 - DNA, 20 bp, Artificial sequence
  SiRNA target sequence
ttaatttcagacgaaagatt

SEQ ID NO: 21710 - DNA, 20 bp, Artificial sequence
  SiRNA target sequence
taatttcagacgaaagatta

SEQ ID NO: 21711 - DNA, 20 bp, Artificial sequence
  SiRNA target sequence
aatttcagacgaaagattag

SEQ ID NO: 21712 - DNA, 20 bp, Artificial sequence
  SiRNA target sequence
atttcagacgaaagattaga

SEQ ID NO: 21713 - DNA, 20 bp, Artificial sequence
  SiRNA target sequence
tttcagacgaaagattagac

SEQ ID NO: 21714 - DNA, 20 bp, Artificial sequence
  SiRNA target sequence
ttcagacgaaagattagacg

SEQ ID NO: 21715 - DNA, 20 bp, Artificial sequence
  SiRNA target sequence
tcagacgaaagattagacga

SEQ ID NO: 21716 - DNA, 20 bp, Artificial sequence
  SiRNA target sequence
cagacgaaagattagacgac

SEQ ID NO: 21717 - DNA, 20 bp, Artificial sequence
  SiRNA target sequence
agacgaaagattagacgaca

SEQ ID NO: 21718 - DNA, 20 bp, Artificial sequence
  SiRNA target sequence
gacgaaagattagacgacag

SEQ ID NO: 21719 - DNA, 20 bp, Artificial sequence
  SiRNA target sequence
acgaaagattagacgacagt

SEQ ID NO: 21720 - DNA, 20 bp, Artificial sequence
  SiRNA target sequence
cgaaagattagacgacagtt

SEQ ID NO: 21721 - DNA, 20 bp, Artificial sequence
  SiRNA target sequence
gaaagattagacgacagttc

SEQ ID NO: 21722 - DNA, 20 bp, Artificial sequence
  SiRNA target sequence
aaagattagacgacagttct

SEQ ID NO: 21723 - DNA, 20 bp, Artificial sequence
  SiRNA target sequence
aagattagacgacagttctt

SEQ ID NO: 21724 - DNA, 20 bp, Artificial sequence
  SiRNA target sequence
agattagacgacagttcttt

SEQ ID NO: 21725 - DNA, 20 bp, Artificial sequence
  SiRNA target sequence
gattagacgacagttctttt

SEQ ID NO: 21726 - DNA, 20 bp, Artificial sequence
  SiRNA target sequence
attagacgacagttcttttt

SEQ ID NO: 21727 - DNA, 20 bp, Artificial sequence
  SiRNA target sequence
ttagacgacagttctttttt

SEQ ID NO: 21728 - DNA, 20 bp, Artificial sequence
  SiRNA target sequence
tagacgacagttcttttttc

SEQ ID NO: 21729 - DNA, 20 bp, Artificial sequence
  SiRNA target sequence
agacgacagttcttttttca

SEQ ID NO: 21730 - DNA, 20 bp, Artificial sequence
  SiRNA target sequence
gacgacagttcttttttcat

SEQ ID NO: 21731 - DNA, 20 bp, Artificial sequence
  SiRNA target sequence
acgacagttcttttttcatt

SEQ ID NO: 21732 - DNA, 20 bp, Artificial sequence
  SiRNA target sequence
cgacagttcttttttcattt

SEQ ID NO: 21733 - DNA, 20 bp, Artificial sequence
  SiRNA target sequence
gacagttcttttttcatttt

SEQ ID NO: 21734 - DNA, 20 bp, Artificial sequence
  SiRNA target sequence
acagttcttttttcattttt

SEQ ID NO: 21735 - DNA, 20 bp, Artificial sequence
  SiRNA target sequence
cagttcttttttcatttttt

SEQ ID NO: 21736 - DNA, 20 bp, Artificial sequence
  SiRNA target sequence
agttcttttttcattttttc

SEQ ID NO: 21737 - DNA, 20 bp, Artificial sequence
  SiRNA target sequence
gttcttttttcattttttcc

SEQ ID NO: 21738 - DNA, 20 bp, Artificial sequence
  SiRNA target sequence
ttcttttttcattttttccg

SEQ ID NO: 21739 - DNA, 20 bp, Artificial sequence
  SiRNA target sequence
tcttttttcattttttccgc

SEQ ID NO: 21740 - DNA, 20 bp, Artificial sequence
  SiRNA target sequence
cttttttcattttttccgct

SEQ ID NO: 21741 - DNA, 20 bp, Artificial sequence
  SiRNA target sequence
ttttttcattttttccgctg

SEQ ID NO: 21742 - DNA, 20 bp, Artificial sequence
  SiRNA target sequence
tttttcattttttccgctgc

SEQ ID NO: 21743 - DNA, 20 bp, Artificial sequence
  SiRNA target sequence
ttttcattttttccgctgct

SEQ ID NO: 21744 - DNA, 20 bp, Artificial sequence
  SiRNA target sequence
tttcattttttccgctgctt

SEQ ID NO: 21745 - DNA, 20 bp, Artificial sequence
  SiRNA target sequence
ttcattttttccgctgcttc

SEQ ID NO: 21746 - DNA, 20 bp, Artificial sequence
  SiRNA target sequence
tcattttttccgctgcttct

SEQ ID NO: 21747 - DNA, 20 bp, Artificial sequence
  SiRNA target sequence
cattttttccgctgcttctt

SEQ ID NO: 21748 - DNA, 20 bp, Artificial sequence
  SiRNA target sequence
attttttccgctgcttcttt

SEQ ID NO: 21749 - DNA, 20 bp, Artificial sequence
  SiRNA target sequence
ttttttccgctgcttcttta

SEQ ID NO: 21750 - DNA, 20 bp, Artificial sequence
  SiRNA target sequence
tttttccgctgcttctttaa

SEQ ID NO: 21751 - DNA, 20 bp, Artificial sequence
  SiRNA target sequence
ttttccgctgcttctttaat

SEQ ID NO: 21752 - DNA, 20 bp, Artificial sequence
  SiRNA target sequence
tttccgctgcttctttaatt

SEQ ID NO: 21753 - DNA, 20 bp, Artificial sequence
  SiRNA target sequence
ttccgctgcttctttaattc

SEQ ID NO: 21754 - DNA, 20 bp, Artificial sequence
  SiRNA target sequence
tccgctgcttctttaattct

SEQ ID NO: 21755 - DNA, 20 bp, Artificial sequence
  SiRNA target sequence
ccgctgcttctttaattcta

SEQ ID NO: 21756 - DNA, 20 bp, Artificial sequence
  SiRNA target sequence
cgctgcttctttaattctat

SEQ ID NO: 21757 - DNA, 20 bp, Artificial sequence
  SiRNA target sequence
gctgcttctttaattctatt

SEQ ID NO: 21758 - DNA, 20 bp, Artificial sequence
  SiRNA target sequence
ctgcttctttaattctatta

SEQ ID NO: 21759 - DNA, 20 bp, Artificial sequence
  SiRNA target sequence
tgcttctttaattctattat

SEQ ID NO: 21760 - DNA, 20 bp, Artificial sequence
  SiRNA target sequence
gcttctttaattctattata

SEQ ID NO: 21761 - DNA, 20 bp, Artificial sequence
  SiRNA target sequence
cttctttaattctattataa

SEQ ID NO: 21762 - DNA, 20 bp, Artificial sequence
  SiRNA target sequence
ttctttaattctattataac

SEQ ID NO: 21763 - DNA, 20 bp, Artificial sequence
  SiRNA target sequence
tctttaattctattataaca

SEQ ID NO: 21764 - DNA, 20 bp, Artificial sequence
  SiRNA target sequence
ctttaattctattataacaa

SEQ ID NO: 21765 - DNA, 20 bp, Artificial sequence
  SiRNA target sequence
tttaattctattataacaag

SEQ ID NO: 21766 - DNA, 20 bp, Artificial sequence
  SiRNA target sequence
ttaattctattataacaaga

SEQ ID NO: 21767 - DNA, 20 bp, Artificial sequence
  SiRNA target sequence
taattctattataacaagaa

SEQ ID NO: 21768 - DNA, 20 bp, Artificial sequence
  SiRNA target sequence
aattctattataacaagaat

SEQ ID NO: 21769 - DNA, 20 bp, Artificial sequence
  SiRNA target sequence
attctattataacaagaatc

SEQ ID NO: 21770 - DNA, 20 bp, Artificial sequence
  SiRNA target sequence
ttctattataacaagaatcg

SEQ ID NO: 21771 - DNA, 20 bp, Artificial sequence
  SiRNA target sequence
tctattataacaagaatcgt

SEQ ID NO: 21772 - DNA, 20 bp, Artificial sequence
  SiRNA target sequence
ctattataacaagaatcgtg

SEQ ID NO: 21773 - DNA, 20 bp, Artificial sequence
  SiRNA target sequence
tattataacaagaatcgtgt

SEQ ID NO: 21774 - DNA, 20 bp, Artificial sequence
  SiRNA target sequence
attataacaagaatcgtgtt

SEQ ID NO: 21775 - DNA, 20 bp, Artificial sequence
  SiRNA target sequence
ttataacaagaatcgtgttt

SEQ ID NO: 21776 - DNA, 20 bp, Artificial sequence
  SiRNA target sequence
tataacaagaatcgtgttta

SEQ ID NO: 21777 - DNA, 20 bp, Artificial sequence
  SiRNA target sequence
ataacaagaatcgtgtttaa

SEQ ID NO: 21778 - DNA, 20 bp, Artificial sequence
  SiRNA target sequence
taacaagaatcgtgtttaag

SEQ ID NO: 21779 - DNA, 20 bp, Artificial sequence
  SiRNA target sequence
aacaagaatcgtgtttaagt

SEQ ID NO: 21780 - DNA, 20 bp, Artificial sequence
  SiRNA target sequence
acaagaatcgtgtttaagta

SEQ ID NO: 21781 - DNA, 20 bp, Artificial sequence
  SiRNA target sequence
caagaatcgtgtttaagtaa

SEQ ID NO: 21782 - DNA, 20 bp, Artificial sequence
  SiRNA target sequence
aagaatcgtgtttaagtaaa

SEQ ID NO: 21783 - DNA, 20 bp, Artificial sequence
  SiRNA target sequence
agaatcgtgtttaagtaaat

SEQ ID NO: 21784 - DNA, 20 bp, Artificial sequence
  SiRNA target sequence
gaatcgtgtttaagtaaatc

SEQ ID NO: 21785 - DNA, 20 bp, Artificial sequence
  SiRNA target sequence
aatcgtgtttaagtaaatca

SEQ ID NO: 21786 - DNA, 20 bp, Artificial sequence
  SiRNA target sequence
atcgtgtttaagtaaatcaa

SEQ ID NO: 21787 - DNA, 20 bp, Artificial sequence
  SiRNA target sequence
tcgtgtttaagtaaatcaat

SEQ ID NO: 21788 - DNA, 20 bp, Artificial sequence
  SiRNA target sequence
cgtgtttaagtaaatcaatt

SEQ ID NO: 21789 - DNA, 20 bp, Artificial sequence
  SiRNA target sequence
gtgtttaagtaaatcaattc

SEQ ID NO: 21790 - DNA, 20 bp, Artificial sequence
  SiRNA target sequence
tgtttaagtaaatcaattcc

SEQ ID NO: 21791 - DNA, 20 bp, Artificial sequence
  SiRNA target sequence
gtttaagtaaatcaattcct

SEQ ID NO: 21792 - DNA, 20 bp, Artificial sequence
  SiRNA target sequence
tttaagtaaatcaattcctg

SEQ ID NO: 21793 - DNA, 20 bp, Artificial sequence
  SiRNA target sequence
ttaagtaaatcaattcctgt

SEQ ID NO: 21794 - DNA, 20 bp, Artificial sequence
  SiRNA target sequence
taagtaaatcaattcctgtt

SEQ ID NO: 21795 - DNA, 20 bp, Artificial sequence
  SiRNA target sequence
aagtaaatcaattcctgttc

SEQ ID NO: 21796 - DNA, 20 bp, Artificial sequence
  SiRNA target sequence
agtaaatcaattcctgttct

SEQ ID NO: 21797 - DNA, 20 bp, Artificial sequence
  SiRNA target sequence
gtaaatcaattcctgttcta

SEQ ID NO: 21798 - DNA, 20 bp, Artificial sequence
  SiRNA target sequence
taaatcaattcctgttctac

SEQ ID NO: 21799 - DNA, 20 bp, Artificial sequence
  SiRNA target sequence
aaatcaattcctgttctact

SEQ ID NO: 21800 - DNA, 20 bp, Artificial sequence
  SiRNA target sequence
aatcaattcctgttctactt

SEQ ID NO: 21801 - DNA, 20 bp, Artificial sequence
  SiRNA target sequence
atcaattcctgttctacttt

SEQ ID NO: 21802 - DNA, 20 bp, Artificial sequence
  SiRNA target sequence
tcaattcctgttctactttt

SEQ ID NO: 21803 - DNA, 20 bp, Artificial sequence
  SiRNA target sequence
caattcctgttctactttta

SEQ ID NO: 21804 - DNA, 20 bp, Artificial sequence
  SiRNA target sequence
aattcctgttctacttttaa

SEQ ID NO: 21805 - DNA, 20 bp, Artificial sequence
  SiRNA target sequence
attcctgttctacttttaaa

SEQ ID NO: 21806 - DNA, 20 bp, Artificial sequence
  SiRNA target sequence
ttcctgttctacttttaaat

SEQ ID NO: 21807 - DNA, 20 bp, Artificial sequence
  SiRNA target sequence
tcctgttctacttttaaatt

SEQ ID NO: 21808 - DNA, 20 bp, Artificial sequence
  SiRNA target sequence
cctgttctacttttaaattt

SEQ ID NO: 21809 - DNA, 20 bp, Artificial sequence
  SiRNA target sequence
ctgttctacttttaaatttt

SEQ ID NO: 21810 - DNA, 20 bp, Artificial sequence
  SiRNA target sequence
tgttctacttttaaattttt

SEQ ID NO: 21811 - DNA, 20 bp, Artificial sequence
  SiRNA target sequence
gttctacttttaaatttttc

SEQ ID NO: 21812 - DNA, 20 bp, Artificial sequence
  SiRNA target sequence
ttctacttttaaatttttca

SEQ ID NO: 21813 - DNA, 20 bp, Artificial sequence
  SiRNA target sequence
tctacttttaaatttttcat

SEQ ID NO: 21814 - DNA, 20 bp, Artificial sequence
  SiRNA target sequence
ctacttttaaatttttcatt

SEQ ID NO: 21815 - DNA, 20 bp, Artificial sequence
  SiRNA target sequence
tacttttaaatttttcatta

SEQ ID NO: 21816 - DNA, 20 bp, Artificial sequence
  SiRNA target sequence
acttttaaatttttcattaa

SEQ ID NO: 21817 - DNA, 20 bp, Artificial sequence
  SiRNA target sequence
cttttaaatttttcattaat

SEQ ID NO: 21818 - DNA, 20 bp, Artificial sequence
  SiRNA target sequence
ttttaaatttttcattaata

SEQ ID NO: 21819 - DNA, 20 bp, Artificial sequence
  SiRNA target sequence
tttaaatttttcattaatat

SEQ ID NO: 21820 - DNA, 20 bp, Artificial sequence
  SiRNA target sequence
ttaaatttttcattaatata

SEQ ID NO: 21821 - DNA, 20 bp, Artificial sequence
  SiRNA target sequence
taaatttttcattaatataa

SEQ ID NO: 21822 - DNA, 20 bp, Artificial sequence
  SiRNA target sequence
aaatttttcattaatataat

SEQ ID NO: 21823 - DNA, 20 bp, Artificial sequence
  SiRNA target sequence
aatttttcattaatataatc

SEQ ID NO: 21824 - DNA, 20 bp, Artificial sequence
  SiRNA target sequence
atttttcattaatataatct

SEQ ID NO: 21825 - DNA, 20 bp, Artificial sequence
  SiRNA target sequence
tttttcattaatataatcta

SEQ ID NO: 21826 - DNA, 20 bp, Artificial sequence
  SiRNA target sequence
ttttcattaatataatctac

SEQ ID NO: 21827 - DNA, 20 bp, Artificial sequence
  SiRNA target sequence
tttcattaatataatctact

SEQ ID NO: 21828 - DNA, 20 bp, Artificial sequence
  SiRNA target sequence
ttcattaatataatctacta

SEQ ID NO: 21829 - DNA, 20 bp, Artificial sequence
  SiRNA target sequence
tcattaatataatctactaa

SEQ ID NO: 21830 - DNA, 20 bp, Artificial sequence
  SiRNA target sequence
cattaatataatctactaaa

SEQ ID NO: 21831 - DNA, 20 bp, Artificial sequence
  SiRNA target sequence
attaatataatctactaaag

SEQ ID NO: 21832 - DNA, 20 bp, Artificial sequence
  SiRNA target sequence
ttaatataatctactaaagt

SEQ ID NO: 21833 - DNA, 20 bp, Artificial sequence
  SiRNA target sequence
taatataatctactaaagta

SEQ ID NO: 21834 - DNA, 20 bp, Artificial sequence
  SiRNA target sequence
aatataatctactaaagtat

SEQ ID NO: 21835 - DNA, 20 bp, Artificial sequence
  SiRNA target sequence
atataatctactaaagtatt

SEQ ID NO: 21836 - DNA, 20 bp, Artificial sequence
  SiRNA target sequence
tataatctactaaagtatta

SEQ ID NO: 21837 - DNA, 20 bp, Artificial sequence
  SiRNA target sequence
ataatctactaaagtattat

SEQ ID NO: 21838 - DNA, 20 bp, Artificial sequence
  SiRNA target sequence
taatctactaaagtattatc

SEQ ID NO: 21839 - DNA, 20 bp, Artificial sequence
  SiRNA target sequence
aatctactaaagtattatcc

SEQ ID NO: 21840 - DNA, 20 bp, Artificial sequence
  SiRNA target sequence
atctactaaagtattatcca

SEQ ID NO: 21841 - DNA, 20 bp, Artificial sequence
  SiRNA target sequence
tctactaaagtattatccaa

SEQ ID NO: 21842 - DNA, 20 bp, Artificial sequence
  SiRNA target sequence
ctactaaagtattatccaaa

SEQ ID NO: 21843 - DNA, 20 bp, Artificial sequence
  SiRNA target sequence
tactaaagtattatccaaat

SEQ ID NO: 21844 - DNA, 20 bp, Artificial sequence
  SiRNA target sequence
actaaagtattatccaaatc

SEQ ID NO: 21845 - DNA, 20 bp, Artificial sequence
  SiRNA target sequence
ctaaagtattatccaaatct

SEQ ID NO: 21846 - DNA, 20 bp, Artificial sequence
  SiRNA target sequence
taaagtattatccaaatctt

SEQ ID NO: 21847 - DNA, 20 bp, Artificial sequence
  SiRNA target sequence
aaagtattatccaaatcttc

SEQ ID NO: 21848 - DNA, 20 bp, Artificial sequence
  SiRNA target sequence
aagtattatccaaatcttct

SEQ ID NO: 21849 - DNA, 20 bp, Artificial sequence
  SiRNA target sequence
agtattatccaaatcttctc

SEQ ID NO: 21850 - DNA, 20 bp, Artificial sequence
  SiRNA target sequence
gtattatccaaatcttctcc

SEQ ID NO: 21851 - DNA, 20 bp, Artificial sequence
  SiRNA target sequence
tattatccaaatcttctcct

SEQ ID NO: 21852 - DNA, 20 bp, Artificial sequence
  SiRNA target sequence
attatccaaatcttctcctc

SEQ ID NO: 21853 - DNA, 20 bp, Artificial sequence
  SiRNA target sequence
ttatccaaatcttctcctcc

SEQ ID NO: 21854 - DNA, 20 bp, Artificial sequence
  SiRNA target sequence
tatccaaatcttctcctcct

SEQ ID NO: 21855 - DNA, 20 bp, Artificial sequence
  SiRNA target sequence
atccaaatcttctcctccta

SEQ ID NO: 21856 - DNA, 20 bp, Artificial sequence
  SiRNA target sequence
tccaaatcttctcctcctaa

SEQ ID NO: 21857 - DNA, 20 bp, Artificial sequence
  SiRNA target sequence
ccaaatcttctcctcctaaa

SEQ ID NO: 21858 - DNA, 20 bp, Artificial sequence
  SiRNA target sequence
caaatcttctcctcctaaaa

SEQ ID NO: 21859 - DNA, 20 bp, Artificial sequence
  SiRNA target sequence
aaatcttctcctcctaaaaa

SEQ ID NO: 21860 - DNA, 20 bp, Artificial sequence
  SiRNA target sequence
aatcttctcctcctaaaaaa

SEQ ID NO: 21861 - DNA, 20 bp, Artificial sequence
  SiRNA target sequence
atcttctcctcctaaaaaag

SEQ ID NO: 21862 - DNA, 20 bp, Artificial sequence
  SiRNA target sequence
tcttctcctcctaaaaaagt

SEQ ID NO: 21863 - DNA, 20 bp, Artificial sequence
  SiRNA target sequence
cttctcctcctaaaaaagta

SEQ ID NO: 21864 - DNA, 20 bp, Artificial sequence
  SiRNA target sequence
ttctcctcctaaaaaagtat

SEQ ID NO: 21865 - DNA, 20 bp, Artificial sequence
  SiRNA target sequence
tctcctcctaaaaaagtatt

SEQ ID NO: 21866 - DNA, 20 bp, Artificial sequence
  SiRNA target sequence
ctcctcctaaaaaagtattt

SEQ ID NO: 21867 - DNA, 20 bp, Artificial sequence
  SiRNA target sequence
tcctcctaaaaaagtatttc

SEQ ID NO: 21868 - DNA, 20 bp, Artificial sequence
  SiRNA target sequence
cctcctaaaaaagtatttcc

SEQ ID NO: 21869 - DNA, 20 bp, Artificial sequence
  SiRNA target sequence
ctcctaaaaaagtatttccg

SEQ ID NO: 21870 - DNA, 20 bp, Artificial sequence
  SiRNA target sequence
tcctaaaaaagtatttccgt

SEQ ID NO: 21871 - DNA, 20 bp, Artificial sequence
  SiRNA target sequence
cctaaaaaagtatttccgtt

SEQ ID NO: 21872 - DNA, 20 bp, Artificial sequence
  SiRNA target sequence
ctaaaaaagtatttccgtta

SEQ ID NO: 21873 - DNA, 20 bp, Artificial sequence
  SiRNA target sequence
taaaaaagtatttccgttag

SEQ ID NO: 21874 - DNA, 20 bp, Artificial sequence
  SiRNA target sequence
aaaaaagtatttccgttagt

SEQ ID NO: 21875 - DNA, 20 bp, Artificial sequence
  SiRNA target sequence
aaaaagtatttccgttagta

SEQ ID NO: 21876 - DNA, 20 bp, Artificial sequence
  SiRNA target sequence
aaaagtatttccgttagtag

SEQ ID NO: 21877 - DNA, 20 bp, Artificial sequence
  SiRNA target sequence
aaagtatttccgttagtaga

SEQ ID NO: 21878 - DNA, 20 bp, Artificial sequence
  SiRNA target sequence
aagtatttccgttagtagat

SEQ ID NO: 21879 - DNA, 20 bp, Artificial sequence
  SiRNA target sequence
agtatttccgttagtagatt

SEQ ID NO: 21880 - DNA, 20 bp, Artificial sequence
  SiRNA target sequence
gtatttccgttagtagattt

SEQ ID NO: 21881 - DNA, 20 bp, Artificial sequence
  SiRNA target sequence
tatttccgttagtagatttt

SEQ ID NO: 21882 - DNA, 20 bp, Artificial sequence
  SiRNA target sequence
atttccgttagtagatttta

SEQ ID NO: 21883 - DNA, 20 bp, Artificial sequence
  SiRNA target sequence
tttccgttagtagattttac

SEQ ID NO: 21884 - DNA, 20 bp, Artificial sequence
  SiRNA target sequence
ttccgttagtagattttaca

SEQ ID NO: 21885 - DNA, 20 bp, Artificial sequence
  SiRNA target sequence
tccgttagtagattttacat

SEQ ID NO: 21886 - DNA, 20 bp, Artificial sequence
  SiRNA target sequence
ccgttagtagattttacatg

SEQ ID NO: 21887 - DNA, 20 bp, Artificial sequence
  SiRNA target sequence
cgttagtagattttacatga

SEQ ID NO: 21888 - DNA, 20 bp, Artificial sequence
  SiRNA target sequence
gttagtagattttacatgaa

SEQ ID NO: 21889 - DNA, 20 bp, Artificial sequence
  SiRNA target sequence
ttagtagattttacatgaaa

SEQ ID NO: 21890 - DNA, 20 bp, Artificial sequence
  SiRNA target sequence
tagtagattttacatgaaaa

SEQ ID NO: 21891 - DNA, 20 bp, Artificial sequence
  SiRNA target sequence
agtagattttacatgaaaaa

SEQ ID NO: 21892 - DNA, 20 bp, Artificial sequence
  SiRNA target sequence
gtagattttacatgaaaaat

SEQ ID NO: 21893 - DNA, 20 bp, Artificial sequence
  SiRNA target sequence
tagattttacatgaaaaata

SEQ ID NO: 21894 - DNA, 20 bp, Artificial sequence
  SiRNA target sequence
agattttacatgaaaaatac

SEQ ID NO: 21895 - DNA, 20 bp, Artificial sequence
  SiRNA target sequence
gattttacatgaaaaatacc

SEQ ID NO: 21896 - DNA, 20 bp, Artificial sequence
  SiRNA target sequence
attttacatgaaaaatacca

SEQ ID NO: 21897 - DNA, 20 bp, Artificial sequence
  SiRNA target sequence
ttttacatgaaaaataccat

SEQ ID NO: 21898 - DNA, 20 bp, Artificial sequence
  SiRNA target sequence
tttacatgaaaaataccatt

SEQ ID NO: 21899 - DNA, 20 bp, Artificial sequence
  SiRNA target sequence
ttacatgaaaaataccatta

SEQ ID NO: 21900 - DNA, 20 bp, Artificial sequence
  SiRNA target sequence
tacatgaaaaataccattat

SEQ ID NO: 21901 - DNA, 20 bp, Artificial sequence
  SiRNA target sequence
acatgaaaaataccattatc

SEQ ID NO: 21902 - DNA, 20 bp, Artificial sequence
  SiRNA target sequence
catgaaaaataccattatct

SEQ ID NO: 21903 - DNA, 20 bp, Artificial sequence
  SiRNA target sequence
atgaaaaataccattatcta

SEQ ID NO: 21904 - DNA, 20 bp, Artificial sequence
  SiRNA target sequence
tgaaaaataccattatctaa

SEQ ID NO: 21905 - DNA, 20 bp, Artificial sequence
  SiRNA target sequence
gaaaaataccattatctaat

SEQ ID NO: 21906 - DNA, 20 bp, Artificial sequence
  SiRNA target sequence
aaaaataccattatctaatt

SEQ ID NO: 21907 - DNA, 20 bp, Artificial sequence
  SiRNA target sequence
aaaataccattatctaattc

SEQ ID NO: 21908 - DNA, 20 bp, Artificial sequence
  SiRNA target sequence
aaataccattatctaattct

SEQ ID NO: 21909 - DNA, 20 bp, Artificial sequence
  SiRNA target sequence
aataccattatctaattcta

SEQ ID NO: 21910 - DNA, 20 bp, Artificial sequence
  SiRNA target sequence
ataccattatctaattctaa

SEQ ID NO: 21911 - DNA, 20 bp, Artificial sequence
  SiRNA target sequence
taccattatctaattctaat

SEQ ID NO: 21912 - DNA, 20 bp, Artificial sequence
  SiRNA target sequence
accattatctaattctaata

SEQ ID NO: 21913 - DNA, 20 bp, Artificial sequence
  SiRNA target sequence
ccattatctaattctaatat

SEQ ID NO: 21914 - DNA, 20 bp, Artificial sequence
  SiRNA target sequence
cattatctaattctaatata

SEQ ID NO: 21915 - DNA, 20 bp, Artificial sequence
  SiRNA target sequence
attatctaattctaatatac

SEQ ID NO: 21916 - DNA, 20 bp, Artificial sequence
  SiRNA target sequence
ttatctaattctaatatact

SEQ ID NO: 21917 - DNA, 20 bp, Artificial sequence
  SiRNA target sequence
tatctaattctaatatacta

SEQ ID NO: 21918 - DNA, 20 bp, Artificial sequence
  SiRNA target sequence
atctaattctaatatactaa

SEQ ID NO: 21919 - DNA, 20 bp, Artificial sequence
  SiRNA target sequence
tctaattctaatatactaat

SEQ ID NO: 21920 - DNA, 20 bp, Artificial sequence
  SiRNA target sequence
ctaattctaatatactaatg

SEQ ID NO: 21921 - DNA, 20 bp, Artificial sequence
  SiRNA target sequence
taattctaatatactaatgt

SEQ ID NO: 21922 - DNA, 20 bp, Artificial sequence
  SiRNA target sequence
aattctaatatactaatgtc

SEQ ID NO: 21923 - DNA, 20 bp, Artificial sequence
  SiRNA target sequence
attctaatatactaatgtca

SEQ ID NO: 21924 - DNA, 20 bp, Artificial sequence
  SiRNA target sequence
ttctaatatactaatgtcaa

SEQ ID NO: 21925 - DNA, 20 bp, Artificial sequence
  SiRNA target sequence
tctaatatactaatgtcaaa

SEQ ID NO: 21926 - DNA, 20 bp, Artificial sequence
  SiRNA target sequence
ctaatatactaatgtcaaaa

SEQ ID NO: 21927 - DNA, 20 bp, Artificial sequence
  SiRNA target sequence
taatatactaatgtcaaaag

SEQ ID NO: 21928 - DNA, 20 bp, Artificial sequence
  SiRNA target sequence
aatatactaatgtcaaaagt

SEQ ID NO: 21929 - DNA, 20 bp, Artificial sequence
  SiRNA target sequence
atatactaatgtcaaaagtt

SEQ ID NO: 21930 - DNA, 20 bp, Artificial sequence
  SiRNA target sequence
tatactaatgtcaaaagttc

SEQ ID NO: 21931 - DNA, 20 bp, Artificial sequence
  SiRNA target sequence
atactaatgtcaaaagttcc

SEQ ID NO: 21932 - DNA, 20 bp, Artificial sequence
  SiRNA target sequence
tactaatgtcaaaagttcct

SEQ ID NO: 21933 - DNA, 20 bp, Artificial sequence
  SiRNA target sequence
actaatgtcaaaagttcctc

SEQ ID NO: 21934 - DNA, 20 bp, Artificial sequence
  SiRNA target sequence
ctaatgtcaaaagttcctcc

SEQ ID NO: 21935 - DNA, 20 bp, Artificial sequence
  SiRNA target sequence
taatgtcaaaagttcctcct

SEQ ID NO: 21936 - DNA, 20 bp, Artificial sequence
  SiRNA target sequence
aatgtcaaaagttcctcctc

SEQ ID NO: 21937 - DNA, 20 bp, Artificial sequence
  SiRNA target sequence
atgtcaaaagttcctcctcc

SEQ ID NO: 21938 - DNA, 20 bp, Artificial sequence
  SiRNA target sequence
tgtcaaaagttcctcctccc

SEQ ID NO: 21939 - DNA, 20 bp, Artificial sequence
  SiRNA target sequence
gtcaaaagttcctcctccca

SEQ ID NO: 21940 - DNA, 20 bp, Artificial sequence
  SiRNA target sequence
tcaaaagttcctcctcccag

SEQ ID NO: 21941 - DNA, 20 bp, Artificial sequence
  SiRNA target sequence
caaaagttcctcctcccaga

SEQ ID NO: 21942 - DNA, 20 bp, Artificial sequence
  SiRNA target sequence
aaaagttcctcctcccagat

SEQ ID NO: 21943 - DNA, 20 bp, Artificial sequence
  SiRNA target sequence
aaagttcctcctcccagatc

SEQ ID NO: 21944 - DNA, 20 bp, Artificial sequence
  SiRNA target sequence
aagttcctcctcccagatca

SEQ ID NO: 21945 - DNA, 20 bp, Artificial sequence
  SiRNA target sequence
agttcctcctcccagatcat

SEQ ID NO: 21946 - DNA, 20 bp, Artificial sequence
  SiRNA target sequence
gttcctcctcccagatcata

SEQ ID NO: 21947 - DNA, 20 bp, Artificial sequence
  SiRNA target sequence
ttcctcctcccagatcataa

SEQ ID NO: 21948 - DNA, 20 bp, Artificial sequence
  SiRNA target sequence
tcctcctcccagatcataaa

SEQ ID NO: 21949 - DNA, 20 bp, Artificial sequence
  SiRNA target sequence
cctcctcccagatcataaac

SEQ ID NO: 21950 - DNA, 20 bp, Artificial sequence
  SiRNA target sequence
ctcctcccagatcataaaca

SEQ ID NO: 21951 - DNA, 20 bp, Artificial sequence
  SiRNA target sequence
tcctcccagatcataaacag

SEQ ID NO: 21952 - DNA, 20 bp, Artificial sequence
  SiRNA target sequence
cctcccagatcataaacagc

SEQ ID NO: 21953 - DNA, 20 bp, Artificial sequence
  SiRNA target sequence
ctcccagatcataaacagct

SEQ ID NO: 21954 - DNA, 20 bp, Artificial sequence
  SiRNA target sequence
tcccagatcataaacagcta

SEQ ID NO: 21955 - DNA, 20 bp, Artificial sequence
  SiRNA target sequence
cccagatcataaacagctat

SEQ ID NO: 21956 - DNA, 20 bp, Artificial sequence
  SiRNA target sequence
ccagatcataaacagctata

SEQ ID NO: 21957 - DNA, 20 bp, Artificial sequence
  SiRNA target sequence
cagatcataaacagctataa

SEQ ID NO: 21958 - DNA, 20 bp, Artificial sequence
  SiRNA target sequence
agatcataaacagctataat

SEQ ID NO: 21959 - DNA, 20 bp, Artificial sequence
  SiRNA target sequence
gatcataaacagctataata

SEQ ID NO: 21960 - DNA, 20 bp, Artificial sequence
  SiRNA target sequence
atcataaacagctataatac

SEQ ID NO: 21961 - DNA, 20 bp, Artificial sequence
  SiRNA target sequence
tcataaacagctataatacc

SEQ ID NO: 21962 - DNA, 20 bp, Artificial sequence
  SiRNA target sequence
cataaacagctataataccc

SEQ ID NO: 21963 - DNA, 20 bp, Artificial sequence
  SiRNA target sequence
ataaacagctataataccct

SEQ ID NO: 21964 - DNA, 20 bp, Artificial sequence
  SiRNA target sequence
taaacagctataataccctg

SEQ ID NO: 21965 - DNA, 20 bp, Artificial sequence
  SiRNA target sequence
aaacagctataataccctgt

SEQ ID NO: 21966 - DNA, 20 bp, Artificial sequence
  SiRNA target sequence
aacagctataataccctgtg

SEQ ID NO: 21967 - DNA, 20 bp, Artificial sequence
  SiRNA target sequence
acagctataataccctgtgc

SEQ ID NO: 21968 - DNA, 20 bp, Artificial sequence
  SiRNA target sequence
cagctataataccctgtgca

SEQ ID NO: 21969 - DNA, 20 bp, Artificial sequence
  SiRNA target sequence
agctataataccctgtgcag

SEQ ID NO: 21970 - DNA, 20 bp, Artificial sequence
  SiRNA target sequence
gctataataccctgtgcaga

SEQ ID NO: 21971 - DNA, 20 bp, Artificial sequence
  SiRNA target sequence
ctataataccctgtgcagac

SEQ ID NO: 21972 - DNA, 20 bp, Artificial sequence
  SiRNA target sequence
tataataccctgtgcagact

SEQ ID NO: 21973 - DNA, 20 bp, Artificial sequence
  SiRNA target sequence
ataataccctgtgcagactt

SEQ ID NO: 21974 - DNA, 20 bp, Artificial sequence
  SiRNA target sequence
taataccctgtgcagacttg

SEQ ID NO: 21975 - DNA, 20 bp, Artificial sequence
  SiRNA target sequence
aataccctgtgcagacttgt

SEQ ID NO: 21976 - DNA, 20 bp, Artificial sequence
  SiRNA target sequence
ataccctgtgcagacttgtc

SEQ ID NO: 21977 - DNA, 20 bp, Artificial sequence
  SiRNA target sequence
taccctgtgcagacttgtca

SEQ ID NO: 21978 - DNA, 20 bp, Artificial sequence
  SiRNA target sequence
accctgtgcagacttgtcaa

SEQ ID NO: 21979 - DNA, 20 bp, Artificial sequence
  SiRNA target sequence
ccctgtgcagacttgtcaag

SEQ ID NO: 21980 - DNA, 20 bp, Artificial sequence
  SiRNA target sequence
cctgtgcagacttgtcaagc

SEQ ID NO: 21981 - DNA, 20 bp, Artificial sequence
  SiRNA target sequence
ctgtgcagacttgtcaagcc

SEQ ID NO: 21982 - DNA, 20 bp, Artificial sequence
  SiRNA target sequence
tgtgcagacttgtcaagccc

SEQ ID NO: 21983 - DNA, 20 bp, Artificial sequence
  SiRNA target sequence
gtgcagacttgtcaagccca

SEQ ID NO: 21984 - DNA, 20 bp, Artificial sequence
  SiRNA target sequence
tgcagacttgtcaagcccat

SEQ ID NO: 21985 - DNA, 20 bp, Artificial sequence
  SiRNA target sequence
gcagacttgtcaagcccata

SEQ ID NO: 21986 - DNA, 20 bp, Artificial sequence
  SiRNA target sequence
cagacttgtcaagcccataa

SEQ ID NO: 21987 - DNA, 20 bp, Artificial sequence
  SiRNA target sequence
agacttgtcaagcccataag

SEQ ID NO: 21988 - DNA, 20 bp, Artificial sequence
  SiRNA target sequence
gacttgtcaagcccataagc

SEQ ID NO: 21989 - DNA, 20 bp, Artificial sequence
  SiRNA target sequence
acttgtcaagcccataagca

SEQ ID NO: 21990 - DNA, 20 bp, Artificial sequence
  SiRNA target sequence
cttgtcaagcccataagcaa

SEQ ID NO: 21991 - DNA, 20 bp, Artificial sequence
  SiRNA target sequence
ttgtcaagcccataagcaag

SEQ ID NO: 21992 - DNA, 20 bp, Artificial sequence
  SiRNA target sequence
tgtcaagcccataagcaagt

SEQ ID NO: 21993 - DNA, 20 bp, Artificial sequence
  SiRNA target sequence
gtcaagcccataagcaagtg

SEQ ID NO: 21994 - DNA, 20 bp, Artificial sequence
  SiRNA target sequence
tcaagcccataagcaagtgc

SEQ ID NO: 21995 - DNA, 20 bp, Artificial sequence
  SiRNA target sequence
caagcccataagcaagtgct

SEQ ID NO: 21996 - DNA, 20 bp, Artificial sequence
  SiRNA target sequence
aagcccataagcaagtgctg

SEQ ID NO: 21997 - DNA, 20 bp, Artificial sequence
  SiRNA target sequence
agcccataagcaagtgctgc

SEQ ID NO: 21998 - DNA, 20 bp, Artificial sequence
  SiRNA target sequence
gcccataagcaagtgctgcc

SEQ ID NO: 21999 - DNA, 20 bp, Artificial sequence
  SiRNA target sequence
cccataagcaagtgctgccg

SEQ ID NO: 22000 - DNA, 20 bp, Artificial sequence
  SiRNA target sequence
ccataagcaagtgctgccgc

SEQ ID NO: 22001 - DNA, 20 bp, Artificial sequence
  SiRNA target sequence
cataagcaagtgctgccgca

SEQ ID NO: 22002 - DNA, 20 bp, Artificial sequence
  SiRNA target sequence
ataagcaagtgctgccgcag

SEQ ID NO: 22003 - DNA, 20 bp, Artificial sequence
  SiRNA target sequence
taagcaagtgctgccgcagt

SEQ ID NO: 22004 - DNA, 20 bp, Artificial sequence
  SiRNA target sequence
aagcaagtgctgccgcagta

SEQ ID NO: 22005 - DNA, 20 bp, Artificial sequence
  SiRNA target sequence
agcaagtgctgccgcagtag

SEQ ID NO: 22006 - DNA, 20 bp, Artificial sequence
  SiRNA target sequence
gcaagtgctgccgcagtagg

SEQ ID NO: 22007 - DNA, 20 bp, Artificial sequence
  SiRNA target sequence
caagtgctgccgcagtaggc

SEQ ID NO: 22008 - DNA, 20 bp, Artificial sequence
  SiRNA target sequence
aagtgctgccgcagtaggct

SEQ ID NO: 22009 - DNA, 20 bp, Artificial sequence
  SiRNA target sequence
agtgctgccgcagtaggctc

SEQ ID NO: 22010 - DNA, 20 bp, Artificial sequence
  SiRNA target sequence
gtgctgccgcagtaggctca

SEQ ID NO: 22011 - DNA, 20 bp, Artificial sequence
  SiRNA target sequence
tgctgccgcagtaggctcat

SEQ ID NO: 22012 - DNA, 20 bp, Artificial sequence
  SiRNA target sequence
gctgccgcagtaggctcatt

SEQ ID NO: 22013 - DNA, 20 bp, Artificial sequence
  SiRNA target sequence
ctgccgcagtaggctcatta

SEQ ID NO: 22014 - DNA, 20 bp, Artificial sequence
  SiRNA target sequence
tgccgcagtaggctcattaa

SEQ ID NO: 22015 - DNA, 20 bp, Artificial sequence
  SiRNA target sequence
gccgcagtaggctcattaat

SEQ ID NO: 22016 - DNA, 20 bp, Artificial sequence
  SiRNA target sequence
ccgcagtaggctcattaatc

SEQ ID NO: 22017 - DNA, 20 bp, Artificial sequence
  SiRNA target sequence
cgcagtaggctcattaatca

SEQ ID NO: 22018 - DNA, 20 bp, Artificial sequence
  SiRNA target sequence
gcagtaggctcattaatcac

SEQ ID NO: 22019 - DNA, 20 bp, Artificial sequence
  SiRNA target sequence
cagtaggctcattaatcact

SEQ ID NO: 22020 - DNA, 20 bp, Artificial sequence
  SiRNA target sequence
agtaggctcattaatcactc

SEQ ID NO: 22021 - DNA, 20 bp, Artificial sequence
  SiRNA target sequence
gtaggctcattaatcactct

SEQ ID NO: 22022 - DNA, 20 bp, Artificial sequence
  SiRNA target sequence
taggctcattaatcactcta

SEQ ID NO: 22023 - DNA, 20 bp, Artificial sequence
  SiRNA target sequence
aggctcattaatcactctaa

SEQ ID NO: 22024 - DNA, 20 bp, Artificial sequence
  SiRNA target sequence
ggctcattaatcactctaag

SEQ ID NO: 22025 - DNA, 20 bp, Artificial sequence
  SiRNA target sequence
gctcattaatcactctaagc

SEQ ID NO: 22026 - DNA, 20 bp, Artificial sequence
  SiRNA target sequence
ctcattaatcactctaagca

SEQ ID NO: 22027 - DNA, 20 bp, Artificial sequence
  SiRNA target sequence
tcattaatcactctaagcac

SEQ ID NO: 22028 - DNA, 20 bp, Artificial sequence
  SiRNA target sequence
cattaatcactctaagcact

SEQ ID NO: 22029 - DNA, 20 bp, Artificial sequence
  SiRNA target sequence
attaatcactctaagcactt

SEQ ID NO: 22030 - DNA, 20 bp, Artificial sequence
  SiRNA target sequence
ttaatcactctaagcacttg

SEQ ID NO: 22031 - DNA, 20 bp, Artificial sequence
  SiRNA target sequence
taatcactctaagcacttgt

SEQ ID NO: 22032 - DNA, 20 bp, Artificial sequence
  SiRNA target sequence
aatcactctaagcacttgta

SEQ ID NO: 22033 - DNA, 20 bp, Artificial sequence
  SiRNA target sequence
atcactctaagcacttgtaa

SEQ ID NO: 22034 - DNA, 20 bp, Artificial sequence
  SiRNA target sequence
tcactctaagcacttgtaat

SEQ ID NO: 22035 - DNA, 20 bp, Artificial sequence
  SiRNA target sequence
cactctaagcacttgtaatc

SEQ ID NO: 22036 - DNA, 20 bp, Artificial sequence
  SiRNA target sequence
actctaagcacttgtaatcc

SEQ ID NO: 22037 - DNA, 20 bp, Artificial sequence
  SiRNA target sequence
ctctaagcacttgtaatccc

SEQ ID NO: 22038 - DNA, 20 bp, Artificial sequence
  SiRNA target sequence
tctaagcacttgtaatcccg

SEQ ID NO: 22039 - DNA, 20 bp, Artificial sequence
  SiRNA target sequence
ctaagcacttgtaatcccgc

SEQ ID NO: 22040 - DNA, 20 bp, Artificial sequence
  SiRNA target sequence
taagcacttgtaatcccgca

SEQ ID NO: 22041 - DNA, 20 bp, Artificial sequence
  SiRNA target sequence
aagcacttgtaatcccgcaa

SEQ ID NO: 22042 - DNA, 20 bp, Artificial sequence
  SiRNA target sequence
agcacttgtaatcccgcaat

SEQ ID NO: 22043 - DNA, 20 bp, Artificial sequence
  SiRNA target sequence
gcacttgtaatcccgcaatc

SEQ ID NO: 22044 - DNA, 20 bp, Artificial sequence
  SiRNA target sequence
cacttgtaatcccgcaatcc

SEQ ID NO: 22045 - DNA, 20 bp, Artificial sequence
  SiRNA target sequence
acttgtaatcccgcaatcct

SEQ ID NO: 22046 - DNA, 20 bp, Artificial sequence
  SiRNA target sequence
cttgtaatcccgcaatcctt

SEQ ID NO: 22047 - DNA, 20 bp, Artificial sequence
  SiRNA target sequence
ttgtaatcccgcaatccttc

SEQ ID NO: 22048 - DNA, 20 bp, Artificial sequence
  SiRNA target sequence
tgtaatcccgcaatccttcc

SEQ ID NO: 22049 - DNA, 20 bp, Artificial sequence
  SiRNA target sequence
gtaatcccgcaatccttccc

SEQ ID NO: 22050 - DNA, 20 bp, Artificial sequence
  SiRNA target sequence
taatcccgcaatccttcccg

SEQ ID NO: 22051 - DNA, 20 bp, Artificial sequence
  SiRNA target sequence
aatcccgcaatccttcccgc

SEQ ID NO: 22052 - DNA, 20 bp, Artificial sequence
  SiRNA target sequence
atcccgcaatccttcccgca

SEQ ID NO: 22053 - DNA, 20 bp, Artificial sequence
  SiRNA target sequence
tcccgcaatccttcccgcat

SEQ ID NO: 22054 - DNA, 20 bp, Artificial sequence
  SiRNA target sequence
cccgcaatccttcccgcatc

SEQ ID NO: 22055 - DNA, 20 bp, Artificial sequence
  SiRNA target sequence
ccgcaatccttcccgcatct

SEQ ID NO: 22056 - DNA, 20 bp, Artificial sequence
  SiRNA target sequence
cgcaatccttcccgcatctt

SEQ ID NO: 22057 - DNA, 20 bp, Artificial sequence
  SiRNA target sequence
gcaatccttcccgcatcttt

SEQ ID NO: 22058 - DNA, 20 bp, Artificial sequence
  SiRNA target sequence
caatccttcccgcatcttta

SEQ ID NO: 22059 - DNA, 20 bp, Artificial sequence
  SiRNA target sequence
aatccttcccgcatctttag

SEQ ID NO: 22060 - DNA, 20 bp, Artificial sequence
  SiRNA target sequence
atccttcccgcatctttagt

SEQ ID NO: 22061 - DNA, 20 bp, Artificial sequence
  SiRNA target sequence
tccttcccgcatctttagta

SEQ ID NO: 22062 - DNA, 20 bp, Artificial sequence
  SiRNA target sequence
ccttcccgcatctttagtag

SEQ ID NO: 22063 - DNA, 20 bp, Artificial sequence
  SiRNA target sequence
cttcccgcatctttagtagc

SEQ ID NO: 22064 - DNA, 20 bp, Artificial sequence
  SiRNA target sequence
ttcccgcatctttagtagct

SEQ ID NO: 22065 - DNA, 20 bp, Artificial sequence
  SiRNA target sequence
tcccgcatctttagtagctt

SEQ ID NO: 22066 - DNA, 20 bp, Artificial sequence
  SiRNA target sequence
cccgcatctttagtagcttg

SEQ ID NO: 22067 - DNA, 20 bp, Artificial sequence
  SiRNA target sequence
ccgcatctttagtagcttgc

SEQ ID NO: 22068 - DNA, 20 bp, Artificial sequence
  SiRNA target sequence
cgcatctttagtagcttgcc

SEQ ID NO: 22069 - DNA, 20 bp, Artificial sequence
  SiRNA target sequence
gcatctttagtagcttgcct

SEQ ID NO: 22070 - DNA, 20 bp, Artificial sequence
  SiRNA target sequence
catctttagtagcttgcctt

SEQ ID NO: 22071 - DNA, 20 bp, Artificial sequence
  SiRNA target sequence
atctttagtagcttgccttt

SEQ ID NO: 22072 - DNA, 20 bp, Artificial sequence
  SiRNA target sequence
tctttagtagcttgcctttg

SEQ ID NO: 22073 - DNA, 20 bp, Artificial sequence
  SiRNA target sequence
ctttagtagcttgcctttgc

SEQ ID NO: 22074 - DNA, 20 bp, Artificial sequence
  SiRNA target sequence
tttagtagcttgcctttgca

SEQ ID NO: 22075 - DNA, 20 bp, Artificial sequence
  SiRNA target sequence
ttagtagcttgcctttgcat

SEQ ID NO: 22076 - DNA, 20 bp, Artificial sequence
  SiRNA target sequence
tagtagcttgcctttgcatg

SEQ ID NO: 22077 - DNA, 20 bp, Artificial sequence
  SiRNA target sequence
agtagcttgcctttgcatgt

SEQ ID NO: 22078 - DNA, 20 bp, Artificial sequence
  SiRNA target sequence
gtagcttgcctttgcatgtc

SEQ ID NO: 22079 - DNA, 20 bp, Artificial sequence
  SiRNA target sequence
tagcttgcctttgcatgtca

SEQ ID NO: 22080 - DNA, 20 bp, Artificial sequence
  SiRNA target sequence
agcttgcctttgcatgtcat

SEQ ID NO: 22081 - DNA, 20 bp, Artificial sequence
  SiRNA target sequence
gcttgcctttgcatgtcatc

SEQ ID NO: 22082 - DNA, 20 bp, Artificial sequence
  SiRNA target sequence
cttgcctttgcatgtcatca

SEQ ID NO: 22083 - DNA, 20 bp, Artificial sequence
  SiRNA target sequence
ttgcctttgcatgtcatcaa

SEQ ID NO: 22084 - DNA, 20 bp, Artificial sequence
  SiRNA target sequence
tgcctttgcatgtcatcaaa

SEQ ID NO: 22085 - DNA, 20 bp, Artificial sequence
  SiRNA target sequence
gcctttgcatgtcatcaaaa

SEQ ID NO: 22086 - DNA, 20 bp, Artificial sequence
  SiRNA target sequence
cctttgcatgtcatcaaaat

SEQ ID NO: 22087 - DNA, 20 bp, Artificial sequence
  SiRNA target sequence
ctttgcatgtcatcaaaata

SEQ ID NO: 22088 - DNA, 20 bp, Artificial sequence
  SiRNA target sequence
tttgcatgtcatcaaaatat

SEQ ID NO: 22089 - DNA, 20 bp, Artificial sequence
  SiRNA target sequence
ttgcatgtcatcaaaatatg

SEQ ID NO: 22090 - DNA, 20 bp, Artificial sequence
  SiRNA target sequence
tgcatgtcatcaaaatatgc

SEQ ID NO: 22091 - DNA, 20 bp, Artificial sequence
  SiRNA target sequence
gcatgtcatcaaaatatgcg

SEQ ID NO: 22092 - DNA, 20 bp, Artificial sequence
  SiRNA target sequence
catgtcatcaaaatatgcgg

SEQ ID NO: 22093 - DNA, 20 bp, Artificial sequence
  SiRNA target sequence
atgtcatcaaaatatgcggg

SEQ ID NO: 22094 - DNA, 20 bp, Artificial sequence
  SiRNA target sequence
tgtcatcaaaatatgcgggc

SEQ ID NO: 22095 - DNA, 20 bp, Artificial sequence
  SiRNA target sequence
gtcatcaaaatatgcgggca

SEQ ID NO: 22096 - DNA, 20 bp, Artificial sequence
  SiRNA target sequence
tcatcaaaatatgcgggcac

SEQ ID NO: 22097 - DNA, 20 bp, Artificial sequence
  SiRNA target sequence
catcaaaatatgcgggcact

SEQ ID NO: 22098 - DNA, 20 bp, Artificial sequence
  SiRNA target sequence
atcaaaatatgcgggcactg

SEQ ID NO: 22099 - DNA, 20 bp, Artificial sequence
  SiRNA target sequence
tcaaaatatgcgggcactgt

SEQ ID NO: 22100 - DNA, 20 bp, Artificial sequence
  SiRNA target sequence
caaaatatgcgggcactgtt

SEQ ID NO: 22101 - DNA, 20 bp, Artificial sequence
  SiRNA target sequence
aaaatatgcgggcactgtta

SEQ ID NO: 22102 - DNA, 20 bp, Artificial sequence
  SiRNA target sequence
aaatatgcgggcactgttat

SEQ ID NO: 22103 - DNA, 20 bp, Artificial sequence
  SiRNA target sequence
aatatgcgggcactgttata

SEQ ID NO: 22104 - DNA, 20 bp, Artificial sequence
  SiRNA target sequence
atatgcgggcactgttataa

SEQ ID NO: 22105 - DNA, 20 bp, Artificial sequence
  SiRNA target sequence
tatgcgggcactgttataac

SEQ ID NO: 22106 - DNA, 20 bp, Artificial sequence
  SiRNA target sequence
atgcgggcactgttataaca

SEQ ID NO: 22107 - DNA, 20 bp, Artificial sequence
  SiRNA target sequence
tgcgggcactgttataacag

SEQ ID NO: 22108 - DNA, 20 bp, Artificial sequence
  SiRNA target sequence
gcgggcactgttataacaga

SEQ ID NO: 22109 - DNA, 20 bp, Artificial sequence
  SiRNA target sequence
cgggcactgttataacagat

SEQ ID NO: 22110 - DNA, 20 bp, Artificial sequence
  SiRNA target sequence
gggcactgttataacagatc

SEQ ID NO: 22111 - DNA, 20 bp, Artificial sequence
  SiRNA target sequence
ggcactgttataacagatct

SEQ ID NO: 22112 - DNA, 20 bp, Artificial sequence
  SiRNA target sequence
gcactgttataacagatctt

SEQ ID NO: 22113 - DNA, 20 bp, Artificial sequence
  SiRNA target sequence
cactgttataacagatctta

SEQ ID NO: 22114 - DNA, 20 bp, Artificial sequence
  SiRNA target sequence
actgttataacagatcttaa

SEQ ID NO: 22115 - DNA, 20 bp, Artificial sequence
  SiRNA target sequence
ctgttataacagatcttaat

SEQ ID NO: 22116 - DNA, 20 bp, Artificial sequence
  SiRNA target sequence
tgttataacagatcttaata

SEQ ID NO: 22117 - DNA, 20 bp, Artificial sequence
  SiRNA target sequence
gttataacagatcttaatac

SEQ ID NO: 22118 - DNA, 20 bp, Artificial sequence
  SiRNA target sequence
ttataacagatcttaatact

SEQ ID NO: 22119 - DNA, 20 bp, Artificial sequence
  SiRNA target sequence
tataacagatcttaatactt

SEQ ID NO: 22120 - DNA, 20 bp, Artificial sequence
  SiRNA target sequence
ataacagatcttaatacttt

SEQ ID NO: 22121 - DNA, 20 bp, Artificial sequence
  SiRNA target sequence
taacagatcttaatacttta

SEQ ID NO: 22122 - DNA, 20 bp, Artificial sequence
  SiRNA target sequence
aacagatcttaatactttag

SEQ ID NO: 22123 - DNA, 20 bp, Artificial sequence
  SiRNA target sequence
acagatcttaatactttaga

SEQ ID NO: 22124 - DNA, 20 bp, Artificial sequence
  SiRNA target sequence
cagatcttaatactttagaa

SEQ ID NO: 22125 - DNA, 20 bp, Artificial sequence
  SiRNA target sequence
agatcttaatactttagaat

SEQ ID NO: 22126 - DNA, 20 bp, Artificial sequence
  SiRNA target sequence
gatcttaatactttagaatt

SEQ ID NO: 22127 - DNA, 20 bp, Artificial sequence
  SiRNA target sequence
atcttaatactttagaattt

SEQ ID NO: 22128 - DNA, 20 bp, Artificial sequence
  SiRNA target sequence
tcttaatactttagaattta

SEQ ID NO: 22129 - DNA, 20 bp, Artificial sequence
  SiRNA target sequence
cttaatactttagaatttaa

SEQ ID NO: 22130 - DNA, 20 bp, Artificial sequence
  SiRNA target sequence
ttaatactttagaatttaaa

SEQ ID NO: 22131 - DNA, 20 bp, Artificial sequence
  SiRNA target sequence
taatactttagaatttaaaa

SEQ ID NO: 22132 - DNA, 20 bp, Artificial sequence
  SiRNA target sequence
aatactttagaatttaaaaa

SEQ ID NO: 22133 - DNA, 20 bp, Artificial sequence
  SiRNA target sequence
atactttagaatttaaaaaa

SEQ ID NO: 22134 - DNA, 20 bp, Artificial sequence
  SiRNA target sequence
tactttagaatttaaaaaat

SEQ ID NO: 22135 - DNA, 20 bp, Artificial sequence
  SiRNA target sequence
actttagaatttaaaaaatt

SEQ ID NO: 22136 - DNA, 20 bp, Artificial sequence
  SiRNA target sequence
ctttagaatttaaaaaattc

SEQ ID NO: 22137 - DNA, 20 bp, Artificial sequence
  SiRNA target sequence
tttagaatttaaaaaattct

SEQ ID NO: 22138 - DNA, 20 bp, Artificial sequence
  SiRNA target sequence
ttagaatttaaaaaattctc

SEQ ID NO: 22139 - DNA, 20 bp, Artificial sequence
  SiRNA target sequence
tagaatttaaaaaattctct

SEQ ID NO: 22140 - DNA, 20 bp, Artificial sequence
  SiRNA target sequence
agaatttaaaaaattctctg

SEQ ID NO: 22141 - DNA, 20 bp, Artificial sequence
  SiRNA target sequence
gaatttaaaaaattctctgc

SEQ ID NO: 22142 - DNA, 20 bp, Artificial sequence
  SiRNA target sequence
aatttaaaaaattctctgcg

SEQ ID NO: 22143 - DNA, 20 bp, Artificial sequence
  SiRNA target sequence
atttaaaaaattctctgcgg

SEQ ID NO: 22144 - DNA, 20 bp, Artificial sequence
  SiRNA target sequence
tttaaaaaattctctgcggc

SEQ ID NO: 22145 - DNA, 20 bp, Artificial sequence
  SiRNA target sequence
ttaaaaaattctctgcggca

SEQ ID NO: 22146 - DNA, 20 bp, Artificial sequence
  SiRNA target sequence
taaaaaattctctgcggcat

SEQ ID NO: 22147 - DNA, 20 bp, Artificial sequence
  SiRNA target sequence
aaaaaattctctgcggcatt

SEQ ID NO: 22148 - DNA, 20 bp, Artificial sequence
  SiRNA target sequence
aaaaattctctgcggcattt

SEQ ID NO: 22149 - DNA, 20 bp, Artificial sequence
  SiRNA target sequence
aaaattctctgcggcatttt

SEQ ID NO: 22150 - DNA, 20 bp, Artificial sequence
  SiRNA target sequence
aaattctctgcggcattttt

SEQ ID NO: 22151 - DNA, 20 bp, Artificial sequence
  SiRNA target sequence
aattctctgcggcatttttc

SEQ ID NO: 22152 - DNA, 20 bp, Artificial sequence
  SiRNA target sequence
attctctgcggcatttttca

SEQ ID NO: 22153 - DNA, 20 bp, Artificial sequence
  SiRNA target sequence
ttctctgcggcatttttcat

SEQ ID NO: 22154 - DNA, 20 bp, Artificial sequence
  SiRNA target sequence
tctctgcggcatttttcatt

SEQ ID NO: 22155 - DNA, 20 bp, Artificial sequence
  SiRNA target sequence
ctctgcggcatttttcattt

SEQ ID NO: 22156 - DNA, 20 bp, Artificial sequence
  SiRNA target sequence
tctgcggcatttttcatttt

SEQ ID NO: 22157 - DNA, 20 bp, Artificial sequence
  SiRNA target sequence
ctgcggcatttttcattttt

SEQ ID NO: 22158 - DNA, 20 bp, Artificial sequence
  SiRNA target sequence
tgcggcatttttcatttttg

SEQ ID NO: 22159 - DNA, 20 bp, Artificial sequence
  SiRNA target sequence
gcggcatttttcatttttga

SEQ ID NO: 22160 - DNA, 20 bp, Artificial sequence
  SiRNA target sequence
cggcatttttcatttttgac

SEQ ID NO: 22161 - DNA, 20 bp, Artificial sequence
  SiRNA target sequence
ggcatttttcatttttgaca

SEQ ID NO: 22162 - DNA, 20 bp, Artificial sequence
  SiRNA target sequence
gcatttttcatttttgacaa

SEQ ID NO: 22163 - DNA, 20 bp, Artificial sequence
  SiRNA target sequence
catttttcatttttgacaaa

SEQ ID NO: 22164 - DNA, 20 bp, Artificial sequence
  SiRNA target sequence
atttttcatttttgacaaaa

SEQ ID NO: 22165 - DNA, 20 bp, Artificial sequence
  SiRNA target sequence
tttttcatttttgacaaaat

SEQ ID NO: 22166 - DNA, 20 bp, Artificial sequence
  SiRNA target sequence
ttttcatttttgacaaaata

SEQ ID NO: 22167 - DNA, 20 bp, Artificial sequence
  SiRNA target sequence
tttcatttttgacaaaataa

SEQ ID NO: 22168 - DNA, 20 bp, Artificial sequence
  SiRNA target sequence
ttcatttttgacaaaataaa

SEQ ID NO: 22169 - DNA, 20 bp, Artificial sequence
  SiRNA target sequence
tcatttttgacaaaataaat

SEQ ID NO: 22170 - DNA, 20 bp, Artificial sequence
  SiRNA target sequence
catttttgacaaaataaatg

SEQ ID NO: 22171 - DNA, 20 bp, Artificial sequence
  SiRNA target sequence
atttttgacaaaataaatgc

SEQ ID NO: 22172 - DNA, 20 bp, Artificial sequence
  SiRNA target sequence
tttttgacaaaataaatgca

SEQ ID NO: 22173 - DNA, 20 bp, Artificial sequence
  SiRNA target sequence
ttttgacaaaataaatgcac

SEQ ID NO: 22174 - DNA, 20 bp, Artificial sequence
  SiRNA target sequence
tttgacaaaataaatgcacc

SEQ ID NO: 22175 - DNA, 20 bp, Artificial sequence
  SiRNA target sequence
ttgacaaaataaatgcacca

SEQ ID NO: 22176 - DNA, 20 bp, Artificial sequence
  SiRNA target sequence
tgacaaaataaatgcaccaa

SEQ ID NO: 22177 - DNA, 20 bp, Artificial sequence
  SiRNA target sequence
gacaaaataaatgcaccaat

SEQ ID NO: 22178 - DNA, 20 bp, Artificial sequence
  SiRNA target sequence
acaaaataaatgcaccaatt

SEQ ID NO: 22179 - DNA, 20 bp, Artificial sequence
  SiRNA target sequence
caaaataaatgcaccaattt

SEQ ID NO: 22180 - DNA, 20 bp, Artificial sequence
  SiRNA target sequence
aaaataaatgcaccaatttg

SEQ ID NO: 22181 - DNA, 20 bp, Artificial sequence
  SiRNA target sequence
aaataaatgcaccaatttgt

SEQ ID NO: 22182 - DNA, 20 bp, Artificial sequence
  SiRNA target sequence
aataaatgcaccaatttgtg

SEQ ID NO: 22183 - DNA, 20 bp, Artificial sequence
  SiRNA target sequence
ataaatgcaccaatttgtgc

SEQ ID NO: 22184 - DNA, 20 bp, Artificial sequence
  SiRNA target sequence
taaatgcaccaatttgtgca

SEQ ID NO: 22185 - DNA, 20 bp, Artificial sequence
  SiRNA target sequence
aaatgcaccaatttgtgcag

SEQ ID NO: 22186 - DNA, 20 bp, Artificial sequence
  SiRNA target sequence
aatgcaccaatttgtgcagg

SEQ ID NO: 22187 - DNA, 20 bp, Artificial sequence
  SiRNA target sequence
atgcaccaatttgtgcagga

SEQ ID NO: 22188 - DNA, 20 bp, Artificial sequence
  SiRNA target sequence
tgcaccaatttgtgcaggag

SEQ ID NO: 22189 - DNA, 20 bp, Artificial sequence
  SiRNA target sequence
gcaccaatttgtgcaggaga

SEQ ID NO: 22190 - DNA, 20 bp, Artificial sequence
  SiRNA target sequence
caccaatttgtgcaggagaa

SEQ ID NO: 22191 - DNA, 20 bp, Artificial sequence
  SiRNA target sequence
accaatttgtgcaggagaat

SEQ ID NO: 22192 - DNA, 20 bp, Artificial sequence
  SiRNA target sequence
ccaatttgtgcaggagaata

SEQ ID NO: 22193 - DNA, 20 bp, Artificial sequence
  SiRNA target sequence
caatttgtgcaggagaatat

SEQ ID NO: 22194 - DNA, 20 bp, Artificial sequence
  SiRNA target sequence
aatttgtgcaggagaatatt

SEQ ID NO: 22195 - DNA, 20 bp, Artificial sequence
  SiRNA target sequence
atttgtgcaggagaatattt

SEQ ID NO: 22196 - DNA, 20 bp, Artificial sequence
  SiRNA target sequence
tttgtgcaggagaatatttc

SEQ ID NO: 22197 - DNA, 20 bp, Artificial sequence
  SiRNA target sequence
ttgtgcaggagaatatttct

SEQ ID NO: 22198 - DNA, 20 bp, Artificial sequence
  SiRNA target sequence
tgtgcaggagaatatttctt

SEQ ID NO: 22199 - DNA, 20 bp, Artificial sequence
  SiRNA target sequence
gtgcaggagaatatttctta

SEQ ID NO: 22200 - DNA, 20 bp, Artificial sequence
  SiRNA target sequence
tgcaggagaatatttcttat

SEQ ID NO: 22201 - DNA, 20 bp, Artificial sequence
  SiRNA target sequence
gcaggagaatatttcttatt

SEQ ID NO: 22202 - DNA, 20 bp, Artificial sequence
  SiRNA target sequence
caggagaatatttcttattg

SEQ ID NO: 22203 - DNA, 20 bp, Artificial sequence
  SiRNA target sequence
aggagaatatttcttattgt

SEQ ID NO: 22204 - DNA, 20 bp, Artificial sequence
  SiRNA target sequence
ggagaatatttcttattgtc

SEQ ID NO: 22205 - DNA, 20 bp, Artificial sequence
  SiRNA target sequence
gagaatatttcttattgtca

SEQ ID NO: 22206 - DNA, 20 bp, Artificial sequence
  SiRNA target sequence
agaatatttcttattgtcaa

SEQ ID NO: 22207 - DNA, 20 bp, Artificial sequence
  SiRNA target sequence
gaatatttcttattgtcaat

SEQ ID NO: 22208 - DNA, 20 bp, Artificial sequence
  SiRNA target sequence
aatatttcttattgtcaatt

SEQ ID NO: 22209 - DNA, 20 bp, Artificial sequence
  SiRNA target sequence
atatttcttattgtcaattt

SEQ ID NO: 22210 - DNA, 20 bp, Artificial sequence
  SiRNA target sequence
tatttcttattgtcaatttt

SEQ ID NO: 22211 - DNA, 20 bp, Artificial sequence
  SiRNA target sequence
atttcttattgtcaattttt

SEQ ID NO: 22212 - DNA, 20 bp, Artificial sequence
  SiRNA target sequence
tttcttattgtcaattttta

SEQ ID NO: 22213 - DNA, 20 bp, Artificial sequence
  SiRNA target sequence
ttcttattgtcaatttttat

SEQ ID NO: 22214 - DNA, 20 bp, Artificial sequence
  SiRNA target sequence
tcttattgtcaatttttatc

SEQ ID NO: 22215 - DNA, 20 bp, Artificial sequence
  SiRNA target sequence
cttattgtcaatttttatcc

SEQ ID NO: 22216 - DNA, 20 bp, Artificial sequence
  SiRNA target sequence
ttattgtcaatttttatcca

SEQ ID NO: 22217 - DNA, 20 bp, Artificial sequence
  SiRNA target sequence
tattgtcaatttttatccaa

SEQ ID NO: 22218 - DNA, 20 bp, Artificial sequence
  SiRNA target sequence
attgtcaatttttatccaaa

SEQ ID NO: 22219 - DNA, 20 bp, Artificial sequence
  SiRNA target sequence
ttgtcaatttttatccaaat

SEQ ID NO: 22220 - DNA, 20 bp, Artificial sequence
  SiRNA target sequence
tgtcaatttttatccaaata

SEQ ID NO: 22221 - DNA, 20 bp, Artificial sequence
  SiRNA target sequence
gtcaatttttatccaaatat

SEQ ID NO: 22222 - DNA, 20 bp, Artificial sequence
  SiRNA target sequence
tcaatttttatccaaatatc

SEQ ID NO: 22223 - DNA, 20 bp, Artificial sequence
  SiRNA target sequence
caatttttatccaaatatcg

SEQ ID NO: 22224 - DNA, 20 bp, Artificial sequence
  SiRNA target sequence
aatttttatccaaatatcgc

SEQ ID NO: 22225 - DNA, 20 bp, Artificial sequence
  SiRNA target sequence
atttttatccaaatatcgcc

SEQ ID NO: 22226 - DNA, 20 bp, Artificial sequence
  SiRNA target sequence
tttttatccaaatatcgccg

SEQ ID NO: 22227 - DNA, 20 bp, Artificial sequence
  SiRNA target sequence
ttttatccaaatatcgccgt

SEQ ID NO: 22228 - DNA, 20 bp, Artificial sequence
  SiRNA target sequence
tttatccaaatatcgccgtt

SEQ ID NO: 22229 - DNA, 20 bp, Artificial sequence
  SiRNA target sequence
ttatccaaatatcgccgtta

SEQ ID NO: 22230 - DNA, 20 bp, Artificial sequence
  SiRNA target sequence
tatccaaatatcgccgttac

SEQ ID NO: 22231 - DNA, 20 bp, Artificial sequence
  SiRNA target sequence
atccaaatatcgccgttaca

SEQ ID NO: 22232 - DNA, 20 bp, Artificial sequence
  SiRNA target sequence
tccaaatatcgccgttacaa

SEQ ID NO: 22233 - DNA, 20 bp, Artificial sequence
  SiRNA target sequence
ccaaatatcgccgttacaat

SEQ ID NO: 22234 - DNA, 20 bp, Artificial sequence
  SiRNA target sequence
caaatatcgccgttacaatg

SEQ ID NO: 22235 - DNA, 20 bp, Artificial sequence
  SiRNA target sequence
aaatatcgccgttacaatgc

SEQ ID NO: 22236 - DNA, 20 bp, Artificial sequence
  SiRNA target sequence
aatatcgccgttacaatgct

SEQ ID NO: 22237 - DNA, 20 bp, Artificial sequence
  SiRNA target sequence
atatcgccgttacaatgctt

SEQ ID NO: 22238 - DNA, 20 bp, Artificial sequence
  SiRNA target sequence
tatcgccgttacaatgctta

SEQ ID NO: 22239 - DNA, 20 bp, Artificial sequence
  SiRNA target sequence
atcgccgttacaatgcttag

SEQ ID NO: 22240 - DNA, 20 bp, Artificial sequence
  SiRNA target sequence
tcgccgttacaatgcttagt

SEQ ID NO: 22241 - DNA, 20 bp, Artificial sequence
  SiRNA target sequence
cgccgttacaatgcttagta

SEQ ID NO: 22242 - DNA, 20 bp, Artificial sequence
  SiRNA target sequence
gccgttacaatgcttagtag

SEQ ID NO: 22243 - DNA, 20 bp, Artificial sequence
  SiRNA target sequence
ccgttacaatgcttagtagt

SEQ ID NO: 22244 - DNA, 20 bp, Artificial sequence
  SiRNA target sequence
cgttacaatgcttagtagtg

SEQ ID NO: 22245 - DNA, 20 bp, Artificial sequence
  SiRNA target sequence
gttacaatgcttagtagtgt

SEQ ID NO: 22246 - DNA, 20 bp, Artificial sequence
  SiRNA target sequence
ttacaatgcttagtagtgtc

SEQ ID NO: 22247 - DNA, 20 bp, Artificial sequence
  SiRNA target sequence
tacaatgcttagtagtgtca

SEQ ID NO: 22248 - DNA, 20 bp, Artificial sequence
  SiRNA target sequence
acaatgcttagtagtgtcat

SEQ ID NO: 22249 - DNA, 20 bp, Artificial sequence
  SiRNA target sequence
caatgcttagtagtgtcata

SEQ ID NO: 22250 - DNA, 20 bp, Artificial sequence
  SiRNA target sequence
aatgcttagtagtgtcatat

SEQ ID NO: 22251 - DNA, 20 bp, Artificial sequence
  SiRNA target sequence
atgcttagtagtgtcatatg

SEQ ID NO: 22252 - DNA, 20 bp, Artificial sequence
  SiRNA target sequence
tgcttagtagtgtcatatgg

SEQ ID NO: 22253 - DNA, 20 bp, Artificial sequence
  SiRNA target sequence
gcttagtagtgtcatatggt

SEQ ID NO: 22254 - DNA, 20 bp, Artificial sequence
  SiRNA target sequence
cttagtagtgtcatatggta

SEQ ID NO: 22255 - DNA, 20 bp, Artificial sequence
  SiRNA target sequence
ttagtagtgtcatatggtaa

SEQ ID NO: 22256 - DNA, 20 bp, Artificial sequence
  SiRNA target sequence
tagtagtgtcatatggtaag

SEQ ID NO: 22257 - DNA, 20 bp, Artificial sequence
  SiRNA target sequence
agtagtgtcatatggtaagc

SEQ ID NO: 22258 - DNA, 20 bp, Artificial sequence
  SiRNA target sequence
gtagtgtcatatggtaagct

SEQ ID NO: 22259 - DNA, 20 bp, Artificial sequence
  SiRNA target sequence
tagtgtcatatggtaagctt

SEQ ID NO: 22260 - DNA, 20 bp, Artificial sequence
  SiRNA target sequence
agtgtcatatggtaagcttt

SEQ ID NO: 22261 - DNA, 20 bp, Artificial sequence
  SiRNA target sequence
gtgtcatatggtaagctttt

SEQ ID NO: 22262 - DNA, 20 bp, Artificial sequence
  SiRNA target sequence
tgtcatatggtaagcttttt

SEQ ID NO: 22263 - DNA, 20 bp, Artificial sequence
  SiRNA target sequence
gtcatatggtaagcttttta

SEQ ID NO: 22264 - DNA, 20 bp, Artificial sequence
  SiRNA target sequence
tcatatggtaagctttttaa

SEQ ID NO: 22265 - DNA, 20 bp, Artificial sequence
  SiRNA target sequence
catatggtaagctttttaaa

SEQ ID NO: 22266 - DNA, 20 bp, Artificial sequence
  SiRNA target sequence
atatggtaagctttttaaat

SEQ ID NO: 22267 - DNA, 20 bp, Artificial sequence
  SiRNA target sequence
tatggtaagctttttaaata

SEQ ID NO: 22268 - DNA, 20 bp, Artificial sequence
  SiRNA target sequence
atggtaagctttttaaataa

SEQ ID NO: 22269 - DNA, 20 bp, Artificial sequence
  SiRNA target sequence
tggtaagctttttaaataat

SEQ ID NO: 22270 - DNA, 20 bp, Artificial sequence
  SiRNA target sequence
ggtaagctttttaaataatc

SEQ ID NO: 22271 - DNA, 20 bp, Artificial sequence
  SiRNA target sequence
gtaagctttttaaataatct

SEQ ID NO: 22272 - DNA, 20 bp, Artificial sequence
  SiRNA target sequence
taagctttttaaataatctt

SEQ ID NO: 22273 - DNA, 20 bp, Artificial sequence
  SiRNA target sequence
aagctttttaaataatcttt

SEQ ID NO: 22274 - DNA, 20 bp, Artificial sequence
  SiRNA target sequence
agctttttaaataatctttt

SEQ ID NO: 22275 - DNA, 20 bp, Artificial sequence
  SiRNA target sequence
gctttttaaataatctttta

SEQ ID NO: 22276 - DNA, 20 bp, Artificial sequence
  SiRNA target sequence
ctttttaaataatcttttaa

SEQ ID NO: 22277 - DNA, 20 bp, Artificial sequence
  SiRNA target sequence
tttttaaataatcttttaat

SEQ ID NO: 22278 - DNA, 20 bp, Artificial sequence
  SiRNA target sequence
ttttaaataatcttttaatt

SEQ ID NO: 22279 - DNA, 20 bp, Artificial sequence
  SiRNA target sequence
tttaaataatcttttaattc

SEQ ID NO: 22280 - DNA, 20 bp, Artificial sequence
  SiRNA target sequence
ttaaataatcttttaattct

SEQ ID NO: 22281 - DNA, 20 bp, Artificial sequence
  SiRNA target sequence
taaataatcttttaattcta

SEQ ID NO: 22282 - DNA, 20 bp, Artificial sequence
  SiRNA target sequence
aaataatcttttaattctac

SEQ ID NO: 22283 - DNA, 20 bp, Artificial sequence
  SiRNA target sequence
aataatcttttaattctaca

SEQ ID NO: 22284 - DNA, 20 bp, Artificial sequence
  SiRNA target sequence
ataatcttttaattctacat

SEQ ID NO: 22285 - DNA, 20 bp, Artificial sequence
  SiRNA target sequence
taatcttttaattctacatc

SEQ ID NO: 22286 - DNA, 20 bp, Artificial sequence
  SiRNA target sequence
aatcttttaattctacatca

SEQ ID NO: 22287 - DNA, 20 bp, Artificial sequence
  SiRNA target sequence
atcttttaattctacatcat

SEQ ID NO: 22288 - DNA, 20 bp, Artificial sequence
  SiRNA target sequence
tcttttaattctacatcatc

SEQ ID NO: 22289 - DNA, 20 bp, Artificial sequence
  SiRNA target sequence
cttttaattctacatcatca

SEQ ID NO: 22290 - DNA, 20 bp, Artificial sequence
  SiRNA target sequence
ttttaattctacatcatcaa

SEQ ID NO: 22291 - DNA, 20 bp, Artificial sequence
  SiRNA target sequence
tttaattctacatcatcaaa

SEQ ID NO: 22292 - DNA, 20 bp, Artificial sequence
  SiRNA target sequence
ttaattctacatcatcaaat

SEQ ID NO: 22293 - DNA, 20 bp, Artificial sequence
  SiRNA target sequence
taattctacatcatcaaatt

SEQ ID NO: 22294 - DNA, 20 bp, Artificial sequence
  SiRNA target sequence
aattctacatcatcaaattt

SEQ ID NO: 22295 - DNA, 20 bp, Artificial sequence
  SiRNA target sequence
attctacatcatcaaatttt

SEQ ID NO: 22296 - DNA, 20 bp, Artificial sequence
  SiRNA target sequence
ttctacatcatcaaattttc

SEQ ID NO: 22297 - DNA, 20 bp, Artificial sequence
  SiRNA target sequence
tctacatcatcaaattttcg

SEQ ID NO: 22298 - DNA, 20 bp, Artificial sequence
  SiRNA target sequence
ctacatcatcaaattttcgt

SEQ ID NO: 22299 - DNA, 20 bp, Artificial sequence
  SiRNA target sequence
tacatcatcaaattttcgtc

SEQ ID NO: 22300 - DNA, 20 bp, Artificial sequence
  SiRNA target sequence
acatcatcaaattttcgtcc

SEQ ID NO: 22301 - DNA, 20 bp, Artificial sequence
  SiRNA target sequence
catcatcaaattttcgtccc

SEQ ID NO: 22302 - DNA, 20 bp, Artificial sequence
  SiRNA target sequence
atcatcaaattttcgtccca

SEQ ID NO: 22303 - DNA, 20 bp, Artificial sequence
  SiRNA target sequence
tcatcaaattttcgtcccag

SEQ ID NO: 22304 - DNA, 20 bp, Artificial sequence
  SiRNA target sequence
catcaaattttcgtcccagc

SEQ ID NO: 22305 - DNA, 20 bp, Artificial sequence
  SiRNA target sequence
atcaaattttcgtcccagca

SEQ ID NO: 22306 - DNA, 20 bp, Artificial sequence
  SiRNA target sequence
tcaaattttcgtcccagcaa

SEQ ID NO: 22307 - DNA, 20 bp, Artificial sequence
  SiRNA target sequence
caaattttcgtcccagcaat

SEQ ID NO: 22308 - DNA, 20 bp, Artificial sequence
  SiRNA target sequence
aaattttcgtcccagcaatc

SEQ ID NO: 22309 - DNA, 20 bp, Artificial sequence
  SiRNA target sequence
aattttcgtcccagcaatct

SEQ ID NO: 22310 - DNA, 20 bp, Artificial sequence
  SiRNA target sequence
attttcgtcccagcaatctc

SEQ ID NO: 22311 - DNA, 20 bp, Artificial sequence
  SiRNA target sequence
ttttcgtcccagcaatctct

SEQ ID NO: 22312 - DNA, 20 bp, Artificial sequence
  SiRNA target sequence
tttcgtcccagcaatctctt

SEQ ID NO: 22313 - DNA, 20 bp, Artificial sequence
  SiRNA target sequence
ttcgtcccagcaatctctta

SEQ ID NO: 22314 - DNA, 20 bp, Artificial sequence
  SiRNA target sequence
tcgtcccagcaatctcttag

SEQ ID NO: 22315 - DNA, 20 bp, Artificial sequence
  SiRNA target sequence
cgtcccagcaatctcttaga

SEQ ID NO: 22316 - DNA, 20 bp, Artificial sequence
  SiRNA target sequence
gtcccagcaatctcttagac

SEQ ID NO: 22317 - DNA, 20 bp, Artificial sequence
  SiRNA target sequence
tcccagcaatctcttagacg

SEQ ID NO: 22318 - DNA, 20 bp, Artificial sequence
  SiRNA target sequence
cccagcaatctcttagacgc

SEQ ID NO: 22319 - DNA, 20 bp, Artificial sequence
  SiRNA target sequence
ccagcaatctcttagacgca

SEQ ID NO: 22320 - DNA, 20 bp, Artificial sequence
  SiRNA target sequence
cagcaatctcttagacgcaa

SEQ ID NO: 22321 - DNA, 20 bp, Artificial sequence
  SiRNA target sequence
agcaatctcttagacgcaaa

SEQ ID NO: 22322 - DNA, 20 bp, Artificial sequence
  SiRNA target sequence
gcaatctcttagacgcaaaa

SEQ ID NO: 22323 - DNA, 20 bp, Artificial sequence
  SiRNA target sequence
caatctcttagacgcaaaaa

SEQ ID NO: 22324 - DNA, 20 bp, Artificial sequence
  SiRNA target sequence
aatctcttagacgcaaaaat

SEQ ID NO: 22325 - DNA, 20 bp, Artificial sequence
  SiRNA target sequence
atctcttagacgcaaaaatc

SEQ ID NO: 22326 - DNA, 20 bp, Artificial sequence
  SiRNA target sequence
tctcttagacgcaaaaatcg

SEQ ID NO: 22327 - DNA, 20 bp, Artificial sequence
  SiRNA target sequence
ctcttagacgcaaaaatcgt

SEQ ID NO: 22328 - DNA, 20 bp, Artificial sequence
  SiRNA target sequence
tcttagacgcaaaaatcgta

SEQ ID NO: 22329 - DNA, 20 bp, Artificial sequence
  SiRNA target sequence
cttagacgcaaaaatcgtat

SEQ ID NO: 22330 - DNA, 20 bp, Artificial sequence
  SiRNA target sequence
ttagacgcaaaaatcgtatt

SEQ ID NO: 22331 - DNA, 20 bp, Artificial sequence
  SiRNA target sequence
tagacgcaaaaatcgtattc

SEQ ID NO: 22332 - DNA, 20 bp, Artificial sequence
  SiRNA target sequence
agacgcaaaaatcgtattct

SEQ ID NO: 22333 - DNA, 20 bp, Artificial sequence
  SiRNA target sequence
gacgcaaaaatcgtattctt

SEQ ID NO: 22334 - DNA, 20 bp, Artificial sequence
  SiRNA target sequence
acgcaaaaatcgtattcttg

SEQ ID NO: 22335 - DNA, 20 bp, Artificial sequence
  SiRNA target sequence
cgcaaaaatcgtattcttgg

SEQ ID NO: 22336 - DNA, 20 bp, Artificial sequence
  SiRNA target sequence
gcaaaaatcgtattcttggg

SEQ ID NO: 22337 - DNA, 20 bp, Artificial sequence
  SiRNA target sequence
caaaaatcgtattcttggga

SEQ ID NO: 22338 - DNA, 20 bp, Artificial sequence
  SiRNA target sequence
aaaaatcgtattcttgggat

SEQ ID NO: 22339 - DNA, 20 bp, Artificial sequence
  SiRNA target sequence
aaaatcgtattcttgggatg

SEQ ID NO: 22340 - DNA, 20 bp, Artificial sequence
  SiRNA target sequence
aaatcgtattcttgggatgt

SEQ ID NO: 22341 - DNA, 20 bp, Artificial sequence
  SiRNA target sequence
aatcgtattcttgggatgta

SEQ ID NO: 22342 - DNA, 20 bp, Artificial sequence
  SiRNA target sequence
atcgtattcttgggatgtaa

SEQ ID NO: 22343 - DNA, 20 bp, Artificial sequence
  SiRNA target sequence
tcgtattcttgggatgtaat

SEQ ID NO: 22344 - DNA, 20 bp, Artificial sequence
  SiRNA target sequence
cgtattcttgggatgtaata

SEQ ID NO: 22345 - DNA, 20 bp, Artificial sequence
  SiRNA target sequence
gtattcttgggatgtaataa

SEQ ID NO: 22346 - DNA, 20 bp, Artificial sequence
  SiRNA target sequence
tattcttgggatgtaataac

SEQ ID NO: 22347 - DNA, 20 bp, Artificial sequence
  SiRNA target sequence
attcttgggatgtaataaca

SEQ ID NO: 22348 - DNA, 20 bp, Artificial sequence
  SiRNA target sequence
ttcttgggatgtaataacaa

SEQ ID NO: 22349 - DNA, 20 bp, Artificial sequence
  SiRNA target sequence
tcttgggatgtaataacaag

SEQ ID NO: 22350 - DNA, 20 bp, Artificial sequence
  SiRNA target sequence
cttgggatgtaataacaagt

SEQ ID NO: 22351 - DNA, 20 bp, Artificial sequence
  SiRNA target sequence
ttgggatgtaataacaagtt

SEQ ID NO: 22352 - DNA, 20 bp, Artificial sequence
  SiRNA target sequence
tgggatgtaataacaagtta

SEQ ID NO: 22353 - DNA, 20 bp, Artificial sequence
  SiRNA target sequence
gggatgtaataacaagttag

SEQ ID NO: 22354 - DNA, 20 bp, Artificial sequence
  SiRNA target sequence
ggatgtaataacaagttaga

SEQ ID NO: 22355 - DNA, 20 bp, Artificial sequence
  SiRNA target sequence
gatgtaataacaagttagac

SEQ ID NO: 22356 - DNA, 20 bp, Artificial sequence
  SiRNA target sequence
atgtaataacaagttagact

SEQ ID NO: 22357 - DNA, 20 bp, Artificial sequence
  SiRNA target sequence
tgtaataacaagttagactt

SEQ ID NO: 22358 - DNA, 20 bp, Artificial sequence
  SiRNA target sequence
gtaataacaagttagactta

SEQ ID NO: 22359 - DNA, 20 bp, Artificial sequence
  SiRNA target sequence
taataacaagttagacttag

SEQ ID NO: 22360 - DNA, 20 bp, Artificial sequence
  SiRNA target sequence
aataacaagttagacttagc

SEQ ID NO: 22361 - DNA, 20 bp, Artificial sequence
  SiRNA target sequence
ataacaagttagacttagct

SEQ ID NO: 22362 - DNA, 20 bp, Artificial sequence
  SiRNA target sequence
taacaagttagacttagctt

SEQ ID NO: 22363 - DNA, 20 bp, Artificial sequence
  SiRNA target sequence
aacaagttagacttagcttg

SEQ ID NO: 22364 - DNA, 20 bp, Artificial sequence
  SiRNA target sequence
acaagttagacttagcttgc

SEQ ID NO: 22365 - DNA, 20 bp, Artificial sequence
  SiRNA target sequence
caagttagacttagcttgct

SEQ ID NO: 22366 - DNA, 20 bp, Artificial sequence
  SiRNA target sequence
aagttagacttagcttgctc

SEQ ID NO: 22367 - DNA, 20 bp, Artificial sequence
  SiRNA target sequence
agttagacttagcttgctca

SEQ ID NO: 22368 - DNA, 20 bp, Artificial sequence
  SiRNA target sequence
gttagacttagcttgctcac

SEQ ID NO: 22369 - DNA, 20 bp, Artificial sequence
  SiRNA target sequence
ttagacttagcttgctcacc

SEQ ID NO: 22370 - DNA, 20 bp, Artificial sequence
  SiRNA target sequence
tagacttagcttgctcacct

SEQ ID NO: 22371 - DNA, 20 bp, Artificial sequence
  SiRNA target sequence
agacttagcttgctcacctg

SEQ ID NO: 22372 - DNA, 20 bp, Artificial sequence
  SiRNA target sequence
gacttagcttgctcacctgt

SEQ ID NO: 22373 - DNA, 20 bp, Artificial sequence
  SiRNA target sequence
acttagcttgctcacctgtt

SEQ ID NO: 22374 - DNA, 20 bp, Artificial sequence
  SiRNA target sequence
cttagcttgctcacctgtta

SEQ ID NO: 22375 - DNA, 20 bp, Artificial sequence
  SiRNA target sequence
ttagcttgctcacctgttaa

SEQ ID NO: 22376 - DNA, 20 bp, Artificial sequence
  SiRNA target sequence
tagcttgctcacctgttaaa

SEQ ID NO: 22377 - DNA, 20 bp, Artificial sequence
  SiRNA target sequence
agcttgctcacctgttaaaa

SEQ ID NO: 22378 - DNA, 20 bp, Artificial sequence
  SiRNA target sequence
gcttgctcacctgttaaaat

SEQ ID NO: 22379 - DNA, 20 bp, Artificial sequence
  SiRNA target sequence
cttgctcacctgttaaaatt

SEQ ID NO: 22380 - DNA, 20 bp, Artificial sequence
  SiRNA target sequence
ttgctcacctgttaaaattt

SEQ ID NO: 22381 - DNA, 20 bp, Artificial sequence
  SiRNA target sequence
tgctcacctgttaaaatttt

SEQ ID NO: 22382 - DNA, 20 bp, Artificial sequence
  SiRNA target sequence
gctcacctgttaaaatttta

SEQ ID NO: 22383 - DNA, 20 bp, Artificial sequence
  SiRNA target sequence
ctcacctgttaaaattttat

SEQ ID NO: 22384 - DNA, 20 bp, Artificial sequence
  SiRNA target sequence
tcacctgttaaaattttatc

SEQ ID NO: 22385 - DNA, 20 bp, Artificial sequence
  SiRNA target sequence
cacctgttaaaattttatct

SEQ ID NO: 22386 - DNA, 20 bp, Artificial sequence
  SiRNA target sequence
acctgttaaaattttatctt

SEQ ID NO: 22387 - DNA, 20 bp, Artificial sequence
  SiRNA target sequence
cctgttaaaattttatcttt

SEQ ID NO: 22388 - DNA, 20 bp, Artificial sequence
  SiRNA target sequence
ctgttaaaattttatcttta

SEQ ID NO: 22389 - DNA, 20 bp, Artificial sequence
  SiRNA target sequence
tgttaaaattttatctttaa

SEQ ID NO: 22390 - DNA, 20 bp, Artificial sequence
  SiRNA target sequence
gttaaaattttatctttaaa

SEQ ID NO: 22391 - DNA, 20 bp, Artificial sequence
  SiRNA target sequence
ttaaaattttatctttaaaa

SEQ ID NO: 22392 - DNA, 20 bp, Artificial sequence
  SiRNA target sequence
taaaattttatctttaaaaa

SEQ ID NO: 22393 - DNA, 20 bp, Artificial sequence
  SiRNA target sequence
aaaattttatctttaaaaat

SEQ ID NO: 22394 - DNA, 20 bp, Artificial sequence
  SiRNA target sequence
aaattttatctttaaaaatt

SEQ ID NO: 22395 - DNA, 20 bp, Artificial sequence
  SiRNA target sequence
aattttatctttaaaaattg

SEQ ID NO: 22396 - DNA, 20 bp, Artificial sequence
  SiRNA target sequence
attttatctttaaaaattga

SEQ ID NO: 22397 - DNA, 20 bp, Artificial sequence
  SiRNA target sequence
ttttatctttaaaaattgat

SEQ ID NO: 22398 - DNA, 20 bp, Artificial sequence
  SiRNA target sequence
tttatctttaaaaattgata

SEQ ID NO: 22399 - DNA, 20 bp, Artificial sequence
  SiRNA target sequence
ttatctttaaaaattgatac

SEQ ID NO: 22400 - DNA, 20 bp, Artificial sequence
  SiRNA target sequence
tatctttaaaaattgatacc

SEQ ID NO: 22401 - DNA, 20 bp, Artificial sequence
  SiRNA target sequence
atctttaaaaattgatacca

SEQ ID NO: 22402 - DNA, 20 bp, Artificial sequence
  SiRNA target sequence
tctttaaaaattgataccac

SEQ ID NO: 22403 - DNA, 20 bp, Artificial sequence
  SiRNA target sequence
ctttaaaaattgataccacc

SEQ ID NO: 22404 - DNA, 20 bp, Artificial sequence
  SiRNA target sequence
tttaaaaattgataccaccg

SEQ ID NO: 22405 - DNA, 20 bp, Artificial sequence
  SiRNA target sequence
ttaaaaattgataccaccga

SEQ ID NO: 22406 - DNA, 20 bp, Artificial sequence
  SiRNA target sequence
taaaaattgataccaccgat

SEQ ID NO: 22407 - DNA, 20 bp, Artificial sequence
  SiRNA target sequence
aaaaattgataccaccgatg

SEQ ID NO: 22408 - DNA, 20 bp, Artificial sequence
  SiRNA target sequence
aaaattgataccaccgatgg

SEQ ID NO: 22409 - DNA, 20 bp, Artificial sequence
  SiRNA target sequence
aaattgataccaccgatggt

SEQ ID NO: 22410 - DNA, 20 bp, Artificial sequence
  SiRNA target sequence
aattgataccaccgatggtg

SEQ ID NO: 22411 - DNA, 20 bp, Artificial sequence
  SiRNA target sequence
attgataccaccgatggtgt

SEQ ID NO: 22412 - DNA, 20 bp, Artificial sequence
  SiRNA target sequence
ttgataccaccgatggtgta

SEQ ID NO: 22413 - DNA, 20 bp, Artificial sequence
  SiRNA target sequence
tgataccaccgatggtgtag

SEQ ID NO: 22414 - DNA, 20 bp, Artificial sequence
  SiRNA target sequence
gataccaccgatggtgtagt

SEQ ID NO: 22415 - DNA, 20 bp, Artificial sequence
  SiRNA target sequence
ataccaccgatggtgtagtt

SEQ ID NO: 22416 - DNA, 20 bp, Artificial sequence
  SiRNA target sequence
taccaccgatggtgtagttc

SEQ ID NO: 22417 - DNA, 20 bp, Artificial sequence
  SiRNA target sequence
accaccgatggtgtagttct

SEQ ID NO: 22418 - DNA, 20 bp, Artificial sequence
  SiRNA target sequence
ccaccgatggtgtagttcta

SEQ ID NO: 22419 - DNA, 20 bp, Artificial sequence
  SiRNA target sequence
caccgatggtgtagttctac

SEQ ID NO: 22420 - DNA, 20 bp, Artificial sequence
  SiRNA target sequence
accgatggtgtagttctacc

SEQ ID NO: 22421 - DNA, 20 bp, Artificial sequence
  SiRNA target sequence
ccgatggtgtagttctacca

SEQ ID NO: 22422 - DNA, 20 bp, Artificial sequence
  SiRNA target sequence
cgatggtgtagttctaccac

SEQ ID NO: 22423 - DNA, 20 bp, Artificial sequence
  SiRNA target sequence
gatggtgtagttctaccacc

SEQ ID NO: 22424 - DNA, 20 bp, Artificial sequence
  SiRNA target sequence
atggtgtagttctaccacct

SEQ ID NO: 22425 - DNA, 20 bp, Artificial sequence
  SiRNA target sequence
tggtgtagttctaccacctt

SEQ ID NO: 22426 - DNA, 20 bp, Artificial sequence
  SiRNA target sequence
ggtgtagttctaccaccttc

SEQ ID NO: 22427 - DNA, 20 bp, Artificial sequence
  SiRNA target sequence
gtgtagttctaccaccttct

SEQ ID NO: 22428 - DNA, 20 bp, Artificial sequence
  SiRNA target sequence
tgtagttctaccaccttctt

SEQ ID NO: 22429 - DNA, 20 bp, Artificial sequence
  SiRNA target sequence
gtagttctaccaccttcttc

SEQ ID NO: 22430 - DNA, 20 bp, Artificial sequence
  SiRNA target sequence
tagttctaccaccttcttcg

SEQ ID NO: 22431 - DNA, 20 bp, Artificial sequence
  SiRNA target sequence
agttctaccaccttcttcgt

SEQ ID NO: 22432 - DNA, 20 bp, Artificial sequence
  SiRNA target sequence
gttctaccaccttcttcgtt

SEQ ID NO: 22433 - DNA, 20 bp, Artificial sequence
  SiRNA target sequence
ttctaccaccttcttcgttt

SEQ ID NO: 22434 - DNA, 20 bp, Artificial sequence
  SiRNA target sequence
tctaccaccttcttcgtttt

SEQ ID NO: 22435 - DNA, 20 bp, Artificial sequence
  SiRNA target sequence
ctaccaccttcttcgttttc

SEQ ID NO: 22436 - DNA, 20 bp, Artificial sequence
  SiRNA target sequence
taccaccttcttcgttttca

SEQ ID NO: 22437 - DNA, 20 bp, Artificial sequence
  SiRNA target sequence
accaccttcttcgttttcaa

SEQ ID NO: 22438 - DNA, 20 bp, Artificial sequence
  SiRNA target sequence
ccaccttcttcgttttcaat

SEQ ID NO: 22439 - DNA, 20 bp, Artificial sequence
  SiRNA target sequence
caccttcttcgttttcaata

SEQ ID NO: 22440 - DNA, 20 bp, Artificial sequence
  SiRNA target sequence
accttcttcgttttcaataa

SEQ ID NO: 22441 - DNA, 20 bp, Artificial sequence
  SiRNA target sequence
ccttcttcgttttcaataat

SEQ ID NO: 22442 - DNA, 20 bp, Artificial sequence
  SiRNA target sequence
cttcttcgttttcaataatt

SEQ ID NO: 22443 - DNA, 20 bp, Artificial sequence
  SiRNA target sequence
ttcttcgttttcaataattt

SEQ ID NO: 22444 - DNA, 20 bp, Artificial sequence
  SiRNA target sequence
tcttcgttttcaataatttg

SEQ ID NO: 22445 - DNA, 20 bp, Artificial sequence
  SiRNA target sequence
cttcgttttcaataatttgt

SEQ ID NO: 22446 - DNA, 20 bp, Artificial sequence
  SiRNA target sequence
ttcgttttcaataatttgtg

SEQ ID NO: 22447 - DNA, 20 bp, Artificial sequence
  SiRNA target sequence
tcgttttcaataatttgtgg

SEQ ID NO: 22448 - DNA, 20 bp, Artificial sequence
  SiRNA target sequence
cgttttcaataatttgtggg

SEQ ID NO: 22449 - DNA, 20 bp, Artificial sequence
  SiRNA target sequence
gttttcaataatttgtggga

SEQ ID NO: 22450 - DNA, 20 bp, Artificial sequence
  SiRNA target sequence
ttttcaataatttgtgggat

SEQ ID NO: 22451 - DNA, 20 bp, Artificial sequence
  SiRNA target sequence
tttcaataatttgtgggata

SEQ ID NO: 22452 - DNA, 20 bp, Artificial sequence
  SiRNA target sequence
ttcaataatttgtgggatat

SEQ ID NO: 22453 - DNA, 20 bp, Artificial sequence
  SiRNA target sequence
tcaataatttgtgggatatt

SEQ ID NO: 22454 - DNA, 20 bp, Artificial sequence
  SiRNA target sequence
caataatttgtgggatattg

SEQ ID NO: 22455 - DNA, 20 bp, Artificial sequence
  SiRNA target sequence
aataatttgtgggatattgt

SEQ ID NO: 22456 - DNA, 20 bp, Artificial sequence
  SiRNA target sequence
ataatttgtgggatattgtt

SEQ ID NO: 22457 - DNA, 20 bp, Artificial sequence
  SiRNA target sequence
taatttgtgggatattgtta

SEQ ID NO: 22458 - DNA, 20 bp, Artificial sequence
  SiRNA target sequence
aatttgtgggatattgttat

SEQ ID NO: 22459 - DNA, 20 bp, Artificial sequence
  SiRNA target sequence
atttgtgggatattgttatg

SEQ ID NO: 22460 - DNA, 20 bp, Artificial sequence
  SiRNA target sequence
tttgtgggatattgttatgt

SEQ ID NO: 22461 - DNA, 20 bp, Artificial sequence
  SiRNA target sequence
ttgtgggatattgttatgta

SEQ ID NO: 22462 - DNA, 20 bp, Artificial sequence
  SiRNA target sequence
tgtgggatattgttatgtat

SEQ ID NO: 22463 - DNA, 20 bp, Artificial sequence
  SiRNA target sequence
gtgggatattgttatgtata

SEQ ID NO: 22464 - DNA, 20 bp, Artificial sequence
  SiRNA target sequence
tgggatattgttatgtataa

SEQ ID NO: 22465 - DNA, 20 bp, Artificial sequence
  SiRNA target sequence
gggatattgttatgtataag

SEQ ID NO: 22466 - DNA, 20 bp, Artificial sequence
  SiRNA target sequence
ggatattgttatgtataaga

SEQ ID NO: 22467 - DNA, 20 bp, Artificial sequence
  SiRNA target sequence
gatattgttatgtataagag

SEQ ID NO: 22468 - DNA, 20 bp, Artificial sequence
  SiRNA target sequence
atattgttatgtataagaga

SEQ ID NO: 22469 - DNA, 20 bp, Artificial sequence
  SiRNA target sequence
tattgttatgtataagagac

SEQ ID NO: 22470 - DNA, 20 bp, Artificial sequence
  SiRNA target sequence
attgttatgtataagagaca

SEQ ID NO: 22471 - DNA, 20 bp, Artificial sequence
  SiRNA target sequence
ttgttatgtataagagacac

SEQ ID NO: 22472 - DNA, 20 bp, Artificial sequence
  SiRNA target sequence
tgttatgtataagagacaca

SEQ ID NO: 22473 - DNA, 20 bp, Artificial sequence
  SiRNA target sequence
gttatgtataagagacacac

SEQ ID NO: 22474 - DNA, 20 bp, Artificial sequence
  SiRNA target sequence
ttatgtataagagacacaca

SEQ ID NO: 22475 - DNA, 20 bp, Artificial sequence
  SiRNA target sequence
tatgtataagagacacacaa

SEQ ID NO: 22476 - DNA, 20 bp, Artificial sequence
  SiRNA target sequence
atgtataagagacacacaag

SEQ ID NO: 22477 - DNA, 20 bp, Artificial sequence
  SiRNA target sequence
tgtataagagacacacaaga

SEQ ID NO: 22478 - DNA, 20 bp, Artificial sequence
  SiRNA target sequence
gtataagagacacacaagaa

SEQ ID NO: 22479 - DNA, 20 bp, Artificial sequence
  SiRNA target sequence
tataagagacacacaagaat

SEQ ID NO: 22480 - DNA, 20 bp, Artificial sequence
  SiRNA target sequence
ataagagacacacaagaatt

SEQ ID NO: 22481 - DNA, 20 bp, Artificial sequence
  SiRNA target sequence
taagagacacacaagaattg

SEQ ID NO: 22482 - DNA, 20 bp, Artificial sequence
  SiRNA target sequence
aagagacacacaagaattgg

SEQ ID NO: 22483 - DNA, 20 bp, Artificial sequence
  SiRNA target sequence
agagacacacaagaattggt

SEQ ID NO: 22484 - DNA, 20 bp, Artificial sequence
  SiRNA target sequence
gagacacacaagaattggtt

SEQ ID NO: 22485 - DNA, 20 bp, Artificial sequence
  SiRNA target sequence
agacacacaagaattggttg

SEQ ID NO: 22486 - DNA, 20 bp, Artificial sequence
  SiRNA target sequence
gacacacaagaattggttgt

SEQ ID NO: 22487 - DNA, 20 bp, Artificial sequence
  SiRNA target sequence
acacacaagaattggttgtt

SEQ ID NO: 22488 - DNA, 20 bp, Artificial sequence
  SiRNA target sequence
cacacaagaattggttgttc

SEQ ID NO: 22489 - DNA, 20 bp, Artificial sequence
  SiRNA target sequence
acacaagaattggttgttcc

SEQ ID NO: 22490 - DNA, 20 bp, Artificial sequence
  SiRNA target sequence
cacaagaattggttgttcct

SEQ ID NO: 22491 - DNA, 20 bp, Artificial sequence
  SiRNA target sequence
acaagaattggttgttccta

SEQ ID NO: 22492 - DNA, 20 bp, Artificial sequence
  SiRNA target sequence
caagaattggttgttcctag

SEQ ID NO: 22493 - DNA, 20 bp, Artificial sequence
  SiRNA target sequence
aagaattggttgttcctaga

SEQ ID NO: 22494 - DNA, 20 bp, Artificial sequence
  SiRNA target sequence
agaattggttgttcctagat

SEQ ID NO: 22495 - DNA, 20 bp, Artificial sequence
  SiRNA target sequence
gaattggttgttcctagatc

SEQ ID NO: 22496 - DNA, 20 bp, Artificial sequence
  SiRNA target sequence
aattggttgttcctagatca

SEQ ID NO: 22497 - DNA, 20 bp, Artificial sequence
  SiRNA target sequence
attggttgttcctagatcaa

SEQ ID NO: 22498 - DNA, 20 bp, Artificial sequence
  SiRNA target sequence
ttggttgttcctagatcaat

SEQ ID NO: 22499 - DNA, 20 bp, Artificial sequence
  SiRNA target sequence
tggttgttcctagatcaatt

SEQ ID NO: 22500 - DNA, 20 bp, Artificial sequence
  SiRNA target sequence
ggttgttcctagatcaattc

SEQ ID NO: 22501 - DNA, 20 bp, Artificial sequence
  SiRNA target sequence
gttgttcctagatcaattcc

SEQ ID NO: 22502 - DNA, 20 bp, Artificial sequence
  SiRNA target sequence
ttgttcctagatcaattcct

SEQ ID NO: 22503 - DNA, 20 bp, Artificial sequence
  SiRNA target sequence
tgttcctagatcaattccta

SEQ ID NO: 22504 - DNA, 20 bp, Artificial sequence
  SiRNA target sequence
gttcctagatcaattcctat

SEQ ID NO: 22505 - DNA, 20 bp, Artificial sequence
  SiRNA target sequence
ttcctagatcaattcctatt

SEQ ID NO: 22506 - DNA, 20 bp, Artificial sequence
  SiRNA target sequence
tcctagatcaattcctatta

SEQ ID NO: 22507 - DNA, 20 bp, Artificial sequence
  SiRNA target sequence
cctagatcaattcctattat

SEQ ID NO: 22508 - DNA, 20 bp, Artificial sequence
  SiRNA target sequence
ctagatcaattcctattatt

SEQ ID NO: 22509 - DNA, 20 bp, Artificial sequence
  SiRNA target sequence
tagatcaattcctattattt

SEQ ID NO: 22510 - DNA, 20 bp, Artificial sequence
  SiRNA target sequence
agatcaattcctattatttt

SEQ ID NO: 22511 - DNA, 20 bp, Artificial sequence
  SiRNA target sequence
gatcaattcctattatttta

SEQ ID NO: 22512 - DNA, 20 bp, Artificial sequence
  SiRNA target sequence
atcaattcctattattttag

SEQ ID NO: 22513 - DNA, 20 bp, Artificial sequence
  SiRNA target sequence
tcaattcctattattttaga

SEQ ID NO: 22514 - DNA, 20 bp, Artificial sequence
  SiRNA target sequence
caattcctattattttagag

SEQ ID NO: 22515 - DNA, 20 bp, Artificial sequence
  SiRNA target sequence
aattcctattattttagagc

SEQ ID NO: 22516 - DNA, 20 bp, Artificial sequence
  SiRNA target sequence
attcctattattttagagct

SEQ ID NO: 22517 - DNA, 20 bp, Artificial sequence
  SiRNA target sequence
ttcctattattttagagcta

SEQ ID NO: 22518 - DNA, 20 bp, Artificial sequence
  SiRNA target sequence
tcctattattttagagctaa

SEQ ID NO: 22519 - DNA, 20 bp, Artificial sequence
  SiRNA target sequence
cctattattttagagctaat

SEQ ID NO: 22520 - DNA, 20 bp, Artificial sequence
  SiRNA target sequence
ctattattttagagctaatt

SEQ ID NO: 22521 - DNA, 20 bp, Artificial sequence
  SiRNA target sequence
tattattttagagctaattt

SEQ ID NO: 22522 - DNA, 20 bp, Artificial sequence
  SiRNA target sequence
attattttagagctaatttc

SEQ ID NO: 22523 - DNA, 20 bp, Artificial sequence
  SiRNA target sequence
ttattttagagctaatttct

SEQ ID NO: 22524 - DNA, 20 bp, Artificial sequence
  SiRNA target sequence
tattttagagctaatttctt

SEQ ID NO: 22525 - DNA, 20 bp, Artificial sequence
  SiRNA target sequence
attttagagctaatttcttc

SEQ ID NO: 22526 - DNA, 20 bp, Artificial sequence
  SiRNA target sequence
ttttagagctaatttcttct

SEQ ID NO: 22527 - DNA, 20 bp, Artificial sequence
  SiRNA target sequence
tttagagctaatttcttctt

SEQ ID NO: 22528 - DNA, 20 bp, Artificial sequence
  SiRNA target sequence
ttagagctaatttcttcttt

SEQ ID NO: 22529 - DNA, 20 bp, Artificial sequence
  SiRNA target sequence
tagagctaatttcttcttta

SEQ ID NO: 22530 - DNA, 20 bp, Artificial sequence
  SiRNA target sequence
agagctaatttcttctttag

SEQ ID NO: 22531 - DNA, 20 bp, Artificial sequence
  SiRNA target sequence
gagctaatttcttctttaga

SEQ ID NO: 22532 - DNA, 20 bp, Artificial sequence
  SiRNA target sequence
agctaatttcttctttagac

SEQ ID NO: 22533 - DNA, 20 bp, Artificial sequence
  SiRNA target sequence
gctaatttcttctttagaca

SEQ ID NO: 22534 - DNA, 20 bp, Artificial sequence
  SiRNA target sequence
ctaatttcttctttagacat

SEQ ID NO: 22535 - DNA, 21 bp, Artificial sequence
  SiRNA target sequence
ttaagaatttttcaatatttt

SEQ ID NO: 22536 - DNA, 21 bp, Artificial sequence
  SiRNA target sequence
taagaatttttcaatattttt

SEQ ID NO: 22537 - DNA, 21 bp, Artificial sequence
  SiRNA target sequence
aagaatttttcaatatttttt

SEQ ID NO: 22538 - DNA, 21 bp, Artificial sequence
  SiRNA target sequence
agaatttttcaatattttttt

SEQ ID NO: 22539 - DNA, 21 bp, Artificial sequence
  SiRNA target sequence
gaatttttcaatatttttttt

SEQ ID NO: 22540 - DNA, 21 bp, Artificial sequence
  SiRNA target sequence
aatttttcaatattttttttg

SEQ ID NO: 22541 - DNA, 21 bp, Artificial sequence
  SiRNA target sequence
atttttcaatattttttttgc

SEQ ID NO: 22542 - DNA, 21 bp, Artificial sequence
  SiRNA target sequence
tttttcaatattttttttgct

SEQ ID NO: 22543 - DNA, 21 bp, Artificial sequence
  SiRNA target sequence
ttttcaatattttttttgctt

SEQ ID NO: 22544 - DNA, 21 bp, Artificial sequence
  SiRNA target sequence
tttcaatattttttttgcttg

SEQ ID NO: 22545 - DNA, 21 bp, Artificial sequence
  SiRNA target sequence
ttcaatattttttttgcttgt

SEQ ID NO: 22546 - DNA, 21 bp, Artificial sequence
  SiRNA target sequence
tcaatattttttttgcttgtt

SEQ ID NO: 22547 - DNA, 21 bp, Artificial sequence
  SiRNA target sequence
caatattttttttgcttgttc

SEQ ID NO: 22548 - DNA, 21 bp, Artificial sequence
  SiRNA target sequence
aatattttttttgcttgttct

SEQ ID NO: 22549 - DNA, 21 bp, Artificial sequence
  SiRNA target sequence
atattttttttgcttgttcta

SEQ ID NO: 22550 - DNA, 21 bp, Artificial sequence
  SiRNA target sequence
tattttttttgcttgttctaa

SEQ ID NO: 22551 - DNA, 21 bp, Artificial sequence
  SiRNA target sequence
attttttttgcttgttctaag

SEQ ID NO: 22552 - DNA, 21 bp, Artificial sequence
  SiRNA target sequence
ttttttttgcttgttctaagt

SEQ ID NO: 22553 - DNA, 21 bp, Artificial sequence
  SiRNA target sequence
tttttttgcttgttctaagtc

SEQ ID NO: 22554 - DNA, 21 bp, Artificial sequence
  SiRNA target sequence
ttttttgcttgttctaagtca

SEQ ID NO: 22555 - DNA, 21 bp, Artificial sequence
  SiRNA target sequence
tttttgcttgttctaagtcat

SEQ ID NO: 22556 - DNA, 21 bp, Artificial sequence
  SiRNA target sequence
ttttgcttgttctaagtcata

SEQ ID NO: 22557 - DNA, 21 bp, Artificial sequence
  SiRNA target sequence
tttgcttgttctaagtcataa

SEQ ID NO: 22558 - DNA, 21 bp, Artificial sequence
  SiRNA target sequence
ttgcttgttctaagtcataaa

SEQ ID NO: 22559 - DNA, 21 bp, Artificial sequence
  SiRNA target sequence
tgcttgttctaagtcataaat

SEQ ID NO: 22560 - DNA, 21 bp, Artificial sequence
  SiRNA target sequence
gcttgttctaagtcataaatt

SEQ ID NO: 22561 - DNA, 21 bp, Artificial sequence
  SiRNA target sequence
cttgttctaagtcataaattt

SEQ ID NO: 22562 - DNA, 21 bp, Artificial sequence
  SiRNA target sequence
ttgttctaagtcataaatttt

SEQ ID NO: 22563 - DNA, 21 bp, Artificial sequence
  SiRNA target sequence
tgttctaagtcataaattttt

SEQ ID NO: 22564 - DNA, 21 bp, Artificial sequence
  SiRNA target sequence
gttctaagtcataaatttttt

SEQ ID NO: 22565 - DNA, 21 bp, Artificial sequence
  SiRNA target sequence
ttctaagtcataaattttttt

SEQ ID NO: 22566 - DNA, 21 bp, Artificial sequence
  SiRNA target sequence
tctaagtcataaattttttta

SEQ ID NO: 22567 - DNA, 21 bp, Artificial sequence
  SiRNA target sequence
ctaagtcataaatttttttag

SEQ ID NO: 22568 - DNA, 21 bp, Artificial sequence
  SiRNA target sequence
taagtcataaatttttttagt

SEQ ID NO: 22569 - DNA, 21 bp, Artificial sequence
  SiRNA target sequence
aagtcataaatttttttagtc

SEQ ID NO: 22570 - DNA, 21 bp, Artificial sequence
  SiRNA target sequence
agtcataaatttttttagtca

SEQ ID NO: 22571 - DNA, 21 bp, Artificial sequence
  SiRNA target sequence
gtcataaatttttttagtcaa

SEQ ID NO: 22572 - DNA, 21 bp, Artificial sequence
  SiRNA target sequence
tcataaatttttttagtcaaa

SEQ ID NO: 22573 - DNA, 21 bp, Artificial sequence
  SiRNA target sequence
cataaatttttttagtcaaat

SEQ ID NO: 22574 - DNA, 21 bp, Artificial sequence
  SiRNA target sequence
ataaatttttttagtcaaata

SEQ ID NO: 22575 - DNA, 21 bp, Artificial sequence
  SiRNA target sequence
taaatttttttagtcaaatat

SEQ ID NO: 22576 - DNA, 21 bp, Artificial sequence
  SiRNA target sequence
aaatttttttagtcaaatatg

SEQ ID NO: 22577 - DNA, 21 bp, Artificial sequence
  SiRNA target sequence
aatttttttagtcaaatatga

SEQ ID NO: 22578 - DNA, 21 bp, Artificial sequence
  SiRNA target sequence
atttttttagtcaaatatgac

SEQ ID NO: 22579 - DNA, 21 bp, Artificial sequence
  SiRNA target sequence
tttttttagtcaaatatgact

SEQ ID NO: 22580 - DNA, 21 bp, Artificial sequence
  SiRNA target sequence
ttttttagtcaaatatgactt

SEQ ID NO: 22581 - DNA, 21 bp, Artificial sequence
  SiRNA target sequence
tttttagtcaaatatgacttt

SEQ ID NO: 22582 - DNA, 21 bp, Artificial sequence
  SiRNA target sequence
ttttagtcaaatatgacttta

SEQ ID NO: 22583 - DNA, 21 bp, Artificial sequence
  SiRNA target sequence
tttagtcaaatatgactttaa

SEQ ID NO: 22584 - DNA, 21 bp, Artificial sequence
  SiRNA target sequence
ttagtcaaatatgactttaaa

SEQ ID NO: 22585 - DNA, 21 bp, Artificial sequence
  SiRNA target sequence
tagtcaaatatgactttaaaa

SEQ ID NO: 22586 - DNA, 21 bp, Artificial sequence
  SiRNA target sequence
agtcaaatatgactttaaaat

SEQ ID NO: 22587 - DNA, 21 bp, Artificial sequence
  SiRNA target sequence
gtcaaatatgactttaaaatc

SEQ ID NO: 22588 - DNA, 21 bp, Artificial sequence
  SiRNA target sequence
tcaaatatgactttaaaatct

SEQ ID NO: 22589 - DNA, 21 bp, Artificial sequence
  SiRNA target sequence
caaatatgactttaaaatctc

SEQ ID NO: 22590 - DNA, 21 bp, Artificial sequence
  SiRNA target sequence
aaatatgactttaaaatctct

SEQ ID NO: 22591 - DNA, 21 bp, Artificial sequence
  SiRNA target sequence
aatatgactttaaaatctctt

SEQ ID NO: 22592 - DNA, 21 bp, Artificial sequence
  SiRNA target sequence
atatgactttaaaatctcttt

SEQ ID NO: 22593 - DNA, 21 bp, Artificial sequence
  SiRNA target sequence
tatgactttaaaatctctttt

SEQ ID NO: 22594 - DNA, 21 bp, Artificial sequence
  SiRNA target sequence
atgactttaaaatctcttttg

SEQ ID NO: 22595 - DNA, 21 bp, Artificial sequence
  SiRNA target sequence
tgactttaaaatctcttttgt

SEQ ID NO: 22596 - DNA, 21 bp, Artificial sequence
  SiRNA target sequence
gactttaaaatctcttttgtt

SEQ ID NO: 22597 - DNA, 21 bp, Artificial sequence
  SiRNA target sequence
actttaaaatctcttttgttt

SEQ ID NO: 22598 - DNA, 21 bp, Artificial sequence
  SiRNA target sequence
ctttaaaatctcttttgtttc

SEQ ID NO: 22599 - DNA, 21 bp, Artificial sequence
  SiRNA target sequence
tttaaaatctcttttgtttca

SEQ ID NO: 22600 - DNA, 21 bp, Artificial sequence
  SiRNA target sequence
ttaaaatctcttttgtttcat

SEQ ID NO: 22601 - DNA, 21 bp, Artificial sequence
  SiRNA target sequence
taaaatctcttttgtttcatc

SEQ ID NO: 22602 - DNA, 21 bp, Artificial sequence
  SiRNA target sequence
aaaatctcttttgtttcatct

SEQ ID NO: 22603 - DNA, 21 bp, Artificial sequence
  SiRNA target sequence
aaatctcttttgtttcatctg

SEQ ID NO: 22604 - DNA, 21 bp, Artificial sequence
  SiRNA target sequence
aatctcttttgtttcatctgt

SEQ ID NO: 22605 - DNA, 21 bp, Artificial sequence
  SiRNA target sequence
atctcttttgtttcatctgtt

SEQ ID NO: 22606 - DNA, 21 bp, Artificial sequence
  SiRNA target sequence
tctcttttgtttcatctgtta

SEQ ID NO: 22607 - DNA, 21 bp, Artificial sequence
  SiRNA target sequence
ctcttttgtttcatctgttac

SEQ ID NO: 22608 - DNA, 21 bp, Artificial sequence
  SiRNA target sequence
tcttttgtttcatctgttact

SEQ ID NO: 22609 - DNA, 21 bp, Artificial sequence
  SiRNA target sequence
cttttgtttcatctgttactt

SEQ ID NO: 22610 - DNA, 21 bp, Artificial sequence
  SiRNA target sequence
ttttgtttcatctgttacttg

SEQ ID NO: 22611 - DNA, 21 bp, Artificial sequence
  SiRNA target sequence
tttgtttcatctgttacttgt

SEQ ID NO: 22612 - DNA, 21 bp, Artificial sequence
  SiRNA target sequence
ttgtttcatctgttacttgtt

SEQ ID NO: 22613 - DNA, 21 bp, Artificial sequence
  SiRNA target sequence
tgtttcatctgttacttgttt

SEQ ID NO: 22614 - DNA, 21 bp, Artificial sequence
  SiRNA target sequence
gtttcatctgttacttgtttg

SEQ ID NO: 22615 - DNA, 21 bp, Artificial sequence
  SiRNA target sequence
tttcatctgttacttgtttgt

SEQ ID NO: 22616 - DNA, 21 bp, Artificial sequence
  SiRNA target sequence
ttcatctgttacttgtttgta

SEQ ID NO: 22617 - DNA, 21 bp, Artificial sequence
  SiRNA target sequence
tcatctgttacttgtttgtac

SEQ ID NO: 22618 - DNA, 21 bp, Artificial sequence
  SiRNA target sequence
catctgttacttgtttgtact

SEQ ID NO: 22619 - DNA, 21 bp, Artificial sequence
  SiRNA target sequence
atctgttacttgtttgtactt

SEQ ID NO: 22620 - DNA, 21 bp, Artificial sequence
  SiRNA target sequence
tctgttacttgtttgtacttt

SEQ ID NO: 22621 - DNA, 21 bp, Artificial sequence
  SiRNA target sequence
ctgttacttgtttgtacttta

SEQ ID NO: 22622 - DNA, 21 bp, Artificial sequence
  SiRNA target sequence
tgttacttgtttgtactttaa

SEQ ID NO: 22623 - DNA, 21 bp, Artificial sequence
  SiRNA target sequence
gttacttgtttgtactttaaa

SEQ ID NO: 22624 - DNA, 21 bp, Artificial sequence
  SiRNA target sequence
ttacttgtttgtactttaaaa

SEQ ID NO: 22625 - DNA, 21 bp, Artificial sequence
  SiRNA target sequence
tacttgtttgtactttaaaaa

SEQ ID NO: 22626 - DNA, 21 bp, Artificial sequence
  SiRNA target sequence
acttgtttgtactttaaaaat

SEQ ID NO: 22627 - DNA, 21 bp, Artificial sequence
  SiRNA target sequence
cttgtttgtactttaaaaatt

SEQ ID NO: 22628 - DNA, 21 bp, Artificial sequence
  SiRNA target sequence
ttgtttgtactttaaaaattg

SEQ ID NO: 22629 - DNA, 21 bp, Artificial sequence
  SiRNA target sequence
tgtttgtactttaaaaattgt

SEQ ID NO: 22630 - DNA, 21 bp, Artificial sequence
  SiRNA target sequence
gtttgtactttaaaaattgtt

SEQ ID NO: 22631 - DNA, 21 bp, Artificial sequence
  SiRNA target sequence
tttgtactttaaaaattgttg

SEQ ID NO: 22632 - DNA, 21 bp, Artificial sequence
  SiRNA target sequence
ttgtactttaaaaattgttga

SEQ ID NO: 22633 - DNA, 21 bp, Artificial sequence
  SiRNA target sequence
tgtactttaaaaattgttgaa

SEQ ID NO: 22634 - DNA, 21 bp, Artificial sequence
  SiRNA target sequence
gtactttaaaaattgttgaat

SEQ ID NO: 22635 - DNA, 21 bp, Artificial sequence
  SiRNA target sequence
tactttaaaaattgttgaatt

SEQ ID NO: 22636 - DNA, 21 bp, Artificial sequence
  SiRNA target sequence
actttaaaaattgttgaattt

SEQ ID NO: 22637 - DNA, 21 bp, Artificial sequence
  SiRNA target sequence
ctttaaaaattgttgaatttc

SEQ ID NO: 22638 - DNA, 21 bp, Artificial sequence
  SiRNA target sequence
tttaaaaattgttgaatttca

SEQ ID NO: 22639 - DNA, 21 bp, Artificial sequence
  SiRNA target sequence
ttaaaaattgttgaatttcaa

SEQ ID NO: 22640 - DNA, 21 bp, Artificial sequence
  SiRNA target sequence
taaaaattgttgaatttcaat

SEQ ID NO: 22641 - DNA, 21 bp, Artificial sequence
  SiRNA target sequence
aaaaattgttgaatttcaatt

SEQ ID NO: 22642 - DNA, 21 bp, Artificial sequence
  SiRNA target sequence
aaaattgttgaatttcaattt

SEQ ID NO: 22643 - DNA, 21 bp, Artificial sequence
  SiRNA target sequence
aaattgttgaatttcaatttt

SEQ ID NO: 22644 - DNA, 21 bp, Artificial sequence
  SiRNA target sequence
aattgttgaatttcaatttta

SEQ ID NO: 22645 - DNA, 21 bp, Artificial sequence
  SiRNA target sequence
attgttgaatttcaattttaa

SEQ ID NO: 22646 - DNA, 21 bp, Artificial sequence
  SiRNA target sequence
ttgttgaatttcaattttaaa

SEQ ID NO: 22647 - DNA, 21 bp, Artificial sequence
  SiRNA target sequence
tgttgaatttcaattttaaat

SEQ ID NO: 22648 - DNA, 21 bp, Artificial sequence
  SiRNA target sequence
gttgaatttcaattttaaatt

SEQ ID NO: 22649 - DNA, 21 bp, Artificial sequence
  SiRNA target sequence
ttgaatttcaattttaaattc

SEQ ID NO: 22650 - DNA, 21 bp, Artificial sequence
  SiRNA target sequence
tgaatttcaattttaaattcg

SEQ ID NO: 22651 - DNA, 21 bp, Artificial sequence
  SiRNA target sequence
gaatttcaattttaaattcgg

SEQ ID NO: 22652 - DNA, 21 bp, Artificial sequence
  SiRNA target sequence
aatttcaattttaaattcggc

SEQ ID NO: 22653 - DNA, 21 bp, Artificial sequence
  SiRNA target sequence
atttcaattttaaattcggca

SEQ ID NO: 22654 - DNA, 21 bp, Artificial sequence
  SiRNA target sequence
tttcaattttaaattcggcac

SEQ ID NO: 22655 - DNA, 21 bp, Artificial sequence
  SiRNA target sequence
ttcaattttaaattcggcaca

SEQ ID NO: 22656 - DNA, 21 bp, Artificial sequence
  SiRNA target sequence
tcaattttaaattcggcacaa

SEQ ID NO: 22657 - DNA, 21 bp, Artificial sequence
  SiRNA target sequence
caattttaaattcggcacaat

SEQ ID NO: 22658 - DNA, 21 bp, Artificial sequence
  SiRNA target sequence
aattttaaattcggcacaatt

SEQ ID NO: 22659 - DNA, 21 bp, Artificial sequence
  SiRNA target sequence
attttaaattcggcacaattt

SEQ ID NO: 22660 - DNA, 21 bp, Artificial sequence
  SiRNA target sequence
ttttaaattcggcacaatttt

SEQ ID NO: 22661 - DNA, 21 bp, Artificial sequence
  SiRNA target sequence
tttaaattcggcacaattttt

SEQ ID NO: 22662 - DNA, 21 bp, Artificial sequence
  SiRNA target sequence
ttaaattcggcacaatttttt

SEQ ID NO: 22663 - DNA, 21 bp, Artificial sequence
  SiRNA target sequence
taaattcggcacaattttttt

SEQ ID NO: 22664 - DNA, 21 bp, Artificial sequence
  SiRNA target sequence
aaattcggcacaatttttttc

SEQ ID NO: 22665 - DNA, 21 bp, Artificial sequence
  SiRNA target sequence
aattcggcacaatttttttca

SEQ ID NO: 22666 - DNA, 21 bp, Artificial sequence
  SiRNA target sequence
attcggcacaatttttttcaa

SEQ ID NO: 22667 - DNA, 21 bp, Artificial sequence
  SiRNA target sequence
ttcggcacaatttttttcaat

SEQ ID NO: 22668 - DNA, 21 bp, Artificial sequence
  SiRNA target sequence
tcggcacaatttttttcaatt

SEQ ID NO: 22669 - DNA, 21 bp, Artificial sequence
  SiRNA target sequence
cggcacaatttttttcaattt

SEQ ID NO: 22670 - DNA, 21 bp, Artificial sequence
  SiRNA target sequence
ggcacaatttttttcaatttc

SEQ ID NO: 22671 - DNA, 21 bp, Artificial sequence
  SiRNA target sequence
gcacaatttttttcaatttca

SEQ ID NO: 22672 - DNA, 21 bp, Artificial sequence
  SiRNA target sequence
cacaatttttttcaatttcat

SEQ ID NO: 22673 - DNA, 21 bp, Artificial sequence
  SiRNA target sequence
acaatttttttcaatttcatc

SEQ ID NO: 22674 - DNA, 21 bp, Artificial sequence
  SiRNA target sequence
caatttttttcaatttcatct

SEQ ID NO: 22675 - DNA, 21 bp, Artificial sequence
  SiRNA target sequence
aatttttttcaatttcatctt

SEQ ID NO: 22676 - DNA, 21 bp, Artificial sequence
  SiRNA target sequence
atttttttcaatttcatcttt

SEQ ID NO: 22677 - DNA, 21 bp, Artificial sequence
  SiRNA target sequence
tttttttcaatttcatctttt

SEQ ID NO: 22678 - DNA, 21 bp, Artificial sequence
  SiRNA target sequence
ttttttcaatttcatcttttt

SEQ ID NO: 22679 - DNA, 21 bp, Artificial sequence
  SiRNA target sequence
tttttcaatttcatctttttt

SEQ ID NO: 22680 - DNA, 21 bp, Artificial sequence
  SiRNA target sequence
ttttcaatttcatcttttttc

SEQ ID NO: 22681 - DNA, 21 bp, Artificial sequence
  SiRNA target sequence
tttcaatttcatcttttttcg

SEQ ID NO: 22682 - DNA, 21 bp, Artificial sequence
  SiRNA target sequence
ttcaatttcatcttttttcga

SEQ ID NO: 22683 - DNA, 21 bp, Artificial sequence
  SiRNA target sequence
tcaatttcatcttttttcgaa

SEQ ID NO: 22684 - DNA, 21 bp, Artificial sequence
  SiRNA target sequence
caatttcatcttttttcgaat

SEQ ID NO: 22685 - DNA, 21 bp, Artificial sequence
  SiRNA target sequence
aatttcatcttttttcgaatt

SEQ ID NO: 22686 - DNA, 21 bp, Artificial sequence
  SiRNA target sequence
atttcatcttttttcgaattt

SEQ ID NO: 22687 - DNA, 21 bp, Artificial sequence
  SiRNA target sequence
tttcatcttttttcgaatttt

SEQ ID NO: 22688 - DNA, 21 bp, Artificial sequence
  SiRNA target sequence
ttcatcttttttcgaattttc

SEQ ID NO: 22689 - DNA, 21 bp, Artificial sequence
  SiRNA target sequence
tcatcttttttcgaattttct

SEQ ID NO: 22690 - DNA, 21 bp, Artificial sequence
  SiRNA target sequence
catcttttttcgaattttctt

SEQ ID NO: 22691 - DNA, 21 bp, Artificial sequence
  SiRNA target sequence
atcttttttcgaattttcttc

SEQ ID NO: 22692 - DNA, 21 bp, Artificial sequence
  SiRNA target sequence
tcttttttcgaattttcttcg

SEQ ID NO: 22693 - DNA, 21 bp, Artificial sequence
  SiRNA target sequence
cttttttcgaattttcttcgg

SEQ ID NO: 22694 - DNA, 21 bp, Artificial sequence
  SiRNA target sequence
ttttttcgaattttcttcggc

SEQ ID NO: 22695 - DNA, 21 bp, Artificial sequence
  SiRNA target sequence
tttttcgaattttcttcggct

SEQ ID NO: 22696 - DNA, 21 bp, Artificial sequence
  SiRNA target sequence
ttttcgaattttcttcggctt

SEQ ID NO: 22697 - DNA, 21 bp, Artificial sequence
  SiRNA target sequence
tttcgaattttcttcggcttc

SEQ ID NO: 22698 - DNA, 21 bp, Artificial sequence
  SiRNA target sequence
ttcgaattttcttcggcttct

SEQ ID NO: 22699 - DNA, 21 bp, Artificial sequence
  SiRNA target sequence
tcgaattttcttcggcttctc

SEQ ID NO: 22700 - DNA, 21 bp, Artificial sequence
  SiRNA target sequence
cgaattttcttcggcttctcg

SEQ ID NO: 22701 - DNA, 21 bp, Artificial sequence
  SiRNA target sequence
gaattttcttcggcttctcgt

SEQ ID NO: 22702 - DNA, 21 bp, Artificial sequence
  SiRNA target sequence
aattttcttcggcttctcgta

SEQ ID NO: 22703 - DNA, 21 bp, Artificial sequence
  SiRNA target sequence
attttcttcggcttctcgtat

SEQ ID NO: 22704 - DNA, 21 bp, Artificial sequence
  SiRNA target sequence
ttttcttcggcttctcgtatc

SEQ ID NO: 22705 - DNA, 21 bp, Artificial sequence
  SiRNA target sequence
tttcttcggcttctcgtatca

SEQ ID NO: 22706 - DNA, 21 bp, Artificial sequence
  SiRNA target sequence
ttcttcggcttctcgtatcat

SEQ ID NO: 22707 - DNA, 21 bp, Artificial sequence
  SiRNA target sequence
tcttcggcttctcgtatcatt

SEQ ID NO: 22708 - DNA, 21 bp, Artificial sequence
  SiRNA target sequence
cttcggcttctcgtatcattt

SEQ ID NO: 22709 - DNA, 21 bp, Artificial sequence
  SiRNA target sequence
ttcggcttctcgtatcatttg

SEQ ID NO: 22710 - DNA, 21 bp, Artificial sequence
  SiRNA target sequence
tcggcttctcgtatcatttgc

SEQ ID NO: 22711 - DNA, 21 bp, Artificial sequence
  SiRNA target sequence
cggcttctcgtatcatttgcg

SEQ ID NO: 22712 - DNA, 21 bp, Artificial sequence
  SiRNA target sequence
ggcttctcgtatcatttgcga

SEQ ID NO: 22713 - DNA, 21 bp, Artificial sequence
  SiRNA target sequence
gcttctcgtatcatttgcgaa

SEQ ID NO: 22714 - DNA, 21 bp, Artificial sequence
  SiRNA target sequence
cttctcgtatcatttgcgaaa

SEQ ID NO: 22715 - DNA, 21 bp, Artificial sequence
  SiRNA target sequence
ttctcgtatcatttgcgaaat

SEQ ID NO: 22716 - DNA, 21 bp, Artificial sequence
  SiRNA target sequence
tctcgtatcatttgcgaaatt

SEQ ID NO: 22717 - DNA, 21 bp, Artificial sequence
  SiRNA target sequence
ctcgtatcatttgcgaaattt

SEQ ID NO: 22718 - DNA, 21 bp, Artificial sequence
  SiRNA target sequence
tcgtatcatttgcgaaatttc

SEQ ID NO: 22719 - DNA, 21 bp, Artificial sequence
  SiRNA target sequence
cgtatcatttgcgaaatttca

SEQ ID NO: 22720 - DNA, 21 bp, Artificial sequence
  SiRNA target sequence
gtatcatttgcgaaatttcac

SEQ ID NO: 22721 - DNA, 21 bp, Artificial sequence
  SiRNA target sequence
tatcatttgcgaaatttcacc

SEQ ID NO: 22722 - DNA, 21 bp, Artificial sequence
  SiRNA target sequence
atcatttgcgaaatttcacct

SEQ ID NO: 22723 - DNA, 21 bp, Artificial sequence
  SiRNA target sequence
tcatttgcgaaatttcacctt

SEQ ID NO: 22724 - DNA, 21 bp, Artificial sequence
  SiRNA target sequence
catttgcgaaatttcaccttc

SEQ ID NO: 22725 - DNA, 21 bp, Artificial sequence
  SiRNA target sequence
atttgcgaaatttcaccttca

SEQ ID NO: 22726 - DNA, 21 bp, Artificial sequence
  SiRNA target sequence
tttgcgaaatttcaccttcat

SEQ ID NO: 22727 - DNA, 21 bp, Artificial sequence
  SiRNA target sequence
ttgcgaaatttcaccttcatt

SEQ ID NO: 22728 - DNA, 21 bp, Artificial sequence
  SiRNA target sequence
tgcgaaatttcaccttcattt

SEQ ID NO: 22729 - DNA, 21 bp, Artificial sequence
  SiRNA target sequence
gcgaaatttcaccttcattta

SEQ ID NO: 22730 - DNA, 21 bp, Artificial sequence
  SiRNA target sequence
cgaaatttcaccttcatttaa

SEQ ID NO: 22731 - DNA, 21 bp, Artificial sequence
  SiRNA target sequence
gaaatttcaccttcatttaat

SEQ ID NO: 22732 - DNA, 21 bp, Artificial sequence
  SiRNA target sequence
aaatttcaccttcatttaatc

SEQ ID NO: 22733 - DNA, 21 bp, Artificial sequence
  SiRNA target sequence
aatttcaccttcatttaatcc

SEQ ID NO: 22734 - DNA, 21 bp, Artificial sequence
  SiRNA target sequence
atttcaccttcatttaatcca

SEQ ID NO: 22735 - DNA, 21 bp, Artificial sequence
  SiRNA target sequence
tttcaccttcatttaatccac

SEQ ID NO: 22736 - DNA, 21 bp, Artificial sequence
  SiRNA target sequence
ttcaccttcatttaatccact

SEQ ID NO: 22737 - DNA, 21 bp, Artificial sequence
  SiRNA target sequence
tcaccttcatttaatccactt

SEQ ID NO: 22738 - DNA, 21 bp, Artificial sequence
  SiRNA target sequence
caccttcatttaatccacttg

SEQ ID NO: 22739 - DNA, 21 bp, Artificial sequence
  SiRNA target sequence
accttcatttaatccacttga

SEQ ID NO: 22740 - DNA, 21 bp, Artificial sequence
  SiRNA target sequence
ccttcatttaatccacttgaa

SEQ ID NO: 22741 - DNA, 21 bp, Artificial sequence
  SiRNA target sequence
cttcatttaatccacttgaag

SEQ ID NO: 22742 - DNA, 21 bp, Artificial sequence
  SiRNA target sequence
ttcatttaatccacttgaagg

SEQ ID NO: 22743 - DNA, 21 bp, Artificial sequence
  SiRNA target sequence
tcatttaatccacttgaaggc

SEQ ID NO: 22744 - DNA, 21 bp, Artificial sequence
  SiRNA target sequence
catttaatccacttgaaggca

SEQ ID NO: 22745 - DNA, 21 bp, Artificial sequence
  SiRNA target sequence
atttaatccacttgaaggcac

SEQ ID NO: 22746 - DNA, 21 bp, Artificial sequence
  SiRNA target sequence
tttaatccacttgaaggcaca

SEQ ID NO: 22747 - DNA, 21 bp, Artificial sequence
  SiRNA target sequence
ttaatccacttgaaggcacaa

SEQ ID NO: 22748 - DNA, 21 bp, Artificial sequence
  SiRNA target sequence
taatccacttgaaggcacaat

SEQ ID NO: 22749 - DNA, 21 bp, Artificial sequence
  SiRNA target sequence
aatccacttgaaggcacaatt

SEQ ID NO: 22750 - DNA, 21 bp, Artificial sequence
  SiRNA target sequence
atccacttgaaggcacaattt

SEQ ID NO: 22751 - DNA, 21 bp, Artificial sequence
  SiRNA target sequence
tccacttgaaggcacaatttc

SEQ ID NO: 22752 - DNA, 21 bp, Artificial sequence
  SiRNA target sequence
ccacttgaaggcacaatttcg

SEQ ID NO: 22753 - DNA, 21 bp, Artificial sequence
  SiRNA target sequence
cacttgaaggcacaatttcga

SEQ ID NO: 22754 - DNA, 21 bp, Artificial sequence
  SiRNA target sequence
acttgaaggcacaatttcgat

SEQ ID NO: 22755 - DNA, 21 bp, Artificial sequence
  SiRNA target sequence
cttgaaggcacaatttcgatt

SEQ ID NO: 22756 - DNA, 21 bp, Artificial sequence
  SiRNA target sequence
ttgaaggcacaatttcgattt

SEQ ID NO: 22757 - DNA, 21 bp, Artificial sequence
  SiRNA target sequence
tgaaggcacaatttcgatttc

SEQ ID NO: 22758 - DNA, 21 bp, Artificial sequence
  SiRNA target sequence
gaaggcacaatttcgatttct

SEQ ID NO: 22759 - DNA, 21 bp, Artificial sequence
  SiRNA target sequence
aaggcacaatttcgatttctt

SEQ ID NO: 22760 - DNA, 21 bp, Artificial sequence
  SiRNA target sequence
aggcacaatttcgatttcttg

SEQ ID NO: 22761 - DNA, 21 bp, Artificial sequence
  SiRNA target sequence
ggcacaatttcgatttcttgc

SEQ ID NO: 22762 - DNA, 21 bp, Artificial sequence
  SiRNA target sequence
gcacaatttcgatttcttgct

SEQ ID NO: 22763 - DNA, 21 bp, Artificial sequence
  SiRNA target sequence
cacaatttcgatttcttgctt

SEQ ID NO: 22764 - DNA, 21 bp, Artificial sequence
  SiRNA target sequence
acaatttcgatttcttgcttt

SEQ ID NO: 22765 - DNA, 21 bp, Artificial sequence
  SiRNA target sequence
caatttcgatttcttgctttt

SEQ ID NO: 22766 - DNA, 21 bp, Artificial sequence
  SiRNA target sequence
aatttcgatttcttgcttttt

SEQ ID NO: 22767 - DNA, 21 bp, Artificial sequence
  SiRNA target sequence
atttcgatttcttgctttttt

SEQ ID NO: 22768 - DNA, 21 bp, Artificial sequence
  SiRNA target sequence
tttcgatttcttgcttttttt

SEQ ID NO: 22769 - DNA, 21 bp, Artificial sequence
  SiRNA target sequence
ttcgatttcttgctttttttt

SEQ ID NO: 22770 - DNA, 21 bp, Artificial sequence
  SiRNA target sequence
tcgatttcttgcttttttttc

SEQ ID NO: 22771 - DNA, 21 bp, Artificial sequence
  SiRNA target sequence
cgatttcttgcttttttttcg

SEQ ID NO: 22772 - DNA, 21 bp, Artificial sequence
  SiRNA target sequence
gatttcttgcttttttttcgt

SEQ ID NO: 22773 - DNA, 21 bp, Artificial sequence
  SiRNA target sequence
atttcttgcttttttttcgtt

SEQ ID NO: 22774 - DNA, 21 bp, Artificial sequence
  SiRNA target sequence
tttcttgcttttttttcgtta

SEQ ID NO: 22775 - DNA, 21 bp, Artificial sequence
  SiRNA target sequence
ttcttgcttttttttcgttat

SEQ ID NO: 22776 - DNA, 21 bp, Artificial sequence
  SiRNA target sequence
tcttgcttttttttcgttatc

SEQ ID NO: 22777 - DNA, 21 bp, Artificial sequence
  SiRNA target sequence
cttgcttttttttcgttatcc

SEQ ID NO: 22778 - DNA, 21 bp, Artificial sequence
  SiRNA target sequence
ttgcttttttttcgttatccc

SEQ ID NO: 22779 - DNA, 21 bp, Artificial sequence
  SiRNA target sequence
tgcttttttttcgttatcccg

SEQ ID NO: 22780 - DNA, 21 bp, Artificial sequence
  SiRNA target sequence
gcttttttttcgttatcccgt

SEQ ID NO: 22781 - DNA, 21 bp, Artificial sequence
  SiRNA target sequence
cttttttttcgttatcccgtc

SEQ ID NO: 22782 - DNA, 21 bp, Artificial sequence
  SiRNA target sequence
ttttttttcgttatcccgtct

SEQ ID NO: 22783 - DNA, 21 bp, Artificial sequence
  SiRNA target sequence
tttttttcgttatcccgtctt

SEQ ID NO: 22784 - DNA, 21 bp, Artificial sequence
  SiRNA target sequence
ttttttcgttatcccgtcttg

SEQ ID NO: 22785 - DNA, 21 bp, Artificial sequence
  SiRNA target sequence
tttttcgttatcccgtcttgc

SEQ ID NO: 22786 - DNA, 21 bp, Artificial sequence
  SiRNA target sequence
ttttcgttatcccgtcttgcg

SEQ ID NO: 22787 - DNA, 21 bp, Artificial sequence
  SiRNA target sequence
tttcgttatcccgtcttgcgc

SEQ ID NO: 22788 - DNA, 21 bp, Artificial sequence
  SiRNA target sequence
ttcgttatcccgtcttgcgca

SEQ ID NO: 22789 - DNA, 21 bp, Artificial sequence
  SiRNA target sequence
tcgttatcccgtcttgcgcag

SEQ ID NO: 22790 - DNA, 21 bp, Artificial sequence
  SiRNA target sequence
cgttatcccgtcttgcgcaga

SEQ ID NO: 22791 - DNA, 21 bp, Artificial sequence
  SiRNA target sequence
gttatcccgtcttgcgcagat

SEQ ID NO: 22792 - DNA, 21 bp, Artificial sequence
  SiRNA target sequence
ttatcccgtcttgcgcagata

SEQ ID NO: 22793 - DNA, 21 bp, Artificial sequence
  SiRNA target sequence
tatcccgtcttgcgcagatac

SEQ ID NO: 22794 - DNA, 21 bp, Artificial sequence
  SiRNA target sequence
atcccgtcttgcgcagatact

SEQ ID NO: 22795 - DNA, 21 bp, Artificial sequence
  SiRNA target sequence
tcccgtcttgcgcagatactt

SEQ ID NO: 22796 - DNA, 21 bp, Artificial sequence
  SiRNA target sequence
cccgtcttgcgcagatacttt

SEQ ID NO: 22797 - DNA, 21 bp, Artificial sequence
  SiRNA target sequence
ccgtcttgcgcagatactttg

SEQ ID NO: 22798 - DNA, 21 bp, Artificial sequence
  SiRNA target sequence
cgtcttgcgcagatactttgt

SEQ ID NO: 22799 - DNA, 21 bp, Artificial sequence
  SiRNA target sequence
gtcttgcgcagatactttgta

SEQ ID NO: 22800 - DNA, 21 bp, Artificial sequence
  SiRNA target sequence
tcttgcgcagatactttgtat

SEQ ID NO: 22801 - DNA, 21 bp, Artificial sequence
  SiRNA target sequence
cttgcgcagatactttgtata

SEQ ID NO: 22802 - DNA, 21 bp, Artificial sequence
  SiRNA target sequence
ttgcgcagatactttgtatat

SEQ ID NO: 22803 - DNA, 21 bp, Artificial sequence
  SiRNA target sequence
tgcgcagatactttgtatatt

SEQ ID NO: 22804 - DNA, 21 bp, Artificial sequence
  SiRNA target sequence
gcgcagatactttgtatattc

SEQ ID NO: 22805 - DNA, 21 bp, Artificial sequence
  SiRNA target sequence
cgcagatactttgtatattcc

SEQ ID NO: 22806 - DNA, 21 bp, Artificial sequence
  SiRNA target sequence
gcagatactttgtatattccg

SEQ ID NO: 22807 - DNA, 21 bp, Artificial sequence
  SiRNA target sequence
cagatactttgtatattccgt

SEQ ID NO: 22808 - DNA, 21 bp, Artificial sequence
  SiRNA target sequence
agatactttgtatattccgtt

SEQ ID NO: 22809 - DNA, 21 bp, Artificial sequence
  SiRNA target sequence
gatactttgtatattccgtta

SEQ ID NO: 22810 - DNA, 21 bp, Artificial sequence
  SiRNA target sequence
atactttgtatattccgttag

SEQ ID NO: 22811 - DNA, 21 bp, Artificial sequence
  SiRNA target sequence
tactttgtatattccgttagc

SEQ ID NO: 22812 - DNA, 21 bp, Artificial sequence
  SiRNA target sequence
actttgtatattccgttagca

SEQ ID NO: 22813 - DNA, 21 bp, Artificial sequence
  SiRNA target sequence
ctttgtatattccgttagcat

SEQ ID NO: 22814 - DNA, 21 bp, Artificial sequence
  SiRNA target sequence
tttgtatattccgttagcatc

SEQ ID NO: 22815 - DNA, 21 bp, Artificial sequence
  SiRNA target sequence
ttgtatattccgttagcatcg

SEQ ID NO: 22816 - DNA, 21 bp, Artificial sequence
  SiRNA target sequence
tgtatattccgttagcatcgg

SEQ ID NO: 22817 - DNA, 21 bp, Artificial sequence
  SiRNA target sequence
gtatattccgttagcatcggc

SEQ ID NO: 22818 - DNA, 21 bp, Artificial sequence
  SiRNA target sequence
tatattccgttagcatcggct

SEQ ID NO: 22819 - DNA, 21 bp, Artificial sequence
  SiRNA target sequence
atattccgttagcatcggctt

SEQ ID NO: 22820 - DNA, 21 bp, Artificial sequence
  SiRNA target sequence
tattccgttagcatcggcttc

SEQ ID NO: 22821 - DNA, 21 bp, Artificial sequence
  SiRNA target sequence
attccgttagcatcggcttca

SEQ ID NO: 22822 - DNA, 21 bp, Artificial sequence
  SiRNA target sequence
ttccgttagcatcggcttcaa

SEQ ID NO: 22823 - DNA, 21 bp, Artificial sequence
  SiRNA target sequence
tccgttagcatcggcttcaaa

SEQ ID NO: 22824 - DNA, 21 bp, Artificial sequence
  SiRNA target sequence
ccgttagcatcggcttcaaat

SEQ ID NO: 22825 - DNA, 21 bp, Artificial sequence
  SiRNA target sequence
cgttagcatcggcttcaaatg

SEQ ID NO: 22826 - DNA, 21 bp, Artificial sequence
  SiRNA target sequence
gttagcatcggcttcaaatgt

SEQ ID NO: 22827 - DNA, 21 bp, Artificial sequence
  SiRNA target sequence
ttagcatcggcttcaaatgta

SEQ ID NO: 22828 - DNA, 21 bp, Artificial sequence
  SiRNA target sequence
tagcatcggcttcaaatgtaa

SEQ ID NO: 22829 - DNA, 21 bp, Artificial sequence
  SiRNA target sequence
agcatcggcttcaaatgtaac

SEQ ID NO: 22830 - DNA, 21 bp, Artificial sequence
  SiRNA target sequence
gcatcggcttcaaatgtaaca

SEQ ID NO: 22831 - DNA, 21 bp, Artificial sequence
  SiRNA target sequence
catcggcttcaaatgtaacat

SEQ ID NO: 22832 - DNA, 21 bp, Artificial sequence
  SiRNA target sequence
atcggcttcaaatgtaacatc

SEQ ID NO: 22833 - DNA, 21 bp, Artificial sequence
  SiRNA target sequence
tcggcttcaaatgtaacatct

SEQ ID NO: 22834 - DNA, 21 bp, Artificial sequence
  SiRNA target sequence
cggcttcaaatgtaacatcta

SEQ ID NO: 22835 - DNA, 21 bp, Artificial sequence
  SiRNA target sequence
ggcttcaaatgtaacatctat

SEQ ID NO: 22836 - DNA, 21 bp, Artificial sequence
  SiRNA target sequence
gcttcaaatgtaacatctatc

SEQ ID NO: 22837 - DNA, 21 bp, Artificial sequence
  SiRNA target sequence
cttcaaatgtaacatctatct

SEQ ID NO: 22838 - DNA, 21 bp, Artificial sequence
  SiRNA target sequence
ttcaaatgtaacatctatctt

SEQ ID NO: 22839 - DNA, 21 bp, Artificial sequence
  SiRNA target sequence
tcaaatgtaacatctatcttt

SEQ ID NO: 22840 - DNA, 21 bp, Artificial sequence
  SiRNA target sequence
caaatgtaacatctatctttg

SEQ ID NO: 22841 - DNA, 21 bp, Artificial sequence
  SiRNA target sequence
aaatgtaacatctatctttgg

SEQ ID NO: 22842 - DNA, 21 bp, Artificial sequence
  SiRNA target sequence
aatgtaacatctatctttgga

SEQ ID NO: 22843 - DNA, 21 bp, Artificial sequence
  SiRNA target sequence
atgtaacatctatctttggaa

SEQ ID NO: 22844 - DNA, 21 bp, Artificial sequence
  SiRNA target sequence
tgtaacatctatctttggaat

SEQ ID NO: 22845 - DNA, 21 bp, Artificial sequence
  SiRNA target sequence
gtaacatctatctttggaata

SEQ ID NO: 22846 - DNA, 21 bp, Artificial sequence
  SiRNA target sequence
taacatctatctttggaatac

SEQ ID NO: 22847 - DNA, 21 bp, Artificial sequence
  SiRNA target sequence
aacatctatctttggaatacc

SEQ ID NO: 22848 - DNA, 21 bp, Artificial sequence
  SiRNA target sequence
acatctatctttggaatacct

SEQ ID NO: 22849 - DNA, 21 bp, Artificial sequence
  SiRNA target sequence
catctatctttggaatacctg

SEQ ID NO: 22850 - DNA, 21 bp, Artificial sequence
  SiRNA target sequence
atctatctttggaatacctgc

SEQ ID NO: 22851 - DNA, 21 bp, Artificial sequence
  SiRNA target sequence
tctatctttggaatacctgca

SEQ ID NO: 22852 - DNA, 21 bp, Artificial sequence
  SiRNA target sequence
ctatctttggaatacctgcag

SEQ ID NO: 22853 - DNA, 21 bp, Artificial sequence
  SiRNA target sequence
tatctttggaatacctgcagg

SEQ ID NO: 22854 - DNA, 21 bp, Artificial sequence
  SiRNA target sequence
atctttggaatacctgcaggt

SEQ ID NO: 22855 - DNA, 21 bp, Artificial sequence
  SiRNA target sequence
tctttggaatacctgcaggtg

SEQ ID NO: 22856 - DNA, 21 bp, Artificial sequence
  SiRNA target sequence
ctttggaatacctgcaggtgc

SEQ ID NO: 22857 - DNA, 21 bp, Artificial sequence
  SiRNA target sequence
tttggaatacctgcaggtgct

SEQ ID NO: 22858 - DNA, 21 bp, Artificial sequence
  SiRNA target sequence
ttggaatacctgcaggtgctt

SEQ ID NO: 22859 - DNA, 21 bp, Artificial sequence
  SiRNA target sequence
tggaatacctgcaggtgcttt

SEQ ID NO: 22860 - DNA, 21 bp, Artificial sequence
  SiRNA target sequence
ggaatacctgcaggtgcttta

SEQ ID NO: 22861 - DNA, 21 bp, Artificial sequence
  SiRNA target sequence
gaatacctgcaggtgctttag

SEQ ID NO: 22862 - DNA, 21 bp, Artificial sequence
  SiRNA target sequence
aatacctgcaggtgctttagg

SEQ ID NO: 22863 - DNA, 21 bp, Artificial sequence
  SiRNA target sequence
atacctgcaggtgctttagga

SEQ ID NO: 22864 - DNA, 21 bp, Artificial sequence
  SiRNA target sequence
tacctgcaggtgctttaggaa

SEQ ID NO: 22865 - DNA, 21 bp, Artificial sequence
  SiRNA target sequence
acctgcaggtgctttaggaat

SEQ ID NO: 22866 - DNA, 21 bp, Artificial sequence
  SiRNA target sequence
cctgcaggtgctttaggaatg

SEQ ID NO: 22867 - DNA, 21 bp, Artificial sequence
  SiRNA target sequence
ctgcaggtgctttaggaatgt

SEQ ID NO: 22868 - DNA, 21 bp, Artificial sequence
  SiRNA target sequence
tgcaggtgctttaggaatgtt

SEQ ID NO: 22869 - DNA, 21 bp, Artificial sequence
  SiRNA target sequence
gcaggtgctttaggaatgttt

SEQ ID NO: 22870 - DNA, 21 bp, Artificial sequence
  SiRNA target sequence
caggtgctttaggaatgtttt

SEQ ID NO: 22871 - DNA, 21 bp, Artificial sequence
  SiRNA target sequence
aggtgctttaggaatgttttt

SEQ ID NO: 22872 - DNA, 21 bp, Artificial sequence
  SiRNA target sequence
ggtgctttaggaatgtttttg

SEQ ID NO: 22873 - DNA, 21 bp, Artificial sequence
  SiRNA target sequence
gtgctttaggaatgtttttga

SEQ ID NO: 22874 - DNA, 21 bp, Artificial sequence
  SiRNA target sequence
tgctttaggaatgtttttgag

SEQ ID NO: 22875 - DNA, 21 bp, Artificial sequence
  SiRNA target sequence
gctttaggaatgtttttgagc

SEQ ID NO: 22876 - DNA, 21 bp, Artificial sequence
  SiRNA target sequence
ctttaggaatgtttttgagct

SEQ ID NO: 22877 - DNA, 21 bp, Artificial sequence
  SiRNA target sequence
tttaggaatgtttttgagctt

SEQ ID NO: 22878 - DNA, 21 bp, Artificial sequence
  SiRNA target sequence
ttaggaatgtttttgagcttt

SEQ ID NO: 22879 - DNA, 21 bp, Artificial sequence
  SiRNA target sequence
taggaatgtttttgagcttta

SEQ ID NO: 22880 - DNA, 21 bp, Artificial sequence
  SiRNA target sequence
aggaatgtttttgagctttat

SEQ ID NO: 22881 - DNA, 21 bp, Artificial sequence
  SiRNA target sequence
ggaatgtttttgagctttata

SEQ ID NO: 22882 - DNA, 21 bp, Artificial sequence
  SiRNA target sequence
gaatgtttttgagctttatag

SEQ ID NO: 22883 - DNA, 21 bp, Artificial sequence
  SiRNA target sequence
aatgtttttgagctttatagc

SEQ ID NO: 22884 - DNA, 21 bp, Artificial sequence
  SiRNA target sequence
atgtttttgagctttatagct

SEQ ID NO: 22885 - DNA, 21 bp, Artificial sequence
  SiRNA target sequence
tgtttttgagctttatagctc

SEQ ID NO: 22886 - DNA, 21 bp, Artificial sequence
  SiRNA target sequence
gtttttgagctttatagctcc

SEQ ID NO: 22887 - DNA, 21 bp, Artificial sequence
  SiRNA target sequence
tttttgagctttatagctcct

SEQ ID NO: 22888 - DNA, 21 bp, Artificial sequence
  SiRNA target sequence
ttttgagctttatagctccta

SEQ ID NO: 22889 - DNA, 21 bp, Artificial sequence
  SiRNA target sequence
tttgagctttatagctcctaa

SEQ ID NO: 22890 - DNA, 21 bp, Artificial sequence
  SiRNA target sequence
ttgagctttatagctcctaaa

SEQ ID NO: 22891 - DNA, 21 bp, Artificial sequence
  SiRNA target sequence
tgagctttatagctcctaaat

SEQ ID NO: 22892 - DNA, 21 bp, Artificial sequence
  SiRNA target sequence
gagctttatagctcctaaata

SEQ ID NO: 22893 - DNA, 21 bp, Artificial sequence
  SiRNA target sequence
agctttatagctcctaaatat

SEQ ID NO: 22894 - DNA, 21 bp, Artificial sequence
  SiRNA target sequence
gctttatagctcctaaatatt

SEQ ID NO: 22895 - DNA, 21 bp, Artificial sequence
  SiRNA target sequence
ctttatagctcctaaatattt

SEQ ID NO: 22896 - DNA, 21 bp, Artificial sequence
  SiRNA target sequence
tttatagctcctaaatattta

SEQ ID NO: 22897 - DNA, 21 bp, Artificial sequence
  SiRNA target sequence
ttatagctcctaaatatttat

SEQ ID NO: 22898 - DNA, 21 bp, Artificial sequence
  SiRNA target sequence
tatagctcctaaatatttatt

SEQ ID NO: 22899 - DNA, 21 bp, Artificial sequence
  SiRNA target sequence
atagctcctaaatatttattg

SEQ ID NO: 22900 - DNA, 21 bp, Artificial sequence
  SiRNA target sequence
tagctcctaaatatttattgt

SEQ ID NO: 22901 - DNA, 21 bp, Artificial sequence
  SiRNA target sequence
agctcctaaatatttattgtc

SEQ ID NO: 22902 - DNA, 21 bp, Artificial sequence
  SiRNA target sequence
gctcctaaatatttattgtct

SEQ ID NO: 22903 - DNA, 21 bp, Artificial sequence
  SiRNA target sequence
ctcctaaatatttattgtctt

SEQ ID NO: 22904 - DNA, 21 bp, Artificial sequence
  SiRNA target sequence
tcctaaatatttattgtcttt

SEQ ID NO: 22905 - DNA, 21 bp, Artificial sequence
  SiRNA target sequence
cctaaatatttattgtctttt

SEQ ID NO: 22906 - DNA, 21 bp, Artificial sequence
  SiRNA target sequence
ctaaatatttattgtctttta

SEQ ID NO: 22907 - DNA, 21 bp, Artificial sequence
  SiRNA target sequence
taaatatttattgtcttttac

SEQ ID NO: 22908 - DNA, 21 bp, Artificial sequence
  SiRNA target sequence
aaatatttattgtcttttacc

SEQ ID NO: 22909 - DNA, 21 bp, Artificial sequence
  SiRNA target sequence
aatatttattgtcttttacca

SEQ ID NO: 22910 - DNA, 21 bp, Artificial sequence
  SiRNA target sequence
atatttattgtcttttaccat

SEQ ID NO: 22911 - DNA, 21 bp, Artificial sequence
  SiRNA target sequence
tatttattgtcttttaccatc

SEQ ID NO: 22912 - DNA, 21 bp, Artificial sequence
  SiRNA target sequence
atttattgtcttttaccatct

SEQ ID NO: 22913 - DNA, 21 bp, Artificial sequence
  SiRNA target sequence
tttattgtcttttaccatctt

SEQ ID NO: 22914 - DNA, 21 bp, Artificial sequence
  SiRNA target sequence
ttattgtcttttaccatcttt

SEQ ID NO: 22915 - DNA, 21 bp, Artificial sequence
  SiRNA target sequence
tattgtcttttaccatctttc

SEQ ID NO: 22916 - DNA, 21 bp, Artificial sequence
  SiRNA target sequence
attgtcttttaccatctttct

SEQ ID NO: 22917 - DNA, 21 bp, Artificial sequence
  SiRNA target sequence
ttgtcttttaccatctttctt

SEQ ID NO: 22918 - DNA, 21 bp, Artificial sequence
  SiRNA target sequence
tgtcttttaccatctttcttt

SEQ ID NO: 22919 - DNA, 21 bp, Artificial sequence
  SiRNA target sequence
gtcttttaccatctttctttc

SEQ ID NO: 22920 - DNA, 21 bp, Artificial sequence
  SiRNA target sequence
tcttttaccatctttctttct

SEQ ID NO: 22921 - DNA, 21 bp, Artificial sequence
  SiRNA target sequence
cttttaccatctttctttctc

SEQ ID NO: 22922 - DNA, 21 bp, Artificial sequence
  SiRNA target sequence
ttttaccatctttctttctcc

SEQ ID NO: 22923 - DNA, 21 bp, Artificial sequence
  SiRNA target sequence
tttaccatctttctttctcct

SEQ ID NO: 22924 - DNA, 21 bp, Artificial sequence
  SiRNA target sequence
ttaccatctttctttctcctt

SEQ ID NO: 22925 - DNA, 21 bp, Artificial sequence
  SiRNA target sequence
taccatctttctttctccttg

SEQ ID NO: 22926 - DNA, 21 bp, Artificial sequence
  SiRNA target sequence
accatctttctttctccttga

SEQ ID NO: 22927 - DNA, 21 bp, Artificial sequence
  SiRNA target sequence
ccatctttctttctccttgat

SEQ ID NO: 22928 - DNA, 21 bp, Artificial sequence
  SiRNA target sequence
catctttctttctccttgata

SEQ ID NO: 22929 - DNA, 21 bp, Artificial sequence
  SiRNA target sequence
atctttctttctccttgatat

SEQ ID NO: 22930 - DNA, 21 bp, Artificial sequence
  SiRNA target sequence
tctttctttctccttgatata

SEQ ID NO: 22931 - DNA, 21 bp, Artificial sequence
  SiRNA target sequence
ctttctttctccttgatatat

SEQ ID NO: 22932 - DNA, 21 bp, Artificial sequence
  SiRNA target sequence
tttctttctccttgatatatt

SEQ ID NO: 22933 - DNA, 21 bp, Artificial sequence
  SiRNA target sequence
ttctttctccttgatatattc

SEQ ID NO: 22934 - DNA, 21 bp, Artificial sequence
  SiRNA target sequence
tctttctccttgatatattct

SEQ ID NO: 22935 - DNA, 21 bp, Artificial sequence
  SiRNA target sequence
ctttctccttgatatattcta

SEQ ID NO: 22936 - DNA, 21 bp, Artificial sequence
  SiRNA target sequence
tttctccttgatatattctaa

SEQ ID NO: 22937 - DNA, 21 bp, Artificial sequence
  SiRNA target sequence
ttctccttgatatattctaat

SEQ ID NO: 22938 - DNA, 21 bp, Artificial sequence
  SiRNA target sequence
tctccttgatatattctaata

SEQ ID NO: 22939 - DNA, 21 bp, Artificial sequence
  SiRNA target sequence
ctccttgatatattctaatat

SEQ ID NO: 22940 - DNA, 21 bp, Artificial sequence
  SiRNA target sequence
tccttgatatattctaatatc

SEQ ID NO: 22941 - DNA, 21 bp, Artificial sequence
  SiRNA target sequence
ccttgatatattctaatatct

SEQ ID NO: 22942 - DNA, 21 bp, Artificial sequence
  SiRNA target sequence
cttgatatattctaatatcta

SEQ ID NO: 22943 - DNA, 21 bp, Artificial sequence
  SiRNA target sequence
ttgatatattctaatatctac

SEQ ID NO: 22944 - DNA, 21 bp, Artificial sequence
  SiRNA target sequence
tgatatattctaatatctact

SEQ ID NO: 22945 - DNA, 21 bp, Artificial sequence
  SiRNA target sequence
gatatattctaatatctactt

SEQ ID NO: 22946 - DNA, 21 bp, Artificial sequence
  SiRNA target sequence
atatattctaatatctacttc

SEQ ID NO: 22947 - DNA, 21 bp, Artificial sequence
  SiRNA target sequence
tatattctaatatctacttcg

SEQ ID NO: 22948 - DNA, 21 bp, Artificial sequence
  SiRNA target sequence
atattctaatatctacttcgg

SEQ ID NO: 22949 - DNA, 21 bp, Artificial sequence
  SiRNA target sequence
tattctaatatctacttcgga

SEQ ID NO: 22950 - DNA, 21 bp, Artificial sequence
  SiRNA target sequence
attctaatatctacttcggat

SEQ ID NO: 22951 - DNA, 21 bp, Artificial sequence
  SiRNA target sequence
ttctaatatctacttcggatt

SEQ ID NO: 22952 - DNA, 21 bp, Artificial sequence
  SiRNA target sequence
tctaatatctacttcggattg

SEQ ID NO: 22953 - DNA, 21 bp, Artificial sequence
  SiRNA target sequence
ctaatatctacttcggattga

SEQ ID NO: 22954 - DNA, 21 bp, Artificial sequence
  SiRNA target sequence
taatatctacttcggattgat

SEQ ID NO: 22955 - DNA, 21 bp, Artificial sequence
  SiRNA target sequence
aatatctacttcggattgatt

SEQ ID NO: 22956 - DNA, 21 bp, Artificial sequence
  SiRNA target sequence
atatctacttcggattgatta

SEQ ID NO: 22957 - DNA, 21 bp, Artificial sequence
  SiRNA target sequence
tatctacttcggattgattat

SEQ ID NO: 22958 - DNA, 21 bp, Artificial sequence
  SiRNA target sequence
atctacttcggattgattatc

SEQ ID NO: 22959 - DNA, 21 bp, Artificial sequence
  SiRNA target sequence
tctacttcggattgattatct

SEQ ID NO: 22960 - DNA, 21 bp, Artificial sequence
  SiRNA target sequence
ctacttcggattgattatctt

SEQ ID NO: 22961 - DNA, 21 bp, Artificial sequence
  SiRNA target sequence
tacttcggattgattatcttc

SEQ ID NO: 22962 - DNA, 21 bp, Artificial sequence
  SiRNA target sequence
acttcggattgattatcttca

SEQ ID NO: 22963 - DNA, 21 bp, Artificial sequence
  SiRNA target sequence
cttcggattgattatcttcag

SEQ ID NO: 22964 - DNA, 21 bp, Artificial sequence
  SiRNA target sequence
ttcggattgattatcttcaga

SEQ ID NO: 22965 - DNA, 21 bp, Artificial sequence
  SiRNA target sequence
tcggattgattatcttcagag

SEQ ID NO: 22966 - DNA, 21 bp, Artificial sequence
  SiRNA target sequence
cggattgattatcttcagagg

SEQ ID NO: 22967 - DNA, 21 bp, Artificial sequence
  SiRNA target sequence
ggattgattatcttcagaggt

SEQ ID NO: 22968 - DNA, 21 bp, Artificial sequence
  SiRNA target sequence
gattgattatcttcagaggta

SEQ ID NO: 22969 - DNA, 21 bp, Artificial sequence
  SiRNA target sequence
attgattatcttcagaggtag

SEQ ID NO: 22970 - DNA, 21 bp, Artificial sequence
  SiRNA target sequence
ttgattatcttcagaggtaga

SEQ ID NO: 22971 - DNA, 21 bp, Artificial sequence
  SiRNA target sequence
tgattatcttcagaggtagaa

SEQ ID NO: 22972 - DNA, 21 bp, Artificial sequence
  SiRNA target sequence
gattatcttcagaggtagaaa

SEQ ID NO: 22973 - DNA, 21 bp, Artificial sequence
  SiRNA target sequence
attatcttcagaggtagaaaa

SEQ ID NO: 22974 - DNA, 21 bp, Artificial sequence
  SiRNA target sequence
ttatcttcagaggtagaaaaa

SEQ ID NO: 22975 - DNA, 21 bp, Artificial sequence
  SiRNA target sequence
tatcttcagaggtagaaaaac

SEQ ID NO: 22976 - DNA, 21 bp, Artificial sequence
  SiRNA target sequence
atcttcagaggtagaaaaact

SEQ ID NO: 22977 - DNA, 21 bp, Artificial sequence
  SiRNA target sequence
tcttcagaggtagaaaaactg

SEQ ID NO: 22978 - DNA, 21 bp, Artificial sequence
  SiRNA target sequence
cttcagaggtagaaaaactgt

SEQ ID NO: 22979 - DNA, 21 bp, Artificial sequence
  SiRNA target sequence
ttcagaggtagaaaaactgtg

SEQ ID NO: 22980 - DNA, 21 bp, Artificial sequence
  SiRNA target sequence
tcagaggtagaaaaactgtgt

SEQ ID NO: 22981 - DNA, 21 bp, Artificial sequence
  SiRNA target sequence
cagaggtagaaaaactgtgtg

SEQ ID NO: 22982 - DNA, 21 bp, Artificial sequence
  SiRNA target sequence
agaggtagaaaaactgtgtgt

SEQ ID NO: 22983 - DNA, 21 bp, Artificial sequence
  SiRNA target sequence
gaggtagaaaaactgtgtgtt

SEQ ID NO: 22984 - DNA, 21 bp, Artificial sequence
  SiRNA target sequence
aggtagaaaaactgtgtgttt

SEQ ID NO: 22985 - DNA, 21 bp, Artificial sequence
  SiRNA target sequence
ggtagaaaaactgtgtgtttc

SEQ ID NO: 22986 - DNA, 21 bp, Artificial sequence
  SiRNA target sequence
gtagaaaaactgtgtgtttcc

SEQ ID NO: 22987 - DNA, 21 bp, Artificial sequence
  SiRNA target sequence
tagaaaaactgtgtgtttcct

SEQ ID NO: 22988 - DNA, 21 bp, Artificial sequence
  SiRNA target sequence
agaaaaactgtgtgtttcctt

SEQ ID NO: 22989 - DNA, 21 bp, Artificial sequence
  SiRNA target sequence
gaaaaactgtgtgtttcctta

SEQ ID NO: 22990 - DNA, 21 bp, Artificial sequence
  SiRNA target sequence
aaaaactgtgtgtttccttaa

SEQ ID NO: 22991 - DNA, 21 bp, Artificial sequence
  SiRNA target sequence
aaaactgtgtgtttccttaaa

SEQ ID NO: 22992 - DNA, 21 bp, Artificial sequence
  SiRNA target sequence
aaactgtgtgtttccttaaat

SEQ ID NO: 22993 - DNA, 21 bp, Artificial sequence
  SiRNA target sequence
aactgtgtgtttccttaaatg

SEQ ID NO: 22994 - DNA, 21 bp, Artificial sequence
  SiRNA target sequence
actgtgtgtttccttaaatgg

SEQ ID NO: 22995 - DNA, 21 bp, Artificial sequence
  SiRNA target sequence
ctgtgtgtttccttaaatgga

SEQ ID NO: 22996 - DNA, 21 bp, Artificial sequence
  SiRNA target sequence
tgtgtgtttccttaaatggaa

SEQ ID NO: 22997 - DNA, 21 bp, Artificial sequence
  SiRNA target sequence
gtgtgtttccttaaatggaat

SEQ ID NO: 22998 - DNA, 21 bp, Artificial sequence
  SiRNA target sequence
tgtgtttccttaaatggaata

SEQ ID NO: 22999 - DNA, 21 bp, Artificial sequence
  SiRNA target sequence
gtgtttccttaaatggaatag

SEQ ID NO: 23000 - DNA, 21 bp, Artificial sequence
  SiRNA target sequence
tgtttccttaaatggaatagt

SEQ ID NO: 23001 - DNA, 21 bp, Artificial sequence
  SiRNA target sequence
gtttccttaaatggaatagta

SEQ ID NO: 23002 - DNA, 21 bp, Artificial sequence
  SiRNA target sequence
tttccttaaatggaatagtag

SEQ ID NO: 23003 - DNA, 21 bp, Artificial sequence
  SiRNA target sequence
ttccttaaatggaatagtaga

SEQ ID NO: 23004 - DNA, 21 bp, Artificial sequence
  SiRNA target sequence
tccttaaatggaatagtagaa

SEQ ID NO: 23005 - DNA, 21 bp, Artificial sequence
  SiRNA target sequence
ccttaaatggaatagtagaat

SEQ ID NO: 23006 - DNA, 21 bp, Artificial sequence
  SiRNA target sequence
cttaaatggaatagtagaatt

SEQ ID NO: 23007 - DNA, 21 bp, Artificial sequence
  SiRNA target sequence
ttaaatggaatagtagaattt

SEQ ID NO: 23008 - DNA, 21 bp, Artificial sequence
  SiRNA target sequence
taaatggaatagtagaatttc

SEQ ID NO: 23009 - DNA, 21 bp, Artificial sequence
  SiRNA target sequence
aaatggaatagtagaatttct

SEQ ID NO: 23010 - DNA, 21 bp, Artificial sequence
  SiRNA target sequence
aatggaatagtagaatttcta

SEQ ID NO: 23011 - DNA, 21 bp, Artificial sequence
  SiRNA target sequence
atggaatagtagaatttctat

SEQ ID NO: 23012 - DNA, 21 bp, Artificial sequence
  SiRNA target sequence
tggaatagtagaatttctatg

SEQ ID NO: 23013 - DNA, 21 bp, Artificial sequence
  SiRNA target sequence
ggaatagtagaatttctatga

SEQ ID NO: 23014 - DNA, 21 bp, Artificial sequence
  SiRNA target sequence
gaatagtagaatttctatgaa

SEQ ID NO: 23015 - DNA, 21 bp, Artificial sequence
  SiRNA target sequence
aatagtagaatttctatgaat

SEQ ID NO: 23016 - DNA, 21 bp, Artificial sequence
  SiRNA target sequence
atagtagaatttctatgaatt

SEQ ID NO: 23017 - DNA, 21 bp, Artificial sequence
  SiRNA target sequence
tagtagaatttctatgaatta

SEQ ID NO: 23018 - DNA, 21 bp, Artificial sequence
  SiRNA target sequence
agtagaatttctatgaattat

SEQ ID NO: 23019 - DNA, 21 bp, Artificial sequence
  SiRNA target sequence
gtagaatttctatgaattatc

SEQ ID NO: 23020 - DNA, 21 bp, Artificial sequence
  SiRNA target sequence
tagaatttctatgaattatct

SEQ ID NO: 23021 - DNA, 21 bp, Artificial sequence
  SiRNA target sequence
agaatttctatgaattatctt

SEQ ID NO: 23022 - DNA, 21 bp, Artificial sequence
  SiRNA target sequence
gaatttctatgaattatctta

SEQ ID NO: 23023 - DNA, 21 bp, Artificial sequence
  SiRNA target sequence
aatttctatgaattatcttat

SEQ ID NO: 23024 - DNA, 21 bp, Artificial sequence
  SiRNA target sequence
atttctatgaattatcttatt

SEQ ID NO: 23025 - DNA, 21 bp, Artificial sequence
  SiRNA target sequence
tttctatgaattatcttatta

SEQ ID NO: 23026 - DNA, 21 bp, Artificial sequence
  SiRNA target sequence
ttctatgaattatcttattaa

SEQ ID NO: 23027 - DNA, 21 bp, Artificial sequence
  SiRNA target sequence
tctatgaattatcttattaaa

SEQ ID NO: 23028 - DNA, 21 bp, Artificial sequence
  SiRNA target sequence
ctatgaattatcttattaaaa

SEQ ID NO: 23029 - DNA, 21 bp, Artificial sequence
  SiRNA target sequence
tatgaattatcttattaaaaa

SEQ ID NO: 23030 - DNA, 21 bp, Artificial sequence
  SiRNA target sequence
atgaattatcttattaaaaat

SEQ ID NO: 23031 - DNA, 21 bp, Artificial sequence
  SiRNA target sequence
tgaattatcttattaaaaatc

SEQ ID NO: 23032 - DNA, 21 bp, Artificial sequence
  SiRNA target sequence
gaattatcttattaaaaatcc

SEQ ID NO: 23033 - DNA, 21 bp, Artificial sequence
  SiRNA target sequence
aattatcttattaaaaatccc

SEQ ID NO: 23034 - DNA, 21 bp, Artificial sequence
  SiRNA target sequence
attatcttattaaaaatcccg

SEQ ID NO: 23035 - DNA, 21 bp, Artificial sequence
  SiRNA target sequence
ttatcttattaaaaatcccgc

SEQ ID NO: 23036 - DNA, 21 bp, Artificial sequence
  SiRNA target sequence
tatcttattaaaaatcccgcc

SEQ ID NO: 23037 - DNA, 21 bp, Artificial sequence
  SiRNA target sequence
atcttattaaaaatcccgccc

SEQ ID NO: 23038 - DNA, 21 bp, Artificial sequence
  SiRNA target sequence
tcttattaaaaatcccgccca

SEQ ID NO: 23039 - DNA, 21 bp, Artificial sequence
  SiRNA target sequence
cttattaaaaatcccgcccaa

SEQ ID NO: 23040 - DNA, 21 bp, Artificial sequence
  SiRNA target sequence
ttattaaaaatcccgcccaaa

SEQ ID NO: 23041 - DNA, 21 bp, Artificial sequence
  SiRNA target sequence
tattaaaaatcccgcccaaaa

SEQ ID NO: 23042 - DNA, 21 bp, Artificial sequence
  SiRNA target sequence
attaaaaatcccgcccaaaag

SEQ ID NO: 23043 - DNA, 21 bp, Artificial sequence
  SiRNA target sequence
ttaaaaatcccgcccaaaagc

SEQ ID NO: 23044 - DNA, 21 bp, Artificial sequence
  SiRNA target sequence
taaaaatcccgcccaaaagct

SEQ ID NO: 23045 - DNA, 21 bp, Artificial sequence
  SiRNA target sequence
aaaaatcccgcccaaaagctc

SEQ ID NO: 23046 - DNA, 21 bp, Artificial sequence
  SiRNA target sequence
aaaatcccgcccaaaagctct

SEQ ID NO: 23047 - DNA, 21 bp, Artificial sequence
  SiRNA target sequence
aaatcccgcccaaaagctcta

SEQ ID NO: 23048 - DNA, 21 bp, Artificial sequence
  SiRNA target sequence
aatcccgcccaaaagctctat

SEQ ID NO: 23049 - DNA, 21 bp, Artificial sequence
  SiRNA target sequence
atcccgcccaaaagctctata

SEQ ID NO: 23050 - DNA, 21 bp, Artificial sequence
  SiRNA target sequence
tcccgcccaaaagctctatac

SEQ ID NO: 23051 - DNA, 21 bp, Artificial sequence
  SiRNA target sequence
cccgcccaaaagctctatacc

SEQ ID NO: 23052 - DNA, 21 bp, Artificial sequence
  SiRNA target sequence
ccgcccaaaagctctatacct

SEQ ID NO: 23053 - DNA, 21 bp, Artificial sequence
  SiRNA target sequence
cgcccaaaagctctataccta

SEQ ID NO: 23054 - DNA, 21 bp, Artificial sequence
  SiRNA target sequence
gcccaaaagctctatacctaa

SEQ ID NO: 23055 - DNA, 21 bp, Artificial sequence
  SiRNA target sequence
cccaaaagctctatacctaaa

SEQ ID NO: 23056 - DNA, 21 bp, Artificial sequence
  SiRNA target sequence
ccaaaagctctatacctaaac

SEQ ID NO: 23057 - DNA, 21 bp, Artificial sequence
  SiRNA target sequence
caaaagctctatacctaaact

SEQ ID NO: 23058 - DNA, 21 bp, Artificial sequence
  SiRNA target sequence
aaaagctctatacctaaactc

SEQ ID NO: 23059 - DNA, 21 bp, Artificial sequence
  SiRNA target sequence
aaagctctatacctaaactca

SEQ ID NO: 23060 - DNA, 21 bp, Artificial sequence
  SiRNA target sequence
aagctctatacctaaactcaa

SEQ ID NO: 23061 - DNA, 21 bp, Artificial sequence
  SiRNA target sequence
agctctatacctaaactcaat

SEQ ID NO: 23062 - DNA, 21 bp, Artificial sequence
  SiRNA target sequence
gctctatacctaaactcaatg

SEQ ID NO: 23063 - DNA, 21 bp, Artificial sequence
  SiRNA target sequence
ctctatacctaaactcaatgg

SEQ ID NO: 23064 - DNA, 21 bp, Artificial sequence
  SiRNA target sequence
tctatacctaaactcaatggt

SEQ ID NO: 23065 - DNA, 21 bp, Artificial sequence
  SiRNA target sequence
ctatacctaaactcaatggta

SEQ ID NO: 23066 - DNA, 21 bp, Artificial sequence
  SiRNA target sequence
tatacctaaactcaatggtac

SEQ ID NO: 23067 - DNA, 21 bp, Artificial sequence
  SiRNA target sequence
atacctaaactcaatggtact

SEQ ID NO: 23068 - DNA, 21 bp, Artificial sequence
  SiRNA target sequence
tacctaaactcaatggtacta

SEQ ID NO: 23069 - DNA, 21 bp, Artificial sequence
  SiRNA target sequence
acctaaactcaatggtactac

SEQ ID NO: 23070 - DNA, 21 bp, Artificial sequence
  SiRNA target sequence
cctaaactcaatggtactaca

SEQ ID NO: 23071 - DNA, 21 bp, Artificial sequence
  SiRNA target sequence
ctaaactcaatggtactacat

SEQ ID NO: 23072 - DNA, 21 bp, Artificial sequence
  SiRNA target sequence
taaactcaatggtactacatc

SEQ ID NO: 23073 - DNA, 21 bp, Artificial sequence
  SiRNA target sequence
aaactcaatggtactacatcc

SEQ ID NO: 23074 - DNA, 21 bp, Artificial sequence
  SiRNA target sequence
aactcaatggtactacatcca

SEQ ID NO: 23075 - DNA, 21 bp, Artificial sequence
  SiRNA target sequence
actcaatggtactacatccaa

SEQ ID NO: 23076 - DNA, 21 bp, Artificial sequence
  SiRNA target sequence
ctcaatggtactacatccaat

SEQ ID NO: 23077 - DNA, 21 bp, Artificial sequence
  SiRNA target sequence
tcaatggtactacatccaata

SEQ ID NO: 23078 - DNA, 21 bp, Artificial sequence
  SiRNA target sequence
caatggtactacatccaataa

SEQ ID NO: 23079 - DNA, 21 bp, Artificial sequence
  SiRNA target sequence
aatggtactacatccaataat

SEQ ID NO: 23080 - DNA, 21 bp, Artificial sequence
  SiRNA target sequence
atggtactacatccaataata

SEQ ID NO: 23081 - DNA, 21 bp, Artificial sequence
  SiRNA target sequence
tggtactacatccaataatag

SEQ ID NO: 23082 - DNA, 21 bp, Artificial sequence
  SiRNA target sequence
ggtactacatccaataatagg

SEQ ID NO: 23083 - DNA, 21 bp, Artificial sequence
  SiRNA target sequence
gtactacatccaataatagga

SEQ ID NO: 23084 - DNA, 21 bp, Artificial sequence
  SiRNA target sequence
tactacatccaataataggac

SEQ ID NO: 23085 - DNA, 21 bp, Artificial sequence
  SiRNA target sequence
actacatccaataataggaca

SEQ ID NO: 23086 - DNA, 21 bp, Artificial sequence
  SiRNA target sequence
ctacatccaataataggacat

SEQ ID NO: 23087 - DNA, 21 bp, Artificial sequence
  SiRNA target sequence
tacatccaataataggacatc

SEQ ID NO: 23088 - DNA, 21 bp, Artificial sequence
  SiRNA target sequence
acatccaataataggacatct

SEQ ID NO: 23089 - DNA, 21 bp, Artificial sequence
  SiRNA target sequence
catccaataataggacatctt

SEQ ID NO: 23090 - DNA, 21 bp, Artificial sequence
  SiRNA target sequence
atccaataataggacatcttt

SEQ ID NO: 23091 - DNA, 21 bp, Artificial sequence
  SiRNA target sequence
tccaataataggacatctttt

SEQ ID NO: 23092 - DNA, 21 bp, Artificial sequence
  SiRNA target sequence
ccaataataggacatctttta

SEQ ID NO: 23093 - DNA, 21 bp, Artificial sequence
  SiRNA target sequence
caataataggacatcttttat

SEQ ID NO: 23094 - DNA, 21 bp, Artificial sequence
  SiRNA target sequence
aataataggacatcttttatt

SEQ ID NO: 23095 - DNA, 21 bp, Artificial sequence
  SiRNA target sequence
ataataggacatcttttattt

SEQ ID NO: 23096 - DNA, 21 bp, Artificial sequence
  SiRNA target sequence
taataggacatcttttatttt

SEQ ID NO: 23097 - DNA, 21 bp, Artificial sequence
  SiRNA target sequence
aataggacatcttttattttt

SEQ ID NO: 23098 - DNA, 21 bp, Artificial sequence
  SiRNA target sequence
ataggacatcttttatttttc

SEQ ID NO: 23099 - DNA, 21 bp, Artificial sequence
  SiRNA target sequence
taggacatcttttatttttcc

SEQ ID NO: 23100 - DNA, 21 bp, Artificial sequence
  SiRNA target sequence
aggacatcttttatttttcct

SEQ ID NO: 23101 - DNA, 21 bp, Artificial sequence
  SiRNA target sequence
ggacatcttttatttttcctt

SEQ ID NO: 23102 - DNA, 21 bp, Artificial sequence
  SiRNA target sequence
gacatcttttatttttccttc

SEQ ID NO: 23103 - DNA, 21 bp, Artificial sequence
  SiRNA target sequence
acatcttttatttttccttct

SEQ ID NO: 23104 - DNA, 21 bp, Artificial sequence
  SiRNA target sequence
catcttttatttttccttcta

SEQ ID NO: 23105 - DNA, 21 bp, Artificial sequence
  SiRNA target sequence
atcttttatttttccttctaa

SEQ ID NO: 23106 - DNA, 21 bp, Artificial sequence
  SiRNA target sequence
tcttttatttttccttctaac

SEQ ID NO: 23107 - DNA, 21 bp, Artificial sequence
  SiRNA target sequence
cttttatttttccttctaaca

SEQ ID NO: 23108 - DNA, 21 bp, Artificial sequence
  SiRNA target sequence
ttttatttttccttctaacac

SEQ ID NO: 23109 - DNA, 21 bp, Artificial sequence
  SiRNA target sequence
tttatttttccttctaacacg

SEQ ID NO: 23110 - DNA, 21 bp, Artificial sequence
  SiRNA target sequence
ttatttttccttctaacacgc

SEQ ID NO: 23111 - DNA, 21 bp, Artificial sequence
  SiRNA target sequence
tatttttccttctaacacgcc

SEQ ID NO: 23112 - DNA, 21 bp, Artificial sequence
  SiRNA target sequence
atttttccttctaacacgcct

SEQ ID NO: 23113 - DNA, 21 bp, Artificial sequence
  SiRNA target sequence
tttttccttctaacacgcctg

SEQ ID NO: 23114 - DNA, 21 bp, Artificial sequence
  SiRNA target sequence
ttttccttctaacacgcctgc

SEQ ID NO: 23115 - DNA, 21 bp, Artificial sequence
  SiRNA target sequence
tttccttctaacacgcctgct

SEQ ID NO: 23116 - DNA, 21 bp, Artificial sequence
  SiRNA target sequence
ttccttctaacacgcctgctt

SEQ ID NO: 23117 - DNA, 21 bp, Artificial sequence
  SiRNA target sequence
tccttctaacacgcctgcttg

SEQ ID NO: 23118 - DNA, 21 bp, Artificial sequence
  SiRNA target sequence
ccttctaacacgcctgcttgt

SEQ ID NO: 23119 - DNA, 21 bp, Artificial sequence
  SiRNA target sequence
cttctaacacgcctgcttgta

SEQ ID NO: 23120 - DNA, 21 bp, Artificial sequence
  SiRNA target sequence
ttctaacacgcctgcttgtag

SEQ ID NO: 23121 - DNA, 21 bp, Artificial sequence
  SiRNA target sequence
tctaacacgcctgcttgtaga

SEQ ID NO: 23122 - DNA, 21 bp, Artificial sequence
  SiRNA target sequence
ctaacacgcctgcttgtagag

SEQ ID NO: 23123 - DNA, 21 bp, Artificial sequence
  SiRNA target sequence
taacacgcctgcttgtagagc

SEQ ID NO: 23124 - DNA, 21 bp, Artificial sequence
  SiRNA target sequence
aacacgcctgcttgtagagcg

SEQ ID NO: 23125 - DNA, 21 bp, Artificial sequence
  SiRNA target sequence
acacgcctgcttgtagagcgg

SEQ ID NO: 23126 - DNA, 21 bp, Artificial sequence
  SiRNA target sequence
cacgcctgcttgtagagcggc

SEQ ID NO: 23127 - DNA, 21 bp, Artificial sequence
  SiRNA target sequence
acgcctgcttgtagagcggcc

SEQ ID NO: 23128 - DNA, 21 bp, Artificial sequence
  SiRNA target sequence
cgcctgcttgtagagcggccc

SEQ ID NO: 23129 - DNA, 21 bp, Artificial sequence
  SiRNA target sequence
gcctgcttgtagagcggcccc

SEQ ID NO: 23130 - DNA, 21 bp, Artificial sequence
  SiRNA target sequence
cctgcttgtagagcggcccct

SEQ ID NO: 23131 - DNA, 21 bp, Artificial sequence
  SiRNA target sequence
ctgcttgtagagcggcccctt

SEQ ID NO: 23132 - DNA, 21 bp, Artificial sequence
  SiRNA target sequence
tgcttgtagagcggccccttt

SEQ ID NO: 23133 - DNA, 21 bp, Artificial sequence
  SiRNA target sequence
gcttgtagagcggccccttta

SEQ ID NO: 23134 - DNA, 21 bp, Artificial sequence
  SiRNA target sequence
cttgtagagcggcccctttag

SEQ ID NO: 23135 - DNA, 21 bp, Artificial sequence
  SiRNA target sequence
ttgtagagcggcccctttagc

SEQ ID NO: 23136 - DNA, 21 bp, Artificial sequence
  SiRNA target sequence
tgtagagcggcccctttagca

SEQ ID NO: 23137 - DNA, 21 bp, Artificial sequence
  SiRNA target sequence
gtagagcggcccctttagcaa

SEQ ID NO: 23138 - DNA, 21 bp, Artificial sequence
  SiRNA target sequence
tagagcggcccctttagcaac

SEQ ID NO: 23139 - DNA, 21 bp, Artificial sequence
  SiRNA target sequence
agagcggcccctttagcaaca

SEQ ID NO: 23140 - DNA, 21 bp, Artificial sequence
  SiRNA target sequence
gagcggcccctttagcaacag

SEQ ID NO: 23141 - DNA, 21 bp, Artificial sequence
  SiRNA target sequence
agcggcccctttagcaacagc

SEQ ID NO: 23142 - DNA, 21 bp, Artificial sequence
  SiRNA target sequence
gcggcccctttagcaacagct

SEQ ID NO: 23143 - DNA, 21 bp, Artificial sequence
  SiRNA target sequence
cggcccctttagcaacagctt

SEQ ID NO: 23144 - DNA, 21 bp, Artificial sequence
  SiRNA target sequence
ggcccctttagcaacagcttc

SEQ ID NO: 23145 - DNA, 21 bp, Artificial sequence
  SiRNA target sequence
gcccctttagcaacagcttca

SEQ ID NO: 23146 - DNA, 21 bp, Artificial sequence
  SiRNA target sequence
cccctttagcaacagcttcat

SEQ ID NO: 23147 - DNA, 21 bp, Artificial sequence
  SiRNA target sequence
ccctttagcaacagcttcatc

SEQ ID NO: 23148 - DNA, 21 bp, Artificial sequence
  SiRNA target sequence
cctttagcaacagcttcatct

SEQ ID NO: 23149 - DNA, 21 bp, Artificial sequence
  SiRNA target sequence
ctttagcaacagcttcatctg

SEQ ID NO: 23150 - DNA, 21 bp, Artificial sequence
  SiRNA target sequence
tttagcaacagcttcatctgg

SEQ ID NO: 23151 - DNA, 21 bp, Artificial sequence
  SiRNA target sequence
ttagcaacagcttcatctgga

SEQ ID NO: 23152 - DNA, 21 bp, Artificial sequence
  SiRNA target sequence
tagcaacagcttcatctggat

SEQ ID NO: 23153 - DNA, 21 bp, Artificial sequence
  SiRNA target sequence
agcaacagcttcatctggatt

SEQ ID NO: 23154 - DNA, 21 bp, Artificial sequence
  SiRNA target sequence
gcaacagcttcatctggatta

SEQ ID NO: 23155 - DNA, 21 bp, Artificial sequence
  SiRNA target sequence
caacagcttcatctggattaa

SEQ ID NO: 23156 - DNA, 21 bp, Artificial sequence
  SiRNA target sequence
aacagcttcatctggattaat

SEQ ID NO: 23157 - DNA, 21 bp, Artificial sequence
  SiRNA target sequence
acagcttcatctggattaata

SEQ ID NO: 23158 - DNA, 21 bp, Artificial sequence
  SiRNA target sequence
cagcttcatctggattaatat

SEQ ID NO: 23159 - DNA, 21 bp, Artificial sequence
  SiRNA target sequence
agcttcatctggattaatatt

SEQ ID NO: 23160 - DNA, 21 bp, Artificial sequence
  SiRNA target sequence
gcttcatctggattaatattt

SEQ ID NO: 23161 - DNA, 21 bp, Artificial sequence
  SiRNA target sequence
cttcatctggattaatatttg

SEQ ID NO: 23162 - DNA, 21 bp, Artificial sequence
  SiRNA target sequence
ttcatctggattaatatttgt

SEQ ID NO: 23163 - DNA, 21 bp, Artificial sequence
  SiRNA target sequence
tcatctggattaatatttgta

SEQ ID NO: 23164 - DNA, 21 bp, Artificial sequence
  SiRNA target sequence
catctggattaatatttgtag

SEQ ID NO: 23165 - DNA, 21 bp, Artificial sequence
  SiRNA target sequence
atctggattaatatttgtaga

SEQ ID NO: 23166 - DNA, 21 bp, Artificial sequence
  SiRNA target sequence
tctggattaatatttgtagaa

SEQ ID NO: 23167 - DNA, 21 bp, Artificial sequence
  SiRNA target sequence
ctggattaatatttgtagaag

SEQ ID NO: 23168 - DNA, 21 bp, Artificial sequence
  SiRNA target sequence
tggattaatatttgtagaagg

SEQ ID NO: 23169 - DNA, 21 bp, Artificial sequence
  SiRNA target sequence
ggattaatatttgtagaaggc

SEQ ID NO: 23170 - DNA, 21 bp, Artificial sequence
  SiRNA target sequence
gattaatatttgtagaaggct

SEQ ID NO: 23171 - DNA, 21 bp, Artificial sequence
  SiRNA target sequence
attaatatttgtagaaggctc

SEQ ID NO: 23172 - DNA, 21 bp, Artificial sequence
  SiRNA target sequence
ttaatatttgtagaaggctcg

SEQ ID NO: 23173 - DNA, 21 bp, Artificial sequence
  SiRNA target sequence
taatatttgtagaaggctcga

SEQ ID NO: 23174 - DNA, 21 bp, Artificial sequence
  SiRNA target sequence
aatatttgtagaaggctcgat

SEQ ID NO: 23175 - DNA, 21 bp, Artificial sequence
  SiRNA target sequence
atatttgtagaaggctcgata

SEQ ID NO: 23176 - DNA, 21 bp, Artificial sequence
  SiRNA target sequence
tatttgtagaaggctcgatac

SEQ ID NO: 23177 - DNA, 21 bp, Artificial sequence
  SiRNA target sequence
atttgtagaaggctcgatacc

SEQ ID NO: 23178 - DNA, 21 bp, Artificial sequence
  SiRNA target sequence
tttgtagaaggctcgatacca

SEQ ID NO: 23179 - DNA, 21 bp, Artificial sequence
  SiRNA target sequence
ttgtagaaggctcgataccaa

SEQ ID NO: 23180 - DNA, 21 bp, Artificial sequence
  SiRNA target sequence
tgtagaaggctcgataccaaa

SEQ ID NO: 23181 - DNA, 21 bp, Artificial sequence
  SiRNA target sequence
gtagaaggctcgataccaaaa

SEQ ID NO: 23182 - DNA, 21 bp, Artificial sequence
  SiRNA target sequence
tagaaggctcgataccaaaaa

SEQ ID NO: 23183 - DNA, 21 bp, Artificial sequence
  SiRNA target sequence
agaaggctcgataccaaaaat

SEQ ID NO: 23184 - DNA, 21 bp, Artificial sequence
  SiRNA target sequence
gaaggctcgataccaaaaatc

SEQ ID NO: 23185 - DNA, 21 bp, Artificial sequence
  SiRNA target sequence
aaggctcgataccaaaaatct

SEQ ID NO: 23186 - DNA, 21 bp, Artificial sequence
  SiRNA target sequence
aggctcgataccaaaaatctt

SEQ ID NO: 23187 - DNA, 21 bp, Artificial sequence
  SiRNA target sequence
ggctcgataccaaaaatcttc

SEQ ID NO: 23188 - DNA, 21 bp, Artificial sequence
  SiRNA target sequence
gctcgataccaaaaatcttct

SEQ ID NO: 23189 - DNA, 21 bp, Artificial sequence
  SiRNA target sequence
ctcgataccaaaaatcttctt

SEQ ID NO: 23190 - DNA, 21 bp, Artificial sequence
  SiRNA target sequence
tcgataccaaaaatcttctta

SEQ ID NO: 23191 - DNA, 21 bp, Artificial sequence
  SiRNA target sequence
cgataccaaaaatcttcttaa

SEQ ID NO: 23192 - DNA, 21 bp, Artificial sequence
  SiRNA target sequence
gataccaaaaatcttcttaac

SEQ ID NO: 23193 - DNA, 21 bp, Artificial sequence
  SiRNA target sequence
ataccaaaaatcttcttaaca

SEQ ID NO: 23194 - DNA, 21 bp, Artificial sequence
  SiRNA target sequence
taccaaaaatcttcttaacaa

SEQ ID NO: 23195 - DNA, 21 bp, Artificial sequence
  SiRNA target sequence
accaaaaatcttcttaacaag

SEQ ID NO: 23196 - DNA, 21 bp, Artificial sequence
  SiRNA target sequence
ccaaaaatcttcttaacaagt

SEQ ID NO: 23197 - DNA, 21 bp, Artificial sequence
  SiRNA target sequence
caaaaatcttcttaacaagtt

SEQ ID NO: 23198 - DNA, 21 bp, Artificial sequence
  SiRNA target sequence
aaaaatcttcttaacaagttt

SEQ ID NO: 23199 - DNA, 21 bp, Artificial sequence
  SiRNA target sequence
aaaatcttcttaacaagtttt

SEQ ID NO: 23200 - DNA, 21 bp, Artificial sequence
  SiRNA target sequence
aaatcttcttaacaagttttc

SEQ ID NO: 23201 - DNA, 21 bp, Artificial sequence
  SiRNA target sequence
aatcttcttaacaagttttct

SEQ ID NO: 23202 - DNA, 21 bp, Artificial sequence
  SiRNA target sequence
atcttcttaacaagttttcta

SEQ ID NO: 23203 - DNA, 21 bp, Artificial sequence
  SiRNA target sequence
tcttcttaacaagttttctaa

SEQ ID NO: 23204 - DNA, 21 bp, Artificial sequence
  SiRNA target sequence
cttcttaacaagttttctaac

SEQ ID NO: 23205 - DNA, 21 bp, Artificial sequence
  SiRNA target sequence
ttcttaacaagttttctaaca

SEQ ID NO: 23206 - DNA, 21 bp, Artificial sequence
  SiRNA target sequence
tcttaacaagttttctaacat

SEQ ID NO: 23207 - DNA, 21 bp, Artificial sequence
  SiRNA target sequence
cttaacaagttttctaacata

SEQ ID NO: 23208 - DNA, 21 bp, Artificial sequence
  SiRNA target sequence
ttaacaagttttctaacatac

SEQ ID NO: 23209 - DNA, 21 bp, Artificial sequence
  SiRNA target sequence
taacaagttttctaacatacg

SEQ ID NO: 23210 - DNA, 21 bp, Artificial sequence
  SiRNA target sequence
aacaagttttctaacatacgg

SEQ ID NO: 23211 - DNA, 21 bp, Artificial sequence
  SiRNA target sequence
acaagttttctaacatacggc

SEQ ID NO: 23212 - DNA, 21 bp, Artificial sequence
  SiRNA target sequence
caagttttctaacatacggca

SEQ ID NO: 23213 - DNA, 21 bp, Artificial sequence
  SiRNA target sequence
aagttttctaacatacggcat

SEQ ID NO: 23214 - DNA, 21 bp, Artificial sequence
  SiRNA target sequence
agttttctaacatacggcatt

SEQ ID NO: 23215 - DNA, 21 bp, Artificial sequence
  SiRNA target sequence
gttttctaacatacggcattc

SEQ ID NO: 23216 - DNA, 21 bp, Artificial sequence
  SiRNA target sequence
ttttctaacatacggcattcg

SEQ ID NO: 23217 - DNA, 21 bp, Artificial sequence
  SiRNA target sequence
tttctaacatacggcattcgt

SEQ ID NO: 23218 - DNA, 21 bp, Artificial sequence
  SiRNA target sequence
ttctaacatacggcattcgtg

SEQ ID NO: 23219 - DNA, 21 bp, Artificial sequence
  SiRNA target sequence
tctaacatacggcattcgtgt

SEQ ID NO: 23220 - DNA, 21 bp, Artificial sequence
  SiRNA target sequence
ctaacatacggcattcgtgtc

SEQ ID NO: 23221 - DNA, 21 bp, Artificial sequence
  SiRNA target sequence
taacatacggcattcgtgtca

SEQ ID NO: 23222 - DNA, 21 bp, Artificial sequence
  SiRNA target sequence
aacatacggcattcgtgtcat

SEQ ID NO: 23223 - DNA, 21 bp, Artificial sequence
  SiRNA target sequence
acatacggcattcgtgtcatt

SEQ ID NO: 23224 - DNA, 21 bp, Artificial sequence
  SiRNA target sequence
catacggcattcgtgtcattc

SEQ ID NO: 23225 - DNA, 21 bp, Artificial sequence
  SiRNA target sequence
atacggcattcgtgtcattcc

SEQ ID NO: 23226 - DNA, 21 bp, Artificial sequence
  SiRNA target sequence
tacggcattcgtgtcattcca

SEQ ID NO: 23227 - DNA, 21 bp, Artificial sequence
  SiRNA target sequence
acggcattcgtgtcattccac

SEQ ID NO: 23228 - DNA, 21 bp, Artificial sequence
  SiRNA target sequence
cggcattcgtgtcattccacc

SEQ ID NO: 23229 - DNA, 21 bp, Artificial sequence
  SiRNA target sequence
ggcattcgtgtcattccaccc

SEQ ID NO: 23230 - DNA, 21 bp, Artificial sequence
  SiRNA target sequence
gcattcgtgtcattccaccca

SEQ ID NO: 23231 - DNA, 21 bp, Artificial sequence
  SiRNA target sequence
cattcgtgtcattccacccac

SEQ ID NO: 23232 - DNA, 21 bp, Artificial sequence
  SiRNA target sequence
attcgtgtcattccacccaca

SEQ ID NO: 23233 - DNA, 21 bp, Artificial sequence
  SiRNA target sequence
ttcgtgtcattccacccacaa

SEQ ID NO: 23234 - DNA, 21 bp, Artificial sequence
  SiRNA target sequence
tcgtgtcattccacccacaag

SEQ ID NO: 23235 - DNA, 21 bp, Artificial sequence
  SiRNA target sequence
cgtgtcattccacccacaagt

SEQ ID NO: 23236 - DNA, 21 bp, Artificial sequence
  SiRNA target sequence
gtgtcattccacccacaagta

SEQ ID NO: 23237 - DNA, 21 bp, Artificial sequence
  SiRNA target sequence
tgtcattccacccacaagtat

SEQ ID NO: 23238 - DNA, 21 bp, Artificial sequence
  SiRNA target sequence
gtcattccacccacaagtata

SEQ ID NO: 23239 - DNA, 21 bp, Artificial sequence
  SiRNA target sequence
tcattccacccacaagtataa

SEQ ID NO: 23240 - DNA, 21 bp, Artificial sequence
  SiRNA target sequence
cattccacccacaagtataac

SEQ ID NO: 23241 - DNA, 21 bp, Artificial sequence
  SiRNA target sequence
attccacccacaagtataacg

SEQ ID NO: 23242 - DNA, 21 bp, Artificial sequence
  SiRNA target sequence
ttccacccacaagtataacgt

SEQ ID NO: 23243 - DNA, 21 bp, Artificial sequence
  SiRNA target sequence
tccacccacaagtataacgtg

SEQ ID NO: 23244 - DNA, 21 bp, Artificial sequence
  SiRNA target sequence
ccacccacaagtataacgtgt

SEQ ID NO: 23245 - DNA, 21 bp, Artificial sequence
  SiRNA target sequence
cacccacaagtataacgtgtt

SEQ ID NO: 23246 - DNA, 21 bp, Artificial sequence
  SiRNA target sequence
acccacaagtataacgtgttt

SEQ ID NO: 23247 - DNA, 21 bp, Artificial sequence
  SiRNA target sequence
cccacaagtataacgtgttta

SEQ ID NO: 23248 - DNA, 21 bp, Artificial sequence
  SiRNA target sequence
ccacaagtataacgtgtttaa

SEQ ID NO: 23249 - DNA, 21 bp, Artificial sequence
  SiRNA target sequence
cacaagtataacgtgtttaat

SEQ ID NO: 23250 - DNA, 21 bp, Artificial sequence
  SiRNA target sequence
acaagtataacgtgtttaata

SEQ ID NO: 23251 - DNA, 21 bp, Artificial sequence
  SiRNA target sequence
caagtataacgtgtttaatat

SEQ ID NO: 23252 - DNA, 21 bp, Artificial sequence
  SiRNA target sequence
aagtataacgtgtttaatatc

SEQ ID NO: 23253 - DNA, 21 bp, Artificial sequence
  SiRNA target sequence
agtataacgtgtttaatatca

SEQ ID NO: 23254 - DNA, 21 bp, Artificial sequence
  SiRNA target sequence
gtataacgtgtttaatatcac

SEQ ID NO: 23255 - DNA, 21 bp, Artificial sequence
  SiRNA target sequence
tataacgtgtttaatatcact

SEQ ID NO: 23256 - DNA, 21 bp, Artificial sequence
  SiRNA target sequence
ataacgtgtttaatatcactt

SEQ ID NO: 23257 - DNA, 21 bp, Artificial sequence
  SiRNA target sequence
taacgtgtttaatatcacttt

SEQ ID NO: 23258 - DNA, 21 bp, Artificial sequence
  SiRNA target sequence
aacgtgtttaatatcactttt

SEQ ID NO: 23259 - DNA, 21 bp, Artificial sequence
  SiRNA target sequence
acgtgtttaatatcactttta

SEQ ID NO: 23260 - DNA, 21 bp, Artificial sequence
  SiRNA target sequence
cgtgtttaatatcacttttag

SEQ ID NO: 23261 - DNA, 21 bp, Artificial sequence
  SiRNA target sequence
gtgtttaatatcacttttagt

SEQ ID NO: 23262 - DNA, 21 bp, Artificial sequence
  SiRNA target sequence
tgtttaatatcacttttagtt

SEQ ID NO: 23263 - DNA, 21 bp, Artificial sequence
  SiRNA target sequence
gtttaatatcacttttagtta

SEQ ID NO: 23264 - DNA, 21 bp, Artificial sequence
  SiRNA target sequence
tttaatatcacttttagttat

SEQ ID NO: 23265 - DNA, 21 bp, Artificial sequence
  SiRNA target sequence
ttaatatcacttttagttata

SEQ ID NO: 23266 - DNA, 21 bp, Artificial sequence
  SiRNA target sequence
taatatcacttttagttatat

SEQ ID NO: 23267 - DNA, 21 bp, Artificial sequence
  SiRNA target sequence
aatatcacttttagttatatt

SEQ ID NO: 23268 - DNA, 21 bp, Artificial sequence
  SiRNA target sequence
atatcacttttagttatattg

SEQ ID NO: 23269 - DNA, 21 bp, Artificial sequence
  SiRNA target sequence
tatcacttttagttatattgg

SEQ ID NO: 23270 - DNA, 21 bp, Artificial sequence
  SiRNA target sequence
atcacttttagttatattggc

SEQ ID NO: 23271 - DNA, 21 bp, Artificial sequence
  SiRNA target sequence
tcacttttagttatattggca

SEQ ID NO: 23272 - DNA, 21 bp, Artificial sequence
  SiRNA target sequence
cacttttagttatattggcat

SEQ ID NO: 23273 - DNA, 21 bp, Artificial sequence
  SiRNA target sequence
acttttagttatattggcatc

SEQ ID NO: 23274 - DNA, 21 bp, Artificial sequence
  SiRNA target sequence
cttttagttatattggcatct

SEQ ID NO: 23275 - DNA, 21 bp, Artificial sequence
  SiRNA target sequence
ttttagttatattggcatctc

SEQ ID NO: 23276 - DNA, 21 bp, Artificial sequence
  SiRNA target sequence
tttagttatattggcatctct

SEQ ID NO: 23277 - DNA, 21 bp, Artificial sequence
  SiRNA target sequence
ttagttatattggcatctcta

SEQ ID NO: 23278 - DNA, 21 bp, Artificial sequence
  SiRNA target sequence
tagttatattggcatctctaa

SEQ ID NO: 23279 - DNA, 21 bp, Artificial sequence
  SiRNA target sequence
agttatattggcatctctaat

SEQ ID NO: 23280 - DNA, 21 bp, Artificial sequence
  SiRNA target sequence
gttatattggcatctctaata

SEQ ID NO: 23281 - DNA, 21 bp, Artificial sequence
  SiRNA target sequence
ttatattggcatctctaatag

SEQ ID NO: 23282 - DNA, 21 bp, Artificial sequence
  SiRNA target sequence
tatattggcatctctaatagc

SEQ ID NO: 23283 - DNA, 21 bp, Artificial sequence
  SiRNA target sequence
atattggcatctctaatagct

SEQ ID NO: 23284 - DNA, 21 bp, Artificial sequence
  SiRNA target sequence
tattggcatctctaatagctt

SEQ ID NO: 23285 - DNA, 21 bp, Artificial sequence
  SiRNA target sequence
attggcatctctaatagcttt

SEQ ID NO: 23286 - DNA, 21 bp, Artificial sequence
  SiRNA target sequence
ttggcatctctaatagcttta

SEQ ID NO: 23287 - DNA, 21 bp, Artificial sequence
  SiRNA target sequence
tggcatctctaatagctttaa

SEQ ID NO: 23288 - DNA, 21 bp, Artificial sequence
  SiRNA target sequence
ggcatctctaatagctttaag

SEQ ID NO: 23289 - DNA, 21 bp, Artificial sequence
  SiRNA target sequence
gcatctctaatagctttaaga

SEQ ID NO: 23290 - DNA, 21 bp, Artificial sequence
  SiRNA target sequence
catctctaatagctttaagac

SEQ ID NO: 23291 - DNA, 21 bp, Artificial sequence
  SiRNA target sequence
atctctaatagctttaagaca

SEQ ID NO: 23292 - DNA, 21 bp, Artificial sequence
  SiRNA target sequence
tctctaatagctttaagacag

SEQ ID NO: 23293 - DNA, 21 bp, Artificial sequence
  SiRNA target sequence
ctctaatagctttaagacagg

SEQ ID NO: 23294 - DNA, 21 bp, Artificial sequence
  SiRNA target sequence
tctaatagctttaagacaggg

SEQ ID NO: 23295 - DNA, 21 bp, Artificial sequence
  SiRNA target sequence
ctaatagctttaagacagggg

SEQ ID NO: 23296 - DNA, 21 bp, Artificial sequence
  SiRNA target sequence
taatagctttaagacaggggt

SEQ ID NO: 23297 - DNA, 21 bp, Artificial sequence
  SiRNA target sequence
aatagctttaagacaggggtt

SEQ ID NO: 23298 - DNA, 21 bp, Artificial sequence
  SiRNA target sequence
atagctttaagacaggggttt

SEQ ID NO: 23299 - DNA, 21 bp, Artificial sequence
  SiRNA target sequence
tagctttaagacaggggttta

SEQ ID NO: 23300 - DNA, 21 bp, Artificial sequence
  SiRNA target sequence
agctttaagacaggggtttat

SEQ ID NO: 23301 - DNA, 21 bp, Artificial sequence
  SiRNA target sequence
gctttaagacaggggtttatt

SEQ ID NO: 23302 - DNA, 21 bp, Artificial sequence
  SiRNA target sequence
ctttaagacaggggtttattg

SEQ ID NO: 23303 - DNA, 21 bp, Artificial sequence
  SiRNA target sequence
tttaagacaggggtttattgt

SEQ ID NO: 23304 - DNA, 21 bp, Artificial sequence
  SiRNA target sequence
ttaagacaggggtttattgtt

SEQ ID NO: 23305 - DNA, 21 bp, Artificial sequence
  SiRNA target sequence
taagacaggggtttattgttt

SEQ ID NO: 23306 - DNA, 21 bp, Artificial sequence
  SiRNA target sequence
aagacaggggtttattgtttt

SEQ ID NO: 23307 - DNA, 21 bp, Artificial sequence
  SiRNA target sequence
agacaggggtttattgttttg

SEQ ID NO: 23308 - DNA, 21 bp, Artificial sequence
  SiRNA target sequence
gacaggggtttattgttttgt

SEQ ID NO: 23309 - DNA, 21 bp, Artificial sequence
  SiRNA target sequence
acaggggtttattgttttgtc

SEQ ID NO: 23310 - DNA, 21 bp, Artificial sequence
  SiRNA target sequence
caggggtttattgttttgtct

SEQ ID NO: 23311 - DNA, 21 bp, Artificial sequence
  SiRNA target sequence
aggggtttattgttttgtcta

SEQ ID NO: 23312 - DNA, 21 bp, Artificial sequence
  SiRNA target sequence
ggggtttattgttttgtctat

SEQ ID NO: 23313 - DNA, 21 bp, Artificial sequence
  SiRNA target sequence
gggtttattgttttgtctatt

SEQ ID NO: 23314 - DNA, 21 bp, Artificial sequence
  SiRNA target sequence
ggtttattgttttgtctatta

SEQ ID NO: 23315 - DNA, 21 bp, Artificial sequence
  SiRNA target sequence
gtttattgttttgtctattaa

SEQ ID NO: 23316 - DNA, 21 bp, Artificial sequence
  SiRNA target sequence
tttattgttttgtctattaac

SEQ ID NO: 23317 - DNA, 21 bp, Artificial sequence
  SiRNA target sequence
ttattgttttgtctattaact

SEQ ID NO: 23318 - DNA, 21 bp, Artificial sequence
  SiRNA target sequence
tattgttttgtctattaactt

SEQ ID NO: 23319 - DNA, 21 bp, Artificial sequence
  SiRNA target sequence
attgttttgtctattaacttt

SEQ ID NO: 23320 - DNA, 21 bp, Artificial sequence
  SiRNA target sequence
ttgttttgtctattaactttt

SEQ ID NO: 23321 - DNA, 21 bp, Artificial sequence
  SiRNA target sequence
tgttttgtctattaacttttt

SEQ ID NO: 23322 - DNA, 21 bp, Artificial sequence
  SiRNA target sequence
gttttgtctattaactttttt

SEQ ID NO: 23323 - DNA, 21 bp, Artificial sequence
  SiRNA target sequence
ttttgtctattaacttttttg

SEQ ID NO: 23324 - DNA, 21 bp, Artificial sequence
  SiRNA target sequence
tttgtctattaacttttttgt

SEQ ID NO: 23325 - DNA, 21 bp, Artificial sequence
  SiRNA target sequence
ttgtctattaacttttttgta

SEQ ID NO: 23326 - DNA, 21 bp, Artificial sequence
  SiRNA target sequence
tgtctattaacttttttgtaa

SEQ ID NO: 23327 - DNA, 21 bp, Artificial sequence
  SiRNA target sequence
gtctattaacttttttgtaat

SEQ ID NO: 23328 - DNA, 21 bp, Artificial sequence
  SiRNA target sequence
tctattaacttttttgtaatt

SEQ ID NO: 23329 - DNA, 21 bp, Artificial sequence
  SiRNA target sequence
ctattaacttttttgtaattt

SEQ ID NO: 23330 - DNA, 21 bp, Artificial sequence
  SiRNA target sequence
tattaacttttttgtaatttt

SEQ ID NO: 23331 - DNA, 21 bp, Artificial sequence
  SiRNA target sequence
attaacttttttgtaattttt

SEQ ID NO: 23332 - DNA, 21 bp, Artificial sequence
  SiRNA target sequence
ttaacttttttgtaatttttt

SEQ ID NO: 23333 - DNA, 21 bp, Artificial sequence
  SiRNA target sequence
taacttttttgtaattttttc

SEQ ID NO: 23334 - DNA, 21 bp, Artificial sequence
  SiRNA target sequence
aacttttttgtaattttttca

SEQ ID NO: 23335 - DNA, 21 bp, Artificial sequence
  SiRNA target sequence
acttttttgtaattttttcaa

SEQ ID NO: 23336 - DNA, 21 bp, Artificial sequence
  SiRNA target sequence
cttttttgtaattttttcaaa

SEQ ID NO: 23337 - DNA, 21 bp, Artificial sequence
  SiRNA target sequence
ttttttgtaattttttcaaat

SEQ ID NO: 23338 - DNA, 21 bp, Artificial sequence
  SiRNA target sequence
tttttgtaattttttcaaatt

SEQ ID NO: 23339 - DNA, 21 bp, Artificial sequence
  SiRNA target sequence
ttttgtaattttttcaaattc

SEQ ID NO: 23340 - DNA, 21 bp, Artificial sequence
  SiRNA target sequence
tttgtaattttttcaaattcg

SEQ ID NO: 23341 - DNA, 21 bp, Artificial sequence
  SiRNA target sequence
ttgtaattttttcaaattcgt

SEQ ID NO: 23342 - DNA, 21 bp, Artificial sequence
  SiRNA target sequence
tgtaattttttcaaattcgtc

SEQ ID NO: 23343 - DNA, 21 bp, Artificial sequence
  SiRNA target sequence
gtaattttttcaaattcgtcg

SEQ ID NO: 23344 - DNA, 21 bp, Artificial sequence
  SiRNA target sequence
taattttttcaaattcgtcgc

SEQ ID NO: 23345 - DNA, 21 bp, Artificial sequence
  SiRNA target sequence
aattttttcaaattcgtcgcg

SEQ ID NO: 23346 - DNA, 21 bp, Artificial sequence
  SiRNA target sequence
attttttcaaattcgtcgcgt

SEQ ID NO: 23347 - DNA, 21 bp, Artificial sequence
  SiRNA target sequence
ttttttcaaattcgtcgcgtg

SEQ ID NO: 23348 - DNA, 21 bp, Artificial sequence
  SiRNA target sequence
tttttcaaattcgtcgcgtgt

SEQ ID NO: 23349 - DNA, 21 bp, Artificial sequence
  SiRNA target sequence
ttttcaaattcgtcgcgtgta

SEQ ID NO: 23350 - DNA, 21 bp, Artificial sequence
  SiRNA target sequence
tttcaaattcgtcgcgtgtaa

SEQ ID NO: 23351 - DNA, 21 bp, Artificial sequence
  SiRNA target sequence
ttcaaattcgtcgcgtgtaat

SEQ ID NO: 23352 - DNA, 21 bp, Artificial sequence
  SiRNA target sequence
tcaaattcgtcgcgtgtaatt

SEQ ID NO: 23353 - DNA, 21 bp, Artificial sequence
  SiRNA target sequence
caaattcgtcgcgtgtaatta

SEQ ID NO: 23354 - DNA, 21 bp, Artificial sequence
  SiRNA target sequence
aaattcgtcgcgtgtaattac

SEQ ID NO: 23355 - DNA, 21 bp, Artificial sequence
  SiRNA target sequence
aattcgtcgcgtgtaattacc

SEQ ID NO: 23356 - DNA, 21 bp, Artificial sequence
  SiRNA target sequence
attcgtcgcgtgtaattacct

SEQ ID NO: 23357 - DNA, 21 bp, Artificial sequence
  SiRNA target sequence
ttcgtcgcgtgtaattacctc

SEQ ID NO: 23358 - DNA, 21 bp, Artificial sequence
  SiRNA target sequence
tcgtcgcgtgtaattacctct

SEQ ID NO: 23359 - DNA, 21 bp, Artificial sequence
  SiRNA target sequence
cgtcgcgtgtaattacctctt

SEQ ID NO: 23360 - DNA, 21 bp, Artificial sequence
  SiRNA target sequence
gtcgcgtgtaattacctcttt

SEQ ID NO: 23361 - DNA, 21 bp, Artificial sequence
  SiRNA target sequence
tcgcgtgtaattacctctttt

SEQ ID NO: 23362 - DNA, 21 bp, Artificial sequence
  SiRNA target sequence
cgcgtgtaattacctctttta

SEQ ID NO: 23363 - DNA, 21 bp, Artificial sequence
  SiRNA target sequence
gcgtgtaattacctcttttaa

SEQ ID NO: 23364 - DNA, 21 bp, Artificial sequence
  SiRNA target sequence
cgtgtaattacctcttttaag

SEQ ID NO: 23365 - DNA, 21 bp, Artificial sequence
  SiRNA target sequence
gtgtaattacctcttttaagt

SEQ ID NO: 23366 - DNA, 21 bp, Artificial sequence
  SiRNA target sequence
tgtaattacctcttttaagtg

SEQ ID NO: 23367 - DNA, 21 bp, Artificial sequence
  SiRNA target sequence
gtaattacctcttttaagtga

SEQ ID NO: 23368 - DNA, 21 bp, Artificial sequence
  SiRNA target sequence
taattacctcttttaagtgat

SEQ ID NO: 23369 - DNA, 21 bp, Artificial sequence
  SiRNA target sequence
aattacctcttttaagtgata

SEQ ID NO: 23370 - DNA, 21 bp, Artificial sequence
  SiRNA target sequence
attacctcttttaagtgataa

SEQ ID NO: 23371 - DNA, 21 bp, Artificial sequence
  SiRNA target sequence
ttacctcttttaagtgataat

SEQ ID NO: 23372 - DNA, 21 bp, Artificial sequence
  SiRNA target sequence
tacctcttttaagtgataatt

SEQ ID NO: 23373 - DNA, 21 bp, Artificial sequence
  SiRNA target sequence
acctcttttaagtgataattc

SEQ ID NO: 23374 - DNA, 21 bp, Artificial sequence
  SiRNA target sequence
cctcttttaagtgataattct

SEQ ID NO: 23375 - DNA, 21 bp, Artificial sequence
  SiRNA target sequence
ctcttttaagtgataattctt

SEQ ID NO: 23376 - DNA, 21 bp, Artificial sequence
  SiRNA target sequence
tcttttaagtgataattcttt

SEQ ID NO: 23377 - DNA, 21 bp, Artificial sequence
  SiRNA target sequence
cttttaagtgataattctttt

SEQ ID NO: 23378 - DNA, 21 bp, Artificial sequence
  SiRNA target sequence
ttttaagtgataattcttttt

SEQ ID NO: 23379 - DNA, 21 bp, Artificial sequence
  SiRNA target sequence
tttaagtgataattcttttta

SEQ ID NO: 23380 - DNA, 21 bp, Artificial sequence
  SiRNA target sequence
ttaagtgataattctttttac

SEQ ID NO: 23381 - DNA, 21 bp, Artificial sequence
  SiRNA target sequence
taagtgataattctttttact

SEQ ID NO: 23382 - DNA, 21 bp, Artificial sequence
  SiRNA target sequence
aagtgataattctttttacta

SEQ ID NO: 23383 - DNA, 21 bp, Artificial sequence
  SiRNA target sequence
agtgataattctttttactat

SEQ ID NO: 23384 - DNA, 21 bp, Artificial sequence
  SiRNA target sequence
gtgataattctttttactatc

SEQ ID NO: 23385 - DNA, 21 bp, Artificial sequence
  SiRNA target sequence
tgataattctttttactatcg

SEQ ID NO: 23386 - DNA, 21 bp, Artificial sequence
  SiRNA target sequence
gataattctttttactatcgt

SEQ ID NO: 23387 - DNA, 21 bp, Artificial sequence
  SiRNA target sequence
ataattctttttactatcgtt

SEQ ID NO: 23388 - DNA, 21 bp, Artificial sequence
  SiRNA target sequence
taattctttttactatcgtta

SEQ ID NO: 23389 - DNA, 21 bp, Artificial sequence
  SiRNA target sequence
aattctttttactatcgttat

SEQ ID NO: 23390 - DNA, 21 bp, Artificial sequence
  SiRNA target sequence
attctttttactatcgttata

SEQ ID NO: 23391 - DNA, 21 bp, Artificial sequence
  SiRNA target sequence
ttctttttactatcgttataa

SEQ ID NO: 23392 - DNA, 21 bp, Artificial sequence
  SiRNA target sequence
tctttttactatcgttataaa

SEQ ID NO: 23393 - DNA, 21 bp, Artificial sequence
  SiRNA target sequence
ctttttactatcgttataaat

SEQ ID NO: 23394 - DNA, 21 bp, Artificial sequence
  SiRNA target sequence
tttttactatcgttataaata

SEQ ID NO: 23395 - DNA, 21 bp, Artificial sequence
  SiRNA target sequence
ttttactatcgttataaatat

SEQ ID NO: 23396 - DNA, 21 bp, Artificial sequence
  SiRNA target sequence
tttactatcgttataaatata

SEQ ID NO: 23397 - DNA, 21 bp, Artificial sequence
  SiRNA target sequence
ttactatcgttataaatatac

SEQ ID NO: 23398 - DNA, 21 bp, Artificial sequence
  SiRNA target sequence
tactatcgttataaatatacg

SEQ ID NO: 23399 - DNA, 21 bp, Artificial sequence
  SiRNA target sequence
actatcgttataaatatacgg

SEQ ID NO: 23400 - DNA, 21 bp, Artificial sequence
  SiRNA target sequence
ctatcgttataaatatacgga

SEQ ID NO: 23401 - DNA, 21 bp, Artificial sequence
  SiRNA target sequence
tatcgttataaatatacggaa

SEQ ID NO: 23402 - DNA, 21 bp, Artificial sequence
  SiRNA target sequence
atcgttataaatatacggaat

SEQ ID NO: 23403 - DNA, 21 bp, Artificial sequence
  SiRNA target sequence
tcgttataaatatacggaata

SEQ ID NO: 23404 - DNA, 21 bp, Artificial sequence
  SiRNA target sequence
cgttataaatatacggaatat

SEQ ID NO: 23405 - DNA, 21 bp, Artificial sequence
  SiRNA target sequence
gttataaatatacggaatatt

SEQ ID NO: 23406 - DNA, 21 bp, Artificial sequence
  SiRNA target sequence
ttataaatatacggaatatta

SEQ ID NO: 23407 - DNA, 21 bp, Artificial sequence
  SiRNA target sequence
tataaatatacggaatattaa

SEQ ID NO: 23408 - DNA, 21 bp, Artificial sequence
  SiRNA target sequence
ataaatatacggaatattaat

SEQ ID NO: 23409 - DNA, 21 bp, Artificial sequence
  SiRNA target sequence
taaatatacggaatattaatt

SEQ ID NO: 23410 - DNA, 21 bp, Artificial sequence
  SiRNA target sequence
aaatatacggaatattaattt

SEQ ID NO: 23411 - DNA, 21 bp, Artificial sequence
  SiRNA target sequence
aatatacggaatattaatttc

SEQ ID NO: 23412 - DNA, 21 bp, Artificial sequence
  SiRNA target sequence
atatacggaatattaatttca

SEQ ID NO: 23413 - DNA, 21 bp, Artificial sequence
  SiRNA target sequence
tatacggaatattaatttcag

SEQ ID NO: 23414 - DNA, 21 bp, Artificial sequence
  SiRNA target sequence
atacggaatattaatttcaga

SEQ ID NO: 23415 - DNA, 21 bp, Artificial sequence
  SiRNA target sequence
tacggaatattaatttcagac

SEQ ID NO: 23416 - DNA, 21 bp, Artificial sequence
  SiRNA target sequence
acggaatattaatttcagacg

SEQ ID NO: 23417 - DNA, 21 bp, Artificial sequence
  SiRNA target sequence
cggaatattaatttcagacga

SEQ ID NO: 23418 - DNA, 21 bp, Artificial sequence
  SiRNA target sequence
ggaatattaatttcagacgaa

SEQ ID NO: 23419 - DNA, 21 bp, Artificial sequence
  SiRNA target sequence
gaatattaatttcagacgaaa

SEQ ID NO: 23420 - DNA, 21 bp, Artificial sequence
  SiRNA target sequence
aatattaatttcagacgaaag

SEQ ID NO: 23421 - DNA, 21 bp, Artificial sequence
  SiRNA target sequence
atattaatttcagacgaaaga

SEQ ID NO: 23422 - DNA, 21 bp, Artificial sequence
  SiRNA target sequence
tattaatttcagacgaaagat

SEQ ID NO: 23423 - DNA, 21 bp, Artificial sequence
  SiRNA target sequence
attaatttcagacgaaagatt

SEQ ID NO: 23424 - DNA, 21 bp, Artificial sequence
  SiRNA target sequence
ttaatttcagacgaaagatta

SEQ ID NO: 23425 - DNA, 21 bp, Artificial sequence
  SiRNA target sequence
taatttcagacgaaagattag

SEQ ID NO: 23426 - DNA, 21 bp, Artificial sequence
  SiRNA target sequence
aatttcagacgaaagattaga

SEQ ID NO: 23427 - DNA, 21 bp, Artificial sequence
  SiRNA target sequence
atttcagacgaaagattagac

SEQ ID NO: 23428 - DNA, 21 bp, Artificial sequence
  SiRNA target sequence
tttcagacgaaagattagacg

SEQ ID NO: 23429 - DNA, 21 bp, Artificial sequence
  SiRNA target sequence
ttcagacgaaagattagacga

SEQ ID NO: 23430 - DNA, 21 bp, Artificial sequence
  SiRNA target sequence
tcagacgaaagattagacgac

SEQ ID NO: 23431 - DNA, 21 bp, Artificial sequence
  SiRNA target sequence
cagacgaaagattagacgaca

SEQ ID NO: 23432 - DNA, 21 bp, Artificial sequence
  SiRNA target sequence
agacgaaagattagacgacag

SEQ ID NO: 23433 - DNA, 21 bp, Artificial sequence
  SiRNA target sequence
gacgaaagattagacgacagt

SEQ ID NO: 23434 - DNA, 21 bp, Artificial sequence
  SiRNA target sequence
acgaaagattagacgacagtt

SEQ ID NO: 23435 - DNA, 21 bp, Artificial sequence
  SiRNA target sequence
cgaaagattagacgacagttc

SEQ ID NO: 23436 - DNA, 21 bp, Artificial sequence
  SiRNA target sequence
gaaagattagacgacagttct

SEQ ID NO: 23437 - DNA, 21 bp, Artificial sequence
  SiRNA target sequence
aaagattagacgacagttctt

SEQ ID NO: 23438 - DNA, 21 bp, Artificial sequence
  SiRNA target sequence
aagattagacgacagttcttt

SEQ ID NO: 23439 - DNA, 21 bp, Artificial sequence
  SiRNA target sequence
agattagacgacagttctttt

SEQ ID NO: 23440 - DNA, 21 bp, Artificial sequence
  SiRNA target sequence
gattagacgacagttcttttt

SEQ ID NO: 23441 - DNA, 21 bp, Artificial sequence
  SiRNA target sequence
attagacgacagttctttttt

SEQ ID NO: 23442 - DNA, 21 bp, Artificial sequence
  SiRNA target sequence
ttagacgacagttcttttttc

SEQ ID NO: 23443 - DNA, 21 bp, Artificial sequence
  SiRNA target sequence
tagacgacagttcttttttca

SEQ ID NO: 23444 - DNA, 21 bp, Artificial sequence
  SiRNA target sequence
agacgacagttcttttttcat

SEQ ID NO: 23445 - DNA, 21 bp, Artificial sequence
  SiRNA target sequence
gacgacagttcttttttcatt

SEQ ID NO: 23446 - DNA, 21 bp, Artificial sequence
  SiRNA target sequence
acgacagttcttttttcattt

SEQ ID NO: 23447 - DNA, 21 bp, Artificial sequence
  SiRNA target sequence
cgacagttcttttttcatttt

SEQ ID NO: 23448 - DNA, 21 bp, Artificial sequence
  SiRNA target sequence
gacagttcttttttcattttt

SEQ ID NO: 23449 - DNA, 21 bp, Artificial sequence
  SiRNA target sequence
acagttcttttttcatttttt

SEQ ID NO: 23450 - DNA, 21 bp, Artificial sequence
  SiRNA target sequence
cagttcttttttcattttttc

SEQ ID NO: 23451 - DNA, 21 bp, Artificial sequence
  SiRNA target sequence
agttcttttttcattttttcc

SEQ ID NO: 23452 - DNA, 21 bp, Artificial sequence
  SiRNA target sequence
gttcttttttcattttttccg

SEQ ID NO: 23453 - DNA, 21 bp, Artificial sequence
  SiRNA target sequence
ttcttttttcattttttccgc

SEQ ID NO: 23454 - DNA, 21 bp, Artificial sequence
  SiRNA target sequence
tcttttttcattttttccgct

SEQ ID NO: 23455 - DNA, 21 bp, Artificial sequence
  SiRNA target sequence
cttttttcattttttccgctg

SEQ ID NO: 23456 - DNA, 21 bp, Artificial sequence
  SiRNA target sequence
ttttttcattttttccgctgc

SEQ ID NO: 23457 - DNA, 21 bp, Artificial sequence
  SiRNA target sequence
tttttcattttttccgctgct

SEQ ID NO: 23458 - DNA, 21 bp, Artificial sequence
  SiRNA target sequence
ttttcattttttccgctgctt

SEQ ID NO: 23459 - DNA, 21 bp, Artificial sequence
  SiRNA target sequence
tttcattttttccgctgcttc

SEQ ID NO: 23460 - DNA, 21 bp, Artificial sequence
  SiRNA target sequence
ttcattttttccgctgcttct

SEQ ID NO: 23461 - DNA, 21 bp, Artificial sequence
  SiRNA target sequence
tcattttttccgctgcttctt

SEQ ID NO: 23462 - DNA, 21 bp, Artificial sequence
  SiRNA target sequence
cattttttccgctgcttcttt

SEQ ID NO: 23463 - DNA, 21 bp, Artificial sequence
  SiRNA target sequence
attttttccgctgcttcttta

SEQ ID NO: 23464 - DNA, 21 bp, Artificial sequence
  SiRNA target sequence
ttttttccgctgcttctttaa

SEQ ID NO: 23465 - DNA, 21 bp, Artificial sequence
  SiRNA target sequence
tttttccgctgcttctttaat

SEQ ID NO: 23466 - DNA, 21 bp, Artificial sequence
  SiRNA target sequence
ttttccgctgcttctttaatt

SEQ ID NO: 23467 - DNA, 21 bp, Artificial sequence
  SiRNA target sequence
tttccgctgcttctttaattc

SEQ ID NO: 23468 - DNA, 21 bp, Artificial sequence
  SiRNA target sequence
ttccgctgcttctttaattct

SEQ ID NO: 23469 - DNA, 21 bp, Artificial sequence
  SiRNA target sequence
tccgctgcttctttaattcta

SEQ ID NO: 23470 - DNA, 21 bp, Artificial sequence
  SiRNA target sequence
ccgctgcttctttaattctat

SEQ ID NO: 23471 - DNA, 21 bp, Artificial sequence
  SiRNA target sequence
cgctgcttctttaattctatt

SEQ ID NO: 23472 - DNA, 21 bp, Artificial sequence
  SiRNA target sequence
gctgcttctttaattctatta

SEQ ID NO: 23473 - DNA, 21 bp, Artificial sequence
  SiRNA target sequence
ctgcttctttaattctattat

SEQ ID NO: 23474 - DNA, 21 bp, Artificial sequence
  SiRNA target sequence
tgcttctttaattctattata

SEQ ID NO: 23475 - DNA, 21 bp, Artificial sequence
  SiRNA target sequence
gcttctttaattctattataa

SEQ ID NO: 23476 - DNA, 21 bp, Artificial sequence
  SiRNA target sequence
cttctttaattctattataac

SEQ ID NO: 23477 - DNA, 21 bp, Artificial sequence
  SiRNA target sequence
ttctttaattctattataaca

SEQ ID NO: 23478 - DNA, 21 bp, Artificial sequence
  SiRNA target sequence
tctttaattctattataacaa

SEQ ID NO: 23479 - DNA, 21 bp, Artificial sequence
  SiRNA target sequence
ctttaattctattataacaag

SEQ ID NO: 23480 - DNA, 21 bp, Artificial sequence
  SiRNA target sequence
tttaattctattataacaaga

SEQ ID NO: 23481 - DNA, 21 bp, Artificial sequence
  SiRNA target sequence
ttaattctattataacaagaa

SEQ ID NO: 23482 - DNA, 21 bp, Artificial sequence
  SiRNA target sequence
taattctattataacaagaat

SEQ ID NO: 23483 - DNA, 21 bp, Artificial sequence
  SiRNA target sequence
aattctattataacaagaatc

SEQ ID NO: 23484 - DNA, 21 bp, Artificial sequence
  SiRNA target sequence
attctattataacaagaatcg

SEQ ID NO: 23485 - DNA, 21 bp, Artificial sequence
  SiRNA target sequence
ttctattataacaagaatcgt

SEQ ID NO: 23486 - DNA, 21 bp, Artificial sequence
  SiRNA target sequence
tctattataacaagaatcgtg

SEQ ID NO: 23487 - DNA, 21 bp, Artificial sequence
  SiRNA target sequence
ctattataacaagaatcgtgt

SEQ ID NO: 23488 - DNA, 21 bp, Artificial sequence
  SiRNA target sequence
tattataacaagaatcgtgtt

SEQ ID NO: 23489 - DNA, 21 bp, Artificial sequence
  SiRNA target sequence
attataacaagaatcgtgttt

SEQ ID NO: 23490 - DNA, 21 bp, Artificial sequence
  SiRNA target sequence
ttataacaagaatcgtgttta

SEQ ID NO: 23491 - DNA, 21 bp, Artificial sequence
  SiRNA target sequence
tataacaagaatcgtgtttaa

SEQ ID NO: 23492 - DNA, 21 bp, Artificial sequence
  SiRNA target sequence
ataacaagaatcgtgtttaag

SEQ ID NO: 23493 - DNA, 21 bp, Artificial sequence
  SiRNA target sequence
taacaagaatcgtgtttaagt

SEQ ID NO: 23494 - DNA, 21 bp, Artificial sequence
  SiRNA target sequence
aacaagaatcgtgtttaagta

SEQ ID NO: 23495 - DNA, 21 bp, Artificial sequence
  SiRNA target sequence
acaagaatcgtgtttaagtaa

SEQ ID NO: 23496 - DNA, 21 bp, Artificial sequence
  SiRNA target sequence
caagaatcgtgtttaagtaaa

SEQ ID NO: 23497 - DNA, 21 bp, Artificial sequence
  SiRNA target sequence
aagaatcgtgtttaagtaaat

SEQ ID NO: 23498 - DNA, 21 bp, Artificial sequence
  SiRNA target sequence
agaatcgtgtttaagtaaatc

SEQ ID NO: 23499 - DNA, 21 bp, Artificial sequence
  SiRNA target sequence
gaatcgtgtttaagtaaatca

SEQ ID NO: 23500 - DNA, 21 bp, Artificial sequence
  SiRNA target sequence
aatcgtgtttaagtaaatcaa

SEQ ID NO: 23501 - DNA, 21 bp, Artificial sequence
  SiRNA target sequence
atcgtgtttaagtaaatcaat

SEQ ID NO: 23502 - DNA, 21 bp, Artificial sequence
  SiRNA target sequence
tcgtgtttaagtaaatcaatt

SEQ ID NO: 23503 - DNA, 21 bp, Artificial sequence
  SiRNA target sequence
cgtgtttaagtaaatcaattc

SEQ ID NO: 23504 - DNA, 21 bp, Artificial sequence
  SiRNA target sequence
gtgtttaagtaaatcaattcc

SEQ ID NO: 23505 - DNA, 21 bp, Artificial sequence
  SiRNA target sequence
tgtttaagtaaatcaattcct

SEQ ID NO: 23506 - DNA, 21 bp, Artificial sequence
  SiRNA target sequence
gtttaagtaaatcaattcctg

SEQ ID NO: 23507 - DNA, 21 bp, Artificial sequence
  SiRNA target sequence
tttaagtaaatcaattcctgt

SEQ ID NO: 23508 - DNA, 21 bp, Artificial sequence
  SiRNA target sequence
ttaagtaaatcaattcctgtt

SEQ ID NO: 23509 - DNA, 21 bp, Artificial sequence
  SiRNA target sequence
taagtaaatcaattcctgttc

SEQ ID NO: 23510 - DNA, 21 bp, Artificial sequence
  SiRNA target sequence
aagtaaatcaattcctgttct

SEQ ID NO: 23511 - DNA, 21 bp, Artificial sequence
  SiRNA target sequence
agtaaatcaattcctgttcta

SEQ ID NO: 23512 - DNA, 21 bp, Artificial sequence
  SiRNA target sequence
gtaaatcaattcctgttctac

SEQ ID NO: 23513 - DNA, 21 bp, Artificial sequence
  SiRNA target sequence
taaatcaattcctgttctact

SEQ ID NO: 23514 - DNA, 21 bp, Artificial sequence
  SiRNA target sequence
aaatcaattcctgttctactt

SEQ ID NO: 23515 - DNA, 21 bp, Artificial sequence
  SiRNA target sequence
aatcaattcctgttctacttt

SEQ ID NO: 23516 - DNA, 21 bp, Artificial sequence
  SiRNA target sequence
atcaattcctgttctactttt

SEQ ID NO: 23517 - DNA, 21 bp, Artificial sequence
  SiRNA target sequence
tcaattcctgttctactttta

SEQ ID NO: 23518 - DNA, 21 bp, Artificial sequence
  SiRNA target sequence
caattcctgttctacttttaa

SEQ ID NO: 23519 - DNA, 21 bp, Artificial sequence
  SiRNA target sequence
aattcctgttctacttttaaa

SEQ ID NO: 23520 - DNA, 21 bp, Artificial sequence
  SiRNA target sequence
attcctgttctacttttaaat

SEQ ID NO: 23521 - DNA, 21 bp, Artificial sequence
  SiRNA target sequence
ttcctgttctacttttaaatt

SEQ ID NO: 23522 - DNA, 21 bp, Artificial sequence
  SiRNA target sequence
tcctgttctacttttaaattt

SEQ ID NO: 23523 - DNA, 21 bp, Artificial sequence
  SiRNA target sequence
cctgttctacttttaaatttt

SEQ ID NO: 23524 - DNA, 21 bp, Artificial sequence
  SiRNA target sequence
ctgttctacttttaaattttt

SEQ ID NO: 23525 - DNA, 21 bp, Artificial sequence
  SiRNA target sequence
tgttctacttttaaatttttc

SEQ ID NO: 23526 - DNA, 21 bp, Artificial sequence
  SiRNA target sequence
gttctacttttaaatttttca

SEQ ID NO: 23527 - DNA, 21 bp, Artificial sequence
  SiRNA target sequence
ttctacttttaaatttttcat

SEQ ID NO: 23528 - DNA, 21 bp, Artificial sequence
  SiRNA target sequence
tctacttttaaatttttcatt

SEQ ID NO: 23529 - DNA, 21 bp, Artificial sequence
  SiRNA target sequence
ctacttttaaatttttcatta

SEQ ID NO: 23530 - DNA, 21 bp, Artificial sequence
  SiRNA target sequence
tacttttaaatttttcattaa

SEQ ID NO: 23531 - DNA, 21 bp, Artificial sequence
  SiRNA target sequence
acttttaaatttttcattaat

SEQ ID NO: 23532 - DNA, 21 bp, Artificial sequence
  SiRNA target sequence
cttttaaatttttcattaata

SEQ ID NO: 23533 - DNA, 21 bp, Artificial sequence
  SiRNA target sequence
ttttaaatttttcattaatat

SEQ ID NO: 23534 - DNA, 21 bp, Artificial sequence
  SiRNA target sequence
tttaaatttttcattaatata

SEQ ID NO: 23535 - DNA, 21 bp, Artificial sequence
  SiRNA target sequence
ttaaatttttcattaatataa

SEQ ID NO: 23536 - DNA, 21 bp, Artificial sequence
  SiRNA target sequence
taaatttttcattaatataat

SEQ ID NO: 23537 - DNA, 21 bp, Artificial sequence
  SiRNA target sequence
aaatttttcattaatataatc

SEQ ID NO: 23538 - DNA, 21 bp, Artificial sequence
  SiRNA target sequence
aatttttcattaatataatct

SEQ ID NO: 23539 - DNA, 21 bp, Artificial sequence
  SiRNA target sequence
atttttcattaatataatcta

SEQ ID NO: 23540 - DNA, 21 bp, Artificial sequence
  SiRNA target sequence
tttttcattaatataatctac

SEQ ID NO: 23541 - DNA, 21 bp, Artificial sequence
  SiRNA target sequence
ttttcattaatataatctact

SEQ ID NO: 23542 - DNA, 21 bp, Artificial sequence
  SiRNA target sequence
tttcattaatataatctacta

SEQ ID NO: 23543 - DNA, 21 bp, Artificial sequence
  SiRNA target sequence
ttcattaatataatctactaa

SEQ ID NO: 23544 - DNA, 21 bp, Artificial sequence
  SiRNA target sequence
tcattaatataatctactaaa

SEQ ID NO: 23545 - DNA, 21 bp, Artificial sequence
  SiRNA target sequence
cattaatataatctactaaag

SEQ ID NO: 23546 - DNA, 21 bp, Artificial sequence
  SiRNA target sequence
attaatataatctactaaagt

SEQ ID NO: 23547 - DNA, 21 bp, Artificial sequence
  SiRNA target sequence
ttaatataatctactaaagta

SEQ ID NO: 23548 - DNA, 21 bp, Artificial sequence
  SiRNA target sequence
taatataatctactaaagtat

SEQ ID NO: 23549 - DNA, 21 bp, Artificial sequence
  SiRNA target sequence
aatataatctactaaagtatt

SEQ ID NO: 23550 - DNA, 21 bp, Artificial sequence
  SiRNA target sequence
atataatctactaaagtatta

SEQ ID NO: 23551 - DNA, 21 bp, Artificial sequence
  SiRNA target sequence
tataatctactaaagtattat

SEQ ID NO: 23552 - DNA, 21 bp, Artificial sequence
  SiRNA target sequence
ataatctactaaagtattatc

SEQ ID NO: 23553 - DNA, 21 bp, Artificial sequence
  SiRNA target sequence
taatctactaaagtattatcc

SEQ ID NO: 23554 - DNA, 21 bp, Artificial sequence
  SiRNA target sequence
aatctactaaagtattatcca

SEQ ID NO: 23555 - DNA, 21 bp, Artificial sequence
  SiRNA target sequence
atctactaaagtattatccaa

SEQ ID NO: 23556 - DNA, 21 bp, Artificial sequence
  SiRNA target sequence
tctactaaagtattatccaaa

SEQ ID NO: 23557 - DNA, 21 bp, Artificial sequence
  SiRNA target sequence
ctactaaagtattatccaaat

SEQ ID NO: 23558 - DNA, 21 bp, Artificial sequence
  SiRNA target sequence
tactaaagtattatccaaatc

SEQ ID NO: 23559 - DNA, 21 bp, Artificial sequence
  SiRNA target sequence
actaaagtattatccaaatct

SEQ ID NO: 23560 - DNA, 21 bp, Artificial sequence
  SiRNA target sequence
ctaaagtattatccaaatctt

SEQ ID NO: 23561 - DNA, 21 bp, Artificial sequence
  SiRNA target sequence
taaagtattatccaaatcttc

SEQ ID NO: 23562 - DNA, 21 bp, Artificial sequence
  SiRNA target sequence
aaagtattatccaaatcttct

SEQ ID NO: 23563 - DNA, 21 bp, Artificial sequence
  SiRNA target sequence
aagtattatccaaatcttctc

SEQ ID NO: 23564 - DNA, 21 bp, Artificial sequence
  SiRNA target sequence
agtattatccaaatcttctcc

SEQ ID NO: 23565 - DNA, 21 bp, Artificial sequence
  SiRNA target sequence
gtattatccaaatcttctcct

SEQ ID NO: 23566 - DNA, 21 bp, Artificial sequence
  SiRNA target sequence
tattatccaaatcttctcctc

SEQ ID NO: 23567 - DNA, 21 bp, Artificial sequence
  SiRNA target sequence
attatccaaatcttctcctcc

SEQ ID NO: 23568 - DNA, 21 bp, Artificial sequence
  SiRNA target sequence
ttatccaaatcttctcctcct

SEQ ID NO: 23569 - DNA, 21 bp, Artificial sequence
  SiRNA target sequence
tatccaaatcttctcctccta

SEQ ID NO: 23570 - DNA, 21 bp, Artificial sequence
  SiRNA target sequence
atccaaatcttctcctcctaa

SEQ ID NO: 23571 - DNA, 21 bp, Artificial sequence
  SiRNA target sequence
tccaaatcttctcctcctaaa

SEQ ID NO: 23572 - DNA, 21 bp, Artificial sequence
  SiRNA target sequence
ccaaatcttctcctcctaaaa

SEQ ID NO: 23573 - DNA, 21 bp, Artificial sequence
  SiRNA target sequence
caaatcttctcctcctaaaaa

SEQ ID NO: 23574 - DNA, 21 bp, Artificial sequence
  SiRNA target sequence
aaatcttctcctcctaaaaaa

SEQ ID NO: 23575 - DNA, 21 bp, Artificial sequence
  SiRNA target sequence
aatcttctcctcctaaaaaag

SEQ ID NO: 23576 - DNA, 21 bp, Artificial sequence
  SiRNA target sequence
atcttctcctcctaaaaaagt

SEQ ID NO: 23577 - DNA, 21 bp, Artificial sequence
  SiRNA target sequence
tcttctcctcctaaaaaagta

SEQ ID NO: 23578 - DNA, 21 bp, Artificial sequence
  SiRNA target sequence
cttctcctcctaaaaaagtat

SEQ ID NO: 23579 - DNA, 21 bp, Artificial sequence
  SiRNA target sequence
ttctcctcctaaaaaagtatt

SEQ ID NO: 23580 - DNA, 21 bp, Artificial sequence
  SiRNA target sequence
tctcctcctaaaaaagtattt

SEQ ID NO: 23581 - DNA, 21 bp, Artificial sequence
  SiRNA target sequence
ctcctcctaaaaaagtatttc

SEQ ID NO: 23582 - DNA, 21 bp, Artificial sequence
  SiRNA target sequence
tcctcctaaaaaagtatttcc

SEQ ID NO: 23583 - DNA, 21 bp, Artificial sequence
  SiRNA target sequence
cctcctaaaaaagtatttccg

SEQ ID NO: 23584 - DNA, 21 bp, Artificial sequence
  SiRNA target sequence
ctcctaaaaaagtatttccgt

SEQ ID NO: 23585 - DNA, 21 bp, Artificial sequence
  SiRNA target sequence
tcctaaaaaagtatttccgtt

SEQ ID NO: 23586 - DNA, 21 bp, Artificial sequence
  SiRNA target sequence
cctaaaaaagtatttccgtta

SEQ ID NO: 23587 - DNA, 21 bp, Artificial sequence
  SiRNA target sequence
ctaaaaaagtatttccgttag

SEQ ID NO: 23588 - DNA, 21 bp, Artificial sequence
  SiRNA target sequence
taaaaaagtatttccgttagt

SEQ ID NO: 23589 - DNA, 21 bp, Artificial sequence
  SiRNA target sequence
aaaaaagtatttccgttagta

SEQ ID NO: 23590 - DNA, 21 bp, Artificial sequence
  SiRNA target sequence
aaaaagtatttccgttagtag

SEQ ID NO: 23591 - DNA, 21 bp, Artificial sequence
  SiRNA target sequence
aaaagtatttccgttagtaga

SEQ ID NO: 23592 - DNA, 21 bp, Artificial sequence
  SiRNA target sequence
aaagtatttccgttagtagat

SEQ ID NO: 23593 - DNA, 21 bp, Artificial sequence
  SiRNA target sequence
aagtatttccgttagtagatt

SEQ ID NO: 23594 - DNA, 21 bp, Artificial sequence
  SiRNA target sequence
agtatttccgttagtagattt

SEQ ID NO: 23595 - DNA, 21 bp, Artificial sequence
  SiRNA target sequence
gtatttccgttagtagatttt

SEQ ID NO: 23596 - DNA, 21 bp, Artificial sequence
  SiRNA target sequence
tatttccgttagtagatttta

SEQ ID NO: 23597 - DNA, 21 bp, Artificial sequence
  SiRNA target sequence
atttccgttagtagattttac

SEQ ID NO: 23598 - DNA, 21 bp, Artificial sequence
  SiRNA target sequence
tttccgttagtagattttaca

SEQ ID NO: 23599 - DNA, 21 bp, Artificial sequence
  SiRNA target sequence
ttccgttagtagattttacat

SEQ ID NO: 23600 - DNA, 21 bp, Artificial sequence
  SiRNA target sequence
tccgttagtagattttacatg

SEQ ID NO: 23601 - DNA, 21 bp, Artificial sequence
  SiRNA target sequence
ccgttagtagattttacatga

SEQ ID NO: 23602 - DNA, 21 bp, Artificial sequence
  SiRNA target sequence
cgttagtagattttacatgaa

SEQ ID NO: 23603 - DNA, 21 bp, Artificial sequence
  SiRNA target sequence
gttagtagattttacatgaaa

SEQ ID NO: 23604 - DNA, 21 bp, Artificial sequence
  SiRNA target sequence
ttagtagattttacatgaaaa

SEQ ID NO: 23605 - DNA, 21 bp, Artificial sequence
  SiRNA target sequence
tagtagattttacatgaaaaa

SEQ ID NO: 23606 - DNA, 21 bp, Artificial sequence
  SiRNA target sequence
agtagattttacatgaaaaat

SEQ ID NO: 23607 - DNA, 21 bp, Artificial sequence
  SiRNA target sequence
gtagattttacatgaaaaata

SEQ ID NO: 23608 - DNA, 21 bp, Artificial sequence
  SiRNA target sequence
tagattttacatgaaaaatac

SEQ ID NO: 23609 - DNA, 21 bp, Artificial sequence
  SiRNA target sequence
agattttacatgaaaaatacc

SEQ ID NO: 23610 - DNA, 21 bp, Artificial sequence
  SiRNA target sequence
gattttacatgaaaaatacca

SEQ ID NO: 23611 - DNA, 21 bp, Artificial sequence
  SiRNA target sequence
attttacatgaaaaataccat

SEQ ID NO: 23612 - DNA, 21 bp, Artificial sequence
  SiRNA target sequence
ttttacatgaaaaataccatt

SEQ ID NO: 23613 - DNA, 21 bp, Artificial sequence
  SiRNA target sequence
tttacatgaaaaataccatta

SEQ ID NO: 23614 - DNA, 21 bp, Artificial sequence
  SiRNA target sequence
ttacatgaaaaataccattat

SEQ ID NO: 23615 - DNA, 21 bp, Artificial sequence
  SiRNA target sequence
tacatgaaaaataccattatc

SEQ ID NO: 23616 - DNA, 21 bp, Artificial sequence
  SiRNA target sequence
acatgaaaaataccattatct

SEQ ID NO: 23617 - DNA, 21 bp, Artificial sequence
  SiRNA target sequence
catgaaaaataccattatcta

SEQ ID NO: 23618 - DNA, 21 bp, Artificial sequence
  SiRNA target sequence
atgaaaaataccattatctaa

SEQ ID NO: 23619 - DNA, 21 bp, Artificial sequence
  SiRNA target sequence
tgaaaaataccattatctaat

SEQ ID NO: 23620 - DNA, 21 bp, Artificial sequence
  SiRNA target sequence
gaaaaataccattatctaatt

SEQ ID NO: 23621 - DNA, 21 bp, Artificial sequence
  SiRNA target sequence
aaaaataccattatctaattc

SEQ ID NO: 23622 - DNA, 21 bp, Artificial sequence
  SiRNA target sequence
aaaataccattatctaattct

SEQ ID NO: 23623 - DNA, 21 bp, Artificial sequence
  SiRNA target sequence
aaataccattatctaattcta

SEQ ID NO: 23624 - DNA, 21 bp, Artificial sequence
  SiRNA target sequence
aataccattatctaattctaa

SEQ ID NO: 23625 - DNA, 21 bp, Artificial sequence
  SiRNA target sequence
ataccattatctaattctaat

SEQ ID NO: 23626 - DNA, 21 bp, Artificial sequence
  SiRNA target sequence
taccattatctaattctaata

SEQ ID NO: 23627 - DNA, 21 bp, Artificial sequence
  SiRNA target sequence
accattatctaattctaatat

SEQ ID NO: 23628 - DNA, 21 bp, Artificial sequence
  SiRNA target sequence
ccattatctaattctaatata

SEQ ID NO: 23629 - DNA, 21 bp, Artificial sequence
  SiRNA target sequence
cattatctaattctaatatac

SEQ ID NO: 23630 - DNA, 21 bp, Artificial sequence
  SiRNA target sequence
attatctaattctaatatact

SEQ ID NO: 23631 - DNA, 21 bp, Artificial sequence
  SiRNA target sequence
ttatctaattctaatatacta

SEQ ID NO: 23632 - DNA, 21 bp, Artificial sequence
  SiRNA target sequence
tatctaattctaatatactaa

SEQ ID NO: 23633 - DNA, 21 bp, Artificial sequence
  SiRNA target sequence
atctaattctaatatactaat

SEQ ID NO: 23634 - DNA, 21 bp, Artificial sequence
  SiRNA target sequence
tctaattctaatatactaatg

SEQ ID NO: 23635 - DNA, 21 bp, Artificial sequence
  SiRNA target sequence
ctaattctaatatactaatgt

SEQ ID NO: 23636 - DNA, 21 bp, Artificial sequence
  SiRNA target sequence
taattctaatatactaatgtc

SEQ ID NO: 23637 - DNA, 21 bp, Artificial sequence
  SiRNA target sequence
aattctaatatactaatgtca

SEQ ID NO: 23638 - DNA, 21 bp, Artificial sequence
  SiRNA target sequence
attctaatatactaatgtcaa

SEQ ID NO: 23639 - DNA, 21 bp, Artificial sequence
  SiRNA target sequence
ttctaatatactaatgtcaaa

SEQ ID NO: 23640 - DNA, 21 bp, Artificial sequence
  SiRNA target sequence
tctaatatactaatgtcaaaa

SEQ ID NO: 23641 - DNA, 21 bp, Artificial sequence
  SiRNA target sequence
ctaatatactaatgtcaaaag

SEQ ID NO: 23642 - DNA, 21 bp, Artificial sequence
  SiRNA target sequence
taatatactaatgtcaaaagt

SEQ ID NO: 23643 - DNA, 21 bp, Artificial sequence
  SiRNA target sequence
aatatactaatgtcaaaagtt

SEQ ID NO: 23644 - DNA, 21 bp, Artificial sequence
  SiRNA target sequence
atatactaatgtcaaaagttc

SEQ ID NO: 23645 - DNA, 21 bp, Artificial sequence
  SiRNA target sequence
tatactaatgtcaaaagttcc

SEQ ID NO: 23646 - DNA, 21 bp, Artificial sequence
  SiRNA target sequence
atactaatgtcaaaagttcct

SEQ ID NO: 23647 - DNA, 21 bp, Artificial sequence
  SiRNA target sequence
tactaatgtcaaaagttcctc

SEQ ID NO: 23648 - DNA, 21 bp, Artificial sequence
  SiRNA target sequence
actaatgtcaaaagttcctcc

SEQ ID NO: 23649 - DNA, 21 bp, Artificial sequence
  SiRNA target sequence
ctaatgtcaaaagttcctcct

SEQ ID NO: 23650 - DNA, 21 bp, Artificial sequence
  SiRNA target sequence
taatgtcaaaagttcctcctc

SEQ ID NO: 23651 - DNA, 21 bp, Artificial sequence
  SiRNA target sequence
aatgtcaaaagttcctcctcc

SEQ ID NO: 23652 - DNA, 21 bp, Artificial sequence
  SiRNA target sequence
atgtcaaaagttcctcctccc

SEQ ID NO: 23653 - DNA, 21 bp, Artificial sequence
  SiRNA target sequence
tgtcaaaagttcctcctccca

SEQ ID NO: 23654 - DNA, 21 bp, Artificial sequence
  SiRNA target sequence
gtcaaaagttcctcctcccag

SEQ ID NO: 23655 - DNA, 21 bp, Artificial sequence
  SiRNA target sequence
tcaaaagttcctcctcccaga

SEQ ID NO: 23656 - DNA, 21 bp, Artificial sequence
  SiRNA target sequence
caaaagttcctcctcccagat

SEQ ID NO: 23657 - DNA, 21 bp, Artificial sequence
  SiRNA target sequence
aaaagttcctcctcccagatc

SEQ ID NO: 23658 - DNA, 21 bp, Artificial sequence
  SiRNA target sequence
aaagttcctcctcccagatca

SEQ ID NO: 23659 - DNA, 21 bp, Artificial sequence
  SiRNA target sequence
aagttcctcctcccagatcat

SEQ ID NO: 23660 - DNA, 21 bp, Artificial sequence
  SiRNA target sequence
agttcctcctcccagatcata

SEQ ID NO: 23661 - DNA, 21 bp, Artificial sequence
  SiRNA target sequence
gttcctcctcccagatcataa

SEQ ID NO: 23662 - DNA, 21 bp, Artificial sequence
  SiRNA target sequence
ttcctcctcccagatcataaa

SEQ ID NO: 23663 - DNA, 21 bp, Artificial sequence
  SiRNA target sequence
tcctcctcccagatcataaac

SEQ ID NO: 23664 - DNA, 21 bp, Artificial sequence
  SiRNA target sequence
cctcctcccagatcataaaca

SEQ ID NO: 23665 - DNA, 21 bp, Artificial sequence
  SiRNA target sequence
ctcctcccagatcataaacag

SEQ ID NO: 23666 - DNA, 21 bp, Artificial sequence
  SiRNA target sequence
tcctcccagatcataaacagc

SEQ ID NO: 23667 - DNA, 21 bp, Artificial sequence
  SiRNA target sequence
cctcccagatcataaacagct

SEQ ID NO: 23668 - DNA, 21 bp, Artificial sequence
  SiRNA target sequence
ctcccagatcataaacagcta

SEQ ID NO: 23669 - DNA, 21 bp, Artificial sequence
  SiRNA target sequence
tcccagatcataaacagctat

SEQ ID NO: 23670 - DNA, 21 bp, Artificial sequence
  SiRNA target sequence
cccagatcataaacagctata

SEQ ID NO: 23671 - DNA, 21 bp, Artificial sequence
  SiRNA target sequence
ccagatcataaacagctataa

SEQ ID NO: 23672 - DNA, 21 bp, Artificial sequence
  SiRNA target sequence
cagatcataaacagctataat

SEQ ID NO: 23673 - DNA, 21 bp, Artificial sequence
  SiRNA target sequence
agatcataaacagctataata

SEQ ID NO: 23674 - DNA, 21 bp, Artificial sequence
  SiRNA target sequence
gatcataaacagctataatac

SEQ ID NO: 23675 - DNA, 21 bp, Artificial sequence
  SiRNA target sequence
atcataaacagctataatacc

SEQ ID NO: 23676 - DNA, 21 bp, Artificial sequence
  SiRNA target sequence
tcataaacagctataataccc

SEQ ID NO: 23677 - DNA, 21 bp, Artificial sequence
  SiRNA target sequence
cataaacagctataataccct

SEQ ID NO: 23678 - DNA, 21 bp, Artificial sequence
  SiRNA target sequence
ataaacagctataataccctg

SEQ ID NO: 23679 - DNA, 21 bp, Artificial sequence
  SiRNA target sequence
taaacagctataataccctgt

SEQ ID NO: 23680 - DNA, 21 bp, Artificial sequence
  SiRNA target sequence
aaacagctataataccctgtg

SEQ ID NO: 23681 - DNA, 21 bp, Artificial sequence
  SiRNA target sequence
aacagctataataccctgtgc

SEQ ID NO: 23682 - DNA, 21 bp, Artificial sequence
  SiRNA target sequence
acagctataataccctgtgca

SEQ ID NO: 23683 - DNA, 21 bp, Artificial sequence
  SiRNA target sequence
cagctataataccctgtgcag

SEQ ID NO: 23684 - DNA, 21 bp, Artificial sequence
  SiRNA target sequence
agctataataccctgtgcaga

SEQ ID NO: 23685 - DNA, 21 bp, Artificial sequence
  SiRNA target sequence
gctataataccctgtgcagac

SEQ ID NO: 23686 - DNA, 21 bp, Artificial sequence
  SiRNA target sequence
ctataataccctgtgcagact

SEQ ID NO: 23687 - DNA, 21 bp, Artificial sequence
  SiRNA target sequence
tataataccctgtgcagactt

SEQ ID NO: 23688 - DNA, 21 bp, Artificial sequence
  SiRNA target sequence
ataataccctgtgcagacttg

SEQ ID NO: 23689 - DNA, 21 bp, Artificial sequence
  SiRNA target sequence
taataccctgtgcagacttgt

SEQ ID NO: 23690 - DNA, 21 bp, Artificial sequence
  SiRNA target sequence
aataccctgtgcagacttgtc

SEQ ID NO: 23691 - DNA, 21 bp, Artificial sequence
  SiRNA target sequence
ataccctgtgcagacttgtca

SEQ ID NO: 23692 - DNA, 21 bp, Artificial sequence
  SiRNA target sequence
taccctgtgcagacttgtcaa

SEQ ID NO: 23693 - DNA, 21 bp, Artificial sequence
  SiRNA target sequence
accctgtgcagacttgtcaag

SEQ ID NO: 23694 - DNA, 21 bp, Artificial sequence
  SiRNA target sequence
ccctgtgcagacttgtcaagc

SEQ ID NO: 23695 - DNA, 21 bp, Artificial sequence
  SiRNA target sequence
cctgtgcagacttgtcaagcc

SEQ ID NO: 23696 - DNA, 21 bp, Artificial sequence
  SiRNA target sequence
ctgtgcagacttgtcaagccc

SEQ ID NO: 23697 - DNA, 21 bp, Artificial sequence
  SiRNA target sequence
tgtgcagacttgtcaagccca

SEQ ID NO: 23698 - DNA, 21 bp, Artificial sequence
  SiRNA target sequence
gtgcagacttgtcaagcccat

SEQ ID NO: 23699 - DNA, 21 bp, Artificial sequence
  SiRNA target sequence
tgcagacttgtcaagcccata

SEQ ID NO: 23700 - DNA, 21 bp, Artificial sequence
  SiRNA target sequence
gcagacttgtcaagcccataa

SEQ ID NO: 23701 - DNA, 21 bp, Artificial sequence
  SiRNA target sequence
cagacttgtcaagcccataag

SEQ ID NO: 23702 - DNA, 21 bp, Artificial sequence
  SiRNA target sequence
agacttgtcaagcccataagc

SEQ ID NO: 23703 - DNA, 21 bp, Artificial sequence
  SiRNA target sequence
gacttgtcaagcccataagca

SEQ ID NO: 23704 - DNA, 21 bp, Artificial sequence
  SiRNA target sequence
acttgtcaagcccataagcaa

SEQ ID NO: 23705 - DNA, 21 bp, Artificial sequence
  SiRNA target sequence
cttgtcaagcccataagcaag

SEQ ID NO: 23706 - DNA, 21 bp, Artificial sequence
  SiRNA target sequence
ttgtcaagcccataagcaagt

SEQ ID NO: 23707 - DNA, 21 bp, Artificial sequence
  SiRNA target sequence
tgtcaagcccataagcaagtg

SEQ ID NO: 23708 - DNA, 21 bp, Artificial sequence
  SiRNA target sequence
gtcaagcccataagcaagtgc

SEQ ID NO: 23709 - DNA, 21 bp, Artificial sequence
  SiRNA target sequence
tcaagcccataagcaagtgct

SEQ ID NO: 23710 - DNA, 21 bp, Artificial sequence
  SiRNA target sequence
caagcccataagcaagtgctg

SEQ ID NO: 23711 - DNA, 21 bp, Artificial sequence
  SiRNA target sequence
aagcccataagcaagtgctgc

SEQ ID NO: 23712 - DNA, 21 bp, Artificial sequence
  SiRNA target sequence
agcccataagcaagtgctgcc

SEQ ID NO: 23713 - DNA, 21 bp, Artificial sequence
  SiRNA target sequence
gcccataagcaagtgctgccg

SEQ ID NO: 23714 - DNA, 21 bp, Artificial sequence
  SiRNA target sequence
cccataagcaagtgctgccgc

SEQ ID NO: 23715 - DNA, 21 bp, Artificial sequence
  SiRNA target sequence
ccataagcaagtgctgccgca

SEQ ID NO: 23716 - DNA, 21 bp, Artificial sequence
  SiRNA target sequence
cataagcaagtgctgccgcag

SEQ ID NO: 23717 - DNA, 21 bp, Artificial sequence
  SiRNA target sequence
ataagcaagtgctgccgcagt

SEQ ID NO: 23718 - DNA, 21 bp, Artificial sequence
  SiRNA target sequence
taagcaagtgctgccgcagta

SEQ ID NO: 23719 - DNA, 21 bp, Artificial sequence
  SiRNA target sequence
aagcaagtgctgccgcagtag

SEQ ID NO: 23720 - DNA, 21 bp, Artificial sequence
  SiRNA target sequence
agcaagtgctgccgcagtagg

SEQ ID NO: 23721 - DNA, 21 bp, Artificial sequence
  SiRNA target sequence
gcaagtgctgccgcagtaggc

SEQ ID NO: 23722 - DNA, 21 bp, Artificial sequence
  SiRNA target sequence
caagtgctgccgcagtaggct

SEQ ID NO: 23723 - DNA, 21 bp, Artificial sequence
  SiRNA target sequence
aagtgctgccgcagtaggctc

SEQ ID NO: 23724 - DNA, 21 bp, Artificial sequence
  SiRNA target sequence
agtgctgccgcagtaggctca

SEQ ID NO: 23725 - DNA, 21 bp, Artificial sequence
  SiRNA target sequence
gtgctgccgcagtaggctcat

SEQ ID NO: 23726 - DNA, 21 bp, Artificial sequence
  SiRNA target sequence
tgctgccgcagtaggctcatt

SEQ ID NO: 23727 - DNA, 21 bp, Artificial sequence
  SiRNA target sequence
gctgccgcagtaggctcatta

SEQ ID NO: 23728 - DNA, 21 bp, Artificial sequence
  SiRNA target sequence
ctgccgcagtaggctcattaa

SEQ ID NO: 23729 - DNA, 21 bp, Artificial sequence
  SiRNA target sequence
tgccgcagtaggctcattaat

SEQ ID NO: 23730 - DNA, 21 bp, Artificial sequence
  SiRNA target sequence
gccgcagtaggctcattaatc

SEQ ID NO: 23731 - DNA, 21 bp, Artificial sequence
  SiRNA target sequence
ccgcagtaggctcattaatca

SEQ ID NO: 23732 - DNA, 21 bp, Artificial sequence
  SiRNA target sequence
cgcagtaggctcattaatcac

SEQ ID NO: 23733 - DNA, 21 bp, Artificial sequence
  SiRNA target sequence
gcagtaggctcattaatcact

SEQ ID NO: 23734 - DNA, 21 bp, Artificial sequence
  SiRNA target sequence
cagtaggctcattaatcactc

SEQ ID NO: 23735 - DNA, 21 bp, Artificial sequence
  SiRNA target sequence
agtaggctcattaatcactct

SEQ ID NO: 23736 - DNA, 21 bp, Artificial sequence
  SiRNA target sequence
gtaggctcattaatcactcta

SEQ ID NO: 23737 - DNA, 21 bp, Artificial sequence
  SiRNA target sequence
taggctcattaatcactctaa

SEQ ID NO: 23738 - DNA, 21 bp, Artificial sequence
  SiRNA target sequence
aggctcattaatcactctaag

SEQ ID NO: 23739 - DNA, 21 bp, Artificial sequence
  SiRNA target sequence
ggctcattaatcactctaagc

SEQ ID NO: 23740 - DNA, 21 bp, Artificial sequence
  SiRNA target sequence
gctcattaatcactctaagca

SEQ ID NO: 23741 - DNA, 21 bp, Artificial sequence
  SiRNA target sequence
ctcattaatcactctaagcac

SEQ ID NO: 23742 - DNA, 21 bp, Artificial sequence
  SiRNA target sequence
tcattaatcactctaagcact

SEQ ID NO: 23743 - DNA, 21 bp, Artificial sequence
  SiRNA target sequence
cattaatcactctaagcactt

SEQ ID NO: 23744 - DNA, 21 bp, Artificial sequence
  SiRNA target sequence
attaatcactctaagcacttg

SEQ ID NO: 23745 - DNA, 21 bp, Artificial sequence
  SiRNA target sequence
ttaatcactctaagcacttgt

SEQ ID NO: 23746 - DNA, 21 bp, Artificial sequence
  SiRNA target sequence
taatcactctaagcacttgta

SEQ ID NO: 23747 - DNA, 21 bp, Artificial sequence
  SiRNA target sequence
aatcactctaagcacttgtaa

SEQ ID NO: 23748 - DNA, 21 bp, Artificial sequence
  SiRNA target sequence
atcactctaagcacttgtaat

SEQ ID NO: 23749 - DNA, 21 bp, Artificial sequence
  SiRNA target sequence
tcactctaagcacttgtaatc

SEQ ID NO: 23750 - DNA, 21 bp, Artificial sequence
  SiRNA target sequence
cactctaagcacttgtaatcc

SEQ ID NO: 23751 - DNA, 21 bp, Artificial sequence
  SiRNA target sequence
actctaagcacttgtaatccc

SEQ ID NO: 23752 - DNA, 21 bp, Artificial sequence
  SiRNA target sequence
ctctaagcacttgtaatcccg

SEQ ID NO: 23753 - DNA, 21 bp, Artificial sequence
  SiRNA target sequence
tctaagcacttgtaatcccgc

SEQ ID NO: 23754 - DNA, 21 bp, Artificial sequence
  SiRNA target sequence
ctaagcacttgtaatcccgca

SEQ ID NO: 23755 - DNA, 21 bp, Artificial sequence
  SiRNA target sequence
taagcacttgtaatcccgcaa

SEQ ID NO: 23756 - DNA, 21 bp, Artificial sequence
  SiRNA target sequence
aagcacttgtaatcccgcaat

SEQ ID NO: 23757 - DNA, 21 bp, Artificial sequence
  SiRNA target sequence
agcacttgtaatcccgcaatc

SEQ ID NO: 23758 - DNA, 21 bp, Artificial sequence
  SiRNA target sequence
gcacttgtaatcccgcaatcc

SEQ ID NO: 23759 - DNA, 21 bp, Artificial sequence
  SiRNA target sequence
cacttgtaatcccgcaatcct

SEQ ID NO: 23760 - DNA, 21 bp, Artificial sequence
  SiRNA target sequence
acttgtaatcccgcaatcctt

SEQ ID NO: 23761 - DNA, 21 bp, Artificial sequence
  SiRNA target sequence
cttgtaatcccgcaatccttc

SEQ ID NO: 23762 - DNA, 21 bp, Artificial sequence
  SiRNA target sequence
ttgtaatcccgcaatccttcc

SEQ ID NO: 23763 - DNA, 21 bp, Artificial sequence
  SiRNA target sequence
tgtaatcccgcaatccttccc

SEQ ID NO: 23764 - DNA, 21 bp, Artificial sequence
  SiRNA target sequence
gtaatcccgcaatccttcccg

SEQ ID NO: 23765 - DNA, 21 bp, Artificial sequence
  SiRNA target sequence
taatcccgcaatccttcccgc

SEQ ID NO: 23766 - DNA, 21 bp, Artificial sequence
  SiRNA target sequence
aatcccgcaatccttcccgca

SEQ ID NO: 23767 - DNA, 21 bp, Artificial sequence
  SiRNA target sequence
atcccgcaatccttcccgcat

SEQ ID NO: 23768 - DNA, 21 bp, Artificial sequence
  SiRNA target sequence
tcccgcaatccttcccgcatc

SEQ ID NO: 23769 - DNA, 21 bp, Artificial sequence
  SiRNA target sequence
cccgcaatccttcccgcatct

SEQ ID NO: 23770 - DNA, 21 bp, Artificial sequence
  SiRNA target sequence
ccgcaatccttcccgcatctt

SEQ ID NO: 23771 - DNA, 21 bp, Artificial sequence
  SiRNA target sequence
cgcaatccttcccgcatcttt

SEQ ID NO: 23772 - DNA, 21 bp, Artificial sequence
  SiRNA target sequence
gcaatccttcccgcatcttta

SEQ ID NO: 23773 - DNA, 21 bp, Artificial sequence
  SiRNA target sequence
caatccttcccgcatctttag

SEQ ID NO: 23774 - DNA, 21 bp, Artificial sequence
  SiRNA target sequence
aatccttcccgcatctttagt

SEQ ID NO: 23775 - DNA, 21 bp, Artificial sequence
  SiRNA target sequence
atccttcccgcatctttagta

SEQ ID NO: 23776 - DNA, 21 bp, Artificial sequence
  SiRNA target sequence
tccttcccgcatctttagtag

SEQ ID NO: 23777 - DNA, 21 bp, Artificial sequence
  SiRNA target sequence
ccttcccgcatctttagtagc

SEQ ID NO: 23778 - DNA, 21 bp, Artificial sequence
  SiRNA target sequence
cttcccgcatctttagtagct

SEQ ID NO: 23779 - DNA, 21 bp, Artificial sequence
  SiRNA target sequence
ttcccgcatctttagtagctt

SEQ ID NO: 23780 - DNA, 21 bp, Artificial sequence
  SiRNA target sequence
tcccgcatctttagtagcttg

SEQ ID NO: 23781 - DNA, 21 bp, Artificial sequence
  SiRNA target sequence
cccgcatctttagtagcttgc

SEQ ID NO: 23782 - DNA, 21 bp, Artificial sequence
  SiRNA target sequence
ccgcatctttagtagcttgcc

SEQ ID NO: 23783 - DNA, 21 bp, Artificial sequence
  SiRNA target sequence
cgcatctttagtagcttgcct

SEQ ID NO: 23784 - DNA, 21 bp, Artificial sequence
  SiRNA target sequence
gcatctttagtagcttgcctt

SEQ ID NO: 23785 - DNA, 21 bp, Artificial sequence
  SiRNA target sequence
catctttagtagcttgccttt

SEQ ID NO: 23786 - DNA, 21 bp, Artificial sequence
  SiRNA target sequence
atctttagtagcttgcctttg

SEQ ID NO: 23787 - DNA, 21 bp, Artificial sequence
  SiRNA target sequence
tctttagtagcttgcctttgc

SEQ ID NO: 23788 - DNA, 21 bp, Artificial sequence
  SiRNA target sequence
ctttagtagcttgcctttgca

SEQ ID NO: 23789 - DNA, 21 bp, Artificial sequence
  SiRNA target sequence
tttagtagcttgcctttgcat

SEQ ID NO: 23790 - DNA, 21 bp, Artificial sequence
  SiRNA target sequence
ttagtagcttgcctttgcatg

SEQ ID NO: 23791 - DNA, 21 bp, Artificial sequence
  SiRNA target sequence
tagtagcttgcctttgcatgt

SEQ ID NO: 23792 - DNA, 21 bp, Artificial sequence
  SiRNA target sequence
agtagcttgcctttgcatgtc

SEQ ID NO: 23793 - DNA, 21 bp, Artificial sequence
  SiRNA target sequence
gtagcttgcctttgcatgtca

SEQ ID NO: 23794 - DNA, 21 bp, Artificial sequence
  SiRNA target sequence
tagcttgcctttgcatgtcat

SEQ ID NO: 23795 - DNA, 21 bp, Artificial sequence
  SiRNA target sequence
agcttgcctttgcatgtcatc

SEQ ID NO: 23796 - DNA, 21 bp, Artificial sequence
  SiRNA target sequence
gcttgcctttgcatgtcatca

SEQ ID NO: 23797 - DNA, 21 bp, Artificial sequence
  SiRNA target sequence
cttgcctttgcatgtcatcaa

SEQ ID NO: 23798 - DNA, 21 bp, Artificial sequence
  SiRNA target sequence
ttgcctttgcatgtcatcaaa

SEQ ID NO: 23799 - DNA, 21 bp, Artificial sequence
  SiRNA target sequence
tgcctttgcatgtcatcaaaa

SEQ ID NO: 23800 - DNA, 21 bp, Artificial sequence
  SiRNA target sequence
gcctttgcatgtcatcaaaat

SEQ ID NO: 23801 - DNA, 21 bp, Artificial sequence
  SiRNA target sequence
cctttgcatgtcatcaaaata

SEQ ID NO: 23802 - DNA, 21 bp, Artificial sequence
  SiRNA target sequence
ctttgcatgtcatcaaaatat

SEQ ID NO: 23803 - DNA, 21 bp, Artificial sequence
  SiRNA target sequence
tttgcatgtcatcaaaatatg

SEQ ID NO: 23804 - DNA, 21 bp, Artificial sequence
  SiRNA target sequence
ttgcatgtcatcaaaatatgc

SEQ ID NO: 23805 - DNA, 21 bp, Artificial sequence
  SiRNA target sequence
tgcatgtcatcaaaatatgcg

SEQ ID NO: 23806 - DNA, 21 bp, Artificial sequence
  SiRNA target sequence
gcatgtcatcaaaatatgcgg

SEQ ID NO: 23807 - DNA, 21 bp, Artificial sequence
  SiRNA target sequence
catgtcatcaaaatatgcggg

SEQ ID NO: 23808 - DNA, 21 bp, Artificial sequence
  SiRNA target sequence
atgtcatcaaaatatgcgggc

SEQ ID NO: 23809 - DNA, 21 bp, Artificial sequence
  SiRNA target sequence
tgtcatcaaaatatgcgggca

SEQ ID NO: 23810 - DNA, 21 bp, Artificial sequence
  SiRNA target sequence
gtcatcaaaatatgcgggcac

SEQ ID NO: 23811 - DNA, 21 bp, Artificial sequence
  SiRNA target sequence
tcatcaaaatatgcgggcact

SEQ ID NO: 23812 - DNA, 21 bp, Artificial sequence
  SiRNA target sequence
catcaaaatatgcgggcactg

SEQ ID NO: 23813 - DNA, 21 bp, Artificial sequence
  SiRNA target sequence
atcaaaatatgcgggcactgt

SEQ ID NO: 23814 - DNA, 21 bp, Artificial sequence
  SiRNA target sequence
tcaaaatatgcgggcactgtt

SEQ ID NO: 23815 - DNA, 21 bp, Artificial sequence
  SiRNA target sequence
caaaatatgcgggcactgtta

SEQ ID NO: 23816 - DNA, 21 bp, Artificial sequence
  SiRNA target sequence
aaaatatgcgggcactgttat

SEQ ID NO: 23817 - DNA, 21 bp, Artificial sequence
  SiRNA target sequence
aaatatgcgggcactgttata

SEQ ID NO: 23818 - DNA, 21 bp, Artificial sequence
  SiRNA target sequence
aatatgcgggcactgttataa

SEQ ID NO: 23819 - DNA, 21 bp, Artificial sequence
  SiRNA target sequence
atatgcgggcactgttataac

SEQ ID NO: 23820 - DNA, 21 bp, Artificial sequence
  SiRNA target sequence
tatgcgggcactgttataaca

SEQ ID NO: 23821 - DNA, 21 bp, Artificial sequence
  SiRNA target sequence
atgcgggcactgttataacag

SEQ ID NO: 23822 - DNA, 21 bp, Artificial sequence
  SiRNA target sequence
tgcgggcactgttataacaga

SEQ ID NO: 23823 - DNA, 21 bp, Artificial sequence
  SiRNA target sequence
gcgggcactgttataacagat

SEQ ID NO: 23824 - DNA, 21 bp, Artificial sequence
  SiRNA target sequence
cgggcactgttataacagatc

SEQ ID NO: 23825 - DNA, 21 bp, Artificial sequence
  SiRNA target sequence
gggcactgttataacagatct

SEQ ID NO: 23826 - DNA, 21 bp, Artificial sequence
  SiRNA target sequence
ggcactgttataacagatctt

SEQ ID NO: 23827 - DNA, 21 bp, Artificial sequence
  SiRNA target sequence
gcactgttataacagatctta

SEQ ID NO: 23828 - DNA, 21 bp, Artificial sequence
  SiRNA target sequence
cactgttataacagatcttaa

SEQ ID NO: 23829 - DNA, 21 bp, Artificial sequence
  SiRNA target sequence
actgttataacagatcttaat

SEQ ID NO: 23830 - DNA, 21 bp, Artificial sequence
  SiRNA target sequence
ctgttataacagatcttaata

SEQ ID NO: 23831 - DNA, 21 bp, Artificial sequence
  SiRNA target sequence
tgttataacagatcttaatac

SEQ ID NO: 23832 - DNA, 21 bp, Artificial sequence
  SiRNA target sequence
gttataacagatcttaatact

SEQ ID NO: 23833 - DNA, 21 bp, Artificial sequence
  SiRNA target sequence
ttataacagatcttaatactt

SEQ ID NO: 23834 - DNA, 21 bp, Artificial sequence
  SiRNA target sequence
tataacagatcttaatacttt

SEQ ID NO: 23835 - DNA, 21 bp, Artificial sequence
  SiRNA target sequence
ataacagatcttaatacttta

SEQ ID NO: 23836 - DNA, 21 bp, Artificial sequence
  SiRNA target sequence
taacagatcttaatactttag

SEQ ID NO: 23837 - DNA, 21 bp, Artificial sequence
  SiRNA target sequence
aacagatcttaatactttaga

SEQ ID NO: 23838 - DNA, 21 bp, Artificial sequence
  SiRNA target sequence
acagatcttaatactttagaa

SEQ ID NO: 23839 - DNA, 21 bp, Artificial sequence
  SiRNA target sequence
cagatcttaatactttagaat

SEQ ID NO: 23840 - DNA, 21 bp, Artificial sequence
  SiRNA target sequence
agatcttaatactttagaatt

SEQ ID NO: 23841 - DNA, 21 bp, Artificial sequence
  SiRNA target sequence
gatcttaatactttagaattt

SEQ ID NO: 23842 - DNA, 21 bp, Artificial sequence
  SiRNA target sequence
atcttaatactttagaattta

SEQ ID NO: 23843 - DNA, 21 bp, Artificial sequence
  SiRNA target sequence
tcttaatactttagaatttaa

SEQ ID NO: 23844 - DNA, 21 bp, Artificial sequence
  SiRNA target sequence
cttaatactttagaatttaaa

SEQ ID NO: 23845 - DNA, 21 bp, Artificial sequence
  SiRNA target sequence
ttaatactttagaatttaaaa

SEQ ID NO: 23846 - DNA, 21 bp, Artificial sequence
  SiRNA target sequence
taatactttagaatttaaaaa

SEQ ID NO: 23847 - DNA, 21 bp, Artificial sequence
  SiRNA target sequence
aatactttagaatttaaaaaa

SEQ ID NO: 23848 - DNA, 21 bp, Artificial sequence
  SiRNA target sequence
atactttagaatttaaaaaat

SEQ ID NO: 23849 - DNA, 21 bp, Artificial sequence
  SiRNA target sequence
tactttagaatttaaaaaatt

SEQ ID NO: 23850 - DNA, 21 bp, Artificial sequence
  SiRNA target sequence
actttagaatttaaaaaattc

SEQ ID NO: 23851 - DNA, 21 bp, Artificial sequence
  SiRNA target sequence
ctttagaatttaaaaaattct

SEQ ID NO: 23852 - DNA, 21 bp, Artificial sequence
  SiRNA target sequence
tttagaatttaaaaaattctc

SEQ ID NO: 23853 - DNA, 21 bp, Artificial sequence
  SiRNA target sequence
ttagaatttaaaaaattctct

SEQ ID NO: 23854 - DNA, 21 bp, Artificial sequence
  SiRNA target sequence
tagaatttaaaaaattctctg

SEQ ID NO: 23855 - DNA, 21 bp, Artificial sequence
  SiRNA target sequence
agaatttaaaaaattctctgc

SEQ ID NO: 23856 - DNA, 21 bp, Artificial sequence
  SiRNA target sequence
gaatttaaaaaattctctgcg

SEQ ID NO: 23857 - DNA, 21 bp, Artificial sequence
  SiRNA target sequence
aatttaaaaaattctctgcgg

SEQ ID NO: 23858 - DNA, 21 bp, Artificial sequence
  SiRNA target sequence
atttaaaaaattctctgcggc

SEQ ID NO: 23859 - DNA, 21 bp, Artificial sequence
  SiRNA target sequence
tttaaaaaattctctgcggca

SEQ ID NO: 23860 - DNA, 21 bp, Artificial sequence
  SiRNA target sequence
ttaaaaaattctctgcggcat

SEQ ID NO: 23861 - DNA, 21 bp, Artificial sequence
  SiRNA target sequence
taaaaaattctctgcggcatt

SEQ ID NO: 23862 - DNA, 21 bp, Artificial sequence
  SiRNA target sequence
aaaaaattctctgcggcattt

SEQ ID NO: 23863 - DNA, 21 bp, Artificial sequence
  SiRNA target sequence
aaaaattctctgcggcatttt

SEQ ID NO: 23864 - DNA, 21 bp, Artificial sequence
  SiRNA target sequence
aaaattctctgcggcattttt

SEQ ID NO: 23865 - DNA, 21 bp, Artificial sequence
  SiRNA target sequence
aaattctctgcggcatttttc

SEQ ID NO: 23866 - DNA, 21 bp, Artificial sequence
  SiRNA target sequence
aattctctgcggcatttttca

SEQ ID NO: 23867 - DNA, 21 bp, Artificial sequence
  SiRNA target sequence
attctctgcggcatttttcat

SEQ ID NO: 23868 - DNA, 21 bp, Artificial sequence
  SiRNA target sequence
ttctctgcggcatttttcatt

SEQ ID NO: 23869 - DNA, 21 bp, Artificial sequence
  SiRNA target sequence
tctctgcggcatttttcattt

SEQ ID NO: 23870 - DNA, 21 bp, Artificial sequence
  SiRNA target sequence
ctctgcggcatttttcatttt

SEQ ID NO: 23871 - DNA, 21 bp, Artificial sequence
  SiRNA target sequence
tctgcggcatttttcattttt

SEQ ID NO: 23872 - DNA, 21 bp, Artificial sequence
  SiRNA target sequence
ctgcggcatttttcatttttg

SEQ ID NO: 23873 - DNA, 21 bp, Artificial sequence
  SiRNA target sequence
tgcggcatttttcatttttga

SEQ ID NO: 23874 - DNA, 21 bp, Artificial sequence
  SiRNA target sequence
gcggcatttttcatttttgac

SEQ ID NO: 23875 - DNA, 21 bp, Artificial sequence
  SiRNA target sequence
cggcatttttcatttttgaca

SEQ ID NO: 23876 - DNA, 21 bp, Artificial sequence
  SiRNA target sequence
ggcatttttcatttttgacaa

SEQ ID NO: 23877 - DNA, 21 bp, Artificial sequence
  SiRNA target sequence
gcatttttcatttttgacaaa

SEQ ID NO: 23878 - DNA, 21 bp, Artificial sequence
  SiRNA target sequence
catttttcatttttgacaaaa

SEQ ID NO: 23879 - DNA, 21 bp, Artificial sequence
  SiRNA target sequence
atttttcatttttgacaaaat

SEQ ID NO: 23880 - DNA, 21 bp, Artificial sequence
  SiRNA target sequence
tttttcatttttgacaaaata

SEQ ID NO: 23881 - DNA, 21 bp, Artificial sequence
  SiRNA target sequence
ttttcatttttgacaaaataa

SEQ ID NO: 23882 - DNA, 21 bp, Artificial sequence
  SiRNA target sequence
tttcatttttgacaaaataaa

SEQ ID NO: 23883 - DNA, 21 bp, Artificial sequence
  SiRNA target sequence
ttcatttttgacaaaataaat

SEQ ID NO: 23884 - DNA, 21 bp, Artificial sequence
  SiRNA target sequence
tcatttttgacaaaataaatg

SEQ ID NO: 23885 - DNA, 21 bp, Artificial sequence
  SiRNA target sequence
catttttgacaaaataaatgc

SEQ ID NO: 23886 - DNA, 21 bp, Artificial sequence
  SiRNA target sequence
atttttgacaaaataaatgca

SEQ ID NO: 23887 - DNA, 21 bp, Artificial sequence
  SiRNA target sequence
tttttgacaaaataaatgcac

SEQ ID NO: 23888 - DNA, 21 bp, Artificial sequence
  SiRNA target sequence
ttttgacaaaataaatgcacc

SEQ ID NO: 23889 - DNA, 21 bp, Artificial sequence
  SiRNA target sequence
tttgacaaaataaatgcacca

SEQ ID NO: 23890 - DNA, 21 bp, Artificial sequence
  SiRNA target sequence
ttgacaaaataaatgcaccaa

SEQ ID NO: 23891 - DNA, 21 bp, Artificial sequence
  SiRNA target sequence
tgacaaaataaatgcaccaat

SEQ ID NO: 23892 - DNA, 21 bp, Artificial sequence
  SiRNA target sequence
gacaaaataaatgcaccaatt

SEQ ID NO: 23893 - DNA, 21 bp, Artificial sequence
  SiRNA target sequence
acaaaataaatgcaccaattt

SEQ ID NO: 23894 - DNA, 21 bp, Artificial sequence
  SiRNA target sequence
caaaataaatgcaccaatttg

SEQ ID NO: 23895 - DNA, 21 bp, Artificial sequence
  SiRNA target sequence
aaaataaatgcaccaatttgt

SEQ ID NO: 23896 - DNA, 21 bp, Artificial sequence
  SiRNA target sequence
aaataaatgcaccaatttgtg

SEQ ID NO: 23897 - DNA, 21 bp, Artificial sequence
  SiRNA target sequence
aataaatgcaccaatttgtgc

SEQ ID NO: 23898 - DNA, 21 bp, Artificial sequence
  SiRNA target sequence
ataaatgcaccaatttgtgca

SEQ ID NO: 23899 - DNA, 21 bp, Artificial sequence
  SiRNA target sequence
taaatgcaccaatttgtgcag

SEQ ID NO: 23900 - DNA, 21 bp, Artificial sequence
  SiRNA target sequence
aaatgcaccaatttgtgcagg

SEQ ID NO: 23901 - DNA, 21 bp, Artificial sequence
  SiRNA target sequence
aatgcaccaatttgtgcagga

SEQ ID NO: 23902 - DNA, 21 bp, Artificial sequence
  SiRNA target sequence
atgcaccaatttgtgcaggag

SEQ ID NO: 23903 - DNA, 21 bp, Artificial sequence
  SiRNA target sequence
tgcaccaatttgtgcaggaga

SEQ ID NO: 23904 - DNA, 21 bp, Artificial sequence
  SiRNA target sequence
gcaccaatttgtgcaggagaa

SEQ ID NO: 23905 - DNA, 21 bp, Artificial sequence
  SiRNA target sequence
caccaatttgtgcaggagaat

SEQ ID NO: 23906 - DNA, 21 bp, Artificial sequence
  SiRNA target sequence
accaatttgtgcaggagaata

SEQ ID NO: 23907 - DNA, 21 bp, Artificial sequence
  SiRNA target sequence
ccaatttgtgcaggagaatat

SEQ ID NO: 23908 - DNA, 21 bp, Artificial sequence
  SiRNA target sequence
caatttgtgcaggagaatatt

SEQ ID NO: 23909 - DNA, 21 bp, Artificial sequence
  SiRNA target sequence
aatttgtgcaggagaatattt

SEQ ID NO: 23910 - DNA, 21 bp, Artificial sequence
  SiRNA target sequence
atttgtgcaggagaatatttc

SEQ ID NO: 23911 - DNA, 21 bp, Artificial sequence
  SiRNA target sequence
tttgtgcaggagaatatttct

SEQ ID NO: 23912 - DNA, 21 bp, Artificial sequence
  SiRNA target sequence
ttgtgcaggagaatatttctt

SEQ ID NO: 23913 - DNA, 21 bp, Artificial sequence
  SiRNA target sequence
tgtgcaggagaatatttctta

SEQ ID NO: 23914 - DNA, 21 bp, Artificial sequence
  SiRNA target sequence
gtgcaggagaatatttcttat

SEQ ID NO: 23915 - DNA, 21 bp, Artificial sequence
  SiRNA target sequence
tgcaggagaatatttcttatt

SEQ ID NO: 23916 - DNA, 21 bp, Artificial sequence
  SiRNA target sequence
gcaggagaatatttcttattg

SEQ ID NO: 23917 - DNA, 21 bp, Artificial sequence
  SiRNA target sequence
caggagaatatttcttattgt

SEQ ID NO: 23918 - DNA, 21 bp, Artificial sequence
  SiRNA target sequence
aggagaatatttcttattgtc

SEQ ID NO: 23919 - DNA, 21 bp, Artificial sequence
  SiRNA target sequence
ggagaatatttcttattgtca

SEQ ID NO: 23920 - DNA, 21 bp, Artificial sequence
  SiRNA target sequence
gagaatatttcttattgtcaa

SEQ ID NO: 23921 - DNA, 21 bp, Artificial sequence
  SiRNA target sequence
agaatatttcttattgtcaat

SEQ ID NO: 23922 - DNA, 21 bp, Artificial sequence
  SiRNA target sequence
gaatatttcttattgtcaatt

SEQ ID NO: 23923 - DNA, 21 bp, Artificial sequence
  SiRNA target sequence
aatatttcttattgtcaattt

SEQ ID NO: 23924 - DNA, 21 bp, Artificial sequence
  SiRNA target sequence
atatttcttattgtcaatttt

SEQ ID NO: 23925 - DNA, 21 bp, Artificial sequence
  SiRNA target sequence
tatttcttattgtcaattttt

SEQ ID NO: 23926 - DNA, 21 bp, Artificial sequence
  SiRNA target sequence
atttcttattgtcaattttta

SEQ ID NO: 23927 - DNA, 21 bp, Artificial sequence
  SiRNA target sequence
tttcttattgtcaatttttat

SEQ ID NO: 23928 - DNA, 21 bp, Artificial sequence
  SiRNA target sequence
ttcttattgtcaatttttatc

SEQ ID NO: 23929 - DNA, 21 bp, Artificial sequence
  SiRNA target sequence
tcttattgtcaatttttatcc

SEQ ID NO: 23930 - DNA, 21 bp, Artificial sequence
  SiRNA target sequence
cttattgtcaatttttatcca

SEQ ID NO: 23931 - DNA, 21 bp, Artificial sequence
  SiRNA target sequence
ttattgtcaatttttatccaa

SEQ ID NO: 23932 - DNA, 21 bp, Artificial sequence
  SiRNA target sequence
tattgtcaatttttatccaaa

SEQ ID NO: 23933 - DNA, 21 bp, Artificial sequence
  SiRNA target sequence
attgtcaatttttatccaaat

SEQ ID NO: 23934 - DNA, 21 bp, Artificial sequence
  SiRNA target sequence
ttgtcaatttttatccaaata

SEQ ID NO: 23935 - DNA, 21 bp, Artificial sequence
  SiRNA target sequence
tgtcaatttttatccaaatat

SEQ ID NO: 23936 - DNA, 21 bp, Artificial sequence
  SiRNA target sequence
gtcaatttttatccaaatatc

SEQ ID NO: 23937 - DNA, 21 bp, Artificial sequence
  SiRNA target sequence
tcaatttttatccaaatatcg

SEQ ID NO: 23938 - DNA, 21 bp, Artificial sequence
  SiRNA target sequence
caatttttatccaaatatcgc

SEQ ID NO: 23939 - DNA, 21 bp, Artificial sequence
  SiRNA target sequence
aatttttatccaaatatcgcc

SEQ ID NO: 23940 - DNA, 21 bp, Artificial sequence
  SiRNA target sequence
atttttatccaaatatcgccg

SEQ ID NO: 23941 - DNA, 21 bp, Artificial sequence
  SiRNA target sequence
tttttatccaaatatcgccgt

SEQ ID NO: 23942 - DNA, 21 bp, Artificial sequence
  SiRNA target sequence
ttttatccaaatatcgccgtt

SEQ ID NO: 23943 - DNA, 21 bp, Artificial sequence
  SiRNA target sequence
tttatccaaatatcgccgtta

SEQ ID NO: 23944 - DNA, 21 bp, Artificial sequence
  SiRNA target sequence
ttatccaaatatcgccgttac

SEQ ID NO: 23945 - DNA, 21 bp, Artificial sequence
  SiRNA target sequence
tatccaaatatcgccgttaca

SEQ ID NO: 23946 - DNA, 21 bp, Artificial sequence
  SiRNA target sequence
atccaaatatcgccgttacaa

SEQ ID NO: 23947 - DNA, 21 bp, Artificial sequence
  SiRNA target sequence
tccaaatatcgccgttacaat

SEQ ID NO: 23948 - DNA, 21 bp, Artificial sequence
  SiRNA target sequence
ccaaatatcgccgttacaatg

SEQ ID NO: 23949 - DNA, 21 bp, Artificial sequence
  SiRNA target sequence
caaatatcgccgttacaatgc

SEQ ID NO: 23950 - DNA, 21 bp, Artificial sequence
  SiRNA target sequence
aaatatcgccgttacaatgct

SEQ ID NO: 23951 - DNA, 21 bp, Artificial sequence
  SiRNA target sequence
aatatcgccgttacaatgctt

SEQ ID NO: 23952 - DNA, 21 bp, Artificial sequence
  SiRNA target sequence
atatcgccgttacaatgctta

SEQ ID NO: 23953 - DNA, 21 bp, Artificial sequence
  SiRNA target sequence
tatcgccgttacaatgcttag

SEQ ID NO: 23954 - DNA, 21 bp, Artificial sequence
  SiRNA target sequence
atcgccgttacaatgcttagt

SEQ ID NO: 23955 - DNA, 21 bp, Artificial sequence
  SiRNA target sequence
tcgccgttacaatgcttagta

SEQ ID NO: 23956 - DNA, 21 bp, Artificial sequence
  SiRNA target sequence
cgccgttacaatgcttagtag

SEQ ID NO: 23957 - DNA, 21 bp, Artificial sequence
  SiRNA target sequence
gccgttacaatgcttagtagt

SEQ ID NO: 23958 - DNA, 21 bp, Artificial sequence
  SiRNA target sequence
ccgttacaatgcttagtagtg

SEQ ID NO: 23959 - DNA, 21 bp, Artificial sequence
  SiRNA target sequence
cgttacaatgcttagtagtgt

SEQ ID NO: 23960 - DNA, 21 bp, Artificial sequence
  SiRNA target sequence
gttacaatgcttagtagtgtc

SEQ ID NO: 23961 - DNA, 21 bp, Artificial sequence
  SiRNA target sequence
ttacaatgcttagtagtgtca

SEQ ID NO: 23962 - DNA, 21 bp, Artificial sequence
  SiRNA target sequence
tacaatgcttagtagtgtcat

SEQ ID NO: 23963 - DNA, 21 bp, Artificial sequence
  SiRNA target sequence
acaatgcttagtagtgtcata

SEQ ID NO: 23964 - DNA, 21 bp, Artificial sequence
  SiRNA target sequence
caatgcttagtagtgtcatat

SEQ ID NO: 23965 - DNA, 21 bp, Artificial sequence
  SiRNA target sequence
aatgcttagtagtgtcatatg

SEQ ID NO: 23966 - DNA, 21 bp, Artificial sequence
  SiRNA target sequence
atgcttagtagtgtcatatgg

SEQ ID NO: 23967 - DNA, 21 bp, Artificial sequence
  SiRNA target sequence
tgcttagtagtgtcatatggt

SEQ ID NO: 23968 - DNA, 21 bp, Artificial sequence
  SiRNA target sequence
gcttagtagtgtcatatggta

SEQ ID NO: 23969 - DNA, 21 bp, Artificial sequence
  SiRNA target sequence
cttagtagtgtcatatggtaa

SEQ ID NO: 23970 - DNA, 21 bp, Artificial sequence
  SiRNA target sequence
ttagtagtgtcatatggtaag

SEQ ID NO: 23971 - DNA, 21 bp, Artificial sequence
  SiRNA target sequence
tagtagtgtcatatggtaagc

SEQ ID NO: 23972 - DNA, 21 bp, Artificial sequence
  SiRNA target sequence
agtagtgtcatatggtaagct

SEQ ID NO: 23973 - DNA, 21 bp, Artificial sequence
  SiRNA target sequence
gtagtgtcatatggtaagctt

SEQ ID NO: 23974 - DNA, 21 bp, Artificial sequence
  SiRNA target sequence
tagtgtcatatggtaagcttt

SEQ ID NO: 23975 - DNA, 21 bp, Artificial sequence
  SiRNA target sequence
agtgtcatatggtaagctttt

SEQ ID NO: 23976 - DNA, 21 bp, Artificial sequence
  SiRNA target sequence
gtgtcatatggtaagcttttt

SEQ ID NO: 23977 - DNA, 21 bp, Artificial sequence
  SiRNA target sequence
tgtcatatggtaagcttttta

SEQ ID NO: 23978 - DNA, 21 bp, Artificial sequence
  SiRNA target sequence
gtcatatggtaagctttttaa

SEQ ID NO: 23979 - DNA, 21 bp, Artificial sequence
  SiRNA target sequence
tcatatggtaagctttttaaa

SEQ ID NO: 23980 - DNA, 21 bp, Artificial sequence
  SiRNA target sequence
catatggtaagctttttaaat

SEQ ID NO: 23981 - DNA, 21 bp, Artificial sequence
  SiRNA target sequence
atatggtaagctttttaaata

SEQ ID NO: 23982 - DNA, 21 bp, Artificial sequence
  SiRNA target sequence
tatggtaagctttttaaataa

SEQ ID NO: 23983 - DNA, 21 bp, Artificial sequence
  SiRNA target sequence
atggtaagctttttaaataat

SEQ ID NO: 23984 - DNA, 21 bp, Artificial sequence
  SiRNA target sequence
tggtaagctttttaaataatc

SEQ ID NO: 23985 - DNA, 21 bp, Artificial sequence
  SiRNA target sequence
ggtaagctttttaaataatct

SEQ ID NO: 23986 - DNA, 21 bp, Artificial sequence
  SiRNA target sequence
gtaagctttttaaataatctt

SEQ ID NO: 23987 - DNA, 21 bp, Artificial sequence
  SiRNA target sequence
taagctttttaaataatcttt

SEQ ID NO: 23988 - DNA, 21 bp, Artificial sequence
  SiRNA target sequence
aagctttttaaataatctttt

SEQ ID NO: 23989 - DNA, 21 bp, Artificial sequence
  SiRNA target sequence
agctttttaaataatctttta

SEQ ID NO: 23990 - DNA, 21 bp, Artificial sequence
  SiRNA target sequence
gctttttaaataatcttttaa

SEQ ID NO: 23991 - DNA, 21 bp, Artificial sequence
  SiRNA target sequence
ctttttaaataatcttttaat

SEQ ID NO: 23992 - DNA, 21 bp, Artificial sequence
  SiRNA target sequence
tttttaaataatcttttaatt

SEQ ID NO: 23993 - DNA, 21 bp, Artificial sequence
  SiRNA target sequence
ttttaaataatcttttaattc

SEQ ID NO: 23994 - DNA, 21 bp, Artificial sequence
  SiRNA target sequence
tttaaataatcttttaattct

SEQ ID NO: 23995 - DNA, 21 bp, Artificial sequence
  SiRNA target sequence
ttaaataatcttttaattcta

SEQ ID NO: 23996 - DNA, 21 bp, Artificial sequence
  SiRNA target sequence
taaataatcttttaattctac

SEQ ID NO: 23997 - DNA, 21 bp, Artificial sequence
  SiRNA target sequence
aaataatcttttaattctaca

SEQ ID NO: 23998 - DNA, 21 bp, Artificial sequence
  SiRNA target sequence
aataatcttttaattctacat

SEQ ID NO: 23999 - DNA, 21 bp, Artificial sequence
  SiRNA target sequence
ataatcttttaattctacatc

SEQ ID NO: 24000 - DNA, 21 bp, Artificial sequence
  SiRNA target sequence
taatcttttaattctacatca

SEQ ID NO: 24001 - DNA, 21 bp, Artificial sequence
  SiRNA target sequence
aatcttttaattctacatcat

SEQ ID NO: 24002 - DNA, 21 bp, Artificial sequence
  SiRNA target sequence
atcttttaattctacatcatc

SEQ ID NO: 24003 - DNA, 21 bp, Artificial sequence
  SiRNA target sequence
tcttttaattctacatcatca

SEQ ID NO: 24004 - DNA, 21 bp, Artificial sequence
  SiRNA target sequence
cttttaattctacatcatcaa

SEQ ID NO: 24005 - DNA, 21 bp, Artificial sequence
  SiRNA target sequence
ttttaattctacatcatcaaa

SEQ ID NO: 24006 - DNA, 21 bp, Artificial sequence
  SiRNA target sequence
tttaattctacatcatcaaat

SEQ ID NO: 24007 - DNA, 21 bp, Artificial sequence
  SiRNA target sequence
ttaattctacatcatcaaatt

SEQ ID NO: 24008 - DNA, 21 bp, Artificial sequence
  SiRNA target sequence
taattctacatcatcaaattt

SEQ ID NO: 24009 - DNA, 21 bp, Artificial sequence
  SiRNA target sequence
aattctacatcatcaaatttt

SEQ ID NO: 24010 - DNA, 21 bp, Artificial sequence
  SiRNA target sequence
attctacatcatcaaattttc

SEQ ID NO: 24011 - DNA, 21 bp, Artificial sequence
  SiRNA target sequence
ttctacatcatcaaattttcg

SEQ ID NO: 24012 - DNA, 21 bp, Artificial sequence
  SiRNA target sequence
tctacatcatcaaattttcgt

SEQ ID NO: 24013 - DNA, 21 bp, Artificial sequence
  SiRNA target sequence
ctacatcatcaaattttcgtc

SEQ ID NO: 24014 - DNA, 21 bp, Artificial sequence
  SiRNA target sequence
tacatcatcaaattttcgtcc

SEQ ID NO: 24015 - DNA, 21 bp, Artificial sequence
  SiRNA target sequence
acatcatcaaattttcgtccc

SEQ ID NO: 24016 - DNA, 21 bp, Artificial sequence
  SiRNA target sequence
catcatcaaattttcgtccca

SEQ ID NO: 24017 - DNA, 21 bp, Artificial sequence
  SiRNA target sequence
atcatcaaattttcgtcccag

SEQ ID NO: 24018 - DNA, 21 bp, Artificial sequence
  SiRNA target sequence
tcatcaaattttcgtcccagc

SEQ ID NO: 24019 - DNA, 21 bp, Artificial sequence
  SiRNA target sequence
catcaaattttcgtcccagca

SEQ ID NO: 24020 - DNA, 21 bp, Artificial sequence
  SiRNA target sequence
atcaaattttcgtcccagcaa

SEQ ID NO: 24021 - DNA, 21 bp, Artificial sequence
  SiRNA target sequence
tcaaattttcgtcccagcaat

SEQ ID NO: 24022 - DNA, 21 bp, Artificial sequence
  SiRNA target sequence
caaattttcgtcccagcaatc

SEQ ID NO: 24023 - DNA, 21 bp, Artificial sequence
  SiRNA target sequence
aaattttcgtcccagcaatct

SEQ ID NO: 24024 - DNA, 21 bp, Artificial sequence
  SiRNA target sequence
aattttcgtcccagcaatctc

SEQ ID NO: 24025 - DNA, 21 bp, Artificial sequence
  SiRNA target sequence
attttcgtcccagcaatctct

SEQ ID NO: 24026 - DNA, 21 bp, Artificial sequence
  SiRNA target sequence
ttttcgtcccagcaatctctt

SEQ ID NO: 24027 - DNA, 21 bp, Artificial sequence
  SiRNA target sequence
tttcgtcccagcaatctctta

SEQ ID NO: 24028 - DNA, 21 bp, Artificial sequence
  SiRNA target sequence
ttcgtcccagcaatctcttag

SEQ ID NO: 24029 - DNA, 21 bp, Artificial sequence
  SiRNA target sequence
tcgtcccagcaatctcttaga

SEQ ID NO: 24030 - DNA, 21 bp, Artificial sequence
  SiRNA target sequence
cgtcccagcaatctcttagac

SEQ ID NO: 24031 - DNA, 21 bp, Artificial sequence
  SiRNA target sequence
gtcccagcaatctcttagacg

SEQ ID NO: 24032 - DNA, 21 bp, Artificial sequence
  SiRNA target sequence
tcccagcaatctcttagacgc

SEQ ID NO: 24033 - DNA, 21 bp, Artificial sequence
  SiRNA target sequence
cccagcaatctcttagacgca

SEQ ID NO: 24034 - DNA, 21 bp, Artificial sequence
  SiRNA target sequence
ccagcaatctcttagacgcaa

SEQ ID NO: 24035 - DNA, 21 bp, Artificial sequence
  SiRNA target sequence
cagcaatctcttagacgcaaa

SEQ ID NO: 24036 - DNA, 21 bp, Artificial sequence
  SiRNA target sequence
agcaatctcttagacgcaaaa

SEQ ID NO: 24037 - DNA, 21 bp, Artificial sequence
  SiRNA target sequence
gcaatctcttagacgcaaaaa

SEQ ID NO: 24038 - DNA, 21 bp, Artificial sequence
  SiRNA target sequence
caatctcttagacgcaaaaat

SEQ ID NO: 24039 - DNA, 21 bp, Artificial sequence
  SiRNA target sequence
aatctcttagacgcaaaaatc

SEQ ID NO: 24040 - DNA, 21 bp, Artificial sequence
  SiRNA target sequence
atctcttagacgcaaaaatcg

SEQ ID NO: 24041 - DNA, 21 bp, Artificial sequence
  SiRNA target sequence
tctcttagacgcaaaaatcgt

SEQ ID NO: 24042 - DNA, 21 bp, Artificial sequence
  SiRNA target sequence
ctcttagacgcaaaaatcgta

SEQ ID NO: 24043 - DNA, 21 bp, Artificial sequence
  SiRNA target sequence
tcttagacgcaaaaatcgtat

SEQ ID NO: 24044 - DNA, 21 bp, Artificial sequence
  SiRNA target sequence
cttagacgcaaaaatcgtatt

SEQ ID NO: 24045 - DNA, 21 bp, Artificial sequence
  SiRNA target sequence
ttagacgcaaaaatcgtattc

SEQ ID NO: 24046 - DNA, 21 bp, Artificial sequence
  SiRNA target sequence
tagacgcaaaaatcgtattct

SEQ ID NO: 24047 - DNA, 21 bp, Artificial sequence
  SiRNA target sequence
agacgcaaaaatcgtattctt

SEQ ID NO: 24048 - DNA, 21 bp, Artificial sequence
  SiRNA target sequence
gacgcaaaaatcgtattcttg

SEQ ID NO: 24049 - DNA, 21 bp, Artificial sequence
  SiRNA target sequence
acgcaaaaatcgtattcttgg

SEQ ID NO: 24050 - DNA, 21 bp, Artificial sequence
  SiRNA target sequence
cgcaaaaatcgtattcttggg

SEQ ID NO: 24051 - DNA, 21 bp, Artificial sequence
  SiRNA target sequence
gcaaaaatcgtattcttggga

SEQ ID NO: 24052 - DNA, 21 bp, Artificial sequence
  SiRNA target sequence
caaaaatcgtattcttgggat

SEQ ID NO: 24053 - DNA, 21 bp, Artificial sequence
  SiRNA target sequence
aaaaatcgtattcttgggatg

SEQ ID NO: 24054 - DNA, 21 bp, Artificial sequence
  SiRNA target sequence
aaaatcgtattcttgggatgt

SEQ ID NO: 24055 - DNA, 21 bp, Artificial sequence
  SiRNA target sequence
aaatcgtattcttgggatgta

SEQ ID NO: 24056 - DNA, 21 bp, Artificial sequence
  SiRNA target sequence
aatcgtattcttgggatgtaa

SEQ ID NO: 24057 - DNA, 21 bp, Artificial sequence
  SiRNA target sequence
atcgtattcttgggatgtaat

SEQ ID NO: 24058 - DNA, 21 bp, Artificial sequence
  SiRNA target sequence
tcgtattcttgggatgtaata

SEQ ID NO: 24059 - DNA, 21 bp, Artificial sequence
  SiRNA target sequence
cgtattcttgggatgtaataa

SEQ ID NO: 24060 - DNA, 21 bp, Artificial sequence
  SiRNA target sequence
gtattcttgggatgtaataac

SEQ ID NO: 24061 - DNA, 21 bp, Artificial sequence
  SiRNA target sequence
tattcttgggatgtaataaca

SEQ ID NO: 24062 - DNA, 21 bp, Artificial sequence
  SiRNA target sequence
attcttgggatgtaataacaa

SEQ ID NO: 24063 - DNA, 21 bp, Artificial sequence
  SiRNA target sequence
ttcttgggatgtaataacaag

SEQ ID NO: 24064 - DNA, 21 bp, Artificial sequence
  SiRNA target sequence
tcttgggatgtaataacaagt

SEQ ID NO: 24065 - DNA, 21 bp, Artificial sequence
  SiRNA target sequence
cttgggatgtaataacaagtt

SEQ ID NO: 24066 - DNA, 21 bp, Artificial sequence
  SiRNA target sequence
ttgggatgtaataacaagtta

SEQ ID NO: 24067 - DNA, 21 bp, Artificial sequence
  SiRNA target sequence
tgggatgtaataacaagttag

SEQ ID NO: 24068 - DNA, 21 bp, Artificial sequence
  SiRNA target sequence
gggatgtaataacaagttaga

SEQ ID NO: 24069 - DNA, 21 bp, Artificial sequence
  SiRNA target sequence
ggatgtaataacaagttagac

SEQ ID NO: 24070 - DNA, 21 bp, Artificial sequence
  SiRNA target sequence
gatgtaataacaagttagact

SEQ ID NO: 24071 - DNA, 21 bp, Artificial sequence
  SiRNA target sequence
atgtaataacaagttagactt

SEQ ID NO: 24072 - DNA, 21 bp, Artificial sequence
  SiRNA target sequence
tgtaataacaagttagactta

SEQ ID NO: 24073 - DNA, 21 bp, Artificial sequence
  SiRNA target sequence
gtaataacaagttagacttag

SEQ ID NO: 24074 - DNA, 21 bp, Artificial sequence
  SiRNA target sequence
taataacaagttagacttagc

SEQ ID NO: 24075 - DNA, 21 bp, Artificial sequence
  SiRNA target sequence
aataacaagttagacttagct

SEQ ID NO: 24076 - DNA, 21 bp, Artificial sequence
  SiRNA target sequence
ataacaagttagacttagctt

SEQ ID NO: 24077 - DNA, 21 bp, Artificial sequence
  SiRNA target sequence
taacaagttagacttagcttg

SEQ ID NO: 24078 - DNA, 21 bp, Artificial sequence
  SiRNA target sequence
aacaagttagacttagcttgc

SEQ ID NO: 24079 - DNA, 21 bp, Artificial sequence
  SiRNA target sequence
acaagttagacttagcttgct

SEQ ID NO: 24080 - DNA, 21 bp, Artificial sequence
  SiRNA target sequence
caagttagacttagcttgctc

SEQ ID NO: 24081 - DNA, 21 bp, Artificial sequence
  SiRNA target sequence
aagttagacttagcttgctca

SEQ ID NO: 24082 - DNA, 21 bp, Artificial sequence
  SiRNA target sequence
agttagacttagcttgctcac

SEQ ID NO: 24083 - DNA, 21 bp, Artificial sequence
  SiRNA target sequence
gttagacttagcttgctcacc

SEQ ID NO: 24084 - DNA, 21 bp, Artificial sequence
  SiRNA target sequence
ttagacttagcttgctcacct

SEQ ID NO: 24085 - DNA, 21 bp, Artificial sequence
  SiRNA target sequence
tagacttagcttgctcacctg

SEQ ID NO: 24086 - DNA, 21 bp, Artificial sequence
  SiRNA target sequence
agacttagcttgctcacctgt

SEQ ID NO: 24087 - DNA, 21 bp, Artificial sequence
  SiRNA target sequence
gacttagcttgctcacctgtt

SEQ ID NO: 24088 - DNA, 21 bp, Artificial sequence
  SiRNA target sequence
acttagcttgctcacctgtta

SEQ ID NO: 24089 - DNA, 21 bp, Artificial sequence
  SiRNA target sequence
cttagcttgctcacctgttaa

SEQ ID NO: 24090 - DNA, 21 bp, Artificial sequence
  SiRNA target sequence
ttagcttgctcacctgttaaa

SEQ ID NO: 24091 - DNA, 21 bp, Artificial sequence
  SiRNA target sequence
tagcttgctcacctgttaaaa

SEQ ID NO: 24092 - DNA, 21 bp, Artificial sequence
  SiRNA target sequence
agcttgctcacctgttaaaat

SEQ ID NO: 24093 - DNA, 21 bp, Artificial sequence
  SiRNA target sequence
gcttgctcacctgttaaaatt

SEQ ID NO: 24094 - DNA, 21 bp, Artificial sequence
  SiRNA target sequence
cttgctcacctgttaaaattt

SEQ ID NO: 24095 - DNA, 21 bp, Artificial sequence
  SiRNA target sequence
ttgctcacctgttaaaatttt

SEQ ID NO: 24096 - DNA, 21 bp, Artificial sequence
  SiRNA target sequence
tgctcacctgttaaaatttta

SEQ ID NO: 24097 - DNA, 21 bp, Artificial sequence
  SiRNA target sequence
gctcacctgttaaaattttat

SEQ ID NO: 24098 - DNA, 21 bp, Artificial sequence
  SiRNA target sequence
ctcacctgttaaaattttatc

SEQ ID NO: 24099 - DNA, 21 bp, Artificial sequence
  SiRNA target sequence
tcacctgttaaaattttatct

SEQ ID NO: 24100 - DNA, 21 bp, Artificial sequence
  SiRNA target sequence
cacctgttaaaattttatctt

SEQ ID NO: 24101 - DNA, 21 bp, Artificial sequence
  SiRNA target sequence
acctgttaaaattttatcttt

SEQ ID NO: 24102 - DNA, 21 bp, Artificial sequence
  SiRNA target sequence
cctgttaaaattttatcttta

SEQ ID NO: 24103 - DNA, 21 bp, Artificial sequence
  SiRNA target sequence
ctgttaaaattttatctttaa

SEQ ID NO: 24104 - DNA, 21 bp, Artificial sequence
  SiRNA target sequence
tgttaaaattttatctttaaa

SEQ ID NO: 24105 - DNA, 21 bp, Artificial sequence
  SiRNA target sequence
gttaaaattttatctttaaaa

SEQ ID NO: 24106 - DNA, 21 bp, Artificial sequence
  SiRNA target sequence
ttaaaattttatctttaaaaa

SEQ ID NO: 24107 - DNA, 21 bp, Artificial sequence
  SiRNA target sequence
taaaattttatctttaaaaat

SEQ ID NO: 24108 - DNA, 21 bp, Artificial sequence
  SiRNA target sequence
aaaattttatctttaaaaatt

SEQ ID NO: 24109 - DNA, 21 bp, Artificial sequence
  SiRNA target sequence
aaattttatctttaaaaattg

SEQ ID NO: 24110 - DNA, 21 bp, Artificial sequence
  SiRNA target sequence
aattttatctttaaaaattga

SEQ ID NO: 24111 - DNA, 21 bp, Artificial sequence
  SiRNA target sequence
attttatctttaaaaattgat

SEQ ID NO: 24112 - DNA, 21 bp, Artificial sequence
  SiRNA target sequence
ttttatctttaaaaattgata

SEQ ID NO: 24113 - DNA, 21 bp, Artificial sequence
  SiRNA target sequence
tttatctttaaaaattgatac

SEQ ID NO: 24114 - DNA, 21 bp, Artificial sequence
  SiRNA target sequence
ttatctttaaaaattgatacc

SEQ ID NO: 24115 - DNA, 21 bp, Artificial sequence
  SiRNA target sequence
tatctttaaaaattgatacca

SEQ ID NO: 24116 - DNA, 21 bp, Artificial sequence
  SiRNA target sequence
atctttaaaaattgataccac

SEQ ID NO: 24117 - DNA, 21 bp, Artificial sequence
  SiRNA target sequence
tctttaaaaattgataccacc

SEQ ID NO: 24118 - DNA, 21 bp, Artificial sequence
  SiRNA target sequence
ctttaaaaattgataccaccg

SEQ ID NO: 24119 - DNA, 21 bp, Artificial sequence
  SiRNA target sequence
tttaaaaattgataccaccga

SEQ ID NO: 24120 - DNA, 21 bp, Artificial sequence
  SiRNA target sequence
ttaaaaattgataccaccgat

SEQ ID NO: 24121 - DNA, 21 bp, Artificial sequence
  SiRNA target sequence
taaaaattgataccaccgatg

SEQ ID NO: 24122 - DNA, 21 bp, Artificial sequence
  SiRNA target sequence
aaaaattgataccaccgatgg

SEQ ID NO: 24123 - DNA, 21 bp, Artificial sequence
  SiRNA target sequence
aaaattgataccaccgatggt

SEQ ID NO: 24124 - DNA, 21 bp, Artificial sequence
  SiRNA target sequence
aaattgataccaccgatggtg

SEQ ID NO: 24125 - DNA, 21 bp, Artificial sequence
  SiRNA target sequence
aattgataccaccgatggtgt

SEQ ID NO: 24126 - DNA, 21 bp, Artificial sequence
  SiRNA target sequence
attgataccaccgatggtgta

SEQ ID NO: 24127 - DNA, 21 bp, Artificial sequence
  SiRNA target sequence
ttgataccaccgatggtgtag

SEQ ID NO: 24128 - DNA, 21 bp, Artificial sequence
  SiRNA target sequence
tgataccaccgatggtgtagt

SEQ ID NO: 24129 - DNA, 21 bp, Artificial sequence
  SiRNA target sequence
gataccaccgatggtgtagtt

SEQ ID NO: 24130 - DNA, 21 bp, Artificial sequence
  SiRNA target sequence
ataccaccgatggtgtagttc

SEQ ID NO: 24131 - DNA, 21 bp, Artificial sequence
  SiRNA target sequence
taccaccgatggtgtagttct

SEQ ID NO: 24132 - DNA, 21 bp, Artificial sequence
  SiRNA target sequence
accaccgatggtgtagttcta

SEQ ID NO: 24133 - DNA, 21 bp, Artificial sequence
  SiRNA target sequence
ccaccgatggtgtagttctac

SEQ ID NO: 24134 - DNA, 21 bp, Artificial sequence
  SiRNA target sequence
caccgatggtgtagttctacc

SEQ ID NO: 24135 - DNA, 21 bp, Artificial sequence
  SiRNA target sequence
accgatggtgtagttctacca

SEQ ID NO: 24136 - DNA, 21 bp, Artificial sequence
  SiRNA target sequence
ccgatggtgtagttctaccac

SEQ ID NO: 24137 - DNA, 21 bp, Artificial sequence
  SiRNA target sequence
cgatggtgtagttctaccacc

SEQ ID NO: 24138 - DNA, 21 bp, Artificial sequence
  SiRNA target sequence
gatggtgtagttctaccacct

SEQ ID NO: 24139 - DNA, 21 bp, Artificial sequence
  SiRNA target sequence
atggtgtagttctaccacctt

SEQ ID NO: 24140 - DNA, 21 bp, Artificial sequence
  SiRNA target sequence
tggtgtagttctaccaccttc

SEQ ID NO: 24141 - DNA, 21 bp, Artificial sequence
  SiRNA target sequence
ggtgtagttctaccaccttct

SEQ ID NO: 24142 - DNA, 21 bp, Artificial sequence
  SiRNA target sequence
gtgtagttctaccaccttctt

SEQ ID NO: 24143 - DNA, 21 bp, Artificial sequence
  SiRNA target sequence
tgtagttctaccaccttcttc

SEQ ID NO: 24144 - DNA, 21 bp, Artificial sequence
  SiRNA target sequence
gtagttctaccaccttcttcg

SEQ ID NO: 24145 - DNA, 21 bp, Artificial sequence
  SiRNA target sequence
tagttctaccaccttcttcgt

SEQ ID NO: 24146 - DNA, 21 bp, Artificial sequence
  SiRNA target sequence
agttctaccaccttcttcgtt

SEQ ID NO: 24147 - DNA, 21 bp, Artificial sequence
  SiRNA target sequence
gttctaccaccttcttcgttt

SEQ ID NO: 24148 - DNA, 21 bp, Artificial sequence
  SiRNA target sequence
ttctaccaccttcttcgtttt

SEQ ID NO: 24149 - DNA, 21 bp, Artificial sequence
  SiRNA target sequence
tctaccaccttcttcgttttc

SEQ ID NO: 24150 - DNA, 21 bp, Artificial sequence
  SiRNA target sequence
ctaccaccttcttcgttttca

SEQ ID NO: 24151 - DNA, 21 bp, Artificial sequence
  SiRNA target sequence
taccaccttcttcgttttcaa

SEQ ID NO: 24152 - DNA, 21 bp, Artificial sequence
  SiRNA target sequence
accaccttcttcgttttcaat

SEQ ID NO: 24153 - DNA, 21 bp, Artificial sequence
  SiRNA target sequence
ccaccttcttcgttttcaata

SEQ ID NO: 24154 - DNA, 21 bp, Artificial sequence
  SiRNA target sequence
caccttcttcgttttcaataa

SEQ ID NO: 24155 - DNA, 21 bp, Artificial sequence
  SiRNA target sequence
accttcttcgttttcaataat

SEQ ID NO: 24156 - DNA, 21 bp, Artificial sequence
  SiRNA target sequence
ccttcttcgttttcaataatt

SEQ ID NO: 24157 - DNA, 21 bp, Artificial sequence
  SiRNA target sequence
cttcttcgttttcaataattt

SEQ ID NO: 24158 - DNA, 21 bp, Artificial sequence
  SiRNA target sequence
ttcttcgttttcaataatttg

SEQ ID NO: 24159 - DNA, 21 bp, Artificial sequence
  SiRNA target sequence
tcttcgttttcaataatttgt

SEQ ID NO: 24160 - DNA, 21 bp, Artificial sequence
  SiRNA target sequence
cttcgttttcaataatttgtg

SEQ ID NO: 24161 - DNA, 21 bp, Artificial sequence
  SiRNA target sequence
ttcgttttcaataatttgtgg

SEQ ID NO: 24162 - DNA, 21 bp, Artificial sequence
  SiRNA target sequence
tcgttttcaataatttgtggg

SEQ ID NO: 24163 - DNA, 21 bp, Artificial sequence
  SiRNA target sequence
cgttttcaataatttgtggga

SEQ ID NO: 24164 - DNA, 21 bp, Artificial sequence
  SiRNA target sequence
gttttcaataatttgtgggat

SEQ ID NO: 24165 - DNA, 21 bp, Artificial sequence
  SiRNA target sequence
ttttcaataatttgtgggata

SEQ ID NO: 24166 - DNA, 21 bp, Artificial sequence
  SiRNA target sequence
tttcaataatttgtgggatat

SEQ ID NO: 24167 - DNA, 21 bp, Artificial sequence
  SiRNA target sequence
ttcaataatttgtgggatatt

SEQ ID NO: 24168 - DNA, 21 bp, Artificial sequence
  SiRNA target sequence
tcaataatttgtgggatattg

SEQ ID NO: 24169 - DNA, 21 bp, Artificial sequence
  SiRNA target sequence
caataatttgtgggatattgt

SEQ ID NO: 24170 - DNA, 21 bp, Artificial sequence
  SiRNA target sequence
aataatttgtgggatattgtt

SEQ ID NO: 24171 - DNA, 21 bp, Artificial sequence
  SiRNA target sequence
ataatttgtgggatattgtta

SEQ ID NO: 24172 - DNA, 21 bp, Artificial sequence
  SiRNA target sequence
taatttgtgggatattgttat

SEQ ID NO: 24173 - DNA, 21 bp, Artificial sequence
  SiRNA target sequence
aatttgtgggatattgttatg

SEQ ID NO: 24174 - DNA, 21 bp, Artificial sequence
  SiRNA target sequence
atttgtgggatattgttatgt

SEQ ID NO: 24175 - DNA, 21 bp, Artificial sequence
  SiRNA target sequence
tttgtgggatattgttatgta

SEQ ID NO: 24176 - DNA, 21 bp, Artificial sequence
  SiRNA target sequence
ttgtgggatattgttatgtat

SEQ ID NO: 24177 - DNA, 21 bp, Artificial sequence
  SiRNA target sequence
tgtgggatattgttatgtata

SEQ ID NO: 24178 - DNA, 21 bp, Artificial sequence
  SiRNA target sequence
gtgggatattgttatgtataa

SEQ ID NO: 24179 - DNA, 21 bp, Artificial sequence
  SiRNA target sequence
tgggatattgttatgtataag

SEQ ID NO: 24180 - DNA, 21 bp, Artificial sequence
  SiRNA target sequence
gggatattgttatgtataaga

SEQ ID NO: 24181 - DNA, 21 bp, Artificial sequence
  SiRNA target sequence
ggatattgttatgtataagag

SEQ ID NO: 24182 - DNA, 21 bp, Artificial sequence
  SiRNA target sequence
gatattgttatgtataagaga

SEQ ID NO: 24183 - DNA, 21 bp, Artificial sequence
  SiRNA target sequence
atattgttatgtataagagac

SEQ ID NO: 24184 - DNA, 21 bp, Artificial sequence
  SiRNA target sequence
tattgttatgtataagagaca

SEQ ID NO: 24185 - DNA, 21 bp, Artificial sequence
  SiRNA target sequence
attgttatgtataagagacac

SEQ ID NO: 24186 - DNA, 21 bp, Artificial sequence
  SiRNA target sequence
ttgttatgtataagagacaca

SEQ ID NO: 24187 - DNA, 21 bp, Artificial sequence
  SiRNA target sequence
tgttatgtataagagacacac

SEQ ID NO: 24188 - DNA, 21 bp, Artificial sequence
  SiRNA target sequence
gttatgtataagagacacaca

SEQ ID NO: 24189 - DNA, 21 bp, Artificial sequence
  SiRNA target sequence
ttatgtataagagacacacaa

SEQ ID NO: 24190 - DNA, 21 bp, Artificial sequence
  SiRNA target sequence
tatgtataagagacacacaag

SEQ ID NO: 24191 - DNA, 21 bp, Artificial sequence
  SiRNA target sequence
atgtataagagacacacaaga

SEQ ID NO: 24192 - DNA, 21 bp, Artificial sequence
  SiRNA target sequence
tgtataagagacacacaagaa

SEQ ID NO: 24193 - DNA, 21 bp, Artificial sequence
  SiRNA target sequence
gtataagagacacacaagaat

SEQ ID NO: 24194 - DNA, 21 bp, Artificial sequence
  SiRNA target sequence
tataagagacacacaagaatt

SEQ ID NO: 24195 - DNA, 21 bp, Artificial sequence
  SiRNA target sequence
ataagagacacacaagaattg

SEQ ID NO: 24196 - DNA, 21 bp, Artificial sequence
  SiRNA target sequence
taagagacacacaagaattgg

SEQ ID NO: 24197 - DNA, 21 bp, Artificial sequence
  SiRNA target sequence
aagagacacacaagaattggt

SEQ ID NO: 24198 - DNA, 21 bp, Artificial sequence
  SiRNA target sequence
agagacacacaagaattggtt

SEQ ID NO: 24199 - DNA, 21 bp, Artificial sequence
  SiRNA target sequence
gagacacacaagaattggttg

SEQ ID NO: 24200 - DNA, 21 bp, Artificial sequence
  SiRNA target sequence
agacacacaagaattggttgt

SEQ ID NO: 24201 - DNA, 21 bp, Artificial sequence
  SiRNA target sequence
gacacacaagaattggttgtt

SEQ ID NO: 24202 - DNA, 21 bp, Artificial sequence
  SiRNA target sequence
acacacaagaattggttgttc

SEQ ID NO: 24203 - DNA, 21 bp, Artificial sequence
  SiRNA target sequence
cacacaagaattggttgttcc

SEQ ID NO: 24204 - DNA, 21 bp, Artificial sequence
  SiRNA target sequence
acacaagaattggttgttcct

SEQ ID NO: 24205 - DNA, 21 bp, Artificial sequence
  SiRNA target sequence
cacaagaattggttgttccta

SEQ ID NO: 24206 - DNA, 21 bp, Artificial sequence
  SiRNA target sequence
acaagaattggttgttcctag

SEQ ID NO: 24207 - DNA, 21 bp, Artificial sequence
  SiRNA target sequence
caagaattggttgttcctaga

SEQ ID NO: 24208 - DNA, 21 bp, Artificial sequence
  SiRNA target sequence
aagaattggttgttcctagat

SEQ ID NO: 24209 - DNA, 21 bp, Artificial sequence
  SiRNA target sequence
agaattggttgttcctagatc

SEQ ID NO: 24210 - DNA, 21 bp, Artificial sequence
  SiRNA target sequence
gaattggttgttcctagatca

SEQ ID NO: 24211 - DNA, 21 bp, Artificial sequence
  SiRNA target sequence
aattggttgttcctagatcaa

SEQ ID NO: 24212 - DNA, 21 bp, Artificial sequence
  SiRNA target sequence
attggttgttcctagatcaat

SEQ ID NO: 24213 - DNA, 21 bp, Artificial sequence
  SiRNA target sequence
ttggttgttcctagatcaatt

SEQ ID NO: 24214 - DNA, 21 bp, Artificial sequence
  SiRNA target sequence
tggttgttcctagatcaattc

SEQ ID NO: 24215 - DNA, 21 bp, Artificial sequence
  SiRNA target sequence
ggttgttcctagatcaattcc

SEQ ID NO: 24216 - DNA, 21 bp, Artificial sequence
  SiRNA target sequence
gttgttcctagatcaattcct

SEQ ID NO: 24217 - DNA, 21 bp, Artificial sequence
  SiRNA target sequence
ttgttcctagatcaattccta

SEQ ID NO: 24218 - DNA, 21 bp, Artificial sequence
  SiRNA target sequence
tgttcctagatcaattcctat

SEQ ID NO: 24219 - DNA, 21 bp, Artificial sequence
  SiRNA target sequence
gttcctagatcaattcctatt

SEQ ID NO: 24220 - DNA, 21 bp, Artificial sequence
  SiRNA target sequence
ttcctagatcaattcctatta

SEQ ID NO: 24221 - DNA, 21 bp, Artificial sequence
  SiRNA target sequence
tcctagatcaattcctattat

SEQ ID NO: 24222 - DNA, 21 bp, Artificial sequence
  SiRNA target sequence
cctagatcaattcctattatt

SEQ ID NO: 24223 - DNA, 21 bp, Artificial sequence
  SiRNA target sequence
ctagatcaattcctattattt

SEQ ID NO: 24224 - DNA, 21 bp, Artificial sequence
  SiRNA target sequence
tagatcaattcctattatttt

SEQ ID NO: 24225 - DNA, 21 bp, Artificial sequence
  SiRNA target sequence
agatcaattcctattatttta

SEQ ID NO: 24226 - DNA, 21 bp, Artificial sequence
  SiRNA target sequence
gatcaattcctattattttag

SEQ ID NO: 24227 - DNA, 21 bp, Artificial sequence
  SiRNA target sequence
atcaattcctattattttaga

SEQ ID NO: 24228 - DNA, 21 bp, Artificial sequence
  SiRNA target sequence
tcaattcctattattttagag

SEQ ID NO: 24229 - DNA, 21 bp, Artificial sequence
  SiRNA target sequence
caattcctattattttagagc

SEQ ID NO: 24230 - DNA, 21 bp, Artificial sequence
  SiRNA target sequence
aattcctattattttagagct

SEQ ID NO: 24231 - DNA, 21 bp, Artificial sequence
  SiRNA target sequence
attcctattattttagagcta

SEQ ID NO: 24232 - DNA, 21 bp, Artificial sequence
  SiRNA target sequence
ttcctattattttagagctaa

SEQ ID NO: 24233 - DNA, 21 bp, Artificial sequence
  SiRNA target sequence
tcctattattttagagctaat

SEQ ID NO: 24234 - DNA, 21 bp, Artificial sequence
  SiRNA target sequence
cctattattttagagctaatt

SEQ ID NO: 24235 - DNA, 21 bp, Artificial sequence
  SiRNA target sequence
ctattattttagagctaattt

SEQ ID NO: 24236 - DNA, 21 bp, Artificial sequence
  SiRNA target sequence
tattattttagagctaatttc

SEQ ID NO: 24237 - DNA, 21 bp, Artificial sequence
  SiRNA target sequence
attattttagagctaatttct

SEQ ID NO: 24238 - DNA, 21 bp, Artificial sequence
  SiRNA target sequence
ttattttagagctaatttctt

SEQ ID NO: 24239 - DNA, 21 bp, Artificial sequence
  SiRNA target sequence
tattttagagctaatttcttc

SEQ ID NO: 24240 - DNA, 21 bp, Artificial sequence
  SiRNA target sequence
attttagagctaatttcttct

SEQ ID NO: 24241 - DNA, 21 bp, Artificial sequence
  SiRNA target sequence
ttttagagctaatttcttctt

SEQ ID NO: 24242 - DNA, 21 bp, Artificial sequence
  SiRNA target sequence
tttagagctaatttcttcttt

SEQ ID NO: 24243 - DNA, 21 bp, Artificial sequence
  SiRNA target sequence
ttagagctaatttcttcttta

SEQ ID NO: 24244 - DNA, 21 bp, Artificial sequence
  SiRNA target sequence
tagagctaatttcttctttag

SEQ ID NO: 24245 - DNA, 21 bp, Artificial sequence
  SiRNA target sequence
agagctaatttcttctttaga

SEQ ID NO: 24246 - DNA, 21 bp, Artificial sequence
  SiRNA target sequence
gagctaatttcttctttagac

SEQ ID NO: 24247 - DNA, 21 bp, Artificial sequence
  SiRNA target sequence
agctaatttcttctttagaca

SEQ ID NO: 24248 - DNA, 21 bp, Artificial sequence
  SiRNA target sequence
gctaatttcttctttagacat

SEQ ID NO: 24249 - DNA, 22 bp, Artificial sequence
  SiRNA target sequence
ttaagaatttttcaatattttt

SEQ ID NO: 24250 - DNA, 22 bp, Artificial sequence
  SiRNA target sequence
taagaatttttcaatatttttt

SEQ ID NO: 24251 - DNA, 22 bp, Artificial sequence
  SiRNA target sequence
aagaatttttcaatattttttt

SEQ ID NO: 24252 - DNA, 22 bp, Artificial sequence
  SiRNA target sequence
agaatttttcaatatttttttt

SEQ ID NO: 24253 - DNA, 22 bp, Artificial sequence
  SiRNA target sequence
gaatttttcaatattttttttg

SEQ ID NO: 24254 - DNA, 22 bp, Artificial sequence
  SiRNA target sequence
aatttttcaatattttttttgc

SEQ ID NO: 24255 - DNA, 22 bp, Artificial sequence
  SiRNA target sequence
atttttcaatattttttttgct

SEQ ID NO: 24256 - DNA, 22 bp, Artificial sequence
  SiRNA target sequence
tttttcaatattttttttgctt

SEQ ID NO: 24257 - DNA, 22 bp, Artificial sequence
  SiRNA target sequence
ttttcaatattttttttgcttg

SEQ ID NO: 24258 - DNA, 22 bp, Artificial sequence
  SiRNA target sequence
tttcaatattttttttgcttgt

SEQ ID NO: 24259 - DNA, 22 bp, Artificial sequence
  SiRNA target sequence
ttcaatattttttttgcttgtt

SEQ ID NO: 24260 - DNA, 22 bp, Artificial sequence
  SiRNA target sequence
tcaatattttttttgcttgttc

SEQ ID NO: 24261 - DNA, 22 bp, Artificial sequence
  SiRNA target sequence
caatattttttttgcttgttct

SEQ ID NO: 24262 - DNA, 22 bp, Artificial sequence
  SiRNA target sequence
aatattttttttgcttgttcta

SEQ ID NO: 24263 - DNA, 22 bp, Artificial sequence
  SiRNA target sequence
atattttttttgcttgttctaa

SEQ ID NO: 24264 - DNA, 22 bp, Artificial sequence
  SiRNA target sequence
tattttttttgcttgttctaag

SEQ ID NO: 24265 - DNA, 22 bp, Artificial sequence
  SiRNA target sequence
attttttttgcttgttctaagt

SEQ ID NO: 24266 - DNA, 22 bp, Artificial sequence
  SiRNA target sequence
ttttttttgcttgttctaagtc

SEQ ID NO: 24267 - DNA, 22 bp, Artificial sequence
  SiRNA target sequence
tttttttgcttgttctaagtca

SEQ ID NO: 24268 - DNA, 22 bp, Artificial sequence
  SiRNA target sequence
ttttttgcttgttctaagtcat

SEQ ID NO: 24269 - DNA, 22 bp, Artificial sequence
  SiRNA target sequence
tttttgcttgttctaagtcata

SEQ ID NO: 24270 - DNA, 22 bp, Artificial sequence
  SiRNA target sequence
ttttgcttgttctaagtcataa

SEQ ID NO: 24271 - DNA, 22 bp, Artificial sequence
  SiRNA target sequence
tttgcttgttctaagtcataaa

SEQ ID NO: 24272 - DNA, 22 bp, Artificial sequence
  SiRNA target sequence
ttgcttgttctaagtcataaat

SEQ ID NO: 24273 - DNA, 22 bp, Artificial sequence
  SiRNA target sequence
tgcttgttctaagtcataaatt

SEQ ID NO: 24274 - DNA, 22 bp, Artificial sequence
  SiRNA target sequence
gcttgttctaagtcataaattt

SEQ ID NO: 24275 - DNA, 22 bp, Artificial sequence
  SiRNA target sequence
cttgttctaagtcataaatttt

SEQ ID NO: 24276 - DNA, 22 bp, Artificial sequence
  SiRNA target sequence
ttgttctaagtcataaattttt

SEQ ID NO: 24277 - DNA, 22 bp, Artificial sequence
  SiRNA target sequence
tgttctaagtcataaatttttt

SEQ ID NO: 24278 - DNA, 22 bp, Artificial sequence
  SiRNA target sequence
gttctaagtcataaattttttt

SEQ ID NO: 24279 - DNA, 22 bp, Artificial sequence
  SiRNA target sequence
ttctaagtcataaattttttta

SEQ ID NO: 24280 - DNA, 22 bp, Artificial sequence
  SiRNA target sequence
tctaagtcataaatttttttag

SEQ ID NO: 24281 - DNA, 22 bp, Artificial sequence
  SiRNA target sequence
ctaagtcataaatttttttagt

SEQ ID NO: 24282 - DNA, 22 bp, Artificial sequence
  SiRNA target sequence
taagtcataaatttttttagtc

SEQ ID NO: 24283 - DNA, 22 bp, Artificial sequence
  SiRNA target sequence
aagtcataaatttttttagtca

SEQ ID NO: 24284 - DNA, 22 bp, Artificial sequence
  SiRNA target sequence
agtcataaatttttttagtcaa

SEQ ID NO: 24285 - DNA, 22 bp, Artificial sequence
  SiRNA target sequence
gtcataaatttttttagtcaaa

SEQ ID NO: 24286 - DNA, 22 bp, Artificial sequence
  SiRNA target sequence
tcataaatttttttagtcaaat

SEQ ID NO: 24287 - DNA, 22 bp, Artificial sequence
  SiRNA target sequence
cataaatttttttagtcaaata

SEQ ID NO: 24288 - DNA, 22 bp, Artificial sequence
  SiRNA target sequence
ataaatttttttagtcaaatat

SEQ ID NO: 24289 - DNA, 22 bp, Artificial sequence
  SiRNA target sequence
taaatttttttagtcaaatatg

SEQ ID NO: 24290 - DNA, 22 bp, Artificial sequence
  SiRNA target sequence
aaatttttttagtcaaatatga

SEQ ID NO: 24291 - DNA, 22 bp, Artificial sequence
  SiRNA target sequence
aatttttttagtcaaatatgac

SEQ ID NO: 24292 - DNA, 22 bp, Artificial sequence
  SiRNA target sequence
atttttttagtcaaatatgact

SEQ ID NO: 24293 - DNA, 22 bp, Artificial sequence
  SiRNA target sequence
tttttttagtcaaatatgactt

SEQ ID NO: 24294 - DNA, 22 bp, Artificial sequence
  SiRNA target sequence
ttttttagtcaaatatgacttt

SEQ ID NO: 24295 - DNA, 22 bp, Artificial sequence
  SiRNA target sequence
tttttagtcaaatatgacttta

SEQ ID NO: 24296 - DNA, 22 bp, Artificial sequence
  SiRNA target sequence
ttttagtcaaatatgactttaa

SEQ ID NO: 24297 - DNA, 22 bp, Artificial sequence
  SiRNA target sequence
tttagtcaaatatgactttaaa

SEQ ID NO: 24298 - DNA, 22 bp, Artificial sequence
  SiRNA target sequence
ttagtcaaatatgactttaaaa

SEQ ID NO: 24299 - DNA, 22 bp, Artificial sequence
  SiRNA target sequence
tagtcaaatatgactttaaaat

SEQ ID NO: 24300 - DNA, 22 bp, Artificial sequence
  SiRNA target sequence
agtcaaatatgactttaaaatc

SEQ ID NO: 24301 - DNA, 22 bp, Artificial sequence
  SiRNA target sequence
gtcaaatatgactttaaaatct

SEQ ID NO: 24302 - DNA, 22 bp, Artificial sequence
  SiRNA target sequence
tcaaatatgactttaaaatctc

SEQ ID NO: 24303 - DNA, 22 bp, Artificial sequence
  SiRNA target sequence
caaatatgactttaaaatctct

SEQ ID NO: 24304 - DNA, 22 bp, Artificial sequence
  SiRNA target sequence
aaatatgactttaaaatctctt

SEQ ID NO: 24305 - DNA, 22 bp, Artificial sequence
  SiRNA target sequence
aatatgactttaaaatctcttt

SEQ ID NO: 24306 - DNA, 22 bp, Artificial sequence
  SiRNA target sequence
atatgactttaaaatctctttt

SEQ ID NO: 24307 - DNA, 22 bp, Artificial sequence
  SiRNA target sequence
tatgactttaaaatctcttttg

SEQ ID NO: 24308 - DNA, 22 bp, Artificial sequence
  SiRNA target sequence
atgactttaaaatctcttttgt

SEQ ID NO: 24309 - DNA, 22 bp, Artificial sequence
  SiRNA target sequence
tgactttaaaatctcttttgtt

SEQ ID NO: 24310 - DNA, 22 bp, Artificial sequence
  SiRNA target sequence
gactttaaaatctcttttgttt

SEQ ID NO: 24311 - DNA, 22 bp, Artificial sequence
  SiRNA target sequence
actttaaaatctcttttgtttc

SEQ ID NO: 24312 - DNA, 22 bp, Artificial sequence
  SiRNA target sequence
ctttaaaatctcttttgtttca

SEQ ID NO: 24313 - DNA, 22 bp, Artificial sequence
  SiRNA target sequence
tttaaaatctcttttgtttcat

SEQ ID NO: 24314 - DNA, 22 bp, Artificial sequence
  SiRNA target sequence
ttaaaatctcttttgtttcatc

SEQ ID NO: 24315 - DNA, 22 bp, Artificial sequence
  SiRNA target sequence
taaaatctcttttgtttcatct

SEQ ID NO: 24316 - DNA, 22 bp, Artificial sequence
  SiRNA target sequence
aaaatctcttttgtttcatctg

SEQ ID NO: 24317 - DNA, 22 bp, Artificial sequence
  SiRNA target sequence
aaatctcttttgtttcatctgt

SEQ ID NO: 24318 - DNA, 22 bp, Artificial sequence
  SiRNA target sequence
aatctcttttgtttcatctgtt

SEQ ID NO: 24319 - DNA, 22 bp, Artificial sequence
  SiRNA target sequence
atctcttttgtttcatctgtta

SEQ ID NO: 24320 - DNA, 22 bp, Artificial sequence
  SiRNA target sequence
tctcttttgtttcatctgttac

SEQ ID NO: 24321 - DNA, 22 bp, Artificial sequence
  SiRNA target sequence
ctcttttgtttcatctgttact

SEQ ID NO: 24322 - DNA, 22 bp, Artificial sequence
  SiRNA target sequence
tcttttgtttcatctgttactt

SEQ ID NO: 24323 - DNA, 22 bp, Artificial sequence
  SiRNA target sequence
cttttgtttcatctgttacttg

SEQ ID NO: 24324 - DNA, 22 bp, Artificial sequence
  SiRNA target sequence
ttttgtttcatctgttacttgt

SEQ ID NO: 24325 - DNA, 22 bp, Artificial sequence
  SiRNA target sequence
tttgtttcatctgttacttgtt

SEQ ID NO: 24326 - DNA, 22 bp, Artificial sequence
  SiRNA target sequence
ttgtttcatctgttacttgttt

SEQ ID NO: 24327 - DNA, 22 bp, Artificial sequence
  SiRNA target sequence
tgtttcatctgttacttgtttg

SEQ ID NO: 24328 - DNA, 22 bp, Artificial sequence
  SiRNA target sequence
gtttcatctgttacttgtttgt

SEQ ID NO: 24329 - DNA, 22 bp, Artificial sequence
  SiRNA target sequence
tttcatctgttacttgtttgta

SEQ ID NO: 24330 - DNA, 22 bp, Artificial sequence
  SiRNA target sequence
ttcatctgttacttgtttgtac

SEQ ID NO: 24331 - DNA, 22 bp, Artificial sequence
  SiRNA target sequence
tcatctgttacttgtttgtact

SEQ ID NO: 24332 - DNA, 22 bp, Artificial sequence
  SiRNA target sequence
catctgttacttgtttgtactt

SEQ ID NO: 24333 - DNA, 22 bp, Artificial sequence
  SiRNA target sequence
atctgttacttgtttgtacttt

SEQ ID NO: 24334 - DNA, 22 bp, Artificial sequence
  SiRNA target sequence
tctgttacttgtttgtacttta

SEQ ID NO: 24335 - DNA, 22 bp, Artificial sequence
  SiRNA target sequence
ctgttacttgtttgtactttaa

SEQ ID NO: 24336 - DNA, 22 bp, Artificial sequence
  SiRNA target sequence
tgttacttgtttgtactttaaa

SEQ ID NO: 24337 - DNA, 22 bp, Artificial sequence
  SiRNA target sequence
gttacttgtttgtactttaaaa

SEQ ID NO: 24338 - DNA, 22 bp, Artificial sequence
  SiRNA target sequence
ttacttgtttgtactttaaaaa

SEQ ID NO: 24339 - DNA, 22 bp, Artificial sequence
  SiRNA target sequence
tacttgtttgtactttaaaaat

SEQ ID NO: 24340 - DNA, 22 bp, Artificial sequence
  SiRNA target sequence
acttgtttgtactttaaaaatt

SEQ ID NO: 24341 - DNA, 22 bp, Artificial sequence
  SiRNA target sequence
cttgtttgtactttaaaaattg

SEQ ID NO: 24342 - DNA, 22 bp, Artificial sequence
  SiRNA target sequence
ttgtttgtactttaaaaattgt

SEQ ID NO: 24343 - DNA, 22 bp, Artificial sequence
  SiRNA target sequence
tgtttgtactttaaaaattgtt

SEQ ID NO: 24344 - DNA, 22 bp, Artificial sequence
  SiRNA target sequence
gtttgtactttaaaaattgttg

SEQ ID NO: 24345 - DNA, 22 bp, Artificial sequence
  SiRNA target sequence
tttgtactttaaaaattgttga

SEQ ID NO: 24346 - DNA, 22 bp, Artificial sequence
  SiRNA target sequence
ttgtactttaaaaattgttgaa

SEQ ID NO: 24347 - DNA, 22 bp, Artificial sequence
  SiRNA target sequence
tgtactttaaaaattgttgaat

SEQ ID NO: 24348 - DNA, 22 bp, Artificial sequence
  SiRNA target sequence
gtactttaaaaattgttgaatt

SEQ ID NO: 24349 - DNA, 22 bp, Artificial sequence
  SiRNA target sequence
tactttaaaaattgttgaattt

SEQ ID NO: 24350 - DNA, 22 bp, Artificial sequence
  SiRNA target sequence
actttaaaaattgttgaatttc

SEQ ID NO: 24351 - DNA, 22 bp, Artificial sequence
  SiRNA target sequence
ctttaaaaattgttgaatttca

SEQ ID NO: 24352 - DNA, 22 bp, Artificial sequence
  SiRNA target sequence
tttaaaaattgttgaatttcaa

SEQ ID NO: 24353 - DNA, 22 bp, Artificial sequence
  SiRNA target sequence
ttaaaaattgttgaatttcaat

SEQ ID NO: 24354 - DNA, 22 bp, Artificial sequence
  SiRNA target sequence
taaaaattgttgaatttcaatt

SEQ ID NO: 24355 - DNA, 22 bp, Artificial sequence
  SiRNA target sequence
aaaaattgttgaatttcaattt

SEQ ID NO: 24356 - DNA, 22 bp, Artificial sequence
  SiRNA target sequence
aaaattgttgaatttcaatttt

SEQ ID NO: 24357 - DNA, 22 bp, Artificial sequence
  SiRNA target sequence
aaattgttgaatttcaatttta

SEQ ID NO: 24358 - DNA, 22 bp, Artificial sequence
  SiRNA target sequence
aattgttgaatttcaattttaa

SEQ ID NO: 24359 - DNA, 22 bp, Artificial sequence
  SiRNA target sequence
attgttgaatttcaattttaaa

SEQ ID NO: 24360 - DNA, 22 bp, Artificial sequence
  SiRNA target sequence
ttgttgaatttcaattttaaat

SEQ ID NO: 24361 - DNA, 22 bp, Artificial sequence
  SiRNA target sequence
tgttgaatttcaattttaaatt

SEQ ID NO: 24362 - DNA, 22 bp, Artificial sequence
  SiRNA target sequence
gttgaatttcaattttaaattc

SEQ ID NO: 24363 - DNA, 22 bp, Artificial sequence
  SiRNA target sequence
ttgaatttcaattttaaattcg

SEQ ID NO: 24364 - DNA, 22 bp, Artificial sequence
  SiRNA target sequence
tgaatttcaattttaaattcgg

SEQ ID NO: 24365 - DNA, 22 bp, Artificial sequence
  SiRNA target sequence
gaatttcaattttaaattcggc

SEQ ID NO: 24366 - DNA, 22 bp, Artificial sequence
  SiRNA target sequence
aatttcaattttaaattcggca

SEQ ID NO: 24367 - DNA, 22 bp, Artificial sequence
  SiRNA target sequence
atttcaattttaaattcggcac

SEQ ID NO: 24368 - DNA, 22 bp, Artificial sequence
  SiRNA target sequence
tttcaattttaaattcggcaca

SEQ ID NO: 24369 - DNA, 22 bp, Artificial sequence
  SiRNA target sequence
ttcaattttaaattcggcacaa

SEQ ID NO: 24370 - DNA, 22 bp, Artificial sequence
  SiRNA target sequence
tcaattttaaattcggcacaat

SEQ ID NO: 24371 - DNA, 22 bp, Artificial sequence
  SiRNA target sequence
caattttaaattcggcacaatt

SEQ ID NO: 24372 - DNA, 22 bp, Artificial sequence
  SiRNA target sequence
aattttaaattcggcacaattt

SEQ ID NO: 24373 - DNA, 22 bp, Artificial sequence
  SiRNA target sequence
attttaaattcggcacaatttt

SEQ ID NO: 24374 - DNA, 22 bp, Artificial sequence
  SiRNA target sequence
ttttaaattcggcacaattttt

SEQ ID NO: 24375 - DNA, 22 bp, Artificial sequence
  SiRNA target sequence
tttaaattcggcacaatttttt

SEQ ID NO: 24376 - DNA, 22 bp, Artificial sequence
  SiRNA target sequence
ttaaattcggcacaattttttt

SEQ ID NO: 24377 - DNA, 22 bp, Artificial sequence
  SiRNA target sequence
taaattcggcacaatttttttc

SEQ ID NO: 24378 - DNA, 22 bp, Artificial sequence
  SiRNA target sequence
aaattcggcacaatttttttca

SEQ ID NO: 24379 - DNA, 22 bp, Artificial sequence
  SiRNA target sequence
aattcggcacaatttttttcaa

SEQ ID NO: 24380 - DNA, 22 bp, Artificial sequence
  SiRNA target sequence
attcggcacaatttttttcaat

SEQ ID NO: 24381 - DNA, 22 bp, Artificial sequence
  SiRNA target sequence
ttcggcacaatttttttcaatt

SEQ ID NO: 24382 - DNA, 22 bp, Artificial sequence
  SiRNA target sequence
tcggcacaatttttttcaattt

SEQ ID NO: 24383 - DNA, 22 bp, Artificial sequence
  SiRNA target sequence
cggcacaatttttttcaatttc

SEQ ID NO: 24384 - DNA, 22 bp, Artificial sequence
  SiRNA target sequence
ggcacaatttttttcaatttca

SEQ ID NO: 24385 - DNA, 22 bp, Artificial sequence
  SiRNA target sequence
gcacaatttttttcaatttcat

SEQ ID NO: 24386 - DNA, 22 bp, Artificial sequence
  SiRNA target sequence
cacaatttttttcaatttcatc

SEQ ID NO: 24387 - DNA, 22 bp, Artificial sequence
  SiRNA target sequence
acaatttttttcaatttcatct

SEQ ID NO: 24388 - DNA, 22 bp, Artificial sequence
  SiRNA target sequence
caatttttttcaatttcatctt

SEQ ID NO: 24389 - DNA, 22 bp, Artificial sequence
  SiRNA target sequence
aatttttttcaatttcatcttt

SEQ ID NO: 24390 - DNA, 22 bp, Artificial sequence
  SiRNA target sequence
atttttttcaatttcatctttt

SEQ ID NO: 24391 - DNA, 22 bp, Artificial sequence
  SiRNA target sequence
tttttttcaatttcatcttttt

SEQ ID NO: 24392 - DNA, 22 bp, Artificial sequence
  SiRNA target sequence
ttttttcaatttcatctttttt

SEQ ID NO: 24393 - DNA, 22 bp, Artificial sequence
  SiRNA target sequence
tttttcaatttcatcttttttc

SEQ ID NO: 24394 - DNA, 22 bp, Artificial sequence
  SiRNA target sequence
ttttcaatttcatcttttttcg

SEQ ID NO: 24395 - DNA, 22 bp, Artificial sequence
  SiRNA target sequence
tttcaatttcatcttttttcga

SEQ ID NO: 24396 - DNA, 22 bp, Artificial sequence
  SiRNA target sequence
ttcaatttcatcttttttcgaa

SEQ ID NO: 24397 - DNA, 22 bp, Artificial sequence
  SiRNA target sequence
tcaatttcatcttttttcgaat

SEQ ID NO: 24398 - DNA, 22 bp, Artificial sequence
  SiRNA target sequence
caatttcatcttttttcgaatt

SEQ ID NO: 24399 - DNA, 22 bp, Artificial sequence
  SiRNA target sequence
aatttcatcttttttcgaattt

SEQ ID NO: 24400 - DNA, 22 bp, Artificial sequence
  SiRNA target sequence
atttcatcttttttcgaatttt

SEQ ID NO: 24401 - DNA, 22 bp, Artificial sequence
  SiRNA target sequence
tttcatcttttttcgaattttc

SEQ ID NO: 24402 - DNA, 22 bp, Artificial sequence
  SiRNA target sequence
ttcatcttttttcgaattttct

SEQ ID NO: 24403 - DNA, 22 bp, Artificial sequence
  SiRNA target sequence
tcatcttttttcgaattttctt

SEQ ID NO: 24404 - DNA, 22 bp, Artificial sequence
  SiRNA target sequence
catcttttttcgaattttcttc

SEQ ID NO: 24405 - DNA, 22 bp, Artificial sequence
  SiRNA target sequence
atcttttttcgaattttcttcg

SEQ ID NO: 24406 - DNA, 22 bp, Artificial sequence
  SiRNA target sequence
tcttttttcgaattttcttcgg

SEQ ID NO: 24407 - DNA, 22 bp, Artificial sequence
  SiRNA target sequence
cttttttcgaattttcttcggc

SEQ ID NO: 24408 - DNA, 22 bp, Artificial sequence
  SiRNA target sequence
ttttttcgaattttcttcggct

SEQ ID NO: 24409 - DNA, 22 bp, Artificial sequence
  SiRNA target sequence
tttttcgaattttcttcggctt

SEQ ID NO: 24410 - DNA, 22 bp, Artificial sequence
  SiRNA target sequence
ttttcgaattttcttcggcttc

SEQ ID NO: 24411 - DNA, 22 bp, Artificial sequence
  SiRNA target sequence
tttcgaattttcttcggcttct

SEQ ID NO: 24412 - DNA, 22 bp, Artificial sequence
  SiRNA target sequence
ttcgaattttcttcggcttctc

SEQ ID NO: 24413 - DNA, 22 bp, Artificial sequence
  SiRNA target sequence
tcgaattttcttcggcttctcg

SEQ ID NO: 24414 - DNA, 22 bp, Artificial sequence
  SiRNA target sequence
cgaattttcttcggcttctcgt

SEQ ID NO: 24415 - DNA, 22 bp, Artificial sequence
  SiRNA target sequence
gaattttcttcggcttctcgta

SEQ ID NO: 24416 - DNA, 22 bp, Artificial sequence
  SiRNA target sequence
aattttcttcggcttctcgtat

SEQ ID NO: 24417 - DNA, 22 bp, Artificial sequence
  SiRNA target sequence
attttcttcggcttctcgtatc

SEQ ID NO: 24418 - DNA, 22 bp, Artificial sequence
  SiRNA target sequence
ttttcttcggcttctcgtatca

SEQ ID NO: 24419 - DNA, 22 bp, Artificial sequence
  SiRNA target sequence
tttcttcggcttctcgtatcat

SEQ ID NO: 24420 - DNA, 22 bp, Artificial sequence
  SiRNA target sequence
ttcttcggcttctcgtatcatt

SEQ ID NO: 24421 - DNA, 22 bp, Artificial sequence
  SiRNA target sequence
tcttcggcttctcgtatcattt

SEQ ID NO: 24422 - DNA, 22 bp, Artificial sequence
  SiRNA target sequence
cttcggcttctcgtatcatttg

SEQ ID NO: 24423 - DNA, 22 bp, Artificial sequence
  SiRNA target sequence
ttcggcttctcgtatcatttgc

SEQ ID NO: 24424 - DNA, 22 bp, Artificial sequence
  SiRNA target sequence
tcggcttctcgtatcatttgcg

SEQ ID NO: 24425 - DNA, 22 bp, Artificial sequence
  SiRNA target sequence
cggcttctcgtatcatttgcga

SEQ ID NO: 24426 - DNA, 22 bp, Artificial sequence
  SiRNA target sequence
ggcttctcgtatcatttgcgaa

SEQ ID NO: 24427 - DNA, 22 bp, Artificial sequence
  SiRNA target sequence
gcttctcgtatcatttgcgaaa

SEQ ID NO: 24428 - DNA, 22 bp, Artificial sequence
  SiRNA target sequence
cttctcgtatcatttgcgaaat

SEQ ID NO: 24429 - DNA, 22 bp, Artificial sequence
  SiRNA target sequence
ttctcgtatcatttgcgaaatt

SEQ ID NO: 24430 - DNA, 22 bp, Artificial sequence
  SiRNA target sequence
tctcgtatcatttgcgaaattt

SEQ ID NO: 24431 - DNA, 22 bp, Artificial sequence
  SiRNA target sequence
ctcgtatcatttgcgaaatttc

SEQ ID NO: 24432 - DNA, 22 bp, Artificial sequence
  SiRNA target sequence
tcgtatcatttgcgaaatttca

SEQ ID NO: 24433 - DNA, 22 bp, Artificial sequence
  SiRNA target sequence
cgtatcatttgcgaaatttcac

SEQ ID NO: 24434 - DNA, 22 bp, Artificial sequence
  SiRNA target sequence
gtatcatttgcgaaatttcacc

SEQ ID NO: 24435 - DNA, 22 bp, Artificial sequence
  SiRNA target sequence
tatcatttgcgaaatttcacct

SEQ ID NO: 24436 - DNA, 22 bp, Artificial sequence
  SiRNA target sequence
atcatttgcgaaatttcacctt

SEQ ID NO: 24437 - DNA, 22 bp, Artificial sequence
  SiRNA target sequence
tcatttgcgaaatttcaccttc

SEQ ID NO: 24438 - DNA, 22 bp, Artificial sequence
  SiRNA target sequence
catttgcgaaatttcaccttca

SEQ ID NO: 24439 - DNA, 22 bp, Artificial sequence
  SiRNA target sequence
atttgcgaaatttcaccttcat

SEQ ID NO: 24440 - DNA, 22 bp, Artificial sequence
  SiRNA target sequence
tttgcgaaatttcaccttcatt

SEQ ID NO: 24441 - DNA, 22 bp, Artificial sequence
  SiRNA target sequence
ttgcgaaatttcaccttcattt

SEQ ID NO: 24442 - DNA, 22 bp, Artificial sequence
  SiRNA target sequence
tgcgaaatttcaccttcattta

SEQ ID NO: 24443 - DNA, 22 bp, Artificial sequence
  SiRNA target sequence
gcgaaatttcaccttcatttaa

SEQ ID NO: 24444 - DNA, 22 bp, Artificial sequence
  SiRNA target sequence
cgaaatttcaccttcatttaat

SEQ ID NO: 24445 - DNA, 22 bp, Artificial sequence
  SiRNA target sequence
gaaatttcaccttcatttaatc

SEQ ID NO: 24446 - DNA, 22 bp, Artificial sequence
  SiRNA target sequence
aaatttcaccttcatttaatcc

SEQ ID NO: 24447 - DNA, 22 bp, Artificial sequence
  SiRNA target sequence
aatttcaccttcatttaatcca

SEQ ID NO: 24448 - DNA, 22 bp, Artificial sequence
  SiRNA target sequence
atttcaccttcatttaatccac

SEQ ID NO: 24449 - DNA, 22 bp, Artificial sequence
  SiRNA target sequence
tttcaccttcatttaatccact

SEQ ID NO: 24450 - DNA, 22 bp, Artificial sequence
  SiRNA target sequence
ttcaccttcatttaatccactt

SEQ ID NO: 24451 - DNA, 22 bp, Artificial sequence
  SiRNA target sequence
tcaccttcatttaatccacttg

SEQ ID NO: 24452 - DNA, 22 bp, Artificial sequence
  SiRNA target sequence
caccttcatttaatccacttga

SEQ ID NO: 24453 - DNA, 22 bp, Artificial sequence
  SiRNA target sequence
accttcatttaatccacttgaa

SEQ ID NO: 24454 - DNA, 22 bp, Artificial sequence
  SiRNA target sequence
ccttcatttaatccacttgaag

SEQ ID NO: 24455 - DNA, 22 bp, Artificial sequence
  SiRNA target sequence
cttcatttaatccacttgaagg

SEQ ID NO: 24456 - DNA, 22 bp, Artificial sequence
  SiRNA target sequence
ttcatttaatccacttgaaggc

SEQ ID NO: 24457 - DNA, 22 bp, Artificial sequence
  SiRNA target sequence
tcatttaatccacttgaaggca

SEQ ID NO: 24458 - DNA, 22 bp, Artificial sequence
  SiRNA target sequence
catttaatccacttgaaggcac

SEQ ID NO: 24459 - DNA, 22 bp, Artificial sequence
  SiRNA target sequence
atttaatccacttgaaggcaca

SEQ ID NO: 24460 - DNA, 22 bp, Artificial sequence
  SiRNA target sequence
tttaatccacttgaaggcacaa

SEQ ID NO: 24461 - DNA, 22 bp, Artificial sequence
  SiRNA target sequence
ttaatccacttgaaggcacaat

SEQ ID NO: 24462 - DNA, 22 bp, Artificial sequence
  SiRNA target sequence
taatccacttgaaggcacaatt

SEQ ID NO: 24463 - DNA, 22 bp, Artificial sequence
  SiRNA target sequence
aatccacttgaaggcacaattt

SEQ ID NO: 24464 - DNA, 22 bp, Artificial sequence
  SiRNA target sequence
atccacttgaaggcacaatttc

SEQ ID NO: 24465 - DNA, 22 bp, Artificial sequence
  SiRNA target sequence
tccacttgaaggcacaatttcg

SEQ ID NO: 24466 - DNA, 22 bp, Artificial sequence
  SiRNA target sequence
ccacttgaaggcacaatttcga

SEQ ID NO: 24467 - DNA, 22 bp, Artificial sequence
  SiRNA target sequence
cacttgaaggcacaatttcgat

SEQ ID NO: 24468 - DNA, 22 bp, Artificial sequence
  SiRNA target sequence
acttgaaggcacaatttcgatt

SEQ ID NO: 24469 - DNA, 22 bp, Artificial sequence
  SiRNA target sequence
cttgaaggcacaatttcgattt

SEQ ID NO: 24470 - DNA, 22 bp, Artificial sequence
  SiRNA target sequence
ttgaaggcacaatttcgatttc

SEQ ID NO: 24471 - DNA, 22 bp, Artificial sequence
  SiRNA target sequence
tgaaggcacaatttcgatttct

SEQ ID NO: 24472 - DNA, 22 bp, Artificial sequence
  SiRNA target sequence
gaaggcacaatttcgatttctt

SEQ ID NO: 24473 - DNA, 22 bp, Artificial sequence
  SiRNA target sequence
aaggcacaatttcgatttcttg

SEQ ID NO: 24474 - DNA, 22 bp, Artificial sequence
  SiRNA target sequence
aggcacaatttcgatttcttgc

SEQ ID NO: 24475 - DNA, 22 bp, Artificial sequence
  SiRNA target sequence
ggcacaatttcgatttcttgct

SEQ ID NO: 24476 - DNA, 22 bp, Artificial sequence
  SiRNA target sequence
gcacaatttcgatttcttgctt

SEQ ID NO: 24477 - DNA, 22 bp, Artificial sequence
  SiRNA target sequence
cacaatttcgatttcttgcttt

SEQ ID NO: 24478 - DNA, 22 bp, Artificial sequence
  SiRNA target sequence
acaatttcgatttcttgctttt

SEQ ID NO: 24479 - DNA, 22 bp, Artificial sequence
  SiRNA target sequence
caatttcgatttcttgcttttt

SEQ ID NO: 24480 - DNA, 22 bp, Artificial sequence
  SiRNA target sequence
aatttcgatttcttgctttttt

SEQ ID NO: 24481 - DNA, 22 bp, Artificial sequence
  SiRNA target sequence
atttcgatttcttgcttttttt

SEQ ID NO: 24482 - DNA, 22 bp, Artificial sequence
  SiRNA target sequence
tttcgatttcttgctttttttt

SEQ ID NO: 24483 - DNA, 22 bp, Artificial sequence
  SiRNA target sequence
ttcgatttcttgcttttttttc

SEQ ID NO: 24484 - DNA, 22 bp, Artificial sequence
  SiRNA target sequence
tcgatttcttgcttttttttcg

SEQ ID NO: 24485 - DNA, 22 bp, Artificial sequence
  SiRNA target sequence
cgatttcttgcttttttttcgt

SEQ ID NO: 24486 - DNA, 22 bp, Artificial sequence
  SiRNA target sequence
gatttcttgcttttttttcgtt

SEQ ID NO: 24487 - DNA, 22 bp, Artificial sequence
  SiRNA target sequence
atttcttgcttttttttcgtta

SEQ ID NO: 24488 - DNA, 22 bp, Artificial sequence
  SiRNA target sequence
tttcttgcttttttttcgttat

SEQ ID NO: 24489 - DNA, 22 bp, Artificial sequence
  SiRNA target sequence
ttcttgcttttttttcgttatc

SEQ ID NO: 24490 - DNA, 22 bp, Artificial sequence
  SiRNA target sequence
tcttgcttttttttcgttatcc

SEQ ID NO: 24491 - DNA, 22 bp, Artificial sequence
  SiRNA target sequence
cttgcttttttttcgttatccc

SEQ ID NO: 24492 - DNA, 22 bp, Artificial sequence
  SiRNA target sequence
ttgcttttttttcgttatcccg

SEQ ID NO: 24493 - DNA, 22 bp, Artificial sequence
  SiRNA target sequence
tgcttttttttcgttatcccgt

SEQ ID NO: 24494 - DNA, 22 bp, Artificial sequence
  SiRNA target sequence
gcttttttttcgttatcccgtc

SEQ ID NO: 24495 - DNA, 22 bp, Artificial sequence
  SiRNA target sequence
cttttttttcgttatcccgtct

SEQ ID NO: 24496 - DNA, 22 bp, Artificial sequence
  SiRNA target sequence
ttttttttcgttatcccgtctt

SEQ ID NO: 24497 - DNA, 22 bp, Artificial sequence
  SiRNA target sequence
tttttttcgttatcccgtcttg

SEQ ID NO: 24498 - DNA, 22 bp, Artificial sequence
  SiRNA target sequence
ttttttcgttatcccgtcttgc

SEQ ID NO: 24499 - DNA, 22 bp, Artificial sequence
  SiRNA target sequence
tttttcgttatcccgtcttgcg

SEQ ID NO: 24500 - DNA, 22 bp, Artificial sequence
  SiRNA target sequence
ttttcgttatcccgtcttgcgc

SEQ ID NO: 24501 - DNA, 22 bp, Artificial sequence
  SiRNA target sequence
tttcgttatcccgtcttgcgca

SEQ ID NO: 24502 - DNA, 22 bp, Artificial sequence
  SiRNA target sequence
ttcgttatcccgtcttgcgcag

SEQ ID NO: 24503 - DNA, 22 bp, Artificial sequence
  SiRNA target sequence
tcgttatcccgtcttgcgcaga

SEQ ID NO: 24504 - DNA, 22 bp, Artificial sequence
  SiRNA target sequence
cgttatcccgtcttgcgcagat

SEQ ID NO: 24505 - DNA, 22 bp, Artificial sequence
  SiRNA target sequence
gttatcccgtcttgcgcagata

SEQ ID NO: 24506 - DNA, 22 bp, Artificial sequence
  SiRNA target sequence
ttatcccgtcttgcgcagatac

SEQ ID NO: 24507 - DNA, 22 bp, Artificial sequence
  SiRNA target sequence
tatcccgtcttgcgcagatact

SEQ ID NO: 24508 - DNA, 22 bp, Artificial sequence
  SiRNA target sequence
atcccgtcttgcgcagatactt

SEQ ID NO: 24509 - DNA, 22 bp, Artificial sequence
  SiRNA target sequence
tcccgtcttgcgcagatacttt

SEQ ID NO: 24510 - DNA, 22 bp, Artificial sequence
  SiRNA target sequence
cccgtcttgcgcagatactttg

SEQ ID NO: 24511 - DNA, 22 bp, Artificial sequence
  SiRNA target sequence
ccgtcttgcgcagatactttgt

SEQ ID NO: 24512 - DNA, 22 bp, Artificial sequence
  SiRNA target sequence
cgtcttgcgcagatactttgta

SEQ ID NO: 24513 - DNA, 22 bp, Artificial sequence
  SiRNA target sequence
gtcttgcgcagatactttgtat

SEQ ID NO: 24514 - DNA, 22 bp, Artificial sequence
  SiRNA target sequence
tcttgcgcagatactttgtata

SEQ ID NO: 24515 - DNA, 22 bp, Artificial sequence
  SiRNA target sequence
cttgcgcagatactttgtatat

SEQ ID NO: 24516 - DNA, 22 bp, Artificial sequence
  SiRNA target sequence
ttgcgcagatactttgtatatt

SEQ ID NO: 24517 - DNA, 22 bp, Artificial sequence
  SiRNA target sequence
tgcgcagatactttgtatattc

SEQ ID NO: 24518 - DNA, 22 bp, Artificial sequence
  SiRNA target sequence
gcgcagatactttgtatattcc

SEQ ID NO: 24519 - DNA, 22 bp, Artificial sequence
  SiRNA target sequence
cgcagatactttgtatattccg

SEQ ID NO: 24520 - DNA, 22 bp, Artificial sequence
  SiRNA target sequence
gcagatactttgtatattccgt

SEQ ID NO: 24521 - DNA, 22 bp, Artificial sequence
  SiRNA target sequence
cagatactttgtatattccgtt

SEQ ID NO: 24522 - DNA, 22 bp, Artificial sequence
  SiRNA target sequence
agatactttgtatattccgtta

SEQ ID NO: 24523 - DNA, 22 bp, Artificial sequence
  SiRNA target sequence
gatactttgtatattccgttag

SEQ ID NO: 24524 - DNA, 22 bp, Artificial sequence
  SiRNA target sequence
atactttgtatattccgttagc

SEQ ID NO: 24525 - DNA, 22 bp, Artificial sequence
  SiRNA target sequence
tactttgtatattccgttagca

SEQ ID NO: 24526 - DNA, 22 bp, Artificial sequence
  SiRNA target sequence
actttgtatattccgttagcat

SEQ ID NO: 24527 - DNA, 22 bp, Artificial sequence
  SiRNA target sequence
ctttgtatattccgttagcatc

SEQ ID NO: 24528 - DNA, 22 bp, Artificial sequence
  SiRNA target sequence
tttgtatattccgttagcatcg

SEQ ID NO: 24529 - DNA, 22 bp, Artificial sequence
  SiRNA target sequence
ttgtatattccgttagcatcgg

SEQ ID NO: 24530 - DNA, 22 bp, Artificial sequence
  SiRNA target sequence
tgtatattccgttagcatcggc

SEQ ID NO: 24531 - DNA, 22 bp, Artificial sequence
  SiRNA target sequence
gtatattccgttagcatcggct

SEQ ID NO: 24532 - DNA, 22 bp, Artificial sequence
  SiRNA target sequence
tatattccgttagcatcggctt

SEQ ID NO: 24533 - DNA, 22 bp, Artificial sequence
  SiRNA target sequence
atattccgttagcatcggcttc

SEQ ID NO: 24534 - DNA, 22 bp, Artificial sequence
  SiRNA target sequence
tattccgttagcatcggcttca

SEQ ID NO: 24535 - DNA, 22 bp, Artificial sequence
  SiRNA target sequence
attccgttagcatcggcttcaa

SEQ ID NO: 24536 - DNA, 22 bp, Artificial sequence
  SiRNA target sequence
ttccgttagcatcggcttcaaa

SEQ ID NO: 24537 - DNA, 22 bp, Artificial sequence
  SiRNA target sequence
tccgttagcatcggcttcaaat

SEQ ID NO: 24538 - DNA, 22 bp, Artificial sequence
  SiRNA target sequence
ccgttagcatcggcttcaaatg

SEQ ID NO: 24539 - DNA, 22 bp, Artificial sequence
  SiRNA target sequence
cgttagcatcggcttcaaatgt

SEQ ID NO: 24540 - DNA, 22 bp, Artificial sequence
  SiRNA target sequence
gttagcatcggcttcaaatgta

SEQ ID NO: 24541 - DNA, 22 bp, Artificial sequence
  SiRNA target sequence
ttagcatcggcttcaaatgtaa

SEQ ID NO: 24542 - DNA, 22 bp, Artificial sequence
  SiRNA target sequence
tagcatcggcttcaaatgtaac

SEQ ID NO: 24543 - DNA, 22 bp, Artificial sequence
  SiRNA target sequence
agcatcggcttcaaatgtaaca

SEQ ID NO: 24544 - DNA, 22 bp, Artificial sequence
  SiRNA target sequence
gcatcggcttcaaatgtaacat

SEQ ID NO: 24545 - DNA, 22 bp, Artificial sequence
  SiRNA target sequence
catcggcttcaaatgtaacatc

SEQ ID NO: 24546 - DNA, 22 bp, Artificial sequence
  SiRNA target sequence
atcggcttcaaatgtaacatct

SEQ ID NO: 24547 - DNA, 22 bp, Artificial sequence
  SiRNA target sequence
tcggcttcaaatgtaacatcta

SEQ ID NO: 24548 - DNA, 22 bp, Artificial sequence
  SiRNA target sequence
cggcttcaaatgtaacatctat

SEQ ID NO: 24549 - DNA, 22 bp, Artificial sequence
  SiRNA target sequence
ggcttcaaatgtaacatctatc

SEQ ID NO: 24550 - DNA, 22 bp, Artificial sequence
  SiRNA target sequence
gcttcaaatgtaacatctatct

SEQ ID NO: 24551 - DNA, 22 bp, Artificial sequence
  SiRNA target sequence
cttcaaatgtaacatctatctt

SEQ ID NO: 24552 - DNA, 22 bp, Artificial sequence
  SiRNA target sequence
ttcaaatgtaacatctatcttt

SEQ ID NO: 24553 - DNA, 22 bp, Artificial sequence
  SiRNA target sequence
tcaaatgtaacatctatctttg

SEQ ID NO: 24554 - DNA, 22 bp, Artificial sequence
  SiRNA target sequence
caaatgtaacatctatctttgg

SEQ ID NO: 24555 - DNA, 22 bp, Artificial sequence
  SiRNA target sequence
aaatgtaacatctatctttgga

SEQ ID NO: 24556 - DNA, 22 bp, Artificial sequence
  SiRNA target sequence
aatgtaacatctatctttggaa

SEQ ID NO: 24557 - DNA, 22 bp, Artificial sequence
  SiRNA target sequence
atgtaacatctatctttggaat

SEQ ID NO: 24558 - DNA, 22 bp, Artificial sequence
  SiRNA target sequence
tgtaacatctatctttggaata

SEQ ID NO: 24559 - DNA, 22 bp, Artificial sequence
  SiRNA target sequence
gtaacatctatctttggaatac

SEQ ID NO: 24560 - DNA, 22 bp, Artificial sequence
  SiRNA target sequence
taacatctatctttggaatacc

SEQ ID NO: 24561 - DNA, 22 bp, Artificial sequence
  SiRNA target sequence
aacatctatctttggaatacct

SEQ ID NO: 24562 - DNA, 22 bp, Artificial sequence
  SiRNA target sequence
acatctatctttggaatacctg

SEQ ID NO: 24563 - DNA, 22 bp, Artificial sequence
  SiRNA target sequence
catctatctttggaatacctgc

SEQ ID NO: 24564 - DNA, 22 bp, Artificial sequence
  SiRNA target sequence
atctatctttggaatacctgca

SEQ ID NO: 24565 - DNA, 22 bp, Artificial sequence
  SiRNA target sequence
tctatctttggaatacctgcag

SEQ ID NO: 24566 - DNA, 22 bp, Artificial sequence
  SiRNA target sequence
ctatctttggaatacctgcagg

SEQ ID NO: 24567 - DNA, 22 bp, Artificial sequence
  SiRNA target sequence
tatctttggaatacctgcaggt

SEQ ID NO: 24568 - DNA, 22 bp, Artificial sequence
  SiRNA target sequence
atctttggaatacctgcaggtg

SEQ ID NO: 24569 - DNA, 22 bp, Artificial sequence
  SiRNA target sequence
tctttggaatacctgcaggtgc

SEQ ID NO: 24570 - DNA, 22 bp, Artificial sequence
  SiRNA target sequence
ctttggaatacctgcaggtgct

SEQ ID NO: 24571 - DNA, 22 bp, Artificial sequence
  SiRNA target sequence
tttggaatacctgcaggtgctt

SEQ ID NO: 24572 - DNA, 22 bp, Artificial sequence
  SiRNA target sequence
ttggaatacctgcaggtgcttt

SEQ ID NO: 24573 - DNA, 22 bp, Artificial sequence
  SiRNA target sequence
tggaatacctgcaggtgcttta

SEQ ID NO: 24574 - DNA, 22 bp, Artificial sequence
  SiRNA target sequence
ggaatacctgcaggtgctttag

SEQ ID NO: 24575 - DNA, 22 bp, Artificial sequence
  SiRNA target sequence
gaatacctgcaggtgctttagg

SEQ ID NO: 24576 - DNA, 22 bp, Artificial sequence
  SiRNA target sequence
aatacctgcaggtgctttagga

SEQ ID NO: 24577 - DNA, 22 bp, Artificial sequence
  SiRNA target sequence
atacctgcaggtgctttaggaa

SEQ ID NO: 24578 - DNA, 22 bp, Artificial sequence
  SiRNA target sequence
tacctgcaggtgctttaggaat

SEQ ID NO: 24579 - DNA, 22 bp, Artificial sequence
  SiRNA target sequence
acctgcaggtgctttaggaatg

SEQ ID NO: 24580 - DNA, 22 bp, Artificial sequence
  SiRNA target sequence
cctgcaggtgctttaggaatgt

SEQ ID NO: 24581 - DNA, 22 bp, Artificial sequence
  SiRNA target sequence
ctgcaggtgctttaggaatgtt

SEQ ID NO: 24582 - DNA, 22 bp, Artificial sequence
  SiRNA target sequence
tgcaggtgctttaggaatgttt

SEQ ID NO: 24583 - DNA, 22 bp, Artificial sequence
  SiRNA target sequence
gcaggtgctttaggaatgtttt

SEQ ID NO: 24584 - DNA, 22 bp, Artificial sequence
  SiRNA target sequence
caggtgctttaggaatgttttt

SEQ ID NO: 24585 - DNA, 22 bp, Artificial sequence
  SiRNA target sequence
aggtgctttaggaatgtttttg

SEQ ID NO: 24586 - DNA, 22 bp, Artificial sequence
  SiRNA target sequence
ggtgctttaggaatgtttttga

SEQ ID NO: 24587 - DNA, 22 bp, Artificial sequence
  SiRNA target sequence
gtgctttaggaatgtttttgag

SEQ ID NO: 24588 - DNA, 22 bp, Artificial sequence
  SiRNA target sequence
tgctttaggaatgtttttgagc

SEQ ID NO: 24589 - DNA, 22 bp, Artificial sequence
  SiRNA target sequence
gctttaggaatgtttttgagct

SEQ ID NO: 24590 - DNA, 22 bp, Artificial sequence
  SiRNA target sequence
ctttaggaatgtttttgagctt

SEQ ID NO: 24591 - DNA, 22 bp, Artificial sequence
  SiRNA target sequence
tttaggaatgtttttgagcttt

SEQ ID NO: 24592 - DNA, 22 bp, Artificial sequence
  SiRNA target sequence
ttaggaatgtttttgagcttta

SEQ ID NO: 24593 - DNA, 22 bp, Artificial sequence
  SiRNA target sequence
taggaatgtttttgagctttat

SEQ ID NO: 24594 - DNA, 22 bp, Artificial sequence
  SiRNA target sequence
aggaatgtttttgagctttata

SEQ ID NO: 24595 - DNA, 22 bp, Artificial sequence
  SiRNA target sequence
ggaatgtttttgagctttatag

SEQ ID NO: 24596 - DNA, 22 bp, Artificial sequence
  SiRNA target sequence
gaatgtttttgagctttatagc

SEQ ID NO: 24597 - DNA, 22 bp, Artificial sequence
  SiRNA target sequence
aatgtttttgagctttatagct

SEQ ID NO: 24598 - DNA, 22 bp, Artificial sequence
  SiRNA target sequence
atgtttttgagctttatagctc

SEQ ID NO: 24599 - DNA, 22 bp, Artificial sequence
  SiRNA target sequence
tgtttttgagctttatagctcc

SEQ ID NO: 24600 - DNA, 22 bp, Artificial sequence
  SiRNA target sequence
gtttttgagctttatagctcct

SEQ ID NO: 24601 - DNA, 22 bp, Artificial sequence
  SiRNA target sequence
tttttgagctttatagctccta

SEQ ID NO: 24602 - DNA, 22 bp, Artificial sequence
  SiRNA target sequence
ttttgagctttatagctcctaa

SEQ ID NO: 24603 - DNA, 22 bp, Artificial sequence
  SiRNA target sequence
tttgagctttatagctcctaaa

SEQ ID NO: 24604 - DNA, 22 bp, Artificial sequence
  SiRNA target sequence
ttgagctttatagctcctaaat

SEQ ID NO: 24605 - DNA, 22 bp, Artificial sequence
  SiRNA target sequence
tgagctttatagctcctaaata

SEQ ID NO: 24606 - DNA, 22 bp, Artificial sequence
  SiRNA target sequence
gagctttatagctcctaaatat

SEQ ID NO: 24607 - DNA, 22 bp, Artificial sequence
  SiRNA target sequence
agctttatagctcctaaatatt

SEQ ID NO: 24608 - DNA, 22 bp, Artificial sequence
  SiRNA target sequence
gctttatagctcctaaatattt

SEQ ID NO: 24609 - DNA, 22 bp, Artificial sequence
  SiRNA target sequence
ctttatagctcctaaatattta

SEQ ID NO: 24610 - DNA, 22 bp, Artificial sequence
  SiRNA target sequence
tttatagctcctaaatatttat

SEQ ID NO: 24611 - DNA, 22 bp, Artificial sequence
  SiRNA target sequence
ttatagctcctaaatatttatt

SEQ ID NO: 24612 - DNA, 22 bp, Artificial sequence
  SiRNA target sequence
tatagctcctaaatatttattg

SEQ ID NO: 24613 - DNA, 22 bp, Artificial sequence
  SiRNA target sequence
atagctcctaaatatttattgt

SEQ ID NO: 24614 - DNA, 22 bp, Artificial sequence
  SiRNA target sequence
tagctcctaaatatttattgtc

SEQ ID NO: 24615 - DNA, 22 bp, Artificial sequence
  SiRNA target sequence
agctcctaaatatttattgtct

SEQ ID NO: 24616 - DNA, 22 bp, Artificial sequence
  SiRNA target sequence
gctcctaaatatttattgtctt

SEQ ID NO: 24617 - DNA, 22 bp, Artificial sequence
  SiRNA target sequence
ctcctaaatatttattgtcttt

SEQ ID NO: 24618 - DNA, 22 bp, Artificial sequence
  SiRNA target sequence
tcctaaatatttattgtctttt

SEQ ID NO: 24619 - DNA, 22 bp, Artificial sequence
  SiRNA target sequence
cctaaatatttattgtctttta

SEQ ID NO: 24620 - DNA, 22 bp, Artificial sequence
  SiRNA target sequence
ctaaatatttattgtcttttac

SEQ ID NO: 24621 - DNA, 22 bp, Artificial sequence
  SiRNA target sequence
taaatatttattgtcttttacc

SEQ ID NO: 24622 - DNA, 22 bp, Artificial sequence
  SiRNA target sequence
aaatatttattgtcttttacca

SEQ ID NO: 24623 - DNA, 22 bp, Artificial sequence
  SiRNA target sequence
aatatttattgtcttttaccat

SEQ ID NO: 24624 - DNA, 22 bp, Artificial sequence
  SiRNA target sequence
atatttattgtcttttaccatc

SEQ ID NO: 24625 - DNA, 22 bp, Artificial sequence
  SiRNA target sequence
tatttattgtcttttaccatct

SEQ ID NO: 24626 - DNA, 22 bp, Artificial sequence
  SiRNA target sequence
atttattgtcttttaccatctt

SEQ ID NO: 24627 - DNA, 22 bp, Artificial sequence
  SiRNA target sequence
tttattgtcttttaccatcttt

SEQ ID NO: 24628 - DNA, 22 bp, Artificial sequence
  SiRNA target sequence
ttattgtcttttaccatctttc

SEQ ID NO: 24629 - DNA, 22 bp, Artificial sequence
  SiRNA target sequence
tattgtcttttaccatctttct

SEQ ID NO: 24630 - DNA, 22 bp, Artificial sequence
  SiRNA target sequence
attgtcttttaccatctttctt

SEQ ID NO: 24631 - DNA, 22 bp, Artificial sequence
  SiRNA target sequence
ttgtcttttaccatctttcttt

SEQ ID NO: 24632 - DNA, 22 bp, Artificial sequence
  SiRNA target sequence
tgtcttttaccatctttctttc

SEQ ID NO: 24633 - DNA, 22 bp, Artificial sequence
  SiRNA target sequence
gtcttttaccatctttctttct

SEQ ID NO: 24634 - DNA, 22 bp, Artificial sequence
  SiRNA target sequence
tcttttaccatctttctttctc

SEQ ID NO: 24635 - DNA, 22 bp, Artificial sequence
  SiRNA target sequence
cttttaccatctttctttctcc

SEQ ID NO: 24636 - DNA, 22 bp, Artificial sequence
  SiRNA target sequence
ttttaccatctttctttctcct

SEQ ID NO: 24637 - DNA, 22 bp, Artificial sequence
  SiRNA target sequence
tttaccatctttctttctcctt

SEQ ID NO: 24638 - DNA, 22 bp, Artificial sequence
  SiRNA target sequence
ttaccatctttctttctccttg

SEQ ID NO: 24639 - DNA, 22 bp, Artificial sequence
  SiRNA target sequence
taccatctttctttctccttga

SEQ ID NO: 24640 - DNA, 22 bp, Artificial sequence
  SiRNA target sequence
accatctttctttctccttgat

SEQ ID NO: 24641 - DNA, 22 bp, Artificial sequence
  SiRNA target sequence
ccatctttctttctccttgata

SEQ ID NO: 24642 - DNA, 22 bp, Artificial sequence
  SiRNA target sequence
catctttctttctccttgatat

SEQ ID NO: 24643 - DNA, 22 bp, Artificial sequence
  SiRNA target sequence
atctttctttctccttgatata

SEQ ID NO: 24644 - DNA, 22 bp, Artificial sequence
  SiRNA target sequence
tctttctttctccttgatatat

SEQ ID NO: 24645 - DNA, 22 bp, Artificial sequence
  SiRNA target sequence
ctttctttctccttgatatatt

SEQ ID NO: 24646 - DNA, 22 bp, Artificial sequence
  SiRNA target sequence
tttctttctccttgatatattc

SEQ ID NO: 24647 - DNA, 22 bp, Artificial sequence
  SiRNA target sequence
ttctttctccttgatatattct

SEQ ID NO: 24648 - DNA, 22 bp, Artificial sequence
  SiRNA target sequence
tctttctccttgatatattcta

SEQ ID NO: 24649 - DNA, 22 bp, Artificial sequence
  SiRNA target sequence
ctttctccttgatatattctaa

SEQ ID NO: 24650 - DNA, 22 bp, Artificial sequence
  SiRNA target sequence
tttctccttgatatattctaat

SEQ ID NO: 24651 - DNA, 22 bp, Artificial sequence
  SiRNA target sequence
ttctccttgatatattctaata

SEQ ID NO: 24652 - DNA, 22 bp, Artificial sequence
  SiRNA target sequence
tctccttgatatattctaatat

SEQ ID NO: 24653 - DNA, 22 bp, Artificial sequence
  SiRNA target sequence
ctccttgatatattctaatatc

SEQ ID NO: 24654 - DNA, 22 bp, Artificial sequence
  SiRNA target sequence
tccttgatatattctaatatct

SEQ ID NO: 24655 - DNA, 22 bp, Artificial sequence
  SiRNA target sequence
ccttgatatattctaatatcta

SEQ ID NO: 24656 - DNA, 22 bp, Artificial sequence
  SiRNA target sequence
cttgatatattctaatatctac

SEQ ID NO: 24657 - DNA, 22 bp, Artificial sequence
  SiRNA target sequence
ttgatatattctaatatctact

SEQ ID NO: 24658 - DNA, 22 bp, Artificial sequence
  SiRNA target sequence
tgatatattctaatatctactt

SEQ ID NO: 24659 - DNA, 22 bp, Artificial sequence
  SiRNA target sequence
gatatattctaatatctacttc

SEQ ID NO: 24660 - DNA, 22 bp, Artificial sequence
  SiRNA target sequence
atatattctaatatctacttcg

SEQ ID NO: 24661 - DNA, 22 bp, Artificial sequence
  SiRNA target sequence
tatattctaatatctacttcgg

SEQ ID NO: 24662 - DNA, 22 bp, Artificial sequence
  SiRNA target sequence
atattctaatatctacttcgga

SEQ ID NO: 24663 - DNA, 22 bp, Artificial sequence
  SiRNA target sequence
tattctaatatctacttcggat

SEQ ID NO: 24664 - DNA, 22 bp, Artificial sequence
  SiRNA target sequence
attctaatatctacttcggatt

SEQ ID NO: 24665 - DNA, 22 bp, Artificial sequence
  SiRNA target sequence
ttctaatatctacttcggattg

SEQ ID NO: 24666 - DNA, 22 bp, Artificial sequence
  SiRNA target sequence
tctaatatctacttcggattga

SEQ ID NO: 24667 - DNA, 22 bp, Artificial sequence
  SiRNA target sequence
ctaatatctacttcggattgat

SEQ ID NO: 24668 - DNA, 22 bp, Artificial sequence
  SiRNA target sequence
taatatctacttcggattgatt

SEQ ID NO: 24669 - DNA, 22 bp, Artificial sequence
  SiRNA target sequence
aatatctacttcggattgatta

SEQ ID NO: 24670 - DNA, 22 bp, Artificial sequence
  SiRNA target sequence
atatctacttcggattgattat

SEQ ID NO: 24671 - DNA, 22 bp, Artificial sequence
  SiRNA target sequence
tatctacttcggattgattatc

SEQ ID NO: 24672 - DNA, 22 bp, Artificial sequence
  SiRNA target sequence
atctacttcggattgattatct

SEQ ID NO: 24673 - DNA, 22 bp, Artificial sequence
  SiRNA target sequence
tctacttcggattgattatctt

SEQ ID NO: 24674 - DNA, 22 bp, Artificial sequence
  SiRNA target sequence
ctacttcggattgattatcttc

SEQ ID NO: 24675 - DNA, 22 bp, Artificial sequence
  SiRNA target sequence
tacttcggattgattatcttca

SEQ ID NO: 24676 - DNA, 22 bp, Artificial sequence
  SiRNA target sequence
acttcggattgattatcttcag

SEQ ID NO: 24677 - DNA, 22 bp, Artificial sequence
  SiRNA target sequence
cttcggattgattatcttcaga

SEQ ID NO: 24678 - DNA, 22 bp, Artificial sequence
  SiRNA target sequence
ttcggattgattatcttcagag

SEQ ID NO: 24679 - DNA, 22 bp, Artificial sequence
  SiRNA target sequence
tcggattgattatcttcagagg

SEQ ID NO: 24680 - DNA, 22 bp, Artificial sequence
  SiRNA target sequence
cggattgattatcttcagaggt

SEQ ID NO: 24681 - DNA, 22 bp, Artificial sequence
  SiRNA target sequence
ggattgattatcttcagaggta

SEQ ID NO: 24682 - DNA, 22 bp, Artificial sequence
  SiRNA target sequence
gattgattatcttcagaggtag

SEQ ID NO: 24683 - DNA, 22 bp, Artificial sequence
  SiRNA target sequence
attgattatcttcagaggtaga

SEQ ID NO: 24684 - DNA, 22 bp, Artificial sequence
  SiRNA target sequence
ttgattatcttcagaggtagaa

SEQ ID NO: 24685 - DNA, 22 bp, Artificial sequence
  SiRNA target sequence
tgattatcttcagaggtagaaa

SEQ ID NO: 24686 - DNA, 22 bp, Artificial sequence
  SiRNA target sequence
gattatcttcagaggtagaaaa

SEQ ID NO: 24687 - DNA, 22 bp, Artificial sequence
  SiRNA target sequence
attatcttcagaggtagaaaaa

SEQ ID NO: 24688 - DNA, 22 bp, Artificial sequence
  SiRNA target sequence
ttatcttcagaggtagaaaaac

SEQ ID NO: 24689 - DNA, 22 bp, Artificial sequence
  SiRNA target sequence
tatcttcagaggtagaaaaact

SEQ ID NO: 24690 - DNA, 22 bp, Artificial sequence
  SiRNA target sequence
atcttcagaggtagaaaaactg

SEQ ID NO: 24691 - DNA, 22 bp, Artificial sequence
  SiRNA target sequence
tcttcagaggtagaaaaactgt

SEQ ID NO: 24692 - DNA, 22 bp, Artificial sequence
  SiRNA target sequence
cttcagaggtagaaaaactgtg

SEQ ID NO: 24693 - DNA, 22 bp, Artificial sequence
  SiRNA target sequence
ttcagaggtagaaaaactgtgt

SEQ ID NO: 24694 - DNA, 22 bp, Artificial sequence
  SiRNA target sequence
tcagaggtagaaaaactgtgtg

SEQ ID NO: 24695 - DNA, 22 bp, Artificial sequence
  SiRNA target sequence
cagaggtagaaaaactgtgtgt

SEQ ID NO: 24696 - DNA, 22 bp, Artificial sequence
  SiRNA target sequence
agaggtagaaaaactgtgtgtt

SEQ ID NO: 24697 - DNA, 22 bp, Artificial sequence
  SiRNA target sequence
gaggtagaaaaactgtgtgttt

SEQ ID NO: 24698 - DNA, 22 bp, Artificial sequence
  SiRNA target sequence
aggtagaaaaactgtgtgtttc

SEQ ID NO: 24699 - DNA, 22 bp, Artificial sequence
  SiRNA target sequence
ggtagaaaaactgtgtgtttcc

SEQ ID NO: 24700 - DNA, 22 bp, Artificial sequence
  SiRNA target sequence
gtagaaaaactgtgtgtttcct

SEQ ID NO: 24701 - DNA, 22 bp, Artificial sequence
  SiRNA target sequence
tagaaaaactgtgtgtttcctt

SEQ ID NO: 24702 - DNA, 22 bp, Artificial sequence
  SiRNA target sequence
agaaaaactgtgtgtttcctta

SEQ ID NO: 24703 - DNA, 22 bp, Artificial sequence
  SiRNA target sequence
gaaaaactgtgtgtttccttaa

SEQ ID NO: 24704 - DNA, 22 bp, Artificial sequence
  SiRNA target sequence
aaaaactgtgtgtttccttaaa

SEQ ID NO: 24705 - DNA, 22 bp, Artificial sequence
  SiRNA target sequence
aaaactgtgtgtttccttaaat

SEQ ID NO: 24706 - DNA, 22 bp, Artificial sequence
  SiRNA target sequence
aaactgtgtgtttccttaaatg

SEQ ID NO: 24707 - DNA, 22 bp, Artificial sequence
  SiRNA target sequence
aactgtgtgtttccttaaatgg

SEQ ID NO: 24708 - DNA, 22 bp, Artificial sequence
  SiRNA target sequence
actgtgtgtttccttaaatgga

SEQ ID NO: 24709 - DNA, 22 bp, Artificial sequence
  SiRNA target sequence
ctgtgtgtttccttaaatggaa

SEQ ID NO: 24710 - DNA, 22 bp, Artificial sequence
  SiRNA target sequence
tgtgtgtttccttaaatggaat

SEQ ID NO: 24711 - DNA, 22 bp, Artificial sequence
  SiRNA target sequence
gtgtgtttccttaaatggaata

SEQ ID NO: 24712 - DNA, 22 bp, Artificial sequence
  SiRNA target sequence
tgtgtttccttaaatggaatag

SEQ ID NO: 24713 - DNA, 22 bp, Artificial sequence
  SiRNA target sequence
gtgtttccttaaatggaatagt

SEQ ID NO: 24714 - DNA, 22 bp, Artificial sequence
  SiRNA target sequence
tgtttccttaaatggaatagta

SEQ ID NO: 24715 - DNA, 22 bp, Artificial sequence
  SiRNA target sequence
gtttccttaaatggaatagtag

SEQ ID NO: 24716 - DNA, 22 bp, Artificial sequence
  SiRNA target sequence
tttccttaaatggaatagtaga

SEQ ID NO: 24717 - DNA, 22 bp, Artificial sequence
  SiRNA target sequence
ttccttaaatggaatagtagaa

SEQ ID NO: 24718 - DNA, 22 bp, Artificial sequence
  SiRNA target sequence
tccttaaatggaatagtagaat

SEQ ID NO: 24719 - DNA, 22 bp, Artificial sequence
  SiRNA target sequence
ccttaaatggaatagtagaatt

SEQ ID NO: 24720 - DNA, 22 bp, Artificial sequence
  SiRNA target sequence
cttaaatggaatagtagaattt

SEQ ID NO: 24721 - DNA, 22 bp, Artificial sequence
  SiRNA target sequence
ttaaatggaatagtagaatttc

SEQ ID NO: 24722 - DNA, 22 bp, Artificial sequence
  SiRNA target sequence
taaatggaatagtagaatttct

SEQ ID NO: 24723 - DNA, 22 bp, Artificial sequence
  SiRNA target sequence
aaatggaatagtagaatttcta

SEQ ID NO: 24724 - DNA, 22 bp, Artificial sequence
  SiRNA target sequence
aatggaatagtagaatttctat

SEQ ID NO: 24725 - DNA, 22 bp, Artificial sequence
  SiRNA target sequence
atggaatagtagaatttctatg

SEQ ID NO: 24726 - DNA, 22 bp, Artificial sequence
  SiRNA target sequence
tggaatagtagaatttctatga

SEQ ID NO: 24727 - DNA, 22 bp, Artificial sequence
  SiRNA target sequence
ggaatagtagaatttctatgaa

SEQ ID NO: 24728 - DNA, 22 bp, Artificial sequence
  SiRNA target sequence
gaatagtagaatttctatgaat

SEQ ID NO: 24729 - DNA, 22 bp, Artificial sequence
  SiRNA target sequence
aatagtagaatttctatgaatt

SEQ ID NO: 24730 - DNA, 22 bp, Artificial sequence
  SiRNA target sequence
atagtagaatttctatgaatta

SEQ ID NO: 24731 - DNA, 22 bp, Artificial sequence
  SiRNA target sequence
tagtagaatttctatgaattat

SEQ ID NO: 24732 - DNA, 22 bp, Artificial sequence
  SiRNA target sequence
agtagaatttctatgaattatc

SEQ ID NO: 24733 - DNA, 22 bp, Artificial sequence
  SiRNA target sequence
gtagaatttctatgaattatct

SEQ ID NO: 24734 - DNA, 22 bp, Artificial sequence
  SiRNA target sequence
tagaatttctatgaattatctt

SEQ ID NO: 24735 - DNA, 22 bp, Artificial sequence
  SiRNA target sequence
agaatttctatgaattatctta

SEQ ID NO: 24736 - DNA, 22 bp, Artificial sequence
  SiRNA target sequence
gaatttctatgaattatcttat

SEQ ID NO: 24737 - DNA, 22 bp, Artificial sequence
  SiRNA target sequence
aatttctatgaattatcttatt

SEQ ID NO: 24738 - DNA, 22 bp, Artificial sequence
  SiRNA target sequence
atttctatgaattatcttatta

SEQ ID NO: 24739 - DNA, 22 bp, Artificial sequence
  SiRNA target sequence
tttctatgaattatcttattaa

SEQ ID NO: 24740 - DNA, 22 bp, Artificial sequence
  SiRNA target sequence
ttctatgaattatcttattaaa

SEQ ID NO: 24741 - DNA, 22 bp, Artificial sequence
  SiRNA target sequence
tctatgaattatcttattaaaa

SEQ ID NO: 24742 - DNA, 22 bp, Artificial sequence
  SiRNA target sequence
ctatgaattatcttattaaaaa

SEQ ID NO: 24743 - DNA, 22 bp, Artificial sequence
  SiRNA target sequence
tatgaattatcttattaaaaat

SEQ ID NO: 24744 - DNA, 22 bp, Artificial sequence
  SiRNA target sequence
atgaattatcttattaaaaatc

SEQ ID NO: 24745 - DNA, 22 bp, Artificial sequence
  SiRNA target sequence
tgaattatcttattaaaaatcc

SEQ ID NO: 24746 - DNA, 22 bp, Artificial sequence
  SiRNA target sequence
gaattatcttattaaaaatccc

SEQ ID NO: 24747 - DNA, 22 bp, Artificial sequence
  SiRNA target sequence
aattatcttattaaaaatcccg

SEQ ID NO: 24748 - DNA, 22 bp, Artificial sequence
  SiRNA target sequence
attatcttattaaaaatcccgc

SEQ ID NO: 24749 - DNA, 22 bp, Artificial sequence
  SiRNA target sequence
ttatcttattaaaaatcccgcc

SEQ ID NO: 24750 - DNA, 22 bp, Artificial sequence
  SiRNA target sequence
tatcttattaaaaatcccgccc

SEQ ID NO: 24751 - DNA, 22 bp, Artificial sequence
  SiRNA target sequence
atcttattaaaaatcccgccca

SEQ ID NO: 24752 - DNA, 22 bp, Artificial sequence
  SiRNA target sequence
tcttattaaaaatcccgcccaa

SEQ ID NO: 24753 - DNA, 22 bp, Artificial sequence
  SiRNA target sequence
cttattaaaaatcccgcccaaa

SEQ ID NO: 24754 - DNA, 22 bp, Artificial sequence
  SiRNA target sequence
ttattaaaaatcccgcccaaaa

SEQ ID NO: 24755 - DNA, 22 bp, Artificial sequence
  SiRNA target sequence
tattaaaaatcccgcccaaaag

SEQ ID NO: 24756 - DNA, 22 bp, Artificial sequence
  SiRNA target sequence
attaaaaatcccgcccaaaagc

SEQ ID NO: 24757 - DNA, 22 bp, Artificial sequence
  SiRNA target sequence
ttaaaaatcccgcccaaaagct

SEQ ID NO: 24758 - DNA, 22 bp, Artificial sequence
  SiRNA target sequence
taaaaatcccgcccaaaagctc

SEQ ID NO: 24759 - DNA, 22 bp, Artificial sequence
  SiRNA target sequence
aaaaatcccgcccaaaagctct

SEQ ID NO: 24760 - DNA, 22 bp, Artificial sequence
  SiRNA target sequence
aaaatcccgcccaaaagctcta

SEQ ID NO: 24761 - DNA, 22 bp, Artificial sequence
  SiRNA target sequence
aaatcccgcccaaaagctctat

SEQ ID NO: 24762 - DNA, 22 bp, Artificial sequence
  SiRNA target sequence
aatcccgcccaaaagctctata

SEQ ID NO: 24763 - DNA, 22 bp, Artificial sequence
  SiRNA target sequence
atcccgcccaaaagctctatac

SEQ ID NO: 24764 - DNA, 22 bp, Artificial sequence
  SiRNA target sequence
tcccgcccaaaagctctatacc

SEQ ID NO: 24765 - DNA, 22 bp, Artificial sequence
  SiRNA target sequence
cccgcccaaaagctctatacct

SEQ ID NO: 24766 - DNA, 22 bp, Artificial sequence
  SiRNA target sequence
ccgcccaaaagctctataccta

SEQ ID NO: 24767 - DNA, 22 bp, Artificial sequence
  SiRNA target sequence
cgcccaaaagctctatacctaa

SEQ ID NO: 24768 - DNA, 22 bp, Artificial sequence
  SiRNA target sequence
gcccaaaagctctatacctaaa

SEQ ID NO: 24769 - DNA, 22 bp, Artificial sequence
  SiRNA target sequence
cccaaaagctctatacctaaac

SEQ ID NO: 24770 - DNA, 22 bp, Artificial sequence
  SiRNA target sequence
ccaaaagctctatacctaaact

SEQ ID NO: 24771 - DNA, 22 bp, Artificial sequence
  SiRNA target sequence
caaaagctctatacctaaactc

SEQ ID NO: 24772 - DNA, 22 bp, Artificial sequence
  SiRNA target sequence
aaaagctctatacctaaactca

SEQ ID NO: 24773 - DNA, 22 bp, Artificial sequence
  SiRNA target sequence
aaagctctatacctaaactcaa

SEQ ID NO: 24774 - DNA, 22 bp, Artificial sequence
  SiRNA target sequence
aagctctatacctaaactcaat

SEQ ID NO: 24775 - DNA, 22 bp, Artificial sequence
  SiRNA target sequence
agctctatacctaaactcaatg

SEQ ID NO: 24776 - DNA, 22 bp, Artificial sequence
  SiRNA target sequence
gctctatacctaaactcaatgg

SEQ ID NO: 24777 - DNA, 22 bp, Artificial sequence
  SiRNA target sequence
ctctatacctaaactcaatggt

SEQ ID NO: 24778 - DNA, 22 bp, Artificial sequence
  SiRNA target sequence
tctatacctaaactcaatggta

SEQ ID NO: 24779 - DNA, 22 bp, Artificial sequence
  SiRNA target sequence
ctatacctaaactcaatggtac

SEQ ID NO: 24780 - DNA, 22 bp, Artificial sequence
  SiRNA target sequence
tatacctaaactcaatggtact

SEQ ID NO: 24781 - DNA, 22 bp, Artificial sequence
  SiRNA target sequence
atacctaaactcaatggtacta

SEQ ID NO: 24782 - DNA, 22 bp, Artificial sequence
  SiRNA target sequence
tacctaaactcaatggtactac

SEQ ID NO: 24783 - DNA, 22 bp, Artificial sequence
  SiRNA target sequence
acctaaactcaatggtactaca

SEQ ID NO: 24784 - DNA, 22 bp, Artificial sequence
  SiRNA target sequence
cctaaactcaatggtactacat

SEQ ID NO: 24785 - DNA, 22 bp, Artificial sequence
  SiRNA target sequence
ctaaactcaatggtactacatc

SEQ ID NO: 24786 - DNA, 22 bp, Artificial sequence
  SiRNA target sequence
taaactcaatggtactacatcc

SEQ ID NO: 24787 - DNA, 22 bp, Artificial sequence
  SiRNA target sequence
aaactcaatggtactacatcca

SEQ ID NO: 24788 - DNA, 22 bp, Artificial sequence
  SiRNA target sequence
aactcaatggtactacatccaa

SEQ ID NO: 24789 - DNA, 22 bp, Artificial sequence
  SiRNA target sequence
actcaatggtactacatccaat

SEQ ID NO: 24790 - DNA, 22 bp, Artificial sequence
  SiRNA target sequence
ctcaatggtactacatccaata

SEQ ID NO: 24791 - DNA, 22 bp, Artificial sequence
  SiRNA target sequence
tcaatggtactacatccaataa

SEQ ID NO: 24792 - DNA, 22 bp, Artificial sequence
  SiRNA target sequence
caatggtactacatccaataat

SEQ ID NO: 24793 - DNA, 22 bp, Artificial sequence
  SiRNA target sequence
aatggtactacatccaataata

SEQ ID NO: 24794 - DNA, 22 bp, Artificial sequence
  SiRNA target sequence
atggtactacatccaataatag

SEQ ID NO: 24795 - DNA, 22 bp, Artificial sequence
  SiRNA target sequence
tggtactacatccaataatagg

SEQ ID NO: 24796 - DNA, 22 bp, Artificial sequence
  SiRNA target sequence
ggtactacatccaataatagga

SEQ ID NO: 24797 - DNA, 22 bp, Artificial sequence
  SiRNA target sequence
gtactacatccaataataggac

SEQ ID NO: 24798 - DNA, 22 bp, Artificial sequence
  SiRNA target sequence
tactacatccaataataggaca

SEQ ID NO: 24799 - DNA, 22 bp, Artificial sequence
  SiRNA target sequence
actacatccaataataggacat

SEQ ID NO: 24800 - DNA, 22 bp, Artificial sequence
  SiRNA target sequence
ctacatccaataataggacatc

SEQ ID NO: 24801 - DNA, 22 bp, Artificial sequence
  SiRNA target sequence
tacatccaataataggacatct

SEQ ID NO: 24802 - DNA, 22 bp, Artificial sequence
  SiRNA target sequence
acatccaataataggacatctt

SEQ ID NO: 24803 - DNA, 22 bp, Artificial sequence
  SiRNA target sequence
catccaataataggacatcttt

SEQ ID NO: 24804 - DNA, 22 bp, Artificial sequence
  SiRNA target sequence
atccaataataggacatctttt

SEQ ID NO: 24805 - DNA, 22 bp, Artificial sequence
  SiRNA target sequence
tccaataataggacatctttta

SEQ ID NO: 24806 - DNA, 22 bp, Artificial sequence
  SiRNA target sequence
ccaataataggacatcttttat

SEQ ID NO: 24807 - DNA, 22 bp, Artificial sequence
  SiRNA target sequence
caataataggacatcttttatt

SEQ ID NO: 24808 - DNA, 22 bp, Artificial sequence
  SiRNA target sequence
aataataggacatcttttattt

SEQ ID NO: 24809 - DNA, 22 bp, Artificial sequence
  SiRNA target sequence
ataataggacatcttttatttt

SEQ ID NO: 24810 - DNA, 22 bp, Artificial sequence
  SiRNA target sequence
taataggacatcttttattttt

SEQ ID NO: 24811 - DNA, 22 bp, Artificial sequence
  SiRNA target sequence
aataggacatcttttatttttc

SEQ ID NO: 24812 - DNA, 22 bp, Artificial sequence
  SiRNA target sequence
ataggacatcttttatttttcc

SEQ ID NO: 24813 - DNA, 22 bp, Artificial sequence
  SiRNA target sequence
taggacatcttttatttttcct

SEQ ID NO: 24814 - DNA, 22 bp, Artificial sequence
  SiRNA target sequence
aggacatcttttatttttcctt

SEQ ID NO: 24815 - DNA, 22 bp, Artificial sequence
  SiRNA target sequence
ggacatcttttatttttccttc

SEQ ID NO: 24816 - DNA, 22 bp, Artificial sequence
  SiRNA target sequence
gacatcttttatttttccttct

SEQ ID NO: 24817 - DNA, 22 bp, Artificial sequence
  SiRNA target sequence
acatcttttatttttccttcta

SEQ ID NO: 24818 - DNA, 22 bp, Artificial sequence
  SiRNA target sequence
catcttttatttttccttctaa

SEQ ID NO: 24819 - DNA, 22 bp, Artificial sequence
  SiRNA target sequence
atcttttatttttccttctaac

SEQ ID NO: 24820 - DNA, 22 bp, Artificial sequence
  SiRNA target sequence
tcttttatttttccttctaaca

SEQ ID NO: 24821 - DNA, 22 bp, Artificial sequence
  SiRNA target sequence
cttttatttttccttctaacac

SEQ ID NO: 24822 - DNA, 22 bp, Artificial sequence
  SiRNA target sequence
ttttatttttccttctaacacg

SEQ ID NO: 24823 - DNA, 22 bp, Artificial sequence
  SiRNA target sequence
tttatttttccttctaacacgc

SEQ ID NO: 24824 - DNA, 22 bp, Artificial sequence
  SiRNA target sequence
ttatttttccttctaacacgcc

SEQ ID NO: 24825 - DNA, 22 bp, Artificial sequence
  SiRNA target sequence
tatttttccttctaacacgcct

SEQ ID NO: 24826 - DNA, 22 bp, Artificial sequence
  SiRNA target sequence
atttttccttctaacacgcctg

SEQ ID NO: 24827 - DNA, 22 bp, Artificial sequence
  SiRNA target sequence
tttttccttctaacacgcctgc

SEQ ID NO: 24828 - DNA, 22 bp, Artificial sequence
  SiRNA target sequence
ttttccttctaacacgcctgct

SEQ ID NO: 24829 - DNA, 22 bp, Artificial sequence
  SiRNA target sequence
tttccttctaacacgcctgctt

SEQ ID NO: 24830 - DNA, 22 bp, Artificial sequence
  SiRNA target sequence
ttccttctaacacgcctgcttg

SEQ ID NO: 24831 - DNA, 22 bp, Artificial sequence
  SiRNA target sequence
tccttctaacacgcctgcttgt

SEQ ID NO: 24832 - DNA, 22 bp, Artificial sequence
  SiRNA target sequence
ccttctaacacgcctgcttgta

SEQ ID NO: 24833 - DNA, 22 bp, Artificial sequence
  SiRNA target sequence
cttctaacacgcctgcttgtag

SEQ ID NO: 24834 - DNA, 22 bp, Artificial sequence
  SiRNA target sequence
ttctaacacgcctgcttgtaga

SEQ ID NO: 24835 - DNA, 22 bp, Artificial sequence
  SiRNA target sequence
tctaacacgcctgcttgtagag

SEQ ID NO: 24836 - DNA, 22 bp, Artificial sequence
  SiRNA target sequence
ctaacacgcctgcttgtagagc

SEQ ID NO: 24837 - DNA, 22 bp, Artificial sequence
  SiRNA target sequence
taacacgcctgcttgtagagcg

SEQ ID NO: 24838 - DNA, 22 bp, Artificial sequence
  SiRNA target sequence
aacacgcctgcttgtagagcgg

SEQ ID NO: 24839 - DNA, 22 bp, Artificial sequence
  SiRNA target sequence
acacgcctgcttgtagagcggc

SEQ ID NO: 24840 - DNA, 22 bp, Artificial sequence
  SiRNA target sequence
cacgcctgcttgtagagcggcc

SEQ ID NO: 24841 - DNA, 22 bp, Artificial sequence
  SiRNA target sequence
acgcctgcttgtagagcggccc

SEQ ID NO: 24842 - DNA, 22 bp, Artificial sequence
  SiRNA target sequence
cgcctgcttgtagagcggcccc

SEQ ID NO: 24843 - DNA, 22 bp, Artificial sequence
  SiRNA target sequence
gcctgcttgtagagcggcccct

SEQ ID NO: 24844 - DNA, 22 bp, Artificial sequence
  SiRNA target sequence
cctgcttgtagagcggcccctt

SEQ ID NO: 24845 - DNA, 22 bp, Artificial sequence
  SiRNA target sequence
ctgcttgtagagcggccccttt

SEQ ID NO: 24846 - DNA, 22 bp, Artificial sequence
  SiRNA target sequence
tgcttgtagagcggccccttta

SEQ ID NO: 24847 - DNA, 22 bp, Artificial sequence
  SiRNA target sequence
gcttgtagagcggcccctttag

SEQ ID NO: 24848 - DNA, 22 bp, Artificial sequence
  SiRNA target sequence
cttgtagagcggcccctttagc

SEQ ID NO: 24849 - DNA, 22 bp, Artificial sequence
  SiRNA target sequence
ttgtagagcggcccctttagca

SEQ ID NO: 24850 - DNA, 22 bp, Artificial sequence
  SiRNA target sequence
tgtagagcggcccctttagcaa

SEQ ID NO: 24851 - DNA, 22 bp, Artificial sequence
  SiRNA target sequence
gtagagcggcccctttagcaac

SEQ ID NO: 24852 - DNA, 22 bp, Artificial sequence
  SiRNA target sequence
tagagcggcccctttagcaaca

SEQ ID NO: 24853 - DNA, 22 bp, Artificial sequence
  SiRNA target sequence
agagcggcccctttagcaacag

SEQ ID NO: 24854 - DNA, 22 bp, Artificial sequence
  SiRNA target sequence
gagcggcccctttagcaacagc

SEQ ID NO: 24855 - DNA, 22 bp, Artificial sequence
  SiRNA target sequence
agcggcccctttagcaacagct

SEQ ID NO: 24856 - DNA, 22 bp, Artificial sequence
  SiRNA target sequence
gcggcccctttagcaacagctt

SEQ ID NO: 24857 - DNA, 22 bp, Artificial sequence
  SiRNA target sequence
cggcccctttagcaacagcttc

SEQ ID NO: 24858 - DNA, 22 bp, Artificial sequence
  SiRNA target sequence
ggcccctttagcaacagcttca

SEQ ID NO: 24859 - DNA, 22 bp, Artificial sequence
  SiRNA target sequence
gcccctttagcaacagcttcat

SEQ ID NO: 24860 - DNA, 22 bp, Artificial sequence
  SiRNA target sequence
cccctttagcaacagcttcatc

SEQ ID NO: 24861 - DNA, 22 bp, Artificial sequence
  SiRNA target sequence
ccctttagcaacagcttcatct

SEQ ID NO: 24862 - DNA, 22 bp, Artificial sequence
  SiRNA target sequence
cctttagcaacagcttcatctg

SEQ ID NO: 24863 - DNA, 22 bp, Artificial sequence
  SiRNA target sequence
ctttagcaacagcttcatctgg

SEQ ID NO: 24864 - DNA, 22 bp, Artificial sequence
  SiRNA target sequence
tttagcaacagcttcatctgga

SEQ ID NO: 24865 - DNA, 22 bp, Artificial sequence
  SiRNA target sequence
ttagcaacagcttcatctggat

SEQ ID NO: 24866 - DNA, 22 bp, Artificial sequence
  SiRNA target sequence
tagcaacagcttcatctggatt

SEQ ID NO: 24867 - DNA, 22 bp, Artificial sequence
  SiRNA target sequence
agcaacagcttcatctggatta

SEQ ID NO: 24868 - DNA, 22 bp, Artificial sequence
  SiRNA target sequence
gcaacagcttcatctggattaa

SEQ ID NO: 24869 - DNA, 22 bp, Artificial sequence
  SiRNA target sequence
caacagcttcatctggattaat

SEQ ID NO: 24870 - DNA, 22 bp, Artificial sequence
  SiRNA target sequence
aacagcttcatctggattaata

SEQ ID NO: 24871 - DNA, 22 bp, Artificial sequence
  SiRNA target sequence
acagcttcatctggattaatat

SEQ ID NO: 24872 - DNA, 22 bp, Artificial sequence
  SiRNA target sequence
cagcttcatctggattaatatt

SEQ ID NO: 24873 - DNA, 22 bp, Artificial sequence
  SiRNA target sequence
agcttcatctggattaatattt

SEQ ID NO: 24874 - DNA, 22 bp, Artificial sequence
  SiRNA target sequence
gcttcatctggattaatatttg

SEQ ID NO: 24875 - DNA, 22 bp, Artificial sequence
  SiRNA target sequence
cttcatctggattaatatttgt

SEQ ID NO: 24876 - DNA, 22 bp, Artificial sequence
  SiRNA target sequence
ttcatctggattaatatttgta

SEQ ID NO: 24877 - DNA, 22 bp, Artificial sequence
  SiRNA target sequence
tcatctggattaatatttgtag

SEQ ID NO: 24878 - DNA, 22 bp, Artificial sequence
  SiRNA target sequence
catctggattaatatttgtaga

SEQ ID NO: 24879 - DNA, 22 bp, Artificial sequence
  SiRNA target sequence
atctggattaatatttgtagaa

SEQ ID NO: 24880 - DNA, 22 bp, Artificial sequence
  SiRNA target sequence
tctggattaatatttgtagaag

SEQ ID NO: 24881 - DNA, 22 bp, Artificial sequence
  SiRNA target sequence
ctggattaatatttgtagaagg

SEQ ID NO: 24882 - DNA, 22 bp, Artificial sequence
  SiRNA target sequence
tggattaatatttgtagaaggc

SEQ ID NO: 24883 - DNA, 22 bp, Artificial sequence
  SiRNA target sequence
ggattaatatttgtagaaggct

SEQ ID NO: 24884 - DNA, 22 bp, Artificial sequence
  SiRNA target sequence
gattaatatttgtagaaggctc

SEQ ID NO: 24885 - DNA, 22 bp, Artificial sequence
  SiRNA target sequence
attaatatttgtagaaggctcg

SEQ ID NO: 24886 - DNA, 22 bp, Artificial sequence
  SiRNA target sequence
ttaatatttgtagaaggctcga

SEQ ID NO: 24887 - DNA, 22 bp, Artificial sequence
  SiRNA target sequence
taatatttgtagaaggctcgat

SEQ ID NO: 24888 - DNA, 22 bp, Artificial sequence
  SiRNA target sequence
aatatttgtagaaggctcgata

SEQ ID NO: 24889 - DNA, 22 bp, Artificial sequence
  SiRNA target sequence
atatttgtagaaggctcgatac

SEQ ID NO: 24890 - DNA, 22 bp, Artificial sequence
  SiRNA target sequence
tatttgtagaaggctcgatacc

SEQ ID NO: 24891 - DNA, 22 bp, Artificial sequence
  SiRNA target sequence
atttgtagaaggctcgatacca

SEQ ID NO: 24892 - DNA, 22 bp, Artificial sequence
  SiRNA target sequence
tttgtagaaggctcgataccaa

SEQ ID NO: 24893 - DNA, 22 bp, Artificial sequence
  SiRNA target sequence
ttgtagaaggctcgataccaaa

SEQ ID NO: 24894 - DNA, 22 bp, Artificial sequence
  SiRNA target sequence
tgtagaaggctcgataccaaaa

SEQ ID NO: 24895 - DNA, 22 bp, Artificial sequence
  SiRNA target sequence
gtagaaggctcgataccaaaaa

SEQ ID NO: 24896 - DNA, 22 bp, Artificial sequence
  SiRNA target sequence
tagaaggctcgataccaaaaat

SEQ ID NO: 24897 - DNA, 22 bp, Artificial sequence
  SiRNA target sequence
agaaggctcgataccaaaaatc

SEQ ID NO: 24898 - DNA, 22 bp, Artificial sequence
  SiRNA target sequence
gaaggctcgataccaaaaatct

SEQ ID NO: 24899 - DNA, 22 bp, Artificial sequence
  SiRNA target sequence
aaggctcgataccaaaaatctt

SEQ ID NO: 24900 - DNA, 22 bp, Artificial sequence
  SiRNA target sequence
aggctcgataccaaaaatcttc

SEQ ID NO: 24901 - DNA, 22 bp, Artificial sequence
  SiRNA target sequence
ggctcgataccaaaaatcttct

SEQ ID NO: 24902 - DNA, 22 bp, Artificial sequence
  SiRNA target sequence
gctcgataccaaaaatcttctt

SEQ ID NO: 24903 - DNA, 22 bp, Artificial sequence
  SiRNA target sequence
ctcgataccaaaaatcttctta

SEQ ID NO: 24904 - DNA, 22 bp, Artificial sequence
  SiRNA target sequence
tcgataccaaaaatcttcttaa

SEQ ID NO: 24905 - DNA, 22 bp, Artificial sequence
  SiRNA target sequence
cgataccaaaaatcttcttaac

SEQ ID NO: 24906 - DNA, 22 bp, Artificial sequence
  SiRNA target sequence
gataccaaaaatcttcttaaca

SEQ ID NO: 24907 - DNA, 22 bp, Artificial sequence
  SiRNA target sequence
ataccaaaaatcttcttaacaa

SEQ ID NO: 24908 - DNA, 22 bp, Artificial sequence
  SiRNA target sequence
taccaaaaatcttcttaacaag

SEQ ID NO: 24909 - DNA, 22 bp, Artificial sequence
  SiRNA target sequence
accaaaaatcttcttaacaagt

SEQ ID NO: 24910 - DNA, 22 bp, Artificial sequence
  SiRNA target sequence
ccaaaaatcttcttaacaagtt

SEQ ID NO: 24911 - DNA, 22 bp, Artificial sequence
  SiRNA target sequence
caaaaatcttcttaacaagttt

SEQ ID NO: 24912 - DNA, 22 bp, Artificial sequence
  SiRNA target sequence
aaaaatcttcttaacaagtttt

SEQ ID NO: 24913 - DNA, 22 bp, Artificial sequence
  SiRNA target sequence
aaaatcttcttaacaagttttc

SEQ ID NO: 24914 - DNA, 22 bp, Artificial sequence
  SiRNA target sequence
aaatcttcttaacaagttttct

SEQ ID NO: 24915 - DNA, 22 bp, Artificial sequence
  SiRNA target sequence
aatcttcttaacaagttttcta

SEQ ID NO: 24916 - DNA, 22 bp, Artificial sequence
  SiRNA target sequence
atcttcttaacaagttttctaa

SEQ ID NO: 24917 - DNA, 22 bp, Artificial sequence
  SiRNA target sequence
tcttcttaacaagttttctaac

SEQ ID NO: 24918 - DNA, 22 bp, Artificial sequence
  SiRNA target sequence
cttcttaacaagttttctaaca

SEQ ID NO: 24919 - DNA, 22 bp, Artificial sequence
  SiRNA target sequence
ttcttaacaagttttctaacat

SEQ ID NO: 24920 - DNA, 22 bp, Artificial sequence
  SiRNA target sequence
tcttaacaagttttctaacata

SEQ ID NO: 24921 - DNA, 22 bp, Artificial sequence
  SiRNA target sequence
cttaacaagttttctaacatac

SEQ ID NO: 24922 - DNA, 22 bp, Artificial sequence
  SiRNA target sequence
ttaacaagttttctaacatacg

SEQ ID NO: 24923 - DNA, 22 bp, Artificial sequence
  SiRNA target sequence
taacaagttttctaacatacgg

SEQ ID NO: 24924 - DNA, 22 bp, Artificial sequence
  SiRNA target sequence
aacaagttttctaacatacggc

SEQ ID NO: 24925 - DNA, 22 bp, Artificial sequence
  SiRNA target sequence
acaagttttctaacatacggca

SEQ ID NO: 24926 - DNA, 22 bp, Artificial sequence
  SiRNA target sequence
caagttttctaacatacggcat

SEQ ID NO: 24927 - DNA, 22 bp, Artificial sequence
  SiRNA target sequence
aagttttctaacatacggcatt

SEQ ID NO: 24928 - DNA, 22 bp, Artificial sequence
  SiRNA target sequence
agttttctaacatacggcattc

SEQ ID NO: 24929 - DNA, 22 bp, Artificial sequence
  SiRNA target sequence
gttttctaacatacggcattcg

SEQ ID NO: 24930 - DNA, 22 bp, Artificial sequence
  SiRNA target sequence
ttttctaacatacggcattcgt

SEQ ID NO: 24931 - DNA, 22 bp, Artificial sequence
  SiRNA target sequence
tttctaacatacggcattcgtg

SEQ ID NO: 24932 - DNA, 22 bp, Artificial sequence
  SiRNA target sequence
ttctaacatacggcattcgtgt

SEQ ID NO: 24933 - DNA, 22 bp, Artificial sequence
  SiRNA target sequence
tctaacatacggcattcgtgtc

SEQ ID NO: 24934 - DNA, 22 bp, Artificial sequence
  SiRNA target sequence
ctaacatacggcattcgtgtca

SEQ ID NO: 24935 - DNA, 22 bp, Artificial sequence
  SiRNA target sequence
taacatacggcattcgtgtcat

SEQ ID NO: 24936 - DNA, 22 bp, Artificial sequence
  SiRNA target sequence
aacatacggcattcgtgtcatt

SEQ ID NO: 24937 - DNA, 22 bp, Artificial sequence
  SiRNA target sequence
acatacggcattcgtgtcattc

SEQ ID NO: 24938 - DNA, 22 bp, Artificial sequence
  SiRNA target sequence
catacggcattcgtgtcattcc

SEQ ID NO: 24939 - DNA, 22 bp, Artificial sequence
  SiRNA target sequence
atacggcattcgtgtcattcca

SEQ ID NO: 24940 - DNA, 22 bp, Artificial sequence
  SiRNA target sequence
tacggcattcgtgtcattccac

SEQ ID NO: 24941 - DNA, 22 bp, Artificial sequence
  SiRNA target sequence
acggcattcgtgtcattccacc

SEQ ID NO: 24942 - DNA, 22 bp, Artificial sequence
  SiRNA target sequence
cggcattcgtgtcattccaccc

SEQ ID NO: 24943 - DNA, 22 bp, Artificial sequence
  SiRNA target sequence
ggcattcgtgtcattccaccca

SEQ ID NO: 24944 - DNA, 22 bp, Artificial sequence
  SiRNA target sequence
gcattcgtgtcattccacccac

SEQ ID NO: 24945 - DNA, 22 bp, Artificial sequence
  SiRNA target sequence
cattcgtgtcattccacccaca

SEQ ID NO: 24946 - DNA, 22 bp, Artificial sequence
  SiRNA target sequence
attcgtgtcattccacccacaa

SEQ ID NO: 24947 - DNA, 22 bp, Artificial sequence
  SiRNA target sequence
ttcgtgtcattccacccacaag

SEQ ID NO: 24948 - DNA, 22 bp, Artificial sequence
  SiRNA target sequence
tcgtgtcattccacccacaagt

SEQ ID NO: 24949 - DNA, 22 bp, Artificial sequence
  SiRNA target sequence
cgtgtcattccacccacaagta

SEQ ID NO: 24950 - DNA, 22 bp, Artificial sequence
  SiRNA target sequence
gtgtcattccacccacaagtat

SEQ ID NO: 24951 - DNA, 22 bp, Artificial sequence
  SiRNA target sequence
tgtcattccacccacaagtata

SEQ ID NO: 24952 - DNA, 22 bp, Artificial sequence
  SiRNA target sequence
gtcattccacccacaagtataa

SEQ ID NO: 24953 - DNA, 22 bp, Artificial sequence
  SiRNA target sequence
tcattccacccacaagtataac

SEQ ID NO: 24954 - DNA, 22 bp, Artificial sequence
  SiRNA target sequence
cattccacccacaagtataacg

SEQ ID NO: 24955 - DNA, 22 bp, Artificial sequence
  SiRNA target sequence
attccacccacaagtataacgt

SEQ ID NO: 24956 - DNA, 22 bp, Artificial sequence
  SiRNA target sequence
ttccacccacaagtataacgtg

SEQ ID NO: 24957 - DNA, 22 bp, Artificial sequence
  SiRNA target sequence
tccacccacaagtataacgtgt

SEQ ID NO: 24958 - DNA, 22 bp, Artificial sequence
  SiRNA target sequence
ccacccacaagtataacgtgtt

SEQ ID NO: 24959 - DNA, 22 bp, Artificial sequence
  SiRNA target sequence
cacccacaagtataacgtgttt

SEQ ID NO: 24960 - DNA, 22 bp, Artificial sequence
  SiRNA target sequence
acccacaagtataacgtgttta

SEQ ID NO: 24961 - DNA, 22 bp, Artificial sequence
  SiRNA target sequence
cccacaagtataacgtgtttaa

SEQ ID NO: 24962 - DNA, 22 bp, Artificial sequence
  SiRNA target sequence
ccacaagtataacgtgtttaat

SEQ ID NO: 24963 - DNA, 22 bp, Artificial sequence
  SiRNA target sequence
cacaagtataacgtgtttaata

SEQ ID NO: 24964 - DNA, 22 bp, Artificial sequence
  SiRNA target sequence
acaagtataacgtgtttaatat

SEQ ID NO: 24965 - DNA, 22 bp, Artificial sequence
  SiRNA target sequence
caagtataacgtgtttaatatc

SEQ ID NO: 24966 - DNA, 22 bp, Artificial sequence
  SiRNA target sequence
aagtataacgtgtttaatatca

SEQ ID NO: 24967 - DNA, 22 bp, Artificial sequence
  SiRNA target sequence
agtataacgtgtttaatatcac

SEQ ID NO: 24968 - DNA, 22 bp, Artificial sequence
  SiRNA target sequence
gtataacgtgtttaatatcact

SEQ ID NO: 24969 - DNA, 22 bp, Artificial sequence
  SiRNA target sequence
tataacgtgtttaatatcactt

SEQ ID NO: 24970 - DNA, 22 bp, Artificial sequence
  SiRNA target sequence
ataacgtgtttaatatcacttt

SEQ ID NO: 24971 - DNA, 22 bp, Artificial sequence
  SiRNA target sequence
taacgtgtttaatatcactttt

SEQ ID NO: 24972 - DNA, 22 bp, Artificial sequence
  SiRNA target sequence
aacgtgtttaatatcactttta

SEQ ID NO: 24973 - DNA, 22 bp, Artificial sequence
  SiRNA target sequence
acgtgtttaatatcacttttag

SEQ ID NO: 24974 - DNA, 22 bp, Artificial sequence
  SiRNA target sequence
cgtgtttaatatcacttttagt

SEQ ID NO: 24975 - DNA, 22 bp, Artificial sequence
  SiRNA target sequence
gtgtttaatatcacttttagtt

SEQ ID NO: 24976 - DNA, 22 bp, Artificial sequence
  SiRNA target sequence
tgtttaatatcacttttagtta

SEQ ID NO: 24977 - DNA, 22 bp, Artificial sequence
  SiRNA target sequence
gtttaatatcacttttagttat

SEQ ID NO: 24978 - DNA, 22 bp, Artificial sequence
  SiRNA target sequence
tttaatatcacttttagttata

SEQ ID NO: 24979 - DNA, 22 bp, Artificial sequence
  SiRNA target sequence
ttaatatcacttttagttatat

SEQ ID NO: 24980 - DNA, 22 bp, Artificial sequence
  SiRNA target sequence
taatatcacttttagttatatt

SEQ ID NO: 24981 - DNA, 22 bp, Artificial sequence
  SiRNA target sequence
aatatcacttttagttatattg

SEQ ID NO: 24982 - DNA, 22 bp, Artificial sequence
  SiRNA target sequence
atatcacttttagttatattgg

SEQ ID NO: 24983 - DNA, 22 bp, Artificial sequence
  SiRNA target sequence
tatcacttttagttatattggc

SEQ ID NO: 24984 - DNA, 22 bp, Artificial sequence
  SiRNA target sequence
atcacttttagttatattggca

SEQ ID NO: 24985 - DNA, 22 bp, Artificial sequence
  SiRNA target sequence
tcacttttagttatattggcat

SEQ ID NO: 24986 - DNA, 22 bp, Artificial sequence
  SiRNA target sequence
cacttttagttatattggcatc

SEQ ID NO: 24987 - DNA, 22 bp, Artificial sequence
  SiRNA target sequence
acttttagttatattggcatct

SEQ ID NO: 24988 - DNA, 22 bp, Artificial sequence
  SiRNA target sequence
cttttagttatattggcatctc

SEQ ID NO: 24989 - DNA, 22 bp, Artificial sequence
  SiRNA target sequence
ttttagttatattggcatctct

SEQ ID NO: 24990 - DNA, 22 bp, Artificial sequence
  SiRNA target sequence
tttagttatattggcatctcta

SEQ ID NO: 24991 - DNA, 22 bp, Artificial sequence
  SiRNA target sequence
ttagttatattggcatctctaa

SEQ ID NO: 24992 - DNA, 22 bp, Artificial sequence
  SiRNA target sequence
tagttatattggcatctctaat

SEQ ID NO: 24993 - DNA, 22 bp, Artificial sequence
  SiRNA target sequence
agttatattggcatctctaata

SEQ ID NO: 24994 - DNA, 22 bp, Artificial sequence
  SiRNA target sequence
gttatattggcatctctaatag

SEQ ID NO: 24995 - DNA, 22 bp, Artificial sequence
  SiRNA target sequence
ttatattggcatctctaatagc

SEQ ID NO: 24996 - DNA, 22 bp, Artificial sequence
  SiRNA target sequence
tatattggcatctctaatagct

SEQ ID NO: 24997 - DNA, 22 bp, Artificial sequence
  SiRNA target sequence
atattggcatctctaatagctt

SEQ ID NO: 24998 - DNA, 22 bp, Artificial sequence
  SiRNA target sequence
tattggcatctctaatagcttt

SEQ ID NO: 24999 - DNA, 22 bp, Artificial sequence
  SiRNA target sequence
attggcatctctaatagcttta

SEQ ID NO: 25000 - DNA, 22 bp, Artificial sequence
  SiRNA target sequence
ttggcatctctaatagctttaa

SEQ ID NO: 25001 - DNA, 22 bp, Artificial sequence
  SiRNA target sequence
tggcatctctaatagctttaag

SEQ ID NO: 25002 - DNA, 22 bp, Artificial sequence
  SiRNA target sequence
ggcatctctaatagctttaaga

SEQ ID NO: 25003 - DNA, 22 bp, Artificial sequence
  SiRNA target sequence
gcatctctaatagctttaagac

SEQ ID NO: 25004 - DNA, 22 bp, Artificial sequence
  SiRNA target sequence
catctctaatagctttaagaca

SEQ ID NO: 25005 - DNA, 22 bp, Artificial sequence
  SiRNA target sequence
atctctaatagctttaagacag

SEQ ID NO: 25006 - DNA, 22 bp, Artificial sequence
  SiRNA target sequence
tctctaatagctttaagacagg

SEQ ID NO: 25007 - DNA, 22 bp, Artificial sequence
  SiRNA target sequence
ctctaatagctttaagacaggg

SEQ ID NO: 25008 - DNA, 22 bp, Artificial sequence
  SiRNA target sequence
tctaatagctttaagacagggg

SEQ ID NO: 25009 - DNA, 22 bp, Artificial sequence
  SiRNA target sequence
ctaatagctttaagacaggggt

SEQ ID NO: 25010 - DNA, 22 bp, Artificial sequence
  SiRNA target sequence
taatagctttaagacaggggtt

SEQ ID NO: 25011 - DNA, 22 bp, Artificial sequence
  SiRNA target sequence
aatagctttaagacaggggttt

SEQ ID NO: 25012 - DNA, 22 bp, Artificial sequence
  SiRNA target sequence
atagctttaagacaggggttta

SEQ ID NO: 25013 - DNA, 22 bp, Artificial sequence
  SiRNA target sequence
tagctttaagacaggggtttat

SEQ ID NO: 25014 - DNA, 22 bp, Artificial sequence
  SiRNA target sequence
agctttaagacaggggtttatt

SEQ ID NO: 25015 - DNA, 22 bp, Artificial sequence
  SiRNA target sequence
gctttaagacaggggtttattg

SEQ ID NO: 25016 - DNA, 22 bp, Artificial sequence
  SiRNA target sequence
ctttaagacaggggtttattgt

SEQ ID NO: 25017 - DNA, 22 bp, Artificial sequence
  SiRNA target sequence
tttaagacaggggtttattgtt

SEQ ID NO: 25018 - DNA, 22 bp, Artificial sequence
  SiRNA target sequence
ttaagacaggggtttattgttt

SEQ ID NO: 25019 - DNA, 22 bp, Artificial sequence
  SiRNA target sequence
taagacaggggtttattgtttt

SEQ ID NO: 25020 - DNA, 22 bp, Artificial sequence
  SiRNA target sequence
aagacaggggtttattgttttg

SEQ ID NO: 25021 - DNA, 22 bp, Artificial sequence
  SiRNA target sequence
agacaggggtttattgttttgt

SEQ ID NO: 25022 - DNA, 22 bp, Artificial sequence
  SiRNA target sequence
gacaggggtttattgttttgtc

SEQ ID NO: 25023 - DNA, 22 bp, Artificial sequence
  SiRNA target sequence
acaggggtttattgttttgtct

SEQ ID NO: 25024 - DNA, 22 bp, Artificial sequence
  SiRNA target sequence
caggggtttattgttttgtcta

SEQ ID NO: 25025 - DNA, 22 bp, Artificial sequence
  SiRNA target sequence
aggggtttattgttttgtctat

SEQ ID NO: 25026 - DNA, 22 bp, Artificial sequence
  SiRNA target sequence
ggggtttattgttttgtctatt

SEQ ID NO: 25027 - DNA, 22 bp, Artificial sequence
  SiRNA target sequence
gggtttattgttttgtctatta

SEQ ID NO: 25028 - DNA, 22 bp, Artificial sequence
  SiRNA target sequence
ggtttattgttttgtctattaa

SEQ ID NO: 25029 - DNA, 22 bp, Artificial sequence
  SiRNA target sequence
gtttattgttttgtctattaac

SEQ ID NO: 25030 - DNA, 22 bp, Artificial sequence
  SiRNA target sequence
tttattgttttgtctattaact

SEQ ID NO: 25031 - DNA, 22 bp, Artificial sequence
  SiRNA target sequence
ttattgttttgtctattaactt

SEQ ID NO: 25032 - DNA, 22 bp, Artificial sequence
  SiRNA target sequence
tattgttttgtctattaacttt

SEQ ID NO: 25033 - DNA, 22 bp, Artificial sequence
  SiRNA target sequence
attgttttgtctattaactttt

SEQ ID NO: 25034 - DNA, 22 bp, Artificial sequence
  SiRNA target sequence
ttgttttgtctattaacttttt

SEQ ID NO: 25035 - DNA, 22 bp, Artificial sequence
  SiRNA target sequence
tgttttgtctattaactttttt

SEQ ID NO: 25036 - DNA, 22 bp, Artificial sequence
  SiRNA target sequence
gttttgtctattaacttttttg

SEQ ID NO: 25037 - DNA, 22 bp, Artificial sequence
  SiRNA target sequence
ttttgtctattaacttttttgt

SEQ ID NO: 25038 - DNA, 22 bp, Artificial sequence
  SiRNA target sequence
tttgtctattaacttttttgta

SEQ ID NO: 25039 - DNA, 22 bp, Artificial sequence
  SiRNA target sequence
ttgtctattaacttttttgtaa

SEQ ID NO: 25040 - DNA, 22 bp, Artificial sequence
  SiRNA target sequence
tgtctattaacttttttgtaat

SEQ ID NO: 25041 - DNA, 22 bp, Artificial sequence
  SiRNA target sequence
gtctattaacttttttgtaatt

SEQ ID NO: 25042 - DNA, 22 bp, Artificial sequence
  SiRNA target sequence
tctattaacttttttgtaattt

SEQ ID NO: 25043 - DNA, 22 bp, Artificial sequence
  SiRNA target sequence
ctattaacttttttgtaatttt

SEQ ID NO: 25044 - DNA, 22 bp, Artificial sequence
  SiRNA target sequence
tattaacttttttgtaattttt

SEQ ID NO: 25045 - DNA, 22 bp, Artificial sequence
  SiRNA target sequence
attaacttttttgtaatttttt

SEQ ID NO: 25046 - DNA, 22 bp, Artificial sequence
  SiRNA target sequence
ttaacttttttgtaattttttc

SEQ ID NO: 25047 - DNA, 22 bp, Artificial sequence
  SiRNA target sequence
taacttttttgtaattttttca

SEQ ID NO: 25048 - DNA, 22 bp, Artificial sequence
  SiRNA target sequence
aacttttttgtaattttttcaa

SEQ ID NO: 25049 - DNA, 22 bp, Artificial sequence
  SiRNA target sequence
acttttttgtaattttttcaaa

SEQ ID NO: 25050 - DNA, 22 bp, Artificial sequence
  SiRNA target sequence
cttttttgtaattttttcaaat

SEQ ID NO: 25051 - DNA, 22 bp, Artificial sequence
  SiRNA target sequence
ttttttgtaattttttcaaatt

SEQ ID NO: 25052 - DNA, 22 bp, Artificial sequence
  SiRNA target sequence
tttttgtaattttttcaaattc

SEQ ID NO: 25053 - DNA, 22 bp, Artificial sequence
  SiRNA target sequence
ttttgtaattttttcaaattcg

SEQ ID NO: 25054 - DNA, 22 bp, Artificial sequence
  SiRNA target sequence
tttgtaattttttcaaattcgt

SEQ ID NO: 25055 - DNA, 22 bp, Artificial sequence
  SiRNA target sequence
ttgtaattttttcaaattcgtc

SEQ ID NO: 25056 - DNA, 22 bp, Artificial sequence
  SiRNA target sequence
tgtaattttttcaaattcgtcg

SEQ ID NO: 25057 - DNA, 22 bp, Artificial sequence
  SiRNA target sequence
gtaattttttcaaattcgtcgc

SEQ ID NO: 25058 - DNA, 22 bp, Artificial sequence
  SiRNA target sequence
taattttttcaaattcgtcgcg

SEQ ID NO: 25059 - DNA, 22 bp, Artificial sequence
  SiRNA target sequence
aattttttcaaattcgtcgcgt

SEQ ID NO: 25060 - DNA, 22 bp, Artificial sequence
  SiRNA target sequence
attttttcaaattcgtcgcgtg

SEQ ID NO: 25061 - DNA, 22 bp, Artificial sequence
  SiRNA target sequence
ttttttcaaattcgtcgcgtgt

SEQ ID NO: 25062 - DNA, 22 bp, Artificial sequence
  SiRNA target sequence
tttttcaaattcgtcgcgtgta

SEQ ID NO: 25063 - DNA, 22 bp, Artificial sequence
  SiRNA target sequence
ttttcaaattcgtcgcgtgtaa

SEQ ID NO: 25064 - DNA, 22 bp, Artificial sequence
  SiRNA target sequence
tttcaaattcgtcgcgtgtaat

SEQ ID NO: 25065 - DNA, 22 bp, Artificial sequence
  SiRNA target sequence
ttcaaattcgtcgcgtgtaatt

SEQ ID NO: 25066 - DNA, 22 bp, Artificial sequence
  SiRNA target sequence
tcaaattcgtcgcgtgtaatta

SEQ ID NO: 25067 - DNA, 22 bp, Artificial sequence
  SiRNA target sequence
caaattcgtcgcgtgtaattac

SEQ ID NO: 25068 - DNA, 22 bp, Artificial sequence
  SiRNA target sequence
aaattcgtcgcgtgtaattacc

SEQ ID NO: 25069 - DNA, 22 bp, Artificial sequence
  SiRNA target sequence
aattcgtcgcgtgtaattacct

SEQ ID NO: 25070 - DNA, 22 bp, Artificial sequence
  SiRNA target sequence
attcgtcgcgtgtaattacctc

SEQ ID NO: 25071 - DNA, 22 bp, Artificial sequence
  SiRNA target sequence
ttcgtcgcgtgtaattacctct

SEQ ID NO: 25072 - DNA, 22 bp, Artificial sequence
  SiRNA target sequence
tcgtcgcgtgtaattacctctt

SEQ ID NO: 25073 - DNA, 22 bp, Artificial sequence
  SiRNA target sequence
cgtcgcgtgtaattacctcttt

SEQ ID NO: 25074 - DNA, 22 bp, Artificial sequence
  SiRNA target sequence
gtcgcgtgtaattacctctttt

SEQ ID NO: 25075 - DNA, 22 bp, Artificial sequence
  SiRNA target sequence
tcgcgtgtaattacctctttta

SEQ ID NO: 25076 - DNA, 22 bp, Artificial sequence
  SiRNA target sequence
cgcgtgtaattacctcttttaa

SEQ ID NO: 25077 - DNA, 22 bp, Artificial sequence
  SiRNA target sequence
gcgtgtaattacctcttttaag

SEQ ID NO: 25078 - DNA, 22 bp, Artificial sequence
  SiRNA target sequence
cgtgtaattacctcttttaagt

SEQ ID NO: 25079 - DNA, 22 bp, Artificial sequence
  SiRNA target sequence
gtgtaattacctcttttaagtg

SEQ ID NO: 25080 - DNA, 22 bp, Artificial sequence
  SiRNA target sequence
tgtaattacctcttttaagtga

SEQ ID NO: 25081 - DNA, 22 bp, Artificial sequence
  SiRNA target sequence
gtaattacctcttttaagtgat

SEQ ID NO: 25082 - DNA, 22 bp, Artificial sequence
  SiRNA target sequence
taattacctcttttaagtgata

SEQ ID NO: 25083 - DNA, 22 bp, Artificial sequence
  SiRNA target sequence
aattacctcttttaagtgataa

SEQ ID NO: 25084 - DNA, 22 bp, Artificial sequence
  SiRNA target sequence
attacctcttttaagtgataat

SEQ ID NO: 25085 - DNA, 22 bp, Artificial sequence
  SiRNA target sequence
ttacctcttttaagtgataatt

SEQ ID NO: 25086 - DNA, 22 bp, Artificial sequence
  SiRNA target sequence
tacctcttttaagtgataattc

SEQ ID NO: 25087 - DNA, 22 bp, Artificial sequence
  SiRNA target sequence
acctcttttaagtgataattct

SEQ ID NO: 25088 - DNA, 22 bp, Artificial sequence
  SiRNA target sequence
cctcttttaagtgataattctt

SEQ ID NO: 25089 - DNA, 22 bp, Artificial sequence
  SiRNA target sequence
ctcttttaagtgataattcttt

SEQ ID NO: 25090 - DNA, 22 bp, Artificial sequence
  SiRNA target sequence
tcttttaagtgataattctttt

SEQ ID NO: 25091 - DNA, 22 bp, Artificial sequence
  SiRNA target sequence
cttttaagtgataattcttttt

SEQ ID NO: 25092 - DNA, 22 bp, Artificial sequence
  SiRNA target sequence
ttttaagtgataattcttttta

SEQ ID NO: 25093 - DNA, 22 bp, Artificial sequence
  SiRNA target sequence
tttaagtgataattctttttac

SEQ ID NO: 25094 - DNA, 22 bp, Artificial sequence
  SiRNA target sequence
ttaagtgataattctttttact

SEQ ID NO: 25095 - DNA, 22 bp, Artificial sequence
  SiRNA target sequence
taagtgataattctttttacta

SEQ ID NO: 25096 - DNA, 22 bp, Artificial sequence
  SiRNA target sequence
aagtgataattctttttactat

SEQ ID NO: 25097 - DNA, 22 bp, Artificial sequence
  SiRNA target sequence
agtgataattctttttactatc

SEQ ID NO: 25098 - DNA, 22 bp, Artificial sequence
  SiRNA target sequence
gtgataattctttttactatcg

SEQ ID NO: 25099 - DNA, 22 bp, Artificial sequence
  SiRNA target sequence
tgataattctttttactatcgt

SEQ ID NO: 25100 - DNA, 22 bp, Artificial sequence
  SiRNA target sequence
gataattctttttactatcgtt

SEQ ID NO: 25101 - DNA, 22 bp, Artificial sequence
  SiRNA target sequence
ataattctttttactatcgtta

SEQ ID NO: 25102 - DNA, 22 bp, Artificial sequence
  SiRNA target sequence
taattctttttactatcgttat

SEQ ID NO: 25103 - DNA, 22 bp, Artificial sequence
  SiRNA target sequence
aattctttttactatcgttata

SEQ ID NO: 25104 - DNA, 22 bp, Artificial sequence
  SiRNA target sequence
attctttttactatcgttataa

SEQ ID NO: 25105 - DNA, 22 bp, Artificial sequence
  SiRNA target sequence
ttctttttactatcgttataaa

SEQ ID NO: 25106 - DNA, 22 bp, Artificial sequence
  SiRNA target sequence
tctttttactatcgttataaat

SEQ ID NO: 25107 - DNA, 22 bp, Artificial sequence
  SiRNA target sequence
ctttttactatcgttataaata

SEQ ID NO: 25108 - DNA, 22 bp, Artificial sequence
  SiRNA target sequence
tttttactatcgttataaatat

SEQ ID NO: 25109 - DNA, 22 bp, Artificial sequence
  SiRNA target sequence
ttttactatcgttataaatata

SEQ ID NO: 25110 - DNA, 22 bp, Artificial sequence
  SiRNA target sequence
tttactatcgttataaatatac

SEQ ID NO: 25111 - DNA, 22 bp, Artificial sequence
  SiRNA target sequence
ttactatcgttataaatatacg

SEQ ID NO: 25112 - DNA, 22 bp, Artificial sequence
  SiRNA target sequence
tactatcgttataaatatacgg

SEQ ID NO: 25113 - DNA, 22 bp, Artificial sequence
  SiRNA target sequence
actatcgttataaatatacgga

SEQ ID NO: 25114 - DNA, 22 bp, Artificial sequence
  SiRNA target sequence
ctatcgttataaatatacggaa

SEQ ID NO: 25115 - DNA, 22 bp, Artificial sequence
  SiRNA target sequence
tatcgttataaatatacggaat

SEQ ID NO: 25116 - DNA, 22 bp, Artificial sequence
  SiRNA target sequence
atcgttataaatatacggaata

SEQ ID NO: 25117 - DNA, 22 bp, Artificial sequence
  SiRNA target sequence
tcgttataaatatacggaatat

SEQ ID NO: 25118 - DNA, 22 bp, Artificial sequence
  SiRNA target sequence
cgttataaatatacggaatatt

SEQ ID NO: 25119 - DNA, 22 bp, Artificial sequence
  SiRNA target sequence
gttataaatatacggaatatta

SEQ ID NO: 25120 - DNA, 22 bp, Artificial sequence
  SiRNA target sequence
ttataaatatacggaatattaa

SEQ ID NO: 25121 - DNA, 22 bp, Artificial sequence
  SiRNA target sequence
tataaatatacggaatattaat

SEQ ID NO: 25122 - DNA, 22 bp, Artificial sequence
  SiRNA target sequence
ataaatatacggaatattaatt

SEQ ID NO: 25123 - DNA, 22 bp, Artificial sequence
  SiRNA target sequence
taaatatacggaatattaattt

SEQ ID NO: 25124 - DNA, 22 bp, Artificial sequence
  SiRNA target sequence
aaatatacggaatattaatttc

SEQ ID NO: 25125 - DNA, 22 bp, Artificial sequence
  SiRNA target sequence
aatatacggaatattaatttca

SEQ ID NO: 25126 - DNA, 22 bp, Artificial sequence
  SiRNA target sequence
atatacggaatattaatttcag

SEQ ID NO: 25127 - DNA, 22 bp, Artificial sequence
  SiRNA target sequence
tatacggaatattaatttcaga

SEQ ID NO: 25128 - DNA, 22 bp, Artificial sequence
  SiRNA target sequence
atacggaatattaatttcagac

SEQ ID NO: 25129 - DNA, 22 bp, Artificial sequence
  SiRNA target sequence
tacggaatattaatttcagacg

SEQ ID NO: 25130 - DNA, 22 bp, Artificial sequence
  SiRNA target sequence
acggaatattaatttcagacga

SEQ ID NO: 25131 - DNA, 22 bp, Artificial sequence
  SiRNA target sequence
cggaatattaatttcagacgaa

SEQ ID NO: 25132 - DNA, 22 bp, Artificial sequence
  SiRNA target sequence
ggaatattaatttcagacgaaa

SEQ ID NO: 25133 - DNA, 22 bp, Artificial sequence
  SiRNA target sequence
gaatattaatttcagacgaaag

SEQ ID NO: 25134 - DNA, 22 bp, Artificial sequence
  SiRNA target sequence
aatattaatttcagacgaaaga

SEQ ID NO: 25135 - DNA, 22 bp, Artificial sequence
  SiRNA target sequence
atattaatttcagacgaaagat

SEQ ID NO: 25136 - DNA, 22 bp, Artificial sequence
  SiRNA target sequence
tattaatttcagacgaaagatt

SEQ ID NO: 25137 - DNA, 22 bp, Artificial sequence
  SiRNA target sequence
attaatttcagacgaaagatta

SEQ ID NO: 25138 - DNA, 22 bp, Artificial sequence
  SiRNA target sequence
ttaatttcagacgaaagattag

SEQ ID NO: 25139 - DNA, 22 bp, Artificial sequence
  SiRNA target sequence
taatttcagacgaaagattaga

SEQ ID NO: 25140 - DNA, 22 bp, Artificial sequence
  SiRNA target sequence
aatttcagacgaaagattagac

SEQ ID NO: 25141 - DNA, 22 bp, Artificial sequence
  SiRNA target sequence
atttcagacgaaagattagacg

SEQ ID NO: 25142 - DNA, 22 bp, Artificial sequence
  SiRNA target sequence
tttcagacgaaagattagacga

SEQ ID NO: 25143 - DNA, 22 bp, Artificial sequence
  SiRNA target sequence
ttcagacgaaagattagacgac

SEQ ID NO: 25144 - DNA, 22 bp, Artificial sequence
  SiRNA target sequence
tcagacgaaagattagacgaca

SEQ ID NO: 25145 - DNA, 22 bp, Artificial sequence
  SiRNA target sequence
cagacgaaagattagacgacag

SEQ ID NO: 25146 - DNA, 22 bp, Artificial sequence
  SiRNA target sequence
agacgaaagattagacgacagt

SEQ ID NO: 25147 - DNA, 22 bp, Artificial sequence
  SiRNA target sequence
gacgaaagattagacgacagtt

SEQ ID NO: 25148 - DNA, 22 bp, Artificial sequence
  SiRNA target sequence
acgaaagattagacgacagttc

SEQ ID NO: 25149 - DNA, 22 bp, Artificial sequence
  SiRNA target sequence
cgaaagattagacgacagttct

SEQ ID NO: 25150 - DNA, 22 bp, Artificial sequence
  SiRNA target sequence
gaaagattagacgacagttctt

SEQ ID NO: 25151 - DNA, 22 bp, Artificial sequence
  SiRNA target sequence
aaagattagacgacagttcttt

SEQ ID NO: 25152 - DNA, 22 bp, Artificial sequence
  SiRNA target sequence
aagattagacgacagttctttt

SEQ ID NO: 25153 - DNA, 22 bp, Artificial sequence
  SiRNA target sequence
agattagacgacagttcttttt

SEQ ID NO: 25154 - DNA, 22 bp, Artificial sequence
  SiRNA target sequence
gattagacgacagttctttttt

SEQ ID NO: 25155 - DNA, 22 bp, Artificial sequence
  SiRNA target sequence
attagacgacagttcttttttc

SEQ ID NO: 25156 - DNA, 22 bp, Artificial sequence
  SiRNA target sequence
ttagacgacagttcttttttca

SEQ ID NO: 25157 - DNA, 22 bp, Artificial sequence
  SiRNA target sequence
tagacgacagttcttttttcat

SEQ ID NO: 25158 - DNA, 22 bp, Artificial sequence
  SiRNA target sequence
agacgacagttcttttttcatt

SEQ ID NO: 25159 - DNA, 22 bp, Artificial sequence
  SiRNA target sequence
gacgacagttcttttttcattt

SEQ ID NO: 25160 - DNA, 22 bp, Artificial sequence
  SiRNA target sequence
acgacagttcttttttcatttt

SEQ ID NO: 25161 - DNA, 22 bp, Artificial sequence
  SiRNA target sequence
cgacagttcttttttcattttt

SEQ ID NO: 25162 - DNA, 22 bp, Artificial sequence
  SiRNA target sequence
gacagttcttttttcatttttt

SEQ ID NO: 25163 - DNA, 22 bp, Artificial sequence
  SiRNA target sequence
acagttcttttttcattttttc

SEQ ID NO: 25164 - DNA, 22 bp, Artificial sequence
  SiRNA target sequence
cagttcttttttcattttttcc

SEQ ID NO: 25165 - DNA, 22 bp, Artificial sequence
  SiRNA target sequence
agttcttttttcattttttccg

SEQ ID NO: 25166 - DNA, 22 bp, Artificial sequence
  SiRNA target sequence
gttcttttttcattttttccgc

SEQ ID NO: 25167 - DNA, 22 bp, Artificial sequence
  SiRNA target sequence
ttcttttttcattttttccgct

SEQ ID NO: 25168 - DNA, 22 bp, Artificial sequence
  SiRNA target sequence
tcttttttcattttttccgctg

SEQ ID NO: 25169 - DNA, 22 bp, Artificial sequence
  SiRNA target sequence
cttttttcattttttccgctgc

SEQ ID NO: 25170 - DNA, 22 bp, Artificial sequence
  SiRNA target sequence
ttttttcattttttccgctgct

SEQ ID NO: 25171 - DNA, 22 bp, Artificial sequence
  SiRNA target sequence
tttttcattttttccgctgctt

SEQ ID NO: 25172 - DNA, 22 bp, Artificial sequence
  SiRNA target sequence
ttttcattttttccgctgcttc

SEQ ID NO: 25173 - DNA, 22 bp, Artificial sequence
  SiRNA target sequence
tttcattttttccgctgcttct

SEQ ID NO: 25174 - DNA, 22 bp, Artificial sequence
  SiRNA target sequence
ttcattttttccgctgcttctt

SEQ ID NO: 25175 - DNA, 22 bp, Artificial sequence
  SiRNA target sequence
tcattttttccgctgcttcttt

SEQ ID NO: 25176 - DNA, 22 bp, Artificial sequence
  SiRNA target sequence
cattttttccgctgcttcttta

SEQ ID NO: 25177 - DNA, 22 bp, Artificial sequence
  SiRNA target sequence
attttttccgctgcttctttaa

SEQ ID NO: 25178 - DNA, 22 bp, Artificial sequence
  SiRNA target sequence
ttttttccgctgcttctttaat

SEQ ID NO: 25179 - DNA, 22 bp, Artificial sequence
  SiRNA target sequence
tttttccgctgcttctttaatt

SEQ ID NO: 25180 - DNA, 22 bp, Artificial sequence
  SiRNA target sequence
ttttccgctgcttctttaattc

SEQ ID NO: 25181 - DNA, 22 bp, Artificial sequence
  SiRNA target sequence
tttccgctgcttctttaattct

SEQ ID NO: 25182 - DNA, 22 bp, Artificial sequence
  SiRNA target sequence
ttccgctgcttctttaattcta

SEQ ID NO: 25183 - DNA, 22 bp, Artificial sequence
  SiRNA target sequence
tccgctgcttctttaattctat

SEQ ID NO: 25184 - DNA, 22 bp, Artificial sequence
  SiRNA target sequence
ccgctgcttctttaattctatt

SEQ ID NO: 25185 - DNA, 22 bp, Artificial sequence
  SiRNA target sequence
cgctgcttctttaattctatta

SEQ ID NO: 25186 - DNA, 22 bp, Artificial sequence
  SiRNA target sequence
gctgcttctttaattctattat

SEQ ID NO: 25187 - DNA, 22 bp, Artificial sequence
  SiRNA target sequence
ctgcttctttaattctattata

SEQ ID NO: 25188 - DNA, 22 bp, Artificial sequence
  SiRNA target sequence
tgcttctttaattctattataa

SEQ ID NO: 25189 - DNA, 22 bp, Artificial sequence
  SiRNA target sequence
gcttctttaattctattataac

SEQ ID NO: 25190 - DNA, 22 bp, Artificial sequence
  SiRNA target sequence
cttctttaattctattataaca

SEQ ID NO: 25191 - DNA, 22 bp, Artificial sequence
  SiRNA target sequence
ttctttaattctattataacaa

SEQ ID NO: 25192 - DNA, 22 bp, Artificial sequence
  SiRNA target sequence
tctttaattctattataacaag

SEQ ID NO: 25193 - DNA, 22 bp, Artificial sequence
  SiRNA target sequence
ctttaattctattataacaaga

SEQ ID NO: 25194 - DNA, 22 bp, Artificial sequence
  SiRNA target sequence
tttaattctattataacaagaa

SEQ ID NO: 25195 - DNA, 22 bp, Artificial sequence
  SiRNA target sequence
ttaattctattataacaagaat

SEQ ID NO: 25196 - DNA, 22 bp, Artificial sequence
  SiRNA target sequence
taattctattataacaagaatc

SEQ ID NO: 25197 - DNA, 22 bp, Artificial sequence
  SiRNA target sequence
aattctattataacaagaatcg

SEQ ID NO: 25198 - DNA, 22 bp, Artificial sequence
  SiRNA target sequence
attctattataacaagaatcgt

SEQ ID NO: 25199 - DNA, 22 bp, Artificial sequence
  SiRNA target sequence
ttctattataacaagaatcgtg

SEQ ID NO: 25200 - DNA, 22 bp, Artificial sequence
  SiRNA target sequence
tctattataacaagaatcgtgt

SEQ ID NO: 25201 - DNA, 22 bp, Artificial sequence
  SiRNA target sequence
ctattataacaagaatcgtgtt

SEQ ID NO: 25202 - DNA, 22 bp, Artificial sequence
  SiRNA target sequence
tattataacaagaatcgtgttt

SEQ ID NO: 25203 - DNA, 22 bp, Artificial sequence
  SiRNA target sequence
attataacaagaatcgtgttta

SEQ ID NO: 25204 - DNA, 22 bp, Artificial sequence
  SiRNA target sequence
ttataacaagaatcgtgtttaa

SEQ ID NO: 25205 - DNA, 22 bp, Artificial sequence
  SiRNA target sequence
tataacaagaatcgtgtttaag

SEQ ID NO: 25206 - DNA, 22 bp, Artificial sequence
  SiRNA target sequence
ataacaagaatcgtgtttaagt

SEQ ID NO: 25207 - DNA, 22 bp, Artificial sequence
  SiRNA target sequence
taacaagaatcgtgtttaagta

SEQ ID NO: 25208 - DNA, 22 bp, Artificial sequence
  SiRNA target sequence
aacaagaatcgtgtttaagtaa

SEQ ID NO: 25209 - DNA, 22 bp, Artificial sequence
  SiRNA target sequence
acaagaatcgtgtttaagtaaa

SEQ ID NO: 25210 - DNA, 22 bp, Artificial sequence
  SiRNA target sequence
caagaatcgtgtttaagtaaat

SEQ ID NO: 25211 - DNA, 22 bp, Artificial sequence
  SiRNA target sequence
aagaatcgtgtttaagtaaatc

SEQ ID NO: 25212 - DNA, 22 bp, Artificial sequence
  SiRNA target sequence
agaatcgtgtttaagtaaatca

SEQ ID NO: 25213 - DNA, 22 bp, Artificial sequence
  SiRNA target sequence
gaatcgtgtttaagtaaatcaa

SEQ ID NO: 25214 - DNA, 22 bp, Artificial sequence
  SiRNA target sequence
aatcgtgtttaagtaaatcaat

SEQ ID NO: 25215 - DNA, 22 bp, Artificial sequence
  SiRNA target sequence
atcgtgtttaagtaaatcaatt

SEQ ID NO: 25216 - DNA, 22 bp, Artificial sequence
  SiRNA target sequence
tcgtgtttaagtaaatcaattc

SEQ ID NO: 25217 - DNA, 22 bp, Artificial sequence
  SiRNA target sequence
cgtgtttaagtaaatcaattcc

SEQ ID NO: 25218 - DNA, 22 bp, Artificial sequence
  SiRNA target sequence
gtgtttaagtaaatcaattcct

SEQ ID NO: 25219 - DNA, 22 bp, Artificial sequence
  SiRNA target sequence
tgtttaagtaaatcaattcctg

SEQ ID NO: 25220 - DNA, 22 bp, Artificial sequence
  SiRNA target sequence
gtttaagtaaatcaattcctgt

SEQ ID NO: 25221 - DNA, 22 bp, Artificial sequence
  SiRNA target sequence
tttaagtaaatcaattcctgtt

SEQ ID NO: 25222 - DNA, 22 bp, Artificial sequence
  SiRNA target sequence
ttaagtaaatcaattcctgttc

SEQ ID NO: 25223 - DNA, 22 bp, Artificial sequence
  SiRNA target sequence
taagtaaatcaattcctgttct

SEQ ID NO: 25224 - DNA, 22 bp, Artificial sequence
  SiRNA target sequence
aagtaaatcaattcctgttcta

SEQ ID NO: 25225 - DNA, 22 bp, Artificial sequence
  SiRNA target sequence
agtaaatcaattcctgttctac

SEQ ID NO: 25226 - DNA, 22 bp, Artificial sequence
  SiRNA target sequence
gtaaatcaattcctgttctact

SEQ ID NO: 25227 - DNA, 22 bp, Artificial sequence
  SiRNA target sequence
taaatcaattcctgttctactt

SEQ ID NO: 25228 - DNA, 22 bp, Artificial sequence
  SiRNA target sequence
aaatcaattcctgttctacttt

SEQ ID NO: 25229 - DNA, 22 bp, Artificial sequence
  SiRNA target sequence
aatcaattcctgttctactttt

SEQ ID NO: 25230 - DNA, 22 bp, Artificial sequence
  SiRNA target sequence
atcaattcctgttctactttta

SEQ ID NO: 25231 - DNA, 22 bp, Artificial sequence
  SiRNA target sequence
tcaattcctgttctacttttaa

SEQ ID NO: 25232 - DNA, 22 bp, Artificial sequence
  SiRNA target sequence
caattcctgttctacttttaaa

SEQ ID NO: 25233 - DNA, 22 bp, Artificial sequence
  SiRNA target sequence
aattcctgttctacttttaaat

SEQ ID NO: 25234 - DNA, 22 bp, Artificial sequence
  SiRNA target sequence
attcctgttctacttttaaatt

SEQ ID NO: 25235 - DNA, 22 bp, Artificial sequence
  SiRNA target sequence
ttcctgttctacttttaaattt

SEQ ID NO: 25236 - DNA, 22 bp, Artificial sequence
  SiRNA target sequence
tcctgttctacttttaaatttt

SEQ ID NO: 25237 - DNA, 22 bp, Artificial sequence
  SiRNA target sequence
cctgttctacttttaaattttt

SEQ ID NO: 25238 - DNA, 22 bp, Artificial sequence
  SiRNA target sequence
ctgttctacttttaaatttttc

SEQ ID NO: 25239 - DNA, 22 bp, Artificial sequence
  SiRNA target sequence
tgttctacttttaaatttttca

SEQ ID NO: 25240 - DNA, 22 bp, Artificial sequence
  SiRNA target sequence
gttctacttttaaatttttcat

SEQ ID NO: 25241 - DNA, 22 bp, Artificial sequence
  SiRNA target sequence
ttctacttttaaatttttcatt

SEQ ID NO: 25242 - DNA, 22 bp, Artificial sequence
  SiRNA target sequence
tctacttttaaatttttcatta

SEQ ID NO: 25243 - DNA, 22 bp, Artificial sequence
  SiRNA target sequence
ctacttttaaatttttcattaa

SEQ ID NO: 25244 - DNA, 22 bp, Artificial sequence
  SiRNA target sequence
tacttttaaatttttcattaat

SEQ ID NO: 25245 - DNA, 22 bp, Artificial sequence
  SiRNA target sequence
acttttaaatttttcattaata

SEQ ID NO: 25246 - DNA, 22 bp, Artificial sequence
  SiRNA target sequence
cttttaaatttttcattaatat

SEQ ID NO: 25247 - DNA, 22 bp, Artificial sequence
  SiRNA target sequence
ttttaaatttttcattaatata

SEQ ID NO: 25248 - DNA, 22 bp, Artificial sequence
  SiRNA target sequence
tttaaatttttcattaatataa

SEQ ID NO: 25249 - DNA, 22 bp, Artificial sequence
  SiRNA target sequence
ttaaatttttcattaatataat

SEQ ID NO: 25250 - DNA, 22 bp, Artificial sequence
  SiRNA target sequence
taaatttttcattaatataatc

SEQ ID NO: 25251 - DNA, 22 bp, Artificial sequence
  SiRNA target sequence
aaatttttcattaatataatct

SEQ ID NO: 25252 - DNA, 22 bp, Artificial sequence
  SiRNA target sequence
aatttttcattaatataatcta

SEQ ID NO: 25253 - DNA, 22 bp, Artificial sequence
  SiRNA target sequence
atttttcattaatataatctac

SEQ ID NO: 25254 - DNA, 22 bp, Artificial sequence
  SiRNA target sequence
tttttcattaatataatctact

SEQ ID NO: 25255 - DNA, 22 bp, Artificial sequence
  SiRNA target sequence
ttttcattaatataatctacta

SEQ ID NO: 25256 - DNA, 22 bp, Artificial sequence
  SiRNA target sequence
tttcattaatataatctactaa

SEQ ID NO: 25257 - DNA, 22 bp, Artificial sequence
  SiRNA target sequence
ttcattaatataatctactaaa

SEQ ID NO: 25258 - DNA, 22 bp, Artificial sequence
  SiRNA target sequence
tcattaatataatctactaaag

SEQ ID NO: 25259 - DNA, 22 bp, Artificial sequence
  SiRNA target sequence
cattaatataatctactaaagt

SEQ ID NO: 25260 - DNA, 22 bp, Artificial sequence
  SiRNA target sequence
attaatataatctactaaagta

SEQ ID NO: 25261 - DNA, 22 bp, Artificial sequence
  SiRNA target sequence
ttaatataatctactaaagtat

SEQ ID NO: 25262 - DNA, 22 bp, Artificial sequence
  SiRNA target sequence
taatataatctactaaagtatt

SEQ ID NO: 25263 - DNA, 22 bp, Artificial sequence
  SiRNA target sequence
aatataatctactaaagtatta

SEQ ID NO: 25264 - DNA, 22 bp, Artificial sequence
  SiRNA target sequence
atataatctactaaagtattat

SEQ ID NO: 25265 - DNA, 22 bp, Artificial sequence
  SiRNA target sequence
tataatctactaaagtattatc

SEQ ID NO: 25266 - DNA, 22 bp, Artificial sequence
  SiRNA target sequence
ataatctactaaagtattatcc

SEQ ID NO: 25267 - DNA, 22 bp, Artificial sequence
  SiRNA target sequence
taatctactaaagtattatcca

SEQ ID NO: 25268 - DNA, 22 bp, Artificial sequence
  SiRNA target sequence
aatctactaaagtattatccaa

SEQ ID NO: 25269 - DNA, 22 bp, Artificial sequence
  SiRNA target sequence
atctactaaagtattatccaaa

SEQ ID NO: 25270 - DNA, 22 bp, Artificial sequence
  SiRNA target sequence
tctactaaagtattatccaaat

SEQ ID NO: 25271 - DNA, 22 bp, Artificial sequence
  SiRNA target sequence
ctactaaagtattatccaaatc

SEQ ID NO: 25272 - DNA, 22 bp, Artificial sequence
  SiRNA target sequence
tactaaagtattatccaaatct

SEQ ID NO: 25273 - DNA, 22 bp, Artificial sequence
  SiRNA target sequence
actaaagtattatccaaatctt

SEQ ID NO: 25274 - DNA, 22 bp, Artificial sequence
  SiRNA target sequence
ctaaagtattatccaaatcttc

SEQ ID NO: 25275 - DNA, 22 bp, Artificial sequence
  SiRNA target sequence
taaagtattatccaaatcttct

SEQ ID NO: 25276 - DNA, 22 bp, Artificial sequence
  SiRNA target sequence
aaagtattatccaaatcttctc

SEQ ID NO: 25277 - DNA, 22 bp, Artificial sequence
  SiRNA target sequence
aagtattatccaaatcttctcc

SEQ ID NO: 25278 - DNA, 22 bp, Artificial sequence
  SiRNA target sequence
agtattatccaaatcttctcct

SEQ ID NO: 25279 - DNA, 22 bp, Artificial sequence
  SiRNA target sequence
gtattatccaaatcttctcctc

SEQ ID NO: 25280 - DNA, 22 bp, Artificial sequence
  SiRNA target sequence
tattatccaaatcttctcctcc

SEQ ID NO: 25281 - DNA, 22 bp, Artificial sequence
  SiRNA target sequence
attatccaaatcttctcctcct

SEQ ID NO: 25282 - DNA, 22 bp, Artificial sequence
  SiRNA target sequence
ttatccaaatcttctcctccta

SEQ ID NO: 25283 - DNA, 22 bp, Artificial sequence
  SiRNA target sequence
tatccaaatcttctcctcctaa

SEQ ID NO: 25284 - DNA, 22 bp, Artificial sequence
  SiRNA target sequence
atccaaatcttctcctcctaaa

SEQ ID NO: 25285 - DNA, 22 bp, Artificial sequence
  SiRNA target sequence
tccaaatcttctcctcctaaaa

SEQ ID NO: 25286 - DNA, 22 bp, Artificial sequence
  SiRNA target sequence
ccaaatcttctcctcctaaaaa

SEQ ID NO: 25287 - DNA, 22 bp, Artificial sequence
  SiRNA target sequence
caaatcttctcctcctaaaaaa

SEQ ID NO: 25288 - DNA, 22 bp, Artificial sequence
  SiRNA target sequence
aaatcttctcctcctaaaaaag

SEQ ID NO: 25289 - DNA, 22 bp, Artificial sequence
  SiRNA target sequence
aatcttctcctcctaaaaaagt

SEQ ID NO: 25290 - DNA, 22 bp, Artificial sequence
  SiRNA target sequence
atcttctcctcctaaaaaagta

SEQ ID NO: 25291 - DNA, 22 bp, Artificial sequence
  SiRNA target sequence
tcttctcctcctaaaaaagtat

SEQ ID NO: 25292 - DNA, 22 bp, Artificial sequence
  SiRNA target sequence
cttctcctcctaaaaaagtatt

SEQ ID NO: 25293 - DNA, 22 bp, Artificial sequence
  SiRNA target sequence
ttctcctcctaaaaaagtattt

SEQ ID NO: 25294 - DNA, 22 bp, Artificial sequence
  SiRNA target sequence
tctcctcctaaaaaagtatttc

SEQ ID NO: 25295 - DNA, 22 bp, Artificial sequence
  SiRNA target sequence
ctcctcctaaaaaagtatttcc

SEQ ID NO: 25296 - DNA, 22 bp, Artificial sequence
  SiRNA target sequence
tcctcctaaaaaagtatttccg

SEQ ID NO: 25297 - DNA, 22 bp, Artificial sequence
  SiRNA target sequence
cctcctaaaaaagtatttccgt

SEQ ID NO: 25298 - DNA, 22 bp, Artificial sequence
  SiRNA target sequence
ctcctaaaaaagtatttccgtt

SEQ ID NO: 25299 - DNA, 22 bp, Artificial sequence
  SiRNA target sequence
tcctaaaaaagtatttccgtta

SEQ ID NO: 25300 - DNA, 22 bp, Artificial sequence
  SiRNA target sequence
cctaaaaaagtatttccgttag

SEQ ID NO: 25301 - DNA, 22 bp, Artificial sequence
  SiRNA target sequence
ctaaaaaagtatttccgttagt

SEQ ID NO: 25302 - DNA, 22 bp, Artificial sequence
  SiRNA target sequence
taaaaaagtatttccgttagta

SEQ ID NO: 25303 - DNA, 22 bp, Artificial sequence
  SiRNA target sequence
aaaaaagtatttccgttagtag

SEQ ID NO: 25304 - DNA, 22 bp, Artificial sequence
  SiRNA target sequence
aaaaagtatttccgttagtaga

SEQ ID NO: 25305 - DNA, 22 bp, Artificial sequence
  SiRNA target sequence
aaaagtatttccgttagtagat

SEQ ID NO: 25306 - DNA, 22 bp, Artificial sequence
  SiRNA target sequence
aaagtatttccgttagtagatt

SEQ ID NO: 25307 - DNA, 22 bp, Artificial sequence
  SiRNA target sequence
aagtatttccgttagtagattt

SEQ ID NO: 25308 - DNA, 22 bp, Artificial sequence
  SiRNA target sequence
agtatttccgttagtagatttt

SEQ ID NO: 25309 - DNA, 22 bp, Artificial sequence
  SiRNA target sequence
gtatttccgttagtagatttta

SEQ ID NO: 25310 - DNA, 22 bp, Artificial sequence
  SiRNA target sequence
tatttccgttagtagattttac

SEQ ID NO: 25311 - DNA, 22 bp, Artificial sequence
  SiRNA target sequence
atttccgttagtagattttaca

SEQ ID NO: 25312 - DNA, 22 bp, Artificial sequence
  SiRNA target sequence
tttccgttagtagattttacat

SEQ ID NO: 25313 - DNA, 22 bp, Artificial sequence
  SiRNA target sequence
ttccgttagtagattttacatg

SEQ ID NO: 25314 - DNA, 22 bp, Artificial sequence
  SiRNA target sequence
tccgttagtagattttacatga

SEQ ID NO: 25315 - DNA, 22 bp, Artificial sequence
  SiRNA target sequence
ccgttagtagattttacatgaa

SEQ ID NO: 25316 - DNA, 22 bp, Artificial sequence
  SiRNA target sequence
cgttagtagattttacatgaaa

SEQ ID NO: 25317 - DNA, 22 bp, Artificial sequence
  SiRNA target sequence
gttagtagattttacatgaaaa

SEQ ID NO: 25318 - DNA, 22 bp, Artificial sequence
  SiRNA target sequence
ttagtagattttacatgaaaaa

SEQ ID NO: 25319 - DNA, 22 bp, Artificial sequence
  SiRNA target sequence
tagtagattttacatgaaaaat

SEQ ID NO: 25320 - DNA, 22 bp, Artificial sequence
  SiRNA target sequence
agtagattttacatgaaaaata

SEQ ID NO: 25321 - DNA, 22 bp, Artificial sequence
  SiRNA target sequence
gtagattttacatgaaaaatac

SEQ ID NO: 25322 - DNA, 22 bp, Artificial sequence
  SiRNA target sequence
tagattttacatgaaaaatacc

SEQ ID NO: 25323 - DNA, 22 bp, Artificial sequence
  SiRNA target sequence
agattttacatgaaaaatacca

SEQ ID NO: 25324 - DNA, 22 bp, Artificial sequence
  SiRNA target sequence
gattttacatgaaaaataccat

SEQ ID NO: 25325 - DNA, 22 bp, Artificial sequence
  SiRNA target sequence
attttacatgaaaaataccatt

SEQ ID NO: 25326 - DNA, 22 bp, Artificial sequence
  SiRNA target sequence
ttttacatgaaaaataccatta

SEQ ID NO: 25327 - DNA, 22 bp, Artificial sequence
  SiRNA target sequence
tttacatgaaaaataccattat

SEQ ID NO: 25328 - DNA, 22 bp, Artificial sequence
  SiRNA target sequence
ttacatgaaaaataccattatc

SEQ ID NO: 25329 - DNA, 22 bp, Artificial sequence
  SiRNA target sequence
tacatgaaaaataccattatct

SEQ ID NO: 25330 - DNA, 22 bp, Artificial sequence
  SiRNA target sequence
acatgaaaaataccattatcta

SEQ ID NO: 25331 - DNA, 22 bp, Artificial sequence
  SiRNA target sequence
catgaaaaataccattatctaa

SEQ ID NO: 25332 - DNA, 22 bp, Artificial sequence
  SiRNA target sequence
atgaaaaataccattatctaat

SEQ ID NO: 25333 - DNA, 22 bp, Artificial sequence
  SiRNA target sequence
tgaaaaataccattatctaatt

SEQ ID NO: 25334 - DNA, 22 bp, Artificial sequence
  SiRNA target sequence
gaaaaataccattatctaattc

SEQ ID NO: 25335 - DNA, 22 bp, Artificial sequence
  SiRNA target sequence
aaaaataccattatctaattct

SEQ ID NO: 25336 - DNA, 22 bp, Artificial sequence
  SiRNA target sequence
aaaataccattatctaattcta

SEQ ID NO: 25337 - DNA, 22 bp, Artificial sequence
  SiRNA target sequence
aaataccattatctaattctaa

SEQ ID NO: 25338 - DNA, 22 bp, Artificial sequence
  SiRNA target sequence
aataccattatctaattctaat

SEQ ID NO: 25339 - DNA, 22 bp, Artificial sequence
  SiRNA target sequence
ataccattatctaattctaata

SEQ ID NO: 25340 - DNA, 22 bp, Artificial sequence
  SiRNA target sequence
taccattatctaattctaatat

SEQ ID NO: 25341 - DNA, 22 bp, Artificial sequence
  SiRNA target sequence
accattatctaattctaatata

SEQ ID NO: 25342 - DNA, 22 bp, Artificial sequence
  SiRNA target sequence
ccattatctaattctaatatac

SEQ ID NO: 25343 - DNA, 22 bp, Artificial sequence
  SiRNA target sequence
cattatctaattctaatatact

SEQ ID NO: 25344 - DNA, 22 bp, Artificial sequence
  SiRNA target sequence
attatctaattctaatatacta

SEQ ID NO: 25345 - DNA, 22 bp, Artificial sequence
  SiRNA target sequence
ttatctaattctaatatactaa

SEQ ID NO: 25346 - DNA, 22 bp, Artificial sequence
  SiRNA target sequence
tatctaattctaatatactaat

SEQ ID NO: 25347 - DNA, 22 bp, Artificial sequence
  SiRNA target sequence
atctaattctaatatactaatg

SEQ ID NO: 25348 - DNA, 22 bp, Artificial sequence
  SiRNA target sequence
tctaattctaatatactaatgt

SEQ ID NO: 25349 - DNA, 22 bp, Artificial sequence
  SiRNA target sequence
ctaattctaatatactaatgtc

SEQ ID NO: 25350 - DNA, 22 bp, Artificial sequence
  SiRNA target sequence
taattctaatatactaatgtca

SEQ ID NO: 25351 - DNA, 22 bp, Artificial sequence
  SiRNA target sequence
aattctaatatactaatgtcaa

SEQ ID NO: 25352 - DNA, 22 bp, Artificial sequence
  SiRNA target sequence
attctaatatactaatgtcaaa

SEQ ID NO: 25353 - DNA, 22 bp, Artificial sequence
  SiRNA target sequence
ttctaatatactaatgtcaaaa

SEQ ID NO: 25354 - DNA, 22 bp, Artificial sequence
  SiRNA target sequence
tctaatatactaatgtcaaaag

SEQ ID NO: 25355 - DNA, 22 bp, Artificial sequence
  SiRNA target sequence
ctaatatactaatgtcaaaagt

SEQ ID NO: 25356 - DNA, 22 bp, Artificial sequence
  SiRNA target sequence
taatatactaatgtcaaaagtt

SEQ ID NO: 25357 - DNA, 22 bp, Artificial sequence
  SiRNA target sequence
aatatactaatgtcaaaagttc

SEQ ID NO: 25358 - DNA, 22 bp, Artificial sequence
  SiRNA target sequence
atatactaatgtcaaaagttcc

SEQ ID NO: 25359 - DNA, 22 bp, Artificial sequence
  SiRNA target sequence
tatactaatgtcaaaagttcct

SEQ ID NO: 25360 - DNA, 22 bp, Artificial sequence
  SiRNA target sequence
atactaatgtcaaaagttcctc

SEQ ID NO: 25361 - DNA, 22 bp, Artificial sequence
  SiRNA target sequence
tactaatgtcaaaagttcctcc

SEQ ID NO: 25362 - DNA, 22 bp, Artificial sequence
  SiRNA target sequence
actaatgtcaaaagttcctcct

SEQ ID NO: 25363 - DNA, 22 bp, Artificial sequence
  SiRNA target sequence
ctaatgtcaaaagttcctcctc

SEQ ID NO: 25364 - DNA, 22 bp, Artificial sequence
  SiRNA target sequence
taatgtcaaaagttcctcctcc

SEQ ID NO: 25365 - DNA, 22 bp, Artificial sequence
  SiRNA target sequence
aatgtcaaaagttcctcctccc

SEQ ID NO: 25366 - DNA, 22 bp, Artificial sequence
  SiRNA target sequence
atgtcaaaagttcctcctccca

SEQ ID NO: 25367 - DNA, 22 bp, Artificial sequence
  SiRNA target sequence
tgtcaaaagttcctcctcccag

SEQ ID NO: 25368 - DNA, 22 bp, Artificial sequence
  SiRNA target sequence
gtcaaaagttcctcctcccaga

SEQ ID NO: 25369 - DNA, 22 bp, Artificial sequence
  SiRNA target sequence
tcaaaagttcctcctcccagat

SEQ ID NO: 25370 - DNA, 22 bp, Artificial sequence
  SiRNA target sequence
caaaagttcctcctcccagatc

SEQ ID NO: 25371 - DNA, 22 bp, Artificial sequence
  SiRNA target sequence
aaaagttcctcctcccagatca

SEQ ID NO: 25372 - DNA, 22 bp, Artificial sequence
  SiRNA target sequence
aaagttcctcctcccagatcat

SEQ ID NO: 25373 - DNA, 22 bp, Artificial sequence
  SiRNA target sequence
aagttcctcctcccagatcata

SEQ ID NO: 25374 - DNA, 22 bp, Artificial sequence
  SiRNA target sequence
agttcctcctcccagatcataa

SEQ ID NO: 25375 - DNA, 22 bp, Artificial sequence
  SiRNA target sequence
gttcctcctcccagatcataaa

SEQ ID NO: 25376 - DNA, 22 bp, Artificial sequence
  SiRNA target sequence
ttcctcctcccagatcataaac

SEQ ID NO: 25377 - DNA, 22 bp, Artificial sequence
  SiRNA target sequence
tcctcctcccagatcataaaca

SEQ ID NO: 25378 - DNA, 22 bp, Artificial sequence
  SiRNA target sequence
cctcctcccagatcataaacag

SEQ ID NO: 25379 - DNA, 22 bp, Artificial sequence
  SiRNA target sequence
ctcctcccagatcataaacagc

SEQ ID NO: 25380 - DNA, 22 bp, Artificial sequence
  SiRNA target sequence
tcctcccagatcataaacagct

SEQ ID NO: 25381 - DNA, 22 bp, Artificial sequence
  SiRNA target sequence
cctcccagatcataaacagcta

SEQ ID NO: 25382 - DNA, 22 bp, Artificial sequence
  SiRNA target sequence
ctcccagatcataaacagctat

SEQ ID NO: 25383 - DNA, 22 bp, Artificial sequence
  SiRNA target sequence
tcccagatcataaacagctata

SEQ ID NO: 25384 - DNA, 22 bp, Artificial sequence
  SiRNA target sequence
cccagatcataaacagctataa

SEQ ID NO: 25385 - DNA, 22 bp, Artificial sequence
  SiRNA target sequence
ccagatcataaacagctataat

SEQ ID NO: 25386 - DNA, 22 bp, Artificial sequence
  SiRNA target sequence
cagatcataaacagctataata

SEQ ID NO: 25387 - DNA, 22 bp, Artificial sequence
  SiRNA target sequence
agatcataaacagctataatac

SEQ ID NO: 25388 - DNA, 22 bp, Artificial sequence
  SiRNA target sequence
gatcataaacagctataatacc

SEQ ID NO: 25389 - DNA, 22 bp, Artificial sequence
  SiRNA target sequence
atcataaacagctataataccc

SEQ ID NO: 25390 - DNA, 22 bp, Artificial sequence
  SiRNA target sequence
tcataaacagctataataccct

SEQ ID NO: 25391 - DNA, 22 bp, Artificial sequence
  SiRNA target sequence
cataaacagctataataccctg

SEQ ID NO: 25392 - DNA, 22 bp, Artificial sequence
  SiRNA target sequence
ataaacagctataataccctgt

SEQ ID NO: 25393 - DNA, 22 bp, Artificial sequence
  SiRNA target sequence
taaacagctataataccctgtg

SEQ ID NO: 25394 - DNA, 22 bp, Artificial sequence
  SiRNA target sequence
aaacagctataataccctgtgc

SEQ ID NO: 25395 - DNA, 22 bp, Artificial sequence
  SiRNA target sequence
aacagctataataccctgtgca

SEQ ID NO: 25396 - DNA, 22 bp, Artificial sequence
  SiRNA target sequence
acagctataataccctgtgcag

SEQ ID NO: 25397 - DNA, 22 bp, Artificial sequence
  SiRNA target sequence
cagctataataccctgtgcaga

SEQ ID NO: 25398 - DNA, 22 bp, Artificial sequence
  SiRNA target sequence
agctataataccctgtgcagac

SEQ ID NO: 25399 - DNA, 22 bp, Artificial sequence
  SiRNA target sequence
gctataataccctgtgcagact

SEQ ID NO: 25400 - DNA, 22 bp, Artificial sequence
  SiRNA target sequence
ctataataccctgtgcagactt

SEQ ID NO: 25401 - DNA, 22 bp, Artificial sequence
  SiRNA target sequence
tataataccctgtgcagacttg

SEQ ID NO: 25402 - DNA, 22 bp, Artificial sequence
  SiRNA target sequence
ataataccctgtgcagacttgt

SEQ ID NO: 25403 - DNA, 22 bp, Artificial sequence
  SiRNA target sequence
taataccctgtgcagacttgtc

SEQ ID NO: 25404 - DNA, 22 bp, Artificial sequence
  SiRNA target sequence
aataccctgtgcagacttgtca

SEQ ID NO: 25405 - DNA, 22 bp, Artificial sequence
  SiRNA target sequence
ataccctgtgcagacttgtcaa

SEQ ID NO: 25406 - DNA, 22 bp, Artificial sequence
  SiRNA target sequence
taccctgtgcagacttgtcaag

SEQ ID NO: 25407 - DNA, 22 bp, Artificial sequence
  SiRNA target sequence
accctgtgcagacttgtcaagc

SEQ ID NO: 25408 - DNA, 22 bp, Artificial sequence
  SiRNA target sequence
ccctgtgcagacttgtcaagcc

SEQ ID NO: 25409 - DNA, 22 bp, Artificial sequence
  SiRNA target sequence
cctgtgcagacttgtcaagccc

SEQ ID NO: 25410 - DNA, 22 bp, Artificial sequence
  SiRNA target sequence
ctgtgcagacttgtcaagccca

SEQ ID NO: 25411 - DNA, 22 bp, Artificial sequence
  SiRNA target sequence
tgtgcagacttgtcaagcccat

SEQ ID NO: 25412 - DNA, 22 bp, Artificial sequence
  SiRNA target sequence
gtgcagacttgtcaagcccata

SEQ ID NO: 25413 - DNA, 22 bp, Artificial sequence
  SiRNA target sequence
tgcagacttgtcaagcccataa

SEQ ID NO: 25414 - DNA, 22 bp, Artificial sequence
  SiRNA target sequence
gcagacttgtcaagcccataag

SEQ ID NO: 25415 - DNA, 22 bp, Artificial sequence
  SiRNA target sequence
cagacttgtcaagcccataagc

SEQ ID NO: 25416 - DNA, 22 bp, Artificial sequence
  SiRNA target sequence
agacttgtcaagcccataagca

SEQ ID NO: 25417 - DNA, 22 bp, Artificial sequence
  SiRNA target sequence
gacttgtcaagcccataagcaa

SEQ ID NO: 25418 - DNA, 22 bp, Artificial sequence
  SiRNA target sequence
acttgtcaagcccataagcaag

SEQ ID NO: 25419 - DNA, 22 bp, Artificial sequence
  SiRNA target sequence
cttgtcaagcccataagcaagt

SEQ ID NO: 25420 - DNA, 22 bp, Artificial sequence
  SiRNA target sequence
ttgtcaagcccataagcaagtg

SEQ ID NO: 25421 - DNA, 22 bp, Artificial sequence
  SiRNA target sequence
tgtcaagcccataagcaagtgc

SEQ ID NO: 25422 - DNA, 22 bp, Artificial sequence
  SiRNA target sequence
gtcaagcccataagcaagtgct

SEQ ID NO: 25423 - DNA, 22 bp, Artificial sequence
  SiRNA target sequence
tcaagcccataagcaagtgctg

SEQ ID NO: 25424 - DNA, 22 bp, Artificial sequence
  SiRNA target sequence
caagcccataagcaagtgctgc

SEQ ID NO: 25425 - DNA, 22 bp, Artificial sequence
  SiRNA target sequence
aagcccataagcaagtgctgcc

SEQ ID NO: 25426 - DNA, 22 bp, Artificial sequence
  SiRNA target sequence
agcccataagcaagtgctgccg

SEQ ID NO: 25427 - DNA, 22 bp, Artificial sequence
  SiRNA target sequence
gcccataagcaagtgctgccgc

SEQ ID NO: 25428 - DNA, 22 bp, Artificial sequence
  SiRNA target sequence
cccataagcaagtgctgccgca

SEQ ID NO: 25429 - DNA, 22 bp, Artificial sequence
  SiRNA target sequence
ccataagcaagtgctgccgcag

SEQ ID NO: 25430 - DNA, 22 bp, Artificial sequence
  SiRNA target sequence
cataagcaagtgctgccgcagt

SEQ ID NO: 25431 - DNA, 22 bp, Artificial sequence
  SiRNA target sequence
ataagcaagtgctgccgcagta

SEQ ID NO: 25432 - DNA, 22 bp, Artificial sequence
  SiRNA target sequence
taagcaagtgctgccgcagtag

SEQ ID NO: 25433 - DNA, 22 bp, Artificial sequence
  SiRNA target sequence
aagcaagtgctgccgcagtagg

SEQ ID NO: 25434 - DNA, 22 bp, Artificial sequence
  SiRNA target sequence
agcaagtgctgccgcagtaggc

SEQ ID NO: 25435 - DNA, 22 bp, Artificial sequence
  SiRNA target sequence
gcaagtgctgccgcagtaggct

SEQ ID NO: 25436 - DNA, 22 bp, Artificial sequence
  SiRNA target sequence
caagtgctgccgcagtaggctc

SEQ ID NO: 25437 - DNA, 22 bp, Artificial sequence
  SiRNA target sequence
aagtgctgccgcagtaggctca

SEQ ID NO: 25438 - DNA, 22 bp, Artificial sequence
  SiRNA target sequence
agtgctgccgcagtaggctcat

SEQ ID NO: 25439 - DNA, 22 bp, Artificial sequence
  SiRNA target sequence
gtgctgccgcagtaggctcatt

SEQ ID NO: 25440 - DNA, 22 bp, Artificial sequence
  SiRNA target sequence
tgctgccgcagtaggctcatta

SEQ ID NO: 25441 - DNA, 22 bp, Artificial sequence
  SiRNA target sequence
gctgccgcagtaggctcattaa

SEQ ID NO: 25442 - DNA, 22 bp, Artificial sequence
  SiRNA target sequence
ctgccgcagtaggctcattaat

SEQ ID NO: 25443 - DNA, 22 bp, Artificial sequence
  SiRNA target sequence
tgccgcagtaggctcattaatc

SEQ ID NO: 25444 - DNA, 22 bp, Artificial sequence
  SiRNA target sequence
gccgcagtaggctcattaatca

SEQ ID NO: 25445 - DNA, 22 bp, Artificial sequence
  SiRNA target sequence
ccgcagtaggctcattaatcac

SEQ ID NO: 25446 - DNA, 22 bp, Artificial sequence
  SiRNA target sequence
cgcagtaggctcattaatcact

SEQ ID NO: 25447 - DNA, 22 bp, Artificial sequence
  SiRNA target sequence
gcagtaggctcattaatcactc

SEQ ID NO: 25448 - DNA, 22 bp, Artificial sequence
  SiRNA target sequence
cagtaggctcattaatcactct

SEQ ID NO: 25449 - DNA, 22 bp, Artificial sequence
  SiRNA target sequence
agtaggctcattaatcactcta

SEQ ID NO: 25450 - DNA, 22 bp, Artificial sequence
  SiRNA target sequence
gtaggctcattaatcactctaa

SEQ ID NO: 25451 - DNA, 22 bp, Artificial sequence
  SiRNA target sequence
taggctcattaatcactctaag

SEQ ID NO: 25452 - DNA, 22 bp, Artificial sequence
  SiRNA target sequence
aggctcattaatcactctaagc

SEQ ID NO: 25453 - DNA, 22 bp, Artificial sequence
  SiRNA target sequence
ggctcattaatcactctaagca

SEQ ID NO: 25454 - DNA, 22 bp, Artificial sequence
  SiRNA target sequence
gctcattaatcactctaagcac

SEQ ID NO: 25455 - DNA, 22 bp, Artificial sequence
  SiRNA target sequence
ctcattaatcactctaagcact

SEQ ID NO: 25456 - DNA, 22 bp, Artificial sequence
  SiRNA target sequence
tcattaatcactctaagcactt

SEQ ID NO: 25457 - DNA, 22 bp, Artificial sequence
  SiRNA target sequence
cattaatcactctaagcacttg

SEQ ID NO: 25458 - DNA, 22 bp, Artificial sequence
  SiRNA target sequence
attaatcactctaagcacttgt

SEQ ID NO: 25459 - DNA, 22 bp, Artificial sequence
  SiRNA target sequence
ttaatcactctaagcacttgta

SEQ ID NO: 25460 - DNA, 22 bp, Artificial sequence
  SiRNA target sequence
taatcactctaagcacttgtaa

SEQ ID NO: 25461 - DNA, 22 bp, Artificial sequence
  SiRNA target sequence
aatcactctaagcacttgtaat

SEQ ID NO: 25462 - DNA, 22 bp, Artificial sequence
  SiRNA target sequence
atcactctaagcacttgtaatc

SEQ ID NO: 25463 - DNA, 22 bp, Artificial sequence
  SiRNA target sequence
tcactctaagcacttgtaatcc

SEQ ID NO: 25464 - DNA, 22 bp, Artificial sequence
  SiRNA target sequence
cactctaagcacttgtaatccc

SEQ ID NO: 25465 - DNA, 22 bp, Artificial sequence
  SiRNA target sequence
actctaagcacttgtaatcccg

SEQ ID NO: 25466 - DNA, 22 bp, Artificial sequence
  SiRNA target sequence
ctctaagcacttgtaatcccgc

SEQ ID NO: 25467 - DNA, 22 bp, Artificial sequence
  SiRNA target sequence
tctaagcacttgtaatcccgca

SEQ ID NO: 25468 - DNA, 22 bp, Artificial sequence
  SiRNA target sequence
ctaagcacttgtaatcccgcaa

SEQ ID NO: 25469 - DNA, 22 bp, Artificial sequence
  SiRNA target sequence
taagcacttgtaatcccgcaat

SEQ ID NO: 25470 - DNA, 22 bp, Artificial sequence
  SiRNA target sequence
aagcacttgtaatcccgcaatc

SEQ ID NO: 25471 - DNA, 22 bp, Artificial sequence
  SiRNA target sequence
agcacttgtaatcccgcaatcc

SEQ ID NO: 25472 - DNA, 22 bp, Artificial sequence
  SiRNA target sequence
gcacttgtaatcccgcaatcct

SEQ ID NO: 25473 - DNA, 22 bp, Artificial sequence
  SiRNA target sequence
cacttgtaatcccgcaatcctt

SEQ ID NO: 25474 - DNA, 22 bp, Artificial sequence
  SiRNA target sequence
acttgtaatcccgcaatccttc

SEQ ID NO: 25475 - DNA, 22 bp, Artificial sequence
  SiRNA target sequence
cttgtaatcccgcaatccttcc

SEQ ID NO: 25476 - DNA, 22 bp, Artificial sequence
  SiRNA target sequence
ttgtaatcccgcaatccttccc

SEQ ID NO: 25477 - DNA, 22 bp, Artificial sequence
  SiRNA target sequence
tgtaatcccgcaatccttcccg

SEQ ID NO: 25478 - DNA, 22 bp, Artificial sequence
  SiRNA target sequence
gtaatcccgcaatccttcccgc

SEQ ID NO: 25479 - DNA, 22 bp, Artificial sequence
  SiRNA target sequence
taatcccgcaatccttcccgca

SEQ ID NO: 25480 - DNA, 22 bp, Artificial sequence
  SiRNA target sequence
aatcccgcaatccttcccgcat

SEQ ID NO: 25481 - DNA, 22 bp, Artificial sequence
  SiRNA target sequence
atcccgcaatccttcccgcatc

SEQ ID NO: 25482 - DNA, 22 bp, Artificial sequence
  SiRNA target sequence
tcccgcaatccttcccgcatct

SEQ ID NO: 25483 - DNA, 22 bp, Artificial sequence
  SiRNA target sequence
cccgcaatccttcccgcatctt

SEQ ID NO: 25484 - DNA, 22 bp, Artificial sequence
  SiRNA target sequence
ccgcaatccttcccgcatcttt

SEQ ID NO: 25485 - DNA, 22 bp, Artificial sequence
  SiRNA target sequence
cgcaatccttcccgcatcttta

SEQ ID NO: 25486 - DNA, 22 bp, Artificial sequence
  SiRNA target sequence
gcaatccttcccgcatctttag

SEQ ID NO: 25487 - DNA, 22 bp, Artificial sequence
  SiRNA target sequence
caatccttcccgcatctttagt

SEQ ID NO: 25488 - DNA, 22 bp, Artificial sequence
  SiRNA target sequence
aatccttcccgcatctttagta

SEQ ID NO: 25489 - DNA, 22 bp, Artificial sequence
  SiRNA target sequence
atccttcccgcatctttagtag

SEQ ID NO: 25490 - DNA, 22 bp, Artificial sequence
  SiRNA target sequence
tccttcccgcatctttagtagc

SEQ ID NO: 25491 - DNA, 22 bp, Artificial sequence
  SiRNA target sequence
ccttcccgcatctttagtagct

SEQ ID NO: 25492 - DNA, 22 bp, Artificial sequence
  SiRNA target sequence
cttcccgcatctttagtagctt

SEQ ID NO: 25493 - DNA, 22 bp, Artificial sequence
  SiRNA target sequence
ttcccgcatctttagtagcttg

SEQ ID NO: 25494 - DNA, 22 bp, Artificial sequence
  SiRNA target sequence
tcccgcatctttagtagcttgc

SEQ ID NO: 25495 - DNA, 22 bp, Artificial sequence
  SiRNA target sequence
cccgcatctttagtagcttgcc

SEQ ID NO: 25496 - DNA, 22 bp, Artificial sequence
  SiRNA target sequence
ccgcatctttagtagcttgcct

SEQ ID NO: 25497 - DNA, 22 bp, Artificial sequence
  SiRNA target sequence
cgcatctttagtagcttgcctt

SEQ ID NO: 25498 - DNA, 22 bp, Artificial sequence
  SiRNA target sequence
gcatctttagtagcttgccttt

SEQ ID NO: 25499 - DNA, 22 bp, Artificial sequence
  SiRNA target sequence
catctttagtagcttgcctttg

SEQ ID NO: 25500 - DNA, 22 bp, Artificial sequence
  SiRNA target sequence
atctttagtagcttgcctttgc

SEQ ID NO: 25501 - DNA, 22 bp, Artificial sequence
  SiRNA target sequence
tctttagtagcttgcctttgca

SEQ ID NO: 25502 - DNA, 22 bp, Artificial sequence
  SiRNA target sequence
ctttagtagcttgcctttgcat

SEQ ID NO: 25503 - DNA, 22 bp, Artificial sequence
  SiRNA target sequence
tttagtagcttgcctttgcatg

SEQ ID NO: 25504 - DNA, 22 bp, Artificial sequence
  SiRNA target sequence
ttagtagcttgcctttgcatgt

SEQ ID NO: 25505 - DNA, 22 bp, Artificial sequence
  SiRNA target sequence
tagtagcttgcctttgcatgtc

SEQ ID NO: 25506 - DNA, 22 bp, Artificial sequence
  SiRNA target sequence
agtagcttgcctttgcatgtca

SEQ ID NO: 25507 - DNA, 22 bp, Artificial sequence
  SiRNA target sequence
gtagcttgcctttgcatgtcat

SEQ ID NO: 25508 - DNA, 22 bp, Artificial sequence
  SiRNA target sequence
tagcttgcctttgcatgtcatc

SEQ ID NO: 25509 - DNA, 22 bp, Artificial sequence
  SiRNA target sequence
agcttgcctttgcatgtcatca

SEQ ID NO: 25510 - DNA, 22 bp, Artificial sequence
  SiRNA target sequence
gcttgcctttgcatgtcatcaa

SEQ ID NO: 25511 - DNA, 22 bp, Artificial sequence
  SiRNA target sequence
cttgcctttgcatgtcatcaaa

SEQ ID NO: 25512 - DNA, 22 bp, Artificial sequence
  SiRNA target sequence
ttgcctttgcatgtcatcaaaa

SEQ ID NO: 25513 - DNA, 22 bp, Artificial sequence
  SiRNA target sequence
tgcctttgcatgtcatcaaaat

SEQ ID NO: 25514 - DNA, 22 bp, Artificial sequence
  SiRNA target sequence
gcctttgcatgtcatcaaaata

SEQ ID NO: 25515 - DNA, 22 bp, Artificial sequence
  SiRNA target sequence
cctttgcatgtcatcaaaatat

SEQ ID NO: 25516 - DNA, 22 bp, Artificial sequence
  SiRNA target sequence
ctttgcatgtcatcaaaatatg

SEQ ID NO: 25517 - DNA, 22 bp, Artificial sequence
  SiRNA target sequence
tttgcatgtcatcaaaatatgc

SEQ ID NO: 25518 - DNA, 22 bp, Artificial sequence
  SiRNA target sequence
ttgcatgtcatcaaaatatgcg

SEQ ID NO: 25519 - DNA, 22 bp, Artificial sequence
  SiRNA target sequence
tgcatgtcatcaaaatatgcgg

SEQ ID NO: 25520 - DNA, 22 bp, Artificial sequence
  SiRNA target sequence
gcatgtcatcaaaatatgcggg

SEQ ID NO: 25521 - DNA, 22 bp, Artificial sequence
  SiRNA target sequence
catgtcatcaaaatatgcgggc

SEQ ID NO: 25522 - DNA, 22 bp, Artificial sequence
  SiRNA target sequence
atgtcatcaaaatatgcgggca

SEQ ID NO: 25523 - DNA, 22 bp, Artificial sequence
  SiRNA target sequence
tgtcatcaaaatatgcgggcac

SEQ ID NO: 25524 - DNA, 22 bp, Artificial sequence
  SiRNA target sequence
gtcatcaaaatatgcgggcact

SEQ ID NO: 25525 - DNA, 22 bp, Artificial sequence
  SiRNA target sequence
tcatcaaaatatgcgggcactg

SEQ ID NO: 25526 - DNA, 22 bp, Artificial sequence
  SiRNA target sequence
catcaaaatatgcgggcactgt

SEQ ID NO: 25527 - DNA, 22 bp, Artificial sequence
  SiRNA target sequence
atcaaaatatgcgggcactgtt

SEQ ID NO: 25528 - DNA, 22 bp, Artificial sequence
  SiRNA target sequence
tcaaaatatgcgggcactgtta

SEQ ID NO: 25529 - DNA, 22 bp, Artificial sequence
  SiRNA target sequence
caaaatatgcgggcactgttat

SEQ ID NO: 25530 - DNA, 22 bp, Artificial sequence
  SiRNA target sequence
aaaatatgcgggcactgttata

SEQ ID NO: 25531 - DNA, 22 bp, Artificial sequence
  SiRNA target sequence
aaatatgcgggcactgttataa

SEQ ID NO: 25532 - DNA, 22 bp, Artificial sequence
  SiRNA target sequence
aatatgcgggcactgttataac

SEQ ID NO: 25533 - DNA, 22 bp, Artificial sequence
  SiRNA target sequence
atatgcgggcactgttataaca

SEQ ID NO: 25534 - DNA, 22 bp, Artificial sequence
  SiRNA target sequence
tatgcgggcactgttataacag

SEQ ID NO: 25535 - DNA, 22 bp, Artificial sequence
  SiRNA target sequence
atgcgggcactgttataacaga

SEQ ID NO: 25536 - DNA, 22 bp, Artificial sequence
  SiRNA target sequence
tgcgggcactgttataacagat

SEQ ID NO: 25537 - DNA, 22 bp, Artificial sequence
  SiRNA target sequence
gcgggcactgttataacagatc

SEQ ID NO: 25538 - DNA, 22 bp, Artificial sequence
  SiRNA target sequence
cgggcactgttataacagatct

SEQ ID NO: 25539 - DNA, 22 bp, Artificial sequence
  SiRNA target sequence
gggcactgttataacagatctt

SEQ ID NO: 25540 - DNA, 22 bp, Artificial sequence
  SiRNA target sequence
ggcactgttataacagatctta

SEQ ID NO: 25541 - DNA, 22 bp, Artificial sequence
  SiRNA target sequence
gcactgttataacagatcttaa

SEQ ID NO: 25542 - DNA, 22 bp, Artificial sequence
  SiRNA target sequence
cactgttataacagatcttaat

SEQ ID NO: 25543 - DNA, 22 bp, Artificial sequence
  SiRNA target sequence
actgttataacagatcttaata

SEQ ID NO: 25544 - DNA, 22 bp, Artificial sequence
  SiRNA target sequence
ctgttataacagatcttaatac

SEQ ID NO: 25545 - DNA, 22 bp, Artificial sequence
  SiRNA target sequence
tgttataacagatcttaatact

SEQ ID NO: 25546 - DNA, 22 bp, Artificial sequence
  SiRNA target sequence
gttataacagatcttaatactt

SEQ ID NO: 25547 - DNA, 22 bp, Artificial sequence
  SiRNA target sequence
ttataacagatcttaatacttt

SEQ ID NO: 25548 - DNA, 22 bp, Artificial sequence
  SiRNA target sequence
tataacagatcttaatacttta

SEQ ID NO: 25549 - DNA, 22 bp, Artificial sequence
  SiRNA target sequence
ataacagatcttaatactttag

SEQ ID NO: 25550 - DNA, 22 bp, Artificial sequence
  SiRNA target sequence
taacagatcttaatactttaga

SEQ ID NO: 25551 - DNA, 22 bp, Artificial sequence
  SiRNA target sequence
aacagatcttaatactttagaa

SEQ ID NO: 25552 - DNA, 22 bp, Artificial sequence
  SiRNA target sequence
acagatcttaatactttagaat

SEQ ID NO: 25553 - DNA, 22 bp, Artificial sequence
  SiRNA target sequence
cagatcttaatactttagaatt

SEQ ID NO: 25554 - DNA, 22 bp, Artificial sequence
  SiRNA target sequence
agatcttaatactttagaattt

SEQ ID NO: 25555 - DNA, 22 bp, Artificial sequence
  SiRNA target sequence
gatcttaatactttagaattta

SEQ ID NO: 25556 - DNA, 22 bp, Artificial sequence
  SiRNA target sequence
atcttaatactttagaatttaa

SEQ ID NO: 25557 - DNA, 22 bp, Artificial sequence
  SiRNA target sequence
tcttaatactttagaatttaaa

SEQ ID NO: 25558 - DNA, 22 bp, Artificial sequence
  SiRNA target sequence
cttaatactttagaatttaaaa

SEQ ID NO: 25559 - DNA, 22 bp, Artificial sequence
  SiRNA target sequence
ttaatactttagaatttaaaaa

SEQ ID NO: 25560 - DNA, 22 bp, Artificial sequence
  SiRNA target sequence
taatactttagaatttaaaaaa

SEQ ID NO: 25561 - DNA, 22 bp, Artificial sequence
  SiRNA target sequence
aatactttagaatttaaaaaat

SEQ ID NO: 25562 - DNA, 22 bp, Artificial sequence
  SiRNA target sequence
atactttagaatttaaaaaatt

SEQ ID NO: 25563 - DNA, 22 bp, Artificial sequence
  SiRNA target sequence
tactttagaatttaaaaaattc

SEQ ID NO: 25564 - DNA, 22 bp, Artificial sequence
  SiRNA target sequence
actttagaatttaaaaaattct

SEQ ID NO: 25565 - DNA, 22 bp, Artificial sequence
  SiRNA target sequence
ctttagaatttaaaaaattctc

SEQ ID NO: 25566 - DNA, 22 bp, Artificial sequence
  SiRNA target sequence
tttagaatttaaaaaattctct

SEQ ID NO: 25567 - DNA, 22 bp, Artificial sequence
  SiRNA target sequence
ttagaatttaaaaaattctctg

SEQ ID NO: 25568 - DNA, 22 bp, Artificial sequence
  SiRNA target sequence
tagaatttaaaaaattctctgc

SEQ ID NO: 25569 - DNA, 22 bp, Artificial sequence
  SiRNA target sequence
agaatttaaaaaattctctgcg

SEQ ID NO: 25570 - DNA, 22 bp, Artificial sequence
  SiRNA target sequence
gaatttaaaaaattctctgcgg

SEQ ID NO: 25571 - DNA, 22 bp, Artificial sequence
  SiRNA target sequence
aatttaaaaaattctctgcggc

SEQ ID NO: 25572 - DNA, 22 bp, Artificial sequence
  SiRNA target sequence
atttaaaaaattctctgcggca

SEQ ID NO: 25573 - DNA, 22 bp, Artificial sequence
  SiRNA target sequence
tttaaaaaattctctgcggcat

SEQ ID NO: 25574 - DNA, 22 bp, Artificial sequence
  SiRNA target sequence
ttaaaaaattctctgcggcatt

SEQ ID NO: 25575 - DNA, 22 bp, Artificial sequence
  SiRNA target sequence
taaaaaattctctgcggcattt

SEQ ID NO: 25576 - DNA, 22 bp, Artificial sequence
  SiRNA target sequence
aaaaaattctctgcggcatttt

SEQ ID NO: 25577 - DNA, 22 bp, Artificial sequence
  SiRNA target sequence
aaaaattctctgcggcattttt

SEQ ID NO: 25578 - DNA, 22 bp, Artificial sequence
  SiRNA target sequence
aaaattctctgcggcatttttc

SEQ ID NO: 25579 - DNA, 22 bp, Artificial sequence
  SiRNA target sequence
aaattctctgcggcatttttca

SEQ ID NO: 25580 - DNA, 22 bp, Artificial sequence
  SiRNA target sequence
aattctctgcggcatttttcat

SEQ ID NO: 25581 - DNA, 22 bp, Artificial sequence
  SiRNA target sequence
attctctgcggcatttttcatt

SEQ ID NO: 25582 - DNA, 22 bp, Artificial sequence
  SiRNA target sequence
ttctctgcggcatttttcattt

SEQ ID NO: 25583 - DNA, 22 bp, Artificial sequence
  SiRNA target sequence
tctctgcggcatttttcatttt

SEQ ID NO: 25584 - DNA, 22 bp, Artificial sequence
  SiRNA target sequence
ctctgcggcatttttcattttt

SEQ ID NO: 25585 - DNA, 22 bp, Artificial sequence
  SiRNA target sequence
tctgcggcatttttcatttttg

SEQ ID NO: 25586 - DNA, 22 bp, Artificial sequence
  SiRNA target sequence
ctgcggcatttttcatttttga

SEQ ID NO: 25587 - DNA, 22 bp, Artificial sequence
  SiRNA target sequence
tgcggcatttttcatttttgac

SEQ ID NO: 25588 - DNA, 22 bp, Artificial sequence
  SiRNA target sequence
gcggcatttttcatttttgaca

SEQ ID NO: 25589 - DNA, 22 bp, Artificial sequence
  SiRNA target sequence
cggcatttttcatttttgacaa

SEQ ID NO: 25590 - DNA, 22 bp, Artificial sequence
  SiRNA target sequence
ggcatttttcatttttgacaaa

SEQ ID NO: 25591 - DNA, 22 bp, Artificial sequence
  SiRNA target sequence
gcatttttcatttttgacaaaa

SEQ ID NO: 25592 - DNA, 22 bp, Artificial sequence
  SiRNA target sequence
catttttcatttttgacaaaat

SEQ ID NO: 25593 - DNA, 22 bp, Artificial sequence
  SiRNA target sequence
atttttcatttttgacaaaata

SEQ ID NO: 25594 - DNA, 22 bp, Artificial sequence
  SiRNA target sequence
tttttcatttttgacaaaataa

SEQ ID NO: 25595 - DNA, 22 bp, Artificial sequence
  SiRNA target sequence
ttttcatttttgacaaaataaa

SEQ ID NO: 25596 - DNA, 22 bp, Artificial sequence
  SiRNA target sequence
tttcatttttgacaaaataaat

SEQ ID NO: 25597 - DNA, 22 bp, Artificial sequence
  SiRNA target sequence
ttcatttttgacaaaataaatg

SEQ ID NO: 25598 - DNA, 22 bp, Artificial sequence
  SiRNA target sequence
tcatttttgacaaaataaatgc

SEQ ID NO: 25599 - DNA, 22 bp, Artificial sequence
  SiRNA target sequence
catttttgacaaaataaatgca

SEQ ID NO: 25600 - DNA, 22 bp, Artificial sequence
  SiRNA target sequence
atttttgacaaaataaatgcac

SEQ ID NO: 25601 - DNA, 22 bp, Artificial sequence
  SiRNA target sequence
tttttgacaaaataaatgcacc

SEQ ID NO: 25602 - DNA, 22 bp, Artificial sequence
  SiRNA target sequence
ttttgacaaaataaatgcacca

SEQ ID NO: 25603 - DNA, 22 bp, Artificial sequence
  SiRNA target sequence
tttgacaaaataaatgcaccaa

SEQ ID NO: 25604 - DNA, 22 bp, Artificial sequence
  SiRNA target sequence
ttgacaaaataaatgcaccaat

SEQ ID NO: 25605 - DNA, 22 bp, Artificial sequence
  SiRNA target sequence
tgacaaaataaatgcaccaatt

SEQ ID NO: 25606 - DNA, 22 bp, Artificial sequence
  SiRNA target sequence
gacaaaataaatgcaccaattt

SEQ ID NO: 25607 - DNA, 22 bp, Artificial sequence
  SiRNA target sequence
acaaaataaatgcaccaatttg

SEQ ID NO: 25608 - DNA, 22 bp, Artificial sequence
  SiRNA target sequence
caaaataaatgcaccaatttgt

SEQ ID NO: 25609 - DNA, 22 bp, Artificial sequence
  SiRNA target sequence
aaaataaatgcaccaatttgtg

SEQ ID NO: 25610 - DNA, 22 bp, Artificial sequence
  SiRNA target sequence
aaataaatgcaccaatttgtgc

SEQ ID NO: 25611 - DNA, 22 bp, Artificial sequence
  SiRNA target sequence
aataaatgcaccaatttgtgca

SEQ ID NO: 25612 - DNA, 22 bp, Artificial sequence
  SiRNA target sequence
ataaatgcaccaatttgtgcag

SEQ ID NO: 25613 - DNA, 22 bp, Artificial sequence
  SiRNA target sequence
taaatgcaccaatttgtgcagg

SEQ ID NO: 25614 - DNA, 22 bp, Artificial sequence
  SiRNA target sequence
aaatgcaccaatttgtgcagga

SEQ ID NO: 25615 - DNA, 22 bp, Artificial sequence
  SiRNA target sequence
aatgcaccaatttgtgcaggag

SEQ ID NO: 25616 - DNA, 22 bp, Artificial sequence
  SiRNA target sequence
atgcaccaatttgtgcaggaga

SEQ ID NO: 25617 - DNA, 22 bp, Artificial sequence
  SiRNA target sequence
tgcaccaatttgtgcaggagaa

SEQ ID NO: 25618 - DNA, 22 bp, Artificial sequence
  SiRNA target sequence
gcaccaatttgtgcaggagaat

SEQ ID NO: 25619 - DNA, 22 bp, Artificial sequence
  SiRNA target sequence
caccaatttgtgcaggagaata

SEQ ID NO: 25620 - DNA, 22 bp, Artificial sequence
  SiRNA target sequence
accaatttgtgcaggagaatat

SEQ ID NO: 25621 - DNA, 22 bp, Artificial sequence
  SiRNA target sequence
ccaatttgtgcaggagaatatt

SEQ ID NO: 25622 - DNA, 22 bp, Artificial sequence
  SiRNA target sequence
caatttgtgcaggagaatattt

SEQ ID NO: 25623 - DNA, 22 bp, Artificial sequence
  SiRNA target sequence
aatttgtgcaggagaatatttc

SEQ ID NO: 25624 - DNA, 22 bp, Artificial sequence
  SiRNA target sequence
atttgtgcaggagaatatttct

SEQ ID NO: 25625 - DNA, 22 bp, Artificial sequence
  SiRNA target sequence
tttgtgcaggagaatatttctt

SEQ ID NO: 25626 - DNA, 22 bp, Artificial sequence
  SiRNA target sequence
ttgtgcaggagaatatttctta

SEQ ID NO: 25627 - DNA, 22 bp, Artificial sequence
  SiRNA target sequence
tgtgcaggagaatatttcttat

SEQ ID NO: 25628 - DNA, 22 bp, Artificial sequence
  SiRNA target sequence
gtgcaggagaatatttcttatt

SEQ ID NO: 25629 - DNA, 22 bp, Artificial sequence
  SiRNA target sequence
tgcaggagaatatttcttattg

SEQ ID NO: 25630 - DNA, 22 bp, Artificial sequence
  SiRNA target sequence
gcaggagaatatttcttattgt

SEQ ID NO: 25631 - DNA, 22 bp, Artificial sequence
  SiRNA target sequence
caggagaatatttcttattgtc

SEQ ID NO: 25632 - DNA, 22 bp, Artificial sequence
  SiRNA target sequence
aggagaatatttcttattgtca

SEQ ID NO: 25633 - DNA, 22 bp, Artificial sequence
  SiRNA target sequence
ggagaatatttcttattgtcaa

SEQ ID NO: 25634 - DNA, 22 bp, Artificial sequence
  SiRNA target sequence
gagaatatttcttattgtcaat

SEQ ID NO: 25635 - DNA, 22 bp, Artificial sequence
  SiRNA target sequence
agaatatttcttattgtcaatt

SEQ ID NO: 25636 - DNA, 22 bp, Artificial sequence
  SiRNA target sequence
gaatatttcttattgtcaattt

SEQ ID NO: 25637 - DNA, 22 bp, Artificial sequence
  SiRNA target sequence
aatatttcttattgtcaatttt

SEQ ID NO: 25638 - DNA, 22 bp, Artificial sequence
  SiRNA target sequence
atatttcttattgtcaattttt

SEQ ID NO: 25639 - DNA, 22 bp, Artificial sequence
  SiRNA target sequence
tatttcttattgtcaattttta

SEQ ID NO: 25640 - DNA, 22 bp, Artificial sequence
  SiRNA target sequence
atttcttattgtcaatttttat

SEQ ID NO: 25641 - DNA, 22 bp, Artificial sequence
  SiRNA target sequence
tttcttattgtcaatttttatc

SEQ ID NO: 25642 - DNA, 22 bp, Artificial sequence
  SiRNA target sequence
ttcttattgtcaatttttatcc

SEQ ID NO: 25643 - DNA, 22 bp, Artificial sequence
  SiRNA target sequence
tcttattgtcaatttttatcca

SEQ ID NO: 25644 - DNA, 22 bp, Artificial sequence
  SiRNA target sequence
cttattgtcaatttttatccaa

SEQ ID NO: 25645 - DNA, 22 bp, Artificial sequence
  SiRNA target sequence
ttattgtcaatttttatccaaa

SEQ ID NO: 25646 - DNA, 22 bp, Artificial sequence
  SiRNA target sequence
tattgtcaatttttatccaaat

SEQ ID NO: 25647 - DNA, 22 bp, Artificial sequence
  SiRNA target sequence
attgtcaatttttatccaaata

SEQ ID NO: 25648 - DNA, 22 bp, Artificial sequence
  SiRNA target sequence
ttgtcaatttttatccaaatat

SEQ ID NO: 25649 - DNA, 22 bp, Artificial sequence
  SiRNA target sequence
tgtcaatttttatccaaatatc

SEQ ID NO: 25650 - DNA, 22 bp, Artificial sequence
  SiRNA target sequence
gtcaatttttatccaaatatcg

SEQ ID NO: 25651 - DNA, 22 bp, Artificial sequence
  SiRNA target sequence
tcaatttttatccaaatatcgc

SEQ ID NO: 25652 - DNA, 22 bp, Artificial sequence
  SiRNA target sequence
caatttttatccaaatatcgcc

SEQ ID NO: 25653 - DNA, 22 bp, Artificial sequence
  SiRNA target sequence
aatttttatccaaatatcgccg

SEQ ID NO: 25654 - DNA, 22 bp, Artificial sequence
  SiRNA target sequence
atttttatccaaatatcgccgt

SEQ ID NO: 25655 - DNA, 22 bp, Artificial sequence
  SiRNA target sequence
tttttatccaaatatcgccgtt

SEQ ID NO: 25656 - DNA, 22 bp, Artificial sequence
  SiRNA target sequence
ttttatccaaatatcgccgtta

SEQ ID NO: 25657 - DNA, 22 bp, Artificial sequence
  SiRNA target sequence
tttatccaaatatcgccgttac

SEQ ID NO: 25658 - DNA, 22 bp, Artificial sequence
  SiRNA target sequence
ttatccaaatatcgccgttaca

SEQ ID NO: 25659 - DNA, 22 bp, Artificial sequence
  SiRNA target sequence
tatccaaatatcgccgttacaa

SEQ ID NO: 25660 - DNA, 22 bp, Artificial sequence
  SiRNA target sequence
atccaaatatcgccgttacaat

SEQ ID NO: 25661 - DNA, 22 bp, Artificial sequence
  SiRNA target sequence
tccaaatatcgccgttacaatg

SEQ ID NO: 25662 - DNA, 22 bp, Artificial sequence
  SiRNA target sequence
ccaaatatcgccgttacaatgc

SEQ ID NO: 25663 - DNA, 22 bp, Artificial sequence
  SiRNA target sequence
caaatatcgccgttacaatgct

SEQ ID NO: 25664 - DNA, 22 bp, Artificial sequence
  SiRNA target sequence
aaatatcgccgttacaatgctt

SEQ ID NO: 25665 - DNA, 22 bp, Artificial sequence
  SiRNA target sequence
aatatcgccgttacaatgctta

SEQ ID NO: 25666 - DNA, 22 bp, Artificial sequence
  SiRNA target sequence
atatcgccgttacaatgcttag

SEQ ID NO: 25667 - DNA, 22 bp, Artificial sequence
  SiRNA target sequence
tatcgccgttacaatgcttagt

SEQ ID NO: 25668 - DNA, 22 bp, Artificial sequence
  SiRNA target sequence
atcgccgttacaatgcttagta

SEQ ID NO: 25669 - DNA, 22 bp, Artificial sequence
  SiRNA target sequence
tcgccgttacaatgcttagtag

SEQ ID NO: 25670 - DNA, 22 bp, Artificial sequence
  SiRNA target sequence
cgccgttacaatgcttagtagt

SEQ ID NO: 25671 - DNA, 22 bp, Artificial sequence
  SiRNA target sequence
gccgttacaatgcttagtagtg

SEQ ID NO: 25672 - DNA, 22 bp, Artificial sequence
  SiRNA target sequence
ccgttacaatgcttagtagtgt

SEQ ID NO: 25673 - DNA, 22 bp, Artificial sequence
  SiRNA target sequence
cgttacaatgcttagtagtgtc

SEQ ID NO: 25674 - DNA, 22 bp, Artificial sequence
  SiRNA target sequence
gttacaatgcttagtagtgtca

SEQ ID NO: 25675 - DNA, 22 bp, Artificial sequence
  SiRNA target sequence
ttacaatgcttagtagtgtcat

SEQ ID NO: 25676 - DNA, 22 bp, Artificial sequence
  SiRNA target sequence
tacaatgcttagtagtgtcata

SEQ ID NO: 25677 - DNA, 22 bp, Artificial sequence
  SiRNA target sequence
acaatgcttagtagtgtcatat

SEQ ID NO: 25678 - DNA, 22 bp, Artificial sequence
  SiRNA target sequence
caatgcttagtagtgtcatatg

SEQ ID NO: 25679 - DNA, 22 bp, Artificial sequence
  SiRNA target sequence
aatgcttagtagtgtcatatgg

SEQ ID NO: 25680 - DNA, 22 bp, Artificial sequence
  SiRNA target sequence
atgcttagtagtgtcatatggt

SEQ ID NO: 25681 - DNA, 22 bp, Artificial sequence
  SiRNA target sequence
tgcttagtagtgtcatatggta

SEQ ID NO: 25682 - DNA, 22 bp, Artificial sequence
  SiRNA target sequence
gcttagtagtgtcatatggtaa

SEQ ID NO: 25683 - DNA, 22 bp, Artificial sequence
  SiRNA target sequence
cttagtagtgtcatatggtaag

SEQ ID NO: 25684 - DNA, 22 bp, Artificial sequence
  SiRNA target sequence
ttagtagtgtcatatggtaagc

SEQ ID NO: 25685 - DNA, 22 bp, Artificial sequence
  SiRNA target sequence
tagtagtgtcatatggtaagct

SEQ ID NO: 25686 - DNA, 22 bp, Artificial sequence
  SiRNA target sequence
agtagtgtcatatggtaagctt

SEQ ID NO: 25687 - DNA, 22 bp, Artificial sequence
  SiRNA target sequence
gtagtgtcatatggtaagcttt

SEQ ID NO: 25688 - DNA, 22 bp, Artificial sequence
  SiRNA target sequence
tagtgtcatatggtaagctttt

SEQ ID NO: 25689 - DNA, 22 bp, Artificial sequence
  SiRNA target sequence
agtgtcatatggtaagcttttt

SEQ ID NO: 25690 - DNA, 22 bp, Artificial sequence
  SiRNA target sequence
gtgtcatatggtaagcttttta

SEQ ID NO: 25691 - DNA, 22 bp, Artificial sequence
  SiRNA target sequence
tgtcatatggtaagctttttaa

SEQ ID NO: 25692 - DNA, 22 bp, Artificial sequence
  SiRNA target sequence
gtcatatggtaagctttttaaa

SEQ ID NO: 25693 - DNA, 22 bp, Artificial sequence
  SiRNA target sequence
tcatatggtaagctttttaaat

SEQ ID NO: 25694 - DNA, 22 bp, Artificial sequence
  SiRNA target sequence
catatggtaagctttttaaata

SEQ ID NO: 25695 - DNA, 22 bp, Artificial sequence
  SiRNA target sequence
atatggtaagctttttaaataa

SEQ ID NO: 25696 - DNA, 22 bp, Artificial sequence
  SiRNA target sequence
tatggtaagctttttaaataat

SEQ ID NO: 25697 - DNA, 22 bp, Artificial sequence
  SiRNA target sequence
atggtaagctttttaaataatc

SEQ ID NO: 25698 - DNA, 22 bp, Artificial sequence
  SiRNA target sequence
tggtaagctttttaaataatct

SEQ ID NO: 25699 - DNA, 22 bp, Artificial sequence
  SiRNA target sequence
ggtaagctttttaaataatctt

SEQ ID NO: 25700 - DNA, 22 bp, Artificial sequence
  SiRNA target sequence
gtaagctttttaaataatcttt

SEQ ID NO: 25701 - DNA, 22 bp, Artificial sequence
  SiRNA target sequence
taagctttttaaataatctttt

SEQ ID NO: 25702 - DNA, 22 bp, Artificial sequence
  SiRNA target sequence
aagctttttaaataatctttta

SEQ ID NO: 25703 - DNA, 22 bp, Artificial sequence
  SiRNA target sequence
agctttttaaataatcttttaa

SEQ ID NO: 25704 - DNA, 22 bp, Artificial sequence
  SiRNA target sequence
gctttttaaataatcttttaat

SEQ ID NO: 25705 - DNA, 22 bp, Artificial sequence
  SiRNA target sequence
ctttttaaataatcttttaatt

SEQ ID NO: 25706 - DNA, 22 bp, Artificial sequence
  SiRNA target sequence
tttttaaataatcttttaattc

SEQ ID NO: 25707 - DNA, 22 bp, Artificial sequence
  SiRNA target sequence
ttttaaataatcttttaattct

SEQ ID NO: 25708 - DNA, 22 bp, Artificial sequence
  SiRNA target sequence
tttaaataatcttttaattcta

SEQ ID NO: 25709 - DNA, 22 bp, Artificial sequence
  SiRNA target sequence
ttaaataatcttttaattctac

SEQ ID NO: 25710 - DNA, 22 bp, Artificial sequence
  SiRNA target sequence
taaataatcttttaattctaca

SEQ ID NO: 25711 - DNA, 22 bp, Artificial sequence
  SiRNA target sequence
aaataatcttttaattctacat

SEQ ID NO: 25712 - DNA, 22 bp, Artificial sequence
  SiRNA target sequence
aataatcttttaattctacatc

SEQ ID NO: 25713 - DNA, 22 bp, Artificial sequence
  SiRNA target sequence
ataatcttttaattctacatca

SEQ ID NO: 25714 - DNA, 22 bp, Artificial sequence
  SiRNA target sequence
taatcttttaattctacatcat

SEQ ID NO: 25715 - DNA, 22 bp, Artificial sequence
  SiRNA target sequence
aatcttttaattctacatcatc

SEQ ID NO: 25716 - DNA, 22 bp, Artificial sequence
  SiRNA target sequence
atcttttaattctacatcatca

SEQ ID NO: 25717 - DNA, 22 bp, Artificial sequence
  SiRNA target sequence
tcttttaattctacatcatcaa

SEQ ID NO: 25718 - DNA, 22 bp, Artificial sequence
  SiRNA target sequence
cttttaattctacatcatcaaa

SEQ ID NO: 25719 - DNA, 22 bp, Artificial sequence
  SiRNA target sequence
ttttaattctacatcatcaaat

SEQ ID NO: 25720 - DNA, 22 bp, Artificial sequence
  SiRNA target sequence
tttaattctacatcatcaaatt

SEQ ID NO: 25721 - DNA, 22 bp, Artificial sequence
  SiRNA target sequence
ttaattctacatcatcaaattt

SEQ ID NO: 25722 - DNA, 22 bp, Artificial sequence
  SiRNA target sequence
taattctacatcatcaaatttt

SEQ ID NO: 25723 - DNA, 22 bp, Artificial sequence
  SiRNA target sequence
aattctacatcatcaaattttc

SEQ ID NO: 25724 - DNA, 22 bp, Artificial sequence
  SiRNA target sequence
attctacatcatcaaattttcg

SEQ ID NO: 25725 - DNA, 22 bp, Artificial sequence
  SiRNA target sequence
ttctacatcatcaaattttcgt

SEQ ID NO: 25726 - DNA, 22 bp, Artificial sequence
  SiRNA target sequence
tctacatcatcaaattttcgtc

SEQ ID NO: 25727 - DNA, 22 bp, Artificial sequence
  SiRNA target sequence
ctacatcatcaaattttcgtcc

SEQ ID NO: 25728 - DNA, 22 bp, Artificial sequence
  SiRNA target sequence
tacatcatcaaattttcgtccc

SEQ ID NO: 25729 - DNA, 22 bp, Artificial sequence
  SiRNA target sequence
acatcatcaaattttcgtccca

SEQ ID NO: 25730 - DNA, 22 bp, Artificial sequence
  SiRNA target sequence
catcatcaaattttcgtcccag

SEQ ID NO: 25731 - DNA, 22 bp, Artificial sequence
  SiRNA target sequence
atcatcaaattttcgtcccagc

SEQ ID NO: 25732 - DNA, 22 bp, Artificial sequence
  SiRNA target sequence
tcatcaaattttcgtcccagca

SEQ ID NO: 25733 - DNA, 22 bp, Artificial sequence
  SiRNA target sequence
catcaaattttcgtcccagcaa

SEQ ID NO: 25734 - DNA, 22 bp, Artificial sequence
  SiRNA target sequence
atcaaattttcgtcccagcaat

SEQ ID NO: 25735 - DNA, 22 bp, Artificial sequence
  SiRNA target sequence
tcaaattttcgtcccagcaatc

SEQ ID NO: 25736 - DNA, 22 bp, Artificial sequence
  SiRNA target sequence
caaattttcgtcccagcaatct

SEQ ID NO: 25737 - DNA, 22 bp, Artificial sequence
  SiRNA target sequence
aaattttcgtcccagcaatctc

SEQ ID NO: 25738 - DNA, 22 bp, Artificial sequence
  SiRNA target sequence
aattttcgtcccagcaatctct

SEQ ID NO: 25739 - DNA, 22 bp, Artificial sequence
  SiRNA target sequence
attttcgtcccagcaatctctt

SEQ ID NO: 25740 - DNA, 22 bp, Artificial sequence
  SiRNA target sequence
ttttcgtcccagcaatctctta

SEQ ID NO: 25741 - DNA, 22 bp, Artificial sequence
  SiRNA target sequence
tttcgtcccagcaatctcttag

SEQ ID NO: 25742 - DNA, 22 bp, Artificial sequence
  SiRNA target sequence
ttcgtcccagcaatctcttaga

SEQ ID NO: 25743 - DNA, 22 bp, Artificial sequence
  SiRNA target sequence
tcgtcccagcaatctcttagac

SEQ ID NO: 25744 - DNA, 22 bp, Artificial sequence
  SiRNA target sequence
cgtcccagcaatctcttagacg

SEQ ID NO: 25745 - DNA, 22 bp, Artificial sequence
  SiRNA target sequence
gtcccagcaatctcttagacgc

SEQ ID NO: 25746 - DNA, 22 bp, Artificial sequence
  SiRNA target sequence
tcccagcaatctcttagacgca

SEQ ID NO: 25747 - DNA, 22 bp, Artificial sequence
  SiRNA target sequence
cccagcaatctcttagacgcaa

SEQ ID NO: 25748 - DNA, 22 bp, Artificial sequence
  SiRNA target sequence
ccagcaatctcttagacgcaaa

SEQ ID NO: 25749 - DNA, 22 bp, Artificial sequence
  SiRNA target sequence
cagcaatctcttagacgcaaaa

SEQ ID NO: 25750 - DNA, 22 bp, Artificial sequence
  SiRNA target sequence
agcaatctcttagacgcaaaaa

SEQ ID NO: 25751 - DNA, 22 bp, Artificial sequence
  SiRNA target sequence
gcaatctcttagacgcaaaaat

SEQ ID NO: 25752 - DNA, 22 bp, Artificial sequence
  SiRNA target sequence
caatctcttagacgcaaaaatc

SEQ ID NO: 25753 - DNA, 22 bp, Artificial sequence
  SiRNA target sequence
aatctcttagacgcaaaaatcg

SEQ ID NO: 25754 - DNA, 22 bp, Artificial sequence
  SiRNA target sequence
atctcttagacgcaaaaatcgt

SEQ ID NO: 25755 - DNA, 22 bp, Artificial sequence
  SiRNA target sequence
tctcttagacgcaaaaatcgta

SEQ ID NO: 25756 - DNA, 22 bp, Artificial sequence
  SiRNA target sequence
ctcttagacgcaaaaatcgtat

SEQ ID NO: 25757 - DNA, 22 bp, Artificial sequence
  SiRNA target sequence
tcttagacgcaaaaatcgtatt

SEQ ID NO: 25758 - DNA, 22 bp, Artificial sequence
  SiRNA target sequence
cttagacgcaaaaatcgtattc

SEQ ID NO: 25759 - DNA, 22 bp, Artificial sequence
  SiRNA target sequence
ttagacgcaaaaatcgtattct

SEQ ID NO: 25760 - DNA, 22 bp, Artificial sequence
  SiRNA target sequence
tagacgcaaaaatcgtattctt

SEQ ID NO: 25761 - DNA, 22 bp, Artificial sequence
  SiRNA target sequence
agacgcaaaaatcgtattcttg

SEQ ID NO: 25762 - DNA, 22 bp, Artificial sequence
  SiRNA target sequence
gacgcaaaaatcgtattcttgg

SEQ ID NO: 25763 - DNA, 22 bp, Artificial sequence
  SiRNA target sequence
acgcaaaaatcgtattcttggg

SEQ ID NO: 25764 - DNA, 22 bp, Artificial sequence
  SiRNA target sequence
cgcaaaaatcgtattcttggga

SEQ ID NO: 25765 - DNA, 22 bp, Artificial sequence
  SiRNA target sequence
gcaaaaatcgtattcttgggat

SEQ ID NO: 25766 - DNA, 22 bp, Artificial sequence
  SiRNA target sequence
caaaaatcgtattcttgggatg

SEQ ID NO: 25767 - DNA, 22 bp, Artificial sequence
  SiRNA target sequence
aaaaatcgtattcttgggatgt

SEQ ID NO: 25768 - DNA, 22 bp, Artificial sequence
  SiRNA target sequence
aaaatcgtattcttgggatgta

SEQ ID NO: 25769 - DNA, 22 bp, Artificial sequence
  SiRNA target sequence
aaatcgtattcttgggatgtaa

SEQ ID NO: 25770 - DNA, 22 bp, Artificial sequence
  SiRNA target sequence
aatcgtattcttgggatgtaat

SEQ ID NO: 25771 - DNA, 22 bp, Artificial sequence
  SiRNA target sequence
atcgtattcttgggatgtaata

SEQ ID NO: 25772 - DNA, 22 bp, Artificial sequence
  SiRNA target sequence
tcgtattcttgggatgtaataa

SEQ ID NO: 25773 - DNA, 22 bp, Artificial sequence
  SiRNA target sequence
cgtattcttgggatgtaataac

SEQ ID NO: 25774 - DNA, 22 bp, Artificial sequence
  SiRNA target sequence
gtattcttgggatgtaataaca

SEQ ID NO: 25775 - DNA, 22 bp, Artificial sequence
  SiRNA target sequence
tattcttgggatgtaataacaa

SEQ ID NO: 25776 - DNA, 22 bp, Artificial sequence
  SiRNA target sequence
attcttgggatgtaataacaag

SEQ ID NO: 25777 - DNA, 22 bp, Artificial sequence
  SiRNA target sequence
ttcttgggatgtaataacaagt

SEQ ID NO: 25778 - DNA, 22 bp, Artificial sequence
  SiRNA target sequence
tcttgggatgtaataacaagtt

SEQ ID NO: 25779 - DNA, 22 bp, Artificial sequence
  SiRNA target sequence
cttgggatgtaataacaagtta

SEQ ID NO: 25780 - DNA, 22 bp, Artificial sequence
  SiRNA target sequence
ttgggatgtaataacaagttag

SEQ ID NO: 25781 - DNA, 22 bp, Artificial sequence
  SiRNA target sequence
tgggatgtaataacaagttaga

SEQ ID NO: 25782 - DNA, 22 bp, Artificial sequence
  SiRNA target sequence
gggatgtaataacaagttagac

SEQ ID NO: 25783 - DNA, 22 bp, Artificial sequence
  SiRNA target sequence
ggatgtaataacaagttagact

SEQ ID NO: 25784 - DNA, 22 bp, Artificial sequence
  SiRNA target sequence
gatgtaataacaagttagactt

SEQ ID NO: 25785 - DNA, 22 bp, Artificial sequence
  SiRNA target sequence
atgtaataacaagttagactta

SEQ ID NO: 25786 - DNA, 22 bp, Artificial sequence
  SiRNA target sequence
tgtaataacaagttagacttag

SEQ ID NO: 25787 - DNA, 22 bp, Artificial sequence
  SiRNA target sequence
gtaataacaagttagacttagc

SEQ ID NO: 25788 - DNA, 22 bp, Artificial sequence
  SiRNA target sequence
taataacaagttagacttagct

SEQ ID NO: 25789 - DNA, 22 bp, Artificial sequence
  SiRNA target sequence
aataacaagttagacttagctt

SEQ ID NO: 25790 - DNA, 22 bp, Artificial sequence
  SiRNA target sequence
ataacaagttagacttagcttg

SEQ ID NO: 25791 - DNA, 22 bp, Artificial sequence
  SiRNA target sequence
taacaagttagacttagcttgc

SEQ ID NO: 25792 - DNA, 22 bp, Artificial sequence
  SiRNA target sequence
aacaagttagacttagcttgct

SEQ ID NO: 25793 - DNA, 22 bp, Artificial sequence
  SiRNA target sequence
acaagttagacttagcttgctc

SEQ ID NO: 25794 - DNA, 22 bp, Artificial sequence
  SiRNA target sequence
caagttagacttagcttgctca

SEQ ID NO: 25795 - DNA, 22 bp, Artificial sequence
  SiRNA target sequence
aagttagacttagcttgctcac

SEQ ID NO: 25796 - DNA, 22 bp, Artificial sequence
  SiRNA target sequence
agttagacttagcttgctcacc

SEQ ID NO: 25797 - DNA, 22 bp, Artificial sequence
  SiRNA target sequence
gttagacttagcttgctcacct

SEQ ID NO: 25798 - DNA, 22 bp, Artificial sequence
  SiRNA target sequence
ttagacttagcttgctcacctg

SEQ ID NO: 25799 - DNA, 22 bp, Artificial sequence
  SiRNA target sequence
tagacttagcttgctcacctgt

SEQ ID NO: 25800 - DNA, 22 bp, Artificial sequence
  SiRNA target sequence
agacttagcttgctcacctgtt

SEQ ID NO: 25801 - DNA, 22 bp, Artificial sequence
  SiRNA target sequence
gacttagcttgctcacctgtta

SEQ ID NO: 25802 - DNA, 22 bp, Artificial sequence
  SiRNA target sequence
acttagcttgctcacctgttaa

SEQ ID NO: 25803 - DNA, 22 bp, Artificial sequence
  SiRNA target sequence
cttagcttgctcacctgttaaa

SEQ ID NO: 25804 - DNA, 22 bp, Artificial sequence
  SiRNA target sequence
ttagcttgctcacctgttaaaa

SEQ ID NO: 25805 - DNA, 22 bp, Artificial sequence
  SiRNA target sequence
tagcttgctcacctgttaaaat

SEQ ID NO: 25806 - DNA, 22 bp, Artificial sequence
  SiRNA target sequence
agcttgctcacctgttaaaatt

SEQ ID NO: 25807 - DNA, 22 bp, Artificial sequence
  SiRNA target sequence
gcttgctcacctgttaaaattt

SEQ ID NO: 25808 - DNA, 22 bp, Artificial sequence
  SiRNA target sequence
cttgctcacctgttaaaatttt

SEQ ID NO: 25809 - DNA, 22 bp, Artificial sequence
  SiRNA target sequence
ttgctcacctgttaaaatttta

SEQ ID NO: 25810 - DNA, 22 bp, Artificial sequence
  SiRNA target sequence
tgctcacctgttaaaattttat

SEQ ID NO: 25811 - DNA, 22 bp, Artificial sequence
  SiRNA target sequence
gctcacctgttaaaattttatc

SEQ ID NO: 25812 - DNA, 22 bp, Artificial sequence
  SiRNA target sequence
ctcacctgttaaaattttatct

SEQ ID NO: 25813 - DNA, 22 bp, Artificial sequence
  SiRNA target sequence
tcacctgttaaaattttatctt

SEQ ID NO: 25814 - DNA, 22 bp, Artificial sequence
  SiRNA target sequence
cacctgttaaaattttatcttt

SEQ ID NO: 25815 - DNA, 22 bp, Artificial sequence
  SiRNA target sequence
acctgttaaaattttatcttta

SEQ ID NO: 25816 - DNA, 22 bp, Artificial sequence
  SiRNA target sequence
cctgttaaaattttatctttaa

SEQ ID NO: 25817 - DNA, 22 bp, Artificial sequence
  SiRNA target sequence
ctgttaaaattttatctttaaa

SEQ ID NO: 25818 - DNA, 22 bp, Artificial sequence
  SiRNA target sequence
tgttaaaattttatctttaaaa

SEQ ID NO: 25819 - DNA, 22 bp, Artificial sequence
  SiRNA target sequence
gttaaaattttatctttaaaaa

SEQ ID NO: 25820 - DNA, 22 bp, Artificial sequence
  SiRNA target sequence
ttaaaattttatctttaaaaat

SEQ ID NO: 25821 - DNA, 22 bp, Artificial sequence
  SiRNA target sequence
taaaattttatctttaaaaatt

SEQ ID NO: 25822 - DNA, 22 bp, Artificial sequence
  SiRNA target sequence
aaaattttatctttaaaaattg

SEQ ID NO: 25823 - DNA, 22 bp, Artificial sequence
  SiRNA target sequence
aaattttatctttaaaaattga

SEQ ID NO: 25824 - DNA, 22 bp, Artificial sequence
  SiRNA target sequence
aattttatctttaaaaattgat

SEQ ID NO: 25825 - DNA, 22 bp, Artificial sequence
  SiRNA target sequence
attttatctttaaaaattgata

SEQ ID NO: 25826 - DNA, 22 bp, Artificial sequence
  SiRNA target sequence
ttttatctttaaaaattgatac

SEQ ID NO: 25827 - DNA, 22 bp, Artificial sequence
  SiRNA target sequence
tttatctttaaaaattgatacc

SEQ ID NO: 25828 - DNA, 22 bp, Artificial sequence
  SiRNA target sequence
ttatctttaaaaattgatacca

SEQ ID NO: 25829 - DNA, 22 bp, Artificial sequence
  SiRNA target sequence
tatctttaaaaattgataccac

SEQ ID NO: 25830 - DNA, 22 bp, Artificial sequence
  SiRNA target sequence
atctttaaaaattgataccacc

SEQ ID NO: 25831 - DNA, 22 bp, Artificial sequence
  SiRNA target sequence
tctttaaaaattgataccaccg

SEQ ID NO: 25832 - DNA, 22 bp, Artificial sequence
  SiRNA target sequence
ctttaaaaattgataccaccga

SEQ ID NO: 25833 - DNA, 22 bp, Artificial sequence
  SiRNA target sequence
tttaaaaattgataccaccgat

SEQ ID NO: 25834 - DNA, 22 bp, Artificial sequence
  SiRNA target sequence
ttaaaaattgataccaccgatg

SEQ ID NO: 25835 - DNA, 22 bp, Artificial sequence
  SiRNA target sequence
taaaaattgataccaccgatgg

SEQ ID NO: 25836 - DNA, 22 bp, Artificial sequence
  SiRNA target sequence
aaaaattgataccaccgatggt

SEQ ID NO: 25837 - DNA, 22 bp, Artificial sequence
  SiRNA target sequence
aaaattgataccaccgatggtg

SEQ ID NO: 25838 - DNA, 22 bp, Artificial sequence
  SiRNA target sequence
aaattgataccaccgatggtgt

SEQ ID NO: 25839 - DNA, 22 bp, Artificial sequence
  SiRNA target sequence
aattgataccaccgatggtgta

SEQ ID NO: 25840 - DNA, 22 bp, Artificial sequence
  SiRNA target sequence
attgataccaccgatggtgtag

SEQ ID NO: 25841 - DNA, 22 bp, Artificial sequence
  SiRNA target sequence
ttgataccaccgatggtgtagt

SEQ ID NO: 25842 - DNA, 22 bp, Artificial sequence
  SiRNA target sequence
tgataccaccgatggtgtagtt

SEQ ID NO: 25843 - DNA, 22 bp, Artificial sequence
  SiRNA target sequence
gataccaccgatggtgtagttc

SEQ ID NO: 25844 - DNA, 22 bp, Artificial sequence
  SiRNA target sequence
ataccaccgatggtgtagttct

SEQ ID NO: 25845 - DNA, 22 bp, Artificial sequence
  SiRNA target sequence
taccaccgatggtgtagttcta

SEQ ID NO: 25846 - DNA, 22 bp, Artificial sequence
  SiRNA target sequence
accaccgatggtgtagttctac

SEQ ID NO: 25847 - DNA, 22 bp, Artificial sequence
  SiRNA target sequence
ccaccgatggtgtagttctacc

SEQ ID NO: 25848 - DNA, 22 bp, Artificial sequence
  SiRNA target sequence
caccgatggtgtagttctacca

SEQ ID NO: 25849 - DNA, 22 bp, Artificial sequence
  SiRNA target sequence
accgatggtgtagttctaccac

SEQ ID NO: 25850 - DNA, 22 bp, Artificial sequence
  SiRNA target sequence
ccgatggtgtagttctaccacc

SEQ ID NO: 25851 - DNA, 22 bp, Artificial sequence
  SiRNA target sequence
cgatggtgtagttctaccacct

SEQ ID NO: 25852 - DNA, 22 bp, Artificial sequence
  SiRNA target sequence
gatggtgtagttctaccacctt

SEQ ID NO: 25853 - DNA, 22 bp, Artificial sequence
  SiRNA target sequence
atggtgtagttctaccaccttc

SEQ ID NO: 25854 - DNA, 22 bp, Artificial sequence
  SiRNA target sequence
tggtgtagttctaccaccttct

SEQ ID NO: 25855 - DNA, 22 bp, Artificial sequence
  SiRNA target sequence
ggtgtagttctaccaccttctt

SEQ ID NO: 25856 - DNA, 22 bp, Artificial sequence
  SiRNA target sequence
gtgtagttctaccaccttcttc

SEQ ID NO: 25857 - DNA, 22 bp, Artificial sequence
  SiRNA target sequence
tgtagttctaccaccttcttcg

SEQ ID NO: 25858 - DNA, 22 bp, Artificial sequence
  SiRNA target sequence
gtagttctaccaccttcttcgt

SEQ ID NO: 25859 - DNA, 22 bp, Artificial sequence
  SiRNA target sequence
tagttctaccaccttcttcgtt

SEQ ID NO: 25860 - DNA, 22 bp, Artificial sequence
  SiRNA target sequence
agttctaccaccttcttcgttt

SEQ ID NO: 25861 - DNA, 22 bp, Artificial sequence
  SiRNA target sequence
gttctaccaccttcttcgtttt

SEQ ID NO: 25862 - DNA, 22 bp, Artificial sequence
  SiRNA target sequence
ttctaccaccttcttcgttttc

SEQ ID NO: 25863 - DNA, 22 bp, Artificial sequence
  SiRNA target sequence
tctaccaccttcttcgttttca

SEQ ID NO: 25864 - DNA, 22 bp, Artificial sequence
  SiRNA target sequence
ctaccaccttcttcgttttcaa

SEQ ID NO: 25865 - DNA, 22 bp, Artificial sequence
  SiRNA target sequence
taccaccttcttcgttttcaat

SEQ ID NO: 25866 - DNA, 22 bp, Artificial sequence
  SiRNA target sequence
accaccttcttcgttttcaata

SEQ ID NO: 25867 - DNA, 22 bp, Artificial sequence
  SiRNA target sequence
ccaccttcttcgttttcaataa

SEQ ID NO: 25868 - DNA, 22 bp, Artificial sequence
  SiRNA target sequence
caccttcttcgttttcaataat

SEQ ID NO: 25869 - DNA, 22 bp, Artificial sequence
  SiRNA target sequence
accttcttcgttttcaataatt

SEQ ID NO: 25870 - DNA, 22 bp, Artificial sequence
  SiRNA target sequence
ccttcttcgttttcaataattt

SEQ ID NO: 25871 - DNA, 22 bp, Artificial sequence
  SiRNA target sequence
cttcttcgttttcaataatttg

SEQ ID NO: 25872 - DNA, 22 bp, Artificial sequence
  SiRNA target sequence
ttcttcgttttcaataatttgt

SEQ ID NO: 25873 - DNA, 22 bp, Artificial sequence
  SiRNA target sequence
tcttcgttttcaataatttgtg

SEQ ID NO: 25874 - DNA, 22 bp, Artificial sequence
  SiRNA target sequence
cttcgttttcaataatttgtgg

SEQ ID NO: 25875 - DNA, 22 bp, Artificial sequence
  SiRNA target sequence
ttcgttttcaataatttgtggg

SEQ ID NO: 25876 - DNA, 22 bp, Artificial sequence
  SiRNA target sequence
tcgttttcaataatttgtggga

SEQ ID NO: 25877 - DNA, 22 bp, Artificial sequence
  SiRNA target sequence
cgttttcaataatttgtgggat

SEQ ID NO: 25878 - DNA, 22 bp, Artificial sequence
  SiRNA target sequence
gttttcaataatttgtgggata

SEQ ID NO: 25879 - DNA, 22 bp, Artificial sequence
  SiRNA target sequence
ttttcaataatttgtgggatat

SEQ ID NO: 25880 - DNA, 22 bp, Artificial sequence
  SiRNA target sequence
tttcaataatttgtgggatatt

SEQ ID NO: 25881 - DNA, 22 bp, Artificial sequence
  SiRNA target sequence
ttcaataatttgtgggatattg

SEQ ID NO: 25882 - DNA, 22 bp, Artificial sequence
  SiRNA target sequence
tcaataatttgtgggatattgt

SEQ ID NO: 25883 - DNA, 22 bp, Artificial sequence
  SiRNA target sequence
caataatttgtgggatattgtt

SEQ ID NO: 25884 - DNA, 22 bp, Artificial sequence
  SiRNA target sequence
aataatttgtgggatattgtta

SEQ ID NO: 25885 - DNA, 22 bp, Artificial sequence
  SiRNA target sequence
ataatttgtgggatattgttat

SEQ ID NO: 25886 - DNA, 22 bp, Artificial sequence
  SiRNA target sequence
taatttgtgggatattgttatg

SEQ ID NO: 25887 - DNA, 22 bp, Artificial sequence
  SiRNA target sequence
aatttgtgggatattgttatgt

SEQ ID NO: 25888 - DNA, 22 bp, Artificial sequence
  SiRNA target sequence
atttgtgggatattgttatgta

SEQ ID NO: 25889 - DNA, 22 bp, Artificial sequence
  SiRNA target sequence
tttgtgggatattgttatgtat

SEQ ID NO: 25890 - DNA, 22 bp, Artificial sequence
  SiRNA target sequence
ttgtgggatattgttatgtata

SEQ ID NO: 25891 - DNA, 22 bp, Artificial sequence
  SiRNA target sequence
tgtgggatattgttatgtataa

SEQ ID NO: 25892 - DNA, 22 bp, Artificial sequence
  SiRNA target sequence
gtgggatattgttatgtataag

SEQ ID NO: 25893 - DNA, 22 bp, Artificial sequence
  SiRNA target sequence
tgggatattgttatgtataaga

SEQ ID NO: 25894 - DNA, 22 bp, Artificial sequence
  SiRNA target sequence
gggatattgttatgtataagag

SEQ ID NO: 25895 - DNA, 22 bp, Artificial sequence
  SiRNA target sequence
ggatattgttatgtataagaga

SEQ ID NO: 25896 - DNA, 22 bp, Artificial sequence
  SiRNA target sequence
gatattgttatgtataagagac

SEQ ID NO: 25897 - DNA, 22 bp, Artificial sequence
  SiRNA target sequence
atattgttatgtataagagaca

SEQ ID NO: 25898 - DNA, 22 bp, Artificial sequence
  SiRNA target sequence
tattgttatgtataagagacac

SEQ ID NO: 25899 - DNA, 22 bp, Artificial sequence
  SiRNA target sequence
attgttatgtataagagacaca

SEQ ID NO: 25900 - DNA, 22 bp, Artificial sequence
  SiRNA target sequence
ttgttatgtataagagacacac

SEQ ID NO: 25901 - DNA, 22 bp, Artificial sequence
  SiRNA target sequence
tgttatgtataagagacacaca

SEQ ID NO: 25902 - DNA, 22 bp, Artificial sequence
  SiRNA target sequence
gttatgtataagagacacacaa

SEQ ID NO: 25903 - DNA, 22 bp, Artificial sequence
  SiRNA target sequence
ttatgtataagagacacacaag

SEQ ID NO: 25904 - DNA, 22 bp, Artificial sequence
  SiRNA target sequence
tatgtataagagacacacaaga

SEQ ID NO: 25905 - DNA, 22 bp, Artificial sequence
  SiRNA target sequence
atgtataagagacacacaagaa

SEQ ID NO: 25906 - DNA, 22 bp, Artificial sequence
  SiRNA target sequence
tgtataagagacacacaagaat

SEQ ID NO: 25907 - DNA, 22 bp, Artificial sequence
  SiRNA target sequence
gtataagagacacacaagaatt

SEQ ID NO: 25908 - DNA, 22 bp, Artificial sequence
  SiRNA target sequence
tataagagacacacaagaattg

SEQ ID NO: 25909 - DNA, 22 bp, Artificial sequence
  SiRNA target sequence
ataagagacacacaagaattgg

SEQ ID NO: 25910 - DNA, 22 bp, Artificial sequence
  SiRNA target sequence
taagagacacacaagaattggt

SEQ ID NO: 25911 - DNA, 22 bp, Artificial sequence
  SiRNA target sequence
aagagacacacaagaattggtt

SEQ ID NO: 25912 - DNA, 22 bp, Artificial sequence
  SiRNA target sequence
agagacacacaagaattggttg

SEQ ID NO: 25913 - DNA, 22 bp, Artificial sequence
  SiRNA target sequence
gagacacacaagaattggttgt

SEQ ID NO: 25914 - DNA, 22 bp, Artificial sequence
  SiRNA target sequence
agacacacaagaattggttgtt

SEQ ID NO: 25915 - DNA, 22 bp, Artificial sequence
  SiRNA target sequence
gacacacaagaattggttgttc

SEQ ID NO: 25916 - DNA, 22 bp, Artificial sequence
  SiRNA target sequence
acacacaagaattggttgttcc

SEQ ID NO: 25917 - DNA, 22 bp, Artificial sequence
  SiRNA target sequence
cacacaagaattggttgttcct

SEQ ID NO: 25918 - DNA, 22 bp, Artificial sequence
  SiRNA target sequence
acacaagaattggttgttccta

SEQ ID NO: 25919 - DNA, 22 bp, Artificial sequence
  SiRNA target sequence
cacaagaattggttgttcctag

SEQ ID NO: 25920 - DNA, 22 bp, Artificial sequence
  SiRNA target sequence
acaagaattggttgttcctaga

SEQ ID NO: 25921 - DNA, 22 bp, Artificial sequence
  SiRNA target sequence
caagaattggttgttcctagat

SEQ ID NO: 25922 - DNA, 22 bp, Artificial sequence
  SiRNA target sequence
aagaattggttgttcctagatc

SEQ ID NO: 25923 - DNA, 22 bp, Artificial sequence
  SiRNA target sequence
agaattggttgttcctagatca

SEQ ID NO: 25924 - DNA, 22 bp, Artificial sequence
  SiRNA target sequence
gaattggttgttcctagatcaa

SEQ ID NO: 25925 - DNA, 22 bp, Artificial sequence
  SiRNA target sequence
aattggttgttcctagatcaat

SEQ ID NO: 25926 - DNA, 22 bp, Artificial sequence
  SiRNA target sequence
attggttgttcctagatcaatt

SEQ ID NO: 25927 - DNA, 22 bp, Artificial sequence
  SiRNA target sequence
ttggttgttcctagatcaattc

SEQ ID NO: 25928 - DNA, 22 bp, Artificial sequence
  SiRNA target sequence
tggttgttcctagatcaattcc

SEQ ID NO: 25929 - DNA, 22 bp, Artificial sequence
  SiRNA target sequence
ggttgttcctagatcaattcct

SEQ ID NO: 25930 - DNA, 22 bp, Artificial sequence
  SiRNA target sequence
gttgttcctagatcaattccta

SEQ ID NO: 25931 - DNA, 22 bp, Artificial sequence
  SiRNA target sequence
ttgttcctagatcaattcctat

SEQ ID NO: 25932 - DNA, 22 bp, Artificial sequence
  SiRNA target sequence
tgttcctagatcaattcctatt

SEQ ID NO: 25933 - DNA, 22 bp, Artificial sequence
  SiRNA target sequence
gttcctagatcaattcctatta

SEQ ID NO: 25934 - DNA, 22 bp, Artificial sequence
  SiRNA target sequence
ttcctagatcaattcctattat

SEQ ID NO: 25935 - DNA, 22 bp, Artificial sequence
  SiRNA target sequence
tcctagatcaattcctattatt

SEQ ID NO: 25936 - DNA, 22 bp, Artificial sequence
  SiRNA target sequence
cctagatcaattcctattattt

SEQ ID NO: 25937 - DNA, 22 bp, Artificial sequence
  SiRNA target sequence
ctagatcaattcctattatttt

SEQ ID NO: 25938 - DNA, 22 bp, Artificial sequence
  SiRNA target sequence
tagatcaattcctattatttta

SEQ ID NO: 25939 - DNA, 22 bp, Artificial sequence
  SiRNA target sequence
agatcaattcctattattttag

SEQ ID NO: 25940 - DNA, 22 bp, Artificial sequence
  SiRNA target sequence
gatcaattcctattattttaga

SEQ ID NO: 25941 - DNA, 22 bp, Artificial sequence
  SiRNA target sequence
atcaattcctattattttagag

SEQ ID NO: 25942 - DNA, 22 bp, Artificial sequence
  SiRNA target sequence
tcaattcctattattttagagc

SEQ ID NO: 25943 - DNA, 22 bp, Artificial sequence
  SiRNA target sequence
caattcctattattttagagct

SEQ ID NO: 25944 - DNA, 22 bp, Artificial sequence
  SiRNA target sequence
aattcctattattttagagcta

SEQ ID NO: 25945 - DNA, 22 bp, Artificial sequence
  SiRNA target sequence
attcctattattttagagctaa

SEQ ID NO: 25946 - DNA, 22 bp, Artificial sequence
  SiRNA target sequence
ttcctattattttagagctaat

SEQ ID NO: 25947 - DNA, 22 bp, Artificial sequence
  SiRNA target sequence
tcctattattttagagctaatt

SEQ ID NO: 25948 - DNA, 22 bp, Artificial sequence
  SiRNA target sequence
cctattattttagagctaattt

SEQ ID NO: 25949 - DNA, 22 bp, Artificial sequence
  SiRNA target sequence
ctattattttagagctaatttc

SEQ ID NO: 25950 - DNA, 22 bp, Artificial sequence
  SiRNA target sequence
tattattttagagctaatttct

SEQ ID NO: 25951 - DNA, 22 bp, Artificial sequence
  SiRNA target sequence
attattttagagctaatttctt

SEQ ID NO: 25952 - DNA, 22 bp, Artificial sequence
  SiRNA target sequence
ttattttagagctaatttcttc

SEQ ID NO: 25953 - DNA, 22 bp, Artificial sequence
  SiRNA target sequence
tattttagagctaatttcttct

SEQ ID NO: 25954 - DNA, 22 bp, Artificial sequence
  SiRNA target sequence
attttagagctaatttcttctt

SEQ ID NO: 25955 - DNA, 22 bp, Artificial sequence
  SiRNA target sequence
ttttagagctaatttcttcttt

SEQ ID NO: 25956 - DNA, 22 bp, Artificial sequence
  SiRNA target sequence
tttagagctaatttcttcttta

SEQ ID NO: 25957 - DNA, 22 bp, Artificial sequence
  SiRNA target sequence
ttagagctaatttcttctttag

SEQ ID NO: 25958 - DNA, 22 bp, Artificial sequence
  SiRNA target sequence
tagagctaatttcttctttaga

SEQ ID NO: 25959 - DNA, 22 bp, Artificial sequence
  SiRNA target sequence
agagctaatttcttctttagac

SEQ ID NO: 25960 - DNA, 22 bp, Artificial sequence
  SiRNA target sequence
gagctaatttcttctttagaca

SEQ ID NO: 25961 - DNA, 22 bp, Artificial sequence
  SiRNA target sequence
agctaatttcttctttagacat

SEQ ID NO: 25962 - DNA, 23 bp, Artificial sequence
  SiRNA target sequence
ttaagaatttttcaatatttttt

SEQ ID NO: 25963 - DNA, 23 bp, Artificial sequence
  SiRNA target sequence
taagaatttttcaatattttttt

SEQ ID NO: 25964 - DNA, 23 bp, Artificial sequence
  SiRNA target sequence
aagaatttttcaatatttttttt

SEQ ID NO: 25965 - DNA, 23 bp, Artificial sequence
  SiRNA target sequence
agaatttttcaatattttttttg

SEQ ID NO: 25966 - DNA, 23 bp, Artificial sequence
  SiRNA target sequence
gaatttttcaatattttttttgc

SEQ ID NO: 25967 - DNA, 23 bp, Artificial sequence
  SiRNA target sequence
aatttttcaatattttttttgct

SEQ ID NO: 25968 - DNA, 23 bp, Artificial sequence
  SiRNA target sequence
atttttcaatattttttttgctt

SEQ ID NO: 25969 - DNA, 23 bp, Artificial sequence
  SiRNA target sequence
tttttcaatattttttttgcttg

SEQ ID NO: 25970 - DNA, 23 bp, Artificial sequence
  SiRNA target sequence
ttttcaatattttttttgcttgt

SEQ ID NO: 25971 - DNA, 23 bp, Artificial sequence
  SiRNA target sequence
tttcaatattttttttgcttgtt

SEQ ID NO: 25972 - DNA, 23 bp, Artificial sequence
  SiRNA target sequence
ttcaatattttttttgcttgttc

SEQ ID NO: 25973 - DNA, 23 bp, Artificial sequence
  SiRNA target sequence
tcaatattttttttgcttgttct

SEQ ID NO: 25974 - DNA, 23 bp, Artificial sequence
  SiRNA target sequence
caatattttttttgcttgttcta

SEQ ID NO: 25975 - DNA, 23 bp, Artificial sequence
  SiRNA target sequence
aatattttttttgcttgttctaa

SEQ ID NO: 25976 - DNA, 23 bp, Artificial sequence
  SiRNA target sequence
atattttttttgcttgttctaag

SEQ ID NO: 25977 - DNA, 23 bp, Artificial sequence
  SiRNA target sequence
tattttttttgcttgttctaagt

SEQ ID NO: 25978 - DNA, 23 bp, Artificial sequence
  SiRNA target sequence
attttttttgcttgttctaagtc

SEQ ID NO: 25979 - DNA, 23 bp, Artificial sequence
  SiRNA target sequence
ttttttttgcttgttctaagtca

SEQ ID NO: 25980 - DNA, 23 bp, Artificial sequence
  SiRNA target sequence
tttttttgcttgttctaagtcat

SEQ ID NO: 25981 - DNA, 23 bp, Artificial sequence
  SiRNA target sequence
ttttttgcttgttctaagtcata

SEQ ID NO: 25982 - DNA, 23 bp, Artificial sequence
  SiRNA target sequence
tttttgcttgttctaagtcataa

SEQ ID NO: 25983 - DNA, 23 bp, Artificial sequence
  SiRNA target sequence
ttttgcttgttctaagtcataaa

SEQ ID NO: 25984 - DNA, 23 bp, Artificial sequence
  SiRNA target sequence
tttgcttgttctaagtcataaat

SEQ ID NO: 25985 - DNA, 23 bp, Artificial sequence
  SiRNA target sequence
ttgcttgttctaagtcataaatt

SEQ ID NO: 25986 - DNA, 23 bp, Artificial sequence
  SiRNA target sequence
tgcttgttctaagtcataaattt

SEQ ID NO: 25987 - DNA, 23 bp, Artificial sequence
  SiRNA target sequence
gcttgttctaagtcataaatttt

SEQ ID NO: 25988 - DNA, 23 bp, Artificial sequence
  SiRNA target sequence
cttgttctaagtcataaattttt

SEQ ID NO: 25989 - DNA, 23 bp, Artificial sequence
  SiRNA target sequence
ttgttctaagtcataaatttttt

SEQ ID NO: 25990 - DNA, 23 bp, Artificial sequence
  SiRNA target sequence
tgttctaagtcataaattttttt

SEQ ID NO: 25991 - DNA, 23 bp, Artificial sequence
  SiRNA target sequence
gttctaagtcataaattttttta

SEQ ID NO: 25992 - DNA, 23 bp, Artificial sequence
  SiRNA target sequence
ttctaagtcataaatttttttag

SEQ ID NO: 25993 - DNA, 23 bp, Artificial sequence
  SiRNA target sequence
tctaagtcataaatttttttagt

SEQ ID NO: 25994 - DNA, 23 bp, Artificial sequence
  SiRNA target sequence
ctaagtcataaatttttttagtc

SEQ ID NO: 25995 - DNA, 23 bp, Artificial sequence
  SiRNA target sequence
taagtcataaatttttttagtca

SEQ ID NO: 25996 - DNA, 23 bp, Artificial sequence
  SiRNA target sequence
aagtcataaatttttttagtcaa

SEQ ID NO: 25997 - DNA, 23 bp, Artificial sequence
  SiRNA target sequence
agtcataaatttttttagtcaaa

SEQ ID NO: 25998 - DNA, 23 bp, Artificial sequence
  SiRNA target sequence
gtcataaatttttttagtcaaat

SEQ ID NO: 25999 - DNA, 23 bp, Artificial sequence
  SiRNA target sequence
tcataaatttttttagtcaaata

SEQ ID NO: 26000 - DNA, 23 bp, Artificial sequence
  SiRNA target sequence
cataaatttttttagtcaaatat

SEQ ID NO: 26001 - DNA, 23 bp, Artificial sequence
  SiRNA target sequence
ataaatttttttagtcaaatatg

SEQ ID NO: 26002 - DNA, 23 bp, Artificial sequence
  SiRNA target sequence
taaatttttttagtcaaatatga

SEQ ID NO: 26003 - DNA, 23 bp, Artificial sequence
  SiRNA target sequence
aaatttttttagtcaaatatgac

SEQ ID NO: 26004 - DNA, 23 bp, Artificial sequence
  SiRNA target sequence
aatttttttagtcaaatatgact

SEQ ID NO: 26005 - DNA, 23 bp, Artificial sequence
  SiRNA target sequence
atttttttagtcaaatatgactt

SEQ ID NO: 26006 - DNA, 23 bp, Artificial sequence
  SiRNA target sequence
tttttttagtcaaatatgacttt

SEQ ID NO: 26007 - DNA, 23 bp, Artificial sequence
  SiRNA target sequence
ttttttagtcaaatatgacttta

SEQ ID NO: 26008 - DNA, 23 bp, Artificial sequence
  SiRNA target sequence
tttttagtcaaatatgactttaa

SEQ ID NO: 26009 - DNA, 23 bp, Artificial sequence
  SiRNA target sequence
ttttagtcaaatatgactttaaa

SEQ ID NO: 26010 - DNA, 23 bp, Artificial sequence
  SiRNA target sequence
tttagtcaaatatgactttaaaa

SEQ ID NO: 26011 - DNA, 23 bp, Artificial sequence
  SiRNA target sequence
ttagtcaaatatgactttaaaat

SEQ ID NO: 26012 - DNA, 23 bp, Artificial sequence
  SiRNA target sequence
tagtcaaatatgactttaaaatc

SEQ ID NO: 26013 - DNA, 23 bp, Artificial sequence
  SiRNA target sequence
agtcaaatatgactttaaaatct

SEQ ID NO: 26014 - DNA, 23 bp, Artificial sequence
  SiRNA target sequence
gtcaaatatgactttaaaatctc

SEQ ID NO: 26015 - DNA, 23 bp, Artificial sequence
  SiRNA target sequence
tcaaatatgactttaaaatctct

SEQ ID NO: 26016 - DNA, 23 bp, Artificial sequence
  SiRNA target sequence
caaatatgactttaaaatctctt

SEQ ID NO: 26017 - DNA, 23 bp, Artificial sequence
  SiRNA target sequence
aaatatgactttaaaatctcttt

SEQ ID NO: 26018 - DNA, 23 bp, Artificial sequence
  SiRNA target sequence
aatatgactttaaaatctctttt

SEQ ID NO: 26019 - DNA, 23 bp, Artificial sequence
  SiRNA target sequence
atatgactttaaaatctcttttg

SEQ ID NO: 26020 - DNA, 23 bp, Artificial sequence
  SiRNA target sequence
tatgactttaaaatctcttttgt

SEQ ID NO: 26021 - DNA, 23 bp, Artificial sequence
  SiRNA target sequence
atgactttaaaatctcttttgtt

SEQ ID NO: 26022 - DNA, 23 bp, Artificial sequence
  SiRNA target sequence
tgactttaaaatctcttttgttt

SEQ ID NO: 26023 - DNA, 23 bp, Artificial sequence
  SiRNA target sequence
gactttaaaatctcttttgtttc

SEQ ID NO: 26024 - DNA, 23 bp, Artificial sequence
  SiRNA target sequence
actttaaaatctcttttgtttca

SEQ ID NO: 26025 - DNA, 23 bp, Artificial sequence
  SiRNA target sequence
ctttaaaatctcttttgtttcat

SEQ ID NO: 26026 - DNA, 23 bp, Artificial sequence
  SiRNA target sequence
tttaaaatctcttttgtttcatc

SEQ ID NO: 26027 - DNA, 23 bp, Artificial sequence
  SiRNA target sequence
ttaaaatctcttttgtttcatct

SEQ ID NO: 26028 - DNA, 23 bp, Artificial sequence
  SiRNA target sequence
taaaatctcttttgtttcatctg

SEQ ID NO: 26029 - DNA, 23 bp, Artificial sequence
  SiRNA target sequence
aaaatctcttttgtttcatctgt

SEQ ID NO: 26030 - DNA, 23 bp, Artificial sequence
  SiRNA target sequence
aaatctcttttgtttcatctgtt

SEQ ID NO: 26031 - DNA, 23 bp, Artificial sequence
  SiRNA target sequence
aatctcttttgtttcatctgtta

SEQ ID NO: 26032 - DNA, 23 bp, Artificial sequence
  SiRNA target sequence
atctcttttgtttcatctgttac

SEQ ID NO: 26033 - DNA, 23 bp, Artificial sequence
  SiRNA target sequence
tctcttttgtttcatctgttact

SEQ ID NO: 26034 - DNA, 23 bp, Artificial sequence
  SiRNA target sequence
ctcttttgtttcatctgttactt

SEQ ID NO: 26035 - DNA, 23 bp, Artificial sequence
  SiRNA target sequence
tcttttgtttcatctgttacttg

SEQ ID NO: 26036 - DNA, 23 bp, Artificial sequence
  SiRNA target sequence
cttttgtttcatctgttacttgt

SEQ ID NO: 26037 - DNA, 23 bp, Artificial sequence
  SiRNA target sequence
ttttgtttcatctgttacttgtt

SEQ ID NO: 26038 - DNA, 23 bp, Artificial sequence
  SiRNA target sequence
tttgtttcatctgttacttgttt

SEQ ID NO: 26039 - DNA, 23 bp, Artificial sequence
  SiRNA target sequence
ttgtttcatctgttacttgtttg

SEQ ID NO: 26040 - DNA, 23 bp, Artificial sequence
  SiRNA target sequence
tgtttcatctgttacttgtttgt

SEQ ID NO: 26041 - DNA, 23 bp, Artificial sequence
  SiRNA target sequence
gtttcatctgttacttgtttgta

SEQ ID NO: 26042 - DNA, 23 bp, Artificial sequence
  SiRNA target sequence
tttcatctgttacttgtttgtac

SEQ ID NO: 26043 - DNA, 23 bp, Artificial sequence
  SiRNA target sequence
ttcatctgttacttgtttgtact

SEQ ID NO: 26044 - DNA, 23 bp, Artificial sequence
  SiRNA target sequence
tcatctgttacttgtttgtactt

SEQ ID NO: 26045 - DNA, 23 bp, Artificial sequence
  SiRNA target sequence
catctgttacttgtttgtacttt

SEQ ID NO: 26046 - DNA, 23 bp, Artificial sequence
  SiRNA target sequence
atctgttacttgtttgtacttta

SEQ ID NO: 26047 - DNA, 23 bp, Artificial sequence
  SiRNA target sequence
tctgttacttgtttgtactttaa

SEQ ID NO: 26048 - DNA, 23 bp, Artificial sequence
  SiRNA target sequence
ctgttacttgtttgtactttaaa

SEQ ID NO: 26049 - DNA, 23 bp, Artificial sequence
  SiRNA target sequence
tgttacttgtttgtactttaaaa

SEQ ID NO: 26050 - DNA, 23 bp, Artificial sequence
  SiRNA target sequence
gttacttgtttgtactttaaaaa

SEQ ID NO: 26051 - DNA, 23 bp, Artificial sequence
  SiRNA target sequence
ttacttgtttgtactttaaaaat

SEQ ID NO: 26052 - DNA, 23 bp, Artificial sequence
  SiRNA target sequence
tacttgtttgtactttaaaaatt

SEQ ID NO: 26053 - DNA, 23 bp, Artificial sequence
  SiRNA target sequence
acttgtttgtactttaaaaattg

SEQ ID NO: 26054 - DNA, 23 bp, Artificial sequence
  SiRNA target sequence
cttgtttgtactttaaaaattgt

SEQ ID NO: 26055 - DNA, 23 bp, Artificial sequence
  SiRNA target sequence
ttgtttgtactttaaaaattgtt

SEQ ID NO: 26056 - DNA, 23 bp, Artificial sequence
  SiRNA target sequence
tgtttgtactttaaaaattgttg

SEQ ID NO: 26057 - DNA, 23 bp, Artificial sequence
  SiRNA target sequence
gtttgtactttaaaaattgttga

SEQ ID NO: 26058 - DNA, 23 bp, Artificial sequence
  SiRNA target sequence
tttgtactttaaaaattgttgaa

SEQ ID NO: 26059 - DNA, 23 bp, Artificial sequence
  SiRNA target sequence
ttgtactttaaaaattgttgaat

SEQ ID NO: 26060 - DNA, 23 bp, Artificial sequence
  SiRNA target sequence
tgtactttaaaaattgttgaatt

SEQ ID NO: 26061 - DNA, 23 bp, Artificial sequence
  SiRNA target sequence
gtactttaaaaattgttgaattt

SEQ ID NO: 26062 - DNA, 23 bp, Artificial sequence
  SiRNA target sequence
tactttaaaaattgttgaatttc

SEQ ID NO: 26063 - DNA, 23 bp, Artificial sequence
  SiRNA target sequence
actttaaaaattgttgaatttca

SEQ ID NO: 26064 - DNA, 23 bp, Artificial sequence
  SiRNA target sequence
ctttaaaaattgttgaatttcaa

SEQ ID NO: 26065 - DNA, 23 bp, Artificial sequence
  SiRNA target sequence
tttaaaaattgttgaatttcaat

SEQ ID NO: 26066 - DNA, 23 bp, Artificial sequence
  SiRNA target sequence
ttaaaaattgttgaatttcaatt

SEQ ID NO: 26067 - DNA, 23 bp, Artificial sequence
  SiRNA target sequence
taaaaattgttgaatttcaattt

SEQ ID NO: 26068 - DNA, 23 bp, Artificial sequence
  SiRNA target sequence
aaaaattgttgaatttcaatttt

SEQ ID NO: 26069 - DNA, 23 bp, Artificial sequence
  SiRNA target sequence
aaaattgttgaatttcaatttta

SEQ ID NO: 26070 - DNA, 23 bp, Artificial sequence
  SiRNA target sequence
aaattgttgaatttcaattttaa

SEQ ID NO: 26071 - DNA, 23 bp, Artificial sequence
  SiRNA target sequence
aattgttgaatttcaattttaaa

SEQ ID NO: 26072 - DNA, 23 bp, Artificial sequence
  SiRNA target sequence
attgttgaatttcaattttaaat

SEQ ID NO: 26073 - DNA, 23 bp, Artificial sequence
  SiRNA target sequence
ttgttgaatttcaattttaaatt

SEQ ID NO: 26074 - DNA, 23 bp, Artificial sequence
  SiRNA target sequence
tgttgaatttcaattttaaattc

SEQ ID NO: 26075 - DNA, 23 bp, Artificial sequence
  SiRNA target sequence
gttgaatttcaattttaaattcg

SEQ ID NO: 26076 - DNA, 23 bp, Artificial sequence
  SiRNA target sequence
ttgaatttcaattttaaattcgg

SEQ ID NO: 26077 - DNA, 23 bp, Artificial sequence
  SiRNA target sequence
tgaatttcaattttaaattcggc

SEQ ID NO: 26078 - DNA, 23 bp, Artificial sequence
  SiRNA target sequence
gaatttcaattttaaattcggca

SEQ ID NO: 26079 - DNA, 23 bp, Artificial sequence
  SiRNA target sequence
aatttcaattttaaattcggcac

SEQ ID NO: 26080 - DNA, 23 bp, Artificial sequence
  SiRNA target sequence
atttcaattttaaattcggcaca

SEQ ID NO: 26081 - DNA, 23 bp, Artificial sequence
  SiRNA target sequence
tttcaattttaaattcggcacaa

SEQ ID NO: 26082 - DNA, 23 bp, Artificial sequence
  SiRNA target sequence
ttcaattttaaattcggcacaat

SEQ ID NO: 26083 - DNA, 23 bp, Artificial sequence
  SiRNA target sequence
tcaattttaaattcggcacaatt

SEQ ID NO: 26084 - DNA, 23 bp, Artificial sequence
  SiRNA target sequence
caattttaaattcggcacaattt

SEQ ID NO: 26085 - DNA, 23 bp, Artificial sequence
  SiRNA target sequence
aattttaaattcggcacaatttt

SEQ ID NO: 26086 - DNA, 23 bp, Artificial sequence
  SiRNA target sequence
attttaaattcggcacaattttt

SEQ ID NO: 26087 - DNA, 23 bp, Artificial sequence
  SiRNA target sequence
ttttaaattcggcacaatttttt

SEQ ID NO: 26088 - DNA, 23 bp, Artificial sequence
  SiRNA target sequence
tttaaattcggcacaattttttt

SEQ ID NO: 26089 - DNA, 23 bp, Artificial sequence
  SiRNA target sequence
ttaaattcggcacaatttttttc

SEQ ID NO: 26090 - DNA, 23 bp, Artificial sequence
  SiRNA target sequence
taaattcggcacaatttttttca

SEQ ID NO: 26091 - DNA, 23 bp, Artificial sequence
  SiRNA target sequence
aaattcggcacaatttttttcaa

SEQ ID NO: 26092 - DNA, 23 bp, Artificial sequence
  SiRNA target sequence
aattcggcacaatttttttcaat

SEQ ID NO: 26093 - DNA, 23 bp, Artificial sequence
  SiRNA target sequence
attcggcacaatttttttcaatt

SEQ ID NO: 26094 - DNA, 23 bp, Artificial sequence
  SiRNA target sequence
ttcggcacaatttttttcaattt

SEQ ID NO: 26095 - DNA, 23 bp, Artificial sequence
  SiRNA target sequence
tcggcacaatttttttcaatttc

SEQ ID NO: 26096 - DNA, 23 bp, Artificial sequence
  SiRNA target sequence
cggcacaatttttttcaatttca

SEQ ID NO: 26097 - DNA, 23 bp, Artificial sequence
  SiRNA target sequence
ggcacaatttttttcaatttcat

SEQ ID NO: 26098 - DNA, 23 bp, Artificial sequence
  SiRNA target sequence
gcacaatttttttcaatttcatc

SEQ ID NO: 26099 - DNA, 23 bp, Artificial sequence
  SiRNA target sequence
cacaatttttttcaatttcatct

SEQ ID NO: 26100 - DNA, 23 bp, Artificial sequence
  SiRNA target sequence
acaatttttttcaatttcatctt

SEQ ID NO: 26101 - DNA, 23 bp, Artificial sequence
  SiRNA target sequence
caatttttttcaatttcatcttt

SEQ ID NO: 26102 - DNA, 23 bp, Artificial sequence
  SiRNA target sequence
aatttttttcaatttcatctttt

SEQ ID NO: 26103 - DNA, 23 bp, Artificial sequence
  SiRNA target sequence
atttttttcaatttcatcttttt

SEQ ID NO: 26104 - DNA, 23 bp, Artificial sequence
  SiRNA target sequence
tttttttcaatttcatctttttt

SEQ ID NO: 26105 - DNA, 23 bp, Artificial sequence
  SiRNA target sequence
ttttttcaatttcatcttttttc

SEQ ID NO: 26106 - DNA, 23 bp, Artificial sequence
  SiRNA target sequence
tttttcaatttcatcttttttcg

SEQ ID NO: 26107 - DNA, 23 bp, Artificial sequence
  SiRNA target sequence
ttttcaatttcatcttttttcga

SEQ ID NO: 26108 - DNA, 23 bp, Artificial sequence
  SiRNA target sequence
tttcaatttcatcttttttcgaa

SEQ ID NO: 26109 - DNA, 23 bp, Artificial sequence
  SiRNA target sequence
ttcaatttcatcttttttcgaat

SEQ ID NO: 26110 - DNA, 23 bp, Artificial sequence
  SiRNA target sequence
tcaatttcatcttttttcgaatt

SEQ ID NO: 26111 - DNA, 23 bp, Artificial sequence
  SiRNA target sequence
caatttcatcttttttcgaattt

SEQ ID NO: 26112 - DNA, 23 bp, Artificial sequence
  SiRNA target sequence
aatttcatcttttttcgaatttt

SEQ ID NO: 26113 - DNA, 23 bp, Artificial sequence
  SiRNA target sequence
atttcatcttttttcgaattttc

SEQ ID NO: 26114 - DNA, 23 bp, Artificial sequence
  SiRNA target sequence
tttcatcttttttcgaattttct

SEQ ID NO: 26115 - DNA, 23 bp, Artificial sequence
  SiRNA target sequence
ttcatcttttttcgaattttctt

SEQ ID NO: 26116 - DNA, 23 bp, Artificial sequence
  SiRNA target sequence
tcatcttttttcgaattttcttc

SEQ ID NO: 26117 - DNA, 23 bp, Artificial sequence
  SiRNA target sequence
catcttttttcgaattttcttcg

SEQ ID NO: 26118 - DNA, 23 bp, Artificial sequence
  SiRNA target sequence
atcttttttcgaattttcttcgg

SEQ ID NO: 26119 - DNA, 23 bp, Artificial sequence
  SiRNA target sequence
tcttttttcgaattttcttcggc

SEQ ID NO: 26120 - DNA, 23 bp, Artificial sequence
  SiRNA target sequence
cttttttcgaattttcttcggct

SEQ ID NO: 26121 - DNA, 23 bp, Artificial sequence
  SiRNA target sequence
ttttttcgaattttcttcggctt

SEQ ID NO: 26122 - DNA, 23 bp, Artificial sequence
  SiRNA target sequence
tttttcgaattttcttcggcttc

SEQ ID NO: 26123 - DNA, 23 bp, Artificial sequence
  SiRNA target sequence
ttttcgaattttcttcggcttct

SEQ ID NO: 26124 - DNA, 23 bp, Artificial sequence
  SiRNA target sequence
tttcgaattttcttcggcttctc

SEQ ID NO: 26125 - DNA, 23 bp, Artificial sequence
  SiRNA target sequence
ttcgaattttcttcggcttctcg

SEQ ID NO: 26126 - DNA, 23 bp, Artificial sequence
  SiRNA target sequence
tcgaattttcttcggcttctcgt

SEQ ID NO: 26127 - DNA, 23 bp, Artificial sequence
  SiRNA target sequence
cgaattttcttcggcttctcgta

SEQ ID NO: 26128 - DNA, 23 bp, Artificial sequence
  SiRNA target sequence
gaattttcttcggcttctcgtat

SEQ ID NO: 26129 - DNA, 23 bp, Artificial sequence
  SiRNA target sequence
aattttcttcggcttctcgtatc

SEQ ID NO: 26130 - DNA, 23 bp, Artificial sequence
  SiRNA target sequence
attttcttcggcttctcgtatca

SEQ ID NO: 26131 - DNA, 23 bp, Artificial sequence
  SiRNA target sequence
ttttcttcggcttctcgtatcat

SEQ ID NO: 26132 - DNA, 23 bp, Artificial sequence
  SiRNA target sequence
tttcttcggcttctcgtatcatt

SEQ ID NO: 26133 - DNA, 23 bp, Artificial sequence
  SiRNA target sequence
ttcttcggcttctcgtatcattt

SEQ ID NO: 26134 - DNA, 23 bp, Artificial sequence
  SiRNA target sequence
tcttcggcttctcgtatcatttg

SEQ ID NO: 26135 - DNA, 23 bp, Artificial sequence
  SiRNA target sequence
cttcggcttctcgtatcatttgc

SEQ ID NO: 26136 - DNA, 23 bp, Artificial sequence
  SiRNA target sequence
ttcggcttctcgtatcatttgcg

SEQ ID NO: 26137 - DNA, 23 bp, Artificial sequence
  SiRNA target sequence
tcggcttctcgtatcatttgcga

SEQ ID NO: 26138 - DNA, 23 bp, Artificial sequence
  SiRNA target sequence
cggcttctcgtatcatttgcgaa

SEQ ID NO: 26139 - DNA, 23 bp, Artificial sequence
  SiRNA target sequence
ggcttctcgtatcatttgcgaaa

SEQ ID NO: 26140 - DNA, 23 bp, Artificial sequence
  SiRNA target sequence
gcttctcgtatcatttgcgaaat

SEQ ID NO: 26141 - DNA, 23 bp, Artificial sequence
  SiRNA target sequence
cttctcgtatcatttgcgaaatt

SEQ ID NO: 26142 - DNA, 23 bp, Artificial sequence
  SiRNA target sequence
ttctcgtatcatttgcgaaattt

SEQ ID NO: 26143 - DNA, 23 bp, Artificial sequence
  SiRNA target sequence
tctcgtatcatttgcgaaatttc

SEQ ID NO: 26144 - DNA, 23 bp, Artificial sequence
  SiRNA target sequence
ctcgtatcatttgcgaaatttca

SEQ ID NO: 26145 - DNA, 23 bp, Artificial sequence
  SiRNA target sequence
tcgtatcatttgcgaaatttcac

SEQ ID NO: 26146 - DNA, 23 bp, Artificial sequence
  SiRNA target sequence
cgtatcatttgcgaaatttcacc

SEQ ID NO: 26147 - DNA, 23 bp, Artificial sequence
  SiRNA target sequence
gtatcatttgcgaaatttcacct

SEQ ID NO: 26148 - DNA, 23 bp, Artificial sequence
  SiRNA target sequence
tatcatttgcgaaatttcacctt

SEQ ID NO: 26149 - DNA, 23 bp, Artificial sequence
  SiRNA target sequence
atcatttgcgaaatttcaccttc

SEQ ID NO: 26150 - DNA, 23 bp, Artificial sequence
  SiRNA target sequence
tcatttgcgaaatttcaccttca

SEQ ID NO: 26151 - DNA, 23 bp, Artificial sequence
  SiRNA target sequence
catttgcgaaatttcaccttcat

SEQ ID NO: 26152 - DNA, 23 bp, Artificial sequence
  SiRNA target sequence
atttgcgaaatttcaccttcatt

SEQ ID NO: 26153 - DNA, 23 bp, Artificial sequence
  SiRNA target sequence
tttgcgaaatttcaccttcattt

SEQ ID NO: 26154 - DNA, 23 bp, Artificial sequence
  SiRNA target sequence
ttgcgaaatttcaccttcattta

SEQ ID NO: 26155 - DNA, 23 bp, Artificial sequence
  SiRNA target sequence
tgcgaaatttcaccttcatttaa

SEQ ID NO: 26156 - DNA, 23 bp, Artificial sequence
  SiRNA target sequence
gcgaaatttcaccttcatttaat

SEQ ID NO: 26157 - DNA, 23 bp, Artificial sequence
  SiRNA target sequence
cgaaatttcaccttcatttaatc

SEQ ID NO: 26158 - DNA, 23 bp, Artificial sequence
  SiRNA target sequence
gaaatttcaccttcatttaatcc

SEQ ID NO: 26159 - DNA, 23 bp, Artificial sequence
  SiRNA target sequence
aaatttcaccttcatttaatcca

SEQ ID NO: 26160 - DNA, 23 bp, Artificial sequence
  SiRNA target sequence
aatttcaccttcatttaatccac

SEQ ID NO: 26161 - DNA, 23 bp, Artificial sequence
  SiRNA target sequence
atttcaccttcatttaatccact

SEQ ID NO: 26162 - DNA, 23 bp, Artificial sequence
  SiRNA target sequence
tttcaccttcatttaatccactt

SEQ ID NO: 26163 - DNA, 23 bp, Artificial sequence
  SiRNA target sequence
ttcaccttcatttaatccacttg

SEQ ID NO: 26164 - DNA, 23 bp, Artificial sequence
  SiRNA target sequence
tcaccttcatttaatccacttga

SEQ ID NO: 26165 - DNA, 23 bp, Artificial sequence
  SiRNA target sequence
caccttcatttaatccacttgaa

SEQ ID NO: 26166 - DNA, 23 bp, Artificial sequence
  SiRNA target sequence
accttcatttaatccacttgaag

SEQ ID NO: 26167 - DNA, 23 bp, Artificial sequence
  SiRNA target sequence
ccttcatttaatccacttgaagg

SEQ ID NO: 26168 - DNA, 23 bp, Artificial sequence
  SiRNA target sequence
cttcatttaatccacttgaaggc

SEQ ID NO: 26169 - DNA, 23 bp, Artificial sequence
  SiRNA target sequence
ttcatttaatccacttgaaggca

SEQ ID NO: 26170 - DNA, 23 bp, Artificial sequence
  SiRNA target sequence
tcatttaatccacttgaaggcac

SEQ ID NO: 26171 - DNA, 23 bp, Artificial sequence
  SiRNA target sequence
catttaatccacttgaaggcaca

SEQ ID NO: 26172 - DNA, 23 bp, Artificial sequence
  SiRNA target sequence
atttaatccacttgaaggcacaa

SEQ ID NO: 26173 - DNA, 23 bp, Artificial sequence
  SiRNA target sequence
tttaatccacttgaaggcacaat

SEQ ID NO: 26174 - DNA, 23 bp, Artificial sequence
  SiRNA target sequence
ttaatccacttgaaggcacaatt

SEQ ID NO: 26175 - DNA, 23 bp, Artificial sequence
  SiRNA target sequence
taatccacttgaaggcacaattt

SEQ ID NO: 26176 - DNA, 23 bp, Artificial sequence
  SiRNA target sequence
aatccacttgaaggcacaatttc

SEQ ID NO: 26177 - DNA, 23 bp, Artificial sequence
  SiRNA target sequence
atccacttgaaggcacaatttcg

SEQ ID NO: 26178 - DNA, 23 bp, Artificial sequence
  SiRNA target sequence
tccacttgaaggcacaatttcga

SEQ ID NO: 26179 - DNA, 23 bp, Artificial sequence
  SiRNA target sequence
ccacttgaaggcacaatttcgat

SEQ ID NO: 26180 - DNA, 23 bp, Artificial sequence
  SiRNA target sequence
cacttgaaggcacaatttcgatt

SEQ ID NO: 26181 - DNA, 23 bp, Artificial sequence
  SiRNA target sequence
acttgaaggcacaatttcgattt

SEQ ID NO: 26182 - DNA, 23 bp, Artificial sequence
  SiRNA target sequence
cttgaaggcacaatttcgatttc

SEQ ID NO: 26183 - DNA, 23 bp, Artificial sequence
  SiRNA target sequence
ttgaaggcacaatttcgatttct

SEQ ID NO: 26184 - DNA, 23 bp, Artificial sequence
  SiRNA target sequence
tgaaggcacaatttcgatttctt

SEQ ID NO: 26185 - DNA, 23 bp, Artificial sequence
  SiRNA target sequence
gaaggcacaatttcgatttcttg

SEQ ID NO: 26186 - DNA, 23 bp, Artificial sequence
  SiRNA target sequence
aaggcacaatttcgatttcttgc

SEQ ID NO: 26187 - DNA, 23 bp, Artificial sequence
  SiRNA target sequence
aggcacaatttcgatttcttgct

SEQ ID NO: 26188 - DNA, 23 bp, Artificial sequence
  SiRNA target sequence
ggcacaatttcgatttcttgctt

SEQ ID NO: 26189 - DNA, 23 bp, Artificial sequence
  SiRNA target sequence
gcacaatttcgatttcttgcttt

SEQ ID NO: 26190 - DNA, 23 bp, Artificial sequence
  SiRNA target sequence
cacaatttcgatttcttgctttt

SEQ ID NO: 26191 - DNA, 23 bp, Artificial sequence
  SiRNA target sequence
acaatttcgatttcttgcttttt

SEQ ID NO: 26192 - DNA, 23 bp, Artificial sequence
  SiRNA target sequence
caatttcgatttcttgctttttt

SEQ ID NO: 26193 - DNA, 23 bp, Artificial sequence
  SiRNA target sequence
aatttcgatttcttgcttttttt

SEQ ID NO: 26194 - DNA, 23 bp, Artificial sequence
  SiRNA target sequence
atttcgatttcttgctttttttt

SEQ ID NO: 26195 - DNA, 23 bp, Artificial sequence
  SiRNA target sequence
tttcgatttcttgcttttttttc

SEQ ID NO: 26196 - DNA, 23 bp, Artificial sequence
  SiRNA target sequence
ttcgatttcttgcttttttttcg

SEQ ID NO: 26197 - DNA, 23 bp, Artificial sequence
  SiRNA target sequence
tcgatttcttgcttttttttcgt

SEQ ID NO: 26198 - DNA, 23 bp, Artificial sequence
  SiRNA target sequence
cgatttcttgcttttttttcgtt

SEQ ID NO: 26199 - DNA, 23 bp, Artificial sequence
  SiRNA target sequence
gatttcttgcttttttttcgtta

SEQ ID NO: 26200 - DNA, 23 bp, Artificial sequence
  SiRNA target sequence
atttcttgcttttttttcgttat

SEQ ID NO: 26201 - DNA, 23 bp, Artificial sequence
  SiRNA target sequence
tttcttgcttttttttcgttatc

SEQ ID NO: 26202 - DNA, 23 bp, Artificial sequence
  SiRNA target sequence
ttcttgcttttttttcgttatcc

SEQ ID NO: 26203 - DNA, 23 bp, Artificial sequence
  SiRNA target sequence
tcttgcttttttttcgttatccc

SEQ ID NO: 26204 - DNA, 23 bp, Artificial sequence
  SiRNA target sequence
cttgcttttttttcgttatcccg

SEQ ID NO: 26205 - DNA, 23 bp, Artificial sequence
  SiRNA target sequence
ttgcttttttttcgttatcccgt

SEQ ID NO: 26206 - DNA, 23 bp, Artificial sequence
  SiRNA target sequence
tgcttttttttcgttatcccgtc

SEQ ID NO: 26207 - DNA, 23 bp, Artificial sequence
  SiRNA target sequence
gcttttttttcgttatcccgtct

SEQ ID NO: 26208 - DNA, 23 bp, Artificial sequence
  SiRNA target sequence
cttttttttcgttatcccgtctt

SEQ ID NO: 26209 - DNA, 23 bp, Artificial sequence
  SiRNA target sequence
ttttttttcgttatcccgtcttg

SEQ ID NO: 26210 - DNA, 23 bp, Artificial sequence
  SiRNA target sequence
tttttttcgttatcccgtcttgc

SEQ ID NO: 26211 - DNA, 23 bp, Artificial sequence
  SiRNA target sequence
ttttttcgttatcccgtcttgcg

SEQ ID NO: 26212 - DNA, 23 bp, Artificial sequence
  SiRNA target sequence
tttttcgttatcccgtcttgcgc

SEQ ID NO: 26213 - DNA, 23 bp, Artificial sequence
  SiRNA target sequence
ttttcgttatcccgtcttgcgca

SEQ ID NO: 26214 - DNA, 23 bp, Artificial sequence
  SiRNA target sequence
tttcgttatcccgtcttgcgcag

SEQ ID NO: 26215 - DNA, 23 bp, Artificial sequence
  SiRNA target sequence
ttcgttatcccgtcttgcgcaga

SEQ ID NO: 26216 - DNA, 23 bp, Artificial sequence
  SiRNA target sequence
tcgttatcccgtcttgcgcagat

SEQ ID NO: 26217 - DNA, 23 bp, Artificial sequence
  SiRNA target sequence
cgttatcccgtcttgcgcagata

SEQ ID NO: 26218 - DNA, 23 bp, Artificial sequence
  SiRNA target sequence
gttatcccgtcttgcgcagatac

SEQ ID NO: 26219 - DNA, 23 bp, Artificial sequence
  SiRNA target sequence
ttatcccgtcttgcgcagatact

SEQ ID NO: 26220 - DNA, 23 bp, Artificial sequence
  SiRNA target sequence
tatcccgtcttgcgcagatactt

SEQ ID NO: 26221 - DNA, 23 bp, Artificial sequence
  SiRNA target sequence
atcccgtcttgcgcagatacttt

SEQ ID NO: 26222 - DNA, 23 bp, Artificial sequence
  SiRNA target sequence
tcccgtcttgcgcagatactttg

SEQ ID NO: 26223 - DNA, 23 bp, Artificial sequence
  SiRNA target sequence
cccgtcttgcgcagatactttgt

SEQ ID NO: 26224 - DNA, 23 bp, Artificial sequence
  SiRNA target sequence
ccgtcttgcgcagatactttgta

SEQ ID NO: 26225 - DNA, 23 bp, Artificial sequence
  SiRNA target sequence
cgtcttgcgcagatactttgtat

SEQ ID NO: 26226 - DNA, 23 bp, Artificial sequence
  SiRNA target sequence
gtcttgcgcagatactttgtata

SEQ ID NO: 26227 - DNA, 23 bp, Artificial sequence
  SiRNA target sequence
tcttgcgcagatactttgtatat

SEQ ID NO: 26228 - DNA, 23 bp, Artificial sequence
  SiRNA target sequence
cttgcgcagatactttgtatatt

SEQ ID NO: 26229 - DNA, 23 bp, Artificial sequence
  SiRNA target sequence
ttgcgcagatactttgtatattc

SEQ ID NO: 26230 - DNA, 23 bp, Artificial sequence
  SiRNA target sequence
tgcgcagatactttgtatattcc

SEQ ID NO: 26231 - DNA, 23 bp, Artificial sequence
  SiRNA target sequence
gcgcagatactttgtatattccg

SEQ ID NO: 26232 - DNA, 23 bp, Artificial sequence
  SiRNA target sequence
cgcagatactttgtatattccgt

SEQ ID NO: 26233 - DNA, 23 bp, Artificial sequence
  SiRNA target sequence
gcagatactttgtatattccgtt

SEQ ID NO: 26234 - DNA, 23 bp, Artificial sequence
  SiRNA target sequence
cagatactttgtatattccgtta

SEQ ID NO: 26235 - DNA, 23 bp, Artificial sequence
  SiRNA target sequence
agatactttgtatattccgttag

SEQ ID NO: 26236 - DNA, 23 bp, Artificial sequence
  SiRNA target sequence
gatactttgtatattccgttagc

SEQ ID NO: 26237 - DNA, 23 bp, Artificial sequence
  SiRNA target sequence
atactttgtatattccgttagca

SEQ ID NO: 26238 - DNA, 23 bp, Artificial sequence
  SiRNA target sequence
tactttgtatattccgttagcat

SEQ ID NO: 26239 - DNA, 23 bp, Artificial sequence
  SiRNA target sequence
actttgtatattccgttagcatc

SEQ ID NO: 26240 - DNA, 23 bp, Artificial sequence
  SiRNA target sequence
ctttgtatattccgttagcatcg

SEQ ID NO: 26241 - DNA, 23 bp, Artificial sequence
  SiRNA target sequence
tttgtatattccgttagcatcgg

SEQ ID NO: 26242 - DNA, 23 bp, Artificial sequence
  SiRNA target sequence
ttgtatattccgttagcatcggc

SEQ ID NO: 26243 - DNA, 23 bp, Artificial sequence
  SiRNA target sequence
tgtatattccgttagcatcggct

SEQ ID NO: 26244 - DNA, 23 bp, Artificial sequence
  SiRNA target sequence
gtatattccgttagcatcggctt

SEQ ID NO: 26245 - DNA, 23 bp, Artificial sequence
  SiRNA target sequence
tatattccgttagcatcggcttc

SEQ ID NO: 26246 - DNA, 23 bp, Artificial sequence
  SiRNA target sequence
atattccgttagcatcggcttca

SEQ ID NO: 26247 - DNA, 23 bp, Artificial sequence
  SiRNA target sequence
tattccgttagcatcggcttcaa

SEQ ID NO: 26248 - DNA, 23 bp, Artificial sequence
  SiRNA target sequence
attccgttagcatcggcttcaaa

SEQ ID NO: 26249 - DNA, 23 bp, Artificial sequence
  SiRNA target sequence
ttccgttagcatcggcttcaaat

SEQ ID NO: 26250 - DNA, 23 bp, Artificial sequence
  SiRNA target sequence
tccgttagcatcggcttcaaatg

SEQ ID NO: 26251 - DNA, 23 bp, Artificial sequence
  SiRNA target sequence
ccgttagcatcggcttcaaatgt

SEQ ID NO: 26252 - DNA, 23 bp, Artificial sequence
  SiRNA target sequence
cgttagcatcggcttcaaatgta

SEQ ID NO: 26253 - DNA, 23 bp, Artificial sequence
  SiRNA target sequence
gttagcatcggcttcaaatgtaa

SEQ ID NO: 26254 - DNA, 23 bp, Artificial sequence
  SiRNA target sequence
ttagcatcggcttcaaatgtaac

SEQ ID NO: 26255 - DNA, 23 bp, Artificial sequence
  SiRNA target sequence
tagcatcggcttcaaatgtaaca

SEQ ID NO: 26256 - DNA, 23 bp, Artificial sequence
  SiRNA target sequence
agcatcggcttcaaatgtaacat

SEQ ID NO: 26257 - DNA, 23 bp, Artificial sequence
  SiRNA target sequence
gcatcggcttcaaatgtaacatc

SEQ ID NO: 26258 - DNA, 23 bp, Artificial sequence
  SiRNA target sequence
catcggcttcaaatgtaacatct

SEQ ID NO: 26259 - DNA, 23 bp, Artificial sequence
  SiRNA target sequence
atcggcttcaaatgtaacatcta

SEQ ID NO: 26260 - DNA, 23 bp, Artificial sequence
  SiRNA target sequence
tcggcttcaaatgtaacatctat

SEQ ID NO: 26261 - DNA, 23 bp, Artificial sequence
  SiRNA target sequence
cggcttcaaatgtaacatctatc

SEQ ID NO: 26262 - DNA, 23 bp, Artificial sequence
  SiRNA target sequence
ggcttcaaatgtaacatctatct

SEQ ID NO: 26263 - DNA, 23 bp, Artificial sequence
  SiRNA target sequence
gcttcaaatgtaacatctatctt

SEQ ID NO: 26264 - DNA, 23 bp, Artificial sequence
  SiRNA target sequence
cttcaaatgtaacatctatcttt

SEQ ID NO: 26265 - DNA, 23 bp, Artificial sequence
  SiRNA target sequence
ttcaaatgtaacatctatctttg

SEQ ID NO: 26266 - DNA, 23 bp, Artificial sequence
  SiRNA target sequence
tcaaatgtaacatctatctttgg

SEQ ID NO: 26267 - DNA, 23 bp, Artificial sequence
  SiRNA target sequence
caaatgtaacatctatctttgga

SEQ ID NO: 26268 - DNA, 23 bp, Artificial sequence
  SiRNA target sequence
aaatgtaacatctatctttggaa

SEQ ID NO: 26269 - DNA, 23 bp, Artificial sequence
  SiRNA target sequence
aatgtaacatctatctttggaat

SEQ ID NO: 26270 - DNA, 23 bp, Artificial sequence
  SiRNA target sequence
atgtaacatctatctttggaata

SEQ ID NO: 26271 - DNA, 23 bp, Artificial sequence
  SiRNA target sequence
tgtaacatctatctttggaatac

SEQ ID NO: 26272 - DNA, 23 bp, Artificial sequence
  SiRNA target sequence
gtaacatctatctttggaatacc

SEQ ID NO: 26273 - DNA, 23 bp, Artificial sequence
  SiRNA target sequence
taacatctatctttggaatacct

SEQ ID NO: 26274 - DNA, 23 bp, Artificial sequence
  SiRNA target sequence
aacatctatctttggaatacctg

SEQ ID NO: 26275 - DNA, 23 bp, Artificial sequence
  SiRNA target sequence
acatctatctttggaatacctgc

SEQ ID NO: 26276 - DNA, 23 bp, Artificial sequence
  SiRNA target sequence
catctatctttggaatacctgca

SEQ ID NO: 26277 - DNA, 23 bp, Artificial sequence
  SiRNA target sequence
atctatctttggaatacctgcag

SEQ ID NO: 26278 - DNA, 23 bp, Artificial sequence
  SiRNA target sequence
tctatctttggaatacctgcagg

SEQ ID NO: 26279 - DNA, 23 bp, Artificial sequence
  SiRNA target sequence
ctatctttggaatacctgcaggt

SEQ ID NO: 26280 - DNA, 23 bp, Artificial sequence
  SiRNA target sequence
tatctttggaatacctgcaggtg

SEQ ID NO: 26281 - DNA, 23 bp, Artificial sequence
  SiRNA target sequence
atctttggaatacctgcaggtgc

SEQ ID NO: 26282 - DNA, 23 bp, Artificial sequence
  SiRNA target sequence
tctttggaatacctgcaggtgct

SEQ ID NO: 26283 - DNA, 23 bp, Artificial sequence
  SiRNA target sequence
ctttggaatacctgcaggtgctt

SEQ ID NO: 26284 - DNA, 23 bp, Artificial sequence
  SiRNA target sequence
tttggaatacctgcaggtgcttt

SEQ ID NO: 26285 - DNA, 23 bp, Artificial sequence
  SiRNA target sequence
ttggaatacctgcaggtgcttta

SEQ ID NO: 26286 - DNA, 23 bp, Artificial sequence
  SiRNA target sequence
tggaatacctgcaggtgctttag

SEQ ID NO: 26287 - DNA, 23 bp, Artificial sequence
  SiRNA target sequence
ggaatacctgcaggtgctttagg

SEQ ID NO: 26288 - DNA, 23 bp, Artificial sequence
  SiRNA target sequence
gaatacctgcaggtgctttagga

SEQ ID NO: 26289 - DNA, 23 bp, Artificial sequence
  SiRNA target sequence
aatacctgcaggtgctttaggaa

SEQ ID NO: 26290 - DNA, 23 bp, Artificial sequence
  SiRNA target sequence
atacctgcaggtgctttaggaat

SEQ ID NO: 26291 - DNA, 23 bp, Artificial sequence
  SiRNA target sequence
tacctgcaggtgctttaggaatg

SEQ ID NO: 26292 - DNA, 23 bp, Artificial sequence
  SiRNA target sequence
acctgcaggtgctttaggaatgt

SEQ ID NO: 26293 - DNA, 23 bp, Artificial sequence
  SiRNA target sequence
cctgcaggtgctttaggaatgtt

SEQ ID NO: 26294 - DNA, 23 bp, Artificial sequence
  SiRNA target sequence
ctgcaggtgctttaggaatgttt

SEQ ID NO: 26295 - DNA, 23 bp, Artificial sequence
  SiRNA target sequence
tgcaggtgctttaggaatgtttt

SEQ ID NO: 26296 - DNA, 23 bp, Artificial sequence
  SiRNA target sequence
gcaggtgctttaggaatgttttt

SEQ ID NO: 26297 - DNA, 23 bp, Artificial sequence
  SiRNA target sequence
caggtgctttaggaatgtttttg

SEQ ID NO: 26298 - DNA, 23 bp, Artificial sequence
  SiRNA target sequence
aggtgctttaggaatgtttttga

SEQ ID NO: 26299 - DNA, 23 bp, Artificial sequence
  SiRNA target sequence
ggtgctttaggaatgtttttgag

SEQ ID NO: 26300 - DNA, 23 bp, Artificial sequence
  SiRNA target sequence
gtgctttaggaatgtttttgagc

SEQ ID NO: 26301 - DNA, 23 bp, Artificial sequence
  SiRNA target sequence
tgctttaggaatgtttttgagct

SEQ ID NO: 26302 - DNA, 23 bp, Artificial sequence
  SiRNA target sequence
gctttaggaatgtttttgagctt

SEQ ID NO: 26303 - DNA, 23 bp, Artificial sequence
  SiRNA target sequence
ctttaggaatgtttttgagcttt

SEQ ID NO: 26304 - DNA, 23 bp, Artificial sequence
  SiRNA target sequence
tttaggaatgtttttgagcttta

SEQ ID NO: 26305 - DNA, 23 bp, Artificial sequence
  SiRNA target sequence
ttaggaatgtttttgagctttat

SEQ ID NO: 26306 - DNA, 23 bp, Artificial sequence
  SiRNA target sequence
taggaatgtttttgagctttata

SEQ ID NO: 26307 - DNA, 23 bp, Artificial sequence
  SiRNA target sequence
aggaatgtttttgagctttatag

SEQ ID NO: 26308 - DNA, 23 bp, Artificial sequence
  SiRNA target sequence
ggaatgtttttgagctttatagc

SEQ ID NO: 26309 - DNA, 23 bp, Artificial sequence
  SiRNA target sequence
gaatgtttttgagctttatagct

SEQ ID NO: 26310 - DNA, 23 bp, Artificial sequence
  SiRNA target sequence
aatgtttttgagctttatagctc

SEQ ID NO: 26311 - DNA, 23 bp, Artificial sequence
  SiRNA target sequence
atgtttttgagctttatagctcc

SEQ ID NO: 26312 - DNA, 23 bp, Artificial sequence
  SiRNA target sequence
tgtttttgagctttatagctcct

SEQ ID NO: 26313 - DNA, 23 bp, Artificial sequence
  SiRNA target sequence
gtttttgagctttatagctccta

SEQ ID NO: 26314 - DNA, 23 bp, Artificial sequence
  SiRNA target sequence
tttttgagctttatagctcctaa

SEQ ID NO: 26315 - DNA, 23 bp, Artificial sequence
  SiRNA target sequence
ttttgagctttatagctcctaaa

SEQ ID NO: 26316 - DNA, 23 bp, Artificial sequence
  SiRNA target sequence
tttgagctttatagctcctaaat

SEQ ID NO: 26317 - DNA, 23 bp, Artificial sequence
  SiRNA target sequence
ttgagctttatagctcctaaata

SEQ ID NO: 26318 - DNA, 23 bp, Artificial sequence
  SiRNA target sequence
tgagctttatagctcctaaatat

SEQ ID NO: 26319 - DNA, 23 bp, Artificial sequence
  SiRNA target sequence
gagctttatagctcctaaatatt

SEQ ID NO: 26320 - DNA, 23 bp, Artificial sequence
  SiRNA target sequence
agctttatagctcctaaatattt

SEQ ID NO: 26321 - DNA, 23 bp, Artificial sequence
  SiRNA target sequence
gctttatagctcctaaatattta

SEQ ID NO: 26322 - DNA, 23 bp, Artificial sequence
  SiRNA target sequence
ctttatagctcctaaatatttat

SEQ ID NO: 26323 - DNA, 23 bp, Artificial sequence
  SiRNA target sequence
tttatagctcctaaatatttatt

SEQ ID NO: 26324 - DNA, 23 bp, Artificial sequence
  SiRNA target sequence
ttatagctcctaaatatttattg

SEQ ID NO: 26325 - DNA, 23 bp, Artificial sequence
  SiRNA target sequence
tatagctcctaaatatttattgt

SEQ ID NO: 26326 - DNA, 23 bp, Artificial sequence
  SiRNA target sequence
atagctcctaaatatttattgtc

SEQ ID NO: 26327 - DNA, 23 bp, Artificial sequence
  SiRNA target sequence
tagctcctaaatatttattgtct

SEQ ID NO: 26328 - DNA, 23 bp, Artificial sequence
  SiRNA target sequence
agctcctaaatatttattgtctt

SEQ ID NO: 26329 - DNA, 23 bp, Artificial sequence
  SiRNA target sequence
gctcctaaatatttattgtcttt

SEQ ID NO: 26330 - DNA, 23 bp, Artificial sequence
  SiRNA target sequence
ctcctaaatatttattgtctttt

SEQ ID NO: 26331 - DNA, 23 bp, Artificial sequence
  SiRNA target sequence
tcctaaatatttattgtctttta

SEQ ID NO: 26332 - DNA, 23 bp, Artificial sequence
  SiRNA target sequence
cctaaatatttattgtcttttac

SEQ ID NO: 26333 - DNA, 23 bp, Artificial sequence
  SiRNA target sequence
ctaaatatttattgtcttttacc

SEQ ID NO: 26334 - DNA, 23 bp, Artificial sequence
  SiRNA target sequence
taaatatttattgtcttttacca

SEQ ID NO: 26335 - DNA, 23 bp, Artificial sequence
  SiRNA target sequence
aaatatttattgtcttttaccat

SEQ ID NO: 26336 - DNA, 23 bp, Artificial sequence
  SiRNA target sequence
aatatttattgtcttttaccatc

SEQ ID NO: 26337 - DNA, 23 bp, Artificial sequence
  SiRNA target sequence
atatttattgtcttttaccatct

SEQ ID NO: 26338 - DNA, 23 bp, Artificial sequence
  SiRNA target sequence
tatttattgtcttttaccatctt

SEQ ID NO: 26339 - DNA, 23 bp, Artificial sequence
  SiRNA target sequence
atttattgtcttttaccatcttt

SEQ ID NO: 26340 - DNA, 23 bp, Artificial sequence
  SiRNA target sequence
tttattgtcttttaccatctttc

SEQ ID NO: 26341 - DNA, 23 bp, Artificial sequence
  SiRNA target sequence
ttattgtcttttaccatctttct

SEQ ID NO: 26342 - DNA, 23 bp, Artificial sequence
  SiRNA target sequence
tattgtcttttaccatctttctt

SEQ ID NO: 26343 - DNA, 23 bp, Artificial sequence
  SiRNA target sequence
attgtcttttaccatctttcttt

SEQ ID NO: 26344 - DNA, 23 bp, Artificial sequence
  SiRNA target sequence
ttgtcttttaccatctttctttc

SEQ ID NO: 26345 - DNA, 23 bp, Artificial sequence
  SiRNA target sequence
tgtcttttaccatctttctttct

SEQ ID NO: 26346 - DNA, 23 bp, Artificial sequence
  SiRNA target sequence
gtcttttaccatctttctttctc

SEQ ID NO: 26347 - DNA, 23 bp, Artificial sequence
  SiRNA target sequence
tcttttaccatctttctttctcc

SEQ ID NO: 26348 - DNA, 23 bp, Artificial sequence
  SiRNA target sequence
cttttaccatctttctttctcct

SEQ ID NO: 26349 - DNA, 23 bp, Artificial sequence
  SiRNA target sequence
ttttaccatctttctttctcctt

SEQ ID NO: 26350 - DNA, 23 bp, Artificial sequence
  SiRNA target sequence
tttaccatctttctttctccttg

SEQ ID NO: 26351 - DNA, 23 bp, Artificial sequence
  SiRNA target sequence
ttaccatctttctttctccttga

SEQ ID NO: 26352 - DNA, 23 bp, Artificial sequence
  SiRNA target sequence
taccatctttctttctccttgat

SEQ ID NO: 26353 - DNA, 23 bp, Artificial sequence
  SiRNA target sequence
accatctttctttctccttgata

SEQ ID NO: 26354 - DNA, 23 bp, Artificial sequence
  SiRNA target sequence
ccatctttctttctccttgatat

SEQ ID NO: 26355 - DNA, 23 bp, Artificial sequence
  SiRNA target sequence
catctttctttctccttgatata

SEQ ID NO: 26356 - DNA, 23 bp, Artificial sequence
  SiRNA target sequence
atctttctttctccttgatatat

SEQ ID NO: 26357 - DNA, 23 bp, Artificial sequence
  SiRNA target sequence
tctttctttctccttgatatatt

SEQ ID NO: 26358 - DNA, 23 bp, Artificial sequence
  SiRNA target sequence
ctttctttctccttgatatattc

SEQ ID NO: 26359 - DNA, 23 bp, Artificial sequence
  SiRNA target sequence
tttctttctccttgatatattct

SEQ ID NO: 26360 - DNA, 23 bp, Artificial sequence
  SiRNA target sequence
ttctttctccttgatatattcta

SEQ ID NO: 26361 - DNA, 23 bp, Artificial sequence
  SiRNA target sequence
tctttctccttgatatattctaa

SEQ ID NO: 26362 - DNA, 23 bp, Artificial sequence
  SiRNA target sequence
ctttctccttgatatattctaat

SEQ ID NO: 26363 - DNA, 23 bp, Artificial sequence
  SiRNA target sequence
tttctccttgatatattctaata

SEQ ID NO: 26364 - DNA, 23 bp, Artificial sequence
  SiRNA target sequence
ttctccttgatatattctaatat

SEQ ID NO: 26365 - DNA, 23 bp, Artificial sequence
  SiRNA target sequence
tctccttgatatattctaatatc

SEQ ID NO: 26366 - DNA, 23 bp, Artificial sequence
  SiRNA target sequence
ctccttgatatattctaatatct

SEQ ID NO: 26367 - DNA, 23 bp, Artificial sequence
  SiRNA target sequence
tccttgatatattctaatatcta

SEQ ID NO: 26368 - DNA, 23 bp, Artificial sequence
  SiRNA target sequence
ccttgatatattctaatatctac

SEQ ID NO: 26369 - DNA, 23 bp, Artificial sequence
  SiRNA target sequence
cttgatatattctaatatctact

SEQ ID NO: 26370 - DNA, 23 bp, Artificial sequence
  SiRNA target sequence
ttgatatattctaatatctactt

SEQ ID NO: 26371 - DNA, 23 bp, Artificial sequence
  SiRNA target sequence
tgatatattctaatatctacttc

SEQ ID NO: 26372 - DNA, 23 bp, Artificial sequence
  SiRNA target sequence
gatatattctaatatctacttcg

SEQ ID NO: 26373 - DNA, 23 bp, Artificial sequence
  SiRNA target sequence
atatattctaatatctacttcgg

SEQ ID NO: 26374 - DNA, 23 bp, Artificial sequence
  SiRNA target sequence
tatattctaatatctacttcgga

SEQ ID NO: 26375 - DNA, 23 bp, Artificial sequence
  SiRNA target sequence
atattctaatatctacttcggat

SEQ ID NO: 26376 - DNA, 23 bp, Artificial sequence
  SiRNA target sequence
tattctaatatctacttcggatt

SEQ ID NO: 26377 - DNA, 23 bp, Artificial sequence
  SiRNA target sequence
attctaatatctacttcggattg

SEQ ID NO: 26378 - DNA, 23 bp, Artificial sequence
  SiRNA target sequence
ttctaatatctacttcggattga

SEQ ID NO: 26379 - DNA, 23 bp, Artificial sequence
  SiRNA target sequence
tctaatatctacttcggattgat

SEQ ID NO: 26380 - DNA, 23 bp, Artificial sequence
  SiRNA target sequence
ctaatatctacttcggattgatt

SEQ ID NO: 26381 - DNA, 23 bp, Artificial sequence
  SiRNA target sequence
taatatctacttcggattgatta

SEQ ID NO: 26382 - DNA, 23 bp, Artificial sequence
  SiRNA target sequence
aatatctacttcggattgattat

SEQ ID NO: 26383 - DNA, 23 bp, Artificial sequence
  SiRNA target sequence
atatctacttcggattgattatc

SEQ ID NO: 26384 - DNA, 23 bp, Artificial sequence
  SiRNA target sequence
tatctacttcggattgattatct

SEQ ID NO: 26385 - DNA, 23 bp, Artificial sequence
  SiRNA target sequence
atctacttcggattgattatctt

SEQ ID NO: 26386 - DNA, 23 bp, Artificial sequence
  SiRNA target sequence
tctacttcggattgattatcttc

SEQ ID NO: 26387 - DNA, 23 bp, Artificial sequence
  SiRNA target sequence
ctacttcggattgattatcttca

SEQ ID NO: 26388 - DNA, 23 bp, Artificial sequence
  SiRNA target sequence
tacttcggattgattatcttcag

SEQ ID NO: 26389 - DNA, 23 bp, Artificial sequence
  SiRNA target sequence
acttcggattgattatcttcaga

SEQ ID NO: 26390 - DNA, 23 bp, Artificial sequence
  SiRNA target sequence
cttcggattgattatcttcagag

SEQ ID NO: 26391 - DNA, 23 bp, Artificial sequence
  SiRNA target sequence
ttcggattgattatcttcagagg

SEQ ID NO: 26392 - DNA, 23 bp, Artificial sequence
  SiRNA target sequence
tcggattgattatcttcagaggt

SEQ ID NO: 26393 - DNA, 23 bp, Artificial sequence
  SiRNA target sequence
cggattgattatcttcagaggta

SEQ ID NO: 26394 - DNA, 23 bp, Artificial sequence
  SiRNA target sequence
ggattgattatcttcagaggtag

SEQ ID NO: 26395 - DNA, 23 bp, Artificial sequence
  SiRNA target sequence
gattgattatcttcagaggtaga

SEQ ID NO: 26396 - DNA, 23 bp, Artificial sequence
  SiRNA target sequence
attgattatcttcagaggtagaa

SEQ ID NO: 26397 - DNA, 23 bp, Artificial sequence
  SiRNA target sequence
ttgattatcttcagaggtagaaa

SEQ ID NO: 26398 - DNA, 23 bp, Artificial sequence
  SiRNA target sequence
tgattatcttcagaggtagaaaa

SEQ ID NO: 26399 - DNA, 23 bp, Artificial sequence
  SiRNA target sequence
gattatcttcagaggtagaaaaa

SEQ ID NO: 26400 - DNA, 23 bp, Artificial sequence
  SiRNA target sequence
attatcttcagaggtagaaaaac

SEQ ID NO: 26401 - DNA, 23 bp, Artificial sequence
  SiRNA target sequence
ttatcttcagaggtagaaaaact

SEQ ID NO: 26402 - DNA, 23 bp, Artificial sequence
  SiRNA target sequence
tatcttcagaggtagaaaaactg

SEQ ID NO: 26403 - DNA, 23 bp, Artificial sequence
  SiRNA target sequence
atcttcagaggtagaaaaactgt

SEQ ID NO: 26404 - DNA, 23 bp, Artificial sequence
  SiRNA target sequence
tcttcagaggtagaaaaactgtg

SEQ ID NO: 26405 - DNA, 23 bp, Artificial sequence
  SiRNA target sequence
cttcagaggtagaaaaactgtgt

SEQ ID NO: 26406 - DNA, 23 bp, Artificial sequence
  SiRNA target sequence
ttcagaggtagaaaaactgtgtg

SEQ ID NO: 26407 - DNA, 23 bp, Artificial sequence
  SiRNA target sequence
tcagaggtagaaaaactgtgtgt

SEQ ID NO: 26408 - DNA, 23 bp, Artificial sequence
  SiRNA target sequence
cagaggtagaaaaactgtgtgtt

SEQ ID NO: 26409 - DNA, 23 bp, Artificial sequence
  SiRNA target sequence
agaggtagaaaaactgtgtgttt

SEQ ID NO: 26410 - DNA, 23 bp, Artificial sequence
  SiRNA target sequence
gaggtagaaaaactgtgtgtttc

SEQ ID NO: 26411 - DNA, 23 bp, Artificial sequence
  SiRNA target sequence
aggtagaaaaactgtgtgtttcc

SEQ ID NO: 26412 - DNA, 23 bp, Artificial sequence
  SiRNA target sequence
ggtagaaaaactgtgtgtttcct

SEQ ID NO: 26413 - DNA, 23 bp, Artificial sequence
  SiRNA target sequence
gtagaaaaactgtgtgtttcctt

SEQ ID NO: 26414 - DNA, 23 bp, Artificial sequence
  SiRNA target sequence
tagaaaaactgtgtgtttcctta

SEQ ID NO: 26415 - DNA, 23 bp, Artificial sequence
  SiRNA target sequence
agaaaaactgtgtgtttccttaa

SEQ ID NO: 26416 - DNA, 23 bp, Artificial sequence
  SiRNA target sequence
gaaaaactgtgtgtttccttaaa

SEQ ID NO: 26417 - DNA, 23 bp, Artificial sequence
  SiRNA target sequence
aaaaactgtgtgtttccttaaat

SEQ ID NO: 26418 - DNA, 23 bp, Artificial sequence
  SiRNA target sequence
aaaactgtgtgtttccttaaatg

SEQ ID NO: 26419 - DNA, 23 bp, Artificial sequence
  SiRNA target sequence
aaactgtgtgtttccttaaatgg

SEQ ID NO: 26420 - DNA, 23 bp, Artificial sequence
  SiRNA target sequence
aactgtgtgtttccttaaatgga

SEQ ID NO: 26421 - DNA, 23 bp, Artificial sequence
  SiRNA target sequence
actgtgtgtttccttaaatggaa

SEQ ID NO: 26422 - DNA, 23 bp, Artificial sequence
  SiRNA target sequence
ctgtgtgtttccttaaatggaat

SEQ ID NO: 26423 - DNA, 23 bp, Artificial sequence
  SiRNA target sequence
tgtgtgtttccttaaatggaata

SEQ ID NO: 26424 - DNA, 23 bp, Artificial sequence
  SiRNA target sequence
gtgtgtttccttaaatggaatag

SEQ ID NO: 26425 - DNA, 23 bp, Artificial sequence
  SiRNA target sequence
tgtgtttccttaaatggaatagt

SEQ ID NO: 26426 - DNA, 23 bp, Artificial sequence
  SiRNA target sequence
gtgtttccttaaatggaatagta

SEQ ID NO: 26427 - DNA, 23 bp, Artificial sequence
  SiRNA target sequence
tgtttccttaaatggaatagtag

SEQ ID NO: 26428 - DNA, 23 bp, Artificial sequence
  SiRNA target sequence
gtttccttaaatggaatagtaga

SEQ ID NO: 26429 - DNA, 23 bp, Artificial sequence
  SiRNA target sequence
tttccttaaatggaatagtagaa

SEQ ID NO: 26430 - DNA, 23 bp, Artificial sequence
  SiRNA target sequence
ttccttaaatggaatagtagaat

SEQ ID NO: 26431 - DNA, 23 bp, Artificial sequence
  SiRNA target sequence
tccttaaatggaatagtagaatt

SEQ ID NO: 26432 - DNA, 23 bp, Artificial sequence
  SiRNA target sequence
ccttaaatggaatagtagaattt

SEQ ID NO: 26433 - DNA, 23 bp, Artificial sequence
  SiRNA target sequence
cttaaatggaatagtagaatttc

SEQ ID NO: 26434 - DNA, 23 bp, Artificial sequence
  SiRNA target sequence
ttaaatggaatagtagaatttct

SEQ ID NO: 26435 - DNA, 23 bp, Artificial sequence
  SiRNA target sequence
taaatggaatagtagaatttcta

SEQ ID NO: 26436 - DNA, 23 bp, Artificial sequence
  SiRNA target sequence
aaatggaatagtagaatttctat

SEQ ID NO: 26437 - DNA, 23 bp, Artificial sequence
  SiRNA target sequence
aatggaatagtagaatttctatg

SEQ ID NO: 26438 - DNA, 23 bp, Artificial sequence
  SiRNA target sequence
atggaatagtagaatttctatga

SEQ ID NO: 26439 - DNA, 23 bp, Artificial sequence
  SiRNA target sequence
tggaatagtagaatttctatgaa

SEQ ID NO: 26440 - DNA, 23 bp, Artificial sequence
  SiRNA target sequence
ggaatagtagaatttctatgaat

SEQ ID NO: 26441 - DNA, 23 bp, Artificial sequence
  SiRNA target sequence
gaatagtagaatttctatgaatt

SEQ ID NO: 26442 - DNA, 23 bp, Artificial sequence
  SiRNA target sequence
aatagtagaatttctatgaatta

SEQ ID NO: 26443 - DNA, 23 bp, Artificial sequence
  SiRNA target sequence
atagtagaatttctatgaattat

SEQ ID NO: 26444 - DNA, 23 bp, Artificial sequence
  SiRNA target sequence
tagtagaatttctatgaattatc

SEQ ID NO: 26445 - DNA, 23 bp, Artificial sequence
  SiRNA target sequence
agtagaatttctatgaattatct

SEQ ID NO: 26446 - DNA, 23 bp, Artificial sequence
  SiRNA target sequence
gtagaatttctatgaattatctt

SEQ ID NO: 26447 - DNA, 23 bp, Artificial sequence
  SiRNA target sequence
tagaatttctatgaattatctta

SEQ ID NO: 26448 - DNA, 23 bp, Artificial sequence
  SiRNA target sequence
agaatttctatgaattatcttat

SEQ ID NO: 26449 - DNA, 23 bp, Artificial sequence
  SiRNA target sequence
gaatttctatgaattatcttatt

SEQ ID NO: 26450 - DNA, 23 bp, Artificial sequence
  SiRNA target sequence
aatttctatgaattatcttatta

SEQ ID NO: 26451 - DNA, 23 bp, Artificial sequence
  SiRNA target sequence
atttctatgaattatcttattaa

SEQ ID NO: 26452 - DNA, 23 bp, Artificial sequence
  SiRNA target sequence
tttctatgaattatcttattaaa

SEQ ID NO: 26453 - DNA, 23 bp, Artificial sequence
  SiRNA target sequence
ttctatgaattatcttattaaaa

SEQ ID NO: 26454 - DNA, 23 bp, Artificial sequence
  SiRNA target sequence
tctatgaattatcttattaaaaa

SEQ ID NO: 26455 - DNA, 23 bp, Artificial sequence
  SiRNA target sequence
ctatgaattatcttattaaaaat

SEQ ID NO: 26456 - DNA, 23 bp, Artificial sequence
  SiRNA target sequence
tatgaattatcttattaaaaatc

SEQ ID NO: 26457 - DNA, 23 bp, Artificial sequence
  SiRNA target sequence
atgaattatcttattaaaaatcc

SEQ ID NO: 26458 - DNA, 23 bp, Artificial sequence
  SiRNA target sequence
tgaattatcttattaaaaatccc

SEQ ID NO: 26459 - DNA, 23 bp, Artificial sequence
  SiRNA target sequence
gaattatcttattaaaaatcccg

SEQ ID NO: 26460 - DNA, 23 bp, Artificial sequence
  SiRNA target sequence
aattatcttattaaaaatcccgc

SEQ ID NO: 26461 - DNA, 23 bp, Artificial sequence
  SiRNA target sequence
attatcttattaaaaatcccgcc

SEQ ID NO: 26462 - DNA, 23 bp, Artificial sequence
  SiRNA target sequence
ttatcttattaaaaatcccgccc

SEQ ID NO: 26463 - DNA, 23 bp, Artificial sequence
  SiRNA target sequence
tatcttattaaaaatcccgccca

SEQ ID NO: 26464 - DNA, 23 bp, Artificial sequence
  SiRNA target sequence
atcttattaaaaatcccgcccaa

SEQ ID NO: 26465 - DNA, 23 bp, Artificial sequence
  SiRNA target sequence
tcttattaaaaatcccgcccaaa

SEQ ID NO: 26466 - DNA, 23 bp, Artificial sequence
  SiRNA target sequence
cttattaaaaatcccgcccaaaa

SEQ ID NO: 26467 - DNA, 23 bp, Artificial sequence
  SiRNA target sequence
ttattaaaaatcccgcccaaaag

SEQ ID NO: 26468 - DNA, 23 bp, Artificial sequence
  SiRNA target sequence
tattaaaaatcccgcccaaaagc

SEQ ID NO: 26469 - DNA, 23 bp, Artificial sequence
  SiRNA target sequence
attaaaaatcccgcccaaaagct

SEQ ID NO: 26470 - DNA, 23 bp, Artificial sequence
  SiRNA target sequence
ttaaaaatcccgcccaaaagctc

SEQ ID NO: 26471 - DNA, 23 bp, Artificial sequence
  SiRNA target sequence
taaaaatcccgcccaaaagctct

SEQ ID NO: 26472 - DNA, 23 bp, Artificial sequence
  SiRNA target sequence
aaaaatcccgcccaaaagctcta

SEQ ID NO: 26473 - DNA, 23 bp, Artificial sequence
  SiRNA target sequence
aaaatcccgcccaaaagctctat

SEQ ID NO: 26474 - DNA, 23 bp, Artificial sequence
  SiRNA target sequence
aaatcccgcccaaaagctctata

SEQ ID NO: 26475 - DNA, 23 bp, Artificial sequence
  SiRNA target sequence
aatcccgcccaaaagctctatac

SEQ ID NO: 26476 - DNA, 23 bp, Artificial sequence
  SiRNA target sequence
atcccgcccaaaagctctatacc

SEQ ID NO: 26477 - DNA, 23 bp, Artificial sequence
  SiRNA target sequence
tcccgcccaaaagctctatacct

SEQ ID NO: 26478 - DNA, 23 bp, Artificial sequence
  SiRNA target sequence
cccgcccaaaagctctataccta

SEQ ID NO: 26479 - DNA, 23 bp, Artificial sequence
  SiRNA target sequence
ccgcccaaaagctctatacctaa

SEQ ID NO: 26480 - DNA, 23 bp, Artificial sequence
  SiRNA target sequence
cgcccaaaagctctatacctaaa

SEQ ID NO: 26481 - DNA, 23 bp, Artificial sequence
  SiRNA target sequence
gcccaaaagctctatacctaaac

SEQ ID NO: 26482 - DNA, 23 bp, Artificial sequence
  SiRNA target sequence
cccaaaagctctatacctaaact

SEQ ID NO: 26483 - DNA, 23 bp, Artificial sequence
  SiRNA target sequence
ccaaaagctctatacctaaactc

SEQ ID NO: 26484 - DNA, 23 bp, Artificial sequence
  SiRNA target sequence
caaaagctctatacctaaactca

SEQ ID NO: 26485 - DNA, 23 bp, Artificial sequence
  SiRNA target sequence
aaaagctctatacctaaactcaa

SEQ ID NO: 26486 - DNA, 23 bp, Artificial sequence
  SiRNA target sequence
aaagctctatacctaaactcaat

SEQ ID NO: 26487 - DNA, 23 bp, Artificial sequence
  SiRNA target sequence
aagctctatacctaaactcaatg

SEQ ID NO: 26488 - DNA, 23 bp, Artificial sequence
  SiRNA target sequence
agctctatacctaaactcaatgg

SEQ ID NO: 26489 - DNA, 23 bp, Artificial sequence
  SiRNA target sequence
gctctatacctaaactcaatggt

SEQ ID NO: 26490 - DNA, 23 bp, Artificial sequence
  SiRNA target sequence
ctctatacctaaactcaatggta

SEQ ID NO: 26491 - DNA, 23 bp, Artificial sequence
  SiRNA target sequence
tctatacctaaactcaatggtac

SEQ ID NO: 26492 - DNA, 23 bp, Artificial sequence
  SiRNA target sequence
ctatacctaaactcaatggtact

SEQ ID NO: 26493 - DNA, 23 bp, Artificial sequence
  SiRNA target sequence
tatacctaaactcaatggtacta

SEQ ID NO: 26494 - DNA, 23 bp, Artificial sequence
  SiRNA target sequence
atacctaaactcaatggtactac

SEQ ID NO: 26495 - DNA, 23 bp, Artificial sequence
  SiRNA target sequence
tacctaaactcaatggtactaca

SEQ ID NO: 26496 - DNA, 23 bp, Artificial sequence
  SiRNA target sequence
acctaaactcaatggtactacat

SEQ ID NO: 26497 - DNA, 23 bp, Artificial sequence
  SiRNA target sequence
cctaaactcaatggtactacatc

SEQ ID NO: 26498 - DNA, 23 bp, Artificial sequence
  SiRNA target sequence
ctaaactcaatggtactacatcc

SEQ ID NO: 26499 - DNA, 23 bp, Artificial sequence
  SiRNA target sequence
taaactcaatggtactacatcca

SEQ ID NO: 26500 - DNA, 23 bp, Artificial sequence
  SiRNA target sequence
aaactcaatggtactacatccaa

SEQ ID NO: 26501 - DNA, 23 bp, Artificial sequence
  SiRNA target sequence
aactcaatggtactacatccaat

SEQ ID NO: 26502 - DNA, 23 bp, Artificial sequence
  SiRNA target sequence
actcaatggtactacatccaata

SEQ ID NO: 26503 - DNA, 23 bp, Artificial sequence
  SiRNA target sequence
ctcaatggtactacatccaataa

SEQ ID NO: 26504 - DNA, 23 bp, Artificial sequence
  SiRNA target sequence
tcaatggtactacatccaataat

SEQ ID NO: 26505 - DNA, 23 bp, Artificial sequence
  SiRNA target sequence
caatggtactacatccaataata

SEQ ID NO: 26506 - DNA, 23 bp, Artificial sequence
  SiRNA target sequence
aatggtactacatccaataatag

SEQ ID NO: 26507 - DNA, 23 bp, Artificial sequence
  SiRNA target sequence
atggtactacatccaataatagg

SEQ ID NO: 26508 - DNA, 23 bp, Artificial sequence
  SiRNA target sequence
tggtactacatccaataatagga

SEQ ID NO: 26509 - DNA, 23 bp, Artificial sequence
  SiRNA target sequence
ggtactacatccaataataggac

SEQ ID NO: 26510 - DNA, 23 bp, Artificial sequence
  SiRNA target sequence
gtactacatccaataataggaca

SEQ ID NO: 26511 - DNA, 23 bp, Artificial sequence
  SiRNA target sequence
tactacatccaataataggacat

SEQ ID NO: 26512 - DNA, 23 bp, Artificial sequence
  SiRNA target sequence
actacatccaataataggacatc

SEQ ID NO: 26513 - DNA, 23 bp, Artificial sequence
  SiRNA target sequence
ctacatccaataataggacatct

SEQ ID NO: 26514 - DNA, 23 bp, Artificial sequence
  SiRNA target sequence
tacatccaataataggacatctt

SEQ ID NO: 26515 - DNA, 23 bp, Artificial sequence
  SiRNA target sequence
acatccaataataggacatcttt

SEQ ID NO: 26516 - DNA, 23 bp, Artificial sequence
  SiRNA target sequence
catccaataataggacatctttt

SEQ ID NO: 26517 - DNA, 23 bp, Artificial sequence
  SiRNA target sequence
atccaataataggacatctttta

SEQ ID NO: 26518 - DNA, 23 bp, Artificial sequence
  SiRNA target sequence
tccaataataggacatcttttat

SEQ ID NO: 26519 - DNA, 23 bp, Artificial sequence
  SiRNA target sequence
ccaataataggacatcttttatt

SEQ ID NO: 26520 - DNA, 23 bp, Artificial sequence
  SiRNA target sequence
caataataggacatcttttattt

SEQ ID NO: 26521 - DNA, 23 bp, Artificial sequence
  SiRNA target sequence
aataataggacatcttttatttt

SEQ ID NO: 26522 - DNA, 23 bp, Artificial sequence
  SiRNA target sequence
ataataggacatcttttattttt

SEQ ID NO: 26523 - DNA, 23 bp, Artificial sequence
  SiRNA target sequence
taataggacatcttttatttttc

SEQ ID NO: 26524 - DNA, 23 bp, Artificial sequence
  SiRNA target sequence
aataggacatcttttatttttcc

SEQ ID NO: 26525 - DNA, 23 bp, Artificial sequence
  SiRNA target sequence
ataggacatcttttatttttcct

SEQ ID NO: 26526 - DNA, 23 bp, Artificial sequence
  SiRNA target sequence
taggacatcttttatttttcctt

SEQ ID NO: 26527 - DNA, 23 bp, Artificial sequence
  SiRNA target sequence
aggacatcttttatttttccttc

SEQ ID NO: 26528 - DNA, 23 bp, Artificial sequence
  SiRNA target sequence
ggacatcttttatttttccttct

SEQ ID NO: 26529 - DNA, 23 bp, Artificial sequence
  SiRNA target sequence
gacatcttttatttttccttcta

SEQ ID NO: 26530 - DNA, 23 bp, Artificial sequence
  SiRNA target sequence
acatcttttatttttccttctaa

SEQ ID NO: 26531 - DNA, 23 bp, Artificial sequence
  SiRNA target sequence
catcttttatttttccttctaac

SEQ ID NO: 26532 - DNA, 23 bp, Artificial sequence
  SiRNA target sequence
atcttttatttttccttctaaca

SEQ ID NO: 26533 - DNA, 23 bp, Artificial sequence
  SiRNA target sequence
tcttttatttttccttctaacac

SEQ ID NO: 26534 - DNA, 23 bp, Artificial sequence
  SiRNA target sequence
cttttatttttccttctaacacg

SEQ ID NO: 26535 - DNA, 23 bp, Artificial sequence
  SiRNA target sequence
ttttatttttccttctaacacgc

SEQ ID NO: 26536 - DNA, 23 bp, Artificial sequence
  SiRNA target sequence
tttatttttccttctaacacgcc

SEQ ID NO: 26537 - DNA, 23 bp, Artificial sequence
  SiRNA target sequence
ttatttttccttctaacacgcct

SEQ ID NO: 26538 - DNA, 23 bp, Artificial sequence
  SiRNA target sequence
tatttttccttctaacacgcctg

SEQ ID NO: 26539 - DNA, 23 bp, Artificial sequence
  SiRNA target sequence
atttttccttctaacacgcctgc

SEQ ID NO: 26540 - DNA, 23 bp, Artificial sequence
  SiRNA target sequence
tttttccttctaacacgcctgct

SEQ ID NO: 26541 - DNA, 23 bp, Artificial sequence
  SiRNA target sequence
ttttccttctaacacgcctgctt

SEQ ID NO: 26542 - DNA, 23 bp, Artificial sequence
  SiRNA target sequence
tttccttctaacacgcctgcttg

SEQ ID NO: 26543 - DNA, 23 bp, Artificial sequence
  SiRNA target sequence
ttccttctaacacgcctgcttgt

SEQ ID NO: 26544 - DNA, 23 bp, Artificial sequence
  SiRNA target sequence
tccttctaacacgcctgcttgta

SEQ ID NO: 26545 - DNA, 23 bp, Artificial sequence
  SiRNA target sequence
ccttctaacacgcctgcttgtag

SEQ ID NO: 26546 - DNA, 23 bp, Artificial sequence
  SiRNA target sequence
cttctaacacgcctgcttgtaga

SEQ ID NO: 26547 - DNA, 23 bp, Artificial sequence
  SiRNA target sequence
ttctaacacgcctgcttgtagag

SEQ ID NO: 26548 - DNA, 23 bp, Artificial sequence
  SiRNA target sequence
tctaacacgcctgcttgtagagc

SEQ ID NO: 26549 - DNA, 23 bp, Artificial sequence
  SiRNA target sequence
ctaacacgcctgcttgtagagcg

SEQ ID NO: 26550 - DNA, 23 bp, Artificial sequence
  SiRNA target sequence
taacacgcctgcttgtagagcgg

SEQ ID NO: 26551 - DNA, 23 bp, Artificial sequence
  SiRNA target sequence
aacacgcctgcttgtagagcggc

SEQ ID NO: 26552 - DNA, 23 bp, Artificial sequence
  SiRNA target sequence
acacgcctgcttgtagagcggcc

SEQ ID NO: 26553 - DNA, 23 bp, Artificial sequence
  SiRNA target sequence
cacgcctgcttgtagagcggccc

SEQ ID NO: 26554 - DNA, 23 bp, Artificial sequence
  SiRNA target sequence
acgcctgcttgtagagcggcccc

SEQ ID NO: 26555 - DNA, 23 bp, Artificial sequence
  SiRNA target sequence
cgcctgcttgtagagcggcccct

SEQ ID NO: 26556 - DNA, 23 bp, Artificial sequence
  SiRNA target sequence
gcctgcttgtagagcggcccctt

SEQ ID NO: 26557 - DNA, 23 bp, Artificial sequence
  SiRNA target sequence
cctgcttgtagagcggccccttt

SEQ ID NO: 26558 - DNA, 23 bp, Artificial sequence
  SiRNA target sequence
ctgcttgtagagcggccccttta

SEQ ID NO: 26559 - DNA, 23 bp, Artificial sequence
  SiRNA target sequence
tgcttgtagagcggcccctttag

SEQ ID NO: 26560 - DNA, 23 bp, Artificial sequence
  SiRNA target sequence
gcttgtagagcggcccctttagc

SEQ ID NO: 26561 - DNA, 23 bp, Artificial sequence
  SiRNA target sequence
cttgtagagcggcccctttagca

SEQ ID NO: 26562 - DNA, 23 bp, Artificial sequence
  SiRNA target sequence
ttgtagagcggcccctttagcaa

SEQ ID NO: 26563 - DNA, 23 bp, Artificial sequence
  SiRNA target sequence
tgtagagcggcccctttagcaac

SEQ ID NO: 26564 - DNA, 23 bp, Artificial sequence
  SiRNA target sequence
gtagagcggcccctttagcaaca

SEQ ID NO: 26565 - DNA, 23 bp, Artificial sequence
  SiRNA target sequence
tagagcggcccctttagcaacag

SEQ ID NO: 26566 - DNA, 23 bp, Artificial sequence
  SiRNA target sequence
agagcggcccctttagcaacagc

SEQ ID NO: 26567 - DNA, 23 bp, Artificial sequence
  SiRNA target sequence
gagcggcccctttagcaacagct

SEQ ID NO: 26568 - DNA, 23 bp, Artificial sequence
  SiRNA target sequence
agcggcccctttagcaacagctt

SEQ ID NO: 26569 - DNA, 23 bp, Artificial sequence
  SiRNA target sequence
gcggcccctttagcaacagcttc

SEQ ID NO: 26570 - DNA, 23 bp, Artificial sequence
  SiRNA target sequence
cggcccctttagcaacagcttca

SEQ ID NO: 26571 - DNA, 23 bp, Artificial sequence
  SiRNA target sequence
ggcccctttagcaacagcttcat

SEQ ID NO: 26572 - DNA, 23 bp, Artificial sequence
  SiRNA target sequence
gcccctttagcaacagcttcatc

SEQ ID NO: 26573 - DNA, 23 bp, Artificial sequence
  SiRNA target sequence
cccctttagcaacagcttcatct

SEQ ID NO: 26574 - DNA, 23 bp, Artificial sequence
  SiRNA target sequence
ccctttagcaacagcttcatctg

SEQ ID NO: 26575 - DNA, 23 bp, Artificial sequence
  SiRNA target sequence
cctttagcaacagcttcatctgg

SEQ ID NO: 26576 - DNA, 23 bp, Artificial sequence
  SiRNA target sequence
ctttagcaacagcttcatctgga

SEQ ID NO: 26577 - DNA, 23 bp, Artificial sequence
  SiRNA target sequence
tttagcaacagcttcatctggat

SEQ ID NO: 26578 - DNA, 23 bp, Artificial sequence
  SiRNA target sequence
ttagcaacagcttcatctggatt

SEQ ID NO: 26579 - DNA, 23 bp, Artificial sequence
  SiRNA target sequence
tagcaacagcttcatctggatta

SEQ ID NO: 26580 - DNA, 23 bp, Artificial sequence
  SiRNA target sequence
agcaacagcttcatctggattaa

SEQ ID NO: 26581 - DNA, 23 bp, Artificial sequence
  SiRNA target sequence
gcaacagcttcatctggattaat

SEQ ID NO: 26582 - DNA, 23 bp, Artificial sequence
  SiRNA target sequence
caacagcttcatctggattaata

SEQ ID NO: 26583 - DNA, 23 bp, Artificial sequence
  SiRNA target sequence
aacagcttcatctggattaatat

SEQ ID NO: 26584 - DNA, 23 bp, Artificial sequence
  SiRNA target sequence
acagcttcatctggattaatatt

SEQ ID NO: 26585 - DNA, 23 bp, Artificial sequence
  SiRNA target sequence
cagcttcatctggattaatattt

SEQ ID NO: 26586 - DNA, 23 bp, Artificial sequence
  SiRNA target sequence
agcttcatctggattaatatttg

SEQ ID NO: 26587 - DNA, 23 bp, Artificial sequence
  SiRNA target sequence
gcttcatctggattaatatttgt

SEQ ID NO: 26588 - DNA, 23 bp, Artificial sequence
  SiRNA target sequence
cttcatctggattaatatttgta

SEQ ID NO: 26589 - DNA, 23 bp, Artificial sequence
  SiRNA target sequence
ttcatctggattaatatttgtag

SEQ ID NO: 26590 - DNA, 23 bp, Artificial sequence
  SiRNA target sequence
tcatctggattaatatttgtaga

SEQ ID NO: 26591 - DNA, 23 bp, Artificial sequence
  SiRNA target sequence
catctggattaatatttgtagaa

SEQ ID NO: 26592 - DNA, 23 bp, Artificial sequence
  SiRNA target sequence
atctggattaatatttgtagaag

SEQ ID NO: 26593 - DNA, 23 bp, Artificial sequence
  SiRNA target sequence
tctggattaatatttgtagaagg

SEQ ID NO: 26594 - DNA, 23 bp, Artificial sequence
  SiRNA target sequence
ctggattaatatttgtagaaggc

SEQ ID NO: 26595 - DNA, 23 bp, Artificial sequence
  SiRNA target sequence
tggattaatatttgtagaaggct

SEQ ID NO: 26596 - DNA, 23 bp, Artificial sequence
  SiRNA target sequence
ggattaatatttgtagaaggctc

SEQ ID NO: 26597 - DNA, 23 bp, Artificial sequence
  SiRNA target sequence
gattaatatttgtagaaggctcg

SEQ ID NO: 26598 - DNA, 23 bp, Artificial sequence
  SiRNA target sequence
attaatatttgtagaaggctcga

SEQ ID NO: 26599 - DNA, 23 bp, Artificial sequence
  SiRNA target sequence
ttaatatttgtagaaggctcgat

SEQ ID NO: 26600 - DNA, 23 bp, Artificial sequence
  SiRNA target sequence
taatatttgtagaaggctcgata

SEQ ID NO: 26601 - DNA, 23 bp, Artificial sequence
  SiRNA target sequence
aatatttgtagaaggctcgatac

SEQ ID NO: 26602 - DNA, 23 bp, Artificial sequence
  SiRNA target sequence
atatttgtagaaggctcgatacc

SEQ ID NO: 26603 - DNA, 23 bp, Artificial sequence
  SiRNA target sequence
tatttgtagaaggctcgatacca

SEQ ID NO: 26604 - DNA, 23 bp, Artificial sequence
  SiRNA target sequence
atttgtagaaggctcgataccaa

SEQ ID NO: 26605 - DNA, 23 bp, Artificial sequence
  SiRNA target sequence
tttgtagaaggctcgataccaaa

SEQ ID NO: 26606 - DNA, 23 bp, Artificial sequence
  SiRNA target sequence
ttgtagaaggctcgataccaaaa

SEQ ID NO: 26607 - DNA, 23 bp, Artificial sequence
  SiRNA target sequence
tgtagaaggctcgataccaaaaa

SEQ ID NO: 26608 - DNA, 23 bp, Artificial sequence
  SiRNA target sequence
gtagaaggctcgataccaaaaat

SEQ ID NO: 26609 - DNA, 23 bp, Artificial sequence
  SiRNA target sequence
tagaaggctcgataccaaaaatc

SEQ ID NO: 26610 - DNA, 23 bp, Artificial sequence
  SiRNA target sequence
agaaggctcgataccaaaaatct

SEQ ID NO: 26611 - DNA, 23 bp, Artificial sequence
  SiRNA target sequence
gaaggctcgataccaaaaatctt

SEQ ID NO: 26612 - DNA, 23 bp, Artificial sequence
  SiRNA target sequence
aaggctcgataccaaaaatcttc

SEQ ID NO: 26613 - DNA, 23 bp, Artificial sequence
  SiRNA target sequence
aggctcgataccaaaaatcttct

SEQ ID NO: 26614 - DNA, 23 bp, Artificial sequence
  SiRNA target sequence
ggctcgataccaaaaatcttctt

SEQ ID NO: 26615 - DNA, 23 bp, Artificial sequence
  SiRNA target sequence
gctcgataccaaaaatcttctta

SEQ ID NO: 26616 - DNA, 23 bp, Artificial sequence
  SiRNA target sequence
ctcgataccaaaaatcttcttaa

SEQ ID NO: 26617 - DNA, 23 bp, Artificial sequence
  SiRNA target sequence
tcgataccaaaaatcttcttaac

SEQ ID NO: 26618 - DNA, 23 bp, Artificial sequence
  SiRNA target sequence
cgataccaaaaatcttcttaaca

SEQ ID NO: 26619 - DNA, 23 bp, Artificial sequence
  SiRNA target sequence
gataccaaaaatcttcttaacaa

SEQ ID NO: 26620 - DNA, 23 bp, Artificial sequence
  SiRNA target sequence
ataccaaaaatcttcttaacaag

SEQ ID NO: 26621 - DNA, 23 bp, Artificial sequence
  SiRNA target sequence
taccaaaaatcttcttaacaagt

SEQ ID NO: 26622 - DNA, 23 bp, Artificial sequence
  SiRNA target sequence
accaaaaatcttcttaacaagtt

SEQ ID NO: 26623 - DNA, 23 bp, Artificial sequence
  SiRNA target sequence
ccaaaaatcttcttaacaagttt

SEQ ID NO: 26624 - DNA, 23 bp, Artificial sequence
  SiRNA target sequence
caaaaatcttcttaacaagtttt

SEQ ID NO: 26625 - DNA, 23 bp, Artificial sequence
  SiRNA target sequence
aaaaatcttcttaacaagttttc

SEQ ID NO: 26626 - DNA, 23 bp, Artificial sequence
  SiRNA target sequence
aaaatcttcttaacaagttttct

SEQ ID NO: 26627 - DNA, 23 bp, Artificial sequence
  SiRNA target sequence
aaatcttcttaacaagttttcta

SEQ ID NO: 26628 - DNA, 23 bp, Artificial sequence
  SiRNA target sequence
aatcttcttaacaagttttctaa

SEQ ID NO: 26629 - DNA, 23 bp, Artificial sequence
  SiRNA target sequence
atcttcttaacaagttttctaac

SEQ ID NO: 26630 - DNA, 23 bp, Artificial sequence
  SiRNA target sequence
tcttcttaacaagttttctaaca

SEQ ID NO: 26631 - DNA, 23 bp, Artificial sequence
  SiRNA target sequence
cttcttaacaagttttctaacat

SEQ ID NO: 26632 - DNA, 23 bp, Artificial sequence
  SiRNA target sequence
ttcttaacaagttttctaacata

SEQ ID NO: 26633 - DNA, 23 bp, Artificial sequence
  SiRNA target sequence
tcttaacaagttttctaacatac

SEQ ID NO: 26634 - DNA, 23 bp, Artificial sequence
  SiRNA target sequence
cttaacaagttttctaacatacg

SEQ ID NO: 26635 - DNA, 23 bp, Artificial sequence
  SiRNA target sequence
ttaacaagttttctaacatacgg

SEQ ID NO: 26636 - DNA, 23 bp, Artificial sequence
  SiRNA target sequence
taacaagttttctaacatacggc

SEQ ID NO: 26637 - DNA, 23 bp, Artificial sequence
  SiRNA target sequence
aacaagttttctaacatacggca

SEQ ID NO: 26638 - DNA, 23 bp, Artificial sequence
  SiRNA target sequence
acaagttttctaacatacggcat

SEQ ID NO: 26639 - DNA, 23 bp, Artificial sequence
  SiRNA target sequence
caagttttctaacatacggcatt

SEQ ID NO: 26640 - DNA, 23 bp, Artificial sequence
  SiRNA target sequence
aagttttctaacatacggcattc

SEQ ID NO: 26641 - DNA, 23 bp, Artificial sequence
  SiRNA target sequence
agttttctaacatacggcattcg

SEQ ID NO: 26642 - DNA, 23 bp, Artificial sequence
  SiRNA target sequence
gttttctaacatacggcattcgt

SEQ ID NO: 26643 - DNA, 23 bp, Artificial sequence
  SiRNA target sequence
ttttctaacatacggcattcgtg

SEQ ID NO: 26644 - DNA, 23 bp, Artificial sequence
  SiRNA target sequence
tttctaacatacggcattcgtgt

SEQ ID NO: 26645 - DNA, 23 bp, Artificial sequence
  SiRNA target sequence
ttctaacatacggcattcgtgtc

SEQ ID NO: 26646 - DNA, 23 bp, Artificial sequence
  SiRNA target sequence
tctaacatacggcattcgtgtca

SEQ ID NO: 26647 - DNA, 23 bp, Artificial sequence
  SiRNA target sequence
ctaacatacggcattcgtgtcat

SEQ ID NO: 26648 - DNA, 23 bp, Artificial sequence
  SiRNA target sequence
taacatacggcattcgtgtcatt

SEQ ID NO: 26649 - DNA, 23 bp, Artificial sequence
  SiRNA target sequence
aacatacggcattcgtgtcattc

SEQ ID NO: 26650 - DNA, 23 bp, Artificial sequence
  SiRNA target sequence
acatacggcattcgtgtcattcc

SEQ ID NO: 26651 - DNA, 23 bp, Artificial sequence
  SiRNA target sequence
catacggcattcgtgtcattcca

SEQ ID NO: 26652 - DNA, 23 bp, Artificial sequence
  SiRNA target sequence
atacggcattcgtgtcattccac

SEQ ID NO: 26653 - DNA, 23 bp, Artificial sequence
  SiRNA target sequence
tacggcattcgtgtcattccacc

SEQ ID NO: 26654 - DNA, 23 bp, Artificial sequence
  SiRNA target sequence
acggcattcgtgtcattccaccc

SEQ ID NO: 26655 - DNA, 23 bp, Artificial sequence
  SiRNA target sequence
cggcattcgtgtcattccaccca

SEQ ID NO: 26656 - DNA, 23 bp, Artificial sequence
  SiRNA target sequence
ggcattcgtgtcattccacccac

SEQ ID NO: 26657 - DNA, 23 bp, Artificial sequence
  SiRNA target sequence
gcattcgtgtcattccacccaca

SEQ ID NO: 26658 - DNA, 23 bp, Artificial sequence
  SiRNA target sequence
cattcgtgtcattccacccacaa

SEQ ID NO: 26659 - DNA, 23 bp, Artificial sequence
  SiRNA target sequence
attcgtgtcattccacccacaag

SEQ ID NO: 26660 - DNA, 23 bp, Artificial sequence
  SiRNA target sequence
ttcgtgtcattccacccacaagt

SEQ ID NO: 26661 - DNA, 23 bp, Artificial sequence
  SiRNA target sequence
tcgtgtcattccacccacaagta

SEQ ID NO: 26662 - DNA, 23 bp, Artificial sequence
  SiRNA target sequence
cgtgtcattccacccacaagtat

SEQ ID NO: 26663 - DNA, 23 bp, Artificial sequence
  SiRNA target sequence
gtgtcattccacccacaagtata

SEQ ID NO: 26664 - DNA, 23 bp, Artificial sequence
  SiRNA target sequence
tgtcattccacccacaagtataa

SEQ ID NO: 26665 - DNA, 23 bp, Artificial sequence
  SiRNA target sequence
gtcattccacccacaagtataac

SEQ ID NO: 26666 - DNA, 23 bp, Artificial sequence
  SiRNA target sequence
tcattccacccacaagtataacg

SEQ ID NO: 26667 - DNA, 23 bp, Artificial sequence
  SiRNA target sequence
cattccacccacaagtataacgt

SEQ ID NO: 26668 - DNA, 23 bp, Artificial sequence
  SiRNA target sequence
attccacccacaagtataacgtg

SEQ ID NO: 26669 - DNA, 23 bp, Artificial sequence
  SiRNA target sequence
ttccacccacaagtataacgtgt

SEQ ID NO: 26670 - DNA, 23 bp, Artificial sequence
  SiRNA target sequence
tccacccacaagtataacgtgtt

SEQ ID NO: 26671 - DNA, 23 bp, Artificial sequence
  SiRNA target sequence
ccacccacaagtataacgtgttt

SEQ ID NO: 26672 - DNA, 23 bp, Artificial sequence
  SiRNA target sequence
cacccacaagtataacgtgttta

SEQ ID NO: 26673 - DNA, 23 bp, Artificial sequence
  SiRNA target sequence
acccacaagtataacgtgtttaa

SEQ ID NO: 26674 - DNA, 23 bp, Artificial sequence
  SiRNA target sequence
cccacaagtataacgtgtttaat

SEQ ID NO: 26675 - DNA, 23 bp, Artificial sequence
  SiRNA target sequence
ccacaagtataacgtgtttaata

SEQ ID NO: 26676 - DNA, 23 bp, Artificial sequence
  SiRNA target sequence
cacaagtataacgtgtttaatat

SEQ ID NO: 26677 - DNA, 23 bp, Artificial sequence
  SiRNA target sequence
acaagtataacgtgtttaatatc

SEQ ID NO: 26678 - DNA, 23 bp, Artificial sequence
  SiRNA target sequence
caagtataacgtgtttaatatca

SEQ ID NO: 26679 - DNA, 23 bp, Artificial sequence
  SiRNA target sequence
aagtataacgtgtttaatatcac

SEQ ID NO: 26680 - DNA, 23 bp, Artificial sequence
  SiRNA target sequence
agtataacgtgtttaatatcact

SEQ ID NO: 26681 - DNA, 23 bp, Artificial sequence
  SiRNA target sequence
gtataacgtgtttaatatcactt

SEQ ID NO: 26682 - DNA, 23 bp, Artificial sequence
  SiRNA target sequence
tataacgtgtttaatatcacttt

SEQ ID NO: 26683 - DNA, 23 bp, Artificial sequence
  SiRNA target sequence
ataacgtgtttaatatcactttt

SEQ ID NO: 26684 - DNA, 23 bp, Artificial sequence
  SiRNA target sequence
taacgtgtttaatatcactttta

SEQ ID NO: 26685 - DNA, 23 bp, Artificial sequence
  SiRNA target sequence
aacgtgtttaatatcacttttag

SEQ ID NO: 26686 - DNA, 23 bp, Artificial sequence
  SiRNA target sequence
acgtgtttaatatcacttttagt

SEQ ID NO: 26687 - DNA, 23 bp, Artificial sequence
  SiRNA target sequence
cgtgtttaatatcacttttagtt

SEQ ID NO: 26688 - DNA, 23 bp, Artificial sequence
  SiRNA target sequence
gtgtttaatatcacttttagtta

SEQ ID NO: 26689 - DNA, 23 bp, Artificial sequence
  SiRNA target sequence
tgtttaatatcacttttagttat

SEQ ID NO: 26690 - DNA, 23 bp, Artificial sequence
  SiRNA target sequence
gtttaatatcacttttagttata

SEQ ID NO: 26691 - DNA, 23 bp, Artificial sequence
  SiRNA target sequence
tttaatatcacttttagttatat

SEQ ID NO: 26692 - DNA, 23 bp, Artificial sequence
  SiRNA target sequence
ttaatatcacttttagttatatt

SEQ ID NO: 26693 - DNA, 23 bp, Artificial sequence
  SiRNA target sequence
taatatcacttttagttatattg

SEQ ID NO: 26694 - DNA, 23 bp, Artificial sequence
  SiRNA target sequence
aatatcacttttagttatattgg

SEQ ID NO: 26695 - DNA, 23 bp, Artificial sequence
  SiRNA target sequence
atatcacttttagttatattggc

SEQ ID NO: 26696 - DNA, 23 bp, Artificial sequence
  SiRNA target sequence
tatcacttttagttatattggca

SEQ ID NO: 26697 - DNA, 23 bp, Artificial sequence
  SiRNA target sequence
atcacttttagttatattggcat

SEQ ID NO: 26698 - DNA, 23 bp, Artificial sequence
  SiRNA target sequence
tcacttttagttatattggcatc

SEQ ID NO: 26699 - DNA, 23 bp, Artificial sequence
  SiRNA target sequence
cacttttagttatattggcatct

SEQ ID NO: 26700 - DNA, 23 bp, Artificial sequence
  SiRNA target sequence
acttttagttatattggcatctc

SEQ ID NO: 26701 - DNA, 23 bp, Artificial sequence
  SiRNA target sequence
cttttagttatattggcatctct

SEQ ID NO: 26702 - DNA, 23 bp, Artificial sequence
  SiRNA target sequence
ttttagttatattggcatctcta

SEQ ID NO: 26703 - DNA, 23 bp, Artificial sequence
  SiRNA target sequence
tttagttatattggcatctctaa

SEQ ID NO: 26704 - DNA, 23 bp, Artificial sequence
  SiRNA target sequence
ttagttatattggcatctctaat

SEQ ID NO: 26705 - DNA, 23 bp, Artificial sequence
  SiRNA target sequence
tagttatattggcatctctaata

SEQ ID NO: 26706 - DNA, 23 bp, Artificial sequence
  SiRNA target sequence
agttatattggcatctctaatag

SEQ ID NO: 26707 - DNA, 23 bp, Artificial sequence
  SiRNA target sequence
gttatattggcatctctaatagc

SEQ ID NO: 26708 - DNA, 23 bp, Artificial sequence
  SiRNA target sequence
ttatattggcatctctaatagct

SEQ ID NO: 26709 - DNA, 23 bp, Artificial sequence
  SiRNA target sequence
tatattggcatctctaatagctt

SEQ ID NO: 26710 - DNA, 23 bp, Artificial sequence
  SiRNA target sequence
atattggcatctctaatagcttt

SEQ ID NO: 26711 - DNA, 23 bp, Artificial sequence
  SiRNA target sequence
tattggcatctctaatagcttta

SEQ ID NO: 26712 - DNA, 23 bp, Artificial sequence
  SiRNA target sequence
attggcatctctaatagctttaa

SEQ ID NO: 26713 - DNA, 23 bp, Artificial sequence
  SiRNA target sequence
ttggcatctctaatagctttaag

SEQ ID NO: 26714 - DNA, 23 bp, Artificial sequence
  SiRNA target sequence
tggcatctctaatagctttaaga

SEQ ID NO: 26715 - DNA, 23 bp, Artificial sequence
  SiRNA target sequence
ggcatctctaatagctttaagac

SEQ ID NO: 26716 - DNA, 23 bp, Artificial sequence
  SiRNA target sequence
gcatctctaatagctttaagaca

SEQ ID NO: 26717 - DNA, 23 bp, Artificial sequence
  SiRNA target sequence
catctctaatagctttaagacag

SEQ ID NO: 26718 - DNA, 23 bp, Artificial sequence
  SiRNA target sequence
atctctaatagctttaagacagg

SEQ ID NO: 26719 - DNA, 23 bp, Artificial sequence
  SiRNA target sequence
tctctaatagctttaagacaggg

SEQ ID NO: 26720 - DNA, 23 bp, Artificial sequence
  SiRNA target sequence
ctctaatagctttaagacagggg

SEQ ID NO: 26721 - DNA, 23 bp, Artificial sequence
  SiRNA target sequence
tctaatagctttaagacaggggt

SEQ ID NO: 26722 - DNA, 23 bp, Artificial sequence
  SiRNA target sequence
ctaatagctttaagacaggggtt

SEQ ID NO: 26723 - DNA, 23 bp, Artificial sequence
  SiRNA target sequence
taatagctttaagacaggggttt

SEQ ID NO: 26724 - DNA, 23 bp, Artificial sequence
  SiRNA target sequence
aatagctttaagacaggggttta

SEQ ID NO: 26725 - DNA, 23 bp, Artificial sequence
  SiRNA target sequence
atagctttaagacaggggtttat

SEQ ID NO: 26726 - DNA, 23 bp, Artificial sequence
  SiRNA target sequence
tagctttaagacaggggtttatt

SEQ ID NO: 26727 - DNA, 23 bp, Artificial sequence
  SiRNA target sequence
agctttaagacaggggtttattg

SEQ ID NO: 26728 - DNA, 23 bp, Artificial sequence
  SiRNA target sequence
gctttaagacaggggtttattgt

SEQ ID NO: 26729 - DNA, 23 bp, Artificial sequence
  SiRNA target sequence
ctttaagacaggggtttattgtt

SEQ ID NO: 26730 - DNA, 23 bp, Artificial sequence
  SiRNA target sequence
tttaagacaggggtttattgttt

SEQ ID NO: 26731 - DNA, 23 bp, Artificial sequence
  SiRNA target sequence
ttaagacaggggtttattgtttt

SEQ ID NO: 26732 - DNA, 23 bp, Artificial sequence
  SiRNA target sequence
taagacaggggtttattgttttg

SEQ ID NO: 26733 - DNA, 23 bp, Artificial sequence
  SiRNA target sequence
aagacaggggtttattgttttgt

SEQ ID NO: 26734 - DNA, 23 bp, Artificial sequence
  SiRNA target sequence
agacaggggtttattgttttgtc

SEQ ID NO: 26735 - DNA, 23 bp, Artificial sequence
  SiRNA target sequence
gacaggggtttattgttttgtct

SEQ ID NO: 26736 - DNA, 23 bp, Artificial sequence
  SiRNA target sequence
acaggggtttattgttttgtcta

SEQ ID NO: 26737 - DNA, 23 bp, Artificial sequence
  SiRNA target sequence
caggggtttattgttttgtctat

SEQ ID NO: 26738 - DNA, 23 bp, Artificial sequence
  SiRNA target sequence
aggggtttattgttttgtctatt

SEQ ID NO: 26739 - DNA, 23 bp, Artificial sequence
  SiRNA target sequence
ggggtttattgttttgtctatta

SEQ ID NO: 26740 - DNA, 23 bp, Artificial sequence
  SiRNA target sequence
gggtttattgttttgtctattaa

SEQ ID NO: 26741 - DNA, 23 bp, Artificial sequence
  SiRNA target sequence
ggtttattgttttgtctattaac

SEQ ID NO: 26742 - DNA, 23 bp, Artificial sequence
  SiRNA target sequence
gtttattgttttgtctattaact

SEQ ID NO: 26743 - DNA, 23 bp, Artificial sequence
  SiRNA target sequence
tttattgttttgtctattaactt

SEQ ID NO: 26744 - DNA, 23 bp, Artificial sequence
  SiRNA target sequence
ttattgttttgtctattaacttt

SEQ ID NO: 26745 - DNA, 23 bp, Artificial sequence
  SiRNA target sequence
tattgttttgtctattaactttt

SEQ ID NO: 26746 - DNA, 23 bp, Artificial sequence
  SiRNA target sequence
attgttttgtctattaacttttt

SEQ ID NO: 26747 - DNA, 23 bp, Artificial sequence
  SiRNA target sequence
ttgttttgtctattaactttttt

SEQ ID NO: 26748 - DNA, 23 bp, Artificial sequence
  SiRNA target sequence
tgttttgtctattaacttttttg

SEQ ID NO: 26749 - DNA, 23 bp, Artificial sequence
  SiRNA target sequence
gttttgtctattaacttttttgt

SEQ ID NO: 26750 - DNA, 23 bp, Artificial sequence
  SiRNA target sequence
ttttgtctattaacttttttgta

SEQ ID NO: 26751 - DNA, 23 bp, Artificial sequence
  SiRNA target sequence
tttgtctattaacttttttgtaa

SEQ ID NO: 26752 - DNA, 23 bp, Artificial sequence
  SiRNA target sequence
ttgtctattaacttttttgtaat

SEQ ID NO: 26753 - DNA, 23 bp, Artificial sequence
  SiRNA target sequence
tgtctattaacttttttgtaatt

SEQ ID NO: 26754 - DNA, 23 bp, Artificial sequence
  SiRNA target sequence
gtctattaacttttttgtaattt

SEQ ID NO: 26755 - DNA, 23 bp, Artificial sequence
  SiRNA target sequence
tctattaacttttttgtaatttt

SEQ ID NO: 26756 - DNA, 23 bp, Artificial sequence
  SiRNA target sequence
ctattaacttttttgtaattttt

SEQ ID NO: 26757 - DNA, 23 bp, Artificial sequence
  SiRNA target sequence
tattaacttttttgtaatttttt

SEQ ID NO: 26758 - DNA, 23 bp, Artificial sequence
  SiRNA target sequence
attaacttttttgtaattttttc

SEQ ID NO: 26759 - DNA, 23 bp, Artificial sequence
  SiRNA target sequence
ttaacttttttgtaattttttca

SEQ ID NO: 26760 - DNA, 23 bp, Artificial sequence
  SiRNA target sequence
taacttttttgtaattttttcaa

SEQ ID NO: 26761 - DNA, 23 bp, Artificial sequence
  SiRNA target sequence
aacttttttgtaattttttcaaa

SEQ ID NO: 26762 - DNA, 23 bp, Artificial sequence
  SiRNA target sequence
acttttttgtaattttttcaaat

SEQ ID NO: 26763 - DNA, 23 bp, Artificial sequence
  SiRNA target sequence
cttttttgtaattttttcaaatt

SEQ ID NO: 26764 - DNA, 23 bp, Artificial sequence
  SiRNA target sequence
ttttttgtaattttttcaaattc

SEQ ID NO: 26765 - DNA, 23 bp, Artificial sequence
  SiRNA target sequence
tttttgtaattttttcaaattcg

SEQ ID NO: 26766 - DNA, 23 bp, Artificial sequence
  SiRNA target sequence
ttttgtaattttttcaaattcgt

SEQ ID NO: 26767 - DNA, 23 bp, Artificial sequence
  SiRNA target sequence
tttgtaattttttcaaattcgtc

SEQ ID NO: 26768 - DNA, 23 bp, Artificial sequence
  SiRNA target sequence
ttgtaattttttcaaattcgtcg

SEQ ID NO: 26769 - DNA, 23 bp, Artificial sequence
  SiRNA target sequence
tgtaattttttcaaattcgtcgc

SEQ ID NO: 26770 - DNA, 23 bp, Artificial sequence
  SiRNA target sequence
gtaattttttcaaattcgtcgcg

SEQ ID NO: 26771 - DNA, 23 bp, Artificial sequence
  SiRNA target sequence
taattttttcaaattcgtcgcgt

SEQ ID NO: 26772 - DNA, 23 bp, Artificial sequence
  SiRNA target sequence
aattttttcaaattcgtcgcgtg

SEQ ID NO: 26773 - DNA, 23 bp, Artificial sequence
  SiRNA target sequence
attttttcaaattcgtcgcgtgt

SEQ ID NO: 26774 - DNA, 23 bp, Artificial sequence
  SiRNA target sequence
ttttttcaaattcgtcgcgtgta

SEQ ID NO: 26775 - DNA, 23 bp, Artificial sequence
  SiRNA target sequence
tttttcaaattcgtcgcgtgtaa

SEQ ID NO: 26776 - DNA, 23 bp, Artificial sequence
  SiRNA target sequence
ttttcaaattcgtcgcgtgtaat

SEQ ID NO: 26777 - DNA, 23 bp, Artificial sequence
  SiRNA target sequence
tttcaaattcgtcgcgtgtaatt

SEQ ID NO: 26778 - DNA, 23 bp, Artificial sequence
  SiRNA target sequence
ttcaaattcgtcgcgtgtaatta

SEQ ID NO: 26779 - DNA, 23 bp, Artificial sequence
  SiRNA target sequence
tcaaattcgtcgcgtgtaattac

SEQ ID NO: 26780 - DNA, 23 bp, Artificial sequence
  SiRNA target sequence
caaattcgtcgcgtgtaattacc

SEQ ID NO: 26781 - DNA, 23 bp, Artificial sequence
  SiRNA target sequence
aaattcgtcgcgtgtaattacct

SEQ ID NO: 26782 - DNA, 23 bp, Artificial sequence
  SiRNA target sequence
aattcgtcgcgtgtaattacctc

SEQ ID NO: 26783 - DNA, 23 bp, Artificial sequence
  SiRNA target sequence
attcgtcgcgtgtaattacctct

SEQ ID NO: 26784 - DNA, 23 bp, Artificial sequence
  SiRNA target sequence
ttcgtcgcgtgtaattacctctt

SEQ ID NO: 26785 - DNA, 23 bp, Artificial sequence
  SiRNA target sequence
tcgtcgcgtgtaattacctcttt

SEQ ID NO: 26786 - DNA, 23 bp, Artificial sequence
  SiRNA target sequence
cgtcgcgtgtaattacctctttt

SEQ ID NO: 26787 - DNA, 23 bp, Artificial sequence
  SiRNA target sequence
gtcgcgtgtaattacctctttta

SEQ ID NO: 26788 - DNA, 23 bp, Artificial sequence
  SiRNA target sequence
tcgcgtgtaattacctcttttaa

SEQ ID NO: 26789 - DNA, 23 bp, Artificial sequence
  SiRNA target sequence
cgcgtgtaattacctcttttaag

SEQ ID NO: 26790 - DNA, 23 bp, Artificial sequence
  SiRNA target sequence
gcgtgtaattacctcttttaagt

SEQ ID NO: 26791 - DNA, 23 bp, Artificial sequence
  SiRNA target sequence
cgtgtaattacctcttttaagtg

SEQ ID NO: 26792 - DNA, 23 bp, Artificial sequence
  SiRNA target sequence
gtgtaattacctcttttaagtga

SEQ ID NO: 26793 - DNA, 23 bp, Artificial sequence
  SiRNA target sequence
tgtaattacctcttttaagtgat

SEQ ID NO: 26794 - DNA, 23 bp, Artificial sequence
  SiRNA target sequence
gtaattacctcttttaagtgata

SEQ ID NO: 26795 - DNA, 23 bp, Artificial sequence
  SiRNA target sequence
taattacctcttttaagtgataa

SEQ ID NO: 26796 - DNA, 23 bp, Artificial sequence
  SiRNA target sequence
aattacctcttttaagtgataat

SEQ ID NO: 26797 - DNA, 23 bp, Artificial sequence
  SiRNA target sequence
attacctcttttaagtgataatt

SEQ ID NO: 26798 - DNA, 23 bp, Artificial sequence
  SiRNA target sequence
ttacctcttttaagtgataattc

SEQ ID NO: 26799 - DNA, 23 bp, Artificial sequence
  SiRNA target sequence
tacctcttttaagtgataattct

SEQ ID NO: 26800 - DNA, 23 bp, Artificial sequence
  SiRNA target sequence
acctcttttaagtgataattctt

SEQ ID NO: 26801 - DNA, 23 bp, Artificial sequence
  SiRNA target sequence
cctcttttaagtgataattcttt

SEQ ID NO: 26802 - DNA, 23 bp, Artificial sequence
  SiRNA target sequence
ctcttttaagtgataattctttt

SEQ ID NO: 26803 - DNA, 23 bp, Artificial sequence
  SiRNA target sequence
tcttttaagtgataattcttttt

SEQ ID NO: 26804 - DNA, 23 bp, Artificial sequence
  SiRNA target sequence
cttttaagtgataattcttttta

SEQ ID NO: 26805 - DNA, 23 bp, Artificial sequence
  SiRNA target sequence
ttttaagtgataattctttttac

SEQ ID NO: 26806 - DNA, 23 bp, Artificial sequence
  SiRNA target sequence
tttaagtgataattctttttact

SEQ ID NO: 26807 - DNA, 23 bp, Artificial sequence
  SiRNA target sequence
ttaagtgataattctttttacta

SEQ ID NO: 26808 - DNA, 23 bp, Artificial sequence
  SiRNA target sequence
taagtgataattctttttactat

SEQ ID NO: 26809 - DNA, 23 bp, Artificial sequence
  SiRNA target sequence
aagtgataattctttttactatc

SEQ ID NO: 26810 - DNA, 23 bp, Artificial sequence
  SiRNA target sequence
agtgataattctttttactatcg

SEQ ID NO: 26811 - DNA, 23 bp, Artificial sequence
  SiRNA target sequence
gtgataattctttttactatcgt

SEQ ID NO: 26812 - DNA, 23 bp, Artificial sequence
  SiRNA target sequence
tgataattctttttactatcgtt

SEQ ID NO: 26813 - DNA, 23 bp, Artificial sequence
  SiRNA target sequence
gataattctttttactatcgtta

SEQ ID NO: 26814 - DNA, 23 bp, Artificial sequence
  SiRNA target sequence
ataattctttttactatcgttat

SEQ ID NO: 26815 - DNA, 23 bp, Artificial sequence
  SiRNA target sequence
taattctttttactatcgttata

SEQ ID NO: 26816 - DNA, 23 bp, Artificial sequence
  SiRNA target sequence
aattctttttactatcgttataa

SEQ ID NO: 26817 - DNA, 23 bp, Artificial sequence
  SiRNA target sequence
attctttttactatcgttataaa

SEQ ID NO: 26818 - DNA, 23 bp, Artificial sequence
  SiRNA target sequence
ttctttttactatcgttataaat

SEQ ID NO: 26819 - DNA, 23 bp, Artificial sequence
  SiRNA target sequence
tctttttactatcgttataaata

SEQ ID NO: 26820 - DNA, 23 bp, Artificial sequence
  SiRNA target sequence
ctttttactatcgttataaatat

SEQ ID NO: 26821 - DNA, 23 bp, Artificial sequence
  SiRNA target sequence
tttttactatcgttataaatata

SEQ ID NO: 26822 - DNA, 23 bp, Artificial sequence
  SiRNA target sequence
ttttactatcgttataaatatac

SEQ ID NO: 26823 - DNA, 23 bp, Artificial sequence
  SiRNA target sequence
tttactatcgttataaatatacg

SEQ ID NO: 26824 - DNA, 23 bp, Artificial sequence
  SiRNA target sequence
ttactatcgttataaatatacgg

SEQ ID NO: 26825 - DNA, 23 bp, Artificial sequence
  SiRNA target sequence
tactatcgttataaatatacgga

SEQ ID NO: 26826 - DNA, 23 bp, Artificial sequence
  SiRNA target sequence
actatcgttataaatatacggaa

SEQ ID NO: 26827 - DNA, 23 bp, Artificial sequence
  SiRNA target sequence
ctatcgttataaatatacggaat

SEQ ID NO: 26828 - DNA, 23 bp, Artificial sequence
  SiRNA target sequence
tatcgttataaatatacggaata

SEQ ID NO: 26829 - DNA, 23 bp, Artificial sequence
  SiRNA target sequence
atcgttataaatatacggaatat

SEQ ID NO: 26830 - DNA, 23 bp, Artificial sequence
  SiRNA target sequence
tcgttataaatatacggaatatt

SEQ ID NO: 26831 - DNA, 23 bp, Artificial sequence
  SiRNA target sequence
cgttataaatatacggaatatta

SEQ ID NO: 26832 - DNA, 23 bp, Artificial sequence
  SiRNA target sequence
gttataaatatacggaatattaa

SEQ ID NO: 26833 - DNA, 23 bp, Artificial sequence
  SiRNA target sequence
ttataaatatacggaatattaat

SEQ ID NO: 26834 - DNA, 23 bp, Artificial sequence
  SiRNA target sequence
tataaatatacggaatattaatt

SEQ ID NO: 26835 - DNA, 23 bp, Artificial sequence
  SiRNA target sequence
ataaatatacggaatattaattt

SEQ ID NO: 26836 - DNA, 23 bp, Artificial sequence
  SiRNA target sequence
taaatatacggaatattaatttc

SEQ ID NO: 26837 - DNA, 23 bp, Artificial sequence
  SiRNA target sequence
aaatatacggaatattaatttca

SEQ ID NO: 26838 - DNA, 23 bp, Artificial sequence
  SiRNA target sequence
aatatacggaatattaatttcag

SEQ ID NO: 26839 - DNA, 23 bp, Artificial sequence
  SiRNA target sequence
atatacggaatattaatttcaga

SEQ ID NO: 26840 - DNA, 23 bp, Artificial sequence
  SiRNA target sequence
tatacggaatattaatttcagac

SEQ ID NO: 26841 - DNA, 23 bp, Artificial sequence
  SiRNA target sequence
atacggaatattaatttcagacg

SEQ ID NO: 26842 - DNA, 23 bp, Artificial sequence
  SiRNA target sequence
tacggaatattaatttcagacga

SEQ ID NO: 26843 - DNA, 23 bp, Artificial sequence
  SiRNA target sequence
acggaatattaatttcagacgaa

SEQ ID NO: 26844 - DNA, 23 bp, Artificial sequence
  SiRNA target sequence
cggaatattaatttcagacgaaa

SEQ ID NO: 26845 - DNA, 23 bp, Artificial sequence
  SiRNA target sequence
ggaatattaatttcagacgaaag

SEQ ID NO: 26846 - DNA, 23 bp, Artificial sequence
  SiRNA target sequence
gaatattaatttcagacgaaaga

SEQ ID NO: 26847 - DNA, 23 bp, Artificial sequence
  SiRNA target sequence
aatattaatttcagacgaaagat

SEQ ID NO: 26848 - DNA, 23 bp, Artificial sequence
  SiRNA target sequence
atattaatttcagacgaaagatt

SEQ ID NO: 26849 - DNA, 23 bp, Artificial sequence
  SiRNA target sequence
tattaatttcagacgaaagatta

SEQ ID NO: 26850 - DNA, 23 bp, Artificial sequence
  SiRNA target sequence
attaatttcagacgaaagattag

SEQ ID NO: 26851 - DNA, 23 bp, Artificial sequence
  SiRNA target sequence
ttaatttcagacgaaagattaga

SEQ ID NO: 26852 - DNA, 23 bp, Artificial sequence
  SiRNA target sequence
taatttcagacgaaagattagac

SEQ ID NO: 26853 - DNA, 23 bp, Artificial sequence
  SiRNA target sequence
aatttcagacgaaagattagacg

SEQ ID NO: 26854 - DNA, 23 bp, Artificial sequence
  SiRNA target sequence
atttcagacgaaagattagacga

SEQ ID NO: 26855 - DNA, 23 bp, Artificial sequence
  SiRNA target sequence
tttcagacgaaagattagacgac

SEQ ID NO: 26856 - DNA, 23 bp, Artificial sequence
  SiRNA target sequence
ttcagacgaaagattagacgaca

SEQ ID NO: 26857 - DNA, 23 bp, Artificial sequence
  SiRNA target sequence
tcagacgaaagattagacgacag

SEQ ID NO: 26858 - DNA, 23 bp, Artificial sequence
  SiRNA target sequence
cagacgaaagattagacgacagt

SEQ ID NO: 26859 - DNA, 23 bp, Artificial sequence
  SiRNA target sequence
agacgaaagattagacgacagtt

SEQ ID NO: 26860 - DNA, 23 bp, Artificial sequence
  SiRNA target sequence
gacgaaagattagacgacagttc

SEQ ID NO: 26861 - DNA, 23 bp, Artificial sequence
  SiRNA target sequence
acgaaagattagacgacagttct

SEQ ID NO: 26862 - DNA, 23 bp, Artificial sequence
  SiRNA target sequence
cgaaagattagacgacagttctt

SEQ ID NO: 26863 - DNA, 23 bp, Artificial sequence
  SiRNA target sequence
gaaagattagacgacagttcttt

SEQ ID NO: 26864 - DNA, 23 bp, Artificial sequence
  SiRNA target sequence
aaagattagacgacagttctttt

SEQ ID NO: 26865 - DNA, 23 bp, Artificial sequence
  SiRNA target sequence
aagattagacgacagttcttttt

SEQ ID NO: 26866 - DNA, 23 bp, Artificial sequence
  SiRNA target sequence
agattagacgacagttctttttt

SEQ ID NO: 26867 - DNA, 23 bp, Artificial sequence
  SiRNA target sequence
gattagacgacagttcttttttc

SEQ ID NO: 26868 - DNA, 23 bp, Artificial sequence
  SiRNA target sequence
attagacgacagttcttttttca

SEQ ID NO: 26869 - DNA, 23 bp, Artificial sequence
  SiRNA target sequence
ttagacgacagttcttttttcat

SEQ ID NO: 26870 - DNA, 23 bp, Artificial sequence
  SiRNA target sequence
tagacgacagttcttttttcatt

SEQ ID NO: 26871 - DNA, 23 bp, Artificial sequence
  SiRNA target sequence
agacgacagttcttttttcattt

SEQ ID NO: 26872 - DNA, 23 bp, Artificial sequence
  SiRNA target sequence
gacgacagttcttttttcatttt

SEQ ID NO: 26873 - DNA, 23 bp, Artificial sequence
  SiRNA target sequence
acgacagttcttttttcattttt

SEQ ID NO: 26874 - DNA, 23 bp, Artificial sequence
  SiRNA target sequence
cgacagttcttttttcatttttt

SEQ ID NO: 26875 - DNA, 23 bp, Artificial sequence
  SiRNA target sequence
gacagttcttttttcattttttc

SEQ ID NO: 26876 - DNA, 23 bp, Artificial sequence
  SiRNA target sequence
acagttcttttttcattttttcc

SEQ ID NO: 26877 - DNA, 23 bp, Artificial sequence
  SiRNA target sequence
cagttcttttttcattttttccg

SEQ ID NO: 26878 - DNA, 23 bp, Artificial sequence
  SiRNA target sequence
agttcttttttcattttttccgc

SEQ ID NO: 26879 - DNA, 23 bp, Artificial sequence
  SiRNA target sequence
gttcttttttcattttttccgct

SEQ ID NO: 26880 - DNA, 23 bp, Artificial sequence
  SiRNA target sequence
ttcttttttcattttttccgctg

SEQ ID NO: 26881 - DNA, 23 bp, Artificial sequence
  SiRNA target sequence
tcttttttcattttttccgctgc

SEQ ID NO: 26882 - DNA, 23 bp, Artificial sequence
  SiRNA target sequence
cttttttcattttttccgctgct

SEQ ID NO: 26883 - DNA, 23 bp, Artificial sequence
  SiRNA target sequence
ttttttcattttttccgctgctt

SEQ ID NO: 26884 - DNA, 23 bp, Artificial sequence
  SiRNA target sequence
tttttcattttttccgctgcttc

SEQ ID NO: 26885 - DNA, 23 bp, Artificial sequence
  SiRNA target sequence
ttttcattttttccgctgcttct

SEQ ID NO: 26886 - DNA, 23 bp, Artificial sequence
  SiRNA target sequence
tttcattttttccgctgcttctt

SEQ ID NO: 26887 - DNA, 23 bp, Artificial sequence
  SiRNA target sequence
ttcattttttccgctgcttcttt

SEQ ID NO: 26888 - DNA, 23 bp, Artificial sequence
  SiRNA target sequence
tcattttttccgctgcttcttta

SEQ ID NO: 26889 - DNA, 23 bp, Artificial sequence
  SiRNA target sequence
cattttttccgctgcttctttaa

SEQ ID NO: 26890 - DNA, 23 bp, Artificial sequence
  SiRNA target sequence
attttttccgctgcttctttaat

SEQ ID NO: 26891 - DNA, 23 bp, Artificial sequence
  SiRNA target sequence
ttttttccgctgcttctttaatt

SEQ ID NO: 26892 - DNA, 23 bp, Artificial sequence
  SiRNA target sequence
tttttccgctgcttctttaattc

SEQ ID NO: 26893 - DNA, 23 bp, Artificial sequence
  SiRNA target sequence
ttttccgctgcttctttaattct

SEQ ID NO: 26894 - DNA, 23 bp, Artificial sequence
  SiRNA target sequence
tttccgctgcttctttaattcta

SEQ ID NO: 26895 - DNA, 23 bp, Artificial sequence
  SiRNA target sequence
ttccgctgcttctttaattctat

SEQ ID NO: 26896 - DNA, 23 bp, Artificial sequence
  SiRNA target sequence
tccgctgcttctttaattctatt

SEQ ID NO: 26897 - DNA, 23 bp, Artificial sequence
  SiRNA target sequence
ccgctgcttctttaattctatta

SEQ ID NO: 26898 - DNA, 23 bp, Artificial sequence
  SiRNA target sequence
cgctgcttctttaattctattat

SEQ ID NO: 26899 - DNA, 23 bp, Artificial sequence
  SiRNA target sequence
gctgcttctttaattctattata

SEQ ID NO: 26900 - DNA, 23 bp, Artificial sequence
  SiRNA target sequence
ctgcttctttaattctattataa

SEQ ID NO: 26901 - DNA, 23 bp, Artificial sequence
  SiRNA target sequence
tgcttctttaattctattataac

SEQ ID NO: 26902 - DNA, 23 bp, Artificial sequence
  SiRNA target sequence
gcttctttaattctattataaca

SEQ ID NO: 26903 - DNA, 23 bp, Artificial sequence
  SiRNA target sequence
cttctttaattctattataacaa

SEQ ID NO: 26904 - DNA, 23 bp, Artificial sequence
  SiRNA target sequence
ttctttaattctattataacaag

SEQ ID NO: 26905 - DNA, 23 bp, Artificial sequence
  SiRNA target sequence
tctttaattctattataacaaga

SEQ ID NO: 26906 - DNA, 23 bp, Artificial sequence
  SiRNA target sequence
ctttaattctattataacaagaa

SEQ ID NO: 26907 - DNA, 23 bp, Artificial sequence
  SiRNA target sequence
tttaattctattataacaagaat

SEQ ID NO: 26908 - DNA, 23 bp, Artificial sequence
  SiRNA target sequence
ttaattctattataacaagaatc

SEQ ID NO: 26909 - DNA, 23 bp, Artificial sequence
  SiRNA target sequence
taattctattataacaagaatcg

SEQ ID NO: 26910 - DNA, 23 bp, Artificial sequence
  SiRNA target sequence
aattctattataacaagaatcgt

SEQ ID NO: 26911 - DNA, 23 bp, Artificial sequence
  SiRNA target sequence
attctattataacaagaatcgtg

SEQ ID NO: 26912 - DNA, 23 bp, Artificial sequence
  SiRNA target sequence
ttctattataacaagaatcgtgt

SEQ ID NO: 26913 - DNA, 23 bp, Artificial sequence
  SiRNA target sequence
tctattataacaagaatcgtgtt

SEQ ID NO: 26914 - DNA, 23 bp, Artificial sequence
  SiRNA target sequence
ctattataacaagaatcgtgttt

SEQ ID NO: 26915 - DNA, 23 bp, Artificial sequence
  SiRNA target sequence
tattataacaagaatcgtgttta

SEQ ID NO: 26916 - DNA, 23 bp, Artificial sequence
  SiRNA target sequence
attataacaagaatcgtgtttaa

SEQ ID NO: 26917 - DNA, 23 bp, Artificial sequence
  SiRNA target sequence
ttataacaagaatcgtgtttaag

SEQ ID NO: 26918 - DNA, 23 bp, Artificial sequence
  SiRNA target sequence
tataacaagaatcgtgtttaagt

SEQ ID NO: 26919 - DNA, 23 bp, Artificial sequence
  SiRNA target sequence
ataacaagaatcgtgtttaagta

SEQ ID NO: 26920 - DNA, 23 bp, Artificial sequence
  SiRNA target sequence
taacaagaatcgtgtttaagtaa

SEQ ID NO: 26921 - DNA, 23 bp, Artificial sequence
  SiRNA target sequence
aacaagaatcgtgtttaagtaaa

SEQ ID NO: 26922 - DNA, 23 bp, Artificial sequence
  SiRNA target sequence
acaagaatcgtgtttaagtaaat

SEQ ID NO: 26923 - DNA, 23 bp, Artificial sequence
  SiRNA target sequence
caagaatcgtgtttaagtaaatc

SEQ ID NO: 26924 - DNA, 23 bp, Artificial sequence
  SiRNA target sequence
aagaatcgtgtttaagtaaatca

SEQ ID NO: 26925 - DNA, 23 bp, Artificial sequence
  SiRNA target sequence
agaatcgtgtttaagtaaatcaa

SEQ ID NO: 26926 - DNA, 23 bp, Artificial sequence
  SiRNA target sequence
gaatcgtgtttaagtaaatcaat

SEQ ID NO: 26927 - DNA, 23 bp, Artificial sequence
  SiRNA target sequence
aatcgtgtttaagtaaatcaatt

SEQ ID NO: 26928 - DNA, 23 bp, Artificial sequence
  SiRNA target sequence
atcgtgtttaagtaaatcaattc

SEQ ID NO: 26929 - DNA, 23 bp, Artificial sequence
  SiRNA target sequence
tcgtgtttaagtaaatcaattcc

SEQ ID NO: 26930 - DNA, 23 bp, Artificial sequence
  SiRNA target sequence
cgtgtttaagtaaatcaattcct

SEQ ID NO: 26931 - DNA, 23 bp, Artificial sequence
  SiRNA target sequence
gtgtttaagtaaatcaattcctg

SEQ ID NO: 26932 - DNA, 23 bp, Artificial sequence
  SiRNA target sequence
tgtttaagtaaatcaattcctgt

SEQ ID NO: 26933 - DNA, 23 bp, Artificial sequence
  SiRNA target sequence
gtttaagtaaatcaattcctgtt

SEQ ID NO: 26934 - DNA, 23 bp, Artificial sequence
  SiRNA target sequence
tttaagtaaatcaattcctgttc

SEQ ID NO: 26935 - DNA, 23 bp, Artificial sequence
  SiRNA target sequence
ttaagtaaatcaattcctgttct

SEQ ID NO: 26936 - DNA, 23 bp, Artificial sequence
  SiRNA target sequence
taagtaaatcaattcctgttcta

SEQ ID NO: 26937 - DNA, 23 bp, Artificial sequence
  SiRNA target sequence
aagtaaatcaattcctgttctac

SEQ ID NO: 26938 - DNA, 23 bp, Artificial sequence
  SiRNA target sequence
agtaaatcaattcctgttctact

SEQ ID NO: 26939 - DNA, 23 bp, Artificial sequence
  SiRNA target sequence
gtaaatcaattcctgttctactt

SEQ ID NO: 26940 - DNA, 23 bp, Artificial sequence
  SiRNA target sequence
taaatcaattcctgttctacttt

SEQ ID NO: 26941 - DNA, 23 bp, Artificial sequence
  SiRNA target sequence
aaatcaattcctgttctactttt

SEQ ID NO: 26942 - DNA, 23 bp, Artificial sequence
  SiRNA target sequence
aatcaattcctgttctactttta

SEQ ID NO: 26943 - DNA, 23 bp, Artificial sequence
  SiRNA target sequence
atcaattcctgttctacttttaa

SEQ ID NO: 26944 - DNA, 23 bp, Artificial sequence
  SiRNA target sequence
tcaattcctgttctacttttaaa

SEQ ID NO: 26945 - DNA, 23 bp, Artificial sequence
  SiRNA target sequence
caattcctgttctacttttaaat

SEQ ID NO: 26946 - DNA, 23 bp, Artificial sequence
  SiRNA target sequence
aattcctgttctacttttaaatt

SEQ ID NO: 26947 - DNA, 23 bp, Artificial sequence
  SiRNA target sequence
attcctgttctacttttaaattt

SEQ ID NO: 26948 - DNA, 23 bp, Artificial sequence
  SiRNA target sequence
ttcctgttctacttttaaatttt

SEQ ID NO: 26949 - DNA, 23 bp, Artificial sequence
  SiRNA target sequence
tcctgttctacttttaaattttt

SEQ ID NO: 26950 - DNA, 23 bp, Artificial sequence
  SiRNA target sequence
cctgttctacttttaaatttttc

SEQ ID NO: 26951 - DNA, 23 bp, Artificial sequence
  SiRNA target sequence
ctgttctacttttaaatttttca

SEQ ID NO: 26952 - DNA, 23 bp, Artificial sequence
  SiRNA target sequence
tgttctacttttaaatttttcat

SEQ ID NO: 26953 - DNA, 23 bp, Artificial sequence
  SiRNA target sequence
gttctacttttaaatttttcatt

SEQ ID NO: 26954 - DNA, 23 bp, Artificial sequence
  SiRNA target sequence
ttctacttttaaatttttcatta

SEQ ID NO: 26955 - DNA, 23 bp, Artificial sequence
  SiRNA target sequence
tctacttttaaatttttcattaa

SEQ ID NO: 26956 - DNA, 23 bp, Artificial sequence
  SiRNA target sequence
ctacttttaaatttttcattaat

SEQ ID NO: 26957 - DNA, 23 bp, Artificial sequence
  SiRNA target sequence
tacttttaaatttttcattaata

SEQ ID NO: 26958 - DNA, 23 bp, Artificial sequence
  SiRNA target sequence
acttttaaatttttcattaatat

SEQ ID NO: 26959 - DNA, 23 bp, Artificial sequence
  SiRNA target sequence
cttttaaatttttcattaatata

SEQ ID NO: 26960 - DNA, 23 bp, Artificial sequence
  SiRNA target sequence
ttttaaatttttcattaatataa

SEQ ID NO: 26961 - DNA, 23 bp, Artificial sequence
  SiRNA target sequence
tttaaatttttcattaatataat

SEQ ID NO: 26962 - DNA, 23 bp, Artificial sequence
  SiRNA target sequence
ttaaatttttcattaatataatc

SEQ ID NO: 26963 - DNA, 23 bp, Artificial sequence
  SiRNA target sequence
taaatttttcattaatataatct

SEQ ID NO: 26964 - DNA, 23 bp, Artificial sequence
  SiRNA target sequence
aaatttttcattaatataatcta

SEQ ID NO: 26965 - DNA, 23 bp, Artificial sequence
  SiRNA target sequence
aatttttcattaatataatctac

SEQ ID NO: 26966 - DNA, 23 bp, Artificial sequence
  SiRNA target sequence
atttttcattaatataatctact

SEQ ID NO: 26967 - DNA, 23 bp, Artificial sequence
  SiRNA target sequence
tttttcattaatataatctacta

SEQ ID NO: 26968 - DNA, 23 bp, Artificial sequence
  SiRNA target sequence
ttttcattaatataatctactaa

SEQ ID NO: 26969 - DNA, 23 bp, Artificial sequence
  SiRNA target sequence
tttcattaatataatctactaaa

SEQ ID NO: 26970 - DNA, 23 bp, Artificial sequence
  SiRNA target sequence
ttcattaatataatctactaaag

SEQ ID NO: 26971 - DNA, 23 bp, Artificial sequence
  SiRNA target sequence
tcattaatataatctactaaagt

SEQ ID NO: 26972 - DNA, 23 bp, Artificial sequence
  SiRNA target sequence
cattaatataatctactaaagta

SEQ ID NO: 26973 - DNA, 23 bp, Artificial sequence
  SiRNA target sequence
attaatataatctactaaagtat

SEQ ID NO: 26974 - DNA, 23 bp, Artificial sequence
  SiRNA target sequence
ttaatataatctactaaagtatt

SEQ ID NO: 26975 - DNA, 23 bp, Artificial sequence
  SiRNA target sequence
taatataatctactaaagtatta

SEQ ID NO: 26976 - DNA, 23 bp, Artificial sequence
  SiRNA target sequence
aatataatctactaaagtattat

SEQ ID NO: 26977 - DNA, 23 bp, Artificial sequence
  SiRNA target sequence
atataatctactaaagtattatc

SEQ ID NO: 26978 - DNA, 23 bp, Artificial sequence
  SiRNA target sequence
tataatctactaaagtattatcc

SEQ ID NO: 26979 - DNA, 23 bp, Artificial sequence
  SiRNA target sequence
ataatctactaaagtattatcca

SEQ ID NO: 26980 - DNA, 23 bp, Artificial sequence
  SiRNA target sequence
taatctactaaagtattatccaa

SEQ ID NO: 26981 - DNA, 23 bp, Artificial sequence
  SiRNA target sequence
aatctactaaagtattatccaaa

SEQ ID NO: 26982 - DNA, 23 bp, Artificial sequence
  SiRNA target sequence
atctactaaagtattatccaaat

SEQ ID NO: 26983 - DNA, 23 bp, Artificial sequence
  SiRNA target sequence
tctactaaagtattatccaaatc

SEQ ID NO: 26984 - DNA, 23 bp, Artificial sequence
  SiRNA target sequence
ctactaaagtattatccaaatct

SEQ ID NO: 26985 - DNA, 23 bp, Artificial sequence
  SiRNA target sequence
tactaaagtattatccaaatctt

SEQ ID NO: 26986 - DNA, 23 bp, Artificial sequence
  SiRNA target sequence
actaaagtattatccaaatcttc

SEQ ID NO: 26987 - DNA, 23 bp, Artificial sequence
  SiRNA target sequence
ctaaagtattatccaaatcttct

SEQ ID NO: 26988 - DNA, 23 bp, Artificial sequence
  SiRNA target sequence
taaagtattatccaaatcttctc

SEQ ID NO: 26989 - DNA, 23 bp, Artificial sequence
  SiRNA target sequence
aaagtattatccaaatcttctcc

SEQ ID NO: 26990 - DNA, 23 bp, Artificial sequence
  SiRNA target sequence
aagtattatccaaatcttctcct

SEQ ID NO: 26991 - DNA, 23 bp, Artificial sequence
  SiRNA target sequence
agtattatccaaatcttctcctc

SEQ ID NO: 26992 - DNA, 23 bp, Artificial sequence
  SiRNA target sequence
gtattatccaaatcttctcctcc

SEQ ID NO: 26993 - DNA, 23 bp, Artificial sequence
  SiRNA target sequence
tattatccaaatcttctcctcct

SEQ ID NO: 26994 - DNA, 23 bp, Artificial sequence
  SiRNA target sequence
attatccaaatcttctcctccta

SEQ ID NO: 26995 - DNA, 23 bp, Artificial sequence
  SiRNA target sequence
ttatccaaatcttctcctcctaa

SEQ ID NO: 26996 - DNA, 23 bp, Artificial sequence
  SiRNA target sequence
tatccaaatcttctcctcctaaa

SEQ ID NO: 26997 - DNA, 23 bp, Artificial sequence
  SiRNA target sequence
atccaaatcttctcctcctaaaa

SEQ ID NO: 26998 - DNA, 23 bp, Artificial sequence
  SiRNA target sequence
tccaaatcttctcctcctaaaaa

SEQ ID NO: 26999 - DNA, 23 bp, Artificial sequence
  SiRNA target sequence
ccaaatcttctcctcctaaaaaa

SEQ ID NO: 27000 - DNA, 23 bp, Artificial sequence
  SiRNA target sequence
caaatcttctcctcctaaaaaag

SEQ ID NO: 27001 - DNA, 23 bp, Artificial sequence
  SiRNA target sequence
aaatcttctcctcctaaaaaagt

SEQ ID NO: 27002 - DNA, 23 bp, Artificial sequence
  SiRNA target sequence
aatcttctcctcctaaaaaagta

SEQ ID NO: 27003 - DNA, 23 bp, Artificial sequence
  SiRNA target sequence
atcttctcctcctaaaaaagtat

SEQ ID NO: 27004 - DNA, 23 bp, Artificial sequence
  SiRNA target sequence
tcttctcctcctaaaaaagtatt

SEQ ID NO: 27005 - DNA, 23 bp, Artificial sequence
  SiRNA target sequence
cttctcctcctaaaaaagtattt

SEQ ID NO: 27006 - DNA, 23 bp, Artificial sequence
  SiRNA target sequence
ttctcctcctaaaaaagtatttc

SEQ ID NO: 27007 - DNA, 23 bp, Artificial sequence
  SiRNA target sequence
tctcctcctaaaaaagtatttcc

SEQ ID NO: 27008 - DNA, 23 bp, Artificial sequence
  SiRNA target sequence
ctcctcctaaaaaagtatttccg

SEQ ID NO: 27009 - DNA, 23 bp, Artificial sequence
  SiRNA target sequence
tcctcctaaaaaagtatttccgt

SEQ ID NO: 27010 - DNA, 23 bp, Artificial sequence
  SiRNA target sequence
cctcctaaaaaagtatttccgtt

SEQ ID NO: 27011 - DNA, 23 bp, Artificial sequence
  SiRNA target sequence
ctcctaaaaaagtatttccgtta

SEQ ID NO: 27012 - DNA, 23 bp, Artificial sequence
  SiRNA target sequence
tcctaaaaaagtatttccgttag

SEQ ID NO: 27013 - DNA, 23 bp, Artificial sequence
  SiRNA target sequence
cctaaaaaagtatttccgttagt

SEQ ID NO: 27014 - DNA, 23 bp, Artificial sequence
  SiRNA target sequence
ctaaaaaagtatttccgttagta

SEQ ID NO: 27015 - DNA, 23 bp, Artificial sequence
  SiRNA target sequence
taaaaaagtatttccgttagtag

SEQ ID NO: 27016 - DNA, 23 bp, Artificial sequence
  SiRNA target sequence
aaaaaagtatttccgttagtaga

SEQ ID NO: 27017 - DNA, 23 bp, Artificial sequence
  SiRNA target sequence
aaaaagtatttccgttagtagat

SEQ ID NO: 27018 - DNA, 23 bp, Artificial sequence
  SiRNA target sequence
aaaagtatttccgttagtagatt

SEQ ID NO: 27019 - DNA, 23 bp, Artificial sequence
  SiRNA target sequence
aaagtatttccgttagtagattt

SEQ ID NO: 27020 - DNA, 23 bp, Artificial sequence
  SiRNA target sequence
aagtatttccgttagtagatttt

SEQ ID NO: 27021 - DNA, 23 bp, Artificial sequence
  SiRNA target sequence
agtatttccgttagtagatttta

SEQ ID NO: 27022 - DNA, 23 bp, Artificial sequence
  SiRNA target sequence
gtatttccgttagtagattttac

SEQ ID NO: 27023 - DNA, 23 bp, Artificial sequence
  SiRNA target sequence
tatttccgttagtagattttaca

SEQ ID NO: 27024 - DNA, 23 bp, Artificial sequence
  SiRNA target sequence
atttccgttagtagattttacat

SEQ ID NO: 27025 - DNA, 23 bp, Artificial sequence
  SiRNA target sequence
tttccgttagtagattttacatg

SEQ ID NO: 27026 - DNA, 23 bp, Artificial sequence
  SiRNA target sequence
ttccgttagtagattttacatga

SEQ ID NO: 27027 - DNA, 23 bp, Artificial sequence
  SiRNA target sequence
tccgttagtagattttacatgaa

SEQ ID NO: 27028 - DNA, 23 bp, Artificial sequence
  SiRNA target sequence
ccgttagtagattttacatgaaa

SEQ ID NO: 27029 - DNA, 23 bp, Artificial sequence
  SiRNA target sequence
cgttagtagattttacatgaaaa

SEQ ID NO: 27030 - DNA, 23 bp, Artificial sequence
  SiRNA target sequence
gttagtagattttacatgaaaaa

SEQ ID NO: 27031 - DNA, 23 bp, Artificial sequence
  SiRNA target sequence
ttagtagattttacatgaaaaat

SEQ ID NO: 27032 - DNA, 23 bp, Artificial sequence
  SiRNA target sequence
tagtagattttacatgaaaaata

SEQ ID NO: 27033 - DNA, 23 bp, Artificial sequence
  SiRNA target sequence
agtagattttacatgaaaaatac

SEQ ID NO: 27034 - DNA, 23 bp, Artificial sequence
  SiRNA target sequence
gtagattttacatgaaaaatacc

SEQ ID NO: 27035 - DNA, 23 bp, Artificial sequence
  SiRNA target sequence
tagattttacatgaaaaatacca

SEQ ID NO: 27036 - DNA, 23 bp, Artificial sequence
  SiRNA target sequence
agattttacatgaaaaataccat

SEQ ID NO: 27037 - DNA, 23 bp, Artificial sequence
  SiRNA target sequence
gattttacatgaaaaataccatt

SEQ ID NO: 27038 - DNA, 23 bp, Artificial sequence
  SiRNA target sequence
attttacatgaaaaataccatta

SEQ ID NO: 27039 - DNA, 23 bp, Artificial sequence
  SiRNA target sequence
ttttacatgaaaaataccattat

SEQ ID NO: 27040 - DNA, 23 bp, Artificial sequence
  SiRNA target sequence
tttacatgaaaaataccattatc

SEQ ID NO: 27041 - DNA, 23 bp, Artificial sequence
  SiRNA target sequence
ttacatgaaaaataccattatct

SEQ ID NO: 27042 - DNA, 23 bp, Artificial sequence
  SiRNA target sequence
tacatgaaaaataccattatcta

SEQ ID NO: 27043 - DNA, 23 bp, Artificial sequence
  SiRNA target sequence
acatgaaaaataccattatctaa

SEQ ID NO: 27044 - DNA, 23 bp, Artificial sequence
  SiRNA target sequence
catgaaaaataccattatctaat

SEQ ID NO: 27045 - DNA, 23 bp, Artificial sequence
  SiRNA target sequence
atgaaaaataccattatctaatt

SEQ ID NO: 27046 - DNA, 23 bp, Artificial sequence
  SiRNA target sequence
tgaaaaataccattatctaattc

SEQ ID NO: 27047 - DNA, 23 bp, Artificial sequence
  SiRNA target sequence
gaaaaataccattatctaattct

SEQ ID NO: 27048 - DNA, 23 bp, Artificial sequence
  SiRNA target sequence
aaaaataccattatctaattcta

SEQ ID NO: 27049 - DNA, 23 bp, Artificial sequence
  SiRNA target sequence
aaaataccattatctaattctaa

SEQ ID NO: 27050 - DNA, 23 bp, Artificial sequence
  SiRNA target sequence
aaataccattatctaattctaat

SEQ ID NO: 27051 - DNA, 23 bp, Artificial sequence
  SiRNA target sequence
aataccattatctaattctaata

SEQ ID NO: 27052 - DNA, 23 bp, Artificial sequence
  SiRNA target sequence
ataccattatctaattctaatat

SEQ ID NO: 27053 - DNA, 23 bp, Artificial sequence
  SiRNA target sequence
taccattatctaattctaatata

SEQ ID NO: 27054 - DNA, 23 bp, Artificial sequence
  SiRNA target sequence
accattatctaattctaatatac

SEQ ID NO: 27055 - DNA, 23 bp, Artificial sequence
  SiRNA target sequence
ccattatctaattctaatatact

SEQ ID NO: 27056 - DNA, 23 bp, Artificial sequence
  SiRNA target sequence
cattatctaattctaatatacta

SEQ ID NO: 27057 - DNA, 23 bp, Artificial sequence
  SiRNA target sequence
attatctaattctaatatactaa

SEQ ID NO: 27058 - DNA, 23 bp, Artificial sequence
  SiRNA target sequence
ttatctaattctaatatactaat

SEQ ID NO: 27059 - DNA, 23 bp, Artificial sequence
  SiRNA target sequence
tatctaattctaatatactaatg

SEQ ID NO: 27060 - DNA, 23 bp, Artificial sequence
  SiRNA target sequence
atctaattctaatatactaatgt

SEQ ID NO: 27061 - DNA, 23 bp, Artificial sequence
  SiRNA target sequence
tctaattctaatatactaatgtc

SEQ ID NO: 27062 - DNA, 23 bp, Artificial sequence
  SiRNA target sequence
ctaattctaatatactaatgtca

SEQ ID NO: 27063 - DNA, 23 bp, Artificial sequence
  SiRNA target sequence
taattctaatatactaatgtcaa

SEQ ID NO: 27064 - DNA, 23 bp, Artificial sequence
  SiRNA target sequence
aattctaatatactaatgtcaaa

SEQ ID NO: 27065 - DNA, 23 bp, Artificial sequence
  SiRNA target sequence
attctaatatactaatgtcaaaa

SEQ ID NO: 27066 - DNA, 23 bp, Artificial sequence
  SiRNA target sequence
ttctaatatactaatgtcaaaag

SEQ ID NO: 27067 - DNA, 23 bp, Artificial sequence
  SiRNA target sequence
tctaatatactaatgtcaaaagt

SEQ ID NO: 27068 - DNA, 23 bp, Artificial sequence
  SiRNA target sequence
ctaatatactaatgtcaaaagtt

SEQ ID NO: 27069 - DNA, 23 bp, Artificial sequence
  SiRNA target sequence
taatatactaatgtcaaaagttc

SEQ ID NO: 27070 - DNA, 23 bp, Artificial sequence
  SiRNA target sequence
aatatactaatgtcaaaagttcc

SEQ ID NO: 27071 - DNA, 23 bp, Artificial sequence
  SiRNA target sequence
atatactaatgtcaaaagttcct

SEQ ID NO: 27072 - DNA, 23 bp, Artificial sequence
  SiRNA target sequence
tatactaatgtcaaaagttcctc

SEQ ID NO: 27073 - DNA, 23 bp, Artificial sequence
  SiRNA target sequence
atactaatgtcaaaagttcctcc

SEQ ID NO: 27074 - DNA, 23 bp, Artificial sequence
  SiRNA target sequence
tactaatgtcaaaagttcctcct

SEQ ID NO: 27075 - DNA, 23 bp, Artificial sequence
  SiRNA target sequence
actaatgtcaaaagttcctcctc

SEQ ID NO: 27076 - DNA, 23 bp, Artificial sequence
  SiRNA target sequence
ctaatgtcaaaagttcctcctcc

SEQ ID NO: 27077 - DNA, 23 bp, Artificial sequence
  SiRNA target sequence
taatgtcaaaagttcctcctccc

SEQ ID NO: 27078 - DNA, 23 bp, Artificial sequence
  SiRNA target sequence
aatgtcaaaagttcctcctccca

SEQ ID NO: 27079 - DNA, 23 bp, Artificial sequence
  SiRNA target sequence
atgtcaaaagttcctcctcccag

SEQ ID NO: 27080 - DNA, 23 bp, Artificial sequence
  SiRNA target sequence
tgtcaaaagttcctcctcccaga

SEQ ID NO: 27081 - DNA, 23 bp, Artificial sequence
  SiRNA target sequence
gtcaaaagttcctcctcccagat

SEQ ID NO: 27082 - DNA, 23 bp, Artificial sequence
  SiRNA target sequence
tcaaaagttcctcctcccagatc

SEQ ID NO: 27083 - DNA, 23 bp, Artificial sequence
  SiRNA target sequence
caaaagttcctcctcccagatca

SEQ ID NO: 27084 - DNA, 23 bp, Artificial sequence
  SiRNA target sequence
aaaagttcctcctcccagatcat

SEQ ID NO: 27085 - DNA, 23 bp, Artificial sequence
  SiRNA target sequence
aaagttcctcctcccagatcata

SEQ ID NO: 27086 - DNA, 23 bp, Artificial sequence
  SiRNA target sequence
aagttcctcctcccagatcataa

SEQ ID NO: 27087 - DNA, 23 bp, Artificial sequence
  SiRNA target sequence
agttcctcctcccagatcataaa

SEQ ID NO: 27088 - DNA, 23 bp, Artificial sequence
  SiRNA target sequence
gttcctcctcccagatcataaac

SEQ ID NO: 27089 - DNA, 23 bp, Artificial sequence
  SiRNA target sequence
ttcctcctcccagatcataaaca

SEQ ID NO: 27090 - DNA, 23 bp, Artificial sequence
  SiRNA target sequence
tcctcctcccagatcataaacag

SEQ ID NO: 27091 - DNA, 23 bp, Artificial sequence
  SiRNA target sequence
cctcctcccagatcataaacagc

SEQ ID NO: 27092 - DNA, 23 bp, Artificial sequence
  SiRNA target sequence
ctcctcccagatcataaacagct

SEQ ID NO: 27093 - DNA, 23 bp, Artificial sequence
  SiRNA target sequence
tcctcccagatcataaacagcta

SEQ ID NO: 27094 - DNA, 23 bp, Artificial sequence
  SiRNA target sequence
cctcccagatcataaacagctat

SEQ ID NO: 27095 - DNA, 23 bp, Artificial sequence
  SiRNA target sequence
ctcccagatcataaacagctata

SEQ ID NO: 27096 - DNA, 23 bp, Artificial sequence
  SiRNA target sequence
tcccagatcataaacagctataa

SEQ ID NO: 27097 - DNA, 23 bp, Artificial sequence
  SiRNA target sequence
cccagatcataaacagctataat

SEQ ID NO: 27098 - DNA, 23 bp, Artificial sequence
  SiRNA target sequence
ccagatcataaacagctataata

SEQ ID NO: 27099 - DNA, 23 bp, Artificial sequence
  SiRNA target sequence
cagatcataaacagctataatac

SEQ ID NO: 27100 - DNA, 23 bp, Artificial sequence
  SiRNA target sequence
agatcataaacagctataatacc

SEQ ID NO: 27101 - DNA, 23 bp, Artificial sequence
  SiRNA target sequence
gatcataaacagctataataccc

SEQ ID NO: 27102 - DNA, 23 bp, Artificial sequence
  SiRNA target sequence
atcataaacagctataataccct

SEQ ID NO: 27103 - DNA, 23 bp, Artificial sequence
  SiRNA target sequence
tcataaacagctataataccctg

SEQ ID NO: 27104 - DNA, 23 bp, Artificial sequence
  SiRNA target sequence
cataaacagctataataccctgt

SEQ ID NO: 27105 - DNA, 23 bp, Artificial sequence
  SiRNA target sequence
ataaacagctataataccctgtg

SEQ ID NO: 27106 - DNA, 23 bp, Artificial sequence
  SiRNA target sequence
taaacagctataataccctgtgc

SEQ ID NO: 27107 - DNA, 23 bp, Artificial sequence
  SiRNA target sequence
aaacagctataataccctgtgca

SEQ ID NO: 27108 - DNA, 23 bp, Artificial sequence
  SiRNA target sequence
aacagctataataccctgtgcag

SEQ ID NO: 27109 - DNA, 23 bp, Artificial sequence
  SiRNA target sequence
acagctataataccctgtgcaga

SEQ ID NO: 27110 - DNA, 23 bp, Artificial sequence
  SiRNA target sequence
cagctataataccctgtgcagac

SEQ ID NO: 27111 - DNA, 23 bp, Artificial sequence
  SiRNA target sequence
agctataataccctgtgcagact

SEQ ID NO: 27112 - DNA, 23 bp, Artificial sequence
  SiRNA target sequence
gctataataccctgtgcagactt

SEQ ID NO: 27113 - DNA, 23 bp, Artificial sequence
  SiRNA target sequence
ctataataccctgtgcagacttg

SEQ ID NO: 27114 - DNA, 23 bp, Artificial sequence
  SiRNA target sequence
tataataccctgtgcagacttgt

SEQ ID NO: 27115 - DNA, 23 bp, Artificial sequence
  SiRNA target sequence
ataataccctgtgcagacttgtc

SEQ ID NO: 27116 - DNA, 23 bp, Artificial sequence
  SiRNA target sequence
taataccctgtgcagacttgtca

SEQ ID NO: 27117 - DNA, 23 bp, Artificial sequence
  SiRNA target sequence
aataccctgtgcagacttgtcaa

SEQ ID NO: 27118 - DNA, 23 bp, Artificial sequence
  SiRNA target sequence
ataccctgtgcagacttgtcaag

SEQ ID NO: 27119 - DNA, 23 bp, Artificial sequence
  SiRNA target sequence
taccctgtgcagacttgtcaagc

SEQ ID NO: 27120 - DNA, 23 bp, Artificial sequence
  SiRNA target sequence
accctgtgcagacttgtcaagcc

SEQ ID NO: 27121 - DNA, 23 bp, Artificial sequence
  SiRNA target sequence
ccctgtgcagacttgtcaagccc

SEQ ID NO: 27122 - DNA, 23 bp, Artificial sequence
  SiRNA target sequence
cctgtgcagacttgtcaagccca

SEQ ID NO: 27123 - DNA, 23 bp, Artificial sequence
  SiRNA target sequence
ctgtgcagacttgtcaagcccat

SEQ ID NO: 27124 - DNA, 23 bp, Artificial sequence
  SiRNA target sequence
tgtgcagacttgtcaagcccata

SEQ ID NO: 27125 - DNA, 23 bp, Artificial sequence
  SiRNA target sequence
gtgcagacttgtcaagcccataa

SEQ ID NO: 27126 - DNA, 23 bp, Artificial sequence
  SiRNA target sequence
tgcagacttgtcaagcccataag

SEQ ID NO: 27127 - DNA, 23 bp, Artificial sequence
  SiRNA target sequence
gcagacttgtcaagcccataagc

SEQ ID NO: 27128 - DNA, 23 bp, Artificial sequence
  SiRNA target sequence
cagacttgtcaagcccataagca

SEQ ID NO: 27129 - DNA, 23 bp, Artificial sequence
  SiRNA target sequence
agacttgtcaagcccataagcaa

SEQ ID NO: 27130 - DNA, 23 bp, Artificial sequence
  SiRNA target sequence
gacttgtcaagcccataagcaag

SEQ ID NO: 27131 - DNA, 23 bp, Artificial sequence
  SiRNA target sequence
acttgtcaagcccataagcaagt

SEQ ID NO: 27132 - DNA, 23 bp, Artificial sequence
  SiRNA target sequence
cttgtcaagcccataagcaagtg

SEQ ID NO: 27133 - DNA, 23 bp, Artificial sequence
  SiRNA target sequence
ttgtcaagcccataagcaagtgc

SEQ ID NO: 27134 - DNA, 23 bp, Artificial sequence
  SiRNA target sequence
tgtcaagcccataagcaagtgct

SEQ ID NO: 27135 - DNA, 23 bp, Artificial sequence
  SiRNA target sequence
gtcaagcccataagcaagtgctg

SEQ ID NO: 27136 - DNA, 23 bp, Artificial sequence
  SiRNA target sequence
tcaagcccataagcaagtgctgc

SEQ ID NO: 27137 - DNA, 23 bp, Artificial sequence
  SiRNA target sequence
caagcccataagcaagtgctgcc

SEQ ID NO: 27138 - DNA, 23 bp, Artificial sequence
  SiRNA target sequence
aagcccataagcaagtgctgccg

SEQ ID NO: 27139 - DNA, 23 bp, Artificial sequence
  SiRNA target sequence
agcccataagcaagtgctgccgc

SEQ ID NO: 27140 - DNA, 23 bp, Artificial sequence
  SiRNA target sequence
gcccataagcaagtgctgccgca

SEQ ID NO: 27141 - DNA, 23 bp, Artificial sequence
  SiRNA target sequence
cccataagcaagtgctgccgcag

SEQ ID NO: 27142 - DNA, 23 bp, Artificial sequence
  SiRNA target sequence
ccataagcaagtgctgccgcagt

SEQ ID NO: 27143 - DNA, 23 bp, Artificial sequence
  SiRNA target sequence
cataagcaagtgctgccgcagta

SEQ ID NO: 27144 - DNA, 23 bp, Artificial sequence
  SiRNA target sequence
ataagcaagtgctgccgcagtag

SEQ ID NO: 27145 - DNA, 23 bp, Artificial sequence
  SiRNA target sequence
taagcaagtgctgccgcagtagg

SEQ ID NO: 27146 - DNA, 23 bp, Artificial sequence
  SiRNA target sequence
aagcaagtgctgccgcagtaggc

SEQ ID NO: 27147 - DNA, 23 bp, Artificial sequence
  SiRNA target sequence
agcaagtgctgccgcagtaggct

SEQ ID NO: 27148 - DNA, 23 bp, Artificial sequence
  SiRNA target sequence
gcaagtgctgccgcagtaggctc

SEQ ID NO: 27149 - DNA, 23 bp, Artificial sequence
  SiRNA target sequence
caagtgctgccgcagtaggctca

SEQ ID NO: 27150 - DNA, 23 bp, Artificial sequence
  SiRNA target sequence
aagtgctgccgcagtaggctcat

SEQ ID NO: 27151 - DNA, 23 bp, Artificial sequence
  SiRNA target sequence
agtgctgccgcagtaggctcatt

SEQ ID NO: 27152 - DNA, 23 bp, Artificial sequence
  SiRNA target sequence
gtgctgccgcagtaggctcatta

SEQ ID NO: 27153 - DNA, 23 bp, Artificial sequence
  SiRNA target sequence
tgctgccgcagtaggctcattaa

SEQ ID NO: 27154 - DNA, 23 bp, Artificial sequence
  SiRNA target sequence
gctgccgcagtaggctcattaat

SEQ ID NO: 27155 - DNA, 23 bp, Artificial sequence
  SiRNA target sequence
ctgccgcagtaggctcattaatc

SEQ ID NO: 27156 - DNA, 23 bp, Artificial sequence
  SiRNA target sequence
tgccgcagtaggctcattaatca

SEQ ID NO: 27157 - DNA, 23 bp, Artificial sequence
  SiRNA target sequence
gccgcagtaggctcattaatcac

SEQ ID NO: 27158 - DNA, 23 bp, Artificial sequence
  SiRNA target sequence
ccgcagtaggctcattaatcact

SEQ ID NO: 27159 - DNA, 23 bp, Artificial sequence
  SiRNA target sequence
cgcagtaggctcattaatcactc

SEQ ID NO: 27160 - DNA, 23 bp, Artificial sequence
  SiRNA target sequence
gcagtaggctcattaatcactct

SEQ ID NO: 27161 - DNA, 23 bp, Artificial sequence
  SiRNA target sequence
cagtaggctcattaatcactcta

SEQ ID NO: 27162 - DNA, 23 bp, Artificial sequence
  SiRNA target sequence
agtaggctcattaatcactctaa

SEQ ID NO: 27163 - DNA, 23 bp, Artificial sequence
  SiRNA target sequence
gtaggctcattaatcactctaag

SEQ ID NO: 27164 - DNA, 23 bp, Artificial sequence
  SiRNA target sequence
taggctcattaatcactctaagc

SEQ ID NO: 27165 - DNA, 23 bp, Artificial sequence
  SiRNA target sequence
aggctcattaatcactctaagca

SEQ ID NO: 27166 - DNA, 23 bp, Artificial sequence
  SiRNA target sequence
ggctcattaatcactctaagcac

SEQ ID NO: 27167 - DNA, 23 bp, Artificial sequence
  SiRNA target sequence
gctcattaatcactctaagcact

SEQ ID NO: 27168 - DNA, 23 bp, Artificial sequence
  SiRNA target sequence
ctcattaatcactctaagcactt

SEQ ID NO: 27169 - DNA, 23 bp, Artificial sequence
  SiRNA target sequence
tcattaatcactctaagcacttg

SEQ ID NO: 27170 - DNA, 23 bp, Artificial sequence
  SiRNA target sequence
cattaatcactctaagcacttgt

SEQ ID NO: 27171 - DNA, 23 bp, Artificial sequence
  SiRNA target sequence
attaatcactctaagcacttgta

SEQ ID NO: 27172 - DNA, 23 bp, Artificial sequence
  SiRNA target sequence
ttaatcactctaagcacttgtaa

SEQ ID NO: 27173 - DNA, 23 bp, Artificial sequence
  SiRNA target sequence
taatcactctaagcacttgtaat

SEQ ID NO: 27174 - DNA, 23 bp, Artificial sequence
  SiRNA target sequence
aatcactctaagcacttgtaatc

SEQ ID NO: 27175 - DNA, 23 bp, Artificial sequence
  SiRNA target sequence
atcactctaagcacttgtaatcc

SEQ ID NO: 27176 - DNA, 23 bp, Artificial sequence
  SiRNA target sequence
tcactctaagcacttgtaatccc

SEQ ID NO: 27177 - DNA, 23 bp, Artificial sequence
  SiRNA target sequence
cactctaagcacttgtaatcccg

SEQ ID NO: 27178 - DNA, 23 bp, Artificial sequence
  SiRNA target sequence
actctaagcacttgtaatcccgc

SEQ ID NO: 27179 - DNA, 23 bp, Artificial sequence
  SiRNA target sequence
ctctaagcacttgtaatcccgca

SEQ ID NO: 27180 - DNA, 23 bp, Artificial sequence
  SiRNA target sequence
tctaagcacttgtaatcccgcaa

SEQ ID NO: 27181 - DNA, 23 bp, Artificial sequence
  SiRNA target sequence
ctaagcacttgtaatcccgcaat

SEQ ID NO: 27182 - DNA, 23 bp, Artificial sequence
  SiRNA target sequence
taagcacttgtaatcccgcaatc

SEQ ID NO: 27183 - DNA, 23 bp, Artificial sequence
  SiRNA target sequence
aagcacttgtaatcccgcaatcc

SEQ ID NO: 27184 - DNA, 23 bp, Artificial sequence
  SiRNA target sequence
agcacttgtaatcccgcaatcct

SEQ ID NO: 27185 - DNA, 23 bp, Artificial sequence
  SiRNA target sequence
gcacttgtaatcccgcaatcctt

SEQ ID NO: 27186 - DNA, 23 bp, Artificial sequence
  SiRNA target sequence
cacttgtaatcccgcaatccttc

SEQ ID NO: 27187 - DNA, 23 bp, Artificial sequence
  SiRNA target sequence
acttgtaatcccgcaatccttcc

SEQ ID NO: 27188 - DNA, 23 bp, Artificial sequence
  SiRNA target sequence
cttgtaatcccgcaatccttccc

SEQ ID NO: 27189 - DNA, 23 bp, Artificial sequence
  SiRNA target sequence
ttgtaatcccgcaatccttcccg

SEQ ID NO: 27190 - DNA, 23 bp, Artificial sequence
  SiRNA target sequence
tgtaatcccgcaatccttcccgc

SEQ ID NO: 27191 - DNA, 23 bp, Artificial sequence
  SiRNA target sequence
gtaatcccgcaatccttcccgca

SEQ ID NO: 27192 - DNA, 23 bp, Artificial sequence
  SiRNA target sequence
taatcccgcaatccttcccgcat

SEQ ID NO: 27193 - DNA, 23 bp, Artificial sequence
  SiRNA target sequence
aatcccgcaatccttcccgcatc

SEQ ID NO: 27194 - DNA, 23 bp, Artificial sequence
  SiRNA target sequence
atcccgcaatccttcccgcatct

SEQ ID NO: 27195 - DNA, 23 bp, Artificial sequence
  SiRNA target sequence
tcccgcaatccttcccgcatctt

SEQ ID NO: 27196 - DNA, 23 bp, Artificial sequence
  SiRNA target sequence
cccgcaatccttcccgcatcttt

SEQ ID NO: 27197 - DNA, 23 bp, Artificial sequence
  SiRNA target sequence
ccgcaatccttcccgcatcttta

SEQ ID NO: 27198 - DNA, 23 bp, Artificial sequence
  SiRNA target sequence
cgcaatccttcccgcatctttag

SEQ ID NO: 27199 - DNA, 23 bp, Artificial sequence
  SiRNA target sequence
gcaatccttcccgcatctttagt

SEQ ID NO: 27200 - DNA, 23 bp, Artificial sequence
  SiRNA target sequence
caatccttcccgcatctttagta

SEQ ID NO: 27201 - DNA, 23 bp, Artificial sequence
  SiRNA target sequence
aatccttcccgcatctttagtag

SEQ ID NO: 27202 - DNA, 23 bp, Artificial sequence
  SiRNA target sequence
atccttcccgcatctttagtagc

SEQ ID NO: 27203 - DNA, 23 bp, Artificial sequence
  SiRNA target sequence
tccttcccgcatctttagtagct

SEQ ID NO: 27204 - DNA, 23 bp, Artificial sequence
  SiRNA target sequence
ccttcccgcatctttagtagctt

SEQ ID NO: 27205 - DNA, 23 bp, Artificial sequence
  SiRNA target sequence
cttcccgcatctttagtagcttg

SEQ ID NO: 27206 - DNA, 23 bp, Artificial sequence
  SiRNA target sequence
ttcccgcatctttagtagcttgc

SEQ ID NO: 27207 - DNA, 23 bp, Artificial sequence
  SiRNA target sequence
tcccgcatctttagtagcttgcc

SEQ ID NO: 27208 - DNA, 23 bp, Artificial sequence
  SiRNA target sequence
cccgcatctttagtagcttgcct

SEQ ID NO: 27209 - DNA, 23 bp, Artificial sequence
  SiRNA target sequence
ccgcatctttagtagcttgcctt

SEQ ID NO: 27210 - DNA, 23 bp, Artificial sequence
  SiRNA target sequence
cgcatctttagtagcttgccttt

SEQ ID NO: 27211 - DNA, 23 bp, Artificial sequence
  SiRNA target sequence
gcatctttagtagcttgcctttg

SEQ ID NO: 27212 - DNA, 23 bp, Artificial sequence
  SiRNA target sequence
catctttagtagcttgcctttgc

SEQ ID NO: 27213 - DNA, 23 bp, Artificial sequence
  SiRNA target sequence
atctttagtagcttgcctttgca

SEQ ID NO: 27214 - DNA, 23 bp, Artificial sequence
  SiRNA target sequence
tctttagtagcttgcctttgcat

SEQ ID NO: 27215 - DNA, 23 bp, Artificial sequence
  SiRNA target sequence
ctttagtagcttgcctttgcatg

SEQ ID NO: 27216 - DNA, 23 bp, Artificial sequence
  SiRNA target sequence
tttagtagcttgcctttgcatgt

SEQ ID NO: 27217 - DNA, 23 bp, Artificial sequence
  SiRNA target sequence
ttagtagcttgcctttgcatgtc

SEQ ID NO: 27218 - DNA, 23 bp, Artificial sequence
  SiRNA target sequence
tagtagcttgcctttgcatgtca

SEQ ID NO: 27219 - DNA, 23 bp, Artificial sequence
  SiRNA target sequence
agtagcttgcctttgcatgtcat

SEQ ID NO: 27220 - DNA, 23 bp, Artificial sequence
  SiRNA target sequence
gtagcttgcctttgcatgtcatc

SEQ ID NO: 27221 - DNA, 23 bp, Artificial sequence
  SiRNA target sequence
tagcttgcctttgcatgtcatca

SEQ ID NO: 27222 - DNA, 23 bp, Artificial sequence
  SiRNA target sequence
agcttgcctttgcatgtcatcaa

SEQ ID NO: 27223 - DNA, 23 bp, Artificial sequence
  SiRNA target sequence
gcttgcctttgcatgtcatcaaa

SEQ ID NO: 27224 - DNA, 23 bp, Artificial sequence
  SiRNA target sequence
cttgcctttgcatgtcatcaaaa

SEQ ID NO: 27225 - DNA, 23 bp, Artificial sequence
  SiRNA target sequence
ttgcctttgcatgtcatcaaaat

SEQ ID NO: 27226 - DNA, 23 bp, Artificial sequence
  SiRNA target sequence
tgcctttgcatgtcatcaaaata

SEQ ID NO: 27227 - DNA, 23 bp, Artificial sequence
  SiRNA target sequence
gcctttgcatgtcatcaaaatat

SEQ ID NO: 27228 - DNA, 23 bp, Artificial sequence
  SiRNA target sequence
cctttgcatgtcatcaaaatatg

SEQ ID NO: 27229 - DNA, 23 bp, Artificial sequence
  SiRNA target sequence
ctttgcatgtcatcaaaatatgc

SEQ ID NO: 27230 - DNA, 23 bp, Artificial sequence
  SiRNA target sequence
tttgcatgtcatcaaaatatgcg

SEQ ID NO: 27231 - DNA, 23 bp, Artificial sequence
  SiRNA target sequence
ttgcatgtcatcaaaatatgcgg

SEQ ID NO: 27232 - DNA, 23 bp, Artificial sequence
  SiRNA target sequence
tgcatgtcatcaaaatatgcggg

SEQ ID NO: 27233 - DNA, 23 bp, Artificial sequence
  SiRNA target sequence
gcatgtcatcaaaatatgcgggc

SEQ ID NO: 27234 - DNA, 23 bp, Artificial sequence
  SiRNA target sequence
catgtcatcaaaatatgcgggca

SEQ ID NO: 27235 - DNA, 23 bp, Artificial sequence
  SiRNA target sequence
atgtcatcaaaatatgcgggcac

SEQ ID NO: 27236 - DNA, 23 bp, Artificial sequence
  SiRNA target sequence
tgtcatcaaaatatgcgggcact

SEQ ID NO: 27237 - DNA, 23 bp, Artificial sequence
  SiRNA target sequence
gtcatcaaaatatgcgggcactg

SEQ ID NO: 27238 - DNA, 23 bp, Artificial sequence
  SiRNA target sequence
tcatcaaaatatgcgggcactgt

SEQ ID NO: 27239 - DNA, 23 bp, Artificial sequence
  SiRNA target sequence
catcaaaatatgcgggcactgtt

SEQ ID NO: 27240 - DNA, 23 bp, Artificial sequence
  SiRNA target sequence
atcaaaatatgcgggcactgtta

SEQ ID NO: 27241 - DNA, 23 bp, Artificial sequence
  SiRNA target sequence
tcaaaatatgcgggcactgttat

SEQ ID NO: 27242 - DNA, 23 bp, Artificial sequence
  SiRNA target sequence
caaaatatgcgggcactgttata

SEQ ID NO: 27243 - DNA, 23 bp, Artificial sequence
  SiRNA target sequence
aaaatatgcgggcactgttataa

SEQ ID NO: 27244 - DNA, 23 bp, Artificial sequence
  SiRNA target sequence
aaatatgcgggcactgttataac

SEQ ID NO: 27245 - DNA, 23 bp, Artificial sequence
  SiRNA target sequence
aatatgcgggcactgttataaca

SEQ ID NO: 27246 - DNA, 23 bp, Artificial sequence
  SiRNA target sequence
atatgcgggcactgttataacag

SEQ ID NO: 27247 - DNA, 23 bp, Artificial sequence
  SiRNA target sequence
tatgcgggcactgttataacaga

SEQ ID NO: 27248 - DNA, 23 bp, Artificial sequence
  SiRNA target sequence
atgcgggcactgttataacagat

SEQ ID NO: 27249 - DNA, 23 bp, Artificial sequence
  SiRNA target sequence
tgcgggcactgttataacagatc

SEQ ID NO: 27250 - DNA, 23 bp, Artificial sequence
  SiRNA target sequence
gcgggcactgttataacagatct

SEQ ID NO: 27251 - DNA, 23 bp, Artificial sequence
  SiRNA target sequence
cgggcactgttataacagatctt

SEQ ID NO: 27252 - DNA, 23 bp, Artificial sequence
  SiRNA target sequence
gggcactgttataacagatctta

SEQ ID NO: 27253 - DNA, 23 bp, Artificial sequence
  SiRNA target sequence
ggcactgttataacagatcttaa

SEQ ID NO: 27254 - DNA, 23 bp, Artificial sequence
  SiRNA target sequence
gcactgttataacagatcttaat

SEQ ID NO: 27255 - DNA, 23 bp, Artificial sequence
  SiRNA target sequence
cactgttataacagatcttaata

SEQ ID NO: 27256 - DNA, 23 bp, Artificial sequence
  SiRNA target sequence
actgttataacagatcttaatac

SEQ ID NO: 27257 - DNA, 23 bp, Artificial sequence
  SiRNA target sequence
ctgttataacagatcttaatact

SEQ ID NO: 27258 - DNA, 23 bp, Artificial sequence
  SiRNA target sequence
tgttataacagatcttaatactt

SEQ ID NO: 27259 - DNA, 23 bp, Artificial sequence
  SiRNA target sequence
gttataacagatcttaatacttt

SEQ ID NO: 27260 - DNA, 23 bp, Artificial sequence
  SiRNA target sequence
ttataacagatcttaatacttta

SEQ ID NO: 27261 - DNA, 23 bp, Artificial sequence
  SiRNA target sequence
tataacagatcttaatactttag

SEQ ID NO: 27262 - DNA, 23 bp, Artificial sequence
  SiRNA target sequence
ataacagatcttaatactttaga

SEQ ID NO: 27263 - DNA, 23 bp, Artificial sequence
  SiRNA target sequence
taacagatcttaatactttagaa

SEQ ID NO: 27264 - DNA, 23 bp, Artificial sequence
  SiRNA target sequence
aacagatcttaatactttagaat

SEQ ID NO: 27265 - DNA, 23 bp, Artificial sequence
  SiRNA target sequence
acagatcttaatactttagaatt

SEQ ID NO: 27266 - DNA, 23 bp, Artificial sequence
  SiRNA target sequence
cagatcttaatactttagaattt

SEQ ID NO: 27267 - DNA, 23 bp, Artificial sequence
  SiRNA target sequence
agatcttaatactttagaattta

SEQ ID NO: 27268 - DNA, 23 bp, Artificial sequence
  SiRNA target sequence
gatcttaatactttagaatttaa

SEQ ID NO: 27269 - DNA, 23 bp, Artificial sequence
  SiRNA target sequence
atcttaatactttagaatttaaa

SEQ ID NO: 27270 - DNA, 23 bp, Artificial sequence
  SiRNA target sequence
tcttaatactttagaatttaaaa

SEQ ID NO: 27271 - DNA, 23 bp, Artificial sequence
  SiRNA target sequence
cttaatactttagaatttaaaaa

SEQ ID NO: 27272 - DNA, 23 bp, Artificial sequence
  SiRNA target sequence
ttaatactttagaatttaaaaaa

SEQ ID NO: 27273 - DNA, 23 bp, Artificial sequence
  SiRNA target sequence
taatactttagaatttaaaaaat

SEQ ID NO: 27274 - DNA, 23 bp, Artificial sequence
  SiRNA target sequence
aatactttagaatttaaaaaatt

SEQ ID NO: 27275 - DNA, 23 bp, Artificial sequence
  SiRNA target sequence
atactttagaatttaaaaaattc

SEQ ID NO: 27276 - DNA, 23 bp, Artificial sequence
  SiRNA target sequence
tactttagaatttaaaaaattct

SEQ ID NO: 27277 - DNA, 23 bp, Artificial sequence
  SiRNA target sequence
actttagaatttaaaaaattctc

SEQ ID NO: 27278 - DNA, 23 bp, Artificial sequence
  SiRNA target sequence
ctttagaatttaaaaaattctct

SEQ ID NO: 27279 - DNA, 23 bp, Artificial sequence
  SiRNA target sequence
tttagaatttaaaaaattctctg

SEQ ID NO: 27280 - DNA, 23 bp, Artificial sequence
  SiRNA target sequence
ttagaatttaaaaaattctctgc

SEQ ID NO: 27281 - DNA, 23 bp, Artificial sequence
  SiRNA target sequence
tagaatttaaaaaattctctgcg

SEQ ID NO: 27282 - DNA, 23 bp, Artificial sequence
  SiRNA target sequence
agaatttaaaaaattctctgcgg

SEQ ID NO: 27283 - DNA, 23 bp, Artificial sequence
  SiRNA target sequence
gaatttaaaaaattctctgcggc

SEQ ID NO: 27284 - DNA, 23 bp, Artificial sequence
  SiRNA target sequence
aatttaaaaaattctctgcggca

SEQ ID NO: 27285 - DNA, 23 bp, Artificial sequence
  SiRNA target sequence
atttaaaaaattctctgcggcat

SEQ ID NO: 27286 - DNA, 23 bp, Artificial sequence
  SiRNA target sequence
tttaaaaaattctctgcggcatt

SEQ ID NO: 27287 - DNA, 23 bp, Artificial sequence
  SiRNA target sequence
ttaaaaaattctctgcggcattt

SEQ ID NO: 27288 - DNA, 23 bp, Artificial sequence
  SiRNA target sequence
taaaaaattctctgcggcatttt

SEQ ID NO: 27289 - DNA, 23 bp, Artificial sequence
  SiRNA target sequence
aaaaaattctctgcggcattttt

SEQ ID NO: 27290 - DNA, 23 bp, Artificial sequence
  SiRNA target sequence
aaaaattctctgcggcatttttc

SEQ ID NO: 27291 - DNA, 23 bp, Artificial sequence
  SiRNA target sequence
aaaattctctgcggcatttttca

SEQ ID NO: 27292 - DNA, 23 bp, Artificial sequence
  SiRNA target sequence
aaattctctgcggcatttttcat

SEQ ID NO: 27293 - DNA, 23 bp, Artificial sequence
  SiRNA target sequence
aattctctgcggcatttttcatt

SEQ ID NO: 27294 - DNA, 23 bp, Artificial sequence
  SiRNA target sequence
attctctgcggcatttttcattt

SEQ ID NO: 27295 - DNA, 23 bp, Artificial sequence
  SiRNA target sequence
ttctctgcggcatttttcatttt

SEQ ID NO: 27296 - DNA, 23 bp, Artificial sequence
  SiRNA target sequence
tctctgcggcatttttcattttt

SEQ ID NO: 27297 - DNA, 23 bp, Artificial sequence
  SiRNA target sequence
ctctgcggcatttttcatttttg

SEQ ID NO: 27298 - DNA, 23 bp, Artificial sequence
  SiRNA target sequence
tctgcggcatttttcatttttga

SEQ ID NO: 27299 - DNA, 23 bp, Artificial sequence
  SiRNA target sequence
ctgcggcatttttcatttttgac

SEQ ID NO: 27300 - DNA, 23 bp, Artificial sequence
  SiRNA target sequence
tgcggcatttttcatttttgaca

SEQ ID NO: 27301 - DNA, 23 bp, Artificial sequence
  SiRNA target sequence
gcggcatttttcatttttgacaa

SEQ ID NO: 27302 - DNA, 23 bp, Artificial sequence
  SiRNA target sequence
cggcatttttcatttttgacaaa

SEQ ID NO: 27303 - DNA, 23 bp, Artificial sequence
  SiRNA target sequence
ggcatttttcatttttgacaaaa

SEQ ID NO: 27304 - DNA, 23 bp, Artificial sequence
  SiRNA target sequence
gcatttttcatttttgacaaaat

SEQ ID NO: 27305 - DNA, 23 bp, Artificial sequence
  SiRNA target sequence
catttttcatttttgacaaaata

SEQ ID NO: 27306 - DNA, 23 bp, Artificial sequence
  SiRNA target sequence
atttttcatttttgacaaaataa

SEQ ID NO: 27307 - DNA, 23 bp, Artificial sequence
  SiRNA target sequence
tttttcatttttgacaaaataaa

SEQ ID NO: 27308 - DNA, 23 bp, Artificial sequence
  SiRNA target sequence
ttttcatttttgacaaaataaat

SEQ ID NO: 27309 - DNA, 23 bp, Artificial sequence
  SiRNA target sequence
tttcatttttgacaaaataaatg

SEQ ID NO: 27310 - DNA, 23 bp, Artificial sequence
  SiRNA target sequence
ttcatttttgacaaaataaatgc

SEQ ID NO: 27311 - DNA, 23 bp, Artificial sequence
  SiRNA target sequence
tcatttttgacaaaataaatgca

SEQ ID NO: 27312 - DNA, 23 bp, Artificial sequence
  SiRNA target sequence
catttttgacaaaataaatgcac

SEQ ID NO: 27313 - DNA, 23 bp, Artificial sequence
  SiRNA target sequence
atttttgacaaaataaatgcacc

SEQ ID NO: 27314 - DNA, 23 bp, Artificial sequence
  SiRNA target sequence
tttttgacaaaataaatgcacca

SEQ ID NO: 27315 - DNA, 23 bp, Artificial sequence
  SiRNA target sequence
ttttgacaaaataaatgcaccaa

SEQ ID NO: 27316 - DNA, 23 bp, Artificial sequence
  SiRNA target sequence
tttgacaaaataaatgcaccaat

SEQ ID NO: 27317 - DNA, 23 bp, Artificial sequence
  SiRNA target sequence
ttgacaaaataaatgcaccaatt

SEQ ID NO: 27318 - DNA, 23 bp, Artificial sequence
  SiRNA target sequence
tgacaaaataaatgcaccaattt

SEQ ID NO: 27319 - DNA, 23 bp, Artificial sequence
  SiRNA target sequence
gacaaaataaatgcaccaatttg

SEQ ID NO: 27320 - DNA, 23 bp, Artificial sequence
  SiRNA target sequence
acaaaataaatgcaccaatttgt

SEQ ID NO: 27321 - DNA, 23 bp, Artificial sequence
  SiRNA target sequence
caaaataaatgcaccaatttgtg

SEQ ID NO: 27322 - DNA, 23 bp, Artificial sequence
  SiRNA target sequence
aaaataaatgcaccaatttgtgc

SEQ ID NO: 27323 - DNA, 23 bp, Artificial sequence
  SiRNA target sequence
aaataaatgcaccaatttgtgca

SEQ ID NO: 27324 - DNA, 23 bp, Artificial sequence
  SiRNA target sequence
aataaatgcaccaatttgtgcag

SEQ ID NO: 27325 - DNA, 23 bp, Artificial sequence
  SiRNA target sequence
ataaatgcaccaatttgtgcagg

SEQ ID NO: 27326 - DNA, 23 bp, Artificial sequence
  SiRNA target sequence
taaatgcaccaatttgtgcagga

SEQ ID NO: 27327 - DNA, 23 bp, Artificial sequence
  SiRNA target sequence
aaatgcaccaatttgtgcaggag

SEQ ID NO: 27328 - DNA, 23 bp, Artificial sequence
  SiRNA target sequence
aatgcaccaatttgtgcaggaga

SEQ ID NO: 27329 - DNA, 23 bp, Artificial sequence
  SiRNA target sequence
atgcaccaatttgtgcaggagaa

SEQ ID NO: 27330 - DNA, 23 bp, Artificial sequence
  SiRNA target sequence
tgcaccaatttgtgcaggagaat

SEQ ID NO: 27331 - DNA, 23 bp, Artificial sequence
  SiRNA target sequence
gcaccaatttgtgcaggagaata

SEQ ID NO: 27332 - DNA, 23 bp, Artificial sequence
  SiRNA target sequence
caccaatttgtgcaggagaatat

SEQ ID NO: 27333 - DNA, 23 bp, Artificial sequence
  SiRNA target sequence
accaatttgtgcaggagaatatt

SEQ ID NO: 27334 - DNA, 23 bp, Artificial sequence
  SiRNA target sequence
ccaatttgtgcaggagaatattt

SEQ ID NO: 27335 - DNA, 23 bp, Artificial sequence
  SiRNA target sequence
caatttgtgcaggagaatatttc

SEQ ID NO: 27336 - DNA, 23 bp, Artificial sequence
  SiRNA target sequence
aatttgtgcaggagaatatttct

SEQ ID NO: 27337 - DNA, 23 bp, Artificial sequence
  SiRNA target sequence
atttgtgcaggagaatatttctt

SEQ ID NO: 27338 - DNA, 23 bp, Artificial sequence
  SiRNA target sequence
tttgtgcaggagaatatttctta

SEQ ID NO: 27339 - DNA, 23 bp, Artificial sequence
  SiRNA target sequence
ttgtgcaggagaatatttcttat

SEQ ID NO: 27340 - DNA, 23 bp, Artificial sequence
  SiRNA target sequence
tgtgcaggagaatatttcttatt

SEQ ID NO: 27341 - DNA, 23 bp, Artificial sequence
  SiRNA target sequence
gtgcaggagaatatttcttattg

SEQ ID NO: 27342 - DNA, 23 bp, Artificial sequence
  SiRNA target sequence
tgcaggagaatatttcttattgt

SEQ ID NO: 27343 - DNA, 23 bp, Artificial sequence
  SiRNA target sequence
gcaggagaatatttcttattgtc

SEQ ID NO: 27344 - DNA, 23 bp, Artificial sequence
  SiRNA target sequence
caggagaatatttcttattgtca

SEQ ID NO: 27345 - DNA, 23 bp, Artificial sequence
  SiRNA target sequence
aggagaatatttcttattgtcaa

SEQ ID NO: 27346 - DNA, 23 bp, Artificial sequence
  SiRNA target sequence
ggagaatatttcttattgtcaat

SEQ ID NO: 27347 - DNA, 23 bp, Artificial sequence
  SiRNA target sequence
gagaatatttcttattgtcaatt

SEQ ID NO: 27348 - DNA, 23 bp, Artificial sequence
  SiRNA target sequence
agaatatttcttattgtcaattt

SEQ ID NO: 27349 - DNA, 23 bp, Artificial sequence
  SiRNA target sequence
gaatatttcttattgtcaatttt

SEQ ID NO: 27350 - DNA, 23 bp, Artificial sequence
  SiRNA target sequence
aatatttcttattgtcaattttt

SEQ ID NO: 27351 - DNA, 23 bp, Artificial sequence
  SiRNA target sequence
atatttcttattgtcaattttta

SEQ ID NO: 27352 - DNA, 23 bp, Artificial sequence
  SiRNA target sequence
tatttcttattgtcaatttttat

SEQ ID NO: 27353 - DNA, 23 bp, Artificial sequence
  SiRNA target sequence
atttcttattgtcaatttttatc

SEQ ID NO: 27354 - DNA, 23 bp, Artificial sequence
  SiRNA target sequence
tttcttattgtcaatttttatcc

SEQ ID NO: 27355 - DNA, 23 bp, Artificial sequence
  SiRNA target sequence
ttcttattgtcaatttttatcca

SEQ ID NO: 27356 - DNA, 23 bp, Artificial sequence
  SiRNA target sequence
tcttattgtcaatttttatccaa

SEQ ID NO: 27357 - DNA, 23 bp, Artificial sequence
  SiRNA target sequence
cttattgtcaatttttatccaaa

SEQ ID NO: 27358 - DNA, 23 bp, Artificial sequence
  SiRNA target sequence
ttattgtcaatttttatccaaat

SEQ ID NO: 27359 - DNA, 23 bp, Artificial sequence
  SiRNA target sequence
tattgtcaatttttatccaaata

SEQ ID NO: 27360 - DNA, 23 bp, Artificial sequence
  SiRNA target sequence
attgtcaatttttatccaaatat

SEQ ID NO: 27361 - DNA, 23 bp, Artificial sequence
  SiRNA target sequence
ttgtcaatttttatccaaatatc

SEQ ID NO: 27362 - DNA, 23 bp, Artificial sequence
  SiRNA target sequence
tgtcaatttttatccaaatatcg

SEQ ID NO: 27363 - DNA, 23 bp, Artificial sequence
  SiRNA target sequence
gtcaatttttatccaaatatcgc

SEQ ID NO: 27364 - DNA, 23 bp, Artificial sequence
  SiRNA target sequence
tcaatttttatccaaatatcgcc

SEQ ID NO: 27365 - DNA, 23 bp, Artificial sequence
  SiRNA target sequence
caatttttatccaaatatcgccg

SEQ ID NO: 27366 - DNA, 23 bp, Artificial sequence
  SiRNA target sequence
aatttttatccaaatatcgccgt

SEQ ID NO: 27367 - DNA, 23 bp, Artificial sequence
  SiRNA target sequence
atttttatccaaatatcgccgtt

SEQ ID NO: 27368 - DNA, 23 bp, Artificial sequence
  SiRNA target sequence
tttttatccaaatatcgccgtta

SEQ ID NO: 27369 - DNA, 23 bp, Artificial sequence
  SiRNA target sequence
ttttatccaaatatcgccgttac

SEQ ID NO: 27370 - DNA, 23 bp, Artificial sequence
  SiRNA target sequence
tttatccaaatatcgccgttaca

SEQ ID NO: 27371 - DNA, 23 bp, Artificial sequence
  SiRNA target sequence
ttatccaaatatcgccgttacaa

SEQ ID NO: 27372 - DNA, 23 bp, Artificial sequence
  SiRNA target sequence
tatccaaatatcgccgttacaat

SEQ ID NO: 27373 - DNA, 23 bp, Artificial sequence
  SiRNA target sequence
atccaaatatcgccgttacaatg

SEQ ID NO: 27374 - DNA, 23 bp, Artificial sequence
  SiRNA target sequence
tccaaatatcgccgttacaatgc

SEQ ID NO: 27375 - DNA, 23 bp, Artificial sequence
  SiRNA target sequence
ccaaatatcgccgttacaatgct

SEQ ID NO: 27376 - DNA, 23 bp, Artificial sequence
  SiRNA target sequence
caaatatcgccgttacaatgctt

SEQ ID NO: 27377 - DNA, 23 bp, Artificial sequence
  SiRNA target sequence
aaatatcgccgttacaatgctta

SEQ ID NO: 27378 - DNA, 23 bp, Artificial sequence
  SiRNA target sequence
aatatcgccgttacaatgcttag

SEQ ID NO: 27379 - DNA, 23 bp, Artificial sequence
  SiRNA target sequence
atatcgccgttacaatgcttagt

SEQ ID NO: 27380 - DNA, 23 bp, Artificial sequence
  SiRNA target sequence
tatcgccgttacaatgcttagta

SEQ ID NO: 27381 - DNA, 23 bp, Artificial sequence
  SiRNA target sequence
atcgccgttacaatgcttagtag

SEQ ID NO: 27382 - DNA, 23 bp, Artificial sequence
  SiRNA target sequence
tcgccgttacaatgcttagtagt

SEQ ID NO: 27383 - DNA, 23 bp, Artificial sequence
  SiRNA target sequence
cgccgttacaatgcttagtagtg

SEQ ID NO: 27384 - DNA, 23 bp, Artificial sequence
  SiRNA target sequence
gccgttacaatgcttagtagtgt

SEQ ID NO: 27385 - DNA, 23 bp, Artificial sequence
  SiRNA target sequence
ccgttacaatgcttagtagtgtc

SEQ ID NO: 27386 - DNA, 23 bp, Artificial sequence
  SiRNA target sequence
cgttacaatgcttagtagtgtca

SEQ ID NO: 27387 - DNA, 23 bp, Artificial sequence
  SiRNA target sequence
gttacaatgcttagtagtgtcat

SEQ ID NO: 27388 - DNA, 23 bp, Artificial sequence
  SiRNA target sequence
ttacaatgcttagtagtgtcata

SEQ ID NO: 27389 - DNA, 23 bp, Artificial sequence
  SiRNA target sequence
tacaatgcttagtagtgtcatat

SEQ ID NO: 27390 - DNA, 23 bp, Artificial sequence
  SiRNA target sequence
acaatgcttagtagtgtcatatg

SEQ ID NO: 27391 - DNA, 23 bp, Artificial sequence
  SiRNA target sequence
caatgcttagtagtgtcatatgg

SEQ ID NO: 27392 - DNA, 23 bp, Artificial sequence
  SiRNA target sequence
aatgcttagtagtgtcatatggt

SEQ ID NO: 27393 - DNA, 23 bp, Artificial sequence
  SiRNA target sequence
atgcttagtagtgtcatatggta

SEQ ID NO: 27394 - DNA, 23 bp, Artificial sequence
  SiRNA target sequence
tgcttagtagtgtcatatggtaa

SEQ ID NO: 27395 - DNA, 23 bp, Artificial sequence
  SiRNA target sequence
gcttagtagtgtcatatggtaag

SEQ ID NO: 27396 - DNA, 23 bp, Artificial sequence
  SiRNA target sequence
cttagtagtgtcatatggtaagc

SEQ ID NO: 27397 - DNA, 23 bp, Artificial sequence
  SiRNA target sequence
ttagtagtgtcatatggtaagct

SEQ ID NO: 27398 - DNA, 23 bp, Artificial sequence
  SiRNA target sequence
tagtagtgtcatatggtaagctt

SEQ ID NO: 27399 - DNA, 23 bp, Artificial sequence
  SiRNA target sequence
agtagtgtcatatggtaagcttt

SEQ ID NO: 27400 - DNA, 23 bp, Artificial sequence
  SiRNA target sequence
gtagtgtcatatggtaagctttt

SEQ ID NO: 27401 - DNA, 23 bp, Artificial sequence
  SiRNA target sequence
tagtgtcatatggtaagcttttt

SEQ ID NO: 27402 - DNA, 23 bp, Artificial sequence
  SiRNA target sequence
agtgtcatatggtaagcttttta

SEQ ID NO: 27403 - DNA, 23 bp, Artificial sequence
  SiRNA target sequence
gtgtcatatggtaagctttttaa

SEQ ID NO: 27404 - DNA, 23 bp, Artificial sequence
  SiRNA target sequence
tgtcatatggtaagctttttaaa

SEQ ID NO: 27405 - DNA, 23 bp, Artificial sequence
  SiRNA target sequence
gtcatatggtaagctttttaaat

SEQ ID NO: 27406 - DNA, 23 bp, Artificial sequence
  SiRNA target sequence
tcatatggtaagctttttaaata

SEQ ID NO: 27407 - DNA, 23 bp, Artificial sequence
  SiRNA target sequence
catatggtaagctttttaaataa

SEQ ID NO: 27408 - DNA, 23 bp, Artificial sequence
  SiRNA target sequence
atatggtaagctttttaaataat

SEQ ID NO: 27409 - DNA, 23 bp, Artificial sequence
  SiRNA target sequence
tatggtaagctttttaaataatc

SEQ ID NO: 27410 - DNA, 23 bp, Artificial sequence
  SiRNA target sequence
atggtaagctttttaaataatct

SEQ ID NO: 27411 - DNA, 23 bp, Artificial sequence
  SiRNA target sequence
tggtaagctttttaaataatctt

SEQ ID NO: 27412 - DNA, 23 bp, Artificial sequence
  SiRNA target sequence
ggtaagctttttaaataatcttt

SEQ ID NO: 27413 - DNA, 23 bp, Artificial sequence
  SiRNA target sequence
gtaagctttttaaataatctttt

SEQ ID NO: 27414 - DNA, 23 bp, Artificial sequence
  SiRNA target sequence
taagctttttaaataatctttta

SEQ ID NO: 27415 - DNA, 23 bp, Artificial sequence
  SiRNA target sequence
aagctttttaaataatcttttaa

SEQ ID NO: 27416 - DNA, 23 bp, Artificial sequence
  SiRNA target sequence
agctttttaaataatcttttaat

SEQ ID NO: 27417 - DNA, 23 bp, Artificial sequence
  SiRNA target sequence
gctttttaaataatcttttaatt

SEQ ID NO: 27418 - DNA, 23 bp, Artificial sequence
  SiRNA target sequence
ctttttaaataatcttttaattc

SEQ ID NO: 27419 - DNA, 23 bp, Artificial sequence
  SiRNA target sequence
tttttaaataatcttttaattct

SEQ ID NO: 27420 - DNA, 23 bp, Artificial sequence
  SiRNA target sequence
ttttaaataatcttttaattcta

SEQ ID NO: 27421 - DNA, 23 bp, Artificial sequence
  SiRNA target sequence
tttaaataatcttttaattctac

SEQ ID NO: 27422 - DNA, 23 bp, Artificial sequence
  SiRNA target sequence
ttaaataatcttttaattctaca

SEQ ID NO: 27423 - DNA, 23 bp, Artificial sequence
  SiRNA target sequence
taaataatcttttaattctacat

SEQ ID NO: 27424 - DNA, 23 bp, Artificial sequence
  SiRNA target sequence
aaataatcttttaattctacatc

SEQ ID NO: 27425 - DNA, 23 bp, Artificial sequence
  SiRNA target sequence
aataatcttttaattctacatca

SEQ ID NO: 27426 - DNA, 23 bp, Artificial sequence
  SiRNA target sequence
ataatcttttaattctacatcat

SEQ ID NO: 27427 - DNA, 23 bp, Artificial sequence
  SiRNA target sequence
taatcttttaattctacatcatc

SEQ ID NO: 27428 - DNA, 23 bp, Artificial sequence
  SiRNA target sequence
aatcttttaattctacatcatca

SEQ ID NO: 27429 - DNA, 23 bp, Artificial sequence
  SiRNA target sequence
atcttttaattctacatcatcaa

SEQ ID NO: 27430 - DNA, 23 bp, Artificial sequence
  SiRNA target sequence
tcttttaattctacatcatcaaa

SEQ ID NO: 27431 - DNA, 23 bp, Artificial sequence
  SiRNA target sequence
cttttaattctacatcatcaaat

SEQ ID NO: 27432 - DNA, 23 bp, Artificial sequence
  SiRNA target sequence
ttttaattctacatcatcaaatt

SEQ ID NO: 27433 - DNA, 23 bp, Artificial sequence
  SiRNA target sequence
tttaattctacatcatcaaattt

SEQ ID NO: 27434 - DNA, 23 bp, Artificial sequence
  SiRNA target sequence
ttaattctacatcatcaaatttt

SEQ ID NO: 27435 - DNA, 23 bp, Artificial sequence
  SiRNA target sequence
taattctacatcatcaaattttc

SEQ ID NO: 27436 - DNA, 23 bp, Artificial sequence
  SiRNA target sequence
aattctacatcatcaaattttcg

SEQ ID NO: 27437 - DNA, 23 bp, Artificial sequence
  SiRNA target sequence
attctacatcatcaaattttcgt

SEQ ID NO: 27438 - DNA, 23 bp, Artificial sequence
  SiRNA target sequence
ttctacatcatcaaattttcgtc

SEQ ID NO: 27439 - DNA, 23 bp, Artificial sequence
  SiRNA target sequence
tctacatcatcaaattttcgtcc

SEQ ID NO: 27440 - DNA, 23 bp, Artificial sequence
  SiRNA target sequence
ctacatcatcaaattttcgtccc

SEQ ID NO: 27441 - DNA, 23 bp, Artificial sequence
  SiRNA target sequence
tacatcatcaaattttcgtccca

SEQ ID NO: 27442 - DNA, 23 bp, Artificial sequence
  SiRNA target sequence
acatcatcaaattttcgtcccag

SEQ ID NO: 27443 - DNA, 23 bp, Artificial sequence
  SiRNA target sequence
catcatcaaattttcgtcccagc

SEQ ID NO: 27444 - DNA, 23 bp, Artificial sequence
  SiRNA target sequence
atcatcaaattttcgtcccagca

SEQ ID NO: 27445 - DNA, 23 bp, Artificial sequence
  SiRNA target sequence
tcatcaaattttcgtcccagcaa

SEQ ID NO: 27446 - DNA, 23 bp, Artificial sequence
  SiRNA target sequence
catcaaattttcgtcccagcaat

SEQ ID NO: 27447 - DNA, 23 bp, Artificial sequence
  SiRNA target sequence
atcaaattttcgtcccagcaatc

SEQ ID NO: 27448 - DNA, 23 bp, Artificial sequence
  SiRNA target sequence
tcaaattttcgtcccagcaatct

SEQ ID NO: 27449 - DNA, 23 bp, Artificial sequence
  SiRNA target sequence
caaattttcgtcccagcaatctc

SEQ ID NO: 27450 - DNA, 23 bp, Artificial sequence
  SiRNA target sequence
aaattttcgtcccagcaatctct

SEQ ID NO: 27451 - DNA, 23 bp, Artificial sequence
  SiRNA target sequence
aattttcgtcccagcaatctctt

SEQ ID NO: 27452 - DNA, 23 bp, Artificial sequence
  SiRNA target sequence
attttcgtcccagcaatctctta

SEQ ID NO: 27453 - DNA, 23 bp, Artificial sequence
  SiRNA target sequence
ttttcgtcccagcaatctcttag

SEQ ID NO: 27454 - DNA, 23 bp, Artificial sequence
  SiRNA target sequence
tttcgtcccagcaatctcttaga

SEQ ID NO: 27455 - DNA, 23 bp, Artificial sequence
  SiRNA target sequence
ttcgtcccagcaatctcttagac

SEQ ID NO: 27456 - DNA, 23 bp, Artificial sequence
  SiRNA target sequence
tcgtcccagcaatctcttagacg

SEQ ID NO: 27457 - DNA, 23 bp, Artificial sequence
  SiRNA target sequence
cgtcccagcaatctcttagacgc

SEQ ID NO: 27458 - DNA, 23 bp, Artificial sequence
  SiRNA target sequence
gtcccagcaatctcttagacgca

SEQ ID NO: 27459 - DNA, 23 bp, Artificial sequence
  SiRNA target sequence
tcccagcaatctcttagacgcaa

SEQ ID NO: 27460 - DNA, 23 bp, Artificial sequence
  SiRNA target sequence
cccagcaatctcttagacgcaaa

SEQ ID NO: 27461 - DNA, 23 bp, Artificial sequence
  SiRNA target sequence
ccagcaatctcttagacgcaaaa

SEQ ID NO: 27462 - DNA, 23 bp, Artificial sequence
  SiRNA target sequence
cagcaatctcttagacgcaaaaa

SEQ ID NO: 27463 - DNA, 23 bp, Artificial sequence
  SiRNA target sequence
agcaatctcttagacgcaaaaat

SEQ ID NO: 27464 - DNA, 23 bp, Artificial sequence
  SiRNA target sequence
gcaatctcttagacgcaaaaatc

SEQ ID NO: 27465 - DNA, 23 bp, Artificial sequence
  SiRNA target sequence
caatctcttagacgcaaaaatcg

SEQ ID NO: 27466 - DNA, 23 bp, Artificial sequence
  SiRNA target sequence
aatctcttagacgcaaaaatcgt

SEQ ID NO: 27467 - DNA, 23 bp, Artificial sequence
  SiRNA target sequence
atctcttagacgcaaaaatcgta

SEQ ID NO: 27468 - DNA, 23 bp, Artificial sequence
  SiRNA target sequence
tctcttagacgcaaaaatcgtat

SEQ ID NO: 27469 - DNA, 23 bp, Artificial sequence
  SiRNA target sequence
ctcttagacgcaaaaatcgtatt

SEQ ID NO: 27470 - DNA, 23 bp, Artificial sequence
  SiRNA target sequence
tcttagacgcaaaaatcgtattc

SEQ ID NO: 27471 - DNA, 23 bp, Artificial sequence
  SiRNA target sequence
cttagacgcaaaaatcgtattct

SEQ ID NO: 27472 - DNA, 23 bp, Artificial sequence
  SiRNA target sequence
ttagacgcaaaaatcgtattctt

SEQ ID NO: 27473 - DNA, 23 bp, Artificial sequence
  SiRNA target sequence
tagacgcaaaaatcgtattcttg

SEQ ID NO: 27474 - DNA, 23 bp, Artificial sequence
  SiRNA target sequence
agacgcaaaaatcgtattcttgg

SEQ ID NO: 27475 - DNA, 23 bp, Artificial sequence
  SiRNA target sequence
gacgcaaaaatcgtattcttggg

SEQ ID NO: 27476 - DNA, 23 bp, Artificial sequence
  SiRNA target sequence
acgcaaaaatcgtattcttggga

SEQ ID NO: 27477 - DNA, 23 bp, Artificial sequence
  SiRNA target sequence
cgcaaaaatcgtattcttgggat

SEQ ID NO: 27478 - DNA, 23 bp, Artificial sequence
  SiRNA target sequence
gcaaaaatcgtattcttgggatg

SEQ ID NO: 27479 - DNA, 23 bp, Artificial sequence
  SiRNA target sequence
caaaaatcgtattcttgggatgt

SEQ ID NO: 27480 - DNA, 23 bp, Artificial sequence
  SiRNA target sequence
aaaaatcgtattcttgggatgta

SEQ ID NO: 27481 - DNA, 23 bp, Artificial sequence
  SiRNA target sequence
aaaatcgtattcttgggatgtaa

SEQ ID NO: 27482 - DNA, 23 bp, Artificial sequence
  SiRNA target sequence
aaatcgtattcttgggatgtaat

SEQ ID NO: 27483 - DNA, 23 bp, Artificial sequence
  SiRNA target sequence
aatcgtattcttgggatgtaata

SEQ ID NO: 27484 - DNA, 23 bp, Artificial sequence
  SiRNA target sequence
atcgtattcttgggatgtaataa

SEQ ID NO: 27485 - DNA, 23 bp, Artificial sequence
  SiRNA target sequence
tcgtattcttgggatgtaataac

SEQ ID NO: 27486 - DNA, 23 bp, Artificial sequence
  SiRNA target sequence
cgtattcttgggatgtaataaca

SEQ ID NO: 27487 - DNA, 23 bp, Artificial sequence
  SiRNA target sequence
gtattcttgggatgtaataacaa

SEQ ID NO: 27488 - DNA, 23 bp, Artificial sequence
  SiRNA target sequence
tattcttgggatgtaataacaag

SEQ ID NO: 27489 - DNA, 23 bp, Artificial sequence
  SiRNA target sequence
attcttgggatgtaataacaagt

SEQ ID NO: 27490 - DNA, 23 bp, Artificial sequence
  SiRNA target sequence
ttcttgggatgtaataacaagtt

SEQ ID NO: 27491 - DNA, 23 bp, Artificial sequence
  SiRNA target sequence
tcttgggatgtaataacaagtta

SEQ ID NO: 27492 - DNA, 23 bp, Artificial sequence
  SiRNA target sequence
cttgggatgtaataacaagttag

SEQ ID NO: 27493 - DNA, 23 bp, Artificial sequence
  SiRNA target sequence
ttgggatgtaataacaagttaga

SEQ ID NO: 27494 - DNA, 23 bp, Artificial sequence
  SiRNA target sequence
tgggatgtaataacaagttagac

SEQ ID NO: 27495 - DNA, 23 bp, Artificial sequence
  SiRNA target sequence
gggatgtaataacaagttagact

SEQ ID NO: 27496 - DNA, 23 bp, Artificial sequence
  SiRNA target sequence
ggatgtaataacaagttagactt

SEQ ID NO: 27497 - DNA, 23 bp, Artificial sequence
  SiRNA target sequence
gatgtaataacaagttagactta

SEQ ID NO: 27498 - DNA, 23 bp, Artificial sequence
  SiRNA target sequence
atgtaataacaagttagacttag

SEQ ID NO: 27499 - DNA, 23 bp, Artificial sequence
  SiRNA target sequence
tgtaataacaagttagacttagc

SEQ ID NO: 27500 - DNA, 23 bp, Artificial sequence
  SiRNA target sequence
gtaataacaagttagacttagct

SEQ ID NO: 27501 - DNA, 23 bp, Artificial sequence
  SiRNA target sequence
taataacaagttagacttagctt

SEQ ID NO: 27502 - DNA, 23 bp, Artificial sequence
  SiRNA target sequence
aataacaagttagacttagcttg

SEQ ID NO: 27503 - DNA, 23 bp, Artificial sequence
  SiRNA target sequence
ataacaagttagacttagcttgc

SEQ ID NO: 27504 - DNA, 23 bp, Artificial sequence
  SiRNA target sequence
taacaagttagacttagcttgct

SEQ ID NO: 27505 - DNA, 23 bp, Artificial sequence
  SiRNA target sequence
aacaagttagacttagcttgctc

SEQ ID NO: 27506 - DNA, 23 bp, Artificial sequence
  SiRNA target sequence
acaagttagacttagcttgctca

SEQ ID NO: 27507 - DNA, 23 bp, Artificial sequence
  SiRNA target sequence
caagttagacttagcttgctcac

SEQ ID NO: 27508 - DNA, 23 bp, Artificial sequence
  SiRNA target sequence
aagttagacttagcttgctcacc

SEQ ID NO: 27509 - DNA, 23 bp, Artificial sequence
  SiRNA target sequence
agttagacttagcttgctcacct

SEQ ID NO: 27510 - DNA, 23 bp, Artificial sequence
  SiRNA target sequence
gttagacttagcttgctcacctg

SEQ ID NO: 27511 - DNA, 23 bp, Artificial sequence
  SiRNA target sequence
ttagacttagcttgctcacctgt

SEQ ID NO: 27512 - DNA, 23 bp, Artificial sequence
  SiRNA target sequence
tagacttagcttgctcacctgtt

SEQ ID NO: 27513 - DNA, 23 bp, Artificial sequence
  SiRNA target sequence
agacttagcttgctcacctgtta

SEQ ID NO: 27514 - DNA, 23 bp, Artificial sequence
  SiRNA target sequence
gacttagcttgctcacctgttaa

SEQ ID NO: 27515 - DNA, 23 bp, Artificial sequence
  SiRNA target sequence
acttagcttgctcacctgttaaa

SEQ ID NO: 27516 - DNA, 23 bp, Artificial sequence
  SiRNA target sequence
cttagcttgctcacctgttaaaa

SEQ ID NO: 27517 - DNA, 23 bp, Artificial sequence
  SiRNA target sequence
ttagcttgctcacctgttaaaat

SEQ ID NO: 27518 - DNA, 23 bp, Artificial sequence
  SiRNA target sequence
tagcttgctcacctgttaaaatt

SEQ ID NO: 27519 - DNA, 23 bp, Artificial sequence
  SiRNA target sequence
agcttgctcacctgttaaaattt

SEQ ID NO: 27520 - DNA, 23 bp, Artificial sequence
  SiRNA target sequence
gcttgctcacctgttaaaatttt

SEQ ID NO: 27521 - DNA, 23 bp, Artificial sequence
  SiRNA target sequence
cttgctcacctgttaaaatttta

SEQ ID NO: 27522 - DNA, 23 bp, Artificial sequence
  SiRNA target sequence
ttgctcacctgttaaaattttat

SEQ ID NO: 27523 - DNA, 23 bp, Artificial sequence
  SiRNA target sequence
tgctcacctgttaaaattttatc

SEQ ID NO: 27524 - DNA, 23 bp, Artificial sequence
  SiRNA target sequence
gctcacctgttaaaattttatct

SEQ ID NO: 27525 - DNA, 23 bp, Artificial sequence
  SiRNA target sequence
ctcacctgttaaaattttatctt

SEQ ID NO: 27526 - DNA, 23 bp, Artificial sequence
  SiRNA target sequence
tcacctgttaaaattttatcttt

SEQ ID NO: 27527 - DNA, 23 bp, Artificial sequence
  SiRNA target sequence
cacctgttaaaattttatcttta

SEQ ID NO: 27528 - DNA, 23 bp, Artificial sequence
  SiRNA target sequence
acctgttaaaattttatctttaa

SEQ ID NO: 27529 - DNA, 23 bp, Artificial sequence
  SiRNA target sequence
cctgttaaaattttatctttaaa

SEQ ID NO: 27530 - DNA, 23 bp, Artificial sequence
  SiRNA target sequence
ctgttaaaattttatctttaaaa

SEQ ID NO: 27531 - DNA, 23 bp, Artificial sequence
  SiRNA target sequence
tgttaaaattttatctttaaaaa

SEQ ID NO: 27532 - DNA, 23 bp, Artificial sequence
  SiRNA target sequence
gttaaaattttatctttaaaaat

SEQ ID NO: 27533 - DNA, 23 bp, Artificial sequence
  SiRNA target sequence
ttaaaattttatctttaaaaatt

SEQ ID NO: 27534 - DNA, 23 bp, Artificial sequence
  SiRNA target sequence
taaaattttatctttaaaaattg

SEQ ID NO: 27535 - DNA, 23 bp, Artificial sequence
  SiRNA target sequence
aaaattttatctttaaaaattga

SEQ ID NO: 27536 - DNA, 23 bp, Artificial sequence
  SiRNA target sequence
aaattttatctttaaaaattgat

SEQ ID NO: 27537 - DNA, 23 bp, Artificial sequence
  SiRNA target sequence
aattttatctttaaaaattgata

SEQ ID NO: 27538 - DNA, 23 bp, Artificial sequence
  SiRNA target sequence
attttatctttaaaaattgatac

SEQ ID NO: 27539 - DNA, 23 bp, Artificial sequence
  SiRNA target sequence
ttttatctttaaaaattgatacc

SEQ ID NO: 27540 - DNA, 23 bp, Artificial sequence
  SiRNA target sequence
tttatctttaaaaattgatacca

SEQ ID NO: 27541 - DNA, 23 bp, Artificial sequence
  SiRNA target sequence
ttatctttaaaaattgataccac

SEQ ID NO: 27542 - DNA, 23 bp, Artificial sequence
  SiRNA target sequence
tatctttaaaaattgataccacc

SEQ ID NO: 27543 - DNA, 23 bp, Artificial sequence
  SiRNA target sequence
atctttaaaaattgataccaccg

SEQ ID NO: 27544 - DNA, 23 bp, Artificial sequence
  SiRNA target sequence
tctttaaaaattgataccaccga

SEQ ID NO: 27545 - DNA, 23 bp, Artificial sequence
  SiRNA target sequence
ctttaaaaattgataccaccgat

SEQ ID NO: 27546 - DNA, 23 bp, Artificial sequence
  SiRNA target sequence
tttaaaaattgataccaccgatg

SEQ ID NO: 27547 - DNA, 23 bp, Artificial sequence
  SiRNA target sequence
ttaaaaattgataccaccgatgg

SEQ ID NO: 27548 - DNA, 23 bp, Artificial sequence
  SiRNA target sequence
taaaaattgataccaccgatggt

SEQ ID NO: 27549 - DNA, 23 bp, Artificial sequence
  SiRNA target sequence
aaaaattgataccaccgatggtg

SEQ ID NO: 27550 - DNA, 23 bp, Artificial sequence
  SiRNA target sequence
aaaattgataccaccgatggtgt

SEQ ID NO: 27551 - DNA, 23 bp, Artificial sequence
  SiRNA target sequence
aaattgataccaccgatggtgta

SEQ ID NO: 27552 - DNA, 23 bp, Artificial sequence
  SiRNA target sequence
aattgataccaccgatggtgtag

SEQ ID NO: 27553 - DNA, 23 bp, Artificial sequence
  SiRNA target sequence
attgataccaccgatggtgtagt

SEQ ID NO: 27554 - DNA, 23 bp, Artificial sequence
  SiRNA target sequence
ttgataccaccgatggtgtagtt

SEQ ID NO: 27555 - DNA, 23 bp, Artificial sequence
  SiRNA target sequence
tgataccaccgatggtgtagttc

SEQ ID NO: 27556 - DNA, 23 bp, Artificial sequence
  SiRNA target sequence
gataccaccgatggtgtagttct

SEQ ID NO: 27557 - DNA, 23 bp, Artificial sequence
  SiRNA target sequence
ataccaccgatggtgtagttcta

SEQ ID NO: 27558 - DNA, 23 bp, Artificial sequence
  SiRNA target sequence
taccaccgatggtgtagttctac

SEQ ID NO: 27559 - DNA, 23 bp, Artificial sequence
  SiRNA target sequence
accaccgatggtgtagttctacc

SEQ ID NO: 27560 - DNA, 23 bp, Artificial sequence
  SiRNA target sequence
ccaccgatggtgtagttctacca

SEQ ID NO: 27561 - DNA, 23 bp, Artificial sequence
  SiRNA target sequence
caccgatggtgtagttctaccac

SEQ ID NO: 27562 - DNA, 23 bp, Artificial sequence
  SiRNA target sequence
accgatggtgtagttctaccacc

SEQ ID NO: 27563 - DNA, 23 bp, Artificial sequence
  SiRNA target sequence
ccgatggtgtagttctaccacct

SEQ ID NO: 27564 - DNA, 23 bp, Artificial sequence
  SiRNA target sequence
cgatggtgtagttctaccacctt

SEQ ID NO: 27565 - DNA, 23 bp, Artificial sequence
  SiRNA target sequence
gatggtgtagttctaccaccttc

SEQ ID NO: 27566 - DNA, 23 bp, Artificial sequence
  SiRNA target sequence
atggtgtagttctaccaccttct

SEQ ID NO: 27567 - DNA, 23 bp, Artificial sequence
  SiRNA target sequence
tggtgtagttctaccaccttctt

SEQ ID NO: 27568 - DNA, 23 bp, Artificial sequence
  SiRNA target sequence
ggtgtagttctaccaccttcttc

SEQ ID NO: 27569 - DNA, 23 bp, Artificial sequence
  SiRNA target sequence
gtgtagttctaccaccttcttcg

SEQ ID NO: 27570 - DNA, 23 bp, Artificial sequence
  SiRNA target sequence
tgtagttctaccaccttcttcgt

SEQ ID NO: 27571 - DNA, 23 bp, Artificial sequence
  SiRNA target sequence
gtagttctaccaccttcttcgtt

SEQ ID NO: 27572 - DNA, 23 bp, Artificial sequence
  SiRNA target sequence
tagttctaccaccttcttcgttt

SEQ ID NO: 27573 - DNA, 23 bp, Artificial sequence
  SiRNA target sequence
agttctaccaccttcttcgtttt

SEQ ID NO: 27574 - DNA, 23 bp, Artificial sequence
  SiRNA target sequence
gttctaccaccttcttcgttttc

SEQ ID NO: 27575 - DNA, 23 bp, Artificial sequence
  SiRNA target sequence
ttctaccaccttcttcgttttca

SEQ ID NO: 27576 - DNA, 23 bp, Artificial sequence
  SiRNA target sequence
tctaccaccttcttcgttttcaa

SEQ ID NO: 27577 - DNA, 23 bp, Artificial sequence
  SiRNA target sequence
ctaccaccttcttcgttttcaat

SEQ ID NO: 27578 - DNA, 23 bp, Artificial sequence
  SiRNA target sequence
taccaccttcttcgttttcaata

SEQ ID NO: 27579 - DNA, 23 bp, Artificial sequence
  SiRNA target sequence
accaccttcttcgttttcaataa

SEQ ID NO: 27580 - DNA, 23 bp, Artificial sequence
  SiRNA target sequence
ccaccttcttcgttttcaataat

SEQ ID NO: 27581 - DNA, 23 bp, Artificial sequence
  SiRNA target sequence
caccttcttcgttttcaataatt

SEQ ID NO: 27582 - DNA, 23 bp, Artificial sequence
  SiRNA target sequence
accttcttcgttttcaataattt

SEQ ID NO: 27583 - DNA, 23 bp, Artificial sequence
  SiRNA target sequence
ccttcttcgttttcaataatttg

SEQ ID NO: 27584 - DNA, 23 bp, Artificial sequence
  SiRNA target sequence
cttcttcgttttcaataatttgt

SEQ ID NO: 27585 - DNA, 23 bp, Artificial sequence
  SiRNA target sequence
ttcttcgttttcaataatttgtg

SEQ ID NO: 27586 - DNA, 23 bp, Artificial sequence
  SiRNA target sequence
tcttcgttttcaataatttgtgg

SEQ ID NO: 27587 - DNA, 23 bp, Artificial sequence
  SiRNA target sequence
cttcgttttcaataatttgtggg

SEQ ID NO: 27588 - DNA, 23 bp, Artificial sequence
  SiRNA target sequence
ttcgttttcaataatttgtggga

SEQ ID NO: 27589 - DNA, 23 bp, Artificial sequence
  SiRNA target sequence
tcgttttcaataatttgtgggat

SEQ ID NO: 27590 - DNA, 23 bp, Artificial sequence
  SiRNA target sequence
cgttttcaataatttgtgggata

SEQ ID NO: 27591 - DNA, 23 bp, Artificial sequence
  SiRNA target sequence
gttttcaataatttgtgggatat

SEQ ID NO: 27592 - DNA, 23 bp, Artificial sequence
  SiRNA target sequence
ttttcaataatttgtgggatatt

SEQ ID NO: 27593 - DNA, 23 bp, Artificial sequence
  SiRNA target sequence
tttcaataatttgtgggatattg

SEQ ID NO: 27594 - DNA, 23 bp, Artificial sequence
  SiRNA target sequence
ttcaataatttgtgggatattgt

SEQ ID NO: 27595 - DNA, 23 bp, Artificial sequence
  SiRNA target sequence
tcaataatttgtgggatattgtt

SEQ ID NO: 27596 - DNA, 23 bp, Artificial sequence
  SiRNA target sequence
caataatttgtgggatattgtta

SEQ ID NO: 27597 - DNA, 23 bp, Artificial sequence
  SiRNA target sequence
aataatttgtgggatattgttat

SEQ ID NO: 27598 - DNA, 23 bp, Artificial sequence
  SiRNA target sequence
ataatttgtgggatattgttatg

SEQ ID NO: 27599 - DNA, 23 bp, Artificial sequence
  SiRNA target sequence
taatttgtgggatattgttatgt

SEQ ID NO: 27600 - DNA, 23 bp, Artificial sequence
  SiRNA target sequence
aatttgtgggatattgttatgta

SEQ ID NO: 27601 - DNA, 23 bp, Artificial sequence
  SiRNA target sequence
atttgtgggatattgttatgtat

SEQ ID NO: 27602 - DNA, 23 bp, Artificial sequence
  SiRNA target sequence
tttgtgggatattgttatgtata

SEQ ID NO: 27603 - DNA, 23 bp, Artificial sequence
  SiRNA target sequence
ttgtgggatattgttatgtataa

SEQ ID NO: 27604 - DNA, 23 bp, Artificial sequence
  SiRNA target sequence
tgtgggatattgttatgtataag

SEQ ID NO: 27605 - DNA, 23 bp, Artificial sequence
  SiRNA target sequence
gtgggatattgttatgtataaga

SEQ ID NO: 27606 - DNA, 23 bp, Artificial sequence
  SiRNA target sequence
tgggatattgttatgtataagag

SEQ ID NO: 27607 - DNA, 23 bp, Artificial sequence
  SiRNA target sequence
gggatattgttatgtataagaga

SEQ ID NO: 27608 - DNA, 23 bp, Artificial sequence
  SiRNA target sequence
ggatattgttatgtataagagac

SEQ ID NO: 27609 - DNA, 23 bp, Artificial sequence
  SiRNA target sequence
gatattgttatgtataagagaca

SEQ ID NO: 27610 - DNA, 23 bp, Artificial sequence
  SiRNA target sequence
atattgttatgtataagagacac

SEQ ID NO: 27611 - DNA, 23 bp, Artificial sequence
  SiRNA target sequence
tattgttatgtataagagacaca

SEQ ID NO: 27612 - DNA, 23 bp, Artificial sequence
  SiRNA target sequence
attgttatgtataagagacacac

SEQ ID NO: 27613 - DNA, 23 bp, Artificial sequence
  SiRNA target sequence
ttgttatgtataagagacacaca

SEQ ID NO: 27614 - DNA, 23 bp, Artificial sequence
  SiRNA target sequence
tgttatgtataagagacacacaa

SEQ ID NO: 27615 - DNA, 23 bp, Artificial sequence
  SiRNA target sequence
gttatgtataagagacacacaag

SEQ ID NO: 27616 - DNA, 23 bp, Artificial sequence
  SiRNA target sequence
ttatgtataagagacacacaaga

SEQ ID NO: 27617 - DNA, 23 bp, Artificial sequence
  SiRNA target sequence
tatgtataagagacacacaagaa

SEQ ID NO: 27618 - DNA, 23 bp, Artificial sequence
  SiRNA target sequence
atgtataagagacacacaagaat

SEQ ID NO: 27619 - DNA, 23 bp, Artificial sequence
  SiRNA target sequence
tgtataagagacacacaagaatt

SEQ ID NO: 27620 - DNA, 23 bp, Artificial sequence
  SiRNA target sequence
gtataagagacacacaagaattg

SEQ ID NO: 27621 - DNA, 23 bp, Artificial sequence
  SiRNA target sequence
tataagagacacacaagaattgg

SEQ ID NO: 27622 - DNA, 23 bp, Artificial sequence
  SiRNA target sequence
ataagagacacacaagaattggt

SEQ ID NO: 27623 - DNA, 23 bp, Artificial sequence
  SiRNA target sequence
taagagacacacaagaattggtt

SEQ ID NO: 27624 - DNA, 23 bp, Artificial sequence
  SiRNA target sequence
aagagacacacaagaattggttg

SEQ ID NO: 27625 - DNA, 23 bp, Artificial sequence
  SiRNA target sequence
agagacacacaagaattggttgt

SEQ ID NO: 27626 - DNA, 23 bp, Artificial sequence
  SiRNA target sequence
gagacacacaagaattggttgtt

SEQ ID NO: 27627 - DNA, 23 bp, Artificial sequence
  SiRNA target sequence
agacacacaagaattggttgttc

SEQ ID NO: 27628 - DNA, 23 bp, Artificial sequence
  SiRNA target sequence
gacacacaagaattggttgttcc

SEQ ID NO: 27629 - DNA, 23 bp, Artificial sequence
  SiRNA target sequence
acacacaagaattggttgttcct

SEQ ID NO: 27630 - DNA, 23 bp, Artificial sequence
  SiRNA target sequence
cacacaagaattggttgttccta

SEQ ID NO: 27631 - DNA, 23 bp, Artificial sequence
  SiRNA target sequence
acacaagaattggttgttcctag

SEQ ID NO: 27632 - DNA, 23 bp, Artificial sequence
  SiRNA target sequence
cacaagaattggttgttcctaga

SEQ ID NO: 27633 - DNA, 23 bp, Artificial sequence
  SiRNA target sequence
acaagaattggttgttcctagat

SEQ ID NO: 27634 - DNA, 23 bp, Artificial sequence
  SiRNA target sequence
caagaattggttgttcctagatc

SEQ ID NO: 27635 - DNA, 23 bp, Artificial sequence
  SiRNA target sequence
aagaattggttgttcctagatca

SEQ ID NO: 27636 - DNA, 23 bp, Artificial sequence
  SiRNA target sequence
agaattggttgttcctagatcaa

SEQ ID NO: 27637 - DNA, 23 bp, Artificial sequence
  SiRNA target sequence
gaattggttgttcctagatcaat

SEQ ID NO: 27638 - DNA, 23 bp, Artificial sequence
  SiRNA target sequence
aattggttgttcctagatcaatt

SEQ ID NO: 27639 - DNA, 23 bp, Artificial sequence
  SiRNA target sequence
attggttgttcctagatcaattc

SEQ ID NO: 27640 - DNA, 23 bp, Artificial sequence
  SiRNA target sequence
ttggttgttcctagatcaattcc

SEQ ID NO: 27641 - DNA, 23 bp, Artificial sequence
  SiRNA target sequence
tggttgttcctagatcaattcct

SEQ ID NO: 27642 - DNA, 23 bp, Artificial sequence
  SiRNA target sequence
ggttgttcctagatcaattccta

SEQ ID NO: 27643 - DNA, 23 bp, Artificial sequence
  SiRNA target sequence
gttgttcctagatcaattcctat

SEQ ID NO: 27644 - DNA, 23 bp, Artificial sequence
  SiRNA target sequence
ttgttcctagatcaattcctatt

SEQ ID NO: 27645 - DNA, 23 bp, Artificial sequence
  SiRNA target sequence
tgttcctagatcaattcctatta

SEQ ID NO: 27646 - DNA, 23 bp, Artificial sequence
  SiRNA target sequence
gttcctagatcaattcctattat

SEQ ID NO: 27647 - DNA, 23 bp, Artificial sequence
  SiRNA target sequence
ttcctagatcaattcctattatt

SEQ ID NO: 27648 - DNA, 23 bp, Artificial sequence
  SiRNA target sequence
tcctagatcaattcctattattt

SEQ ID NO: 27649 - DNA, 23 bp, Artificial sequence
  SiRNA target sequence
cctagatcaattcctattatttt

SEQ ID NO: 27650 - DNA, 23 bp, Artificial sequence
  SiRNA target sequence
ctagatcaattcctattatttta

SEQ ID NO: 27651 - DNA, 23 bp, Artificial sequence
  SiRNA target sequence
tagatcaattcctattattttag

SEQ ID NO: 27652 - DNA, 23 bp, Artificial sequence
  SiRNA target sequence
agatcaattcctattattttaga

SEQ ID NO: 27653 - DNA, 23 bp, Artificial sequence
  SiRNA target sequence
gatcaattcctattattttagag

SEQ ID NO: 27654 - DNA, 23 bp, Artificial sequence
  SiRNA target sequence
atcaattcctattattttagagc

SEQ ID NO: 27655 - DNA, 23 bp, Artificial sequence
  SiRNA target sequence
tcaattcctattattttagagct

SEQ ID NO: 27656 - DNA, 23 bp, Artificial sequence
  SiRNA target sequence
caattcctattattttagagcta

SEQ ID NO: 27657 - DNA, 23 bp, Artificial sequence
  SiRNA target sequence
aattcctattattttagagctaa

SEQ ID NO: 27658 - DNA, 23 bp, Artificial sequence
  SiRNA target sequence
attcctattattttagagctaat

SEQ ID NO: 27659 - DNA, 23 bp, Artificial sequence
  SiRNA target sequence
ttcctattattttagagctaatt

SEQ ID NO: 27660 - DNA, 23 bp, Artificial sequence
  SiRNA target sequence
tcctattattttagagctaattt

SEQ ID NO: 27661 - DNA, 23 bp, Artificial sequence
  SiRNA target sequence
cctattattttagagctaatttc

SEQ ID NO: 27662 - DNA, 23 bp, Artificial sequence
  SiRNA target sequence
ctattattttagagctaatttct

SEQ ID NO: 27663 - DNA, 23 bp, Artificial sequence
  SiRNA target sequence
tattattttagagctaatttctt

SEQ ID NO: 27664 - DNA, 23 bp, Artificial sequence
  SiRNA target sequence
attattttagagctaatttcttc

SEQ ID NO: 27665 - DNA, 23 bp, Artificial sequence
  SiRNA target sequence
ttattttagagctaatttcttct

SEQ ID NO: 27666 - DNA, 23 bp, Artificial sequence
  SiRNA target sequence
tattttagagctaatttcttctt

SEQ ID NO: 27667 - DNA, 23 bp, Artificial sequence
  SiRNA target sequence
attttagagctaatttcttcttt

SEQ ID NO: 27668 - DNA, 23 bp, Artificial sequence
  SiRNA target sequence
ttttagagctaatttcttcttta

SEQ ID NO: 27669 - DNA, 23 bp, Artificial sequence
  SiRNA target sequence
tttagagctaatttcttctttag

SEQ ID NO: 27670 - DNA, 23 bp, Artificial sequence
  SiRNA target sequence
ttagagctaatttcttctttaga

SEQ ID NO: 27671 - DNA, 23 bp, Artificial sequence
  SiRNA target sequence
tagagctaatttcttctttagac

SEQ ID NO: 27672 - DNA, 23 bp, Artificial sequence
  SiRNA target sequence
agagctaatttcttctttagaca

SEQ ID NO: 27673 - DNA, 23 bp, Artificial sequence
  SiRNA target sequence
gagctaatttcttctttagacat

SEQ ID NO: 27674 - DNA, 24 bp, Artificial sequence
  SiRNA target sequence
ttaagaatttttcaatattttttt

SEQ ID NO: 27675 - DNA, 24 bp, Artificial sequence
  SiRNA target sequence
taagaatttttcaatatttttttt

SEQ ID NO: 27676 - DNA, 24 bp, Artificial sequence
  SiRNA target sequence
aagaatttttcaatattttttttg

SEQ ID NO: 27677 - DNA, 24 bp, Artificial sequence
  SiRNA target sequence
agaatttttcaatattttttttgc

SEQ ID NO: 27678 - DNA, 24 bp, Artificial sequence
  SiRNA target sequence
gaatttttcaatattttttttgct

SEQ ID NO: 27679 - DNA, 24 bp, Artificial sequence
  SiRNA target sequence
aatttttcaatattttttttgctt

SEQ ID NO: 27680 - DNA, 24 bp, Artificial sequence
  SiRNA target sequence
atttttcaatattttttttgcttg

SEQ ID NO: 27681 - DNA, 24 bp, Artificial sequence
  SiRNA target sequence
tttttcaatattttttttgcttgt

SEQ ID NO: 27682 - DNA, 24 bp, Artificial sequence
  SiRNA target sequence
ttttcaatattttttttgcttgtt

SEQ ID NO: 27683 - DNA, 24 bp, Artificial sequence
  SiRNA target sequence
tttcaatattttttttgcttgttc

SEQ ID NO: 27684 - DNA, 24 bp, Artificial sequence
  SiRNA target sequence
ttcaatattttttttgcttgttct

SEQ ID NO: 27685 - DNA, 24 bp, Artificial sequence
  SiRNA target sequence
tcaatattttttttgcttgttcta

SEQ ID NO: 27686 - DNA, 24 bp, Artificial sequence
  SiRNA target sequence
caatattttttttgcttgttctaa

SEQ ID NO: 27687 - DNA, 24 bp, Artificial sequence
  SiRNA target sequence
aatattttttttgcttgttctaag

SEQ ID NO: 27688 - DNA, 24 bp, Artificial sequence
  SiRNA target sequence
atattttttttgcttgttctaagt

SEQ ID NO: 27689 - DNA, 24 bp, Artificial sequence
  SiRNA target sequence
tattttttttgcttgttctaagtc

SEQ ID NO: 27690 - DNA, 24 bp, Artificial sequence
  SiRNA target sequence
attttttttgcttgttctaagtca

SEQ ID NO: 27691 - DNA, 24 bp, Artificial sequence
  SiRNA target sequence
ttttttttgcttgttctaagtcat

SEQ ID NO: 27692 - DNA, 24 bp, Artificial sequence
  SiRNA target sequence
tttttttgcttgttctaagtcata

SEQ ID NO: 27693 - DNA, 24 bp, Artificial sequence
  SiRNA target sequence
ttttttgcttgttctaagtcataa

SEQ ID NO: 27694 - DNA, 24 bp, Artificial sequence
  SiRNA target sequence
tttttgcttgttctaagtcataaa

SEQ ID NO: 27695 - DNA, 24 bp, Artificial sequence
  SiRNA target sequence
ttttgcttgttctaagtcataaat

SEQ ID NO: 27696 - DNA, 24 bp, Artificial sequence
  SiRNA target sequence
tttgcttgttctaagtcataaatt

SEQ ID NO: 27697 - DNA, 24 bp, Artificial sequence
  SiRNA target sequence
ttgcttgttctaagtcataaattt

SEQ ID NO: 27698 - DNA, 24 bp, Artificial sequence
  SiRNA target sequence
tgcttgttctaagtcataaatttt

SEQ ID NO: 27699 - DNA, 24 bp, Artificial sequence
  SiRNA target sequence
gcttgttctaagtcataaattttt

SEQ ID NO: 27700 - DNA, 24 bp, Artificial sequence
  SiRNA target sequence
cttgttctaagtcataaatttttt

SEQ ID NO: 27701 - DNA, 24 bp, Artificial sequence
  SiRNA target sequence
ttgttctaagtcataaattttttt

SEQ ID NO: 27702 - DNA, 24 bp, Artificial sequence
  SiRNA target sequence
tgttctaagtcataaattttttta

SEQ ID NO: 27703 - DNA, 24 bp, Artificial sequence
  SiRNA target sequence
gttctaagtcataaatttttttag

SEQ ID NO: 27704 - DNA, 24 bp, Artificial sequence
  SiRNA target sequence
ttctaagtcataaatttttttagt

SEQ ID NO: 27705 - DNA, 24 bp, Artificial sequence
  SiRNA target sequence
tctaagtcataaatttttttagtc

SEQ ID NO: 27706 - DNA, 24 bp, Artificial sequence
  SiRNA target sequence
ctaagtcataaatttttttagtca

SEQ ID NO: 27707 - DNA, 24 bp, Artificial sequence
  SiRNA target sequence
taagtcataaatttttttagtcaa

SEQ ID NO: 27708 - DNA, 24 bp, Artificial sequence
  SiRNA target sequence
aagtcataaatttttttagtcaaa

SEQ ID NO: 27709 - DNA, 24 bp, Artificial sequence
  SiRNA target sequence
agtcataaatttttttagtcaaat

SEQ ID NO: 27710 - DNA, 24 bp, Artificial sequence
  SiRNA target sequence
gtcataaatttttttagtcaaata

SEQ ID NO: 27711 - DNA, 24 bp, Artificial sequence
  SiRNA target sequence
tcataaatttttttagtcaaatat

SEQ ID NO: 27712 - DNA, 24 bp, Artificial sequence
  SiRNA target sequence
cataaatttttttagtcaaatatg

SEQ ID NO: 27713 - DNA, 24 bp, Artificial sequence
  SiRNA target sequence
ataaatttttttagtcaaatatga

SEQ ID NO: 27714 - DNA, 24 bp, Artificial sequence
  SiRNA target sequence
taaatttttttagtcaaatatgac

SEQ ID NO: 27715 - DNA, 24 bp, Artificial sequence
  SiRNA target sequence
aaatttttttagtcaaatatgact

SEQ ID NO: 27716 - DNA, 24 bp, Artificial sequence
  SiRNA target sequence
aatttttttagtcaaatatgactt

SEQ ID NO: 27717 - DNA, 24 bp, Artificial sequence
  SiRNA target sequence
atttttttagtcaaatatgacttt

SEQ ID NO: 27718 - DNA, 24 bp, Artificial sequence
  SiRNA target sequence
tttttttagtcaaatatgacttta

SEQ ID NO: 27719 - DNA, 24 bp, Artificial sequence
  SiRNA target sequence
ttttttagtcaaatatgactttaa

SEQ ID NO: 27720 - DNA, 24 bp, Artificial sequence
  SiRNA target sequence
tttttagtcaaatatgactttaaa

SEQ ID NO: 27721 - DNA, 24 bp, Artificial sequence
  SiRNA target sequence
ttttagtcaaatatgactttaaaa

SEQ ID NO: 27722 - DNA, 24 bp, Artificial sequence
  SiRNA target sequence
tttagtcaaatatgactttaaaat

SEQ ID NO: 27723 - DNA, 24 bp, Artificial sequence
  SiRNA target sequence
ttagtcaaatatgactttaaaatc

SEQ ID NO: 27724 - DNA, 24 bp, Artificial sequence
  SiRNA target sequence
tagtcaaatatgactttaaaatct

SEQ ID NO: 27725 - DNA, 24 bp, Artificial sequence
  SiRNA target sequence
agtcaaatatgactttaaaatctc

SEQ ID NO: 27726 - DNA, 24 bp, Artificial sequence
  SiRNA target sequence
gtcaaatatgactttaaaatctct

SEQ ID NO: 27727 - DNA, 24 bp, Artificial sequence
  SiRNA target sequence
tcaaatatgactttaaaatctctt

SEQ ID NO: 27728 - DNA, 24 bp, Artificial sequence
  SiRNA target sequence
caaatatgactttaaaatctcttt

SEQ ID NO: 27729 - DNA, 24 bp, Artificial sequence
  SiRNA target sequence
aaatatgactttaaaatctctttt

SEQ ID NO: 27730 - DNA, 24 bp, Artificial sequence
  SiRNA target sequence
aatatgactttaaaatctcttttg

SEQ ID NO: 27731 - DNA, 24 bp, Artificial sequence
  SiRNA target sequence
atatgactttaaaatctcttttgt

SEQ ID NO: 27732 - DNA, 24 bp, Artificial sequence
  SiRNA target sequence
tatgactttaaaatctcttttgtt

SEQ ID NO: 27733 - DNA, 24 bp, Artificial sequence
  SiRNA target sequence
atgactttaaaatctcttttgttt

SEQ ID NO: 27734 - DNA, 24 bp, Artificial sequence
  SiRNA target sequence
tgactttaaaatctcttttgtttc

SEQ ID NO: 27735 - DNA, 24 bp, Artificial sequence
  SiRNA target sequence
gactttaaaatctcttttgtttca

SEQ ID NO: 27736 - DNA, 24 bp, Artificial sequence
  SiRNA target sequence
actttaaaatctcttttgtttcat

SEQ ID NO: 27737 - DNA, 24 bp, Artificial sequence
  SiRNA target sequence
ctttaaaatctcttttgtttcatc

SEQ ID NO: 27738 - DNA, 24 bp, Artificial sequence
  SiRNA target sequence
tttaaaatctcttttgtttcatct

SEQ ID NO: 27739 - DNA, 24 bp, Artificial sequence
  SiRNA target sequence
ttaaaatctcttttgtttcatctg

SEQ ID NO: 27740 - DNA, 24 bp, Artificial sequence
  SiRNA target sequence
taaaatctcttttgtttcatctgt

SEQ ID NO: 27741 - DNA, 24 bp, Artificial sequence
  SiRNA target sequence
aaaatctcttttgtttcatctgtt

SEQ ID NO: 27742 - DNA, 24 bp, Artificial sequence
  SiRNA target sequence
aaatctcttttgtttcatctgtta

SEQ ID NO: 27743 - DNA, 24 bp, Artificial sequence
  SiRNA target sequence
aatctcttttgtttcatctgttac

SEQ ID NO: 27744 - DNA, 24 bp, Artificial sequence
  SiRNA target sequence
atctcttttgtttcatctgttact

SEQ ID NO: 27745 - DNA, 24 bp, Artificial sequence
  SiRNA target sequence
tctcttttgtttcatctgttactt

SEQ ID NO: 27746 - DNA, 24 bp, Artificial sequence
  SiRNA target sequence
ctcttttgtttcatctgttacttg

SEQ ID NO: 27747 - DNA, 24 bp, Artificial sequence
  SiRNA target sequence
tcttttgtttcatctgttacttgt

SEQ ID NO: 27748 - DNA, 24 bp, Artificial sequence
  SiRNA target sequence
cttttgtttcatctgttacttgtt

SEQ ID NO: 27749 - DNA, 24 bp, Artificial sequence
  SiRNA target sequence
ttttgtttcatctgttacttgttt

SEQ ID NO: 27750 - DNA, 24 bp, Artificial sequence
  SiRNA target sequence
tttgtttcatctgttacttgtttg

SEQ ID NO: 27751 - DNA, 24 bp, Artificial sequence
  SiRNA target sequence
ttgtttcatctgttacttgtttgt

SEQ ID NO: 27752 - DNA, 24 bp, Artificial sequence
  SiRNA target sequence
tgtttcatctgttacttgtttgta

SEQ ID NO: 27753 - DNA, 24 bp, Artificial sequence
  SiRNA target sequence
gtttcatctgttacttgtttgtac

SEQ ID NO: 27754 - DNA, 24 bp, Artificial sequence
  SiRNA target sequence
tttcatctgttacttgtttgtact

SEQ ID NO: 27755 - DNA, 24 bp, Artificial sequence
  SiRNA target sequence
ttcatctgttacttgtttgtactt

SEQ ID NO: 27756 - DNA, 24 bp, Artificial sequence
  SiRNA target sequence
tcatctgttacttgtttgtacttt

SEQ ID NO: 27757 - DNA, 24 bp, Artificial sequence
  SiRNA target sequence
catctgttacttgtttgtacttta

SEQ ID NO: 27758 - DNA, 24 bp, Artificial sequence
  SiRNA target sequence
atctgttacttgtttgtactttaa

SEQ ID NO: 27759 - DNA, 24 bp, Artificial sequence
  SiRNA target sequence
tctgttacttgtttgtactttaaa

SEQ ID NO: 27760 - DNA, 24 bp, Artificial sequence
  SiRNA target sequence
ctgttacttgtttgtactttaaaa

SEQ ID NO: 27761 - DNA, 24 bp, Artificial sequence
  SiRNA target sequence
tgttacttgtttgtactttaaaaa

SEQ ID NO: 27762 - DNA, 24 bp, Artificial sequence
  SiRNA target sequence
gttacttgtttgtactttaaaaat

SEQ ID NO: 27763 - DNA, 24 bp, Artificial sequence
  SiRNA target sequence
ttacttgtttgtactttaaaaatt

SEQ ID NO: 27764 - DNA, 24 bp, Artificial sequence
  SiRNA target sequence
tacttgtttgtactttaaaaattg

SEQ ID NO: 27765 - DNA, 24 bp, Artificial sequence
  SiRNA target sequence
acttgtttgtactttaaaaattgt

SEQ ID NO: 27766 - DNA, 24 bp, Artificial sequence
  SiRNA target sequence
cttgtttgtactttaaaaattgtt

SEQ ID NO: 27767 - DNA, 24 bp, Artificial sequence
  SiRNA target sequence
ttgtttgtactttaaaaattgttg

SEQ ID NO: 27768 - DNA, 24 bp, Artificial sequence
  SiRNA target sequence
tgtttgtactttaaaaattgttga

SEQ ID NO: 27769 - DNA, 24 bp, Artificial sequence
  SiRNA target sequence
gtttgtactttaaaaattgttgaa

SEQ ID NO: 27770 - DNA, 24 bp, Artificial sequence
  SiRNA target sequence
tttgtactttaaaaattgttgaat

SEQ ID NO: 27771 - DNA, 24 bp, Artificial sequence
  SiRNA target sequence
ttgtactttaaaaattgttgaatt

SEQ ID NO: 27772 - DNA, 24 bp, Artificial sequence
  SiRNA target sequence
tgtactttaaaaattgttgaattt

SEQ ID NO: 27773 - DNA, 24 bp, Artificial sequence
  SiRNA target sequence
gtactttaaaaattgttgaatttc

SEQ ID NO: 27774 - DNA, 24 bp, Artificial sequence
  SiRNA target sequence
tactttaaaaattgttgaatttca

SEQ ID NO: 27775 - DNA, 24 bp, Artificial sequence
  SiRNA target sequence
actttaaaaattgttgaatttcaa

SEQ ID NO: 27776 - DNA, 24 bp, Artificial sequence
  SiRNA target sequence
ctttaaaaattgttgaatttcaat

SEQ ID NO: 27777 - DNA, 24 bp, Artificial sequence
  SiRNA target sequence
tttaaaaattgttgaatttcaatt

SEQ ID NO: 27778 - DNA, 24 bp, Artificial sequence
  SiRNA target sequence
ttaaaaattgttgaatttcaattt

SEQ ID NO: 27779 - DNA, 24 bp, Artificial sequence
  SiRNA target sequence
taaaaattgttgaatttcaatttt

SEQ ID NO: 27780 - DNA, 24 bp, Artificial sequence
  SiRNA target sequence
aaaaattgttgaatttcaatttta

SEQ ID NO: 27781 - DNA, 24 bp, Artificial sequence
  SiRNA target sequence
aaaattgttgaatttcaattttaa

SEQ ID NO: 27782 - DNA, 24 bp, Artificial sequence
  SiRNA target sequence
aaattgttgaatttcaattttaaa

SEQ ID NO: 27783 - DNA, 24 bp, Artificial sequence
  SiRNA target sequence
aattgttgaatttcaattttaaat

SEQ ID NO: 27784 - DNA, 24 bp, Artificial sequence
  SiRNA target sequence
attgttgaatttcaattttaaatt

SEQ ID NO: 27785 - DNA, 24 bp, Artificial sequence
  SiRNA target sequence
ttgttgaatttcaattttaaattc

SEQ ID NO: 27786 - DNA, 24 bp, Artificial sequence
  SiRNA target sequence
tgttgaatttcaattttaaattcg

SEQ ID NO: 27787 - DNA, 24 bp, Artificial sequence
  SiRNA target sequence
gttgaatttcaattttaaattcgg

SEQ ID NO: 27788 - DNA, 24 bp, Artificial sequence
  SiRNA target sequence
ttgaatttcaattttaaattcggc

SEQ ID NO: 27789 - DNA, 24 bp, Artificial sequence
  SiRNA target sequence
tgaatttcaattttaaattcggca

SEQ ID NO: 27790 - DNA, 24 bp, Artificial sequence
  SiRNA target sequence
gaatttcaattttaaattcggcac

SEQ ID NO: 27791 - DNA, 24 bp, Artificial sequence
  SiRNA target sequence
aatttcaattttaaattcggcaca

SEQ ID NO: 27792 - DNA, 24 bp, Artificial sequence
  SiRNA target sequence
atttcaattttaaattcggcacaa

SEQ ID NO: 27793 - DNA, 24 bp, Artificial sequence
  SiRNA target sequence
tttcaattttaaattcggcacaat

SEQ ID NO: 27794 - DNA, 24 bp, Artificial sequence
  SiRNA target sequence
ttcaattttaaattcggcacaatt

SEQ ID NO: 27795 - DNA, 24 bp, Artificial sequence
  SiRNA target sequence
tcaattttaaattcggcacaattt

SEQ ID NO: 27796 - DNA, 24 bp, Artificial sequence
  SiRNA target sequence
caattttaaattcggcacaatttt

SEQ ID NO: 27797 - DNA, 24 bp, Artificial sequence
  SiRNA target sequence
aattttaaattcggcacaattttt

SEQ ID NO: 27798 - DNA, 24 bp, Artificial sequence
  SiRNA target sequence
attttaaattcggcacaatttttt

SEQ ID NO: 27799 - DNA, 24 bp, Artificial sequence
  SiRNA target sequence
ttttaaattcggcacaattttttt

SEQ ID NO: 27800 - DNA, 24 bp, Artificial sequence
  SiRNA target sequence
tttaaattcggcacaatttttttc

SEQ ID NO: 27801 - DNA, 24 bp, Artificial sequence
  SiRNA target sequence
ttaaattcggcacaatttttttca

SEQ ID NO: 27802 - DNA, 24 bp, Artificial sequence
  SiRNA target sequence
taaattcggcacaatttttttcaa

SEQ ID NO: 27803 - DNA, 24 bp, Artificial sequence
  SiRNA target sequence
aaattcggcacaatttttttcaat

SEQ ID NO: 27804 - DNA, 24 bp, Artificial sequence
  SiRNA target sequence
aattcggcacaatttttttcaatt

SEQ ID NO: 27805 - DNA, 24 bp, Artificial sequence
  SiRNA target sequence
attcggcacaatttttttcaattt

SEQ ID NO: 27806 - DNA, 24 bp, Artificial sequence
  SiRNA target sequence
ttcggcacaatttttttcaatttc

SEQ ID NO: 27807 - DNA, 24 bp, Artificial sequence
  SiRNA target sequence
tcggcacaatttttttcaatttca

SEQ ID NO: 27808 - DNA, 24 bp, Artificial sequence
  SiRNA target sequence
cggcacaatttttttcaatttcat

SEQ ID NO: 27809 - DNA, 24 bp, Artificial sequence
  SiRNA target sequence
ggcacaatttttttcaatttcatc

SEQ ID NO: 27810 - DNA, 24 bp, Artificial sequence
  SiRNA target sequence
gcacaatttttttcaatttcatct

SEQ ID NO: 27811 - DNA, 24 bp, Artificial sequence
  SiRNA target sequence
cacaatttttttcaatttcatctt

SEQ ID NO: 27812 - DNA, 24 bp, Artificial sequence
  SiRNA target sequence
acaatttttttcaatttcatcttt

SEQ ID NO: 27813 - DNA, 24 bp, Artificial sequence
  SiRNA target sequence
caatttttttcaatttcatctttt

SEQ ID NO: 27814 - DNA, 24 bp, Artificial sequence
  SiRNA target sequence
aatttttttcaatttcatcttttt

SEQ ID NO: 27815 - DNA, 24 bp, Artificial sequence
  SiRNA target sequence
atttttttcaatttcatctttttt

SEQ ID NO: 27816 - DNA, 24 bp, Artificial sequence
  SiRNA target sequence
tttttttcaatttcatcttttttc

SEQ ID NO: 27817 - DNA, 24 bp, Artificial sequence
  SiRNA target sequence
ttttttcaatttcatcttttttcg

SEQ ID NO: 27818 - DNA, 24 bp, Artificial sequence
  SiRNA target sequence
tttttcaatttcatcttttttcga

SEQ ID NO: 27819 - DNA, 24 bp, Artificial sequence
  SiRNA target sequence
ttttcaatttcatcttttttcgaa

SEQ ID NO: 27820 - DNA, 24 bp, Artificial sequence
  SiRNA target sequence
tttcaatttcatcttttttcgaat

SEQ ID NO: 27821 - DNA, 24 bp, Artificial sequence
  SiRNA target sequence
ttcaatttcatcttttttcgaatt

SEQ ID NO: 27822 - DNA, 24 bp, Artificial sequence
  SiRNA target sequence
tcaatttcatcttttttcgaattt

SEQ ID NO: 27823 - DNA, 24 bp, Artificial sequence
  SiRNA target sequence
caatttcatcttttttcgaatttt

SEQ ID NO: 27824 - DNA, 24 bp, Artificial sequence
  SiRNA target sequence
aatttcatcttttttcgaattttc

SEQ ID NO: 27825 - DNA, 24 bp, Artificial sequence
  SiRNA target sequence
atttcatcttttttcgaattttct

SEQ ID NO: 27826 - DNA, 24 bp, Artificial sequence
  SiRNA target sequence
tttcatcttttttcgaattttctt

SEQ ID NO: 27827 - DNA, 24 bp, Artificial sequence
  SiRNA target sequence
ttcatcttttttcgaattttcttc

SEQ ID NO: 27828 - DNA, 24 bp, Artificial sequence
  SiRNA target sequence
tcatcttttttcgaattttcttcg

SEQ ID NO: 27829 - DNA, 24 bp, Artificial sequence
  SiRNA target sequence
catcttttttcgaattttcttcgg

SEQ ID NO: 27830 - DNA, 24 bp, Artificial sequence
  SiRNA target sequence
atcttttttcgaattttcttcggc

SEQ ID NO: 27831 - DNA, 24 bp, Artificial sequence
  SiRNA target sequence
tcttttttcgaattttcttcggct

SEQ ID NO: 27832 - DNA, 24 bp, Artificial sequence
  SiRNA target sequence
cttttttcgaattttcttcggctt

SEQ ID NO: 27833 - DNA, 24 bp, Artificial sequence
  SiRNA target sequence
ttttttcgaattttcttcggcttc

SEQ ID NO: 27834 - DNA, 24 bp, Artificial sequence
  SiRNA target sequence
tttttcgaattttcttcggcttct

SEQ ID NO: 27835 - DNA, 24 bp, Artificial sequence
  SiRNA target sequence
ttttcgaattttcttcggcttctc

SEQ ID NO: 27836 - DNA, 24 bp, Artificial sequence
  SiRNA target sequence
tttcgaattttcttcggcttctcg

SEQ ID NO: 27837 - DNA, 24 bp, Artificial sequence
  SiRNA target sequence
ttcgaattttcttcggcttctcgt

SEQ ID NO: 27838 - DNA, 24 bp, Artificial sequence
  SiRNA target sequence
tcgaattttcttcggcttctcgta

SEQ ID NO: 27839 - DNA, 24 bp, Artificial sequence
  SiRNA target sequence
cgaattttcttcggcttctcgtat

SEQ ID NO: 27840 - DNA, 24 bp, Artificial sequence
  SiRNA target sequence
gaattttcttcggcttctcgtatc

SEQ ID NO: 27841 - DNA, 24 bp, Artificial sequence
  SiRNA target sequence
aattttcttcggcttctcgtatca

SEQ ID NO: 27842 - DNA, 24 bp, Artificial sequence
  SiRNA target sequence
attttcttcggcttctcgtatcat

SEQ ID NO: 27843 - DNA, 24 bp, Artificial sequence
  SiRNA target sequence
ttttcttcggcttctcgtatcatt

SEQ ID NO: 27844 - DNA, 24 bp, Artificial sequence
  SiRNA target sequence
tttcttcggcttctcgtatcattt

SEQ ID NO: 27845 - DNA, 24 bp, Artificial sequence
  SiRNA target sequence
ttcttcggcttctcgtatcatttg

SEQ ID NO: 27846 - DNA, 24 bp, Artificial sequence
  SiRNA target sequence
tcttcggcttctcgtatcatttgc

SEQ ID NO: 27847 - DNA, 24 bp, Artificial sequence
  SiRNA target sequence
cttcggcttctcgtatcatttgcg

SEQ ID NO: 27848 - DNA, 24 bp, Artificial sequence
  SiRNA target sequence
ttcggcttctcgtatcatttgcga

SEQ ID NO: 27849 - DNA, 24 bp, Artificial sequence
  SiRNA target sequence
tcggcttctcgtatcatttgcgaa

SEQ ID NO: 27850 - DNA, 24 bp, Artificial sequence
  SiRNA target sequence
cggcttctcgtatcatttgcgaaa

SEQ ID NO: 27851 - DNA, 24 bp, Artificial sequence
  SiRNA target sequence
ggcttctcgtatcatttgcgaaat

SEQ ID NO: 27852 - DNA, 24 bp, Artificial sequence
  SiRNA target sequence
gcttctcgtatcatttgcgaaatt

SEQ ID NO: 27853 - DNA, 24 bp, Artificial sequence
  SiRNA target sequence
cttctcgtatcatttgcgaaattt

SEQ ID NO: 27854 - DNA, 24 bp, Artificial sequence
  SiRNA target sequence
ttctcgtatcatttgcgaaatttc

SEQ ID NO: 27855 - DNA, 24 bp, Artificial sequence
  SiRNA target sequence
tctcgtatcatttgcgaaatttca

SEQ ID NO: 27856 - DNA, 24 bp, Artificial sequence
  SiRNA target sequence
ctcgtatcatttgcgaaatttcac

SEQ ID NO: 27857 - DNA, 24 bp, Artificial sequence
  SiRNA target sequence
tcgtatcatttgcgaaatttcacc

SEQ ID NO: 27858 - DNA, 24 bp, Artificial sequence
  SiRNA target sequence
cgtatcatttgcgaaatttcacct

SEQ ID NO: 27859 - DNA, 24 bp, Artificial sequence
  SiRNA target sequence
gtatcatttgcgaaatttcacctt

SEQ ID NO: 27860 - DNA, 24 bp, Artificial sequence
  SiRNA target sequence
tatcatttgcgaaatttcaccttc

SEQ ID NO: 27861 - DNA, 24 bp, Artificial sequence
  SiRNA target sequence
atcatttgcgaaatttcaccttca

SEQ ID NO: 27862 - DNA, 24 bp, Artificial sequence
  SiRNA target sequence
tcatttgcgaaatttcaccttcat

SEQ ID NO: 27863 - DNA, 24 bp, Artificial sequence
  SiRNA target sequence
catttgcgaaatttcaccttcatt

SEQ ID NO: 27864 - DNA, 24 bp, Artificial sequence
  SiRNA target sequence
atttgcgaaatttcaccttcattt

SEQ ID NO: 27865 - DNA, 24 bp, Artificial sequence
  SiRNA target sequence
tttgcgaaatttcaccttcattta

SEQ ID NO: 27866 - DNA, 24 bp, Artificial sequence
  SiRNA target sequence
ttgcgaaatttcaccttcatttaa

SEQ ID NO: 27867 - DNA, 24 bp, Artificial sequence
  SiRNA target sequence
tgcgaaatttcaccttcatttaat

SEQ ID NO: 27868 - DNA, 24 bp, Artificial sequence
  SiRNA target sequence
gcgaaatttcaccttcatttaatc

SEQ ID NO: 27869 - DNA, 24 bp, Artificial sequence
  SiRNA target sequence
cgaaatttcaccttcatttaatcc

SEQ ID NO: 27870 - DNA, 24 bp, Artificial sequence
  SiRNA target sequence
gaaatttcaccttcatttaatcca

SEQ ID NO: 27871 - DNA, 24 bp, Artificial sequence
  SiRNA target sequence
aaatttcaccttcatttaatccac

SEQ ID NO: 27872 - DNA, 24 bp, Artificial sequence
  SiRNA target sequence
aatttcaccttcatttaatccact

SEQ ID NO: 27873 - DNA, 24 bp, Artificial sequence
  SiRNA target sequence
atttcaccttcatttaatccactt

SEQ ID NO: 27874 - DNA, 24 bp, Artificial sequence
  SiRNA target sequence
tttcaccttcatttaatccacttg

SEQ ID NO: 27875 - DNA, 24 bp, Artificial sequence
  SiRNA target sequence
ttcaccttcatttaatccacttga

SEQ ID NO: 27876 - DNA, 24 bp, Artificial sequence
  SiRNA target sequence
tcaccttcatttaatccacttgaa

SEQ ID NO: 27877 - DNA, 24 bp, Artificial sequence
  SiRNA target sequence
caccttcatttaatccacttgaag

SEQ ID NO: 27878 - DNA, 24 bp, Artificial sequence
  SiRNA target sequence
accttcatttaatccacttgaagg

SEQ ID NO: 27879 - DNA, 24 bp, Artificial sequence
  SiRNA target sequence
ccttcatttaatccacttgaaggc

SEQ ID NO: 27880 - DNA, 24 bp, Artificial sequence
  SiRNA target sequence
cttcatttaatccacttgaaggca

SEQ ID NO: 27881 - DNA, 24 bp, Artificial sequence
  SiRNA target sequence
ttcatttaatccacttgaaggcac

SEQ ID NO: 27882 - DNA, 24 bp, Artificial sequence
  SiRNA target sequence
tcatttaatccacttgaaggcaca

SEQ ID NO: 27883 - DNA, 24 bp, Artificial sequence
  SiRNA target sequence
catttaatccacttgaaggcacaa

SEQ ID NO: 27884 - DNA, 24 bp, Artificial sequence
  SiRNA target sequence
atttaatccacttgaaggcacaat

SEQ ID NO: 27885 - DNA, 24 bp, Artificial sequence
  SiRNA target sequence
tttaatccacttgaaggcacaatt

SEQ ID NO: 27886 - DNA, 24 bp, Artificial sequence
  SiRNA target sequence
ttaatccacttgaaggcacaattt

SEQ ID NO: 27887 - DNA, 24 bp, Artificial sequence
  SiRNA target sequence
taatccacttgaaggcacaatttc

SEQ ID NO: 27888 - DNA, 24 bp, Artificial sequence
  SiRNA target sequence
aatccacttgaaggcacaatttcg

SEQ ID NO: 27889 - DNA, 24 bp, Artificial sequence
  SiRNA target sequence
atccacttgaaggcacaatttcga

SEQ ID NO: 27890 - DNA, 24 bp, Artificial sequence
  SiRNA target sequence
tccacttgaaggcacaatttcgat

SEQ ID NO: 27891 - DNA, 24 bp, Artificial sequence
  SiRNA target sequence
ccacttgaaggcacaatttcgatt

SEQ ID NO: 27892 - DNA, 24 bp, Artificial sequence
  SiRNA target sequence
cacttgaaggcacaatttcgattt

SEQ ID NO: 27893 - DNA, 24 bp, Artificial sequence
  SiRNA target sequence
acttgaaggcacaatttcgatttc

SEQ ID NO: 27894 - DNA, 24 bp, Artificial sequence
  SiRNA target sequence
cttgaaggcacaatttcgatttct

SEQ ID NO: 27895 - DNA, 24 bp, Artificial sequence
  SiRNA target sequence
ttgaaggcacaatttcgatttctt

SEQ ID NO: 27896 - DNA, 24 bp, Artificial sequence
  SiRNA target sequence
tgaaggcacaatttcgatttcttg

SEQ ID NO: 27897 - DNA, 24 bp, Artificial sequence
  SiRNA target sequence
gaaggcacaatttcgatttcttgc

SEQ ID NO: 27898 - DNA, 24 bp, Artificial sequence
  SiRNA target sequence
aaggcacaatttcgatttcttgct

SEQ ID NO: 27899 - DNA, 24 bp, Artificial sequence
  SiRNA target sequence
aggcacaatttcgatttcttgctt

SEQ ID NO: 27900 - DNA, 24 bp, Artificial sequence
  SiRNA target sequence
ggcacaatttcgatttcttgcttt

SEQ ID NO: 27901 - DNA, 24 bp, Artificial sequence
  SiRNA target sequence
gcacaatttcgatttcttgctttt

SEQ ID NO: 27902 - DNA, 24 bp, Artificial sequence
  SiRNA target sequence
cacaatttcgatttcttgcttttt

SEQ ID NO: 27903 - DNA, 24 bp, Artificial sequence
  SiRNA target sequence
acaatttcgatttcttgctttttt

SEQ ID NO: 27904 - DNA, 24 bp, Artificial sequence
  SiRNA target sequence
caatttcgatttcttgcttttttt

SEQ ID NO: 27905 - DNA, 24 bp, Artificial sequence
  SiRNA target sequence
aatttcgatttcttgctttttttt

SEQ ID NO: 27906 - DNA, 24 bp, Artificial sequence
  SiRNA target sequence
atttcgatttcttgcttttttttc

SEQ ID NO: 27907 - DNA, 24 bp, Artificial sequence
  SiRNA target sequence
tttcgatttcttgcttttttttcg

SEQ ID NO: 27908 - DNA, 24 bp, Artificial sequence
  SiRNA target sequence
ttcgatttcttgcttttttttcgt

SEQ ID NO: 27909 - DNA, 24 bp, Artificial sequence
  SiRNA target sequence
tcgatttcttgcttttttttcgtt

SEQ ID NO: 27910 - DNA, 24 bp, Artificial sequence
  SiRNA target sequence
cgatttcttgcttttttttcgtta

SEQ ID NO: 27911 - DNA, 24 bp, Artificial sequence
  SiRNA target sequence
gatttcttgcttttttttcgttat

SEQ ID NO: 27912 - DNA, 24 bp, Artificial sequence
  SiRNA target sequence
atttcttgcttttttttcgttatc

SEQ ID NO: 27913 - DNA, 24 bp, Artificial sequence
  SiRNA target sequence
tttcttgcttttttttcgttatcc

SEQ ID NO: 27914 - DNA, 24 bp, Artificial sequence
  SiRNA target sequence
ttcttgcttttttttcgttatccc

SEQ ID NO: 27915 - DNA, 24 bp, Artificial sequence
  SiRNA target sequence
tcttgcttttttttcgttatcccg

SEQ ID NO: 27916 - DNA, 24 bp, Artificial sequence
  SiRNA target sequence
cttgcttttttttcgttatcccgt

SEQ ID NO: 27917 - DNA, 24 bp, Artificial sequence
  SiRNA target sequence
ttgcttttttttcgttatcccgtc

SEQ ID NO: 27918 - DNA, 24 bp, Artificial sequence
  SiRNA target sequence
tgcttttttttcgttatcccgtct

SEQ ID NO: 27919 - DNA, 24 bp, Artificial sequence
  SiRNA target sequence
gcttttttttcgttatcccgtctt

SEQ ID NO: 27920 - DNA, 24 bp, Artificial sequence
  SiRNA target sequence
cttttttttcgttatcccgtcttg

SEQ ID NO: 27921 - DNA, 24 bp, Artificial sequence
  SiRNA target sequence
ttttttttcgttatcccgtcttgc

SEQ ID NO: 27922 - DNA, 24 bp, Artificial sequence
  SiRNA target sequence
tttttttcgttatcccgtcttgcg

SEQ ID NO: 27923 - DNA, 24 bp, Artificial sequence
  SiRNA target sequence
ttttttcgttatcccgtcttgcgc

SEQ ID NO: 27924 - DNA, 24 bp, Artificial sequence
  SiRNA target sequence
tttttcgttatcccgtcttgcgca

SEQ ID NO: 27925 - DNA, 24 bp, Artificial sequence
  SiRNA target sequence
ttttcgttatcccgtcttgcgcag

SEQ ID NO: 27926 - DNA, 24 bp, Artificial sequence
  SiRNA target sequence
tttcgttatcccgtcttgcgcaga

SEQ ID NO: 27927 - DNA, 24 bp, Artificial sequence
  SiRNA target sequence
ttcgttatcccgtcttgcgcagat

SEQ ID NO: 27928 - DNA, 24 bp, Artificial sequence
  SiRNA target sequence
tcgttatcccgtcttgcgcagata

SEQ ID NO: 27929 - DNA, 24 bp, Artificial sequence
  SiRNA target sequence
cgttatcccgtcttgcgcagatac

SEQ ID NO: 27930 - DNA, 24 bp, Artificial sequence
  SiRNA target sequence
gttatcccgtcttgcgcagatact

SEQ ID NO: 27931 - DNA, 24 bp, Artificial sequence
  SiRNA target sequence
ttatcccgtcttgcgcagatactt

SEQ ID NO: 27932 - DNA, 24 bp, Artificial sequence
  SiRNA target sequence
tatcccgtcttgcgcagatacttt

SEQ ID NO: 27933 - DNA, 24 bp, Artificial sequence
  SiRNA target sequence
atcccgtcttgcgcagatactttg

SEQ ID NO: 27934 - DNA, 24 bp, Artificial sequence
  SiRNA target sequence
tcccgtcttgcgcagatactttgt

SEQ ID NO: 27935 - DNA, 24 bp, Artificial sequence
  SiRNA target sequence
cccgtcttgcgcagatactttgta

SEQ ID NO: 27936 - DNA, 24 bp, Artificial sequence
  SiRNA target sequence
ccgtcttgcgcagatactttgtat

SEQ ID NO: 27937 - DNA, 24 bp, Artificial sequence
  SiRNA target sequence
cgtcttgcgcagatactttgtata

SEQ ID NO: 27938 - DNA, 24 bp, Artificial sequence
  SiRNA target sequence
gtcttgcgcagatactttgtatat

SEQ ID NO: 27939 - DNA, 24 bp, Artificial sequence
  SiRNA target sequence
tcttgcgcagatactttgtatatt

SEQ ID NO: 27940 - DNA, 24 bp, Artificial sequence
  SiRNA target sequence
cttgcgcagatactttgtatattc

SEQ ID NO: 27941 - DNA, 24 bp, Artificial sequence
  SiRNA target sequence
ttgcgcagatactttgtatattcc

SEQ ID NO: 27942 - DNA, 24 bp, Artificial sequence
  SiRNA target sequence
tgcgcagatactttgtatattccg

SEQ ID NO: 27943 - DNA, 24 bp, Artificial sequence
  SiRNA target sequence
gcgcagatactttgtatattccgt

SEQ ID NO: 27944 - DNA, 24 bp, Artificial sequence
  SiRNA target sequence
cgcagatactttgtatattccgtt

SEQ ID NO: 27945 - DNA, 24 bp, Artificial sequence
  SiRNA target sequence
gcagatactttgtatattccgtta

SEQ ID NO: 27946 - DNA, 24 bp, Artificial sequence
  SiRNA target sequence
cagatactttgtatattccgttag

SEQ ID NO: 27947 - DNA, 24 bp, Artificial sequence
  SiRNA target sequence
agatactttgtatattccgttagc

SEQ ID NO: 27948 - DNA, 24 bp, Artificial sequence
  SiRNA target sequence
gatactttgtatattccgttagca

SEQ ID NO: 27949 - DNA, 24 bp, Artificial sequence
  SiRNA target sequence
atactttgtatattccgttagcat

SEQ ID NO: 27950 - DNA, 24 bp, Artificial sequence
  SiRNA target sequence
tactttgtatattccgttagcatc

SEQ ID NO: 27951 - DNA, 24 bp, Artificial sequence
  SiRNA target sequence
actttgtatattccgttagcatcg

SEQ ID NO: 27952 - DNA, 24 bp, Artificial sequence
  SiRNA target sequence
ctttgtatattccgttagcatcgg

SEQ ID NO: 27953 - DNA, 24 bp, Artificial sequence
  SiRNA target sequence
tttgtatattccgttagcatcggc

SEQ ID NO: 27954 - DNA, 24 bp, Artificial sequence
  SiRNA target sequence
ttgtatattccgttagcatcggct

SEQ ID NO: 27955 - DNA, 24 bp, Artificial sequence
  SiRNA target sequence
tgtatattccgttagcatcggctt

SEQ ID NO: 27956 - DNA, 24 bp, Artificial sequence
  SiRNA target sequence
gtatattccgttagcatcggcttc

SEQ ID NO: 27957 - DNA, 24 bp, Artificial sequence
  SiRNA target sequence
tatattccgttagcatcggcttca

SEQ ID NO: 27958 - DNA, 24 bp, Artificial sequence
  SiRNA target sequence
atattccgttagcatcggcttcaa

SEQ ID NO: 27959 - DNA, 24 bp, Artificial sequence
  SiRNA target sequence
tattccgttagcatcggcttcaaa

SEQ ID NO: 27960 - DNA, 24 bp, Artificial sequence
  SiRNA target sequence
attccgttagcatcggcttcaaat

SEQ ID NO: 27961 - DNA, 24 bp, Artificial sequence
  SiRNA target sequence
ttccgttagcatcggcttcaaatg

SEQ ID NO: 27962 - DNA, 24 bp, Artificial sequence
  SiRNA target sequence
tccgttagcatcggcttcaaatgt

SEQ ID NO: 27963 - DNA, 24 bp, Artificial sequence
  SiRNA target sequence
ccgttagcatcggcttcaaatgta

SEQ ID NO: 27964 - DNA, 24 bp, Artificial sequence
  SiRNA target sequence
cgttagcatcggcttcaaatgtaa

SEQ ID NO: 27965 - DNA, 24 bp, Artificial sequence
  SiRNA target sequence
gttagcatcggcttcaaatgtaac

SEQ ID NO: 27966 - DNA, 24 bp, Artificial sequence
  SiRNA target sequence
ttagcatcggcttcaaatgtaaca

SEQ ID NO: 27967 - DNA, 24 bp, Artificial sequence
  SiRNA target sequence
tagcatcggcttcaaatgtaacat

SEQ ID NO: 27968 - DNA, 24 bp, Artificial sequence
  SiRNA target sequence
agcatcggcttcaaatgtaacatc

SEQ ID NO: 27969 - DNA, 24 bp, Artificial sequence
  SiRNA target sequence
gcatcggcttcaaatgtaacatct

SEQ ID NO: 27970 - DNA, 24 bp, Artificial sequence
  SiRNA target sequence
catcggcttcaaatgtaacatcta

SEQ ID NO: 27971 - DNA, 24 bp, Artificial sequence
  SiRNA target sequence
atcggcttcaaatgtaacatctat

SEQ ID NO: 27972 - DNA, 24 bp, Artificial sequence
  SiRNA target sequence
tcggcttcaaatgtaacatctatc

SEQ ID NO: 27973 - DNA, 24 bp, Artificial sequence
  SiRNA target sequence
cggcttcaaatgtaacatctatct

SEQ ID NO: 27974 - DNA, 24 bp, Artificial sequence
  SiRNA target sequence
ggcttcaaatgtaacatctatctt

SEQ ID NO: 27975 - DNA, 24 bp, Artificial sequence
  SiRNA target sequence
gcttcaaatgtaacatctatcttt

SEQ ID NO: 27976 - DNA, 24 bp, Artificial sequence
  SiRNA target sequence
cttcaaatgtaacatctatctttg

SEQ ID NO: 27977 - DNA, 24 bp, Artificial sequence
  SiRNA target sequence
ttcaaatgtaacatctatctttgg

SEQ ID NO: 27978 - DNA, 24 bp, Artificial sequence
  SiRNA target sequence
tcaaatgtaacatctatctttgga

SEQ ID NO: 27979 - DNA, 24 bp, Artificial sequence
  SiRNA target sequence
caaatgtaacatctatctttggaa

SEQ ID NO: 27980 - DNA, 24 bp, Artificial sequence
  SiRNA target sequence
aaatgtaacatctatctttggaat

SEQ ID NO: 27981 - DNA, 24 bp, Artificial sequence
  SiRNA target sequence
aatgtaacatctatctttggaata

SEQ ID NO: 27982 - DNA, 24 bp, Artificial sequence
  SiRNA target sequence
atgtaacatctatctttggaatac

SEQ ID NO: 27983 - DNA, 24 bp, Artificial sequence
  SiRNA target sequence
tgtaacatctatctttggaatacc

SEQ ID NO: 27984 - DNA, 24 bp, Artificial sequence
  SiRNA target sequence
gtaacatctatctttggaatacct

SEQ ID NO: 27985 - DNA, 24 bp, Artificial sequence
  SiRNA target sequence
taacatctatctttggaatacctg

SEQ ID NO: 27986 - DNA, 24 bp, Artificial sequence
  SiRNA target sequence
aacatctatctttggaatacctgc

SEQ ID NO: 27987 - DNA, 24 bp, Artificial sequence
  SiRNA target sequence
acatctatctttggaatacctgca

SEQ ID NO: 27988 - DNA, 24 bp, Artificial sequence
  SiRNA target sequence
catctatctttggaatacctgcag

SEQ ID NO: 27989 - DNA, 24 bp, Artificial sequence
  SiRNA target sequence
atctatctttggaatacctgcagg

SEQ ID NO: 27990 - DNA, 24 bp, Artificial sequence
  SiRNA target sequence
tctatctttggaatacctgcaggt

SEQ ID NO: 27991 - DNA, 24 bp, Artificial sequence
  SiRNA target sequence
ctatctttggaatacctgcaggtg

SEQ ID NO: 27992 - DNA, 24 bp, Artificial sequence
  SiRNA target sequence
tatctttggaatacctgcaggtgc

SEQ ID NO: 27993 - DNA, 24 bp, Artificial sequence
  SiRNA target sequence
atctttggaatacctgcaggtgct

SEQ ID NO: 27994 - DNA, 24 bp, Artificial sequence
  SiRNA target sequence
tctttggaatacctgcaggtgctt

SEQ ID NO: 27995 - DNA, 24 bp, Artificial sequence
  SiRNA target sequence
ctttggaatacctgcaggtgcttt

SEQ ID NO: 27996 - DNA, 24 bp, Artificial sequence
  SiRNA target sequence
tttggaatacctgcaggtgcttta

SEQ ID NO: 27997 - DNA, 24 bp, Artificial sequence
  SiRNA target sequence
ttggaatacctgcaggtgctttag

SEQ ID NO: 27998 - DNA, 24 bp, Artificial sequence
  SiRNA target sequence
tggaatacctgcaggtgctttagg

SEQ ID NO: 27999 - DNA, 24 bp, Artificial sequence
  SiRNA target sequence
ggaatacctgcaggtgctttagga

SEQ ID NO: 28000 - DNA, 24 bp, Artificial sequence
  SiRNA target sequence
gaatacctgcaggtgctttaggaa

SEQ ID NO: 28001 - DNA, 24 bp, Artificial sequence
  SiRNA target sequence
aatacctgcaggtgctttaggaat

SEQ ID NO: 28002 - DNA, 24 bp, Artificial sequence
  SiRNA target sequence
atacctgcaggtgctttaggaatg

SEQ ID NO: 28003 - DNA, 24 bp, Artificial sequence
  SiRNA target sequence
tacctgcaggtgctttaggaatgt

SEQ ID NO: 28004 - DNA, 24 bp, Artificial sequence
  SiRNA target sequence
acctgcaggtgctttaggaatgtt

SEQ ID NO: 28005 - DNA, 24 bp, Artificial sequence
  SiRNA target sequence
cctgcaggtgctttaggaatgttt

SEQ ID NO: 28006 - DNA, 24 bp, Artificial sequence
  SiRNA target sequence
ctgcaggtgctttaggaatgtttt

SEQ ID NO: 28007 - DNA, 24 bp, Artificial sequence
  SiRNA target sequence
tgcaggtgctttaggaatgttttt

SEQ ID NO: 28008 - DNA, 24 bp, Artificial sequence
  SiRNA target sequence
gcaggtgctttaggaatgtttttg

SEQ ID NO: 28009 - DNA, 24 bp, Artificial sequence
  SiRNA target sequence
caggtgctttaggaatgtttttga

SEQ ID NO: 28010 - DNA, 24 bp, Artificial sequence
  SiRNA target sequence
aggtgctttaggaatgtttttgag

SEQ ID NO: 28011 - DNA, 24 bp, Artificial sequence
  SiRNA target sequence
ggtgctttaggaatgtttttgagc

SEQ ID NO: 28012 - DNA, 24 bp, Artificial sequence
  SiRNA target sequence
gtgctttaggaatgtttttgagct

SEQ ID NO: 28013 - DNA, 24 bp, Artificial sequence
  SiRNA target sequence
tgctttaggaatgtttttgagctt

SEQ ID NO: 28014 - DNA, 24 bp, Artificial sequence
  SiRNA target sequence
gctttaggaatgtttttgagcttt

SEQ ID NO: 28015 - DNA, 24 bp, Artificial sequence
  SiRNA target sequence
ctttaggaatgtttttgagcttta

SEQ ID NO: 28016 - DNA, 24 bp, Artificial sequence
  SiRNA target sequence
tttaggaatgtttttgagctttat

SEQ ID NO: 28017 - DNA, 24 bp, Artificial sequence
  SiRNA target sequence
ttaggaatgtttttgagctttata

SEQ ID NO: 28018 - DNA, 24 bp, Artificial sequence
  SiRNA target sequence
taggaatgtttttgagctttatag

SEQ ID NO: 28019 - DNA, 24 bp, Artificial sequence
  SiRNA target sequence
aggaatgtttttgagctttatagc

SEQ ID NO: 28020 - DNA, 24 bp, Artificial sequence
  SiRNA target sequence
ggaatgtttttgagctttatagct

SEQ ID NO: 28021 - DNA, 24 bp, Artificial sequence
  SiRNA target sequence
gaatgtttttgagctttatagctc

SEQ ID NO: 28022 - DNA, 24 bp, Artificial sequence
  SiRNA target sequence
aatgtttttgagctttatagctcc

SEQ ID NO: 28023 - DNA, 24 bp, Artificial sequence
  SiRNA target sequence
atgtttttgagctttatagctcct

SEQ ID NO: 28024 - DNA, 24 bp, Artificial sequence
  SiRNA target sequence
tgtttttgagctttatagctccta

SEQ ID NO: 28025 - DNA, 24 bp, Artificial sequence
  SiRNA target sequence
gtttttgagctttatagctcctaa

SEQ ID NO: 28026 - DNA, 24 bp, Artificial sequence
  SiRNA target sequence
tttttgagctttatagctcctaaa

SEQ ID NO: 28027 - DNA, 24 bp, Artificial sequence
  SiRNA target sequence
ttttgagctttatagctcctaaat

SEQ ID NO: 28028 - DNA, 24 bp, Artificial sequence
  SiRNA target sequence
tttgagctttatagctcctaaata

SEQ ID NO: 28029 - DNA, 24 bp, Artificial sequence
  SiRNA target sequence
ttgagctttatagctcctaaatat

SEQ ID NO: 28030 - DNA, 24 bp, Artificial sequence
  SiRNA target sequence
tgagctttatagctcctaaatatt

SEQ ID NO: 28031 - DNA, 24 bp, Artificial sequence
  SiRNA target sequence
gagctttatagctcctaaatattt

SEQ ID NO: 28032 - DNA, 24 bp, Artificial sequence
  SiRNA target sequence
agctttatagctcctaaatattta

SEQ ID NO: 28033 - DNA, 24 bp, Artificial sequence
  SiRNA target sequence
gctttatagctcctaaatatttat

SEQ ID NO: 28034 - DNA, 24 bp, Artificial sequence
  SiRNA target sequence
ctttatagctcctaaatatttatt

SEQ ID NO: 28035 - DNA, 24 bp, Artificial sequence
  SiRNA target sequence
tttatagctcctaaatatttattg

SEQ ID NO: 28036 - DNA, 24 bp, Artificial sequence
  SiRNA target sequence
ttatagctcctaaatatttattgt

SEQ ID NO: 28037 - DNA, 24 bp, Artificial sequence
  SiRNA target sequence
tatagctcctaaatatttattgtc

SEQ ID NO: 28038 - DNA, 24 bp, Artificial sequence
  SiRNA target sequence
atagctcctaaatatttattgtct

SEQ ID NO: 28039 - DNA, 24 bp, Artificial sequence
  SiRNA target sequence
tagctcctaaatatttattgtctt

SEQ ID NO: 28040 - DNA, 24 bp, Artificial sequence
  SiRNA target sequence
agctcctaaatatttattgtcttt

SEQ ID NO: 28041 - DNA, 24 bp, Artificial sequence
  SiRNA target sequence
gctcctaaatatttattgtctttt

SEQ ID NO: 28042 - DNA, 24 bp, Artificial sequence
  SiRNA target sequence
ctcctaaatatttattgtctttta

SEQ ID NO: 28043 - DNA, 24 bp, Artificial sequence
  SiRNA target sequence
tcctaaatatttattgtcttttac

SEQ ID NO: 28044 - DNA, 24 bp, Artificial sequence
  SiRNA target sequence
cctaaatatttattgtcttttacc

SEQ ID NO: 28045 - DNA, 24 bp, Artificial sequence
  SiRNA target sequence
ctaaatatttattgtcttttacca

SEQ ID NO: 28046 - DNA, 24 bp, Artificial sequence
  SiRNA target sequence
taaatatttattgtcttttaccat

SEQ ID NO: 28047 - DNA, 24 bp, Artificial sequence
  SiRNA target sequence
aaatatttattgtcttttaccatc

SEQ ID NO: 28048 - DNA, 24 bp, Artificial sequence
  SiRNA target sequence
aatatttattgtcttttaccatct

SEQ ID NO: 28049 - DNA, 24 bp, Artificial sequence
  SiRNA target sequence
atatttattgtcttttaccatctt

SEQ ID NO: 28050 - DNA, 24 bp, Artificial sequence
  SiRNA target sequence
tatttattgtcttttaccatcttt

SEQ ID NO: 28051 - DNA, 24 bp, Artificial sequence
  SiRNA target sequence
atttattgtcttttaccatctttc

SEQ ID NO: 28052 - DNA, 24 bp, Artificial sequence
  SiRNA target sequence
tttattgtcttttaccatctttct

SEQ ID NO: 28053 - DNA, 24 bp, Artificial sequence
  SiRNA target sequence
ttattgtcttttaccatctttctt

SEQ ID NO: 28054 - DNA, 24 bp, Artificial sequence
  SiRNA target sequence
tattgtcttttaccatctttcttt

SEQ ID NO: 28055 - DNA, 24 bp, Artificial sequence
  SiRNA target sequence
attgtcttttaccatctttctttc

SEQ ID NO: 28056 - DNA, 24 bp, Artificial sequence
  SiRNA target sequence
ttgtcttttaccatctttctttct

SEQ ID NO: 28057 - DNA, 24 bp, Artificial sequence
  SiRNA target sequence
tgtcttttaccatctttctttctc

SEQ ID NO: 28058 - DNA, 24 bp, Artificial sequence
  SiRNA target sequence
gtcttttaccatctttctttctcc

SEQ ID NO: 28059 - DNA, 24 bp, Artificial sequence
  SiRNA target sequence
tcttttaccatctttctttctcct

SEQ ID NO: 28060 - DNA, 24 bp, Artificial sequence
  SiRNA target sequence
cttttaccatctttctttctcctt

SEQ ID NO: 28061 - DNA, 24 bp, Artificial sequence
  SiRNA target sequence
ttttaccatctttctttctccttg

SEQ ID NO: 28062 - DNA, 24 bp, Artificial sequence
  SiRNA target sequence
tttaccatctttctttctccttga

SEQ ID NO: 28063 - DNA, 24 bp, Artificial sequence
  SiRNA target sequence
ttaccatctttctttctccttgat

SEQ ID NO: 28064 - DNA, 24 bp, Artificial sequence
  SiRNA target sequence
taccatctttctttctccttgata

SEQ ID NO: 28065 - DNA, 24 bp, Artificial sequence
  SiRNA target sequence
accatctttctttctccttgatat

SEQ ID NO: 28066 - DNA, 24 bp, Artificial sequence
  SiRNA target sequence
ccatctttctttctccttgatata

SEQ ID NO: 28067 - DNA, 24 bp, Artificial sequence
  SiRNA target sequence
catctttctttctccttgatatat

SEQ ID NO: 28068 - DNA, 24 bp, Artificial sequence
  SiRNA target sequence
atctttctttctccttgatatatt

SEQ ID NO: 28069 - DNA, 24 bp, Artificial sequence
  SiRNA target sequence
tctttctttctccttgatatattc

SEQ ID NO: 28070 - DNA, 24 bp, Artificial sequence
  SiRNA target sequence
ctttctttctccttgatatattct

SEQ ID NO: 28071 - DNA, 24 bp, Artificial sequence
  SiRNA target sequence
tttctttctccttgatatattcta

SEQ ID NO: 28072 - DNA, 24 bp, Artificial sequence
  SiRNA target sequence
ttctttctccttgatatattctaa

SEQ ID NO: 28073 - DNA, 24 bp, Artificial sequence
  SiRNA target sequence
tctttctccttgatatattctaat

SEQ ID NO: 28074 - DNA, 24 bp, Artificial sequence
  SiRNA target sequence
ctttctccttgatatattctaata

SEQ ID NO: 28075 - DNA, 24 bp, Artificial sequence
  SiRNA target sequence
tttctccttgatatattctaatat

SEQ ID NO: 28076 - DNA, 24 bp, Artificial sequence
  SiRNA target sequence
ttctccttgatatattctaatatc

SEQ ID NO: 28077 - DNA, 24 bp, Artificial sequence
  SiRNA target sequence
tctccttgatatattctaatatct

SEQ ID NO: 28078 - DNA, 24 bp, Artificial sequence
  SiRNA target sequence
ctccttgatatattctaatatcta

SEQ ID NO: 28079 - DNA, 24 bp, Artificial sequence
  SiRNA target sequence
tccttgatatattctaatatctac

SEQ ID NO: 28080 - DNA, 24 bp, Artificial sequence
  SiRNA target sequence
ccttgatatattctaatatctact

SEQ ID NO: 28081 - DNA, 24 bp, Artificial sequence
  SiRNA target sequence
cttgatatattctaatatctactt

SEQ ID NO: 28082 - DNA, 24 bp, Artificial sequence
  SiRNA target sequence
ttgatatattctaatatctacttc

SEQ ID NO: 28083 - DNA, 24 bp, Artificial sequence
  SiRNA target sequence
tgatatattctaatatctacttcg

SEQ ID NO: 28084 - DNA, 24 bp, Artificial sequence
  SiRNA target sequence
gatatattctaatatctacttcgg

SEQ ID NO: 28085 - DNA, 24 bp, Artificial sequence
  SiRNA target sequence
atatattctaatatctacttcgga

SEQ ID NO: 28086 - DNA, 24 bp, Artificial sequence
  SiRNA target sequence
tatattctaatatctacttcggat

SEQ ID NO: 28087 - DNA, 24 bp, Artificial sequence
  SiRNA target sequence
atattctaatatctacttcggatt

SEQ ID NO: 28088 - DNA, 24 bp, Artificial sequence
  SiRNA target sequence
tattctaatatctacttcggattg

SEQ ID NO: 28089 - DNA, 24 bp, Artificial sequence
  SiRNA target sequence
attctaatatctacttcggattga

SEQ ID NO: 28090 - DNA, 24 bp, Artificial sequence
  SiRNA target sequence
ttctaatatctacttcggattgat

SEQ ID NO: 28091 - DNA, 24 bp, Artificial sequence
  SiRNA target sequence
tctaatatctacttcggattgatt

SEQ ID NO: 28092 - DNA, 24 bp, Artificial sequence
  SiRNA target sequence
ctaatatctacttcggattgatta

SEQ ID NO: 28093 - DNA, 24 bp, Artificial sequence
  SiRNA target sequence
taatatctacttcggattgattat

SEQ ID NO: 28094 - DNA, 24 bp, Artificial sequence
  SiRNA target sequence
aatatctacttcggattgattatc

SEQ ID NO: 28095 - DNA, 24 bp, Artificial sequence
  SiRNA target sequence
atatctacttcggattgattatct

SEQ ID NO: 28096 - DNA, 24 bp, Artificial sequence
  SiRNA target sequence
tatctacttcggattgattatctt

SEQ ID NO: 28097 - DNA, 24 bp, Artificial sequence
  SiRNA target sequence
atctacttcggattgattatcttc

SEQ ID NO: 28098 - DNA, 24 bp, Artificial sequence
  SiRNA target sequence
tctacttcggattgattatcttca

SEQ ID NO: 28099 - DNA, 24 bp, Artificial sequence
  SiRNA target sequence
ctacttcggattgattatcttcag

SEQ ID NO: 28100 - DNA, 24 bp, Artificial sequence
  SiRNA target sequence
tacttcggattgattatcttcaga

SEQ ID NO: 28101 - DNA, 24 bp, Artificial sequence
  SiRNA target sequence
acttcggattgattatcttcagag

SEQ ID NO: 28102 - DNA, 24 bp, Artificial sequence
  SiRNA target sequence
cttcggattgattatcttcagagg

SEQ ID NO: 28103 - DNA, 24 bp, Artificial sequence
  SiRNA target sequence
ttcggattgattatcttcagaggt

SEQ ID NO: 28104 - DNA, 24 bp, Artificial sequence
  SiRNA target sequence
tcggattgattatcttcagaggta

SEQ ID NO: 28105 - DNA, 24 bp, Artificial sequence
  SiRNA target sequence
cggattgattatcttcagaggtag

SEQ ID NO: 28106 - DNA, 24 bp, Artificial sequence
  SiRNA target sequence
ggattgattatcttcagaggtaga

SEQ ID NO: 28107 - DNA, 24 bp, Artificial sequence
  SiRNA target sequence
gattgattatcttcagaggtagaa

SEQ ID NO: 28108 - DNA, 24 bp, Artificial sequence
  SiRNA target sequence
attgattatcttcagaggtagaaa

SEQ ID NO: 28109 - DNA, 24 bp, Artificial sequence
  SiRNA target sequence
ttgattatcttcagaggtagaaaa

SEQ ID NO: 28110 - DNA, 24 bp, Artificial sequence
  SiRNA target sequence
tgattatcttcagaggtagaaaaa

SEQ ID NO: 28111 - DNA, 24 bp, Artificial sequence
  SiRNA target sequence
gattatcttcagaggtagaaaaac

SEQ ID NO: 28112 - DNA, 24 bp, Artificial sequence
  SiRNA target sequence
attatcttcagaggtagaaaaact

SEQ ID NO: 28113 - DNA, 24 bp, Artificial sequence
  SiRNA target sequence
ttatcttcagaggtagaaaaactg

SEQ ID NO: 28114 - DNA, 24 bp, Artificial sequence
  SiRNA target sequence
tatcttcagaggtagaaaaactgt

SEQ ID NO: 28115 - DNA, 24 bp, Artificial sequence
  SiRNA target sequence
atcttcagaggtagaaaaactgtg

SEQ ID NO: 28116 - DNA, 24 bp, Artificial sequence
  SiRNA target sequence
tcttcagaggtagaaaaactgtgt

SEQ ID NO: 28117 - DNA, 24 bp, Artificial sequence
  SiRNA target sequence
cttcagaggtagaaaaactgtgtg

SEQ ID NO: 28118 - DNA, 24 bp, Artificial sequence
  SiRNA target sequence
ttcagaggtagaaaaactgtgtgt

SEQ ID NO: 28119 - DNA, 24 bp, Artificial sequence
  SiRNA target sequence
tcagaggtagaaaaactgtgtgtt

SEQ ID NO: 28120 - DNA, 24 bp, Artificial sequence
  SiRNA target sequence
cagaggtagaaaaactgtgtgttt

SEQ ID NO: 28121 - DNA, 24 bp, Artificial sequence
  SiRNA target sequence
agaggtagaaaaactgtgtgtttc

SEQ ID NO: 28122 - DNA, 24 bp, Artificial sequence
  SiRNA target sequence
gaggtagaaaaactgtgtgtttcc

SEQ ID NO: 28123 - DNA, 24 bp, Artificial sequence
  SiRNA target sequence
aggtagaaaaactgtgtgtttcct

SEQ ID NO: 28124 - DNA, 24 bp, Artificial sequence
  SiRNA target sequence
ggtagaaaaactgtgtgtttcctt

SEQ ID NO: 28125 - DNA, 24 bp, Artificial sequence
  SiRNA target sequence
gtagaaaaactgtgtgtttcctta

SEQ ID NO: 28126 - DNA, 24 bp, Artificial sequence
  SiRNA target sequence
tagaaaaactgtgtgtttccttaa

SEQ ID NO: 28127 - DNA, 24 bp, Artificial sequence
  SiRNA target sequence
agaaaaactgtgtgtttccttaaa

SEQ ID NO: 28128 - DNA, 24 bp, Artificial sequence
  SiRNA target sequence
gaaaaactgtgtgtttccttaaat

SEQ ID NO: 28129 - DNA, 24 bp, Artificial sequence
  SiRNA target sequence
aaaaactgtgtgtttccttaaatg

SEQ ID NO: 28130 - DNA, 24 bp, Artificial sequence
  SiRNA target sequence
aaaactgtgtgtttccttaaatgg

SEQ ID NO: 28131 - DNA, 24 bp, Artificial sequence
  SiRNA target sequence
aaactgtgtgtttccttaaatgga

SEQ ID NO: 28132 - DNA, 24 bp, Artificial sequence
  SiRNA target sequence
aactgtgtgtttccttaaatggaa

SEQ ID NO: 28133 - DNA, 24 bp, Artificial sequence
  SiRNA target sequence
actgtgtgtttccttaaatggaat

SEQ ID NO: 28134 - DNA, 24 bp, Artificial sequence
  SiRNA target sequence
ctgtgtgtttccttaaatggaata

SEQ ID NO: 28135 - DNA, 24 bp, Artificial sequence
  SiRNA target sequence
tgtgtgtttccttaaatggaatag

SEQ ID NO: 28136 - DNA, 24 bp, Artificial sequence
  SiRNA target sequence
gtgtgtttccttaaatggaatagt

SEQ ID NO: 28137 - DNA, 24 bp, Artificial sequence
  SiRNA target sequence
tgtgtttccttaaatggaatagta

SEQ ID NO: 28138 - DNA, 24 bp, Artificial sequence
  SiRNA target sequence
gtgtttccttaaatggaatagtag

SEQ ID NO: 28139 - DNA, 24 bp, Artificial sequence
  SiRNA target sequence
tgtttccttaaatggaatagtaga

SEQ ID NO: 28140 - DNA, 24 bp, Artificial sequence
  SiRNA target sequence
gtttccttaaatggaatagtagaa

SEQ ID NO: 28141 - DNA, 24 bp, Artificial sequence
  SiRNA target sequence
tttccttaaatggaatagtagaat

SEQ ID NO: 28142 - DNA, 24 bp, Artificial sequence
  SiRNA target sequence
ttccttaaatggaatagtagaatt

SEQ ID NO: 28143 - DNA, 24 bp, Artificial sequence
  SiRNA target sequence
tccttaaatggaatagtagaattt

SEQ ID NO: 28144 - DNA, 24 bp, Artificial sequence
  SiRNA target sequence
ccttaaatggaatagtagaatttc

SEQ ID NO: 28145 - DNA, 24 bp, Artificial sequence
  SiRNA target sequence
cttaaatggaatagtagaatttct

SEQ ID NO: 28146 - DNA, 24 bp, Artificial sequence
  SiRNA target sequence
ttaaatggaatagtagaatttcta

SEQ ID NO: 28147 - DNA, 24 bp, Artificial sequence
  SiRNA target sequence
taaatggaatagtagaatttctat

SEQ ID NO: 28148 - DNA, 24 bp, Artificial sequence
  SiRNA target sequence
aaatggaatagtagaatttctatg

SEQ ID NO: 28149 - DNA, 24 bp, Artificial sequence
  SiRNA target sequence
aatggaatagtagaatttctatga

SEQ ID NO: 28150 - DNA, 24 bp, Artificial sequence
  SiRNA target sequence
atggaatagtagaatttctatgaa

SEQ ID NO: 28151 - DNA, 24 bp, Artificial sequence
  SiRNA target sequence
tggaatagtagaatttctatgaat

SEQ ID NO: 28152 - DNA, 24 bp, Artificial sequence
  SiRNA target sequence
ggaatagtagaatttctatgaatt

SEQ ID NO: 28153 - DNA, 24 bp, Artificial sequence
  SiRNA target sequence
gaatagtagaatttctatgaatta

SEQ ID NO: 28154 - DNA, 24 bp, Artificial sequence
  SiRNA target sequence
aatagtagaatttctatgaattat

SEQ ID NO: 28155 - DNA, 24 bp, Artificial sequence
  SiRNA target sequence
atagtagaatttctatgaattatc

SEQ ID NO: 28156 - DNA, 24 bp, Artificial sequence
  SiRNA target sequence
tagtagaatttctatgaattatct

SEQ ID NO: 28157 - DNA, 24 bp, Artificial sequence
  SiRNA target sequence
agtagaatttctatgaattatctt

SEQ ID NO: 28158 - DNA, 24 bp, Artificial sequence
  SiRNA target sequence
gtagaatttctatgaattatctta

SEQ ID NO: 28159 - DNA, 24 bp, Artificial sequence
  SiRNA target sequence
tagaatttctatgaattatcttat

SEQ ID NO: 28160 - DNA, 24 bp, Artificial sequence
  SiRNA target sequence
agaatttctatgaattatcttatt

SEQ ID NO: 28161 - DNA, 24 bp, Artificial sequence
  SiRNA target sequence
gaatttctatgaattatcttatta

SEQ ID NO: 28162 - DNA, 24 bp, Artificial sequence
  SiRNA target sequence
aatttctatgaattatcttattaa

SEQ ID NO: 28163 - DNA, 24 bp, Artificial sequence
  SiRNA target sequence
atttctatgaattatcttattaaa

SEQ ID NO: 28164 - DNA, 24 bp, Artificial sequence
  SiRNA target sequence
tttctatgaattatcttattaaaa

SEQ ID NO: 28165 - DNA, 24 bp, Artificial sequence
  SiRNA target sequence
ttctatgaattatcttattaaaaa

SEQ ID NO: 28166 - DNA, 24 bp, Artificial sequence
  SiRNA target sequence
tctatgaattatcttattaaaaat

SEQ ID NO: 28167 - DNA, 24 bp, Artificial sequence
  SiRNA target sequence
ctatgaattatcttattaaaaatc

SEQ ID NO: 28168 - DNA, 24 bp, Artificial sequence
  SiRNA target sequence
tatgaattatcttattaaaaatcc

SEQ ID NO: 28169 - DNA, 24 bp, Artificial sequence
  SiRNA target sequence
atgaattatcttattaaaaatccc

SEQ ID NO: 28170 - DNA, 24 bp, Artificial sequence
  SiRNA target sequence
tgaattatcttattaaaaatcccg

SEQ ID NO: 28171 - DNA, 24 bp, Artificial sequence
  SiRNA target sequence
gaattatcttattaaaaatcccgc

SEQ ID NO: 28172 - DNA, 24 bp, Artificial sequence
  SiRNA target sequence
aattatcttattaaaaatcccgcc

SEQ ID NO: 28173 - DNA, 24 bp, Artificial sequence
  SiRNA target sequence
attatcttattaaaaatcccgccc

SEQ ID NO: 28174 - DNA, 24 bp, Artificial sequence
  SiRNA target sequence
ttatcttattaaaaatcccgccca

SEQ ID NO: 28175 - DNA, 24 bp, Artificial sequence
  SiRNA target sequence
tatcttattaaaaatcccgcccaa

SEQ ID NO: 28176 - DNA, 24 bp, Artificial sequence
  SiRNA target sequence
atcttattaaaaatcccgcccaaa

SEQ ID NO: 28177 - DNA, 24 bp, Artificial sequence
  SiRNA target sequence
tcttattaaaaatcccgcccaaaa

SEQ ID NO: 28178 - DNA, 24 bp, Artificial sequence
  SiRNA target sequence
cttattaaaaatcccgcccaaaag

SEQ ID NO: 28179 - DNA, 24 bp, Artificial sequence
  SiRNA target sequence
ttattaaaaatcccgcccaaaagc

SEQ ID NO: 28180 - DNA, 24 bp, Artificial sequence
  SiRNA target sequence
tattaaaaatcccgcccaaaagct

SEQ ID NO: 28181 - DNA, 24 bp, Artificial sequence
  SiRNA target sequence
attaaaaatcccgcccaaaagctc

SEQ ID NO: 28182 - DNA, 24 bp, Artificial sequence
  SiRNA target sequence
ttaaaaatcccgcccaaaagctct

SEQ ID NO: 28183 - DNA, 24 bp, Artificial sequence
  SiRNA target sequence
taaaaatcccgcccaaaagctcta

SEQ ID NO: 28184 - DNA, 24 bp, Artificial sequence
  SiRNA target sequence
aaaaatcccgcccaaaagctctat

SEQ ID NO: 28185 - DNA, 24 bp, Artificial sequence
  SiRNA target sequence
aaaatcccgcccaaaagctctata

SEQ ID NO: 28186 - DNA, 24 bp, Artificial sequence
  SiRNA target sequence
aaatcccgcccaaaagctctatac

SEQ ID NO: 28187 - DNA, 24 bp, Artificial sequence
  SiRNA target sequence
aatcccgcccaaaagctctatacc

SEQ ID NO: 28188 - DNA, 24 bp, Artificial sequence
  SiRNA target sequence
atcccgcccaaaagctctatacct

SEQ ID NO: 28189 - DNA, 24 bp, Artificial sequence
  SiRNA target sequence
tcccgcccaaaagctctataccta

SEQ ID NO: 28190 - DNA, 24 bp, Artificial sequence
  SiRNA target sequence
cccgcccaaaagctctatacctaa

SEQ ID NO: 28191 - DNA, 24 bp, Artificial sequence
  SiRNA target sequence
ccgcccaaaagctctatacctaaa

SEQ ID NO: 28192 - DNA, 24 bp, Artificial sequence
  SiRNA target sequence
cgcccaaaagctctatacctaaac

SEQ ID NO: 28193 - DNA, 24 bp, Artificial sequence
  SiRNA target sequence
gcccaaaagctctatacctaaact

SEQ ID NO: 28194 - DNA, 24 bp, Artificial sequence
  SiRNA target sequence
cccaaaagctctatacctaaactc

SEQ ID NO: 28195 - DNA, 24 bp, Artificial sequence
  SiRNA target sequence
ccaaaagctctatacctaaactca

SEQ ID NO: 28196 - DNA, 24 bp, Artificial sequence
  SiRNA target sequence
caaaagctctatacctaaactcaa

SEQ ID NO: 28197 - DNA, 24 bp, Artificial sequence
  SiRNA target sequence
aaaagctctatacctaaactcaat

SEQ ID NO: 28198 - DNA, 24 bp, Artificial sequence
  SiRNA target sequence
aaagctctatacctaaactcaatg

SEQ ID NO: 28199 - DNA, 24 bp, Artificial sequence
  SiRNA target sequence
aagctctatacctaaactcaatgg

SEQ ID NO: 28200 - DNA, 24 bp, Artificial sequence
  SiRNA target sequence
agctctatacctaaactcaatggt

SEQ ID NO: 28201 - DNA, 24 bp, Artificial sequence
  SiRNA target sequence
gctctatacctaaactcaatggta

SEQ ID NO: 28202 - DNA, 24 bp, Artificial sequence
  SiRNA target sequence
ctctatacctaaactcaatggtac

SEQ ID NO: 28203 - DNA, 24 bp, Artificial sequence
  SiRNA target sequence
tctatacctaaactcaatggtact

SEQ ID NO: 28204 - DNA, 24 bp, Artificial sequence
  SiRNA target sequence
ctatacctaaactcaatggtacta

SEQ ID NO: 28205 - DNA, 24 bp, Artificial sequence
  SiRNA target sequence
tatacctaaactcaatggtactac

SEQ ID NO: 28206 - DNA, 24 bp, Artificial sequence
  SiRNA target sequence
atacctaaactcaatggtactaca

SEQ ID NO: 28207 - DNA, 24 bp, Artificial sequence
  SiRNA target sequence
tacctaaactcaatggtactacat

SEQ ID NO: 28208 - DNA, 24 bp, Artificial sequence
  SiRNA target sequence
acctaaactcaatggtactacatc

SEQ ID NO: 28209 - DNA, 24 bp, Artificial sequence
  SiRNA target sequence
cctaaactcaatggtactacatcc

SEQ ID NO: 28210 - DNA, 24 bp, Artificial sequence
  SiRNA target sequence
ctaaactcaatggtactacatcca

SEQ ID NO: 28211 - DNA, 24 bp, Artificial sequence
  SiRNA target sequence
taaactcaatggtactacatccaa

SEQ ID NO: 28212 - DNA, 24 bp, Artificial sequence
  SiRNA target sequence
aaactcaatggtactacatccaat

SEQ ID NO: 28213 - DNA, 24 bp, Artificial sequence
  SiRNA target sequence
aactcaatggtactacatccaata

SEQ ID NO: 28214 - DNA, 24 bp, Artificial sequence
  SiRNA target sequence
actcaatggtactacatccaataa

SEQ ID NO: 28215 - DNA, 24 bp, Artificial sequence
  SiRNA target sequence
ctcaatggtactacatccaataat

SEQ ID NO: 28216 - DNA, 24 bp, Artificial sequence
  SiRNA target sequence
tcaatggtactacatccaataata

SEQ ID NO: 28217 - DNA, 24 bp, Artificial sequence
  SiRNA target sequence
caatggtactacatccaataatag

SEQ ID NO: 28218 - DNA, 24 bp, Artificial sequence
  SiRNA target sequence
aatggtactacatccaataatagg

SEQ ID NO: 28219 - DNA, 24 bp, Artificial sequence
  SiRNA target sequence
atggtactacatccaataatagga

SEQ ID NO: 28220 - DNA, 24 bp, Artificial sequence
  SiRNA target sequence
tggtactacatccaataataggac

SEQ ID NO: 28221 - DNA, 24 bp, Artificial sequence
  SiRNA target sequence
ggtactacatccaataataggaca

SEQ ID NO: 28222 - DNA, 24 bp, Artificial sequence
  SiRNA target sequence
gtactacatccaataataggacat

SEQ ID NO: 28223 - DNA, 24 bp, Artificial sequence
  SiRNA target sequence
tactacatccaataataggacatc

SEQ ID NO: 28224 - DNA, 24 bp, Artificial sequence
  SiRNA target sequence
actacatccaataataggacatct

SEQ ID NO: 28225 - DNA, 24 bp, Artificial sequence
  SiRNA target sequence
ctacatccaataataggacatctt

SEQ ID NO: 28226 - DNA, 24 bp, Artificial sequence
  SiRNA target sequence
tacatccaataataggacatcttt

SEQ ID NO: 28227 - DNA, 24 bp, Artificial sequence
  SiRNA target sequence
acatccaataataggacatctttt

SEQ ID NO: 28228 - DNA, 24 bp, Artificial sequence
  SiRNA target sequence
catccaataataggacatctttta

SEQ ID NO: 28229 - DNA, 24 bp, Artificial sequence
  SiRNA target sequence
atccaataataggacatcttttat

SEQ ID NO: 28230 - DNA, 24 bp, Artificial sequence
  SiRNA target sequence
tccaataataggacatcttttatt

SEQ ID NO: 28231 - DNA, 24 bp, Artificial sequence
  SiRNA target sequence
ccaataataggacatcttttattt

SEQ ID NO: 28232 - DNA, 24 bp, Artificial sequence
  SiRNA target sequence
caataataggacatcttttatttt

SEQ ID NO: 28233 - DNA, 24 bp, Artificial sequence
  SiRNA target sequence
aataataggacatcttttattttt

SEQ ID NO: 28234 - DNA, 24 bp, Artificial sequence
  SiRNA target sequence
ataataggacatcttttatttttc

SEQ ID NO: 28235 - DNA, 24 bp, Artificial sequence
  SiRNA target sequence
taataggacatcttttatttttcc

SEQ ID NO: 28236 - DNA, 24 bp, Artificial sequence
  SiRNA target sequence
aataggacatcttttatttttcct

SEQ ID NO: 28237 - DNA, 24 bp, Artificial sequence
  SiRNA target sequence
ataggacatcttttatttttcctt

SEQ ID NO: 28238 - DNA, 24 bp, Artificial sequence
  SiRNA target sequence
taggacatcttttatttttccttc

SEQ ID NO: 28239 - DNA, 24 bp, Artificial sequence
  SiRNA target sequence
aggacatcttttatttttccttct

SEQ ID NO: 28240 - DNA, 24 bp, Artificial sequence
  SiRNA target sequence
ggacatcttttatttttccttcta

SEQ ID NO: 28241 - DNA, 24 bp, Artificial sequence
  SiRNA target sequence
gacatcttttatttttccttctaa

SEQ ID NO: 28242 - DNA, 24 bp, Artificial sequence
  SiRNA target sequence
acatcttttatttttccttctaac

SEQ ID NO: 28243 - DNA, 24 bp, Artificial sequence
  SiRNA target sequence
catcttttatttttccttctaaca

SEQ ID NO: 28244 - DNA, 24 bp, Artificial sequence
  SiRNA target sequence
atcttttatttttccttctaacac

SEQ ID NO: 28245 - DNA, 24 bp, Artificial sequence
  SiRNA target sequence
tcttttatttttccttctaacacg

SEQ ID NO: 28246 - DNA, 24 bp, Artificial sequence
  SiRNA target sequence
cttttatttttccttctaacacgc

SEQ ID NO: 28247 - DNA, 24 bp, Artificial sequence
  SiRNA target sequence
ttttatttttccttctaacacgcc

SEQ ID NO: 28248 - DNA, 24 bp, Artificial sequence
  SiRNA target sequence
tttatttttccttctaacacgcct

SEQ ID NO: 28249 - DNA, 24 bp, Artificial sequence
  SiRNA target sequence
ttatttttccttctaacacgcctg

SEQ ID NO: 28250 - DNA, 24 bp, Artificial sequence
  SiRNA target sequence
tatttttccttctaacacgcctgc

SEQ ID NO: 28251 - DNA, 24 bp, Artificial sequence
  SiRNA target sequence
atttttccttctaacacgcctgct

SEQ ID NO: 28252 - DNA, 24 bp, Artificial sequence
  SiRNA target sequence
tttttccttctaacacgcctgctt

SEQ ID NO: 28253 - DNA, 24 bp, Artificial sequence
  SiRNA target sequence
ttttccttctaacacgcctgcttg

SEQ ID NO: 28254 - DNA, 24 bp, Artificial sequence
  SiRNA target sequence
tttccttctaacacgcctgcttgt

SEQ ID NO: 28255 - DNA, 24 bp, Artificial sequence
  SiRNA target sequence
ttccttctaacacgcctgcttgta

SEQ ID NO: 28256 - DNA, 24 bp, Artificial sequence
  SiRNA target sequence
tccttctaacacgcctgcttgtag

SEQ ID NO: 28257 - DNA, 24 bp, Artificial sequence
  SiRNA target sequence
ccttctaacacgcctgcttgtaga

SEQ ID NO: 28258 - DNA, 24 bp, Artificial sequence
  SiRNA target sequence
cttctaacacgcctgcttgtagag

SEQ ID NO: 28259 - DNA, 24 bp, Artificial sequence
  SiRNA target sequence
ttctaacacgcctgcttgtagagc

SEQ ID NO: 28260 - DNA, 24 bp, Artificial sequence
  SiRNA target sequence
tctaacacgcctgcttgtagagcg

SEQ ID NO: 28261 - DNA, 24 bp, Artificial sequence
  SiRNA target sequence
ctaacacgcctgcttgtagagcgg

SEQ ID NO: 28262 - DNA, 24 bp, Artificial sequence
  SiRNA target sequence
taacacgcctgcttgtagagcggc

SEQ ID NO: 28263 - DNA, 24 bp, Artificial sequence
  SiRNA target sequence
aacacgcctgcttgtagagcggcc

SEQ ID NO: 28264 - DNA, 24 bp, Artificial sequence
  SiRNA target sequence
acacgcctgcttgtagagcggccc

SEQ ID NO: 28265 - DNA, 24 bp, Artificial sequence
  SiRNA target sequence
cacgcctgcttgtagagcggcccc

SEQ ID NO: 28266 - DNA, 24 bp, Artificial sequence
  SiRNA target sequence
acgcctgcttgtagagcggcccct

SEQ ID NO: 28267 - DNA, 24 bp, Artificial sequence
  SiRNA target sequence
cgcctgcttgtagagcggcccctt

SEQ ID NO: 28268 - DNA, 24 bp, Artificial sequence
  SiRNA target sequence
gcctgcttgtagagcggccccttt

SEQ ID NO: 28269 - DNA, 24 bp, Artificial sequence
  SiRNA target sequence
cctgcttgtagagcggccccttta

SEQ ID NO: 28270 - DNA, 24 bp, Artificial sequence
  SiRNA target sequence
ctgcttgtagagcggcccctttag

SEQ ID NO: 28271 - DNA, 24 bp, Artificial sequence
  SiRNA target sequence
tgcttgtagagcggcccctttagc

SEQ ID NO: 28272 - DNA, 24 bp, Artificial sequence
  SiRNA target sequence
gcttgtagagcggcccctttagca

SEQ ID NO: 28273 - DNA, 24 bp, Artificial sequence
  SiRNA target sequence
cttgtagagcggcccctttagcaa

SEQ ID NO: 28274 - DNA, 24 bp, Artificial sequence
  SiRNA target sequence
ttgtagagcggcccctttagcaac

SEQ ID NO: 28275 - DNA, 24 bp, Artificial sequence
  SiRNA target sequence
tgtagagcggcccctttagcaaca

SEQ ID NO: 28276 - DNA, 24 bp, Artificial sequence
  SiRNA target sequence
gtagagcggcccctttagcaacag

SEQ ID NO: 28277 - DNA, 24 bp, Artificial sequence
  SiRNA target sequence
tagagcggcccctttagcaacagc

SEQ ID NO: 28278 - DNA, 24 bp, Artificial sequence
  SiRNA target sequence
agagcggcccctttagcaacagct

SEQ ID NO: 28279 - DNA, 24 bp, Artificial sequence
  SiRNA target sequence
gagcggcccctttagcaacagctt

SEQ ID NO: 28280 - DNA, 24 bp, Artificial sequence
  SiRNA target sequence
agcggcccctttagcaacagcttc

SEQ ID NO: 28281 - DNA, 24 bp, Artificial sequence
  SiRNA target sequence
gcggcccctttagcaacagcttca

SEQ ID NO: 28282 - DNA, 24 bp, Artificial sequence
  SiRNA target sequence
cggcccctttagcaacagcttcat

SEQ ID NO: 28283 - DNA, 24 bp, Artificial sequence
  SiRNA target sequence
ggcccctttagcaacagcttcatc

SEQ ID NO: 28284 - DNA, 24 bp, Artificial sequence
  SiRNA target sequence
gcccctttagcaacagcttcatct

SEQ ID NO: 28285 - DNA, 24 bp, Artificial sequence
  SiRNA target sequence
cccctttagcaacagcttcatctg

SEQ ID NO: 28286 - DNA, 24 bp, Artificial sequence
  SiRNA target sequence
ccctttagcaacagcttcatctgg

SEQ ID NO: 28287 - DNA, 24 bp, Artificial sequence
  SiRNA target sequence
cctttagcaacagcttcatctgga

SEQ ID NO: 28288 - DNA, 24 bp, Artificial sequence
  SiRNA target sequence
ctttagcaacagcttcatctggat

SEQ ID NO: 28289 - DNA, 24 bp, Artificial sequence
  SiRNA target sequence
tttagcaacagcttcatctggatt

SEQ ID NO: 28290 - DNA, 24 bp, Artificial sequence
  SiRNA target sequence
ttagcaacagcttcatctggatta

SEQ ID NO: 28291 - DNA, 24 bp, Artificial sequence
  SiRNA target sequence
tagcaacagcttcatctggattaa

SEQ ID NO: 28292 - DNA, 24 bp, Artificial sequence
  SiRNA target sequence
agcaacagcttcatctggattaat

SEQ ID NO: 28293 - DNA, 24 bp, Artificial sequence
  SiRNA target sequence
gcaacagcttcatctggattaata

SEQ ID NO: 28294 - DNA, 24 bp, Artificial sequence
  SiRNA target sequence
caacagcttcatctggattaatat

SEQ ID NO: 28295 - DNA, 24 bp, Artificial sequence
  SiRNA target sequence
aacagcttcatctggattaatatt

SEQ ID NO: 28296 - DNA, 24 bp, Artificial sequence
  SiRNA target sequence
acagcttcatctggattaatattt

SEQ ID NO: 28297 - DNA, 24 bp, Artificial sequence
  SiRNA target sequence
cagcttcatctggattaatatttg

SEQ ID NO: 28298 - DNA, 24 bp, Artificial sequence
  SiRNA target sequence
agcttcatctggattaatatttgt

SEQ ID NO: 28299 - DNA, 24 bp, Artificial sequence
  SiRNA target sequence
gcttcatctggattaatatttgta

SEQ ID NO: 28300 - DNA, 24 bp, Artificial sequence
  SiRNA target sequence
cttcatctggattaatatttgtag

SEQ ID NO: 28301 - DNA, 24 bp, Artificial sequence
  SiRNA target sequence
ttcatctggattaatatttgtaga

SEQ ID NO: 28302 - DNA, 24 bp, Artificial sequence
  SiRNA target sequence
tcatctggattaatatttgtagaa

SEQ ID NO: 28303 - DNA, 24 bp, Artificial sequence
  SiRNA target sequence
catctggattaatatttgtagaag

SEQ ID NO: 28304 - DNA, 24 bp, Artificial sequence
  SiRNA target sequence
atctggattaatatttgtagaagg

SEQ ID NO: 28305 - DNA, 24 bp, Artificial sequence
  SiRNA target sequence
tctggattaatatttgtagaaggc

SEQ ID NO: 28306 - DNA, 24 bp, Artificial sequence
  SiRNA target sequence
ctggattaatatttgtagaaggct

SEQ ID NO: 28307 - DNA, 24 bp, Artificial sequence
  SiRNA target sequence
tggattaatatttgtagaaggctc

SEQ ID NO: 28308 - DNA, 24 bp, Artificial sequence
  SiRNA target sequence
ggattaatatttgtagaaggctcg

SEQ ID NO: 28309 - DNA, 24 bp, Artificial sequence
  SiRNA target sequence
gattaatatttgtagaaggctcga

SEQ ID NO: 28310 - DNA, 24 bp, Artificial sequence
  SiRNA target sequence
attaatatttgtagaaggctcgat

SEQ ID NO: 28311 - DNA, 24 bp, Artificial sequence
  SiRNA target sequence
ttaatatttgtagaaggctcgata

SEQ ID NO: 28312 - DNA, 24 bp, Artificial sequence
  SiRNA target sequence
taatatttgtagaaggctcgatac

SEQ ID NO: 28313 - DNA, 24 bp, Artificial sequence
  SiRNA target sequence
aatatttgtagaaggctcgatacc

SEQ ID NO: 28314 - DNA, 24 bp, Artificial sequence
  SiRNA target sequence
atatttgtagaaggctcgatacca

SEQ ID NO: 28315 - DNA, 24 bp, Artificial sequence
  SiRNA target sequence
tatttgtagaaggctcgataccaa

SEQ ID NO: 28316 - DNA, 24 bp, Artificial sequence
  SiRNA target sequence
atttgtagaaggctcgataccaaa

SEQ ID NO: 28317 - DNA, 24 bp, Artificial sequence
  SiRNA target sequence
tttgtagaaggctcgataccaaaa

SEQ ID NO: 28318 - DNA, 24 bp, Artificial sequence
  SiRNA target sequence
ttgtagaaggctcgataccaaaaa

SEQ ID NO: 28319 - DNA, 24 bp, Artificial sequence
  SiRNA target sequence
tgtagaaggctcgataccaaaaat

SEQ ID NO: 28320 - DNA, 24 bp, Artificial sequence
  SiRNA target sequence
gtagaaggctcgataccaaaaatc

SEQ ID NO: 28321 - DNA, 24 bp, Artificial sequence
  SiRNA target sequence
tagaaggctcgataccaaaaatct

SEQ ID NO: 28322 - DNA, 24 bp, Artificial sequence
  SiRNA target sequence
agaaggctcgataccaaaaatctt

SEQ ID NO: 28323 - DNA, 24 bp, Artificial sequence
  SiRNA target sequence
gaaggctcgataccaaaaatcttc

SEQ ID NO: 28324 - DNA, 24 bp, Artificial sequence
  SiRNA target sequence
aaggctcgataccaaaaatcttct

SEQ ID NO: 28325 - DNA, 24 bp, Artificial sequence
  SiRNA target sequence
aggctcgataccaaaaatcttctt

SEQ ID NO: 28326 - DNA, 24 bp, Artificial sequence
  SiRNA target sequence
ggctcgataccaaaaatcttctta

SEQ ID NO: 28327 - DNA, 24 bp, Artificial sequence
  SiRNA target sequence
gctcgataccaaaaatcttcttaa

SEQ ID NO: 28328 - DNA, 24 bp, Artificial sequence
  SiRNA target sequence
ctcgataccaaaaatcttcttaac

SEQ ID NO: 28329 - DNA, 24 bp, Artificial sequence
  SiRNA target sequence
tcgataccaaaaatcttcttaaca

SEQ ID NO: 28330 - DNA, 24 bp, Artificial sequence
  SiRNA target sequence
cgataccaaaaatcttcttaacaa

SEQ ID NO: 28331 - DNA, 24 bp, Artificial sequence
  SiRNA target sequence
gataccaaaaatcttcttaacaag

SEQ ID NO: 28332 - DNA, 24 bp, Artificial sequence
  SiRNA target sequence
ataccaaaaatcttcttaacaagt

SEQ ID NO: 28333 - DNA, 24 bp, Artificial sequence
  SiRNA target sequence
taccaaaaatcttcttaacaagtt

SEQ ID NO: 28334 - DNA, 24 bp, Artificial sequence
  SiRNA target sequence
accaaaaatcttcttaacaagttt

SEQ ID NO: 28335 - DNA, 24 bp, Artificial sequence
  SiRNA target sequence
ccaaaaatcttcttaacaagtttt

SEQ ID NO: 28336 - DNA, 24 bp, Artificial sequence
  SiRNA target sequence
caaaaatcttcttaacaagttttc

SEQ ID NO: 28337 - DNA, 24 bp, Artificial sequence
  SiRNA target sequence
aaaaatcttcttaacaagttttct

SEQ ID NO: 28338 - DNA, 24 bp, Artificial sequence
  SiRNA target sequence
aaaatcttcttaacaagttttcta

SEQ ID NO: 28339 - DNA, 24 bp, Artificial sequence
  SiRNA target sequence
aaatcttcttaacaagttttctaa

SEQ ID NO: 28340 - DNA, 24 bp, Artificial sequence
  SiRNA target sequence
aatcttcttaacaagttttctaac

SEQ ID NO: 28341 - DNA, 24 bp, Artificial sequence
  SiRNA target sequence
atcttcttaacaagttttctaaca

SEQ ID NO: 28342 - DNA, 24 bp, Artificial sequence
  SiRNA target sequence
tcttcttaacaagttttctaacat

SEQ ID NO: 28343 - DNA, 24 bp, Artificial sequence
  SiRNA target sequence
cttcttaacaagttttctaacata

SEQ ID NO: 28344 - DNA, 24 bp, Artificial sequence
  SiRNA target sequence
ttcttaacaagttttctaacatac

SEQ ID NO: 28345 - DNA, 24 bp, Artificial sequence
  SiRNA target sequence
tcttaacaagttttctaacatacg

SEQ ID NO: 28346 - DNA, 24 bp, Artificial sequence
  SiRNA target sequence
cttaacaagttttctaacatacgg

SEQ ID NO: 28347 - DNA, 24 bp, Artificial sequence
  SiRNA target sequence
ttaacaagttttctaacatacggc

SEQ ID NO: 28348 - DNA, 24 bp, Artificial sequence
  SiRNA target sequence
taacaagttttctaacatacggca

SEQ ID NO: 28349 - DNA, 24 bp, Artificial sequence
  SiRNA target sequence
aacaagttttctaacatacggcat

SEQ ID NO: 28350 - DNA, 24 bp, Artificial sequence
  SiRNA target sequence
acaagttttctaacatacggcatt

SEQ ID NO: 28351 - DNA, 24 bp, Artificial sequence
  SiRNA target sequence
caagttttctaacatacggcattc

SEQ ID NO: 28352 - DNA, 24 bp, Artificial sequence
  SiRNA target sequence
aagttttctaacatacggcattcg

SEQ ID NO: 28353 - DNA, 24 bp, Artificial sequence
  SiRNA target sequence
agttttctaacatacggcattcgt

SEQ ID NO: 28354 - DNA, 24 bp, Artificial sequence
  SiRNA target sequence
gttttctaacatacggcattcgtg

SEQ ID NO: 28355 - DNA, 24 bp, Artificial sequence
  SiRNA target sequence
ttttctaacatacggcattcgtgt

SEQ ID NO: 28356 - DNA, 24 bp, Artificial sequence
  SiRNA target sequence
tttctaacatacggcattcgtgtc

SEQ ID NO: 28357 - DNA, 24 bp, Artificial sequence
  SiRNA target sequence
ttctaacatacggcattcgtgtca

SEQ ID NO: 28358 - DNA, 24 bp, Artificial sequence
  SiRNA target sequence
tctaacatacggcattcgtgtcat

SEQ ID NO: 28359 - DNA, 24 bp, Artificial sequence
  SiRNA target sequence
ctaacatacggcattcgtgtcatt

SEQ ID NO: 28360 - DNA, 24 bp, Artificial sequence
  SiRNA target sequence
taacatacggcattcgtgtcattc

SEQ ID NO: 28361 - DNA, 24 bp, Artificial sequence
  SiRNA target sequence
aacatacggcattcgtgtcattcc

SEQ ID NO: 28362 - DNA, 24 bp, Artificial sequence
  SiRNA target sequence
acatacggcattcgtgtcattcca

SEQ ID NO: 28363 - DNA, 24 bp, Artificial sequence
  SiRNA target sequence
catacggcattcgtgtcattccac

SEQ ID NO: 28364 - DNA, 24 bp, Artificial sequence
  SiRNA target sequence
atacggcattcgtgtcattccacc

SEQ ID NO: 28365 - DNA, 24 bp, Artificial sequence
  SiRNA target sequence
tacggcattcgtgtcattccaccc

SEQ ID NO: 28366 - DNA, 24 bp, Artificial sequence
  SiRNA target sequence
acggcattcgtgtcattccaccca

SEQ ID NO: 28367 - DNA, 24 bp, Artificial sequence
  SiRNA target sequence
cggcattcgtgtcattccacccac

SEQ ID NO: 28368 - DNA, 24 bp, Artificial sequence
  SiRNA target sequence
ggcattcgtgtcattccacccaca

SEQ ID NO: 28369 - DNA, 24 bp, Artificial sequence
  SiRNA target sequence
gcattcgtgtcattccacccacaa

SEQ ID NO: 28370 - DNA, 24 bp, Artificial sequence
  SiRNA target sequence
cattcgtgtcattccacccacaag

SEQ ID NO: 28371 - DNA, 24 bp, Artificial sequence
  SiRNA target sequence
attcgtgtcattccacccacaagt

SEQ ID NO: 28372 - DNA, 24 bp, Artificial sequence
  SiRNA target sequence
ttcgtgtcattccacccacaagta

SEQ ID NO: 28373 - DNA, 24 bp, Artificial sequence
  SiRNA target sequence
tcgtgtcattccacccacaagtat

SEQ ID NO: 28374 - DNA, 24 bp, Artificial sequence
  SiRNA target sequence
cgtgtcattccacccacaagtata

SEQ ID NO: 28375 - DNA, 24 bp, Artificial sequence
  SiRNA target sequence
gtgtcattccacccacaagtataa

SEQ ID NO: 28376 - DNA, 24 bp, Artificial sequence
  SiRNA target sequence
tgtcattccacccacaagtataac

SEQ ID NO: 28377 - DNA, 24 bp, Artificial sequence
  SiRNA target sequence
gtcattccacccacaagtataacg

SEQ ID NO: 28378 - DNA, 24 bp, Artificial sequence
  SiRNA target sequence
tcattccacccacaagtataacgt

SEQ ID NO: 28379 - DNA, 24 bp, Artificial sequence
  SiRNA target sequence
cattccacccacaagtataacgtg

SEQ ID NO: 28380 - DNA, 24 bp, Artificial sequence
  SiRNA target sequence
attccacccacaagtataacgtgt

SEQ ID NO: 28381 - DNA, 24 bp, Artificial sequence
  SiRNA target sequence
ttccacccacaagtataacgtgtt

SEQ ID NO: 28382 - DNA, 24 bp, Artificial sequence
  SiRNA target sequence
tccacccacaagtataacgtgttt

SEQ ID NO: 28383 - DNA, 24 bp, Artificial sequence
  SiRNA target sequence
ccacccacaagtataacgtgttta

SEQ ID NO: 28384 - DNA, 24 bp, Artificial sequence
  SiRNA target sequence
cacccacaagtataacgtgtttaa

SEQ ID NO: 28385 - DNA, 24 bp, Artificial sequence
  SiRNA target sequence
acccacaagtataacgtgtttaat

SEQ ID NO: 28386 - DNA, 24 bp, Artificial sequence
  SiRNA target sequence
cccacaagtataacgtgtttaata

SEQ ID NO: 28387 - DNA, 24 bp, Artificial sequence
  SiRNA target sequence
ccacaagtataacgtgtttaatat

SEQ ID NO: 28388 - DNA, 24 bp, Artificial sequence
  SiRNA target sequence
cacaagtataacgtgtttaatatc

SEQ ID NO: 28389 - DNA, 24 bp, Artificial sequence
  SiRNA target sequence
acaagtataacgtgtttaatatca

SEQ ID NO: 28390 - DNA, 24 bp, Artificial sequence
  SiRNA target sequence
caagtataacgtgtttaatatcac

SEQ ID NO: 28391 - DNA, 24 bp, Artificial sequence
  SiRNA target sequence
aagtataacgtgtttaatatcact

SEQ ID NO: 28392 - DNA, 24 bp, Artificial sequence
  SiRNA target sequence
agtataacgtgtttaatatcactt

SEQ ID NO: 28393 - DNA, 24 bp, Artificial sequence
  SiRNA target sequence
gtataacgtgtttaatatcacttt

SEQ ID NO: 28394 - DNA, 24 bp, Artificial sequence
  SiRNA target sequence
tataacgtgtttaatatcactttt

SEQ ID NO: 28395 - DNA, 24 bp, Artificial sequence
  SiRNA target sequence
ataacgtgtttaatatcactttta

SEQ ID NO: 28396 - DNA, 24 bp, Artificial sequence
  SiRNA target sequence
taacgtgtttaatatcacttttag

SEQ ID NO: 28397 - DNA, 24 bp, Artificial sequence
  SiRNA target sequence
aacgtgtttaatatcacttttagt

SEQ ID NO: 28398 - DNA, 24 bp, Artificial sequence
  SiRNA target sequence
acgtgtttaatatcacttttagtt

SEQ ID NO: 28399 - DNA, 24 bp, Artificial sequence
  SiRNA target sequence
cgtgtttaatatcacttttagtta

SEQ ID NO: 28400 - DNA, 24 bp, Artificial sequence
  SiRNA target sequence
gtgtttaatatcacttttagttat

SEQ ID NO: 28401 - DNA, 24 bp, Artificial sequence
  SiRNA target sequence
tgtttaatatcacttttagttata

SEQ ID NO: 28402 - DNA, 24 bp, Artificial sequence
  SiRNA target sequence
gtttaatatcacttttagttatat

SEQ ID NO: 28403 - DNA, 24 bp, Artificial sequence
  SiRNA target sequence
tttaatatcacttttagttatatt

SEQ ID NO: 28404 - DNA, 24 bp, Artificial sequence
  SiRNA target sequence
ttaatatcacttttagttatattg

SEQ ID NO: 28405 - DNA, 24 bp, Artificial sequence
  SiRNA target sequence
taatatcacttttagttatattgg

SEQ ID NO: 28406 - DNA, 24 bp, Artificial sequence
  SiRNA target sequence
aatatcacttttagttatattggc

SEQ ID NO: 28407 - DNA, 24 bp, Artificial sequence
  SiRNA target sequence
atatcacttttagttatattggca

SEQ ID NO: 28408 - DNA, 24 bp, Artificial sequence
  SiRNA target sequence
tatcacttttagttatattggcat

SEQ ID NO: 28409 - DNA, 24 bp, Artificial sequence
  SiRNA target sequence
atcacttttagttatattggcatc

SEQ ID NO: 28410 - DNA, 24 bp, Artificial sequence
  SiRNA target sequence
tcacttttagttatattggcatct

SEQ ID NO: 28411 - DNA, 24 bp, Artificial sequence
  SiRNA target sequence
cacttttagttatattggcatctc

SEQ ID NO: 28412 - DNA, 24 bp, Artificial sequence
  SiRNA target sequence
acttttagttatattggcatctct

SEQ ID NO: 28413 - DNA, 24 bp, Artificial sequence
  SiRNA target sequence
cttttagttatattggcatctcta

SEQ ID NO: 28414 - DNA, 24 bp, Artificial sequence
  SiRNA target sequence
ttttagttatattggcatctctaa

SEQ ID NO: 28415 - DNA, 24 bp, Artificial sequence
  SiRNA target sequence
tttagttatattggcatctctaat

SEQ ID NO: 28416 - DNA, 24 bp, Artificial sequence
  SiRNA target sequence
ttagttatattggcatctctaata

SEQ ID NO: 28417 - DNA, 24 bp, Artificial sequence
  SiRNA target sequence
tagttatattggcatctctaatag

SEQ ID NO: 28418 - DNA, 24 bp, Artificial sequence
  SiRNA target sequence
agttatattggcatctctaatagc

SEQ ID NO: 28419 - DNA, 24 bp, Artificial sequence
  SiRNA target sequence
gttatattggcatctctaatagct

SEQ ID NO: 28420 - DNA, 24 bp, Artificial sequence
  SiRNA target sequence
ttatattggcatctctaatagctt

SEQ ID NO: 28421 - DNA, 24 bp, Artificial sequence
  SiRNA target sequence
tatattggcatctctaatagcttt

SEQ ID NO: 28422 - DNA, 24 bp, Artificial sequence
  SiRNA target sequence
atattggcatctctaatagcttta

SEQ ID NO: 28423 - DNA, 24 bp, Artificial sequence
  SiRNA target sequence
tattggcatctctaatagctttaa

SEQ ID NO: 28424 - DNA, 24 bp, Artificial sequence
  SiRNA target sequence
attggcatctctaatagctttaag

SEQ ID NO: 28425 - DNA, 24 bp, Artificial sequence
  SiRNA target sequence
ttggcatctctaatagctttaaga

SEQ ID NO: 28426 - DNA, 24 bp, Artificial sequence
  SiRNA target sequence
tggcatctctaatagctttaagac

SEQ ID NO: 28427 - DNA, 24 bp, Artificial sequence
  SiRNA target sequence
ggcatctctaatagctttaagaca

SEQ ID NO: 28428 - DNA, 24 bp, Artificial sequence
  SiRNA target sequence
gcatctctaatagctttaagacag

SEQ ID NO: 28429 - DNA, 24 bp, Artificial sequence
  SiRNA target sequence
catctctaatagctttaagacagg

SEQ ID NO: 28430 - DNA, 24 bp, Artificial sequence
  SiRNA target sequence
atctctaatagctttaagacaggg

SEQ ID NO: 28431 - DNA, 24 bp, Artificial sequence
  SiRNA target sequence
tctctaatagctttaagacagggg

SEQ ID NO: 28432 - DNA, 24 bp, Artificial sequence
  SiRNA target sequence
ctctaatagctttaagacaggggt

SEQ ID NO: 28433 - DNA, 24 bp, Artificial sequence
  SiRNA target sequence
tctaatagctttaagacaggggtt

SEQ ID NO: 28434 - DNA, 24 bp, Artificial sequence
  SiRNA target sequence
ctaatagctttaagacaggggttt

SEQ ID NO: 28435 - DNA, 24 bp, Artificial sequence
  SiRNA target sequence
taatagctttaagacaggggttta

SEQ ID NO: 28436 - DNA, 24 bp, Artificial sequence
  SiRNA target sequence
aatagctttaagacaggggtttat

SEQ ID NO: 28437 - DNA, 24 bp, Artificial sequence
  SiRNA target sequence
atagctttaagacaggggtttatt

SEQ ID NO: 28438 - DNA, 24 bp, Artificial sequence
  SiRNA target sequence
tagctttaagacaggggtttattg

SEQ ID NO: 28439 - DNA, 24 bp, Artificial sequence
  SiRNA target sequence
agctttaagacaggggtttattgt

SEQ ID NO: 28440 - DNA, 24 bp, Artificial sequence
  SiRNA target sequence
gctttaagacaggggtttattgtt

SEQ ID NO: 28441 - DNA, 24 bp, Artificial sequence
  SiRNA target sequence
ctttaagacaggggtttattgttt

SEQ ID NO: 28442 - DNA, 24 bp, Artificial sequence
  SiRNA target sequence
tttaagacaggggtttattgtttt

SEQ ID NO: 28443 - DNA, 24 bp, Artificial sequence
  SiRNA target sequence
ttaagacaggggtttattgttttg

SEQ ID NO: 28444 - DNA, 24 bp, Artificial sequence
  SiRNA target sequence
taagacaggggtttattgttttgt

SEQ ID NO: 28445 - DNA, 24 bp, Artificial sequence
  SiRNA target sequence
aagacaggggtttattgttttgtc

SEQ ID NO: 28446 - DNA, 24 bp, Artificial sequence
  SiRNA target sequence
agacaggggtttattgttttgtct

SEQ ID NO: 28447 - DNA, 24 bp, Artificial sequence
  SiRNA target sequence
gacaggggtttattgttttgtcta

SEQ ID NO: 28448 - DNA, 24 bp, Artificial sequence
  SiRNA target sequence
acaggggtttattgttttgtctat

SEQ ID NO: 28449 - DNA, 24 bp, Artificial sequence
  SiRNA target sequence
caggggtttattgttttgtctatt

SEQ ID NO: 28450 - DNA, 24 bp, Artificial sequence
  SiRNA target sequence
aggggtttattgttttgtctatta

SEQ ID NO: 28451 - DNA, 24 bp, Artificial sequence
  SiRNA target sequence
ggggtttattgttttgtctattaa

SEQ ID NO: 28452 - DNA, 24 bp, Artificial sequence
  SiRNA target sequence
gggtttattgttttgtctattaac

SEQ ID NO: 28453 - DNA, 24 bp, Artificial sequence
  SiRNA target sequence
ggtttattgttttgtctattaact

SEQ ID NO: 28454 - DNA, 24 bp, Artificial sequence
  SiRNA target sequence
gtttattgttttgtctattaactt

SEQ ID NO: 28455 - DNA, 24 bp, Artificial sequence
  SiRNA target sequence
tttattgttttgtctattaacttt

SEQ ID NO: 28456 - DNA, 24 bp, Artificial sequence
  SiRNA target sequence
ttattgttttgtctattaactttt

SEQ ID NO: 28457 - DNA, 24 bp, Artificial sequence
  SiRNA target sequence
tattgttttgtctattaacttttt

SEQ ID NO: 28458 - DNA, 24 bp, Artificial sequence
  SiRNA target sequence
attgttttgtctattaactttttt

SEQ ID NO: 28459 - DNA, 24 bp, Artificial sequence
  SiRNA target sequence
ttgttttgtctattaacttttttg

SEQ ID NO: 28460 - DNA, 24 bp, Artificial sequence
  SiRNA target sequence
tgttttgtctattaacttttttgt

SEQ ID NO: 28461 - DNA, 24 bp, Artificial sequence
  SiRNA target sequence
gttttgtctattaacttttttgta

SEQ ID NO: 28462 - DNA, 24 bp, Artificial sequence
  SiRNA target sequence
ttttgtctattaacttttttgtaa

SEQ ID NO: 28463 - DNA, 24 bp, Artificial sequence
  SiRNA target sequence
tttgtctattaacttttttgtaat

SEQ ID NO: 28464 - DNA, 24 bp, Artificial sequence
  SiRNA target sequence
ttgtctattaacttttttgtaatt

SEQ ID NO: 28465 - DNA, 24 bp, Artificial sequence
  SiRNA target sequence
tgtctattaacttttttgtaattt

SEQ ID NO: 28466 - DNA, 24 bp, Artificial sequence
  SiRNA target sequence
gtctattaacttttttgtaatttt

SEQ ID NO: 28467 - DNA, 24 bp, Artificial sequence
  SiRNA target sequence
tctattaacttttttgtaattttt

SEQ ID NO: 28468 - DNA, 24 bp, Artificial sequence
  SiRNA target sequence
ctattaacttttttgtaatttttt

SEQ ID NO: 28469 - DNA, 24 bp, Artificial sequence
  SiRNA target sequence
tattaacttttttgtaattttttc

SEQ ID NO: 28470 - DNA, 24 bp, Artificial sequence
  SiRNA target sequence
attaacttttttgtaattttttca

SEQ ID NO: 28471 - DNA, 24 bp, Artificial sequence
  SiRNA target sequence
ttaacttttttgtaattttttcaa

SEQ ID NO: 28472 - DNA, 24 bp, Artificial sequence
  SiRNA target sequence
taacttttttgtaattttttcaaa

SEQ ID NO: 28473 - DNA, 24 bp, Artificial sequence
  SiRNA target sequence
aacttttttgtaattttttcaaat

SEQ ID NO: 28474 - DNA, 24 bp, Artificial sequence
  SiRNA target sequence
acttttttgtaattttttcaaatt

SEQ ID NO: 28475 - DNA, 24 bp, Artificial sequence
  SiRNA target sequence
cttttttgtaattttttcaaattc

SEQ ID NO: 28476 - DNA, 24 bp, Artificial sequence
  SiRNA target sequence
ttttttgtaattttttcaaattcg

SEQ ID NO: 28477 - DNA, 24 bp, Artificial sequence
  SiRNA target sequence
tttttgtaattttttcaaattcgt

SEQ ID NO: 28478 - DNA, 24 bp, Artificial sequence
  SiRNA target sequence
ttttgtaattttttcaaattcgtc

SEQ ID NO: 28479 - DNA, 24 bp, Artificial sequence
  SiRNA target sequence
tttgtaattttttcaaattcgtcg

SEQ ID NO: 28480 - DNA, 24 bp, Artificial sequence
  SiRNA target sequence
ttgtaattttttcaaattcgtcgc

SEQ ID NO: 28481 - DNA, 24 bp, Artificial sequence
  SiRNA target sequence
tgtaattttttcaaattcgtcgcg

SEQ ID NO: 28482 - DNA, 24 bp, Artificial sequence
  SiRNA target sequence
gtaattttttcaaattcgtcgcgt

SEQ ID NO: 28483 - DNA, 24 bp, Artificial sequence
  SiRNA target sequence
taattttttcaaattcgtcgcgtg

SEQ ID NO: 28484 - DNA, 24 bp, Artificial sequence
  SiRNA target sequence
aattttttcaaattcgtcgcgtgt

SEQ ID NO: 28485 - DNA, 24 bp, Artificial sequence
  SiRNA target sequence
attttttcaaattcgtcgcgtgta

SEQ ID NO: 28486 - DNA, 24 bp, Artificial sequence
  SiRNA target sequence
ttttttcaaattcgtcgcgtgtaa

SEQ ID NO: 28487 - DNA, 24 bp, Artificial sequence
  SiRNA target sequence
tttttcaaattcgtcgcgtgtaat

SEQ ID NO: 28488 - DNA, 24 bp, Artificial sequence
  SiRNA target sequence
ttttcaaattcgtcgcgtgtaatt

SEQ ID NO: 28489 - DNA, 24 bp, Artificial sequence
  SiRNA target sequence
tttcaaattcgtcgcgtgtaatta

SEQ ID NO: 28490 - DNA, 24 bp, Artificial sequence
  SiRNA target sequence
ttcaaattcgtcgcgtgtaattac

SEQ ID NO: 28491 - DNA, 24 bp, Artificial sequence
  SiRNA target sequence
tcaaattcgtcgcgtgtaattacc

SEQ ID NO: 28492 - DNA, 24 bp, Artificial sequence
  SiRNA target sequence
caaattcgtcgcgtgtaattacct

SEQ ID NO: 28493 - DNA, 24 bp, Artificial sequence
  SiRNA target sequence
aaattcgtcgcgtgtaattacctc

SEQ ID NO: 28494 - DNA, 24 bp, Artificial sequence
  SiRNA target sequence
aattcgtcgcgtgtaattacctct

SEQ ID NO: 28495 - DNA, 24 bp, Artificial sequence
  SiRNA target sequence
attcgtcgcgtgtaattacctctt

SEQ ID NO: 28496 - DNA, 24 bp, Artificial sequence
  SiRNA target sequence
ttcgtcgcgtgtaattacctcttt

SEQ ID NO: 28497 - DNA, 24 bp, Artificial sequence
  SiRNA target sequence
tcgtcgcgtgtaattacctctttt

SEQ ID NO: 28498 - DNA, 24 bp, Artificial sequence
  SiRNA target sequence
cgtcgcgtgtaattacctctttta

SEQ ID NO: 28499 - DNA, 24 bp, Artificial sequence
  SiRNA target sequence
gtcgcgtgtaattacctcttttaa

SEQ ID NO: 28500 - DNA, 24 bp, Artificial sequence
  SiRNA target sequence
tcgcgtgtaattacctcttttaag

SEQ ID NO: 28501 - DNA, 24 bp, Artificial sequence
  SiRNA target sequence
cgcgtgtaattacctcttttaagt

SEQ ID NO: 28502 - DNA, 24 bp, Artificial sequence
  SiRNA target sequence
gcgtgtaattacctcttttaagtg

SEQ ID NO: 28503 - DNA, 24 bp, Artificial sequence
  SiRNA target sequence
cgtgtaattacctcttttaagtga

SEQ ID NO: 28504 - DNA, 24 bp, Artificial sequence
  SiRNA target sequence
gtgtaattacctcttttaagtgat

SEQ ID NO: 28505 - DNA, 24 bp, Artificial sequence
  SiRNA target sequence
tgtaattacctcttttaagtgata

SEQ ID NO: 28506 - DNA, 24 bp, Artificial sequence
  SiRNA target sequence
gtaattacctcttttaagtgataa

SEQ ID NO: 28507 - DNA, 24 bp, Artificial sequence
  SiRNA target sequence
taattacctcttttaagtgataat

SEQ ID NO: 28508 - DNA, 24 bp, Artificial sequence
  SiRNA target sequence
aattacctcttttaagtgataatt

SEQ ID NO: 28509 - DNA, 24 bp, Artificial sequence
  SiRNA target sequence
attacctcttttaagtgataattc

SEQ ID NO: 28510 - DNA, 24 bp, Artificial sequence
  SiRNA target sequence
ttacctcttttaagtgataattct

SEQ ID NO: 28511 - DNA, 24 bp, Artificial sequence
  SiRNA target sequence
tacctcttttaagtgataattctt

SEQ ID NO: 28512 - DNA, 24 bp, Artificial sequence
  SiRNA target sequence
acctcttttaagtgataattcttt

SEQ ID NO: 28513 - DNA, 24 bp, Artificial sequence
  SiRNA target sequence
cctcttttaagtgataattctttt

SEQ ID NO: 28514 - DNA, 24 bp, Artificial sequence
  SiRNA target sequence
ctcttttaagtgataattcttttt

SEQ ID NO: 28515 - DNA, 24 bp, Artificial sequence
  SiRNA target sequence
tcttttaagtgataattcttttta

SEQ ID NO: 28516 - DNA, 24 bp, Artificial sequence
  SiRNA target sequence
cttttaagtgataattctttttac

SEQ ID NO: 28517 - DNA, 24 bp, Artificial sequence
  SiRNA target sequence
ttttaagtgataattctttttact

SEQ ID NO: 28518 - DNA, 24 bp, Artificial sequence
  SiRNA target sequence
tttaagtgataattctttttacta

SEQ ID NO: 28519 - DNA, 24 bp, Artificial sequence
  SiRNA target sequence
ttaagtgataattctttttactat

SEQ ID NO: 28520 - DNA, 24 bp, Artificial sequence
  SiRNA target sequence
taagtgataattctttttactatc

SEQ ID NO: 28521 - DNA, 24 bp, Artificial sequence
  SiRNA target sequence
aagtgataattctttttactatcg

SEQ ID NO: 28522 - DNA, 24 bp, Artificial sequence
  SiRNA target sequence
agtgataattctttttactatcgt

SEQ ID NO: 28523 - DNA, 24 bp, Artificial sequence
  SiRNA target sequence
gtgataattctttttactatcgtt

SEQ ID NO: 28524 - DNA, 24 bp, Artificial sequence
  SiRNA target sequence
tgataattctttttactatcgtta

SEQ ID NO: 28525 - DNA, 24 bp, Artificial sequence
  SiRNA target sequence
gataattctttttactatcgttat

SEQ ID NO: 28526 - DNA, 24 bp, Artificial sequence
  SiRNA target sequence
ataattctttttactatcgttata

SEQ ID NO: 28527 - DNA, 24 bp, Artificial sequence
  SiRNA target sequence
taattctttttactatcgttataa

SEQ ID NO: 28528 - DNA, 24 bp, Artificial sequence
  SiRNA target sequence
aattctttttactatcgttataaa

SEQ ID NO: 28529 - DNA, 24 bp, Artificial sequence
  SiRNA target sequence
attctttttactatcgttataaat

SEQ ID NO: 28530 - DNA, 24 bp, Artificial sequence
  SiRNA target sequence
ttctttttactatcgttataaata

SEQ ID NO: 28531 - DNA, 24 bp, Artificial sequence
  SiRNA target sequence
tctttttactatcgttataaatat

SEQ ID NO: 28532 - DNA, 24 bp, Artificial sequence
  SiRNA target sequence
ctttttactatcgttataaatata

SEQ ID NO: 28533 - DNA, 24 bp, Artificial sequence
  SiRNA target sequence
tttttactatcgttataaatatac

SEQ ID NO: 28534 - DNA, 24 bp, Artificial sequence
  SiRNA target sequence
ttttactatcgttataaatatacg

SEQ ID NO: 28535 - DNA, 24 bp, Artificial sequence
  SiRNA target sequence
tttactatcgttataaatatacgg

SEQ ID NO: 28536 - DNA, 24 bp, Artificial sequence
  SiRNA target sequence
ttactatcgttataaatatacgga

SEQ ID NO: 28537 - DNA, 24 bp, Artificial sequence
  SiRNA target sequence
tactatcgttataaatatacggaa

SEQ ID NO: 28538 - DNA, 24 bp, Artificial sequence
  SiRNA target sequence
actatcgttataaatatacggaat

SEQ ID NO: 28539 - DNA, 24 bp, Artificial sequence
  SiRNA target sequence
ctatcgttataaatatacggaata

SEQ ID NO: 28540 - DNA, 24 bp, Artificial sequence
  SiRNA target sequence
tatcgttataaatatacggaatat

SEQ ID NO: 28541 - DNA, 24 bp, Artificial sequence
  SiRNA target sequence
atcgttataaatatacggaatatt

SEQ ID NO: 28542 - DNA, 24 bp, Artificial sequence
  SiRNA target sequence
tcgttataaatatacggaatatta

SEQ ID NO: 28543 - DNA, 24 bp, Artificial sequence
  SiRNA target sequence
cgttataaatatacggaatattaa

SEQ ID NO: 28544 - DNA, 24 bp, Artificial sequence
  SiRNA target sequence
gttataaatatacggaatattaat

SEQ ID NO: 28545 - DNA, 24 bp, Artificial sequence
  SiRNA target sequence
ttataaatatacggaatattaatt

SEQ ID NO: 28546 - DNA, 24 bp, Artificial sequence
  SiRNA target sequence
tataaatatacggaatattaattt

SEQ ID NO: 28547 - DNA, 24 bp, Artificial sequence
  SiRNA target sequence
ataaatatacggaatattaatttc

SEQ ID NO: 28548 - DNA, 24 bp, Artificial sequence
  SiRNA target sequence
taaatatacggaatattaatttca

SEQ ID NO: 28549 - DNA, 24 bp, Artificial sequence
  SiRNA target sequence
aaatatacggaatattaatttcag

SEQ ID NO: 28550 - DNA, 24 bp, Artificial sequence
  SiRNA target sequence
aatatacggaatattaatttcaga

SEQ ID NO: 28551 - DNA, 24 bp, Artificial sequence
  SiRNA target sequence
atatacggaatattaatttcagac

SEQ ID NO: 28552 - DNA, 24 bp, Artificial sequence
  SiRNA target sequence
tatacggaatattaatttcagacg

SEQ ID NO: 28553 - DNA, 24 bp, Artificial sequence
  SiRNA target sequence
atacggaatattaatttcagacga

SEQ ID NO: 28554 - DNA, 24 bp, Artificial sequence
  SiRNA target sequence
tacggaatattaatttcagacgaa

SEQ ID NO: 28555 - DNA, 24 bp, Artificial sequence
  SiRNA target sequence
acggaatattaatttcagacgaaa

SEQ ID NO: 28556 - DNA, 24 bp, Artificial sequence
  SiRNA target sequence
cggaatattaatttcagacgaaag

SEQ ID NO: 28557 - DNA, 24 bp, Artificial sequence
  SiRNA target sequence
ggaatattaatttcagacgaaaga

SEQ ID NO: 28558 - DNA, 24 bp, Artificial sequence
  SiRNA target sequence
gaatattaatttcagacgaaagat

SEQ ID NO: 28559 - DNA, 24 bp, Artificial sequence
  SiRNA target sequence
aatattaatttcagacgaaagatt

SEQ ID NO: 28560 - DNA, 24 bp, Artificial sequence
  SiRNA target sequence
atattaatttcagacgaaagatta

SEQ ID NO: 28561 - DNA, 24 bp, Artificial sequence
  SiRNA target sequence
tattaatttcagacgaaagattag

SEQ ID NO: 28562 - DNA, 24 bp, Artificial sequence
  SiRNA target sequence
attaatttcagacgaaagattaga

SEQ ID NO: 28563 - DNA, 24 bp, Artificial sequence
  SiRNA target sequence
ttaatttcagacgaaagattagac

SEQ ID NO: 28564 - DNA, 24 bp, Artificial sequence
  SiRNA target sequence
taatttcagacgaaagattagacg

SEQ ID NO: 28565 - DNA, 24 bp, Artificial sequence
  SiRNA target sequence
aatttcagacgaaagattagacga

SEQ ID NO: 28566 - DNA, 24 bp, Artificial sequence
  SiRNA target sequence
atttcagacgaaagattagacgac

SEQ ID NO: 28567 - DNA, 24 bp, Artificial sequence
  SiRNA target sequence
tttcagacgaaagattagacgaca

SEQ ID NO: 28568 - DNA, 24 bp, Artificial sequence
  SiRNA target sequence
ttcagacgaaagattagacgacag

SEQ ID NO: 28569 - DNA, 24 bp, Artificial sequence
  SiRNA target sequence
tcagacgaaagattagacgacagt

SEQ ID NO: 28570 - DNA, 24 bp, Artificial sequence
  SiRNA target sequence
cagacgaaagattagacgacagtt

SEQ ID NO: 28571 - DNA, 24 bp, Artificial sequence
  SiRNA target sequence
agacgaaagattagacgacagttc

SEQ ID NO: 28572 - DNA, 24 bp, Artificial sequence
  SiRNA target sequence
gacgaaagattagacgacagttct

SEQ ID NO: 28573 - DNA, 24 bp, Artificial sequence
  SiRNA target sequence
acgaaagattagacgacagttctt

SEQ ID NO: 28574 - DNA, 24 bp, Artificial sequence
  SiRNA target sequence
cgaaagattagacgacagttcttt

SEQ ID NO: 28575 - DNA, 24 bp, Artificial sequence
  SiRNA target sequence
gaaagattagacgacagttctttt

SEQ ID NO: 28576 - DNA, 24 bp, Artificial sequence
  SiRNA target sequence
aaagattagacgacagttcttttt

SEQ ID NO: 28577 - DNA, 24 bp, Artificial sequence
  SiRNA target sequence
aagattagacgacagttctttttt

SEQ ID NO: 28578 - DNA, 24 bp, Artificial sequence
  SiRNA target sequence
agattagacgacagttcttttttc

SEQ ID NO: 28579 - DNA, 24 bp, Artificial sequence
  SiRNA target sequence
gattagacgacagttcttttttca

SEQ ID NO: 28580 - DNA, 24 bp, Artificial sequence
  SiRNA target sequence
attagacgacagttcttttttcat

SEQ ID NO: 28581 - DNA, 24 bp, Artificial sequence
  SiRNA target sequence
ttagacgacagttcttttttcatt

SEQ ID NO: 28582 - DNA, 24 bp, Artificial sequence
  SiRNA target sequence
tagacgacagttcttttttcattt

SEQ ID NO: 28583 - DNA, 24 bp, Artificial sequence
  SiRNA target sequence
agacgacagttcttttttcatttt

SEQ ID NO: 28584 - DNA, 24 bp, Artificial sequence
  SiRNA target sequence
gacgacagttcttttttcattttt

SEQ ID NO: 28585 - DNA, 24 bp, Artificial sequence
  SiRNA target sequence
acgacagttcttttttcatttttt

SEQ ID NO: 28586 - DNA, 24 bp, Artificial sequence
  SiRNA target sequence
cgacagttcttttttcattttttc

SEQ ID NO: 28587 - DNA, 24 bp, Artificial sequence
  SiRNA target sequence
gacagttcttttttcattttttcc

SEQ ID NO: 28588 - DNA, 24 bp, Artificial sequence
  SiRNA target sequence
acagttcttttttcattttttccg

SEQ ID NO: 28589 - DNA, 24 bp, Artificial sequence
  SiRNA target sequence
cagttcttttttcattttttccgc

SEQ ID NO: 28590 - DNA, 24 bp, Artificial sequence
  SiRNA target sequence
agttcttttttcattttttccgct

SEQ ID NO: 28591 - DNA, 24 bp, Artificial sequence
  SiRNA target sequence
gttcttttttcattttttccgctg

SEQ ID NO: 28592 - DNA, 24 bp, Artificial sequence
  SiRNA target sequence
ttcttttttcattttttccgctgc

SEQ ID NO: 28593 - DNA, 24 bp, Artificial sequence
  SiRNA target sequence
tcttttttcattttttccgctgct

SEQ ID NO: 28594 - DNA, 24 bp, Artificial sequence
  SiRNA target sequence
cttttttcattttttccgctgctt

SEQ ID NO: 28595 - DNA, 24 bp, Artificial sequence
  SiRNA target sequence
ttttttcattttttccgctgcttc

SEQ ID NO: 28596 - DNA, 24 bp, Artificial sequence
  SiRNA target sequence
tttttcattttttccgctgcttct

SEQ ID NO: 28597 - DNA, 24 bp, Artificial sequence
  SiRNA target sequence
ttttcattttttccgctgcttctt

SEQ ID NO: 28598 - DNA, 24 bp, Artificial sequence
  SiRNA target sequence
tttcattttttccgctgcttcttt

SEQ ID NO: 28599 - DNA, 24 bp, Artificial sequence
  SiRNA target sequence
ttcattttttccgctgcttcttta

SEQ ID NO: 28600 - DNA, 24 bp, Artificial sequence
  SiRNA target sequence
tcattttttccgctgcttctttaa

SEQ ID NO: 28601 - DNA, 24 bp, Artificial sequence
  SiRNA target sequence
cattttttccgctgcttctttaat

SEQ ID NO: 28602 - DNA, 24 bp, Artificial sequence
  SiRNA target sequence
attttttccgctgcttctttaatt

SEQ ID NO: 28603 - DNA, 24 bp, Artificial sequence
  SiRNA target sequence
ttttttccgctgcttctttaattc

SEQ ID NO: 28604 - DNA, 24 bp, Artificial sequence
  SiRNA target sequence
tttttccgctgcttctttaattct

SEQ ID NO: 28605 - DNA, 24 bp, Artificial sequence
  SiRNA target sequence
ttttccgctgcttctttaattcta

SEQ ID NO: 28606 - DNA, 24 bp, Artificial sequence
  SiRNA target sequence
tttccgctgcttctttaattctat

SEQ ID NO: 28607 - DNA, 24 bp, Artificial sequence
  SiRNA target sequence
ttccgctgcttctttaattctatt

SEQ ID NO: 28608 - DNA, 24 bp, Artificial sequence
  SiRNA target sequence
tccgctgcttctttaattctatta

SEQ ID NO: 28609 - DNA, 24 bp, Artificial sequence
  SiRNA target sequence
ccgctgcttctttaattctattat

SEQ ID NO: 28610 - DNA, 24 bp, Artificial sequence
  SiRNA target sequence
cgctgcttctttaattctattata

SEQ ID NO: 28611 - DNA, 24 bp, Artificial sequence
  SiRNA target sequence
gctgcttctttaattctattataa

SEQ ID NO: 28612 - DNA, 24 bp, Artificial sequence
  SiRNA target sequence
ctgcttctttaattctattataac

SEQ ID NO: 28613 - DNA, 24 bp, Artificial sequence
  SiRNA target sequence
tgcttctttaattctattataaca

SEQ ID NO: 28614 - DNA, 24 bp, Artificial sequence
  SiRNA target sequence
gcttctttaattctattataacaa

SEQ ID NO: 28615 - DNA, 24 bp, Artificial sequence
  SiRNA target sequence
cttctttaattctattataacaag

SEQ ID NO: 28616 - DNA, 24 bp, Artificial sequence
  SiRNA target sequence
ttctttaattctattataacaaga

SEQ ID NO: 28617 - DNA, 24 bp, Artificial sequence
  SiRNA target sequence
tctttaattctattataacaagaa

SEQ ID NO: 28618 - DNA, 24 bp, Artificial sequence
  SiRNA target sequence
ctttaattctattataacaagaat

SEQ ID NO: 28619 - DNA, 24 bp, Artificial sequence
  SiRNA target sequence
tttaattctattataacaagaatc

SEQ ID NO: 28620 - DNA, 24 bp, Artificial sequence
  SiRNA target sequence
ttaattctattataacaagaatcg

SEQ ID NO: 28621 - DNA, 24 bp, Artificial sequence
  SiRNA target sequence
taattctattataacaagaatcgt

SEQ ID NO: 28622 - DNA, 24 bp, Artificial sequence
  SiRNA target sequence
aattctattataacaagaatcgtg

SEQ ID NO: 28623 - DNA, 24 bp, Artificial sequence
  SiRNA target sequence
attctattataacaagaatcgtgt

SEQ ID NO: 28624 - DNA, 24 bp, Artificial sequence
  SiRNA target sequence
ttctattataacaagaatcgtgtt

SEQ ID NO: 28625 - DNA, 24 bp, Artificial sequence
  SiRNA target sequence
tctattataacaagaatcgtgttt

SEQ ID NO: 28626 - DNA, 24 bp, Artificial sequence
  SiRNA target sequence
ctattataacaagaatcgtgttta

SEQ ID NO: 28627 - DNA, 24 bp, Artificial sequence
  SiRNA target sequence
tattataacaagaatcgtgtttaa

SEQ ID NO: 28628 - DNA, 24 bp, Artificial sequence
  SiRNA target sequence
attataacaagaatcgtgtttaag

SEQ ID NO: 28629 - DNA, 24 bp, Artificial sequence
  SiRNA target sequence
ttataacaagaatcgtgtttaagt

SEQ ID NO: 28630 - DNA, 24 bp, Artificial sequence
  SiRNA target sequence
tataacaagaatcgtgtttaagta

SEQ ID NO: 28631 - DNA, 24 bp, Artificial sequence
  SiRNA target sequence
ataacaagaatcgtgtttaagtaa

SEQ ID NO: 28632 - DNA, 24 bp, Artificial sequence
  SiRNA target sequence
taacaagaatcgtgtttaagtaaa

SEQ ID NO: 28633 - DNA, 24 bp, Artificial sequence
  SiRNA target sequence
aacaagaatcgtgtttaagtaaat

SEQ ID NO: 28634 - DNA, 24 bp, Artificial sequence
  SiRNA target sequence
acaagaatcgtgtttaagtaaatc

SEQ ID NO: 28635 - DNA, 24 bp, Artificial sequence
  SiRNA target sequence
caagaatcgtgtttaagtaaatca

SEQ ID NO: 28636 - DNA, 24 bp, Artificial sequence
  SiRNA target sequence
aagaatcgtgtttaagtaaatcaa

SEQ ID NO: 28637 - DNA, 24 bp, Artificial sequence
  SiRNA target sequence
agaatcgtgtttaagtaaatcaat

SEQ ID NO: 28638 - DNA, 24 bp, Artificial sequence
  SiRNA target sequence
gaatcgtgtttaagtaaatcaatt

SEQ ID NO: 28639 - DNA, 24 bp, Artificial sequence
  SiRNA target sequence
aatcgtgtttaagtaaatcaattc

SEQ ID NO: 28640 - DNA, 24 bp, Artificial sequence
  SiRNA target sequence
atcgtgtttaagtaaatcaattcc

SEQ ID NO: 28641 - DNA, 24 bp, Artificial sequence
  SiRNA target sequence
tcgtgtttaagtaaatcaattcct

SEQ ID NO: 28642 - DNA, 24 bp, Artificial sequence
  SiRNA target sequence
cgtgtttaagtaaatcaattcctg

SEQ ID NO: 28643 - DNA, 24 bp, Artificial sequence
  SiRNA target sequence
gtgtttaagtaaatcaattcctgt

SEQ ID NO: 28644 - DNA, 24 bp, Artificial sequence
  SiRNA target sequence
tgtttaagtaaatcaattcctgtt

SEQ ID NO: 28645 - DNA, 24 bp, Artificial sequence
  SiRNA target sequence
gtttaagtaaatcaattcctgttc

SEQ ID NO: 28646 - DNA, 24 bp, Artificial sequence
  SiRNA target sequence
tttaagtaaatcaattcctgttct

SEQ ID NO: 28647 - DNA, 24 bp, Artificial sequence
  SiRNA target sequence
ttaagtaaatcaattcctgttcta

SEQ ID NO: 28648 - DNA, 24 bp, Artificial sequence
  SiRNA target sequence
taagtaaatcaattcctgttctac

SEQ ID NO: 28649 - DNA, 24 bp, Artificial sequence
  SiRNA target sequence
aagtaaatcaattcctgttctact

SEQ ID NO: 28650 - DNA, 24 bp, Artificial sequence
  SiRNA target sequence
agtaaatcaattcctgttctactt

SEQ ID NO: 28651 - DNA, 24 bp, Artificial sequence
  SiRNA target sequence
gtaaatcaattcctgttctacttt

SEQ ID NO: 28652 - DNA, 24 bp, Artificial sequence
  SiRNA target sequence
taaatcaattcctgttctactttt

SEQ ID NO: 28653 - DNA, 24 bp, Artificial sequence
  SiRNA target sequence
aaatcaattcctgttctactttta

SEQ ID NO: 28654 - DNA, 24 bp, Artificial sequence
  SiRNA target sequence
aatcaattcctgttctacttttaa

SEQ ID NO: 28655 - DNA, 24 bp, Artificial sequence
  SiRNA target sequence
atcaattcctgttctacttttaaa

SEQ ID NO: 28656 - DNA, 24 bp, Artificial sequence
  SiRNA target sequence
tcaattcctgttctacttttaaat

SEQ ID NO: 28657 - DNA, 24 bp, Artificial sequence
  SiRNA target sequence
caattcctgttctacttttaaatt

SEQ ID NO: 28658 - DNA, 24 bp, Artificial sequence
  SiRNA target sequence
aattcctgttctacttttaaattt

SEQ ID NO: 28659 - DNA, 24 bp, Artificial sequence
  SiRNA target sequence
attcctgttctacttttaaatttt

SEQ ID NO: 28660 - DNA, 24 bp, Artificial sequence
  SiRNA target sequence
ttcctgttctacttttaaattttt

SEQ ID NO: 28661 - DNA, 24 bp, Artificial sequence
  SiRNA target sequence
tcctgttctacttttaaatttttc

SEQ ID NO: 28662 - DNA, 24 bp, Artificial sequence
  SiRNA target sequence
cctgttctacttttaaatttttca

SEQ ID NO: 28663 - DNA, 24 bp, Artificial sequence
  SiRNA target sequence
ctgttctacttttaaatttttcat

SEQ ID NO: 28664 - DNA, 24 bp, Artificial sequence
  SiRNA target sequence
tgttctacttttaaatttttcatt

SEQ ID NO: 28665 - DNA, 24 bp, Artificial sequence
  SiRNA target sequence
gttctacttttaaatttttcatta

SEQ ID NO: 28666 - DNA, 24 bp, Artificial sequence
  SiRNA target sequence
ttctacttttaaatttttcattaa

SEQ ID NO: 28667 - DNA, 24 bp, Artificial sequence
  SiRNA target sequence
tctacttttaaatttttcattaat

SEQ ID NO: 28668 - DNA, 24 bp, Artificial sequence
  SiRNA target sequence
ctacttttaaatttttcattaata

SEQ ID NO: 28669 - DNA, 24 bp, Artificial sequence
  SiRNA target sequence
tacttttaaatttttcattaatat

SEQ ID NO: 28670 - DNA, 24 bp, Artificial sequence
  SiRNA target sequence
acttttaaatttttcattaatata

SEQ ID NO: 28671 - DNA, 24 bp, Artificial sequence
  SiRNA target sequence
cttttaaatttttcattaatataa

SEQ ID NO: 28672 - DNA, 24 bp, Artificial sequence
  SiRNA target sequence
ttttaaatttttcattaatataat

SEQ ID NO: 28673 - DNA, 24 bp, Artificial sequence
  SiRNA target sequence
tttaaatttttcattaatataatc

SEQ ID NO: 28674 - DNA, 24 bp, Artificial sequence
  SiRNA target sequence
ttaaatttttcattaatataatct

SEQ ID NO: 28675 - DNA, 24 bp, Artificial sequence
  SiRNA target sequence
taaatttttcattaatataatcta

SEQ ID NO: 28676 - DNA, 24 bp, Artificial sequence
  SiRNA target sequence
aaatttttcattaatataatctac

SEQ ID NO: 28677 - DNA, 24 bp, Artificial sequence
  SiRNA target sequence
aatttttcattaatataatctact

SEQ ID NO: 28678 - DNA, 24 bp, Artificial sequence
  SiRNA target sequence
atttttcattaatataatctacta

SEQ ID NO: 28679 - DNA, 24 bp, Artificial sequence
  SiRNA target sequence
tttttcattaatataatctactaa

SEQ ID NO: 28680 - DNA, 24 bp, Artificial sequence
  SiRNA target sequence
ttttcattaatataatctactaaa

SEQ ID NO: 28681 - DNA, 24 bp, Artificial sequence
  SiRNA target sequence
tttcattaatataatctactaaag

SEQ ID NO: 28682 - DNA, 24 bp, Artificial sequence
  SiRNA target sequence
ttcattaatataatctactaaagt

SEQ ID NO: 28683 - DNA, 24 bp, Artificial sequence
  SiRNA target sequence
tcattaatataatctactaaagta

SEQ ID NO: 28684 - DNA, 24 bp, Artificial sequence
  SiRNA target sequence
cattaatataatctactaaagtat

SEQ ID NO: 28685 - DNA, 24 bp, Artificial sequence
  SiRNA target sequence
attaatataatctactaaagtatt

SEQ ID NO: 28686 - DNA, 24 bp, Artificial sequence
  SiRNA target sequence
ttaatataatctactaaagtatta

SEQ ID NO: 28687 - DNA, 24 bp, Artificial sequence
  SiRNA target sequence
taatataatctactaaagtattat

SEQ ID NO: 28688 - DNA, 24 bp, Artificial sequence
  SiRNA target sequence
aatataatctactaaagtattatc

SEQ ID NO: 28689 - DNA, 24 bp, Artificial sequence
  SiRNA target sequence
atataatctactaaagtattatcc

SEQ ID NO: 28690 - DNA, 24 bp, Artificial sequence
  SiRNA target sequence
tataatctactaaagtattatcca

SEQ ID NO: 28691 - DNA, 24 bp, Artificial sequence
  SiRNA target sequence
ataatctactaaagtattatccaa

SEQ ID NO: 28692 - DNA, 24 bp, Artificial sequence
  SiRNA target sequence
taatctactaaagtattatccaaa

SEQ ID NO: 28693 - DNA, 24 bp, Artificial sequence
  SiRNA target sequence
aatctactaaagtattatccaaat

SEQ ID NO: 28694 - DNA, 24 bp, Artificial sequence
  SiRNA target sequence
atctactaaagtattatccaaatc

SEQ ID NO: 28695 - DNA, 24 bp, Artificial sequence
  SiRNA target sequence
tctactaaagtattatccaaatct

SEQ ID NO: 28696 - DNA, 24 bp, Artificial sequence
  SiRNA target sequence
ctactaaagtattatccaaatctt

SEQ ID NO: 28697 - DNA, 24 bp, Artificial sequence
  SiRNA target sequence
tactaaagtattatccaaatcttc

SEQ ID NO: 28698 - DNA, 24 bp, Artificial sequence
  SiRNA target sequence
actaaagtattatccaaatcttct

SEQ ID NO: 28699 - DNA, 24 bp, Artificial sequence
  SiRNA target sequence
ctaaagtattatccaaatcttctc

SEQ ID NO: 28700 - DNA, 24 bp, Artificial sequence
  SiRNA target sequence
taaagtattatccaaatcttctcc

SEQ ID NO: 28701 - DNA, 24 bp, Artificial sequence
  SiRNA target sequence
aaagtattatccaaatcttctcct

SEQ ID NO: 28702 - DNA, 24 bp, Artificial sequence
  SiRNA target sequence
aagtattatccaaatcttctcctc

SEQ ID NO: 28703 - DNA, 24 bp, Artificial sequence
  SiRNA target sequence
agtattatccaaatcttctcctcc

SEQ ID NO: 28704 - DNA, 24 bp, Artificial sequence
  SiRNA target sequence
gtattatccaaatcttctcctcct

SEQ ID NO: 28705 - DNA, 24 bp, Artificial sequence
  SiRNA target sequence
tattatccaaatcttctcctccta

SEQ ID NO: 28706 - DNA, 24 bp, Artificial sequence
  SiRNA target sequence
attatccaaatcttctcctcctaa

SEQ ID NO: 28707 - DNA, 24 bp, Artificial sequence
  SiRNA target sequence
ttatccaaatcttctcctcctaaa

SEQ ID NO: 28708 - DNA, 24 bp, Artificial sequence
  SiRNA target sequence
tatccaaatcttctcctcctaaaa

SEQ ID NO: 28709 - DNA, 24 bp, Artificial sequence
  SiRNA target sequence
atccaaatcttctcctcctaaaaa

SEQ ID NO: 28710 - DNA, 24 bp, Artificial sequence
  SiRNA target sequence
tccaaatcttctcctcctaaaaaa

SEQ ID NO: 28711 - DNA, 24 bp, Artificial sequence
  SiRNA target sequence
ccaaatcttctcctcctaaaaaag

SEQ ID NO: 28712 - DNA, 24 bp, Artificial sequence
  SiRNA target sequence
caaatcttctcctcctaaaaaagt

SEQ ID NO: 28713 - DNA, 24 bp, Artificial sequence
  SiRNA target sequence
aaatcttctcctcctaaaaaagta

SEQ ID NO: 28714 - DNA, 24 bp, Artificial sequence
  SiRNA target sequence
aatcttctcctcctaaaaaagtat

SEQ ID NO: 28715 - DNA, 24 bp, Artificial sequence
  SiRNA target sequence
atcttctcctcctaaaaaagtatt

SEQ ID NO: 28716 - DNA, 24 bp, Artificial sequence
  SiRNA target sequence
tcttctcctcctaaaaaagtattt

SEQ ID NO: 28717 - DNA, 24 bp, Artificial sequence
  SiRNA target sequence
cttctcctcctaaaaaagtatttc

SEQ ID NO: 28718 - DNA, 24 bp, Artificial sequence
  SiRNA target sequence
ttctcctcctaaaaaagtatttcc

SEQ ID NO: 28719 - DNA, 24 bp, Artificial sequence
  SiRNA target sequence
tctcctcctaaaaaagtatttccg

SEQ ID NO: 28720 - DNA, 24 bp, Artificial sequence
  SiRNA target sequence
ctcctcctaaaaaagtatttccgt

SEQ ID NO: 28721 - DNA, 24 bp, Artificial sequence
  SiRNA target sequence
tcctcctaaaaaagtatttccgtt

SEQ ID NO: 28722 - DNA, 24 bp, Artificial sequence
  SiRNA target sequence
cctcctaaaaaagtatttccgtta

SEQ ID NO: 28723 - DNA, 24 bp, Artificial sequence
  SiRNA target sequence
ctcctaaaaaagtatttccgttag

SEQ ID NO: 28724 - DNA, 24 bp, Artificial sequence
  SiRNA target sequence
tcctaaaaaagtatttccgttagt

SEQ ID NO: 28725 - DNA, 24 bp, Artificial sequence
  SiRNA target sequence
cctaaaaaagtatttccgttagta

SEQ ID NO: 28726 - DNA, 24 bp, Artificial sequence
  SiRNA target sequence
ctaaaaaagtatttccgttagtag

SEQ ID NO: 28727 - DNA, 24 bp, Artificial sequence
  SiRNA target sequence
taaaaaagtatttccgttagtaga

SEQ ID NO: 28728 - DNA, 24 bp, Artificial sequence
  SiRNA target sequence
aaaaaagtatttccgttagtagat

SEQ ID NO: 28729 - DNA, 24 bp, Artificial sequence
  SiRNA target sequence
aaaaagtatttccgttagtagatt

SEQ ID NO: 28730 - DNA, 24 bp, Artificial sequence
  SiRNA target sequence
aaaagtatttccgttagtagattt

SEQ ID NO: 28731 - DNA, 24 bp, Artificial sequence
  SiRNA target sequence
aaagtatttccgttagtagatttt

SEQ ID NO: 28732 - DNA, 24 bp, Artificial sequence
  SiRNA target sequence
aagtatttccgttagtagatttta

SEQ ID NO: 28733 - DNA, 24 bp, Artificial sequence
  SiRNA target sequence
agtatttccgttagtagattttac

SEQ ID NO: 28734 - DNA, 24 bp, Artificial sequence
  SiRNA target sequence
gtatttccgttagtagattttaca

SEQ ID NO: 28735 - DNA, 24 bp, Artificial sequence
  SiRNA target sequence
tatttccgttagtagattttacat

SEQ ID NO: 28736 - DNA, 24 bp, Artificial sequence
  SiRNA target sequence
atttccgttagtagattttacatg

SEQ ID NO: 28737 - DNA, 24 bp, Artificial sequence
  SiRNA target sequence
tttccgttagtagattttacatga

SEQ ID NO: 28738 - DNA, 24 bp, Artificial sequence
  SiRNA target sequence
ttccgttagtagattttacatgaa

SEQ ID NO: 28739 - DNA, 24 bp, Artificial sequence
  SiRNA target sequence
tccgttagtagattttacatgaaa

SEQ ID NO: 28740 - DNA, 24 bp, Artificial sequence
  SiRNA target sequence
ccgttagtagattttacatgaaaa

SEQ ID NO: 28741 - DNA, 24 bp, Artificial sequence
  SiRNA target sequence
cgttagtagattttacatgaaaaa

SEQ ID NO: 28742 - DNA, 24 bp, Artificial sequence
  SiRNA target sequence
gttagtagattttacatgaaaaat

SEQ ID NO: 28743 - DNA, 24 bp, Artificial sequence
  SiRNA target sequence
ttagtagattttacatgaaaaata

SEQ ID NO: 28744 - DNA, 24 bp, Artificial sequence
  SiRNA target sequence
tagtagattttacatgaaaaatac

SEQ ID NO: 28745 - DNA, 24 bp, Artificial sequence
  SiRNA target sequence
agtagattttacatgaaaaatacc

SEQ ID NO: 28746 - DNA, 24 bp, Artificial sequence
  SiRNA target sequence
gtagattttacatgaaaaatacca

SEQ ID NO: 28747 - DNA, 24 bp, Artificial sequence
  SiRNA target sequence
tagattttacatgaaaaataccat

SEQ ID NO: 28748 - DNA, 24 bp, Artificial sequence
  SiRNA target sequence
agattttacatgaaaaataccatt

SEQ ID NO: 28749 - DNA, 24 bp, Artificial sequence
  SiRNA target sequence
gattttacatgaaaaataccatta

SEQ ID NO: 28750 - DNA, 24 bp, Artificial sequence
  SiRNA target sequence
attttacatgaaaaataccattat

SEQ ID NO: 28751 - DNA, 24 bp, Artificial sequence
  SiRNA target sequence
ttttacatgaaaaataccattatc

SEQ ID NO: 28752 - DNA, 24 bp, Artificial sequence
  SiRNA target sequence
tttacatgaaaaataccattatct

SEQ ID NO: 28753 - DNA, 24 bp, Artificial sequence
  SiRNA target sequence
ttacatgaaaaataccattatcta

SEQ ID NO: 28754 - DNA, 24 bp, Artificial sequence
  SiRNA target sequence
tacatgaaaaataccattatctaa

SEQ ID NO: 28755 - DNA, 24 bp, Artificial sequence
  SiRNA target sequence
acatgaaaaataccattatctaat

SEQ ID NO: 28756 - DNA, 24 bp, Artificial sequence
  SiRNA target sequence
catgaaaaataccattatctaatt

SEQ ID NO: 28757 - DNA, 24 bp, Artificial sequence
  SiRNA target sequence
atgaaaaataccattatctaattc

SEQ ID NO: 28758 - DNA, 24 bp, Artificial sequence
  SiRNA target sequence
tgaaaaataccattatctaattct

SEQ ID NO: 28759 - DNA, 24 bp, Artificial sequence
  SiRNA target sequence
gaaaaataccattatctaattcta

SEQ ID NO: 28760 - DNA, 24 bp, Artificial sequence
  SiRNA target sequence
aaaaataccattatctaattctaa

SEQ ID NO: 28761 - DNA, 24 bp, Artificial sequence
  SiRNA target sequence
aaaataccattatctaattctaat

SEQ ID NO: 28762 - DNA, 24 bp, Artificial sequence
  SiRNA target sequence
aaataccattatctaattctaata

SEQ ID NO: 28763 - DNA, 24 bp, Artificial sequence
  SiRNA target sequence
aataccattatctaattctaatat

SEQ ID NO: 28764 - DNA, 24 bp, Artificial sequence
  SiRNA target sequence
ataccattatctaattctaatata

SEQ ID NO: 28765 - DNA, 24 bp, Artificial sequence
  SiRNA target sequence
taccattatctaattctaatatac

SEQ ID NO: 28766 - DNA, 24 bp, Artificial sequence
  SiRNA target sequence
accattatctaattctaatatact

SEQ ID NO: 28767 - DNA, 24 bp, Artificial sequence
  SiRNA target sequence
ccattatctaattctaatatacta

SEQ ID NO: 28768 - DNA, 24 bp, Artificial sequence
  SiRNA target sequence
cattatctaattctaatatactaa

SEQ ID NO: 28769 - DNA, 24 bp, Artificial sequence
  SiRNA target sequence
attatctaattctaatatactaat

SEQ ID NO: 28770 - DNA, 24 bp, Artificial sequence
  SiRNA target sequence
ttatctaattctaatatactaatg

SEQ ID NO: 28771 - DNA, 24 bp, Artificial sequence
  SiRNA target sequence
tatctaattctaatatactaatgt

SEQ ID NO: 28772 - DNA, 24 bp, Artificial sequence
  SiRNA target sequence
atctaattctaatatactaatgtc

SEQ ID NO: 28773 - DNA, 24 bp, Artificial sequence
  SiRNA target sequence
tctaattctaatatactaatgtca

SEQ ID NO: 28774 - DNA, 24 bp, Artificial sequence
  SiRNA target sequence
ctaattctaatatactaatgtcaa

SEQ ID NO: 28775 - DNA, 24 bp, Artificial sequence
  SiRNA target sequence
taattctaatatactaatgtcaaa

SEQ ID NO: 28776 - DNA, 24 bp, Artificial sequence
  SiRNA target sequence
aattctaatatactaatgtcaaaa

SEQ ID NO: 28777 - DNA, 24 bp, Artificial sequence
  SiRNA target sequence
attctaatatactaatgtcaaaag

SEQ ID NO: 28778 - DNA, 24 bp, Artificial sequence
  SiRNA target sequence
ttctaatatactaatgtcaaaagt

SEQ ID NO: 28779 - DNA, 24 bp, Artificial sequence
  SiRNA target sequence
tctaatatactaatgtcaaaagtt

SEQ ID NO: 28780 - DNA, 24 bp, Artificial sequence
  SiRNA target sequence
ctaatatactaatgtcaaaagttc

SEQ ID NO: 28781 - DNA, 24 bp, Artificial sequence
  SiRNA target sequence
taatatactaatgtcaaaagttcc

SEQ ID NO: 28782 - DNA, 24 bp, Artificial sequence
  SiRNA target sequence
aatatactaatgtcaaaagttcct

SEQ ID NO: 28783 - DNA, 24 bp, Artificial sequence
  SiRNA target sequence
atatactaatgtcaaaagttcctc

SEQ ID NO: 28784 - DNA, 24 bp, Artificial sequence
  SiRNA target sequence
tatactaatgtcaaaagttcctcc

SEQ ID NO: 28785 - DNA, 24 bp, Artificial sequence
  SiRNA target sequence
atactaatgtcaaaagttcctcct

SEQ ID NO: 28786 - DNA, 24 bp, Artificial sequence
  SiRNA target sequence
tactaatgtcaaaagttcctcctc

SEQ ID NO: 28787 - DNA, 24 bp, Artificial sequence
  SiRNA target sequence
actaatgtcaaaagttcctcctcc

SEQ ID NO: 28788 - DNA, 24 bp, Artificial sequence
  SiRNA target sequence
ctaatgtcaaaagttcctcctccc

SEQ ID NO: 28789 - DNA, 24 bp, Artificial sequence
  SiRNA target sequence
taatgtcaaaagttcctcctccca

SEQ ID NO: 28790 - DNA, 24 bp, Artificial sequence
  SiRNA target sequence
aatgtcaaaagttcctcctcccag

SEQ ID NO: 28791 - DNA, 24 bp, Artificial sequence
  SiRNA target sequence
atgtcaaaagttcctcctcccaga

SEQ ID NO: 28792 - DNA, 24 bp, Artificial sequence
  SiRNA target sequence
tgtcaaaagttcctcctcccagat

SEQ ID NO: 28793 - DNA, 24 bp, Artificial sequence
  SiRNA target sequence
gtcaaaagttcctcctcccagatc

SEQ ID NO: 28794 - DNA, 24 bp, Artificial sequence
  SiRNA target sequence
tcaaaagttcctcctcccagatca

SEQ ID NO: 28795 - DNA, 24 bp, Artificial sequence
  SiRNA target sequence
caaaagttcctcctcccagatcat

SEQ ID NO: 28796 - DNA, 24 bp, Artificial sequence
  SiRNA target sequence
aaaagttcctcctcccagatcata

SEQ ID NO: 28797 - DNA, 24 bp, Artificial sequence
  SiRNA target sequence
aaagttcctcctcccagatcataa

SEQ ID NO: 28798 - DNA, 24 bp, Artificial sequence
  SiRNA target sequence
aagttcctcctcccagatcataaa

SEQ ID NO: 28799 - DNA, 24 bp, Artificial sequence
  SiRNA target sequence
agttcctcctcccagatcataaac

SEQ ID NO: 28800 - DNA, 24 bp, Artificial sequence
  SiRNA target sequence
gttcctcctcccagatcataaaca

SEQ ID NO: 28801 - DNA, 24 bp, Artificial sequence
  SiRNA target sequence
ttcctcctcccagatcataaacag

SEQ ID NO: 28802 - DNA, 24 bp, Artificial sequence
  SiRNA target sequence
tcctcctcccagatcataaacagc

SEQ ID NO: 28803 - DNA, 24 bp, Artificial sequence
  SiRNA target sequence
cctcctcccagatcataaacagct

SEQ ID NO: 28804 - DNA, 24 bp, Artificial sequence
  SiRNA target sequence
ctcctcccagatcataaacagcta

SEQ ID NO: 28805 - DNA, 24 bp, Artificial sequence
  SiRNA target sequence
tcctcccagatcataaacagctat

SEQ ID NO: 28806 - DNA, 24 bp, Artificial sequence
  SiRNA target sequence
cctcccagatcataaacagctata

SEQ ID NO: 28807 - DNA, 24 bp, Artificial sequence
  SiRNA target sequence
ctcccagatcataaacagctataa

SEQ ID NO: 28808 - DNA, 24 bp, Artificial sequence
  SiRNA target sequence
tcccagatcataaacagctataat

SEQ ID NO: 28809 - DNA, 24 bp, Artificial sequence
  SiRNA target sequence
cccagatcataaacagctataata

SEQ ID NO: 28810 - DNA, 24 bp, Artificial sequence
  SiRNA target sequence
ccagatcataaacagctataatac

SEQ ID NO: 28811 - DNA, 24 bp, Artificial sequence
  SiRNA target sequence
cagatcataaacagctataatacc

SEQ ID NO: 28812 - DNA, 24 bp, Artificial sequence
  SiRNA target sequence
agatcataaacagctataataccc

SEQ ID NO: 28813 - DNA, 24 bp, Artificial sequence
  SiRNA target sequence
gatcataaacagctataataccct

SEQ ID NO: 28814 - DNA, 24 bp, Artificial sequence
  SiRNA target sequence
atcataaacagctataataccctg

SEQ ID NO: 28815 - DNA, 24 bp, Artificial sequence
  SiRNA target sequence
tcataaacagctataataccctgt

SEQ ID NO: 28816 - DNA, 24 bp, Artificial sequence
  SiRNA target sequence
cataaacagctataataccctgtg

SEQ ID NO: 28817 - DNA, 24 bp, Artificial sequence
  SiRNA target sequence
ataaacagctataataccctgtgc

SEQ ID NO: 28818 - DNA, 24 bp, Artificial sequence
  SiRNA target sequence
taaacagctataataccctgtgca

SEQ ID NO: 28819 - DNA, 24 bp, Artificial sequence
  SiRNA target sequence
aaacagctataataccctgtgcag

SEQ ID NO: 28820 - DNA, 24 bp, Artificial sequence
  SiRNA target sequence
aacagctataataccctgtgcaga

SEQ ID NO: 28821 - DNA, 24 bp, Artificial sequence
  SiRNA target sequence
acagctataataccctgtgcagac

SEQ ID NO: 28822 - DNA, 24 bp, Artificial sequence
  SiRNA target sequence
cagctataataccctgtgcagact

SEQ ID NO: 28823 - DNA, 24 bp, Artificial sequence
  SiRNA target sequence
agctataataccctgtgcagactt

SEQ ID NO: 28824 - DNA, 24 bp, Artificial sequence
  SiRNA target sequence
gctataataccctgtgcagacttg

SEQ ID NO: 28825 - DNA, 24 bp, Artificial sequence
  SiRNA target sequence
ctataataccctgtgcagacttgt

SEQ ID NO: 28826 - DNA, 24 bp, Artificial sequence
  SiRNA target sequence
tataataccctgtgcagacttgtc

SEQ ID NO: 28827 - DNA, 24 bp, Artificial sequence
  SiRNA target sequence
ataataccctgtgcagacttgtca

SEQ ID NO: 28828 - DNA, 24 bp, Artificial sequence
  SiRNA target sequence
taataccctgtgcagacttgtcaa

SEQ ID NO: 28829 - DNA, 24 bp, Artificial sequence
  SiRNA target sequence
aataccctgtgcagacttgtcaag

SEQ ID NO: 28830 - DNA, 24 bp, Artificial sequence
  SiRNA target sequence
ataccctgtgcagacttgtcaagc

SEQ ID NO: 28831 - DNA, 24 bp, Artificial sequence
  SiRNA target sequence
taccctgtgcagacttgtcaagcc

SEQ ID NO: 28832 - DNA, 24 bp, Artificial sequence
  SiRNA target sequence
accctgtgcagacttgtcaagccc

SEQ ID NO: 28833 - DNA, 24 bp, Artificial sequence
  SiRNA target sequence
ccctgtgcagacttgtcaagccca

SEQ ID NO: 28834 - DNA, 24 bp, Artificial sequence
  SiRNA target sequence
cctgtgcagacttgtcaagcccat

SEQ ID NO: 28835 - DNA, 24 bp, Artificial sequence
  SiRNA target sequence
ctgtgcagacttgtcaagcccata

SEQ ID NO: 28836 - DNA, 24 bp, Artificial sequence
  SiRNA target sequence
tgtgcagacttgtcaagcccataa

SEQ ID NO: 28837 - DNA, 24 bp, Artificial sequence
  SiRNA target sequence
gtgcagacttgtcaagcccataag

SEQ ID NO: 28838 - DNA, 24 bp, Artificial sequence
  SiRNA target sequence
tgcagacttgtcaagcccataagc

SEQ ID NO: 28839 - DNA, 24 bp, Artificial sequence
  SiRNA target sequence
gcagacttgtcaagcccataagca

SEQ ID NO: 28840 - DNA, 24 bp, Artificial sequence
  SiRNA target sequence
cagacttgtcaagcccataagcaa

SEQ ID NO: 28841 - DNA, 24 bp, Artificial sequence
  SiRNA target sequence
agacttgtcaagcccataagcaag

SEQ ID NO: 28842 - DNA, 24 bp, Artificial sequence
  SiRNA target sequence
gacttgtcaagcccataagcaagt

SEQ ID NO: 28843 - DNA, 24 bp, Artificial sequence
  SiRNA target sequence
acttgtcaagcccataagcaagtg

SEQ ID NO: 28844 - DNA, 24 bp, Artificial sequence
  SiRNA target sequence
cttgtcaagcccataagcaagtgc

SEQ ID NO: 28845 - DNA, 24 bp, Artificial sequence
  SiRNA target sequence
ttgtcaagcccataagcaagtgct

SEQ ID NO: 28846 - DNA, 24 bp, Artificial sequence
  SiRNA target sequence
tgtcaagcccataagcaagtgctg

SEQ ID NO: 28847 - DNA, 24 bp, Artificial sequence
  SiRNA target sequence
gtcaagcccataagcaagtgctgc

SEQ ID NO: 28848 - DNA, 24 bp, Artificial sequence
  SiRNA target sequence
tcaagcccataagcaagtgctgcc

SEQ ID NO: 28849 - DNA, 24 bp, Artificial sequence
  SiRNA target sequence
caagcccataagcaagtgctgccg

SEQ ID NO: 28850 - DNA, 24 bp, Artificial sequence
  SiRNA target sequence
aagcccataagcaagtgctgccgc

SEQ ID NO: 28851 - DNA, 24 bp, Artificial sequence
  SiRNA target sequence
agcccataagcaagtgctgccgca

SEQ ID NO: 28852 - DNA, 24 bp, Artificial sequence
  SiRNA target sequence
gcccataagcaagtgctgccgcag

SEQ ID NO: 28853 - DNA, 24 bp, Artificial sequence
  SiRNA target sequence
cccataagcaagtgctgccgcagt

SEQ ID NO: 28854 - DNA, 24 bp, Artificial sequence
  SiRNA target sequence
ccataagcaagtgctgccgcagta

SEQ ID NO: 28855 - DNA, 24 bp, Artificial sequence
  SiRNA target sequence
cataagcaagtgctgccgcagtag

SEQ ID NO: 28856 - DNA, 24 bp, Artificial sequence
  SiRNA target sequence
ataagcaagtgctgccgcagtagg

SEQ ID NO: 28857 - DNA, 24 bp, Artificial sequence
  SiRNA target sequence
taagcaagtgctgccgcagtaggc

SEQ ID NO: 28858 - DNA, 24 bp, Artificial sequence
  SiRNA target sequence
aagcaagtgctgccgcagtaggct

SEQ ID NO: 28859 - DNA, 24 bp, Artificial sequence
  SiRNA target sequence
agcaagtgctgccgcagtaggctc

SEQ ID NO: 28860 - DNA, 24 bp, Artificial sequence
  SiRNA target sequence
gcaagtgctgccgcagtaggctca

SEQ ID NO: 28861 - DNA, 24 bp, Artificial sequence
  SiRNA target sequence
caagtgctgccgcagtaggctcat

SEQ ID NO: 28862 - DNA, 24 bp, Artificial sequence
  SiRNA target sequence
aagtgctgccgcagtaggctcatt

SEQ ID NO: 28863 - DNA, 24 bp, Artificial sequence
  SiRNA target sequence
agtgctgccgcagtaggctcatta

SEQ ID NO: 28864 - DNA, 24 bp, Artificial sequence
  SiRNA target sequence
gtgctgccgcagtaggctcattaa

SEQ ID NO: 28865 - DNA, 24 bp, Artificial sequence
  SiRNA target sequence
tgctgccgcagtaggctcattaat

SEQ ID NO: 28866 - DNA, 24 bp, Artificial sequence
  SiRNA target sequence
gctgccgcagtaggctcattaatc

SEQ ID NO: 28867 - DNA, 24 bp, Artificial sequence
  SiRNA target sequence
ctgccgcagtaggctcattaatca

SEQ ID NO: 28868 - DNA, 24 bp, Artificial sequence
  SiRNA target sequence
tgccgcagtaggctcattaatcac

SEQ ID NO: 28869 - DNA, 24 bp, Artificial sequence
  SiRNA target sequence
gccgcagtaggctcattaatcact

SEQ ID NO: 28870 - DNA, 24 bp, Artificial sequence
  SiRNA target sequence
ccgcagtaggctcattaatcactc

SEQ ID NO: 28871 - DNA, 24 bp, Artificial sequence
  SiRNA target sequence
cgcagtaggctcattaatcactct

SEQ ID NO: 28872 - DNA, 24 bp, Artificial sequence
  SiRNA target sequence
gcagtaggctcattaatcactcta

SEQ ID NO: 28873 - DNA, 24 bp, Artificial sequence
  SiRNA target sequence
cagtaggctcattaatcactctaa

SEQ ID NO: 28874 - DNA, 24 bp, Artificial sequence
  SiRNA target sequence
agtaggctcattaatcactctaag

SEQ ID NO: 28875 - DNA, 24 bp, Artificial sequence
  SiRNA target sequence
gtaggctcattaatcactctaagc

SEQ ID NO: 28876 - DNA, 24 bp, Artificial sequence
  SiRNA target sequence
taggctcattaatcactctaagca

SEQ ID NO: 28877 - DNA, 24 bp, Artificial sequence
  SiRNA target sequence
aggctcattaatcactctaagcac

SEQ ID NO: 28878 - DNA, 24 bp, Artificial sequence
  SiRNA target sequence
ggctcattaatcactctaagcact

SEQ ID NO: 28879 - DNA, 24 bp, Artificial sequence
  SiRNA target sequence
gctcattaatcactctaagcactt

SEQ ID NO: 28880 - DNA, 24 bp, Artificial sequence
  SiRNA target sequence
ctcattaatcactctaagcacttg

SEQ ID NO: 28881 - DNA, 24 bp, Artificial sequence
  SiRNA target sequence
tcattaatcactctaagcacttgt

SEQ ID NO: 28882 - DNA, 24 bp, Artificial sequence
  SiRNA target sequence
cattaatcactctaagcacttgta

SEQ ID NO: 28883 - DNA, 24 bp, Artificial sequence
  SiRNA target sequence
attaatcactctaagcacttgtaa

SEQ ID NO: 28884 - DNA, 24 bp, Artificial sequence
  SiRNA target sequence
ttaatcactctaagcacttgtaat

SEQ ID NO: 28885 - DNA, 24 bp, Artificial sequence
  SiRNA target sequence
taatcactctaagcacttgtaatc

SEQ ID NO: 28886 - DNA, 24 bp, Artificial sequence
  SiRNA target sequence
aatcactctaagcacttgtaatcc

SEQ ID NO: 28887 - DNA, 24 bp, Artificial sequence
  SiRNA target sequence
atcactctaagcacttgtaatccc

SEQ ID NO: 28888 - DNA, 24 bp, Artificial sequence
  SiRNA target sequence
tcactctaagcacttgtaatcccg

SEQ ID NO: 28889 - DNA, 24 bp, Artificial sequence
  SiRNA target sequence
cactctaagcacttgtaatcccgc

SEQ ID NO: 28890 - DNA, 24 bp, Artificial sequence
  SiRNA target sequence
actctaagcacttgtaatcccgca

SEQ ID NO: 28891 - DNA, 24 bp, Artificial sequence
  SiRNA target sequence
ctctaagcacttgtaatcccgcaa

SEQ ID NO: 28892 - DNA, 24 bp, Artificial sequence
  SiRNA target sequence
tctaagcacttgtaatcccgcaat

SEQ ID NO: 28893 - DNA, 24 bp, Artificial sequence
  SiRNA target sequence
ctaagcacttgtaatcccgcaatc

SEQ ID NO: 28894 - DNA, 24 bp, Artificial sequence
  SiRNA target sequence
taagcacttgtaatcccgcaatcc

SEQ ID NO: 28895 - DNA, 24 bp, Artificial sequence
  SiRNA target sequence
aagcacttgtaatcccgcaatcct

SEQ ID NO: 28896 - DNA, 24 bp, Artificial sequence
  SiRNA target sequence
agcacttgtaatcccgcaatcctt

SEQ ID NO: 28897 - DNA, 24 bp, Artificial sequence
  SiRNA target sequence
gcacttgtaatcccgcaatccttc

SEQ ID NO: 28898 - DNA, 24 bp, Artificial sequence
  SiRNA target sequence
cacttgtaatcccgcaatccttcc

SEQ ID NO: 28899 - DNA, 24 bp, Artificial sequence
  SiRNA target sequence
acttgtaatcccgcaatccttccc

SEQ ID NO: 28900 - DNA, 24 bp, Artificial sequence
  SiRNA target sequence
cttgtaatcccgcaatccttcccg

SEQ ID NO: 28901 - DNA, 24 bp, Artificial sequence
  SiRNA target sequence
ttgtaatcccgcaatccttcccgc

SEQ ID NO: 28902 - DNA, 24 bp, Artificial sequence
  SiRNA target sequence
tgtaatcccgcaatccttcccgca

SEQ ID NO: 28903 - DNA, 24 bp, Artificial sequence
  SiRNA target sequence
gtaatcccgcaatccttcccgcat

SEQ ID NO: 28904 - DNA, 24 bp, Artificial sequence
  SiRNA target sequence
taatcccgcaatccttcccgcatc

SEQ ID NO: 28905 - DNA, 24 bp, Artificial sequence
  SiRNA target sequence
aatcccgcaatccttcccgcatct

SEQ ID NO: 28906 - DNA, 24 bp, Artificial sequence
  SiRNA target sequence
atcccgcaatccttcccgcatctt

SEQ ID NO: 28907 - DNA, 24 bp, Artificial sequence
  SiRNA target sequence
tcccgcaatccttcccgcatcttt

SEQ ID NO: 28908 - DNA, 24 bp, Artificial sequence
  SiRNA target sequence
cccgcaatccttcccgcatcttta

SEQ ID NO: 28909 - DNA, 24 bp, Artificial sequence
  SiRNA target sequence
ccgcaatccttcccgcatctttag

SEQ ID NO: 28910 - DNA, 24 bp, Artificial sequence
  SiRNA target sequence
cgcaatccttcccgcatctttagt

SEQ ID NO: 28911 - DNA, 24 bp, Artificial sequence
  SiRNA target sequence
gcaatccttcccgcatctttagta

SEQ ID NO: 28912 - DNA, 24 bp, Artificial sequence
  SiRNA target sequence
caatccttcccgcatctttagtag

SEQ ID NO: 28913 - DNA, 24 bp, Artificial sequence
  SiRNA target sequence
aatccttcccgcatctttagtagc

SEQ ID NO: 28914 - DNA, 24 bp, Artificial sequence
  SiRNA target sequence
atccttcccgcatctttagtagct

SEQ ID NO: 28915 - DNA, 24 bp, Artificial sequence
  SiRNA target sequence
tccttcccgcatctttagtagctt

SEQ ID NO: 28916 - DNA, 24 bp, Artificial sequence
  SiRNA target sequence
ccttcccgcatctttagtagcttg

SEQ ID NO: 28917 - DNA, 24 bp, Artificial sequence
  SiRNA target sequence
cttcccgcatctttagtagcttgc

SEQ ID NO: 28918 - DNA, 24 bp, Artificial sequence
  SiRNA target sequence
ttcccgcatctttagtagcttgcc

SEQ ID NO: 28919 - DNA, 24 bp, Artificial sequence
  SiRNA target sequence
tcccgcatctttagtagcttgcct

SEQ ID NO: 28920 - DNA, 24 bp, Artificial sequence
  SiRNA target sequence
cccgcatctttagtagcttgcctt

SEQ ID NO: 28921 - DNA, 24 bp, Artificial sequence
  SiRNA target sequence
ccgcatctttagtagcttgccttt

SEQ ID NO: 28922 - DNA, 24 bp, Artificial sequence
  SiRNA target sequence
cgcatctttagtagcttgcctttg

SEQ ID NO: 28923 - DNA, 24 bp, Artificial sequence
  SiRNA target sequence
gcatctttagtagcttgcctttgc

SEQ ID NO: 28924 - DNA, 24 bp, Artificial sequence
  SiRNA target sequence
catctttagtagcttgcctttgca

SEQ ID NO: 28925 - DNA, 24 bp, Artificial sequence
  SiRNA target sequence
atctttagtagcttgcctttgcat

SEQ ID NO: 28926 - DNA, 24 bp, Artificial sequence
  SiRNA target sequence
tctttagtagcttgcctttgcatg

SEQ ID NO: 28927 - DNA, 24 bp, Artificial sequence
  SiRNA target sequence
ctttagtagcttgcctttgcatgt

SEQ ID NO: 28928 - DNA, 24 bp, Artificial sequence
  SiRNA target sequence
tttagtagcttgcctttgcatgtc

SEQ ID NO: 28929 - DNA, 24 bp, Artificial sequence
  SiRNA target sequence
ttagtagcttgcctttgcatgtca

SEQ ID NO: 28930 - DNA, 24 bp, Artificial sequence
  SiRNA target sequence
tagtagcttgcctttgcatgtcat

SEQ ID NO: 28931 - DNA, 24 bp, Artificial sequence
  SiRNA target sequence
agtagcttgcctttgcatgtcatc

SEQ ID NO: 28932 - DNA, 24 bp, Artificial sequence
  SiRNA target sequence
gtagcttgcctttgcatgtcatca

SEQ ID NO: 28933 - DNA, 24 bp, Artificial sequence
  SiRNA target sequence
tagcttgcctttgcatgtcatcaa

SEQ ID NO: 28934 - DNA, 24 bp, Artificial sequence
  SiRNA target sequence
agcttgcctttgcatgtcatcaaa

SEQ ID NO: 28935 - DNA, 24 bp, Artificial sequence
  SiRNA target sequence
gcttgcctttgcatgtcatcaaaa

SEQ ID NO: 28936 - DNA, 24 bp, Artificial sequence
  SiRNA target sequence
cttgcctttgcatgtcatcaaaat

SEQ ID NO: 28937 - DNA, 24 bp, Artificial sequence
  SiRNA target sequence
ttgcctttgcatgtcatcaaaata

SEQ ID NO: 28938 - DNA, 24 bp, Artificial sequence
  SiRNA target sequence
tgcctttgcatgtcatcaaaatat

SEQ ID NO: 28939 - DNA, 24 bp, Artificial sequence
  SiRNA target sequence
gcctttgcatgtcatcaaaatatg

SEQ ID NO: 28940 - DNA, 24 bp, Artificial sequence
  SiRNA target sequence
cctttgcatgtcatcaaaatatgc

SEQ ID NO: 28941 - DNA, 24 bp, Artificial sequence
  SiRNA target sequence
ctttgcatgtcatcaaaatatgcg

SEQ ID NO: 28942 - DNA, 24 bp, Artificial sequence
  SiRNA target sequence
tttgcatgtcatcaaaatatgcgg

SEQ ID NO: 28943 - DNA, 24 bp, Artificial sequence
  SiRNA target sequence
ttgcatgtcatcaaaatatgcggg

SEQ ID NO: 28944 - DNA, 24 bp, Artificial sequence
  SiRNA target sequence
tgcatgtcatcaaaatatgcgggc

SEQ ID NO: 28945 - DNA, 24 bp, Artificial sequence
  SiRNA target sequence
gcatgtcatcaaaatatgcgggca

SEQ ID NO: 28946 - DNA, 24 bp, Artificial sequence
  SiRNA target sequence
catgtcatcaaaatatgcgggcac

SEQ ID NO: 28947 - DNA, 24 bp, Artificial sequence
  SiRNA target sequence
atgtcatcaaaatatgcgggcact

SEQ ID NO: 28948 - DNA, 24 bp, Artificial sequence
  SiRNA target sequence
tgtcatcaaaatatgcgggcactg

SEQ ID NO: 28949 - DNA, 24 bp, Artificial sequence
  SiRNA target sequence
gtcatcaaaatatgcgggcactgt

SEQ ID NO: 28950 - DNA, 24 bp, Artificial sequence
  SiRNA target sequence
tcatcaaaatatgcgggcactgtt

SEQ ID NO: 28951 - DNA, 24 bp, Artificial sequence
  SiRNA target sequence
catcaaaatatgcgggcactgtta

SEQ ID NO: 28952 - DNA, 24 bp, Artificial sequence
  SiRNA target sequence
atcaaaatatgcgggcactgttat

SEQ ID NO: 28953 - DNA, 24 bp, Artificial sequence
  SiRNA target sequence
tcaaaatatgcgggcactgttata

SEQ ID NO: 28954 - DNA, 24 bp, Artificial sequence
  SiRNA target sequence
caaaatatgcgggcactgttataa

SEQ ID NO: 28955 - DNA, 24 bp, Artificial sequence
  SiRNA target sequence
aaaatatgcgggcactgttataac

SEQ ID NO: 28956 - DNA, 24 bp, Artificial sequence
  SiRNA target sequence
aaatatgcgggcactgttataaca

SEQ ID NO: 28957 - DNA, 24 bp, Artificial sequence
  SiRNA target sequence
aatatgcgggcactgttataacag

SEQ ID NO: 28958 - DNA, 24 bp, Artificial sequence
  SiRNA target sequence
atatgcgggcactgttataacaga

SEQ ID NO: 28959 - DNA, 24 bp, Artificial sequence
  SiRNA target sequence
tatgcgggcactgttataacagat

SEQ ID NO: 28960 - DNA, 24 bp, Artificial sequence
  SiRNA target sequence
atgcgggcactgttataacagatc

SEQ ID NO: 28961 - DNA, 24 bp, Artificial sequence
  SiRNA target sequence
tgcgggcactgttataacagatct

SEQ ID NO: 28962 - DNA, 24 bp, Artificial sequence
  SiRNA target sequence
gcgggcactgttataacagatctt

SEQ ID NO: 28963 - DNA, 24 bp, Artificial sequence
  SiRNA target sequence
cgggcactgttataacagatctta

SEQ ID NO: 28964 - DNA, 24 bp, Artificial sequence
  SiRNA target sequence
gggcactgttataacagatcttaa

SEQ ID NO: 28965 - DNA, 24 bp, Artificial sequence
  SiRNA target sequence
ggcactgttataacagatcttaat

SEQ ID NO: 28966 - DNA, 24 bp, Artificial sequence
  SiRNA target sequence
gcactgttataacagatcttaata

SEQ ID NO: 28967 - DNA, 24 bp, Artificial sequence
  SiRNA target sequence
cactgttataacagatcttaatac

SEQ ID NO: 28968 - DNA, 24 bp, Artificial sequence
  SiRNA target sequence
actgttataacagatcttaatact

SEQ ID NO: 28969 - DNA, 24 bp, Artificial sequence
  SiRNA target sequence
ctgttataacagatcttaatactt

SEQ ID NO: 28970 - DNA, 24 bp, Artificial sequence
  SiRNA target sequence
tgttataacagatcttaatacttt

SEQ ID NO: 28971 - DNA, 24 bp, Artificial sequence
  SiRNA target sequence
gttataacagatcttaatacttta

SEQ ID NO: 28972 - DNA, 24 bp, Artificial sequence
  SiRNA target sequence
ttataacagatcttaatactttag

SEQ ID NO: 28973 - DNA, 24 bp, Artificial sequence
  SiRNA target sequence
tataacagatcttaatactttaga

SEQ ID NO: 28974 - DNA, 24 bp, Artificial sequence
  SiRNA target sequence
ataacagatcttaatactttagaa

SEQ ID NO: 28975 - DNA, 24 bp, Artificial sequence
  SiRNA target sequence
taacagatcttaatactttagaat

SEQ ID NO: 28976 - DNA, 24 bp, Artificial sequence
  SiRNA target sequence
aacagatcttaatactttagaatt

SEQ ID NO: 28977 - DNA, 24 bp, Artificial sequence
  SiRNA target sequence
acagatcttaatactttagaattt

SEQ ID NO: 28978 - DNA, 24 bp, Artificial sequence
  SiRNA target sequence
cagatcttaatactttagaattta

SEQ ID NO: 28979 - DNA, 24 bp, Artificial sequence
  SiRNA target sequence
agatcttaatactttagaatttaa

SEQ ID NO: 28980 - DNA, 24 bp, Artificial sequence
  SiRNA target sequence
gatcttaatactttagaatttaaa

SEQ ID NO: 28981 - DNA, 24 bp, Artificial sequence
  SiRNA target sequence
atcttaatactttagaatttaaaa

SEQ ID NO: 28982 - DNA, 24 bp, Artificial sequence
  SiRNA target sequence
tcttaatactttagaatttaaaaa

SEQ ID NO: 28983 - DNA, 24 bp, Artificial sequence
  SiRNA target sequence
cttaatactttagaatttaaaaaa

SEQ ID NO: 28984 - DNA, 24 bp, Artificial sequence
  SiRNA target sequence
ttaatactttagaatttaaaaaat

SEQ ID NO: 28985 - DNA, 24 bp, Artificial sequence
  SiRNA target sequence
taatactttagaatttaaaaaatt

SEQ ID NO: 28986 - DNA, 24 bp, Artificial sequence
  SiRNA target sequence
aatactttagaatttaaaaaattc

SEQ ID NO: 28987 - DNA, 24 bp, Artificial sequence
  SiRNA target sequence
atactttagaatttaaaaaattct

SEQ ID NO: 28988 - DNA, 24 bp, Artificial sequence
  SiRNA target sequence
tactttagaatttaaaaaattctc

SEQ ID NO: 28989 - DNA, 24 bp, Artificial sequence
  SiRNA target sequence
actttagaatttaaaaaattctct

SEQ ID NO: 28990 - DNA, 24 bp, Artificial sequence
  SiRNA target sequence
ctttagaatttaaaaaattctctg

SEQ ID NO: 28991 - DNA, 24 bp, Artificial sequence
  SiRNA target sequence
tttagaatttaaaaaattctctgc

SEQ ID NO: 28992 - DNA, 24 bp, Artificial sequence
  SiRNA target sequence
ttagaatttaaaaaattctctgcg

SEQ ID NO: 28993 - DNA, 24 bp, Artificial sequence
  SiRNA target sequence
tagaatttaaaaaattctctgcgg

SEQ ID NO: 28994 - DNA, 24 bp, Artificial sequence
  SiRNA target sequence
agaatttaaaaaattctctgcggc

SEQ ID NO: 28995 - DNA, 24 bp, Artificial sequence
  SiRNA target sequence
gaatttaaaaaattctctgcggca

SEQ ID NO: 28996 - DNA, 24 bp, Artificial sequence
  SiRNA target sequence
aatttaaaaaattctctgcggcat

SEQ ID NO: 28997 - DNA, 24 bp, Artificial sequence
  SiRNA target sequence
atttaaaaaattctctgcggcatt

SEQ ID NO: 28998 - DNA, 24 bp, Artificial sequence
  SiRNA target sequence
tttaaaaaattctctgcggcattt

SEQ ID NO: 28999 - DNA, 24 bp, Artificial sequence
  SiRNA target sequence
ttaaaaaattctctgcggcatttt

SEQ ID NO: 29000 - DNA, 24 bp, Artificial sequence
  SiRNA target sequence
taaaaaattctctgcggcattttt

SEQ ID NO: 29001 - DNA, 24 bp, Artificial sequence
  SiRNA target sequence
aaaaaattctctgcggcatttttc

SEQ ID NO: 29002 - DNA, 24 bp, Artificial sequence
  SiRNA target sequence
aaaaattctctgcggcatttttca

SEQ ID NO: 29003 - DNA, 24 bp, Artificial sequence
  SiRNA target sequence
aaaattctctgcggcatttttcat

SEQ ID NO: 29004 - DNA, 24 bp, Artificial sequence
  SiRNA target sequence
aaattctctgcggcatttttcatt

SEQ ID NO: 29005 - DNA, 24 bp, Artificial sequence
  SiRNA target sequence
aattctctgcggcatttttcattt

SEQ ID NO: 29006 - DNA, 24 bp, Artificial sequence
  SiRNA target sequence
attctctgcggcatttttcatttt

SEQ ID NO: 29007 - DNA, 24 bp, Artificial sequence
  SiRNA target sequence
ttctctgcggcatttttcattttt

SEQ ID NO: 29008 - DNA, 24 bp, Artificial sequence
  SiRNA target sequence
tctctgcggcatttttcatttttg

SEQ ID NO: 29009 - DNA, 24 bp, Artificial sequence
  SiRNA target sequence
ctctgcggcatttttcatttttga

SEQ ID NO: 29010 - DNA, 24 bp, Artificial sequence
  SiRNA target sequence
tctgcggcatttttcatttttgac

SEQ ID NO: 29011 - DNA, 24 bp, Artificial sequence
  SiRNA target sequence
ctgcggcatttttcatttttgaca

SEQ ID NO: 29012 - DNA, 24 bp, Artificial sequence
  SiRNA target sequence
tgcggcatttttcatttttgacaa

SEQ ID NO: 29013 - DNA, 24 bp, Artificial sequence
  SiRNA target sequence
gcggcatttttcatttttgacaaa

SEQ ID NO: 29014 - DNA, 24 bp, Artificial sequence
  SiRNA target sequence
cggcatttttcatttttgacaaaa

SEQ ID NO: 29015 - DNA, 24 bp, Artificial sequence
  SiRNA target sequence
ggcatttttcatttttgacaaaat

SEQ ID NO: 29016 - DNA, 24 bp, Artificial sequence
  SiRNA target sequence
gcatttttcatttttgacaaaata

SEQ ID NO: 29017 - DNA, 24 bp, Artificial sequence
  SiRNA target sequence
catttttcatttttgacaaaataa

SEQ ID NO: 29018 - DNA, 24 bp, Artificial sequence
  SiRNA target sequence
atttttcatttttgacaaaataaa

SEQ ID NO: 29019 - DNA, 24 bp, Artificial sequence
  SiRNA target sequence
tttttcatttttgacaaaataaat

SEQ ID NO: 29020 - DNA, 24 bp, Artificial sequence
  SiRNA target sequence
ttttcatttttgacaaaataaatg

SEQ ID NO: 29021 - DNA, 24 bp, Artificial sequence
  SiRNA target sequence
tttcatttttgacaaaataaatgc

SEQ ID NO: 29022 - DNA, 24 bp, Artificial sequence
  SiRNA target sequence
ttcatttttgacaaaataaatgca

SEQ ID NO: 29023 - DNA, 24 bp, Artificial sequence
  SiRNA target sequence
tcatttttgacaaaataaatgcac

SEQ ID NO: 29024 - DNA, 24 bp, Artificial sequence
  SiRNA target sequence
catttttgacaaaataaatgcacc

SEQ ID NO: 29025 - DNA, 24 bp, Artificial sequence
  SiRNA target sequence
atttttgacaaaataaatgcacca

SEQ ID NO: 29026 - DNA, 24 bp, Artificial sequence
  SiRNA target sequence
tttttgacaaaataaatgcaccaa

SEQ ID NO: 29027 - DNA, 24 bp, Artificial sequence
  SiRNA target sequence
ttttgacaaaataaatgcaccaat

SEQ ID NO: 29028 - DNA, 24 bp, Artificial sequence
  SiRNA target sequence
tttgacaaaataaatgcaccaatt

SEQ ID NO: 29029 - DNA, 24 bp, Artificial sequence
  SiRNA target sequence
ttgacaaaataaatgcaccaattt

SEQ ID NO: 29030 - DNA, 24 bp, Artificial sequence
  SiRNA target sequence
tgacaaaataaatgcaccaatttg

SEQ ID NO: 29031 - DNA, 24 bp, Artificial sequence
  SiRNA target sequence
gacaaaataaatgcaccaatttgt

SEQ ID NO: 29032 - DNA, 24 bp, Artificial sequence
  SiRNA target sequence
acaaaataaatgcaccaatttgtg

SEQ ID NO: 29033 - DNA, 24 bp, Artificial sequence
  SiRNA target sequence
caaaataaatgcaccaatttgtgc

SEQ ID NO: 29034 - DNA, 24 bp, Artificial sequence
  SiRNA target sequence
aaaataaatgcaccaatttgtgca

SEQ ID NO: 29035 - DNA, 24 bp, Artificial sequence
  SiRNA target sequence
aaataaatgcaccaatttgtgcag

SEQ ID NO: 29036 - DNA, 24 bp, Artificial sequence
  SiRNA target sequence
aataaatgcaccaatttgtgcagg

SEQ ID NO: 29037 - DNA, 24 bp, Artificial sequence
  SiRNA target sequence
ataaatgcaccaatttgtgcagga

SEQ ID NO: 29038 - DNA, 24 bp, Artificial sequence
  SiRNA target sequence
taaatgcaccaatttgtgcaggag

SEQ ID NO: 29039 - DNA, 24 bp, Artificial sequence
  SiRNA target sequence
aaatgcaccaatttgtgcaggaga

SEQ ID NO: 29040 - DNA, 24 bp, Artificial sequence
  SiRNA target sequence
aatgcaccaatttgtgcaggagaa

SEQ ID NO: 29041 - DNA, 24 bp, Artificial sequence
  SiRNA target sequence
atgcaccaatttgtgcaggagaat

SEQ ID NO: 29042 - DNA, 24 bp, Artificial sequence
  SiRNA target sequence
tgcaccaatttgtgcaggagaata

SEQ ID NO: 29043 - DNA, 24 bp, Artificial sequence
  SiRNA target sequence
gcaccaatttgtgcaggagaatat

SEQ ID NO: 29044 - DNA, 24 bp, Artificial sequence
  SiRNA target sequence
caccaatttgtgcaggagaatatt

SEQ ID NO: 29045 - DNA, 24 bp, Artificial sequence
  SiRNA target sequence
accaatttgtgcaggagaatattt

SEQ ID NO: 29046 - DNA, 24 bp, Artificial sequence
  SiRNA target sequence
ccaatttgtgcaggagaatatttc

SEQ ID NO: 29047 - DNA, 24 bp, Artificial sequence
  SiRNA target sequence
caatttgtgcaggagaatatttct

SEQ ID NO: 29048 - DNA, 24 bp, Artificial sequence
  SiRNA target sequence
aatttgtgcaggagaatatttctt

SEQ ID NO: 29049 - DNA, 24 bp, Artificial sequence
  SiRNA target sequence
atttgtgcaggagaatatttctta

SEQ ID NO: 29050 - DNA, 24 bp, Artificial sequence
  SiRNA target sequence
tttgtgcaggagaatatttcttat

SEQ ID NO: 29051 - DNA, 24 bp, Artificial sequence
  SiRNA target sequence
ttgtgcaggagaatatttcttatt

SEQ ID NO: 29052 - DNA, 24 bp, Artificial sequence
  SiRNA target sequence
tgtgcaggagaatatttcttattg

SEQ ID NO: 29053 - DNA, 24 bp, Artificial sequence
  SiRNA target sequence
gtgcaggagaatatttcttattgt

SEQ ID NO: 29054 - DNA, 24 bp, Artificial sequence
  SiRNA target sequence
tgcaggagaatatttcttattgtc

SEQ ID NO: 29055 - DNA, 24 bp, Artificial sequence
  SiRNA target sequence
gcaggagaatatttcttattgtca

SEQ ID NO: 29056 - DNA, 24 bp, Artificial sequence
  SiRNA target sequence
caggagaatatttcttattgtcaa

SEQ ID NO: 29057 - DNA, 24 bp, Artificial sequence
  SiRNA target sequence
aggagaatatttcttattgtcaat

SEQ ID NO: 29058 - DNA, 24 bp, Artificial sequence
  SiRNA target sequence
ggagaatatttcttattgtcaatt

SEQ ID NO: 29059 - DNA, 24 bp, Artificial sequence
  SiRNA target sequence
gagaatatttcttattgtcaattt

SEQ ID NO: 29060 - DNA, 24 bp, Artificial sequence
  SiRNA target sequence
agaatatttcttattgtcaatttt

SEQ ID NO: 29061 - DNA, 24 bp, Artificial sequence
  SiRNA target sequence
gaatatttcttattgtcaattttt

SEQ ID NO: 29062 - DNA, 24 bp, Artificial sequence
  SiRNA target sequence
aatatttcttattgtcaattttta

SEQ ID NO: 29063 - DNA, 24 bp, Artificial sequence
  SiRNA target sequence
atatttcttattgtcaatttttat

SEQ ID NO: 29064 - DNA, 24 bp, Artificial sequence
  SiRNA target sequence
tatttcttattgtcaatttttatc

SEQ ID NO: 29065 - DNA, 24 bp, Artificial sequence
  SiRNA target sequence
atttcttattgtcaatttttatcc

SEQ ID NO: 29066 - DNA, 24 bp, Artificial sequence
  SiRNA target sequence
tttcttattgtcaatttttatcca

SEQ ID NO: 29067 - DNA, 24 bp, Artificial sequence
  SiRNA target sequence
ttcttattgtcaatttttatccaa

SEQ ID NO: 29068 - DNA, 24 bp, Artificial sequence
  SiRNA target sequence
tcttattgtcaatttttatccaaa

SEQ ID NO: 29069 - DNA, 24 bp, Artificial sequence
  SiRNA target sequence
cttattgtcaatttttatccaaat

SEQ ID NO: 29070 - DNA, 24 bp, Artificial sequence
  SiRNA target sequence
ttattgtcaatttttatccaaata

SEQ ID NO: 29071 - DNA, 24 bp, Artificial sequence
  SiRNA target sequence
tattgtcaatttttatccaaatat

SEQ ID NO: 29072 - DNA, 24 bp, Artificial sequence
  SiRNA target sequence
attgtcaatttttatccaaatatc

SEQ ID NO: 29073 - DNA, 24 bp, Artificial sequence
  SiRNA target sequence
ttgtcaatttttatccaaatatcg

SEQ ID NO: 29074 - DNA, 24 bp, Artificial sequence
  SiRNA target sequence
tgtcaatttttatccaaatatcgc

SEQ ID NO: 29075 - DNA, 24 bp, Artificial sequence
  SiRNA target sequence
gtcaatttttatccaaatatcgcc

SEQ ID NO: 29076 - DNA, 24 bp, Artificial sequence
  SiRNA target sequence
tcaatttttatccaaatatcgccg

SEQ ID NO: 29077 - DNA, 24 bp, Artificial sequence
  SiRNA target sequence
caatttttatccaaatatcgccgt

SEQ ID NO: 29078 - DNA, 24 bp, Artificial sequence
  SiRNA target sequence
aatttttatccaaatatcgccgtt

SEQ ID NO: 29079 - DNA, 24 bp, Artificial sequence
  SiRNA target sequence
atttttatccaaatatcgccgtta

SEQ ID NO: 29080 - DNA, 24 bp, Artificial sequence
  SiRNA target sequence
tttttatccaaatatcgccgttac

SEQ ID NO: 29081 - DNA, 24 bp, Artificial sequence
  SiRNA target sequence
ttttatccaaatatcgccgttaca

SEQ ID NO: 29082 - DNA, 24 bp, Artificial sequence
  SiRNA target sequence
tttatccaaatatcgccgttacaa

SEQ ID NO: 29083 - DNA, 24 bp, Artificial sequence
  SiRNA target sequence
ttatccaaatatcgccgttacaat

SEQ ID NO: 29084 - DNA, 24 bp, Artificial sequence
  SiRNA target sequence
tatccaaatatcgccgttacaatg

SEQ ID NO: 29085 - DNA, 24 bp, Artificial sequence
  SiRNA target sequence
atccaaatatcgccgttacaatgc

SEQ ID NO: 29086 - DNA, 24 bp, Artificial sequence
  SiRNA target sequence
tccaaatatcgccgttacaatgct

SEQ ID NO: 29087 - DNA, 24 bp, Artificial sequence
  SiRNA target sequence
ccaaatatcgccgttacaatgctt

SEQ ID NO: 29088 - DNA, 24 bp, Artificial sequence
  SiRNA target sequence
caaatatcgccgttacaatgctta

SEQ ID NO: 29089 - DNA, 24 bp, Artificial sequence
  SiRNA target sequence
aaatatcgccgttacaatgcttag

SEQ ID NO: 29090 - DNA, 24 bp, Artificial sequence
  SiRNA target sequence
aatatcgccgttacaatgcttagt

SEQ ID NO: 29091 - DNA, 24 bp, Artificial sequence
  SiRNA target sequence
atatcgccgttacaatgcttagta

SEQ ID NO: 29092 - DNA, 24 bp, Artificial sequence
  SiRNA target sequence
tatcgccgttacaatgcttagtag

SEQ ID NO: 29093 - DNA, 24 bp, Artificial sequence
  SiRNA target sequence
atcgccgttacaatgcttagtagt

SEQ ID NO: 29094 - DNA, 24 bp, Artificial sequence
  SiRNA target sequence
tcgccgttacaatgcttagtagtg

SEQ ID NO: 29095 - DNA, 24 bp, Artificial sequence
  SiRNA target sequence
cgccgttacaatgcttagtagtgt

SEQ ID NO: 29096 - DNA, 24 bp, Artificial sequence
  SiRNA target sequence
gccgttacaatgcttagtagtgtc

SEQ ID NO: 29097 - DNA, 24 bp, Artificial sequence
  SiRNA target sequence
ccgttacaatgcttagtagtgtca

SEQ ID NO: 29098 - DNA, 24 bp, Artificial sequence
  SiRNA target sequence
cgttacaatgcttagtagtgtcat

SEQ ID NO: 29099 - DNA, 24 bp, Artificial sequence
  SiRNA target sequence
gttacaatgcttagtagtgtcata

SEQ ID NO: 29100 - DNA, 24 bp, Artificial sequence
  SiRNA target sequence
ttacaatgcttagtagtgtcatat

SEQ ID NO: 29101 - DNA, 24 bp, Artificial sequence
  SiRNA target sequence
tacaatgcttagtagtgtcatatg

SEQ ID NO: 29102 - DNA, 24 bp, Artificial sequence
  SiRNA target sequence
acaatgcttagtagtgtcatatgg

SEQ ID NO: 29103 - DNA, 24 bp, Artificial sequence
  SiRNA target sequence
caatgcttagtagtgtcatatggt

SEQ ID NO: 29104 - DNA, 24 bp, Artificial sequence
  SiRNA target sequence
aatgcttagtagtgtcatatggta

SEQ ID NO: 29105 - DNA, 24 bp, Artificial sequence
  SiRNA target sequence
atgcttagtagtgtcatatggtaa

SEQ ID NO: 29106 - DNA, 24 bp, Artificial sequence
  SiRNA target sequence
tgcttagtagtgtcatatggtaag

SEQ ID NO: 29107 - DNA, 24 bp, Artificial sequence
  SiRNA target sequence
gcttagtagtgtcatatggtaagc

SEQ ID NO: 29108 - DNA, 24 bp, Artificial sequence
  SiRNA target sequence
cttagtagtgtcatatggtaagct

SEQ ID NO: 29109 - DNA, 24 bp, Artificial sequence
  SiRNA target sequence
ttagtagtgtcatatggtaagctt

SEQ ID NO: 29110 - DNA, 24 bp, Artificial sequence
  SiRNA target sequence
tagtagtgtcatatggtaagcttt

SEQ ID NO: 29111 - DNA, 24 bp, Artificial sequence
  SiRNA target sequence
agtagtgtcatatggtaagctttt

SEQ ID NO: 29112 - DNA, 24 bp, Artificial sequence
  SiRNA target sequence
gtagtgtcatatggtaagcttttt

SEQ ID NO: 29113 - DNA, 24 bp, Artificial sequence
  SiRNA target sequence
tagtgtcatatggtaagcttttta

SEQ ID NO: 29114 - DNA, 24 bp, Artificial sequence
  SiRNA target sequence
agtgtcatatggtaagctttttaa

SEQ ID NO: 29115 - DNA, 24 bp, Artificial sequence
  SiRNA target sequence
gtgtcatatggtaagctttttaaa

SEQ ID NO: 29116 - DNA, 24 bp, Artificial sequence
  SiRNA target sequence
tgtcatatggtaagctttttaaat

SEQ ID NO: 29117 - DNA, 24 bp, Artificial sequence
  SiRNA target sequence
gtcatatggtaagctttttaaata

SEQ ID NO: 29118 - DNA, 24 bp, Artificial sequence
  SiRNA target sequence
tcatatggtaagctttttaaataa

SEQ ID NO: 29119 - DNA, 24 bp, Artificial sequence
  SiRNA target sequence
catatggtaagctttttaaataat

SEQ ID NO: 29120 - DNA, 24 bp, Artificial sequence
  SiRNA target sequence
atatggtaagctttttaaataatc

SEQ ID NO: 29121 - DNA, 24 bp, Artificial sequence
  SiRNA target sequence
tatggtaagctttttaaataatct

SEQ ID NO: 29122 - DNA, 24 bp, Artificial sequence
  SiRNA target sequence
atggtaagctttttaaataatctt

SEQ ID NO: 29123 - DNA, 24 bp, Artificial sequence
  SiRNA target sequence
tggtaagctttttaaataatcttt

SEQ ID NO: 29124 - DNA, 24 bp, Artificial sequence
  SiRNA target sequence
ggtaagctttttaaataatctttt

SEQ ID NO: 29125 - DNA, 24 bp, Artificial sequence
  SiRNA target sequence
gtaagctttttaaataatctttta

SEQ ID NO: 29126 - DNA, 24 bp, Artificial sequence
  SiRNA target sequence
taagctttttaaataatcttttaa

SEQ ID NO: 29127 - DNA, 24 bp, Artificial sequence
  SiRNA target sequence
aagctttttaaataatcttttaat

SEQ ID NO: 29128 - DNA, 24 bp, Artificial sequence
  SiRNA target sequence
agctttttaaataatcttttaatt

SEQ ID NO: 29129 - DNA, 24 bp, Artificial sequence
  SiRNA target sequence
gctttttaaataatcttttaattc

SEQ ID NO: 29130 - DNA, 24 bp, Artificial sequence
  SiRNA target sequence
ctttttaaataatcttttaattct

SEQ ID NO: 29131 - DNA, 24 bp, Artificial sequence
  SiRNA target sequence
tttttaaataatcttttaattcta

SEQ ID NO: 29132 - DNA, 24 bp, Artificial sequence
  SiRNA target sequence
ttttaaataatcttttaattctac

SEQ ID NO: 29133 - DNA, 24 bp, Artificial sequence
  SiRNA target sequence
tttaaataatcttttaattctaca

SEQ ID NO: 29134 - DNA, 24 bp, Artificial sequence
  SiRNA target sequence
ttaaataatcttttaattctacat

SEQ ID NO: 29135 - DNA, 24 bp, Artificial sequence
  SiRNA target sequence
taaataatcttttaattctacatc

SEQ ID NO: 29136 - DNA, 24 bp, Artificial sequence
  SiRNA target sequence
aaataatcttttaattctacatca

SEQ ID NO: 29137 - DNA, 24 bp, Artificial sequence
  SiRNA target sequence
aataatcttttaattctacatcat

SEQ ID NO: 29138 - DNA, 24 bp, Artificial sequence
  SiRNA target sequence
ataatcttttaattctacatcatc

SEQ ID NO: 29139 - DNA, 24 bp, Artificial sequence
  SiRNA target sequence
taatcttttaattctacatcatca

SEQ ID NO: 29140 - DNA, 24 bp, Artificial sequence
  SiRNA target sequence
aatcttttaattctacatcatcaa

SEQ ID NO: 29141 - DNA, 24 bp, Artificial sequence
  SiRNA target sequence
atcttttaattctacatcatcaaa

SEQ ID NO: 29142 - DNA, 24 bp, Artificial sequence
  SiRNA target sequence
tcttttaattctacatcatcaaat

SEQ ID NO: 29143 - DNA, 24 bp, Artificial sequence
  SiRNA target sequence
cttttaattctacatcatcaaatt

SEQ ID NO: 29144 - DNA, 24 bp, Artificial sequence
  SiRNA target sequence
ttttaattctacatcatcaaattt

SEQ ID NO: 29145 - DNA, 24 bp, Artificial sequence
  SiRNA target sequence
tttaattctacatcatcaaatttt

SEQ ID NO: 29146 - DNA, 24 bp, Artificial sequence
  SiRNA target sequence
ttaattctacatcatcaaattttc

SEQ ID NO: 29147 - DNA, 24 bp, Artificial sequence
  SiRNA target sequence
taattctacatcatcaaattttcg

SEQ ID NO: 29148 - DNA, 24 bp, Artificial sequence
  SiRNA target sequence
aattctacatcatcaaattttcgt

SEQ ID NO: 29149 - DNA, 24 bp, Artificial sequence
  SiRNA target sequence
attctacatcatcaaattttcgtc

SEQ ID NO: 29150 - DNA, 24 bp, Artificial sequence
  SiRNA target sequence
ttctacatcatcaaattttcgtcc

SEQ ID NO: 29151 - DNA, 24 bp, Artificial sequence
  SiRNA target sequence
tctacatcatcaaattttcgtccc

SEQ ID NO: 29152 - DNA, 24 bp, Artificial sequence
  SiRNA target sequence
ctacatcatcaaattttcgtccca

SEQ ID NO: 29153 - DNA, 24 bp, Artificial sequence
  SiRNA target sequence
tacatcatcaaattttcgtcccag

SEQ ID NO: 29154 - DNA, 24 bp, Artificial sequence
  SiRNA target sequence
acatcatcaaattttcgtcccagc

SEQ ID NO: 29155 - DNA, 24 bp, Artificial sequence
  SiRNA target sequence
catcatcaaattttcgtcccagca

SEQ ID NO: 29156 - DNA, 24 bp, Artificial sequence
  SiRNA target sequence
atcatcaaattttcgtcccagcaa

SEQ ID NO: 29157 - DNA, 24 bp, Artificial sequence
  SiRNA target sequence
tcatcaaattttcgtcccagcaat

SEQ ID NO: 29158 - DNA, 24 bp, Artificial sequence
  SiRNA target sequence
catcaaattttcgtcccagcaatc

SEQ ID NO: 29159 - DNA, 24 bp, Artificial sequence
  SiRNA target sequence
atcaaattttcgtcccagcaatct

SEQ ID NO: 29160 - DNA, 24 bp, Artificial sequence
  SiRNA target sequence
tcaaattttcgtcccagcaatctc

SEQ ID NO: 29161 - DNA, 24 bp, Artificial sequence
  SiRNA target sequence
caaattttcgtcccagcaatctct

SEQ ID NO: 29162 - DNA, 24 bp, Artificial sequence
  SiRNA target sequence
aaattttcgtcccagcaatctctt

SEQ ID NO: 29163 - DNA, 24 bp, Artificial sequence
  SiRNA target sequence
aattttcgtcccagcaatctctta

SEQ ID NO: 29164 - DNA, 24 bp, Artificial sequence
  SiRNA target sequence
attttcgtcccagcaatctcttag

SEQ ID NO: 29165 - DNA, 24 bp, Artificial sequence
  SiRNA target sequence
ttttcgtcccagcaatctcttaga

SEQ ID NO: 29166 - DNA, 24 bp, Artificial sequence
  SiRNA target sequence
tttcgtcccagcaatctcttagac

SEQ ID NO: 29167 - DNA, 24 bp, Artificial sequence
  SiRNA target sequence
ttcgtcccagcaatctcttagacg

SEQ ID NO: 29168 - DNA, 24 bp, Artificial sequence
  SiRNA target sequence
tcgtcccagcaatctcttagacgc

SEQ ID NO: 29169 - DNA, 24 bp, Artificial sequence
  SiRNA target sequence
cgtcccagcaatctcttagacgca

SEQ ID NO: 29170 - DNA, 24 bp, Artificial sequence
  SiRNA target sequence
gtcccagcaatctcttagacgcaa

SEQ ID NO: 29171 - DNA, 24 bp, Artificial sequence
  SiRNA target sequence
tcccagcaatctcttagacgcaaa

SEQ ID NO: 29172 - DNA, 24 bp, Artificial sequence
  SiRNA target sequence
cccagcaatctcttagacgcaaaa

SEQ ID NO: 29173 - DNA, 24 bp, Artificial sequence
  SiRNA target sequence
ccagcaatctcttagacgcaaaaa

SEQ ID NO: 29174 - DNA, 24 bp, Artificial sequence
  SiRNA target sequence
cagcaatctcttagacgcaaaaat

SEQ ID NO: 29175 - DNA, 24 bp, Artificial sequence
  SiRNA target sequence
agcaatctcttagacgcaaaaatc

SEQ ID NO: 29176 - DNA, 24 bp, Artificial sequence
  SiRNA target sequence
gcaatctcttagacgcaaaaatcg

SEQ ID NO: 29177 - DNA, 24 bp, Artificial sequence
  SiRNA target sequence
caatctcttagacgcaaaaatcgt

SEQ ID NO: 29178 - DNA, 24 bp, Artificial sequence
  SiRNA target sequence
aatctcttagacgcaaaaatcgta

SEQ ID NO: 29179 - DNA, 24 bp, Artificial sequence
  SiRNA target sequence
atctcttagacgcaaaaatcgtat

SEQ ID NO: 29180 - DNA, 24 bp, Artificial sequence
  SiRNA target sequence
tctcttagacgcaaaaatcgtatt

SEQ ID NO: 29181 - DNA, 24 bp, Artificial sequence
  SiRNA target sequence
ctcttagacgcaaaaatcgtattc

SEQ ID NO: 29182 - DNA, 24 bp, Artificial sequence
  SiRNA target sequence
tcttagacgcaaaaatcgtattct

SEQ ID NO: 29183 - DNA, 24 bp, Artificial sequence
  SiRNA target sequence
cttagacgcaaaaatcgtattctt

SEQ ID NO: 29184 - DNA, 24 bp, Artificial sequence
  SiRNA target sequence
ttagacgcaaaaatcgtattcttg

SEQ ID NO: 29185 - DNA, 24 bp, Artificial sequence
  SiRNA target sequence
tagacgcaaaaatcgtattcttgg

SEQ ID NO: 29186 - DNA, 24 bp, Artificial sequence
  SiRNA target sequence
agacgcaaaaatcgtattcttggg

SEQ ID NO: 29187 - DNA, 24 bp, Artificial sequence
  SiRNA target sequence
gacgcaaaaatcgtattcttggga

SEQ ID NO: 29188 - DNA, 24 bp, Artificial sequence
  SiRNA target sequence
acgcaaaaatcgtattcttgggat

SEQ ID NO: 29189 - DNA, 24 bp, Artificial sequence
  SiRNA target sequence
cgcaaaaatcgtattcttgggatg

SEQ ID NO: 29190 - DNA, 24 bp, Artificial sequence
  SiRNA target sequence
gcaaaaatcgtattcttgggatgt

SEQ ID NO: 29191 - DNA, 24 bp, Artificial sequence
  SiRNA target sequence
caaaaatcgtattcttgggatgta

SEQ ID NO: 29192 - DNA, 24 bp, Artificial sequence
  SiRNA target sequence
aaaaatcgtattcttgggatgtaa

SEQ ID NO: 29193 - DNA, 24 bp, Artificial sequence
  SiRNA target sequence
aaaatcgtattcttgggatgtaat

SEQ ID NO: 29194 - DNA, 24 bp, Artificial sequence
  SiRNA target sequence
aaatcgtattcttgggatgtaata

SEQ ID NO: 29195 - DNA, 24 bp, Artificial sequence
  SiRNA target sequence
aatcgtattcttgggatgtaataa

SEQ ID NO: 29196 - DNA, 24 bp, Artificial sequence
  SiRNA target sequence
atcgtattcttgggatgtaataac

SEQ ID NO: 29197 - DNA, 24 bp, Artificial sequence
  SiRNA target sequence
tcgtattcttgggatgtaataaca

SEQ ID NO: 29198 - DNA, 24 bp, Artificial sequence
  SiRNA target sequence
cgtattcttgggatgtaataacaa

SEQ ID NO: 29199 - DNA, 24 bp, Artificial sequence
  SiRNA target sequence
gtattcttgggatgtaataacaag

SEQ ID NO: 29200 - DNA, 24 bp, Artificial sequence
  SiRNA target sequence
tattcttgggatgtaataacaagt

SEQ ID NO: 29201 - DNA, 24 bp, Artificial sequence
  SiRNA target sequence
attcttgggatgtaataacaagtt

SEQ ID NO: 29202 - DNA, 24 bp, Artificial sequence
  SiRNA target sequence
ttcttgggatgtaataacaagtta

SEQ ID NO: 29203 - DNA, 24 bp, Artificial sequence
  SiRNA target sequence
tcttgggatgtaataacaagttag

SEQ ID NO: 29204 - DNA, 24 bp, Artificial sequence
  SiRNA target sequence
cttgggatgtaataacaagttaga

SEQ ID NO: 29205 - DNA, 24 bp, Artificial sequence
  SiRNA target sequence
ttgggatgtaataacaagttagac

SEQ ID NO: 29206 - DNA, 24 bp, Artificial sequence
  SiRNA target sequence
tgggatgtaataacaagttagact

SEQ ID NO: 29207 - DNA, 24 bp, Artificial sequence
  SiRNA target sequence
gggatgtaataacaagttagactt

SEQ ID NO: 29208 - DNA, 24 bp, Artificial sequence
  SiRNA target sequence
ggatgtaataacaagttagactta

SEQ ID NO: 29209 - DNA, 24 bp, Artificial sequence
  SiRNA target sequence
gatgtaataacaagttagacttag

SEQ ID NO: 29210 - DNA, 24 bp, Artificial sequence
  SiRNA target sequence
atgtaataacaagttagacttagc

SEQ ID NO: 29211 - DNA, 24 bp, Artificial sequence
  SiRNA target sequence
tgtaataacaagttagacttagct

SEQ ID NO: 29212 - DNA, 24 bp, Artificial sequence
  SiRNA target sequence
gtaataacaagttagacttagctt

SEQ ID NO: 29213 - DNA, 24 bp, Artificial sequence
  SiRNA target sequence
taataacaagttagacttagcttg

SEQ ID NO: 29214 - DNA, 24 bp, Artificial sequence
  SiRNA target sequence
aataacaagttagacttagcttgc

SEQ ID NO: 29215 - DNA, 24 bp, Artificial sequence
  SiRNA target sequence
ataacaagttagacttagcttgct

SEQ ID NO: 29216 - DNA, 24 bp, Artificial sequence
  SiRNA target sequence
taacaagttagacttagcttgctc

SEQ ID NO: 29217 - DNA, 24 bp, Artificial sequence
  SiRNA target sequence
aacaagttagacttagcttgctca

SEQ ID NO: 29218 - DNA, 24 bp, Artificial sequence
  SiRNA target sequence
acaagttagacttagcttgctcac

SEQ ID NO: 29219 - DNA, 24 bp, Artificial sequence
  SiRNA target sequence
caagttagacttagcttgctcacc

SEQ ID NO: 29220 - DNA, 24 bp, Artificial sequence
  SiRNA target sequence
aagttagacttagcttgctcacct

SEQ ID NO: 29221 - DNA, 24 bp, Artificial sequence
  SiRNA target sequence
agttagacttagcttgctcacctg

SEQ ID NO: 29222 - DNA, 24 bp, Artificial sequence
  SiRNA target sequence
gttagacttagcttgctcacctgt

SEQ ID NO: 29223 - DNA, 24 bp, Artificial sequence
  SiRNA target sequence
ttagacttagcttgctcacctgtt

SEQ ID NO: 29224 - DNA, 24 bp, Artificial sequence
  SiRNA target sequence
tagacttagcttgctcacctgtta

SEQ ID NO: 29225 - DNA, 24 bp, Artificial sequence
  SiRNA target sequence
agacttagcttgctcacctgttaa

SEQ ID NO: 29226 - DNA, 24 bp, Artificial sequence
  SiRNA target sequence
gacttagcttgctcacctgttaaa

SEQ ID NO: 29227 - DNA, 24 bp, Artificial sequence
  SiRNA target sequence
acttagcttgctcacctgttaaaa

SEQ ID NO: 29228 - DNA, 24 bp, Artificial sequence
  SiRNA target sequence
cttagcttgctcacctgttaaaat

SEQ ID NO: 29229 - DNA, 24 bp, Artificial sequence
  SiRNA target sequence
ttagcttgctcacctgttaaaatt

SEQ ID NO: 29230 - DNA, 24 bp, Artificial sequence
  SiRNA target sequence
tagcttgctcacctgttaaaattt

SEQ ID NO: 29231 - DNA, 24 bp, Artificial sequence
  SiRNA target sequence
agcttgctcacctgttaaaatttt

SEQ ID NO: 29232 - DNA, 24 bp, Artificial sequence
  SiRNA target sequence
gcttgctcacctgttaaaatttta

SEQ ID NO: 29233 - DNA, 24 bp, Artificial sequence
  SiRNA target sequence
cttgctcacctgttaaaattttat

SEQ ID NO: 29234 - DNA, 24 bp, Artificial sequence
  SiRNA target sequence
ttgctcacctgttaaaattttatc

SEQ ID NO: 29235 - DNA, 24 bp, Artificial sequence
  SiRNA target sequence
tgctcacctgttaaaattttatct

SEQ ID NO: 29236 - DNA, 24 bp, Artificial sequence
  SiRNA target sequence
gctcacctgttaaaattttatctt

SEQ ID NO: 29237 - DNA, 24 bp, Artificial sequence
  SiRNA target sequence
ctcacctgttaaaattttatcttt

SEQ ID NO: 29238 - DNA, 24 bp, Artificial sequence
  SiRNA target sequence
tcacctgttaaaattttatcttta

SEQ ID NO: 29239 - DNA, 24 bp, Artificial sequence
  SiRNA target sequence
cacctgttaaaattttatctttaa

SEQ ID NO: 29240 - DNA, 24 bp, Artificial sequence
  SiRNA target sequence
acctgttaaaattttatctttaaa

SEQ ID NO: 29241 - DNA, 24 bp, Artificial sequence
  SiRNA target sequence
cctgttaaaattttatctttaaaa

SEQ ID NO: 29242 - DNA, 24 bp, Artificial sequence
  SiRNA target sequence
ctgttaaaattttatctttaaaaa

SEQ ID NO: 29243 - DNA, 24 bp, Artificial sequence
  SiRNA target sequence
tgttaaaattttatctttaaaaat

SEQ ID NO: 29244 - DNA, 24 bp, Artificial sequence
  SiRNA target sequence
gttaaaattttatctttaaaaatt

SEQ ID NO: 29245 - DNA, 24 bp, Artificial sequence
  SiRNA target sequence
ttaaaattttatctttaaaaattg

SEQ ID NO: 29246 - DNA, 24 bp, Artificial sequence
  SiRNA target sequence
taaaattttatctttaaaaattga

SEQ ID NO: 29247 - DNA, 24 bp, Artificial sequence
  SiRNA target sequence
aaaattttatctttaaaaattgat

SEQ ID NO: 29248 - DNA, 24 bp, Artificial sequence
  SiRNA target sequence
aaattttatctttaaaaattgata

SEQ ID NO: 29249 - DNA, 24 bp, Artificial sequence
  SiRNA target sequence
aattttatctttaaaaattgatac

SEQ ID NO: 29250 - DNA, 24 bp, Artificial sequence
  SiRNA target sequence
attttatctttaaaaattgatacc

SEQ ID NO: 29251 - DNA, 24 bp, Artificial sequence
  SiRNA target sequence
ttttatctttaaaaattgatacca

SEQ ID NO: 29252 - DNA, 24 bp, Artificial sequence
  SiRNA target sequence
tttatctttaaaaattgataccac

SEQ ID NO: 29253 - DNA, 24 bp, Artificial sequence
  SiRNA target sequence
ttatctttaaaaattgataccacc

SEQ ID NO: 29254 - DNA, 24 bp, Artificial sequence
  SiRNA target sequence
tatctttaaaaattgataccaccg

SEQ ID NO: 29255 - DNA, 24 bp, Artificial sequence
  SiRNA target sequence
atctttaaaaattgataccaccga

SEQ ID NO: 29256 - DNA, 24 bp, Artificial sequence
  SiRNA target sequence
tctttaaaaattgataccaccgat

SEQ ID NO: 29257 - DNA, 24 bp, Artificial sequence
  SiRNA target sequence
ctttaaaaattgataccaccgatg

SEQ ID NO: 29258 - DNA, 24 bp, Artificial sequence
  SiRNA target sequence
tttaaaaattgataccaccgatgg

SEQ ID NO: 29259 - DNA, 24 bp, Artificial sequence
  SiRNA target sequence
ttaaaaattgataccaccgatggt

SEQ ID NO: 29260 - DNA, 24 bp, Artificial sequence
  SiRNA target sequence
taaaaattgataccaccgatggtg

SEQ ID NO: 29261 - DNA, 24 bp, Artificial sequence
  SiRNA target sequence
aaaaattgataccaccgatggtgt

SEQ ID NO: 29262 - DNA, 24 bp, Artificial sequence
  SiRNA target sequence
aaaattgataccaccgatggtgta

SEQ ID NO: 29263 - DNA, 24 bp, Artificial sequence
  SiRNA target sequence
aaattgataccaccgatggtgtag

SEQ ID NO: 29264 - DNA, 24 bp, Artificial sequence
  SiRNA target sequence
aattgataccaccgatggtgtagt

SEQ ID NO: 29265 - DNA, 24 bp, Artificial sequence
  SiRNA target sequence
attgataccaccgatggtgtagtt

SEQ ID NO: 29266 - DNA, 24 bp, Artificial sequence
  SiRNA target sequence
ttgataccaccgatggtgtagttc

SEQ ID NO: 29267 - DNA, 24 bp, Artificial sequence
  SiRNA target sequence
tgataccaccgatggtgtagttct

SEQ ID NO: 29268 - DNA, 24 bp, Artificial sequence
  SiRNA target sequence
gataccaccgatggtgtagttcta

SEQ ID NO: 29269 - DNA, 24 bp, Artificial sequence
  SiRNA target sequence
ataccaccgatggtgtagttctac

SEQ ID NO: 29270 - DNA, 24 bp, Artificial sequence
  SiRNA target sequence
taccaccgatggtgtagttctacc

SEQ ID NO: 29271 - DNA, 24 bp, Artificial sequence
  SiRNA target sequence
accaccgatggtgtagttctacca

SEQ ID NO: 29272 - DNA, 24 bp, Artificial sequence
  SiRNA target sequence
ccaccgatggtgtagttctaccac

SEQ ID NO: 29273 - DNA, 24 bp, Artificial sequence
  SiRNA target sequence
caccgatggtgtagttctaccacc

SEQ ID NO: 29274 - DNA, 24 bp, Artificial sequence
  SiRNA target sequence
accgatggtgtagttctaccacct

SEQ ID NO: 29275 - DNA, 24 bp, Artificial sequence
  SiRNA target sequence
ccgatggtgtagttctaccacctt

SEQ ID NO: 29276 - DNA, 24 bp, Artificial sequence
  SiRNA target sequence
cgatggtgtagttctaccaccttc

SEQ ID NO: 29277 - DNA, 24 bp, Artificial sequence
  SiRNA target sequence
gatggtgtagttctaccaccttct

SEQ ID NO: 29278 - DNA, 24 bp, Artificial sequence
  SiRNA target sequence
atggtgtagttctaccaccttctt

SEQ ID NO: 29279 - DNA, 24 bp, Artificial sequence
  SiRNA target sequence
tggtgtagttctaccaccttcttc

SEQ ID NO: 29280 - DNA, 24 bp, Artificial sequence
  SiRNA target sequence
ggtgtagttctaccaccttcttcg

SEQ ID NO: 29281 - DNA, 24 bp, Artificial sequence
  SiRNA target sequence
gtgtagttctaccaccttcttcgt

SEQ ID NO: 29282 - DNA, 24 bp, Artificial sequence
  SiRNA target sequence
tgtagttctaccaccttcttcgtt

SEQ ID NO: 29283 - DNA, 24 bp, Artificial sequence
  SiRNA target sequence
gtagttctaccaccttcttcgttt

SEQ ID NO: 29284 - DNA, 24 bp, Artificial sequence
  SiRNA target sequence
tagttctaccaccttcttcgtttt

SEQ ID NO: 29285 - DNA, 24 bp, Artificial sequence
  SiRNA target sequence
agttctaccaccttcttcgttttc

SEQ ID NO: 29286 - DNA, 24 bp, Artificial sequence
  SiRNA target sequence
gttctaccaccttcttcgttttca

SEQ ID NO: 29287 - DNA, 24 bp, Artificial sequence
  SiRNA target sequence
ttctaccaccttcttcgttttcaa

SEQ ID NO: 29288 - DNA, 24 bp, Artificial sequence
  SiRNA target sequence
tctaccaccttcttcgttttcaat

SEQ ID NO: 29289 - DNA, 24 bp, Artificial sequence
  SiRNA target sequence
ctaccaccttcttcgttttcaata

SEQ ID NO: 29290 - DNA, 24 bp, Artificial sequence
  SiRNA target sequence
taccaccttcttcgttttcaataa

SEQ ID NO: 29291 - DNA, 24 bp, Artificial sequence
  SiRNA target sequence
accaccttcttcgttttcaataat

SEQ ID NO: 29292 - DNA, 24 bp, Artificial sequence
  SiRNA target sequence
ccaccttcttcgttttcaataatt

SEQ ID NO: 29293 - DNA, 24 bp, Artificial sequence
  SiRNA target sequence
caccttcttcgttttcaataattt

SEQ ID NO: 29294 - DNA, 24 bp, Artificial sequence
  SiRNA target sequence
accttcttcgttttcaataatttg

SEQ ID NO: 29295 - DNA, 24 bp, Artificial sequence
  SiRNA target sequence
ccttcttcgttttcaataatttgt

SEQ ID NO: 29296 - DNA, 24 bp, Artificial sequence
  SiRNA target sequence
cttcttcgttttcaataatttgtg

SEQ ID NO: 29297 - DNA, 24 bp, Artificial sequence
  SiRNA target sequence
ttcttcgttttcaataatttgtgg

SEQ ID NO: 29298 - DNA, 24 bp, Artificial sequence
  SiRNA target sequence
tcttcgttttcaataatttgtggg

SEQ ID NO: 29299 - DNA, 24 bp, Artificial sequence
  SiRNA target sequence
cttcgttttcaataatttgtggga

SEQ ID NO: 29300 - DNA, 24 bp, Artificial sequence
  SiRNA target sequence
ttcgttttcaataatttgtgggat

SEQ ID NO: 29301 - DNA, 24 bp, Artificial sequence
  SiRNA target sequence
tcgttttcaataatttgtgggata

SEQ ID NO: 29302 - DNA, 24 bp, Artificial sequence
  SiRNA target sequence
cgttttcaataatttgtgggatat

SEQ ID NO: 29303 - DNA, 24 bp, Artificial sequence
  SiRNA target sequence
gttttcaataatttgtgggatatt

SEQ ID NO: 29304 - DNA, 24 bp, Artificial sequence
  SiRNA target sequence
ttttcaataatttgtgggatattg

SEQ ID NO: 29305 - DNA, 24 bp, Artificial sequence
  SiRNA target sequence
tttcaataatttgtgggatattgt

SEQ ID NO: 29306 - DNA, 24 bp, Artificial sequence
  SiRNA target sequence
ttcaataatttgtgggatattgtt

SEQ ID NO: 29307 - DNA, 24 bp, Artificial sequence
  SiRNA target sequence
tcaataatttgtgggatattgtta

SEQ ID NO: 29308 - DNA, 24 bp, Artificial sequence
  SiRNA target sequence
caataatttgtgggatattgttat

SEQ ID NO: 29309 - DNA, 24 bp, Artificial sequence
  SiRNA target sequence
aataatttgtgggatattgttatg

SEQ ID NO: 29310 - DNA, 24 bp, Artificial sequence
  SiRNA target sequence
ataatttgtgggatattgttatgt

SEQ ID NO: 29311 - DNA, 24 bp, Artificial sequence
  SiRNA target sequence
taatttgtgggatattgttatgta

SEQ ID NO: 29312 - DNA, 24 bp, Artificial sequence
  SiRNA target sequence
aatttgtgggatattgttatgtat

SEQ ID NO: 29313 - DNA, 24 bp, Artificial sequence
  SiRNA target sequence
atttgtgggatattgttatgtata

SEQ ID NO: 29314 - DNA, 24 bp, Artificial sequence
  SiRNA target sequence
tttgtgggatattgttatgtataa

SEQ ID NO: 29315 - DNA, 24 bp, Artificial sequence
  SiRNA target sequence
ttgtgggatattgttatgtataag

SEQ ID NO: 29316 - DNA, 24 bp, Artificial sequence
  SiRNA target sequence
tgtgggatattgttatgtataaga

SEQ ID NO: 29317 - DNA, 24 bp, Artificial sequence
  SiRNA target sequence
gtgggatattgttatgtataagag

SEQ ID NO: 29318 - DNA, 24 bp, Artificial sequence
  SiRNA target sequence
tgggatattgttatgtataagaga

SEQ ID NO: 29319 - DNA, 24 bp, Artificial sequence
  SiRNA target sequence
gggatattgttatgtataagagac

SEQ ID NO: 29320 - DNA, 24 bp, Artificial sequence
  SiRNA target sequence
ggatattgttatgtataagagaca

SEQ ID NO: 29321 - DNA, 24 bp, Artificial sequence
  SiRNA target sequence
gatattgttatgtataagagacac

SEQ ID NO: 29322 - DNA, 24 bp, Artificial sequence
  SiRNA target sequence
atattgttatgtataagagacaca

SEQ ID NO: 29323 - DNA, 24 bp, Artificial sequence
  SiRNA target sequence
tattgttatgtataagagacacac

SEQ ID NO: 29324 - DNA, 24 bp, Artificial sequence
  SiRNA target sequence
attgttatgtataagagacacaca

SEQ ID NO: 29325 - DNA, 24 bp, Artificial sequence
  SiRNA target sequence
ttgttatgtataagagacacacaa

SEQ ID NO: 29326 - DNA, 24 bp, Artificial sequence
  SiRNA target sequence
tgttatgtataagagacacacaag

SEQ ID NO: 29327 - DNA, 24 bp, Artificial sequence
  SiRNA target sequence
gttatgtataagagacacacaaga

SEQ ID NO: 29328 - DNA, 24 bp, Artificial sequence
  SiRNA target sequence
ttatgtataagagacacacaagaa

SEQ ID NO: 29329 - DNA, 24 bp, Artificial sequence
  SiRNA target sequence
tatgtataagagacacacaagaat

SEQ ID NO: 29330 - DNA, 24 bp, Artificial sequence
  SiRNA target sequence
atgtataagagacacacaagaatt

SEQ ID NO: 29331 - DNA, 24 bp, Artificial sequence
  SiRNA target sequence
tgtataagagacacacaagaattg

SEQ ID NO: 29332 - DNA, 24 bp, Artificial sequence
  SiRNA target sequence
gtataagagacacacaagaattgg

SEQ ID NO: 29333 - DNA, 24 bp, Artificial sequence
  SiRNA target sequence
tataagagacacacaagaattggt

SEQ ID NO: 29334 - DNA, 24 bp, Artificial sequence
  SiRNA target sequence
ataagagacacacaagaattggtt

SEQ ID NO: 29335 - DNA, 24 bp, Artificial sequence
  SiRNA target sequence
taagagacacacaagaattggttg

SEQ ID NO: 29336 - DNA, 24 bp, Artificial sequence
  SiRNA target sequence
aagagacacacaagaattggttgt

SEQ ID NO: 29337 - DNA, 24 bp, Artificial sequence
  SiRNA target sequence
agagacacacaagaattggttgtt

SEQ ID NO: 29338 - DNA, 24 bp, Artificial sequence
  SiRNA target sequence
gagacacacaagaattggttgttc

SEQ ID NO: 29339 - DNA, 24 bp, Artificial sequence
  SiRNA target sequence
agacacacaagaattggttgttcc

SEQ ID NO: 29340 - DNA, 24 bp, Artificial sequence
  SiRNA target sequence
gacacacaagaattggttgttcct

SEQ ID NO: 29341 - DNA, 24 bp, Artificial sequence
  SiRNA target sequence
acacacaagaattggttgttccta

SEQ ID NO: 29342 - DNA, 24 bp, Artificial sequence
  SiRNA target sequence
cacacaagaattggttgttcctag

SEQ ID NO: 29343 - DNA, 24 bp, Artificial sequence
  SiRNA target sequence
acacaagaattggttgttcctaga

SEQ ID NO: 29344 - DNA, 24 bp, Artificial sequence
  SiRNA target sequence
cacaagaattggttgttcctagat

SEQ ID NO: 29345 - DNA, 24 bp, Artificial sequence
  SiRNA target sequence
acaagaattggttgttcctagatc

SEQ ID NO: 29346 - DNA, 24 bp, Artificial sequence
  SiRNA target sequence
caagaattggttgttcctagatca

SEQ ID NO: 29347 - DNA, 24 bp, Artificial sequence
  SiRNA target sequence
aagaattggttgttcctagatcaa

SEQ ID NO: 29348 - DNA, 24 bp, Artificial sequence
  SiRNA target sequence
agaattggttgttcctagatcaat

SEQ ID NO: 29349 - DNA, 24 bp, Artificial sequence
  SiRNA target sequence
gaattggttgttcctagatcaatt

SEQ ID NO: 29350 - DNA, 24 bp, Artificial sequence
  SiRNA target sequence
aattggttgttcctagatcaattc

SEQ ID NO: 29351 - DNA, 24 bp, Artificial sequence
  SiRNA target sequence
attggttgttcctagatcaattcc

SEQ ID NO: 29352 - DNA, 24 bp, Artificial sequence
  SiRNA target sequence
ttggttgttcctagatcaattcct

SEQ ID NO: 29353 - DNA, 24 bp, Artificial sequence
  SiRNA target sequence
tggttgttcctagatcaattccta

SEQ ID NO: 29354 - DNA, 24 bp, Artificial sequence
  SiRNA target sequence
ggttgttcctagatcaattcctat

SEQ ID NO: 29355 - DNA, 24 bp, Artificial sequence
  SiRNA target sequence
gttgttcctagatcaattcctatt

SEQ ID NO: 29356 - DNA, 24 bp, Artificial sequence
  SiRNA target sequence
ttgttcctagatcaattcctatta

SEQ ID NO: 29357 - DNA, 24 bp, Artificial sequence
  SiRNA target sequence
tgttcctagatcaattcctattat

SEQ ID NO: 29358 - DNA, 24 bp, Artificial sequence
  SiRNA target sequence
gttcctagatcaattcctattatt

SEQ ID NO: 29359 - DNA, 24 bp, Artificial sequence
  SiRNA target sequence
ttcctagatcaattcctattattt

SEQ ID NO: 29360 - DNA, 24 bp, Artificial sequence
  SiRNA target sequence
tcctagatcaattcctattatttt

SEQ ID NO: 29361 - DNA, 24 bp, Artificial sequence
  SiRNA target sequence
cctagatcaattcctattatttta

SEQ ID NO: 29362 - DNA, 24 bp, Artificial sequence
  SiRNA target sequence
ctagatcaattcctattattttag

SEQ ID NO: 29363 - DNA, 24 bp, Artificial sequence
  SiRNA target sequence
tagatcaattcctattattttaga

SEQ ID NO: 29364 - DNA, 24 bp, Artificial sequence
  SiRNA target sequence
agatcaattcctattattttagag

SEQ ID NO: 29365 - DNA, 24 bp, Artificial sequence
  SiRNA target sequence
gatcaattcctattattttagagc

SEQ ID NO: 29366 - DNA, 24 bp, Artificial sequence
  SiRNA target sequence
atcaattcctattattttagagct

SEQ ID NO: 29367 - DNA, 24 bp, Artificial sequence
  SiRNA target sequence
tcaattcctattattttagagcta

SEQ ID NO: 29368 - DNA, 24 bp, Artificial sequence
  SiRNA target sequence
caattcctattattttagagctaa

SEQ ID NO: 29369 - DNA, 24 bp, Artificial sequence
  SiRNA target sequence
aattcctattattttagagctaat

SEQ ID NO: 29370 - DNA, 24 bp, Artificial sequence
  SiRNA target sequence
attcctattattttagagctaatt

SEQ ID NO: 29371 - DNA, 24 bp, Artificial sequence
  SiRNA target sequence
ttcctattattttagagctaattt

SEQ ID NO: 29372 - DNA, 24 bp, Artificial sequence
  SiRNA target sequence
tcctattattttagagctaatttc

SEQ ID NO: 29373 - DNA, 24 bp, Artificial sequence
  SiRNA target sequence
cctattattttagagctaatttct

SEQ ID NO: 29374 - DNA, 24 bp, Artificial sequence
  SiRNA target sequence
ctattattttagagctaatttctt

SEQ ID NO: 29375 - DNA, 24 bp, Artificial sequence
  SiRNA target sequence
tattattttagagctaatttcttc

SEQ ID NO: 29376 - DNA, 24 bp, Artificial sequence
  SiRNA target sequence
attattttagagctaatttcttct

SEQ ID NO: 29377 - DNA, 24 bp, Artificial sequence
  SiRNA target sequence
ttattttagagctaatttcttctt

SEQ ID NO: 29378 - DNA, 24 bp, Artificial sequence
  SiRNA target sequence
tattttagagctaatttcttcttt

SEQ ID NO: 29379 - DNA, 24 bp, Artificial sequence
  SiRNA target sequence
attttagagctaatttcttcttta

SEQ ID NO: 29380 - DNA, 24 bp, Artificial sequence
  SiRNA target sequence
ttttagagctaatttcttctttag

SEQ ID NO: 29381 - DNA, 24 bp, Artificial sequence
  SiRNA target sequence
tttagagctaatttcttctttaga

SEQ ID NO: 29382 - DNA, 24 bp, Artificial sequence
  SiRNA target sequence
ttagagctaatttcttctttagac

SEQ ID NO: 29383 - DNA, 24 bp, Artificial sequence
  SiRNA target sequence
tagagctaatttcttctttagaca

SEQ ID NO: 29384 - DNA, 24 bp, Artificial sequence
  SiRNA target sequence
agagctaatttcttctttagacat

SEQ ID NO: 29385 - DNA, 25 bp, Artificial sequence
  SiRNA target sequence
ttaagaatttttcaatatttttttt

SEQ ID NO: 29386 - DNA, 25 bp, Artificial sequence
  SiRNA target sequence
taagaatttttcaatattttttttg

SEQ ID NO: 29387 - DNA, 25 bp, Artificial sequence
  SiRNA target sequence
aagaatttttcaatattttttttgc

SEQ ID NO: 29388 - DNA, 25 bp, Artificial sequence
  SiRNA target sequence
agaatttttcaatattttttttgct

SEQ ID NO: 29389 - DNA, 25 bp, Artificial sequence
  SiRNA target sequence
gaatttttcaatattttttttgctt

SEQ ID NO: 29390 - DNA, 25 bp, Artificial sequence
  SiRNA target sequence
aatttttcaatattttttttgcttg

SEQ ID NO: 29391 - DNA, 25 bp, Artificial sequence
  SiRNA target sequence
atttttcaatattttttttgcttgt

SEQ ID NO: 29392 - DNA, 25 bp, Artificial sequence
  SiRNA target sequence
tttttcaatattttttttgcttgtt

SEQ ID NO: 29393 - DNA, 25 bp, Artificial sequence
  SiRNA target sequence
ttttcaatattttttttgcttgttc

SEQ ID NO: 29394 - DNA, 25 bp, Artificial sequence
  SiRNA target sequence
tttcaatattttttttgcttgttct

SEQ ID NO: 29395 - DNA, 25 bp, Artificial sequence
  SiRNA target sequence
ttcaatattttttttgcttgttcta

SEQ ID NO: 29396 - DNA, 25 bp, Artificial sequence
  SiRNA target sequence
tcaatattttttttgcttgttctaa

SEQ ID NO: 29397 - DNA, 25 bp, Artificial sequence
  SiRNA target sequence
caatattttttttgcttgttctaag

SEQ ID NO: 29398 - DNA, 25 bp, Artificial sequence
  SiRNA target sequence
aatattttttttgcttgttctaagt

SEQ ID NO: 29399 - DNA, 25 bp, Artificial sequence
  SiRNA target sequence
atattttttttgcttgttctaagtc

SEQ ID NO: 29400 - DNA, 25 bp, Artificial sequence
  SiRNA target sequence
tattttttttgcttgttctaagtca

SEQ ID NO: 29401 - DNA, 25 bp, Artificial sequence
  SiRNA target sequence
attttttttgcttgttctaagtcat

SEQ ID NO: 29402 - DNA, 25 bp, Artificial sequence
  SiRNA target sequence
ttttttttgcttgttctaagtcata

SEQ ID NO: 29403 - DNA, 25 bp, Artificial sequence
  SiRNA target sequence
tttttttgcttgttctaagtcataa

SEQ ID NO: 29404 - DNA, 25 bp, Artificial sequence
  SiRNA target sequence
ttttttgcttgttctaagtcataaa

SEQ ID NO: 29405 - DNA, 25 bp, Artificial sequence
  SiRNA target sequence
tttttgcttgttctaagtcataaat

SEQ ID NO: 29406 - DNA, 25 bp, Artificial sequence
  SiRNA target sequence
ttttgcttgttctaagtcataaatt

SEQ ID NO: 29407 - DNA, 25 bp, Artificial sequence
  SiRNA target sequence
tttgcttgttctaagtcataaattt

SEQ ID NO: 29408 - DNA, 25 bp, Artificial sequence
  SiRNA target sequence
ttgcttgttctaagtcataaatttt

SEQ ID NO: 29409 - DNA, 25 bp, Artificial sequence
  SiRNA target sequence
tgcttgttctaagtcataaattttt

SEQ ID NO: 29410 - DNA, 25 bp, Artificial sequence
  SiRNA target sequence
gcttgttctaagtcataaatttttt

SEQ ID NO: 29411 - DNA, 25 bp, Artificial sequence
  SiRNA target sequence
cttgttctaagtcataaattttttt

SEQ ID NO: 29412 - DNA, 25 bp, Artificial sequence
  SiRNA target sequence
ttgttctaagtcataaattttttta

SEQ ID NO: 29413 - DNA, 25 bp, Artificial sequence
  SiRNA target sequence
tgttctaagtcataaatttttttag

SEQ ID NO: 29414 - DNA, 25 bp, Artificial sequence
  SiRNA target sequence
gttctaagtcataaatttttttagt

SEQ ID NO: 29415 - DNA, 25 bp, Artificial sequence
  SiRNA target sequence
ttctaagtcataaatttttttagtc

SEQ ID NO: 29416 - DNA, 25 bp, Artificial sequence
  SiRNA target sequence
tctaagtcataaatttttttagtca

SEQ ID NO: 29417 - DNA, 25 bp, Artificial sequence
  SiRNA target sequence
ctaagtcataaatttttttagtcaa

SEQ ID NO: 29418 - DNA, 25 bp, Artificial sequence
  SiRNA target sequence
taagtcataaatttttttagtcaaa

SEQ ID NO: 29419 - DNA, 25 bp, Artificial sequence
  SiRNA target sequence
aagtcataaatttttttagtcaaat

SEQ ID NO: 29420 - DNA, 25 bp, Artificial sequence
  SiRNA target sequence
agtcataaatttttttagtcaaata

SEQ ID NO: 29421 - DNA, 25 bp, Artificial sequence
  SiRNA target sequence
gtcataaatttttttagtcaaatat

SEQ ID NO: 29422 - DNA, 25 bp, Artificial sequence
  SiRNA target sequence
tcataaatttttttagtcaaatatg

SEQ ID NO: 29423 - DNA, 25 bp, Artificial sequence
  SiRNA target sequence
cataaatttttttagtcaaatatga

SEQ ID NO: 29424 - DNA, 25 bp, Artificial sequence
  SiRNA target sequence
ataaatttttttagtcaaatatgac

SEQ ID NO: 29425 - DNA, 25 bp, Artificial sequence
  SiRNA target sequence
taaatttttttagtcaaatatgact

SEQ ID NO: 29426 - DNA, 25 bp, Artificial sequence
  SiRNA target sequence
aaatttttttagtcaaatatgactt

SEQ ID NO: 29427 - DNA, 25 bp, Artificial sequence
  SiRNA target sequence
aatttttttagtcaaatatgacttt

SEQ ID NO: 29428 - DNA, 25 bp, Artificial sequence
  SiRNA target sequence
atttttttagtcaaatatgacttta

SEQ ID NO: 29429 - DNA, 25 bp, Artificial sequence
  SiRNA target sequence
tttttttagtcaaatatgactttaa

SEQ ID NO: 29430 - DNA, 25 bp, Artificial sequence
  SiRNA target sequence
ttttttagtcaaatatgactttaaa

SEQ ID NO: 29431 - DNA, 25 bp, Artificial sequence
  SiRNA target sequence
tttttagtcaaatatgactttaaaa

SEQ ID NO: 29432 - DNA, 25 bp, Artificial sequence
  SiRNA target sequence
ttttagtcaaatatgactttaaaat

SEQ ID NO: 29433 - DNA, 25 bp, Artificial sequence
  SiRNA target sequence
tttagtcaaatatgactttaaaatc

SEQ ID NO: 29434 - DNA, 25 bp, Artificial sequence
  SiRNA target sequence
ttagtcaaatatgactttaaaatct

SEQ ID NO: 29435 - DNA, 25 bp, Artificial sequence
  SiRNA target sequence
tagtcaaatatgactttaaaatctc

SEQ ID NO: 29436 - DNA, 25 bp, Artificial sequence
  SiRNA target sequence
agtcaaatatgactttaaaatctct

SEQ ID NO: 29437 - DNA, 25 bp, Artificial sequence
  SiRNA target sequence
gtcaaatatgactttaaaatctctt

SEQ ID NO: 29438 - DNA, 25 bp, Artificial sequence
  SiRNA target sequence
tcaaatatgactttaaaatctcttt

SEQ ID NO: 29439 - DNA, 25 bp, Artificial sequence
  SiRNA target sequence
caaatatgactttaaaatctctttt

SEQ ID NO: 29440 - DNA, 25 bp, Artificial sequence
  SiRNA target sequence
aaatatgactttaaaatctcttttg

SEQ ID NO: 29441 - DNA, 25 bp, Artificial sequence
  SiRNA target sequence
aatatgactttaaaatctcttttgt

SEQ ID NO: 29442 - DNA, 25 bp, Artificial sequence
  SiRNA target sequence
atatgactttaaaatctcttttgtt

SEQ ID NO: 29443 - DNA, 25 bp, Artificial sequence
  SiRNA target sequence
tatgactttaaaatctcttttgttt

SEQ ID NO: 29444 - DNA, 25 bp, Artificial sequence
  SiRNA target sequence
atgactttaaaatctcttttgtttc

SEQ ID NO: 29445 - DNA, 25 bp, Artificial sequence
  SiRNA target sequence
tgactttaaaatctcttttgtttca

SEQ ID NO: 29446 - DNA, 25 bp, Artificial sequence
  SiRNA target sequence
gactttaaaatctcttttgtttcat

SEQ ID NO: 29447 - DNA, 25 bp, Artificial sequence
  SiRNA target sequence
actttaaaatctcttttgtttcatc

SEQ ID NO: 29448 - DNA, 25 bp, Artificial sequence
  SiRNA target sequence
ctttaaaatctcttttgtttcatct

SEQ ID NO: 29449 - DNA, 25 bp, Artificial sequence
  SiRNA target sequence
tttaaaatctcttttgtttcatctg

SEQ ID NO: 29450 - DNA, 25 bp, Artificial sequence
  SiRNA target sequence
ttaaaatctcttttgtttcatctgt

SEQ ID NO: 29451 - DNA, 25 bp, Artificial sequence
  SiRNA target sequence
taaaatctcttttgtttcatctgtt

SEQ ID NO: 29452 - DNA, 25 bp, Artificial sequence
  SiRNA target sequence
aaaatctcttttgtttcatctgtta

SEQ ID NO: 29453 - DNA, 25 bp, Artificial sequence
  SiRNA target sequence
aaatctcttttgtttcatctgttac

SEQ ID NO: 29454 - DNA, 25 bp, Artificial sequence
  SiRNA target sequence
aatctcttttgtttcatctgttact

SEQ ID NO: 29455 - DNA, 25 bp, Artificial sequence
  SiRNA target sequence
atctcttttgtttcatctgttactt

SEQ ID NO: 29456 - DNA, 25 bp, Artificial sequence
  SiRNA target sequence
tctcttttgtttcatctgttacttg

SEQ ID NO: 29457 - DNA, 25 bp, Artificial sequence
  SiRNA target sequence
ctcttttgtttcatctgttacttgt

SEQ ID NO: 29458 - DNA, 25 bp, Artificial sequence
  SiRNA target sequence
tcttttgtttcatctgttacttgtt

SEQ ID NO: 29459 - DNA, 25 bp, Artificial sequence
  SiRNA target sequence
cttttgtttcatctgttacttgttt

SEQ ID NO: 29460 - DNA, 25 bp, Artificial sequence
  SiRNA target sequence
ttttgtttcatctgttacttgtttg

SEQ ID NO: 29461 - DNA, 25 bp, Artificial sequence
  SiRNA target sequence
tttgtttcatctgttacttgtttgt

SEQ ID NO: 29462 - DNA, 25 bp, Artificial sequence
  SiRNA target sequence
ttgtttcatctgttacttgtttgta

SEQ ID NO: 29463 - DNA, 25 bp, Artificial sequence
  SiRNA target sequence
tgtttcatctgttacttgtttgtac

SEQ ID NO: 29464 - DNA, 25 bp, Artificial sequence
  SiRNA target sequence
gtttcatctgttacttgtttgtact

SEQ ID NO: 29465 - DNA, 25 bp, Artificial sequence
  SiRNA target sequence
tttcatctgttacttgtttgtactt

SEQ ID NO: 29466 - DNA, 25 bp, Artificial sequence
  SiRNA target sequence
ttcatctgttacttgtttgtacttt

SEQ ID NO: 29467 - DNA, 25 bp, Artificial sequence
  SiRNA target sequence
tcatctgttacttgtttgtacttta

SEQ ID NO: 29468 - DNA, 25 bp, Artificial sequence
  SiRNA target sequence
catctgttacttgtttgtactttaa

SEQ ID NO: 29469 - DNA, 25 bp, Artificial sequence
  SiRNA target sequence
atctgttacttgtttgtactttaaa

SEQ ID NO: 29470 - DNA, 25 bp, Artificial sequence
  SiRNA target sequence
tctgttacttgtttgtactttaaaa

SEQ ID NO: 29471 - DNA, 25 bp, Artificial sequence
  SiRNA target sequence
ctgttacttgtttgtactttaaaaa

SEQ ID NO: 29472 - DNA, 25 bp, Artificial sequence
  SiRNA target sequence
tgttacttgtttgtactttaaaaat

SEQ ID NO: 29473 - DNA, 25 bp, Artificial sequence
  SiRNA target sequence
gttacttgtttgtactttaaaaatt

SEQ ID NO: 29474 - DNA, 25 bp, Artificial sequence
  SiRNA target sequence
ttacttgtttgtactttaaaaattg

SEQ ID NO: 29475 - DNA, 25 bp, Artificial sequence
  SiRNA target sequence
tacttgtttgtactttaaaaattgt

SEQ ID NO: 29476 - DNA, 25 bp, Artificial sequence
  SiRNA target sequence
acttgtttgtactttaaaaattgtt

SEQ ID NO: 29477 - DNA, 25 bp, Artificial sequence
  SiRNA target sequence
cttgtttgtactttaaaaattgttg

SEQ ID NO: 29478 - DNA, 25 bp, Artificial sequence
  SiRNA target sequence
ttgtttgtactttaaaaattgttga

SEQ ID NO: 29479 - DNA, 25 bp, Artificial sequence
  SiRNA target sequence
tgtttgtactttaaaaattgttgaa

SEQ ID NO: 29480 - DNA, 25 bp, Artificial sequence
  SiRNA target sequence
gtttgtactttaaaaattgttgaat

SEQ ID NO: 29481 - DNA, 25 bp, Artificial sequence
  SiRNA target sequence
tttgtactttaaaaattgttgaatt

SEQ ID NO: 29482 - DNA, 25 bp, Artificial sequence
  SiRNA target sequence
ttgtactttaaaaattgttgaattt

SEQ ID NO: 29483 - DNA, 25 bp, Artificial sequence
  SiRNA target sequence
tgtactttaaaaattgttgaatttc

SEQ ID NO: 29484 - DNA, 25 bp, Artificial sequence
  SiRNA target sequence
gtactttaaaaattgttgaatttca

SEQ ID NO: 29485 - DNA, 25 bp, Artificial sequence
  SiRNA target sequence
tactttaaaaattgttgaatttcaa

SEQ ID NO: 29486 - DNA, 25 bp, Artificial sequence
  SiRNA target sequence
actttaaaaattgttgaatttcaat

SEQ ID NO: 29487 - DNA, 25 bp, Artificial sequence
  SiRNA target sequence
ctttaaaaattgttgaatttcaatt

SEQ ID NO: 29488 - DNA, 25 bp, Artificial sequence
  SiRNA target sequence
tttaaaaattgttgaatttcaattt

SEQ ID NO: 29489 - DNA, 25 bp, Artificial sequence
  SiRNA target sequence
ttaaaaattgttgaatttcaatttt

SEQ ID NO: 29490 - DNA, 25 bp, Artificial sequence
  SiRNA target sequence
taaaaattgttgaatttcaatttta

SEQ ID NO: 29491 - DNA, 25 bp, Artificial sequence
  SiRNA target sequence
aaaaattgttgaatttcaattttaa

SEQ ID NO: 29492 - DNA, 25 bp, Artificial sequence
  SiRNA target sequence
aaaattgttgaatttcaattttaaa

SEQ ID NO: 29493 - DNA, 25 bp, Artificial sequence
  SiRNA target sequence
aaattgttgaatttcaattttaaat

SEQ ID NO: 29494 - DNA, 25 bp, Artificial sequence
  SiRNA target sequence
aattgttgaatttcaattttaaatt

SEQ ID NO: 29495 - DNA, 25 bp, Artificial sequence
  SiRNA target sequence
attgttgaatttcaattttaaattc

SEQ ID NO: 29496 - DNA, 25 bp, Artificial sequence
  SiRNA target sequence
ttgttgaatttcaattttaaattcg

SEQ ID NO: 29497 - DNA, 25 bp, Artificial sequence
  SiRNA target sequence
tgttgaatttcaattttaaattcgg

SEQ ID NO: 29498 - DNA, 25 bp, Artificial sequence
  SiRNA target sequence
gttgaatttcaattttaaattcggc

SEQ ID NO: 29499 - DNA, 25 bp, Artificial sequence
  SiRNA target sequence
ttgaatttcaattttaaattcggca

SEQ ID NO: 29500 - DNA, 25 bp, Artificial sequence
  SiRNA target sequence
tgaatttcaattttaaattcggcac

SEQ ID NO: 29501 - DNA, 25 bp, Artificial sequence
  SiRNA target sequence
gaatttcaattttaaattcggcaca

SEQ ID NO: 29502 - DNA, 25 bp, Artificial sequence
  SiRNA target sequence
aatttcaattttaaattcggcacaa

SEQ ID NO: 29503 - DNA, 25 bp, Artificial sequence
  SiRNA target sequence
atttcaattttaaattcggcacaat

SEQ ID NO: 29504 - DNA, 25 bp, Artificial sequence
  SiRNA target sequence
tttcaattttaaattcggcacaatt

SEQ ID NO: 29505 - DNA, 25 bp, Artificial sequence
  SiRNA target sequence
ttcaattttaaattcggcacaattt

SEQ ID NO: 29506 - DNA, 25 bp, Artificial sequence
  SiRNA target sequence
tcaattttaaattcggcacaatttt

SEQ ID NO: 29507 - DNA, 25 bp, Artificial sequence
  SiRNA target sequence
caattttaaattcggcacaattttt

SEQ ID NO: 29508 - DNA, 25 bp, Artificial sequence
  SiRNA target sequence
aattttaaattcggcacaatttttt

SEQ ID NO: 29509 - DNA, 25 bp, Artificial sequence
  SiRNA target sequence
attttaaattcggcacaattttttt

SEQ ID NO: 29510 - DNA, 25 bp, Artificial sequence
  SiRNA target sequence
ttttaaattcggcacaatttttttc

SEQ ID NO: 29511 - DNA, 25 bp, Artificial sequence
  SiRNA target sequence
tttaaattcggcacaatttttttca

SEQ ID NO: 29512 - DNA, 25 bp, Artificial sequence
  SiRNA target sequence
ttaaattcggcacaatttttttcaa

SEQ ID NO: 29513 - DNA, 25 bp, Artificial sequence
  SiRNA target sequence
taaattcggcacaatttttttcaat

SEQ ID NO: 29514 - DNA, 25 bp, Artificial sequence
  SiRNA target sequence
aaattcggcacaatttttttcaatt

SEQ ID NO: 29515 - DNA, 25 bp, Artificial sequence
  SiRNA target sequence
aattcggcacaatttttttcaattt

SEQ ID NO: 29516 - DNA, 25 bp, Artificial sequence
  SiRNA target sequence
attcggcacaatttttttcaatttc

SEQ ID NO: 29517 - DNA, 25 bp, Artificial sequence
  SiRNA target sequence
ttcggcacaatttttttcaatttca

SEQ ID NO: 29518 - DNA, 25 bp, Artificial sequence
  SiRNA target sequence
tcggcacaatttttttcaatttcat

SEQ ID NO: 29519 - DNA, 25 bp, Artificial sequence
  SiRNA target sequence
cggcacaatttttttcaatttcatc

SEQ ID NO: 29520 - DNA, 25 bp, Artificial sequence
  SiRNA target sequence
ggcacaatttttttcaatttcatct

SEQ ID NO: 29521 - DNA, 25 bp, Artificial sequence
  SiRNA target sequence
gcacaatttttttcaatttcatctt

SEQ ID NO: 29522 - DNA, 25 bp, Artificial sequence
  SiRNA target sequence
cacaatttttttcaatttcatcttt

SEQ ID NO: 29523 - DNA, 25 bp, Artificial sequence
  SiRNA target sequence
acaatttttttcaatttcatctttt

SEQ ID NO: 29524 - DNA, 25 bp, Artificial sequence
  SiRNA target sequence
caatttttttcaatttcatcttttt

SEQ ID NO: 29525 - DNA, 25 bp, Artificial sequence
  SiRNA target sequence
aatttttttcaatttcatctttttt

SEQ ID NO: 29526 - DNA, 25 bp, Artificial sequence
  SiRNA target sequence
atttttttcaatttcatcttttttc

SEQ ID NO: 29527 - DNA, 25 bp, Artificial sequence
  SiRNA target sequence
tttttttcaatttcatcttttttcg

SEQ ID NO: 29528 - DNA, 25 bp, Artificial sequence
  SiRNA target sequence
ttttttcaatttcatcttttttcga

SEQ ID NO: 29529 - DNA, 25 bp, Artificial sequence
  SiRNA target sequence
tttttcaatttcatcttttttcgaa

SEQ ID NO: 29530 - DNA, 25 bp, Artificial sequence
  SiRNA target sequence
ttttcaatttcatcttttttcgaat

SEQ ID NO: 29531 - DNA, 25 bp, Artificial sequence
  SiRNA target sequence
tttcaatttcatcttttttcgaatt

SEQ ID NO: 29532 - DNA, 25 bp, Artificial sequence
  SiRNA target sequence
ttcaatttcatcttttttcgaattt

SEQ ID NO: 29533 - DNA, 25 bp, Artificial sequence
  SiRNA target sequence
tcaatttcatcttttttcgaatttt

SEQ ID NO: 29534 - DNA, 25 bp, Artificial sequence
  SiRNA target sequence
caatttcatcttttttcgaattttc

SEQ ID NO: 29535 - DNA, 25 bp, Artificial sequence
  SiRNA target sequence
aatttcatcttttttcgaattttct

SEQ ID NO: 29536 - DNA, 25 bp, Artificial sequence
  SiRNA target sequence
atttcatcttttttcgaattttctt

SEQ ID NO: 29537 - DNA, 25 bp, Artificial sequence
  SiRNA target sequence
tttcatcttttttcgaattttcttc

SEQ ID NO: 29538 - DNA, 25 bp, Artificial sequence
  SiRNA target sequence
ttcatcttttttcgaattttcttcg

SEQ ID NO: 29539 - DNA, 25 bp, Artificial sequence
  SiRNA target sequence
tcatcttttttcgaattttcttcgg

SEQ ID NO: 29540 - DNA, 25 bp, Artificial sequence
  SiRNA target sequence
catcttttttcgaattttcttcggc

SEQ ID NO: 29541 - DNA, 25 bp, Artificial sequence
  SiRNA target sequence
atcttttttcgaattttcttcggct

SEQ ID NO: 29542 - DNA, 25 bp, Artificial sequence
  SiRNA target sequence
tcttttttcgaattttcttcggctt

SEQ ID NO: 29543 - DNA, 25 bp, Artificial sequence
  SiRNA target sequence
cttttttcgaattttcttcggcttc

SEQ ID NO: 29544 - DNA, 25 bp, Artificial sequence
  SiRNA target sequence
ttttttcgaattttcttcggcttct

SEQ ID NO: 29545 - DNA, 25 bp, Artificial sequence
  SiRNA target sequence
tttttcgaattttcttcggcttctc

SEQ ID NO: 29546 - DNA, 25 bp, Artificial sequence
  SiRNA target sequence
ttttcgaattttcttcggcttctcg

SEQ ID NO: 29547 - DNA, 25 bp, Artificial sequence
  SiRNA target sequence
tttcgaattttcttcggcttctcgt

SEQ ID NO: 29548 - DNA, 25 bp, Artificial sequence
  SiRNA target sequence
ttcgaattttcttcggcttctcgta

SEQ ID NO: 29549 - DNA, 25 bp, Artificial sequence
  SiRNA target sequence
tcgaattttcttcggcttctcgtat

SEQ ID NO: 29550 - DNA, 25 bp, Artificial sequence
  SiRNA target sequence
cgaattttcttcggcttctcgtatc

SEQ ID NO: 29551 - DNA, 25 bp, Artificial sequence
  SiRNA target sequence
gaattttcttcggcttctcgtatca

SEQ ID NO: 29552 - DNA, 25 bp, Artificial sequence
  SiRNA target sequence
aattttcttcggcttctcgtatcat

SEQ ID NO: 29553 - DNA, 25 bp, Artificial sequence
  SiRNA target sequence
attttcttcggcttctcgtatcatt

SEQ ID NO: 29554 - DNA, 25 bp, Artificial sequence
  SiRNA target sequence
ttttcttcggcttctcgtatcattt

SEQ ID NO: 29555 - DNA, 25 bp, Artificial sequence
  SiRNA target sequence
tttcttcggcttctcgtatcatttg

SEQ ID NO: 29556 - DNA, 25 bp, Artificial sequence
  SiRNA target sequence
ttcttcggcttctcgtatcatttgc

SEQ ID NO: 29557 - DNA, 25 bp, Artificial sequence
  SiRNA target sequence
tcttcggcttctcgtatcatttgcg

SEQ ID NO: 29558 - DNA, 25 bp, Artificial sequence
  SiRNA target sequence
cttcggcttctcgtatcatttgcga

SEQ ID NO: 29559 - DNA, 25 bp, Artificial sequence
  SiRNA target sequence
ttcggcttctcgtatcatttgcgaa

SEQ ID NO: 29560 - DNA, 25 bp, Artificial sequence
  SiRNA target sequence
tcggcttctcgtatcatttgcgaaa

SEQ ID NO: 29561 - DNA, 25 bp, Artificial sequence
  SiRNA target sequence
cggcttctcgtatcatttgcgaaat

SEQ ID NO: 29562 - DNA, 25 bp, Artificial sequence
  SiRNA target sequence
ggcttctcgtatcatttgcgaaatt

SEQ ID NO: 29563 - DNA, 25 bp, Artificial sequence
  SiRNA target sequence
gcttctcgtatcatttgcgaaattt

SEQ ID NO: 29564 - DNA, 25 bp, Artificial sequence
  SiRNA target sequence
cttctcgtatcatttgcgaaatttc

SEQ ID NO: 29565 - DNA, 25 bp, Artificial sequence
  SiRNA target sequence
ttctcgtatcatttgcgaaatttca

SEQ ID NO: 29566 - DNA, 25 bp, Artificial sequence
  SiRNA target sequence
tctcgtatcatttgcgaaatttcac

SEQ ID NO: 29567 - DNA, 25 bp, Artificial sequence
  SiRNA target sequence
ctcgtatcatttgcgaaatttcacc

SEQ ID NO: 29568 - DNA, 25 bp, Artificial sequence
  SiRNA target sequence
tcgtatcatttgcgaaatttcacct

SEQ ID NO: 29569 - DNA, 25 bp, Artificial sequence
  SiRNA target sequence
cgtatcatttgcgaaatttcacctt

SEQ ID NO: 29570 - DNA, 25 bp, Artificial sequence
  SiRNA target sequence
gtatcatttgcgaaatttcaccttc

SEQ ID NO: 29571 - DNA, 25 bp, Artificial sequence
  SiRNA target sequence
tatcatttgcgaaatttcaccttca

SEQ ID NO: 29572 - DNA, 25 bp, Artificial sequence
  SiRNA target sequence
atcatttgcgaaatttcaccttcat

SEQ ID NO: 29573 - DNA, 25 bp, Artificial sequence
  SiRNA target sequence
tcatttgcgaaatttcaccttcatt

SEQ ID NO: 29574 - DNA, 25 bp, Artificial sequence
  SiRNA target sequence
catttgcgaaatttcaccttcattt

SEQ ID NO: 29575 - DNA, 25 bp, Artificial sequence
  SiRNA target sequence
atttgcgaaatttcaccttcattta

SEQ ID NO: 29576 - DNA, 25 bp, Artificial sequence
  SiRNA target sequence
tttgcgaaatttcaccttcatttaa

SEQ ID NO: 29577 - DNA, 25 bp, Artificial sequence
  SiRNA target sequence
ttgcgaaatttcaccttcatttaat

SEQ ID NO: 29578 - DNA, 25 bp, Artificial sequence
  SiRNA target sequence
tgcgaaatttcaccttcatttaatc

SEQ ID NO: 29579 - DNA, 25 bp, Artificial sequence
  SiRNA target sequence
gcgaaatttcaccttcatttaatcc

SEQ ID NO: 29580 - DNA, 25 bp, Artificial sequence
  SiRNA target sequence
cgaaatttcaccttcatttaatcca

SEQ ID NO: 29581 - DNA, 25 bp, Artificial sequence
  SiRNA target sequence
gaaatttcaccttcatttaatccac

SEQ ID NO: 29582 - DNA, 25 bp, Artificial sequence
  SiRNA target sequence
aaatttcaccttcatttaatccact

SEQ ID NO: 29583 - DNA, 25 bp, Artificial sequence
  SiRNA target sequence
aatttcaccttcatttaatccactt

SEQ ID NO: 29584 - DNA, 25 bp, Artificial sequence
  SiRNA target sequence
atttcaccttcatttaatccacttg

SEQ ID NO: 29585 - DNA, 25 bp, Artificial sequence
  SiRNA target sequence
tttcaccttcatttaatccacttga

SEQ ID NO: 29586 - DNA, 25 bp, Artificial sequence
  SiRNA target sequence
ttcaccttcatttaatccacttgaa

SEQ ID NO: 29587 - DNA, 25 bp, Artificial sequence
  SiRNA target sequence
tcaccttcatttaatccacttgaag

SEQ ID NO: 29588 - DNA, 25 bp, Artificial sequence
  SiRNA target sequence
caccttcatttaatccacttgaagg

SEQ ID NO: 29589 - DNA, 25 bp, Artificial sequence
  SiRNA target sequence
accttcatttaatccacttgaaggc

SEQ ID NO: 29590 - DNA, 25 bp, Artificial sequence
  SiRNA target sequence
ccttcatttaatccacttgaaggca

SEQ ID NO: 29591 - DNA, 25 bp, Artificial sequence
  SiRNA target sequence
cttcatttaatccacttgaaggcac

SEQ ID NO: 29592 - DNA, 25 bp, Artificial sequence
  SiRNA target sequence
ttcatttaatccacttgaaggcaca

SEQ ID NO: 29593 - DNA, 25 bp, Artificial sequence
  SiRNA target sequence
tcatttaatccacttgaaggcacaa

SEQ ID NO: 29594 - DNA, 25 bp, Artificial sequence
  SiRNA target sequence
catttaatccacttgaaggcacaat

SEQ ID NO: 29595 - DNA, 25 bp, Artificial sequence
  SiRNA target sequence
atttaatccacttgaaggcacaatt

SEQ ID NO: 29596 - DNA, 25 bp, Artificial sequence
  SiRNA target sequence
tttaatccacttgaaggcacaattt

SEQ ID NO: 29597 - DNA, 25 bp, Artificial sequence
  SiRNA target sequence
ttaatccacttgaaggcacaatttc

SEQ ID NO: 29598 - DNA, 25 bp, Artificial sequence
  SiRNA target sequence
taatccacttgaaggcacaatttcg

SEQ ID NO: 29599 - DNA, 25 bp, Artificial sequence
  SiRNA target sequence
aatccacttgaaggcacaatttcga

SEQ ID NO: 29600 - DNA, 25 bp, Artificial sequence
  SiRNA target sequence
atccacttgaaggcacaatttcgat

SEQ ID NO: 29601 - DNA, 25 bp, Artificial sequence
  SiRNA target sequence
tccacttgaaggcacaatttcgatt

SEQ ID NO: 29602 - DNA, 25 bp, Artificial sequence
  SiRNA target sequence
ccacttgaaggcacaatttcgattt

SEQ ID NO: 29603 - DNA, 25 bp, Artificial sequence
  SiRNA target sequence
cacttgaaggcacaatttcgatttc

SEQ ID NO: 29604 - DNA, 25 bp, Artificial sequence
  SiRNA target sequence
acttgaaggcacaatttcgatttct

SEQ ID NO: 29605 - DNA, 25 bp, Artificial sequence
  SiRNA target sequence
cttgaaggcacaatttcgatttctt

SEQ ID NO: 29606 - DNA, 25 bp, Artificial sequence
  SiRNA target sequence
ttgaaggcacaatttcgatttcttg

SEQ ID NO: 29607 - DNA, 25 bp, Artificial sequence
  SiRNA target sequence
tgaaggcacaatttcgatttcttgc

SEQ ID NO: 29608 - DNA, 25 bp, Artificial sequence
  SiRNA target sequence
gaaggcacaatttcgatttcttgct

SEQ ID NO: 29609 - DNA, 25 bp, Artificial sequence
  SiRNA target sequence
aaggcacaatttcgatttcttgctt

SEQ ID NO: 29610 - DNA, 25 bp, Artificial sequence
  SiRNA target sequence
aggcacaatttcgatttcttgcttt

SEQ ID NO: 29611 - DNA, 25 bp, Artificial sequence
  SiRNA target sequence
ggcacaatttcgatttcttgctttt

SEQ ID NO: 29612 - DNA, 25 bp, Artificial sequence
  SiRNA target sequence
gcacaatttcgatttcttgcttttt

SEQ ID NO: 29613 - DNA, 25 bp, Artificial sequence
  SiRNA target sequence
cacaatttcgatttcttgctttttt

SEQ ID NO: 29614 - DNA, 25 bp, Artificial sequence
  SiRNA target sequence
acaatttcgatttcttgcttttttt

SEQ ID NO: 29615 - DNA, 25 bp, Artificial sequence
  SiRNA target sequence
caatttcgatttcttgctttttttt

SEQ ID NO: 29616 - DNA, 25 bp, Artificial sequence
  SiRNA target sequence
aatttcgatttcttgcttttttttc

SEQ ID NO: 29617 - DNA, 25 bp, Artificial sequence
  SiRNA target sequence
atttcgatttcttgcttttttttcg

SEQ ID NO: 29618 - DNA, 25 bp, Artificial sequence
  SiRNA target sequence
tttcgatttcttgcttttttttcgt

SEQ ID NO: 29619 - DNA, 25 bp, Artificial sequence
  SiRNA target sequence
ttcgatttcttgcttttttttcgtt

SEQ ID NO: 29620 - DNA, 25 bp, Artificial sequence
  SiRNA target sequence
tcgatttcttgcttttttttcgtta

SEQ ID NO: 29621 - DNA, 25 bp, Artificial sequence
  SiRNA target sequence
cgatttcttgcttttttttcgttat

SEQ ID NO: 29622 - DNA, 25 bp, Artificial sequence
  SiRNA target sequence
gatttcttgcttttttttcgttatc

SEQ ID NO: 29623 - DNA, 25 bp, Artificial sequence
  SiRNA target sequence
atttcttgcttttttttcgttatcc

SEQ ID NO: 29624 - DNA, 25 bp, Artificial sequence
  SiRNA target sequence
tttcttgcttttttttcgttatccc

SEQ ID NO: 29625 - DNA, 25 bp, Artificial sequence
  SiRNA target sequence
ttcttgcttttttttcgttatcccg

SEQ ID NO: 29626 - DNA, 25 bp, Artificial sequence
  SiRNA target sequence
tcttgcttttttttcgttatcccgt

SEQ ID NO: 29627 - DNA, 25 bp, Artificial sequence
  SiRNA target sequence
cttgcttttttttcgttatcccgtc

SEQ ID NO: 29628 - DNA, 25 bp, Artificial sequence
  SiRNA target sequence
ttgcttttttttcgttatcccgtct

SEQ ID NO: 29629 - DNA, 25 bp, Artificial sequence
  SiRNA target sequence
tgcttttttttcgttatcccgtctt

SEQ ID NO: 29630 - DNA, 25 bp, Artificial sequence
  SiRNA target sequence
gcttttttttcgttatcccgtcttg

SEQ ID NO: 29631 - DNA, 25 bp, Artificial sequence
  SiRNA target sequence
cttttttttcgttatcccgtcttgc

SEQ ID NO: 29632 - DNA, 25 bp, Artificial sequence
  SiRNA target sequence
ttttttttcgttatcccgtcttgcg

SEQ ID NO: 29633 - DNA, 25 bp, Artificial sequence
  SiRNA target sequence
tttttttcgttatcccgtcttgcgc

SEQ ID NO: 29634 - DNA, 25 bp, Artificial sequence
  SiRNA target sequence
ttttttcgttatcccgtcttgcgca

SEQ ID NO: 29635 - DNA, 25 bp, Artificial sequence
  SiRNA target sequence
tttttcgttatcccgtcttgcgcag

SEQ ID NO: 29636 - DNA, 25 bp, Artificial sequence
  SiRNA target sequence
ttttcgttatcccgtcttgcgcaga

SEQ ID NO: 29637 - DNA, 25 bp, Artificial sequence
  SiRNA target sequence
tttcgttatcccgtcttgcgcagat

SEQ ID NO: 29638 - DNA, 25 bp, Artificial sequence
  SiRNA target sequence
ttcgttatcccgtcttgcgcagata

SEQ ID NO: 29639 - DNA, 25 bp, Artificial sequence
  SiRNA target sequence
tcgttatcccgtcttgcgcagatac

SEQ ID NO: 29640 - DNA, 25 bp, Artificial sequence
  SiRNA target sequence
cgttatcccgtcttgcgcagatact

SEQ ID NO: 29641 - DNA, 25 bp, Artificial sequence
  SiRNA target sequence
gttatcccgtcttgcgcagatactt

SEQ ID NO: 29642 - DNA, 25 bp, Artificial sequence
  SiRNA target sequence
ttatcccgtcttgcgcagatacttt

SEQ ID NO: 29643 - DNA, 25 bp, Artificial sequence
  SiRNA target sequence
tatcccgtcttgcgcagatactttg

SEQ ID NO: 29644 - DNA, 25 bp, Artificial sequence
  SiRNA target sequence
atcccgtcttgcgcagatactttgt

SEQ ID NO: 29645 - DNA, 25 bp, Artificial sequence
  SiRNA target sequence
tcccgtcttgcgcagatactttgta

SEQ ID NO: 29646 - DNA, 25 bp, Artificial sequence
  SiRNA target sequence
cccgtcttgcgcagatactttgtat

SEQ ID NO: 29647 - DNA, 25 bp, Artificial sequence
  SiRNA target sequence
ccgtcttgcgcagatactttgtata

SEQ ID NO: 29648 - DNA, 25 bp, Artificial sequence
  SiRNA target sequence
cgtcttgcgcagatactttgtatat

SEQ ID NO: 29649 - DNA, 25 bp, Artificial sequence
  SiRNA target sequence
gtcttgcgcagatactttgtatatt

SEQ ID NO: 29650 - DNA, 25 bp, Artificial sequence
  SiRNA target sequence
tcttgcgcagatactttgtatattc

SEQ ID NO: 29651 - DNA, 25 bp, Artificial sequence
  SiRNA target sequence
cttgcgcagatactttgtatattcc

SEQ ID NO: 29652 - DNA, 25 bp, Artificial sequence
  SiRNA target sequence
ttgcgcagatactttgtatattccg

SEQ ID NO: 29653 - DNA, 25 bp, Artificial sequence
  SiRNA target sequence
tgcgcagatactttgtatattccgt

SEQ ID NO: 29654 - DNA, 25 bp, Artificial sequence
  SiRNA target sequence
gcgcagatactttgtatattccgtt

SEQ ID NO: 29655 - DNA, 25 bp, Artificial sequence
  SiRNA target sequence
cgcagatactttgtatattccgtta

SEQ ID NO: 29656 - DNA, 25 bp, Artificial sequence
  SiRNA target sequence
gcagatactttgtatattccgttag

SEQ ID NO: 29657 - DNA, 25 bp, Artificial sequence
  SiRNA target sequence
cagatactttgtatattccgttagc

SEQ ID NO: 29658 - DNA, 25 bp, Artificial sequence
  SiRNA target sequence
agatactttgtatattccgttagca

SEQ ID NO: 29659 - DNA, 25 bp, Artificial sequence
  SiRNA target sequence
gatactttgtatattccgttagcat

SEQ ID NO: 29660 - DNA, 25 bp, Artificial sequence
  SiRNA target sequence
atactttgtatattccgttagcatc

SEQ ID NO: 29661 - DNA, 25 bp, Artificial sequence
  SiRNA target sequence
tactttgtatattccgttagcatcg

SEQ ID NO: 29662 - DNA, 25 bp, Artificial sequence
  SiRNA target sequence
actttgtatattccgttagcatcgg

SEQ ID NO: 29663 - DNA, 25 bp, Artificial sequence
  SiRNA target sequence
ctttgtatattccgttagcatcggc

SEQ ID NO: 29664 - DNA, 25 bp, Artificial sequence
  SiRNA target sequence
tttgtatattccgttagcatcggct

SEQ ID NO: 29665 - DNA, 25 bp, Artificial sequence
  SiRNA target sequence
ttgtatattccgttagcatcggctt

SEQ ID NO: 29666 - DNA, 25 bp, Artificial sequence
  SiRNA target sequence
tgtatattccgttagcatcggcttc

SEQ ID NO: 29667 - DNA, 25 bp, Artificial sequence
  SiRNA target sequence
gtatattccgttagcatcggcttca

SEQ ID NO: 29668 - DNA, 25 bp, Artificial sequence
  SiRNA target sequence
tatattccgttagcatcggcttcaa

SEQ ID NO: 29669 - DNA, 25 bp, Artificial sequence
  SiRNA target sequence
atattccgttagcatcggcttcaaa

SEQ ID NO: 29670 - DNA, 25 bp, Artificial sequence
  SiRNA target sequence
tattccgttagcatcggcttcaaat

SEQ ID NO: 29671 - DNA, 25 bp, Artificial sequence
  SiRNA target sequence
attccgttagcatcggcttcaaatg

SEQ ID NO: 29672 - DNA, 25 bp, Artificial sequence
  SiRNA target sequence
ttccgttagcatcggcttcaaatgt

SEQ ID NO: 29673 - DNA, 25 bp, Artificial sequence
  SiRNA target sequence
tccgttagcatcggcttcaaatgta

SEQ ID NO: 29674 - DNA, 25 bp, Artificial sequence
  SiRNA target sequence
ccgttagcatcggcttcaaatgtaa

SEQ ID NO: 29675 - DNA, 25 bp, Artificial sequence
  SiRNA target sequence
cgttagcatcggcttcaaatgtaac

SEQ ID NO: 29676 - DNA, 25 bp, Artificial sequence
  SiRNA target sequence
gttagcatcggcttcaaatgtaaca

SEQ ID NO: 29677 - DNA, 25 bp, Artificial sequence
  SiRNA target sequence
ttagcatcggcttcaaatgtaacat

SEQ ID NO: 29678 - DNA, 25 bp, Artificial sequence
  SiRNA target sequence
tagcatcggcttcaaatgtaacatc

SEQ ID NO: 29679 - DNA, 25 bp, Artificial sequence
  SiRNA target sequence
agcatcggcttcaaatgtaacatct

SEQ ID NO: 29680 - DNA, 25 bp, Artificial sequence
  SiRNA target sequence
gcatcggcttcaaatgtaacatcta

SEQ ID NO: 29681 - DNA, 25 bp, Artificial sequence
  SiRNA target sequence
catcggcttcaaatgtaacatctat

SEQ ID NO: 29682 - DNA, 25 bp, Artificial sequence
  SiRNA target sequence
atcggcttcaaatgtaacatctatc

SEQ ID NO: 29683 - DNA, 25 bp, Artificial sequence
  SiRNA target sequence
tcggcttcaaatgtaacatctatct

SEQ ID NO: 29684 - DNA, 25 bp, Artificial sequence
  SiRNA target sequence
cggcttcaaatgtaacatctatctt

SEQ ID NO: 29685 - DNA, 25 bp, Artificial sequence
  SiRNA target sequence
ggcttcaaatgtaacatctatcttt

SEQ ID NO: 29686 - DNA, 25 bp, Artificial sequence
  SiRNA target sequence
gcttcaaatgtaacatctatctttg

SEQ ID NO: 29687 - DNA, 25 bp, Artificial sequence
  SiRNA target sequence
cttcaaatgtaacatctatctttgg

SEQ ID NO: 29688 - DNA, 25 bp, Artificial sequence
  SiRNA target sequence
ttcaaatgtaacatctatctttgga

SEQ ID NO: 29689 - DNA, 25 bp, Artificial sequence
  SiRNA target sequence
tcaaatgtaacatctatctttggaa

SEQ ID NO: 29690 - DNA, 25 bp, Artificial sequence
  SiRNA target sequence
caaatgtaacatctatctttggaat

SEQ ID NO: 29691 - DNA, 25 bp, Artificial sequence
  SiRNA target sequence
aaatgtaacatctatctttggaata

SEQ ID NO: 29692 - DNA, 25 bp, Artificial sequence
  SiRNA target sequence
aatgtaacatctatctttggaatac

SEQ ID NO: 29693 - DNA, 25 bp, Artificial sequence
  SiRNA target sequence
atgtaacatctatctttggaatacc

SEQ ID NO: 29694 - DNA, 25 bp, Artificial sequence
  SiRNA target sequence
tgtaacatctatctttggaatacct

SEQ ID NO: 29695 - DNA, 25 bp, Artificial sequence
  SiRNA target sequence
gtaacatctatctttggaatacctg

SEQ ID NO: 29696 - DNA, 25 bp, Artificial sequence
  SiRNA target sequence
taacatctatctttggaatacctgc

SEQ ID NO: 29697 - DNA, 25 bp, Artificial sequence
  SiRNA target sequence
aacatctatctttggaatacctgca

SEQ ID NO: 29698 - DNA, 25 bp, Artificial sequence
  SiRNA target sequence
acatctatctttggaatacctgcag

SEQ ID NO: 29699 - DNA, 25 bp, Artificial sequence
  SiRNA target sequence
catctatctttggaatacctgcagg

SEQ ID NO: 29700 - DNA, 25 bp, Artificial sequence
  SiRNA target sequence
atctatctttggaatacctgcaggt

SEQ ID NO: 29701 - DNA, 25 bp, Artificial sequence
  SiRNA target sequence
tctatctttggaatacctgcaggtg

SEQ ID NO: 29702 - DNA, 25 bp, Artificial sequence
  SiRNA target sequence
ctatctttggaatacctgcaggtgc

SEQ ID NO: 29703 - DNA, 25 bp, Artificial sequence
  SiRNA target sequence
tatctttggaatacctgcaggtgct

SEQ ID NO: 29704 - DNA, 25 bp, Artificial sequence
  SiRNA target sequence
atctttggaatacctgcaggtgctt

SEQ ID NO: 29705 - DNA, 25 bp, Artificial sequence
  SiRNA target sequence
tctttggaatacctgcaggtgcttt

SEQ ID NO: 29706 - DNA, 25 bp, Artificial sequence
  SiRNA target sequence
ctttggaatacctgcaggtgcttta

SEQ ID NO: 29707 - DNA, 25 bp, Artificial sequence
  SiRNA target sequence
tttggaatacctgcaggtgctttag

SEQ ID NO: 29708 - DNA, 25 bp, Artificial sequence
  SiRNA target sequence
ttggaatacctgcaggtgctttagg

SEQ ID NO: 29709 - DNA, 25 bp, Artificial sequence
  SiRNA target sequence
tggaatacctgcaggtgctttagga

SEQ ID NO: 29710 - DNA, 25 bp, Artificial sequence
  SiRNA target sequence
ggaatacctgcaggtgctttaggaa

SEQ ID NO: 29711 - DNA, 25 bp, Artificial sequence
  SiRNA target sequence
gaatacctgcaggtgctttaggaat

SEQ ID NO: 29712 - DNA, 25 bp, Artificial sequence
  SiRNA target sequence
aatacctgcaggtgctttaggaatg

SEQ ID NO: 29713 - DNA, 25 bp, Artificial sequence
  SiRNA target sequence
atacctgcaggtgctttaggaatgt

SEQ ID NO: 29714 - DNA, 25 bp, Artificial sequence
  SiRNA target sequence
tacctgcaggtgctttaggaatgtt

SEQ ID NO: 29715 - DNA, 25 bp, Artificial sequence
  SiRNA target sequence
acctgcaggtgctttaggaatgttt

SEQ ID NO: 29716 - DNA, 25 bp, Artificial sequence
  SiRNA target sequence
cctgcaggtgctttaggaatgtttt

SEQ ID NO: 29717 - DNA, 25 bp, Artificial sequence
  SiRNA target sequence
ctgcaggtgctttaggaatgttttt

SEQ ID NO: 29718 - DNA, 25 bp, Artificial sequence
  SiRNA target sequence
tgcaggtgctttaggaatgtttttg

SEQ ID NO: 29719 - DNA, 25 bp, Artificial sequence
  SiRNA target sequence
gcaggtgctttaggaatgtttttga

SEQ ID NO: 29720 - DNA, 25 bp, Artificial sequence
  SiRNA target sequence
caggtgctttaggaatgtttttgag

SEQ ID NO: 29721 - DNA, 25 bp, Artificial sequence
  SiRNA target sequence
aggtgctttaggaatgtttttgagc

SEQ ID NO: 29722 - DNA, 25 bp, Artificial sequence
  SiRNA target sequence
ggtgctttaggaatgtttttgagct

SEQ ID NO: 29723 - DNA, 25 bp, Artificial sequence
  SiRNA target sequence
gtgctttaggaatgtttttgagctt

SEQ ID NO: 29724 - DNA, 25 bp, Artificial sequence
  SiRNA target sequence
tgctttaggaatgtttttgagcttt

SEQ ID NO: 29725 - DNA, 25 bp, Artificial sequence
  SiRNA target sequence
gctttaggaatgtttttgagcttta

SEQ ID NO: 29726 - DNA, 25 bp, Artificial sequence
  SiRNA target sequence
ctttaggaatgtttttgagctttat

SEQ ID NO: 29727 - DNA, 25 bp, Artificial sequence
  SiRNA target sequence
tttaggaatgtttttgagctttata

SEQ ID NO: 29728 - DNA, 25 bp, Artificial sequence
  SiRNA target sequence
ttaggaatgtttttgagctttatag

SEQ ID NO: 29729 - DNA, 25 bp, Artificial sequence
  SiRNA target sequence
taggaatgtttttgagctttatagc

SEQ ID NO: 29730 - DNA, 25 bp, Artificial sequence
  SiRNA target sequence
aggaatgtttttgagctttatagct

SEQ ID NO: 29731 - DNA, 25 bp, Artificial sequence
  SiRNA target sequence
ggaatgtttttgagctttatagctc

SEQ ID NO: 29732 - DNA, 25 bp, Artificial sequence
  SiRNA target sequence
gaatgtttttgagctttatagctcc

SEQ ID NO: 29733 - DNA, 25 bp, Artificial sequence
  SiRNA target sequence
aatgtttttgagctttatagctcct

SEQ ID NO: 29734 - DNA, 25 bp, Artificial sequence
  SiRNA target sequence
atgtttttgagctttatagctccta

SEQ ID NO: 29735 - DNA, 25 bp, Artificial sequence
  SiRNA target sequence
tgtttttgagctttatagctcctaa

SEQ ID NO: 29736 - DNA, 25 bp, Artificial sequence
  SiRNA target sequence
gtttttgagctttatagctcctaaa

SEQ ID NO: 29737 - DNA, 25 bp, Artificial sequence
  SiRNA target sequence
tttttgagctttatagctcctaaat

SEQ ID NO: 29738 - DNA, 25 bp, Artificial sequence
  SiRNA target sequence
ttttgagctttatagctcctaaata

SEQ ID NO: 29739 - DNA, 25 bp, Artificial sequence
  SiRNA target sequence
tttgagctttatagctcctaaatat

SEQ ID NO: 29740 - DNA, 25 bp, Artificial sequence
  SiRNA target sequence
ttgagctttatagctcctaaatatt

SEQ ID NO: 29741 - DNA, 25 bp, Artificial sequence
  SiRNA target sequence
tgagctttatagctcctaaatattt

SEQ ID NO: 29742 - DNA, 25 bp, Artificial sequence
  SiRNA target sequence
gagctttatagctcctaaatattta

SEQ ID NO: 29743 - DNA, 25 bp, Artificial sequence
  SiRNA target sequence
agctttatagctcctaaatatttat

SEQ ID NO: 29744 - DNA, 25 bp, Artificial sequence
  SiRNA target sequence
gctttatagctcctaaatatttatt

SEQ ID NO: 29745 - DNA, 25 bp, Artificial sequence
  SiRNA target sequence
ctttatagctcctaaatatttattg

SEQ ID NO: 29746 - DNA, 25 bp, Artificial sequence
  SiRNA target sequence
tttatagctcctaaatatttattgt

SEQ ID NO: 29747 - DNA, 25 bp, Artificial sequence
  SiRNA target sequence
ttatagctcctaaatatttattgtc

SEQ ID NO: 29748 - DNA, 25 bp, Artificial sequence
  SiRNA target sequence
tatagctcctaaatatttattgtct

SEQ ID NO: 29749 - DNA, 25 bp, Artificial sequence
  SiRNA target sequence
atagctcctaaatatttattgtctt

SEQ ID NO: 29750 - DNA, 25 bp, Artificial sequence
  SiRNA target sequence
tagctcctaaatatttattgtcttt

SEQ ID NO: 29751 - DNA, 25 bp, Artificial sequence
  SiRNA target sequence
agctcctaaatatttattgtctttt

SEQ ID NO: 29752 - DNA, 25 bp, Artificial sequence
  SiRNA target sequence
gctcctaaatatttattgtctttta

SEQ ID NO: 29753 - DNA, 25 bp, Artificial sequence
  SiRNA target sequence
ctcctaaatatttattgtcttttac

SEQ ID NO: 29754 - DNA, 25 bp, Artificial sequence
  SiRNA target sequence
tcctaaatatttattgtcttttacc

SEQ ID NO: 29755 - DNA, 25 bp, Artificial sequence
  SiRNA target sequence
cctaaatatttattgtcttttacca

SEQ ID NO: 29756 - DNA, 25 bp, Artificial sequence
  SiRNA target sequence
ctaaatatttattgtcttttaccat

SEQ ID NO: 29757 - DNA, 25 bp, Artificial sequence
  SiRNA target sequence
taaatatttattgtcttttaccatc

SEQ ID NO: 29758 - DNA, 25 bp, Artificial sequence
  SiRNA target sequence
aaatatttattgtcttttaccatct

SEQ ID NO: 29759 - DNA, 25 bp, Artificial sequence
  SiRNA target sequence
aatatttattgtcttttaccatctt

SEQ ID NO: 29760 - DNA, 25 bp, Artificial sequence
  SiRNA target sequence
atatttattgtcttttaccatcttt

SEQ ID NO: 29761 - DNA, 25 bp, Artificial sequence
  SiRNA target sequence
tatttattgtcttttaccatctttc

SEQ ID NO: 29762 - DNA, 25 bp, Artificial sequence
  SiRNA target sequence
atttattgtcttttaccatctttct

SEQ ID NO: 29763 - DNA, 25 bp, Artificial sequence
  SiRNA target sequence
tttattgtcttttaccatctttctt

SEQ ID NO: 29764 - DNA, 25 bp, Artificial sequence
  SiRNA target sequence
ttattgtcttttaccatctttcttt

SEQ ID NO: 29765 - DNA, 25 bp, Artificial sequence
  SiRNA target sequence
tattgtcttttaccatctttctttc

SEQ ID NO: 29766 - DNA, 25 bp, Artificial sequence
  SiRNA target sequence
attgtcttttaccatctttctttct

SEQ ID NO: 29767 - DNA, 25 bp, Artificial sequence
  SiRNA target sequence
ttgtcttttaccatctttctttctc

SEQ ID NO: 29768 - DNA, 25 bp, Artificial sequence
  SiRNA target sequence
tgtcttttaccatctttctttctcc

SEQ ID NO: 29769 - DNA, 25 bp, Artificial sequence
  SiRNA target sequence
gtcttttaccatctttctttctcct

SEQ ID NO: 29770 - DNA, 25 bp, Artificial sequence
  SiRNA target sequence
tcttttaccatctttctttctcctt

SEQ ID NO: 29771 - DNA, 25 bp, Artificial sequence
  SiRNA target sequence
cttttaccatctttctttctccttg

SEQ ID NO: 29772 - DNA, 25 bp, Artificial sequence
  SiRNA target sequence
ttttaccatctttctttctccttga

SEQ ID NO: 29773 - DNA, 25 bp, Artificial sequence
  SiRNA target sequence
tttaccatctttctttctccttgat

SEQ ID NO: 29774 - DNA, 25 bp, Artificial sequence
  SiRNA target sequence
ttaccatctttctttctccttgata

SEQ ID NO: 29775 - DNA, 25 bp, Artificial sequence
  SiRNA target sequence
taccatctttctttctccttgatat

SEQ ID NO: 29776 - DNA, 25 bp, Artificial sequence
  SiRNA target sequence
accatctttctttctccttgatata

SEQ ID NO: 29777 - DNA, 25 bp, Artificial sequence
  SiRNA target sequence
ccatctttctttctccttgatatat

SEQ ID NO: 29778 - DNA, 25 bp, Artificial sequence
  SiRNA target sequence
catctttctttctccttgatatatt

SEQ ID NO: 29779 - DNA, 25 bp, Artificial sequence
  SiRNA target sequence
atctttctttctccttgatatattc

SEQ ID NO: 29780 - DNA, 25 bp, Artificial sequence
  SiRNA target sequence
tctttctttctccttgatatattct

SEQ ID NO: 29781 - DNA, 25 bp, Artificial sequence
  SiRNA target sequence
ctttctttctccttgatatattcta

SEQ ID NO: 29782 - DNA, 25 bp, Artificial sequence
  SiRNA target sequence
tttctttctccttgatatattctaa

SEQ ID NO: 29783 - DNA, 25 bp, Artificial sequence
  SiRNA target sequence
ttctttctccttgatatattctaat

SEQ ID NO: 29784 - DNA, 25 bp, Artificial sequence
  SiRNA target sequence
tctttctccttgatatattctaata

SEQ ID NO: 29785 - DNA, 25 bp, Artificial sequence
  SiRNA target sequence
ctttctccttgatatattctaatat

SEQ ID NO: 29786 - DNA, 25 bp, Artificial sequence
  SiRNA target sequence
tttctccttgatatattctaatatc

SEQ ID NO: 29787 - DNA, 25 bp, Artificial sequence
  SiRNA target sequence
ttctccttgatatattctaatatct

SEQ ID NO: 29788 - DNA, 25 bp, Artificial sequence
  SiRNA target sequence
tctccttgatatattctaatatcta

SEQ ID NO: 29789 - DNA, 25 bp, Artificial sequence
  SiRNA target sequence
ctccttgatatattctaatatctac

SEQ ID NO: 29790 - DNA, 25 bp, Artificial sequence
  SiRNA target sequence
tccttgatatattctaatatctact

SEQ ID NO: 29791 - DNA, 25 bp, Artificial sequence
  SiRNA target sequence
ccttgatatattctaatatctactt

SEQ ID NO: 29792 - DNA, 25 bp, Artificial sequence
  SiRNA target sequence
cttgatatattctaatatctacttc

SEQ ID NO: 29793 - DNA, 25 bp, Artificial sequence
  SiRNA target sequence
ttgatatattctaatatctacttcg

SEQ ID NO: 29794 - DNA, 25 bp, Artificial sequence
  SiRNA target sequence
tgatatattctaatatctacttcgg

SEQ ID NO: 29795 - DNA, 25 bp, Artificial sequence
  SiRNA target sequence
gatatattctaatatctacttcgga

SEQ ID NO: 29796 - DNA, 25 bp, Artificial sequence
  SiRNA target sequence
atatattctaatatctacttcggat

SEQ ID NO: 29797 - DNA, 25 bp, Artificial sequence
  SiRNA target sequence
tatattctaatatctacttcggatt

SEQ ID NO: 29798 - DNA, 25 bp, Artificial sequence
  SiRNA target sequence
atattctaatatctacttcggattg

SEQ ID NO: 29799 - DNA, 25 bp, Artificial sequence
  SiRNA target sequence
tattctaatatctacttcggattga

SEQ ID NO: 29800 - DNA, 25 bp, Artificial sequence
  SiRNA target sequence
attctaatatctacttcggattgat

SEQ ID NO: 29801 - DNA, 25 bp, Artificial sequence
  SiRNA target sequence
ttctaatatctacttcggattgatt

SEQ ID NO: 29802 - DNA, 25 bp, Artificial sequence
  SiRNA target sequence
tctaatatctacttcggattgatta

SEQ ID NO: 29803 - DNA, 25 bp, Artificial sequence
  SiRNA target sequence
ctaatatctacttcggattgattat

SEQ ID NO: 29804 - DNA, 25 bp, Artificial sequence
  SiRNA target sequence
taatatctacttcggattgattatc

SEQ ID NO: 29805 - DNA, 25 bp, Artificial sequence
  SiRNA target sequence
aatatctacttcggattgattatct

SEQ ID NO: 29806 - DNA, 25 bp, Artificial sequence
  SiRNA target sequence
atatctacttcggattgattatctt

SEQ ID NO: 29807 - DNA, 25 bp, Artificial sequence
  SiRNA target sequence
tatctacttcggattgattatcttc

SEQ ID NO: 29808 - DNA, 25 bp, Artificial sequence
  SiRNA target sequence
atctacttcggattgattatcttca

SEQ ID NO: 29809 - DNA, 25 bp, Artificial sequence
  SiRNA target sequence
tctacttcggattgattatcttcag

SEQ ID NO: 29810 - DNA, 25 bp, Artificial sequence
  SiRNA target sequence
ctacttcggattgattatcttcaga

SEQ ID NO: 29811 - DNA, 25 bp, Artificial sequence
  SiRNA target sequence
tacttcggattgattatcttcagag

SEQ ID NO: 29812 - DNA, 25 bp, Artificial sequence
  SiRNA target sequence
acttcggattgattatcttcagagg

SEQ ID NO: 29813 - DNA, 25 bp, Artificial sequence
  SiRNA target sequence
cttcggattgattatcttcagaggt

SEQ ID NO: 29814 - DNA, 25 bp, Artificial sequence
  SiRNA target sequence
ttcggattgattatcttcagaggta

SEQ ID NO: 29815 - DNA, 25 bp, Artificial sequence
  SiRNA target sequence
tcggattgattatcttcagaggtag

SEQ ID NO: 29816 - DNA, 25 bp, Artificial sequence
  SiRNA target sequence
cggattgattatcttcagaggtaga

SEQ ID NO: 29817 - DNA, 25 bp, Artificial sequence
  SiRNA target sequence
ggattgattatcttcagaggtagaa

SEQ ID NO: 29818 - DNA, 25 bp, Artificial sequence
  SiRNA target sequence
gattgattatcttcagaggtagaaa

SEQ ID NO: 29819 - DNA, 25 bp, Artificial sequence
  SiRNA target sequence
attgattatcttcagaggtagaaaa

SEQ ID NO: 29820 - DNA, 25 bp, Artificial sequence
  SiRNA target sequence
ttgattatcttcagaggtagaaaaa

SEQ ID NO: 29821 - DNA, 25 bp, Artificial sequence
  SiRNA target sequence
tgattatcttcagaggtagaaaaac

SEQ ID NO: 29822 - DNA, 25 bp, Artificial sequence
  SiRNA target sequence
gattatcttcagaggtagaaaaact

SEQ ID NO: 29823 - DNA, 25 bp, Artificial sequence
  SiRNA target sequence
attatcttcagaggtagaaaaactg

SEQ ID NO: 29824 - DNA, 25 bp, Artificial sequence
  SiRNA target sequence
ttatcttcagaggtagaaaaactgt

SEQ ID NO: 29825 - DNA, 25 bp, Artificial sequence
  SiRNA target sequence
tatcttcagaggtagaaaaactgtg

SEQ ID NO: 29826 - DNA, 25 bp, Artificial sequence
  SiRNA target sequence
atcttcagaggtagaaaaactgtgt

SEQ ID NO: 29827 - DNA, 25 bp, Artificial sequence
  SiRNA target sequence
tcttcagaggtagaaaaactgtgtg

SEQ ID NO: 29828 - DNA, 25 bp, Artificial sequence
  SiRNA target sequence
cttcagaggtagaaaaactgtgtgt

SEQ ID NO: 29829 - DNA, 25 bp, Artificial sequence
  SiRNA target sequence
ttcagaggtagaaaaactgtgtgtt

SEQ ID NO: 29830 - DNA, 25 bp, Artificial sequence
  SiRNA target sequence
tcagaggtagaaaaactgtgtgttt

SEQ ID NO: 29831 - DNA, 25 bp, Artificial sequence
  SiRNA target sequence
cagaggtagaaaaactgtgtgtttc

SEQ ID NO: 29832 - DNA, 25 bp, Artificial sequence
  SiRNA target sequence
agaggtagaaaaactgtgtgtttcc

SEQ ID NO: 29833 - DNA, 25 bp, Artificial sequence
  SiRNA target sequence
gaggtagaaaaactgtgtgtttcct

SEQ ID NO: 29834 - DNA, 25 bp, Artificial sequence
  SiRNA target sequence
aggtagaaaaactgtgtgtttcctt

SEQ ID NO: 29835 - DNA, 25 bp, Artificial sequence
  SiRNA target sequence
ggtagaaaaactgtgtgtttcctta

SEQ ID NO: 29836 - DNA, 25 bp, Artificial sequence
  SiRNA target sequence
gtagaaaaactgtgtgtttccttaa

SEQ ID NO: 29837 - DNA, 25 bp, Artificial sequence
  SiRNA target sequence
tagaaaaactgtgtgtttccttaaa

SEQ ID NO: 29838 - DNA, 25 bp, Artificial sequence
  SiRNA target sequence
agaaaaactgtgtgtttccttaaat

SEQ ID NO: 29839 - DNA, 25 bp, Artificial sequence
  SiRNA target sequence
gaaaaactgtgtgtttccttaaatg

SEQ ID NO: 29840 - DNA, 25 bp, Artificial sequence
  SiRNA target sequence
aaaaactgtgtgtttccttaaatgg

SEQ ID NO: 29841 - DNA, 25 bp, Artificial sequence
  SiRNA target sequence
aaaactgtgtgtttccttaaatgga

SEQ ID NO: 29842 - DNA, 25 bp, Artificial sequence
  SiRNA target sequence
aaactgtgtgtttccttaaatggaa

SEQ ID NO: 29843 - DNA, 25 bp, Artificial sequence
  SiRNA target sequence
aactgtgtgtttccttaaatggaat

SEQ ID NO: 29844 - DNA, 25 bp, Artificial sequence
  SiRNA target sequence
actgtgtgtttccttaaatggaata

SEQ ID NO: 29845 - DNA, 25 bp, Artificial sequence
  SiRNA target sequence
ctgtgtgtttccttaaatggaatag

SEQ ID NO: 29846 - DNA, 25 bp, Artificial sequence
  SiRNA target sequence
tgtgtgtttccttaaatggaatagt

SEQ ID NO: 29847 - DNA, 25 bp, Artificial sequence
  SiRNA target sequence
gtgtgtttccttaaatggaatagta

SEQ ID NO: 29848 - DNA, 25 bp, Artificial sequence
  SiRNA target sequence
tgtgtttccttaaatggaatagtag

SEQ ID NO: 29849 - DNA, 25 bp, Artificial sequence
  SiRNA target sequence
gtgtttccttaaatggaatagtaga

SEQ ID NO: 29850 - DNA, 25 bp, Artificial sequence
  SiRNA target sequence
tgtttccttaaatggaatagtagaa

SEQ ID NO: 29851 - DNA, 25 bp, Artificial sequence
  SiRNA target sequence
gtttccttaaatggaatagtagaat

SEQ ID NO: 29852 - DNA, 25 bp, Artificial sequence
  SiRNA target sequence
tttccttaaatggaatagtagaatt

SEQ ID NO: 29853 - DNA, 25 bp, Artificial sequence
  SiRNA target sequence
ttccttaaatggaatagtagaattt

SEQ ID NO: 29854 - DNA, 25 bp, Artificial sequence
  SiRNA target sequence
tccttaaatggaatagtagaatttc

SEQ ID NO: 29855 - DNA, 25 bp, Artificial sequence
  SiRNA target sequence
ccttaaatggaatagtagaatttct

SEQ ID NO: 29856 - DNA, 25 bp, Artificial sequence
  SiRNA target sequence
cttaaatggaatagtagaatttcta

SEQ ID NO: 29857 - DNA, 25 bp, Artificial sequence
  SiRNA target sequence
ttaaatggaatagtagaatttctat

SEQ ID NO: 29858 - DNA, 25 bp, Artificial sequence
  SiRNA target sequence
taaatggaatagtagaatttctatg

SEQ ID NO: 29859 - DNA, 25 bp, Artificial sequence
  SiRNA target sequence
aaatggaatagtagaatttctatga

SEQ ID NO: 29860 - DNA, 25 bp, Artificial sequence
  SiRNA target sequence
aatggaatagtagaatttctatgaa

SEQ ID NO: 29861 - DNA, 25 bp, Artificial sequence
  SiRNA target sequence
atggaatagtagaatttctatgaat

SEQ ID NO: 29862 - DNA, 25 bp, Artificial sequence
  SiRNA target sequence
tggaatagtagaatttctatgaatt

SEQ ID NO: 29863 - DNA, 25 bp, Artificial sequence
  SiRNA target sequence
ggaatagtagaatttctatgaatta

SEQ ID NO: 29864 - DNA, 25 bp, Artificial sequence
  SiRNA target sequence
gaatagtagaatttctatgaattat

SEQ ID NO: 29865 - DNA, 25 bp, Artificial sequence
  SiRNA target sequence
aatagtagaatttctatgaattatc

SEQ ID NO: 29866 - DNA, 25 bp, Artificial sequence
  SiRNA target sequence
atagtagaatttctatgaattatct

SEQ ID NO: 29867 - DNA, 25 bp, Artificial sequence
  SiRNA target sequence
tagtagaatttctatgaattatctt

SEQ ID NO: 29868 - DNA, 25 bp, Artificial sequence
  SiRNA target sequence
agtagaatttctatgaattatctta

SEQ ID NO: 29869 - DNA, 25 bp, Artificial sequence
  SiRNA target sequence
gtagaatttctatgaattatcttat

SEQ ID NO: 29870 - DNA, 25 bp, Artificial sequence
  SiRNA target sequence
tagaatttctatgaattatcttatt

SEQ ID NO: 29871 - DNA, 25 bp, Artificial sequence
  SiRNA target sequence
agaatttctatgaattatcttatta

SEQ ID NO: 29872 - DNA, 25 bp, Artificial sequence
  SiRNA target sequence
gaatttctatgaattatcttattaa

SEQ ID NO: 29873 - DNA, 25 bp, Artificial sequence
  SiRNA target sequence
aatttctatgaattatcttattaaa

SEQ ID NO: 29874 - DNA, 25 bp, Artificial sequence
  SiRNA target sequence
atttctatgaattatcttattaaaa

SEQ ID NO: 29875 - DNA, 25 bp, Artificial sequence
  SiRNA target sequence
tttctatgaattatcttattaaaaa

SEQ ID NO: 29876 - DNA, 25 bp, Artificial sequence
  SiRNA target sequence
ttctatgaattatcttattaaaaat

SEQ ID NO: 29877 - DNA, 25 bp, Artificial sequence
  SiRNA target sequence
tctatgaattatcttattaaaaatc

SEQ ID NO: 29878 - DNA, 25 bp, Artificial sequence
  SiRNA target sequence
ctatgaattatcttattaaaaatcc

SEQ ID NO: 29879 - DNA, 25 bp, Artificial sequence
  SiRNA target sequence
tatgaattatcttattaaaaatccc

SEQ ID NO: 29880 - DNA, 25 bp, Artificial sequence
  SiRNA target sequence
atgaattatcttattaaaaatcccg

SEQ ID NO: 29881 - DNA, 25 bp, Artificial sequence
  SiRNA target sequence
tgaattatcttattaaaaatcccgc

SEQ ID NO: 29882 - DNA, 25 bp, Artificial sequence
  SiRNA target sequence
gaattatcttattaaaaatcccgcc

SEQ ID NO: 29883 - DNA, 25 bp, Artificial sequence
  SiRNA target sequence
aattatcttattaaaaatcccgccc

SEQ ID NO: 29884 - DNA, 25 bp, Artificial sequence
  SiRNA target sequence
attatcttattaaaaatcccgccca

SEQ ID NO: 29885 - DNA, 25 bp, Artificial sequence
  SiRNA target sequence
ttatcttattaaaaatcccgcccaa

SEQ ID NO: 29886 - DNA, 25 bp, Artificial sequence
  SiRNA target sequence
tatcttattaaaaatcccgcccaaa

SEQ ID NO: 29887 - DNA, 25 bp, Artificial sequence
  SiRNA target sequence
atcttattaaaaatcccgcccaaaa

SEQ ID NO: 29888 - DNA, 25 bp, Artificial sequence
  SiRNA target sequence
tcttattaaaaatcccgcccaaaag

SEQ ID NO: 29889 - DNA, 25 bp, Artificial sequence
  SiRNA target sequence
cttattaaaaatcccgcccaaaagc

SEQ ID NO: 29890 - DNA, 25 bp, Artificial sequence
  SiRNA target sequence
ttattaaaaatcccgcccaaaagct

SEQ ID NO: 29891 - DNA, 25 bp, Artificial sequence
  SiRNA target sequence
tattaaaaatcccgcccaaaagctc

SEQ ID NO: 29892 - DNA, 25 bp, Artificial sequence
  SiRNA target sequence
attaaaaatcccgcccaaaagctct

SEQ ID NO: 29893 - DNA, 25 bp, Artificial sequence
  SiRNA target sequence
ttaaaaatcccgcccaaaagctcta

SEQ ID NO: 29894 - DNA, 25 bp, Artificial sequence
  SiRNA target sequence
taaaaatcccgcccaaaagctctat

SEQ ID NO: 29895 - DNA, 25 bp, Artificial sequence
  SiRNA target sequence
aaaaatcccgcccaaaagctctata

SEQ ID NO: 29896 - DNA, 25 bp, Artificial sequence
  SiRNA target sequence
aaaatcccgcccaaaagctctatac

SEQ ID NO: 29897 - DNA, 25 bp, Artificial sequence
  SiRNA target sequence
aaatcccgcccaaaagctctatacc

SEQ ID NO: 29898 - DNA, 25 bp, Artificial sequence
  SiRNA target sequence
aatcccgcccaaaagctctatacct

SEQ ID NO: 29899 - DNA, 25 bp, Artificial sequence
  SiRNA target sequence
atcccgcccaaaagctctataccta

SEQ ID NO: 29900 - DNA, 25 bp, Artificial sequence
  SiRNA target sequence
tcccgcccaaaagctctatacctaa

SEQ ID NO: 29901 - DNA, 25 bp, Artificial sequence
  SiRNA target sequence
cccgcccaaaagctctatacctaaa

SEQ ID NO: 29902 - DNA, 25 bp, Artificial sequence
  SiRNA target sequence
ccgcccaaaagctctatacctaaac

SEQ ID NO: 29903 - DNA, 25 bp, Artificial sequence
  SiRNA target sequence
cgcccaaaagctctatacctaaact

SEQ ID NO: 29904 - DNA, 25 bp, Artificial sequence
  SiRNA target sequence
gcccaaaagctctatacctaaactc

SEQ ID NO: 29905 - DNA, 25 bp, Artificial sequence
  SiRNA target sequence
cccaaaagctctatacctaaactca

SEQ ID NO: 29906 - DNA, 25 bp, Artificial sequence
  SiRNA target sequence
ccaaaagctctatacctaaactcaa

SEQ ID NO: 29907 - DNA, 25 bp, Artificial sequence
  SiRNA target sequence
caaaagctctatacctaaactcaat

SEQ ID NO: 29908 - DNA, 25 bp, Artificial sequence
  SiRNA target sequence
aaaagctctatacctaaactcaatg

SEQ ID NO: 29909 - DNA, 25 bp, Artificial sequence
  SiRNA target sequence
aaagctctatacctaaactcaatgg

SEQ ID NO: 29910 - DNA, 25 bp, Artificial sequence
  SiRNA target sequence
aagctctatacctaaactcaatggt

SEQ ID NO: 29911 - DNA, 25 bp, Artificial sequence
  SiRNA target sequence
agctctatacctaaactcaatggta

SEQ ID NO: 29912 - DNA, 25 bp, Artificial sequence
  SiRNA target sequence
gctctatacctaaactcaatggtac

SEQ ID NO: 29913 - DNA, 25 bp, Artificial sequence
  SiRNA target sequence
ctctatacctaaactcaatggtact

SEQ ID NO: 29914 - DNA, 25 bp, Artificial sequence
  SiRNA target sequence
tctatacctaaactcaatggtacta

SEQ ID NO: 29915 - DNA, 25 bp, Artificial sequence
  SiRNA target sequence
ctatacctaaactcaatggtactac

SEQ ID NO: 29916 - DNA, 25 bp, Artificial sequence
  SiRNA target sequence
tatacctaaactcaatggtactaca

SEQ ID NO: 29917 - DNA, 25 bp, Artificial sequence
  SiRNA target sequence
atacctaaactcaatggtactacat

SEQ ID NO: 29918 - DNA, 25 bp, Artificial sequence
  SiRNA target sequence
tacctaaactcaatggtactacatc

SEQ ID NO: 29919 - DNA, 25 bp, Artificial sequence
  SiRNA target sequence
acctaaactcaatggtactacatcc

SEQ ID NO: 29920 - DNA, 25 bp, Artificial sequence
  SiRNA target sequence
cctaaactcaatggtactacatcca

SEQ ID NO: 29921 - DNA, 25 bp, Artificial sequence
  SiRNA target sequence
ctaaactcaatggtactacatccaa

SEQ ID NO: 29922 - DNA, 25 bp, Artificial sequence
  SiRNA target sequence
taaactcaatggtactacatccaat

SEQ ID NO: 29923 - DNA, 25 bp, Artificial sequence
  SiRNA target sequence
aaactcaatggtactacatccaata

SEQ ID NO: 29924 - DNA, 25 bp, Artificial sequence
  SiRNA target sequence
aactcaatggtactacatccaataa

SEQ ID NO: 29925 - DNA, 25 bp, Artificial sequence
  SiRNA target sequence
actcaatggtactacatccaataat

SEQ ID NO: 29926 - DNA, 25 bp, Artificial sequence
  SiRNA target sequence
ctcaatggtactacatccaataata

SEQ ID NO: 29927 - DNA, 25 bp, Artificial sequence
  SiRNA target sequence
tcaatggtactacatccaataatag

SEQ ID NO: 29928 - DNA, 25 bp, Artificial sequence
  SiRNA target sequence
caatggtactacatccaataatagg

SEQ ID NO: 29929 - DNA, 25 bp, Artificial sequence
  SiRNA target sequence
aatggtactacatccaataatagga

SEQ ID NO: 29930 - DNA, 25 bp, Artificial sequence
  SiRNA target sequence
atggtactacatccaataataggac

SEQ ID NO: 29931 - DNA, 25 bp, Artificial sequence
  SiRNA target sequence
tggtactacatccaataataggaca

SEQ ID NO: 29932 - DNA, 25 bp, Artificial sequence
  SiRNA target sequence
ggtactacatccaataataggacat

SEQ ID NO: 29933 - DNA, 25 bp, Artificial sequence
  SiRNA target sequence
gtactacatccaataataggacatc

SEQ ID NO: 29934 - DNA, 25 bp, Artificial sequence
  SiRNA target sequence
tactacatccaataataggacatct

SEQ ID NO: 29935 - DNA, 25 bp, Artificial sequence
  SiRNA target sequence
actacatccaataataggacatctt

SEQ ID NO: 29936 - DNA, 25 bp, Artificial sequence
  SiRNA target sequence
ctacatccaataataggacatcttt

SEQ ID NO: 29937 - DNA, 25 bp, Artificial sequence
  SiRNA target sequence
tacatccaataataggacatctttt

SEQ ID NO: 29938 - DNA, 25 bp, Artificial sequence
  SiRNA target sequence
acatccaataataggacatctttta

SEQ ID NO: 29939 - DNA, 25 bp, Artificial sequence
  SiRNA target sequence
catccaataataggacatcttttat

SEQ ID NO: 29940 - DNA, 25 bp, Artificial sequence
  SiRNA target sequence
atccaataataggacatcttttatt

SEQ ID NO: 29941 - DNA, 25 bp, Artificial sequence
  SiRNA target sequence
tccaataataggacatcttttattt

SEQ ID NO: 29942 - DNA, 25 bp, Artificial sequence
  SiRNA target sequence
ccaataataggacatcttttatttt

SEQ ID NO: 29943 - DNA, 25 bp, Artificial sequence
  SiRNA target sequence
caataataggacatcttttattttt

SEQ ID NO: 29944 - DNA, 25 bp, Artificial sequence
  SiRNA target sequence
aataataggacatcttttatttttc

SEQ ID NO: 29945 - DNA, 25 bp, Artificial sequence
  SiRNA target sequence
ataataggacatcttttatttttcc

SEQ ID NO: 29946 - DNA, 25 bp, Artificial sequence
  SiRNA target sequence
taataggacatcttttatttttcct

SEQ ID NO: 29947 - DNA, 25 bp, Artificial sequence
  SiRNA target sequence
aataggacatcttttatttttcctt

SEQ ID NO: 29948 - DNA, 25 bp, Artificial sequence
  SiRNA target sequence
ataggacatcttttatttttccttc

SEQ ID NO: 29949 - DNA, 25 bp, Artificial sequence
  SiRNA target sequence
taggacatcttttatttttccttct

SEQ ID NO: 29950 - DNA, 25 bp, Artificial sequence
  SiRNA target sequence
aggacatcttttatttttccttcta

SEQ ID NO: 29951 - DNA, 25 bp, Artificial sequence
  SiRNA target sequence
ggacatcttttatttttccttctaa

SEQ ID NO: 29952 - DNA, 25 bp, Artificial sequence
  SiRNA target sequence
gacatcttttatttttccttctaac

SEQ ID NO: 29953 - DNA, 25 bp, Artificial sequence
  SiRNA target sequence
acatcttttatttttccttctaaca

SEQ ID NO: 29954 - DNA, 25 bp, Artificial sequence
  SiRNA target sequence
catcttttatttttccttctaacac

SEQ ID NO: 29955 - DNA, 25 bp, Artificial sequence
  SiRNA target sequence
atcttttatttttccttctaacacg

SEQ ID NO: 29956 - DNA, 25 bp, Artificial sequence
  SiRNA target sequence
tcttttatttttccttctaacacgc

SEQ ID NO: 29957 - DNA, 25 bp, Artificial sequence
  SiRNA target sequence
cttttatttttccttctaacacgcc

SEQ ID NO: 29958 - DNA, 25 bp, Artificial sequence
  SiRNA target sequence
ttttatttttccttctaacacgcct

SEQ ID NO: 29959 - DNA, 25 bp, Artificial sequence
  SiRNA target sequence
tttatttttccttctaacacgcctg

SEQ ID NO: 29960 - DNA, 25 bp, Artificial sequence
  SiRNA target sequence
ttatttttccttctaacacgcctgc

SEQ ID NO: 29961 - DNA, 25 bp, Artificial sequence
  SiRNA target sequence
tatttttccttctaacacgcctgct

SEQ ID NO: 29962 - DNA, 25 bp, Artificial sequence
  SiRNA target sequence
atttttccttctaacacgcctgctt

SEQ ID NO: 29963 - DNA, 25 bp, Artificial sequence
  SiRNA target sequence
tttttccttctaacacgcctgcttg

SEQ ID NO: 29964 - DNA, 25 bp, Artificial sequence
  SiRNA target sequence
ttttccttctaacacgcctgcttgt

SEQ ID NO: 29965 - DNA, 25 bp, Artificial sequence
  SiRNA target sequence
tttccttctaacacgcctgcttgta

SEQ ID NO: 29966 - DNA, 25 bp, Artificial sequence
  SiRNA target sequence
ttccttctaacacgcctgcttgtag

SEQ ID NO: 29967 - DNA, 25 bp, Artificial sequence
  SiRNA target sequence
tccttctaacacgcctgcttgtaga

SEQ ID NO: 29968 - DNA, 25 bp, Artificial sequence
  SiRNA target sequence
ccttctaacacgcctgcttgtagag

SEQ ID NO: 29969 - DNA, 25 bp, Artificial sequence
  SiRNA target sequence
cttctaacacgcctgcttgtagagc

SEQ ID NO: 29970 - DNA, 25 bp, Artificial sequence
  SiRNA target sequence
ttctaacacgcctgcttgtagagcg

SEQ ID NO: 29971 - DNA, 25 bp, Artificial sequence
  SiRNA target sequence
tctaacacgcctgcttgtagagcgg

SEQ ID NO: 29972 - DNA, 25 bp, Artificial sequence
  SiRNA target sequence
ctaacacgcctgcttgtagagcggc

SEQ ID NO: 29973 - DNA, 25 bp, Artificial sequence
  SiRNA target sequence
taacacgcctgcttgtagagcggcc

SEQ ID NO: 29974 - DNA, 25 bp, Artificial sequence
  SiRNA target sequence
aacacgcctgcttgtagagcggccc

SEQ ID NO: 29975 - DNA, 25 bp, Artificial sequence
  SiRNA target sequence
acacgcctgcttgtagagcggcccc

SEQ ID NO: 29976 - DNA, 25 bp, Artificial sequence
  SiRNA target sequence
cacgcctgcttgtagagcggcccct

SEQ ID NO: 29977 - DNA, 25 bp, Artificial sequence
  SiRNA target sequence
acgcctgcttgtagagcggcccctt

SEQ ID NO: 29978 - DNA, 25 bp, Artificial sequence
  SiRNA target sequence
cgcctgcttgtagagcggccccttt

SEQ ID NO: 29979 - DNA, 25 bp, Artificial sequence
  SiRNA target sequence
gcctgcttgtagagcggccccttta

SEQ ID NO: 29980 - DNA, 25 bp, Artificial sequence
  SiRNA target sequence
cctgcttgtagagcggcccctttag

SEQ ID NO: 29981 - DNA, 25 bp, Artificial sequence
  SiRNA target sequence
ctgcttgtagagcggcccctttagc

SEQ ID NO: 29982 - DNA, 25 bp, Artificial sequence
  SiRNA target sequence
tgcttgtagagcggcccctttagca

SEQ ID NO: 29983 - DNA, 25 bp, Artificial sequence
  SiRNA target sequence
gcttgtagagcggcccctttagcaa

SEQ ID NO: 29984 - DNA, 25 bp, Artificial sequence
  SiRNA target sequence
cttgtagagcggcccctttagcaac

SEQ ID NO: 29985 - DNA, 25 bp, Artificial sequence
  SiRNA target sequence
ttgtagagcggcccctttagcaaca

SEQ ID NO: 29986 - DNA, 25 bp, Artificial sequence
  SiRNA target sequence
tgtagagcggcccctttagcaacag

SEQ ID NO: 29987 - DNA, 25 bp, Artificial sequence
  SiRNA target sequence
gtagagcggcccctttagcaacagc

SEQ ID NO: 29988 - DNA, 25 bp, Artificial sequence
  SiRNA target sequence
tagagcggcccctttagcaacagct

SEQ ID NO: 29989 - DNA, 25 bp, Artificial sequence
  SiRNA target sequence
agagcggcccctttagcaacagctt

SEQ ID NO: 29990 - DNA, 25 bp, Artificial sequence
  SiRNA target sequence
gagcggcccctttagcaacagcttc

SEQ ID NO: 29991 - DNA, 25 bp, Artificial sequence
  SiRNA target sequence
agcggcccctttagcaacagcttca

SEQ ID NO: 29992 - DNA, 25 bp, Artificial sequence
  SiRNA target sequence
gcggcccctttagcaacagcttcat

SEQ ID NO: 29993 - DNA, 25 bp, Artificial sequence
  SiRNA target sequence
cggcccctttagcaacagcttcatc

SEQ ID NO: 29994 - DNA, 25 bp, Artificial sequence
  SiRNA target sequence
ggcccctttagcaacagcttcatct

SEQ ID NO: 29995 - DNA, 25 bp, Artificial sequence
  SiRNA target sequence
gcccctttagcaacagcttcatctg

SEQ ID NO: 29996 - DNA, 25 bp, Artificial sequence
  SiRNA target sequence
cccctttagcaacagcttcatctgg

SEQ ID NO: 29997 - DNA, 25 bp, Artificial sequence
  SiRNA target sequence
ccctttagcaacagcttcatctgga

SEQ ID NO: 29998 - DNA, 25 bp, Artificial sequence
  SiRNA target sequence
cctttagcaacagcttcatctggat

SEQ ID NO: 29999 - DNA, 25 bp, Artificial sequence
  SiRNA target sequence
ctttagcaacagcttcatctggatt

SEQ ID NO: 30000 - DNA, 25 bp, Artificial sequence
  SiRNA target sequence
tttagcaacagcttcatctggatta

SEQ ID NO: 30001 - DNA, 25 bp, Artificial sequence
  SiRNA target sequence
ttagcaacagcttcatctggattaa

SEQ ID NO: 30002 - DNA, 25 bp, Artificial sequence
  SiRNA target sequence
tagcaacagcttcatctggattaat

SEQ ID NO: 30003 - DNA, 25 bp, Artificial sequence
  SiRNA target sequence
agcaacagcttcatctggattaata

SEQ ID NO: 30004 - DNA, 25 bp, Artificial sequence
  SiRNA target sequence
gcaacagcttcatctggattaatat

SEQ ID NO: 30005 - DNA, 25 bp, Artificial sequence
  SiRNA target sequence
caacagcttcatctggattaatatt

SEQ ID NO: 30006 - DNA, 25 bp, Artificial sequence
  SiRNA target sequence
aacagcttcatctggattaatattt

SEQ ID NO: 30007 - DNA, 25 bp, Artificial sequence
  SiRNA target sequence
acagcttcatctggattaatatttg

SEQ ID NO: 30008 - DNA, 25 bp, Artificial sequence
  SiRNA target sequence
cagcttcatctggattaatatttgt

SEQ ID NO: 30009 - DNA, 25 bp, Artificial sequence
  SiRNA target sequence
agcttcatctggattaatatttgta

SEQ ID NO: 30010 - DNA, 25 bp, Artificial sequence
  SiRNA target sequence
gcttcatctggattaatatttgtag

SEQ ID NO: 30011 - DNA, 25 bp, Artificial sequence
  SiRNA target sequence
cttcatctggattaatatttgtaga

SEQ ID NO: 30012 - DNA, 25 bp, Artificial sequence
  SiRNA target sequence
ttcatctggattaatatttgtagaa

SEQ ID NO: 30013 - DNA, 25 bp, Artificial sequence
  SiRNA target sequence
tcatctggattaatatttgtagaag

SEQ ID NO: 30014 - DNA, 25 bp, Artificial sequence
  SiRNA target sequence
catctggattaatatttgtagaagg

SEQ ID NO: 30015 - DNA, 25 bp, Artificial sequence
  SiRNA target sequence
atctggattaatatttgtagaaggc

SEQ ID NO: 30016 - DNA, 25 bp, Artificial sequence
  SiRNA target sequence
tctggattaatatttgtagaaggct

SEQ ID NO: 30017 - DNA, 25 bp, Artificial sequence
  SiRNA target sequence
ctggattaatatttgtagaaggctc

SEQ ID NO: 30018 - DNA, 25 bp, Artificial sequence
  SiRNA target sequence
tggattaatatttgtagaaggctcg

SEQ ID NO: 30019 - DNA, 25 bp, Artificial sequence
  SiRNA target sequence
ggattaatatttgtagaaggctcga

SEQ ID NO: 30020 - DNA, 25 bp, Artificial sequence
  SiRNA target sequence
gattaatatttgtagaaggctcgat

SEQ ID NO: 30021 - DNA, 25 bp, Artificial sequence
  SiRNA target sequence
attaatatttgtagaaggctcgata

SEQ ID NO: 30022 - DNA, 25 bp, Artificial sequence
  SiRNA target sequence
ttaatatttgtagaaggctcgatac

SEQ ID NO: 30023 - DNA, 25 bp, Artificial sequence
  SiRNA target sequence
taatatttgtagaaggctcgatacc

SEQ ID NO: 30024 - DNA, 25 bp, Artificial sequence
  SiRNA target sequence
aatatttgtagaaggctcgatacca

SEQ ID NO: 30025 - DNA, 25 bp, Artificial sequence
  SiRNA target sequence
atatttgtagaaggctcgataccaa

SEQ ID NO: 30026 - DNA, 25 bp, Artificial sequence
  SiRNA target sequence
tatttgtagaaggctcgataccaaa

SEQ ID NO: 30027 - DNA, 25 bp, Artificial sequence
  SiRNA target sequence
atttgtagaaggctcgataccaaaa

SEQ ID NO: 30028 - DNA, 25 bp, Artificial sequence
  SiRNA target sequence
tttgtagaaggctcgataccaaaaa

SEQ ID NO: 30029 - DNA, 25 bp, Artificial sequence
  SiRNA target sequence
ttgtagaaggctcgataccaaaaat

SEQ ID NO: 30030 - DNA, 25 bp, Artificial sequence
  SiRNA target sequence
tgtagaaggctcgataccaaaaatc

SEQ ID NO: 30031 - DNA, 25 bp, Artificial sequence
  SiRNA target sequence
gtagaaggctcgataccaaaaatct

SEQ ID NO: 30032 - DNA, 25 bp, Artificial sequence
  SiRNA target sequence
tagaaggctcgataccaaaaatctt

SEQ ID NO: 30033 - DNA, 25 bp, Artificial sequence
  SiRNA target sequence
agaaggctcgataccaaaaatcttc

SEQ ID NO: 30034 - DNA, 25 bp, Artificial sequence
  SiRNA target sequence
gaaggctcgataccaaaaatcttct

SEQ ID NO: 30035 - DNA, 25 bp, Artificial sequence
  SiRNA target sequence
aaggctcgataccaaaaatcttctt

SEQ ID NO: 30036 - DNA, 25 bp, Artificial sequence
  SiRNA target sequence
aggctcgataccaaaaatcttctta

SEQ ID NO: 30037 - DNA, 25 bp, Artificial sequence
  SiRNA target sequence
ggctcgataccaaaaatcttcttaa

SEQ ID NO: 30038 - DNA, 25 bp, Artificial sequence
  SiRNA target sequence
gctcgataccaaaaatcttcttaac

SEQ ID NO: 30039 - DNA, 25 bp, Artificial sequence
  SiRNA target sequence
ctcgataccaaaaatcttcttaaca

SEQ ID NO: 30040 - DNA, 25 bp, Artificial sequence
  SiRNA target sequence
tcgataccaaaaatcttcttaacaa

SEQ ID NO: 30041 - DNA, 25 bp, Artificial sequence
  SiRNA target sequence
cgataccaaaaatcttcttaacaag

SEQ ID NO: 30042 - DNA, 25 bp, Artificial sequence
  SiRNA target sequence
gataccaaaaatcttcttaacaagt

SEQ ID NO: 30043 - DNA, 25 bp, Artificial sequence
  SiRNA target sequence
ataccaaaaatcttcttaacaagtt

SEQ ID NO: 30044 - DNA, 25 bp, Artificial sequence
  SiRNA target sequence
taccaaaaatcttcttaacaagttt

SEQ ID NO: 30045 - DNA, 25 bp, Artificial sequence
  SiRNA target sequence
accaaaaatcttcttaacaagtttt

SEQ ID NO: 30046 - DNA, 25 bp, Artificial sequence
  SiRNA target sequence
ccaaaaatcttcttaacaagttttc

SEQ ID NO: 30047 - DNA, 25 bp, Artificial sequence
  SiRNA target sequence
caaaaatcttcttaacaagttttct

SEQ ID NO: 30048 - DNA, 25 bp, Artificial sequence
  SiRNA target sequence
aaaaatcttcttaacaagttttcta

SEQ ID NO: 30049 - DNA, 25 bp, Artificial sequence
  SiRNA target sequence
aaaatcttcttaacaagttttctaa

SEQ ID NO: 30050 - DNA, 25 bp, Artificial sequence
  SiRNA target sequence
aaatcttcttaacaagttttctaac

SEQ ID NO: 30051 - DNA, 25 bp, Artificial sequence
  SiRNA target sequence
aatcttcttaacaagttttctaaca

SEQ ID NO: 30052 - DNA, 25 bp, Artificial sequence
  SiRNA target sequence
atcttcttaacaagttttctaacat

SEQ ID NO: 30053 - DNA, 25 bp, Artificial sequence
  SiRNA target sequence
tcttcttaacaagttttctaacata

SEQ ID NO: 30054 - DNA, 25 bp, Artificial sequence
  SiRNA target sequence
cttcttaacaagttttctaacatac

SEQ ID NO: 30055 - DNA, 25 bp, Artificial sequence
  SiRNA target sequence
ttcttaacaagttttctaacatacg

SEQ ID NO: 30056 - DNA, 25 bp, Artificial sequence
  SiRNA target sequence
tcttaacaagttttctaacatacgg

SEQ ID NO: 30057 - DNA, 25 bp, Artificial sequence
  SiRNA target sequence
cttaacaagttttctaacatacggc

SEQ ID NO: 30058 - DNA, 25 bp, Artificial sequence
  SiRNA target sequence
ttaacaagttttctaacatacggca

SEQ ID NO: 30059 - DNA, 25 bp, Artificial sequence
  SiRNA target sequence
taacaagttttctaacatacggcat

SEQ ID NO: 30060 - DNA, 25 bp, Artificial sequence
  SiRNA target sequence
aacaagttttctaacatacggcatt

SEQ ID NO: 30061 - DNA, 25 bp, Artificial sequence
  SiRNA target sequence
acaagttttctaacatacggcattc

SEQ ID NO: 30062 - DNA, 25 bp, Artificial sequence
  SiRNA target sequence
caagttttctaacatacggcattcg

SEQ ID NO: 30063 - DNA, 25 bp, Artificial sequence
  SiRNA target sequence
aagttttctaacatacggcattcgt

SEQ ID NO: 30064 - DNA, 25 bp, Artificial sequence
  SiRNA target sequence
agttttctaacatacggcattcgtg

SEQ ID NO: 30065 - DNA, 25 bp, Artificial sequence
  SiRNA target sequence
gttttctaacatacggcattcgtgt

SEQ ID NO: 30066 - DNA, 25 bp, Artificial sequence
  SiRNA target sequence
ttttctaacatacggcattcgtgtc

SEQ ID NO: 30067 - DNA, 25 bp, Artificial sequence
  SiRNA target sequence
tttctaacatacggcattcgtgtca

SEQ ID NO: 30068 - DNA, 25 bp, Artificial sequence
  SiRNA target sequence
ttctaacatacggcattcgtgtcat

SEQ ID NO: 30069 - DNA, 25 bp, Artificial sequence
  SiRNA target sequence
tctaacatacggcattcgtgtcatt

SEQ ID NO: 30070 - DNA, 25 bp, Artificial sequence
  SiRNA target sequence
ctaacatacggcattcgtgtcattc

SEQ ID NO: 30071 - DNA, 25 bp, Artificial sequence
  SiRNA target sequence
taacatacggcattcgtgtcattcc

SEQ ID NO: 30072 - DNA, 25 bp, Artificial sequence
  SiRNA target sequence
aacatacggcattcgtgtcattcca

SEQ ID NO: 30073 - DNA, 25 bp, Artificial sequence
  SiRNA target sequence
acatacggcattcgtgtcattccac

SEQ ID NO: 30074 - DNA, 25 bp, Artificial sequence
  SiRNA target sequence
catacggcattcgtgtcattccacc

SEQ ID NO: 30075 - DNA, 25 bp, Artificial sequence
  SiRNA target sequence
atacggcattcgtgtcattccaccc

SEQ ID NO: 30076 - DNA, 25 bp, Artificial sequence
  SiRNA target sequence
tacggcattcgtgtcattccaccca

SEQ ID NO: 30077 - DNA, 25 bp, Artificial sequence
  SiRNA target sequence
acggcattcgtgtcattccacccac

SEQ ID NO: 30078 - DNA, 25 bp, Artificial sequence
  SiRNA target sequence
cggcattcgtgtcattccacccaca

SEQ ID NO: 30079 - DNA, 25 bp, Artificial sequence
  SiRNA target sequence
ggcattcgtgtcattccacccacaa

SEQ ID NO: 30080 - DNA, 25 bp, Artificial sequence
  SiRNA target sequence
gcattcgtgtcattccacccacaag

SEQ ID NO: 30081 - DNA, 25 bp, Artificial sequence
  SiRNA target sequence
cattcgtgtcattccacccacaagt

SEQ ID NO: 30082 - DNA, 25 bp, Artificial sequence
  SiRNA target sequence
attcgtgtcattccacccacaagta

SEQ ID NO: 30083 - DNA, 25 bp, Artificial sequence
  SiRNA target sequence
ttcgtgtcattccacccacaagtat

SEQ ID NO: 30084 - DNA, 25 bp, Artificial sequence
  SiRNA target sequence
tcgtgtcattccacccacaagtata

SEQ ID NO: 30085 - DNA, 25 bp, Artificial sequence
  SiRNA target sequence
cgtgtcattccacccacaagtataa

SEQ ID NO: 30086 - DNA, 25 bp, Artificial sequence
  SiRNA target sequence
gtgtcattccacccacaagtataac

SEQ ID NO: 30087 - DNA, 25 bp, Artificial sequence
  SiRNA target sequence
tgtcattccacccacaagtataacg

SEQ ID NO: 30088 - DNA, 25 bp, Artificial sequence
  SiRNA target sequence
gtcattccacccacaagtataacgt

SEQ ID NO: 30089 - DNA, 25 bp, Artificial sequence
  SiRNA target sequence
tcattccacccacaagtataacgtg

SEQ ID NO: 30090 - DNA, 25 bp, Artificial sequence
  SiRNA target sequence
cattccacccacaagtataacgtgt

SEQ ID NO: 30091 - DNA, 25 bp, Artificial sequence
  SiRNA target sequence
attccacccacaagtataacgtgtt

SEQ ID NO: 30092 - DNA, 25 bp, Artificial sequence
  SiRNA target sequence
ttccacccacaagtataacgtgttt

SEQ ID NO: 30093 - DNA, 25 bp, Artificial sequence
  SiRNA target sequence
tccacccacaagtataacgtgttta

SEQ ID NO: 30094 - DNA, 25 bp, Artificial sequence
  SiRNA target sequence
ccacccacaagtataacgtgtttaa

SEQ ID NO: 30095 - DNA, 25 bp, Artificial sequence
  SiRNA target sequence
cacccacaagtataacgtgtttaat

SEQ ID NO: 30096 - DNA, 25 bp, Artificial sequence
  SiRNA target sequence
acccacaagtataacgtgtttaata

SEQ ID NO: 30097 - DNA, 25 bp, Artificial sequence
  SiRNA target sequence
cccacaagtataacgtgtttaatat

SEQ ID NO: 30098 - DNA, 25 bp, Artificial sequence
  SiRNA target sequence
ccacaagtataacgtgtttaatatc

SEQ ID NO: 30099 - DNA, 25 bp, Artificial sequence
  SiRNA target sequence
cacaagtataacgtgtttaatatca

SEQ ID NO: 30100 - DNA, 25 bp, Artificial sequence
  SiRNA target sequence
acaagtataacgtgtttaatatcac

SEQ ID NO: 30101 - DNA, 25 bp, Artificial sequence
  SiRNA target sequence
caagtataacgtgtttaatatcact

SEQ ID NO: 30102 - DNA, 25 bp, Artificial sequence
  SiRNA target sequence
aagtataacgtgtttaatatcactt

SEQ ID NO: 30103 - DNA, 25 bp, Artificial sequence
  SiRNA target sequence
agtataacgtgtttaatatcacttt

SEQ ID NO: 30104 - DNA, 25 bp, Artificial sequence
  SiRNA target sequence
gtataacgtgtttaatatcactttt

SEQ ID NO: 30105 - DNA, 25 bp, Artificial sequence
  SiRNA target sequence
tataacgtgtttaatatcactttta

SEQ ID NO: 30106 - DNA, 25 bp, Artificial sequence
  SiRNA target sequence
ataacgtgtttaatatcacttttag

SEQ ID NO: 30107 - DNA, 25 bp, Artificial sequence
  SiRNA target sequence
taacgtgtttaatatcacttttagt

SEQ ID NO: 30108 - DNA, 25 bp, Artificial sequence
  SiRNA target sequence
aacgtgtttaatatcacttttagtt

SEQ ID NO: 30109 - DNA, 25 bp, Artificial sequence
  SiRNA target sequence
acgtgtttaatatcacttttagtta

SEQ ID NO: 30110 - DNA, 25 bp, Artificial sequence
  SiRNA target sequence
cgtgtttaatatcacttttagttat

SEQ ID NO: 30111 - DNA, 25 bp, Artificial sequence
  SiRNA target sequence
gtgtttaatatcacttttagttata

SEQ ID NO: 30112 - DNA, 25 bp, Artificial sequence
  SiRNA target sequence
tgtttaatatcacttttagttatat

SEQ ID NO: 30113 - DNA, 25 bp, Artificial sequence
  SiRNA target sequence
gtttaatatcacttttagttatatt

SEQ ID NO: 30114 - DNA, 25 bp, Artificial sequence
  SiRNA target sequence
tttaatatcacttttagttatattg

SEQ ID NO: 30115 - DNA, 25 bp, Artificial sequence
  SiRNA target sequence
ttaatatcacttttagttatattgg

SEQ ID NO: 30116 - DNA, 25 bp, Artificial sequence
  SiRNA target sequence
taatatcacttttagttatattggc

SEQ ID NO: 30117 - DNA, 25 bp, Artificial sequence
  SiRNA target sequence
aatatcacttttagttatattggca

SEQ ID NO: 30118 - DNA, 25 bp, Artificial sequence
  SiRNA target sequence
atatcacttttagttatattggcat

SEQ ID NO: 30119 - DNA, 25 bp, Artificial sequence
  SiRNA target sequence
tatcacttttagttatattggcatc

SEQ ID NO: 30120 - DNA, 25 bp, Artificial sequence
  SiRNA target sequence
atcacttttagttatattggcatct

SEQ ID NO: 30121 - DNA, 25 bp, Artificial sequence
  SiRNA target sequence
tcacttttagttatattggcatctc

SEQ ID NO: 30122 - DNA, 25 bp, Artificial sequence
  SiRNA target sequence
cacttttagttatattggcatctct

SEQ ID NO: 30123 - DNA, 25 bp, Artificial sequence
  SiRNA target sequence
acttttagttatattggcatctcta

SEQ ID NO: 30124 - DNA, 25 bp, Artificial sequence
  SiRNA target sequence
cttttagttatattggcatctctaa

SEQ ID NO: 30125 - DNA, 25 bp, Artificial sequence
  SiRNA target sequence
ttttagttatattggcatctctaat

SEQ ID NO: 30126 - DNA, 25 bp, Artificial sequence
  SiRNA target sequence
tttagttatattggcatctctaata

SEQ ID NO: 30127 - DNA, 25 bp, Artificial sequence
  SiRNA target sequence
ttagttatattggcatctctaatag

SEQ ID NO: 30128 - DNA, 25 bp, Artificial sequence
  SiRNA target sequence
tagttatattggcatctctaatagc

SEQ ID NO: 30129 - DNA, 25 bp, Artificial sequence
  SiRNA target sequence
agttatattggcatctctaatagct

SEQ ID NO: 30130 - DNA, 25 bp, Artificial sequence
  SiRNA target sequence
gttatattggcatctctaatagctt

SEQ ID NO: 30131 - DNA, 25 bp, Artificial sequence
  SiRNA target sequence
ttatattggcatctctaatagcttt

SEQ ID NO: 30132 - DNA, 25 bp, Artificial sequence
  SiRNA target sequence
tatattggcatctctaatagcttta

SEQ ID NO: 30133 - DNA, 25 bp, Artificial sequence
  SiRNA target sequence
atattggcatctctaatagctttaa

SEQ ID NO: 30134 - DNA, 25 bp, Artificial sequence
  SiRNA target sequence
tattggcatctctaatagctttaag

SEQ ID NO: 30135 - DNA, 25 bp, Artificial sequence
  SiRNA target sequence
attggcatctctaatagctttaaga

SEQ ID NO: 30136 - DNA, 25 bp, Artificial sequence
  SiRNA target sequence
ttggcatctctaatagctttaagac

SEQ ID NO: 30137 - DNA, 25 bp, Artificial sequence
  SiRNA target sequence
tggcatctctaatagctttaagaca

SEQ ID NO: 30138 - DNA, 25 bp, Artificial sequence
  SiRNA target sequence
ggcatctctaatagctttaagacag

SEQ ID NO: 30139 - DNA, 25 bp, Artificial sequence
  SiRNA target sequence
gcatctctaatagctttaagacagg

SEQ ID NO: 30140 - DNA, 25 bp, Artificial sequence
  SiRNA target sequence
catctctaatagctttaagacaggg

SEQ ID NO: 30141 - DNA, 25 bp, Artificial sequence
  SiRNA target sequence
atctctaatagctttaagacagggg

SEQ ID NO: 30142 - DNA, 25 bp, Artificial sequence
  SiRNA target sequence
tctctaatagctttaagacaggggt

SEQ ID NO: 30143 - DNA, 25 bp, Artificial sequence
  SiRNA target sequence
ctctaatagctttaagacaggggtt

SEQ ID NO: 30144 - DNA, 25 bp, Artificial sequence
  SiRNA target sequence
tctaatagctttaagacaggggttt

SEQ ID NO: 30145 - DNA, 25 bp, Artificial sequence
  SiRNA target sequence
ctaatagctttaagacaggggttta

SEQ ID NO: 30146 - DNA, 25 bp, Artificial sequence
  SiRNA target sequence
taatagctttaagacaggggtttat

SEQ ID NO: 30147 - DNA, 25 bp, Artificial sequence
  SiRNA target sequence
aatagctttaagacaggggtttatt

SEQ ID NO: 30148 - DNA, 25 bp, Artificial sequence
  SiRNA target sequence
atagctttaagacaggggtttattg

SEQ ID NO: 30149 - DNA, 25 bp, Artificial sequence
  SiRNA target sequence
tagctttaagacaggggtttattgt

SEQ ID NO: 30150 - DNA, 25 bp, Artificial sequence
  SiRNA target sequence
agctttaagacaggggtttattgtt

SEQ ID NO: 30151 - DNA, 25 bp, Artificial sequence
  SiRNA target sequence
gctttaagacaggggtttattgttt

SEQ ID NO: 30152 - DNA, 25 bp, Artificial sequence
  SiRNA target sequence
ctttaagacaggggtttattgtttt

SEQ ID NO: 30153 - DNA, 25 bp, Artificial sequence
  SiRNA target sequence
tttaagacaggggtttattgttttg

SEQ ID NO: 30154 - DNA, 25 bp, Artificial sequence
  SiRNA target sequence
ttaagacaggggtttattgttttgt

SEQ ID NO: 30155 - DNA, 25 bp, Artificial sequence
  SiRNA target sequence
taagacaggggtttattgttttgtc

SEQ ID NO: 30156 - DNA, 25 bp, Artificial sequence
  SiRNA target sequence
aagacaggggtttattgttttgtct

SEQ ID NO: 30157 - DNA, 25 bp, Artificial sequence
  SiRNA target sequence
agacaggggtttattgttttgtcta

SEQ ID NO: 30158 - DNA, 25 bp, Artificial sequence
  SiRNA target sequence
gacaggggtttattgttttgtctat

SEQ ID NO: 30159 - DNA, 25 bp, Artificial sequence
  SiRNA target sequence
acaggggtttattgttttgtctatt

SEQ ID NO: 30160 - DNA, 25 bp, Artificial sequence
  SiRNA target sequence
caggggtttattgttttgtctatta

SEQ ID NO: 30161 - DNA, 25 bp, Artificial sequence
  SiRNA target sequence
aggggtttattgttttgtctattaa

SEQ ID NO: 30162 - DNA, 25 bp, Artificial sequence
  SiRNA target sequence
ggggtttattgttttgtctattaac

SEQ ID NO: 30163 - DNA, 25 bp, Artificial sequence
  SiRNA target sequence
gggtttattgttttgtctattaact

SEQ ID NO: 30164 - DNA, 25 bp, Artificial sequence
  SiRNA target sequence
ggtttattgttttgtctattaactt

SEQ ID NO: 30165 - DNA, 25 bp, Artificial sequence
  SiRNA target sequence
gtttattgttttgtctattaacttt

SEQ ID NO: 30166 - DNA, 25 bp, Artificial sequence
  SiRNA target sequence
tttattgttttgtctattaactttt

SEQ ID NO: 30167 - DNA, 25 bp, Artificial sequence
  SiRNA target sequence
ttattgttttgtctattaacttttt

SEQ ID NO: 30168 - DNA, 25 bp, Artificial sequence
  SiRNA target sequence
tattgttttgtctattaactttttt

SEQ ID NO: 30169 - DNA, 25 bp, Artificial sequence
  SiRNA target sequence
attgttttgtctattaacttttttg

SEQ ID NO: 30170 - DNA, 25 bp, Artificial sequence
  SiRNA target sequence
ttgttttgtctattaacttttttgt

SEQ ID NO: 30171 - DNA, 25 bp, Artificial sequence
  SiRNA target sequence
tgttttgtctattaacttttttgta

SEQ ID NO: 30172 - DNA, 25 bp, Artificial sequence
  SiRNA target sequence
gttttgtctattaacttttttgtaa

SEQ ID NO: 30173 - DNA, 25 bp, Artificial sequence
  SiRNA target sequence
ttttgtctattaacttttttgtaat

SEQ ID NO: 30174 - DNA, 25 bp, Artificial sequence
  SiRNA target sequence
tttgtctattaacttttttgtaatt

SEQ ID NO: 30175 - DNA, 25 bp, Artificial sequence
  SiRNA target sequence
ttgtctattaacttttttgtaattt

SEQ ID NO: 30176 - DNA, 25 bp, Artificial sequence
  SiRNA target sequence
tgtctattaacttttttgtaatttt

SEQ ID NO: 30177 - DNA, 25 bp, Artificial sequence
  SiRNA target sequence
gtctattaacttttttgtaattttt

SEQ ID NO: 30178 - DNA, 25 bp, Artificial sequence
  SiRNA target sequence
tctattaacttttttgtaatttttt

SEQ ID NO: 30179 - DNA, 25 bp, Artificial sequence
  SiRNA target sequence
ctattaacttttttgtaattttttc

SEQ ID NO: 30180 - DNA, 25 bp, Artificial sequence
  SiRNA target sequence
tattaacttttttgtaattttttca

SEQ ID NO: 30181 - DNA, 25 bp, Artificial sequence
  SiRNA target sequence
attaacttttttgtaattttttcaa

SEQ ID NO: 30182 - DNA, 25 bp, Artificial sequence
  SiRNA target sequence
ttaacttttttgtaattttttcaaa

SEQ ID NO: 30183 - DNA, 25 bp, Artificial sequence
  SiRNA target sequence
taacttttttgtaattttttcaaat

SEQ ID NO: 30184 - DNA, 25 bp, Artificial sequence
  SiRNA target sequence
aacttttttgtaattttttcaaatt

SEQ ID NO: 30185 - DNA, 25 bp, Artificial sequence
  SiRNA target sequence
acttttttgtaattttttcaaattc

SEQ ID NO: 30186 - DNA, 25 bp, Artificial sequence
  SiRNA target sequence
cttttttgtaattttttcaaattcg

SEQ ID NO: 30187 - DNA, 25 bp, Artificial sequence
  SiRNA target sequence
ttttttgtaattttttcaaattcgt

SEQ ID NO: 30188 - DNA, 25 bp, Artificial sequence
  SiRNA target sequence
tttttgtaattttttcaaattcgtc

SEQ ID NO: 30189 - DNA, 25 bp, Artificial sequence
  SiRNA target sequence
ttttgtaattttttcaaattcgtcg

SEQ ID NO: 30190 - DNA, 25 bp, Artificial sequence
  SiRNA target sequence
tttgtaattttttcaaattcgtcgc

SEQ ID NO: 30191 - DNA, 25 bp, Artificial sequence
  SiRNA target sequence
ttgtaattttttcaaattcgtcgcg

SEQ ID NO: 30192 - DNA, 25 bp, Artificial sequence
  SiRNA target sequence
tgtaattttttcaaattcgtcgcgt

SEQ ID NO: 30193 - DNA, 25 bp, Artificial sequence
  SiRNA target sequence
gtaattttttcaaattcgtcgcgtg

SEQ ID NO: 30194 - DNA, 25 bp, Artificial sequence
  SiRNA target sequence
taattttttcaaattcgtcgcgtgt

SEQ ID NO: 30195 - DNA, 25 bp, Artificial sequence
  SiRNA target sequence
aattttttcaaattcgtcgcgtgta

SEQ ID NO: 30196 - DNA, 25 bp, Artificial sequence
  SiRNA target sequence
attttttcaaattcgtcgcgtgtaa

SEQ ID NO: 30197 - DNA, 25 bp, Artificial sequence
  SiRNA target sequence
ttttttcaaattcgtcgcgtgtaat

SEQ ID NO: 30198 - DNA, 25 bp, Artificial sequence
  SiRNA target sequence
tttttcaaattcgtcgcgtgtaatt

SEQ ID NO: 30199 - DNA, 25 bp, Artificial sequence
  SiRNA target sequence
ttttcaaattcgtcgcgtgtaatta

SEQ ID NO: 30200 - DNA, 25 bp, Artificial sequence
  SiRNA target sequence
tttcaaattcgtcgcgtgtaattac

SEQ ID NO: 30201 - DNA, 25 bp, Artificial sequence
  SiRNA target sequence
ttcaaattcgtcgcgtgtaattacc

SEQ ID NO: 30202 - DNA, 25 bp, Artificial sequence
  SiRNA target sequence
tcaaattcgtcgcgtgtaattacct

SEQ ID NO: 30203 - DNA, 25 bp, Artificial sequence
  SiRNA target sequence
caaattcgtcgcgtgtaattacctc

SEQ ID NO: 30204 - DNA, 25 bp, Artificial sequence
  SiRNA target sequence
aaattcgtcgcgtgtaattacctct

SEQ ID NO: 30205 - DNA, 25 bp, Artificial sequence
  SiRNA target sequence
aattcgtcgcgtgtaattacctctt

SEQ ID NO: 30206 - DNA, 25 bp, Artificial sequence
  SiRNA target sequence
attcgtcgcgtgtaattacctcttt

SEQ ID NO: 30207 - DNA, 25 bp, Artificial sequence
  SiRNA target sequence
ttcgtcgcgtgtaattacctctttt

SEQ ID NO: 30208 - DNA, 25 bp, Artificial sequence
  SiRNA target sequence
tcgtcgcgtgtaattacctctttta

SEQ ID NO: 30209 - DNA, 25 bp, Artificial sequence
  SiRNA target sequence
cgtcgcgtgtaattacctcttttaa

SEQ ID NO: 30210 - DNA, 25 bp, Artificial sequence
  SiRNA target sequence
gtcgcgtgtaattacctcttttaag

SEQ ID NO: 30211 - DNA, 25 bp, Artificial sequence
  SiRNA target sequence
tcgcgtgtaattacctcttttaagt

SEQ ID NO: 30212 - DNA, 25 bp, Artificial sequence
  SiRNA target sequence
cgcgtgtaattacctcttttaagtg

SEQ ID NO: 30213 - DNA, 25 bp, Artificial sequence
  SiRNA target sequence
gcgtgtaattacctcttttaagtga

SEQ ID NO: 30214 - DNA, 25 bp, Artificial sequence
  SiRNA target sequence
cgtgtaattacctcttttaagtgat

SEQ ID NO: 30215 - DNA, 25 bp, Artificial sequence
  SiRNA target sequence
gtgtaattacctcttttaagtgata

SEQ ID NO: 30216 - DNA, 25 bp, Artificial sequence
  SiRNA target sequence
tgtaattacctcttttaagtgataa

SEQ ID NO: 30217 - DNA, 25 bp, Artificial sequence
  SiRNA target sequence
gtaattacctcttttaagtgataat

SEQ ID NO: 30218 - DNA, 25 bp, Artificial sequence
  SiRNA target sequence
taattacctcttttaagtgataatt

SEQ ID NO: 30219 - DNA, 25 bp, Artificial sequence
  SiRNA target sequence
aattacctcttttaagtgataattc

SEQ ID NO: 30220 - DNA, 25 bp, Artificial sequence
  SiRNA target sequence
attacctcttttaagtgataattct

SEQ ID NO: 30221 - DNA, 25 bp, Artificial sequence
  SiRNA target sequence
ttacctcttttaagtgataattctt

SEQ ID NO: 30222 - DNA, 25 bp, Artificial sequence
  SiRNA target sequence
tacctcttttaagtgataattcttt

SEQ ID NO: 30223 - DNA, 25 bp, Artificial sequence
  SiRNA target sequence
acctcttttaagtgataattctttt

SEQ ID NO: 30224 - DNA, 25 bp, Artificial sequence
  SiRNA target sequence
cctcttttaagtgataattcttttt

SEQ ID NO: 30225 - DNA, 25 bp, Artificial sequence
  SiRNA target sequence
ctcttttaagtgataattcttttta

SEQ ID NO: 30226 - DNA, 25 bp, Artificial sequence
  SiRNA target sequence
tcttttaagtgataattctttttac

SEQ ID NO: 30227 - DNA, 25 bp, Artificial sequence
  SiRNA target sequence
cttttaagtgataattctttttact

SEQ ID NO: 30228 - DNA, 25 bp, Artificial sequence
  SiRNA target sequence
ttttaagtgataattctttttacta

SEQ ID NO: 30229 - DNA, 25 bp, Artificial sequence
  SiRNA target sequence
tttaagtgataattctttttactat

SEQ ID NO: 30230 - DNA, 25 bp, Artificial sequence
  SiRNA target sequence
ttaagtgataattctttttactatc

SEQ ID NO: 30231 - DNA, 25 bp, Artificial sequence
  SiRNA target sequence
taagtgataattctttttactatcg

SEQ ID NO: 30232 - DNA, 25 bp, Artificial sequence
  SiRNA target sequence
aagtgataattctttttactatcgt

SEQ ID NO: 30233 - DNA, 25 bp, Artificial sequence
  SiRNA target sequence
agtgataattctttttactatcgtt

SEQ ID NO: 30234 - DNA, 25 bp, Artificial sequence
  SiRNA target sequence
gtgataattctttttactatcgtta

SEQ ID NO: 30235 - DNA, 25 bp, Artificial sequence
  SiRNA target sequence
tgataattctttttactatcgttat

SEQ ID NO: 30236 - DNA, 25 bp, Artificial sequence
  SiRNA target sequence
gataattctttttactatcgttata

SEQ ID NO: 30237 - DNA, 25 bp, Artificial sequence
  SiRNA target sequence
ataattctttttactatcgttataa

SEQ ID NO: 30238 - DNA, 25 bp, Artificial sequence
  SiRNA target sequence
taattctttttactatcgttataaa

SEQ ID NO: 30239 - DNA, 25 bp, Artificial sequence
  SiRNA target sequence
aattctttttactatcgttataaat

SEQ ID NO: 30240 - DNA, 25 bp, Artificial sequence
  SiRNA target sequence
attctttttactatcgttataaata

SEQ ID NO: 30241 - DNA, 25 bp, Artificial sequence
  SiRNA target sequence
ttctttttactatcgttataaatat

SEQ ID NO: 30242 - DNA, 25 bp, Artificial sequence
  SiRNA target sequence
tctttttactatcgttataaatata

SEQ ID NO: 30243 - DNA, 25 bp, Artificial sequence
  SiRNA target sequence
ctttttactatcgttataaatatac

SEQ ID NO: 30244 - DNA, 25 bp, Artificial sequence
  SiRNA target sequence
tttttactatcgttataaatatacg

SEQ ID NO: 30245 - DNA, 25 bp, Artificial sequence
  SiRNA target sequence
ttttactatcgttataaatatacgg

SEQ ID NO: 30246 - DNA, 25 bp, Artificial sequence
  SiRNA target sequence
tttactatcgttataaatatacgga

SEQ ID NO: 30247 - DNA, 25 bp, Artificial sequence
  SiRNA target sequence
ttactatcgttataaatatacggaa

SEQ ID NO: 30248 - DNA, 25 bp, Artificial sequence
  SiRNA target sequence
tactatcgttataaatatacggaat

SEQ ID NO: 30249 - DNA, 25 bp, Artificial sequence
  SiRNA target sequence
actatcgttataaatatacggaata

SEQ ID NO: 30250 - DNA, 25 bp, Artificial sequence
  SiRNA target sequence
ctatcgttataaatatacggaatat

SEQ ID NO: 30251 - DNA, 25 bp, Artificial sequence
  SiRNA target sequence
tatcgttataaatatacggaatatt

SEQ ID NO: 30252 - DNA, 25 bp, Artificial sequence
  SiRNA target sequence
atcgttataaatatacggaatatta

SEQ ID NO: 30253 - DNA, 25 bp, Artificial sequence
  SiRNA target sequence
tcgttataaatatacggaatattaa

SEQ ID NO: 30254 - DNA, 25 bp, Artificial sequence
  SiRNA target sequence
cgttataaatatacggaatattaat

SEQ ID NO: 30255 - DNA, 25 bp, Artificial sequence
  SiRNA target sequence
gttataaatatacggaatattaatt

SEQ ID NO: 30256 - DNA, 25 bp, Artificial sequence
  SiRNA target sequence
ttataaatatacggaatattaattt

SEQ ID NO: 30257 - DNA, 25 bp, Artificial sequence
  SiRNA target sequence
tataaatatacggaatattaatttc

SEQ ID NO: 30258 - DNA, 25 bp, Artificial sequence
  SiRNA target sequence
ataaatatacggaatattaatttca

SEQ ID NO: 30259 - DNA, 25 bp, Artificial sequence
  SiRNA target sequence
taaatatacggaatattaatttcag

SEQ ID NO: 30260 - DNA, 25 bp, Artificial sequence
  SiRNA target sequence
aaatatacggaatattaatttcaga

SEQ ID NO: 30261 - DNA, 25 bp, Artificial sequence
  SiRNA target sequence
aatatacggaatattaatttcagac

SEQ ID NO: 30262 - DNA, 25 bp, Artificial sequence
  SiRNA target sequence
atatacggaatattaatttcagacg

SEQ ID NO: 30263 - DNA, 25 bp, Artificial sequence
  SiRNA target sequence
tatacggaatattaatttcagacga

SEQ ID NO: 30264 - DNA, 25 bp, Artificial sequence
  SiRNA target sequence
atacggaatattaatttcagacgaa

SEQ ID NO: 30265 - DNA, 25 bp, Artificial sequence
  SiRNA target sequence
tacggaatattaatttcagacgaaa

SEQ ID NO: 30266 - DNA, 25 bp, Artificial sequence
  SiRNA target sequence
acggaatattaatttcagacgaaag

SEQ ID NO: 30267 - DNA, 25 bp, Artificial sequence
  SiRNA target sequence
cggaatattaatttcagacgaaaga

SEQ ID NO: 30268 - DNA, 25 bp, Artificial sequence
  SiRNA target sequence
ggaatattaatttcagacgaaagat

SEQ ID NO: 30269 - DNA, 25 bp, Artificial sequence
  SiRNA target sequence
gaatattaatttcagacgaaagatt

SEQ ID NO: 30270 - DNA, 25 bp, Artificial sequence
  SiRNA target sequence
aatattaatttcagacgaaagatta

SEQ ID NO: 30271 - DNA, 25 bp, Artificial sequence
  SiRNA target sequence
atattaatttcagacgaaagattag

SEQ ID NO: 30272 - DNA, 25 bp, Artificial sequence
  SiRNA target sequence
tattaatttcagacgaaagattaga

SEQ ID NO: 30273 - DNA, 25 bp, Artificial sequence
  SiRNA target sequence
attaatttcagacgaaagattagac

SEQ ID NO: 30274 - DNA, 25 bp, Artificial sequence
  SiRNA target sequence
ttaatttcagacgaaagattagacg

SEQ ID NO: 30275 - DNA, 25 bp, Artificial sequence
  SiRNA target sequence
taatttcagacgaaagattagacga

SEQ ID NO: 30276 - DNA, 25 bp, Artificial sequence
  SiRNA target sequence
aatttcagacgaaagattagacgac

SEQ ID NO: 30277 - DNA, 25 bp, Artificial sequence
  SiRNA target sequence
atttcagacgaaagattagacgaca

SEQ ID NO: 30278 - DNA, 25 bp, Artificial sequence
  SiRNA target sequence
tttcagacgaaagattagacgacag

SEQ ID NO: 30279 - DNA, 25 bp, Artificial sequence
  SiRNA target sequence
ttcagacgaaagattagacgacagt

SEQ ID NO: 30280 - DNA, 25 bp, Artificial sequence
  SiRNA target sequence
tcagacgaaagattagacgacagtt

SEQ ID NO: 30281 - DNA, 25 bp, Artificial sequence
  SiRNA target sequence
cagacgaaagattagacgacagttc

SEQ ID NO: 30282 - DNA, 25 bp, Artificial sequence
  SiRNA target sequence
agacgaaagattagacgacagttct

SEQ ID NO: 30283 - DNA, 25 bp, Artificial sequence
  SiRNA target sequence
gacgaaagattagacgacagttctt

SEQ ID NO: 30284 - DNA, 25 bp, Artificial sequence
  SiRNA target sequence
acgaaagattagacgacagttcttt

SEQ ID NO: 30285 - DNA, 25 bp, Artificial sequence
  SiRNA target sequence
cgaaagattagacgacagttctttt

SEQ ID NO: 30286 - DNA, 25 bp, Artificial sequence
  SiRNA target sequence
gaaagattagacgacagttcttttt

SEQ ID NO: 30287 - DNA, 25 bp, Artificial sequence
  SiRNA target sequence
aaagattagacgacagttctttttt

SEQ ID NO: 30288 - DNA, 25 bp, Artificial sequence
  SiRNA target sequence
aagattagacgacagttcttttttc

SEQ ID NO: 30289 - DNA, 25 bp, Artificial sequence
  SiRNA target sequence
agattagacgacagttcttttttca

SEQ ID NO: 30290 - DNA, 25 bp, Artificial sequence
  SiRNA target sequence
gattagacgacagttcttttttcat

SEQ ID NO: 30291 - DNA, 25 bp, Artificial sequence
  SiRNA target sequence
attagacgacagttcttttttcatt

SEQ ID NO: 30292 - DNA, 25 bp, Artificial sequence
  SiRNA target sequence
ttagacgacagttcttttttcattt

SEQ ID NO: 30293 - DNA, 25 bp, Artificial sequence
  SiRNA target sequence
tagacgacagttcttttttcatttt

SEQ ID NO: 30294 - DNA, 25 bp, Artificial sequence
  SiRNA target sequence
agacgacagttcttttttcattttt

SEQ ID NO: 30295 - DNA, 25 bp, Artificial sequence
  SiRNA target sequence
gacgacagttcttttttcatttttt

SEQ ID NO: 30296 - DNA, 25 bp, Artificial sequence
  SiRNA target sequence
acgacagttcttttttcattttttc

SEQ ID NO: 30297 - DNA, 25 bp, Artificial sequence
  SiRNA target sequence
cgacagttcttttttcattttttcc

SEQ ID NO: 30298 - DNA, 25 bp, Artificial sequence
  SiRNA target sequence
gacagttcttttttcattttttccg

SEQ ID NO: 30299 - DNA, 25 bp, Artificial sequence
  SiRNA target sequence
acagttcttttttcattttttccgc

SEQ ID NO: 30300 - DNA, 25 bp, Artificial sequence
  SiRNA target sequence
cagttcttttttcattttttccgct

SEQ ID NO: 30301 - DNA, 25 bp, Artificial sequence
  SiRNA target sequence
agttcttttttcattttttccgctg

SEQ ID NO: 30302 - DNA, 25 bp, Artificial sequence
  SiRNA target sequence
gttcttttttcattttttccgctgc

SEQ ID NO: 30303 - DNA, 25 bp, Artificial sequence
  SiRNA target sequence
ttcttttttcattttttccgctgct

SEQ ID NO: 30304 - DNA, 25 bp, Artificial sequence
  SiRNA target sequence
tcttttttcattttttccgctgctt

SEQ ID NO: 30305 - DNA, 25 bp, Artificial sequence
  SiRNA target sequence
cttttttcattttttccgctgcttc

SEQ ID NO: 30306 - DNA, 25 bp, Artificial sequence
  SiRNA target sequence
ttttttcattttttccgctgcttct

SEQ ID NO: 30307 - DNA, 25 bp, Artificial sequence
  SiRNA target sequence
tttttcattttttccgctgcttctt

SEQ ID NO: 30308 - DNA, 25 bp, Artificial sequence
  SiRNA target sequence
ttttcattttttccgctgcttcttt

SEQ ID NO: 30309 - DNA, 25 bp, Artificial sequence
  SiRNA target sequence
tttcattttttccgctgcttcttta

SEQ ID NO: 30310 - DNA, 25 bp, Artificial sequence
  SiRNA target sequence
ttcattttttccgctgcttctttaa

SEQ ID NO: 30311 - DNA, 25 bp, Artificial sequence
  SiRNA target sequence
tcattttttccgctgcttctttaat

SEQ ID NO: 30312 - DNA, 25 bp, Artificial sequence
  SiRNA target sequence
cattttttccgctgcttctttaatt

SEQ ID NO: 30313 - DNA, 25 bp, Artificial sequence
  SiRNA target sequence
attttttccgctgcttctttaattc

SEQ ID NO: 30314 - DNA, 25 bp, Artificial sequence
  SiRNA target sequence
ttttttccgctgcttctttaattct

SEQ ID NO: 30315 - DNA, 25 bp, Artificial sequence
  SiRNA target sequence
tttttccgctgcttctttaattcta

SEQ ID NO: 30316 - DNA, 25 bp, Artificial sequence
  SiRNA target sequence
ttttccgctgcttctttaattctat

SEQ ID NO: 30317 - DNA, 25 bp, Artificial sequence
  SiRNA target sequence
tttccgctgcttctttaattctatt

SEQ ID NO: 30318 - DNA, 25 bp, Artificial sequence
  SiRNA target sequence
ttccgctgcttctttaattctatta

SEQ ID NO: 30319 - DNA, 25 bp, Artificial sequence
  SiRNA target sequence
tccgctgcttctttaattctattat

SEQ ID NO: 30320 - DNA, 25 bp, Artificial sequence
  SiRNA target sequence
ccgctgcttctttaattctattata

SEQ ID NO: 30321 - DNA, 25 bp, Artificial sequence
  SiRNA target sequence
cgctgcttctttaattctattataa

SEQ ID NO: 30322 - DNA, 25 bp, Artificial sequence
  SiRNA target sequence
gctgcttctttaattctattataac

SEQ ID NO: 30323 - DNA, 25 bp, Artificial sequence
  SiRNA target sequence
ctgcttctttaattctattataaca

SEQ ID NO: 30324 - DNA, 25 bp, Artificial sequence
  SiRNA target sequence
tgcttctttaattctattataacaa

SEQ ID NO: 30325 - DNA, 25 bp, Artificial sequence
  SiRNA target sequence
gcttctttaattctattataacaag

SEQ ID NO: 30326 - DNA, 25 bp, Artificial sequence
  SiRNA target sequence
cttctttaattctattataacaaga

SEQ ID NO: 30327 - DNA, 25 bp, Artificial sequence
  SiRNA target sequence
ttctttaattctattataacaagaa

SEQ ID NO: 30328 - DNA, 25 bp, Artificial sequence
  SiRNA target sequence
tctttaattctattataacaagaat

SEQ ID NO: 30329 - DNA, 25 bp, Artificial sequence
  SiRNA target sequence
ctttaattctattataacaagaatc

SEQ ID NO: 30330 - DNA, 25 bp, Artificial sequence
  SiRNA target sequence
tttaattctattataacaagaatcg

SEQ ID NO: 30331 - DNA, 25 bp, Artificial sequence
  SiRNA target sequence
ttaattctattataacaagaatcgt

SEQ ID NO: 30332 - DNA, 25 bp, Artificial sequence
  SiRNA target sequence
taattctattataacaagaatcgtg

SEQ ID NO: 30333 - DNA, 25 bp, Artificial sequence
  SiRNA target sequence
aattctattataacaagaatcgtgt

SEQ ID NO: 30334 - DNA, 25 bp, Artificial sequence
  SiRNA target sequence
attctattataacaagaatcgtgtt

SEQ ID NO: 30335 - DNA, 25 bp, Artificial sequence
  SiRNA target sequence
ttctattataacaagaatcgtgttt

SEQ ID NO: 30336 - DNA, 25 bp, Artificial sequence
  SiRNA target sequence
tctattataacaagaatcgtgttta

SEQ ID NO: 30337 - DNA, 25 bp, Artificial sequence
  SiRNA target sequence
ctattataacaagaatcgtgtttaa

SEQ ID NO: 30338 - DNA, 25 bp, Artificial sequence
  SiRNA target sequence
tattataacaagaatcgtgtttaag

SEQ ID NO: 30339 - DNA, 25 bp, Artificial sequence
  SiRNA target sequence
attataacaagaatcgtgtttaagt

SEQ ID NO: 30340 - DNA, 25 bp, Artificial sequence
  SiRNA target sequence
ttataacaagaatcgtgtttaagta

SEQ ID NO: 30341 - DNA, 25 bp, Artificial sequence
  SiRNA target sequence
tataacaagaatcgtgtttaagtaa

SEQ ID NO: 30342 - DNA, 25 bp, Artificial sequence
  SiRNA target sequence
ataacaagaatcgtgtttaagtaaa

SEQ ID NO: 30343 - DNA, 25 bp, Artificial sequence
  SiRNA target sequence
taacaagaatcgtgtttaagtaaat

SEQ ID NO: 30344 - DNA, 25 bp, Artificial sequence
  SiRNA target sequence
aacaagaatcgtgtttaagtaaatc

SEQ ID NO: 30345 - DNA, 25 bp, Artificial sequence
  SiRNA target sequence
acaagaatcgtgtttaagtaaatca

SEQ ID NO: 30346 - DNA, 25 bp, Artificial sequence
  SiRNA target sequence
caagaatcgtgtttaagtaaatcaa

SEQ ID NO: 30347 - DNA, 25 bp, Artificial sequence
  SiRNA target sequence
aagaatcgtgtttaagtaaatcaat

SEQ ID NO: 30348 - DNA, 25 bp, Artificial sequence
  SiRNA target sequence
agaatcgtgtttaagtaaatcaatt

SEQ ID NO: 30349 - DNA, 25 bp, Artificial sequence
  SiRNA target sequence
gaatcgtgtttaagtaaatcaattc

SEQ ID NO: 30350 - DNA, 25 bp, Artificial sequence
  SiRNA target sequence
aatcgtgtttaagtaaatcaattcc

SEQ ID NO: 30351 - DNA, 25 bp, Artificial sequence
  SiRNA target sequence
atcgtgtttaagtaaatcaattcct

SEQ ID NO: 30352 - DNA, 25 bp, Artificial sequence
  SiRNA target sequence
tcgtgtttaagtaaatcaattcctg

SEQ ID NO: 30353 - DNA, 25 bp, Artificial sequence
  SiRNA target sequence
cgtgtttaagtaaatcaattcctgt

SEQ ID NO: 30354 - DNA, 25 bp, Artificial sequence
  SiRNA target sequence
gtgtttaagtaaatcaattcctgtt

SEQ ID NO: 30355 - DNA, 25 bp, Artificial sequence
  SiRNA target sequence
tgtttaagtaaatcaattcctgttc

SEQ ID NO: 30356 - DNA, 25 bp, Artificial sequence
  SiRNA target sequence
gtttaagtaaatcaattcctgttct

SEQ ID NO: 30357 - DNA, 25 bp, Artificial sequence
  SiRNA target sequence
tttaagtaaatcaattcctgttcta

SEQ ID NO: 30358 - DNA, 25 bp, Artificial sequence
  SiRNA target sequence
ttaagtaaatcaattcctgttctac

SEQ ID NO: 30359 - DNA, 25 bp, Artificial sequence
  SiRNA target sequence
taagtaaatcaattcctgttctact

SEQ ID NO: 30360 - DNA, 25 bp, Artificial sequence
  SiRNA target sequence
aagtaaatcaattcctgttctactt

SEQ ID NO: 30361 - DNA, 25 bp, Artificial sequence
  SiRNA target sequence
agtaaatcaattcctgttctacttt

SEQ ID NO: 30362 - DNA, 25 bp, Artificial sequence
  SiRNA target sequence
gtaaatcaattcctgttctactttt

SEQ ID NO: 30363 - DNA, 25 bp, Artificial sequence
  SiRNA target sequence
taaatcaattcctgttctactttta

SEQ ID NO: 30364 - DNA, 25 bp, Artificial sequence
  SiRNA target sequence
aaatcaattcctgttctacttttaa

SEQ ID NO: 30365 - DNA, 25 bp, Artificial sequence
  SiRNA target sequence
aatcaattcctgttctacttttaaa

SEQ ID NO: 30366 - DNA, 25 bp, Artificial sequence
  SiRNA target sequence
atcaattcctgttctacttttaaat

SEQ ID NO: 30367 - DNA, 25 bp, Artificial sequence
  SiRNA target sequence
tcaattcctgttctacttttaaatt

SEQ ID NO: 30368 - DNA, 25 bp, Artificial sequence
  SiRNA target sequence
caattcctgttctacttttaaattt

SEQ ID NO: 30369 - DNA, 25 bp, Artificial sequence
  SiRNA target sequence
aattcctgttctacttttaaatttt

SEQ ID NO: 30370 - DNA, 25 bp, Artificial sequence
  SiRNA target sequence
attcctgttctacttttaaattttt

SEQ ID NO: 30371 - DNA, 25 bp, Artificial sequence
  SiRNA target sequence
ttcctgttctacttttaaatttttc

SEQ ID NO: 30372 - DNA, 25 bp, Artificial sequence
  SiRNA target sequence
tcctgttctacttttaaatttttca

SEQ ID NO: 30373 - DNA, 25 bp, Artificial sequence
  SiRNA target sequence
cctgttctacttttaaatttttcat

SEQ ID NO: 30374 - DNA, 25 bp, Artificial sequence
  SiRNA target sequence
ctgttctacttttaaatttttcatt

SEQ ID NO: 30375 - DNA, 25 bp, Artificial sequence
  SiRNA target sequence
tgttctacttttaaatttttcatta

SEQ ID NO: 30376 - DNA, 25 bp, Artificial sequence
  SiRNA target sequence
gttctacttttaaatttttcattaa

SEQ ID NO: 30377 - DNA, 25 bp, Artificial sequence
  SiRNA target sequence
ttctacttttaaatttttcattaat

SEQ ID NO: 30378 - DNA, 25 bp, Artificial sequence
  SiRNA target sequence
tctacttttaaatttttcattaata

SEQ ID NO: 30379 - DNA, 25 bp, Artificial sequence
  SiRNA target sequence
ctacttttaaatttttcattaatat

SEQ ID NO: 30380 - DNA, 25 bp, Artificial sequence
  SiRNA target sequence
tacttttaaatttttcattaatata

SEQ ID NO: 30381 - DNA, 25 bp, Artificial sequence
  SiRNA target sequence
acttttaaatttttcattaatataa

SEQ ID NO: 30382 - DNA, 25 bp, Artificial sequence
  SiRNA target sequence
cttttaaatttttcattaatataat

SEQ ID NO: 30383 - DNA, 25 bp, Artificial sequence
  SiRNA target sequence
ttttaaatttttcattaatataatc

SEQ ID NO: 30384 - DNA, 25 bp, Artificial sequence
  SiRNA target sequence
tttaaatttttcattaatataatct

SEQ ID NO: 30385 - DNA, 25 bp, Artificial sequence
  SiRNA target sequence
ttaaatttttcattaatataatcta

SEQ ID NO: 30386 - DNA, 25 bp, Artificial sequence
  SiRNA target sequence
taaatttttcattaatataatctac

SEQ ID NO: 30387 - DNA, 25 bp, Artificial sequence
  SiRNA target sequence
aaatttttcattaatataatctact

SEQ ID NO: 30388 - DNA, 25 bp, Artificial sequence
  SiRNA target sequence
aatttttcattaatataatctacta

SEQ ID NO: 30389 - DNA, 25 bp, Artificial sequence
  SiRNA target sequence
atttttcattaatataatctactaa

SEQ ID NO: 30390 - DNA, 25 bp, Artificial sequence
  SiRNA target sequence
tttttcattaatataatctactaaa

SEQ ID NO: 30391 - DNA, 25 bp, Artificial sequence
  SiRNA target sequence
ttttcattaatataatctactaaag

SEQ ID NO: 30392 - DNA, 25 bp, Artificial sequence
  SiRNA target sequence
tttcattaatataatctactaaagt

SEQ ID NO: 30393 - DNA, 25 bp, Artificial sequence
  SiRNA target sequence
ttcattaatataatctactaaagta

SEQ ID NO: 30394 - DNA, 25 bp, Artificial sequence
  SiRNA target sequence
tcattaatataatctactaaagtat

SEQ ID NO: 30395 - DNA, 25 bp, Artificial sequence
  SiRNA target sequence
cattaatataatctactaaagtatt

SEQ ID NO: 30396 - DNA, 25 bp, Artificial sequence
  SiRNA target sequence
attaatataatctactaaagtatta

SEQ ID NO: 30397 - DNA, 25 bp, Artificial sequence
  SiRNA target sequence
ttaatataatctactaaagtattat

SEQ ID NO: 30398 - DNA, 25 bp, Artificial sequence
  SiRNA target sequence
taatataatctactaaagtattatc

SEQ ID NO: 30399 - DNA, 25 bp, Artificial sequence
  SiRNA target sequence
aatataatctactaaagtattatcc

SEQ ID NO: 30400 - DNA, 25 bp, Artificial sequence
  SiRNA target sequence
atataatctactaaagtattatcca

SEQ ID NO: 30401 - DNA, 25 bp, Artificial sequence
  SiRNA target sequence
tataatctactaaagtattatccaa

SEQ ID NO: 30402 - DNA, 25 bp, Artificial sequence
  SiRNA target sequence
ataatctactaaagtattatccaaa

SEQ ID NO: 30403 - DNA, 25 bp, Artificial sequence
  SiRNA target sequence
taatctactaaagtattatccaaat

SEQ ID NO: 30404 - DNA, 25 bp, Artificial sequence
  SiRNA target sequence
aatctactaaagtattatccaaatc

SEQ ID NO: 30405 - DNA, 25 bp, Artificial sequence
  SiRNA target sequence
atctactaaagtattatccaaatct

SEQ ID NO: 30406 - DNA, 25 bp, Artificial sequence
  SiRNA target sequence
tctactaaagtattatccaaatctt

SEQ ID NO: 30407 - DNA, 25 bp, Artificial sequence
  SiRNA target sequence
ctactaaagtattatccaaatcttc

SEQ ID NO: 30408 - DNA, 25 bp, Artificial sequence
  SiRNA target sequence
tactaaagtattatccaaatcttct

SEQ ID NO: 30409 - DNA, 25 bp, Artificial sequence
  SiRNA target sequence
actaaagtattatccaaatcttctc

SEQ ID NO: 30410 - DNA, 25 bp, Artificial sequence
  SiRNA target sequence
ctaaagtattatccaaatcttctcc

SEQ ID NO: 30411 - DNA, 25 bp, Artificial sequence
  SiRNA target sequence
taaagtattatccaaatcttctcct

SEQ ID NO: 30412 - DNA, 25 bp, Artificial sequence
  SiRNA target sequence
aaagtattatccaaatcttctcctc

SEQ ID NO: 30413 - DNA, 25 bp, Artificial sequence
  SiRNA target sequence
aagtattatccaaatcttctcctcc

SEQ ID NO: 30414 - DNA, 25 bp, Artificial sequence
  SiRNA target sequence
agtattatccaaatcttctcctcct

SEQ ID NO: 30415 - DNA, 25 bp, Artificial sequence
  SiRNA target sequence
gtattatccaaatcttctcctccta

SEQ ID NO: 30416 - DNA, 25 bp, Artificial sequence
  SiRNA target sequence
tattatccaaatcttctcctcctaa

SEQ ID NO: 30417 - DNA, 25 bp, Artificial sequence
  SiRNA target sequence
attatccaaatcttctcctcctaaa

SEQ ID NO: 30418 - DNA, 25 bp, Artificial sequence
  SiRNA target sequence
ttatccaaatcttctcctcctaaaa

SEQ ID NO: 30419 - DNA, 25 bp, Artificial sequence
  SiRNA target sequence
tatccaaatcttctcctcctaaaaa

SEQ ID NO: 30420 - DNA, 25 bp, Artificial sequence
  SiRNA target sequence
atccaaatcttctcctcctaaaaaa

SEQ ID NO: 30421 - DNA, 25 bp, Artificial sequence
  SiRNA target sequence
tccaaatcttctcctcctaaaaaag

SEQ ID NO: 30422 - DNA, 25 bp, Artificial sequence
  SiRNA target sequence
ccaaatcttctcctcctaaaaaagt

SEQ ID NO: 30423 - DNA, 25 bp, Artificial sequence
  SiRNA target sequence
caaatcttctcctcctaaaaaagta

SEQ ID NO: 30424 - DNA, 25 bp, Artificial sequence
  SiRNA target sequence
aaatcttctcctcctaaaaaagtat

SEQ ID NO: 30425 - DNA, 25 bp, Artificial sequence
  SiRNA target sequence
aatcttctcctcctaaaaaagtatt

SEQ ID NO: 30426 - DNA, 25 bp, Artificial sequence
  SiRNA target sequence
atcttctcctcctaaaaaagtattt

SEQ ID NO: 30427 - DNA, 25 bp, Artificial sequence
  SiRNA target sequence
tcttctcctcctaaaaaagtatttc

SEQ ID NO: 30428 - DNA, 25 bp, Artificial sequence
  SiRNA target sequence
cttctcctcctaaaaaagtatttcc

SEQ ID NO: 30429 - DNA, 25 bp, Artificial sequence
  SiRNA target sequence
ttctcctcctaaaaaagtatttccg

SEQ ID NO: 30430 - DNA, 25 bp, Artificial sequence
  SiRNA target sequence
tctcctcctaaaaaagtatttccgt

SEQ ID NO: 30431 - DNA, 25 bp, Artificial sequence
  SiRNA target sequence
ctcctcctaaaaaagtatttccgtt

SEQ ID NO: 30432 - DNA, 25 bp, Artificial sequence
  SiRNA target sequence
tcctcctaaaaaagtatttccgtta

SEQ ID NO: 30433 - DNA, 25 bp, Artificial sequence
  SiRNA target sequence
cctcctaaaaaagtatttccgttag

SEQ ID NO: 30434 - DNA, 25 bp, Artificial sequence
  SiRNA target sequence
ctcctaaaaaagtatttccgttagt

SEQ ID NO: 30435 - DNA, 25 bp, Artificial sequence
  SiRNA target sequence
tcctaaaaaagtatttccgttagta

SEQ ID NO: 30436 - DNA, 25 bp, Artificial sequence
  SiRNA target sequence
cctaaaaaagtatttccgttagtag

SEQ ID NO: 30437 - DNA, 25 bp, Artificial sequence
  SiRNA target sequence
ctaaaaaagtatttccgttagtaga

SEQ ID NO: 30438 - DNA, 25 bp, Artificial sequence
  SiRNA target sequence
taaaaaagtatttccgttagtagat

SEQ ID NO: 30439 - DNA, 25 bp, Artificial sequence
  SiRNA target sequence
aaaaaagtatttccgttagtagatt

SEQ ID NO: 30440 - DNA, 25 bp, Artificial sequence
  SiRNA target sequence
aaaaagtatttccgttagtagattt

SEQ ID NO: 30441 - DNA, 25 bp, Artificial sequence
  SiRNA target sequence
aaaagtatttccgttagtagatttt

SEQ ID NO: 30442 - DNA, 25 bp, Artificial sequence
  SiRNA target sequence
aaagtatttccgttagtagatttta

SEQ ID NO: 30443 - DNA, 25 bp, Artificial sequence
  SiRNA target sequence
aagtatttccgttagtagattttac

SEQ ID NO: 30444 - DNA, 25 bp, Artificial sequence
  SiRNA target sequence
agtatttccgttagtagattttaca

SEQ ID NO: 30445 - DNA, 25 bp, Artificial sequence
  SiRNA target sequence
gtatttccgttagtagattttacat

SEQ ID NO: 30446 - DNA, 25 bp, Artificial sequence
  SiRNA target sequence
tatttccgttagtagattttacatg

SEQ ID NO: 30447 - DNA, 25 bp, Artificial sequence
  SiRNA target sequence
atttccgttagtagattttacatga

SEQ ID NO: 30448 - DNA, 25 bp, Artificial sequence
  SiRNA target sequence
tttccgttagtagattttacatgaa

SEQ ID NO: 30449 - DNA, 25 bp, Artificial sequence
  SiRNA target sequence
ttccgttagtagattttacatgaaa

SEQ ID NO: 30450 - DNA, 25 bp, Artificial sequence
  SiRNA target sequence
tccgttagtagattttacatgaaaa

SEQ ID NO: 30451 - DNA, 25 bp, Artificial sequence
  SiRNA target sequence
ccgttagtagattttacatgaaaaa

SEQ ID NO: 30452 - DNA, 25 bp, Artificial sequence
  SiRNA target sequence
cgttagtagattttacatgaaaaat

SEQ ID NO: 30453 - DNA, 25 bp, Artificial sequence
  SiRNA target sequence
gttagtagattttacatgaaaaata

SEQ ID NO: 30454 - DNA, 25 bp, Artificial sequence
  SiRNA target sequence
ttagtagattttacatgaaaaatac

SEQ ID NO: 30455 - DNA, 25 bp, Artificial sequence
  SiRNA target sequence
tagtagattttacatgaaaaatacc

SEQ ID NO: 30456 - DNA, 25 bp, Artificial sequence
  SiRNA target sequence
agtagattttacatgaaaaatacca

SEQ ID NO: 30457 - DNA, 25 bp, Artificial sequence
  SiRNA target sequence
gtagattttacatgaaaaataccat

SEQ ID NO: 30458 - DNA, 25 bp, Artificial sequence
  SiRNA target sequence
tagattttacatgaaaaataccatt

SEQ ID NO: 30459 - DNA, 25 bp, Artificial sequence
  SiRNA target sequence
agattttacatgaaaaataccatta

SEQ ID NO: 30460 - DNA, 25 bp, Artificial sequence
  SiRNA target sequence
gattttacatgaaaaataccattat

SEQ ID NO: 30461 - DNA, 25 bp, Artificial sequence
  SiRNA target sequence
attttacatgaaaaataccattatc

SEQ ID NO: 30462 - DNA, 25 bp, Artificial sequence
  SiRNA target sequence
ttttacatgaaaaataccattatct

SEQ ID NO: 30463 - DNA, 25 bp, Artificial sequence
  SiRNA target sequence
tttacatgaaaaataccattatcta

SEQ ID NO: 30464 - DNA, 25 bp, Artificial sequence
  SiRNA target sequence
ttacatgaaaaataccattatctaa

SEQ ID NO: 30465 - DNA, 25 bp, Artificial sequence
  SiRNA target sequence
tacatgaaaaataccattatctaat

SEQ ID NO: 30466 - DNA, 25 bp, Artificial sequence
  SiRNA target sequence
acatgaaaaataccattatctaatt

SEQ ID NO: 30467 - DNA, 25 bp, Artificial sequence
  SiRNA target sequence
catgaaaaataccattatctaattc

SEQ ID NO: 30468 - DNA, 25 bp, Artificial sequence
  SiRNA target sequence
atgaaaaataccattatctaattct

SEQ ID NO: 30469 - DNA, 25 bp, Artificial sequence
  SiRNA target sequence
tgaaaaataccattatctaattcta

SEQ ID NO: 30470 - DNA, 25 bp, Artificial sequence
  SiRNA target sequence
gaaaaataccattatctaattctaa

SEQ ID NO: 30471 - DNA, 25 bp, Artificial sequence
  SiRNA target sequence
aaaaataccattatctaattctaat

SEQ ID NO: 30472 - DNA, 25 bp, Artificial sequence
  SiRNA target sequence
aaaataccattatctaattctaata

SEQ ID NO: 30473 - DNA, 25 bp, Artificial sequence
  SiRNA target sequence
aaataccattatctaattctaatat

SEQ ID NO: 30474 - DNA, 25 bp, Artificial sequence
  SiRNA target sequence
aataccattatctaattctaatata

SEQ ID NO: 30475 - DNA, 25 bp, Artificial sequence
  SiRNA target sequence
ataccattatctaattctaatatac

SEQ ID NO: 30476 - DNA, 25 bp, Artificial sequence
  SiRNA target sequence
taccattatctaattctaatatact

SEQ ID NO: 30477 - DNA, 25 bp, Artificial sequence
  SiRNA target sequence
accattatctaattctaatatacta

SEQ ID NO: 30478 - DNA, 25 bp, Artificial sequence
  SiRNA target sequence
ccattatctaattctaatatactaa

SEQ ID NO: 30479 - DNA, 25 bp, Artificial sequence
  SiRNA target sequence
cattatctaattctaatatactaat

SEQ ID NO: 30480 - DNA, 25 bp, Artificial sequence
  SiRNA target sequence
attatctaattctaatatactaatg

SEQ ID NO: 30481 - DNA, 25 bp, Artificial sequence
  SiRNA target sequence
ttatctaattctaatatactaatgt

SEQ ID NO: 30482 - DNA, 25 bp, Artificial sequence
  SiRNA target sequence
tatctaattctaatatactaatgtc

SEQ ID NO: 30483 - DNA, 25 bp, Artificial sequence
  SiRNA target sequence
atctaattctaatatactaatgtca

SEQ ID NO: 30484 - DNA, 25 bp, Artificial sequence
  SiRNA target sequence
tctaattctaatatactaatgtcaa

SEQ ID NO: 30485 - DNA, 25 bp, Artificial sequence
  SiRNA target sequence
ctaattctaatatactaatgtcaaa

SEQ ID NO: 30486 - DNA, 25 bp, Artificial sequence
  SiRNA target sequence
taattctaatatactaatgtcaaaa

SEQ ID NO: 30487 - DNA, 25 bp, Artificial sequence
  SiRNA target sequence
aattctaatatactaatgtcaaaag

SEQ ID NO: 30488 - DNA, 25 bp, Artificial sequence
  SiRNA target sequence
attctaatatactaatgtcaaaagt

SEQ ID NO: 30489 - DNA, 25 bp, Artificial sequence
  SiRNA target sequence
ttctaatatactaatgtcaaaagtt

SEQ ID NO: 30490 - DNA, 25 bp, Artificial sequence
  SiRNA target sequence
tctaatatactaatgtcaaaagttc

SEQ ID NO: 30491 - DNA, 25 bp, Artificial sequence
  SiRNA target sequence
ctaatatactaatgtcaaaagttcc

SEQ ID NO: 30492 - DNA, 25 bp, Artificial sequence
  SiRNA target sequence
taatatactaatgtcaaaagttcct

SEQ ID NO: 30493 - DNA, 25 bp, Artificial sequence
  SiRNA target sequence
aatatactaatgtcaaaagttcctc

SEQ ID NO: 30494 - DNA, 25 bp, Artificial sequence
  SiRNA target sequence
atatactaatgtcaaaagttcctcc

SEQ ID NO: 30495 - DNA, 25 bp, Artificial sequence
  SiRNA target sequence
tatactaatgtcaaaagttcctcct

SEQ ID NO: 30496 - DNA, 25 bp, Artificial sequence
  SiRNA target sequence
atactaatgtcaaaagttcctcctc

SEQ ID NO: 30497 - DNA, 25 bp, Artificial sequence
  SiRNA target sequence
tactaatgtcaaaagttcctcctcc

SEQ ID NO: 30498 - DNA, 25 bp, Artificial sequence
  SiRNA target sequence
actaatgtcaaaagttcctcctccc

SEQ ID NO: 30499 - DNA, 25 bp, Artificial sequence
  SiRNA target sequence
ctaatgtcaaaagttcctcctccca

SEQ ID NO: 30500 - DNA, 25 bp, Artificial sequence
  SiRNA target sequence
taatgtcaaaagttcctcctcccag

SEQ ID NO: 30501 - DNA, 25 bp, Artificial sequence
  SiRNA target sequence
aatgtcaaaagttcctcctcccaga

SEQ ID NO: 30502 - DNA, 25 bp, Artificial sequence
  SiRNA target sequence
atgtcaaaagttcctcctcccagat

SEQ ID NO: 30503 - DNA, 25 bp, Artificial sequence
  SiRNA target sequence
tgtcaaaagttcctcctcccagatc

SEQ ID NO: 30504 - DNA, 25 bp, Artificial sequence
  SiRNA target sequence
gtcaaaagttcctcctcccagatca

SEQ ID NO: 30505 - DNA, 25 bp, Artificial sequence
  SiRNA target sequence
tcaaaagttcctcctcccagatcat

SEQ ID NO: 30506 - DNA, 25 bp, Artificial sequence
  SiRNA target sequence
caaaagttcctcctcccagatcata

SEQ ID NO: 30507 - DNA, 25 bp, Artificial sequence
  SiRNA target sequence
aaaagttcctcctcccagatcataa

SEQ ID NO: 30508 - DNA, 25 bp, Artificial sequence
  SiRNA target sequence
aaagttcctcctcccagatcataaa

SEQ ID NO: 30509 - DNA, 25 bp, Artificial sequence
  SiRNA target sequence
aagttcctcctcccagatcataaac

SEQ ID NO: 30510 - DNA, 25 bp, Artificial sequence
  SiRNA target sequence
agttcctcctcccagatcataaaca

SEQ ID NO: 30511 - DNA, 25 bp, Artificial sequence
  SiRNA target sequence
gttcctcctcccagatcataaacag

SEQ ID NO: 30512 - DNA, 25 bp, Artificial sequence
  SiRNA target sequence
ttcctcctcccagatcataaacagc

SEQ ID NO: 30513 - DNA, 25 bp, Artificial sequence
  SiRNA target sequence
tcctcctcccagatcataaacagct

SEQ ID NO: 30514 - DNA, 25 bp, Artificial sequence
  SiRNA target sequence
cctcctcccagatcataaacagcta

SEQ ID NO: 30515 - DNA, 25 bp, Artificial sequence
  SiRNA target sequence
ctcctcccagatcataaacagctat

SEQ ID NO: 30516 - DNA, 25 bp, Artificial sequence
  SiRNA target sequence
tcctcccagatcataaacagctata

SEQ ID NO: 30517 - DNA, 25 bp, Artificial sequence
  SiRNA target sequence
cctcccagatcataaacagctataa

SEQ ID NO: 30518 - DNA, 25 bp, Artificial sequence
  SiRNA target sequence
ctcccagatcataaacagctataat

SEQ ID NO: 30519 - DNA, 25 bp, Artificial sequence
  SiRNA target sequence
tcccagatcataaacagctataata

SEQ ID NO: 30520 - DNA, 25 bp, Artificial sequence
  SiRNA target sequence
cccagatcataaacagctataatac

SEQ ID NO: 30521 - DNA, 25 bp, Artificial sequence
  SiRNA target sequence
ccagatcataaacagctataatacc

SEQ ID NO: 30522 - DNA, 25 bp, Artificial sequence
  SiRNA target sequence
cagatcataaacagctataataccc

SEQ ID NO: 30523 - DNA, 25 bp, Artificial sequence
  SiRNA target sequence
agatcataaacagctataataccct

SEQ ID NO: 30524 - DNA, 25 bp, Artificial sequence
  SiRNA target sequence
gatcataaacagctataataccctg

SEQ ID NO: 30525 - DNA, 25 bp, Artificial sequence
  SiRNA target sequence
atcataaacagctataataccctgt

SEQ ID NO: 30526 - DNA, 25 bp, Artificial sequence
  SiRNA target sequence
tcataaacagctataataccctgtg

SEQ ID NO: 30527 - DNA, 25 bp, Artificial sequence
  SiRNA target sequence
cataaacagctataataccctgtgc

SEQ ID NO: 30528 - DNA, 25 bp, Artificial sequence
  SiRNA target sequence
ataaacagctataataccctgtgca

SEQ ID NO: 30529 - DNA, 25 bp, Artificial sequence
  SiRNA target sequence
taaacagctataataccctgtgcag

SEQ ID NO: 30530 - DNA, 25 bp, Artificial sequence
  SiRNA target sequence
aaacagctataataccctgtgcaga

SEQ ID NO: 30531 - DNA, 25 bp, Artificial sequence
  SiRNA target sequence
aacagctataataccctgtgcagac

SEQ ID NO: 30532 - DNA, 25 bp, Artificial sequence
  SiRNA target sequence
acagctataataccctgtgcagact

SEQ ID NO: 30533 - DNA, 25 bp, Artificial sequence
  SiRNA target sequence
cagctataataccctgtgcagactt

SEQ ID NO: 30534 - DNA, 25 bp, Artificial sequence
  SiRNA target sequence
agctataataccctgtgcagacttg

SEQ ID NO: 30535 - DNA, 25 bp, Artificial sequence
  SiRNA target sequence
gctataataccctgtgcagacttgt

SEQ ID NO: 30536 - DNA, 25 bp, Artificial sequence
  SiRNA target sequence
ctataataccctgtgcagacttgtc

SEQ ID NO: 30537 - DNA, 25 bp, Artificial sequence
  SiRNA target sequence
tataataccctgtgcagacttgtca

SEQ ID NO: 30538 - DNA, 25 bp, Artificial sequence
  SiRNA target sequence
ataataccctgtgcagacttgtcaa

SEQ ID NO: 30539 - DNA, 25 bp, Artificial sequence
  SiRNA target sequence
taataccctgtgcagacttgtcaag

SEQ ID NO: 30540 - DNA, 25 bp, Artificial sequence
  SiRNA target sequence
aataccctgtgcagacttgtcaagc

SEQ ID NO: 30541 - DNA, 25 bp, Artificial sequence
  SiRNA target sequence
ataccctgtgcagacttgtcaagcc

SEQ ID NO: 30542 - DNA, 25 bp, Artificial sequence
  SiRNA target sequence
taccctgtgcagacttgtcaagccc

SEQ ID NO: 30543 - DNA, 25 bp, Artificial sequence
  SiRNA target sequence
accctgtgcagacttgtcaagccca

SEQ ID NO: 30544 - DNA, 25 bp, Artificial sequence
  SiRNA target sequence
ccctgtgcagacttgtcaagcccat

SEQ ID NO: 30545 - DNA, 25 bp, Artificial sequence
  SiRNA target sequence
cctgtgcagacttgtcaagcccata

SEQ ID NO: 30546 - DNA, 25 bp, Artificial sequence
  SiRNA target sequence
ctgtgcagacttgtcaagcccataa

SEQ ID NO: 30547 - DNA, 25 bp, Artificial sequence
  SiRNA target sequence
tgtgcagacttgtcaagcccataag

SEQ ID NO: 30548 - DNA, 25 bp, Artificial sequence
  SiRNA target sequence
gtgcagacttgtcaagcccataagc

SEQ ID NO: 30549 - DNA, 25 bp, Artificial sequence
  SiRNA target sequence
tgcagacttgtcaagcccataagca

SEQ ID NO: 30550 - DNA, 25 bp, Artificial sequence
  SiRNA target sequence
gcagacttgtcaagcccataagcaa

SEQ ID NO: 30551 - DNA, 25 bp, Artificial sequence
  SiRNA target sequence
cagacttgtcaagcccataagcaag

SEQ ID NO: 30552 - DNA, 25 bp, Artificial sequence
  SiRNA target sequence
agacttgtcaagcccataagcaagt

SEQ ID NO: 30553 - DNA, 25 bp, Artificial sequence
  SiRNA target sequence
gacttgtcaagcccataagcaagtg

SEQ ID NO: 30554 - DNA, 25 bp, Artificial sequence
  SiRNA target sequence
acttgtcaagcccataagcaagtgc

SEQ ID NO: 30555 - DNA, 25 bp, Artificial sequence
  SiRNA target sequence
cttgtcaagcccataagcaagtgct

SEQ ID NO: 30556 - DNA, 25 bp, Artificial sequence
  SiRNA target sequence
ttgtcaagcccataagcaagtgctg

SEQ ID NO: 30557 - DNA, 25 bp, Artificial sequence
  SiRNA target sequence
tgtcaagcccataagcaagtgctgc

SEQ ID NO: 30558 - DNA, 25 bp, Artificial sequence
  SiRNA target sequence
gtcaagcccataagcaagtgctgcc

SEQ ID NO: 30559 - DNA, 25 bp, Artificial sequence
  SiRNA target sequence
tcaagcccataagcaagtgctgccg

SEQ ID NO: 30560 - DNA, 25 bp, Artificial sequence
  SiRNA target sequence
caagcccataagcaagtgctgccgc

SEQ ID NO: 30561 - DNA, 25 bp, Artificial sequence
  SiRNA target sequence
aagcccataagcaagtgctgccgca

SEQ ID NO: 30562 - DNA, 25 bp, Artificial sequence
  SiRNA target sequence
agcccataagcaagtgctgccgcag

SEQ ID NO: 30563 - DNA, 25 bp, Artificial sequence
  SiRNA target sequence
gcccataagcaagtgctgccgcagt

SEQ ID NO: 30564 - DNA, 25 bp, Artificial sequence
  SiRNA target sequence
cccataagcaagtgctgccgcagta

SEQ ID NO: 30565 - DNA, 25 bp, Artificial sequence
  SiRNA target sequence
ccataagcaagtgctgccgcagtag

SEQ ID NO: 30566 - DNA, 25 bp, Artificial sequence
  SiRNA target sequence
cataagcaagtgctgccgcagtagg

SEQ ID NO: 30567 - DNA, 25 bp, Artificial sequence
  SiRNA target sequence
ataagcaagtgctgccgcagtaggc

SEQ ID NO: 30568 - DNA, 25 bp, Artificial sequence
  SiRNA target sequence
taagcaagtgctgccgcagtaggct

SEQ ID NO: 30569 - DNA, 25 bp, Artificial sequence
  SiRNA target sequence
aagcaagtgctgccgcagtaggctc

SEQ ID NO: 30570 - DNA, 25 bp, Artificial sequence
  SiRNA target sequence
agcaagtgctgccgcagtaggctca

SEQ ID NO: 30571 - DNA, 25 bp, Artificial sequence
  SiRNA target sequence
gcaagtgctgccgcagtaggctcat

SEQ ID NO: 30572 - DNA, 25 bp, Artificial sequence
  SiRNA target sequence
caagtgctgccgcagtaggctcatt

SEQ ID NO: 30573 - DNA, 25 bp, Artificial sequence
  SiRNA target sequence
aagtgctgccgcagtaggctcatta

SEQ ID NO: 30574 - DNA, 25 bp, Artificial sequence
  SiRNA target sequence
agtgctgccgcagtaggctcattaa

SEQ ID NO: 30575 - DNA, 25 bp, Artificial sequence
  SiRNA target sequence
gtgctgccgcagtaggctcattaat

SEQ ID NO: 30576 - DNA, 25 bp, Artificial sequence
  SiRNA target sequence
tgctgccgcagtaggctcattaatc

SEQ ID NO: 30577 - DNA, 25 bp, Artificial sequence
  SiRNA target sequence
gctgccgcagtaggctcattaatca

SEQ ID NO: 30578 - DNA, 25 bp, Artificial sequence
  SiRNA target sequence
ctgccgcagtaggctcattaatcac

SEQ ID NO: 30579 - DNA, 25 bp, Artificial sequence
  SiRNA target sequence
tgccgcagtaggctcattaatcact

SEQ ID NO: 30580 - DNA, 25 bp, Artificial sequence
  SiRNA target sequence
gccgcagtaggctcattaatcactc

SEQ ID NO: 30581 - DNA, 25 bp, Artificial sequence
  SiRNA target sequence
ccgcagtaggctcattaatcactct

SEQ ID NO: 30582 - DNA, 25 bp, Artificial sequence
  SiRNA target sequence
cgcagtaggctcattaatcactcta

SEQ ID NO: 30583 - DNA, 25 bp, Artificial sequence
  SiRNA target sequence
gcagtaggctcattaatcactctaa

SEQ ID NO: 30584 - DNA, 25 bp, Artificial sequence
  SiRNA target sequence
cagtaggctcattaatcactctaag

SEQ ID NO: 30585 - DNA, 25 bp, Artificial sequence
  SiRNA target sequence
agtaggctcattaatcactctaagc

SEQ ID NO: 30586 - DNA, 25 bp, Artificial sequence
  SiRNA target sequence
gtaggctcattaatcactctaagca

SEQ ID NO: 30587 - DNA, 25 bp, Artificial sequence
  SiRNA target sequence
taggctcattaatcactctaagcac

SEQ ID NO: 30588 - DNA, 25 bp, Artificial sequence
  SiRNA target sequence
aggctcattaatcactctaagcact

SEQ ID NO: 30589 - DNA, 25 bp, Artificial sequence
  SiRNA target sequence
ggctcattaatcactctaagcactt

SEQ ID NO: 30590 - DNA, 25 bp, Artificial sequence
  SiRNA target sequence
gctcattaatcactctaagcacttg

SEQ ID NO: 30591 - DNA, 25 bp, Artificial sequence
  SiRNA target sequence
ctcattaatcactctaagcacttgt

SEQ ID NO: 30592 - DNA, 25 bp, Artificial sequence
  SiRNA target sequence
tcattaatcactctaagcacttgta

SEQ ID NO: 30593 - DNA, 25 bp, Artificial sequence
  SiRNA target sequence
cattaatcactctaagcacttgtaa

SEQ ID NO: 30594 - DNA, 25 bp, Artificial sequence
  SiRNA target sequence
attaatcactctaagcacttgtaat

SEQ ID NO: 30595 - DNA, 25 bp, Artificial sequence
  SiRNA target sequence
ttaatcactctaagcacttgtaatc

SEQ ID NO: 30596 - DNA, 25 bp, Artificial sequence
  SiRNA target sequence
taatcactctaagcacttgtaatcc

SEQ ID NO: 30597 - DNA, 25 bp, Artificial sequence
  SiRNA target sequence
aatcactctaagcacttgtaatccc

SEQ ID NO: 30598 - DNA, 25 bp, Artificial sequence
  SiRNA target sequence
atcactctaagcacttgtaatcccg

SEQ ID NO: 30599 - DNA, 25 bp, Artificial sequence
  SiRNA target sequence
tcactctaagcacttgtaatcccgc

SEQ ID NO: 30600 - DNA, 25 bp, Artificial sequence
  SiRNA target sequence
cactctaagcacttgtaatcccgca

SEQ ID NO: 30601 - DNA, 25 bp, Artificial sequence
  SiRNA target sequence
actctaagcacttgtaatcccgcaa

SEQ ID NO: 30602 - DNA, 25 bp, Artificial sequence
  SiRNA target sequence
ctctaagcacttgtaatcccgcaat

SEQ ID NO: 30603 - DNA, 25 bp, Artificial sequence
  SiRNA target sequence
tctaagcacttgtaatcccgcaatc

SEQ ID NO: 30604 - DNA, 25 bp, Artificial sequence
  SiRNA target sequence
ctaagcacttgtaatcccgcaatcc

SEQ ID NO: 30605 - DNA, 25 bp, Artificial sequence
  SiRNA target sequence
taagcacttgtaatcccgcaatcct

SEQ ID NO: 30606 - DNA, 25 bp, Artificial sequence
  SiRNA target sequence
aagcacttgtaatcccgcaatcctt

SEQ ID NO: 30607 - DNA, 25 bp, Artificial sequence
  SiRNA target sequence
agcacttgtaatcccgcaatccttc

SEQ ID NO: 30608 - DNA, 25 bp, Artificial sequence
  SiRNA target sequence
gcacttgtaatcccgcaatccttcc

SEQ ID NO: 30609 - DNA, 25 bp, Artificial sequence
  SiRNA target sequence
cacttgtaatcccgcaatccttccc

SEQ ID NO: 30610 - DNA, 25 bp, Artificial sequence
  SiRNA target sequence
acttgtaatcccgcaatccttcccg

SEQ ID NO: 30611 - DNA, 25 bp, Artificial sequence
  SiRNA target sequence
cttgtaatcccgcaatccttcccgc

SEQ ID NO: 30612 - DNA, 25 bp, Artificial sequence
  SiRNA target sequence
ttgtaatcccgcaatccttcccgca

SEQ ID NO: 30613 - DNA, 25 bp, Artificial sequence
  SiRNA target sequence
tgtaatcccgcaatccttcccgcat

SEQ ID NO: 30614 - DNA, 25 bp, Artificial sequence
  SiRNA target sequence
gtaatcccgcaatccttcccgcatc

SEQ ID NO: 30615 - DNA, 25 bp, Artificial sequence
  SiRNA target sequence
taatcccgcaatccttcccgcatct

SEQ ID NO: 30616 - DNA, 25 bp, Artificial sequence
  SiRNA target sequence
aatcccgcaatccttcccgcatctt

SEQ ID NO: 30617 - DNA, 25 bp, Artificial sequence
  SiRNA target sequence
atcccgcaatccttcccgcatcttt

SEQ ID NO: 30618 - DNA, 25 bp, Artificial sequence
  SiRNA target sequence
tcccgcaatccttcccgcatcttta

SEQ ID NO: 30619 - DNA, 25 bp, Artificial sequence
  SiRNA target sequence
cccgcaatccttcccgcatctttag

SEQ ID NO: 30620 - DNA, 25 bp, Artificial sequence
  SiRNA target sequence
ccgcaatccttcccgcatctttagt

SEQ ID NO: 30621 - DNA, 25 bp, Artificial sequence
  SiRNA target sequence
cgcaatccttcccgcatctttagta

SEQ ID NO: 30622 - DNA, 25 bp, Artificial sequence
  SiRNA target sequence
gcaatccttcccgcatctttagtag

SEQ ID NO: 30623 - DNA, 25 bp, Artificial sequence
  SiRNA target sequence
caatccttcccgcatctttagtagc

SEQ ID NO: 30624 - DNA, 25 bp, Artificial sequence
  SiRNA target sequence
aatccttcccgcatctttagtagct

SEQ ID NO: 30625 - DNA, 25 bp, Artificial sequence
  SiRNA target sequence
atccttcccgcatctttagtagctt

SEQ ID NO: 30626 - DNA, 25 bp, Artificial sequence
  SiRNA target sequence
tccttcccgcatctttagtagcttg

SEQ ID NO: 30627 - DNA, 25 bp, Artificial sequence
  SiRNA target sequence
ccttcccgcatctttagtagcttgc

SEQ ID NO: 30628 - DNA, 25 bp, Artificial sequence
  SiRNA target sequence
cttcccgcatctttagtagcttgcc

SEQ ID NO: 30629 - DNA, 25 bp, Artificial sequence
  SiRNA target sequence
ttcccgcatctttagtagcttgcct

SEQ ID NO: 30630 - DNA, 25 bp, Artificial sequence
  SiRNA target sequence
tcccgcatctttagtagcttgcctt

SEQ ID NO: 30631 - DNA, 25 bp, Artificial sequence
  SiRNA target sequence
cccgcatctttagtagcttgccttt

SEQ ID NO: 30632 - DNA, 25 bp, Artificial sequence
  SiRNA target sequence
ccgcatctttagtagcttgcctttg

SEQ ID NO: 30633 - DNA, 25 bp, Artificial sequence
  SiRNA target sequence
cgcatctttagtagcttgcctttgc

SEQ ID NO: 30634 - DNA, 25 bp, Artificial sequence
  SiRNA target sequence
gcatctttagtagcttgcctttgca

SEQ ID NO: 30635 - DNA, 25 bp, Artificial sequence
  SiRNA target sequence
catctttagtagcttgcctttgcat

SEQ ID NO: 30636 - DNA, 25 bp, Artificial sequence
  SiRNA target sequence
atctttagtagcttgcctttgcatg

SEQ ID NO: 30637 - DNA, 25 bp, Artificial sequence
  SiRNA target sequence
tctttagtagcttgcctttgcatgt

SEQ ID NO: 30638 - DNA, 25 bp, Artificial sequence
  SiRNA target sequence
ctttagtagcttgcctttgcatgtc

SEQ ID NO: 30639 - DNA, 25 bp, Artificial sequence
  SiRNA target sequence
tttagtagcttgcctttgcatgtca

SEQ ID NO: 30640 - DNA, 25 bp, Artificial sequence
  SiRNA target sequence
ttagtagcttgcctttgcatgtcat

SEQ ID NO: 30641 - DNA, 25 bp, Artificial sequence
  SiRNA target sequence
tagtagcttgcctttgcatgtcatc

SEQ ID NO: 30642 - DNA, 25 bp, Artificial sequence
  SiRNA target sequence
agtagcttgcctttgcatgtcatca

SEQ ID NO: 30643 - DNA, 25 bp, Artificial sequence
  SiRNA target sequence
gtagcttgcctttgcatgtcatcaa

SEQ ID NO: 30644 - DNA, 25 bp, Artificial sequence
  SiRNA target sequence
tagcttgcctttgcatgtcatcaaa

SEQ ID NO: 30645 - DNA, 25 bp, Artificial sequence
  SiRNA target sequence
agcttgcctttgcatgtcatcaaaa

SEQ ID NO: 30646 - DNA, 25 bp, Artificial sequence
  SiRNA target sequence
gcttgcctttgcatgtcatcaaaat

SEQ ID NO: 30647 - DNA, 25 bp, Artificial sequence
  SiRNA target sequence
cttgcctttgcatgtcatcaaaata

SEQ ID NO: 30648 - DNA, 25 bp, Artificial sequence
  SiRNA target sequence
ttgcctttgcatgtcatcaaaatat

SEQ ID NO: 30649 - DNA, 25 bp, Artificial sequence
  SiRNA target sequence
tgcctttgcatgtcatcaaaatatg

SEQ ID NO: 30650 - DNA, 25 bp, Artificial sequence
  SiRNA target sequence
gcctttgcatgtcatcaaaatatgc

SEQ ID NO: 30651 - DNA, 25 bp, Artificial sequence
  SiRNA target sequence
cctttgcatgtcatcaaaatatgcg

SEQ ID NO: 30652 - DNA, 25 bp, Artificial sequence
  SiRNA target sequence
ctttgcatgtcatcaaaatatgcgg

SEQ ID NO: 30653 - DNA, 25 bp, Artificial sequence
  SiRNA target sequence
tttgcatgtcatcaaaatatgcggg

SEQ ID NO: 30654 - DNA, 25 bp, Artificial sequence
  SiRNA target sequence
ttgcatgtcatcaaaatatgcgggc

SEQ ID NO: 30655 - DNA, 25 bp, Artificial sequence
  SiRNA target sequence
tgcatgtcatcaaaatatgcgggca

SEQ ID NO: 30656 - DNA, 25 bp, Artificial sequence
  SiRNA target sequence
gcatgtcatcaaaatatgcgggcac

SEQ ID NO: 30657 - DNA, 25 bp, Artificial sequence
  SiRNA target sequence
catgtcatcaaaatatgcgggcact

SEQ ID NO: 30658 - DNA, 25 bp, Artificial sequence
  SiRNA target sequence
atgtcatcaaaatatgcgggcactg

SEQ ID NO: 30659 - DNA, 25 bp, Artificial sequence
  SiRNA target sequence
tgtcatcaaaatatgcgggcactgt

SEQ ID NO: 30660 - DNA, 25 bp, Artificial sequence
  SiRNA target sequence
gtcatcaaaatatgcgggcactgtt

SEQ ID NO: 30661 - DNA, 25 bp, Artificial sequence
  SiRNA target sequence
tcatcaaaatatgcgggcactgtta

SEQ ID NO: 30662 - DNA, 25 bp, Artificial sequence
  SiRNA target sequence
catcaaaatatgcgggcactgttat

SEQ ID NO: 30663 - DNA, 25 bp, Artificial sequence
  SiRNA target sequence
atcaaaatatgcgggcactgttata

SEQ ID NO: 30664 - DNA, 25 bp, Artificial sequence
  SiRNA target sequence
tcaaaatatgcgggcactgttataa

SEQ ID NO: 30665 - DNA, 25 bp, Artificial sequence
  SiRNA target sequence
caaaatatgcgggcactgttataac

SEQ ID NO: 30666 - DNA, 25 bp, Artificial sequence
  SiRNA target sequence
aaaatatgcgggcactgttataaca

SEQ ID NO: 30667 - DNA, 25 bp, Artificial sequence
  SiRNA target sequence
aaatatgcgggcactgttataacag

SEQ ID NO: 30668 - DNA, 25 bp, Artificial sequence
  SiRNA target sequence
aatatgcgggcactgttataacaga

SEQ ID NO: 30669 - DNA, 25 bp, Artificial sequence
  SiRNA target sequence
atatgcgggcactgttataacagat

SEQ ID NO: 30670 - DNA, 25 bp, Artificial sequence
  SiRNA target sequence
tatgcgggcactgttataacagatc

SEQ ID NO: 30671 - DNA, 25 bp, Artificial sequence
  SiRNA target sequence
atgcgggcactgttataacagatct

SEQ ID NO: 30672 - DNA, 25 bp, Artificial sequence
  SiRNA target sequence
tgcgggcactgttataacagatctt

SEQ ID NO: 30673 - DNA, 25 bp, Artificial sequence
  SiRNA target sequence
gcgggcactgttataacagatctta

SEQ ID NO: 30674 - DNA, 25 bp, Artificial sequence
  SiRNA target sequence
cgggcactgttataacagatcttaa

SEQ ID NO: 30675 - DNA, 25 bp, Artificial sequence
  SiRNA target sequence
gggcactgttataacagatcttaat

SEQ ID NO: 30676 - DNA, 25 bp, Artificial sequence
  SiRNA target sequence
ggcactgttataacagatcttaata

SEQ ID NO: 30677 - DNA, 25 bp, Artificial sequence
  SiRNA target sequence
gcactgttataacagatcttaatac

SEQ ID NO: 30678 - DNA, 25 bp, Artificial sequence
  SiRNA target sequence
cactgttataacagatcttaatact

SEQ ID NO: 30679 - DNA, 25 bp, Artificial sequence
  SiRNA target sequence
actgttataacagatcttaatactt

SEQ ID NO: 30680 - DNA, 25 bp, Artificial sequence
  SiRNA target sequence
ctgttataacagatcttaatacttt

SEQ ID NO: 30681 - DNA, 25 bp, Artificial sequence
  SiRNA target sequence
tgttataacagatcttaatacttta

SEQ ID NO: 30682 - DNA, 25 bp, Artificial sequence
  SiRNA target sequence
gttataacagatcttaatactttag

SEQ ID NO: 30683 - DNA, 25 bp, Artificial sequence
  SiRNA target sequence
ttataacagatcttaatactttaga

SEQ ID NO: 30684 - DNA, 25 bp, Artificial sequence
  SiRNA target sequence
tataacagatcttaatactttagaa

SEQ ID NO: 30685 - DNA, 25 bp, Artificial sequence
  SiRNA target sequence
ataacagatcttaatactttagaat

SEQ ID NO: 30686 - DNA, 25 bp, Artificial sequence
  SiRNA target sequence
taacagatcttaatactttagaatt

SEQ ID NO: 30687 - DNA, 25 bp, Artificial sequence
  SiRNA target sequence
aacagatcttaatactttagaattt

SEQ ID NO: 30688 - DNA, 25 bp, Artificial sequence
  SiRNA target sequence
acagatcttaatactttagaattta

SEQ ID NO: 30689 - DNA, 25 bp, Artificial sequence
  SiRNA target sequence
cagatcttaatactttagaatttaa

SEQ ID NO: 30690 - DNA, 25 bp, Artificial sequence
  SiRNA target sequence
agatcttaatactttagaatttaaa

SEQ ID NO: 30691 - DNA, 25 bp, Artificial sequence
  SiRNA target sequence
gatcttaatactttagaatttaaaa

SEQ ID NO: 30692 - DNA, 25 bp, Artificial sequence
  SiRNA target sequence
atcttaatactttagaatttaaaaa

SEQ ID NO: 30693 - DNA, 25 bp, Artificial sequence
  SiRNA target sequence
tcttaatactttagaatttaaaaaa

SEQ ID NO: 30694 - DNA, 25 bp, Artificial sequence
  SiRNA target sequence
cttaatactttagaatttaaaaaat

SEQ ID NO: 30695 - DNA, 25 bp, Artificial sequence
  SiRNA target sequence
ttaatactttagaatttaaaaaatt

SEQ ID NO: 30696 - DNA, 25 bp, Artificial sequence
  SiRNA target sequence
taatactttagaatttaaaaaattc

SEQ ID NO: 30697 - DNA, 25 bp, Artificial sequence
  SiRNA target sequence
aatactttagaatttaaaaaattct

SEQ ID NO: 30698 - DNA, 25 bp, Artificial sequence
  SiRNA target sequence
atactttagaatttaaaaaattctc

SEQ ID NO: 30699 - DNA, 25 bp, Artificial sequence
  SiRNA target sequence
tactttagaatttaaaaaattctct

SEQ ID NO: 30700 - DNA, 25 bp, Artificial sequence
  SiRNA target sequence
actttagaatttaaaaaattctctg

SEQ ID NO: 30701 - DNA, 25 bp, Artificial sequence
  SiRNA target sequence
ctttagaatttaaaaaattctctgc

SEQ ID NO: 30702 - DNA, 25 bp, Artificial sequence
  SiRNA target sequence
tttagaatttaaaaaattctctgcg

SEQ ID NO: 30703 - DNA, 25 bp, Artificial sequence
  SiRNA target sequence
ttagaatttaaaaaattctctgcgg

SEQ ID NO: 30704 - DNA, 25 bp, Artificial sequence
  SiRNA target sequence
tagaatttaaaaaattctctgcggc

SEQ ID NO: 30705 - DNA, 25 bp, Artificial sequence
  SiRNA target sequence
agaatttaaaaaattctctgcggca

SEQ ID NO: 30706 - DNA, 25 bp, Artificial sequence
  SiRNA target sequence
gaatttaaaaaattctctgcggcat

SEQ ID NO: 30707 - DNA, 25 bp, Artificial sequence
  SiRNA target sequence
aatttaaaaaattctctgcggcatt

SEQ ID NO: 30708 - DNA, 25 bp, Artificial sequence
  SiRNA target sequence
atttaaaaaattctctgcggcattt

SEQ ID NO: 30709 - DNA, 25 bp, Artificial sequence
  SiRNA target sequence
tttaaaaaattctctgcggcatttt

SEQ ID NO: 30710 - DNA, 25 bp, Artificial sequence
  SiRNA target sequence
ttaaaaaattctctgcggcattttt

SEQ ID NO: 30711 - DNA, 25 bp, Artificial sequence
  SiRNA target sequence
taaaaaattctctgcggcatttttc

SEQ ID NO: 30712 - DNA, 25 bp, Artificial sequence
  SiRNA target sequence
aaaaaattctctgcggcatttttca

SEQ ID NO: 30713 - DNA, 25 bp, Artificial sequence
  SiRNA target sequence
aaaaattctctgcggcatttttcat

SEQ ID NO: 30714 - DNA, 25 bp, Artificial sequence
  SiRNA target sequence
aaaattctctgcggcatttttcatt

SEQ ID NO: 30715 - DNA, 25 bp, Artificial sequence
  SiRNA target sequence
aaattctctgcggcatttttcattt

SEQ ID NO: 30716 - DNA, 25 bp, Artificial sequence
  SiRNA target sequence
aattctctgcggcatttttcatttt

SEQ ID NO: 30717 - DNA, 25 bp, Artificial sequence
  SiRNA target sequence
attctctgcggcatttttcattttt

SEQ ID NO: 30718 - DNA, 25 bp, Artificial sequence
  SiRNA target sequence
ttctctgcggcatttttcatttttg

SEQ ID NO: 30719 - DNA, 25 bp, Artificial sequence
  SiRNA target sequence
tctctgcggcatttttcatttttga

SEQ ID NO: 30720 - DNA, 25 bp, Artificial sequence
  SiRNA target sequence
ctctgcggcatttttcatttttgac

SEQ ID NO: 30721 - DNA, 25 bp, Artificial sequence
  SiRNA target sequence
tctgcggcatttttcatttttgaca

SEQ ID NO: 30722 - DNA, 25 bp, Artificial sequence
  SiRNA target sequence
ctgcggcatttttcatttttgacaa

SEQ ID NO: 30723 - DNA, 25 bp, Artificial sequence
  SiRNA target sequence
tgcggcatttttcatttttgacaaa

SEQ ID NO: 30724 - DNA, 25 bp, Artificial sequence
  SiRNA target sequence
gcggcatttttcatttttgacaaaa

SEQ ID NO: 30725 - DNA, 25 bp, Artificial sequence
  SiRNA target sequence
cggcatttttcatttttgacaaaat

SEQ ID NO: 30726 - DNA, 25 bp, Artificial sequence
  SiRNA target sequence
ggcatttttcatttttgacaaaata

SEQ ID NO: 30727 - DNA, 25 bp, Artificial sequence
  SiRNA target sequence
gcatttttcatttttgacaaaataa

SEQ ID NO: 30728 - DNA, 25 bp, Artificial sequence
  SiRNA target sequence
catttttcatttttgacaaaataaa

SEQ ID NO: 30729 - DNA, 25 bp, Artificial sequence
  SiRNA target sequence
atttttcatttttgacaaaataaat

SEQ ID NO: 30730 - DNA, 25 bp, Artificial sequence
  SiRNA target sequence
tttttcatttttgacaaaataaatg

SEQ ID NO: 30731 - DNA, 25 bp, Artificial sequence
  SiRNA target sequence
ttttcatttttgacaaaataaatgc

SEQ ID NO: 30732 - DNA, 25 bp, Artificial sequence
  SiRNA target sequence
tttcatttttgacaaaataaatgca

SEQ ID NO: 30733 - DNA, 25 bp, Artificial sequence
  SiRNA target sequence
ttcatttttgacaaaataaatgcac

SEQ ID NO: 30734 - DNA, 25 bp, Artificial sequence
  SiRNA target sequence
tcatttttgacaaaataaatgcacc

SEQ ID NO: 30735 - DNA, 25 bp, Artificial sequence
  SiRNA target sequence
catttttgacaaaataaatgcacca

SEQ ID NO: 30736 - DNA, 25 bp, Artificial sequence
  SiRNA target sequence
atttttgacaaaataaatgcaccaa

SEQ ID NO: 30737 - DNA, 25 bp, Artificial sequence
  SiRNA target sequence
tttttgacaaaataaatgcaccaat

SEQ ID NO: 30738 - DNA, 25 bp, Artificial sequence
  SiRNA target sequence
ttttgacaaaataaatgcaccaatt

SEQ ID NO: 30739 - DNA, 25 bp, Artificial sequence
  SiRNA target sequence
tttgacaaaataaatgcaccaattt

SEQ ID NO: 30740 - DNA, 25 bp, Artificial sequence
  SiRNA target sequence
ttgacaaaataaatgcaccaatttg

SEQ ID NO: 30741 - DNA, 25 bp, Artificial sequence
  SiRNA target sequence
tgacaaaataaatgcaccaatttgt

SEQ ID NO: 30742 - DNA, 25 bp, Artificial sequence
  SiRNA target sequence
gacaaaataaatgcaccaatttgtg

SEQ ID NO: 30743 - DNA, 25 bp, Artificial sequence
  SiRNA target sequence
acaaaataaatgcaccaatttgtgc

SEQ ID NO: 30744 - DNA, 25 bp, Artificial sequence
  SiRNA target sequence
caaaataaatgcaccaatttgtgca

SEQ ID NO: 30745 - DNA, 25 bp, Artificial sequence
  SiRNA target sequence
aaaataaatgcaccaatttgtgcag

SEQ ID NO: 30746 - DNA, 25 bp, Artificial sequence
  SiRNA target sequence
aaataaatgcaccaatttgtgcagg

SEQ ID NO: 30747 - DNA, 25 bp, Artificial sequence
  SiRNA target sequence
aataaatgcaccaatttgtgcagga

SEQ ID NO: 30748 - DNA, 25 bp, Artificial sequence
  SiRNA target sequence
ataaatgcaccaatttgtgcaggag

SEQ ID NO: 30749 - DNA, 25 bp, Artificial sequence
  SiRNA target sequence
taaatgcaccaatttgtgcaggaga

SEQ ID NO: 30750 - DNA, 25 bp, Artificial sequence
  SiRNA target sequence
aaatgcaccaatttgtgcaggagaa

SEQ ID NO: 30751 - DNA, 25 bp, Artificial sequence
  SiRNA target sequence
aatgcaccaatttgtgcaggagaat

SEQ ID NO: 30752 - DNA, 25 bp, Artificial sequence
  SiRNA target sequence
atgcaccaatttgtgcaggagaata

SEQ ID NO: 30753 - DNA, 25 bp, Artificial sequence
  SiRNA target sequence
tgcaccaatttgtgcaggagaatat

SEQ ID NO: 30754 - DNA, 25 bp, Artificial sequence
  SiRNA target sequence
gcaccaatttgtgcaggagaatatt

SEQ ID NO: 30755 - DNA, 25 bp, Artificial sequence
  SiRNA target sequence
caccaatttgtgcaggagaatattt

SEQ ID NO: 30756 - DNA, 25 bp, Artificial sequence
  SiRNA target sequence
accaatttgtgcaggagaatatttc

SEQ ID NO: 30757 - DNA, 25 bp, Artificial sequence
  SiRNA target sequence
ccaatttgtgcaggagaatatttct

SEQ ID NO: 30758 - DNA, 25 bp, Artificial sequence
  SiRNA target sequence
caatttgtgcaggagaatatttctt

SEQ ID NO: 30759 - DNA, 25 bp, Artificial sequence
  SiRNA target sequence
aatttgtgcaggagaatatttctta

SEQ ID NO: 30760 - DNA, 25 bp, Artificial sequence
  SiRNA target sequence
atttgtgcaggagaatatttcttat

SEQ ID NO: 30761 - DNA, 25 bp, Artificial sequence
  SiRNA target sequence
tttgtgcaggagaatatttcttatt

SEQ ID NO: 30762 - DNA, 25 bp, Artificial sequence
  SiRNA target sequence
ttgtgcaggagaatatttcttattg

SEQ ID NO: 30763 - DNA, 25 bp, Artificial sequence
  SiRNA target sequence
tgtgcaggagaatatttcttattgt

SEQ ID NO: 30764 - DNA, 25 bp, Artificial sequence
  SiRNA target sequence
gtgcaggagaatatttcttattgtc

SEQ ID NO: 30765 - DNA, 25 bp, Artificial sequence
  SiRNA target sequence
tgcaggagaatatttcttattgtca

SEQ ID NO: 30766 - DNA, 25 bp, Artificial sequence
  SiRNA target sequence
gcaggagaatatttcttattgtcaa

SEQ ID NO: 30767 - DNA, 25 bp, Artificial sequence
  SiRNA target sequence
caggagaatatttcttattgtcaat

SEQ ID NO: 30768 - DNA, 25 bp, Artificial sequence
  SiRNA target sequence
aggagaatatttcttattgtcaatt

SEQ ID NO: 30769 - DNA, 25 bp, Artificial sequence
  SiRNA target sequence
ggagaatatttcttattgtcaattt

SEQ ID NO: 30770 - DNA, 25 bp, Artificial sequence
  SiRNA target sequence
gagaatatttcttattgtcaatttt

SEQ ID NO: 30771 - DNA, 25 bp, Artificial sequence
  SiRNA target sequence
agaatatttcttattgtcaattttt

SEQ ID NO: 30772 - DNA, 25 bp, Artificial sequence
  SiRNA target sequence
gaatatttcttattgtcaattttta

SEQ ID NO: 30773 - DNA, 25 bp, Artificial sequence
  SiRNA target sequence
aatatttcttattgtcaatttttat

SEQ ID NO: 30774 - DNA, 25 bp, Artificial sequence
  SiRNA target sequence
atatttcttattgtcaatttttatc

SEQ ID NO: 30775 - DNA, 25 bp, Artificial sequence
  SiRNA target sequence
tatttcttattgtcaatttttatcc

SEQ ID NO: 30776 - DNA, 25 bp, Artificial sequence
  SiRNA target sequence
atttcttattgtcaatttttatcca

SEQ ID NO: 30777 - DNA, 25 bp, Artificial sequence
  SiRNA target sequence
tttcttattgtcaatttttatccaa

SEQ ID NO: 30778 - DNA, 25 bp, Artificial sequence
  SiRNA target sequence
ttcttattgtcaatttttatccaaa

SEQ ID NO: 30779 - DNA, 25 bp, Artificial sequence
  SiRNA target sequence
tcttattgtcaatttttatccaaat

SEQ ID NO: 30780 - DNA, 25 bp, Artificial sequence
  SiRNA target sequence
cttattgtcaatttttatccaaata

SEQ ID NO: 30781 - DNA, 25 bp, Artificial sequence
  SiRNA target sequence
ttattgtcaatttttatccaaatat

SEQ ID NO: 30782 - DNA, 25 bp, Artificial sequence
  SiRNA target sequence
tattgtcaatttttatccaaatatc

SEQ ID NO: 30783 - DNA, 25 bp, Artificial sequence
  SiRNA target sequence
attgtcaatttttatccaaatatcg

SEQ ID NO: 30784 - DNA, 25 bp, Artificial sequence
  SiRNA target sequence
ttgtcaatttttatccaaatatcgc

SEQ ID NO: 30785 - DNA, 25 bp, Artificial sequence
  SiRNA target sequence
tgtcaatttttatccaaatatcgcc

SEQ ID NO: 30786 - DNA, 25 bp, Artificial sequence
  SiRNA target sequence
gtcaatttttatccaaatatcgccg

SEQ ID NO: 30787 - DNA, 25 bp, Artificial sequence
  SiRNA target sequence
tcaatttttatccaaatatcgccgt

SEQ ID NO: 30788 - DNA, 25 bp, Artificial sequence
  SiRNA target sequence
caatttttatccaaatatcgccgtt

SEQ ID NO: 30789 - DNA, 25 bp, Artificial sequence
  SiRNA target sequence
aatttttatccaaatatcgccgtta

SEQ ID NO: 30790 - DNA, 25 bp, Artificial sequence
  SiRNA target sequence
atttttatccaaatatcgccgttac

SEQ ID NO: 30791 - DNA, 25 bp, Artificial sequence
  SiRNA target sequence
tttttatccaaatatcgccgttaca

SEQ ID NO: 30792 - DNA, 25 bp, Artificial sequence
  SiRNA target sequence
ttttatccaaatatcgccgttacaa

SEQ ID NO: 30793 - DNA, 25 bp, Artificial sequence
  SiRNA target sequence
tttatccaaatatcgccgttacaat

SEQ ID NO: 30794 - DNA, 25 bp, Artificial sequence
  SiRNA target sequence
ttatccaaatatcgccgttacaatg

SEQ ID NO: 30795 - DNA, 25 bp, Artificial sequence
  SiRNA target sequence
tatccaaatatcgccgttacaatgc

SEQ ID NO: 30796 - DNA, 25 bp, Artificial sequence
  SiRNA target sequence
atccaaatatcgccgttacaatgct

SEQ ID NO: 30797 - DNA, 25 bp, Artificial sequence
  SiRNA target sequence
tccaaatatcgccgttacaatgctt

SEQ ID NO: 30798 - DNA, 25 bp, Artificial sequence
  SiRNA target sequence
ccaaatatcgccgttacaatgctta

SEQ ID NO: 30799 - DNA, 25 bp, Artificial sequence
  SiRNA target sequence
caaatatcgccgttacaatgcttag

SEQ ID NO: 30800 - DNA, 25 bp, Artificial sequence
  SiRNA target sequence
aaatatcgccgttacaatgcttagt

SEQ ID NO: 30801 - DNA, 25 bp, Artificial sequence
  SiRNA target sequence
aatatcgccgttacaatgcttagta

SEQ ID NO: 30802 - DNA, 25 bp, Artificial sequence
  SiRNA target sequence
atatcgccgttacaatgcttagtag

SEQ ID NO: 30803 - DNA, 25 bp, Artificial sequence
  SiRNA target sequence
tatcgccgttacaatgcttagtagt

SEQ ID NO: 30804 - DNA, 25 bp, Artificial sequence
  SiRNA target sequence
atcgccgttacaatgcttagtagtg

SEQ ID NO: 30805 - DNA, 25 bp, Artificial sequence
  SiRNA target sequence
tcgccgttacaatgcttagtagtgt

SEQ ID NO: 30806 - DNA, 25 bp, Artificial sequence
  SiRNA target sequence
cgccgttacaatgcttagtagtgtc

SEQ ID NO: 30807 - DNA, 25 bp, Artificial sequence
  SiRNA target sequence
gccgttacaatgcttagtagtgtca

SEQ ID NO: 30808 - DNA, 25 bp, Artificial sequence
  SiRNA target sequence
ccgttacaatgcttagtagtgtcat

SEQ ID NO: 30809 - DNA, 25 bp, Artificial sequence
  SiRNA target sequence
cgttacaatgcttagtagtgtcata

SEQ ID NO: 30810 - DNA, 25 bp, Artificial sequence
  SiRNA target sequence
gttacaatgcttagtagtgtcatat

SEQ ID NO: 30811 - DNA, 25 bp, Artificial sequence
  SiRNA target sequence
ttacaatgcttagtagtgtcatatg

SEQ ID NO: 30812 - DNA, 25 bp, Artificial sequence
  SiRNA target sequence
tacaatgcttagtagtgtcatatgg

SEQ ID NO: 30813 - DNA, 25 bp, Artificial sequence
  SiRNA target sequence
acaatgcttagtagtgtcatatggt

SEQ ID NO: 30814 - DNA, 25 bp, Artificial sequence
  SiRNA target sequence
caatgcttagtagtgtcatatggta

SEQ ID NO: 30815 - DNA, 25 bp, Artificial sequence
  SiRNA target sequence
aatgcttagtagtgtcatatggtaa

SEQ ID NO: 30816 - DNA, 25 bp, Artificial sequence
  SiRNA target sequence
atgcttagtagtgtcatatggtaag

SEQ ID NO: 30817 - DNA, 25 bp, Artificial sequence
  SiRNA target sequence
tgcttagtagtgtcatatggtaagc

SEQ ID NO: 30818 - DNA, 25 bp, Artificial sequence
  SiRNA target sequence
gcttagtagtgtcatatggtaagct

SEQ ID NO: 30819 - DNA, 25 bp, Artificial sequence
  SiRNA target sequence
cttagtagtgtcatatggtaagctt

SEQ ID NO: 30820 - DNA, 25 bp, Artificial sequence
  SiRNA target sequence
ttagtagtgtcatatggtaagcttt

SEQ ID NO: 30821 - DNA, 25 bp, Artificial sequence
  SiRNA target sequence
tagtagtgtcatatggtaagctttt

SEQ ID NO: 30822 - DNA, 25 bp, Artificial sequence
  SiRNA target sequence
agtagtgtcatatggtaagcttttt

SEQ ID NO: 30823 - DNA, 25 bp, Artificial sequence
  SiRNA target sequence
gtagtgtcatatggtaagcttttta

SEQ ID NO: 30824 - DNA, 25 bp, Artificial sequence
  SiRNA target sequence
tagtgtcatatggtaagctttttaa

SEQ ID NO: 30825 - DNA, 25 bp, Artificial sequence
  SiRNA target sequence
agtgtcatatggtaagctttttaaa

SEQ ID NO: 30826 - DNA, 25 bp, Artificial sequence
  SiRNA target sequence
gtgtcatatggtaagctttttaaat

SEQ ID NO: 30827 - DNA, 25 bp, Artificial sequence
  SiRNA target sequence
tgtcatatggtaagctttttaaata

SEQ ID NO: 30828 - DNA, 25 bp, Artificial sequence
  SiRNA target sequence
gtcatatggtaagctttttaaataa

SEQ ID NO: 30829 - DNA, 25 bp, Artificial sequence
  SiRNA target sequence
tcatatggtaagctttttaaataat

SEQ ID NO: 30830 - DNA, 25 bp, Artificial sequence
  SiRNA target sequence
catatggtaagctttttaaataatc

SEQ ID NO: 30831 - DNA, 25 bp, Artificial sequence
  SiRNA target sequence
atatggtaagctttttaaataatct

SEQ ID NO: 30832 - DNA, 25 bp, Artificial sequence
  SiRNA target sequence
tatggtaagctttttaaataatctt

SEQ ID NO: 30833 - DNA, 25 bp, Artificial sequence
  SiRNA target sequence
atggtaagctttttaaataatcttt

SEQ ID NO: 30834 - DNA, 25 bp, Artificial sequence
  SiRNA target sequence
tggtaagctttttaaataatctttt

SEQ ID NO: 30835 - DNA, 25 bp, Artificial sequence
  SiRNA target sequence
ggtaagctttttaaataatctttta

SEQ ID NO: 30836 - DNA, 25 bp, Artificial sequence
  SiRNA target sequence
gtaagctttttaaataatcttttaa

SEQ ID NO: 30837 - DNA, 25 bp, Artificial sequence
  SiRNA target sequence
taagctttttaaataatcttttaat

SEQ ID NO: 30838 - DNA, 25 bp, Artificial sequence
  SiRNA target sequence
aagctttttaaataatcttttaatt

SEQ ID NO: 30839 - DNA, 25 bp, Artificial sequence
  SiRNA target sequence
agctttttaaataatcttttaattc

SEQ ID NO: 30840 - DNA, 25 bp, Artificial sequence
  SiRNA target sequence
gctttttaaataatcttttaattct

SEQ ID NO: 30841 - DNA, 25 bp, Artificial sequence
  SiRNA target sequence
ctttttaaataatcttttaattcta

SEQ ID NO: 30842 - DNA, 25 bp, Artificial sequence
  SiRNA target sequence
tttttaaataatcttttaattctac

SEQ ID NO: 30843 - DNA, 25 bp, Artificial sequence
  SiRNA target sequence
ttttaaataatcttttaattctaca

SEQ ID NO: 30844 - DNA, 25 bp, Artificial sequence
  SiRNA target sequence
tttaaataatcttttaattctacat

SEQ ID NO: 30845 - DNA, 25 bp, Artificial sequence
  SiRNA target sequence
ttaaataatcttttaattctacatc

SEQ ID NO: 30846 - DNA, 25 bp, Artificial sequence
  SiRNA target sequence
taaataatcttttaattctacatca

SEQ ID NO: 30847 - DNA, 25 bp, Artificial sequence
  SiRNA target sequence
aaataatcttttaattctacatcat

SEQ ID NO: 30848 - DNA, 25 bp, Artificial sequence
  SiRNA target sequence
aataatcttttaattctacatcatc

SEQ ID NO: 30849 - DNA, 25 bp, Artificial sequence
  SiRNA target sequence
ataatcttttaattctacatcatca

SEQ ID NO: 30850 - DNA, 25 bp, Artificial sequence
  SiRNA target sequence
taatcttttaattctacatcatcaa

SEQ ID NO: 30851 - DNA, 25 bp, Artificial sequence
  SiRNA target sequence
aatcttttaattctacatcatcaaa

SEQ ID NO: 30852 - DNA, 25 bp, Artificial sequence
  SiRNA target sequence
atcttttaattctacatcatcaaat

SEQ ID NO: 30853 - DNA, 25 bp, Artificial sequence
  SiRNA target sequence
tcttttaattctacatcatcaaatt

SEQ ID NO: 30854 - DNA, 25 bp, Artificial sequence
  SiRNA target sequence
cttttaattctacatcatcaaattt

SEQ ID NO: 30855 - DNA, 25 bp, Artificial sequence
  SiRNA target sequence
ttttaattctacatcatcaaatttt

SEQ ID NO: 30856 - DNA, 25 bp, Artificial sequence
  SiRNA target sequence
tttaattctacatcatcaaattttc

SEQ ID NO: 30857 - DNA, 25 bp, Artificial sequence
  SiRNA target sequence
ttaattctacatcatcaaattttcg

SEQ ID NO: 30858 - DNA, 25 bp, Artificial sequence
  SiRNA target sequence
taattctacatcatcaaattttcgt

SEQ ID NO: 30859 - DNA, 25 bp, Artificial sequence
  SiRNA target sequence
aattctacatcatcaaattttcgtc

SEQ ID NO: 30860 - DNA, 25 bp, Artificial sequence
  SiRNA target sequence
attctacatcatcaaattttcgtcc

SEQ ID NO: 30861 - DNA, 25 bp, Artificial sequence
  SiRNA target sequence
ttctacatcatcaaattttcgtccc

SEQ ID NO: 30862 - DNA, 25 bp, Artificial sequence
  SiRNA target sequence
tctacatcatcaaattttcgtccca

SEQ ID NO: 30863 - DNA, 25 bp, Artificial sequence
  SiRNA target sequence
ctacatcatcaaattttcgtcccag

SEQ ID NO: 30864 - DNA, 25 bp, Artificial sequence
  SiRNA target sequence
tacatcatcaaattttcgtcccagc

SEQ ID NO: 30865 - DNA, 25 bp, Artificial sequence
  SiRNA target sequence
acatcatcaaattttcgtcccagca

SEQ ID NO: 30866 - DNA, 25 bp, Artificial sequence
  SiRNA target sequence
catcatcaaattttcgtcccagcaa

SEQ ID NO: 30867 - DNA, 25 bp, Artificial sequence
  SiRNA target sequence
atcatcaaattttcgtcccagcaat

SEQ ID NO: 30868 - DNA, 25 bp, Artificial sequence
  SiRNA target sequence
tcatcaaattttcgtcccagcaatc

SEQ ID NO: 30869 - DNA, 25 bp, Artificial sequence
  SiRNA target sequence
catcaaattttcgtcccagcaatct

SEQ ID NO: 30870 - DNA, 25 bp, Artificial sequence
  SiRNA target sequence
atcaaattttcgtcccagcaatctc

SEQ ID NO: 30871 - DNA, 25 bp, Artificial sequence
  SiRNA target sequence
tcaaattttcgtcccagcaatctct

SEQ ID NO: 30872 - DNA, 25 bp, Artificial sequence
  SiRNA target sequence
caaattttcgtcccagcaatctctt

SEQ ID NO: 30873 - DNA, 25 bp, Artificial sequence
  SiRNA target sequence
aaattttcgtcccagcaatctctta

SEQ ID NO: 30874 - DNA, 25 bp, Artificial sequence
  SiRNA target sequence
aattttcgtcccagcaatctcttag

SEQ ID NO: 30875 - DNA, 25 bp, Artificial sequence
  SiRNA target sequence
attttcgtcccagcaatctcttaga

SEQ ID NO: 30876 - DNA, 25 bp, Artificial sequence
  SiRNA target sequence
ttttcgtcccagcaatctcttagac

SEQ ID NO: 30877 - DNA, 25 bp, Artificial sequence
  SiRNA target sequence
tttcgtcccagcaatctcttagacg

SEQ ID NO: 30878 - DNA, 25 bp, Artificial sequence
  SiRNA target sequence
ttcgtcccagcaatctcttagacgc

SEQ ID NO: 30879 - DNA, 25 bp, Artificial sequence
  SiRNA target sequence
tcgtcccagcaatctcttagacgca

SEQ ID NO: 30880 - DNA, 25 bp, Artificial sequence
  SiRNA target sequence
cgtcccagcaatctcttagacgcaa

SEQ ID NO: 30881 - DNA, 25 bp, Artificial sequence
  SiRNA target sequence
gtcccagcaatctcttagacgcaaa

SEQ ID NO: 30882 - DNA, 25 bp, Artificial sequence
  SiRNA target sequence
tcccagcaatctcttagacgcaaaa

SEQ ID NO: 30883 - DNA, 25 bp, Artificial sequence
  SiRNA target sequence
cccagcaatctcttagacgcaaaaa

SEQ ID NO: 30884 - DNA, 25 bp, Artificial sequence
  SiRNA target sequence
ccagcaatctcttagacgcaaaaat

SEQ ID NO: 30885 - DNA, 25 bp, Artificial sequence
  SiRNA target sequence
cagcaatctcttagacgcaaaaatc

SEQ ID NO: 30886 - DNA, 25 bp, Artificial sequence
  SiRNA target sequence
agcaatctcttagacgcaaaaatcg

SEQ ID NO: 30887 - DNA, 25 bp, Artificial sequence
  SiRNA target sequence
gcaatctcttagacgcaaaaatcgt

SEQ ID NO: 30888 - DNA, 25 bp, Artificial sequence
  SiRNA target sequence
caatctcttagacgcaaaaatcgta

SEQ ID NO: 30889 - DNA, 25 bp, Artificial sequence
  SiRNA target sequence
aatctcttagacgcaaaaatcgtat

SEQ ID NO: 30890 - DNA, 25 bp, Artificial sequence
  SiRNA target sequence
atctcttagacgcaaaaatcgtatt

SEQ ID NO: 30891 - DNA, 25 bp, Artificial sequence
  SiRNA target sequence
tctcttagacgcaaaaatcgtattc

SEQ ID NO: 30892 - DNA, 25 bp, Artificial sequence
  SiRNA target sequence
ctcttagacgcaaaaatcgtattct

SEQ ID NO: 30893 - DNA, 25 bp, Artificial sequence
  SiRNA target sequence
tcttagacgcaaaaatcgtattctt

SEQ ID NO: 30894 - DNA, 25 bp, Artificial sequence
  SiRNA target sequence
cttagacgcaaaaatcgtattcttg

SEQ ID NO: 30895 - DNA, 25 bp, Artificial sequence
  SiRNA target sequence
ttagacgcaaaaatcgtattcttgg

SEQ ID NO: 30896 - DNA, 25 bp, Artificial sequence
  SiRNA target sequence
tagacgcaaaaatcgtattcttggg

SEQ ID NO: 30897 - DNA, 25 bp, Artificial sequence
  SiRNA target sequence
agacgcaaaaatcgtattcttggga

SEQ ID NO: 30898 - DNA, 25 bp, Artificial sequence
  SiRNA target sequence
gacgcaaaaatcgtattcttgggat

SEQ ID NO: 30899 - DNA, 25 bp, Artificial sequence
  SiRNA target sequence
acgcaaaaatcgtattcttgggatg

SEQ ID NO: 30900 - DNA, 25 bp, Artificial sequence
  SiRNA target sequence
cgcaaaaatcgtattcttgggatgt

SEQ ID NO: 30901 - DNA, 25 bp, Artificial sequence
  SiRNA target sequence
gcaaaaatcgtattcttgggatgta

SEQ ID NO: 30902 - DNA, 25 bp, Artificial sequence
  SiRNA target sequence
caaaaatcgtattcttgggatgtaa

SEQ ID NO: 30903 - DNA, 25 bp, Artificial sequence
  SiRNA target sequence
aaaaatcgtattcttgggatgtaat

SEQ ID NO: 30904 - DNA, 25 bp, Artificial sequence
  SiRNA target sequence
aaaatcgtattcttgggatgtaata

SEQ ID NO: 30905 - DNA, 25 bp, Artificial sequence
  SiRNA target sequence
aaatcgtattcttgggatgtaataa

SEQ ID NO: 30906 - DNA, 25 bp, Artificial sequence
  SiRNA target sequence
aatcgtattcttgggatgtaataac

SEQ ID NO: 30907 - DNA, 25 bp, Artificial sequence
  SiRNA target sequence
atcgtattcttgggatgtaataaca

SEQ ID NO: 30908 - DNA, 25 bp, Artificial sequence
  SiRNA target sequence
tcgtattcttgggatgtaataacaa

SEQ ID NO: 30909 - DNA, 25 bp, Artificial sequence
  SiRNA target sequence
cgtattcttgggatgtaataacaag

SEQ ID NO: 30910 - DNA, 25 bp, Artificial sequence
  SiRNA target sequence
gtattcttgggatgtaataacaagt

SEQ ID NO: 30911 - DNA, 25 bp, Artificial sequence
  SiRNA target sequence
tattcttgggatgtaataacaagtt

SEQ ID NO: 30912 - DNA, 25 bp, Artificial sequence
  SiRNA target sequence
attcttgggatgtaataacaagtta

SEQ ID NO: 30913 - DNA, 25 bp, Artificial sequence
  SiRNA target sequence
ttcttgggatgtaataacaagttag

SEQ ID NO: 30914 - DNA, 25 bp, Artificial sequence
  SiRNA target sequence
tcttgggatgtaataacaagttaga

SEQ ID NO: 30915 - DNA, 25 bp, Artificial sequence
  SiRNA target sequence
cttgggatgtaataacaagttagac

SEQ ID NO: 30916 - DNA, 25 bp, Artificial sequence
  SiRNA target sequence
ttgggatgtaataacaagttagact

SEQ ID NO: 30917 - DNA, 25 bp, Artificial sequence
  SiRNA target sequence
tgggatgtaataacaagttagactt

SEQ ID NO: 30918 - DNA, 25 bp, Artificial sequence
  SiRNA target sequence
gggatgtaataacaagttagactta

SEQ ID NO: 30919 - DNA, 25 bp, Artificial sequence
  SiRNA target sequence
ggatgtaataacaagttagacttag

SEQ ID NO: 30920 - DNA, 25 bp, Artificial sequence
  SiRNA target sequence
gatgtaataacaagttagacttagc

SEQ ID NO: 30921 - DNA, 25 bp, Artificial sequence
  SiRNA target sequence
atgtaataacaagttagacttagct

SEQ ID NO: 30922 - DNA, 25 bp, Artificial sequence
  SiRNA target sequence
tgtaataacaagttagacttagctt

SEQ ID NO: 30923 - DNA, 25 bp, Artificial sequence
  SiRNA target sequence
gtaataacaagttagacttagcttg

SEQ ID NO: 30924 - DNA, 25 bp, Artificial sequence
  SiRNA target sequence
taataacaagttagacttagcttgc

SEQ ID NO: 30925 - DNA, 25 bp, Artificial sequence
  SiRNA target sequence
aataacaagttagacttagcttgct

SEQ ID NO: 30926 - DNA, 25 bp, Artificial sequence
  SiRNA target sequence
ataacaagttagacttagcttgctc

SEQ ID NO: 30927 - DNA, 25 bp, Artificial sequence
  SiRNA target sequence
taacaagttagacttagcttgctca

SEQ ID NO: 30928 - DNA, 25 bp, Artificial sequence
  SiRNA target sequence
aacaagttagacttagcttgctcac

SEQ ID NO: 30929 - DNA, 25 bp, Artificial sequence
  SiRNA target sequence
acaagttagacttagcttgctcacc

SEQ ID NO: 30930 - DNA, 25 bp, Artificial sequence
  SiRNA target sequence
caagttagacttagcttgctcacct

SEQ ID NO: 30931 - DNA, 25 bp, Artificial sequence
  SiRNA target sequence
aagttagacttagcttgctcacctg

SEQ ID NO: 30932 - DNA, 25 bp, Artificial sequence
  SiRNA target sequence
agttagacttagcttgctcacctgt

SEQ ID NO: 30933 - DNA, 25 bp, Artificial sequence
  SiRNA target sequence
gttagacttagcttgctcacctgtt

SEQ ID NO: 30934 - DNA, 25 bp, Artificial sequence
  SiRNA target sequence
ttagacttagcttgctcacctgtta

SEQ ID NO: 30935 - DNA, 25 bp, Artificial sequence
  SiRNA target sequence
tagacttagcttgctcacctgttaa

SEQ ID NO: 30936 - DNA, 25 bp, Artificial sequence
  SiRNA target sequence
agacttagcttgctcacctgttaaa

SEQ ID NO: 30937 - DNA, 25 bp, Artificial sequence
  SiRNA target sequence
gacttagcttgctcacctgttaaaa

SEQ ID NO: 30938 - DNA, 25 bp, Artificial sequence
  SiRNA target sequence
acttagcttgctcacctgttaaaat

SEQ ID NO: 30939 - DNA, 25 bp, Artificial sequence
  SiRNA target sequence
cttagcttgctcacctgttaaaatt

SEQ ID NO: 30940 - DNA, 25 bp, Artificial sequence
  SiRNA target sequence
ttagcttgctcacctgttaaaattt

SEQ ID NO: 30941 - DNA, 25 bp, Artificial sequence
  SiRNA target sequence
tagcttgctcacctgttaaaatttt

SEQ ID NO: 30942 - DNA, 25 bp, Artificial sequence
  SiRNA target sequence
agcttgctcacctgttaaaatttta

SEQ ID NO: 30943 - DNA, 25 bp, Artificial sequence
  SiRNA target sequence
gcttgctcacctgttaaaattttat

SEQ ID NO: 30944 - DNA, 25 bp, Artificial sequence
  SiRNA target sequence
cttgctcacctgttaaaattttatc

SEQ ID NO: 30945 - DNA, 25 bp, Artificial sequence
  SiRNA target sequence
ttgctcacctgttaaaattttatct

SEQ ID NO: 30946 - DNA, 25 bp, Artificial sequence
  SiRNA target sequence
tgctcacctgttaaaattttatctt

SEQ ID NO: 30947 - DNA, 25 bp, Artificial sequence
  SiRNA target sequence
gctcacctgttaaaattttatcttt

SEQ ID NO: 30948 - DNA, 25 bp, Artificial sequence
  SiRNA target sequence
ctcacctgttaaaattttatcttta

SEQ ID NO: 30949 - DNA, 25 bp, Artificial sequence
  SiRNA target sequence
tcacctgttaaaattttatctttaa

SEQ ID NO: 30950 - DNA, 25 bp, Artificial sequence
  SiRNA target sequence
cacctgttaaaattttatctttaaa

SEQ ID NO: 30951 - DNA, 25 bp, Artificial sequence
  SiRNA target sequence
acctgttaaaattttatctttaaaa

SEQ ID NO: 30952 - DNA, 25 bp, Artificial sequence
  SiRNA target sequence
cctgttaaaattttatctttaaaaa

SEQ ID NO: 30953 - DNA, 25 bp, Artificial sequence
  SiRNA target sequence
ctgttaaaattttatctttaaaaat

SEQ ID NO: 30954 - DNA, 25 bp, Artificial sequence
  SiRNA target sequence
tgttaaaattttatctttaaaaatt

SEQ ID NO: 30955 - DNA, 25 bp, Artificial sequence
  SiRNA target sequence
gttaaaattttatctttaaaaattg

SEQ ID NO: 30956 - DNA, 25 bp, Artificial sequence
  SiRNA target sequence
ttaaaattttatctttaaaaattga

SEQ ID NO: 30957 - DNA, 25 bp, Artificial sequence
  SiRNA target sequence
taaaattttatctttaaaaattgat

SEQ ID NO: 30958 - DNA, 25 bp, Artificial sequence
  SiRNA target sequence
aaaattttatctttaaaaattgata

SEQ ID NO: 30959 - DNA, 25 bp, Artificial sequence
  SiRNA target sequence
aaattttatctttaaaaattgatac

SEQ ID NO: 30960 - DNA, 25 bp, Artificial sequence
  SiRNA target sequence
aattttatctttaaaaattgatacc

SEQ ID NO: 30961 - DNA, 25 bp, Artificial sequence
  SiRNA target sequence
attttatctttaaaaattgatacca

SEQ ID NO: 30962 - DNA, 25 bp, Artificial sequence
  SiRNA target sequence
ttttatctttaaaaattgataccac

SEQ ID NO: 30963 - DNA, 25 bp, Artificial sequence
  SiRNA target sequence
tttatctttaaaaattgataccacc

SEQ ID NO: 30964 - DNA, 25 bp, Artificial sequence
  SiRNA target sequence
ttatctttaaaaattgataccaccg

SEQ ID NO: 30965 - DNA, 25 bp, Artificial sequence
  SiRNA target sequence
tatctttaaaaattgataccaccga

SEQ ID NO: 30966 - DNA, 25 bp, Artificial sequence
  SiRNA target sequence
atctttaaaaattgataccaccgat

SEQ ID NO: 30967 - DNA, 25 bp, Artificial sequence
  SiRNA target sequence
tctttaaaaattgataccaccgatg

SEQ ID NO: 30968 - DNA, 25 bp, Artificial sequence
  SiRNA target sequence
ctttaaaaattgataccaccgatgg

SEQ ID NO: 30969 - DNA, 25 bp, Artificial sequence
  SiRNA target sequence
tttaaaaattgataccaccgatggt

SEQ ID NO: 30970 - DNA, 25 bp, Artificial sequence
  SiRNA target sequence
ttaaaaattgataccaccgatggtg

SEQ ID NO: 30971 - DNA, 25 bp, Artificial sequence
  SiRNA target sequence
taaaaattgataccaccgatggtgt

SEQ ID NO: 30972 - DNA, 25 bp, Artificial sequence
  SiRNA target sequence
aaaaattgataccaccgatggtgta

SEQ ID NO: 30973 - DNA, 25 bp, Artificial sequence
  SiRNA target sequence
aaaattgataccaccgatggtgtag

SEQ ID NO: 30974 - DNA, 25 bp, Artificial sequence
  SiRNA target sequence
aaattgataccaccgatggtgtagt

SEQ ID NO: 30975 - DNA, 25 bp, Artificial sequence
  SiRNA target sequence
aattgataccaccgatggtgtagtt

SEQ ID NO: 30976 - DNA, 25 bp, Artificial sequence
  SiRNA target sequence
attgataccaccgatggtgtagttc

SEQ ID NO: 30977 - DNA, 25 bp, Artificial sequence
  SiRNA target sequence
ttgataccaccgatggtgtagttct

SEQ ID NO: 30978 - DNA, 25 bp, Artificial sequence
  SiRNA target sequence
tgataccaccgatggtgtagttcta

SEQ ID NO: 30979 - DNA, 25 bp, Artificial sequence
  SiRNA target sequence
gataccaccgatggtgtagttctac

SEQ ID NO: 30980 - DNA, 25 bp, Artificial sequence
  SiRNA target sequence
ataccaccgatggtgtagttctacc

SEQ ID NO: 30981 - DNA, 25 bp, Artificial sequence
  SiRNA target sequence
taccaccgatggtgtagttctacca

SEQ ID NO: 30982 - DNA, 25 bp, Artificial sequence
  SiRNA target sequence
accaccgatggtgtagttctaccac

SEQ ID NO: 30983 - DNA, 25 bp, Artificial sequence
  SiRNA target sequence
ccaccgatggtgtagttctaccacc

SEQ ID NO: 30984 - DNA, 25 bp, Artificial sequence
  SiRNA target sequence
caccgatggtgtagttctaccacct

SEQ ID NO: 30985 - DNA, 25 bp, Artificial sequence
  SiRNA target sequence
accgatggtgtagttctaccacctt

SEQ ID NO: 30986 - DNA, 25 bp, Artificial sequence
  SiRNA target sequence
ccgatggtgtagttctaccaccttc

SEQ ID NO: 30987 - DNA, 25 bp, Artificial sequence
  SiRNA target sequence
cgatggtgtagttctaccaccttct

SEQ ID NO: 30988 - DNA, 25 bp, Artificial sequence
  SiRNA target sequence
gatggtgtagttctaccaccttctt

SEQ ID NO: 30989 - DNA, 25 bp, Artificial sequence
  SiRNA target sequence
atggtgtagttctaccaccttcttc

SEQ ID NO: 30990 - DNA, 25 bp, Artificial sequence
  SiRNA target sequence
tggtgtagttctaccaccttcttcg

SEQ ID NO: 30991 - DNA, 25 bp, Artificial sequence
  SiRNA target sequence
ggtgtagttctaccaccttcttcgt

SEQ ID NO: 30992 - DNA, 25 bp, Artificial sequence
  SiRNA target sequence
gtgtagttctaccaccttcttcgtt

SEQ ID NO: 30993 - DNA, 25 bp, Artificial sequence
  SiRNA target sequence
tgtagttctaccaccttcttcgttt

SEQ ID NO: 30994 - DNA, 25 bp, Artificial sequence
  SiRNA target sequence
gtagttctaccaccttcttcgtttt

SEQ ID NO: 30995 - DNA, 25 bp, Artificial sequence
  SiRNA target sequence
tagttctaccaccttcttcgttttc

SEQ ID NO: 30996 - DNA, 25 bp, Artificial sequence
  SiRNA target sequence
agttctaccaccttcttcgttttca

SEQ ID NO: 30997 - DNA, 25 bp, Artificial sequence
  SiRNA target sequence
gttctaccaccttcttcgttttcaa

SEQ ID NO: 30998 - DNA, 25 bp, Artificial sequence
  SiRNA target sequence
ttctaccaccttcttcgttttcaat

SEQ ID NO: 30999 - DNA, 25 bp, Artificial sequence
  SiRNA target sequence
tctaccaccttcttcgttttcaata

SEQ ID NO: 31000 - DNA, 25 bp, Artificial sequence
  SiRNA target sequence
ctaccaccttcttcgttttcaataa

SEQ ID NO: 31001 - DNA, 25 bp, Artificial sequence
  SiRNA target sequence
taccaccttcttcgttttcaataat

SEQ ID NO: 31002 - DNA, 25 bp, Artificial sequence
  SiRNA target sequence
accaccttcttcgttttcaataatt

SEQ ID NO: 31003 - DNA, 25 bp, Artificial sequence
  SiRNA target sequence
ccaccttcttcgttttcaataattt

SEQ ID NO: 31004 - DNA, 25 bp, Artificial sequence
  SiRNA target sequence
caccttcttcgttttcaataatttg

SEQ ID NO: 31005 - DNA, 25 bp, Artificial sequence
  SiRNA target sequence
accttcttcgttttcaataatttgt

SEQ ID NO: 31006 - DNA, 25 bp, Artificial sequence
  SiRNA target sequence
ccttcttcgttttcaataatttgtg

SEQ ID NO: 31007 - DNA, 25 bp, Artificial sequence
  SiRNA target sequence
cttcttcgttttcaataatttgtgg

SEQ ID NO: 31008 - DNA, 25 bp, Artificial sequence
  SiRNA target sequence
ttcttcgttttcaataatttgtggg

SEQ ID NO: 31009 - DNA, 25 bp, Artificial sequence
  SiRNA target sequence
tcttcgttttcaataatttgtggga

SEQ ID NO: 31010 - DNA, 25 bp, Artificial sequence
  SiRNA target sequence
cttcgttttcaataatttgtgggat

SEQ ID NO: 31011 - DNA, 25 bp, Artificial sequence
  SiRNA target sequence
ttcgttttcaataatttgtgggata

SEQ ID NO: 31012 - DNA, 25 bp, Artificial sequence
  SiRNA target sequence
tcgttttcaataatttgtgggatat

SEQ ID NO: 31013 - DNA, 25 bp, Artificial sequence
  SiRNA target sequence
cgttttcaataatttgtgggatatt

SEQ ID NO: 31014 - DNA, 25 bp, Artificial sequence
  SiRNA target sequence
gttttcaataatttgtgggatattg

SEQ ID NO: 31015 - DNA, 25 bp, Artificial sequence
  SiRNA target sequence
ttttcaataatttgtgggatattgt

SEQ ID NO: 31016 - DNA, 25 bp, Artificial sequence
  SiRNA target sequence
tttcaataatttgtgggatattgtt

SEQ ID NO: 31017 - DNA, 25 bp, Artificial sequence
  SiRNA target sequence
ttcaataatttgtgggatattgtta

SEQ ID NO: 31018 - DNA, 25 bp, Artificial sequence
  SiRNA target sequence
tcaataatttgtgggatattgttat

SEQ ID NO: 31019 - DNA, 25 bp, Artificial sequence
  SiRNA target sequence
caataatttgtgggatattgttatg

SEQ ID NO: 31020 - DNA, 25 bp, Artificial sequence
  SiRNA target sequence
aataatttgtgggatattgttatgt

SEQ ID NO: 31021 - DNA, 25 bp, Artificial sequence
  SiRNA target sequence
ataatttgtgggatattgttatgta

SEQ ID NO: 31022 - DNA, 25 bp, Artificial sequence
  SiRNA target sequence
taatttgtgggatattgttatgtat

SEQ ID NO: 31023 - DNA, 25 bp, Artificial sequence
  SiRNA target sequence
aatttgtgggatattgttatgtata

SEQ ID NO: 31024 - DNA, 25 bp, Artificial sequence
  SiRNA target sequence
atttgtgggatattgttatgtataa

SEQ ID NO: 31025 - DNA, 25 bp, Artificial sequence
  SiRNA target sequence
tttgtgggatattgttatgtataag

SEQ ID NO: 31026 - DNA, 25 bp, Artificial sequence
  SiRNA target sequence
ttgtgggatattgttatgtataaga

SEQ ID NO: 31027 - DNA, 25 bp, Artificial sequence
  SiRNA target sequence
tgtgggatattgttatgtataagag

SEQ ID NO: 31028 - DNA, 25 bp, Artificial sequence
  SiRNA target sequence
gtgggatattgttatgtataagaga

SEQ ID NO: 31029 - DNA, 25 bp, Artificial sequence
  SiRNA target sequence
tgggatattgttatgtataagagac

SEQ ID NO: 31030 - DNA, 25 bp, Artificial sequence
  SiRNA target sequence
gggatattgttatgtataagagaca

SEQ ID NO: 31031 - DNA, 25 bp, Artificial sequence
  SiRNA target sequence
ggatattgttatgtataagagacac

SEQ ID NO: 31032 - DNA, 25 bp, Artificial sequence
  SiRNA target sequence
gatattgttatgtataagagacaca

SEQ ID NO: 31033 - DNA, 25 bp, Artificial sequence
  SiRNA target sequence
atattgttatgtataagagacacac

SEQ ID NO: 31034 - DNA, 25 bp, Artificial sequence
  SiRNA target sequence
tattgttatgtataagagacacaca

SEQ ID NO: 31035 - DNA, 25 bp, Artificial sequence
  SiRNA target sequence
attgttatgtataagagacacacaa

SEQ ID NO: 31036 - DNA, 25 bp, Artificial sequence
  SiRNA target sequence
ttgttatgtataagagacacacaag

SEQ ID NO: 31037 - DNA, 25 bp, Artificial sequence
  SiRNA target sequence
tgttatgtataagagacacacaaga

SEQ ID NO: 31038 - DNA, 25 bp, Artificial sequence
  SiRNA target sequence
gttatgtataagagacacacaagaa

SEQ ID NO: 31039 - DNA, 25 bp, Artificial sequence
  SiRNA target sequence
ttatgtataagagacacacaagaat

SEQ ID NO: 31040 - DNA, 25 bp, Artificial sequence
  SiRNA target sequence
tatgtataagagacacacaagaatt

SEQ ID NO: 31041 - DNA, 25 bp, Artificial sequence
  SiRNA target sequence
atgtataagagacacacaagaattg

SEQ ID NO: 31042 - DNA, 25 bp, Artificial sequence
  SiRNA target sequence
tgtataagagacacacaagaattgg

SEQ ID NO: 31043 - DNA, 25 bp, Artificial sequence
  SiRNA target sequence
gtataagagacacacaagaattggt

SEQ ID NO: 31044 - DNA, 25 bp, Artificial sequence
  SiRNA target sequence
tataagagacacacaagaattggtt

SEQ ID NO: 31045 - DNA, 25 bp, Artificial sequence
  SiRNA target sequence
ataagagacacacaagaattggttg

SEQ ID NO: 31046 - DNA, 25 bp, Artificial sequence
  SiRNA target sequence
taagagacacacaagaattggttgt

SEQ ID NO: 31047 - DNA, 25 bp, Artificial sequence
  SiRNA target sequence
aagagacacacaagaattggttgtt

SEQ ID NO: 31048 - DNA, 25 bp, Artificial sequence
  SiRNA target sequence
agagacacacaagaattggttgttc

SEQ ID NO: 31049 - DNA, 25 bp, Artificial sequence
  SiRNA target sequence
gagacacacaagaattggttgttcc

SEQ ID NO: 31050 - DNA, 25 bp, Artificial sequence
  SiRNA target sequence
agacacacaagaattggttgttcct

SEQ ID NO: 31051 - DNA, 25 bp, Artificial sequence
  SiRNA target sequence
gacacacaagaattggttgttccta

SEQ ID NO: 31052 - DNA, 25 bp, Artificial sequence
  SiRNA target sequence
acacacaagaattggttgttcctag

SEQ ID NO: 31053 - DNA, 25 bp, Artificial sequence
  SiRNA target sequence
cacacaagaattggttgttcctaga

SEQ ID NO: 31054 - DNA, 25 bp, Artificial sequence
  SiRNA target sequence
acacaagaattggttgttcctagat

SEQ ID NO: 31055 - DNA, 25 bp, Artificial sequence
  SiRNA target sequence
cacaagaattggttgttcctagatc

SEQ ID NO: 31056 - DNA, 25 bp, Artificial sequence
  SiRNA target sequence
acaagaattggttgttcctagatca

SEQ ID NO: 31057 - DNA, 25 bp, Artificial sequence
  SiRNA target sequence
caagaattggttgttcctagatcaa

SEQ ID NO: 31058 - DNA, 25 bp, Artificial sequence
  SiRNA target sequence
aagaattggttgttcctagatcaat

SEQ ID NO: 31059 - DNA, 25 bp, Artificial sequence
  SiRNA target sequence
agaattggttgttcctagatcaatt

SEQ ID NO: 31060 - DNA, 25 bp, Artificial sequence
  SiRNA target sequence
gaattggttgttcctagatcaattc

SEQ ID NO: 31061 - DNA, 25 bp, Artificial sequence
  SiRNA target sequence
aattggttgttcctagatcaattcc

SEQ ID NO: 31062 - DNA, 25 bp, Artificial sequence
  SiRNA target sequence
attggttgttcctagatcaattcct

SEQ ID NO: 31063 - DNA, 25 bp, Artificial sequence
  SiRNA target sequence
ttggttgttcctagatcaattccta

SEQ ID NO: 31064 - DNA, 25 bp, Artificial sequence
  SiRNA target sequence
tggttgttcctagatcaattcctat

SEQ ID NO: 31065 - DNA, 25 bp, Artificial sequence
  SiRNA target sequence
ggttgttcctagatcaattcctatt

SEQ ID NO: 31066 - DNA, 25 bp, Artificial sequence
  SiRNA target sequence
gttgttcctagatcaattcctatta

SEQ ID NO: 31067 - DNA, 25 bp, Artificial sequence
  SiRNA target sequence
ttgttcctagatcaattcctattat

SEQ ID NO: 31068 - DNA, 25 bp, Artificial sequence
  SiRNA target sequence
tgttcctagatcaattcctattatt

SEQ ID NO: 31069 - DNA, 25 bp, Artificial sequence
  SiRNA target sequence
gttcctagatcaattcctattattt

SEQ ID NO: 31070 - DNA, 25 bp, Artificial sequence
  SiRNA target sequence
ttcctagatcaattcctattatttt

SEQ ID NO: 31071 - DNA, 25 bp, Artificial sequence
  SiRNA target sequence
tcctagatcaattcctattatttta

SEQ ID NO: 31072 - DNA, 25 bp, Artificial sequence
  SiRNA target sequence
cctagatcaattcctattattttag

SEQ ID NO: 31073 - DNA, 25 bp, Artificial sequence
  SiRNA target sequence
ctagatcaattcctattattttaga

SEQ ID NO: 31074 - DNA, 25 bp, Artificial sequence
  SiRNA target sequence
tagatcaattcctattattttagag

SEQ ID NO: 31075 - DNA, 25 bp, Artificial sequence
  SiRNA target sequence
agatcaattcctattattttagagc

SEQ ID NO: 31076 - DNA, 25 bp, Artificial sequence
  SiRNA target sequence
gatcaattcctattattttagagct

SEQ ID NO: 31077 - DNA, 25 bp, Artificial sequence
  SiRNA target sequence
atcaattcctattattttagagcta

SEQ ID NO: 31078 - DNA, 25 bp, Artificial sequence
  SiRNA target sequence
tcaattcctattattttagagctaa

SEQ ID NO: 31079 - DNA, 25 bp, Artificial sequence
  SiRNA target sequence
caattcctattattttagagctaat

SEQ ID NO: 31080 - DNA, 25 bp, Artificial sequence
  SiRNA target sequence
aattcctattattttagagctaatt

SEQ ID NO: 31081 - DNA, 25 bp, Artificial sequence
  SiRNA target sequence
attcctattattttagagctaattt

SEQ ID NO: 31082 - DNA, 25 bp, Artificial sequence
  SiRNA target sequence
ttcctattattttagagctaatttc

SEQ ID NO: 31083 - DNA, 25 bp, Artificial sequence
  SiRNA target sequence
tcctattattttagagctaatttct

SEQ ID NO: 31084 - DNA, 25 bp, Artificial sequence
  SiRNA target sequence
cctattattttagagctaatttctt

SEQ ID NO: 31085 - DNA, 25 bp, Artificial sequence
  SiRNA target sequence
ctattattttagagctaatttcttc

SEQ ID NO: 31086 - DNA, 25 bp, Artificial sequence
  SiRNA target sequence
tattattttagagctaatttcttct

SEQ ID NO: 31087 - DNA, 25 bp, Artificial sequence
  SiRNA target sequence
attattttagagctaatttcttctt

SEQ ID NO: 31088 - DNA, 25 bp, Artificial sequence
  SiRNA target sequence
ttattttagagctaatttcttcttt

SEQ ID NO: 31089 - DNA, 25 bp, Artificial sequence
  SiRNA target sequence
tattttagagctaatttcttcttta

SEQ ID NO: 31090 - DNA, 25 bp, Artificial sequence
  SiRNA target sequence
attttagagctaatttcttctttag

SEQ ID NO: 31091 - DNA, 25 bp, Artificial sequence
  SiRNA target sequence
ttttagagctaatttcttctttaga

SEQ ID NO: 31092 - DNA, 25 bp, Artificial sequence
  SiRNA target sequence
tttagagctaatttcttctttagac

SEQ ID NO: 31093 - DNA, 25 bp, Artificial sequence
  SiRNA target sequence
ttagagctaatttcttctttagaca

SEQ ID NO: 31094 - DNA, 25 bp, Artificial sequence
  SiRNA target sequence
tagagctaatttcttctttagacat

SEQ ID NO: 31095 - DNA, 26 bp, Artificial sequence
  SiRNA target sequence
ttaagaatttttcaatattttttttg

SEQ ID NO: 31096 - DNA, 26 bp, Artificial sequence
  SiRNA target sequence
taagaatttttcaatattttttttgc

SEQ ID NO: 31097 - DNA, 26 bp, Artificial sequence
  SiRNA target sequence
aagaatttttcaatattttttttgct

SEQ ID NO: 31098 - DNA, 26 bp, Artificial sequence
  SiRNA target sequence
agaatttttcaatattttttttgctt

SEQ ID NO: 31099 - DNA, 26 bp, Artificial sequence
  SiRNA target sequence
gaatttttcaatattttttttgcttg

SEQ ID NO: 31100 - DNA, 26 bp, Artificial sequence
  SiRNA target sequence
aatttttcaatattttttttgcttgt

SEQ ID NO: 31101 - DNA, 26 bp, Artificial sequence
  SiRNA target sequence
atttttcaatattttttttgcttgtt

SEQ ID NO: 31102 - DNA, 26 bp, Artificial sequence
  SiRNA target sequence
tttttcaatattttttttgcttgttc

SEQ ID NO: 31103 - DNA, 26 bp, Artificial sequence
  SiRNA target sequence
ttttcaatattttttttgcttgttct

SEQ ID NO: 31104 - DNA, 26 bp, Artificial sequence
  SiRNA target sequence
tttcaatattttttttgcttgttcta

SEQ ID NO: 31105 - DNA, 26 bp, Artificial sequence
  SiRNA target sequence
ttcaatattttttttgcttgttctaa

SEQ ID NO: 31106 - DNA, 26 bp, Artificial sequence
  SiRNA target sequence
tcaatattttttttgcttgttctaag

SEQ ID NO: 31107 - DNA, 26 bp, Artificial sequence
  SiRNA target sequence
caatattttttttgcttgttctaagt

SEQ ID NO: 31108 - DNA, 26 bp, Artificial sequence
  SiRNA target sequence
aatattttttttgcttgttctaagtc

SEQ ID NO: 31109 - DNA, 26 bp, Artificial sequence
  SiRNA target sequence
atattttttttgcttgttctaagtca

SEQ ID NO: 31110 - DNA, 26 bp, Artificial sequence
  SiRNA target sequence
tattttttttgcttgttctaagtcat

SEQ ID NO: 31111 - DNA, 26 bp, Artificial sequence
  SiRNA target sequence
attttttttgcttgttctaagtcata

SEQ ID NO: 31112 - DNA, 26 bp, Artificial sequence
  SiRNA target sequence
ttttttttgcttgttctaagtcataa

SEQ ID NO: 31113 - DNA, 26 bp, Artificial sequence
  SiRNA target sequence
tttttttgcttgttctaagtcataaa

SEQ ID NO: 31114 - DNA, 26 bp, Artificial sequence
  SiRNA target sequence
ttttttgcttgttctaagtcataaat

SEQ ID NO: 31115 - DNA, 26 bp, Artificial sequence
  SiRNA target sequence
tttttgcttgttctaagtcataaatt

SEQ ID NO: 31116 - DNA, 26 bp, Artificial sequence
  SiRNA target sequence
ttttgcttgttctaagtcataaattt

SEQ ID NO: 31117 - DNA, 26 bp, Artificial sequence
  SiRNA target sequence
tttgcttgttctaagtcataaatttt

SEQ ID NO: 31118 - DNA, 26 bp, Artificial sequence
  SiRNA target sequence
ttgcttgttctaagtcataaattttt

SEQ ID NO: 31119 - DNA, 26 bp, Artificial sequence
  SiRNA target sequence
tgcttgttctaagtcataaatttttt

SEQ ID NO: 31120 - DNA, 26 bp, Artificial sequence
  SiRNA target sequence
gcttgttctaagtcataaattttttt

SEQ ID NO: 31121 - DNA, 26 bp, Artificial sequence
  SiRNA target sequence
cttgttctaagtcataaattttttta

SEQ ID NO: 31122 - DNA, 26 bp, Artificial sequence
  SiRNA target sequence
ttgttctaagtcataaatttttttag

SEQ ID NO: 31123 - DNA, 26 bp, Artificial sequence
  SiRNA target sequence
tgttctaagtcataaatttttttagt

SEQ ID NO: 31124 - DNA, 26 bp, Artificial sequence
  SiRNA target sequence
gttctaagtcataaatttttttagtc

SEQ ID NO: 31125 - DNA, 26 bp, Artificial sequence
  SiRNA target sequence
ttctaagtcataaatttttttagtca

SEQ ID NO: 31126 - DNA, 26 bp, Artificial sequence
  SiRNA target sequence
tctaagtcataaatttttttagtcaa

SEQ ID NO: 31127 - DNA, 26 bp, Artificial sequence
  SiRNA target sequence
ctaagtcataaatttttttagtcaaa

SEQ ID NO: 31128 - DNA, 26 bp, Artificial sequence
  SiRNA target sequence
taagtcataaatttttttagtcaaat

SEQ ID NO: 31129 - DNA, 26 bp, Artificial sequence
  SiRNA target sequence
aagtcataaatttttttagtcaaata

SEQ ID NO: 31130 - DNA, 26 bp, Artificial sequence
  SiRNA target sequence
agtcataaatttttttagtcaaatat

SEQ ID NO: 31131 - DNA, 26 bp, Artificial sequence
  SiRNA target sequence
gtcataaatttttttagtcaaatatg

SEQ ID NO: 31132 - DNA, 26 bp, Artificial sequence
  SiRNA target sequence
tcataaatttttttagtcaaatatga

SEQ ID NO: 31133 - DNA, 26 bp, Artificial sequence
  SiRNA target sequence
cataaatttttttagtcaaatatgac

SEQ ID NO: 31134 - DNA, 26 bp, Artificial sequence
  SiRNA target sequence
ataaatttttttagtcaaatatgact

SEQ ID NO: 31135 - DNA, 26 bp, Artificial sequence
  SiRNA target sequence
taaatttttttagtcaaatatgactt

SEQ ID NO: 31136 - DNA, 26 bp, Artificial sequence
  SiRNA target sequence
aaatttttttagtcaaatatgacttt

SEQ ID NO: 31137 - DNA, 26 bp, Artificial sequence
  SiRNA target sequence
aatttttttagtcaaatatgacttta

SEQ ID NO: 31138 - DNA, 26 bp, Artificial sequence
  SiRNA target sequence
atttttttagtcaaatatgactttaa

SEQ ID NO: 31139 - DNA, 26 bp, Artificial sequence
  SiRNA target sequence
tttttttagtcaaatatgactttaaa

SEQ ID NO: 31140 - DNA, 26 bp, Artificial sequence
  SiRNA target sequence
ttttttagtcaaatatgactttaaaa

SEQ ID NO: 31141 - DNA, 26 bp, Artificial sequence
  SiRNA target sequence
tttttagtcaaatatgactttaaaat

SEQ ID NO: 31142 - DNA, 26 bp, Artificial sequence
  SiRNA target sequence
ttttagtcaaatatgactttaaaatc

SEQ ID NO: 31143 - DNA, 26 bp, Artificial sequence
  SiRNA target sequence
tttagtcaaatatgactttaaaatct

SEQ ID NO: 31144 - DNA, 26 bp, Artificial sequence
  SiRNA target sequence
ttagtcaaatatgactttaaaatctc

SEQ ID NO: 31145 - DNA, 26 bp, Artificial sequence
  SiRNA target sequence
tagtcaaatatgactttaaaatctct

SEQ ID NO: 31146 - DNA, 26 bp, Artificial sequence
  SiRNA target sequence
agtcaaatatgactttaaaatctctt

SEQ ID NO: 31147 - DNA, 26 bp, Artificial sequence
  SiRNA target sequence
gtcaaatatgactttaaaatctcttt

SEQ ID NO: 31148 - DNA, 26 bp, Artificial sequence
  SiRNA target sequence
tcaaatatgactttaaaatctctttt

SEQ ID NO: 31149 - DNA, 26 bp, Artificial sequence
  SiRNA target sequence
caaatatgactttaaaatctcttttg

SEQ ID NO: 31150 - DNA, 26 bp, Artificial sequence
  SiRNA target sequence
aaatatgactttaaaatctcttttgt

SEQ ID NO: 31151 - DNA, 26 bp, Artificial sequence
  SiRNA target sequence
aatatgactttaaaatctcttttgtt

SEQ ID NO: 31152 - DNA, 26 bp, Artificial sequence
  SiRNA target sequence
atatgactttaaaatctcttttgttt

SEQ ID NO: 31153 - DNA, 26 bp, Artificial sequence
  SiRNA target sequence
tatgactttaaaatctcttttgtttc

SEQ ID NO: 31154 - DNA, 26 bp, Artificial sequence
  SiRNA target sequence
atgactttaaaatctcttttgtttca

SEQ ID NO: 31155 - DNA, 26 bp, Artificial sequence
  SiRNA target sequence
tgactttaaaatctcttttgtttcat

SEQ ID NO: 31156 - DNA, 26 bp, Artificial sequence
  SiRNA target sequence
gactttaaaatctcttttgtttcatc

SEQ ID NO: 31157 - DNA, 26 bp, Artificial sequence
  SiRNA target sequence
actttaaaatctcttttgtttcatct

SEQ ID NO: 31158 - DNA, 26 bp, Artificial sequence
  SiRNA target sequence
ctttaaaatctcttttgtttcatctg

SEQ ID NO: 31159 - DNA, 26 bp, Artificial sequence
  SiRNA target sequence
tttaaaatctcttttgtttcatctgt

SEQ ID NO: 31160 - DNA, 26 bp, Artificial sequence
  SiRNA target sequence
ttaaaatctcttttgtttcatctgtt

SEQ ID NO: 31161 - DNA, 26 bp, Artificial sequence
  SiRNA target sequence
taaaatctcttttgtttcatctgtta

SEQ ID NO: 31162 - DNA, 26 bp, Artificial sequence
  SiRNA target sequence
aaaatctcttttgtttcatctgttac

SEQ ID NO: 31163 - DNA, 26 bp, Artificial sequence
  SiRNA target sequence
aaatctcttttgtttcatctgttact

SEQ ID NO: 31164 - DNA, 26 bp, Artificial sequence
  SiRNA target sequence
aatctcttttgtttcatctgttactt

SEQ ID NO: 31165 - DNA, 26 bp, Artificial sequence
  SiRNA target sequence
atctcttttgtttcatctgttacttg

SEQ ID NO: 31166 - DNA, 26 bp, Artificial sequence
  SiRNA target sequence
tctcttttgtttcatctgttacttgt

SEQ ID NO: 31167 - DNA, 26 bp, Artificial sequence
  SiRNA target sequence
ctcttttgtttcatctgttacttgtt

SEQ ID NO: 31168 - DNA, 26 bp, Artificial sequence
  SiRNA target sequence
tcttttgtttcatctgttacttgttt

SEQ ID NO: 31169 - DNA, 26 bp, Artificial sequence
  SiRNA target sequence
cttttgtttcatctgttacttgtttg

SEQ ID NO: 31170 - DNA, 26 bp, Artificial sequence
  SiRNA target sequence
ttttgtttcatctgttacttgtttgt

SEQ ID NO: 31171 - DNA, 26 bp, Artificial sequence
  SiRNA target sequence
tttgtttcatctgttacttgtttgta

SEQ ID NO: 31172 - DNA, 26 bp, Artificial sequence
  SiRNA target sequence
ttgtttcatctgttacttgtttgtac

SEQ ID NO: 31173 - DNA, 26 bp, Artificial sequence
  SiRNA target sequence
tgtttcatctgttacttgtttgtact

SEQ ID NO: 31174 - DNA, 26 bp, Artificial sequence
  SiRNA target sequence
gtttcatctgttacttgtttgtactt

SEQ ID NO: 31175 - DNA, 26 bp, Artificial sequence
  SiRNA target sequence
tttcatctgttacttgtttgtacttt

SEQ ID NO: 31176 - DNA, 26 bp, Artificial sequence
  SiRNA target sequence
ttcatctgttacttgtttgtacttta

SEQ ID NO: 31177 - DNA, 26 bp, Artificial sequence
  SiRNA target sequence
tcatctgttacttgtttgtactttaa

SEQ ID NO: 31178 - DNA, 26 bp, Artificial sequence
  SiRNA target sequence
catctgttacttgtttgtactttaaa

SEQ ID NO: 31179 - DNA, 26 bp, Artificial sequence
  SiRNA target sequence
atctgttacttgtttgtactttaaaa

SEQ ID NO: 31180 - DNA, 26 bp, Artificial sequence
  SiRNA target sequence
tctgttacttgtttgtactttaaaaa

SEQ ID NO: 31181 - DNA, 26 bp, Artificial sequence
  SiRNA target sequence
ctgttacttgtttgtactttaaaaat

SEQ ID NO: 31182 - DNA, 26 bp, Artificial sequence
  SiRNA target sequence
tgttacttgtttgtactttaaaaatt

SEQ ID NO: 31183 - DNA, 26 bp, Artificial sequence
  SiRNA target sequence
gttacttgtttgtactttaaaaattg

SEQ ID NO: 31184 - DNA, 26 bp, Artificial sequence
  SiRNA target sequence
ttacttgtttgtactttaaaaattgt

SEQ ID NO: 31185 - DNA, 26 bp, Artificial sequence
  SiRNA target sequence
tacttgtttgtactttaaaaattgtt

SEQ ID NO: 31186 - DNA, 26 bp, Artificial sequence
  SiRNA target sequence
acttgtttgtactttaaaaattgttg

SEQ ID NO: 31187 - DNA, 26 bp, Artificial sequence
  SiRNA target sequence
cttgtttgtactttaaaaattgttga

SEQ ID NO: 31188 - DNA, 26 bp, Artificial sequence
  SiRNA target sequence
ttgtttgtactttaaaaattgttgaa

SEQ ID NO: 31189 - DNA, 26 bp, Artificial sequence
  SiRNA target sequence
tgtttgtactttaaaaattgttgaat

SEQ ID NO: 31190 - DNA, 26 bp, Artificial sequence
  SiRNA target sequence
gtttgtactttaaaaattgttgaatt

SEQ ID NO: 31191 - DNA, 26 bp, Artificial sequence
  SiRNA target sequence
tttgtactttaaaaattgttgaattt

SEQ ID NO: 31192 - DNA, 26 bp, Artificial sequence
  SiRNA target sequence
ttgtactttaaaaattgttgaatttc

SEQ ID NO: 31193 - DNA, 26 bp, Artificial sequence
  SiRNA target sequence
tgtactttaaaaattgttgaatttca

SEQ ID NO: 31194 - DNA, 26 bp, Artificial sequence
  SiRNA target sequence
gtactttaaaaattgttgaatttcaa

SEQ ID NO: 31195 - DNA, 26 bp, Artificial sequence
  SiRNA target sequence
tactttaaaaattgttgaatttcaat

SEQ ID NO: 31196 - DNA, 26 bp, Artificial sequence
  SiRNA target sequence
actttaaaaattgttgaatttcaatt

SEQ ID NO: 31197 - DNA, 26 bp, Artificial sequence
  SiRNA target sequence
ctttaaaaattgttgaatttcaattt

SEQ ID NO: 31198 - DNA, 26 bp, Artificial sequence
  SiRNA target sequence
tttaaaaattgttgaatttcaatttt

SEQ ID NO: 31199 - DNA, 26 bp, Artificial sequence
  SiRNA target sequence
ttaaaaattgttgaatttcaatttta

SEQ ID NO: 31200 - DNA, 26 bp, Artificial sequence
  SiRNA target sequence
taaaaattgttgaatttcaattttaa

SEQ ID NO: 31201 - DNA, 26 bp, Artificial sequence
  SiRNA target sequence
aaaaattgttgaatttcaattttaaa

SEQ ID NO: 31202 - DNA, 26 bp, Artificial sequence
  SiRNA target sequence
aaaattgttgaatttcaattttaaat

SEQ ID NO: 31203 - DNA, 26 bp, Artificial sequence
  SiRNA target sequence
aaattgttgaatttcaattttaaatt

SEQ ID NO: 31204 - DNA, 26 bp, Artificial sequence
  SiRNA target sequence
aattgttgaatttcaattttaaattc

SEQ ID NO: 31205 - DNA, 26 bp, Artificial sequence
  SiRNA target sequence
attgttgaatttcaattttaaattcg

SEQ ID NO: 31206 - DNA, 26 bp, Artificial sequence
  SiRNA target sequence
ttgttgaatttcaattttaaattcgg

SEQ ID NO: 31207 - DNA, 26 bp, Artificial sequence
  SiRNA target sequence
tgttgaatttcaattttaaattcggc

SEQ ID NO: 31208 - DNA, 26 bp, Artificial sequence
  SiRNA target sequence
gttgaatttcaattttaaattcggca

SEQ ID NO: 31209 - DNA, 26 bp, Artificial sequence
  SiRNA target sequence
ttgaatttcaattttaaattcggcac

SEQ ID NO: 31210 - DNA, 26 bp, Artificial sequence
  SiRNA target sequence
tgaatttcaattttaaattcggcaca

SEQ ID NO: 31211 - DNA, 26 bp, Artificial sequence
  SiRNA target sequence
gaatttcaattttaaattcggcacaa

SEQ ID NO: 31212 - DNA, 26 bp, Artificial sequence
  SiRNA target sequence
aatttcaattttaaattcggcacaat

SEQ ID NO: 31213 - DNA, 26 bp, Artificial sequence
  SiRNA target sequence
atttcaattttaaattcggcacaatt

SEQ ID NO: 31214 - DNA, 26 bp, Artificial sequence
  SiRNA target sequence
tttcaattttaaattcggcacaattt

SEQ ID NO: 31215 - DNA, 26 bp, Artificial sequence
  SiRNA target sequence
ttcaattttaaattcggcacaatttt

SEQ ID NO: 31216 - DNA, 26 bp, Artificial sequence
  SiRNA target sequence
tcaattttaaattcggcacaattttt

SEQ ID NO: 31217 - DNA, 26 bp, Artificial sequence
  SiRNA target sequence
caattttaaattcggcacaatttttt

SEQ ID NO: 31218 - DNA, 26 bp, Artificial sequence
  SiRNA target sequence
aattttaaattcggcacaattttttt

SEQ ID NO: 31219 - DNA, 26 bp, Artificial sequence
  SiRNA target sequence
attttaaattcggcacaatttttttc

SEQ ID NO: 31220 - DNA, 26 bp, Artificial sequence
  SiRNA target sequence
ttttaaattcggcacaatttttttca

SEQ ID NO: 31221 - DNA, 26 bp, Artificial sequence
  SiRNA target sequence
tttaaattcggcacaatttttttcaa

SEQ ID NO: 31222 - DNA, 26 bp, Artificial sequence
  SiRNA target sequence
ttaaattcggcacaatttttttcaat

SEQ ID NO: 31223 - DNA, 26 bp, Artificial sequence
  SiRNA target sequence
taaattcggcacaatttttttcaatt

SEQ ID NO: 31224 - DNA, 26 bp, Artificial sequence
  SiRNA target sequence
aaattcggcacaatttttttcaattt

SEQ ID NO: 31225 - DNA, 26 bp, Artificial sequence
  SiRNA target sequence
aattcggcacaatttttttcaatttc

SEQ ID NO: 31226 - DNA, 26 bp, Artificial sequence
  SiRNA target sequence
attcggcacaatttttttcaatttca

SEQ ID NO: 31227 - DNA, 26 bp, Artificial sequence
  SiRNA target sequence
ttcggcacaatttttttcaatttcat

SEQ ID NO: 31228 - DNA, 26 bp, Artificial sequence
  SiRNA target sequence
tcggcacaatttttttcaatttcatc

SEQ ID NO: 31229 - DNA, 26 bp, Artificial sequence
  SiRNA target sequence
cggcacaatttttttcaatttcatct

SEQ ID NO: 31230 - DNA, 26 bp, Artificial sequence
  SiRNA target sequence
ggcacaatttttttcaatttcatctt

SEQ ID NO: 31231 - DNA, 26 bp, Artificial sequence
  SiRNA target sequence
gcacaatttttttcaatttcatcttt

SEQ ID NO: 31232 - DNA, 26 bp, Artificial sequence
  SiRNA target sequence
cacaatttttttcaatttcatctttt

SEQ ID NO: 31233 - DNA, 26 bp, Artificial sequence
  SiRNA target sequence
acaatttttttcaatttcatcttttt

SEQ ID NO: 31234 - DNA, 26 bp, Artificial sequence
  SiRNA target sequence
caatttttttcaatttcatctttttt

SEQ ID NO: 31235 - DNA, 26 bp, Artificial sequence
  SiRNA target sequence
aatttttttcaatttcatcttttttc

SEQ ID NO: 31236 - DNA, 26 bp, Artificial sequence
  SiRNA target sequence
atttttttcaatttcatcttttttcg

SEQ ID NO: 31237 - DNA, 26 bp, Artificial sequence
  SiRNA target sequence
tttttttcaatttcatcttttttcga

SEQ ID NO: 31238 - DNA, 26 bp, Artificial sequence
  SiRNA target sequence
ttttttcaatttcatcttttttcgaa

SEQ ID NO: 31239 - DNA, 26 bp, Artificial sequence
  SiRNA target sequence
tttttcaatttcatcttttttcgaat

SEQ ID NO: 31240 - DNA, 26 bp, Artificial sequence
  SiRNA target sequence
ttttcaatttcatcttttttcgaatt

SEQ ID NO: 31241 - DNA, 26 bp, Artificial sequence
  SiRNA target sequence
tttcaatttcatcttttttcgaattt

SEQ ID NO: 31242 - DNA, 26 bp, Artificial sequence
  SiRNA target sequence
ttcaatttcatcttttttcgaatttt

SEQ ID NO: 31243 - DNA, 26 bp, Artificial sequence
  SiRNA target sequence
tcaatttcatcttttttcgaattttc

SEQ ID NO: 31244 - DNA, 26 bp, Artificial sequence
  SiRNA target sequence
caatttcatcttttttcgaattttct

SEQ ID NO: 31245 - DNA, 26 bp, Artificial sequence
  SiRNA target sequence
aatttcatcttttttcgaattttctt

SEQ ID NO: 31246 - DNA, 26 bp, Artificial sequence
  SiRNA target sequence
atttcatcttttttcgaattttcttc

SEQ ID NO: 31247 - DNA, 26 bp, Artificial sequence
  SiRNA target sequence
tttcatcttttttcgaattttcttcg

SEQ ID NO: 31248 - DNA, 26 bp, Artificial sequence
  SiRNA target sequence
ttcatcttttttcgaattttcttcgg

SEQ ID NO: 31249 - DNA, 26 bp, Artificial sequence
  SiRNA target sequence
tcatcttttttcgaattttcttcggc

SEQ ID NO: 31250 - DNA, 26 bp, Artificial sequence
  SiRNA target sequence
catcttttttcgaattttcttcggct

SEQ ID NO: 31251 - DNA, 26 bp, Artificial sequence
  SiRNA target sequence
atcttttttcgaattttcttcggctt

SEQ ID NO: 31252 - DNA, 26 bp, Artificial sequence
  SiRNA target sequence
tcttttttcgaattttcttcggcttc

SEQ ID NO: 31253 - DNA, 26 bp, Artificial sequence
  SiRNA target sequence
cttttttcgaattttcttcggcttct

SEQ ID NO: 31254 - DNA, 26 bp, Artificial sequence
  SiRNA target sequence
ttttttcgaattttcttcggcttctc

SEQ ID NO: 31255 - DNA, 26 bp, Artificial sequence
  SiRNA target sequence
tttttcgaattttcttcggcttctcg

SEQ ID NO: 31256 - DNA, 26 bp, Artificial sequence
  SiRNA target sequence
ttttcgaattttcttcggcttctcgt

SEQ ID NO: 31257 - DNA, 26 bp, Artificial sequence
  SiRNA target sequence
tttcgaattttcttcggcttctcgta

SEQ ID NO: 31258 - DNA, 26 bp, Artificial sequence
  SiRNA target sequence
ttcgaattttcttcggcttctcgtat

SEQ ID NO: 31259 - DNA, 26 bp, Artificial sequence
  SiRNA target sequence
tcgaattttcttcggcttctcgtatc

SEQ ID NO: 31260 - DNA, 26 bp, Artificial sequence
  SiRNA target sequence
cgaattttcttcggcttctcgtatca

SEQ ID NO: 31261 - DNA, 26 bp, Artificial sequence
  SiRNA target sequence
gaattttcttcggcttctcgtatcat

SEQ ID NO: 31262 - DNA, 26 bp, Artificial sequence
  SiRNA target sequence
aattttcttcggcttctcgtatcatt

SEQ ID NO: 31263 - DNA, 26 bp, Artificial sequence
  SiRNA target sequence
attttcttcggcttctcgtatcattt

SEQ ID NO: 31264 - DNA, 26 bp, Artificial sequence
  SiRNA target sequence
ttttcttcggcttctcgtatcatttg

SEQ ID NO: 31265 - DNA, 26 bp, Artificial sequence
  SiRNA target sequence
tttcttcggcttctcgtatcatttgc

SEQ ID NO: 31266 - DNA, 26 bp, Artificial sequence
  SiRNA target sequence
ttcttcggcttctcgtatcatttgcg

SEQ ID NO: 31267 - DNA, 26 bp, Artificial sequence
  SiRNA target sequence
tcttcggcttctcgtatcatttgcga

SEQ ID NO: 31268 - DNA, 26 bp, Artificial sequence
  SiRNA target sequence
cttcggcttctcgtatcatttgcgaa

SEQ ID NO: 31269 - DNA, 26 bp, Artificial sequence
  SiRNA target sequence
ttcggcttctcgtatcatttgcgaaa

SEQ ID NO: 31270 - DNA, 26 bp, Artificial sequence
  SiRNA target sequence
tcggcttctcgtatcatttgcgaaat

SEQ ID NO: 31271 - DNA, 26 bp, Artificial sequence
  SiRNA target sequence
cggcttctcgtatcatttgcgaaatt

SEQ ID NO: 31272 - DNA, 26 bp, Artificial sequence
  SiRNA target sequence
ggcttctcgtatcatttgcgaaattt

SEQ ID NO: 31273 - DNA, 26 bp, Artificial sequence
  SiRNA target sequence
gcttctcgtatcatttgcgaaatttc

SEQ ID NO: 31274 - DNA, 26 bp, Artificial sequence
  SiRNA target sequence
cttctcgtatcatttgcgaaatttca

SEQ ID NO: 31275 - DNA, 26 bp, Artificial sequence
  SiRNA target sequence
ttctcgtatcatttgcgaaatttcac

SEQ ID NO: 31276 - DNA, 26 bp, Artificial sequence
  SiRNA target sequence
tctcgtatcatttgcgaaatttcacc

SEQ ID NO: 31277 - DNA, 26 bp, Artificial sequence
  SiRNA target sequence
ctcgtatcatttgcgaaatttcacct

SEQ ID NO: 31278 - DNA, 26 bp, Artificial sequence
  SiRNA target sequence
tcgtatcatttgcgaaatttcacctt

SEQ ID NO: 31279 - DNA, 26 bp, Artificial sequence
  SiRNA target sequence
cgtatcatttgcgaaatttcaccttc

SEQ ID NO: 31280 - DNA, 26 bp, Artificial sequence
  SiRNA target sequence
gtatcatttgcgaaatttcaccttca

SEQ ID NO: 31281 - DNA, 26 bp, Artificial sequence
  SiRNA target sequence
tatcatttgcgaaatttcaccttcat

SEQ ID NO: 31282 - DNA, 26 bp, Artificial sequence
  SiRNA target sequence
atcatttgcgaaatttcaccttcatt

SEQ ID NO: 31283 - DNA, 26 bp, Artificial sequence
  SiRNA target sequence
tcatttgcgaaatttcaccttcattt

SEQ ID NO: 31284 - DNA, 26 bp, Artificial sequence
  SiRNA target sequence
catttgcgaaatttcaccttcattta

SEQ ID NO: 31285 - DNA, 26 bp, Artificial sequence
  SiRNA target sequence
atttgcgaaatttcaccttcatttaa

SEQ ID NO: 31286 - DNA, 26 bp, Artificial sequence
  SiRNA target sequence
tttgcgaaatttcaccttcatttaat

SEQ ID NO: 31287 - DNA, 26 bp, Artificial sequence
  SiRNA target sequence
ttgcgaaatttcaccttcatttaatc

SEQ ID NO: 31288 - DNA, 26 bp, Artificial sequence
  SiRNA target sequence
tgcgaaatttcaccttcatttaatcc

SEQ ID NO: 31289 - DNA, 26 bp, Artificial sequence
  SiRNA target sequence
gcgaaatttcaccttcatttaatcca

SEQ ID NO: 31290 - DNA, 26 bp, Artificial sequence
  SiRNA target sequence
cgaaatttcaccttcatttaatccac

SEQ ID NO: 31291 - DNA, 26 bp, Artificial sequence
  SiRNA target sequence
gaaatttcaccttcatttaatccact

SEQ ID NO: 31292 - DNA, 26 bp, Artificial sequence
  SiRNA target sequence
aaatttcaccttcatttaatccactt

SEQ ID NO: 31293 - DNA, 26 bp, Artificial sequence
  SiRNA target sequence
aatttcaccttcatttaatccacttg

SEQ ID NO: 31294 - DNA, 26 bp, Artificial sequence
  SiRNA target sequence
atttcaccttcatttaatccacttga

SEQ ID NO: 31295 - DNA, 26 bp, Artificial sequence
  SiRNA target sequence
tttcaccttcatttaatccacttgaa

SEQ ID NO: 31296 - DNA, 26 bp, Artificial sequence
  SiRNA target sequence
ttcaccttcatttaatccacttgaag

SEQ ID NO: 31297 - DNA, 26 bp, Artificial sequence
  SiRNA target sequence
tcaccttcatttaatccacttgaagg

SEQ ID NO: 31298 - DNA, 26 bp, Artificial sequence
  SiRNA target sequence
caccttcatttaatccacttgaaggc

SEQ ID NO: 31299 - DNA, 26 bp, Artificial sequence
  SiRNA target sequence
accttcatttaatccacttgaaggca

SEQ ID NO: 31300 - DNA, 26 bp, Artificial sequence
  SiRNA target sequence
ccttcatttaatccacttgaaggcac

SEQ ID NO: 31301 - DNA, 26 bp, Artificial sequence
  SiRNA target sequence
cttcatttaatccacttgaaggcaca

SEQ ID NO: 31302 - DNA, 26 bp, Artificial sequence
  SiRNA target sequence
ttcatttaatccacttgaaggcacaa

SEQ ID NO: 31303 - DNA, 26 bp, Artificial sequence
  SiRNA target sequence
tcatttaatccacttgaaggcacaat

SEQ ID NO: 31304 - DNA, 26 bp, Artificial sequence
  SiRNA target sequence
catttaatccacttgaaggcacaatt

SEQ ID NO: 31305 - DNA, 26 bp, Artificial sequence
  SiRNA target sequence
atttaatccacttgaaggcacaattt

SEQ ID NO: 31306 - DNA, 26 bp, Artificial sequence
  SiRNA target sequence
tttaatccacttgaaggcacaatttc

SEQ ID NO: 31307 - DNA, 26 bp, Artificial sequence
  SiRNA target sequence
ttaatccacttgaaggcacaatttcg

SEQ ID NO: 31308 - DNA, 26 bp, Artificial sequence
  SiRNA target sequence
taatccacttgaaggcacaatttcga

SEQ ID NO: 31309 - DNA, 26 bp, Artificial sequence
  SiRNA target sequence
aatccacttgaaggcacaatttcgat

SEQ ID NO: 31310 - DNA, 26 bp, Artificial sequence
  SiRNA target sequence
atccacttgaaggcacaatttcgatt

SEQ ID NO: 31311 - DNA, 26 bp, Artificial sequence
  SiRNA target sequence
tccacttgaaggcacaatttcgattt

SEQ ID NO: 31312 - DNA, 26 bp, Artificial sequence
  SiRNA target sequence
ccacttgaaggcacaatttcgatttc

SEQ ID NO: 31313 - DNA, 26 bp, Artificial sequence
  SiRNA target sequence
cacttgaaggcacaatttcgatttct

SEQ ID NO: 31314 - DNA, 26 bp, Artificial sequence
  SiRNA target sequence
acttgaaggcacaatttcgatttctt

SEQ ID NO: 31315 - DNA, 26 bp, Artificial sequence
  SiRNA target sequence
cttgaaggcacaatttcgatttcttg

SEQ ID NO: 31316 - DNA, 26 bp, Artificial sequence
  SiRNA target sequence
ttgaaggcacaatttcgatttcttgc

SEQ ID NO: 31317 - DNA, 26 bp, Artificial sequence
  SiRNA target sequence
tgaaggcacaatttcgatttcttgct

SEQ ID NO: 31318 - DNA, 26 bp, Artificial sequence
  SiRNA target sequence
gaaggcacaatttcgatttcttgctt

SEQ ID NO: 31319 - DNA, 26 bp, Artificial sequence
  SiRNA target sequence
aaggcacaatttcgatttcttgcttt

SEQ ID NO: 31320 - DNA, 26 bp, Artificial sequence
  SiRNA target sequence
aggcacaatttcgatttcttgctttt

SEQ ID NO: 31321 - DNA, 26 bp, Artificial sequence
  SiRNA target sequence
ggcacaatttcgatttcttgcttttt

SEQ ID NO: 31322 - DNA, 26 bp, Artificial sequence
  SiRNA target sequence
gcacaatttcgatttcttgctttttt

SEQ ID NO: 31323 - DNA, 26 bp, Artificial sequence
  SiRNA target sequence
cacaatttcgatttcttgcttttttt

SEQ ID NO: 31324 - DNA, 26 bp, Artificial sequence
  SiRNA target sequence
acaatttcgatttcttgctttttttt

SEQ ID NO: 31325 - DNA, 26 bp, Artificial sequence
  SiRNA target sequence
caatttcgatttcttgcttttttttc

SEQ ID NO: 31326 - DNA, 26 bp, Artificial sequence
  SiRNA target sequence
aatttcgatttcttgcttttttttcg

SEQ ID NO: 31327 - DNA, 26 bp, Artificial sequence
  SiRNA target sequence
atttcgatttcttgcttttttttcgt

SEQ ID NO: 31328 - DNA, 26 bp, Artificial sequence
  SiRNA target sequence
tttcgatttcttgcttttttttcgtt

SEQ ID NO: 31329 - DNA, 26 bp, Artificial sequence
  SiRNA target sequence
ttcgatttcttgcttttttttcgtta

SEQ ID NO: 31330 - DNA, 26 bp, Artificial sequence
  SiRNA target sequence
tcgatttcttgcttttttttcgttat

SEQ ID NO: 31331 - DNA, 26 bp, Artificial sequence
  SiRNA target sequence
cgatttcttgcttttttttcgttatc

SEQ ID NO: 31332 - DNA, 26 bp, Artificial sequence
  SiRNA target sequence
gatttcttgcttttttttcgttatcc

SEQ ID NO: 31333 - DNA, 26 bp, Artificial sequence
  SiRNA target sequence
atttcttgcttttttttcgttatccc

SEQ ID NO: 31334 - DNA, 26 bp, Artificial sequence
  SiRNA target sequence
tttcttgcttttttttcgttatcccg

SEQ ID NO: 31335 - DNA, 26 bp, Artificial sequence
  SiRNA target sequence
ttcttgcttttttttcgttatcccgt

SEQ ID NO: 31336 - DNA, 26 bp, Artificial sequence
  SiRNA target sequence
tcttgcttttttttcgttatcccgtc

SEQ ID NO: 31337 - DNA, 26 bp, Artificial sequence
  SiRNA target sequence
cttgcttttttttcgttatcccgtct

SEQ ID NO: 31338 - DNA, 26 bp, Artificial sequence
  SiRNA target sequence
ttgcttttttttcgttatcccgtctt

SEQ ID NO: 31339 - DNA, 26 bp, Artificial sequence
  SiRNA target sequence
tgcttttttttcgttatcccgtcttg

SEQ ID NO: 31340 - DNA, 26 bp, Artificial sequence
  SiRNA target sequence
gcttttttttcgttatcccgtcttgc

SEQ ID NO: 31341 - DNA, 26 bp, Artificial sequence
  SiRNA target sequence
cttttttttcgttatcccgtcttgcg

SEQ ID NO: 31342 - DNA, 26 bp, Artificial sequence
  SiRNA target sequence
ttttttttcgttatcccgtcttgcgc

SEQ ID NO: 31343 - DNA, 26 bp, Artificial sequence
  SiRNA target sequence
tttttttcgttatcccgtcttgcgca

SEQ ID NO: 31344 - DNA, 26 bp, Artificial sequence
  SiRNA target sequence
ttttttcgttatcccgtcttgcgcag

SEQ ID NO: 31345 - DNA, 26 bp, Artificial sequence
  SiRNA target sequence
tttttcgttatcccgtcttgcgcaga

SEQ ID NO: 31346 - DNA, 26 bp, Artificial sequence
  SiRNA target sequence
ttttcgttatcccgtcttgcgcagat

SEQ ID NO: 31347 - DNA, 26 bp, Artificial sequence
  SiRNA target sequence
tttcgttatcccgtcttgcgcagata

SEQ ID NO: 31348 - DNA, 26 bp, Artificial sequence
  SiRNA target sequence
ttcgttatcccgtcttgcgcagatac

SEQ ID NO: 31349 - DNA, 26 bp, Artificial sequence
  SiRNA target sequence
tcgttatcccgtcttgcgcagatact

SEQ ID NO: 31350 - DNA, 26 bp, Artificial sequence
  SiRNA target sequence
cgttatcccgtcttgcgcagatactt

SEQ ID NO: 31351 - DNA, 26 bp, Artificial sequence
  SiRNA target sequence
gttatcccgtcttgcgcagatacttt

SEQ ID NO: 31352 - DNA, 26 bp, Artificial sequence
  SiRNA target sequence
ttatcccgtcttgcgcagatactttg

SEQ ID NO: 31353 - DNA, 26 bp, Artificial sequence
  SiRNA target sequence
tatcccgtcttgcgcagatactttgt

SEQ ID NO: 31354 - DNA, 26 bp, Artificial sequence
  SiRNA target sequence
atcccgtcttgcgcagatactttgta

SEQ ID NO: 31355 - DNA, 26 bp, Artificial sequence
  SiRNA target sequence
tcccgtcttgcgcagatactttgtat

SEQ ID NO: 31356 - DNA, 26 bp, Artificial sequence
  SiRNA target sequence
cccgtcttgcgcagatactttgtata

SEQ ID NO: 31357 - DNA, 26 bp, Artificial sequence
  SiRNA target sequence
ccgtcttgcgcagatactttgtatat

SEQ ID NO: 31358 - DNA, 26 bp, Artificial sequence
  SiRNA target sequence
cgtcttgcgcagatactttgtatatt

SEQ ID NO: 31359 - DNA, 26 bp, Artificial sequence
  SiRNA target sequence
gtcttgcgcagatactttgtatattc

SEQ ID NO: 31360 - DNA, 26 bp, Artificial sequence
  SiRNA target sequence
tcttgcgcagatactttgtatattcc

SEQ ID NO: 31361 - DNA, 26 bp, Artificial sequence
  SiRNA target sequence
cttgcgcagatactttgtatattccg

SEQ ID NO: 31362 - DNA, 26 bp, Artificial sequence
  SiRNA target sequence
ttgcgcagatactttgtatattccgt

SEQ ID NO: 31363 - DNA, 26 bp, Artificial sequence
  SiRNA target sequence
tgcgcagatactttgtatattccgtt

SEQ ID NO: 31364 - DNA, 26 bp, Artificial sequence
  SiRNA target sequence
gcgcagatactttgtatattccgtta

SEQ ID NO: 31365 - DNA, 26 bp, Artificial sequence
  SiRNA target sequence
cgcagatactttgtatattccgttag

SEQ ID NO: 31366 - DNA, 26 bp, Artificial sequence
  SiRNA target sequence
gcagatactttgtatattccgttagc

SEQ ID NO: 31367 - DNA, 26 bp, Artificial sequence
  SiRNA target sequence
cagatactttgtatattccgttagca

SEQ ID NO: 31368 - DNA, 26 bp, Artificial sequence
  SiRNA target sequence
agatactttgtatattccgttagcat

SEQ ID NO: 31369 - DNA, 26 bp, Artificial sequence
  SiRNA target sequence
gatactttgtatattccgttagcatc

SEQ ID NO: 31370 - DNA, 26 bp, Artificial sequence
  SiRNA target sequence
atactttgtatattccgttagcatcg

SEQ ID NO: 31371 - DNA, 26 bp, Artificial sequence
  SiRNA target sequence
tactttgtatattccgttagcatcgg

SEQ ID NO: 31372 - DNA, 26 bp, Artificial sequence
  SiRNA target sequence
actttgtatattccgttagcatcggc

SEQ ID NO: 31373 - DNA, 26 bp, Artificial sequence
  SiRNA target sequence
ctttgtatattccgttagcatcggct

SEQ ID NO: 31374 - DNA, 26 bp, Artificial sequence
  SiRNA target sequence
tttgtatattccgttagcatcggctt

SEQ ID NO: 31375 - DNA, 26 bp, Artificial sequence
  SiRNA target sequence
ttgtatattccgttagcatcggcttc

SEQ ID NO: 31376 - DNA, 26 bp, Artificial sequence
  SiRNA target sequence
tgtatattccgttagcatcggcttca

SEQ ID NO: 31377 - DNA, 26 bp, Artificial sequence
  SiRNA target sequence
gtatattccgttagcatcggcttcaa

SEQ ID NO: 31378 - DNA, 26 bp, Artificial sequence
  SiRNA target sequence
tatattccgttagcatcggcttcaaa

SEQ ID NO: 31379 - DNA, 26 bp, Artificial sequence
  SiRNA target sequence
atattccgttagcatcggcttcaaat

SEQ ID NO: 31380 - DNA, 26 bp, Artificial sequence
  SiRNA target sequence
tattccgttagcatcggcttcaaatg

SEQ ID NO: 31381 - DNA, 26 bp, Artificial sequence
  SiRNA target sequence
attccgttagcatcggcttcaaatgt

SEQ ID NO: 31382 - DNA, 26 bp, Artificial sequence
  SiRNA target sequence
ttccgttagcatcggcttcaaatgta

SEQ ID NO: 31383 - DNA, 26 bp, Artificial sequence
  SiRNA target sequence
tccgttagcatcggcttcaaatgtaa

SEQ ID NO: 31384 - DNA, 26 bp, Artificial sequence
  SiRNA target sequence
ccgttagcatcggcttcaaatgtaac

SEQ ID NO: 31385 - DNA, 26 bp, Artificial sequence
  SiRNA target sequence
cgttagcatcggcttcaaatgtaaca

SEQ ID NO: 31386 - DNA, 26 bp, Artificial sequence
  SiRNA target sequence
gttagcatcggcttcaaatgtaacat

SEQ ID NO: 31387 - DNA, 26 bp, Artificial sequence
  SiRNA target sequence
ttagcatcggcttcaaatgtaacatc

SEQ ID NO: 31388 - DNA, 26 bp, Artificial sequence
  SiRNA target sequence
tagcatcggcttcaaatgtaacatct

SEQ ID NO: 31389 - DNA, 26 bp, Artificial sequence
  SiRNA target sequence
agcatcggcttcaaatgtaacatcta

SEQ ID NO: 31390 - DNA, 26 bp, Artificial sequence
  SiRNA target sequence
gcatcggcttcaaatgtaacatctat

SEQ ID NO: 31391 - DNA, 26 bp, Artificial sequence
  SiRNA target sequence
catcggcttcaaatgtaacatctatc

SEQ ID NO: 31392 - DNA, 26 bp, Artificial sequence
  SiRNA target sequence
atcggcttcaaatgtaacatctatct

SEQ ID NO: 31393 - DNA, 26 bp, Artificial sequence
  SiRNA target sequence
tcggcttcaaatgtaacatctatctt

SEQ ID NO: 31394 - DNA, 26 bp, Artificial sequence
  SiRNA target sequence
cggcttcaaatgtaacatctatcttt

SEQ ID NO: 31395 - DNA, 26 bp, Artificial sequence
  SiRNA target sequence
ggcttcaaatgtaacatctatctttg

SEQ ID NO: 31396 - DNA, 26 bp, Artificial sequence
  SiRNA target sequence
gcttcaaatgtaacatctatctttgg

SEQ ID NO: 31397 - DNA, 26 bp, Artificial sequence
  SiRNA target sequence
cttcaaatgtaacatctatctttgga

SEQ ID NO: 31398 - DNA, 26 bp, Artificial sequence
  SiRNA target sequence
ttcaaatgtaacatctatctttggaa

SEQ ID NO: 31399 - DNA, 26 bp, Artificial sequence
  SiRNA target sequence
tcaaatgtaacatctatctttggaat

SEQ ID NO: 31400 - DNA, 26 bp, Artificial sequence
  SiRNA target sequence
caaatgtaacatctatctttggaata

SEQ ID NO: 31401 - DNA, 26 bp, Artificial sequence
  SiRNA target sequence
aaatgtaacatctatctttggaatac

SEQ ID NO: 31402 - DNA, 26 bp, Artificial sequence
  SiRNA target sequence
aatgtaacatctatctttggaatacc

SEQ ID NO: 31403 - DNA, 26 bp, Artificial sequence
  SiRNA target sequence
atgtaacatctatctttggaatacct

SEQ ID NO: 31404 - DNA, 26 bp, Artificial sequence
  SiRNA target sequence
tgtaacatctatctttggaatacctg

SEQ ID NO: 31405 - DNA, 26 bp, Artificial sequence
  SiRNA target sequence
gtaacatctatctttggaatacctgc

SEQ ID NO: 31406 - DNA, 26 bp, Artificial sequence
  SiRNA target sequence
taacatctatctttggaatacctgca

SEQ ID NO: 31407 - DNA, 26 bp, Artificial sequence
  SiRNA target sequence
aacatctatctttggaatacctgcag

SEQ ID NO: 31408 - DNA, 26 bp, Artificial sequence
  SiRNA target sequence
acatctatctttggaatacctgcagg

SEQ ID NO: 31409 - DNA, 26 bp, Artificial sequence
  SiRNA target sequence
catctatctttggaatacctgcaggt

SEQ ID NO: 31410 - DNA, 26 bp, Artificial sequence
  SiRNA target sequence
atctatctttggaatacctgcaggtg

SEQ ID NO: 31411 - DNA, 26 bp, Artificial sequence
  SiRNA target sequence
tctatctttggaatacctgcaggtgc

SEQ ID NO: 31412 - DNA, 26 bp, Artificial sequence
  SiRNA target sequence
ctatctttggaatacctgcaggtgct

SEQ ID NO: 31413 - DNA, 26 bp, Artificial sequence
  SiRNA target sequence
tatctttggaatacctgcaggtgctt

SEQ ID NO: 31414 - DNA, 26 bp, Artificial sequence
  SiRNA target sequence
atctttggaatacctgcaggtgcttt

SEQ ID NO: 31415 - DNA, 26 bp, Artificial sequence
  SiRNA target sequence
tctttggaatacctgcaggtgcttta

SEQ ID NO: 31416 - DNA, 26 bp, Artificial sequence
  SiRNA target sequence
ctttggaatacctgcaggtgctttag

SEQ ID NO: 31417 - DNA, 26 bp, Artificial sequence
  SiRNA target sequence
tttggaatacctgcaggtgctttagg

SEQ ID NO: 31418 - DNA, 26 bp, Artificial sequence
  SiRNA target sequence
ttggaatacctgcaggtgctttagga

SEQ ID NO: 31419 - DNA, 26 bp, Artificial sequence
  SiRNA target sequence
tggaatacctgcaggtgctttaggaa

SEQ ID NO: 31420 - DNA, 26 bp, Artificial sequence
  SiRNA target sequence
ggaatacctgcaggtgctttaggaat

SEQ ID NO: 31421 - DNA, 26 bp, Artificial sequence
  SiRNA target sequence
gaatacctgcaggtgctttaggaatg

SEQ ID NO: 31422 - DNA, 26 bp, Artificial sequence
  SiRNA target sequence
aatacctgcaggtgctttaggaatgt

SEQ ID NO: 31423 - DNA, 26 bp, Artificial sequence
  SiRNA target sequence
atacctgcaggtgctttaggaatgtt

SEQ ID NO: 31424 - DNA, 26 bp, Artificial sequence
  SiRNA target sequence
tacctgcaggtgctttaggaatgttt

SEQ ID NO: 31425 - DNA, 26 bp, Artificial sequence
  SiRNA target sequence
acctgcaggtgctttaggaatgtttt

SEQ ID NO: 31426 - DNA, 26 bp, Artificial sequence
  SiRNA target sequence
cctgcaggtgctttaggaatgttttt

SEQ ID NO: 31427 - DNA, 26 bp, Artificial sequence
  SiRNA target sequence
ctgcaggtgctttaggaatgtttttg

SEQ ID NO: 31428 - DNA, 26 bp, Artificial sequence
  SiRNA target sequence
tgcaggtgctttaggaatgtttttga

SEQ ID NO: 31429 - DNA, 26 bp, Artificial sequence
  SiRNA target sequence
gcaggtgctttaggaatgtttttgag

SEQ ID NO: 31430 - DNA, 26 bp, Artificial sequence
  SiRNA target sequence
caggtgctttaggaatgtttttgagc

SEQ ID NO: 31431 - DNA, 26 bp, Artificial sequence
  SiRNA target sequence
aggtgctttaggaatgtttttgagct

SEQ ID NO: 31432 - DNA, 26 bp, Artificial sequence
  SiRNA target sequence
ggtgctttaggaatgtttttgagctt

SEQ ID NO: 31433 - DNA, 26 bp, Artificial sequence
  SiRNA target sequence
gtgctttaggaatgtttttgagcttt

SEQ ID NO: 31434 - DNA, 26 bp, Artificial sequence
  SiRNA target sequence
tgctttaggaatgtttttgagcttta

SEQ ID NO: 31435 - DNA, 26 bp, Artificial sequence
  SiRNA target sequence
gctttaggaatgtttttgagctttat

SEQ ID NO: 31436 - DNA, 26 bp, Artificial sequence
  SiRNA target sequence
ctttaggaatgtttttgagctttata

SEQ ID NO: 31437 - DNA, 26 bp, Artificial sequence
  SiRNA target sequence
tttaggaatgtttttgagctttatag

SEQ ID NO: 31438 - DNA, 26 bp, Artificial sequence
  SiRNA target sequence
ttaggaatgtttttgagctttatagc

SEQ ID NO: 31439 - DNA, 26 bp, Artificial sequence
  SiRNA target sequence
taggaatgtttttgagctttatagct

SEQ ID NO: 31440 - DNA, 26 bp, Artificial sequence
  SiRNA target sequence
aggaatgtttttgagctttatagctc

SEQ ID NO: 31441 - DNA, 26 bp, Artificial sequence
  SiRNA target sequence
ggaatgtttttgagctttatagctcc

SEQ ID NO: 31442 - DNA, 26 bp, Artificial sequence
  SiRNA target sequence
gaatgtttttgagctttatagctcct

SEQ ID NO: 31443 - DNA, 26 bp, Artificial sequence
  SiRNA target sequence
aatgtttttgagctttatagctccta

SEQ ID NO: 31444 - DNA, 26 bp, Artificial sequence
  SiRNA target sequence
atgtttttgagctttatagctcctaa

SEQ ID NO: 31445 - DNA, 26 bp, Artificial sequence
  SiRNA target sequence
tgtttttgagctttatagctcctaaa

SEQ ID NO: 31446 - DNA, 26 bp, Artificial sequence
  SiRNA target sequence
gtttttgagctttatagctcctaaat

SEQ ID NO: 31447 - DNA, 26 bp, Artificial sequence
  SiRNA target sequence
tttttgagctttatagctcctaaata

SEQ ID NO: 31448 - DNA, 26 bp, Artificial sequence
  SiRNA target sequence
ttttgagctttatagctcctaaatat

SEQ ID NO: 31449 - DNA, 26 bp, Artificial sequence
  SiRNA target sequence
tttgagctttatagctcctaaatatt

SEQ ID NO: 31450 - DNA, 26 bp, Artificial sequence
  SiRNA target sequence
ttgagctttatagctcctaaatattt

SEQ ID NO: 31451 - DNA, 26 bp, Artificial sequence
  SiRNA target sequence
tgagctttatagctcctaaatattta

SEQ ID NO: 31452 - DNA, 26 bp, Artificial sequence
  SiRNA target sequence
gagctttatagctcctaaatatttat

SEQ ID NO: 31453 - DNA, 26 bp, Artificial sequence
  SiRNA target sequence
agctttatagctcctaaatatttatt

SEQ ID NO: 31454 - DNA, 26 bp, Artificial sequence
  SiRNA target sequence
gctttatagctcctaaatatttattg

SEQ ID NO: 31455 - DNA, 26 bp, Artificial sequence
  SiRNA target sequence
ctttatagctcctaaatatttattgt

SEQ ID NO: 31456 - DNA, 26 bp, Artificial sequence
  SiRNA target sequence
tttatagctcctaaatatttattgtc

SEQ ID NO: 31457 - DNA, 26 bp, Artificial sequence
  SiRNA target sequence
ttatagctcctaaatatttattgtct

SEQ ID NO: 31458 - DNA, 26 bp, Artificial sequence
  SiRNA target sequence
tatagctcctaaatatttattgtctt

SEQ ID NO: 31459 - DNA, 26 bp, Artificial sequence
  SiRNA target sequence
atagctcctaaatatttattgtcttt

SEQ ID NO: 31460 - DNA, 26 bp, Artificial sequence
  SiRNA target sequence
tagctcctaaatatttattgtctttt

SEQ ID NO: 31461 - DNA, 26 bp, Artificial sequence
  SiRNA target sequence
agctcctaaatatttattgtctttta

SEQ ID NO: 31462 - DNA, 26 bp, Artificial sequence
  SiRNA target sequence
gctcctaaatatttattgtcttttac

SEQ ID NO: 31463 - DNA, 26 bp, Artificial sequence
  SiRNA target sequence
ctcctaaatatttattgtcttttacc

SEQ ID NO: 31464 - DNA, 26 bp, Artificial sequence
  SiRNA target sequence
tcctaaatatttattgtcttttacca

SEQ ID NO: 31465 - DNA, 26 bp, Artificial sequence
  SiRNA target sequence
cctaaatatttattgtcttttaccat

SEQ ID NO: 31466 - DNA, 26 bp, Artificial sequence
  SiRNA target sequence
ctaaatatttattgtcttttaccatc

SEQ ID NO: 31467 - DNA, 26 bp, Artificial sequence
  SiRNA target sequence
taaatatttattgtcttttaccatct

SEQ ID NO: 31468 - DNA, 26 bp, Artificial sequence
  SiRNA target sequence
aaatatttattgtcttttaccatctt

SEQ ID NO: 31469 - DNA, 26 bp, Artificial sequence
  SiRNA target sequence
aatatttattgtcttttaccatcttt

SEQ ID NO: 31470 - DNA, 26 bp, Artificial sequence
  SiRNA target sequence
atatttattgtcttttaccatctttc

SEQ ID NO: 31471 - DNA, 26 bp, Artificial sequence
  SiRNA target sequence
tatttattgtcttttaccatctttct

SEQ ID NO: 31472 - DNA, 26 bp, Artificial sequence
  SiRNA target sequence
atttattgtcttttaccatctttctt

SEQ ID NO: 31473 - DNA, 26 bp, Artificial sequence
  SiRNA target sequence
tttattgtcttttaccatctttcttt

SEQ ID NO: 31474 - DNA, 26 bp, Artificial sequence
  SiRNA target sequence
ttattgtcttttaccatctttctttc

SEQ ID NO: 31475 - DNA, 26 bp, Artificial sequence
  SiRNA target sequence
tattgtcttttaccatctttctttct

SEQ ID NO: 31476 - DNA, 26 bp, Artificial sequence
  SiRNA target sequence
attgtcttttaccatctttctttctc

SEQ ID NO: 31477 - DNA, 26 bp, Artificial sequence
  SiRNA target sequence
ttgtcttttaccatctttctttctcc

SEQ ID NO: 31478 - DNA, 26 bp, Artificial sequence
  SiRNA target sequence
tgtcttttaccatctttctttctcct

SEQ ID NO: 31479 - DNA, 26 bp, Artificial sequence
  SiRNA target sequence
gtcttttaccatctttctttctcctt

SEQ ID NO: 31480 - DNA, 26 bp, Artificial sequence
  SiRNA target sequence
tcttttaccatctttctttctccttg

SEQ ID NO: 31481 - DNA, 26 bp, Artificial sequence
  SiRNA target sequence
cttttaccatctttctttctccttga

SEQ ID NO: 31482 - DNA, 26 bp, Artificial sequence
  SiRNA target sequence
ttttaccatctttctttctccttgat

SEQ ID NO: 31483 - DNA, 26 bp, Artificial sequence
  SiRNA target sequence
tttaccatctttctttctccttgata

SEQ ID NO: 31484 - DNA, 26 bp, Artificial sequence
  SiRNA target sequence
ttaccatctttctttctccttgatat

SEQ ID NO: 31485 - DNA, 26 bp, Artificial sequence
  SiRNA target sequence
taccatctttctttctccttgatata

SEQ ID NO: 31486 - DNA, 26 bp, Artificial sequence
  SiRNA target sequence
accatctttctttctccttgatatat

SEQ ID NO: 31487 - DNA, 26 bp, Artificial sequence
  SiRNA target sequence
ccatctttctttctccttgatatatt

SEQ ID NO: 31488 - DNA, 26 bp, Artificial sequence
  SiRNA target sequence
catctttctttctccttgatatattc

SEQ ID NO: 31489 - DNA, 26 bp, Artificial sequence
  SiRNA target sequence
atctttctttctccttgatatattct

SEQ ID NO: 31490 - DNA, 26 bp, Artificial sequence
  SiRNA target sequence
tctttctttctccttgatatattcta

SEQ ID NO: 31491 - DNA, 26 bp, Artificial sequence
  SiRNA target sequence
ctttctttctccttgatatattctaa

SEQ ID NO: 31492 - DNA, 26 bp, Artificial sequence
  SiRNA target sequence
tttctttctccttgatatattctaat

SEQ ID NO: 31493 - DNA, 26 bp, Artificial sequence
  SiRNA target sequence
ttctttctccttgatatattctaata

SEQ ID NO: 31494 - DNA, 26 bp, Artificial sequence
  SiRNA target sequence
tctttctccttgatatattctaatat

SEQ ID NO: 31495 - DNA, 26 bp, Artificial sequence
  SiRNA target sequence
ctttctccttgatatattctaatatc

SEQ ID NO: 31496 - DNA, 26 bp, Artificial sequence
  SiRNA target sequence
tttctccttgatatattctaatatct

SEQ ID NO: 31497 - DNA, 26 bp, Artificial sequence
  SiRNA target sequence
ttctccttgatatattctaatatcta

SEQ ID NO: 31498 - DNA, 26 bp, Artificial sequence
  SiRNA target sequence
tctccttgatatattctaatatctac

SEQ ID NO: 31499 - DNA, 26 bp, Artificial sequence
  SiRNA target sequence
ctccttgatatattctaatatctact

SEQ ID NO: 31500 - DNA, 26 bp, Artificial sequence
  SiRNA target sequence
tccttgatatattctaatatctactt

SEQ ID NO: 31501 - DNA, 26 bp, Artificial sequence
  SiRNA target sequence
ccttgatatattctaatatctacttc

SEQ ID NO: 31502 - DNA, 26 bp, Artificial sequence
  SiRNA target sequence
cttgatatattctaatatctacttcg

SEQ ID NO: 31503 - DNA, 26 bp, Artificial sequence
  SiRNA target sequence
ttgatatattctaatatctacttcgg

SEQ ID NO: 31504 - DNA, 26 bp, Artificial sequence
  SiRNA target sequence
tgatatattctaatatctacttcgga

SEQ ID NO: 31505 - DNA, 26 bp, Artificial sequence
  SiRNA target sequence
gatatattctaatatctacttcggat

SEQ ID NO: 31506 - DNA, 26 bp, Artificial sequence
  SiRNA target sequence
atatattctaatatctacttcggatt

SEQ ID NO: 31507 - DNA, 26 bp, Artificial sequence
  SiRNA target sequence
tatattctaatatctacttcggattg

SEQ ID NO: 31508 - DNA, 26 bp, Artificial sequence
  SiRNA target sequence
atattctaatatctacttcggattga

SEQ ID NO: 31509 - DNA, 26 bp, Artificial sequence
  SiRNA target sequence
tattctaatatctacttcggattgat

SEQ ID NO: 31510 - DNA, 26 bp, Artificial sequence
  SiRNA target sequence
attctaatatctacttcggattgatt

SEQ ID NO: 31511 - DNA, 26 bp, Artificial sequence
  SiRNA target sequence
ttctaatatctacttcggattgatta

SEQ ID NO: 31512 - DNA, 26 bp, Artificial sequence
  SiRNA target sequence
tctaatatctacttcggattgattat

SEQ ID NO: 31513 - DNA, 26 bp, Artificial sequence
  SiRNA target sequence
ctaatatctacttcggattgattatc

SEQ ID NO: 31514 - DNA, 26 bp, Artificial sequence
  SiRNA target sequence
taatatctacttcggattgattatct

SEQ ID NO: 31515 - DNA, 26 bp, Artificial sequence
  SiRNA target sequence
aatatctacttcggattgattatctt

SEQ ID NO: 31516 - DNA, 26 bp, Artificial sequence
  SiRNA target sequence
atatctacttcggattgattatcttc

SEQ ID NO: 31517 - DNA, 26 bp, Artificial sequence
  SiRNA target sequence
tatctacttcggattgattatcttca

SEQ ID NO: 31518 - DNA, 26 bp, Artificial sequence
  SiRNA target sequence
atctacttcggattgattatcttcag

SEQ ID NO: 31519 - DNA, 26 bp, Artificial sequence
  SiRNA target sequence
tctacttcggattgattatcttcaga

SEQ ID NO: 31520 - DNA, 26 bp, Artificial sequence
  SiRNA target sequence
ctacttcggattgattatcttcagag

SEQ ID NO: 31521 - DNA, 26 bp, Artificial sequence
  SiRNA target sequence
tacttcggattgattatcttcagagg

SEQ ID NO: 31522 - DNA, 26 bp, Artificial sequence
  SiRNA target sequence
acttcggattgattatcttcagaggt

SEQ ID NO: 31523 - DNA, 26 bp, Artificial sequence
  SiRNA target sequence
cttcggattgattatcttcagaggta

SEQ ID NO: 31524 - DNA, 26 bp, Artificial sequence
  SiRNA target sequence
ttcggattgattatcttcagaggtag

SEQ ID NO: 31525 - DNA, 26 bp, Artificial sequence
  SiRNA target sequence
tcggattgattatcttcagaggtaga

SEQ ID NO: 31526 - DNA, 26 bp, Artificial sequence
  SiRNA target sequence
cggattgattatcttcagaggtagaa

SEQ ID NO: 31527 - DNA, 26 bp, Artificial sequence
  SiRNA target sequence
ggattgattatcttcagaggtagaaa

SEQ ID NO: 31528 - DNA, 26 bp, Artificial sequence
  SiRNA target sequence
gattgattatcttcagaggtagaaaa

SEQ ID NO: 31529 - DNA, 26 bp, Artificial sequence
  SiRNA target sequence
attgattatcttcagaggtagaaaaa

SEQ ID NO: 31530 - DNA, 26 bp, Artificial sequence
  SiRNA target sequence
ttgattatcttcagaggtagaaaaac

SEQ ID NO: 31531 - DNA, 26 bp, Artificial sequence
  SiRNA target sequence
tgattatcttcagaggtagaaaaact

SEQ ID NO: 31532 - DNA, 26 bp, Artificial sequence
  SiRNA target sequence
gattatcttcagaggtagaaaaactg

SEQ ID NO: 31533 - DNA, 26 bp, Artificial sequence
  SiRNA target sequence
attatcttcagaggtagaaaaactgt

SEQ ID NO: 31534 - DNA, 26 bp, Artificial sequence
  SiRNA target sequence
ttatcttcagaggtagaaaaactgtg

SEQ ID NO: 31535 - DNA, 26 bp, Artificial sequence
  SiRNA target sequence
tatcttcagaggtagaaaaactgtgt

SEQ ID NO: 31536 - DNA, 26 bp, Artificial sequence
  SiRNA target sequence
atcttcagaggtagaaaaactgtgtg

SEQ ID NO: 31537 - DNA, 26 bp, Artificial sequence
  SiRNA target sequence
tcttcagaggtagaaaaactgtgtgt

SEQ ID NO: 31538 - DNA, 26 bp, Artificial sequence
  SiRNA target sequence
cttcagaggtagaaaaactgtgtgtt

SEQ ID NO: 31539 - DNA, 26 bp, Artificial sequence
  SiRNA target sequence
ttcagaggtagaaaaactgtgtgttt

SEQ ID NO: 31540 - DNA, 26 bp, Artificial sequence
  SiRNA target sequence
tcagaggtagaaaaactgtgtgtttc

SEQ ID NO: 31541 - DNA, 26 bp, Artificial sequence
  SiRNA target sequence
cagaggtagaaaaactgtgtgtttcc

SEQ ID NO: 31542 - DNA, 26 bp, Artificial sequence
  SiRNA target sequence
agaggtagaaaaactgtgtgtttcct

SEQ ID NO: 31543 - DNA, 26 bp, Artificial sequence
  SiRNA target sequence
gaggtagaaaaactgtgtgtttcctt

SEQ ID NO: 31544 - DNA, 26 bp, Artificial sequence
  SiRNA target sequence
aggtagaaaaactgtgtgtttcctta

SEQ ID NO: 31545 - DNA, 26 bp, Artificial sequence
  SiRNA target sequence
ggtagaaaaactgtgtgtttccttaa

SEQ ID NO: 31546 - DNA, 26 bp, Artificial sequence
  SiRNA target sequence
gtagaaaaactgtgtgtttccttaaa

SEQ ID NO: 31547 - DNA, 26 bp, Artificial sequence
  SiRNA target sequence
tagaaaaactgtgtgtttccttaaat

SEQ ID NO: 31548 - DNA, 26 bp, Artificial sequence
  SiRNA target sequence
agaaaaactgtgtgtttccttaaatg

SEQ ID NO: 31549 - DNA, 26 bp, Artificial sequence
  SiRNA target sequence
gaaaaactgtgtgtttccttaaatgg

SEQ ID NO: 31550 - DNA, 26 bp, Artificial sequence
  SiRNA target sequence
aaaaactgtgtgtttccttaaatgga

SEQ ID NO: 31551 - DNA, 26 bp, Artificial sequence
  SiRNA target sequence
aaaactgtgtgtttccttaaatggaa

SEQ ID NO: 31552 - DNA, 26 bp, Artificial sequence
  SiRNA target sequence
aaactgtgtgtttccttaaatggaat

SEQ ID NO: 31553 - DNA, 26 bp, Artificial sequence
  SiRNA target sequence
aactgtgtgtttccttaaatggaata

SEQ ID NO: 31554 - DNA, 26 bp, Artificial sequence
  SiRNA target sequence
actgtgtgtttccttaaatggaatag

SEQ ID NO: 31555 - DNA, 26 bp, Artificial sequence
  SiRNA target sequence
ctgtgtgtttccttaaatggaatagt

SEQ ID NO: 31556 - DNA, 26 bp, Artificial sequence
  SiRNA target sequence
tgtgtgtttccttaaatggaatagta

SEQ ID NO: 31557 - DNA, 26 bp, Artificial sequence
  SiRNA target sequence
gtgtgtttccttaaatggaatagtag

SEQ ID NO: 31558 - DNA, 26 bp, Artificial sequence
  SiRNA target sequence
tgtgtttccttaaatggaatagtaga

SEQ ID NO: 31559 - DNA, 26 bp, Artificial sequence
  SiRNA target sequence
gtgtttccttaaatggaatagtagaa

SEQ ID NO: 31560 - DNA, 26 bp, Artificial sequence
  SiRNA target sequence
tgtttccttaaatggaatagtagaat

SEQ ID NO: 31561 - DNA, 26 bp, Artificial sequence
  SiRNA target sequence
gtttccttaaatggaatagtagaatt

SEQ ID NO: 31562 - DNA, 26 bp, Artificial sequence
  SiRNA target sequence
tttccttaaatggaatagtagaattt

SEQ ID NO: 31563 - DNA, 26 bp, Artificial sequence
  SiRNA target sequence
ttccttaaatggaatagtagaatttc

SEQ ID NO: 31564 - DNA, 26 bp, Artificial sequence
  SiRNA target sequence
tccttaaatggaatagtagaatttct

SEQ ID NO: 31565 - DNA, 26 bp, Artificial sequence
  SiRNA target sequence
ccttaaatggaatagtagaatttcta

SEQ ID NO: 31566 - DNA, 26 bp, Artificial sequence
  SiRNA target sequence
cttaaatggaatagtagaatttctat

SEQ ID NO: 31567 - DNA, 26 bp, Artificial sequence
  SiRNA target sequence
ttaaatggaatagtagaatttctatg

SEQ ID NO: 31568 - DNA, 26 bp, Artificial sequence
  SiRNA target sequence
taaatggaatagtagaatttctatga

SEQ ID NO: 31569 - DNA, 26 bp, Artificial sequence
  SiRNA target sequence
aaatggaatagtagaatttctatgaa

SEQ ID NO: 31570 - DNA, 26 bp, Artificial sequence
  SiRNA target sequence
aatggaatagtagaatttctatgaat

SEQ ID NO: 31571 - DNA, 26 bp, Artificial sequence
  SiRNA target sequence
atggaatagtagaatttctatgaatt

SEQ ID NO: 31572 - DNA, 26 bp, Artificial sequence
  SiRNA target sequence
tggaatagtagaatttctatgaatta

SEQ ID NO: 31573 - DNA, 26 bp, Artificial sequence
  SiRNA target sequence
ggaatagtagaatttctatgaattat

SEQ ID NO: 31574 - DNA, 26 bp, Artificial sequence
  SiRNA target sequence
gaatagtagaatttctatgaattatc

(The sequence listing continues in the following parts.)

What is claimed is:

1. A nucleic acid construct comprising a polynucleotide expressing a nucleic acid agent downregulating expression of a gene product of an insect pathogen, said polynucleotide operably linked to a cis-regulatory element operable in plants.

2. The nucleic acid construct of claim 1, wherein said nucleic acid agent is selected from the group consisting of a dsRNA, an antisense RNA and a ribozyme.

3. The nucleic acid construct of claim 2, wherein said dsRNA is selected from the group consisting of siRNA, shRNA and miRNA.

4. The nucleic acid construct of claim 1, said cis regulatory element being active in floral nectary tissues, extrafloral nectarines and/or pollen.

5. The nucleic acid construct of claim 1, wherein said nucleic acid agent is greater than 15 base pairs in length.

6. The nucleic acid construct of claim 5, wherein said nucleic acid agent is 19 to 25 base pairs in length.

7. The nucleic acid construct of claim 5, wherein said nucleic acid agent is greater than 30 base pairs in length.

8. The nucleic acid construct of claim 1, wherein said insect is a bee.

9. The nucleic acid construct of claim 1, wherein said insect pathogen is selected from the group consisting of a virus, a bacteria, a parasitic protozoan, a fungus a nematode and a mite.

10. The nucleic acid construct of claim 1, wherein said insect pathogen is a virus.

11. The nucleic acid construct of claim 10, wherein said insect is a bee and said virus is Israel Acute Paralysis Virus.

12. The nucleic acid construct of claim 11, wherein the nucleic acid agent is complementary to a viral nucleic acid sequence as set forth in any of SEQ ID NOs: 256752, 256761, 256762 and 311552.

13. The nucleic acid construct of claim 11, wherein said nucleic acid agent is complementary to a viral nucleic acid sequence as set forth in any of SEQ ID NOs: SEQ ID NOs: 256782-266260.

14. The nucleic acid construct of claim 11, having a nucleic acid sequence as set forth in SEQ ID NO: 311533.

15. The nucleic acid construct of claim 1, wherein said insect is a bee and said pathogen is a Nosema parasite.

16. The nucleic acid construct of claim 15, wherein said nucleic acid agent is complementary to a Nosema nucleic acid sequence as set forth in any of SEQ ID NOs: 55-252698.

17. The nucleic acid construct of claim 15, wherein said Nosema parasite is N. cerana and said gene product is an mRNA encoding a Nosema ATP/ADP transporter protein or homologue thereof.

18. The nucleic acid construct of claim 17, wherein said ATP/ADP transporter protein or homologue thereof is selected from the group consisting of proteins encoded by SEQ ID NOs: 44, 45, 46 and 47.

19. The nucleic acid construct of claim 1, wherein said insect is a bee and said pathogen is a Varroa destructor mite.

20. The nucleic acid construct of claim 19, wherein said gene product is an Varroa specific mRNA encoding a polypeptide selected from the group consisting of NADH dehydrogenase subunit 2, ATP synthetase subunit 8, ATP synthetase subunit 6, sodium channel and cytochrome oxydase subunit I.

21. The nucleic acid construct of claim 1, wherein said insect is a bee and said nucleic acid construct comprises at least two nucleic acid agents, each of said nucleic acid agents downregulating expression of at least one gene product of at least one bee pathogen.

22. The nucleic acid construct of claim 21, wherein said insect is a bee and said at least one bee pathogen is selected from the group consisting of a virus, a bacteria, a parasitic protozoan, a fungus, a nematode and a mite.

23. The nucleic acid construct of claim 22, wherein said at least one bee pathogen comprises at least two bee pathogens.

24. The nucleic acid construct of claim 23, wherein said nucleic acid agent corresponds to conserved sequences in said at least two bee pathogens.

25. A cell comprising the nucleic acid construct of any of claims 1-24.

26. The cell of claim 25, being a plant cell.

27. The cell of claim 25, wherein said cell is an Agrobacterium.

28. A plant expressing the nucleic acid construct of any of claims 1 to 24.

29. The plant of claim 28, wherein said plant is a flowering plant selected from the group consisting of rapeseed, alfalfa and clover.

30. The plant of claim 28, expressing said nucleic acid construct in floral nectary tissues, extrafloral nectarines or pollen.

31. A method of reducing the susceptibility of a insect to a disease caused by an insect pathogen, the method comprising providing to the insects plants expressing the nucleic acid construct of any of claims 1 to 24, such that said insect feeds from said plants and ingests said nucleic acid agent, thereby reducing the susceptibility of said insect to said pathogen.

32. The method of claim 31, wherein said insect is a pollinating insect or a herbivorous insect.

33. A method for reducing the susceptibility of a bee to a disease caused by an insect pathogen comprising providing the bee with a plant expressing the nucleotide construct of any of claims 11 to 20 such that said bee feeds from said plants and ingests said nucleic acid agent, thereby reducing the susceptibility of said bee to said pathogen.

34. The method of claim 33, wherein said insect is a bee and said transgenic plants express a nucleic acid agent complementary to a nucleic acid sequence selected from the group consisting of SEQ ID NOs: 60-252698, 252699-256728 and 256782-266260.

35. The method of claim 31, wherein said plants express a nucleic acid agent complementary to a nucleic acid sequence selected from the group consisting of SEQ ID NOs: 55-59, 253194, 254090, 259289, 256752, 256761, 256762 and 311552.

36. A method of reducing the susceptibility of honeybees to Colony Collapse Disorder (CCD), the method comprising providing to the honeybees plants expressing the nucleic acid construct of any of claims 11 to 20.

37. A method of producing a plant capable of reducing the susceptibility of an insect feeding from said plant, plant tissues or plant secretions to a disease caused by an insect pathogen, the method comprising transforming cells of said plant with the nucleic acid construct of any of claims 1 to 24, selecting transformed plants or plant cells expressing insect pathogen-specific dsRNA, and propagating said plants or plant cells to produce a plant or plant cells capable of reducing the susceptibility of an insect feeding from said plant.
